(19) United States
(12) Patent Application Publication
(10) Pub. No.: US 2025/0011887 A1
(43) Pub. Date: Jan. 9, 2025

(54) PROBES FOR IMPROVING CORONAVIRUS SAMPLE SURVEILLANCE

(71) Applicant: ILLUMINA, INC., San Diego, CA (US)

(72) Inventors: Brian Hawks, San Diego, CA (US); Stephen Gross, San Diego, CA (US); Gary Schroth, Danville, CA (US)

(21) Appl. No.: 18/898,408

(22) Filed: Sep. 26, 2024

Related U.S. Application Data
(63) Continuation of application No. PCT/US2023/076120, filed on Oct. 5, 2023.
(60) Provisional application No. 63/378,632, filed on Oct. 6, 2022.
(60) Provisional application No. 63/479,823, filed on Jan. 13, 2023.
(60) Provisional application No. 63/480,860, filed on Jan. 20, 2023.

(30) Foreign Application Priority Data
Oct. 5, 2023 (WO) PCT/US2023/076120

(51) Int. Cl. C12Q 1/70; C12Q 1/6806; C12Q 1/6832; C12Q 1/6874

(52) U.S. Cl. CPC C12Q 1/701; C12Q 1/6832; C12Q 1/6874; C12Q 1/6806

(57) ABSTRACT

Described herein are compositions and methods for enriching library fragments prepared for coronavirus sequences prepared from various samples. These methods may incorporate microfluidics and flowcells for greater case of use. Libraries enriched with the present methods may be used for sequencing. Also described are probes and methods for enzymatic depletion of unwanted RNA.

### CROSS-REFERENCE TO RELATED APPLICATIONS

[0001] This application is a bypass continuation claiming priority to PCT/2023/076120, filed Oct. 5, 2023, which claims the benefit of priority of U.S. Provisional Application Nos. 63/378,632, filed Oct. 6, 2022; 63/479,823, filed Jan. 13, 2023; and 63/480,860, filed Jan. 20, 2023; each of which is incorporated by reference herein in its entirety for any purpose.

### SEQUENCE LISTING

[0002] The application contains a Sequence Listing which has been submitted electronically in .XML format and is hereby incorporated by reference in its entirety. The sequence listing does not go beyond the disclosure of the PCT priority application as filed. Said .XML copy, is named “IP-2346-PCT_SL.xml” and is 31,630 kb in size. The sequence listing contained in this .XML file is part of the specification and is hereby incorporated by reference herein in its entirety.

### DESCRIPTION

### Field

[0003] This disclosure relates to probes for improving environmental sample (including wastewater samples and other samples) surveillance and surveillance of other samples for various coronaviruses. Libraries enriched with the present methods may be used to generate sequencing data. Also described are probes and methods for enzymatic depletion of unwanted RNA and cDNA from human wastewater and other samples.

### Background

[0004] Viruses continue to develop naturally resulting in new strains and diseases to human populations. For example, the World Health Organization (WHO) declared infection by the novel Severe Acute Respiratory Syndrome Coronavirus 2 (SARS-COV-2) as a pandemic and termed the related disease as coronavirus disease 2019 (COVID-19). Although a large percentage of persons infected with this novel virus experience mild to moderate respiratory, gastrointestinal, cardiovascular, and/or other discomforts without requiring medical care, infected persons with underlying medical problems and/or comorbidities, such as diabetes, cardiovascular disease, chronic respiratory disease, or cancer, are more likely to develop serious illness and/or die from COVID-19 or related secondary infections.

[0005] Transmission vectors of SARS-COV-2, and variants thereof, are under heavy investigation. Infected subjects, whether symptomatic or asymptomatic, shed virus and/or inactive viral particles thereof into community sewer systems through feces, nasal/sinus drainage/mucus, and phlegm. While this presents an opportunity to investigate wastewater for incidence of disease, sampling and measuring wastewater for a virus-of-interest such as SARS-COV-2 and/or variants thereof is problematic due to low concentrations of virus or particles thereof alone, or in combination with contaminants (e.g., other waterborne pathogens or human nucleic acids) in the wastewater. Non-limiting examples of waterborne pathogens include bacterial, viral, fungal, and parasitic pathogens, such as fecal coliforms. The mixture of contaminants and pathogens presents a difficult medium for viral DNA and RNA extraction therefrom, especially where concentrations of a virus-of-interest are low.

[0006] As such, public health officials need methods of enriching wastewater samples for coronavirus to quantify incidence of viral infection or disease in a community and to identify novel coronaviruses of interest in wastewater, such as from a sewer system. Public health officials also need methods of recovering nucleic acids from a virus-of-interest in wastewater. Investigations of other types of samples would also benefit from improved methods of recovering nucleic acids. Monitoring of other samples also provides valuable public health information and would benefit from improved methods of recovering nucleic acids.

[0007] Described herein is the development of a pan-coronavirus probe set for enrichment and detection of novel coronaviruses. Through an iterative design process, probes described herein are designed to have a broad diversity of targets in order to increase the odds of capturing genomic sequence from an as of yet undiscovered or novel variant coronavirus. The probe set described herein, simultaneously minimizes the overall number of oligonucleotides that are necessary to detect such a broad diversity of sequences and minimizes the amount of redundancy.

### SUMMARY

[0008] In accordance with the description, described herein are methods of enriching a sample for one or more target coronavirus nucleic acids and/or for improving environmental wastewater surveillance for various coronaviruses. These methods may be performed with standard lab equipment, such as flowcells comprised in sequencers. In some embodiments, standard sequencing consumables and platform (i.e., sequencer) can be used as a microfluidic device for enriching and/or depleting library fragments. In some embodiments, depleting abundant small noncoding RNAis performed after cDNA synthesis and amplification.

[0009] Embodiment 1. A method of enriching a sample for one or more target viral nucleic acids comprising the steps of: (a) providing a probe set comprising at least two nucleic acid probes complementary to one or more target viral nucleic acids, wherein the probe set comprises at least two of SEQ ID NOs: 1-22909; (b) allowing the probes in the probe set to hybridize to the target viral nucleic acids; (c) enriching the sample for the one or more target viral nucleic acids by amplifying the target viral nucleic acids and/or separating the target viral nucleic acids from the sample.

[0010] Embodiment 2. A method of enriching a sample for one or more target coronavirus nucleic acids comprising the steps of: (a) providing a probe set comprising at least two nucleic acid probes complementary to one or more target coronavirus nucleic acids, wherein the nucleic acid probes are affixed to a support; (b) capturing the one or more target coronavirus nucleic acids on the support; (c) using the one or more captured target coronavirus nucleic acids as a template strand to produce one or more nucleic acid duplexes immobilized on the support, wherein the one or more target coronavirus nucleic acids hybridize to one or more probes of the probe set on the support; (d) contacting a transposase and transposon with the one or more nucleic acid duplexes under conditions wherein the one or more nucleic acid duplexes and transposon composition undergo a transposition reaction to produce one or more tagged nucleic acid duplexes, wherein the transposon composition comprises a double stranded nucleic acid molecule comprising a transferred strand and a non-transferred strand; (e) contacting the one or more tagged nucleic acid duplexes with a nucleic acid modifying enzyme under conditions to extend the 3′ end of the immobilized strand to the 5′ end of the template strand to produce one or more end-extended tagged nucleic acid duplexes; (f) amplifying the one or more end-extended tagged nucleic acid duplexes to produce a plurality of tagged nucleic acid strands; (g) contacting the plurality of tagged nucleic acid strands with a probe set to create an enriched library; and (h) amplifying the enriched library.

[0011] Embodiment 3. The method of embodiment 1 or 2, wherein the sample comprises a sample from a mammal.

[0012] Embodiment 4. The method of embodiment 3, wherein the sample comprises a sample from a human, monkey, bat, dog, cat, horse, goat, sheep, cow, pig, rat and/or mouse.

[0013] Embodiment 5. The method of any one of embodiments 1-4, wherein the sample comprises a blood sample, a serum sample, and/or a whole blood sample.

[0014] Embodiment 6. The method of any one of embodiments 1-4, wherein the sample comprises a tissue sample.

[0015] Embodiment 7. The method of any one of embodiments 1-4, wherein the sample comprises a fecal sample, a urine sample, a mucus sample, a saliva sample, a lymph sample, a vaginal fluid sample, a semen sample, an amniotic sample, and/or a sweat sample.

[0016] Embodiment 8. The method of embodiment 1 or 2, comprises a freshwater sample, a wastewater sample, a saline water sample, or a combination thereof.

[0017] Embodiment 9. The method of embodiment 1 or 8, wherein the sample comprises a wastewater sample.

[0018] Embodiment 10. The method of any one of embodiments 1-9, wherein the probe set is biotinylated.

[0019] Embodiment 11. The method of any one of embodiments 1-10, wherein the one or more target coronavirus nucleic acids are coronavirus RNA molecules.

[0020] Embodiment 12. The method of any one of embodiments 1-11, wherein the one or more target coronavirus nucleic acids are genomic coronavirus RNA molecules.

[0021] Embodiment 13. The method of any one of embodiments 1-12, wherein the probe set further comprises at least two DNA probes that each hybridize to at least one target coronavirus molecule of the Alphacoronavirus, Betacoronavirus, Deltacoronavirus, Gammacoronavirus, and/or Bafinivirus genus.

[0022] Embodiment 14. The method of any one of embodiments 1-13, wherein the probe set further comprises at least two DNA probes that each hybridize to at least one target coronavirus molecule selected from Table 2.

[0023] Embodiment 15. The method of any one of embodiments 1-14, wherein at wherein the DNA probes further comprise any one of SEQ ID NOs 22917-23376.

[0024] Embodiment 16. The method of any one of embodiments 1-15, wherein at wherein the DNA probes further comprise two or more, or five or more, or 10 or more, or 25 or more sequences, or all of the sequences selected from SEQ ID NOs: 22917-23376.

[0025] Embodiment 17. The method of any one of embodiments 1-16, wherein the method further comprises depleting unwanted nucleic acid molecules from a nucleic acid sample.

[0026] Embodiment 18. The method of any one of embodiments 1-17, wherein the depleting unwanted nucleic acid molecules comprises depleting unwanted cDNA library fragments from a library of cDNA fragments prepared from RNA, wherein the unwanted library fragments comprise those prepared from unwanted RNA sequences, further comprising: (a) preparing a solid support comprising at least one immobilized oligonucleotide, wherein each immobilized oligonucleotide comprises a nucleic acid sequence corresponding to an unwanted RNA sequence or its complement; (b) adding the library of fragments to the solid support and hybridizing the library fragments to at least one immobilized oligonucleotide to allow binding of unwanted library fragments to at least one immobilized oligonucleotide; and (c) collecting library fragments not bound to at least one immobilized oligonucleotide.

[0027] Embodiment 19. The method of claim any one of embodiments 1-18 wherein the at least one immobilized oligonucleotide comprises a sequence comprising any one or more of SEQ ID NOs: 23377-24507 or its complement.

[0028] Embodiment 20. The method of any one of embodiments 1-19, wherein the depleting unwanted nucleic acid molecules comprises depleting off-target RNA nucleic acid molecules from a nucleic acid sample comprises: (a) contacting a nucleic acid sample comprising at least one RNA or DNA target sequence and at least one off-target RNA molecule from a first species with a probe set comprising at least two DNA probes complementary to discontiguous sequences along the full length of the at least one off-target RNA molecule from a second species, thereby hybridizing the DNA probes to the off-target RNA molecules to form DNA: RNA hybrids, wherein each DNA: RNA hybrid is at least 5 bases apart, or at least 10 bases apart, along a given off-target RNA molecule sequence from any other DNA: RNA hybrid, wherein the off-target DNA comprises at least one small noncoding RNA chosen from RN7SK, RN7SL1, RN7SL2, RN7SL5P, RPPH1, SNORD3A; (b) contacting the DNA: RNA hybrids with a ribonuclease that degrades the RNA from the DNA: RNA hybrids, thereby degrading the off-target RNA molecules in the nucleic acid sample to form a degraded mixture; (c) separating the degraded RNA from the degraded mixture; (d) sequencing the remaining RNA from the sample; (e) evaluating the remaining RNA sequences for the presence of off-target RNA molecules from the first species, thereby determining gap sequence regions; and (f) supplementing the probe set with additional DNA probes complementary to discontiguous sequences in one or more of the gap sequence regions.

[0029] Embodiment 21. The method of any one of embodiments 1-20, wherein the probe set comprises any one or more of SEQ ID NOs: 22917-23376.

[0030] Embodiment 22. The method of any one of embodiments 1-21, wherein the method further comprises depleting unwanted cDNA library fragments from a library of cDNA fragments prepared from RNA, wherein the unwanted library fragments comprise those prepared from unwanted RNA sequences.

[0031] Embodiment 23. A composition comprising a probe set comprising at least two DNA probes complementary to at least one target coronavirus RNA molecule in a nucleic acid sample wherein the target coronavirus RNA comprises at least one coronavirus molecule selected from Table 2.

[0032] Embodiment 24. A composition comprising a probe set comprising at least one DNA probe comprising at least one sequence of SEQ ID NOs: 1-22909.

[0033] Embodiment 25. The composition of embodiment 24, comprising at least 5, at least at least 10, at least 50, at least 100, at least 250, at least 500, at least 750, at least 1000, at least 1500, or at least 2000 sequences of SEQ ID NOs: 1-22909.

[0034] Embodiment 26. A kit comprising a probe set comprising: (a) at least one DNA probe comprising at least one sequence comprising at least one of SEQ ID NOs: 1-22909; and (b) a buffer.

[0035] Embodiment 27. The kit of any one of embodiment 26, wherein the buffer is a wash buffer and/or an elution buffer.

[0036] Embodiment 28. The kit of any one of embodiment 26 or 27, further comprising an RNA depletion buffer, a probe depletion buffer, and/or a probe removal buffer.

[0037] Embodiment 29. The kit of any one of embodiments 26-28, further comprising: (a) a ribonuclease; (b) a DNase; and (c) RNA purification beads.

[0038] Embodiment 30. The kit of any one of embodiments 26-29, wherein the ribonuclease is RNase H.

[0039] Embodiment 31. The kit of any one of embodiments 26-30, comprising a buffer and nucleic acid purification medium.

[0040] Embodiment 32. The kit of any one of embodiments 26-31, wherein the buffer is an RNA depletion buffer, a probe depletion buffer, and/or a probe removal buffer.

[0041] Embodiment 33. The kit of any one of embodiments 26-32. further comprising a nucleic acid destabilizing chemical.

[0042] Embodiment 34. The kit of embodiment 33, wherein the nucleic acid destabilizing chemical comprises betaine, DMSO, formamide, glycerol, or a derivative thereof, or a mixture thereof.

[0043] Embodiment 35. The kit of embodiment 33 or 34, wherein the nucleic acid destabilizing chemical comprises formamide.

[0044] Embodiment 36. The kit of any one of embodiments 26-35, wherein the at least one DNA probe comprises 2 or more, 5 or more, 10 or more, 25 or more, 50 or more, 100 or more, 200 or more, 300 or more, 400 or more, 500 or more, 600 or more, 700 or more, 800 or more, 900 or more, 1000 or more, 1100 or more, or 22909 probes comprising sequences selected from SEQ ID NOs: 1-22909.

[0045] Embodiment 37. The kit of any one of embodiments 26-36, wherein the at least one DNA probe comprises 500 or more, 600 or more, 700 or more, 800 or more, 900 or more, 1000 or more, 1100 or more, or 22909 probes comprising sequences selected from SEQ ID NOs: 1-22909.

[0046] Additional objects and advantages will be set forth in part in the description which follows, and in part will be understood from the description, or may be learned by practice. The objects and advantages will be realized and attained by means of the elements and combinations particularly pointed out in the appended claims.

[0047] It is to be understood that both the foregoing general description and the following detailed description are exemplary and explanatory only and are not restrictive of the claims.

### BRIEF DESCRIPTION OF SELECT SEQUENCES

| | SEQ | |
|---|---|---|
| | ID | |
| Description | NO: | Sequence (3′ to 5′) |
| RN7SK | 22910 | GATGTGAGGGCGATCTGGCTGCGACATCTGTCACCCCATTGATCGCCAG |
| | | GGTTGATTCGGCTGATCTGGCTGGCTAGGCGGGTGTCCCCTTCCTCCCT |
| | | CACCGCTCCATGTGCGTCCCTCCCGAAGCTGCGCGCTCGGTCGAAGAGG |
| | | ACGACCATCCCCGATAGAGGAGGACCGGTCTTCGGTCAAGGGTATACGA |
| | | GTAGCTGCGCTCCCCTGCTAGAACCTCCAAACAAGCTCTCAAGGTCCAT |
| | | TTGTAGGAGAACGTAGGGTAGTCAAGCTTCCAAGACTCCAGACACATCC |
| | | AAATGAGGCGCTGCATGTGGCAGTCTGCCTTTCT |
| RN7SL1 | 22911 | GCCGGGCGCGGTGGCGCGTGCCTGTAGTCCCAGCTACTCGGGAGGCTGA |
| | | GGCTGGAGGATCGCTTGAGTCCAGGAGTTCTGGGCTGTAGTGCGCTATG |
| | | CCGATCGGGTGTCCGCACTAAGTTCGGCATCAATATGGTGACCTCCCGG |
| | | GAGCGGGGGACCACCAGGTTGCCTAAGGAGGGGTGAACCGGCCCAGGTC |
| | | GGAAACGGAGCAGGTCAAAACTCCCGTGCTGATCAGTAGTGGGATCGCG |
| | | CCTGTGAATAGCCACTGCACTCCAGCCTGGGCAACATAGCGAGACCCCG |
| | | TCTCT |
| RN7SL2 | 22912 | GCCGGGCGCGGTGGCGCGTGCCTGTAGTCCCAGCTACTCGGGAGGCTGA |
| | | GGTGGGAGGATCGCTTGAGCCCAGGAGTTCTGGGCTGTAGTGCGCTATG |
| | | CCGATCGGGTGTCCGCACTAAGTTCGGCATCAATATGGTGACCTCCCGG |
| | | GAGCGGGGGACCACCAGGTTGCCTAAGGAGGGGTGAACCGGCCCAGGTC |
| | | GGAAACGGAGCAGGTCAAAACTCCCGTGCTGATCAGTAGTGGGATCGCG |
| | | CCTGTGAATAGCCACTGCACTCCAGCCTGAGCAACATAGCGAGACCCCG |
| | | TCTCTT |
| RN7SL5P | 22913 | GCCGGGCGCGGTGGCGCGTGCCTGTGGTCCCAGCTACTCGGGAGGCTGA |
| | | GGCTGGAGGATCGCTTGAGTCCAGGAGTTCTGGGCTGTAGTGCGCTATG |
| | | CCGATCGGGTGTCCGCACTAAGTTCGGCATCAATATGGTGACCTCCCGG |
| | | GAGCGGGGGACCACCAGGTTGCCTAAGGAGGGGTGAACCGGCCCAGGTC |
| | | GGAAACGGAGCAGGTCAAAACTCCCGTGCTGATCAGTAGAAGTCTGTAA |
| | | TGCTACTGGTGTCCCCTAATTTTCTTATAGCCACAGTTCCTTTCGCCTG |
| | | AGCTCATTACAGAGACAAATATCCATT |
| RPPH1 | 22914 | GGCGGAGGGAAGCTCATCAGTGGGGCCACGAGCTGAGTGCGTCCTGTCA |
| | | CTCCACTCCCATGTCCCTTGGGAAGGTCTGAGACTAGGGCCAGAGGCGG |
| | | CCCTAACAGGGCTCTCCCTGAGCTTCGGGGAGGTGAGTTCCCAGAGAAC |
| | | GGGGCTCCGCGCGAGGTCAGACTGGGCAGGAGATGCCGTGGACCCCGCC |
| | | CTTCGGGGAGGGGCCCGGCGGATGCCTCCTTTGCCGGAGCTTGGAACAG |
| | | ACTCACGGCCAGCGAAGTGAGTTCAATGGCTGAGGTGAGGTACCCCGCA |
| | | GGGGACCTCATAACCCAATTCAGACTACTCTCCTCCGCC |
| SNORD3A with | 22915 | AAGACTATACTTTCAGGGATCATTTCTATAGTGTGTTACTAGAGAAGTT |
| the ALU region in | | TCTCTGAACGTGTAGAGCACCGAAAACCACGAGGAAGAGAGGTAGCGTT |
| bold and italics, in | | TTCTCCTGAGCGTGAAGCCGGCTTTCTGGCGTTGCTTGGCTGCAACTGC |
| some | | CGTCAGCCATTGATGATCGTTCTTCTCTCCGTATTGGGGAGTGAGAGGG |
| embodiments the | | AGAGAACGCGGTCTGAGTGGTTTTTCCTTCTTGATGGCTCAATGACAGA |
| ALU region was | | GACTAGCTCGTAAACTCCGGGGCGTTTCTGGGCTGTTCGCTCCTGCTTG |
| not used to | | GCATGTCGCGAGAAAGGTTTTCGCCTCCTGTTTCAGCGGTGACGGCTCT |
| generate probes | | TGGGTTTTCTCGGGGTGGCTTTTTAATTTTAGTCTTGGCGCGAGGCGGG |
| because it is a | | GGATGCTGTGTGGCACCTCCTATTGTCTCTTTTTGCGTTTTCTCCCATT |
| repetitive region in | | CTCGCTCCCTCTTTTGTCGCCGTTTCCCGCCCGCCACTCCCACCCCCAG |
| other areas of the | | ACGGGGTCTCCGGGTCTCTTGTTCTGTCTGCCGGCCCCGGCTGGATTGC |
| genome. | | AGTGGCGCGATCTCGGCTCCTAGCAACATCTGCCTCCCGGGCTCAAGCG |
| | | AGTCTCCCGCCTAAGCCCTCCCGAGTAGCCGGGGCTTAAAGGCGCACAC |
| | | GCCACTCCAGGCTTTTTTTTTTTTTTTTTTTTTTTTTTTGGCAGAAACG |
| | | GGGTGTCAGCATG |
| Reverse | 22916 | AGAAAGGCAGACTGCCACATGCAGCGCCTCATTTGGATGTGTCTGGAGT |
| complement of | | CTTGGAAGCTTGACTACCCTACGTTCTCCTACAAATGGACCTTGAGAGC |
| RN7SK with | | TTGTTTGGAGGTTCTAGCAGGGGAGCGCAGCTACTCGTATACCCTTGAC |
| probe sequences in | | CGAAGACCGGTCCTCCTCTATCGGGGATGGTCGTCCTCTTCGACCGAGC |
| bold and italics | | GCGCAGCTTCGGGAGGGACGCACATGGAGCGGTGAGGGAGGAAGGGGAC |
| (and with gaps | | ACCCGCCTAGCCAGCCAGATCAGCCGAATCAACCCTGGCGATCAATGGG |
| between the probes) | | GTGACAGATGTCGCAGCCAGATCGCCCTCACATC |
| Probe for | 22917 | AGAAAGGCAGACTGCCACATGCAGCGCCTCATTTGGATGTGTCTGGAGT |
| RN7SK | | C |
| Probe for | 22918 | CCCTACGTTCTCCTACAAATGGACCTTGAGAGCTTGTTTGGAGGTTCTA |
| RN7SK | | G |
| Probe for | 22919 | ACTCGTATACCCTTGACCGAAGACCGGTCCTCCTCTATCGGGGATGGTC |
| RN7SK | | G |
| Probe for | 22920 | CGCGCAGCTTCGGGAGGGACGCACATGGAGCGGTGAGGGAGGAAGGGGA |
| RN7SK | | C |
| Probe for | 22921 | CAGATCAGCCGAATCAACCCTGGCGATCAATGGGGTGACAGATGTCGCA |
| RN7SK | | G |
| Probe | 22922 | AGAGACGGGGTCTCGCTATGTTGCCCAGGCTGGAGTGCAGTGGCTATTC |
| for RN7SL1 | | A |
| Probe for | 22923 | TACTGATCAGCACGGGAGTTTTGACCTGCTCCGTTTCCGACCTGGGCCG |
| RN7SL1 | | G |
| Probe for | 22924 | GCAACCTGGTGGTCCCCCGCTCCCGGGAGGTCACCATATTGATGCCGAA |
| RN7SL1 | | C |
| Probe for | 22925 | GATCGGCATAGCGCACTACAGCCCAGAACTCCTGGACTCAAGCGATCCT |
| RN7SL1 | | C |
| Probe for RN7SL2 | 22926 | AAGAGACGGGGTCTCGCTATGTTGCTCAGGCTGGAGTGCAGTGGCTATT |
| | | C |
| Probe for RN7SL2 | 22927 | CTACTGATCAGCACGGGAGTTTTGACCTGCTCCGTTTCCGACCTGGGCC |
| | | G |
| Probe for RN7SL2 | 22928 | GGCAACCTGGTGGTCCCCCGCTCCCGGGAGGTCACCATATTGATGCCGA |
| | | A |
| Probe for RN7SL2 | 22929 | CGATCGGCATAGCGCACTACAGCCCAGAACTCCTGGGCTCAAGCGATCC |
| | | T |
| Probe | 22930 | AATGGATATTTGTCTCTGTAATGAGCTCAGGCGAAAGGAACTGTGGCTA |
| for RN7SL5P | | T |
| Probe | 22931 | CACCAGTAGCATTACAGACTTCTACTGATCAGCACGGGAGTTTTGACCT |
| for RN7SL5P | | G |
| Probe | 22932 | GGGCCGGTTCACCCCTCCTTAGGCAACCTGGTGGTCCCCCGCTCCCGGG |
| for RN7SL5P | | A |
| Probe | 22933 | GCCGAACTTAGTGCGGACACCCGATCGGCATAGCGCACTACAGCCCAGA |
| for RN7SL5P | | A |
| Probe | 22934 | GATCCTCCAGCCTCAGCCTCCCGAGTAGCTGGGACCACAGGCACGCGCC |
| for RN7SL5P | | A |
| Probe for RPPH1 | 22935 | GGCGGAGGAGAGTAGTCTGAATTGGGTTATGAGGTCCCCTGCGGGGTAC |
| | | C |
| Probe for RPPH1 | 22936 | AACTCACTTCGCTGGCCGTGAGTCTGTTCCAAGCTCCGGCAAAGGAGGC |
| | | A |
| Probe for RPPH1 | 22937 | CCCGAAGGGCGGGGTCCACGGCATCTCCTGCCCAGTCTGACCTCGCGCG |
| | | G |
| Probe for RPPH1 | 22938 | GAACTCACCTCCCCGAAGCTCAGGGAGAGCCCTGTTAGGGCCGCCTCTG |
| | | G |
| Probe for RPPH1 | 22939 | TTCCCAAGGGACATGGGAGTGGAGTGACAGGACGCACTCAGCTCGTGGC |
| | | C |
| Probe | 22940 | CCCGGAGACCCCGTCTGGGGGTGGGAGTGGCGGGCGGGAAACGGCGACA |
| for SNORD3A | | A |
| Probe | 22941 | TGGGAGAAAACGCAAAAAGAGACAATAGGAGGTGCCACACAGCATCCCC |
| for SNORD3A | | C |
| Probe | 22942 | TAAAATTAAAAAGCCACCCCGAGAAAACCCAAGAGCCGTCACCGCTGAA |
| for SNORD3A | | A |
| Probe | 22943 | TTTCTCGCGACATGCCAAGCAGGAGCGAACAGCCCAGAAACGCCCCGGA |
| for SNORD3A | | G |
| Probe | 22944 | CTGTCATTGAGCCATCAAGAAGGAAAAACCACTCAGACCGCGTTCTCTC |
| for SNORD3A | | C |
| Probe for | 22945 | ACGGAGAGAAGAACGATCATCAATGGCTGACGGCAGTTGCAGCCAAGCA |
| SNORD3A | | A |
| Probe for | 22946 | TTCACGCTCAGGAGAAAACGCTACCTCTCTTCCTCGTGGTTTTCGGTGC |
| SNORD3A | | T |
| Probe for | 22947 | AAACTTCTCTAGTAACACACTATAGAAATGATCCCTGAAAGTATAGTCT |
| SNORD3A | | T |
| (additional probe | | |
| added at start of | | |
| SNORD3A | | |
| transcript) | | |
| Probe for RN7SL1 | 22948 | CTCAGCCTCCCGAGTAGCTGGGACTACAGGCACGCGCCACCGCGCCCGG |
| and RN7SL2 | | C |
| (additional probe | | |
| added at start of | | |
| RN7SL1 and | | |
| RN7SL2 | | |
| transcript) | | |

Additional Probes

| | | |
|---|---|---|
| 12S_P1 | 22949 | GTTCGTCCAAGTGCACTTTCCAGTACACTTACCATGTTACGACTTGTCT |
| | | C |
| 12S_P2 | 22951 | TAGGGGTTTTAGTTAAATGTCCTTTGAAGTATACTTGAGGAGGGTGACG |
| | | G |
| 12S_P3 | 22951 | TTCAGGGCCCTGTTCAACTAAGCACTCTACTCTCAGTTTACTGCTAAAT |
| | | C |
| 12S_P4 | 22952 | AGTTTCATAAGGGCTATCGTAGTTTTCTGGGGTAGAAAATGTAGCCCAT |
| | | T |
| 12S_P5 | 22953 | GGCTACACCTTGACCTAACGTCTTTACGTGGGTACTTGCGCTTACTTTG |
| | | T |
| 12S_P6 | 22954 | TTGCTGAAGATGGCGGTATATAGGCTGAGCAAGAGGTGGTGAGGTTGAT |
| | | C |
| 12S_P7 | 22955 | CAGAACAGGCTCCTCTAGAGGGATATGAAGCACCGCCAGGTCCTTTGAG |
| | | T |
| 12S_P8 | 22956 | GTAGTGTTCTGGCGAGCAGTTTTGTTGATTTAACTGTTGAGGTTTAGGG |
| | | C |
| 12S_P9 | 22957 | ATCTAATCCCAGTTTGGGTCTTAGCTATTGTGTGTTCAGATATGTTAAA |
| | | G |
| 12S_P10 | 22958 | ATTTTGTGTCAACTGGAGTTTTTTACAACTCAGGTGAGTTTTAGCTTTA |
| | | T |
| 12S_P11 | 22959 | CTAAAACACTCTTTACGCCGGCTTCTATTGACTTGGGTTAATCGTGTGA |
| | | C |
| 12S_P12 | 22960 | GAAATTGACCAACCCTGGGGTTAGTATAGCTTAGTTAAACTTTCGTTTA |
| | | T |
| 12S_P13 | 22961 | ACTGCTGTTTCCCGTGGGGGTGTGGCTAGGCTAAGCGTTTTGAGCTGCA |
| | | T |
| 12S_P14 | 22962 | GCTTGTCCCTTTTGATCGTGGTGATTTAGAGGGTGAACTCACTGGAACG |
| | | G |
| 12S_P15 | 22963 | TAATCTTACTAAGAGCTAATAGAAAGGCTAGGACCAAACCTATTTGTTT |
| | | A |
| 16S_P1 | 22964 | AAACCCTGTTCTTGGGTGGGTGTGGGTATAATACTAAGTTGAGATGATA |
| | | T |
| 16S_P2 | 22965 | GCGCTTTGTGAAGTAGGCCTTATTTCTCTTGTCCTTTCGTACAGGGAGG |
| | | A |
| 16S_P3 | 22966 | AAACCGACCTGGATTACTCCGGTCTGAACTCAGATCACGTAGGACTTTA |
| | | A |
| 16S_P4 | 22967 | ACCTTTAATAGCGGCTGCACCATCGGGATGTCCTGATCCAACATCGAGG |
| | | T |
| 16S_P5 | 22968 | TGATATGGACTCTAGAATAGGATTGCGCTGTTATCCCTAGGGTAACTTG |
| | | T |
| 16S_P6 | 22969 | ATTGGATCAATTGAGTATAGTAGTTCGCTTTGACTGGTGAAGTCTTAGC |
| | | A |
| 16S_P7 | 22970 | TTGGGTTCTGCTCCGAGGTCGCCCCAACCGAAATTTTTAATGCAGGTTT |
| | | G |
| 16S_P8 | 22971 | TGGGTTTGTTAGGTACTGTTTGCATTAATAAATTAAAGCTCCATAGGGT |
| | | C |
| 16S_P9 | 22972 | GTCATGCCCGCCTCTTCACGGGCAGGTCAATTTCACTGGTTAAAAGTAA |
| | | G |
| 16S_P10 | 22973 | CGTGGAGCCATTCATACAGGTCCCTATTTAAGGAACAAGTGATTATGCT |
| | | A |
| 16S_P11 | 22974 | GGTACCGCGGCCGTTAAACATGTGTCACTGGGCAGGCGGTGCCTCTAAT |
| | | A |
| 16S_P12 | 22975 | GTGATGTTTTTGGTAAACAGGCGGGGTAAGGTTTGCCGAGTTCCTTTTA |
| | | C |
| 16S_P13 | 22976 | CTTATGAGCATGCCTGTGTTGGGTTGACAGTGAGGGTAATAATGACTTG |
| | | T |
| 16S_P14 | 22977 | ATTGGGCTGTTAATTGTCAGTTCAGTGTTTTGATCTGACGCAGGCTTAT |
| | | G |
| 16S_P15 | 22978 | TCATGTTACTTATACTAACATTAGTTCTTCTATAGGGTGATAGATTGGT |
| | | C |
| 16S_P16 | 22979 | AGTTCAGTTATATGTTTGGGATTTTTTAGGTAGTGGGTGTTGAGCTTGA |
| | | A |
| 16S_P17 | 22980 | TGGCTGCTTTTAGGCCTACTATGGGTGTTAAATTTTTTACTCTCTCTAC |
| | | A |
| 16S_P18 | 22981 | GTCCAAAGAGCTGTTCCTCTTTGGACTAACAGTTAAATTTACAAGGGGA |
| | | T |
| 16S_P19 | 22982 | GGCAAATTTAAAGTTGAACTAAGATTCTATCTTGGACAACCAGCTATCA |
| | | C |
| 16S_P20 | 22983 | TGTCGCCTCTACCTATAAATCTTCCCACTATTTTGCTACATAGACGGGT |
| | | G |
| 16S_P21 | 22984 | TCTTAGGTAGCTCGTCTGGTTTCGGGGGTCTTAGCTTTGGCTCTCCTTG |
| | | C |
| 16S_P22 | 22985 | TAATTCATTATGCAGAAGGTATAGGGGTTAGTCCTTGCTATATTATGCT |
| | | T |
| 16S_P23 | 22986 | TCTTTCCCTTGCGGTACTATATCTATTGCGCCAGGTTTCAATTTCTATC |
| | | G |
| 16S_P24 | 22987 | GGTAAATGGTTTGGCTAAGGTTGTCTGGTAGTAAGGTGGAGTGGGTTTG |
| | | G |
| 18S_P1 | 22988 | TAATGATCCTTCCGCAGGTTCACCTACGGAAACCTTGTTACGACTTTTA |
| | | C |
| 18S_P2 | 22989 | AAGTTCGACCGTCTTCTCAGCGCTCCGCCAGGGCCGTGGGCCGACCCCG |
| | | G |
| 18S_P3 | 22990 | GGCCTCACTAAACCATCCAATCGGTAGTAGCGACGGGCGGTGTGTACAA |
| | | A |
| 18S_P4 | 22991 | CAACGCAAGCTTATGACCCGCACTTACTCGGGAATTCCCTCGTTCATGG |
| | | G |
| 18S_P5 | 22992 | CCGATCCCCATCACGAATGGGGTTCAACGGGTTACCCGCGCCTGCCGGC |
| | | G |
| 18S_P6 | 22993 | CTGAGCCAGTCAGTGTAGCGCGCGTGCAGCCCCGGACATCTAAGGGCAT |
| | | C |
| 18S_P7 | 22994 | CTCAATCTCGGGTGGCTGAACGCCACTTGTCCCTCTAAGAAGTTGGGGG |
| | | A |
| 18S_P8 | 22995 | GGTCGCGTAACTAGTTAGCATGCCAGAGTCTCGTTCGTTATCGGAATTA |
| | | A |
| 18S_P9 | 22996 | CACCAACTAAGAACGGCCATGCACCACCACCCACGGAATCGAGAAAGAG |
| | | C |
| 18S_P10 | 22997 | CCTGTCCGTGTCCGGGCCGGGTGAGGTTTCCCGTGTTGAGTCAAATTAA |
| | | G |
| 18S_P11 | 22998 | CTGGTGGTGCCCTTCCGTCAATTCCTTTAAGTTTCAGCTTTGCAACCAT |
| | | A |
| 18S_P12 | 22999 | AAAGACTTTGGTTTCCCGGAAGCTGCCCGGCGGGTCATGGGAATAACGC |
| | | C |
| 18S_P13 | 23000 | GGCATCGTTTATGGTCGGAACTACGACGGTATCTGATCGTCTTCGAACC |
| | | T |
| 18S_P14 | 23001 | GATTAATGAAAACATTCTTGGCAAATGCTTTCGCTCTGGTCCGTCTTGC |
| | | G |
| 18S_P15 | 23002 | CACCTCTAGCGGCGCAATACGAATGCCCCCGGCCGTCCCTCTTAATCAT |
| | | G |
| 18S_P16 | 23003 | ACCAACAAAATAGAACCGCGGTCCTATTCCATTATTCCTAGCTGCGGTA |
| | | T |
| 18S_P17 | 23004 | CTGCTTTGAACACTCTAATTTTTTCAAAGTAAACGCTTCGGGCCCCGCG |
| | | G |
| 18S_P18 | 23005 | GCATCGAGGGGGCGCCGAGAGGCAAGGGGCGGGGACGGGCGGTGGCTCG |
| | | C |
| 18S_P19 | 23006 | CCGCCCGCTCCCAAGATCCAACTACGAGCTTTTTAACTGCAGCAACTTT |
| | | A |
| 18S_P20 | 23007 | GCTGGAATTACCGCGGCTGCTGGCACCAGACTTGCCCTCCAATGGATCC |
| | | T |
| 18S_P21 | 23008 | AGTGGACTCATTCCAATTACAGGGCCTCGAAAGAGTCCTGTATTGTTAT |
| | | T |
| 18S_P22 | 23009 | CCCGGGTCGGGAGTGGGTAATTTGCGCGCCTGCTGCCTTCCTTGGATGT |
| | | G |
| 18S_P23 | 23010 | GCTCCCTCTCCGGAATCGAACCCTGATTCCCCGTCACCCGTGGTCACCA |
| | | T |
| 18S_P24 | 23011 | TACCATCGAAAGTTGATAGGGCAGACGTTCGAATGGGTCGTCGCCGCCA |
| | | C |
| 18S_P25 | 23012 | GGCCCGAGGTTATCTAGAGTCACCAAAGCCGCCGGCGCCCGCCCCCCGG |
| | | C |
| 18S_P26 | 23013 | GCTGACCGGGTTGGTTTTGATCTGATAAATGCACGCATCCCCCCCGCGA |
| | | A |
| 18S_P27 | 23014 | TCGGCATGTATTAGCTCTAGAATTACCACAGTTATCCAAGTAGGAGAGG |
| | | A |
| 18S_P28 | 23015 | AACCATAACTGATTTAATGAGCCATTCGCAGTTTCACTGTACCGGCCGT |
| | | G |
| 18S_P29 | 23016 | ATGGCTTAATCTTTGAGACAAGCATATGCTACTGGCAGGATCAACCAGG |
| | | T |
| 28S_P1 | 23017 | GACAAACCCTTGTGTCGAGGGCTGACTTTCAATAGATCGCAGCGAGGGA |
| | | G |
| 28S_P2 | 23018 | CGAAACCCCGACCCAGAAGCAGGTCGTCTACGAATGGTTTAGCGCCAGG |
| | | T |
| 28S_P3 | 23019 | GGTGCGTGACGGGCGAGGGGGCGGCCGCCTTTCCGGCCGCGCCCCGTTT |
| | | C |
| 28S_P4 | 23020 | CTCCGCACCGGACCCCGGTCCCGGCGCGCGGCGGGGCACGCGCCCTCCC |
| | | G |
| 28S_P5 | 23021 | AGGGGGGGGCGGCCCGCCGGCGGGGACAGGCGGGGGACCGGCTATCCGA |
| | | G |
| 28S_P6 | 23022 | GCGGCGCTGCCGTATCGTTCGCCTGGGCGGGATTCTGACTTAGAGGCGT |
| | | T |
| 28S_P7 | 23023 | AGATGGTAGCTTCGCCCCATTGGCTCCTCAGCCAAGCACATACACCAAA |
| | | T |
| 28S_P8 | 23024 | TCCTCTCGTACTGAGCAGGATTACCATGGCAACAACACATCATCAGTAG |
| | | G |
| 28S_P9 | 23025 | CTCACGACGGTCTAAACCCAGCTCACGTTCCCTATTAGTGGGTGAACAA |
| | | T |
| 28S_P10 | 23026 | TTCTGCTTCACAATGATAGGAAGAGCCGACATCGAAGGATCAAAAAGCG |
| | | A |
| 28S_P11 | 23027 | TTGGCCGCCACAAGCCAGTTATCCCTGTGGTAACTTTTCTGACACCTCC |
| | | T |
| 28S_P12 | 23028 | GGTCAGAAGGATCGTGAGGCCCCGCTTTCACGGTCTGTATTCGTACTGA |
| | | A |
| 28S_P13 | 23029 | AGCTTTTGCCCTTCTGCTCCACGGGAGGTTTCTGTCCTCCCTGAGCTCG |
| | | C |
| 28S_P14 | 23030 | TTACCGTTTGACAGGTGTACCGCCCCAGTCAAACTCCCCACCTGGCACT |
| | | G |
| 28S_P15 | 23031 | GCGCCCGGCCGGGCGGGCGCTTGGCGCCAGAAGCGAGAGCCCCTCGGGC |
| | | T |
| 28S_P16 | 23032 | CCGGGTCAGTGAAAAAACGATCAGAGTAGTGGTATTTCACCGGCGGCCC |
| | | G |
| 28S_P17 | 23033 | CGCCCCGGGCCCCTCGCGGGGACACCGGGGGGGCGCCGGGGGCCTCCCA |
| | | C |
| 28S_P18 | 23034 | CATGTCTCTTCACCGTGCCAGACTAGAGTCAAGCTCAACAGGGTCTTCT |
| | | T |
| 28S_P19 | 23035 | CCAAGCCCGTTCCCTTGGCTGTGGTTTCGCTGGATAGTAGGTAGGGACA |
| | | G |
| 28S_P20 | 23036 | TCCATTCATGCGCGTCACTAATTAGATGACGAGGCATTTGGCTACCTTA |
| | | A |
| 28S_P21 | 23037 | TCCCGCCGTTTACCCGCGCTTCATTGAATTTCTTCACTTTGACATTCAG |
| | | A |
| 28S_P22 | 23038 | CACATCGCGTCAACACCCGCCGCGGGCCTTCGCGATGCTTTGTTTTAAT |
| | | T |
| 28S_P23 | 23039 | CCTGGTCCGCACCAGTTCTAAGTCGGCTGCTAGGCGCCGGCCGAGGCGA |
| | | G |
| 28S_P24 | 23040 | CGGCCCCGGGGGCGGACCCGGCGGGGGGGACCGGCCCGCGGCCCCTCCG |
| | | C |
| 28S_P25 | 23041 | CCGCCGCGCGCCGAGGAGGAGGGGGGAACGGGGGGCGGACGGGGCCGGG |
| | | G |
| 28S_P26 | 23042 | ACGAACCGCCCCGCCCCGCCGCCCGCCGACCGCCGCCGCCCGACCGCTC |
| | | C |
| 28S_P27 | 23043 | CGCGCGCGACCGAGACGTGGGGTGGGGGTGGGGGGCGCGCCGCGCCGCC |
| | | G |
| 28S_P28 | 23044 | GCGGCCGCGACGCCCGCCGCAGCTGGGGCGATCCACGGGAAGGGCCCGG |
| | | C |
| 28S_P29 | 23045 | GCGCCGCCGCCGGCCCCCCGGGTCCCCGGGGCCCCCCTCGCGGGGACCT |
| | | G |
| 28S_P30 | 23046 | CCGGCGGCCGCCGCGCGGCCCCTGCCGCCCCGACCCTTCTCCCCCCGCC |
| | | G |
| 28S_P31 | 23047 | CTCCCCCGGGGAGGGGGGAGGACGGGGAGCGGGGGAGAGAGAGAGAGAG |
| | | A |
| 28S_P32 | 23048 | AGGGAGCGAGCGGCGCGCGCGGGTGGGGCGGGGGAGGGCCGCGAGGGGG |
| | | G |
| 28S_P33 | 23049 | GGGGGCGCGCGCCTCGTCCAGCCGCGGCGCGCGCCCAGCCCCGCTTCGC |
| | | G |
| 28S_P34 | 23050 | CCCAGCCCTTAGAGCCAATCCTTATCCCGAAGTTACGGATCCGGCTTGC |
| | | C |
| 28S_P35 | 23051 | CATTGTTCCAACATGCCAGAGGCTGTTCACCTTGGAGACCTGCTGCGGA |
| | | T |
| 28S_P36 | 23052 | CGCGAGATTTACACCCTCTCCCCCGGATTTTCAAGGGCCAGCGAGAGCT |
| | | C |
| 28S_P37 | 23053 | AACCGCGACGCTTTCCAAGGCACGGGCCCCTCTCTCGGGGCGAACCCAT |
| | | T |
| 28S_P38 | 23054 | CTTCACAAAGAAAAGAGAACTCTCCCCGGGGCTCCCGCCGGCTTCTCCG |
| | | G |
| 28S_P39 | 23055 | CGCACTGGACGCCTCGCGGCGCCCATCTCCGCCACTCCGGATTCGGGGA |
| | | T |
| 28S_P40 | 23056 | TTTCGATCGGCCGAGGGCAACGGAGGCCATCGCCCGTCCCTTCGGAACG |
| | | G |
| 28S_P41 | 23057 | CAGGACCGACTGACCCATGTTCAACTGCTGTTCACATGGAACCCTTCTC |
| | | C |
| 28S_P42 | 23058 | GTTCTCGTTTGAATATTTGCTACTACCACCAAGATCTGCACCTGCGGCG |
| | | G |
| 28S_P43 | 23059 | CGCCCTAGGCTTCAAGGCTCACCGCAGCGGCCCTCCTACTCGTCGCGGC |
| | | G |
| 28S_P44 | 23060 | TCCGGGGGCGGGGAGCGGGGCGTGGGCGGGAGGAGGGGAGGAGGCGTGG |
| | | G |
| 28S_P45 | 23061 | AGGACCCCACACCCCCGCCGCCGCCGCCGCCGCCGCCCTCCGACGCACA |
| | | C |
| 28S_P46 | 23062 | GCGCGCCGCCCCCGCCGCTCCCGTCCACTCTCGACTGCCGGCGACGGCC |
| | | G |
| 28S_P47 | 23063 | CTCCAGCGCCATCCATTTTCAGGGCTAGTTGATTCGGCAGGTGAGTTGT |
| | | T |
| 28S_P48 | 23064 | GATTCCGACTTCCATGGCCACCGTCCTGCTGTCTATATCAACCAACACC |
| | | T |
| 28S_P49 | 23065 | GAGCGTCGGCATCGGGCGCCTTAACCCGGCGTTCGGTTCATCCCGCAGC |
| | | G |
| 28S_P50 | 23066 | AAAAGTGGCCCACTAGGCACTCGCATTCCACGCCCGGCTCCACGCCAGC |
| | | G |
| 28S_P51 | 23067 | CCATTTAAAGTTTGAGAATAGGTTGAGATCGTTTCGGCCCCAAGACCTC |
| | | T |
| 28S_P52 | 23068 | CGGATAAAACTGCGTGGCGGGGGTGCGTCGGGTCTGCGAGAGCGCCAGC |
| | | T |
| 28S_P53 | 23069 | TCGGAGGGAACCAGCTACTAGATGGTTCGATTAGTCTTTCGCCCCTATA |
| | | C |
| 28S_P54 | 23070 | GATTTGCACGTCAGGACCGCTACGGACCTCCACCAGAGTTTCCTCTGGC |
| | | T |
| 28S_P55 | 23071 | ATAGTTCACCATCTTTCGGGTCCTAACACGTGCGCTCGTGCTCCACCTC |
| | | C |
| 28S_P56 | 23072 | AGACGGGCCGGTGGTGCGCCCTCGGCGGACTGGAGAGGCCTCGGGATCC |
| | | C |
| 28S_P57 | 23073 | CGCGCCGGCCTTCACCTTCATTGCGCCACGGCGGCTTTCGTGCGAGCCC |
| | | C |
| 28S_P58 | 23074 | TTAGACTCCTTGGTCCGTGTTTCAAGACGGGTCGGGTGGGTAGCCGACG |
| | | T |
| 28S_P59 | 23075 | GCGCTCGCTCCGCCGTCCCCCTCTTCGGGGGACGCGCGCGTGGCCCCGA |
| | | G |
| 28S_P60 | 23076 | CCCGACGGCGCGACCCGCCCGGGGCGCACTGGGGACAGTCCGCCCCGCC |
| | | C |
| 28S_P61 | 23077 | GCACCCCCCCCGTCGCCGGGGCGGGGGCGCGGGGAGGAGGGGTGGGAGA |
| | | G |
| 28S_P62 | 23078 | AGGGGTGGCCCGGCCCCCCCACGAGGAGACGCCGGCGCGCCCCCGCGGG |
| | | G |
| 28S_P63 | 23079 | GGGGATTCCCCGCGGGGGTGGGCGCCGGGAGGGGGGAGAGCGCGGCGAC |
| | | G |
| 28S_P64 | 23080 | GCCCCGGGATTCGGCGAGTGCTGCTGCCGGGGGGGCTGTAACACTCGGG |
| | | G |
| 28S_P65 | 23081 | CCGCCCCCGCCGCCGCCGCCACCGCCGCCGCCGCCGCCGCCCCGACCCG |
| | | C |
| 28S_P66 | 23082 | AGGACGCGGGGCCGGGGGGCGGAGACGGGGGAGGAGGAGGACGGACGGA |
| | | C |
| 28S_P67 | 23083 | AGCCACCTTCCCCGCCGGGCCTTCCCAGCCGTCCCGGAGCCGGTCGCGG |
| | | C |
| 28S_P68 | 23084 | AAATGCGCCCGGCGGCGGCCGGTCGCCGGTCGGGGGACGGTCCCCCGCC |
| | | G |
| 28S_P69 | 23085 | CCGCCCGCCCACCCCCGCACCCGCCGGAGCCCGCCCCCTCCGGGGAGGA |
| | | G |
| 28S_P70 | 23086 | GGGAAGGGAGGGCGGGTGGAGGGGTCGGGAGGAACGGGGGGCGGGAAAG |
| | | A |
| 28S_P71 | 23087 | ACACGGCCGGACCCGCCGCCGGGTTGAATCCTCCGGGCGGACTGCGCGG |
| | | A |
| 28S_P72 | 23088 | TCTTAACGGTTTCACGCCCTCTTGAACTCTCTCTTCAAAGTTCTTTTCA |
| | | A |
| 28S_P73 | 23089 | CTTGTTGACTATCGGTCTCGTGCCGGTATTTAGCCTTAGATGGAGTTTA |
| | | C |
| 28S_P74 | 23090 | GCATTCCCAAGCAACCCGACTCCGGGAAGACCCGGGCGCGCGCCGGCCG |
| | | C |
| 28S_P75 | 23091 | GTCCACGGGCTGGGCCTCGATCAGAAGGACTTGGGCCCCCCACGAGCGG |
| | | C |
| 28S_P76 | 23092 | TTCCGTACGCCACATGTCCCGCGCCCCGCGGGGCGGGGATTCGGCGCTG |
| | | G |
| 28S_P77 | 23093 | CTCGCCGTTACTGAGGGAATCCTGGTTAGTTTCTTTTCCTCCGCTGACT |
| | | A |
| 28S_P78 | 23094 | GCGGGTCGCCACGTCTGATCTGAGGTCGCGTCTCGGAGGGGGACGGGCC |
| | | G |
| 5.8S_P1 | 23095 | AAGCGACGCTCAGACAGGCGTAGCCCCGGGAGGAACCCGGGGCCGCAAG |
| | | T |
| 5.8S_P3 | 23096 | GCAGCTAGCTGCGTTCTTCATCGACGCACGAGCCGAGTGATCCACCGCT |
| | | A |
| 5S_P1 | 23097 | AAAGCCTACAGCACCCGGTATTCCCAGGCGGTCTCCCATCCAAGTACTA |
| | | A |
| 5S_P3 | 23098 | TTCCGAGATCAGACGAGATCGGGCGCGTTCAGGGTGGTATGGCCGTAGA |
| | | C |
| HBA1_P1 | 23099 | GCCGCCCACTCAGACTTTATTCAAAGACCACGGGGGTACGGGTGCAGGA |
| | | A |
| HBA1_P2 | 23100 | GGGGGAGGCCCAAGGGGCAAGAAGCATGGCCACCGAGGCTCCAGCTTAA |
| | | C |
| HBA1_P3 | 23101 | GCACGGTGCTCACAGAAGCCAGGAACTTGTCCAGGGAGGCGTGCACCGC |
| | | A |
| HBA1_P4 | 23102 | GGGAGGTGGGCGGCCAGGGTCACCAGCAGGCAGTGGCTTAGGAGCTTGA |
| | | A |
| HBA1_P5 | 23103 | CCGAAGCTTGTGCGCGTGCAGGTCGCTCAGGGCGGACAGCGCGTTGGGC |
| | | A |
| HBA1_P6 | 23104 | CCACGGCGTTGGTCAGCGCGTCGGCCACCTTCTTGCCGTGGCCCTTAAC |
| | | C |
| HBA1_P7 | 23105 | CTCAGGTCGAAGTGCGGGAAGTAGGTCTTGGTGGTGGGGAAGGACAGGA |
| | | A |
| HBA1_P8 | 23106 | CTCCGCACCATACTCGCCAGCGTGCGCGCCGACCTTACCCCAGGCGGCC |
| | | T |
| HBA1_P9 | 23107 | CGGCAGGAGACAGCACCATGGTGGGTTCTCTCTGAGTCTGTGGGGACCA |
| | | G |
| HBA2_P1 | 23108 | GAGGGGAGGAGGGCCCGTTGGGAGGCCCAGCGGGCAGGAGGAACGGCTA |
| | | C |
| HBA2_P2 | 23109 | ACGGTATTTGGAGGTCAGCACGGTGCTCACAGAAGCCAGGAACTTGTCC |
| | | A |
| HBA2_P3 | 23110 | CAGGGGTGAACTCGGCGGGGAGGTGGGCGGCCAGGGTCACCAGCAGGCA |
| | | G |
| HBA2_P4 | 23111 | AAGTTGACCGGGTCCACCCGAAGCTTGTGCGCGTGCAGGTCGCTCAGGG |
| | | C |
| HBA2_P5 | 23112 | CATGTCGTCCACGTGCGCCACGGCGTTGGTCAGCGCGTCGGCCACCTTC |
| | | T |
| HBA2_P6 | 23113 | CCTGGGCAGAGCCGTGGCTCAGGTCGAAGTGCGGGAAGTAGGTCTTGGT |
| | | G |
| HBA2_P7 | 23114 | AACATCCTCTCCAGGGCCTCCGCACCATACTCGCCAGCGTGCGCGCCGA |
| | | C |
| HBA2_P8 | 23115 | CTTGACGTTGGTCTTGTCGGCAGGAGACAGCACCATGGTGGGTTCTCTC |
| | | T |
| HBB_P1 | 23116 | GCAATGAAAATAAATGTTTTTTATTAGGCAGAATCCAGATGCTCAAGGC |
| | | C |
| HBB_P2 | 23117 | CAGTTTAGTAGTTGGACTTAGGGAACAAAGGAACCTTTAATAGAAATTG |
| | | G |
| HBB_P3 | 23118 | GCTTAGTGATACTTGTGGGCCAGGGCATTAGCCACACCAGCCACCACTT |
| | | T |
| HBB_P4 | 23119 | CACTGGTGGGGTGAATTCTTTGCCAAAGTGATGGGCCAGCACACAGACC |
| | | A |
| HBB_P5 | 23120 | GCCTGAAGTTCTCAGGATCCACGTGCAGCTTGTCACAGTGCAGCTCACT |
| | | C |
| HBB_P6 | 23121 | CCCTTGAGGTTGTCCAGGTGAGCCAGGCCATCACTAAAGGCACCGAGCA |
| | | C |
| HBB_P7 | 23122 | CTTCACCTTAGGGTTGCCCATAACAGCATCAGGAGTGGACAGATCCCCA |
| | | A |
| HBB_P8 | 23123 | TCTGGGTCCAAGGGTAGACCACCAGCAGCCTGCCCAGGGCCTCACCACC |
| | | A |
| HBB_P9 | 23124 | ACCTTGCCCCACAGGGCAGTAACGGCAGACTTCTCCTCAGGAGTCAGAT |
| | | G |
| HBG1_P1 | 23125 | GTGATCTCTCAGCAGAATAGATTTATTATTTGTATTGCTTGCAGAATAA |
| | | A |
| HBG1_P2 | 23126 | CTCTGAATCATGGGCAGTGAGCTCAGTGGTATCTGGAGGACAGGGCACT |
| | | G |
| HBG1_P3 | 23127 | ATCTTCTGCCAGGAAGCCTGCACCTCAGGGGTGAATTCTTTGCCGAAAT |
| | | G |
| HBG1_P4 | 23128 | CACCAGCACATTTCCCAGGAGCTTGAAGTTCTCAGGATCCACATGCAGC |
| | | T |
| HBG1_P5 | 23129 | CACTCAGCTGGGCAAAGGTGCCCTTGAGATCATCCAGGTGCTTTGTGGC |
| | | A |
| HBG1_P6 | 23130 | AGCACCTTCTTGCCATGTGCCTTGACTTTGGGGTTGCCCATGATGGCAG |
| | | A |
| HBG1_P7 | 23131 | GCCAAAGCTGTCAAAGAACCTCTGGGTCCATGGGTAGACAACCAGGAGC |
| | | C |
| HBG1_P8 | 23132 | CTCCAGCATCTTCCACATTCACCTTGCCCCACAGGCTTGTGATAGTAGC |
| | | C |
| HBG1_P9 | 23133 | AAATGACCCATGGCGTCTGGACTAGGAGCTTATTGATAACCTCAGACGT |
| | | T |
| HBG2_P1 | 23134 | GTGATCTCTTAGCAGAATAGATTTATTATTTGATTGCTTGCAGAATAAA |
| | | G |
| HBG2_P2 | 23135 | TCTGCATCATGGGCAGTGAGCTCAGTGGTATCTGGAGGACAGGGCACTG |
| | | G |
| HBG2_P3 | 23136 | TCTTCTGCCAGGAAGCCTGCACCTCAGGGGTGAATTCTTTGCCGAAATG |
| | | G |
| HBG2_P4 | 23137 | ACCAGCACATTTCCCAGGAGCTTGAAGTTCTCAGGATCCACATGCAGCT |
| | | T |
| HBG2_P5 | 23138 | ACTCAGCTGGGCAAAGGTGCCCTTGAGATCATCCAGGTGCTTTATGGCA |
| | | T |
| HBG2_P6 | 23139 | GCACCTTCTTGCCATGTGCCTTGACTTTGGGGTTGCCCATGATGGCAGA |
| | | G |
| HBG2_P7 | 23140 | CCAAAGCTGTCAAAGAACCTCTGGGTCCATGGGTAGACAACCAGGAGCC |
| | | T |
| HBG2_P8 | 23141 | TCCAGCATCTTCCACATTCACCTTGCCCCACAGGCTTGTGATAGTAGCC |
| | | T |
| HBG2_P9 | 23142 | AATGACCCATGGCGTCTGGACTAGGAGCTTATTGATAACCTCAGACGTT |
| | | C |
| 5S_GNbac_P1 | 23143 | ATGCCTGGCAGTTCCCTACTCTCGCATGGGGAGACCCCACACTACCATC |
| | | G |
| 5S_GNbac_P2 | 23144 | ACTTCTGAGTTCGGCATGGGGTCAGGTGGGACCACCGCGCTACGGCCGC |
| | | C |
| 16S_GNbac_P1 | 23145 | GGTTACCTTGTTACGACTTCACCCCAGTCATGAATCACAAAGTGGTAAG |
| | | T |
| 16S_GNbac_P2 | 23146 | AAGCTACCTACTTCTTTTGCAACCCACTCCCATGGTGTGACGGGCGGTG |
| | | T |
| 16S_GNbac_P3 | 23147 | ACGTATTCACCGTGGCATTCTGATCCACGATTACTAGCGATTCCGACTT |
| | | C |
| 16S_GNbac_P4 | 23148 | AGACTCCAATCCGGACTACGACGCACTTTATGAGGTCCGCTTGCTCTCG |
| | | C |
| 16S_GNbac_P5 | 23149 | TGTATGCGCCATTGTAGCACGTGTGTAGCCCTGGTCGTAAGGGCCATGA |
| | | T |
| 16S_GNbac_P6 | 23150 | CCACCTTCCTCCAGTTTATCACTGGCAGTCTCCTTTGAGTTCCCGGCCG |
| | | G |
| 16S_GNbac_P7 | 23151 | GGATAAGGGTTGCGCTCGTTGCGGGACTTAACCCAACATTTCACAACAC |
| | | G |
| 16S_GNbac_P8 | 23152 | TGCAGCACCTGTCTCACGGTTCCCGAAGGCACATTCTCATCTCTGAAAA |
| | | C |
| 16S_GNbac_P9 | 23153 | GACCAGGTAAGGTTCTTCGCGTTGCATCGAATTAAACCACATGCTCCAC |
| | | C |
| 16S_GNbac_P10 | 23154 | CGTCAATTCATTTGAGTTTTAACCTTGCGGCCGTACTCCCCAGGCGGTC |
| | | G |
| 16S_GNbac_P11 | 23155 | TCCGGAAGCCACGCCTCAAGGGCACAACCTCCAAGTCGACATCGTTTAC |
| | | G |
| 16S_GNbac_P12 | 23156 | GTATCTAATCCTGTTTGCTCCCCACGCTTTCGCACTGAGCGTCAGTCTT |
| | | C |
| 16S_GNbac_P13 | 23157 | TTCGCCACCGGTATTCCTCCAGATCTCTACGCATTTCACCGCTACACCT |
| | | G |
| 16S_GNbac_P14 | 23158 | CTACGAGACTCAAGCTTGCCAGTATCAGATGCAGTTCCCAGGTTGAGCC |
| | | C |
| 16S_GNbac_P15 | 23159 | GACTTAACAAACCGCCTGCGTGCGCTTTACGCCCAGTAATTCCGATTAA |
| | | C |
| 16S_GNbac_P16 | 23160 | ATTACCGCGGCTGCTGGCACGGAGTTAGCCGGTGCTTCTTCTGCGGGTA |
| | | A |
| 16S_GNbac_P17 | 23161 | GTATTAACTTTACTCCCTTCCTCCCCGCTGAAAGTACTTTACAACCCGA |
| | | A |
| 16S_GNbac_P18 | 23162 | CGCGGCATGGCTGCATCAGGCTTGCGCCCATTGTGCAGTATTCCCCACT |
| | | G |
| 16S_GNbac_P19 | 23163 | GTCTGGACCGTGTCTCAGTTCCAGTGTGGCTGGTCATCCTCTCAGACCA |
| | | G |
| 16S_GNbac_P20 | 23164 | TAGGTGAGCCGTTACCCCACCTACTAGCTAATCCCATCTGGGCACATCC |
| | | G |
| 16S_GNbac_P21 | 23165 | AAGGTCCCCCTCTTTGGTCTTGCGACGTTATGCGGTATTAGCTACCGTT |
| | | T |
| 16S_GNbac_P22 | 23166 | CTCCATCAGGCAGTTTCCCAGACATTACTCACCCGTCCGCCACTCGTCA |
| | | G |
| 23S_GNbac_P1 | 23167 | AAGGTTAAGCCTCACGGTTCATTAGTACCGGTTAGCTCAACGCATCGCT |
| | | G |
| 23S_GNbac_P2 | 23168 | CCTATCAACGTCGTCGTCTTCAACGTTCCTTCAGGACCCTTAAAGGGTC |
| | | A |
| 23S_GNbac_P3 | 23169 | GGGGCAAGTTTCGTGCTTAGATGCTTTCAGCACTTATCTCTTCCGCATT |
| | | T |
| 23S_GNbac_P4 | 23170 | CCATTGGCATGACAACCCGAACACCAGTGATGCGTCCACTCCGGTCCTC |
| | | T |
| 23S_GNbac_P5 | 23171 | CCCCCTCAGTTCTCCAGCGCCCACGGCAGATAGGGACCGAACTGTCTCA |
| | | C |
| 23S_GNbac_P6 | 23172 | GCTCGCGTACCACTTTAAATGGCGAACAGCCATACCCTTGGGACCTACT |
| | | T |
| 23S_GNbac_P7 | 23173 | ATGAGCCGACATCGAGGTGCCAAACACCGCCGTCGATATGAACTCTTGG |
| | | G |
| 23S_GNbac_P8 | 23174 | ATCCCCGGAGTACCTTTTATCCGTTGAGCGATGGCCCTTCCATTCAGAA |
| | | C |
| 23S_GNbac_P9 | 23175 | ACCTGCTTTCGCACCTGCTCGCGCCGTCACGCTCGCAGTCAAGCTGGCT |
| | | T |
| 23S_GNbac_P10 | 23176 | CCTCCTGATGTCCGACCAGGATTAGCCAACCTTCGTGCTCCTCCGTTAC |
| | | T |
| 23S_GNbac_P11 | 23177 | GCCCCAGTCAAACTACCCACCAGACACTGTCCGCAACCCGGATTACGGG |
| | | T |
| 23S_GNbac_P12 | 23178 | AAACATTAAAGGGTGGTATTTCAAGGTCGGCTCCATGCAGACTGGCGTC |
| | | C |
| 23S_GNbac_P13 | 23179 | CCACCTATCCTACACATCAAGGCTCAATGTTCAGTGTCAAGCTATAGTA |
| | | A |
| 23S_GNbac_P14 | 23180 | TTCCGTCTTGCCGCGGGTACACTGCATCTTCACAGCGAGTTCAATTTCA |
| | | C |
| 23S_GNbac_P15 | 23181 | GACAGCCTGGCCATCATTACGCCATTCGTGCAGGTCGGAACTTACCCGA |
| | | C |
| 23S_GNbac_P16 | 23182 | CTTAGGACCGTTATAGTTACGGCCGCCGTTTACCGGGGCTTCGATCAAG |
| | | A |
| 23S_GNbac_P17 | 23183 | ACCCCATCAATTAACCTTCCGGCACCGGGCAGGCGTCACACCGTATACG |
| | | T |
| 23S_GNbac_P18 | 23184 | CACAGTGCTGTGTTTTTAATAAACAGTTGCAGCCAGCTGGTATCTTCGA |
| | | C |
| 23S_GNbac_P19 | 23185 | CCGCGAGGGACCTCACCTACATATCAGCGTGCCTTCTCCCGAAGTTACG |
| | | G |
| 23S_GNbac_P20 | 23186 | TTCCTTCACCCGAGTTCTCTCAAGCGCCTTGGTATTCTCTACCTGACCA |
| | | C |
| 23S_GNbac_P21 | 23187 | GTACGATTTGATGTTACCTGATGCTTAGAGGCTTTTCCTGGAAGCAGGG |
| | | C |
| 23S_GNbac_P22 | 23188 | ACCGTAGTGCCTCGTCATCACGCCTCAGCCTTGATTTTCCGGATTTGCC |
| | | T |
| 23S_GNbac_P23 | 23189 | ACGCTTAAACCGGGACAACCGTCGCCCGGCCAACATAGCCTTCTCCGTC |
| | | C |
| 23S_GNbac_P24 | 23190 | ACCAAGTACAGGAATATTAACCTGTTTCCCATCGACTACGCCTTTCGGC |
| | | C |
| 23S_GNbac_P25 | 23191 | ACTCACCCTGCCCCGATTAACGTTGGACAGGAACCCTTGGTCTTCCGGC |
| | | G |
| 23S_GNbac_P26 | 23192 | CGCTTTATCGTTACTTATGTCAGCATTCGCACTTCTGATACCTCCAGCA |
| | | T |
| 23S_GNbac_P27 | 23193 | TTCGCAGGCTTACAGAACGCTCCCCTACCCAACAACGCATAAGCGTCGC |
| | | T |
| 23S_GNbac_P28 | 23194 | CATGGTTTAGCCCCGTTACATCTTCCGCGCAGGCCGACTCGACCAGTGA |
| | | G |
| 23S_GNbac_P29 | 23195 | TAAATGATGGCTGCTTCTAAGCCAACATCCTGGCTGTCTGGGCCTTCCC |
| | | A |
| 23S_GNbac_P30 | 23196 | AACCATGACTTTGGGACCTTAGCTGGCGGTCTGGGTTGTTTCCCTCTTC |
| | | A |
| 23S_GNbac_P31 | 23197 | CCCGCCGTGTGTCTCCCGTGATAACATTCTCCGGTATTCGCAGTTTGCA |
| | | T |
| 23S_GNbac_P32 | 23198 | GGATGACCCCCTTGCCGAAACAGTGCTCTACCCCCGGAGATGAATTCAC |
| | | G |
| 23S_GNbac_P33 | 23199 | AGCTTTCGGGGAGAACCAGCTATCTCCCGGTTTGATTGGCCTTTCACCC |
| | | C |
| 23S_GNbac_P34 | 23200 | CGCTAATTTTTCAACATTAGTCGGTTCGGTCCTCCAGTTAGTGTTACCC |
| | | A |
| 23S_GNbac_P35 | 23201 | ATGGCTAGATCACCGGGTTTCGGGTCTATACCCTGCAACTTAACGCCCA |
| | | G |
| 23S_GNbac_P36 | 23202 | CCTTCGGCTCCCCTATTCGGTTAACCTTGCTACAGAATATAAGTCGCTG |
| | | A |
| 23S_GNbac_P37 | 23203 | GTACGCAGTCACACGCCTAAGCGTGCTCCCACTGCTTGTACGTACACGG |
| | | T |
| 23S_GNbac_P38 | 23204 | ACTCCCCTCGCCGGGGTTCTTTTCGCCTTTCCCTCACGGTACTGGTTCA |
| | | C |
| 23S_GNbac_P39 | 23205 | AGTATTTAGCCTTGGAGGATGGTCCCCCCATATTCAGACAGGATACCAC |
| | | G |
| 23S_GNbac_P40 | 23206 | ATCGAGCTCACAGCATGTGCATTTTTGTGTACGGGGCTGTCACCCTGTA |
| | | T |
| 23S_GNbac_P41 | 23207 | ACGCTTCCACTAACACACACACTGATTCAGGCTCTGGGCTGCTCCCCGT |
| | | T |
| 23S_GNbac_P42 | 23208 | GGGGAATCTCGGTTGATTTCTTTTCCTCGGGGTACTTAGATGTTTCAGT |
| | | T |
| 23S_GNbac_P43 | 23209 | ATTAACCTATGGATTCAGTTAATGATAGTGTGTCGAAACACACTGGGTT |
| | | T |
| 23S_GNbac_P44 | 23210 | GCCGGTTATAACGGTTCATATCACCTTACCGACGCTTATCGCAGATTAG |
| | | C |
| 5S_GPbac_P1 | 23211 | GCTTGGCGGCGTCCTACTCTCACAGGGGGAAACCCCCGACTACCATCGG |
| | | C |
| 5S_GPbac_P2 | 23212 | TTCCGTGTTCGGTATGGGAACGGGTGTGACCTCTTCGCTATCGCCACCA |
| | | A |
| 16S_GPbac_P1 | 23213 | TAGAAAGGAGGTGATCCAGCCGCACCTTCCGATACGGCTACCTTGTTAC |
| | | G |
| 16S_GPbac_P2 | 23214 | TCTGTCCCACCTTCGGCGGCTGGCTCCTAAAAGGTTACCTCACCGACTT |
| | | C |
| 16S_GPbac_P3 | 23215 | TCGTGGTGTGACGGGCGGTGTGTACAAGGCCCGGGAACGTATTCACCGC |
| | | G |
| 16S_GPbac_P4 | 23216 | ATTACTAGCGATTCCAGCTTCACGCAGTCGAGTTGCAGACTGCGATCCG |
| | | A |
| 16S_GPbac_P5 | 23217 | GTGGGATTGGCTTAACCTCGCGGTTTCGCTGCCCTTTGTTCTGTCCATT |
| | | G |
| 16S_GPbac_P6 | 23218 | CCAGGTCATAAGGGGCATGATGATTTGACGTCATCCCCACCTTCCTCCG |
| | | G |
| 16S_GPbac_P7 | 23219 | CACCTTAGAGTGCCCAACTGAATGCTGGCAACTAAGATCAAGGGTTGCG |
| | | C |
| 16S_GPbac_P8 | 23220 | ACCCAACATCTCACGACACGAGCTGACGACAACCATGCACCACCTGTCA |
| | | C |
| 16S_GPbac_P9 | 23221 | GACGTCCTATCTCTAGGATTGTCAGAGGATGTCAAGACCTGGTAAGGTT |
| | | C |
| 16S_GPbac_P10 | 23222 | ATTAAACCACATGCTCCACCGCTTGTGCGGGCCCCCGTCAATTCCTTTG |
| | | A |
| 16S_GPbac_P11 | 23223 | CCGTACTCCCCAGGCGGAGTGCTTAATGCGTTAGCTGCAGCACTAAGGG |
| | | G |
| 16S_GPbac_P12 | 23224 | ACTTAGCACTCATCGTTTACGGCGTGGACTACCAGGGTATCTAATCCTG |
| | | T |
| 16S_GPbac_P13 | 23225 | TCGCTCCTCAGCGTCAGTTACAGACCAGAGAGTCGCCTTCGCCACTGGT |
| | | G |
| 16S_GPbac_P14 | 23226 | ACGCATTTCACCGCTACACGTGGAATTCCACTCTCCTCTTCTGCACTCA |
| | | A |
| 16S_GPbac_P15 | 23227 | ATGACCCTCCCCGGTTGAGCCGGGGGCTTTCACATCAGACTTAAGAAAC |
| | | C |
| 16S_GPbac_P16 | 23228 | ACGCCCAATAATTCCGGACAACGCTTGCCACCTACGTATTACCGCGGCT |
| | | G |
| 16S_GPbac_P17 | 23229 | CCGTGGCTTTCTGGTTAGGTACCGTCAAGGTACCGCCCTATTCGAACGG |
| | | T |
| 16S_GPbac_P18 | 23230 | ACAACAGAGCTTTACGATCCGAAAACCTTCATCACTCACGCGGCGTTGC |
| | | T |
| 16S_GPbac_P19 | 23231 | CCATTGCGGAAGATTCCCTACTGCTGCCTCCCGTAGGAGTCTGGGCCGT |
| | | G |
| 16S_GPbac_P20 | 23232 | GGCCGATCACCCTCTCAGGTCGGCTACGCATCGTCGCCTTGGTGAGCCG |
| | | T |
| 16S_GPbac_P21 | 23233 | CTAATGCGCCGCGGGTCCATCTGTAAGTGGTAGCCGAAGCCACCTTTTA |
| | | T |
| 16S_GPbac_P22 | 23234 | TTCAAACAACCATCCGGTATTAGCCCCGGTTTCCCGGAGTTATCCCAGT |
| | | C |
| 16S_GPbac_P23 | 23235 | CCACGTGTTACTCACCCGTCCGCCGCTAACATCAGGGAGCAAGCTCCCA |
| | | T |
| 16S_GPbac_P24 | 23236 | GCATGTATTAGGCACGCCGCCAGCGTTCGTCCTGAGCCAGGATCAAACT |
| | | C |
| 23S_GPbac_P1 | 23237 | TGGTTAAGTCCTCGATCGATTAGTATCTGTCAGCTCCATGTGTCGCCAC |
| | | A |
| 23S_GPbac_P2 | 23238 | TATCAACCTGATCATCTTTCAGGGATCTTACTTCCTTGCGGAATGGGAA |
| | | A |
| 23S_GPbac_P3 | 23239 | GGCTTCATGCTTAGATGCTTTCAGCACTTATCCCGTCCGCACATAGCTA |
| | | C |
| 23S_GPbac_P4 | 23240 | GCAGAACAACTGGTACACCAGCGGTGCGTCCATCCCGGTCCTCTCGTAC |
| | | T |
| 23S_GPbac_P5 | 23241 | CAAATTTCCTGCGCCCGCGACGGATAGGGACCGAACTGTCTCACGACGT |
| | | T |
| 23S_GPbac_P6 | 23242 | GTACCGCTTTAATGGGCGAACAGCCCAACCCTTGGGACTGACTACAGCC |
| | | C |
| 23S_GPbac_P7 | 23243 | CGACATCGAGGTGCCAAACCTCCCCGTCGATGTGGACTCTTGGGGGAGA |
| | | T |
| 23S_GPbac_P8 | 23244 | GGGGTAGCTTTTATCCGTTGAGCGATGGCCCTTCCATGCGGAACCACCG |
| | | G |
| 23S_GPbac_P9 | 23245 | TTTCGTCCCTGCTCGACTTGTAGGTCTCGCAGTCAAGCTCCCTTGTGCC |
| | | T |
| 23S_GPbac_P10 | 23246 | GATTTCCAACCATTCTGAGGGAACCTTTGGGCGCCTCCGTTACCTTTTA |
| | | G |
| 23S_GPbac_P11 | 23247 | GTCAAACTGCCCACCTGACACTGTCTCCCCGCCCGATAAGGGCGGCGGG |
| | | T |
| 23S_GPbac_P12 | 23248 | GCCAGGGTAGTATCCCACCGATGCCTCCACCGAAGCTGGCGCTCCGGTT |
| | | T |
| 23S_GPbac_P13 | 23249 | ATCCTGTACAAGCTGTACCAACATTCAATATCAGGCTGCAGTAAAGCTC |
| | | C |
| 23S_GPbac_P14 | 23250 | CCTGTCGCGGGTAACCTGCATCTTCACAGGTACTATAATTTCACCGAGT |
| | | C |
| 23S_GPbac_P15 | 23251 | GCCCAGATCGTTGCGCCTTTCGTGCGGGTCGGAACTTACCCGACAAGGA |
| | | A |
| 23S_GPbac_P16 | 23252 | ACCGTTATAGTTACGGCCGCCGTTTACTGGGGCTTCAATTCGCACCTTC |
| | | G |
| 23S_GPbac_P17 | 23253 | CCTCTTAACCTTCCAGCACCGGGCAGGCGTCAGCCCCTATACTTCGCCT |
| | | T |
| 23S_GPbac_P18 | 23254 | CCTGTGTTTTTGCTAAACAGTCGCCTGGGCCTATTCACTGCGGCTCTCT |
| | | C |
| 23S_GPbac_P19 | 23255 | CAGAGCACCCCTTCTCCCGAAGTTACGGGGTCATTTTGCCGAGTTCCTT |
| | | A |
| 23S_GPbac_P20 | 23256 | ATCACCTTAGGATTCTCTCCTCGCCTACCTGTGTCGGTTTGCGGTACGG |
| | | G |
| 23S_GPbac_P21 | 23257 | TAGAGGCTTTTCTTGGCAGTGTGGAATCAGGAACTTCGCTACTATATTT |
| | | C |
| 23S_GPbac_P22 | 23258 | TCAGCCTTATGGGAAACGGATTTGCCTATTTCCCAGCCTAACTGCTTGG |
| | | A |
| 23S_GPbac_P23 | 23259 | CCGCGCTTACCCTATCCTCCTGCGTCCCCCCATTGCTCAAATGGTGAGG |
| | | A |
| 23S_GPbac_P24 | 23260 | TCAACCTGTTGTCCATCGCCTACGCCTTTCGGCCTCGGCTTAGGTCCCG |
| | | A |
| 23S_GPbac_P25 | 23261 | CGAGCCTTCCTCAGGAAACCTTAGGCATTCGGTGGAGGGGATTCTCACC |
| | | C |
| 23S_GPbac_P26 | 23262 | TACCGGCATTCTCACTTCTAAGCGCTCCACCAGTCCTTCCGGTCTGGCT |
| | | T |
| 23S_GPbac_P27 | 23263 | GCTCTCCTACCACTGTTCGAAGAACAGTCCGCAGCTTCGGTGATACGTT |
| | | T |
| 23S_GPbac_P28 | 23264 | TCGGCGCAGAGTCACTCGACCAGTGAGCTATTACGCACTCTTTAAATGG |
| | | T |
| 23S_GPbac_P29 | 23265 | AACATCCTGGTTGTCTAAGCAACTCCACATCCTTTTCCACTTAACGTAT |
| | | A |
| 23S_GPbac_P30 | 23266 | TGGCGGTCTGGGCTGTTTCCCTTTCGACTACGGATCTTATCACTCGCAG |
| | | T |
| 23S_GPbac_P31 | 23267 | AAGTCATTGGCATTCGGAGTTTGACTGAATTCGGTAACCCGGTAGGGGC |
| | | C |
| 23S_GPbac_P32 | 23268 | GCTCTACCTCCAAGACTCTTACCTTGAGGCTAGCCCTAAAGCTATTTCG |
| | | G |
| 23S_GPbac_P33 | 23269 | TCCAGGTTCGATTGGCATTTCACCCCTACCCACACCTCATCCCCGCACT |
| | | T |
| 23S_GPbac_P34 | 23270 | TTCGGGCCTCCATTCAGTGTTACCTGAACTTCACCCTGGACATGGGTAG |
| | | A |
| 23S_GPbac_P35 | 23271 | TCTACGACCACGTACTCATGCGCCCTATTCAGACTCGCTTTCGCTGCGG |
| | | C |
| 23S_GPbac_P36 | 23272 | TAACCTTGCACGGGATCGTAACTCGCCGGTTCATTCTACAAAAGGCACG |
| | | C |
| 23S_GPbac_P37 | 23273 | GGCTCTGACTACTTGTAGGCACACGGTTTCAGGATCTCTTTCACTCCCC |
| | | T |
| 23S_GPbac_P38 | 23274 | ACCTTTCCCTCACGGTACTGGTTCACTATCGGTCACTAGGGAGTATTTA |
| | | G |
| 23S_GPbac_P39 | 23275 | CTCCCGGATTCCGACGGAATTTCACGTGTTCCGCCGTACTCAGGATCCA |
| | | C |
| 23S_GPbac_P40 | 23276 | GTTTTGACTACAGGGCTGTTACCTCCTATGGCGGGCCTTTCCAGACCTC |
| | | T |
| 23S_GPbac_P41 | 23277 | CTTTGTAACTCCGTACAGAGTGTCCTACAACCCCAAGAGGCAAGCCTCT |
| | | T |
| 23S_GPbac_P42 | 23278 | CGTTTCGCTCGCCGCTACTCAGGGAATCGCATTTGCTTTCTCTTCCTCC |
| | | G |
| 23S_GPbac_P43 | 23279 | CAGTTCCCCGGGTCTGCCTTCTCATATCCTATGAATTCAGATATGGATA |
| | | C |
| 23S_GPbac_P44 | 23280 | GGTGGGTTTCCCCATTCGGAAATCTCCGGATCAAAGCTTGCTTACAGCT |
| | | C |
| 23S_GPbac_P45 | 23281 | TGTTCGTCCCGTCCTTCATCGGCTCCTAGTGCCAAGGCATCCACCGTGC |
| | | G |
| 16S:A1 | 23282 | AAACTAGATTCGAATATAACAAAACATTACATCCTCATCCAATCCCTTT |
| | | T |
| 16S:A2 | 23283 | GCGGTGTGTGCAAGGAGCAGGGACGTATTCACCGCGCGATTGTGACACG |
| | | C |
| 16S:A3 | 23284 | GCCTTTCGGCGTCGGAACCCATTGTCTCAGCCATTGTAGCCCGCGTGTT |
| | | G |
| 16S:A4 | 23285 | GCATACGGACCTACCGTCGTCCACTCCTTCCTCCTATTTATCATAGGCG |
| | | G |
| 16S:A5 | 23286 | CGGCATCCAAAAAAGGATCCGCTGGTAACTAAGAGCGTGGGTCTCGCTC |
| | | G |
| 16S:A6 | 23287 | CAACCTGGCTATCATACAGCTGTCGCCTCTGGTGAGATGTCCGGCGTTG |
| | | A |
| 16S:A7 | 23288 | AGGCTCCACGCGTTGTGGTGCTCCCCCGCCAATTCCTTTAAGTTTCAGT |
| | | C |
| 16S:A8 | 23289 | CCAGGCGGCGGACTTAACAGCTTCCCTTCGGCACTGGGACAGCTCAAAG |
| | | C |
| 16S:A9 | 23290 | TCCGCATCGTTTACAGCTAGGACTACCCGGGTATCTAATCCGGTTCGCG |
| | | C |
| 16S:A10 | 23291 | TTCCCACAGTTAAGCTGCAGGATTTCACCAGAGACTTATTAAACCGGCT |
| | | A |
| 16S:A12 | 23292 | CTCTTATTCCAAAAGCTCTTTACACTAATGAAAAGCCATCCCGTTAAGA |
| | | A |
| 16S:A13 | 23293 | CCCCCGTCGCGATTTCTCACATTGCGGAGGTTTCGCGCCTGCTGCACCC |
| | | C |
| 16S:A14 | 23294 | TTGTCTCAGGTTCCATCTCCGGGCTCTTGCTCTCACAACCCGTACCGAT |
| | | C |
| 16S:A16 | 23295 | CATTACCTAACCAACTACCTAATCGGCCGCAGACCCATCCTTAGGCGAA |
| | | A |
| 16S:A17 | 23296 | AAACCATTACAGGAATAATTGCCTATCCAGTATTATCCCCAGTTTCCCA |
| | | G |
| 16S:A18 | 23297 | AAGGGTAGGTTATCCACGTGTTACTGAGCCGTACGCCACGAGCCTAAAC |
| | | T |
| 23S:A1 | 23298 | ACCTAGCGCGTAGCTGCCCGGCACTGCCTTATCAGACAACCGGTCGACC |
| | | A |
| 23S:A2 | 23299 | CGTTCCTCTCGTACTGGAGCCACCTTCCCCTCAGACTACTAACACATCC |
| | | A |
| 23S:A3 | 23300 | CCTGTCTCACGACGGTCTAAACCCAGCTCACGTTCCCCTTTAATGGGCG |
| | | A |
| 23S:A4 | 23301 | GGTGCTGCTGCACACCCAGGATGGAAAGAACCGACATCGAAGTAGCAAG |
| | | C |
| 23S:A5 | 23302 | GGCTCTTGCCTGCGACCACCCAGTTATCCCCGAGGTAGTTTTTCTGTCA |
| | | T |
| 23S:A6 | 23303 | AGGAGGACTCTGAGGTTCGCTAGGCCCGGCTTTCGCCTCTGGATTTCTT |
| | | G |
| 23S:A7 | 23304 | CAAAGTAAGTTAGAAACACAGTCATAAGAAAGTGGTGTCTCAAGAACGA |
| | | A |
| 23S:A8 | 23305 | GACTTATAATCGAATTCTCCCACTTACACTGCATACCTATAACCAAGCT |
| | | T |
| 23S:A9 | 23306 | GTAAAACTCTACGGGGTCTTCGCTTCCCAATGGAAGACTCTGGCTTGTG |
| | | C |
| 23S:A10 | 23307 | TCACTAAGTTCTAGCTAGGGACAGTGGGGACCTCGTTCTACCATTCATG |
| | | C |
| 23S:A11 | 23308 | CGACAAGGCATTTCGCTACCTTAAGAGGGTTATAGTTACCCCCGCCGTT |
| | | T |
| 23S:A12 | 23309 | AACTGAACTCCAGCTTCACGTGCCAGCACTGGGCAGGTGTCGCCCTCTG |
| | | T |
| 23S:A13 | 23310 | CTAGCAGAGAGCTATGTTTTTATTAAACAGTCGGGCCCCCCTAGTCACT |
| | | G |
| 23S:A14 | 23311 | TTAAAACGCCTTAGCCTACTCAGCTAGGGGCACCTGTGACGGATCTCGG |
| | | T |
| 23S:A15 | 23312 | ACAAAACTAACTCCCTTTTCAAGGACTCCATGAATCAGTTAAACCAGTA |
| | | C |
| 23S:A16 | 23313 | ATAATGCCTACACCTGGTTCTCGCTATTACACCTCTCCCCAGGCTTAAA |
| | | C |
| 23S:A17 | 23314 | CAATCCTACAAAACATATCTCGAAGTGTCAGAAATTAGCCCTCAACGTC |
| | | A |
| 23S:A18 | 23315 | CTTTGCTGCTACTACTACCAGGATCCACATACCTGCAAGGTCCAAAGGA |
| | | A |
| 23S:A19 | 23316 | CAACCCACACAGGTCGCCACTCTACACAATCACCAAAAAAAAGGTGTTC |
| | | C |
| 23S:A20 | 23317 | GGATTAATTCCCGTCCATTTTAGGTGCCTCTGACCTCGATGGGTGATCT |
| | | G |
| 23S:A21 | 23318 | AGGGTGGCTGCTTCTAAGCCCACCTTCCCATTGTCTTGGGCCAAAGACT |
| | | C |
| 23S:A22 | 23319 | GTATTTAGGGGCCTTAACCATAGTCTGAGTTGTTTCTCTTTCGGGACAC |
| | | A |
| 23S:A23 | 23320 | CCTCACTCCAACCTTCTACGACGGTGACGAGTTCGGAGTTTTACAGTAC |
| | | G |
| 23S:A24 | 23321 | CCCTAAACGTCCAATTAGTGCTCTACCCCGCCACCAACCTCCAGTCAGG |
| | | C |
| 23S:A25 | 23322 | AATAGATCGACCGGCTTCGGGTTTCAATGCTGTGATTCCAGGCCCTATT |
| | | A |
| 23S:A26 | 23323 | ACAACGCTGCGGGCATATCGGTTTCCCTACGACTACAAGGATAAAAACC |
| | | T |
| 23S:A27 | 23324 | ACAAAGAACTCCCTGGCCCGTGTTTCAAGACGGACGATGCAACACTAGT |
| | | C |
| 23S:A28 | 23325 | ACAATGTTACCACTGATTCTTTCGGAAGAATTCATTCCTTACGCGCCAC |
| | | A |
| 23S:A29 | 23326 | CTGGTTTCAGGTACTTTTCACCCCCCTATAGGGGTACTTTTCAGCATTC |
| | | C |
| 23S:A30 | 23327 | CTCTATCGGTCTTGAGACGTATTTAGAATTGGAAGTTGATGCCTCCCAC |
| | | A |
| 23S:A31 | 23328 | ATCACCCTCTACGGTTCTAAAATTCCAAATAAAATTCGATTTATCCCAC |
| | | G |
| 23S:A32 | 23329 | TCTATACACCACATCTCCCTAATATTACTAAAAGGGATTCAGTTTGTTC |
| | | T |
| 23S:A33 | 23330 | GCCGTTACTAACGACATCGCATATTGCTTTCTTTTCCTCCGCCTACTAA |
| | | G |
| 23S:A34 | 23331 | GGGTTCCCAATCCTACACGGATCAACACAAAAAAAATGTGCTAGGAAGT |
| | | C |
| 5S:A1 | 23332 | ACTACTGGGATCGAAACGAGACCAGGTATAACCCCCATGCTATGACCGC |
| | | A |
| MM_16S_P10 | 23333 | GCGTATGCCTGGAGAATTGGAATTCTTGTTACTCATACTAACAGTGTTG |
| | | C |
| MM_16S_P11 | 23334 | GATTAACCCAATTTTAAGTTTAGGAAGTTGGTGTAAATTATGGAATTAA |
| | | T |
| MM_16S_P12 | 23335 | AGCTTGAACGCTTTCTTTATTGGTGGCTGCTTTTAGGCCTACAATGGTT |
| | | A |
| MM_16S_P13 | 23336 | ATTATTCACTATTAAAGGTTTTTTCCGTTCCAGAAGAGCTGTCCCTCTT |
| | | T |
| MM_16S_P14 | 23337 | CTTACTTTTTGATTTTGTTGTTTTTTTAGCAAGTTTAAAATTGAACTTA |
| | | A |
| MM_16S_P15 | 23338 | AACCAGCTATCACCAAGCTCGTTAGGCTTTTCACCTCTACCTAAAAATC |
| | | T |
| MM_16S_P7 | 23339 | AATACTTGTAATGCTAGAGGTGATGTTTTTGGTAAACAGGCGGGGTTCT |
| | | T |
| MM_16S_P8 | 23340 | TTTATCTTTTTGGATCTTTCCTTTAGGCATTCCGGTGTTGGGTTAACAG |
| | | A |
| MM_16S_P9 | 23341 | TTATTTATAGTGTGATTATTGCCTATAGTCTGATTAACTAACAATGGTT |
| | | A |
| RN_16S_P4 | 23342 | AGTGATTGTAGTTGTTTATTCACTATTTAAGGTTTTTTCCTTTTCCTAA |
| | | A |
| RN_16S_P5 | 23343 | TGGCTATATTTTAAGTTTACATTTTGATTTGTTGTTCTGATGGTAAGCT |
| | | T |
| RN_16S_P6 | 23344 | TTTTTTTAATCTTTCCTTAAAGCACGCCTGTGTTGGGCTAACGAGTTAG |
| | | G |
| RN_16S_P7 | 23345 | TGTTGGGTTAGTACCTATGATTCGATAATTGACAATGGTTATCCGGGTT |
| | | G |
| RN_16S_P8 | 23346 | AGGAGAATTGGTTCTTGTTACTCATATTAACAGTATTTCATCTATGGAT |
| | | C |
| RN_16S_P9 | 23347 | TTTGTGATATAGGAATTTATTGAGGTTTGTGGAATTAGTGTGTGTAAGT |
| | | A |
| MM_28S_P1 | 23348 | GCCGGGGAGTGGGTCTTCCGTACGCCACATTTCCCACGCCGCGACGCGC |
| | | G |
| MM_28S_P10 | 23349 | ACCTCGGGCCCCCGGGCGGGGCCCTTCACCTTCATTGCGCCACGGCGGC |
| | | T |
| MM_28S_P14 | 23350 | TCGCGTCCAGAGTCGCCGCCGCCGCCGGCCCCCCGAGTGTCCGGGCCCC |
| | | C |
| MM_28S_P15 | 23351 | CGCTGGTTCCTCCCGCTCCGGAACCCCCGCGGGGTTGGACCCGCCGCCC |
| | | C |
| MM_28S_P16 | 23352 | CGCCGACCCCCGACCCGCCCCCCGACGGGAAGAAGGAGGGGGGAAGAGA |
| | | G |
| MM_28S_P17 | 23353 | GGGACGACGGGGCCCCGCGGGGAAGAGGGGAGGGCGGGCCCGGGCGGAA |
| | | A |
| MM_28S_P18 | 23354 | GGCGCCGCGCGGAAAACCGCGGCCCGGGGGGCGGACCCGGCGGGGGAAC |
| | | A |
| MM_28S_P19 | 23355 | CCCCCACACGCGCGGGACACGCCCGCCCGCCCCCGCCACGCACCTCGGG |
| | | A |
| MM_28S_P2 | 23356 | CACCCGCTTTGGGCTGCATTCCCAAGCAACCCGACTCCGGGAAGACCCG |
| | | A |
| MM_28S_P20 | 23357 | TGGAGCGAGGCCCCGCGGGGAGGGGACCCGCGCCGGCACCCGCCGGGCT |
| | | C |
| MM_28S_P21 | 23358 | CGAGGCCGGCGTGCCCCGACCCCGACGCGAGGACGGGGCCGGGCGCCGG |
| | | G |
| MM_28S_P22 | 23359 | TCCCCGGAGCGGGTCGCGCCCGCCCGCACGCGCGGGACGGACGCTTGGC |
| | | G |
| MM_28S_P23 | 23360 | TCCACACGAACGTGCGTTCAACGTGACGGGCGAGAGGGCGGCCCCCTTT |
| | | C |
| MM_28S_P24 | 23361 | TCCCAAGACGAACGGCTCTCCGCACCGGACCCCGGTCCCGACGCCCGGC |
| | | G |
| MM_28S_P25 | 23362 | CCGCCGCGGGGACGACGCGGGGACCCCGCCGAGCGGGGACGGACGGGGA |
| | | C |
| MM_28S_P3 | 23363 | GCACCGCCACGGTGGAAGTGCGCCCGGCGGCGGCCGGTCGCCGGCCGGG |
| | | G |
| MM_28S_P6 | 23364 | CCCACCGGGCCCCGAGAGAGGCGACGGAGGGGGGTGGGAGAGCGGTCGC |
| | | G |
| MM_28S_P7 | 23365 | CCCGGCCCCCACCCCCACGCCCGCCCGGGAGGCGGACGGGGGGAGAGGG |
| | | A |
| MM_28S_P8 | 23366 | TATCTGGCTTCCTCGGCCCCGGGATTCGGCGAAAGCGCGGCCGGAGGGC |
| | | T |
| MM_28S_P9 | 23367 | CGCCGCCGACCCCGTGCGCTCGGCTTCGTCGGGAGACGCGTGACCGACG |
| | | G |
| RN_28S_P12 | 23368 | GCGCCCCCCCGCACCCGCCCCGTCCCCCCCGCGGACGGGGAAGAAGGGA |
| | | G |
| RN_28S_P14 | 23369 | CGAACCCCGGGAACCCCCGACCCCGCGGAGGGGGAAGGGGGAGGACGAG |
| | | G |
| RN_28S_P16 | 23370 | CACCCGGGGGGGCGACGAGGCGGGGACCCGCCGGACGGGGACGGACGGG |
| | | G |
| RN_28S_P17 | 23371 | GCCAACCGAGGCTCCTTCGGCGCTGCCGTATCGTTCCGCTTGGGCGGAT |
| | | T |
| RN_28S_P4 | 23372 | CCCGGGCCCCCGGACCCCCGAGAGGGACGACGGAGGCGACGGGGGGTGG |
| | | G |
| RN_28S_P5 | 23373 | TGGGAGGGGCGGCCCGGCCCCCGCGACCGCCCCCCTTTCCGCCACCCCA |
| | | C |
| RN_28S_P6 | 23374 | GGGAGAGGCCGGGGGGAGAGCGCGGCGACGGGTATCCGGCTCCCTCGGC |
| | | C |
| RN_28S_P7 | 23375 | CGCTGCTGCCGGGGGGCTGTAACACTCGGGGGGGGGTGGTCCGGCGCCC |
| | | A |
| RN_28S_P8 | 23376 | CGCCGCCGACCCCGTGCGCTCGGCTTCGCTCCCCCCCACCCCGAGAAGG |
| | | G |
| | 23377 | CTCATCCCCACCCTTTTCAACGGATGTGGGTTCGGTCCTCCACTGCCTC |
| | | T |
| | 23378 | AGCCGGGGCTTCTTAGTCAGGTACCGTCATTTTTTCTTCCCTGCTGATA |
| | | G |
| | 23379 | TAGATGATCAACCTACCGGGTTAGAGTAGCCATCACACAAGGGTAGTAT |
| | | C |
| | 23380 | CAGATGGCGGCATTGTCACTGCTCCGTCTCCACGTCACTCCTGAAGGTA |
| | | G |
| | 23381 | GGGAAGCAGGGTGGACCACCACCCAAGGCTAAATACTACCTGATGACCG |
| | | A |
| | 23382 | ACTAAACTTCACTCCGCATCACGTCTTCCCATTGCCGCACGGTTTTTCC |
| | | A |
| | 23383 | GTTCCTCCGCTTGTGCGGGCCCCCGTCAATTCCTTTGAGTTTCACCGTT |
| | | G |
| | 23384 | GCCCCAGACAACCATCGCTGGGGTTGAGCTACCTCACTGCGTCCCTCCG |
| | | C |
| | 23385 | CTTTCGTGCGGGTCGGAACTTACCCGACAAGGAATTTCGCTACCTTAGG |
| | | A |
| | 23386 | CAGGCGTCAGCTCGTATACGTCATCTTTCGATTTAGCACAAACCTGTGT |
| | | T |
| | 23387 | GGCTTCATGCTTAGATGCTTTCAGCACTTATCCCGTCCGCACATAGCTA |
| | | C |
| | 23388 | ATTACCGCGGCTGCTGGCACGTAGTTAGCCGGGGCTTCTTAGTCAGGTA |
| | | C |
| | 23389 | TTCACGCAAGATTTCTCGTGTCCCGCGCTACTCAGGATACCACTACGCT |
| | | T |
| | 23390 | ATCTAAAGTCTTCTCGTTTAAAATACTGGGCTGTTACCATCTGTGGCGG |
| | | A |
| | 23391 | GGGCTCTGACTTCTTGTAGGCATACGGTTTCAGGTTCTCTTTCACTCCG |
| | | C |
| | 23392 | GCTATGGATCGTCGGTTTGGTGGGCCGTTACCCCGCCAACTGCCTAATC |
| | | C |
| | 23393 | ATGACTTCAGCATGGGCGGTCATAACGCGGTACCAGAATATCAACTGGT |
| | | T |
| | 23394 | TTTCAGTTCAGGCGGTTCCCCTCATATACCTATGTATTCAGTATATGAT |
| | | G |
| | 23395 | CGAAAGGGGAGACGGCACGGGCCCGGAGGTTAGCGCCCCAGGCCTCGGT |
| | | T |
| | 23396 | TTTCGTCCCTGCTCGACTTGTAGGTCTCGCAGTCAAGCTCCCTTGTGCC |
| | | T |
| | 23397 | CTCTTATCGATGACATCTCCTCTTAACCTTCCAGCACCGGGCAGGTGTC |
| | | A |
| | 23398 | TCGTCCCTGACAACAGAGCTTTACGATCCGAAAACCTTCTTCACTCACG |
| | | C |
| | 23399 | ACCCAACATCTCACGACACGAGCTGACGACAACCATGCACCACCTGTCA |
| | | C |
| | 23400 | GTCCTCTCGTACTAAGGACAGAGCTCCTCAAATATCCTGCGCCCACGAC |
| | | A |
| | 23401 | TTATAGTTACGGCCGCCGTTTACCGGGGCTTCAATTCAGAGCTCTCACT |
| | | C |
| | 23402 | CGTTTCTACGAGTTAGAACTCAAATAATCAAAGGGCCGTATTTCAACAG |
| | | C |
| | 23403 | CACCAGTGTCGGTTTAGGGTACGGGCGGACCCGCCACCTCGCTCACGAA |
| | | G |
| | 23404 | CGTCCATCCCGGTCCTCTCGTACTAGGGACAGCTCCTCTCAAATATCCT |
| | | G |
| | 23405 | AGCTGACGCTCATGTTTCCAAGTCTCCCGCCTATCCTGTACATAGATTT |
| | | C |
| | 23406 | CTCTTTTAATGAGTGGCTGCTTCTAAGCCAACATCCTGGTTGTCTAAGC |
| | | A |
| | 23407 | ACAGCTTTTCTCGCCATCTTCCATCCCAGACTTCGGTACTAACTTCCCT |
| | | C |
| | 23408 | CATAGACCTGTGTTTTTGCTAAACAGTTGCTTGAGCCTATTCTCTGCGG |
| | | C |
| | 23409 | TCACGGTACTGGTTCACTATCGCTCACTCGTTTATATTTAGCCTTGGCG |
| | | G |
| | 23410 | ACTCACCCTGCCCCGATTAACGTTGGACAGGAACCCTTGGTCTTCCGGC |
| | | G |
| | 23411 | GGCTACAGTAAAGCTCCATGGGGTCTTTCCGTCTTGTCGCGGGTAACCG |
| | | G |
| | 23412 | GTACGATTTGATGTTACCTGATGCTTAGAGGCTTTTCCTGGAAGCAGGG |
| | | C |
| | 23413 | AAGTCATTGGCATTCGGAGTTTGACTGAATTCGGTAACCCGGTAGGGGC |
| | | C |
| | 23414 | GGTTACCTTGTTACGACTTCACCCCAGTCATGAATCACAAAGTGGTAAG |
| | | T |
| | 23415 | CCCTTCTCCCGTTGGCCTTAGAATCTTCTTCCTACCTACCTGTGTCGGT |
| | | T |
| | 23416 | TACCTTCACTAAGGTTCTTTCCGACGCTAGCCCTAAAGCTATTTCGGGG |
| | | A |
| | 23417 | CCCCCCTGCTTCCCACAGGGTTTCACGTGTCCCGTGGTACTCTGGATCA |
| | | C |
| | 23418 | GACCGGCCTTCCCATGCCGTTCGGTTAACAGATTAAGTCTTAAAAGCAG |
| | | T |
| | 23419 | TTCCTTTGACCCCCCCCCCCCCCCTCCCTATCCCCCCCCGCCCCCCCCC |
| | | A |
| | 23420 | CCCCCTCAGTTCTCCAGCGCCCACGGCAGATAGGGACCGAACTGTCTCA |
| | | C |
| | 23421 | CTTTGGGAGGCAACCGCCCCAGTTAAACTACCCGCCAGGCACTCTCCCC |
| | | G |
| | 23422 | ACATGATCGGTTCACACACTCACCACCACACAAGACCTCAAAGAGACCC |
| | | C |
| | 23423 | CCAGCACCGGGCAGGTGTCACCCCCTATACTTCGTCTTGCGACTTCGCA |
| | | G |
| | 23424 | GTACCGCTTTAATGGGCGAACAGCCCAACCCTTGGGACTGACTACAGCC |
| | | C |
| | 23425 | CCATTGCGGAAGATTCCCTACTGCTGCCTCCCGTAGGAGTCTGGGCCGT |
| | | G |
| | 23426 | TTCTCTGCGGCTCATGTTTCCATGAGCACCCCTTATCCCTAAGTTACGG |
| | | G |
| | 23427 | TTTGACTCATATCACACCTCACTGCTTAGACGTGCACTTCCAATCGCAC |
| | | G |
| | 23428 | CCGGTTTGCCCTCTTCCGCGTTCGCTCGCCACTACTTACGGAATCTCGT |
| | | T |
| | 23429 | TACCTGATCGACTTGTCAGTCTCCCAGTCAAGCGCCCTTATGCCATTAC |
| | | A |
| | 23430 | TCCCAAGCTTCGGTGTATGATTTAGCCCCGTTAAATTTTCGGCGCAGGG |
| | | T |
| | 23431 | CCTAGTCTTTTCAGTGCTCTACAAGCCGTGGTCATGGTTCGAGGCTGTA |
| | | C |
| | 23432 | TCGGGGTGCTTTTCACCTTTCCTTCACAGTACTCGTACGCTATCGGTCT |
| | | C |
| | 23433 | GGTCTGGGCTCTTTCCCTTTCGACTGCCCAACTTATCTCGTGCAGTCTG |
| | | A |
| | 23434 | GCACTCCACAGCTCCTTCCGGTACTGCTTCTTCGCGTTAAGAATGCTCC |
| | | T |
| | 23435 | GACTGCGAACCGTGAGCATTCGGAGTTCGTCAGGACTCGATAGGCGGTG |
| | | A |
| | 23436 | GTAAACAGTCGCTTGGGTCTATTCTCTGCGGCCCATTCCTGGGCACTCC |
| | | T |
| | 23437 | CCCACTTTCGTGCCTGCTCGACGTGTCTGTCTCGCAGTCAAGCCACCTT |
| | | G |
| | 23438 | TTTCCCTGCGGCTCCGGGACTTTATCCCTTAACCTTGCCAGTATGCACA |
| | | A |
| | 23439 | GGGCGCCTTCGCTTCGTAGCAGCTTTTCTCGCCAGCGTGAATTCAGCAG |
| | | C |
| | 23440 | TTCCGCCTGACCTTAGCTCCCGACTAACCCTGAGCGGACGAACCTTCCT |
| | | C |
| | 23441 | CTCTCAGGTCGGCTACTGATCGTCGGCTTGGTAGGCCGTTACCCCACCA |
| | | A |
| | 23442 | CTTCCTCCGGCTACTTAGATGTTTCAGTTCACCGGGTTCCCCTCCATAC |
| | | G |
| | 23443 | TACCTGATCGACTTGTTAGTCTCCCAGTCAAGCGCCCTTATGCCATTAC |
| | | A |
| | 23444 | GCAACCGCCCCAGTTAAACTACCCGCCAGGCACTGTCCCTGAACAGGAT |
| | | G |
| | 23445 | TTCCTCGTGTCTCGCCGTACTCAGGATCCCATTAGGCTTCGATCGGATT |
| | | T |
| | 23446 | ACGGATCGTCGCCTTGGTAGGCCTTTACCCCACCAACTAGCTAATGCAC |
| | | C |
| | 23447 | TGTCGGTTTGGGGTACGGGCGGCAACGCGCCTGACGCCGGGGCTTTTCT |
| | | C |
| | 23448 | CGGTTTCCGTTCGCGCTGAGGGAACCTTTGGGCGCCTCCGTTACATTTT |
| | | G |
| | 23449 | TTATAGTTACGGCCGCCGTTTACTGGGGCTTCAATTCAATGCTCTCACA |
| | | T |
| | 23450 | TGTAGCATGCGTGAAGCCCTGGACGTAAGGGGCATGATGATCTGACGTC |
| | | A |
| | 23451 | AGCACCGGGCAGGTGTCAGCACCTATACGTCAGCTCTCGCTTTCGCAGA |
| | | T |
| | 23452 | GCTGATAGGACGCGACCCCATCCCACGCCGATAGAATCTTTCCCACAAT |
| | | C |
| | 23453 | GTTTCAGGTTCTATTTCACTCCCCTCCCGGGGTGCTTTTCACCTTTCCC |
| | | T |
| | 23454 | CGGCTCCCATTCCGTGTCACCCCTGCGCTCACCTACCACGGCTACGCTC |
| | | C |
| | 23455 | TAGAGGCTTTTCTTGGCAGTGTGGAATCAGGAACTTCGCTACTATATTT |
| | | C |
| | 23456 | GGGGAATCTCGGTTGATTTCTTTTCCTCGGGGTACTTAGATGTTTCAGT |
| | | T |
| | 23457 | CATACCAGAGGTTCGTCCACCCAGGTCCTCTCGTACTATGGGCAGGCCT |
| | | C |
| | 23458 | CGCGGGTCCATCTTATACCACCGGAGTTTTTCACACTGAGCCATGCAGC |
| | | T |
| | 23459 | CTCCCGCAACCCCGGCCACGCAACCCCCGACGGGTATCGCGCGCGGCCG |
| | | G |
| | 23460 | TTCTCTGCGGCTCCATCTCTGGAGCACCCCTTCTCCCGAAGTTACGGGG |
| | | T |
| | 23461 | GAACATCCGGCATTACCACCCGTTTCCAGGAGCTATTCCGGAGCATGGG |
| | | G |
| | 23462 | AGGTCCCGGGGTCTTTTCGTCCTTCTGCGCTTAACGAGCATCTTTACTC |
| | | G |
| | 23463 | GCTTCGGTGGCATGTTTTAGCCCCGGACATTTTCGGCGCAGGACCTCTC |
| | | G |
| | 23464 | GCTTCAAAGCCTCCGACCTATCCTACACATCACGTGCCCAGATTCAATG |
| | | A |
| | 23465 | TACTTTATTTCGCTCCACATCACGGCTTCGTCTCATGCACAGCGGATTT |
| | | G |
| | 23466 | CATGGGGTCTTTCCGTCCTGTCGCGGGTAACCTGCATCTTCACAGGTAC |
| | | T |
| | 23467 | GACCTTCCTCTCAGAACCCCTACTGATCGTTGCCTTGGTGGGCCGTTAC |
| | | C |
| | 23468 | ATGTTTCAGTTCCCCGGGTTCCCCTCCATACGTTATGGATTGGCGTATG |
| | | G |
| | 23469 | TTAACGCTTTCGCTTGGCCGCTTACTGTATATCGCAAACAGCGAGTATT |
| | | C |
| | 23470 | CCACGGAAAACCACCTCCGCGGCCGGCTCCCATTCCGTGTCACCCCTGC |
| | | G |
| | 23471 | TCGTAACTCGCCGGTTCATTCTACAAAAGGCACGCTCTCACCCATTAAC |
| | | G |
| | 23472 | AGGATGCGACGAGCCGACATCGAGGTGCCAAACCTCCCCGCCGATATGG |
| | | A |
| | 23473 | TCCCCGGAGTACCTTTTATCCTTTGAGCGATGTCCCTTCCATACGGAAA |
| | | C |
| | 23474 | CGGCTTCCCTACTTTAATTTCGGTCCCTTACGCCCGGGTCAACCAACGC |
| | | C |
| | 23475 | CTGCTTCCAAGCCAACATCCTAGCTGTCTTAGCAGTCAGACTTCGTTAG |
| | | T |
| | 23476 | GCTACTCATACCGGCATTCTCACTTCTATGCGTTCCAGCGCTCCTCACG |
| | | G |
| | 23477 | GCCTTCGGTGTCTGCCTTATACCCGATTATTATCCATGCCCGGACCCTC |
| | | G |
| | 23478 | CCGGCTTTCCCAAAACCGTTCCACTAACATTGCAGAATCTTAAATGCAG |
| | | T |
| | 23479 | TACCTGTGTCGGTTTGCGGTACGGGCACCTTAGTATACACATAAGCTTT |
| | | T |
| | 23480 | TGTTACGCACTCTTTCAAGGGTGGCTGCTTCTGAGCCAACCTCCTGGCT |
| | | G |
| | 23481 | CTGGAGACCTTGGATATTCGGCCACAAGGATTCTCACCTTGTTCTCGCT |
| | | A |
| | 23482 | CAGTAACCCGCAAGGCTGCACCTAAATGCATTTCGGGGAGTACGAGCTA |
| | | T |
| | 23483 | AAACCTTGGATATTCGGCCTAGAGGATTCTCACCTCTATCTCGCTACTC |
| | | A |
| | 23484 | CGCTTGTGCGGGCCCCCGTCAATTTCTTTGAGTTTTAGCCTTGCGACCG |
| | | T |
| | 23485 | ACCGGGACACGTGATCCCACAACACCGGCAACGCAACCCCCGACGGGTA |
| | | T |
| | 23486 | GCTTTTCTCGCCTTCAGCCAAGTGTGCTTCCCTACTCTAATTTCGGTCC |
| | | C |
| | 23487 | CACTACTCACGGAGTATCCCTTCCTGCAGGTACTGAGATGTTTCACTTC |
| | | C |
| | 23488 | GATTGGAATTTCTCCGCTACCCACAGTTCATCCGCTACCATTTCAACGG |
| | | G |
| | 23489 | TTCCACGAGTCCCGCGCTACTCGGGAGACACCATCCATGGTGCACGCGC |
| | | A |
| | 23490 | GTCTTTTCGTCCCATCGCGGGTAATCGGCATCTTCACCGATACTACAAT |
| | | T |
| | 23491 | CCGTACATCATCTCGATGGCATTCGGAGTTTGATATTCTTTGGTAAGCT |
| | | T |
| | 23492 | GGGCTTGGCTACCCGGCTATAGACTTGGCAGTCTAACCGGTGCACCAGC |
| | | G |
| | 23493 | ACTTTCGTTACTGCTCGACCCGTCAGTCTCGCAGTTAGGCTCGCTTCTG |
| | | C |
| | 23494 | CTACTGTTTCTCCGCGTATACAACGCTCCCCTACCCAATCCATTACTGG |
| | | A |
| | 23495 | ACTTATAGTCAGCGCCCCTTCTCCCGAAGTTACGGGGCCATTTTGCCGA |
| | | G |
| | 23496 | CTTCCAAGCCAACATCCTAGCTGTCTTAGCAATCTGACTTCGTTAGTTC |
| | | A |
| | 23497 | CCTCGGCAACTGGCGTTACCGATTCTCAGCCTCCCACCTATCCTGTACA |
| | | T |
| | 23498 | CCATAACGGCTCCCATCATCACACCTCGCCATGCATGCCATGCGGATTT |
| | | G |
| | 23499 | CGTGCAGGTCGGAACTTACCCGACAAGGAATTTCGCTACCTTAGGACCG |
| | | T |
| | 23500 | CATCCAAACACTTTTCAACGTGTCCTGGTTCGGTCCTCCAGTGCGTTTT |
| | | A |
| | 23501 | GCCCTAAAGCTATTTCGGGGAGAACCAGCTATATCCGGGTTCGATTGGA |
| | | A |
| | 23502 | CAGTAAAGCTCTACGGGGTCTCTCCGTCCAGTCGCGGGTAATGGGCATC |
| | | T |
| | 23503 | GGAACCTTTGGGCGCCTCCGTTACGCTTTAGGAGGCGACCGCCCCAGTC |
| | | A |
| | 23504 | CCCGCCGTGTGTCTCCCGTGATAACATTCTCCGGTATTCGCAGTTTGCA |
| | | T |
| | 23505 | CAGGTGTCAGCCCCTATACTTCATCTTTCGATTTGGCAGAGACCTGTGT |
| | | T |
| | 23506 | GACTCTTCCCAGAGTCTTCTTCTATTCCCTTGGCTGCTTTATCGCAGTC |
| | | C |
| | 23507 | GGCAACCCAACAACCCACACACCATCATCTTCAGCTACAGGACTATCAC |
| | | C |
| | 23508 | AGCACCGGGCAGGTGTCAGGCTATATACCTCATGTTTCCATTTCGCATA |
| | | G |
| | 23509 | TTGCATACTATTAAGTTCAGCTCGGAAGGTGGATTTGCCTGCCTTCCTC |
| | | A |
| | 23510 | CCGGCGGATTTGCCAACCGGACACCCTACACCCTTGGACCAGGTCAATT |
| | | C |
| | 23511 | GCCGGTTATAACGGTTCATATCACCTTACCGACGCTTATCGCAGATTAG |
| | | C |
| | 23512 | CTGATACAACCAGTATCGCTCCGTCCATTTGCGCAGCACCAGTAATCAT |
| | | G |
| | 23513 | TCTTTGAATGTATGGCTGCTTCTGAGCCAACATCCTAGTTGTCTTCGAG |
| | | A |
| | 23514 | TGGATTCTCGCCCTCTTGTACTCATTTCGACTACGGGACTGTTACCCTC |
| | | T |
| | 23515 | CAGTATCAACTGCAATTTTACGGTTGAGCCGCAAACTTTCACAACTGAC |
| | | T |
| | 23516 | TTCTCTGCGGCTTACCTTCGTAAGCACCCCTTCTCCCGAAGTTACGGGG |
| | | T |
| | 23517 | ATTACTAGCGATTCCAGCTTCACGCAGTCGAGTTGCAGACTGCGATCCG |
| | | A |
| | 23518 | CATAGACCTGTGTTTTTGCTAAACAGTTGCTTGAGCCTATTCTCTGCGG |
| | | C |
| | 23519 | TATAAGTCGAGGCTGCACCTAAATGCATTTCGGGGAGTACGAGCTATCT |
| | | C |
| | 23520 | TCAACCTGTTGTCCATCGCCTACGCCTTTCGGCCTCGGCTTAGGTCCCG |
| | | A |
| | 23521 | GGGGTAGCTTTTATCCGTTGAGCGATGGCCCTTCCATGCGGAACCACCG |
| | | G |
| | 23522 | ATTAACCTATGGATTCAGTTAATGATAGTGTGTCGAAACACACTGGGTT |
| | | T |
| | 23523 | CCTCTTAACCTTCCAGCACCGGGCAGGCGTCAGCCCCTATACTTCGCCT |
| | | T |
| | 23524 | AAAAAGCAAGCTCTCTCAAGTTCCGTTCGACTTGCATGTGTTAGGCGCG |
| | | C |
| | 23525 | GGGCCCGTGTCTCAGTGCCCATGTGGGGGACCCTCCTCAGGCCGGCTAT |
| | | C |
| | 23526 | GACTTAACAAACCGCCTGCGTGCGCTTTACGCCCAGTAATTCCGATTAA |
| | | C |
| | 23527 | CAACCTGTTGTCCATCGGCTACGCTTTTCAGCCTCACCTTAGGTCCCGA |
| | | C |
| | 23528 | CACACACCACCACCACCCGAAAGCGGAGGCGGGGCGCGGGCAGATTGGT |
| | | T |
| | 23529 | CCGTTCGACTTGCATGTGTTAAGCACGCCGCCAGCGTTCATCCTGAGCC |
| | | A |
| | 23530 | GGCACCCTCTACGGCCAGGCCTTCAAGCCTGTTCCCCTGGCAAGCCGTT |
| | | T |
| | 23531 | GCCCTTCAAAAGCGTCCCTGTGTTTAAATCTTCGGAGGTTACGGAATTT |
| | | C |
| | 23532 | TCGTGGTGTGACGGGCGGTGTGTACAAGGCCCGGGAACGTATTCACCGC |
| | | G |
| | 23533 | TCCCGGGGTTCTTTTCACCGTTCCTTCACAGTACTATGCGCTATCGGTC |
| | | A |
| | 23534 | GACTGTTCGAGGTTAGACATCAAACGAGAACAGAGCGGTATTTCACCTT |
| | | G |
| | 23535 | CACCTTAGAGTGCCCAACTGAATGCTGGCAACTAAGATCAAGGGTTGCG |
| | | C |
| | 23536 | TATGGCACTTAAGCCGACACCTCACGGCACGAGCTGACGACAACCATGC |
| | | A |
| | 23537 | TCTCGTCCATTGACCAATATTCCTCACTGCTGCCTCCCGTAGGAGTTTG |
| | | G |
| | 23538 | TTTTCACCTTTCCCTCACGGTACTGGTTCGCTATCGGTCTCTCGGGAGT |
| | | A |
| | 23539 | TTCCCCATTCAGAGATCTCCGGATCAATGGATATTTGCTCCTCCCCGAA |
| | | G |
| | 23540 | TGAGCCAACATCCTGGTTGTCTGCGTATCTTCACATCGTTTTCCACTTA |
| | | A |
| | 23541 | TCGGAGTTTGATATTCTTCGGTAGGCTTTGACGCCCCCTAGGAAATTCA |
| | | G |
| | 23542 | CCTTCGGCTCCCCTATTCGGTTAACCTTGCTACAGAATATAAGTCGCTG |
| | | A |
| | 23543 | GTCTGGACCGTGTCTCAGTTCCAGTGTGGCTGGTCATCCTCTCAGACCA |
| | | G |
| | 23544 | TTATCCGTTCCGTACATAGCTGCCCAGCCGTGCCATTGGCATGACAACT |
| | | G |
| | 23545 | TTCACAGTACTATGCGCTATCGGTCACTAAGGAGTATTTAGCCTTGCGG |
| | | G |
| | 23546 | GACTCACCCGGGGACGACGAACGTGGCCCCGGAACCCTTGGTCATCCAG |
| | | C |
| | 23547 | GGCAACTTCAACCTGCACATGGATAGATCACCCGGTTTCGGGTCTACGT |
| | | A |
| | 23548 | ACCACGAATTCCGCCTGCCTCAACTGCACTCAAGATATCCAGTATCAAC |
| | | T |
| | 23549 | ACCACGCATTGCTGCATCCCAAGCTTCGGTTACATGCTTAGCCCCGTTA |
| | | C |
| | 23550 | CCAGAGCTTTTCTCGCCTCCGTCCAAGCATGCTTCCCTACTAAATTTCA |
| | | G |
| | 23551 | GCTGCACCTAAATGCATTTCGGAGAGAACCAGCTATCACGGAATTTGAT |
| | | T |
| | 23552 | CCTGGTTCGGGCCTCCAGTGAGTTTTACCTCACCTTCACCCTGCTCATG |
| | | G |
| | 23553 | ACTCACCCGGGGACGACGAACGTGGCCCCGGAACCCTTGGTCATCCAGC |
| | | G |
| | 23554 | AACATCCTGGTTGTCTGTGCAATTCCACATCCTTCTCCACTTAACGTGA |
| | | A |
| | 23555 | CTACGACTTCTCCCCATACAGAACGCTCTCCTACCATACATTAGATGTA |
| | | T |
| | 23556 | CACACTTAGCCCCGGACAACCATCACCGGGGATGAGCTACCTCACTGCG |
| | | T |
| | 23557 | GGGCGACCCTCCAACAGCGGCGGAACACATTTCGACTACGGGACTCTCA |
| | | C |
| | 23558 | CTCCGGTGCTTAACCTTGCCAGTGAGCGCAACTCGCCGGACCGTTCTAC |
| | | A |
| | 23559 | TTCGCAGGCTTACAGAACGCTCCCCTACCCAACAACGCATAAGCGTCGC |
| | | T |
| | 23560 | CCGTCAAGCCATGGGAGCCGGGTGTACCTAAAGTCGGTAACCGCAAGGA |
| | | G |
| | 23561 | TTACCTACACCATCACCTACACGCTTACACCAACAATCCACTAAGCGGC |
| | | A |
| | 23562 | GCGTACACCTGCAGCCTATCTACCTCGTAGTCTTCAAGGGGTCTTACCT |
| | | G |
| | 23563 | GCCGTCGCCCGTTAGTACCGGTCGGCTCCACCCCTCGCGGGGCTTCCAC |
| | | C |
| | 23564 | CACAGTGCTGTGTTTTTAATAAACAGTTGCAGCCAGCTGGTATCTTCGA |
| | | C |
| | 23565 | CTGTTATCCCCAGGGTAGCTTTTATCCGTTGAGCGACGGCATTTCCACT |
| | | C |
| | 23566 | ACTTAGATGCTTTCAGCACTTATCCAATCCCGACTTAGATACCCGGCAA |
| | | T |
| | 23567 | GCTTGCGCTAACCTCTCCTCTTAACCTTCCAGCACCGGGCAGGCGTCAG |
| | | C |
| | 23568 | ACCTATCCTGTACATGTGGTACAGATACTCAATATCAAACTGCAGTAAA |
| | | G |
| | 23569 | CTCCACCAGACTAAAACGAGGCTAGCCCTAAAGCTATTTCGAGGAGAAC |
| | | C |
| | 23570 | CCCGGCTTACCTTGGGCGGACGAACCTTCCCCAAGAAACCTTAGATTTT |
| | | C |
| | 23571 | GCAGAACAACTGGTACACCAGCGGTGCGTCCATCCCGGTCCTCTCGTAC |
| | | T |
| | 23572 | GACCAGGTCGATTCCATTGCCTGGCCCGGCTACCTTCCTGCGTCACACC |
| | | T |
| | 23573 | CTCTGAGACTTCAAATGTGTCCCTGTGCTTAACTCTTTTGGTGGTGACG |
| | | G |
| | 23574 | ACCTCGCGGTACGCCTTCGACGCTGACTGGAATGCTCCCCTACCGATCA |
| | | T |
| | 23575 | CGTCCATCCTGAGGGAACCTTTGGGCGCCTCCGATACCCTTTCGGAGGC |
| | | G |
| | 23576 | CACCTATCGGTCTCTCCTTAGGTCCCGACTAACCCAGGGCGGACGAGCC |
| | | T |
| | 23577 | CGCTCGCCGCTACTAAGGAAATCGATGTTTCTTTCTCTTCCTCCGGCTA |
| | | C |
| | 23578 | CGCGAGTCCATCTTCAAGCGATAAAATCTTTGATATCAAAACCATGTGG |
| | | T |
| | 23579 | TGACTGGAGTTTGTCCAGCCGGGTTTCCCCATTCAGAGATCTGCGGATC |
| | | A |
| | 23580 | CCTACTTAGCTACCCGGCTATGCCCCTGGCGGAACAACCGGTGCACCAG |
| | | C |
| | 23581 | ACGCTTAAACCGGGACAACCGTCGCCCGGCCAACATAGCCTTCTCCGTC |
| | | C |
| | 23582 | GATTTGCCTGGGATAATCAACATCTACACCCTTTAACGGACTATTCCGT |
| | | C |
| | 23583 | CTAATGCGCCGCGGGTCCATCTGTAAGTGGTAGCCGAAGCCACCTTTTA |
| | | T |
| | 23584 | GGATCTTAGCACTCGCAGTCTGACTGCCGACCATAAATCAATGGCATTC |
| | | G |
| | 23585 | ACCTATCCTGTACATGTGGTACAGGTACTCAATATCAAACTGCAGTAAA |
| | | G |
| | 23586 | TCACCGGGGATGAGCTACCTCACTGCGTCCCTCCGCAGCTTGCCTACTA |
| | | C |
| | 23587 | GCCATGCAGATTCTCACTGCATTCGCGCTACTCATTCCGGCATTCTCAC |
| | | T |
| | 23588 | CTTCACCTCACATACGACGCTCCCCTACCCCTGACAATTACTTGTCAAG |
| | | C |
| | 23589 | CCCTACTGATCGTCGCCTTGGTGGGCCGTTACCCCGCCAACAAGCTAAT |
| | | C |
| | 23590 | ACGCATTCGGAGTTTGTCAAGACTTGATAGGCGGTGAAGCCCTCGCATC |
| | | T |
| | 23591 | ACATTTTAGGAGGCGACCGCCCCAGTCAAACTGCCCGTCAGACACTGTC |
| | | T |
| | 23592 | GGTGGGTTTCCCCATTCGGAAATCTCCGGATCAAAGCTTGCTTACAGCT |
| | | C |
| | 23593 | CTCATCCCCACCCTTTTCAACGGATGTGGGTTCGGTCCTCCATTGCCTT |
| | | T |
| | 23594 | AGGTCACTTGGTTTCGGGTCTACATCTACGTACTTAACCGCCCTTTTCA |
| | | G |
| | 23595 | ACACACTCACCACACCACCACAACATCAAAGACATCACAATGGCAGGCT |
| | | C |
| | 23596 | TGACAACTGGTGCACCAGAGGTGCGTCCATCCCGGTCCTCTCGTACTAG |
| | | G |
| | 23597 | TCTGCCTCTGCACATTGCTCCTCTACCGCGCATCTTCTTCAGACGCACC |
| | | C |
| | 23598 | CTTTTCTCGACAGTACGGGATCACCAACTTCACCAATTAAGGCTACGCA |
| | | T |
| | 23599 | CCCTCATGTCACTATTTATTCATGACATGATGACACGCTGTTAACGTGC |
| | | C |
| | 23600 | GTACGCAGTCACACGCCTAAGCGTGCTCCCACTGCTTGTACGTACACGG |
| | | T |
| | 23601 | GGCGACCACCCCAGTCAAACTACCCACCAAGCAATGTCCGCGCATAGCG |
| | | C |
| | 23602 | GACTTAGTCCCAATCACGAGCCTCACCTTAGACGGCTCCATCCCACAAG |
| | | G |
| | 23603 | GCGCTTATGCGGTATTAGCAGTCATTTCTAACTGTTATCCCCCTGTATA |
| | | A |
| | 23604 | CGCTTTCACTGCGGCTACGTGTCTCGTGACACTCAACCTCGCCAGTGAC |
| | | G |
| | 23605 | ATGCTTTTCGCTTACAGGACTATAACCTTCTTTGGTGTGCCTTCCCATA |
| | | C |
| | 23606 | CGACTAACCCAGGGCGGACGAGCCTTCCCCTGGAAACCTTAGTCTTACG |
| | | G |
| | 23607 | TAGGACCCGACTAACCCTGATCCGATTAGCGTTGATCAGGAAACCTTAG |
| | | T |
| | 23608 | ACAGCTTTTCTCGTCTCTTTCCAAACTGACTTCCGCTTACGCGTCCCTT |
| | | A |
| | 23609 | TAAGACTTGCTCTCGCTGCGGCTTCAGACCTTAAGTCCTTAACCTTGCC |
| | | A |
| | 23610 | CTCTCAAACCAGCTATGGATCGTCGGCTTGGTAGGCCATTACCCCACCA |
| | | A |
| | 23611 | GGAATTTCTCCCCTATCCACACGTCATCTCCACCCTTTTCAACGGATGT |
| | | G |
| | 23612 | CCGGTCCATGGTCGGTACGGGAATATCCACCCGTTCATCCATTCGACTA |
| | | C |
| | 23613 | CCCCCGACCGGTTTCACGGCCGCAGGTTAGAATTCCAGAAACCTAAGGG |
| | | C |
| | 23614 | AAGTTTCGGTGGCTACGGAATTTCAACCGTATGTGCATCGACTACGCCT |
| | | C |
| | 23615 | TGCGCTCCCTTTACACCCAGTAAATCCGGATAACGCTTGCCCCCTACGT |
| | | A |
| | 23616 | ATTTCGCCTACGGGACTGTCACCCTCTATGGTCCACCTTTCCAGGTGAG |
| | | T |
| | 23617 | GCTTCGGTGGCATGTTTTAGCCCCGGACATTTTCGGCGCAGGACCTCTC |
| | | G |
| | 23618 | GACATGTCTCCACATCATTCAGTTGCAATTCAAGCCCGGGTAAGGTTCC |
| | | T |
| | 23619 | CGATAACTGGCACACCAGAGGTGCGTCCTTCCCGGTCCTCTCGTACTAG |
| | | G |
| | 23620 | AACGCTTATCGGTGCGGACCTCCATCCCGTGTTACCGGGACTTCATCCT |
| | | G |
| | 23621 | CCACTCCGTCGATGTGAACTCTTGGGAGTGATAAGCCTGTTATCCCCAG |
| | | G |
| | 23622 | GCCGCCTTTTCAACGGAGGTCGGTTCGGCCCTCCATGGAGTTTTACCTC |
| | | C |
| | 23623 | ACCGTTATAGTTACGGCCGCCGTTTACTGGGGCTTCAATTCGCACCTTC |
| | | G |
| | 23624 | AGGTGTTCTCATGTGGGTTTCCCCATTCAGAGATCTGCGGGTCAATGGA |
| | | T |
| | 23625 | AGCCTGTTCCCCTGGCAAGCCGTTTTATGACTCCCGCCCGGTCCGTCGG |
| | | A |
| | 23626 | GCTGACCTACTACGAGGGGGGATCCCAACGCGCCCGCGCCGCGACCCCC |
| | | C |
| | 23627 | GTTATCCCCCTGTATGAGGCAGGTTACCCACGCGTTACTCACCCGTCCG |
| | | C |
| | 23628 | CGGACATCTTCGGCGCACAATCACTCGACCAGTGAGCTATTACGCACTC |
| | | T |
| | 23629 | TGCTTGATGCCCGATTATTATCCACGCCAAACTCCTCGACTAGTGAGCT |
| | | G |
| | 23630 | CTCCATTCGGAAATCTGCGGATCAAAGCCTACTTACGGCTCCCCGCAGC |
| | | T |
| | 23631 | GCTGTTGGTCCGGATTGTTCTCCTTTAGGACATGGACCTTAGCACCCAT |
| | | G |
| | 23632 | TGCTGGCACGGAGTTAGCCGTCACTTCCTTGTTGAGTACCGTCATTATC |
| | | T |
| | 23633 | GCTATCGGTCAGACAGGTATGCTTAGACTTACCCAACGGTCTGGGCTGA |
| | | T |
| | 23634 | TATTCCTCACTGCTGCCTCCCGTAGGAGTTTGGACCGTGTCTCAGTTCC |
| | | A |
| | 23635 | TCCCGCTGGCCTTAGAATTCTCTTCCTGTCCACCTGTGTCGGTTTGCGG |
| | | T |
| | 23636 | CGACTATTGTCCTCGGCTTAGGTCCCGACTTACCCTGAGAGGACGAGCC |
| | | T |
| | 23637 | GGTCCTTTTCACCTTTCCTTCACAGTACTATGCGCTATCGGTCACTAAG |
| | | T |
| | 23638 | TCGGCTACTGATCGTCGCCTTGGTAGGCCGTTGCCCTGCCAACTAGCTA |
| | | A |
| | 23639 | CTTGGGAGTATGTTTACACGCACTATTACCGTTTTCCGAGGAAATTGGT |
| | | A |
| | 23640 | CACACAACCCCTACCAGGTATCACATGCACACGGTTTAGCCTCATCCAC |
| | | G |
| | 23641 | CCACGGCTTCGGTGTTGTGTTTTAGCCCCGGACATTTTCGGCGCAGGGC |
| | | C |
| | 23642 | CCACCTTCCTCCAGTTTATCACTGGCAGTCTCCTTTGAGTTCCCGGCCG |
| | | G |
| | 23643 | AGCTTTCGGGGAGAACCAGCTATCTCCCGGTTTGATTGGCCTTTCACCC |
| | | C |
| | 23644 | CGAGCCTTCCTCAGGAAACCTTAGGCATTCGGTGGAGGGGATTCTCACC |
| | | C |
| | 23645 | CCCAGGGCTAGATCATCCCGCTTCGGGTCCAGGACAAGCGACTGAAAAC |
| | | G |
| | 23646 | AAAATCATGGGAAATCTCATCTTGAGGGGGGCTTCGCACTTAGATGCTT |
| | | T |
| | 23647 | ATCCTGTACAAGCTGTACCAACATTCAATATCAGGCTGCAGTAAAGCTC |
| | | C |
| | 23648 | TTAGCAGGTGGTCCGGATTCTTCTCCTCTCGGGCACGGACCTTAGCACC |
| | | C |
| | 23649 | GTCCGTTTACGGTACGGGTACCTCAAGGATAAGTTTAGCGGGTTTTCTA |
| | | G |
| | 23650 | CACTGGCGTGCTGCCTTCTCTGCCTCCCACCTATCCTGTACATGAAATA |
| | | C |
| | 23651 | TGCGGTATTAGCAGTCATTTCTAACTGTTATCCCCCTGTATAAGGCAGG |
| | | T |
| | 23652 | GCTATCGGTCAGACAGGTATGCTTAGACTTACACCACGGTCGGTGCGGA |
| | | T |
| | 23653 | TTTACTCCTTTCGGATGGGATATCTCATCTTGAGGGGGGCTTCACGCTT |
| | | A |
| | 23654 | TGGCCGGTCGCCCTCTCAGGCCGGCTACCCGTCGAAGCCTTGGTGAGCC |
| | | G |
| | 23655 | AAGCCTGTTCCCCTGGCAAGCCGTTTTATGACTCCCGCCCGGCCCGTCG |
| | | G |
| | 23656 | AAGGTTAAGCCTCACGGTTCATTAGTACCGGTTAGCTCAACGCATCGCT |
| | | G |
| | 23657 | GACATCATACTAACGCGCCCTATTAAGACTCGGTTTCCCTACGGCTCCG |
| | | T |
| | 23658 | TGTGTTTTTGTTAAACAGTTGCCTGGACCGATTCTCTGCGCCTCAAGTC |
| | | G |
| | 23659 | GCCCCAGTCAAACTACCCACCAGACACTGTCCGCAACCCGGATTACGGG |
| | | T |
| | 23660 | GCGTCACACCTGTTAATGCGCTTGCCTTACCGGTTCAGGTCCCGCGCTC |
| | | C |
| | 23661 | GCGATGGCCCTTCCATGCGGAACCACCGGATCACTAAGCCCGACTTTCG |
| | | T |
| | 23662 | AAGCTCCATGGGGTCTTTCCGTCTAGTCGCGGGTAACCGGCATCTTCAC |
| | | C |
| | 23663 | CGCTAGCCCTAAAGCTATTTCGGAGAGAACCAGCTATCTCCAAGTTCGT |
| | | T |
| | 23664 | TCCCATCCGCACTTCGCTTCCCTGCTATGCCGTTGGCACGACAACAGTT |
| | | G |
| | 23665 | TTTCACTCCCCTCCCGGGGTCCTTTTCACCTTTCCTTCACAGTACTCTG |
| | | C |
| | 23666 | CGTCCTCGGCTTAGGCCCCGACTTACCCTGGGCGGATGAACCTTCCCCA |
| | | G |
| | 23667 | CGACATCGAGGTGCCAAACCTCCCCGTCGATGTGGACTCTTGGGGGAGA |
| | | T |
| | 23668 | TACCTGATCGACTTGTCAGTCTCCCAGTCAAGCGCCCTTATGCCATTAC |
| | | A |
| | 23669 | CTTCCAAGCCAACATCCTAGCTGTCTTAGCAATCTGACTTCGTTAGTTC |
| | | A |
| | 23670 | ACGCCTTAACCATGTGAAGGGTAGATTTTCTGACCCCTTCGGCCTGAAC |
| | | G |
| | 23671 | CTCAAGGATTAAGTTTAGCGGATTTTCTCGGGAGTATGTTTACACGCAC |
| | | T |
| | 23672 | CCCCATCCATCACCGATAAATCTTTAATCTCTTTCAGATGTCTTCTAGA |
| | | G |
| | 23673 | ATACTTTGGGACCTTAGCTGTGGGTCTGGGCTGTTTCCCTTTTGACAAT |
| | | G |
| | 23674 | CGCCCATAGGCGGTGCCGGCCCATGACGGCCGGCGGGTTCCCCCATTCG |
| | | G |
| | 23675 | AAAATCATGGGAAATCTCATCTTGAGGTGGGCTTCGCACTTAGATGCTT |
| | | T |
| | 23676 | ACAACTTGATACCCGATTATTATCCACGCCCGACTCCTCGACTAGTGAG |
| | | C |
| | 23677 | CTGAGTTTGATAAGCTTCGCTAACCTCTCGGCCGCTAGGCTATTCAGTG |
| | | C |
| | 23678 | GCCCAGATCGTTGCGCCTTTCGTGCGGGTCGGAACTTACCCGACAAGGA |
| | | A |
| | 23679 | TTATAGTTACGGCCGCCGTTCACTGGGGCTTCGGATCACTGCTTCAGAT |
| | | C |
| | 23680 | GGCATTGTCCCACCGCCGGGTCACGGCGGCTGGTTAGAAACCCAATACT |
| | | G |
| | 23681 | GTCCACACATTTAGCCCCAGACAACCATCGCTGGGGTTGAGCTACCTCA |
| | | C |
| | 23682 | TCTCACGACGTTCTGAACCCAGCTCGCGTGCCGCTTTAATGGGCGAACA |
| | | G |
| | 23683 | ATGCGACGAGCCGACATCGAGGTGCCAAACCTCCCCGTCGATGTGAACT |
| | | C |
| | 23684 | CCTGTGTCGGTTTAGGGTACGGGCAGTTTGAACCTCGCGCCGATGCTTT |
| | | T |
| | 23685 | CGATATTGCAAGGGTGGTATCCCAACAGCGCCTCCTCAGAGACTGGCGT |
| | | C |
| | 23686 | CCCCCGACCGGATTCACGGCCGCAGGTTAGAATTTCAGCACCTCAAGAG |
| | | T |
| | 23687 | TCAGATGGCGGCATTGTCACTACTGCGTCTCCACATCACTCCTGGAGGT |
| | | A |
| | 23688 | CTTTTCGTCCCATCGCGGGTAATCGGCATCTTCACCGATACTACAATTT |
| | | C |
| | 23689 | ACAACGAATTCCGCCAACTTCCCGCGCACTCAAGCCCTCCAGTTCGCGC |
| | | T |
| | 23690 | CCCGAAGTTACGGGGCCAATTTGCCGAGTTCCTTAACAACCCTTCTCCC |
| | | G |
| | 23691 | TCAAGGGGGTTTACTTCTTTCGAATGGGATATCTCATCTTAAGGGGGGC |
| | | T |
| | 23692 | CTTCACAGTACTATACGCTATCGGTCACTGGGTAGTATTTAGGGTTGGA |
| | | G |
| | 23693 | ATTCCGTCAGACGGCCGGACTGTCACTTCTCCGTCACCACATCGCTCTC |
| | | T |
| | 23694 | CGGTACTGGTTCACTATCGGTCACTAGGGAGTATTTAGGGTTGGGAGAT |
| | | G |
| | 23695 | AGCTGATGGTCCGGATTCTTCTCCTTTAGGACATGGACCTTAGCACCCA |
| | | T |
| | 23696 | CGTATTACCGCGGCTGCTGGCACGGAATTAGCCGGTCCTTATTCATAAG |
| | | G |
| | 23697 | ACGGGTTAGCCTCGCCACGCACCACTGACTCGCAGACTCATTTTTCGAT |
| | | A |
| | 23698 | ACGGCGTGGACTACCAGGGTATCTAATCCTGTTCGCTCCCCACGCTTTC |
| | | G |
| | 23699 | TGCGCATTCGGAGTTTATCAAGACTTGATAGGCGGTGAAGCCCTCGCAT |
| | | C |
| | 23700 | CTGTTGTCCATCGGCTACGACTCTCGTCCTCACCTTAGGCCCCGACTTA |
| | | C |
| | 23701 | GGCTCACGCCTCACCTTCGACGCGGAGTGGAATGCTCCCCTACCGATGT |
| | | T |
| | 23702 | GATGTTTCAGTTCAGGCGGTTCCCTCGATATACCTATTTTTAAGTTCAG |
| | | T |
| | 23703 | CATTGTCTAAGATTCCCCACTGCTGCCTCCCGTAGGAGTCTGGGCCGTG |
| | | T |
| | 23704 | TCACAGTACTATGCGCTATCGGTCACTAAGTGGTATTTAGCCTTAGGGG |
| | | G |
| | 23705 | GTAGTATTTAGGCTTGGAGGATGGTCCCTCCTGCTTCCCACAGGGTTTC |
| | | A |
| | 23706 | TTGGGACCTTAGCTGCGGGTCTGGGCTCTTTCCCTTTTGACTATCCAAC |
| | | T |
| | 23707 | CAGCTTGGTGGCGCAGAACTAAGCATTTGACTCAGTCCTCACCTCACTG |
| | | C |
| | 23708 | ACCAAGTACAGGAATATTAACCTGTTTCCCATCGACTACGCCTTTCGGC |
| | | C |
| | 23709 | AAGCCCGCTTGTGCGATTACACTCGACACCCGATTGCCAACCGGGCCGA |
| | | G |
| | 23710 | CCTTAAATACGCACAACCATCGGCGCACTGCAGCTACCTGTCTGCGTCA |
| | | C |
| | 23711 | CTACCCAGCGATGCCTTTGGCAAGACAACTGGTACACCAGCGGTAAGTC |
| | | C |
| | 23712 | CCTGTGTCGGTTTACGGTACGGGCGCATGGCAAACAATAGCGGCTTTTC |
| | | T |
| | 23713 | CCGCGCTTACCCTATCCTCCTGCGTCCCCCCATTGCTCAAATGGTGAGG |
| | | A |
| | 23714 | GGCTCTCTGTACTGTCAGGTTTCAGCAAGGACTAACTCTTAATCTGCCC |
| | | C |
| | 23715 | GGATCACCGGATTCGGGCCGTAAGGCCCCCATCATCGCGCCTCGCCCCG |
| | | A |
| | 23716 | TGGTCTCCGCTCGTTCAGACAAGGTTTCACGTGTCTCGTCCTACTCTGG |
| | | A |
| | 23717 | CAATCCCACTTTATGCCACCGGATCACTAAGTCCTACTTTCGTACCTGC |
| | | T |
| | 23718 | GTCACCAAGTAGTATTTAGCCTTGGGGGGTGGGCCCCCCGTCTTCCCAC |
| | | C |
| | 23719 | ATCCCCGGAGTACCTTTTATCCGTTGAGCGATGGCCCTTCCATTCAGAA |
| | | C |
| | 23720 | TACCTCTCACGGTGACCATCCGACGCGGCACCTAAATGCCTTTCGGGGA |
| | | G |
| | 23721 | CCGTACTCCCCAGGCGGAGTGCTTAATGCGTTAGCTGCAGCACTAAGGG |
| | | G |
| | 23722 | ATCACCAGTTTTACCCTAGGGCGCTCCTTGCGGTTACGCACTTCAGGTA |
| | | C |
| | 23723 | GGAGGGCACCTTTAGAAGCCTCCGTTACGCTTTTGGAGGCGACCACCCC |
| | | A |
| | 23724 | CTGGAGACCTTGGATATTCGGCCACAAGGATTCTCACCTTGTTCTCGCT |
| | | A |
| | 23725 | GGGCTTTCACCCTCTTTGGCTGGCTTTCCCAAAACCATTCTGCTAGGAT |
| | | C |
| | 23726 | GTGGGATTGGCTTAACCTCGCGGTTTCGCTGCCCTTTGTTCTGTCCATT |
| | | G |
| | 23727 | ATGCTACGCAGAGAAGTCCGGATATCAATGCCAGACTAGAGTAAAGCTC |
| | | C |
| | 23728 | TCCGTATACTCTCAGGTTCGACTCTCCCCGCGGATTTGCCTACGGGAAT |
| | | C |
| | 23729 | CTGGACCTATTCTCTGCGCCTCACATTGCTGTGAGGACCCTTTATCCCG |
| | | A |
| | 23730 | TTAGCAGGTGGTCCGGATTCTTCTCCTCTCGGGCACGGACCTTAGCACC |
| | | C |
| | 23731 | GCCTGTACACCTGCATCCTATCAACGTCATAGTCTTTGACGACCCTGAG |
| | | A |
| | 23732 | AGACTCCAATCCGGACTACGACGCACTTTATGAGGTCCGCTTGCTCTCG |
| | | C |
| | 23733 | GGTTTGCCCTCCTGCCTCTTCGCTCGCCGCTACTGAGGCAATCGCTCTT |
| | | G |
| | 23734 | ACCTTTCCCTCACGGTACTGGTACGCTATCGGTCAGACAGGTATGCTTA |
| | | G |
| | 23735 | CCGGTCCTCTCGTACTAGGGACAGCTCCCATCAAATATCCTGCGCCCAC |
| | | G |
| | 23736 | CCATTGGCATGACAACCCGAACACCAGTGATGCGTCCACTCCGGTCCTC |
| | | T |
| | 23737 | ATGTGCTTGTAAGCACAGAGTTTCAGGTTCTTTTCACTCCCCTCCCGGG |
| | | G |
| | 23738 | CCCTTCTCCCGAAGTTACGGGGTAATTTTGCCGAGTTCCTTAACAACCC |
| | | T |
| | 23739 | CCTGAGTCGGTTTAGGGTACGGGCGCGTTATGCCCTCACGTCGAGGCTT |
| | | T |
| | 23740 | ATCTGGGCTGTTTCCCTTTCGACAATGAAACTTATCTCACACTGTCTGA |
| | | C |
| | 23741 | CGTATTTCAAGGATGGCTCCACAAACACTGGCGTGCCTGCTTCAAAGCC |
| | | T |
| | 23742 | GGTCATTGCCTGCTTGCGGCTGACCATGGCTTATCGCAGCTGACCACGT |
| | | C |
| | 23743 | CCTGGCGCGGGTAACCAGCATCTTCACTGGTACTTCAATTTCACCGGGT |
| | | G |
| | 23744 | GTAACTCACAAGGCTGCACCTAAATGCATTTCGGGGAGTACGAGCTATC |
| | | T |
| | 23745 | GTCGGTTTGGGGTACGGGCGGCCATAGCCCTCACGCCGAGGCTTTTCTC |
| | | G |
| | 23746 | CACCGTCTATGGTCCCATTTTCCAAAGGGTTCTACTCATGAAATGTCTT |
| | | G |
| | 23747 | CCGGCAACGCAACCCCCGACGGGTATCACGCGCAACCGGTTTGGTCTGA |
| | | T |
| | 23748 | TTATCCTTCTGTGTCACTGCTTCATTCCATCGGTAGTGCAGGAATCTAC |
| | | A |
| | 23749 | CAGAGCACCCCTTCTCCCGAAGTTACGGGGTCATTTTGCCGAGTTCCTT |
| | | A |
| | 23750 | ATACTATCAGGTTCGATTCTCATGGTGGATTTGCCTGCCAAGATCAACA |
| | | T |
| | 23751 | CTTACGGGGCTTTCACCCTCTCTGGCCGGCTTTCCCAAAACCGTTCTGC |
| | | T |
| | 23752 | GACCGGCCTTCCCATGCCGTTCGGTTAACAACTTAAGTCCTAAATGCGG |
| | | T |
| | 23753 | CGTTTATCCGATCCGTACGTAGTTGCCCAGCTATGCTCCTGGCGGAACA |
| | | A |
| | 23754 | GTATCTAATCCTGTTTGATACCCACACTTTCGAGCATCAGCGTCAGTTA |
| | | C |
| | 23755 | GGTGCTTGTAAACACAAGGTTTCAGGTTCTTTTTCACTCCCCGTCAGGG |
| | | G |
| | 23756 | GTAGGCGCACGGTTTCAGGAACTCTTTCACTCCCCTCCCGGGGTGCTTT |
| | | T |
| | 23757 | ACTTCTGAGTTCGGCATGGGGTCAGGTGGGACCACCGCGCTACGGCCGC |
| | | C |
| | 23758 | TTCCGTGTTCGGTATGGGAACGGGTGTGACCTCTTCGCTATCGCCACCA |
| | | A |
| | 23759 | TCGCCTTAGGACCCGACTCACCCGGGGACGTTAACCGTGGCCCCGGAAC |
| | | C |
| | 23760 | CACTCACCCACAACCATGGGCTCCCCATCATGCCTCAACCTTCACGCCC |
| | | A |
| | 23761 | CTCCGAGACTTCATATGTGTCCCTGTGTTTAACTCTTTTGGTGGTGACG |
| | | G |
| | 23762 | AAAATTCCCTACTGCTGCCTCCCGTAGGAGTTTGGGCCGTGTCTCAGTC |
| | | C |
| | 23763 | GACCAGGTAAGGTTCTTCGCGTTGCATCGAATTAAACCACATGCTCCAC |
| | | C |
| | 23764 | CGAAGTTTGATAGGGTTCGGTAAGCTTTGTGGCCCCCTAGCCCATTCAG |
| | | T |
| | 23765 | AGGCTTGCGCCGCCGCTTCGCCCCGATGGGGACGCTCTCCTACCCAGCG |
| | | T |
| | 23766 | CGAACAGAGCGGTATTTCACCTTACGGCTCCGCGCGATCTGGCGACCGC |
| | | G |
| | 23767 | ACCGTTCTACAAAAAGTACGCGGTTGTACTCGTATGGTACTTCCACAGT |
| | | T |
| | 23768 | CGTTTCGCTCGCCGCTACTCAGGGAATCGCATTTGCTTTCTCTTCCTCC |
| | | G |
| | 23769 | GCTACTTGGGACAACACGATCGGAAGACGGCTCACGTCCAGGTACGGGG |
| | | C |
| | 23770 | AAGGTCCCCCTCTTTGGTCTTGCGACGTTATGCGGTATTAGCTACCGTT |
| | | T |
| | 23771 | GTTCTGAACCCAGCTCGCGTACCACTTTAATCGGCGAACAGCCGAACCC |
| | | T |
| | 23772 | TGATTCAAAGCCTCCGGCCTATCCTACACATCAATCACCCAAATTCAAT |
| | | G |
| | 23773 | GTCTTTTCGTCCCATCGCGGGTAATCGGCATCTTCACCGATACTACAAT |
| | | T |
| | 23774 | CCCCCCCCCCCCTTCCCCCCTCTCCTCCCCCTTCCCCCTTTCGCGCCCC |
| | | C |
| | 23775 | CAGGTGTCACCCCATATACGTCATCTTTCGATTTAGCATAGAGCTGTGT |
| | | T |
| | 23776 | CTCCACCAGACTAAAACGAGGCTAGCCCTAAAGCTATTTCGAGGAGAAC |
| | | C |
| | 23777 | TTCCGTCAGCCGGCAGGACTGTCACTTCTCCGTCTCCACGTCACTCCAT |
| | | G |
| | 23778 | CGCTAATTTTTCAACATTAGTCGGTTCGGTCCTCCAGTTAGTGTTACCC |
| | | A |
| | 23779 | CTTGGCAGTGTGACATCACTAACTTCGCTACTAAACTTCGCTCCCCATC |
| | | A |
| | 23780 | CCCGTTAAATTTTCGGCGCAGAGTCACTCGACCAGTGAGCTATTACGCA |
| | | C |
| | 23781 | CCCGGAGTACCTTTTATCCTTTGAGCGATGTCCCTTCCATGCGGAAACA |
| | | C |
| | 23782 | TTCTCTGCGGCTCCATCGCTGCAGCACCCCTTCTCCCGAAGTTACGGGG |
| | | T |
| | 23783 | AAGCTACCTACTTCTTTTGCAACCCACTCCCATGGTGTGACGGGCGGTG |
| | | T |
| | 23784 | GCACAGCCATGTGTTTTTGTTAAACAGTTGCCTGGACCTATTCTCTGCG |
| | | C |
| | 23785 | GCCAACATCCTGGTTGTCTGTGCAATTCCACATCCTTTTCCACTTAACT |
| | | A |
| | 23786 | GGTCACCCGGTTTCGGGCCCATTATATGCAACTTAACGCCCTTTTCAAA |
| | | C |
| | 23787 | TTATAGTTACGGCCGCCGTTCACTGGGGCTTCGATTCAATGCTTGCACA |
| | | T |
| | 23788 | GTTTATCTGAGATTGGTAATCCGGGATGGACCCCTCAATCAAACAGTGC |
| | | T |
| | 23789 | CGAAGTTACGGGGTCATTTTGCCGAGTTCCTTGACAATGCTTCTTCCGC |
| | | C |
| | 23790 | GTCCACACACGCGTGTGTCCCTCATCAGTTCTCACCCTCCATGCCCCCC |
| | | G |
| | 23791 | CCGGCCCGTCGGGGCCGGGACACACGCTCCCGCAACCCCGGCCACGCAA |
| | | C |
| | 23792 | CCGGTACATTTTCGGCGCAGGGTCACTCGACTAGTGAGCTATTACGCAC |
| | | T |
| | 23793 | CTCGAACTTCTTGTAAGCACACGGTTTCAGGTTCTCTTTCACTCCCCTT |
| | | C |
| | 23794 | TTTCAGTTCAGGCGGTTCCCCCCGTATCCCTATGGATTCAGAATACGGT |
| | | G |
| | 23795 | TCCGTTACATTTTGGGAGGCGACCGCCCCAGTCAAACTGCCTACCTGAC |
| | | A |
| | 23796 | CCGCTCCTTCCATCAAGGTTCCACGTGTCTCGATGTACTCTGGATCCTG |
| | | C |
| | 23797 | CCACGTGTTACTCACCCGTCCGCCGCTAACATCAGGGAGCAAGCTCCCA |
| | | T |
| | 23798 | GACTCCGTACTGTCAGGTTCGGCTCAACGGGTGGATTTGCCTGCCCATC |
| | | T |
| | 23799 | ACGTGTCCGGCGGTACTCTGGATACAGATGGCTGTTCAGGCTTTTCGTG |
| | | T |
| | 23800 | TGGGCTGTTTCCCTTTGGACAATGAAACTTATCTCCCACTGTCTGACTC |
| | | C |
| | 23801 | ACATAGCTACCCAGCCATGCCCTTGGCAGAACAACTGGTACACCAGCGG |
| | | T |
| | 23802 | CAGAGGTCAGTCCAACACGGTCCTCTCGTACTAGTGTCAGAGCCACGCA |
| | | A |
| | 23803 | GTTTGATAGGGTTCAGTAACTTCTCAGCCCCTAGCCCATTCAGTGCTTT |
| | | A |
| | 23804 | CGGCACCGGGCAGGCGTCACACCCTATACGTCCACTGTTCGTGTTGGCA |
| | | G |
| | 23805 | AACCCAATAAATCCGGATAACGCTTGCCCCCTACGTATTACCGCGGCTG |
| | | C |
| | 23806 | CCATACATCAATTATCTGGCATTCTGAGTTTGATAGGGTTCAGTAACCT |
| | | C |
| | 23807 | CCTCCGTTACACTTTGGGAGGCGACCGCCCCAGTCAAACTGCCCGCCAA |
| | | G |
| | 23808 | CTGTTATCCCCGAGGTAGCTTTTATCCGTTAAGCGACGGCTTTTCCACT |
| | | C |
| | 23809 | TAGCCCATTCAGTGCTTTACCTCCGGTAATCTAAATCAACGCTAGCCCT |
| | | A |
| | 23810 | TCCACAGCTCCTTACGGTACTGCTTCGTCCCGCATGCAATGCTCCTCTA |
| | | C |
| | 23811 | CCATCGCGGGTAATCGGCATCTTCACCGATACTACAATTTCACCGAGCT |
| | | C |
| | 23812 | CTGGACCTATTCTCTGCGCCCAACTCTCGTTGGGACCCTTTATCCCGAA |
| | | G |
| | 23813 | CTTTTACCTTTACACTCTACGATTGATTTCCAACCAATCTGAGCCAACC |
| | | T |
| | 23814 | TTATAGTTACGGCCGCCGTTTACCGGGGCTTCAATTCAAAGCTTCATAT |
| | | T |
| | 23815 | GCCATTAAGATTCTCACTTAATTCTCGCTACTTATTCCGGCATTCTCAC |
| | | T |
| | 23816 | GGCCGATCACCCTCTCAGGTCGGCTACGCATCGTCGCCTTGGTGAGCCG |
| | | T |
| | 23817 | CTTCTCCCGCTGGCCTTAGAATCTTCTTCCTATCTACCTGTGTCGGTTT |
| | | G |
| | 23818 | TTCCTTCACCCGAGTTCTCTCAAGCGCCTTGGTATTCTCTACCTGACCA |
| | | C |
| | 23819 | GCTAGTCCTAAAACTATTTCGGGGAGAACCAGCTATCTCCGGGTTCGAT |
| | | T |
| | 23820 | CCTCCGGCCGGTTTCACGGCCGCAAGTTAGAATTCCAGCACTACAAGAG |
| | | T |
| | 23821 | TGTTCGTCCCGTCCTTCATCGGCTCCTAGTGCCAAGGCATCCACCGTGC |
| | | G |
| | 23822 | GCCAGGCCTTCAAGCCTGTTCCCCTGGCTAGCCGCTTTATGACTCCCGC |
| | | C |
| | 23823 | CTTTCTTTTCCTCCGGCTACTTAGATGTTTCAGTTCACCGGGTTCCCTT |
| | | C |
| | 23824 | ATGATTCTCACATAATTCTCGCTACTCATTCCGGCATTCTCACTCGTAT |
| | | G |
| | 23825 | CGGGCACGGACCTTAGCACCCATGCCCTTACTGCCGGACTGCAGACCGT |
| | | G |
| | 23826 | GTGAGTTTCCTCATTCAGAGATCTCCGGATCAATGCTTATTTGCAGCTC |
| | | C |
| | 23827 | TAAATGCAGTCCGAACCCCGGAGTGCACGCACTCCGGTTTGGGCTCTTT |
| | | C |
| | 23828 | GCCCAAGGGTAGATCACTTGGTTTCGCGTCTACTCCTTCCGACTATACG |
| | | C |
| | 23829 | AGCTTAGCGGATTTTCTCGGGAGTCTGATTACCGGCGCTATTGGATTCC |
| | | A |
| | 23830 | CTCGCAGTCAAGCTCCCTTCTGCCTTTGCACTCTCCGAATGATTTCCAA |
| | | C |
| | 23831 | GTCTAGTCCCACGTACTTGTGCGCCCTGTTCAGACTCGCTTTCGCTCCG |
| | | C |
| | 23832 | TTCTCCGCTATCCACACCTCATCGCCACCCTTTTCAACGGATGTGCGTT |
| | | C |
| | 23833 | GCCGGCTCCCATTCCGTGTCACCCCTGCGCTCACCTACCACGGCTACGC |
| | | T |
| | 23834 | TCCCGGGGTCCTTTTCACCTTTCCTTCACAGTACTATGCGCTATCGGTC |
| | | A |
| | 23835 | CCAACATCCTGGTTGTCTGTGCAATTCCACATCCTTTTCCACTTAAATC |
| | | C |
| | 23836 | GCTGGCGCCGCGGCTTCGAAGCCTCCCGCCTATGCTACACAATCCGCAC |
| | | C |
| | 23837 | ACGCCCAATAATTCCGGACAACGCTTGCCACCTACGTATTACCGCGGCT |
| | | G |
| | 23838 | CCCTACCAGGTATCACATGCACACGGTTTAGCCTCATCCACGTTCGTTC |
| | | G |
| | 23839 | AGCACCGGGCAGGTGTCAGGCTGTATACGTGATCTTTCAATTTGGCACA |
| | | G |
| | 23840 | CTCCCCATCATGCCTCAACCTTCACGCCCAGCGGATTTACCTACCAGAC |
| | | A |
| | 23841 | CTTCAACTTAACCTCGCACGTAAACGTAACTCGCCGGTTCATTCTACAA |
| | | A |
| | 23842 | AGAGTAGCCATAACACAAGGGTAGTATCCCAACAACGCCTCAGTCGAAA |
| | | C |
| | 23843 | GCTCGCGTACCACTTTAAATGGCGAACAGCCATACCCTTGGGACCTACT |
| | | T |
| | 23844 | CATAGACCTGTGTTTTTGCTAAACAGTTGCTTGAGCCTATTCTCTGCGG |
| | | C |
| | 23845 | ACACACAACCCCTACCAAGTATCACATGCACACGGTTTAGCCTCATCCA |
| | | C |
| | 23846 | TCTACGACCACGTACTCATGCGCCCTATTCAGACTCGCTTTCGCTGCGG |
| | | C |
| | 23847 | CATTCGGATATCTCTGGATCAAGGCTTACTTACAGCTCCCCAAAGCATG |
| | | T |
| | 23848 | GCTCTCCTACCACTGTTCGAAGAACAGTCCGCAGCTTCGGTGATACGTT |
| | | T |
| | 23849 | TCTTTTCGTCCCATCGCGGGTAATCGGCATCTTCACCGATACTACAATT |
| | | T |
| | 23850 | TGTACCCCCCATTGTAACACGTGTGTAGCCCCGGACGTAAGGGCCGTGC |
| | | T |
| | 23851 | TCCCCGGAGTACCTTTTATCCTTTGAGCGATGTCCCTTCCATACGGAAA |
| | | C |
| | 23852 | CGTTGAGCGATGGCCCTTCCTTTCGGTACCACCGGATCACTAAGCCCGA |
| | | C |
| | 23853 | TTCAAGGGGTCTTACTCGTTATACGATGGGATATCTAATCTTGGAGTCG |
| | | G |
| | 23854 | CCTCCTGATGTCCGACCAGGATTAGCCAACCTTCGTGCTCCTCCGTTAC |
| | | T |
| | 23855 | ACCTTGGTCTTACGGCGGGAGGGAATCTCACCCTCCTTATCGTTACTTA |
| | | T |
| | 23856 | CGTGCCCCGCCCTACTCAGGATACTGCTAGCCACGATCAACTTTTAGGT |
| | | A |
| | 23857 | CACCCTCAGTTCATCCGGAAGCTTTTCAACGCTTATCGGTTCGGTCCTC |
| | | C |
| | 23858 | TCTACCTCCATGAGACTAATACGAGGCTAGCCCTAAAGCTATTTCGAGG |
| | | A |
| | 23859 | TACCTGTGTCGGTTTGCGGTACGGGCACCTTAGCATACACTAGAACTTT |
| | | T |
| | 23860 | AGCGGTTCCACAGCTTGTAAACATATGGTTTCAGGTTCTCTTTCACTCC |
| | | C |
| | 23861 | TTATAGTTACGGCCGCCGTTCACTGGGGCTTCGGGTCAAAGCTTGCACT |
| | | C |
| | 23862 | TTATAGTTACGGCCGCCGTTTACTGGGGCTTCGGTTCGATGCTTCGATT |
| | | G |
| | 23863 | GCCTTACGGGGTGGTCCCCGCTCATTCCCACAAGGTTTCTCGTGTCTCG |
| | | T |
| | 23864 | CCGGAGTTTTTCACACTGAGCCATGCAGCTCTGTGCGCTTATGCGGTAT |
| | | T |
| | 23865 | CTTCTCCCGTTGGCCTTAGAATCTTCTTCCTACCTACCTGTGTCGGTTT |
| | | G |
| | 23866 | TGCCGCTTTAATGGGCGAACAGCCCAACCCTTGGGACCGACTACAGCCC |
| | | C |
| | 23867 | GGAGTTCTTCGTGATATCTAAGCATTTCACCGCTACACCACGAATTCCG |
| | | C |
| | 23868 | AGTGATGGGCAGGTTGGATACGCGTTACTCACCCGTGCGCCGGTCGACG |
| | | C |
| | 23869 | TCACGGTACTCGTACGCTATCGGTCAGACAGGTATACTCAGGCTTACCC |
| | | G |
| | 23870 | ACGCATTCGGAGTTTGTCAAGACTTGATAGGCGGTGAAGCCCTCGCATC |
| | | T |
| | 23871 | CATCATCTGTATGGCATTCGGAGTTTGATATCCCTTAGTAAGCTTTGAC |
| | | G |
| | 23872 | TTCTCCGCTATCCACACCTCATCGCCACCCTTTTCAACGGATGTGCGTT |
| | | C |
| | 23873 | AAGCACTTTGGTTTGGGCTGTTCCCCGTTCGCTCGCCGCTACTTAGGGA |
| | | A |
| | 23874 | CACTTATGCCCGATTATTATCCACGCCAAACTCCTCGACTAGTGAGCTG |
| | | T |
| | 23875 | CTTAGGACCCGACTCACCCAGGGCAGACAAACTTGACCCTGGAACCCTT |
| | | G |
| | 23876 | CTCATCAGTTCTCACCCCCAATGTCCCCCGGATTTACCTGAGGGACGGG |
| | | C |
| | 23877 | CCCATGGTGCACGCACCATGGTTTGGGCTCTTCCGCGTTCGCTCGCCGC |
| | | T |
| | 23878 | GCTAGTCCTAAAACTATTTCGGGGAGAACCAGCTATCTCCGGGTTCGAT |
| | | T |
| | 23879 | ACCCCATCAATTAACCTTCCGGCACCGGGCAGGCGTCACACCGTATACG |
| | | T |
| | 23880 | CATTCCGGCATTCTCACTCGAATACAATCCACCGCTGCTTCCGCTACGA |
| | | C |
| | 23881 | GTTTCAGTTCGCCGGGTACCTCTCTTGCAGGCCATGTATTCACCTGCAG |
| | | A |
| | 23882 | ACCTGAGGCTACTCGCCTCGACTACCTGTGTCGGTTTGCGGTACGGGTA |
| | | G |
| | 23883 | AAGGCTAGCCCTAAAGCTATTTCGAGGAGAACCAGCTATCTCCGGGTTC |
| | | G |
| | 23884 | ATTATTATTTTCTCCTCCTACGGGTACTGAGATGTTTCACTTCCCCGCG |
| | | T |
| | 23885 | GCTTGCGCTAACCTCTCCTCTTAACCTTCCAGCACCGGGCAGGCGTCAG |
| | | C |
| | 23886 | CAGAGGTCTGTCCAACACGGTCCTCTCGTACTAGTGTCAGAGCCACGCA |
| | | A |
| | 23887 | ATCCTCTCAGACCAGTTACGGATCGTCGCCTTGGTAGGCCTTTACCCCA |
| | | C |
| | 23888 | TCACGCAGAATTCCTCGTGCTCCGCGCTACTCAGGATACCACTAGGCTT |
| | | C |
| | 23889 | CGCGTCTTCGGTGGCGTGCTTGAGCCCCGCTACATTGTCGGCGCGGAAC |
| | | C |
| | 23890 | TACTTATGCCCGATTATTATCCACGCCAAACTCCTCGACTAGTGAGCTG |
| | | T |
| | 23891 | ACCGTAGTGCCTCGTCATCACGCCTCAGCCTTGATTTTCCGGATTTGCC |
| | | T |
| | 23892 | AGCTGACGCCTGTATTTCCCAGTCTCCCACCTATCCTGTACATGAAATA |
| | | C |
| | 23893 | GGCGTTGCTGATCCGCGATTACTAGCGACTCCGCCTTCACGGAGCCGGG |
| | | T |
| | 23894 | GGGTGCCGCATGGGTTAAGCTTAGCGGATTTTCTCGGGAGTATGGTTAC |
| | | C |
| | 23895 | TCTTCAGCCCCAGGATGCGATGAGCCGACATCGAGGTGCCAAACTTCCT |
| | | C |
| | 23896 | CGCCGGCACCGGATCACTATCTCCGACTTTCGTCCCTGCTCGATCCGTC |
| | | G |
| | 23897 | CACACTATCCGTCTCCGTCACTCCTTCGCTCCATATACGGGTGCAGGAA |
| | | T |
| | 23898 | ACTGTCAGGTTCGACTCTTCCTGCGGATTTGCCTGCAGGAATCAACATC |
| | | T |
| | 23899 | TCTTTCGGCGAGGGGGTTTCCCACCCCCTTTATCGTTACTTATACCTAC |
| | | A |
| | 23900 | CTTTTCAGTGCTCTACAGGACACATCCATCACCTGAGGCTGTACCTCAA |
| | | T |
| | 23901 | ATGACCCTCCCCGGTTGAGCCGGGGGCTTTCACATCAGACTTAAGAAAC |
| | | C |
| | 23902 | TTTCACAACTGACTTAAATATCCATCTACGCTCCCTTTAAACCCAATAA |
| | | A |
| | 23903 | CTACTTATTTTCGGTCCCTTACGCCCGGGTCAACCAACGCCCGGGTCCA |
| | | G |
| | 23904 | GTATTTAGGCTTACCGGGTGGTCCCGGCAGATTCACAGCAGATTCCACG |
| | | A |
| | 23905 | CTTCAACCTGGACATGGATAGGTCACCCGGTTTCGGGTCTGCACACACT |
| | | G |
| | 23906 | TCCGGAAGCCACGCCTCAAGGGCACAACCTCCAAGTCGACATCGTTTAC |
| | | G |
| | 23907 | GGTCACCCGGTTTCGGGCCCATTGTATGCAACTTAACGCCCTTTTCAAA |
| | | C |
| | 23908 | GGCTACACATTTTAAAATGCTTAACCTTGCCGGAAAAAGTAACTCGTAG |
| | | G |
| | 23909 | CAAATTTCCTGCGCCCGCGACGGATAGGGACCGAACTGTCTCACGACGT |
| | | T |
| | 23910 | GCCAGGGTAGTATCCCACCGATGCCTCCACCGAAGCTGGCGCTCCGGTT |
| | | T |
| | 23911 | TTCACTGAAGGGTAACACCCCATAACAGGTGCCAGGTTTCCCCATTCGG |
| | | A |
| | 23912 | TCCAGCTAATCAGACGCGGGTCCATCTTATACCACCGGAGTTTTTCACA |
| | | C |
| | 23913 | CTTTATGAATATGCTTAGCGGATTTTCTTGGGAGCCTGATTACGTCCAT |
| | | T |
| | 23914 | CATCAGGTAGTATTCAGGCTTACCAGGTGGTCCTGGCAGATTCACACGA |
| | | A |
| | 23915 | CATGCACCACGGATTTGCCTATGATGCGCGCTGCGTGCTTGACCACGGA |
| | | A |
| | 23916 | GACAGCCTGGCCATCATTACGCCATTCGTGCAGGTCGGAACTTACCCGA |
| | | C |
| | 23917 | TCACTGCTTTAAGCAGCTCCGACCGCTTGTAGGCGCACGGTTTCAGGAA |
| | | C |
| | 23918 | GCTCCCAACACCACGCGGCGATACCAACCCGAAGGAAGGAACCACCACG |
| | | A |
| | 23919 | GACTTCCCATTCCATTCCACTAAACCTTTACAATACCGTTTTCTGTCCG |
| | | A |
| | 23920 | ACTTAACGACCCGTCTGCGCTCCCTTTAAACCCAATAAATCCGGATAAC |
| | | G |
| | 23921 | GGGGTGGGTTTCATACTTAGATGCTTTCAGCAGTTATCCGCTCCGCACT |
| | | T |
| | 23922 | GAAATCCTCGGATCAAAGCCCTGCTGGCGGCTCCCCGAGGCATATCGCA |
| | | G |
| | 23923 | CTTTCATGGCCCCTACTGATCATCGCCTTGGTAGGCCATTACCCTACCA |
| | | A |
| | 23924 | CTGTTATCCCCAGGGTAACTTTTATCCGTTGAGCGATGGCATTTCCACT |
| | | C |
| | 23925 | CCTACCCTCAGCTCATCCAGAAGCTTTTCAACGCTTATTGGTGCGGTCC |
| | | T |
| | 23926 | ACCAAGAAGGTGCTCCGACCGCTTGTAGGCACATGGTTTCAGGAACTAT |
| | | T |
| | 23927 | CTTCTCCCGTTGGCCTTAGAATCTTCTTCCTACCTACCTGTGTCGGTTT |
| | | G |
| | 23928 | CCTGGCCAAGGGTAGATCACTTGGTTTCGCGTCTGCCACTGCCGACTAT |
| | | A |
| | 23929 | GGGGGTCTCCCTTATGCCGAAGGCACGGGAGCAATTTGCCGAGTTCCTT |
| | | G |
| | 23930 | CATGGTTTAGCCCCGTTACATCTTCCGCGCAGGCCGACTCGACCAGTGA |
| | | G |
| | 23931 | ATCCGCCGCCTTTTCAACGGAGGTCGGTTCGGTCCTCCATGGAATTTTA |
| | | C |
| | 23932 | CCAAAGTCAATGCTAAGCTGTAGTAAAGGTTCACGGGGTCTTTTCGTCC |
| | | C |
| | 23933 | AAAGTTCGGTGGTTACGGAATTTCTACCGTATGTGCATCGACTACGCCG |
| | | T |
| | 23934 | CAGGTGTCAGCCCCTATACTTCATCTTTCGATTTAGCAGAGACCTGTGT |
| | | T |
| | 23935 | ACTTAAAGCCAGCGCCCCTTCTCCCGAAGTTACGGGGCCATTTTGCCGA |
| | | G |
| | 23936 | ACTTAGATGCTTTCAGCACTTATCCGATCCAGACTTAGATACCCGGCAA |
| | | T |
| | 23937 | CTACAGGATTTAGTTTAGCGGATTTTCTTGGCAGCATGATTACATGCAC |
| | | T |
| | 23938 | CCTTAACCTTCCGGCACTGGGCAGGTGTCAGCCCGTATACGTCGTATCT |
| | | C |
| | 23939 | TGAGCCAACATCCTAGTTGTCTTCGAAATCCCACATCCTTTTCCACTTA |
| | | A |
| | 23940 | CAGGATGTGACGAGCCGACATCGAGGTGCCAAACCCCTCCGTCGATATG |
| | | A |
| | 23941 | GGTTTTGCCGGTCCATGGTCGGTACGGGAATATCCACCCGTTCATCCAT |
| | | T |
| | 23942 | CTTTACGCTATCGGTCATTGGGTAGTATTTAGGCTTGGAGGGTGGTCCC |
| | | C |
| | 23943 | GCATGGATTAAGTTTAGCGGATTTTCTAGGAAGTATGATTACCTACGCT |
| | | A |
| | 23944 | ACTGTCCATCCTCTGGTTTCACAGAGCTATGTTAGAATTTCAGTAACCG |
| | | A |
| | 23945 | ACCTCGCGGTACGCCTTCGACGCCGACTGGAATGCTCCCCTACCGATCA |
| | | T |
| | 23946 | CTCTTGCGATGAGCTCTCCTCTTAACCTTCCAGCACCGGGCAGGTGTCA |
| | | G |
| | 23947 | AGCTGACGCCTTGGCTTCCCAGTCTCCCACCTATCCTGTACATGTAATA |
| | | C |
| | 23948 | GAATGAATGGCTGCTTCCAAGCCAACATCCTAGCTGTCACTGGGACCAG |
| | | A |
| | 23949 | TGAGCCAACATCCTGGTTGTCTACGTATCTTCACATCGTTTTCCACTTA |
| | | A |
| | 23950 | TGAGGGCACCTTTAGAAGCCTCCGTTACGCTTTTGGAGGCGACCACCCC |
| | | A |
| | 23951 | TTAAATCGACCGAAGTTTCAATAAAGTAATTCCCGTTCGACTTGCATGT |
| | | G |
| | 23952 | AGTCGGGTTGCAGACTCCAATCCGAACTGAGAGAGGCTTTAGGGATTAG |
| | | C |
| | 23953 | CCTGTGTCGGTTTACGGTACGGGTATGGTATGAACAATAGCGGCTTTTC |
| | | T |
| | 23954 | CTCCCGGATTCCGACGGAATTTCACGTGTTCCGCCGTACTCAGGATCCA |
| | | C |
| | 23955 | AAACATTAAAGGGTGGTATTTCAAGGTCGGCTCCATGCAGACTGGCGTC |
| | | C |
| | 23956 | CCTGAGTATATTCAACCCGACTACGTGTGTCCGTTTACGGTACGGGTAC |
| | | C |
| | 23957 | ACCACGAATTCCGCCTGCCTCAACTGCACTCAAGATATCCAGTATCAAC |
| | | T |
| | 23958 | AGTGAGCTATTACGCACTCTTTTAATGAGTGGCTGCTTCTAAGCCAACA |
| | | T |
| | 23959 | GGCTCACGCCCCGCCTTCAACGCCGAGTGGAATGCTCCCCTACCGATGA |
| | | T |
| | 23960 | AGGGCACCTTTAGAAGCCTCCGTTACACTTTTGGAGGCGACCACCCCAG |
| | | T |
| | 23961 | CTCTGCCATCGCCATCGCCGTTCGGCTTAGACTTAGGACCCGACTGACC |
| | | C |
| | 23962 | GCCGAGTTCCTTAACAAGGGTTCTCCCGCTCGTCTTAGGATTCTCTCCT |
| | | C |
| | 23963 | CTCCCCCCCCCCCCTTCCCCTCCGCGGCCACCTTTCCCCCCCCCTCCCC |
| | | A |
| | 23964 | CCCATATACACGGGTTAGAATCCAAACAAATGAAGGGTCGTATTTCAAC |
| | | A |
| | 23965 | CCCGCATCAGCGGGTTAGAACTCAAATAATCAAAGGGCCGTATTTCAAC |
| | | A |
| | 23966 | CTTCACAGTACTATACGCTATCGGTCACTGGGTAGTATTTAGGGTTGGA |
| | | G |
| | 23967 | CATTCCCACTTAATACCACCGGATCACTAAGCCCTACTTTCGTACCTGC |
| | | T |
| | 23968 | CTTCCGTCGCCCCGCGGTGGTTTCACTGCTCCGTCTCCACGTCGCCCCA |
| | | T |
| | 23969 | GCGGGTAACCTGCATCTTCACAGGTACTAAAATTTCACCGAGTCTCTCG |
| | | T |
| | 23970 | AAAAGTACGCGGTTGAGCTAATAATGCTCTTCCACAGCTTGTAAACACA |
| | | G |
| | 23971 | CGGTACGGGAATATCAACCCGTTCATCCATTCGACTACGCCTGTCGGCC |
| | | T |
| | 23972 | CCTCATCTACCTGTGTCGGTTTGCGGTACGGGCGCCTTAGTATACCTCA |
| | | T |
| | 23973 | GTAGTATTTAGCCTTGGAGGGTGGTCCCTCCTGCTTCCCACAGGGTTTC |
| | | A |
| | 23974 | TTCCGTCAGGTGGCGGCACTTACGTTCCTTCGTCTCTCCATCGAGGTAT |
| | | A |
| | 23975 | CTTCAAAGTCTCCGGCCTATCCTACACATCAATTACCCAAATTCAATGT |
| | | T |
| | 23976 | CTCTCAGGGCTCTTACTAACTGAACGTTATGGGAAATCTCATCTTGAGG |
| | | G |
| | 23977 | AAGTCCTCGAGCGATTAGTATTGGTCCGCTTCACGTCTCACAACGCTTC |
| | | C |
| | 23978 | ACGCCTTTCGTGCAGGTCGGAACTTACCCGACAAGGAATTTCGCTACCT |
| | | T |
| | 23979 | CCTGATCGACTTGTATGTCTCCCAGTCAAGCGCCCTTATGCCATTACAC |
| | | T |
| | 23980 | CGTTTTCCACTTAGCATGTATTAGGGACCTTAGCTGTGGGTCTGGGCTG |
| | | T |
| | 23981 | TAGTCAAGTATCGTCTCTCTTCTTCCTTGCTGATAGACCTTTACATACC |
| | | G |
| | 23982 | GACACATGGTTTTCTGCAACTGCCGGCCGGCCCGTCGGAGCCGGCGCAC |
| | | G |
| | 23983 | TTTCTCGTGTCTCGTGGTACTCTGGATCCCGCCTTGCCGCTCCCGGTTT |
| | | C |
| | 23984 | CTAATGAGATGTTTCAGTTCACAGCGTTTACCTCCAACTAGACTATGAA |
| | | T |
| | 23985 | ATCCTTTCCCACTTAGCACGCGCTTGGGGACCTTAGACGACGATCTGGG |
| | | C |
| | 23986 | GTTTCACGTGTCTGGCCGTACTCTGGAACTCGCTCAGCTCTTGTCGTTT |
| | | T |
| | 23987 | ATGGTTATAGTTACCACCGCCGTTTACCGGGGCTTGAATTCACCGCTTC |
| | | G |
| | 23988 | CCGCACGGAATGGCCGTCTCGTCTCGGGGGGGGCTTCCCGCTTAGATGC |
| | | T |
| | 23989 | TGCTCGACTTGTCTGTCTCGCAGTCAAGCTCCCTTATACCTTTACACTC |
| | | T |
| | 23990 | ATGCATTGCCAGAAGCTTTTCCTGGAAGCCGTCATCATGTGCTTCGCTA |
| | | C |
| | 23991 | TCTTGCGGCGAGCAGGTTTCTCACCTGCTTTATCGTTACTTATACCTAC |
| | | A |
| | 23992 | CGCGCACGCAACCCCCGACGGGTATCACGCGCACGCGGTTTGGTCTGAT |
| | | C |
| | 23993 | CGCTTTATCGTTACTTATGTCAGCATTCGCACTTCTGATACCTCCAGCA |
| | | T |
| | 23994 | GACAGTGCCCAAATCATTACGCCTTTCGTGCGGGTCGGAACTTACCCGA |
| | | C |
| | 23995 | TCCCATCTATCCTGTGCATGCAACACCGAAACCCAATATTAGGCTACAG |
| | | T |
| | 23996 | CCCGGGTCATGCCCTTTCAGAGTGTCCCTCTGCTTAAAACTTTCGGTGG |
| | | T |
| | 23997 | GGGATCCCATTCCCGGCTTCCGCTCTCTGCACGTGTCCCCACAGTTCTG |
| | | T |
| | 23998 | CACCTCGCCATACACGCCGCACGGATTTGCCTATGCGACTGGCTGCGTG |
| | | C |
| | 23999 | TCGCTCCTCAGCGTCAGTTACAGACCAGAGAGTCGCCTTCGCCACTGGT |
| | | G |
| | 24000 | TATCGAACCATAACGGCTCCCATCATCACACCTCGCCATGCATGCCATG |
| | | C |
| | 24001 | TTCACCGGGGCTTCAATTCGGAGCTTGCACCCCTCCTCTTGACCTTCCG |
| | | G |
| | 24002 | CTGCAGGATTAAGTTTAGCGGATTTTCTCGGCAGCATGCTTACGCGCAC |
| | | T |
| | 24003 | TCTCCTACCATACCTATAAAGGTATCCACAGCTTCGGTAATATGTTTTA |
| | | G |
| | 24004 | GGGCGCGTCATGCCCTCACGTCGAGGCTTTTCTCGGCAGCATAGGATCA |
| | | C |
| | 24005 | CTCCGACGGATTGTAGGCGCACGGTTTCAGGAACTCTTTCACTCCCCTC |
| | | C |
| | 24006 | CACTCGACTAGTGAGCTATTACGCACTCTTTGAATGAATAGCTGCTTCT |
| | | A |
| | 24007 | ACTCCCCTCGCCGGGGTTCTTTTCGCCTTTCCCTCACGGTACTGGTTCA |
| | | C |
| | 24008 | CCCTCCCGGGGTTCTTTTCACCTTTCCCTCACGGTACTATGCGCTATCG |
| | | G |
| | 24009 | CTGGTCCTCTCGTACTAGGAGCAGATCCTCTCAAATTTCCTTCGCCCGC |
| | | G |
| | 24010 | ACTTTCGTTACTGCTCGGGCCGTCACCCTCGCAGTTAGGCTAGCTTTTG |
| | | C |
| | 24011 | TGTAATAGCCACGTAATTTAAAACTGAAATTGAGAGAGACTTACCCAGA |
| | | G |
| | 24012 | GGTGGTCTACCGGGAGACTTACCCTCATGTGAGGTGGGAATACTCATCT |
| | | T |
| | 24013 | TGGCGGTCTGGGCTGTTTCCCTTTCGACTACGGATCTTATCACTCGCAG |
| | | T |
| | 24014 | TCTCCACATCACTCTTATAGGTAGTACAGGAATATTAACCTGTTCTGCC |
| | | A |
| | 24015 | CCATTCTGAGGGTACCTTTGGGCGCCTCCGTTACTCTTTCGGAGGCGAC |
| | | C |
| | 24016 | GATGGCAGGACTGTCACTTCTCCGTCTCCACATCGCTCCATAAAGTAGT |
| | | A |
| | 24017 | TCGGCGCAGAGTCACTCGACCAGTGAGCTATTACGCACTCTTTAAATGG |
| | | T |
| | 24018 | CGCGGCATGGCTGCATCAGGCTTGCGCCCATTGTGCAGTATTCCCCACT |
| | | G |
| | 24019 | CGGACATCCTTAATGACATTCGCAGTTTGATTGTATTCAGTACCCCGGG |
| | | A |
| | 24020 | TACCGGCATTCTCACTTCTAAGCGCTCCACCAGTCCTTCCGGTCTGGCT |
| | | T |
| | 24021 | TTCGGGCCTCCATTCAGTGTTACCTGAACTTCACCCTGGACATGGGTAG |
| | | A |
| | 24022 | CGGAGGCGACCGCCCCAGTCAAACTCCCCGCCTGGCATTGTCCCACCGC |
| | | C |
| | 24023 | ACCTTTTAGGAGGCGACCGCCCCAGTCAAACTGCCCGTCAGACACTGTC |
| | | T |
| | 24024 | ACAGCCCAGCCTTCCGTTGTGCGTACTTCACTACACAACAGCCTCACTG |
| | | C |
| | 24025 | TCATACCACCGGAGTTTTTACCCCTGCACCATGCGGTGCTGTGGTCTTA |
| | | T |
| | 24026 | CACTCACCCGAAGGCTTGCTCCCAAACAAAAGAGGTTTACAACCCGAAG |
| | | G |
| | 24027 | CGTCAATTCATTTGAGTTTTAACCTTGCGGCCGTACTCCCCAGGCGGTC |
| | | G |
| | 24028 | ACTTTCGTTCCTGCTCGACTTGTCAGTCTCGCAGTCAGGCTGGCTTGTG |
| | | C |
| | 24029 | CCACCAGGGAGGCTCCGACGGTTTGTGGGCGCACGGTTTCAGGAACTGT |
| | | T |
| | 24030 | ACTGGCGTGCACGTCTCTTTGTCTCCCACCTATCCTGTACATGTATGAC |
| | | C |
| | 24031 | TGATAGCGTGAGGTCCGAAGATCCCCCACTTTCTCCCTCAGGACGTATG |
| | | C |
| | 24032 | AAATCTTTAATCTCTTTCAGATGTCTTCTAGAGACGTCATTGGGTATTA |
| | | G |
| | 24033 | CACCGGGGCCCCAAGACCCACACACACCAACAAACCCGAAGGCTTAGTG |
| | | G |
| | 24034 | TACTTTTCCAATTTTTTTTTTTTTTTTTTTTTTTTTTTTCTTCCAATAA |
| | | A |
| | 24035 | CTCTGCCTATCCTTCTGTGTCACTGCATCCGGTTGCTCGGCGGTATCGG |
| | | A |
| | 24036 | ATGCCTGGCAGTTCCCTACTCTCGCATGGGGAGACCCCACACTACCATC |
| | | G |
| | 24037 | AACATCCTGGTTGTCTAAGCAACTCCACATCCTTTTCCACTTAACGTAT |
| | | A |
| | 24038 | CTCCGGCCGGGCCCGCCAGGACCCGGACACACGCTCCCTCAACACCACG |
| | | C |
| | 24039 | TTCTCTGCGGCTCTTTCGAGCACTCCTTATTCCGAAGTTACGGAGTCAA |
| | | T |
| | 24040 | GGCACAGCCCTGTGTTTTTGTTAAACAGTTGCCTGGACCGATTCTCTGC |
| | | G |
| | 24041 | TGCTCCCCACGCTTTCGAGCCTCAACGTCAGTTACTGTCCAGTAAGCCG |
| | | C |
| | 24042 | ATGCGTCCCACGGATTTGCCTATGGGACGGGCTGCGTGCTTGACCACGG |
| | | A |
| | 24043 | CCCAGACAACCATCGCTGGGGTTGAGCTACCTCCCTGCGTCCCTCCGCA |
| | | G |
| | 24044 | ACGCCGTTAGGCCTCACCTTAGCTCCCGACTGACCTGGAGCGGACGAAC |
| | | C |
| | 24045 | GCCTTTAGCCTTAACCTTGCCAGCCGGCGTAACTCGCCGGACCGTTCTA |
| | | C |
| | 24046 | TGGCCGTTCAACCTCTCAGTCCGGCTACTGATCGTCGCCATGGTGAGCC |
| | | G |
| | 24047 | CGCTTTCGCTCGCCACTACTCACGGAGTATCCCTTCCTGCAGGTACTGA |
| | | G |
| | 24048 | AGGACCCGACTCACCCGGGGACGACGAACGTGGCCCCGGAACCCTTGGT |
| | | C |
| | 24049 | CATTGCGGAAGATTCCCCACTGCTGCCTCCCGTAGGAGTCTGGACCGTG |
| | | T |
| | 24050 | GCATGTATTAGGCACGCCGCCAGCGTTCGTCCTGAGCCAGGATCAAACT |
| | | C |
| | 24051 | CCCGTTACCCATCATCGCCATGGTAGGCCTTTACCCTACCATCTAGCTA |
| | | A |
| | 24052 | GCCCTCACCCGATTAGTAACAGTCAGCTCCATGTGTTGCCACACTTCCA |
| | | C |
| | 24053 | ACCCCAAGTCATCCCCCGGTTTTCAACCCAGGTGGGTTCGGTCCTCCAC |
| | | G |
| | 24054 | CGCCTTAGGACCCGACTAACCCAGGGCGGATAAACCTAGCCCTGGAACC |
| | | C |
| | 24055 | TTCCGTCTTGCCGCGGGTACACTGCATCTTCACAGCGAGTTCAATTTCA |
| | | C |
| | 24056 | GTACGGGTAACACAGAAATATGCTTAGCGGGTTTTCTTGGGAGCCGGTT |
| | | T |
| | 24057 | AAGCTCCATGGGGTCTTTCCGTCTTGTCGCGGGTAACCGGCATCTTCAC |
| | | C |
| | 24058 | AACTTTATTCCCTTATAGAAGCAGTTTACAACCCATAGGGCCGTCTTCG |
| | | T |
| | 24059 | GGGCGGGATTCGCACCCGCCTCTCGCTACTCATGTCTGCATTCTCACTC |
| | | C |
| | 24060 | ATACTATCAGGTTCGGATCTCATGGTGGATTTGCCTGCCATGATCGACT |
| | | C |
| | 24061 | ACGCCGTCGGGCATATAAAGCCCTCCGACAGTTTGTAAACACAGGGTTT |
| | | C |
| | 24062 | GCCTATCGACCACGTGTTCTGCATGGGGTCTTCAGCGGCTCGGGGCCGC |
| | | A |
| | 24063 | GGATAAGGGTTGCGCTCGTTGCGGGACTTAACCCAACATTTCACAACAC |
| | | G |
| | 24064 | GCCCCCGAGCCTTGGCAGTGCTCTACACGGCGTGAGGTTCATCCGAGGC |
| | | T |
| | 24065 | TTCCTTAACCAAGAATCTCTCAACGCCTTAGTATGTTCTACCCGACCAC |
| | | G |
| | 24066 | TTTCCCTGCGGCTCCGGGACTTTATCCCTTAACCTTGCCAGTATGCACA |
| | | A |
| | 24067 | TACTGTCAGGTTCGACTCTTGCACCGGATTTGCCTGGCACAATCAACAT |
| | | C |
| | 24068 | GCCTTCCCATGCCATTCTGCTAGATACCTTCCATACCGTGCGCTGTCCG |
| | | A |
| | 24069 | ATGAGCCGACATCGAGGTGCCAAACACCGCCGTCGATATGAACTCTTGG |
| | | G |
| | 24070 | TTCGGCTCAAAGTCCGGATTTGCCTGGACCTCTCATCACCTACACTCTT |
| | | C |
| | 24071 | ACGCATTTCACCGCTACACGTGGAATTCCACTCTCCTCTTCTGCACTCA |
| | | A |
| | 24072 | TTTCCGTTTCGCCTACGGGGCTCTCACCCTCTCTGGCCGGTCTTTCCAG |
| | | A |
| | 24073 | GCCCCGGACAACCATCGCCGGGGATGAGCTACCTCCCTGCGTCCCTCCG |
| | | C |
| | 24074 | TGTCGCGGGTAACCGGCATCTTCACCGGTACTACAATTTCGCCGGGCGG |
| | | G |
| | 24075 | AAGCCCTCGATCTATTAGTACACACTTGCTGAATGGATCGCTCCACTTA |
| | | C |
| | 24076 | CCTTGGCAACAGTTCTCTCGCTCACCTCGGGATACTCTCCCTGCCCACC |
| | | T |
| | 24077 | TCTCCGCCAAAGCCAAAGCCTTGGTTTCCCAGAGTCCCATCTATCCTGT |
| | | G |
| | 24078 | AGGAGTATTCAGGCTTACCAGGTGGTCCTGGCAGATTCACACGAGATTT |
| | | C |
| | 24079 | CAGGATGTGACGAGCCGACATCGAGGTGCCAAACCACTCCGTCGATATG |
| | | A |
| | 24080 | CAACCTGTTGTCCATCGGCTACGCTTTTCAGCCTCACCTTAGGTCCCGA |
| | | C |
| | 24081 | TCAGATGGCGGCACTGCCACGACTCCGTCTCCACGTCACTCCCCAAGGT |
| | | A |
| | 24082 | CTACGGGGCCATCACCCTCTGCGGCCCGGCATTCAATCCGGTTCGCCTC |
| | | A |
| | 24083 | CCAGGTCATAAGGGGCATGATGATTTGACGTCATCCCCACCTTCCTCCG |
| | | G |
| | 24084 | CCTTTAATCATGTGAACATGCGGACTCATGATGCCATCTTGTATTAATC |
| | | T |
| | 24085 | TTTTCACACCTGACTTAAGATCCCGCCTTAAGCTTCCCTTTACACCCAG |
| | | T |
| | 24086 | CCTACCCTCAGCTCATCCAGAAGCTTTTCAACGCTTATTGGTGCGGTCC |
| | | T |
| | 24087 | GTCACACTGAGTATTTAGGCTTACCGGGTGGTCCCGGCAGATTCACAGC |
| | | A |
| | 24088 | CCAGGATAACTTACGTACACCATTCGACGCCGTGAGTATGCTCCCCTAC |
| | | C |
| | 24089 | AGAGAACCAGCTATCTCCAAGTTCGTTTGGAATTTCTCCGCTACCCACA |
| | | A |
| | 24090 | CCCGAAGTTACGGGGTAATTTTGCCGAGTTCCTTAACAACCCTTCTCCC |
| | | G |
| | 24091 | GGCTCACGCCCCACCTTCGACGCGGAGTGGAATGCTCCCCTACCGATGT |
| | | T |
| | 24092 | GTATCTAATCCTGTTTGCTCCCCACGCTTTCGCACTGAGCGTCAGTCTT |
| | | C |
| | 24093 | CGCGAGTCCATCCTGAAGCGAATAAATCCTTTTCCCTCAGCACCATGCG |
| | | G |
| | 24094 | TTATCGCAGCTTATCACGTCTTTCTTCGGCTCTTAGTGCCAAGGCATCC |
| | | A |
| | 24095 | CGGCAAAGATTCTCACTTTGCTCTCGCTACTCATGCCGGCATTCTCTCT |
| | | C |
| | 24096 | CCGGCAGACCGATCAAGAAAAAACCCACAACCCCGCACGCGCAACCCCT |
| | | G |
| | 24097 | GGGCTGTTTCCCTTTTGACTATGAGACTTATCTCACATAGTCTGACTGC |
| | | T |
| | 24098 | CCCCACTGCTGCCTCCCGTAGGAGTCTGGACCGTGTCTCAGTTCCAGTG |
| | | T |
| | 24099 | TTGTGACTATTCTCTGCGGCCTGCTCTCGCAGGCACCCCTTATCCCGAA |
| | | G |
| | 24100 | TTACCTCCACTTCAACCTGGACATGGGTAGGTCACCCGGTTTCGGGTCG |
| | | A |
| | 24101 | TCGCAAGGTTATCCCCAAGTGAAGGGCAGGTTGGATACGCGTTACTCAC |
| | | C |
| | 24102 | CGCGATCGGCAGACCATGCGCGTTCAGGTACGGGGCCCTCACCCTCTGC |
| | | G |
| | 24103 | GCCTTTCACTCCTACACTCGGCTCATCCAGAAGCTTTTCAACGCTTATT |
| | | G |
| | 24104 | AGTTTGATAAGGTTCAGTAACCTCTCGGCCCCTAGCCAATTCAGTGCTT |
| | | T |
| | 24105 | GGCTGCAACACGGTGACGTGAAGCGAATCCCAAAAACCATCTCTCAGTT |
| | | C |
| | 24106 | CCGGTCTCTCGACTAGTGAGCTGTTACGCACTCTTTGAATGAATGGCTG |
| | | C |
| | 24107 | GGATCACTAACTCCAACTTTCGTTACTGCTCGAACTGTCGCTCTCGCAG |
| | | T |
| | 24108 | CTCGCGTACCGCTTTAATGGGCGAACAGCCCAACCCTTGGGACCGACTA |
| | | C |
| | 24109 | CGGCTACGCCTTTCGGCCTCACCTTAGCTCCCGACTAACTTGGAGCGGA |
| | | C |
| | 24110 | ACCTTTCCCTCACGGTACTGGTTCACTATCGGTCACTAGGGAGTATTTA |
| | | G |
| | 24111 | ATACTGTCAGGTTCGACTCTTGCACCGGATTTGCCTGGCGCAATCAGCA |
| | | T |
| | 24112 | TGTCATGCTCTATGGTCTTTCTTTCCAGAAAGTTCTTCTCCGATGTCTT |
| | | C |
| | 24113 | ATCACCTTAGGATTCTCTCCTCGCCTACCTGTGTCGGTTTGCGGTACGG |
| | | G |
| | 24114 | ACGTATTCACCGTGGCATTCTGATCCACGATTACTAGCGATTCCGACTT |
| | | C |
| | 24115 | TAGAGCATTTTCTTGGAAGCAGGATTACCCACACTATTGGTTTACTCCG |
| | | A |
| | 24116 | CATTGACCAATATTCCTCACTGCTGCCTCCCGTAGGAGTTTGGGCCGTG |
| | | T |
| | 24117 | ATCCGCCGCCTTTTCAACGGAGGTCGGTTCGGTCCTCCATGGAATTTTA |
| | | C |
| | 24118 | CCTGTGTCGGTTTACGGTACGGGCGCATGGCAAACGATAGCGGCTTTTC |
| | | T |
| | 24119 | GCCCAAGGGTAGATCACTTGGTTTCGCGTCTACTCCTTCCGACTATACG |
| | | C |
| | 24120 | GGCGGATTTTCCCAAATCCTTCGACTATCAAGTTCTTTGGTAACTCAAA |
| | | T |
| | 24121 | CTTTCGGGGAGTACGAGCTATCTCCGAGTTTGATTGGCCTTTCACTCCT |
| | | A |
| | 24122 | CTCTAGTTAGCCTGCTGCGTCCCTCCTTCACTCAATACTCTAGTACAGG |
| | | A |
| | 24123 | CGCCGTCGATGTGAACTCTTGGGCGAGATCAGCCTGTTATCCCCAGGGT |
| | | A |
| | 24124 | AGTCGTTTCCAACTGTTGTCCCCCACTCCAGGGCAGGTTACTCACGCGT |
| | | T |
| | 24125 | GCATGCTTAAAGTTCGGCGGCTACGGAATTTCAACCGTATGTGCATCGA |
| | | C |
| | 24126 | ATTACCGCGGCTGCTGGCACGGAATTAGCCGGTCCTTATTCTTATGGTA |
| | | C |
| | 24127 | CGCACAGCCCTGTGTTTTTGTTAAACAGTTGCCTGGACCTATTCTCTGC |
| | | G |
| | 24128 | CATAATTTTATTTTCTTCTCCTACGGGTACTGAGATGTTTCACTTCCCC |
| | | G |
| | 24129 | ACCTTGGGCGGACGAACCTTCCCCAAGAAACCTTAGATTTTCGGCCATT |
| | | A |
| | 24130 | TACTATCAGGTTCGGCTCTCAAGGTGGATTTGCCTGCCTCGATCTGCGC |
| | | C |
| | 24131 | CTGTACATGCAATACCAAGCTCCAGTACCAAACTGGAGTAAAGCTCCAT |
| | | G |
| | 24132 | TGCTTGACCACGGAAAACCACCTCCGCGGCCGGCTCCCATTCCGTGTCA |
| | | C |
| | 24133 | CAGTAACCCGCAAGGCTGCACCTAAATGCATTTCGGGGAGTACGAGCTA |
| | | T |
| | 24134 | AAGCCAACATCCTGGTTGTCTACGCAATTGCACATCCTTTTCCACTTAA |
| | | C |
| | 24135 | CACATCTTACGACGGCAGTCTCGACAGAGTCCCCAGCATCACCTGATGG |
| | | T |
| | 24136 | TTATAGTTACGGCCGCCGTTCACTGGGGCTTCGATTCAATGCTTGCACA |
| | | T |
| | 24137 | CATCTTTACTCGTACTGCAATTTCGCCGAGCTCCTGGTCGAGACAGTGG |
| | | G |
| | 24138 | ACACCGAGCCATGCAGCTCTGTGCGCTTATGCGGTATTAGCAGTCATTT |
| | | C |
| | 24139 | AGGTCCCGCGCTCCCCACCACCGTCCCCGTCAAAGACGGGGTTCGGGAT |
| | | G |
| | 24140 | ATCGAGCTCACAGCATGTGCATTTTTGTGTACGGGGCTGTCACCCTGTA |
| | | T |
| | 24141 | GGAATTTCTCCCCTAGCCACAAGTCATCCGCTAACTTTTCAACGGTAGT |
| | | C |
| | 24142 | GCTCTACCTCCAAGACTCTTACCTTGAGGCTAGCCCTAAAGCTATTTCG |
| | | G |
| | 24143 | TTATAGTTACGGCCGCCGTTTACTGGGGCTTCAATTCAATGCTTCTCTT |
| | | G |
| | 24144 | CTTCAACCTGGACATGGATAGGTCACCCGGTTTCGGGTCTGCACACACT |
| | | G |
| | 24145 | GAGGCTAGCCCTAAAGCTATTTCGAGGAGAACCAGCTATCTCCGGGTTC |
| | | G |
| | 24146 | TGGGCTGTTTCCCTTTCGACTACGGATCTTAGCACTCGCAGTCTGACTG |
| | | C |
| | 24147 | CTCCGGCCTATCCTACACATCGATTGCCCAAATTCAATGTAAAGCTATA |
| | | G |
| | 24148 | CCACTTCACCTAACAACAATGCAAAAAGGGCGTGCCACTGGTAGATGAC |
| | | A |
| | 24149 | ACCCTCAGGTCATCCAGAAGCTTTTCAACGCTTATTGGTTCGGTCCTCC |
| | | A |
| | 24150 | AGTATCCCTTCCTGCAGGTACTGAGATGTTTCACTTCCCTGCGTACCCC |
| | | C |
| | 24151 | ACTTGGTATCCCTTCGGCTCCGCACCTTAAGTGCTTAACCTCGCCAGTA |
| | | T |
| | 24152 | TCGGATACGTGTGTCGTCACACTTAACCTTGCCGGCAAAGGCAACTCGT |
| | | A |
| | 24153 | GGATCACTAACTCCAACTTTCGTTACTGCTCGAACTGTCGCTCTCGCAG |
| | | T |
| | 24154 | CGAACGCCTTAGTATTTTCAACCTGACTACCTGTGTCGGTTTGGGGTAC |
| | | G |
| | 24155 | TTCTGCTTCTGCCCGTACACGTTGCTCCCCTACCCAGAAGTTTCCTTCT |
| | | G |
| | 24156 | TCACGGTACTAGTTCGCTATCGGTCAGACAGGTATATCTAGGCTTACCC |
| | | C |
| | 24157 | ACTTCTTACAAAGCTCCGACCGCTTGTAGGCGCATGGTTTCAGGGACTA |
| | | T |
| | 24158 | TCTTTAAAGGATGGCTGCTTCTGAGCCAACCTCCTAGTTGTCTGGGCAT |
| | | C |
| | 24159 | CCCCATTGGGGCCCACAACACCGCACACACAACCCCTACCAAGTATCAC |
| | | A |
| | 24160 | CTCAACTTCAACCTGCTCATGGCTAGATCACCCGGTTTCGGGTCTGCAA |
| | | C |
| | 24161 | GCATACGCCACACGGCTTATGCTCGCCACCCGCCACTGACTCGCAGACT |
| | | C |
| | 24162 | GTTCGTCTATATGCCCGCACCTCACTGCGCCATGCCGGCAGACATGACC |
| | | A |
| | 24163 | ATCTGGGCTGTTTCCCTTTTGACAATGACATTTATCTGACACTGTCTGA |
| | | C |
| | 24164 | CTATTAGTAGCAGTCAGCTCCATGTGTTACCACACTTCCACCCCTGCCC |
| | | T |
| | 24165 | TTTCACAACTGACTTAAACATCCATCTACGCTCCCTTTAAACCCAATAA |
| | | A |
| | 24166 | CCGTTGAATTTTCGGCGCAGAGTCACTCGACCAGTGAGCTATTACGCAC |
| | | T |
| | 24167 | TCCTTAACGAGAGTTCGCTCGCTCACCTGAGGCTACTCGCCTCGACTAC |
| | | C |
| | 24168 | CCACTCCGTCGATGTGAACTCTTGGGAGTGATAAGCCTGTTATCCCCAG |
| | | G |
| | 24169 | CAACAGGATGAAGTTTAGCGGATTTTCTCGGGAGTATGATTACATGCGC |
| | | T |
| | 24170 | GACGGGCTGCGTGCTTGACCACGGAAAACCACCTCCGCGGCCGGCTACC |
| | | C |
| | 24171 | CGGATTTGCCTATGATGCGCGCTGCGTGCTTGACCACGGAAAACCACCT |
| | | C |
| | 24172 | CTGAGTTTGATAAGCTTCGCTAACCTCTCGGCCGCTAGGCTATTCAGTG |
| | | C |
| | 24173 | TGCAGCACCTGTCTCACGGTTCCCGAAGGCACATTCTCATCTCTGAAAA |
| | | C |
| | 24174 | AGGCTAGCCCTAAAGCTATTTCGGGGAGAACCAGCTATCTCCGAGTTCG |
| | | A |
| | 24175 | GACGTCCTATCTCTAGGATTGTCAGAGGATGTCAAGACCTGGTAAGGTT |
| | | C |
| | 24176 | GTTTTGACTACAGGGCTGTTACCTCCTATGGCGGGCCTTTCCAGACCTC |
| | | T |
| | 24177 | CTGGGGCTTCAATTCAGATCTTCGCTAACGCTAAACCCTCCTCTTAACC |
| | | T |
| | 24178 | CCTTAGTATATTCAACCCGACTACGTGTGTCCGTTTACGGTACGGGTAC |
| | | C |
| | 24179 | CTATACATCATCTTACGATTTAGCAGAGAGCTGTGTTTTTGATAAACAG |
| | | T |
| | 24180 | CTAACAATGTCCCCCGACTCGATTCAGAGCCGCAGGTTAGAATTCCAAT |
| | | A |
| | 24181 | TTTGGCCTCTTCCGCGTTCGCTCGCCACTACTTACGGAATCTCAGTTGA |
| | | T |
| | 24182 | CCCGCCAACTGGCTAATCAGACGCGGGTCCATCTTATACCACCGGAGTT |
| | | T |
| | 24183 | GCTACTTGGGACACGCGATCGGAAGACGGCAAGCGTCCAGGTACGGGGC |
| | | T |
| | 24184 | CATCACCGGGGATGAGCTACCTCACTGCGTCCCTCCGCAGCTTGCCTAC |
| | | T |
| | 24185 | ACAACTTAATACCCGATTATTATCCACGCCAGACTCCTCGACTAGTGAG |
| | | C |
| | 24186 | CTCTCAGACCAGTTACGGATCGTCGCCTTGGTAGGCCTTTACCCCACCA |
| | | A |
| | 24187 | TCACGTAGTCTGACTGCTGATCATCAATTAGCCGGCATTCAGAGTTTGA |
| | | T |
| | 24188 | TAGGTCACCCGGTTTCGGGTGTACTGCATGCAACTTTACGCCCTTTTCA |
| | | G |
| | 24189 | TACTTTAGTTCGCTCCACATCACGGCTTCGTCTCATGCACAGCGGATTT |
| | | G |
| | 24190 | CTTACGGGGCTTTCACCCTCTCTGGCAGGCTTTCCCAAAAACCTTTCTG |
| | | C |
| | 24191 | GGCCGGGCTTTCGATCCCGTTCTTCTATCCTCTCTCTTGCCATATCATG |
| | | G |
| | 24192 | ACGGCTTCTACTCGTATACAACGCTCCCCTACCACTATAGTTTCCTACA |
| | | A |
| | 24193 | ATCGAGTTTTCTTTCTCTTCCTCCGGCTACTTAGATGTTTCAGTTCACC |
| | | G |
| | 24194 | GCTTTACATACCGAAATACTTCTTCACTCACGCGGCGTCGCTGCATCAG |
| | | G |
| | 24195 | TCCCTTCTGCCTTTGCACTCTTCTAATGGTTTCCGACCATTATGAGGGA |
| | | A |
| | 24196 | CTCCATCAGGCAGTTTCCCAGACATTACTCACCCGTCCGCCACTCGTCA |
| | | G |
| | 24197 | TGCCAAACCTCCCCGTCGATGTGAACTCTTGGGGGAGATAAGCCTGTTA |
| | | T |
| | 24198 | GCCTGGACCTATTCTCTGCGCCTCACATTACTGTGAGGACCCTTTATCC |
| | | C |
| | 24199 | ACCTTTACACCTGCATCCTATCAACGTCGTAGTCTACAACGACCCTCAG |
| | | A |
| | 24200 | GTATTCATTAACGCTAGAAGCTTTTCTTGGCAGAGTGACATCACTAGCT |
| | | T |
| | 24201 | GCTGTTGGTCCGGATTGTTCTCCTTTAGGACATGGACCTTAGCACCCAT |
| | | G |
| | 24202 | AAAAACCCTCCCCCCCCCCCCTTCCCCTCCGCGGCCACCTTTCCCCCCC |
| | | C |
| | 24203 | CTGTCGGTACCCGATACGGGCCCTCAAGCATCCAGTAGCTCTACCCCCC |
| | | G |
| | 24204 | ATCTACGCATTTCACCGCTACACTAGGAATTCCGCTTACCTCTGTTGCA |
| | | C |
| | 24205 | TCTGTCCCACCTTCGGCGGCTGGCTCCTAAAAGGTTACCTCACCGACTT |
| | | C |
| | 24206 | TGACCAAGGGTAGATCACTTGGTTTCGCGTCTACTCCTTCCGACTAATC |
| | | G |
| | 24207 | TGTGCACTTGCACTCGCCACCCGATTGCCAACCGGGCTGAGCGGACCTT |
| | | T |
| | 24208 | CAGCCTCACTCCCAGGCTGTAAAATATGCCCCTTCGGAGTTTGATAAGG |
| | | T |
| | 24209 | ACGCTTCCACTAACACACACACTGATTCAGGCTCTGGGCTGCTCCCCGT |
| | | T |
| | 24210 | CTGTCAAGGTCGACTCTCCCTGCGGATTTGCCTACAGGAATCTACATCT |
| | | A |
| | 24211 | CCTGTGTTTTTGGTAAACAGTCGCTACCCCCTGGCCTGTGCCACCCCCC |
| | | G |
| | 24212 | ATCTGATAGCGTGAGGTCCGAAGATCCCCCACTTTCTCCCTCAGGACGT |
| | | A |
| | 24213 | ACACTTTGGGACCTTAGCCGGTGGTCTGGGCTCTTTCCCTTTTGACTAC |
| | | C |
| | 24214 | CTACAAGGGATCTTACCTGATTGAATCAGTGGGATATCTTATCTTTGGG |
| | | T |
| | 24215 | CTGAAGGGTAACCCCACATAACCAGGGCCAGGTTTCCCCATTCGGACAT |
| | | C |
| | 24216 | TCAGTCCGCGGCGCTGTCACGCCTCCGTCTCCACGTCACTCCTTAAGGT |
| | | A |
| | 24217 | TTAACAAGGGTTCTCCCGTTCGTCTCAGGATTCTCTCCTCGCCCACCTG |
| | | C |
| | 24218 | CTAACATCCTAGTTGTCTGTGCAACCCCACATCCTTTTCCACTTAACAA |
| | | T |
| | 24219 | GATAAATCTTTCCCCCGTAGGGCACATTCGGTATTACTCCCAGTTTCCC |
| | | G |
| | 24220 | GTTTACAATCCGAAGACCTTCTTCCCACACGCGGCGTTGCTGCATCAGG |
| | | G |
| | 24221 | CGGCGCACTGCAGCTACCTGTCTGCGTCACCCCTGTTAACACGCTTGCC |
| | | T |
| | 24222 | ATGAAGCTGGAATCGCTAGTAATCGTATATCAGCAATGATACGGTGAAT |
| | | A |
| | 24223 | CGGATTTGCCTATGGGACGGGCTGCGTGCTTGACCACGGAAAACCACCT |
| | | C |
| | 24224 | GGATGACCCCCTTGCCGAAACAGTGCTCTACCCCCGGAGATGAATTCAC |
| | | G |
| | 24225 | GGTACGGGTAACATATACTATAACTTAGAAGATTTTCTCGGAAGTCGAC |
| | | T |
| | 24226 | CTTTGTAACTCCGTACAGAGTGTCCTACAACCCCAAGAGGCAAGCCTCT |
| | | T |
| | 24227 | TCTTACTTCTTGCGAATGGGAGATCTCATCTTGGAGTAGGCTTCGTGCT |
| | | T |
| | 24228 | GTCAAGCTCCCTTATACCTTTACACTCTGCGATTGATTTCCAACCAATC |
| | | T |
| | 24229 | CCACCTATCCTACACATCAAGGCTCAATGTTCAGTGTCAAGCTATAGTA |
| | | A |
| | 24230 | AAAAGCAGTTTACAACCCATAGGGCCGTCATCCTGCACGCTACTTGGCT |
| | | G |
| | 24231 | TGAGGGCACCTTTAGAAGCCTCCGTTACACTTTTGGAGGCGACCACCCC |
| | | A |
| | 24232 | ACGCTCTAACCTTATGGTAACCGGATTTGCCTGGTAACCAGCCGCTTCG |
| | | C |
| | 24233 | GCTTCCAAGCCAACATCCTAGCTGTCTTAGCAATCTGACTTCGTTAGTT |
| | | C |
| | 24234 | TGGCCGTTCACCCTCTCAGGCCGGCTATGGATCGTCGCCTTGGTAGGCC |
| | | G |
| | 24235 | TGAGCCAACATCCTGGTTGTCTTCGAAATCCCACATCCTTTTCCACTTA |
| | | A |
| | 24236 | CTAGAGAGTATTTAGGGTTAGGAGATGGTCCTCCCAGATTCCGACGAGA |
| | | T |
| | 24237 | GCCTTTCGGCCTCGCGTTAGGTCCCGACTTACCCAGGGCGGACGAACCT |
| | | T |
| | 24238 | GTCAAACTGCCCACCTGACACTGTCTCCCCGCCCGATAAGGGCGGCGGG |
| | | T |
| | 24239 | TGGAGTAAAGCTCCATGGGGTCTTTCCGTCCTGGCGCAGGTAACCAGCA |
| | | T |
| | 24240 | TTTCTTCTCCTACGGGTACTGAGATGTTTCACTTCCCCGCGTAACCCCC |
| | | A |
| | 24241 | ACCAGCTATGGATCGTCGGCTTGGTAGGCCATTACCCCACCAACTACCT |
| | | A |
| | 24242 | GGGGCAAGTTTCGTGCTTAGATGCTTTCAGCACTTATCTCTTCCGCATT |
| | | T |
| | 24243 | CACCAGTGTCGGTTTGGGGTACGGGCGGCCATAGCCCTCACGCCGAGGC |
| | | T |
| | 24244 | GACGTTCTGAACCCAGCTCGCGTGCCGCTTTAATGGGCGAACAGCCCAA |
| | | C |
| | 24245 | GGTTAGAATTCCAATATCGCAAGGATGGTATCCCAACGGCCTCTCCGCC |
| | | A |
| | 24246 | AGGTTACCCACGCGTTACTCACCCGTCCGCCACTAGAAACAATCTAAAT |
| | | C |
| | 24247 | CAGGTGTCACCCCATATACGTCATCTTTCGATTTAGCATAGAGCTGTGT |
| | | T |
| | 24248 | TCTTTCGGCGAGGGGGTTTCCCACCCCCTTTATCGTTACTTATACCTAC |
| | | A |
| | 24249 | CTTAGGACCGTTATAGTTACGGCCGCCGTTTACCGGGGCTTCGATCAAG |
| | | A |
| | 24250 | CCACTTAGTGATGATTTGGGGACCTTAGCTGGCGGTCTGGGTTGTTTCC |
| | | C |
| | 24251 | TCCCCCATTCGGACACCTCCGCTTCTTCGCTTCCTTACAGCTTCACGGA |
| | | G |
| | 24252 | ATAGATCACCCGGTTTCGGGTCTGCCCCCACTGACTCTGGCCCTCTTAA |
| | | G |
| | 24253 | GCCTATCAAACACGTGTTCCACATGCGGGCTTCAGGACCCCGAAGGGCC |
| | | C |
| | 24254 | CCATTTCTGACTGTTATCCCCCTGTATAAGGCAGGTTGCCCACGCGTTA |
| | | C |
| | 24255 | CATCATCTGTATGGCATTCGGAGTTTGATATCCCTTAGTAAGCTTTGAC |
| | | G |
| | 24256 | GTTTGGGGTACGGGCGGCTAAAACCTCGCGCCGATGCTTTTCTAGGCAG |
| | | C |
| | 24257 | GCGATGGCCCTTCCATACGGTACCACCGGATCACTAAGCCCGACTTTCG |
| | | T |
| | 24258 | GAGTTAACCCCGGCGGTCCCCCGTGAGTTCCCACCATAACGTGCTGGCA |
| | | A |
| | 24259 | GGATAATCGGCGGACGGGATTCCCACCCGTCACACGCTACTCATGCCTG |
| | | C |
| | 24260 | TACCTCTTCGTTATGATATGTCCGCAACCCCAATAAAGAAAACTTTATT |
| | | G |
| | 24261 | ACGTGTCCGGCGGTACTCTGGATTCAGCTGGCGGATCTTCTCTTTCGCA |
| | | T |
| | 24262 | TCGAGACCAGACTTCGTTAGACTAACTCAGACAGGATTCCGGGACCTTA |
| | | G |
| | 24263 | TGGCCGTTCAACCTCTCAGTCCGGCTACCAATCGTCGCCTTGGTGGGCC |
| | | G |
| | 24264 | TATAAGTCAAGGCTGCACCTAAATGCATTTCGGGGAGTACGAGCTATCT |
| | | C |
| | 24265 | CTACTGTTTCACCGCGTATACAACGCTCCCCTACCCAGCATGTAAACAT |
| | | G |
| | 24266 | TTATAGTTACGGCCGCCGTTTACTGGGGCTTCAATTCACACCTTCGACA |
| | | A |
| | 24267 | GGATGGACCCCTCACCCAAACAGTGCTCTACCTCCATGATTCTTAATGT |
| | | C |
| | 24268 | TTGGGACCTTAGCTGCGGGTCTGGGCTCTTTCCCTTTTGACTATCCAAC |
| | | T |
| | 24269 | GGCTCTGACTACTTGTAGGCACACGGTTTCAGGATCTCTTTCACTCCCC |
| | | T |
| | 24270 | TCGCTACTCATTCCGGCATTCTCACTCGTGTACAGTCCACCGCTGCTTT |
| | | C |
| | 24271 | CCTCCCCCCCCCCCCCCCCCCCCCCCCCTTCCCCCCTCTCCTCCCCCTT |
| | | C |
| | 24272 | TAACACCCCATAACAGGTGCCAGGTTTCCCCATTCGGACATCCTCGGAT |
| | | C |
| | 24273 | ACCTCGACACGGACGGTGACAAGCCGGTACCAGAATATCAACTGGTTAC |
| | | C |
| | 24274 | ATAGATCACCCGGTTTCGGGTCTACTCCGGCTGACTCGCTCGCCCTATT |
| | | C |
| | 24275 | TAAATGATGGCTGCTTCTAAGCCAACATCCTGGCTGTCTGGGCCTTCCC |
| | | A |
| | 24276 | CAGCTTATAGGGTTGCGTACTTCACTACAACCCAACCTTGATGCTTGCA |
| | | C |
| | 24277 | GCTTGGGCCTTTTCACTGCGGCTGACTTATCGCCAGCGCCCCTTCTCCC |
| | | G |
| | 24278 | TGAGGTCGGCTTCACGCTTAGATGCTTTCAGCGTTTATCCGTTCCGCAC |
| | | T |
| | 24279 | CTCCGGGTACTGTCAGGTTCGACTCTCAGGGCGGATTTGCCTACCCCGA |
| | | T |
| | 24280 | GCTTGGGCCTCTTCACTGCGGCTTAATTGCTTAAGCACTCCTTCTCGCT |
| | | A |
| | 24281 | TTTATCCCGAAGTTACAGGGTCAGTTTGCCTAGTTCCTTAACCGTGAAT |
| | | C |
| | 24282 | GTAGTTAGCCGGAGCTTCCTCCTAAAGTACCGTCATTATCGTCCTTTAA |
| | | G |
| | 24283 | TCTTTCGGCGAGGGGGTTTCCCGCCCCCTTTATCGTTACTTATACCTAC |
| | | A |
| | 24284 | GGATGTACTAGCAGCTTTTCTCGCCAGCGTGAACTCACTCGCTTCCCTA |
| | | C |
| | 24285 | TTAGTATCAGTGCTTTATCAGGGGCGCATATACTCGGGTACCAGAATAT |
| | | C |
| | 24286 | GCTTGGCGGCGTCCTACTCTCACAGGGGGAAACCCCCGACTACCATCGG |
| | | C |
| | 24287 | AGATTCACGCAGAATTCCTCGTGCTCCGCGCTACTCAGGATACTACTAT |
| | | G |
| | 24288 | TATCAACCTGATCATCTTTCAGGGATCTTACTTCCTTGCGGAATGGGAA |
| | | A |
| | 24289 | TCAATAGGCACGCCACCACACTCTTATGGAGCGGTGACTGCTTGTAAGT |
| | | C |
| | 24290 | CTACTATATTTCGGTCCCTTACGCCCGGGGCAACCATCGCCCGGGATAA |
| | | C |
| | 24291 | TGCCATGACTGCTTGTAAGTCCACGGTTTCAGGTTCTCTTTCACTCCCC |
| | | T |
| | 24292 | TCCATTTGCGCAGCACCAGTAATCATGTTCTTAACATAGTCAGCATGTC |
| | | C |
| | 24293 | TCTCAGTCCCAATGTGGCCGGTCACCCTCTCAGGTCGGCTACTGATCGT |
| | | C |
| | 24294 | TGGCCGTTCAACCTCTCAGTCCGGCTACTGATCGTCGCCTTGGTGGGCC |
| | | T |
| | 24295 | TTATAGTTACGGCCGCCGTTTACCGGGGCTTCAATTCGGAGCTCTCACT |
| | | C |
| | 24296 | TAGTGAAAGGTAGATTTTCTGACCCTTTCGACCTGAACGTACCAACCAG |
| | | C |
| | 24297 | TCTTGGCAGTGTGACATCACTAACTTCGCTACTAAACTTCGCTCCCCAT |
| | | C |
| | 24298 | ACCTGCTTTCGCACCTGCTCGCGCCGTCACGCTCGCAGTCAAGCTGGCT |
| | | T |
| | 24299 | TCGGAGTTTGATATTCTTCGGTAAGCTTTGACGCCCCCTAGGAAATTCA |
| | | G |
| | 24300 | ACCCACCGAGTGGGCGCCCATCAGGTCTCAAGCACATAGCCGGCGGATT |
| | | T |
| | 24301 | TACGGGTGCCGCATGGATAAGTTTAGCGGATTTTCTCGGGAGCATGGTT |
| | | A |
| | 24302 | TTCAAACAACCATCCGGTATTAGCCCCGGTTTCCCGGAGTTATCCCAGT |
| | | C |
| | 24303 | TCCTTAACCACGCTGCATACCATAACTCGCCGGACCATTCTACAAAAGG |
| | | T |
| | 24304 | CCGGCACCGGGCAGGTGTCAGGCTGTATACGTCATCTTTCGAGTTTGCA |
| | | C |
| | 24305 | CAGGAATATTCAGGCTTACCCAACGGTCTGGGCGGATTCGCACGGGGTT |
| | | C |
| | 24306 | TTTATCCCGAAGTTACAGGGTCAGTTTGCCTAGTTCCTTAACCGTGAAT |
| | | C |
| | 24307 | CTTCTGCAATTGCACTCGTCGATTGGTTTCCATCCAATCTGAGCGTACC |
| | | T |
| | 24308 | TCGGTTTGCCCTCTTCCGCGTTCGCTCGCCACTACTTACGGAATCTCGT |
| | | T |
| | 24309 | AAGCTCCATGGGGTCTTTCCGTCTTGTCGCGGGTAACCGGCATCTTCAC |
| | | C |
| | 24310 | CATCGGCCTCACCGTTCGGCTGAGCCTTAGGACCCGACTAACCCTGATC |
| | | C |
| | 24311 | CCTCGCCATACACGCCGCACGGATTTGCCTATGCGACTGGCTGCGTGCT |
| | | T |
| | 24312 | CCTGTCGCGGGTAACCTGCATCTTCACAGGTACTATAATTTCACCGAGT |
| | | C |
| | 24313 | TCAGCCTTATGGGAAACGGATTTGCCTATTTCCCAGCCTAACTGCTTGG |
| | | A |
| | 24314 | TTTCACAACACGCTTAAAAGGCGGCCTACGCTCCCTTTAAACCCAATAA |
| | | A |
| | 24315 | CCCCGCGGTACTCTGGATCCTGCTAGCTCTCGCTCCTTTTCGTCTACGT |
| | | G |
| | 24316 | ATCGGTTCACACACTCACCCACCCCAGAAGCATCAAAAACACTCCCAAG |
| | | A |
| | 24317 | TAGAAAGGAGGTGATCCAGCCGCACCTTCCGATACGGCTACCTTGTTAC |
| | | G |
| | 24318 | GCCCATTGTCCAATATTCCCCACTGCTGCCTCCCGTAGGAGTCTGGACC |
| | | G |
| | 24319 | TCACCTTTCCCTCACGGTACTGGTTCGCTATCGGTCTCTCGGGAGTATT |
| | | T |
| | 24320 | CGAAGTTACGGGGTCATTTTGCCGAGTTCCTTGACAATGCTTCTCCCGC |
| | | C |
| | 24321 | AGATCCTCTCAAATTTCCTACGCCCGCGACGGATAGGGACCGAACTGTC |
| | | T |
| | 24322 | TCTCAGTCCCAATGTGGCCGGTCACCCTCTCAGGTCGGCTACTGATCGT |
| | | C |
| | 24323 | GGCAACCCAACAACCCACACATCATCATCTTCAGCTACAGGACTCTCAC |
| | | C |
| | 24324 | GCACTATTGCCTTGTCCCGGAGGACGCGGCATACTGTCAGGTTCGAATC |
| | | A |
| | 24325 | CCGTGGCTTTCTGGTTAGGTACCGTCAAGGTACCGCCCTATTCGAACGG |
| | | T |
| | 24326 | ATACTATCAGGTTCGACTCTTATCCCGGATTTGCCTGGGATAATCAACA |
| | | T |
| | 24327 | TAAGTCCTTAACCTTGCTGCATACAATCGCTCGCCGGACCGTTCTACAA |
| | | A |
| | 24328 | ATCTGGGCTGTTTCCCTTTTGACAATGACATTTATCTGACACTGTCTGA |
| | | C |
| | 24329 | AGAGTAACCATAACACAAGGGTAGTATCCCAACAACGCCTCCTCCGAAA |
| | | C |
| | 24330 | TGGACAGGATTCTCACCTGTCTTACGCTACTCATACCGGCATTCTCACT |
| | | T |
| | 24331 | GCCCGGCTACCTTCCTGCGTCACACCTGTTAATACGCTTGGCTCCCCAG |
| | | T |
| | 24332 | GTCAAGCTCCCTTATACCTTTACACTCTGCGAATGATTTCCAACCATTC |
| | | T |
| | 24333 | CCCAACCCTTGGAACATACTACAGCCCCAGGTGGCGAAGAGCCGACATC |
| | | G |
| | 24334 | TCTTTCGGCGAGGGGGTTTCCCACCCCCTTTATCGTTACTTATACCTAC |
| | | A |
| | 24335 | GGGTGTTCCCCTTTTGCCCGCGGAACTTATCTCTCGCGGACTGACTCCC |
| | | A |
| | 24336 | ACCCGGTTTCGGGTCTATGGCATACAACTTCTCGCCCTTGTCAGACTCG |
| | | C |
| | 24337 | CTGCCTGGCTTACGCCTACGGGGCTTTCACCCTCTCCGGCGCCGGCATT |
| | | C |
| | 24338 | GCTGCGGGGCTGAGCCCCTTAACCTCGCCGGAAAAAGTAACTCGTAGGT |
| | | T |
| | 24339 | AAGGATGGCTCTCTTCAAATCTCCTGCGCCCGCGACGGATAGGGACCGA |
| | | A |
| | 24340 | CAGGCCCCACAACACCGCACACACAACCCCCGCCGGGTATCACATGCAC |
| | | A |
| | 24341 | CCCCTACGGATCCATGCCTTGGTGGGCCATTACCCCACCAACTAGCTAA |
| | | T |
| | 24342 | ACTTAGCACTCATCGTTTACGGCGTGGACTACCAGGGTATCTAATCCTG |
| | | T |
| | 24343 | TATCCATCGAAGACTAGGTGGGCCGTTACCCCGCCTACTATCTAATGGA |
| | | A |
| | 24344 | CAGGCGTCAGCTCGTATACGTCATCTTTCGATTTAGCACAAACCTGTGT |
| | | T |
| | 24345 | TGGCCGTTCAACCTCTCAGTCCGGCTACCGATCGCGGTCTTGGTGAGCC |
| | | G |
| | 24346 | CCTGTGTTTTTGCTAAACAGTCGCCTGGGCCTATTCACTGCGGCTCTCT |
| | | C |
| | 24347 | ACGCCTTTCGGCCTGACCTTAGCTCCCGACTTACTTGGAGCGGACGAAC |
| | | C |
| | 24348 | GGTCTGGGCTCTTTCCCTTTTGACTGCCCAACTTATCTCGTGCAGTCTG |
| | | A |
| | 24349 | GAATGAATGGCTGCTTCTGAGCCAACATCCTAGTTGTCTTAGAGATCCC |
| | | A |
| | 24350 | CCCCATCATGCCTCAACCTTCACGCCCAGCGGATTTACCTACCAGACAG |
| | | T |
| | 24351 | AAAAGTACGCGGTTCATCATATAAAGATGTTCCACAGCTTGTAAACACA |
| | | G |
| | 24352 | ATCTGAAGTCTTCTCGTTTAACATACAGGACTATTACCTTCTGTGGTGA |
| | | G |
| | 24353 | GGTCACACCCTTTTGAAGTGTCCCTTTGCTTAAATTACAGATGGTTACG |
| | | G |
| | 24354 | CAGCTTATCACGTCTTTCATCGGCTCTTAGTGCCAAGGCATCCACCCTG |
| | | C |
| | 24355 | TTCCATTCGGCACCGCCGGATCACTATTCCCGACTTTCGTCCCTGTTCG |
| | | A |
| | 24356 | TCCAGGTTCGATTGGCATTTCACCCCTACCCACACCTCATCCCCGCACT |
| | | T |
| | 24357 | TACACCTTCTGCGTACATAGAACGCTCTCCTACCATCCCCTAAGGGATC |
| | | C |
| | 24358 | GCTTGCGCTAACCTCTCCTCTTAACCTTCCAGCACCGGGCAGGCGTCAG |
| | | C |
| | 24359 | CGCCCGTTAGTACCGGTCGGCTCCACCCCTCGCGGGGCTTCCACCTCCG |
| | | G |
| | 24360 | CTCCGGGACCTTAGACGGCGGTCTGGATTCTTCTCCTCTCGGGGACGGA |
| | | C |
| | 24361 | TGGTTAAGTCCTCGATCGATTAGTATCTGTCAGCTCCATGTGTCGCCAC |
| | | A |
| | 24362 | TAAGTCCTTAACCTTGCTGCATACAATCGCTCGCCGGACCGTTCTACAA |
| | | A |
| | 24363 | ACCGGACTTTCCATTTCCGGCCCATGTTTCCCTCCCGTGTCCCCACAGT |
| | | T |
| | 24364 | CGGCTCCCACCTATGCTACGCAGAAGAATCCGGATATCAATGCCAGACT |
| | | A |
| | 24365 | ACCCCACATCCTTTTCCACTTAACATATATTTGGGGACCTTAGCTGGTG |
| | | G |
| | 24366 | CCACACCACTTCACCTAACAACAACACACAAGCACGATGATGGTAGTCA |
| | | C |
| | 24367 | TCATCCCCGCACTTTTCACGTACGTGTGGTTCGGACCTCCACGACGTCT |
| | | T |
| | 24368 | CCCTTCAAAGCCTCCGACCTATCCTACACATCACGTGCCCAGATTCAAT |
| | | G |
| | 24369 | CTTCACCTAACAACAATGCGCAAGCAGGACGTCAGTAGCCATCCTCATC |
| | | A |
| | 24370 | GGGGTACGGGCGGCAACGCGCCTGACGCCGAAGCTTTTCTCGGCACCAC |
| | | G |
| | 24371 | ATGGCTAGATCACCGGGTTTCGGGTCTATACCCTGCAACTTAACGCCCA |
| | | G |
| | 24372 | ATTAAACCACATGCTCCACCGCTTGTGCGGGCCCCCGTCAATTCCTTTG |
| | | A |
| | 24373 | GCCGGCTTTCCCAAAGCCGTTCTGCTACCTCTCGCGGATCAATTATGCG |
| | | G |
| | 24374 | ACGCCTTCCGGCCTCACCTTAGCTCCCGACTAACTTGGAGCGGACGAAC |
| | | C |
| | 24375 | ACACCACGCGGCGATACCAACCCGAAGGAAGGAACCACCACGAGGCGGA |
| | | G |
| | 24376 | CCGAACCCCGAGATGCACGCATCTCGGTTTGGCCTCTTTCGCGTTCGCT |
| | | C |
| | 24377 | GGGACTTCATCCTGGCCAAGTGTAGATCACTTGGTTTCGCGTCTACCCC |
| | | C |
| | 24378 | AGCCCTCGACCTATTAGTACTGCCAAGCTGAATGCCTCACGGCACTTAC |
| | | A |
| | 24379 | GGGAGCGGGATTACCTTCACTATCAATCCACCCGAAGGTTTCATGTACT |
| | | A |
| | 24380 | CACGCGGGATTCCACGAGGCCCGCGCTACTTGGGACAACACGATCGGAA |
| | | G |
| | 24381 | CCTACACCCTTCAACCATCTATTCCGTCAGATGGCGGCACTGTCACTAC |
| | | T |
| | 24382 | CCCCGTACCTGTTCTCGATACCAGGTTAGAACCCCGGTCACACAAGAGT |
| | | G |
| | 24383 | GTTTCACGTGTCTGGCCGTACTCTGGATCCTGCGCAGCTCTCTCCGTTT |
| | | T |
| | 24384 | TTCCCGCTTAGATGCTTTCAGCGGTTATCCCTCCCGAACGTAGCCAACC |
| | | G |
| | 24385 | GCACTCCCACAGCTTGTAGACACAGGGTTTCAGGTTCTCTTTCACTCCC |
| | | C |
| | 24386 | CCTGGCCAAGGGTAGATCACTTGGTTTCGCGTCTGCCACTGCCGACTAT |
| | | A |
| | 24387 | CCGCGAGGGACCTCACCTACATATCAGCGTGCCTTCTCCCGAAGTTACG |
| | | G |
| | 24388 | AAGCTCCATGGGGTCTTTCCGTCTTGCCGCAGGTAACCGGCATCTTCAC |
| | | C |
| | 24389 | CGTCGGCTTGGTGGGCCGTTACCTCACCAACTACCTAATCCAACGCGGG |
| | | T |
| | 24390 | GCTCCCACCTATCCTGTACATGCAATACCAAGCTCCAGTACCAAACTGG |
| | | A |
| | 24391 | ACCGGACTTTCCATTTCCGGCCCATGTTTCCCTCCCGTGTCCCCACAGT |
| | | T |
| | 24392 | CAGTTCCCCGGGTCTGCCTTCTCATATCCTATGAATTCAGATATGGATA |
| | | C |
| | 24393 | GGTCCCGGCAGATTCGCGCAGGATTCCTCGTGTCCCGCGTTACTCAGGA |
| | | T |
| | 24394 | GTATTAACTTTACTCCCTTCCTCCCCGCTGAAAGTACTTTACAACCCGA |
| | | A |
| | 24395 | GGGGGCGGGGAGCGGGGCGTGGGCGGGAGGAGGGGAGGAGGCGTGGGGG |
| | | G |
| | 24396 | CACGAGGCCCGCGCTACTTGGGACACGCGATCGGGAGACGGCAAGCGTC |
| | | C |
| | 24397 | CGTTTATCCCCTCCCTACTTAGCTACCCAGCGATGCTCTTGGCAGAACA |
| | | A |
| | 24398 | CCTCTTAACCTTCCGGCACCGGGCAGGCGTCAGAGCGTATACAGCGGCT |
| | | T |
| | 24399 | ACCTTGGGCGGACGAACCTTCCCCAAGAAACCTTAGATTTTCGGCCATT |
| | | A |
| | 24400 | TTCGTTCGCCACTACTAGCAGAATCATAATTTTATTTTCTTCTCCTACG |
| | | G |
| | 24401 | GTTTCTCGCATGCCTCTCGCTACTCATACCGGCATTCTCTCTTGTGCAG |
| | | T |
| | 24402 | CCTATCAACGTCGTCGTCTTCAACGTTCCTTCAGGACCCTTAAAGGGTC |
| | | A |
| | 24403 | CTGTTATCCCCAGGGTAGCTTTTATCCGTTGAGCGACGGCATTTCCATT |
| | | C |
| | 24404 | CAACAATATATGGAACACCTACCTGGCGAGACAATAGAATGTGTTCCCT |
| | | C |
| | 24405 | TTATAGTTACGGCCGCCGTTTACTGGGGCTTCAATTCAATGCTTCTCTT |
| | | G |
| | 24406 | ACAACAGAGCTTTACGATCCGAAAACCTTCATCACTCACGCGGCGTTGC |
| | | T |
| | 24407 | CCCGTTCCACGGGTTAGAATCCAAACAAATAAAGGGTCGTATTTCAACA |
| | | G |
| | 24408 | CCCCCTTCCCCCCTCTCCTCCCCCTTCCCCCTTTCGCGCCCCCTTTTCC |
| | | C |
| | 24409 | TGGTGTTCCAACCAATTCGGCTTGGGGGGATGGATCTTAAAAACTGGTC |
| | | C |
| | 24410 | CTCGTGTCCCGCCGTACTCAGGATCCTGCTTGGCATCAAGTGAATTTCA |
| | | A |
| | 24411 | AGCTTCTACACCCTTCAACCATCTATTCCGTCAGATGGCGGCACTGTCA |
| | | C |
| | 24412 | CCGATTAGTACCAGTCAACTCCGTACATCACTGCACTTCCATCCCTGGC |
| | | C |
| | 24413 | CGCTTGAACCACACATCAGGCCCCACGGCTTGCCACCATGTTAACCCGA |
| | | A |
| | 24414 | TGGCGAGACAATAGAATGTGTTCCCTCGTTTGTGGCATAGGACCATCAG |
| | | C |
| | 24415 | CGTCCATCCCGGTCCTCTCGTACTAGGGACAGCTCCTCTCAAATATCCT |
| | | G |
| | 24416 | TCGAGGTGCCAAACCTCCCCGTCGATGTGAACTCTTGGGGGAGATAAGC |
| | | C |
| | 24417 | CTTAACAACTTAACCTCGCTGCACACAGTAACTCGCCGGCCCGTTCTAC |
| | | A |
| | 24418 | GTCAACAGGTAGTATTCAGGCTTACCAGGTGGTCCTGGCAGATTCACAC |
| | | G |
| | 24419 | AGGCACGCCGTCACACATTGCTGTGCTCCGACCGCTTGTAGGCGTATGG |
| | | T |
| | 24420 | TCCCTTTCCCCCTTCCCCCCCCCCCCCCCCCCCCCCCCCTTTCCCCCCC |
| | | C |
| | 24421 | AACCATGACTTTGGGACCTTAGCTGGCGGTCTGGGTTGTTTCCCTCTTC |
| | | A |
| | 24422 | TGCCATTACACTCTATGAGACCGGTTACCAATCGGTCCGAAGGGCACCT |
| | | T |
| | 24423 | GATTGGAATTTCTCCGCTACCCACACCTCATCCGCTACCATTTCAACGG |
| | | G |
| | 24424 | TTCTCGTGTCCCGCGGTACTCTGGATCCTGCTCAGTCTGCTCTGTTTTC |
| | | G |
| | 24425 | GTAAACCCCCACAACAGCTATGAATTCACTGAAGGGTAACACCCCATAA |
| | | C |
| | 24426 | TCCCGAAGTTACAGGGTCAATTTGCCTAGTTCCTTAACCGTGAATCACT |
| | | C |
| | 24427 | CCCCCGACGGGTATCACACGCGCAAGGTTTGGCCATCATCCGCTTTCGC |
| | | T |
| | 24428 | CCCTTGTCTCAGTGCCCATCTCCGGGCTCCTCCTTCCAGAGCCCGTACC |
| | | C |
| | 24429 | TCAGACTTGCTCTCGCTGCGGCTTCACACCTTAAGTGCTTAACCTCGCC |
| | | G |
| | 24430 | CTCCATTCGGAAATCCACGGATCAATGCCTACTTACGGCTCCCCGTGGC |
| | | T |
| | 24431 | TTTTACGGTTGAGCCGCAAACTTTCACAACTGACTTAACAACCCGCCTA |
| | | C |
| | 24432 | CGGTTTAGGCTCTTCCGCGTTCGCTCGCCGCTACTTACGGAATCGAGTT |
| | | T |
| | 24433 | CTTCACTATATACTCTAGTACAGGAATATCAACCTGTTGGCCATCGGAT |
| | | A |
| | 24434 | TGTTTCAGTTCACTGCGTCTTCCTTCTCATAACCTTAACAGTTATGGAT |
| | | A |
| | 24435 | GACGGAGCTTATCCCCCGCCGACTCACTGCCGGGATACGCGTCACGGGT |
| | | A |
| | 24436 | CCGAACTGTCTCACGACGTTCTGAACCCAGCTCGCGTACCGCTTTAATG |
| | | G |
| | 24437 | GACGGTGACAAGCCGGTACCAGAATATCAACTGGTTACCCATCGACTAC |
| | | G |
| | 24438 | GATGCGCATTCGGAGTTTGTCAAGACTTGATAGGCGGTGAAGCCCTCGC |
| | | A |
| | 24439 | TAGGTGAGCCGTTACCCCACCTACTAGCTAATCCCATCTGGGCACATCC |
| | | G |
| | 24440 | TGGTCCCCGCTCATTCCATCAAGGTTTCTCGTGTCTCGATGTACTCTGG |
| | | A |
| | 24441 | ATGCTCCCCTACCGATACTTTTTAATGCTATCCCGCGCCTTCGGTACCT |
| | | G |
| | 24442 | TTACCTTTACTTCAACCTGACCATGGGTAGGTCACCCGGTTTCGGGTCG |
| | | A |
| | 24443 | GTAGTATTTAGCCTTGGAGGATGGTCCCTCCTGCTTCCCACAGGGTTTC |
| | | A |
| | 24444 | GATTTCCAACCATTCTGAGGGAACCTTTGGGCGCCTCCGTTACCTTTTA |
| | | G |
| | 24445 | ATCCCTTCCGGGCTTGGCTACTCGGCCGTAGACTTGGCAGTCTAACCGA |
| | | T |
| | 24446 | GATGCGCATTCGGAGTTTGTCAAGACTTGATAGGCGGTGAAGCCCTCGC |
| | | A |
| | 24447 | GTAATCGCCTTGGTGGGCCATTACCCCACCAACAAGCTGATAGGCCGCA |
| | | G |
| | 24448 | ACCCTCAGGTCATCCAGAAGCTTTTCAACGCTTATTGGTTCGGTCCTCC |
| | | A |
| | 24449 | AGCTCCATGGGGTCTTTCCGTCTAGTTGCGGGTAACCTGCATTTTCACA |
| | | G |
| | 24450 | CGTGGGGATTAAGTTTAGCGGATTTTCTCGGGAGTATGATTACGTGCGC |
| | | T |
| | 24451 | TATTTTGGGACCTTAACTGGCGGTCTGGGCTGTTTCCCTCTTGACCATG |
| | | G |
| | 24452 | TAACCTTGCACGGGATCGTAACTCGCCGGTTCATTCTACAAAAGGCACG |
| | | C |
| | 24453 | GACGGCCCAGAGACCTGCCTTCGCCATCGGTGTTCTTCCCGATATCTAC |
| | | A |
| | 24454 | TCACACGGGATTCCACGAGTCCCGCGCTACTTGGGAGACACGATCCGGA |
| | | G |
| | 24455 | AGTATTTAGCCTTGGAGGATGGTCCCCCCATATTCAGACAGGATACCAC |
| | | G |
| | 24456 | TTTGGCCTCTTCCGCGTTCGCTCGCCACTACTAGCGGAATCTCGGTTGA |
| | | T |
| | 24457 | CTGCTTCCAAGCCAACATCCTAGCTGTCTTAGCAGTCAGACTTCGTTAG |
| | | T |
| | 24458 | CTGGGGCTTCAATTCACACCTTCGCTTACGCTAAGCGCTCCTCTTAACC |
| | | T |
| | 24459 | GTTTGGGCTTCTCCCCTTTCGCTCGCCGCTACTCAGGGAATCACTGTTG |
| | | T |
| | 24460 | ACAATCCACACCGAATGCCAATACCAAGGTATAGTAAAGGTCCCGGGGT |
| | | C |
| | 24461 | CAGGGTAGCTTTTATCCGTTGAGCGATGGCCCTTCCATACGGTACCACC |
| | | G |
| | 24462 | ATAGGCGGTGAAGCCCTCTTGACCTATCGGTCGCTCTACCTCTCACGGT |
| | | G |
| | 24463 | GCCATGCAGATTCTCACTGCATTCGCGCTACTCATTCCGGCATTCTCAC |
| | | T |
| | 24464 | CGGTACGCCGCCGGTACGGGAATATCCACCCGTTCATCCATTCGACTAC |
| | | G |
| | 24465 | GCACTCCACAGCTCCTTCCGGTACTGCTTCTTCGCGTTAAGAATGCTCC |
| | | T |
| | 24466 | CGTTCACTCTTCCTTGGCTCCTACCTATCCTGTACATGTGTAACAGATA |
| | | C |
| | 24467 | CCCCTGACCTGATTCAAGGCCACAGGTTAGAATTTCAGCACTTCAAGAG |
| | | T |
| | 24468 | CTACCCAGCAATGCCTTTGGCAAGACAACTGGTACACCAGCGGTAAGTC |
| | | C |
| | 24469 | CCAGCACCGGGCAGGCGTCACCCCCTATACTTCATCTTACGATTTCGCA |
| | | G |
| | 24470 | ATTCCTCACTGCTGCCTCCCGTAGGAGTTTGGACCGTGTCTCAGTCCCA |
| | | A |
| | 24471 | CTACGAGACTCAAGCTTGCCAGTATCAGATGCAGTTCCCAGGTTGAGCC |
| | | C |
| | 24472 | CTCTCAACGATGACGTCTCCTCTTAACCTTCCAGCACCGGGCAGGTGTC |
| | | A |
| | 24473 | ATTACCGCGGCTGCTGGCACGGAGTTAGCCGGTGCTTCTTCTGCGGGTA |
| | | A |
| | 24474 | GCGATGGACTTTCACACCGGACGCGACGAGCCGCCTACGAGCCCTTTAC |
| | | G |
| | 24475 | CCCACACCGGATATGGACCGAACTGTCTCACGACGTTCTGAACCCAGCT |
| | | C |
| | 24476 | GAATGAATGGCTGCTTCTGAGCCAACATCCTAGTTGTCTTAGAGATCCC |
| | | A |
| | 24477 | TCCCCGGAGTACCTTTTATCCTTTGAGCGATGTCCCTTCCATACGGAAA |
| | | C |
| | 24478 | GTAAAGCCACCTTATACCCTTGCATTCTACAGGAGATTTCTGACCTCCT |
| | | T |
| | 24479 | TCCGCCTGCGCACCCTTTAAACCCAATAAATCCGGATAACGCTCGTATC |
| | | C |
| | 24480 | AGGAAGTATTCAGGCTTACCAGGTGGTCCTGGCAGATTCACACACGATT |
| | | C |
| | 24481 | GTGTAGGATTCTCACCTACATCTCGCTACTCACACCGGCATTCTCACTT |
| | | C |
| | 24482 | GAACTGAGACCGGTTTTCAGGGATCCGCTCCATGTCGCCATGTCGCATC |
| | | C |
| | 24483 | TTCCTGAAGTTGATTCTTCGGGTTAGACAGCCAAACTTCTCAGGGTGGT |
| | | A |
| | 24484 | CGGTACTGGTACGCTATCGGTCAGACAGGTATGCTTAGACTTACGCCAC |
| | | G |
| | 24485 | GTTTCCCCTCGACTTGCATGTGTTAAGCCTGTAGCTAGCGTTCATCCTG |
| | | A |
| | 24486 | CGAAGTTACGGGGTCATTTTGCCGAGTTCCTTGACAATGCTTCTCCCGC |
| | | C |
| | 24487 | CTTGGGAATGATCAGCCTGTTATCCCCGGGGTACCTTTTATCCGTTGAG |
| | | C |
| | 24488 | GTCTATAAGTACTTCGATTTTTGCAAGTCCGAACCCCGAACGTCCGTAG |
| | | A |
| | 24489 | CACCTTTCCTTCACAGTACTGGTTCACTATCGGTCTCTCGGGAGTATTT |
| | | A |
| | 24490 | CCGGGAATTCCAGTCTCCCCTACCGCACTCCAGCCCGCCCGTACCCGGC |
| | | G |
| | 24491 | ACAGCTTTTCTCGCCATCTTCCATCTCGGACTTCGGTACTAATTTCCCT |
| | | C |
| | 24492 | TCTTTCGGCGAGGGGGGTTCCCGCCCCCTTTATCGTTACTTATACCTAC |
| | | A |
| | 24493 | TGTATGCGCCATTGTAGCACGTGTGTAGCCCTGGTCGTAAGGGCCATGA |
| | | T |
| | 24494 | CTTTCGTCTCTGATCGAGTTGTCACTCTCGCAGTCAGGCACCCTTCTGC |
| | | C |
| | 24495 | GATACTACAATTTCACTGAGCTCTTGGTTGAGACAGCGTCCGGATCATT |
| | | A |
| | 24496 | GATGTTTCAGTTCAGGCGGTTCCCTCAATACACCTATTTTAAATTTCAG |
| | | T |
| | 24497 | AAAAAAAAACAAAAAAAAAAACCCTCCCCCCCCCCCCTTCCCCTCCGCG |
| | | G |
| | 24498 | GCCCTGTTAAGACTTGGTATCCCTTCGGCTCCGCACCTTAAGTGCTTAA |
| | | C |
| | 24499 | ACCACGAATTCCGCCTGCCTCAACTGCACTCAAGATATCCAGTATCAAC |
| | | T |
| | 24500 | GAGTTTTTCACACTGTGCCATGCAGCACTGTGCGCTTATGCGGTATTAG |
| | | C |
| | 24501 | TGCCTAGTTCCTTAACCATGAATCTCTCAACGCCTCAGTATGTTCTACC |
| | | C |
| | 24502 | GGTGTGTACAAGGCCCGGGAACGTATTCACCGCGCCGTGGCTGATGCGC |
| | | G |
| | 24503 | TTCGCCACCGGTATTCCTCCAGATCTCTACGCATTTCACCGCTACACCT |
| | | G |
| | 24504 | CGCTTAACGCGTTAGCTCCGACACGGAACACGTGGAACGTGCCCCACAT |
| | | C |
| | 24505 | ACACGAGCCGAAACCCGTGTCTCTCAGACTCCCACCTATCCTGTGCATC |
| | | A |
| | 24506 | ACTCGATTTCTCTTCGGCTCCACACCTTAAGTGCTTAACCTTGCCGGCA |
| | | C |
| | 24507 | TGAACCCGCCCCGAAGGGAAACGCCATCTCTGGCGTCGTCGGGAACATG |
| | | T |

### DESCRIPTION OF THE EMBODIMENTS

[0048] This application discloses method for enriching viral molecules from a nucleic acid sample, particularly coronavirus molecules. In some embodiments, the viral molecules are viral RNA molecules. In some embodiments, the viral molecules are genomic viral DNA or RNA molecules. In some embodiments, solid supports can be prepared for enriching desired library fragments or depleting unwanted library fragments, wherein oligonucleotides are immobilized to the solid support. In some embodiments, the solid support is a flowcell.

[0049] Also disclosed herein are compositions comprising a probe set comprising at least two DNA probes complementary to at least one target viral nucleic acid molecules in a nucleic acid sample.

[0050] Disclosed herein are also kits for depleting or enriching libraries. In some embodiments, the kit comprises probe compositions disclosed herein and instructions for using the probe set. Such a kit may further comprise reagents for preparing a cDNA library from RNA, such as reagents for a stranded method of cDNA preparation from a sample comprising RNA, as described below.

### I. Target and Off-Target Nucleic Acids

### A. Coronavirus Targets

[0051] Described herein are methods for enriching viral molecules from a nucleic acid sample. In some embodiments, the viral molecule is a coronavirus molecule. In some embodiments, at least one coronavirus molecule is of the Alphacoronavirus, Betacoronavirus, Deltacoronavirus, Gammacoronavirus, and/or Bafinivirus genus.

[0052] As used herein, the term “nucleic acid” is intended to be consistent with its use in the art and includes naturally occurring nucleic acids or functional analogs thereof. Particularly useful functional analogs are capable of hybridizing to a nucleic acid in a sequence specific fashion or capable of being used as a template for replication of a particular nucleotide sequence. Naturally occurring nucleic acids generally have a backbone containing phosphodiester bonds. An analog structure can have an alternate backbone linkage including any of a variety of those known in the art. Naturally occurring nucleic acids generally have a deoxyribose sugar (e.g., found in deoxyribonucleic acid (DNA)) or a ribose sugar (e.g., found in ribonucleic acid (RNA)). A nucleic acid can contain any of a variety of analogs of these sugar moieties that are known in the art. A nucleic acid can include native or non-native bases. In this regard, a native deoxyribonucleic acid can have one or more bases selected from the group consisting of adenine, thymine, cytosine or guanine and a ribonucleic acid can have one or more bases selected from the group consisting of uracil, adenine, cytosine, or guanine. Useful non-native bases that can be included in a nucleic acid are known in the art. The term “target,” when used in reference to a nucleic acid, is intended as a semantic identifier for the nucleic acid in the context of a method or composition set forth herein and does not necessarily limit the structure or function of the nucleic acid beyond what is otherwise explicitly indicated.

[0053] In some embodiments, the present methods decrease library preparation costs and hands-on-time, as compared to prior art methods of enrichment, followed by library preparation.

[0054] As used herein, “desired RNA” or “a desired RNA sequence” refers to any RNA that a user wants to analyze. As used herein, a desired RNA includes the complement of a desired RNA sequence. Desired RNA may be RNA from which a user would like to collect sequencing data, after cDNA and library preparation. In some instances, the desired RNA is mRNA (or messenger RNA). In some instances, the desired RNA is a portion of the mRNA in a sample. For example, a user may want to analyze RNA transcribed from cancer-related genes, and thus this is the desired RNA.

[0055] As used herein, “desired library fragments” refers to library fragments prepared from cDNA prepared from desired RNA.

[0056] In some embodiments, the desired RNA sequence is a coronavirus sequence.

[0057] Also disclosed herein are compositions comprising a library fragment bound to an immobilized oligonucleotide on a solid support. In some embodiments, a single-stranded library fragment comprising cDNA prepared from a sample comprising RNA is hybridized to a solid support comprising immobilized oligonucleotides. In some embodiments, the cDNA comprised in the composition is complementary to RNA comprised in the sample.

### B. Off Target RNA

[0058] Also described herein are methods for depleting off-target RNA molecules from a nucleic acid sample.

[0059] As used herein, “off-target RNA,” “an off-target RNA sequence”, “unwanted RNA,” or “an unwanted RNA sequence” refers to any RNA that a user does not wish to analyze. As used herein, an unwanted RNA includes the complement of an unwanted RNA sequence. When RNA is converted into cDNA and this cDNA is prepared into a library, a user would sequence library fragments that were prepared from all RNA transcripts in the absence of depletion. Methods described herein for depleting library fragments prepared from unwanted RNA can thus save the user time and consumables related to sequencing and analyzing sequencing data prepared from unwanted RNA. In some embodiments, off-target RNA relates to small non-coding RNA (sncRNA). In some embodiments, the off-target RNA comprises sncRNA with MALAT 1. In some embodiments, off-target RNA comprises at least one small noncoding RNA chosen from RN7SK, RN7SL1, RN7SL2, RN7SL5P, RPPH1, SNORD3A. In some embodiments the off-target RNA is not MALAT1.Small noncoding RNAs are highly abundant as reads during the sequencing process and can lead to noise when analyzing sequencing data. MALAT1 is also highly abundant in the genome. MALAT1 is a highly conserved large, infrequently spliced non-coding RNA which is highly expressed in the nucleus. Trying to remove these reads after sequencing results in wasted sequencing.

[0060] As used herein, “off-target RNA,” “unwanted RNA” or “unwanted RNA sequence” also includes fragments of such RNA. For example, an unwanted RNA may comprise part of the sequence of an unwanted RNA. In some embodiments, unwanted RNA sequence is from human, rat, mouse, or bacteria. In some embodiments, the bacteria are Archaca species, E. Coli, or B. subtilis.

[0061] As used herein, “off-target library fragments” or “unwanted library fragments” also includes library fragments prepared from cDNA prepared from unwanted RNA.

[0062] Also described herein are compositions comprising a probe set comprising at least two DNA probes complementary to discontiguous sequences at least 5, or at least 10, or 15 bases apart along the full length of at least one off-target RNA molecule in a nucleic acid sample and a ribonuclease capable of degrading RNA in a DNA: RNA hybrid, wherein the off-target RNA comprises at least one small noncoding RNA chosen from RN7SK, RN7SL1, RN7SL2, RN7SL5P, RPPH1, SNORD3A

[0063] In some embodiments, the off-target RNA is high-abundance RNA. High-abundance RNA is RNA that is very abundant in many samples and which users do not wish to sequence, but it may or may not be present in a given sample. In some embodiments, the high-abundance RNA sequence is a ribosomal RNA (rRNA) sequence. Exemplary high-abundance RNAs are disclosed in WO2021/127191 and WO 2020/132304, each of which is incorporated by reference herein in its entirety.

[0064] In some embodiments, the high-abundance RNA sequences are the most abundant RNA sequences determined to be in a sample. In some embodiments, the high-abundance RNA sequences are the most abundant RNA sequences across a plurality of samples even though they may not be the most abundant in a given sample. In some embodiments, a user utilizes a method of determining the most abundant RNA sequences in a sample, as described herein.

[0065] In a given sample, the most abundant sequences are the 100 most abundant sequences. In some embodiments, in addition to depleting the 100 most abundant sequences, the method also is capable of depleting the 1,000 most abundant sequences, or the 10,000 most abundant sequences in a sample. In some embodiments, the off-target RNA sequence comprises a sequence with homology of at least 90%, at least 95%, or at least 99% to a most abundant sequence in a sample comprising RNA. In some embodiments, the off-target RNA sequence comprises a sequence with homology of at least 90%, at least 95%, or at least 99% to a most abundant sequence in a sample comprising RNA, wherein the most abundant sequences comprise the 100 most abundant sequences. In some embodiments, homology is measured against the 1,000 most abundant sequences, or the 10,000 most abundant sequences.

[0066] In some embodiments, the high-abundance RNA sequences are comprised in RNA known to be highly abundant in a range of samples.

[0067] In some embodiments, the off-target RNA sequence is globin mRNA or 28S, 23S, 18S, 5.8S, 5S, 16S, 12S, HBA-A1, HBA-A2, HBB, HBB-B1, HBB-B2, HBG1, or HBG2 RNA, or a fragment thereof.

[0068] In some embodiments, the off-target RNA sequence is 28S, 18S, 5.8S, 5S, 16S, or 12S RNA from humans, or a fragment thereof. In some embodiments, the off-target RNA sequence is rat 16S, rat 28S, mouse 16S, or mouse 28S RNA.

[0069] In some embodiments, the off-target RNA sequence is comprised in mRNA related to one or more “housekeeping” genes. For example, a housekeeping gene may be one that is commonly expressed in a sample from a tumor or other oncology-related sample, but that is not implicated in tumor genesis or progression. Housekeeping genes are typically constitutive genes that are required for the maintenance of basal cellular functions that are essential for the existence of a cell, regardless of its specific role in the tissue or organism. In some embodiments, the off-target RNA sequence is comprised in 23S, 16S, or 5S RNA from Gram-positive or Gram-negative bacteria.

### II. Compositions

[0070] Described herein are compositions comprising a probe set comprising at least one DNA probe comprising at least one sequence of SEQ ID NOs: 1-22909.

[0071] Also described herein are compositions comprising a probe set comprising at least two DNA probes complementary to at least one target coronavirus nucleic acid molecules in a nucleic acid sample wherein the target coronavirus nucleic comprises at least one coronavirus molecule selected from Table 2.

[0072] In some embodiments, the one or more target coronavirus nucleic acids are coronavirus RNA molecules. In some embodiments, the one or more target coronavirus nucleic acids are genomic coronavirus RNA molecules.

[0073] In some embodiments, the probe set further comprises at least two DNA probes that each hybridize to at least one target coronavirus molecule of the Alphacoronavirus, Betacoronavirus, Deltacoronavirus, Gammacoronavirus, and/or Bafinivirus genus.

[0074] In some embodiments, the probe set further comprises at least two DNA probes that each hybridize to at least one target coronavirus molecule selected from Table 2.

[0075] Also described herein are compositions comprising a probe set comprising at least one DNA probe comprising at least one sequence of SEQ ID NOs: 1-22909. In some embodiments, the composition comprises 2 or more, 5 or more, 10 or more, 25 or more, 50 or more, 100 or more, 200 or more, 300 or more, 400 or more, 500 or more, 600 or more, 700 or more, 800 or more, 900 or more, 1000 or more, 1100 or more, or 22909sequences selected from SEQ ID NOs: 1-22909. In some embodiments, the at least one DNA probe comprises 500 or more, 600 or more, 700 or more, 800 or more, 900 or more, 1000 or more, 1100 or more, or 22909sequences selected from SEQ ID NOs: 1-22909.

[0076] In some embodiments, the composition comprises at least 5, at least at least 10, at least 50, at least 100, at least 250, at least 500, at least 750, at least 1000, at least 1500, or at least 2000 sequences of SEQ ID NOs: 1-22909. In some embodiments, the composition comprises two or more, five or more, 10 or more, or 25 or more sequences selected from SEQ ID NOs: 1-22909.

[0077] In some embodiments the probe set comprises any one or more of SEQ ID NOs: 22910-24507.

[0078] In some embodiments the probe set is biotinylated.

### III. Methods of Use

### A. Methods of Enriching for Viral Nucleic Acids

[0079] Described herein are methods of enriching a sample for one or more target viral nucleic acids.

[0080] In some embodiments, the present methods decrease library preparation costs and hands-on-time, as compared to prior art methods of enriching for vial nucleic acids, followed by library preparation.

[0081] In some embodiments, the method comprises providing any of the compositions described herein, in Section II (Compositions) above.

[0082] In some embodiments, the method comprises providing a probe set comprising at least two nucleic acid probes complementary to one or more target viral nucleic acids, wherein the probe set comprises at least two of SEQ ID NOs: 1-22909; allowing the probes in the probe set to hybridize to the target viral nucleic acids; and enriching the sample for the one or more target viral nucleic acids by amplifying the target viral nucleic acids and/or separating the target viral nucleic acids from the sample.

[0083] Also described herein are methods of enriching a sample for one or more target coronavirus nucleic acids. In some embodiments, the present methods detect or enrich for new or unknown viral pathogens, including coronaviruses, or new or unknown strains of viral pathogens, including coronaviruses. This may include analysis of patient samples. In some embodiments, the present methods detect co-infections with one or more additional pathogens, including viruses or bacteria. In some embodiments, the present methods detect or enrich for specific viral pathogen strains. In some embodiments, the present methods can be used to perform strain typing and/or strain characterization for monitoring viral pathogen evolution and epidemiology (e.g., coronavirus evolution and epidemiology). In some embodiments, the present methods detect or enrich for viral nucleic acids that exhibit resistance. Resistance can include resistance to anti-viral therapies (whether small molecule therapy or other therapies including treatment with antibodies (including antigen-binding fragments thereof or other biologics with CDRs responsible for specific binding), viral entry inhibitors, viral assembly inhibitors, viral DNA and RNA polymerase inhibitors, viral reverse transcriptase inhibitors, viral protease inhibitors, viral integrase inhibitors, and inhibitors of viral shedding. In some embodiments, the present methods are used to identify hospital-associated viral infections (e.g., hospital-associated coronavirus infections). As used herein, a hospital-associated viral infection refers to an infection whose development spread through and/or is favored by a hospital environment, nursing home, rehabilitation facility, group home, residential facility, medical office, clinic, or other clinical settings. This infection is spread to a subject in the clinical setting by a number of means, for example through contaminated equipment, bed linens, or air droplets. In some embodiments, the present methods are used for viral resequencing. In some embodiments, resequencing allows for testing for known mutations or scanning for one or more mutations in a given target region. Such methods may be used in a panel used for detection of and/or typing of viral pathogens (e.g., coronaviruses).

[0084] In some embodiments, the method comprises providing a probe set comprising at least two nucleic acid probes complementary to one or more target coronavirus nucleic acids, wherein the nucleic acid probes are affixed to a support; capturing one or more target coronavirus nucleic acids on a support; using the one or more captured target coronavirus nucleic acids as a template strand to produce one or more nucleic acid duplexes immobilized on the support, wherein the at least one target coronavirus nucleic acids hybridize to one or more probes in a probe set on the support; contacting a transposase and transposon with the one or more nucleic acid duplexes under conditions wherein the one or more nucleic acid duplexes and transposon composition undergo a transposition reaction to produce one or more tagged nucleic acid duplexes, wherein the transposon composition comprises a double stranded nucleic acid molecule comprising a transferred strand and a non-transferred strand; contacting the one or more tagged nucleic acid duplexes with a nucleic acid modifying enzyme under conditions to extend the 3′ end of the immobilized strand to the 5′ end of the template strand to produce one or more end-extended tagged nucleic acid duplexes; amplifying the one or more end-extended tagged nucleic acid duplexes to produce a plurality of tagged nucleic acid strands; contacting the plurality of tagged nucleic acid strands with a probe set to create an enriched library; and amplifying the enriched library. A wide variety of solid supports may be used to immobilize oligonucleotides for depleting or enriching as described herein, including those described in WO 2014/108810, which is incorporated in its entirety herein.

[0085] The composition and geometry of the solid support can vary with its use. In some embodiments, the solid support is a planar structure such as a slide, chip, microchip and/or array. As such, the surface of a substrate can be in the form of a planar layer. In some embodiments, the solid support comprises one or more surfaces of a flowcell. The term “flowcell” as used herein refers to a chamber comprising a solid surface across which one or more fluid reagents can be flowed. Examples of flowcells and related fluidic systems and detection platforms that can be readily used in the methods of the present disclosure are described, for example, in Bentley et al., Nature 456:53-59 (2008), WO 04/018497; U.S. Pat. No. 7,057,026; WO 91/06678; WO 07/123744; U.S. Pat. Nos. 7,329,492; 7,211,414; 7,315,019; 7,405,281, and U.S. 2008/0108082, each of which is incorporated herein by reference.

[0086] In some embodiments, a flowcell is comprised within an apparatus or device for sequencing nucleic acids, which may be referred to as a sequencer. In some embodiments, a sequence may also comprise reservoirs for collection of samples or tubing (such as for collecting samples in a reservoir of for exiting of waste). In some embodiments, one or more reservoirs are separate from the flowcell and are comprised in the sequencer. In some embodiments, modifications are made to standard sequencers to improve fluidics system recipes and/or hardware for use of reservoirs in the present methods.

[0087] As used herein, a “flowcell” may comprise a flowcell-like device that is not intended to be imaged. While standard flowcells used for imaging may be employed in the present methods, flowcells can also be engineered differently than flowcells intended for imaging. In some embodiments, a flowcell may have a high density of immobilized oligonucleotides, wherein imaging infrastructure would have difficulty separating out into different bridge-amplified clusters associated with different immobilized oligonucleotides. In some embodiments, a high density of immobilized oligonucleotides improves hybridization efficiency. In some embodiments, standard clear glass may be used in a flowcell. In other embodiments, hard plastic may be used in the flowcell. Use of glass in a flowcell may allow use of a standard flowcell without further optimization, whereas use of hard plastic may reduce the cost of manufacturing the flowcell and/or improve stability of a flowcell. Depending on the advantages desired, different materials may be used. In some embodiments, immobilized oligonucleotides are embedded in a substrate other than that of a standard flowcell (i.e., embedded in a substrate other than PAZAM) to improve immobilization of oligonucleotides of longer length.

### B. Methods of Supplementing a Probe Set for Use in Enriching for Viral Nucleic Acids

[0088] Also described herein are methods of supplementing a probe set for use in enriching for viral nucleic acid molecules from a nucleic acid sample.

[0089] In some embodiments, the methods of enriching for viral nucleic acids described herein can be supplemented with or used in conjunction with other enrichment panels. In some embodiments, the method also targets genitourinary pathogens, Antimicrobial Resistance (AMR) markers, respiratory viruses, respiratory pathogens (e.g., viruses, bacteria, fungi, and/or parasites), and/or exonic content. In some embodiments, the method is used with, supplemented with, or used in conjunction with the Urinary Pathogen ID/AMR Panel or Enrichment Kit (UPIP; Illumina). In some embodiments, the method is used with, supplemented with, or used in conjunction with the Respiratory Virus Oligos Panel or Enrichment Kit (RVOP; Illumina). In some embodiments, the method is used with the Illumina Exome Panel (Illumina). In some embodiments, the method is used with, supplemented with, or used in conjunction with the Virus Surveillance Panel or Enrichment Kit (VSP; Illumina) In some embodiments, the method is used with, supplemented with, or used in conjunction with the Respiratory Pathogen ID/Antimicrobial Resistance (AMR) Panel or Enrichment Kit (Illumina). In some embodiments, the method is used with, supplemented with, or used in conjunction with the Pan-CoV Panel or Enrichment Kit (Illumina). In some embodiments, the method is supplemented with or used in conjunction with the Illumina Exome Panel (Illumina). In some embodiments, the method targets and enriches for coding RNA sequences. In some embodiments, the method is used with the Illumina RNA Prep with Enrichment (Illumina).

[0090] Examples of supplemental probe sets that can be readily used in the methods of the present disclosure are described, for example, in U.S. Provisional Application No. 63/250,563, filed Sep. 30, 2021, U.S. Provisional Application No. 63/351,170, filed Jun. 10, 2022, and U.S. Provisional Application No. 63/378,610, filed Oct. 6, 2022, each of which is incorporated by reference herein in its entirety.

[0091] In some embodiments the method comprises depleting unwanted nucleic acid molecules from a nucleic acid sample.

[0092] In some embodiments, the depleting unwanted nucleic acid molecules comprises depleting unwanted cDNA library fragments from a library of cDNA fragments prepared from RNA, wherein the unwanted library fragments comprise those prepared from unwanted RNA sequences, further comprising: preparing a solid support comprising at least one immobilized oligonucleotide, wherein each immobilized oligonucleotide comprises a nucleic acid sequence corresponding to an unwanted RNA sequence or its complement, adding the library of fragments to the solid support and hybridizing the library fragments to at least one immobilized oligonucleotide to allow binding of unwanted library fragments to at least one immobilized oligonucleotide, and collecting library fragments not bound to at least one immobilized oligonucleotide.

[0093] In some embodiments, the at least one immobilized oligonucleotide comprises a sequence comprising any one or more of SEQ ID NOs: 23377-24507 or its complement.

[0094] In some embodiments, the depleting unwanted nucleic acid molecules comprises depleting off-target RNA nucleic acid molecules from a nucleic acid sample comprises contacting a nucleic acid sample comprising at least one RNA or DNA target sequence and at least one off-target RNA molecule from a first species with a probe set comprising at least two DNA probes complementary to discontiguous sequences along the full length of the at least one off-target RNA molecule from a second species, thereby hybridizing the DNA probes to the off-target RNA molecules to form DNA: RNA hybrids, wherein each DNA: RNA hybrid is at least 5 bases apart, or at least 10 bases apart, along a given off-target RNA molecule sequence from any other DNA: RNA hybrid, wherein the off-target DNA comprises at least one small noncoding RNA chosen from RN7SK, RN7SL1, RN7SL2, RN7SL5P, RPPH1, SNORD3A; contacting the DNA: RNA hybrids with a ribonuclease that degrades the RNA from the DNA: RNA hybrids, thereby degrading the off-target RNA molecules in the nucleic acid sample to form a degraded mixture; separating the degraded RNA from the degraded mixture; sequencing the remaining RNA from the sample; evaluating the remaining RNA sequences for the presence of off-target RNA molecules from the first species, thereby determining gap sequence regions; and supplementing the probe set with additional DNA probes complementary to discontiguous sequences in one or more of the gap sequence regions.

[0095] In some embodiments, the probe set comprises any one or more of SEQ ID NOs: 22917-23376.

[0096] In some embodiments, the method further comprises depleting unwanted cDNA library fragments from a library of cDNA fragments prepared from RNA, wherein the unwanted library fragments comprise those prepared from unwanted RNA sequences. In some embodiments, a solid support comprises more than one pool of immobilized oligonucleotides on its surface.

[0097] For example, a solid support may comprise a first pool of immobilized oligonucleotides for depleting and a second pool of immobilized oligonucleotides for enriching. In some embodiments, one pool of immobilized oligonucleotides may be blocked (such as with complementary nucleic acid sequences) to avoid binding to complementary library fragments during certain steps of methods using the solid support.

[0098] In some embodiments, a solid support has two pools of immobilized oligonucleotides on its surface, wherein the first pool comprises immobilized oligonucleotides each comprising an unwanted RNA sequence and the second pool comprises immobilized oligonucleotides each comprising a solid support adapter sequence that can bind to a library adapter comprised in library fragments. In some embodiments, solid support adapter sequences are bound by adapter complements, wherein the adapter complements can be denatured during a method to allow binding of solid support adapter sequences to library adapters in library fragments. Such a solid support can be used for methods of preparing a depleted library and amplifying the depleted library on the same solid support.

[0099] In some embodiments, at least one unwanted RNA sequence has at least 90%, at least 95%, or at least 99% homology to a high-abundance RNA sequence in a sample used to prepare the library of fragments. In some embodiments, all unwanted sequences have at least 90%, at least 95%, or at least 99% homology to a high-abundance RNA sequence in a sample used to prepare the library of fragments.

### C. Samples

[0100] In some embodiments, the sample comprises a microbe sample, a microbiome sample, a bacteria sample, a yeast sample, a plant sample, an animal sample, a patient sample, an epidemiology sample, an environmental sample, a soil sample, a water sample, a metatranscriptomics sample, or a combination thereof. In some embodiments, samples are from mixed populations of microbes such as microbial populations or viral populations from patients.

[0101] In some embodiments the sample is a water sample. In some embodiments, the water sample is a freshwater sample, a wastewater sample, a saline water sample, or a combination thereof. In some embodiments, the sample comprises a wastewater sample.

[0102] In some embodiments, the sample may be from a mammal. In some embodiments the sample may be from a human, monkey, bat, dog, cat, horse, goat, sheep, cow, pig, rat and/or mouse. In some instances, reservoirs of coronaviruses or other microbes in animal populations can serve as samples to predict what diseases or strains of diseases may become human pathogens or to compare sequences in animal reservoirs to sequences of pathogens infecting humans.

[0103] In some embodiments, samples may be from a patient. In some embodiments, samples may be from a patient with cancer (i.e., an oncology sample). In some embodiments, samples may be from a patient with a rare disease. In some embodiments, samples may be from a patient with coronavirus SARS-COV2 (COVID-19).

[0104] In some embodiments, the sample may be a tumor sample. In some embodiments, the sample may be a blood sample, a serum sample, and/or a whole blood sample. In some embodiments the sample may be a tissue sample. In some embodiments the sample may be a fecal sample, a urine sample, a mucus sample, a saliva sample, a lymph sample, a vaginal fluid sample, a semen sample, an amniotic sample, and/or a sweat sample.

### D. Library Preparation

[0105] Libraries prepared by any method can be used together with the present methods of enriching and/or depleting. In some embodiments, probes are single-stranded to allow for hybridizing and capturing of single-stranded library fragments that are complementary. In some embodiments, specific binding of a single-stranded library fragment to a probe generates a double-stranded oligonucleotide. In some embodiments, the double-stranded oligonucleotide forms a DNA: RNA hybrid. The probe specifically bound to the library fragment may be bound with a high-enough affinity to be recognized for degradation with a ribonuclease. In some embodiments, the off-target RNA molecules are degraded after contacting the sample with a ribonuclease to form a degraded mixture.

[0106] As used herein, the term “library” refers to a collection of members. In one embodiment, the library includes a collection of nucleic acid members, for example, a collection of whole genomic, subgenomic fragments, cDNA, cDNA fragments, RNA, RNA fragments, or a combination thereof. In some embodiments, a portion or all library members include a non-target adaptor sequence. The adaptor sequence can be located at one or both ends. The adaptor sequence can be used in, for example, a sequencing method (for example, an NGS method), for amplification, for reverse transcription, or for cloning into a vector.

[0107] In some embodiments, this DNA: RNA hybrid-specific cleavage comprises use of RNase H. This methodology is implemented as part of the current Illumina Total RNA Stranded Library Prep workflow and New England Biolabs NEBNext rRNA Depletion Kit and RNA depletion methods as described in U.S. Pat. Nos. 9,745,570 and 9,005,891.

### E. Amplification

[0108] In some embodiments, methods described herein comprise one or more amplification step. In some embodiments, library fragments are amplified before being added to a solid support. In some embodiments library fragments are amplified after a method of depleting described herein. In some embodiments, amplifying is by PCR amplification.

[0109] As used herein, “amplify,” “amplifying,” or “amplification reaction” and their derivatives, refer generally to any action or process whereby at least a portion of a nucleic acid molecule is replicated or copied into at least one additional nucleic acid molecule. The additional nucleic acid molecule optionally includes sequence that is substantially identical or substantially complementary to at least some portion of the template nucleic acid molecule. The template nucleic acid molecule can be single-stranded or double-stranded and the additional nucleic acid molecule can independently be single-stranded or double-stranded. Amplification optionally includes linear or exponential replication of a nucleic acid molecule. In some embodiments, such amplification can be performed using isothermal conditions; in other embodiments, such amplification can include thermocycling. In some embodiments, the amplification is a multiplex amplification that includes the simultaneous amplification of a plurality of target sequences in a single amplification reaction. In some embodiments, “amplification” includes amplification of at least some portion of DNA and RNA based nucleic acids alone, or in combination. The amplification reaction can include any of the amplification processes known to one of ordinary skill in the art. In some embodiments, the amplification reaction includes polymerase chain reaction (PCR).

1. Amplification after Enriching

[0110] In some embodiments, collected library fragments are amplified after a method of enriching. In some embodiments, an enriched library is amplified.

[0111] In some embodiments, the amplifying is performed with a thermocycler. In some embodiments, the amplifying is by PCR amplification.

[0112] As used herein, the term “polymerase chain reaction” (“PCR”) refers to the method as described in U.S. Pat. Nos. 4,683,195 and 4,683,202, which describe a method for increasing the concentration of a segment of a polynucleotide of interest in a mixture of genomic DNA without cloning or purification. This process for amplifying the polynucleotide of interest consists of introducing a large excess of two oligonucleotide primers to the DNA mixture containing the desired polynucleotide of interest, followed by a series of thermal cycling in the presence of a DNA polymerase. The two primers are complementary to their respective strands of the double stranded polynucleotide of interest. The mixture is denatured at a higher temperature first and the primers are then annealed to complementary sequences within the polynucleotide of interest molecule. Following annealing, the primers are extended with a polymerase to form a new pair of complementary strands. The steps of denaturation, primer annealing, and polymerase extension can be repeated many times (referred to as thermocycling) to obtain a high concentration of an amplified segment of the desired polynucleotide of interest. The length of the amplified segment of the desired polynucleotide of interest (amplicon) is determined by the relative positions of the primers with respect to each other, and therefore, this length is a controllable parameter. By virtue of repeating the process, the method is referred to as the “polymerase chain reaction” (hereinafter “PCR”). Because the desired amplified segments of the polynucleotide of interest become the predominant nucleic acid sequences (in terms of concentration) in the mixture, they are said to be “PCR amplified.” In a modification to the method discussed above, the target nucleic acid molecules can be PCR amplified using a plurality of different primer pairs, in some cases, one or more primer pairs per target nucleic acid molecule of interest, thereby forming a multiplex PCR reaction.

[0113] In some embodiments, the amplifying is performed without PCR amplification. In some embodiments, the amplifying does not require a thermocycler. In some embodiments, depleting and amplifying after the depleting is performed in a sequencer.

[0114] In some embodiments, the amplifying is performed without a thermocycler. In some embodiments, the amplifying is performed by bridge or cluster amplification

### F. Sequencing of Enriched Libraries

[0115] In some embodiments, a library enriched for enriching for target viral sequences library fragments is sequenced.

[0116] In some embodiments, sequencing data generated after enriching for target viral sequences is capable of capturing novel coronaviruses with homology to the sequence in the probe set. In some embodiments, sequencing data generated after enriching for target viral sequences is capable of capturing new or unknown viruses (e.g., new or unknown coronaviruses). In some embodiments, sequencing data generated after enriching for target viral sequences is capable of capturing co-infections. In some embodiments, sequencing data generated after enriching for target viral sequences is capable of capturing specific viral strains (e.g., specific coronavirus strains). In some embodiments, sequencing data generated after enriching for target viral sequences is capable of capturing viral nucleic acids that exhibit resistance. In some embodiments, sequencing data generated after enriching for target viral sequences provides unbiased viral pathogen detection. In some embodiments, sequencing data generated after enriching for target viral sequences is capable of capturing viral nucleic acids present in hospital-associated infection management.

[0117] Enriched libraries prepared by the present method can be used with any type of RNA sequencing, such as RNA-seq, small RNA sequencing, long non-coding RNA (lncRNA) sequencing, circular RNA (circRNA) sequencing, targeted RNA sequencing, exosomal RNA sequencing, and degradome sequencing.

[0118] Enriched libraries can be sequenced according to any suitable sequencing methodology, such as direct sequencing, including sequencing by synthesis, sequencing by ligation, sequencing by hybridization, nanopore sequencing and the like. In some embodiments, the enriched libraries are sequenced on a solid support. In some embodiments, the solid support for sequencing is the same solid support on which the enriching is performed. In some embodiments, the solid support for sequencing is the same solid support upon which amplification occurs after the enriching.

[0119] Flowcells provide a convenient solid support for performing sequencing. One or more library fragments (or amplicons produced from library fragments) in such a format can be subjected to an SBS or other detection technique that involves repeated delivery of reagents in cycles. For example, to initiate a first SBS cycle, one or more labeled nucleotides, DNA polymerase, etc., can be flowed into/through a flowcell that houses one or more amplified nucleic acid molecules. Those sites where primer extension causes a labeled nucleotide to be incorporated can be detected. Optionally, the nucleotides can further include a reversible termination property that terminates further primer extension once a nucleotide has been added to a primer. For example, a nucleotide analog having a reversible terminator moiety can be added to a primer such that subsequent extension cannot occur until a deblocking agent is delivered to remove the moiety. Thus, for embodiments that use reversible termination, a deblocking reagent can be delivered to the flowcell (before or after detection occurs). Washes can be carried out between the various delivery steps. The cycle can then be repeated n times to extend the primer by n nucleotides, thereby detecting a sequence of length n. Exemplary SBS procedures, fluidic systems and detection platforms that can be readily adapted for use with amplicons produced by the methods of the present disclosure are described, for example, in Bentley et al., Nature 456:53-59 (2008), WO 04/018497; U.S. Pat. No. 7,057,026; WO 91/06678; WO 07/123744; U.S. Pat. Nos. 7,329,492; 7,211,414; 7,315,019; 7,405,281, and US 2008/0108082, each of which is incorporated herein by reference.

[0120] The term “flow cell” as used herein refers to a chamber comprising a solid surface across which one or more fluid reagents can be flowed. Examples of flow cells and related fluidic systems and detection platforms that can be readily used in the methods of the present disclosure are described, for example, in Bentley et al., Nature 456:53-59 (2008); WO 04/018497; WO 91/06678; WO 07/123744; U.S. Pat. Nos. 7,057,026; 7,211,414; 7,315,019; 7,329,492; 7,405,281; and US Pat. Publication No. 2008/0108082.

### G. Whole Genome Sequencing, Amplicon Sequencing, Metagenomic Analysis, and Metatranscriptomic Analysis

[0121] In some embodiments, samples are sequenced using whole-genome sequencing and/or amplicon sequencing. Whole genome sequencing refers to sequencing the genome of any organism including viral pathogens (e.g., coronaviruses) and host organisms. For example, whole genome sequencing may be performed on a microbial isolate. Transmission dynamics may be evaluated by whole genome sequencing. Whole genome sequencing also provides useful information on strain characterization, resistance detection, and hospital-associated infection management.

[0122] In some embodiments, samples are sequenced using amplicon sequencing. The term “amplicon” refers to the resultant mixture of compounds after two or more cycles of the PCR steps of denaturation, annealing and extension. Thus, amplicon sequencing is the sequencing of amplicons and this can provide useful information on variant identification and characterization. In some embodiments, amplicon sequencing encompasses amplification of one or more segments of one or more target sequences, which can be performed by using probes to target and amplify regions of interest, followed by sequencing, such as next-generation sequencing. Amplicon sequencing may be performed on a variety of samples, including patient samples or microbial isolates, and is useful for strain characterization. It is also useful for viral resequencing and resistance detection.

[0123] In some embodiments, additional information may be obtained about samples using metagenomic and/or metatranscriptomic analyses. Metagenomic and/or metatranscriptomic analysis may be performed on patient samples and may provide unbiased viral pathogen detection. In some embodiments, metagenomic or metatranscriptomic analyses comprises sequencing the genomes of a plurality of individuals of different species in a given sample. In some embodiments, metagenomic or metatranscriptomic analyses is done without prior knowledge regarding the biological species in the sample, whether they be viral or human. In some embodiments, metagenomic or metatranscriptomic analyses enables determination of which species are present, and their relative abundances. Thus, metagenomic and/or metatranscriptomic analysis may be useful for unknown viral pathogen detection, co-infection detection, resistance detection, and/or strain characterization.

[0124] In some embodiments, whole genome sequencing, amplicon sequencing, metgenomic analysis, and/or metatranscriptomic analyses may be used in combination with each other.

### IV. Kits

[0125] Described herein is a kit comprising any of the compositions described herein in Section II, Compositions, above.

[0126] Disclosed herein are also kits for depleting or enriching libraries. In some embodiments, the kit comprises a solid support disclosed herein and instructions for using the solid support. Such a kit may further comprise reagents for preparing a cDNA library from RNA, such as reagents for a stranded method of cDNA preparation from a sample comprising RNA, as described below.

[0127] In some embodiments the kit comprises at least one DNA probe comprising at least one sequence comprising at least one of SEQ ID NOs: 1-2909 and a buffer.

[0128] In some embodiments, the buffer is a wash buffer and/or an elution buffer.

[0129] In some embodiments, the kit further comprises an RNA depletion buffer, a probe depletion buffer, and/or a probe removal buffer.

[0130] In some embodiments, the kit further comprises a ribonuclease; a DNase; and RNA purification beads. In some embodiments, the ribonuclease is RNase H.

[0131] In some embodiments, the kit comprises a buffer and nucleic acid purification medium. In some embodiments, the buffer is an RNA depletion buffer, a probe depletion buffer, and/or a probe removal buffer.

[0132] In some embodiments, the kit comprises a nucleic acid destabilizing chemical. In some embodiments, the nucleic acid destabilizing chemical comprises betaine, DMSO, formamide, glycerol, or a derivative thereof, or a mixture thereof. In some embodiments, the nucleic acid destabilizing chemical comprises formamide.

[0133] Throughout this application and claims, the term “and/or” means one or more of the listed elements or a combination of any two or more of the listed elements.

[0134] The term “comprises” and variations thereof do not have a limiting meaning where these terms appear in the description and claims.

[0135] It is understood that wherever embodiments are described herein with the language “include,” “includes,” or “including,” and the like, otherwise analogous embodiments described in terms of “consisting of” and/or “consisting essentially of” are also provided. The term “consisting of” is limited to whatever follows the phrase “consisting of.” That is, “consisting of” indicates that the listed elements are required or mandatory, and that no other elements may be present. The term “consisting essentially of” indicates that any elements listed after the phrase are included, and that other elements than those listed may be included provided that those elements do not interfere with or contribute to the activity or action specified in the disclosure for the listed elements.

[0136] Unless otherwise specified, “a,” “an,” “the,” and “at least one” are used interchangeably and mean one or more than one.

[0137] As used herein, the term “each,” when used in reference to a collection of items, is intended to identify an individual term in the collection but does not necessarily refer to every term in the collection unless the context clearly dictates otherwise.

[0138] The recitations of numerical ranges by endpoints include all numbers subsumed within that range (e.g., 1 to 5 includes 1, 1.5, 2, 2.75, 3, 3.80, 4, 5, etc.).

[0139] For any method disclosed herein that includes discrete steps, the steps may be conducted in any feasible order. And, as appropriate, any combination of two or more steps may be conducted simultaneously.

[0140] The above summary of the present invention is not intended to describe each disclosed embodiment or every implementation of the present invention. The description that follows more particularly exemplifies illustrative embodiments. In several places throughout the application, guidance is provided through lists of examples, which examples can be used in various combinations. In each instance, the recited list serves only as a representative group and should not be interpreted as an exclusive list.

[0141] Reference throughout this specification to “one embodiment,” “an embodiment,” “certain embodiments,” or “some embodiments,” etc., means that a particular feature, configuration, composition, or characteristic described in connection with the embodiment is included in at least one embodiment of the disclosure. Thus, the appearances of such phrases in various places throughout this specification are not necessarily referring to the same embodiment of the disclosure. Furthermore, the particular features, configurations, compositions, or characteristics may be combined in any suitable manner in one or more embodiments.

[0142] Unless otherwise indicated, all numbers expressing quantities of components, molecular weights, and so forth used in the specification and claims are to be understood as being modified in all instances by the term “about.” Accordingly, unless otherwise indicated to the contrary, the numerical parameters set forth in the specification and claims are approximations that may vary depending upon the desired properties sought to be obtained by the present invention. At the very least, and not as an attempt to limit the doctrine of equivalents to the scope of the claims, each numerical parameter should at least be construed in light of the number of reported significant digits and by applying ordinary rounding techniques.

[0143] All headings are for the convenience of the reader and should not be used to limit the meaning of the text that follows the heading, unless so specified.

[0144] Notwithstanding that the numerical ranges and parameters setting forth the broad scope of the invention are approximations, the numerical values set forth in the specific examples are reported as precisely as possible. All numerical values, however, inherently contain a range necessarily resulting from the standard deviation found in their respective testing measurements.

### EXAMPLES

[0145] The following examples are illustrative only and are not intended to limit the scope of the application. Modifications will be apparent and understood by skilled artisans and are included within the spirit and under the disclosure of this application.

### Example 1. Preparation of Probes to Improve Enrichment of Coronaviruses of Interest in Wastewater Samples

### A. Probe Design

[0146] Probes were designed by a proprietary algorithm for enrichment probes running on a Linux server (first iteration probes). The weighting for spacing and probe scoring variables were set to 6 and 1 respectively. Probe spacing was set to ‘adjacent’, or 80 bp center to center.

[0147] The first iteration probes aimed to strike a balance between capturing the most important virus species/the ones most heavily represented as isolates in NCBI nucleotide database and capturing a diverse set of sequences from the four coronavirus genera. Choice of diverse sequences was based on phylogenetic trees generated by sequence alignments using the MAFFT alignment algorithm set to the FFT-NS-i iterative refinement method and generating trees using Jalview average distance method. See Table 1.

TABLE 1

| FASTA_ID | Name | Accession | Genus | Subgenus |
|---|---|---|---|---|
| 229E | Human coronavirus 229E | Consensus | Alphacoronavirus | Duvinacovirus |
| AlphaCoV1 | Phylogenetic grouping of various animal | Consensus | Alphacoronavirus | Tegacovirus |
| | transmissible gastroenteritis viruses | | | |
| AlphaSp | Phylogenetic grouping of various | Consensus | Alphacoronavirus | unclassified |
| | alphacoronavirus sp. strains | | | |
| Anlong | Bat coronavirus isolate Anlong | Consensus | unclassified | n/a |
| | | | Coronavirinae | |
| AvianCoV | Phylogenetic grouping of avian | Consensus | Gammacoronavirus | Igacovirus |
| | coronavirus (infectious bronchitis) strains | | | |
| Beluga | Beluga Whale coronavirus | Consensus | Gammacoronavirus | Cegacovirus |
| BetaCoV1 | Phylogenetic grouping of various | Consensus | Betacoronavirus | Embecovirus |
| | embecovirus isolates | | | |
| BetaSp | Phylogenetic grouping of rodent | Consensus | Betacoronavirus | Embecovirus |
| | embecovirus isolates | | | |
| CDPHE15 | Bat coronavirus CDPHE15 | Consensus | Alphacoronavirus | Colacovirus |
| Delta | Consensus sequences of NCBI | Consensus | Deltacoronavirus | multiple |
| | Deltacoronavirus sequences | | | |
| HKU1 | Human coronavirus HKU1 | Consensus | Betacoronavirus | Embecovirus |
| HKU2 | Rhinolophus bat coronavirus HKU2 | Consensus | Alphacoronavirus | Rhinacovirus |
| HKU4 | Tylonycteris bat coronavirus HKU4 | Consensus | Betacoronavirus | Merbecovirus |
| HKU5 | Pipistrellus bat coronavirus HKU5 | Consensus | Betacoronavirus | Merbecovirus |
| HKU8 | Miniopterus bat coronavirus HKU8 | Consensus | Alphacoronavirus | Minunacovirus |
| HKU9 | Rousettus bat coronavirus HKU9 | Consensus | Betacoronavirus | Nobecovirus |
| HKU10 | Bat coronavirus HKU10 | Consensus | Alphacoronavirus | Decacovirus |
| HKU14 | rabbit coronavirus HKU14 | Consensus | Betacoronavirus | Embecovirus |
| HKU15 | Porcine coronavirus HKU15 | Consensus | Deltacoronavirus | Buldecovirus |
| HKU25 | Hypsugo bat coronavirus HKU25 | Consensus | Betacoronavirus | Merbecovirus |
| HKU31 | Erinaceus hedgehog coronavirus HKU31 | Consensus | Betacoronavirus | Merbecovirus |
| MERS | Middle East respiratory syndrome | Consensus | Betacoronavirus | Merbecovirus |
| | coronavirus | | | |
| MurineCoV | Phylogenetic grouping of rodent | Consensus | Betacoronavirus | Embecovirus |
| | embecovirus isolates | | | |
| NL63 | Human Coronavirus NL63 | Consensus | Alphacoronavirus | Setracovirus |
| PEDV | Porcine epidemic diarrhea virus | Consensus | Alphacoronavirus | Pedacovirus |
| SARSCoV2 | Severe acute respiratory syndrome | Consensus | Betacoronavirus | Sarbecovirus |
| | coronavirus 2 | | | |
| SARSCoV | Severe acute respiratory syndrome | Consensus | Betacoronavirus | Sarbecovirus |
| | coronavirus | | | |
| Sparrow | Sparrow deltacoronavirus | Consensus | Deltacoronavirus | Buldecovirus |

[0148] A further round of probe design using the same methods was targeted to a larger and yet more diverse set of coronavirus isolates (second iteration probes). See Table 2. In addition to the publicly available sequences provided in Table 2, second iteration probes were also designed to a number of proprietary sequences.

TABLE 2

| FASTA_ID | Name | Accession | Genus | Subgenus |
|---|---|---|---|---|
| 229ER | Rousettus aegyptiacus | MN611517 | Alphacoronavirus | Duvinacovirus |
| | bat coronavirus | | | |
| | 229E_related | | | |
| AcCoV_JC34 | Coronavirus | KX964649 | Alphacoronavirus | Luchacovirus |
| | AcCoV_JC34 | | | |
| Alpha2 | Mink coronavirus strain | HM245926 | Alphacoronavirus | Minacovirus |
| | WD1133 | | | |
| Alpha3398 | Alphacoronavirus | HM245925 | Alphacoronavirus | Minacovirus |
| | Bat_CoV/P.kuhlii/Italy/ | | | |
| | 3398_19/2015 | | | |
| AlphaBat | Bat alphacoronavirus | MN065811 | Alphacoronavirus | unclassified |
| AlphaMink | Alphacoronavirus | MF113046 | Alphacoronavirus | Minacovirus |
| | Mink/China/1/2016 | | | |
| BatCoV | Bat coronavirus | MG916904 | unclassified | n/a |
| | BtCoV/Rh/YN2012 | | Coronavirinae | |
| | isolate | | | |
| | BtCoV/Rh/YN2012_Ra13591 | | | |
| BatCoV1A | Bat coronavirus 1A | EU420137 | Alphacoronavirus | Minunacovirus |
| BM48_31 | Bat coronavirus | GU190215 | Betacoronavirus | Sarbecovirus |
| | BM48_31/BGR/2008 | | | |
| BtKYNL63 | NL63_related bat | KY073746 | Alphacoronavirus | Setracovirus |
| | coronavirus strain | | | |
| | BtKYNL63_9b | | | |
| BtRf_AlphaCoV | BtRf_AlphaCoV/YN2012 | KJ473808 | Alphacoronavirus | Rhinacovirus |
| BtRl_BetaCoV | Coronavirus | MK211374 | Betacoronavirus | Sarbecovirus |
| | BtRl_BetaCoV/SC2018 | | | |
| BtSk_AlphaCoV | Coronavirus | MK211372 | Alphacoronavirus | Pedacovirus |
| | BtSk_AlphaCoV/GX2018D | | | |
| CHB25 | Hipposideros pomona | MN611525 | Alphacoronavirus | Decacovirus |
| | bat coronavirus CHB25 | | | |
| FelineAlpha1 | Feline alphacoronavirus 1 | MH817484 | Alphacoronavirus | Tegacovirus |
| FerretCoV | Ferret coronavirus | NC_030292 | Alphacoronavirus | Minacovirus |
| GCCDC1 | Rousettus bat | KU762338 | Betacoronavirus | Nobecovirus |
| | coronavirus GCCDC1 | | | |
| HghCoV1 | Hedgehog coronavirus 1 | NC_039207 | Betacoronavirus | Merbecovirus |
| HKU10R | Hipposideros pomona | MN611523 | Alphacoronavirus | Decacovirus |
| | bat coronavirus | | | |
| | HKU10_related | | | |
| HKU11 | Bulbul coronavirus | FJ376620 | Deltacoronavirus | Buldecovirus |
| | HKU11 | | | |
| HKU12 | Thrush coronavirus | FJ376621 | Deltacoronavirus | Buldecovirus |
| | HKU12 | | | |
| HKU16 | White_eye coronavirus | JQ065044 | Deltacoronavirus | Buldecovirus |
| | HKU16 | | | |
| HKU17 | Sparrow coronavirus | JQ065045 | Deltacoronavirus | Buldecovirus |
| | HKU17 | | | |
| HKU18 | Magpie_robin | JQ065046 | Deltacoronavirus | Buldecovirus |
| | coronavirus HKU18 | | | |
| HKU19 | Night heron coronavirus | JQ065047 | Deltacoronavirus | Herdecovirus |
| | HKU19 | | | |
| HKU20_FJ376622 | Munia coronavirus | FJ376622 | Deltacoronavirus | Buldecovirus |
| | HKU20 | | | |
| HKU20_JQ065048 | Wigeon coronavirus | JQ065048 | Deltacoronavirus | Andecovirus |
| | HKU20 | | | |
| HKU21 | Common moorhen | JQ065049 | Deltacoronavirus | Moordecovirus |
| | coronavirus HKU21 | | | |
| HKU23 | Camel coronavirus | KT368891 | Betacoronavirus | Embecovirus |
| | HKU23 | | | |
| HKU24 | China Rattus coronavirus | NC_026011 | Betacoronavirus | Embecovirus |
| | HKU24 | | | |
| HKU2R | Rhinolophus affinis bat | MN611522 | Alphacoronavirus | Rhinacovirus |
| | coronavirus | | | |
| | HKU2_related | | | |
| HKU32 | Rhinolophus bat | MK720945 | Alphacoronavirus | Decacovirus |
| | coronavirus HKU32 | | | |
| HKU33 | Tylonycteris bat | MK720944 | Alphacoronavirus | Nyctacovirus |
| | coronavirus HKU33 | | | |
| HKU4R | Tylonycteris pachypus | MN611519 | Betacoronavirus | Merbecovirus |
| | bat coronavirus | | | |
| | HKU4_related | | | |
| HKU5R | Pipistrellus abramus bat | MN611520 | Betacoronavirus | Merbecovirus |
| | coronavirus | | | |
| | HKU5_related | | | |
| HKU8R | Miniopterus pusillus bat | MN611518 | Alphacoronavirus | Minunacovirus |
| | coronavirus | | | |
| | HKU8_related | | | |
| Hp_Beta | Bat Hp_betacoronavirus | KF636752 | Betacoronavirus | Hibecovirus |
| | Zhejiang2013 | | | |
| HuB | Rhinolophus | KJ473810 | Alphacoronavirus | Decacovirus |
| | ferrumequinum | | | |
| | alphacoronavirus | | | |
| | HuB_2013 | | | |
| MbCoV1 | Miniopterus bat | EU420138 | Alphacoronavirus | Minunacovirus |
| | coronavirus 1 | | | |
| MinkCoV1 | Mink coronavirus 1 | HM245925 | Alphacoronavirus | Minacovirus |
| MrAlphaSax | Myotis ricketti | KJ473806 | Alphacoronavirus | Myotacovirus |
| | alphacoronavirus | | | |
| | Sax_2011 | | | |
| MsbCoV1 | Miniopterus schreibersii | MN611524 | Alphacoronavirus | Minunacovirus |
| | bat coronavirus 1_related | | | |
| MvAlphaSC | Nyctalus velutinus | KJ473809 | Alphacoronavirus | Nyctacovirus |
| | alphacoronavirus | | | |
| | SC_2013 | | | |
| Quail | Quail deltacoronavirus | MH532440 | Deltacoronavirus | Buldecovirus |
| SARSRC | Severe acute respiratory | DQ648856 | Betacoronavirus | Sarbecovirus |
| | syndrome_related | | | |
| | coronavirus | | | |
| Sb512 | Scotophilus bat | NC_009657 | Alphacoronavirus | Pedacovirus |
| | coronavirus 512 | | | |
| SEAC | Swine enteric | MK977618 | Alphacoronavirus | Rhinacovirus |
| | alphacoronavirus | | | |
| Sk512R | Scotophilus kuhlii bat | MN611521 | Alphacoronavirus | Pedacovirus |
| | coronavirus 512_related | | | |
| WIV16 | SARS_like coronavirus | KT444582 | Betacoronavirus | Sarbecovirus |
| | WIV16 | | | |
| BtCoV_008_16 | Bat alphacoronavirus | MN065811 | Alphacoronavirus | unclassified |
| | strain | | | |
| | BtCoV/008_16/M.bra/FIN/ | | | |
| | 2016 | | | |
| CanadaGoose | Canada goose | MK359255 | Gammacoronavirus | unclassified |
| | coronavirus strain | | | |
| | Cambridge_Bay_2017 | | | |
| Lucheng19 | Lucheng Rn rat | KF294380 | Alphacoronavirus | Luchacovirus |
| | coronavirus isolate | | | |
| | Lucheng-19 | | | |
| Shrew | Wencheng Sm shrew | NC_035191 | Alphacoronavirus | unclassified |
| | coronavirus isolate | | | |
| | Xingguo-101 | | | |
| M95169 | Avian-infectious- | M95169 | Gammacoronavirus | Igacovirus |
| | bronchitis-virus-pol- | | | |
| | protein,-spike-protein,- | | | |
| | small-virion-associated- | | | |
| | protein,-membrane- | | | |
| | protein,-and- | | | |
| | nucleocapsid-protein- | | | |
| | genes | | | |
| AF029248 | Mouse-hepatitis-virus- | AF029248 | Betacoronavirus | Embecovirus |
| | strain-MHV-A59-C12- | | | |
| | mutant | | | |
| AF201929 | Murine-hepatitis-virus- | AF201929 | Betacoronavirus | Embecovirus |
| | strain-2 | | | |
| AF208066 | Murine-hepatitis-virus- | AF208066 | Betacoronavirus | Embecovirus |
| | strain-Penn-97-1 | | | |
| AF208067 | Murine-hepatitis-virus- | AF208067 | Betacoronavirus | Embecovirus |
| | strain-ML-10 | | | |
| AJ271965 | Transmissible- | AJ271965 | Alphacoronavirus | Tegacovirus |
| | gastroenteritis-virus- | | | |
| | complete-genome,- | | | |
| | genomic-RNA | | | |
| AJ311317 | Avian-infectious- | AJ311317 | Gammacoronavirus | Igacovirus |
| | bronchitis-virus-(strain- | | | |
| | Beaudette-CK)- | | | |
| | complete-genomic-RNA | | | |
| AY338732 | Avian-infectious- | AY338732 | Gammacoronavirus | Igacovirus |
| | bronchitis-virus-1a- | | | |
| | protein-(1a),-1ab- | | | |
| | polyprotein-(1),-S- | | | |
| | protein-(S),-3a-protein- | | | |
| | (3a),-3b-protein-(3b),-E- | | | |
| | protein-(3c),-M-protein- | | | |
| | (M),-5a-protein-(5a),-5b- | | | |
| | protein-(5b),-and- | | | |
| | nucleocapsid-protein- | | | |
| | (N)-genes | | | |
| AY692454 | Avian-infectious- | AY692454 | Gammacoronavirus | Igacovirus |
| | bronchitis-virus- | | | |
| | polyprotein-1a,- | | | |
| | polyprotein-1b,-spike- | | | |
| | protein,-3a-protein,-3b- | | | |
| | protein,-small-envelope- | | | |
| | protein,-membrane- | | | |
| | protein,-5a-protein,-5b- | | | |
| | protein,-and- | | | |
| | nucleocapsid-protein- | | | |
| | mRNAs | | | |
| AY994055 | Feline-infectious- | AY994055 | Alphacoronavirus | Tegacovirus |
| | peritonitis-virus | | | |
| AY597011 | Human-coronavirus- | AY597011 | Betacoronavirus | Embecovirus |
| | HKU1-genotype-A | | | |
| NC_009021 | Rousettus-bat- | NC_009021 | Betacoronavirus | Nobecovirus |
| | coronavirus-HKU9 | | | |
| NC_010438 | Bat-coronavirus-HKU8 | NC_010438 | Alphacoronavirus | Minunacovirus |
| NC_010646 | Beluga-Whale- | NC_010646 | Gammacoronavirus | Cegacovirus |
| | coronavirus-SW1 | | | |
| NC_010800 | Turkey-coronavirus | NC_010800 | Gammacoronavirus | Igacovirus |
| NC_012936 | Rat-coronavirus-Parker | NC_012936 | Betacoronavirus | Embecovirus |
| FN430414 | Infectious-bronchitis- | FN430414 | Gammacoronavirus | Igacovirus |
| | virus-ITA/90254/2005 | | | |
| FN430415 | Infectious-bronchitis- | FN430415 | Gammacoronavirus | Igacovirus |
| | virus-NGA/A116E7/2006 | | | |
| AB551247 | Murine-hepatitis-virus- | AB551247 | Betacoronavirus | Embecovirus |
| | RNA,-strain:-MHV-MI | | | |
| HQ166910 | Zaria-bat-coronavirus- | HQ166910 | Betacoronavirus | Hibecovirus |
| | strain-ZBCoV | | | |
| GU002364 | Fathead-minnow- | GU002364 | Bafinivirus | Pimfabavirus |
| | nidovirus-replicase- | | | |
| | polyprotein-1ab- | | | |
| | (pp1ab),-replicase- | | | |
| | polyprotein-1a-(pp1a),- | | | |
| | spike-glycoprotein-(S),- | | | |
| | membrane-protein-(M),- | | | |
| | and-nucleocapsid- | | | |
| | protein-(N)-genes | | | |
| NC_017083 | Rabbit-coronavirus- | NC_017083 | Betacoronavirus | Embecovirus |
| | HKU14 | | | |
| NC_018871 | Rousettus-bat- | NC_018871 | Alphacoronavirus | Decacovirus |
| | coronavirus-HKU10 | | | |
| NC_022103 | Bat-coronavirus- | NC_022103 | Alphacoronavirus | Colacovirus |
| | CDPHE15/USA/2006 | | | |
| KF850449 | Rat-coronavirus-strain- | KF850449 | Betacoronavirus | Embecovirus |
| | mouse_lab/USA/ | | | |
| | MG6644_HOLMES10/1996 | | | |
| KF294370 | Longquan-R1-rat- | KF294370 | Betacoronavirus | Embecovirus |
| | coronavirus-isolate- | | | |
| | Longquan-189-orf1ab- | | | |
| | polyprotein-gene;-and- | | | |
| | hemagglutinin-esterase,- | | | |
| | spike-protein,-envelope- | | | |
| | protein,-membrane- | | | |
| | protein,-and- | | | |
| | nucleocapsid-protein- | | | |
| | genes | | | |
| KF294371 | Longquan-R1-rat- | KF294371 | Betacoronavirus | Embecovirus |
| | coronavirus-isolate- | | | |
| | Longquan-370-orf1ab- | | | |
| | polyprotein-gene;-and- | | | |
| | hemagglutinin-esterase,- | | | |
| | spike-protein,-envelope- | | | |
| | protein,-membrane- | | | |
| | protein,-and- | | | |
| | nucleocapsid-protein- | | | |
| | genes | | | |
| KF294372 | Longquan-R1-rat- | KF294372 | Betacoronavirus | Embecovirus |
| | coronavirus-isolate- | | | |
| | Longquan-708-orf1ab- | | | |
| | polyprotein-gene;-and- | | | |
| | hemagglutinin-esterase,- | | | |
| | spike-protein,-envelope- | | | |
| | protein,-membrane- | | | |
| | protein,-and- | | | |
| | nucleocapsid-protein- | | | |
| | genes | | | |
| LN610099 | Guinea-fowl-coronavirus- | LN610099 | Gammacoronavirus | Igacovirus |
| | GfCoV/FR/2011- | | | |
| | complete-genome | | | |
| LC061272 | Equine-coronavirus- | LC061272 | Betacoronavirus | Embecovirus |
| | RNA,-strain:-Tokachi09 | | | |
| LC061273 | Equine-coronavirus- | LC061273 | Betacoronavirus | Embecovirus |
| | RNA,-strain:-Obihiro 12-1 | | | |
| LC061274 | Equine-coronavirus- | LC061274 | Betacoronavirus | Embecovirus |
| | RNA,-strain:-Obihiro12-2 | | | |
| KT253269 | 229E-related-bat- | KT253269 | Alphacoronavirus | Duvinacovirus |
| | coronavirus-isolate- | | | |
| | BtCoV/KW2E- | | | |
| | F151/Hip_cf._rub/GHA/ | | | |
| | 2011-orf1ab,-orf1a,- | | | |
| | spike-glycoprotein,- | | | |
| | orf4,-E,-M,-N,-and-orf8- | | | |
| | genes | | | |
| KT253270 | 229E-related-bat- | KT253270 | Alphacoronavirus | Duvinacovirus |
| | coronavirus-isolate- | | | |
| | BtCoV/FO1A- | | | |
| | F2/Hip_aba/GHA/2010- | | | |
| | orf1ab,-orf1a,-spike- | | | |
| | glycoprotein,-orf4,-E,- | | | |
| | M,-N,-and-orf8-genes | | | |
| KT253271 | 229E-related-bat- | KT253271 | Alphacoronavirus | Duvinacovirus |
| | coronavirus-isolate- | | | |
| | BtCoV/KW2E- | | | |
| | F56/Hip_cf._rub/GHA/2 | | | |
| | 011-orf1ab,-orf1a,-spike- | | | |
| | glycoprotein,-orf4,-E,- | | | |
| | M,-N,-and-orf8-genes | | | |
| KT253272 | 229E-related-bat- | KT253272 | Alphacoronavirus | Duvinacovirus |
| | coronavirus-isolate- | | | |
| | BtCoV/AT1A- | | | |
| | F1/Hip_aba/GHA/2010- | | | |
| | orf1ab,-orf1a,-spike- | | | |
| | glycoprotein,-orf4,-E,- | | | |
| | M,-N,-and-orf8-genes | | | |
| NC_028752 | Camel-alphacoronavirus- | NC_028752 | Alphacoronavirus | Duvinacovirus |
| | isolate- | | | |
| | camel/Riyadh/Ry141/2015 | | | |
| NC_028806 | Swine-enteric- | NC_028806 | Alphacoronavirus | Tegacovirus |
| | coronavirus-strain- | | | |
| | Italy/213306/2009 | | | |
| LC119077 | Ferret-coronavirus- | LC119077 | Alphacoronavirus | Minacovirus |
| | genomic-RNA,-strain:- | | | |
| | FRCoV4370 | | | |
| NC_032107 | NL63-related-bat- | NC_032107 | Alphacoronavirus | Setracovirus |
| | coronavirus-strain- | | | |
| | BtKYNL63-9a | | | |
| KU556804 | Infectious-bronchitis- | KU556804 | Gammacoronavirus | Igacovirus |
| | virus-isolate- | | | |
| | Ck/Aus/N1/88 | | | |
| KU556805 | Infectious-bronchitis- | KU556805 | Gammacoronavirus | Igacovirus |
| | virus-isolate-Armidale-A3 | | | |
| KU556806 | Infectious-bronchitis- | KU556806 | Gammacoronavirus | Igacovirus |
| | virus-isolate- | | | |
| | Ck/Aus/N1/03 | | | |
| KU556807 | Infectious-bronchitis- | KU556807 | Gammacoronavirus | Igacovirus |
| | virus-isolate- | | | |
| | Ck/Aus/N1/08 | | | |
| NC_032730 | Lucheng-Rn-rat- | NC_032730 | Alphacoronavirus | Luchacovirus |
| | coronavirus-isolate- | | | |
| | Lucheng-19 | | | |
| KX721498 | Infectious-bronchitis- | KX721498 | Gammacoronavirus | Igacovirus |
| | virus-isolate-SCZJ-2 | | | |
| KY419111 | Porcine- | KY419111 | Betacoronavirus | Embecovirus |
| | hemagglutinating- | | | |
| | encephalomyelitis-virus- | | | |
| | strain-PHEV- | | | |
| | CoV/swine/USA/15TOSU1727/ | | | |
| | 2015 | | | |
| KY588134 | Infectious-bronchitis- | KY588134 | Gammacoronavirus | Igacovirus |
| | virus-isolate- | | | |
| | Pakistan/Mass/1003/2A/2015 | | | |
| KY588135 | Infectious-bronchitis- | KY588135 | Gammacoronavirus | Igacovirus |
| | virus-isolate- | | | |
| | Pakistan/Mass/1009/13A/2015 | | | |
| NC_034440 | Bat-coronavirus-isolate- | NC_034440 | unclassified | n/a |
| | PREDICT/PDF-2180 | | Coronavirinae | |
| KY983584 | Human-coronavirus- | KY983584 | Betacoronavirus | Embecovirus |
| | HKU1-strain-SC2628 | | | |
| NC_034976 | Goat-torovirus-strain-SZ | NC_034976 | Gammacoronavirus | Igacovirus |
| KY273667 | Infectious-bronchitis- | KY273667 | Gammacoronavirus | Igacovirus |
| | virus-isolate- | | | |
| | Jordan/Mass/15/2004 | | | |
| LC215871 | Ferret-coronavirus- | LC215871 | Alphacoronavirus | Minacovirus |
| | genomic-RNA,-strain:- | | | |
| | ferret063 | | | |
| KX722531 | Feline-coronavirus- | KX722531 | Alphacoronavirus | Tegacovirus |
| | isolate-Cat-2-Holstebro | | | |
| KY370043 | Rodent-coronavirus- | KY370043 | unclassified | n/a |
| | isolate-RtRn- | | Coronavirinae | |
| | CoV/YN2013-ORF1ab- | | | |
| | polyprotein,- | | | |
| | hemagglutinin-esterase- | | | |
| | protein,-spike- | | | |
| | glycoprotein,-envelope- | | | |
| | protein,-membrane- | | | |
| | protein,-and- | | | |
| | nucleocapsid-protein- | | | |
| | genes | | | |
| KY370044 | Rodent-coronavirus- | KY370044 | unclassified | n/a |
| | isolate-RtAs- | | Coronavirinae | |
| | CoV/IM2014-ORF1ab- | | | |
| | polyprotein,- | | | |
| | hemagglutinin-esterase- | | | |
| | protein,-spike- | | | |
| | glycoprotein,-envelope- | | | |
| | protein,-membrane- | | | |
| | protein,-and- | | | |
| | nucleocapsid-protein- | | | |
| | genes | | | |
| KY370045 | Rodent-coronavirus- | KY370045 | unclassified | n/a |
| | isolate-RtMruf-CoV- | | Coronavirinae | |
| | 1/JL2014-ORF1ab- | | | |
| | polyprotein,-spike- | | | |
| | glycoprotein,-envelope- | | | |
| | protein,-membrane- | | | |
| | protein,-and- | | | |
| | nucleocapsid-protein- | | | |
| | genes | | | |
| KY370046 | Rodent-coronavirus- | KY370046 | unclassified | n/a |
| | isolate-RtMruf-CoV- | | Coronavirinae | |
| | 2/JL2014-ORF1ab- | | | |
| | polyprotein,- | | | |
| | hemagglutinin-esterase- | | | |
| | protein,-spike- | | | |
| | glycoprotein,-envelope- | | | |
| | protein,-membrane- | | | |
| | protein,-and- | | | |
| | nucleocapsid-protein- | | | |
| | genes | | | |
| KY370048 | Rodent-coronavirus- | KY370048 | unclassified | n/a |
| | isolate-RtMm- | | Coronavirinae | |
| | CoV/GD2015-ORF1ab- | | | |
| | polyprotein,- | | | |
| | hemagglutinin-esterase- | | | |
| | protein,-spike- | | | |
| | glycoprotein,-envelope- | | | |
| | protein,-membrane- | | | |
| | protein,-and- | | | |
| | nucleocapsid-protein- | | | |
| | genes | | | |
| KY370049 | Rodent-coronavirus- | KY370049 | unclassified | n/a |
| | isolate-RtNn- | | Coronavirinae | |
| | CoV/SAX2015-ORF1ab- | | | |
| | polyprotein,- | | | |
| | hemagglutinin-esterase- | | | |
| | protein,-spike- | | | |
| | glycoprotein,-envelope- | | | |
| | protein,-membrane- | | | |
| | protein,-and- | | | |
| | nucleocapsid-protein- | | | |
| | genes | | | |
| KY370050 | Rodent-coronavirus- | KY370050 | unclassified | n/a |
| | isolate-RtRl- | | Coronavirinae | |
| | CoV/FJ2015-ORF1ab- | | | |
| | polyprotein,-spike- | | | |
| | glycoprotein,-envelope- | | | |
| | protein,-membrane- | | | |
| | protein,-and- | | | |
| | nucleocapsid-protein- | | | |
| | genes | | | |
| KY370051 | Rodent-coronavirus- | KY370051 | unclassified | n/a |
| | isolate-RtBi- | | Coronavirinae | |
| | CoV/FJ2015-ORF1ab- | | | |
| | polyprotein,- | | | |
| | hemagglutinin-esterase- | | | |
| | protein,-spike- | | | |
| | glycoprotein,-envelope- | | | |
| | protein,-membrane- | | | |
| | protein,-and- | | | |
| | nucleocapsid-protein- | | | |
| | genes | | | |
| KY370052 | Rodent-coronavirus- | KY370052 | unclassified | n/a |
| | isolate-RtMm-CoV- | | Coronavirinae | |
| | 1/IM2014-ORF1ab- | | | |
| | polyprotein,- | | | |
| | hemagglutinin-esterase- | | | |
| | protein,-spike- | | | |
| | glycoprotein,-envelope- | | | |
| | protein,-membrane- | | | |
| | protein,-and- | | | |
| | nucleocapsid-protein- | | | |
| | genes | | | |
| KY370053 | Shrew-coronavirus- | KY370053 | Alphacoronavirus | Soracovirus |
| | isolate-Shrew- | | | |
| | CoV/Tibet2014- | | | |
| | ORF1ab-polyprotein,- | | | |
| | spike-glycoprotein,- | | | |
| | envelope-protein,- | | | |
| | membrane-protein,-and- | | | |
| | nucleocapsid-protein- | | | |
| | genes | | | |
| KY370054 | Rodent-coronavirus- | KY370054 | unclassified | n/a |
| | isolate-RtClan- | | Coronavirinae | |
| | CoV/GZ2015-ORF1ab- | | | |
| | polyprotein-gene;-and- | | | |
| | spike-glycoprotein,- | | | |
| | envelope-protein,- | | | |
| | membrane-protein,-and- | | | |
| | nucleocapsid-protein- | | | |
| | genes | | | |
| MF416379 | Murine-hepatitis-virus- | MF416379 | Betacoronavirus | Embecovirus |
| | isolate- | | | |
| | MHV/NYC/Manhattan/poolF5 | | | |
| MG428700 | Human-coronavirus- | MG428700 | Alphacoronavirus | Setracovirus |
| | NL63-isolate- | | | |
| | Kilifi_HH_1602_01-Jun-2010 | | | |
| MG693168 | Bat-coronavirus-isolate- | MG693168 | unclassified | n/a |
| | CMR704-P12-ORF1a,- | | Coronavirinae | |
| | ORF1b,-spike-protein,- | | | |
| | ORF3,-Membrane- | | | |
| | protein,-capsid,- | | | |
| | hypothetical-protein- | | | |
| | ORFx,-and-hypothetical- | | | |
| | protein-ORFy-genes | | | |
| MG693169 | Bat-coronavirus-isolate- | MG693169 | unclassified | n/a |
| | CMR900-ORF1a,- | | Coronavirinae | |
| | ORF1b,-Spike-protein,- | | | |
| | ORF3,-Membrane- | | | |
| | protein,-capsid,- | | | |
| | hypothetical-protein- | | | |
| | ORFx,-and-hypothetical- | | | |
| | protein-ORFy-genes | | | |
| MG693170 | Bat-coronavirus-isolate- | MG693170 | unclassified | n/a |
| | CMR66-ORF1a,- | | Coronavirinae | |
| | ORF1b,-Spike-protein,- | | | |
| | ORF3,-Membrane- | | | |
| | protein,-capsid,- | | | |
| | hypothetical-protein- | | | |
| | ORFx,-and-hypothetical- | | | |
| | protein-ORFy-genes | | | |
| MG693171 | Bat-coronavirus-isolate- | MG693171 | unclassified | n/a |
| | CMR891-892-ORF1a- | | Coronavirinae | |
| | gene;-and-ORF1b,- | | | |
| | Spike-protein,-ORF3,- | | | |
| | Membrane-protein,- | | | |
| | capsid,-hypothetical- | | | |
| | protein-ORFx,-and- | | | |
| | hypothetical-protein- | | | |
| | ORFy-genes | | | |
| MG693172 | Bat-coronavirus-isolate- | MG693172 | unclassified | n/a |
| | CMR705-P13-ORF1a,- | | Coronavirinae | |
| | ORF1b,-Spike-protein,- | | | |
| | ORF3,-Membrane- | | | |
| | protein,-capsid,- | | | |
| | hypothetical-protein- | | | |
| | ORFx,-and-hypothetical- | | | |
| | protein-ORFy-genes | | | |
| NC_038294 | Betacoronavirus- | NC_038294 | Betacoronavirus | Merbecovirus |
| | England-1-isolate- | | | |
| | H123990006 | | | |
| MK163627 | Alphacoronavirus- | MK163627 | Alphacoronavirus | |
| | UKRn3-pp1a,-pp1ab,- | | | |
| | NS2,-spike,-NS4,-E- | | | |
| | protein,-M-protein,- | | | |
| | NS7a,-nucleocapsid,- | | | |
| | and-NS9-genes | | | |
| MG923574 | Bat-alphacoronavirus- | MG923574 | Alphacoronavirus | unclassified |
| | isolate- | | | |
| | BtCoV/020_16/M.dau/FIN/ | | | |
| | 2016-polyprotein,- | | | |
| | spike-protein,- | | | |
| | hypothetical-protein,- | | | |
| | envelope-protein,- | | | |
| | membrane-protein,-and- | | | |
| | nucleocapsid-protein- | | | |
| | genes | | | |
| MK953937 | Infectious-bronchitis- | MK953937 | Gammacoronavirus | Igacovirus |
| | virus-strain-Brazil/SP55 | | | |
| MK957244 | Infectious-bronchitis- | MK957244 | Gammacoronavirus | Igacovirus |
| | virus-strain-PR05 | | | |
| MK957245 | Infectious-bronchitis- | MK957245 | Gammacoronavirus | Igacovirus |
| | virus-strain-PR01 | | | |
| MK204393 | Avian-coronavirus-non- | MK204393 | Gammacoronavirus | Igacovirus |
| | structural-polyprotein- | | | |
| | (ORF1ab)-and-spike- | | | |
| | protein-(S)-genes | | | |
| MK204411 | Avian-coronavirus-non- | MK204411 | Gammacoronavirus | Igacovirus |
| | structural-polyprotein- | | | |
| | (ORF1ab),-spike- | | | |
| | protein-(S),-3a-(3a),-3b- | | | |
| | (3b),-envelope-protein- | | | |
| | (3c),-membrane- | | | |
| | glycoprotein,-5a-(5a),- | | | |
| | 5b-(5b),-and- | | | |
| | nucleocapsid-(N)-genes | | | |
| LC469308 | Bat-coronavirus-Vs- | LC469308 | unclassified | n/a |
| | CoV-1-genomic-RNA | | Coronavirinae | |
| MK618759 | Infectious-bronchitis- | MK618759 | Gammacoronavirus | Igacovirus |
| | virus-isolate-K047-12 | | | |
| MT040333 | Pangolin-coronavirus- | MT040333 | Betacoronavirus | Sarbecovirus |
| | isolate-PCoV_GX-P4L | | | |
| MT040334 | Pangolin-coronavirus- | MT040334 | Betacoronavirus | Sarbecovirus |
| | isolate-PCoV_GX-P1E | | | |
| MT040335 | Pangolin-coronavirus- | MT040335 | Betacoronavirus | Sarbecovirus |
| | isolate-PCoV_GX-P5L | | | |
| MT040336 | Pangolin-coronavirus- | MT040336 | Betacoronavirus | Sarbecovirus |
| | isolate-PCoV_GX-P5E | | | |
| MT084071 | Pangolin-coronavirus- | MT084071 | Betacoronavirus | Sarbecovirus |
| | isolate-MP789-genomic- | | | |
| | sequence | | | |
| MT121216 | Pangolin-coronavirus- | MT121216 | Betacoronavirus | Sarbecovirus |
| | isolate-MP789 | | | |
| MN690608 | Bottlenose-dolphin- | MN690608 | Gammacoronavirus | Cegacovirus |
| | coronavirus-strain- | | | |
| | 37112-1 | | | |
| MN690609 | Bottlenose-dolphin- | MN690609 | Gammacoronavirus | Cegacovirus |
| | coronavirus-strain- | | | |
| | 37112-2 | | | |
| MN690610 | Bottlenose-dolphin- | MN690610 | Gammacoronavirus | Cegacovirus |
| | coronavirus-strain- | | | |
| | 37112-3 | | | |
| MN690611 | Bottlenose-dolphin- | MN690611 | Gammacoronavirus | Cegacovirus |
| | coronavirus-strain- | | | |
| | 37112-4 | | | |
| MN262644 | Avian-coronavirus- | MN262644 | Gammacoronavirus | Igacovirus |
| | strain-CV10 | | | |
| MN711790 | Infectious-bronchitis- | MN711790 | Gammacoronavirus | Igacovirus |
| | virus-isolate- | | | |
| | GA/1472/2004 | | | |
| MN199462 | Infectious-bronchitis- | MN199462 | Gammacoronavirus | Igacovirus |
| | virus-isolate-R17/16 | | | |
| MN199463 | Infectious-bronchitis- | MN199463 | Gammacoronavirus | Igacovirus |
| | virus-isolate-R17/19 | | | |
| MN199464 | Infectious-bronchitis- | MN199464 | Gammacoronavirus | Igacovirus |
| | virus-isolate-R17/27 | | | |
| MN199465 | Infectious-bronchitis- | MN199465 | Gammacoronavirus | Igacovirus |
| | virus-isolate-R17/36 | | | |
| MN199466 | Infectious-bronchitis- | MN199466 | Gammacoronavirus | Igacovirus |
| | virus-isolate-R18/23 | | | |
| MT072864 | Pangolin-coronavirus- | MT072864 | Betacoronavirus | Sarbecovirus |
| | isolate-PCoV_GX-P2V | | | |
| MT072865 | Pangolin-coronavirus- | MT072865 | Betacoronavirus | Sarbecovirus |
| | isolate-PCoV_GX-P3B- | | | |
| | genomic-sequence | | | |
| MN128086 | Infectious-bronchitis- | MN128086 | Gammacoronavirus | Igacovirus |
| | virus-strain- | | | |
| | TW2296/95 vac | | | |
| MN128087 | Infectious-bronchitis- | MN128087 | Gammacoronavirus | Igacovirus |
| | virus-strain- | | | |
| | TW2575/98 vac | | | |
| MN128088 | Infectious-bronchitis- | MN128088 | Gammacoronavirus | Igacovirus |
| | virus-strain- | | | |
| | TW2296/95w | | | |
| NC_046954 | Rodent-coronavirus- | NC_046954 | unclassified | n/a |
| | isolate-RtMruf-CoV- | | Coronavirinae | |
| | 2/JL2014 | | | |
| NC_046955 | Shrew-coronavirus- | NC_046955 | unclassified | n/a |
| | isolate-Shrew- | | Coronavirinae | |
| | CoV/Tibet2014- | | | |
| | ORF1ab-polyprotein,- | | | |
| | spike-glycoprotein,- | | | |
| | envelope-protein,- | | | |
| | membrane-protein,-and- | | | |
| | nucleocapsid-protein- | | | |
| | genes | | | |
| NC_046965 | Canada-goose- | NC_046965 | Gammacoronavirus | unclassified |
| | coronavirus-strain- | | | |
| | Cambridge_Bay_2017 | | | |
| MN307884 | Infectious-bronchitis- | MN307884 | Gammacoronavirus | Igacovirus |
| | virus-isolate- | | | |
| | ck/CH/LJX/2017/07 | | | |
| MT114538 | Canine-coronavirus- | MT114538 | Alphacoronavirus | Tegacovirus |
| | strain-B639_ZJ_2019 | | | |
| MT114539 | Canine-coronavirus- | MT114539 | Alphacoronavirus | Tegacovirus |
| | strain-B600_ZJ_2019 | | | |
| MT114540 | Canine-coronavirus- | MT114540 | Alphacoronavirus | Tegacovirus |
| | strain-B447_ZJ_2019 | | | |
| MT114541 | Canine-coronavirus- | MT114541 | Alphacoronavirus | Tegacovirus |
| | strain-B363_ZJ_2019 | | | |
| MT114542 | Canine-coronavirus- | MT114542 | Alphacoronavirus | Tegacovirus |
| | strain-B203_GZ_2019 | | | |
| MT114543 | Canine-coronavirus- | MT114543 | Alphacoronavirus | Tegacovirus |
| | strain-B194_GZ_2019 | | | |
| MT114544 | Canine-coronavirus- | MT114544 | Alphacoronavirus | Tegacovirus |
| | strain-B135_JS_2018 | | | |
| MN794188 | Infectious-bronchitis- | MN794188 | Gammacoronavirus | Igacovirus |
| | virus-strain-I0305/19 | | | |
| MN509587 | Infectious-bronchitis- | MN509587 | Gammacoronavirus | Igacovirus |
| | virus-strain- | | | |
| | cK/CH/LDL/091021 | | | |
| MN509588 | Infectious-bronchitis- | MN509588 | Gammacoronavirus | Igacovirus |
| | virus-strain-I0730/17 | | | |
| MN509589 | Infectious-bronchitis- | MN509589 | Gammacoronavirus | Igacovirus |
| | virus-strain- | | | |
| | cK/CH/LHLJ/110664 | | | |
| MN517816 | Infectious-bronchitis- | MN517816 | Gammacoronavirus | Igacovirus |
| | virus-strain- | | | |
| | cK/CH/LJL/090608 | | | |
| MN517817 | Infectious-bronchitis- | MN517817 | Gammacoronavirus | Igacovirus |
| | virus-strain- | | | |
| | cK/CH/LSD/110723 | | | |
| MN531554 | Infectious-bronchitis- | MN531554 | Gammacoronavirus | Igacovirus |
| | virus-strain- | | | |
| | cK/CH/LLN/120611 | | | |
| MN531555 | Infectious-bronchitis- | MN531555 | Gammacoronavirus | Igacovirus |
| | virus-strain- | | | |
| | cK/CH/LSD/1112145 | | | |
| MN531556 | Infectious-bronchitis- | MN531556 | Gammacoronavirus | Igacovirus |
| | virus-strain- | | | |
| | cK/CH/LSD/110856 | | | |
| NC_048212 | Bat-coronavirus | NC_048212 | unclassified | n/a |
| | | | Coronavirinae | |
| NC_048213 | Infectious-bronchitis- | NC_048213 | Gammacoronavirus | Igacovirus |
| | virus-isolate-Ind-TN92-03 | | | |
| NC_048214 | Duck-coronavirus- | NC_048214 | Gammacoronavirus | Igacovirus |
| | isolate-DK/GD/27/2014 | | | |
| NC_048216 | NL63-related-bat- | NC_048216 | Alphacoronavirus | Setracovirus |
| | coronavirus-strain- | | | |
| | BtKYNL63-9b | | | |
| NC_048217 | Murine-hepatitis-virus- | NC_048217 | Betacoronavirus | Embecovirus |
| | strain-A59 | | | |
| MT337384 | Bat-coronavirus-HKU9- | MT337384 | Betacoronavirus | Nobecovirus |
| | 1-isolate- | | | |
| | MCL_20_Bat_76_10 | | | |
| MT337385 | Coronavirus-BtRt- | MT337385 | Betacoronavirus | Nobecovirus |
| | BetaCoV/GX2018- | | | |
| | isolate- | | | |
| | MCL_20_Bat_76_8 | | | |
| MT337386 | Coronavirus-BtRt- | MT337386 | Betacoronavirus | Nobecovirus |
| | BetaCoV/GX2018- | | | |
| | isolate- | | | |
| | MCL_19_Bat_606_2 | | | |
| MT337387 | Coronavirus-BtRt- | MT337387 | Betacoronavirus | Nobecovirus |
| | BetaCoV/GX2018- | | | |
| | isolate- | | | |
| | MCL_19_Bat_606_10 | | | |
| MN548286 | Infectious-bronchitis- | MN548286 | Gammacoronavirus | Igacovirus |
| | virus-strain-D1466 | | | |
| MN548287 | Infectious-bronchitis- | MN548287 | Gammacoronavirus | Igacovirus |
| | virus-strain-H120 | | | |
| MN548288 | Infectious-bronchitis- | MN548288 | Gammacoronavirus | Igacovirus |
| | virus-strain-Italy02 | | | |
| MN548289 | Infectious-bronchitis- | MN548289 | Gammacoronavirus | Igacovirus |
| | virus-strain-QX | | | |
| MN692770 | Swine-enteric- | MN692770 | Alphacoronavirus | Tegacovirus |
| | coronavirus-isolate- | | | |
| | SeCoV-1480-Murcia- | | | |
| | Lorca | | | |
| MT663548 | Bat-alphacoronavirus- | MT663548 | Alphacoronavirus | unclassified |
| | isolate-AMA_L_F | | | |
| MN548285 | Infectious-bronchitis- | MN548285 | Gammacoronavirus | Igacovirus |
| | virus-strain-CR88 | | | |
| MN987230 | Infectious-bronchitis- | MN987230 | Gammacoronavirus | Igacovirus |
| | virus-isolate- | | | |
| | IBV/ck/EGY- | | | |
| | Monuf/NR725/16 | | | |
| MN987231 | Infectious-bronchitis- | MN987231 | Gammacoronavirus | Igacovirus |
| | virus-isolate- | | | |
| | IBV/ck/EGY- | | | |
| | Monuf/USC-5/13 | | | |
| MW251308 | Bat-coronavirus- | MW251308 | Betacoronavirus | Sarbecovirus |
| | RacCS203 | | | |

### A. Deduplication of Probes

[0149] Because the second set of virus inputs for developing the second iteration probes represented a less curated set of sequences, it was expected that there would be a very large degree of sequence homology across the various genomes. Therefore, the present probe set (first iteration probes and second iteration probes) was subjected to deduplication using the dedupe algorithm from the Joint Genome Institute as part of their BBTools suite of bioinformatic software tools. (jgi.doe.gov/data-and-tools/software-tools/bbtools/) The probe set was deduplicated using the Clustering by overlap method. In short, highly homologous probes were removed from the probe set and only the ‘best representative’ identified by the clustering algorithm were retained.

### B. Specificity Check

[0150] The combination of probes comprising the first iteration probes and the second iteration probes is henceforth referred to as the v1 probe set. This probe set was then tested for theoretical pull-down efficacy against the entirety of the coronavirus isolate sequences that we had downloaded from NCBI in 2020, which contained ˜2700 sequences. Theoretical pulldown was calculated using both high and low stringency assumptions, which consisted of 70% minimum identity over 30 bp for low and 90% minimum identity over 70 bp for high stringency. Using the higher stringency requirements, a gap analysis of the sequences (i.e., the sequences expected *not* to be captured) was generated.

C. Probe Set backfill

[0151] From this analysis a BED file was generated, and all gaps in sequences were used as input regions for the proprietary algorithm to generate another set of probes to backfill regions that for any reason were not showing up as ‘covered’ in the analysis. In many cases, only 1 or a few extra probes were added per genome. See Table 3. This probe set was then subjected to the deduplication step as outlined above. SEQ ID NOs: 1-22909 resulted from this analysis.

TABLE 3

| Accession | Name | Accession | Name |
|---|---|---|---|
| KF636752 | Bat Hp- | KP202848 | Transmissible gastroenteritis virus |
| | betacoronavirus/Zhejiang2013 | | isolate SHXB |
| KM347965 | Ferret coronavirus isolate FRCoV- | KP780179 | Infectious bronchitis virus strain |
| | NL-2010 | | gammaCoV/Ck/Italy/I2022/13 |
| KX512809 | Ferret enteric coronavirus strain | KP849472 | Alphacoronavirus 1 strain 23/03 |
| | FECV1 | | |
| KX512810 | Ferret systemic coronavirus strain | KP886808 | Bat SARS-like coronavirus |
| | FSCV6 | | YNLF_31C |
| HM245925 | Mink coronavirus strain WD1127 | KP886809 | Bat SARS-like coronavirus |
| | | | YNLF_34C |
| KY073745 | NL63-related bat coronavirus | KR608272 | Infectious bronchitis virus isolate |
| | strain BtKYNL63-9b | | LDT3-A |
| KY073746 | NL63-related bat coronavirus | KR822424 | European turkey coronavirus 080385d |
| | strain BtKYNL63-15 | | |
| KJ473809 | BtNv-AlphaCoV/SC2013 | KT368891 | Camel coronavirus HKU23 isolate |
| | | | camel/Riyadh/Ry123/2015 |
| KU762338 | Rousettus bat coronavirus isolate | KT444582 | SARS-like coronavirus WIV16 |
| | GCCDC1 356 | | |
| MK720944 | Tylonycteris bat coronavirus | KT696544 | Transmissible gastroenteritis virus |
| | HKU33 strain GZ151867 | | strain JS2012 |
| MF113046 | Alphacoronavirus | KT852992 | Infectious bronchitis virus isolate |
| | Mink/China/1/2016 | | tl/CH/LDT3/03 |
| MH938449 | Alphacoronavirus Bat- | KU131570 | Human coronavirus OC43 strain |
| | CoV/P.kuhlii/Italy/3398-19/2015 | | HCoV-OC43/UK/London/2011 |
| MH938450 | Alphacoronavirus Bat- | KU182964 | Bat coronavirus isolate JTMC15 |
| | CoV/P.kuhlii/Italy/206679-3/2010 | | |
| MH938448 | Alphacoronavirus Bat- | KU215419 | Feline coronavirus isolate inoculum |
| | CoV/P.kuhlii/Italy/206645- | | |
| | 41/2011 | | |
| HM245926 | Mink coronavirus strain WD1133 | KU215420 | Feline coronavirus isolate Cat1_day7 |
| MG916901 | Bat coronavirus | KU215421 | Feline coronavirus isolate |
| | BtCoV/Rh/YN2012 isolate | | Cat2_day21_deletion |
| | BtCoV/Rh/YN2012_Rs3376 | | |
| MG916902 | Bat coronavirus | KU215422 | Feline coronavirus isolate |
| | BtCoV/Rh/YN2012 isolate | | Cat2_day21_withoutdeletion |
| | BtCoV/Rh/YN2012_Rs4125 | | |
| MG916903 | Bat coronavirus | KU215423 | Feline coronavirus isolate Cat3_day9 |
| | BtCoV/Rh/YN2012 isolate | | |
| | BtCoV/Rh/YN2012_Rs4259 | | |
| MG916904 | Bat coronavirus | KU215424 | Feline coronavirus isolate |
| | BtCoV/Rh/YN2012 isolate | | Cat1_day28_deletion |
| | BtCoV/Rh/YN2012_Ra13591 | | |
| MK492263 | Bat coronavirus strain BtCoV92 | KU215425 | Feline coronavirus isolate |
| | | | Cat1_day28_withoutdeletion |
| MN197549 | Infectious bronchitis virus isolate | KU215426 | Feline coronavirus isolate Cat2_day84 |
| | CK/CH/GD/GDTS13 | | |
| MN512434 | Infectious bronchitis virus isolate | KU215427 | Feline coronavirus isolate |
| | IBV/Ck/Can/17-035614 | | Cat3_day28_deletion |
| MN512435 | Infectious bronchitis virus isolate | KU215428 | Feline coronavirus isolate |
| | IBV/Ck/Can/17-036989 | | Cat3_day28_withoutdeletion |
| MN512436 | Infectious bronchitis virus isolate | KU291448 | Human coronavirus 229E isolate |
| | IBV/Ck/Can/18-048192T | | HCoV-229E/BN1/GER/2015 |
| MN512437 | Infectious bronchitis virus isolate | KU361188 | Infectious bronchitis virus isolate |
| | IBV/Ck/Can/18-048430 | | CK/CH/2014/QL1403 |
| MN512438 | Infectious bronchitis virus isolate | KU558922 | Betacoronavirus 1 isolate Buffalo |
| | IBV/Ck/Can/18-049707 | | coronavirus B1-24F |
| MN096598 | Infectious bronchitis virus strain | KU558923 | Betacoronavirus 1 isolate Buffalo |
| | ck/CH/YNSL/160501 | | coronavirus B1-28F |
| MK581202 | Infectious bronchitis virus strain | KU729220 | Transmissible gastroenteritis virus |
| | gammaCoV/Ck/Poland/80/1989 | | strain TH-98 |
| MK581204 | Infectious bronchitis virus strain | KU762338 | Rousettus bat coronavirus isolate |
| | gammaCoV/Ck/Poland/255/1997 | | GCCDC1 356 |
| MK329221 | Infectious bronchitis virus isolate | KU886219 | Bovine coronavirus strain BCV-AKS- |
| | CK-CH-GX-YL17 | | 01 |
| MK309398 | Infectious bronchitis virus isolate | KU973692 | UNVERIFIED: SARS-related |
| | CK/CH/GD/HY16 | | coronavirus isolate F46 |
| MK217372 | Infectious bronchitis virus strain | KX083668 | Transmissible gastroenteritis virus |
| | I0221/17 | | isolate HE-1 |
| MK217373 | Infectious bronchitis virus strain | KX185057 | Infectious bronchitis virus strain |
| | I0725/17 | | ck/CH/LHLJ/95I |
| MK217374 | Infectious bronchitis virus strain | KX252791 | Infectious bronchitis virus strain |
| | I0916/16 | | ck/CH/LLN/98I |
| MK217375 | Infectious bronchitis virus strain | KX266757 | Infectious bronchitis virus isolate |
| | I1209/16 | | 3575/08 |
| MK574042 | Infectious bronchitis virus strain | KX344031 | Human coronavirus OC43 isolate |
| | ck/CH/LHB/110615 | | LRTI_238 |
| MK574043 | Infectious bronchitis virus strain | KX432213 | Canine respiratory coronavirus strain |
| | ck/CH/LHB/110617 | | BJ232 |
| MK142676 | Infectious bronchitis virus isolate | KX499468 | Transmissible gastroenteritis virus |
| | ahysx-1 | | strain TGEV AHHF |
| MK878536 | Infectious bronchitis virus isolate | KX512809 | Ferret enteric coronavirus strain |
| | GA9977/2019 | | FECV1 |
| MH924835 | Infectious bronchitis virus strain | KX512810 | Ferret systemic coronavirus strain |
| | gammaCoV/ck/China/I0636/16 | | FSCV6 |
| MH878976 | Infectious bronchitis virus isolate | KX538964 | Human coronavirus OC43 isolate MY- |
| | VFAR-047 | | U002/12 |
| MG021194 | Infectious bronchitis virus isolate | KX538965 | Human coronavirus OC43 isolate MY- |
| | gammaCoV/AvCov/Ck/Italy/624I/ | | U208/12 |
| | 96 | | |
| MH021175 | Avian coronavirus strain D274 | KX538966 | Human coronavirus OC43 isolate MY- |
| | | | U236/12 |
| MG448607 | Infectious bronchitis virus strain | KX538967 | Human coronavirus OC43 isolate MY- |
| | ck/CH/LHB/121042 | | U413/12 |
| MF882923 | Infectious bronchitis virus isolate | KX538968 | Human coronavirus OC43 isolate MY- |
| | CK/CH/HB/2016 | | U464/12 |
| MF421319 | Infectious bronchitis virus isolate | KX538969 | Human coronavirus OC43 isolate MY- |
| | UY/09/CA/01 | | U523/12 |
| KX252791 | Infectious bronchitis virus strain | KX538970 | Human coronavirus OC43 isolate MY- |
| | ck/CH/LLN/98I | | U710/12 |
| KX185057 | Infectious bronchitis virus strain | KX538971 | Human coronavirus OC43 isolate MY- |
| | ck/CH/LHLJ/95I | | U732/12 |
| KX266757 | Infectious bronchitis virus isolate | KX538972 | Human coronavirus OC43 isolate MY- |
| | 3575/08 | | U774/12 |
| KU361188 | Infectious bronchitis virus isolate | KX538973 | Human coronavirus OC43 isolate MY- |
| | CK/CH/2014/QL1403 | | U868/12 |
| KR608272 | Infectious bronchitis virus isolate | KX538974 | Human coronavirus OC43 isolate MY- |
| | LDT3-A | | U945/12 |
| KT852992 | Infectious bronchitis virus isolate | KX538975 | Human coronavirus OC43 isolate MY- |
| | tl/CH/LDT3/03 | | U1024/12 |
| KR822424 | European turkey coronavirus | KX538976 | Human coronavirus OC43 isolate MY- |
| | 080385d | | U1057/12 |
| KP780179 | Infectious bronchitis virus strain | KX538977 | Human coronavirus OC43 isolate MY- |
| | gammaCoV/Ck/Italy/I2022/13 | | U1140/12 |
| KM454473 | Duck coronavirus isolate | KX538978 | Human coronavirus OC43 isolate MY- |
| | DK/GD/27/2014 | | U1758/13 |
| KF460437 | Infectious bronchitis virus isolate | KX538979 | Human coronavirus OC43 isolate MY- |
| | VicS-v | | U1975/13 |
| KF931628 | Infectious bronchitis virus isolate | KX574227 | Bat coronavirus isolate |
| | VicS-del | | PREDICT/PDF-2180 |
| KM213963 | Infectious bronchitis virus isolate | KX722529 | Feline coronavirus isolate UG-FH8 |
| | CK/CH/XDC- 2/2013 | | |
| KF663559 | Infectious bronchitis virus isolate | KX722530 | Feline coronavirus isolate Cat 1 |
| | ck/CH/IBTZ/2012 | | Karlslunde |
| KF668605 | Infectious bronchitis virus isolate | KX900393 | Transmissible gastroenteritis virus |
| | CK/CH/SD09/005 | | strain TGEV/USA/Z/1986 |
| JX897900 | UNVERIFIED: Infectious | KX900394 | Transmissible gastroenteritis virus |
| | bronchitis virus isolate GX- | | strain TGEV/USA/HB/1988 |
| | NN09032 | | |
| JQ977697 | Infectious bronchitis virus isolate | KX900395 | Transmissible gastroenteritis virus |
| | SNU8067 | | strain TGEV/USA/Minnesota138/2006 |
| GU393332 | Infectious bronchitis virus serotype | KX900396 | Transmissible gastroenteritis virus |
| | Delaware 072 | | strain TGEV/USA/Illinois139/2006 |
| JF330898 | Infectious bronchitis virus strain | KX900397 | Transmissible gastroenteritis virus |
| | ck/CH/LHB/100801 | | strain |
| | | | TGEV/USA/NorthCarolina140/2007 |
| GQ504722 | Infectious bronchitis virus strain | KX900398 | Transmissible gastroenteritis virus |
| | Georgia 1998 pass8 | | strain TGEV/USA/Minnesota141/2007 |
| GQ504723 | Infectious bronchitis virus strain | KX900399 | Transmissible gastroenteritis virus |
| | Georgia 1998 Vaccine | | strain |
| | | | TGEV/USA/NorthCarolina142/2007 |
| GQ427173 | Turkey coronavirus strain | KX900400 | Transmissible gastroenteritis virus |
| | TCoV/VA-74/03 | | strain TGEV/USA/Iowa143/2008 |
| GQ427174 | Turkey coronavirus strain | KX900401 | Transmissible gastroenteritis virus |
| | TCoV/TX-GL/01 | | strain TGEV/USA/Tennessee144/2008 |
| GQ427175 | Turkey coronavirus strain | KX900402 | Transmissible gastroenteritis virus |
| | TCoV/IN-517/94 | | strain TGEV/Mex/145/2008 |
| GQ427176 | Turkey coronavirus strain | KX900403 | Transmissible gastroenteritis virus |
| | TCoV/TX-1038/98 | | strain TGEV/USA/Illinois146/2008 |
| EU022525 | Turkey coronavirus isolate | KX900404 | Transmissible gastroenteritis virus |
| | TCoV-540 | | strain TGEV/USA/Oklahoma147/2012 |
| EU022526 | Turkey coronavirus isolate | KX900405 | Transmissible gastroenteritis virus |
| | TCoV-ATCC | | strain TGEV/USA/Minnesota148/2013 |
| EU095850 | Turkey coronavirus isolate MG10 | KX900406 | Transmissible gastroenteritis virus |
| | | | strain TGEV/USA/Illinois149/2013 |
| EU526388 | Infectious bronchitis virus strain | KX900407 | Transmissible gastroenteritis virus |
| | A2 | | strain TGEV/USA/Minnesota150/2013 |
| EU111742 | Coronavirus SW1 | KX900408 | Transmissible gastroenteritis virus |
| | | | strain TGEV/USA/Wisconsin151/2014 |
| AY646283 | Avian infectious bronchitis virus | KX900409 | Transmissible gastroenteritis virus |
| | partridge/GD/S14/2003 | | strain TGEV/USA/Minnesota152/2014 |
| AY319651 | Avian infectious bronchitis virus | KX900410 | Transmissible gastroenteritis virus |
| | isolate BJ | | strain TGEV/USA/Minnesota153/2014 |
| MH532440 | Quail deltacoronavirus strain | KX900411 | Transmissible gastroenteritis virus |
| | G032/2015 | | strain |
| | | | TGEV/USA/SouthDakota154/2014 |
| MG812377 | Sparrow deltacoronavirus strain | KX964649 | Coronavirus AcCoV-JC34 |
| | ISU42824 | | |
| MG812378 | Sparrow deltacoronavirus strain | KX982264 | Bovine coronavirus isolate |
| | ISU73347 | | BCoV_2014_13 |
| JQ065044 | White-eye coronavirus HKU16 | KY014281 | Human coronavirus OC43 isolate |
| | strain HKU16-6847 | | 2002-04 |
| JQ065045 | Sparrow coronavirus HKU17 | KY014282 | Human coronavirus OC43 isolate |
| | strain HKU17-6124 | | 2007-09 |
| JQ065046 | Magpie-robin coronavirus HKU18 | KY073744 | NL63-related bat coronavirus strain |
| | strain HKU18-chu3 | | BtKYNL63-9a |
| JQ065047 | Night-heron coronavirus HKU19 | KY073745 | NL63-related bat coronavirus strain |
| | strain HKU19-6918 | | BtKYNL63-9b |
| JQ065048 | Wigeon coronavirus HKU20 strain | KY073746 | NL63-related bat coronavirus strain |
| | HKU20-9243 | | BtKYNL63-15 |
| JQ065049 | Common-moorhen coronavirus | KY073747 | 229E-related bat coronavirus strain |
| | HKU21 strain HKU21-8295 | | BtKY229E-1 |
| FJ376620 | Bulbul coronavirus HKU11-796 | KY073748 | 229E-related bat coronavirus strain |
| | | | BtKY229E-8 |
| FJ376621 | Thrush coronavirus HKU12-600 | KY292377 | Feline coronavirus strain |
| | | | HLJ/DQ/2016/01 |
| FJ376622 | Munia coronavirus HKU13-3514 | KY352407 | Severe acute respiratory syndrome- |
| | | | related coronavirus strain BtKY72 |
| AF220295 | Bovine coronavirus strain Quebec | KY369905 | Human coronavirus OC43 strain |
| | | | SC831 |
| AF391542 | Bovine coronavirus isolate BCoV- | KY369906 | Human coronavirus OC43 strain |
| | LUN | | SC622 |
| AY319651 | Avian infectious bronchitis virus | KY369907 | Human coronavirus OC43 strain |
| | isolate BJ | | SC9741 |
| AY391777 | Human coronavirus OC43 | KY369908 | Human coronavirus 229E strain SC579 |
| AY585228 | Human coronavirus OC43 strain | KY369909 | Human coronavirus 229E strain SC677 |
| | ATCC VR-759 | | |
| AY585229 | Human coronavirus OC43 serotype | KY369910 | Human coronavirus 229E strain |
| | OC43-Paris | | SC1143 |
| AY646283 | Avian infectious bronchitis virus | KY369911 | Human coronavirus 229E strain |
| | partridge/GD/S14/2003 | | SC1212 |
| AY884001 | Human coronavirus HKU1 | KY369912 | Human coronavirus 229E strain |
| | genotype B | | SC9731 |
| AY903459 | Human coronavirus OC43 strain | KY369913 | Human coronavirus 229E strain |
| | 87309 Belgium 2003 | | SC1073 |
| AY903460 | Human coronavirus OC43 strain | KY369914 | Human coronavirus 229E strain |
| | 19572 Belgium 2004 | | SC9773 |
| DQ011855 | Porcine hemagglutinating | KY417142 | Bat SARS-like coronavirus isolate |
| | encephalomyelitis virus strain | | As6526 |
| | VW572 | | |
| DQ022305 | Bat SARS coronavirus HKU3-1 | KY417143 | Bat SARS-like coronavirus isolate |
| | | | Rs4081 |
| DQ071615 | Bat SARS coronavirus Rp3 | KY417144 | Bat SARS-like coronavirus isolate |
| | | | Rs4084 |
| DQ084199 | bat SARS coronavirus HKU3-2 | KY417145 | Bat SARS-like coronavirus isolate |
| | | | Rf4092 |
| DQ084200 | bat SARS coronavirus HKU3-3 | KY417147 | Bat SARS-like coronavirus isolate |
| | | | Rs4237 |
| DQ201447 | Transmissible gastroenteritis virus | KY417148 | Bat SARS-like coronavirus isolate |
| | strain TS | | Rs4247 |
| DQ339101 | Human coronavirus HKU1 strain | KY417149 | Bat SARS-like coronavirus isolate |
| | N5P8 genotype A/B recombinant | | Rs4255 |
| DQ412042 | Bat SARS coronavirus Rf1 | KY417150 | Bat SARS-like coronavirus isolate |
| | | | Rs4874 |
| DQ412043 | Bat SARS coronavirus Rm1 | KY417151 | Bat SARS-like coronavirus isolate |
| | | | Rs7327 |
| DQ415897 | Human coronavirus HKU1 strain | KY419103 | Porcine hemagglutinating |
| | N20 genotype C | | encephalomyelitis virus strain PHEV |
| | | | CoV USA-15TOSU25049 |
| DQ415898 | Human coronavirus HKU1 strain | KY419104 | Porcine hemagglutinating |
| | N21 genotype C | | encephalomyelitis virus strain PHEV |
| | | | CoV USA-15TOSU0331 |
| DQ415899 | Human coronavirus HKU1 strain | KY419105 | Porcine hemagglutinating |
| | N22 genotype C | | encephalomyelitis virus strain PHEV |
| | | | CoV USA-15TOSU0582 |
| DQ415902 | Human coronavirus HKU1 strain | KY419106 | Porcine hemagglutinating |
| | N25 genotype B | | encephalomyelitis virus strain PHEV |
| | | | CoV USA-15TOSU1785 |
| DQ415911 | Human coronavirus HKU1 strain | KY419107 | Porcine hemagglutinating |
| | N15 genotype B | | encephalomyelitis virus strain PHEV |
| | | | CoV USA-15TOSU1209 |
| DQ415912 | Human coronavirus HKU1 strain | KY419109 | Porcine hemagglutinating |
| | N16 genotype C | | encephalomyelitis virus strain PHEV |
| | | | CoV USA-15TOSU1655 |
| DQ415913 | Human coronavirus HKU1 strain | KY419110 | Porcine hemagglutinating |
| | N17 genotype C | | encephalomyelitis virus strain PHEV |
| | | | CoV USA-15TOSU1362 |
| DQ443743 | Transmissible gastroenteritis virus | KY419112 | Porcine hemagglutinating |
| | strain SC-Y | | encephalomyelitis virus strain PHEV |
| | | | CoV USA-15TOSU1765 |
| DQ646405 | Infectious bronchitis virus isolate | KY419113 | Porcine hemagglutinating |
| | TW2575/98 | | encephalomyelitis virus strain PHEV |
| | | | CoV USA-15TOSU1582 |
| DQ648856 | Bat coronavirus (BtCoV/273/2005) | KY554972 | Human coronavirus OC43 strain N07- |
| | | | 1541B_433X |
| DQ648857 | Bat coronavirus (BtCoV/279/2005) | KY554973 | Human coronavirus OC43 strain N07- |
| | | | 1689B_116X |
| DQ811784 | Bovine coronavirus DB2 | KY554974 | Human coronavirus OC43 strain N08- |
| | | | 33B_360X |
| DQ811785 | TGEV Miller M6 | KY554975 | Human coronavirus OC43 strain N09- |
| | | | 382B |
| DQ811786 | TGEV Miller M60 | KY566209 | Feline coronavirus strain |
| | | | HLJ/HRB/2016/10 |
| DQ811788 | TGEV Purdue P115 | KY566210 | Feline coronavirus strain |
| | | | HLJ/HRB/2016/11 |
| DQ811789 | TGEV virulent Purdue | KY566211 | Feline coronavirus strain |
| | | | HLJ/HRB/2016/13 |
| DQ848678 | Feline coronavirus strain FCoV | KY621348 | Human coronavirus 229E strain SC379 |
| | C1Je | | |
| DQ915164 | Bovine coronavirus isolate Alpaca | KY674914 | Human coronavirus 229E strain SC399 |
| EF065513 | Bat coronavirus HKU9-1 | KY674917 | Human coronavirus OC43 strain N07- |
| | | | 1609B |
| EF065514 | Bat coronavirus HKU9-2 | KY674918 | Human coronavirus OC43 strain N07- |
| | | | 1647B |
| EF065516 | Bat coronavirus HKU9-4 | KY674920 | Human coronavirus OC43 strain N09- |
| | | | 595B |
| EF203064 | Bat coronavirus HKU2 strain | KY674921 | Human coronavirus HKU1 genotype B |
| | HKU2/GD/430/2006 | | strain N08-87 |
| EF203065 | Bat coronavirus HKU2 strain | KY684759 | Human coronavirus OC43 strain |
| | HKU2/HK/46/2006 | | SC2269 |
| EF203066 | Bat coronavirus HKU2 strain | KY684760 | Human coronavirus 229E strain |
| | HKU2/HK/298/2006 | | SC2282 |
| EF203067 | Bat coronavirus HKU2 strain | KY770858 | Bat coronavirus isolate Anlong-103 |
| | HKU2/HK/33/2006 | | |
| EF424615 | Bovine coronavirus E-AH65 | KY770859 | Bat coronavirus isolate Anlong-112 |
| EF424616 | Bovine coronavirus E-AH65-TC | KY770860 | Bat coronavirus isolate Jiyuan-84 |
| EF424617 | Bovine coronavirus R-AH65 | KY799179 | Myotis lucifugus coronavirus |
| EF424618 | Bovine coronavirus R-AH65-TC | KY938558 | Bat coronavirus strain 16BO133 |
| EF424619 | Bovine coronavirus E-AH187 | KY967356 | Human coronavirus OC43 strain |
| | | | SC2924 |
| EF424620 | Bovine coronavirus R-AH187 | KY967357 | Human coronavirus 229E strain |
| | | | SC2872 |
| EF424621 | Sable antelope coronavirus | KY967358 | Human coronavirus OC43 strain |
| | US/OH1/2003 | | SC2770 |
| EF424622 | Giraffe coronavirus US/OH3- | KY967359 | Human coronavirus OC43 strain |
| | TC/2006 | | SC2730 |
| EF424623 | Giraffe coronavirus US/OH3/2003 | KY967360 | Human coronavirus OC43 strain |
| | | | SC2476 |
| EF424624 | Calf-giraffe coronavirus | KY967361 | Human coronavirus OC43 strain |
| | US/OH3/2006 | | SC2345 |
| EF446615 | Equine coronavirus strain NC99 | KY983583 | Human coronavirus OC43 strain |
| | | | SC2481 |
| EU022525 | Turkey coronavirus isolate TCoV- | KY983585 | Human coronavirus OC43 strain |
| | 540 | | SC2854 |
| EU022526 | Turkey coronavirus isolate TCoV- | KY983587 | Human coronavirus 229E strain |
| | ATCC | | SC3112 |
| EU074218 | Transmissible gastroenteritis virus | KY983588 | Human coronavirus OC43 strain |
| | strain attenuated H | | SC3118 |
| EU095850 | Turkey coronavirus isolate MG10 | KY994645 | Porcine hemagglutinating |
| | | | encephalomyelitis virus strain JL/2008 |
| EU111742 | Coronavirus SW1 | KY996417 | Human coronavirus 229E strain |
| | | | 229E/UF-1/2016 |
| EU186072 | Feline coronavirus isolate Black | MF083115 | Porcine hemagglutinating |
| | | | encephalomyelitis virus strain CC14 |
| EU420137 | Bat coronavirus 1B strain | MF094685 | Swine acute diarrhea syndrome related |
| | AFCD307 | | coronavirus isolate 8462 |
| EU420138 | Miniopterus bat coronavirus 1 | MF094686 | Swine acute diarrhea syndrome related |
| | | | coronavirus isolate 8495 |
| EU420139 | Bat coronavirus HKU8 strain | MF113046 | Alphacoronavirus Mink/China/1/2016 |
| | AFCD77 | | |
| EU526388 | Infectious bronchitis virus strain | MF314143 | Human coronavirus OC43 isolate |
| | A2 | | HCoV-OC43/USA/ACRI_0052/2016 |
| FJ376619 | Bulbul coronavirus HKU11-934 | MF374983 | Human coronavirus OC43 isolate |
| | | | HCoV-OC43/USA/TCNP_0070/2016 |
| FJ376620 | Bulbul coronavirus HKU11-796 | MF374984 | Human coronavirus OC43 isolate |
| | | | HCoV-OC43/USA/TCNP_00204/2017 |
| FJ376621 | Thrush coronavirus HKU12-600 | MF374985 | Human coronavirus OC43 isolate |
| | | | HCoV-OC43/USA/TCNP_00212/2017 |
| FJ376622 | Munia coronavirus HKU13-3514 | MF421319 | Infectious bronchitis virus isolate |
| | | | UY/09/CA/01 |
| FJ415324 | Human enteric coronavirus 4408 | MF542265 | Human coronavirus 229E strain |
| | | | 229E/Haiti-1/2016 |
| FJ425184 | Waterbuck coronavirus US/OH- | MF577027 | Porcine epidemic diarrhea virus strain |
| | WD358-TC/1994 | | PEDV/Belgorod/dom/2008 |
| FJ425185 | Waterbuck coronavirus US/OH- | MF593268 | Middle East respiratory syndrome- |
| | WD358-GnC/1994 | | related coronavirus strain |
| | | | Neoromicia/5038 |
| FJ425186 | Waterbuck coronavirus US/OH- | MF882923 | Infectious bronchitis virus isolate |
| | WD358/1994 | | CK/CH/HB/2016 |
| FJ425187 | White-tailed deer coronavirus | MG021194 | Infectious bronchitis virus isolate |
| | US/OH-WD470/1994 | | gammaCoV/AvCov/Ck/Italy/624I/96 |
| FJ425188 | Sambar deer coronavirus US/OH- | MG021451 | Middle East respiratory syndrome- |
| | WD388-TC/1994 | | related coronavirus isolate NL13845 |
| FJ425189 | Sambar deer coronavirus US/OH- | MG021452 | Middle East respiratory syndrome- |
| | WD388/1994 | | related coronavirus isolate NL140422 |
| FJ425190 | Sambar deer coronavirus US/OH- | MG197709 | Human coronavirus OC43 strain BJ- |
| | WD388-TC/1994 calf-passaged | | 112 |
| FJ588686 | Bat SARS CoV Rs672/2006 | MG197710 | Human coronavirus OC43 strain BJ- |
| | | | 124 |
| FJ647223 | Murine coronavirus MHV-1 | MG197711 | Human coronavirus OC43 strain BJ- |
| | | | 164 |
| FJ755618 | Transmissible gastroenteritis virus | MG197712 | Human coronavirus OC43 strain BJ- |
| | strain H16 | | 165 |
| FJ938051 | Feline coronavirus RM | MG197713 | Human coronavirus OC43 strain BJ- |
| | | | 221 |
| FJ938052 | Feline coronavirus UU11 | MG197714 | Human coronavirus OC43 strain CC- |
| | | | 23 |
| FJ938053 | Feline coronavirus UU7 | MG197715 | Human coronavirus OC43 strain |
| | | | GZYF-26 |
| FJ938054 | Feline coronavirus UU4 | MG197716 | Human coronavirus OC43 strain WZ- |
| | | | 303 |
| FJ938055 | Feline coronavirus UU8 | MG197717 | Human coronavirus OC43 strain WZ- |
| | | | 522 |
| FJ938056 | Feline coronavirus UU5 | MG197718 | Human coronavirus OC43 strain YC- |
| | | | 55 |
| FJ938057 | Feline coronavirus UU15 | MG197719 | Human coronavirus OC43 strain YC- |
| | | | 67 |
| FJ938058 | Feline coronavirus UU16 | MG197720 | Human coronavirus OC43 strain YC- |
| | | | 68 |
| FJ938059 | Feline coronavirus UU10 | MG197721 | Human coronavirus OC43 strain YC- |
| | | | 72 |
| FJ938060 | Feline coronavirus UU2 | MG197722 | Human coronavirus OC43 strain YC- |
| | | | 207 |
| FJ938061 | Feline coronavirus UU3 | MG197723 | Human coronavirus OC43 strain HZ- |
| | | | 459 |
| FJ938062 | Feline coronavirus UU9 | MG448607 | Infectious bronchitis virus strain |
| | | | ck/CH/LHB/121042 |
| FJ938063 | Bovine coronavirus E-DB2-TC | MG518518 | Water deer coronavirus isolate W17-18 |
| FJ938064 | Bovine coronavirus E-AH187-TC | MG596802 | Middle East respiratory syndrome- |
| | | | related coronavirus isolate Bat- |
| | | | CoV/H.savii/Italy/206645-40/2011 |
| FJ938065 | Bovine respiratory coronavirus | MG596803 | Middle East respiratory syndrome- |
| | AH187 | | related coronavirus isolate Bat- |
| | | | CoV/P.khulii/Italy/206645-63/2011 |
| FJ938066 | Bovine respiratory coronavirus | MG757138 | Bovine coronavirus isolate ICSA21- |
| | bovine/US/OH-440-TC/1996 | | LBA |
| FJ938067 | Human enteric coronavirus strain | MG757139 | Bovine coronavirus isolate ICSA16- |
| | 4408 | | EN |
| FJ938068 | Rat coronavirus Parker | MG757140 | Bovine coronavirus isolate ICSA16- |
| | | | LBA |
| GQ152141 | Feline coronavirus strain | MG757141 | Bovine coronavirus isolate ICSA-pool- |
| | FCoV/NTU156/P/2007 | | EN |
| GQ153539 | Bat SARS coronavirus HKU3-4 | MG757142 | Bovine coronavirus isolate ICSA-pool- |
| | | | LBA |
| GQ153540 | Bat SARS coronavirus HKU3-5 | MG762674 | Rousettus bat coronavirus HKU9 |
| | | | isolate Rousettus spp/Jinghong/2009 |
| GQ153541 | Bat SARS coronavirus HKU3-6 | MG772933 | Bat SARS-like coronavirus isolate bat- |
| | | | SL-CoVZC45 |
| GQ153542 | Bat SARS coronavirus HKU3-7 | MG772934 | Bat SARS-like coronavirus isolate bat- |
| | | | SL-CoVZXC21 |
| GQ153543 | Bat SARS coronavirus HKU3-8 | MG812377 | Sparrow deltacoronavirus strain |
| | | | ISU42824 |
| GQ153544 | Bat SARS coronavirus HKU3-9 | MG812378 | Sparrow deltacoronavirus strain |
| | | | ISU73347 |
| GQ153545 | Bat SARS coronavirus HKU3-10 | MG893511 | Feline coronavirus isolate Felix |
| GQ153546 | Bat SARS coronavirus HKU3-11 | MG916901 | Bat coronavirus BtCoV/Rh/YN2012 |
| | | | isolate BtCoV/Rh/YN2012_Rs3376 |
| GQ153547 | Bat SARS coronavirus HKU3-12 | MG916902 | Bat coronavirus BtCoV/Rh/YN2012 |
| | | | isolate BtCoV/Rh/YN2012_Rs4125 |
| GQ153548 | Bat SARS coronavirus HKU3-13 | MG916903 | Bat coronavirus BtCoV/Rh/YN2012 |
| | | | isolate BtCoV/Rh/YN2012_Rs4259 |
| GQ427173 | Turkey coronavirus strain | MG916904 | Bat coronavirus BtCoV/Rh/YN2012 |
| | TCoV/VA-74/03 | | isolate BtCoV/Rh/YN2012_Ra13591 |
| GQ427174 | Turkey coronavirus strain | MG977444 | Human coronavirus OC43 isolate TNP |
| | TCoV/TX-GL/01 | | F1778_2 |
| GQ427175 | Turkey coronavirus strain | MG977445 | Human coronavirus OC43 isolate TNP |
| | TCoV/IN-517/94 | | F1790_2 |
| GQ427176 | Turkey coronavirus strain | MG977447 | Human coronavirus OC43 isolate TNP |
| | TCoV/TX-1038/98 | | F1832_2 |
| GQ477367 | Canine coronavirus strain | MG977449 | Human coronavirus OC43 isolate TNP |
| | CCoV/NTU336/F/2008 | | F1834_2 |
| GQ504722 | Infectious bronchitis virus strain | MG977451 | Human coronavirus OC43 isolate TNP |
| | Georgia 1998 pass8 | | 12636 |
| GQ504723 | Infectious bronchitis virus strain | MG977452 | Human coronavirus OC43 isolate TNP |
| | Georgia 1998 Vaccine | | 12643 |
| GU190215 | Bat coronavirus BM48- | MH021175 | Avian coronavirus strain D274 |
| | 31/BGR/2008 | | |
| GU393332 | Infectious bronchitis virus serotype | MH043952 | Bovine coronavirus isolate 4-17-03 |
| | Delaware 072 | | |
| GU553361 | Feline coronavirus UU22 isolate | MH043953 | Bovine coronavirus isolate 4-17-25 |
| | TCVSP-ROTTIER-00022 | | |
| GU553362 | Feline coronavirus UU23 isolate | MH043954 | Bovine coronavirus isolate 4-17-08 |
| | TCVSP-ROTTIER-00023 | | |
| HM211099 | Bat coronavirus HKU9-5-2 | MH043955 | Bovine coronavirus isolate 7-16-23 |
| HM211101 | Bat coronavirus HKU9-10-2 | MH121121 | Human coronavirus OC43 isolate |
| | | | HCoV-OC43/USA/ACRI_0213/2016 |
| HM245925 | Mink coronavirus strain WD1127 | MH532440 | Quail deltacoronavirus strain |
| | | | G032/2015 |
| HM245926 | Mink coronavirus strain WD1133 | MH687935 | Alphacoronavirus sp. strain |
| | | | VZ_AlphaCoV_16715_24 |
| HM776941 | Transmissible gastroenteritis virus | MH687936 | Alphacoronavirus sp. strain |
| | isolate AYU | | VZ_AlphaCoV_16715_31 |
| HQ012367 | Feline coronavirus UU17 | MH687937 | Alphacoronavirus sp. strain |
| | | | VZ_AlphaCoV_16715_32 |
| HQ012368 | Feline coronavirus UU18 | MH687939 | Alphacoronavirus sp. strain |
| | | | VZ_AlphaCoV_16715_39_c2 |
| HQ012369 | Feline coronavirus UU21 | MH687940 | Alphacoronavirus sp. strain |
| | | | VZ_AlphaCoV_16715_45 |
| HQ012370 | Feline coronavirus UU24 | MH687942 | Alphacoronavirus sp. strain |
| | | | VZ_AlphaCoV_16715_47_c2 |
| HQ012371 | Feline coronavirus UU31 | MH687943 | Alphacoronavirus sp. strain |
| | | | VZ_AlphaCoV_16715_5 |
| HQ012372 | Feline coronavirus UU34 | MH687944 | Alphacoronavirus sp. strain |
| | | | VZ_AlphaCoV_16715_53 |
| HQ392469 | Feline coronavirus UU40 | MH687947 | Alphacoronavirus sp. strain |
| | | | VZ_AlphaCoV_16715_63 |
| HQ392470 | Feline coronavirus UU19 | MH687949 | Alphacoronavirus sp. strain |
| | | | VZ_AlphaCoV_16715_76 |
| HQ392471 | Feline coronavirus UU20 | MH687950 | Alphacoronavirus sp. strain |
| | | | VZ_AlphaCoV_16715_77 |
| HQ392472 | Feline coronavirus UU30 | MH687951 | Alphacoronavirus sp. strain |
| | | | VZ_AlphaCoV_16715_78 |
| HQ462571 | Transmissible gastroenteritis virus | MH687952 | Alphacoronavirus sp. strain |
| | strain WH-1 | | VZ_AlphaCoV_16715_84 |
| JF330898 | Infectious bronchitis virus strain | MH687953 | Alphacoronavirus sp. strain |
| | ck/CH/LHB/100801 | | VZ_AlphaCoV_16715_86 |
| JF792616 | Rat coronavirus isolate 681 | MH687955 | Alphacoronavirus sp. strain |
| | | | VZ_AlphaCoV_16845_47 |
| JF792617 | Rat coronavirus isolate 8190 | MH687956 | Alphacoronavirus sp. strain |
| | | | VZ_AlphaCoV_16845_53 |
| JN129834 | Human coronavirus OC43 strain | MH687957 | Alphacoronavirus sp. strain |
| | HK04-01 | | VZ_AlphaCoV_16845_64 |
| JN129835 | Human coronavirus OC43 strain | MH687958 | Alphacoronavirus sp. strain |
| | HK04-02 | | VZ_AlphaCoV_16845_87 |
| JN183882 | Feline coronavirus UU47 | MH687959 | Alphacoronavirus sp. strain |
| | | | VZ_AlphaCoV_17819_17 |
| JN183883 | Feline coronavirus UU54 | MH687960 | Alphacoronavirus sp. strain |
| | | | VZ_AlphaCoV_17819_22 |
| JN856008 | Canine coronavirus strain A76 | MH687961 | Alphacoronavirus sp. strain |
| | | | VZ_AlphaCoV_17819_4 |
| JQ065044 | White-eye coronavirus HKU16 | MH687962 | Alphacoronavirus sp. strain |
| | strain HKU16-6847 | | VZ_AlphaCoV_17819_50 |
| JQ065045 | Sparrow coronavirus HKU17 | MH687965 | Alphacoronavirus sp. strain |
| | strain HKU17-6124 | | VZ_AlphaCoV_20745_17 |
| JQ065046 | Magpie-robin coronavirus HKU18 | MH687966 | Alphacoronavirus sp. strain |
| | strain HKU18-chu3 | | VZ_AlphaCoV_20745_6 |
| JQ065047 | Night-heron coronavirus HKU19 | MH687968 | Betacoronavirus sp. strain |
| | strain HKU19-6918 | | VZ_BetaCoV_16715_52 |
| JQ065048 | Wigeon coronavirus HKU20 strain | MH687970 | Betacoronavirus sp. strain |
| | HKU20-9243 | | VZ_BetaCoV_20724_34_c12 |
| JQ065049 | Common-moorhen coronavirus | MH810163 | Yak coronavirus strain |
| | HKU21 strain HKU21-8295 | | YAK/HY24/CH/2017 |
| JQ977697 | Infectious bronchitis virus isolate | MH817484 | Feline Alphacoronavirus 1 strain |
| | SNU8067 | | FCoV-SB22 |
| JQ989270 | Rousettus bat coronavirus HKU10 | MH878976 | Infectious bronchitis virus isolate |
| | isolate 183A | | VFAR-047 |
| JQ989271 | Rousettus bat coronavirus HKU10 | MH924835 | Infectious bronchitis virus strain |
| | isolate 175A | | gammaCoV/ck/China/I0636/16 |
| JQ989272 | Hipposideros bat coronavirus | MH938448 | Alphacoronavirus Bat- |
| | HKU10 isolate TLC1343A | | CoV/P.kuhlii/Italy/206645-41/2011 |
| JQ989273 | Hipposideros bat coronavirus | MH938449 | Alphacoronavirus Bat- |
| | HKU10 isolate TLC1347A | | CoV/P.kuhlii/Italy/3398-19/2015 |
| JX860640 | Canine respiratory coronavirus | MH938450 | Alphacoronavirus Bat- |
| | strain K37 | | CoV/P.kuhlii/Italy/206679-3/2010 |
| JX897900 | UNVERIFIED: Infectious | MH940245 | Human coronavirus HKU1 isolate |
| | bronchitis virus isolate GX- | | SI17244 |
| | NN09032 | | |
| JX993987 | Bat coronavirus Rp/Shaanxi2011 | MK142676 | Infectious bronchitis virus isolate |
| | | | ahysx-1 |
| JX993988 | Bat coronavirus Cp/Yunnan2011 | MK211369 | Coronavirus BtSk- |
| | | | AlphaCoV/GX2018A |
| KC869678 | Coronavirus Neoromicia/PML- | MK211370 | Coronavirus BtSk- |
| | PHE1/RSA/2011 | | AlphaCoV/GX2018B |
| KC881005 | Bat SARS-like coronavirus | MK211372 | Coronavirus BtSk- |
| | RsSHC014 | | AlphaCoV/GX2018D |
| KC881006 | Bat SARS-like coronavirus | MK211373 | Coronavirus BtRs-AlphaCoV/YN2018 |
| | Rs3367 | | |
| KC962433 | Transmissible gastroenteritis virus | MK211374 | Coronavirus BtRl-BetaCoV/SC2018 |
| | isolate TGEV-HX | | |
| KF367457 | Bat SARS-like coronavirus WIV1 | MK211375 | Coronavirus BtRs-BetaCoV/YN2018A |
| KF430219 | Bat coronavirus | MK211376 | Coronavirus BtRs-BetaCoV/YN2018B |
| | CDPHE15/USA/2006 | | |
| KF460437 | Infectious bronchitis virus isolate | MK211377 | Coronavirus BtRs-BetaCoV/YN2018C |
| | VicS-v | | |
| KF530060 | Human coronavirus OC43 strain | MK211378 | Coronavirus BtRs-BetaCoV/YN2018D |
| | OC43/human/USA/851-15/1985 | | |
| KF530061 | Human coronavirus OC43 strain | MK211379 | Coronavirus BtRt-BetaCoV/GX2018 |
| | OC43/human/USA/901-43/1990 | | |
| KF530063 | Human coronavirus OC43 strain | MK217372 | Infectious bronchitis virus strain |
| | OC43/human/USA/9612-48/1996 | | I0221/17 |
| KF530064 | Human coronavirus OC43 strain | MK217373 | Infectious bronchitis virus strain |
| | OC43/human/USA/9612-9/1996 | | I0725/17 |
| KF530065 | Human coronavirus OC43 strain | MK217374 | Infectious bronchitis virus strain |
| | OC43/human/USA/901-41/1990 | | I0916/16 |
| KF530066 | Human coronavirus OC43 strain | MK217375 | Infectious bronchitis virus strain |
| | OC43/human/USA/901-33/1990 | | I1209/16 |
| KF530067 | Human coronavirus OC43 strain | MK303619 | Human coronavirus OC43 isolate |
| | OC43/human/USA/912-10/1991 | | MDS6 |
| KF530068 | Human coronavirus OC43 strain | MK303620 | Human coronavirus OC43 isolate |
| | OC43/human/USA/007-11/2000 | | MDS2 |
| KF530069 | Human coronavirus OC43 strain | MK303621 | Human coronavirus OC43 isolate |
| | OC43/human/USA/982-4/1998 | | MDS4 |
| KF530070 | Human coronavirus OC43 strain | MK303622 | Human coronavirus OC43 isolate |
| | OC43/human/USA/991-19/1999 | | MDS11 |
| KF530071 | Human coronavirus OC43 strain | MK303623 | Human coronavirus OC43 isolate |
| | OC43/human/USA/925-1/1992 | | MDS12 |
| KF530072 | Human coronavirus OC43 strain | MK303624 | Human coronavirus OC43 isolate |
| | OC43/human/USA/9712-13/1997 | | MDS14 |
| KF530073 | Human coronavirus OC43 strain | MK303625 | Human coronavirus OC43 isolate |
| | OC43/human/USA/8912-37/1989 | | MDS16 |
| KF530074 | Human coronavirus OC43 strain | MK309398 | Infectious bronchitis virus isolate |
| | OC43/human/USA/9212-33/1992 | | CK/CH/GD/HY16 |
| KF530075 | Human coronavirus OC43 strain | MK329221 | Infectious bronchitis virus isolate CK- |
| | OC43/human/USA/953-23/1995 | | CH-GX-YL17 |
| KF530076 | Human coronavirus OC43 strain | MK472067 | Alphacoronavirus sp. isolate WA1087 |
| | OC43/human/USA/911-11/1991 | | |
| KF530077 | Human coronavirus OC43 strain | MK472068 | Alphacoronavirus sp. isolate WA2028 |
| | OC43/human/USA/873-16/1987 | | |
| KF530078 | Human coronavirus OC43 strain | MK472069 | Alphacoronavirus sp. isolate WA3301 |
| | OC43/human/USA/9612-29/1996 | | |
| KF530079 | Human coronavirus OC43 strain | MK472070 | Alphacoronavirus sp. isolate WA3607 |
| | OC43/human/USA/913-29/1991 | | |
| KF530080 | Human coronavirus OC43 strain | MK472071 | Alphacoronavirus sp. isolate WAAlc1 |
| | OC43/human/USA/9712-31/1997 | | |
| KF530081 | Human coronavirus OC43 strain | MK492263 | Bat coronavirus strain BtCoV92 |
| | OC43/human/USA/991-5/1999 | | |
| KF530082 | Human coronavirus OC43 strain | MK574042 | Infectious bronchitis virus strain |
| | OC43/human/USA/912-11/1991 | | ck/CH/LHB/110615 |
| KF530083 | Human coronavirus OC43 strain | MK574043 | Infectious bronchitis virus strain |
| | OC43/human/USA/873-19/1987 | | ck/CH/LHB/110617 |
| KF530084 | Human coronavirus OC43 strain | MK581202 | Infectious bronchitis virus strain |
| | OC43/human/USA/951-18/1995 | | gammaCoV/Ck/Poland/80/1989 |
| KF530085 | Human coronavirus OC43 strain | MK581204 | Infectious bronchitis virus strain |
| | OC43/human/USA/871-25/1987 | | gammaCoV/Ck/Poland/255/1997 |
| KF530086 | Human coronavirus OC43 strain | MK720944 | Tylonycteris bat coronavirus HKU33 |
| | OC43/human/USA/872-5/1987 | | strain GZ151867 |
| KF530087 | Human coronavirus OC43 strain | MK720945 | Rhinolophus bat coronavirus HKU32 |
| | OC43/human/USA/873-6/1987 | | strain TLC26A |
| KF530088 | Human coronavirus OC43 strain | MK720946 | Rhinolophus bat coronavirus HKU32 |
| | OC43/human/USA/901-54/1990 | | strain TLC28A |
| KF530089 | Human coronavirus OC43 strain | MK878536 | Infectious bronchitis virus isolate |
| | OC43/human/USA/911-66/1991 | | GA9977/2019 |
| KF530090 | Human coronavirus OC43 strain | MK907286 | Erinaceus hedgehog coronavirus |
| | OC43/human/USA/931-85/1993 | | HKU31 strain F6 |
| KF530091 | Human coronavirus OC43 strain | MK907287 | Erinaceus hedgehog coronavirus |
| | OC43/human/USA/911-58/1991 | | HKU31 strain Rs13 |
| KF530092 | Human coronavirus OC43 strain | MN026164 | Human coronavirus OC43 isolate |
| | OC43/human/USA/008-5/2000 | | OC43_KLF_01_2018 |
| KF530094 | Human coronavirus OC43 strain | MN096598 | Infectious bronchitis virus strain |
| | OC43/human/USA/912-36/1991 | | ck/CH/YNSL/160501 |
| KF530095 | Human coronavirus OC43 strain | MN165107 | Feline coronavirus isolate XXN |
| | OC43/human/USA/912-6/1991 | | |
| KF530096 | Human coronavirus OC43 strain | MN197549 | Infectious bronchitis virus isolate |
| | OC43/human/USA/911-38/1991 | | CK/CH/GD/GDTS13 |
| KF530097 | Human coronavirus OC43 strain | MN306036 | Human coronavirus OC43 strain |
| | OC43/human/USA/9211-43/1992 | | SC0682 |
| KF530098 | Human coronavirus OC43 strain | MN306041 | Human coronavirus OC43 strain |
| | OC43/human/USA/965-6/1996 | | SC0810 |
| KF530099 | Human coronavirus OC43 strain | MN306042 | Human coronavirus OC43 strain |
| | OC43/human/USA/971-5/1997 | | SC0839 |
| KF530123 | Feline coronavirus strain Felis | MN306043 | Human coronavirus OC43 strain |
| | catus/NLD/UU88/2010 | | SC0841 |
| KF569996 | Rhinolophus affinis coronavirus | MN306046 | Human coronavirus 229E strain |
| | isolate LYRa11 | | SC0865 |
| KF636752 | Bat Hp- | MN306053 | Human coronavirus OC43 strain |
| | betacoronavirus/Zhejiang2013 | | SC9430 |
| KF663559 | Infectious bronchitis virus isolate | MN310476 | Human coronavirus OC43 strain |
| | ck/CH/IBTZ/2012 | | SC9428 |
| KF668605 | Infectious bronchitis virus isolate | MN310478 | Human coronavirus OC43 strain |
| | CK/CH/SD09/005 | | SC0776 |
| KF906249 | Dromedary camel coronavirus | MN369046 | Human coronavirus 229E strain |
| | HKU23 strain HKU23-265F | | SC9724 |
| KF906250 | Dromedary camel coronavirus | MN512434 | Infectious bronchitis virus isolate |
| | HKU23 strain HKU23-362F | | IBV/Ck/Can/17-035614 |
| KF923886 | Human coronavirus OC43 isolate | MN512435 | Infectious bronchitis virus isolate |
| | 1908A/2010 | | IBV/Ck/Can/17-036989 |
| KF923887 | Human coronavirus OC43 isolate | MN512436 | Infectious bronchitis virus isolate |
| | 1997A/2010 | | IBV/Ck/Can/18-048192T |
| KF923888 | Human coronavirus OC43 isolate | MN512437 | Infectious bronchitis virus isolate |
| | 2145A/2010 | | IBV/Ck/Can/18-048430 |
| KF923889 | Human coronavirus OC43 isolate | MN512438 | Infectious bronchitis virus isolate |
| | 1926/2006 | | IBV/Ck/Can/18-049707 |
| KF923890 | Human coronavirus OC43 isolate | MN514962 | Dromedary camel coronavirus HKU23 |
| | 39A/2007 | | isolate DcCoV- |
| | | | HKU23/camel/Ethiopia/CAC1019/2015 |
| KF923891 | Human coronavirus OC43 isolate | MN514963 | Dromedary camel coronavirus HKU23 |
| | 5240/2007 | | isolate DcCoV- |
| | | | HKU23/camel/Morocco/CAC2586/2016 |
| KF923892 | Human coronavirus OC43 isolate | MN514964 | Dromedary camel coronavirus HKU23 |
| | 5345/2007 | | isolate DcCoV- |
| | | | HKU23/camel/Nigeria/NV1010/2015 |
| KF923893 | Human coronavirus OC43 isolate | MN514965 | Dromedary camel coronavirus HKU23 |
| | 2151A/2010 | | isolate DcCoV- |
| | | | HKU23/camel/Nigeria/NV1092/2015 |
| KF923894 | Human coronavirus OC43 isolate | MN514966 | Dromedary camel coronavirus HKU23 |
| | 5352/2007 | | isolate DcCoV- |
| | | | HKU23/camel/Nigeria/NV1097/2015 |
| KF923895 | Human coronavirus OC43 isolate | MN514967 | Dromedary camel coronavirus HKU23 |
| | 10285/2010 | | isolate DcCoV- |
| | | | HKU23/camel/Nigeria/NV1385/2016 |
| KF923896 | Human coronavirus OC43 isolate | MN611517 | Rousettus aegyptiacus bat coronavirus |
| | 3074A/2012 | | 229E-related isolate 5425 |
| KF923897 | Human coronavirus OC43 isolate | MN611518 | Miniopterus pusillus bat coronavirus |
| | 3269A/2012 | | HKU8-related isolate 6610 |
| KF923898 | Human coronavirus OC43 isolate | MN611521 | Scotophilus kuhlii bat coronavirus 512- |
| | 3184A/2012 | | related isolate HK140714 |
| KF923899 | Human coronavirus OC43 isolate | MN611522 | Rhinolophus affinis bat coronavirus |
| | 3582/2006 | | HKU2-related isolate 160660 |
| KF923900 | Human coronavirus OC43 isolate | MN611524 | Miniopterus schreibersii bat |
| | 3647/2006 | | coronavirus 1-related isolate 161454 |
| KF923901 | Human coronavirus OC43 isolate | MN611525 | Hipposideros pomona bat coronavirus |
| | 5472/2007 | | CHB25 isolate CHB0025 |
| KF923902 | Human coronavirus OC43 isolate | NC_003045 | Bovine coronavirus |
| | 12689/2012 | | |
| KF923903 | Human coronavirus OC43 isolate | NC_038861 | Transmissible gastroenteritis virus |
| | 12691/2012 | | complete genome |
| KF923904 | Human coronavirus OC43 isolate | NC_045512 | Wuhan seafood market pneumonia |
| | 12694/2012 | | virus isolate Wuhan-Hu-1 |
| KF923905 | Human coronavirus OC43 isolate | U00735 | Bovine coronavirus strain Mebus |
| | 229/2005 | | |
| KF923906 | Human coronavirus OC43 isolate | PDF_0663 | #N/A |
| | 3194A/2012 | | |
| KF923907 | Human coronavirus OC43 isolate | GCS_003 | #N/A |
| | 5370/2007 | | |
| KF923908 | Human coronavirus OC43 isolate | GCS_019 | #N/A |
| | 5414/2007 | | |
| KF923909 | Human coronavirus OC43 isolate | PDF_2560 | #N/A |
| | 5442/2007 | | |
| KF923910 | Human coronavirus OC43 isolate | PDF_3316 | #N/A |
| | 5445/2007 | | |
| KF923911 | Human coronavirus OC43 isolate | GCS_242 | #N/A |
| | 5479/2007 | | |
| KF923912 | Human coronavirus OC43 isolate | GCS_264a | #N/A |
| | 5484/2007 | | |
| KF923913 | Human coronavirus OC43 isolate | GCS_264b | #N/A |
| | 5485/2007 | | |
| KF923914 | Human coronavirus OC43 isolate | GCS_265a | #N/A |
| | 5508/2007 | | |
| KF923915 | Human coronavirus OC43 isolate | GCS_265b | #N/A |
| | 5517/2007 | | |
| KF923916 | Human coronavirus OC43 isolate | SBB_122 | #N/A |
| | 5519/2007 | | |
| KF923917 | Human coronavirus OC43 isolate | PDF_1704 | #N/A |
| | 5566/2007 | | |
| KF923918 | Human coronavirus OC43 isolate | GCS_008 | #N/A |
| | 10108/2010 | | |
| KF923919 | Human coronavirus OC43 isolate | SBB_943 | #N/A |
| | 5595/2007 | | |
| KF923920 | Human coronavirus OC43 isolate | SBB_797 | #N/A |
| | 5617/2007 | | |
| KF923921 | Human coronavirus OC43 isolate | PDF_2370 | #N/A |
| | 69A/2007 | | |
| KF923922 | Human coronavirus OC43 isolate | PDF_2386 | #N/A |
| | 8164/2009 | | |
| KF923923 | Human coronavirus OC43 isolate | GCS_017 | #N/A |
| | 892A/2008 | | |
| KF923924 | Human coronavirus OC43 isolate | PRD_0038 | #N/A |
| | 10290/2010 | | |
| KF923925 | Human coronavirus OC43 isolate | PDF_2180 | #N/A |
| | 10574/2010 | | |
| KF931628 | Infectious bronchitis virus isolate | SBB_120 | #N/A |
| | VicS-del | | |
| KJ473795 | BtMf-AlphaCoV/AH2011 | SBB_041 | #N/A |
| KJ473796 | BtMf-AlphaCoV/JX2012 | SBB_053 | #N/A |
| KJ473797 | BtMf-AlphaCoV/GD2012 | SBB_010 | #N/A |
| KJ473798 | BtMf-AlphaCoV/HuB2013 | SBB_024 | #N/A |
| KJ473799 | BtMf-AlphaCoV/FJ2012 | SBB_726 | #N/A |
| KJ473800 | BtMf-AlphaCoV/HeN2013 | SBB_747 | #N/A |
| KJ473806 | BtMr-AlphaCoV/SAX2011 | SBB_788 | #N/A |
| KJ473807 | BtRf-AlphaCoV/HuB2013 | SBB_130 | #N/A |
| KJ473808 | BtRf-AlphaCoV/YN2012 | GCS_011 | #N/A |
| KJ473809 | BtNv-AlphaCoV/SC2013 | GCS_211 | #N/A |
| KJ473810 | BtMs-AlphaCoV/GS2013 | GCS_227 | #N/A |
| KJ473811 | BtRf-BetaCoV/JL2012 | NC_009020 | Pipistrellus bat coronavirus HKU5 |
| KJ473812 | BtRf-BetaCoV/HeB2013 | EF065508 | Bat coronavirus HKU4-4 |
| KJ473813 | BtRf-BetaCoV/SX2013 | EF065505 | Bat coronavirus HKU4-1 |
| KJ473814 | BtRs-BetaCoV/HuB2013 | EF065506 | Bat coronavirus HKU4-2 |
| KJ473815 | BtRs-BetaCoV/GX2013 | EF065507 | Bat coronavirus HKU4-3 |
| KJ473816 | BtRs-BetaCoV/YN2013 | NC_009019 | Tylonycteris bat coronavirus HKU4 |
| KJ473821 | BtVs-BetaCoV/SC2013 | MH002339 | Tylonycteris bat coronavirus HKU4 |
| KJ958218 | Human coronavirus OC43 strain | MH002337 | Tylonycteris bat coronavirus HKU4 |
| | LY341 | | |
| KJ958219 | Human coronavirus OC43 strain | MH002338 | Tylonycteris bat coronavirus HKU4 |
| | LY342 | | |
| KM213963 | Infectious bronchitis virus isolate | MW218395 | Tylonycteris bat coronavirus HKU4 |
| | CK/CH/XDC- 2/2013 | | |
| KM347965 | Ferret coronavirus isolate FRCoV- | MN611519 | Tylonycteris pachypus bat coronavirus |
| | NL-2010 | | HKU4-related isolate GZ131656 |
| KM454473 | Duck coronavirus isolate | MH002342 | Pipistrellus bat coronavirus HKU5 |
| | DK/GD/27/2014 | | |
| KP143507 | Feline coronavirus isolate 27C | MN611520 | Pipistrellus abramus bat coronavirus |
| | | | HKU5-related isolate BY140568 |
| KP143508 | Feline coronavirus isolate 28O | MH002340 | Pipistrellus bat coronavirus HKU5 |
| KP143509 | Feline coronavirus isolate 65F | EF065510 | Bat coronavirus HKU5-2 |
| KP143510 | Feline coronavirus isolate 67F | EF065511 | Bat coronavirus HKU5-3 |
| KP143511 | Feline coronavirus isolate 80F | EF065512 | Bat coronavirus HKU5-5 |
| KP143512 | Feline coronavirus isolate 26M | EF065509 | Bat coronavirus HKU5-1 |
| KP198610 | Human coronavirus OC43 strain | MH002341 | Pipistrellus bat coronavirus HKU5 |
| | 2058A/10 | | |
| KP198611 | Human coronavirus OC43 strain | | |
| | 1783A/10 | | |

### Example 2. RNA Preparation and Tagmentation Enrichment of RNAs of Interest in Wastewater Samples

[0152] RNA sequencing (RNA-Seq) with next-generation sequencing (NGS) is a powerful method for discovering, profiling, and quantifying RNA transcripts. Targeted RNA-Seq analyzes expression in a focused set of genes. Enrichment enables cost-effective RNA exome analysis using sequence-specific capture of the coding regions of the transcriptome. It is ideal for low-quality samples.

[0153] This tagmentation enrichment uses on-bead tagmentation followed by a single 90-minute hybridization step to provide a rapid workflow. On-bead tagmentation features enrichment Bead-Linked Transposomes (eBLT) optimized for RNA (eBLTL) that mediate a uniform tagmentation reaction. In addition to manual preparation, RNA Preparation and Tagmentation Enrichment is designed to be compatible with liquid-handling platforms for an automated workflow, providing highly reproducible sample handling, reduced risk of human error, and less hands-on time.

A. cDNA Synthesis and Tagmentation

[0154] Wastewater is collected for evaluation of viral RNA. RNA collected from wastewater is denatured and then random hexamers are annealed. The random hexamers prime the sample for cDNA synthesis. The hexamer-primed RNA fragments are then reverse transcribed to produce first strand cDNA. Enrichment Bead-Linked Transposomes are used to tagment double-stranded cDNA.

### B. Amplification and Purification

[0155] After tagmentation, the fragments are purified and amplified to add index adapter sequences for dual indexing and P7 and P5 sequences for clustering. Next, magnetic beads are implemented to purify the tagmented library. Then the purified library is quantified and normalized.

### C. Enrichment

[0156] After normalization, the library is combined into one pool for one- or three-plex enrichment. Results are optimized for 200 ng of each library. Following quantification and normalization, the magnetic beads are implemented to capture probes hybridized to the targeted library fragments of interest. Using heated washes, nonspecific binding is removed from the beads. The enriched library is then eluted from the beads. The enriched library is then amplified using a PCR program. In some embodiments, the PCR program is 14 cycles. After amplification, magnetic beads are used purify the enriched library.

### D. Evaluation

[0157] The enriched library is then evaluated using either or both of the following methods: (1) analyzing 1 μl of the enriched library with the Qubit dsDNA HS Assay kit (Illumina) to quantify library concentration (ng/μl); and/or (2) analyzing 1 μl of the enriched library with the Agilent 2100 Bioanalyzer System and a DNA 1000 Kit to qualify.

[0158] After diluting to the starting concentration depending on the sequence system, libraries are denatured and diluted to the final loading concentration. Paired-end runs are used for sequencing. The number of cycles per index read is 10, and the number of cycles per read varies depending on the sequencing system.

### Example 3. Enrichment Using a Solid Support

[0159] A solid support, such as a flowcell, is prepared for enrichment. Oligonucleotides are prepared corresponding to desired RNA, and these oligonucleotides are immobilized to a solid support. For example, oligonucleotides comprising sequences complementary to desired RNA (e.g., RNA sequences associated with coronaviruses) are immobilized to a solid support to allow for enrichment. A flowcell with such immobilized oligonucleotides may be termed an enrichment flowcell.

[0160] A cDNA library is prepared using the probe sets described above in Example 1 from a wastewater sample comprising RNA. Library fragments are then be added to the enrichment flowcell. Library fragments prepared from desired RNA bind to the enrichment flowcell, and the fluid that does not bind to the enrichment flowcell (comprising library fragments not prepared from desired RNA) is siphoned to a waste container. The bound library fragments are denatured, collected, and sequenced (with optional amplification before sequencing). In this way, the library that is sequenced is enriched for library fragments prepared from desired RNA.

### Example 4. Pan-Coronavirus Panel for Genomic Surveillance of Coronaviruses Using Target Enrichment NGS

[0161] The performance of a panel comprising coronavirus enrichment probes described herein (Pan-CoV panel) was evaluated in an enrichment assay (Illumina RNA Prep with Enrichment or “IRPE”) followed by Illumina SBS sequencing using synthetic controls representative of four different coronaviruses. The Pan-CoV panel contains probes to >200 human and animal coronaviruses. Compared to untargeted sequencing, enrichment using the Pan-CoV panel provides much more depth of genome coverage and sensitivity (>100-fold enrichment at low viral loads). Mixing studies demonstrated that different controls of Coronaviruses can be detected together, revealing the robustness of this assay. In addition, the design strategy of Pan-CoV panel and IRPE chemistry can also tolerate a certain level of mismatches such that diverse coronaviruses sequences including new variants, as indicated by the identification of BA.2 variant of SARS-COV-2 that emerged after the panel development was complete.

[0162] To further demonstrate the applications of this assay in real-world samples, enrichment using the Pan-CoV panel was performed on 48 RNA samples extracted from bat feces collected from Africa followed by sequencing. When performing assembly analysis, it was found that enriched libraries showed more and longer contigs compared to untargeted sequencing. Alignment of these contigs to widely used databases showed similarity to currently characterized Bat and Human Coronaviruses but have significant divergence in regions of the genome, seemingly due to the novelty of the Coronaviruses sequenced. To provide a comprehensive analysis solution, a DRAGEN Microbial Enrichment App was developed, which provides users with consensus genomes and contigs, enabling novel coronaviruses discovery and characterization, and using these two methods together provides benefits. Thus, the panel comprising coronavirus enrichment probes is a powerful tool for monitoring the spread of coronaviruses to prevent the next pandemic.

### EQUIVALENTS

[0163] The foregoing written specification is considered to be sufficient to enable one skilled in the art to practice the embodiments. The foregoing description and Examples detail certain embodiments and describes the best mode contemplated by the inventors. It will be appreciated, however, that no matter how detailed the foregoing may appear in text, the embodiment may be practiced in many ways and should be construed in accordance with the appended claims and any equivalents thereof.

[0164] As used herein, the term about refers to a numeric value, including, for example, whole numbers, fractions, and percentages, whether or not explicitly indicated. The term about generally refers to a range of numerical values (e.g., +/−5-10% of the recited range) that one of ordinary skill in the art would consider equivalent to the recited value (e.g., having the same function or result). When terms such as at least and about precede a list of numerical values or ranges, the terms modify all of the values or ranges provided in the list. In some instances, the term about may include numerical values that are rounded to the nearest significant figure.

What is claimed is:

1. A method of enriching a sample for one or more target viral nucleic acids comprising the steps of:
a. providing a probe set comprising at least two nucleic acid probes complementary to one or more target viral nucleic acids, wherein the probe set comprises at least two of SEQ ID NOs: 1-22909;
b. allowing the probes in the probe set to hybridize to the target viral nucleic acids; and
c. enriching the sample for the one or more target viral nucleic acids by amplifying the target viral nucleic acids and/or separating the target viral nucleic acids from the sample.

2. A method of enriching a sample for one or more target coronavirus nucleic acids comprising the steps of:
a. providing a probe set comprising at least two nucleic acid probes complementary to one or more target coronavirus nucleic acids, wherein the nucleic acid probes are affixed to a support;
b. capturing one or more target coronavirus nucleic acids on a support;
c. using the one or more captured target coronavirus nucleic acids as a template strand to produce one or more nucleic acid duplexes immobilized on the support, wherein the at least one target coronavirus nucleic acids hybridize to one or more probes in a probe set on the support;
d. contacting a transposase and transposon with the one or more nucleic acid duplexes under conditions wherein the one or more nucleic acid duplexes and transposon composition undergo a transposition reaction to produce one or more tagged nucleic acid duplexes, wherein the transposon composition comprises a double stranded nucleic acid molecule comprising a transferred strand and a non-transferred strand;
e. contacting the one or more tagged nucleic acid duplexes with a nucleic acid modifying enzyme under conditions to extend a 3′ end of the immobilized strand to a 5′ end of the template strand to produce one or more end-extended tagged nucleic acid duplexes;
f. amplifying the one or more end-extended tagged nucleic acid duplexes to produce a plurality of tagged nucleic acid strands;
g. contacting the plurality of tagged nucleic acid strands with a probe set to create an enriched library; and
h. amplifying the enriched library.

3. The method of claim 2, wherein the sample comprises a sample from a mammal.

4. The method of claim 2, wherein the sample comprises a blood sample, a serum sample, a whole blood sample, a tissue sample, a fecal sample, a urine sample, a mucus sample, a saliva sample, a lymph sample, a vaginal fluid sample, a semen sample, an amniotic sample, and/or a sweat sample.

5. The method of claim 2, wherein the sample comprises a freshwater sample, a wastewater sample, a saline water sample, or a combination thereof.

6. The method of claim 2, wherein the probe set is biotinylated.

7. The method of claim 2, wherein the one or more target coronavirus nucleic acids are coronavirus RNA molecules.

8. The method of claim 2, wherein the probe set further comprises at least two DNA probes that each hybridize to at least one target coronavirus molecule of an Alphacoronavirus, Betacoronavirus, Deltacoronavirus, Gammacoronavirus, and/or Bafinivirus genus.

9. The method of claim 2, wherein the probe set further comprises at least two DNA probes that each hybridize to at least one target coronavirus molecule selected from Table 2.

10. The method of claim 2, wherein the probe set further comprises at least two DNA probes that comprise any one of SEQ ID NOs: 22917-23376.

11. The method of claim 2, wherein the method further comprises depleting unwanted nucleic acid molecules from a nucleic acid sample by depleting unwanted cDNA library fragments from a library of cDNA fragments prepared from RNA, wherein the unwanted cDNA library fragments comprise those prepared from unwanted RNA sequences, further comprising:
a. preparing a solid support comprising at least one immobilized oligonucleotide, wherein each immobilized oligonucleotide comprises a nucleic acid sequence corresponding to an unwanted RNA sequence or its complement;
b. adding the library of fragments to the solid support and hybridizing the library fragments to at least one immobilized oligonucleotide to allow binding of unwanted library fragments to at least one immobilized oligonucleotide; and
c. collecting library fragments not bound to at least one immobilized oligonucleotide.

12. The method of claim 11 wherein the at least one immobilized oligonucleotide comprises a sequence comprising any one or more of SEQ ID NOs: 23377-24507 or its complement.

13. The method of claim 11, wherein the depleting unwanted nucleic acid molecules comprises depleting off-target RNA nucleic acid molecules from a nucleic acid sample comprises:
a. contacting a nucleic acid sample comprising at least one RNA or DNA target sequence and at least one off-target RNA molecule from a first species with a probe set comprising at least two DNA probes complementary to discontiguous sequences along the full length of the at least one off-target RNA molecule from a second species, thereby hybridizing the DNA probes to the off-target RNA molecules to form DNA: RNA hybrids, wherein each DNA: RNA hybrid is at least 5 bases apart, or at least 10 bases apart, along a given off-target RNA molecule sequence from any other DNA: RNA hybrid, wherein the off-target RNA comprises at least one small noncoding RNA chosen from RN7SK, RN7SL1, RN7SL2, RN7SL5P, RPPH1, SNORD3A;
b. contacting the DNA: RNA hybrids with a ribonuclease that degrades the RNA from the DNA: RNA hybrids, thereby degrading the off-target RNA molecules in the nucleic acid sample to form a degraded mixture;
c. separating the degraded RNA from the degraded mixture;
d. sequencing the remaining RNA from the sample;
e. evaluating the remaining RNA sequences for the presence of off-target RNA molecules from the first species, thereby determining gap sequence regions; and
f. supplementing the probe set with additional DNA probes complementary to discontiguous sequences in one or more of the gap sequence regions.

14. The method of claim 2, wherein the probe set comprises any one or more of SEQ ID NOs: 22917-23376.

15. The method of claim 2, wherein the method further comprises depleting unwanted cDNA library fragments from a library of cDNA fragments prepared from RNA, wherein the unwanted cDNA library fragments comprise those prepared from unwanted RNA sequences.

16. A composition comprising a probe set comprising at least one DNA probe comprising at least one sequence of SEQ ID NOs: 1-22909.

17. The composition of claim 16, comprising at least 5, at least at least 10, at least 50, at least 100, at least 250, at least 500, at least 750, at least 1000, at least 1500, or at least 2000 sequences of SEQ ID NOs: 1-22909.

18. A kit comprising a probe set comprising:
a. at least one DNA probe comprising at least one sequence comprising at least one of SEQ ID NOs: 1-22909; and
b. a buffer.

19. The kit of claim 18, further comprising:
a. a ribonuclease;
b. a DNase; and
c. RNA purification beads.

20. The kit of claim 19, further comprising a nucleic acid destabilizing chemical comprising formamide.

The application's sequence listing, which the Patent Office published only in electronic form, follows.

SEQUENCE LISTING (24507 sequences)

SEQ ID NO: 1 - DNA, 80 bp, synthetic construct
  misc_feature 1..80: note = Synthetic: >AlphaCoV1-cand-3210-3289
  source 1..80: mol_type = other DNA
acttgaaggttacttcatttatgacacttgtggtggatttgacattaataatccagatggtattatgatttcacagtatg

SEQ ID NO: 2 - DNA, 80 bp, synthetic construct
  misc_feature 1..80: note = Synthetic: >AlphaCoV1-cand-3290-3369
  source 1..80: mol_type = other DNA
atcttaacactgctgctgatgacaaaagagaatctgatgcatcaagtgtggaagaaatctcttcgatttctgacaatgaa

SEQ ID NO: 3 - DNA, 80 bp, synthetic construct
  misc_feature 1..80: note = Synthetic: >AlphaCoV1-cand-3370-3449
  source 1..80: mol_type = other DNA
gctgttgaacaaattgaagaggatgaaattgtagaatcaactgatgatgctgaagagatttcttctcaagaagaggttga

SEQ ID NO: 4 - DNA, 80 bp, synthetic construct
  misc_feature 1..80: note = Synthetic: >AlphaCoV1-cand-3450-3529
  source 1..80: mol_type = other DNA
aacagtagcagttgcagatgttgaagactctgttgaacaagtttctcctgtagaagaagatagtgttttaactcctgctg

SEQ ID NO: 5 - DNA, 80 bp, synthetic construct
  misc_feature 1..80: note = Synthetic: >AlphaCoV1-cand-3530-3609
  source 1..80: mol_type = other DNA
taaaccctgatgagcaactttcctcagtagatgaaaatgttgaagtatctgctaaagatgacccttgggctgctgctgtt

SEQ ID NO: 6 - DNA, 80 bp, synthetic construct
  misc_feature 1..80: note = Synthetic: >AlphaCoV1-cand-3610-3689
  source 1..80: mol_type = other DNA
gatgaacaggaagctgaacaacctaaaccttccttaccacctttcaagacaacaaatcttaatggtaaaattatccttaa

SEQ ID NO: 7 - DNA, 80 bp, synthetic construct
  misc_feature 1..80: note = Synthetic: >AlphaCoV1-cand-3690-3769
  source 1..80: mol_type = other DNA
acaacaggataataattgttggataaatgcttgctgttatcagctgcaagcctttgattttttcaaccatgaattgtggg

SEQ ID NO: 8 - DNA, 80 bp, synthetic construct
  misc_feature 1..80: note = Synthetic: >AlphaCoV1-cand-3770-3849
  source 1..80: mol_type = other DNA
aggattttaagaaaggtgatgttatgccttttgtaaacttttgttatgcagctataactttgaagcagggtgattcaggt

SEQ ID NO: 9 - DNA, 80 bp, synthetic construct
  misc_feature 1..80: note = Synthetic: >AlphaCoV1-cand-3850-3929
  source 1..80: mol_type = other DNA
gatgcagaatatcttttggagacgatgctcaatgattatagtacagctaaagtaatacttagtgctaagtgtggctgtgg

SEQ ID NO: 10 - DNA, 80 bp, synthetic construct
  misc_feature 1..80: note = Synthetic: >AlphaCoV1-cand-3930-4009
  source 1..80: mol_type = other DNA
tgttaaagaaatagttttagaacgaactgtgtttaagctcacacctcttaagaatgagtttaaatatggtgtttgtggtg

SEQ ID NO: 11 - DNA, 80 bp, synthetic construct
  misc_feature 1..80: note = Synthetic: >AlphaCoV1-cand-4010-4089
  source 1..80: mol_type = other DNA
actgtaagcaaattaacatggtgtaagtttgcaagtgtttgaaggctctggtgtttttgttcatgatagaattgaaaaac

SEQ ID NO: 12 - DNA, 80 bp, synthetic construct
  misc_feature 1..80: note = Synthetic: >AlphaCoV1-cand-4090-4169
  source 1..80: mol_type = other DNA
aatacgccagagtcacaatttattgtgaaacctattatgcatgcagtttacacaggtacaacacagaatggtcattacat

SEQ ID NO: 13 - DNA, 80 bp, synthetic construct
  misc_feature 1..80: note = Synthetic: >AlphaCoV1-cand-4170-4249
  source 1..80: mol_type = other DNA
gattgatgattgtgttcatgattattgtgtggatggtatgggaattaaacctcgtaaacataagttttacacatccactt

SEQ ID NO: 14 - DNA, 80 bp, synthetic construct
  misc_feature 1..80: note = Synthetic: >AlphaCoV1-cand-4250-4329
  source 1..80: mol_type = other DNA
tgtttcttaatgcaaatgtaatgacagctgctgaagaatctaaaactagagttgaagctagtgaagacccctgggctaaa

SEQ ID NO: 15 - DNA, 80 bp, synthetic construct
  misc_feature 1..80: note = Synthetic: >AlphaCoV1-cand-4330-4409
  source 1..80: mol_type = other DNA
gcagttgaaaaagtagaacagcaaccttctgttgttacaacgtctagccaagtaccggaggaggataaatgttttattga

SEQ ID NO: 16 - DNA, 80 bp, synthetic construct
  misc_feature 1..80: note = Synthetic: >AlphaCoV1-cand-4410-4489
  source 1..80: mol_type = other DNA
aaaagaaggctgatgttgcaacatgtgatcaggaggtcactaatgtcaaagtcctaaaaatgatcaaagatactgtgcaa

SEQ ID NO: 17 - DNA, 80 bp, synthetic construct
  misc_feature 1..80: note = Synthetic: >AlphaSp-cand-8840-8919
  source 1..80: mol_type = other DNA
attcaattggcatgctagcttatgctacattgtactttttgtgtactaaaggtgctagatactcatgggtgtggcatgtt

SEQ ID NO: 18 - DNA, 80 bp, synthetic construct
  misc_feature 1..80: note = Synthetic: >AlphaSp-cand-8920-8999
  source 1..80: mol_type = other DNA
ggttttgccatctcatattgtttcttagcaccttggtgggtggttttggcctatttgatttgtgcgttgcttgaattttt

SEQ ID NO: 19 - DNA, 80 bp, synthetic construct
  misc_feature 1..80: note = Synthetic: >AlphaSp-cand-9000-9079
  source 1..80: mol_type = other DNA
gcctaatctgtttaaacttaaagtttctacgcagttgtttgagggtgacaagtttgttggttcttttgaaagtgcagcat

SEQ ID NO: 20 - DNA, 80 bp, synthetic construct
  misc_feature 1..80: note = Synthetic: >AlphaSp-cand-9080-9159
  source 1..80: mol_type = other DNA
caggtacttttgtacttgacatgcattcataccaaaaacttgcaaattctatttcaacagaaaaactcaaacaatactgc

SEQ ID NO: 21 - DNA, 80 bp, synthetic construct
  misc_feature 1..80: note = Synthetic: >AlphaSp-cand-9160-9239
  source 1..80: mol_type = other DNA
gcttcatacaaccgttataagtattatagcggtagtgctagtgaggcagattaccggcttgcatgctttgcacatctggc

SEQ ID NO: 22 - DNA, 80 bp, synthetic construct
  misc_feature 1..80: note = Synthetic: >AlphaSp-cand-9240-9319
  source 1..80: mol_type = other DNA
taaagctatgagtgattttgctaatgaccacatggacaagttgtacacaccaccaacaattagttacaactccacattac

SEQ ID NO: 23 - DNA, 80 bp, synthetic construct
  misc_feature 1..80: note = Synthetic: >AlphaSp-cand-9320-9399
  source 1..80: mol_type = other DNA
aagctggcttacgtaagatggcccagccttcaggtgttgtggaaggttgtattgtcagagtttcttatggtaatttgaca

SEQ ID NO: 24 - DNA, 80 bp, synthetic construct
  misc_feature 1..80: note = Synthetic: >AlphaSp-cand-9400-9479
  source 1..80: mol_type = other DNA
cttaatggtctttggcttggtgatactgttatctgtcctagacatgttatagcaagtaacactactaatgtgatagacta

SEQ ID NO: 25 - DNA, 80 bp, synthetic construct
  misc_feature 1..80: note = Synthetic: >AlphaSp-cand-9480-9559
  source 1..80: mol_type = other DNA
tgaccatgctatgtctctggttagattacataacttttcaatttcttcaggcaatatgttcctgggtgttatcagtgctt

SEQ ID NO: 26 - DNA, 80 bp, synthetic construct
  misc_feature 1..80: note = Synthetic: >AlphaSp-cand-9560-9639
  source 1..80: mol_type = other DNA
ctatgcgtggcactttgttgcatattaaagtcaatcaacctaatgctaatacacctaattatacctataaggttttgaaa

SEQ ID NO: 27 - DNA, 80 bp, synthetic construct
  misc_feature 1..80: note = Synthetic: >AlphaSp-cand-9640-9719
  source 1..80: mol_type = other DNA
ccaggtgagtcttttaacattttagcatgttatgacggtagtgctgcaggtgtttatggcgttaatatgcgtacaaacta

SEQ ID NO: 28 - DNA, 80 bp, synthetic construct
  misc_feature 1..80: note = Synthetic: >AlphaSp-cand-9720-9799
  source 1..80: mol_type = other DNA
cactatcagaggttcttttattagtggagcttgtggttcaccaggttacaatatcaataacggtgttgtagagttttgtt

SEQ ID NO: 29 - DNA, 80 bp, synthetic construct
  misc_feature 1..80: note = Synthetic: >AlphaSp-cand-9800-9879
  source 1..80: mol_type = other DNA
acatgcatcaccttgaattgggttctggctgtcatgtaggtagcgacatggatggtaccatgtacggtaaatacgaagat

SEQ ID NO: 30 - DNA, 80 bp, synthetic construct
  misc_feature 1..80: note = Synthetic: >AlphaSp-cand-9880-9959
  source 1..80: mol_type = other DNA
cagccgacattacaaattgaaggtgctagtaacttgattactgagaatgtttgctcatggctttatggtgctctcattaa

SEQ ID NO: 31 - DNA, 80 bp, synthetic construct
  misc_feature 1..80: note = Synthetic: >AlphaSp-cand-9960-10039
  source 1..80: mol_type = other DNA
tggtgatcgctggtggctcagttctgttagtataggtttagatacttataatgagtgggctttgcgcaatggaatgacgc

SEQ ID NO: 32 - DNA, 80 bp, synthetic construct
  misc_feature 1..80: note = Synthetic: >AlphaSp-cand-10040-10119
  source 1..80: mol_type = other DNA
cattgcaaaatgtcgattgcttctccttgcttgttgcaaaaacaggtgttgatgtaggtagattgcttgcatctatacaa

SEQ ID NO: 33 - DNA, 80 bp, synthetic construct
  misc_feature 1..80: note = Synthetic: >Anlong-cand-8590-8669
  source 1..80: mol_type = other DNA
acaacacgtcagctcagatatgagtggatttggcatataggctatgttgtgtcatactttttcttagcaccatggtggct

SEQ ID NO: 34 - DNA, 80 bp, synthetic construct
  misc_feature 1..80: note = Synthetic: >Anlong-cand-8670-8749
  source 1..80: mol_type = other DNA
tatgttggcatatgtgggagtattgattctagagttggtacccaatctcttgaaactcaaggtttccacacatttgtttg

SEQ ID NO: 35 - DNA, 80 bp, synthetic construct
  misc_feature 1..80: note = Synthetic: >Anlong-cand-8750-8829
  source 1..80: mol_type = other DNA
aggatggccattttattggtagctttgaaagtgctgcttcaggtacgtttgtgctcgatatgcgtgcctatgagaaactt

SEQ ID NO: 36 - DNA, 80 bp, synthetic construct
  misc_feature 1..80: note = Synthetic: >Anlong-cand-8830-8909
  source 1..80: mol_type = other DNA
gttaatagtatacctgcggagcgtcttagacagtatgcttccagttataataaatacaagtattatagtggctcgcctac

SEQ ID NO: 37 - DNA, 80 bp, synthetic construct
  misc_feature 1..80: note = Synthetic: >Anlong-cand-8910-8989
  source 1..80: mol_type = other DNA
agaggttgattacagacttgcgtgttatgcacatctagcacatgccatgatgacatttggtaaggaacagcgtgatatgc

SEQ ID NO: 38 - DNA, 80 bp, synthetic construct
  misc_feature 1..80: note = Synthetic: >Anlong-cand-8990-9069
  source 1..80: mol_type = other DNA
tttatgccccacccacatgtagttttaactcttcattgcagtctggtctcaagaaaatggctcaaccttctggtattgtt

SEQ ID NO: 39 - DNA, 80 bp, synthetic construct
  misc_feature 1..80: note = Synthetic: >Anlong-cand-9070-9149
  source 1..80: mol_type = other DNA
gaaccttgtattgtcagggtttcttacaatagtaccgtcctgaatggtttgtggcttggagacacagtttattgtcctag

SEQ ID NO: 40 - DNA, 80 bp, synthetic construct
  misc_feature 1..80: note = Synthetic: >Anlong-cand-9150-9229
  source 1..80: mol_type = other DNA
acatgtgttagcttctaacactacagtcactatagactacgaacatgcttatgcagttatgcgtttgcataactttagca

SEQ ID NO: 41 - DNA, 80 bp, synthetic construct
  misc_feature 1..80: note = Synthetic: >Anlong-cand-9230-9309
  source 1..80: mol_type = other DNA
tttcagctggtaatatgtacttgggtgttattagtgccacaatgcatggtgctaatttacacattaaagtaaaccagagc

SEQ ID NO: 42 - DNA, 80 bp, synthetic construct
  misc_feature 1..80: note = Synthetic: >Anlong-cand-9310-9389
  source 1..80: mol_type = other DNA
aatgttcaaacaccaccacatagttttagaactgtgaaacctggtgagatgtttaacatactggcttgctatgatggtac

SEQ ID NO: 43 - DNA, 80 bp, synthetic construct
  misc_feature 1..80: note = Synthetic: >Anlong-cand-9390-9469
  source 1..80: mol_type = other DNA
accagcaggtgtctatagtgtaaacttaaggacaaatcatacaattaaaggctctttcattaatggcgcttgtggctcac

SEQ ID NO: 44 - DNA, 80 bp, synthetic construct
  misc_feature 1..80: note = Synthetic: >Anlong-cand-9470-9549
  source 1..80: mol_type = other DNA
ctggttacaatgtcgttaatggtactgttgaatttgtgtacatgcaccaaattgagttaggtagtggttgccatgtgggt

SEQ ID NO: 45 - DNA, 80 bp, synthetic construct
  misc_feature 1..80: note = Synthetic: >Anlong-cand-9550-9629
  source 1..80: mol_type = other DNA
tctgactattcaggcaagatctatggtggctacgaagaccaacccactatacaaattgagggatctgccaatttggtaac

SEQ ID NO: 46 - DNA, 80 bp, synthetic construct
  misc_feature 1..80: note = Synthetic: >Anlong-cand-9630-9709
  source 1..80: mol_type = other DNA
agaaaatgtcattgcatttctttatggtgcacttcttaatggtattacttggtggttgacaccaactcgtgtcagcgttg

SEQ ID NO: 47 - DNA, 80 bp, synthetic construct
  misc_feature 1..80: note = Synthetic: >Anlong-cand-9710-9789
  source 1..80: mol_type = other DNA
aagcttttaatgaatgggcctccgtttcaggttatacaccactacagagtgctgatggtttctctatgttggctgctaag

SEQ ID NO: 48 - DNA, 80 bp, synthetic construct
  misc_feature 1..80: note = Synthetic: >Anlong-cand-9790-9869
  source 1..80: mol_type = other DNA
actggtgttgaggtagaacgtcttttagcttctatacaaaaatacgccagtggttttggtggtcgtaacattttgggata

SEQ ID NO: 49 - DNA, 80 bp, synthetic construct
  misc_feature 1..80: note = Synthetic: >AvianCoV-cand-15100-15179
  source 1..80: mol_type = other DNA
ggagttctatgaaaatatgtatagagctcctacaactttacaatcttgtggtgtttgtgtagtttgtaatagtcaaacta

SEQ ID NO: 50 - DNA, 80 bp, synthetic construct
  misc_feature 1..80: note = Synthetic: >AvianCoV-cand-15180-15259
  source 1..80: mol_type = other DNA
tactacgctgtggtaattgtattagaaaaccattcttgtgttgtaagtgttgctatgaccatgtcatgcacactgaccac

SEQ ID NO: 51 - DNA, 80 bp, synthetic construct
  misc_feature 1..80: note = Synthetic: >AvianCoV-cand-15260-15339
  source 1..80: mol_type = other DNA
aaaaatgttttgtctataaatccatacatttgctctcaacctggttgtggtgaagcagatgttactaaactttacctcgg

SEQ ID NO: 52 - DNA, 80 bp, synthetic construct
  misc_feature 1..80: note = Synthetic: >AvianCoV-cand-15340-15419
  source 1..80: mol_type = other DNA
aggtatgtcatacttctgtggtaatcataaacctaaattatcaataccgttagtatctaatggtactgtttttggaattt

SEQ ID NO: 53 - DNA, 80 bp, synthetic construct
  misc_feature 1..80: note = Synthetic: >AvianCoV-cand-15420-15499
  source 1..80: mol_type = other DNA
acagggccaattgtgttggtagcgaaaatgttgatgattttaatcaactagctactactaattggtctactgttgaacct

SEQ ID NO: 54 - DNA, 80 bp, synthetic construct
  misc_feature 1..80: note = Synthetic: >AvianCoV-cand-15500-15579
  source 1..80: mol_type = other DNA
tatatattagcaaatcgctgtagcgactcattaagacgctttgctgctgagacagtaaaagcaacagaagagttgcataa

SEQ ID NO: 55 - DNA, 80 bp, synthetic construct
  misc_feature 1..80: note = Synthetic: >AvianCoV-cand-15580-15659
  source 1..80: mol_type = other DNA
acagcaatttgctagtgcagaagtcagagaggtaatctctgaccgtgaattaattctatcatgggaacctggtaagacaa

SEQ ID NO: 56 - DNA, 80 bp, synthetic construct
  misc_feature 1..80: note = Synthetic: >AvianCoV-cand-15660-15739
  source 1..80: mol_type = other DNA
ggcctccattgaatagaaattatgttttcactggctatcactttacaagaactagtaaggtacagctaggtgattttact

SEQ ID NO: 57 - DNA, 80 bp, synthetic construct
  misc_feature 1..80: note = Synthetic: >AvianCoV-cand-15740-15819
  source 1..80: mol_type = other DNA
tttgaaaaaggtgaaggtagagatgttgtctattatagggcgacgtctactgctaaattgtctgttggagacatttttgt

SEQ ID NO: 58 - DNA, 80 bp, synthetic construct
  misc_feature 1..80: note = Synthetic: >AvianCoV-cand-15820-15899
  source 1..80: mol_type = other DNA
cttaacatcacacaatgttgtttctcttgtagcaccaactttgtgtcctcaacaaactttttctaggtttgttaatttaa

SEQ ID NO: 59 - DNA, 80 bp, synthetic construct
  misc_feature 1..80: note = Synthetic: >AvianCoV-cand-15900-15979
  source 1..80: mol_type = other DNA
gacctaatgtaatggtaccggagtgttttgttaataacattccattataccatttagtaggtaaacaaaagcgtactaca

SEQ ID NO: 60 - DNA, 80 bp, synthetic construct
  misc_feature 1..80: note = Synthetic: >AvianCoV-cand-15980-16059
  source 1..80: mol_type = other DNA
gtacaaggccctcctggcagtggtaagtcacactttgccataggccttgctgcatactttagtaatgctcgtgttgtttt

SEQ ID NO: 61 - DNA, 80 bp, synthetic construct
  misc_feature 1..80: note = Synthetic: >AvianCoV-cand-16060-16139
  source 1..80: mol_type = other DNA
tacagcatgttctcatgctgctgtagatgctctttgtgaaaaagcgtttaaatttcttaaagttgatgattgcactcgca

SEQ ID NO: 62 - DNA, 80 bp, synthetic construct
  misc_feature 1..80: note = Synthetic: >AvianCoV-cand-16140-16219
  source 1..80: mol_type = other DNA
tagtacctcaaaggactactgtcgactgcttctcaaaatttaaagctaatgacacaggcaaaaagtacatttttagtact

SEQ ID NO: 63 - DNA, 80 bp, synthetic construct
  misc_feature 1..80: note = Synthetic: >AvianCoV-cand-16220-16299
  source 1..80: mol_type = other DNA
attaatgccttgccagaagttagttgtgacattctgttggtagatgaggttagtatgttgaccaattatgaattgtcatt

SEQ ID NO: 64 - DNA, 80 bp, synthetic construct
  misc_feature 1..80: note = Synthetic: >AvianCoV-cand-16300-16379
  source 1..80: mol_type = other DNA
tattaatggtaagataaattaccagtatgttgtgtatgtaggtgatcctgctcaattaccggcacctcgtactttgctta

SEQ ID NO: 65 - DNA, 80 bp, synthetic construct
  misc_feature 1..80: note = Synthetic: >Beluga-cand-21470-21549
  source 1..80: mol_type = other DNA
agcatacttattttgatgcggtttatgtaggtagagaagaaaaattttctctagatgctgtgcaaataatttttaggtta

SEQ ID NO: 66 - DNA, 80 bp, synthetic construct
  misc_feature 1..80: note = Synthetic: >Beluga-cand-21550-21629
  source 1..80: mol_type = other DNA
aagccaaatgctacgtatttgggcttacccttttgtaatgagacacatacagataaatccagtagtgccattattgctta

SEQ ID NO: 67 - DNA, 80 bp, synthetic construct
  misc_feature 1..80: note = Synthetic: >Beluga-cand-21630-21709
  source 1..80: mol_type = other DNA
tcttataggtggtgagttttatagtgttgatacatccacagttgttgttgagacctataatcctcacatacccgaccctt

SEQ ID NO: 68 - DNA, 80 bp, synthetic construct
  misc_feature 1..80: note = Synthetic: >Beluga-cand-21710-21789
  source 1..80: mol_type = other DNA
ctgctacacccacaagtgcatcaactacgcaatctaggaccaccatttatggttggcaagatttgcgtagttataatatg

SEQ ID NO: 69 - DNA, 80 bp, synthetic construct
  misc_feature 1..80: note = Synthetic: >Beluga-cand-21790-21869
  source 1..80: mol_type = other DNA
tcttgtgttaggttttcatatgagttaaaacgtgttatgtctgtgcctttatctatgataagggatgttattattgatgt

SEQ ID NO: 70 - DNA, 80 bp, synthetic construct
  misc_feature 1..80: note = Synthetic: >Beluga-cand-21870-21949
  source 1..80: mol_type = other DNA
taagaagagagttttgtccatagatggttttccagttggatcgctcttgtcagattttgaatttaggtttagtattcttg

SEQ ID NO: 71 - DNA, 80 bp, synthetic construct
  misc_feature 1..80: note = Synthetic: >Beluga-cand-21950-22029
  source 1..80: mol_type = other DNA
ctatgaatgatacctatttagcaggtcttaaatatacgacagcgctcattacttttgataaaggtaatgttcgcaatgtt

SEQ ID NO: 72 - DNA, 80 bp, synthetic construct
  misc_feature 1..80: note = Synthetic: >Beluga-cand-22030-22109
  source 1..80: mol_type = other DNA
attgattgtaatagtgactccgtctttgacaaactcaggtgtgatttgcaaactgatgttatgtcagatgggttttatcc

SEQ ID NO: 73 - DNA, 80 bp, synthetic construct
  misc_feature 1..80: note = Synthetic: >Beluga-cand-22110-22189
  source 1..80: mol_type = other DNA
tgttaatattaaaactaatgaagctgaggaaaatgcaacttttatagatgttgaggctacattagctaatttgagtttgg

SEQ ID NO: 74 - DNA, 80 bp, synthetic construct
  misc_feature 1..80: note = Synthetic: >Beluga-cand-22190-22269
  source 1..80: mol_type = other DNA
aagtttttgttagtagtccaagccatagtcctgcatgtttattaaaaagctataagtgtgttgatacccgttatttttat

SEQ ID NO: 75 - DNA, 80 bp, synthetic construct
  misc_feature 1..80: note = Synthetic: >Beluga-cand-22270-22349
  source 1..80: mol_type = other DNA
ttgcaaaattacacttatagttgtgctgataatggcattagtaatgatgctgccggtagtgcatactgtgagggtcgtat

SEQ ID NO: 76 - DNA, 80 bp, synthetic construct
  misc_feature 1..80: note = Synthetic: >Beluga-cand-22350-22429
  source 1..80: mol_type = other DNA
ggacacctttaataaatttggtgttaatggccttgattttagaggtaaatgccccttttcagctagtaaggtgaatacag

SEQ ID NO: 77 - DNA, 80 bp, synthetic construct
  misc_feature 1..80: note = Synthetic: >Beluga-cand-22430-22509
  source 1..80: mol_type = other DNA
ggcttacttttgataagatttgttttggtgtttatgaacaaggttgtcaagcagataaagtttgtaactttgggttttat

SEQ ID NO: 78 - DNA, 80 bp, synthetic construct
  misc_feature 1..80: note = Synthetic: >Beluga-cand-22510-22589
  source 1..80: mol_type = other DNA
tttgatgatgtagtttttaatcagtatggtaataaagtgtattataagcgccaagatttaggctttattgattaccaatt

SEQ ID NO: 79 - DNA, 80 bp, synthetic construct
  misc_feature 1..80: note = Synthetic: >Beluga-cand-22590-22669
  source 1..80: mol_type = other DNA
tggcacactatttaagaattctttagttcaacctaatgtaattcaggatggttgccatgattatgatatttatggctata

SEQ ID NO: 80 - DNA, 80 bp, synthetic construct
  misc_feature 1..80: note = Synthetic: >Beluga-cand-22670-22749
  source 1..80: mol_type = other DNA
aaggaactggttttgtaaaacccttctttgattatagctatttgaatatgggaggtcttataatgttagacagtggagga

SEQ ID NO: 81 - DNA, 80 bp, synthetic construct
  misc_feature 1..80: note = Synthetic: >BetaSp-cand-14330-14409
  source 1..80: mol_type = other DNA
tgtataaaaagcttggtcccatttttaatagggctttgcttaacactgctaagtttgctgatgctatggtagaagcaggc

SEQ ID NO: 82 - DNA, 80 bp, synthetic construct
  misc_feature 1..80: note = Synthetic: >BetaSp-cand-14390-14469
  source 1..80: mol_type = other DNA
atgctatggtagaagcaggcttggtaggtgttttaacacttgataatcaagatttgaatggtatatggtatgattttggt

SEQ ID NO: 83 - DNA, 80 bp, synthetic construct
  misc_feature 1..80: note = Synthetic: >BetaSp-cand-14470-14549
  source 1..80: mol_type = other DNA
gattttgttcttgcagcccccggttgtggtgttgcaatagcagattcttattattcttatatgatgccaatgttgacaat

SEQ ID NO: 84 - DNA, 80 bp, synthetic construct
  misc_feature 1..80: note = Synthetic: >BetaSp-cand-14550-14629
  source 1..80: mol_type = other DNA
gtgtcatgcattggacagtgaattgtatgttaatggagcttatagacaatttgatcttgtacagtatgattttactgatt

SEQ ID NO: 85 - DNA, 80 bp, synthetic construct
  misc_feature 1..80: note = Synthetic: >BetaSp-cand-14630-14709
  source 1..80: mol_type = other DNA
acaagctagagttgtttaataagtactttaagtattggactatgccttaccatccaaacacatgtgattgcgaggatgat

SEQ ID NO: 86 - DNA, 80 bp, synthetic construct
  misc_feature 1..80: note = Synthetic: >BetaSp-cand-14710-14789
  source 1..80: mol_type = other DNA
aggtgcataatacattgtgccaattttaatatactctttagtatggtattgcctaatacctgttttgggcctcttgttag

SEQ ID NO: 87 - DNA, 80 bp, synthetic construct
  misc_feature 1..80: note = Synthetic: >BetaSp-cand-14790-14869
  source 1..80: mol_type = other DNA
gcaaatctttgtagatggtgtgccttttgtcgtttcaataggctaccattataaggaattaggtgttgttatgaatatgg

SEQ ID NO: 88 - DNA, 80 bp, synthetic construct
  misc_feature 1..80: note = Synthetic: >BetaSp-cand-14870-14949
  source 1..80: mol_type = other DNA
atgtggatacccataggtacagattgtccctaaaggatctacttttatatgctgctgatccagctttacatgtggcatca

SEQ ID NO: 89 - DNA, 80 bp, synthetic construct
  misc_feature 1..80: note = Synthetic: >BetaSp-cand-14950-15029
  source 1..80: mol_type = other DNA
gcaaatgcattgtatgatttacgcacatgttgctttagcgttgcagctatagcgagtggcgtgaaatttcaaaccgttaa

SEQ ID NO: 90 - DNA, 80 bp, synthetic construct
  misc_feature 1..80: note = Synthetic: >BetaSp-cand-15030-15109
  source 1..80: mol_type = other DNA
acccggtaattttaatcaggatttttatgattttatattaagtaaaggcttgcttaaggaaggtagttctgttgatttga

SEQ ID NO: 91 - DNA, 80 bp, synthetic construct
  misc_feature 1..80: note = Synthetic: >BetaSp-cand-15110-15189
  source 1..80: mol_type = other DNA
agcacttcttctttacgcaagatggtaatgctgctatcactgattataattattataaatataatttacccaccatggtg

SEQ ID NO: 92 - DNA, 80 bp, synthetic construct
  misc_feature 1..80: note = Synthetic: >BetaSp-cand-15190-15269
  source 1..80: mol_type = other DNA
gatataaagcagttattgttttgtttagaagttgtttttaagtattttgaggtctatgatggtgggtgtatcccagcatc

SEQ ID NO: 93 - DNA, 80 bp, synthetic construct
  misc_feature 1..80: note = Synthetic: >BetaSp-cand-15270-15349
  source 1..80: mol_type = other DNA
acaggttattgttaataattatgataagagtgctggctatccattcaataagtttggtaaggcccgcctctactacgaag

SEQ ID NO: 94 - DNA, 80 bp, synthetic construct
  misc_feature 1..80: note = Synthetic: >BetaSp-cand-15350-15429
  source 1..80: mol_type = other DNA
cactttcatttgaagagcaggatgacgtttacgcatataccaagcgaaacgtccttccaactcttacacaaatgaatctt

SEQ ID NO: 95 - DNA, 80 bp, synthetic construct
  misc_feature 1..80: note = Synthetic: >BetaSp-cand-15430-15509
  source 1..80: mol_type = other DNA
aaatatgccattagtgctaaaaatagagctcgcactgttgctggagtctctatcttgagtactatgactggcagaatgtt

SEQ ID NO: 96 - DNA, 80 bp, synthetic construct
  misc_feature 1..80: note = Synthetic: >BetaSp-cand-15510-15589
  source 1..80: mol_type = other DNA
tcaccagaagtgtttgaaaagtatagcagctactcgtggtgttccagttgttattggcaccacgaaattttatggcggct

SEQ ID NO: 97 - DNA, 80 bp, synthetic construct
  misc_feature 1..80: note = Synthetic: >CDPHE15-cand-3030-3109
  source 1..80: mol_type = other DNA
gtttcacaatggccaccagctgatgttgacgagtcttgtgatgacagtgacgacgatgatgactccgaccatgaagcaga

SEQ ID NO: 98 - DNA, 80 bp, synthetic construct
  misc_feature 1..80: note = Synthetic: >CDPHE15-cand-3110-3189
  source 1..80: mol_type = other DNA
cgaagaatcctctgctgagcatgatgatgatcccgaaagtgcatcaacagatgaacagttgatgggccaggatactgcac

SEQ ID NO: 99 - DNA, 80 bp, synthetic construct
  misc_feature 1..80: note = Synthetic: >CDPHE15-cand-3190-3269
  source 1..80: mol_type = other DNA
ctgatagtgcatcgacagatgaaagtcatgagaccgaacctaatggtgcgtctttagatgaagatctgtctgcaaaacag

SEQ ID NO: 100 - DNA, 80 bp, synthetic construct
  misc_feature 1..80: note = Synthetic: >CDPHE15-cand-3270-3349
  source 1..80: mol_type = other DNA
gaagaggctctaaatgctttggacaacgccattggtagtgcatcagctgccacagaagaagaagaagttaatgatgcact

SEQ ID NO: 101 - DNA, 80 bp, synthetic construct
  misc_feature 1..80: note = Synthetic: >CDPHE15-cand-3350-3429
  source 1..80: mol_type = other DNA
gtcctttatgaccgagtcatcaccaaaaccttgtgagcctactagcgacacatttgcatatccttttaaggattataatg

SEQ ID NO: 102 - DNA, 80 bp, synthetic construct
  misc_feature 1..80: note = Synthetic: >CDPHE15-cand-3430-3509
  source 1..80: mol_type = other DNA
gtgtcaaggtgctagaccaacaaagtaacaattgctgggttaactcaactttactccagttgcagttgcttggtgtcatc

SEQ ID NO: 103 - DNA, 80 bp, synthetic construct
  misc_feature 1..80: note = Synthetic: >CDPHE15-cand-3510-3589
  source 1..80: mol_type = other DNA
ggtgatgactccgcaatggcattgtttaaagttggtagagttggacctatggttaagcgttgctacgaagctgttggcgc

SEQ ID NO: 104 - DNA, 80 bp, synthetic construct
  misc_feature 1..80: note = Synthetic: >CDPHE15-cand-3590-3669
  source 1..80: mol_type = other DNA
aattaaaggctctttaggcgacgtgtctcagtgtatggaagttttgttacgtgatgtcaaaactcttactgtacactgtg

SEQ ID NO: 105 - DNA, 80 bp, synthetic construct
  misc_feature 1..80: note = Synthetic: >CDPHE15-cand-3670-3749
  source 1..80: mol_type = other DNA
atactgtttgtgactgtgggtctggcgctaagacctttgttggctgtgcttttaggtttgagcctacgacggaaccgttt

SEQ ID NO: 106 - DNA, 80 bp, synthetic construct
  misc_feature 1..80: note = Synthetic: >CDPHE15-cand-3750-3829
  source 1..80: mol_type = other DNA
ccatatggttgttgtcagaattgcaaacaggttttattgcataccattacttctattagtggtactggtgtgttttgtcg

SEQ ID NO: 107 - DNA, 80 bp, synthetic construct
  misc_feature 1..80: note = Synthetic: >CDPHE15-cand-3830-3909
  source 1..80: mol_type = other DNA
tgaacctactccttttgacatcagtgttatgccaattcgaccattgtgtgctgcaaattatgttggcgctgttgatggtg

SEQ ID NO: 108 - DNA, 80 bp, synthetic construct
  misc_feature 1..80: note = Synthetic: >CDPHE15-cand-3910-3989
  source 1..80: mol_type = other DNA
gtcattatatgactaacatatataccaacaatgttgcggtggacggtcatggtgtacacgggattgcaaacacaggcctt

SEQ ID NO: 109 - DNA, 80 bp, synthetic construct
  misc_feature 1..80: note = Synthetic: >CDPHE15-cand-3990-4069
  source 1..80: mol_type = other DNA
aacactatttgtgttaaggatgtggattggtctagagctattaaacatgaacccattcgtgttgaaaagcctaaaaagga

SEQ ID NO: 110 - DNA, 80 bp, synthetic construct
  misc_feature 1..80: note = Synthetic: >CDPHE15-cand-4070-4149
  source 1..80: mol_type = other DNA
tgtcaagccagaaccaccagttaaacctttgaatgctaaagttgatggtttgaaaccatttgttagttacaaaggtgttg

SEQ ID NO: 111 - DNA, 80 bp, synthetic construct
  misc_feature 1..80: note = Synthetic: >CDPHE15-cand-4150-4229
  source 1..80: mol_type = other DNA
aattctatcagggtgcttttaaggacctccttgagttgccatttgactttgttgtaaacgcagcaaatgagcaattgtca

SEQ ID NO: 112 - DNA, 80 bp, synthetic construct
  misc_feature 1..80: note = Synthetic: >CDPHE15-cand-4230-4309
  source 1..80: mol_type = other DNA
catggtggtggtgttgcacgtgctatagatgaacatactggtggtgaactgcaaagtttgtctgacagatatgttaaagc

SEQ ID NO: 113 - DNA, 80 bp, synthetic construct
  misc_feature 1..80: note = Synthetic: >CDPHE15-cand-5590-5669
  source 1..80: mol_type = other DNA
agtctcagggacacgtggttgtggaccgcactacagttgattcctgctgtagctcccagcgcacacttgttacaccagtg

SEQ ID NO: 114 - DNA, 80 bp, synthetic construct
  misc_feature 1..80: note = Synthetic: >CDPHE15-cand-5670-5749
  source 1..80: mol_type = other DNA
gttaatggtagtattttgcgcatgggtgttgacgatggtgcgtgtaaacatggttctacttttataaataaggttgtcag

SEQ ID NO: 115 - DNA, 80 bp, synthetic construct
  misc_feature 1..80: note = Synthetic: >CDPHE15-cand-5750-5829
  source 1..80: mol_type = other DNA
tattaatggtactgtaatcttagttaatgttggaccaccaatctctagtgcacctacttcttttatacagggtctgtctt

SEQ ID NO: 116 - DNA, 80 bp, synthetic construct
  misc_feature 1..80: note = Synthetic: >CDPHE15-cand-5830-5909
  source 1..80: mol_type = other DNA
atacatcattcaacaacacagttggaggtgtcggacattacactgtatatgatagtacacagcatggcttttatgacggt

SEQ ID NO: 117 - DNA, 80 bp, synthetic construct
  misc_feature 1..80: note = Synthetic: >CDPHE15-cand-5910-5989
  source 1..80: mol_type = other DNA
gacgcatttgtacgtggtgaattggctatgcaacctgtaactgctttagttgctagacatagtcattacgttgttaaaga

SEQ ID NO: 118 - DNA, 80 bp, synthetic construct
  misc_feature 1..80: note = Synthetic: >CDPHE15-cand-5990-6069
  source 1..80: mol_type = other DNA
ccctgtaaagtcttttgaacaacgtgcttctgcagttgttgacagtctcaattttgcatctgagaagtttttcacctttg

SEQ ID NO: 119 - DNA, 80 bp, synthetic construct
  misc_feature 1..80: note = Synthetic: >CDPHE15-cand-6070-6149
  source 1..80: mol_type = other DNA
gtgattttgtgtcacgtaacgtcataacaatgttagtgtggttctttagtttgctttctttgctgctgaagtctgtgcgt

SEQ ID NO: 120 - DNA, 80 bp, synthetic construct
  misc_feature 1..80: note = Synthetic: >CDPHE15-cand-6150-6229
  source 1..80: mol_type = other DNA
cgcagagactttagggttttagcaggtgcaccagagcgttctggtgttataattagtcgtagcattaaatataatgttag

SEQ ID NO: 121 - DNA, 80 bp, synthetic construct
  misc_feature 1..80: note = Synthetic: >CDPHE15-cand-6230-6309
  source 1..80: mol_type = other DNA
agcattacgctactttatgaggctgaaagccaagtgggtttgtatgtttttgaaggcctgtttcatattgtatacatgtt

SEQ ID NO: 122 - DNA, 80 bp, synthetic construct
  misc_feature 1..80: note = Synthetic: >CDPHE15-cand-6310-6389
  source 1..80: mol_type = other DNA
atgctacatgttttatgattattaggttttcgtttgtaagtgacatcttttgcagtggcgacgttgatggttatgctaat

SEQ ID NO: 123 - DNA, 80 bp, synthetic construct
  misc_feature 1..80: note = Synthetic: >CDPHE15-cand-6390-6469
  source 1..80: mol_type = other DNA
tcctcatttgacaaaaatgcatactgtgatggacagttgtgcaaggtatgtttgtttggttacgatgaactagcagattt

SEQ ID NO: 124 - DNA, 80 bp, synthetic construct
  misc_feature 1..80: note = Synthetic: >CDPHE15-cand-6470-6549
  source 1..80: mol_type = other DNA
tccgcatacaactgttgtttgggaacacttaaaagacccatttgtcataaatgtcatacccctattttatcttggcttct

SEQ ID NO: 125 - DNA, 80 bp, synthetic construct
  misc_feature 1..80: note = Synthetic: >CDPHE15-cand-6540-6619
  source 1..80: mol_type = other DNA
cttggcttcttggcaatatttggtggaactgttactcgtataatggttttgtactttgttagccagtatgttaacatgct

SEQ ID NO: 126 - DNA, 80 bp, synthetic construct
  misc_feature 1..80: note = Synthetic: >CDPHE15-cand-6620-6699
  source 1..80: mol_type = other DNA
tggtgcttaccttggtgtacaagatagtgtttggtttttgcaattctttccatttgatgtttttggagatgagatcgtcg

SEQ ID NO: 127 - DNA, 80 bp, synthetic construct
  misc_feature 1..80: note = Synthetic: >CDPHE15-cand-6700-6779
  source 1..80: mol_type = other DNA
tgctatttttagtagtacgcgtgcttatgttcctcaaacacgtgttgtttggttgcgataaaccctcatgtctggcttgc

SEQ ID NO: 128 - DNA, 80 bp, synthetic construct
  misc_feature 1..80: note = Synthetic: >CDPHE15-cand-6780-6859
  source 1..80: mol_type = other DNA
tctaagagcgcaaggctgaagcgtgttccagtttccactattgtttctggtgctaataagtccttctatgtcaatgctaa

SEQ ID NO: 129 - DNA, 80 bp, synthetic construct
  misc_feature 1..80: note = Synthetic: >Delta-cand-9030-9109
  source 1..80: mol_type = other DNA
gtaacatgcaattgcttgcgctcattgtgtgtagcattatctactttctctacacctatgttcatactgtagctaagaca

SEQ ID NO: 130 - DNA, 80 bp, synthetic construct
  misc_feature 1..80: note = Synthetic: >Delta-cand-9110-9189
  source 1..80: mol_type = other DNA
gctacagggaaattttcttccttcttagacgcagctaaagctacttttgtcattgacaatgaaaagtacgtgttgcttaa

SEQ ID NO: 131 - DNA, 80 bp, synthetic construct
  misc_feature 1..80: note = Synthetic: >Delta-cand-9190-9269
  source 1..80: mol_type = other DNA
agacctcgctggtgctgaatttgaccagtatctggcctcttacaacaagtacaaatatttttctggtactgcttctgata

SEQ ID NO: 132 - DNA, 80 bp, synthetic construct
  misc_feature 1..80: note = Synthetic: >Delta-cand-9270-9349
  source 1..80: mol_type = other DNA
aggattatgataaggtctgtatggcatttcttgccaaggctttgtcatcttttcgtgaaggatggcggttcacagagtgt

SEQ ID NO: 133 - DNA, 80 bp, synthetic construct
  misc_feature 1..80: note = Synthetic: >Delta-cand-9350-9429
  source 1..80: mol_type = other DNA
tttgtacacaccacctaaatttgcagttgttcagagtcttaagaccaagctgcaagcaggtatcaaaatcctcctgcacc

SEQ ID NO: 134 - DNA, 80 bp, synthetic construct
  misc_feature 1..80: note = Synthetic: >Delta-cand-9430-9509
  source 1..80: mol_type = other DNA
cttcaggtgtagttgagcgatgtatggtctcagttgtctacaatggatctgcattgaatggcatctggcttaagaatgtt

SEQ ID NO: 135 - DNA, 80 bp, synthetic construct
  misc_feature 1..80: note = Synthetic: >Delta-cand-9510-9589
  source 1..80: mol_type = other DNA
gtctactgcccacgccatgtaattggaaaattccgtggtgaccagtggactcacatggtctcaattgctgattgccgcga

SEQ ID NO: 136 - DNA, 80 bp, synthetic construct
  misc_feature 1..80: note = Synthetic: >Delta-cand-9590-9669
  source 1..80: mol_type = other DNA
ctttatagtcaagtgtccaatacagggtattcagctaaatgtccaatcagttaagatggtaggagctctcctccagttaa

SEQ ID NO: 137 - DNA, 80 bp, synthetic construct
  misc_feature 1..80: note = Synthetic: >Delta-cand-9670-9749
  source 1..80: mol_type = other DNA
ctgttcataccgagcagaacaacacagccactccagactataagtttgaaaggctccaaccaggatcatcgatgacaatt

SEQ ID NO: 138 - DNA, 80 bp, synthetic construct
  misc_feature 1..80: note = Synthetic: >Delta-cand-9750-9829
  source 1..80: mol_type = other DNA
gcttgtgcttatgatggcattgtacggcatgtctatcacgtggtcctccaacttaataatcttatttatgcaagcttcct

SEQ ID NO: 139 - DNA, 80 bp, synthetic construct
  misc_feature 1..80: note = Synthetic: >Delta-cand-9830-9909
  source 1..80: mol_type = other DNA
taacggagcttgtggtagtgtgggttacactcttaagggtaaaacactctacttacattacatgcaccacattgagttta

SEQ ID NO: 140 - DNA, 80 bp, synthetic construct
  misc_feature 1..80: note = Synthetic: >Delta-cand-9910-9989
  source 1..80: mol_type = other DNA
acaacaaaactcatagtggtacagatcttgaaggtaacttctatggcccctatgtggatgaggaagttattcagcaacaa

SEQ ID NO: 141 - DNA, 80 bp, synthetic construct
  misc_feature 1..80: note = Synthetic: >Delta-cand-9990-10069
  source 1..80: mol_type = other DNA
acagcattccagtattacactgataatgttgttgctcaattatatgcacacttactgactgttgatgctagaccaaaatg

SEQ ID NO: 142 - DNA, 80 bp, synthetic construct
  misc_feature 1..80: note = Synthetic: >Delta-cand-10070-10149
  source 1..80: mol_type = other DNA
gctggcacaatctcagataagtatcgaggatttcaactcatgggctgctaacaattcctttgctaacttcccatgtgaac

SEQ ID NO: 143 - DNA, 80 bp, synthetic construct
  misc_feature 1..80: note = Synthetic: >Delta-cand-10150-10229
  source 1..80: mol_type = other DNA
aaactaatatgtcctacattatgggactctcgcaaacagctcgagtccctgtagaacgtatcctcaataccattatacag

SEQ ID NO: 144 - DNA, 80 bp, synthetic construct
  misc_feature 1..80: note = Synthetic: >Delta-cand-10230-10309
  source 1..80: mol_type = other DNA
ctaaccaccaatagagatggtgcttgtattatgggatcttatgatttcgagtgcgattggacgccagagatggtatacaa

SEQ ID NO: 145 - DNA, 80 bp, synthetic construct
  misc_feature 1..80: note = Synthetic: >HKU10-cand-1310-1389
  source 1..80: mol_type = other DNA
atctatcatactgatgatgtttgcagtccgactaatatgtctaaaacatctcatgcttttaaattatgctacttcacagg

SEQ ID NO: 146 - DNA, 80 bp, synthetic construct
  misc_feature 1..80: note = Synthetic: >HKU10-cand-1390-1469
  source 1..80: mol_type = other DNA
ttcttacacagatgaagtaaaatctgctatactccatggtgagttcgatgtttgcacaaacatctgtgatgtttcagacc

SEQ ID NO: 147 - DNA, 80 bp, synthetic construct
  misc_feature 1..80: note = Synthetic: >HKU10-cand-1470-1549
  source 1..80: mol_type = other DNA
attcaattcacaagccttggtttgtgcgtgagatggaagaacttcttggaggagcatgggacaactttgttaaggctgtt

SEQ ID NO: 148 - DNA, 80 bp, synthetic construct
  misc_feature 1..80: note = Synthetic: >HKU10-cand-1550-1629
  source 1..80: mol_type = other DNA
aagtccttatctgtcttgaacagtcaactgttcgaccttatgagtggtcttgctaaggctactattagggttgtaaatgg

SEQ ID NO: 149 - DNA, 80 bp, synthetic construct
  misc_feature 1..80: note = Synthetic: >HKU10-cand-1630-1709
  source 1..80: mol_type = other DNA
ctgcattgagttttgtgccaatattcctacatgctttaacgatgcttttgagtgtcttaagagctttgtggaaacacttt

SEQ ID NO: 150 - DNA, 80 bp, synthetic construct
  misc_feature 1..80: note = Synthetic: >HKU10-cand-1710-1789
  source 1..80: mol_type = other DNA
ttgaccttacagttaacactgtaacatttgctggtcagtcctttaaggctgtcggtgattatgttcttcttaacaatgcc

SEQ ID NO: 151 - DNA, 80 bp, synthetic construct
  misc_feature 1..80: note = Synthetic: >HKU10-cand-1790-1869
  source 1..80: mol_type = other DNA
attgttaagtttgtatctgtaaaggttaaaggtttacatcaggatggcattaagagtactatgtatgccactacagttgt

SEQ ID NO: 152 - DNA, 80 bp, synthetic construct
  misc_feature 1..80: note = Synthetic: >HKU10-cand-1870-1949
  source 1..80: mol_type = other DNA
tggtaaaacagctaaagttaagtcccgtagaattgaaacgtgcaatgctaatctgagtgttgtacctgaccaagaaccac

SEQ ID NO: 153 - DNA, 80 bp, synthetic construct
  misc_feature 1..80: note = Synthetic: >HKU10-cand-1950-2029
  source 1..80: mol_type = other DNA
ttgttaaagacggtgttaccaagattattggtggacgttcgttcttttgtagtggaggttgttatcgcttgatgagtgat

SEQ ID NO: 154 - DNA, 80 bp, synthetic construct
  misc_feature 1..80: note = Synthetic: >HKU10-cand-2030-2109
  source 1..80: mol_type = other DNA
gtggatactgttattatgtcacctgtttaccaagctgctgcacccactaaagttgtgtttaactgtgttaaacctgatgg

SEQ ID NO: 155 - DNA, 80 bp, synthetic construct
  misc_feature 1..80: note = Synthetic: >HKU10-cand-2110-2189
  source 1..80: mol_type = other DNA
ttttgtggatcctgtgtgtaacactcttcctgaacttgtcagtgatgtgactaaacaattattgcccttgaacaaacctt

SEQ ID NO: 156 - DNA, 80 bp, synthetic construct
  misc_feature 1..80: note = Synthetic: >HKU10-cand-2190-2269
  source 1..80: mol_type = other DNA
accgtttctacgacgttaaggttaaagatgacatgtgtattgttacacaagagaccacatttagagcaccatcttatatt

SEQ ID NO: 157 - DNA, 80 bp, synthetic construct
  misc_feature 1..80: note = Synthetic: >HKU10-cand-2270-2349
  source 1..80: mol_type = other DNA
gcagacacagagctgtttgtgcagctttgtgaagagtgcgttgatgttcaaggttttgatgatttctatgtaaaggcaca

SEQ ID NO: 158 - DNA, 80 bp, synthetic construct
  misc_feature 1..80: note = Synthetic: >HKU10-cand-2350-2429
  source 1..80: mol_type = other DNA
tgaagctaccagtttgagccaatttgaacctgtgtttcctgcttttttcacgtttaagactgttgcacaacagtttgtaa

SEQ ID NO: 159 - DNA, 80 bp, synthetic construct
  misc_feature 1..80: note = Synthetic: >HKU10-cand-2430-2509
  source 1..80: mol_type = other DNA
aaagtgttgattgcccccaaatattgaaggatattgatggtggtggcatttggaagacatttattcagactgtttctgat

SEQ ID NO: 160 - DNA, 80 bp, synthetic construct
  misc_feature 1..80: note = Synthetic: >HKU10-cand-2510-2589
  source 1..80: mol_type = other DNA
gctgttgagtttgtaaaatctattaaggtagattttggactagatggtattattattacagccacaaaaaggttcaagaa

SEQ ID NO: 161 - DNA, 80 bp, synthetic construct
  misc_feature 1..80: note = Synthetic: >HKU10-cand-7690-7769
  source 1..80: mol_type = other DNA
gcaatgcacatcgttacaacacattgttgtctgatttgtcatacaacaattttgttacatcttatgccaaaccagaagaa

SEQ ID NO: 162 - DNA, 80 bp, synthetic construct
  misc_feature 1..80: note = Synthetic: >HKU10-cand-7770-7849
  source 1..80: mol_type = other DNA
aaactttcaacccatgatcttgctgcttgcatgcgtggtggcgctaaggttgttaatcataatattttagtaaaggagaa

SEQ ID NO: 163 - DNA, 80 bp, synthetic construct
  misc_feature 1..80: note = Synthetic: >HKU10-cand-7850-7929
  source 1..80: mol_type = other DNA
tgtacccattgtttggtatgctaaagatttcaacatgttgtctgaagaaggacgtagatatgttgttaaaactgccaaac

SEQ ID NO: 164 - DNA, 80 bp, synthetic construct
  misc_feature 1..80: note = Synthetic: >HKU10-cand-7930-8009
  source 1..80: mol_type = other DNA
ttaaaggtgtaaactttctacttacatttaatgacaaccgtatgcaaactcaaatacctgtggttagtgtcacaacaaag

SEQ ID NO: 165 - DNA, 80 bp, synthetic construct
  misc_feature 1..80: note = Synthetic: >HKU10-cand-8010-8089
  source 1..80: mol_type = other DNA
tgcgggtctggcattagacgatgttataattacatctggtggatctgtgcttttattttgtgtgtgtttttagctacagg

SEQ ID NO: 166 - DNA, 80 bp, synthetic construct
  misc_feature 1..80: note = Synthetic: >HKU10-cand-8090-8169
  source 1..80: mol_type = other DNA
atttgttgattatacctctatggttgtaagcgctagtgactatgattttaggtacattgaaggtggtaagctgaaagttt

SEQ ID NO: 167 - DNA, 80 bp, synthetic construct
  misc_feature 1..80: note = Synthetic: >HKU10-cand-8170-8249
  source 1..80: mol_type = other DNA
ttgaaacacctttgaaatgtgtacataacacatttgctaattttgacaattggtacaactcaaagtttggttttactcct

SEQ ID NO: 168 - DNA, 80 bp, synthetic construct
  misc_feature 1..80: note = Synthetic: >HKU10-cand-8250-8329
  source 1..80: mol_type = other DNA
agtaaagacaaacgttgtccgattgttgttggtgtttctaacgaggctagaactatccctggtgtgccgtcgggtgtttt

SEQ ID NO: 169 - DNA, 80 bp, synthetic construct
  misc_feature 1..80: note = Synthetic: >HKU10-cand-8330-8409
  source 1..80: mol_type = other DNA
tctttttggtaagacacttgtctttgcgcttcaaacagtttttggaggttcacacacatgctatgacatgactggaccag

SEQ ID NO: 170 - DNA, 80 bp, synthetic construct
  misc_feature 1..80: note = Synthetic: >HKU10-cand-8410-8489
  source 1..80: mol_type = other DNA
ctcctttggaccgctgtatattcgactctgcctgtaccacacttaatggtttgggcggtgagcgtgtatattgttacaaa

SEQ ID NO: 171 - DNA, 80 bp, synthetic construct
  misc_feature 1..80: note = Synthetic: >HKU10-cand-8490-8569
  source 1..80: mol_type = other DNA
aacggtcttgttgaaggttctcttctttacacagacttgcaacctaatagttattatagtctcccagttggtggttatgt

SEQ ID NO: 172 - DNA, 80 bp, synthetic construct
  misc_feature 1..80: note = Synthetic: >HKU10-cand-8570-8649
  source 1..80: mol_type = other DNA
tagactaccagaggttataactagtggtttaggttttaggactgtacgtacacaacaaactacttattgtagaatgggag

SEQ ID NO: 173 - DNA, 80 bp, synthetic construct
  misc_feature 1..80: note = Synthetic: >HKU10-cand-8650-8729
  source 1..80: mol_type = other DNA
aatgtgttgactcgaaggctggtatttgttttggcgctaataggtttcttgtttatagtgctgaatcaggtacagacttt

SEQ ID NO: 174 - DNA, 80 bp, synthetic construct
  misc_feature 1..80: note = Synthetic: >HKU10-cand-8730-8809
  source 1..80: mol_type = other DNA
gtttgtggtacaggtctcttgtctttgttgcttaatgtgtttaatatgttctcatcttcattttctgttttggctatgtc

SEQ ID NO: 175 - DNA, 80 bp, synthetic construct
  misc_feature 1..80: note = Synthetic: >HKU10-cand-8800-8879
  source 1..80: mol_type = other DNA
tggctatgtctggtcaaattgtctttaactgtgttcttacatgtgttgtaattatggcctgtttgcttgtcacaaaactt

SEQ ID NO: 176 - DNA, 80 bp, synthetic construct
  misc_feature 1..80: note = Synthetic: >HKU10-cand-8880-8959
  source 1..80: mol_type = other DNA
aagcgtatgtttggtgacctgtcattgggtgtttgtactgttgtttgtgtggctattgtgaacaatttgtcatatattat

SEQ ID NO: 177 - DNA, 80 bp, synthetic construct
  misc_feature 1..80: note = Synthetic: >HKU10-cand-11520-11599
  source 1..80: mol_type = other DNA
gctaatgattctgctcctcagttggttaaacaattgaagacagctatgaacatagcaaaatctgagtttgatagggaagt

SEQ ID NO: 178 - DNA, 80 bp, synthetic construct
  misc_feature 1..80: note = Synthetic: >HKU10-cand-11600-11679
  source 1..80: mol_type = other DNA
ttctgtgcaaaagaaaatttcgcgtatggctgaacaagctgcagcgcaaatgtacaaagaggctagagctgttaacagaa

SEQ ID NO: 179 - DNA, 80 bp, synthetic construct
  misc_feature 1..80: note = Synthetic: >HKU10-cand-11680-11759
  source 1..80: mol_type = other DNA
agtctaaggttattggtgctatgcattcattgcttatgggcatgcttcgtaagttggacatgtctaatgttgacaccata

SEQ ID NO: 180 - DNA, 80 bp, synthetic construct
  misc_feature 1..80: note = Synthetic: >HKU10-cand-11760-11839
  source 1..80: mol_type = other DNA
cttaatttagcaaaagatggtgttgtacctctctctattataccagcagcttgttccacaaagttgaacgttgttagtgc

SEQ ID NO: 181 - DNA, 80 bp, synthetic construct
  misc_feature 1..80: note = Synthetic: >HKU10-cand-11840-11919
  source 1..80: mol_type = other DNA
tgatttagattcttattataagatttgcagagatggttgtgtgcactatgccggtgttatctggaatgttatagacattc

SEQ ID NO: 182 - DNA, 80 bp, synthetic construct
  misc_feature 1..80: note = Synthetic: >HKU10-cand-11920-11999
  source 1..80: mol_type = other DNA
gtgataatgatggtaaaattgtacatgctaaagaaattgcacctgaaaatgttgaaaacattgcttggcccatttttctt

SEQ ID NO: 183 - DNA, 80 bp, synthetic construct
  misc_feature 1..80: note = Synthetic: >HKU10-cand-12000-12079
  source 1..80: mol_type = other DNA
aactgtgaacgcattgttaagttgcagaataatgaaataatgcccggtaagcttaaacagcgtcctgttaaagctgaggg

SEQ ID NO: 184 - DNA, 80 bp, synthetic construct
  misc_feature 1..80: note = Synthetic: >HKU10-cand-12080-12159
  source 1..80: mol_type = other DNA
tgatggtatttctgctgatggtatggctttgttcaacaatgagtctggtaaaacgtttatgtatgcgtttattgcagata

SEQ ID NO: 185 - DNA, 80 bp, synthetic construct
  misc_feature 1..80: note = Synthetic: >HKU10-cand-12160-12239
  source 1..80: mol_type = other DNA
aacctgatcttaaatttgttaaatgggagaggtcatttgacaatggatgtagtgttatagaacttgaaccaccgtgtcgt

SEQ ID NO: 186 - DNA, 80 bp, synthetic construct
  misc_feature 1..80: note = Synthetic: >HKU10-cand-12240-12319
  source 1..80: mol_type = other DNA
tttgcagtgcaaacacctactggtaccactattaagtatttgtattttgtgcgcaatttgaatacattgcgtcgtggtgc

SEQ ID NO: 187 - DNA, 80 bp, synthetic construct
  misc_feature 1..80: note = Synthetic: >HKU10-cand-12320-12399
  source 1..80: mol_type = other DNA
tgttttaggttttattggtgcaactgttcgacttcaagctggtaaacaaactgaacttgccgttaattccccattgctta

SEQ ID NO: 188 - DNA, 80 bp, synthetic construct
  misc_feature 1..80: note = Synthetic: >HKU10-cand-12400-12479
  source 1..80: mol_type = other DNA
ctatgtgtgcctttgcagttgaccctgctaagacttacttggatgctgtcaaaagaggtgctaaacctgttggtaattgc

SEQ ID NO: 189 - DNA, 80 bp, synthetic construct
  misc_feature 1..80: note = Synthetic: >HKU10-cand-12480-12559
  source 1..80: mol_type = other DNA
attaaaatgcttgccaatggttctggcactggacaggctgtaactacgggtgttgaggctaacactaatcaagatagtta

SEQ ID NO: 190 - DNA, 80 bp, synthetic construct
  misc_feature 1..80: note = Synthetic: >HKU10-cand-12560-12639
  source 1..80: mol_type = other DNA
tggtggtgcgtctgtgtgtttgtattgtagagcacatgttgaacaccctagtatggatggttattgtaaactgaaaggtc

SEQ ID NO: 191 - DNA, 80 bp, synthetic construct
  misc_feature 1..80: note = Synthetic: >HKU10-cand-12640-12719
  source 1..80: mol_type = other DNA
gttatgtacaggtgcctatgggaacaatagatcctataagatttgtactagaaaatgaggcctgtaaagtttgccagtgc

SEQ ID NO: 192 - DNA, 80 bp, synthetic construct
  misc_feature 1..80: note = Synthetic: >HKU10-cand-12720-12799
  source 1..80: mol_type = other DNA
tggttaaataatggttgtgcttgtgacagagtttctacatctatgcaagcttttgacaatggttatttaaacgagcaagg

SEQ ID NO: 193 - DNA, 80 bp, synthetic construct
  misc_feature 1..80: note = Synthetic: >HKU14-cand-6880-6959
  source 1..80: mol_type = other DNA
acaccacagagattgcttcaaagcttacgtgtaagcttgtcgctttggctgttaaaaatgctttattgacatttaaatgg

SEQ ID NO: 194 - DNA, 80 bp, synthetic construct
  misc_feature 1..80: note = Synthetic: >HKU14-cand-6960-7039
  source 1..80: mol_type = other DNA
agtatggttgtacgaggattttttcttattgccaccatatttttgttatggtttaattttatatatgccaatgtaatatt

SEQ ID NO: 195 - DNA, 80 bp, synthetic construct
  misc_feature 1..80: note = Synthetic: >HKU14-cand-7040-7119
  source 1..80: mol_type = other DNA
tagtgatttttatttgcctaaaattggttttctgccaacattcgttggtagtgttgtgcagtggcttaagactacatttg

SEQ ID NO: 196 - DNA, 80 bp, synthetic construct
  misc_feature 1..80: note = Synthetic: >HKU14-cand-7120-7199
  source 1..80: mol_type = other DNA
ggttttataccttgtgtgatttttatgacactgctagtataggctttaaaaatcagtattgtaatggaagtcttgcttgc

SEQ ID NO: 197 - DNA, 80 bp, synthetic construct
  misc_feature 1..80: note = Synthetic: >HKU14-cand-7200-7279
  source 1..80: mol_type = other DNA
cagctttgtgtttctggttttgatatgcttgataattataaggctatagacgttgttcagtacgaggctgatcgacgttc

SEQ ID NO: 198 - DNA, 80 bp, synthetic construct
  misc_feature 1..80: note = Synthetic: >HKU14-cand-7280-7359
  source 1..80: mol_type = other DNA
tgtagttgattatacaggcatgattaagttgattattgagttggttgttagttatgccttgtatactgtttggttttacc

SEQ ID NO: 199 - DNA, 80 bp, synthetic construct
  misc_feature 1..80: note = Synthetic: >HKU14-cand-7360-7439
  source 1..80: mol_type = other DNA
cattgtttggtcttatctgcttgcagatgttgacgacatggttgcctgaattttttatggttagttcattgcattggttt

SEQ ID NO: 200 - DNA, 80 bp, synthetic construct
  misc_feature 1..80: note = Synthetic: >HKU14-cand-7440-7519
  source 1..80: mol_type = other DNA
ttgagaatacttgtttctgttgccaatttgttgccagcacatgtgtttttgaggttttacattactgtgacctttatttt

SEQ ID NO: 201 - DNA, 80 bp, synthetic construct
  misc_feature 1..80: note = Synthetic: >HKU14-cand-7520-7599
  source 1..80: mol_type = other DNA
taaaatatttagtctttttagacatgtaatacatgggtgtaataaagctggttgcttgttttgctataagagaaaccgta

SEQ ID NO: 202 - DNA, 80 bp, synthetic construct
  misc_feature 1..80: note = Synthetic: >HKU14-cand-7600-7679
  source 1..80: mol_type = other DNA
gtgttcgcgtcaaatgcagtacggttgtaggtggcatgatacgctattacgatgtgatggctaatggtggtaccggtttt

SEQ ID NO: 203 - DNA, 80 bp, synthetic construct
  misc_feature 1..80: note = Synthetic: >HKU14-cand-7680-7759
  source 1..80: mol_type = other DNA
tgtagcaaacaccaatggaattgcattaattgtgattcctataaaccaggtaatacattcattactgttgaagctgccgc

SEQ ID NO: 204 - DNA, 80 bp, synthetic construct
  misc_feature 1..80: note = Synthetic: >HKU14-cand-7760-7839
  source 1..80: mol_type = other DNA
agagctttctaaggaattgcgacggcctgttgtacccactgatgttgcttaccatactgttacagatgttaagcaggttg

SEQ ID NO: 205 - DNA, 80 bp, synthetic construct
  misc_feature 1..80: note = Synthetic: >HKU14-cand-7840-7919
  source 1..80: mol_type = other DNA
gttgttctatgcgtttgttctacgatagggatggacaacgtgtttatgatgatgttaatgctagtttgtttgtggattat

SEQ ID NO: 206 - DNA, 80 bp, synthetic construct
  misc_feature 1..80: note = Synthetic: >HKU14-cand-7920-7999
  source 1..80: mol_type = other DNA
aacaatctgctgcattctaaagttaagagtgtgcctaatttgcatgttgtagtggttgagaatgatgctgataaagccaa

SEQ ID NO: 207 - DNA, 80 bp, synthetic construct
  misc_feature 1..80: note = Synthetic: >HKU14-cand-8000-8079
  source 1..80: mol_type = other DNA
ctttctcaatgccgctgtattttatgcacaatctctttttaggcctgtgctgatggtggataagagtttaattaccactg

SEQ ID NO: 208 - DNA, 80 bp, synthetic construct
  misc_feature 1..80: note = Synthetic: >HKU14-cand-8080-8159
  source 1..80: mol_type = other DNA
caaacacgggtacttctgtttctcagactatgttcgatgtctatgttgacacattgttgtcgatgtttgacgttgataga

SEQ ID NO: 209 - DNA, 80 bp, synthetic construct
  misc_feature 1..80: note = Synthetic: >HKU25-cand-2580-2659
  source 1..80: mol_type = other DNA
ctactaaccactctacaactgtggatgcgaaagtccaaaacaaatcagttgaagtagttgttggccagcttgaagaaact

SEQ ID NO: 210 - DNA, 80 bp, synthetic construct
  misc_feature 1..80: note = Synthetic: >HKU25-cand-2660-2739
  source 1..80: mol_type = other DNA
aatatgcatagtccagacctcgtagtaggagactatgtcgtcattagtgataagctgttcgtgcgttgtgtagaggatgg

SEQ ID NO: 211 - DNA, 80 bp, synthetic construct
  misc_feature 1..80: note = Synthetic: >HKU25-cand-2740-2819
  source 1..80: mol_type = other DNA
acagactgtcttctaccccatgtgcactaatggcaatgttgtacctaccttattcagacttaagggtggtgctccaacta

SEQ ID NO: 212 - DNA, 80 bp, synthetic construct
  misc_feature 1..80: note = Synthetic: >HKU25-cand-2820-2899
  source 1..80: mol_type = other DNA
agaaagttacctttggcgatgaggaagtacatgaggtagccgcagtcagaagtgtgacagtcgagtacaacattcatgct

SEQ ID NO: 213 - DNA, 80 bp, synthetic construct
  misc_feature 1..80: note = Synthetic: >HKU25-cand-2900-2979
  source 1..80: mol_type = other DNA
gtattagacacactcctttcaaactctaacctaagagtcttctctgtagacaaaacactcacagtcgaagagttcatcga

SEQ ID NO: 214 - DNA, 80 bp, synthetic construct
  misc_feature 1..80: note = Synthetic: >HKU25-cand-2980-3059
  source 1..80: mol_type = other DNA
tgtcgttaaagatgaagtttgcgaattgctcggcaagcttctcaacggcatcgaaattgatgacttcgacttggacagtt

SEQ ID NO: 215 - DNA, 80 bp, synthetic construct
  misc_feature 1..80: note = Synthetic: >HKU25-cand-3060-3139
  source 1..80: mol_type = other DNA
ttattgataacccctgttactgtttcaaccatgatggtgacagtcagtggagttccacaatgatcttttccacacaccct

SEQ ID NO: 216 - DNA, 80 bp, synthetic construct
  misc_feature 1..80: note = Synthetic: >HKU25-cand-3140-3219
  source 1..80: mol_type = other DNA
gttgagtgtgatgaagaagactatgaagaaccagaagaagcagatgatgagccagaagaagctcccaactgcttaggaca

SEQ ID NO: 217 - DNA, 80 bp, synthetic construct
  misc_feature 1..80: note = Synthetic: >HKU25-cand-3220-3299
  source 1..80: mol_type = other DNA
agaatttgaagaaagccatgacgatgaagcatggtccactcttgttgatgaagccttccctatggaagatgaagatgaat

SEQ ID NO: 218 - DNA, 80 bp, synthetic construct
  misc_feature 1..80: note = Synthetic: >HKU25-cand-3300-3379
  source 1..80: mol_type = other DNA
cttcacctctagaggaagagcccaaacaattagaactctgcacagctgtacagagtcaacttacagttgaggtgtttgag

SEQ ID NO: 219 - DNA, 80 bp, synthetic construct
  misc_feature 1..80: note = Synthetic: >HKU25-cand-3380-3459
  source 1..80: mol_type = other DNA
gcacaaaccttcgaaaccccacctgtctcctattgtaatgcagtccctgtagaaatgcacactgcaaaggttatagtaca

SEQ ID NO: 220 - DNA, 80 bp, synthetic construct
  misc_feature 1..80: note = Synthetic: >HKU25-cand-3460-3539
  source 1..80: mol_type = other DNA
ggatgtaaaaattgcaacccctctagaacaaaaggacaaaccacagacttcagtagagtctcaactcttacctgaagatg

SEQ ID NO: 221 - DNA, 80 bp, synthetic construct
  misc_feature 1..80: note = Synthetic: >HKU25-cand-3540-3619
  source 1..80: mol_type = other DNA
tttctcctgcaccaaaaacggatgagctaccagctgtggatgttggtacatctgtgcacgactccaaacctggactctgt

SEQ ID NO: 222 - DNA, 80 bp, synthetic construct
  misc_feature 1..80: note = Synthetic: >HKU25-cand-3620-3699
  source 1..80: mol_type = other DNA
gcagttgatcggtgtgaagcagcagctgtggacgttggtgcagctgtacacgaatccaaacaaggaatcagtgcagttga

SEQ ID NO: 223 - DNA, 80 bp, synthetic construct
  misc_feature 1..80: note = Synthetic: >HKU25-cand-3700-3779
  source 1..80: mol_type = other DNA
tcggtgtgaagcagcagctgtggacgttggtgcagctgtaaacagacccaaacatggactcggcccagttgaccgatgtg

SEQ ID NO: 224 - DNA, 80 bp, synthetic construct
  misc_feature 1..80: note = Synthetic: >HKU25-cand-3780-3859
  source 1..80: mol_type = other DNA
aagcagaaaacgctcaaaccgttaacgctcagtctcctaagtctgaagtaacttatgaggctgatgctgaaaatgaccag

SEQ ID NO: 225 - DNA, 80 bp, synthetic construct
  misc_feature 1..80: note = Synthetic: >HKU25-cand-25600-25679
  source 1..80: mol_type = other DNA
aaacgaggtagtcaagcaacttaaccaatcttacatagatttgaaggagcttggaaattattcctactaccagaaatggc

SEQ ID NO: 226 - DNA, 80 bp, synthetic construct
  misc_feature 1..80: note = Synthetic: >HKU25-cand-25680-25759
  source 1..80: mol_type = other DNA
cttggtacatctggttaggtttcattgcaggacttgttgctttagccctgtgtgtattcttcttactatgctgtactggt

SEQ ID NO: 227 - DNA, 80 bp, synthetic construct
  misc_feature 1..80: note = Synthetic: >HKU25-cand-25760-25839
  source 1..80: mol_type = other DNA
tgtggtacgaattgcatgggtaagttaaaatgtaatcgttgttgtgacaagtatgaggagtacgaaatcgagcctcacaa

SEQ ID NO: 228 - DNA, 80 bp, synthetic construct
  misc_feature 1..80: note = Synthetic: >HKU25-cand-25840-25919
  source 1..80: mol_type = other DNA
aatacatgtccattaacgaacctagttatgagagtgcaaagaccaccaaccttgctgttgttagtcgcactgtcactctt

SEQ ID NO: 229 - DNA, 80 bp, synthetic construct
  misc_feature 1..80: note = Synthetic: >HKU25-cand-25920-25999
  source 1..80: mol_type = other DNA
tgctaatgcattttctagacccactgtttcttacatacctgagcattgccagtcctacactggcagtatgctcaaggctt

SEQ ID NO: 230 - DNA, 80 bp, synthetic construct
  misc_feature 1..80: note = Synthetic: >HKU25-cand-26000-26079
  source 1..80: mol_type = other DNA
gtattgcccagactagatttgagactactggtatgtataccaatggagtcatatctgtgtctgttgctactggggcttac

SEQ ID NO: 231 - DNA, 80 bp, synthetic construct
  misc_feature 1..80: note = Synthetic: >HKU25-cand-26080-26159
  source 1..80: mol_type = other DNA
gagcttactattgaccgtgactcccagactagtcatgatagtttttatgaccagtctactgccacgactcttgtgaatgt

SEQ ID NO: 232 - DNA, 80 bp, synthetic construct
  misc_feature 1..80: note = Synthetic: >HKU25-cand-26160-26239
  source 1..80: mol_type = other DNA
tgaccctacccaggattaacgaactttatggattacgtgtcattgctgaaccaagtttggcaacattacactaattccgc

SEQ ID NO: 233 - DNA, 80 bp, synthetic construct
  misc_feature 1..80: note = Synthetic: >HKU25-cand-26240-26319
  source 1..80: mol_type = other DNA
tgttgatactggtgtctacatccctcctccagttgttgcttttctgcctgttcctggcacgtcactccaccctgtgcagt

SEQ ID NO: 234 - DNA, 80 bp, synthetic construct
  misc_feature 1..80: note = Synthetic: >HKU25-cand-26320-26399
  source 1..80: mol_type = other DNA
ggcattgtcaaatcatctttgacggcattattgaacaggctgtgaatagctctaaagcattagcaaagcaagatgcagca

SEQ ID NO: 235 - DNA, 80 bp, synthetic construct
  misc_feature 1..80: note = Synthetic: >HKU25-cand-26400-26479
  source 1..80: mol_type = other DNA
agacaaattgcctggagactgcacaagcagggcaaattgtcaggcatcaataagtacgcactcagatggcgtttcacgta

SEQ ID NO: 236 - DNA, 80 bp, synthetic construct
  misc_feature 1..80: note = Synthetic: >HKU25-cand-26480-26559
  source 1..80: mol_type = other DNA
aacgcccagcgtctccctactctatgttgaacctgcgttatgttaagcgccggttttcacctctcaaactcgaagatata

SEQ ID NO: 237 - DNA, 80 bp, synthetic construct
  misc_feature 1..80: note = Synthetic: >HKU25-cand-26550-26629
  source 1..80: mol_type = other DNA
cgaagatataatggaagttgacccacctcagcctacccattacgttcgacttgtctttgacccacttaccagctggcaaa

SEQ ID NO: 238 - DNA, 80 bp, synthetic construct
  misc_feature 1..80: note = Synthetic: >HKU25-cand-26630-26709
  source 1..80: mol_type = other DNA
ttgttcgtggacattctcttgatgttattcagaactggttaacaccctttggtgccaaacctgtcactgaataccacatt

SEQ ID NO: 239 - DNA, 80 bp, synthetic construct
  misc_feature 1..80: note = Synthetic: >HKU25-cand-26710-26789
  source 1..80: mol_type = other DNA
acacttgctctattgtgttgtcaaccaacagagcaattccatgatctctcaccactaacccatctgcttgcaggtgtcaa

SEQ ID NO: 240 - DNA, 80 bp, synthetic construct
  misc_feature 1..80: note = Synthetic: >HKU25-cand-26790-26869
  source 1..80: mol_type = other DNA
atttgtgctgagtgattttaatgtcttgggaagaaccttggttcttaatgctcatgagttacaggatggaagcaatttcg

SEQ ID NO: 241 - DNA, 80 bp, synthetic construct
  misc_feature 1..80: note = Synthetic: >HKU5-cand-29300-29379
  source 1..80: mol_type = other DNA
ctccttcggtttttgggacacgcaaccctgcaaacgatccagctatcgtcacgcagtttgctcctggtactacgctacct

SEQ ID NO: 242 - DNA, 80 bp, synthetic construct
  misc_feature 1..80: note = Synthetic: >HKU5-cand-29380-29459
  source 1..80: mol_type = other DNA
aaaaacttccacatcgaaggcactggtggcaatagccaatcatcttcgagagcctccagcagaagctcatctagatctag

SEQ ID NO: 243 - DNA, 80 bp, synthetic construct
  misc_feature 1..80: note = Synthetic: >HKU5-cand-29460-29539
  source 1..80: mol_type = other DNA
ttcaagaaacggaagaagcaacaacaactcacgcaacgcctccccagctccacatggagtcggagatgtagtgggtgctg

SEQ ID NO: 244 - DNA, 80 bp, synthetic construct
  misc_feature 1..80: note = Synthetic: >HKU5-cand-29540-29619
  source 1..80: mol_type = other DNA
gaactctttcagttcttttggacttacagaagaggcttgccgatttggaagctggtaagggtaataagcaacctaaagtc

SEQ ID NO: 245 - DNA, 80 bp, synthetic construct
  misc_feature 1..80: note = Synthetic: >HKU5-cand-29620-29699
  source 1..80: mol_type = other DNA
atcactaaaaaggatgcacaggctgccaaacaaaagatgcgccacaagcgtgtcgccaccaaaggatacaatgtagtcca

SEQ ID NO: 246 - DNA, 80 bp, synthetic construct
  misc_feature 1..80: note = Synthetic: >HKU5-cand-29700-29779
  source 1..80: mol_type = other DNA
ggctttcggaatgagaggccctggtccactgcagagtaactttggtgacatgcaatacaacaagcttggcacagaagacc

SEQ ID NO: 247 - DNA, 80 bp, synthetic construct
  misc_feature 1..80: note = Synthetic: >HKU5-cand-29780-29859
  source 1..80: mol_type = other DNA
ctcgttggcctcaaattgctgaacttgccccctcagcatctgctttcatgagtacctctcaattcaaggttactcaccag

SEQ ID NO: 248 - DNA, 80 bp, synthetic construct
  misc_feature 1..80: note = Synthetic: >HKU5-cand-29860-29939
  source 1..80: mol_type = other DNA
agcaatgatgaaaatggtgaaccggtgtacttcctaagttactcgggcgccataaaattagacccaaagaatcccaacta

SEQ ID NO: 249 - DNA, 80 bp, synthetic construct
  misc_feature 1..80: note = Synthetic: >HKU5-cand-29940-30019
  source 1..80: mol_type = other DNA
caacaagtggatggagattcttgacgcaaatattgatgcttacaaatccttccccaaaaaggagcgaaagcaaaaaccaa

SEQ ID NO: 250 - DNA, 80 bp, synthetic construct
  misc_feature 1..80: note = Synthetic: >HKU5-cand-30020-30099
  source 1..80: mol_type = other DNA
gtggtgatgatgctgctacagcacctgccacatctcagatggaagatgtccccgaactgccccctaagcaacagcgcaag

SEQ ID NO: 251 - DNA, 80 bp, synthetic construct
  misc_feature 1..80: note = Synthetic: >HKU5-cand-30100-30179
  source 1..80: mol_type = other DNA
aaacgcgttgttcaaggcagtatcacccaacgttcagcaggcgtgcctagctttgaggacgttgtggatgccattttccc

SEQ ID NO: 252 - DNA, 80 bp, synthetic construct
  misc_feature 1..80: note = Synthetic: >HKU5-cand-30180-30259
  source 1..80: mol_type = other DNA
cgattcagaggcataaattgccaattgaacgtaacaagagtcgaggcgatcgctagtgttctggaaaccccattacatga

SEQ ID NO: 253 - DNA, 80 bp, synthetic construct
  misc_feature 1..80: note = Synthetic: >HKU5-cand-30260-30339
  source 1..80: mol_type = other DNA
tgcaattgtccactcttgcacagaatggaatcatgttttacttacagtgcaagaaggtaagtgaacccatttaattgata

SEQ ID NO: 254 - DNA, 80 bp, synthetic construct
  misc_feature 1..80: note = Synthetic: >HKU5-cand-30340-30419
  source 1..80: mol_type = other DNA
gctgtcattttagtaaagtgtatagctatagagagaagtttaaagactgtcacctctgcgagattgcaagtgaacagtgc

SEQ ID NO: 255 - DNA, 80 bp, synthetic construct
  misc_feature 1..80: note = Synthetic: >HKU5-cand-30420-30499
  source 1..80: mol_type = other DNA
cccctgggaagagctctatagtgtgaaatgtaaataaaaacagctattattcaattagattaggctttttagatgatttg

SEQ ID NO: 256 - DNA, 80 bp, synthetic construct
  misc_feature 1..80: note = Synthetic: >HKU8-cand-0-79
  source 1..80: mol_type = other DNA
cttaaagatataatccatctacagataggttgtactctttctagactgttgtctaatcccctcaactaaacgaaattttt

SEQ ID NO: 257 - DNA, 80 bp, synthetic construct
  misc_feature 1..80: note = Synthetic: >HKU8-cand-18000-18079
  source 1..80: mol_type = other DNA
tgtacctatgagagcgttatttcatttatgggttttagatttgacctcaacattcctggttatcacacgttgttttgcac

SEQ ID NO: 258 - DNA, 80 bp, synthetic construct
  misc_feature 1..80: note = Synthetic: >HKU8-cand-18080-18159
  source 1..80: mol_type = other DNA
gcgtgattttgctatgcgacatgttagaggctggctaggtatggacgtcgaaggtgctcatgtctgtggctctaatgttg

SEQ ID NO: 259 - DNA, 80 bp, synthetic construct
  misc_feature 1..80: note = Synthetic: >HKU8-cand-18160-18239
  source 1..80: mol_type = other DNA
gcactaatgttccactccagatagggttttcaaatggtgtggattttgttgtcaacccagagggctgtgttatgactaat

SEQ ID NO: 260 - DNA, 80 bp, synthetic construct
  misc_feature 1..80: note = Synthetic: >HKU8-cand-18240-18319
  source 1..80: mol_type = other DNA
gtcaatgacgttattgcacctgttaaagcacgtgcaccacctggtgagcagttcgcacatcttatacctctaatgcgtaa

SEQ ID NO: 261 - DNA, 80 bp, synthetic construct
  misc_feature 1..80: note = Synthetic: >HKU8-cand-18320-18399
  source 1..80: mol_type = other DNA
aggacagccttggactgtcattcgtaagcgcatagtacagatgtgttgtgattatgtcagtccttcatctgacattctca

SEQ ID NO: 262 - DNA, 80 bp, synthetic construct
  misc_feature 1..80: note = Synthetic: >HKU8-cand-18400-18479
  source 1..80: mol_type = other DNA
tttttgtgctctgggctggtggtcttgaacttactacaatgcgctattttgttaaggttggacctcgctgtgattgtcac

SEQ ID NO: 263 - DNA, 80 bp, synthetic construct
  misc_feature 1..80: note = Synthetic: >HKU8-cand-18480-18559
  source 1..80: mol_type = other DNA
tgcggtaaggttgctacatgttataatagtgttgaacatgccttttactgttttaggcatgctctgggttgtgattatct

SEQ ID NO: 264 - DNA, 80 bp, synthetic construct
  misc_feature 1..80: note = Synthetic: >HKU8-cand-18560-18639
  source 1..80: mol_type = other DNA
ttacaacccttatgtcatagatatacagcagtggggttatacaggttccttgagttccaatcaccatgagcattgtaatg

SEQ ID NO: 265 - DNA, 80 bp, synthetic construct
  misc_feature 1..80: note = Synthetic: >HKU8-cand-18640-18719
  source 1..80: mol_type = other DNA
ttcatcgtaatgaacatgttgcttctggtgatgctataatgacccgttgtttggctatttatgattgctttgttaagaat

SEQ ID NO: 266 - DNA, 80 bp, synthetic construct
  misc_feature 1..80: note = Synthetic: >HKU8-cand-18720-18799
  source 1..80: mol_type = other DNA
gttgattggtctattacctacccttttattggcaatgaagctgccattaatagaagtggtcgtattgtccaatcacatgt

SEQ ID NO: 267 - DNA, 80 bp, synthetic construct
  misc_feature 1..80: note = Synthetic: >HKU8-cand-18800-18879
  source 1..80: mol_type = other DNA
tgtcaaagctgcactaaaagtgtataatccaaaggctatccatgatattggaaatcctaagggtatacgttgtgctgtta

SEQ ID NO: 268 - DNA, 80 bp, synthetic construct
  misc_feature 1..80: note = Synthetic: >HKU8-cand-18880-18959
  source 1..80: mol_type = other DNA
ctgatgctagttggtactgttatgataaaaatcctatcagctctaatgtcaagacattggagtatgattattttgttcat

SEQ ID NO: 269 - DNA, 80 bp, synthetic construct
  misc_feature 1..80: note = Synthetic: >HKU8-cand-18960-19039
  source 1..80: mol_type = other DNA
ggtcaattggatggattgtgcctgttttggaattgtaacgttgatatgtaccctgaattttctgttgtttgtagatttga

SEQ ID NO: 270 - DNA, 80 bp, synthetic construct
  misc_feature 1..80: note = Synthetic: >HKU8-cand-19040-19119
  source 1..80: mol_type = other DNA
tactcgctgtaaatccgccttcaatttggaaggtgttaacggtggttcactctacgtcaacaatcatgcttttcacacac

SEQ ID NO: 271 - DNA, 80 bp, synthetic construct
  misc_feature 1..80: note = Synthetic: >HKU8-cand-19120-19199
  source 1..80: mol_type = other DNA
ctgcatttgataaacgtgcatttgccaaacttaaggcaataccgtttttcttttatgatgatggtgattgtgatagctgt

SEQ ID NO: 272 - DNA, 80 bp, synthetic construct
  misc_feature 1..80: note = Synthetic: >HKU8-cand-19200-19279
  source 1..80: mol_type = other DNA
cagggttctataaattatgtaccactacatgcttccaattgtgttacaaggtgtaatattggcggtgctgtttgtagtaa

SEQ ID NO: 273 - DNA, 80 bp, synthetic construct
  misc_feature 1..80: note = Synthetic: >HKU8-cand-25680-25759
  source 1..80: mol_type = other DNA
tggttgagtctcatgttgtgcctgtggctcatgcaacttcttttgctggttaccttcttactagcctctttgtagtgtat

SEQ ID NO: 274 - DNA, 80 bp, synthetic construct
  misc_feature 1..80: note = Synthetic: >HKU8-cand-25760-25839
  source 1..80: mol_type = other DNA
tttgccttatttaaggctaatacaattaggggcaattatgcatgctttattgcacgcattttgctcattctggtgtattg

SEQ ID NO: 275 - DNA, 80 bp, synthetic construct
  misc_feature 1..80: note = Synthetic: >HKU8-cand-25840-25919
  source 1..80: mol_type = other DNA
tccacttatggcttattgtggcgcttatttggattcatgcattattgttactgcattgcttgttaggttcttttggactg

SEQ ID NO: 276 - DNA, 80 bp, synthetic construct
  misc_feature 1..80: note = Synthetic: >HKU8-cand-25920-25999
  source 1..80: mol_type = other DNA
gttattatgcctgtcgatatagaacttttctatttgtcatcttgaatgacaccaccttggcttttgttaatggaaaggct

SEQ ID NO: 277 - DNA, 80 bp, synthetic construct
  misc_feature 1..80: note = Synthetic: >HKU8-cand-26000-26079
  source 1..80: mol_type = other DNA
tggtattattcatctcagccctagatggttttgcctggtggcgaacattatgttcagcttgggcctcattttataccatt

SEQ ID NO: 278 - DNA, 80 bp, synthetic construct
  misc_feature 1..80: note = Synthetic: >HKU8-cand-26080-26159
  source 1..80: mol_type = other DNA
tgtaggtgccaaagagctttatgttgctgttaggggcatgaatgatgaaaatcttgagcttgttcgctgtgtcgaactta

SEQ ID NO: 279 - DNA, 80 bp, synthetic construct
  misc_feature 1..80: note = Synthetic: >HKU8-cand-26160-26239
  source 1..80: mol_type = other DNA
ttaatggctcgtttttctacatcttcgcaagagaacccgttgttggtgtcgtgaatatgaaattcactgagatattgagt

SEQ ID NO: 280 - DNA, 80 bp, synthetic construct
  misc_feature 1..80: note = Synthetic: >HKU8-cand-26240-26319
  source 1..80: mol_type = other DNA
tcaactctacgaagatgttaacattgattgatgaccacgggttggttgtcaacattttactgtggttaatagtgtgtata

SEQ ID NO: 281 - DNA, 80 bp, synthetic construct
  misc_feature 1..80: note = Synthetic: >HKU8-cand-26320-26399
  source 1..80: mol_type = other DNA
tgcgtcattataatttgcagttctattattcagtttgtgcagctgttgttttcttgtcacagactgtgctctaatactgt

SEQ ID NO: 282 - DNA, 80 bp, synthetic construct
  misc_feature 1..80: note = Synthetic: >HKU8-cand-26400-26479
  source 1..80: mol_type = other DNA
ttataggcctgtttatgatgcatatcgcgcttaccaagattatatgcgaatagatccacttccagttattgatgtctaaa

SEQ ID NO: 283 - DNA, 80 bp, synthetic construct
  misc_feature 1..80: note = Synthetic: >HKU8-cand-26480-26559
  source 1..80: mol_type = other DNA
cgaaaatgattaatttcattattctattttgcgcctttttaggcattattcttgcgtgtgcagcaaatggtaattctaac

SEQ ID NO: 284 - DNA, 80 bp, synthetic construct
  misc_feature 1..80: note = Synthetic: >HKU8-cand-26560-26639
  source 1..80: mol_type = other DNA
actactgctactccaacaacaccaacagctcattcaatacctgttgaggaggttgtggaacatctaagaaactggaattt

SEQ ID NO: 285 - DNA, 80 bp, synthetic construct
  misc_feature 1..80: note = Synthetic: >HKU8-cand-26640-26719
  source 1..80: mol_type = other DNA
cagctggaacgtaatactgacagtctttttaattgtgctgcagtatggcaattttaagtattctaaattgctttatggcc

SEQ ID NO: 286 - DNA, 80 bp, synthetic construct
  misc_feature 1..80: note = Synthetic: >HKU8-cand-26720-26799
  source 1..80: mol_type = other DNA
tgaaaatggttatactctggctgttatggcctcttgtgcttgcactctcaatttttgatgcatgggcgagctttggggtc

SEQ ID NO: 287 - DNA, 80 bp, synthetic construct
  misc_feature 1..80: note = Synthetic: >HKU8-cand-26800-26879
  source 1..80: mol_type = other DNA
aattggaccttgttcgctttcagcatcgttatggcctgcacaacattagtgctgtggataatgtattttatcaacagctt

SEQ ID NO: 288 - DNA, 80 bp, synthetic construct
  misc_feature 1..80: note = Synthetic: >HKU8-cand-26880-26959
  source 1..80: mol_type = other DNA
caggctttatcgaagaactcagtcattctgggcttttaacccagaaactgatgccataattacaatctctgtttttggaa

SEQ ID NO: 289 - DNA, 80 bp, synthetic construct
  misc_feature 1..80: note = Synthetic: >HKU9-cand-2730-2809
  source 1..80: mol_type = other DNA
atgaaaaattgtctgaattgttttctgactgcccagctgaactacgtcctataaatttggaggagtttatggagtcagag

SEQ ID NO: 290 - DNA, 80 bp, synthetic construct
  misc_feature 1..80: note = Synthetic: >HKU9-cand-2810-2889
  source 1..80: mol_type = other DNA
tgctatgtgtacagtaaggattatgagaaagttctcgagtctgaaatgtacttttctctagaggatgtcactccagttga

SEQ ID NO: 291 - DNA, 80 bp, synthetic construct
  misc_feature 1..80: note = Synthetic: >HKU9-cand-2890-2969
  source 1..80: mol_type = other DNA
agatgatgtttcgagtgaagctgacactatcgagtcggaggatgacgtagaaccaacctctgacagtgatgatcagtggc

SEQ ID NO: 292 - DNA, 80 bp, synthetic construct
  misc_feature 1..80: note = Synthetic: >HKU9-cand-2970-3049
  source 1..80: mol_type = other DNA
taggtgatgagtctgctgaagaagatgttgaacacattactgctgatgaacaagagtcttctgatattgaccctggtttg

SEQ ID NO: 293 - DNA, 80 bp, synthetic construct
  misc_feature 1..80: note = Synthetic: >HKU9-cand-3050-3129
  source 1..80: mol_type = other DNA
ccgctagaagcggttgtcgctagtgaccagccgactgctcctggtggttacacacagattactgagcacgtttatataaa

SEQ ID NO: 294 - DNA, 80 bp, synthetic construct
  misc_feature 1..80: note = Synthetic: >HKU9-cand-3130-3209
  source 1..80: mol_type = other DNA
atgtgcagatattgtgcaggaagcacgtgcttatacatatgcagtgttggttaatgctgctaatgttaatttacatcatg

SEQ ID NO: 295 - DNA, 80 bp, synthetic construct
  misc_feature 1..80: note = Synthetic: >HKU9-cand-3210-3289
  source 1..80: mol_type = other DNA
gcggtggcgttgcaggagcccttaatagagctactggcaatgccatgcaaaaagagtctaatgactacattagagctaat

SEQ ID NO: 296 - DNA, 80 bp, synthetic construct
  misc_feature 1..80: note = Synthetic: >HKU9-cand-3290-3369
  source 1..80: mol_type = other DNA
ggcccccttcaaccaggtgggcatgttttactaggctcacatggcttggccactactggtatactacatgtcgtaggacc

SEQ ID NO: 297 - DNA, 80 bp, synthetic construct
  misc_feature 1..80: note = Synthetic: >HKU9-cand-3370-3449
  source 1..80: mol_type = other DNA
agataagcgcttaggacaggatattaagttgcttgataaagtgtatcaggcatatacaggctttgatactgtgttgacac

SEQ ID NO: 298 - DNA, 80 bp, synthetic construct
  misc_feature 1..80: note = Synthetic: >HKU9-cand-3450-3529
  source 1..80: mol_type = other DNA
ctttagtgtcggcaggtatttttggttttactgtggaggaatctctacgtagtcttgttaacaatgttacttgtaagact

SEQ ID NO: 299 - DNA, 80 bp, synthetic construct
  misc_feature 1..80: note = Synthetic: >HKU9-cand-3530-3609
  source 1..80: mol_type = other DNA
tacgttgttgtttatgatagacagttatacgagcgggctttggccgtatcttttgatgtgccaggaccacagtctgatgt

SEQ ID NO: 300 - DNA, 80 bp, synthetic construct
  misc_feature 1..80: note = Synthetic: >HKU9-cand-3610-3689
  source 1..80: mol_type = other DNA
taaacctgctcctgcaccggagccatcaaccgctattgtggattgggctgaggctgtagaggtgcaagaatctgatgcgc

SEQ ID NO: 301 - DNA, 80 bp, synthetic construct
  misc_feature 1..80: note = Synthetic: >HKU9-cand-3690-3769
  source 1..80: mol_type = other DNA
aacaaattgaaacccctcgttttgaagcaacaggcacggttgagtgtgatgctgatagcgtgcccactgacaccgcgcgt

SEQ ID NO: 302 - DNA, 80 bp, synthetic construct
  misc_feature 1..80: note = Synthetic: >HKU9-cand-3770-3849
  source 1..80: mol_type = other DNA
tcacctgagaatgtcgttggctctgtgccagatgatatagatgcagatgtagcagcttgtgtgagagacttgcttcggcg

SEQ ID NO: 303 - DNA, 80 bp, synthetic construct
  misc_feature 1..80: note = Synthetic: >HKU9-cand-3850-3929
  source 1..80: mol_type = other DNA
ggttgttaagcaggtaaagcgtgataagcgtccaccgcctttaccacttccggctactgaggataagcgtcctaaagatg

SEQ ID NO: 304 - DNA, 80 bp, synthetic construct
  misc_feature 1..80: note = Synthetic: >HKU9-cand-3930-4009
  source 1..80: mol_type = other DNA
aggttgcttcggattcacctactgacgaacagagaactccattggttgatgtggtgtgtatgtctttttctgctatgttg

SEQ ID NO: 305 - DNA, 80 bp, synthetic construct
  misc_feature 1..80: note = Synthetic: >MERS-cand-18480-18559
  source 1..80: mol_type = other DNA
gttagacgacgtatagtgcaaatgttgtcagacactttagacaaattgtctgattactgtacgtttgtttgttgggctca

SEQ ID NO: 306 - DNA, 80 bp, synthetic construct
  misc_feature 1..80: note = Synthetic: >MERS-cand-18560-18639
  source 1..80: mol_type = other DNA
tggctttgaattaacgtctgcatcatacttttgcaagataggtaaggaacagaagtgttgcatgtgcaatagacgcgctg

SEQ ID NO: 307 - DNA, 80 bp, synthetic construct
  misc_feature 1..80: note = Synthetic: >MERS-cand-18640-18719
  source 1..80: mol_type = other DNA
cagcgtactcttcacctctgcaatcttatgcctgctggactcattcctgcggttatgattatgtctacaaccctttcttt

SEQ ID NO: 308 - DNA, 80 bp, synthetic construct
  misc_feature 1..80: note = Synthetic: >MERS-cand-18720-18799
  source 1..80: mol_type = other DNA
gtcgatgttcaacagtggggttatgtaggcaatcttgctactaatcacgatcgttattgctctgtccatcaaggagctca

SEQ ID NO: 309 - DNA, 80 bp, synthetic construct
  misc_feature 1..80: note = Synthetic: >MERS-cand-18800-18879
  source 1..80: mol_type = other DNA
tgtggcttctaatgatgcaataatgactcgttgtttagctattcattcttgttttatagaacgtgtggattgggatatag

SEQ ID NO: 310 - DNA, 80 bp, synthetic construct
  misc_feature 1..80: note = Synthetic: >MERS-cand-18880-18959
  source 1..80: mol_type = other DNA
agtatccttatatctcacatgaaaagaaattgaattcctgttgtagaatcgttgagcgcaacgtcgtacgtgctgctctt

SEQ ID NO: 311 - DNA, 80 bp, synthetic construct
  misc_feature 1..80: note = Synthetic: >MERS-cand-18960-19039
  source 1..80: mol_type = other DNA
cttgccggttcatttgacaaagtctatgatattggcaatcctaaaggaattcctattgttgatgaccctgtggttgattg

SEQ ID NO: 312 - DNA, 80 bp, synthetic construct
  misc_feature 1..80: note = Synthetic: >MERS-cand-19040-19119
  source 1..80: mol_type = other DNA
gcattattttgatgcacagcccttgaccagaaaggtacaacagcttttctatacagaggacatggcctcaagatttgctg

SEQ ID NO: 313 - DNA, 80 bp, synthetic construct
  misc_feature 1..80: note = Synthetic: >MERS-cand-19120-19199
  source 1..80: mol_type = other DNA
atgggctctgcttattttggaactgtaatgtaccaaaatatcctaataatgcaattgtatgcaggtttgacacacgtgtg

SEQ ID NO: 314 - DNA, 80 bp, synthetic construct
  misc_feature 1..80: note = Synthetic: >MERS-cand-19200-19279
  source 1..80: mol_type = other DNA
cattctgagttcaatttgccaggttgtgatggcggtagtttgtatgttaacaagcacgcttttcatacaccagcatatga

SEQ ID NO: 315 - DNA, 80 bp, synthetic construct
  misc_feature 1..80: note = Synthetic: >MERS-cand-19280-19359
  source 1..80: mol_type = other DNA
tgtgagtgcattccgtgatctgaaacctttaccattcttttattattctactacaccatgtgaagtgcatggtaatggta

SEQ ID NO: 316 - DNA, 80 bp, synthetic construct
  misc_feature 1..80: note = Synthetic: >MERS-cand-19360-19439
  source 1..80: mol_type = other DNA
gtatgatagaggatattgattatgtacccctaaaatctgcagtctgtattacagcttgtaatttagggggcgctgtttgt

SEQ ID NO: 317 - DNA, 80 bp, synthetic construct
  misc_feature 1..80: note = Synthetic: >MERS-cand-19450-19529
  source 1..80: mol_type = other DNA
ctacagagtacagagagtatatggaagcatataatcttgtctctgcatcaggtttccgcctttggtgttataagaccttt

SEQ ID NO: 318 - DNA, 80 bp, synthetic construct
  misc_feature 1..80: note = Synthetic: >MERS-cand-19530-19609
  source 1..80: mol_type = other DNA
gatatttataatctctggtctacttttacaaaagttcaaggtttggaaaacattgcttttaatgttgttaaacaaggcca

SEQ ID NO: 319 - DNA, 80 bp, synthetic construct
  misc_feature 1..80: note = Synthetic: >MERS-cand-19610-19689
  source 1..80: mol_type = other DNA
ttttattggtgttgagggtgaactacctgtagctgtagtcaatgataagatcttcaccaagagtggcgttaatgacattt

SEQ ID NO: 320 - DNA, 80 bp, synthetic construct
  misc_feature 1..80: note = Synthetic: >MERS-cand-19690-19769
  source 1..80: mol_type = other DNA
gtatgtttgagaataaaaccactttgcctactaatatagcttttgaactctatgctaagcgtgctgtacgctcgcatccc

SEQ ID NO: 321 - DNA, 80 bp, synthetic construct
  misc_feature 1..80: note = Synthetic: >NL63-cand-6720-6799
  source 1..80: mol_type = other DNA
cgtgtaccacttcaaactattattaatggtatgcataaatcattctatgttaatgctaatggtggtacttgtttctgtaa

SEQ ID NO: 322 - DNA, 80 bp, synthetic construct
  misc_feature 1..80: note = Synthetic: >NL63-cand-6800-6879
  source 1..80: mol_type = other DNA
taaacataacttcttttgtgttaattgtgattcttttgggcctggtaatacttttattaatggtgatattgcaagagagc

SEQ ID NO: 323 - DNA, 80 bp, synthetic construct
  misc_feature 1..80: note = Synthetic: >NL63-cand-6880-6959
  source 1..80: mol_type = other DNA
ttggtaatgttgttaaaacagctgttcaacccacagctcctgcatatgttattattgataaggtagattttgttaatgga

SEQ ID NO: 324 - DNA, 80 bp, synthetic construct
  misc_feature 1..80: note = Synthetic: >NL63-cand-6960-7039
  source 1..80: mol_type = other DNA
ttttatcgtctttatagtggtgacactttttggcggtatgactttgacattactgaatctaagtatagttgtaaagaggt

SEQ ID NO: 325 - DNA, 80 bp, synthetic construct
  misc_feature 1..80: note = Synthetic: >NL63-cand-7040-7119
  source 1..80: mol_type = other DNA
tctgaagaattgtaatgttttagaaaattttattgtttacaataatagtggtagtaacattacacagattaaaaatgctt

SEQ ID NO: 326 - DNA, 80 bp, synthetic construct
  misc_feature 1..80: note = Synthetic: >NL63-cand-7120-7199
  source 1..80: mol_type = other DNA
gtgtttatttttctcaattgttgtgtgaacctataaagttggtaaattcagagttgttgtcaactttatcagttgatttt

SEQ ID NO: 327 - DNA, 80 bp, synthetic construct
  misc_feature 1..80: note = Synthetic: >NL63-cand-7200-7279
  source 1..80: mol_type = other DNA
aatggtgttttgcataaggcatatgttgatgttttgtgtaatagtttttttaaggagctaactgctaacatgtccatggc

SEQ ID NO: 328 - DNA, 80 bp, synthetic construct
  misc_feature 1..80: note = Synthetic: >NL63-cand-7280-7359
  source 1..80: mol_type = other DNA
tgaatgtaaagctacacttggtttgactgtttctgatgatgattttgtttcagctgttgccaatgcacataggtatgacg

SEQ ID NO: 329 - DNA, 80 bp, synthetic construct
  misc_feature 1..80: note = Synthetic: >NL63-cand-7360-7439
  source 1..80: mol_type = other DNA
ttttgctttcagatttgtcatttaataatttttttatttcttatgctaaacctgaagataagttgtccgtttatgacatt

SEQ ID NO: 330 - DNA, 80 bp, synthetic construct
  misc_feature 1..80: note = Synthetic: >NL63-cand-7440-7519
  source 1..80: mol_type = other DNA
gcttgttgtatgcgtgccggttctaaggttgttaaccataatgttttaatcaaagagtcaatacctattgtttggggtgt

SEQ ID NO: 331 - DNA, 80 bp, synthetic construct
  misc_feature 1..80: note = Synthetic: >NL63-cand-7510-7589
  source 1..80: mol_type = other DNA
tttggggtgtcaaggactttaatactctttctcaagagggtaagaagtaccttgttaaaacaactaaagcaaagggtttg

SEQ ID NO: 332 - DNA, 80 bp, synthetic construct
  misc_feature 1..80: note = Synthetic: >NL63-cand-7590-7669
  source 1..80: mol_type = other DNA
acttttttattaacttttaatgataaccaagcaattacacaagttcctgctactagtatagttgcaaaacagggtgctgg

SEQ ID NO: 333 - DNA, 80 bp, synthetic construct
  misc_feature 1..80: note = Synthetic: >NL63-cand-7670-7749
  source 1..80: mol_type = other DNA
ttttaaacgtacttataattttctgtggtatgtatgtttatttgttgttgcattgtttattggtgtctcatttattgatt

SEQ ID NO: 334 - DNA, 80 bp, synthetic construct
  misc_feature 1..80: note = Synthetic: >NL63-cand-7750-7829
  source 1..80: mol_type = other DNA
atacaaccactgtaactagctttcatggttatgattttaagtacattgagaatggtcagttgaaggtgtttgaagcacct

SEQ ID NO: 335 - DNA, 80 bp, synthetic construct
  misc_feature 1..80: note = Synthetic: >NL63-cand-7830-7909
  source 1..80: mol_type = other DNA
ttacactgtgttcgtaatgtttttgataattttaatcaatggcatgaggctaagtttggtgttgttactactaatagtga

SEQ ID NO: 336 - DNA, 80 bp, synthetic construct
  misc_feature 1..80: note = Synthetic: >NL63-cand-7910-7989
  source 1..80: mol_type = other DNA
taaatgtcctatagttgttggtgtttcagagcgtattaatgttgttcctggtgttccaacaaatgtatatttggtaggaa

SEQ ID NO: 337 - DNA, 80 bp, synthetic construct
  misc_feature 1..80: note = Synthetic: >NL63-cand-10550-10629
  source 1..80: mol_type = other DNA
tgtaattttttcacctgaaagtgtatttagtgtttttggtgatgtgaaacttactttagttgtttatttaatttgtggtt

SEQ ID NO: 338 - DNA, 80 bp, synthetic construct
  misc_feature 1..80: note = Synthetic: >NL63-cand-10630-10709
  source 1..80: mol_type = other DNA
atttagtttgtacttattggggcattttgtattggttcaataggttttttaaatgtactatgggtgtttatgattttaag

SEQ ID NO: 339 - DNA, 80 bp, synthetic construct
  misc_feature 1..80: note = Synthetic: >NL63-cand-10710-10789
  source 1..80: mol_type = other DNA
gtgagtgctgctgaatttaaatacatggttgctaatggacttcatgcaccacatggaccttttgatgcactttggttatc

SEQ ID NO: 340 - DNA, 80 bp, synthetic construct
  misc_feature 1..80: note = Synthetic: >NL63-cand-10790-10869
  source 1..80: mol_type = other DNA
attcaaactacttggtattggtggtgaccgttgtataaaaatttcaactgtccaatccaaactgactgatttgaagtgta

SEQ ID NO: 341 - DNA, 80 bp, synthetic construct
  misc_feature 1..80: note = Synthetic: >NL63-cand-10870-10949
  source 1..80: mol_type = other DNA
ctaatgttgtgttattgggttgtttgtctagtatgaacattgcagctaattctagtgaatgggcttattgtgttgattta

SEQ ID NO: 342 - DNA, 80 bp, synthetic construct
  misc_feature 1..80: note = Synthetic: >NL63-cand-10950-11029
  source 1..80: mol_type = other DNA
cacaataagattaatctttgtgatgaccctgaaaaagctcaaggtatgttgttagcactccttgcgttctttctaagtaa

SEQ ID NO: 343 - DNA, 80 bp, synthetic construct
  misc_feature 1..80: note = Synthetic: >NL63-cand-11030-11109
  source 1..80: mol_type = other DNA
acatagtgattttggtcttgatggccttattgattcttattttgataatagtagcacccttcagagtgttgcttcatcat

SEQ ID NO: 344 - DNA, 80 bp, synthetic construct
  misc_feature 1..80: note = Synthetic: >NL63-cand-11110-11189
  source 1..80: mol_type = other DNA
ttgttagtatgccatcatatattgcttatgaaaatgctagacaagcttatgaggatgctattgctaatggatcttcttct

SEQ ID NO: 345 - DNA, 80 bp, synthetic construct
  misc_feature 1..80: note = Synthetic: >NL63-cand-11190-11269
  source 1..80: mol_type = other DNA
caacttattaaacaattgaagcgtgccatgaatatcgcaaagtctgaatttgatcatgagatatctgttcagaagaaaat

SEQ ID NO: 346 - DNA, 80 bp, synthetic construct
  misc_feature 1..80: note = Synthetic: >NL63-cand-11270-11349
  source 1..80: mol_type = other DNA
taatagaatggctgaacaagctgctactcagatgtataaagaagcacgctctgttaatagaaaatctaaagttattagtg

SEQ ID NO: 347 - DNA, 80 bp, synthetic construct
  misc_feature 1..80: note = Synthetic: >NL63-cand-11350-11429
  source 1..80: mol_type = other DNA
ctatgcactctttactttttggaatgttaagacgtttggatatgtctagtgttgaaactgttttgaatttagcacgtgat

SEQ ID NO: 348 - DNA, 80 bp, synthetic construct
  misc_feature 1..80: note = Synthetic: >NL63-cand-11430-11509
  source 1..80: mol_type = other DNA
ggtgttgtgccattgtcagttatacctgcaacttcagcttccaaactaactattgttagtccagatcttgaatcttattc

SEQ ID NO: 349 - DNA, 80 bp, synthetic construct
  misc_feature 1..80: note = Synthetic: >NL63-cand-11510-11589
  source 1..80: mol_type = other DNA
taagattgtttgtgatggttctgttcattatgctggagttgtttggacacttaatgatgttaaagacaatgatggtagac

SEQ ID NO: 350 - DNA, 80 bp, synthetic construct
  misc_feature 1..80: note = Synthetic: >NL63-cand-11590-11669
  source 1..80: mol_type = other DNA
ctgttcatgttaaagagattacaaaggaaaatgttgaaactttgacatggcctcttatccttaattgtgaacgtgttgtt

SEQ ID NO: 351 - DNA, 80 bp, synthetic construct
  misc_feature 1..80: note = Synthetic: >NL63-cand-11670-11749
  source 1..80: mol_type = other DNA
aaacttcaaaataatgaaattatgcctggtaaacttaagcaaaaacctatgaaagctgagggtgatggtggtgttttagg

SEQ ID NO: 352 - DNA, 80 bp, synthetic construct
  misc_feature 1..80: note = Synthetic: >NL63-cand-11750-11829
  source 1..80: mol_type = other DNA
tgatggtaatgccttgtataatactgagggtggtaaaacttttatgtacgcttatatttctaataaagctgaccttaaat

SEQ ID NO: 353 - DNA, 80 bp, synthetic construct
  misc_feature 1..80: note = Synthetic: >SARSCoV-cand-17710-17789
  source 1..80: mol_type = other DNA
ccttataattcacagaacgctgtagcttcaaaaatcttaggattgcctacgcagactgttgattcatcacagggttctga

SEQ ID NO: 354 - DNA, 80 bp, synthetic construct
  misc_feature 1..80: note = Synthetic: >SARSCoV-cand-17800-17879
  source 1..80: mol_type = other DNA
gtcatattcacacaaactactgaaacagcacactcttgtaatgtcaaccgcttcaatgtggctatcacaagggcaaaaat

SEQ ID NO: 355 - DNA, 80 bp, synthetic construct
  misc_feature 1..80: note = Synthetic: >SARSCoV-cand-17880-17959
  source 1..80: mol_type = other DNA
tggcattttgtgcataatgtctgatagagatctttatgacaaactgcaatttacaagtctagaaataccacgtcgcaatg

SEQ ID NO: 356 - DNA, 80 bp, synthetic construct
  misc_feature 1..80: note = Synthetic: >SARSCoV-cand-17960-18039
  source 1..80: mol_type = other DNA
tggctacattacaagcagaaaatgtaactggactttttaaggactgtagtaagatcattactggtcttcatcctacacag

SEQ ID NO: 357 - DNA, 80 bp, synthetic construct
  misc_feature 1..80: note = Synthetic: >SARSCoV-cand-18040-18119
  source 1..80: mol_type = other DNA
gcacctacacacctcagcgttgatataaagttcaagactgaaggattatgtgttgacataccaggcataccaaaggacat

SEQ ID NO: 358 - DNA, 80 bp, synthetic construct
  misc_feature 1..80: note = Synthetic: >SARSCoV-cand-18120-18199
  source 1..80: mol_type = other DNA
gacctaccgtagactcatctctatgatgggtttcaaaatgaattaccaagtcaatggttaccctaatatgtttatcaccc

SEQ ID NO: 359 - DNA, 80 bp, synthetic construct
  misc_feature 1..80: note = Synthetic: >SARSCoV-cand-18200-18279
  source 1..80: mol_type = other DNA
gcgaagaagctattcgtcacgttcgtgcgtggattggctttgatgtagagggctgtcatgcaactagagatgctgtgggt

SEQ ID NO: 360 - DNA, 80 bp, synthetic construct
  misc_feature 1..80: note = Synthetic: >SARSCoV-cand-18280-18359
  source 1..80: mol_type = other DNA
actaacctacctctccagctaggattttctacaggtgttaacttagtagctgtaccgactggttatgttgacactgaaaa

SEQ ID NO: 361 - DNA, 80 bp, synthetic construct
  misc_feature 1..80: note = Synthetic: >SARSCoV-cand-18360-18439
  source 1..80: mol_type = other DNA
taacacagaattcaccagagttaatgcaaaacctccaccaggtgaccagtttaaacatcttataccactcatgtataaag

SEQ ID NO: 362 - DNA, 80 bp, synthetic construct
  misc_feature 1..80: note = Synthetic: >SARSCoV-cand-18440-18519
  source 1..80: mol_type = other DNA
gcttgccctggaatgtagtgcgtattaagatagtacaaatgctcagtgatacactgaaaggattgtcagacagagtcgtg

SEQ ID NO: 363 - DNA, 80 bp, synthetic construct
  misc_feature 1..80: note = Synthetic: >SARSCoV-cand-18520-18599
  source 1..80: mol_type = other DNA
ttcgtcctttgggcgcatggctttgagcttacatcaatgaagtactttgtcaagattggacctgaaagaacgtgttgtct

SEQ ID NO: 364 - DNA, 80 bp, synthetic construct
  misc_feature 1..80: note = Synthetic: >SARSCoV-cand-18600-18679
  source 1..80: mol_type = other DNA
gtgtgacaaacgtgcaacttgcttttctacttcatcagatacttatgcctgctggaatcattctgtgggttttgactatg

SEQ ID NO: 365 - DNA, 80 bp, synthetic construct
  misc_feature 1..80: note = Synthetic: >SARSCoV-cand-18680-18759
  source 1..80: mol_type = other DNA
tctataacccatttatgattgatgttcagcagtggggctttacgggtaaccttcagagtaaccatgaccaacattgccag

SEQ ID NO: 366 - DNA, 80 bp, synthetic construct
  misc_feature 1..80: note = Synthetic: >SARSCoV-cand-18760-18839
  source 1..80: mol_type = other DNA
gtacatggaaatgcacatgtggctagttgtgatgctatcatgactagatgtttagcagtccatgagtgctttgttaagcg

SEQ ID NO: 367 - DNA, 80 bp, synthetic construct
  misc_feature 1..80: note = Synthetic: >SARSCoV-cand-18840-18919
  source 1..80: mol_type = other DNA
cgttgattggtctgttgaataccctattataggagatgaactgagggttaattctgcttgcagaaaagtacaacacatgg

SEQ ID NO: 368 - DNA, 80 bp, synthetic construct
  misc_feature 1..80: note = Synthetic: >SARSCoV-cand-18920-18999
  source 1..80: mol_type = other DNA
ttgtgaagtctgcattgcttgctgataagtttccagttcttcatgacattggaaatccaaaggctatcaagtgtgtgcct

SEQ ID NO: 369 - DNA, 80 bp, synthetic construct
  misc_feature 1..80: note = Synthetic: >Shrew-cand-13140-13219
  source 1..80: mol_type = other DNA
ttagcacaggttttgactgaaaccgcttttgtacaaggtggtttgtatgtaaaacctggtggtactacatctggtgatgc

SEQ ID NO: 370 - DNA, 80 bp, synthetic construct
  misc_feature 1..80: note = Synthetic: >Shrew-cand-13220-13299
  source 1..80: mol_type = other DNA
tagtactgcttatgctaattcagtatttaatatttttcagagtgttagttctaatgttcaaagattgttgtctgttaata

SEQ ID NO: 371 - DNA, 80 bp, synthetic construct
  misc_feature 1..80: note = Synthetic: >Shrew-cand-13300-13379
  source 1..80: mol_type = other DNA
cagctgacataaatgttgttagtgttaaaagaatacaatataacttgtatcacaatatttatcgtagttgtgtagcagat

SEQ ID NO: 372 - DNA, 80 bp, synthetic construct
  misc_feature 1..80: note = Synthetic: >Shrew-cand-13380-13459
  source 1..80: mol_type = other DNA
gttaattttgttcaagaatattatgattatttgcaaaagcatttttcattaatgattttaagtgatgatggtgtttgttg

SEQ ID NO: 373 - DNA, 80 bp, synthetic construct
  misc_feature 1..80: note = Synthetic: >Shrew-cand-13460-13539
  source 1..80: mol_type = other DNA
ttataataaagattatgcctctatgggatatgtgtctgacatgggagcatttaaagctttattatattatcaaaatggtg

SEQ ID NO: 374 - DNA, 80 bp, synthetic construct
  misc_feature 1..80: note = Synthetic: >Shrew-cand-13540-13619
  source 1..80: mol_type = other DNA
ttttcatgagcaattctaagtgttgggttgaagaagatttagaaaaaggacctcatgaattttgttctcaacatacgttg

SEQ ID NO: 375 - DNA, 80 bp, synthetic construct
  misc_feature 1..80: note = Synthetic: >Shrew-cand-13620-13699
  source 1..80: mol_type = other DNA
ttaattaaaggtgataatgaagtttatctaccttatccagatcctagtcgtattttgagtgcaggtgtttttgtggatga

SEQ ID NO: 376 - DNA, 80 bp, synthetic construct
  misc_feature 1..80: note = Synthetic: >Shrew-cand-13700-13779
  source 1..80: mol_type = other DNA
tgttgtaaaatctgataatgttttagcattagaacgttatgttagtttggctattgatgcttatcctttagtaaaacatg

SEQ ID NO: 377 - DNA, 80 bp, synthetic construct
  misc_feature 1..80: note = Synthetic: >Shrew-cand-13780-13859
  source 1..80: mol_type = other DNA
aaaattctgagtatcagaaagttttctgggttttattagattggattaaaaatttgtatagtaaatttaatcaaggtgtt

SEQ ID NO: 378 - DNA, 80 bp, synthetic construct
  misc_feature 1..80: note = Synthetic: >Shrew-cand-13860-13939
  source 1..80: mol_type = other DNA
cttgatagtttttctatacgagtagttgatgatgcacaaagtaaattttgggaggaagatttttataaaaatttgtatga

SEQ ID NO: 379 - DNA, 80 bp, synthetic construct
  misc_feature 1..80: note = Synthetic: >Shrew-cand-13940-14019
  source 1..80: mol_type = other DNA
acgtagtacaatactgcaatctgcaggttgttgtgttgtttgcaattcgcagactatactacgatgtggtgattgtatac

SEQ ID NO: 380 - DNA, 80 bp, synthetic construct
  misc_feature 1..80: note = Synthetic: >Shrew-cand-14020-14099
  source 1..80: mol_type = other DNA
gtagacctttgttgtgtactaaatgtgcttatgatcatgtttgtggcaccagtcataaatttattttagctataacacca

SEQ ID NO: 381 - DNA, 80 bp, synthetic construct
  misc_feature 1..80: note = Synthetic: >Shrew-cand-14100-14179
  source 1..80: mol_type = other DNA
tatgtgtgtcatacaagtggttgtgttgtaaatgatgttacaagattgtatcttggaggtatgagttattattgttttga

SEQ ID NO: 382 - DNA, 80 bp, synthetic construct
  misc_feature 1..80: note = Synthetic: >Shrew-cand-14180-14259
  source 1..80: mol_type = other DNA
acacaaacctaaattgtcatttccgttagttagtaatggacatgtttttggtttgtataagaatagtgctgttggtagtg

SEQ ID NO: 383 - DNA, 80 bp, synthetic construct
  misc_feature 1..80: note = Synthetic: >Shrew-cand-14260-14339
  source 1..80: mol_type = other DNA
tagattgtgatgtctttaatagaattgccactagtgattggtctaatgtggatgattatgtgttggctaattcttgtaaa

SEQ ID NO: 384 - DNA, 80 bp, synthetic construct
  misc_feature 1..80: note = Synthetic: >Shrew-cand-14340-14419
  source 1..80: mol_type = other DNA
gagtccttgattttatttgcagctgaaactattaaagcatttgaagaatcttctaagagttcttatgcttgtgctatttt

SEQ ID NO: 385 - DNA, 80 bp, synthetic construct
  misc_feature 1..80: note = Synthetic: >Shrew-cand-19540-19619
  source 1..80: mol_type = other DNA
agagtggtgtgttgaattttagtatatgttataggaattattttagtttttcatgggatacagatccaccgtcacccatt

SEQ ID NO: 386 - DNA, 80 bp, synthetic construct
  misc_feature 1..80: note = Synthetic: >Shrew-cand-19620-19699
  source 1..80: mol_type = other DNA
agttgtgcttttaatagacgcatttattttggacatagatatatttatttaggtgttatttggcgtcatggttatgttaa

SEQ ID NO: 387 - DNA, 80 bp, synthetic construct
  misc_feature 1..80: note = Synthetic: >Shrew-cand-19700-19779
  source 1..80: mol_type = other DNA
aattattacgccaaattttgtgcaacagtttgaattggataatatgtatttagaagttataagagttgcaactggtcgtt

SEQ ID NO: 388 - DNA, 80 bp, synthetic construct
  misc_feature 1..80: note = Synthetic: >Shrew-cand-19780-19859
  source 1..80: mol_type = other DNA
ttggtagtactgttaattatgttatagtaatgccctttcaaattgtagataaaagatctacatttttagttaattataat

SEQ ID NO: 389 - DNA, 80 bp, synthetic construct
  misc_feature 1..80: note = Synthetic: >Shrew-cand-19860-19939
  source 1..80: mol_type = other DNA
caaagtggttatgtaagtaatttattaaattgttcagaatctattgaagcacaattaaaatgtaaaagtagaagttttga

SEQ ID NO: 390 - DNA, 80 bp, synthetic construct
  misc_feature 1..80: note = Synthetic: >Shrew-cand-19940-20019
  source 1..80: mol_type = other DNA
acttcaaagtggtgtttatgaaattgcattagaagaaagagttggaggttattatagtgttgtgacaaatgttacaggtg

SEQ ID NO: 391 - DNA, 80 bp, synthetic construct
  misc_feature 1..80: note = Synthetic: >Shrew-cand-20020-20099
  source 1..80: mol_type = other DNA
attgtaataatattaaacatctttttagtaatttcactggaaatcgacaaccgctttatgctggtaattttgcaagtatg

SEQ ID NO: 392 - DNA, 80 bp, synthetic construct
  misc_feature 1..80: note = Synthetic: >Shrew-cand-20100-20179
  source 1..80: mol_type = other DNA
tcttgtatagtaccatttaatttttccattaataatgatttgttaaataataatccgcaattgagaggttttaatggtga

SEQ ID NO: 393 - DNA, 80 bp, synthetic construct
  misc_feature 1..80: note = Synthetic: >Shrew-cand-20180-20259
  source 1..80: mol_type = other DNA
gtttaaaccttttatagattgtaagggtattaatccaattggtttatttggaagtaatggtacttgttattcaggtatgg

SEQ ID NO: 394 - DNA, 80 bp, synthetic construct
  misc_feature 1..80: note = Synthetic: >Shrew-cand-20260-20339
  source 1..80: mol_type = other DNA
aatggagatattggaccagaaggtttagtggttataatatgtctattgaaggtatagctgaaagtttttatgatgctggt

SEQ ID NO: 395 - DNA, 80 bp, synthetic construct
  misc_feature 1..80: note = Synthetic: >Shrew-cand-20340-20419
  source 1..80: mol_type = other DNA
ataggtgaaaatgaatgttatggtcttcttaaaggtaggcagtataatgaattctggcaatttacagaggtcctttacta

SEQ ID NO: 396 - DNA, 80 bp, synthetic construct
  misc_feature 1..80: note = Synthetic: >Shrew-cand-20420-20499
  source 1..80: mol_type = other DNA
taaagtgcgctttatggaaaaaggattagatgtttgttatggtaatttaccaccagcaccacaagttaataagtgtaatg

SEQ ID NO: 397 - DNA, 80 bp, synthetic construct
  misc_feature 1..80: note = Synthetic: >Shrew-cand-20500-20579
  source 1..80: mol_type = other DNA
tatggacttttaatgatattacttttgaaggtgtgttgttagaaaccaataaaactttcaatcctcagttgaaagcttta

SEQ ID NO: 398 - DNA, 80 bp, synthetic construct
  misc_feature 1..80: note = Synthetic: >Shrew-cand-20580-20659
  source 1..80: mol_type = other DNA
tataaaggtagtatggttgttatgattagagtttttggcattgtgtatgaagtagtaccatgtataaaaactcggcttag

SEQ ID NO: 399 - DNA, 80 bp, synthetic construct
  misc_feature 1..80: note = Synthetic: >Shrew-cand-20660-20739
  source 1..80: mol_type = other DNA
cgttatttataatgctaataataagaactattcaacattgtatcgtgttgctaattgtaatcaaatagacacaaaaagga

SEQ ID NO: 400 - DNA, 80 bp, synthetic construct
  misc_feature 1..80: note = Synthetic: >Shrew-cand-20740-20819
  source 1..80: mol_type = other DNA
gtgttcatccagttggattgttgtctagagatggaattaatactccttgtggttgtcttagaaatgcaatgttttcgcct

SEQ ID NO: 401 - DNA, 80 bp, synthetic construct
  misc_feature 1..80: note = Synthetic: >BtSk_AlphaCoV-cand-13250-13329
  source 1..80: mol_type = other DNA
tgcctatatgtacgtcatattattcttatatgatgccagttatgggtatgaccaactgcttagctagtgaatgttttatt

SEQ ID NO: 402 - DNA, 80 bp, synthetic construct
  misc_feature 1..80: note = Synthetic: >Sb512-cand-13300-13379
  source 1..80: mol_type = other DNA
tatgtacgtcatattattcttatatgatgccagttatgggtatgaccaactgcttagctagtgaatgttttattaagagt

SEQ ID NO: 403 - DNA, 80 bp, synthetic construct
  misc_feature 1..80: note = Synthetic: >Sk512R-cand-13280-13359
  source 1..80: mol_type = other DNA
atgggagtgcctatatgtacgtcatattattcttacatgatgccagtcatgggtatgaccaactgcttagctagtgaatg

SEQ ID NO: 404 - DNA, 80 bp, synthetic construct
  misc_feature 1..80: note = Synthetic: >AlphaSp-cand-13310-13389
  source 1..80: mol_type = other DNA
atattattcttatatgatgccagttatgggtatgaccaactgtttagctagtgaatgttttattaagagtgatatttttg

SEQ ID NO: 405 - DNA, 80 bp, synthetic construct
  misc_feature 1..80: note = Synthetic: >Sb512-cand-14100-14179
  source 1..80: mol_type = other DNA
aataagagtgctggttatccttttaacaagtttggtaaggctggtttgtattatgattctttgtcatatgaagagcagga

SEQ ID NO: 406 - DNA, 80 bp, synthetic construct
  misc_feature 1..80: note = Synthetic: >BtSk_AlphaCoV-cand-14050-14129
  source 1..80: mol_type = other DNA
ctcaataagagtgctggttatccttttaacaagtttggtaaggctggtttgtattatgattctttgtcatatgaagagca

SEQ ID NO: 407 - DNA, 80 bp, synthetic construct
  misc_feature 1..80: note = Synthetic: >AlphaSp-cand-14110-14189
  source 1..80: mol_type = other DNA
ctggttatccttttaacaagtttggtaaggctggtttgtattatgattctttgtcatatgaagagcaggatgacttgtat

SEQ ID NO: 408 - DNA, 80 bp, synthetic construct
  misc_feature 1..80: note = Synthetic: >Sk512R-cand-14080-14159
  source 1..80: mol_type = other DNA
tgttaacaacctcaataagagtgctggttatccttttaacaagtttggtaaggctggtttgtattatgattctttgtcat

SEQ ID NO: 409 - DNA, 80 bp, synthetic construct
  misc_feature 1..80: note = Synthetic: >Sb512-cand-12670-12749
  source 1..80: mol_type = other DNA
gactagagcccttaaatggttcggacacacatcatgtgttccgtgcttttgatgtttacaatcgtgatgtcgcgtgtatt

SEQ ID NO: 410 - DNA, 80 bp, synthetic construct
  misc_feature 1..80: note = Synthetic: >Sk512R-cand-12660-12739
  source 1..80: mol_type = other DNA
ctcgactagagcccttaaatggttcggacacacatcatgtgttccgtgcttttgatgtttacaatcgtgatgtcgcgtgt

SEQ ID NO: 411 - DNA, 80 bp, synthetic construct
  misc_feature 1..80: note = Synthetic: >BtSk_AlphaCoV-cand-12630-12709
  source 1..80: mol_type = other DNA
agagcccttaaatggttcggacacacatcatgtgttccgtgcttttgatgtttacaatcgtgatgtcgcgtgtattagca

SEQ ID NO: 412 - DNA, 80 bp, synthetic construct
  misc_feature 1..80: note = Synthetic: >BtSk_AlphaCoV-cand-15410-15489
  source 1..80: mol_type = other DNA
gtatacgtagacctatgttgtgcactaagtgtgcttatgatcatgttgtaagtactagtcataaattcatcctggctatt

SEQ ID NO: 413 - DNA, 80 bp, synthetic construct
  misc_feature 1..80: note = Synthetic: >Sk512R-cand-15440-15519
  source 1..80: mol_type = other DNA
tgtggcgattgtatacgtagacccatgttgtgcactaagtgtgcttatgatcatgttgtaagtactagtcataaattcat

SEQ ID NO: 414 - DNA, 80 bp, synthetic construct
  misc_feature 1..80: note = Synthetic: >AlphaSp-cand-15460-15539
  source 1..80: mol_type = other DNA
tacgtagacccatgttgtgcactaagtgtgcttatgatcatgttgtaagtactagtcataagttcatcctggctattact

SEQ ID NO: 415 - DNA, 80 bp, synthetic construct
  misc_feature 1..80: note = Synthetic: >WIV16-cand-14190-14269
  source 1..80: mol_type = other DNA
tacggaagagagactttgtctcttcgaccgttattttaaatattgggaccagacataccatcccaattgtattaactgtt

SEQ ID NO: 416 - DNA, 80 bp, synthetic construct
  misc_feature 1..80: note = Synthetic: >BetaSp-cand-12980-13059
  source 1..80: mol_type = other DNA
aaacagttgaatgagattaatgaaagtgttaactggcccattgttattactgccacacggtataatgaggtatcaactac

SEQ ID NO: 417 - DNA, 80 bp, synthetic construct
  misc_feature 1..80: note = Synthetic: >BetaCoV1-cand-12860-12939
  source 1..80: mol_type = other DNA
tgttaaacagttgaatgagattaatgaaagtgttaactggcccattgttattactgccacacggtataatgaggtatcaa

SEQ ID NO: 418 - DNA, 80 bp, synthetic construct
  misc_feature 1..80: note = Synthetic: >Delta-cand-14390-14469
  source 1..80: mol_type = other DNA
cagcgggctacccctttaacaagctaggtaaggctcgtaactattacgacatgactcatgccgagcaaaatcaactgttt

SEQ ID NO: 419 - DNA, 80 bp, synthetic construct
  misc_feature 1..80: note = Synthetic: >HKU15-cand-12890-12969
  source 1..80: mol_type = other DNA
gtcagcgggctacccctttaacaagctaggtaaggctcgtaactattacgacatgactcatgccgagcaaaatcaactgt

SEQ ID NO: 420 - DNA, 80 bp, synthetic construct
  misc_feature 1..80: note = Synthetic: >BetaSp-cand-8340-8419
  source 1..80: mol_type = other DNA
ttatgcacaatcattgtttcggcctgttcttatggtagataagagtttgcttacaactgccagtacaggtactaatgttt

SEQ ID NO: 421 - DNA, 80 bp, synthetic construct
  misc_feature 1..80: note = Synthetic: >BetaCoV1-cand-8220-8299
  source 1..80: mol_type = other DNA
tcttttatgcacaatcattgtttcggcctgttcttatggtagataagagtttgcttacaactgccagtacaggtactaat

SEQ ID NO: 422 - DNA, 80 bp, synthetic construct
  misc_feature 1..80: note = Synthetic: >SEAC-cand-22360-22439
  source 1..80: mol_type = other DNA
cggtgatgttagtagtttgtactctactattgctgccaaaactagttccgttgtgcccactactgatagattcaatgttt

SEQ ID NO: 423 - DNA, 80 bp, synthetic construct
  misc_feature 1..80: note = Synthetic: >HKU2-cand-22400-22479
  source 1..80: mol_type = other DNA
tgttagtagtttgtactctactattgctgccaaaactagttccgttgtgcccactactgatagattcaatgtttctcaat

SEQ ID NO: 424 - DNA, 80 bp, synthetic construct
  misc_feature 1..80: note = Synthetic: >BetaCoV1-cand-26830-26909
  source 1..80: mol_type = other DNA
ggtagcaactgcagcctatcgcaccgctccgcaatagaagatatactttttaataaagtgaaattgtctgatgttggttt

SEQ ID NO: 425 - DNA, 80 bp, synthetic construct
  misc_feature 1..80: note = Synthetic: >BetaSp-cand-26940-27019
  source 1..80: mol_type = other DNA
tgtgtgggtagcaactgcagcctatcgcaccgctccgcaatagaagatatactttttaataaagtgaaattgtctgatgt

SEQ ID NO: 426 - DNA, 80 bp, synthetic construct
  misc_feature 1..80: note = Synthetic: >HKU5R-cand-10870-10949
  source 1..80: mol_type = other DNA
tccaattgtcagacaaatactgtaccataaatatagtagcttggctttatgcggcgattcttaacggttgtaattggttt

SEQ ID NO: 427 - DNA, 80 bp, synthetic construct
  misc_feature 1..80: note = Synthetic: >HKU5-cand-10880-10959
  source 1..80: mol_type = other DNA
gtcagacaaatactgtaccataaatatagtagcttggctttatgcggcgattcttaacggttgtaattggtttgttaagc

SEQ ID NO: 428 - DNA, 80 bp, synthetic construct
  misc_feature 1..80: note = Synthetic: >BtRl_BetaCoV-cand-10520-10599
  source 1..80: mol_type = other DNA
ctgcaggtacagacacgaccataacattaaatgtgttggcatggctgtatgctgctgttatcaatggtgataggtggttt

SEQ ID NO: 429 - DNA, 80 bp, synthetic construct
  misc_feature 1..80: note = Synthetic: >WIV16-cand-10550-10629
  source 1..80: mol_type = other DNA
gcacaggctgcaggtacagacacaaccataacattaaatgttttggcatggctgtatgctgctgttatcaatggtgatag

SEQ ID NO: 430 - DNA, 80 bp, synthetic construct
  misc_feature 1..80: note = Synthetic: >BtSk_AlphaCoV-cand-18550-18629
  source 1..80: mol_type = other DNA
ggaggtgcagtctgcagtaaacattgtgctttgtaccataactatgttatggcatacaacacttttactactgctggttt

SEQ ID NO: 431 - DNA, 80 bp, synthetic construct
  misc_feature 1..80: note = Synthetic: >MsbCoV1-cand-19680-19759
  source 1..80: mol_type = other DNA
tgatggtattttcacacaaggtcgcaatgttagcatctttgaaccacgtagtgagatggagtctgatttcttaaatctag

SEQ ID NO: 432 - DNA, 80 bp, synthetic construct
  misc_feature 1..80: note = Synthetic: >MsbCoV1-cand-27560-27639
  source 1..80: mol_type = other DNA
aagcctgaatggaaacgtgttcctaacagaactgaaaatgctaccacttgctttggtcagcgttctgttgagagaaactg

SEQ ID NO: 433 - DNA, 80 bp, synthetic construct
  misc_feature 1..80: note = Synthetic: >MbCoV1-cand-27560-27639
  source 1..80: mol_type = other DNA
acttgacaagcctgaatggaaacgtgttcctaacagaactgaaaatgcaaccacttgttttggtcagcgttctgttgaga

SEQ ID NO: 434 - DNA, 80 bp, synthetic construct
  misc_feature 1..80: note = Synthetic: >CHB25-cand-27990-28069
  source 1..80: mol_type = other DNA
aagcctgtttataagctagtataagtagagtttataaatgttgctgtgcatagatgaacatacatgttacaagaacctct

SEQ ID NO: 435 - DNA, 80 bp, synthetic construct
  misc_feature 1..80: note = Synthetic: >HKU32-cand-29030-29109
  source 1..80: mol_type = other DNA
gtttataagctagtataagtagagtttataaatgttgctgcacttagaccaacgtacatgttacaagacactcctagagt

SEQ ID NO: 436 - DNA, 80 bp, synthetic construct
  misc_feature 1..80: note = Synthetic: >Quail-cand-16500-16579
  source 1..80: mol_type = other DNA
ctattttgttaaactcggtatggaagagaagtgcttctgtggcagacgagcctgtttcactaatggaactgagttcgctt

SEQ ID NO: 437 - DNA, 80 bp, synthetic construct
  misc_feature 1..80: note = Synthetic: >Sparrow-cand-16580-16659
  source 1..80: mol_type = other DNA
aatgcgctattttgttaaacttggtatggaagagaagtgcttttgtggcagacgagcctgtttcactaatggaactgagt

SEQ ID NO: 438 - DNA, 80 bp, synthetic construct
  misc_feature 1..80: note = Synthetic: >HKU5R-cand-8640-8719
  source 1..80: mol_type = other DNA
aagcgacagattagaatcgcttgtcgtaagtgcaatatttcatttagactcaccacgtctagattacgttctgcggacaa

SEQ ID NO: 439 - DNA, 80 bp, synthetic construct
  misc_feature 1..80: note = Synthetic: >HKU5-cand-8640-8719
  source 1..80: mol_type = other DNA
ctcaagcgacagattagaatcgcttgtcgtaagtgcaatattccatttagacttaccacgtctagattacgttctgcgga

SEQ ID NO: 440 - DNA, 80 bp, synthetic construct
  misc_feature 1..80: note = Synthetic: >Sparrow-cand-16020-16099
  source 1..80: mol_type = other DNA
aagcgctgcggctatgattataatggcgtccacccagctcatgccttgacttggcatgattgtggtacagagtaccgctg

SEQ ID NO: 441 - DNA, 80 bp, synthetic construct
  misc_feature 1..80: note = Synthetic: >Quail-cand-15940-16019
  source 1..80: mol_type = other DNA
tgcggctatgattataatggcgtccacccagctcatgccttgacgtggcatgattgtggtatagaataccgctgcgagga

SEQ ID NO: 442 - DNA, 80 bp, synthetic construct
  misc_feature 1..80: note = Synthetic: >Alpha2-cand-28650-28729
  source 1..80: mol_type = other DNA
actcatagatatattaggaagtttagattgaattaatcaatactagattgaaaatttgagagtaatttaaagatccgctt

SEQ ID NO: 443 - DNA, 80 bp, synthetic construct
  misc_feature 1..80: note = Synthetic: >AlphaMink-cand-28660-28739
  source 1..80: mol_type = other DNA
ctcatagatatattaggaagtttagattgaattaatcaatactagattgaaaatttgagagtaatttaaagatccgctta

SEQ ID NO: 444 - DNA, 80 bp, synthetic construct
  misc_feature 1..80: note = Synthetic: >HKU10R-cand-25820-25899
  source 1..80: mol_type = other DNA
caatttttgacagttggtcaagttttggcaacaactggaccatgtttgcttttagcatcttaatggcttgcattacgctt

SEQ ID NO: 445 - DNA, 80 bp, synthetic construct
  misc_feature 1..80: note = Synthetic: >HKU10-cand-27280-27359
  source 1..80: mol_type = other DNA
atttttgacagttggtcaagttttggcaacaactggaccatgtttgcttttagcatcttaatgtcttgcattacgcttgt

SEQ ID NO: 446 - DNA, 80 bp, synthetic construct
  misc_feature 1..80: note = Synthetic: >BetaSp-cand-24620-24699
  source 1..80: mol_type = other DNA
aagctaattggcaccttgagtgcttctgtatgccaatatactatgtgtgaataccctaacacggcttgtaatccagcctt

SEQ ID NO: 447 - DNA, 80 bp, synthetic construct
  misc_feature 1..80: note = Synthetic: >MsbCoV1-cand-5370-5449
  source 1..80: mol_type = other DNA
atttaagtcagacacctaatgtacctcctggcaatgtaatctctatgcgttgcagtggtttagccacagttgtgtttgca

SEQ ID NO: 448 - DNA, 80 bp, synthetic construct
  misc_feature 1..80: note = Synthetic: >HKU4R-cand-4280-4359
  source 1..80: mol_type = other DNA
actgttcgtactgctaagaactatggttttacatgcttcatttgtactgagtattcagccaatgttaaatttttacgtac

SEQ ID NO: 449 - DNA, 80 bp, synthetic construct
  misc_feature 1..80: note = Synthetic: >HKU4-cand-4290-4369
  source 1..80: mol_type = other DNA
tgttcgtactgctaagaactatggttttacatgcttcatttgtactgagtattcagccaatgttaaatttttacgtacca

SEQ ID NO: 450 - DNA, 80 bp, synthetic construct
  misc_feature 1..80: note = Synthetic: >MbCoV1-cand-11210-11289
  source 1..80: mol_type = other DNA
acttttcatgtatgttacttgtggttatttatgctgtatgtattatggcatatgctactggtttaaccgcttctttaagt

SEQ ID NO: 451 - DNA, 80 bp, synthetic construct
  misc_feature 1..80: note = Synthetic: >BatCoV1A-cand-11380-11459
  source 1..80: mol_type = other DNA
ctttttatgtatgtgctttgtggctatttgtgctgtgtttattatggcatatgctactggtttaaccgcttctttaagtg

SEQ ID NO: 452 - DNA, 80 bp, synthetic construct
  misc_feature 1..80: note = Synthetic: >HKU5-cand-1840-1919
  source 1..80: mol_type = other DNA
acttaacacctcgtggctggattgtcacgatgggttcctacattgagggtgtcattaacgtaggtgcagctggtgtctgc

SEQ ID NO: 453 - DNA, 80 bp, synthetic construct
  misc_feature 1..80: note = Synthetic: >HKU5R-cand-1850-1929
  source 1..80: mol_type = other DNA
tcgtggctggattgtcacgatgggttcctacatagagggtgccattaacgtaggtgcagctggtgtctgcaatgctgcaa

SEQ ID NO: 454 - DNA, 80 bp, synthetic construct
  misc_feature 1..80: note = Synthetic: >AlphaMink-cand-14640-14719
  source 1..80: mol_type = other DNA
acttaagtgtaggaccacatgagttttgttcgcagcataccatgcaaattgtaactccagagggtgattattatttacca

SEQ ID NO: 455 - DNA, 80 bp, synthetic construct
  misc_feature 1..80: note = Synthetic: >Alpha2-cand-14630-14709
  source 1..80: mol_type = other DNA
tctaagtgtaggaccacatgagttttgctcgcagcatactatgcaaattgtaactccagagggtgattattatttaccat

SEQ ID NO: 456 - DNA, 80 bp, synthetic construct
  misc_feature 1..80: note = Synthetic: >Sparrow-cand-10180-10259
  source 1..80: mol_type = other DNA
atttacaaacgctctgttgagatgaatgaatcacctcaagagcagaaaaagaagcttaaagctgttaacattgcaaaggc

SEQ ID NO: 457 - DNA, 80 bp, synthetic construct
  misc_feature 1..80: note = Synthetic: >229ER-cand-14800-14879
  source 1..80: mol_type = other DNA
acttatgctgaacttggttacattgctgatattagtgcttttaaagctactttatattatcagaacagtgtattcatgag

SEQ ID NO: 458 - DNA, 80 bp, synthetic construct
  misc_feature 1..80: note = Synthetic: >229E-cand-14820-14899
  source 1..80: mol_type = other DNA
ctgaacttggttacattgctgatattagtgcttttaaagccactttatattatcagaatggtgtattcatgagcacagct

SEQ ID NO: 459 - DNA, 80 bp, synthetic construct
  misc_feature 1..80: note = Synthetic: >Alpha2-cand-9090-9169
  source 1..80: mol_type = other DNA
tgttattggttgttcatatcgtggtgttaatcttgttattaaggttagccaagtgaacacacaaactcctaaacataagt

SEQ ID NO: 460 - DNA, 80 bp, synthetic construct
  misc_feature 1..80: note = Synthetic: >AlphaMink-cand-9100-9179
  source 1..80: mol_type = other DNA
gtgttattggttgttcatatcgtggtgttaatcttattatcaaggttagtcaagtgaacacgcaaactcctaaacataag

SEQ ID NO: 461 - DNA, 80 bp, synthetic construct
  misc_feature 1..80: note = Synthetic: >HKU4-cand-3250-3329
  source 1..80: mol_type = other DNA
gatgacattctagtagctgaaattgagttggaagaagacccaccactggaaaccgccttggaaagtgtggaagctgaagt

SEQ ID NO: 462 - DNA, 80 bp, synthetic construct
  misc_feature 1..80: note = Synthetic: >HKU5-cand-26980-27059
  source 1..80: mol_type = other DNA
attagacttcgtccaacaatcatatgttggcagtaagttctttattaaacattctcacaccaccgaatacgctatgcctg

SEQ ID NO: 463 - DNA, 80 bp, synthetic construct
  misc_feature 1..80: note = Synthetic: >BetaCoV1-cand-25790-25869
  source 1..80: mol_type = other DNA
caattctatcctcacatgttcgtgttctaatactcagtatagtgcaggcacttttgtaagtcaatcttattactatgcct

SEQ ID NO: 464 - DNA, 80 bp, synthetic construct
  misc_feature 1..80: note = Synthetic: >BetaSp-cand-25900-25979
  source 1..80: mol_type = other DNA
gccaggcaattctatcctcacatgttcgtgttctaatactcagtatagtgcaggcacttttgtaagtcaatcttattact

SEQ ID NO: 465 - DNA, 80 bp, synthetic construct
  misc_feature 1..80: note = Synthetic: >SARSCoV2-cand-29730-29809
  source 1..80: mol_type = other DNA
aggccacgcggagtacgatcgagtgtacagtgaacaatgctagggagagctgcctatatggaagagccctaatgtgtaaa

SEQ ID NO: 466 - DNA, 80 bp, synthetic construct
  misc_feature 1..80: note = Synthetic: >BtRl_BetaCoV-cand-29530-29609
  source 1..80: mol_type = other DNA
attttcaccgaggccacgcggagtacgatcgagggtacagtgaataatactagggagagctgcctatatggaagagccct

SEQ ID NO: 467 - DNA, 80 bp, synthetic construct
  misc_feature 1..80: note = Synthetic: >BetaCoV1-cand-27470-27549
  source 1..80: mol_type = other DNA
aggccattgagaagattaatgaatgtgttaaaagtcagtcaatgcgcgtaaatttctgtggcaagggtaatcacatattg

SEQ ID NO: 468 - DNA, 80 bp, synthetic construct
  misc_feature 1..80: note = Synthetic: >BetaSp-cand-27580-27659
  source 1..80: mol_type = other DNA
cttcccaggccattgagaagattaatgaatgtgttaaaagtcagtcaatgcgcgtaaatttctgtggcaagggtaatcac

SEQ ID NO: 469 - DNA, 80 bp, synthetic construct
  misc_feature 1..80: note = Synthetic: >HKU8-cand-17360-17439
  source 1..80: mol_type = other DNA
aggccctgatgtgttcttgcataaatgttaccgttgtcctgcagaaattgtaaagactgtttccgagcttgtttatgaga

SEQ ID NO: 470 - DNA, 80 bp, synthetic construct
  misc_feature 1..80: note = Synthetic: >HKU8R-cand-16980-17059
  source 1..80: mol_type = other DNA
atgtgttcttgcataaatgctaccgttgccctgcagaaattgtaaagactgtttccgagcttgtttatgagaacaagttc

SEQ ID NO: 471 - DNA, 80 bp, synthetic construct
  misc_feature 1..80: note = Synthetic: >BtSk_AlphaCoV-cand-16130-16209
  source 1..80: mol_type = other DNA
ttcatgaggactactctaatcttataccctattatcagttaataggtaagcagaagcttaccacaatccaaggtccgcct

SEQ ID NO: 472 - DNA, 80 bp, synthetic construct
  misc_feature 1..80: note = Synthetic: >Sk512R-cand-16160-16239
  source 1..80: mol_type = other DNA
gccttcaacattcatgaggactactctaatcttataccctattatcagttaataggtaagcagaagcttaccacaatcca

SEQ ID NO: 473 - DNA, 80 bp, synthetic construct
  misc_feature 1..80: note = Synthetic: >HKU15-cand-8960-9039
  source 1..80: mol_type = other DNA
aggctccaatttcattgcagtcaggagtagttaagaaaacttgtacgtggttcttccacttcttgtttatggctattacc

SEQ ID NO: 474 - DNA, 80 bp, synthetic construct
  misc_feature 1..80: note = Synthetic: >Delta-cand-10310-10389
  source 1..80: mol_type = other DNA
tcaggctccaatttcattgcagtcaggagtagttaagaaaacttgtacgtggttcttccacttcttgtttatggctatta

SEQ ID NO: 475 - DNA, 80 bp, synthetic construct
  misc_feature 1..80: note = Synthetic: >Quail-cand-240-319
  source 1..80: mol_type = other DNA
ccgtagggttgaagtcacaccggtctgcaccgcccgtcagcggacacattgcccagcatagcactccttgcaccgagcct

SEQ ID NO: 476 - DNA, 80 bp, synthetic construct
  misc_feature 1..80: note = Synthetic: >Sparrow-cand-270-349
  source 1..80: mol_type = other DNA
cgtagggtttaagtcacaccggtctgcaccgcccgtcagcggacacattgcccagcatagcactccttgcaccgagccta

SEQ ID NO: 477 - DNA, 80 bp, synthetic construct
  misc_feature 1..80: note = Synthetic: >HghCoV1-cand-27890-27969
  source 1..80: mol_type = other DNA
gaactttgcatggtccatagtctttcttattattactgctgtactacagtatggttatccatctcgtagtatgacagcct

SEQ ID NO: 478 - DNA, 80 bp, synthetic construct
  misc_feature 1..80: note = Synthetic: >Delta-cand-26280-26359
  source 1..80: mol_type = other DNA
catatcagtcagaaatccgccacaggatatggtgatagtgtcaccaagtgacacctttcactacacttttaagaaacctg

SEQ ID NO: 479 - DNA, 80 bp, synthetic construct
  misc_feature 1..80: note = Synthetic: >HKU15-cand-8000-8079
  source 1..80: mol_type = other DNA
cacagttgtacacaccacctaaatttgcagttgttcagagtcttaagaccaagctgcaagcaggtatcaaaatcctcctg

SEQ ID NO: 480 - DNA, 80 bp, synthetic construct
  misc_feature 1..80: note = Synthetic: >HKU4-cand-3410-3489
  source 1..80: mol_type = other DNA
cccctagcacttctacagtagtaggtgaaaatgacttgagcgttaagcccatgtcacgtgtagctgaaactgacgatgtg

SEQ ID NO: 481 - DNA, 80 bp, synthetic construct
  misc_feature 1..80: note = Synthetic: >HKU4R-cand-3400-3479
  source 1..80: mol_type = other DNA
tgcccctagcacttctacagtagtaggtgaaaatgacttgagcgttaagcccatgtcacgtgtagctgaaactggcgatg

SEQ ID NO: 482 - DNA, 80 bp, synthetic construct
  misc_feature 1..80: note = Synthetic: >HKU5-cand-10320-10399
  source 1..80: mol_type = other DNA
gttgtagagaattgtatggttcaggtgacttgcggttcaatgacacttaatggcttgtggctcgacaattatgtctggtg

SEQ ID NO: 483 - DNA, 80 bp, synthetic construct
  misc_feature 1..80: note = Synthetic: >HKU5R-cand-10320-10399
  source 1..80: mol_type = other DNA
gtagagaattgtatggttcaggtgacttgcggttcaatgacacttaatggcttatggctcgacaactatgtctggtgtcc

SEQ ID NO: 484 - DNA, 80 bp, synthetic construct
  misc_feature 1..80: note = Synthetic: >HKU18-cand-12670-12749
  source 1..80: mol_type = other DNA
ctacaagcatttgcttgatagtgatattttggaccaacttggtatagacattcgccacttctactatatgcaggatggtg

SEQ ID NO: 485 - DNA, 80 bp, synthetic construct
  misc_feature 1..80: note = Synthetic: >HKU15-cand-12650-12729
  source 1..80: mol_type = other DNA
ctacaagcatttgcttgatagtaacctattagaccaacttggaatagacattcgccacttctactatatgcaggatggtg

SEQ ID NO: 486 - DNA, 80 bp, synthetic construct
  misc_feature 1..80: note = Synthetic: >BetaCoV1-cand-26670-26749
  source 1..80: mol_type = other DNA
cattaacaccatactaaatgaagttaatagcatgattgacacctcccagtatcaattagctagtacattaatgaatggtg

SEQ ID NO: 487 - DNA, 80 bp, synthetic construct
  misc_feature 1..80: note = Synthetic: >BetaSp-cand-26780-26859
  source 1..80: mol_type = other DNA
tgataacattaacaccatactaaatgaagttaatagcatgattgacacctcccagtatcaattagctagtacattaatga

SEQ ID NO: 488 - DNA, 80 bp, synthetic construct
  misc_feature 1..80: note = Synthetic: >Anlong-cand-170-249
  source 1..80: mol_type = other DNA
tcgtacactccctgccgtagtgttccgtcaccacagagcaaagtgtgcctggaccctcaactgttccgtcagccgaggtg

SEQ ID NO: 489 - DNA, 80 bp, synthetic construct
  misc_feature 1..80: note = Synthetic: >MrAlphaSax-cand-160-239
  source 1..80: mol_type = other DNA
tagtgtgcctcgtacactccctgccgtagtgttccgtcactacagatcacagtgtgcctggaccctctactgttccgtca

SEQ ID NO: 490 - DNA, 80 bp, synthetic construct
  misc_feature 1..80: note = Synthetic: >Sb512-cand-4140-4219
  source 1..80: mol_type = other DNA
tgttgattgggaggtgtctaatggttcttgtgatgtcaaaccatttttgacttacaagaacattgagttttaccaaggtg

SEQ ID NO: 491 - DNA, 80 bp, synthetic construct
  misc_feature 1..80: note = Synthetic: >Sk512R-cand-1170-1249
  source 1..80: mol_type = other DNA
tacaacaacgtctttttaaaacacattatagaccttgttgtaccaggcactaccttgggttggggtgtttggcgtatagc

SEQ ID NO: 492 - DNA, 80 bp, synthetic construct
  misc_feature 1..80: note = Synthetic: >HKU8R-cand-15700-15779
  source 1..80: mol_type = other DNA
ttctcagactgttctgaggtgtggtgattgcctccgtaggcctatgttgtgcactaagtgcgcttatgaccatgttgtag

SEQ ID NO: 493 - DNA, 80 bp, synthetic construct
  misc_feature 1..80: note = Synthetic: >HKU8-cand-16080-16159
  source 1..80: mol_type = other DNA
gtttgcaattctcagactgttctgagctgtggtgattgcctacgtaggcctatgttgtgcactaagtgcgcttatgacca

SEQ ID NO: 494 - DNA, 80 bp, synthetic construct
  misc_feature 1..80: note = Synthetic: >AlphaSp-cand-19930-20009
  source 1..80: mol_type = other DNA
ctacaatgtgtgttccacaccatatgcgtgtgttacacttaggtgctggttctgataagggtgttgcacctggtactgca

SEQ ID NO: 495 - DNA, 80 bp, synthetic construct
  misc_feature 1..80: note = Synthetic: >Sk512R-cand-19920-19999
  source 1..80: mol_type = other DNA
gcactacaatgtgtgttccacaccatatgcgtgtgttacacttaggtgccggttctgataagggtgtcgcacctggtacc

SEQ ID NO: 496 - DNA, 80 bp, synthetic construct
  misc_feature 1..80: note = Synthetic: >BetaCoV1-cand-13660-13739
  source 1..80: mol_type = other DNA
cttgttcctgtgtaggttcaagtgctacattgcagtcaaaggatacgaactttttaaacgggttcggggtgcgagtgtag

SEQ ID NO: 497 - DNA, 80 bp, synthetic construct
  misc_feature 1..80: note = Synthetic: >BetaSp-cand-13780-13859
  source 1..80: mol_type = other DNA
ttcctgtgtaggttcaagtgctacattgcagtcaaaggatacgaactttttaaacgggttcggggtgcgagtgtagatgc

SEQ ID NO: 498 - DNA, 80 bp, synthetic construct
  misc_feature 1..80: note = Synthetic: >MbCoV1-cand-16580-16659
  source 1..80: mol_type = other DNA
gatgattatgccaacttaattccatattaccaaatgattggaaagcagatgattacaactattcagggacctcctggtag

SEQ ID NO: 499 - DNA, 80 bp, synthetic construct
  misc_feature 1..80: note = Synthetic: >MsbCoV1-cand-16560-16639
  source 1..80: mol_type = other DNA
taatattagtgattattatgccaacttagttccatattaccaaatgattggaaagcagatgattacaactattcagggac

SEQ ID NO: 500 - DNA, 80 bp, synthetic construct
  misc_feature 1..80: note = Synthetic: >HghCoV1-cand-16050-16129
  source 1..80: mol_type = other DNA
ttatccagatccctctaggattttgtctgcaggttgctttgtggatgatatcattaagactgatggtactctcatggtag

SEQ ID NO: 501 - DNA, 80 bp, synthetic construct
  misc_feature 1..80: note = Synthetic: >HKU31-cand-16120-16199
  source 1..80: mol_type = other DNA
tatccagatccctctaggattttgtctgcaggttgctttgtagatgatatcattaagactgatggtactctcatggtaga

SEQ ID NO: 502 - DNA, 80 bp, synthetic construct
  misc_feature 1..80: note = Synthetic: >BetaCoV1-cand-21300-21379
  source 1..80: mol_type = other DNA
ctacttactttggggattgtgttacactaccttttgattgtcagtgggatctgataatttctgatatgtatgaccctata

SEQ ID NO: 503 - DNA, 80 bp, synthetic construct
  misc_feature 1..80: note = Synthetic: >BetaSp-cand-21410-21489
  source 1..80: mol_type = other DNA
gcgttgctacttactttggggattgtgttacactaccttttgattgtcagtgggatctgataatttctgatatgtatgac

SEQ ID NO: 504 - DNA, 80 bp, synthetic construct
  misc_feature 1..80: note = Synthetic: >Sk512R-cand-19600-19679
  source 1..80: mol_type = other DNA
tgttgacttgttgcttgatgactttgttaacatacttaaatctgtagatttgagcgttgtttcaaaagttcatgaagtag

SEQ ID NO: 505 - DNA, 80 bp, synthetic construct
  misc_feature 1..80: note = Synthetic: >AlphaSp-cand-19610-19689
  source 1..80: mol_type = other DNA
tgacttgttgcttgatgactttgttaacatacttaaatctgtagatttgagcgttgtttcaaaagttcatgaagtagtta

SEQ ID NO: 506 - DNA, 80 bp, synthetic construct
  misc_feature 1..80: note = Synthetic: >BetaCoV1-cand-9500-9579
  source 1..80: mol_type = other DNA
gtagggttgtgtgagcctgctgatgagggtatctgttttacttttaatggttcctgggctcttaataatgaatattatag

SEQ ID NO: 507 - DNA, 80 bp, synthetic construct
  misc_feature 1..80: note = Synthetic: >MN531555-cand-10570-10649
  source 1..80: mol_type = other DNA
aacttcaaagtttctgtggaccaatataggtatatgtgtcttcataagatagcaccacctaaaactgtgtgggaagtctt

SEQ ID NO: 508 - DNA, 80 bp, synthetic construct
  misc_feature 1..80: note = Synthetic: >MT114540-cand-23040-23119
  source 1..80: mol_type = other DNA
aacttctggtctgggtacagttgatgaagattacaaacgttgtacaggtggttatgacatagctgacttagtttgtgcac

SEQ ID NO: 509 - DNA, 80 bp, synthetic construct
  misc_feature 1..80: note = Synthetic: >MN517817-cand-17890-17969
  source 1..80: mol_type = other DNA
caaatgaggacgaagtaaattccagttgtagatatttacaacgcatgtatcttaatgcatgtgttgatgctcttaaagtt

SEQ ID NO: 510 - DNA, 80 bp, synthetic construct
  misc_feature 1..80: note = Synthetic: >MN128087-cand-17890-17969
  source 1..80: mol_type = other DNA
caaatgaggatgaagtcaattcaagttgtagatacttacagcgcatgtatcttaatgcatgtgttgatgctcttaaagtt

SEQ ID NO: 511 - DNA, 80 bp, synthetic construct
  misc_feature 1..80: note = Synthetic: >MN128086-cand-16410-16489
  source 1..80: mol_type = other DNA
ttacttaatggttcactctcgcctaaggattataatatcatcacaaatctcatggtttgtgtgaagccagatattttctt

SEQ ID NO: 512 - DNA, 80 bp, synthetic construct
  misc_feature 1..80: note = Synthetic: >MT114541-cand-25760-25839
  source 1..80: mol_type = other DNA
gcattgctaaatataattaagctatgcatggtatgttgtaatttaggaagaacagttatcattgtcccagcacaacatgc

SEQ ID NO: 513 - DNA, 80 bp, synthetic construct
  misc_feature 1..80: note = Synthetic: >MT114541-cand-23680-23759
  source 1..80: mol_type = other DNA
gttaatgaatgtgttaggtctcagtctcagagatttggattctgcggtaatggtacacatttgttctcacttgcaaatgc

SEQ ID NO: 514 - DNA, 80 bp, synthetic construct
  misc_feature 1..80: note = Synthetic: >MN711790-cand-880-959
  source 1..80: mol_type = other DNA
gtggtctctcactgtagaagcactggacactcgtgcacaaacccttgatgaaatttttgaccccactgaaatactttggc

SEQ ID NO: 515 - DNA, 80 bp, synthetic construct
  misc_feature 1..80: note = Synthetic: >AJ311317-cand-880-959
  source 1..80: mol_type = other DNA
gtggtctcttactgtagaagcactggatgttcgtgcacaaactctcgatgaaatttttgaccccactgaaatactttggc

SEQ ID NO: 516 - DNA, 80 bp, synthetic construct
  misc_feature 1..80: note = Synthetic: >MN517816-cand-25130-25209
  source 1..80: mol_type = other DNA
gcggaaataagaaaaggtttgctacatttgtctatgccaaacagtcagtagacactggcgagctagaaagtgtagcaaca

SEQ ID NO: 517 - DNA, 80 bp, synthetic construct
  misc_feature 1..80: note = Synthetic: >SBB-053-cand-19270-19349
  source 1..80: mol_type = other DNA
aagttaggtgttcttaagatagaagaattcgcatctagtgatgattctacacttaagtgttgcactgtaacttatgctaa

SEQ ID NO: 518 - DNA, 80 bp, synthetic construct
  misc_feature 1..80: note = Synthetic: >SBB-130-cand-19280-19359
  source 1..80: mol_type = other DNA
ttaagatagaagaatttgcatctagtgatgattctacacttaagtgttgcactgtaacttatgctaatgatcctagctct

SEQ ID NO: 519 - DNA, 80 bp, synthetic construct
  misc_feature 1..80: note = Synthetic: >SBB-120-cand-19290-19369
  source 1..80: mol_type = other DNA
agaagaatttgcatctagtgatgattctacgcttaagtgttgcactgtaacttatgctaatgatcctagctccaaaatgg

SEQ ID NO: 520 - DNA, 80 bp, synthetic construct
  misc_feature 1..80: note = Synthetic: >SBB-041-cand-19670-19749
  source 1..80: mol_type = other DNA
aatacactcaattatgtcaatatttaaatagcactactatgtgtgtaccacacaacatgagggttttgcaccttggtgca

SEQ ID NO: 521 - DNA, 80 bp, synthetic construct
  misc_feature 1..80: note = Synthetic: >SBB-010-cand-19680-19759
  source 1..80: mol_type = other DNA
attatgccaatatttaaatagcactactatgtgtgtaccacacaacatgagggttttgcaccttggtgcagggtcggata

SEQ ID NO: 522 - DNA, 80 bp, synthetic construct
  misc_feature 1..80: note = Synthetic: >SBB-130-cand-19680-19759
  source 1..80: mol_type = other DNA
atgccaatatttaaatagcactactatgtgtgtaccacacaacatgagggttttgcaccttggtgcagggtcggataagg

SEQ ID NO: 523 - DNA, 80 bp, synthetic construct
  misc_feature 1..80: note = Synthetic: >SBB-120-cand-19690-19769
  source 1..80: mol_type = other DNA
tatttaaatagcactactatgtgtgtaccacacaacatgagggttttgcaccttggtgcagggtcggataagggagttgc

SEQ ID NO: 524 - DNA, 80 bp, synthetic construct
  misc_feature 1..80: note = Synthetic: >SBB-041-cand-19590-19669
  source 1..80: mol_type = other DNA
aatgtgcctagagccatgtaacctctataattatggtactggtgttaagttaccagacggcatcatgttcaatgtcgtta

SEQ ID NO: 525 - DNA, 80 bp, synthetic construct
  misc_feature 1..80: note = Synthetic: >SBB-010-cand-19600-19679
  source 1..80: mol_type = other DNA
gagccatgtaacctctacaattatggtactggtgttaagctaccagatggcatcatgttcaatgtcgttaaatacactca

SEQ ID NO: 526 - DNA, 80 bp, synthetic construct
  misc_feature 1..80: note = Synthetic: >SBB-120-cand-19610-19689
  source 1..80: mol_type = other DNA
acctctacaattatggtactggtgttaagctaccagatggcatcatgttcaatgtcgttaaatacactcaattatgtcaa

SEQ ID NO: 527 - DNA, 80 bp, synthetic construct
  misc_feature 1..80: note = Synthetic: >SBB-130-cand-19600-19679
  source 1..80: mol_type = other DNA
ccgtgtaacctctacaattatggtactggtgttaagctaccagatggcatcatgttcaatgtcgttaaatacactcaatt

SEQ ID NO: 528 - DNA, 80 bp, synthetic construct
  misc_feature 1..80: note = Synthetic: >SBB-041-cand-5390-5469
  source 1..80: mol_type = other DNA
gacttcttgactggtaaagtggctaagtttgtacattggttgtactggtttgttaatgccaataaaggcgaacctggtga

SEQ ID NO: 529 - DNA, 80 bp, synthetic construct
  misc_feature 1..80: note = Synthetic: >SBB-024-cand-5400-5479
  source 1..80: mol_type = other DNA
ctggtaaagtggctaagtttgtacattggttgtactggtttgttaatgccaataaaggcgaacctggtgatgttgagcat

SEQ ID NO: 530 - DNA, 80 bp, synthetic construct
  misc_feature 1..80: note = Synthetic: >SBB-010-cand-24480-24559
  source 1..80: mol_type = other DNA
aggagattccactctatgagaaaccttcagatgtttgtgctacagtttgagagtgtctcatcccctcaactaaacgatgt

SEQ ID NO: 531 - DNA, 80 bp, synthetic construct
  misc_feature 1..80: note = Synthetic: >SBB-053-cand-24470-24549
  source 1..80: mol_type = other DNA
attccactttatgagaaaccttcagatgtttgtgctacagtttgagagtgtctcatcccctcaactaaacgatgttgact

SEQ ID NO: 532 - DNA, 80 bp, synthetic construct
  misc_feature 1..80: note = Synthetic: >SBB-130-cand-24480-24559
  source 1..80: mol_type = other DNA
aggaaattccactttatgagaaaccttcagatgtttgtgccactgtttaagagtgtctcatcccctcaactaaacgatgt

SEQ ID NO: 533 - DNA, 80 bp, synthetic construct
  misc_feature 1..80: note = Synthetic: >SBB-130-cand-25350-25429
  source 1..80: mol_type = other DNA
ctgaacgcacgttcaaacacaggttgggctttctttgttagaattaaaaacggcgactactctgctgtcacgagtcatgt

SEQ ID NO: 534 - DNA, 80 bp, synthetic construct
  misc_feature 1..80: note = Synthetic: >SBB-010-cand-25360-25439
  source 1..80: mol_type = other DNA
gttcaaacacaggttgggctttctttgttagaattaaaaacggcgactactctgctgtcacgagtcatgtagatacgatg

SEQ ID NO: 535 - DNA, 80 bp, synthetic construct
  misc_feature 1..80: note = Synthetic: >SBB-053-cand-25350-25429
  source 1..80: mol_type = other DNA
tccaacacaggatgggctttttatgtcagatccaaaaacggcgactactctgctgtcacgagtcatgtagatacgatgac

SEQ ID NO: 536 - DNA, 80 bp, synthetic construct
  misc_feature 1..80: note = Synthetic: >SBB-797-cand-8960-9039
  source 1..80: mol_type = other DNA
ggccttatcctatgttacctagtatttatgctatggcatttttatatgcgacttgctactttggtagtgacatcgcatgt

SEQ ID NO: 537 - DNA, 80 bp, synthetic construct
  misc_feature 1..80: note = Synthetic: >SBB-747-cand-8950-9029
  source 1..80: mol_type = other DNA
tgcttagaggggccctatcctatgttacctagtatttatgctatggcatttttatatgcgacttgctactttggtagtga

SEQ ID NO: 538 - DNA, 80 bp, synthetic construct
  misc_feature 1..80: note = Synthetic: >SBB-747-cand-3750-3829
  source 1..80: mol_type = other DNA
tgcacaaagtgaagttgcaccctcagacgcatctggaagtgtgttggtagatgtagtgtcaatgtctttttctgccatgt

SEQ ID NO: 539 - DNA, 80 bp, synthetic construct
  misc_feature 1..80: note = Synthetic: >SBB-747-cand-13510-13589
  source 1..80: mol_type = other DNA
ttatagagggaccggctggtgctggtgtagctgttatggatacttattattcattggctatgcctatttataccatgacc

SEQ ID NO: 540 - DNA, 80 bp, synthetic construct
  misc_feature 1..80: note = Synthetic: >SBB-788-cand-13520-13599
  source 1..80: mol_type = other DNA
accggctggtgctggtgtagctgttatggatacttattattcattggctatgcctatttataccatgaccgatatgttgg

SEQ ID NO: 541 - DNA, 80 bp, synthetic construct
  misc_feature 1..80: note = Synthetic: >SBB-797-cand-11440-11519
  source 1..80: mol_type = other DNA
attaatttggatgagttatgtaacagtatattggagaacaatactgtgcttcaagctgttgctagtgaatttagcaatct

SEQ ID NO: 542 - DNA, 80 bp, synthetic construct
  misc_feature 1..80: note = Synthetic: >SBB-747-cand-11430-11509
  source 1..80: mol_type = other DNA
accgggagcaattaatttggatgagttatgtaacagtatattggagaacaatactgtgcttcaggctgttgctagtgaat

SEQ ID NO: 543 - DNA, 80 bp, synthetic construct
  misc_feature 1..80: note = Synthetic: >SBB-053-cand-17070-17149
  source 1..80: mol_type = other DNA
tagtggtgatttggcagtccaagtaggtgctaatggtgtctgcaagtatgaacatgttatctcttttatgggatttaggt

SEQ ID NO: 544 - DNA, 80 bp, synthetic construct
  misc_feature 1..80: note = Synthetic: >SBB-120-cand-17080-17159
  source 1..80: mol_type = other DNA
ttggcagttcaagtaggtgctaatggtgtctgcaattatgaacatgttatctcttttatgggatttaggtttgacactaa

SEQ ID NO: 545 - DNA, 80 bp, synthetic construct
  misc_feature 1..80: note = Synthetic: >SBB-788-cand-12640-12719
  source 1..80: mol_type = other DNA
gcatcttgctgcttgtactgtaggtgccatattgagcatcctggtgcgagcggtgtgtgtaagtacaaaggcaagttcgt

SEQ ID NO: 546 - DNA, 80 bp, synthetic construct
  misc_feature 1..80: note = Synthetic: >SBB-726-cand-12630-12709
  source 1..80: mol_type = other DNA
ttttggtggtgcatcttgctgcttgtactgtaggtgccatattgagcatcctggtgcgagtggtgtgtgtaagtacaaag

SEQ ID NO: 547 - DNA, 80 bp, synthetic construct
  misc_feature 1..80: note = Synthetic: >SBB-130-cand-9060-9139
  source 1..80: mol_type = other DNA
cacctcctactattagttataactctactcttcaatctggtttgaaacggatggcacaaccatctggtttggtagagcgt

SEQ ID NO: 548 - DNA, 80 bp, synthetic construct
  misc_feature 1..80: note = Synthetic: >SBB-130-cand-24000-24079
  source 1..80: mol_type = other DNA
tgtttgcgctctactttgcactgttcaaaagctccaacttccgtatcaactacggtttgctgttgcttagagtgcttaca

SEQ ID NO: 549 - DNA, 80 bp, synthetic construct
  misc_feature 1..80: note = Synthetic: >SBB-010-cand-24000-24079
  source 1..80: mol_type = other DNA
tgtttgcactttactttgcactgttcaaaagctccaacttccgtatcaactacggtttgctgctgcttagagtgcttaca

SEQ ID NO: 550 - DNA, 80 bp, synthetic construct
  misc_feature 1..80: note = Synthetic: >SBB-041-cand-23990-24069
  source 1..80: mol_type = other DNA
gcgctctactttgcactgttcaaaagctccaacttccgtatcaactacggtttgctgctgcttagagtgcttacattgct

SEQ ID NO: 551 - DNA, 80 bp, synthetic construct
  misc_feature 1..80: note = Synthetic: >SBB-747-cand-1190-1269
  source 1..80: mol_type = other DNA
tgaaagacatgggtactgtagtgtgcctatgtggtgcagaatatcagttaacatcttcttgtgttgatgctgaatctgct

SEQ ID NO: 552 - DNA, 80 bp, synthetic construct
  misc_feature 1..80: note = Synthetic: >SBB-788-cand-1200-1279
  source 1..80: mol_type = other DNA
gggtactgtagtgtgcctatgtggtgcagagtatcagctaacatcttcttgtgttgatgctgaatctgctggtctgatta

SEQ ID NO: 553 - DNA, 80 bp, synthetic construct
  misc_feature 1..80: note = Synthetic: >SBB-130-cand-8900-8979
  source 1..80: mol_type = other DNA
agcatcgcacctgagaaacttaaacaatttgctgccagctataataagtataaatattatagcggcagcgctagtgaagc

SEQ ID NO: 554 - DNA, 80 bp, synthetic construct
  misc_feature 1..80: note = Synthetic: >SBB-010-cand-8910-8989
  source 1..80: mol_type = other DNA
cacctgagaaacttaaacaatttgctgccagttataataagtacaaatattatagcggcagcgctagtgaagctgactat

SEQ ID NO: 555 - DNA, 80 bp, synthetic construct
  misc_feature 1..80: note = Synthetic: >SBB-788-cand-8880-8959
  source 1..80: mol_type = other DNA
agcatttggtgattattcaggggtcatttttgcaaatatagtggcctttgtattaaatgttatagtgctgtgcttagagg

SEQ ID NO: 556 - DNA, 80 bp, synthetic construct
  misc_feature 1..80: note = Synthetic: >SBB-797-cand-8890-8969
  source 1..80: mol_type = other DNA
gattattcaggggtcatttttgcaaatatagtggcctttgtattaaatgttatagtgctgtgcttagaggggccttatcc

SEQ ID NO: 557 - DNA, 80 bp, synthetic construct
  misc_feature 1..80: note = Synthetic: >SBB-747-cand-8870-8949
  source 1..80: mol_type = other DNA
gctttagaagagcatttggtgattattcaggggtcatttttgcaaatatagtggcctttgtattaaatgttatagtgctg

SEQ ID NO: 558 - DNA, 80 bp, synthetic construct
  misc_feature 1..80: note = Synthetic: >PDF-2386-cand-8960-9039
  source 1..80: mol_type = other DNA
cgtcctgacactagatatgtgttgatggacggttcaatcatacaattccctaacacctaccttgagggctctgttagagt

SEQ ID NO: 559 - DNA, 80 bp, synthetic construct
  misc_feature 1..80: note = Synthetic: >PRD-0038-cand-5440-5519
  source 1..80: mol_type = other DNA
ctatgatgaacttaaacaaggagttaaaaatccttgtgtttgtggcagagatgctgtacaatatttagtacaacaagagt

SEQ ID NO: 560 - DNA, 80 bp, synthetic construct
  misc_feature 1..80: note = Synthetic: >SBB-726-cand-19860-19939
  source 1..80: mol_type = other DNA
actgcatctagtaagcaggtatgtagtgtttttgacatggttttagatgactttattgagcttataagggctcaagatag

SEQ ID NO: 561 - DNA, 80 bp, synthetic construct
  misc_feature 1..80: note = Synthetic: >SBB-788-cand-19850-19929
  source 1..80: mol_type = other DNA
agaccagccaactgcatctagtaagcaggtatgtagtgtctttgacatggttttagatgattttattgagcttataaggg

SEQ ID NO: 562 - DNA, 80 bp, synthetic construct
  misc_feature 1..80: note = Synthetic: >PDF-2386-cand-16000-16079
  source 1..80: mol_type = other DNA
tcagttatgcttacaaatgataacacttccaggtactgggaaccagagttttatgaagctatgtacacaccacacacagt

SEQ ID NO: 563 - DNA, 80 bp, synthetic construct
  misc_feature 1..80: note = Synthetic: >PRD-0038-cand-15990-16069
  source 1..80: mol_type = other DNA
agacatgtattcagttatgcttacaaatgataacacttccaggtactgggaaccagagttttatgaagctatgtacacac

SEQ ID NO: 564 - DNA, 80 bp, synthetic construct
  misc_feature 1..80: note = Synthetic: >SBB-120-cand-12080-12159
  source 1..80: mol_type = other DNA
gtcaagcgtggttgtaagcctgtaggtaattgtgtgaaaatgttgtctaatggttctggtactggtcaagctataacagt

SEQ ID NO: 565 - DNA, 80 bp, synthetic construct
  misc_feature 1..80: note = Synthetic: >SBB-024-cand-12070-12149
  source 1..80: mol_type = other DNA
tcttgatgctgtcaagcgtggttgtaagcctgtaggtaattgtgtgaaaatgctgtctaatggttctggtactggtcaag

SEQ ID NO: 566 - DNA, 80 bp, synthetic construct
  misc_feature 1..80: note = Synthetic: >SBB-010-cand-14190-14269
  source 1..80: mol_type = other DNA
acttattgatggtgtggagaacccttgtcttatgggttgggattatcctaagtgtgatagagctttgcctaacatgatta

SEQ ID NO: 567 - DNA, 80 bp, synthetic construct
  misc_feature 1..80: note = Synthetic: >PDF-2370-cand-16160-16239
  source 1..80: mol_type = other DNA
tatgttgcaaatgctgttatgaccatgttatttcaacatcacataaattagtgttgtctgttaatccctatgtttgcaat

SEQ ID NO: 568 - DNA, 80 bp, synthetic construct
  misc_feature 1..80: note = Synthetic: >PRD-0038-cand-11200-11279
  source 1..80: mol_type = other DNA
gacagcccgtactgtctatgatgacgcagcaagacgtgtttggacatttatgaatgtcataacacttgtttataaagtct

SEQ ID NO: 569 - DNA, 80 bp, synthetic construct
  misc_feature 1..80: note = Synthetic: >SBB-130-cand-7860-7939
  source 1..80: mol_type = other DNA
agacttggttccatgctaagtttggttttgtgccacgtaatagtagacgctgtcctatagtcgtaggtgtgtcagaggaa

SEQ ID NO: 570 - DNA, 80 bp, synthetic construct
  misc_feature 1..80: note = Synthetic: >SBB-041-cand-7870-7949
  source 1..80: mol_type = other DNA
gttccatgctaagtttggttttgtgccacgtaatagtagacgctgtcccatagtcgtaggtgtgtcagaggaatctcgct

SEQ ID NO: 571 - DNA, 80 bp, synthetic construct
  misc_feature 1..80: note = Synthetic: >SBB-130-cand-7060-7139
  source 1..80: mol_type = other DNA
agattttatagtttataacaacaatggtagtaatgtgtcacaggttcgtaatgcatgtgtttatttctctcaactgctct

SEQ ID NO: 572 - DNA, 80 bp, synthetic construct
  misc_feature 1..80: note = Synthetic: >SBB-053-cand-7070-7149
  source 1..80: mol_type = other DNA
atagtttataacaacaatggtagtaatgtgtcacaggttcgtaatgcatgtgtttatttctctcaactgctctgtaaacc

SEQ ID NO: 573 - DNA, 80 bp, synthetic construct
  misc_feature 1..80: note = Synthetic: >PDF-2386-cand-16720-16799
  source 1..80: mol_type = other DNA
agaggtactacaacatacaagcttaatgttggtgattactttgtgttaacttcgcacactgtaatgcccttaacagctcc

SEQ ID NO: 574 - DNA, 80 bp, synthetic construct
  misc_feature 1..80: note = Synthetic: >PRD-0038-cand-16710-16789
  source 1..80: mol_type = other DNA
tgtagtctacagaggtactacaacatacaagcttaatgttggtgattactttgtgttaacttcgcacactgtaatgccct

SEQ ID NO: 575 - DNA, 80 bp, synthetic construct
  misc_feature 1..80: note = Synthetic: >SBB-122-cand-26980-27059
  source 1..80: mol_type = other DNA
tcttatactgcttctgttctttctatttctaacttgtttgctaggctatggctttgccctctaactagcaaacctactct

SEQ ID NO: 576 - DNA, 80 bp, synthetic construct
  misc_feature 1..80: note = Synthetic: >SBB-120-cand-27010-27089
  source 1..80: mol_type = other DNA
ctgcttctgttctttctatttctaacttgtttgctaggctatggctttgccctctaactagcaaacctactcttatacag

SEQ ID NO: 577 - DNA, 80 bp, synthetic construct
  misc_feature 1..80: note = Synthetic: >SBB-024-cand-26990-27069
  source 1..80: mol_type = other DNA
ttagttcttatactgcttctgttctttctatttctaacttgtttgctaggctatggcttcgccctctaactagcaaacct

SEQ ID NO: 578 - DNA, 80 bp, synthetic construct
  misc_feature 1..80: note = Synthetic: >PDF-2370-cand-2080-2159
  source 1..80: mol_type = other DNA
agtagaacagtggctaacccagctactgggttcactgtcagacagtctgaagacagtcttgacttggttagaacagagat

SEQ ID NO: 579 - DNA, 80 bp, synthetic construct
  misc_feature 1..80: note = Synthetic: >SBB-726-cand-7610-7689
  source 1..80: mol_type = other DNA
atttggagtcagatgttgacactaatgacgtggtttcttgtattcgtttgtgccatcaggaaggatgggactggtctact

SEQ ID NO: 580 - DNA, 80 bp, synthetic construct
  misc_feature 1..80: note = Synthetic: >SBB-797-cand-7600-7679
  source 1..80: mol_type = other DNA
gaggctaaagatttggagtcagatgttgacactaatgacgtggtttcttgtattcgtttgtgccaccaggaaggatggga

SEQ ID NO: 581 - DNA, 80 bp, synthetic construct
  misc_feature 1..80: note = Synthetic: >PDF-2386-cand-18240-18319
  source 1..80: mol_type = other DNA
agtagcagttcctactggctatgtagacacatgtaatgccacagagttcacaagagtgaatgctaaaccaccacctggtg

SEQ ID NO: 582 - DNA, 80 bp, synthetic construct
  misc_feature 1..80: note = Synthetic: >PRD-0038-cand-18230-18309
  source 1..80: mol_type = other DNA
gtgtcaatttagtagcagttcctactggctatgtagacacatgtaatgccacagagttcacaagagtgaatgctaaacca

SEQ ID NO: 583 - DNA, 80 bp, synthetic construct
  misc_feature 1..80: note = Synthetic: >PDF-2386-cand-5760-5839
  source 1..80: mol_type = other DNA
ataaactggacggagttacctatacagaaataaatccaaaattagatgggtattataagaaggacaatgcttactatact

SEQ ID NO: 584 - DNA, 80 bp, synthetic construct
  misc_feature 1..80: note = Synthetic: >SBB-122-cand-9190-9269
  source 1..80: mol_type = other DNA
gttaggtgatgttgttatatgccctagacatgtgatagcttcatctaccacaagtcatatagattatgaccatgaatact

SEQ ID NO: 585 - DNA, 80 bp, synthetic construct
  misc_feature 1..80: note = Synthetic: >SBB-120-cand-9180-9259
  source 1..80: mol_type = other DNA
atggtttgtggttaggtgatgttgttatatgccctagacatgtaatagcttcatccaccacaagtcatatcgattatgac

SEQ ID NO: 586 - DNA, 80 bp, synthetic construct
  misc_feature 1..80: note = Synthetic: >SBB-797-cand-18320-18399
  source 1..80: mol_type = other DNA
agttaattgggatgtggagtatccaattatagctaatgagttagctataaataaggcctgtcgtagtgtgcagcgagttg

SEQ ID NO: 587 - DNA, 80 bp, synthetic construct
  misc_feature 1..80: note = Synthetic: >GCS-227-cand-28450-28529
  source 1..80: mol_type = other DNA
tcccagcagggcttacaatgtcatccagtgtaattaatcagaattgtggttgattgaagttcccatttcttaaaaatttt

SEQ ID NO: 588 - DNA, 80 bp, synthetic construct
  misc_feature 1..80: note = Synthetic: >GCS-211-cand-28450-28529
  source 1..80: mol_type = other DNA
aaccccagcagggcttacaatgtcatccagtgtaattaatcagaacagtggttgattgaagttcccatttcttaaaaatt

SEQ ID NO: 589 - DNA, 80 bp, synthetic construct
  misc_feature 1..80: note = Synthetic: >GCS-227-cand-8720-8799
  source 1..80: mol_type = other DNA
aaacaaggtgtctgttttggtgctgaccgctggcttgtttataatgatgaaactggtgcagacttcgtttgtggtagttc

SEQ ID NO: 590 - DNA, 80 bp, synthetic construct
  misc_feature 1..80: note = Synthetic: >GCS-211-cand-8720-8799
  source 1..80: mol_type = other DNA
cgaaacaaggtgtctgttttggtgctgaccgctggcttgtttataatgatgaaactggtgcagactttgtttgtggtagt

SEQ ID NO: 591 - DNA, 80 bp, synthetic construct
  misc_feature 1..80: note = Synthetic: >SBB-010-cand-21520-21599
  source 1..80: mol_type = other DNA
aaacaccttttcttgtccctggttcatgcttcggttgggagtggttagacaggcagaacaaaacttacaagtggtggatt

SEQ ID NO: 592 - DNA, 80 bp, synthetic construct
  misc_feature 1..80: note = Synthetic: >GCS-211-cand-4250-4329
  source 1..80: mol_type = other DNA
aaacagaacctgaacctgttattaaacctttcttggtgtacaaaaatattgagttctaccagggtgctataggcgagtta

SEQ ID NO: 593 - DNA, 80 bp, synthetic construct
  misc_feature 1..80: note = Synthetic: >GCS-227-cand-4250-4329
  source 1..80: mol_type = other DNA
acagaacctgaacctgttattaaacctttcttggtgtacaaaaatattgagttctaccagggtgctataggcgagttagt

SEQ ID NO: 594 - DNA, 80 bp, synthetic construct
  misc_feature 1..80: note = Synthetic: >GCS-227-cand-13670-13749
  source 1..80: mol_type = other DNA
gacaggattatcaccctaattgttgtgattgctacgatgaactttgtatagttcattgtgccaattttaacaccctgttt

SEQ ID NO: 595 - DNA, 80 bp, synthetic construct
  misc_feature 1..80: note = Synthetic: >GCS-211-cand-13670-13749
  source 1..80: mol_type = other DNA
gggacaagattatcaccctaattgttgtgattgctacgatgaactttgtatagttcattgtgccaattttaacaccctgt

SEQ ID NO: 596 - DNA, 80 bp, synthetic construct
  misc_feature 1..80: note = Synthetic: >GCS-227-cand-24210-24289
  source 1..80: mol_type = other DNA
tctgcaccagaaggcttcattttctttcacacagtgctggtgcctagctcacatattacagttagagcatttgctggttt

SEQ ID NO: 597 - DNA, 80 bp, synthetic construct
  misc_feature 1..80: note = Synthetic: >GCS-211-cand-24220-24299
  source 1..80: mol_type = other DNA
agaaggcttcattttctttcacacagtgctggtgcctagctcacatattacagttagagcatttgctggtttctgctatg

SEQ ID NO: 598 - DNA, 80 bp, synthetic construct
  misc_feature 1..80: note = Synthetic: >SBB-120-cand-15900-15979
  source 1..80: mol_type = other DNA
aaaccaggaacgctactcttctatacataagttgcatcctagtttcaatattagtgaagcttactccacacttgtgccat

SEQ ID NO: 599 - DNA, 80 bp, synthetic construct
  misc_feature 1..80: note = Synthetic: >GCS-227-cand-11990-12069
  source 1..80: mol_type = other DNA
aaaccagtacaccaaaaggaattagttaaatcacaagaagaagaacttaactggccactccactttgagtgtgagcgtgt

SEQ ID NO: 600 - DNA, 80 bp, synthetic construct
  misc_feature 1..80: note = Synthetic: >GCS-211-cand-12000-12079
  source 1..80: mol_type = other DNA
acaccaaaaggaattagttaaatcacaagaagaagaacttaactggccactccactttgagtgtgagcgtgttgttaagt

SEQ ID NO: 601 - DNA, 80 bp, synthetic construct
  misc_feature 1..80: note = Synthetic: >229E-cand-15380-15459
  source 1..80: mol_type = other DNA
tgcactaagtgtgcttatgatcatgtgtttggcactgatcataagttcattttggctattacaccttatgtttgtaacac

SEQ ID NO: 602 - DNA, 80 bp, synthetic construct
  misc_feature 1..80: note = Synthetic: >229E-cand-15460-15539
  source 1..80: mol_type = other DNA
atctggttgcaatgtaaacgacgttacaaaactgtatcttggaggtttgaattattactgtgtagatcacaaaccacatt

SEQ ID NO: 603 - DNA, 80 bp, synthetic construct
  misc_feature 1..80: note = Synthetic: >229E-cand-15540-15619
  source 1..80: mol_type = other DNA
tgtcattcccactgtgttcagctggtaatgtctttggtttgtacaaaagttctgctttgggttccatagacgttgatgtt

SEQ ID NO: 604 - DNA, 80 bp, synthetic construct
  misc_feature 1..80: note = Synthetic: >229E-cand-15620-15699
  source 1..80: mol_type = other DNA
tttaataagctttctacttctgattggtctgacattcgtgactataagttagctaatgaagctaaagagtcactaaggct

SEQ ID NO: 605 - DNA, 80 bp, synthetic construct
  misc_feature 1..80: note = Synthetic: >229E-cand-15700-15779
  source 1..80: mol_type = other DNA
atttgcagctgaaactgtcaaagctaaggaggaaagtgttaagtcatcatatgcttatgccaccctaaaggagattgtag

SEQ ID NO: 606 - DNA, 80 bp, synthetic construct
  misc_feature 1..80: note = Synthetic: >229E-cand-15780-15859
  source 1..80: mol_type = other DNA
gtcctaaggaacttttgctctcatgggaaagtggaaaagccaaaccaccgttaaaccgtaattctgtatttacttgcttc

SEQ ID NO: 607 - DNA, 80 bp, synthetic construct
  misc_feature 1..80: note = Synthetic: >229E-cand-15860-15939
  source 1..80: mol_type = other DNA
caaattacaaaggactccaagtttcaagttggtgaatttgtgtttgagaaagtagattatggttctgatacggtgacgta

SEQ ID NO: 608 - DNA, 80 bp, synthetic construct
  misc_feature 1..80: note = Synthetic: >229E-cand-15940-16019
  source 1..80: mol_type = other DNA
caaatccactgccactactaagttagtaccaggtatgttatttattttgacttctcataatgttgctccacttagagcac

SEQ ID NO: 609 - DNA, 80 bp, synthetic construct
  misc_feature 1..80: note = Synthetic: >229E-cand-16020-16099
  source 1..80: mol_type = other DNA
caactatggctaatcaggaaaaatattccaccatttacaagttgcacccatcatttaatgttagtgatgcttatgcaaac

SEQ ID NO: 610 - DNA, 80 bp, synthetic construct
  misc_feature 1..80: note = Synthetic: >229E-cand-16100-16179
  source 1..80: mol_type = other DNA
cttgtaccttactaccaactcattggtaaacaacgcattactacaatacagggtccccctggtagtggtaagtctcattg

SEQ ID NO: 611 - DNA, 80 bp, synthetic construct
  misc_feature 1..80: note = Synthetic: >229E-cand-16180-16259
  source 1..80: mol_type = other DNA
ttctatcggtattggtgtgtattatcctggagcaagaattgtgttcacagcttgttcacatgctgctgttgattcgttgt

SEQ ID NO: 612 - DNA, 80 bp, synthetic construct
  misc_feature 1..80: note = Synthetic: >229E-cand-16260-16339
  source 1..80: mol_type = other DNA
gtgcaaaagctgccacagcttacagcgttgacaagtgtacacgtattattcctgcacgtgctagagttgagtgttatagt

SEQ ID NO: 613 - DNA, 80 bp, synthetic construct
  misc_feature 1..80: note = Synthetic: >229E-cand-16340-16419
  source 1..80: mol_type = other DNA
ggttttaaacctaataataatagtgcacaatatgtgtttagtactgttaatgcgctacctgaagttaacgcagacattgt

SEQ ID NO: 614 - DNA, 80 bp, synthetic construct
  misc_feature 1..80: note = Synthetic: >229E-cand-16420-16499
  source 1..80: mol_type = other DNA
tgtcgtagatgaagtgtctatgtgcactaactatgatttgtctgtgattaaccagcgtatatcatacaaacacattgtgt

SEQ ID NO: 615 - DNA, 80 bp, synthetic construct
  misc_feature 1..80: note = Synthetic: >229E-cand-16500-16579
  source 1..80: mol_type = other DNA
atgttggtgatcctcaacagctgccagctcctagagttcttatctctaaaggtgttatggaaccaatcgattataatgtt

SEQ ID NO: 616 - DNA, 80 bp, synthetic construct
  misc_feature 1..80: note = Synthetic: >229E-cand-16580-16659
  source 1..80: mol_type = other DNA
gtgacacagcgtatgtgtgctataggacctgatgtctttttacacaagtgttacagatgtcctgctgaaatagttaacac

SEQ ID NO: 617 - DNA, 80 bp, synthetic construct
  misc_feature 1..80: note = Synthetic: >229E-cand-24330-24409
  source 1..80: mol_type = other DNA
ttcaaagcaagatctaatcgaggaagagtagctcttatagtgtttaaaattttaatcctcttcgtttatgtaccattgct

SEQ ID NO: 618 - DNA, 80 bp, synthetic construct
  misc_feature 1..80: note = Synthetic: >229E-cand-24410-24489
  source 1..80: mol_type = other DNA
gtattggtctcaagcttacattgatgcgacgttgatcgctgtaattttgcttggaaggtttttccatacagcttggtact

SEQ ID NO: 619 - DNA, 80 bp, synthetic construct
  misc_feature 1..80: note = Synthetic: >229E-cand-24490-24569
  source 1..80: mol_type = other DNA
gttggctgtacaaaacatgggatttcatagtcttcaatgtaaccacactttgctatgtgcaaggcaaatgttggtttctt

SEQ ID NO: 620 - DNA, 80 bp, synthetic construct
  misc_feature 1..80: note = Synthetic: >229E-cand-24570-24649
  source 1..80: mol_type = other DNA
gaaaataaggctttgaaaccatttgtgtgcttctacggaggggaccaatttctttacataggtgacagagttgtttccta

SEQ ID NO: 621 - DNA, 80 bp, synthetic construct
  misc_feature 1..80: note = Synthetic: >229E-cand-24650-24729
  source 1..80: mol_type = other DNA
tgtctcaactaacgatttatacgttgctcttagaggacgtattgacagagatcttagcctttctagaaaggttgatcttt

SEQ ID NO: 622 - DNA, 80 bp, synthetic construct
  misc_feature 1..80: note = Synthetic: >229E-cand-24730-24809
  source 1..80: mol_type = other DNA
ataacggtgaatgtgtatactttttttgtgaacacccagctgtcggaatagttaatacagattttaaattggaaatttat

SEQ ID NO: 623 - DNA, 80 bp, synthetic construct
  misc_feature 1..80: note = Synthetic: >229E-cand-24810-24889
  source 1..80: mol_type = other DNA
gaagatgtttctgaagctagtggatgatcatgctttagttgtaaatgtaatactgtggtgcgtagtacttatagtacttt

SEQ ID NO: 624 - DNA, 80 bp, synthetic construct
  misc_feature 1..80: note = Synthetic: >229E-cand-24890-24969
  source 1..80: mol_type = other DNA
tgctagtttgtattacaattattaaactaattaaattatgttttacatgccatatgttttgtaataaaacgatttatggt

SEQ ID NO: 625 - DNA, 80 bp, synthetic construct
  misc_feature 1..80: note = Synthetic: >229E-cand-24970-25049
  source 1..80: mol_type = other DNA
cccattaaaaatgtgtatcacatttaccaatcatacatgcacatagaccctttccctagacaaattattgatgtctaaac

SEQ ID NO: 626 - DNA, 80 bp, synthetic construct
  misc_feature 1..80: note = Synthetic: >229E-cand-25050-25129
  source 1..80: mol_type = other DNA
taaacgacaatgactgaagctaatattactcaggaggagttggtaactcacctgaaaaattggaattttagttggaatat

SEQ ID NO: 627 - DNA, 80 bp, synthetic construct
  misc_feature 1..80: note = Synthetic: >229E-cand-25130-25209
  source 1..80: mol_type = other DNA
tattctaactattttcattgtcattcttcagtttggccattataaatactcaagaatcttttatggtctgaagatgctag

SEQ ID NO: 628 - DNA, 80 bp, synthetic construct
  misc_feature 1..80: note = Synthetic: >229E-cand-25210-25289
  source 1..80: mol_type = other DNA
ttttgtggcttttgtggccacttgtacttgcactttcaatctttgacacttgggcaaactggggatccaactgggccttt

SEQ ID NO: 629 - DNA, 80 bp, synthetic construct
  misc_feature 1..80: note = Synthetic: >229E-cand-25290-25369
  source 1..80: mol_type = other DNA
gtcgcattcagcctttttatggccgtatcaacactcattatgtgggtgatgtatttcgtaaatagtttcagacttttccg

SEQ ID NO: 630 - DNA, 80 bp, synthetic construct
  misc_feature 1..80: note = Synthetic: >229E-cand-25370-25449
  source 1..80: mol_type = other DNA
acgtgctcgaactttttgggcatggaatccggaagtgaatgcaatcacagtcacaaccgtgctgggacagacgtactacc

SEQ ID NO: 631 - DNA, 80 bp, synthetic construct
  misc_feature 1..80: note = Synthetic: >229E-cand-25450-25529
  source 1..80: mol_type = other DNA
aacccattcaacaagctccaacaggcattacggtgaccttgttgagcggcgtgctttacgtggacggacatagattggct

SEQ ID NO: 632 - DNA, 80 bp, synthetic construct
  misc_feature 1..80: note = Synthetic: >229E-cand-25530-25609
  source 1..80: mol_type = other DNA
tcaggtgttcaggttcataacctacctgaacacatgacagttgccgtgccgagcactactataatttatagtagagtcgg

SEQ ID NO: 633 - DNA, 80 bp, synthetic construct
  misc_feature 1..80: note = Synthetic: >AvianCoV-cand-7400-7479
  source 1..80: mol_type = other DNA
ttttacagtgtgttgtttgggttattatcatttggaaatgagtagaaattttgctcatcccatgtatgatgttaactcca

SEQ ID NO: 634 - DNA, 80 bp, synthetic construct
  misc_feature 1..80: note = Synthetic: >AvianCoV-cand-7480-7559
  source 1..80: mol_type = other DNA
caatgcatgtagaagggtttaaggttatagataagggtgttcttagggatattgtgccagaagacacttgtttctctaat

SEQ ID NO: 635 - DNA, 80 bp, synthetic construct
  misc_feature 1..80: note = Synthetic: >AvianCoV-cand-7560-7639
  source 1..80: mol_type = other DNA
aagtatgttaattttgacgcattttggggtaaaccatatgtaaatagtagagactgtccaattgtaaccgctattataga

SEQ ID NO: 636 - DNA, 80 bp, synthetic construct
  misc_feature 1..80: note = Synthetic: >AvianCoV-cand-7640-7719
  source 1..80: mol_type = other DNA
tggtgctggaacagtagctgctggtgttcctggttttgtacagtgggttatggatggtgtaatgtttatacatatgacac

SEQ ID NO: 637 - DNA, 80 bp, synthetic construct
  misc_feature 1..80: note = Synthetic: >AvianCoV-cand-7720-7799
  source 1..80: mol_type = other DNA
agactgagcgaaaaccgtggtatattcctacttggtttaatagagaaattgttggttacactcaggattcaattattact

SEQ ID NO: 638 - DNA, 80 bp, synthetic construct
  misc_feature 1..80: note = Synthetic: >AvianCoV-cand-7800-7879
  source 1..80: mol_type = other DNA
gaaggtggtttttatacatctatagcattgtttgctgctagatgtttgtatttaacagctagcaatacaccacaattgta

SEQ ID NO: 639 - DNA, 80 bp, synthetic construct
  misc_feature 1..80: note = Synthetic: >AvianCoV-cand-7880-7959
  source 1..80: mol_type = other DNA
ttgttttaatggtgataatgatgctcctggtgctttaccatttggaagtatacttcctcatagagtatactttcaaccta

SEQ ID NO: 640 - DNA, 80 bp, synthetic construct
  misc_feature 1..80: note = Synthetic: >AvianCoV-cand-7960-8039
  source 1..80: mol_type = other DNA
atggtgttaggcttatagtgcctcaacaaataatgcacacaccatacatagttaagtttgtttcagacagctattgtaga

SEQ ID NO: 641 - DNA, 80 bp, synthetic construct
  misc_feature 1..80: note = Synthetic: >AvianCoV-cand-8040-8119
  source 1..80: mol_type = other DNA
ggtagtgtttgtgagtatactaaaccaggttattgtgtctcaatgaactctcaatgggttttgtttaatgatgaatacac

SEQ ID NO: 642 - DNA, 80 bp, synthetic construct
  misc_feature 1..80: note = Synthetic: >AvianCoV-cand-8120-8199
  source 1..80: mol_type = other DNA
aattaaaccaggcgtgttttgtggttctactgttagagaacttttgtttaatatggttagtacattctttacgggtgtta

SEQ ID NO: 643 - DNA, 80 bp, synthetic construct
  misc_feature 1..80: note = Synthetic: >AvianCoV-cand-8200-8279
  source 1..80: mol_type = other DNA
atcctaatatttatatgcaattggcaactatgttcttaatactagttgctgttgtgttagtttttgcaatggttataaag

SEQ ID NO: 644 - DNA, 80 bp, synthetic construct
  misc_feature 1..80: note = Synthetic: >AvianCoV-cand-8280-8359
  source 1..80: mol_type = other DNA
tttcaaggtgtttttaaagcttatgcaaccactgtatttacaataatgctagtttgggttattaatgcatttgtattatg

SEQ ID NO: 645 - DNA, 80 bp, synthetic construct
  misc_feature 1..80: note = Synthetic: >AvianCoV-cand-8360-8439
  source 1..80: mol_type = other DNA
tgtacatagttataatagtgttttagctgttatactacttgtactctattgttatgcatcacttgtgacaagtcgtaata

SEQ ID NO: 646 - DNA, 80 bp, synthetic construct
  misc_feature 1..80: note = Synthetic: >AvianCoV-cand-8440-8519
  source 1..80: mol_type = other DNA
ctgctataataatgcattgttggcttgtttttacatttggtttaatagtacctatttggatagcttgttgctacctagga

SEQ ID NO: 647 - DNA, 80 bp, synthetic construct
  misc_feature 1..80: note = Synthetic: >AvianCoV-cand-8520-8599
  source 1..80: mol_type = other DNA
tttgttctatatatgtatacaccactgtttttctggtgttatggtactactaaaaattctcgtaagctttatgatggcaa

SEQ ID NO: 648 - DNA, 80 bp, synthetic construct
  misc_feature 1..80: note = Synthetic: >AvianCoV-cand-8600-8679
  source 1..80: mol_type = other DNA
cgagtttgttggtaattatgatcttgctgcgaagagtacttttgttattcgcggtcctgaatttgttaagcttacgaatg

SEQ ID NO: 649 - DNA, 80 bp, synthetic construct
  misc_feature 1..80: note = Synthetic: >Beluga-cand-9980-10059
  source 1..80: mol_type = other DNA
tttccatgactttttgaagtatgttggaattgaggctacacatcaatatgcttggatgctgctaccatttgcgctttacg

SEQ ID NO: 650 - DNA, 80 bp, synthetic construct
  misc_feature 1..80: note = Synthetic: >Beluga-cand-10060-10139
  source 1..80: mol_type = other DNA
tggcatataatgtagcgaagggcgtgggttcaacattgattaacttcaatgctggtggtattagcttgtggaactcgctt

SEQ ID NO: 651 - DNA, 80 bp, synthetic construct
  misc_feature 1..80: note = Synthetic: >Beluga-cand-10140-10219
  source 1..80: mol_type = other DNA
gtgtatggtatgcgatggggtagtacacttcgctttttgtacacagcactgatgtcagataatgtttttgagacctttgg

SEQ ID NO: 652 - DNA, 80 bp, synthetic construct
  misc_feature 1..80: note = Synthetic: >Beluga-cand-10220-10299
  source 1..80: mol_type = other DNA
gtcatctggtgagttttatattaatatgcatatggcatgtgttggtctgttttcttcagaccccgcatcaggatatatta

SEQ ID NO: 653 - DNA, 80 bp, synthetic construct
  misc_feature 1..80: note = Synthetic: >Beluga-cand-10300-10379
  source 1..80: mol_type = other DNA
taatgtggatagtaaagcaggtgaactatgtaggttacctagcttactttactgagttgagctattacacttttgtattt

SEQ ID NO: 654 - DNA, 80 bp, synthetic construct
  misc_feature 1..80: note = Synthetic: >Beluga-cand-10380-10459
  source 1..80: mol_type = other DNA
tacagttgtgtattgtgctatatgttttcatgctattttggactgttctggtttaccaataaggtgcttggtacgacttt

SEQ ID NO: 655 - DNA, 80 bp, synthetic construct
  misc_feature 1..80: note = Synthetic: >Beluga-cand-10460-10539
  source 1..80: mol_type = other DNA
tggtaagtatccttataaagtaagtgctggacaattcaaatatatgatgcttaacggtatgagaggacctaggtccactg

SEQ ID NO: 656 - DNA, 80 bp, synthetic construct
  misc_feature 1..80: note = Synthetic: >Beluga-cand-10540-10619
  source 1..80: mol_type = other DNA
ccgatgtgcttattactaacatgcggttagctggtattggtggtgaaagaaccattaccgtgtctactgtgcaatctaaa

SEQ ID NO: 657 - DNA, 80 bp, synthetic construct
  misc_feature 1..80: note = Synthetic: >Beluga-cand-10620-10699
  source 1..80: mol_type = other DNA
ttgactgatgtgaaatgtgctactgtggttttgatgcagttgctcacaaagttaaatgtggaagccaattctcgtttaca

SEQ ID NO: 658 - DNA, 80 bp, synthetic construct
  misc_feature 1..80: note = Synthetic: >Beluga-cand-10700-10779
  source 1..80: mol_type = other DNA
caagcatttggtacaaacacataatgatattttagcagagagtgatcccgctatttgcattgaaaaattaactggtatgc

SEQ ID NO: 659 - DNA, 80 bp, synthetic construct
  misc_feature 1..80: note = Synthetic: >Beluga-cand-10780-10859
  source 1..80: mol_type = other DNA
tcatgactttgttgtctattgattcaacattggacgtgaaggcattgtgtgatgaactactcgccaaggaaagtgtctta

SEQ ID NO: 660 - DNA, 80 bp, synthetic construct
  misc_feature 1..80: note = Synthetic: >Beluga-cand-10860-10939
  source 1..80: mol_type = other DNA
caggccgtcactgacgagttttgtgccttgccttcttatgtggattatgaaaaggcacgtgctgcttatgaagaaattca

SEQ ID NO: 661 - DNA, 80 bp, synthetic construct
  misc_feature 1..80: note = Synthetic: >Beluga-cand-10940-11019
  source 1..80: mol_type = other DNA
gaagaatagtactaatccccaggaaatcaaggcatacaagaaggctatgaatatagctaagtctgttcttgatagggata

SEQ ID NO: 662 - DNA, 80 bp, synthetic construct
  misc_feature 1..80: note = Synthetic: >Beluga-cand-11020-11099
  source 1..80: mol_type = other DNA
ttgcagttcaaaagaaactggatgccatggctgagagagctatgagcacaatgtataaagaagcgaagagcagtgagaag

SEQ ID NO: 663 - DNA, 80 bp, synthetic construct
  misc_feature 1..80: note = Synthetic: >Beluga-cand-11100-11179
  source 1..80: mol_type = other DNA
aagactcgtttagtctcatctcttcatgctctcttattttctatgatcaagagacttgattcagatcaggttgctgatgt

SEQ ID NO: 664 - DNA, 80 bp, synthetic construct
  misc_feature 1..80: note = Synthetic: >Beluga-cand-11180-11259
  source 1..80: mol_type = other DNA
ttttgaaaaagcaaggaatggtgtggtgcctttggctagtgtaccgattacttgttctaataaactaacaatagttattc

SEQ ID NO: 665 - DNA, 80 bp, synthetic construct
  misc_feature 1..80: note = Synthetic: >Beluga-cand-26580-26659
  source 1..80: mol_type = other DNA
gcctagcagcttctgctagtaatatgcaaatgcacttttctgttacgctagttattactagcatgttgatgtttgtgatt

SEQ ID NO: 666 - DNA, 80 bp, synthetic construct
  misc_feature 1..80: note = Synthetic: >Beluga-cand-26660-26739
  source 1..80: mol_type = other DNA
atttttgttatgctttttatgctatgtagtatacgtagacatttaatgcccaataaggggcgaacgcttataggacgtgc

SEQ ID NO: 667 - DNA, 80 bp, synthetic construct
  misc_feature 1..80: note = Synthetic: >Beluga-cand-26740-26819
  source 1..80: mol_type = other DNA
cactcgtgctataaggcgtacttttaagagcaaaaagggagggagcaaagatatggaagagcttcagcctctaaataacc

SEQ ID NO: 668 - DNA, 80 bp, synthetic construct
  misc_feature 1..80: note = Synthetic: >Beluga-cand-26820-26899
  source 1..80: mol_type = other DNA
aaatcaagcattcctcagttgaatttaaaaagaatttgctcactatgattaatgaggtggataaaattgaagcctctaga

SEQ ID NO: 669 - DNA, 80 bp, synthetic construct
  misc_feature 1..80: note = Synthetic: >Beluga-cand-26900-26979
  source 1..80: mol_type = other DNA
aaggaagagccattttacgaggaaattaaacttaagccgagtactaagaagtaccgtgcacctcagcctcctaagataag

SEQ ID NO: 670 - DNA, 80 bp, synthetic construct
  misc_feature 1..80: note = Synthetic: >Beluga-cand-26980-27059
  source 1..80: mol_type = other DNA
ctctacacctatttatattaatcatgttgggtagtaaattttacattcagatgacagcaagttttagctgtcgtaagtgg

SEQ ID NO: 671 - DNA, 80 bp, synthetic construct
  misc_feature 1..80: note = Synthetic: >Beluga-cand-27060-27139
  source 1..80: mol_type = other DNA
aagttgagcttaagcccaattgtccgtgaaagtaaagtcaccaacacttataagtttatctgtactactgagcgcttagc

SEQ ID NO: 672 - DNA, 80 bp, synthetic construct
  misc_feature 1..80: note = Synthetic: >Beluga-cand-27130-27209
  source 1..80: mol_type = other DNA
agcgcttagccaatcatttgtggggtaagtcggtcaaggtgatagtacacagagaaatttttaatagggaggattgtgat

SEQ ID NO: 673 - DNA, 80 bp, synthetic construct
  misc_feature 1..80: note = Synthetic: >Beluga-cand-27210-27289
  source 1..80: mol_type = other DNA
ggccataaattttatgagtccatccttactaggtgttttaatgatgatctcactgatgaggccgttcattatattatgca

SEQ ID NO: 674 - DNA, 80 bp, synthetic construct
  misc_feature 1..80: note = Synthetic: >Beluga-cand-27290-27369
  source 1..80: mol_type = other DNA
ttatgagcttatggagttattcacttctggttggaacaagcctaagcatgttgttaaggagaactatagttcgattattc

SEQ ID NO: 675 - DNA, 80 bp, synthetic construct
  misc_feature 1..80: note = Synthetic: >Beluga-cand-27370-27449
  source 1..80: mol_type = other DNA
tagatgttaatgagagacccatcacagacatggtggttaccgcagtggcaaaaggaaaagttcaaaatttgccaagcttc

SEQ ID NO: 676 - DNA, 80 bp, synthetic construct
  misc_feature 1..80: note = Synthetic: >Beluga-cand-27450-27529
  source 1..80: mol_type = other DNA
ggtatgcgccttatcatggagagtgaaggatttgttattaatgagaattgcattggaaatgatgcatatttaggtgttta

SEQ ID NO: 677 - DNA, 80 bp, synthetic construct
  misc_feature 1..80: note = Synthetic: >Beluga-cand-27530-27609
  source 1..80: mol_type = other DNA
aacaatgtctttttcacttcttaaggagtttcttgtgaggctatgcgggggagatgtttccgatggccaatggtttcttg

SEQ ID NO: 678 - DNA, 80 bp, synthetic construct
  misc_feature 1..80: note = Synthetic: >Beluga-cand-27610-27689
  source 1..80: mol_type = other DNA
gacgtaaaggcgttgagagtggtgctccatatggtactatgcagcttaccaaggaggccaccgaagaattgattaaagca

SEQ ID NO: 679 - DNA, 80 bp, synthetic construct
  misc_feature 1..80: note = Synthetic: >Beluga-cand-27700-27779
  source 1..80: mol_type = other DNA
caggcaacaatgatgagtgtggaaggtttcctatgccagtctgtgaccacgaagtgaaatttgctcaggattttgtcaat

SEQ ID NO: 680 - DNA, 80 bp, synthetic construct
  misc_feature 1..80: note = Synthetic: >Beluga-cand-27780-27859
  source 1..80: mol_type = other DNA
gcttttgcacaggctctattgtttaaagaagctggttgtgatgatatcggctcagatgtaggctacgaaaatggtagcaa

SEQ ID NO: 681 - DNA, 80 bp, synthetic construct
  misc_feature 1..80: note = Synthetic: >BetaSp-cand-7940-8019
  source 1..80: mol_type = other DNA
ctgttgttggtggcatgttacgctattacgatgtgatggctaatggtggcatcaacttttgtaacaaacatcagtggaat

SEQ ID NO: 682 - DNA, 80 bp, synthetic construct
  misc_feature 1..80: note = Synthetic: >BetaSp-cand-8020-8099
  source 1..80: mol_type = other DNA
tgcattggatgcgattcttacaaacctggcaatacttttataaccgtagaggctgcagctgaattgtctaaagaattcaa

SEQ ID NO: 683 - DNA, 80 bp, synthetic construct
  misc_feature 1..80: note = Synthetic: >BetaSp-cand-8100-8179
  source 1..80: mol_type = other DNA
acgcactataaatcctactgatgttacgcactatgttgtagagtgtgtgcagcaagttggttgtaaaatgcgcttgttct

SEQ ID NO: 684 - DNA, 80 bp, synthetic construct
  misc_feature 1..80: note = Synthetic: >BetaSp-cand-8180-8259
  source 1..80: mol_type = other DNA
acgagaaggatggacagcgtgtttatgatgatgtaaatgctagcatgtttgtagactttaatggtctgctgcattctaaa

SEQ ID NO: 685 - DNA, 80 bp, synthetic construct
  misc_feature 1..80: note = Synthetic: >BetaSp-cand-8260-8339
  source 1..80: mol_type = other DNA
gttaatggtgtgcctaagactaatgtagtcattgtggatggtgatgctgataaggctaactttctcaatgctgttgtctt

SEQ ID NO: 686 - DNA, 80 bp, synthetic construct
  misc_feature 1..80: note = Synthetic: >BetaSp-cand-8420-8499
  source 1..80: mol_type = other DNA
ctaagactatgttcgacgtatacgtggataccctgttgggcatgtttgaggtcgaacgcaagtcgctcaataattttatt

SEQ ID NO: 687 - DNA, 80 bp, synthetic construct
  misc_feature 1..80: note = Synthetic: >BetaSp-cand-8500-8579
  source 1..80: mol_type = other DNA
caagcagcgcacaagtctcttgcagaaggtgtgcagcttgaaaaagttttaaacacatttattggctgtgcacgaaaaat

SEQ ID NO: 688 - DNA, 80 bp, synthetic construct
  misc_feature 1..80: note = Synthetic: >BetaSp-cand-8580-8659
  source 1..80: mol_type = other DNA
ttgctctatagattctgatgttgacactggatgccttgcagacactgttatgtctacagtggccgctgggcttgacatga

SEQ ID NO: 689 - DNA, 80 bp, synthetic construct
  misc_feature 1..80: note = Synthetic: >BetaSp-cand-8660-8739
  source 1..80: mol_type = other DNA
cagatgagtcctgcaataatctagtgccaacttatataaagagcgataatatagtggcagccgatttaggtgttcttata

SEQ ID NO: 690 - DNA, 80 bp, synthetic construct
  misc_feature 1..80: note = Synthetic: >BetaSp-cand-8740-8819
  source 1..80: mol_type = other DNA
caaaatagttgtaaacatgtgcaaggtaacgtggctaaaatggctggtgtttcttgtatatggcatgtagatgtgtttaa

SEQ ID NO: 691 - DNA, 80 bp, synthetic construct
  misc_feature 1..80: note = Synthetic: >BetaSp-cand-8820-8899
  source 1..80: mol_type = other DNA
tcagcttagttctgattttcagcataaattaaagaaagcatgtgtaaagactggccttaagcttaagctcacttataata

SEQ ID NO: 692 - DNA, 80 bp, synthetic construct
  misc_feature 1..80: note = Synthetic: >BetaSp-cand-8900-8979
  source 1..80: mol_type = other DNA
aacagtccgctaatgtgtctattttgacaatgcctttttcccttaagggaggtgcgcttgttagcaatgtgttgtttaag

SEQ ID NO: 693 - DNA, 80 bp, synthetic construct
  misc_feature 1..80: note = Synthetic: >BetaSp-cand-8980-9059
  source 1..80: mol_type = other DNA
tgctttatggcaagtttgatagtcttttgtacattgtggctttttatgcctagctatagtgtacataagtctgattatga

SEQ ID NO: 694 - DNA, 80 bp, synthetic construct
  misc_feature 1..80: note = Synthetic: >BetaSp-cand-9060-9139
  source 1..80: mol_type = other DNA
gctaccagcttatgccagttttaaggttatagataatggagttgtgcgtgatgttgatgttaaagatgtatgttttgcta

SEQ ID NO: 695 - DNA, 80 bp, synthetic construct
  misc_feature 1..80: note = Synthetic: >BetaSp-cand-9140-9219
  source 1..80: mol_type = other DNA
acaaatacgcacaatttgatcagtggtatgagtctacttttggtttgtcatattatagtaatcaccacagttgtcctgtg

SEQ ID NO: 696 - DNA, 80 bp, synthetic construct
  misc_feature 1..80: note = Synthetic: >BetaSp-cand-10500-10579
  source 1..80: mol_type = other DNA
tacttatggcaatatgactcttaatgggctttggcttgacaataaagtatattgtcctcgtcatgtcatctgtgcagcca

SEQ ID NO: 697 - DNA, 80 bp, synthetic construct
  misc_feature 1..80: note = Synthetic: >BetaSp-cand-10580-10659
  source 1..80: mol_type = other DNA
atgatatggttgatcctgattatgagtctttgctttgtagggttacctcgacagattttgtggttatgtttgatcgtatg

SEQ ID NO: 698 - DNA, 80 bp, synthetic construct
  misc_feature 1..80: note = Synthetic: >BetaSp-cand-10660-10739
  source 1..80: mol_type = other DNA
agtcttactgttatgtcttaccaaatgcagggcgctatgttgatcctgactgtcacattgcaaaatactaaaacaccaaa

SEQ ID NO: 699 - DNA, 80 bp, synthetic construct
  misc_feature 1..80: note = Synthetic: >BetaSp-cand-10740-10819
  source 1..80: mol_type = other DNA
gtatacttttggcaatgtgaaacctggagagacatttacagttttggctgcatacaatggcaaacctcagggagcctttc

SEQ ID NO: 700 - DNA, 80 bp, synthetic construct
  misc_feature 1..80: note = Synthetic: >BetaSp-cand-10820-10899
  source 1..80: mol_type = other DNA
atgtgacaatgcgtagcagtttcactattaagggctcttttctctgtggatcttgtggatccgtaggttatgttttaatg

SEQ ID NO: 701 - DNA, 80 bp, synthetic construct
  misc_feature 1..80: note = Synthetic: >BetaSp-cand-10900-10979
  source 1..80: mol_type = other DNA
ggagattgtgtcaaatttgtttatatgcatcaattggagcttagtacaggttgtcatactggtactgacttcaatgggaa

SEQ ID NO: 702 - DNA, 80 bp, synthetic construct
  misc_feature 1..80: note = Synthetic: >BetaSp-cand-10980-11059
  source 1..80: mol_type = other DNA
tttctatggaccctatcgtgatgctcaagttgtacaactccctatacaggattatgtgcagtctgttaattttgtagctt

SEQ ID NO: 703 - DNA, 80 bp, synthetic construct
  misc_feature 1..80: note = Synthetic: >BetaSp-cand-11060-11139
  source 1..80: mol_type = other DNA
ggttgtatgccgcaattcttaacaactgtaattggtttatacaaagtgatatttgttctgttgaagattataatgtctgg

SEQ ID NO: 704 - DNA, 80 bp, synthetic construct
  misc_feature 1..80: note = Synthetic: >BetaSp-cand-11140-11219
  source 1..80: mol_type = other DNA
gctatggcaaatggtttcagtcaatttaccatggatcttgttatagatgctttggcttctatgactggagttcctgttga

SEQ ID NO: 705 - DNA, 80 bp, synthetic construct
  misc_feature 1..80: note = Synthetic: >BetaSp-cand-11220-11299
  source 1..80: mol_type = other DNA
gaagtgtcttgccgccattaaaagattgaataatggttttcagggcaggcaaattttgggcagttgcgtctttgaggatg

SEQ ID NO: 706 - DNA, 80 bp, synthetic construct
  misc_feature 1..80: note = Synthetic: >BetaSp-cand-11300-11379
  source 1..80: mol_type = other DNA
aacttacaccaagcgatgtctatcaacaactcgctggtgttaagttgcaatcgaagcgcactagagtttttaagggtaca

SEQ ID NO: 707 - DNA, 80 bp, synthetic construct
  misc_feature 1..80: note = Synthetic: >BetaSp-cand-11380-11459
  source 1..80: mol_type = other DNA
ttgtgctgggtgtttacatcaacgtttttgtttgcgtgtattctctcagcatttgtaaaatggactatgtttatgtatgt

SEQ ID NO: 708 - DNA, 80 bp, synthetic construct
  misc_feature 1..80: note = Synthetic: >BetaSp-cand-11460-11539
  source 1..80: mol_type = other DNA
gactctcaatgtttttagtgtcacaataggaacactttgtcttgtagcctgtgctatgttgtttattaaacacaagcact

SEQ ID NO: 709 - DNA, 80 bp, synthetic construct
  misc_feature 1..80: note = Synthetic: >BetaSp-cand-11540-11619
  source 1..80: mol_type = other DNA
tgtatttgactatgtttatacttcctgtatttttgacactgttgtatactaactatttggtggtttacaaacagtcattt

SEQ ID NO: 710 - DNA, 80 bp, synthetic construct
  misc_feature 1..80: note = Synthetic: >BetaSp-cand-11620-11699
  source 1..80: mol_type = other DNA
agagggtatgcctatgcatggctatcatatgtggtgccttctgttgactatacttatacctatgaggttttgtatggttg

SEQ ID NO: 711 - DNA, 80 bp, synthetic construct
  misc_feature 1..80: note = Synthetic: >BetaSp-cand-11700-11779
  source 1..80: mol_type = other DNA
ttgtgccggtttattcaatgatctttactaccatgcgtagcattaatcatgatttgttctctattataatatttataact

SEQ ID NO: 712 - DNA, 80 bp, synthetic construct
  misc_feature 1..80: note = Synthetic: >BetaSp-cand-13060-13139
  source 1..80: mol_type = other DNA
cgtgatgcagaataacgaacttatgcctgcaaaattaaaaatacaggttgttagtagtggaccagacatgaattgtaatg

SEQ ID NO: 713 - DNA, 80 bp, synthetic construct
  misc_feature 1..80: note = Synthetic: >BetaSp-cand-13140-13219
  source 1..80: mol_type = other DNA
tgcctacccagtgttattataataatagtaacaaagggcggataatttatgctatacttagtgatacggatggtttgaag

SEQ ID NO: 714 - DNA, 80 bp, synthetic construct
  misc_feature 1..80: note = Synthetic: >BetaSp-cand-13220-13299
  source 1..80: mol_type = other DNA
tacactaagatagtaaaggaagatcaatctgttgtagtgttagaattggatcccccatgtaaatttactgttcaagatgc

SEQ ID NO: 715 - DNA, 80 bp, synthetic construct
  misc_feature 1..80: note = Synthetic: >BetaSp-cand-13300-13379
  source 1..80: mol_type = other DNA
aaagggacttaaagttaagtacttgtattttgttaaaggttgtaacacactagcccgtggctgggttgttggaactatat

SEQ ID NO: 716 - DNA, 80 bp, synthetic construct
  misc_feature 1..80: note = Synthetic: >BetaSp-cand-13380-13459
  source 1..80: mol_type = other DNA
cttcaacagttcgtttgcaggctgggcatgcaactgagtatgctgccaattctgcaatactgtctttgtgtgcgttctct

SEQ ID NO: 717 - DNA, 80 bp, synthetic construct
  misc_feature 1..80: note = Synthetic: >BetaSp-cand-13460-13539
  source 1..80: mol_type = other DNA
gtagatcctaagaagacgtatttggattatatacaacaagggggtagtcctatagcaaattgtgtgaagatgctttgcga

SEQ ID NO: 718 - DNA, 80 bp, synthetic construct
  misc_feature 1..80: note = Synthetic: >BetaSp-cand-13540-13619
  source 1..80: mol_type = other DNA
ccatgcgggtaccggtatggccattacagttaaacctgatgctactactaatcaggattcttatggtggtgcatctgtat

SEQ ID NO: 719 - DNA, 80 bp, synthetic construct
  misc_feature 1..80: note = Synthetic: >BetaSp-cand-13620-13699
  source 1..80: mol_type = other DNA
gtatatactgccgcgctcgtattgaacatccagatatagatggattgtgcaagttgcgtggtaaatttgtgcaagtgccc

SEQ ID NO: 720 - DNA, 80 bp, synthetic construct
  misc_feature 1..80: note = Synthetic: >BetaSp-cand-13700-13779
  source 1..80: mol_type = other DNA
ataggtataaaagatcctgtgtcttatgttttgacgcatgatgtttgccaggtatgtggattttggcgtgatgggtcttg

SEQ ID NO: 721 - DNA, 80 bp, synthetic construct
  misc_feature 1..80: note = Synthetic: >BetaSp-cand-13860-13939
  source 1..80: mol_type = other DNA
ccgtctcgtaccctgtgccagtggtttatctactgatgttcaaaaaagggcatttgatatttgtaatgctaatgttgctg

SEQ ID NO: 722 - DNA, 80 bp, synthetic construct
  misc_feature 1..80: note = Synthetic: >BetaSp-cand-13940-14019
  source 1..80: mol_type = other DNA
gcattggtttacattataaggttaattgctgtcgatttcagtgtgctgaagaagacggtactttattagaccagtacttt

SEQ ID NO: 723 - DNA, 80 bp, synthetic construct
  misc_feature 1..80: note = Synthetic: >BetaSp-cand-14020-14099
  source 1..80: mol_type = other DNA
gttgtaaaaagaactggccttgatatatatgagaaagaaaaagcatgttatgagcggttaaaagattgtagtgttgtggc

SEQ ID NO: 724 - DNA, 80 bp, synthetic construct
  misc_feature 1..80: note = Synthetic: >BetaSp-cand-14100-14179
  source 1..80: mol_type = other DNA
tatacacgacttcttcacatttgatgttgaaggtagccgtgttccccacattgtccgcaaatatctaacaaaatatacta

SEQ ID NO: 725 - DNA, 80 bp, synthetic construct
  misc_feature 1..80: note = Synthetic: >BetaSp-cand-14180-14259
  source 1..80: mol_type = other DNA
tgttggatctttgctatgcattgcgtcattttgatcgcaatgactgctcattattatgtgatattctttgcttgtatgct

SEQ ID NO: 726 - DNA, 80 bp, synthetic construct
  misc_feature 1..80: note = Synthetic: >BetaSp-cand-14250-14329
  source 1..80: mol_type = other DNA
cttgtatgctgagtgtgaacagtcctattttactaaaaaggactggtatgattttgttgaaaatcctgatattattaatg

SEQ ID NO: 727 - DNA, 80 bp, synthetic construct
  misc_feature 1..80: note = Synthetic: >CDPHE15-cand-4310-4389
  source 1..80: mol_type = other DNA
cgtaggtcctctaaaggttggcacaggtgcttacattaaatgcaaagcatttgatgtttttaatgttgtaggtccacgca

SEQ ID NO: 728 - DNA, 80 bp, synthetic construct
  misc_feature 1..80: note = Synthetic: >CDPHE15-cand-4390-4469
  source 1..80: mol_type = other DNA
agggtaaacatgctaaggatttgcttgtcaagtcttatgacagtgtctttagtgtgcctggcgtgccacttatgccatta

SEQ ID NO: 729 - DNA, 80 bp, synthetic construct
  misc_feature 1..80: note = Synthetic: >CDPHE15-cand-4470-4549
  source 1..80: mol_type = other DNA
ttgagcattggtatatttagggtacccattgaagattctttgagtgctctatttgcctgtgttggagatcgcgtttgcaa

SEQ ID NO: 730 - DNA, 80 bp, synthetic construct
  misc_feature 1..80: note = Synthetic: >CDPHE15-cand-4550-4629
  source 1..80: mol_type = other DNA
gtgtttttgttatttggacgctgagcgtgacgctattctgcaatatgttgctgggctttcggttgtcaacgaggaggaag

SEQ ID NO: 731 - DNA, 80 bp, synthetic construct
  misc_feature 1..80: note = Synthetic: >CDPHE15-cand-4630-4709
  source 1..80: mol_type = other DNA
ttaagcaggaaactgcttttactcctaggcgtatggagggctcatgtaacttttatgactgcaaccctaaagcattggtt

SEQ ID NO: 732 - DNA, 80 bp, synthetic construct
  misc_feature 1..80: note = Synthetic: >CDPHE15-cand-4710-4789
  source 1..80: mol_type = other DNA
gacaatggtgtgacaaggtttgttgtttttaccaaaccaagtcttgatttttgtgacaccaccaaagtgctagacaccta

SEQ ID NO: 733 - DNA, 80 bp, synthetic construct
  misc_feature 1..80: note = Synthetic: >CDPHE15-cand-4790-4869
  source 1..80: mol_type = other DNA
ctttaaaagtttgctaactaaccttgtaaaggattatgttagcactcttaagggtaaggttgtgccagctggtaactgcg

SEQ ID NO: 734 - DNA, 80 bp, synthetic construct
  misc_feature 1..80: note = Synthetic: >CDPHE15-cand-4870-4949
  source 1..80: mol_type = other DNA
ttacactgcgttgcactgatagtgttagtgttacatttgttgttttgcctacagatgacgaccccaattttgaaactaat

SEQ ID NO: 735 - DNA, 80 bp, synthetic construct
  misc_feature 1..80: note = Synthetic: >CDPHE15-cand-4950-5029
  source 1..80: mol_type = other DNA
gcaaagcgtgcttttcaaaaatgtcttaaacttaaaggtacatgtgtttatgcaaccactgatgccgatgttttgagacg

SEQ ID NO: 736 - DNA, 80 bp, synthetic construct
  misc_feature 1..80: note = Synthetic: >CDPHE15-cand-5030-5109
  source 1..80: mol_type = other DNA
tattgtcaagcactcatgctttggttttatcgctaatgacaatgttattagtgcagttttcacggatggtcaatttaggg

SEQ ID NO: 737 - DNA, 80 bp, synthetic construct
  misc_feature 1..80: note = Synthetic: >CDPHE15-cand-5110-5189
  source 1..80: mol_type = other DNA
ttgaagttacacaagaccagcgtacttacagtgttaaatccttagatgctagtaaaacaatgggcgaacagttgggtaca

SEQ ID NO: 738 - DNA, 80 bp, synthetic construct
  misc_feature 1..80: note = Synthetic: >CDPHE15-cand-5190-5269
  source 1..80: mol_type = other DNA
tgtagtgttgataacactaatgtctctgatcagcgtccaactagtgatatttctaaggttactgttgctcctgctgttga

SEQ ID NO: 739 - DNA, 80 bp, synthetic construct
  misc_feature 1..80: note = Synthetic: >CDPHE15-cand-5270-5349
  source 1..80: mol_type = other DNA
ttgggacgtgcattatggttttgttggcgcagctagttttcatattttgaatcatgaagcattcgaatatcctagcagcg

SEQ ID NO: 740 - DNA, 80 bp, synthetic construct
  misc_feature 1..80: note = Synthetic: >CDPHE15-cand-5350-5429
  source 1..80: mol_type = other DNA
tgcaaaatggtaagcgtgttcttaaaactagtgacaacaattgttgggttaatgctgtatgtttacaactacagtttgct

SEQ ID NO: 741 - DNA, 80 bp, synthetic construct
  misc_feature 1..80: note = Synthetic: >CDPHE15-cand-5430-5509
  source 1..80: mol_type = other DNA
aatgccaaatttgttggaactggtcttcaaacattgtgggatgagtacctggttggtaatgttgctggctttgtacactg

SEQ ID NO: 742 - DNA, 80 bp, synthetic construct
  misc_feature 1..80: note = Synthetic: >CDPHE15-cand-5510-5589
  source 1..80: mol_type = other DNA
gttgtattggctagcaggcgttcagaagggggatcctggtgatgctgaggacactttgaatttaatttctaagtttcttc

SEQ ID NO: 743 - DNA, 80 bp, synthetic construct
  misc_feature 1..80: note = Synthetic: >Delta-cand-11590-11669
  source 1..80: mol_type = other DNA
atctgttgagatgaacgaatctccgcaggagcaaaagaaaaagcttaaagctgttaacattgcaaaggcggaatgggagc

SEQ ID NO: 744 - DNA, 80 bp, synthetic construct
  misc_feature 1..80: note = Synthetic: >Delta-cand-11670-11749
  source 1..80: mol_type = other DNA
gtgaggctgcttctcagcgtaagcttgaaaagcttgctgatgctgctatgaagtctatgtatcttgcagaacgtgctgag

SEQ ID NO: 745 - DNA, 80 bp, synthetic construct
  misc_feature 1..80: note = Synthetic: >Delta-cand-11750-11829
  source 1..80: mol_type = other DNA
gatcgtcgcattaagctaacctctggacttactgcaatgctttaccatatgcttagacgtcttgactcagatagggtaaa

SEQ ID NO: 746 - DNA, 80 bp, synthetic construct
  misc_feature 1..80: note = Synthetic: >Delta-cand-11830-11909
  source 1..80: mol_type = other DNA
agctctgtttgagtgcgctaaggcacaaatcttgccaatacatgctgtagttggaatttctaatgacaaccttaaagtta

SEQ ID NO: 747 - DNA, 80 bp, synthetic construct
  misc_feature 1..80: note = Synthetic: >Delta-cand-11910-11989
  source 1..80: mol_type = other DNA
tttttaacgataaggacagctactctcattatgtagagggcaacacacttatacataagggagttcgctacactattgtg

SEQ ID NO: 748 - DNA, 80 bp, synthetic construct
  misc_feature 1..80: note = Synthetic: >Delta-cand-11990-12069
  source 1..80: mol_type = other DNA
aagaaactctccttagataatgcacctattgaaggcgtaccagaagaattccctgtggtcgttgagtgtacaaaacttaa

SEQ ID NO: 749 - DNA, 80 bp, synthetic construct
  misc_feature 1..80: note = Synthetic: >Delta-cand-12070-12149
  source 1..80: mol_type = other DNA
tgttttagaaaaacttcactgttagggaaggtgtgccccagttgtaaagcgccaaaataatgagctatgtttgcgcaatg

SEQ ID NO: 750 - DNA, 80 bp, synthetic construct
  misc_feature 1..80: note = Synthetic: >Delta-cand-12150-12229
  source 1..80: mol_type = other DNA
ttttcactgctcagaacacagctcaggacttcaatggcaatgaatccactgtaaaatctttttatgttactagaaccggt

SEQ ID NO: 751 - DNA, 80 bp, synthetic construct
  misc_feature 1..80: note = Synthetic: >Delta-cand-12230-12309
  source 1..80: mol_type = other DNA
aagaagattttggttgccattacatcaactaaagacaatcttaagactgtgacctgccttactgagaccggttctaagac

SEQ ID NO: 752 - DNA, 80 bp, synthetic construct
  misc_feature 1..80: note = Synthetic: >Delta-cand-12310-12389
  source 1..80: mol_type = other DNA
agtccttaacttggacccccctatgcgcttcgcacataccgtaggtggaaaacagtctgttgtctatctctattttattc

SEQ ID NO: 753 - DNA, 80 bp, synthetic construct
  misc_feature 1..80: note = Synthetic: >Delta-cand-12390-12469
  source 1..80: mol_type = other DNA
agaatattagttcactcaacagaggtatggttattggccacatctctgaaactactatccttcaggcaagtggcactcaa

SEQ ID NO: 754 - DNA, 80 bp, synthetic construct
  misc_feature 1..80: note = Synthetic: >Delta-cand-12470-12549
  source 1..80: mol_type = other DNA
attgagtaccagcaaaatgcctctcttttgacctatttggcatctttcgctgtagaccctaagacagcctaccttaagca

SEQ ID NO: 755 - DNA, 80 bp, synthetic construct
  misc_feature 1..80: note = Synthetic: >Delta-cand-12550-12629
  source 1..80: mol_type = other DNA
tcttgctgatggtgggtctcctatacagggttgtattcagatgattgctactatgggtcctggatttgcagttactacta

SEQ ID NO: 756 - DNA, 80 bp, synthetic construct
  misc_feature 1..80: note = Synthetic: >Delta-cand-12630-12709
  source 1..80: mol_type = other DNA
aaccacaacctaatgagcatcagtattcttatggtggtgcttcaatttgtctttattgccgtgctcatataccacatcct

SEQ ID NO: 757 - DNA, 80 bp, synthetic construct
  misc_feature 1..80: note = Synthetic: >Delta-cand-12710-12789
  source 1..80: mol_type = other DNA
ggtgttgatggacggtgcccctacaaaggccgctttgttcacatcgacaaagataaggaacctgtttccttcgccttgac

SEQ ID NO: 758 - DNA, 80 bp, synthetic construct
  misc_feature 1..80: note = Synthetic: >Delta-cand-12790-12869
  source 1..80: mol_type = other DNA
tcatgagccatgcagttcttgtcaacggtgggttaattatgactgcacctgcacaaaccttcaattgggatctagtctga

SEQ ID NO: 759 - DNA, 80 bp, synthetic construct
  misc_feature 1..80: note = Synthetic: >Delta-cand-14150-14229
  source 1..80: mol_type = other DNA
agcatttgcttgatagtaacctattgtcagaccaacttggaatagacattcgccacttctactatatgcaggatggtgaa

SEQ ID NO: 760 - DNA, 80 bp, synthetic construct
  misc_feature 1..80: note = Synthetic: >Delta-cand-14230-14309
  source 1..80: mol_type = other DNA
gcggctatcacagactacagctactacaggtataatacccccacgatggtagatatcaagatgttcttattttgccttga

SEQ ID NO: 761 - DNA, 80 bp, synthetic construct
  misc_feature 1..80: note = Synthetic: >Delta-cand-14310-14389
  source 1..80: mol_type = other DNA
ggtggcagataagtatcttgagccctacgaaggtggatgtattaatgcacagtcagttgtggtctctaatttggacaagt

SEQ ID NO: 762 - DNA, 80 bp, synthetic construct
  misc_feature 1..80: note = Synthetic: >Delta-cand-14470-14549
  source 1..80: mol_type = other DNA
gagtatacaaaacgcaatgttttgcctacactcactcagatgaaccttaagtatgcaatttcagccaaggatcgtgctcg

SEQ ID NO: 763 - DNA, 80 bp, synthetic construct
  misc_feature 1..80: note = Synthetic: >Delta-cand-14550-14629
  source 1..80: mol_type = other DNA
cactgtggcaggagtgtctataattagcaccatgactaacaggcagtaccatcaaaagatgctgaaatctatttcacttg

SEQ ID NO: 764 - DNA, 80 bp, synthetic construct
  misc_feature 1..80: note = Synthetic: >Delta-cand-14630-14709
  source 1..80: mol_type = other DNA
cacgcaatcagaccatcgtgattggaacaaccaaattctatggtggttgggacaacatgttacgacgactgatgtgtaat

SEQ ID NO: 765 - DNA, 80 bp, synthetic construct
  misc_feature 1..80: note = Synthetic: >Delta-cand-14710-14789
  source 1..80: mol_type = other DNA
atcaacaatcccattttagtgggttgggattaccctaagtgtgatcgttctatgccaaacatgctgcgcattgccgcttc

SEQ ID NO: 766 - DNA, 80 bp, synthetic construct
  misc_feature 1..80: note = Synthetic: >Delta-cand-14790-14869
  source 1..80: mol_type = other DNA
gtgcttgctagcacgaaaacacacttgctgtaaccaaagccagcgattctaccgtttggctaatgaatgttgccaagtac

SEQ ID NO: 767 - DNA, 80 bp, synthetic construct
  misc_feature 1..80: note = Synthetic: >Delta-cand-14870-14949
  source 1..80: mol_type = other DNA
tatctgaagtggtagtctctggtaacaacctctatgtaaaaccaggtggcactagcagtggtgatgcaaccacagcttat

SEQ ID NO: 768 - DNA, 80 bp, synthetic construct
  misc_feature 1..80: note = Synthetic: >Delta-cand-14950-15029
  source 1..80: mol_type = other DNA
gccaactcggtatttaacatcttacaggtggtttctgctaatgtagccaccttcttatcaacttccaccacgacacatct

SEQ ID NO: 769 - DNA, 80 bp, synthetic construct
  misc_feature 1..80: note = Synthetic: >Delta-cand-15030-15109
  source 1..80: mol_type = other DNA
taataaggacattgcggacttgcatcgtagtctttatgaagatatttatcgtggtgactctaatgatatcaccgtcatca

SEQ ID NO: 770 - DNA, 80 bp, synthetic construct
  misc_feature 1..80: note = Synthetic: >Delta-cand-15110-15189
  source 1..80: mol_type = other DNA
atagattctaccagcatctccaaagttactttggacttatgatattgtctgatgatggtgtcgcatgcatagactcagcc

SEQ ID NO: 771 - DNA, 80 bp, synthetic construct
  misc_feature 1..80: note = Synthetic: >Delta-cand-15190-15269
  source 1..80: mol_type = other DNA
gttgcaaaggctggagctgttgctgatcttgatggtttccgagacattttgttttaccaaaacaatgtttacatggcaga

SEQ ID NO: 772 - DNA, 80 bp, synthetic construct
  misc_feature 1..80: note = Synthetic: >Delta-cand-15270-15349
  source 1..80: mol_type = other DNA
ctcaaagtgttggacagaaactgacatgaatgttggccctcatgaattttgctcacagcatactgtgttagcagagcatg

SEQ ID NO: 773 - DNA, 80 bp, synthetic construct
  misc_feature 1..80: note = Synthetic: >Delta-cand-15350-15429
  source 1..80: mol_type = other DNA
atggtaaaccttactacttaccttacccagatgtctctcgcattctgggtgcatgcatctttgtggatgacgttaacaag

SEQ ID NO: 774 - DNA, 80 bp, synthetic construct
  misc_feature 1..80: note = Synthetic: >HKU1-cand-28840-28919
  source 1..80: mol_type = other DNA
gcgttcttttaaaacagctgatggtcaacaaaagcagttgttaccgagatggtatttctactatctcggtaccggcccat

SEQ ID NO: 775 - DNA, 80 bp, synthetic construct
  misc_feature 1..80: note = Synthetic: >HKU1-cand-28920-28999
  source 1..80: mol_type = other DNA
atgccaatgcatcctatggtgaatccctcgaaggggtcttctgggttgctaatcaccaagctgacacttctactccctcc

SEQ ID NO: 776 - DNA, 80 bp, synthetic construct
  misc_feature 1..80: note = Synthetic: >HKU1-cand-29000-29079
  source 1..80: mol_type = other DNA
gatgtttcgtcaagggatcctactactcaagaagctatccctactaggtttccgcctggtacgattttgcctcaaggcta

SEQ ID NO: 777 - DNA, 80 bp, synthetic construct
  misc_feature 1..80: note = Synthetic: >HKU1-cand-29080-29159
  source 1..80: mol_type = other DNA
ttatgttgaaggctcaggaaggtctgcttctaatagtcgaccaggttcacgttctcaatcacgtggacccaataatcgtt

SEQ ID NO: 778 - DNA, 80 bp, synthetic construct
  misc_feature 1..80: note = Synthetic: >HKU1-cand-29160-29239
  source 1..80: mol_type = other DNA
cattaagtagaagtaattctaattttagacattcagattctatagtaaaacctgatatggctgatgagattgctaatctt

SEQ ID NO: 779 - DNA, 80 bp, synthetic construct
  misc_feature 1..80: note = Synthetic: >HKU1-cand-29240-29319
  source 1..80: mol_type = other DNA
gttttagccaagcttggtaaagattctaaacctcagcaagtcactaagcaaaatgccaaggaaattaggcataaaatttt

SEQ ID NO: 780 - DNA, 80 bp, synthetic construct
  misc_feature 1..80: note = Synthetic: >HKU1-cand-29320-29399
  source 1..80: mol_type = other DNA
aacaaaacctcgccaaaagcgaactcctaataaacattgtaatgttcaacagtgttttggtaaaagaggaccttctcaaa

SEQ ID NO: 781 - DNA, 80 bp, synthetic construct
  misc_feature 1..80: note = Synthetic: >HKU1-cand-29400-29479
  source 1..80: mol_type = other DNA
actttggtaatgctgaaatgttaaagcttggtactaatgatcctcagtttcctattcttgcagaattagctcctacacca

SEQ ID NO: 782 - DNA, 80 bp, synthetic construct
  misc_feature 1..80: note = Synthetic: >HKU1-cand-29480-29559
  source 1..80: mol_type = other DNA
ggtgcttttttctttggttctaaattagagttggttaaaagagattccgaggctgactcacctgttaaagatgtttttga

SEQ ID NO: 783 - DNA, 80 bp, synthetic construct
  misc_feature 1..80: note = Synthetic: >HKU1-cand-29560-29639
  source 1..80: mol_type = other DNA
acttcgttattctggttctattaggtttgatagtactttacctggttttgagacaattatgaaagttcttaaagagaatt

SEQ ID NO: 784 - DNA, 80 bp, synthetic construct
  misc_feature 1..80: note = Synthetic: >HKU1-cand-29640-29719
  source 1..80: mol_type = other DNA
tagatgcttatgttaattctaatcagaacactgtttctggttcgctgagtcctaaacctcagcgtaaaagaggtgttaaa

SEQ ID NO: 785 - DNA, 80 bp, synthetic construct
  misc_feature 1..80: note = Synthetic: >HKU1-cand-29720-29799
  source 1..80: mol_type = other DNA
caatcacctgaatagtttgactctcttaatttaagtgctgatactcagcacatttcaaatgattttactcctgaggatca

SEQ ID NO: 786 - DNA, 80 bp, synthetic construct
  misc_feature 1..80: note = Synthetic: >HKU1-cand-29800-29879
  source 1..80: mol_type = other DNA
tagtttacttgctactcttgatgatccttatgtagaagactctgttgcttaatgagaatgaatcctaattcgacactagg

SEQ ID NO: 787 - DNA, 80 bp, synthetic construct
  misc_feature 1..80: note = Synthetic: >HKU1-cand-29880-29959
  source 1..80: mol_type = other DNA
tggtaacccctcgctattagtcggaataggacactctctatcagaatgaattcttgctgtaataacagatagagtaggtt

SEQ ID NO: 788 - DNA, 80 bp, synthetic construct
  misc_feature 1..80: note = Synthetic: >HKU1-cand-29960-30039
  source 1..80: mol_type = other DNA
gttacagactatatattaattagtagaaattttatatttagacatttgattgttagagtagttataaggtttagctgtag

SEQ ID NO: 789 - DNA, 80 bp, synthetic construct
  misc_feature 1..80: note = Synthetic: >HKU1-cand-30040-30119
  source 1..80: mol_type = other DNA
tataaacgcctccgggaagagctatcaattgtagtgtttaatatatatattagtatatgattgaaattaattatagcctt

SEQ ID NO: 790 - DNA, 80 bp, synthetic construct
  misc_feature 1..80: note = Synthetic: >HKU14-cand-27300-27379
  source 1..80: mol_type = other DNA
tatgtcacagcgaaggttagtcccggtctgtgcattgctggtgatagaggtatagcgcctaagagtggctattttgttaa

SEQ ID NO: 791 - DNA, 80 bp, synthetic construct
  misc_feature 1..80: note = Synthetic: >HKU14-cand-27380-27459
  source 1..80: mol_type = other DNA
tgtaaacaatacttggatgttcactggtagtggttattactaccctgaacctataactgaaaataatgtcgctgttatga

SEQ ID NO: 792 - DNA, 80 bp, synthetic construct
  misc_feature 1..80: note = Synthetic: >HKU14-cand-27460-27539
  source 1..80: mol_type = other DNA
gtacctgcgctgtaaattacactaaagcgccggatgtaatgctgaacatttcaacacccaaccttcctgattttaaggaa

SEQ ID NO: 793 - DNA, 80 bp, synthetic construct
  misc_feature 1..80: note = Synthetic: >HKU14-cand-27540-27619
  source 1..80: mol_type = other DNA
gagttggatcaatggtttaaaaatcaaacttcagtggcaccagatttgtcacttgattatataaatgttacattcttgga

SEQ ID NO: 794 - DNA, 80 bp, synthetic construct
  misc_feature 1..80: note = Synthetic: >HKU14-cand-27620-27699
  source 1..80: mol_type = other DNA
cctacaagatgaaatgaataggttacaggaggcaataaaagttttaaatcagagctacatcaatctcaaggacattggta

SEQ ID NO: 795 - DNA, 80 bp, synthetic construct
  misc_feature 1..80: note = Synthetic: >HKU14-cand-27700-27779
  source 1..80: mol_type = other DNA
catatgaatattatgtaaaatggccttggtatgtatggcttttaatcggccttgctggtgtagctgtgcttgttttacta

SEQ ID NO: 796 - DNA, 80 bp, synthetic construct
  misc_feature 1..80: note = Synthetic: >HKU14-cand-27780-27859
  source 1..80: mol_type = other DNA
ttcttcatatgctgttgcacaggatgtgggactagttgttttaagaaatgtggtggttgttgtgatgattatactggaca

SEQ ID NO: 797 - DNA, 80 bp, synthetic construct
  misc_feature 1..80: note = Synthetic: >HKU14-cand-27860-27939
  source 1..80: mol_type = other DNA
ccaggagttagtaatcaaaacttcacatgacgactaagttcgtctttgatttattgactcttgatgatatagtacatccc

SEQ ID NO: 798 - DNA, 80 bp, synthetic construct
  misc_feature 1..80: note = Synthetic: >HKU14-cand-27940-28019
  source 1..80: mol_type = other DNA
ttcaaccatttgtagttatttatggctgatttaagacccattgaggtcgagcacattggattaccacacatttgttggtt

SEQ ID NO: 799 - DNA, 80 bp, synthetic construct
  misc_feature 1..80: note = Synthetic: >HKU14-cand-28030-28109
  source 1..80: mol_type = other DNA
aagcctactactgttttcataacagttttcgtaggcggttttaaggtattgacactagtacaactggttttagtgcagta

SEQ ID NO: 800 - DNA, 80 bp, synthetic construct
  misc_feature 1..80: note = Synthetic: >HKU14-cand-28110-28189
  source 1..80: mol_type = other DNA
ttagtactagttccaaaccatattataattcgggtagaccttataactttaatcatttgccaaagtttttaaggccattc

SEQ ID NO: 801 - DNA, 80 bp, synthetic construct
  misc_feature 1..80: note = Synthetic: >HKU14-cand-28190-28269
  source 1..80: mol_type = other DNA
cctattaatggacgtctggagacctgagaagaaatacctccgttacactaatggatttaatgtctcagaactagaagatg

SEQ ID NO: 802 - DNA, 80 bp, synthetic construct
  misc_feature 1..80: note = Synthetic: >HKU14-cand-28270-28349
  source 1..80: mol_type = other DNA
tttgttttaaatataattatcaatttcccaaagtaggctattgtagagttcctaattacgcttggtgtcgtaaccaaggt

SEQ ID NO: 803 - DNA, 80 bp, synthetic construct
  misc_feature 1..80: note = Synthetic: >HKU14-cand-28350-28429
  source 1..80: mol_type = other DNA
agcttttgcgctacatttactctttacggcaaatccaaacgttatgataagtattttgggataataactagtttcacagc

SEQ ID NO: 804 - DNA, 80 bp, synthetic construct
  misc_feature 1..80: note = Synthetic: >HKU14-cand-28430-28509
  source 1..80: mol_type = other DNA
attcgctaacactgtagaggaggctgttaacaaactggtttttttagctgttgactttattacctggcggagacaggagt

SEQ ID NO: 805 - DNA, 80 bp, synthetic construct
  misc_feature 1..80: note = Synthetic: >HKU14-cand-28510-28589
  source 1..80: mol_type = other DNA
taaatgtttatggctgatgcttatcttgcagacactgtgtggtatgtgggtcaaataatttttatagttgccatctgttt

SEQ ID NO: 806 - DNA, 80 bp, synthetic construct
  misc_feature 1..80: note = Synthetic: >HKU15-cand-1360-1439
  source 1..80: mol_type = other DNA
accactgattcgccacccctttactttcccaaagtcaagggtggtgttattggtattgcacttaagcagcagggcactgc

SEQ ID NO: 807 - DNA, 80 bp, synthetic construct
  misc_feature 1..80: note = Synthetic: >HKU15-cand-1440-1519
  source 1..80: mol_type = other DNA
ggctaagaagctcaatgtagtcttccatgctcaacctgatgatgttctgctagccttcatacaacttcagcaattcttga

SEQ ID NO: 808 - DNA, 80 bp, synthetic construct
  misc_feature 1..80: note = Synthetic: >HKU15-cand-1520-1599
  source 1..80: mol_type = other DNA
accgtacttcggattcaagtgttgaaattactgattgccagagttatgaagtatctccaactgtgacggtcaaaattggc

SEQ ID NO: 809 - DNA, 80 bp, synthetic construct
  misc_feature 1..80: note = Synthetic: >HKU15-cand-1600-1679
  source 1..80: mol_type = other DNA
ccgtctaaacctggggatgtcatcgtggctactgatgaggaataccttaaatgctttgaaacccctgaggtaggtaggct

SEQ ID NO: 810 - DNA, 80 bp, synthetic construct
  misc_feature 1..80: note = Synthetic: >HKU15-cand-1680-1759
  source 1..80: mol_type = other DNA
ctataaggttttccaaactcaatcttgggctatcattgagcgtgccttctccagtttgaagatccgcgtgtccaaagctt

SEQ ID NO: 811 - DNA, 80 bp, synthetic construct
  misc_feature 1..80: note = Synthetic: >HKU15-cand-1760-1839
  source 1..80: mol_type = other DNA
tatcagcatttataagttttctgcaaaaccttgcagataactttactgcaataagtggtgttgtcactgcactcattcgt

SEQ ID NO: 812 - DNA, 80 bp, synthetic construct
  misc_feature 1..80: note = Synthetic: >HKU15-cand-1840-1919
  source 1..80: mol_type = other DNA
gaactccaggatcttaccctggatgtggcgacacgtatcactaacatacaatttgtttaccgtgccggtaagcttattgt

SEQ ID NO: 813 - DNA, 80 bp, synthetic construct
  misc_feature 1..80: note = Synthetic: >HKU15-cand-1920-1999
  source 1..80: mol_type = other DNA
cgacacgacaagtgtcatagctaaacttttccagccattttgtgattttatatcacctttccttcggaaagttgctggtt

SEQ ID NO: 814 - DNA, 80 bp, synthetic construct
  misc_feature 1..80: note = Synthetic: >HKU15-cand-2000-2079
  source 1..80: mol_type = other DNA
ttgcaatttacactgttggtaatcgcatgcttatgtttaccagcactggcacctttcttctcacaaaggcaactactaag

SEQ ID NO: 815 - DNA, 80 bp, synthetic construct
  misc_feature 1..80: note = Synthetic: >HKU15-cand-2080-2159
  source 1..80: mol_type = other DNA
atactcaataaggcaaagtacatctttgatgtggagcctgagtacccagtagatgtaacaacatccaaagttgtagtaca

SEQ ID NO: 816 - DNA, 80 bp, synthetic construct
  misc_feature 1..80: note = Synthetic: >HKU15-cand-2160-2239
  source 1..80: mol_type = other DNA
tgaagcactccagcaaaccgacactaagcctactagagctctggaggctgttgatgtcgttgttggtaatactgtactgc

SEQ ID NO: 817 - DNA, 80 bp, synthetic construct
  misc_feature 1..80: note = Synthetic: >HKU15-cand-2240-2319
  source 1..80: mol_type = other DNA
aaatggctactgatggcactgcgttctacccatcggatggtacgcacgcctctcttccaggattcaaagcaggttcggat

SEQ ID NO: 818 - DNA, 80 bp, synthetic construct
  misc_feature 1..80: note = Synthetic: >HKU15-cand-2320-2399
  source 1..80: mol_type = other DNA
gagcttttcataagcttcaactgcgacctctttgatgatgagactaatgctcaaatcaacgaaacactcgctgcatatga

SEQ ID NO: 819 - DNA, 80 bp, synthetic construct
  misc_feature 1..80: note = Synthetic: >HKU15-cand-2400-2479
  source 1..80: mol_type = other DNA
gcttaaccaactagtggctccaggtgattctacaccgcgtcaaattgcgacgttggttgtcgatacacttgcagatgcta

SEQ ID NO: 820 - DNA, 80 bp, synthetic construct
  misc_feature 1..80: note = Synthetic: >HKU15-cand-2480-2559
  source 1..80: mol_type = other DNA
taacagaccactttccggagaaaaccattgatctacctgaagactatcaagtcttttctgaccatgatgacctcccactc

SEQ ID NO: 821 - DNA, 80 bp, synthetic construct
  misc_feature 1..80: note = Synthetic: >HKU15-cand-2560-2639
  source 1..80: mol_type = other DNA
gcacaataccacatccctgatcacctgagcctgtatattcaggctatggaaggtgaagatgatagtggtgatgaaatatg

SEQ ID NO: 822 - DNA, 80 bp, synthetic construct
  misc_feature 1..80: note = Synthetic: >HKU2-cand-10580-10659
  source 1..80: mol_type = other DNA
ccatactgtcctggacttatctcctttgttggtgatattaaggctgtattggttatgtaccttgtctttggatttgttgc

SEQ ID NO: 823 - DNA, 80 bp, synthetic construct
  misc_feature 1..80: note = Synthetic: >HKU2-cand-10660-10739
  source 1..80: mol_type = other DNA
gactgtttattttggcttgctttattggcttaacagagtgcttaaattgactcttggttgttatgactttaaagtatcag

SEQ ID NO: 824 - DNA, 80 bp, synthetic construct
  misc_feature 1..80: note = Synthetic: >HKU2-cand-10740-10819
  source 1..80: mol_type = other DNA
ctgctgaatttaagtatatggtcgcgaatggttatactgcaccaagaggtccttttgactctgtattacttagtctcaga

SEQ ID NO: 825 - DNA, 80 bp, synthetic construct
  misc_feature 1..80: note = Synthetic: >HKU2-cand-10820-10899
  source 1..80: mol_type = other DNA
ctattgggtgttggtggccagaaaactattaaggtttctacagtgcagtctaaacttactgatcttaagtgtgccaatgt

SEQ ID NO: 826 - DNA, 80 bp, synthetic construct
  misc_feature 1..80: note = Synthetic: >HKU2-cand-10900-10979
  source 1..80: mol_type = other DNA
tgtgcttttgggttgtcttaccaacatgaatatcgcagctaatagtagagaatggtcttattgtgttaatttgcataatg

SEQ ID NO: 827 - DNA, 80 bp, synthetic construct
  misc_feature 1..80: note = Synthetic: >HKU2-cand-10980-11059
  source 1..80: mol_type = other DNA
agattaaccttactagtgaccctgaagaggcccttgaaaaacttttggcattagtagcatttttcctatcaaagcaacaa

SEQ ID NO: 828 - DNA, 80 bp, synthetic construct
  misc_feature 1..80: note = Synthetic: >HKU2-cand-11060-11139
  source 1..80: mol_type = other DNA
aactttggtgttgatgatttaatagattcattctttgaaaacagaaatgtgcttcaaagtgttgcatctgcttttgctaa

SEQ ID NO: 829 - DNA, 80 bp, synthetic construct
  misc_feature 1..80: note = Synthetic: >HKU2-cand-11140-11219
  source 1..80: mol_type = other DNA
tatgcctagttttattgcttatgagaaggctcgtatgaattacgaggatgctattgctaatgatgctgctcctactgttg

SEQ ID NO: 830 - DNA, 80 bp, synthetic construct
  misc_feature 1..80: note = Synthetic: >HKU2-cand-11220-11299
  source 1..80: mol_type = other DNA
ttaagcagttgaagaaggctatgaatactgcaaagggtgagtttgaccacgaggcttcagttcagaagaagattcagcgt

SEQ ID NO: 831 - DNA, 80 bp, synthetic construct
  misc_feature 1..80: note = Synthetic: >HKU2-cand-11300-11379
  source 1..80: mol_type = other DNA
atggctgatgcggctgcagctcagatgtataaagatgctcgtgctgtggaccgtaagtctaaagttgttagtgctatgca

SEQ ID NO: 832 - DNA, 80 bp, synthetic construct
  misc_feature 1..80: note = Synthetic: >HKU2-cand-11380-11459
  source 1..80: mol_type = other DNA
ttcactgttgtttggtatgctccgtaagcttgatatgtcttctatcaatcagcttatggagcttgcaaaggatggttgca

SEQ ID NO: 833 - DNA, 80 bp, synthetic construct
  misc_feature 1..80: note = Synthetic: >HKU2-cand-11460-11539
  source 1..80: mol_type = other DNA
tacctatggctattatacctgctgctgcagctacaaaacttacagttattacccctgatttggagtcctttagtaaaata

SEQ ID NO: 834 - DNA, 80 bp, synthetic construct
  misc_feature 1..80: note = Synthetic: >HKU2-cand-11540-11619
  source 1..80: mol_type = other DNA
cgtgttgataataacatttattatgctggggctgcatggagtattactgatgttaaagatgctgatggcagagttgtcat

SEQ ID NO: 835 - DNA, 80 bp, synthetic construct
  misc_feature 1..80: note = Synthetic: >HKU2-cand-11620-11699
  source 1..80: mol_type = other DNA
tttgaaggagattaatgctgacaacaaggacgctttagtttggccattacatgttacttgcgagcgtgttgttaaactcc

SEQ ID NO: 836 - DNA, 80 bp, synthetic construct
  misc_feature 1..80: note = Synthetic: >HKU2-cand-11700-11779
  source 1..80: mol_type = other DNA
agaataatgaaattattcctggtaagcttaagcagcgtgctgttaaggcggaaggtgatggcttttctactgatgctaaa

SEQ ID NO: 837 - DNA, 80 bp, synthetic construct
  misc_feature 1..80: note = Synthetic: >HKU2-cand-11780-11859
  source 1..80: mol_type = other DNA
gctctttacaatactgaaggtggtcactgttttgtgtatgcacttatagctgacaaacctgatttaaaggttgtcaagtg

SEQ ID NO: 838 - DNA, 80 bp, synthetic construct
  misc_feature 1..80: note = Synthetic: >HKU31-cand-16920-16999
  source 1..80: mol_type = other DNA
tgtgtgggaggttggtaaatccaaaccaccactcaaccgtaattatgtttttactggttaccatataaccaaaaatagta

SEQ ID NO: 839 - DNA, 80 bp, synthetic construct
  misc_feature 1..80: note = Synthetic: >HKU31-cand-17000-17079
  source 1..80: mol_type = other DNA
aggtacaactcggagaatatgtctttgagcgtgtagactatagtgaaactgtcacttataagtcaagcactacttataag

SEQ ID NO: 840 - DNA, 80 bp, synthetic construct
  misc_feature 1..80: note = Synthetic: >HKU31-cand-17080-17159
  source 1..80: mol_type = other DNA
ctttctataggtgacatttttgtacttacatctcactcagtggctacgttgacagcgccaactgtagtaaatcaagagaa

SEQ ID NO: 841 - DNA, 80 bp, synthetic construct
  misc_feature 1..80: note = Synthetic: >HKU31-cand-17160-17239
  source 1..80: mol_type = other DNA
gtatgtaaaaatagttggattgtatccaacaattacagtaccagaggagttttctactcatgtagttaatttccaaaagg

SEQ ID NO: 842 - DNA, 80 bp, synthetic construct
  misc_feature 1..80: note = Synthetic: >HKU31-cand-17240-17319
  source 1..80: mol_type = other DNA
taggttataataagtttgtcactgtacagggaccacctggcactggcaaaagtcattttgctgtgggtttagctatatat

SEQ ID NO: 843 - DNA, 80 bp, synthetic construct
  misc_feature 1..80: note = Synthetic: >HKU31-cand-17320-17399
  source 1..80: mol_type = other DNA
taccctacagctcgtattatttttacagcatgttcacatgcggcagtagatgcattatgtgagaaagcttttaagtactt

SEQ ID NO: 844 - DNA, 80 bp, synthetic construct
  misc_feature 1..80: note = Synthetic: >HKU31-cand-17400-17479
  source 1..80: mol_type = other DNA
gaatattgctaaatgttcacgtattattcctgccaaagcacgtgttgagtgttatgacaggtttaaagtgaatgaaacta

SEQ ID NO: 845 - DNA, 80 bp, synthetic construct
  misc_feature 1..80: note = Synthetic: >HKU31-cand-17480-17559
  source 1..80: mol_type = other DNA
cttcacagtatgttttttccacaattaatgcattaccagaaactacagctgatattttggttgttgatgaagttagcatg

SEQ ID NO: 846 - DNA, 80 bp, synthetic construct
  misc_feature 1..80: note = Synthetic: >HKU31-cand-17560-17639
  source 1..80: mol_type = other DNA
tgtactaattatgacttgtccataattaatgcacgtgttaaagctaaacacattgtctatgtaggtgatccagcacagct

SEQ ID NO: 847 - DNA, 80 bp, synthetic construct
  misc_feature 1..80: note = Synthetic: >HKU31-cand-17640-17719
  source 1..80: mol_type = other DNA
gcctgcacctcggacattgttaactagaggcacattagaacctgaaaattttaatagtgtcactaggtttatgtgtaatt

SEQ ID NO: 848 - DNA, 80 bp, synthetic construct
  misc_feature 1..80: note = Synthetic: >HKU31-cand-17720-17799
  source 1..80: mol_type = other DNA
taggaccagatatctttttaagtacatgttatcgttgtcctaaagagattgtaaccactgttagtgctctagtttacaac

SEQ ID NO: 849 - DNA, 80 bp, synthetic construct
  misc_feature 1..80: note = Synthetic: >HKU31-cand-17800-17879
  source 1..80: mol_type = other DNA
aataagttgttgtctaagaaagagcagtcagggcagtgttttaaagtgctctataaaggctgtgtaacgcatgatgctag

SEQ ID NO: 850 - DNA, 80 bp, synthetic construct
  misc_feature 1..80: note = Synthetic: >HKU31-cand-17880-17959
  source 1..80: mol_type = other DNA
ttcagccattaatagaccacaacttgtttttgttaagaattttatagctgcaaatcccgcatggagtaaagcagtcttta

SEQ ID NO: 851 - DNA, 80 bp, synthetic construct
  misc_feature 1..80: note = Synthetic: >HKU31-cand-17960-18039
  source 1..80: mol_type = other DNA
tttcaccttacaactcacaaaatgctgttgcaaggtctatgttgggtttaaatacccaaactgtagattcttcacagggt

SEQ ID NO: 852 - DNA, 80 bp, synthetic construct
  misc_feature 1..80: note = Synthetic: >HKU31-cand-18040-18119
  source 1..80: mol_type = other DNA
tcagaatacccctatgtgatattttgtcagacagctgacacagcacatgccaataacattaataggtttaatgttgctgt

SEQ ID NO: 853 - DNA, 80 bp, synthetic construct
  misc_feature 1..80: note = Synthetic: >HKU31-cand-18120-18199
  source 1..80: mol_type = other DNA
aacacgtgcacagaagggtatattgtgtgttatgacatctcaggcgttgtttgattctttacaattttctgagttgtcta

SEQ ID NO: 854 - DNA, 80 bp, synthetic construct
  misc_feature 1..80: note = Synthetic: >HKU5-cand-1120-1199
  source 1..80: mol_type = other DNA
atgtccctagacactcattcacaatcggctcagagatccaagtgattgcaccctcaactgcggtgcaagctaatggacat

SEQ ID NO: 855 - DNA, 80 bp, synthetic construct
  misc_feature 1..80: note = Synthetic: >HKU5-cand-1200-1279
  source 1..80: mol_type = other DNA
ctcaatctcaaacagagactcctctacgcattttatggtaagcaggctgtctctgaacccaactacatctatcattcagc

SEQ ID NO: 856 - DNA, 80 bp, synthetic construct
  misc_feature 1..80: note = Synthetic: >HKU5-cand-1280-1359
  source 1..80: mol_type = other DNA
gtacgtcgattgcacgagctgtggtaaaggtagttggctgactggcaatgctgtgcaaggttttgcatgtgattgcggag

SEQ ID NO: 857 - DNA, 80 bp, synthetic construct
  misc_feature 1..80: note = Synthetic: >HKU5-cand-1360-1439
  source 1..80: mol_type = other DNA
cacactattgtgctaatgacgtagacttgcagtcttcgggccttgtgcggaagaatgctgtcctgcttactacctgtccc

SEQ ID NO: 858 - DNA, 80 bp, synthetic construct
  misc_feature 1..80: note = Synthetic: >HKU5-cand-1440-1519
  source 1..80: mol_type = other DNA
tgcaataaggacggagaatgcaaacacaccctccctcagcttgttagcatgatgactgacaagtgtgacgttgaggttgt

SEQ ID NO: 859 - DNA, 80 bp, synthetic construct
  misc_feature 1..80: note = Synthetic: >HKU5-cand-1520-1599
  source 1..80: mol_type = other DNA
tggaaaaaccttcattcttacttatggaggcgtaatttacgcttacatgggttgcagtggtggtactatgcactttattc

SEQ ID NO: 860 - DNA, 80 bp, synthetic construct
  misc_feature 1..80: note = Synthetic: >HKU5-cand-1600-1679
  source 1..80: mol_type = other DNA
ctcgtgcaaagtcatgtgtttccaagattggcgatgccatcttcactggatgcacaggcacctggagtaaggtatgcgaa

SEQ ID NO: 861 - DNA, 80 bp, synthetic construct
  misc_feature 1..80: note = Synthetic: >HKU5-cand-1680-1759
  source 1..80: mol_type = other DNA
acagcaaaccttttcctcgaaagggctcagcatgccatcaattttgttaatgagtttgtgctcacagagactgtagtggc

SEQ ID NO: 862 - DNA, 80 bp, synthetic construct
  misc_feature 1..80: note = Synthetic: >HKU5-cand-1760-1839
  source 1..80: mol_type = other DNA
actactttctggtactacttctagtatcgaagaacttcgtgacctgtgtcgtaacgcaacgttcgaaaaggtccgagact

SEQ ID NO: 863 - DNA, 80 bp, synthetic construct
  misc_feature 1..80: note = Synthetic: >HKU5-cand-1920-1999
  source 1..80: mol_type = other DNA
aatgctgcgcttaatgccccgtttgttgttctctccggactcggagaatcctttaagaaggtcgctgcaactccctggaa

SEQ ID NO: 864 - DNA, 80 bp, synthetic construct
  misc_feature 1..80: note = Synthetic: >HKU5-cand-2000-2079
  source 1..80: mol_type = other DNA
attgtgcagctccctcagagaaactctggatcattatgcagacagcataacctacagggttttcccatatgacatcccgt

SEQ ID NO: 865 - DNA, 80 bp, synthetic construct
  misc_feature 1..80: note = Synthetic: >HKU5-cand-2080-2159
  source 1..80: mol_type = other DNA
gtgatgttactgactttacagctctcttgttagattgtgcagttctgactggagcttcagcctactttgtagcccgctat

SEQ ID NO: 866 - DNA, 80 bp, synthetic construct
  misc_feature 1..80: note = Synthetic: >HKU5-cand-2160-2239
  source 1..80: mol_type = other DNA
gtggatgaaaaagtagagcaactcactaaccttgtcttctcctcatgccagagcgcagttacagcttttgtacaggcatg

SEQ ID NO: 867 - DNA, 80 bp, synthetic construct
  misc_feature 1..80: note = Synthetic: >HKU5-cand-2240-2319
  source 1..80: mol_type = other DNA
tatgtctacttacaaagctactgcaaaattcatctctgacatgttcactctaataaaagtagtctctgaacggctctacg

SEQ ID NO: 868 - DNA, 80 bp, synthetic construct
  misc_feature 1..80: note = Synthetic: >HKU5-cand-2320-2399
  source 1..80: mol_type = other DNA
tctacacgtctgtgggctttgtcgttgtcggagattactcatcccagcttctgaagcaattcatgcatatcctctcaaag

SEQ ID NO: 869 - DNA, 80 bp, synthetic construct
  misc_feature 1..80: note = Synthetic: >HKU9-cand-12940-13019
  source 1..80: mol_type = other DNA
cccaataggtttttgtatacgaaatgtcgtttgtgcagtgtgtaatatgtggcaaggatatggttgtccttgtgctagtt

SEQ ID NO: 870 - DNA, 80 bp, synthetic construct
  misc_feature 1..80: note = Synthetic: >HKU9-cand-13020-13099
  source 1..80: mol_type = other DNA
taagagaaatcaacctacaggctagggatgagtgctttttaaacgagtcaggggtactagtggagtagcccgtctagtac

SEQ ID NO: 871 - DNA, 80 bp, synthetic construct
  misc_feature 1..80: note = Synthetic: >HKU9-cand-13100-13179
  source 1..80: mol_type = other DNA
ccctaggttctggtgtacaaccagatatagtattaagggcttttgatatatgtaacacaaaagtagcaggatttggctta

SEQ ID NO: 872 - DNA, 80 bp, synthetic construct
  misc_feature 1..80: note = Synthetic: >HKU9-cand-13180-13259
  source 1..80: mol_type = other DNA
catttaaagaataattgttgtaggtatcaagaattggatgctgatggcaatcaactagattcctactttgttgttaagcg

SEQ ID NO: 873 - DNA, 80 bp, synthetic construct
  misc_feature 1..80: note = Synthetic: >HKU9-cand-13260-13339
  source 1..80: mol_type = other DNA
ccatactgagagtaattatttacttgagcaacgttgttatgaaaagcttaaggattgtggtgtagttgcacgccatgatt

SEQ ID NO: 874 - DNA, 80 bp, synthetic construct
  misc_feature 1..80: note = Synthetic: >HKU9-cand-13340-13419
  source 1..80: mol_type = other DNA
tctttaagtttaatatagaaggtgttatgacaccacatgtgtctcgagagcgccttactaagtatacaatggcagactta

SEQ ID NO: 875 - DNA, 80 bp, synthetic construct
  misc_feature 1..80: note = Synthetic: >HKU9-cand-13420-13499
  source 1..80: mol_type = other DNA
gtttatagtttacgccattttgataacaacaactgtgacacattaaaggaaatacttgtgttacgtggttgttgtactgc

SEQ ID NO: 876 - DNA, 80 bp, synthetic construct
  misc_feature 1..80: note = Synthetic: >HKU9-cand-13500-13579
  source 1..80: mol_type = other DNA
ggattattttgacagaaaggattggtatgatcctgtcgagaatcctgatattattagagtttaccataaattaggtgaaa

SEQ ID NO: 877 - DNA, 80 bp, synthetic construct
  misc_feature 1..80: note = Synthetic: >HKU9-cand-13580-13659
  source 1..80: mol_type = other DNA
cagttagaaaagccgtactgtcagctgtaaagatggcagatgccatggttgaacaaggacttattggtgttttaaccctg

SEQ ID NO: 878 - DNA, 80 bp, synthetic construct
  misc_feature 1..80: note = Synthetic: >HKU9-cand-13660-13739
  source 1..80: mol_type = other DNA
gataaccaggatttaaatggccaatggtatgattttggtgactttatagaaggaccagcaggtgcgggtgtagctgttat

SEQ ID NO: 879 - DNA, 80 bp, synthetic construct
  misc_feature 1..80: note = Synthetic: >HKU9-cand-13740-13819
  source 1..80: mol_type = other DNA
ggatacttattattcattggctatgcctgtttatactatgacaaatatgctggctgctgaatgtcacgttgatggagatt

SEQ ID NO: 880 - DNA, 80 bp, synthetic construct
  misc_feature 1..80: note = Synthetic: >HKU9-cand-13820-13899
  source 1..80: mol_type = other DNA
ttagtaagcctaagcgcgtgtgggacatatgtaagtatgactacacgcagtttaagtactcattgttctccaagtatttt

SEQ ID NO: 881 - DNA, 80 bp, synthetic construct
  misc_feature 1..80: note = Synthetic: >HKU9-cand-13900-13979
  source 1..80: mol_type = other DNA
aagcattgggacatgcagtatcatcctaattgtgttgcatgtgccgatgatcgttgcattttgcattgtgctaattttaa

SEQ ID NO: 882 - DNA, 80 bp, synthetic construct
  misc_feature 1..80: note = Synthetic: >HKU9-cand-13990-14069
  source 1..80: mol_type = other DNA
agtatggtattacctaatacatcctttgggcctttagttcagaagatttacgttgatggtgtgccatttgtagtttccac

SEQ ID NO: 883 - DNA, 80 bp, synthetic construct
  misc_feature 1..80: note = Synthetic: >HKU9-cand-14070-14149
  source 1..80: mol_type = other DNA
tggttaccattatagagagttaggtgttgtgatgaaccaagatattcgtcaacatgctcaacgtttgtctttgcgtgagc

SEQ ID NO: 884 - DNA, 80 bp, synthetic construct
  misc_feature 1..80: note = Synthetic: >HKU9-cand-14150-14229
  source 1..80: mol_type = other DNA
tactagtgtatgcagcagatcctgctatgcatgttgcggctagtaacgcattggcagataagcgtacagtctgtatgtct

SEQ ID NO: 885 - DNA, 80 bp, synthetic construct
  misc_feature 1..80: note = Synthetic: >MERS-cand-8240-8319
  source 1..80: mol_type = other DNA
gtgtgtctaccagtgatttaggtagtctcattgattgtaatgcggcttcagttaaccaaattgtcttgcgtaattctaat

SEQ ID NO: 886 - DNA, 80 bp, synthetic construct
  misc_feature 1..80: note = Synthetic: >MERS-cand-8320-8399
  source 1..80: mol_type = other DNA
ggtgcttgtatttggaacgctgctgcatatatgaaactctcggatgcacttaaacgacagattcgcattgcatgccgtaa

SEQ ID NO: 887 - DNA, 80 bp, synthetic construct
  misc_feature 1..80: note = Synthetic: >MERS-cand-8400-8479
  source 1..80: mol_type = other DNA
gtgtaatttagctttccggttaaccacctcaaagctacgcgctaatgataatatcttatcagttagattcactgctaaca

SEQ ID NO: 888 - DNA, 80 bp, synthetic construct
  misc_feature 1..80: note = Synthetic: >MERS-cand-8480-8559
  source 1..80: mol_type = other DNA
aaattgttggtggtgctcctacatggtttaatgtgttgcgtgactttacgttaaagggttacgttcttgctaccattatt

SEQ ID NO: 889 - DNA, 80 bp, synthetic construct
  misc_feature 1..80: note = Synthetic: >MERS-cand-8560-8639
  source 1..80: mol_type = other DNA
gtgtttctgtgtgctgtactgatgtatttgtgtttacctacattttctatggtacctgttgaattttatgaagaccgcat

SEQ ID NO: 890 - DNA, 80 bp, synthetic construct
  misc_feature 1..80: note = Synthetic: >MERS-cand-8640-8719
  source 1..80: mol_type = other DNA
cttggactttaaagttcttgataatggtatcattagggatgtaaatcctgatgataagtgctttgctaataagcaccggt

SEQ ID NO: 891 - DNA, 80 bp, synthetic construct
  misc_feature 1..80: note = Synthetic: >MERS-cand-8720-8799
  source 1..80: mol_type = other DNA
ccttcacacaatggtatcatgagcatgttggtggtgtctatgacaactctatcacatgcccattgacagttgcagtaatt

SEQ ID NO: 892 - DNA, 80 bp, synthetic construct
  misc_feature 1..80: note = Synthetic: >MERS-cand-8800-8879
  source 1..80: mol_type = other DNA
gctggagttgctggtgctcgcattccagacgtacctactacattggcttgggtgaacaatcagataattttctttgtttc

SEQ ID NO: 893 - DNA, 80 bp, synthetic construct
  misc_feature 1..80: note = Synthetic: >MERS-cand-8880-8959
  source 1..80: mol_type = other DNA
tcgagtctttgctaatacaggcagtgtttgctacactcctatagatgagataccctataagagtttctctgatagtggtt

SEQ ID NO: 894 - DNA, 80 bp, synthetic construct
  misc_feature 1..80: note = Synthetic: >MERS-cand-8960-9039
  source 1..80: mol_type = other DNA
gcattcttccatctgagtgcactatgtttagggatgcagagggccgtatgacaccatactgccatgatcctactgttttg

SEQ ID NO: 895 - DNA, 80 bp, synthetic construct
  misc_feature 1..80: note = Synthetic: >MERS-cand-9040-9119
  source 1..80: mol_type = other DNA
cctggggcttttgcgtacagtcagatgaggcctcatgttcgttacgacttgtatgatggtaacatgtttattaaatttcc

SEQ ID NO: 896 - DNA, 80 bp, synthetic construct
  misc_feature 1..80: note = Synthetic: >MERS-cand-9120-9199
  source 1..80: mol_type = other DNA
tgaagtagtatttgaaagtacacttaggattactagaactctgtcaactcagtactgccggttcggtagttgtgagtatg

SEQ ID NO: 897 - DNA, 80 bp, synthetic construct
  misc_feature 1..80: note = Synthetic: >MERS-cand-9200-9279
  source 1..80: mol_type = other DNA
cacaagagggtgtttgtattaccacaaatggctcgtgggccatttttaatgaccaccatcttaatagacctggtgtctat

SEQ ID NO: 898 - DNA, 80 bp, synthetic construct
  misc_feature 1..80: note = Synthetic: >MERS-cand-9280-9359
  source 1..80: mol_type = other DNA
tgtggctctgattttattgacattgtcaggcggttagcagtatcactgttccagcctattacttatttccaattgactac

SEQ ID NO: 899 - DNA, 80 bp, synthetic construct
  misc_feature 1..80: note = Synthetic: >MERS-cand-9360-9439
  source 1..80: mol_type = other DNA
ctcattggtcttgggtataggtttgtgtgcattcctgactttgctcttctattatattaataaagtaaaacgtgcttttg

SEQ ID NO: 900 - DNA, 80 bp, synthetic construct
  misc_feature 1..80: note = Synthetic: >MERS-cand-9440-9519
  source 1..80: mol_type = other DNA
cagattacacccagtgtgctgtaattgctgttgttgctgctgttcttaatagcttgtgcatctgctttgttgcctctata

SEQ ID NO: 901 - DNA, 80 bp, synthetic construct
  misc_feature 1..80: note = Synthetic: >MERS-cand-12080-12159
  source 1..80: mol_type = other DNA
acttagctacctttgctgagttggaagctgcgcagaaagcctatcaggaagctatggactctggtgacacctcaccacaa

SEQ ID NO: 902 - DNA, 80 bp, synthetic construct
  misc_feature 1..80: note = Synthetic: >MERS-cand-12160-12239
  source 1..80: mol_type = other DNA
gttcttaaggctttgcagaaggctgttaatatagctaaaaacgcctatgagaaggataaggcagtggcccgtaagttaga

SEQ ID NO: 903 - DNA, 80 bp, synthetic construct
  misc_feature 1..80: note = Synthetic: >MERS-cand-12240-12319
  source 1..80: mol_type = other DNA
acgtatggctgatcaggctatgacttctatgtataagcaagcacgtgctgaagacaagaaagcaaaaattgtcagtgcta

SEQ ID NO: 904 - DNA, 80 bp, synthetic construct
  misc_feature 1..80: note = Synthetic: >MERS-cand-12320-12399
  source 1..80: mol_type = other DNA
tgcaaactatgttgtttggtatgattaagaagctcgacaacgatgttcttaatggtatcatttctaacgctaggaatggt

SEQ ID NO: 905 - DNA, 80 bp, synthetic construct
  misc_feature 1..80: note = Synthetic: >MERS-cand-12400-12479
  source 1..80: mol_type = other DNA
tgtatacctcttagtgtcattccactgtgtgcttcaaataaacttcgcgttgtaattcctgacttcaccgtctggaatca

SEQ ID NO: 906 - DNA, 80 bp, synthetic construct
  misc_feature 1..80: note = Synthetic: >MERS-cand-12480-12559
  source 1..80: mol_type = other DNA
ggtagtcacatatccctcgcttaactacgctggggctttgtgggacattacagttataaacaatgtggacaatgaaattg

SEQ ID NO: 907 - DNA, 80 bp, synthetic construct
  misc_feature 1..80: note = Synthetic: >MERS-cand-12560-12639
  source 1..80: mol_type = other DNA
ttaagtcttcagatgttgtagacagcaatgaaaatttaacatggccacttgttttagaatgcactagggcatccacttct

SEQ ID NO: 908 - DNA, 80 bp, synthetic construct
  misc_feature 1..80: note = Synthetic: >MERS-cand-12640-12719
  source 1..80: mol_type = other DNA
gccgttaagttgcaaaataatgagatcaaaccttcaggtttaaaaaccatggttgtgtctgcaggtcaagagcaaactaa

SEQ ID NO: 909 - DNA, 80 bp, synthetic construct
  misc_feature 1..80: note = Synthetic: >MERS-cand-12720-12799
  source 1..80: mol_type = other DNA
ctgtaatactagttccttagcttattacgaacctgtgcagggtcgtaaaatgctgatggctcttctttctgataatgcct

SEQ ID NO: 910 - DNA, 80 bp, synthetic construct
  misc_feature 1..80: note = Synthetic: >MERS-cand-12800-12879
  source 1..80: mol_type = other DNA
atctcaaatgggcgcgtgttgaaggtaaggacggatttgttagtgtagagctacaacctccttgcaaattcttgattgcg

SEQ ID NO: 911 - DNA, 80 bp, synthetic construct
  misc_feature 1..80: note = Synthetic: >MERS-cand-12880-12959
  source 1..80: mol_type = other DNA
ggaccaaaaggacctgaaatccgatatctctattttgttaaaaatcttaacaaccttcatcgcgggcaagtgttagggca

SEQ ID NO: 912 - DNA, 80 bp, synthetic construct
  misc_feature 1..80: note = Synthetic: >MERS-cand-12960-13039
  source 1..80: mol_type = other DNA
cattgctgcgactgttagattgcaagctggttctaacaccgagtttgcctctaattcttcggtgttgtcacttgttaact

SEQ ID NO: 913 - DNA, 80 bp, synthetic construct
  misc_feature 1..80: note = Synthetic: >MERS-cand-13040-13119
  source 1..80: mol_type = other DNA
tcaccgttgatcctcaaaaagcttatctcgatttcgtcaatgcgggaggtgccccattgacaaattgtgttaagatgctt

SEQ ID NO: 914 - DNA, 80 bp, synthetic construct
  misc_feature 1..80: note = Synthetic: >MERS-cand-13120-13199
  source 1..80: mol_type = other DNA
actcctaaaactggtacaggtatagctatatctgttaaaccagagagtacagctgatcaagagacttatggtggagcttc

SEQ ID NO: 915 - DNA, 80 bp, synthetic construct
  misc_feature 1..80: note = Synthetic: >MERS-cand-13200-13279
  source 1..80: mol_type = other DNA
agtgtgtctctattgccgtgcgcatatagaacatcctgatgtctctggtgtttgtaaatataagggtaagtttgtccaaa

SEQ ID NO: 916 - DNA, 80 bp, synthetic construct
  misc_feature 1..80: note = Synthetic: >MERS-cand-13280-13359
  source 1..80: mol_type = other DNA
tccctgctcagtgtgtccgtgaccctgtgggattttgtttgtcaaataccccctgtaatgtctgtcaatattggattgga

SEQ ID NO: 917 - DNA, 80 bp, synthetic construct
  misc_feature 1..80: note = Synthetic: >NL63-cand-16950-17029
  source 1..80: mol_type = other DNA
agttttttgagattaaacatgcagatttacactctagccaggtttgtggcttgtttaaaaattgtacacgcactcctctt

SEQ ID NO: 918 - DNA, 80 bp, synthetic construct
  misc_feature 1..80: note = Synthetic: >NL63-cand-17030-17109
  source 1..80: mol_type = other DNA
aatttaccaccaactcatgcacacactttcttgtcgttgtcagatcagtttaagactacaggtgatttagctgttcaaat

SEQ ID NO: 919 - DNA, 80 bp, synthetic construct
  misc_feature 1..80: note = Synthetic: >NL63-cand-17110-17189
  source 1..80: mol_type = other DNA
aggttcaaataacgtttgtacttatgaacatgttatatcatttatgggttttaggtttgatattagtattcctggtagtc

SEQ ID NO: 920 - DNA, 80 bp, synthetic construct
  misc_feature 1..80: note = Synthetic: >NL63-cand-17190-17269
  source 1..80: mol_type = other DNA
atagtttgttttgtacacgtgactttgctattcgtaatgtgcgtggttggttgggtatggatgttgaaagtgctcatgtt

SEQ ID NO: 921 - DNA, 80 bp, synthetic construct
  misc_feature 1..80: note = Synthetic: >NL63-cand-17270-17349
  source 1..80: mol_type = other DNA
tgtggcgataacataggtactaatgttcctttacaggttggtttttcaaatggtgttaattttgttgtgcaaactgaagg

SEQ ID NO: 922 - DNA, 80 bp, synthetic construct
  misc_feature 1..80: note = Synthetic: >NL63-cand-17350-17429
  source 1..80: mol_type = other DNA
ttgtgtgtctaccaattttggtgatgttattaaacctgtttgtgcaaaatctccaccaggtgaacaatttagacaccttg

SEQ ID NO: 923 - DNA, 80 bp, synthetic construct
  misc_feature 1..80: note = Synthetic: >NL63-cand-17430-17509
  source 1..80: mol_type = other DNA
ttcctcttttacgtaaaggacaaccttggttaattgttcgtagacgcattgtgcaaatgatatctgattatttgtccaat

SEQ ID NO: 924 - DNA, 80 bp, synthetic construct
  misc_feature 1..80: note = Synthetic: >NL63-cand-17510-17589
  source 1..80: mol_type = other DNA
ttgtctgacattcttgtctttgttttgtgggcaggtagtttggaattaactacaatgcgttactttgtaaaaatagggcc

SEQ ID NO: 925 - DNA, 80 bp, synthetic construct
  misc_feature 1..80: note = Synthetic: >NL63-cand-17590-17669
  source 1..80: mol_type = other DNA
aattaaatattgttattgtggtaattctgccacttgttataattcagttagtaatgaatattgttgttttaaacatgcat

SEQ ID NO: 926 - DNA, 80 bp, synthetic construct
  misc_feature 1..80: note = Synthetic: >NL63-cand-17670-17749
  source 1..80: mol_type = other DNA
tgggttgtgattatgtttacaatccgtatgcttttgatatacaacagtggggttatgttggttccttgagccaaaaccac

SEQ ID NO: 927 - DNA, 80 bp, synthetic construct
  misc_feature 1..80: note = Synthetic: >NL63-cand-17750-17829
  source 1..80: mol_type = other DNA
cacacattctgtaacattcatagaaacgagcatgatgcctctggtgatgctgttatgacacgttgtttggcagtacatga

SEQ ID NO: 928 - DNA, 80 bp, synthetic construct
  misc_feature 1..80: note = Synthetic: >NL63-cand-17830-17909
  source 1..80: mol_type = other DNA
ttgttttgtcaaaaatgttgattggactgtaacgtacccctttattgcaaatgagaaatttatcaatggctgtgggcgta

SEQ ID NO: 929 - DNA, 80 bp, synthetic construct
  misc_feature 1..80: note = Synthetic: >NL63-cand-17910-17989
  source 1..80: mol_type = other DNA
atgtccagggacatgttgttcgtgcagccttgaaattgtataaacctagtgttattcatgacattggtaatcctaaaggt

SEQ ID NO: 930 - DNA, 80 bp, synthetic construct
  misc_feature 1..80: note = Synthetic: >NL63-cand-17990-18069
  source 1..80: mol_type = other DNA
gtacgttgtgctgttactgatgccaaatggtactgttatgacaagcaacctgttaatagtaatgtcaagttgttggatta

SEQ ID NO: 931 - DNA, 80 bp, synthetic construct
  misc_feature 1..80: note = Synthetic: >NL63-cand-18070-18149
  source 1..80: mol_type = other DNA
tgattatgcaacccatggtcaacttgatggtctttgtctattctggaattgtaatgttgatatgtatccagaattttcaa

SEQ ID NO: 932 - DNA, 80 bp, synthetic construct
  misc_feature 1..80: note = Synthetic: >NL63-cand-18150-18229
  source 1..80: mol_type = other DNA
ttgtgtgtcgttttgacacacgtactcgttctgtttttaatttagaaggtgttaatggtggttctctttatgttaacaaa

SEQ ID NO: 933 - DNA, 80 bp, synthetic construct
  misc_feature 1..80: note = Synthetic: >NL63-cand-22080-22159
  source 1..80: mol_type = other DNA
ctcttcatggcacatttatttaaagagtggcacttgtccattttctttttctaagttaaataattttcaaaagtttaaga

SEQ ID NO: 934 - DNA, 80 bp, synthetic construct
  misc_feature 1..80: note = Synthetic: >NL63-cand-22160-22239
  source 1..80: mol_type = other DNA
ctatttgtttctcaaccgtcgcagtgcctggtagttgtaattttccacttgaagccacctggcattacacttcttatact

SEQ ID NO: 935 - DNA, 80 bp, synthetic construct
  misc_feature 1..80: note = Synthetic: >NL63-cand-22240-22319
  source 1..80: mol_type = other DNA
attgttggtgctttgtatgttacttggtctgaaggtaattccattactggtgtaccttatcctgtctctggtattcgtga

SEQ ID NO: 936 - DNA, 80 bp, synthetic construct
  misc_feature 1..80: note = Synthetic: >NL63-cand-22320-22399
  source 1..80: mol_type = other DNA
gtttagtaatttagttttaaataattgtaccaaatataatatttatgattatgttggtactggaattatacgttcttcaa

SEQ ID NO: 937 - DNA, 80 bp, synthetic construct
  misc_feature 1..80: note = Synthetic: >NL63-cand-22400-22479
  source 1..80: mol_type = other DNA
accagtcacttgctggtggtattacatatgtttctaactctggtaatttacttggttttaaaaatgtttccactggtaac

SEQ ID NO: 938 - DNA, 80 bp, synthetic construct
  misc_feature 1..80: note = Synthetic: >NL63-cand-22480-22559
  source 1..80: mol_type = other DNA
atttttattgtgacaccatgtaaccaaccagaccaagtagctgtttatcaacaaagcattattggtgccatgactgctgt

SEQ ID NO: 939 - DNA, 80 bp, synthetic construct
  misc_feature 1..80: note = Synthetic: >NL63-cand-22560-22639
  source 1..80: mol_type = other DNA
taatgagtctagatatggcttgcaaaacttactacagttacctaacttttattatgttagtaatggtggtaacaattgca

SEQ ID NO: 940 - DNA, 80 bp, synthetic construct
  misc_feature 1..80: note = Synthetic: >NL63-cand-22640-22719
  source 1..80: mol_type = other DNA
ctacggccgttatgacttattctaattttggtatttgtgctgatggttctttaattcctgttcgtccgcgtaattctagt

SEQ ID NO: 941 - DNA, 80 bp, synthetic construct
  misc_feature 1..80: note = Synthetic: >NL63-cand-22720-22799
  source 1..80: mol_type = other DNA
gataatggtatttcagccataatcactgctaatttatccattccctctaactggactacttcagttcaagttgagtacct

SEQ ID NO: 942 - DNA, 80 bp, synthetic construct
  misc_feature 1..80: note = Synthetic: >NL63-cand-22800-22879
  source 1..80: mol_type = other DNA
ccaaattactagtactccaatagttgttgattgtgctacttatgtgtgtaatggtaaccctcgctgtaagaatctactta

SEQ ID NO: 943 - DNA, 80 bp, synthetic construct
  misc_feature 1..80: note = Synthetic: >NL63-cand-22880-22959
  source 1..80: mol_type = other DNA
agcagtatacttctgcttgtaaaactattgaagatgccttacgacttagtgctcatttggaaactaatgatgttagtagt

SEQ ID NO: 944 - DNA, 80 bp, synthetic construct
  misc_feature 1..80: note = Synthetic: >NL63-cand-22960-23039
  source 1..80: mol_type = other DNA
atgctaactttcgatagcaatgcttttagtttggctaatgttactagttttggagattataacctttctagtgttttacc

SEQ ID NO: 945 - DNA, 80 bp, synthetic construct
  misc_feature 1..80: note = Synthetic: >NL63-cand-23040-23119
  source 1..80: mol_type = other DNA
tcagagaaacattcattcaagccgtatagcaggacgtagtgctttggaagatttgttgtttagcaaagttgttacatctg

SEQ ID NO: 946 - DNA, 80 bp, synthetic construct
  misc_feature 1..80: note = Synthetic: >NL63-cand-23120-23199
  source 1..80: mol_type = other DNA
gtttgggtactgttgatgttgactataagtcttgtactaaaggtctttctattgctgaccttgcttgtgctcagtactac

SEQ ID NO: 947 - DNA, 80 bp, synthetic construct
  misc_feature 1..80: note = Synthetic: >NL63-cand-23200-23279
  source 1..80: mol_type = other DNA
aatggcataatggttttgccaggtgttgctgatgctgaacgtatggccatgtacacaggttctcttataggtggcatggt

SEQ ID NO: 948 - DNA, 80 bp, synthetic construct
  misc_feature 1..80: note = Synthetic: >NL63-cand-23280-23359
  source 1..80: mol_type = other DNA
gctcggaggtcttacatcagcagccgccatacctttttctttggcactgcaagcacgacttaactatgttgctttacaaa

SEQ ID NO: 949 - DNA, 80 bp, synthetic construct
  misc_feature 1..80: note = Synthetic: >SARSCoV-cand-8770-8849
  source 1..80: mol_type = other DNA
cattacaagagagattggtttcatagtgcctggcttaccgggtactgtgctgagagcaatcaatggtgacttcttgcatt

SEQ ID NO: 950 - DNA, 80 bp, synthetic construct
  misc_feature 1..80: note = Synthetic: >SARSCoV-cand-8850-8929
  source 1..80: mol_type = other DNA
ttctacctcgtgtttttagtgctgttggcaacatttgctacacaccttccaaactcattgagtatagtgattttgctacc

SEQ ID NO: 951 - DNA, 80 bp, synthetic construct
  misc_feature 1..80: note = Synthetic: >SARSCoV-cand-8930-9009
  source 1..80: mol_type = other DNA
tctgcttgcgttcttgctgctgagtgtacaatttttaaggatgctatgggcaaacctgtgccatattgttatgacactaa

SEQ ID NO: 952 - DNA, 80 bp, synthetic construct
  misc_feature 1..80: note = Synthetic: >SARSCoV-cand-9010-9089
  source 1..80: mol_type = other DNA
tttgctagagggttctatttcttatagtgagcttcgtccagacactcgttatgtgcttatggatggttccatcatacagt

SEQ ID NO: 953 - DNA, 80 bp, synthetic construct
  misc_feature 1..80: note = Synthetic: >SARSCoV-cand-9090-9169
  source 1..80: mol_type = other DNA
ttcctaacacttacctggagggttctgttagagtagtaacaacttttgatgctgagtactgtagacatggtacatgcgaa

SEQ ID NO: 954 - DNA, 80 bp, synthetic construct
  misc_feature 1..80: note = Synthetic: >SARSCoV-cand-9170-9249
  source 1..80: mol_type = other DNA
aggtcagaagtaggtatttgcctatctaccagtggtagatgggttcttaataatgagcattacagagctctatcaggagt

SEQ ID NO: 955 - DNA, 80 bp, synthetic construct
  misc_feature 1..80: note = Synthetic: >SARSCoV-cand-9250-9329
  source 1..80: mol_type = other DNA
tttctgtggtgttgatgcgatgaatctcatagctaacatctttactcctcttgtgcaacctgtgggtgctttagatgtgt

SEQ ID NO: 956 - DNA, 80 bp, synthetic construct
  misc_feature 1..80: note = Synthetic: >SARSCoV-cand-9330-9409
  source 1..80: mol_type = other DNA
ctgcttcagtagtggctggtggtattattgccatattggtgacttgtgctgcctactactttatgaaattcagacgtgtt

SEQ ID NO: 957 - DNA, 80 bp, synthetic construct
  misc_feature 1..80: note = Synthetic: >SARSCoV-cand-9410-9489
  source 1..80: mol_type = other DNA
tttggtgagtacaaccatgttgttgctgctaatgcacttttgtttttgatgtctttcactatactctgtctggtaccagc

SEQ ID NO: 958 - DNA, 80 bp, synthetic construct
  misc_feature 1..80: note = Synthetic: >SARSCoV-cand-9490-9569
  source 1..80: mol_type = other DNA
ttacagctttctgccgggagtctactcagtcttttacttgtacttgacattctatttcaccaatgatgtttcattcttgg

SEQ ID NO: 959 - DNA, 80 bp, synthetic construct
  misc_feature 1..80: note = Synthetic: >SARSCoV-cand-9570-9649
  source 1..80: mol_type = other DNA
ctcaccttcaatggtttgccatgttttctcctattgtgcctttttggataacagcaatctatgtattctgtatttctctg

SEQ ID NO: 960 - DNA, 80 bp, synthetic construct
  misc_feature 1..80: note = Synthetic: >SARSCoV-cand-9650-9729
  source 1..80: mol_type = other DNA
aagcactgccattggttctttaacaactatcttaggaaaagagtcatgtttaatggagttacatttagtaccttcgagga

SEQ ID NO: 961 - DNA, 80 bp, synthetic construct
  misc_feature 1..80: note = Synthetic: >SARSCoV-cand-9730-9809
  source 1..80: mol_type = other DNA
ggctgctttgtgtacctttttgctcaacaaggaaatgtacctaaaattgcgtagcgagacactgttgccacttacacagt

SEQ ID NO: 962 - DNA, 80 bp, synthetic construct
  misc_feature 1..80: note = Synthetic: >SARSCoV-cand-9810-9889
  source 1..80: mol_type = other DNA
ataacaggtatcttgctctatataacaagtacaagtatttcagtggagccttagatactaccagctatcgtgaagcagct

SEQ ID NO: 963 - DNA, 80 bp, synthetic construct
  misc_feature 1..80: note = Synthetic: >SARSCoV-cand-9890-9969
  source 1..80: mol_type = other DNA
tgctgccacttagcaaaggctctaaatgactttagcaactcaggtgctgatgttctctaccaaccaccacagacatcaat

SEQ ID NO: 964 - DNA, 80 bp, synthetic construct
  misc_feature 1..80: note = Synthetic: >SARSCoV-cand-9970-10049
  source 1..80: mol_type = other DNA
cacttctgctgttctgcagagtggttttaggaaaatggcattcccgtcaggcaaagttgaagggtgcatggtacaagtaa

SEQ ID NO: 965 - DNA, 80 bp, synthetic construct
  misc_feature 1..80: note = Synthetic: >Shrew-cand-20820-20899
  source 1..80: mol_type = other DNA
aatataaccgttgattcatatagttgtaaaactttattgagtgatggttattgtgttgtttttaataatggtagtactga

SEQ ID NO: 966 - DNA, 80 bp, synthetic construct
  misc_feature 1..80: note = Synthetic: >Shrew-cand-20900-20979
  source 1..80: mol_type = other DNA
ggttgttcctattggtattgttggtgctaataccacctataatatgccaatattagaagaatcttttgttgaattagcat

SEQ ID NO: 967 - DNA, 80 bp, synthetic construct
  misc_feature 1..80: note = Synthetic: >Shrew-cand-20980-21059
  source 1..80: mol_type = other DNA
tagaccatgttttagtttctgaatctgaatattttcagacagaaatgccggtttttgatatagattgtgaaaagtatatt

SEQ ID NO: 968 - DNA, 80 bp, synthetic construct
  misc_feature 1..80: note = Synthetic: >Shrew-cand-21060-21139
  source 1..80: mol_type = other DNA
tgtgacaattctgaaagttgtcggatgttattagaacaatacgctggtttttgttctaaaataacatctgacgtcaaagg

SEQ ID NO: 969 - DNA, 80 bp, synthetic construct
  misc_feature 1..80: note = Synthetic: >Shrew-cand-21140-21219
  source 1..80: mol_type = other DNA
aaattcacaacttcttaatgctaacacattggctatgtataaaaacatagttccaagtgatagtattaagcctatagaaa

SEQ ID NO: 970 - DNA, 80 bp, synthetic construct
  misc_feature 1..80: note = Synthetic: >Shrew-cand-21220-21299
  source 1..80: mol_type = other DNA
attttggtgattttaatatgtctatgtttattgataaaagcggtagaagtgttttagaagatttattgtttgataaaatt

SEQ ID NO: 971 - DNA, 80 bp, synthetic construct
  misc_feature 1..80: note = Synthetic: >Shrew-cand-21300-21379
  source 1..80: mol_type = other DNA
gtaaccactggtcctggtttctatgaagattattataaatgtcgcacaacaactgttaaagatttggtttgtgcgcaata

SEQ ID NO: 972 - DNA, 80 bp, synthetic construct
  misc_feature 1..80: note = Synthetic: >Shrew-cand-21380-21459
  source 1..80: mol_type = other DNA
ttataatggtattatgataatacccccaattcaagatgctgaaactattggtatgtatggtggtattgtggcagcaggta

SEQ ID NO: 973 - DNA, 80 bp, synthetic construct
  misc_feature 1..80: note = Synthetic: >Shrew-cand-21460-21539
  source 1..80: mol_type = other DNA
tgactatgggtctttttggaggccaagcaaccatgggaacatggcaaattgctatgtctgctcgtttgaatgctgttggt

SEQ ID NO: 974 - DNA, 80 bp, synthetic construct
  misc_feature 1..80: note = Synthetic: >Shrew-cand-21540-21619
  source 1..80: mol_type = other DNA
gttactcagggtatgattatggaagatgttcaaaagttggccaatggttttaatacattggctacctcagtgtctaaaat

SEQ ID NO: 975 - DNA, 80 bp, synthetic construct
  misc_feature 1..80: note = Synthetic: >Shrew-cand-21620-21699
  source 1..80: mol_type = other DNA
ggctagtgtaacagctgatgcgcttagtcgaattcaaggtgttgttaatgctaatgcattgcaagttgaattattggcta

SEQ ID NO: 976 - DNA, 80 bp, synthetic construct
  misc_feature 1..80: note = Synthetic: >Shrew-cand-21700-21779
  source 1..80: mol_type = other DNA
gagctaccatggataattttggtgcaatttcatcaaattttgaaattattgagaaacggttgaaacaagtgcaggctgaa

SEQ ID NO: 977 - DNA, 80 bp, synthetic construct
  misc_feature 1..80: note = Synthetic: >Shrew-cand-21780-21859
  source 1..80: mol_type = other DNA
caacaaatggatcgagtgattaatgggaaaatgaacgcacttttgaattttgtgtctaattataagttgaaagtgtcaga

SEQ ID NO: 978 - DNA, 80 bp, synthetic construct
  misc_feature 1..80: note = Synthetic: >Shrew-cand-21860-21939
  source 1..80: mol_type = other DNA
gttgacaagtattcaacagttggttaagcagaaagttcaagaatgtgtgcatgctcaaagtttaagaaatggattttgtg

SEQ ID NO: 979 - DNA, 80 bp, synthetic construct
  misc_feature 1..80: note = Synthetic: >Shrew-cand-21940-22019
  source 1..80: mol_type = other DNA
gttctggcttgcatgtaatgtcaattccgcaattggttcctaatggtgtaatgtttttacatttttcattggttaagaat

SEQ ID NO: 980 - DNA, 80 bp, synthetic construct
  misc_feature 1..80: note = Synthetic: >Shrew-cand-22020-22099
  source 1..80: mol_type = other DNA
aatagtataattgttaaacaaacacctggtttgtgtaaagaagataagattaattgtattgtacctaaaagtggaatttt

SEQ ID NO: 981 - DNA, 80 bp, synthetic construct
  misc_feature 1..80: note = Synthetic: >BtSk_AlphaCoV-cand-11750-11829
  source 1..80: mol_type = other DNA
gatggcaaacctgtgcatgcaaaagaagttgtaactagtaatgtggaatcattatcttggcccttattccttaattgtga

SEQ ID NO: 982 - DNA, 80 bp, synthetic construct
  misc_feature 1..80: note = Synthetic: >Sb512-cand-11790-11869
  source 1..80: mol_type = other DNA
taacgatggcaaacctgtgcatgcaaaagaagttgtaactagtaatgtggaatcattagcttggcccttattccttaatt

SEQ ID NO: 983 - DNA, 80 bp, synthetic construct
  misc_feature 1..80: note = Synthetic: >Sk512R-cand-11780-11859
  source 1..80: mol_type = other DNA
agataacgatggcaaacctgtgcatgcaaaagaagttgtaactagtaatgtggactcgttatcttggcccttattcctta

SEQ ID NO: 984 - DNA, 80 bp, synthetic construct
  misc_feature 1..80: note = Synthetic: >AlphaSp-cand-15860-15939
  source 1..80: mol_type = other DNA
tattcatgaagtagtgggacctaaagagctggtgttaaaatgggaggttggtaaaccacgtcctcctctaagtcgtaatt

SEQ ID NO: 985 - DNA, 80 bp, synthetic construct
  misc_feature 1..80: note = Synthetic: >BtSk_AlphaCoV-cand-15810-15889
  source 1..80: mol_type = other DNA
cactattcatgaagtggtgggacccaaagagctggtgttaaaatgggaggttggtaaaccacgtcctcctctaagtcgta

SEQ ID NO: 986 - DNA, 80 bp, synthetic construct
  misc_feature 1..80: note = Synthetic: >Sk512R-cand-15840-15919
  source 1..80: mol_type = other DNA
acgcttgtgccactattcatgaagtggtgggacctaaagagctggtgttaaaatgggaggttggtaaaccacgtcctcct

SEQ ID NO: 987 - DNA, 80 bp, synthetic construct
  misc_feature 1..80: note = Synthetic: >BtSk_AlphaCoV-cand-12710-12789
  source 1..80: mol_type = other DNA
aatttcttaaggtgaactgtgttcgtctcaagaatcttgataagcacgacgctttttggattgtaaagaaatgtacgaag

SEQ ID NO: 988 - DNA, 80 bp, synthetic construct
  misc_feature 1..80: note = Synthetic: >AlphaSp-cand-12750-12829
  source 1..80: mol_type = other DNA
agcaaatttcttaaggtgaactgtgttcgtctcaagaatcttgacaagcacgacgctttttggattgtaaagaaatgtac

SEQ ID NO: 989 - DNA, 80 bp, synthetic construct
  misc_feature 1..80: note = Synthetic: >Sk512R-cand-12740-12819
  source 1..80: mol_type = other DNA
attagcaaatttcttaaggtgaactgtgttcgcctcaagcatcttgataagcacgacgctttttggattgtaaagaaatg

SEQ ID NO: 990 - DNA, 80 bp, synthetic construct
  misc_feature 1..80: note = Synthetic: >BtSk_AlphaCoV-cand-15010-15089
  source 1..80: mol_type = other DNA
atgcagatagttgataaggatggtacttattacctcccttaccctgatccgtcaaggatactgtctgcaggtgtttttgt

SEQ ID NO: 991 - DNA, 80 bp, synthetic construct
  misc_feature 1..80: note = Synthetic: >Sb512-cand-15060-15139
  source 1..80: mol_type = other DNA
cagatagttgataaggatggtacttattacctcccttatcctgatccgtcaaggatactgtctgcaggtgtttttgtaga

SEQ ID NO: 992 - DNA, 80 bp, synthetic construct
  misc_feature 1..80: note = Synthetic: >Sk512R-cand-15040-15119
  source 1..80: mol_type = other DNA
tcaacatacaatgcagatagttgataaggatggtacttattacctcccttatcctgatccgtcaaggatactgtctgcag

SEQ ID NO: 993 - DNA, 80 bp, synthetic construct
  misc_feature 1..80: note = Synthetic: >AlphaSp-cand-15070-15149
  source 1..80: mol_type = other DNA
ataaggatggtacttattaccttccctatcccgatccgtcaaggatactgtctgcaggtgtttttgtagatgacattgta

SEQ ID NO: 994 - DNA, 80 bp, synthetic construct
  misc_feature 1..80: note = Synthetic: >Sk512R-cand-12900-12979
  source 1..80: mol_type = other DNA
tcacttggaaagagggtaggtctgtctatggtaatgtttgtcgtcaagatttgactgaatataccatgatggacttatgt

SEQ ID NO: 995 - DNA, 80 bp, synthetic construct
  misc_feature 1..80: note = Synthetic: >Sb512-cand-12910-12989
  source 1..80: mol_type = other DNA
cttggaaagagggtaggtctgtctatggtaatgtttgtcgtcaagatttgactgaatataccatgatggacttatgttat

SEQ ID NO: 996 - DNA, 80 bp, synthetic construct
  misc_feature 1..80: note = Synthetic: >BtSk_AlphaCoV-cand-12870-12949
  source 1..80: mol_type = other DNA
gaaagagggtaggtctgtctatggtaatgtttgtcgtcaagatttgactgaatataccatgatggacttatgttatgcat

SEQ ID NO: 997 - DNA, 80 bp, synthetic construct
  misc_feature 1..80: note = Synthetic: >AlphaSp-cand-16820-16899
  source 1..80: mol_type = other DNA
taagatttattgtagaggtaatgttcaggttgataatggttctagtattaacagacgacaacttgaagttgttcgtatgt

SEQ ID NO: 998 - DNA, 80 bp, synthetic construct
  misc_feature 1..80: note = Synthetic: >BtSk_AlphaCoV-cand-16770-16849
  source 1..80: mol_type = other DNA
ctttaagatttactgtagaggtaatgttcaggttgacaatggctctagtattaacagacgacaacttgaagttgttcgta

SEQ ID NO: 999 - DNA, 80 bp, synthetic construct
  misc_feature 1..80: note = Synthetic: >Sk512R-cand-16800-16879
  source 1..80: mol_type = other DNA
gcaaagagtgctttaagatttactgtagaggtaatgttcaggttgacaatggttctagtattaacagacgacaacttgaa

SEQ ID NO: 1000 - DNA, 80 bp, synthetic construct
  misc_feature 1..80: note = Synthetic: >Sk512R-cand-12420-12499
  source 1..80: mol_type = other DNA
gcttctgtgtgtctctattgtagagcacatgttgaacacccagatatggacgggttttgtaagcttagaggcaagtatgt

SEQ ID NO: 1001 - DNA, 80 bp, synthetic construct
  misc_feature 1..80: note = Synthetic: >BtSk_AlphaCoV-cand-12390-12469
  source 1..80: mol_type = other DNA
tgtgtctctattgtagagcacatgttgaacacccagatatggacgggttttgtaagcttagaggcaagtatgttcaggtg

SEQ ID NO: 1002 - DNA, 80 bp, synthetic construct
  misc_feature 1..80: note = Synthetic: >AlphaSp-cand-12430-12509
  source 1..80: mol_type = other DNA
tctgtgtgtctctattgtagagcacatgttgaacacccagatatggacgggttttgtaagcttaaaggcaagtatgttca

SEQ ID NO: 1003 - DNA, 80 bp, synthetic construct
  misc_feature 1..80: note = Synthetic: >AlphaSp-cand-11320-11399
  source 1..80: mol_type = other DNA
acatatgttaacttgccttcctatatggcttatgaaacagcacgtcaaagttatgaagacgctttggctaatggttctcc

SEQ ID NO: 1004 - DNA, 80 bp, synthetic construct
  misc_feature 1..80: note = Synthetic: >Sb512-cand-11310-11389
  source 1..80: mol_type = other DNA
cgttgcagccacatatgttaacttgccttcctatttggcttatgaaacagcacgtcaaagttatgaagacgctttggcta

SEQ ID NO: 1005 - DNA, 80 bp, synthetic construct
  misc_feature 1..80: note = Synthetic: >BtSk_AlphaCoV-cand-11270-11349
  source 1..80: mol_type = other DNA
gcagccacatatgttaacttgccttcctatttggcttttgaaacagcacgtcaaagttatgaagacgctttggctaatgg

SEQ ID NO: 1006 - DNA, 80 bp, synthetic construct
  misc_feature 1..80: note = Synthetic: >Sk512R-cand-11300-11379
  source 1..80: mol_type = other DNA
gagcgttgcagccacatatgttaacttgccttcctatttggcttatgaaacagcacgtcaaagttatgaagacgctttgg

SEQ ID NO: 1007 - DNA, 80 bp, synthetic construct
  misc_feature 1..80: note = Synthetic: >Sk512R-cand-13140-13219
  source 1..80: mol_type = other DNA
ttgcccgtgccatgcttaagtgtgttaaatactgtgatgcaatggtcgaacagggcatagttggtgttattacacttgat

SEQ ID NO: 1008 - DNA, 80 bp, synthetic construct
  misc_feature 1..80: note = Synthetic: >Sb512-cand-13150-13229
  source 1..80: mol_type = other DNA
cccgtgccatgcttaagtgtgttaaatactgtgatgcaatggttgaacaaggcatagttggtgttattacgcttgataat

SEQ ID NO: 1009 - DNA, 80 bp, synthetic construct
  misc_feature 1..80: note = Synthetic: >BtSk_AlphaCoV-cand-13110-13189
  source 1..80: mol_type = other DNA
tgccatgcttaagtgtgttaaatactgtgatgcaatggttgaacaaggcatagttggtgttattacgcttgataatcagg

SEQ ID NO: 1010 - DNA, 80 bp, synthetic construct
  misc_feature 1..80: note = Synthetic: >BtSk_AlphaCoV-cand-11910-11989
  source 1..80: mol_type = other DNA
ttgtagcagatggtaatgcactatacagtaatgagggtgggcgtacatttatgtacgcttttatctctgataaaccagat

SEQ ID NO: 1011 - DNA, 80 bp, synthetic construct
  misc_feature 1..80: note = Synthetic: >Sk512R-cand-11940-12019
  source 1..80: mol_type = other DNA
gagggtgttgtagcagatggtaatgcactatacagtaatgagggtgggcgtacatttatgtacgcttttatctctgataa

SEQ ID NO: 1012 - DNA, 80 bp, synthetic construct
  misc_feature 1..80: note = Synthetic: >AlphaSp-cand-11950-12029
  source 1..80: mol_type = other DNA
ggtgttgtagcagatggtaatgcactatacagtagtgagggtgggcgtacatttatgtatgcttttatctctgataaacc

SEQ ID NO: 1013 - DNA, 80 bp, synthetic construct
  misc_feature 1..80: note = Synthetic: >BtSk_AlphaCoV-cand-14930-15009
  source 1..80: mol_type = other DNA
atgtttttatgagtgcatccaagtgttggatagaacctgacatcaacaagggtccacatgagttttgttctcaacataca

SEQ ID NO: 1014 - DNA, 80 bp, synthetic construct
  misc_feature 1..80: note = Synthetic: >Sb512-cand-14980-15059
  source 1..80: mol_type = other DNA
tttttatgagtgcatccaagtgttggatagaacctgatatcaacaagggtccacatgagttttgttctcaacatacaatg

SEQ ID NO: 1015 - DNA, 80 bp, synthetic construct
  misc_feature 1..80: note = Synthetic: >Sk512R-cand-14960-15039
  source 1..80: mol_type = other DNA
taccagaataatgtttttatgagtgcatccaagtgttggatagaacctgatatcaacaagggtccacatgagttttgttc

SEQ ID NO: 1016 - DNA, 80 bp, synthetic construct
  misc_feature 1..80: note = Synthetic: >AlphaSp-cand-14990-15069
  source 1..80: mol_type = other DNA
tgcatccaagtgttggatagaacctgatatcaacaagggtccacatgagttttgttctcaacacacaatgcagatagttg

SEQ ID NO: 1017 - DNA, 80 bp, synthetic construct
  misc_feature 1..80: note = Synthetic: >HKU15-cand-14260-14339
  source 1..80: mol_type = other DNA
tctgtgcctaccagcatgttacgcagactacacataaacgtatcattgctatcaacaactacatttgtagtgttgagaat

SEQ ID NO: 1018 - DNA, 80 bp, synthetic construct
  misc_feature 1..80: note = Synthetic: >Delta-cand-15760-15839
  source 1..80: mol_type = other DNA
tgtgcctaccagcatgttacgcagactacacataaacgtatcattgctatcaacaactacatttgtagtgttgagaattg

SEQ ID NO: 1019 - DNA, 80 bp, synthetic construct
  misc_feature 1..80: note = Synthetic: >Quail-cand-14200-14279
  source 1..80: mol_type = other DNA
gtctgcgcctatcagcatgtgacgcagacatcacataaacgtgtcattgctatcaacaactacatttgtagtgttgagaa

SEQ ID NO: 1020 - DNA, 80 bp, synthetic construct
  misc_feature 1..80: note = Synthetic: >HKU17-cand-14270-14349
  source 1..80: mol_type = other DNA
tctgtgcttaccagcatgtgacgcagactactcataaacgtatcattgctatcaacaactacatttgtagtgttgagaac

SEQ ID NO: 1021 - DNA, 80 bp, synthetic construct
  misc_feature 1..80: note = Synthetic: >BtSk_AlphaCoV-cand-17330-17409
  source 1..80: mol_type = other DNA
ttgacattaatgtgccaaaccaacatacgttgttttgcactcgtgatttcgcgatgcgcaacgttaggggttggctaggt

SEQ ID NO: 1022 - DNA, 80 bp, synthetic construct
  misc_feature 1..80: note = Synthetic: >Sk512R-cand-17360-17439
  source 1..80: mol_type = other DNA
ggattcagatttgacattaatgtgccaaaccaacatacgttgttttgcactcgtgatttcgcgatgcgcaacgttagggg

SEQ ID NO: 1023 - DNA, 80 bp, synthetic construct
  misc_feature 1..80: note = Synthetic: >SARSCoV-cand-26940-27019
  source 1..80: mol_type = other DNA
agatcactgtggctacatcacgaacgctttcttattacaaattaggagcgtcgcagcgtgtaggcactgattcaggtttt

SEQ ID NO: 1024 - DNA, 80 bp, synthetic construct
  misc_feature 1..80: note = Synthetic: >BtRl_BetaCoV-cand-26810-26889
  source 1..80: mol_type = other DNA
gagatcactgtggctacatcacgaacgctttcttattacaaattaggagcgtcgcagcgtgtaggcactgattcaggttt

SEQ ID NO: 1025 - DNA, 80 bp, synthetic construct
  misc_feature 1..80: note = Synthetic: >SARSRC-cand-26830-26909
  source 1..80: mol_type = other DNA
atcactgtggctacatcacgaacgctttcttattacaaattaggagcgtcgcagcgtgtaggcactgattcaggttttgc

SEQ ID NO: 1026 - DNA, 80 bp, synthetic construct
  misc_feature 1..80: note = Synthetic: >BtSk_AlphaCoV-cand-13330-13409
  source 1..80: mol_type = other DNA
aagagtgatatttttggagaagattttagaacctttgatctcttggcgtatgacttcacagagcataaggtcaatctttt

SEQ ID NO: 1027 - DNA, 80 bp, synthetic construct
  misc_feature 1..80: note = Synthetic: >Sb512-cand-13380-13459
  source 1..80: mol_type = other DNA
gatatttttggagaagattttagaacctttgatctcttggcgtatgacttcacagagcataaggtcaatcttttcaataa

SEQ ID NO: 1028 - DNA, 80 bp, synthetic construct
  misc_feature 1..80: note = Synthetic: >Sk512R-cand-13360-13439
  source 1..80: mol_type = other DNA
ttttattaagagtgatatttttggagaagattttagaacctttgatcttttggcgtatgacttcacagagcataaggtca

SEQ ID NO: 1029 - DNA, 80 bp, synthetic construct
  misc_feature 1..80: note = Synthetic: >SARSCoV-cand-13400-13479
  source 1..80: mol_type = other DNA
aacgggtttgcggtgtaagtgcagcccgtcttacaccgtgcggcacaggcactagtactgatgtcgtctacagggctttt

SEQ ID NO: 1030 - DNA, 80 bp, synthetic construct
  misc_feature 1..80: note = Synthetic: >WIV16-cand-13390-13469
  source 1..80: mol_type = other DNA
aaacgggtttgcggtgtaagtgcagcccgtcttacaccgtgcggcacaggcactagcactgatgtcgtctacagggcttt

SEQ ID NO: 1031 - DNA, 80 bp, synthetic construct
  misc_feature 1..80: note = Synthetic: >SARSCoV-cand-24530-24609
  source 1..80: mol_type = other DNA
tgaaatcagggcttctgctaatcttgctgctactaaaatgtctgagtgtgttcttggacaatcaaaaagagttgactttt

SEQ ID NO: 1032 - DNA, 80 bp, synthetic construct
  misc_feature 1..80: note = Synthetic: >WIV16-cand-24490-24569
  source 1..80: mol_type = other DNA
gcttctgctaatcttgctgctactaaaatgtctgagtgtgttcttggacaatcaaaaagagttgacttttgcggaaaggg

SEQ ID NO: 1033 - DNA, 80 bp, synthetic construct
  misc_feature 1..80: note = Synthetic: >SARSCoV2-cand-24610-24689
  source 1..80: mol_type = other DNA
tcagagcttctgctaatcttgctgctactaaaatgtcagagtgtgtacttggacaatcaaaaagagttgatttttgtgga

SEQ ID NO: 1034 - DNA, 80 bp, synthetic construct
  misc_feature 1..80: note = Synthetic: >Sk512R-cand-8120-8199
  source 1..80: mol_type = other DNA
taatagtaggcgttgtcctatagttgttggcacatctgatgaggttcgatacattccaggcgtaccagctggtgtatttt

SEQ ID NO: 1035 - DNA, 80 bp, synthetic construct
  misc_feature 1..80: note = Synthetic: >Sb512-cand-8120-8199
  source 1..80: mol_type = other DNA
tacctactaatagtaggcgttgtcctatagttgttggcacatctgatgaggttcgatacattccaggcgtaccagccggt

SEQ ID NO: 1036 - DNA, 80 bp, synthetic construct
  misc_feature 1..80: note = Synthetic: >Sb512-cand-12190-12269
  source 1..80: mol_type = other DNA
tttattggagctacagttagactgcaagctggtaaacaaacagaacaggctactaattcttctttgctgactttatgtgc

SEQ ID NO: 1037 - DNA, 80 bp, synthetic construct
  misc_feature 1..80: note = Synthetic: >Sk512R-cand-12180-12259
  source 1..80: mol_type = other DNA
ggctttattggagctacagttagactgcaagctggtaaacaaacagaacaggccactaattcttctttgctgactttatg

SEQ ID NO: 1038 - DNA, 80 bp, synthetic construct
  misc_feature 1..80: note = Synthetic: >Sparrow-cand-23910-23989
  source 1..80: mol_type = other DNA
aaaggccggtgacgctcgcctgtataagtatatgtaatgtgcaactgtctgttgcagttgagagacttatataaattgtg

SEQ ID NO: 1039 - DNA, 80 bp, synthetic construct
  misc_feature 1..80: note = Synthetic: >Delta-cand-26440-26519
  source 1..80: mol_type = other DNA
accacttcaaaggccggtgacgctcgcctgtataagtatatgtaatgtgcaactgccatctgcagctgcgagatttatat

SEQ ID NO: 1040 - DNA, 80 bp, synthetic construct
  misc_feature 1..80: note = Synthetic: >HKU15-cand-23650-23729
  source 1..80: mol_type = other DNA
cacttcaaaggccggtgacgctcgcctgtataagtatatgtaatgtgcaactgccatctgcagctgcgagatttatatag

SEQ ID NO: 1041 - DNA, 80 bp, synthetic construct
  misc_feature 1..80: note = Synthetic: >Sb512-cand-2220-2299
  source 1..80: mol_type = other DNA
tgacaggtgttatatacagtgtacccacacttttaaggcaccatcttactactttgatgatgatgagtttgttgaacttt

SEQ ID NO: 1042 - DNA, 80 bp, synthetic construct
  misc_feature 1..80: note = Synthetic: >Sk512R-cand-2210-2289
  source 1..80: mol_type = other DNA
gggtgacaggtgttatatacagtgtacccacacttttaaggcaccatcttactactttgatgatgatgagtttgttgaac

SEQ ID NO: 1043 - DNA, 80 bp, synthetic construct
  misc_feature 1..80: note = Synthetic: >AlphaSp-cand-2170-2249
  source 1..80: mol_type = other DNA
agggtgacaggtgttttatacagtgtactcacacttttaatgcaccatcttactactttgatgatgatgagtttgttgaa

SEQ ID NO: 1044 - DNA, 80 bp, synthetic construct
  misc_feature 1..80: note = Synthetic: >Sb512-cand-1980-2059
  source 1..80: mol_type = other DNA
aggtaatcaggcatttttctgcagtgatggcttgtatcggttcatggctgatagagatcttgttattacaagtcctattt

SEQ ID NO: 1045 - DNA, 80 bp, synthetic construct
  misc_feature 1..80: note = Synthetic: >Sk512R-cand-1970-2049
  source 1..80: mol_type = other DNA
tgtaggtaatcaggcatttttctgcagtgatggcttgtatcggttcatggctgatagagatcttgttattacaagtccta

SEQ ID NO: 1046 - DNA, 80 bp, synthetic construct
  misc_feature 1..80: note = Synthetic: >AlphaSp-cand-1930-2009
  source 1..80: mol_type = other DNA
cagtaggtaatcaggcatttttctgtagtgatggcttgtaccggttcatggctgatagagatcttgttattacaagtcct

SEQ ID NO: 1047 - DNA, 80 bp, synthetic construct
  misc_feature 1..80: note = Synthetic: >BetaCoV1-cand-15310-15389
  source 1..80: mol_type = other DNA
tcttaaatatgccattagtgctaaaaatagagctcgcactgttgctggagtctctatcttgagtactatgactggcagaa

SEQ ID NO: 1048 - DNA, 80 bp, synthetic construct
  misc_feature 1..80: note = Synthetic: >HKU24-cand-15070-15149
  source 1..80: mol_type = other DNA
atcttaaatatgccattagtgctaaaaatagggctcgcactgttgctggagtctctatcttgagtactatgactggcaga

SEQ ID NO: 1049 - DNA, 80 bp, synthetic construct
  misc_feature 1..80: note = Synthetic: >BetaCoV1-cand-15860-15939
  source 1..80: mol_type = other DNA
ctatactctcatgtgtaccgcagtgattatgttgatcctgcttttgttaatgagttttatgagtttttaaataagcattt

SEQ ID NO: 1050 - DNA, 80 bp, synthetic construct
  misc_feature 1..80: note = Synthetic: >BetaSp-cand-15970-16049
  source 1..80: mol_type = other DNA
cggcgcctatactctcatgtgtaccgcagtgattatgttgatcctgcttttgttaatgagttttatgagtttttaaataa

SEQ ID NO: 1051 - DNA, 80 bp, synthetic construct
  misc_feature 1..80: note = Synthetic: >BtRf_AlphaCoV-cand-18490-18569
  source 1..80: mol_type = other DNA
cattaccaaccaatgttgcatttgagctgtatgctaagcgcaaaattggtcttacaccgccacttaccattctgaaaaat

SEQ ID NO: 1052 - DNA, 80 bp, synthetic construct
  misc_feature 1..80: note = Synthetic: >SEAC-cand-18680-18759
  source 1..80: mol_type = other DNA
taagacttcattaccaaccaatgttgcatttgagctgtatgctaagcgcaaaattggtcttacaccgccacttaccattc

SEQ ID NO: 1053 - DNA, 80 bp, synthetic construct
  misc_feature 1..80: note = Synthetic: >MinkCoV1-cand-14750-14829
  source 1..80: mol_type = other DNA
agacccttctagaatccttagtgctggtgtgtttgttgacgatattgtcaaaactgataacgttatcatgcttgagcgtt

SEQ ID NO: 1054 - DNA, 80 bp, synthetic construct
  misc_feature 1..80: note = Synthetic: >AlphaMink-cand-14720-14799
  source 1..80: mol_type = other DNA
tacccagacccttctagaatccttagtgctggtgtgtttgttgatgatattgtcaaaactgataacgttatcatgcttga

SEQ ID NO: 1055 - DNA, 80 bp, synthetic construct
  misc_feature 1..80: note = Synthetic: >Alpha2-cand-14710-14789
  source 1..80: mol_type = other DNA
atccagatccttctagaatccttagtgctggtgtgtttgttgatgatattgtcaaaactgataacgttatcatgcttgag

SEQ ID NO: 1056 - DNA, 80 bp, synthetic construct
  misc_feature 1..80: note = Synthetic: >BtSk_AlphaCoV-cand-11190-11269
  source 1..80: mol_type = other DNA
tcttaagtaagaacagcgcttttggtgtggatgagttgttggattcttatttcaacgatagttccatcctccagagcgtt

SEQ ID NO: 1057 - DNA, 80 bp, synthetic construct
  misc_feature 1..80: note = Synthetic: >Sb512-cand-11230-11309
  source 1..80: mol_type = other DNA
ttcttcttaagtaagaacagcgcttttggtgtggatgagttgttggattcttatttcaacgatagttctgtcctccagag

SEQ ID NO: 1058 - DNA, 80 bp, synthetic construct
  misc_feature 1..80: note = Synthetic: >Sk512R-cand-11220-11299
  source 1..80: mol_type = other DNA
gctttcttcttaagtaagaacagcgcttttggtgtggatgagttgttggattcttatttcaacgatagttctgtcctcca

SEQ ID NO: 1059 - DNA, 80 bp, synthetic construct
  misc_feature 1..80: note = Synthetic: >HKU2-cand-8020-8099
  source 1..80: mol_type = other DNA
aacgcttattttcacacttaaaacagtctttggtagtgctggtcattgttatgatgttaatggcatagccgatggtgaca

SEQ ID NO: 1060 - DNA, 80 bp, synthetic construct
  misc_feature 1..80: note = Synthetic: >HKU2R-cand-7840-7919
  source 1..80: mol_type = other DNA
ggtaaaacgcttatttttacacttaaaaccgtctttggtagtgctggtcattgttatgatgttaatggcatagccgatgg

SEQ ID NO: 1061 - DNA, 80 bp, synthetic construct
  misc_feature 1..80: note = Synthetic: >BetaCoV1-cand-16980-17059
  source 1..80: mol_type = other DNA
agattggaaaagtgcggccaccacttaataaaaattatgtttttaccggctaccattttactaagaatggtaagaccgtt

SEQ ID NO: 1062 - DNA, 80 bp, synthetic construct
  misc_feature 1..80: note = Synthetic: >BetaSp-cand-17090-17169
  source 1..80: mol_type = other DNA
cttgggagattggaaaagtgcggccaccacttaataaaaattatgtttttaccggctaccattttactaagaatggtaag

SEQ ID NO: 1063 - DNA, 80 bp, synthetic construct
  misc_feature 1..80: note = Synthetic: >HKU24-cand-16740-16819
  source 1..80: mol_type = other DNA
gaggttggcaaagtgcggccaccacttaataaaaattatgttttcaccggctaccattttactaagaatggtaagaccgt

SEQ ID NO: 1064 - DNA, 80 bp, synthetic construct
  misc_feature 1..80: note = Synthetic: >Sb512-cand-16900-16979
  source 1..80: mol_type = other DNA
ttttggctaagaatcctaaatgggctaaagctgtttttatttctccttacaacagccaaaattatgttgctggcagagtt

SEQ ID NO: 1065 - DNA, 80 bp, synthetic construct
  misc_feature 1..80: note = Synthetic: >HKU14-cand-19150-19229
  source 1..80: mol_type = other DNA
gttttattcttatgaggcacataaggacagttttaaagatggtttgtgtatgttttggaactgcaatgtggataagtatc

SEQ ID NO: 1066 - DNA, 80 bp, synthetic construct
  misc_feature 1..80: note = Synthetic: >BatCoV1A-cand-27100-27179
  source 1..80: mol_type = other DNA
atgctcctctgcgtgttgctgatgacaagcttttccttaagtctatgcctggtaatggtgtaccaaagggtatgggcgag

SEQ ID NO: 1067 - DNA, 80 bp, synthetic construct
  misc_feature 1..80: note = Synthetic: >MbCoV1-cand-26930-27009
  source 1..80: mol_type = other DNA
ttatgctcctctgcgtgttgctgatgacaagcttttccttaagtctatgcctggtaatggtgtaccaaagggtatgggcg

SEQ ID NO: 1068 - DNA, 80 bp, synthetic construct
  misc_feature 1..80: note = Synthetic: >MsbCoV1-cand-26920-26999
  source 1..80: mol_type = other DNA
ttattatgctcctctgcgtgttgctgatgacaagcttttccttaagtctatgcctggtaatggtgtaccaaagggtatgg

SEQ ID NO: 1069 - DNA, 80 bp, synthetic construct
  misc_feature 1..80: note = Synthetic: >Sb512-cand-9000-9079
  source 1..80: mol_type = other DNA
tttgcctaatctgtttaaacttaaagtttctacgcagttgtttgagggtgacaagttcgttggttcttttgaaagtgcag

SEQ ID NO: 1070 - DNA, 80 bp, synthetic construct
  misc_feature 1..80: note = Synthetic: >Sk512R-cand-8990-9069
  source 1..80: mol_type = other DNA
atttttgcctaatctgtttaaacttaaagtttctgcgcagttgtttgagggtgacaagtttgttggttcttttgaaagtg

SEQ ID NO: 1071 - DNA, 80 bp, synthetic construct
  misc_feature 1..80: note = Synthetic: >HKU5-cand-19450-19529
  source 1..80: mol_type = other DNA
atgtaggtttgacacacgtgtgcattcagaattcaatttgcctggttgcgatggtggcagcttgtacgttaacaagcatg

SEQ ID NO: 1072 - DNA, 80 bp, synthetic construct
  misc_feature 1..80: note = Synthetic: >HKU31-cand-19400-19479
  source 1..80: mol_type = other DNA
tatgtaggtttgacacacgtgtgcattcagaatttaatctacctggttgtaatggtggcagtttgtatgttaacaaacat

SEQ ID NO: 1073 - DNA, 80 bp, synthetic construct
  misc_feature 1..80: note = Synthetic: >HKU4R-cand-19310-19389
  source 1..80: mol_type = other DNA
ctattgtttgtcggtttgatactagagtgcattcagagtttaatttgcctggttgtaatggtggcagtttgtatgttaac

SEQ ID NO: 1074 - DNA, 80 bp, synthetic construct
  misc_feature 1..80: note = Synthetic: >Sb512-cand-9240-9319
  source 1..80: mol_type = other DNA
ggctaaagctatgagtgattttgctaatgaccacatggataagttgtacacaccaccaacagttagttataactccacat

SEQ ID NO: 1075 - DNA, 80 bp, synthetic construct
  misc_feature 1..80: note = Synthetic: >Sk512R-cand-9230-9309
  source 1..80: mol_type = other DNA
tctggctaaagctatgagtgactttgctaatgaccatatggataaattgtacacaccaccaacagttagttataactcca

SEQ ID NO: 1076 - DNA, 80 bp, synthetic construct
  misc_feature 1..80: note = Synthetic: >HKU2-cand-15630-15709
  source 1..80: mol_type = other DNA
tagggaggagagtgttaagtcctcttacgcgtgtgctactcttaaggagattataggtcctaaagaactactgttgcaat

SEQ ID NO: 1077 - DNA, 80 bp, synthetic construct
  misc_feature 1..80: note = Synthetic: >SEAC-cand-15610-15689
  source 1..80: mol_type = other DNA
ctattaaagctagggaggagagtgttaagtcctcttacgcgtgtgctactcttaaggagattataggtcctaaagaacta

SEQ ID NO: 1078 - DNA, 80 bp, synthetic construct
  misc_feature 1..80: note = Synthetic: >HKU2R-cand-15440-15519
  source 1..80: mol_type = other DNA
tgaaactattaaagctagagaggagagtgttaagtcttcttatgcgtgtgctactcttaaggagattataggtcctaaag

SEQ ID NO: 1079 - DNA, 80 bp, synthetic construct
  misc_feature 1..80: note = Synthetic: >Alpha2-cand-28250-28329
  source 1..80: mol_type = other DNA
accagagataatagtggtgatgttgtgtatgtcaaactcttaacaactgtctctaaggtaaaaatgcttaatgtgggttg

SEQ ID NO: 1080 - DNA, 80 bp, synthetic construct
  misc_feature 1..80: note = Synthetic: >HKU5R-cand-1450-1529
  source 1..80: mol_type = other DNA
acggagaatgcaaacataccctccctcagcttgttagcatgatgactgacaagtgtgacgttgaggttgttgggaaaacc

SEQ ID NO: 1081 - DNA, 80 bp, synthetic construct
  misc_feature 1..80: note = Synthetic: >BetaCoV1-cand-24750-24829
  source 1..80: mol_type = other DNA
acaacgcttttgtttcaagtatatttaggtactgtcgttacacactattatgtgttgccacttgtgtgtaacgccaggga

SEQ ID NO: 1082 - DNA, 80 bp, synthetic construct
  misc_feature 1..80: note = Synthetic: >BetaSp-cand-24860-24939
  source 1..80: mol_type = other DNA
cccattacaacgcttttgtttcaagtatatttaggtactgtcgttacacactattatgtgttgccacttgtgtgtaacgc

SEQ ID NO: 1083 - DNA, 80 bp, synthetic construct
  misc_feature 1..80: note = Synthetic: >Sb512-cand-3340-3419
  source 1..80: mol_type = other DNA
gctgaagacgttgctgaaacacagaatgttcagcaagacgtcacgcaagatgaagtggaagctgtctgtgacttagttgt

SEQ ID NO: 1084 - DNA, 80 bp, synthetic construct
  misc_feature 1..80: note = Synthetic: >Sk512R-cand-3330-3409
  source 1..80: mol_type = other DNA
tttgctgaagacgttgctgaaacacaggatgttcagcaagatgtctcgcaagatgaagtggaagctgtctgtgacttagt

SEQ ID NO: 1085 - DNA, 80 bp, synthetic construct
  misc_feature 1..80: note = Synthetic: >HKU31-cand-2600-2679
  source 1..80: mol_type = other DNA
acaactgttgatgtgaggcctaaaactagaaatgtagaattggtttatggccaattggaaacaactaatatgcatagtcc

SEQ ID NO: 1086 - DNA, 80 bp, synthetic construct
  misc_feature 1..80: note = Synthetic: >HghCoV1-cand-2600-2679
  source 1..80: mol_type = other DNA
actgttgatgttaggcctaaaactagaaatgtggaattagtttatggccaattggaaacaactaatatgcatagtccaga

SEQ ID NO: 1087 - DNA, 80 bp, synthetic construct
  misc_feature 1..80: note = Synthetic: >BetaCoV1-cand-7660-7739
  source 1..80: mol_type = other DNA
tatggccaatgtgttgccatttcatgtgtttttgcgtttgtatataattgttgtttttatttctaaaatgtttaagttgt

SEQ ID NO: 1088 - DNA, 80 bp, synthetic construct
  misc_feature 1..80: note = Synthetic: >BetaSp-cand-7780-7859
  source 1..80: mol_type = other DNA
gccaatgtgttgccatttcatgtgtttttgcgtttgtatataattgttgtttttatttctaaaatgtttaagttgtttag

SEQ ID NO: 1089 - DNA, 80 bp, synthetic construct
  misc_feature 1..80: note = Synthetic: >HKU31-cand-15720-15799
  source 1..80: mol_type = other DNA
acaagccgttacttcaaatgttagtgctcttatgagtgctaatggtaataaaattattgataaagaagttaaagacatgc

SEQ ID NO: 1090 - DNA, 80 bp, synthetic construct
  misc_feature 1..80: note = Synthetic: >HghCoV1-cand-15650-15729
  source 1..80: mol_type = other DNA
tacaagccgttacttcaaatgttagtgctcttatgagtgctaatggtaataaaattattgataaagaagttaaagacatg

SEQ ID NO: 1091 - DNA, 80 bp, synthetic construct
  misc_feature 1..80: note = Synthetic: >HKU24-cand-14270-14349
  source 1..80: mol_type = other DNA
tgattacaagctagagttgtttaataagtactttaagtattggactatgccttaccatccaaacacatgtgattgcgagg

SEQ ID NO: 1092 - DNA, 80 bp, synthetic construct
  misc_feature 1..80: note = Synthetic: >MsbCoV1-cand-16640-16719
  source 1..80: mol_type = other DNA
ctcctggtagtggtaaatctcattgtgtcattggtcttgggttgtattatcccaacgcacgtattgtctttacagcttgt

SEQ ID NO: 1093 - DNA, 80 bp, synthetic construct
  misc_feature 1..80: note = Synthetic: >229ER-cand-17920-17999
  source 1..80: mol_type = other DNA
gctgtttatgactgctttgttaagaatgtggactggtcaattacctatcctatgatagctaatgaaaaagccataaacaa

SEQ ID NO: 1094 - DNA, 80 bp, synthetic construct
  misc_feature 1..80: note = Synthetic: >AlphaMink-cand-13110-13189
  source 1..80: mol_type = other DNA
accaccctaattgttcagattgtgtagatgatgcttgtattttacattgtgcaaattttaacactttgtttgctactaca

SEQ ID NO: 1095 - DNA, 80 bp, synthetic construct
  misc_feature 1..80: note = Synthetic: >Alpha2-cand-13100-13179
  source 1..80: mol_type = other DNA
ccaccctaattgttcagattgtgtagatgatgcttgtattttacattgtgcaaatttcaacactttatttgctactacaa

SEQ ID NO: 1096 - DNA, 80 bp, synthetic construct
  misc_feature 1..80: note = Synthetic: >HKU31-cand-28250-28329
  source 1..80: mol_type = other DNA
tcagactttttagaaggactgggtcttggtggtcttttaacccagaaactaactgtcttctcaatgtacctataggtggt

SEQ ID NO: 1097 - DNA, 80 bp, synthetic construct
  misc_feature 1..80: note = Synthetic: >HghCoV1-cand-28130-28209
  source 1..80: mol_type = other DNA
cagactttttagaaggactgggtcttggtggtcttttaatccagaaactaactgtcttctcaatgtaccaataggtggta

SEQ ID NO: 1098 - DNA, 80 bp, synthetic construct
  misc_feature 1..80: note = Synthetic: >MsbCoV1-cand-17200-17279
  source 1..80: mol_type = other DNA
cagtgtttcaagatctattgtaagggttccgttcaggttgataacggatcgagcattaaccggcgtcaactggaggtggt

SEQ ID NO: 1099 - DNA, 80 bp, synthetic construct
  misc_feature 1..80: note = Synthetic: >BatCoV1A-cand-17380-17459
  source 1..80: mol_type = other DNA
attgttttaaaatctattgtaagggtactgttcaggttgataacgggtcgagcattaaccggcgtcaactggaggtggtg

SEQ ID NO: 1100 - DNA, 80 bp, synthetic construct
  misc_feature 1..80: note = Synthetic: >BtSk_AlphaCoV-cand-17990-18069
  source 1..80: mol_type = other DNA
atgactgttttgttaagaatgttgactggtccattacttacccatttattgctaacgagcaggctattaacaagagtggt

SEQ ID NO: 1101 - DNA, 80 bp, synthetic construct
  misc_feature 1..80: note = Synthetic: >Sb512-cand-18040-18119
  source 1..80: mol_type = other DNA
actgttttgttaagaatgttgactggtccattacttacccatttattgctaacgagcaggctattaacaagagtggtcgt

SEQ ID NO: 1102 - DNA, 80 bp, synthetic construct
  misc_feature 1..80: note = Synthetic: >MbCoV1-cand-4170-4249
  source 1..80: mol_type = other DNA
accagagatagttttagttatggtgcttgtggtgtttgtggtaaaacactcaagcttaagattagaactatgactggtac

SEQ ID NO: 1103 - DNA, 80 bp, synthetic construct
  misc_feature 1..80: note = Synthetic: >MsbCoV1-cand-4160-4239
  source 1..80: mol_type = other DNA
agagatagttttagttatggtgcttgtggtgtttgtggtaaaacactcaagcttaagattaaaactatgactggtaccgg

SEQ ID NO: 1104 - DNA, 80 bp, synthetic construct
  misc_feature 1..80: note = Synthetic: >MbCoV1-cand-17940-18019
  source 1..80: mol_type = other DNA
ttgttgtacaacctgaaggttgtgttatgaataatgtgaatgacactataacatctgtcaaagctaaggctccacctggt

SEQ ID NO: 1105 - DNA, 80 bp, synthetic construct
  misc_feature 1..80: note = Synthetic: >MsbCoV1-cand-17920-17999
  source 1..80: mol_type = other DNA
ggtgtcgattttgttgtacaacctgaaggttgtgttatgaacaatgtgaatgacactataacatctgtcaaggctaaggc

SEQ ID NO: 1106 - DNA, 80 bp, synthetic construct
  misc_feature 1..80: note = Synthetic: >HKU8R-cand-14010-14089
  source 1..80: mol_type = other DNA
ctgcattgcttgtagcatcctcacctgcattgtttgaccagcgcactgtttgcttctctgttgctgcattgggtactggt

SEQ ID NO: 1107 - DNA, 80 bp, synthetic construct
  misc_feature 1..80: note = Synthetic: >HKU8-cand-14390-14469
  source 1..80: mol_type = other DNA
tacagaccctgcattgcttgttgcatcctcaccagcattgtttgaccagcgcactgtttgcttctctgttgctgcattgg

SEQ ID NO: 1108 - DNA, 80 bp, synthetic construct
  misc_feature 1..80: note = Synthetic: >HKU5-cand-20490-20569
  source 1..80: mol_type = other DNA
actttctcgctcttgatagcgatgtttttatcaagaagtataaactagaagattatgcttttgagcatgtggtttatggt

SEQ ID NO: 1109 - DNA, 80 bp, synthetic construct
  misc_feature 1..80: note = Synthetic: >Sparrow-cand-16740-16819
  source 1..80: mol_type = other DNA
tggggattctcgggacggctctccactaaccacgacgcggtgtgcacatatcatgctaatgcccatgtagcatcagccga

SEQ ID NO: 1110 - DNA, 80 bp, synthetic construct
  misc_feature 1..80: note = Synthetic: >HghCoV1-cand-19090-19169
  source 1..80: mol_type = other DNA
cgtaatgtagttcgtgctgcattactagccggtggttttaatcacgtttatgatattggtaatccaaaaggaattcctat

SEQ ID NO: 1111 - DNA, 80 bp, synthetic construct
  misc_feature 1..80: note = Synthetic: >HKU31-cand-19160-19239
  source 1..80: mol_type = other DNA
gtaatgtagttcgtgccgcattgctagccggtggttttaatcacgtctatgatattggtaatccaaaaggaattcctata

SEQ ID NO: 1112 - DNA, 80 bp, synthetic construct
  misc_feature 1..80: note = Synthetic: >HKU8-cand-15030-15109
  source 1..80: mol_type = other DNA
atagggactactaagttctatggcggctgggacaatatgttgcgaaatcttatggatggtgtggacaatgcgtgtctcat

SEQ ID NO: 1113 - DNA, 80 bp, synthetic construct
  misc_feature 1..80: note = Synthetic: >HKU8R-cand-14650-14729
  source 1..80: mol_type = other DNA
tactaagttctatggcggctgggacaatatgttgcgaaatcttatggatggtgtggacaatgcttgtctcatgggttggg

SEQ ID NO: 1114 - DNA, 80 bp, synthetic construct
  misc_feature 1..80: note = Synthetic: >AcCoV_JC34-cand-15890-15969
  source 1..80: mol_type = other DNA
atagggcgacaaaagattaccaccatccaaggacctccgggtagtggtaagtctcatacaatggtcggccttggtttgta

SEQ ID NO: 1115 - DNA, 80 bp, synthetic construct
  misc_feature 1..80: note = Synthetic: >Lucheng19-cand-16240-16319
  source 1..80: mol_type = other DNA
ggcgacaaaagattaccacaatccaaggacctccgggtagtggtaagtctcatacaatggtcggccttggtttgtactac

SEQ ID NO: 1116 - DNA, 80 bp, synthetic construct
  misc_feature 1..80: note = Synthetic: >HKU5R-cand-490-569
  source 1..80: mol_type = other DNA
ctcaaactctgaagggattcatacggcatctcccaggccctcgtgtttacctggttgagaggctgacagggggtacctat

SEQ ID NO: 1117 - DNA, 80 bp, synthetic construct
  misc_feature 1..80: note = Synthetic: >HKU5-cand-480-559
  source 1..80: mol_type = other DNA
ctctttgtccctcaaactttgaagggattcatacggcatctcccaggccctcgtgtttacctggttgagaggctgacagg

SEQ ID NO: 1118 - DNA, 80 bp, synthetic construct
  misc_feature 1..80: note = Synthetic: >SEAC-cand-24040-24119
  source 1..80: mol_type = other DNA
ttgtacaagccttcaacaagacgtggcagaattgctatgtttgtttctaagttgctcgtaatctttgcttacgtacctat

SEQ ID NO: 1119 - DNA, 80 bp, synthetic construct
  misc_feature 1..80: note = Synthetic: >HKU2-cand-24080-24159
  source 1..80: mol_type = other DNA
attgtacaagccttcaacaagacgtggcagaattgctatgtttgtttctaagttgctcgtaatctttgcttacgtaccta

SEQ ID NO: 1120 - DNA, 80 bp, synthetic construct
  misc_feature 1..80: note = Synthetic: >Delta-cand-3760-3839
  source 1..80: mol_type = other DNA
gattctcttaatgatgatgaaattattattcctatagtaccagtaacacctgcggatttaaaaccacagactattactat

SEQ ID NO: 1121 - DNA, 80 bp, synthetic construct
  misc_feature 1..80: note = Synthetic: >HKU15-cand-3040-3119
  source 1..80: mol_type = other DNA
gattctgatgatgaaattattattcctatagtaccagtaacacctgcggatttaaaaccacagactattactataaagga

SEQ ID NO: 1122 - DNA, 80 bp, synthetic construct
  misc_feature 1..80: note = Synthetic: >Sk512R-cand-10260-10339
  source 1..80: mol_type = other DNA
atagtctgttgtttcttatttttgtttttgtcagaaatgttgaaccactcaaagttgttttggattaacccaggttatat

SEQ ID NO: 1123 - DNA, 80 bp, synthetic construct
  misc_feature 1..80: note = Synthetic: >Sb512-cand-10270-10349
  source 1..80: mol_type = other DNA
gtctgttgtttattatttttgtttttgtcagaaatgttgaaccactcaaagttgttttggattaacccaggttatattac

SEQ ID NO: 1124 - DNA, 80 bp, synthetic construct
  misc_feature 1..80: note = Synthetic: >HKU15-cand-4800-4879
  source 1..80: mol_type = other DNA
tctggacattttggatctttggattcgtaaacccaaattcatcctcgtaaagtcgtggagtgttttgggtagagcactat

SEQ ID NO: 1125 - DNA, 80 bp, synthetic construct
  misc_feature 1..80: note = Synthetic: >HKU4R-cand-5080-5159
  source 1..80: mol_type = other DNA
tgatgttacatttttgcaacgatattattcactgcagccattggttcagcagtggaaatttgttgtacatgatggtgtta

SEQ ID NO: 1126 - DNA, 80 bp, synthetic construct
  misc_feature 1..80: note = Synthetic: >HKU4-cand-11150-11229
  source 1..80: mol_type = other DNA
atgttagcgttatgcaactcactaagtttactatgtggacttatttgtttgagactattcccacacaaatgactcctctc

SEQ ID NO: 1127 - DNA, 80 bp, synthetic construct
  misc_feature 1..80: note = Synthetic: >HKU4R-cand-11150-11229
  source 1..80: mol_type = other DNA
gttatgcaactcactaagtttactatgtggacttatttgtttgagactattcccacacaaatgactcctctcttattggg

SEQ ID NO: 1128 - DNA, 80 bp, synthetic construct
  misc_feature 1..80: note = Synthetic: >Lucheng19-cand-12640-12719
  source 1..80: mol_type = other DNA
caatccaacattattaaccaagattatttaaacgggtgcggggctctagtgatgctcaactagagccctgtagtgaacat

SEQ ID NO: 1129 - DNA, 80 bp, synthetic construct
  misc_feature 1..80: note = Synthetic: >AcCoV_JC34-cand-12290-12369
  source 1..80: mol_type = other DNA
tgtccaatctaacattattagtcaagattatttaaacgggtgcggggctctagtgatgctcaactagagccctgtagtga

SEQ ID NO: 1130 - DNA, 80 bp, synthetic construct
  misc_feature 1..80: note = Synthetic: >Sk512R-cand-3970-4049
  source 1..80: mol_type = other DNA
atgttgacacattggttgtaaaacctttatgtgcagctgtgtatgtgggagctcaagacggtgggcattatttgacaaac

SEQ ID NO: 1131 - DNA, 80 bp, synthetic construct
  misc_feature 1..80: note = Synthetic: >Sb512-cand-3980-4059
  source 1..80: mol_type = other DNA
ttgacacattggttgtaaaacctttatgtgcggctgtgtatgtgggagctcaagatggtgggcattatttgacaaatatg

SEQ ID NO: 1132 - DNA, 80 bp, synthetic construct
  misc_feature 1..80: note = Synthetic: >BtRl_BetaCoV-cand-28490-28569
  source 1..80: mol_type = other DNA
tacacctaaagatcacattggcacccgcaatcctaataacaatgctgccatcgtgctacaacttcctcaaggaacaacat

SEQ ID NO: 1133 - DNA, 80 bp, synthetic construct
  misc_feature 1..80: note = Synthetic: >SARSCoV2-cand-28690-28769
  source 1..80: mol_type = other DNA
caccaaaagatcacattggcacccgcaatcctgctaacaatgctgcaatcgtgctacaacttcctcaaggaacaacattg

SEQ ID NO: 1134 - DNA, 80 bp, synthetic construct
  misc_feature 1..80: note = Synthetic: >Alpha2-cand-9730-9809
  source 1..80: mol_type = other DNA
ccaacagaggttgtgagacagatgtttggcgtgaatttacaaagtacgaaagttaaatcctattgttatcctgttttaat

SEQ ID NO: 1135 - DNA, 80 bp, synthetic construct
  misc_feature 1..80: note = Synthetic: >AlphaMink-cand-9740-9819
  source 1..80: mol_type = other DNA
gccaacagaggttgtgagacagatgtttggcgtgaacttacaaagtacgaaagttaaatcctattgctaccctgttttaa

SEQ ID NO: 1136 - DNA, 80 bp, synthetic construct
  misc_feature 1..80: note = Synthetic: >SARSCoV-cand-470-549
  source 1..80: mol_type = other DNA
attaaacgttctgatgccttaagcaccaatcacggccacaaggtcgttgagctggttgcagaaatggacggcattcagta

SEQ ID NO: 1137 - DNA, 80 bp, synthetic construct
  misc_feature 1..80: note = Synthetic: >WIV16-cand-480-559
  source 1..80: mol_type = other DNA
ctgatgccttaagcaccaatcacggccacaaggtcgttgagctggttgcagaattggacggcattcagtacggtcgtagc

SEQ ID NO: 1138 - DNA, 80 bp, synthetic construct
  misc_feature 1..80: note = Synthetic: >HKU15-cand-6640-6719
  source 1..80: mol_type = other DNA
attaaatctgatatccgcgcctctaccttctacgttgttagagatggagtcttggatactgttcgttcaaatgacaagtg

SEQ ID NO: 1139 - DNA, 80 bp, synthetic construct
  misc_feature 1..80: note = Synthetic: >Delta-cand-7910-7989
  source 1..80: mol_type = other DNA
ctgatatccgcgcctctaccttctacgttgttagagatggagtcttggatactgttcgttcaaatgacaagtgctttgca

SEQ ID NO: 1140 - DNA, 80 bp, synthetic construct
  misc_feature 1..80: note = Synthetic: >HKU8R-cand-14730-14809
  source 1..80: mol_type = other DNA
attaccctaagtgtgaccgtgcattgcccaacatgattcgtatgatttctgctatgattttgggttctaagcatgttaat

SEQ ID NO: 1141 - DNA, 80 bp, synthetic construct
  misc_feature 1..80: note = Synthetic: >WIV16-cand-23930-24009
  source 1..80: mol_type = other DNA
ttatgaagcaatatggcgaatgcctaggtgatattaatgctagagatctcatttgtgcgcagaagttcaatggacttaca

SEQ ID NO: 1142 - DNA, 80 bp, synthetic construct
  misc_feature 1..80: note = Synthetic: >HKU10R-cand-15990-16069
  source 1..80: mol_type = other DNA
gattatggttctgatgctgttagttataagtctacttctacaagtaagttgtctcctggtatggtgtttgtgcttacatc

SEQ ID NO: 1143 - DNA, 80 bp, synthetic construct
  misc_feature 1..80: note = Synthetic: >HKU10-cand-16160-16239
  source 1..80: mol_type = other DNA
tatggttctgatgctgttagttataagtctacttctacaagtaagttgtctcctggtatggtgtttgtgctaacatcgca

SEQ ID NO: 1144 - DNA, 80 bp, synthetic construct
  misc_feature 1..80: note = Synthetic: >HKU4R-cand-13630-13709
  source 1..80: mol_type = other DNA
gatgtcgtttatagggcattcgacatctgcaattttaaagctagagttgcaggtataggaaagtattataaaactaatac

SEQ ID NO: 1145 - DNA, 80 bp, synthetic construct
  misc_feature 1..80: note = Synthetic: >HKU4-cand-13630-13709
  source 1..80: mol_type = other DNA
taaccactgatgtcgtttatagggcattcgacatctgcaattttaaagctagagttgcaggtataggaaagtattataaa

SEQ ID NO: 1146 - DNA, 80 bp, synthetic construct
  misc_feature 1..80: note = Synthetic: >AlphaMink-cand-5980-6059
  source 1..80: mol_type = other DNA
taccattgtttcataaggtagcatgctcaagatatagttctatgtatgcaaactctagttttgttaaatcagatgtttgc

SEQ ID NO: 1147 - DNA, 80 bp, synthetic construct
  misc_feature 1..80: note = Synthetic: >Alpha2-cand-5960-6039
  source 1..80: mol_type = other DNA
ttgttagtgtgccaatgtttcataaggtagcatgttcaagatacagttctatgtatgcaaactctagttttgttaaatca

SEQ ID NO: 1148 - DNA, 80 bp, synthetic construct
  misc_feature 1..80: note = Synthetic: >AlphaCoV1-cand-7210-7289
  source 1..80: mol_type = other DNA
tcttgctagtgttagaaatgtctgtgtttacttttcacaactaattggtaggcctattaagattgttaatagtgatttgc

SEQ ID NO: 1149 - DNA, 80 bp, synthetic construct
  misc_feature 1..80: note = Synthetic: >FelineAlpha1-cand-6810-6889
  source 1..80: mol_type = other DNA
tcttctcttgctagtgttagaaatgtctgtgtttatttttcacaattaattggtaggcctattaagattgttaatagtga

SEQ ID NO: 1150 - DNA, 80 bp, synthetic construct
  misc_feature 1..80: note = Synthetic: >HKU31-cand-27450-27529
  source 1..80: mol_type = other DNA
tctattaattttttagagtgcacattttatagtcgcttcactaaaattagcctagtttcagtagctgaatttagtgttgc

SEQ ID NO: 1151 - DNA, 80 bp, synthetic construct
  misc_feature 1..80: note = Synthetic: >HKU4-cand-11950-12029
  source 1..80: mol_type = other DNA
gcaacagtccaatccaagcttacagatttgaaatgcacatctgttgttttacttacggtgttgcaacaattacaccttga

SEQ ID NO: 1152 - DNA, 80 bp, synthetic construct
  misc_feature 1..80: note = Synthetic: >HKU4R-cand-11950-12029
  source 1..80: mol_type = other DNA
tcaatccaagcttacagatttgaaatgcacatctgttgttttacttacggtgttgcaacaattacaccttgagtctaata

SEQ ID NO: 1153 - DNA, 80 bp, synthetic construct
  misc_feature 1..80: note = Synthetic: >AlphaMink-cand-16640-16719
  source 1..80: mol_type = other DNA
ggtagtgaatatgactttgtcgtgtacacacagacctctgacacagcacatgctgttaacattaacagatttaatgttgc

SEQ ID NO: 1154 - DNA, 80 bp, synthetic construct
  misc_feature 1..80: note = Synthetic: >Alpha2-cand-16630-16709
  source 1..80: mol_type = other DNA
gtagtgaatatgactttgtagtgtacacgcagacctcggatacagcacatgctgttaacattaacagatttaatgttgca

SEQ ID NO: 1155 - DNA, 80 bp, synthetic construct
  misc_feature 1..80: note = Synthetic: >AcCoV_JC34-cand-11810-11889
  source 1..80: mol_type = other DNA
gtatttgtattttgttaaaaatttgaatactttgaggcgtggtgctgttttgggttttataggcgctactgttagattgc

SEQ ID NO: 1156 - DNA, 80 bp, synthetic construct
  misc_feature 1..80: note = Synthetic: >MK953937-cand-2240-2319
  source 1..80: mol_type = other DNA
gtagaattcatggagatttattcttctggaaagggggtgtgcataaaattgttcaagatggcgatgaaatttggtttgac

SEQ ID NO: 1157 - DNA, 80 bp, synthetic construct
  misc_feature 1..80: note = Synthetic: >MN711790-cand-480-559
  source 1..80: mol_type = other DNA
tctggtggtgtttagtgagcagacatacaatagacagtgacaatatggcttcaagcctaaaacagggagtatctcccaaa

SEQ ID NO: 1158 - DNA, 80 bp, synthetic construct
  misc_feature 1..80: note = Synthetic: >MN531555-cand-27530-27609
  source 1..80: mol_type = other DNA
ttttattttagtttaagttagtttagagtagttagaaagatgccagtgccggggccacgcggagtacgatcgagggtaca

SEQ ID NO: 1159 - DNA, 80 bp, synthetic construct
  misc_feature 1..80: note = Synthetic: >KU556806-cand-18050-18129
  source 1..80: mol_type = other DNA
tgttctggaattgtaatgtggattgttatccggacaattcacttgtttgtaggtatgacacaaggaatttgagtgtgttt

SEQ ID NO: 1160 - DNA, 80 bp, synthetic construct
  misc_feature 1..80: note = Synthetic: >MT114541-cand-3070-3149
  source 1..80: mol_type = other DNA
aagaagtcgaatctgctgaggaagattctgaacatgacagtgtagatgcatctgaagttgttgaggaaacttctattcaa

SEQ ID NO: 1161 - DNA, 80 bp, synthetic construct
  misc_feature 1..80: note = Synthetic: >MT114544-cand-3130-3209
  source 1..80: mol_type = other DNA
aagaagttgaatctgttgaagaagactctgaacatgatattgtatatgcatctgaagttgttgaggaaacttctattcaa

SEQ ID NO: 1162 - DNA, 80 bp, synthetic construct
  misc_feature 1..80: note = Synthetic: >MT114540-cand-28560-28639
  source 1..80: mol_type = other DNA
aagagaaaagattgaacgttggttgtttaacatccttctcagtcaaccttccaattggaactcagatttaccatgacaaa

SEQ ID NO: 1163 - DNA, 80 bp, synthetic construct
  misc_feature 1..80: note = Synthetic: >MT114541-cand-28560-28639
  source 1..80: mol_type = other DNA
aagataaaagattgaatgttggttgtcgaacatctttctcagttaaccttccaattggaactcagatttaccatgacaaa

SEQ ID NO: 1164 - DNA, 80 bp, synthetic construct
  misc_feature 1..80: note = Synthetic: >AY692454-cand-0-79
  source 1..80: mol_type = other DNA
aagatagatattaatatatatctattatactagccttgcgctagatttttaacttaacaaaacggacttaaatacctaca

SEQ ID NO: 1165 - DNA, 80 bp, synthetic construct
  misc_feature 1..80: note = Synthetic: >MT114541-cand-27200-27279
  source 1..80: mol_type = other DNA
aaggtcacgctctcaatctagatctcagtctagaaatagatctcaatctagaggaaggcaacaatccaataacaagaagg

SEQ ID NO: 1166 - DNA, 80 bp, synthetic construct
  misc_feature 1..80: note = Synthetic: >MN517817-cand-17410-17489
  source 1..80: mol_type = other DNA
aagcacctccaggtgagcagtttaatcacttgagagctttatttaagagcgctaaaccttggcatgttataagaccaagg

SEQ ID NO: 1167 - DNA, 80 bp, synthetic construct
  misc_feature 1..80: note = Synthetic: >MT114540-cand-19050-19129
  source 1..80: mol_type = other DNA
atgtgtgcacttatatggacatactcttggacgattttgtgactatcattaagggcttagatcttaatgttgtgtccaaa

SEQ ID NO: 1168 - DNA, 80 bp, synthetic construct
  misc_feature 1..80: note = Synthetic: >MT114544-cand-19110-19189
  source 1..80: mol_type = other DNA
atgtgtgtacctatatggacatactcttggacgattttgtgactatcattaagagcttagatcttaatgttgtgtccaaa

SEQ ID NO: 1169 - DNA, 80 bp, synthetic construct
  misc_feature 1..80: note = Synthetic: >MN307884-cand-22770-22849
  source 1..80: mol_type = other DNA
ttaataaggccattggtcatatgcaggaaggttttagaagcacttcgctagcattacaacaggttcaagacgttgttaat

SEQ ID NO: 1170 - DNA, 80 bp, synthetic construct
  misc_feature 1..80: note = Synthetic: >MN128088-cand-25860-25939
  source 1..80: mol_type = other DNA
attagattgtgtttactttcttaacaaagcaggacaagcagagccttgtcccgcgtgtacctccctagtattcaaaggga

SEQ ID NO: 1171 - DNA, 80 bp, synthetic construct
  misc_feature 1..80: note = Synthetic: >MN794188-cand-20270-20349
  source 1..80: mol_type = other DNA
atttaattaagtgtggtaagttactggtaagagatgttgggcaaaccgcttttactagtgactctttggtatgcactatg

SEQ ID NO: 1172 - DNA, 80 bp, synthetic construct
  misc_feature 1..80: note = Synthetic: >AY692454-cand-20330-20409
  source 1..80: mol_type = other DNA
atttaattaagtgtggtaagttactggtaagagatgttggtaacacctcttttactagtgactcttttgtgtgcactatg

SEQ ID NO: 1173 - DNA, 80 bp, synthetic construct
  misc_feature 1..80: note = Synthetic: >AJ311317-cand-2000-2079
  source 1..80: mol_type = other DNA
cttggagaggacatttggcatcttgtctcacaagtcatctataaattaggtgttctttttactaaagtcgttgacttttg

SEQ ID NO: 1174 - DNA, 80 bp, synthetic construct
  misc_feature 1..80: note = Synthetic: >LC088095-cand-24240-24319
  source 1..80: mol_type = other DNA
ctcttgagaatcagattactattcttactgattatacagaaaaaaattttaaggaaatacaatcttccttgaatactttg

SEQ ID NO: 1175 - DNA, 80 bp, synthetic construct
  misc_feature 1..80: note = Synthetic: >SBB-726-cand-8650-8729
  source 1..80: mol_type = other DNA
gaggcagggttgtgtatgtctatacagcccagatggatcgtaaacaatgcctattttagacagcagcagggtgtttattg

SEQ ID NO: 1176 - DNA, 80 bp, synthetic construct
  misc_feature 1..80: note = Synthetic: >SBB-788-cand-8640-8719
  source 1..80: mol_type = other DNA
tgacgtatctgaggcagggttgtgtatgtctatacagcccagatggatcgtaaacaatgcctattttagacagcagcagg

SEQ ID NO: 1177 - DNA, 80 bp, synthetic construct
  misc_feature 1..80: note = Synthetic: >SBB-747-cand-8630-8709
  source 1..80: mol_type = other DNA
taggacgttgtgacgtatctgaggcagggttgtgtatgtctatacagcccagatggatcgtaaacaatgcctattttaga

SEQ ID NO: 1178 - DNA, 80 bp, synthetic construct
  misc_feature 1..80: note = Synthetic: >SBB-130-cand-10100-10179
  source 1..80: mol_type = other DNA
gttagtcctggttttgttacaccagtgtttttaacacttatagtcctatctgttcttttcatgtttttgctcaaacataa

SEQ ID NO: 1179 - DNA, 80 bp, synthetic construct
  misc_feature 1..80: note = Synthetic: >SBB-041-cand-10110-10189
  source 1..80: mol_type = other DNA
ctggttttgttacaccagtgtttttaacacttgtagtcctatctgttcttttcatgtttttgctcaaacataagatattg

SEQ ID NO: 1180 - DNA, 80 bp, synthetic construct
  misc_feature 1..80: note = Synthetic: >SBB-041-cand-10030-10109
  source 1..80: mol_type = other DNA
caatgttgctattgttggtgctttccttgttatgttttggtctgaacttttacactatacagcatttttctgggttagtc

SEQ ID NO: 1181 - DNA, 80 bp, synthetic construct
  misc_feature 1..80: note = Synthetic: >SBB-130-cand-10020-10099
  source 1..80: mol_type = other DNA
ctattagcaatgttgctattgttggtgctttccttgttatgttttggtctgaacttttacactatacagcatttttctgg

SEQ ID NO: 1182 - DNA, 80 bp, synthetic construct
  misc_feature 1..80: note = Synthetic: >SBB-726-cand-18660-18739
  source 1..80: mol_type = other DNA
ttgtcaaagttaaatttagctgggtgcaatggtggctcgctttatgtgaaccaacatgcatttcatactgatgcatttaa

SEQ ID NO: 1183 - DNA, 80 bp, synthetic construct
  misc_feature 1..80: note = Synthetic: >SBB-747-cand-18650-18729
  source 1..80: mol_type = other DNA
cacacgtgtgttgtcaaagttaaacttagctgggtgcaatggtggttcgctttacgtgaaccaacatgcatttcatactg

SEQ ID NO: 1184 - DNA, 80 bp, synthetic construct
  misc_feature 1..80: note = Synthetic: >SBB-747-cand-2630-2709
  source 1..80: mol_type = other DNA
tcaatgtaatccttgacaaagtcatggcgccttttcaagttgaagagggaactagtcttgatgacttagcttgcgtagta

SEQ ID NO: 1185 - DNA, 80 bp, synthetic construct
  misc_feature 1..80: note = Synthetic: >SBB-726-cand-2640-2719
  source 1..80: mol_type = other DNA
ccttgacaaagtcatggcgccttttcaagttgaagagggaactagtcttgatgacttagcttgcgtagttcaacaggcag

SEQ ID NO: 1186 - DNA, 80 bp, synthetic construct
  misc_feature 1..80: note = Synthetic: >SBB-130-cand-8980-9059
  source 1..80: mol_type = other DNA
tgactatcgtcttgcatgctatgcccatttggctaaagccatgttagattactctacaaaccaccaagacttattataca

SEQ ID NO: 1187 - DNA, 80 bp, synthetic construct
  misc_feature 1..80: note = Synthetic: >SBB-010-cand-8990-9069
  source 1..80: mol_type = other DNA
cgtcttgcatgctatgcccatttggctaaagccatgttagattactctacaaaccaccaagacttattatatacacctcc

SEQ ID NO: 1188 - DNA, 80 bp, synthetic construct
  misc_feature 1..80: note = Synthetic: >SBB-797-cand-11280-11359
  source 1..80: mol_type = other DNA
tttgctatctgtccttcaacaactgcgtgttgaggctagtagcaaattatggtcactatgtgtcaagttacataatgaaa

SEQ ID NO: 1189 - DNA, 80 bp, synthetic construct
  misc_feature 1..80: note = Synthetic: >SBB-726-cand-11270-11349
  source 1..80: mol_type = other DNA
ctagtgtagttttgctatctgtccttcaacaactgcgtgttgaggctagtagcaaattatggtcactatgtgttaagtta

SEQ ID NO: 1190 - DNA, 80 bp, synthetic construct
  misc_feature 1..80: note = Synthetic: >SBB-747-cand-1350-1429
  source 1..80: mol_type = other DNA
tgcttttggaggtgccatctggtcccccattggcaaagtcagcgatgttaccgtgtgggtacctcgtgcgtattctatag

SEQ ID NO: 1191 - DNA, 80 bp, synthetic construct
  misc_feature 1..80: note = Synthetic: >SBB-797-cand-1360-1439
  source 1..80: mol_type = other DNA
ggtgccatctggtctcccattggcaaagtcaacgatgttaccgtgtgggtacctcgtgcgtattctatagtagctggaga

SEQ ID NO: 1192 - DNA, 80 bp, synthetic construct
  misc_feature 1..80: note = Synthetic: >SBB-041-cand-12590-12669
  source 1..80: mol_type = other DNA
ttaagaggtgtcctaagtctgtcatggaacatgagcagtccatatatgacatacttaaagattgtggagccgttgcagca

SEQ ID NO: 1193 - DNA, 80 bp, synthetic construct
  misc_feature 1..80: note = Synthetic: >PDF-2386-cand-20320-20399
  source 1..80: mol_type = other DNA
aaaacaggctcatctaagtgtgtttgttctgttattgatcttcttctagatgactttgttgaaataataaagtcacagga

SEQ ID NO: 1194 - DNA, 80 bp, synthetic construct
  misc_feature 1..80: note = Synthetic: >PRD-0038-cand-20310-20389
  source 1..80: mol_type = other DNA
aacagatgtaaaaacaggctcatctaagtgtgtttgttctgttattgatcttcttctagatgactttgttgaaataataa

SEQ ID NO: 1195 - DNA, 80 bp, synthetic construct
  misc_feature 1..80: note = Synthetic: >SBB-041-cand-8350-8429
  source 1..80: mol_type = other DNA
ttatgatggtgagtcaggttctgatttcatttgtggcacaggtttagtttctcttatttacaattttattgtaatgtttt

SEQ ID NO: 1196 - DNA, 80 bp, synthetic construct
  misc_feature 1..80: note = Synthetic: >SBB-130-cand-8340-8419
  source 1..80: mol_type = other DNA
ttcttgtttatgatggtgagtcaggttctgatttcatttgtggcacaggtttagtttctcttatttacaattttattgta

SEQ ID NO: 1197 - DNA, 80 bp, synthetic construct
  misc_feature 1..80: note = Synthetic: >SBB-120-cand-1140-1219
  source 1..80: mol_type = other DNA
ctagtaacaacatctcacctagtggggttaaatactacaatggcatgacacttaaatttgttgacgctgttgacggtttt

SEQ ID NO: 1198 - DNA, 80 bp, synthetic construct
  misc_feature 1..80: note = Synthetic: >SBB-010-cand-1130-1209
  source 1..80: mol_type = other DNA
gtcgttgtcactagtaacaacatctcacctagtggggttaaatactacaatggcatgacactcaaatttgttgacgctgt

SEQ ID NO: 1199 - DNA, 80 bp, synthetic construct
  misc_feature 1..80: note = Synthetic: >SBB-122-cand-1130-1209
  source 1..80: mol_type = other DNA
gttgtcattactagtaacaatatctcacctagtggggttaagtactacaatggcatgacactcaaatttgttgacgctgt

SEQ ID NO: 1200 - DNA, 80 bp, synthetic construct
  misc_feature 1..80: note = Synthetic: >SBB-053-cand-2280-2359
  source 1..80: mol_type = other DNA
cttgttatgcttgtgttgacctaaaagaatttgattctttttatgtcaacgcacatgctgtagaaacactcactgctttt

SEQ ID NO: 1201 - DNA, 80 bp, synthetic construct
  misc_feature 1..80: note = Synthetic: >SBB-010-cand-2270-2349
  source 1..80: mol_type = other DNA
tttattgctgcttgttatgcctgtgttgatctaaaagaatttgattctttttatgtcaacgcacatgctgtagaaacact

SEQ ID NO: 1202 - DNA, 80 bp, synthetic construct
  misc_feature 1..80: note = Synthetic: >SBB-130-cand-5940-6019
  source 1..80: mol_type = other DNA
aaaagcttgacgtggcatctgaaaagttctttactgttggagacgttgttatgcgtaacactgttgctgtgctgttatgg

SEQ ID NO: 1203 - DNA, 80 bp, synthetic construct
  misc_feature 1..80: note = Synthetic: >SBB-041-cand-5950-6029
  source 1..80: mol_type = other DNA
tgacgtggcatctgaaaagttctttactgttggagacgttgttatgcgtaacactgttgctgtgctgttatggcttttca

SEQ ID NO: 1204 - DNA, 80 bp, synthetic construct
  misc_feature 1..80: note = Synthetic: >SBB-120-cand-16840-16919
  source 1..80: mol_type = other DNA
gcttgtaacgttaatagatttaatgttgctattacaagagccaagaagggtatcttttgtgtcatgtgtgataaggagct

SEQ ID NO: 1205 - DNA, 80 bp, synthetic construct
  misc_feature 1..80: note = Synthetic: >SBB-122-cand-16830-16909
  source 1..80: mol_type = other DNA
tactgctcatgcttgtaacgttaatagatttaatgttgctattacaagagccaagaagggtatcttttgtgtcatgtgtg

SEQ ID NO: 1206 - DNA, 80 bp, synthetic construct
  misc_feature 1..80: note = Synthetic: >SBB-010-cand-6970-7049
  source 1..80: mol_type = other DNA
tgcagatggtgatacattctggcgttacaactttgacattacagatagtaaatacagctgtaaggaggttcttaagagct

SEQ ID NO: 1207 - DNA, 80 bp, synthetic construct
  misc_feature 1..80: note = Synthetic: >SBB-122-cand-11190-11269
  source 1..80: mol_type = other DNA
agcttaaacgtgctatgaacatagctaaagctgagtttgaccatgaggcgtctgttcagaagaaaatctctcgtatggca

SEQ ID NO: 1208 - DNA, 80 bp, synthetic construct
  misc_feature 1..80: note = Synthetic: >SBB-120-cand-11200-11279
  source 1..80: mol_type = other DNA
tgctatgaacatagctaaagctgagtttgaccatgaggcttctgttcagaagaaaatctcgcgtatggcagagcaagcag

SEQ ID NO: 1209 - DNA, 80 bp, synthetic construct
  misc_feature 1..80: note = Synthetic: >SBB-797-cand-27810-27889
  source 1..80: mol_type = other DNA
agctttttcccttaacgaaccatgtttttctttatcatagtgcttggcctactggctagtgccagcacttttaaattgga

SEQ ID NO: 1210 - DNA, 80 bp, synthetic construct
  misc_feature 1..80: note = Synthetic: >SBB-747-cand-27800-27879
  source 1..80: mol_type = other DNA
tttcccttaacgaaccatgtttttctttatgttagtgcttggcctactggctagtgccagcacttttaaattggaaatac

SEQ ID NO: 1211 - DNA, 80 bp, synthetic construct
  misc_feature 1..80: note = Synthetic: >SBB-122-cand-10070-10149
  source 1..80: mol_type = other DNA
tctgaacttttacattatacagcattcttctgggttagtcctggttttgttacaccagtgtttttaacacttatagtcct

SEQ ID NO: 1212 - DNA, 80 bp, synthetic construct
  misc_feature 1..80: note = Synthetic: >GCS-211-cand-8240-8319
  source 1..80: mol_type = other DNA
tcagttgtgtttccaatcgtttttcaaactttgacaattggcatcaagacaaatttggttttatacctagcaagtctcct

SEQ ID NO: 1213 - DNA, 80 bp, synthetic construct
  misc_feature 1..80: note = Synthetic: >GCS-227-cand-8240-8319
  source 1..80: mol_type = other DNA
agttgtgtttccaatcgtttttcaaactttgacaattggcatcaagacaaatttggttttacacctagcaagtctcctaa

SEQ ID NO: 1214 - DNA, 80 bp, synthetic construct
  misc_feature 1..80: note = Synthetic: >SBB-130-cand-18010-18089
  source 1..80: mol_type = other DNA
gataagcaaccgcttaattccaacgtcaagatgtttgagtatgactatataacacatggtcagttagatgggttgtgcct

SEQ ID NO: 1215 - DNA, 80 bp, synthetic construct
  misc_feature 1..80: note = Synthetic: >SBB-010-cand-18010-18089
  source 1..80: mol_type = other DNA
tatgataagcaaccgcttaattccaacgtcaagatgtttgagtatgattatataacacatggtcagttagatgggttatg

SEQ ID NO: 1216 - DNA, 80 bp, synthetic construct
  misc_feature 1..80: note = Synthetic: >SBB-120-cand-22330-22409
  source 1..80: mol_type = other DNA
tatactctactattgctgcacgaagcacttcacaacatcctgtcactgatggctttaatgtttctcaatactttctgcct

SEQ ID NO: 1217 - DNA, 80 bp, synthetic construct
  misc_feature 1..80: note = Synthetic: >SBB-122-cand-22320-22399
  source 1..80: mol_type = other DNA
attagcagtttatactctactattgctgcacgaagcacttcacaacatcctgtcactgatggctttaacgtgtctcaata

SEQ ID NO: 1218 - DNA, 80 bp, synthetic construct
  misc_feature 1..80: note = Synthetic: >AlphaCoV1-cand-650-729
  source 1..80: mol_type = other DNA
cgtactggaaaaggtgccatatatgtagatcaatacatgtgtggtgctgatggaaaaccagttattgaaggcgagtttaa

SEQ ID NO: 1219 - DNA, 80 bp, synthetic construct
  misc_feature 1..80: note = Synthetic: >AlphaCoV1-cand-730-809
  source 1..80: mol_type = other DNA
ggactacttcggtgatgaggacgttatcatctatgaaggagaggagtaccattgcgcttggataactgtgcgcgatctgg

SEQ ID NO: 1220 - DNA, 80 bp, synthetic construct
  misc_feature 1..80: note = Synthetic: >AlphaCoV1-cand-810-889
  source 1..80: mol_type = other DNA
aaaaacctttgtgtcaacaaactctccttacaattaaggaaatccaatacaatctggacatcccacataagttgccaaat

SEQ ID NO: 1221 - DNA, 80 bp, synthetic construct
  misc_feature 1..80: note = Synthetic: >AlphaCoV1-cand-890-969
  source 1..80: mol_type = other DNA
tgtgctattagagatgtagcaccaccagtcaagaagaactctaaggtagttctttctgaagagtacaaaaagctctatga

SEQ ID NO: 1222 - DNA, 80 bp, synthetic construct
  misc_feature 1..80: note = Synthetic: >AlphaCoV1-cand-970-1049
  source 1..80: mol_type = other DNA
catcttcggttcaccatttatgggaaatggtgacagtcttaacaagtgttttgacactcttcatttcatcgctgccactc

SEQ ID NO: 1223 - DNA, 80 bp, synthetic construct
  misc_feature 1..80: note = Synthetic: >AlphaCoV1-cand-1050-1129
  source 1..80: mol_type = other DNA
ttaagtgcccttgtggtgctgaaagtagtggtgttggtgattggactggttttaagactgcttgttgtggtcttcatggc

SEQ ID NO: 1224 - DNA, 80 bp, synthetic construct
  misc_feature 1..80: note = Synthetic: >AlphaCoV1-cand-1130-1209
  source 1..80: mol_type = other DNA
aaagttaaaggtgtcacattaggtgctgttaagcctggtgatgctgttgtcactagcatgagtgctggtaagggtgttaa

SEQ ID NO: 1225 - DNA, 80 bp, synthetic construct
  misc_feature 1..80: note = Synthetic: >AlphaCoV1-cand-1210-1289
  source 1..80: mol_type = other DNA
attctttgctaatagtgttctccaatatgctggtgatgttgaaaatgtctctgtttggaaagtgattaaaactttcactg

SEQ ID NO: 1226 - DNA, 80 bp, synthetic construct
  misc_feature 1..80: note = Synthetic: >AlphaCoV1-cand-1290-1369
  source 1..80: mol_type = other DNA
ttaatgagactgtttgcaccactgattttgaaggcgaattagaacgacttcatcaaaccagagagtacttcacctgttgc

SEQ ID NO: 1227 - DNA, 80 bp, synthetic construct
  misc_feature 1..80: note = Synthetic: >AlphaCoV1-cand-1370-1449
  source 1..80: mol_type = other DNA
atgctccattaagagagcattcattactggtgaagttgatgatgcagtccatgattgtatcatcacaggaaagttggatc

SEQ ID NO: 1228 - DNA, 80 bp, synthetic construct
  misc_feature 1..80: note = Synthetic: >AlphaCoV1-cand-1450-1529
  source 1..80: mol_type = other DNA
ttagtactaacctttttggtagtgctagtctactttttaagaaaactccctggtttgtacaaaagtgtggtgcaattttt

SEQ ID NO: 1229 - DNA, 80 bp, synthetic construct
  misc_feature 1..80: note = Synthetic: >AlphaCoV1-cand-1530-1609
  source 1..80: mol_type = other DNA
gctgatgcttggaaagttgttgaggagacttctttgttctctcaaacttacatacaagcaaatttatgatgtagtagcat

SEQ ID NO: 1230 - DNA, 80 bp, synthetic construct
  misc_feature 1..80: note = Synthetic: >AlphaCoV1-cand-1610-1689
  source 1..80: mol_type = other DNA
cactttgcacttctgcttttactattatggactacaaacctgtatttgtagtttcatctaatagtgttaaggatcttgtt

SEQ ID NO: 1231 - DNA, 80 bp, synthetic construct
  misc_feature 1..80: note = Synthetic: >AlphaCoV1-cand-1690-1769
  source 1..80: mol_type = other DNA
gacaagtgtgtgaaaattcttgtgaaagcatttgatgttttcacacagactattacaattgcaggtgttgaggctaagtg

SEQ ID NO: 1232 - DNA, 80 bp, synthetic construct
  misc_feature 1..80: note = Synthetic: >AlphaCoV1-cand-1770-1849
  source 1..80: mol_type = other DNA
ctttgtgcttggttctaaatacttgctttttaataatgcacttgtcaagcttgtcagtgttaaaatacttggcaagaggc

SEQ ID NO: 1233 - DNA, 80 bp, synthetic construct
  misc_feature 1..80: note = Synthetic: >AlphaCoV1-cand-1850-1929
  source 1..80: mol_type = other DNA
aaaaaggtcttgatagtgcattctttgctactaacttgattggtgcaactgttaatgtgacaccacaaagaactgagact

SEQ ID NO: 1234 - DNA, 80 bp, synthetic construct
  misc_feature 1..80: note = Synthetic: >AlphaSp-cand-17940-18019
  source 1..80: mol_type = other DNA
ggttcacttagtatgaatcaccatgaagtttgtaacattcatagaaatgaacatgttgcttcaggtgatgcagctatgac

SEQ ID NO: 1235 - DNA, 80 bp, synthetic construct
  misc_feature 1..80: note = Synthetic: >AlphaSp-cand-18020-18099
  source 1..80: mol_type = other DNA
taggtgcttggctattcatgactgttttgttaagaatgttgactggtctattacttacccattcattgccaatgaacagg

SEQ ID NO: 1236 - DNA, 80 bp, synthetic construct
  misc_feature 1..80: note = Synthetic: >AlphaSp-cand-18100-18179
  source 1..80: mol_type = other DNA
ctattaacaagagtggtcgtttggtacaatcacatgtaatgcgtgcagtcttgaaactgtacaatcctaaggctatccac

SEQ ID NO: 1237 - DNA, 80 bp, synthetic construct
  misc_feature 1..80: note = Synthetic: >AlphaSp-cand-18180-18259
  source 1..80: mol_type = other DNA
gacgttggtaatcctaaaggcatacggtgtgttgttacagacgccagttggtattgttatgataaaaatcctacaaatac

SEQ ID NO: 1238 - DNA, 80 bp, synthetic construct
  misc_feature 1..80: note = Synthetic: >AlphaSp-cand-18260-18339
  source 1..80: mol_type = other DNA
caatgttaaaatgttagagtatgattatattactcatggccagttggatggtttgtgcctgttttggaattgcaatgtgg

SEQ ID NO: 1239 - DNA, 80 bp, synthetic construct
  misc_feature 1..80: note = Synthetic: >AlphaSp-cand-18340-18419
  source 1..80: mol_type = other DNA
acatgtacccagaattctctgtagtttgtaggtttgacacaagaatgcgttcaaccctcaatctagaaggctgtaatggt

SEQ ID NO: 1240 - DNA, 80 bp, synthetic construct
  misc_feature 1..80: note = Synthetic: >AlphaSp-cand-18420-18499
  source 1..80: mol_type = other DNA
ggttcgttgtatgtcaacaaccatgctttccacacaccagcttatgataaacgtgcatttgctaagttaaaagcaatgcc

SEQ ID NO: 1241 - DNA, 80 bp, synthetic construct
  misc_feature 1..80: note = Synthetic: >AlphaSp-cand-18500-18579
  source 1..80: mol_type = other DNA
gtttttcttttatgatgatagtgagtgtgagaaacttcaggatgcagtcaattatgtgcctctgagagcatcaaattgca

SEQ ID NO: 1242 - DNA, 80 bp, synthetic construct
  misc_feature 1..80: note = Synthetic: >AlphaSp-cand-18580-18659
  source 1..80: mol_type = other DNA
ttaccaggtgtaatgttggaggtgcagtttgcagtaaacattgtgctttgtaccataactatgttacggcatacaacact

SEQ ID NO: 1243 - DNA, 80 bp, synthetic construct
  misc_feature 1..80: note = Synthetic: >AlphaSp-cand-18660-18739
  source 1..80: mol_type = other DNA
tttactactgctggttttactatctgggtacctaatagttttgacatgtttaatctatggcagacatttaagaattccaa

SEQ ID NO: 1244 - DNA, 80 bp, synthetic construct
  misc_feature 1..80: note = Synthetic: >AlphaSp-cand-18740-18819
  source 1..80: mol_type = other DNA
cgtgcaaggtttggagaacatagcctataacgttgttaagaaagggtccttcgttggtgtagaaggtgaattacctgttg

SEQ ID NO: 1245 - DNA, 80 bp, synthetic construct
  misc_feature 1..80: note = Synthetic: >AlphaSp-cand-18820-18899
  source 1..80: mol_type = other DNA
ccatagttaatgataaagtaatggttcgcgatggtgtttcagataatgttgtgtttgttaataacacttctttgcctaca

SEQ ID NO: 1246 - DNA, 80 bp, synthetic construct
  misc_feature 1..80: note = Synthetic: >AlphaSp-cand-18900-18979
  source 1..80: mol_type = other DNA
aatgtagctttcgagctatatgccaagcgtaaaataggtttgacgccacccttaaccattttgaaaaatttaggtgttgt

SEQ ID NO: 1247 - DNA, 80 bp, synthetic construct
  misc_feature 1..80: note = Synthetic: >AlphaSp-cand-18980-19059
  source 1..80: mol_type = other DNA
ttgcaccagtaaatgtgttttgtgggattatgaagccgcaagacctcttactacttttactaaggatgtttgtaaatata

SEQ ID NO: 1248 - DNA, 80 bp, synthetic construct
  misc_feature 1..80: note = Synthetic: >Anlong-cand-14990-15069
  source 1..80: mol_type = other DNA
tctcaacaaaacacttaatgctggcatattggatgctttttccataacgatgctggaagactcgacagccaagttttggg

SEQ ID NO: 1249 - DNA, 80 bp, synthetic construct
  misc_feature 1..80: note = Synthetic: >Anlong-cand-15070-15149
  source 1..80: mol_type = other DNA
atgagggcttctatgctagtctttatgaaaaatccaccgtcttacaggccgcaggcttgtgtgtggtgtgtggttctcag

SEQ ID NO: 1250 - DNA, 80 bp, synthetic construct
  misc_feature 1..80: note = Synthetic: >Anlong-cand-15150-15229
  source 1..80: mol_type = other DNA
actgttcttcgttgtggtgattgcatacgtcgtcctatgctttgtactaaatgtgcttatgatcatgttgttggtactac

SEQ ID NO: 1251 - DNA, 80 bp, synthetic construct
  misc_feature 1..80: note = Synthetic: >Anlong-cand-15230-15309
  source 1..80: mol_type = other DNA
gcacaagttcattttgtctgtaacaccttacgtttgtaatgcgtctggttgtacagttaatgatgtgacaaaattgtggc

SEQ ID NO: 1252 - DNA, 80 bp, synthetic construct
  misc_feature 1..80: note = Synthetic: >Anlong-cand-15310-15389
  source 1..80: mol_type = other DNA
ttggtggtcttagttactggtgtactgaacacaaacctcagttggcattcccactatgttcaggtggtaatgtttttggt

SEQ ID NO: 1253 - DNA, 80 bp, synthetic construct
  misc_feature 1..80: note = Synthetic: >Anlong-cand-15390-15469
  source 1..80: mol_type = other DNA
ttgtataagagtgctgccactggttcgccagatgtagaaacttttaatcagttagccatgtctgattggacagatgtcaa

SEQ ID NO: 1254 - DNA, 80 bp, synthetic construct
  misc_feature 1..80: note = Synthetic: >Anlong-cand-15470-15549
  source 1..80: mol_type = other DNA
ggactacaaggtcgccaattctgccaaggatagtctacgtttgtttgcagctgaaactgttaaggcacgtgaagagagtg

SEQ ID NO: 1255 - DNA, 80 bp, synthetic construct
  misc_feature 1..80: note = Synthetic: >Anlong-cand-15550-15629
  source 1..80: mol_type = other DNA
ttaagtctcagtacgctagtgctactcttaaggaggtcgttggccccaaggagttgttacttagctgggaagctgggaaa

SEQ ID NO: 1256 - DNA, 80 bp, synthetic construct
  misc_feature 1..80: note = Synthetic: >Anlong-cand-15630-15709
  source 1..80: mol_type = other DNA
gttaagccaccgcttaacaggaactctgtctttacatgctttcagatttctaaagactctaaatatcagatcggtgagtt

SEQ ID NO: 1257 - DNA, 80 bp, synthetic construct
  misc_feature 1..80: note = Synthetic: >Anlong-cand-15710-15789
  source 1..80: mol_type = other DNA
tacctttgaaaaggctgactacgattccgatactgttatttataagtctactgctacaacaagactgtgtccaggtatga

SEQ ID NO: 1258 - DNA, 80 bp, synthetic construct
  misc_feature 1..80: note = Synthetic: >Anlong-cand-15790-15869
  source 1..80: mol_type = other DNA
tctttgtcctcacgtcacacaatgttgcaccactacgcgcaccaactattgccaaccaggagcgttactcatccattttt

SEQ ID NO: 1259 - DNA, 80 bp, synthetic construct
  misc_feature 1..80: note = Synthetic: >Anlong-cand-15870-15949
  source 1..80: mol_type = other DNA
aaattgcatcctgcatttaatgtggctgaagcttacgcacagttggttccatactaccagcttataggtaagcagcgtat

SEQ ID NO: 1260 - DNA, 80 bp, synthetic construct
  misc_feature 1..80: note = Synthetic: >Anlong-cand-15950-16029
  source 1..80: mol_type = other DNA
taccactatccagggtccaccaggtagtggaaagtcacactgcgttataggcttgggtctttactaccctggtgctcgta

SEQ ID NO: 1261 - DNA, 80 bp, synthetic construct
  misc_feature 1..80: note = Synthetic: >Anlong-cand-16030-16109
  source 1..80: mol_type = other DNA
tagcatttacagcttgctcacatgctgctgttgactctttgtgtgttaaggcctttagtgcatatgcacgtgataggtgt

SEQ ID NO: 1262 - DNA, 80 bp, synthetic construct
  misc_feature 1..80: note = Synthetic: >Anlong-cand-16110-16189
  source 1..80: mol_type = other DNA
agccgcatagttccagcacgtgctagagttgaatgctttagtggttttaagtccaacaacaataatgcacagtacatatt

SEQ ID NO: 1263 - DNA, 80 bp, synthetic construct
  misc_feature 1..80: note = Synthetic: >Anlong-cand-16190-16269
  source 1..80: mol_type = other DNA
ttctactgttaatgcattgccagagtgtaatgttgacattgtcgtcgttgacgaagtctctatgtgcaccaattacgacc

SEQ ID NO: 1264 - DNA, 80 bp, synthetic construct
  misc_feature 1..80: note = Synthetic: >AvianCoV-cand-20220-20299
  source 1..80: mol_type = other DNA
ggaggaattgtaattatttacaaacctctgcttatagtacatttgacgttgctaagtttggattgaaattaaaagcaacg

SEQ ID NO: 1265 - DNA, 80 bp, synthetic construct
  misc_feature 1..80: note = Synthetic: >AvianCoV-cand-20300-20379
  source 1..80: mol_type = other DNA
ccagttgtaaatttgaaaactgaacaaaagaccgacttagttgttaatttactaaggaacggtaagttattggttagaga

SEQ ID NO: 1266 - DNA, 80 bp, synthetic construct
  misc_feature 1..80: note = Synthetic: >AvianCoV-cand-20380-20459
  source 1..80: mol_type = other DNA
tgttggggaagtcactgtttttagtgaccattttgtgtgcactatgtagtgcaaatttgtttgattctgctaatacttat

SEQ ID NO: 1267 - DNA, 80 bp, synthetic construct
  misc_feature 1..80: note = Synthetic: >AvianCoV-cand-20460-20539
  source 1..80: mol_type = other DNA
gtgtactactaccaaagtgcctttagacctccaaatggttggcatttacaagggggtgcttatgcagtagttaattctac

SEQ ID NO: 1268 - DNA, 80 bp, synthetic construct
  misc_feature 1..80: note = Synthetic: >AvianCoV-cand-20540-20619
  source 1..80: mol_type = other DNA
taatgaaactaataatgcaggttctgcaactgagtgcactgttggtgttatttttaattatactaacggaaataaggatg

SEQ ID NO: 1269 - DNA, 80 bp, synthetic construct
  misc_feature 1..80: note = Synthetic: >AvianCoV-cand-20620-20699
  source 1..80: mol_type = other DNA
gttataatcttagtgcggcttctatagctatgacagcacctccaggtcaggcagtatggcttggtctaatagtcacaatt

SEQ ID NO: 1270 - DNA, 80 bp, synthetic construct
  misc_feature 1..80: note = Synthetic: >AvianCoV-cand-20700-20779
  source 1..80: mol_type = other DNA
ttgtactgcacactgtaatcttttctgaaattacagtgtttgttacacattgttatagtagtggatctaatggagggtct

SEQ ID NO: 1271 - DNA, 80 bp, synthetic construct
  misc_feature 1..80: note = Synthetic: >AvianCoV-cand-20780-20859
  source 1..80: mol_type = other DNA
tgtcctataacaggcatgattccacaggatcatattcgtatttctgctatggataaaaatggaagtactagtcctggttc

SEQ ID NO: 1272 - DNA, 80 bp, synthetic construct
  misc_feature 1..80: note = Synthetic: >AvianCoV-cand-20860-20939
  source 1..80: mol_type = other DNA
tttattttataatttaacagttagcgtatctaaataccctaattttaaatcttttcaatgtgttaacaatttcacatcta

SEQ ID NO: 1273 - DNA, 80 bp, synthetic construct
  misc_feature 1..80: note = Synthetic: >AvianCoV-cand-20940-21019
  source 1..80: mol_type = other DNA
ttgccactggagatgtttatttaaatggtgatcttgtttttacttctaatgaaactactacacaaaccttaacgatgtta

SEQ ID NO: 1274 - DNA, 80 bp, synthetic construct
  misc_feature 1..80: note = Synthetic: >AvianCoV-cand-21020-21099
  source 1..80: mol_type = other DNA
cgtctgcagtgtgtgtattttaaagcaggtggacctgtaacttataaagttatgaaagaatttaaggttctggcttattt

SEQ ID NO: 1275 - DNA, 80 bp, synthetic construct
  misc_feature 1..80: note = Synthetic: >AvianCoV-cand-21100-21179
  source 1..80: mol_type = other DNA
tgttaatggtactgcacaagatgttattttgtgtacagatgattcacctagaggtttgctagcatgtcaatataatactg

SEQ ID NO: 1276 - DNA, 80 bp, synthetic construct
  misc_feature 1..80: note = Synthetic: >AvianCoV-cand-21180-21259
  source 1..80: mol_type = other DNA
gcaatttttcagatggcttttatccttttactaatagtactttagtgacatctaaggaaaagtttattgtctatcgtgaa

SEQ ID NO: 1277 - DNA, 80 bp, synthetic construct
  misc_feature 1..80: note = Synthetic: >AvianCoV-cand-21260-21339
  source 1..80: mol_type = other DNA
agtagtgttaatactactttgacgttaactaatttcacttttactcttaatgtaagtaatgcacagcctaatcaaaagga

SEQ ID NO: 1278 - DNA, 80 bp, synthetic construct
  misc_feature 1..80: note = Synthetic: >AvianCoV-cand-21340-21419
  source 1..80: mol_type = other DNA
acctactggtggtgttaatacttaatttcaattatatcaaacacaaacagctcagagtggttattataattttaattttt

SEQ ID NO: 1279 - DNA, 80 bp, synthetic construct
  misc_feature 1..80: note = Synthetic: >AvianCoV-cand-21420-21499
  source 1..80: mol_type = other DNA
gcatttctgagtagttttgtgtataaggcatctgattttatgtatgggggtataatgtttacactaataccgcaacattc

SEQ ID NO: 1280 - DNA, 80 bp, synthetic construct
  misc_feature 1..80: note = Synthetic: >Beluga-cand-15090-15169
  source 1..80: mol_type = other DNA
aggaagatttttaccgccaaatgtatgagagctcacccactttacaggcttctggtgtgtgtgttgtgtgtaattctcaa

SEQ ID NO: 1281 - DNA, 80 bp, synthetic construct
  misc_feature 1..80: note = Synthetic: >Beluga-cand-15170-15249
  source 1..80: mol_type = other DNA
acagttttgcgatgcggtaattgtcttcgtaaaccgtttttgtgctgcaaatgttgttatgatcacgttatggaaacgga

SEQ ID NO: 1282 - DNA, 80 bp, synthetic construct
  misc_feature 1..80: note = Synthetic: >Beluga-cand-15250-15329
  source 1..80: mol_type = other DNA
gcataagaatgttctcagcattaatccttatgtttgtagtgttgctggttgtggagaatccaatgtctgcaagctatttt

SEQ ID NO: 1283 - DNA, 80 bp, synthetic construct
  misc_feature 1..80: note = Synthetic: >Beluga-cand-15330-15409
  source 1..80: mol_type = other DNA
taggtggcatgtcatatttttgccttgaccacaaacctaggttagctatacctcttgtttctggaggtacagtatttggt

SEQ ID NO: 1284 - DNA, 80 bp, synthetic construct
  misc_feature 1..80: note = Synthetic: >Beluga-cand-15410-15489
  source 1..80: mol_type = other DNA
atttatcgtgctacatgttcaggaagtcctgatgttgcagtgtttaataaattagctactacagattggaagagcataga

SEQ ID NO: 1285 - DNA, 80 bp, synthetic construct
  misc_feature 1..80: note = Synthetic: >Beluga-cand-15490-15569
  source 1..80: mol_type = other DNA
ctcttatgtattagcaaataattgctcagatagtctgagacgctttgcagctgagactgtaaaggccactgaagagcttg

SEQ ID NO: 1286 - DNA, 80 bp, synthetic construct
  misc_feature 1..80: note = Synthetic: >Beluga-cand-15570-15649
  source 1..80: mol_type = other DNA
aaaagcagcagtacgcttctgccgaaattaaagagatagtaggtgagaaggaacttgtgcttagttgggaaccaggtaaa

SEQ ID NO: 1287 - DNA, 80 bp, synthetic construct
  misc_feature 1..80: note = Synthetic: >Beluga-cand-15650-15729
  source 1..80: mol_type = other DNA
accagacctcctttaaataggaattatgtgtttactggttatcattttactagaaatggtaaaactcaattaggtgaatt

SEQ ID NO: 1288 - DNA, 80 bp, synthetic construct
  misc_feature 1..80: note = Synthetic: >Beluga-cand-15730-15809
  source 1..80: mol_type = other DNA
cacctttgagaaaagtgactcccagcagtcggtgtattataaggctacttcaacgtctaaattggctgtgggcgatttgt

SEQ ID NO: 1289 - DNA, 80 bp, synthetic construct
  misc_feature 1..80: note = Synthetic: >Beluga-cand-15810-15889
  source 1..80: mol_type = other DNA
ttgtgcttacatcacataacataagccctcttactgctcccacgatctgtaatcagcagatctatactaaatttcagaat

SEQ ID NO: 1290 - DNA, 80 bp, synthetic construct
  misc_feature 1..80: note = Synthetic: >Beluga-cand-15890-15969
  source 1..80: mol_type = other DNA
attacaccaaacctttttttgagtgaagcgtttgctgataatataccattatatcatatagtaggaaagcagcggcgtac

SEQ ID NO: 1291 - DNA, 80 bp, synthetic construct
  misc_feature 1..80: note = Synthetic: >Beluga-cand-15970-16049
  source 1..80: mol_type = other DNA
cacagtgcaaggtccccccggcagtggtaaatcgcactttgctataggtttagcagcatatttttcaaatgcaagaatag

SEQ ID NO: 1292 - DNA, 80 bp, synthetic construct
  misc_feature 1..80: note = Synthetic: >Beluga-cand-16050-16129
  source 1..80: mol_type = other DNA
tttatacggcatgttctcatgctgcagttgatgctttgtgtgctaaggcttttaagtttcttaagcatgatgattgtacc

SEQ ID NO: 1293 - DNA, 80 bp, synthetic construct
  misc_feature 1..80: note = Synthetic: >Beluga-cand-16130-16209
  source 1..80: mol_type = other DNA
agagtagtacctatgcgtgtaggcgtagattgcttctctgattttaaggttaatgatatgactcgtaagtacattttttc

SEQ ID NO: 1294 - DNA, 80 bp, synthetic construct
  misc_feature 1..80: note = Synthetic: >Beluga-cand-16210-16289
  source 1..80: mol_type = other DNA
tacgataaatgcacttccagaagttagttgtgatatattgcttgttgatgaggtgagcatgcttaccaattatgagcttt

SEQ ID NO: 1295 - DNA, 80 bp, synthetic construct
  misc_feature 1..80: note = Synthetic: >Beluga-cand-16290-16369
  source 1..80: mol_type = other DNA
cttatttgaatcagaagatttcttatcaatatgttgtttatgtaggagaccctgcgcaattgccagcacccaggactctt

SEQ ID NO: 1296 - DNA, 80 bp, synthetic construct
  misc_feature 1..80: note = Synthetic: >BetaSp-cand-9220-9299
  source 1..80: mol_type = other DNA
gttgttgctgtaatagataaagatattggctctacagtgtttaatgttcctactaaggttttgaggtttggttaccatgt

SEQ ID NO: 1297 - DNA, 80 bp, synthetic construct
  misc_feature 1..80: note = Synthetic: >BetaSp-cand-9300-9379
  source 1..80: mol_type = other DNA
gttgcattttataacatatgcattctcagctgatggtgtgcaatgttatactccgcatgaacagatttcttattcagatt

SEQ ID NO: 1298 - DNA, 80 bp, synthetic construct
  misc_feature 1..80: note = Synthetic: >BetaSp-cand-9380-9459
  source 1..80: mol_type = other DNA
tctatagtagcggttgcgtcttgtcgtcagcatgcacaatgtttgcttctgacaatggtgcatcacaggcttattgctat

SEQ ID NO: 1299 - DNA, 80 bp, synthetic construct
  misc_feature 1..80: note = Synthetic: >BetaSp-cand-9460-9539
  source 1..80: mol_type = other DNA
acggatgggcttgttcaaaatgctagtctgtattcctcattgaggccacacgttcgttatagtctggctaatacccatgg

SEQ ID NO: 1300 - DNA, 80 bp, synthetic construct
  misc_feature 1..80: note = Synthetic: >BetaSp-cand-9540-9619
  source 1..80: mol_type = other DNA
ctatatacgttttcctgaggtactgcgagaaggtcttgttagggttattcgtactaaagcaatgacttactgcagggtag

SEQ ID NO: 1301 - DNA, 80 bp, synthetic construct
  misc_feature 1..80: note = Synthetic: >BetaSp-cand-9620-9699
  source 1..80: mol_type = other DNA
ggttgtgtgagcctgctgatgagggtatctgttttacttttaatggttcctgggctcttaataatgaatattataggaaa

SEQ ID NO: 1302 - DNA, 80 bp, synthetic construct
  misc_feature 1..80: note = Synthetic: >BetaSp-cand-9700-9779
  source 1..80: mol_type = other DNA
atgccaggcactttttgtggtagggattttatggatatttttaatcaatttgtagtaggattagcccaaccaatagattt

SEQ ID NO: 1303 - DNA, 80 bp, synthetic construct
  misc_feature 1..80: note = Synthetic: >BetaSp-cand-9780-9859
  source 1..80: mol_type = other DNA
cttttcgttgacgatgagttctgttgttggtgccgttcttgctataataattgttttgatcttttattatctcatcaagc

SEQ ID NO: 1304 - DNA, 80 bp, synthetic construct
  misc_feature 1..80: note = Synthetic: >BetaSp-cand-9860-9939
  source 1..80: mol_type = other DNA
tcaagcgtgcgtttggtgattatacggccgttgtagtggttaatgtgatagtgtggtttataaattttgtgatgcttttt

SEQ ID NO: 1305 - DNA, 80 bp, synthetic construct
  misc_feature 1..80: note = Synthetic: >BetaSp-cand-9940-10019
  source 1..80: mol_type = other DNA
gttttccaggtttatcccacttttgctgttatatatgctttgtgttatttttatgtgacattgtatttcccctcggagat

SEQ ID NO: 1306 - DNA, 80 bp, synthetic construct
  misc_feature 1..80: note = Synthetic: >BetaSp-cand-10020-10099
  source 1..80: mol_type = other DNA
tagtgtcataatgcatctacagtggcttgtgatgtatggtacaattatgccaatatggttttgtatactctacgttgcag

SEQ ID NO: 1307 - DNA, 80 bp, synthetic construct
  misc_feature 1..80: note = Synthetic: >BetaSp-cand-10100-10179
  source 1..80: mol_type = other DNA
ctgttgtttcaaatcatgctttctgggtatttagttactttaggaagttgcatactggtatacgtagtgatggtaccttt

SEQ ID NO: 1308 - DNA, 80 bp, synthetic construct
  misc_feature 1..80: note = Synthetic: >BetaSp-cand-10180-10259
  source 1..80: mol_type = other DNA
gaagaaatgtccctcactacttttatgattaataaggatacttattgtaagttgaagaactctctgtcggaggttgcatt

SEQ ID NO: 1309 - DNA, 80 bp, synthetic construct
  misc_feature 1..80: note = Synthetic: >BetaSp-cand-10260-10339
  source 1..80: mol_type = other DNA
taataaatatttgagtttgtataataagtataggtattacagtggtaaaatggataccgctgcgtaccgtgaagctgctt

SEQ ID NO: 1310 - DNA, 80 bp, synthetic construct
  misc_feature 1..80: note = Synthetic: >BetaSp-cand-10340-10419
  source 1..80: mol_type = other DNA
gttctcagttggcaaaagcacttgatacatttaaccataataatggtaatgatgtgctttaccaaccaccgacggcatca

SEQ ID NO: 1311 - DNA, 80 bp, synthetic construct
  misc_feature 1..80: note = Synthetic: >BetaSp-cand-10420-10499
  source 1..80: mol_type = other DNA
gtttctacatcattcttgcaatcaggcattgctaagattgtttgtcctacatctaaagttgagccttgtatcgttagtgt

SEQ ID NO: 1312 - DNA, 80 bp, synthetic construct
  misc_feature 1..80: note = Synthetic: >CDPHE15-cand-8130-8209
  source 1..80: mol_type = other DNA
ggtctatgttacgatgagtttggagcagccgcacccgaacagtgtttgttcaattccgcttgtacgacgctgaaaggtct

SEQ ID NO: 1313 - DNA, 80 bp, synthetic construct
  misc_feature 1..80: note = Synthetic: >CDPHE15-cand-8210-8289
  source 1..80: mol_type = other DNA
aggtggtacttctacttattgttaccgtagtggtctggtcagtgatagtggtctctacagagatttgctgcatgacagtc

SEQ ID NO: 1314 - DNA, 80 bp, synthetic construct
  misc_feature 1..80: note = Synthetic: >CDPHE15-cand-8290-8369
  source 1..80: mol_type = other DNA
attactttttgcctgatggtaactatgttaaatttccagaggttatatcacgtggttttggtttcagaacagtacgtact

SEQ ID NO: 1315 - DNA, 80 bp, synthetic construct
  misc_feature 1..80: note = Synthetic: >CDPHE15-cand-8370-8449
  source 1..80: mol_type = other DNA
gctgctacaacatactgccgtgttggtcaatgtgttgactctaaacaaggtgtatgttttggacttgataggttcttggt

SEQ ID NO: 1316 - DNA, 80 bp, synthetic construct
  misc_feature 1..80: note = Synthetic: >CDPHE15-cand-8450-8529
  source 1..80: mol_type = other DNA
ttacagtgcagagtctggctctgactttgtttgtggtacaggccttatgtcattgttgtacaacgtttttggtatattta

SEQ ID NO: 1317 - DNA, 80 bp, synthetic construct
  misc_feature 1..80: note = Synthetic: >CDPHE15-cand-8530-8609
  source 1..80: mol_type = other DNA
cacgttctataccagttgttgtactttcaggtcaaattatgttcaactgtgttgttgcatttcttgctgtctcttgctgc

SEQ ID NO: 1318 - DNA, 80 bp, synthetic construct
  misc_feature 1..80: note = Synthetic: >CDPHE15-cand-8610-8689
  source 1..80: mol_type = other DNA
tttttgtttactaagtttaagaggcttttcggtgacatgtctttcggtgtgttcactgtttgctgctgtgtcttggtaaa

SEQ ID NO: 1319 - DNA, 80 bp, synthetic construct
  misc_feature 1..80: note = Synthetic: >CDPHE15-cand-8690-8769
  source 1..80: mol_type = other DNA
caacctttcctatataataactcagaattatatgggtcttgttttctacactgttttgtatttcttctccacaaagaccg

SEQ ID NO: 1320 - DNA, 80 bp, synthetic construct
  misc_feature 1..80: note = Synthetic: >CDPHE15-cand-8770-8849
  source 1..80: mol_type = other DNA
tgcgttatgcttggatttggcacataggttactttgttgcctacttcctcgtagcaccatggtggcttttgggtatgttt

SEQ ID NO: 1321 - DNA, 80 bp, synthetic construct
  misc_feature 1..80: note = Synthetic: >CDPHE15-cand-8850-8929
  source 1..80: mol_type = other DNA
cttgcttctgctttgacagagtttttgccgtcaatgtttaaacttaaagtttctacccaactgtttgatggagagaaatt

SEQ ID NO: 1322 - DNA, 80 bp, synthetic construct
  misc_feature 1..80: note = Synthetic: >CDPHE15-cand-8930-9009
  source 1..80: mol_type = other DNA
cgttggtagttttgagacagctgctatgggtacttttgttttagacatgcgtacctatgaaaaacttgttaattcaactc

SEQ ID NO: 1323 - DNA, 80 bp, synthetic construct
  misc_feature 1..80: note = Synthetic: >CDPHE15-cand-9010-9089
  source 1..80: mol_type = other DNA
ctggtgataaaatacgtcagtatgcagccacctataataaatataaatattatagtggtggcgccaacgaggctgattat

SEQ ID NO: 1324 - DNA, 80 bp, synthetic construct
  misc_feature 1..80: note = Synthetic: >CDPHE15-cand-9090-9169
  source 1..80: mol_type = other DNA
agattggcatgtttcgcacatctagccaaagccatgatggactttggttcaaaccaccaggacatgttgtactcacctcc

SEQ ID NO: 1325 - DNA, 80 bp, synthetic construct
  misc_feature 1..80: note = Synthetic: >CDPHE15-cand-9170-9249
  source 1..80: mol_type = other DNA
cactgtcagttataattcaacactgcaagctgggcttaaaaagatggcacaaccttcaggtgttgttgagcgctgtatag

SEQ ID NO: 1326 - DNA, 80 bp, synthetic construct
  misc_feature 1..80: note = Synthetic: >CDPHE15-cand-9250-9329
  source 1..80: mol_type = other DNA
tccgtgttagttacggtaacatggtgctcaatggcctttggttaggtgacacagtttactgcccaagacatgtgttggct

SEQ ID NO: 1327 - DNA, 80 bp, synthetic construct
  misc_feature 1..80: note = Synthetic: >CDPHE15-cand-9330-9409
  source 1..80: mol_type = other DNA
gcatccactactactcatattgactatgaacatgcgcttgctattatgaggttacataatttttctatatcttatggtaa

SEQ ID NO: 1328 - DNA, 80 bp, synthetic construct
  misc_feature 1..80: note = Synthetic: >CDPHE15-cand-10690-10769
  source 1..80: mol_type = other DNA
aggctatagtctttgtgtacgttgctgttggctatgtttgttgtgtgttttatggtattttgtactgggttaacaggttt

SEQ ID NO: 1329 - DNA, 80 bp, synthetic construct
  misc_feature 1..80: note = Synthetic: >CDPHE15-cand-10770-10849
  source 1..80: mol_type = other DNA
tgtaaactttcacttggtgtttacgattttatggttagcccagctgaatttaagtacatggtcgctaatggcttaagagc

SEQ ID NO: 1330 - DNA, 80 bp, synthetic construct
  misc_feature 1..80: note = Synthetic: >CDPHE15-cand-10850-10929
  source 1..80: mol_type = other DNA
tcctactggtgcatttgattcactatttttgtctgcacgtttgcttggtattggtggtcagcgtaccattaagatatcaa

SEQ ID NO: 1331 - DNA, 80 bp, synthetic construct
  misc_feature 1..80: note = Synthetic: >CDPHE15-cand-10930-11009
  source 1..80: mol_type = other DNA
cagtgcagtccaaacttactgatgttaagtgtaccaatgtggttctaatgggctgtttgtctagcatgaacattcaggct

SEQ ID NO: 1332 - DNA, 80 bp, synthetic construct
  misc_feature 1..80: note = Synthetic: >CDPHE15-cand-11010-11089
  source 1..80: mol_type = other DNA
aactctgctgagtggaattattgtgttgatttgcacaataaaataaacttgtgcaatgatttagaacgtgcacaagagta

SEQ ID NO: 1333 - DNA, 80 bp, synthetic construct
  misc_feature 1..80: note = Synthetic: >CDPHE15-cand-11090-11169
  source 1..80: mol_type = other DNA
tcttttggcattgttggcatttttcttgtcaaagaatagtgcctttggcttagatgaccttttggactcttattttgaca

SEQ ID NO: 1334 - DNA, 80 bp, synthetic construct
  misc_feature 1..80: note = Synthetic: >CDPHE15-cand-11170-11249
  source 1..80: mol_type = other DNA
ataacactgtgcttcaggctgttgctactacatatgctaacatgccatcatacattatgtatgagaatgcaagacaggca

SEQ ID NO: 1335 - DNA, 80 bp, synthetic construct
  misc_feature 1..80: note = Synthetic: >CDPHE15-cand-11250-11329
  source 1..80: mol_type = other DNA
tatgaggaagcaatttcaaaccgttcctcaccccagttaattaagcaacttaagcatgctatgaacagggctaaggggga

SEQ ID NO: 1336 - DNA, 80 bp, synthetic construct
  misc_feature 1..80: note = Synthetic: >CDPHE15-cand-11330-11409
  source 1..80: mol_type = other DNA
gtttgaccatgaggctgcaactcagcgtaagattgatcgtatggctgaacaagcagctgcgcagatgtttaaggaagcta

SEQ ID NO: 1337 - DNA, 80 bp, synthetic construct
  misc_feature 1..80: note = Synthetic: >CDPHE15-cand-11410-11489
  source 1..80: mol_type = other DNA
gagctgtgaacaaaaagtcaaaggtcactagtgctatgcatgccatgttattcagtatgttgcgccgtttggatatgtct

SEQ ID NO: 1338 - DNA, 80 bp, synthetic construct
  misc_feature 1..80: note = Synthetic: >CDPHE15-cand-11490-11569
  source 1..80: mol_type = other DNA
agtgttgacattatcctcaacctcgctagaaatggcaccgtgccattatccataatacctgctttgtgtgctactagatt

SEQ ID NO: 1339 - DNA, 80 bp, synthetic construct
  misc_feature 1..80: note = Synthetic: >CDPHE15-cand-11570-11649
  source 1..80: mol_type = other DNA
gtcaattattgtcagtgactttgagtcatatgccaaactgtttagagaaggttgcatacattatgccggtactatatggt

SEQ ID NO: 1340 - DNA, 80 bp, synthetic construct
  misc_feature 1..80: note = Synthetic: >CDPHE15-cand-11650-11729
  source 1..80: mol_type = other DNA
ctgttgctgacattaagaacaacgatggtaaaccagtacatcagaaggaagtgacatcttctaatgctgagaacttgagt

SEQ ID NO: 1341 - DNA, 80 bp, synthetic construct
  misc_feature 1..80: note = Synthetic: >CDPHE15-cand-11730-11809
  source 1..80: mol_type = other DNA
tggccattgtgtattaatgcagaacgtatagttaagttacagaataacgaagttatgcctggtaagcttaaacagcgttc

SEQ ID NO: 1342 - DNA, 80 bp, synthetic construct
  misc_feature 1..80: note = Synthetic: >CDPHE15-cand-11810-11889
  source 1..80: mol_type = other DNA
tgtcaaagcagaaggtgacggtgtcatggctgagggcaaggcgctttacaatactgagaatggacgtacttttatgtacg

SEQ ID NO: 1343 - DNA, 80 bp, synthetic construct
  misc_feature 1..80: note = Synthetic: >CDPHE15-cand-11890-11969
  source 1..80: mol_type = other DNA
catttcttgcagacaaacctgatcttaaggtcgtaaaatgggaatctgatgacggtgttaaggtcatagaattggaacca

SEQ ID NO: 1344 - DNA, 80 bp, synthetic construct
  misc_feature 1..80: note = Synthetic: >Delta-cand-2640-2719
  source 1..80: mol_type = other DNA
gactgcggattcaaagcaggtggtctcaaaacaatacttaaaaagcaatgtgtgttttgacaatggcgagcccgtcttta

SEQ ID NO: 1345 - DNA, 80 bp, synthetic construct
  misc_feature 1..80: note = Synthetic: >Delta-cand-2720-2799
  source 1..80: mol_type = other DNA
agggcccagattgtaaaatttacacaactagtaacaaacctaaaaaggctgtcaaattaaaagaaactaaagtgcaacat

SEQ ID NO: 1346 - DNA, 80 bp, synthetic construct
  misc_feature 1..80: note = Synthetic: >Delta-cand-2800-2879
  source 1..80: mol_type = other DNA
gaaaagaacactacttatggtagtcttaattcggatgagcttttcaaaacagccttgtctaagaagttgaaggcacctat

SEQ ID NO: 1347 - DNA, 80 bp, synthetic construct
  misc_feature 1..80: note = Synthetic: >Delta-cand-2880-2959
  source 1..80: mol_type = other DNA
gcagaaactaccaggatagcgttacaggagattaagcttcaactgccattaaaacctacacggtagtgtcggacctcttt

SEQ ID NO: 1348 - DNA, 80 bp, synthetic construct
  misc_feature 1..80: note = Synthetic: >Delta-cand-2960-3039
  source 1..80: mol_type = other DNA
gatgatgagactaatgctcaaatcaacgaaacactcgctgcatatgagcttaactaggaaacatcaactagtggctccag

SEQ ID NO: 1349 - DNA, 80 bp, synthetic construct
  misc_feature 1..80: note = Synthetic: >Delta-cand-3040-3119
  source 1..80: mol_type = other DNA
gtgattctacaccgcgtcaaattgcgacgttggttgtcgatacacttttgtggtcgcagatgctataacagaccactttc

SEQ ID NO: 1350 - DNA, 80 bp, synthetic construct
  misc_feature 1..80: note = Synthetic: >Delta-cand-3120-3199
  source 1..80: mol_type = other DNA
cggagaaaaccattgatctacctgaagactatcaagtcttttctgaccatgatgacctcccactcgcacaataccacatc

SEQ ID NO: 1351 - DNA, 80 bp, synthetic construct
  misc_feature 1..80: note = Synthetic: >Delta-cand-3200-3279
  source 1..80: mol_type = other DNA
cctgatcacctgagcctgtatattcaggctatggaaggtgaagattgcactcattctaaagactacgatagtggtgatga

SEQ ID NO: 1352 - DNA, 80 bp, synthetic construct
  misc_feature 1..80: note = Synthetic: >Delta-cand-3280-3359
  source 1..80: mol_type = other DNA
aatatgtattgaggacgatgattacgggcatgactgtcctcaagccgacgaagacacagaaggagtaattccccaacagt

SEQ ID NO: 1353 - DNA, 80 bp, synthetic construct
  misc_feature 1..80: note = Synthetic: >Delta-cand-3360-3439
  source 1..80: mol_type = other DNA
gggaacttcctgatgttgataaatttttacttcttccaagatccaggaacggaagaccagcagcgacgaagtacttagcg

SEQ ID NO: 1354 - DNA, 80 bp, synthetic construct
  misc_feature 1..80: note = Synthetic: >Delta-cand-3440-3519
  source 1..80: mol_type = other DNA
tcgacgtctatcctaaaccagagccggtcggcaatgttgggattgacgacagcgcgtcggaaaagaagccaaatggggac

SEQ ID NO: 1355 - DNA, 80 bp, synthetic construct
  misc_feature 1..80: note = Synthetic: >Delta-cand-3520-3599
  source 1..80: mol_type = other DNA
ccagtaccggatcctgaggtccatccaacactagagagtgtggatgttgaacgaccaaccgaaacagcaaaccaggctgt

SEQ ID NO: 1356 - DNA, 80 bp, synthetic construct
  misc_feature 1..80: note = Synthetic: >Delta-cand-3600-3679
  source 1..80: mol_type = other DNA
tgcacgaactcaatctgagagatcggaggcggctgagtgcgaccaagacaaaccttctgataccacctttgtggttgatg

SEQ ID NO: 1357 - DNA, 80 bp, synthetic construct
  misc_feature 1..80: note = Synthetic: >Delta-cand-3680-3759
  source 1..80: mol_type = other DNA
aggaacaattacaagaatcaacaccagaacatgaactccgctcctatgatgatgatgagtcaactcagccaggggagttt

SEQ ID NO: 1358 - DNA, 80 bp, synthetic construct
  misc_feature 1..80: note = Synthetic: >Delta-cand-3840-3919
  source 1..80: mol_type = other DNA
aaaggagtactttaagtctgaaaaactcaaaaatgagactattaacgaaggatcatctaatcaagagagcagtcgttcca

SEQ ID NO: 1359 - DNA, 80 bp, synthetic construct
  misc_feature 1..80: note = Synthetic: >HKU10-cand-8960-9039
  source 1..80: mol_type = other DNA
tacccagaatgctgtcatgatggtagtgtatgccattttgtactttttgtcaactaggactttcaagtacggatggatat

SEQ ID NO: 1360 - DNA, 80 bp, synthetic construct
  misc_feature 1..80: note = Synthetic: >HKU10-cand-9040-9119
  source 1..80: mol_type = other DNA
ggcatgtgggctactgtattgcttacctttctatggcaccatggtggttgttgttctggtatatgtgttcagctttaatt

SEQ ID NO: 1361 - DNA, 80 bp, synthetic construct
  misc_feature 1..80: note = Synthetic: >HKU10-cand-9120-9199
  source 1..80: mol_type = other DNA
ggcttagtacctagtttgcttaagttaaaagttacttctcaactttttgatggtgacaaatttgttggcaactttgaaac

SEQ ID NO: 1362 - DNA, 80 bp, synthetic construct
  misc_feature 1..80: note = Synthetic: >HKU10-cand-9200-9279
  source 1..80: mol_type = other DNA
tgctgctactggcacatttgtgttggatatgcattcgtatcaaagaattgttaatagtattgcacccgaaaagattaagc

SEQ ID NO: 1363 - DNA, 80 bp, synthetic construct
  misc_feature 1..80: note = Synthetic: >HKU10-cand-9280-9359
  source 1..80: mol_type = other DNA
aacatgctgctagttataacaagtataagtactatagtggtgctgcttctgaagctgattatagacttgcttgttatgca

SEQ ID NO: 1364 - DNA, 80 bp, synthetic construct
  misc_feature 1..80: note = Synthetic: >HKU10-cand-9360-9439
  source 1..80: mol_type = other DNA
catttggctaaagctgttttagactatggaaccaaccaccaagatacgttgtacacaccaccaaccattagttacaattc

SEQ ID NO: 1365 - DNA, 80 bp, synthetic construct
  misc_feature 1..80: note = Synthetic: >HKU10-cand-9440-9519
  source 1..80: mol_type = other DNA
aacattgcaatctggtttgcgtaagatggcgcaaccgtctggtgtggtggagaagtgtgttgtacgtgtttgttatggta

SEQ ID NO: 1366 - DNA, 80 bp, synthetic construct
  misc_feature 1..80: note = Synthetic: >HKU10-cand-9520-9599
  source 1..80: mol_type = other DNA
atatggcacttaatggtttgtggctaggtgatgttgttatttgtcctagacatgtgatagcatcaaacactaatgcactt

SEQ ID NO: 1367 - DNA, 80 bp, synthetic construct
  misc_feature 1..80: note = Synthetic: >HKU10-cand-9600-9679
  source 1..80: mol_type = other DNA
attgattatgaacatgagattagtgttatgcgtttgcataatttctcagtttctgttggtaatgtgtttttgggtgtcgt

SEQ ID NO: 1368 - DNA, 80 bp, synthetic construct
  misc_feature 1..80: note = Synthetic: >HKU10-cand-9680-9759
  source 1..80: mol_type = other DNA
tagtgctacaatgaaaggtgctaacttgcatattaaggttaaccagaccaatgttaatactcctgaacatagtttcaaaa

SEQ ID NO: 1369 - DNA, 80 bp, synthetic construct
  misc_feature 1..80: note = Synthetic: >HKU10-cand-9760-9839
  source 1..80: mol_type = other DNA
ccataaaacagggtgagtcttttaacattcttgcatgttatgatggtatgccttctggtgtttatggtgtcactatgcgt

SEQ ID NO: 1370 - DNA, 80 bp, synthetic construct
  misc_feature 1..80: note = Synthetic: >HKU10-cand-9840-9919
  source 1..80: mol_type = other DNA
aacaactatactattagaggttcttttattactggtgcttgtggttcgcctggttacaatgtaactaatggcaaagttga

SEQ ID NO: 1371 - DNA, 80 bp, synthetic construct
  misc_feature 1..80: note = Synthetic: >HKU10-cand-9920-9999
  source 1..80: mol_type = other DNA
attttgctacttgcaccaattagaacttggtagtggttgtcatgtaggttcaaacttagaaggtgttatgtatggttgtt

SEQ ID NO: 1372 - DNA, 80 bp, synthetic construct
  misc_feature 1..80: note = Synthetic: >HKU10-cand-10000-10079
  source 1..80: mol_type = other DNA
atgaagaccaacctacattgcagatagagggtgttaaccatcttgtgactcctaatgttattgcattcctttatggtgca

SEQ ID NO: 1373 - DNA, 80 bp, synthetic construct
  misc_feature 1..80: note = Synthetic: >HKU10-cand-10080-10159
  source 1..80: mol_type = other DNA
ttacttaatggtattacatggtggttgaactctgataaagtttctgtggaatccttcaatgaatgggctcttaacaatgg

SEQ ID NO: 1374 - DNA, 80 bp, synthetic construct
  misc_feature 1..80: note = Synthetic: >HKU10-cand-10160-10239
  source 1..80: mol_type = other DNA
ttttactacatgtggtaacctagactgctttaatatgctttctgctaagactggtgtagacgtgcaacgtttattggcgg

SEQ ID NO: 1375 - DNA, 80 bp, synthetic construct
  misc_feature 1..80: note = Synthetic: >HKU14-cand-10720-10799
  source 1..80: mol_type = other DNA
aatctgttaattttgtagcatggctttatgctgcaattcttaacaattgcaattggtttgtacaaagtgatagatgttct

SEQ ID NO: 1376 - DNA, 80 bp, synthetic construct
  misc_feature 1..80: note = Synthetic: >HKU14-cand-10800-10879
  source 1..80: mol_type = other DNA
attgaagactataatgtttgggctatgtcaaatggatttagccaaattaaatctgatttggttgttgatgctcttgcatc

SEQ ID NO: 1377 - DNA, 80 bp, synthetic construct
  misc_feature 1..80: note = Synthetic: >HKU14-cand-10880-10959
  source 1..80: mol_type = other DNA
tatgactggtgtgtctttggaaaacttgttggctgctattaagcgcctgcataaaggattccagggacgtcagattatgg

SEQ ID NO: 1378 - DNA, 80 bp, synthetic construct
  misc_feature 1..80: note = Synthetic: >HKU14-cand-10960-11039
  source 1..80: mol_type = other DNA
gtagttgtgcttttgaagatgagttgacacctagcgatgtttaccaacaactagctggcgtcaagttacaatcaaagcgc

SEQ ID NO: 1379 - DNA, 80 bp, synthetic construct
  misc_feature 1..80: note = Synthetic: >HKU14-cand-11040-11119
  source 1..80: mol_type = other DNA
tctagagttattaaaggaactatttgctgggttattgcttctacatttttgtttagttgcataattacagcatttgttaa

SEQ ID NO: 1380 - DNA, 80 bp, synthetic construct
  misc_feature 1..80: note = Synthetic: >HKU14-cand-11120-11199
  source 1..80: mol_type = other DNA
atggactatgtttatgtatgtaacgactcatatgttgagtgttacagtgttggcactttgttgtgtgagttttactatgc

SEQ ID NO: 1381 - DNA, 80 bp, synthetic construct
  misc_feature 1..80: note = Synthetic: >HKU14-cand-11200-11279
  source 1..80: mol_type = other DNA
ttttggtgaaacataagcatctttatttgacaatgtatatcattcctgtacttttgacattgctatataacaactatttg

SEQ ID NO: 1382 - DNA, 80 bp, synthetic construct
  misc_feature 1..80: note = Synthetic: >HKU14-cand-11280-11359
  source 1..80: mol_type = other DNA
gttgtttataagcattcttttagagggtatgtgtatgcatggctttctcatttcatgccgtcagtggattacacttatac

SEQ ID NO: 1383 - DNA, 80 bp, synthetic construct
  misc_feature 1..80: note = Synthetic: >HKU14-cand-11360-11439
  source 1..80: mol_type = other DNA
ggatgaggtgatttatagcattgttttgctctttggtatgatttttattactatgcgtagtattaatcatgatgtgtttt

SEQ ID NO: 1384 - DNA, 80 bp, synthetic construct
  misc_feature 1..80: note = Synthetic: >HKU14-cand-11440-11519
  source 1..80: mol_type = other DNA
ctgttataatgtttgcaggccgggtgatttctactgtttctatgtggtacataggttcaaacttggaggaggaagtcctt

SEQ ID NO: 1385 - DNA, 80 bp, synthetic construct
  misc_feature 1..80: note = Synthetic: >HKU14-cand-11520-11599
  source 1..80: mol_type = other DNA
ctcctccttgtttctgccttcggtacttacacatggactacagtattgtcattggctgtgtcaaagattattgcaaaatg

SEQ ID NO: 1386 - DNA, 80 bp, synthetic construct
  misc_feature 1..80: note = Synthetic: >HKU14-cand-11600-11679
  source 1..80: mol_type = other DNA
gatttctgtgaatttgttatatttcacagacataccgcttattaaattggttcttttgagctatttgtttgttggttatg

SEQ ID NO: 1387 - DNA, 80 bp, synthetic construct
  misc_feature 1..80: note = Synthetic: >HKU14-cand-11680-11759
  source 1..80: mol_type = other DNA
ttgttagttgttattggggattgttttccttgatgaacaagctttttagaatgcctctgggtgtttataattataaaatt

SEQ ID NO: 1388 - DNA, 80 bp, synthetic construct
  misc_feature 1..80: note = Synthetic: >HKU14-cand-11760-11839
  source 1..80: mol_type = other DNA
tcagtgcaggaattgaggtatatgaatgctaatggtttgcgcccaccgcgtaatagttttgaagcccttatgctcaattt

SEQ ID NO: 1389 - DNA, 80 bp, synthetic construct
  misc_feature 1..80: note = Synthetic: >HKU14-cand-11840-11919
  source 1..80: mol_type = other DNA
taagcttttgggtattggtggtgtgccaatcatagaagtatctcaaatccaatcaaaattgactgatgttaaatgtgcta

SEQ ID NO: 1390 - DNA, 80 bp, synthetic construct
  misc_feature 1..80: note = Synthetic: >HKU14-cand-11920-11999
  source 1..80: mol_type = other DNA
atgttgttttgcttaattgcttgcagcatttgcatgtggcatctaattctaagttgtggcagtattgtagtactcttcat

SEQ ID NO: 1391 - DNA, 80 bp, synthetic construct
  misc_feature 1..80: note = Synthetic: >HKU25-cand-1300-1379
  source 1..80: mol_type = other DNA
cgctgtgcaagggtttgcatgcgactgtggtgcagaattctcagcacttgatgttgagcttcaatcatctggagttatca

SEQ ID NO: 1392 - DNA, 80 bp, synthetic construct
  misc_feature 1..80: note = Synthetic: >HKU25-cand-1380-1459
  source 1..80: mol_type = other DNA
atcccaatgcaatcttctgcgcaacttgcccgtttgctaaaggcgatagttgctcttctgcgtgcaaacacaccttgcct

SEQ ID NO: 1393 - DNA, 80 bp, synthetic construct
  misc_feature 1..80: note = Synthetic: >HKU25-cand-1460-1539
  source 1..80: mol_type = other DNA
cagctcgttagcaaattgactgagaagtgtgagcttacacccgatggtaaatccttcaccataacttttggaggcgtagt

SEQ ID NO: 1394 - DNA, 80 bp, synthetic construct
  misc_feature 1..80: note = Synthetic: >HKU25-cand-1540-1619
  source 1..80: mol_type = other DNA
ttatgcctacctgggttgtacagaaggtactatgtactttatcccacgtgctaaatccattgtgtcaaggattggcgagg

SEQ ID NO: 1395 - DNA, 80 bp, synthetic construct
  misc_feature 1..80: note = Synthetic: >HKU25-cand-1620-1699
  source 1..80: mol_type = other DNA
ccatcttcactggatgtgtaggcacgtggtctaaggttacttctatcgctaaccttttcttggaacaaacacagcgttcc

SEQ ID NO: 1396 - DNA, 80 bp, synthetic construct
  misc_feature 1..80: note = Synthetic: >HKU25-cand-1700-1779
  source 1..80: mol_type = other DNA
ctcaactttgtcggagagtttgtgcttaacgatgtagttattgcaattctctctggcactaccaacaatgtggacaaatt

SEQ ID NO: 1397 - DNA, 80 bp, synthetic construct
  misc_feature 1..80: note = Synthetic: >HKU25-cand-1780-1859
  source 1..80: mol_type = other DNA
gcgttctcttgtcagcaatcttgatgctgataagctacgtaattacttgtcagactttggcattgctgtcactgtcggcc

SEQ ID NO: 1398 - DNA, 80 bp, synthetic construct
  misc_feature 1..80: note = Synthetic: >HKU25-cand-1860-1939
  source 1..80: mol_type = other DNA
cttacttggatggtgccattaatgttggtaaacaaggattacagtttgctaccattactgcccctttcctaattctcact

SEQ ID NO: 1399 - DNA, 80 bp, synthetic construct
  misc_feature 1..80: note = Synthetic: >HKU25-cand-1940-2019
  source 1..80: mol_type = other DNA
ggtcttggtgagtctttcaagaaggccgctgcagtgccgtataaactatgcagctcacttaaggatactctagattacta

SEQ ID NO: 1400 - DNA, 80 bp, synthetic construct
  misc_feature 1..80: note = Synthetic: >HKU25-cand-2020-2099
  source 1..80: mol_type = other DNA
tgctaacagcatactctacagggtatttccttatgagatctcatctgatgtctcttcattctctgaactgctgttagact

SEQ ID NO: 1401 - DNA, 80 bp, synthetic construct
  misc_feature 1..80: note = Synthetic: >HKU25-cand-2100-2179
  source 1..80: mol_type = other DNA
gtattggtttcacagcagcatctgcttactttgtagtgcgtctgttgcatgataaaaccgacacacttctttccactatc

SEQ ID NO: 1402 - DNA, 80 bp, synthetic construct
  misc_feature 1..80: note = Synthetic: >HKU25-cand-2180-2259
  source 1..80: mol_type = other DNA
tactcctcatgtcaagccgcagtcaagagctttcttaacacatgtttcgaaactactgcagcttccatcaactttcttat

SEQ ID NO: 1403 - DNA, 80 bp, synthetic construct
  misc_feature 1..80: note = Synthetic: >HKU25-cand-2260-2339
  source 1..80: mol_type = other DNA
tgaccttgccaatctcttcaaaacctttcttacacaggcctatgtgtacacaacgaggggtttcgtcattgtgagcggta

SEQ ID NO: 1404 - DNA, 80 bp, synthetic construct
  misc_feature 1..80: note = Synthetic: >HKU25-cand-2340-2419
  source 1..80: mol_type = other DNA
aggccaccaagcttactactcagcttttggacattctgtctaaaggcatgcagctactgagcactaaagtcacttgggct

SEQ ID NO: 1405 - DNA, 80 bp, synthetic construct
  misc_feature 1..80: note = Synthetic: >HKU25-cand-2420-2499
  source 1..80: mol_type = other DNA
ggtgctaaagtcaaggcggtcgtctataacagccgcgaatcacttgtgttcccatcaggaacctactactgtgtacccac

SEQ ID NO: 1406 - DNA, 80 bp, synthetic construct
  misc_feature 1..80: note = Synthetic: >HKU25-cand-2500-2579
  source 1..80: mol_type = other DNA
taaggctagtaccgtgcaacaagaatttagcatggtactgcctggtgagcttgttaagaaacaacttggcttgctagaac

SEQ ID NO: 1407 - DNA, 80 bp, synthetic construct
  misc_feature 1..80: note = Synthetic: >HKU25-cand-6420-6499
  source 1..80: mol_type = other DNA
gaaatctctcaagattcaatagggcatcattgcgtcaaatatttgaccctaaacccattgaattagataataaattcaca

SEQ ID NO: 1408 - DNA, 80 bp, synthetic construct
  misc_feature 1..80: note = Synthetic: >HKU25-cand-6500-6579
  source 1..80: mol_type = other DNA
cctctcgctatagaggaagctgaacctgtaaaagaaaaagaaaaggaagaaattcccacaataagcagtcaaccagagct

SEQ ID NO: 1409 - DNA, 80 bp, synthetic construct
  misc_feature 1..80: note = Synthetic: >HKU25-cand-6580-6659
  source 1..80: mol_type = other DNA
aaaactagtcaaatgcaaaggcttgaaaaagccgtttgtgaaggatggctttagctttgtgagtgatggtgaaggtattc

SEQ ID NO: 1410 - DNA, 80 bp, synthetic construct
  misc_feature 1..80: note = Synthetic: >HKU25-cand-6660-6739
  source 1..80: mol_type = other DNA
ctgtagtagattacctcacacgtgatgacatgcatcaattgtatgttgatccaaagcatagactgattgtcctcaatgac

SEQ ID NO: 1411 - DNA, 80 bp, synthetic construct
  misc_feature 1..80: note = Synthetic: >HKU25-cand-6740-6819
  source 1..80: mol_type = other DNA
aatttgttgtctacgtgtttcggactgcacaccgtacagagtggagatctcagtgttgttgcagctaatgggtccttgac

SEQ ID NO: 1412 - DNA, 80 bp, synthetic construct
  misc_feature 1..80: note = Synthetic: >HKU25-cand-6820-6899
  source 1..80: mol_type = other DNA
taagaaagttaggatgctgttcaaggcttctgctttgttcaaggagtttgctagcagaacttttcaagctgtgtccgcga

SEQ ID NO: 1413 - DNA, 80 bp, synthetic construct
  misc_feature 1..80: note = Synthetic: >HKU25-cand-6900-6979
  source 1..80: mol_type = other DNA
tcggaacagctgtcaagtttgtagcatcacattctggtgtatgtgcaagcgtcatctataattgcttctcaattataaag

SEQ ID NO: 1414 - DNA, 80 bp, synthetic construct
  misc_feature 1..80: note = Synthetic: >HKU25-cand-6980-7059
  source 1..80: mol_type = other DNA
atgctatgcttactacctttcagctatctaaagcagaaagagaccgctagtacagaagttgaagttaatgcttttcgtac

SEQ ID NO: 1415 - DNA, 80 bp, synthetic construct
  misc_feature 1..80: note = Synthetic: >HKU25-cand-7060-7139
  source 1..80: mol_type = other DNA
agcgggaatcgtaaccggcaatgttgtcaagcagtgttgcacagcagccgcagatttacttgttaacaaattacagcgta

SEQ ID NO: 1416 - DNA, 80 bp, synthetic construct
  misc_feature 1..80: note = Synthetic: >HKU25-cand-7140-7219
  source 1..80: mol_type = other DNA
ttgattggaaatcctccttacggctgttacttgtgttatgtacaactgggctattgttgtcagctgtatatcacttgtac

SEQ ID NO: 1417 - DNA, 80 bp, synthetic construct
  misc_feature 1..80: note = Synthetic: >HKU25-cand-7220-7299
  source 1..80: mol_type = other DNA
gtctttaaccaggtgctatcaagtgatgcattgttagaggatgctacaggattgactgcactctatagagaggctcgcca

SEQ ID NO: 1418 - DNA, 80 bp, synthetic construct
  misc_feature 1..80: note = Synthetic: >HKU25-cand-7300-7379
  source 1..80: mol_type = other DNA
ataccttggtatcacttcagcttgcgacggtatggcacgtgattatagagcgaattcgttcaacatctatgattactgtg

SEQ ID NO: 1419 - DNA, 80 bp, synthetic construct
  misc_feature 1..80: note = Synthetic: >HKU25-cand-7380-7459
  source 1..80: mol_type = other DNA
caaaccgttcatctatttgtaagtggtgtttacttggtcaagattccattacacactattcggcgctcaaaatggttcaa

SEQ ID NO: 1420 - DNA, 80 bp, synthetic construct
  misc_feature 1..80: note = Synthetic: >HKU25-cand-7460-7539
  source 1..80: mol_type = other DNA
actcacctaagccactatgtcttgaacatagattggctgtggtttgtcattgagtttctgattgcttatgcattgtacac

SEQ ID NO: 1421 - DNA, 80 bp, synthetic construct
  misc_feature 1..80: note = Synthetic: >HKU25-cand-7540-7619
  source 1..80: mol_type = other DNA
atcagcctttaactgggtcctgatggcatgcactctgcaatacttctttgtgcaaacaactgtgttcgtggactggcgtt

SEQ ID NO: 1422 - DNA, 80 bp, synthetic construct
  misc_feature 1..80: note = Synthetic: >HKU25-cand-7620-7699
  source 1..80: mol_type = other DNA
cctacaactatgttgtttcatgcatctatctgttcttcacgcatatccctcttgacggtctggtcagaatatacaatgtt

SEQ ID NO: 1423 - DNA, 80 bp, synthetic construct
  misc_feature 1..80: note = Synthetic: >HKU25-cand-20490-20569
  source 1..80: mol_type = other DNA
tgagtctttctatactcaaggtcgcactcatgacaactttgagcccatgtcagacatggagaaagactttctcttattag

SEQ ID NO: 1424 - DNA, 80 bp, synthetic construct
  misc_feature 1..80: note = Synthetic: >HKU25-cand-20570-20649
  source 1..80: mol_type = other DNA
acagtgatgtttttattaagaaatataagttggaaaaatatgcttttgaacatgtagtctatggtgatttctcacatact

SEQ ID NO: 1425 - DNA, 80 bp, synthetic construct
  misc_feature 1..80: note = Synthetic: >HKU25-cand-20650-20729
  source 1..80: mol_type = other DNA
acattgggcggcctacatctacttattggtttacacaagaagtgtttggaaggccatattgttatggaggaaatgctcaa

SEQ ID NO: 1426 - DNA, 80 bp, synthetic construct
  misc_feature 1..80: note = Synthetic: >HKU25-cand-20730-20809
  source 1..80: mol_type = other DNA
cgaaagtgcaaccatccataattactttatcactgaaacacccacagcgtcatttaaagcggtgtgttctgttatagact

SEQ ID NO: 1427 - DNA, 80 bp, synthetic construct
  misc_feature 1..80: note = Synthetic: >HKU25-cand-20810-20889
  source 1..80: mol_type = other DNA
taaaacttgacgacttcgtacagatcataaaaagtcaagaccttggcgtagtatccaaggtggtcaaaatacctattgat

SEQ ID NO: 1428 - DNA, 80 bp, synthetic construct
  misc_feature 1..80: note = Synthetic: >HKU25-cand-20890-20969
  source 1..80: mol_type = other DNA
ttaacatttgttgaatttatgttatggtgtaaggatggccaggtacaaacgttctacccgcgacttcaggcttcaaacga

SEQ ID NO: 1429 - DNA, 80 bp, synthetic construct
  misc_feature 1..80: note = Synthetic: >HKU25-cand-20970-21049
  source 1..80: mol_type = other DNA
ttggaaacctgggttggctatgccgtcactcttcaaagttcagaatgtaaaccttgaaccatgccagcttgccaattaca

SEQ ID NO: 1430 - DNA, 80 bp, synthetic construct
  misc_feature 1..80: note = Synthetic: >HKU25-cand-21050-21129
  source 1..80: mol_type = other DNA
agcaatcaatacctatgccacgaggtgttcacatgaacgtggctaaatatatgcaattgtgccagtatttaaatacctgc

SEQ ID NO: 1431 - DNA, 80 bp, synthetic construct
  misc_feature 1..80: note = Synthetic: >HKU25-cand-21130-21209
  source 1..80: mol_type = other DNA
acaatagctgttcctgctaacatgcgtgtaatgcattttggcgctggttctgataaaggtatcgcacccggtacttcagt

SEQ ID NO: 1432 - DNA, 80 bp, synthetic construct
  misc_feature 1..80: note = Synthetic: >HKU25-cand-21210-21289
  source 1..80: mol_type = other DNA
tttaaggcaatggctacctgtcgatgctgttcttatagataatgacctaaatgagtacgtgtcagatgctgacattagct

SEQ ID NO: 1433 - DNA, 80 bp, synthetic construct
  misc_feature 1..80: note = Synthetic: >HKU25-cand-21290-21369
  source 1..80: mol_type = other DNA
tatttggagattgtgtaactgtacgtgttggacagcaagtggatcttgttatctctgacatgtatgatcctagtactaag

SEQ ID NO: 1434 - DNA, 80 bp, synthetic construct
  misc_feature 1..80: note = Synthetic: >HKU25-cand-21370-21449
  source 1..80: mol_type = other DNA
aatgtcaagggtactaatgaagcaaaagcattattctttacctacctttgtaattttatcaataataatcttgctctggg

SEQ ID NO: 1435 - DNA, 80 bp, synthetic construct
  misc_feature 1..80: note = Synthetic: >HKU25-cand-21450-21529
  source 1..80: mol_type = other DNA
tggctctgttgctattaaaataacagaacactcatggagcgcggatctttatgaattaatgggaaagtttgcttggtgga

SEQ ID NO: 1436 - DNA, 80 bp, synthetic construct
  misc_feature 1..80: note = Synthetic: >HKU25-cand-21530-21609
  source 1..80: mol_type = other DNA
cagtgttctgcactaacgcaaacgcatcatcttcggaaggatttctcaatggtctaaattacttgggtactattagagaa

SEQ ID NO: 1437 - DNA, 80 bp, synthetic construct
  misc_feature 1..80: note = Synthetic: >HKU25-cand-21610-21689
  source 1..80: mol_type = other DNA
gttatagatggcaatgcaatgcatgctaactatatattctggagaaattccacacttatgaatctgagtacctactcact

SEQ ID NO: 1438 - DNA, 80 bp, synthetic construct
  misc_feature 1..80: note = Synthetic: >HKU25-cand-21690-21769
  source 1..80: mol_type = other DNA
ttttgatctatccaagttttcaatcaagttaaaaggcaccccggtgcttcaattaaaagagagtcaaattaacgaactcg

SEQ ID NO: 1439 - DNA, 80 bp, synthetic construct
  misc_feature 1..80: note = Synthetic: >HKU8-cand-3910-3989
  source 1..80: mol_type = other DNA
caactgcgtttgttgatccttttaagtttgagtattatgaccacgatggtgttcgtgtgcttaaacaggatgataacaat

SEQ ID NO: 1440 - DNA, 80 bp, synthetic construct
  misc_feature 1..80: note = Synthetic: >HKU8-cand-3990-4069
  source 1..80: mol_type = other DNA
tgttgggtcgcttccacgttggtacaattgcagctttatggcttgttggatgatagtgatgctatgtcactttttaaggc

SEQ ID NO: 1441 - DNA, 80 bp, synthetic construct
  misc_feature 1..80: note = Synthetic: >HKU8-cand-4070-4149
  source 1..80: mol_type = other DNA
tggtagtgtttcacctatggtgcgtaagtgctatgatgctgttggagctattcgtggtagtctaggtgatgtatctcagt

SEQ ID NO: 1442 - DNA, 80 bp, synthetic construct
  misc_feature 1..80: note = Synthetic: >HKU8-cand-4150-4229
  source 1..80: mol_type = other DNA
gtttagaagtacttctttatgatagtcatactatgtttatgactttcgatgtgaagtgtgattgtggtggctctatggct

SEQ ID NO: 1443 - DNA, 80 bp, synthetic construct
  misc_feature 1..80: note = Synthetic: >HKU8-cand-4230-4309
  source 1..80: mol_type = other DNA
gaaatgagtggtgctgtgtttcgttttatgcctactcgtgatacttttaattatggtgcttgtcctacttgtaggagagt

SEQ ID NO: 1444 - DNA, 80 bp, synthetic construct
  misc_feature 1..80: note = Synthetic: >HKU8-cand-4310-4389
  source 1..80: mol_type = other DNA
catggtttataagattaagagtatgcagggtactggcttcttttgtcaggacccaaaaccttttaatactgcacgttctc

SEQ ID NO: 1445 - DNA, 80 bp, synthetic construct
  misc_feature 1..80: note = Synthetic: >HKU8-cand-4390-4469
  source 1..80: mol_type = other DNA
ttgttaagccagttagtgccagtgtttacagtggttgtactgatggtggacattataaaaccaatatttatgacgcacgt

SEQ ID NO: 1446 - DNA, 80 bp, synthetic construct
  misc_feature 1..80: note = Synthetic: >HKU8-cand-4470-4549
  source 1..80: mol_type = other DNA
gtttgcgttgatggttttggcgttactagtatttctactggtaatgttaatgtgattcttctgcaggatggtagctatgg

SEQ ID NO: 1447 - DNA, 80 bp, synthetic construct
  misc_feature 1..80: note = Synthetic: >HKU8-cand-4550-4629
  source 1..80: mol_type = other DNA
tctttctgctattgatgaacctaagcaagacatagttgatgatgttgttacaactactgtggaaagtgttggacaagttg

SEQ ID NO: 1448 - DNA, 80 bp, synthetic construct
  misc_feature 1..80: note = Synthetic: >HKU8-cand-4630-4709
  source 1..80: mol_type = other DNA
ttaaaccaaatgttgaaccttttgccacttttggcagtattgagttctaccagggtgatgttaaggcattggctgcactt

SEQ ID NO: 1449 - DNA, 80 bp, synthetic construct
  misc_feature 1..80: note = Synthetic: >HKU8-cand-4710-4789
  source 1..80: mol_type = other DNA
ccttgcgactttgtggttaatgctgccaatgaaaatttgcagcatgctggtggtgtcgctaatgctattaatgagcttac

SEQ ID NO: 1450 - DNA, 80 bp, synthetic construct
  misc_feature 1..80: note = Synthetic: >HKU8-cand-4790-4869
  source 1..80: mol_type = other DNA
tggcggtgtgttgcagcgtctgtcagacgattacatacgtgccaatggtaaggttaaagttggttgtggtgtcatgcttg

SEQ ID NO: 1451 - DNA, 80 bp, synthetic construct
  misc_feature 1..80: note = Synthetic: >HKU8-cand-4870-4949
  source 1..80: mol_type = other DNA
agtgtaagccattgcgtgtatttaatgttgttggacctcgtaaaggtaaacatgccaggtctttgcttgttaagtgttat

SEQ ID NO: 1452 - DNA, 80 bp, synthetic construct
  misc_feature 1..80: note = Synthetic: >HKU8-cand-4950-5029
  source 1..80: mol_type = other DNA
aaaagtgttctttcaaagccaggtgttcctctaacacctttagttagtgttggtatatttggtgtacctttgtcagaatc

SEQ ID NO: 1453 - DNA, 80 bp, synthetic construct
  misc_feature 1..80: note = Synthetic: >HKU8-cand-5030-5109
  source 1..80: mol_type = other DNA
ttttattgcacttacgagcgctgtcggtggtagacgggttttgtgtttctgctattctgatacagagcgtaatgctatta

SEQ ID NO: 1454 - DNA, 80 bp, synthetic construct
  misc_feature 1..80: note = Synthetic: >HKU8-cand-5110-5189
  source 1..80: mol_type = other DNA
taaagttgattgctcagcgcactgagcaagtcaatgctgttactgtgattgctgagaacaagcctattgctgaagctaag

SEQ ID NO: 1455 - DNA, 80 bp, synthetic construct
  misc_feature 1..80: note = Synthetic: >MurineCoV-cand-12790-12869
  source 1..80: mol_type = other DNA
tagatgttaattcaacctggcctctagtcattgctgcaaataggcataatgaagtgtctactgttgttttgcagaacaat

SEQ ID NO: 1456 - DNA, 80 bp, synthetic construct
  misc_feature 1..80: note = Synthetic: >MurineCoV-cand-12870-12949
  source 1..80: mol_type = other DNA
gagttgatgcctcagaagttgagaactcaggttgtcaatagtggctcagatatgaattgtaatactcctacccagtgtta

SEQ ID NO: 1457 - DNA, 80 bp, synthetic construct
  misc_feature 1..80: note = Synthetic: >MurineCoV-cand-12950-13029
  source 1..80: mol_type = other DNA
ctataatactactggcacgggtaagattgtgtatgctatacttagtgactgtgatggtctcaagtacactaagatagtaa

SEQ ID NO: 1458 - DNA, 80 bp, synthetic construct
  misc_feature 1..80: note = Synthetic: >MurineCoV-cand-13030-13109
  source 1..80: mol_type = other DNA
aagaagatggaaattgtgttgttttggaattggatcctccctgtaagttttctgttcaggatgtgaagggccttaaaatt

SEQ ID NO: 1459 - DNA, 80 bp, synthetic construct
  misc_feature 1..80: note = Synthetic: >MurineCoV-cand-13110-13189
  source 1..80: mol_type = other DNA
aagtacctttactttgtgaaggggtgtaatacactggctagaggctgggttgtaggcaccttatcctcgacagtgagatt

SEQ ID NO: 1460 - DNA, 80 bp, synthetic construct
  misc_feature 1..80: note = Synthetic: >MurineCoV-cand-13190-13269
  source 1..80: mol_type = other DNA
gcaggcgggtacggcaactgagtatgcctccaactctgcaatactgtcgctgtgtgcgttttctgtagatcctaagaaaa

SEQ ID NO: 1461 - DNA, 80 bp, synthetic construct
  misc_feature 1..80: note = Synthetic: >MurineCoV-cand-13270-13349
  source 1..80: mol_type = other DNA
cgtacttggattatataaaacagggtggagttcccgttactaattgtgttaagatgttatgtgaccatgctggcactggt

SEQ ID NO: 1462 - DNA, 80 bp, synthetic construct
  misc_feature 1..80: note = Synthetic: >MurineCoV-cand-13350-13429
  source 1..80: mol_type = other DNA
atggccattactattaagccggaggcaaccactaatcaggattcttatggtggtgcttccgtttgtatatattgccgctc

SEQ ID NO: 1463 - DNA, 80 bp, synthetic construct
  misc_feature 1..80: note = Synthetic: >MurineCoV-cand-13430-13509
  source 1..80: mol_type = other DNA
gcgtgttgaacatccagatgttgatggattgtgcaaattacgcggcaagtttgtccaagtgcccttaggcataaaagatc

SEQ ID NO: 1464 - DNA, 80 bp, synthetic construct
  misc_feature 1..80: note = Synthetic: >MurineCoV-cand-13510-13589
  source 1..80: mol_type = other DNA
ctgtgtcatatgtgttgacgcatgatgtttgtcaggtttgtggcttttggcgagatggtagctgttcctgtgtaggcaca

SEQ ID NO: 1465 - DNA, 80 bp, synthetic construct
  misc_feature 1..80: note = Synthetic: >MurineCoV-cand-13590-13669
  source 1..80: mol_type = other DNA
ggctcccagtttcagtcaaaagacacgaactttttaaacgggttcggggtacaagtgtaaatgcccgtcttgtaccctgt

SEQ ID NO: 1466 - DNA, 80 bp, synthetic construct
  misc_feature 1..80: note = Synthetic: >MurineCoV-cand-13670-13749
  source 1..80: mol_type = other DNA
gccagtggcttggacactgatgttcaattaagggcatttgacatttgtaatgctaatcgagctggcattggtttgtatta

SEQ ID NO: 1467 - DNA, 80 bp, synthetic construct
  misc_feature 1..80: note = Synthetic: >MurineCoV-cand-13750-13829
  source 1..80: mol_type = other DNA
taaagtgaattgctgccgcttccagcgtgtagatgaggacggcaacaagttggataagttctttgttgttaaaagaacta

SEQ ID NO: 1468 - DNA, 80 bp, synthetic construct
  misc_feature 1..80: note = Synthetic: >MurineCoV-cand-13830-13909
  source 1..80: mol_type = other DNA
atttagaagtgtataataaggagaaagaatgctatgagttgacaaaagaatgcggtgttgtggctgaacacgagttcttc

SEQ ID NO: 1469 - DNA, 80 bp, synthetic construct
  misc_feature 1..80: note = Synthetic: >MurineCoV-cand-13910-13989
  source 1..80: mol_type = other DNA
acatttgatgtggagggaagtcgggtaccacacatagtccgtaaagatctttcaaagtttactatgttagatctttgcta

SEQ ID NO: 1470 - DNA, 80 bp, synthetic construct
  misc_feature 1..80: note = Synthetic: >MurineCoV-cand-13990-14069
  source 1..80: mol_type = other DNA
tgcattgcgtcattttgaccgcaatgattgttcaactcttaaggaaattctccttacatatgctgagtgtgaagagtcct

SEQ ID NO: 1471 - DNA, 80 bp, synthetic construct
  misc_feature 1..80: note = Synthetic: >MurineCoV-cand-17930-18009
  source 1..80: mol_type = other DNA
aatagtcagaactatgttgctaagagagtcttgggattacaaacccagacagtagactcagcgcagggttctgaatatga

SEQ ID NO: 1472 - DNA, 80 bp, synthetic construct
  misc_feature 1..80: note = Synthetic: >MurineCoV-cand-18010-18089
  source 1..80: mol_type = other DNA
ttttgttatttattcacagactgcggaaacagcgcattctgtcaatgtaaatagattcaatgttgctattacacgtgcta

SEQ ID NO: 1473 - DNA, 80 bp, synthetic construct
  misc_feature 1..80: note = Synthetic: >MurineCoV-cand-18090-18169
  source 1..80: mol_type = other DNA
agaagggtattctctgtgtcatgagtagtatgcaattatttgagtctcttaattttactacactgacgttggataagatt

SEQ ID NO: 1474 - DNA, 80 bp, synthetic construct
  misc_feature 1..80: note = Synthetic: >MurineCoV-cand-18170-18249
  source 1..80: mol_type = other DNA
aacaatccacgattacagtgtactacaaatttgtttaaggattgtagcaggagctatgtaggatatcacccagcccatgc

SEQ ID NO: 1475 - DNA, 80 bp, synthetic construct
  misc_feature 1..80: note = Synthetic: >MurineCoV-cand-18250-18329
  source 1..80: mol_type = other DNA
accatcctttttggcagttgatgacaaatataaggtaggcggtgatttagccgtttgccttaatgttgctgattctgctg

SEQ ID NO: 1476 - DNA, 80 bp, synthetic construct
  misc_feature 1..80: note = Synthetic: >MurineCoV-cand-18330-18409
  source 1..80: mol_type = other DNA
tcacttattcgcggcttatatcactcatgggattcaagcttgacttgacccttgatggttattgtaagctgtttataact

SEQ ID NO: 1477 - DNA, 80 bp, synthetic construct
  misc_feature 1..80: note = Synthetic: >MurineCoV-cand-18410-18489
  source 1..80: mol_type = other DNA
agagatgaagctatcaaacgtgttagagcctgggttggcttcgatgcagaaggtgcccatgcgatacgtgatagcattgg

SEQ ID NO: 1478 - DNA, 80 bp, synthetic construct
  misc_feature 1..80: note = Synthetic: >MurineCoV-cand-18490-18569
  source 1..80: mol_type = other DNA
gacaaatttcccattacaattaggcttttcgactggaattgattttgttgtcgaagccactggaatgtttgctgagagag

SEQ ID NO: 1479 - DNA, 80 bp, synthetic construct
  misc_feature 1..80: note = Synthetic: >MurineCoV-cand-18570-18649
  source 1..80: mol_type = other DNA
atggttatgtctttaaaaaggcagccgcacgagctcctcctggcgaacaatttaaacaccttatcccacttatgtcaaga

SEQ ID NO: 1480 - DNA, 80 bp, synthetic construct
  misc_feature 1..80: note = Synthetic: >MurineCoV-cand-18650-18729
  source 1..80: mol_type = other DNA
gggcagaaatgggatgtggttcgaattagaatagtacaaatgttgtcagaccacctagtggatttggcagacagtgttgt

SEQ ID NO: 1481 - DNA, 80 bp, synthetic construct
  misc_feature 1..80: note = Synthetic: >MurineCoV-cand-18730-18809
  source 1..80: mol_type = other DNA
acttgtgacgtgggctgccagctttgagctcacatgtttgcgatatttcgctaaagttggaagagaagttgtgtgtagtg

SEQ ID NO: 1482 - DNA, 80 bp, synthetic construct
  misc_feature 1..80: note = Synthetic: >MurineCoV-cand-18810-18889
  source 1..80: mol_type = other DNA
tctgcaccaagcgtgcgacatgttttaattctagaactggatactatggatgctggcgacatagttattcctgtgattac

SEQ ID NO: 1483 - DNA, 80 bp, synthetic construct
  misc_feature 1..80: note = Synthetic: >MurineCoV-cand-18890-18969
  source 1..80: mol_type = other DNA
ctgtacaacccactaatagttgacattcaacagtggggatatacaggatctttaactagcaatcatgatcctatttgcag

SEQ ID NO: 1484 - DNA, 80 bp, synthetic construct
  misc_feature 1..80: note = Synthetic: >MurineCoV-cand-18970-19049
  source 1..80: mol_type = other DNA
cgtgcataagggtgctcatgttgcatcatctgatgctatcatgacccggtgtctagctgttcatgattgcttttgtaagt

SEQ ID NO: 1485 - DNA, 80 bp, synthetic construct
  misc_feature 1..80: note = Synthetic: >MurineCoV-cand-19050-19129
  source 1..80: mol_type = other DNA
ctgttaattggaatttagaataccccattatttcaaatgaggtcagtgttaatacctcctgcaggttattgcagcgcgta

SEQ ID NO: 1486 - DNA, 80 bp, synthetic construct
  misc_feature 1..80: note = Synthetic: >MurineCoV-cand-19130-19209
  source 1..80: mol_type = other DNA
atgtttagggctgcgatgctatgcaataggtatgatgtgtgttatgacattggcaaccctaaaggtcttgcctgtgtcaa

SEQ ID NO: 1487 - DNA, 80 bp, synthetic construct
  misc_feature 1..80: note = Synthetic: >MurineCoV-cand-21760-21839
  source 1..80: mol_type = other DNA
aaatgtcaaataaatctatacttgtcgtggctgtgaaaatggcctttgctgacaagcctaatcatttcataaactttccc

SEQ ID NO: 1488 - DNA, 80 bp, synthetic construct
  misc_feature 1..80: note = Synthetic: >MurineCoV-cand-21840-21919
  source 1..80: mol_type = other DNA
ctggcccaatttagtggctttatgggtaagtatttaaagctacagtctcaacttgtggaaatgggtttagactgtaaatt

SEQ ID NO: 1489 - DNA, 80 bp, synthetic construct
  misc_feature 1..80: note = Synthetic: >MurineCoV-cand-21920-21999
  source 1..80: mol_type = other DNA
acagaaggcaccacatgttagtattaccctgcttgatattaaagcagaccaatacaaacaggtggaatttgcaatacaag

SEQ ID NO: 1490 - DNA, 80 bp, synthetic construct
  misc_feature 1..80: note = Synthetic: >MurineCoV-cand-22000-22079
  source 1..80: mol_type = other DNA
aaataatagatgatctggcggcatatgagggagatattgtctttgacaaccctcacatgcttggcagatgccttgttctt

SEQ ID NO: 1491 - DNA, 80 bp, synthetic construct
  misc_feature 1..80: note = Synthetic: >MurineCoV-cand-22080-22159
  source 1..80: mol_type = other DNA
gatgttagaggatttgaagagttgcatgaagatattgttgaaattctccgcagaaggggttgcacggcagatcaatccag

SEQ ID NO: 1492 - DNA, 80 bp, synthetic construct
  misc_feature 1..80: note = Synthetic: >MurineCoV-cand-22160-22239
  source 1..80: mol_type = other DNA
acactggattccgcactgcactgtggcccaatttgacgaagaaagagaaacaaaaggaatgcaattctatcataaagaac

SEQ ID NO: 1493 - DNA, 80 bp, synthetic construct
  misc_feature 1..80: note = Synthetic: >MurineCoV-cand-22250-22329
  source 1..80: mol_type = other DNA
caagcataacaacctattaacggatgctgggcttgagctcgtgaagataggttcttccaaaatagatgggttttattgta

SEQ ID NO: 1494 - DNA, 80 bp, synthetic construct
  misc_feature 1..80: note = Synthetic: >MurineCoV-cand-22330-22409
  source 1..80: mol_type = other DNA
gtgaactgagtgtttggtgtggtgagaggctttgttataagcctccaacacccaaattcagtgatatatttggctattgc

SEQ ID NO: 1495 - DNA, 80 bp, synthetic construct
  misc_feature 1..80: note = Synthetic: >MurineCoV-cand-22410-22489
  source 1..80: mol_type = other DNA
tgcatagataaaatacgtggtgatttagaaataggagacctaccgcaggatgatgaggaagcgtgggccgagctaagtta

SEQ ID NO: 1496 - DNA, 80 bp, synthetic construct
  misc_feature 1..80: note = Synthetic: >MurineCoV-cand-22490-22569
  source 1..80: mol_type = other DNA
ccactatcaaagaaacacctacttcttcagacatgtgcacgataatagcatctattttcgtaccgtatgtagaatgaagg

SEQ ID NO: 1497 - DNA, 80 bp, synthetic construct
  misc_feature 1..80: note = Synthetic: >MurineCoV-cand-22570-22649
  source 1..80: mol_type = other DNA
gttgtatgtgttgatttgtttttacactattagtgtaataagcttattattttgttgaaaagggcaggatgtcatggcgc

SEQ ID NO: 1498 - DNA, 80 bp, synthetic construct
  misc_feature 1..80: note = Synthetic: >MurineCoV-cand-22650-22729
  source 1..80: mol_type = other DNA
gcggcatagctatggctcctcgcacactgcttttgctgatttgatgtcagctggtgtttgggttcaatgaacctcttaac

SEQ ID NO: 1499 - DNA, 80 bp, synthetic construct
  misc_feature 1..80: note = Synthetic: >MurineCoV-cand-22730-22809
  source 1..80: mol_type = other DNA
atcgtttcacatttaaatgatgactggtttctatttggtgacagtcgttctgactgtacctatgtagaaaataacggtca

SEQ ID NO: 1500 - DNA, 80 bp, synthetic construct
  misc_feature 1..80: note = Synthetic: >MurineCoV-cand-22810-22889
  source 1..80: mol_type = other DNA
tcctaaattagattggcttgacctcgacccaaagttgtgtaattcaggaaagatttccgcaaagagtggtaactctctct

SEQ ID NO: 1501 - DNA, 80 bp, synthetic construct
  misc_feature 1..80: note = Synthetic: >MurineCoV-cand-22890-22969
  source 1..80: mol_type = other DNA
ttaggagttttcacttcactgatttttacaattatacgggtgagggagaccaaattgtattttatgaaggagttaatttt

SEQ ID NO: 1502 - DNA, 80 bp, synthetic construct
  misc_feature 1..80: note = Synthetic: >MurineCoV-cand-22970-23049
  source 1..80: mol_type = other DNA
agtcccagccatggctttaaatgcctggctcatggagataataaaagatggatgggcaataaagctcgattttatgcccg

SEQ ID NO: 1503 - DNA, 80 bp, synthetic construct
  misc_feature 1..80: note = Synthetic: >SARSCoV2-cand-7140-7219
  source 1..80: mol_type = other DNA
ggtttagattctttagacacctatccttctttagaaactatacaaattaccatttcatcttttaaatgggatttaactgc

SEQ ID NO: 1504 - DNA, 80 bp, synthetic construct
  misc_feature 1..80: note = Synthetic: >SARSCoV2-cand-7220-7299
  source 1..80: mol_type = other DNA
ttttggcttagttgcagagtggtttttggcatatattcttttcactaggtttttctatgtacttggattggctgcaatca

SEQ ID NO: 1505 - DNA, 80 bp, synthetic construct
  misc_feature 1..80: note = Synthetic: >SARSCoV2-cand-7300-7379
  source 1..80: mol_type = other DNA
tgcaattgtttttcagctattttgcagtacattttattagtaattcttggcttatgtggttaataattaatcttgtacaa

SEQ ID NO: 1506 - DNA, 80 bp, synthetic construct
  misc_feature 1..80: note = Synthetic: >SARSCoV2-cand-7380-7459
  source 1..80: mol_type = other DNA
atggccccgatttcagctatggttagaatgtacatcttctttgcatcattttattatgtatggaaaagttatgtgcatgt

SEQ ID NO: 1507 - DNA, 80 bp, synthetic construct
  misc_feature 1..80: note = Synthetic: >SARSCoV2-cand-7460-7539
  source 1..80: mol_type = other DNA
tgtagacggttgtaattcatcaacttgtatgatgtgttacaaacgtaatagagcaacaagagtcgaatgtacaactattg

SEQ ID NO: 1508 - DNA, 80 bp, synthetic construct
  misc_feature 1..80: note = Synthetic: >SARSCoV2-cand-7540-7619
  source 1..80: mol_type = other DNA
ttaatggtgttagaaggtccttttatgtctatgctaatggaggtaaaggcttttgcaaactacacaattggaattgtgtt

SEQ ID NO: 1509 - DNA, 80 bp, synthetic construct
  misc_feature 1..80: note = Synthetic: >SARSCoV2-cand-7620-7699
  source 1..80: mol_type = other DNA
aattgtgatacattctgtgctggtagtacatttattagtgatgaagttgcgagagacttgtcactacagtttaaaagacc

SEQ ID NO: 1510 - DNA, 80 bp, synthetic construct
  misc_feature 1..80: note = Synthetic: >SARSCoV2-cand-7700-7779
  source 1..80: mol_type = other DNA
aataaatcctactgaccagtcttcttacatcgttgatagtgttacagtgaagaatggttccatccatctttactttgata

SEQ ID NO: 1511 - DNA, 80 bp, synthetic construct
  misc_feature 1..80: note = Synthetic: >SARSCoV2-cand-7780-7859
  source 1..80: mol_type = other DNA
aagctggtcaaaagacttatgaaagacattctctctctcattttgttaacttagacaacctgagagctaataacactaaa

SEQ ID NO: 1512 - DNA, 80 bp, synthetic construct
  misc_feature 1..80: note = Synthetic: >SARSCoV2-cand-7860-7939
  source 1..80: mol_type = other DNA
ggttcattgcctattaatgttatagtttttgatggtaaatcaaaatgtgaagaatcatctgcaaaatcagcgtctgttta

SEQ ID NO: 1513 - DNA, 80 bp, synthetic construct
  misc_feature 1..80: note = Synthetic: >SARSCoV2-cand-7940-8019
  source 1..80: mol_type = other DNA
ctacagtcagcttatgtgtcaacctatactgttactagatcaggcattagtgtctgatgttggtgatagtgcggaagttg

SEQ ID NO: 1514 - DNA, 80 bp, synthetic construct
  misc_feature 1..80: note = Synthetic: >SARSCoV2-cand-8020-8099
  source 1..80: mol_type = other DNA
cagttaaaatgtttgatgcttacgttaatacgttttcatcaacttttaacgtaccaatggaaaaactcaaaacactagtt

SEQ ID NO: 1515 - DNA, 80 bp, synthetic construct
  misc_feature 1..80: note = Synthetic: >SARSCoV2-cand-8100-8179
  source 1..80: mol_type = other DNA
gcaactgcagaagctgaacttgcaaagaatgtgtccttagacaatgtcttatctacttttatttcagcagctcggcaagg

SEQ ID NO: 1516 - DNA, 80 bp, synthetic construct
  misc_feature 1..80: note = Synthetic: >SARSCoV2-cand-8180-8259
  source 1..80: mol_type = other DNA
gtttgttgattcagatgtagaaactaaagatgttgttgaatgtcttaaattgtcacatcaatctgacatagaagttactg

SEQ ID NO: 1517 - DNA, 80 bp, synthetic construct
  misc_feature 1..80: note = Synthetic: >SARSCoV2-cand-8260-8339
  source 1..80: mol_type = other DNA
gcgatagttgtaataactatatgctcacctataacaaagttgaaaacatgacaccccgtgaccttggtgcttgtattgac

SEQ ID NO: 1518 - DNA, 80 bp, synthetic construct
  misc_feature 1..80: note = Synthetic: >SARSCoV2-cand-8340-8419
  source 1..80: mol_type = other DNA
tgtagtgcgcgtcatattaatgcgcaggtagcaaaaagtcacaacattgctttgatatggaacgttaaagatttcatgtc

SEQ ID NO: 1519 - DNA, 80 bp, synthetic construct
  misc_feature 1..80: note = Synthetic: >SARSCoV2-cand-16110-16189
  source 1..80: mol_type = other DNA
atgatgagttaacaggacacatgttagacatgtattctgttatgcttactaatgataacacttcaaggtattgggaacct

SEQ ID NO: 1520 - DNA, 80 bp, synthetic construct
  misc_feature 1..80: note = Synthetic: >SARSCoV2-cand-16190-16269
  source 1..80: mol_type = other DNA
gagttttatgaggctatgtacacaccgcatacagtcttacaggctgttggggcttgtgttctttgcaattcacagacttc

SEQ ID NO: 1521 - DNA, 80 bp, synthetic construct
  misc_feature 1..80: note = Synthetic: >SARSCoV2-cand-16270-16349
  source 1..80: mol_type = other DNA
attaagatgtggtgcttgcatacgtagaccattcttatgttgtaaatgctgttacgaccatgtcatatcaacatcacata

SEQ ID NO: 1522 - DNA, 80 bp, synthetic construct
  misc_feature 1..80: note = Synthetic: >SARSCoV2-cand-16350-16429
  source 1..80: mol_type = other DNA
aattagtcttgtctgttaatccgtatgtttgcaatgctccaggttgtgatgtcacagatgtgactcaactttacttagga

SEQ ID NO: 1523 - DNA, 80 bp, synthetic construct
  misc_feature 1..80: note = Synthetic: >SARSCoV2-cand-16430-16509
  source 1..80: mol_type = other DNA
ggtatgagctattattgtaaatcacataaaccacccattagttttccattgtgtgctaatggacaagtttttggtttata

SEQ ID NO: 1524 - DNA, 80 bp, synthetic construct
  misc_feature 1..80: note = Synthetic: >SARSCoV2-cand-16510-16589
  source 1..80: mol_type = other DNA
taaaaatacatgtgttggtagcgataatgttactgactttaatgcaattgcaacatgtgactggacaaatgctggtgatt

SEQ ID NO: 1525 - DNA, 80 bp, synthetic construct
  misc_feature 1..80: note = Synthetic: >SARSCoV2-cand-16590-16669
  source 1..80: mol_type = other DNA
acattttagctaacacctgtactgaaagactcaagctttttgcagcagaaacgctcaaagctactgaggagacatttaaa

SEQ ID NO: 1526 - DNA, 80 bp, synthetic construct
  misc_feature 1..80: note = Synthetic: >SARSCoV2-cand-16670-16749
  source 1..80: mol_type = other DNA
ctgtcttatggtattgctactgtacgtgaagtgctgtctgacagagaattacatctttcatgggaagttggtaaacctag

SEQ ID NO: 1527 - DNA, 80 bp, synthetic construct
  misc_feature 1..80: note = Synthetic: >SARSCoV2-cand-16750-16829
  source 1..80: mol_type = other DNA
accaccacttaaccgaaattatgtctttactggttatcgtgtaactaaaaacagtaaagtacaaataggagagtacacct

SEQ ID NO: 1528 - DNA, 80 bp, synthetic construct
  misc_feature 1..80: note = Synthetic: >SARSCoV2-cand-16830-16909
  source 1..80: mol_type = other DNA
ttgaaaaaggtgactatggtgatgctgttgtttaccgaggtacaacaacttacaaattaaatgttggtgattattttgtg

SEQ ID NO: 1529 - DNA, 80 bp, synthetic construct
  misc_feature 1..80: note = Synthetic: >SARSCoV2-cand-16910-16989
  source 1..80: mol_type = other DNA
ctgacatcacatacagtaatgccattaagtgcacctacactagtgccacaagagcactatgttagaattactggcttata

SEQ ID NO: 1530 - DNA, 80 bp, synthetic construct
  misc_feature 1..80: note = Synthetic: >SARSCoV2-cand-16990-17069
  source 1..80: mol_type = other DNA
cccaacactcaatatctcagatgagttttctagcaatgttgcaaattatcaaaaggttggtatgcaaaagtattctacac

SEQ ID NO: 1531 - DNA, 80 bp, synthetic construct
  misc_feature 1..80: note = Synthetic: >SARSCoV2-cand-17070-17149
  source 1..80: mol_type = other DNA
tccagggaccacctggtactggtaagagtcattttgctattggcctagctctctactacccttctgctcgcatagtgtat

SEQ ID NO: 1532 - DNA, 80 bp, synthetic construct
  misc_feature 1..80: note = Synthetic: >SARSCoV2-cand-17150-17229
  source 1..80: mol_type = other DNA
acagcttgctctcatgccgctgttgatgcactatgtgagaaggcattaaaatatttgcctatagataaatgtagtagaat

SEQ ID NO: 1533 - DNA, 80 bp, synthetic construct
  misc_feature 1..80: note = Synthetic: >SARSCoV2-cand-17230-17309
  source 1..80: mol_type = other DNA
tatacctgcacgtgctcgtgtagagtgttttgataaattcaaagtgaattcaacattagaacagtatgtcttttgtactg

SEQ ID NO: 1534 - DNA, 80 bp, synthetic construct
  misc_feature 1..80: note = Synthetic: >SARSCoV2-cand-17310-17389
  source 1..80: mol_type = other DNA
taaatgcattgcctgagacgacagcagatatagttgtctttgatgaaatttcaatggccacaaattatgatttgagtgtt

SEQ ID NO: 1535 - DNA, 80 bp, synthetic construct
  misc_feature 1..80: note = Synthetic: >SARSCoV2-cand-21240-21319
  source 1..80: mol_type = other DNA
atgtgaatgcgtcatcatctgaagcatttttaattggatgtaattatcttggcaaaccacgcgaacaaatagatggttat

SEQ ID NO: 1536 - DNA, 80 bp, synthetic construct
  misc_feature 1..80: note = Synthetic: >SARSCoV2-cand-21320-21399
  source 1..80: mol_type = other DNA
gtcatgcatgcaaattacatattttggaggaatacaaatccaattcagttgtcttcctattctttatttgacatgagtaa

SEQ ID NO: 1537 - DNA, 80 bp, synthetic construct
  misc_feature 1..80: note = Synthetic: >SARSCoV2-cand-21400-21479
  source 1..80: mol_type = other DNA
atttccccttaaattaaggggtactgctgttatgtctttaaaagaaggtcaaatcaatgatatgattttatctcttctta

SEQ ID NO: 1538 - DNA, 80 bp, synthetic construct
  misc_feature 1..80: note = Synthetic: >SARSCoV2-cand-21480-21559
  source 1..80: mol_type = other DNA
gtaaaggtagacttataattagagaaaacaacagagttgttatttctagtgatgttcttgttaacaactaaacgaacaat

SEQ ID NO: 1539 - DNA, 80 bp, synthetic construct
  misc_feature 1..80: note = Synthetic: >SARSCoV2-cand-21560-21639
  source 1..80: mol_type = other DNA
gtttgtttttcttgttttattgccactagtctctagtcagtgtgttaatcttacaaccagaactcaattaccccctgcat

SEQ ID NO: 1540 - DNA, 80 bp, synthetic construct
  misc_feature 1..80: note = Synthetic: >SARSCoV2-cand-21640-21719
  source 1..80: mol_type = other DNA
acactaattctttcacacgtggtgtttattaccctgacaaagttttcagatcctcagttttacattcaactcaggacttg

SEQ ID NO: 1541 - DNA, 80 bp, synthetic construct
  misc_feature 1..80: note = Synthetic: >SARSCoV2-cand-21720-21799
  source 1..80: mol_type = other DNA
ttcttacctttcttttccaatgttacttggttccatgctatacatgtctctgggaccaatggtactaagaggtttgataa

SEQ ID NO: 1542 - DNA, 80 bp, synthetic construct
  misc_feature 1..80: note = Synthetic: >SARSCoV2-cand-21800-21879
  source 1..80: mol_type = other DNA
ccctgtcctaccatttaatgatggtgtttattttgcttccactgagaagtctaacataataagaggctggatttttggta

SEQ ID NO: 1543 - DNA, 80 bp, synthetic construct
  misc_feature 1..80: note = Synthetic: >SARSCoV2-cand-21880-21959
  source 1..80: mol_type = other DNA
ctactttagattcgaagacccagtccctacttattgttaataacgctactaatgttgttattaaagtctgtgaatttcaa

SEQ ID NO: 1544 - DNA, 80 bp, synthetic construct
  misc_feature 1..80: note = Synthetic: >SARSCoV2-cand-21960-22039
  source 1..80: mol_type = other DNA
ttttgtaatgatccatttttgggtgtttattaccacaaaaacaacaaaagttggatggaaagtgagttcagagtttattc

SEQ ID NO: 1545 - DNA, 80 bp, synthetic construct
  misc_feature 1..80: note = Synthetic: >SARSCoV2-cand-22040-22119
  source 1..80: mol_type = other DNA
tagtgcgaataattgcacttttgaatatgtctctcagccttttcttatggaccttgaaggaaaacagggtaatttcaaaa

SEQ ID NO: 1546 - DNA, 80 bp, synthetic construct
  misc_feature 1..80: note = Synthetic: >SARSCoV2-cand-22120-22199
  source 1..80: mol_type = other DNA
atcttagggaatttgtgtttaagaatattgatggttattttaaaatatattctaagcacacgcctattaatttagtgcgt

SEQ ID NO: 1547 - DNA, 80 bp, synthetic construct
  misc_feature 1..80: note = Synthetic: >SARSCoV2-cand-22200-22279
  source 1..80: mol_type = other DNA
gatctccctcagggtttttcggctttagaaccattggtagatttgccaataggtattaacatcactaggtttcaaacttt

SEQ ID NO: 1548 - DNA, 80 bp, synthetic construct
  misc_feature 1..80: note = Synthetic: >SARSCoV2-cand-22280-22359
  source 1..80: mol_type = other DNA
acttgctttacatagaagttatttgactcctggtgattcttcttcaggttggacagctggtgctgcagcttattatgtgg

SEQ ID NO: 1549 - DNA, 80 bp, synthetic construct
  misc_feature 1..80: note = Synthetic: >SARSCoV2-cand-22360-22439
  source 1..80: mol_type = other DNA
gttatcttcaacctaggacttttctattaaaatataatgaaaatggaaccattacagatgctgtagactgtgcacttgac

SEQ ID NO: 1550 - DNA, 80 bp, synthetic construct
  misc_feature 1..80: note = Synthetic: >SARSCoV2-cand-22440-22519
  source 1..80: mol_type = other DNA
cctctctcagaaacaaagtgtacgttgaaatccttcactgtagaaaaaggaatctatcaaacttctaactttagagtcca

SEQ ID NO: 1551 - DNA, 80 bp, synthetic construct
  misc_feature 1..80: note = Synthetic: >Alpha2-cand-25130-25209
  source 1..80: mol_type = other DNA
agcaattagaggctttgttcaattagatcttaatgttgtaaggtccatagaacttcttaacggtgattttatttacatat

SEQ ID NO: 1552 - DNA, 80 bp, synthetic construct
  misc_feature 1..80: note = Synthetic: >MinkCoV1-cand-25190-25269
  source 1..80: mol_type = other DNA
agttaaaatagcaattagaggctttgttcaattagatcttaatgttgtaaggtctatagaacttcttaacggtgatttta

SEQ ID NO: 1553 - DNA, 80 bp, synthetic construct
  misc_feature 1..80: note = Synthetic: >BtSk_AlphaCoV-cand-11670-11749
  source 1..80: mol_type = other DNA
aatcatattctaaaatacaacgtgacggttgtgtgcattatgccggtgttatctggtctgtcgttgacattaaagataac

SEQ ID NO: 1554 - DNA, 80 bp, synthetic construct
  misc_feature 1..80: note = Synthetic: >Sb512-cand-11710-11789
  source 1..80: mol_type = other DNA
attgaatcatattctaaaatacaacgtgaaggttgtgtgcattatgccggtgttatctggtctgtcgttgacattaaaga

SEQ ID NO: 1555 - DNA, 80 bp, synthetic construct
  misc_feature 1..80: note = Synthetic: >Sk512R-cand-11700-11779
  source 1..80: mol_type = other DNA
gatattgaatcatattctaaaatacaacgtgaaggttgtgtgcattatgccggtgttatctggtctgtcgttgacattaa

SEQ ID NO: 1556 - DNA, 80 bp, synthetic construct
  misc_feature 1..80: note = Synthetic: >SARSCoV-cand-790-869
  source 1..80: mol_type = other DNA
caatggaggtgcagtcactcgctatgtcgacaacaatttctgtggcccagatgggtaccctcttgattgcatcaaagatt

SEQ ID NO: 1557 - DNA, 80 bp, synthetic construct
  misc_feature 1..80: note = Synthetic: >WIV16-cand-800-879
  source 1..80: mol_type = other DNA
gcagttactcgctatgtcgacaacaacttctgtggcccagatgggtaccctcttgattgcatcaaagattttctcgctcg

SEQ ID NO: 1558 - DNA, 80 bp, synthetic construct
  misc_feature 1..80: note = Synthetic: >BtRl_BetaCoV-cand-800-879
  source 1..80: mol_type = other DNA
ttactcgctatgtcgacaacaacttctgtggcccagatgggtaccctcttgaatgcattaaagatctgctcgctcgtgcg

SEQ ID NO: 1559 - DNA, 80 bp, synthetic construct
  misc_feature 1..80: note = Synthetic: >BatCoV1A-cand-25500-25579
  source 1..80: mol_type = other DNA
acctttttactagtttctttgtggtgtattttgcattatttaaagcaaacacctatagaagcaattttgtgtgtttcatt

SEQ ID NO: 1560 - DNA, 80 bp, synthetic construct
  misc_feature 1..80: note = Synthetic: >MsbCoV1-cand-25320-25399
  source 1..80: mol_type = other DNA
gggctacctttttactagtttctttgtggtgtattttgcattatttaaagcaaacacctatagaagcaatattgtgtgtc

SEQ ID NO: 1561 - DNA, 80 bp, synthetic construct
  misc_feature 1..80: note = Synthetic: >MbCoV1-cand-25330-25409
  source 1..80: mol_type = other DNA
ctacctttttactagtttctttgtggtgtattttgcattatttaaagcaaacacctatagaagcaatattgtgtgtcttg

SEQ ID NO: 1562 - DNA, 80 bp, synthetic construct
  misc_feature 1..80: note = Synthetic: >BtSk_AlphaCoV-cand-13410-13489
  source 1..80: mol_type = other DNA
caataaatattttaaacattggggacaaacttaccaccccaattgtgaagattgtcacgatgaaagttgcattgttcatt

SEQ ID NO: 1563 - DNA, 80 bp, synthetic construct
  misc_feature 1..80: note = Synthetic: >Sb512-cand-13460-13539
  source 1..80: mol_type = other DNA
atattttaaacattgggggcaaacttaccaccccaattgtgaagattgtcacgatgaaagttgcattgttcattgtgcca

SEQ ID NO: 1564 - DNA, 80 bp, synthetic construct
  misc_feature 1..80: note = Synthetic: >Sk512R-cand-13440-13519
  source 1..80: mol_type = other DNA
atcttttcaataaatattttaaacattgggggcaaacttaccaccccaattgtgaagattgtcacgatgaaagttgcatt

SEQ ID NO: 1565 - DNA, 80 bp, synthetic construct
  misc_feature 1..80: note = Synthetic: >WIV16-cand-14830-14909
  source 1..80: mol_type = other DNA
aatgccaaccaagtaatcgttaacaatctggacaaatcagctggtttcccatttaataaatggggtaaggctagacttta

SEQ ID NO: 1566 - DNA, 80 bp, synthetic construct
  misc_feature 1..80: note = Synthetic: >SARSCoV-cand-14840-14919
  source 1..80: mol_type = other DNA
atgccaaccaagtaatcgttaacaatctggataaatcagctggtttcccatttaataaatggggtaaggctagactttat

SEQ ID NO: 1567 - DNA, 80 bp, synthetic construct
  misc_feature 1..80: note = Synthetic: >AlphaSp-cand-8520-8599
  source 1..80: mol_type = other DNA
tgaatgcatcgactcccaagctggtgtttgtttgggtcttgatcgcttctttgtctacagtaaaacacctggtagtgact

SEQ ID NO: 1568 - DNA, 80 bp, synthetic construct
  misc_feature 1..80: note = Synthetic: >SEAC-cand-14260-14339
  source 1..80: mol_type = other DNA
atcctaaatgtgatagagctatgcctagtatgatacgaatgcttgctgctatggttctcggttcaaagcatgttacatgt

SEQ ID NO: 1569 - DNA, 80 bp, synthetic construct
  misc_feature 1..80: note = Synthetic: >HKU2R-cand-14090-14169
  source 1..80: mol_type = other DNA
ggattatcctaaatgtgatagagctatgcctagtatgatacgcatgcttgctgctatggttcttggttcaaagcatgtta

SEQ ID NO: 1570 - DNA, 80 bp, synthetic construct
  misc_feature 1..80: note = Synthetic: >AlphaMink-cand-12550-12629
  source 1..80: mol_type = other DNA
acatgtttttggtaatgtttgtagacgtgatttgactaagtatacaatgatggatctttgttatgcactgcgcaattttg

SEQ ID NO: 1571 - DNA, 80 bp, synthetic construct
  misc_feature 1..80: note = Synthetic: >Alpha2-cand-12540-12619
  source 1..80: mol_type = other DNA
catgtctttggtaatgtttgtagacgtgatttgactaagtatacaatgatggatctttgttatgcactgcgcaattttga

SEQ ID NO: 1572 - DNA, 80 bp, synthetic construct
  misc_feature 1..80: note = Synthetic: >MinkCoV1-cand-12570-12649
  source 1..80: mol_type = other DNA
ggtagacatgtctttggtaatgtttgtagacgcaatttgactaagtatacaatgatggatctttgttatgcactgcgcaa

SEQ ID NO: 1573 - DNA, 80 bp, synthetic construct
  misc_feature 1..80: note = Synthetic: >SARSCoV2-cand-25090-25169
  source 1..80: mol_type = other DNA
acattcaaaaagaaattgaccgcctcaatgaggttgccaagaatttaaatgaatctctcatcgatctccaagaacttgga

SEQ ID NO: 1574 - DNA, 80 bp, synthetic construct
  misc_feature 1..80: note = Synthetic: >SARSCoV-cand-25010-25089
  source 1..80: mol_type = other DNA
cgtcaacattcaaaaagaaattgaccgcctcaatgaggtcgctaaaaatttaaatgaatcactcattgaccttcaagaat

SEQ ID NO: 1575 - DNA, 80 bp, synthetic construct
  misc_feature 1..80: note = Synthetic: >WIV16-cand-24970-25049
  source 1..80: mol_type = other DNA
caaaaagaaattgaccgcctcaatgaggtcgctaaaaatttaaatgaatcactcattgaccttcaagaattgggaaaata

SEQ ID NO: 1576 - DNA, 80 bp, synthetic construct
  misc_feature 1..80: note = Synthetic: >BetaSp-cand-17330-17409
  source 1..80: mol_type = other DNA
atacaagtataaaatttcctagtgtttatagtgtgcctgaaacctttcaaggcaatgtggtgaattatcagcacattggt

SEQ ID NO: 1577 - DNA, 80 bp, synthetic construct
  misc_feature 1..80: note = Synthetic: >BetaCoV1-cand-17220-17299
  source 1..80: mol_type = other DNA
gtataaaatttcctagtgtttatagtgtgcctgaaacctttcaaggcaatgtggtgaattatcagcacattggtatgaaa

SEQ ID NO: 1578 - DNA, 80 bp, synthetic construct
  misc_feature 1..80: note = Synthetic: >HKU24-cand-16980-17059
  source 1..80: mol_type = other DNA
agtataaaatttcctagtgtttatagtgtgcctgaaacttttcaaggcaatgtggtgaattatcagcacattggtatgaa

SEQ ID NO: 1579 - DNA, 80 bp, synthetic construct
  misc_feature 1..80: note = Synthetic: >AlphaSp-cand-490-569
  source 1..80: mol_type = other DNA
caaatcttcgaggttggttacttttctcaaattgcaactacttcttagaagagttggatttgatttttggcaggtgtggt

SEQ ID NO: 1580 - DNA, 80 bp, synthetic construct
  misc_feature 1..80: note = Synthetic: >BtSk_AlphaCoV-cand-500-579
  source 1..80: mol_type = other DNA
cgaggttggttacttttctcaaattgcaactacttcttagaagagttggatttggtttttggcaggtgtggtggtactac

SEQ ID NO: 1581 - DNA, 80 bp, synthetic construct
  misc_feature 1..80: note = Synthetic: >Sk512R-cand-530-609
  source 1..80: mol_type = other DNA
gaatcttcgaggttggttacttttctcaaattgcaactacttcttagaagagttggatttggtttttggcaggtgtggtg

SEQ ID NO: 1582 - DNA, 80 bp, synthetic construct
  misc_feature 1..80: note = Synthetic: >HKU24-cand-15460-15539
  source 1..80: mol_type = other DNA
tttatgttaagccaggtggcactagtagtggggatgcaaccactgcctttgctaattctgtgtttaacatatgtcaagct

SEQ ID NO: 1583 - DNA, 80 bp, synthetic construct
  misc_feature 1..80: note = Synthetic: >BetaCoV1-cand-15700-15779
  source 1..80: mol_type = other DNA
ttatgttaagccaggtggcactagtagtggggatgcaaccactgcttttgctaattctgtgtttaacatatgtcaagctg

SEQ ID NO: 1584 - DNA, 80 bp, synthetic construct
  misc_feature 1..80: note = Synthetic: >BetaSp-cand-15810-15889
  source 1..80: mol_type = other DNA
ctgtttttatgttaagccaggtggcactagtagtggggatgcaaccactgcttttgctaattctgtgtttaacatatgtc

SEQ ID NO: 1585 - DNA, 80 bp, synthetic construct
  misc_feature 1..80: note = Synthetic: >MbCoV1-cand-26530-26609
  source 1..80: mol_type = other DNA
tctgtttttggaaagacagtcgctattccagtactggtacctccgacaggcattacgttgacagttcttagtggaaagct

SEQ ID NO: 1586 - DNA, 80 bp, synthetic construct
  misc_feature 1..80: note = Synthetic: >MsbCoV1-cand-26520-26599
  source 1..80: mol_type = other DNA
atctctgtttttggaaagacagtcgctattccagtactggtacctcctacaggcattacgttgacagttcttagtggaaa

SEQ ID NO: 1587 - DNA, 80 bp, synthetic construct
  misc_feature 1..80: note = Synthetic: >BatCoV1A-cand-26700-26779
  source 1..80: mol_type = other DNA
tgtttttggaaagacagtcgctattcctgtactgacacctccgactggcattacgttgacagttcttagtggaaagctcc

SEQ ID NO: 1588 - DNA, 80 bp, synthetic construct
  misc_feature 1..80: note = Synthetic: >BetaCoV1-cand-30660-30739
  source 1..80: mol_type = other DNA
ccagcagagcgtctagtgtcggtggcagcagaagcagaaacaactcagcttctagaaataatacctctgaagtgacacct

SEQ ID NO: 1589 - DNA, 80 bp, synthetic construct
  misc_feature 1..80: note = Synthetic: >BetaSp-cand-30780-30859
  source 1..80: mol_type = other DNA
cagagcgtctagtgtcggtggcagcagaagcagaaacaactcagcttctagaaataatacctctgaagtgacacctgata

SEQ ID NO: 1590 - DNA, 80 bp, synthetic construct
  misc_feature 1..80: note = Synthetic: >HKU24-cand-30200-30279
  source 1..80: mol_type = other DNA
ctcgtgcatccagcagagcatctagtgtcggcggaagcagaagcagaaacaactcagcttctagaaataatacctctgaa

SEQ ID NO: 1591 - DNA, 80 bp, synthetic construct
  misc_feature 1..80: note = Synthetic: >SARSCoV-cand-27100-27179
  source 1..80: mol_type = other DNA
agtacagtaagtgacaacagatgtttcatcttgttgacttccaggttacaatagcagagatattgattatcattatgagg

SEQ ID NO: 1592 - DNA, 80 bp, synthetic construct
  misc_feature 1..80: note = Synthetic: >BtRl_BetaCoV-cand-26970-27049
  source 1..80: mol_type = other DNA
tagtacagtaagtgacaacagatgtttcatcttgttgacttccaggttacaatagcagagatattgattatcattatgag

SEQ ID NO: 1593 - DNA, 80 bp, synthetic construct
  misc_feature 1..80: note = Synthetic: >SARSRC-cand-26980-27059
  source 1..80: mol_type = other DNA
gctttgctagtacagtaagtgacaacagatgtttcatctcgttgactttcaggttacaatagcagagatattgattatca

SEQ ID NO: 1594 - DNA, 80 bp, synthetic construct
  misc_feature 1..80: note = Synthetic: >SEAC-cand-14020-14099
  source 1..80: mol_type = other DNA
tgacacagcttaatctcaagtattctattagtggtaaagcacgtgcccgaactgttggcggtgtttcacttttagcgact

SEQ ID NO: 1595 - DNA, 80 bp, synthetic construct
  misc_feature 1..80: note = Synthetic: >HKU2R-cand-13860-13939
  source 1..80: mol_type = other DNA
cagcttaatctcaagtattctattagtggtaaagcacgtgcccgaactgttggcggtgtttcacttttagcgactatgac

SEQ ID NO: 1596 - DNA, 80 bp, synthetic construct
  misc_feature 1..80: note = Synthetic: >Sb512-cand-8040-8119
  source 1..80: mol_type = other DNA
agtctttgaaaaacccctagattgtgtgcataacgcttttgtcaactttaatgaatggcacaatgctaaatttggtagta

SEQ ID NO: 1597 - DNA, 80 bp, synthetic construct
  misc_feature 1..80: note = Synthetic: >HKU5R-cand-15270-15349
  source 1..80: mol_type = other DNA
agcgaaatgttcttccgacgataacgcagatgaatttgaaatatgctattagtgctaagaatagagctcggactgttgcc

SEQ ID NO: 1598 - DNA, 80 bp, synthetic construct
  misc_feature 1..80: note = Synthetic: >HKU5R-cand-6080-6159
  source 1..80: mol_type = other DNA
acatgacggtaccattggcagtgatgctattagttcttcttttaataatctattaggctttgataattctaagcctgtgt

SEQ ID NO: 1599 - DNA, 80 bp, synthetic construct
  misc_feature 1..80: note = Synthetic: >HKU5-cand-6080-6159
  source 1..80: mol_type = other DNA
cggacatgacggtaccattggcagtgatgctattagttcttctttcaataacctattaggctttgataattctaagccag

SEQ ID NO: 1600 - DNA, 80 bp, synthetic construct
  misc_feature 1..80: note = Synthetic: >BetaSp-cand-25260-25339
  source 1..80: mol_type = other DNA
tgagtagtctcctcagcaaggtgagggctacttctttttcttgtaataacattgatgcttccaagatatatgatatgtgt

SEQ ID NO: 1601 - DNA, 80 bp, synthetic construct
  misc_feature 1..80: note = Synthetic: >BetaCoV1-cand-25150-25229
  source 1..80: mol_type = other DNA
gtctcctcagcaaggtgagggctacttctttttcttgtaataacattgatgcttccaagatatatgatatgtgttttggt

SEQ ID NO: 1602 - DNA, 80 bp, synthetic construct
  misc_feature 1..80: note = Synthetic: >BetaCoV1-cand-8620-8699
  source 1..80: mol_type = other DNA
tatacaaaatagttgtaaacatgtgcaaggtaacgtggctaaaatggctggtgtttcttgtatatggcatgtagatgtgt

SEQ ID NO: 1603 - DNA, 80 bp, synthetic construct
  misc_feature 1..80: note = Synthetic: >HKU2-cand-24960-25039
  source 1..80: mol_type = other DNA
gttaagatgttaatcatgtggctcctatggcccttagtcattgctctgagcatttttaatgcctatgctgactttggtgt

SEQ ID NO: 1604 - DNA, 80 bp, synthetic construct
  misc_feature 1..80: note = Synthetic: >SEAC-cand-24920-24999
  source 1..80: mol_type = other DNA
agatgttaatcatgtggctcctatggcccttagtcattgctctgagcatttttaatgcctatgctgactttggtgttaat

SEQ ID NO: 1605 - DNA, 80 bp, synthetic construct
  misc_feature 1..80: note = Synthetic: >HKU10-cand-13280-13359
  source 1..80: mol_type = other DNA
ttgggtaaaatagtagcaaatgccatgttaaaatgtgttcgtttaggtgatgccatggttaaacatggtatcgttggtgt

SEQ ID NO: 1606 - DNA, 80 bp, synthetic construct
  misc_feature 1..80: note = Synthetic: >HKU10R-cand-13110-13189
  source 1..80: mol_type = other DNA
actttgggtaaaatagtagcaaatgccatgttaaaatgtgttcgtttaggtgatgccatggttcaacatggtattgtagg

SEQ ID NO: 1607 - DNA, 80 bp, synthetic construct
  misc_feature 1..80: note = Synthetic: >HKU8-cand-8470-8549
  source 1..80: mol_type = other DNA
ttcttactcacattcaattctaacccaatgcatcttaatattcctgctaccagcattgttaataagcgagctgctggtgt

SEQ ID NO: 1608 - DNA, 80 bp, synthetic construct
  misc_feature 1..80: note = Synthetic: >HKU8R-cand-8080-8159
  source 1..80: mol_type = other DNA
cattcttactcacattcaattctaacccaatgcaacttaatattccatccaccagcatcgttaataagcgggctgctggt

SEQ ID NO: 1609 - DNA, 80 bp, synthetic construct
  misc_feature 1..80: note = Synthetic: >HKU2-cand-21440-21519
  source 1..80: mol_type = other DNA
acaccagcgtgattttcaacatttaattttgcctaatggcaagtttaatccatttactgagtgtaatgggttgaacagaa

SEQ ID NO: 1610 - DNA, 80 bp, synthetic construct
  misc_feature 1..80: note = Synthetic: >SEAC-cand-21400-21479
  source 1..80: mol_type = other DNA
ggttaatccagaccagcgtgattttcaacatttaattttgcctaatggcaagtttaatccatttactgagtgtaatgggt

SEQ ID NO: 1611 - DNA, 80 bp, synthetic construct
  misc_feature 1..80: note = Synthetic: >HKU5R-cand-21760-21839
  source 1..80: mol_type = other DNA
tgatgtgctcgttaacttttataggaaaccgcacaagcagtcaaagcgttgatgttggccctgctggttcaggttcgtgt

SEQ ID NO: 1612 - DNA, 80 bp, synthetic construct
  misc_feature 1..80: note = Synthetic: >HKU5-cand-17680-17759
  source 1..80: mol_type = other DNA
agcccagctgcctgcaccacgcaccttgctcactcggggaacattggaaccggaaaatttcaatagtgtaacccgtttaa

SEQ ID NO: 1613 - DNA, 80 bp, synthetic construct
  misc_feature 1..80: note = Synthetic: >HKU5R-cand-18080-18159
  source 1..80: mol_type = other DNA
cagggttctgaatacccatacgtcatcttttgtcaaactgctgacactgctcacgcaaacaacattaacagatttaatgt

SEQ ID NO: 1614 - DNA, 80 bp, synthetic construct
  misc_feature 1..80: note = Synthetic: >HKU5-cand-18080-18159
  source 1..80: mol_type = other DNA
tcacagggttccgaatacccatatgtcatcttttgtcaaactgctgacactgctcacgcaaacaacattaacagatttaa

SEQ ID NO: 1615 - DNA, 80 bp, synthetic construct
  misc_feature 1..80: note = Synthetic: >SEAC-cand-24680-24759
  source 1..80: mol_type = other DNA
accatatacataccagtgtataatgcttaccttgtttacaagtcttatatggaagttgaaccatgccccataattaatgt

SEQ ID NO: 1616 - DNA, 80 bp, synthetic construct
  misc_feature 1..80: note = Synthetic: >HKU2-cand-24720-24799
  source 1..80: mol_type = other DNA
taccatatacataccagtgtataatgcttaccttgtttacaagtcttatatggaagttgaaccatgccccataattaatg

SEQ ID NO: 1617 - DNA, 80 bp, synthetic construct
  misc_feature 1..80: note = Synthetic: >BetaCoV1-cand-25470-25549
  source 1..80: mol_type = other DNA
gataataaatatagtgcgatttattccactatgtgttttaatgtacccaatgattattgtccgtgtgcagaccctaatgt

SEQ ID NO: 1618 - DNA, 80 bp, synthetic construct
  misc_feature 1..80: note = Synthetic: >BetaSp-cand-25580-25659
  source 1..80: mol_type = other DNA
tactcagataataaatatagtgcgatttattccactatgtgttttaatgtacccaatgattattgtccgtgtgcagaccc

SEQ ID NO: 1619 - DNA, 80 bp, synthetic construct
  misc_feature 1..80: note = Synthetic: >HKU17-cand-11680-11759
  source 1..80: mol_type = other DNA
gctgaactatatactactgatgaaacatttggcgttcttgcaaagactgaatttttcaagtttgacaagatacctaatgt

SEQ ID NO: 1620 - DNA, 80 bp, synthetic construct
  misc_feature 1..80: note = Synthetic: >HKU18-cand-11700-11779
  source 1..80: mol_type = other DNA
tcaccactggtgacacatttggtgttcttgccaagactgaatttttcaagtttgacaagatacctaatgtaagtcgccag

SEQ ID NO: 1621 - DNA, 80 bp, synthetic construct
  misc_feature 1..80: note = Synthetic: >BetaCoV1-cand-10940-11019
  source 1..80: mol_type = other DNA
gcttggttgtatgccgcaattcttaacaactgtaattggtttatacaaagtgatatttgttctgttgaagattataatgt

SEQ ID NO: 1622 - DNA, 80 bp, synthetic construct
  misc_feature 1..80: note = Synthetic: >HKU10-cand-17200-17279
  source 1..80: mol_type = other DNA
tgacacacagcatgcttgtaacgttaatcgctttaacgttgctattacacgtgctaagaaaggtattttgtgtataatgt

SEQ ID NO: 1623 - DNA, 80 bp, synthetic construct
  misc_feature 1..80: note = Synthetic: >HKU10R-cand-17030-17109
  source 1..80: mol_type = other DNA
atctgacacacagcatgcatgtaatgttaaccgttttaacgttgctataacacgtgctaagaaaggtattttgtgtataa

SEQ ID NO: 1624 - DNA, 80 bp, synthetic construct
  misc_feature 1..80: note = Synthetic: >HKU5R-cand-18320-18399
  source 1..80: mol_type = other DNA
catcctgcttatgcaccaacctatgttagtgttgatgataagtataagactagtgacgagctttgcgtgaacctgaatgt

SEQ ID NO: 1625 - DNA, 80 bp, synthetic construct
  misc_feature 1..80: note = Synthetic: >HKU5-cand-18320-18399
  source 1..80: mol_type = other DNA
cttcatcctgcttatgcaccaacctatgttagtgttgatgataagtataagactagtgatgagctctgcgtgaacctgaa

SEQ ID NO: 1626 - DNA, 80 bp, synthetic construct
  misc_feature 1..80: note = Synthetic: >WIV16-cand-23600-23679
  source 1..80: mol_type = other DNA
ctacagaagtaatgcctgtttctatggctaaaacctctgtagattgtaatatgtacatctgcggagattctactgaatgt

SEQ ID NO: 1627 - DNA, 80 bp, synthetic construct
  misc_feature 1..80: note = Synthetic: >HKU17-cand-15260-15339
  source 1..80: mol_type = other DNA
ctatcaatgccttacctgacattaagtgtgacattgtagttgtagatgaagtttctatgttgaccaactatgagctttcc

SEQ ID NO: 1628 - DNA, 80 bp, synthetic construct
  misc_feature 1..80: note = Synthetic: >HKU31-cand-16280-16359
  source 1..80: mol_type = other DNA
atttacaatatatagagaaattgtataaagatcttacaggacacatgcttgacacttattctgttatgctatgtggtgat

SEQ ID NO: 1629 - DNA, 80 bp, synthetic construct
  misc_feature 1..80: note = Synthetic: >HghCoV1-cand-16210-16289
  source 1..80: mol_type = other DNA
tatttacaatatatagagaaattgtataaagatcttacaggacacatgcttgacacttattctgttatgctatgtggtga

SEQ ID NO: 1630 - DNA, 80 bp, synthetic construct
  misc_feature 1..80: note = Synthetic: >HKU4-cand-770-849
  source 1..80: mol_type = other DNA
tggaaattttagatgatcttgaggctgaccctactggtaagtactcacagaatcttcttaagaagttgattggtggtgat

SEQ ID NO: 1631 - DNA, 80 bp, synthetic construct
  misc_feature 1..80: note = Synthetic: >HKU4R-cand-760-839
  source 1..80: mol_type = other DNA
cgtggaaattttagatgatcttgaggctgaccctactggtaagtactcacagaatcttcttaagaagttgattggcggtg

SEQ ID NO: 1632 - DNA, 80 bp, synthetic construct
  misc_feature 1..80: note = Synthetic: >HKU4R-cand-3720-3799
  source 1..80: mol_type = other DNA
gctcacgtaagtctaaggttgatttaagtaagtataagcacactgttattaataatagtgtgactttagtattaggtgat

SEQ ID NO: 1633 - DNA, 80 bp, synthetic construct
  misc_feature 1..80: note = Synthetic: >HKU4-cand-3730-3809
  source 1..80: mol_type = other DNA
tcacgtaagtctaaggttgatttaagtaaatataagcatactgttattaataatagtgtgactttagtattaggtgatgc

SEQ ID NO: 1634 - DNA, 80 bp, synthetic construct
  misc_feature 1..80: note = Synthetic: >BtRl_BetaCoV-cand-10920-10999
  source 1..80: mol_type = other DNA
atcactattgattcttgttcaaagtacacagtggtcactgtttttctttgtttacgagaatgctttcttgccatttactc

SEQ ID NO: 1635 - DNA, 80 bp, synthetic construct
  misc_feature 1..80: note = Synthetic: >WIV16-cand-10950-11029
  source 1..80: mol_type = other DNA
tcttgacatcactattgattcttgttcagagtacacagtggtcactgtttttctttgtttacgagaatgctttcttgcca

SEQ ID NO: 1636 - DNA, 80 bp, synthetic construct
  misc_feature 1..80: note = Synthetic: >HKU2-cand-15470-15549
  source 1..80: mol_type = other DNA
gtaacatttttggcctttataaaaactccgcagttgggtccttagatgttgaagtttttaataaacttgctatgtctgat

SEQ ID NO: 1637 - DNA, 80 bp, synthetic construct
  misc_feature 1..80: note = Synthetic: >SEAC-cand-15450-15529
  source 1..80: mol_type = other DNA
tgtgctaatggtaacatttttggcctttataaaaactccgcagttgggtccttagatgttgaagtttttaataaacttgc

SEQ ID NO: 1638 - DNA, 80 bp, synthetic construct
  misc_feature 1..80: note = Synthetic: >HKU2-cand-23200-23279
  source 1..80: mol_type = other DNA
ttttgcggtcagggactacatgtactgtcacttatgcaaaatgcacctagtggtataatgtttttccactattcgctgat

SEQ ID NO: 1639 - DNA, 80 bp, synthetic construct
  misc_feature 1..80: note = Synthetic: >SEAC-cand-23160-23239
  source 1..80: mol_type = other DNA
tttgcggtcagggactacatgtactgtcacttatgcaaaatgcacctagtggtataatgtttttccactattcgctgata

SEQ ID NO: 1640 - DNA, 80 bp, synthetic construct
  misc_feature 1..80: note = Synthetic: >Quail-cand-400-479
  source 1..80: mol_type = other DNA
tctgatctgtggtgtattgtgttgcgcaagtgtgacacccataggaacgtggaatcctattctgcggctccgtgcctgat

SEQ ID NO: 1641 - DNA, 80 bp, synthetic construct
  misc_feature 1..80: note = Synthetic: >Sparrow-cand-430-509
  source 1..80: mol_type = other DNA
ctgatctgtggtgtattgtgttgcgcaagtgtgacacccataggagcgtggaatcctattctgcggctccgtgcctgata

SEQ ID NO: 1642 - DNA, 80 bp, synthetic construct
  misc_feature 1..80: note = Synthetic: >SARSRC-cand-12590-12669
  source 1..80: mol_type = other DNA
tacagaataatgaactgagtccagtagcactacgacagatgtcttgtgcagctggtactacacaaacagcttgtactgat

SEQ ID NO: 1643 - DNA, 80 bp, synthetic construct
  misc_feature 1..80: note = Synthetic: >Quail-cand-24110-24189
  source 1..80: mol_type = other DNA
gaaaaccatggctattggctgcgttacaccagacaaaagccaggtggtgctcaaattcctccatcctatgccttctatta

SEQ ID NO: 1644 - DNA, 80 bp, synthetic construct
  misc_feature 1..80: note = Synthetic: >MbCoV1-cand-18820-18899
  source 1..80: mol_type = other DNA
ttctttgtatgtaaacaatcacgcttttcatacaccagcatttgacaaacgtgcttttgccaaactcaaacaagcaccat

SEQ ID NO: 1645 - DNA, 80 bp, synthetic construct
  misc_feature 1..80: note = Synthetic: >MsbCoV1-cand-18800-18879
  source 1..80: mol_type = other DNA
ttaatggtggttctttgtatgtaaacaatcatgcttttcatacaccagcatttgacaaacgtgcttttgccaaactcaaa

SEQ ID NO: 1646 - DNA, 80 bp, synthetic construct
  misc_feature 1..80: note = Synthetic: >BetaSp-cand-26860-26939
  source 1..80: mol_type = other DNA
atggtgtcacactcagcagtaggcttaaggatggcatcagtttcaatcaagacgacatcaacttttcttctgttatgggc

SEQ ID NO: 1647 - DNA, 80 bp, synthetic construct
  misc_feature 1..80: note = Synthetic: >BetaCoV1-cand-26750-26829
  source 1..80: mol_type = other DNA
tcacactcagcagtaggcttaaggatggcatcagtttcaatcaagacgacatcaacttttcttctgttatgggctgtgtg

SEQ ID NO: 1648 - DNA, 80 bp, synthetic construct
  misc_feature 1..80: note = Synthetic: >BtSk_AlphaCoV-cand-180-259
  source 1..80: mol_type = other DNA
cagttttgtctgcaggttgtgtggaaagtctgttccgtcagacttgaaaccgataactgttagctatggcaagcaaccat

SEQ ID NO: 1649 - DNA, 80 bp, synthetic construct
  misc_feature 1..80: note = Synthetic: >AlphaSp-cand-170-249
  source 1..80: mol_type = other DNA
ccttcctgcagttttgtctgcaggttgtgtggaaagtctgttccgtcagacttgaaaccggtaactgttagctatggcaa

SEQ ID NO: 1650 - DNA, 80 bp, synthetic construct
  misc_feature 1..80: note = Synthetic: >BetaSp-cand-27980-28059
  source 1..80: mol_type = other DNA
atggtttaaaaaccaaagttcagtggcacctgatctgtcgctggatcttgaaagaattaatgttaccttcttggacctcc

SEQ ID NO: 1651 - DNA, 80 bp, synthetic construct
  misc_feature 1..80: note = Synthetic: >BetaCoV1-cand-27870-27949
  source 1..80: mol_type = other DNA
taaaaaccaaagttcagtggcacctgatctgtcgctggatcttgaaagaattaatgttaccttcttggacctccaagaag

SEQ ID NO: 1652 - DNA, 80 bp, synthetic construct
  misc_feature 1..80: note = Synthetic: >BetaSp-cand-24700-24779
  source 1..80: mol_type = other DNA
gggtaatggaagacctagtctatggcatgcatctacaggcattgatcaacttccttgtctatatcagcgcaattttacat

SEQ ID NO: 1653 - DNA, 80 bp, synthetic construct
  misc_feature 1..80: note = Synthetic: >BetaCoV1-cand-24590-24669
  source 1..80: mol_type = other DNA
tggaagacctagtctatggcatgcatctacaggcattgatcaacttccttgtctatatcagcgcaattttacatataatg

SEQ ID NO: 1654 - DNA, 80 bp, synthetic construct
  misc_feature 1..80: note = Synthetic: >BatCoV1A-cand-9540-9619
  source 1..80: mol_type = other DNA
gcttactggtctgttgccatctgtcttgaagcttaagatttccactaatttgtttgaaggtgacaagtttgttggtacat

SEQ ID NO: 1655 - DNA, 80 bp, synthetic construct
  misc_feature 1..80: note = Synthetic: >MbCoV1-cand-9370-9449
  source 1..80: mol_type = other DNA
tgcttactggtcttttgccatctgtcttaaaacttaaaatttctaccaatttgtttgaaggtgacaagtttgttggtaca

SEQ ID NO: 1656 - DNA, 80 bp, synthetic construct
  misc_feature 1..80: note = Synthetic: >MbCoV1-cand-18740-18819
  source 1..80: mol_type = other DNA
atgtaccctgaattctctgttgtttgtagatttgatacccgttgtaaatccacatttaacttggaaggtgttaatggcgg

SEQ ID NO: 1657 - DNA, 80 bp, synthetic construct
  misc_feature 1..80: note = Synthetic: >MsbCoV1-cand-18720-18799
  source 1..80: mol_type = other DNA
taatgtcgacatgtaccctgaattctctgttgtttgtagatttgatacccgttgtaaatccacatttaacttggaaggtg

SEQ ID NO: 1658 - DNA, 80 bp, synthetic construct
  misc_feature 1..80: note = Synthetic: >SARSCoV-cand-14360-14439
  source 1..80: mol_type = other DNA
tagtaagaaaaatatttgtagatggtgttccttttgttgtttcaactggataccattttcgtgagttaggagtcgtacat

SEQ ID NO: 1659 - DNA, 80 bp, synthetic construct
  misc_feature 1..80: note = Synthetic: >AlphaSp-cand-7150-7229
  source 1..80: mol_type = other DNA
gtggaatttagtaacggtttttactacctttatagtggctctacattttggaagtataattttgatattacagagggtaa

SEQ ID NO: 1660 - DNA, 80 bp, synthetic construct
  misc_feature 1..80: note = Synthetic: >229ER-cand-19040-19119
  source 1..80: mol_type = other DNA
tctctgccactgctgtgaagacaggtggtaagagtttgccggctattaaattgaattttggaatgcttaatggtaatgcc

SEQ ID NO: 1661 - DNA, 80 bp, synthetic construct
  misc_feature 1..80: note = Synthetic: >229E-cand-19060-19139
  source 1..80: mol_type = other DNA
tactgctgtgaaagcaggtggtaaaagtttgccggctattaaattgaattttggaatgcttaatggtaatgccattgcta

SEQ ID NO: 1662 - DNA, 80 bp, synthetic construct
  misc_feature 1..80: note = Synthetic: >Alpha2-cand-7170-7249
  source 1..80: mol_type = other DNA
ggctaacgctaaggctgttaatcatagtgtcttaagcaaagagaatgtacctattgtgtggtctgcaacagattttgtaa

SEQ ID NO: 1663 - DNA, 80 bp, synthetic construct
  misc_feature 1..80: note = Synthetic: >AlphaMink-cand-7180-7259
  source 1..80: mol_type = other DNA
gggctaatgctaaagctattaatcatagtgtcttaagtaaggagaatgtacctattgtgtggtctgcaacagattttgta

SEQ ID NO: 1664 - DNA, 80 bp, synthetic construct
  misc_feature 1..80: note = Synthetic: >Lucheng19-cand-10080-10159
  source 1..80: mol_type = other DNA
ggctagtaaaacaggtgttagtgtggaacagattttagccgccattataacgtatgctaaaggctttggtcatagaacaa

SEQ ID NO: 1665 - DNA, 80 bp, synthetic construct
  misc_feature 1..80: note = Synthetic: >AcCoV_JC34-cand-9730-9809
  source 1..80: mol_type = other DNA
tagtggctagtaaaacaggtgttagtgtggaacagattttagccgccattataacttattctaagggctttggtcataga

SEQ ID NO: 1666 - DNA, 80 bp, synthetic construct
  misc_feature 1..80: note = Synthetic: >BetaCoV1-cand-7180-7259
  source 1..80: mol_type = other DNA
tttttatagttgccacaatattccttctttggtttagtgtaatttttgcaaatgtaatttttagtgatttatatctgccc

SEQ ID NO: 1667 - DNA, 80 bp, synthetic construct
  misc_feature 1..80: note = Synthetic: >BetaSp-cand-7300-7379
  source 1..80: mol_type = other DNA
tatagttgccacaatattccttctttggtttagtgtaatttttgcaaatgtaatttttagtgatttatatctgcccaata

SEQ ID NO: 1668 - DNA, 80 bp, synthetic construct
  misc_feature 1..80: note = Synthetic: >HKU5R-cand-7920-7999
  source 1..80: mol_type = other DNA
gtggagtcagttacggttaaagattcagttgtccaactgcattatagtagagagggtgcctcatgctatgagcgttaccc

SEQ ID NO: 1669 - DNA, 80 bp, synthetic construct
  misc_feature 1..80: note = Synthetic: >HKU5-cand-7920-7999
  source 1..80: mol_type = other DNA
tatgtggagtcagttacggttaaagattcagttgtccaactgcattacagtagagagggtgcctcatgctatgagcgtta

SEQ ID NO: 1670 - DNA, 80 bp, synthetic construct
  misc_feature 1..80: note = Synthetic: >Sparrow-cand-12020-12099
  source 1..80: mol_type = other DNA
tggtcttgttggcatattaacacccgacaatcaagatctcctgggtcaaatttatgactttggtgattttattattaccc

SEQ ID NO: 1671 - DNA, 80 bp, synthetic construct
  misc_feature 1..80: note = Synthetic: >HKU17-cand-12000-12079
  source 1..80: mol_type = other DNA
tattgacgctggtcttgttggcatattaacacccgacaatcaggatctccttggtcaaatttatgactttggtgatttta

SEQ ID NO: 1672 - DNA, 80 bp, synthetic construct
  misc_feature 1..80: note = Synthetic: >HKU5-cand-560-639
  source 1..80: mol_type = other DNA
gggtacctattcggacccattcatggttaaccagcttgcttaccaaaatgcagcaggagaaggtgtcattggcacaaccc

SEQ ID NO: 1673 - DNA, 80 bp, synthetic construct
  misc_feature 1..80: note = Synthetic: >HKU5R-cand-570-649
  source 1..80: mol_type = other DNA
tcggacccattcatggttaaccagcttgcttaccaaaatgcagcaggagaaggtgtcattggcacaaccctgcagggtaa

SEQ ID NO: 1674 - DNA, 80 bp, synthetic construct
  misc_feature 1..80: note = Synthetic: >HKU5-cand-13520-13599
  source 1..80: mol_type = other DNA
tgtttgtaaatttaagggtaagtttgtacaggttccactacacattcgtgatcctgttggattctgtctacaaaacaccc

SEQ ID NO: 1675 - DNA, 80 bp, synthetic construct
  misc_feature 1..80: note = Synthetic: >MN517817-cand-560-639
  source 1..80: mol_type = other DNA
accagaggagtgtcattcttgttgccaaagacattcccgaccaacttcgtgacgctttgttcttttatacgtcacacaat

SEQ ID NO: 1676 - DNA, 80 bp, synthetic construct
  misc_feature 1..80: note = Synthetic: >MN531554-cand-400-479
  source 1..80: mol_type = other DNA
gttgggctacgttctcccataaggtcggctatacgacgtttgtagggggtagtgccaaacaacccctgaggtgacaggtt

SEQ ID NO: 1677 - DNA, 80 bp, synthetic construct
  misc_feature 1..80: note = Synthetic: >MN531555-cand-160-239
  source 1..80: mol_type = other DNA
agattctattgttgttagtatcactgcttgttttgttgtgtcttactttatacatccgttgcttgggctacctagtatcc

SEQ ID NO: 1678 - DNA, 80 bp, synthetic construct
  misc_feature 1..80: note = Synthetic: >MT114542-cand-9870-9949
  source 1..80: mol_type = other DNA
gttctgcctagtgttatcctagtgacagcgcataatttgttctgggacttttcttactatgaaagtcttcagtcaattgt

SEQ ID NO: 1679 - DNA, 80 bp, synthetic construct
  misc_feature 1..80: note = Synthetic: >MG693169-cand-830-909
  source 1..80: mol_type = other DNA
accctggctaatttactggatgacctcgcaccatacaagtgcgatgatggatatgagttgcccactggcactgtgtgtat

SEQ ID NO: 1680 - DNA, 80 bp, synthetic construct
  misc_feature 1..80: note = Synthetic: >MT114544-cand-19260-19339
  source 1..80: mol_type = other DNA
ccttctatccacagctccagtctgccgaatggaatcctggctatagcatgcctacattgtacaaaattcagcgtatgtgt

SEQ ID NO: 1681 - DNA, 80 bp, synthetic construct
  misc_feature 1..80: note = Synthetic: >MN128088-cand-23380-23459
  source 1..80: mol_type = other DNA
cgtgacatgtatatgccaagagatattacagcaggagatatagttaccttgacttcttgtcaagcaaactatgttagtgt

SEQ ID NO: 1682 - DNA, 80 bp, synthetic construct
  misc_feature 1..80: note = Synthetic: >MN711790-cand-23330-23409
  source 1..80: mol_type = other DNA
cgtgatatgtatatgccaagaagtattacagcaggagacatagttactctgacttcttgtcaagcaaactatgttagtgt

SEQ ID NO: 1683 - DNA, 80 bp, synthetic construct
  misc_feature 1..80: note = Synthetic: >MK953937-cand-24790-24869
  source 1..80: mol_type = other DNA
tcatttaacccggaatctaacgccgtaggttcaatactcctaactaatggtcaacaatgtaattttgctatagagagtgt

SEQ ID NO: 1684 - DNA, 80 bp, synthetic construct
  misc_feature 1..80: note = Synthetic: >MK957244-cand-24850-24929
  source 1..80: mol_type = other DNA
tcttttaaccymgagtcaaatgccgtaggttcaatactcctaacaaatggtcaacaatgtaattttgctatagagagtgt

SEQ ID NO: 1685 - DNA, 80 bp, synthetic construct
  misc_feature 1..80: note = Synthetic: >MK957245-cand-24830-24909
  source 1..80: mol_type = other DNA
gcctttaaccctgagtctaatgctgtaggttcaatactcctaacaaatggtcaacaatgtaattttgctatagagagtgt

SEQ ID NO: 1686 - DNA, 80 bp, synthetic construct
  misc_feature 1..80: note = Synthetic: >MT040333-cand-22260-22339
  source 1..80: mol_type = other DNA
acatagaagttatcttacacctggtaatctagaaagtggctggacaactggagctgctgcttactatgtaggttacctac

SEQ ID NO: 1687 - DNA, 80 bp, synthetic construct
  misc_feature 1..80: note = Synthetic: >LC061273-cand-2240-2319
  source 1..80: mol_type = other DNA
agttgagagtagtatatattttgttaagagcgttcctagttatgcccgttctgtagtacaggcatttcaggacgttgtta

SEQ ID NO: 1688 - DNA, 80 bp, synthetic construct
  misc_feature 1..80: note = Synthetic: >MT114541-cand-2510-2589
  source 1..80: mol_type = other DNA
tgttgtagataatggtaccatttctactgatgattggtctgaacccattttgcttgagcctgctgaatatgtgcagccta

SEQ ID NO: 1689 - DNA, 80 bp, synthetic construct
  misc_feature 1..80: note = Synthetic: >M95169-cand-1360-1439
  source 1..80: mol_type = other DNA
agttgtggagaacataccaaatgcaccgagaggtactaagggatttgaagttgttggcaatgccaaaggcacacaggtag

SEQ ID NO: 1690 - DNA, 80 bp, synthetic construct
  misc_feature 1..80: note = Synthetic: >KR527150-cand-25780-25859
  source 1..80: mol_type = other DNA
attattggcccttccctgaccaggctccaaacccatttaatgctcaagttgagcagttatcagcaactgaaaatgtttat

SEQ ID NO: 1691 - DNA, 80 bp, synthetic construct
  misc_feature 1..80: note = Synthetic: >LC088095-cand-25600-25679
  source 1..80: mol_type = other DNA
attattggcccttccctgaccaggctccaaacccattcactgcccaagctgagcagttatcatcaacagagaatgtttac

SEQ ID NO: 1692 - DNA, 80 bp, synthetic construct
  misc_feature 1..80: note = Synthetic: >MN517817-cand-1660-1739
  source 1..80: mol_type = other DNA
ataaatgatggactcattcttgctgcaatttactcatctttcagtgtctctgaacttgtggcggcacttaaaaaaggtga

SEQ ID NO: 1693 - DNA, 80 bp, synthetic construct
  misc_feature 1..80: note = Synthetic: >SBB-120-cand-16030-16109
  source 1..80: mol_type = other DNA
ggtagtggaaagtctcattgtgtcataggccttggcctatattaccccggtgcacgcattatgtttgcagcatgctcaca

SEQ ID NO: 1694 - DNA, 80 bp, synthetic construct
  misc_feature 1..80: note = Synthetic: >SBB-041-cand-16030-16109
  source 1..80: mol_type = other DNA
ggtagtggaaagtcacactgcgttataggcctgggcttatattaccctggtgcacgcattatgtttgcagcatgctcaca

SEQ ID NO: 1695 - DNA, 80 bp, synthetic construct
  misc_feature 1..80: note = Synthetic: >SBB-788-cand-1840-1919
  source 1..80: mol_type = other DNA
gttcagttggcatataaacagggtcgtgttaccgttttgtctgcctttcatgttttaaacattgccattagcaaaactaa

SEQ ID NO: 1696 - DNA, 80 bp, synthetic construct
  misc_feature 1..80: note = Synthetic: >SBB-747-cand-1830-1909
  source 1..80: mol_type = other DNA
taatagttgtgttcagttggcatataagcagggtcgtgttaccgtgttgtctgcctttcatgttttaaacattgccatta

SEQ ID NO: 1697 - DNA, 80 bp, synthetic construct
  misc_feature 1..80: note = Synthetic: >SBB-726-cand-12470-12549
  source 1..80: mol_type = other DNA
tatccttatgtgcttttagtgttgatccagaagctacttataaggagtatttagataatggtggctcacctataggtaac

SEQ ID NO: 1698 - DNA, 80 bp, synthetic construct
  misc_feature 1..80: note = Synthetic: >SBB-797-cand-12480-12559
  source 1..80: mol_type = other DNA
tgcttttagtgttgatccagaagctacttataaggagtatttagataatggtggctcacctataggtaactgcgttaaga

SEQ ID NO: 1699 - DNA, 80 bp, synthetic construct
  misc_feature 1..80: note = Synthetic: >SBB-747-cand-1430-1509
  source 1..80: mol_type = other DNA
tagctggagatcactctggagccgtaggttcgggtgctgtccttactataaacagagaaataatggcctacattgtggaa

SEQ ID NO: 1700 - DNA, 80 bp, synthetic construct
  misc_feature 1..80: note = Synthetic: >SBB-788-cand-1440-1519
  source 1..80: mol_type = other DNA
tcactctggagccgtaggttcgggtgctgtccttactataaacagagaaataatggcctacattgtggaaggctttaaaa

SEQ ID NO: 1701 - DNA, 80 bp, synthetic construct
  misc_feature 1..80: note = Synthetic: >SBB-010-cand-12600-12679
  source 1..80: mol_type = other DNA
tcctaagtctgtcatggaacatgagcagtccatatatgacatacttaaagattgtggagccgtagcagcacatgattttt

SEQ ID NO: 1702 - DNA, 80 bp, synthetic construct
  misc_feature 1..80: note = Synthetic: >SBB-797-cand-25920-25999
  source 1..80: mol_type = other DNA
gcttatgtggttgagctactttattagctcattccgcttgctttgtaggactggttcagcatggtctttcatgcctgaaa

SEQ ID NO: 1703 - DNA, 80 bp, synthetic construct
  misc_feature 1..80: note = Synthetic: >PRD-0038-cand-15910-15989
  source 1..80: mol_type = other DNA
aatcaggaatatgcagatgtcttccatttgtatttacaatacatccggaagttacatgatgagcttactggacacatgtt

SEQ ID NO: 1704 - DNA, 80 bp, synthetic construct
  misc_feature 1..80: note = Synthetic: >PDF-2386-cand-15920-15999
  source 1..80: mol_type = other DNA
atgcagatgtcttccatttgtatttacaatacatccggaagttacatgatgagcttactggacacatgttagacatgtat

SEQ ID NO: 1705 - DNA, 80 bp, synthetic construct
  misc_feature 1..80: note = Synthetic: >PDF-2386-cand-16800-16879
  source 1..80: mol_type = other DNA
aacattagtgccacaggagcactatgttagaattacaggcttataccccactcttaacatctctgatgagttttcaagca

SEQ ID NO: 1706 - DNA, 80 bp, synthetic construct
  misc_feature 1..80: note = Synthetic: >PRD-0038-cand-16790-16869
  source 1..80: mol_type = other DNA
taacagctccaacattagtgccacaggagcactatgttagaattacaggcttataccccactcttaacatctctgatgag

SEQ ID NO: 1707 - DNA, 80 bp, synthetic construct
  misc_feature 1..80: note = Synthetic: >SBB-010-cand-7770-7849
  source 1..80: mol_type = other DNA
ctggtgaatatgactttaagtacattagaggtggcaagttatacacttttgataagagtctcgattgtgtccataatgtt

SEQ ID NO: 1708 - DNA, 80 bp, synthetic construct
  misc_feature 1..80: note = Synthetic: >SBB-010-cand-3390-3469
  source 1..80: mol_type = other DNA
ttaccagtccttttgcatttgagttttatgatttacgtggcctgcgtgttttagttcaaaatgccaataattgttgggtt

SEQ ID NO: 1709 - DNA, 80 bp, synthetic construct
  misc_feature 1..80: note = Synthetic: >SBB-053-cand-3400-3479
  source 1..80: mol_type = other DNA
ttttgcattcgagttttatgatttacgtggcctgcgtgttttagttcaaaatgccaataattgttgggttgcatctacgt

SEQ ID NO: 1710 - DNA, 80 bp, synthetic construct
  misc_feature 1..80: note = Synthetic: >SBB-041-cand-8030-8109
  source 1..80: mol_type = other DNA
tctacctgttatgatatcactggtcctgctagtccggctcagtgtgtgttcaatgctgcctgtacaactcttaaagggtt

SEQ ID NO: 1711 - DNA, 80 bp, synthetic construct
  misc_feature 1..80: note = Synthetic: >SBB-130-cand-8020-8099
  source 1..80: mol_type = other DNA
agactcgtctacttgttatgatatcactggtcctgctagtccagcccagtgtgtgttcaatgctgcctgtacaactctta

SEQ ID NO: 1712 - DNA, 80 bp, synthetic construct
  misc_feature 1..80: note = Synthetic: >GCS-227-cand-7530-7609
  source 1..80: mol_type = other DNA
acttgtcccaattgctgtgcaaacctattaaactagttgactctgcattgctgtctacattggatgtagactttaatggt

SEQ ID NO: 1713 - DNA, 80 bp, synthetic construct
  misc_feature 1..80: note = Synthetic: >GCS-211-cand-7530-7609
  source 1..80: mol_type = other DNA
gtacttgtcccaattgctgtgcaaacctattaaactagttgactctgcattgctgtctacattggatgtagactttaatg

SEQ ID NO: 1714 - DNA, 80 bp, synthetic construct
  misc_feature 1..80: note = Synthetic: >GCS-211-cand-890-969
  source 1..80: mol_type = other DNA
agatgaataagagtgttgttgttgatgctaaatttcaaccagtcttggatgccttcggcgtgccttttgtacgcaatggt

SEQ ID NO: 1715 - DNA, 80 bp, synthetic construct
  misc_feature 1..80: note = Synthetic: >GCS-227-cand-890-969
  source 1..80: mol_type = other DNA
atgaataagagtgttgttgttgatgctaaatttcaaccagtcttggatgccttcggcgtgccttttgtacgcaatggtac

SEQ ID NO: 1716 - DNA, 80 bp, synthetic construct
  misc_feature 1..80: note = Synthetic: >GCS-211-cand-12710-12789
  source 1..80: mol_type = other DNA
ctgttggtacaccagatcctattcgattttgcttagagaatacaccttgtaaagtgtgcatgtgttggttgagcaatggt

SEQ ID NO: 1717 - DNA, 80 bp, synthetic construct
  misc_feature 1..80: note = Synthetic: >GCS-227-cand-12710-12789
  source 1..80: mol_type = other DNA
gttggtacactagaccctattcgattttgcttagagaatacaccttgtaaagtgtgcatgtgttggttgagcaatggttg

SEQ ID NO: 1718 - DNA, 80 bp, synthetic construct
  misc_feature 1..80: note = Synthetic: >GCS-227-cand-9990-10069
  source 1..80: mol_type = other DNA
accatttagagttgggtagtggctgtcatgttggctcagattttgagggtaacatgtatggcaattatgaagatcaaccc

SEQ ID NO: 1719 - DNA, 80 bp, synthetic construct
  misc_feature 1..80: note = Synthetic: >GCS-211-cand-10000-10079
  source 1..80: mol_type = other DNA
gagttgggtagtggctgtcatgttggctcagattttgagggtaacatgtatggcaattatgaagatcaacccagcctaca

SEQ ID NO: 1720 - DNA, 80 bp, synthetic construct
  misc_feature 1..80: note = Synthetic: >GCS-211-cand-3610-3689
  source 1..80: mol_type = other DNA
gagaagcctgtttttggttacaaatcaacagagctcaattctattagaattcttaaacaagattataacaactgttgggt

SEQ ID NO: 1721 - DNA, 80 bp, synthetic construct
  misc_feature 1..80: note = Synthetic: >GCS-227-cand-3610-3689
  source 1..80: mol_type = other DNA
gaagcctgtttttggttacaaatcaacagagctcaattctattagaattcttaaacaagattataacaactgttgggtta

SEQ ID NO: 1722 - DNA, 80 bp, synthetic construct
  misc_feature 1..80: note = Synthetic: >SBB-788-cand-21210-21289
  source 1..80: mol_type = other DNA
acccagcgacacttattgtcaggaaccatttggcgttgcgtttggtacgacatttgagtacgaccgtatcgctattgtta

SEQ ID NO: 1723 - DNA, 80 bp, synthetic construct
  misc_feature 1..80: note = Synthetic: >GCS-211-cand-3450-3529
  source 1..80: mol_type = other DNA
acccgttgctagtgaagaaattgccactattgtgaatgactccatcgaagtcaccacacaagacacctctgaatgtgaca

SEQ ID NO: 1724 - DNA, 80 bp, synthetic construct
  misc_feature 1..80: note = Synthetic: >GCS-227-cand-3450-3529
  source 1..80: mol_type = other DNA
ccgttgctagtgaagaaattgccactattgtgaatgactccatcgaagtcaccacacaagacacctctgaatgtgacaca

SEQ ID NO: 1725 - DNA, 80 bp, synthetic construct
  misc_feature 1..80: note = Synthetic: >GCS-227-cand-18060-18139
  source 1..80: mol_type = other DNA
ttgtttcagccattcacttagttgtgattacctatacaacccatattgtattgacatacaacagtggggctacgtagggt

SEQ ID NO: 1726 - DNA, 80 bp, synthetic construct
  misc_feature 1..80: note = Synthetic: >GCS-211-cand-18070-18149
  source 1..80: mol_type = other DNA
gccattcacttagttgtgattacctatacaacccatattgtattgacatacaacagtggggctacgtagggtctcttagc

SEQ ID NO: 1727 - DNA, 80 bp, synthetic construct
  misc_feature 1..80: note = Synthetic: >PDF-0663-cand-30170-30249
  source 1..80: mol_type = other DNA
caacccagtatgtattagcttcttggacatgtacgctcctccacgtagtggcgctctctcattttcagatgagtctttct

SEQ ID NO: 1728 - DNA, 80 bp, synthetic construct
  misc_feature 1..80: note = Synthetic: >PDF-0663-cand-30090-30169
  source 1..80: mol_type = other DNA
tgttcagttaaaatcagctgcttggacatgtacgctcctccacgtagtggcgctctctcattttcagatgagtctttctc

SEQ ID NO: 1729 - DNA, 80 bp, synthetic construct
  misc_feature 1..80: note = Synthetic: >GCS-211-cand-22140-22219
  source 1..80: mol_type = other DNA
agaacaacaatggtttttggactgtggcttacacacagtatgctgatgtcctcttgcaagtgaatggaactgatattact

SEQ ID NO: 1730 - DNA, 80 bp, synthetic construct
  misc_feature 1..80: note = Synthetic: >GCS-227-cand-22130-22209
  source 1..80: mol_type = other DNA
gtatagtaagaacaacaatggtttttggactgtggcttacacacagtatgctgatgtcctcttgcaagtgaatggaactg

SEQ ID NO: 1731 - DNA, 80 bp, synthetic construct
  misc_feature 1..80: note = Synthetic: >GCS-227-cand-14070-14149
  source 1..80: mol_type = other DNA
agaacgtggtttcttttcaagcagctctgagctgactttaaaacactttttctttgcgcagaaaggtgatgccacaatta

SEQ ID NO: 1732 - DNA, 80 bp, synthetic construct
  misc_feature 1..80: note = Synthetic: >GCS-211-cand-14070-14149
  source 1..80: mol_type = other DNA
atagaacgtggtttcttttcaagcagctctgagctgactttaaaacactttttctttgcgcagaaaggtgatgccacaat

SEQ ID NO: 1733 - DNA, 80 bp, synthetic construct
  misc_feature 1..80: note = Synthetic: >GCS-211-cand-10160-10239
  source 1..80: mol_type = other DNA
ggtgtgacaatactcgcactacagttgacaactataatgagtgggctcaacaacacggtttcaccaaaatcactagttct

SEQ ID NO: 1734 - DNA, 80 bp, synthetic construct
  misc_feature 1..80: note = Synthetic: >GCS-227-cand-10150-10229
  source 1..80: mol_type = other DNA
cacttggtggtgtgacaatactcgcactacagttgacaactataatgagtgggctcaacaacacggtttcaccaaaatca

SEQ ID NO: 1735 - DNA, 80 bp, synthetic construct
  misc_feature 1..80: note = Synthetic: >SBB-788-cand-26330-26409
  source 1..80: mol_type = other DNA
agaataacacatgttgtaaatatttccttcttatagtttgaacgaacctattatgtctggacggaataagccccgccctg

SEQ ID NO: 1736 - DNA, 80 bp, synthetic construct
  misc_feature 1..80: note = Synthetic: >SBB-726-cand-26330-26409
  source 1..80: mol_type = other DNA
ctcagaataacacatgttgtaaatatttccttcttatagtttgaacgaacctattatgtctggacggaataagccccgcc

SEQ ID NO: 1737 - DNA, 80 bp, synthetic construct
  misc_feature 1..80: note = Synthetic: >GCS-211-cand-7290-7369
  source 1..80: mol_type = other DNA
taatgttgtaaaaacaactgttcaacccactggccctgcaaccattaccatagacaaagttgagttcagtgatggattct

SEQ ID NO: 1738 - DNA, 80 bp, synthetic construct
  misc_feature 1..80: note = Synthetic: >GCS-227-cand-7290-7369
  source 1..80: mol_type = other DNA
atgttgtaaaaacaactgttcaacccactggccctgcaaccattaccatagacaaagttgagttcagtgatggattctac

SEQ ID NO: 1739 - DNA, 80 bp, synthetic construct
  misc_feature 1..80: note = Synthetic: >GCS-227-cand-28130-28209
  source 1..80: mol_type = other DNA
agaattgatgtcacatcatgctgtcctcagctgaaccatcctgagctgccaagtgagcccattccaactagtcaggtctg

SEQ ID NO: 1740 - DNA, 80 bp, synthetic construct
  misc_feature 1..80: note = Synthetic: >GCS-211-cand-28130-28209
  source 1..80: mol_type = other DNA
agagaattgatgtcacatcatgctgtcctcagctgaaccatcctgagctgccaagtgagcccattccaactagtcaggtc

SEQ ID NO: 1741 - DNA, 80 bp, synthetic construct
  misc_feature 1..80: note = Synthetic: >GCS-227-cand-11430-11509
  source 1..80: mol_type = other DNA
gtaaacatcagaatatagatcttgaaagtttgattggcacgtactttgataacagtgctatgttgcaaagtattgcgtct

SEQ ID NO: 1742 - DNA, 80 bp, synthetic construct
  misc_feature 1..80: note = Synthetic: >GCS-211-cand-11440-11519
  source 1..80: mol_type = other DNA
cagaatatagatcttgaaagtttgattggcacgtactttgataacagtgctatgttgcaaagtattgcgtctgcttatgc

SEQ ID NO: 1743 - DNA, 80 bp, synthetic construct
  misc_feature 1..80: note = Synthetic: >GCS-211-cand-28370-28449
  source 1..80: mol_type = other DNA
agtacagtggcacgctttaccctaaagcagctgcaaaagatcctcaaggtgattgggtttttgtcactgatgccaaagaa

SEQ ID NO: 1744 - DNA, 80 bp, synthetic construct
  misc_feature 1..80: note = Synthetic: >GCS-227-cand-28370-28449
  source 1..80: mol_type = other DNA
tacagtggcacgcttcaccctaaagcagctgcaaaagatcctcaaggtgattgggtttttgtcactgatgccaaagaaaa

SEQ ID NO: 1745 - DNA, 80 bp, synthetic construct
  misc_feature 1..80: note = Synthetic: >GCS-227-cand-25810-25889
  source 1..80: mol_type = other DNA
atcaaaatggctactaatattagtagtgatgttattgttgaacatcttaagaactggaatttcacgtggaatatcatact

SEQ ID NO: 1746 - DNA, 80 bp, synthetic construct
  misc_feature 1..80: note = Synthetic: >GCS-211-cand-25820-25899
  source 1..80: mol_type = other DNA
ggctactaatattagtagtgatgttattgttgaacatcttaagaactggaatttcacgtggaatatcatacttacagtgc

SEQ ID NO: 1747 - DNA, 80 bp, synthetic construct
  misc_feature 1..80: note = Synthetic: >SBB-122-cand-26740-26819
  source 1..80: mol_type = other DNA
agtatttgccgattgtttttctgtacctaattatagtgtaaatgatgttattttcacttccaatgatgtctgttggctaa

SEQ ID NO: 1748 - DNA, 80 bp, synthetic construct
  misc_feature 1..80: note = Synthetic: >SBB-120-cand-26770-26849
  source 1..80: mol_type = other DNA
gccgattgtttttctgtacctaattatagtgtaaatgatgttattttcacttccaatgatgtctgttggctaacccatcc

SEQ ID NO: 1749 - DNA, 80 bp, synthetic construct
  misc_feature 1..80: note = Synthetic: >GCS-227-cand-250-329
  source 1..80: mol_type = other DNA
atacagcgttctgtcgttgttgaaaccgttaacgcgtgtcatggccagtagtcaattgacactagcaattgctagtgact

SEQ ID NO: 1750 - DNA, 80 bp, synthetic construct
  misc_feature 1..80: note = Synthetic: >GCS-211-cand-250-329
  source 1..80: mol_type = other DNA
ggatacagcgttctgtcgttgttgaaaccgttaacgcgtgtcatggccagtagtcaattgacactagcagttgctagtga

SEQ ID NO: 1751 - DNA, 80 bp, synthetic construct
  misc_feature 1..80: note = Synthetic: >SBB-130-cand-10960-11039
  source 1..80: mol_type = other DNA
cccagaagttgctcaggagttattgttggccctattagctttctttttaagtaaacagaaggactttggtgtagatgact

SEQ ID NO: 1752 - DNA, 80 bp, synthetic construct
  misc_feature 1..80: note = Synthetic: >SBB-120-cand-10960-11039
  source 1..80: mol_type = other DNA
tgacccagaagttgctcaggaattgttgttggcccttttagctttctttttaagtaaacagaaggactttggtgtagatg

SEQ ID NO: 1753 - DNA, 80 bp, synthetic construct
  misc_feature 1..80: note = Synthetic: >GCS-211-cand-24940-25019
  source 1..80: mol_type = other DNA
tcagttgaccaactcattaacaccactatcgaacaacagaatttaacaactgaaaatgctgccaccctacgatctggact

SEQ ID NO: 1754 - DNA, 80 bp, synthetic construct
  misc_feature 1..80: note = Synthetic: >GCS-227-cand-24930-25009
  source 1..80: mol_type = other DNA
tcttgttctcagttgaccaactcattaacaccactatcgaacaacagaatttaacaactgaaaatgctgccaccctacga

SEQ ID NO: 1755 - DNA, 80 bp, synthetic construct
  misc_feature 1..80: note = Synthetic: >SBB-120-cand-22890-22969
  source 1..80: mol_type = other DNA
tttggagccattagctctaattttaagatcttgtcagaacgacttgacagacttgaggctgatgtacaaatggacagact

SEQ ID NO: 1756 - DNA, 80 bp, synthetic construct
  misc_feature 1..80: note = Synthetic: >SBB-122-cand-22880-22959
  source 1..80: mol_type = other DNA
cagcgagaattttggtgccattagctccaattttaagatcttgtcagaacgacttgacagacttgaggctgatgtacaaa

SEQ ID NO: 1757 - DNA, 80 bp, synthetic construct
  misc_feature 1..80: note = Synthetic: >GCS-211-cand-410-489
  source 1..80: mol_type = other DNA
gggactgccgatttgtaccattcggccttcaggactgtgttgttggtgttagtggtggtgactacgtcgtactactcact

SEQ ID NO: 1758 - DNA, 80 bp, synthetic construct
  misc_feature 1..80: note = Synthetic: >GCS-227-cand-410-489
  source 1..80: mol_type = other DNA
gactgccgatttgtaccattcggccttcaggactgtgttgttggtgttagtggtggtgactacgtcgtactactcactgg

SEQ ID NO: 1759 - DNA, 80 bp, synthetic construct
  misc_feature 1..80: note = Synthetic: >229E-cand-26890-26969
  source 1..80: mol_type = other DNA
aacccatcacaaacttcacctggaactgctgaaccagtctacgatgcagtttctattgaaactgacataattgatgaagt

SEQ ID NO: 1760 - DNA, 80 bp, synthetic construct
  misc_feature 1..80: note = Synthetic: >229E-cand-26970-27049
  source 1..80: mol_type = other DNA
caactaaacatgcatccagaagatgaacatgcccccctatggcaagttttgtttggaatggttttagttgagggttctat

SEQ ID NO: 1761 - DNA, 80 bp, synthetic construct
  misc_feature 1..80: note = Synthetic: >229E-cand-27050-27129
  source 1..80: mol_type = other DNA
tatttggctaatggccactgtgttgtttgaaatcattcaattgttagttgctgctaattcagatggtttgtatgtggttt

SEQ ID NO: 1762 - DNA, 80 bp, synthetic construct
  misc_feature 1..80: note = Synthetic: >229E-cand-27130-27209
  source 1..80: mol_type = other DNA
taagttggaattttgcttttgttcttgcttttattatttttctgctgcctgtttccagagagatttggcgccctggtgcc

SEQ ID NO: 1763 - DNA, 80 bp, synthetic construct
  misc_feature 1..80: note = Synthetic: >229E-cand-27210-27289
  source 1..80: mol_type = other DNA
gtagatgagtatattgcttttctccgatctatgcatgatggcatgatcagagctgcttttaactaacatgatcccttgct

SEQ ID NO: 1764 - DNA, 80 bp, synthetic construct
  misc_feature 1..80: note = Synthetic: >229E-cand-27290-27369
  source 1..80: mol_type = other DNA
tcggcttgacaaggatctagtcttatacacaatggtaagccagtagtagtagaggtataagaaatttgctactatgttac

SEQ ID NO: 1765 - DNA, 80 bp, synthetic construct
  misc_feature 1..80: note = Synthetic: >229E-cand-27370-27449
  source 1..80: mol_type = other DNA
tgaacctaggtgaacactagtataactcattacaaatgtgctggagtaattaaagatcgctttgacgagccaacaatgga

SEQ ID NO: 1766 - DNA, 80 bp, synthetic construct
  misc_feature 1..80: note = Synthetic: >229E-cand-27450-27529
  source 1..80: mol_type = other DNA
agagccagtcatttgtcttgagacctatctagttagtaactgctaatggaacggtttcgatatggatacacaaaaaaaaa

SEQ ID NO: 1767 - DNA, 80 bp, synthetic construct
  misc_feature 1..80: note = Synthetic: >AlphaCoV1-cand-10-89
  source 1..80: mol_type = other DNA
agtgagtgtagcgtggctataactcttcttttactttaactagccttgtgctagattttgtcttcggacaccaactcgaa

SEQ ID NO: 1768 - DNA, 80 bp, synthetic construct
  misc_feature 1..80: note = Synthetic: >AlphaCoV1-cand-90-169
  source 1..80: mol_type = other DNA
ctaaacgaaatatttgtctctctatgaaatcatagaagacaagcgtctttgattattttcaattctatcaaagtttggca

SEQ ID NO: 1769 - DNA, 80 bp, synthetic construct
  misc_feature 1..80: note = Synthetic: >AlphaCoV1-cand-170-249
  source 1..80: mol_type = other DNA
atcactcctaggaacggggttgagagaacggcgcaccagggttccgtccctgtttggtaagtcgtctagtattagctgcg

SEQ ID NO: 1770 - DNA, 80 bp, synthetic construct
  misc_feature 1..80: note = Synthetic: >AlphaCoV1-cand-250-329
  source 1..80: mol_type = other DNA
gctggttccgcccgtcgtacgttgggtagatccgggttccgtcctggtgaaacctgatctccctcgccggccgccaggag

SEQ ID NO: 1771 - DNA, 80 bp, synthetic construct
  misc_feature 1..80: note = Synthetic: >AlphaCoV1-cand-330-409
  source 1..80: mol_type = other DNA
aatgagttccaaacaatttaagatcctcgttaatgaggactaccaagtcaacgtgcctagccttcctttccgtgacgtgt

SEQ ID NO: 1772 - DNA, 80 bp, synthetic construct
  misc_feature 1..80: note = Synthetic: >AlphaCoV1-cand-410-489
  source 1..80: mol_type = other DNA
tgcaggaaattttaaagtactgctaccgtaacggttttgagggctatgttttcgtgcctgaataccgtcgtgacctagtt

SEQ ID NO: 1773 - DNA, 80 bp, synthetic construct
  misc_feature 1..80: note = Synthetic: >AlphaCoV1-cand-490-569
  source 1..80: mol_type = other DNA
gattgcgatcgtaaggatcaactacgtcattggtgttctgggtaacggaataagtgatcttaaacctgttcttcttaccg

SEQ ID NO: 1774 - DNA, 80 bp, synthetic construct
  misc_feature 1..80: note = Synthetic: >AlphaCoV1-cand-570-649
  source 1..80: mol_type = other DNA
aaccttccgtcatgttgcaaggctttattgttagagctaactgcaatggcgttcttgaggactttgaccttaaaattgcc

SEQ ID NO: 1775 - DNA, 80 bp, synthetic construct
  misc_feature 1..80: note = Synthetic: >AlphaSp-cand-19060-19139
  source 1..80: mol_type = other DNA
ctgattttgatggtgacgtttgtacactttttgataatagtgttcctggtgcttttgagcgttttactgttacgaagaat

SEQ ID NO: 1776 - DNA, 80 bp, synthetic construct
  misc_feature 1..80: note = Synthetic: >AlphaSp-cand-19140-19219
  source 1..80: mol_type = other DNA
gcagtgctcatttcacttactgctgttaagaagctaactgccatcaaacttacatatggttatctcaatggtgtacctgt

SEQ ID NO: 1777 - DNA, 80 bp, synthetic construct
  misc_feature 1..80: note = Synthetic: >AlphaSp-cand-19220-19299
  source 1..80: mol_type = other DNA
ttttacacatgaagataaaccatttacttggtacatttacactcgaaaggatggtgcctttgttgaatatcctgatggct

SEQ ID NO: 1778 - DNA, 80 bp, synthetic construct
  misc_feature 1..80: note = Synthetic: >AlphaSp-cand-19300-19379
  source 1..80: mol_type = other DNA
atttcactcaaggacgcgtcatttcggactttcaacctcgtagtaacatggaagaagattttcttaacatggatatgggt

SEQ ID NO: 1779 - DNA, 80 bp, synthetic construct
  misc_feature 1..80: note = Synthetic: >AlphaSp-cand-19380-19459
  source 1..80: mol_type = other DNA
ttgtttataagtaaatatggactagaagattatggttttgaacatgttgtgtatggtgatgtttctaaaaccacattggg

SEQ ID NO: 1780 - DNA, 80 bp, synthetic construct
  misc_feature 1..80: note = Synthetic: >AlphaSp-cand-19450-19529
  source 1..80: mol_type = other DNA
ccacattgggtggtttgcatttacttatatcacaaatacgtctttccaagataggtgttcttaaagttgaagattttgtt

SEQ ID NO: 1781 - DNA, 80 bp, synthetic construct
  misc_feature 1..80: note = Synthetic: >AlphaSp-cand-19530-19609
  source 1..80: mol_type = other DNA
tctagttcagatagtacacttaaatcgtgtacagttacttatgttgacaaccctagtagtaagatggtttgtacatatgt

SEQ ID NO: 1782 - DNA, 80 bp, synthetic construct
  misc_feature 1..80: note = Synthetic: >AlphaSp-cand-19690-19769
  source 1..80: mol_type = other DNA
tagattgtaaagtttggcgttggatgttgtggtgtaaagaccacaaagtacagaccttctatcctcagctccagtcagct

SEQ ID NO: 1783 - DNA, 80 bp, synthetic construct
  misc_feature 1..80: note = Synthetic: >AlphaSp-cand-19770-19849
  source 1..80: mol_type = other DNA
gaatggaagtgtggttattcaatgccatcaatctacaagattcagcgtatgtgtttggaaccttgcaacttgtacaatta

SEQ ID NO: 1784 - DNA, 80 bp, synthetic construct
  misc_feature 1..80: note = Synthetic: >AlphaSp-cand-19850-19929
  source 1..80: mol_type = other DNA
tggcagtggtctgaagttaccagatggtatcatgtttaacgtagtcaaatacacacagctttgtcagtatttgaatagca

SEQ ID NO: 1785 - DNA, 80 bp, synthetic construct
  misc_feature 1..80: note = Synthetic: >AlphaSp-cand-20010-20089
  source 1..80: mol_type = other DNA
gttttgcgcagatggttgccccttgatgctgtgattgttgacaatgatgtcaatgactatgttagtgatgcagattacag

SEQ ID NO: 1786 - DNA, 80 bp, synthetic construct
  misc_feature 1..80: note = Synthetic: >AlphaSp-cand-20090-20169
  source 1..80: mol_type = other DNA
ttacactggtgattgtgcttctatgtacctaacagacaagttcgacctggtcatctcagatatgtatgatggtagaacta

SEQ ID NO: 1787 - DNA, 80 bp, synthetic construct
  misc_feature 1..80: note = Synthetic: >AlphaSp-cand-20170-20249
  source 1..80: mol_type = other DNA
agtcttgtgatggtgacaatgtttccaaagagggtttctttccctacattaatggtgttatcaccgaaaaattagcgctg

SEQ ID NO: 1788 - DNA, 80 bp, synthetic construct
  misc_feature 1..80: note = Synthetic: >AlphaSp-cand-20250-20329
  source 1..80: mol_type = other DNA
ggtggaacagttgctattaaaataactgagttcagctggaataaaaagctttatgaactcattcagaagtttgagtactg

SEQ ID NO: 1789 - DNA, 80 bp, synthetic construct
  misc_feature 1..80: note = Synthetic: >Anlong-cand-16270-16349
  source 1..80: mol_type = other DNA
tctctattattaatagtcgcctttcatataaacacattgtttatgtaggcgatcctcagcaattaccggcaccacgtacg

SEQ ID NO: 1790 - DNA, 80 bp, synthetic construct
  misc_feature 1..80: note = Synthetic: >Anlong-cand-16350-16429
  source 1..80: mol_type = other DNA
atgattacaaagggtgtacttgagcctgctgactacaacgttgttacacagcgtatgtgtagtgttggaccagacatctt

SEQ ID NO: 1791 - DNA, 80 bp, synthetic construct
  misc_feature 1..80: note = Synthetic: >Anlong-cand-16430-16509
  source 1..80: mol_type = other DNA
tttgcatcgttgttttaggtgtccagctgagattgttaacactgtttctgagcttgtttatgagaacaagtttaagcctg

SEQ ID NO: 1792 - DNA, 80 bp, synthetic construct
  misc_feature 1..80: note = Synthetic: >Anlong-cand-16510-16589
  source 1..80: mol_type = other DNA
taaatgctgaaagtaagcagtgtttcaagctttttgctaaaggtaatgttcaggtagacaatggttctagcattaatagg

SEQ ID NO: 1793 - DNA, 80 bp, synthetic construct
  misc_feature 1..80: note = Synthetic: >Anlong-cand-16590-16669
  source 1..80: mol_type = other DNA
agacagcttgacatagtcaaaatgttccttgctaagaacccttcttggtctaaagcagtttttatttcgccttataatag

SEQ ID NO: 1794 - DNA, 80 bp, synthetic construct
  misc_feature 1..80: note = Synthetic: >Anlong-cand-16670-16749
  source 1..80: mol_type = other DNA
tcagaattacgttgctgctcgtgttttgggtctgcaaattcagactgtagactcatcacaaggcagcgagtatgactatg

SEQ ID NO: 1795 - DNA, 80 bp, synthetic construct
  misc_feature 1..80: note = Synthetic: >Anlong-cand-16750-16829
  source 1..80: mol_type = other DNA
ttattttcacacaaacatcagacaccctccatgcgtgcaatgttaacaggtttaacgttgctataacgcgtgcaaagaaa

SEQ ID NO: 1796 - DNA, 80 bp, synthetic construct
  misc_feature 1..80: note = Synthetic: >Anlong-cand-16830-16909
  source 1..80: mol_type = other DNA
ggtatcttttgtgttatgtgtgataagtctttgtatgatgccttgaaatttttcgaggttaacatctcagacttacaggc

SEQ ID NO: 1797 - DNA, 80 bp, synthetic construct
  misc_feature 1..80: note = Synthetic: >Anlong-cand-16910-16989
  source 1..80: mol_type = other DNA
tgagaatggctgtggcctttttaaaaactgcatacgtaatgaggtcgtgcttagtcctacacacgcacctacttatatgg

SEQ ID NO: 1798 - DNA, 80 bp, synthetic construct
  misc_feature 1..80: note = Synthetic: >Anlong-cand-16990-17069
  source 1..80: mol_type = other DNA
cattgtcagactgttttaaaacgagtcaagacttagccgtagcaataggtacagcccgtgagagtgttcgttatgaacat

SEQ ID NO: 1799 - DNA, 80 bp, synthetic construct
  misc_feature 1..80: note = Synthetic: >Anlong-cand-17070-17149
  source 1..80: mol_type = other DNA
gttatctcttttatgggtttccgttttgatgtcaatgtgcctaattaccatactctgttttgtactcgtgattttgccat

SEQ ID NO: 1800 - DNA, 80 bp, synthetic construct
  misc_feature 1..80: note = Synthetic: >Anlong-cand-17150-17229
  source 1..80: mol_type = other DNA
gagacatgtaagaggttggataggcatggatgttgaaggtgcgcatgtttgtggtgacaatgtcggcactaacgttccat

SEQ ID NO: 1801 - DNA, 80 bp, synthetic construct
  misc_feature 1..80: note = Synthetic: >Anlong-cand-17230-17309
  source 1..80: mol_type = other DNA
tacaggtcggtttctctaacggtattgattttgttgtccaaccagaggggtgtgtctctactgaagttggtgactttatt

SEQ ID NO: 1802 - DNA, 80 bp, synthetic construct
  misc_feature 1..80: note = Synthetic: >Anlong-cand-17310-17389
  source 1..80: mol_type = other DNA
aaaccagttagagcccgtgcaccaccaggcgaacagtttacacatttggtgcctttacttcgtaagggtcaaccatggac

SEQ ID NO: 1803 - DNA, 80 bp, synthetic construct
  misc_feature 1..80: note = Synthetic: >Anlong-cand-17390-17469
  source 1..80: mol_type = other DNA
agttgttcgtcgccgtatagtacagatggtatgtgatagtctgaaaggtttatcagacgtcgtagtgtttgtgctatggg

SEQ ID NO: 1804 - DNA, 80 bp, synthetic construct
  misc_feature 1..80: note = Synthetic: >Anlong-cand-17470-17549
  source 1..80: mol_type = other DNA
caggtggtttggagttgacgactatgaggtactttgtgaaaataggtccagttcaacattgctattgtggtaaggaaggc

SEQ ID NO: 1805 - DNA, 80 bp, synthetic construct
  misc_feature 1..80: note = Synthetic: >BetaCoV1-cand-6370-6449
  source 1..80: mol_type = other DNA
gatactctcaatgttaaattgggctttgattctactaaagattcagttcaatataaggttaccgtctggcctgatgcaac

SEQ ID NO: 1806 - DNA, 80 bp, synthetic construct
  misc_feature 1..80: note = Synthetic: >BetaCoV1-cand-6450-6529
  source 1..80: mol_type = other DNA
tggtgatgttgtgttagcagatgatgacttgtatgtcaagcgctataaaaagggttgcataacatttggcaaaccagtta

SEQ ID NO: 1807 - DNA, 80 bp, synthetic construct
  misc_feature 1..80: note = Synthetic: >BetaCoV1-cand-6530-6609
  source 1..80: mol_type = other DNA
tctggcagagccatatggaagcttccctggcatccttgacgtattttaacagacctagtctgattgataaaaataaattt

SEQ ID NO: 1808 - DNA, 80 bp, synthetic construct
  misc_feature 1..80: note = Synthetic: >BetaCoV1-cand-6610-6689
  source 1..80: mol_type = other DNA
gatgtgttaacagtggaggagtcgacttcagaggaaaaagatgattctcagcaggttggaatgatcccctttattataaa

SEQ ID NO: 1809 - DNA, 80 bp, synthetic construct
  misc_feature 1..80: note = Synthetic: >BetaCoV1-cand-6690-6769
  source 1..80: mol_type = other DNA
gaggttaagcttaaaaatgttaaaaagcctattagtgtggatggtgtcatcatagagaatgatgaaaaagccgaggccac

SEQ ID NO: 1810 - DNA, 80 bp, synthetic construct
  misc_feature 1..80: note = Synthetic: >BetaCoV1-cand-6770-6849
  source 1..80: mol_type = other DNA
tttagttaaaagtttgaccttagatgatgtaattgctatgtgggtcacgggcggtaggtatgttgtacgggtagccaatt

SEQ ID NO: 1811 - DNA, 80 bp, synthetic construct
  misc_feature 1..80: note = Synthetic: >BetaCoV1-cand-6850-6929
  source 1..80: mol_type = other DNA
ggcttagtaagctcgtatgcacgcctacagtacgtgaatatgctaagcgaggtcttcaaaaggttaaaatacctgtggaa

SEQ ID NO: 1812 - DNA, 80 bp, synthetic construct
  misc_feature 1..80: note = Synthetic: >BetaCoV1-cand-6930-7009
  source 1..80: mol_type = other DNA
ctctttttaaggcgtggtgacaagtgcgaatttgtagttcagaagagtataaaacgtgttgttttgactccgatgaatgt

SEQ ID NO: 1813 - DNA, 80 bp, synthetic construct
  misc_feature 1..80: note = Synthetic: >BetaCoV1-cand-7010-7089
  source 1..80: mol_type = other DNA
gttgcgctggtttttcacctatctgctaatgtgctcttggttgaagaagccaagtgacaataaagttgtatacaccacag

SEQ ID NO: 1814 - DNA, 80 bp, synthetic construct
  misc_feature 1..80: note = Synthetic: >BetaCoV1-cand-7100-7179
  source 1..80: mol_type = other DNA
taagtttagttctaagttgtttgttaaagcatgtggtatagctttacgcaactttaagtggggcatgttgttgcgtggct

SEQ ID NO: 1815 - DNA, 80 bp, synthetic construct
  misc_feature 1..80: note = Synthetic: >BetaCoV1-cand-7260-7339
  source 1..80: mol_type = other DNA
aatatacgtttcatgccgacctttgtaggccatgttatcgctaggttcaaatccactttaggattttggacattatgtga

SEQ ID NO: 1816 - DNA, 80 bp, synthetic construct
  misc_feature 1..80: note = Synthetic: >BetaCoV1-cand-7340-7419
  source 1..80: mol_type = other DNA
tggcatagacgtgtcaggtattgggtttatacgtgataattgtacatcagttgcatggtttgtcaattctgtttatcggg

SEQ ID NO: 1817 - DNA, 80 bp, synthetic construct
  misc_feature 1..80: note = Synthetic: >BetaCoV1-cand-7420-7499
  source 1..80: mol_type = other DNA
tttcgacatgattgatacgtacaaggctatagactttgtgcagtatcatgtagcaggcttttctggttttgactataaga

SEQ ID NO: 1818 - DNA, 80 bp, synthetic construct
  misc_feature 1..80: note = Synthetic: >BetaCoV1-cand-7500-7579
  source 1..80: mol_type = other DNA
gctttgcggttttagtgttggaacttgttataagttatgttttgtatacagtgtggttttatcccttgtttgggttggtc

SEQ ID NO: 1819 - DNA, 80 bp, synthetic construct
  misc_feature 1..80: note = Synthetic: >BetaCoV1-cand-7580-7659
  source 1..80: mol_type = other DNA
tgtttacaaatttttacaacgtggtttcctgatatgtttatgatcactgaattacattggtttgtacgcttgtttcttta

SEQ ID NO: 1820 - DNA, 80 bp, synthetic construct
  misc_feature 1..80: note = Synthetic: >BetaCoV1-cand-15390-15469
  source 1..80: mol_type = other DNA
tgtttcaccagaagtgtttgaaaagtatagcagctactcgtggtgttccagttgttattggcaccacgaaattttatggc

SEQ ID NO: 1821 - DNA, 80 bp, synthetic construct
  misc_feature 1..80: note = Synthetic: >BetaCoV1-cand-15460-15539
  source 1..80: mol_type = other DNA
attttatggcggctgggatgatatgttgcgtcgccttattaaaggagttgataatcctgtccttatgggctgggattatc

SEQ ID NO: 1822 - DNA, 80 bp, synthetic construct
  misc_feature 1..80: note = Synthetic: >BetaCoV1-cand-15540-15619
  source 1..80: mol_type = other DNA
ctaagtgcgatcgtgctatgcctaacattctcagaattctgagcagtttggttcttgcacgtaagcatgatgcatgttgt

SEQ ID NO: 1823 - DNA, 80 bp, synthetic construct
  misc_feature 1..80: note = Synthetic: >BetaCoV1-cand-15620-15699
  source 1..80: mol_type = other DNA
tcacaaactgataggttctatcgtttggcgaatgagtgcgcacaagttttaagtgaaattgttatgtgtggtggctgttt

SEQ ID NO: 1824 - DNA, 80 bp, synthetic construct
  misc_feature 1..80: note = Synthetic: >BetaCoV1-cand-15780-15859
  source 1..80: mol_type = other DNA
tttctgccaatgtatgtgctttgatgtcatgcaatggcaataagattgaagatttgagtattcgcagcctacagcggcgc

SEQ ID NO: 1825 - DNA, 80 bp, synthetic construct
  misc_feature 1..80: note = Synthetic: >BetaCoV1-cand-15940-16019
  source 1..80: mol_type = other DNA
tagtatgatgattttgagtgatgatggcgttgtgtgttataattctgattatgcgtccaaaggttatattgctaatatta

SEQ ID NO: 1826 - DNA, 80 bp, synthetic construct
  misc_feature 1..80: note = Synthetic: >BetaCoV1-cand-16020-16099
  source 1..80: mol_type = other DNA
gtgcctttcaacaggtgctgtattatcaaaataacgtgtttatgtcagaatccaaatgttgggtagaaaatgacgtaaag

SEQ ID NO: 1827 - DNA, 80 bp, synthetic construct
  misc_feature 1..80: note = Synthetic: >BetaCoV1-cand-16100-16179
  source 1..80: mol_type = other DNA
aatggacctcatgaattctgttcgcaacatacaatgctagtaaaaatggatggcgatgatgtctatctgccatatcctga

SEQ ID NO: 1828 - DNA, 80 bp, synthetic construct
  misc_feature 1..80: note = Synthetic: >BetaCoV1-cand-16180-16259
  source 1..80: mol_type = other DNA
ccctagtcgaattctaggagcaggctgttttgtggacgatctattaaagactgatagtgtcttattaatagagcgctttg

SEQ ID NO: 1829 - DNA, 80 bp, synthetic construct
  misc_feature 1..80: note = Synthetic: >BetaCoV1-cand-16260-16339
  source 1..80: mol_type = other DNA
ttagtttggctatagatgcttatccattggtatatcatgagaatgaagaatatcaaaaggtttttagagtgtatttggag

SEQ ID NO: 1830 - DNA, 80 bp, synthetic construct
  misc_feature 1..80: note = Synthetic: >BetaCoV1-cand-16340-16419
  source 1..80: mol_type = other DNA
tatataaagaagttgtataatgatttgggcaaccagatattagacagctatagtgtgattttaagtacttgtgatggaca

SEQ ID NO: 1831 - DNA, 80 bp, synthetic construct
  misc_feature 1..80: note = Synthetic: >BetaCoV1-cand-16420-16499
  source 1..80: mol_type = other DNA
aaaatttactgatgagtccttttacaagaacatgtatttaagaagtgcagttatgcaaagcgttggcgcctgcgtagtct

SEQ ID NO: 1832 - DNA, 80 bp, synthetic construct
  misc_feature 1..80: note = Synthetic: >BetaCoV1-cand-16500-16579
  source 1..80: mol_type = other DNA
gctcctctcaaacatcgttacgctgtggcagttgcatacgaaaacctttattgtgttgcaagtgctgttatgatcatgta

SEQ ID NO: 1833 - DNA, 80 bp, synthetic construct
  misc_feature 1..80: note = Synthetic: >CanadaGoose-cand-1680-1759
  source 1..80: mol_type = other DNA
tgtaaatttggtgtttacaaactctcttatggtgtctcgcgtgcaggagactttgtcattaattctgctgttaatgcttg

SEQ ID NO: 1834 - DNA, 80 bp, synthetic construct
  misc_feature 1..80: note = Synthetic: >CanadaGoose-cand-1760-1839
  source 1..80: mol_type = other DNA
ggacatccttaaattttgtggcacaaatgtcagtgcactttacactgaccaattagccactttgttgaaattgcggtctc

SEQ ID NO: 1835 - DNA, 80 bp, synthetic construct
  misc_feature 1..80: note = Synthetic: >CanadaGoose-cand-1830-1909
  source 1..80: mol_type = other DNA
ttgcggtctcaaacttttagaaagctttgttttgagtttctcttcaaggcaaagtgttggtttgcagatcttgcaattag

SEQ ID NO: 1836 - DNA, 80 bp, synthetic construct
  misc_feature 1..80: note = Synthetic: >CanadaGoose-cand-1910-1989
  source 1..80: mol_type = other DNA
tgttgtgagtagccttgttacagttactgacgatttattttgtcagttgtgtaacctgacatttgttgtgaagaaaactg

SEQ ID NO: 1837 - DNA, 80 bp, synthetic construct
  misc_feature 1..80: note = Synthetic: >CanadaGoose-cand-1990-2069
  source 1..80: mol_type = other DNA
gtgtcttctttaaagaggccactcatgtcttctttaagatggttagtgaggttgtagttttggcttttaagacactgcct

SEQ ID NO: 1838 - DNA, 80 bp, synthetic construct
  misc_feature 1..80: note = Synthetic: >CanadaGoose-cand-2070-2149
  source 1..80: mol_type = other DNA
actctctttggtgctgtgtgccataatggctatcttatttggacacatggctcttgtaagtatgctggcacattctttga

SEQ ID NO: 1839 - DNA, 80 bp, synthetic construct
  misc_feature 1..80: note = Synthetic: >CanadaGoose-cand-2150-2229
  source 1..80: mol_type = other DNA
agcatctactggtgatcttcatgttcaagttgacagtactgttacagactcaacacttgagttttttgagtgtgaaccac

SEQ ID NO: 1840 - DNA, 80 bp, synthetic construct
  misc_feature 1..80: note = Synthetic: >CanadaGoose-cand-2230-2309
  source 1..80: mol_type = other DNA
agagacccagttcaggggtttgtgtagatgttgttgctgaaggcactacctataagttttttagatttaagtgtggtgat

SEQ ID NO: 1841 - DNA, 80 bp, synthetic construct
  misc_feature 1..80: note = Synthetic: >CanadaGoose-cand-2310-2389
  source 1..80: mol_type = other DNA
aattattattatgcacctatgacatctccctctactgtagctgatgtctggtttgtaaaagctggcggacatgtcactct

SEQ ID NO: 1842 - DNA, 80 bp, synthetic construct
  misc_feature 1..80: note = Synthetic: >CanadaGoose-cand-2390-2469
  source 1..80: mol_type = other DNA
ttctgatgaggttcaagttaaagagataagtgttgacactgtgtctttttatcttgatgtcacttgctgtggtgaacctt

SEQ ID NO: 1843 - DNA, 80 bp, synthetic construct
  misc_feature 1..80: note = Synthetic: >CanadaGoose-cand-2470-2549
  source 1..80: mol_type = other DNA
ggactactctttttagaaaagtctataaggaccccattgatgttgacagtagtgttactgttgaggaactgcatgccgtg

SEQ ID NO: 1844 - DNA, 80 bp, synthetic construct
  misc_feature 1..80: note = Synthetic: >CanadaGoose-cand-2550-2629
  source 1..80: mol_type = other DNA
gtctatgaaatggctgctgatgttgctcttaatatgccatcttttgatggtaggacaattttgtttccgccttttgaaga

SEQ ID NO: 1845 - DNA, 80 bp, synthetic construct
  misc_feature 1..80: note = Synthetic: >CanadaGoose-cand-2630-2709
  source 1..80: mol_type = other DNA
aacagtcttagttgataaagctggtgactgtattttgaaagtgcaagattgtgctttagcattgtttgaagattatgatt

SEQ ID NO: 1846 - DNA, 80 bp, synthetic construct
  misc_feature 1..80: note = Synthetic: >CanadaGoose-cand-2710-2789
  source 1..80: mol_type = other DNA
cagaaggtgctgaagagtttgacgatgatgacgatgagtccgttaaggtctatggtcctcatcttccttttgatttgaat

SEQ ID NO: 1847 - DNA, 80 bp, synthetic construct
  misc_feature 1..80: note = Synthetic: >CanadaGoose-cand-2790-2869
  source 1..80: mol_type = other DNA
cttgctattttgttagctagagatccaattagtgccacaacaccactagtacttagtggtgattatgtggtttttcttaa

SEQ ID NO: 1848 - DNA, 80 bp, synthetic construct
  misc_feature 1..80: note = Synthetic: >CanadaGoose-cand-2870-2949
  source 1..80: mol_type = other DNA
taatgtctatcttaatgtagacgttgactatgacattatgcctaatggctgtgagcggtgtgtacctgtagctcctccag

SEQ ID NO: 1849 - DNA, 80 bp, synthetic construct
  misc_feature 1..80: note = Synthetic: >CanadaGoose-cand-4230-4309
  source 1..80: mol_type = other DNA
ttaaaacaggcatgggcttcatttctcggtggtgaccccaccgaaatggtagcctggtgctatggcattcttagctgtga

SEQ ID NO: 1850 - DNA, 80 bp, synthetic construct
  misc_feature 1..80: note = Synthetic: >CanadaGoose-cand-4310-4389
  source 1..80: mol_type = other DNA
tgtcggtcgtatggaaaatcatcatggcattgttactgctctcttgcgtcagcaagatttgatcgcagcttttgttcgta

SEQ ID NO: 1851 - DNA, 80 bp, synthetic construct
  misc_feature 1..80: note = Synthetic: >CanadaGoose-cand-4390-4469
  source 1..80: mol_type = other DNA
gacgcgttacttgtagctgtggcactgttgaaaatgtgcttaggggtataaatgcgtgttatcaacctgtcatggccgct

SEQ ID NO: 1852 - DNA, 80 bp, synthetic construct
  misc_feature 1..80: note = Synthetic: >CanadaGoose-cand-4470-4549
  source 1..80: mol_type = other DNA
aatatggcacacttcatgacgcaacatggtgtttgccattgtggcggcaattttgttgatgtagttgtcgagatggatgt

SEQ ID NO: 1853 - DNA, 80 bp, synthetic construct
  misc_feature 1..80: note = Synthetic: >CanadaGoose-cand-4550-4629
  source 1..80: mol_type = other DNA
tccttacctctatctcgtaacagctgcaggtcctaaagttgtacaggctgatggtgagtcagtttttaatgcatgttttg

SEQ ID NO: 1854 - DNA, 80 bp, synthetic construct
  misc_feature 1..80: note = Synthetic: >CanadaGoose-cand-4630-4709
  source 1..80: mol_type = other DNA
aagggtcaattaactctggacatctttatgtccaagctaagggtctcgtttttgataaccttaataagaagcgtaaatat

SEQ ID NO: 1855 - DNA, 80 bp, synthetic construct
  misc_feature 1..80: note = Synthetic: >CanadaGoose-cand-4710-4789
  source 1..80: mol_type = other DNA
tctagagtttctagttatatagacgctttttattctggtgttaaatctaaagttgactgtcaagaaacatctctctcttt

SEQ ID NO: 1856 - DNA, 80 bp, synthetic construct
  misc_feature 1..80: note = Synthetic: >CanadaGoose-cand-4790-4869
  source 1..80: mol_type = other DNA
aatagagaatgttgacgaacagtcctacgaacaatggtatagtgataactattaccaatgtcttgcagtagatgattttg

SEQ ID NO: 1857 - DNA, 80 bp, synthetic construct
  misc_feature 1..80: note = Synthetic: >CanadaGoose-cand-4870-4949
  source 1..80: mol_type = other DNA
attcacctgctgatgtaaaggatgaagacacttctgtgtcgcattctactcaagtttttgttaggggtttgaaacagcca

SEQ ID NO: 1858 - DNA, 80 bp, synthetic construct
  misc_feature 1..80: note = Synthetic: >CanadaGoose-cand-4950-5029
  source 1..80: mol_type = other DNA
cttgcttttaatggtgttgtttttaatcctactgacaattctgtttatcctaagttgttgcagtctcttactgtttatga

SEQ ID NO: 1859 - DNA, 80 bp, synthetic construct
  misc_feature 1..80: note = Synthetic: >CanadaGoose-cand-5030-5109
  source 1..80: mol_type = other DNA
cttgtatactatgtggcttgaaaatgacgttaattatgttgttttaaaagctaacaagttaagtgacatgtgtggtgctg

SEQ ID NO: 1860 - DNA, 80 bp, synthetic construct
  misc_feature 1..80: note = Synthetic: >CanadaGoose-cand-5110-5189
  source 1..80: mol_type = other DNA
ccactgtacaaacgcatggttcggcagcattaaatatgttgtttactaaatctgttttacgtactgtagtttttaaaatt

SEQ ID NO: 1861 - DNA, 80 bp, synthetic construct
  misc_feature 1..80: note = Synthetic: >CanadaGoose-cand-5190-5269
  source 1..80: mol_type = other DNA
ttaaagactgctggttttgtagggtcaacagttgcatacactactactagtaatgtagcttctgttgtaagaagagcgac

SEQ ID NO: 1862 - DNA, 80 bp, synthetic construct
  misc_feature 1..80: note = Synthetic: >CanadaGoose-cand-5270-5349
  source 1..80: mol_type = other DNA
tagatctgttcaattaccctctttttcatttttaagaggttttagtttaaattttagtcgcgtctttttatggaatgttg

SEQ ID NO: 1863 - DNA, 80 bp, synthetic construct
  misc_feature 1..80: note = Synthetic: >CanadaGoose-cand-5350-5429
  source 1..80: mol_type = other DNA
ttatgtttttgtggtttggtcttaagtgtacttttcttgcacttaagcctaaacacattacaagtgtagttactggtaaa

SEQ ID NO: 1864 - DNA, 80 bp, synthetic construct
  misc_feature 1..80: note = Synthetic: >CanadaGoose-cand-5430-5509
  source 1..80: mol_type = other DNA
tttaacttgtttttaacactagttgttattggtgttgcttgttataattttactagtgtctacactatggtctttgattt

SEQ ID NO: 1865 - DNA, 80 bp, synthetic construct
  misc_feature 1..80: note = Synthetic: >CanadaGoose-cand-6790-6869
  source 1..80: mol_type = other DNA
atgccccaccggtggtttggcggtattctgaccttaagaatttgtctgaaacctgccttaaatacctcttttctggtgtt

SEQ ID NO: 1866 - DNA, 80 bp, synthetic construct
  misc_feature 1..80: note = Synthetic: >CanadaGoose-cand-6870-6949
  source 1..80: mol_type = other DNA
aataagtcaggttcgaagttttttgttactagagctgattgtaagcaggttattagttgtcatactgctaagcttattct

SEQ ID NO: 1867 - DNA, 80 bp, synthetic construct
  misc_feature 1..80: note = Synthetic: >CanadaGoose-cand-6950-7029
  source 1..80: mol_type = other DNA
tgataagaatgttaaagctggtggtgttgtgtctaatttttggacttggatttggaggttttgtttacttctaaccctcg

SEQ ID NO: 1868 - DNA, 80 bp, synthetic construct
  misc_feature 1..80: note = Synthetic: >CanadaGoose-cand-7030-7109
  source 1..80: mol_type = other DNA
tgtttgttgtttgtagtcatttgtatgttcttaatacgagtttcaatcatggtcgtgttgaaacttcttcagcaaatttt

SEQ ID NO: 1869 - DNA, 80 bp, synthetic construct
  misc_feature 1..80: note = Synthetic: >CanadaGoose-cand-7110-7189
  source 1..80: mol_type = other DNA
aaagttattgataatggtgttattcgttcaattgttaatgaggacagctgtttttctaataagtatgtacagtttgacaa

SEQ ID NO: 1870 - DNA, 80 bp, synthetic construct
  misc_feature 1..80: note = Synthetic: >CanadaGoose-cand-7190-7269
  source 1..80: mol_type = other DNA
ctttttgggcagagattatgttcaagataattcgtgtcctattgttgttgctgttaattttaatcaaggtgttatagcta

SEQ ID NO: 1871 - DNA, 80 bp, synthetic construct
  misc_feature 1..80: note = Synthetic: >CanadaGoose-cand-7270-7349
  source 1..80: mol_type = other DNA
ctggagttcctgggtttgttggttggcatgatgctaatcttatactccattccatagtggaggagttgaaagcttggtat

SEQ ID NO: 1872 - DNA, 80 bp, synthetic construct
  misc_feature 1..80: note = Synthetic: >CanadaGoose-cand-7350-7429
  source 1..80: mol_type = other DNA
gcgcctacttggtttgcagatgatgctgctttgggttttacacaagatgctgtcataaatggtgacgatttttatacttc

SEQ ID NO: 1873 - DNA, 80 bp, synthetic construct
  misc_feature 1..80: note = Synthetic: >CanadaGoose-cand-7430-7509
  source 1..80: mol_type = other DNA
agttgctatttttgcagcacgttgtttgtatcttaaaactggtactgagacactttattgttttggtggtagtgttgatg

SEQ ID NO: 1874 - DNA, 80 bp, synthetic construct
  misc_feature 1..80: note = Synthetic: >CanadaGoose-cand-7510-7589
  source 1..80: mol_type = other DNA
tttcaggtgcggaacctttttctgtattagtacctcataggttgtatttgcaaccaaatggagttaaggtttcctttcct

SEQ ID NO: 1875 - DNA, 80 bp, synthetic construct
  misc_feature 1..80: note = Synthetic: >CanadaGoose-cand-7590-7669
  source 1..80: mol_type = other DNA
aaacaattactttataatccatatgttgtacagacagttgatacaacatattgtagagctggtgtttgtgaaccatctaa

SEQ ID NO: 1876 - DNA, 80 bp, synthetic construct
  misc_feature 1..80: note = Synthetic: >CanadaGoose-cand-7670-7749
  source 1..80: mol_type = other DNA
ggctggctattgtgttagccttactggtaggtggttgttgtataatgatgattacttgcgggaatctggtaatttctgtg

SEQ ID NO: 1877 - DNA, 80 bp, synthetic construct
  misc_feature 1..80: note = Synthetic: >CanadaGoose-cand-7750-7829
  source 1..80: mol_type = other DNA
gtgggtcttggttagaattattttttaatatggttaatgcatttattgttggtgttagtcccaatatatacatgcatata

SEQ ID NO: 1878 - DNA, 80 bp, synthetic construct
  misc_feature 1..80: note = Synthetic: >CanadaGoose-cand-7830-7909
  source 1..80: mol_type = other DNA
gccatgatgtttgtcttattgtgtattgttattattttgtttttgtgtattctgaaatttcagggtatttttaaggccta

SEQ ID NO: 1879 - DNA, 80 bp, synthetic construct
  misc_feature 1..80: note = Synthetic: >CanadaGoose-cand-7910-7989
  source 1..80: mol_type = other DNA
tgctatgatggttttttctattattgtcgtttggcttataaatatttttatggttacatgttatagttacaatccctttg

SEQ ID NO: 1880 - DNA, 80 bp, synthetic construct
  misc_feature 1..80: note = Synthetic: >CanadaGoose-cand-7990-8069
  source 1..80: mol_type = other DNA
tggctataattttagccattgtatattgttattggtcattgcttgttagccgcaattttgctgttgttatgcatttgtgg

SEQ ID NO: 1881 - DNA, 80 bp, synthetic construct
  misc_feature 1..80: note = Synthetic: >CanadaGoose-cand-9350-9429
  source 1..80: mol_type = other DNA
tgaaataacaccatttagtgtcgttgagcagtgtggtggtgttgttttacaatctaaccccgtcaaacgtttttgtgttt

SEQ ID NO: 1882 - DNA, 80 bp, synthetic construct
  misc_feature 1..80: note = Synthetic: >CanadaGoose-cand-9430-9509
  source 1..80: mol_type = other DNA
ggtggtggtctaaagttatgttggctattctgatggctgttgttgttattggtggtacttttaatatagtaccaacttca

SEQ ID NO: 1883 - DNA, 80 bp, synthetic construct
  misc_feature 1..80: note = Synthetic: >CanadaGoose-cand-9510-9589
  source 1..80: mol_type = other DNA
atatttgtaccatatgttgtagtgtgttttgctgttgcgggatttatttctctaacaataaagcattctatggcatttat

SEQ ID NO: 1884 - DNA, 80 bp, synthetic construct
  misc_feature 1..80: note = Synthetic: >CanadaGoose-cand-9590-9669
  source 1..80: mol_type = other DNA
ggacacctatttgttaccggttgtctgtgttgtagctattagtgttgcagttgacgtaccgctactttataatggcttgt

SEQ ID NO: 1885 - DNA, 80 bp, synthetic construct
  misc_feature 1..80: note = Synthetic: >CanadaGoose-cand-9670-9749
  source 1..80: mol_type = other DNA
attaccaataccttaatagagtgttggaatgggctggtattgtcacttctaactttaatgtttggaagtgggttgctgct

SEQ ID NO: 1886 - DNA, 80 bp, synthetic construct
  misc_feature 1..80: note = Synthetic: >CanadaGoose-cand-9750-9829
  source 1..80: mol_type = other DNA
ggtgctactgttgctaatgcgtgtagaattattgttggttgtttttctatacgtactgcctcagatagtgctggtgtatt

SEQ ID NO: 1887 - DNA, 80 bp, synthetic construct
  misc_feature 1..80: note = Synthetic: >CanadaGoose-cand-9830-9909
  source 1..80: mol_type = other DNA
ttatgctgtattgaagctttgtactattttagtcacagcttatcgtttaggtgcagcttatgctgctagtgattatgacc

SEQ ID NO: 1888 - DNA, 80 bp, synthetic construct
  misc_feature 1..80: note = Synthetic: >CanadaGoose-cand-9910-9989
  source 1..80: mol_type = other DNA
aattcttggtcttgttgcatactaatttggttgccacttttagtggtaatgcactttttggtattgtatcttttaatgtc

SEQ ID NO: 1889 - DNA, 80 bp, synthetic construct
  misc_feature 1..80: note = Synthetic: >CanadaGoose-cand-9990-10069
  source 1..80: mol_type = other DNA
attaggtattgtgttagttggctgtaccctataccagtgactagttattttatggttggcattcttaatgtcacctttgg

SEQ ID NO: 1890 - DNA, 80 bp, synthetic construct
  misc_feature 1..80: note = Synthetic: >CanadaGoose-cand-10070-10149
  source 1..80: mol_type = other DNA
ttggttctgctgctgttattttggactttactggtggcttaatagggtctttggttttaccctaggtcgctacgtatata

SEQ ID NO: 1891 - DNA, 80 bp, synthetic construct
  misc_feature 1..80: note = Synthetic: >CanadaGoose-cand-10150-10229
  source 1..80: mol_type = other DNA
aggttagtgttgaacagtataagtatatgaatgtccataagattagatccccgcgtaatgcatgggatgtcttctggact

SEQ ID NO: 1892 - DNA, 80 bp, synthetic construct
  misc_feature 1..80: note = Synthetic: >CanadaGoose-cand-10230-10309
  source 1..80: mol_type = other DNA
aatacacttattgctggcataggtggtgagcgtgtcttacctgttgcatatgttcaatctaaattgactgatgttaaatg

SEQ ID NO: 1893 - DNA, 80 bp, synthetic construct
  misc_feature 1..80: note = Synthetic: >CanadaGoose-cand-10310-10389
  source 1..80: mol_type = other DNA
tagtgctgttgtccttatgcagcttcttactaagcttaatattgaggcaaattctagggtacataaacaccttgttgaat

SEQ ID NO: 1894 - DNA, 80 bp, synthetic construct
  misc_feature 1..80: note = Synthetic: >CanadaGoose-cand-10390-10469
  source 1..80: mol_type = other DNA
tgcacaataagcttcttgctgaagaagatctagtcaaatgtatggaatatttgttgggtatgcttgtaactttgttagct

SEQ ID NO: 1895 - DNA, 80 bp, synthetic construct
  misc_feature 1..80: note = Synthetic: >CanadaGoose-cand-10470-10549
  source 1..80: mol_type = other DNA
atggatgctaatttggatttgcagccatattgtgaggatgtccttactaataatactgtcttgcaggcagtcgttagtga

SEQ ID NO: 1896 - DNA, 80 bp, synthetic construct
  misc_feature 1..80: note = Synthetic: >CanadaGoose-cand-10550-10629
  source 1..80: mol_type = other DNA
gttttcacatataccttcttatactgactatgaaaaggctagagcagcctatgaagaaattcaagctcaggttaagcgag

SEQ ID NO: 1897 - DNA, 80 bp, synthetic construct
  misc_feature 1..80: note = Synthetic: >HKU10-cand-26880-26959
  source 1..80: mol_type = other DNA
ttgtaagtgcaatcctttggttagttgtgttgttgtttgttctactaattgctgttactgtaattaaattaattcaatta

SEQ ID NO: 1898 - DNA, 80 bp, synthetic construct
  misc_feature 1..80: note = Synthetic: >HKU10-cand-26960-27039
  source 1..80: mol_type = other DNA
tgctttacatgtcacaagcttatgagcaacacaatttatgtgcctgtttatagtgcttatgttatgtataaaaattttat

SEQ ID NO: 1899 - DNA, 80 bp, synthetic construct
  misc_feature 1..80: note = Synthetic: >HKU10-cand-27040-27119
  source 1..80: mol_type = other DNA
gcaaatagatccttgcccagttatagatgtctaaacgactaaatgtcgactgatgataatgagacaattcctctcgacca

SEQ ID NO: 1900 - DNA, 80 bp, synthetic construct
  misc_feature 1..80: note = Synthetic: >HKU10-cand-27120-27199
  source 1..80: mol_type = other DNA
ggtggtcgaacatctaagaaattggaatttcagttggaatgtaattcttacaatatttctagttgtcctgcaatatggac

SEQ ID NO: 1901 - DNA, 80 bp, synthetic construct
  misc_feature 1..80: note = Synthetic: >HKU10-cand-27200-27279
  source 1..80: mol_type = other DNA
actacaaatatagtgctgtgctttacatcctgaaaatgacaattctgtggctgctgtggcctcttgtacttgccctgtca

SEQ ID NO: 1902 - DNA, 80 bp, synthetic construct
  misc_feature 1..80: note = Synthetic: >HKU10-cand-27360-27439
  source 1..80: mol_type = other DNA
gctgtggataatgtattttgtcaacagtttcaggctgtaccgcagaaccaacactttctgggcctttaacccggaaactg

SEQ ID NO: 1903 - DNA, 80 bp, synthetic construct
  misc_feature 1..80: note = Synthetic: >HKU10-cand-27440-27519
  source 1..80: mol_type = other DNA
atgccattatcacactgtccgtctttggtcgccaagtttcaattccagcccttgtggctccaactggcatcacgctcact

SEQ ID NO: 1904 - DNA, 80 bp, synthetic construct
  misc_feature 1..80: note = Synthetic: >HKU10-cand-27520-27599
  source 1..80: mol_type = other DNA
gtgttaagtggtacactcctagtggaaggcattaaggttgctactggtgtgcaggtaaatcaattacctacgtacatcac

SEQ ID NO: 1905 - DNA, 80 bp, synthetic construct
  misc_feature 1..80: note = Synthetic: >HKU10-cand-27600-27679
  source 1..80: mol_type = other DNA
tgttgccaagcctagcaccacaattgtgtaccaacgtgctggacgttcgctcaacacgcgctcaaacacaggttgggcgt

SEQ ID NO: 1906 - DNA, 80 bp, synthetic construct
  misc_feature 1..80: note = Synthetic: >HKU10-cand-27680-27759
  source 1..80: mol_type = other DNA
tttatgtcagatcgaaaaatggcgactactctgctgtaacgagttctgctgattcgcttacagaagacgagaaactttta

SEQ ID NO: 1907 - DNA, 80 bp, synthetic construct
  misc_feature 1..80: note = Synthetic: >HKU10-cand-27760-27839
  source 1..80: mol_type = other DNA
catttagtctaaactaaacaaaaatggcctcaggtggcaataatgttagctttgctaacaaacccagaggccggagtggc

SEQ ID NO: 1908 - DNA, 80 bp, synthetic construct
  misc_feature 1..80: note = Synthetic: >HKU10-cand-27840-27919
  source 1..80: mol_type = other DNA
agagtccctctgtcttattattctcctgtcatgattgacggagatcaacccttttggaaggtgatgcccactaatgctgt

SEQ ID NO: 1909 - DNA, 80 bp, synthetic construct
  misc_feature 1..80: note = Synthetic: >HKU10-cand-27920-27999
  source 1..80: mol_type = other DNA
accaacaaatggcatgggtgacaaaaatcaacaaattggctattggaatgaacaaccccgttggagaatggtcaaaggcc

SEQ ID NO: 1910 - DNA, 80 bp, synthetic construct
  misc_feature 1..80: note = Synthetic: >HKU10-cand-28000-28079
  source 1..80: mol_type = other DNA
agcgtaaggagttgccgtctaagtggcacttttattaccttggtactggaccacaagaagatgcacgctaccgtcaaaga

SEQ ID NO: 1911 - DNA, 80 bp, synthetic construct
  misc_feature 1..80: note = Synthetic: >HKU10-cand-28080-28159
  source 1..80: mol_type = other DNA
attgaaggtgtgttttgggttgctgtacagggttcaaagactgatcctaccggcttgggaactcgcaggaagggtcagga

SEQ ID NO: 1912 - DNA, 80 bp, synthetic construct
  misc_feature 1..80: note = Synthetic: >HKU25-cand-12830-12909
  source 1..80: mol_type = other DNA
gtctggaatcaagttgttacgtacccatcatttaattatgctggggctctatgggatatagtttctattagtaatgtgga

SEQ ID NO: 1913 - DNA, 80 bp, synthetic construct
  misc_feature 1..80: note = Synthetic: >HKU25-cand-12910-12989
  source 1..80: mol_type = other DNA
taacgagataatcaaatcctcagatgtttcagaaaacaatgagcatttgacttggccacttgtcttagaatgcactagag

SEQ ID NO: 1914 - DNA, 80 bp, synthetic construct
  misc_feature 1..80: note = Synthetic: >HKU25-cand-12990-13069
  source 1..80: mol_type = other DNA
ctgcagcttctgcggttaaattgcaaaataatgagattaggcctactggacttaaaactatggttgtaagtgcaggttta

SEQ ID NO: 1915 - DNA, 80 bp, synthetic construct
  misc_feature 1..80: note = Synthetic: >HKU25-cand-13070-13149
  source 1..80: mol_type = other DNA
gatcaaacctcatttaatgtaaactccttggcatattatgaacctgttcaaggacgtaaaatgctaatgggcgtgctttc

SEQ ID NO: 1916 - DNA, 80 bp, synthetic construct
  misc_feature 1..80: note = Synthetic: >HKU25-cand-13150-13229
  source 1..80: mol_type = other DNA
tgacaatgcatatctcaaatatgctaaggttgaaggccaggatgggtttgttaccgttgagttgcaacctccttgcaaat

SEQ ID NO: 1917 - DNA, 80 bp, synthetic construct
  misc_feature 1..80: note = Synthetic: >HKU25-cand-13230-13309
  source 1..80: mol_type = other DNA
ttttgattgctggtcctaaaggtcctgaaatccgttatctctattttgttaaaaatttaaacaaccttcatagaggacag

SEQ ID NO: 1918 - DNA, 80 bp, synthetic construct
  misc_feature 1..80: note = Synthetic: >HKU25-cand-13310-13389
  source 1..80: mol_type = other DNA
cttctcggtcatatagctgccactgttaaattacaggctggttctaatacagaatttgctgctaattcctcagtgttgtc

SEQ ID NO: 1919 - DNA, 80 bp, synthetic construct
  misc_feature 1..80: note = Synthetic: >HKU25-cand-13390-13469
  source 1..80: mol_type = other DNA
tcttgttaccttcactgttgatcctaaaaaagcttacatggactttgttaatgcgggcggtgctcctttaactaactgtg

SEQ ID NO: 1920 - DNA, 80 bp, synthetic construct
  misc_feature 1..80: note = Synthetic: >HKU25-cand-13470-13549
  source 1..80: mol_type = other DNA
taaagatgctgactcctaagactggtacaggtatcgctatatctgtcaagcctgagagtaatgcagatcaagaaacttac

SEQ ID NO: 1921 - DNA, 80 bp, synthetic construct
  misc_feature 1..80: note = Synthetic: >HKU25-cand-13550-13629
  source 1..80: mol_type = other DNA
ggcggagcctcagtctgtctctattgtcgtgcacatatagagcatcctgatgtttctggcgtttgtaaatataagggtag

SEQ ID NO: 1922 - DNA, 80 bp, synthetic construct
  misc_feature 1..80: note = Synthetic: >HKU25-cand-13630-13709
  source 1..80: mol_type = other DNA
attcgtgcagataccatcacagtgtactcgtgatcctgttggtttctgcttaatgaatgacccgtgtcaactttgtcaat

SEQ ID NO: 1923 - DNA, 80 bp, synthetic construct
  misc_feature 1..80: note = Synthetic: >HKU25-cand-13710-13789
  source 1..80: mol_type = other DNA
attggaaaggacatggctgcaactgcgactcacttagagaagcagcgctgccacaatccaaggattccaattttttaaac

SEQ ID NO: 1924 - DNA, 80 bp, synthetic construct
  misc_feature 1..80: note = Synthetic: >HKU25-cand-13790-13869
  source 1..80: mol_type = other DNA
gagtccggggttctattgtaaatgcccgaatagaaccctgtgcaagtggtttggccactgatgtcgtttatagggcattt

SEQ ID NO: 1925 - DNA, 80 bp, synthetic construct
  misc_feature 1..80: note = Synthetic: >HKU25-cand-13870-13949
  source 1..80: mol_type = other DNA
gacatctgcaactataaggctaaggttgctggtataggaaaatactacaagactaatacttgtaggtttgttgaaaaaga

SEQ ID NO: 1926 - DNA, 80 bp, synthetic construct
  misc_feature 1..80: note = Synthetic: >HKU25-cand-13950-14029
  source 1..80: mol_type = other DNA
tgaccaaggtcatccattagactcctattttgtggttaaacgccacactatggagaattatgaacttgagaagaagtgtt

SEQ ID NO: 1927 - DNA, 80 bp, synthetic construct
  misc_feature 1..80: note = Synthetic: >HKU25-cand-14030-14109
  source 1..80: mol_type = other DNA
atgagcttctcaaggattgtgatgctgttgcgcgtcatgatttctttgtgtttgacgttgataaggtcaaaactcctcac

SEQ ID NO: 1928 - DNA, 80 bp, synthetic construct
  misc_feature 1..80: note = Synthetic: >HKU8-cand-9030-9109
  source 1..80: mol_type = other DNA
caaactttattctgatctggttccacattcacactataagatggaagatggtaattttgttaaattgcctgaaacacttg

SEQ ID NO: 1929 - DNA, 80 bp, synthetic construct
  misc_feature 1..80: note = Synthetic: >HKU8-cand-9110-9189
  source 1..80: mol_type = other DNA
ctcgtggctttggtttagtcaccattaaaacaatggaaactacctattgtcgcgttggtgagtgtcttgaatctaaggct

SEQ ID NO: 1930 - DNA, 80 bp, synthetic construct
  misc_feature 1..80: note = Synthetic: >HKU8-cand-9190-9269
  source 1..80: mol_type = other DNA
ggtgtgtgttttggtgttgataggttctttgtttataatactgactttggtggcgattacatttgtggttctggcttttt

SEQ ID NO: 1931 - DNA, 80 bp, synthetic construct
  misc_feature 1..80: note = Synthetic: >HKU8-cand-9270-9349
  source 1..80: mol_type = other DNA
gtcatttttcagaaatgttcttagcatttttacaaggtcattttctgttatggctttgtcaggacaggtcatgtttaatt

SEQ ID NO: 1932 - DNA, 80 bp, synthetic construct
  misc_feature 1..80: note = Synthetic: >HKU8-cand-9350-9429
  source 1..80: mol_type = other DNA
gtattgttgcagctatggcagttgtcgtgtgctttcttgttataaagtttaagcgcatgtttggtgatctgtctatgggt

SEQ ID NO: 1933 - DNA, 80 bp, synthetic construct
  misc_feature 1..80: note = Synthetic: >HKU8-cand-9430-9509
  source 1..80: mol_type = other DNA
gtttgtactgtcgttgctgctgtaattattaacaatgtttcttatatttttacacaaaacatgttgttcatgtttttgta

SEQ ID NO: 1934 - DNA, 80 bp, synthetic construct
  misc_feature 1..80: note = Synthetic: >HKU8-cand-9510-9589
  source 1..80: mol_type = other DNA
tgcaatattttactttttggctgttaaaggtcttaattatgcttggatttggcatgttggatatgttgttgcctatttta

SEQ ID NO: 1935 - DNA, 80 bp, synthetic construct
  misc_feature 1..80: note = Synthetic: >HKU8-cand-9590-9669
  source 1..80: mol_type = other DNA
ccctggcaccatggtttttggttgcatggtatttgggtgctacggctattgatgttttgccagctgtcttaaagcttaag

SEQ ID NO: 1936 - DNA, 80 bp, synthetic construct
  misc_feature 1..80: note = Synthetic: >HKU8-cand-9670-9749
  source 1..80: mol_type = other DNA
atctctactcagttgtttgaaggtgataagtttgttggtacatttgagactgcagcttatggcacttttgtcctagacat

SEQ ID NO: 1937 - DNA, 80 bp, synthetic construct
  misc_feature 1..80: note = Synthetic: >HKU8-cand-9750-9829
  source 1..80: mol_type = other DNA
gcgttcctatgagaaacttgttaatagtattactatggataagattaaacagtatgccgccacttataataagtataagt

SEQ ID NO: 1938 - DNA, 80 bp, synthetic construct
  misc_feature 1..80: note = Synthetic: >HKU8-cand-9830-9909
  source 1..80: mol_type = other DNA
attatagtggtagtgcttctgaggctgattacagatgcgcatgttttgcacatctagctaaggctttgcttgcttatgct

SEQ ID NO: 1939 - DNA, 80 bp, synthetic construct
  misc_feature 1..80: note = Synthetic: >HKU8-cand-9910-9989
  source 1..80: mol_type = other DNA
gaaaatcaccaagacatgctgtacacacctccatctattagttataatagaactttgcagagtggtcttaagaaaatggc

SEQ ID NO: 1940 - DNA, 80 bp, synthetic construct
  misc_feature 1..80: note = Synthetic: >HKU8-cand-9990-10069
  source 1..80: mol_type = other DNA
tcaaccttcaggtataattgaacattgcgttgtgcgtgtctgttatggtaacatgactcttaatggtatttggttgggtg

SEQ ID NO: 1941 - DNA, 80 bp, synthetic construct
  misc_feature 1..80: note = Synthetic: >HKU8-cand-10070-10149
  source 1..80: mol_type = other DNA
atgttgttatttgtcctagacatgtgatagcctcgtctactaatactaccattgattatgagcatgagtatactatgatg

SEQ ID NO: 1942 - DNA, 80 bp, synthetic construct
  misc_feature 1..80: note = Synthetic: >HKU8-cand-10150-10229
  source 1..80: mol_type = other DNA
cgtctgcacaatttctctgtgtctgttggtaatgtttttattggcgttaatggtgttacaatgaaaggtgttaacttgca

SEQ ID NO: 1943 - DNA, 80 bp, synthetic construct
  misc_feature 1..80: note = Synthetic: >HKU8-cand-10230-10309
  source 1..80: mol_type = other DNA
tattaaagttaaccagtctaacccacatacgcctaaacatgcttttagaactctaaaacctggtgattcatttaatattt

SEQ ID NO: 1944 - DNA, 80 bp, synthetic construct
  misc_feature 1..80: note = Synthetic: >MurineCoV-cand-6350-6429
  source 1..80: mol_type = other DNA
ttttaatagacctagtgtcgtttgtgaaaataaatttaatgtgttgcccgttgatgtcagtgaacccacggacaaggggc

SEQ ID NO: 1945 - DNA, 80 bp, synthetic construct
  misc_feature 1..80: note = Synthetic: >MurineCoV-cand-6430-6509
  source 1..80: mol_type = other DNA
ctgtgcctgctgcagtccttgttaccggcgtcccgagtggagctgatgcgtcagctatatccaccggtgccggtattgcc

SEQ ID NO: 1946 - DNA, 80 bp, synthetic construct
  misc_feature 1..80: note = Synthetic: >MurineCoV-cand-6510-6589
  source 1..80: mol_type = other DNA
aaggagcaaaaagcctgtgcttctgctagtgtggaggatcaggttgttacggaggttcgtcaagagccatctgtttcagc

SEQ ID NO: 1947 - DNA, 80 bp, synthetic construct
  misc_feature 1..80: note = Synthetic: >MurineCoV-cand-6590-6669
  source 1..80: mol_type = other DNA
tgctgatgtcaaagaggttaaattgaatggtgttaaaaagcctgttaaggtggaaggtagtgtggttgttaatgatccca

SEQ ID NO: 1948 - DNA, 80 bp, synthetic construct
  misc_feature 1..80: note = Synthetic: >MurineCoV-cand-6670-6749
  source 1..80: mol_type = other DNA
ctagcgaaaccaaagttgttaaaagtttgtctattgttgatgtctatgatatgttcctgacagggtgtaagtatgtggtt

SEQ ID NO: 1949 - DNA, 80 bp, synthetic construct
  misc_feature 1..80: note = Synthetic: >MurineCoV-cand-6750-6829
  source 1..80: mol_type = other DNA
tggactgctaatgagttgtctcgactagtaaattcaccgactgttagggagtatgtgaagtggggtatgggaaagattgt

SEQ ID NO: 1950 - DNA, 80 bp, synthetic construct
  misc_feature 1..80: note = Synthetic: >MurineCoV-cand-6830-6909
  source 1..80: mol_type = other DNA
aacacccgctaagttgttgttgttaagagatgagaagcaagagttcgtagcgccaaaagtagtcaaggcgaaagctattg

SEQ ID NO: 1951 - DNA, 80 bp, synthetic construct
  misc_feature 1..80: note = Synthetic: >MurineCoV-cand-6910-6989
  source 1..80: mol_type = other DNA
cctgctattgtgctgtgaagtggtttctcctctattgttttagttggataaagtttaatactgataataaggttatatac

SEQ ID NO: 1952 - DNA, 80 bp, synthetic construct
  misc_feature 1..80: note = Synthetic: >MurineCoV-cand-6990-7069
  source 1..80: mol_type = other DNA
accacagaagtagcttcaaagcttactttcaagttgtgctgtttggcctttaagaatgccttacagacgtttaattggag

SEQ ID NO: 1953 - DNA, 80 bp, synthetic construct
  misc_feature 1..80: note = Synthetic: >MurineCoV-cand-7070-7149
  source 1..80: mol_type = other DNA
cgttgtgtctaggggctttttcctagttgcaacggtctttttattatggtttaactttttgtatgctaatgttattttga

SEQ ID NO: 1954 - DNA, 80 bp, synthetic construct
  misc_feature 1..80: note = Synthetic: >MurineCoV-cand-7150-7229
  source 1..80: mol_type = other DNA
gtgacttctatttgcctaatattgggcctctccctacgtttgtgggacagatagttgcgtggtttaagactacatttggt

SEQ ID NO: 1955 - DNA, 80 bp, synthetic construct
  misc_feature 1..80: note = Synthetic: >MurineCoV-cand-7240-7319
  source 1..80: mol_type = other DNA
tctgtgatttctaccaggtgacggatttgggctatagaagttcgttttgtaatggaagtatggtatgtgaactatgcttc

SEQ ID NO: 1956 - DNA, 80 bp, synthetic construct
  misc_feature 1..80: note = Synthetic: >MurineCoV-cand-7320-7399
  source 1..80: mol_type = other DNA
tcaggttttgatatgctggacaactatgatgctataaatgttgttcaacacgttgtagataggcgtttgtcctttgacta

SEQ ID NO: 1957 - DNA, 80 bp, synthetic construct
  misc_feature 1..80: note = Synthetic: >MurineCoV-cand-7400-7479
  source 1..80: mol_type = other DNA
tattagcctatttaaattagtagttgagcttgtaatcggctactctctttatactgtgtgcttctacccactgtttgtcc

SEQ ID NO: 1958 - DNA, 80 bp, synthetic construct
  misc_feature 1..80: note = Synthetic: >MurineCoV-cand-7480-7559
  source 1..80: mol_type = other DNA
ttattggaatgcagttgttgaccacatggttgcctgaattctttatgctggagactatgcattggagtgctcgtttgttt

SEQ ID NO: 1959 - DNA, 80 bp, synthetic construct
  misc_feature 1..80: note = Synthetic: >MurineCoV-cand-7560-7639
  source 1..80: mol_type = other DNA
gtgtttgttgccaatatgcttccagcttttacgttactgcgattttacatcgtggtgacagctatgtataaggtctattg

SEQ ID NO: 1960 - DNA, 80 bp, synthetic construct
  misc_feature 1..80: note = Synthetic: >MurineCoV-cand-16650-16729
  source 1..80: mol_type = other DNA
tggtttttggtttatataaacaatcttgtactggttcgccctacatagaggattttaataaaatagctagttgcaaatgg

SEQ ID NO: 1961 - DNA, 80 bp, synthetic construct
  misc_feature 1..80: note = Synthetic: >MurineCoV-cand-16730-16809
  source 1..80: mol_type = other DNA
acagaagtcgatgattatgtgctagctaatgaatgcaccgaacgccttaaattgtttgccgcagaaacgcagaaggccac

SEQ ID NO: 1962 - DNA, 80 bp, synthetic construct
  misc_feature 1..80: note = Synthetic: >MurineCoV-cand-16810-16889
  source 1..80: mol_type = other DNA
agaagaggcctttaagcaatgttatgcgtcagcaacgatccgtgagatcgtgagcgatcgggagttaattttatcttggg

SEQ ID NO: 1963 - DNA, 80 bp, synthetic construct
  misc_feature 1..80: note = Synthetic: >MurineCoV-cand-16890-16969
  source 1..80: mol_type = other DNA
aaattggtaaagtgagaccaccacttaataaaaattatgtttttactggctaccattttactaataatggtaagacagtt

SEQ ID NO: 1964 - DNA, 80 bp, synthetic construct
  misc_feature 1..80: note = Synthetic: >MurineCoV-cand-16970-17049
  source 1..80: mol_type = other DNA
ttaggtgagtatgtttttgataagagtgagttgactaatggtgtgtattatcgcgccacaaccacttataagttatctgt

SEQ ID NO: 1965 - DNA, 80 bp, synthetic construct
  misc_feature 1..80: note = Synthetic: >MurineCoV-cand-17050-17129
  source 1..80: mol_type = other DNA
aggtgatgtgttcattttaacatcacacgcagtgtctagtttaagtgctcctacattagtaccgcaggagaattatacta

SEQ ID NO: 1966 - DNA, 80 bp, synthetic construct
  misc_feature 1..80: note = Synthetic: >MurineCoV-cand-17130-17209
  source 1..80: mol_type = other DNA
gcattcgttttgctagtgtttatagtgtgcctgagacgtttcagaataatgtgcctaattatcagcacattggaatgaag

SEQ ID NO: 1967 - DNA, 80 bp, synthetic construct
  misc_feature 1..80: note = Synthetic: >MurineCoV-cand-17210-17289
  source 1..80: mol_type = other DNA
cgctattgtactgtacagggaccgcctggtactggtaagtcccatctagccattgggctagctgtttattattgtacagc

SEQ ID NO: 1968 - DNA, 80 bp, synthetic construct
  misc_feature 1..80: note = Synthetic: >MurineCoV-cand-17290-17369
  source 1..80: mol_type = other DNA
gcgcgtggtgtataccgctgctagccatgctgcagttgacgcgctgtgtgaaaaggcacataaatttttaaatattaatg

SEQ ID NO: 1969 - DNA, 80 bp, synthetic construct
  misc_feature 1..80: note = Synthetic: >MurineCoV-cand-17370-17449
  source 1..80: mol_type = other DNA
actgcacgcgtattgttcctgcaaaggtgcgtgtagattgttatgataaatttaaggtcaatgacaccactcgcaagtat

SEQ ID NO: 1970 - DNA, 80 bp, synthetic construct
  misc_feature 1..80: note = Synthetic: >MurineCoV-cand-17450-17529
  source 1..80: mol_type = other DNA
gtgtttactacaataaatgcattacctgagttggtgactgacattattgtcgttgatgaagttagtatgcttaccaacta

SEQ ID NO: 1971 - DNA, 80 bp, synthetic construct
  misc_feature 1..80: note = Synthetic: >MurineCoV-cand-17530-17609
  source 1..80: mol_type = other DNA
tgagctgtctgttattaacagtcgtgttagggctaagcattatgtgtatattggagaccctgcgcagttacctgcaccac

SEQ ID NO: 1972 - DNA, 80 bp, synthetic construct
  misc_feature 1..80: note = Synthetic: >MurineCoV-cand-17610-17689
  source 1..80: mol_type = other DNA
gtgtgctactgaataagggaactctagaacctagatattttaattccgttaccaagctaatgtgttgtttgggtccagat

SEQ ID NO: 1973 - DNA, 80 bp, synthetic construct
  misc_feature 1..80: note = Synthetic: >MurineCoV-cand-17690-17769
  source 1..80: mol_type = other DNA
attttcttgggcacctgttatagatgccctaaggagattgtggatacggtgtcagccttggtttataataataagctgaa

SEQ ID NO: 1974 - DNA, 80 bp, synthetic construct
  misc_feature 1..80: note = Synthetic: >MurineCoV-cand-17770-17849
  source 1..80: mol_type = other DNA
ggctaaaaatgataatagctccatgtgctttaaggtttattataagggccagactacacatgagagttctagtgctgtta

SEQ ID NO: 1975 - DNA, 80 bp, synthetic construct
  misc_feature 1..80: note = Synthetic: >MurineCoV-cand-17850-17929
  source 1..80: mol_type = other DNA
atatgcagcaaatacatttaattagtaagtttttaaaggcaaaccccagttggagtaacgccgtatttattagtccttat

SEQ ID NO: 1976 - DNA, 80 bp, synthetic construct
  misc_feature 1..80: note = Synthetic: >SARSCoV2-cand-9700-9779
  source 1..80: mol_type = other DNA
gtatttccacaaagcatttctattggttctttagtaattacctaaagagacgtgtagtctttaatggtgtttcctttagt

SEQ ID NO: 1977 - DNA, 80 bp, synthetic construct
  misc_feature 1..80: note = Synthetic: >SARSCoV2-cand-9780-9859
  source 1..80: mol_type = other DNA
acttttgaagaagctgcgctgtgcacctttttgttaaataaagaaatgtatctaaagttgcgtagtgatgtgctattacc

SEQ ID NO: 1978 - DNA, 80 bp, synthetic construct
  misc_feature 1..80: note = Synthetic: >SARSCoV2-cand-9860-9939
  source 1..80: mol_type = other DNA
tcttacgcaatataatagatacttagctctttataataagtacaagtattttagtggagcaatggatacaactagctaca

SEQ ID NO: 1979 - DNA, 80 bp, synthetic construct
  misc_feature 1..80: note = Synthetic: >SARSCoV2-cand-9940-10019
  source 1..80: mol_type = other DNA
gagaagctgcttgttgtcatctcgcaaaggctctcaatgacttcagtaactcaggttctgatgttctttaccaaccacca

SEQ ID NO: 1980 - DNA, 80 bp, synthetic construct
  misc_feature 1..80: note = Synthetic: >SARSCoV2-cand-10020-10099
  source 1..80: mol_type = other DNA
caaacctctatcacctcagctgttttgcagagtggttttagaaaaatggcattcccatctggtaaagttgagggttgtat

SEQ ID NO: 1981 - DNA, 80 bp, synthetic construct
  misc_feature 1..80: note = Synthetic: >SARSCoV2-cand-10100-10179
  source 1..80: mol_type = other DNA
ggtacaagtaacttgtggtacaactacacttaacggtctttggcttgatgacgtagtttactgtccaagacatgtgatct

SEQ ID NO: 1982 - DNA, 80 bp, synthetic construct
  misc_feature 1..80: note = Synthetic: >SARSCoV2-cand-10180-10259
  source 1..80: mol_type = other DNA
gcacctctgaagacatgcttaaccctaattatgaagatttactcattcgtaagtctaatcataatttcttggtacaggct

SEQ ID NO: 1983 - DNA, 80 bp, synthetic construct
  misc_feature 1..80: note = Synthetic: >SARSCoV2-cand-10260-10339
  source 1..80: mol_type = other DNA
ggtaatgttcaactcagggttattggacattctatgcaaaattgtgtacttaagcttaaggttgatacagccaatcctaa

SEQ ID NO: 1984 - DNA, 80 bp, synthetic construct
  misc_feature 1..80: note = Synthetic: >SARSCoV2-cand-10340-10419
  source 1..80: mol_type = other DNA
gacacctaagtataagtttgttcgcattcaaccaggacagactttttcagtgttagcttgttacaatggttcaccatctg

SEQ ID NO: 1985 - DNA, 80 bp, synthetic construct
  misc_feature 1..80: note = Synthetic: >SARSCoV2-cand-10420-10499
  source 1..80: mol_type = other DNA
gtgtttaccaatgtgctatgaggcccaatttcactattaagggttcattccttaatggttcatgtggtagtgttggtttt

SEQ ID NO: 1986 - DNA, 80 bp, synthetic construct
  misc_feature 1..80: note = Synthetic: >SARSCoV2-cand-10500-10579
  source 1..80: mol_type = other DNA
aacatagattatgactgtgtctctttttgttacatgcaccatatggaattaccaactggagttcatgctggcacagactt

SEQ ID NO: 1987 - DNA, 80 bp, synthetic construct
  misc_feature 1..80: note = Synthetic: >SARSCoV2-cand-10580-10659
  source 1..80: mol_type = other DNA
agaaggtaacttttatggaccttttgttgacaggcaaacagcacaagcagctggtacggacacaactattacagttaatg

SEQ ID NO: 1988 - DNA, 80 bp, synthetic construct
  misc_feature 1..80: note = Synthetic: >SARSCoV2-cand-10660-10739
  source 1..80: mol_type = other DNA
ttttagcttggttgtacgctgctgttataaatggagacaggtggtttctcaatcgatttaccacaactcttaatgacttt

SEQ ID NO: 1989 - DNA, 80 bp, synthetic construct
  misc_feature 1..80: note = Synthetic: >SARSCoV2-cand-10740-10819
  source 1..80: mol_type = other DNA
aaccttgtggctatgaagtacaattatgaacctctaacacaagaccatgttgacatactaggacctctttctgctcaaac

SEQ ID NO: 1990 - DNA, 80 bp, synthetic construct
  misc_feature 1..80: note = Synthetic: >SARSCoV2-cand-10820-10899
  source 1..80: mol_type = other DNA
tggaattgccgttttagatatgtgtgcttcattaaaagaattactgcaaaatggtatgaatggacgtaccatattgggta

SEQ ID NO: 1991 - DNA, 80 bp, synthetic construct
  misc_feature 1..80: note = Synthetic: >SARSCoV2-cand-10900-10979
  source 1..80: mol_type = other DNA
gtgctttattagaagatgaatttacaccttttgatgttgttagacaatgctcaggtgttactttccaaagtgcagtgaaa

SEQ ID NO: 1992 - DNA, 80 bp, synthetic construct
  misc_feature 1..80: note = Synthetic: >Alpha2-cand-12300-12379
  source 1..80: mol_type = other DNA
ggtacaagccctgattgtgttacaagggcttttgatgtttacaatgctgatgtggcatgcattggtaagtttcttaaaac

SEQ ID NO: 1993 - DNA, 80 bp, synthetic construct
  misc_feature 1..80: note = Synthetic: >AlphaMink-cand-12310-12389
  source 1..80: mol_type = other DNA
cggtacaagccctgactgtgttacaagggcttttgatgtttacaatgctgatgtggcatgcattggtaagtttcttaaaa

SEQ ID NO: 1994 - DNA, 80 bp, synthetic construct
  misc_feature 1..80: note = Synthetic: >BatCoV1A-cand-26140-26219
  source 1..80: mol_type = other DNA
agactttgttctaacacggtatacagacctgtatataaagcttacaaaatttatcaagattatatgcaaattgaaccact

SEQ ID NO: 1995 - DNA, 80 bp, synthetic construct
  misc_feature 1..80: note = Synthetic: >MsbCoV1-cand-25960-26039
  source 1..80: mol_type = other DNA
gtcatagactttgttctaacactgtatacagacctgtttacaaagcctacaaaatttatcaagattatatgcaaattgaa

SEQ ID NO: 1996 - DNA, 80 bp, synthetic construct
  misc_feature 1..80: note = Synthetic: >MbCoV1-cand-25970-26049
  source 1..80: mol_type = other DNA
atagactttgttctaacactgtgtacaaacctgtttataaagcctacaaaatttatcaagattatatgcaaattgaaccg

SEQ ID NO: 1997 - DNA, 80 bp, synthetic construct
  misc_feature 1..80: note = Synthetic: >Quail-cand-12740-12819
  source 1..80: mol_type = other DNA
tattctgtcttgaagtagcagacaagtatcttgaaccctacgaaggtggttgtattaatgcacagtctgttgtggtctct

SEQ ID NO: 1998 - DNA, 80 bp, synthetic construct
  misc_feature 1..80: note = Synthetic: >Sparrow-cand-12830-12909
  source 1..80: mol_type = other DNA
cgaagtagcagacaagtaccttgaaccctacgaaggtggttgtattaatgcacagtctgttgtggtctctaatttggaca

SEQ ID NO: 1999 - DNA, 80 bp, synthetic construct
  misc_feature 1..80: note = Synthetic: >HKU18-cand-12830-12909
  source 1..80: mol_type = other DNA
gaagtagcagataagtatctcaccccttatgaaggtggatgtattaatgcacagtctgttgtggtctctaatttggacaa

SEQ ID NO: 2000 - DNA, 80 bp, synthetic construct
  misc_feature 1..80: note = Synthetic: >Sb512-cand-11390-11469
  source 1..80: mol_type = other DNA
atggttctccaccccagttggtcaagcaactcagacatgctatgaatgtggcaaagagtgaatttgaccgtgaagcatct

SEQ ID NO: 2001 - DNA, 80 bp, synthetic construct
  misc_feature 1..80: note = Synthetic: >Sk512R-cand-11380-11459
  source 1..80: mol_type = other DNA
ctaatggttctccaccccagttggtcaagcaacttagacatgctatgaatgtggcaaagagtgaatttgaccgtgaagca

SEQ ID NO: 2002 - DNA, 80 bp, synthetic construct
  misc_feature 1..80: note = Synthetic: >BtSk_AlphaCoV-cand-11350-11429
  source 1..80: mol_type = other DNA
ttctccaccccagttggtcaagcaactcagacatgctatgaacgtggcaaagagtgaatttgaccgtgaagcatctacac

SEQ ID NO: 2003 - DNA, 80 bp, synthetic construct
  misc_feature 1..80: note = Synthetic: >BtSk_AlphaCoV-cand-13810-13889
  source 1..80: mol_type = other DNA
agattctatgacttcttgcgaagccaaggtttctttgaagaaggttctgagttaactttaaagcatttctttttcgctca

SEQ ID NO: 2004 - DNA, 80 bp, synthetic construct
  misc_feature 1..80: note = Synthetic: >Sb512-cand-13860-13939
  source 1..80: mol_type = other DNA
ttctatgacttcttgcgaagccaaggtttctttgaagaaggttctgagttaactttaaagcatttctttttcgctcagaa

SEQ ID NO: 2005 - DNA, 80 bp, synthetic construct
  misc_feature 1..80: note = Synthetic: >AlphaSp-cand-13870-13949
  source 1..80: mol_type = other DNA
tcttgcgaagccaaggtttctttgaagaaggttctgagttaactttaaagcatttcttttttgctcagaagggtgacgca

SEQ ID NO: 2006 - DNA, 80 bp, synthetic construct
  misc_feature 1..80: note = Synthetic: >SARSCoV-cand-27020-27099
  source 1..80: mol_type = other DNA
gctgcatacaaccgctaccgtattggaaactataaattaaatacagaccacgccggtagcaacgacaatattgctttgct

SEQ ID NO: 2007 - DNA, 80 bp, synthetic construct
  misc_feature 1..80: note = Synthetic: >BtRl_BetaCoV-cand-26890-26969
  source 1..80: mol_type = other DNA
tgctgcatacaaccgctaccgtattggaaactacaaattaaatacagaccacgccggtagcaacgacaatattgctttgc

SEQ ID NO: 2008 - DNA, 80 bp, synthetic construct
  misc_feature 1..80: note = Synthetic: >HKU5-cand-21770-21849
  source 1..80: mol_type = other DNA
gatgtgctcgttaacttttataggaaaccgcacaagctgtcaaagcgttgatattggcacgcctggcacgggttcatgtc

SEQ ID NO: 2009 - DNA, 80 bp, synthetic construct
  misc_feature 1..80: note = Synthetic: >Sb512-cand-19480-19559
  source 1..80: mol_type = other DNA
cacaaatacgtctttctaagataggtgttcttaaagttgaagattttgtttctagttcagatagtacactcaaatcgtgt

SEQ ID NO: 2010 - DNA, 80 bp, synthetic construct
  misc_feature 1..80: note = Synthetic: >BtSk_AlphaCoV-cand-19430-19509
  source 1..80: mol_type = other DNA
tatcacaaatacgtctttctaagataggtgttcttaaagtcgaagattttgtttctagttcagatagtacacttaaatcg

SEQ ID NO: 2011 - DNA, 80 bp, synthetic construct
  misc_feature 1..80: note = Synthetic: >AcCoV_JC34-cand-19580-19659
  source 1..80: mol_type = other DNA
atgtttaatgttgttaaatatactcagctatgtcagtatctaaacaccacttctatgtgcgttccacataaaatgcgtgt

SEQ ID NO: 2012 - DNA, 80 bp, synthetic construct
  misc_feature 1..80: note = Synthetic: >Lucheng19-cand-19930-20009
  source 1..80: mol_type = other DNA
ttaatgttgttaaatatactcagctatgtcagtacctaaacaccacatctatgtgcgttccacataaaatgcgggtgcta

SEQ ID NO: 2013 - DNA, 80 bp, synthetic construct
  misc_feature 1..80: note = Synthetic: >229ER-cand-15360-15439
  source 1..80: mol_type = other DNA
gatgttgtgcactaagtgtgcttatgatcatgtgtttggcactgatcataagttcattttggctattacaccttacgtgt

SEQ ID NO: 2014 - DNA, 80 bp, synthetic construct
  misc_feature 1..80: note = Synthetic: >HKU5-cand-26100-26179
  source 1..80: mol_type = other DNA
ttctgaccctcagttgctgtctgatattggttactcctttgattatgggaagtaattaacgaacttcatggattacgtgt

SEQ ID NO: 2015 - DNA, 80 bp, synthetic construct
  misc_feature 1..80: note = Synthetic: >HKU5R-cand-26090-26169
  source 1..80: mol_type = other DNA
cttctgaccctcagttgttgtctgatattggttactcctttgattatgggaagtaattaacgaacttcatggattacgtg

SEQ ID NO: 2016 - DNA, 80 bp, synthetic construct
  misc_feature 1..80: note = Synthetic: >BetaSp-cand-27740-27819
  source 1..80: mol_type = other DNA
acacgtgagccctggcttatgtttggctggtgatgttggagtagcgcccaagagtggatactttattaaggttaatgata

SEQ ID NO: 2017 - DNA, 80 bp, synthetic construct
  misc_feature 1..80: note = Synthetic: >BetaCoV1-cand-27630-27709
  source 1..80: mol_type = other DNA
gagccctggcttatgtttggctggtgatgttggagtagcgcccaagagtggatactttattaaggttaatgataaatgga

SEQ ID NO: 2018 - DNA, 80 bp, synthetic construct
  misc_feature 1..80: note = Synthetic: >HKU8-cand-17760-17839
  source 1..80: mol_type = other DNA
acacgtgctaagaagggtatcttctgtattatgtgtgataaagtgctgtatgaagcgcttaagttctttgaagtcaaact

SEQ ID NO: 2019 - DNA, 80 bp, synthetic construct
  misc_feature 1..80: note = Synthetic: >HKU8R-cand-17380-17459
  source 1..80: mol_type = other DNA
taagaagggtatcttctgtattatgtgtgataagttgctgtatgaagcgcttaagttctttgaagtcaaactcactgatc

SEQ ID NO: 2020 - DNA, 80 bp, synthetic construct
  misc_feature 1..80: note = Synthetic: >MbCoV1-cand-18980-19059
  source 1..80: mol_type = other DNA
acacgttgtaacattggcggtgcagtttgcaataagcatgctaatatgtattattcgtatgttaatgcatacaatacata

SEQ ID NO: 2021 - DNA, 80 bp, synthetic construct
  misc_feature 1..80: note = Synthetic: >MsbCoV1-cand-18960-19039
  source 1..80: mol_type = other DNA
taattgcattacacgttgtaacattggcggtgcagtttgcaataagcatgctaatatgtattattcgtatgttaacgcat

SEQ ID NO: 2022 - DNA, 80 bp, synthetic construct
  misc_feature 1..80: note = Synthetic: >SEAC-cand-24520-24599
  source 1..80: mol_type = other DNA
gaaactcaactaaactatgtttctgaagattgttgaggatgatggtttgttcatcaacacagtcttgtggcttttagtgt

SEQ ID NO: 2023 - DNA, 80 bp, synthetic construct
  misc_feature 1..80: note = Synthetic: >BetaSp-cand-4440-4519
  source 1..80: mol_type = other DNA
gattttatagttgggcatcctgttagttttgctatgtcaactttcgagattgctcagctttatggaacttgtataacacc

SEQ ID NO: 2024 - DNA, 80 bp, synthetic construct
  misc_feature 1..80: note = Synthetic: >HKU4R-cand-10110-10189
  source 1..80: mol_type = other DNA
acatcttgtaccaaccacctaattgtagtgtcacgtccagtgtgctgcaaagtggtttggttaagatgtcagctcctagt

SEQ ID NO: 2025 - DNA, 80 bp, synthetic construct
  misc_feature 1..80: note = Synthetic: >HKU4-cand-10110-10189
  source 1..80: mol_type = other DNA
tggtagtgacatcttgtaccaaccacctaattgtagtgtcacgtctagtgtgctgcaaagtggtttggttaagatgtcag

SEQ ID NO: 2026 - DNA, 80 bp, synthetic construct
  misc_feature 1..80: note = Synthetic: >BetaSp-cand-25740-25819
  source 1..80: mol_type = other DNA
gtacttcaaccagtggacaacctatatatgattgtcctggttatccttggttaaccagttctattgctggtgaatcatgt

SEQ ID NO: 2027 - DNA, 80 bp, synthetic construct
  misc_feature 1..80: note = Synthetic: >BetaCoV1-cand-25630-25709
  source 1..80: mol_type = other DNA
caaccagtggacaacctatatatgattgtcctggttatccttggttaaccagttctattgctggtgaatcatgtaaacaa

SEQ ID NO: 2028 - DNA, 80 bp, synthetic construct
  misc_feature 1..80: note = Synthetic: >Sb512-cand-9800-9879
  source 1..80: mol_type = other DNA
gttacatgcaccaccttgagttgggttctggctgtcatgtaggtagcgacatggatggtaccatgtacggtaaatacgaa

SEQ ID NO: 2029 - DNA, 80 bp, synthetic construct
  misc_feature 1..80: note = Synthetic: >MsbCoV1-cand-19760-19839
  source 1..80: mol_type = other DNA
acatgggcttatttatttctaagtatggtcttgaagactatgcatttgaacacattgtctttggtgatgtgtctaaaaat

SEQ ID NO: 2030 - DNA, 80 bp, synthetic construct
  misc_feature 1..80: note = Synthetic: >MbCoV1-cand-19780-19859
  source 1..80: mol_type = other DNA
attcatctctaagtatggtcttgaagactatgcatttgaacacattgtctttggtgatgtgtctaaaaatactcttggtg

SEQ ID NO: 2031 - DNA, 80 bp, synthetic construct
  misc_feature 1..80: note = Synthetic: >BetaCoV1-cand-9100-9179
  source 1..80: mol_type = other DNA
tgtggttgttgctgtaatagataaagatattggctctacagtgtttaatgttcctactaaggttttgaggtttggttacc

SEQ ID NO: 2032 - DNA, 80 bp, synthetic construct
  misc_feature 1..80: note = Synthetic: >MbCoV1-cand-6010-6089
  source 1..80: mol_type = other DNA
acatgtggaatgaattcctggttggcaatgtcgctaaattctgtcactggatatattggcttgtcagagctaataaaggt

SEQ ID NO: 2033 - DNA, 80 bp, synthetic construct
  misc_feature 1..80: note = Synthetic: >MsbCoV1-cand-6010-6089
  source 1..80: mol_type = other DNA
tgaattcctggttggcaatgtcgctaaattctgtcactggatatattggcttgttagagctaataaaggcgatgcaggtg

SEQ ID NO: 2034 - DNA, 80 bp, synthetic construct
  misc_feature 1..80: note = Synthetic: >BetaSp-cand-7860-7939
  source 1..80: mol_type = other DNA
acatgtggttcatggttgtaataagcctggttgtttgttttgttataagaggaacaagagtgttcgtgttaagtgcagca

SEQ ID NO: 2035 - DNA, 80 bp, synthetic construct
  misc_feature 1..80: note = Synthetic: >BetaCoV1-cand-7740-7819
  source 1..80: mol_type = other DNA
ttagacatgtggttcatggttgtaataagcctggttgtttgttttgttataagaggaacaagagtgttcgtgttaagtgc

SEQ ID NO: 2036 - DNA, 80 bp, synthetic construct
  misc_feature 1..80: note = Synthetic: >HKU5R-cand-17680-17759
  source 1..80: mol_type = other DNA
ccagctgcctgcaccacgcaccttgctcactcggggcacattggaaccggaaaatttcaatagtgttacccgtttaatgt

SEQ ID NO: 2037 - DNA, 80 bp, synthetic construct
  misc_feature 1..80: note = Synthetic: >SARSCoV-cand-12610-12689
  source 1..80: mol_type = other DNA
taaactacagaataatgaactgagtccagtagcactacgacagatgtcctgtgcggctggtaccacacaaacagcttgta

SEQ ID NO: 2038 - DNA, 80 bp, synthetic construct
  misc_feature 1..80: note = Synthetic: >HKU5-cand-13680-13759
  source 1..80: mol_type = other DNA
gattccaactttttaaacgagtccggggttctattgtaaatgcccgaatagaaccctgtgccagtggtcttaccactgat

SEQ ID NO: 2039 - DNA, 80 bp, synthetic construct
  misc_feature 1..80: note = Synthetic: >HKU5R-cand-13670-13749
  source 1..80: mol_type = other DNA
gtccaaagattccaactttttaaacgagtccggggttctattgtaaatgcccgaatagaaccctgtgccagtggtcttac

SEQ ID NO: 2040 - DNA, 80 bp, synthetic construct
  misc_feature 1..80: note = Synthetic: >Alpha2-cand-28410-28489
  source 1..80: mol_type = other DNA
gtagggctgttccttgtactaatagaaaatatttcattgaattctgtccttctggtcctaatgatttttgcttttatgat

SEQ ID NO: 2041 - DNA, 80 bp, synthetic construct
  misc_feature 1..80: note = Synthetic: >AlphaMink-cand-28420-28499
  source 1..80: mol_type = other DNA
cagggctgtcccttgtactaatagaaaatactttattgaattctgtccttctggtcctaatgatttttgcttttatgatg

SEQ ID NO: 2042 - DNA, 80 bp, synthetic construct
  misc_feature 1..80: note = Synthetic: >MbCoV1-cand-16020-16099
  source 1..80: mol_type = other DNA
atcataaaccaactttagcttttccattgtgttcaaatggcaacatttttggcctttacaaaaattcagccactggttca

SEQ ID NO: 2043 - DNA, 80 bp, synthetic construct
  misc_feature 1..80: note = Synthetic: >BatCoV1A-cand-16190-16269
  source 1..80: mol_type = other DNA
tcataaaccaactttagcttttccattgtgttcaaatggcaatatttttggtctttacaaaaattctgccactggttcac

SEQ ID NO: 2044 - DNA, 80 bp, synthetic construct
  misc_feature 1..80: note = Synthetic: >BetaSp-cand-16610-16689
  source 1..80: mol_type = other DNA
tagtctgctcctctcaaacatcgttacgctgtggcagttgcatacgaaaacctttattgtgttgcaagtgctgttatgat

SEQ ID NO: 2045 - DNA, 80 bp, synthetic construct
  misc_feature 1..80: note = Synthetic: >Delta-cand-10470-10549
  source 1..80: mol_type = other DNA
gtggcattcctgttgactttaaccattaaacacactgttgtgtttaccactacatacttgcttccgtcacttttgatgat

SEQ ID NO: 2046 - DNA, 80 bp, synthetic construct
  misc_feature 1..80: note = Synthetic: >HKU15-cand-9110-9189
  source 1..80: mol_type = other DNA
tggcattcctgttgactttaaccattaaacacactgttgtgtttaccactacatacttgcttccgtcacttttgatgatg

SEQ ID NO: 2047 - DNA, 80 bp, synthetic construct
  misc_feature 1..80: note = Synthetic: >HKU23-cand-23540-23619
  source 1..80: mol_type = other DNA
ttctcttgggtgttgcggtcataattattgtagttttgttgttatattttatggtggataatggtactaggctgcatgat

SEQ ID NO: 2048 - DNA, 80 bp, synthetic construct
  misc_feature 1..80: note = Synthetic: >HKU14-cand-23700-23779
  source 1..80: mol_type = other DNA
tggcattcttttgggtgttgcggtcataattattgtagttttgttgttatattttatggtggataatggtactaggctgc

SEQ ID NO: 2049 - DNA, 80 bp, synthetic construct
  misc_feature 1..80: note = Synthetic: >SEAC-cand-7220-7299
  source 1..80: mol_type = other DNA
gtgctttgcataaggcatttttagatgtcttacataatagttttggcaaggattttagttcttgtaaaactatgcatgat

SEQ ID NO: 2050 - DNA, 80 bp, synthetic construct
  misc_feature 1..80: note = Synthetic: >HKU2-cand-7220-7299
  source 1..80: mol_type = other DNA
gactttaatggtgctttgcataaggcatttttagatgtcttacataatagttttggcaaggattttagttcttgtaaaac

SEQ ID NO: 2051 - DNA, 80 bp, synthetic construct
  misc_feature 1..80: note = Synthetic: >MsbCoV1-cand-25640-25719
  source 1..80: mol_type = other DNA
atcatgtgaaattcggaccttataatattacttttctatctaataaccaacttcatgttgatgttagaggctatactaat

SEQ ID NO: 2052 - DNA, 80 bp, synthetic construct
  misc_feature 1..80: note = Synthetic: >WIV16-cand-5300-5379
  source 1..80: mol_type = other DNA
gctggtgatgctgctaacttttgtgcactcatactcgcttacagtaataaaactgttggcgagctcggtgatgtcagaga

SEQ ID NO: 2053 - DNA, 80 bp, synthetic construct
  misc_feature 1..80: note = Synthetic: >AlphaSp-cand-28100-28179
  source 1..80: mol_type = other DNA
atgctgtacttaactttattctgacaccagactttgctgtcttggttttatctttcctgttcatgatcttaacatggctg

SEQ ID NO: 2054 - DNA, 80 bp, synthetic construct
  misc_feature 1..80: note = Synthetic: >BtSk_AlphaCoV-cand-27900-27979
  source 1..80: mol_type = other DNA
gtatttaactttgttctgacaccagactttgctgtcttggttatatctttcctgttcatgatcttaacatggctgctggg

SEQ ID NO: 2055 - DNA, 80 bp, synthetic construct
  misc_feature 1..80: note = Synthetic: >BetaCoV1-cand-24910-24989
  source 1..80: mol_type = other DNA
atgctgtcgattgtgctagtgatcatatgagtgaaattcagtgcatgactcaaaatataaaacctgttacaggagtatac

SEQ ID NO: 2056 - DNA, 80 bp, synthetic construct
  misc_feature 1..80: note = Synthetic: >BetaSp-cand-25020-25099
  source 1..80: mol_type = other DNA
ttactaatgctgtcgattgtgctagtgatcatatgagtgaaattcagtgcatgactcaaaatataaaacctgttacagga

SEQ ID NO: 2057 - DNA, 80 bp, synthetic construct
  misc_feature 1..80: note = Synthetic: >SEAC-cand-4850-4929
  source 1..80: mol_type = other DNA
atgctgtgtcgccttttgatggtgctagctttgagaagcagagtggtcgtaccatacgtaaattggctagattggatggc

SEQ ID NO: 2058 - DNA, 80 bp, synthetic construct
  misc_feature 1..80: note = Synthetic: >HKU2R-cand-4690-4769
  source 1..80: mol_type = other DNA
gtgtcgccttttgatggtgctagctttgagaagcagagtggtcgtaccatacgaaaattggctagattggatggcagcac

SEQ ID NO: 2059 - DNA, 80 bp, synthetic construct
  misc_feature 1..80: note = Synthetic: >BetaSp-cand-5720-5799
  source 1..80: mol_type = other DNA
atgcttaatgttgcaaaatcttaatttgacttttaaattgcagcaatggcaagaggcgtggctcgaatttagagctggac

SEQ ID NO: 2060 - DNA, 80 bp, synthetic construct
  misc_feature 1..80: note = Synthetic: >HKU24-cand-5390-5469
  source 1..80: mol_type = other DNA
catgcttaatgttgcaaaatcttaatttgacttttaaattgcagcaatggcaagaggcgtggctcgaattcagagcggga

SEQ ID NO: 2061 - DNA, 80 bp, synthetic construct
  misc_feature 1..80: note = Synthetic: >MbCoV1-cand-24460-24539
  source 1..80: mol_type = other DNA
atggaacacatgtcttttctgttgctaatgctgctcctgatggtattatgtttttacatgctaatcttgtacccactgca

SEQ ID NO: 2062 - DNA, 80 bp, synthetic construct
  misc_feature 1..80: note = Synthetic: >BatCoV1A-cand-24620-24699
  source 1..80: mol_type = other DNA
tctgtggtaatggtacacatgtcttttctgttgcaaatgctgctcctgatggtattatgtttttacatgctaatcttgta

SEQ ID NO: 2063 - DNA, 80 bp, synthetic construct
  misc_feature 1..80: note = Synthetic: >HKU5-cand-26420-26499
  source 1..80: mol_type = other DNA
atggatttggacttagactgcgttatagcacagccttcgagcacaatcgttatgatgcctctaagtcctatttctacacg

SEQ ID NO: 2064 - DNA, 80 bp, synthetic construct
  misc_feature 1..80: note = Synthetic: >HKU5R-cand-26410-26489
  source 1..80: mol_type = other DNA
gatggatttggacttagactgcgttatagcacagccttcgagcacaaccgttatgatgcctctaagtcctatttctacac

SEQ ID NO: 2065 - DNA, 80 bp, synthetic construct
  misc_feature 1..80: note = Synthetic: >BetaCoV1-cand-9420-9499
  source 1..80: mol_type = other DNA
atggctatatacgttttcctgaggtactgcgagaaggtcttgttagggttattcgtactaaagcaatgacttactgcagg

SEQ ID NO: 2066 - DNA, 80 bp, synthetic construct
  misc_feature 1..80: note = Synthetic: >Sparrow-cand-24390-24469
  source 1..80: mol_type = other DNA
atggctattggctgcgttacaccagacaaaagccaggtggtgctcaaattcctccatcctatgccttctattatactggc

SEQ ID NO: 2067 - DNA, 80 bp, synthetic construct
  misc_feature 1..80: note = Synthetic: >HKU5R-cand-13510-13589
  source 1..80: mol_type = other DNA
tcacaggtgtttgtaaatttaagggtaagtttgtacaggtcccactgcacattcgtgatccagttggattctgtttacaa

SEQ ID NO: 2068 - DNA, 80 bp, synthetic construct
  misc_feature 1..80: note = Synthetic: >MsbCoV1-cand-20240-20319
  source 1..80: mol_type = other DNA
gtgctagtattaaattaccagatggcataatgttcaatgttgtcaaatatactcaactatgtcagtatctaaacagtacc

SEQ ID NO: 2069 - DNA, 80 bp, synthetic construct
  misc_feature 1..80: note = Synthetic: >MbCoV1-cand-20260-20339
  source 1..80: mol_type = other DNA
taaattaccagatggcataatgttcaatgttgtcaaatatactcagttatgtcagtatttaaatagtactactatgtgta

SEQ ID NO: 2070 - DNA, 80 bp, synthetic construct
  misc_feature 1..80: note = Synthetic: >HghCoV1-cand-18130-18209
  source 1..80: mol_type = other DNA
gttaataactataagttacaatcgcaaattgtgactggtttatataaagattgctcacgtgaaatgagcggactttcacc

SEQ ID NO: 2071 - DNA, 80 bp, synthetic construct
  misc_feature 1..80: note = Synthetic: >HKU31-cand-18200-18279
  source 1..80: mol_type = other DNA
ttaataactataagttacaatcgcaaattgtgactggtttatataaggactgctcacgtgaaatgagcggactttcacca

SEQ ID NO: 2072 - DNA, 80 bp, synthetic construct
  misc_feature 1..80: note = Synthetic: >BtSk_AlphaCoV-cand-6350-6429
  source 1..80: mol_type = other DNA
tacattaaattgtttttgaagtttagtttgtttttgtacacgttatatgcactaatgtttatgtttatacgatttacacc

SEQ ID NO: 2073 - DNA, 80 bp, synthetic construct
  misc_feature 1..80: note = Synthetic: >Sb512-cand-6390-6469
  source 1..80: mol_type = other DNA
tcaatacattaaagtgtttttgaagtttagtttggttttgtacacgttatatgcactaatgtttatgtttatacgattta

SEQ ID NO: 2074 - DNA, 80 bp, synthetic construct
  misc_feature 1..80: note = Synthetic: >HKU2-cand-22880-22959
  source 1..80: mol_type = other DNA
gtaagcttgctttgaccacttctagtgcattgcaggccattcaggctgtcgttaaccagaatgctgctcaagttgagtca

SEQ ID NO: 2075 - DNA, 80 bp, synthetic construct
  misc_feature 1..80: note = Synthetic: >SEAC-cand-22840-22919
  source 1..80: mol_type = other DNA
taagcttgctttgaccacttctagtgcattgcaggccattcaggctgtcgttaaccagaatgctgctcaagttgagtcac

SEQ ID NO: 2076 - DNA, 80 bp, synthetic construct
  misc_feature 1..80: note = Synthetic: >Alpha2-cand-16950-17029
  source 1..80: mol_type = other DNA
gttacgtatgcgtctgtaatctcatacatgggttttaggtttgatgctaatatacctggttatcacactttgttttgtac

SEQ ID NO: 2077 - DNA, 80 bp, synthetic construct
  misc_feature 1..80: note = Synthetic: >AlphaMink-cand-16960-17039
  source 1..80: mol_type = other DNA
tgttacgtatgcgtccgtaatctcatacatgggtttcaggtttgatgctaatatacctggttatcacactttgttttgta

SEQ ID NO: 2078 - DNA, 80 bp, synthetic construct
  misc_feature 1..80: note = Synthetic: >HKU15-cand-7840-7919
  source 1..80: mol_type = other DNA
gtgttgcttaaagacctcgctggtgctgaatttgaccagtatctggcctcttacaacaagtacaaatatttttctggtac

SEQ ID NO: 2079 - DNA, 80 bp, synthetic construct
  misc_feature 1..80: note = Synthetic: >Quail-cand-7780-7859
  source 1..80: mol_type = other DNA
tgtgctgttgaaagatttggctggtgctgaatttgaccagtacctagcttcttacaacaagtacaaatatttttctggta

SEQ ID NO: 2080 - DNA, 80 bp, synthetic construct
  misc_feature 1..80: note = Synthetic: >AlphaMink-cand-26180-26259
  source 1..80: mol_type = other DNA
gtagaaaatttgcctaagtatgtaatggtagcaacacctggtaataccattgtctatcatcaagtgggcaagtccctcaa

SEQ ID NO: 2081 - DNA, 80 bp, synthetic construct
  misc_feature 1..80: note = Synthetic: >Alpha2-cand-26170-26249
  source 1..80: mol_type = other DNA
tgtagaaaatttgcctaagtatgtaatggtagccacacctggtaacaccattgtctaccaccaagtaggcaagtcactta

SEQ ID NO: 2082 - DNA, 80 bp, synthetic construct
  misc_feature 1..80: note = Synthetic: >MrAlphaSax-cand-21330-21409
  source 1..80: mol_type = other DNA
gtcataccttttggtcacattgaccaaccatattattgctttaccacattttacatcaatgaaacagctggtactactac

SEQ ID NO: 2083 - DNA, 80 bp, synthetic construct
  misc_feature 1..80: note = Synthetic: >MN509589-cand-240-319
  source 1..80: mol_type = other DNA
agcgtcctacgggcgccgtggtcggttcgagtgggaagaacctctggttcatctagcggtacgcgggtgtgtggaagtag

SEQ ID NO: 2084 - DNA, 80 bp, synthetic construct
  misc_feature 1..80: note = Synthetic: >MK618759-cand-80-159
  source 1..80: mol_type = other DNA
gctggtccctctaggtgttccattgcagtgcactctagtgccctggatggcacctggccacctgtcaggttttagttatt

SEQ ID NO: 2085 - DNA, 80 bp, synthetic construct
  misc_feature 1..80: note = Synthetic: >MN128087-cand-80-159
  source 1..80: mol_type = other DNA
agctggtcccctaggttgtccattgcagtgcactttagtgccctggatggcacctggccacccgtcaggttttagttatt

SEQ ID NO: 2086 - DNA, 80 bp, synthetic construct
  misc_feature 1..80: note = Synthetic: >MK957244-cand-560-639
  source 1..80: mol_type = other DNA
aaccaaggggtgtcattcttgttgccaaagacattcccgaacaacttcgtgacgctttgtttttctatacgtcacacaat

SEQ ID NO: 2087 - DNA, 80 bp, synthetic construct
  misc_feature 1..80: note = Synthetic: >MN128087-cand-560-639
  source 1..80: mol_type = other DNA
accagaggagtgtcgttcttgttgccaaagacattcccgcccaactccgtgacgctttgtttttctatacgtcacacaat

SEQ ID NO: 2088 - DNA, 80 bp, synthetic construct
  misc_feature 1..80: note = Synthetic: >MT114543-cand-20840-20919
  source 1..80: mol_type = other DNA
acatcaatactaattggtttaacaatgtcacacttttgtattcgcgctccagcactgcaacatggcaaaagagtgctgca

SEQ ID NO: 2089 - DNA, 80 bp, synthetic construct
  misc_feature 1..80: note = Synthetic: >MT114538-cand-23980-24059
  source 1..80: mol_type = other DNA
ttctatttgactcccagaactatgtatcagcctagagctgcaactagttcagattttgttcaaattgaggggtgtgacgt

SEQ ID NO: 2090 - DNA, 80 bp, synthetic construct
  misc_feature 1..80: note = Synthetic: >MT114541-cand-28800-28879
  source 1..80: mol_type = other DNA
accaacagcagaaaagtgagttgtaaggcaacccgatgtttaaaactggtttttccgaggaattactggtcatcgcgctg

SEQ ID NO: 2091 - DNA, 80 bp, synthetic construct
  misc_feature 1..80: note = Synthetic: >MN517817-cand-1740-1819
  source 1..80: mol_type = other DNA
accattcaagttcttgggacataaatttgtgtatgtgaaggaagctgcagtttctttcacattgggaaaagcagccacta

SEQ ID NO: 2092 - DNA, 80 bp, synthetic construct
  misc_feature 1..80: note = Synthetic: >MT114542-cand-13990-14069
  source 1..80: mol_type = other DNA
acctaatatgattagaatggcatctgccatgatattaggttctaagcacattggttgttgtacacatagtgatagattct

SEQ ID NO: 2093 - DNA, 80 bp, synthetic construct
  misc_feature 1..80: note = Synthetic: >MT040336-cand-25860-25939
  source 1..80: mol_type = other DNA
aggtgatggcactccaagtcctattacagaccatgactaccaaattggtggttatacggaaaagtgggaatctggtgtta

SEQ ID NO: 2094 - DNA, 80 bp, synthetic construct
  misc_feature 1..80: note = Synthetic: >AY692454-cand-16250-16329
  source 1..80: mol_type = other DNA
aggttagtatgttgaccaattacgaattgtcttttattaatggtaagataaattaccaatatgttgtgtatgtaggtgat

SEQ ID NO: 2095 - DNA, 80 bp, synthetic construct
  misc_feature 1..80: note = Synthetic: >MT114544-cand-4010-4089
  source 1..80: mol_type = other DNA
agtagaacagcaaccagaagtagaagaaaagaaaccttcaattgcaaaagaggaagttcaaagtcctaaaaacgatgatc

SEQ ID NO: 2096 - DNA, 80 bp, synthetic construct
  misc_feature 1..80: note = Synthetic: >MT114538-cand-4010-4089
  source 1..80: mol_type = other DNA
agttgaacagcaaccagaagtagaggaaaacaaaccttcacttgaaaaagaggaagttcaaagtcctaaaaaagatgatc

SEQ ID NO: 2097 - DNA, 80 bp, synthetic construct
  misc_feature 1..80: note = Synthetic: >MN711790-cand-23730-23809
  source 1..80: mol_type = other DNA
gttgtggttgttgttgtggatgctttggcattattccgctaatgagcaagtgtggtaagaaatcttcttattacacgact

SEQ ID NO: 2098 - DNA, 80 bp, synthetic construct
  misc_feature 1..80: note = Synthetic: >MN509589-cand-23780-23859
  source 1..80: mol_type = other DNA
gttgtggttgttgttgtggatgctttggcattattccattaatgagtaagtgtggtaagaagtcttcttactacacgact

SEQ ID NO: 2099 - DNA, 80 bp, synthetic construct
  misc_feature 1..80: note = Synthetic: >LC061274-cand-2800-2879
  source 1..80: mol_type = other DNA
taaaggtctgttatgaacttgatgtggattttaattctatattaaacactgcgtgtagcgtgtttgaggtagataccact

SEQ ID NO: 2100 - DNA, 80 bp, synthetic construct
  misc_feature 1..80: note = Synthetic: >MN517817-cand-17490-17569
  source 1..80: mol_type = other DNA
attgtgcagatgctagcagacaacctatgcaatgtgtcagattgtgtagtgtttgttacttggtgtcatggtctagaact

SEQ ID NO: 2101 - DNA, 80 bp, synthetic construct
  misc_feature 1..80: note = Synthetic: >MK957245-cand-17410-17489
  source 1..80: mol_type = other DNA
atagtgcaaatgttagcagataatctatgcaatgtctcagactgtgtagtgtttgttacttggtgtcatggtctagaact

SEQ ID NO: 2102 - DNA, 80 bp, synthetic construct
  misc_feature 1..80: note = Synthetic: >PRD-0038-cand-15430-15509
  source 1..80: mol_type = other DNA
aaaattgccgacaagtatgtccgcaatctacaacacagactttatgagtgtctctacaggaatagagatgttgatcatga

SEQ ID NO: 2103 - DNA, 80 bp, synthetic construct
  misc_feature 1..80: note = Synthetic: >PDF-2386-cand-15440-15519
  source 1..80: mol_type = other DNA
acaagtatgtccgcaatctacaacacagactttatgagtgtctctacaggaatagagatgttgatcatgaattcgtggga

SEQ ID NO: 2104 - DNA, 80 bp, synthetic construct
  misc_feature 1..80: note = Synthetic: >SBB-797-cand-24800-24879
  source 1..80: mol_type = other DNA
cattaatgatgttgttcaaaatgtcacagattatgtgcattccaccactacagtaacattaattttgtatgcaactgttt

SEQ ID NO: 2105 - DNA, 80 bp, synthetic construct
  misc_feature 1..80: note = Synthetic: >SBB-726-cand-24800-24879
  source 1..80: mol_type = other DNA
actcattaatgatgttgttcaaaatgtcacagattatgtgcattccaccactacagtaacattaatcttgtatgcaactg

SEQ ID NO: 2106 - DNA, 80 bp, synthetic construct
  misc_feature 1..80: note = Synthetic: >SBB-130-cand-7620-7699
  source 1..80: mol_type = other DNA
aaacttcaattcctgttgttagcatagcttacaaacaaggttctggtttgaagagatgttacaactttgtttggtggttt

SEQ ID NO: 2107 - DNA, 80 bp, synthetic construct
  misc_feature 1..80: note = Synthetic: >SBB-041-cand-7630-7709
  source 1..80: mol_type = other DNA
aattcctgttgttagcatagcttacaaacaaggttctggtttgaagagatgttacaactttgtttggtggttttgtgcat

SEQ ID NO: 2108 - DNA, 80 bp, synthetic construct
  misc_feature 1..80: note = Synthetic: >PRD-0038-cand-17590-17669
  source 1..80: mol_type = other DNA
cgcaaccctgcttggcgtaaagctgtttttatatccccttacaattcgcagaatgctgttgcatccaaaattttgggttt

SEQ ID NO: 2109 - DNA, 80 bp, synthetic construct
  misc_feature 1..80: note = Synthetic: >PDF-2386-cand-17600-17679
  source 1..80: mol_type = other DNA
cttggcgtaaagctgtttttatatccccttataattcgcagaatgctgttgcatccaaaattttgggtttgccaactcaa

SEQ ID NO: 2110 - DNA, 80 bp, synthetic construct
  misc_feature 1..80: note = Synthetic: >PDF-2386-cand-20080-20159
  source 1..80: mol_type = other DNA
aaacccaggtcacaaatggaggttgattttctagagttagcaacagatgagttcatacaacggtataaacttgaaggcta

SEQ ID NO: 2111 - DNA, 80 bp, synthetic construct
  misc_feature 1..80: note = Synthetic: >PRD-0038-cand-20070-20149
  source 1..80: mol_type = other DNA
agaagatttcaaacccaggtcacaaatggaggttgattttctagagttagcaacagatgagttcatacaacggtataaac

SEQ ID NO: 2112 - DNA, 80 bp, synthetic construct
  misc_feature 1..80: note = Synthetic: >SBB-747-cand-15830-15909
  source 1..80: mol_type = other DNA
gtatctgggtggcatgtcttattattgtaaggatcataagccgcctatatcatttcctttatgtgcgaatggtcaggttt

SEQ ID NO: 2113 - DNA, 80 bp, synthetic construct
  misc_feature 1..80: note = Synthetic: >GCS-227-cand-24610-24689
  source 1..80: mol_type = other DNA
accttgaacaacgttctgagtcgcttaaaaactacaccattgacctacgacatctaattgacaacctaaataagactttg

SEQ ID NO: 2114 - DNA, 80 bp, synthetic construct
  misc_feature 1..80: note = Synthetic: >GCS-211-cand-24620-24699
  source 1..80: mol_type = other DNA
caacgttctgagtcgcttaaaaactacaccattgacctacgacatctaattgacaacctaaataagactttggttgacct

SEQ ID NO: 2115 - DNA, 80 bp, synthetic construct
  misc_feature 1..80: note = Synthetic: >GCS-227-cand-11830-11909
  source 1..80: mol_type = other DNA
gaatggtgttgtacctttgtccatcatacctacggttgcctcaacaaaattgaacatagtgtgtccagatttggcttcgt

SEQ ID NO: 2116 - DNA, 80 bp, synthetic construct
  misc_feature 1..80: note = Synthetic: >GCS-211-cand-11840-11919
  source 1..80: mol_type = other DNA
ttgtacctttgtccatcatacctacggttgcctcaacaaaattgaacatagtgtgtccagatttggcttcgtatcaaaag

SEQ ID NO: 2117 - DNA, 80 bp, synthetic construct
  misc_feature 1..80: note = Synthetic: >GCS-211-cand-14470-14549
  source 1..80: mol_type = other DNA
ttggtggtgtttcactattgtcaactatgactaccaggcaatttcaccaaaagcatcttaaatctattgtcaatgcgcgt

SEQ ID NO: 2118 - DNA, 80 bp, synthetic construct
  misc_feature 1..80: note = Synthetic: >GCS-227-cand-14470-14549
  source 1..80: mol_type = other DNA
ggtggcgtttcactattgtcaactatgactaccaggcagtttcaccaaaagcatcttaaatctattgtcaatgcgcgtaa

SEQ ID NO: 2119 - DNA, 80 bp, synthetic construct
  misc_feature 1..80: note = Synthetic: >GCS-211-cand-17430-17509
  source 1..80: mol_type = other DNA
gaagtcgatttaccacctagtcatgcacccacttctatggctttgtctgatcgttttaaggtcagtgatgaattagccgt

SEQ ID NO: 2120 - DNA, 80 bp, synthetic construct
  misc_feature 1..80: note = Synthetic: >GCS-227-cand-17420-17499
  source 1..80: mol_type = other DNA
atcgtaatgaagtcgatttaccacctaatcatgcacccacttctatggctttgtctgatcgttttaaggtcagtgatgaa

SEQ ID NO: 2121 - DNA, 80 bp, synthetic construct
  misc_feature 1..80: note = Synthetic: >GCS-211-cand-6170-6249
  source 1..80: mol_type = other DNA
acgtacagaatggtcattacaccgtttatgacagcgcacgcaaacatatgtatgatggtgacaaatttgtaccctttgca

SEQ ID NO: 2122 - DNA, 80 bp, synthetic construct
  misc_feature 1..80: note = Synthetic: >GCS-227-cand-6170-6249
  source 1..80: mol_type = other DNA
gtacagaatggtcattacaccgtttatgacagcgcacgcaaacatatgtatgatggtgacaaatttgtaccctttgcacg

SEQ ID NO: 2123 - DNA, 80 bp, synthetic construct
  misc_feature 1..80: note = Synthetic: >GCS-211-cand-5210-5289
  source 1..80: mol_type = other DNA
acgttttgttagctgttttgccacctgtgagtgatgccaattatgctaagaacttaaagagaactgttgctaaagtccac

SEQ ID NO: 2124 - DNA, 80 bp, synthetic construct
  misc_feature 1..80: note = Synthetic: >GCS-227-cand-5210-5289
  source 1..80: mol_type = other DNA
gttttgttagctgttttgccacctgtgagtgatgccaattatgctaagaacttaaagagaactgttgctaaagtccacaa

SEQ ID NO: 2125 - DNA, 80 bp, synthetic construct
  misc_feature 1..80: note = Synthetic: >GCS-227-cand-16550-16629
  source 1..80: mol_type = other DNA
gtcataaagcatctacagtctattgtagggaaaagtgttcacgcattgtacctgcaagggctagagttgagtgttttagt

SEQ ID NO: 2126 - DNA, 80 bp, synthetic construct
  misc_feature 1..80: note = Synthetic: >GCS-211-cand-16550-16629
  source 1..80: mol_type = other DNA
gtgtcataaagcatctacagtctattgtagggaaaagtgttcacgcattgtacctgcaagggctagagttgagtgtttta

SEQ ID NO: 2127 - DNA, 80 bp, synthetic construct
  misc_feature 1..80: note = Synthetic: >SBB-122-cand-26900-26979
  source 1..80: mol_type = other DNA
cacatctttgaaagatacatggattgctgggctttgatccatcgcacctatgttaaggctatgttttcagatagtttagt

SEQ ID NO: 2128 - DNA, 80 bp, synthetic construct
  misc_feature 1..80: note = Synthetic: >SBB-120-cand-26930-27009
  source 1..80: mol_type = other DNA
ttgaaagatacatggattgctgggctttgatccatcgcacctatgttaaggctatgttttcagatagtttagttcttata

SEQ ID NO: 2129 - DNA, 80 bp, synthetic construct
  misc_feature 1..80: note = Synthetic: >SBB-120-cand-1300-1379
  source 1..80: mol_type = other DNA
tttagcagaccatgtttgcagtcctaccaacaaagaccttgtctctattggtttcaagtttggtatgcttaatgcagtct

SEQ ID NO: 2130 - DNA, 80 bp, synthetic construct
  misc_feature 1..80: note = Synthetic: >SBB-010-cand-1310-1389
  source 1..80: mol_type = other DNA
catacttgcagtcctaccaacaaagaccttgtatcaattggtttcaagtttggtatgcttaatgcagtctttgcagacga

SEQ ID NO: 2131 - DNA, 80 bp, synthetic construct
  misc_feature 1..80: note = Synthetic: >SBB-120-cand-26850-26929
  source 1..80: mol_type = other DNA
agacttcatctacatctgcctaatcatcatctttgtgtatattccttggatttctgctttagtctttggtgagcacatct

SEQ ID NO: 2132 - DNA, 80 bp, synthetic construct
  misc_feature 1..80: note = Synthetic: >SBB-122-cand-26820-26899
  source 1..80: mol_type = other DNA
cccatccagacttcatctacatctgcctaatcctcatctttgtgtatattccttggatttctgctttagtctttggtgag

SEQ ID NO: 2133 - DNA, 80 bp, synthetic construct
  misc_feature 1..80: note = Synthetic: >GCS-227-cand-19740-19819
  source 1..80: mol_type = other DNA
agagtttgttgcttctagtgataacacattgaaatgctgtactgttacttatgctgataacccaagttgtaaacaagtct

SEQ ID NO: 2134 - DNA, 80 bp, synthetic construct
  misc_feature 1..80: note = Synthetic: >GCS-211-cand-19750-19829
  source 1..80: mol_type = other DNA
ttgcttctagtgataacacattgaaatgctgtactgttacttatgctgataacccaagttgtaaacaagtctgtacttat

SEQ ID NO: 2135 - DNA, 80 bp, synthetic construct
  misc_feature 1..80: note = Synthetic: >GCS-211-cand-18950-19029
  source 1..80: mol_type = other DNA
agagaacattgcttttaatgttgttaagaaaggtggttttgtcaatgcgccaggtgagttgccagttgctattattggtg

SEQ ID NO: 2136 - DNA, 80 bp, synthetic construct
  misc_feature 1..80: note = Synthetic: >GCS-227-cand-18940-19019
  source 1..80: mol_type = other DNA
cagggtttagagaacattgcttttaatgttgttaagaaaggtggttttgtcaatgcgccaggtgagttgccagttgctat

SEQ ID NO: 2137 - DNA, 80 bp, synthetic construct
  misc_feature 1..80: note = Synthetic: >GCS-227-cand-10870-10949
  source 1..80: mol_type = other DNA
cttgtcccttcttatgatggttttgtgtgccccttgcaaggattggttcgttggtgttattgcttaccgtgtggccctct

SEQ ID NO: 2138 - DNA, 80 bp, synthetic construct
  misc_feature 1..80: note = Synthetic: >GCS-211-cand-10880-10959
  source 1..80: mol_type = other DNA
ttcttatgatggttttgtgtgccccttgcaaggattggttcgttggtgttattgcttaccgtgtggccctcttttgcact

SEQ ID NO: 2139 - DNA, 80 bp, synthetic construct
  misc_feature 1..80: note = Synthetic: >SBB-024-cand-3190-3269
  source 1..80: mol_type = other DNA
agagggtggtagtgacttgtgcaaaactgttatgatttctcaatgggatgtacaagctgatgttgatgatgctgcaacca

SEQ ID NO: 2140 - DNA, 80 bp, synthetic construct
  misc_feature 1..80: note = Synthetic: >SBB-130-cand-3200-3279
  source 1..80: mol_type = other DNA
agtgacttgtgcaaaactgttatgatttctcaatgggatatacaagctgctgatgatgttgcaaccaatgatcagacgga

SEQ ID NO: 2141 - DNA, 80 bp, synthetic construct
  misc_feature 1..80: note = Synthetic: >GCS-227-cand-9600-9679
  source 1..80: mol_type = other DNA
taggtgaccaggtgttctgcccccgtcatgtaattgccccgagtactactaagcgtatagattatgagtatgcttactct

SEQ ID NO: 2142 - DNA, 80 bp, synthetic construct
  misc_feature 1..80: note = Synthetic: >GCS-211-cand-9600-9679
  source 1..80: mol_type = other DNA
gctaggtgaccaggtgttctgcccccgccatgtaattgccccgagtactactaagcgtatagattatgagtatgcttact

SEQ ID NO: 2143 - DNA, 80 bp, synthetic construct
  misc_feature 1..80: note = Synthetic: >SBB-726-cand-21690-21769
  source 1..80: mol_type = other DNA
agttactggcgcttataaaaatgatgccaattgtttggcttttcagaataatttgtatctagcatatataagtaagcggg

SEQ ID NO: 2144 - DNA, 80 bp, synthetic construct
  misc_feature 1..80: note = Synthetic: >GCS-211-cand-10480-10559
  source 1..80: mol_type = other DNA
agtgagtttgtggtttacacagctgttgtctggatacaccctcaacttattactgcaatttttgcattattagttgtgtg

SEQ ID NO: 2145 - DNA, 80 bp, synthetic construct
  misc_feature 1..80: note = Synthetic: >GCS-227-cand-10470-10549
  source 1..80: mol_type = other DNA
tattctggagtgagtttgtggtttacacagctgttgtctggatacaccctcaacttattactgcaatttttgcattatta

SEQ ID NO: 2146 - DNA, 80 bp, synthetic construct
  misc_feature 1..80: note = Synthetic: >GCS-227-cand-1290-1369
  source 1..80: mol_type = other DNA
agtgcaatgtgatggacccactctattacaaggtaaacgataggcttaccaatgagctgcgtatgaccatgttaggcatg

SEQ ID NO: 2147 - DNA, 80 bp, synthetic construct
  misc_feature 1..80: note = Synthetic: >GCS-211-cand-1290-1369
  source 1..80: mol_type = other DNA
tgagtgcaatgtgatggacccactctattacaaggcaaacgataggcttaccaatgagctgcgtatgaccatgttaggca

SEQ ID NO: 2148 - DNA, 80 bp, synthetic construct
  misc_feature 1..80: note = Synthetic: >SBB-122-cand-24520-24599
  source 1..80: mol_type = other DNA
agtgtctcatcccctcaactaaacgatgttgactttaatcaatgacaatggcatgcttcttagcgccattttatggttat

SEQ ID NO: 2149 - DNA, 80 bp, synthetic construct
  misc_feature 1..80: note = Synthetic: >SBB-120-cand-24530-24609
  source 1..80: mol_type = other DNA
atcccctcaactaaacgatgttgactttaatcaatgacaatggcatgcttcttagcgccattttatggttatttgtcttg

SEQ ID NO: 2150 - DNA, 80 bp, synthetic construct
  misc_feature 1..80: note = Synthetic: >GCS-211-cand-25420-25499
  source 1..80: mol_type = other DNA
agttcggcagacatgtacattgctgttagaggtgcgcgagaattcgacttacacttggccaaaagtattgaactaagtga

SEQ ID NO: 2151 - DNA, 80 bp, synthetic construct
  misc_feature 1..80: note = Synthetic: >GCS-227-cand-25410-25489
  source 1..80: mol_type = other DNA
catttgccagttcggcagacatgtacattgctgttagaggtgagcgagaattcgacttacacttagccaaaagtattgaa

SEQ ID NO: 2152 - DNA, 80 bp, synthetic construct
  misc_feature 1..80: note = Synthetic: >SBB-120-cand-26050-26129
  source 1..80: mol_type = other DNA
cagtcacaaaaccgtggtcaaagcctaaaacaagacccggtggacattgttgctgcagtaaaacaagccctacaagaact

SEQ ID NO: 2153 - DNA, 80 bp, synthetic construct
  misc_feature 1..80: note = Synthetic: >SBB-122-cand-26020-26099
  source 1..80: mol_type = other DNA
tcgtaatcagtcacaaaaccgtggtcaaagccaaaaacaagacccggtggacattgttgctgcagtaaaacaagccctac

SEQ ID NO: 2154 - DNA, 80 bp, synthetic construct
  misc_feature 1..80: note = Synthetic: >GCS-211-cand-13750-13829
  source 1..80: mol_type = other DNA
ttgccaccacaatacctaatacagcttttggacctttgtgtcgtaaagtttttgttgatggtgtggcactagtagcaact

SEQ ID NO: 2155 - DNA, 80 bp, synthetic construct
  misc_feature 1..80: note = Synthetic: >GCS-227-cand-13750-13829
  source 1..80: mol_type = other DNA
gccaccacaatacctaatacagcttttggacctttgtgtcgtaaagtttttgttgatggtgtggcactagtagcaactgc

SEQ ID NO: 2156 - DNA, 80 bp, synthetic construct
  misc_feature 1..80: note = Synthetic: >GCS-227-cand-2730-2809
  source 1..80: mol_type = other DNA
ttgagagtggtgtgaaccaattcacagtggttgaaggtggcaccgtagatgtcaaacctaagtccattcagtgtgaaact

SEQ ID NO: 2157 - DNA, 80 bp, synthetic construct
  misc_feature 1..80: note = Synthetic: >GCS-211-cand-2730-2809
  source 1..80: mol_type = other DNA
tattgagagtggtgtgaaccaattcacagtggttgaaggtggcaccgtagatgtcaaacctaagtccattcagtgtgaaa

SEQ ID NO: 2158 - DNA, 80 bp, synthetic construct
  misc_feature 1..80: note = Synthetic: >GCS-227-cand-490-569
  source 1..80: mol_type = other DNA
cgacaacattctgcgcgcctttattggtacctttgatgaacgccctgcagctttgcgtggctggatcatcaagtcaaact

SEQ ID NO: 2159 - DNA, 80 bp, synthetic construct
  misc_feature 1..80: note = Synthetic: >GCS-211-cand-490-569
  source 1..80: mol_type = other DNA
ggcgacaacattctgcgcgcctttattggtacctttgatgaacgccctgcagctttgcgtggctggatcatcaagtcaaa

SEQ ID NO: 2160 - DNA, 80 bp, synthetic construct
  misc_feature 1..80: note = Synthetic: >229E-cand-19210-19289
  source 1..80: mol_type = other DNA
tgttgatcattatgacggtttttacactcaaggtcgtaatttacaagactttttgcctcgcagcacaatggaagaagact

SEQ ID NO: 2161 - DNA, 80 bp, synthetic construct
  misc_feature 1..80: note = Synthetic: >229E-cand-19290-19369
  source 1..80: mol_type = other DNA
ttttgaatatggatataggtgtatttattcaaaagtatggtctcgaagattttaactttgagcacgttgtgtatggtgat

SEQ ID NO: 2162 - DNA, 80 bp, synthetic construct
  misc_feature 1..80: note = Synthetic: >229E-cand-19370-19449
  source 1..80: mol_type = other DNA
gtgtcaaaaactaccctaggcggtttgcacttgttgatctcacaggtacgtctgagtaaaatgggcatcttgaaggcaga

SEQ ID NO: 2163 - DNA, 80 bp, synthetic construct
  misc_feature 1..80: note = Synthetic: >229E-cand-19450-19529
  source 1..80: mol_type = other DNA
agagtttgtgtcagcatctgacataacactcaaatgttgtactgtgacctatcttaatgatcctagttataagactgttt

SEQ ID NO: 2164 - DNA, 80 bp, synthetic construct
  misc_feature 1..80: note = Synthetic: >229E-cand-19530-19609
  source 1..80: mol_type = other DNA
gcacttacatggatttgttgttagatgattttgttgctatattgaagtctttggatttgaccgttgtatctaaggttcat

SEQ ID NO: 2165 - DNA, 80 bp, synthetic construct
  misc_feature 1..80: note = Synthetic: >229E-cand-19610-19689
  source 1..80: mol_type = other DNA
gaggtcataattgacaacaaaccgtggagatggatgctatggtgtaaagataatgccgttgctacattctatcctcagtt

SEQ ID NO: 2166 - DNA, 80 bp, synthetic construct
  misc_feature 1..80: note = Synthetic: >229E-cand-19690-19769
  source 1..80: mol_type = other DNA
acagagtgcagaatggaaatgcggatattctatgcctggtatttataagacacaacgtatgtgcttagaaccatgtaatt

SEQ ID NO: 2167 - DNA, 80 bp, synthetic construct
  misc_feature 1..80: note = Synthetic: >229E-cand-19770-19849
  source 1..80: mol_type = other DNA
tgtataattacggtgcgggtttgaagttacctagtggcattatgttcaatgttgttaaatatactcaattgtgtcaatat

SEQ ID NO: 2168 - DNA, 80 bp, synthetic construct
  misc_feature 1..80: note = Synthetic: >229E-cand-19850-19929
  source 1..80: mol_type = other DNA
ctcaacagtactactttatgcgttcctcataatatgagagtgttacacttaggtgctggttcagattatggtgttgcacc

SEQ ID NO: 2169 - DNA, 80 bp, synthetic construct
  misc_feature 1..80: note = Synthetic: >229E-cand-19930-20009
  source 1..80: mol_type = other DNA
aggaactgccgttcttaaaagatggttgccacatgatgcaattgttgttgataatgatgttgttgactatgtgagtgatg

SEQ ID NO: 2170 - DNA, 80 bp, synthetic construct
  misc_feature 1..80: note = Synthetic: >229E-cand-20010-20089
  source 1..80: mol_type = other DNA
ccgatttcagtgttactggtgattgtgcaaccgtttatttggaagacaagttcgacttgttaatttctgatatgtacgat

SEQ ID NO: 2171 - DNA, 80 bp, synthetic construct
  misc_feature 1..80: note = Synthetic: >229E-cand-20090-20169
  source 1..80: mol_type = other DNA
ggcaggacaaaggcaattgatggtgaaaatgtttcgaaagaaggatttttcacttatatcaatggtgtcatttgtgagaa

SEQ ID NO: 2172 - DNA, 80 bp, synthetic construct
  misc_feature 1..80: note = Synthetic: >229E-cand-20170-20249
  source 1..80: mol_type = other DNA
acttgccatcggaggatcggttgccattaaagtaacagagtatagctggaacaagaaattgtatgaacttgtacaaaaat

SEQ ID NO: 2173 - DNA, 80 bp, synthetic construct
  misc_feature 1..80: note = Synthetic: >229E-cand-20250-20329
  source 1..80: mol_type = other DNA
tttctttttggactatgttctgcacttctgttaatacgtcatcatcagaagcctttgttgtcggaattaactatcttggt

SEQ ID NO: 2174 - DNA, 80 bp, synthetic construct
  misc_feature 1..80: note = Synthetic: >229E-cand-20330-20409
  source 1..80: mol_type = other DNA
gatttcgcaaaaggaccctttatagatggcaacataatacatgcaaattatgtgttctggcgtaactcaactgttatgac

SEQ ID NO: 2175 - DNA, 80 bp, synthetic construct
  misc_feature 1..80: note = Synthetic: >229E-cand-20410-20489
  source 1..80: mol_type = other DNA
tttgtcctacaattctgttttagacttgagtaagtttaattgcaaacataaagcgaccgttgttgtgcaattaaaggatg

SEQ ID NO: 2176 - DNA, 80 bp, synthetic construct
  misc_feature 1..80: note = Synthetic: >AlphaCoV1-cand-12170-12249
  source 1..80: mol_type = other DNA
aaatatttgtattttgtgaaaaacttaaacactcttagacgtggtgctgttcttggttatatcggtgcaacagttcgtct

SEQ ID NO: 2177 - DNA, 80 bp, synthetic construct
  misc_feature 1..80: note = Synthetic: >AlphaCoV1-cand-12250-12329
  source 1..80: mol_type = other DNA
gcaagctggtaaacctactgaacatccatctaatagtagtttattgacattgtgtgcttttgcacctgaccctgctaaag

SEQ ID NO: 2178 - DNA, 80 bp, synthetic construct
  misc_feature 1..80: note = Synthetic: >AlphaCoV1-cand-12330-12409
  source 1..80: mol_type = other DNA
catatgttgatgctgttaagagaggtatgcagccagttactaactgtgtaaaaatgctctcaaatggtgctggtaatggt

SEQ ID NO: 2179 - DNA, 80 bp, synthetic construct
  misc_feature 1..80: note = Synthetic: >AlphaCoV1-cand-12410-12489
  source 1..80: mol_type = other DNA
atggctattacaaatggtgtcgaatctaacacacaacaggactcttatggtggtgcatctgtgtgtatttattgtagatg

SEQ ID NO: 2180 - DNA, 80 bp, synthetic construct
  misc_feature 1..80: note = Synthetic: >AlphaCoV1-cand-12490-12569
  source 1..80: mol_type = other DNA
tcatgtagaacatcctgcaattgatggattgtgccgctttaaaggtaaatttgtgcaagtaccaaccggcactcaagatc

SEQ ID NO: 2181 - DNA, 80 bp, synthetic construct
  misc_feature 1..80: note = Synthetic: >AlphaCoV1-cand-12570-12649
  source 1..80: mol_type = other DNA
ctattagattctgtattgaaaatgaagtttgtgttgtctgtggttgctggcttaataatggttgtatgtgtgatcgtact

SEQ ID NO: 2182 - DNA, 80 bp, synthetic construct
  misc_feature 1..80: note = Synthetic: >AlphaCoV1-cand-12650-12729
  source 1..80: mol_type = other DNA
tctatgcagggttctactgttgatcagagttatttaaacgagtgcggggttctagtgcagctcgactagaaccctgtaat

SEQ ID NO: 2183 - DNA, 80 bp, synthetic construct
  misc_feature 1..80: note = Synthetic: >AlphaCoV1-cand-12730-12809
  source 1..80: mol_type = other DNA
ggtactgatccagaccatgttagtagagcttttgacatctacaataaagatgttgcatgtattggtaaattccttaagac

SEQ ID NO: 2184 - DNA, 80 bp, synthetic construct
  misc_feature 1..80: note = Synthetic: >AlphaCoV1-cand-12810-12889
  source 1..80: mol_type = other DNA
taattgttcacgttttaggaatttggacaaacatgatgcctactacattgtcaagcgttgtactaagagcgttatggacc

SEQ ID NO: 2185 - DNA, 80 bp, synthetic construct
  misc_feature 1..80: note = Synthetic: >AlphaCoV1-cand-12890-12969
  source 1..80: mol_type = other DNA
atgagcaagtctgttataacgatcttaaagattctggtgcagttgctgaacatgacttcttttcgtataaggaaggtcga

SEQ ID NO: 2186 - DNA, 80 bp, synthetic construct
  misc_feature 1..80: note = Synthetic: >AlphaCoV1-cand-12970-13049
  source 1..80: mol_type = other DNA
tgtgaattcggtaatgttgcacgtaaggatcttacaaagtacacaatgatggatctttgttatgctatcagaaattttga

SEQ ID NO: 2187 - DNA, 80 bp, synthetic construct
  misc_feature 1..80: note = Synthetic: >AlphaCoV1-cand-13050-13129
  source 1..80: mol_type = other DNA
tgaaaagaactgtgaagttcttaaagaaatacttgtgacattaggtgcctgcaatgaatcattctttgaaaataaagatt

SEQ ID NO: 2188 - DNA, 80 bp, synthetic construct
  misc_feature 1..80: note = Synthetic: >AlphaCoV1-cand-13130-13209
  source 1..80: mol_type = other DNA
ggtttgatccagttgaaaatgaagctatacatgaagtttacgcaagacttggacctatagtagccaatgctatgcttaaa

SEQ ID NO: 2189 - DNA, 80 bp, synthetic construct
  misc_feature 1..80: note = Synthetic: >AlphaCoV1-cand-13210-13289
  source 1..80: mol_type = other DNA
tgtgtagcgttttgtgatgctatagtggaaaaaggttacataggtattataacacttgacaaccaagatcttaatggcaa

SEQ ID NO: 2190 - DNA, 80 bp, synthetic construct
  misc_feature 1..80: note = Synthetic: >AlphaCoV1-cand-13290-13369
  source 1..80: mol_type = other DNA
tttttacgatttcggtgatttcgtaaaaactgcgccaggttttggttgtgcttgcgttacatcatattattcttatatga

SEQ ID NO: 2191 - DNA, 80 bp, synthetic construct
  misc_feature 1..80: note = Synthetic: >AlphaCoV1-cand-13370-13449
  source 1..80: mol_type = other DNA
tgcctttaatgggaatgacttcatgtttagagtctgaaaattttgtgaaaagtgacatctatggttctgattataagcag

SEQ ID NO: 2192 - DNA, 80 bp, synthetic construct
  misc_feature 1..80: note = Synthetic: >AlphaSp-cand-4970-5049
  source 1..80: mol_type = other DNA
gtgtgactcttaagtgtgatggttttatatcattcacttttgtcattttacctaaggaaggtgacaataactatgagaaa

SEQ ID NO: 2193 - DNA, 80 bp, synthetic construct
  misc_feature 1..80: note = Synthetic: >AlphaSp-cand-5050-5129
  source 1..80: mol_type = other DNA
aatttcaacagggccattgctaagtttttaaaacttaagggttcactgcttgttgttgttgaagacagccttgtctttaa

SEQ ID NO: 2194 - DNA, 80 bp, synthetic construct
  misc_feature 1..80: note = Synthetic: >AlphaSp-cand-5130-5209
  source 1..80: mol_type = other DNA
caaaatatctcatgctagtgtcgcaggctatgtagcaaagccggcacttgttgacacactgtttgaggctaaacctgttc

SEQ ID NO: 2195 - DNA, 80 bp, synthetic construct
  misc_feature 1..80: note = Synthetic: >AlphaSp-cand-5210-5289
  source 1..80: mol_type = other DNA
aggttgttgttactcaagaccagcgtagttttcacactgtggaattgtcgactagtcagacttatggtcagcagttaggt

SEQ ID NO: 2196 - DNA, 80 bp, synthetic construct
  misc_feature 1..80: note = Synthetic: >AlphaSp-cand-5300-5379
  source 1..80: mol_type = other DNA
tggaagataagaaagtcacgaacctaaaacctgttgctacagacaaggttgttagtgttgtgcctaatgttgattgggac

SEQ ID NO: 2197 - DNA, 80 bp, synthetic construct
  misc_feature 1..80: note = Synthetic: >AlphaSp-cand-5380-5459
  source 1..80: mol_type = other DNA
aaacactatgggtttgtagatgctggtatcttccacactctcgatcacacactgtttgcctttgacaacaatgttgttaa

SEQ ID NO: 2198 - DNA, 80 bp, synthetic construct
  misc_feature 1..80: note = Synthetic: >AlphaSp-cand-5470-5549
  source 1..80: mol_type = other DNA
gttttgcgcactagcgacaacaattgctgggtaaatgcagtttgtttgcaactgcaatttgcaaatgctaagtttaagac

SEQ ID NO: 2199 - DNA, 80 bp, synthetic construct
  misc_feature 1..80: note = Synthetic: >AlphaSp-cand-5550-5629
  source 1..80: mol_type = other DNA
aaagggtttacaacagttgtgggagtcatactgcactggggatgttgccatgtttgcacactggttatattggataactg

SEQ ID NO: 2200 - DNA, 80 bp, synthetic construct
  misc_feature 1..80: note = Synthetic: >AlphaSp-cand-5630-5709
  source 1..80: mol_type = other DNA
gtgtagaaaaaggtgaacctagtgatgctgaaaatgctcttaatgttatttcacgttttctgaaacctcagggttctgta

SEQ ID NO: 2201 - DNA, 80 bp, synthetic construct
  misc_feature 1..80: note = Synthetic: >AlphaSp-cand-5710-5789
  source 1..80: mol_type = other DNA
gaaatgttgagagctacatccactacctgtgacggtacttgctcaaccaagcgtgtagtttctacacctgtggttaatgc

SEQ ID NO: 2202 - DNA, 80 bp, synthetic construct
  misc_feature 1..80: note = Synthetic: >AlphaSp-cand-5790-5869
  source 1..80: mol_type = other DNA
aagtgttcttaaagtaggattggatgacggtaattgcatacatggtctcccacttgtcgatcgggttgtctctgtcaatg

SEQ ID NO: 2203 - DNA, 80 bp, synthetic construct
  misc_feature 1..80: note = Synthetic: >AlphaSp-cand-5870-5949
  source 1..80: mol_type = other DNA
gcactgttattattaccaatgttggtgacacccctggtaaacctgttgtagccactgaaaatctcttgttagatggtgtg

SEQ ID NO: 2204 - DNA, 80 bp, synthetic construct
  misc_feature 1..80: note = Synthetic: >AlphaSp-cand-5950-6029
  source 1..80: mol_type = other DNA
tcctacacagtgtttcaggatagtaccactggtgttgggcactatacagtgtttgacaaggaggcaaaacttatgttcga

SEQ ID NO: 2205 - DNA, 80 bp, synthetic construct
  misc_feature 1..80: note = Synthetic: >AlphaSp-cand-6030-6109
  source 1..80: mol_type = other DNA
tggtgacatgcttaagccttgtgatttaaatgtttcacctgttactagtatggttgtttgtaacaacaagaaggttgtag

SEQ ID NO: 2206 - DNA, 80 bp, synthetic construct
  misc_feature 1..80: note = Synthetic: >AlphaSp-cand-6110-6189
  source 1..80: mol_type = other DNA
tacaggaccctgttagacgtgttgagctggacgctagtaaatttttggacactatgaatgtggcttcagaaaagtttttc

SEQ ID NO: 2207 - DNA, 80 bp, synthetic construct
  misc_feature 1..80: note = Synthetic: >AlphaSp-cand-6190-6269
  source 1..80: mol_type = other DNA
acttttggtgattttgtttctagaaacattattgtgttgattgtttacctgtttagtttgctggctatttgttttagagc

SEQ ID NO: 2208 - DNA, 80 bp, synthetic construct
  misc_feature 1..80: note = Synthetic: >Anlong-cand-4740-4819
  source 1..80: mol_type = other DNA
agttgttcctccaaaggacacaccagggtttgaaaagaatgttgccagaacattacgtaaggtttcaaagttggaaggta

SEQ ID NO: 2209 - DNA, 80 bp, synthetic construct
  misc_feature 1..80: note = Synthetic: >Anlong-cand-4820-4899
  source 1..80: mol_type = other DNA
agacattctgcactgtacctattaaagagataatgcagagtgcacttaaaatctttgactcaagttacgcatttgttgtt

SEQ ID NO: 2210 - DNA, 80 bp, synthetic construct
  misc_feature 1..80: note = Synthetic: >Anlong-cand-4900-4979
  source 1..80: mol_type = other DNA
caagctgatgagaagaaacttgtggaagattgttttaagccacagagtgttaagttgacaacaacagaggatggtgttaa

SEQ ID NO: 2211 - DNA, 80 bp, synthetic construct
  misc_feature 1..80: note = Synthetic: >Anlong-cand-4990-5069
  source 1..80: mol_type = other DNA
gtaattgtttctagtgctgctacgtatggtgagcagttgggtactgttactaatggtaatacagaccttactgctactaa

SEQ ID NO: 2212 - DNA, 80 bp, synthetic construct
  misc_feature 1..80: note = Synthetic: >Anlong-cand-5070-5149
  source 1..80: mol_type = other DNA
gccatctagtagtgatgaaactaagattttgaatgtggcaccagcagttgattgggttgctcattatggtttccatgatg

SEQ ID NO: 2213 - DNA, 80 bp, synthetic construct
  misc_feature 1..80: note = Synthetic: >Anlong-cand-5150-5229
  source 1..80: mol_type = other DNA
cagcagcttttgttacgtacgaccacaagccttttgcttacgaaagtgatatgcttatgggtaagcgtactttaaaacag

SEQ ID NO: 2214 - DNA, 80 bp, synthetic construct
  misc_feature 1..80: note = Synthetic: >Anlong-cand-5230-5309
  source 1..80: mol_type = other DNA
actgataataactgctggattaatgctgcctgtctagcactgcagtatttgaaacccaagtttcgatatcctggttggga

SEQ ID NO: 2215 - DNA, 80 bp, synthetic construct
  misc_feature 1..80: note = Synthetic: >Anlong-cand-5310-5389
  source 1..80: mol_type = other DNA
agctgcctggaataaatttgttacaggtgcttgtgaagaatttgtgcatctcttataccatattgcgcaagctcgcaagg

SEQ ID NO: 2216 - DNA, 80 bp, synthetic construct
  misc_feature 1..80: note = Synthetic: >Anlong-cand-5390-5469
  source 1..80: mol_type = other DNA
gtgatttaggggatgcagaagaattgcttggcaggttggataagttcatcgtgccaggtggtacagtagttttggagcgc

SEQ ID NO: 2217 - DNA, 80 bp, synthetic construct
  misc_feature 1..80: note = Synthetic: >Anlong-cand-5470-5549
  source 1..80: mol_type = other DNA
cacgttgactgttctgtttgtaagacaacggagcgtgtcgttaagtctagcgttgtatctgctagtcttaagcgtgaagg

SEQ ID NO: 2218 - DNA, 80 bp, synthetic construct
  misc_feature 1..80: note = Synthetic: >Anlong-cand-5550-5629
  source 1..80: mol_type = other DNA
cgttgatgacggcgcttgttgcaaacacggtagtgcttattcactgcgtgttaagagtgtaaagggcgacgttatcgtaa

SEQ ID NO: 2219 - DNA, 80 bp, synthetic construct
  misc_feature 1..80: note = Synthetic: >Anlong-cand-5630-5709
  source 1..80: mol_type = other DNA
ctacttgtgaaaaaccacaatgctacaggaattcagaagttctctgcggtgaagcatatgttgcatttactggtcctgtg

SEQ ID NO: 2220 - DNA, 80 bp, synthetic construct
  misc_feature 1..80: note = Synthetic: >Anlong-cand-5710-5789
  source 1..80: mol_type = other DNA
gatggtggtcattatctggtgtatgataggtctactggtcaagtttttgatggtgacagaattgtgccatatgaatttga

SEQ ID NO: 2221 - DNA, 80 bp, synthetic construct
  misc_feature 1..80: note = Synthetic: >Anlong-cand-5790-5869
  source 1..80: mol_type = other DNA
cactttgacggtttctgcactagttgtgaaagggggctatgtttgttcggtgccaaaagctattaaacttgagcgcgtta

SEQ ID NO: 2222 - DNA, 80 bp, synthetic construct
  misc_feature 1..80: note = Synthetic: >Anlong-cand-5870-5949
  source 1..80: mol_type = other DNA
tgacagatttggataacggtgctcaaaagttctttgattttggcgattttgtgttacgcaatctcgtcagtttcttctct

SEQ ID NO: 2223 - DNA, 80 bp, synthetic construct
  misc_feature 1..80: note = Synthetic: >Anlong-cand-5950-6029
  source 1..80: mol_type = other DNA
gtgttatttagtctattgtttataggctataaagcattgagaaaaagagatcttaaagttttagcacaggcaccgcagcg

SEQ ID NO: 2224 - DNA, 80 bp, synthetic construct
  misc_feature 1..80: note = Synthetic: >AvianCoV-cand-11240-11319
  source 1..80: mol_type = other DNA
aaagcttaatgtattatttgaccaggcaagtagtggtgttgtaccgctagctactgttccaatagtttgtagtaataagc

SEQ ID NO: 2225 - DNA, 80 bp, synthetic construct
  misc_feature 1..80: note = Synthetic: >AvianCoV-cand-11320-11399
  source 1..80: mol_type = other DNA
ttactcttgtagtaccagatccagaaacttgggtcaagtgcgtagagggtatgcatgttacatattcaacagttgtttgg

SEQ ID NO: 2226 - DNA, 80 bp, synthetic construct
  misc_feature 1..80: note = Synthetic: >AvianCoV-cand-11420-11499
  source 1..80: mol_type = other DNA
tgcagatggcactgaattgcaaccaacttctacaggtaatggtttaacttactgtataagtggtgataatatagcatggc

SEQ ID NO: 2227 - DNA, 80 bp, synthetic construct
  misc_feature 1..80: note = Synthetic: >AvianCoV-cand-11500-11579
  source 1..80: mol_type = other DNA
ctcttaaggtcaacttgactaggaatgggcataataaagttgatgcagtattgcagaacaacgagcttatgcctcatggt

SEQ ID NO: 2228 - DNA, 80 bp, synthetic construct
  misc_feature 1..80: note = Synthetic: >AvianCoV-cand-11580-11659
  source 1..80: mol_type = other DNA
gttaaaacaaaggcttgcgtggcaggtgtagatcaagcacactgcagcgtagagtctaaatgttattatactaatattag

SEQ ID NO: 2229 - DNA, 80 bp, synthetic construct
  misc_feature 1..80: note = Synthetic: >AvianCoV-cand-11660-11739
  source 1..80: mol_type = other DNA
tggtaattcagttgtagctgctattacttcttcaaatccaaatttgaaagttgcctcatttttgaatgaggcaggcaatc

SEQ ID NO: 2230 - DNA, 80 bp, synthetic construct
  misc_feature 1..80: note = Synthetic: >AvianCoV-cand-11740-11819
  source 1..80: mol_type = other DNA
aaatttatgtagacttagacccaccatgtaaatttggcatgaaggtgggtgataaagttgaagttgtttacttgtatttt

SEQ ID NO: 2231 - DNA, 80 bp, synthetic construct
  misc_feature 1..80: note = Synthetic: >AvianCoV-cand-11820-11899
  source 1..80: mol_type = other DNA
ataaagaatacaaggtcaattgttagaggtatggtacttggtgctatatctaatgttgttgtcttacagtctaaaggaca

SEQ ID NO: 2232 - DNA, 80 bp, synthetic construct
  misc_feature 1..80: note = Synthetic: >AvianCoV-cand-11900-11979
  source 1..80: mol_type = other DNA
tgagacagaggaagttgatgctgttggcatactatcactttgttcttttgcagtagatccggctgacacgtattgtaaat

SEQ ID NO: 2233 - DNA, 80 bp, synthetic construct
  misc_feature 1..80: note = Synthetic: >AvianCoV-cand-11980-12059
  source 1..80: mol_type = other DNA
atgtggcagcaggtaatcaacctttaggtaactgtgttaaaatgttgacagttcataatggtagtggctttgctataaca

SEQ ID NO: 2234 - DNA, 80 bp, synthetic construct
  misc_feature 1..80: note = Synthetic: >AvianCoV-cand-12060-12139
  source 1..80: mol_type = other DNA
tcaaagccaagtccaactcctgatcaggattcttatggaggagcttctgtgtgtctctattgtagagcacatatagcaca

SEQ ID NO: 2235 - DNA, 80 bp, synthetic construct
  misc_feature 1..80: note = Synthetic: >AvianCoV-cand-12140-12219
  source 1..80: mol_type = other DNA
cccaggaagtgcaggaaatttagatggacgttgtcaatttaaaggttcttttgtacaaatacctactacggagaaagacc

SEQ ID NO: 2236 - DNA, 80 bp, synthetic construct
  misc_feature 1..80: note = Synthetic: >AvianCoV-cand-12220-12299
  source 1..80: mol_type = other DNA
ctgttggattctgtctacgtaataaggtttgcactgtttgtcagtgttggataggtcatggatgtcaatgtgattcactt

SEQ ID NO: 2237 - DNA, 80 bp, synthetic construct
  misc_feature 1..80: note = Synthetic: >AvianCoV-cand-12300-12379
  source 1..80: mol_type = other DNA
agacaaccaaaaccttctgttcaatcagatgctggtgcacctggttttgataagaattatttaaacgggtacggggtagc

SEQ ID NO: 2238 - DNA, 80 bp, synthetic construct
  misc_feature 1..80: note = Synthetic: >AvianCoV-cand-12380-12459
  source 1..80: mol_type = other DNA
agtgaggctcggctgataccccttgctaatggatgtgaacctgatgttgtaaagcgagcctttgatgtatgtaataagga

SEQ ID NO: 2239 - DNA, 80 bp, synthetic construct
  misc_feature 1..80: note = Synthetic: >AvianCoV-cand-12460-12539
  source 1..80: mol_type = other DNA
atcagccggtatgtttaaaaatttgaagcgtaactgtgctcgattccaagaagtgcgtggtactgaagatggaaatcttg

SEQ ID NO: 2240 - DNA, 80 bp, synthetic construct
  misc_feature 1..80: note = Synthetic: >Beluga-cand-25300-25379
  source 1..80: mol_type = other DNA
cactatccacatttctgactttgattatttgtgtgttacagtttggttatgcctctcgtaacaggttcttttattggatt

SEQ ID NO: 2241 - DNA, 80 bp, synthetic construct
  misc_feature 1..80: note = Synthetic: >Beluga-cand-25380-25459
  source 1..80: mol_type = other DNA
aaaattattacattgtggcttatgtggccatttgctattgttactgcagtgttttcgtgtttgtaccccccgtgttatga

SEQ ID NO: 2242 - DNA, 80 bp, synthetic construct
  misc_feature 1..80: note = Synthetic: >Beluga-cand-25460-25539
  source 1..80: mol_type = other DNA
gtatgcctctagggttgggcagaacagcttttccctacttcttcaccagtgagtacaaccacacatagtagcacattatc

SEQ ID NO: 2243 - DNA, 80 bp, synthetic construct
  misc_feature 1..80: note = Synthetic: >Beluga-cand-25540-25619
  source 1..80: mol_type = other DNA
tgttactaaagttcctatacctcagggtaatggtctttggtcctgtggttcaacttatggtcataatattaacattactg

SEQ ID NO: 2244 - DNA, 80 bp, synthetic construct
  misc_feature 1..80: note = Synthetic: >Beluga-cand-25620-25699
  source 1..80: mol_type = other DNA
catttgtgtttgcgataatttttgcaattttcacatgtgcagcatggttattttattggatacaatccacacgcctgtat

SEQ ID NO: 2245 - DNA, 80 bp, synthetic construct
  misc_feature 1..80: note = Synthetic: >Beluga-cand-25700-25779
  source 1..80: mol_type = other DNA
ttgagagtaaggtcttggtgggctttctcacccgacactaactacgttgctgtatttaaaatggctaatgaccagtattt

SEQ ID NO: 2246 - DNA, 80 bp, synthetic construct
  misc_feature 1..80: note = Synthetic: >Beluga-cand-25780-25859
  source 1..80: mol_type = other DNA
tactttgcctttgcttgaaatacctatggtcctcagtcttgtttataagaacaattttgtttattgtaatggtacatacc

SEQ ID NO: 2247 - DNA, 80 bp, synthetic construct
  misc_feature 1..80: note = Synthetic: >Beluga-cand-25860-25939
  source 1..80: mol_type = other DNA
tcggccgaattcccagtatgggttatctgcctgctagttgtatagtaggcagtgccgagaagattgctagatataggaaa

SEQ ID NO: 2248 - DNA, 80 bp, synthetic construct
  misc_feature 1..80: note = Synthetic: >Beluga-cand-25940-26019
  source 1..80: mol_type = other DNA
atcacagtgtcagcagcagatggcagtgatgctaatgtagctcgttttggtactgtgatatatgcgaaagataaatatat

SEQ ID NO: 2249 - DNA, 80 bp, synthetic construct
  misc_feature 1..80: note = Synthetic: >Beluga-cand-26020-26099
  source 1..80: mol_type = other DNA
aagtgcaggacttgcatatactaagagagagaaaactgagacagagaagctttattctgtttaaacatgtcagttcgtta

SEQ ID NO: 2250 - DNA, 80 bp, synthetic construct
  misc_feature 1..80: note = Synthetic: >Beluga-cand-26100-26179
  source 1..80: mol_type = other DNA
ttacctgaaaattgatgtgtgttggcaatatgtggcacatttatggccaccttactacaaagttctcagtaataatacca

SEQ ID NO: 2251 - DNA, 80 bp, synthetic construct
  misc_feature 1..80: note = Synthetic: >Beluga-cand-26180-26259
  source 1..80: mol_type = other DNA
ctgagatagttgaatgtagagtaaatcctggtaggggtataaatcatatctctttgatgggaaatgattttacctctcac

SEQ ID NO: 2252 - DNA, 80 bp, synthetic construct
  misc_feature 1..80: note = Synthetic: >Beluga-cand-26260-26339
  source 1..80: mol_type = other DNA
aaatttactggtctaatttctagcttctctactgctaagagttctacggaacatttgcattatttatgtcatcatagaat

SEQ ID NO: 2253 - DNA, 80 bp, synthetic construct
  misc_feature 1..80: note = Synthetic: >Beluga-cand-26340-26419
  source 1..80: mol_type = other DNA
tgctgaagttctgaatcaattgcagaaagggcgttctaagatattgtatgttaagactaagttattgggtgtaaatatga

SEQ ID NO: 2254 - DNA, 80 bp, synthetic construct
  misc_feature 1..80: note = Synthetic: >Beluga-cand-26420-26499
  source 1..80: mol_type = other DNA
ttagtgttactcaaccaataacgacttttattgatataggaaacccagaacctttgaccacctttggttttagccatggg

SEQ ID NO: 2255 - DNA, 80 bp, synthetic construct
  misc_feature 1..80: note = Synthetic: >Beluga-cand-26500-26579
  source 1..80: mol_type = other DNA
taatttcctttctaatatatttacagttcaggttagcaccaaccacaacgcacatgtagtgcaagctggtcatgatgcta

SEQ ID NO: 2256 - DNA, 80 bp, synthetic construct
  misc_feature 1..80: note = Synthetic: >BetaCoV1-cand-3770-3849
  source 1..80: mol_type = other DNA
aaactaccaggactaattgctggttgcgttctgtcctggcagtaatgcagaaaataccttgtgtatttaaggataagaaa

SEQ ID NO: 2257 - DNA, 80 bp, synthetic construct
  misc_feature 1..80: note = Synthetic: >BetaCoV1-cand-3850-3929
  source 1..80: mol_type = other DNA
ttacagagtttgtggtgtttgtacaagaatcagtattcttctgattttgtagatgcactgttgaaaaagattccggaaaa

SEQ ID NO: 2258 - DNA, 80 bp, synthetic construct
  misc_feature 1..80: note = Synthetic: >BetaCoV1-cand-3930-4009
  source 1..80: mol_type = other DNA
tattattgtaccggaaggaggctatgttgctgattttgcttattggtttttaatgcagtgcaaatggaatgctaactcct

SEQ ID NO: 2259 - DNA, 80 bp, synthetic construct
  misc_feature 1..80: note = Synthetic: >BetaCoV1-cand-4010-4089
  source 1..80: mol_type = other DNA
attggcgctgcttgaattgtgggattgatagtgagtataaaggccttgatgccatgttcttctatggagatgtaatctca

SEQ ID NO: 2260 - DNA, 80 bp, synthetic construct
  misc_feature 1..80: note = Synthetic: >BetaCoV1-cand-4090-4169
  source 1..80: mol_type = other DNA
cagccatgtaagacatgtggtcagagtatggtggcacttaagctagatgcaccatgcacactacacttttcattgatcga

SEQ ID NO: 2261 - DNA, 80 bp, synthetic construct
  misc_feature 1..80: note = Synthetic: >BetaCoV1-cand-4170-4249
  source 1..80: mol_type = other DNA
caccacatttagtgcgttcttttcattgaagagagtgtacttagcagcgtgtgttgttgatgtgcataatcgacactcat

SEQ ID NO: 2262 - DNA, 80 bp, synthetic construct
  misc_feature 1..80: note = Synthetic: >BetaCoV1-cand-4250-4329
  source 1..80: mol_type = other DNA
tggcagtgattgattataatggtttaaaacaagttgatgggacgcttgttacaaatgttagtagtaacaagtttgatttt

SEQ ID NO: 2263 - DNA, 80 bp, synthetic construct
  misc_feature 1..80: note = Synthetic: >BetaCoV1-cand-4330-4409
  source 1..80: mol_type = other DNA
atagttgggcatcctgttagttttgctatgtcaactttcgagattgctcagctttatggaacttgtataacaccagatgt

SEQ ID NO: 2264 - DNA, 80 bp, synthetic construct
  misc_feature 1..80: note = Synthetic: >BetaCoV1-cand-4410-4489
  source 1..80: mol_type = other DNA
ttgttttgtaaaaggtgatattatagatgttgctaagaaggtctttgctgatgttgttgtgaaccctgccaacagccata

SEQ ID NO: 2265 - DNA, 80 bp, synthetic construct
  misc_feature 1..80: note = Synthetic: >BetaCoV1-cand-4500-4579
  source 1..80: mol_type = other DNA
tggcggtgtagcaaaagcaatcgcaagggcagctggcgatgcctttaataaagagacttctgacatggtaaagttgagag

SEQ ID NO: 2266 - DNA, 80 bp, synthetic construct
  misc_feature 1..80: note = Synthetic: >BetaCoV1-cand-4580-4659
  source 1..80: mol_type = other DNA
gtccttgtcctgtgggtgaatgttataaatccacaggtggaaaattgtgtaagttggtgcttaatgttgttggtcctgat

SEQ ID NO: 2267 - DNA, 80 bp, synthetic construct
  misc_feature 1..80: note = Synthetic: >BetaCoV1-cand-4660-4739
  source 1..80: mol_type = other DNA
gcgcgagcacagggtaaacaatcttacgcgctacttgaacgcgtctataagacgtttaataaatatgaatgttgcgtcac

SEQ ID NO: 2268 - DNA, 80 bp, synthetic construct
  misc_feature 1..80: note = Synthetic: >BetaCoV1-cand-4740-4819
  source 1..80: mol_type = other DNA
tacgttagtgtcagctggtatatttagtgtaccatctgatgtttcgttgacgtatttgttgggggccaccactaaaaagg

SEQ ID NO: 2269 - DNA, 80 bp, synthetic construct
  misc_feature 1..80: note = Synthetic: >BetaCoV1-cand-4820-4899
  source 1..80: mol_type = other DNA
tagtgttggtcagtaataataaagaagattttaagctcatcgagggttgtcaaacaacagccgtcgatggtactaaacag

SEQ ID NO: 2270 - DNA, 80 bp, synthetic construct
  misc_feature 1..80: note = Synthetic: >BetaCoV1-cand-4900-4979
  source 1..80: mol_type = other DNA
ttggctgctagattaactcaacagttgggtcgccagattaagtatgaaaccgatgcaagtatagctcttcttgataagga

SEQ ID NO: 2271 - DNA, 80 bp, synthetic construct
  misc_feature 1..80: note = Synthetic: >BetaCoV1-cand-4980-5059
  source 1..80: mol_type = other DNA
gacaactctagtatcgacttatgataagctgcaggacatttattgtatgcagcatgatataaagttggatgatgatgccc

SEQ ID NO: 2272 - DNA, 80 bp, synthetic construct
  misc_feature 1..80: note = Synthetic: >BetaCoV1-cand-19140-19219
  source 1..80: mol_type = other DNA
tttgtaataatgttaattggaaccttgagtatccaattattagtaatgagttagttataaattcctcttgtagggcattg

SEQ ID NO: 2273 - DNA, 80 bp, synthetic construct
  misc_feature 1..80: note = Synthetic: >BetaCoV1-cand-19220-19299
  source 1..80: mol_type = other DNA
cagagagttatgcttaaggcggcgatgctctgtaataggtatagtttgtgttatgacattggcaacccgaaagcgattgc

SEQ ID NO: 2274 - DNA, 80 bp, synthetic construct
  misc_feature 1..80: note = Synthetic: >BetaCoV1-cand-19300-19379
  source 1..80: mol_type = other DNA
ctgtgtcaaagattttgattttaagttctatgatgctaagcctcttgttaaggcggtgaagactcttgtctacacatatg

SEQ ID NO: 2275 - DNA, 80 bp, synthetic construct
  misc_feature 1..80: note = Synthetic: >BetaCoV1-cand-19380-19459
  source 1..80: mol_type = other DNA
atgctcataaggacagttttaaagatggtttgtgtatgttttggaactgcaatgtggataagtatccatccaatgcagta

SEQ ID NO: 2276 - DNA, 80 bp, synthetic construct
  misc_feature 1..80: note = Synthetic: >BetaCoV1-cand-19460-19539
  source 1..80: mol_type = other DNA
gtatgtcggtttgacacaagagtgttaagcaagttaaatctccctggctgtaatggtggtagtctgtatgttaataaaca

SEQ ID NO: 2277 - DNA, 80 bp, synthetic construct
  misc_feature 1..80: note = Synthetic: >BetaCoV1-cand-19540-19619
  source 1..80: mol_type = other DNA
tgcattccacacacctccctttacaagggcagcctttgagtatttgaaaccaatgccttttttctattattcagatacgc

SEQ ID NO: 2278 - DNA, 80 bp, synthetic construct
  misc_feature 1..80: note = Synthetic: >BetaCoV1-cand-19620-19699
  source 1..80: mol_type = other DNA
cttgtgtgtatatggaaggcattgatgttaaacaggtagattatgtacctcttaaatccgccacttgcatcacaagatgc

SEQ ID NO: 2279 - DNA, 80 bp, synthetic construct
  misc_feature 1..80: note = Synthetic: >BetaCoV1-cand-19700-19779
  source 1..80: mol_type = other DNA
aatttaggtggtgcagtttgtttaaagcatgctgaggagtatcgtgagtatcttgaatgctacaatacagcaactacagc

SEQ ID NO: 2280 - DNA, 80 bp, synthetic construct
  misc_feature 1..80: note = Synthetic: >BetaCoV1-cand-19780-19859
  source 1..80: mol_type = other DNA
aggttttactttttgggtctataagacctttgagttttataatttgtggaatacatttacccaactgcagagtttggaga

SEQ ID NO: 2281 - DNA, 80 bp, synthetic construct
  misc_feature 1..80: note = Synthetic: >BetaCoV1-cand-19860-19939
  source 1..80: mol_type = other DNA
atgtagtatataatttagtcaagactggagcatttactggtgaggccggcgaaatgccttgtgctatccgtaatgacaaa

SEQ ID NO: 2282 - DNA, 80 bp, synthetic construct
  misc_feature 1..80: note = Synthetic: >BetaCoV1-cand-19940-20019
  source 1..80: mol_type = other DNA
gtctttgctaagattgaacaggaggatgttttagtgtttaaaaataacacaacattccctactaatgtggctgtcgaact

SEQ ID NO: 2283 - DNA, 80 bp, synthetic construct
  misc_feature 1..80: note = Synthetic: >BetaCoV1-cand-20020-20099
  source 1..80: mol_type = other DNA
attcgctaagcgaagtgttaggcaccacccagagctgaagctcttaagaaatttgaatgttgatgtgtgttggaagcata

SEQ ID NO: 2284 - DNA, 80 bp, synthetic construct
  misc_feature 1..80: note = Synthetic: >BetaCoV1-cand-20100-20179
  source 1..80: mol_type = other DNA
tcatatgggattatgttagagagagtatattttgcactagcacctttggtgtttgcaagtatactgatattaaaaatatt

SEQ ID NO: 2285 - DNA, 80 bp, synthetic construct
  misc_feature 1..80: note = Synthetic: >BetaCoV1-cand-20180-20259
  source 1..80: mol_type = other DNA
agtcaattaaatgtattgtatgatggtcgtgacaatggtgctcttgaagcatttagaaacgcacaaaatggtgtgtacat

SEQ ID NO: 2286 - DNA, 80 bp, synthetic construct
  misc_feature 1..80: note = Synthetic: >BetaCoV1-cand-20260-20339
  source 1..80: mol_type = other DNA
tagcacgacaaaaataaaaagtctatcgatgattaaaggtccaccacgcgcagaattaaatggcctggtggtggataaag

SEQ ID NO: 2287 - DNA, 80 bp, synthetic construct
  misc_feature 1..80: note = Synthetic: >BetaCoV1-cand-20340-20419
  source 1..80: mol_type = other DNA
ttggaaaagaagatgtttctttttattttgcagttcgtaaagagggtcaggacgttatcttcagccagttaaccagcctg

SEQ ID NO: 2288 - DNA, 80 bp, synthetic construct
  misc_feature 1..80: note = Synthetic: >CDPHE15-cand-23510-23589
  source 1..80: mol_type = other DNA
tttagttacgccgtgcaagcaagccttaattatgttgcattgcaaaccgatgttctacaacgcaatcaacaaatgcttgc

SEQ ID NO: 2289 - DNA, 80 bp, synthetic construct
  misc_feature 1..80: note = Synthetic: >CDPHE15-cand-23590-23669
  source 1..80: mol_type = other DNA
agagtcattcaacaatgccattggtaacataactaatgcattcgctagtgttaacgatgccatatcacagactgctgaag

SEQ ID NO: 2290 - DNA, 80 bp, synthetic construct
  misc_feature 1..80: note = Synthetic: >CDPHE15-cand-23670-23749
  source 1..80: mol_type = other DNA
gtcttaacactgttgctgaagcactttcaaaagtccaagacgttgttaacaaccagggtatggcactaaaccatctaact

SEQ ID NO: 2291 - DNA, 80 bp, synthetic construct
  misc_feature 1..80: note = Synthetic: >CDPHE15-cand-23750-23829
  source 1..80: mol_type = other DNA
ctacaattgcaaaacaacttccaggcaattagttcttctatcgcagacatctatcgcaggctagatcaacttacggcgga

SEQ ID NO: 2292 - DNA, 80 bp, synthetic construct
  misc_feature 1..80: note = Synthetic: >CDPHE15-cand-23830-23909
  source 1..80: mol_type = other DNA
tgcacaagtagacagactaattaatggcagactggctgcgcttaatgcctttgtgtcacaaacactgacaaagtattctc

SEQ ID NO: 2293 - DNA, 80 bp, synthetic construct
  misc_feature 1..80: note = Synthetic: >CDPHE15-cand-23910-23989
  source 1..80: mol_type = other DNA
aagtgcaagcttctcgtactttggccaagcagaagattaatgagtgcgttttatctcaatcaccgagatatggcttctgt

SEQ ID NO: 2294 - DNA, 80 bp, synthetic construct
  misc_feature 1..80: note = Synthetic: >CDPHE15-cand-24000-24079
  source 1..80: mol_type = other DNA
gcagacatgtgttcaccgtcacacaggctgcaccacaagggatactctttttacacaccgtactcagacctactagcagt

SEQ ID NO: 2295 - DNA, 80 bp, synthetic construct
  misc_feature 1..80: note = Synthetic: >CDPHE15-cand-24080-24159
  source 1..80: mol_type = other DNA
attaatgttactgctgctgctggtatttgcgttgatggtgcggggtatgctttaaaccaaccaggcttagttctcattta

SEQ ID NO: 2296 - DNA, 80 bp, synthetic construct
  misc_feature 1..80: note = Synthetic: >CDPHE15-cand-24160-24239
  source 1..80: mol_type = other DNA
ccaacaaaacaaataccttattacacccagagttatgtttgaaccacgacagcctcagattagtgactttgtgcgtatag

SEQ ID NO: 2297 - DNA, 80 bp, synthetic construct
  misc_feature 1..80: note = Synthetic: >CDPHE15-cand-24240-24319
  source 1..80: mol_type = other DNA
aaggctgtgacgtagagtattttaatgtcactagtgactcgctacctgacattttcccagactttattgatgtcaataaa

SEQ ID NO: 2298 - DNA, 80 bp, synthetic construct
  misc_feature 1..80: note = Synthetic: >CDPHE15-cand-24320-24399
  source 1..80: mol_type = other DNA
actctggaagatattctttcacagctgcaaaacaacactggacctaagtttgatattgacatttttaatgccacatatct

SEQ ID NO: 2299 - DNA, 80 bp, synthetic construct
  misc_feature 1..80: note = Synthetic: >CDPHE15-cand-24400-24479
  source 1..80: mol_type = other DNA
caacttatccagtgaaattgcagacctcgaaatgaggtctgaatctttgcacaatactacagaggaacttaagcgactta

SEQ ID NO: 2300 - DNA, 80 bp, synthetic construct
  misc_feature 1..80: note = Synthetic: >CDPHE15-cand-24480-24559
  source 1..80: mol_type = other DNA
ttgataatataaattcaacacttgtggaccttgaatggctcaatagggttgaaacttatattaagtggccatggtgggtg

SEQ ID NO: 2301 - DNA, 80 bp, synthetic construct
  misc_feature 1..80: note = Synthetic: >CDPHE15-cand-24560-24639
  source 1..80: mol_type = other DNA
tggttgcttattgccattgcgctcatttttacagtttctttgttgttgttctgttgtattgcaacagggtgttgtggctg

SEQ ID NO: 2302 - DNA, 80 bp, synthetic construct
  misc_feature 1..80: note = Synthetic: >CDPHE15-cand-24640-24719
  source 1..80: mol_type = other DNA
ttgtggctgttgtgcttcttgtttaactggttgttgtaaaggtcctagattacaaccatacgaagctattgaaaaggtcc

SEQ ID NO: 2303 - DNA, 80 bp, synthetic construct
  misc_feature 1..80: note = Synthetic: >CDPHE15-cand-24720-24799
  source 1..80: mol_type = other DNA
acgtgcagtaatgtttcttggacttttccagtatacaattaactctgccatcaaagatagtatcgctaagagcaatttgt

SEQ ID NO: 2304 - DNA, 80 bp, synthetic construct
  misc_feature 1..80: note = Synthetic: >CDPHE15-cand-26080-26159
  source 1..80: mol_type = other DNA
ctttaaggttgctgtaggagtcacggtagaacttctacctgactatgtaacagttgccaagccgcatacgacaatcatat

SEQ ID NO: 2305 - DNA, 80 bp, synthetic construct
  misc_feature 1..80: note = Synthetic: >CDPHE15-cand-26160-26239
  source 1..80: mol_type = other DNA
accagcgagttggacgttctgtcaatgcgagatccaacacaggttggtctttttacgtgaaggctaaatacggcgactat

SEQ ID NO: 2306 - DNA, 80 bp, synthetic construct
  misc_feature 1..80: note = Synthetic: >CDPHE15-cand-26240-26319
  source 1..80: mol_type = other DNA
gctactactggacattcaaatgataaagttccagatagtgaagttgtgttacatttagtataaactaaacaaaatggcct

SEQ ID NO: 2307 - DNA, 80 bp, synthetic construct
  misc_feature 1..80: note = Synthetic: >CDPHE15-cand-26320-26399
  source 1..80: mol_type = other DNA
ctgtcaagttcgccaagaacaaccgcagaggaaggatggaatactcccattttgccccacttattatcaattctgaccaa

SEQ ID NO: 2308 - DNA, 80 bp, synthetic construct
  misc_feature 1..80: note = Synthetic: >CDPHE15-cand-26400-26479
  source 1..80: mol_type = other DNA
cccatttggaaagttcttcctaacaatgctgtgccagttggcaagggcggtaaggatgagcagattgggtattggaatga

SEQ ID NO: 2309 - DNA, 80 bp, synthetic construct
  misc_feature 1..80: note = Synthetic: >CDPHE15-cand-26480-26559
  source 1..80: mol_type = other DNA
acaaccacgttggcgcatgcgcaagggacagcgtgttgacgttgcatctaagtggcacttctattacctcggtactggac

SEQ ID NO: 2310 - DNA, 80 bp, synthetic construct
  misc_feature 1..80: note = Synthetic: >CDPHE15-cand-26560-26639
  source 1..80: mol_type = other DNA
ctcactctgaggagcagtatcgtaagcgtattgacggtgtctactgggttgctgtcaacggagctaaaacatcgccaaca

SEQ ID NO: 2311 - DNA, 80 bp, synthetic construct
  misc_feature 1..80: note = Synthetic: >CDPHE15-cand-26640-26719
  source 1..80: mol_type = other DNA
gggcttggcactcgcagtgctaagaccaagccgctggaactgaagtttaacacgaaaatccctaaggaggttgagttcgt

SEQ ID NO: 2312 - DNA, 80 bp, synthetic construct
  misc_feature 1..80: note = Synthetic: >CDPHE15-cand-26720-26799
  source 1..80: mol_type = other DNA
tgaacctacctctccagggtcttctcgtgcaaactcgcgcagccaaagccgtggtggttctaaatccagaaataattctc

SEQ ID NO: 2313 - DNA, 80 bp, synthetic construct
  misc_feature 1..80: note = Synthetic: >CDPHE15-cand-26800-26879
  source 1..80: mol_type = other DNA
ccagaaggggtaatcaaagcaaatcaaggaacagttctaagaacagaggtggtgacaaccgctcccgtagttcctcaggt

SEQ ID NO: 2314 - DNA, 80 bp, synthetic construct
  misc_feature 1..80: note = Synthetic: >CDPHE15-cand-26880-26959
  source 1..80: mol_type = other DNA
acaagagaccaggaagcaattgttgccgccgtaaaggctgcgcttttgggacttggacttggtactgacagtaactccgg

SEQ ID NO: 2315 - DNA, 80 bp, synthetic construct
  misc_feature 1..80: note = Synthetic: >CDPHE15-cand-26960-27039
  source 1..80: mol_type = other DNA
tgcttcaggtaaggcttctaaggctaacagtggaacttcgaccccaaaaccgaaaccagctgcaacgccaaaaccgcctt

SEQ ID NO: 2316 - DNA, 80 bp, synthetic construct
  misc_feature 1..80: note = Synthetic: >CDPHE15-cand-27040-27119
  source 1..80: mol_type = other DNA
caacacctaagagtcagcttgaaagacctgaatggaagcgagtgccagattctgattgctctgttgagcagtgctttgga

SEQ ID NO: 2317 - DNA, 80 bp, synthetic construct
  misc_feature 1..80: note = Synthetic: >CDPHE15-cand-27120-27199
  source 1..80: mol_type = other DNA
ccacgtggtggcttcaagaattttggcagcgcagatttcgtacagtatggtgtcgctgctaagggttaccctcaagcagc

SEQ ID NO: 2318 - DNA, 80 bp, synthetic construct
  misc_feature 1..80: note = Synthetic: >CDPHE15-cand-27200-27279
  source 1..80: mol_type = other DNA
cgcactaacaccaacatcagctgcactgctgttcggtggtaacgtacaggttcaggaactttcagatgacattgaaatca

SEQ ID NO: 2319 - DNA, 80 bp, synthetic construct
  misc_feature 1..80: note = Synthetic: >CDPHE15-cand-27280-27359
  source 1..80: mol_type = other DNA
cctacacctacaagatgactgttcccaagtcagacaaaaaccttgaggtcttcctctctaatgttaatgcttacaaagaa

SEQ ID NO: 2320 - DNA, 80 bp, synthetic construct
  misc_feature 1..80: note = Synthetic: >CanadaGoose-cand-400-479
  source 1..80: mol_type = other DNA
ctcatctctaaaggcttttgagcccagcgttgaactacgtctttgcacaaaaccggctatacggtggtaggaggggtagt

SEQ ID NO: 2321 - DNA, 80 bp, synthetic construct
  misc_feature 1..80: note = Synthetic: >CanadaGoose-cand-480-559
  source 1..80: mol_type = other DNA
gcctagaaactctagaggcgactagctcttgtggggtttagtgagcagacaagtaaacgtcagcaactaatgatggcttc

SEQ ID NO: 2322 - DNA, 80 bp, synthetic construct
  misc_feature 1..80: note = Synthetic: >CanadaGoose-cand-560-639
  source 1..80: mol_type = other DNA
agccatgaaaaaggaagtatcttcctctcaaggagttgtaatttatgtgttaccagatgcaactcctacaatcttggatg

SEQ ID NO: 2323 - DNA, 80 bp, synthetic construct
  misc_feature 1..80: note = Synthetic: >CanadaGoose-cand-640-719
  source 1..80: mol_type = other DNA
cgcttttcttttacactgcgcaccagcctgttgatgcttgtgatgctattcaagttcgtcgcaagtttgataagaagtta

SEQ ID NO: 2324 - DNA, 80 bp, synthetic construct
  misc_feature 1..80: note = Synthetic: >CanadaGoose-cand-720-799
  source 1..80: mol_type = other DNA
acttctggaaagaagttttcttttgacacagtgaatggagttgttcacgtcattggcgtgaagaaaaccgttcctggtgt

SEQ ID NO: 2325 - DNA, 80 bp, synthetic construct
  misc_feature 1..80: note = Synthetic: >CanadaGoose-cand-800-879
  source 1..80: mol_type = other DNA
ctttgttgttgacgctaatactaaattggcggatttagaaaatgtgcttggtgtttccacactggcacgtttataccgtg

SEQ ID NO: 2326 - DNA, 80 bp, synthetic construct
  misc_feature 1..80: note = Synthetic: >CanadaGoose-cand-880-959
  source 1..80: mol_type = other DNA
atttgctcaaacaagcgaatcagtggtcattgtcacttagtgcgcttgaggaaaaagctctccaacttgaggaaagtttt

SEQ ID NO: 2327 - DNA, 80 bp, synthetic construct
  misc_feature 1..80: note = Synthetic: >CanadaGoose-cand-960-1039
  source 1..80: mol_type = other DNA
cccagagtgcatgtctttttgttgcagactgccgcgtgtgttaaggttgcagccctcacactgcgtagtctgataggatt

SEQ ID NO: 2328 - DNA, 80 bp, synthetic construct
  misc_feature 1..80: note = Synthetic: >CanadaGoose-cand-1040-1119
  source 1..80: mol_type = other DNA
gttagttaaggatttcaaagttttgttgaaaccctttgttaatgttccagatgggttttcttgtaaactcaatctcgcct

SEQ ID NO: 2329 - DNA, 80 bp, synthetic construct
  misc_feature 1..80: note = Synthetic: >CanadaGoose-cand-1120-1199
  source 1..80: mol_type = other DNA
ttaaaaaagcccttgctaatgtggttagtgacatacaaccatttagagaggctattgttgcactgtataagaattttaca

SEQ ID NO: 2330 - DNA, 80 bp, synthetic construct
  misc_feature 1..80: note = Synthetic: >CanadaGoose-cand-1200-1279
  source 1..80: mol_type = other DNA
gtgtcttttgttcgtggaaatctctacatagcctcgtgtgcaggtagtgtgttttcatttgttaatgacatgctgcaggc

SEQ ID NO: 2331 - DNA, 80 bp, synthetic construct
  misc_feature 1..80: note = Synthetic: >CanadaGoose-cand-1280-1359
  source 1..80: mol_type = other DNA
cctcactgagaagcgtgctcatttaggttttgctgagaatcttgttgttgcaaatggttctgcagttgttagaaaagatg

SEQ ID NO: 2332 - DNA, 80 bp, synthetic construct
  misc_feature 1..80: note = Synthetic: >CanadaGoose-cand-1360-1439
  source 1..80: mol_type = other DNA
gtgttgtgtttctctatggcattaagcgtagagttactgcaattaatcgtcttgagacttatcagcttggtgaaccttgt

SEQ ID NO: 2333 - DNA, 80 bp, synthetic construct
  misc_feature 1..80: note = Synthetic: >CanadaGoose-cand-1440-1519
  source 1..80: mol_type = other DNA
tatgtcaaagtgcctagtgagggttacctggctattgttgatggagaacagatgtttgtctttgagcagggtgactctgt

SEQ ID NO: 2334 - DNA, 80 bp, synthetic construct
  misc_feature 1..80: note = Synthetic: >CanadaGoose-cand-1520-1599
  source 1..80: mol_type = other DNA
ttatgcagtgcctttttcagatggtcatgttgtagacatctgttttgagtgtgagaggcgtatggttgttcatgaccagc

SEQ ID NO: 2335 - DNA, 80 bp, synthetic construct
  misc_feature 1..80: note = Synthetic: >CanadaGoose-cand-1600-1679
  source 1..80: mol_type = other DNA
tctctgttgagcagcatgatgccatagtgcttcttgcttctaattttggtgcgtcttttgttgatgacgtttctagtgtt

SEQ ID NO: 2336 - DNA, 80 bp, synthetic construct
  misc_feature 1..80: note = Synthetic: >CanadaGoose-cand-2950-3029
  source 1..80: mol_type = other DNA
tcatgcagctttctaaattgttagttgaagtgtgtgttgttccgcaggacaatgagttatttattggaccgcagctaccc

SEQ ID NO: 2337 - DNA, 80 bp, synthetic construct
  misc_feature 1..80: note = Synthetic: >CanadaGoose-cand-3030-3109
  source 1..80: mol_type = other DNA
tttgatatagacgacttttttggtgttgtgggccctagtgtacctatgacactaaaaaattctttttgtgtctataacta

SEQ ID NO: 2338 - DNA, 80 bp, synthetic construct
  misc_feature 1..80: note = Synthetic: >CanadaGoose-cand-3110-3189
  source 1..80: mol_type = other DNA
tggggtttatgcacccgatagttttgaagatatagagggagtttataaacctgtttgtagacccctttttgattatagta

SEQ ID NO: 2339 - DNA, 80 bp, synthetic construct
  misc_feature 1..80: note = Synthetic: >CanadaGoose-cand-3190-3269
  source 1..80: mol_type = other DNA
agctttttggcatttattcaactccaaattgtagtggagttgtgaagccaactagtttgcaatgtgactgggatgtggca

SEQ ID NO: 2340 - DNA, 80 bp, synthetic construct
  misc_feature 1..80: note = Synthetic: >CanadaGoose-cand-3270-3349
  source 1..80: mol_type = other DNA
cttcgccaacaagaagctctggctgattccgagccagtaccgtcccaggtagttgtggatgatgtaggctgtgccatttt

SEQ ID NO: 2341 - DNA, 80 bp, synthetic construct
  misc_feature 1..80: note = Synthetic: >CanadaGoose-cand-3350-3429
  source 1..80: mol_type = other DNA
ggaaccacaaactacacttcctgcagttactgaactttcctttgttgtgggtgacttgtataaagttcttactgttgcta

SEQ ID NO: 2342 - DNA, 80 bp, synthetic construct
  misc_feature 1..80: note = Synthetic: >CanadaGoose-cand-3430-3509
  source 1..80: mol_type = other DNA
aggctaagtttggtaattttgtcttagttaatgctgctaatgttaatatgcaacatggtggcggtattgcagctgctatt

SEQ ID NO: 2343 - DNA, 80 bp, synthetic construct
  misc_feature 1..80: note = Synthetic: >CanadaGoose-cand-3510-3589
  source 1..80: mol_type = other DNA
gctagtatggcaggttgtaattttgttaagttttgcaatgatgctgttcaacagcatggagcgcttaaattattggaaac

SEQ ID NO: 2344 - DNA, 80 bp, synthetic construct
  misc_feature 1..80: note = Synthetic: >CanadaGoose-cand-3590-3669
  source 1..80: mol_type = other DNA
accaccatttagtcttaaagattatggtgttgttaagatattgaatgttgttggtcctaagagtactgacaaaaatatct

SEQ ID NO: 2345 - DNA, 80 bp, synthetic construct
  misc_feature 1..80: note = Synthetic: >CanadaGoose-cand-3670-3749
  source 1..80: mol_type = other DNA
ataagaagctctgtaaagcttatgctagtataacagggactaattgtgttgtacctgttctgagttcaggcatctttgga

SEQ ID NO: 2346 - DNA, 80 bp, synthetic construct
  misc_feature 1..80: note = Synthetic: >CanadaGoose-cand-3750-3829
  source 1..80: mol_type = other DNA
gttgactttaagctatccatagatgcgttttatgaatcgtgtggttctaagttgcagagatactgtttgttttccctgca

SEQ ID NO: 2347 - DNA, 80 bp, synthetic construct
  misc_feature 1..80: note = Synthetic: >CanadaGoose-cand-3830-3909
  source 1..80: mol_type = other DNA
acaagcacatgccgattatttctttgataaacagaaaccttgtaggcgtttctatgttacttctgatggtgtttcattta

SEQ ID NO: 2348 - DNA, 80 bp, synthetic construct
  misc_feature 1..80: note = Synthetic: >CanadaGoose-cand-3910-3989
  source 1..80: mol_type = other DNA
agtcgtttaaagctcacttgaatgaatctcttgcagttgtagtgggctgtactgtttatgctcgtaataagcaggtacag

SEQ ID NO: 2349 - DNA, 80 bp, synthetic construct
  misc_feature 1..80: note = Synthetic: >CanadaGoose-cand-3990-4069
  source 1..80: mol_type = other DNA
cttgttcgagatcttgttgaagatgagattgtttatatacctactgttgatcaagcagtcttggacttttatggtctaga

SEQ ID NO: 2350 - DNA, 80 bp, synthetic construct
  misc_feature 1..80: note = Synthetic: >CanadaGoose-cand-4070-4149
  source 1..80: mol_type = other DNA
caggtttcagtttgtgtattatttgcaggccttaggccatgagtggaaaacttatgagtcaaatggtgttttacaactag

SEQ ID NO: 2351 - DNA, 80 bp, synthetic construct
  misc_feature 1..80: note = Synthetic: >CanadaGoose-cand-4150-4229
  source 1..80: mol_type = other DNA
agtggcaggctaataattgttttattaatgcagctctagttgccttgcaagtgtctggcatgtcatttaatgatgggttt

SEQ ID NO: 2352 - DNA, 80 bp, synthetic construct
  misc_feature 1..80: note = Synthetic: >CanadaGoose-cand-13210-13289
  source 1..80: mol_type = other DNA
tgctcttgtaacaggcataacacatcaaactgttaagcctgggcattttaatcgtgatttttacgattttgcagagaaat

SEQ ID NO: 2353 - DNA, 80 bp, synthetic construct
  misc_feature 1..80: note = Synthetic: >CanadaGoose-cand-13290-13369
  source 1..80: mol_type = other DNA
cgggaatgtttaaagaaggtagttctataccacttaaacatttctttttccctcaaactggtagtgctgctatagaagat

SEQ ID NO: 2354 - DNA, 80 bp, synthetic construct
  misc_feature 1..80: note = Synthetic: >CanadaGoose-cand-13370-13449
  source 1..80: mol_type = other DNA
tatgattattatcgctataataggcctacaatgtttgatatacggcagcttcttttctgtctagaagtgactgctaagta

SEQ ID NO: 2355 - DNA, 80 bp, synthetic construct
  misc_feature 1..80: note = Synthetic: >CanadaGoose-cand-13450-13529
  source 1..80: mol_type = other DNA
ttttgattgttatgaaggcgggtgtatacctgctagtcaagttattgttaccaacctcgataagagtgctggttaccctt

SEQ ID NO: 2356 - DNA, 80 bp, synthetic construct
  misc_feature 1..80: note = Synthetic: >CanadaGoose-cand-13530-13609
  source 1..80: mol_type = other DNA
ttaataagtttggtaaggccaggctttattatgaaatgagttatgaagagcaagatgcattgtttgcttctacgaagcgc

SEQ ID NO: 2357 - DNA, 80 bp, synthetic construct
  misc_feature 1..80: note = Synthetic: >CanadaGoose-cand-13610-13689
  source 1..80: mol_type = other DNA
aatgtaatgccaactataactcagatgaatttgaaatatgctatatctgcaaagaatagggctcgtaccgttgcaggtgt

SEQ ID NO: 2358 - DNA, 80 bp, synthetic construct
  misc_feature 1..80: note = Synthetic: >CanadaGoose-cand-13690-13769
  source 1..80: mol_type = other DNA
atccatactttctactatgactaatagacagtatcaccagaaggtgctcaagtctattgttaatacacgtaatgcagctg

SEQ ID NO: 2359 - DNA, 80 bp, synthetic construct
  misc_feature 1..80: note = Synthetic: >CanadaGoose-cand-13770-13849
  source 1..80: mol_type = other DNA
ttgttatcggcacatccaagttttatggaggctgggacaacatgttgcgcaatcttattgatggcgttgataatcctatg

SEQ ID NO: 2360 - DNA, 80 bp, synthetic construct
  misc_feature 1..80: note = Synthetic: >CanadaGoose-cand-13850-13929
  source 1..80: mol_type = other DNA
cttatgggctgggactatcctaaatgtgatagggccatgcctaatatacttaggatttcagcttctttagttctagcacg

SEQ ID NO: 2361 - DNA, 80 bp, synthetic construct
  misc_feature 1..80: note = Synthetic: >CanadaGoose-cand-13930-14009
  source 1..80: mol_type = other DNA
taaacatacaacatgttgtacgtggtcagagcgtatctatcgcctctttaatgagtgtgcccaggttctttctgaatctg

SEQ ID NO: 2362 - DNA, 80 bp, synthetic construct
  misc_feature 1..80: note = Synthetic: >CanadaGoose-cand-14020-14099
  source 1..80: mol_type = other DNA
tggaggcatctatgttaaacctggaggcactagtagtggtgatgcaactactgcttatgctaatagtgtgtttaatatta

SEQ ID NO: 2363 - DNA, 80 bp, synthetic construct
  misc_feature 1..80: note = Synthetic: >CanadaGoose-cand-14100-14179
  source 1..80: mol_type = other DNA
tacaggcgacatctgctaatgttgctcgtctaatttctacctgtactcccgatattgtctatgatgatgttcggtctatg

SEQ ID NO: 2364 - DNA, 80 bp, synthetic construct
  misc_feature 1..80: note = Synthetic: >CanadaGoose-cand-14180-14259
  source 1..80: mol_type = other DNA
cagtatgagttgtaccaacaggtgtataggcgggttaatcctgatcctgcatttgttgataaattctttgcttaccttaa

SEQ ID NO: 2365 - DNA, 80 bp, synthetic construct
  misc_feature 1..80: note = Synthetic: >CanadaGoose-cand-14260-14339
  source 1..80: mol_type = other DNA
taagcatttttctttgatgatcttgtctgatgatggtgttgtttgttacaatgacacctatgctaaacaaggtcttgttg

SEQ ID NO: 2366 - DNA, 80 bp, synthetic construct
  misc_feature 1..80: note = Synthetic: >CanadaGoose-cand-14340-14419
  source 1..80: mol_type = other DNA
ctgatatttctgcttttagagaagttctctattatcagaacaatgtttttatgtctgatgctaagtgttggactgagcca

SEQ ID NO: 2367 - DNA, 80 bp, synthetic construct
  misc_feature 1..80: note = Synthetic: >CanadaGoose-cand-14420-14499
  source 1..80: mol_type = other DNA
gatattattaagggacctcatgagttttgttcccagcataccatgttggttgaggttgatggtgagtataaatatttacc

SEQ ID NO: 2368 - DNA, 80 bp, synthetic construct
  misc_feature 1..80: note = Synthetic: >HKU10-cand-23040-23119
  source 1..80: mol_type = other DNA
tgaaaacattacttttggctttaacaattctattgaattgcctaaattttactaacattctaatgctgaaaatgctacta

SEQ ID NO: 2369 - DNA, 80 bp, synthetic construct
  misc_feature 1..80: note = Synthetic: >HKU10-cand-23120-23199
  source 1..80: mol_type = other DNA
attgtacagaaccagtacttacctatggtaaaattggtatttgtgaagatggtagcattactgaagttaaaccacgtatt

SEQ ID NO: 2370 - DNA, 80 bp, synthetic construct
  misc_feature 1..80: note = Synthetic: >HKU10-cand-23200-23279
  source 1..80: mol_type = other DNA
gcagaacctgaacctgactcacctattgttacagctaatattacaatccctagtaattttagcatttctgtgcaagctga

SEQ ID NO: 2371 - DNA, 80 bp, synthetic construct
  misc_feature 1..80: note = Synthetic: >HKU10-cand-23280-23359
  source 1..80: mol_type = other DNA
gtatgttcaaatgtacttgaaaccagttagtgttgactgtaatatgtatgtttgtaatggtaataggcattgtcttcgcc

SEQ ID NO: 2372 - DNA, 80 bp, synthetic construct
  misc_feature 1..80: note = Synthetic: >HKU10-cand-23360-23439
  source 1..80: mol_type = other DNA
ttctagctcaatatgttactgcttgtaaaaatattgaagctgcacttcagcttagtgctcgtttagagtctattgaagtt

SEQ ID NO: 2373 - DNA, 80 bp, synthetic construct
  misc_feature 1..80: note = Synthetic: >HKU10-cand-23440-23519
  source 1..80: mol_type = other DNA
aataatttcattactgtttctgagaatgctatatatcttgccaacatctccaactttgatagctacaacctttcagtttt

SEQ ID NO: 2374 - DNA, 80 bp, synthetic construct
  misc_feature 1..80: note = Synthetic: >HKU10-cand-23520-23599
  source 1..80: mol_type = other DNA
actacctaaacagcagaatggtaagagtgtcattgaagacattttgtttgataaggttgtgactagtggtcttggtaccg

SEQ ID NO: 2375 - DNA, 80 bp, synthetic construct
  misc_feature 1..80: note = Synthetic: >HKU10-cand-23600-23679
  source 1..80: mol_type = other DNA
ttgaccaggattataaggagtgcatgggcaagcgtagtggtgttaaggatgtagcagatgtggcttgtgctcagtattac

SEQ ID NO: 2376 - DNA, 80 bp, synthetic construct
  misc_feature 1..80: note = Synthetic: >HKU10-cand-23680-23759
  source 1..80: mol_type = other DNA
aatggaattatggtgctccctggtgttgttgatgacgtaaaaatgggtctttacacagcttctttaactggtgctatggt

SEQ ID NO: 2377 - DNA, 80 bp, synthetic construct
  misc_feature 1..80: note = Synthetic: >HKU10-cand-23760-23839
  source 1..80: mol_type = other DNA
tatgggcggtttaactgccgctgctgctataccattttcaatagctgttcaatcacgactcaattatgttgcacttcaaa

SEQ ID NO: 2378 - DNA, 80 bp, synthetic construct
  misc_feature 1..80: note = Synthetic: >HKU10-cand-23840-23919
  source 1..80: mol_type = other DNA
ctgatgttttgcagaagaaccagcaaattttagcagattcatttaacaatgctatgagtaatattactatggcatttgct

SEQ ID NO: 2379 - DNA, 80 bp, synthetic construct
  misc_feature 1..80: note = Synthetic: >HKU10-cand-23920-23999
  source 1..80: mol_type = other DNA
caggtgaatgatgccattaaagaaacttctgaagccattagtaccgtagctcaagctttgagtaaggttcagagtgttgt

SEQ ID NO: 2380 - DNA, 80 bp, synthetic construct
  misc_feature 1..80: note = Synthetic: >HKU10-cand-24000-24079
  source 1..80: mol_type = other DNA
caatgaacaaggtcaagcactttcacagcttactaaacaattggcttccaattttcaggctatttcgtcttccatagaag

SEQ ID NO: 2381 - DNA, 80 bp, synthetic construct
  misc_feature 1..80: note = Synthetic: >HKU10-cand-24080-24159
  source 1..80: mol_type = other DNA
acatttataatagcttggacatgcttgctgctgatgctcaagttgacagacttatcacgggtagaattggtgctttgaat

SEQ ID NO: 2382 - DNA, 80 bp, synthetic construct
  misc_feature 1..80: note = Synthetic: >HKU10-cand-24160-24239
  source 1..80: mol_type = other DNA
gcttttgtcacacaaacacttacaaagtacactgaagttcgtgctagtcgtcaacttgctttacagaaaattaatgagtg

SEQ ID NO: 2383 - DNA, 80 bp, synthetic construct
  misc_feature 1..80: note = Synthetic: >HKU10-cand-24240-24319
  source 1..80: mol_type = other DNA
tgtcaaatcacagtctagccgatttggtttttgtggaaatggcactcatttattttcaattgctaacgctgcacctaatg

SEQ ID NO: 2384 - DNA, 80 bp, synthetic construct
  misc_feature 1..80: note = Synthetic: >HKU25-cand-14110-14189
  source 1..80: mol_type = other DNA
atcgtccgtcaaagactcactgagtatactatgatggacctggtctatgctttgcgccacttcgaccaaaacaattgcga

SEQ ID NO: 2385 - DNA, 80 bp, synthetic construct
  misc_feature 1..80: note = Synthetic: >HKU25-cand-14190-14269
  source 1..80: mol_type = other DNA
agtgctcaaacatatacttgtgaagtatggctgctgtgatgcatcctactttgataataagctctggtttgactttgttg

SEQ ID NO: 2386 - DNA, 80 bp, synthetic construct
  misc_feature 1..80: note = Synthetic: >HKU25-cand-14270-14349
  source 1..80: mol_type = other DNA
aaaaccctggagttattggtgtttaccacaagctaggcgaacgtattcccaaagctgtattaaacactgtcaaattttgt

SEQ ID NO: 2387 - DNA, 80 bp, synthetic construct
  misc_feature 1..80: note = Synthetic: >HKU25-cand-14350-14429
  source 1..80: mol_type = other DNA
gaccaaatggtgtcagcaggtctagtcggagtcttgactctcgacaaccaagatcttaacggcctatggtatgattttgg

SEQ ID NO: 2388 - DNA, 80 bp, synthetic construct
  misc_feature 1..80: note = Synthetic: >HKU25-cand-14430-14509
  source 1..80: mol_type = other DNA
tgatttcgtaatcacccaaccaggttctggagtggctattgttgatagctactattcttatttaatgcctgtgttgtcga

SEQ ID NO: 2389 - DNA, 80 bp, synthetic construct
  misc_feature 1..80: note = Synthetic: >HKU25-cand-14510-14589
  source 1..80: mol_type = other DNA
tgactgactgtttagcagcagaaacacacagggattgtgatcttaacaagcctctcattgagtggccacttactgagtat

SEQ ID NO: 2390 - DNA, 80 bp, synthetic construct
  misc_feature 1..80: note = Synthetic: >HKU25-cand-14590-14669
  source 1..80: mol_type = other DNA
gactttactgattacaaggtacaactctttgagaagtactttaaacactgggaccagacataccacgcaaattgcgtaaa

SEQ ID NO: 2391 - DNA, 80 bp, synthetic construct
  misc_feature 1..80: note = Synthetic: >HKU25-cand-14670-14749
  source 1..80: mol_type = other DNA
ctgtgctgatgaccgttgcgtgttacattgtgcaaatttcaatgtattatttgcaatgacactacctaagacatgtttcg

SEQ ID NO: 2392 - DNA, 80 bp, synthetic construct
  misc_feature 1..80: note = Synthetic: >HKU25-cand-14750-14829
  source 1..80: mol_type = other DNA
gcccgatagtccgaaaaatctttgtcgatggtgtgccatttgttgtatcctgtggttatcactacaaggaattaggctta

SEQ ID NO: 2393 - DNA, 80 bp, synthetic construct
  misc_feature 1..80: note = Synthetic: >HKU25-cand-14830-14909
  source 1..80: mol_type = other DNA
gttatgaatatggacattagcctccatagacatagactctctcttaaggagctaatgatgtatgcagctgaccctgccat

SEQ ID NO: 2394 - DNA, 80 bp, synthetic construct
  misc_feature 1..80: note = Synthetic: >HKU25-cand-14910-14989
  source 1..80: mol_type = other DNA
gcacattgcctcctctaacgccttacttgatttaaggacatcatgttttagtgtcgcggcccttaccactggtcttacat

SEQ ID NO: 2395 - DNA, 80 bp, synthetic construct
  misc_feature 1..80: note = Synthetic: >HKU25-cand-14990-15069
  source 1..80: mol_type = other DNA
ttcagacagtgaggcccggcaattttaatcaagatttctatgactttgtagtgtcaaagggcttctttaaagaaggttcc

SEQ ID NO: 2396 - DNA, 80 bp, synthetic construct
  misc_feature 1..80: note = Synthetic: >HKU25-cand-15070-15149
  source 1..80: mol_type = other DNA
tctgtgacccttaaacatttcttctttgctcaagatgggcatgctgctattacagattataactattactcttataatct

SEQ ID NO: 2397 - DNA, 80 bp, synthetic construct
  misc_feature 1..80: note = Synthetic: >HKU25-cand-15150-15229
  source 1..80: mol_type = other DNA
gcctactatgtgtgacatcaagcagatgttattctgtatggaagttgttaacaaatacttcgagatctacgatggcggtt

SEQ ID NO: 2398 - DNA, 80 bp, synthetic construct
  misc_feature 1..80: note = Synthetic: >HKU25-cand-15230-15309
  source 1..80: mol_type = other DNA
gccttaatgcatctgaagttgttgttaacaatttagacaaaagcgctggctatccattcaataagtttggcaaagctcgc

SEQ ID NO: 2399 - DNA, 80 bp, synthetic construct
  misc_feature 1..80: note = Synthetic: >HKU25-cand-15310-15389
  source 1..80: mol_type = other DNA
gtttactatgaaagtatgtcgtaccaggagcaggatgagctgtttgcaatcactaaacgcaatgtcctcccgacgattac

SEQ ID NO: 2400 - DNA, 80 bp, synthetic construct
  misc_feature 1..80: note = Synthetic: >HKU8-cand-7750-7829
  source 1..80: mol_type = other DNA
cgtgaactctctaatgttgttaaatctagtgtaaagcctactgatgtagcatatatcgaggttgataaagtagagtttaa

SEQ ID NO: 2401 - DNA, 80 bp, synthetic construct
  misc_feature 1..80: note = Synthetic: >HKU8-cand-7830-7909
  source 1..80: mol_type = other DNA
agacggcttttattacctttattctggtgaaaccttttggcgctataactttgatataacagatactaagtactcatgta

SEQ ID NO: 2402 - DNA, 80 bp, synthetic construct
  misc_feature 1..80: note = Synthetic: >HKU8-cand-7910-7989
  source 1..80: mol_type = other DNA
aagaggctcttaagagttgtaatgttttgtctgacttcattgtttataatgatgctggttcaaacattactcaagttcgt

SEQ ID NO: 2403 - DNA, 80 bp, synthetic construct
  misc_feature 1..80: note = Synthetic: >HKU8-cand-7990-8069
  source 1..80: mol_type = other DNA
aatgcgtgtgtgtacttttctcagttgctttgcaaacctattaagcttgttaatgcttcattgttttccactcttaatgt

SEQ ID NO: 2404 - DNA, 80 bp, synthetic construct
  misc_feature 1..80: note = Synthetic: >HKU8-cand-8070-8149
  source 1..80: mol_type = other DNA
ggatttcaatggtgctttacatactgcttttgttaatgttcttagtgatagtttctctaaggatcttagcaattgtgcta

SEQ ID NO: 2405 - DNA, 80 bp, synthetic construct
  misc_feature 1..80: note = Synthetic: >HKU8-cand-8150-8229
  source 1..80: mol_type = other DNA
ctatgaatgagtgtaaacaagctttaggttttgaagtttctgatgatgagttccttaatggtgttagtgatgcacatcgt

SEQ ID NO: 2406 - DNA, 80 bp, synthetic construct
  misc_feature 1..80: note = Synthetic: >HKU8-cand-8230-8309
  source 1..80: mol_type = other DNA
tataatgtgttgctttctgacacttcttgtaataacctggttacatcttatgccaagcctgaagaaaaattgtctgtgca

SEQ ID NO: 2407 - DNA, 80 bp, synthetic construct
  misc_feature 1..80: note = Synthetic: >HKU8-cand-8310-8389
  source 1..80: mol_type = other DNA
tgacttgggtacttgcatgaggtttggtgctaaagtggtcaaccataatgttcttattaaggagaatgttcctgttgtgt

SEQ ID NO: 2408 - DNA, 80 bp, synthetic construct
  misc_feature 1..80: note = Synthetic: >HKU8-cand-8390-8469
  source 1..80: mol_type = other DNA
ggcttgcaagtgactttcaccttctttctgaagagggtcgtaagtacattgttaaaactactaaggctaagggtgttaca

SEQ ID NO: 2409 - DNA, 80 bp, synthetic construct
  misc_feature 1..80: note = Synthetic: >HKU8-cand-8550-8629
  source 1..80: mol_type = other DNA
tggtagtaagttcatatggtgggtgtgtttggctattgttgcattctttttcctccttaatgcttctgagttcggttatg

SEQ ID NO: 2410 - DNA, 80 bp, synthetic construct
  misc_feature 1..80: note = Synthetic: >HKU8-cand-8630-8709
  source 1..80: mol_type = other DNA
ttgctactagttttgaggactttggttttaagtatattgaagatggtgttctgaaagactttgatggtcctctgagttgt

SEQ ID NO: 2411 - DNA, 80 bp, synthetic construct
  misc_feature 1..80: note = Synthetic: >HKU8-cand-8710-8789
  source 1..80: mol_type = other DNA
gtgcataatgtttttgacaattttaatggttggcatgaggctcgttatggtgttattccaattaacagccgtaaatgtcc

SEQ ID NO: 2412 - DNA, 80 bp, synthetic construct
  misc_feature 1..80: note = Synthetic: >HKU8-cand-8790-8869
  source 1..80: mol_type = other DNA
tattgttgttggcaccattgataatatacgttttgtacctaatgtgccttctggtatagtgttggttggcaaaacacttg

SEQ ID NO: 2413 - DNA, 80 bp, synthetic construct
  misc_feature 1..80: note = Synthetic: >HKU8-cand-8870-8949
  source 1..80: mol_type = other DNA
tttttgctgttaaagcagtttttactgagactggtaactgttttgatcttaatggtctaactactgtgggttcttgtatt

SEQ ID NO: 2414 - DNA, 80 bp, synthetic construct
  misc_feature 1..80: note = Synthetic: >HKU8-cand-8950-9029
  source 1..80: mol_type = other DNA
ttcaactctgcttgtaccaaaatggaaggtcttggtggtcctgctacttattgttacaaagaaggtttgtttgaaaattc

SEQ ID NO: 2415 - DNA, 80 bp, synthetic construct
  misc_feature 1..80: note = Synthetic: >MurineCoV-cand-10210-10289
  source 1..80: mol_type = other DNA
ctgttactacatcatttttacagtctggtatagtgaagatggtgtcgcccacctctaaagtggagccttgtattgttagt

SEQ ID NO: 2416 - DNA, 80 bp, synthetic construct
  misc_feature 1..80: note = Synthetic: >MurineCoV-cand-10290-10369
  source 1..80: mol_type = other DNA
gttacttatggtaacatgacacttaatgggttgtggttggatgataaagtttattgcccaagacatgttatctgttcttc

SEQ ID NO: 2417 - DNA, 80 bp, synthetic construct
  misc_feature 1..80: note = Synthetic: >MurineCoV-cand-10370-10449
  source 1..80: mol_type = other DNA
agctgacatgacagaccctgattatcctaatttgctttgtagagtgacatcaagtgatttttgtgttatgtctggtcgta

SEQ ID NO: 2418 - DNA, 80 bp, synthetic construct
  misc_feature 1..80: note = Synthetic: >MurineCoV-cand-10450-10529
  source 1..80: mol_type = other DNA
tgagccttactgtaatgtcttatcaaatgcagggctgccaacttgttttgactgttacactgcaaaatcctaacacgcct

SEQ ID NO: 2419 - DNA, 80 bp, synthetic construct
  misc_feature 1..80: note = Synthetic: >MurineCoV-cand-10530-10609
  source 1..80: mol_type = other DNA
aagtattccttcggtgttgttaagcctggtgagacatttactgtactggctgcatacaatggcagacctcaaggagcctt

SEQ ID NO: 2420 - DNA, 80 bp, synthetic construct
  misc_feature 1..80: note = Synthetic: >MurineCoV-cand-10610-10689
  source 1..80: mol_type = other DNA
ccatgttacgcttcgtagtagccataccataaagggctcctttctatgtggatcctgcggttctgtaggatatgttttaa

SEQ ID NO: 2421 - DNA, 80 bp, synthetic construct
  misc_feature 1..80: note = Synthetic: >MurineCoV-cand-10690-10769
  source 1..80: mol_type = other DNA
ctggcgatagtgtacgatttgtttatatgcatcagctagagttgagtactggttgtcataccggtactgactttagtggg

SEQ ID NO: 2422 - DNA, 80 bp, synthetic construct
  misc_feature 1..80: note = Synthetic: >MurineCoV-cand-10770-10849
  source 1..80: mol_type = other DNA
aacttttatggtccctatagagatgcgcaagttgtacaattgcctgttcaggattatacgcagactgttaatgttgtagc

SEQ ID NO: 2423 - DNA, 80 bp, synthetic construct
  misc_feature 1..80: note = Synthetic: >MurineCoV-cand-10850-10929
  source 1..80: mol_type = other DNA
ttggctttatgctgctatttttaacagatgcaactggtttgtgcaaagtgatagttgttccctggaggagtttaatgttt

SEQ ID NO: 2424 - DNA, 80 bp, synthetic construct
  misc_feature 1..80: note = Synthetic: >MurineCoV-cand-10930-11009
  source 1..80: mol_type = other DNA
gggctatgaccaatggttttagctcaatcaaagccgatcttgtcttggatgcgcttgcttctatgacaggcgttacagtt

SEQ ID NO: 2425 - DNA, 80 bp, synthetic construct
  misc_feature 1..80: note = Synthetic: >MurineCoV-cand-11010-11089
  source 1..80: mol_type = other DNA
gaacaggtgttggccgctattaagaggctgcattctggattccagggcaaacaaattttaggtagttgtgtgcttgaaga

SEQ ID NO: 2426 - DNA, 80 bp, synthetic construct
  misc_feature 1..80: note = Synthetic: >MurineCoV-cand-11090-11169
  source 1..80: mol_type = other DNA
tgagctgacaccaagtgatgtttatcaacaactagctggtgtcaagctacagtcaaagcgcacaagagttataaaaggta

SEQ ID NO: 2427 - DNA, 80 bp, synthetic construct
  misc_feature 1..80: note = Synthetic: >MurineCoV-cand-11170-11249
  source 1..80: mol_type = other DNA
catgttgctggatattggcttcaacgtttttgttctgtagcattatctcagcatttgtaaaatggactatgtttatgtat

SEQ ID NO: 2428 - DNA, 80 bp, synthetic construct
  misc_feature 1..80: note = Synthetic: >MurineCoV-cand-11250-11329
  source 1..80: mol_type = other DNA
gttactacccatatgttgggagtgacattgtgtgcactttgttttgtaagctttgctatgttgttgatcaagcataagca

SEQ ID NO: 2429 - DNA, 80 bp, synthetic construct
  misc_feature 1..80: note = Synthetic: >MurineCoV-cand-11350-11429
  source 1..80: mol_type = other DNA
ttatgcctgtgttatgcacactgttttacaccaactatttggttgttgggtacaaacagagttttagaggtctagcttat

SEQ ID NO: 2430 - DNA, 80 bp, synthetic construct
  misc_feature 1..80: note = Synthetic: >MurineCoV-cand-11430-11509
  source 1..80: mol_type = other DNA
gcttggctttcacactttgtccctgctgtagattatacatatatggatgaagttttatatggtgttgtgttgctagtagc

SEQ ID NO: 2431 - DNA, 80 bp, synthetic construct
  misc_feature 1..80: note = Synthetic: >MurineCoV-cand-14080-14159
  source 1..80: mol_type = other DNA
gaaggactggtatgattttgttgagaatcctgatataattaatgtgtataaaaagcttggtcctatatttaatagagccc

SEQ ID NO: 2432 - DNA, 80 bp, synthetic construct
  misc_feature 1..80: note = Synthetic: >MurineCoV-cand-14160-14239
  source 1..80: mol_type = other DNA
tgcttaacactgccaagtttgcagacgcattagtggaggcaggcttagtaggtgttttaacacttgataatcaagattta

SEQ ID NO: 2433 - DNA, 80 bp, synthetic construct
  misc_feature 1..80: note = Synthetic: >MurineCoV-cand-14250-14329
  source 1..80: mol_type = other DNA
ggtatgactttggagattttgtcaagacagtacctggttgtggtgttgccgtggcagactcttattattcatatatgatg

SEQ ID NO: 2434 - DNA, 80 bp, synthetic construct
  misc_feature 1..80: note = Synthetic: >MurineCoV-cand-14330-14409
  source 1..80: mol_type = other DNA
ccaatgctgactatgtgtcatgcgttggatagtgagttgtttgttaatggtacttatagggagtttgaccttgttcagta

SEQ ID NO: 2435 - DNA, 80 bp, synthetic construct
  misc_feature 1..80: note = Synthetic: >MurineCoV-cand-14410-14489
  source 1..80: mol_type = other DNA
tgattttactgatttcaagctagagctcttcactaagtattttaagcattggagtatgacctaccacccgaacacctgtg

SEQ ID NO: 2436 - DNA, 80 bp, synthetic construct
  misc_feature 1..80: note = Synthetic: >MurineCoV-cand-14490-14569
  source 1..80: mol_type = other DNA
agtgcgaggatgacaggtgcattattcattgcgccaattttaatatactttttagtatggtcttacctaagacctgtttt

SEQ ID NO: 2437 - DNA, 80 bp, synthetic construct
  misc_feature 1..80: note = Synthetic: >MurineCoV-cand-14570-14649
  source 1..80: mol_type = other DNA
gggcctcttgttaggcagatatttgtggatggtgttcctttcgttgtgtcgatcggttaccattataaagaattaggtgt

SEQ ID NO: 2438 - DNA, 80 bp, synthetic construct
  misc_feature 1..80: note = Synthetic: >MurineCoV-cand-14650-14729
  source 1..80: mol_type = other DNA
tgttatgaatatggatgtggatacacatcgttatcgcttgtctcttaaggacttgcttttgtatgctgcagaccctgccc

SEQ ID NO: 2439 - DNA, 80 bp, synthetic construct
  misc_feature 1..80: note = Synthetic: >MurineCoV-cand-14730-14809
  source 1..80: mol_type = other DNA
ttcatgtggcgtctgctagtgcactgcttgatttgcgcacatgttgttttagcgttgcagctattacaagtggcgtaaaa

SEQ ID NO: 2440 - DNA, 80 bp, synthetic construct
  misc_feature 1..80: note = Synthetic: >MurineCoV-cand-14810-14889
  source 1..80: mol_type = other DNA
tttcaaacagttaaacctggaaattttaatcaggatttttatgagtttattttgagtaaaggcctgcttaaagaggggag

SEQ ID NO: 2441 - DNA, 80 bp, synthetic construct
  misc_feature 1..80: note = Synthetic: >MurineCoV-cand-14890-14969
  source 1..80: mol_type = other DNA
ctccgttgatttgaagcacttcttctttacgcaggatggtaatgctgctattactgattataattattacaagtataatc

SEQ ID NO: 2442 - DNA, 80 bp, synthetic construct
  misc_feature 1..80: note = Synthetic: >MurineCoV-cand-14970-15049
  source 1..80: mol_type = other DNA
tacccaccatggtggatattaagcagttgttgtttgttttagaagttgttaataagtattttgagatctatgagggtggg

SEQ ID NO: 2443 - DNA, 80 bp, synthetic construct
  misc_feature 1..80: note = Synthetic: >MurineCoV-cand-15050-15129
  source 1..80: mol_type = other DNA
tgtatacccgcaacacaggtcattgttaataattatgataagagtgctggctatccatttaataaatttggaaaggccag

SEQ ID NO: 2444 - DNA, 80 bp, synthetic construct
  misc_feature 1..80: note = Synthetic: >MurineCoV-cand-15130-15209
  source 1..80: mol_type = other DNA
gctctattatgaggcattatcatttgaggagcaggatgaaatttatgcgtataccaaacgcaatgtcctgccgaccctaa

SEQ ID NO: 2445 - DNA, 80 bp, synthetic construct
  misc_feature 1..80: note = Synthetic: >MurineCoV-cand-15210-15289
  source 1..80: mol_type = other DNA
ctcaaatgaatcttaaatatgctattagtgctaagaatagggcccgcaccgttgctggtgtctctattctcagtactatg

SEQ ID NO: 2446 - DNA, 80 bp, synthetic construct
  misc_feature 1..80: note = Synthetic: >MurineCoV-cand-15290-15369
  source 1..80: mol_type = other DNA
actggcagaatgtttcatcaaaagtgtctaaagagtatagcagctactcgcggtgttcctgtagttataggcaccacgaa

SEQ ID NO: 2447 - DNA, 80 bp, synthetic construct
  misc_feature 1..80: note = Synthetic: >SARSCoV2-cand-12260-12339
  source 1..80: mol_type = other DNA
gttggaaaagatggctgatcaagctatgacccaaatgtataaacaggctagatctgaggacaagagggcaaaagttacta

SEQ ID NO: 2448 - DNA, 80 bp, synthetic construct
  misc_feature 1..80: note = Synthetic: >SARSCoV2-cand-12340-12419
  source 1..80: mol_type = other DNA
gtgctatgcagacaatgcttttcactatgcttagaaagttggataatgatgcactcaacaacattatcaacaatgcaaga

SEQ ID NO: 2449 - DNA, 80 bp, synthetic construct
  misc_feature 1..80: note = Synthetic: >SARSCoV2-cand-12420-12499
  source 1..80: mol_type = other DNA
gatggttgtgttcccttgaacataatacctcttacaacagcagccaaactaatggttgtcataccagactataacacata

SEQ ID NO: 2450 - DNA, 80 bp, synthetic construct
  misc_feature 1..80: note = Synthetic: >SARSCoV2-cand-12500-12579
  source 1..80: mol_type = other DNA
taaaaatacgtgtgatggtacaacatttacttatgcatcagcattgtgggaaatccaacaggttgtagatgcagatagta

SEQ ID NO: 2451 - DNA, 80 bp, synthetic construct
  misc_feature 1..80: note = Synthetic: >SARSCoV2-cand-12580-12659
  source 1..80: mol_type = other DNA
aaattgttcaacttagtgaaattagtatggacaattcacctaatttagcatggcctcttattgtaacagctttaagggcc

SEQ ID NO: 2452 - DNA, 80 bp, synthetic construct
  misc_feature 1..80: note = Synthetic: >SARSCoV2-cand-12660-12739
  source 1..80: mol_type = other DNA
aattctgctgtcaaattacagaataatgagcttagtcctgttgcactacgacagatgtcttgtgctgccggtactacaca

SEQ ID NO: 2453 - DNA, 80 bp, synthetic construct
  misc_feature 1..80: note = Synthetic: >SARSCoV2-cand-12740-12819
  source 1..80: mol_type = other DNA
aactgcttgcactgatgacaatgcgttagcttactacaacacaacaaagggaggtaggtttgtacttgcactgttatccg

SEQ ID NO: 2454 - DNA, 80 bp, synthetic construct
  misc_feature 1..80: note = Synthetic: >SARSCoV2-cand-12820-12899
  source 1..80: mol_type = other DNA
atttacaggatttgaaatgggctagattccctaagagtgatggaactggtactatctatacagaactggaaccaccttgt

SEQ ID NO: 2455 - DNA, 80 bp, synthetic construct
  misc_feature 1..80: note = Synthetic: >SARSCoV2-cand-12900-12979
  source 1..80: mol_type = other DNA
aggtttgttacagacacacctaaaggtcctaaagtgaagtatttatactttattaaaggattaaacaacctaaatagagg

SEQ ID NO: 2456 - DNA, 80 bp, synthetic construct
  misc_feature 1..80: note = Synthetic: >SARSCoV2-cand-12980-13059
  source 1..80: mol_type = other DNA
tatggtacttggtagtttagctgccacagtacgtctacaagctggtaatgcaacagaagtgcctgccaattcaactgtat

SEQ ID NO: 2457 - DNA, 80 bp, synthetic construct
  misc_feature 1..80: note = Synthetic: >SARSCoV2-cand-13060-13139
  source 1..80: mol_type = other DNA
tatctttctgtgcttttgctgtagatgctgctaaagcttacaaagattatctagctagtgggggacaaccaatcactaat

SEQ ID NO: 2458 - DNA, 80 bp, synthetic construct
  misc_feature 1..80: note = Synthetic: >SARSCoV2-cand-13140-13219
  source 1..80: mol_type = other DNA
tgtgttaagatgttgtgtacacacactggtactggtcaggcaataacagttacaccggaagccaatatggatcaagaatc

SEQ ID NO: 2459 - DNA, 80 bp, synthetic construct
  misc_feature 1..80: note = Synthetic: >SARSCoV2-cand-13220-13299
  source 1..80: mol_type = other DNA
ctttggtggtgcatcgtgttgtctgtactgccgttgccacatagatcatccaaatcctaaaggattttgtgacttaaaag

SEQ ID NO: 2460 - DNA, 80 bp, synthetic construct
  misc_feature 1..80: note = Synthetic: >SARSCoV2-cand-13300-13379
  source 1..80: mol_type = other DNA
gtaagtatgtacaaatacctacaacttgtgctaatgaccctgtgggttttacacttaaaaacacagtctgtaccgtctgc

SEQ ID NO: 2461 - DNA, 80 bp, synthetic construct
  misc_feature 1..80: note = Synthetic: >SARSCoV2-cand-13380-13459
  source 1..80: mol_type = other DNA
ggtatgtggaaaggttatggctgtagttgtgatcaactccgcgaacccatgcttcagtcagctgatgcacaatcgttttt

SEQ ID NO: 2462 - DNA, 80 bp, synthetic construct
  misc_feature 1..80: note = Synthetic: >SEAC-cand-12260-12339
  source 1..80: mol_type = other DNA
accacccagctatggatggtgcgtgtcgctttaagggtaagtatgtgcaaatacctataggtgtcaatgaccctattaga

SEQ ID NO: 2463 - DNA, 80 bp, synthetic construct
  misc_feature 1..80: note = Synthetic: >HKU2R-cand-12090-12169
  source 1..80: mol_type = other DNA
tgtcaatcacccagcgatggatggtgcatgtcgctttaagggtaagtatgtgcaaatacctataggtgtcaatgacccta

SEQ ID NO: 2464 - DNA, 80 bp, synthetic construct
  misc_feature 1..80: note = Synthetic: >Sk512R-cand-6760-6839
  source 1..80: mol_type = other DNA
accaggacaacgtttggctcttacatttattgccttttaattctatgggtaatataattgttgttgcttttattgttacc

SEQ ID NO: 2465 - DNA, 80 bp, synthetic construct
  misc_feature 1..80: note = Synthetic: >Sb512-cand-6760-6839
  source 1..80: mol_type = other DNA
ctcggataccaggacaacgtttggctcttacatttattgccttttaattctatgggtaatataattgttgttgcttttat

SEQ ID NO: 2466 - DNA, 80 bp, synthetic construct
  misc_feature 1..80: note = Synthetic: >AlphaSp-cand-6750-6829
  source 1..80: mol_type = other DNA
tgtggcccttggataccaggaaaacgtttggcttttacatttgttgccctttaattctatgggtaatataattgttgttg

SEQ ID NO: 2467 - DNA, 80 bp, synthetic construct
  misc_feature 1..80: note = Synthetic: >AlphaSp-cand-730-809
  source 1..80: mol_type = other DNA
atgactatgccaagcaaaatgtaacatgcattcgccgcattacttatattactgaccatcgccatgtgcttgctgatggt

SEQ ID NO: 2468 - DNA, 80 bp, synthetic construct
  misc_feature 1..80: note = Synthetic: >Sk512R-cand-770-849
  source 1..80: mol_type = other DNA
tgactatgccaagcaaaatgtaacatgcatccgccgcattacttacattactgaccatcgccatgtgcttgctgatggta

SEQ ID NO: 2469 - DNA, 80 bp, synthetic construct
  misc_feature 1..80: note = Synthetic: >BtSk_AlphaCoV-cand-740-819
  source 1..80: mol_type = other DNA
gccaagcaaaatgtaacatgcattcgccgcattacctacatcactgaccatcgccatgtgcttgctgatggtaccacaat

SEQ ID NO: 2470 - DNA, 80 bp, synthetic construct
  misc_feature 1..80: note = Synthetic: >BetaSp-cand-17810-17889
  source 1..80: mol_type = other DNA
caccacgtgtgctattgagtaaaggaactctcgagcctaaatatttcaatactgtaactaagctaatgtgttgcttgggt

SEQ ID NO: 2471 - DNA, 80 bp, synthetic construct
  misc_feature 1..80: note = Synthetic: >BetaCoV1-cand-17700-17779
  source 1..80: mol_type = other DNA
gtgtgctattgagtaaaggaactctcgagcctaaatatttcaatactgtaactaagctaatgtgttgcttgggtcctgat

SEQ ID NO: 2472 - DNA, 80 bp, synthetic construct
  misc_feature 1..80: note = Synthetic: >HKU24-cand-17460-17539
  source 1..80: mol_type = other DNA
cgtgtgctattgagtaaaggaactctcgagcctaaatattttaatactgtaactaagctaatgtgttgcttaggtcctga

SEQ ID NO: 2473 - DNA, 80 bp, synthetic construct
  misc_feature 1..80: note = Synthetic: >AlphaSp-cand-2410-2489
  source 1..80: mol_type = other DNA
gaggttccatctggacttcgttcatcttgagtgtacgcagtgctactgactttattaaaaatttaaaaattgacttgggt

SEQ ID NO: 2474 - DNA, 80 bp, synthetic construct
  misc_feature 1..80: note = Synthetic: >Sk512R-cand-2450-2529
  source 1..80: mol_type = other DNA
aggttccatctggacttcgttcatcttgagtgtacgcagtgccactgacttcattaaaactttaaaaattgacttgggtc

SEQ ID NO: 2475 - DNA, 80 bp, synthetic construct
  misc_feature 1..80: note = Synthetic: >Sb512-cand-2460-2539
  source 1..80: mol_type = other DNA
ttccatctggacttcgttcatcttgagtgtacgcagtgccactgacttcattaaaactttaaaaattgacttgggtctta

SEQ ID NO: 2476 - DNA, 80 bp, synthetic construct
  misc_feature 1..80: note = Synthetic: >WIV16-cand-720-799
  source 1..80: mol_type = other DNA
ttgaagattatgaacaaaactggaacactaagcatggcagtggtgtactccgtgaactcactcgtgagctcaatggaggt

SEQ ID NO: 2477 - DNA, 80 bp, synthetic construct
  misc_feature 1..80: note = Synthetic: >SARSRC-cand-26910-26989
  source 1..80: mol_type = other DNA
tgcatacaaccgctaccgtattggaaactacaaattaaacacagaccactctggtagcaacgacaatattgctttgctag

SEQ ID NO: 2478 - DNA, 80 bp, synthetic construct
  misc_feature 1..80: note = Synthetic: >HKU24-cand-30990-31069
  source 1..80: mol_type = other DNA
cgggatagggcactctctatcagaatggatgtcttgtcactacaatagatagagaaggttgtagtggactatagattgct

SEQ ID NO: 2479 - DNA, 80 bp, synthetic construct
  misc_feature 1..80: note = Synthetic: >BetaSp-cand-31580-31659
  source 1..80: mol_type = other DNA
gggcactctctatcagaatggatgtcttgtcactacaacagatagagaaggttgtggtggactatagattgcttagttga

SEQ ID NO: 2480 - DNA, 80 bp, synthetic construct
  misc_feature 1..80: note = Synthetic: >BetaCoV1-cand-31450-31529
  source 1..80: mol_type = other DNA
agccagtcgggatagggcactctctatcagaatggatgtcttgtcactacaacagatagagaaggttgtggtggactata

SEQ ID NO: 2481 - DNA, 80 bp, synthetic construct
  misc_feature 1..80: note = Synthetic: >Sk512R-cand-10660-10739
  source 1..80: mol_type = other DNA
attattattccaccgatgtcttaggtcttattttgacctccatgtctggttttactaattactggtttattggcactgct

SEQ ID NO: 2482 - DNA, 80 bp, synthetic construct
  misc_feature 1..80: note = Synthetic: >BtSk_AlphaCoV-cand-10630-10709
  source 1..80: mol_type = other DNA
ttccaccgatgtcttaggtcttattttgacctccatgtctggttttactaattactggtttattggcactgctacttaca

SEQ ID NO: 2483 - DNA, 80 bp, synthetic construct
  misc_feature 1..80: note = Synthetic: >Sb512-cand-10670-10749
  source 1..80: mol_type = other DNA
attattccaccgatgtcttaggtcttattttgacctctatgtctggttttactaattactggtttattggcactgctact

SEQ ID NO: 2484 - DNA, 80 bp, synthetic construct
  misc_feature 1..80: note = Synthetic: >MinkCoV1-cand-25110-25189
  source 1..80: mol_type = other DNA
gctcattatgtgacactttatggtagtcttaatcatatgagagtggatgactttacgttgtactttgtagacccaatgct

SEQ ID NO: 2485 - DNA, 80 bp, synthetic construct
  misc_feature 1..80: note = Synthetic: >Alpha2-cand-25050-25129
  source 1..80: mol_type = other DNA
gtgacactttacggtagtcttaatcatatgagagtggatgactttacgttgtactttgtagacccaatgctagttaaaat

SEQ ID NO: 2486 - DNA, 80 bp, synthetic construct
  misc_feature 1..80: note = Synthetic: >AlphaMink-cand-25060-25139
  source 1..80: mol_type = other DNA
tgacactttacggtagtcttaatcatatgagagtggatgactttacgttgtattttgtagacccaatgctagttaaaata

SEQ ID NO: 2487 - DNA, 80 bp, synthetic construct
  misc_feature 1..80: note = Synthetic: >HKU24-cand-15150-15229
  source 1..80: mol_type = other DNA
atgtttcaccagaagtgtttgaaaagtatagcagctactcgtggtgtatcagttgttattggcaccacgaaattttatgg

SEQ ID NO: 2488 - DNA, 80 bp, synthetic construct
  misc_feature 1..80: note = Synthetic: >BtRf_AlphaCoV-cand-26790-26869
  source 1..80: mol_type = other DNA
tagagtataattatattgagtcctatagaccaaagcagtcaactacatgtctggtgtggcggagtaaccaaagatccgct

SEQ ID NO: 2489 - DNA, 80 bp, synthetic construct
  misc_feature 1..80: note = Synthetic: >SEAC-cand-26980-27059
  source 1..80: mol_type = other DNA
agtagagtataattatattgagtcctatagaccaacgcagttaactacatgtctggtgtggtggagtaatcaaagatccg

SEQ ID NO: 2490 - DNA, 80 bp, synthetic construct
  misc_feature 1..80: note = Synthetic: >HKU2R-cand-26780-26859
  source 1..80: mol_type = other DNA
gtatgagtagagtataattatattgagtcctatagacaaaagcagtatactacatgtctggtgtggcggagtaatcaaag

SEQ ID NO: 2491 - DNA, 80 bp, synthetic construct
  misc_feature 1..80: note = Synthetic: >Sb512-cand-6680-6759
  source 1..80: mol_type = other DNA
tgattatctttggtggcttctttgttcgcattggtatcacgtattttattatgcagtacattaatgctgctggtgtggcc

SEQ ID NO: 2492 - DNA, 80 bp, synthetic construct
  misc_feature 1..80: note = Synthetic: >AlphaSp-cand-6670-6749
  source 1..80: mol_type = other DNA
gcattcctgattatctttggtggcttctttgttcgcattggtattgtgtattttattatgcagtacattaatgctgctgg

SEQ ID NO: 2493 - DNA, 80 bp, synthetic construct
  misc_feature 1..80: note = Synthetic: >Quail-cand-25790-25869
  source 1..80: mol_type = other DNA
cccattgggaaagcgccaattaggttacaattgtggtggggacaaattaggggaaattaaattggcttataaggggggat

SEQ ID NO: 2494 - DNA, 80 bp, synthetic construct
  misc_feature 1..80: note = Synthetic: >Sparrow-cand-26080-26159
  source 1..80: mol_type = other DNA
tagcagtcgcccagtgggaaagcgccaatcaggttacaattgtggtggggacaaattaggggaaattaaattggcttata

SEQ ID NO: 2495 - DNA, 80 bp, synthetic construct
  misc_feature 1..80: note = Synthetic: >HKU15-cand-25330-25409
  source 1..80: mol_type = other DNA
gtcgcccagtgggaaagcgccaactaggttacaattgtggtggggacaaattaggggaaattaaattggcttataggggg

SEQ ID NO: 2496 - DNA, 80 bp, synthetic construct
  misc_feature 1..80: note = Synthetic: >Sparrow-cand-25920-25999
  source 1..80: mol_type = other DNA
atctcagtaatcaacagtgctagaaggttgattattccatttaatatgccgaggccacgcggagtacgatcgagggtaca

SEQ ID NO: 2497 - DNA, 80 bp, synthetic construct
  misc_feature 1..80: note = Synthetic: >HKU15-cand-25170-25249
  source 1..80: mol_type = other DNA
cgataatcaacagtgctagaaggttgattataccatttaatatgccgaggccacgcggagtacgatcgagggtacagcat

SEQ ID NO: 2498 - DNA, 80 bp, synthetic construct
  misc_feature 1..80: note = Synthetic: >HKU18-cand-26420-26499
  source 1..80: mol_type = other DNA
cctgataattgtcagtgcaagaaggacaattataccgtttaatgtgccgaggccacgcggagtacgatcgagggtacagc

SEQ ID NO: 2499 - DNA, 80 bp, synthetic construct
  misc_feature 1..80: note = Synthetic: >BetaCoV1-cand-17780-17859
  source 1..80: mol_type = other DNA
atcttccttggcacgtgttatcgttgtcctaaggagattgtggatacagtgtcagccttagtttatgataataagctgaa

SEQ ID NO: 2500 - DNA, 80 bp, synthetic construct
  misc_feature 1..80: note = Synthetic: >BetaSp-cand-17890-17969
  source 1..80: mol_type = other DNA
cctgatatcttccttggcacgtgttatcgttgtcctaaggagattgtggatacagtgtcagccttagtttatgataataa

SEQ ID NO: 2501 - DNA, 80 bp, synthetic construct
  misc_feature 1..80: note = Synthetic: >HKU24-cand-17540-17619
  source 1..80: mol_type = other DNA
tatcttccttggcacgtgttatcgttgtcctaaggagattgtggatacagtgtcagccttagtttatgataataagctta

SEQ ID NO: 2502 - DNA, 80 bp, synthetic construct
  misc_feature 1..80: note = Synthetic: >Sk512R-cand-290-369
  source 1..80: mol_type = other DNA
caaccatatttcgttggcttttgccaatgatgatgaaatttcagcaataggctttggctctgttgaagaggccgtatcat

SEQ ID NO: 2503 - DNA, 80 bp, synthetic construct
  misc_feature 1..80: note = Synthetic: >AlphaSp-cand-250-329
  source 1..80: mol_type = other DNA
gcaaccatatttcgttggcttttgccaatgatgatgaaatttcagcaattggctttggttctgttggagaggccgtatca

SEQ ID NO: 2504 - DNA, 80 bp, synthetic construct
  misc_feature 1..80: note = Synthetic: >BtSk_AlphaCoV-cand-260-339
  source 1..80: mol_type = other DNA
atttcgttggcttttgccaatgatgaagaaatttcagcacttggctttggctctgttgaagaggccgtatcatattatag

SEQ ID NO: 2505 - DNA, 80 bp, synthetic construct
  misc_feature 1..80: note = Synthetic: >BetaSp-cand-19490-19569
  source 1..80: mol_type = other DNA
catatgatgctcataaggacagttttaaagatggtttgtgtatgttttggaactgcaatgtggataagtatccatccaat

SEQ ID NO: 2506 - DNA, 80 bp, synthetic construct
  misc_feature 1..80: note = Synthetic: >Alpha2-cand-25770-25849
  source 1..80: mol_type = other DNA
ttataacaatactacaatatgggaggccgcaggtcagctggttcatttatggtattaaaatgcttatcatgtggcttttg

SEQ ID NO: 2507 - DNA, 80 bp, synthetic construct
  misc_feature 1..80: note = Synthetic: >HKU31-cand-1640-1719
  source 1..80: mol_type = other DNA
ggatgtgttggtgcttgggataaagtgcaacaagtggcaaatctatttacacagaaagcacagcagcagttgaattttgt

SEQ ID NO: 2508 - DNA, 80 bp, synthetic construct
  misc_feature 1..80: note = Synthetic: >HghCoV1-cand-1640-1719
  source 1..80: mol_type = other DNA
tgtgttggtgcttgggataaagtgcaacaagtggcaaatctgtttacacagaaagcacagcagcagttgaacttcgttaa

SEQ ID NO: 2509 - DNA, 80 bp, synthetic construct
  misc_feature 1..80: note = Synthetic: >AlphaMink-cand-25460-25539
  source 1..80: mol_type = other DNA
ttatcattgcgcctgctcgacaagcctataatgcctataaggatttcatgaacataccaaaagcaccggacagtgtttgt

SEQ ID NO: 2510 - DNA, 80 bp, synthetic construct
  misc_feature 1..80: note = Synthetic: >Alpha2-cand-25450-25529
  source 1..80: mol_type = other DNA
gttatcattgcgcctgctcgacaagcctataatgcatataaagatttcatgaacataccaaaagcaccggacagtgtttg

SEQ ID NO: 2511 - DNA, 80 bp, synthetic construct
  misc_feature 1..80: note = Synthetic: >SEAC-cand-18040-18119
  source 1..80: mol_type = other DNA
acaaacagcctattaattctaatgttaagatgcttgagtatgattatatgactcatggacaattggacggtatgtgccta

SEQ ID NO: 2512 - DNA, 80 bp, synthetic construct
  misc_feature 1..80: note = Synthetic: >BtRf_AlphaCoV-cand-17850-17929
  source 1..80: mol_type = other DNA
cctattaattctaatgttaagatgcttgagtatgattatatgactcatggacaattggacggtatgtgcctattttggaa

SEQ ID NO: 2513 - DNA, 80 bp, synthetic construct
  misc_feature 1..80: note = Synthetic: >HKU14-cand-23460-23539
  source 1..80: mol_type = other DNA
taattctactaccaactatgttggtgtttatgatatcaatcatggggatgctggttttactagcatactcagtggtttgt

SEQ ID NO: 2514 - DNA, 80 bp, synthetic construct
  misc_feature 1..80: note = Synthetic: >HKU23-cand-23300-23379
  source 1..80: mol_type = other DNA
ctactaccaattatgttggtgtttatgatatcaatcatggggatgctggttttactagcatactcagtggtttgttatat

SEQ ID NO: 2515 - DNA, 80 bp, synthetic construct
  misc_feature 1..80: note = Synthetic: >Sk512R-cand-1410-1489
  source 1..80: mol_type = other DNA
gcaatagtgcaaggtgttgtgcatgttaacacagccatatgtgatgttgttaaggacatcttaggcttcccatggtttgt

SEQ ID NO: 2516 - DNA, 80 bp, synthetic construct
  misc_feature 1..80: note = Synthetic: >AlphaSp-cand-1370-1449
  source 1..80: mol_type = other DNA
tgcaatagtgcaaggtgttgtgcatgttaacactgccatatgtgatgttgttaaggacatcttaggcctcccatggtttg

SEQ ID NO: 2517 - DNA, 80 bp, synthetic construct
  misc_feature 1..80: note = Synthetic: >Lucheng19-cand-16560-16639
  source 1..80: mol_type = other DNA
acaaactatgacttgtctgtactcaattcacgagttgcatacagacacatagtttatgtcggtgatcctcaacaactacc

SEQ ID NO: 2518 - DNA, 80 bp, synthetic construct
  misc_feature 1..80: note = Synthetic: >AcCoV_JC34-cand-16210-16289
  source 1..80: mol_type = other DNA
gtgtacaaactatgacttgtctgtactcaattcacgagttgcctacagacacatcgtttatgttggtgatcctcaacaac

SEQ ID NO: 2519 - DNA, 80 bp, synthetic construct
  misc_feature 1..80: note = Synthetic: >BetaCoV1-cand-9020-9099
  source 1..80: mol_type = other DNA
gctaacaaatacgcacaatttgatcagtggtatgagtctacttttggtttgtcatattatagtaatcaccacagttgtcc

SEQ ID NO: 2520 - DNA, 80 bp, synthetic construct
  misc_feature 1..80: note = Synthetic: >HKU5-cand-7440-7519
  source 1..80: mol_type = other DNA
gtcttgtacacttcaacctttaacgtgttgttactggtggtgtcatctcagtatttcttctcctacaccggggcatttgt

SEQ ID NO: 2521 - DNA, 80 bp, synthetic construct
  misc_feature 1..80: note = Synthetic: >Sb512-cand-25170-25249
  source 1..80: mol_type = other DNA
gtttttacatggtcatgccaattattataatggcaggccctatgtaatgcttgaaggtggaagccattacgtcacattgg

SEQ ID NO: 2522 - DNA, 80 bp, synthetic construct
  misc_feature 1..80: note = Synthetic: >BtRf_AlphaCoV-cand-16730-16809
  source 1..80: mol_type = other DNA
tatgtgtgacaaggcactgtatgacacattgaaattctttgagatcagtcaatcagaccttcaatctactataggtgggt

SEQ ID NO: 2523 - DNA, 80 bp, synthetic construct
  misc_feature 1..80: note = Synthetic: >SEAC-cand-16920-16999
  source 1..80: mol_type = other DNA
ttgtgtattatgtgtgacaaggcactgtatgacacattgaaattttttgagatcagtcaatcagaccttcaatctactat

SEQ ID NO: 2524 - DNA, 80 bp, synthetic construct
  misc_feature 1..80: note = Synthetic: >BetaCoV1-cand-13580-13659
  source 1..80: mol_type = other DNA
gcccataggtataaaagatcctgtgtcttatgttttgacgcatgatgtttgccaggtatgtggattttggcgtgatgggt

SEQ ID NO: 2525 - DNA, 80 bp, synthetic construct
  misc_feature 1..80: note = Synthetic: >HKU5R-cand-12310-12389
  source 1..80: mol_type = other DNA
acccatcagtgctgcaggctactttatctgaattttcccacttagctagttatgctgagttggaagctgctcaatcttcc

SEQ ID NO: 2526 - DNA, 80 bp, synthetic construct
  misc_feature 1..80: note = Synthetic: >HKU5-cand-12320-12399
  source 1..80: mol_type = other DNA
agtgctgcaggctactttatctgaattttcccacttagctagttatgctgagttggaagctgctcaatcttcctaccaaa

SEQ ID NO: 2527 - DNA, 80 bp, synthetic construct
  misc_feature 1..80: note = Synthetic: >HKU5R-cand-11110-11189
  source 1..80: mol_type = other DNA
tccagggtaagacaatccttggcaactcaatgctggaagatgaattcacccctgatgatgttaacatgcaggtcatgggt

SEQ ID NO: 2528 - DNA, 80 bp, synthetic construct
  misc_feature 1..80: note = Synthetic: >HKU5-cand-11120-11199
  source 1..80: mol_type = other DNA
taagacaatccttggcaactcaatgctggaagatgaattcacccctgatgatgttaacatgcaagtcatgggtgttgtca

SEQ ID NO: 2529 - DNA, 80 bp, synthetic construct
  misc_feature 1..80: note = Synthetic: >HKU15-cand-14420-14499
  source 1..80: mol_type = other DNA
acccattgtagctaatggttctgtttttggtatctatcgccacactgcccgtggtagtgatgacatagacctctttaacg

SEQ ID NO: 2530 - DNA, 80 bp, synthetic construct
  misc_feature 1..80: note = Synthetic: >Delta-cand-15920-15999
  source 1..80: mol_type = other DNA
ccattgtagctaatggttctgtttttggtatctatcgccacactgcccgtggtagtgatgacatagacctctttaacgag

SEQ ID NO: 2531 - DNA, 80 bp, synthetic construct
  misc_feature 1..80: note = Synthetic: >MinkCoV1-cand-80-159
  source 1..80: mol_type = other DNA
ttgttaccacacattttatgtgggtaacattttggtaatttcgtttttatctagcttgttaaccattctgaggtaggggt

SEQ ID NO: 2532 - DNA, 80 bp, synthetic construct
  misc_feature 1..80: note = Synthetic: >BatCoV-cand-19690-19769
  source 1..80: mol_type = other DNA
tactcaattatgtcaatacttaaatagcactactatgtgtgtaccgcacaacatgagggttttgcaccttggtgcagggt

SEQ ID NO: 2533 - DNA, 80 bp, synthetic construct
  misc_feature 1..80: note = Synthetic: >HKU10R-cand-19890-19969
  source 1..80: mol_type = other DNA
tgtcaatatttaaatagcactactatgtgtgtaccatacaacatgagggttttgcaccttggtgcagggtcggataaggg

SEQ ID NO: 2534 - DNA, 80 bp, synthetic construct
  misc_feature 1..80: note = Synthetic: >HKU15-cand-17140-17219
  source 1..80: mol_type = other DNA
accctgctaacgcccttgtgtgccgctacgacactcatcggcagaagcatttaattggacctaatggttcagcactatat

SEQ ID NO: 2535 - DNA, 80 bp, synthetic construct
  misc_feature 1..80: note = Synthetic: >HKU4-cand-3810-3889
  source 1..80: mol_type = other DNA
tatacagatagcctcattactgcctaagtgtattcttgtaaatgctgctaaccgccatcttaaacatggtggtggtatag

SEQ ID NO: 2536 - DNA, 80 bp, synthetic construct
  misc_feature 1..80: note = Synthetic: >SARSRC-cand-25800-25879
  source 1..80: mol_type = other DNA
gactatgtcgttgtacatggctatttcaccgaagttcactaccagcttgagtctacacaaattactacagacactggtat

SEQ ID NO: 2537 - DNA, 80 bp, synthetic construct
  misc_feature 1..80: note = Synthetic: >SARSCoV-cand-25900-25979
  source 1..80: mol_type = other DNA
gtgttaaagactatgtcgttgtacatggctatttcaccgaagtttactaccagcttgagtctacacaaattactacagac

SEQ ID NO: 2538 - DNA, 80 bp, synthetic construct
  misc_feature 1..80: note = Synthetic: >Sb512-cand-19800-19879
  source 1..80: mol_type = other DNA
atctacaagattcagcgcatgtgtttggaaccttgcaatttgtacaattatggcagtggcctgaagttaccagatggtat

SEQ ID NO: 2539 - DNA, 80 bp, synthetic construct
  misc_feature 1..80: note = Synthetic: >BtSk_AlphaCoV-cand-19750-19829
  source 1..80: mol_type = other DNA
tcaatctacaagattcagcgcatgtgtttggaatcttgcaatttgtacaattatggcagtggcctgaagttaccagatgg

SEQ ID NO: 2540 - DNA, 80 bp, synthetic construct
  misc_feature 1..80: note = Synthetic: >HKU5-cand-29060-29139
  source 1..80: mol_type = other DNA
gtaagcagcctcttgccttccctcctggacagggcgtacctcttaatgccaattcaacccctgcacagaatgctgggtat

SEQ ID NO: 2541 - DNA, 80 bp, synthetic construct
  misc_feature 1..80: note = Synthetic: >HKU5R-cand-29050-29129
  source 1..80: mol_type = other DNA
ggtaagcagcctcttgccttccctcctggacagggcgtacctcttaatgccaattcaacccctgcacagaatgctgggta

SEQ ID NO: 2542 - DNA, 80 bp, synthetic construct
  misc_feature 1..80: note = Synthetic: >BetaSp-cand-19730-19809
  source 1..80: mol_type = other DNA
atacgccttgtgtgtatatggaaggcattgatgttaaacaggtagattatgtacctcttaaatccgccacttgcatcaca

SEQ ID NO: 2543 - DNA, 80 bp, synthetic construct
  misc_feature 1..80: note = Synthetic: >SARSRC-cand-6400-6479
  source 1..80: mol_type = other DNA
atactaaaaccatcagacgaaggtgtcaaagtgacacaagagttaggccatgaagatctaatggctgcttatgtagaaaa

SEQ ID NO: 2544 - DNA, 80 bp, synthetic construct
  misc_feature 1..80: note = Synthetic: >BtRl_BetaCoV-cand-6370-6449
  source 1..80: mol_type = other DNA
cgcaatgtcatattaaaaccatcagaagaaggtgtcaaagtgacacaagagttaggccatgaagatctaatggctgctta

SEQ ID NO: 2545 - DNA, 80 bp, synthetic construct
  misc_feature 1..80: note = Synthetic: >MbCoV1-cand-20180-20259
  source 1..80: mol_type = other DNA
ggttattccatgccatctttgtacaaagttcaacgcatgtgccttgagccatgtaatttgtacaattatggtgctagtat

SEQ ID NO: 2546 - DNA, 80 bp, synthetic construct
  misc_feature 1..80: note = Synthetic: >MsbCoV1-cand-20160-20239
  source 1..80: mol_type = other DNA
atggaaatgtggttattccatgccatctttgtataaagttcaacgcatgtgccttgagccatgtaatttgtacaattatg

SEQ ID NO: 2547 - DNA, 80 bp, synthetic construct
  misc_feature 1..80: note = Synthetic: >BetaCoV1-cand-26190-26269
  source 1..80: mol_type = other DNA
gccgcataccattctgatacagatgagcctgctcttctgtacagaaatcttaaatgcagctacgtgtttaataatagtat

SEQ ID NO: 2548 - DNA, 80 bp, synthetic construct
  misc_feature 1..80: note = Synthetic: >BetaSp-cand-26300-26379
  source 1..80: mol_type = other DNA
gtaagtgccgcataccattctgatacagatgagcctgctcttctgtacagaaatcttaaatgcagctacgtgtttaataa

SEQ ID NO: 2549 - DNA, 80 bp, synthetic construct
  misc_feature 1..80: note = Synthetic: >HKU2-cand-25360-25439
  source 1..80: mol_type = other DNA
atactcgtgcggggcgttcccttaatgcaagcaccaacactggttgggctttttatgtcagaagtaagcatggtgactat

SEQ ID NO: 2550 - DNA, 80 bp, synthetic construct
  misc_feature 1..80: note = Synthetic: >WIV16-cand-560-639
  source 1..80: mol_type = other DNA
ggtataactctgggagtactcgtgccacatgtgggcgaaaccccaatcgcataccgcaatgttcttcttcgtaagaacgg

SEQ ID NO: 2551 - DNA, 80 bp, synthetic construct
  misc_feature 1..80: note = Synthetic: >HKU15-cand-12010-12089
  source 1..80: mol_type = other DNA
gcatattaacacccgacaatcaagacctcctgggtcagatctatgactttggagattttattattacacaaccaggtaat

SEQ ID NO: 2552 - DNA, 80 bp, synthetic construct
  misc_feature 1..80: note = Synthetic: >Delta-cand-13510-13589
  source 1..80: mol_type = other DNA
ttaacacccgacaatcaagacctcctgggtcagatctatgactttggagattttattattacacaaccaggtaatggatg

SEQ ID NO: 2553 - DNA, 80 bp, synthetic construct
  misc_feature 1..80: note = Synthetic: >SEAC-cand-24600-24679
  source 1..80: mol_type = other DNA
tgatacttgttctcttggtggctagcactgttattaagctcatacagctatgtttttcttgtcataggcttatgagtaat

SEQ ID NO: 2554 - DNA, 80 bp, synthetic construct
  misc_feature 1..80: note = Synthetic: >HKU2-cand-24640-24719
  source 1..80: mol_type = other DNA
ttgatacttgttctcttggtggctatcactgttattaagctcatacagctatgtttttcttgtcataggcttatgagtaa

SEQ ID NO: 2555 - DNA, 80 bp, synthetic construct
  misc_feature 1..80: note = Synthetic: >BatCoV1A-cand-14910-14989
  source 1..80: mol_type = other DNA
gtcaacactcgtaatgctactgttgtcattgggactaccaagttctatggtggatgggacaatatgctcagaaatctaat

SEQ ID NO: 2556 - DNA, 80 bp, synthetic construct
  misc_feature 1..80: note = Synthetic: >MbCoV1-cand-14740-14819
  source 1..80: mol_type = other DNA
tgtcaacactcgtaatgctactgttgtcattgggactactaagttttatggtggatgggacaatatgcttagaaatctaa

SEQ ID NO: 2557 - DNA, 80 bp, synthetic construct
  misc_feature 1..80: note = Synthetic: >HKU8R-cand-17780-17859
  source 1..80: mol_type = other DNA
gttccactccagattggtttttcaaatggtgtggattttgttgtcaacccagagggctgtgttatgactaatgtcaatga

SEQ ID NO: 2558 - DNA, 80 bp, synthetic construct
  misc_feature 1..80: note = Synthetic: >HKU4R-cand-4520-4599
  source 1..80: mol_type = other DNA
gctcaatctggcaactatgtacgtcaagtaaaagtgccatatgtttgtttattagcttctaaagaacagattcctataat

SEQ ID NO: 2559 - DNA, 80 bp, synthetic construct
  misc_feature 1..80: note = Synthetic: >HKU4-cand-4530-4609
  source 1..80: mol_type = other DNA
tcaatctggcaactatgtacgtcaagtaaaagtgccgtatgtttgtttattagcttctaaagaacagattcctataatga

SEQ ID NO: 2560 - DNA, 80 bp, synthetic construct
  misc_feature 1..80: note = Synthetic: >MsbCoV1-cand-18400-18479
  source 1..80: mol_type = other DNA
attatgactaggtgtcttgcaatttatgactgttttgtcaaaaatgttgattggtctattacctatccatttattggtaa

SEQ ID NO: 2561 - DNA, 80 bp, synthetic construct
  misc_feature 1..80: note = Synthetic: >MbCoV1-cand-18420-18499
  source 1..80: mol_type = other DNA
ggtgtcttgcaatttatgactgttttgtcaaaaatgttgattggtctattacctatccatttattggtaatgaagctgcc

SEQ ID NO: 2562 - DNA, 80 bp, synthetic construct
  misc_feature 1..80: note = Synthetic: >BetaCoV1-cand-21060-21139
  source 1..80: mol_type = other DNA
attatggcaaggtaatcccacttcctatgggatgtatgatgaatgttgctaagtacacccagctatgtcagtacttgaat

SEQ ID NO: 2563 - DNA, 80 bp, synthetic construct
  misc_feature 1..80: note = Synthetic: >BetaSp-cand-21170-21249
  source 1..80: mol_type = other DNA
tatggaattatggcaaggtaatcccacttcctatgggatgtatgatgaatgttgctaagtacacccagctatgtcagtac

SEQ ID NO: 2564 - DNA, 80 bp, synthetic construct
  misc_feature 1..80: note = Synthetic: >HKU5-cand-27780-27859
  source 1..80: mol_type = other DNA
attcaactgttttcgtgcctttcaatagccgcgattcagtacctcttcacataatcgcacccagcgtgcttacagtttaa

SEQ ID NO: 2565 - DNA, 80 bp, synthetic construct
  misc_feature 1..80: note = Synthetic: >HKU5R-cand-7200-7279
  source 1..80: mol_type = other DNA
ttgcgttcctatttgggcatccattctctctgcgacggtatggtcgaagcgtatcggaacgtctcgtatgacgtaaacga

SEQ ID NO: 2566 - DNA, 80 bp, synthetic construct
  misc_feature 1..80: note = Synthetic: >BtRl_BetaCoV-cand-12430-12509
  source 1..80: mol_type = other DNA
tctgcactctgggaaattcagcaagttgttgatgcggatagcaagattgttcaacttagtgaaattaacatggacaattc

SEQ ID NO: 2567 - DNA, 80 bp, synthetic construct
  misc_feature 1..80: note = Synthetic: >WIV16-cand-12470-12549
  source 1..80: mol_type = other DNA
gcactctgggaaatccagcaagttgttgatgcagatagcaagattgttcaacttagtgaaattaacatggacaattcacc

SEQ ID NO: 2568 - DNA, 80 bp, synthetic construct
  misc_feature 1..80: note = Synthetic: >HKU5R-cand-17760-17839
  source 1..80: mol_type = other DNA
gcaacttgggacctgatatctttctgagtgtttgctatcggtgtcctgaagaaatagttaacactgtgagtgcgctcgtc

SEQ ID NO: 2569 - DNA, 80 bp, synthetic construct
  misc_feature 1..80: note = Synthetic: >HKU5-cand-17760-17839
  source 1..80: mol_type = other DNA
tgtgcaacttgggaccagatatctttctgagtgtttgctatcggtgtcctgaagaaatagttaacactgtgagtgcgctc

SEQ ID NO: 2570 - DNA, 80 bp, synthetic construct
  misc_feature 1..80: note = Synthetic: >Sb512-cand-5500-5579
  source 1..80: mol_type = other DNA
tggataaatgcagtttgtttgcaactgcaatttgcaaatgctaagtttaagccaaagggtttacaacagttgtgggagtc

SEQ ID NO: 2571 - DNA, 80 bp, synthetic construct
  misc_feature 1..80: note = Synthetic: >Sk512R-cand-5490-5569
  source 1..80: mol_type = other DNA
tgctgggtgaatgcagtttgtttgcaactgcaatttgcaaatgctaagtttaagccaaagggtttacaacagttgtggga

SEQ ID NO: 2572 - DNA, 80 bp, synthetic construct
  misc_feature 1..80: note = Synthetic: >WIV16-cand-13070-13149
  source 1..80: mol_type = other DNA
tgtgtgaagatgttgtgtacacacactggtacaggacaggcaattactgtaacaccagaagccaatatggaccaagagtc

SEQ ID NO: 2573 - DNA, 80 bp, synthetic construct
  misc_feature 1..80: note = Synthetic: >SARSCoV-cand-13080-13159
  source 1..80: mol_type = other DNA
gtgtgaagatgttgtgtacacacactggtacaggacaggcaattactgtaacaccagaagctaacatggaccaagagtcc

SEQ ID NO: 2574 - DNA, 80 bp, synthetic construct
  misc_feature 1..80: note = Synthetic: >WIV16-cand-26670-26749
  source 1..80: mol_type = other DNA
gctacttcattgcttccttcaggctatttgctcgtacccgctcaatgtggtcattcaacccagaaacaaacattcttctc

SEQ ID NO: 2575 - DNA, 80 bp, synthetic construct
  misc_feature 1..80: note = Synthetic: >SARSRC-cand-26600-26679
  source 1..80: mol_type = other DNA
tgtggcttagctacttcgttgcttccttcaggctgtttgctcgtacccgctcaatgtggtcattcaacccagaaacaaac

SEQ ID NO: 2576 - DNA, 80 bp, synthetic construct
  misc_feature 1..80: note = Synthetic: >HKU4-cand-2210-2289
  source 1..80: mol_type = other DNA
gttttcttaatgcctgtgtagcagcgtcgcgtgctactgcaggctttattaatgacatgttcaaattgtttaaagtgctc

SEQ ID NO: 2577 - DNA, 80 bp, synthetic construct
  misc_feature 1..80: note = Synthetic: >HKU4R-cand-2200-2279
  source 1..80: mol_type = other DNA
tagttttcttaatgcctgtgtagcagcgtcgcgtgctactgcaggctttattaatgacatgttcaaattgtttaaagtgc

SEQ ID NO: 2578 - DNA, 80 bp, synthetic construct
  misc_feature 1..80: note = Synthetic: >HKU8-cand-29290-29369
  source 1..80: mol_type = other DNA
gagcctagtgtggaagagccgtatggagtgcctgtagtgttataattagtaattgtagataggtgtagttttgataggga

SEQ ID NO: 2579 - DNA, 80 bp, synthetic construct
  misc_feature 1..80: note = Synthetic: >HKU8R-cand-28660-28739
  source 1..80: mol_type = other DNA
tttgacgagcccagtgtggaagagccgtctggagtgcctgtagtgttataattagtaattgtagataggtgtagttttga

SEQ ID NO: 2580 - DNA, 80 bp, synthetic construct
  misc_feature 1..80: note = Synthetic: >Sb512-cand-10110-10189
  source 1..80: mol_type = other DNA
tgcatctatacaaaagttgcatggcaattttggtggtaagagcattttgggttgcacttcattgtgtgatgaatttactc

SEQ ID NO: 2581 - DNA, 80 bp, synthetic construct
  misc_feature 1..80: note = Synthetic: >MN128087-cand-18130-18209
  source 1..80: mol_type = other DNA
tgttctggaattgtaatgttgattgttatccagaaaattctattgtttgtaggtatgacacaagaaatttgagtgtgttc

SEQ ID NO: 2582 - DNA, 80 bp, synthetic construct
  misc_feature 1..80: note = Synthetic: >MN517817-cand-23190-23269
  source 1..80: mol_type = other DNA
aagacatttatgcgcaacttgttgcaattcaggcagatgcacaagttgatcgtcttatcactggtagactatcgtctctt

SEQ ID NO: 2583 - DNA, 80 bp, synthetic construct
  misc_feature 1..80: note = Synthetic: >MN517816-cand-22650-22729
  source 1..80: mol_type = other DNA
ggatatgcaaacaatgtatactgcttctttagtaggagctatggcttttggtggtattacatcagctgcagctatacctt

SEQ ID NO: 2584 - DNA, 80 bp, synthetic construct
  misc_feature 1..80: note = Synthetic: >MT114540-cand-19920-19999
  source 1..80: mol_type = other DNA
actctacaattatggccctatcacacaattcagtcctagacactccaaaattcaagtgccgttgtaataacgcacttatt

SEQ ID NO: 2585 - DNA, 80 bp, synthetic construct
  misc_feature 1..80: note = Synthetic: >NC_034976-cand-20690-20769
  source 1..80: mol_type = other DNA
gactataatatttaagacaactgagagttcaagaccagatatacagttaagtaaaataacaaaatattttgctgctgtgc

SEQ ID NO: 2586 - DNA, 80 bp, synthetic construct
  misc_feature 1..80: note = Synthetic: >AJ311317-cand-5440-5519
  source 1..80: mol_type = other DNA
aactatgggactttggcgtgcagaacaccttaataaacctaatttggagagaattttcaacattgctaagaaagccattg

SEQ ID NO: 2587 - DNA, 80 bp, synthetic construct
  misc_feature 1..80: note = Synthetic: >MN517817-cand-12900-12979
  source 1..80: mol_type = other DNA
atagaaaacccaaaatattatgccatgttggccaaaatgggatctattgtaagacgtgccttattgaatgctgttgagtt

SEQ ID NO: 2588 - DNA, 80 bp, synthetic construct
  misc_feature 1..80: note = Synthetic: >MK957245-cand-12820-12899
  source 1..80: mol_type = other DNA
atagaaaacccaaaatattatgccatgttggctaaaatggggcctattgtacgacgtgctttattgaatgctattgagtt

SEQ ID NO: 2589 - DNA, 80 bp, synthetic construct
  misc_feature 1..80: note = Synthetic: >MN307884-cand-22290-22369
  source 1..80: mol_type = other DNA
atagtgttggtcagaaagaagacatggaacttttaaatttctattcttctactaaaccaaaaggttttgacacaccagtt

SEQ ID NO: 2590 - DNA, 80 bp, synthetic construct
  misc_feature 1..80: note = Synthetic: >MN987231-cand-1890-1969
  source 1..80: mol_type = other DNA
aacttctggaagctcgcatatggaaaagtgcgtaagcttgaagaatttgtgaagactcacttttgtaaagctcaaatgtc

SEQ ID NO: 2591 - DNA, 80 bp, synthetic construct
  misc_feature 1..80: note = Synthetic: >MN517817-cand-1900-1979
  source 1..80: mol_type = other DNA
gatttctggagactcgcatatggaaaagtgcgtaatctggaagaatttctgaagactcacttttgtaaagctcaaatgtc

SEQ ID NO: 2592 - DNA, 80 bp, synthetic construct
  misc_feature 1..80: note = Synthetic: >MK957245-cand-12740-12819
  source 1..80: mol_type = other DNA
aagaaatacttgtcacttatggttgtatagaagattatcaccctaagtggtttgaagagaataaggattggtacgaccca

SEQ ID NO: 2593 - DNA, 80 bp, synthetic construct
  misc_feature 1..80: note = Synthetic: >KF294370-cand-11550-11629
  source 1..80: mol_type = other DNA
caaatatagaagaggtcagcgatgattatgcgcgtgacagtactgttttgcaagctttacagagtgaatttgttaatatg

SEQ ID NO: 2594 - DNA, 80 bp, synthetic construct
  misc_feature 1..80: note = Synthetic: >LC061272-cand-1280-1359
  source 1..80: mol_type = other DNA
tttttatatggaagaagatagggctcttgatgctatttatggtgtcaagttggaagaatgtggtcttgttatgcaatttg

SEQ ID NO: 2595 - DNA, 80 bp, synthetic construct
  misc_feature 1..80: note = Synthetic: >MN987230-cand-10030-10109
  source 1..80: mol_type = other DNA
ttgttattttcttaagccaatggtatgacccagtagtgtttgacactatggtgccatggatgttcttaccactagtgttg

SEQ ID NO: 2596 - DNA, 80 bp, synthetic construct
  misc_feature 1..80: note = Synthetic: >MN531556-cand-10050-10129
  source 1..80: mol_type = other DNA
ttgttattttctttagccaatggtatgatccagtagtctttgacactgtagtaccgtggatgtttctaccattagtcttg

SEQ ID NO: 2597 - DNA, 80 bp, synthetic construct
  misc_feature 1..80: note = Synthetic: >KR527150-cand-23700-23779
  source 1..80: mol_type = other DNA
ggtatcctggtggtcaggcctatgatgtctctttctatgtctctgtaattatacgctatgctccacctaagcttgagttg

SEQ ID NO: 2598 - DNA, 80 bp, synthetic construct
  misc_feature 1..80: note = Synthetic: >KY370043-cand-11920-11999
  source 1..80: mol_type = other DNA
gagcgttgcttttgaaaagctcgctcaattacttattgtcttatttgctaatccagcagcagtggatagcaagtgtcttg

SEQ ID NO: 2599 - DNA, 80 bp, synthetic construct
  misc_feature 1..80: note = Synthetic: >SBB-747-cand-9590-9669
  source 1..80: mol_type = other DNA
ctagggatgaattacaaaatcctgattatgcgcgcttgtcaatgcgagcagctaattatgattttcatgtttctcataat

SEQ ID NO: 2600 - DNA, 80 bp, synthetic construct
  misc_feature 1..80: note = Synthetic: >SBB-797-cand-9600-9679
  source 1..80: mol_type = other DNA
attacaaaatcctgattatgcgcgcttgtcaatgcgagcagctaattatgattttcatgtttctcataatggccataata

SEQ ID NO: 2601 - DNA, 80 bp, synthetic construct
  misc_feature 1..80: note = Synthetic: >SBB-053-cand-18110-18189
  source 1..80: mol_type = other DNA
ttgacatgtaccctgaattctctattgtttgtaggtttgatacacgttgtcgttctaaccttaacttagagggctgtaat

SEQ ID NO: 2602 - DNA, 80 bp, synthetic construct
  misc_feature 1..80: note = Synthetic: >SBB-747-cand-2550-2629
  source 1..80: mol_type = other DNA
ggtaacctttggtgatgaggaggtttacaccatccctaatactgtgactgtaaattttagttacgacgtttgtgaaggac

SEQ ID NO: 2603 - DNA, 80 bp, synthetic construct
  misc_feature 1..80: note = Synthetic: >SBB-788-cand-2560-2639
  source 1..80: mol_type = other DNA
ggtgatgaggaggtttacaccatccctaatactgtgactgtaaattttagttacgacgtttgtgaaggactcaacgtaat

SEQ ID NO: 2604 - DNA, 80 bp, synthetic construct
  misc_feature 1..80: note = Synthetic: >SBB-797-cand-11760-11839
  source 1..80: mol_type = other DNA
tatgttgttcaatatgatacgtcgtcttgatagtgacgcgcttagtaacattttgaacaacgcccgtaatggcgtcgtac

SEQ ID NO: 2605 - DNA, 80 bp, synthetic construct
  misc_feature 1..80: note = Synthetic: >SBB-726-cand-11750-11829
  source 1..80: mol_type = other DNA
ctatgcaaaccatgttgttcaatatgatacgtcgtcttgatagtgacgcgcttagtaacattttgaacaacgcccgtaat

SEQ ID NO: 2606 - DNA, 80 bp, synthetic construct
  misc_feature 1..80: note = Synthetic: >SBB-130-cand-11520-11599
  source 1..80: mol_type = other DNA
attatgctggtgttgtctggaatgttgtagacatacgcgacaatgatggcaaagttgtacatatgaaagagattacacaa

SEQ ID NO: 2607 - DNA, 80 bp, synthetic construct
  misc_feature 1..80: note = Synthetic: >SBB-120-cand-16520-16599
  source 1..80: mol_type = other DNA
tagttcaaactgtgtcagagatggtttatgagaataagtttgtgcccgtgcaccctgctagcaaacagtgctttaagctc

SEQ ID NO: 2608 - DNA, 80 bp, synthetic construct
  misc_feature 1..80: note = Synthetic: >SBB-053-cand-16510-16589
  source 1..80: mol_type = other DNA
cctgctgaaatagttcaaactgtgtcagagatggtttatgagaacaagtttgtgcccgtgcaccctgctagcaaacagtg

SEQ ID NO: 2609 - DNA, 80 bp, synthetic construct
  misc_feature 1..80: note = Synthetic: >SBB-788-cand-11840-11919
  source 1..80: mol_type = other DNA
cacttggtgttataccgcgtacagctgctaacaagctgttgctcgtggttcctgattattcagtttttaccgccactata

SEQ ID NO: 2610 - DNA, 80 bp, synthetic construct
  misc_feature 1..80: note = Synthetic: >SBB-747-cand-11830-11909
  source 1..80: mol_type = other DNA
ggcgtcgtaccacttggtgttataccgcgtacagctgctaacaagctgttgctcgtggttcctgattattcagtttttac

SEQ ID NO: 2611 - DNA, 80 bp, synthetic construct
  misc_feature 1..80: note = Synthetic: >SBB-726-cand-10790-10869
  source 1..80: mol_type = other DNA
tgtggtacgtttgtacagctatcgggtggctatataactgctggacaggtagtgccgacacagtagctattagttatctg

SEQ ID NO: 2612 - DNA, 80 bp, synthetic construct
  misc_feature 1..80: note = Synthetic: >SBB-797-cand-10800-10879
  source 1..80: mol_type = other DNA
ttgtacagccatcgggtggctatataactgctggacgggtagtgccgacacagtagctattagttatctgacatttatgg

SEQ ID NO: 2613 - DNA, 80 bp, synthetic construct
  misc_feature 1..80: note = Synthetic: >SBB-747-cand-12150-12229
  source 1..80: mol_type = other DNA
tcagactgcatgtgttacagatgctttagcctattacaatgctgcaaaagaggggcgtcacgttatggctattttagctg

SEQ ID NO: 2614 - DNA, 80 bp, synthetic construct
  misc_feature 1..80: note = Synthetic: >SBB-797-cand-12160-12239
  source 1..80: mol_type = other DNA
tgtgttacagatgctttagcctattacaatgctgcaaaagaggggcgtcacgttatggctattttagctgacgttgatgg

SEQ ID NO: 2615 - DNA, 80 bp, synthetic construct
  misc_feature 1..80: note = Synthetic: >SBB-797-cand-11520-11599
  source 1..80: mol_type = other DNA
ctcgtcttatgtggattatgagaatgctcaaaaggcttatgatacagctgtatccactggggcccctgagtctacggtga

SEQ ID NO: 2616 - DNA, 80 bp, synthetic construct
  misc_feature 1..80: note = Synthetic: >SBB-747-cand-11510-11589
  source 1..80: mol_type = other DNA
ttagcaatctctcgtcttatgtggattatgagaatgctcaaaaggcttatgatacagctgtatccactggggcccccgag

SEQ ID NO: 2617 - DNA, 80 bp, synthetic construct
  misc_feature 1..80: note = Synthetic: >SBB-041-cand-24390-24469
  source 1..80: mol_type = other DNA
ttgaacttcttaatggagtttacctctatgtttttgcacctgaaccttgtgtcggcgttgtaaaccttgctttcaaggag

SEQ ID NO: 2618 - DNA, 80 bp, synthetic construct
  misc_feature 1..80: note = Synthetic: >SBB-010-cand-24400-24479
  source 1..80: mol_type = other DNA
tagcattgaacttcttaatggggtttacctctatgtttttgcacctgaaccttgtgtcggtgttgtaaaccttgctttca

SEQ ID NO: 2619 - DNA, 80 bp, synthetic construct
  misc_feature 1..80: note = Synthetic: >SBB-053-cand-16110-16189
  source 1..80: mol_type = other DNA
tgcagctgtcgactctttgtgtgtcaaggcctctactgcttacagtgtggatcgttgtactcgcattatacctgctagag

SEQ ID NO: 2620 - DNA, 80 bp, synthetic construct
  misc_feature 1..80: note = Synthetic: >SBB-726-cand-19060-19139
  source 1..80: mol_type = other DNA
tactaaaatctggacattttacggctataacaggtgagctacctgtggctattcttaatgaccgcctctatataaaagag

SEQ ID NO: 2621 - DNA, 80 bp, synthetic construct
  misc_feature 1..80: note = Synthetic: >SBB-788-cand-19050-19129
  source 1..80: mol_type = other DNA
gcttacaatgtactaaaatctggacattttacggctatagcaggtgagttacctgtggctattcttaatgaccgccttta

SEQ ID NO: 2622 - DNA, 80 bp, synthetic construct
  misc_feature 1..80: note = Synthetic: >SBB-122-cand-890-969
  source 1..80: mol_type = other DNA
gctgtgatgctggacaagtattacaacaaactctacgatgctgttggtgtgccttttgtgaacaatggtactaatctcag

SEQ ID NO: 2623 - DNA, 80 bp, synthetic construct
  misc_feature 1..80: note = Synthetic: >SBB-010-cand-13710-13789
  source 1..80: mol_type = other DNA
aaaaggtgatgctgctattaaagactttgactattatcggtacaatagacctactgttcttgatatttgtcaggctcgtg

SEQ ID NO: 2624 - DNA, 80 bp, synthetic construct
  misc_feature 1..80: note = Synthetic: >SBB-747-cand-17440-17519
  source 1..80: mol_type = other DNA
tgcagtctgaagttactgtagggttatttaaagattgtgctaaggctgaaccattaggtccagcctatgcaccaactttt

SEQ ID NO: 2625 - DNA, 80 bp, synthetic construct
  misc_feature 1..80: note = Synthetic: >SBB-130-cand-12950-13029
  source 1..80: mol_type = other DNA
gtgatgccatggttgaacatggcattgtaggtgttcttacattggataaccaggatttaaatggcaatttctatgatttt

SEQ ID NO: 2626 - DNA, 80 bp, synthetic construct
  misc_feature 1..80: note = Synthetic: >SBB-120-cand-12960-13039
  source 1..80: mol_type = other DNA
catggttgaacatggcattgtaggtgttcttacattggataaccaggatttaaatggcaatttctacgattttggagact

SEQ ID NO: 2627 - DNA, 80 bp, synthetic construct
  misc_feature 1..80: note = Synthetic: >SBB-122-cand-12960-13039
  source 1..80: mol_type = other DNA
catggttgaacatggcatcgtaggtgttcttacattggataaccaggatttaaatggcaatttctatgattttggagatt

SEQ ID NO: 2628 - DNA, 80 bp, synthetic construct
  misc_feature 1..80: note = Synthetic: >SBB-041-cand-6990-7069
  source 1..80: mol_type = other DNA
ggcgttacaactttgacattacagatagtaaatacagctgtaaggaggttcttaagagctgcaacattctcacagatttt

SEQ ID NO: 2629 - DNA, 80 bp, synthetic construct
  misc_feature 1..80: note = Synthetic: >SBB-130-cand-6980-7059
  source 1..80: mol_type = other DNA
acattctggcgttacaactttgacattacagatagtaaatacagctgtaaggatgttcttaagagctgcaacattcttac

SEQ ID NO: 2630 - DNA, 80 bp, synthetic construct
  misc_feature 1..80: note = Synthetic: >PDF-2386-cand-16880-16959
  source 1..80: mol_type = other DNA
atgttgctaattatcaaaaagtgggtacacaaaagtactccacattacaaggaccccctggcactggtaaaagtcatttt

SEQ ID NO: 2631 - DNA, 80 bp, synthetic construct
  misc_feature 1..80: note = Synthetic: >PRD-0038-cand-16870-16949
  source 1..80: mol_type = other DNA
ttttcaagcaatgttgctaattatcaaaaagtgggtacacaaaagtactccacattacaaggaccccctggcactggtaa

SEQ ID NO: 2632 - DNA, 80 bp, synthetic construct
  misc_feature 1..80: note = Synthetic: >GCS-211-cand-11920-11999
  source 1..80: mol_type = other DNA
atctgggttgattcagccattcattatgcaggtgttgtgtggaccattgtcagcattaaagataatgatggcaaaccagt

SEQ ID NO: 2633 - DNA, 80 bp, synthetic construct
  misc_feature 1..80: note = Synthetic: >GCS-227-cand-11910-11989
  source 1..80: mol_type = other DNA
atcaaaagatctgggttgattcagccattcattatgcaggtgttgtgtggaccattgtcagcattaaagataatgatggc

SEQ ID NO: 2634 - DNA, 80 bp, synthetic construct
  misc_feature 1..80: note = Synthetic: >GCS-227-cand-2010-2089
  source 1..80: mol_type = other DNA
cagaaaatagcgtcatcgaatccccagtgtttgtacctcgccagacttcagtgaaagttgtgtgtcatggttttgacagt

SEQ ID NO: 2635 - DNA, 80 bp, synthetic construct
  misc_feature 1..80: note = Synthetic: >GCS-211-cand-2010-2089
  source 1..80: mol_type = other DNA
ttcagaaaatagcgtcatcgaatccccagtgtttgtacctcgccagacttcagtgaaagttgtgtgtcatggttttgaca

SEQ ID NO: 2636 - DNA, 80 bp, synthetic construct
  misc_feature 1..80: note = Synthetic: >GCS-211-cand-6250-6329
  source 1..80: mol_type = other DNA
cgtgatcaacttagcttgtcttcaggtgtagtcaagagaggctataagaagattgtggctcagcctgagaccgtcacagt

SEQ ID NO: 2637 - DNA, 80 bp, synthetic construct
  misc_feature 1..80: note = Synthetic: >GCS-227-cand-6250-6329
  source 1..80: mol_type = other DNA
tgatcaacttagcttgtcttcaggtgtagtcaagagaggctataagaggattgtggctcagcctgagaccgtcacagtca

SEQ ID NO: 2638 - DNA, 80 bp, synthetic construct
  misc_feature 1..80: note = Synthetic: >GCS-211-cand-16950-17029
  source 1..80: mol_type = other DNA
actgtgtctgagattgtttatgaaaacaagttcaagccagtaaaagataaaagccgcgagtgctttaaattgtacgctcg

SEQ ID NO: 2639 - DNA, 80 bp, synthetic construct
  misc_feature 1..80: note = Synthetic: >GCS-227-cand-16940-17019
  source 1..80: mol_type = other DNA
ttgttgacactgtgtctgagattgtttatgaaaacaagttcaagccagtaaaagataaaagccgcgagtgctttaaattg

SEQ ID NO: 2640 - DNA, 80 bp, synthetic construct
  misc_feature 1..80: note = Synthetic: >SBB-130-cand-18170-18249
  source 1..80: mol_type = other DNA
acttagagggatgtaatggtggttctttatacgtcaacaagcatgctttccacacaccagcttttgacaaacgcgctcta

SEQ ID NO: 2641 - DNA, 80 bp, synthetic construct
  misc_feature 1..80: note = Synthetic: >SBB-010-cand-18170-18249
  source 1..80: mol_type = other DNA
ttaacttagagggctgtaatggtggttcattatacgtcaacaagcatgctttccacacaccagcttttgacaaacgcgct

SEQ ID NO: 2642 - DNA, 80 bp, synthetic construct
  misc_feature 1..80: note = Synthetic: >GCS-227-cand-11350-11429
  source 1..80: mol_type = other DNA
acttcataataagattaatcttagtgacaatgcagaagaagcaatggtgaatttgttaactcttattgcaatgtttatta

SEQ ID NO: 2643 - DNA, 80 bp, synthetic construct
  misc_feature 1..80: note = Synthetic: >GCS-211-cand-11360-11439
  source 1..80: mol_type = other DNA
ataagattaatcttagtgacaatgcagaagaagcaatggtgaatttgttaactcttattgcaatgtttattagtaaacat

SEQ ID NO: 2644 - DNA, 80 bp, synthetic construct
  misc_feature 1..80: note = Synthetic: >SBB-130-cand-16650-16729
  source 1..80: mol_type = other DNA
acttgatgttgtcaaaatgtttctcgctaaaaatccatcttggtctaaggcagttttcatttcaccttataacagtcaga

SEQ ID NO: 2645 - DNA, 80 bp, synthetic construct
  misc_feature 1..80: note = Synthetic: >SBB-010-cand-16650-16729
  source 1..80: mol_type = other DNA
gcaacttgatgttgtcaaaatgtttctcgctaaaaatccatcttggtctaaggcagttttcatttcaccttataacagcc

SEQ ID NO: 2646 - DNA, 80 bp, synthetic construct
  misc_feature 1..80: note = Synthetic: >GCS-211-cand-13910-13989
  source 1..80: mol_type = other DNA
tttgttgaaatatgtcactgaccctacgctggtagtttcgtcatcaccggctttggttgacatgaggactgtttgtttct

SEQ ID NO: 2647 - DNA, 80 bp, synthetic construct
  misc_feature 1..80: note = Synthetic: >GCS-227-cand-13910-13989
  source 1..80: mol_type = other DNA
tgttgaaatatgtcactgaccctacgctggtagtttcgtcatcaccggctttggttgacatgaggactgtttgtttctct

SEQ ID NO: 2648 - DNA, 80 bp, synthetic construct
  misc_feature 1..80: note = Synthetic: >GCS-227-cand-10-89
  source 1..80: mol_type = other DNA
atctattaccagtaggtaaggatacttctttctagacttttgtctactcccctcaactaaacgaaattttgccgatggct

SEQ ID NO: 2649 - DNA, 80 bp, synthetic construct
  misc_feature 1..80: note = Synthetic: >GCS-211-cand-10-89
  source 1..80: mol_type = other DNA
atctattaccagtaggtaaggatacttctttctagacttttgtctactcccctcaactaaacgaaatttttgccgatggc

SEQ ID NO: 2650 - DNA, 80 bp, synthetic construct
  misc_feature 1..80: note = Synthetic: >SBB-120-cand-26610-26689
  source 1..80: mol_type = other DNA
agcccaaagcgaggttgaagtggtagaaatgatcaatgaagttttcgattcttaattgatcaactaaactatgatcggtc

SEQ ID NO: 2651 - DNA, 80 bp, synthetic construct
  misc_feature 1..80: note = Synthetic: >SBB-122-cand-26580-26659
  source 1..80: mol_type = other DNA
ttcagccagcccaaagcgaggttgaagtggtagaaatgatcaatgaagtcttcgattcttaattgatcaactaaactatg

SEQ ID NO: 2652 - DNA, 80 bp, synthetic construct
  misc_feature 1..80: note = Synthetic: >SBB-122-cand-9430-9509
  source 1..80: mol_type = other DNA
taacatattggcttgttatgatggtgcagctgctggtgtctatggcgttacgttacgcactaatagcactataaagggct

SEQ ID NO: 2653 - DNA, 80 bp, synthetic construct
  misc_feature 1..80: note = Synthetic: >SBB-120-cand-9420-9499
  source 1..80: mol_type = other DNA
gtgacaattttaacatattggcttgttatgatggtgcagctgctggtgtctatggcgttacgttacgcactaatagcact

SEQ ID NO: 2654 - DNA, 80 bp, synthetic construct
  misc_feature 1..80: note = Synthetic: >GCS-227-cand-27250-27329
  source 1..80: mol_type = other DNA
agcctgtctggaaaagaacccctaataaggaggagaatgtcaagaagtgctttggcccacgtagcatggtccaaaacttc

SEQ ID NO: 2655 - DNA, 80 bp, synthetic construct
  misc_feature 1..80: note = Synthetic: >GCS-211-cand-27250-27329
  source 1..80: mol_type = other DNA
caagcctgtctggaaaagaacccctaataaggaggagaatgtcaagaaatgctttggcccacgtagcatggtccaaaact

SEQ ID NO: 2656 - DNA, 80 bp, synthetic construct
  misc_feature 1..80: note = Synthetic: >GCS-227-cand-11750-11829
  source 1..80: mol_type = other DNA
agcgctcttcactctttgttgtttaacatgttgaagaggcttgatatgactagtgtagataatgtgttgaaccttgccag

SEQ ID NO: 2657 - DNA, 80 bp, synthetic construct
  misc_feature 1..80: note = Synthetic: >GCS-211-cand-11760-11839
  source 1..80: mol_type = other DNA
tcactctttgttgtttaacatgttgaagaggcttgatatgactagtgtagataatgtgttgaaccttgccaggaatggtg

SEQ ID NO: 2658 - DNA, 80 bp, synthetic construct
  misc_feature 1..80: note = Synthetic: >GCS-211-cand-27010-27089
  source 1..80: mol_type = other DNA
agctagaccgagtaacaatggctcgcgttaccaatcacgggacaactcacgtgacaggtcgcgttctaggtctaactcag

SEQ ID NO: 2659 - DNA, 80 bp, synthetic construct
  misc_feature 1..80: note = Synthetic: >GCS-227-cand-27010-27089
  source 1..80: mol_type = other DNA
ctagaccgagtaacaatggctcgcgttaccaatcacgggacaactcacgtgacaggtcgcgttctaggtctaactcagat

SEQ ID NO: 2660 - DNA, 80 bp, synthetic construct
  misc_feature 1..80: note = Synthetic: >GCS-211-cand-26060-26139
  source 1..80: mol_type = other DNA
agctatgctagttatcactttagtactttggattatgtattttgtcaattctttcaggctttatcgacgagctcctacat

SEQ ID NO: 2661 - DNA, 80 bp, synthetic construct
  misc_feature 1..80: note = Synthetic: >GCS-227-cand-26050-26129
  source 1..80: mol_type = other DNA
ttcagcatagctatgctagttatcactttagtactttggattatgtattttgtcaattctttcaggctttatcgacgagc

SEQ ID NO: 2662 - DNA, 80 bp, synthetic construct
  misc_feature 1..80: note = Synthetic: >GCS-211-cand-90-169
  source 1..80: mol_type = other DNA
tagtgatttattcacggccattaggcgtcattgaaatttcagtttaggctacttcgttgacacatacgtgacgtggagct

SEQ ID NO: 2663 - DNA, 80 bp, synthetic construct
  misc_feature 1..80: note = Synthetic: >GCS-227-cand-90-169
  source 1..80: mol_type = other DNA
agtgatttttcacggccattaggcgtcattgaaatttcagtttaggctacttcgttgacacatacgtgacgtggagctgg

SEQ ID NO: 2664 - DNA, 80 bp, synthetic construct
  misc_feature 1..80: note = Synthetic: >SBB-024-cand-3030-3109
  source 1..80: mol_type = other DNA
agtttgagaatgatgacatcgtcaaagtctgcaagaaagtcattggtaagagctttaagtataatggtgattcgtgggac

SEQ ID NO: 2665 - DNA, 80 bp, synthetic construct
  misc_feature 1..80: note = Synthetic: >SBB-130-cand-3040-3119
  source 1..80: mol_type = other DNA
tgatgacatcgtaaaagtctgcaagaaagtcattggtaagagctttaagtataatggtgattcgtgggacgatttttgtg

SEQ ID NO: 2666 - DNA, 80 bp, synthetic construct
  misc_feature 1..80: note = Synthetic: >GCS-227-cand-25490-25569
  source 1..80: mol_type = other DNA
ctaagtgacggtacgttcgtttacctcttttccagagaagcagctgtcagcatattccattctgtttttaatgaaaaact

SEQ ID NO: 2667 - DNA, 80 bp, synthetic construct
  misc_feature 1..80: note = Synthetic: >GCS-211-cand-25500-25579
  source 1..80: mol_type = other DNA
cggtacgttcgtttacctcttttccagagaagcagctgtcagcatattccattctgtttttaatgaaaaactttacgaag

SEQ ID NO: 2668 - DNA, 80 bp, synthetic construct
  misc_feature 1..80: note = Synthetic: >GCS-211-cand-15990-16069
  source 1..80: mol_type = other DNA
ttgtttgctgctgagaccataaaagctactgaagagtgtgttaagtcacagtacgctagtgccactcttaaagatgttat

SEQ ID NO: 2669 - DNA, 80 bp, synthetic construct
  misc_feature 1..80: note = Synthetic: >GCS-227-cand-15990-16069
  source 1..80: mol_type = other DNA
gtttgctgctgagaccataaaagctactgaagagtgtgttaagtcacagtacgctagtgccactcttaaagaggttattg

SEQ ID NO: 2670 - DNA, 80 bp, synthetic construct
  misc_feature 1..80: note = Synthetic: >SBB-010-cand-17050-17129
  source 1..80: mol_type = other DNA
ctttctgacaactttaagactagtggtgatttggcagtccaagtaggtgctaatggtgtctgtaagtatgaacatgttat

SEQ ID NO: 2671 - DNA, 80 bp, synthetic construct
  misc_feature 1..80: note = Synthetic: >SBB-130-cand-17050-17129
  source 1..80: mol_type = other DNA
tctgataattttaagactagtggtgatttggcagtccaagtaggtgctaatggtgtctgtaagtatgaacatgttatctc

SEQ ID NO: 2672 - DNA, 80 bp, synthetic construct
  misc_feature 1..80: note = Synthetic: >GCS-211-cand-19830-19909
  source 1..80: mol_type = other DNA
atggacttgttgcttgatgactttgttgccatactaaagtctttagaccttagtgtagtttccaaagttcatgaagttat

SEQ ID NO: 2673 - DNA, 80 bp, synthetic construct
  misc_feature 1..80: note = Synthetic: >GCS-227-cand-19820-19899
  source 1..80: mol_type = other DNA
gtacttatatggacttgttgcttgatgactttgttgccatactaaagtctttagaccttagtgtagtttccaaagttcat

SEQ ID NO: 2674 - DNA, 80 bp, synthetic construct
  misc_feature 1..80: note = Synthetic: >SBB-130-cand-17930-18009
  source 1..80: mol_type = other DNA
ataatcccaaagctatccatgatgttggcaaccctaagggtatacggtgtgctgttactgacgcacgctggtattgctac

SEQ ID NO: 2675 - DNA, 80 bp, synthetic construct
  misc_feature 1..80: note = Synthetic: >SBB-010-cand-17930-18009
  source 1..80: mol_type = other DNA
tgtataatcccaaagctatccatgatgttggcaaccctaagggtatacggtgtgctgttactgatgcacgctggtattgc

SEQ ID NO: 2676 - DNA, 80 bp, synthetic construct
  misc_feature 1..80: note = Synthetic: >SBB-726-cand-21770-21849
  source 1..80: mol_type = other DNA
atttgcttgtgtcttatgatgataatggacttcccattgctgtagcagattgttcccagaacgctggggatgaattgtac

SEQ ID NO: 2677 - DNA, 80 bp, synthetic construct
  misc_feature 1..80: note = Synthetic: >SBB-130-cand-16810-16889
  source 1..80: mol_type = other DNA
tacacacagacgtctgataccgctcatgcctgtaatgttaacagatttaatgttgctattacaagagctaagaagggtat

SEQ ID NO: 2678 - DNA, 80 bp, synthetic construct
  misc_feature 1..80: note = Synthetic: >SBB-010-cand-16810-16889
  source 1..80: mol_type = other DNA
atatacacacagacttctgataccgctcatgcctgtaatgttaacagatttaatgttgctattacaagagctaagaaggg

SEQ ID NO: 2679 - DNA, 80 bp, synthetic construct
  misc_feature 1..80: note = Synthetic: >AlphaCoV1-cand-14740-14819
  source 1..80: mol_type = other DNA
caagctgtttctgctaatgttaataagcttttaggagttgattcaaacgcttgtaacaatgttacagtaaaatccataca

SEQ ID NO: 2680 - DNA, 80 bp, synthetic construct
  misc_feature 1..80: note = Synthetic: >AlphaCoV1-cand-14820-14899
  source 1..80: mol_type = other DNA
gcgtaaaatatacgataattgttatcgtagtagcagcattgatgaagaatttgttgttgagtactttagttatttgagaa

SEQ ID NO: 2681 - DNA, 80 bp, synthetic construct
  misc_feature 1..80: note = Synthetic: >AlphaCoV1-cand-14900-14979
  source 1..80: mol_type = other DNA
aacacttttctatgatgattttatctgatgatggagttgtttgctacaacaaagattatgctgatctaggttatgtagct

SEQ ID NO: 2682 - DNA, 80 bp, synthetic construct
  misc_feature 1..80: note = Synthetic: >AlphaCoV1-cand-14980-15059
  source 1..80: mol_type = other DNA
gacattaatgcttttaaagcaacactatattaccagaataatgtctttatgtctacttctaagtgttgggtagaaccaga

SEQ ID NO: 2683 - DNA, 80 bp, synthetic construct
  misc_feature 1..80: note = Synthetic: >AlphaCoV1-cand-15060-15139
  source 1..80: mol_type = other DNA
tcttagtgttggaccacatgaattttgttcacagcacacattgcagattgtaggacctgatggagactattatcttccct

SEQ ID NO: 2684 - DNA, 80 bp, synthetic construct
  misc_feature 1..80: note = Synthetic: >AlphaCoV1-cand-15140-15219
  source 1..80: mol_type = other DNA
atccagacccttctagaattttgtcagctggtgtgtttgttgatgacatagttaaaacagacaatgttattatgttagaa

SEQ ID NO: 2685 - DNA, 80 bp, synthetic construct
  misc_feature 1..80: note = Synthetic: >AlphaCoV1-cand-15220-15299
  source 1..80: mol_type = other DNA
cgttatgtgtcattggctattgatgcatacccactcacaaaacaccctaagcctgcttatcaaaaagtgttttatactct

SEQ ID NO: 2686 - DNA, 80 bp, synthetic construct
  misc_feature 1..80: note = Synthetic: >AlphaCoV1-cand-15300-15379
  source 1..80: mol_type = other DNA
gctagattgggttaaacatttacagaaaaatttgaatgcaggtattcttgattcattttcagtgacaatgttagaggaag

SEQ ID NO: 2687 - DNA, 80 bp, synthetic construct
  misc_feature 1..80: note = Synthetic: >AlphaCoV1-cand-15380-15459
  source 1..80: mol_type = other DNA
gtcaagataagttctggagtgaagagttttatgctagcctctatgaaaagtctactgttttgcaagctgcaggcatgtgt

SEQ ID NO: 2688 - DNA, 80 bp, synthetic construct
  misc_feature 1..80: note = Synthetic: >AlphaCoV1-cand-15460-15539
  source 1..80: mol_type = other DNA
gttgtttgtggttcacaaactgtactacgttgtggagactgtcttaggagaccacttttatgcacgaagtgtgcttacga

SEQ ID NO: 2689 - DNA, 80 bp, synthetic construct
  misc_feature 1..80: note = Synthetic: >AlphaCoV1-cand-15540-15619
  source 1..80: mol_type = other DNA
ccatgttatgggaacaaagcataaattcattatgtctatcacaccatatgtgtgtagttttaatggttgtaatgtcaatg

SEQ ID NO: 2690 - DNA, 80 bp, synthetic construct
  misc_feature 1..80: note = Synthetic: >AlphaCoV1-cand-15620-15699
  source 1..80: mol_type = other DNA
atgttacaaaattgtttttaggtggtcttagttattattgtatggaccacaaaccacagttgtcattcccactctgtgct

SEQ ID NO: 2691 - DNA, 80 bp, synthetic construct
  misc_feature 1..80: note = Synthetic: >AlphaCoV1-cand-15700-15779
  source 1..80: mol_type = other DNA
aatggcaatgtttttggtctgtacaaaagtagtgcagttggttcagaggatgttgaagatttcaacaaacttgcagtttc

SEQ ID NO: 2692 - DNA, 80 bp, synthetic construct
  misc_feature 1..80: note = Synthetic: >AlphaCoV1-cand-15780-15859
  source 1..80: mol_type = other DNA
tgactggaccaatgtagaagactacaaacttgctaacaatgtcaaagaatctctgaaaattttcgctgctgaaactgtga

SEQ ID NO: 2693 - DNA, 80 bp, synthetic construct
  misc_feature 1..80: note = Synthetic: >AlphaCoV1-cand-15860-15939
  source 1..80: mol_type = other DNA
aagctaaggaggagtctgttaaatctgaatatgcttatgccatattaaaggaggttgtcggccctaaggaaattgtactc

SEQ ID NO: 2694 - DNA, 80 bp, synthetic construct
  misc_feature 1..80: note = Synthetic: >AlphaCoV1-cand-15940-16019
  source 1..80: mol_type = other DNA
caatgggaagcttctaagattaagcctccacttaacagaaattcagttttcacgtgttttcagataagtaaggatactaa

SEQ ID NO: 2695 - DNA, 80 bp, synthetic construct
  misc_feature 1..80: note = Synthetic: >AlphaCoV1-cand-19870-19949
  source 1..80: mol_type = other DNA
atgtgtctcgaacggtgtaatctctacaattatggtgcacaagtgaaattacctgatggcattactactaatgtcgttaa

SEQ ID NO: 2696 - DNA, 80 bp, synthetic construct
  misc_feature 1..80: note = Synthetic: >AlphaCoV1-cand-19950-20029
  source 1..80: mol_type = other DNA
gtatactcagttgtgtcaataccttaacactactacactgtgtgtaccacacaaaatgcgtgttttgcatttaggagctg

SEQ ID NO: 2697 - DNA, 80 bp, synthetic construct
  misc_feature 1..80: note = Synthetic: >AlphaCoV1-cand-20030-20109
  source 1..80: mol_type = other DNA
ctggtgcatatggtgttgctcctggtagtactgtattaagaagatggttaccagatgatgccatattggttgataatgat

SEQ ID NO: 2698 - DNA, 80 bp, synthetic construct
  misc_feature 1..80: note = Synthetic: >AlphaCoV1-cand-20110-20189
  source 1..80: mol_type = other DNA
ttgagagattacgtttccgacgcagacttcagtgttacaggtgattgtactagtctttacattgaagacaaatttgattt

SEQ ID NO: 2699 - DNA, 80 bp, synthetic construct
  misc_feature 1..80: note = Synthetic: >AlphaCoV1-cand-20190-20269
  source 1..80: mol_type = other DNA
gcttatctctgatttatatgatggctccacaaagtcaattgacggtgaaaacacgtcgaaagatggtttctttacttata

SEQ ID NO: 2700 - DNA, 80 bp, synthetic construct
  misc_feature 1..80: note = Synthetic: >AlphaCoV1-cand-20270-20349
  source 1..80: mol_type = other DNA
ttaatggtttcattaaagagaaactatcacttggtggatctgttgccatcaaaatcactgaatttagttggaataaagat

SEQ ID NO: 2701 - DNA, 80 bp, synthetic construct
  misc_feature 1..80: note = Synthetic: >AlphaCoV1-cand-20350-20429
  source 1..80: mol_type = other DNA
ttatatgaattgattcaaagatttgagtattggactgtgttttgtacaagtgttaacacctcatcatcagaaggttttct

SEQ ID NO: 2702 - DNA, 80 bp, synthetic construct
  misc_feature 1..80: note = Synthetic: >AlphaCoV1-cand-20430-20509
  source 1..80: mol_type = other DNA
gattggtattaactacttaggaccatactgtgacaaagcaatagtagatggaaatataatgcatgccaattatatatttt

SEQ ID NO: 2703 - DNA, 80 bp, synthetic construct
  misc_feature 1..80: note = Synthetic: >AlphaCoV1-cand-20510-20589
  source 1..80: mol_type = other DNA
ggagaaactctacaattatggctctatcacataactcagtcctagatactccaaaatttaagtgtcgttgtaacaacgca

SEQ ID NO: 2704 - DNA, 80 bp, synthetic construct
  misc_feature 1..80: note = Synthetic: >AlphaCoV1-cand-20590-20669
  source 1..80: mol_type = other DNA
cttattgttaatttaaaagaaaaagaattaaatgaaatggttgttggattactaaggaagggtaagttactcattagaaa

SEQ ID NO: 2705 - DNA, 80 bp, synthetic construct
  misc_feature 1..80: note = Synthetic: >AlphaCoV1-cand-20670-20749
  source 1..80: mol_type = other DNA
taatggtaagttactaaactttggtaatcactttgttaatacaccatgaaataaactatttgtggtattggcacttctta

SEQ ID NO: 2706 - DNA, 80 bp, synthetic construct
  misc_feature 1..80: note = Synthetic: >AlphaCoV1-cand-20750-20829
  source 1..80: mol_type = other DNA
gattggtttattcagacgatgctccttatggtatattgactaatagaacttaacacaatttaacacctcacaattggata

SEQ ID NO: 2707 - DNA, 80 bp, synthetic construct
  misc_feature 1..80: note = Synthetic: >AlphaCoV1-cand-20830-20909
  source 1..80: mol_type = other DNA
acaatgagaatctcatttgaactttatttttacaattttatagacaactttcttacagaagtaggatatcgattaccacc

SEQ ID NO: 2708 - DNA, 80 bp, synthetic construct
  misc_feature 1..80: note = Synthetic: >AlphaCoV1-cand-20910-20989
  source 1..80: mol_type = other DNA
aaatacagatgttgttttaggtggttattttccatactgtggagaaggtgttaattgtggtacaaccttggtataattgt

SEQ ID NO: 2709 - DNA, 80 bp, synthetic construct
  misc_feature 1..80: note = Synthetic: >AlphaCoV1-cand-20990-21069
  source 1..80: mol_type = other DNA
gtttgcaatgatagtaatgacctttatgttaaatttgattacataaacacgcaaaacctgaacataccaaatgttcatgc

SEQ ID NO: 2710 - DNA, 80 bp, synthetic construct
  misc_feature 1..80: note = Synthetic: >AlphaCoV1-cand-21070-21149
  source 1..80: mol_type = other DNA
attgtattttgatgtacgagaacatgctacagaaaatagcacttggaatcacagagaacgggttggcttatacgtagtca

SEQ ID NO: 2711 - DNA, 80 bp, synthetic construct
  misc_feature 1..80: note = Synthetic: >AlphaSp-cand-2490-2569
  source 1..80: mol_type = other DNA
cttaacggcgttgtcgtttttgtgaccaaaaagtttaagaaggctggtgccattttgcaaaagctgtacaatgcattttt

SEQ ID NO: 2712 - DNA, 80 bp, synthetic construct
  misc_feature 1..80: note = Synthetic: >AlphaSp-cand-2570-2649
  source 1..80: mol_type = other DNA
ggatactgtgaccagtgttattaaggtggccggtgttgcttttaaatactgtgctacatgtgtcccaaaaattgtgatta

SEQ ID NO: 2713 - DNA, 80 bp, synthetic construct
  misc_feature 1..80: note = Synthetic: >AlphaSp-cand-2650-2729
  source 1..80: mol_type = other DNA
acggttgttatcacacagttacacgcttgttcgcaaaagacctgcaaatcccaacagaagatggtgttgctgattttaac

SEQ ID NO: 2714 - DNA, 80 bp, synthetic construct
  misc_feature 1..80: note = Synthetic: >AlphaSp-cand-2730-2809
  source 1..80: mol_type = other DNA
acatttaaccattgtgtgtttcctgtcaaccctactaggatcgaaacagattctttagagttggaggaagttgattttgt

SEQ ID NO: 2715 - DNA, 80 bp, synthetic construct
  misc_feature 1..80: note = Synthetic: >AlphaSp-cand-2810-2889
  source 1..80: mol_type = other DNA
ggagcctggttctgatggcaaacttgtaattcttgacgattattccttctattcggatggtacaaattactacccttctg

SEQ ID NO: 2716 - DNA, 80 bp, synthetic construct
  misc_feature 1..80: note = Synthetic: >AlphaSp-cand-2890-2969
  source 1..80: mol_type = other DNA
atggcaaaggtgttgttgcatcttgttttaagaagaagggtggtggtgttgttaccatttctgaggaagttcaagttcgt

SEQ ID NO: 2717 - DNA, 80 bp, synthetic construct
  misc_feature 1..80: note = Synthetic: >AlphaSp-cand-2970-3049
  source 1..80: mol_type = other DNA
actatagaccctgtttacaaggtcagattagagtatgagtttgaagatgaaactattgtcaaggtttgcgaaaaggccat

SEQ ID NO: 2718 - DNA, 80 bp, synthetic construct
  misc_feature 1..80: note = Synthetic: >AlphaSp-cand-3050-3129
  source 1..80: mol_type = other DNA
aggtacaaaacttaaagtaacaggagattggtctaatctgctcgaaactttagagacggctatggatgtagtgaggcagc

SEQ ID NO: 2719 - DNA, 80 bp, synthetic construct
  misc_feature 1..80: note = Synthetic: >AlphaSp-cand-3130-3209
  source 1..80: mol_type = other DNA
accttgaagtgccagattactttgtctatgacgaagagggtggcacagacttgaatttaaccattatggtatctcagtgg

SEQ ID NO: 2720 - DNA, 80 bp, synthetic construct
  misc_feature 1..80: note = Synthetic: >AlphaSp-cand-3210-3289
  source 1..80: mol_type = other DNA
cctttgtcttctgatagtgaggacgactttaaggctgtggatgatgaatctaatgccgctactgatgagacagttgacat

SEQ ID NO: 2721 - DNA, 80 bp, synthetic construct
  misc_feature 1..80: note = Synthetic: >AlphaSp-cand-3290-3369
  source 1..80: mol_type = other DNA
ttgttgttgaagacgttgctgagacagaggatgttcagcaagatgtcacgctcgatgaagtggaagctgtctgtgactta

SEQ ID NO: 2722 - DNA, 80 bp, synthetic construct
  misc_feature 1..80: note = Synthetic: >AlphaSp-cand-3370-3449
  source 1..80: mol_type = other DNA
gttgctaaggccactgaggaagagcccatcgaacatgaggactttgtggagactgtcgaagcaaaatcagaagaccaaaa

SEQ ID NO: 2723 - DNA, 80 bp, synthetic construct
  misc_feature 1..80: note = Synthetic: >AlphaSp-cand-3450-3529
  source 1..80: mol_type = other DNA
ggaagtgcaacaggcgttggcttttattgaagacaagcctgtacaacaaccggttactattgtaaagcctgatgtctttg

SEQ ID NO: 2724 - DNA, 80 bp, synthetic construct
  misc_feature 1..80: note = Synthetic: >AlphaSp-cand-3530-3609
  source 1..80: mol_type = other DNA
cttttagctacgccagttatggtggcttgaaagttcttaaccagtccagcaataactgttgggtttcatcagcactaatt

SEQ ID NO: 2725 - DNA, 80 bp, synthetic construct
  misc_feature 1..80: note = Synthetic: >AlphaSp-cand-3610-3689
  source 1..80: mol_type = other DNA
caattgcaacttacgggtttgcttgatagcgatgaaatgaaattgtttaatgctggtagagttagtcctatggttaagcg

SEQ ID NO: 2726 - DNA, 80 bp, synthetic construct
  misc_feature 1..80: note = Synthetic: >AlphaSp-cand-26730-26809
  source 1..80: mol_type = other DNA
ggcacttctacttcctcggtactggaccgcattctgatctgcctttcagaaaacgcactgatggtgttttctgggttgca

SEQ ID NO: 2727 - DNA, 80 bp, synthetic construct
  misc_feature 1..80: note = Synthetic: >AlphaSp-cand-26810-26889
  source 1..80: mol_type = other DNA
atcgatggtgctaagacccagccaacaggccttggcgtacgtaagtcgtctgagaagccgttggttccaaaatttaaagt

SEQ ID NO: 2728 - DNA, 80 bp, synthetic construct
  misc_feature 1..80: note = Synthetic: >AlphaSp-cand-26890-26969
  source 1..80: mol_type = other DNA
caaattacccagtaatgtggaaatcgttgaacctaccacaccaaacaactccagagctaactcaaggagtcgtagtcgtg

SEQ ID NO: 2729 - DNA, 80 bp, synthetic construct
  misc_feature 1..80: note = Synthetic: >AlphaSp-cand-26970-27049
  source 1..80: mol_type = other DNA
gtggacagtccaacagcagaggaaattcccaaaacagaggtgataaatccagaaaccagtccagaaacaggagtcaatct

SEQ ID NO: 2730 - DNA, 80 bp, synthetic construct
  misc_feature 1..80: note = Synthetic: >AlphaSp-cand-27050-27129
  source 1..80: mol_type = other DNA
aatgatcgtgggtctgactcgcgagatgacttagtggctgccgttagaaaagcacttgaagacctaggagttggtgctga

SEQ ID NO: 2731 - DNA, 80 bp, synthetic construct
  misc_feature 1..80: note = Synthetic: >AlphaSp-cand-27130-27209
  source 1..80: mol_type = other DNA
tggacaaaagcctaaaagcaaaaatcagagtggtaaaaacacccctaagaacaaatctaggtcaggctctgagcaacgcg

SEQ ID NO: 2732 - DNA, 80 bp, synthetic construct
  misc_feature 1..80: note = Synthetic: >AlphaSp-cand-27210-27289
  source 1..80: mol_type = other DNA
cagaagccaaggacaaacccgagtggcgtcgtactcctagtggcgatgagtcagttgaggtttgttttggaccccgtggt

SEQ ID NO: 2733 - DNA, 80 bp, synthetic construct
  misc_feature 1..80: note = Synthetic: >AlphaSp-cand-27290-27369
  source 1..80: mol_type = other DNA
ggcaccagaaattttggtagctccgaatttgttgctaaaggtgtgaatgcccccggttatgctcaggctgcttcactggt

SEQ ID NO: 2734 - DNA, 80 bp, synthetic construct
  misc_feature 1..80: note = Synthetic: >AlphaSp-cand-27380-27459
  source 1..80: mol_type = other DNA
gcagcactgctttttggtggtaatgttgccaccaaggaaatggctgaaggtgttgaaatcacctatacatacaaaatgat

SEQ ID NO: 2735 - DNA, 80 bp, synthetic construct
  misc_feature 1..80: note = Synthetic: >AlphaSp-cand-27460-27539
  source 1..80: mol_type = other DNA
tgtccccaaggacgacaaaaatcttgaaatctttcttgctcaggttgacgcgtacaagcttggcgaccccaagcctcagc

SEQ ID NO: 2736 - DNA, 80 bp, synthetic construct
  misc_feature 1..80: note = Synthetic: >AlphaSp-cand-27540-27619
  source 1..80: mol_type = other DNA
gtaaagtcaaacgttcaagaaccccaacaccaaaacctgcaacagagccaatttatgacgacgttgctgcagatcctact

SEQ ID NO: 2737 - DNA, 80 bp, synthetic construct
  misc_feature 1..80: note = Synthetic: >AlphaSp-cand-27620-27699
  source 1..80: mol_type = other DNA
tatgccaatcttgagtgggacactacagtagaggatggtgttgagatgatcaacgaggtttttgacacccagaattgaat

SEQ ID NO: 2738 - DNA, 80 bp, synthetic construct
  misc_feature 1..80: note = Synthetic: >AlphaSp-cand-27700-27779
  source 1..80: mol_type = other DNA
tcaactaaaacaatgtacagaattgtagctattgttttggctgagattttccgagcattggctatctttggcccattctt

SEQ ID NO: 2739 - DNA, 80 bp, synthetic construct
  misc_feature 1..80: note = Synthetic: >AlphaSp-cand-27780-27859
  source 1..80: mol_type = other DNA
gcaaatcttttggctataccttgaatgcttgtacaatgtgagtgtgagctgtaatggtttgcctaacatcgttgtagccc

SEQ ID NO: 2740 - DNA, 80 bp, synthetic construct
  misc_feature 1..80: note = Synthetic: >AlphaSp-cand-27860-27939
  source 1..80: mol_type = other DNA
ctagatgtcacagagtagggtattattgggatccacctgtatatgagtgtgaacccacacccatttcttcacattttagc

SEQ ID NO: 2741 - DNA, 80 bp, synthetic construct
  misc_feature 1..80: note = Synthetic: >AlphaSp-cand-27940-28019
  source 1..80: mol_type = other DNA
gcaggacaatggtgttttcttacacatccagatttcattctttgcatgctcatattctttcttttcttggtgccttttac

SEQ ID NO: 2742 - DNA, 80 bp, synthetic construct
  misc_feature 1..80: note = Synthetic: >Beluga-cand-29140-29219
  source 1..80: mol_type = other DNA
ttggctttgtgcttgctttgcagtgtttgttttattttaagggaggaaaccctgatcatgatggtcatgaaaggctacat

SEQ ID NO: 2743 - DNA, 80 bp, synthetic construct
  misc_feature 1..80: note = Synthetic: >Beluga-cand-29220-29299
  source 1..80: mol_type = other DNA
cctaaactagctacactcgcttatactttaagcgtgtgccctgaggagaaattcactgctattactaaggatggtgagaa

SEQ ID NO: 2744 - DNA, 80 bp, synthetic construct
  misc_feature 1..80: note = Synthetic: >Beluga-cand-29300-29379
  source 1..80: mol_type = other DNA
tattgaaacatattacacacaccatgcaccgacaagttggtggacacgtgtgtgctttagaaattgtcaccagaagttcg

SEQ ID NO: 2745 - DNA, 80 bp, synthetic construct
  misc_feature 1..80: note = Synthetic: >Beluga-cand-29380-29459
  source 1..80: mol_type = other DNA
ttgttcgttcgaaactccttagctcagattctggtttgattaacccggatttggtagctaatgaagtttgtgactattct

SEQ ID NO: 2746 - DNA, 80 bp, synthetic construct
  misc_feature 1..80: note = Synthetic: >Beluga-cand-29460-29539
  source 1..80: mol_type = other DNA
tttgatgctgatagacacaccctgaatgccaatggctacgcaggatttgtacagcattatcctaatcgcaaagcttatgg

SEQ ID NO: 2747 - DNA, 80 bp, synthetic construct
  misc_feature 1..80: note = Synthetic: >Beluga-cand-29540-29619
  source 1..80: mol_type = other DNA
cagcgatgaagtttaaacatgaaaccctatattattgggatttccgggattagtggatctggtaaatcaacttttgcagc

SEQ ID NO: 2748 - DNA, 80 bp, synthetic construct
  misc_feature 1..80: note = Synthetic: >Beluga-cand-29620-29699
  source 1..80: mol_type = other DNA
caatttgaaaactaagtgtggagatttttatgctggggatgttgtgattattaatttagatgggttttatcgcagcatta

SEQ ID NO: 2749 - DNA, 80 bp, synthetic construct
  misc_feature 1..80: note = Synthetic: >Beluga-cand-29700-29779
  source 1..80: mol_type = other DNA
atgaggacgatatgtgccttgttaaagctggtgagtataattttgatcatccctatgcaatagatttggaccatgcacgt

SEQ ID NO: 2750 - DNA, 80 bp, synthetic construct
  misc_feature 1..80: note = Synthetic: >Beluga-cand-29780-29859
  source 1..80: mol_type = other DNA
aggtgtatttcagctatagctgatggccaccttgttgcagttcctatttatgattttgagaaaaagaaatgtgttgggca

SEQ ID NO: 2751 - DNA, 80 bp, synthetic construct
  misc_feature 1..80: note = Synthetic: >Beluga-cand-29860-29939
  source 1..80: mol_type = other DNA
ctatgaagtgaacaaccctagagtagtgatcgtggagggaatacatgcactccaccctaagctttttccattgtatgata

SEQ ID NO: 2752 - DNA, 80 bp, synthetic construct
  misc_feature 1..80: note = Synthetic: >Beluga-cand-29940-30019
  source 1..80: mol_type = other DNA
ttacagcatttctagaagtaccgatgagtgtggcactttctagacgtgctgttagagataataaagaaagaggtagaaca

SEQ ID NO: 2753 - DNA, 80 bp, synthetic construct
  misc_feature 1..80: note = Synthetic: >Beluga-cand-30020-30099
  source 1..80: mol_type = other DNA
ccagaggatacagcagagatgttccgtaaatttgttctccccatgtataaattacatgttgaacccaatgttaagaaggc

SEQ ID NO: 2754 - DNA, 80 bp, synthetic construct
  misc_feature 1..80: note = Synthetic: >Beluga-cand-30100-30179
  source 1..80: mol_type = other DNA
ggccattcttgtgaatggactaaacactggtgttcatattaatatgctctatgagcacattaagcccctattgatttatc

SEQ ID NO: 2755 - DNA, 80 bp, synthetic construct
  misc_feature 1..80: note = Synthetic: >Beluga-cand-30180-30259
  source 1..80: mol_type = other DNA
cacgcttttaaacaaaatgtctgctgagcaaggcccctgggataatttacaggtgaggcgtgcacgtatgaaagtaggtt

SEQ ID NO: 2756 - DNA, 80 bp, synthetic construct
  misc_feature 1..80: note = Synthetic: >Beluga-cand-30260-30339
  source 1..80: mol_type = other DNA
ccaatgatccgaatgatttaatttttattgattacaacaaaaatggcctctacatcgggaaagggaaagaaccccgccga

SEQ ID NO: 2757 - DNA, 80 bp, synthetic construct
  misc_feature 1..80: note = Synthetic: >Beluga-cand-30340-30419
  source 1..80: mol_type = other DNA
caagagcgtcaagtttcaagcaccgaaggtaggacgccaggctccagccctgccaacatcaggaaatgtttcttggtttc

SEQ ID NO: 2758 - DNA, 80 bp, synthetic construct
  misc_feature 1..80: note = Synthetic: >BetaCoV1-cand-5060-5139
  source 1..80: mol_type = other DNA
gagcttatgttcagagtatgtatcaatccttgccagaagattggcgatcagtcttcaaatatgatgtttgtgctggtgtt

SEQ ID NO: 2759 - DNA, 80 bp, synthetic construct
  misc_feature 1..80: note = Synthetic: >BetaCoV1-cand-5140-5219
  source 1..80: mol_type = other DNA
agagttgttaaatattttgagtgccctggcggtatatttatatgcagtcagggttcagattttggatatgtacaggaggg

SEQ ID NO: 2760 - DNA, 80 bp, synthetic construct
  misc_feature 1..80: note = Synthetic: >BetaCoV1-cand-5220-5299
  source 1..80: mol_type = other DNA
tacctttgtaaaggctaccgtcaaagaggttcagcagctttttaggaatgcagttgaagtcctgcttactgttgatggtt

SEQ ID NO: 2761 - DNA, 80 bp, synthetic construct
  misc_feature 1..80: note = Synthetic: >BetaCoV1-cand-5300-5379
  source 1..80: mol_type = other DNA
tcaatttcaagaccaagtcagttgtttgtggtgaagcttttggtaagcaggtgggtaatgtgttttgtgaaaatgttgat

SEQ ID NO: 2762 - DNA, 80 bp, synthetic construct
  misc_feature 1..80: note = Synthetic: >BetaCoV1-cand-5380-5459
  source 1..80: mol_type = other DNA
gttaccaagcacattgtcactaaagagcatgcaggcaaagtactctaccagtttgagaacttgtctgaagctgaattaga

SEQ ID NO: 2763 - DNA, 80 bp, synthetic construct
  misc_feature 1..80: note = Synthetic: >BetaCoV1-cand-5460-5539
  source 1..80: mol_type = other DNA
ttctgttaaacaatcctttgggtttgaccagaagcagcttcttgcttattacagctatcgcagttgttgtaagtgggagg

SEQ ID NO: 2764 - DNA, 80 bp, synthetic construct
  misc_feature 1..80: note = Synthetic: >BetaCoV1-cand-5540-5619
  source 1..80: mol_type = other DNA
ttgtggtccagcgcaaatggttttgttttaagcaggcagacaataattgttattgtaatgctgcatgcttaatgttgcaa

SEQ ID NO: 2765 - DNA, 80 bp, synthetic construct
  misc_feature 1..80: note = Synthetic: >BetaCoV1-cand-5620-5699
  source 1..80: mol_type = other DNA
aatcttaatttgacttttaaattgcagcaatggcaagaggcgtggctcgaatttagagctggacgacctctgcgctttgt

SEQ ID NO: 2766 - DNA, 80 bp, synthetic construct
  misc_feature 1..80: note = Synthetic: >BetaCoV1-cand-5700-5779
  source 1..80: mol_type = other DNA
tgcacttgtgcttgcaaaaggtgcctttgtttatggacaaccagctgatgcgcgtgactttatgcgagttgccttgagtc

SEQ ID NO: 2767 - DNA, 80 bp, synthetic construct
  misc_feature 1..80: note = Synthetic: >BetaCoV1-cand-5780-5859
  source 1..80: mol_type = other DNA
aggcagacttgtcaggtgccagctgtgagtatgagtttatttgtaaatgtggtgtaaaggttgaaaaacgtgacggtatt

SEQ ID NO: 2768 - DNA, 80 bp, synthetic construct
  misc_feature 1..80: note = Synthetic: >BetaCoV1-cand-5860-5939
  source 1..80: mol_type = other DNA
gatgcagtcatgttttatggtacttgtgataagcaggcactagaaaagggtgctactacagattgtagttgtggacccaa

SEQ ID NO: 2769 - DNA, 80 bp, synthetic construct
  misc_feature 1..80: note = Synthetic: >BetaCoV1-cand-5940-6019
  source 1..80: mol_type = other DNA
aactgtgcatttgcttagcatgaatgtgccattctttattggcagtcaggctcctgctgttggagtcttgcctaatggtt

SEQ ID NO: 2770 - DNA, 80 bp, synthetic construct
  misc_feature 1..80: note = Synthetic: >BetaCoV1-cand-6020-6099
  source 1..80: mol_type = other DNA
gtactgctgctaacttgtatagaggtggtgctgttggccattatactcatgttaagaatggcaaacagctcacatgtttt

SEQ ID NO: 2771 - DNA, 80 bp, synthetic construct
  misc_feature 1..80: note = Synthetic: >BetaCoV1-cand-6100-6179
  source 1..80: mol_type = other DNA
gatgcacataatgttaaaaagtgcacaactcttgtagatagtgttacagattgtctgtacactaatgtgcctaagcaaac

SEQ ID NO: 2772 - DNA, 80 bp, synthetic construct
  misc_feature 1..80: note = Synthetic: >BetaCoV1-cand-6210-6289
  source 1..80: mol_type = other DNA
agatgatgtgaaacatgttgaatataagcctgatctctcgcaatattactgtgagggtggtcggtattacactcaacgta

SEQ ID NO: 2773 - DNA, 80 bp, synthetic construct
  misc_feature 1..80: note = Synthetic: >BetaCoV1-cand-6290-6369
  source 1..80: mol_type = other DNA
tagttaaagcacaatttaaaacttttgaggctgtcgatggtgtgtacacaaactttgagcttgtgggtcatgccttatgt

SEQ ID NO: 2774 - DNA, 80 bp, synthetic construct
  misc_feature 1..80: note = Synthetic: >BetaCoV1-cand-16580-16659
  source 1..80: mol_type = other DNA
atgtctactgatcataaatacgtcctaagcgtatcaccatatgtgtgtaatgcaccaggatgtgatgtgaatgatgttac

SEQ ID NO: 2775 - DNA, 80 bp, synthetic construct
  misc_feature 1..80: note = Synthetic: >BetaCoV1-cand-16660-16739
  source 1..80: mol_type = other DNA
caaattgtatttaggtggtatgtcatattattgtgaagaccataagccacaatattcttttaaattagtaatgaatggta

SEQ ID NO: 2776 - DNA, 80 bp, synthetic construct
  misc_feature 1..80: note = Synthetic: >BetaCoV1-cand-16740-16819
  source 1..80: mol_type = other DNA
tggtttttggtctgtataaacaatcttgtacaggttctccctttatagatgattttaatcgcattgctagttgtaaatgg

SEQ ID NO: 2777 - DNA, 80 bp, synthetic construct
  misc_feature 1..80: note = Synthetic: >BetaCoV1-cand-16820-16899
  source 1..80: mol_type = other DNA
actgatgtggacgattacatactagccaatgaatgtaccgagcgcttaaaattatttgctgcagagactcagaaggcaac

SEQ ID NO: 2778 - DNA, 80 bp, synthetic construct
  misc_feature 1..80: note = Synthetic: >BetaCoV1-cand-16900-16979
  source 1..80: mol_type = other DNA
tgaagaggctttcaagcaaagctatgcttctgctactatacaggagatagtaagcgatcgtgaattaattctctcttggg

SEQ ID NO: 2779 - DNA, 80 bp, synthetic construct
  misc_feature 1..80: note = Synthetic: >BetaCoV1-cand-17060-17139
  source 1..80: mol_type = other DNA
ttaggtgagtatgtttttgataagagtgagttgactaatggcgtctattatagagccacaaccacttataagctatcagt

SEQ ID NO: 2780 - DNA, 80 bp, synthetic construct
  misc_feature 1..80: note = Synthetic: >BetaCoV1-cand-17140-17219
  source 1..80: mol_type = other DNA
gggtgatgtttttgttttaacatcacactctgtagcaaatttaagtgctcctacgcttgttccacaggagcattatacaa

SEQ ID NO: 2781 - DNA, 80 bp, synthetic construct
  misc_feature 1..80: note = Synthetic: >BetaCoV1-cand-17300-17379
  source 1..80: mol_type = other DNA
agatattgtactgtccagggaccacctggtactggaaaatcgcatttagctatcgggctggcagtttattactgtacagc

SEQ ID NO: 2782 - DNA, 80 bp, synthetic construct
  misc_feature 1..80: note = Synthetic: >BetaCoV1-cand-17380-17459
  source 1..80: mol_type = other DNA
gcgagttgtttatacagcagcgagccatgcggccgttgatgcgttgtgtgagaaggcatacaaatttttgaatttgaatg

SEQ ID NO: 2783 - DNA, 80 bp, synthetic construct
  misc_feature 1..80: note = Synthetic: >BetaCoV1-cand-17460-17539
  source 1..80: mol_type = other DNA
actgcacgcgaattattcctgcaaaggtgcgtgtggagtgctatgataagtttaagataaatgacacatctcgcaagtat

SEQ ID NO: 2784 - DNA, 80 bp, synthetic construct
  misc_feature 1..80: note = Synthetic: >BetaCoV1-cand-17540-17619
  source 1..80: mol_type = other DNA
gtatttactaccataaatgcattgcctgagattgtcactgatattgttgttgtagatgaagtaagtatgcttaccaacta

SEQ ID NO: 2785 - DNA, 80 bp, synthetic construct
  misc_feature 1..80: note = Synthetic: >BetaCoV1-cand-17620-17699
  source 1..80: mol_type = other DNA
tgagctttctgttattaatgctcgtgtgcgtgctaagcattatgtatatattggagatcctgctcaattaccagcaccac

SEQ ID NO: 2786 - DNA, 80 bp, synthetic construct
  misc_feature 1..80: note = Synthetic: >BetaCoV1-cand-20420-20499
  source 1..80: mol_type = other DNA
ggagtcagccctaactggagcccacaaggtaatccagggggttatgccaaacccggtaatggcgctggtaatgatgctct

SEQ ID NO: 2787 - DNA, 80 bp, synthetic construct
  misc_feature 1..80: note = Synthetic: >BetaCoV1-cand-20500-20579
  source 1..80: mol_type = other DNA
agcgcttgggaatctctttacgcaaagtagacagcttgagacatttgaacctcgttcagagatggagagggactttgtcc

SEQ ID NO: 2788 - DNA, 80 bp, synthetic construct
  misc_feature 1..80: note = Synthetic: >BetaCoV1-cand-20580-20659
  source 1..80: mol_type = other DNA
agctggaagatgaattgtttattcagaagtatggtttggaggactatgcttttgaacatattgtttatggaagttttaac

SEQ ID NO: 2789 - DNA, 80 bp, synthetic construct
  misc_feature 1..80: note = Synthetic: >BetaCoV1-cand-20660-20739
  source 1..80: mol_type = other DNA
cagaagataattggtgggttgcatttgcttataggtttgtaccgaaggcagcaaacctccaagctggaaattcaagagtt

SEQ ID NO: 2790 - DNA, 80 bp, synthetic construct
  misc_feature 1..80: note = Synthetic: >BetaCoV1-cand-20740-20819
  source 1..80: mol_type = other DNA
cattgagtatgactctagcatacattcgtactttatcacagatcagaagagtggtagtagtaagagtgtgtgcactgtta

SEQ ID NO: 2791 - DNA, 80 bp, synthetic construct
  misc_feature 1..80: note = Synthetic: >BetaCoV1-cand-20820-20899
  source 1..80: mol_type = other DNA
ttgatttgttgttagatgattttgtggctcttgttaagtcactcgatctgaattgtgttagcaaggtagttaatgtaaat

SEQ ID NO: 2792 - DNA, 80 bp, synthetic construct
  misc_feature 1..80: note = Synthetic: >BetaCoV1-cand-20900-20979
  source 1..80: mol_type = other DNA
gttgattttaaggattttcagtttatgttgtggtgtaactcggataaagttatgactttttatcccagattgcaagcagc

SEQ ID NO: 2793 - DNA, 80 bp, synthetic construct
  misc_feature 1..80: note = Synthetic: >BetaCoV1-cand-20980-21059
  source 1..80: mol_type = other DNA
atctgattggaaacctggttatactatgcctgtgctatataaatatctcaattcatctatggagagagttgatttatgga

SEQ ID NO: 2794 - DNA, 80 bp, synthetic construct
  misc_feature 1..80: note = Synthetic: >BetaCoV1-cand-21140-21219
  source 1..80: mol_type = other DNA
actacaacgctggctgtacctgcaaatatgagagtcttgcacttaggagcaggctcagataaaggtgttgcacctggctc

SEQ ID NO: 2795 - DNA, 80 bp, synthetic construct
  misc_feature 1..80: note = Synthetic: >BetaCoV1-cand-21220-21299
  source 1..80: mol_type = other DNA
tgcagttcttagacagtggttaccagcaggcacaatacttgtagataatgatttgaatccctttgttagtgatagcgttg

SEQ ID NO: 2796 - DNA, 80 bp, synthetic construct
  misc_feature 1..80: note = Synthetic: >BetaCoV1-cand-21380-21459
  source 1..80: mol_type = other DNA
actaagaatataggagagtacaatgttagtaaagatggcttctttacgtatatttgtcatttaatccgttccaagttggc

SEQ ID NO: 2797 - DNA, 80 bp, synthetic construct
  misc_feature 1..80: note = Synthetic: >BetaCoV1-cand-21460-21539
  source 1..80: mol_type = other DNA
tctaggaggctcagttgccataaaaattacagagttttcgtggaacgcagaattatatagtttaatggggaagtttgctt

SEQ ID NO: 2798 - DNA, 80 bp, synthetic construct
  misc_feature 1..80: note = Synthetic: >BetaCoV1-cand-21540-21619
  source 1..80: mol_type = other DNA
tttggacggttttttgtgcaaatgcaaatgcctcttcaagtgaaggatttttagttggcattaattatttgggtaagtcc

SEQ ID NO: 2799 - DNA, 80 bp, synthetic construct
  misc_feature 1..80: note = Synthetic: >BetaCoV1-cand-21620-21699
  source 1..80: mol_type = other DNA
aaggttgaaattgatggaaatgttatgcatgccaactatttgttttggagaaatagtcagatgtggaatggagggtctta

SEQ ID NO: 2800 - DNA, 80 bp, synthetic construct
  misc_feature 1..80: note = Synthetic: >CDPHE15-cand-22230-22309
  source 1..80: mol_type = other DNA
tccagagcagccaatttaccacaactggaaatgttaaaactaataccaaacaccagtttgacttttacacacagcgtgca

SEQ ID NO: 2801 - DNA, 80 bp, synthetic construct
  misc_feature 1..80: note = Synthetic: >CDPHE15-cand-22310-22389
  source 1..80: mol_type = other DNA
gcttctaatggctgcccttttaacatagacaccataaacaactatcttacatttggtaagatatgcttcacctatggtga

SEQ ID NO: 2802 - DNA, 80 bp, synthetic construct
  misc_feature 1..80: note = Synthetic: >CDPHE15-cand-22390-22469
  source 1..80: mol_type = other DNA
aacaggagcaggctgtggtattgacgtcatagtggagtcacagtacaacatcatcaaggtcacaactatctttgtctctt

SEQ ID NO: 2803 - DNA, 80 bp, synthetic construct
  misc_feature 1..80: note = Synthetic: >CDPHE15-cand-22470-22549
  source 1..80: mol_type = other DNA
acacagaaggtgatataattgctggtatgcccaaaccatctgaaggtatacaggatgtttcaaaaatccacctggacgtc

SEQ ID NO: 2804 - DNA, 80 bp, synthetic construct
  misc_feature 1..80: note = Synthetic: >CDPHE15-cand-22550-22629
  source 1..80: mol_type = other DNA
tgcagcacctacagcatatatggtcatactggtgatggcattatcagactaacaaatgacacatagttaggtggcctcta

SEQ ID NO: 2805 - DNA, 80 bp, synthetic construct
  misc_feature 1..80: note = Synthetic: >CDPHE15-cand-22630-22709
  source 1..80: mol_type = other DNA
ttacacatcacctggtggtgcgctgttaggttttaaaaatgttaccacaggtgaaatttactccgtaacaccatgttcgc

SEQ ID NO: 2806 - DNA, 80 bp, synthetic construct
  misc_feature 1..80: note = Synthetic: >CDPHE15-cand-22710-22789
  source 1..80: mol_type = other DNA
tgacacagcaggttgctgtcgttacagatgaaattgttggtgtggtgtcatctagtgctaagctcagtgatcaattcagc

SEQ ID NO: 2807 - DNA, 80 bp, synthetic construct
  misc_feature 1..80: note = Synthetic: >CDPHE15-cand-22790-22869
  source 1..80: mol_type = other DNA
tttacttataccactgtcactgagcagttttactatatgactgatggcaatagtacgtgtgctgaacccgtactaacata

SEQ ID NO: 2808 - DNA, 80 bp, synthetic construct
  misc_feature 1..80: note = Synthetic: >CDPHE15-cand-22870-22949
  source 1..80: mol_type = other DNA
cagttcactaggtgtttgcaaagacggagcattgcgtattatgcaaccacgccaagacacaacacaaccaacacctatag

SEQ ID NO: 2809 - DNA, 80 bp, synthetic construct
  misc_feature 1..80: note = Synthetic: >CDPHE15-cand-22950-23029
  source 1..80: mol_type = other DNA
tgtctggtgttatttctattgcaaccaacttcacacttagtgtcgtcacagaatacatacaattagcaaacacaccaatc

SEQ ID NO: 2810 - DNA, 80 bp, synthetic construct
  misc_feature 1..80: note = Synthetic: >CDPHE15-cand-23030-23109
  source 1..80: mol_type = other DNA
agtgttgactgtgccatgtatgtttgtaacggcaaccctaggtgcaatatgctgctcgcacaatattcttctgcttgtca

SEQ ID NO: 2811 - DNA, 80 bp, synthetic construct
  misc_feature 1..80: note = Synthetic: >CDPHE15-cand-23110-23189
  source 1..80: mol_type = other DNA
aacaatcgaaaatgccctgcagctcagcgccaaactagagtccatcgaagtgactaacatgcttacagtctcagaagaca

SEQ ID NO: 2812 - DNA, 80 bp, synthetic construct
  misc_feature 1..80: note = Synthetic: >CDPHE15-cand-23190-23269
  source 1..80: mol_type = other DNA
acctccaaattgctaacattaccacatttaatggtggtggttacaatttcactaatttaatgggtacaacgtactcaacc

SEQ ID NO: 2813 - DNA, 80 bp, synthetic construct
  misc_feature 1..80: note = Synthetic: >CDPHE15-cand-23270-23349
  source 1..80: mol_type = other DNA
aaatcagtaatagaggacatcttgtttgacaaagtcgtcacaactggactcggaactgttgatgcagattacaaagcatg

SEQ ID NO: 2814 - DNA, 80 bp, synthetic construct
  misc_feature 1..80: note = Synthetic: >CDPHE15-cand-23350-23429
  source 1..80: mol_type = other DNA
ttctaatggcctatccattgcagatcttgtttgtgcgcagtactaccagggcgttatggtgctgccaggcgttgttgatg

SEQ ID NO: 2815 - DNA, 80 bp, synthetic construct
  misc_feature 1..80: note = Synthetic: >CDPHE15-cand-23430-23509
  source 1..80: mol_type = other DNA
cagaaaaactgcatatgtactctgcatcactcatgggcggtatggccctaggaggcataactgcagccgctgcgttgccg

SEQ ID NO: 2816 - DNA, 80 bp, synthetic construct
  misc_feature 1..80: note = Synthetic: >CanadaGoose-cand-19600-19679
  source 1..80: mol_type = other DNA
cggtagcattgtcaataatggtaatgatgatgtttttgtttacctcacaaattttataaggtctaacctcgctttgggag

SEQ ID NO: 2817 - DNA, 80 bp, synthetic construct
  misc_feature 1..80: note = Synthetic: >CanadaGoose-cand-19680-19759
  source 1..80: mol_type = other DNA
gtacatttgttgtaaaagttacagagaccagctggcacgaggagctatataatttagctcaagattgtgcctggtggact

SEQ ID NO: 2818 - DNA, 80 bp, synthetic construct
  misc_feature 1..80: note = Synthetic: >CanadaGoose-cand-19760-19839
  source 1..80: mol_type = other DNA
atgtattgcacggctgtaaatgcttcttcttcagaagcttttcttattggtgttaattatttgggtgagagtaaaggtat

SEQ ID NO: 2819 - DNA, 80 bp, synthetic construct
  misc_feature 1..80: note = Synthetic: >CanadaGoose-cand-19840-19919
  source 1..80: mol_type = other DNA
taaaataccgggtaagactcttcacgcaaattatatattttggagaaatgtgtcggttttacaaactagcgcattttcta

SEQ ID NO: 2820 - DNA, 80 bp, synthetic construct
  misc_feature 1..80: note = Synthetic: >CanadaGoose-cand-19920-19999
  source 1..80: mol_type = other DNA
tttttgatgtcgcacgttttgaattgaaaaacaaagcaacccctgttgttactcttaaaaaagagcttcaatcggagctg

SEQ ID NO: 2821 - DNA, 80 bp, synthetic construct
  misc_feature 1..80: note = Synthetic: >CanadaGoose-cand-20000-20079
  source 1..80: mol_type = other DNA
gttctcaatttagttagaaatggaaagttgctaattagagaaacaggacctgttaatttgttagatgaaagctttattta

SEQ ID NO: 2822 - DNA, 80 bp, synthetic construct
  misc_feature 1..80: note = Synthetic: >CanadaGoose-cand-20080-20159
  source 1..80: mol_type = other DNA
aaactttcaccttcttttctcttttggtgtgcttgtcatgtcaaatttatggtgatgactgggtctattattacccatca

SEQ ID NO: 2823 - DNA, 80 bp, synthetic construct
  misc_feature 1..80: note = Synthetic: >CanadaGoose-cand-20160-20239
  source 1..80: mol_type = other DNA
gcgtttagaccgagtgatggctggcacttgcagtctggtgcttaccaagttgtggagcagtcaacactcaattcaactag

SEQ ID NO: 2824 - DNA, 80 bp, synthetic construct
  misc_feature 1..80: note = Synthetic: >CanadaGoose-cand-20240-20319
  source 1..80: mol_type = other DNA
tggtgcaggttgtacatttgcgcataatagttttaatttaaccatgtcggatggtgttgttcttcaagcgctccctccga

SEQ ID NO: 2825 - DNA, 80 bp, synthetic construct
  misc_feature 1..80: note = Synthetic: >CanadaGoose-cand-20320-20399
  source 1..80: mol_type = other DNA
ctggttggaccgatcaagctgctaaaacttatgttcatttagcaggttgctctatgggaccatatatattttttgtgttt

SEQ ID NO: 2826 - DNA, 80 bp, synthetic construct
  misc_feature 1..80: note = Synthetic: >CanadaGoose-cand-20400-20479
  source 1..80: mol_type = other DNA
ggcccctgtaataataacaaagtgtgtggtagacctggtataaaaggtggcattagcttcattgtctatgacaccaatta

SEQ ID NO: 2827 - DNA, 80 bp, synthetic construct
  misc_feature 1..80: note = Synthetic: >CanadaGoose-cand-20480-20559
  source 1..80: mol_type = other DNA
tactataatctaccagactgacttccctaattggactgcacacactaagttttcaactttacagtgtgtgggacataagg

SEQ ID NO: 2828 - DNA, 80 bp, synthetic construct
  misc_feature 1..80: note = Synthetic: >CanadaGoose-cand-20560-20639
  source 1..80: mol_type = other DNA
ggagcgtctatctaaatggtgatcttttgtatcagttgggttatgatgctactgttactaatgcatcacttgtaacatgt

SEQ ID NO: 2829 - DNA, 80 bp, synthetic construct
  misc_feature 1..80: note = Synthetic: >CanadaGoose-cand-20640-20719
  source 1..80: mol_type = other DNA
accacacctagtgtgcagtatttatacaagagttcacgtgctataaattctcttgtctattttcagaatggtactgcgca

SEQ ID NO: 2830 - DNA, 80 bp, synthetic construct
  misc_feature 1..80: note = Synthetic: >CanadaGoose-cand-20720-20799
  source 1..80: mol_type = other DNA
ggacctcatcctttgtgatgatacaccgcgtggtgtcctttattgtacttatggtaatggtaatcttacagatggacttt

SEQ ID NO: 2831 - DNA, 80 bp, synthetic construct
  misc_feature 1..80: note = Synthetic: >CanadaGoose-cand-20800-20879
  source 1..80: mol_type = other DNA
accctatatcagcactttcaactccaaataaaactcttgaggtttatttgattggtagtgttgttaataacacctatctt

SEQ ID NO: 2832 - DNA, 80 bp, synthetic construct
  misc_feature 1..80: note = Synthetic: >CanadaGoose-cand-23440-23519
  source 1..80: mol_type = other DNA
ctattattttcttccttattttaggttggattttctttatgactggttgttgtggtggttgctgtggctgctgtggccta

SEQ ID NO: 2833 - DNA, 80 bp, synthetic construct
  misc_feature 1..80: note = Synthetic: >CanadaGoose-cand-23520-23599
  source 1..80: mol_type = other DNA
attccattagcacagcgttgcagtaagaaatcatcatactaccagacatttgatgatgatgtagtaggcgaacgaatcag

SEQ ID NO: 2834 - DNA, 80 bp, synthetic construct
  misc_feature 1..80: note = Synthetic: >CanadaGoose-cand-23600-23679
  source 1..80: mol_type = other DNA
acctaagaaaaatgtctgatgactcgtcctgctgcatacataatccatgcctctctgagtggtgtgtctattgtaaccca

SEQ ID NO: 2835 - DNA, 80 bp, synthetic construct
  misc_feature 1..80: note = Synthetic: >CanadaGoose-cand-23680-23759
  source 1..80: mol_type = other DNA
ccagatgaggatgttcctcttcatgttttatcttttattatcaactcgcaacaagagttgttagagttgatagatctatt

SEQ ID NO: 2836 - DNA, 80 bp, synthetic construct
  misc_feature 1..80: note = Synthetic: >CanadaGoose-cand-23760-23839
  source 1..80: mol_type = other DNA
atttgaatcttaacaaaacgcatgttttattacatacttttgtttatattctatctttggtgtaagacactactagttat

SEQ ID NO: 2837 - DNA, 80 bp, synthetic construct
  misc_feature 1..80: note = Synthetic: >CanadaGoose-cand-23840-23919
  source 1..80: mol_type = other DNA
atctagagaagtagcttaccttgtaataatctttgtgcagtttagtttgaagtgtctggacggtctttatgacagatatc

SEQ ID NO: 2838 - DNA, 80 bp, synthetic construct
  misc_feature 1..80: note = Synthetic: >CanadaGoose-cand-23920-23999
  source 1..80: mol_type = other DNA
ttaaccaaatctgtacaagagaatggtagttttcttactgctgtatatgtatttacagcttttgttgctttatatctctt

SEQ ID NO: 2839 - DNA, 80 bp, synthetic construct
  misc_feature 1..80: note = Synthetic: >CanadaGoose-cand-24000-24079
  source 1..80: mol_type = other DNA
gggtaaagctctttatgcatttacccaggcagcagatgcttgtttcgcattttggtatacctgggttgccttacccactg

SEQ ID NO: 2840 - DNA, 80 bp, synthetic construct
  misc_feature 1..80: note = Synthetic: >CanadaGoose-cand-24080-24159
  source 1..80: mol_type = other DNA
gtaagggtgtggcttttgtgtacaggaatacctatggtagaaaaattaacaatccagacttggaagcggttattgttaac

SEQ ID NO: 2841 - DNA, 80 bp, synthetic construct
  misc_feature 1..80: note = Synthetic: >CanadaGoose-cand-24160-24239
  source 1..80: mol_type = other DNA
gagtttccaaagaacggtccaaataataaactagtcccgaagttatcatgagtagcaacgagacagttaattgtaccctt

SEQ ID NO: 2842 - DNA, 80 bp, synthetic construct
  misc_feature 1..80: note = Synthetic: >CanadaGoose-cand-24240-24319
  source 1..80: mol_type = other DNA
gatgtgactcaagcggagaaagtctttaaggagtataatctattccttacatgtttctttctattcatgacctttgtgct

SEQ ID NO: 2843 - DNA, 80 bp, synthetic construct
  misc_feature 1..80: note = Synthetic: >CanadaGoose-cand-24320-24399
  source 1..80: mol_type = other DNA
gcaatatggttacgccacacgcagcagagtcatgtatgtaattaagatgatagtgctttggctattctggccacttaaca

SEQ ID NO: 2844 - DNA, 80 bp, synthetic construct
  misc_feature 1..80: note = Synthetic: >CanadaGoose-cand-24400-24479
  source 1..80: mol_type = other DNA
ttgctgttggtgtgctgtcctgtatatggccagttaacactggaggctttgttgctgctatcgtgcttaccattatggct

SEQ ID NO: 2845 - DNA, 80 bp, synthetic construct
  misc_feature 1..80: note = Synthetic: >CanadaGoose-cand-24480-24559
  source 1..80: mol_type = other DNA
attttggcttttcttggctattggattcagtccataagactttttaagcgctgcgcatctttctgggcttttaaccctga

SEQ ID NO: 2846 - DNA, 80 bp, synthetic construct
  misc_feature 1..80: note = Synthetic: >CanadaGoose-cand-24560-24639
  source 1..80: mol_type = other DNA
gagtaacgcagtaggctctatcaatcttaataacggcaccgtgtgtaagttctctattgagagcgtacctatggtgctgt

SEQ ID NO: 2847 - DNA, 80 bp, synthetic construct
  misc_feature 1..80: note = Synthetic: >CanadaGoose-cand-24640-24719
  source 1..80: mol_type = other DNA
cacctattataaaagctggtgtcctctattgtgagggccagtggcttactaagtgcactccttcggaagtgcctaattat

SEQ ID NO: 2848 - DNA, 80 bp, synthetic construct
  misc_feature 1..80: note = Synthetic: >HKU10-cand-15360-15439
  source 1..80: mol_type = other DNA
ctaaacacccaaatcctgagtatcgtaaagtattttatgtacttttagactgggttaaacatttgcataacacacttaat

SEQ ID NO: 2849 - DNA, 80 bp, synthetic construct
  misc_feature 1..80: note = Synthetic: >HKU10-cand-15440-15519
  source 1..80: mol_type = other DNA
caaggtgttttagaatctttctctgtcacattactagaagacacgtcttctaagttctgggacgagagtttctatgccaa

SEQ ID NO: 2850 - DNA, 80 bp, synthetic construct
  misc_feature 1..80: note = Synthetic: >HKU10-cand-15520-15599
  source 1..80: mol_type = other DNA
tatgtatgaaaagtcagccatactacagtcggctggtttatgtgttgtgtgtggttctcaaactgtacttcgttgtggtg

SEQ ID NO: 2851 - DNA, 80 bp, synthetic construct
  misc_feature 1..80: note = Synthetic: >HKU10-cand-15600-15679
  source 1..80: mol_type = other DNA
actgtctacgacgtcccatgttgtgtacaaagtgtgcttatgaccacgtaattgccacacctcacaaatttatattggct

SEQ ID NO: 2852 - DNA, 80 bp, synthetic construct
  misc_feature 1..80: note = Synthetic: >HKU10-cand-15680-15759
  source 1..80: mol_type = other DNA
attacgccctatgtgtgttcatattctggctgtaatgttaatgatgtcactcagctttaccttggtggtcttagttacta

SEQ ID NO: 2853 - DNA, 80 bp, synthetic construct
  misc_feature 1..80: note = Synthetic: >HKU10-cand-15760-15839
  source 1..80: mol_type = other DNA
ttgtgctgaacataaacccagactttcattccctctttgttctgctggcaatgtttttggtctttataaagcttcagcca

SEQ ID NO: 2854 - DNA, 80 bp, synthetic construct
  misc_feature 1..80: note = Synthetic: >HKU10-cand-15840-15919
  source 1..80: mol_type = other DNA
ctggttctccagatgttgaaattttcaacacactggcaacttctgattggacagatgttagagactataaaattgccaat

SEQ ID NO: 2855 - DNA, 80 bp, synthetic construct
  misc_feature 1..80: note = Synthetic: >HKU10-cand-15920-15999
  source 1..80: mol_type = other DNA
gaagctaaggattctcttaggttgtttgcagcagaaactattaaagcaaaggaggaaagtgttaagtcttcttatgcttg

SEQ ID NO: 2856 - DNA, 80 bp, synthetic construct
  misc_feature 1..80: note = Synthetic: >HKU10-cand-16000-16079
  source 1..80: mol_type = other DNA
tgcaacacttaaagaagttataggacctaaagaactactgctaagttgggagtgtggtaaagttaaaccacccctcaaca

SEQ ID NO: 2857 - DNA, 80 bp, synthetic construct
  misc_feature 1..80: note = Synthetic: >HKU10-cand-16080-16159
  source 1..80: mol_type = other DNA
gaaacagtgtttttacatgttttcatattacaaaagactccaaatttcaagtgggtgagtttgtttttgaaaaagttgat

SEQ ID NO: 2858 - DNA, 80 bp, synthetic construct
  misc_feature 1..80: note = Synthetic: >HKU10-cand-16240-16319
  source 1..80: mol_type = other DNA
caatgtacagccgcttcgagcacctaccatagcaaaccaggaacgctactcatcaattcataaattgtacccatccttca

SEQ ID NO: 2859 - DNA, 80 bp, synthetic construct
  misc_feature 1..80: note = Synthetic: >HKU10-cand-16320-16399
  source 1..80: mol_type = other DNA
acattgctgacgcttactctacgctggtaccttattatcaaatgataggtaaacagcgtataacaacaatacagggacct

SEQ ID NO: 2860 - DNA, 80 bp, synthetic construct
  misc_feature 1..80: note = Synthetic: >HKU10-cand-16400-16479
  source 1..80: mol_type = other DNA
cctggtagtggtaagtcacattgtgttataggtttgggtttgtactaccctggtgcacgcatagttttcacagcatgctc

SEQ ID NO: 2861 - DNA, 80 bp, synthetic construct
  misc_feature 1..80: note = Synthetic: >HKU10-cand-16480-16559
  source 1..80: mol_type = other DNA
tcatgcagctgttgactctttgtgtgttaaggcatcaactgcttatgtaaatgaccgctgctctagaattattcctgctc

SEQ ID NO: 2862 - DNA, 80 bp, synthetic construct
  misc_feature 1..80: note = Synthetic: >HKU10-cand-16560-16639
  source 1..80: mol_type = other DNA
gtgctagagtggattgtttcagtggttttaagtctaataacaatagtgcccagtacctcttttccactgtcaatgcatta

SEQ ID NO: 2863 - DNA, 80 bp, synthetic construct
  misc_feature 1..80: note = Synthetic: >HKU14-cand-3040-3119
  source 1..80: mol_type = other DNA
tatattgtacattttcggctcctattgatgaagattttggagagtcagaatatgaagaaggtgatgttgatgttgatgaa

SEQ ID NO: 2864 - DNA, 80 bp, synthetic construct
  misc_feature 1..80: note = Synthetic: >HKU14-cand-3120-3199
  source 1..80: mol_type = other DNA
actgattccattgttactagcacctcgcaggaggtttgtgcaggttcgggcatcccttgtggtacggactgcaatagtat

SEQ ID NO: 2865 - DNA, 80 bp, synthetic construct
  misc_feature 1..80: note = Synthetic: >HKU14-cand-3200-3279
  source 1..80: mol_type = other DNA
tgccaatggacaggaggaggcatcagaagtctttgaaatagctgaagttgaggattctattttggaagaacttcaagtca

SEQ ID NO: 2866 - DNA, 80 bp, synthetic construct
  misc_feature 1..80: note = Synthetic: >HKU14-cand-3280-3359
  source 1..80: mol_type = other DNA
gcatacaagcgcatgatgaagtggacgttgtgtctgcggattctgattccgtgcttgtgcatgattacatagatggtgtt

SEQ ID NO: 2867 - DNA, 80 bp, synthetic construct
  misc_feature 1..80: note = Synthetic: >HKU14-cand-3360-3439
  source 1..80: mol_type = other DNA
aattatgacactttctattgtgatactgtttttgatttttatgttgcacacaaggaacctgatttcgtaaaagttcttgg

SEQ ID NO: 2868 - DNA, 80 bp, synthetic construct
  misc_feature 1..80: note = Synthetic: >HKU14-cand-3440-3519
  source 1..80: mol_type = other DNA
tgtgtatgttcctaaagcaacgcgcaataattgttggttgcgttctgtcttggctgtttttcagaagttgccatgtactt

SEQ ID NO: 2869 - DNA, 80 bp, synthetic construct
  misc_feature 1..80: note = Synthetic: >HKU14-cand-3520-3599
  source 1..80: mol_type = other DNA
ttaaggataaaaatttgcagagtttgtggttgtcttataagcagcaatttgatcagttgtttgtagacactattatgcag

SEQ ID NO: 2870 - DNA, 80 bp, synthetic construct
  misc_feature 1..80: note = Synthetic: >HKU14-cand-3600-3679
  source 1..80: mol_type = other DNA
aaaatacctgcaaatatagttgttccacagggtggttatgtagctgattttgcttattggctacttactttgtgcgattg

SEQ ID NO: 2871 - DNA, 80 bp, synthetic construct
  misc_feature 1..80: note = Synthetic: >HKU14-cand-3680-3759
  source 1..80: mol_type = other DNA
gaatgcggcatctcattggagatgtcttaaatgtgatttggcactaaaccttcaaggtttggatgctatattcttttatg

SEQ ID NO: 2872 - DNA, 80 bp, synthetic construct
  misc_feature 1..80: note = Synthetic: >HKU14-cand-3760-3839
  source 1..80: mol_type = other DNA
gagacatagtgtcacatgtttgtaagtgtggcgagtctatggttcttcttaaagttgatgtgccgtttactgcacatttt

SEQ ID NO: 2873 - DNA, 80 bp, synthetic construct
  misc_feature 1..80: note = Synthetic: >HKU14-cand-3840-3919
  source 1..80: mol_type = other DNA
gctgtgaaggataagcagttttgttcttttacgacacaacgtcgtatttttaaagctgcttgcgttattgataaaaatga

SEQ ID NO: 2874 - DNA, 80 bp, synthetic construct
  misc_feature 1..80: note = Synthetic: >HKU14-cand-3920-3999
  source 1..80: mol_type = other DNA
ccgtcattctatggctgtcattgatggtaaacaaattgatgacaagcttgttactgatattaacagtgataagtttgatt

SEQ ID NO: 2875 - DNA, 80 bp, synthetic construct
  misc_feature 1..80: note = Synthetic: >HKU14-cand-4000-4079
  source 1..80: mol_type = other DNA
ttattattgggcatgagatggcatttagtatgtcatcctttgaaattgctcaattgtatggttgctgtataacacctaat

SEQ ID NO: 2876 - DNA, 80 bp, synthetic construct
  misc_feature 1..80: note = Synthetic: >HKU14-cand-4080-4159
  source 1..80: mol_type = other DNA
gtttgttttgttaaaggtgatgttataagaattgcccagcttgtgtatgctgatgtagttgttaatcccgctaatggcca

SEQ ID NO: 2877 - DNA, 80 bp, synthetic construct
  misc_feature 1..80: note = Synthetic: >HKU14-cand-4160-4239
  source 1..80: mol_type = other DNA
tatggctcatggtggtggtgtggcaaaagctatagctaatgcagctggtcaaagttttattaaggagactgctaatatgg

SEQ ID NO: 2878 - DNA, 80 bp, synthetic construct
  misc_feature 1..80: note = Synthetic: >HKU14-cand-4240-4319
  source 1..80: mol_type = other DNA
ttaagtctaaaggagtttgtgctaccggtgattgttatgtgtcatcaggaggcaaattatgtaaaactgtgcttaatgtt

SEQ ID NO: 2879 - DNA, 80 bp, synthetic construct
  misc_feature 1..80: note = Synthetic: >HKU25-cand-5140-5219
  source 1..80: mol_type = other DNA
atacagaacacagctaggatgcgtgtttcttgatggtgctgatatttcggacactatacctgatgttaaacagcatggtg

SEQ ID NO: 2880 - DNA, 80 bp, synthetic construct
  misc_feature 1..80: note = Synthetic: >HKU25-cand-5220-5299
  source 1..80: mol_type = other DNA
tcagcttattcttagcagataacttatctgcagatgagaaagcagtgcttaacgacttatatggcactcctgatgttaaa

SEQ ID NO: 2881 - DNA, 80 bp, synthetic construct
  misc_feature 1..80: note = Synthetic: >HKU25-cand-5300-5379
  source 1..80: mol_type = other DNA
ttcttatacaggtattattcccttaaggcaaaggtttgcaagtggaaaatgccagtatgcgacaaagtgcggtctctgaa

SEQ ID NO: 2882 - DNA, 80 bp, synthetic construct
  misc_feature 1..80: note = Synthetic: >HKU25-cand-5380-5459
  source 1..80: mol_type = other DNA
actcagtgattcaaattgctacatgaatgtagtaattatgatgattgactgtcttagagacatacgcttcacaatccctg

SEQ ID NO: 2883 - DNA, 80 bp, synthetic construct
  misc_feature 1..80: note = Synthetic: >HKU25-cand-5460-5539
  source 1..80: mol_type = other DNA
ctttacaacaggcatacattaaacataagggcggtgattcgacagatttcattgccctcattatggcttatggcaattgc

SEQ ID NO: 2884 - DNA, 80 bp, synthetic construct
  misc_feature 1..80: note = Synthetic: >HKU25-cand-5540-5619
  source 1..80: mol_type = other DNA
acatttggtgccccagatgatgcctctcggttacttcacaccgtgcttgcaaaagctgagttatgcgttaatgcacgcat

SEQ ID NO: 2885 - DNA, 80 bp, synthetic construct
  misc_feature 1..80: note = Synthetic: >HKU25-cand-5620-5699
  source 1..80: mol_type = other DNA
ggtgtggagagagtggtgcaacgtctgtggcacaaaagatgttaccctccaaggcctcaaggcttgttgttatgtgggct

SEQ ID NO: 2886 - DNA, 80 bp, synthetic construct
  misc_feature 1..80: note = Synthetic: >HKU25-cand-5700-5779
  source 1..80: mol_type = other DNA
tgcacactcttagtgaattgcatagccgcatggattatacatgccagtgtggtggtgagcgtcatagacaattaattgag

SEQ ID NO: 2887 - DNA, 80 bp, synthetic construct
  misc_feature 1..80: note = Synthetic: >HKU25-cand-5780-5859
  source 1..80: mol_type = other DNA
cacaacacaccctggctcctcttgtcaggcaaacctagagagcagctcgtttcaactgctactagtcctgattttgaggc

SEQ ID NO: 2888 - DNA, 80 bp, synthetic construct
  misc_feature 1..80: note = Synthetic: >HKU25-cand-5860-5939
  source 1..80: mol_type = other DNA
gtttaatgtctttctcggcgcagaaaatgctgttgggcattatgttcatgtgcgtgtgaaagatgcactactgtataagt

SEQ ID NO: 2889 - DNA, 80 bp, synthetic construct
  misc_feature 1..80: note = Synthetic: >HKU25-cand-5940-6019
  source 1..80: mol_type = other DNA
atgactcaggttccttgactaaagcctctgattggaaatgcaaggtcactgacactttatacccaggacaaaaatacact

SEQ ID NO: 2890 - DNA, 80 bp, synthetic construct
  misc_feature 1..80: note = Synthetic: >HKU25-cand-6020-6099
  source 1..80: mol_type = other DNA
agcgaatgcaatgtagtagtgtattctttggatggtaatctcaaggcagaagtcaaccctgacttatctgcattctatgt

SEQ ID NO: 2891 - DNA, 80 bp, synthetic construct
  misc_feature 1..80: note = Synthetic: >HKU25-cand-6100-6179
  source 1..80: mol_type = other DNA
aaaggatggtaaatacttcacacaagtgccacccgttgcttatactcctgcaactgttattgcaggtagtgtctatacta

SEQ ID NO: 2892 - DNA, 80 bp, synthetic construct
  misc_feature 1..80: note = Synthetic: >HKU25-cand-6180-6259
  source 1..80: mol_type = other DNA
atagttgcctagtttctgcagatgggcagataagtggtgatcctattagtctagcttttaataacatgcttggctacgat

SEQ ID NO: 2893 - DNA, 80 bp, synthetic construct
  misc_feature 1..80: note = Synthetic: >HKU25-cand-6260-6339
  source 1..80: mol_type = other DNA
cctagtaagccttgctctaagaaatttacatactctgtgttgccagatgaaaaaggtgacgttctacttgcagagtatag

SEQ ID NO: 2894 - DNA, 80 bp, synthetic construct
  misc_feature 1..80: note = Synthetic: >HKU25-cand-6340-6419
  source 1..80: mol_type = other DNA
tacttatgaccctatgtacaaaaatggagccatgctaaatggcaagcctgtactctgggttactaatggcatctttgatg

SEQ ID NO: 2895 - DNA, 80 bp, synthetic construct
  misc_feature 1..80: note = Synthetic: >HKU25-cand-26870-26949
  source 1..80: mol_type = other DNA
tacctgttaacatggcagtctcccatattaaggaatggcttaaagtgcatggttacatcatccacaatagccatctccca

SEQ ID NO: 2896 - DNA, 80 bp, synthetic construct
  misc_feature 1..80: note = Synthetic: >HKU25-cand-26950-27029
  source 1..80: mol_type = other DNA
ctacacctttctgtgtctaagctccatgacctggatgataacacaagatcatacatagattcatggccttatttcacaca

SEQ ID NO: 2897 - DNA, 80 bp, synthetic construct
  misc_feature 1..80: note = Synthetic: >HKU25-cand-27030-27109
  source 1..80: mol_type = other DNA
agataatacatccattgtagtgacaccttcagctttggagctagtcactatccgtggtaatccaaacaatcctaaacaga

SEQ ID NO: 2898 - DNA, 80 bp, synthetic construct
  misc_feature 1..80: note = Synthetic: >HKU25-cand-27110-27189
  source 1..80: mol_type = other DNA
ttgtacaatcgttgccaataccagctcgttggtaacgaactatggccttctcgatttcattgtttcgccctatagaactt

SEQ ID NO: 2899 - DNA, 80 bp, synthetic construct
  misc_feature 1..80: note = Synthetic: >HKU25-cand-27190-27269
  source 1..80: mol_type = other DNA
gtttctgcattcccatcagcaattgcagaatcagcctcgcgagcaatcgagcagcctcaagtcatcctatcatgcatttc

SEQ ID NO: 2900 - DNA, 80 bp, synthetic construct
  misc_feature 1..80: note = Synthetic: >HKU25-cand-27270-27349
  source 1..80: mol_type = other DNA
caccactggttacagtgcagctttagctgttaatgcatgcctcataccactcatactttgtcttaaccaagacacttgta

SEQ ID NO: 2901 - DNA, 80 bp, synthetic construct
  misc_feature 1..80: note = Synthetic: >HKU25-cand-27350-27429
  source 1..80: mol_type = other DNA
tgcgtagtattgctaagacactagttctctatggtcttatgttctacaattttatcctatcggctgttttagtcagtggg

SEQ ID NO: 2902 - DNA, 80 bp, synthetic construct
  misc_feature 1..80: note = Synthetic: >HKU25-cand-27430-27509
  source 1..80: mol_type = other DNA
actcacgtaccacttggtagctgcttgctaacctttgtggttgtactatcaatactttggtttatcgacagaattcgctt

SEQ ID NO: 2903 - DNA, 80 bp, synthetic construct
  misc_feature 1..80: note = Synthetic: >HKU25-cand-27510-27589
  source 1..80: mol_type = other DNA
ctgccttatcctaaggtcttacattccacttattgacatgagatctcatttcatccgtgtcaatacgtgtgcatctcagg

SEQ ID NO: 2904 - DNA, 80 bp, synthetic construct
  misc_feature 1..80: note = Synthetic: >HKU25-cand-27590-27669
  source 1..80: mol_type = other DNA
gtttagttgctatcaataacagcaaaccttactttatcaaaaactttgaacagcagtgtcgctgctctcgttgtttctac

SEQ ID NO: 2905 - DNA, 80 bp, synthetic construct
  misc_feature 1..80: note = Synthetic: >HKU25-cand-27670-27749
  source 1..80: mol_type = other DNA
gtgcattccgtgtcctacattgagtgcacctatattagtcgtttcagtaaattgcagttagtatccgtaactcaattttc

SEQ ID NO: 2906 - DNA, 80 bp, synthetic construct
  misc_feature 1..80: note = Synthetic: >HKU25-cand-27750-27829
  source 1..80: mol_type = other DNA
actgaacaatcacacatctactgtattcgtgccgtcaacgcgcgattcagtaccactccacataatcgcaccaagcgtgc

SEQ ID NO: 2907 - DNA, 80 bp, synthetic construct
  misc_feature 1..80: note = Synthetic: >HKU25-cand-27830-27909
  source 1..80: mol_type = other DNA
tcacagtttaagcacgcgaagcgcatctatggtcccatgtagtgactaatccatttagtccctccttggacatttggaaa

SEQ ID NO: 2908 - DNA, 80 bp, synthetic construct
  misc_feature 1..80: note = Synthetic: >HKU25-cand-27910-27989
  source 1..80: mol_type = other DNA
acgaactatgttaccctttgtccaagaacaaatagggtcattcatagtaaactttttcatcttcaccgtagcttgtgcta

SEQ ID NO: 2909 - DNA, 80 bp, synthetic construct
  misc_feature 1..80: note = Synthetic: >HKU25-cand-27990-28069
  source 1..80: mol_type = other DNA
ttacactactagtttgtatggcattccttacggccacgcgattatgtatgcagtgtgcaataggtgttaacaccctatta

SEQ ID NO: 2910 - DNA, 80 bp, synthetic construct
  misc_feature 1..80: note = Synthetic: >HKU25-cand-28070-28149
  source 1..80: mol_type = other DNA
gtacaacctgccatatacgtatataacacaggacgttccgcctatgttaagtttcaagagagtaaacctcctctaccccc

SEQ ID NO: 2911 - DNA, 80 bp, synthetic construct
  misc_feature 1..80: note = Synthetic: >HKU31-cand-280-359
  source 1..80: mol_type = other DNA
cacgtatagagcagcgctcaacaatgaaaaacgtcatgaccatgttgccctaactgtgccatgctgtggtacaggggcta

SEQ ID NO: 2912 - DNA, 80 bp, synthetic construct
  misc_feature 1..80: note = Synthetic: >HKU31-cand-360-439
  source 1..80: mol_type = other DNA
aggttacagctctttcaccttggttcatggatggcgaaatagcctatgaaaccgtgaaggaaatgctcttaaaaggagaa

SEQ ID NO: 2913 - DNA, 80 bp, synthetic construct
  misc_feature 1..80: note = Synthetic: >HKU31-cand-440-519
  source 1..80: mol_type = other DNA
aaactcctgttcgctccaagtaatttgagtggatatattaagtttctcccaggcccacgtgtttacctggttgagaggct

SEQ ID NO: 2914 - DNA, 80 bp, synthetic construct
  misc_feature 1..80: note = Synthetic: >HKU31-cand-520-599
  source 1..80: mol_type = other DNA
cactggaggtacttactccgaaccatttattgttaaccaattggctttttccgatgagcaggatggtccaatgatgggta

SEQ ID NO: 2915 - DNA, 80 bp, synthetic construct
  misc_feature 1..80: note = Synthetic: >HKU31-cand-600-679
  source 1..80: mol_type = other DNA
ctactctgcagggcaaacctattggatttttctttccttttgacgaagagcttgttacaggtacttataccttcaagcta

SEQ ID NO: 2916 - DNA, 80 bp, synthetic construct
  misc_feature 1..80: note = Synthetic: >HKU31-cand-680-759
  source 1..80: mol_type = other DNA
cgtaagaatggacttggtggacaattgttccgcgaagttcctaggtttgaaaaccatgattttcatggtattgaagattt

SEQ ID NO: 2917 - DNA, 80 bp, synthetic construct
  misc_feature 1..80: note = Synthetic: >HKU31-cand-760-839
  source 1..80: mol_type = other DNA
ttcacagattgttgaagacttacaggaggatcctaaaggaaagttttctaacaagctgtataagaaattgtgtggtggtg

SEQ ID NO: 2918 - DNA, 80 bp, synthetic construct
  misc_feature 1..80: note = Synthetic: >HKU31-cand-840-919
  source 1..80: mol_type = other DNA
atgtcatacctgtggatcaatatatgtgtggttttgatgggcagcctgtcaaaccatatttggatctagccaccaaagaa

SEQ ID NO: 2919 - DNA, 80 bp, synthetic construct
  misc_feature 1..80: note = Synthetic: >HKU31-cand-920-999
  source 1..80: mol_type = other DNA
ggtttaacaaagttggcagacgttgaagccgatgttcgttcacgtgtggataaacagggttttctcatttttaaaggaaa

SEQ ID NO: 2920 - DNA, 80 bp, synthetic construct
  misc_feature 1..80: note = Synthetic: >HKU31-cand-1000-1079
  source 1..80: mol_type = other DNA
aacatatagagttgtttggtttactgagcgcaaggacgttgattatggtaaacaaacactctttacagtgaattgtgtga

SEQ ID NO: 2921 - DNA, 80 bp, synthetic construct
  misc_feature 1..80: note = Synthetic: >HKU31-cand-1080-1159
  source 1..80: mol_type = other DNA
tgcaacgtaatggtgtacaagatgtaccagcacaccccttcactttaggaggacgagtggatcaacttaaaccacatgta

SEQ ID NO: 2922 - DNA, 80 bp, synthetic construct
  misc_feature 1..80: note = Synthetic: >HKU31-cand-1160-1239
  source 1..80: mol_type = other DNA
gctaaaggcaacctagtaggccttacattgaaagcaaaaatcttgtatacaatgtatggtgaagatgctgttgaagaacc

SEQ ID NO: 2923 - DNA, 80 bp, synthetic construct
  misc_feature 1..80: note = Synthetic: >HKU31-cand-1240-1319
  source 1..80: mol_type = other DNA
ttcttacatttaccattctgcatttgtggattgtgctaaatgtaatgaaggtaagtggtgtacaggtaatgctgtggctg

SEQ ID NO: 2924 - DNA, 80 bp, synthetic construct
  misc_feature 1..80: note = Synthetic: >HKU31-cand-1320-1399
  source 1..80: mol_type = other DNA
ggtttgcatgtgaatgtggagctccgtacactgctaaagaagtgctcctacaatcttcaggattagtaaaacctaatgcc

SEQ ID NO: 2925 - DNA, 80 bp, synthetic construct
  misc_feature 1..80: note = Synthetic: >HKU31-cand-1400-1479
  source 1..80: mol_type = other DNA
ttgttttgtgcaacatgtccctttgcagaaggagatcgttgttcttcagaatgcaaacacactatacctcaagtcgttag

SEQ ID NO: 2926 - DNA, 80 bp, synthetic construct
  misc_feature 1..80: note = Synthetic: >HKU31-cand-1480-1559
  source 1..80: mol_type = other DNA
taatttgagtgagaagtgtgttgttttcccatcaggtaagagctttgtgctagcatttgggggtgcattgtatacatata

SEQ ID NO: 2927 - DNA, 80 bp, synthetic construct
  misc_feature 1..80: note = Synthetic: >HKU5-cand-17840-17919
  source 1..80: mol_type = other DNA
gtctacaacaacaagcttgtagcaaagaagccggcctcaggacagtgtttcaaaattctgtataagggcagtgttacaca

SEQ ID NO: 2928 - DNA, 80 bp, synthetic construct
  misc_feature 1..80: note = Synthetic: >HKU5-cand-17920-17999
  source 1..80: mol_type = other DNA
tgatgctagctctgccattaacagacctcagcttaactttgttaagtcttttattgctgctaaccccaattggagtaaag

SEQ ID NO: 2929 - DNA, 80 bp, synthetic construct
  misc_feature 1..80: note = Synthetic: >HKU5-cand-18000-18079
  source 1..80: mol_type = other DNA
cagtttttatttctccttacaatagtcaaaatgcagtcgcccgatcagttttgggcttgaccacgcagactgttgattca

SEQ ID NO: 2930 - DNA, 80 bp, synthetic construct
  misc_feature 1..80: note = Synthetic: >HKU5-cand-18160-18239
  source 1..80: mol_type = other DNA
tgttgcagtgacgcgtgcgcagaagggtattctttgcgtcatgacttctcaagcactcttcgattcgctcgagtttgctg

SEQ ID NO: 2931 - DNA, 80 bp, synthetic construct
  misc_feature 1..80: note = Synthetic: >HKU5-cand-18240-18319
  source 1..80: mol_type = other DNA
aggtttctcttaataactacaagctacagtcacagatagtaacgggcttgtataaagattgctccagagagtcatctgga

SEQ ID NO: 2932 - DNA, 80 bp, synthetic construct
  misc_feature 1..80: note = Synthetic: >HKU5-cand-18400-18479
  source 1..80: mol_type = other DNA
tgtacccgcaaacgttccttattcaagagtcatttcaagaatgggtttcaagctagatgcatcgatacccaactacccaa

SEQ ID NO: 2933 - DNA, 80 bp, synthetic construct
  misc_feature 1..80: note = Synthetic: >HKU5-cand-18480-18559
  source 1..80: mol_type = other DNA
aactcttcattacacgtgatgaggctataaggcaagtcagaagctggataggcttcgacgtcgaaggtgcccatgcatcg

SEQ ID NO: 2934 - DNA, 80 bp, synthetic construct
  misc_feature 1..80: note = Synthetic: >HKU5-cand-18560-18639
  source 1..80: mol_type = other DNA
cgtaatgcatgtggtactaacgtgccgttacaacttggcttttctactggtgtgaactttgttgttcaacccgtgggtgt

SEQ ID NO: 2935 - DNA, 80 bp, synthetic construct
  misc_feature 1..80: note = Synthetic: >HKU5-cand-18640-18719
  source 1..80: mol_type = other DNA
cgtcgatactgagtgggggagcatgctgacgagcatcgctgcacgccctcctcccggtgaacaatttaagcatttggtgc

SEQ ID NO: 2936 - DNA, 80 bp, synthetic construct
  misc_feature 1..80: note = Synthetic: >HKU5-cand-18720-18799
  source 1..80: mol_type = other DNA
ctcttatgaataaaggagccgcctggccaattgtaagaagacgtattgttcagatgctatcagacactttggataaattg

SEQ ID NO: 2937 - DNA, 80 bp, synthetic construct
  misc_feature 1..80: note = Synthetic: >HKU5-cand-18800-18879
  source 1..80: mol_type = other DNA
tctgactactgtacgtttgtttgttgggctcatggctttgagttaacatctgcatcctatttttgcaagataggtaagga

SEQ ID NO: 2938 - DNA, 80 bp, synthetic construct
  misc_feature 1..80: note = Synthetic: >HKU5-cand-18890-18969
  source 1..80: mol_type = other DNA
tgtatgtgtaatcgtcgcgcttcgacgtactcttcaccgttacactcttatgcctgctggagtcattctagcggatatga

SEQ ID NO: 2939 - DNA, 80 bp, synthetic construct
  misc_feature 1..80: note = Synthetic: >HKU5-cand-18970-19049
  source 1..80: mol_type = other DNA
ctatgtctataacccattctttgtagatgtacaacaatggggatatataggcaatttagcgactaatcacgaccgctact

SEQ ID NO: 2940 - DNA, 80 bp, synthetic construct
  misc_feature 1..80: note = Synthetic: >HKU5-cand-21610-21689
  source 1..80: mol_type = other DNA
gagtacttactccctctttgatctctcacgctttcctcttaaattaaaaggaacaccagttcttcaattaaaagagagcc

SEQ ID NO: 2941 - DNA, 80 bp, synthetic construct
  misc_feature 1..80: note = Synthetic: >HKU5-cand-21690-21769
  source 1..80: mol_type = other DNA
aaattaacgaacttgtgatttctctcttgtcgcagggtaaacttattattcgcgacaatgatacgctcagtgttagtact

SEQ ID NO: 2942 - DNA, 80 bp, synthetic construct
  misc_feature 1..80: note = Synthetic: >HKU5-cand-21850-21929
  source 1..80: mol_type = other DNA
tacggtctcaagttagaccagaatattttgacattgtccataacacatggccaatgcctattgatacgagtaaggctgaa

SEQ ID NO: 2943 - DNA, 80 bp, synthetic construct
  misc_feature 1..80: note = Synthetic: >HKU5-cand-21930-22009
  source 1..80: mol_type = other DNA
ggtgtcatttaccctaatggcaagtcatactctaatatttccctaacttatactggactgtacccaaaggctaaggacct

SEQ ID NO: 2944 - DNA, 80 bp, synthetic construct
  misc_feature 1..80: note = Synthetic: >HKU5-cand-22010-22089
  source 1..80: mol_type = other DNA
tggcaaacagtatttgttttctgatggacacagtgctcctaatcagcttaatgatctatttgtcagtaattattctgcac

SEQ ID NO: 2945 - DNA, 80 bp, synthetic construct
  misc_feature 1..80: note = Synthetic: >HKU5-cand-22090-22169
  source 1..80: mol_type = other DNA
aggtagagtcttttgatgatggtttcgttgttcgtattggagcagcttccaataagaccggaaccactgtcatctctcaa

SEQ ID NO: 2946 - DNA, 80 bp, synthetic construct
  misc_feature 1..80: note = Synthetic: >HKU5-cand-22170-22249
  source 1..80: mol_type = other DNA
acaacttttaaacccattaagaaaatataccctggctttatgctagggcatgctgtgggtaattacacacctaccaacat

SEQ ID NO: 2947 - DNA, 80 bp, synthetic construct
  misc_feature 1..80: note = Synthetic: >HKU5-cand-22250-22329
  source 1..80: mol_type = other DNA
cacaggtcggtatcttaaccacacccttgtaatcctaccggatggctgtggtactctagttcatgcattctattgcatcc

SEQ ID NO: 2948 - DNA, 80 bp, synthetic construct
  misc_feature 1..80: note = Synthetic: >HKU5-cand-22330-22409
  source 1..80: mol_type = other DNA
ttcaacctcgcacacaggctaactgtcctggtgcttcttcattcacatctgtcacattgtgggacactcccgcaacagat

SEQ ID NO: 2949 - DNA, 80 bp, synthetic construct
  misc_feature 1..80: note = Synthetic: >HKU5-cand-22410-22489
  source 1..80: mol_type = other DNA
tgcgcaccaagtggtgtttacaatcctttggcaaatttgaatgctttcaaattgtattttgacctgatcaattgcacgtt

SEQ ID NO: 2950 - DNA, 80 bp, synthetic construct
  misc_feature 1..80: note = Synthetic: >HKU5-cand-22490-22569
  source 1..80: mol_type = other DNA
cagatacaattatactataacagaggatgaaaatgctgagtggtttggcattacccaagacacacaaggcgttcacctct

SEQ ID NO: 2951 - DNA, 80 bp, synthetic construct
  misc_feature 1..80: note = Synthetic: >HKU5-cand-22570-22649
  source 1..80: mol_type = other DNA
attcctctcgaaaagagaacgtgttcagaaataacatgttccactttgctactttacctgtgtatcagaaaatcctctat

SEQ ID NO: 2952 - DNA, 80 bp, synthetic construct
  misc_feature 1..80: note = Synthetic: >HKU5-cand-22650-22729
  source 1..80: mol_type = other DNA
tacacagtcattcctcgcagcatccgaagtcctttcaatgacagaaaagcttgggctgccttctacatttataaactaca

SEQ ID NO: 2953 - DNA, 80 bp, synthetic construct
  misc_feature 1..80: note = Synthetic: >HKU5-cand-22730-22809
  source 1..80: mol_type = other DNA
tccactcacatatttgctaaattttgatgtggagggctatataaccaaagctgtagactgtggctatgatgattttgcac

SEQ ID NO: 2954 - DNA, 80 bp, synthetic construct
  misc_feature 1..80: note = Synthetic: >HKU5-cand-22810-22889
  source 1..80: mol_type = other DNA
agctacaatgttcatatgaaaacttcgatgttgaaacaggtgtttattccgtttcatctttcgaagcttctcctagaggt

SEQ ID NO: 2955 - DNA, 80 bp, synthetic construct
  misc_feature 1..80: note = Synthetic: >HKU5-cand-26740-26819
  source 1..80: mol_type = other DNA
attcagtgatctcacaccactaacattcattctagctgacatgctgcttgaatttaatggcatctttactttgggacaga

SEQ ID NO: 2956 - DNA, 80 bp, synthetic construct
  misc_feature 1..80: note = Synthetic: >HKU5-cand-26820-26899
  source 1..80: mol_type = other DNA
ctttggtcattggtgcacgagagtaccattggctaccacaagagctcaaaactaatgtgggcaaagcgatccctcaggct

SEQ ID NO: 2957 - DNA, 80 bp, synthetic construct
  misc_feature 1..80: note = Synthetic: >HKU5-cand-26900-26979
  source 1..80: mol_type = other DNA
aaagaatggcttgtagaccatggctacaacgtgtaccatacaggccttcctactcatatgtcgcttgcaaagctgcattc

SEQ ID NO: 2958 - DNA, 80 bp, synthetic construct
  misc_feature 1..80: note = Synthetic: >HKU5-cand-27060-27139
  source 1..80: mol_type = other DNA
tttgcttacaggtaatagctattgatggtgagaaagttgatggtcgatcgaaacctctgtttcagtatcccatccataat

SEQ ID NO: 2959 - DNA, 80 bp, synthetic construct
  misc_feature 1..80: note = Synthetic: >HKU5-cand-27140-27219
  source 1..80: mol_type = other DNA
cactacagacactatcgtgcctgctttcctggccgctagaacgaacttatggctttttcgccatccctgttccagccagt

SEQ ID NO: 2960 - DNA, 80 bp, synthetic construct
  misc_feature 1..80: note = Synthetic: >HKU5-cand-27220-27299
  source 1..80: mol_type = other DNA
tgtaatccaaaaggagacacacggcggtgaacctagcagtcttaatgatgtcatcacatgcattcctcttacaggctatg

SEQ ID NO: 2961 - DNA, 80 bp, synthetic construct
  misc_feature 1..80: note = Synthetic: >HKU5-cand-27300-27379
  source 1..80: mol_type = other DNA
ttgccgctcttgtggttaatgcatgtttctacccgctactactctgcttgccttatagcagttgtagggctagtatatgt

SEQ ID NO: 2962 - DNA, 80 bp, synthetic construct
  misc_feature 1..80: note = Synthetic: >HKU5-cand-27380-27459
  source 1..80: mol_type = other DNA
aagaccttggtactctatgtgctgatgctttacaatttcattttgtcgtgtatccttgttcaggacacacaacaacctgt

SEQ ID NO: 2963 - DNA, 80 bp, synthetic construct
  misc_feature 1..80: note = Synthetic: >HKU5-cand-27460-27539
  source 1..80: mol_type = other DNA
tggcatatgccttatggtatattgcataatattaatggcgatctggactatcgacagagttcgattttgtctattgatca

SEQ ID NO: 2964 - DNA, 80 bp, synthetic construct
  misc_feature 1..80: note = Synthetic: >HKU5-cand-27540-27619
  source 1..80: mol_type = other DNA
gatcattacgtccacttattgacatgaggtcaaatttcatccgtgtcaatacagttgcaggcggggttgttatacctgtt

SEQ ID NO: 2965 - DNA, 80 bp, synthetic construct
  misc_feature 1..80: note = Synthetic: >HKU5-cand-27620-27699
  source 1..80: mol_type = other DNA
aactatagcaaaccctggtttgtcaaaaattttaaccagcgttgtcgctgtacaaattgtttctttgcgcactcagcaac

SEQ ID NO: 2966 - DNA, 80 bp, synthetic construct
  misc_feature 1..80: note = Synthetic: >HKU5-cand-27700-27779
  source 1..80: mol_type = other DNA
ctatctcgagtgcacattcataagccgtttcgctaaaaccactcttgtttccattagtgactttcagcttaacggttctc

SEQ ID NO: 2967 - DNA, 80 bp, synthetic construct
  misc_feature 1..80: note = Synthetic: >HKU5-cand-27860-27939
  source 1..80: mol_type = other DNA
gctcgcttcgcgctgctatgggtcccatgttgaggctaatccatttagtctcactttggacatttggaaaacgaactatg

SEQ ID NO: 2968 - DNA, 80 bp, synthetic construct
  misc_feature 1..80: note = Synthetic: >HKU5-cand-27940-28019
  source 1..80: mol_type = other DNA
ttaccttttgtccaagaacaaataggtgcattcatagtaaattttttcatattatccgtagtttgtgctgtaacactcgt

SEQ ID NO: 2969 - DNA, 80 bp, synthetic construct
  misc_feature 1..80: note = Synthetic: >HKU8-cand-21840-21919
  source 1..80: mol_type = other DNA
cataatgatattgttggtgttacttggtctggtgatagggtggttctttatactcgtaatggtgttacaacttattatgt

SEQ ID NO: 2970 - DNA, 80 bp, synthetic construct
  misc_feature 1..80: note = Synthetic: >HKU8-cand-21920-21999
  source 1..80: mol_type = other DNA
tcctggtattggtgaatgggatgttgtttctattaggtgtaattataaagaaacttgtgctcaccaagttattacaaagc

SEQ ID NO: 2971 - DNA, 80 bp, synthetic construct
  misc_feature 1..80: note = Synthetic: >HKU8-cand-22000-22079
  source 1..80: mol_type = other DNA
ctatcactgttattgttaccactactgctgatggttttatttctaattattcagtttgtgataattgtaatggctttcct

SEQ ID NO: 2972 - DNA, 80 bp, synthetic construct
  misc_feature 1..80: note = Synthetic: >HKU8-cand-22080-22159
  source 1..80: mol_type = other DNA
aaacatgtttttgctgtaactgaaggtggtaccataccacctaattttcagtttgacaattggttttatttaaccaatag

SEQ ID NO: 2973 - DNA, 80 bp, synthetic construct
  misc_feature 1..80: note = Synthetic: >HKU8-cand-22160-22239
  source 1..80: mol_type = other DNA
ttctacacctgtttctggtatgtttacttcagtgcagccttttaatttgtcttgtgtttggcctattcctgtattgatta

SEQ ID NO: 2974 - DNA, 80 bp, synthetic construct
  misc_feature 1..80: note = Synthetic: >HKU8-cand-22240-22319
  source 1..80: mol_type = other DNA
gtaatacactacctgtgtattttaatatgtcaatgaatgaaaatgcgaattgtaatggctatagcaactttgctgatggt

SEQ ID NO: 2975 - DNA, 80 bp, synthetic construct
  misc_feature 1..80: note = Synthetic: >HKU8-cand-22320-22399
  source 1..80: mol_type = other DNA
gttgttgatgccttgcggttttcacttaattttactgatgaacgagcttttgcacgcaagggtgttatttctcttgttac

SEQ ID NO: 2976 - DNA, 80 bp, synthetic construct
  misc_feature 1..80: note = Synthetic: >HKU8-cand-22400-22479
  source 1..80: mol_type = other DNA
tggtggtaatgtatataattttagttgtactaatactagtacacctgttgttggtagtaattctgtaataccttttggtg

SEQ ID NO: 2977 - DNA, 80 bp, synthetic construct
  misc_feature 1..80: note = Synthetic: >HKU8-cand-22480-22559
  source 1..80: mol_type = other DNA
atgttgatcaaacatattattgttttattactttttatactaacaggactgcaggcgaaagtactactctatttgttggt

SEQ ID NO: 2978 - DNA, 80 bp, synthetic construct
  misc_feature 1..80: note = Synthetic: >HKU8-cand-22560-22639
  source 1..80: mol_type = other DNA
atgttgcctcctctggttagagagtttgtaattatgcgtaatggtgatttttatctgaatggttttaggattttttctgt

SEQ ID NO: 2979 - DNA, 80 bp, synthetic construct
  misc_feature 1..80: note = Synthetic: >HKU8-cand-22640-22719
  source 1..80: mol_type = other DNA
tgaacatgttgaaagtgttatgtttaatatttctacaaatgatggcagagatttttggactgttgcatttgctaataatg

SEQ ID NO: 2980 - DNA, 80 bp, synthetic construct
  misc_feature 1..80: note = Synthetic: >HKU8-cand-22720-22799
  source 1..80: mol_type = other DNA
ctgaggtgttggctgagattaatgccactagcattcaaaatttgctttattgtaataaccctgtgaacagcatcaagtgt

SEQ ID NO: 2981 - DNA, 80 bp, synthetic construct
  misc_feature 1..80: note = Synthetic: >HKU8-cand-22800-22879
  source 1..80: mol_type = other DNA
caacagttgcgctttaaccttgataatggcttttattcacatacttctgacagtgctgataacttgcctagaactattgt

SEQ ID NO: 2982 - DNA, 80 bp, synthetic construct
  misc_feature 1..80: note = Synthetic: >HKU8-cand-22880-22959
  source 1..80: mol_type = other DNA
acgtttgcctaagtatgtgacacattcttttattaatgtctctgtaaaatggaagagcagtgtcttatgatgttgttaat

SEQ ID NO: 2983 - DNA, 80 bp, synthetic construct
  misc_feature 1..80: note = Synthetic: >HKU8-cand-22960-23039
  source 1..80: mol_type = other DNA
tttaataatattgggcttactaattatcttgttgattttgcagatcatgggaatgccataggaaaagataacagaacgta

SEQ ID NO: 2984 - DNA, 80 bp, synthetic construct
  misc_feature 1..80: note = Synthetic: >HKU8-cand-23040-23119
  source 1..80: mol_type = other DNA
ctgtttgtgttgacaccacaacgtttactactaatctgactcttattgtagttgctttttcttatttcagtactgctgtt

SEQ ID NO: 2985 - DNA, 80 bp, synthetic construct
  misc_feature 1..80: note = Synthetic: >HKU8-cand-26960-27039
  source 1..80: mol_type = other DNA
aaatagtcgcgattcctgtaatgacaccgcctactggcatcacgttgacagttcttagtggaaagctccttgtggagggc

SEQ ID NO: 2986 - DNA, 80 bp, synthetic construct
  misc_feature 1..80: note = Synthetic: >HKU8-cand-27040-27119
  source 1..80: mol_type = other DNA
ataccggttgctaatggcgtctcggtaactcagttacctgagtacgtcactgtcgccaaggccactaccactattatcta

SEQ ID NO: 2987 - DNA, 80 bp, synthetic construct
  misc_feature 1..80: note = Synthetic: >HKU8-cand-27120-27199
  source 1..80: mol_type = other DNA
tcaacgtgtcggtaaatcacttaatgcggccagccaaacaggctgggctttttatgtgagggccaagaatggcgactatt

SEQ ID NO: 2988 - DNA, 80 bp, synthetic construct
  misc_feature 1..80: note = Synthetic: >HKU8-cand-27200-27279
  source 1..80: mol_type = other DNA
ctgctgtgtcgaatccaagtgattcgtatactgaaaaagaaagattgctacatttagtataaactaaacaagtgttgttg

SEQ ID NO: 2989 - DNA, 80 bp, synthetic construct
  misc_feature 1..80: note = Synthetic: >HKU8-cand-27280-27359
  source 1..80: mol_type = other DNA
tacaactccggttgttaacgcactgtaattatggcttctgtaagtttttctgataccgagtcccgtggtcgttctggtag

SEQ ID NO: 2990 - DNA, 80 bp, synthetic construct
  misc_feature 1..80: note = Synthetic: >HKU8-cand-27360-27439
  source 1..80: mol_type = other DNA
agtaccactatccctttatgctccattgcgtactaccgatggcacgcttttcttccgggctatgcctggtaatggtgtac

SEQ ID NO: 2991 - DNA, 80 bp, synthetic construct
  misc_feature 1..80: note = Synthetic: >HKU8-cand-27440-27519
  source 1..80: mol_type = other DNA
caaagggtatgggtaaaaaagaccaacaagtcggatactggaatgaacaggtccgctggcgcatgaaaaagggtcagaga

SEQ ID NO: 2992 - DNA, 80 bp, synthetic construct
  misc_feature 1..80: note = Synthetic: >HKU8-cand-27520-27599
  source 1..80: mol_type = other DNA
aagaatctgccttctaattggcatttctattatcacggaactggacctcatgcagatgctaaattccgagagaagattga

SEQ ID NO: 2993 - DNA, 80 bp, synthetic construct
  misc_feature 1..80: note = Synthetic: >HKU8-cand-27600-27679
  source 1..80: mol_type = other DNA
tggtgttttctgggttgctaagcaaggttctaaggttgcgcctactgacttgcctacacgcaagcgcaaccagcctacta

SEQ ID NO: 2994 - DNA, 80 bp, synthetic construct
  misc_feature 1..80: note = Synthetic: >HKU8-cand-27680-27759
  source 1..80: mol_type = other DNA
ttgatccccagtttgactttgatcttccaaagaacattgaaattgtgactgccccaagtcagcctaattcacgctctaac

SEQ ID NO: 2995 - DNA, 80 bp, synthetic construct
  misc_feature 1..80: note = Synthetic: >HKU8-cand-27760-27839
  source 1..80: mol_type = other DNA
tcacgtagtcagagcagtggtggcagcaagtctcgtgctaattctcaaagcagggataattcagaccagcaaaagacgcc

SEQ ID NO: 2996 - DNA, 80 bp, synthetic construct
  misc_feature 1..80: note = Synthetic: >HKU8-cand-27850-27929
  source 1..80: mol_type = other DNA
actaataactcaagaagtaattcacaggaacgttcccagaaatccaagaagggcaagggcggtagtaatcaagatgacct

SEQ ID NO: 2997 - DNA, 80 bp, synthetic construct
  misc_feature 1..80: note = Synthetic: >HKU8-cand-27930-28009
  source 1..80: mol_type = other DNA
tgttgctgctgttcgtcaagctcttatgggcctcggttttcaaccgcagggaaattctggaaagaatggtggtaagaaat

SEQ ID NO: 2998 - DNA, 80 bp, synthetic construct
  misc_feature 1..80: note = Synthetic: >HKU8-cand-28010-28089
  source 1..80: mol_type = other DNA
cagctccaagcagtggaaagtcaactcccaaggactcgcgctcaaaatcgccagcgagacctcagtcgaccaagaaacag

SEQ ID NO: 2999 - DNA, 80 bp, synthetic construct
  misc_feature 1..80: note = Synthetic: >HKU8-cand-28090-28169
  source 1..80: mol_type = other DNA
cttgacaaacctgaatggaaacgtgtccccaacaagtctgaaagcgtcactgcctgtttcggtccgcgtgatgttgcccg

SEQ ID NO: 3000 - DNA, 80 bp, synthetic construct
  misc_feature 1..80: note = Synthetic: >HKU8-cand-28170-28249
  source 1..80: mol_type = other DNA
aaatttcggaaccaatggacttgttgcagagggagtagaatcccctcattttcctcagattgctgaattgattccaactc

SEQ ID NO: 3001 - DNA, 80 bp, synthetic construct
  misc_feature 1..80: note = Synthetic: >HKU9-cand-4010-4089
  source 1..80: mol_type = other DNA
cagcatggtaaggaacagggtttgcttacacctgttgttatagattatccagcatttaataaggttctaaagcgctatgc

SEQ ID NO: 3002 - DNA, 80 bp, synthetic construct
  misc_feature 1..80: note = Synthetic: >HKU9-cand-4090-4169
  source 1..80: mol_type = other DNA
acctaaagagggtttttacacctgtgatggtcaagatttttatggttacagtcgtgatacacctattcaggatgttagca

SEQ ID NO: 3003 - DNA, 80 bp, synthetic construct
  misc_feature 1..80: note = Synthetic: >HKU9-cand-4170-4249
  source 1..80: mol_type = other DNA
aagctttaaatgctttgggtaggccattgcttatgataccttttggttttatagtaaatggccaatccttagctgtttct

SEQ ID NO: 3004 - DNA, 80 bp, synthetic construct
  misc_feature 1..80: note = Synthetic: >HKU9-cand-4250-4329
  source 1..80: mol_type = other DNA
gccgtcagtatgcgtacacttaccgttccacatacggtagttgtaccttcagaatcatgtgttccattatatagggccta

SEQ ID NO: 3005 - DNA, 80 bp, synthetic construct
  misc_feature 1..80: note = Synthetic: >HKU9-cand-4330-4409
  source 1..80: mol_type = other DNA
ttttaatgggtcttttagtggtgacactactgctgttcaggactttgtcgttgatatattagtcaatggcgcacgcgatt

SEQ ID NO: 3006 - DNA, 80 bp, synthetic construct
  misc_feature 1..80: note = Synthetic: >HKU9-cand-4410-4489
  source 1..80: mol_type = other DNA
gggatgttatacagacaacttgtacagtagatcgtaaagtttacaaaacagtttgtaagcgtggtgatacttatatgtgt

SEQ ID NO: 3007 - DNA, 80 bp, synthetic construct
  misc_feature 1..80: note = Synthetic: >HKU9-cand-4490-4569
  source 1..80: mol_type = other DNA
tatgatgacacaaatttgtatgccataacaggtaatgtggttctaaagtttgccacagtggctaaggcgcgtgcttactt

SEQ ID NO: 3008 - DNA, 80 bp, synthetic construct
  misc_feature 1..80: note = Synthetic: >HKU9-cand-4570-4649
  source 1..80: mol_type = other DNA
ggaaactaagccatgcgaaccagagaccttaattaaggtcttaactacagtggacggtattaattataatactgttttag

SEQ ID NO: 3009 - DNA, 80 bp, synthetic construct
  misc_feature 1..80: note = Synthetic: >HKU9-cand-4650-4729
  source 1..80: mol_type = other DNA
tgtcgcgtgaacagagatataaagcacaaattggtaaagtgttttgtgacggtagagattagtcagatagaaatcccatg

SEQ ID NO: 3010 - DNA, 80 bp, synthetic construct
  misc_feature 1..80: note = Synthetic: >HKU9-cand-4730-4809
  source 1..80: mol_type = other DNA
actacagatgaaggtgtacatttgtttaagcaggacaatttttctatggaagagttgcaatctatgcgtgaatattatgg

SEQ ID NO: 3011 - DNA, 80 bp, synthetic construct
  misc_feature 1..80: note = Synthetic: >HKU9-cand-4810-4889
  source 1..80: mol_type = other DNA
tgttgatgaccctaatattatagctcgtgccatgagtattaggaagactgtacagacatggccatatacggttattgatg

SEQ ID NO: 3012 - DNA, 80 bp, synthetic construct
  misc_feature 1..80: note = Synthetic: >HKU9-cand-4890-4969
  source 1..80: mol_type = other DNA
gtcgagttttattagcacaaagggattcaaattgctatctcaatgtggctatttctttactacaagatgtggatgtcacc

SEQ ID NO: 3013 - DNA, 80 bp, synthetic construct
  misc_feature 1..80: note = Synthetic: >HKU9-cand-4970-5049
  source 1..80: mol_type = other DNA
tttactacaccgtgggttgctcgtgcctatgatgcacttaagggtggcaatccgctgcctatggcagaggtacttatagc

SEQ ID NO: 3014 - DNA, 80 bp, synthetic construct
  misc_feature 1..80: note = Synthetic: >HKU9-cand-5050-5129
  source 1..80: mol_type = other DNA
acttagtaaggctacaccaggtgagtgtgatgatgctcatatggttttatcaactgtgttaaaccatggtactgttgagg

SEQ ID NO: 3015 - DNA, 80 bp, synthetic construct
  misc_feature 1..80: note = Synthetic: >HKU9-cand-5130-5209
  source 1..80: mol_type = other DNA
cacgccgcgttatgcagactgtgtgtgaacattgtggtgttagccaattggtgtttactggcactgatgcttgtacgttt

SEQ ID NO: 3016 - DNA, 80 bp, synthetic construct
  misc_feature 1..80: note = Synthetic: >HKU9-cand-5210-5289
  source 1..80: mol_type = other DNA
tatggctcggtcgtgttggatgatttgtatgaacctgttagtgtggtgtgtccatgtggtcggcctgctatacggtatgt

SEQ ID NO: 3017 - DNA, 80 bp, synthetic construct
  misc_feature 1..80: note = Synthetic: >HKU9-cand-9120-9199
  source 1..80: mol_type = other DNA
tagttctgtgcttagagggtccttatcctatgttacccagtatatatgctatggcatttttatatgcaacttgctacttt

SEQ ID NO: 3018 - DNA, 80 bp, synthetic construct
  misc_feature 1..80: note = Synthetic: >HKU9-cand-9190-9269
  source 1..80: mol_type = other DNA
ttgctactttggtagtgatattgcatgtatgatgcatgtttcatttttaataatgtttgctggcgtggtacccttatggg

SEQ ID NO: 3019 - DNA, 80 bp, synthetic construct
  misc_feature 1..80: note = Synthetic: >HKU9-cand-9270-9349
  source 1..80: mol_type = other DNA
ttactgtattatacatagttgtggtattgagtaggcatatattgtggtttaccagtttgtgcacgaagcgtactgtgcaa

SEQ ID NO: 3020 - DNA, 80 bp, synthetic construct
  misc_feature 1..80: note = Synthetic: >HKU9-cand-9350-9429
  source 1..80: mol_type = other DNA
gtaggtgaccttgcatttcactcatttcaagacgctgctttgcaaacttttatgctggacaaggaggtgtttttacggct

SEQ ID NO: 3021 - DNA, 80 bp, synthetic construct
  misc_feature 1..80: note = Synthetic: >HKU9-cand-9430-9509
  source 1..80: mol_type = other DNA
taagcgtgagatatcctcggatgcttatgctaagtatttggctatgtataataagtacaagtattatagtggccctatgg

SEQ ID NO: 3022 - DNA, 80 bp, synthetic construct
  misc_feature 1..80: note = Synthetic: >HKU9-cand-9510-9589
  source 1..80: mol_type = other DNA
atactgctgcttatagagaggctgcttgttctcatttggtaatggctttagaaaagtattctaatggtggtggtgatact

SEQ ID NO: 3023 - DNA, 80 bp, synthetic construct
  misc_feature 1..80: note = Synthetic: >HKU9-cand-9590-9669
  source 1..80: mol_type = other DNA
atatatcaaccacctcgctgtagtgtagcatctgctgcattacaagctggtttgacacgtatggcccacccatctggttt

SEQ ID NO: 3024 - DNA, 80 bp, synthetic construct
  misc_feature 1..80: note = Synthetic: >HKU9-cand-9670-9749
  source 1..80: mol_type = other DNA
agtagaaccgtgcgttgttaaagttagttatggttccatgacacttaatggtatatggctggataactttgttatatgtc

SEQ ID NO: 3025 - DNA, 80 bp, synthetic construct
  misc_feature 1..80: note = Synthetic: >HKU9-cand-9750-9829
  source 1..80: mol_type = other DNA
ctagacatgttatgtgttctagggatgagttaccaaatcctgattatgctcgtttgtctatgcgagcagctaattatgat

SEQ ID NO: 3026 - DNA, 80 bp, synthetic construct
  misc_feature 1..80: note = Synthetic: >HKU9-cand-9830-9909
  source 1..80: mol_type = other DNA
tttcatgtatctcaaaatggccataacattcgagttataggacatgttatggagggttcgcttttaaagctaacagttga

SEQ ID NO: 3027 - DNA, 80 bp, synthetic construct
  misc_feature 1..80: note = Synthetic: >HKU9-cand-9900-9979
  source 1..80: mol_type = other DNA
taacagttgatgttaacaaccctaaaacacctgcttactcttttatacgggtgagtacaggtcaggctatgagtttgcta

SEQ ID NO: 3028 - DNA, 80 bp, synthetic construct
  misc_feature 1..80: note = Synthetic: >HKU9-cand-9980-10059
  source 1..80: mol_type = other DNA
gcatgttatgatggcgttcctactggtgtttacacatgtacgttacggtctaatggtacactaagagcctcatttttatg

SEQ ID NO: 3029 - DNA, 80 bp, synthetic construct
  misc_feature 1..80: note = Synthetic: >HKU9-cand-10060-10139
  source 1..80: mol_type = other DNA
tggctcttgtggtagtcctggttttgttatgaatggcaaagaagttcagttctgttatctgcaccagttggagttaccaa

SEQ ID NO: 3030 - DNA, 80 bp, synthetic construct
  misc_feature 1..80: note = Synthetic: >HKU9-cand-10140-10219
  source 1..80: mol_type = other DNA
atggtactcacactggtacagatttttcaggtgtcttttatggcccttttgaagacaagcaagttcctcaattggcggca

SEQ ID NO: 3031 - DNA, 80 bp, synthetic construct
  misc_feature 1..80: note = Synthetic: >HKU9-cand-10220-10299
  source 1..80: mol_type = other DNA
cctgattgtactataactgttaatgttttggcatggctctatgcagctgtgttaagtggtgagaattggtttttaacaaa

SEQ ID NO: 3032 - DNA, 80 bp, synthetic construct
  misc_feature 1..80: note = Synthetic: >HKU9-cand-10300-10379
  source 1..80: mol_type = other DNA
atctagtatttcaccggctgaatttaataattgtgctgttaagtacatgtgtcagtcagtaactagtgagagtttgcaag

SEQ ID NO: 3033 - DNA, 80 bp, synthetic construct
  misc_feature 1..80: note = Synthetic: >MERS-cand-14640-14719
  source 1..80: mol_type = other DNA
cctggcaattttaaccaagacttctatgatttcgtggtatctaaaggtttctttaaggagggctcttcagttacgctcaa

SEQ ID NO: 3034 - DNA, 80 bp, synthetic construct
  misc_feature 1..80: note = Synthetic: >MERS-cand-14720-14799
  source 1..80: mol_type = other DNA
acattttttctttgctcaagatggtaatgctgctattacagattataattactattcttataatctgcctactatgtgtg

SEQ ID NO: 3035 - DNA, 80 bp, synthetic construct
  misc_feature 1..80: note = Synthetic: >MERS-cand-14800-14879
  source 1..80: mol_type = other DNA
acatcaaacaaatgttgttctgcatggaagttgtaaacaagtacttcgaaatctatgacggtggttgtcttaatgcttct

SEQ ID NO: 3036 - DNA, 80 bp, synthetic construct
  misc_feature 1..80: note = Synthetic: >MERS-cand-14880-14959
  source 1..80: mol_type = other DNA
gaagtggttgttaataatttagacaagagtgctggccatccttttaataagtttggcaaagctcgtgtctattatgagag

SEQ ID NO: 3037 - DNA, 80 bp, synthetic construct
  misc_feature 1..80: note = Synthetic: >MERS-cand-14960-15039
  source 1..80: mol_type = other DNA
catgtcttaccaggagcaagatgaactctttgccatgacaaagcgtaacgtcattcctaccatgactcaaatgaatctaa

SEQ ID NO: 3038 - DNA, 80 bp, synthetic construct
  misc_feature 1..80: note = Synthetic: >MERS-cand-15040-15119
  source 1..80: mol_type = other DNA
aatatgctattagtgctaagaatagagctcgcactgttgcaggcgtgtccatacttagcacaatgactaatcgccagtac

SEQ ID NO: 3039 - DNA, 80 bp, synthetic construct
  misc_feature 1..80: note = Synthetic: >MERS-cand-15120-15199
  source 1..80: mol_type = other DNA
catcagaaaatgcttaagtccatggctgcaactcgtggagcgacttgcgtcattggtactacaaagttctatggtggctg

SEQ ID NO: 3040 - DNA, 80 bp, synthetic construct
  misc_feature 1..80: note = Synthetic: >MERS-cand-15200-15279
  source 1..80: mol_type = other DNA
ggatttcatgcttaaaacattgtacaaagatgttgataatccgcatcttatgggttgggattaccctaagtgtgatagag

SEQ ID NO: 3041 - DNA, 80 bp, synthetic construct
  misc_feature 1..80: note = Synthetic: >MERS-cand-15280-15359
  source 1..80: mol_type = other DNA
ctatgcctaatatgtgtagaatcttcgcttcactcatattagctcgtaaacatggcacttgttgtactacaagggacaga

SEQ ID NO: 3042 - DNA, 80 bp, synthetic construct
  misc_feature 1..80: note = Synthetic: >MERS-cand-15360-15439
  source 1..80: mol_type = other DNA
ttttatcgcttggcaaatgagtgtgctcaggtgctaagcgaatatgttctatgtggtggtggttactacgtcaaacctgg

SEQ ID NO: 3043 - DNA, 80 bp, synthetic construct
  misc_feature 1..80: note = Synthetic: >MERS-cand-15440-15519
  source 1..80: mol_type = other DNA
aggtaccagtagcggagatgccaccactgcatatgccaatagtgtctttaacattttgcaggcgacaactgctaatgtca

SEQ ID NO: 3044 - DNA, 80 bp, synthetic construct
  misc_feature 1..80: note = Synthetic: >MERS-cand-15520-15599
  source 1..80: mol_type = other DNA
gtgcacttatgggtgctaatggcaacaagattgttgacaaagaagttaaagacatgcagtttgatttgtatgtcaatgtt

SEQ ID NO: 3045 - DNA, 80 bp, synthetic construct
  misc_feature 1..80: note = Synthetic: >MERS-cand-15600-15679
  source 1..80: mol_type = other DNA
tacaggagcactagcccagaccccaaatttgttgataaatactatgcttttcttaataagcacttttctatgatgatact

SEQ ID NO: 3046 - DNA, 80 bp, synthetic construct
  misc_feature 1..80: note = Synthetic: >MERS-cand-15680-15759
  source 1..80: mol_type = other DNA
gtctgatgacggtgtcgtttgctataatagtgattatgcagctaagggttacattgctggaatacagaattttaaggaaa

SEQ ID NO: 3047 - DNA, 80 bp, synthetic construct
  misc_feature 1..80: note = Synthetic: >MERS-cand-15760-15839
  source 1..80: mol_type = other DNA
cgctgtattatcagaacaatgtctttatgtctgaagctaaatgctgggtggaaaccgatctgaagaaagggccacatgaa

SEQ ID NO: 3048 - DNA, 80 bp, synthetic construct
  misc_feature 1..80: note = Synthetic: >MERS-cand-15840-15919
  source 1..80: mol_type = other DNA
ttctgttcacagcatacgctttatattaaggatggcgacgatggttacttccttccttatccagacccttcaagaatttt

SEQ ID NO: 3049 - DNA, 80 bp, synthetic construct
  misc_feature 1..80: note = Synthetic: >MERS-cand-19770-19849
  source 1..80: mol_type = other DNA
gatttcaaattgctacacaatttacaagcagacatttgctacaagttcgtcctttgggattatgaacgtagcaatattta

SEQ ID NO: 3050 - DNA, 80 bp, synthetic construct
  misc_feature 1..80: note = Synthetic: >MERS-cand-19850-19929
  source 1..80: mol_type = other DNA
tggtactgctactattggtgtatgtaagtacactgatattgatgttaattcagctttgaatatatgttttgacatacgcg

SEQ ID NO: 3051 - DNA, 80 bp, synthetic construct
  misc_feature 1..80: note = Synthetic: >MERS-cand-19930-20009
  source 1..80: mol_type = other DNA
ataatggttcattggagaagttcatgtctactcccaatgccatctttatttctgatagaaaaattaagaaatacccttgt

SEQ ID NO: 3052 - DNA, 80 bp, synthetic construct
  misc_feature 1..80: note = Synthetic: >MERS-cand-20010-20089
  source 1..80: mol_type = other DNA
atggtaggtcctgattatgcttacttcaatggtgctatcatccgtgatagtgatgttgttaaacaaccagtgaagttcta

SEQ ID NO: 3053 - DNA, 80 bp, synthetic construct
  misc_feature 1..80: note = Synthetic: >MERS-cand-20090-20169
  source 1..80: mol_type = other DNA
cttgtataagaaagtcaataatgagtttattgatcctactgagtgtatttacactcagagtcgctcttgtagtgacttcc

SEQ ID NO: 3054 - DNA, 80 bp, synthetic construct
  misc_feature 1..80: note = Synthetic: >MERS-cand-20170-20249
  source 1..80: mol_type = other DNA
tacccctgtctgacatggagaaagactttctatcttttgatagtgatgttttcattaagaagtatggcttggaaaactat

SEQ ID NO: 3055 - DNA, 80 bp, synthetic construct
  misc_feature 1..80: note = Synthetic: >MERS-cand-20250-20329
  source 1..80: mol_type = other DNA
gcttttgagcacgtagtctatggagacttctctcatactacgttaggcggtcttcacttgcttattggtttatacaagaa

SEQ ID NO: 3056 - DNA, 80 bp, synthetic construct
  misc_feature 1..80: note = Synthetic: >MERS-cand-20330-20409
  source 1..80: mol_type = other DNA
gcaacaggaaggtcatattattatggaagaaatgctaaaaggtagctcaactattcataactattttattactgagacta

SEQ ID NO: 3057 - DNA, 80 bp, synthetic construct
  misc_feature 1..80: note = Synthetic: >MERS-cand-20410-20489
  source 1..80: mol_type = other DNA
acacagcggcttttaaggcggtgtgttctgttatagatttaaagcttgacgactttgttatgattttaaagagtcaagac

SEQ ID NO: 3058 - DNA, 80 bp, synthetic construct
  misc_feature 1..80: note = Synthetic: >MERS-cand-20490-20569
  source 1..80: mol_type = other DNA
cttggcgtagtatccaaggttgtcaaggttcctattgacttaacaatgattgagtttatgttatggtgtaaggatggaca

SEQ ID NO: 3059 - DNA, 80 bp, synthetic construct
  misc_feature 1..80: note = Synthetic: >MERS-cand-20570-20649
  source 1..80: mol_type = other DNA
ggttcaaaccttctaccctcgactccaggcttctgcagattggaaacctggtcatgcaatgccatccctctttaaagttc

SEQ ID NO: 3060 - DNA, 80 bp, synthetic construct
  misc_feature 1..80: note = Synthetic: >MERS-cand-20650-20729
  source 1..80: mol_type = other DNA
aaaatgtaaaccttgaacgttgtgagcttgctaattacaagcaatctattcctatgcctcgcggtgtgcacatgaacatc

SEQ ID NO: 3061 - DNA, 80 bp, synthetic construct
  misc_feature 1..80: note = Synthetic: >MERS-cand-20730-20809
  source 1..80: mol_type = other DNA
gctaaatatatgcaattgtgccagtatttaaatacttgcacattagccgtgcctgccaatatgcgtgttatacattttgg

SEQ ID NO: 3062 - DNA, 80 bp, synthetic construct
  misc_feature 1..80: note = Synthetic: >MERS-cand-20810-20889
  source 1..80: mol_type = other DNA
cgctggttctgataaaggtatcgctcctggtacatcagttttacgacagtggcttcctacagatgccattattatagata

SEQ ID NO: 3063 - DNA, 80 bp, synthetic construct
  misc_feature 1..80: note = Synthetic: >MERS-cand-20890-20969
  source 1..80: mol_type = other DNA
atgatttaaatgagttcgtgtcagatgctgacataactttatttggagattgtgtaactgtacgtgtcggccaacaagtg

SEQ ID NO: 3064 - DNA, 80 bp, synthetic construct
  misc_feature 1..80: note = Synthetic: >MERS-cand-20970-21049
  source 1..80: mol_type = other DNA
gatcttgttatttccgacatgtatgatcctactactaagaatgtaacaggtagtaatgagtcaaaggctttattctttac

SEQ ID NO: 3065 - DNA, 80 bp, synthetic construct
  misc_feature 1..80: note = Synthetic: >MERS-cand-24890-24969
  source 1..80: mol_type = other DNA
ttgaggttgtttctgcttatggtctttgcgatgcagctaaccctactaattgtatagcccctgttaatggctactttatt

SEQ ID NO: 3066 - DNA, 80 bp, synthetic construct
  misc_feature 1..80: note = Synthetic: >MERS-cand-24970-25049
  source 1..80: mol_type = other DNA
aaaactaataacactaggattgttgatgagtggtcatatactggctcgtccttctatgcacctgagcccatcacctctct

SEQ ID NO: 3067 - DNA, 80 bp, synthetic construct
  misc_feature 1..80: note = Synthetic: >MERS-cand-25050-25129
  source 1..80: mol_type = other DNA
taatactaagtatgttgcaccacaggtgacataccaaaacatttctactaacctccctcctcctcttctcggcaattcca

SEQ ID NO: 3068 - DNA, 80 bp, synthetic construct
  misc_feature 1..80: note = Synthetic: >MERS-cand-25130-25209
  source 1..80: mol_type = other DNA
ccgggattgacttccaagatgagttggatgagtttttcaaaaatgttagcaccagtatacctaattttggttctctaaca

SEQ ID NO: 3069 - DNA, 80 bp, synthetic construct
  misc_feature 1..80: note = Synthetic: >MERS-cand-25210-25289
  source 1..80: mol_type = other DNA
cagattaatactacattactcgatcttacctacgagatgttgtctcttcaacaagttgttaaagcccttaatgagtctta

SEQ ID NO: 3070 - DNA, 80 bp, synthetic construct
  misc_feature 1..80: note = Synthetic: >MERS-cand-25290-25369
  source 1..80: mol_type = other DNA
catagaccttaaagagcttggcaattatacttattacaacaaatggccgtggtacatttggcttggtttcattgctgggc

SEQ ID NO: 3071 - DNA, 80 bp, synthetic construct
  misc_feature 1..80: note = Synthetic: >MERS-cand-25370-25449
  source 1..80: mol_type = other DNA
ttgttgccttagctctatgcgtcttcttcatactgtgctgcactggttgtggcacaaactgtatgggaaaacttaagtgt

SEQ ID NO: 3072 - DNA, 80 bp, synthetic construct
  misc_feature 1..80: note = Synthetic: >MERS-cand-25450-25529
  source 1..80: mol_type = other DNA
aatcgttgttgtgatagatacgaggaatacgacctcgagccgcataaggttcatgttcactaattaacgaactatcaatg

SEQ ID NO: 3073 - DNA, 80 bp, synthetic construct
  misc_feature 1..80: note = Synthetic: >MERS-cand-25530-25609
  source 1..80: mol_type = other DNA
agagttcaaagaccacccactctcttgttagtgttctcactctctcttttggtcactgcattttcaaaacctctctatgt

SEQ ID NO: 3074 - DNA, 80 bp, synthetic construct
  misc_feature 1..80: note = Synthetic: >MERS-cand-25610-25689
  source 1..80: mol_type = other DNA
acctgagcattgtcagaattattctggttgcatgcttagggcttgtattaaaactgcccaagctgatacagctggtcttt

SEQ ID NO: 3075 - DNA, 80 bp, synthetic construct
  misc_feature 1..80: note = Synthetic: >MERS-cand-25690-25769
  source 1..80: mol_type = other DNA
atacaaattttcgaattgacgtcccatctgcagaatcaactggtactcaatcagtttctgtcgatcgtgagtcaacttca

SEQ ID NO: 3076 - DNA, 80 bp, synthetic construct
  misc_feature 1..80: note = Synthetic: >MERS-cand-25770-25849
  source 1..80: mol_type = other DNA
actcatgatggtcctaccgaacatgttactagtgtgaatctttttgacgttggttactcagttaattaacgaactctatg

SEQ ID NO: 3077 - DNA, 80 bp, synthetic construct
  misc_feature 1..80: note = Synthetic: >MERS-cand-25850-25929
  source 1..80: mol_type = other DNA
gattacgtgtctctgcttaatcaaatttggcagaagtaccttaattcaccgtatactacttgtttgtatatccctaaacc

SEQ ID NO: 3078 - DNA, 80 bp, synthetic construct
  misc_feature 1..80: note = Synthetic: >MERS-cand-25930-26009
  source 1..80: mol_type = other DNA
cacagctaagtatacacctttagttggcacttcattgcaccctgtgctgtggaactgtcagctatcctttgctggttata

SEQ ID NO: 3079 - DNA, 80 bp, synthetic construct
  misc_feature 1..80: note = Synthetic: >MERS-cand-26010-26089
  source 1..80: mol_type = other DNA
ctgaatctgctgttaattctacaaaagctttggccaaacaggacgcagctcagcgaatcgcttggttgctacataaggat

SEQ ID NO: 3080 - DNA, 80 bp, synthetic construct
  misc_feature 1..80: note = Synthetic: >MERS-cand-26090-26169
  source 1..80: mol_type = other DNA
ggaggaatccctgatggatgttccctctacctccggcactcaagtttattcgcgcaaagcgaggaagaggagtcattctc

SEQ ID NO: 3081 - DNA, 80 bp, synthetic construct
  misc_feature 1..80: note = Synthetic: >MERS-cand-28740-28819
  source 1..80: mol_type = other DNA
gcagggtgtacctcttaatgccaattccacccctgcgcaaaatgctgggtattggcggagacaggacagaaaaattaata

SEQ ID NO: 3082 - DNA, 80 bp, synthetic construct
  misc_feature 1..80: note = Synthetic: >MERS-cand-28820-28899
  source 1..80: mol_type = other DNA
ccgggaatggaattaagcaactggctcccaggtggtacttctactacactggaactggacccgaagcagcactcccattc

SEQ ID NO: 3083 - DNA, 80 bp, synthetic construct
  misc_feature 1..80: note = Synthetic: >MERS-cand-28900-28979
  source 1..80: mol_type = other DNA
cgggctgttaaggatggcatcgtttgggtccatgaagatggcgccactgatgctccttcaacttttgggacgcggaaccc

SEQ ID NO: 3084 - DNA, 80 bp, synthetic construct
  misc_feature 1..80: note = Synthetic: >MERS-cand-28980-29059
  source 1..80: mol_type = other DNA
taacaatgattcagctattgttacacaattcgcgcccggtactaagcttcctaaaaacttccacattgaggggactggag

SEQ ID NO: 3085 - DNA, 80 bp, synthetic construct
  misc_feature 1..80: note = Synthetic: >MERS-cand-29060-29139
  source 1..80: mol_type = other DNA
gcaatagtcaatcatcttcaagagcctctagcgtaagcagaaactcttccagatctagttcacaaggttcaagatcagga

SEQ ID NO: 3086 - DNA, 80 bp, synthetic construct
  misc_feature 1..80: note = Synthetic: >MERS-cand-29140-29219
  source 1..80: mol_type = other DNA
aactctacccgcggcacttctccaggtccatctggaatcggagcagtaggaggtgatctactttaccttgatcttctgaa

SEQ ID NO: 3087 - DNA, 80 bp, synthetic construct
  misc_feature 1..80: note = Synthetic: >MERS-cand-29220-29299
  source 1..80: mol_type = other DNA
cagactacaagcccttgagtctggcaaagtaaagcaatcgcagccaaaagtaatcactaagaaagatgctgctgctgcta

SEQ ID NO: 3088 - DNA, 80 bp, synthetic construct
  misc_feature 1..80: note = Synthetic: >MERS-cand-29300-29379
  source 1..80: mol_type = other DNA
aaaataagatgcgccacaagcgcacttccaccaaaagtttcaacatggtgcaagcttttggtcttcgcggaccaggagac

SEQ ID NO: 3089 - DNA, 80 bp, synthetic construct
  misc_feature 1..80: note = Synthetic: >MERS-cand-29380-29459
  source 1..80: mol_type = other DNA
ctccagggaaactttggtgatcttcaattgaataaactcggcactgaggacccacgttggccccaaattgctgagcttgc

SEQ ID NO: 3090 - DNA, 80 bp, synthetic construct
  misc_feature 1..80: note = Synthetic: >MERS-cand-29460-29539
  source 1..80: mol_type = other DNA
tcctacagccagtgcttttatgggtatgtcgcaatttaaacttacccatcagaacaatgatgatcatggcaaccctgtgt

SEQ ID NO: 3091 - DNA, 80 bp, synthetic construct
  misc_feature 1..80: note = Synthetic: >MERS-cand-29540-29619
  source 1..80: mol_type = other DNA
acttccttcggtacagtggagccattaaacttgacccaaagaatcccaactacaataagtggttggagcttcttgagcaa

SEQ ID NO: 3092 - DNA, 80 bp, synthetic construct
  misc_feature 1..80: note = Synthetic: >MERS-cand-29620-29699
  source 1..80: mol_type = other DNA
aatattgatgcctacaaaaccttccctaagaaggaaaagaaacaaaaggcaccaaaagaagaatcaacagaccaaatgtc

SEQ ID NO: 3093 - DNA, 80 bp, synthetic construct
  misc_feature 1..80: note = Synthetic: >MERS-cand-29700-29779
  source 1..80: mol_type = other DNA
tgaacctccaaaggagcagcgtgtgcaaggtagcatcactcagcgcactcgcacccgtccaagtgttcagcctggtccaa

SEQ ID NO: 3094 - DNA, 80 bp, synthetic construct
  misc_feature 1..80: note = Synthetic: >MERS-cand-29780-29859
  source 1..80: mol_type = other DNA
tgattgatgttaacactgattagtgtcactcaaagtaacaagatcgcggcaatcgtttgtgtttggtaaccccatctcac

SEQ ID NO: 3095 - DNA, 80 bp, synthetic construct
  misc_feature 1..80: note = Synthetic: >MERS-cand-29860-29939
  source 1..80: mol_type = other DNA
catcgcttgtccactcttgcacagaatggaatcatgttgtaattacagtgcaataaggtaattataacccatttaattga

SEQ ID NO: 3096 - DNA, 80 bp, synthetic construct
  misc_feature 1..80: note = Synthetic: >MERS-cand-29940-30019
  source 1..80: mol_type = other DNA
tagctatgctttattaaagtgtgtagctgtagagagaatgttaaagactgtcacctctgcgtgattgcaagtgaacagtg

SEQ ID NO: 3097 - DNA, 80 bp, synthetic construct
  misc_feature 1..80: note = Synthetic: >MurineCoV-cand-5070-5149
  source 1..80: mol_type = other DNA
atggtgttaacttccgctcctgctgcgtagcagagggtgaagtttttggcaagacattaggttcagtcttttgtgatggc

SEQ ID NO: 3098 - DNA, 80 bp, synthetic construct
  misc_feature 1..80: note = Synthetic: >MurineCoV-cand-5150-5229
  source 1..80: mol_type = other DNA
ataaatgtcaccaaagttaggtgtagtgccatttacaagggtaaggttttctttcagtacagtgatttgtccgaggcaga

SEQ ID NO: 3099 - DNA, 80 bp, synthetic construct
  misc_feature 1..80: note = Synthetic: >MurineCoV-cand-5230-5309
  source 1..80: mol_type = other DNA
tcttgtggctgttaaagatgcctttggttttgatgaaccacaactgctgaagtactacactatgcttggcatgtgtaagt

SEQ ID NO: 3100 - DNA, 80 bp, synthetic construct
  misc_feature 1..80: note = Synthetic: >MurineCoV-cand-5310-5389
  source 1..80: mol_type = other DNA
ggccagtagttgtttgtggcaattattttgctttcaagcagtcaaataataattgctatataaatgtggcatgtttaatg

SEQ ID NO: 3101 - DNA, 80 bp, synthetic construct
  misc_feature 1..80: note = Synthetic: >MurineCoV-cand-5390-5469
  source 1..80: mol_type = other DNA
ctgcaacacttgagtttaaagtttcctaagtggcaatggcaagaggcttggaacgagttccgctctggtaaaccactaag

SEQ ID NO: 3102 - DNA, 80 bp, synthetic construct
  misc_feature 1..80: note = Synthetic: >MurineCoV-cand-5470-5549
  source 1..80: mol_type = other DNA
gtttgtgtccttggtattagcaaagggcagctttaaatttaatgaaccttctgattctaccgattttatgcgtgtggtgc

SEQ ID NO: 3103 - DNA, 80 bp, synthetic construct
  misc_feature 1..80: note = Synthetic: >MurineCoV-cand-5550-5629
  source 1..80: mol_type = other DNA
tacgtgaagcagatttgagtggtgccacgtgcaatttggaatttgtttgtaaatgtggtgtgaagcaagagcagcgcaaa

SEQ ID NO: 3104 - DNA, 80 bp, synthetic construct
  misc_feature 1..80: note = Synthetic: >MurineCoV-cand-5630-5709
  source 1..80: mol_type = other DNA
ggtgttgacgctgttatgcattttggtacgttggataaaggtgatcttgtcaggggttataatatcgcatgtacgtgcgg

SEQ ID NO: 3105 - DNA, 80 bp, synthetic construct
  misc_feature 1..80: note = Synthetic: >MurineCoV-cand-5710-5789
  source 1..80: mol_type = other DNA
tagtaaacttgtgcattgcacccaatttaacgtaccatttttaatttgctccaacacaccagagggtaggaaactgcccg

SEQ ID NO: 3106 - DNA, 80 bp, synthetic construct
  misc_feature 1..80: note = Synthetic: >MurineCoV-cand-5790-5869
  source 1..80: mol_type = other DNA
acgatgttgttgcagctaatatttttactggtggtagtgtgggccattacacgcatgtgaaatgtaaacccaagtaccag

SEQ ID NO: 3107 - DNA, 80 bp, synthetic construct
  misc_feature 1..80: note = Synthetic: >MurineCoV-cand-5870-5949
  source 1..80: mol_type = other DNA
ctttatgatgcttgtaatgttaataaggtttcggaggctaagggtaattttaccgattgcctctaccttaaaaatttaaa

SEQ ID NO: 3108 - DNA, 80 bp, synthetic construct
  misc_feature 1..80: note = Synthetic: >MurineCoV-cand-5950-6029
  source 1..80: mol_type = other DNA
gcaaactttttcgtctgtgctgacgactttttatttagatgatgtaaagtgtgtggagtataagccagatttatcgcagt

SEQ ID NO: 3109 - DNA, 80 bp, synthetic construct
  misc_feature 1..80: note = Synthetic: >MurineCoV-cand-6030-6109
  source 1..80: mol_type = other DNA
attactgtgagtctggtaaatattatacaaaacccattattaaggcccaatttagaacatcttgagaaggttgatggtgt

SEQ ID NO: 3110 - DNA, 80 bp, synthetic construct
  misc_feature 1..80: note = Synthetic: >MurineCoV-cand-6110-6189
  source 1..80: mol_type = other DNA
ctataccaactttaaattggtgggacatagtattgctgaaaaactcaatgctaagctgggatttgattgtaattctccct

SEQ ID NO: 3111 - DNA, 80 bp, synthetic construct
  misc_feature 1..80: note = Synthetic: >MurineCoV-cand-6190-6269
  source 1..80: mol_type = other DNA
ttgtggagtataaaattacagagtggccaacagctactggagatgtggtgttggctagtgatgatttgtatgtaagtcgg

SEQ ID NO: 3112 - DNA, 80 bp, synthetic construct
  misc_feature 1..80: note = Synthetic: >MurineCoV-cand-6270-6349
  source 1..80: mol_type = other DNA
tactcaagcgggtgcattacttttggtaaaccggttgtctggcttggccatgaggaagcatcgctgaaatctctcacata

SEQ ID NO: 3113 - DNA, 80 bp, synthetic construct
  misc_feature 1..80: note = Synthetic: >MurineCoV-cand-19210-19289
  source 1..80: mol_type = other DNA
aggatatgattttaagttttatgatgcctcccctgttgttaagtctgttaaacagtttgtttataaatacgaggcacata

SEQ ID NO: 3114 - DNA, 80 bp, synthetic construct
  misc_feature 1..80: note = Synthetic: >MurineCoV-cand-19290-19369
  source 1..80: mol_type = other DNA
aagatcaatttttagatggtttgtgtatgttttggaactgcaatgtggataagtatccagcgaatgcagttgtgtgtagg

SEQ ID NO: 3115 - DNA, 80 bp, synthetic construct
  misc_feature 1..80: note = Synthetic: >MurineCoV-cand-19370-19449
  source 1..80: mol_type = other DNA
tttgacacgcgtgtgttgaacaaattaaatctccctggctgtaatggtggcagtttgtatgttaacaaacatgcattcca

SEQ ID NO: 3116 - DNA, 80 bp, synthetic construct
  misc_feature 1..80: note = Synthetic: >MurineCoV-cand-19450-19529
  source 1..80: mol_type = other DNA
caccagtccctttacccgggctgccttcgagaatttgaagcctatgcctttcttttattattcagatacgccctgtgtgt

SEQ ID NO: 3117 - DNA, 80 bp, synthetic construct
  misc_feature 1..80: note = Synthetic: >MurineCoV-cand-19530-19609
  source 1..80: mol_type = other DNA
atatggaaggcatggaatctaagcaggtcgattatgtcccattgagaagcgctacatgcatcacaagatgcaatttaggt

SEQ ID NO: 3118 - DNA, 80 bp, synthetic construct
  misc_feature 1..80: note = Synthetic: >MurineCoV-cand-19600-19679
  source 1..80: mol_type = other DNA
caatttaggtggcgctgtttgtttaaaacatgctgaggagtatcgtgagtaccttgagtcttacaatacggcaaccacag

SEQ ID NO: 3119 - DNA, 80 bp, synthetic construct
  misc_feature 1..80: note = Synthetic: >MurineCoV-cand-19680-19759
  source 1..80: mol_type = other DNA
cgggttttactttttgggtctataagacttttgatttttataacctttggaatacttttactaggctccaaagtttagaa

SEQ ID NO: 3120 - DNA, 80 bp, synthetic construct
  misc_feature 1..80: note = Synthetic: >MurineCoV-cand-19760-19839
  source 1..80: mol_type = other DNA
aatgtagtgtataatttggtcaatgctggacactttgatggccgggcgggtgaactgccttgtgctgttataggtgagaa

SEQ ID NO: 3121 - DNA, 80 bp, synthetic construct
  misc_feature 1..80: note = Synthetic: >MurineCoV-cand-19840-19919
  source 1..80: mol_type = other DNA
agtcattgccaagattcaaaatgaggatgtcgtggtctttaaaaataacacgccattccccactaatgtggctgtcgaat

SEQ ID NO: 3122 - DNA, 80 bp, synthetic construct
  misc_feature 1..80: note = Synthetic: >MurineCoV-cand-19920-19999
  source 1..80: mol_type = other DNA
tatttgctaagcgcagtattcggccccaccccgagcttaagctctttagaaatttgaatattgacgtgtgctggagtcac

SEQ ID NO: 3123 - DNA, 80 bp, synthetic construct
  misc_feature 1..80: note = Synthetic: >MurineCoV-cand-20000-20079
  source 1..80: mol_type = other DNA
gtcctttgggattatgctaaggatagtgtgttttgcagttcgacgtataaggtctgcaaatacacagatttacagtgcat

SEQ ID NO: 3124 - DNA, 80 bp, synthetic construct
  misc_feature 1..80: note = Synthetic: >MurineCoV-cand-20080-20159
  source 1..80: mol_type = other DNA
tgaaagcttgaatgtactttttgatggtcgtgataatggtgctcttgaagcttttaagaagtgccggaatggcgtctaca

SEQ ID NO: 3125 - DNA, 80 bp, synthetic construct
  misc_feature 1..80: note = Synthetic: >MurineCoV-cand-20160-20239
  source 1..80: mol_type = other DNA
ttaacacgacaaaaattaaaagtctgtcgatgattaaaggcccacaacgtgccgatttgaatggcgtagttgtggagaaa

SEQ ID NO: 3126 - DNA, 80 bp, synthetic construct
  misc_feature 1..80: note = Synthetic: >MurineCoV-cand-20240-20319
  source 1..80: mol_type = other DNA
gttggagattctgatgtggaattttggtttgctgtgcgtaaagacggtgacgatgttatcttcagccgtacagggagcct

SEQ ID NO: 3127 - DNA, 80 bp, synthetic construct
  misc_feature 1..80: note = Synthetic: >MurineCoV-cand-20320-20399
  source 1..80: mol_type = other DNA
tgaaccgagccattaccggagcccacaaggtaatccgggtggtaatcgcgtgggtgatctcagcggtaatgaagctctag

SEQ ID NO: 3128 - DNA, 80 bp, synthetic construct
  misc_feature 1..80: note = Synthetic: >MurineCoV-cand-20400-20479
  source 1..80: mol_type = other DNA
cgcgtggcactatctttactcaaagcagattattatcctctttcacacctcgatcagagatggagaaagattttatggat

SEQ ID NO: 3129 - DNA, 80 bp, synthetic construct
  misc_feature 1..80: note = Synthetic: >MurineCoV-cand-24330-24409
  source 1..80: mol_type = other DNA
tgcaactgcatattttcctactatagttataggtagtttgtttggctatacttcctataccgttgtaatagagccatata

SEQ ID NO: 3130 - DNA, 80 bp, synthetic construct
  misc_feature 1..80: note = Synthetic: >MurineCoV-cand-24410-24489
  source 1..80: mol_type = other DNA
atggtgttataatggcctcagtgtgccagtataccatttgtcagttaccttacactgattgtaagcctaacactaatggt

SEQ ID NO: 3131 - DNA, 80 bp, synthetic construct
  misc_feature 1..80: note = Synthetic: >MurineCoV-cand-24490-24569
  source 1..80: mol_type = other DNA
aataaattaatagggttttggcacacggatgtaaaacccccaatttgtgtgttaaagcgaaatttcacgcttaatgttaa

SEQ ID NO: 3132 - DNA, 80 bp, synthetic construct
  misc_feature 1..80: note = Synthetic: >MurineCoV-cand-24570-24649
  source 1..80: mol_type = other DNA
tgctgatgcattttattttcatttttaccaacatggtggtactttttatgcgtactatgcggataaaccctccgctacta

SEQ ID NO: 3133 - DNA, 80 bp, synthetic construct
  misc_feature 1..80: note = Synthetic: >MurineCoV-cand-24650-24729
  source 1..80: mol_type = other DNA
cgtttttgtttagtgtatatattggcgatattttaacacagtattatgtgttacctttcatctgcaacccaacagctggt

SEQ ID NO: 3134 - DNA, 80 bp, synthetic construct
  misc_feature 1..80: note = Synthetic: >MurineCoV-cand-24730-24809
  source 1..80: mol_type = other DNA
agcacttttgctccgcgctattgggttacacctttggttaagcgccaatatttgtttaatttcaaccagaagggtgtcat

SEQ ID NO: 3135 - DNA, 80 bp, synthetic construct
  misc_feature 1..80: note = Synthetic: >MurineCoV-cand-24810-24889
  source 1..80: mol_type = other DNA
tactagtgctgttgattgtgctagtagttataccagtgaaataaaatgtaagacccagagcatgttacctagcactggtg

SEQ ID NO: 3136 - DNA, 80 bp, synthetic construct
  misc_feature 1..80: note = Synthetic: >MurineCoV-cand-24890-24969
  source 1..80: mol_type = other DNA
tctatgagttatccggttatacggtccaaccagttggagttgtataccggcgtgttgctaacctcccagcttgtaatata

SEQ ID NO: 3137 - DNA, 80 bp, synthetic construct
  misc_feature 1..80: note = Synthetic: >MurineCoV-cand-24970-25049
  source 1..80: mol_type = other DNA
gaggagtggcttactgctaggtcagtcccctcccctctcaactgggagcgtaagacttttcagaattgtaattttaattt

SEQ ID NO: 3138 - DNA, 80 bp, synthetic construct
  misc_feature 1..80: note = Synthetic: >MurineCoV-cand-25050-25129
  source 1..80: mol_type = other DNA
aagcagcctgttacgttatgttcaggctgagagtttgttttgtaataatatcgatgcttccaaagtgtatggcaggtgct

SEQ ID NO: 3139 - DNA, 80 bp, synthetic construct
  misc_feature 1..80: note = Synthetic: >MurineCoV-cand-25130-25209
  source 1..80: mol_type = other DNA
ttggtagtatttcagttgataagtttgctgtaccccgaagtaggcaagttgatttacagcttggtaactctggatttctg

SEQ ID NO: 3140 - DNA, 80 bp, synthetic construct
  misc_feature 1..80: note = Synthetic: >MurineCoV-cand-25210-25289
  source 1..80: mol_type = other DNA
cagactgctaattataagattgatacagctgccacttcgtgtcagctgcattacaccttgcctaagaataatgtcaccat

SEQ ID NO: 3141 - DNA, 80 bp, synthetic construct
  misc_feature 1..80: note = Synthetic: >MurineCoV-cand-25290-25369
  source 1..80: mol_type = other DNA
aaacaaccataacccctcgtcttggaataggaggtatggctttaatgatgctggcgtctttggcaaaaaccaacatgacg

SEQ ID NO: 3142 - DNA, 80 bp, synthetic construct
  misc_feature 1..80: note = Synthetic: >MurineCoV-cand-25370-25449
  source 1..80: mol_type = other DNA
ttgtttacgctcagcaatgttttactgtaagatctagttattgcccgtgtgctcaaccggacatagttagcccttgcact

SEQ ID NO: 3143 - DNA, 80 bp, synthetic construct
  misc_feature 1..80: note = Synthetic: >MurineCoV-cand-25450-25529
  source 1..80: mol_type = other DNA
actcagactaagcctaagtctgcttattgcccaacaggcacaactcatcgtgagtgtaatctttggaatgggccccattt

SEQ ID NO: 3144 - DNA, 80 bp, synthetic construct
  misc_feature 1..80: note = Synthetic: >MurineCoV-cand-25530-25609
  source 1..80: mol_type = other DNA
gcgctcgggtggtccacctgtaggttctaacacgtataagtgcgagtgcacttgtaaccccaatccactaaatacctatg

SEQ ID NO: 3145 - DNA, 80 bp, synthetic construct
  misc_feature 1..80: note = Synthetic: >SARSCoV2-cand-2010-2089
  source 1..80: mol_type = other DNA
atgatgttcacatctgatttggctactaacaatctagttgtaatggcctacattacaggtggtgttgttcagttgacttc

SEQ ID NO: 3146 - DNA, 80 bp, synthetic construct
  misc_feature 1..80: note = Synthetic: >SARSCoV2-cand-2090-2169
  source 1..80: mol_type = other DNA
gcagtggctaactaacatctttggcactgtttatgaaaaactcaaacccgtccttgattggcttgaagagaagtttaagg

SEQ ID NO: 3147 - DNA, 80 bp, synthetic construct
  misc_feature 1..80: note = Synthetic: >SARSCoV2-cand-2170-2249
  source 1..80: mol_type = other DNA
aaggtgtagagtttcttagagacggttgggaaattgttaaatttatctcaacctgtgcttgtgaaattgtcggtggacaa

SEQ ID NO: 3148 - DNA, 80 bp, synthetic construct
  misc_feature 1..80: note = Synthetic: >SARSCoV2-cand-2250-2329
  source 1..80: mol_type = other DNA
attgtcacctgtgcaaaggaaattaaggagagtgttcagacattctttaagcttgtaaataaatttttggctttgtgtgc

SEQ ID NO: 3149 - DNA, 80 bp, synthetic construct
  misc_feature 1..80: note = Synthetic: >SARSCoV2-cand-2330-2409
  source 1..80: mol_type = other DNA
tgactctatcattattggtggagctaaacttaaagccttgaatttaggtgaaacatttgtcacgcactcaaagggattgt

SEQ ID NO: 3150 - DNA, 80 bp, synthetic construct
  misc_feature 1..80: note = Synthetic: >SARSCoV2-cand-2410-2489
  source 1..80: mol_type = other DNA
acagaaagtgtgttaaatccagagaagaaactggcctactcatgcctctaaaagccccaaaagaaattatcttcttagag

SEQ ID NO: 3151 - DNA, 80 bp, synthetic construct
  misc_feature 1..80: note = Synthetic: >SARSCoV2-cand-2490-2569
  source 1..80: mol_type = other DNA
ggagaaacacttcccacagaagtgttaacagaggaagttgtcttgaaaactggtgatttacaaccattagaacaacctac

SEQ ID NO: 3152 - DNA, 80 bp, synthetic construct
  misc_feature 1..80: note = Synthetic: >SARSCoV2-cand-2570-2649
  source 1..80: mol_type = other DNA
tagtgaagctgttgaagctccattggttggtacaccagtttgtattaacgggcttatgttgctcgaaatcaaagacacag

SEQ ID NO: 3153 - DNA, 80 bp, synthetic construct
  misc_feature 1..80: note = Synthetic: >SARSCoV2-cand-2650-2729
  source 1..80: mol_type = other DNA
aaaagtactgtgcccttgcacctaatatgatggtaacaaacaataccttcacactcaaaggcggtgcaccaacaaaggtt

SEQ ID NO: 3154 - DNA, 80 bp, synthetic construct
  misc_feature 1..80: note = Synthetic: >SARSCoV2-cand-2730-2809
  source 1..80: mol_type = other DNA
acttttggtgatgacactgtgatagaagtgcaaggttacaagagtgtgaatatcacttttgaacttgatgaaaggattga

SEQ ID NO: 3155 - DNA, 80 bp, synthetic construct
  misc_feature 1..80: note = Synthetic: >SARSCoV2-cand-2810-2889
  source 1..80: mol_type = other DNA
taaagtacttaatgagaagtgctctgcctatacagttgaactcggtacagaagtaaatgagttcgcctgtgttgtggcag

SEQ ID NO: 3156 - DNA, 80 bp, synthetic construct
  misc_feature 1..80: note = Synthetic: >SARSCoV2-cand-2890-2969
  source 1..80: mol_type = other DNA
atgctgtcataaaaactttgcaaccagtatctgaattacttacaccactgggcattgatttagatgagtggagtatggct

SEQ ID NO: 3157 - DNA, 80 bp, synthetic construct
  misc_feature 1..80: note = Synthetic: >SARSCoV2-cand-2970-3049
  source 1..80: mol_type = other DNA
acatactacttatttgatgagtctggtgagtttaaattggcttcacatatgtattgttctttctaccctccagatgagga

SEQ ID NO: 3158 - DNA, 80 bp, synthetic construct
  misc_feature 1..80: note = Synthetic: >SARSCoV2-cand-3050-3129
  source 1..80: mol_type = other DNA
tgaagaagaaggtgattgtgaagaagaagagtttgagccatcaactcaatatgagtatggtactgaagatgattaccaag

SEQ ID NO: 3159 - DNA, 80 bp, synthetic construct
  misc_feature 1..80: note = Synthetic: >SARSCoV2-cand-3130-3209
  source 1..80: mol_type = other DNA
gtaaacctttggaatttggtgccacttctgctgctcttcaacctgaagaagagcaagaagaagattggttagatgatgat

SEQ ID NO: 3160 - DNA, 80 bp, synthetic construct
  misc_feature 1..80: note = Synthetic: >SARSCoV2-cand-3210-3289
  source 1..80: mol_type = other DNA
agtcaacaaactgttggtcaacaagacggcagtgaggacaatcagacaactactattcaaacaattgttgaggttcaacc

SEQ ID NO: 3161 - DNA, 80 bp, synthetic construct
  misc_feature 1..80: note = Synthetic: >SARSCoV2-cand-4580-4659
  source 1..80: mol_type = other DNA
tctaaatgaaactcttgttacaatgccacttggctatgtaacacatggcttaaatttggaagaagctgctcggtatatga

SEQ ID NO: 3162 - DNA, 80 bp, synthetic construct
  misc_feature 1..80: note = Synthetic: >SARSCoV2-cand-4660-4739
  source 1..80: mol_type = other DNA
gatctctcaaagtgccagctacagtttctgtttcttcacctgatgctgttacagcgtataatggttatcttacttcttct

SEQ ID NO: 3163 - DNA, 80 bp, synthetic construct
  misc_feature 1..80: note = Synthetic: >SARSCoV2-cand-4740-4819
  source 1..80: mol_type = other DNA
tctaaaacacctgaagaacattttattgaaaccatctcacttgctggttcctataaagattggtcctattctggacaatc

SEQ ID NO: 3164 - DNA, 80 bp, synthetic construct
  misc_feature 1..80: note = Synthetic: >SARSCoV2-cand-4820-4899
  source 1..80: mol_type = other DNA
tacacaactaggtatagaatttcttaagagaggtgataaaagtgtatattacactagtaatcctaccacattccacctag

SEQ ID NO: 3165 - DNA, 80 bp, synthetic construct
  misc_feature 1..80: note = Synthetic: >SARSCoV2-cand-4900-4979
  source 1..80: mol_type = other DNA
atggtgaagttatcacctttgacaatcttaagacacttctttctttgagagaagtgaggactattaaggtgtttacaaca

SEQ ID NO: 3166 - DNA, 80 bp, synthetic construct
  misc_feature 1..80: note = Synthetic: >SARSCoV2-cand-4980-5059
  source 1..80: mol_type = other DNA
gtagacaacattaacctccacacgcaagttgtggacatgtcaatgacatatggacaacagtttggtccaacttatttgga

SEQ ID NO: 3167 - DNA, 80 bp, synthetic construct
  misc_feature 1..80: note = Synthetic: >SARSCoV2-cand-5060-5139
  source 1..80: mol_type = other DNA
tggagctgatgttactaaaataaaacctcataattcacatgaaggtaaaacattttatgttttacctaatgatgacactc

SEQ ID NO: 3168 - DNA, 80 bp, synthetic construct
  misc_feature 1..80: note = Synthetic: >SARSCoV2-cand-5140-5219
  source 1..80: mol_type = other DNA
tacgtgttgaggcttttgagtactaccacacaactgatcctagttttctgggtaggtacatgtcagcattaaatcacact

SEQ ID NO: 3169 - DNA, 80 bp, synthetic construct
  misc_feature 1..80: note = Synthetic: >SARSCoV2-cand-5220-5299
  source 1..80: mol_type = other DNA
aaaaagtggaaatacccacaagttaatggtttaacttctattaaatgggcagataacaactgttatcttgccactgcatt

SEQ ID NO: 3170 - DNA, 80 bp, synthetic construct
  misc_feature 1..80: note = Synthetic: >SARSCoV2-cand-5300-5379
  source 1..80: mol_type = other DNA
gttaacactccaacaaatagagttgaagtttaatccacctgctctacaagatgcttattacagagcaagggctggtgaag

SEQ ID NO: 3171 - DNA, 80 bp, synthetic construct
  misc_feature 1..80: note = Synthetic: >SARSCoV2-cand-5380-5459
  source 1..80: mol_type = other DNA
ctgctaacttttgtgcacttatcttagcctactgtaataagacagtaggtgagttaggtgatgttagagaaacaatgagt

SEQ ID NO: 3172 - DNA, 80 bp, synthetic construct
  misc_feature 1..80: note = Synthetic: >SARSCoV2-cand-5460-5539
  source 1..80: mol_type = other DNA
tacttgtttcaacatgccaatttagattcttgcaaaagagtcttgaacgtggtgtgtaaaacttgtggacaacagcagac

SEQ ID NO: 3173 - DNA, 80 bp, synthetic construct
  misc_feature 1..80: note = Synthetic: >SARSCoV2-cand-5540-5619
  source 1..80: mol_type = other DNA
aacccttaagggtgtagaagctgttatgtacatgggcacactttcttatgaacaatttaagaaaggtgttcagatacctt

SEQ ID NO: 3174 - DNA, 80 bp, synthetic construct
  misc_feature 1..80: note = Synthetic: >SARSCoV2-cand-5620-5699
  source 1..80: mol_type = other DNA
gtacgtgtggtaaacaagctacaaaatatctagtacaacaggagtcaccttttgttatgatgtcagcaccacctgctcag

SEQ ID NO: 3175 - DNA, 80 bp, synthetic construct
  misc_feature 1..80: note = Synthetic: >SARSCoV2-cand-5700-5779
  source 1..80: mol_type = other DNA
tatgaacttaagcatggtacatttacttgtgctagtgagtacactggtaattaccagtgtggtcactataaacatataac

SEQ ID NO: 3176 - DNA, 80 bp, synthetic construct
  misc_feature 1..80: note = Synthetic: >SARSCoV2-cand-5780-5859
  source 1..80: mol_type = other DNA
ttctaaagaaactttgtattgcatagacggtgctttacttacaaagtcctcagaatacaaaggtcctattacggatgttt

SEQ ID NO: 3177 - DNA, 80 bp, synthetic construct
  misc_feature 1..80: note = Synthetic: >SARSCoV2-cand-10980-11059
  source 1..80: mol_type = other DNA
agaacaatcaagggtacacaccactggttgttactcacaattttgacttcacttttagttttagtccagagtactcaatg

SEQ ID NO: 3178 - DNA, 80 bp, synthetic construct
  misc_feature 1..80: note = Synthetic: >SARSCoV2-cand-11060-11139
  source 1..80: mol_type = other DNA
gtctttgttcttttttttgtatgaaaatgcctttttaccttttgctatgggtattattgctatgtctgcttttgcaatga

SEQ ID NO: 3179 - DNA, 80 bp, synthetic construct
  misc_feature 1..80: note = Synthetic: >SARSCoV2-cand-11140-11219
  source 1..80: mol_type = other DNA
tgtttgtcaaacataagcatgcatttctctgtttgtttttgttaccttctcttgccactgtagcttattttaatatggtc

SEQ ID NO: 3180 - DNA, 80 bp, synthetic construct
  misc_feature 1..80: note = Synthetic: >SARSCoV2-cand-11220-11299
  source 1..80: mol_type = other DNA
tatatgcctgctagttgggtgatgcgtattatgacatggttggatatggttgatactagtttgtctggttttaagctaaa

SEQ ID NO: 3181 - DNA, 80 bp, synthetic construct
  misc_feature 1..80: note = Synthetic: >SARSCoV2-cand-11300-11379
  source 1..80: mol_type = other DNA
agactgtgttatgtatgcatcagctgtagtgttactaatccttatgacagcaagaactgtgtatgatgatggtgctagga

SEQ ID NO: 3182 - DNA, 80 bp, synthetic construct
  misc_feature 1..80: note = Synthetic: >SARSCoV2-cand-11380-11459
  source 1..80: mol_type = other DNA
gagtgtggacacttatgaatgtcttgacactcgtttataaagtttattatggtaatgctttagatcaagccatttccatg

SEQ ID NO: 3183 - DNA, 80 bp, synthetic construct
  misc_feature 1..80: note = Synthetic: >SARSCoV2-cand-11460-11539
  source 1..80: mol_type = other DNA
tgggctcttataatctctgttacttctaactactcaggtgtagttacaactgtcatgtttttggccagaggtattgtttt

SEQ ID NO: 3184 - DNA, 80 bp, synthetic construct
  misc_feature 1..80: note = Synthetic: >SARSCoV2-cand-11540-11619
  source 1..80: mol_type = other DNA
tatgtgtgttgagtattgccctattttcttcataactggtaatacacttcagtgtataatgctagtttattgtttcttag

SEQ ID NO: 3185 - DNA, 80 bp, synthetic construct
  misc_feature 1..80: note = Synthetic: >SARSCoV2-cand-11620-11699
  source 1..80: mol_type = other DNA
gctatttttgtacttgttactttggcctcttttgtttactcaaccgctactttagactgactcttggtgtttatgattac

SEQ ID NO: 3186 - DNA, 80 bp, synthetic construct
  misc_feature 1..80: note = Synthetic: >SARSCoV2-cand-11700-11779
  source 1..80: mol_type = other DNA
ttagtttctacacaggagtttagatatatgaattcacagggactactcccacccaagaatagcatagatgccttcaaact

SEQ ID NO: 3187 - DNA, 80 bp, synthetic construct
  misc_feature 1..80: note = Synthetic: >SARSCoV2-cand-11780-11859
  source 1..80: mol_type = other DNA
caacattaaattgttgggtgttggtggcaaaccttgtatcaaagtagccactgtacagtctaaaatgtcagatgtaaagt

SEQ ID NO: 3188 - DNA, 80 bp, synthetic construct
  misc_feature 1..80: note = Synthetic: >SARSCoV2-cand-11860-11939
  source 1..80: mol_type = other DNA
gcacatcagtagtcttactctcagttttgcaacaactcagagtagaatcatcatctaaattgtgggctcaatgtgtccag

SEQ ID NO: 3189 - DNA, 80 bp, synthetic construct
  misc_feature 1..80: note = Synthetic: >SARSCoV2-cand-11940-12019
  source 1..80: mol_type = other DNA
ttacacaatgacattctcttagctaaagatactactgaagcctttgaaaaaatggtttcactactttctgttttgctttc

SEQ ID NO: 3190 - DNA, 80 bp, synthetic construct
  misc_feature 1..80: note = Synthetic: >SARSCoV2-cand-12020-12099
  source 1..80: mol_type = other DNA
catgcagggtgctgtagacataaacaagctttgtgaagaaatgctggacaacagggcaaccttacaagctatagcctcag

SEQ ID NO: 3191 - DNA, 80 bp, synthetic construct
  misc_feature 1..80: note = Synthetic: >SARSCoV2-cand-12100-12179
  source 1..80: mol_type = other DNA
agtttagttcccttccatcatatgcagcttttgctactgctcaagaagcttatgagcaggctgttgctaatggtgattct

SEQ ID NO: 3192 - DNA, 80 bp, synthetic construct
  misc_feature 1..80: note = Synthetic: >SARSCoV2-cand-12180-12259
  source 1..80: mol_type = other DNA
gaagttgttcttaaaaagttgaagaagtctttgaatgtggctaaatctgaatttgaccgtgatgcagccatgcaacgtaa

SEQ ID NO: 3193 - DNA, 80 bp, synthetic construct
  misc_feature 1..80: note = Synthetic: >BatCoV1A-cand-16260-16339
  source 1..80: mol_type = other DNA
actggttcacctgatgttgaagtttttaatactttacccacatctgaatggaatgatgctaaggattataggcttgctaa

SEQ ID NO: 3194 - DNA, 80 bp, synthetic construct
  misc_feature 1..80: note = Synthetic: >MsbCoV1-cand-16080-16159
  source 1..80: mol_type = other DNA
cactggttcacctgacgttgaagtttttaatactttggctacgtctgaatggaatgatgctaaggattataggcttgcta

SEQ ID NO: 3195 - DNA, 80 bp, synthetic construct
  misc_feature 1..80: note = Synthetic: >MbCoV1-cand-16100-16179
  source 1..80: mol_type = other DNA
cctgacgttgaagtttttaatactttggctacgtctgaatggaatgatgctaaggattataggcttgctaatgaggttaa

SEQ ID NO: 3196 - DNA, 80 bp, synthetic construct
  misc_feature 1..80: note = Synthetic: >HghCoV1-cand-18690-18769
  source 1..80: mol_type = other DNA
ttgtacgtttgtttgttgggctcatggctttgaattaacatctgcatcttatttttgcaagattggtaaagaacagaagt

SEQ ID NO: 3197 - DNA, 80 bp, synthetic construct
  misc_feature 1..80: note = Synthetic: >HKU31-cand-18760-18839
  source 1..80: mol_type = other DNA
tgtacgtttgtttgttgggctcatggctttgaattaacatctgcatcttatttttgcaagattggtaaagagcagaagtg

SEQ ID NO: 3198 - DNA, 80 bp, synthetic construct
  misc_feature 1..80: note = Synthetic: >SARSCoV2-cand-26290-26369
  source 1..80: mol_type = other DNA
acttctttttcttgctttcgtggtattcttgctagttacactagccatccttactgcgcttcgattgtgtgcgtactgct

SEQ ID NO: 3199 - DNA, 80 bp, synthetic construct
  misc_feature 1..80: note = Synthetic: >SARSCoV-cand-26220-26299
  source 1..80: mol_type = other DNA
tttcttgctttcgtggtattcttgctagtcacactagccatccttactgcgcttcgattgtgtgcgtactgctgcaatat

SEQ ID NO: 3200 - DNA, 80 bp, synthetic construct
  misc_feature 1..80: note = Synthetic: >SARSRC-cand-26120-26199
  source 1..80: mol_type = other DNA
tttcgtggtattcttgctagttacactagccatccttactgcgcttcgattgtgtgcgtactgctgcaatattgttaacg

SEQ ID NO: 3201 - DNA, 80 bp, synthetic construct
  misc_feature 1..80: note = Synthetic: >HKU24-cand-30280-30359
  source 1..80: mol_type = other DNA
gtgacacctgatatggctgatcaaattgcttcccttgtgctggccaagctgaacaaagagtccggcaaaccagtgcaagt

SEQ ID NO: 3202 - DNA, 80 bp, synthetic construct
  misc_feature 1..80: note = Synthetic: >BetaCoV1-cand-30740-30819
  source 1..80: mol_type = other DNA
gatatggctgatcagattgcttcccttgtgcttgctaagctgaacaaagagtccggcaaaccagtgcaagtcacaaagca

SEQ ID NO: 3203 - DNA, 80 bp, synthetic construct
  misc_feature 1..80: note = Synthetic: >BetaSp-cand-30860-30939
  source 1..80: mol_type = other DNA
tggctgatcagattgcttcccttgtgcttgctaagctgaacaaagagtccggcaaaccagtgcaagtcacaaagcagaca

SEQ ID NO: 3204 - DNA, 80 bp, synthetic construct
  misc_feature 1..80: note = Synthetic: >SARSRC-cand-26670-26749
  source 1..80: mol_type = other DNA
agaaacaaacattcttctcaatgtgcctcttcgagggacaattgtaaccagaccgctcatggaaagtgaacttgtcattg

SEQ ID NO: 3205 - DNA, 80 bp, synthetic construct
  misc_feature 1..80: note = Synthetic: >BtRl_BetaCoV-cand-26650-26729
  source 1..80: mol_type = other DNA
cccagaaacaaacattcttctcaatgtgcctcttcgggggacaattgtgaccagaccgctcatggaaagtgaacttgtca

SEQ ID NO: 3206 - DNA, 80 bp, synthetic construct
  misc_feature 1..80: note = Synthetic: >SARSCoV-cand-26780-26859
  source 1..80: mol_type = other DNA
ccagaaacaaacattcttctcaatgtgcctctccgggggacaattgtgaccagaccgctcatggaaagtgaacttgtcat

SEQ ID NO: 3207 - DNA, 80 bp, synthetic construct
  misc_feature 1..80: note = Synthetic: >MinkCoV1-cand-12330-12409
  source 1..80: mol_type = other DNA
tgcaatggtacaagccctgattgtgttacaagggcttttgatgtttacaatgctgatgtggcatgcattggcaagtttct

SEQ ID NO: 3208 - DNA, 80 bp, synthetic construct
  misc_feature 1..80: note = Synthetic: >HKU2-cand-24560-24639
  source 1..80: mol_type = other DNA
agaaactcaactaaactatgtttctgaagattgttgaggatgatggtttgttcatcaacacagtcttgtggcttttagtg

SEQ ID NO: 3209 - DNA, 80 bp, synthetic construct
  misc_feature 1..80: note = Synthetic: >229ER-cand-17200-17279
  source 1..80: mol_type = other DNA
gctgttcagataggtagcaacaatgtttgcacttatgaacatgtgatctcatatatgggtttcaggtttgatgttagtgt

SEQ ID NO: 3210 - DNA, 80 bp, synthetic construct
  misc_feature 1..80: note = Synthetic: >229E-cand-17220-17299
  source 1..80: mol_type = other DNA
agataggtagcaacaatgtttgcacttatgaacatgtgatttcatatatgggtttcaggtttgatgttagtatgcctggc

SEQ ID NO: 3211 - DNA, 80 bp, synthetic construct
  misc_feature 1..80: note = Synthetic: >BetaCoV1-cand-10300-10379
  source 1..80: mol_type = other DNA
atcagtttctacatcattcttgcaatcaggcattgctaagattgtttgtcctacatctaaagttgagccttgtatcgtta

SEQ ID NO: 3212 - DNA, 80 bp, synthetic construct
  misc_feature 1..80: note = Synthetic: >MsbCoV1-cand-20320-20399
  source 1..80: mol_type = other DNA
actatgtgtatacctcattctatgagagtattacatttaggtgccggttctgacaaaggtgtagctcctggtactagtgt

SEQ ID NO: 3213 - DNA, 80 bp, synthetic construct
  misc_feature 1..80: note = Synthetic: >MbCoV1-cand-20340-20419
  source 1..80: mol_type = other DNA
tacctcattctatgagagtattacatttaggtgctggttctgacaaaggcgtagcacctggtactagtgtactaagaaga

SEQ ID NO: 3214 - DNA, 80 bp, synthetic construct
  misc_feature 1..80: note = Synthetic: >HKU5R-cand-1130-1209
  source 1..80: mol_type = other DNA
acactcattcacaatcggctcagagatccaagtgattgcaccctcaacagcggtgcaagctaatggacatctcaatctca

SEQ ID NO: 3215 - DNA, 80 bp, synthetic construct
  misc_feature 1..80: note = Synthetic: >Sk512R-cand-5410-5489
  source 1..80: mol_type = other DNA
acactctagatcacacactgtttgtctttgacaacaatgtggttaatggcaaacgtgttttgcgcactagcgacaataat

SEQ ID NO: 3216 - DNA, 80 bp, synthetic construct
  misc_feature 1..80: note = Synthetic: >Sb512-cand-5420-5499
  source 1..80: mol_type = other DNA
ctctagatcacacaatgtttgtctttgacaacaatgtggttaatggcaaacgtgttttgcgcactagcgacaataattgc

SEQ ID NO: 3217 - DNA, 80 bp, synthetic construct
  misc_feature 1..80: note = Synthetic: >Alpha2-cand-8770-8849
  source 1..80: mol_type = other DNA
tatgctcatttagcccgtgctttattagattatagtgctaatcgtaatgatattttgtacacaccaccaactgtcagtgt

SEQ ID NO: 3218 - DNA, 80 bp, synthetic construct
  misc_feature 1..80: note = Synthetic: >AlphaMink-cand-8780-8859
  source 1..80: mol_type = other DNA
ttatgctcatttagcacgtgctttattggattatagtgctaatcgtaatgatattttgtacacaccaccaactgtcagtg

SEQ ID NO: 3219 - DNA, 80 bp, synthetic construct
  misc_feature 1..80: note = Synthetic: >SARSRC-cand-5050-5129
  source 1..80: mol_type = other DNA
acactgcgtagtgaagcatttgaatattaccacactctcgacgagagttttcttggtagatacatgtctgctttgaatca

SEQ ID NO: 3220 - DNA, 80 bp, synthetic construct
  misc_feature 1..80: note = Synthetic: >BtRl_BetaCoV-cand-5030-5109
  source 1..80: mol_type = other DNA
cactgcgtagtgaagcatttgaatattaccatactctcgatgagagttttcttggtagatacatgtctgctttaaaccac

SEQ ID NO: 3221 - DNA, 80 bp, synthetic construct
  misc_feature 1..80: note = Synthetic: >HKU20_FJ376622-cand-15630-15709
  source 1..80: mol_type = other DNA
tgatataatggtgcatgctggcgctgatgtaatgctagacatgtgctaccgctgcccacgtgaaatcgtagatacagtgt

SEQ ID NO: 3222 - DNA, 80 bp, synthetic construct
  misc_feature 1..80: note = Synthetic: >Sb512-cand-25090-25169
  source 1..80: mol_type = other DNA
tctcgtctattgtttttgacctactactcatggcgttataaaacttataaatttcttatttacaactcttccacacttat

SEQ ID NO: 3223 - DNA, 80 bp, synthetic construct
  misc_feature 1..80: note = Synthetic: >HKU5R-cand-16320-16399
  source 1..80: mol_type = other DNA
gggtgtatttacagtacatagaaaaactgtataaagacctcacaggacacatgcttgatagttactctgtcatgctatgt

SEQ ID NO: 3224 - DNA, 80 bp, synthetic construct
  misc_feature 1..80: note = Synthetic: >HKU5-cand-16320-16399
  source 1..80: mol_type = other DNA
tctgggtgtatttacagtacatagaaaaactgtataaagacctcacaggacacatgcttgatagttactctgtcatgcta

SEQ ID NO: 3225 - DNA, 80 bp, synthetic construct
  misc_feature 1..80: note = Synthetic: >HKU5R-cand-11190-11269
  source 1..80: mol_type = other DNA
gttgtcatgcaaagtggtgtgaagcgtatctcttacggcctggtacattggttgcttacaacattgctactggcatatgt

SEQ ID NO: 3226 - DNA, 80 bp, synthetic construct
  misc_feature 1..80: note = Synthetic: >HKU5-cand-11200-11279
  source 1..80: mol_type = other DNA
tgcaaagtggtgtgaagcgtatctcttacggtctggtgcattggttgcttacaacattgctactgacatatgtggctacg

SEQ ID NO: 3227 - DNA, 80 bp, synthetic construct
  misc_feature 1..80: note = Synthetic: >Sk512R-cand-19520-19599
  source 1..80: mol_type = other DNA
gtttctagttcagatagtacactcaaatcgtgtacagttacttatgttgacaaccctagtagtaagatggtttgtacata

SEQ ID NO: 3228 - DNA, 80 bp, synthetic construct
  misc_feature 1..80: note = Synthetic: >Sparrow-cand-1390-1469
  source 1..80: mol_type = other DNA
gtcattggtattgcacttaaacagcagggcacagcggctaagaaactcaatgtagttttccacgccaaacctgatgatgt

SEQ ID NO: 3229 - DNA, 80 bp, synthetic construct
  misc_feature 1..80: note = Synthetic: >Quail-cand-1360-1439
  source 1..80: mol_type = other DNA
cgtcattggtattgcacttaaacagcagggcactgcgactaagagactcaatgtagtctttcacgcccagcctaatgatg

SEQ ID NO: 3230 - DNA, 80 bp, synthetic construct
  misc_feature 1..80: note = Synthetic: >MinkCoV1-cand-15150-15229
  source 1..80: mol_type = other DNA
gtcatgggaacaaaacaccatttcatcatgtctcttacaccatatgtatgtagttacaatggttgtaatattaatgatgt

SEQ ID NO: 3231 - DNA, 80 bp, synthetic construct
  misc_feature 1..80: note = Synthetic: >AlphaMink-cand-15120-15199
  source 1..80: mol_type = other DNA
atcacgtcatgggaacaaaacaccatttcatcatgtctcttacaccatatgtatgtagttacaatggttgtaacattaat

SEQ ID NO: 3232 - DNA, 80 bp, synthetic construct
  misc_feature 1..80: note = Synthetic: >BetaSp-cand-27180-27259
  source 1..80: mol_type = other DNA
cctttttcggcggcagcaggtgtcccatttactatgagtgttcaatatagaattaatggtcttggtgtcactatggatgt

SEQ ID NO: 3233 - DNA, 80 bp, synthetic construct
  misc_feature 1..80: note = Synthetic: >BetaCoV1-cand-27070-27149
  source 1..80: mol_type = other DNA
tcggcggcagcaggtgtcccatttactatgagtgttcaatatagaattaatggtcttggtgtcactatggatgttttgaa

SEQ ID NO: 3234 - DNA, 80 bp, synthetic construct
  misc_feature 1..80: note = Synthetic: >BetaCoV1-cand-29950-30029
  source 1..80: mol_type = other DNA
ttatcggctgccatcctctcaaaaagggaatggcatggacaccgcattgttgagaaataatgtctaaacttaaaggatgt

SEQ ID NO: 3235 - DNA, 80 bp, synthetic construct
  misc_feature 1..80: note = Synthetic: >BetaSp-cand-30060-30139
  source 1..80: mol_type = other DNA
cggcaattatcggctgccatcctctcaaaaagggaatggcatggacaccgcattgttgagaaataatgtctaaacttaaa

SEQ ID NO: 3236 - DNA, 80 bp, synthetic construct
  misc_feature 1..80: note = Synthetic: >MbCoV1-cand-25650-25729
  source 1..80: mol_type = other DNA
atgtgaagttcggacctcataatattacttttctatctaacaatcaacttcatgttgatgttagaggctatactaatcta

SEQ ID NO: 3237 - DNA, 80 bp, synthetic construct
  misc_feature 1..80: note = Synthetic: >HKU31-cand-16520-16599
  source 1..80: mol_type = other DNA
atcatgttatagcaacccctcataaaatggttctgtcagtatcaccctatgtttgtaacgcaccaggttgtgatgtttca

SEQ ID NO: 3238 - DNA, 80 bp, synthetic construct
  misc_feature 1..80: note = Synthetic: >HghCoV1-cand-16450-16529
  source 1..80: mol_type = other DNA
gatcacgttatagcaacccctcataaaatggttctgtcagtttcaccctatgtttgtaacgcaccaggttgtgatgtttc

SEQ ID NO: 3239 - DNA, 80 bp, synthetic construct
  misc_feature 1..80: note = Synthetic: >HKU4-cand-4850-4929
  source 1..80: mol_type = other DNA
ctagggccgcacagcaagttaatatcgaagtgcttgttacaatcgatggtgttaatttcagaactgttattctgaatgat

SEQ ID NO: 3240 - DNA, 80 bp, synthetic construct
  misc_feature 1..80: note = Synthetic: >HKU4R-cand-4840-4919
  source 1..80: mol_type = other DNA
ttctagagccgcacagcaagttaatatcgaagtgcttgtcacaatcgatggtgttaatttcagaactgttattctgaatg

SEQ ID NO: 3241 - DNA, 80 bp, synthetic construct
  misc_feature 1..80: note = Synthetic: >SARSRC-cand-20510-20589
  source 1..80: mol_type = other DNA
atcatttatgctttggtgtaaagatggacatgttgaaaccttttacccaaaattacaagcgagtcaggcatggcaaccgg

SEQ ID NO: 3242 - DNA, 80 bp, synthetic construct
  misc_feature 1..80: note = Synthetic: >BM48_31-cand-20430-20509
  source 1..80: mol_type = other DNA
ttatgctttggtgtaaagatggacatgttgagacattttacccaaaactgcaagcaaatcaaacatggcaacctggtgtc

SEQ ID NO: 3243 - DNA, 80 bp, synthetic construct
  misc_feature 1..80: note = Synthetic: >HKU5R-cand-9280-9359
  source 1..80: mol_type = other DNA
atccttactgctatgaccctactgttctgcctggtgcttctgcatatgatcaaatgaagccccatgttaggtatgacatg

SEQ ID NO: 3244 - DNA, 80 bp, synthetic construct
  misc_feature 1..80: note = Synthetic: >HKU5-cand-9280-9359
  source 1..80: mol_type = other DNA
ttaacccctactgctatgaccctactgttctgcctggcgcttctgcgtatgatcaaatgaagccccatgttaggtatgac

SEQ ID NO: 3245 - DNA, 80 bp, synthetic construct
  misc_feature 1..80: note = Synthetic: >MbCoV1-cand-18660-18739
  source 1..80: mol_type = other DNA
atgtcaagactttggaatacgactatttaattcatggtcaaatggatggactctgtttgttctggaattgcaatgtcgat

SEQ ID NO: 3246 - DNA, 80 bp, synthetic construct
  misc_feature 1..80: note = Synthetic: >MsbCoV1-cand-18640-18719
  source 1..80: mol_type = other DNA
ttaaattctaatgtcaagactttggagtacgactatttaattcatggtcaaatggatggactctgtttgttctggaattg

SEQ ID NO: 3247 - DNA, 80 bp, synthetic construct
  misc_feature 1..80: note = Synthetic: >AcCoV_JC34-cand-16370-16449
  source 1..80: mol_type = other DNA
atcggcccagatgtgttcttgagcaagtgttataggtgcccagcagaggttgttaatagtgtttcatcccttgtttatga

SEQ ID NO: 3248 - DNA, 80 bp, synthetic construct
  misc_feature 1..80: note = Synthetic: >Lucheng19-cand-16720-16799
  source 1..80: mol_type = other DNA
gcccagatgtgttcttgaacaagtgctataggtgcccagcagaagttgttaatagtgtttcatcccttgtttatgaaaat

SEQ ID NO: 3249 - DNA, 80 bp, synthetic construct
  misc_feature 1..80: note = Synthetic: >AlphaSp-cand-8440-8519
  source 1..80: mol_type = other DNA
atcgttttgcctgaaattattaccagaggttttggttttaggacaattaagacacaggctatgacttattgtcgtaccgg

SEQ ID NO: 3250 - DNA, 80 bp, synthetic construct
  misc_feature 1..80: note = Synthetic: >Sk512R-cand-8440-8519
  source 1..80: mol_type = other DNA
ttttgcctgaaattattaccagaggttttggtattaggacaattaagacacaggctatgacttattgtcgtaccggtgaa

SEQ ID NO: 3251 - DNA, 80 bp, synthetic construct
  misc_feature 1..80: note = Synthetic: >BetaCoV1-cand-29310-29389
  source 1..80: mol_type = other DNA
atctaaacattatgagtggtcaagcaacaaccccagagccagtctatagctggactgcggatgaggcaattagattccta

SEQ ID NO: 3252 - DNA, 80 bp, synthetic construct
  misc_feature 1..80: note = Synthetic: >HKU31-cand-19320-19399
  source 1..80: mol_type = other DNA
tgccatggcttctgattttagtgatggtttgtgtttattttggaattgtaatgttccattatatccaaataatgctgtag

SEQ ID NO: 3253 - DNA, 80 bp, synthetic construct
  misc_feature 1..80: note = Synthetic: >AlphaMink-cand-12950-13029
  source 1..80: mol_type = other DNA
atgcccattatgggtatgacatcatgtttagagtctgaaaactttgttaagagtgacatttatggttctgattataagca

SEQ ID NO: 3254 - DNA, 80 bp, synthetic construct
  misc_feature 1..80: note = Synthetic: >Alpha2-cand-12940-13019
  source 1..80: mol_type = other DNA
tgcctattatgggtatgacatcatgtttagattctgagaattttgttaagagtgacatttatggttctgattataagcag

SEQ ID NO: 3255 - DNA, 80 bp, synthetic construct
  misc_feature 1..80: note = Synthetic: >BetaSp-cand-25980-26059
  source 1..80: mol_type = other DNA
atgcctggacttcttttggcgccgacacttgtttgtcgggcggtaattgtcaagtctttgcaaatgttctgcttaataat

SEQ ID NO: 3256 - DNA, 80 bp, synthetic construct
  misc_feature 1..80: note = Synthetic: >BetaCoV1-cand-25870-25949
  source 1..80: mol_type = other DNA
ggacttcttttggcgccgacacttgtttgtcgggcggtaattgtcaagtctttgcaaatgttctgcttaataatgtaaat

SEQ ID NO: 3257 - DNA, 80 bp, synthetic construct
  misc_feature 1..80: note = Synthetic: >WIV16-cand-29560-29639
  source 1..80: mol_type = other DNA
caaggaactgattataaacattggccgcaaattgcacaatttgctccaagtgcctctgcattcttcggaatgtcacgcat

SEQ ID NO: 3258 - DNA, 80 bp, synthetic construct
  misc_feature 1..80: note = Synthetic: >SARSRC-cand-28970-29049
  source 1..80: mol_type = other DNA
tgattataaacactggccgcaaatagcacagtttgctccaagtgcctctgcattcttcggaatgtcacgcattagcatgg

SEQ ID NO: 3259 - DNA, 80 bp, synthetic construct
  misc_feature 1..80: note = Synthetic: >Sk512R-cand-4290-4369
  source 1..80: mol_type = other DNA
attgctaaggctctggatgatcttactaagggtgaattgcaggtgttgtctaaccagtatgttaatcgtaatggtagcat

SEQ ID NO: 3260 - DNA, 80 bp, synthetic construct
  misc_feature 1..80: note = Synthetic: >Sb512-cand-4300-4379
  source 1..80: mol_type = other DNA
gctaaggctctggatgatcttactaagggtgaattgcaggtgttgtctaaccagtatgttagtcgtaatggtagcattaa

SEQ ID NO: 3261 - DNA, 80 bp, synthetic construct
  misc_feature 1..80: note = Synthetic: >HKU31-cand-3240-3319
  source 1..80: mol_type = other DNA
atgctatattccccttgagtgatgaagcagagggtgatgtagatgtagaagaacaatctctagttgatgatgcagatgta

SEQ ID NO: 3262 - DNA, 80 bp, synthetic construct
  misc_feature 1..80: note = Synthetic: >HghCoV1-cand-3240-3319
  source 1..80: mol_type = other DNA
ctatattccccttgagtgatgaagcagagggtgatgtagttgtagaagaacaatctctagttgatgatgcaggtgtagtc

SEQ ID NO: 3263 - DNA, 80 bp, synthetic construct
  misc_feature 1..80: note = Synthetic: >SARSRC-cand-28180-28259
  source 1..80: mol_type = other DNA
gtggtgcacggccaaaacaacgccgaccccagggtttacccaataatactgcgtcttggttcacagctctcactcagcat

SEQ ID NO: 3264 - DNA, 80 bp, synthetic construct
  misc_feature 1..80: note = Synthetic: >BtRl_BetaCoV-cand-28170-28249
  source 1..80: mol_type = other DNA
ggtgcacggccaaagcagcgccgaccccaaggtttacccaataatactgcgtcttggttcacagctctcactcagcatgg

SEQ ID NO: 3265 - DNA, 80 bp, synthetic construct
  misc_feature 1..80: note = Synthetic: >HKU5R-cand-20960-21039
  source 1..80: mol_type = other DNA
atgctgcctaactataagcagtcaattccgatgccgcaaggtgtccatatgaatatagcaaaatatatgcaattgtgcca

SEQ ID NO: 3266 - DNA, 80 bp, synthetic construct
  misc_feature 1..80: note = Synthetic: >HKU5-cand-20970-21049
  source 1..80: mol_type = other DNA
tgctgcctaattacaagcagtcaatcccgatgccgcaaggcgtccatatgaatatagcaaaatatatgcaattgtgccag

SEQ ID NO: 3267 - DNA, 80 bp, synthetic construct
  misc_feature 1..80: note = Synthetic: >BtRl_BetaCoV-cand-5270-5349
  source 1..80: mol_type = other DNA
atgctgctaacttttgtgcactcatactcgcttatagtaataagactgttggcgagttgggtgatgtcagagaaacaatg

SEQ ID NO: 3268 - DNA, 80 bp, synthetic construct
  misc_feature 1..80: note = Synthetic: >Anlong-cand-21470-21549
  source 1..80: mol_type = other DNA
tatgtcataccttttggtcacattgaccaaccatattattgcttcaccacattttatattaatgagacaactggcactac

SEQ ID NO: 3269 - DNA, 80 bp, synthetic construct
  misc_feature 1..80: note = Synthetic: >Sb512-cand-18360-18439
  source 1..80: mol_type = other DNA
gtagtttgtaggtttgacacaagaatgcgttcaaccctcaatctagaaggctgtaatggtggttcgttgtatgtcaacaa

SEQ ID NO: 3270 - DNA, 80 bp, synthetic construct
  misc_feature 1..80: note = Synthetic: >BtSk_AlphaCoV-cand-18310-18389
  source 1..80: mol_type = other DNA
tctgtagtttgtaggtttgacacaagaatgcgttctaccctcaatctagaaggctgtaatggtggttcgttgtatgtcaa

SEQ ID NO: 3271 - DNA, 80 bp, synthetic construct
  misc_feature 1..80: note = Synthetic: >HKU31-cand-18520-18599
  source 1..80: mol_type = other DNA
tgtggtactaatgtgcctctccagttaggattttcaacaggtgtgaattttgttgttcaacctgttggagttgtggatac

SEQ ID NO: 3272 - DNA, 80 bp, synthetic construct
  misc_feature 1..80: note = Synthetic: >HghCoV1-cand-18450-18529
  source 1..80: mol_type = other DNA
gtgtggtactaatgtgcctctccagttaggattttcaacaggcgtgaattttgttgttcaacctgttggcgttgtggata

SEQ ID NO: 3273 - DNA, 80 bp, synthetic construct
  misc_feature 1..80: note = Synthetic: >HKU4-cand-4130-4209
  source 1..80: mol_type = other DNA
gtatttttagtgtagaccctaaagtgtcttttgagtatcttctggctaatgttactacaactacttatgttgttgttaac

SEQ ID NO: 3274 - DNA, 80 bp, synthetic construct
  misc_feature 1..80: note = Synthetic: >HKU4R-cand-4120-4199
  source 1..80: mol_type = other DNA
tggtatttttagtgtagaccctaaagtgtcttttgagtatcttctggctaatgttactacaactacttatgttgttgtta

SEQ ID NO: 3275 - DNA, 80 bp, synthetic construct
  misc_feature 1..80: note = Synthetic: >HKU4R-cand-13230-13309
  source 1..80: mol_type = other DNA
gtggaacaccattatctaattatgttaagatgcttgcacctaaaacaggtactggcgtggctatttcagttaagccagaa

SEQ ID NO: 3276 - DNA, 80 bp, synthetic construct
  misc_feature 1..80: note = Synthetic: >HKU4-cand-13230-13309
  source 1..80: mol_type = other DNA
tggttctggtggaacaccattgtccaattatgttaagatgcttgcacctaaaacaggtactggcgtggctatttcagtta

SEQ ID NO: 3277 - DNA, 80 bp, synthetic construct
  misc_feature 1..80: note = Synthetic: >HKU5-cand-10720-10799
  source 1..80: mol_type = other DNA
gtggctcttgtggtagtgttggttacactcaagaaggaaatgtgatcaacttttgctatatgcatcagatggagttatca

SEQ ID NO: 3278 - DNA, 80 bp, synthetic construct
  misc_feature 1..80: note = Synthetic: >HKU5R-cand-10710-10789
  source 1..80: mol_type = other DNA
ttcttatgtggctcttgtggtagtgttggttacactcaagaagggaatgtgatcaacttttgctatatgcatcagatgga

SEQ ID NO: 3279 - DNA, 80 bp, synthetic construct
  misc_feature 1..80: note = Synthetic: >BetaCoV1-cand-25070-25149
  source 1..80: mol_type = other DNA
gtggttaaatgatccacaggtaccatctccaatctcatgggagcgtaaaacatttagtaattgtaattttaatatgagta

SEQ ID NO: 3280 - DNA, 80 bp, synthetic construct
  misc_feature 1..80: note = Synthetic: >BetaSp-cand-25180-25259
  source 1..80: mol_type = other DNA
tgaacagtggttaaatgatccacaggtaccatctccaatctcatgggagcgtaaaacatttagtaattgtaattttaata

SEQ ID NO: 3281 - DNA, 80 bp, synthetic construct
  misc_feature 1..80: note = Synthetic: >HKU10-cand-22000-22079
  source 1..80: mol_type = other DNA
gtgtataaatgttttgttcgtattgatgcaattaatgctacaataaatttgtttgtgggtattttaccacctgttacaaa

SEQ ID NO: 3282 - DNA, 80 bp, synthetic construct
  misc_feature 1..80: note = Synthetic: >HKU10R-cand-21730-21809
  source 1..80: mol_type = other DNA
tgtgtataaatgttttgttcgtattgatgcaattaattcaacacaaagcttgtttgttggcattttaccacctattacaa

SEQ ID NO: 3283 - DNA, 80 bp, synthetic construct
  misc_feature 1..80: note = Synthetic: >HKU4-cand-10670-10749
  source 1..80: mol_type = other DNA
tggaattatcaaatggtacacatactggtagttcctttgatggtgttatgtatggtgcttttgaagataaacaaacacac

SEQ ID NO: 3284 - DNA, 80 bp, synthetic construct
  misc_feature 1..80: note = Synthetic: >MN531555-cand-0-79
  source 1..80: mol_type = other DNA
aaaatagatattaatatatatctattgcactagccttgagctagattttcaacttaacaaaacggacttaaaatacctac

SEQ ID NO: 3285 - DNA, 80 bp, synthetic construct
  misc_feature 1..80: note = Synthetic: >MN548285-cand-0-79
  source 1..80: mol_type = other DNA
aagtgtgatataaatatatatcatacatactagccttgtgctagatttccaacttaacaaaacggacttaaatacctaca

SEQ ID NO: 3286 - DNA, 80 bp, synthetic construct
  misc_feature 1..80: note = Synthetic: >MK618759-cand-240-319
  source 1..80: mol_type = other DNA
agcgtcctgcaggcgccgtggttgattcgagtgcgaagaacctctggttcatctagcggtacgcgggtgtgtggaagtag

SEQ ID NO: 3287 - DNA, 80 bp, synthetic construct
  misc_feature 1..80: note = Synthetic: >LC061274-cand-2640-2719
  source 1..80: mol_type = other DNA
gataatgtttatatggctaaggctggtgataaatattatcctgtagtggtagataagcaggcagggcttttggatcaggc

SEQ ID NO: 3288 - DNA, 80 bp, synthetic construct
  misc_feature 1..80: note = Synthetic: >KU556806-cand-14600-14679
  source 1..80: mol_type = other DNA
atgatggtgttgtttgttataacaacacacttgccaaacaaggtcttgtagcagatatttctggttttagagaagttctc

SEQ ID NO: 3289 - DNA, 80 bp, synthetic construct
  misc_feature 1..80: note = Synthetic: >MT114540-cand-27280-27359
  source 1..80: mol_type = other DNA
atgacagtgtagaacaagctgttcttgctgcactcaaaaagttaggtgttgacacagaaaaacaacaacaacgctcgcgt

SEQ ID NO: 3290 - DNA, 80 bp, synthetic construct
  misc_feature 1..80: note = Synthetic: >AY692454-cand-15530-15609
  source 1..80: mol_type = other DNA
cagagacagtaaaagccacagaagaattacataagcaacaatttgctagtgcagaagtgagagaagtattctcagatcgt

SEQ ID NO: 3291 - DNA, 80 bp, synthetic construct
  misc_feature 1..80: note = Synthetic: >MT114542-cand-8830-8909
  source 1..80: mol_type = other DNA
gtaacaatgtgcttaatggcttgtggctgggagacgaagtcatctgtcctagacatgttattgctagtgataccacacgt

SEQ ID NO: 3292 - DNA, 80 bp, synthetic construct
  misc_feature 1..80: note = Synthetic: >MT114542-cand-14390-14469
  source 1..80: mol_type = other DNA
gatgatggagttgtgtgctacaacaaagattatgcagatctaggttatgtagctgacatcaatgcttttaaagcaacgct

SEQ ID NO: 3293 - DNA, 80 bp, synthetic construct
  misc_feature 1..80: note = Synthetic: >MK953937-cand-400-479
  source 1..80: mol_type = other DNA
agcgttgggctacgttctcgcacaaggtcggctatacgacgtttgtagggggtagtgccaaacaacccctgaggtgacag

SEQ ID NO: 3294 - DNA, 80 bp, synthetic construct
  misc_feature 1..80: note = Synthetic: >MT114544-cand-17910-17989
  source 1..80: mol_type = other DNA
tgtctttagaaggttgtaatggtggtgcattgtatgtcaataaccatgcctttcacacaccagcttatgatagaagagct

SEQ ID NO: 3295 - DNA, 80 bp, synthetic construct
  misc_feature 1..80: note = Synthetic: >MT114540-cand-17850-17929
  source 1..80: mol_type = other DNA
tgtctttagaaggttgtaatggtggtgcattgtatgtaaacaatcatgctttccacacaccagcttatgatagaagagca

SEQ ID NO: 3296 - DNA, 80 bp, synthetic construct
  misc_feature 1..80: note = Synthetic: >MN794188-cand-19710-19789
  source 1..80: mol_type = other DNA
aggaacactcctcgttgacaatgatattgtagattatgtgtctgatgcacatgtttctgtgctttcagattgcaataaat

SEQ ID NO: 3297 - DNA, 80 bp, synthetic construct
  misc_feature 1..80: note = Synthetic: >AY692454-cand-19770-19849
  source 1..80: mol_type = other DNA
agggacactccttgtcgataatgatattgtagactatgtgtctgatgcacatgtttctgtgctttcagattgcaataaat

SEQ ID NO: 3298 - DNA, 80 bp, synthetic construct
  misc_feature 1..80: note = Synthetic: >MN548285-cand-27560-27639
  source 1..80: mol_type = other DNA
aggggaagagctaaattttagtttaagttaagtttaattggctaaatatagttaaaatttataggctagtatagagttag

SEQ ID NO: 3299 - DNA, 80 bp, synthetic construct
  misc_feature 1..80: note = Synthetic: >SBB-788-cand-15840-15919
  source 1..80: mol_type = other DNA
ggcatgtcttattattgtaaggatcataagccgcctatatcatttcctttatgtgcaaatggtcaggtttttgggcttta

SEQ ID NO: 3300 - DNA, 80 bp, synthetic construct
  misc_feature 1..80: note = Synthetic: >SBB-122-cand-1880-1959
  source 1..80: mol_type = other DNA
aaacgtatggagcattctacagtcaacttagttgttgtagatgaagcagtgccattgtgcaaggatggtgtttctgttat

SEQ ID NO: 3301 - DNA, 80 bp, synthetic construct
  misc_feature 1..80: note = Synthetic: >SBB-041-cand-1880-1959
  source 1..80: mol_type = other DNA
agacgcatggagcattctacagtcaacttggttattgtagatgaatcagtgccattgtgcaaggatggtgtttctgttat

SEQ ID NO: 3302 - DNA, 80 bp, synthetic construct
  misc_feature 1..80: note = Synthetic: >SBB-797-cand-25200-25279
  source 1..80: mol_type = other DNA
tcgcgtggtctctattgtaatgggtaccatgttaaggggtctatagctgtttctgatacagctattatttatagtttatt

SEQ ID NO: 3303 - DNA, 80 bp, synthetic construct
  misc_feature 1..80: note = Synthetic: >SBB-726-cand-25200-25279
  source 1..80: mol_type = other DNA
acttcgcgtggtctctattgcaatgggtaccatgttaaggggtctatagctgtttctgatacagctattatttatagttt

SEQ ID NO: 3304 - DNA, 80 bp, synthetic construct
  misc_feature 1..80: note = Synthetic: >SBB-010-cand-2990-3069
  source 1..80: mol_type = other DNA
aaagaaattgaccctgtttacaaggtaaaacttgactttgagttcgagaatgatgacatcgtaaaagtctgcaagaaagt

SEQ ID NO: 3305 - DNA, 80 bp, synthetic construct
  misc_feature 1..80: note = Synthetic: >SBB-053-cand-3000-3079
  source 1..80: mol_type = other DNA
accctgtttacaaggtaaaacttgactttgagtttgataatgatgacatcgtaaaagtctgcaagaaagtcattggtaag

SEQ ID NO: 3306 - DNA, 80 bp, synthetic construct
  misc_feature 1..80: note = Synthetic: >SBB-747-cand-3030-3109
  source 1..80: mol_type = other DNA
aaagattgctgatcacgtttatattaaatgtgctgacatagttcaggaggcacgttctaatgcatatgcagtgcttgtta

SEQ ID NO: 3307 - DNA, 80 bp, synthetic construct
  misc_feature 1..80: note = Synthetic: >SBB-788-cand-3040-3119
  source 1..80: mol_type = other DNA
gatcacgtttatattaaatgtgctgacatagttcaggaggcacgttctaatgcatatgcagtgcttgttaatgctgctaa

SEQ ID NO: 3308 - DNA, 80 bp, synthetic construct
  misc_feature 1..80: note = Synthetic: >SBB-130-cand-7460-7539
  source 1..80: mol_type = other DNA
aaagttgtcaaccataatgtcttagttaaggaacaagtgcctattgtttggcttgcaagagattttaatgtgctttccga

SEQ ID NO: 3309 - DNA, 80 bp, synthetic construct
  misc_feature 1..80: note = Synthetic: >SBB-041-cand-7470-7549
  source 1..80: mol_type = other DNA
ttaaccataatgtcttagttaaggaacaagtgcctattgtttggcttgcaagagattttaatgtgctttccgaagaagga

SEQ ID NO: 3310 - DNA, 80 bp, synthetic construct
  misc_feature 1..80: note = Synthetic: >GCS-211-cand-17590-17669
  source 1..80: mol_type = other DNA
ctgattaccataatatgttttgtacaagagcttttgccatgcgtcatgtacgtggctggctcggtatggatgttgagggt

SEQ ID NO: 3311 - DNA, 80 bp, synthetic construct
  misc_feature 1..80: note = Synthetic: >GCS-227-cand-17580-17659
  source 1..80: mol_type = other DNA
taatgtacctgattaccataatatgttttgtacaagagcttttgccatgcgtcatgtacgtggctggctcggtatggatg

SEQ ID NO: 3312 - DNA, 80 bp, synthetic construct
  misc_feature 1..80: note = Synthetic: >GCS-227-cand-12870-12949
  source 1..80: mol_type = other DNA
accctgcaatggcactgacacagatcattgtgttagagcttttgacatttttaacaaagatgttgcatgtattggtaagt

SEQ ID NO: 3313 - DNA, 80 bp, synthetic construct
  misc_feature 1..80: note = Synthetic: >GCS-211-cand-12870-12949
  source 1..80: mol_type = other DNA
gaaccctgcaatggcactgacacagatcattgtgttagagcttttgacatttttaacaaagatgttgcatgtattggtaa

SEQ ID NO: 3314 - DNA, 80 bp, synthetic construct
  misc_feature 1..80: note = Synthetic: >GCS-227-cand-15350-15429
  source 1..80: mol_type = other DNA
accctgtgatactgcttgagcgatacgtctcattggctatagatgcttacccactgtccaagcatgaaaaaccagaatat

SEQ ID NO: 3315 - DNA, 80 bp, synthetic construct
  misc_feature 1..80: note = Synthetic: >GCS-211-cand-15350-15429
  source 1..80: mol_type = other DNA
agaccctgtgatactgcttgagcgatacgtctcattggctatagatgcttacccattgtccaagcatgaaaaaccagaat

SEQ ID NO: 3316 - DNA, 80 bp, synthetic construct
  misc_feature 1..80: note = Synthetic: >GCS-211-cand-23580-23659
  source 1..80: mol_type = other DNA
attataatggtatcatggtacttccaggtgttgtagaccctgagaaaatggccatgtatactggttcccttattggaggt

SEQ ID NO: 3317 - DNA, 80 bp, synthetic construct
  misc_feature 1..80: note = Synthetic: >GCS-227-cand-23570-23649
  source 1..80: mol_type = other DNA
tgctcagtattataatggtatcatggtacttccaggtgttgtagaccctgagaaaatggccatgtatactggttccctta

SEQ ID NO: 3318 - DNA, 80 bp, synthetic construct
  misc_feature 1..80: note = Synthetic: >GCS-227-cand-4410-4489
  source 1..80: mol_type = other DNA
acctgacacatggtgagttgcagaaattgtctaaccagtacatcaagaaacaaaaccacgttccaactggtcgtggtgtc

SEQ ID NO: 3319 - DNA, 80 bp, synthetic construct
  misc_feature 1..80: note = Synthetic: >GCS-211-cand-4410-4489
  source 1..80: mol_type = other DNA
tgacctgacacatggtgagttgcagaaattgtctaaccagtacatcaagaaacaaaaccacgttccaactggtcgtggtg

SEQ ID NO: 3320 - DNA, 80 bp, synthetic construct
  misc_feature 1..80: note = Synthetic: >SBB-010-cand-17450-17529
  source 1..80: mol_type = other DNA
tgcgtaagagaatagttcagatgtgctgtgattgtttgtctggtttgtcagatgtcctagtttttgtactatgggcaggt

SEQ ID NO: 3321 - DNA, 80 bp, synthetic construct
  misc_feature 1..80: note = Synthetic: >SBB-130-cand-17450-17529
  source 1..80: mol_type = other DNA
gtaagagaatagttcagatgtgctgtgattgtttatctggtctgtcagatgtcctagtttttgtactatgggcaggtggc

SEQ ID NO: 3322 - DNA, 80 bp, synthetic construct
  misc_feature 1..80: note = Synthetic: >SBB-120-cand-11440-11519
  source 1..80: mol_type = other DNA
acctgctgcaagtgcgactaagcttaatgttgttagtgctgacttagagtcatatcttaagatatgtaaggatggttgtg

SEQ ID NO: 3323 - DNA, 80 bp, synthetic construct
  misc_feature 1..80: note = Synthetic: >SBB-130-cand-11440-11519
  source 1..80: mol_type = other DNA
tgctgcaagtgcaactaagcttaacgttgttagtgcagacttagagtcatatcttaagatatgtaaggatggttgtgtac

SEQ ID NO: 3324 - DNA, 80 bp, synthetic construct
  misc_feature 1..80: note = Synthetic: >GCS-211-cand-22540-22619
  source 1..80: mol_type = other DNA
taactatgtcacttttaacagattatgtttttcaacccaacctttcgctgactcgtgccgtatgtattttcagtacaggt

SEQ ID NO: 3325 - DNA, 80 bp, synthetic construct
  misc_feature 1..80: note = Synthetic: >GCS-227-cand-22530-22609
  source 1..80: mol_type = other DNA
actttgaataactatgtcacttttaacagattatgtttttcaacccaacctttcgctgactcgtgccgtatgtattttca

SEQ ID NO: 3326 - DNA, 80 bp, synthetic construct
  misc_feature 1..80: note = Synthetic: >GCS-227-cand-24130-24209
  source 1..80: mol_type = other DNA
agattaatgagtgtgtcaagtcacaatcatccaggtttgggttttgtggcaatggcacgcatttattctccattgtcaac

SEQ ID NO: 3327 - DNA, 80 bp, synthetic construct
  misc_feature 1..80: note = Synthetic: >GCS-211-cand-24140-24219
  source 1..80: mol_type = other DNA
gagtgtgtcaagtcacaatcatccaggtttgggttttgtggcaatggcacgcatttattctccattgtcaactctgcacc

SEQ ID NO: 3328 - DNA, 80 bp, synthetic construct
  misc_feature 1..80: note = Synthetic: >GCS-227-cand-21490-21569
  source 1..80: mol_type = other DNA
gtcgcacgttctttgtgtcaaccaattcgcttggcaatattactcgctatcaggcttgcaatgattgtgttggttttgct

SEQ ID NO: 3329 - DNA, 80 bp, synthetic construct
  misc_feature 1..80: note = Synthetic: >GCS-211-cand-21500-21579
  source 1..80: mol_type = other DNA
ttctttgtgtcaaccaattcgcttggcaatattactcgctatcaggcttgcaatgattgtgttggttttgctgaaaacat

SEQ ID NO: 3330 - DNA, 80 bp, synthetic construct
  misc_feature 1..80: note = Synthetic: >GCS-227-cand-12390-12469
  source 1..80: mol_type = other DNA
gtgctaccatccgtttacaggctggtaaacaaactgaacttgcctctaacagttctttactcacattgtgtgcatttgct

SEQ ID NO: 3331 - DNA, 80 bp, synthetic construct
  misc_feature 1..80: note = Synthetic: >GCS-211-cand-12400-12479
  source 1..80: mol_type = other DNA
atccgtttacaggctggtaaacaaactgaacttgcctctaacagttctttactcacattgtgtgcatttgcttgtgaccc

SEQ ID NO: 3332 - DNA, 80 bp, synthetic construct
  misc_feature 1..80: note = Synthetic: >GCS-211-cand-23100-23179
  source 1..80: mol_type = other DNA
tagaagctgcggatggacctgcagatatcatacccatacaacacggcaacgtcagtatacctgttaattttacaattgct

SEQ ID NO: 3333 - DNA, 80 bp, synthetic construct
  misc_feature 1..80: note = Synthetic: >GCS-227-cand-23090-23169
  source 1..80: mol_type = other DNA
tacatttttagaagctgcggatggacctgcagatattatacccatacaacacggcaacgtcagtatacctgttaatttta

SEQ ID NO: 3334 - DNA, 80 bp, synthetic construct
  misc_feature 1..80: note = Synthetic: >GCS-211-cand-26450-26529
  source 1..80: mol_type = other DNA
agcaggacctttgtcagatcgtgacaaattattacatatcgcttaatcaattaaacaaaagaaatggcttcaggaggctc

SEQ ID NO: 3335 - DNA, 80 bp, synthetic construct
  misc_feature 1..80: note = Synthetic: >GCS-227-cand-26450-26529
  source 1..80: mol_type = other DNA
caggacctttgtcagatcgtgacaaattattacatatcgcttaatcaattaaacaaaagaaatggcttcaggaggctcca

SEQ ID NO: 3336 - DNA, 80 bp, synthetic construct
  misc_feature 1..80: note = Synthetic: >GCS-211-cand-6330-6409
  source 1..80: mol_type = other DNA
cagtcgtgttattgatgtattggatggtaaggctgaaaagttcttcagtgctggtgattttatttttcacaatttatgct

SEQ ID NO: 3337 - DNA, 80 bp, synthetic construct
  misc_feature 1..80: note = Synthetic: >GCS-227-cand-6330-6409
  source 1..80: mol_type = other DNA
gtcgtgttattgatgtattggatggtaaggctgaaaagttcttcagtgctggtgattttatttttcacaatttatgcttg

SEQ ID NO: 3338 - DNA, 80 bp, synthetic construct
  misc_feature 1..80: note = Synthetic: >SBB-120-cand-4440-4519
  source 1..80: mol_type = other DNA
gcactgttaagtgtttttgttacacgcatgcagagcgtgataagatcacagactttcttgaagctctgactgtggtggct

SEQ ID NO: 3339 - DNA, 80 bp, synthetic construct
  misc_feature 1..80: note = Synthetic: >SBB-122-cand-4450-4529
  source 1..80: mol_type = other DNA
gtgtttttgttacacacatgcagagcgtgctaagatcacagactttcttgaagctctgactgtggtggctaagttggata

SEQ ID NO: 3340 - DNA, 80 bp, synthetic construct
  misc_feature 1..80: note = Synthetic: >SBB-122-cand-25940-26019
  source 1..80: mol_type = other DNA
agccagagcaacaaccgttccagctccagaggtcctaatcagggccaaaatcaaaatcaaaccccaaagcaacaacgttc

SEQ ID NO: 3341 - DNA, 80 bp, synthetic construct
  misc_feature 1..80: note = Synthetic: >SBB-120-cand-25970-26049
  source 1..80: mol_type = other DNA
gcaacaaccgttccagctccagaggtcctaatcagggtcaaaatcaaaatcaaaccccaaagcaacaacgttctcgtaat

SEQ ID NO: 3342 - DNA, 80 bp, synthetic construct
  misc_feature 1..80: note = Synthetic: >GCS-227-cand-9040-9119
  source 1..80: mol_type = other DNA
ttgttatgctttcatttactattttacaacacgcacctttaagtatgagtggatttggcatatgacttttgtcgtagcct

SEQ ID NO: 3343 - DNA, 80 bp, synthetic construct
  misc_feature 1..80: note = Synthetic: >GCS-211-cand-9040-9119
  source 1..80: mol_type = other DNA
ttttgttatgctttcatttactattttacaacacgcacctttaagtatgagtggatttggcatatgacttttgtcgtagc

SEQ ID NO: 3344 - DNA, 80 bp, synthetic construct
  misc_feature 1..80: note = Synthetic: >GCS-227-cand-24690-24769
  source 1..80: mol_type = other DNA
gttgaccttgaatggttgaatcgcattgaaacatatgtaaagtggccctggtgggtgtggcttatcattgtgatcagcct

SEQ ID NO: 3345 - DNA, 80 bp, synthetic construct
  misc_feature 1..80: note = Synthetic: >GCS-211-cand-24700-24779
  source 1..80: mol_type = other DNA
tgaatggttgaatcgcattgaaacatatgtaaagtggccctggtgggtgtggcttatcattgtgatcagcctcattttca

SEQ ID NO: 3346 - DNA, 80 bp, synthetic construct
  misc_feature 1..80: note = Synthetic: >GCS-211-cand-11200-11279
  source 1..80: mol_type = other DNA
aggcttatgggaattggtggtgctagatccattaaaatctctagtgtgcagtctaagttgactgatctcaagtgtgctaa

SEQ ID NO: 3347 - DNA, 80 bp, synthetic construct
  misc_feature 1..80: note = Synthetic: >GCS-227-cand-11190-11269
  source 1..80: mol_type = other DNA
tgtctattaggcttatgggaattggtggtgctagatccattaaaatatctagtgtgcagtctaagttgactgatctcaag

SEQ ID NO: 3348 - DNA, 80 bp, synthetic construct
  misc_feature 1..80: note = Synthetic: >GCS-227-cand-2330-2409
  source 1..80: mol_type = other DNA
agggactatgctagagtccactctggctggttagatgatgttactgtgtttactaaggagtttttacaaacaaaacactg

SEQ ID NO: 3349 - DNA, 80 bp, synthetic construct
  misc_feature 1..80: note = Synthetic: >GCS-211-cand-2330-2409
  source 1..80: mol_type = other DNA
ttagggactatgctagagtccactctggctggttagatgatgttactgtgtttactaaggagtttttacaaacaaaacac

SEQ ID NO: 3350 - DNA, 80 bp, synthetic construct
  misc_feature 1..80: note = Synthetic: >GCS-211-cand-22220-22299
  source 1..80: mol_type = other DNA
agggtactttattgtgacagtgacatagaaagacttaagtgtgcccagaagtcgtttacccttgataatggcttctacaa

SEQ ID NO: 3351 - DNA, 80 bp, synthetic construct
  misc_feature 1..80: note = Synthetic: >GCS-227-cand-22210-22289
  source 1..80: mol_type = other DNA
atattactagggtactttattgtgacagtgacatagaaagacttaagtgtgcccagaagtcgtttacccttgataatggc

SEQ ID NO: 3352 - DNA, 80 bp, synthetic construct
  misc_feature 1..80: note = Synthetic: >GCS-211-cand-17030-17109
  source 1..80: mol_type = other DNA
aggtactgtgcatgttgacaatgggtctagtgttaataaaaggcagcttgaaattgttaaaatgttcttagctaaaaacc

SEQ ID NO: 3353 - DNA, 80 bp, synthetic construct
  misc_feature 1..80: note = Synthetic: >GCS-227-cand-17020-17099
  source 1..80: mol_type = other DNA
tacgctcgaggtactgtgcatgttgacaatgggtctagtgttaataaaaggcagcttgaaattgttaaaatgttcttagc

SEQ ID NO: 3354 - DNA, 80 bp, synthetic construct
  misc_feature 1..80: note = Synthetic: >GCS-227-cand-12630-12709
  source 1..80: mol_type = other DNA
gtttgtattgtcgtgcacacgttgaacaccccgacatggatggattctgcaaacttaaaggtaaatatgttcaaatacct

SEQ ID NO: 3355 - DNA, 80 bp, synthetic construct
  misc_feature 1..80: note = Synthetic: >GCS-211-cand-12630-12709
  source 1..80: mol_type = other DNA
gtgtttgtattgtcgtgcacacgttgaacaccccgacatggatggattctgcaaacttaaaggtaaatatgttcaaatac

SEQ ID NO: 3356 - DNA, 80 bp, synthetic construct
  misc_feature 1..80: note = Synthetic: >GCS-227-cand-4890-4969
  source 1..80: mol_type = other DNA
ctacatcagaactcactgatgtagagggcaagatacccattaaattggatgatgtcgtcactgttagtgttgaaggacct

SEQ ID NO: 3357 - DNA, 80 bp, synthetic construct
  misc_feature 1..80: note = Synthetic: >GCS-211-cand-4890-4969
  source 1..80: mol_type = other DNA
gtctacatcagaactcactgatgtagagggcaagatacccattaaattggatgatgtcgtcactgttagtgttgaaggac

SEQ ID NO: 3358 - DNA, 80 bp, synthetic construct
  misc_feature 1..80: note = Synthetic: >SBB-120-cand-660-739
  source 1..80: mol_type = other DNA
ctgtccttgaggcagctctttgggaattcaaggattactttggagaactcgaagagttattgctcgatggtactacatat

SEQ ID NO: 3359 - DNA, 80 bp, synthetic construct
  misc_feature 1..80: note = Synthetic: >SBB-130-cand-650-729
  source 1..80: mol_type = other DNA
gacggcaaacctgtccttgaggcagctctttgggaattcaaagactactttggagaactcgaagagttattgctcgatgg

SEQ ID NO: 3360 - DNA, 80 bp, synthetic construct
  misc_feature 1..80: note = Synthetic: >GCS-211-cand-18790-18869
  source 1..80: mol_type = other DNA
atattggtggtgctgtatgtagtaagcatgcaaatctttatcgtgcctatgtggaggcttataataccttcacttcagcg

SEQ ID NO: 3361 - DNA, 80 bp, synthetic construct
  misc_feature 1..80: note = Synthetic: >GCS-227-cand-18780-18859
  source 1..80: mol_type = other DNA
taaatgtaatattggtggtgctgtatgtagtaagcatgcaaatctttatcgtgcctatgtggaggcttataataccttca

SEQ ID NO: 3362 - DNA, 80 bp, synthetic construct
  misc_feature 1..80: note = Synthetic: >GCS-227-cand-13190-13269
  source 1..80: mol_type = other DNA
gcaactttgatgaaaaagattgtgaaactttgaaagaaatactagtactcactggttgttgtgacgctacatactttgat

SEQ ID NO: 3363 - DNA, 80 bp, synthetic construct
  misc_feature 1..80: note = Synthetic: >GCS-211-cand-13190-13269
  source 1..80: mol_type = other DNA
tcgcaactttgatgaaaaagattgtgaaactttgaaagaaatactagtactcactggttgttgtgacgctacatactttg

SEQ ID NO: 3364 - DNA, 80 bp, synthetic construct
  misc_feature 1..80: note = Synthetic: >GCS-227-cand-5130-5209
  source 1..80: mol_type = other DNA
ttattgccggctacttggagcgtaataagactgttccagctggtaaccttgtgggatttagctgtggcttaaaatttgat

SEQ ID NO: 3365 - DNA, 80 bp, synthetic construct
  misc_feature 1..80: note = Synthetic: >GCS-211-cand-5130-5209
  source 1..80: mol_type = other DNA
ggttattgccggctacttggagcgtaataagactgttccagctggtaaccttgtgggatttagctgtggtttaaaatttg

SEQ ID NO: 3366 - DNA, 80 bp, synthetic construct
  misc_feature 1..80: note = Synthetic: >SBB-797-cand-18160-18239
  source 1..80: mol_type = other DNA
tctacaacccattcctggtggatgtacagcaatggggttacgtaggtaatttacaggtaaaccatgataatgtctgtgat

SEQ ID NO: 3367 - DNA, 80 bp, synthetic construct
  misc_feature 1..80: note = Synthetic: >SBB-788-cand-18170-18249
  source 1..80: mol_type = other DNA
attcctggtggatgtacagcaatggggttacgtaggtaatttacaggtaaaccatgacaatgtctgcgatgtccataagg

SEQ ID NO: 3368 - DNA, 80 bp, synthetic construct
  misc_feature 1..80: note = Synthetic: >SBB-010-cand-1050-1129
  source 1..80: mol_type = other DNA
ggtcttgttacaagtctacctgctgtggagctgtttgcaaacctctttgcattrctagtggtagtgttaagcctggtgat

SEQ ID NO: 3369 - DNA, 80 bp, synthetic construct
  misc_feature 1..80: note = Synthetic: >SBB-120-cand-1060-1139
  source 1..80: mol_type = other DNA
caagtctacctgctgtggagctgtttgcaaacccatttgcattgctagtggtagtgttaagcctggtgatgtcgtcgtta

SEQ ID NO: 3370 - DNA, 80 bp, synthetic construct
  misc_feature 1..80: note = Synthetic: >GCS-227-cand-19580-19659
  source 1..80: mol_type = other DNA
ttcttgaactggatactggcttgtttataaacaagtatggcttagaagactacaattttgagcatgtggtgtacggtgat

SEQ ID NO: 3371 - DNA, 80 bp, synthetic construct
  misc_feature 1..80: note = Synthetic: >GCS-211-cand-19590-19669
  source 1..80: mol_type = other DNA
ctggatactggcttgtttataaacaagtatggcttagaagattacaattttgagcatgtggtgtacggtgatgtgtctaa

SEQ ID NO: 3372 - DNA, 80 bp, synthetic construct
  misc_feature 1..80: note = Synthetic: >GCS-227-cand-21810-21889
  source 1..80: mol_type = other DNA
atcagatttaaccttaattacactgacaacccttttcagcatgcttccaatgaatcagttataattaatactgacttggg

SEQ ID NO: 3373 - DNA, 80 bp, synthetic construct
  misc_feature 1..80: note = Synthetic: >GCS-211-cand-21820-21899
  source 1..80: mol_type = other DNA
taaccttaattacactgacaacccttttcagcatgcttccaatgaatcagttataattaatactgacttgggtcggtttg

SEQ ID NO: 3374 - DNA, 80 bp, synthetic construct
  misc_feature 1..80: note = Synthetic: >229E-cand-1290-1369
  source 1..80: mol_type = other DNA
gaggaggaacatgctaacagaatggatacattctgcttcaatgtacgcaatagcactactgatgagtgtcgtttggccat

SEQ ID NO: 3375 - DNA, 80 bp, synthetic construct
  misc_feature 1..80: note = Synthetic: >229E-cand-1370-1449
  source 1..80: mol_type = other DNA
gttgggtgctgaaatgaccagtaatgtcagaagacaagttgctgcaggtgtcatagacattagtaccggttggtttgatg

SEQ ID NO: 3376 - DNA, 80 bp, synthetic construct
  misc_feature 1..80: note = Synthetic: >229E-cand-1450-1529
  source 1..80: mol_type = other DNA
tttatgatgacatctttgctgaaaataaaccatggtttgttcgcaaggctgaagacatttttggcccgtgttggtctgct

SEQ ID NO: 3377 - DNA, 80 bp, synthetic construct
  misc_feature 1..80: note = Synthetic: >229E-cand-1530-1609
  source 1..80: mol_type = other DNA
cttgtttctgtgcttaaacagcttaaagtcactacaggtgaacttatgaggtttgttaagtctatttgcagttcagctgt

SEQ ID NO: 3378 - DNA, 80 bp, synthetic construct
  misc_feature 1..80: note = Synthetic: >229E-cand-1610-1689
  source 1..80: mol_type = other DNA
tgctgttgtgagtggtactatacaaattgttgctagtgtgcctgatatgtttttgcctgcttttgacgtgtttgtcaaag

SEQ ID NO: 3379 - DNA, 80 bp, synthetic construct
  misc_feature 1..80: note = Synthetic: >229E-cand-1690-1769
  source 1..80: mol_type = other DNA
ctgtgcaaactgtttttgactgtgctgttgagaccagtactattgcaggtaaatcatttgacaaggtttttgactatgtt

SEQ ID NO: 3380 - DNA, 80 bp, synthetic construct
  misc_feature 1..80: note = Synthetic: >229E-cand-1770-1849
  source 1..80: mol_type = other DNA
ttgcttgacaatgcacttgtaaaacttgtcaccataaagcttaagggcgttcgcgcaagtggccttaaaacagttaagta

SEQ ID NO: 3381 - DNA, 80 bp, synthetic construct
  misc_feature 1..80: note = Synthetic: >229E-cand-1850-1929
  source 1..80: mol_type = other DNA
tgcaacagctgttgttggttccactgaagaagttaaatcttcacgtgttgaacgtagcactgctgtacttacaatcgcca

SEQ ID NO: 3382 - DNA, 80 bp, synthetic construct
  misc_feature 1..80: note = Synthetic: >229E-cand-1930-2009
  source 1..80: mol_type = other DNA
ataactaccccaaactttcagatgaggggtatactgccgtaattggcgatgtggcgtactttgttagtgatggctacttc

SEQ ID NO: 3383 - DNA, 80 bp, synthetic construct
  misc_feature 1..80: note = Synthetic: >229E-cand-2010-2089
  source 1..80: mol_type = other DNA
cgtcttatggccagtccaaatagtgtgttgactactgcagtctataaaccattgtttgcttttaacgtgaatgttatggg

SEQ ID NO: 3384 - DNA, 80 bp, synthetic construct
  misc_feature 1..80: note = Synthetic: >229E-cand-2090-2169
  source 1..80: mol_type = other DNA
tactagacctgaaaaatttccaaccattgtgacttgtgaaaatttagagtctgccgttttatttgttaatgacaaaatca

SEQ ID NO: 3385 - DNA, 80 bp, synthetic construct
  misc_feature 1..80: note = Synthetic: >229E-cand-2170-2249
  source 1..80: mol_type = other DNA
ctgaatttcaattggattgcagtgttgatgttattgacaatgaaataattgtcaaacctaacatcagcctgtgtgttcca

SEQ ID NO: 3386 - DNA, 80 bp, synthetic construct
  misc_feature 1..80: note = Synthetic: >229E-cand-2250-2329
  source 1..80: mol_type = other DNA
ctttatgtgagagactatgttgacaaatgggatgatttttgcagacaatatagtaacgagtcttggtttgaagatgatta

SEQ ID NO: 3387 - DNA, 80 bp, synthetic construct
  misc_feature 1..80: note = Synthetic: >229E-cand-2330-2409
  source 1..80: mol_type = other DNA
tagggcttttattagcgttttggatgttgctgacgctgatgttaaagctgcagagtctaaggcttttattgataccatta

SEQ ID NO: 3388 - DNA, 80 bp, synthetic construct
  misc_feature 1..80: note = Synthetic: >229E-cand-2410-2489
  source 1..80: mol_type = other DNA
ttccatcttgtccttctattttgaaaataatagacggtggcaagatatggagtggaatcattaaggctgttagctctgtt

SEQ ID NO: 3389 - DNA, 80 bp, synthetic construct
  misc_feature 1..80: note = Synthetic: >229E-cand-2490-2569
  source 1..80: mol_type = other DNA
gcagactggcttaaatctttgaaattaactcttacaccagagggtctgtttggtacttgtgctaagcgttttaaacggtt

SEQ ID NO: 3390 - DNA, 80 bp, synthetic construct
  misc_feature 1..80: note = Synthetic: >AlphaCoV1-cand-1930-2009
  source 1..80: mol_type = other DNA
gccaatattagcttgaataaagtagatgatgttgttacaccaggtgaaggtcatattgtcattgttggtgatatggcttt

SEQ ID NO: 3391 - DNA, 80 bp, synthetic construct
  misc_feature 1..80: note = Synthetic: >AlphaCoV1-cand-2010-2089
  source 1..80: mol_type = other DNA
ctacaagagtggtgaatactattttatgatggcaagtcctgattcagttcttattaacaatgtttttaaagcagctcgag

SEQ ID NO: 3392 - DNA, 80 bp, synthetic construct
  misc_feature 1..80: note = Synthetic: >AlphaCoV1-cand-2090-2169
  source 1..80: mol_type = other DNA
tgccatcttataacatcgtttatgatgtggatgatgataccaagagtaagatgattgtaaaaattggaacatcatttgaa

SEQ ID NO: 3393 - DNA, 80 bp, synthetic construct
  misc_feature 1..80: note = Synthetic: >AlphaCoV1-cand-2170-2249
  source 1..80: mol_type = other DNA
tttgatggtgatattgatgctgctattgttaaggttaatgaattacttattgaatttagacaagaaaagttgtgtttcag

SEQ ID NO: 3394 - DNA, 80 bp, synthetic construct
  misc_feature 1..80: note = Synthetic: >AlphaCoV1-cand-2250-2329
  source 1..80: mol_type = other DNA
agcacttaaggatggtgaaaacatctttgttgaggcataccttaagaagtacaaaatgccagcttgtcttaaaaaccatg

SEQ ID NO: 3395 - DNA, 80 bp, synthetic construct
  misc_feature 1..80: note = Synthetic: >AlphaCoV1-cand-2330-2409
  source 1..80: mol_type = other DNA
ttggtttgtgggacatcataaagcaagattcaggtaagaagggttttcttgataccttcaatcatcttaatgaattggag

SEQ ID NO: 3396 - DNA, 80 bp, synthetic construct
  misc_feature 1..80: note = Synthetic: >AlphaCoV1-cand-2410-2489
  source 1..80: mol_type = other DNA
gatatcaaggatacaaatattcaggctattaaaaacattctttgtcctgaccttctgcttgaattggattttggtgccat

SEQ ID NO: 3397 - DNA, 80 bp, synthetic construct
  misc_feature 1..80: note = Synthetic: >AlphaCoV1-cand-2490-2569
  source 1..80: mol_type = other DNA
ttggtacaaatgcatgccaacctgctctgatccgtctgttttgggtaatgttaaaattatgctaggtaatggtgttaaag

SEQ ID NO: 3398 - DNA, 80 bp, synthetic construct
  misc_feature 1..80: note = Synthetic: >AlphaCoV1-cand-2570-2649
  source 1..80: mol_type = other DNA
tggtttgtgatggctgtcaaagttttgctaaccgtctaacaattaattacaacaaactctgtgatacagctcgtaatgat

SEQ ID NO: 3399 - DNA, 80 bp, synthetic construct
  misc_feature 1..80: note = Synthetic: >AlphaCoV1-cand-2650-2729
  source 1..80: mol_type = other DNA
attgaaattggtggtataccattttccacttttaaaacaccatctaataaaagttttattgaaatgaaagatgctatcta

SEQ ID NO: 3400 - DNA, 80 bp, synthetic construct
  misc_feature 1..80: note = Synthetic: >AlphaCoV1-cand-2730-2809
  source 1..80: mol_type = other DNA
ttcagtagttgaataaggtgaggcattctcctttaagactgcaagtgtgcctgtaattaataatggtaccattacaactg

SEQ ID NO: 3401 - DNA, 80 bp, synthetic construct
  misc_feature 1..80: note = Synthetic: >AlphaCoV1-cand-2810-2889
  source 1..80: mol_type = other DNA
atgattggtcagaacccattttgttagaacctgcagattatgttgaacctaaagacaatggtgatgtaattgtcattgct

SEQ ID NO: 3402 - DNA, 80 bp, synthetic construct
  misc_feature 1..80: note = Synthetic: >AlphaCoV1-cand-2890-2969
  source 1..80: mol_type = other DNA
ggatacaccttttataaggatgaagatgaacatttttatccatatggttctggcatggttgtgcagaaaatgtacaataa

SEQ ID NO: 3403 - DNA, 80 bp, synthetic construct
  misc_feature 1..80: note = Synthetic: >AlphaCoV1-cand-2970-3049
  source 1..80: mol_type = other DNA
aatgggtggtggtgacaagtctgtctcattttcagacaatgtaaatgttaaagagatagaacctgttacacgtgttaagc

SEQ ID NO: 3404 - DNA, 80 bp, synthetic construct
  misc_feature 1..80: note = Synthetic: >AlphaCoV1-cand-3050-3129
  source 1..80: mol_type = other DNA
tagaatttgagtttagacaatgcaaagttgtaacacatgttcttgaaaaagtcattggtactaaatacaaatttacaggt

SEQ ID NO: 3405 - DNA, 80 bp, synthetic construct
  misc_feature 1..80: note = Synthetic: >AlphaCoV1-cand-3130-3209
  source 1..80: mol_type = other DNA
acaacttgggaagaatttgaagattctatttctgaagaacttgataaaatttttgacacgcttgctgaccagggtgtaga

SEQ ID NO: 3406 - DNA, 80 bp, synthetic construct
  misc_feature 1..80: note = Synthetic: >AlphaSp-cand-15230-15309
  source 1..80: mol_type = other DNA
tgagtacaggcgtgttttcacggttatgttggagtgggttaagcacttgtacaagacactcaaccaaggagttttggatt

SEQ ID NO: 3407 - DNA, 80 bp, synthetic construct
  misc_feature 1..80: note = Synthetic: >AlphaSp-cand-15310-15389
  source 1..80: mol_type = other DNA
ctttctctgttacactattagaggatgcaactgcaaagttttgggatgaaagtttttatgctagtatgtatgaacagtct

SEQ ID NO: 3408 - DNA, 80 bp, synthetic construct
  misc_feature 1..80: note = Synthetic: >AlphaSp-cand-15780-15859
  source 1..80: mol_type = other DNA
aaagattctttgcgtttatttgcagctgaaaccattaaggctaaggaagagagtgttaagtcttcttatgcttgtgccac

SEQ ID NO: 3409 - DNA, 80 bp, synthetic construct
  misc_feature 1..80: note = Synthetic: >AlphaSp-cand-16020-16099
  source 1..80: mol_type = other DNA
aatgatgccgttagctataaatccacagcaacaacaaagttggtacctggtatggtatttgtgctcacttcgcacaatgt

SEQ ID NO: 3410 - DNA, 80 bp, synthetic construct
  misc_feature 1..80: note = Synthetic: >AlphaSp-cand-16100-16179
  source 1..80: mol_type = other DNA
ccaaccgttgagagcacctacaataattaaccaagaacgttattctactctgcataagcttagaccagccttcaatattc

SEQ ID NO: 3411 - DNA, 80 bp, synthetic construct
  misc_feature 1..80: note = Synthetic: >AlphaSp-cand-16180-16259
  source 1..80: mol_type = other DNA
atgaggactattctaatcttataccctattatcagttaataggtaagcagaagattactacaatccaaggtcctcctggt

SEQ ID NO: 3412 - DNA, 80 bp, synthetic construct
  misc_feature 1..80: note = Synthetic: >AlphaSp-cand-16260-16339
  source 1..80: mol_type = other DNA
agtggtaagtctcattgcgttattggtttggggctctattttcctggtgccagaattgtttttacagcttgttcacatgc

SEQ ID NO: 3413 - DNA, 80 bp, synthetic construct
  misc_feature 1..80: note = Synthetic: >AlphaSp-cand-16340-16419
  source 1..80: mol_type = other DNA
tgctgttgattcactttgtgttaaggcagccacagcttatagctcagatagatgttctcgtattatacctcaaaaggctc

SEQ ID NO: 3414 - DNA, 80 bp, synthetic construct
  misc_feature 1..80: note = Synthetic: >AlphaSp-cand-16420-16499
  source 1..80: mol_type = other DNA
gcattgagtgttatgatggatttaaatccaacaacactagtgcgcagtatctattttcaactgtcaatgcgttaccagaa

SEQ ID NO: 3415 - DNA, 80 bp, synthetic construct
  misc_feature 1..80: note = Synthetic: >AvianCoV-cand-13820-13899
  source 1..80: mol_type = other DNA
agccaagttgttgttaccaaccttgataagagtgcaggctttccatttaataaatttggaaaagcccgtctctattatga

SEQ ID NO: 3416 - DNA, 80 bp, synthetic construct
  misc_feature 1..80: note = Synthetic: >AvianCoV-cand-13900-13979
  source 1..80: mol_type = other DNA
aatgagtctagaagagcaggaccaactctttgaaagtacaaagaaaaatgtcctgcctactataactcagatgaatctaa

SEQ ID NO: 3417 - DNA, 80 bp, synthetic construct
  misc_feature 1..80: note = Synthetic: >AvianCoV-cand-13980-14059
  source 1..80: mol_type = other DNA
aatatgccatatccgcgaaaaatagagcgcgtactgtggcaggtgtgtctattctttctactatgactaatagacagttt

SEQ ID NO: 3418 - DNA, 80 bp, synthetic construct
  misc_feature 1..80: note = Synthetic: >AvianCoV-cand-14060-14139
  source 1..80: mol_type = other DNA
catcagaaggttcttaagtctatagtcaatactagaaatgctcctgtagttattggaacaactaaattttatggcggttg

SEQ ID NO: 3419 - DNA, 80 bp, synthetic construct
  misc_feature 1..80: note = Synthetic: >AvianCoV-cand-14140-14219
  source 1..80: mol_type = other DNA
ggacaatatgttaagaaacctaattcaaggtgtggaagacccaattcttatgggttgggattatcctaagtgtgatagag

SEQ ID NO: 3420 - DNA, 80 bp, synthetic construct
  misc_feature 1..80: note = Synthetic: >AvianCoV-cand-14220-14299
  source 1..80: mol_type = other DNA
caatgccaaatttgttgcgtatagcagcatctttggtgcttgcccgtaaacatactaattgttgtacatggtctgagcgc

SEQ ID NO: 3421 - DNA, 80 bp, synthetic construct
  misc_feature 1..80: note = Synthetic: >AvianCoV-cand-14300-14379
  source 1..80: mol_type = other DNA
atttatagattgtacaatgaatgcgcccaagtattgtctgaaactgtattagctacaggtggtatttatgtgaaacctgg

SEQ ID NO: 3422 - DNA, 80 bp, synthetic construct
  misc_feature 1..80: note = Synthetic: >AvianCoV-cand-14380-14459
  source 1..80: mol_type = other DNA
tggtactagcagtggtgatgctactactgcttatgccaacagtgtttttaatataatacaagccacatctgctaatgttg

SEQ ID NO: 3423 - DNA, 80 bp, synthetic construct
  misc_feature 1..80: note = Synthetic: >AvianCoV-cand-14460-14539
  source 1..80: mol_type = other DNA
cgcgttttcttagtgttataacgcgtgatatagtatatgatgacattaaaagcctgcagtatgagttataccagcaggtt

SEQ ID NO: 3424 - DNA, 80 bp, synthetic construct
  misc_feature 1..80: note = Synthetic: >AvianCoV-cand-14540-14619
  source 1..80: mol_type = other DNA
tataggcgagtcaattttgaccctgcctttgttgaaaagttttattcttacatgtgtaagaatttttcattaatgatctt

SEQ ID NO: 3425 - DNA, 80 bp, synthetic construct
  misc_feature 1..80: note = Synthetic: >AvianCoV-cand-14620-14699
  source 1..80: mol_type = other DNA
gtctgatgatggtgttgtttgttataacaacacacttgccaaacaaggtcttgtagcagatatttctggttttagagaaa

SEQ ID NO: 3426 - DNA, 80 bp, synthetic construct
  misc_feature 1..80: note = Synthetic: >AvianCoV-cand-14700-14779
  source 1..80: mol_type = other DNA
ttctctactaccaaaataatgtttatatggctgattctaagtgttgggttgaaccagacttagaaaaaggcccacatgaa

SEQ ID NO: 3427 - DNA, 80 bp, synthetic construct
  misc_feature 1..80: note = Synthetic: >AvianCoV-cand-14780-14859
  source 1..80: mol_type = other DNA
ttttgttcacagcacacaatgctagtagaggttgatggtgagcctagatacttgccatatccagacccttcacgcatttt

SEQ ID NO: 3428 - DNA, 80 bp, synthetic construct
  misc_feature 1..80: note = Synthetic: >AvianCoV-cand-14860-14939
  source 1..80: mol_type = other DNA
gggtgcatgtgtttttgtagatgaagtggataagacagaacctgtggctgttatggagcgttatatcgctcttgccatag

SEQ ID NO: 3429 - DNA, 80 bp, synthetic construct
  misc_feature 1..80: note = Synthetic: >AvianCoV-cand-14940-15019
  source 1..80: mol_type = other DNA
atgcttacccgcttgtacatcatgaaaatgaggagtacaagaaggttttctttgtacttctttcttatattagaaaactc

SEQ ID NO: 3430 - DNA, 80 bp, synthetic construct
  misc_feature 1..80: note = Synthetic: >AvianCoV-cand-15020-15099
  source 1..80: mol_type = other DNA
tatcaagagctttctcaaagtatgcttatggactactcctttgttatggatatagacaagggtagtaaattttgggaaca

SEQ ID NO: 3431 - DNA, 80 bp, synthetic construct
  misc_feature 1..80: note = Synthetic: >Beluga-cand-24020-24099
  source 1..80: mol_type = other DNA
tagattaataaatggtagattaactgctttatctgcatttgtggcggccaggcaagtggaagcttctagggtagcgtcac

SEQ ID NO: 3432 - DNA, 80 bp, synthetic construct
  misc_feature 1..80: note = Synthetic: >Beluga-cand-24100-24179
  source 1..80: mol_type = other DNA
aacgtgttttagcagctgagaagattaatgagtgtgttaaaagtacatctaacagatatggtttctgtggtaatggtaca

SEQ ID NO: 3433 - DNA, 80 bp, synthetic construct
  misc_feature 1..80: note = Synthetic: >Beluga-cand-24180-24259
  source 1..80: mol_type = other DNA
catattatcagcttcccacagaatgcccctaatggtatgttgtttgtacatttttcattggtacctaatgagactattac

SEQ ID NO: 3434 - DNA, 80 bp, synthetic construct
  misc_feature 1..80: note = Synthetic: >Beluga-cand-24260-24339
  source 1..80: mol_type = other DNA
cgtttatggtattattggtctctgtttgaataattctatcggcattgtacctgcaaaggatagaggtatatttattaaat

SEQ ID NO: 3435 - DNA, 80 bp, synthetic construct
  misc_feature 1..80: note = Synthetic: >Beluga-cand-24340-24419
  source 1..80: mol_type = other DNA
gcagtaatggtagttactgtcctgaatttgagaatagttttaatatgactaaagatggcaatgtgacttttccctttgcc

SEQ ID NO: 3436 - DNA, 80 bp, synthetic construct
  misc_feature 1..80: note = Synthetic: >Beluga-cand-24420-24499
  source 1..80: mol_type = other DNA
ataactagtagagagcagtataacccgcgtcaaattacgacgggagatatacagatgcttacttcctgtaactctagtta

SEQ ID NO: 3437 - DNA, 80 bp, synthetic construct
  misc_feature 1..80: note = Synthetic: >Beluga-cand-24500-24579
  source 1..80: mol_type = other DNA
cacacatatagagtggagtcagctacctttagttgcaccaccctataaagattttgatcaagagtttgaagaattgtatg

SEQ ID NO: 3438 - DNA, 80 bp, synthetic construct
  misc_feature 1..80: note = Synthetic: >Beluga-cand-24580-24659
  source 1..80: mol_type = other DNA
aaaaatggaactacacattggaggagttggagaagttaaatgttacttttccataccttaatgttagtgatcagatagat

SEQ ID NO: 3439 - DNA, 80 bp, synthetic construct
  misc_feature 1..80: note = Synthetic: >Beluga-cand-24660-24739
  source 1..80: mol_type = other DNA
attattaatggtgccatggaaaatattaggaatcagattcagaatttgaatagttcctatattgatcttgaatggcttaa

SEQ ID NO: 3440 - DNA, 80 bp, synthetic construct
  misc_feature 1..80: note = Synthetic: >Beluga-cand-24740-24819
  source 1..80: mol_type = other DNA
taagtatgagagatattctaagtggccatggtgggtgtggctaataatagcattgtgctttgctgcattttgcctattag

SEQ ID NO: 3441 - DNA, 80 bp, synthetic construct
  misc_feature 1..80: note = Synthetic: >Beluga-cand-24820-24899
  source 1..80: mol_type = other DNA
tcttttggatatttatttgtactgggtgttgtggcggttgttgcaattgttgcggtatacctgccctcttcggctattgt

SEQ ID NO: 3442 - DNA, 80 bp, synthetic construct
  misc_feature 1..80: note = Synthetic: >Beluga-cand-24900-24979
  source 1..80: mol_type = other DNA
aagcagaaagcccactacgaaagattgagaatggatgaggaaggcaacctagaagaaataaaagcagactaggagccatg

SEQ ID NO: 3443 - DNA, 80 bp, synthetic construct
  misc_feature 1..80: note = Synthetic: >Beluga-cand-24980-25059
  source 1..80: mol_type = other DNA
tcagctattagtgattggtttaatgcaaatggcattttcttttcatgcctttacattttacttggtttgattgcaattta

SEQ ID NO: 3444 - DNA, 80 bp, synthetic construct
  misc_feature 1..80: note = Synthetic: >Beluga-cand-25060-25139
  source 1..80: mol_type = other DNA
tattgttggtaaggtacttacagtctttgttcaagccattgacgtgtgcctattgttttgtaaaggctgggcggtagatc

SEQ ID NO: 3445 - DNA, 80 bp, synthetic construct
  misc_feature 1..80: note = Synthetic: >Beluga-cand-25140-25219
  source 1..80: mol_type = other DNA
cctcagttagattagttagttatgcttatgaagcactcccaaaacaacccaaattaaactttgaggatattgaaagagtg

SEQ ID NO: 3446 - DNA, 80 bp, synthetic construct
  misc_feature 1..80: note = Synthetic: >Beluga-cand-25220-25299
  source 1..80: mol_type = other DNA
cctttgagttttccaagaaatagtaaagatggtgaatatgtatgaacttgcacttagtgtgcttagggattacaatttag

SEQ ID NO: 3447 - DNA, 80 bp, synthetic construct
  misc_feature 1..80: note = Synthetic: >BetaCoV1-cand-26910-26989
  source 1..80: mol_type = other DNA
tgtggacgcttataacaactgcactcaagggtctgaaatcagagatctagtttgtgtgcagagttttaatggtattaaag

SEQ ID NO: 3448 - DNA, 80 bp, synthetic construct
  misc_feature 1..80: note = Synthetic: >BetaCoV1-cand-26990-27069
  source 1..80: mol_type = other DNA
tactaccacctgttctatcagagtcccagatgtctggttatgccacaggtgtagggctatccatgctcttcccacctttt

SEQ ID NO: 3449 - DNA, 80 bp, synthetic construct
  misc_feature 1..80: note = Synthetic: >BetaCoV1-cand-27150-27229
  source 1..80: mol_type = other DNA
ccagaaccagaaaatgattgctaatgccttcaacaacgcactgactgctattcagaatgggttcgatgcaaccaattctg

SEQ ID NO: 3450 - DNA, 80 bp, synthetic construct
  misc_feature 1..80: note = Synthetic: >BetaCoV1-cand-27230-27309
  source 1..80: mol_type = other DNA
ctctagctaagatccagtccgttgtgaatgcaaatgcagaagctttaaataacttattgcagcagctctctaatagattt

SEQ ID NO: 3451 - DNA, 80 bp, synthetic construct
  misc_feature 1..80: note = Synthetic: >BetaCoV1-cand-27310-27389
  source 1..80: mol_type = other DNA
ggtgcgattagttcctctttacaagaaattctctctaggttggatgcccttgaggcacaagtccaaatagatagattaat

SEQ ID NO: 3452 - DNA, 80 bp, synthetic construct
  misc_feature 1..80: note = Synthetic: >BetaCoV1-cand-27390-27469
  source 1..80: mol_type = other DNA
taatggcagacttactgctcttaatgcctatgtgtcgcaacaacttagcgacataacgcttgttaagttcagtgcttccc

SEQ ID NO: 3453 - DNA, 80 bp, synthetic construct
  misc_feature 1..80: note = Synthetic: >BetaCoV1-cand-27550-27629
  source 1..80: mol_type = other DNA
tcccttgtccagaacgcgccatatggattatattttattcactttagctaccaaccaactaaatacaccactgcacacgt

SEQ ID NO: 3454 - DNA, 80 bp, synthetic construct
  misc_feature 1..80: note = Synthetic: >BetaCoV1-cand-27710-27789
  source 1..80: mol_type = other DNA
tgttcactggtagtggctactaccatcctgaacccattactaatgataatgtcataatgatgagtaattgcgctgtgaat

SEQ ID NO: 3455 - DNA, 80 bp, synthetic construct
  misc_feature 1..80: note = Synthetic: >BetaCoV1-cand-27790-27869
  source 1..80: mol_type = other DNA
ttcacaaaagcgcctgatgtagttttgaacacatcaataccaaatctccccgattttaaggaggagttagacaaatggtt

SEQ ID NO: 3456 - DNA, 80 bp, synthetic construct
  misc_feature 1..80: note = Synthetic: >BetaCoV1-cand-27950-28029
  source 1..80: mol_type = other DNA
agatggataggattcaggatgctattaagaagttaaatgacagttacatcaacctaaaggagattggtacgtacgagatg

SEQ ID NO: 3457 - DNA, 80 bp, synthetic construct
  misc_feature 1..80: note = Synthetic: >BetaCoV1-cand-28030-28109
  source 1..80: mol_type = other DNA
tatgtaaaatggccttggtatgtatggcttctaattggccttgcaggtgtagctgtcttagtactcctattctttgtatg

SEQ ID NO: 3458 - DNA, 80 bp, synthetic construct
  misc_feature 1..80: note = Synthetic: >BetaCoV1-cand-29390-29469
  source 1..80: mol_type = other DNA
aaagaatggaatttctctttgggtatcatactacttgtaatcacaatcatactacagttcggttatacgagccgtagcat

SEQ ID NO: 3459 - DNA, 80 bp, synthetic construct
  misc_feature 1..80: note = Synthetic: >BetaCoV1-cand-29470-29549
  source 1..80: mol_type = other DNA
gtttgtttatgtcatcaagatgataattctttggctcatgtggcctttgactatcattttggtcatttttaattgcgttt

SEQ ID NO: 3460 - DNA, 80 bp, synthetic construct
  misc_feature 1..80: note = Synthetic: >BetaCoV1-cand-29550-29629
  source 1..80: mol_type = other DNA
acgcattgaataatgtgtatcttggattttctatagtgtttgctatagtgtccattattatgtggattgtgtattttgtg

SEQ ID NO: 3461 - DNA, 80 bp, synthetic construct
  misc_feature 1..80: note = Synthetic: >BetaCoV1-cand-29630-29709
  source 1..80: mol_type = other DNA
aatagtattaggttgtttatcagaacgggaagttggtggagtttcaaccccgaaacaaacaacctgatgtgtatagatat

SEQ ID NO: 3462 - DNA, 80 bp, synthetic construct
  misc_feature 1..80: note = Synthetic: >BetaCoV1-cand-29710-29789
  source 1..80: mol_type = other DNA
gaaagggagaatgtttgttaggcctataattgaggactaccatacccttacggtcacaataatacgtggccacctttaca

SEQ ID NO: 3463 - DNA, 80 bp, synthetic construct
  misc_feature 1..80: note = Synthetic: >BetaCoV1-cand-29790-29869
  source 1..80: mol_type = other DNA
ttcagggtataaagcttggtaccggctatactttgtccgatcttcccgcttatgtgactgtagcaaaagttacacatatt

SEQ ID NO: 3464 - DNA, 80 bp, synthetic construct
  misc_feature 1..80: note = Synthetic: >BetaCoV1-cand-29870-29949
  source 1..80: mol_type = other DNA
tgcacatataagagggcatttttggataagataggcgatatcagtggttttgcagtttatgtgaagtccaaagtcggcaa

SEQ ID NO: 3465 - DNA, 80 bp, synthetic construct
  misc_feature 1..80: note = Synthetic: >BetaCoV1-cand-30030-30109
  source 1..80: mol_type = other DNA
ctcatactccaggtcaacaaaaagctggtagcagatcatcctctgggaaccgctctaatggcggcattcttaagaaaaca

SEQ ID NO: 3466 - DNA, 80 bp, synthetic construct
  misc_feature 1..80: note = Synthetic: >BetaCoV1-cand-30100-30179
  source 1..80: mol_type = other DNA
taagaaaacatcttgggccgaccagacggagcgacctaataatgttaatagcagaggtagaagagcccaacctaagcaaa

SEQ ID NO: 3467 - DNA, 80 bp, synthetic construct
  misc_feature 1..80: note = Synthetic: >BetaCoV1-cand-30180-30259
  source 1..80: mol_type = other DNA
cagctaacacccaggcttcaggaggaaatgttgtaccattttactcctggttctctggaattacccagtttcaaaaaggg

SEQ ID NO: 3468 - DNA, 80 bp, synthetic construct
  misc_feature 1..80: note = Synthetic: >BetaCoV1-cand-30260-30339
  source 1..80: mol_type = other DNA
caagaatttggatttgaacaaggacaaggtgtgccccttaccaatggtgtcccttcctcagaagaaaagggatactggta

SEQ ID NO: 3469 - DNA, 80 bp, synthetic construct
  misc_feature 1..80: note = Synthetic: >BetaCoV1-cand-30340-30419
  source 1..80: mol_type = other DNA
caggcacaacagaaagtcctatagaacagctgatggacagcaacggcagctgctacccagatggtatttttactatctcg

SEQ ID NO: 3470 - DNA, 80 bp, synthetic construct
  misc_feature 1..80: note = Synthetic: >BetaCoV1-cand-30420-30499
  source 1..80: mol_type = other DNA
gaacagggccgtatgcgaacaaacaatacgggtcggatatcgacggtgttgtttgggttgctagtccaaatgttgatgta

SEQ ID NO: 3471 - DNA, 80 bp, synthetic construct
  misc_feature 1..80: note = Synthetic: >BetaCoV1-cand-30500-30579
  source 1..80: mol_type = other DNA
cgttcccctgcggatgttccagatagggatcctactagccactcagctgagccgactaggtttgcgcctggcacggttct

SEQ ID NO: 3472 - DNA, 80 bp, synthetic construct
  misc_feature 1..80: note = Synthetic: >BetaCoV1-cand-30580-30659
  source 1..80: mol_type = other DNA
gcctaaaggctattatgttgaaggctcaggaaggtctgctcctagtagtcaaccagcctcgcgatctagctctcgtgcgt

SEQ ID NO: 3473 - DNA, 80 bp, synthetic construct
  misc_feature 1..80: note = Synthetic: >BetaSp-cand-260-339
  source 1..80: mol_type = other DNA
ggcgttgcatagtcttgtatttcaagtctagtgtctctaggaatttgactgataacactttccagctaacggcgtgttgc

SEQ ID NO: 3474 - DNA, 80 bp, synthetic construct
  misc_feature 1..80: note = Synthetic: >BetaSp-cand-340-419
  source 1..80: mol_type = other DNA
actctcggtcttaagcctcccacccataggaggtatcatggctaagcctaaatctgatatgcttagagtcaacaaatacg

SEQ ID NO: 3475 - DNA, 80 bp, synthetic construct
  misc_feature 1..80: note = Synthetic: >BetaSp-cand-420-499
  source 1..80: mol_type = other DNA
gcctcacgctaaaatgggccccagaatttccgtggatgtttgaggacacagaggagaagttgggtaaccctgatagcgga

SEQ ID NO: 3476 - DNA, 80 bp, synthetic construct
  misc_feature 1..80: note = Synthetic: >BetaSp-cand-500-579
  source 1..80: mol_type = other DNA
gatggggatgggttttgctccccagttaagcagaaagagggatcggtcaaagatcattttgataatcacgttaagatgga

SEQ ID NO: 3477 - DNA, 80 bp, synthetic construct
  misc_feature 1..80: note = Synthetic: >BetaSp-cand-580-659
  source 1..80: mol_type = other DNA
ttgtagcatcctatctacttatgatatggtgtgcgcagtctgctctgatacgtgatatagtccttaagacaggaccggaa

SEQ ID NO: 3478 - DNA, 80 bp, synthetic construct
  misc_feature 1..80: note = Synthetic: >BetaSp-cand-660-739
  source 1..80: mol_type = other DNA
gataccgagtctgttttaaagcaagccttgttgtcccgcgaggcagtctttgtgcgaccaccccagcacatgactcttga

SEQ ID NO: 3479 - DNA, 80 bp, synthetic construct
  misc_feature 1..80: note = Synthetic: >BetaSp-cand-740-819
  source 1..80: mol_type = other DNA
gtcatgttatgcaggagggtgtgttcctaaaggatgggtcatgggtcagttccgccggtgcacaacctgtactacaggga

SEQ ID NO: 3480 - DNA, 80 bp, synthetic construct
  misc_feature 1..80: note = Synthetic: >BetaSp-cand-820-899
  source 1..80: mol_type = other DNA
attgtggtgtggacaaacatgtatcctatgagctctacctgatcagccctcaaggtgttggttatggtgcgggccgtttt

SEQ ID NO: 3481 - DNA, 80 bp, synthetic construct
  misc_feature 1..80: note = Synthetic: >BetaSp-cand-900-979
  source 1..80: mol_type = other DNA
atgggttgggtagtaccaaagagtgtgctgtcacccaaagctcttgcgcgcttggaaccttatgttcttaaggtgcgcaa

SEQ ID NO: 3482 - DNA, 80 bp, synthetic construct
  misc_feature 1..80: note = Synthetic: >BetaSp-cand-980-1059
  source 1..80: mol_type = other DNA
gacaggagttaaaggtgcttacagtcgtgggcactatgaacagccgggtgataagaaggggttatgaggttcgagttttg

SEQ ID NO: 3483 - DNA, 80 bp, synthetic construct
  misc_feature 1..80: note = Synthetic: >BetaSp-cand-1060-1139
  source 1..80: mol_type = other DNA
ccctggataatgcctgtgatgaagtcatgagtgcgccaaagggcaagttctctgccaaagcctatgctcttttaagacag

SEQ ID NO: 3484 - DNA, 80 bp, synthetic construct
  misc_feature 1..80: note = Synthetic: >BetaSp-cand-1140-1219
  source 1..80: mol_type = other DNA
tatagaggcttgaaacctcttgtttttgtggaccagtatgggtgtgactatactggcagccttgcacaaggtctttccgc

SEQ ID NO: 3485 - DNA, 80 bp, synthetic construct
  misc_feature 1..80: note = Synthetic: >BetaSp-cand-1220-1299
  source 1..80: mol_type = other DNA
ttttggggaatgcagtgtgaaagagatgagagttggtacttggaagtccagtcagtctggcttgcatctgaccaatttga

SEQ ID NO: 3486 - DNA, 80 bp, synthetic construct
  misc_feature 1..80: note = Synthetic: >BetaSp-cand-1300-1379
  source 1..80: mol_type = other DNA
gtatgtggtggcatggcgcacagttcgagatgaaaggtttgtgatgagtttgcaaacgtgtgctactatacgtagtattg

SEQ ID NO: 3487 - DNA, 80 bp, synthetic construct
  misc_feature 1..80: note = Synthetic: >BetaSp-cand-1380-1459
  source 1..80: mol_type = other DNA
catacgtagcagacccaatggatgatttggaaggtgaccaggttgttatgaaggagcctgttcatgttctaagcgccgat

SEQ ID NO: 3488 - DNA, 80 bp, synthetic construct
  misc_feature 1..80: note = Synthetic: >BetaSp-cand-1460-1539
  source 1..80: mol_type = other DNA
gccactgtaaagaagtttgttaaaatagcagacttaatgcaggtcactgatgctgtgtctgttatagaaactgtttataa

SEQ ID NO: 3489 - DNA, 80 bp, synthetic construct
  misc_feature 1..80: note = Synthetic: >BetaSp-cand-2820-2899
  source 1..80: mol_type = other DNA
ccacttggctatcgaaagcctccaatgaaagcagctcggctgtgtgttgtagataatttgtatatggctcaaaacggtga

SEQ ID NO: 3490 - DNA, 80 bp, synthetic construct
  misc_feature 1..80: note = Synthetic: >BetaSp-cand-2900-2979
  source 1..80: mol_type = other DNA
ctgtctatatcctgtgatatttgatggtcagcgtattgggttattggatcaggcttggcgctttccctgtgcgggtaaga

SEQ ID NO: 3491 - DNA, 80 bp, synthetic construct
  misc_feature 1..80: note = Synthetic: >BetaSp-cand-2980-3059
  source 1..80: mol_type = other DNA
gtgtgtctttcgctgcagaagatgatgttaaaatcatagctgcaaagaagaaggtcacagttgagtatgatctagatgtt

SEQ ID NO: 3492 - DNA, 80 bp, synthetic construct
  misc_feature 1..80: note = Synthetic: >BetaSp-cand-3060-3139
  source 1..80: mol_type = other DNA
gaatttaacaccatcttaaatactgcttgtaacagttttgaggtggatggtagtgttgatgcggaagagcttgctgctgt

SEQ ID NO: 3493 - DNA, 80 bp, synthetic construct
  misc_feature 1..80: note = Synthetic: >BetaSp-cand-3140-3219
  source 1..80: mol_type = other DNA
gattgttgatacaatccaggacaagttagaatcttgcaagacacttgaaggagtgggtgaaaaagtctgtgcatttttgt

SEQ ID NO: 3494 - DNA, 80 bp, synthetic construct
  misc_feature 1..80: note = Synthetic: >BetaSp-cand-3220-3299
  source 1..80: mol_type = other DNA
gtaggttggatgaagaacctatttacttgtttgatgagtgtggtgatgagaaactttcttctcatatgttctgcacattc

SEQ ID NO: 3495 - DNA, 80 bp, synthetic construct
  misc_feature 1..80: note = Synthetic: >BetaSp-cand-3300-3379
  source 1..80: mol_type = other DNA
tgcccaccagaagatgatgatgttgtaatgtttgagtgtgaagatgaaggttgtgaccttagtgaagtggaaacacctga

SEQ ID NO: 3496 - DNA, 80 bp, synthetic construct
  misc_feature 1..80: note = Synthetic: >BetaSp-cand-3380-3459
  source 1..80: mol_type = other DNA
aacagtggaagcagaaccagccagccagtcagacagccaaaatggtgatgtcgatggtaatggtgtaggcgacgtgaaag

SEQ ID NO: 3497 - DNA, 80 bp, synthetic construct
  misc_feature 1..80: note = Synthetic: >BetaSp-cand-3470-3549
  source 1..80: mol_type = other DNA
tgtggaaactgaagctgtggttgactctgaatctgaacaagatcaaacattaagtgcaaataaagagctgctttgtgcag

SEQ ID NO: 3498 - DNA, 80 bp, synthetic construct
  misc_feature 1..80: note = Synthetic: >BetaSp-cand-3550-3629
  source 1..80: mol_type = other DNA
tatttgaagaagacgtagaagccacagaaccggtcattgtcactgattgcactagccattatggtagcctggtaggtaat

SEQ ID NO: 3499 - DNA, 80 bp, synthetic construct
  misc_feature 1..80: note = Synthetic: >BetaSp-cand-3640-3719
  source 1..80: mol_type = other DNA
gtggtagcagcagtgttgccagtgaggctgaacaagtggaagaagtctttgatatagcgacatgcgatgatcctattttg

SEQ ID NO: 3500 - DNA, 80 bp, synthetic construct
  misc_feature 1..80: note = Synthetic: >BetaSp-cand-3720-3799
  source 1..80: mol_type = other DNA
caggaattagagcaggtcgtaaatgttgagtatcatgtgcttcatgataatgtctgcgactatgttgcagcttatgaggc

SEQ ID NO: 3501 - DNA, 80 bp, synthetic construct
  misc_feature 1..80: note = Synthetic: >BetaSp-cand-3800-3879
  source 1..80: mol_type = other DNA
caattattcacaagctgttagtgatttttggacagtacagcaggacgagtttattcacgtctgtgttaatggtgtatttg

SEQ ID NO: 3502 - DNA, 80 bp, synthetic construct
  misc_feature 1..80: note = Synthetic: >BetaSp-cand-3880-3959
  source 1..80: mol_type = other DNA
ttcctaaaactaccaggactaattgctggttgcgttctgtcctggcagtaatgcagaaaataccttgtgtatttaaggat

SEQ ID NO: 3503 - DNA, 80 bp, synthetic construct
  misc_feature 1..80: note = Synthetic: >BetaSp-cand-3960-4039
  source 1..80: mol_type = other DNA
aagaaattacagagtttgtggtgtttgtacaagaatcagtattcttctgattttgtagatgcactgttgaaaaagattcc

SEQ ID NO: 3504 - DNA, 80 bp, synthetic construct
  misc_feature 1..80: note = Synthetic: >BetaSp-cand-4040-4119
  source 1..80: mol_type = other DNA
ggaaaatattattgtaccggaaggaggctatgttgctgattttgcttattggtttttaatgcagtgcaaatggaatgcta

SEQ ID NO: 3505 - DNA, 80 bp, synthetic construct
  misc_feature 1..80: note = Synthetic: >CDPHE15-cand-14520-14599
  source 1..80: mol_type = other DNA
gtggcacaacttctggtgatgctactacagcatatgccaattctgtttttaacatctttcaggctgtcagtgctaatgtg

SEQ ID NO: 3506 - DNA, 80 bp, synthetic construct
  misc_feature 1..80: note = Synthetic: >CDPHE15-cand-14600-14679
  source 1..80: mol_type = other DNA
aatcggttactaagagttgatagtaatctgtgcaataatctcgacgtaagagacctacaacgtagactctatgagtgttg

SEQ ID NO: 3507 - DNA, 80 bp, synthetic construct
  misc_feature 1..80: note = Synthetic: >CDPHE15-cand-14680-14759
  source 1..80: mol_type = other DNA
ttataggtcttctactgtagatgataattttgttaatgattactatggttttcttaggaagcatttttctatgatgatat

SEQ ID NO: 3508 - DNA, 80 bp, synthetic construct
  misc_feature 1..80: note = Synthetic: >CDPHE15-cand-14760-14839
  source 1..80: mol_type = other DNA
tatcagacgatggtgttgtttgccataacagcgagtacgctcagcttggttatgtagcagatcttaatgccttcaagtct

SEQ ID NO: 3509 - DNA, 80 bp, synthetic construct
  misc_feature 1..80: note = Synthetic: >CDPHE15-cand-14840-14919
  source 1..80: mol_type = other DNA
gtgctatattatcagaataatgtgtttatgagtgagtctaaatgttgggttgaacccgatgttaataaaggacctcatga

SEQ ID NO: 3510 - DNA, 80 bp, synthetic construct
  misc_feature 1..80: note = Synthetic: >CDPHE15-cand-14920-14999
  source 1..80: mol_type = other DNA
gttttgctcacagcacactatgcagataactgataaggatggttcatactttctgccttatccagatccctctagaattt

SEQ ID NO: 3511 - DNA, 80 bp, synthetic construct
  misc_feature 1..80: note = Synthetic: >CDPHE15-cand-15000-15079
  source 1..80: mol_type = other DNA
tgtcagcaggcgtttttgtggacgatgttgttaagacagaccctgtcattcttttagagcgttatgtttcattggctata

SEQ ID NO: 3512 - DNA, 80 bp, synthetic construct
  misc_feature 1..80: note = Synthetic: >CDPHE15-cand-15080-15159
  source 1..80: mol_type = other DNA
gatgcctaccctttgtccaaacatgaaaaccctgagtatcagcgtgtcttctatgtattattggactgggttaaacatct

SEQ ID NO: 3513 - DNA, 80 bp, synthetic construct
  misc_feature 1..80: note = Synthetic: >CDPHE15-cand-15160-15239
  source 1..80: mol_type = other DNA
taataaaactttaaaccaaggcgtattagatgcgttctctatcgaaatgctagaggactcaacttgtaagttttgggatg

SEQ ID NO: 3514 - DNA, 80 bp, synthetic construct
  misc_feature 1..80: note = Synthetic: >CDPHE15-cand-15240-15319
  source 1..80: mol_type = other DNA
aaaagttttattctaacatgtatgaacgctctgcagttttgcagtcggcaggtctgtgtgttgtttgttcgtctcaaact

SEQ ID NO: 3515 - DNA, 80 bp, synthetic construct
  misc_feature 1..80: note = Synthetic: >CDPHE15-cand-15320-15399
  source 1..80: mol_type = other DNA
gtattacggtgtggtgactgtctacgtaggcctatgctttgtactaaatgtgcatatgatcatgtggtttctaccagtca

SEQ ID NO: 3516 - DNA, 80 bp, synthetic construct
  misc_feature 1..80: note = Synthetic: >CDPHE15-cand-15400-15479
  source 1..80: mol_type = other DNA
taagtttatattggctataacaccgtatgtttgttgtgctactggctgtggtgttaatgacgttaccaagctctaccttg

SEQ ID NO: 3517 - DNA, 80 bp, synthetic construct
  misc_feature 1..80: note = Synthetic: >CDPHE15-cand-15480-15559
  source 1..80: mol_type = other DNA
gtggtttgagttattggtgtatagaccacaaacctaggttagcctttccattatgttctgctggcaatgtttttggtttg

SEQ ID NO: 3518 - DNA, 80 bp, synthetic construct
  misc_feature 1..80: note = Synthetic: >CDPHE15-cand-15560-15639
  source 1..80: mol_type = other DNA
tacaaaaattctgcagttggttcacctgatgtggaccaatttaaccaactagctacttctgactggactgatgttcgtga

SEQ ID NO: 3519 - DNA, 80 bp, synthetic construct
  misc_feature 1..80: note = Synthetic: >CDPHE15-cand-15640-15719
  source 1..80: mol_type = other DNA
ttacaaattagccaatgatgtcaaggactcattgcgtttgtttgcagcagaaactattaaagctagcgaagaaaatatta

SEQ ID NO: 3520 - DNA, 80 bp, synthetic construct
  misc_feature 1..80: note = Synthetic: >CDPHE15-cand-15720-15799
  source 1..80: mol_type = other DNA
agtcttcttatgcctgtgctacaatcagggaagttattggtcctaaagagcttattttaagttgggaggctggtaagaca

SEQ ID NO: 3521 - DNA, 80 bp, synthetic construct
  misc_feature 1..80: note = Synthetic: >CanadaGoose-cand-27280-27359
  source 1..80: mol_type = other DNA
ggatgagcaggaagtcaatgaccggctggaatttgatgatgagaatcctgaagactttgcagatagagtggattggggaa

SEQ ID NO: 3522 - DNA, 80 bp, synthetic construct
  misc_feature 1..80: note = Synthetic: >CanadaGoose-cand-27360-27439
  source 1..80: mol_type = other DNA
attcagctctaggaagttcagagatttaacaagctggacatggcccaggttgtgaagactccattagaggcatctgtgaa

SEQ ID NO: 3523 - DNA, 80 bp, synthetic construct
  misc_feature 1..80: note = Synthetic: >CanadaGoose-cand-27430-27509
  source 1..80: mol_type = other DNA
catctgtgaagactatggaagctagactcggttgtgggtctagtgagtgtgagtggaattggtccaagcacacaaataga

SEQ ID NO: 3524 - DNA, 80 bp, synthetic construct
  misc_feature 1..80: note = Synthetic: >CanadaGoose-cand-27510-27589
  source 1..80: mol_type = other DNA
cttcccttgtgccttttttcagagtctacacatttcctgtgtgagagacacctacataacaaagatgataaaatttgttg

SEQ ID NO: 3525 - DNA, 80 bp, synthetic construct
  misc_feature 1..80: note = Synthetic: >CanadaGoose-cand-27590-27669
  source 1..80: mol_type = other DNA
tttatgttggtctcatctagactataggcgcgagctgcttaacacttgtgttcagcagtccaaacttaaagtcgttgaga

SEQ ID NO: 3526 - DNA, 80 bp, synthetic construct
  misc_feature 1..80: note = Synthetic: >CanadaGoose-cand-27670-27749
  source 1..80: mol_type = other DNA
gagaaactgttgtttaacaaaacagtcatgaaccatggttctcgtactgttcttgttctttcttttgtcagtgttctatc

SEQ ID NO: 3527 - DNA, 80 bp, synthetic construct
  misc_feature 1..80: note = Synthetic: >CanadaGoose-cand-27750-27829
  source 1..80: mol_type = other DNA
tgtttctttatgtgcagtgtggaatattgattgtccagtacctcctgataaaactgtttgctcagttgtttccaaggatg

SEQ ID NO: 3528 - DNA, 80 bp, synthetic construct
  misc_feature 1..80: note = Synthetic: >CanadaGoose-cand-27830-27909
  source 1..80: mol_type = other DNA
gtaattatatagataggttggttaatgtcacctattataatagaactcaacaatctttctgtggcgagtttggctgtagt

SEQ ID NO: 3529 - DNA, 80 bp, synthetic construct
  misc_feature 1..80: note = Synthetic: >CanadaGoose-cand-27910-27989
  source 1..80: mol_type = other DNA
gttgaggctataccagctgagctgtattttacagcgatctcttttgaggaagttggtagtgttaattgtcagggtgccat

SEQ ID NO: 3530 - DNA, 80 bp, synthetic construct
  misc_feature 1..80: note = Synthetic: >CanadaGoose-cand-27990-28069
  source 1..80: mol_type = other DNA
cgtgatgggttgtgttacacaacttagcattgatagttacatctgtgagccatgccacctacaacctcttgttgatttag

SEQ ID NO: 3531 - DNA, 80 bp, synthetic construct
  misc_feature 1..80: note = Synthetic: >CanadaGoose-cand-28070-28149
  source 1..80: mol_type = other DNA
ttgaggaaaatttggcagttgttgttgtagaacatgtgattataggtcttttgtgttgggttataatcatgttagctttg

SEQ ID NO: 3532 - DNA, 80 bp, synthetic construct
  misc_feature 1..80: note = Synthetic: >CanadaGoose-cand-28150-28229
  source 1..80: mol_type = other DNA
ttgttgtttttaaaccggtgcaataagtattgtcctgcaccggagagttttcattgattgcattaaggcatgtgcgctta

SEQ ID NO: 3533 - DNA, 80 bp, synthetic construct
  misc_feature 1..80: note = Synthetic: >CanadaGoose-cand-28230-28309
  source 1..80: mol_type = other DNA
atccgtatatgtctaatgcctggataatgtctaatctgtgtgtctagtagccaggaaacgaacggcacacccttaggttt

SEQ ID NO: 3534 - DNA, 80 bp, synthetic construct
  misc_feature 1..80: note = Synthetic: >CanadaGoose-cand-28310-28389
  source 1..80: mol_type = other DNA
taatttagtttaattaggttagtttaggttagtttagagtagtttaaaagatgccatgtgccggggccacgcggagtacg

SEQ ID NO: 3535 - DNA, 80 bp, synthetic construct
  misc_feature 1..80: note = Synthetic: >CanadaGoose-cand-28390-28469
  source 1..80: mol_type = other DNA
atcgagggtacagcacatggacgcccattttgattaatgggaagagctagatttagtttaggtttagtttaattggctaa

SEQ ID NO: 3536 - DNA, 80 bp, synthetic construct
  misc_feature 1..80: note = Synthetic: >Delta-cand-0-79
  source 1..80: mol_type = other DNA
ggggactaaagataaaaattatagcattagtctataattttatctccactctagcttcgctagttctctactcgacacca

SEQ ID NO: 3537 - DNA, 80 bp, synthetic construct
  misc_feature 1..80: note = Synthetic: >HKU10-cand-12800-12879
  source 1..80: mol_type = other DNA
ggctctagtgcagctcaactagagccctgcaatggcactgacactgatcattgtgtcagagcatttgacatttataacaa

SEQ ID NO: 3538 - DNA, 80 bp, synthetic construct
  misc_feature 1..80: note = Synthetic: >HKU10-cand-12880-12959
  source 1..80: mol_type = other DNA
agatgttgcatgtctcggtaagtttttgaaaacgaactgtgttcgtttcagaaacaaattacataaggatgcatactttg

SEQ ID NO: 3539 - DNA, 80 bp, synthetic construct
  misc_feature 1..80: note = Synthetic: >HKU10-cand-12960-13039
  source 1..80: mol_type = other DNA
ttataaagagatgtcctaagtctgtcatggaacatgagcaatccatatatgacatacttaaagattctggagccattgca

SEQ ID NO: 3540 - DNA, 80 bp, synthetic construct
  misc_feature 1..80: note = Synthetic: >HKU10-cand-13040-13119
  source 1..80: mol_type = other DNA
acacatgacttcttcgtatggaaggatggtcgtatgatttatggtaatattagtagacaagatcttactaagtatactat

SEQ ID NO: 3541 - DNA, 80 bp, synthetic construct
  misc_feature 1..80: note = Synthetic: >HKU10-cand-13120-13199
  source 1..80: mol_type = other DNA
gatggaccttgtgtatgcattgcgcaactttgatgagaaaaattgtgaaactcttaaggagatacttgttattacaggtg

SEQ ID NO: 3542 - DNA, 80 bp, synthetic construct
  misc_feature 1..80: note = Synthetic: >HKU10-cand-13200-13279
  source 1..80: mol_type = other DNA
cgtgtgaccagtcttattttgataataagttttggtttgaccctgtagaaaatgaagatctccatagagtttatgccatt

SEQ ID NO: 3543 - DNA, 80 bp, synthetic construct
  misc_feature 1..80: note = Synthetic: >HKU10-cand-13360-13439
  source 1..80: mol_type = other DNA
tatcactcttgataaccaagaccttaacggcaacttttatgactttggtgattttgctaagacattacctggtatgggtg

SEQ ID NO: 3544 - DNA, 80 bp, synthetic construct
  misc_feature 1..80: note = Synthetic: >HKU10-cand-13440-13519
  source 1..80: mol_type = other DNA
ttcctttgtgtacttcttattactcttacatgatgcctgttatgggtatgactaattgtcttgctggtgaatgctttatt

SEQ ID NO: 3545 - DNA, 80 bp, synthetic construct
  misc_feature 1..80: note = Synthetic: >HKU10-cand-13520-13599
  source 1..80: mol_type = other DNA
aaaagtgatatttttggtagtgattttaagtctttcgatcttttgcattatgactttactgatcataaacaagcattgtt

SEQ ID NO: 3546 - DNA, 80 bp, synthetic construct
  misc_feature 1..80: note = Synthetic: >HKU10-cand-13600-13679
  source 1..80: mol_type = other DNA
cgaaaagtactttaagcattgggaccaagagtatcatcctaattgtgtggattgccatgatgaactttgtatagttcatt

SEQ ID NO: 3547 - DNA, 80 bp, synthetic construct
  misc_feature 1..80: note = Synthetic: >HKU10-cand-13680-13759
  source 1..80: mol_type = other DNA
gtgccaattttaacacattgttttctaccactatccctattacggcttatggcccgctgtgtcgcaaagtttttgttgat

SEQ ID NO: 3548 - DNA, 80 bp, synthetic construct
  misc_feature 1..80: note = Synthetic: >HKU10-cand-13760-13839
  source 1..80: mol_type = other DNA
ggtgtgccattagttgctacagcaggttatcattttaaacaacttggtattgtgtggaataaggacttgaacacacattc

SEQ ID NO: 3549 - DNA, 80 bp, synthetic construct
  misc_feature 1..80: note = Synthetic: >HKU10-cand-13840-13919
  source 1..80: mol_type = other DNA
taccaggcttactattaatgagctattacaatttgtgactgacccgtcgttgcttgttgcttcttcgccagccctggttg

SEQ ID NO: 3550 - DNA, 80 bp, synthetic construct
  misc_feature 1..80: note = Synthetic: >HKU10-cand-13920-13999
  source 1..80: mol_type = other DNA
atcagcgtactgtgtgtttctcagtcgcagcactaggtacaggtatgactaagcaaactatgcaacctggtcattttaac

SEQ ID NO: 3551 - DNA, 80 bp, synthetic construct
  misc_feature 1..80: note = Synthetic: >HKU10-cand-14000-14079
  source 1..80: mol_type = other DNA
aaggaattctatgactttttgcgtaaacaaggcttctttgaagaaggttctgaattaacacttaaacacttcttctttgc

SEQ ID NO: 3552 - DNA, 80 bp, synthetic construct
  misc_feature 1..80: note = Synthetic: >HKU14-cand-5600-5679
  source 1..80: mol_type = other DNA
tagttgtggtgataagctaattcattgcacgcgaattaatgttccatttttaatttgcagcaacacacccaaagacagtg

SEQ ID NO: 3553 - DNA, 80 bp, synthetic construct
  misc_feature 1..80: note = Synthetic: >HKU14-cand-5680-5759
  source 1..80: mol_type = other DNA
tcgtgcctaagggtgtgacatgtgcaaatgtttttattggtggtaatgtggggcactatactcatttgaggtgtgactca

SEQ ID NO: 3554 - DNA, 80 bp, synthetic construct
  misc_feature 1..80: note = Synthetic: >HKU14-cand-5760-5839
  source 1..80: mol_type = other DNA
agttatcaactttttgatgcttctactgttaaaaagattactacagtcaatggtaaaatcactgactgtttgtatcttaa

SEQ ID NO: 3555 - DNA, 80 bp, synthetic construct
  misc_feature 1..80: note = Synthetic: >HKU14-cand-5840-5919
  source 1..80: mol_type = other DNA
aaatttgaagcaaacttttaggtctgttttgacgacttattatttggatgatgttaagaaggttgagtataatcctgatc

SEQ ID NO: 3556 - DNA, 80 bp, synthetic construct
  misc_feature 1..80: note = Synthetic: >HKU14-cand-5920-5999
  source 1..80: mol_type = other DNA
ttacacagtactactgtgagggtggtaagtattatactcaaagaattataaaggctcaatttagaacttttgagaaggtt

SEQ ID NO: 3557 - DNA, 80 bp, synthetic construct
  misc_feature 1..80: note = Synthetic: >HKU14-cand-6000-6079
  source 1..80: mol_type = other DNA
gatggtgtctatactaactttaagttagttggtcacaccatctgtgatagcttgaatgctaaactgggttttgatgctaa

SEQ ID NO: 3558 - DNA, 80 bp, synthetic construct
  misc_feature 1..80: note = Synthetic: >HKU14-cand-6080-6159
  source 1..80: mol_type = other DNA
taagcattttgaagaatttaaggttactgagtggcccatagctactggtgatgtggtattggttactgatgatatgtatg

SEQ ID NO: 3559 - DNA, 80 bp, synthetic construct
  misc_feature 1..80: note = Synthetic: >HKU14-cand-6160-6239
  source 1..80: mol_type = other DNA
ttaagaggtatgagaagggatgtattacttttggtaaacctgttatctggtataaccatgatcaggcatcccttaattct

SEQ ID NO: 3560 - DNA, 80 bp, synthetic construct
  misc_feature 1..80: note = Synthetic: >HKU14-cand-6240-6319
  source 1..80: mol_type = other DNA
cttacatattttaatcgacctagtttggttgatgttaataagtttgatgttttgaaagttgatgatgttgttgcagaagt

SEQ ID NO: 3561 - DNA, 80 bp, synthetic construct
  misc_feature 1..80: note = Synthetic: >HKU14-cand-6320-6399
  source 1..80: mol_type = other DNA
tgaatcttgcagctctgacttgagccatgggagtttgagtggtagtgtgagtacaggcagctcttacctgagcccacaag

SEQ ID NO: 3562 - DNA, 80 bp, synthetic construct
  misc_feature 1..80: note = Synthetic: >HKU14-cand-6400-6479
  source 1..80: mol_type = other DNA
gtaatcaggggagtaatgtcgaagctcatacgactgttcttgcttcaggtaatcaagggagtaatgcaattaatggttca

SEQ ID NO: 3563 - DNA, 80 bp, synthetic construct
  misc_feature 1..80: note = Synthetic: >HKU14-cand-6480-6559
  source 1..80: mol_type = other DNA
gctaatagtaataagattgttaaattaaatggtgttaaaaagccttttaaggttgaaaatagtgttgttgttaatgacag

SEQ ID NO: 3564 - DNA, 80 bp, synthetic construct
  misc_feature 1..80: note = Synthetic: >HKU14-cand-6560-6639
  source 1..80: mol_type = other DNA
cactagtgagaccaaatttgttaagagtttgtctattgttgatgtttatgatatgtggctgactggtagtcggtatgttg

SEQ ID NO: 3565 - DNA, 80 bp, synthetic construct
  misc_feature 1..80: note = Synthetic: >HKU14-cand-6640-6719
  source 1..80: mol_type = other DNA
ttaaaactgctaatgcacttagtgctgcggttaacgtacctacaatcaagaagtttataaaatttggtatgactcttgtt

SEQ ID NO: 3566 - DNA, 80 bp, synthetic construct
  misc_feature 1..80: note = Synthetic: >HKU14-cand-6720-6799
  source 1..80: mol_type = other DNA
agtataccaatagatttgttgaatttgcgagaaattaagcctgtgtttggtgcagcgaaagtggttagagacagagtttc

SEQ ID NO: 3567 - DNA, 80 bp, synthetic construct
  misc_feature 1..80: note = Synthetic: >HKU14-cand-6800-6879
  source 1..80: mol_type = other DNA
tgactgctaccgctttattaaatggctttttgttcttttgtttgggtggataaaaatatccagttataatagagttgtat

SEQ ID NO: 3568 - DNA, 80 bp, synthetic construct
  misc_feature 1..80: note = Synthetic: >HKU25-cand-3860-3939
  source 1..80: mol_type = other DNA
cctgcagtacgccctaaggtgcgtgcacctaagaagcgagccgcaaaagttgggcagacagctgctagtgatagtgacac

SEQ ID NO: 3569 - DNA, 80 bp, synthetic construct
  misc_feature 1..80: note = Synthetic: >HKU25-cand-3940-4019
  source 1..80: mol_type = other DNA
agcagctgatccacttactccttttaggcacaaagtcataacagattgtgttacaatcgtgttgtgcgatgccataaggt

SEQ ID NO: 3570 - DNA, 80 bp, synthetic construct
  misc_feature 1..80: note = Synthetic: >HKU25-cand-4020-4099
  source 1..80: mol_type = other DNA
tggctaagtgctttaaaaatagtgtgttagtcaatgcggctaatacacatcttaaacatggtggtggtatagctgctgcc

SEQ ID NO: 3571 - DNA, 80 bp, synthetic construct
  misc_feature 1..80: note = Synthetic: >HKU25-cand-4100-4179
  source 1..80: mol_type = other DNA
ataaatgaagcctcacagggagctgtgcaaaaagagtccgacgagtacataaactctaaaggaccattgcacgtaggtga

SEQ ID NO: 3572 - DNA, 80 bp, synthetic construct
  misc_feature 1..80: note = Synthetic: >HKU25-cand-4180-4259
  source 1..80: mol_type = other DNA
ctctgtgttattaaagggacatggtgtggctaagaacatcctacatgtagtaggacctgatgctagaaccaaacaggatg

SEQ ID NO: 3573 - DNA, 80 bp, synthetic construct
  misc_feature 1..80: note = Synthetic: >HKU25-cand-4260-4339
  source 1..80: mol_type = other DNA
tctctttactcattaattgttacaaggctatgaattcatatccactaattgtaacacctctcatctctgcaggcattttt

SEQ ID NO: 3574 - DNA, 80 bp, synthetic construct
  misc_feature 1..80: note = Synthetic: >HKU25-cand-4340-4419
  source 1..80: mol_type = other DNA
ggagttgatcctaaagtgtcttttgagtatcttcagcgtgaggttaaaactagagtgctagttgcaacaaactctgaaga

SEQ ID NO: 3575 - DNA, 80 bp, synthetic construct
  misc_feature 1..80: note = Synthetic: >HKU25-cand-4420-4499
  source 1..80: mol_type = other DNA
aatctttaataacctaacacaggttaaagtgccaaagggcttaactttctcctatgatgggcttaagggcggcatgcgta

SEQ ID NO: 3576 - DNA, 80 bp, synthetic construct
  misc_feature 1..80: note = Synthetic: >HKU25-cand-4500-4579
  source 1..80: mol_type = other DNA
aggctaaggattatggctttacgatgttcgtctgtactgacacatcgtctaatactaagatccttcgtagtaagggtatt

SEQ ID NO: 3577 - DNA, 80 bp, synthetic construct
  misc_feature 1..80: note = Synthetic: >HKU25-cand-4580-4659
  source 1..80: mol_type = other DNA
gattacactaagaaacaagtcacaacaggtggggttcattaccacttttatagtgctaaggaccccttaccagaacttgt

SEQ ID NO: 3578 - DNA, 80 bp, synthetic construct
  misc_feature 1..80: note = Synthetic: >HKU25-cand-4660-4739
  source 1..80: mol_type = other DNA
cgcaaaagctaataatactaaaggcatcatagcccatccattgggatacatttctcatggtttggatcttatgcaggcca

SEQ ID NO: 3579 - DNA, 80 bp, synthetic construct
  misc_feature 1..80: note = Synthetic: >HKU25-cand-4740-4819
  source 1..80: mol_type = other DNA
gaaaatttgtcaacatgatttctgtcccttatgtatgcctactcgcaaacaaagagcaggctttagtactaacaactaca

SEQ ID NO: 3580 - DNA, 80 bp, synthetic construct
  misc_feature 1..80: note = Synthetic: >HKU25-cand-4820-4899
  source 1..80: mol_type = other DNA
agtgagcaagttagccctgttgttgaattcataagacatgttgaaagcacaggatcctatcacaattggcacctggtcaa

SEQ ID NO: 3581 - DNA, 80 bp, synthetic construct
  misc_feature 1..80: note = Synthetic: >HKU25-cand-4900-4979
  source 1..80: mol_type = other DNA
aggtgaggttcttgtcaacaacatcgtctataataaactgttgcactggtcagatcaaaccatctgctacaaagatgaac

SEQ ID NO: 3582 - DNA, 80 bp, synthetic construct
  misc_feature 1..80: note = Synthetic: >HKU25-cand-4980-5059
  source 1..80: mol_type = other DNA
agctcttcgtgttaaagaacggttgcgttctaccatttgaagacattagtaagtgccgcgcctatctgacgtcaaggacg

SEQ ID NO: 3583 - DNA, 80 bp, synthetic construct
  misc_feature 1..80: note = Synthetic: >HKU25-cand-5060-5139
  source 1..80: mol_type = other DNA
acacaacaattaacagtcgaagtgcttgtcacgatcgatggtgttaattttagaacatgtgttctaaataatcaaagcac

SEQ ID NO: 3584 - DNA, 80 bp, synthetic construct
  misc_feature 1..80: note = Synthetic: >HKU25-cand-29430-29509
  source 1..80: mol_type = other DNA
gcagaggctcttctagatccagttccagaggatctcgctcaggaaactcctccagaaatgcttccccaggcccatctgga

SEQ ID NO: 3585 - DNA, 80 bp, synthetic construct
  misc_feature 1..80: note = Synthetic: >HKU25-cand-29510-29589
  source 1..80: mol_type = other DNA
atcggagctgtaagcggcgatgcatcgggtgtcctttaccttagcttgctcaaacgccttgaagatctcgaggctggcaa

SEQ ID NO: 3586 - DNA, 80 bp, synthetic construct
  misc_feature 1..80: note = Synthetic: >HKU25-cand-29590-29669
  source 1..80: mol_type = other DNA
gaacaaggctactcctaaagtagtaacaaagaaagatgctgcagctgctaaaaataagatgcgccacaagcgtgtcgcca

SEQ ID NO: 3587 - DNA, 80 bp, synthetic construct
  misc_feature 1..80: note = Synthetic: >HKU25-cand-29670-29749
  source 1..80: mol_type = other DNA
ccaaaagtttcaacatggttcaggcgtttggacgtcggggaccaggcgaccttcaaggaaactttggtgatctccagttg

SEQ ID NO: 3588 - DNA, 80 bp, synthetic construct
  misc_feature 1..80: note = Synthetic: >HKU25-cand-29750-29829
  source 1..80: mol_type = other DNA
aacaagctcggcactgaagacccacgttggccacaaattgctgaacttgccccttcatccagtgctttcattggtatgtc

SEQ ID NO: 3589 - DNA, 80 bp, synthetic construct
  misc_feature 1..80: note = Synthetic: >HKU25-cand-29830-29909
  source 1..80: mol_type = other DNA
ccaattcaaacttacccatcagagcaatgaggatgatggcaccccagtgtatttccttagatacagtggtgccataaaac

SEQ ID NO: 3590 - DNA, 80 bp, synthetic construct
  misc_feature 1..80: note = Synthetic: >HKU25-cand-29910-29989
  source 1..80: mol_type = other DNA
ttgaccccaagaaccctaactacaataagtggttggagttgcttgagaaaaacattgatgcctacaaatctttccctgtt

SEQ ID NO: 3591 - DNA, 80 bp, synthetic construct
  misc_feature 1..80: note = Synthetic: >HKU25-cand-29990-30069
  source 1..80: mol_type = other DNA
aaggagaagaaacagaaggctgataaaaacaaacaagactcaaccgatgacggttctctcgcgtttgatgaagctgtcgc

SEQ ID NO: 3592 - DNA, 80 bp, synthetic construct
  misc_feature 1..80: note = Synthetic: >HKU25-cand-30070-30149
  source 1..80: mol_type = other DNA
agcagcgatggcatcccaaaaacctcagcgagcgcctcgtggtagtattacccagcgctctcatgctcgtgcagctgtag

SEQ ID NO: 3593 - DNA, 80 bp, synthetic construct
  misc_feature 1..80: note = Synthetic: >HKU25-cand-30150-30229
  source 1..80: mol_type = other DNA
gtccaatgcaagacgtgaatcaggatgatgatcgtcagtaaaagtaacaagagtaaggcgaccgcaagtgattggaaacc

SEQ ID NO: 3594 - DNA, 80 bp, synthetic construct
  misc_feature 1..80: note = Synthetic: >HKU25-cand-30230-30309
  source 1..80: mol_type = other DNA
ccaatacacgacgcgtttgtctactcttgcacagaatggaatcatgttgtaattacagtgcaagaaggtaattataaccc

SEQ ID NO: 3595 - DNA, 80 bp, synthetic construct
  misc_feature 1..80: note = Synthetic: >HKU25-cand-30310-30389
  source 1..80: mol_type = other DNA
atttaattgatagctatgattagtaaaatgtgtagctgtagagagaatgttaaagactgtcacctctgcgtgattgcaag

SEQ ID NO: 3596 - DNA, 80 bp, synthetic construct
  misc_feature 1..80: note = Synthetic: >HKU25-cand-30390-30469
  source 1..80: mol_type = other DNA
tgaacagtgccccctgggaagagctctacagtgtgaagtgtaaataaaaatagctgttattcaattagattaggctgatt

SEQ ID NO: 3597 - DNA, 80 bp, synthetic construct
  misc_feature 1..80: note = Synthetic: >HKU31-cand-40-119
  source 1..80: mol_type = other DNA
gtagaactcttgttttaacgaacttaattaaaatgcccttatactttgtctaggtagtggcacttaagtgccagacctat

SEQ ID NO: 3598 - DNA, 80 bp, synthetic construct
  misc_feature 1..80: note = Synthetic: >HKU31-cand-120-199
  source 1..80: mol_type = other DNA
gcattgtagtgggtttagtaaaaattaaatttatatttttcatttagagctgcgtgtctcaagtgcgtctcggtcacaat

SEQ ID NO: 3599 - DNA, 80 bp, synthetic construct
  misc_feature 1..80: note = Synthetic: >HKU31-cand-200-279
  source 1..80: mol_type = other DNA
atactgttccgtcaggtgcgtgacaatccggggctcatcatgtcttccgcgactggtgagggttctcaaggtgcgagagc

SEQ ID NO: 3600 - DNA, 80 bp, synthetic construct
  misc_feature 1..80: note = Synthetic: >HKU5-cand-22890-22969
  source 1..80: mol_type = other DNA
gagttcattgaacaggcaacaactcaagagtgtgatttcacacccatgttgactggcacacctcctcctatatataattt

SEQ ID NO: 3601 - DNA, 80 bp, synthetic construct
  misc_feature 1..80: note = Synthetic: >HKU5-cand-22970-23049
  source 1..80: mol_type = other DNA
caaaaggttggttttcaccaattgcaattacaacttaacaaaactcctttcacttttccaagtgagtgagttttcgtgtc

SEQ ID NO: 3602 - DNA, 80 bp, synthetic construct
  misc_feature 1..80: note = Synthetic: >HKU5-cand-23040-23119
  source 1..80: mol_type = other DNA
ttttcgtgtcatcaagtttcacctagtagtcttgctactggctgttactcttctcttacagtggattattttgcatactc

SEQ ID NO: 3603 - DNA, 80 bp, synthetic construct
  misc_feature 1..80: note = Synthetic: >HKU5-cand-23120-23199
  source 1..80: mol_type = other DNA
cactgatatgagttcttacctgcaacctggctccgctggagaaattgtgcagtttaattacaaacaagactttagcaatc

SEQ ID NO: 3604 - DNA, 80 bp, synthetic construct
  misc_feature 1..80: note = Synthetic: >HKU5-cand-23200-23279
  source 1..80: mol_type = other DNA
ccacgtgtagagtgctcgctactgttccaaaaaatcttactacaattactaaacctagtaattatgttcatcttacagag

SEQ ID NO: 3605 - DNA, 80 bp, synthetic construct
  misc_feature 1..80: note = Synthetic: >HKU5-cand-23280-23359
  source 1..80: mol_type = other DNA
tgttataaaaccaccgcatatggcaagaattacttgtacaatgcacctggtggctacactccttgcctatctctagcatc

SEQ ID NO: 3606 - DNA, 80 bp, synthetic construct
  misc_feature 1..80: note = Synthetic: >HKU5-cand-23360-23439
  source 1..80: mol_type = other DNA
gcgcgggttcactactaaccgtcaatcacacagccttgagctgcctgatgatggttatttaaccacaacaggttctgtct

SEQ ID NO: 3607 - DNA, 80 bp, synthetic construct
  misc_feature 1..80: note = Synthetic: >HKU5-cand-23440-23519
  source 1..80: mol_type = other DNA
accccgtaaatggtaaccttcaaatggctttcattatttctgttcagtatggaactgacactaatagtgtctgtcccatg

SEQ ID NO: 3608 - DNA, 80 bp, synthetic construct
  misc_feature 1..80: note = Synthetic: >HKU5-cand-23520-23599
  source 1..80: mol_type = other DNA
caagctctaagaaatgacactagcattgaagataagctagatgtctgtgttgaatactccctccatggcataacaggaag

SEQ ID NO: 3609 - DNA, 80 bp, synthetic construct
  misc_feature 1..80: note = Synthetic: >HKU5-cand-23600-23679
  source 1..80: mol_type = other DNA
aggagtatttcacaattgcacatctgttggactgagaaaccagcggtttgtgtatgatactttcgacaacctagttggtt

SEQ ID NO: 3610 - DNA, 80 bp, synthetic construct
  misc_feature 1..80: note = Synthetic: >HKU5-cand-23680-23759
  source 1..80: mol_type = other DNA
accattcagataatggtaattactattgtgtcagaccttgtgttagtgtgcctgtctctgtgatttatgacaaggcatct

SEQ ID NO: 3611 - DNA, 80 bp, synthetic construct
  misc_feature 1..80: note = Synthetic: >HKU5-cand-23760-23839
  source 1..80: mol_type = other DNA
aattctcatgccacactatttggaagcgttgcatgttcgcacgttaccactatgatgtcgcaattttcacgcatgaccaa

SEQ ID NO: 3612 - DNA, 80 bp, synthetic construct
  misc_feature 1..80: note = Synthetic: >HKU5-cand-23840-23919
  source 1..80: mol_type = other DNA
aactaatttgctcgcgcgtacaactcctggaccattgcaaactactgttggttgtgcaatgggcttcattaattcttcaa

SEQ ID NO: 3613 - DNA, 80 bp, synthetic construct
  misc_feature 1..80: note = Synthetic: >HKU5-cand-23920-23999
  source 1..80: mol_type = other DNA
tggtagttgatgaatgtcaacttcctcttggtcaatcactttgtgctattccaccaactacttctacacgctttcgacgt

SEQ ID NO: 3614 - DNA, 80 bp, synthetic construct
  misc_feature 1..80: note = Synthetic: >HKU5-cand-24000-24079
  source 1..80: mol_type = other DNA
gctacttctggtatacctgatgtgtttcaaatcgccactctaaactttactagtcctttaacactcgcaccaataaattc

SEQ ID NO: 3615 - DNA, 80 bp, synthetic construct
  misc_feature 1..80: note = Synthetic: >HKU5-cand-24080-24159
  source 1..80: mol_type = other DNA
aactggatttgttgttgcggtgccgactaatttcacatttggtgttactcaagaattcattgagactaccattcaaaaga

SEQ ID NO: 3616 - DNA, 80 bp, synthetic construct
  misc_feature 1..80: note = Synthetic: >HKU5-cand-28020-28099
  source 1..80: mol_type = other DNA
tgtgtgtctagcaatccttacggctattcgattatgtgtgcagtgtgtttctggttgtcatacactagtatttctaccag

SEQ ID NO: 3617 - DNA, 80 bp, synthetic construct
  misc_feature 1..80: note = Synthetic: >HKU5-cand-28100-28179
  source 1..80: mol_type = other DNA
ctgttcatatttataatacagggcgtgcagcctatgtaaagttccaagagagccacccaccatatccccctgaggactgg

SEQ ID NO: 3618 - DNA, 80 bp, synthetic construct
  misc_feature 1..80: note = Synthetic: >HKU5-cand-28180-28259
  source 1..80: mol_type = other DNA
gtttaacgaactctctaaatatggcgtcaagcaatgttaccctcactaatgatgaggttctcaggcttgttaaagactgg

SEQ ID NO: 3619 - DNA, 80 bp, synthetic construct
  misc_feature 1..80: note = Synthetic: >HKU5-cand-28260-28339
  source 1..80: mol_type = other DNA
aatttcacctggtcggtggttttcctgctcatcacaatcgtgctccaatatggctacccatctaggagcatgtttgtcta

SEQ ID NO: 3620 - DNA, 80 bp, synthetic construct
  misc_feature 1..80: note = Synthetic: >HKU5-cand-28340-28419
  source 1..80: mol_type = other DNA
cgtcattaagatgtttgtattatggctactttggccagcatcaatggcactatctatattttgtgctgtctatccaattg

SEQ ID NO: 3621 - DNA, 80 bp, synthetic construct
  misc_feature 1..80: note = Synthetic: >HKU5-cand-28420-28499
  source 1..80: mol_type = other DNA
atttagcttcccagataatctctggcatactagccgcaacaagctgcgcaatgtggatttcctacttcgtgcaaagcatt

SEQ ID NO: 3622 - DNA, 80 bp, synthetic construct
  misc_feature 1..80: note = Synthetic: >HKU5-cand-28500-28579
  source 1..80: mol_type = other DNA
cggctgtttatgcgcactggctcttggtggtccttcaaccctgagtccaactgtctacttaatgttcccatcggaggcac

SEQ ID NO: 3623 - DNA, 80 bp, synthetic construct
  misc_feature 1..80: note = Synthetic: >HKU5-cand-28580-28659
  source 1..80: mol_type = other DNA
cactgttgtgcgaccacttgttgaagattcaaccagtgtcactgctgtggtcactgatggctaccttaagatggcaggca

SEQ ID NO: 3624 - DNA, 80 bp, synthetic construct
  misc_feature 1..80: note = Synthetic: >HKU5-cand-28660-28739
  source 1..80: mol_type = other DNA
tgcatttcggtgcttgcgactttcaacgtctaccctctgaggtgacggtcgcaaaaccaaatgtgctgatagccctcaaa

SEQ ID NO: 3625 - DNA, 80 bp, synthetic construct
  misc_feature 1..80: note = Synthetic: >HKU5-cand-28740-28819
  source 1..80: mol_type = other DNA
atgatcaaacgccaagcgtatggtacaaattctggtgttgctatttatcataggtataaggcaggcaactatagaaggcc

SEQ ID NO: 3626 - DNA, 80 bp, synthetic construct
  misc_feature 1..80: note = Synthetic: >HKU5-cand-28820-28899
  source 1..80: mol_type = other DNA
gcccattatacaagaccaagaactcgcactgctaagggcttaattgctctagtaagagacagatttttaacgaatcttat

SEQ ID NO: 3627 - DNA, 80 bp, synthetic construct
  misc_feature 1..80: note = Synthetic: >HKU5-cand-28900-28979
  source 1..80: mol_type = other DNA
tatctcattgttatggctactcctgctcctcctcgtgcagtagtgttcgctaatgacaatgaaacccctaccaacaacca

SEQ ID NO: 3628 - DNA, 80 bp, synthetic construct
  misc_feature 1..80: note = Synthetic: >HKU5-cand-28980-29059
  source 1..80: mol_type = other DNA
gcgtccagggcgtccaagaactaagcccagacctgcccctaataccactgtctcatggttcacgggccttacccagcacg

SEQ ID NO: 3629 - DNA, 80 bp, synthetic construct
  misc_feature 1..80: note = Synthetic: >HKU5-cand-29140-29219
  source 1..80: mol_type = other DNA
tggcggagacaggacaggaaaattaacactggaaacggaacaaaacctctggcccccaggtggtatttctactacactgg

SEQ ID NO: 3630 - DNA, 80 bp, synthetic construct
  misc_feature 1..80: note = Synthetic: >HKU5-cand-29220-29299
  source 1..80: mol_type = other DNA
aacaggacctgaggcaaatctccctttcagatcagtcaaagatggaatcatctgggtccacgaaaacggtgccacggatg

SEQ ID NO: 3631 - DNA, 80 bp, synthetic construct
  misc_feature 1..80: note = Synthetic: >HKU8-cand-19280-19359
  source 1..80: mol_type = other DNA
gcatgctaatatgtattatgcgtatgttaatgcgtataatacttttacacaagctggtttcactatttgggtacctaaca

SEQ ID NO: 3632 - DNA, 80 bp, synthetic construct
  misc_feature 1..80: note = Synthetic: >HKU8-cand-19360-19439
  source 1..80: mol_type = other DNA
gctttgacgtttataatttgtggcagacactcgtcacacctaagttgcagagtcttgaaaatgttgcctttaatgtggtt

SEQ ID NO: 3633 - DNA, 80 bp, synthetic construct
  misc_feature 1..80: note = Synthetic: >HKU8-cand-19440-19519
  source 1..80: mol_type = other DNA
aaacatggctcttttattggtgtagaaggtgaactccctgttgctatagtctctgataaagtttttgtgcgtgaaggcac

SEQ ID NO: 3634 - DNA, 80 bp, synthetic construct
  misc_feature 1..80: note = Synthetic: >HKU8-cand-19520-19599
  source 1..80: mol_type = other DNA
tgttgataatgtgctctttgttaacaagaccactttaccgacaaatgtggcatttgaactttatgcaaaacgtaagactg

SEQ ID NO: 3635 - DNA, 80 bp, synthetic construct
  misc_feature 1..80: note = Synthetic: >HKU8-cand-19600-19679
  source 1..80: mol_type = other DNA
gtaacactccatcccttactattttgaggaatttgggtgttacacgtacttacaaatttgttttgtgggattatgaagct

SEQ ID NO: 3636 - DNA, 80 bp, synthetic construct
  misc_feature 1..80: note = Synthetic: >HKU8-cand-19680-19759
  source 1..80: mol_type = other DNA
gaacgaccttttacttcatacactaaggatgtctgtggttatacagattttgatgctgatgtctgcacttgctatgacaa

SEQ ID NO: 3637 - DNA, 80 bp, synthetic construct
  misc_feature 1..80: note = Synthetic: >HKU8-cand-19760-19839
  source 1..80: mol_type = other DNA
tagtattgcgggttcttttgaacggttttctatgtgtcgtgatggagttttgatatctacatcagctgttaaaaagttgt

SEQ ID NO: 3638 - DNA, 80 bp, synthetic construct
  misc_feature 1..80: note = Synthetic: >HKU8-cand-19840-19919
  source 1..80: mol_type = other DNA
ccgccattaagcttaactatggttatcttaatggtgatcctgttactactcctgatgataagcctatcacatggtacttt

SEQ ID NO: 3639 - DNA, 80 bp, synthetic construct
  misc_feature 1..80: note = Synthetic: >HKU8-cand-19920-19999
  source 1..80: mol_type = other DNA
tatgtacgcaaagatggtcattttgttgaccagtgtgatggtattttcactcagggtcgcagtgctagcaactttgtacc

SEQ ID NO: 3640 - DNA, 80 bp, synthetic construct
  misc_feature 1..80: note = Synthetic: >HKU8-cand-20000-20079
  source 1..80: mol_type = other DNA
acgtactcagatggaaactgatttccttgagctggacatgggtttgttcattagcaagtatggtttggaaaactttgcat

SEQ ID NO: 3641 - DNA, 80 bp, synthetic construct
  misc_feature 1..80: note = Synthetic: >HKU8-cand-20080-20159
  source 1..80: mol_type = other DNA
ttgaacacattgtgtatggagatgtctctaaaaccacactaggtggtttacacttactcatatctcaggttaggttgagt

SEQ ID NO: 3642 - DNA, 80 bp, synthetic construct
  misc_feature 1..80: note = Synthetic: >HKU8-cand-20160-20239
  source 1..80: mol_type = other DNA
aagatgggcattcttaaggtcgaggagtttgtgcatactggtgatagttcactacgttgcgcatctgtcacttatgttga

SEQ ID NO: 3643 - DNA, 80 bp, synthetic construct
  misc_feature 1..80: note = Synthetic: >HKU8-cand-20240-20319
  source 1..80: mol_type = other DNA
taacccttcatccaagatggtttgttcttatatggatattttgcttgatgactttgttacattgctcaagacattggact

SEQ ID NO: 3644 - DNA, 80 bp, synthetic construct
  misc_feature 1..80: note = Synthetic: >HKU8-cand-20320-20399
  source 1..80: mol_type = other DNA
tgagtgttgtttctaaggttcatgaagttattgttgactgtaaagtttaccgctggatgttgtggtgtaaggatcataag

SEQ ID NO: 3645 - DNA, 80 bp, synthetic construct
  misc_feature 1..80: note = Synthetic: >HKU8-cand-20400-20479
  source 1..80: mol_type = other DNA
gttcaaaccttttatcctcaattgcaatcggctgagtggaaatgcggttattctatgccttcgttgtacaagattcaacg

SEQ ID NO: 3646 - DNA, 80 bp, synthetic construct
  misc_feature 1..80: note = Synthetic: >HKU8-cand-20480-20559
  source 1..80: mol_type = other DNA
catgtgccttgagccatgcaacttgtacaattatggtgcaagcatcaaactacccgacggtatcatgttcaatgttgtca

SEQ ID NO: 3647 - DNA, 80 bp, synthetic construct
  misc_feature 1..80: note = Synthetic: >HKU8-cand-23120-23199
  source 1..80: mol_type = other DNA
gacattcaagctggagattgtccttttagttttaatactttgaacaattaccttagctttggttctttttgtttttccat

SEQ ID NO: 3648 - DNA, 80 bp, synthetic construct
  misc_feature 1..80: note = Synthetic: >HKU8-cand-23200-23279
  source 1..80: mol_type = other DNA
aaatggcataccaaatggaggttgtacgatgagtgttgttactcggggttcttttggtgaatctcagaaagttgccgttt

SEQ ID NO: 3649 - DNA, 80 bp, synthetic construct
  misc_feature 1..80: note = Synthetic: >HKU8-cand-23280-23359
  source 1..80: mol_type = other DNA
tgtatgtttgggtcgctttcactaagggtgataatgtacttggtgttcctccaaataatgtgcctactataggtgttagt

SEQ ID NO: 3650 - DNA, 80 bp, synthetic construct
  misc_feature 1..80: note = Synthetic: >HKU8-cand-23360-23439
  source 1..80: mol_type = other DNA
gatatgagtgatgtcaaacataatgtttgcacttcatacaccatctatggtcatacaggccgaggtattattaacaaagc

SEQ ID NO: 3651 - DNA, 80 bp, synthetic construct
  misc_feature 1..80: note = Synthetic: >HKU8-cand-23440-23519
  source 1..80: mol_type = other DNA
taatatcacttttgtttcaggtttgttttacacttctgccactggtaatttgctgggttttaagaattccaccactggag

SEQ ID NO: 3652 - DNA, 80 bp, synthetic construct
  misc_feature 1..80: note = Synthetic: >HKU8-cand-23520-23599
  source 1..80: mol_type = other DNA
aggtttttagtatttcaccatgtcaacttacaactcaagttgctgttgtttctgacaagattgttggtgttgcttcatct

SEQ ID NO: 3653 - DNA, 80 bp, synthetic construct
  misc_feature 1..80: note = Synthetic: >HKU8-cand-23600-23679
  source 1..80: mol_type = other DNA
acgacaaatgtttcaatgccttttaacaatactgttaattcaggctcgttttattatcactttaacaatgctactgctga

SEQ ID NO: 3654 - DNA, 80 bp, synthetic construct
  misc_feature 1..80: note = Synthetic: >HKU8-cand-23680-23759
  source 1..80: mol_type = other DNA
taatggtacgaattgtgaagatccaactttgatgtatggtggtcttggtatttgtgaagatggtaggattgtcaatgtta

SEQ ID NO: 3655 - DNA, 80 bp, synthetic construct
  misc_feature 1..80: note = Synthetic: >HKU8-cand-23760-23839
  source 1..80: mol_type = other DNA
caagacctgaagatacttttgaacctgtttctgctgtaataagtggcaatatttcagtacctgcgaatttcactttttca

SEQ ID NO: 3656 - DNA, 80 bp, synthetic construct
  misc_feature 1..80: note = Synthetic: >HKU8-cand-23840-23919
  source 1..80: mol_type = other DNA
gttcaagttgagtacattcagattatgattaaacctgttactgtggattgtagtgtttatgtttgtaatggtaatcctcg

SEQ ID NO: 3657 - DNA, 80 bp, synthetic construct
  misc_feature 1..80: note = Synthetic: >HKU8-cand-23920-23999
  source 1..80: mol_type = other DNA
ttgtcttcagttactgacacaatatgctagtgcttgcagaactattgaggaagcattacagctaaatgcacgtctagaaa

SEQ ID NO: 3658 - DNA, 80 bp, synthetic construct
  misc_feature 1..80: note = Synthetic: >HKU8-cand-24000-24079
  source 1..80: mol_type = other DNA
gacttgaagttaatagcatgattgctgtttctgacacagcattcaatcttggtgttatcagtaattttgatgacacattt

SEQ ID NO: 3659 - DNA, 80 bp, synthetic construct
  misc_feature 1..80: note = Synthetic: >HKU8-cand-24080-24159
  source 1..80: mol_type = other DNA
aatcttacttttgttttacctagacgtgttggttctagatctgttattgaagatctgttgtttgacaaagttgtcaccag

SEQ ID NO: 3660 - DNA, 80 bp, synthetic construct
  misc_feature 1..80: note = Synthetic: >HKU8-cand-24160-24239
  source 1..80: mol_type = other DNA
tggtcttggtactgttgatgatgattacaaggcttgtgctgataaaatggctaatactattgctgaagctggttgtgtcc

SEQ ID NO: 3661 - DNA, 80 bp, synthetic construct
  misc_feature 1..80: note = Synthetic: >HKU8-cand-24240-24319
  source 1..80: mol_type = other DNA
agtattacaatggcattatggtactgcctggtgtagttgatcaatctttgctatcccaatacactgctgcacttactggt

SEQ ID NO: 3662 - DNA, 80 bp, synthetic construct
  misc_feature 1..80: note = Synthetic: >HKU8-cand-24320-24399
  source 1..80: mol_type = other DNA
gctatggtcatgggtggtgtcactgctgctgctgctatacctttttctcttgctgttcagtctcgtcttaattatctggc

SEQ ID NO: 3663 - DNA, 80 bp, synthetic construct
  misc_feature 1..80: note = Synthetic: >MERS-cand-26170-26249
  source 1..80: mol_type = other DNA
caactaagaaactgcgctacgttaagcgtagattttctcttctgcgccctgaagaccttagtgttattgtccaaccaaca

SEQ ID NO: 3664 - DNA, 80 bp, synthetic construct
  misc_feature 1..80: note = Synthetic: >MERS-cand-26250-26329
  source 1..80: mol_type = other DNA
cactatgtcagggttacattttcagaccccaacatgtggtatctacgttcgggtcatcatttacactcagttcacaattg

SEQ ID NO: 3665 - DNA, 80 bp, synthetic construct
  misc_feature 1..80: note = Synthetic: >MERS-cand-26330-26409
  source 1..80: mol_type = other DNA
gcttaaaccttatggcggccaacctgtttctgagtaccatattactctagctttgctaaatctcactgatgaagatttag

SEQ ID NO: 3666 - DNA, 80 bp, synthetic construct
  misc_feature 1..80: note = Synthetic: >MERS-cand-26410-26489
  source 1..80: mol_type = other DNA
ctagagatttttcacccattgcgctctttttgcgcaatgtcagatttgagctacatgagttcgccttgctgcgcaaaact

SEQ ID NO: 3667 - DNA, 80 bp, synthetic construct
  misc_feature 1..80: note = Synthetic: >MERS-cand-26490-26569
  source 1..80: mol_type = other DNA
cttgttcttaatgcatcagagatctactgtgctaacatacatagatttaagcctgtgtatagagttaacacggcaatccc

SEQ ID NO: 3668 - DNA, 80 bp, synthetic construct
  misc_feature 1..80: note = Synthetic: >MERS-cand-26570-26649
  source 1..80: mol_type = other DNA
tactattaaggattggcttctcgttcagggattttccctttaccatagtggcctccctttacatatgtcaatctctaaat

SEQ ID NO: 3669 - DNA, 80 bp, synthetic construct
  misc_feature 1..80: note = Synthetic: >MERS-cand-26650-26729
  source 1..80: mol_type = other DNA
tgcatgcactggatgatgttactcgcaattacatcattacaatgccatgctttagaacttatcctcaacaaatgtttgtt

SEQ ID NO: 3670 - DNA, 80 bp, synthetic construct
  misc_feature 1..80: note = Synthetic: >MERS-cand-26730-26809
  source 1..80: mol_type = other DNA
actcctttggccgtagatgttgtctccatacggtcttccaatcagggtaataaacaaattgttcattcttaccccatttt

SEQ ID NO: 3671 - DNA, 80 bp, synthetic construct
  misc_feature 1..80: note = Synthetic: >MERS-cand-26810-26889
  source 1..80: mol_type = other DNA
acatcatccaggattttaacgaactatggctttctcggcgtctttatttaaacccgtccagctagtcccagtttctcctg

SEQ ID NO: 3672 - DNA, 80 bp, synthetic construct
  misc_feature 1..80: note = Synthetic: >MERS-cand-26890-26969
  source 1..80: mol_type = other DNA
catttcatcgcattgagtctactgactctattgttttcacatacattcctgctagcggctatgtagctgctttagctgtc

SEQ ID NO: 3673 - DNA, 80 bp, synthetic construct
  misc_feature 1..80: note = Synthetic: >MERS-cand-26970-27049
  source 1..80: mol_type = other DNA
aatgtgtgtctcattcccctattattactgctacgtcaagatacttgtcgtcgcagcattatcagaactatggttctcta

SEQ ID NO: 3674 - DNA, 80 bp, synthetic construct
  misc_feature 1..80: note = Synthetic: >MERS-cand-27050-27129
  source 1..80: mol_type = other DNA
tttccttgttctttataactttttattagccattgtactagtcaatggtgtacattatccaactggaagttgcctgatag

SEQ ID NO: 3675 - DNA, 80 bp, synthetic construct
  misc_feature 1..80: note = Synthetic: >MERS-cand-27130-27209
  source 1..80: mol_type = other DNA
ccttcttagttatcctcataatactttggtttgtagatagaattcgtttctgtctcatgctgaattcctacattccactg

SEQ ID NO: 3676 - DNA, 80 bp, synthetic construct
  misc_feature 1..80: note = Synthetic: >MERS-cand-27210-27289
  source 1..80: mol_type = other DNA
tttgacatgcgttctcactttattcgtgttagtacagtttcttctcatggtatggtccctgtcatacacaccaaaccatt

SEQ ID NO: 3677 - DNA, 80 bp, synthetic construct
  misc_feature 1..80: note = Synthetic: >MERS-cand-27300-27379
  source 1..80: mol_type = other DNA
aacttcgatcagcgttgcagctgttctcgttgtttttatttgcactcttctacttatatagagtgcacttatattagccg

SEQ ID NO: 3678 - DNA, 80 bp, synthetic construct
  misc_feature 1..80: note = Synthetic: >MERS-cand-27380-27459
  source 1..80: mol_type = other DNA
ttttagtaagattagcctagtttctgtaactgacttctccttaaacggcaatgtttccactgttttcgtgcctgcaacgc

SEQ ID NO: 3679 - DNA, 80 bp, synthetic construct
  misc_feature 1..80: note = Synthetic: >MurineCoV-cand-30680-30759
  source 1..80: mol_type = other DNA
agtcaggcagaaaattttaaacaagcctcgccaaaagaggactccaaacaagcagtgcccagtgcagcagtgttttggaa

SEQ ID NO: 3680 - DNA, 80 bp, synthetic construct
  misc_feature 1..80: note = Synthetic: >MurineCoV-cand-30760-30839
  source 1..80: mol_type = other DNA
agagaggccccaatcagaattttggaggctctgaaatgttaaaacttggaactagtgatccacagttccccattcttgca

SEQ ID NO: 3681 - DNA, 80 bp, synthetic construct
  misc_feature 1..80: note = Synthetic: >MurineCoV-cand-30840-30919
  source 1..80: mol_type = other DNA
gagttggctccaacagttggtgccttcttctttggatctaaattagaattggtcaaaaagaattctggtggtgctgatga

SEQ ID NO: 3682 - DNA, 80 bp, synthetic construct
  misc_feature 1..80: note = Synthetic: >MurineCoV-cand-30920-30999
  source 1..80: mol_type = other DNA
acccaccaaagatgtgtatgagctgcaatattcaggtgcagttagatttgatagtactctacctggttttgagactatca

SEQ ID NO: 3683 - DNA, 80 bp, synthetic construct
  misc_feature 1..80: note = Synthetic: >MurineCoV-cand-31000-31079
  source 1..80: mol_type = other DNA
tgaaagtgttgaatgagaatttgaatgcctaccagaatcaggatggtggtgcagatgtggtgagcccaaagccccaaaga

SEQ ID NO: 3684 - DNA, 80 bp, synthetic construct
  misc_feature 1..80: note = Synthetic: >MurineCoV-cand-31080-31159
  source 1..80: mol_type = other DNA
aaagggcgtagacaggctcaggaaaagaaaaagaatgatgaagtagataatgtaagcgttgcaaagcccaaaagctctgt

SEQ ID NO: 3685 - DNA, 80 bp, synthetic construct
  misc_feature 1..80: note = Synthetic: >MurineCoV-cand-31160-31239
  source 1..80: mol_type = other DNA
gcagcgaaatgtaagtagagaattaaccccagaggatagaagtctgttggctcagatccttgatgatggcgtagtgccag

SEQ ID NO: 3686 - DNA, 80 bp, synthetic construct
  misc_feature 1..80: note = Synthetic: >MurineCoV-cand-31240-31319
  source 1..80: mol_type = other DNA
atgggttagaagatgactctaatgtgtaaagagaatgaatcctatgtcggcgctcggtggtaacccctcgcgagaaagtc

SEQ ID NO: 3687 - DNA, 80 bp, synthetic construct
  misc_feature 1..80: note = Synthetic: >MurineCoV-cand-31320-31399
  source 1..80: mol_type = other DNA
gggataggacactctctatcagaatggatgtcttgctgtcataacagatagagaaggttgtggcagaccctgtatcaatt

SEQ ID NO: 3688 - DNA, 80 bp, synthetic construct
  misc_feature 1..80: note = Synthetic: >MurineCoV-cand-31400-31479
  source 1..80: mol_type = other DNA
agttgaaagagattgcaaaatagagaatgtgtgagagaagttagcaaggtcctacgtctaaccataagaacggcgatagg

SEQ ID NO: 3689 - DNA, 80 bp, synthetic construct
  misc_feature 1..80: note = Synthetic: >MurineCoV-cand-31480-31559
  source 1..80: mol_type = other DNA
cgcccccctgggaagagctcacatcagggtactattcctgcaatgccctagtaaatgaatgaagttgatcatggccaatt

SEQ ID NO: 3690 - DNA, 80 bp, synthetic construct
  misc_feature 1..80: note = Synthetic: >MurineCoV-cand-31560-31639
  source 1..80: mol_type = other DNA
ggaagaatcacaaaaaaaaaaaaaaaaaaaaaaaaaaaaaaaaaaaaaaaaaaaaaaaaaaaaaaaaaaaaaaaaaaaaa

SEQ ID NO: 3691 - DNA, 80 bp, synthetic construct
  misc_feature 1..80: note = Synthetic: >NL63-cand-0-79
  source 1..80: mol_type = other DNA
aagaatttttctatctatagatagagaattttcttatttagactttgtgtctactcttctcaactaaacgaaatttttct

SEQ ID NO: 3692 - DNA, 80 bp, synthetic construct
  misc_feature 1..80: note = Synthetic: >NL63-cand-80-159
  source 1..80: mol_type = other DNA
agtgctgtcatttgttatggcagtcctagtgtaattgaaatttcgtcaagtttgtaaactggttaggcaagtgttgtatt

SEQ ID NO: 3693 - DNA, 80 bp, synthetic construct
  misc_feature 1..80: note = Synthetic: >NL63-cand-160-239
  source 1..80: mol_type = other DNA
ttctgtgtctaagcactggtgattctgttcactagtgcatacactgatatttaagtggtgttccgtcactgcttattgtg

SEQ ID NO: 3694 - DNA, 80 bp, synthetic construct
  misc_feature 1..80: note = Synthetic: >NL63-cand-240-319
  source 1..80: mol_type = other DNA
gaagcaacgttctgtcgttgtggaaaccaataactgctaaccatgttttacaatcaagtgacacttgctgttgcaagtga

SEQ ID NO: 3695 - DNA, 80 bp, synthetic construct
  misc_feature 1..80: note = Synthetic: >SARSCoV-cand-27980-28059
  source 1..80: mol_type = other DNA
taggggtaatacttatagcactgcttgcctagtacagctttgtgctggctaggaaaggttttaccttttcatagatggca

SEQ ID NO: 3696 - DNA, 80 bp, synthetic construct
  misc_feature 1..80: note = Synthetic: >SARSCoV-cand-28060-28139
  source 1..80: mol_type = other DNA
cactatggttcaaacatgcacacctaatgtgaaccacttactatcaactgtcaagatccagctggtggtgcgcttatagc

SEQ ID NO: 3697 - DNA, 80 bp, synthetic construct
  misc_feature 1..80: note = Synthetic: >SARSCoV-cand-28140-28219
  source 1..80: mol_type = other DNA
taggtgttggtacgatgatgacttcatgaaggtcaccaaactgctgcatttagagacgtacttgttgttttaaatttcat

SEQ ID NO: 3698 - DNA, 80 bp, synthetic construct
  misc_feature 1..80: note = Synthetic: >SARSCoV-cand-28220-28299
  source 1..80: mol_type = other DNA
ctaaacgaacaaattaaaatgtctgataatggaccccaatcaaaccaacgtagtgccccccgcattacatttggtggacc

SEQ ID NO: 3699 - DNA, 80 bp, synthetic construct
  misc_feature 1..80: note = Synthetic: >SARSCoV-cand-28300-28379
  source 1..80: mol_type = other DNA
cacagattcaactgacaataaccagaatggaggacgcaatggggcaaggccaaaacagcgccgaccccaaggtttaccca

SEQ ID NO: 3700 - DNA, 80 bp, synthetic construct
  misc_feature 1..80: note = Synthetic: >SARSCoV-cand-28380-28459
  source 1..80: mol_type = other DNA
ataatactgcgtcttggttcacagctctcactcagcatggcaaggaggaacttagattccctcgaggccagggcgttcca

SEQ ID NO: 3701 - DNA, 80 bp, synthetic construct
  misc_feature 1..80: note = Synthetic: >SARSCoV-cand-28460-28539
  source 1..80: mol_type = other DNA
atcaacaccaatagtggtccagatgaccaaattggctactaccgaagagctacccgacgagttcgtggtggtgacggcaa

SEQ ID NO: 3702 - DNA, 80 bp, synthetic construct
  misc_feature 1..80: note = Synthetic: >SARSCoV-cand-28540-28619
  source 1..80: mol_type = other DNA
aatgaaagagctcagccccagatggtacttctattacctaggaactggcccagaagcttcacttccctacggcgctaaca

SEQ ID NO: 3703 - DNA, 80 bp, synthetic construct
  misc_feature 1..80: note = Synthetic: >SARSCoV-cand-28620-28699
  source 1..80: mol_type = other DNA
aagaaggcatcgtatgggttgcaactgagggagccttgaatacacccaaagaccacattggcacccgcaatcctaataac

SEQ ID NO: 3704 - DNA, 80 bp, synthetic construct
  misc_feature 1..80: note = Synthetic: >SARSCoV-cand-28700-28779
  source 1..80: mol_type = other DNA
aatgctgccaccgtgctacaacttcctcaaggaacaacattgccaaaaggcttctacgcagagggaagcagaggcggcag

SEQ ID NO: 3705 - DNA, 80 bp, synthetic construct
  misc_feature 1..80: note = Synthetic: >SARSCoV-cand-28780-28859
  source 1..80: mol_type = other DNA
tcaagcctcttctcgctcctcatcacgtagtcgcggtaattcaagaaattcaactcctggcagcagtaggggaaattctc

SEQ ID NO: 3706 - DNA, 80 bp, synthetic construct
  misc_feature 1..80: note = Synthetic: >SARSCoV-cand-28860-28939
  source 1..80: mol_type = other DNA
ctgctcgaatggctagcggaggtggtgaaactgccctcgcgctattgctgctagacagattgaaccagcttgagagcaaa

SEQ ID NO: 3707 - DNA, 80 bp, synthetic construct
  misc_feature 1..80: note = Synthetic: >SARSCoV-cand-28940-29019
  source 1..80: mol_type = other DNA
gtttctggtaaaggccaacaacaacaaggccaaactgtcactaagaaatctgctgctgaggcatctaaaaagcctcgcca

SEQ ID NO: 3708 - DNA, 80 bp, synthetic construct
  misc_feature 1..80: note = Synthetic: >SARSCoV-cand-29020-29099
  source 1..80: mol_type = other DNA
aaaacgtactgccacaaaacagtacaacgtcactcaagcatttgggagacgtggtccagaacaaacccaaggaaatttcg

SEQ ID NO: 3709 - DNA, 80 bp, synthetic construct
  misc_feature 1..80: note = Synthetic: >SARSCoV-cand-29100-29179
  source 1..80: mol_type = other DNA
gggaccaagacctaatcagacaaggaactgattacaaacattggccgcaaattgcacaatttgctccaagtgcctctgca

SEQ ID NO: 3710 - DNA, 80 bp, synthetic construct
  misc_feature 1..80: note = Synthetic: >SARSCoV-cand-29180-29259
  source 1..80: mol_type = other DNA
ttctttggaatgtcacgcattggcatggaagtcacaccttcgggaacatggctgacttatcatggagccattaaattgga

SEQ ID NO: 3711 - DNA, 80 bp, synthetic construct
  misc_feature 1..80: note = Synthetic: >SARSCoV2-cand-3290-3369
  source 1..80: mol_type = other DNA
tcaattagagatggaacttacaccagttgttcagactattgaagtgaatagttttagtggttatttaaaacttactgaca

SEQ ID NO: 3712 - DNA, 80 bp, synthetic construct
  misc_feature 1..80: note = Synthetic: >SARSCoV2-cand-3370-3449
  source 1..80: mol_type = other DNA
atgtatacattaaaaatgcagacattgtggaagaagctaaaaaggtaaaaccaacagtggttgttaatgcagccaatgtt

SEQ ID NO: 3713 - DNA, 80 bp, synthetic construct
  misc_feature 1..80: note = Synthetic: >SARSCoV2-cand-3450-3529
  source 1..80: mol_type = other DNA
taccttaaacatggaggaggtgttgcaggagccttaaataaggctactaacaatgccatgcaagttgaatctgatgatta

SEQ ID NO: 3714 - DNA, 80 bp, synthetic construct
  misc_feature 1..80: note = Synthetic: >SARSCoV2-cand-3530-3609
  source 1..80: mol_type = other DNA
catagctactaatggaccacttaaagtgggtggtagttgtgttttaagcggacacaatcttgctaaacactgtcttcatg

SEQ ID NO: 3715 - DNA, 80 bp, synthetic construct
  misc_feature 1..80: note = Synthetic: >SARSCoV2-cand-3610-3689
  source 1..80: mol_type = other DNA
ttgtcggcccaaatgttaacaaaggtgaagacattcaacttcttaagagtgcttatgaaaattttaatcagcacgaagtt

SEQ ID NO: 3716 - DNA, 80 bp, synthetic construct
  misc_feature 1..80: note = Synthetic: >SARSCoV2-cand-3690-3769
  source 1..80: mol_type = other DNA
ctacttgcaccattattatcagctggtatttttggtgctgaccctatacattctttaagagtttgtgtagatactgttcg

SEQ ID NO: 3717 - DNA, 80 bp, synthetic construct
  misc_feature 1..80: note = Synthetic: >SARSCoV2-cand-3770-3849
  source 1..80: mol_type = other DNA
cacaaatgtctacttagctgtctttgataaaaatctctatgacaaacttgtttcaagctttttggaaatgaagagtgaaa

SEQ ID NO: 3718 - DNA, 80 bp, synthetic construct
  misc_feature 1..80: note = Synthetic: >SARSCoV2-cand-3850-3929
  source 1..80: mol_type = other DNA
agcaagttgaacaaaagatcgctgagattcctaaagaggaagttaagccatttataactgaaagtaaaccttcagttgaa

SEQ ID NO: 3719 - DNA, 80 bp, synthetic construct
  misc_feature 1..80: note = Synthetic: >SARSCoV2-cand-3930-4009
  source 1..80: mol_type = other DNA
cagagaaaacaagatgataagaaaatcaaagcttgtgttgaagaagttacaacaactctggaagaaactaagttcctcac

SEQ ID NO: 3720 - DNA, 80 bp, synthetic construct
  misc_feature 1..80: note = Synthetic: >SARSCoV2-cand-4010-4089
  source 1..80: mol_type = other DNA
agaaaacttgttactttatattgacattaatggcaatcttcatccagattctgccactcttgttagtgacattgacatca

SEQ ID NO: 3721 - DNA, 80 bp, synthetic construct
  misc_feature 1..80: note = Synthetic: >SARSCoV2-cand-4090-4169
  source 1..80: mol_type = other DNA
ctttcttaaagaaagatgctccatatatagtgggtgatgttgttcaagagggtgttttaactgctgtggttatacctact

SEQ ID NO: 3722 - DNA, 80 bp, synthetic construct
  misc_feature 1..80: note = Synthetic: >SARSCoV2-cand-4170-4249
  source 1..80: mol_type = other DNA
aaaaaggctggtggcactactgaaatgctagcgaaagctttgagaaaagtgccaacagacaattatataaccacttaccc

SEQ ID NO: 3723 - DNA, 80 bp, synthetic construct
  misc_feature 1..80: note = Synthetic: >SARSCoV2-cand-4250-4329
  source 1..80: mol_type = other DNA
gggtcagggtttaaatggttacactgtagaggaggcaaagacagtgcttaaaaagtgtaaaagtgccttttacattctac

SEQ ID NO: 3724 - DNA, 80 bp, synthetic construct
  misc_feature 1..80: note = Synthetic: >SARSCoV2-cand-4330-4409
  source 1..80: mol_type = other DNA
catctattatctctaatgagaagcaagaaattcttggaactgtttcttggaatttgcgagaaatgcttgcacatgcagaa

SEQ ID NO: 3725 - DNA, 80 bp, synthetic construct
  misc_feature 1..80: note = Synthetic: >SARSCoV2-cand-4410-4489
  source 1..80: mol_type = other DNA
gaaacacgcaaattaatgcctgtctgtgtggaaactaaagccatagtttcaactatacagcgtaaatataagggtattaa

SEQ ID NO: 3726 - DNA, 80 bp, synthetic construct
  misc_feature 1..80: note = Synthetic: >SARSCoV2-cand-4500-4579
  source 1..80: mol_type = other DNA
ggtgtggttgattatggtgctagattttacttttacaccagtaaaacaactgtagcgtcacttatcaacacacttaacga

SEQ ID NO: 3727 - DNA, 80 bp, synthetic construct
  misc_feature 1..80: note = Synthetic: >SARSCoV2-cand-19960-20039
  source 1..80: mol_type = other DNA
ttgtgcaccactcactgtcttttttgatggtagagttgatggtcaagtagacttatttagaaatgcccgtaatggtgttc

SEQ ID NO: 3728 - DNA, 80 bp, synthetic construct
  misc_feature 1..80: note = Synthetic: >SARSCoV2-cand-20040-20119
  source 1..80: mol_type = other DNA
ttattacagaaggtagtgttaaaggtttacaaccatctgtaggtcccaaacaagctagtcttaatggagtcacattaatt

SEQ ID NO: 3729 - DNA, 80 bp, synthetic construct
  misc_feature 1..80: note = Synthetic: >SARSCoV2-cand-20120-20199
  source 1..80: mol_type = other DNA
ggagaagccgtaaaaacacagttcaattattataagaaagttgatggtgttgtccaacaattacctgaaacttactttac

SEQ ID NO: 3730 - DNA, 80 bp, synthetic construct
  misc_feature 1..80: note = Synthetic: >SARSCoV2-cand-20200-20279
  source 1..80: mol_type = other DNA
tcagagtagaaatttacaagaatttaaacccaggagtcaaatggaaattgatttcttagaattagctatggatgaattca

SEQ ID NO: 3731 - DNA, 80 bp, synthetic construct
  misc_feature 1..80: note = Synthetic: >SARSCoV2-cand-20280-20359
  source 1..80: mol_type = other DNA
ttgaacggtataaattagaaggctatgccttcgaacatatcgtttatggagattttagtcatagtcagttaggtggttta

SEQ ID NO: 3732 - DNA, 80 bp, synthetic construct
  misc_feature 1..80: note = Synthetic: >SARSCoV2-cand-20360-20439
  source 1..80: mol_type = other DNA
catctactgattggactagctaaacgttttaaggaatcaccttttgaattagaagattttattcctatggacagtacagt

SEQ ID NO: 3733 - DNA, 80 bp, synthetic construct
  misc_feature 1..80: note = Synthetic: >SARSCoV2-cand-20440-20519
  source 1..80: mol_type = other DNA
taaaaactatttcataacagatgcgcaaacaggttcatctaagtgtgtgtgttctgttattgatttattacttgatgatt

SEQ ID NO: 3734 - DNA, 80 bp, synthetic construct
  misc_feature 1..80: note = Synthetic: >SARSCoV2-cand-20520-20599
  source 1..80: mol_type = other DNA
ttgttgaaataataaaatcccaagatttatctgtagtttctaaggttgtcaaagtgactattgactatacagaaatttca

SEQ ID NO: 3735 - DNA, 80 bp, synthetic construct
  misc_feature 1..80: note = Synthetic: >SARSCoV2-cand-20600-20679
  source 1..80: mol_type = other DNA
tttatgctttggtgtaaagatggccatgtagaaacattttacccaaaattacaatctagtcaagcgtggcaaccgggtgt

SEQ ID NO: 3736 - DNA, 80 bp, synthetic construct
  misc_feature 1..80: note = Synthetic: >SARSCoV2-cand-20680-20759
  source 1..80: mol_type = other DNA
tgctatgcctaatctttacaaaatgcaaagaatgctattagaaaagtgtgaccttcaaaattatggtgatagtgcaacat

SEQ ID NO: 3737 - DNA, 80 bp, synthetic construct
  misc_feature 1..80: note = Synthetic: >SARSCoV2-cand-20760-20839
  source 1..80: mol_type = other DNA
tacctaaaggcataatgatgaatgtcgcaaaatatactcaactgtgtcaatatttaaacacattaacattagctgtaccc

SEQ ID NO: 3738 - DNA, 80 bp, synthetic construct
  misc_feature 1..80: note = Synthetic: >SARSCoV2-cand-20840-20919
  source 1..80: mol_type = other DNA
tataatatgagagttatacattttggtgctggttctgataaaggagttgcaccaggtacagctgttttaagacagtggtt

SEQ ID NO: 3739 - DNA, 80 bp, synthetic construct
  misc_feature 1..80: note = Synthetic: >SARSCoV2-cand-20920-20999
  source 1..80: mol_type = other DNA
gcctacgggtacgctgcttgtcgattcagatcttaatgactttgtctctgatgcagattcaactttgattggtgattgtg

SEQ ID NO: 3740 - DNA, 80 bp, synthetic construct
  misc_feature 1..80: note = Synthetic: >SARSCoV2-cand-21000-21079
  source 1..80: mol_type = other DNA
caactgtacatacagctaataaatgggatctcattattagtgatatgtacgaccctaagactaaaaatgttacaaaagaa

SEQ ID NO: 3741 - DNA, 80 bp, synthetic construct
  misc_feature 1..80: note = Synthetic: >SARSCoV2-cand-21080-21159
  source 1..80: mol_type = other DNA
aatgactctaaagagggttttttcacttacatttgtgggtttatacaacaaaagctagctcttggaggttccgtggctat

SEQ ID NO: 3742 - DNA, 80 bp, synthetic construct
  misc_feature 1..80: note = Synthetic: >SARSCoV2-cand-21160-21239
  source 1..80: mol_type = other DNA
aaagataacagaacattcttggaatgctgatctttataagctcatgggacacttcgcatggtggacagcctttgttacta

SEQ ID NO: 3743 - DNA, 80 bp, synthetic construct
  misc_feature 1..80: note = Synthetic: >SARSCoV2-cand-26370-26449
  source 1..80: mol_type = other DNA
gcaatattgttaacgtgagtcttgtaaaaccttctttttacgtttactctcgtgttaaaaatctgaattcttctagagtt

SEQ ID NO: 3744 - DNA, 80 bp, synthetic construct
  misc_feature 1..80: note = Synthetic: >SARSCoV2-cand-26450-26529
  source 1..80: mol_type = other DNA
cctgatcttctggtctaaacgaactaaatattatattagtttttctgtttggaactttaattttagccatggcagattcc

SEQ ID NO: 3745 - DNA, 80 bp, synthetic construct
  misc_feature 1..80: note = Synthetic: >SARSCoV2-cand-26530-26609
  source 1..80: mol_type = other DNA
aacggtactattaccgttgaagagcttaaaaagctccttgaacaatggaacctagtaataggtttcctattccttacatg

SEQ ID NO: 3746 - DNA, 80 bp, synthetic construct
  misc_feature 1..80: note = Synthetic: >SARSCoV2-cand-26610-26689
  source 1..80: mol_type = other DNA
gatttgtcttctacaatttgcctatgccaacaggaataggtttttgtatataattaagttaattttcctctggctgttat

SEQ ID NO: 3747 - DNA, 80 bp, synthetic construct
  misc_feature 1..80: note = Synthetic: >SARSCoV2-cand-26690-26769
  source 1..80: mol_type = other DNA
ggccagtaactttagcttgttttgtgcttgctgctgtttacagaataaattggatcaccggtggaattgctatcgcaatg

SEQ ID NO: 3748 - DNA, 80 bp, synthetic construct
  misc_feature 1..80: note = Synthetic: >SARSCoV2-cand-26770-26849
  source 1..80: mol_type = other DNA
gcttgtcttgtaggcttgatgtggctcagctacttcattgcttctttcagactgtttgcgcgtacgcgttccatgtggtc

SEQ ID NO: 3749 - DNA, 80 bp, synthetic construct
  misc_feature 1..80: note = Synthetic: >SARSCoV2-cand-26850-26929
  source 1..80: mol_type = other DNA
attcaatccagaaactaacattcttctcaacgtgccactccatggcactattctgaccagaccgcttctagaaagtgaac

SEQ ID NO: 3750 - DNA, 80 bp, synthetic construct
  misc_feature 1..80: note = Synthetic: >SARSCoV2-cand-26930-27009
  source 1..80: mol_type = other DNA
tcgtaatcggagctgtgatccttcgtggacatcttcgtattgctggacaccatctaggacgctgtgacatcaaggacctg

SEQ ID NO: 3751 - DNA, 80 bp, synthetic construct
  misc_feature 1..80: note = Synthetic: >SARSCoV2-cand-27010-27089
  source 1..80: mol_type = other DNA
cctaaagaaatcactgttgctacatcacgaacgctttcttattacaaattgggagcttcgcagcgtgtagcaggtgactc

SEQ ID NO: 3752 - DNA, 80 bp, synthetic construct
  misc_feature 1..80: note = Synthetic: >SARSCoV2-cand-27090-27169
  source 1..80: mol_type = other DNA
aggttttgctgcatacagtcgctacaggattggcaactataaattaaacacagaccattccagtagcagtgacaatattg

SEQ ID NO: 3753 - DNA, 80 bp, synthetic construct
  misc_feature 1..80: note = Synthetic: >SARSCoV2-cand-27170-27249
  source 1..80: mol_type = other DNA
ctttgcttgtacagtaagtgacaacagatgtttcatctcgttgactttcaggttactatagcagagatattactaattat

SEQ ID NO: 3754 - DNA, 80 bp, synthetic construct
  misc_feature 1..80: note = Synthetic: >SARSCoV2-cand-27250-27329
  source 1..80: mol_type = other DNA
tatgaggacttttaaagtttccatttggaatcttgattacatcataaacctcataattaaaaatttatctaagtcactaa

SEQ ID NO: 3755 - DNA, 80 bp, synthetic construct
  misc_feature 1..80: note = Synthetic: >SARSCoV2-cand-27330-27409
  source 1..80: mol_type = other DNA
ctgagaataaatattctcaattagatgaagagcaaccaatggagattgattaaacgaacatgaaaattattcttttcttg

SEQ ID NO: 3756 - DNA, 80 bp, synthetic construct
  misc_feature 1..80: note = Synthetic: >SARSCoV2-cand-27410-27489
  source 1..80: mol_type = other DNA
gcactgataacactcgctacttgtgagctttatcactaccaagagtgtgttagaggtacaacagtacttttaaaagaacc

SEQ ID NO: 3757 - DNA, 80 bp, synthetic construct
  misc_feature 1..80: note = Synthetic: >SARSCoV2-cand-27490-27569
  source 1..80: mol_type = other DNA
ttgctcttctggaacatacgagggcaattcaccatttcatcctctagctgataacaaatttgcactgacttgctttagca

SEQ ID NO: 3758 - DNA, 80 bp, synthetic construct
  misc_feature 1..80: note = Synthetic: >SARSCoV2-cand-27570-27649
  source 1..80: mol_type = other DNA
ctcaatttgcttttgcttgtcctgacggcgtaaaacacgtctatcagttacgtgccagatcagtttcacctaaactgttc

SEQ ID NO: 3759 - DNA, 80 bp, synthetic construct
  misc_feature 1..80: note = Synthetic: >Shrew-cand-320-399
  source 1..80: mol_type = other DNA
ctgccgctccaagttttgaaggagtttattttgtagcctatgggttacaagatattgtagaattaggccgtaactcttat

SEQ ID NO: 3760 - DNA, 80 bp, synthetic construct
  misc_feature 1..80: note = Synthetic: >Shrew-cand-400-479
  source 1..80: mol_type = other DNA
gttatgggagtttttggagatgaagtgttggatttggcggttgttccttttggttatcgtgatgaggatcttaggggatg

SEQ ID NO: 3761 - DNA, 80 bp, synthetic construct
  misc_feature 1..80: note = Synthetic: >Shrew-cand-480-559
  source 1..80: mol_type = other DNA
gttgctatttcttgaaacacctgtctcttatgttaaacaagaatttttgttcaggcttttaggaggtgaacaaaaagtgg

SEQ ID NO: 3762 - DNA, 80 bp, synthetic construct
  misc_feature 1..80: note = Synthetic: >Shrew-cand-560-639
  source 1..80: mol_type = other DNA
tttatgtggataattacctttgtggtaacaatggcaaacctgtcgtaccaaaagacaaatggaaaattttgtctaaagga

SEQ ID NO: 3763 - DNA, 80 bp, synthetic construct
  misc_feature 1..80: note = Synthetic: >Shrew-cand-640-719
  source 1..80: mol_type = other DNA
cagcaaggtttgcttgcagataatgtctattataaagttgtgtgggatgtaaagcgtgacgatgtgccatatgagaagca

SEQ ID NO: 3764 - DNA, 80 bp, synthetic construct
  misc_feature 1..80: note = Synthetic: >Shrew-cand-720-799
  source 1..80: mol_type = other DNA
aaatatgtcttccattgtgagcattcgctatcttattgatattccacacttcttagctgatggtgcagtacgtgaaaaga

SEQ ID NO: 3765 - DNA, 80 bp, synthetic construct
  misc_feature 1..80: note = Synthetic: >Shrew-cand-800-879
  source 1..80: mol_type = other DNA
aacgtccacctcaagattatactactatgcttgtgaaaggttttcctttcttgatggcatatgattggaagtttgttaac

SEQ ID NO: 3766 - DNA, 80 bp, synthetic construct
  misc_feature 1..80: note = Synthetic: >Shrew-cand-880-959
  source 1..80: mol_type = other DNA
catgctgttaagtgtggtaagtgtgataatcatgtagttgaagctggagcctttgagagtgtgattacatcttgttgtcg

SEQ ID NO: 3767 - DNA, 80 bp, synthetic construct
  misc_feature 1..80: note = Synthetic: >Shrew-cand-960-1039
  source 1..80: mol_type = other DNA
tgatgaaattgtacatcagggagtagtcactgctaaagcaggagagttagtcttgacacctttgagcaataagaaattaa

SEQ ID NO: 3768 - DNA, 80 bp, synthetic construct
  misc_feature 1..80: note = Synthetic: >Shrew-cand-1040-1119
  source 1..80: mol_type = other DNA
ttcttgttggttctactgtgttgagaaacataggaactgcacacaacctctcaatttggtttgtttgtagttcttgtgtt

SEQ ID NO: 3769 - DNA, 80 bp, synthetic construct
  misc_feature 1..80: note = Synthetic: >Shrew-cand-1120-1199
  source 1..80: mol_type = other DNA
gctaatgtgaaggaattgcatgatttgaattttagtgtaaaacaggttgctaaattctcactcactgttgcaagtgaagt

SEQ ID NO: 3770 - DNA, 80 bp, synthetic construct
  misc_feature 1..80: note = Synthetic: >Shrew-cand-1200-1279
  source 1..80: mol_type = other DNA
gaatttggaggcttgtgggatagaagatttggaagttgttcctgatgatggtgatcttatggaatatttgattccatctt

SEQ ID NO: 3771 - DNA, 80 bp, synthetic construct
  misc_feature 1..80: note = Synthetic: >Shrew-cand-1280-1359
  source 1..80: mol_type = other DNA
ggcttagaaatcaatccattgtcttttttgaagaggcattggatttgattgttaagtttttagttaagagtgttgtggtt

SEQ ID NO: 3772 - DNA, 80 bp, synthetic construct
  misc_feature 1..80: note = Synthetic: >Shrew-cand-1360-1439
  source 1..80: mol_type = other DNA
tctttgaagggattggtccttttgagggaagccatccaacactttacacttagaataatagatggtgttgttgtgtgtaa

SEQ ID NO: 3773 - DNA, 80 bp, synthetic construct
  misc_feature 1..80: note = Synthetic: >Shrew-cand-1440-1519
  source 1..80: mol_type = other DNA
gacaaaatgcagtggtgttttgtctaaggtgtttgaggattttgtcaactttgttgtcaaacttctcaataagtctaaag

SEQ ID NO: 3774 - DNA, 80 bp, synthetic construct
  misc_feature 1..80: note = Synthetic: >Shrew-cand-1520-1599
  source 1..80: mol_type = other DNA
atattggaagtttcttgggtgttcaatttagaacattcatgaatgttaacatgatgaatgattgtctttttactgtgaag

SEQ ID NO: 3775 - DNA, 80 bp, synthetic construct
  misc_feature 1..80: note = Synthetic: >HKU24-cand-15620-15699
  source 1..80: mol_type = other DNA
cttatactctcatgtgtaccgcagcgattatgttgatcctgcttttgttaatgagttttatgagtttttaaataagcatt

SEQ ID NO: 3776 - DNA, 80 bp, synthetic construct
  misc_feature 1..80: note = Synthetic: >WIV16-cand-400-479
  source 1..80: mol_type = other DNA
aaatggcacttgtggtttagtagagctggaaaaaggcgtactgccccagcttgaacagccctatgtgttcattaaacgtt

SEQ ID NO: 3777 - DNA, 80 bp, synthetic construct
  misc_feature 1..80: note = Synthetic: >BtRl_BetaCoV-cand-400-479
  source 1..80: mol_type = other DNA
ggcacttgtggtttggttgagctggagaaaggcgtactgccccagcttgaacagccctatgtgttcattaaacgttctga

SEQ ID NO: 3778 - DNA, 80 bp, synthetic construct
  misc_feature 1..80: note = Synthetic: >BetaSp-cand-31660-31739
  source 1..80: mol_type = other DNA
aaattattgttgatcatgtatagtgttggagtaggtgaaagacgtgcgtacataagtgacgacacgtgcccatgtggaag

SEQ ID NO: 3779 - DNA, 80 bp, synthetic construct
  misc_feature 1..80: note = Synthetic: >HKU24-cand-31070-31149
  source 1..80: mol_type = other DNA
tagttgaaaattattgttgatcatgtatagtgttggagcaggtgaaagatgtgcgtacataagtgacgacacgtgcccat

SEQ ID NO: 3780 - DNA, 80 bp, synthetic construct
  misc_feature 1..80: note = Synthetic: >BetaCoV1-cand-31530-31609
  source 1..80: mol_type = other DNA
gattgcttagttgaaaattattgttgatcatgtatagtgttggagtaggtgaaagacgtgcgtacataagtgacgacacg

SEQ ID NO: 3781 - DNA, 80 bp, synthetic construct
  misc_feature 1..80: note = Synthetic: >Sparrow-cand-23830-23909
  source 1..80: mol_type = other DNA
aacaacgatccagaattcgctgttctgatataccagggtgaccgcgcttcaaacgctggacttcacaccataaccacttc

SEQ ID NO: 3782 - DNA, 80 bp, synthetic construct
  misc_feature 1..80: note = Synthetic: >Delta-cand-26360-26439
  source 1..80: mol_type = other DNA
tggaatcaaacaacgatccagaattcgctgttctgatataccagggtgaccgcgcttcaaacgctggacttcacaccata

SEQ ID NO: 3783 - DNA, 80 bp, synthetic construct
  misc_feature 1..80: note = Synthetic: >HKU15-cand-23570-23649
  source 1..80: mol_type = other DNA
gaatcaaacaacgatccagaatttgctgttctgatataccagggtgaccgcgcttcaaacgctggacttcacaccataac

SEQ ID NO: 3784 - DNA, 80 bp, synthetic construct
  misc_feature 1..80: note = Synthetic: >Sb512-cand-8280-8359
  source 1..80: mol_type = other DNA
ccttacagacccagactcatgcattttcaactctgcttgtaccacactttctggcataggcggccgtaatgtttattgtt

SEQ ID NO: 3785 - DNA, 80 bp, synthetic construct
  misc_feature 1..80: note = Synthetic: >Sk512R-cand-8280-8359
  source 1..80: mol_type = other DNA
gacccagactcatgcattttcaactcagcttgtaccacactttctggcataggcggccgtaatgtttattgttacagaga

SEQ ID NO: 3786 - DNA, 80 bp, synthetic construct
  misc_feature 1..80: note = Synthetic: >AlphaSp-cand-8280-8359
  source 1..80: mol_type = other DNA
tacagacccagactcatgcattttcaactctgcttgtaccacactttctggtataggaggccgtaatgtttattgttaca

SEQ ID NO: 3787 - DNA, 80 bp, synthetic construct
  misc_feature 1..80: note = Synthetic: >Sk512R-cand-370-449
  source 1..80: mol_type = other DNA
attatagtgatgccgctgtcaacggatttgaccaatgccgctttgtgtcacttggcctacaagatgccgtggttggtgtt

SEQ ID NO: 3788 - DNA, 80 bp, synthetic construct
  misc_feature 1..80: note = Synthetic: >BtSk_AlphaCoV-cand-340-419
  source 1..80: mol_type = other DNA
tgatgccgctgtcaacggatttgaccaatgccgttttgtgtccttaggcctacaagatgccgtggttggtgttgaaaacg

SEQ ID NO: 3789 - DNA, 80 bp, synthetic construct
  misc_feature 1..80: note = Synthetic: >AlphaSp-cand-330-409
  source 1..80: mol_type = other DNA
tattatagtgatgccgctgtcaacggatttgaccaatgccgttttgtgtcctttggcctacaaagtgctgtggttggtgt

SEQ ID NO: 3790 - DNA, 80 bp, synthetic construct
  misc_feature 1..80: note = Synthetic: >SARSCoV2-cand-15060-15139
  source 1..80: mol_type = other DNA
tgaatcttaagtatgccattagtgcaaagaatagagctcgcaccgtagctggtgtctctatctgtagtactatgaccaat

SEQ ID NO: 3791 - DNA, 80 bp, synthetic construct
  misc_feature 1..80: note = Synthetic: >SARSCoV-cand-15000-15079
  source 1..80: mol_type = other DNA
gaatcttaagtatgccattagtgcaaagaatagagctcgcaccgtagctggtgtctctatctgtagtactatgacaaata

SEQ ID NO: 3792 - DNA, 80 bp, synthetic construct
  misc_feature 1..80: note = Synthetic: >WIV16-cand-14990-15069
  source 1..80: mol_type = other DNA
tgaatcttaagtacgccattagtgcaaagaatagagctcgcaccgtagctggtgtctctatctgtagtactatgacaaat

SEQ ID NO: 3793 - DNA, 80 bp, synthetic construct
  misc_feature 1..80: note = Synthetic: >MbCoV1-cand-13050-13129
  source 1..80: mol_type = other DNA
ggggctctagtgcagctcgactagagccctgtaatggtactgaaccggagcatgttgtacgcgcctttgatatttacaat

SEQ ID NO: 3794 - DNA, 80 bp, synthetic construct
  misc_feature 1..80: note = Synthetic: >MvAlphaSC-cand-11990-12069
  source 1..80: mol_type = other DNA
gctctagtgcagctcgactagagccctgtaatggttccgaaacggaccatgttgtgcgtgcttttgacatttacaataaa

SEQ ID NO: 3795 - DNA, 80 bp, synthetic construct
  misc_feature 1..80: note = Synthetic: >CDPHE15-cand-12530-12609
  source 1..80: mol_type = other DNA
gcaaggggctctagtgcagctcgactagagccctgtaatggcactgatactgatcatgtgtatcgtgcttttgacattta

SEQ ID NO: 3796 - DNA, 80 bp, synthetic construct
  misc_feature 1..80: note = Synthetic: >BtRf_AlphaCoV-cand-19450-19529
  source 1..80: mol_type = other DNA
atttgtataattatggtgctagtattaagttgccagatggtattatgtttaacgttgttaaatatacccaactgtgtcag

SEQ ID NO: 3797 - DNA, 80 bp, synthetic construct
  misc_feature 1..80: note = Synthetic: >SEAC-cand-19640-19719
  source 1..80: mol_type = other DNA
tgcatgtaatttgtataattatggtgctagtattaagttgccagatggtattatgtttaacgttgttaaatatacccagc

SEQ ID NO: 3798 - DNA, 80 bp, synthetic construct
  misc_feature 1..80: note = Synthetic: >HKU2R-cand-19490-19569
  source 1..80: mol_type = other DNA
taattatggtgctagtattaagttgccagatggtattatgtttaatgttgttaaatacacccagctgtgtcaatttctta

SEQ ID NO: 3799 - DNA, 80 bp, synthetic construct
  misc_feature 1..80: note = Synthetic: >MbCoV1-cand-2970-3049
  source 1..80: mol_type = other DNA
gttgctgtcaaacaaattgaccctgtttacaaagtaaagctcgtcttcgagtttgaagatgacactatcagtagtgtttg

SEQ ID NO: 3800 - DNA, 80 bp, synthetic construct
  misc_feature 1..80: note = Synthetic: >MsbCoV1-cand-2960-3039
  source 1..80: mol_type = other DNA
gctgtcaaacaaattgaccctgtttacaaagtaaaacttgttttcgagtttgaagatgacactattagtagtgtttgtaa

SEQ ID NO: 3801 - DNA, 80 bp, synthetic construct
  misc_feature 1..80: note = Synthetic: >BatCoV1A-cand-2970-3049
  source 1..80: mol_type = other DNA
cgctgtcaaacaaattgaccctgtttacaaagtaaaactcatttttgagttcgaagatgacactatcagtagtgtctgca

SEQ ID NO: 3802 - DNA, 80 bp, synthetic construct
  misc_feature 1..80: note = Synthetic: >HghCoV1-cand-13650-13729
  source 1..80: mol_type = other DNA
tagggcatttgacatctgcaactataaggcaagagttgctggtataggaaagcactacaagacgaatacttgtaggtttg

SEQ ID NO: 3803 - DNA, 80 bp, synthetic construct
  misc_feature 1..80: note = Synthetic: >HKU5-cand-13760-13839
  source 1..80: mol_type = other DNA
gttgtctttagggcatttgacatctgcaactataaggcaaaagttgctggtataggcaagtattacaagactaatacttg

SEQ ID NO: 3804 - DNA, 80 bp, synthetic construct
  misc_feature 1..80: note = Synthetic: >HKU5R-cand-13750-13829
  source 1..80: mol_type = other DNA
cactgatgttgtctttagggcatttgacatctgcaactataaggcaaaagttgctggtataggcaagtattacaagacta

SEQ ID NO: 3805 - DNA, 80 bp, synthetic construct
  misc_feature 1..80: note = Synthetic: >Sb512-cand-13070-13149
  source 1..80: mol_type = other DNA
ctttgacaataagctatggtttgatcctgttgaaaatgaagacgtccatcgtgtctatgccaaattgggtactattgttg

SEQ ID NO: 3806 - DNA, 80 bp, synthetic construct
  misc_feature 1..80: note = Synthetic: >SEAC-cand-22280-22359
  source 1..80: mol_type = other DNA
tgcaaaaatttgctatttaggtatggtggtttttgtcaaaaagttgaggctgacattcgtggtgcaggcattcttttgga

SEQ ID NO: 3807 - DNA, 80 bp, synthetic construct
  misc_feature 1..80: note = Synthetic: >BetaSp-cand-30380-30459
  source 1..80: mol_type = other DNA
aatttggatttgaacaaggacaaggtgtgccccttaccaatggtgtcccttcctcagaagaaaagggatactggtacagg

SEQ ID NO: 3808 - DNA, 80 bp, synthetic construct
  misc_feature 1..80: note = Synthetic: >AcCoV_JC34-cand-13090-13169
  source 1..80: mol_type = other DNA
tatgtatgattttacagaacataaggaggcactttttaaaaaatattttaaatattgggatcaagtttaccacccaaatt

SEQ ID NO: 3809 - DNA, 80 bp, synthetic construct
  misc_feature 1..80: note = Synthetic: >Lucheng19-cand-13440-13519
  source 1..80: mol_type = other DNA
tatgattttacagaacataaggaggcactttttaaaaaatattttaaatattgggatcaagtctaccacccaaattgtat

SEQ ID NO: 3810 - DNA, 80 bp, synthetic construct
  misc_feature 1..80: note = Synthetic: >HKU5R-cand-24160-24239
  source 1..80: mol_type = other DNA
attgcaagcagtacgtttgtaatggttttaagaagtgcgaagacttgctcaaagaatatggccagttctgctctaaaatt

SEQ ID NO: 3811 - DNA, 80 bp, synthetic construct
  misc_feature 1..80: note = Synthetic: >HKU5-cand-24160-24239
  source 1..80: mol_type = other DNA
ttactgtcgattgcaagcagtacgtttgtaatggttttaagaagtgcgaagacttgctcaaagaatatggccagttttgc

SEQ ID NO: 3812 - DNA, 80 bp, synthetic construct
  misc_feature 1..80: note = Synthetic: >MsbCoV1-cand-25880-25959
  source 1..80: mol_type = other DNA
aattttgtggcttttgttttgtgtatctgttattataatttgctgtgcgttaatacaacttgtacagttgtgttttatat

SEQ ID NO: 3813 - DNA, 80 bp, synthetic construct
  misc_feature 1..80: note = Synthetic: >MbCoV1-cand-25890-25969
  source 1..80: mol_type = other DNA
tttgtggcttttgttttgtgtatctgttattataatttgctgtgcgttaatacaacttgtacagttgtgttttatatgtc

SEQ ID NO: 3814 - DNA, 80 bp, synthetic construct
  misc_feature 1..80: note = Synthetic: >SARSCoV-cand-24690-24769
  source 1..80: mol_type = other DNA
tcccaggagaggaacttcaccacagcgccagcaatttgtcatgaaggcaaagcatacttccctcgtgaaggtgtttttgt

SEQ ID NO: 3815 - DNA, 80 bp, synthetic construct
  misc_feature 1..80: note = Synthetic: >WIV16-cand-24650-24729
  source 1..80: mol_type = other DNA
gaaacttcaccacagcgccagcaatttgtcatgaaggcaaagcatacttccctcgtgaaggtgtttttgtgtttaatggc

SEQ ID NO: 3816 - DNA, 80 bp, synthetic construct
  misc_feature 1..80: note = Synthetic: >BtRl_BetaCoV-cand-15780-15859
  source 1..80: mol_type = other DNA
atgttagttaaacaaggagatgattacgtgtacctgccttatccagacccatcaagaatattaggcgcaggctgttttgt

SEQ ID NO: 3817 - DNA, 80 bp, synthetic construct
  misc_feature 1..80: note = Synthetic: >BM48_31-cand-15720-15799
  source 1..80: mol_type = other DNA
tagttaaacaaggagatgattacgtgtacctgccttacccagacccatctagaattttaggcgctggttgttttgttgat

SEQ ID NO: 3818 - DNA, 80 bp, synthetic construct
  misc_feature 1..80: note = Synthetic: >Sb512-cand-3100-3179
  source 1..80: mol_type = other DNA
acaaaacttaaagtaacgggagattggtctaatctgcttgaaactttagagaaggctatggatgtagtgagacagcacct

SEQ ID NO: 3819 - DNA, 80 bp, synthetic construct
  misc_feature 1..80: note = Synthetic: >Sk512R-cand-3090-3169
  source 1..80: mol_type = other DNA
ggcacaaaacttaaagtaacgggagattggtctaatctgcttgaaactttagagaaggctatggatgtagtgagacagca

SEQ ID NO: 3820 - DNA, 80 bp, synthetic construct
  misc_feature 1..80: note = Synthetic: >AlphaMink-cand-25780-25859
  source 1..80: mol_type = other DNA
tataacaatattacaatatggaaggccgcaggtcagctggttcatttatggtattaaaatgcttatcatgtggcttttgt

SEQ ID NO: 3821 - DNA, 80 bp, synthetic construct
  misc_feature 1..80: note = Synthetic: >HKU17-cand-17160-17239
  source 1..80: mol_type = other DNA
tgcccttgtctgtcgctacgacacgcatcggcaaaagcatttaattggacctaatggttcagcactatatgtcaataagc

SEQ ID NO: 3822 - DNA, 80 bp, synthetic construct
  misc_feature 1..80: note = Synthetic: >HghCoV1-cand-17890-17969
  source 1..80: mol_type = other DNA
atttcaccttacaactctcaaaatgctgttgcaaggtctatgttgggtttaaatacccaaactgtagattcttcacaggg

SEQ ID NO: 3823 - DNA, 80 bp, synthetic construct
  misc_feature 1..80: note = Synthetic: >Sk512R-cand-1330-1409
  source 1..80: mol_type = other DNA
attttggtaatgatggtccttttgctaccaagtttaaatttcagttgctggccaattcctttgacgatgaagttaagggt

SEQ ID NO: 3824 - DNA, 80 bp, synthetic construct
  misc_feature 1..80: note = Synthetic: >AlphaSp-cand-1290-1369
  source 1..80: mol_type = other DNA
tattttggtaatgatggtccttttgcaaccaagttcaaatttcagttgctggccaattcctttgacgatgaagttaaggg

SEQ ID NO: 3825 - DNA, 80 bp, synthetic construct
  misc_feature 1..80: note = Synthetic: >BtRl_BetaCoV-cand-28330-28409
  source 1..80: mol_type = other DNA
accgaagagctacccgacgagttcgtggtggtgatggtaaaatgaaagagctcagccccagatggtacttctattaccta

SEQ ID NO: 3826 - DNA, 80 bp, synthetic construct
  misc_feature 1..80: note = Synthetic: >SARSRC-cand-28340-28419
  source 1..80: mol_type = other DNA
ctacagaagagctacccgacgagttcgtggtggtgacggtaaaatgaaagagctcagccccagatggtacttctattacc

SEQ ID NO: 3827 - DNA, 80 bp, synthetic construct
  misc_feature 1..80: note = Synthetic: >HKU2-cand-7300-7379
  source 1..80: mol_type = other DNA
tatgcatgattgcaaagagttgcttgagttagatgttagtgatgatgattttattaaggttgtatctgatgctcatcggt

SEQ ID NO: 3828 - DNA, 80 bp, synthetic construct
  misc_feature 1..80: note = Synthetic: >SEAC-cand-7300-7379
  source 1..80: mol_type = other DNA
tgcaaagagttgcttgagttagatgttagtgatgatgattttattaaggttgtatctgatgctcatcggtttgatgtgct

SEQ ID NO: 3829 - DNA, 80 bp, synthetic construct
  misc_feature 1..80: note = Synthetic: >BtRf_AlphaCoV-cand-12460-12539
  source 1..80: mol_type = other DNA
tgtataacaaacttagtggttctaatgcattagctgtgcatgacttctttacctggaaagatggtcgctctatttacggt

SEQ ID NO: 3830 - DNA, 80 bp, synthetic construct
  misc_feature 1..80: note = Synthetic: >HKU2R-cand-12490-12569
  source 1..80: mol_type = other DNA
ccatgtataacaaacttagtggttctaatgcattagctgtgcatgacttctttacttggaaagatggtcgctctatttat

SEQ ID NO: 3831 - DNA, 80 bp, synthetic construct
  misc_feature 1..80: note = Synthetic: >SEAC-cand-21960-22039
  source 1..80: mol_type = other DNA
accgtttattaccgtctcataatggtactgctactgtattaggttgtttgtttaatgctagttacgcacctaatgacacc

SEQ ID NO: 3832 - DNA, 80 bp, synthetic construct
  misc_feature 1..80: note = Synthetic: >HKU2-cand-22000-22079
  source 1..80: mol_type = other DNA
tattaccgtctcataatggtactgctactgtattaggttgtttgtttaatgctagttacgcacctaatgacaccatggta

SEQ ID NO: 3833 - DNA, 80 bp, synthetic construct
  misc_feature 1..80: note = Synthetic: >HKU2-cand-23280-23359
  source 1..80: mol_type = other DNA
acctaacaacactatcactgttaaaaccacaccaggtctttgtgagagtgatgaattgggttctaagtgcattgttgcta

SEQ ID NO: 3834 - DNA, 80 bp, synthetic construct
  misc_feature 1..80: note = Synthetic: >SEAC-cand-23240-23319
  source 1..80: mol_type = other DNA
cctaacaacactatcactgttaaaaccacaccaggtctttgtgagagtgatgaattgggttctaagtgcattgttgctaa

SEQ ID NO: 3835 - DNA, 80 bp, synthetic construct
  misc_feature 1..80: note = Synthetic: >MinkCoV1-cand-17840-17919
  source 1..80: mol_type = other DNA
ccccaaaggcatacgttgtgttacaacaccattaccatggttttgttatgacaaagaccctattaatagtaatgttaggt

SEQ ID NO: 3836 - DNA, 80 bp, synthetic construct
  misc_feature 1..80: note = Synthetic: >HKU5R-cand-7840-7919
  source 1..80: mol_type = other DNA
ttatctgtgaagaagttgcaaatgacctcactaccagcctacggagattggtgaaaccgactgacaagtcccattattat

SEQ ID NO: 3837 - DNA, 80 bp, synthetic construct
  misc_feature 1..80: note = Synthetic: >HKU5-cand-7840-7919
  source 1..80: mol_type = other DNA
cctttatctgtgaagaagttgcaaatgacctcactaccagcctacggagattagtgaaaccgactgacaagtcccattat

SEQ ID NO: 3838 - DNA, 80 bp, synthetic construct
  misc_feature 1..80: note = Synthetic: >WIV16-cand-28830-28909
  source 1..80: mol_type = other DNA
gtcttggttcacagctctcactcagcatggcaaggaggaacttagattccctcgaggccagggcgttccaatcaacacca

SEQ ID NO: 3839 - DNA, 80 bp, synthetic construct
  misc_feature 1..80: note = Synthetic: >BetaCoV1-cand-29230-29309
  source 1..80: mol_type = other DNA
ataatagaggaagacaattttataagttttacagtgatgaagcaaaaccccctgttttagatttggatgatgtctagttc

SEQ ID NO: 3840 - DNA, 80 bp, synthetic construct
  misc_feature 1..80: note = Synthetic: >BetaSp-cand-29340-29419
  source 1..80: mol_type = other DNA
atgtgtataatagaggaagacaattttataagttttacagtgatgaagcaaaaccccctgttttagatttggatgatgtc

SEQ ID NO: 3841 - DNA, 80 bp, synthetic construct
  misc_feature 1..80: note = Synthetic: >HKU24-cand-2260-2339
  source 1..80: mol_type = other DNA
tttgttggaagtgtgcctgattatgctcgcaattttgtgaggatacttagggagatggttaatatgatgttagattgtat

SEQ ID NO: 3842 - DNA, 80 bp, synthetic construct
  misc_feature 1..80: note = Synthetic: >BetaCoV1-cand-2410-2489
  source 1..80: mol_type = other DNA
ggaagtgtgcctgattatgctcgcaattttgtgaggatacttagggagatgattaatatggtgttggattgtatgaaaca

SEQ ID NO: 3843 - DNA, 80 bp, synthetic construct
  misc_feature 1..80: note = Synthetic: >HKU15-cand-12090-12169
  source 1..80: mol_type = other DNA
ggatgtgtggacttagcatcctattattcttatttaatgcccattatgtccatgactcacatgttaaagtgtgagtgtat

SEQ ID NO: 3844 - DNA, 80 bp, synthetic construct
  misc_feature 1..80: note = Synthetic: >Delta-cand-13590-13669
  source 1..80: mol_type = other DNA
tgtggacttagcatcctattattcttatttaatgcccattatgtccatgactcacatgttaaagtgtgagtgtatggata

SEQ ID NO: 3845 - DNA, 80 bp, synthetic construct
  misc_feature 1..80: note = Synthetic: >MbCoV1-cand-28040-28119
  source 1..80: mol_type = other DNA
tctgttgcgctattcaccccatatctgtacttttcagaatggacaaggtgacctacttatactaaaatgtaagcctgtat

SEQ ID NO: 3846 - DNA, 80 bp, synthetic construct
  misc_feature 1..80: note = Synthetic: >MsbCoV1-cand-28040-28119
  source 1..80: mol_type = other DNA
cgctattcaccccatatctgtacttttcagaatggacaaggtgacctacttatactaaaatgtaagcctgtatttaagca

SEQ ID NO: 3847 - DNA, 80 bp, synthetic construct
  misc_feature 1..80: note = Synthetic: >BtRf_AlphaCoV-cand-19690-19769
  source 1..80: mol_type = other DNA
atgctgattttagtataacaggtgattgtacgcatgtttatgttgaagacaaatttgacctacttatatcagatatgtat

SEQ ID NO: 3848 - DNA, 80 bp, synthetic construct
  misc_feature 1..80: note = Synthetic: >SEAC-cand-19880-19959
  source 1..80: mol_type = other DNA
tgtcagtgatgctgattttagtataacaggtgattgtacacatgtttatgttgaagacaaatttgacctacttatatcag

SEQ ID NO: 3849 - DNA, 80 bp, synthetic construct
  misc_feature 1..80: note = Synthetic: >HKU4R-cand-3800-3879
  source 1..80: mol_type = other DNA
gctatacagatagcctcattactgcctaagtgtattcttgtaaatgctgctaatcgccatcttaaacatggtggtggtat

SEQ ID NO: 3850 - DNA, 80 bp, synthetic construct
  misc_feature 1..80: note = Synthetic: >HKU5R-cand-27770-27849
  source 1..80: mol_type = other DNA
cattcaactgttttcgtgcctttcaatagccgcgattcagtacctcttcacataatcgcacccagcgtgcttacagttta

SEQ ID NO: 3851 - DNA, 80 bp, synthetic construct
  misc_feature 1..80: note = Synthetic: >Quail-cand-11060-11139
  source 1..80: mol_type = other DNA
attcagatgattgctactatgggtcctggatttgcggttacaactaaaccacaacctagtgagcaccagtactcgtatgg

SEQ ID NO: 3852 - DNA, 80 bp, synthetic construct
  misc_feature 1..80: note = Synthetic: >HKU15-cand-11110-11189
  source 1..80: mol_type = other DNA
cagggttgtattcagatgattgctactatgggtcctggatttgcagttactactaaaccacaacctaatgagcatcagta

SEQ ID NO: 3853 - DNA, 80 bp, synthetic construct
  misc_feature 1..80: note = Synthetic: >SARSCoV2-cand-15790-15869
  source 1..80: mol_type = other DNA
tctttattatcaaaacaatgtttttatgtctgaagcaaaatgttggactgagactgaccttactaaaggacctcatgaat

SEQ ID NO: 3854 - DNA, 80 bp, synthetic construct
  misc_feature 1..80: note = Synthetic: >SARSCoV-cand-15720-15799
  source 1..80: mol_type = other DNA
taaggcagttctttattatcaaaataatgtgttcatgtctgaggcaaaatgttggactgagactgaccttactaaaggac

SEQ ID NO: 3855 - DNA, 80 bp, synthetic construct
  misc_feature 1..80: note = Synthetic: >Lucheng19-cand-16080-16159
  source 1..80: mol_type = other DNA
attccagggatgatatttgtgctcacttcacataatgtagcacctctcagagcacctgttattgtcaaccaggaacgtta

SEQ ID NO: 3856 - DNA, 80 bp, synthetic construct
  misc_feature 1..80: note = Synthetic: >AcCoV_JC34-cand-15730-15809
  source 1..80: mol_type = other DNA
gttaattccagggatgatatttgtgctcacttcacataatgttgcacctttgagagcacctgttattgtgaaccaggaac

SEQ ID NO: 3857 - DNA, 80 bp, synthetic construct
  misc_feature 1..80: note = Synthetic: >WIV16-cand-29230-29309
  source 1..80: mol_type = other DNA
tctcgctcttcgtcacgtagtcgcggtaattcaagaaattcaactcctggcagcagtaggggaaattctcctgctcgaat

SEQ ID NO: 3858 - DNA, 80 bp, synthetic construct
  misc_feature 1..80: note = Synthetic: >BetaSp-cand-20130-20209
  source 1..80: mol_type = other DNA
cgaactattcgctaagcgaagtgttaggcaccacccagagctgaagctcttaagaaatttgaatgttgatgtgtgttgga

SEQ ID NO: 3859 - DNA, 80 bp, synthetic construct
  misc_feature 1..80: note = Synthetic: >BetaCoV1-cand-18420-18499
  source 1..80: mol_type = other DNA
attctactatcagttattcaaggcttatatccctcatgggttttaaattagatgtaacccttgacggatattgcaaattg

SEQ ID NO: 3860 - DNA, 80 bp, synthetic construct
  misc_feature 1..80: note = Synthetic: >BetaSp-cand-18530-18609
  source 1..80: mol_type = other DNA
ttgcagattctactatcagttattcaaggcttatatccctcatgggttttaaattagatgtaacccttgacggatattgc

SEQ ID NO: 3861 - DNA, 80 bp, synthetic construct
  misc_feature 1..80: note = Synthetic: >BetaCoV1-cand-21940-22019
  source 1..80: mol_type = other DNA
attttaatgagtttgtcgtgaaatttaataagcttcaagctgcactacttgaaatgggtgtagaatgtaagctacagaat

SEQ ID NO: 3862 - DNA, 80 bp, synthetic construct
  misc_feature 1..80: note = Synthetic: >BetaSp-cand-22050-22129
  source 1..80: mol_type = other DNA
tttctcattttaatgagtttgtcgtgaaatttaataagcttcaagctgcactacttgaaatgggtgtagaatgtaagcta

SEQ ID NO: 3863 - DNA, 80 bp, synthetic construct
  misc_feature 1..80: note = Synthetic: >HuB-cand-17550-17629
  source 1..80: mol_type = other DNA
tacatcgtaatgagcatgtagcatctggtgacgctatcatgactcggtgtcttgcaatacatgattgctttgtgaagaat

SEQ ID NO: 3864 - DNA, 80 bp, synthetic construct
  misc_feature 1..80: note = Synthetic: >MsbCoV1-cand-15640-15719
  source 1..80: mol_type = other DNA
gttcttttagattgggttaaacacttaaataacaccttgaatgaaggtgttttagaatctttctcagttactttgcttga

SEQ ID NO: 3865 - DNA, 80 bp, synthetic construct
  misc_feature 1..80: note = Synthetic: >HKU2R-cand-1960-2039
  source 1..80: mol_type = other DNA
gaaggtgacaacattgacactgtggttcggactgttgctaataaagttcaagcatttaacaatagattcgttgtttacaa

SEQ ID NO: 3866 - DNA, 80 bp, synthetic construct
  misc_feature 1..80: note = Synthetic: >SEAC-cand-2130-2209
  source 1..80: mol_type = other DNA
tgacaacattgacactgtggttcagactgttgccaataaagtccaagcatttaacaatagattcgttgtttacaacgcac

SEQ ID NO: 3867 - DNA, 80 bp, synthetic construct
  misc_feature 1..80: note = Synthetic: >Sb512-cand-20280-20359
  source 1..80: mol_type = other DNA
ttcagctggaataaaaagctttatgaactcattcagaagtttgagtactggaccttgttttgtaccagtgtcaatacttc

SEQ ID NO: 3868 - DNA, 80 bp, synthetic construct
  misc_feature 1..80: note = Synthetic: >BtSk_AlphaCoV-cand-20230-20309
  source 1..80: mol_type = other DNA
gagttcagctggaataaaaagctttatgaactcattcagaagtttgagtactggaccttgttttgtaccagtgtcaatac

SEQ ID NO: 3869 - DNA, 80 bp, synthetic construct
  misc_feature 1..80: note = Synthetic: >BetaCoV1-cand-11900-11979
  source 1..80: mol_type = other DNA
gggagtgttttcactgtgtaacaaattgtttagagttcctttgggggtttataattataaaatctctgtgcaggaacttc

SEQ ID NO: 3870 - DNA, 80 bp, synthetic construct
  misc_feature 1..80: note = Synthetic: >BetaSp-cand-12020-12099
  source 1..80: mol_type = other DNA
gtgttttcactgtgtaacaaattgtttagagttcctttgggggtttataattataaaatctctgtgcaggaacttcgtta

SEQ ID NO: 3871 - DNA, 80 bp, synthetic construct
  misc_feature 1..80: note = Synthetic: >HKU5R-cand-1530-1609
  source 1..80: mol_type = other DNA
ttcattcttacttatggaggcgtaatttacgcttacatgggttgcagtggtggtactatgcactttattcctcgtgcaaa

SEQ ID NO: 3872 - DNA, 80 bp, synthetic construct
  misc_feature 1..80: note = Synthetic: >MsbCoV1-cand-27400-27479
  source 1..80: mol_type = other DNA
gaatcaaaaacctaagaagaaccagcaagaagatcttgttgctgcagttcgtgaagcactgaaaggtcttggcattcaac

SEQ ID NO: 3873 - DNA, 80 bp, synthetic construct
  misc_feature 1..80: note = Synthetic: >MbCoV1-cand-27410-27489
  source 1..80: mol_type = other DNA
tcaaaaacctaagaagaaccagcaagaagatcttgttgctgcagttcgcgaagcactgaaaggtcttggcattcaacaaa

SEQ ID NO: 3874 - DNA, 80 bp, synthetic construct
  misc_feature 1..80: note = Synthetic: >Sk512R-cand-19760-19839
  source 1..80: mol_type = other DNA
gctgaatggaagtgtggttattcaatgccatcaatctacaagattcagcgcatgtgtttggaatcttgcaatttatacaa

SEQ ID NO: 3875 - DNA, 80 bp, synthetic construct
  misc_feature 1..80: note = Synthetic: >AlphaCoV1-cand-9770-9849
  source 1..80: mol_type = other DNA
gaattaggtaatggctcgcatgttggttcaaatcttgaaggggaaatgtatggcggttatgaagatcaacctagcatgca

SEQ ID NO: 3876 - DNA, 80 bp, synthetic construct
  misc_feature 1..80: note = Synthetic: >HKU5-cand-7200-7279
  source 1..80: mol_type = other DNA
gaattgcgttcctatttgggcatccattctctctgcgacggtatggtcgaagcgtatcggaacgtctcgtatgacgtaaa

SEQ ID NO: 3877 - DNA, 80 bp, synthetic construct
  misc_feature 1..80: note = Synthetic: >MN517816-cand-23850-23929
  source 1..80: mol_type = other DNA
cacgacttttgataatgatgtggtaactgacctttacagacctaaaaagtctgtttaatgattcaaacgcccacctcatt

SEQ ID NO: 3878 - DNA, 80 bp, synthetic construct
  misc_feature 1..80: note = Synthetic: >MT114542-cand-20300-20379
  source 1..80: mol_type = other DNA
actttctgtttagcaattttaaagaagaaggaactgtagttgttggtggttattaccctacagaggtgtggtataactgt

SEQ ID NO: 3879 - DNA, 80 bp, synthetic construct
  misc_feature 1..80: note = Synthetic: >MN531554-cand-22090-22169
  source 1..80: mol_type = other DNA
cctgatggttcacttaaacaaatagtaccacaagaattacaacatttcgtggcacctttacttaatgttacagaatatgt

SEQ ID NO: 3880 - DNA, 80 bp, synthetic construct
  misc_feature 1..80: note = Synthetic: >MN517817-cand-22310-22389
  source 1..80: mol_type = other DNA
cctgatggttcacttaaacaaatagtaccacgagaattagaacagttcgtggcacctttatttaatgttacagaacatgt

SEQ ID NO: 3881 - DNA, 80 bp, synthetic construct
  misc_feature 1..80: note = Synthetic: >MN987231-cand-15400-15479
  source 1..80: mol_type = other DNA
aaatgttgatgattttaatcaactagctactactaattggtctactgtagaaccctatattttagcaaatcgttgtagtg

SEQ ID NO: 3882 - DNA, 80 bp, synthetic construct
  misc_feature 1..80: note = Synthetic: >MT114542-cand-25100-25179
  source 1..80: mol_type = other DNA
ttatagtacaacagcatcaggttgttagtgctagaacacaaaattactatccagagttcagcattgctgcactctttgtt

SEQ ID NO: 3883 - DNA, 80 bp, synthetic construct
  misc_feature 1..80: note = Synthetic: >NC_028752-cand-160-239
  source 1..80: mol_type = other DNA
tgcgtcctagtctaagggttctgtgttctgtcacgggattccattctacaaacgccttactcgaggttctgtctcgtgtt

SEQ ID NO: 3884 - DNA, 80 bp, synthetic construct
  misc_feature 1..80: note = Synthetic: >LC061273-cand-1840-1919
  source 1..80: mol_type = other DNA
gtgtctataaacctttgttagatcatattgattattttaatatgcgtcgtgctaaatttagtttagaaacatttactgtt

SEQ ID NO: 3885 - DNA, 80 bp, synthetic construct
  misc_feature 1..80: note = Synthetic: >MT114541-cand-270-349
  source 1..80: mol_type = other DNA
aacggagtaagtgatcttaaacctgttcttcttaccgaaccctccgtcatgctgcaaggctttattgttagggccaactg

SEQ ID NO: 3886 - DNA, 80 bp, synthetic construct
  misc_feature 1..80: note = Synthetic: >MN548287-cand-26980-27059
  source 1..80: mol_type = other DNA
ctcagatgaggagaggaacaatgcacagctggaatttgatgatgaacccaaggtgattaactggggggagtcagcacttg

SEQ ID NO: 3887 - DNA, 80 bp, synthetic construct
  misc_feature 1..80: note = Synthetic: >LC088095-cand-25120-25199
  source 1..80: mol_type = other DNA
tgaaaattacactttcccaattatggacccacagtgtagaggttttgaccagataaccatatcatcaccaattgccattg

SEQ ID NO: 3888 - DNA, 80 bp, synthetic construct
  misc_feature 1..80: note = Synthetic: >MN509588-cand-18530-18609
  source 1..80: mol_type = other DNA
taatttgtggaaaagtttttcagctctccagtcaattgataatattgcgtacaatatgtacaaaggtggccattacgatg

SEQ ID NO: 3889 - DNA, 80 bp, synthetic construct
  misc_feature 1..80: note = Synthetic: >LC061272-cand-2560-2639
  source 1..80: mol_type = other DNA
tggtagaagttgttacagcttcaattataccatgtggctattctaaaccacctaaaatagcagaaaaaatctgtgttgtg

SEQ ID NO: 3890 - DNA, 80 bp, synthetic construct
  misc_feature 1..80: note = Synthetic: >AJ311317-cand-2640-2719
  source 1..80: mol_type = other DNA
ggaatacgatcttcaagaaggcttataaagagcctatagaagtagatacagacctcacagtagaacaattgctctctgtg

SEQ ID NO: 3891 - DNA, 80 bp, synthetic construct
  misc_feature 1..80: note = Synthetic: >SBB-053-cand-23750-23829
  source 1..80: mol_type = other DNA
tgattgtagaggaactaaacttaaaacttacgagcttgaaaaagttcacacgcaataatgtacggtgaatttgatgacat

SEQ ID NO: 3892 - DNA, 80 bp, synthetic construct
  misc_feature 1..80: note = Synthetic: >SBB-130-cand-23760-23839
  source 1..80: mol_type = other DNA
tgctgtgattgtagaggaactaaacttaaaacttacgagcttgaaaaagttcacacacaataatgtacggtgaattggat

SEQ ID NO: 3893 - DNA, 80 bp, synthetic construct
  misc_feature 1..80: note = Synthetic: >SBB-747-cand-5750-5829
  source 1..80: mol_type = other DNA
ttaacacgactaataattatgacgtgttaccagtagaacctctgcctgttgatgcagacatttccgttgagcctgtagat

SEQ ID NO: 3894 - DNA, 80 bp, synthetic construct
  misc_feature 1..80: note = Synthetic: >SBB-726-cand-5760-5839
  source 1..80: mol_type = other DNA
taataattatgacgtgttaccagtagaacctctgcctgttggtgcagacatttccgttgagcctgtagatgtaaaaccta

SEQ ID NO: 3895 - DNA, 80 bp, synthetic construct
  misc_feature 1..80: note = Synthetic: >SBB-797-cand-10240-10319
  source 1..80: mol_type = other DNA
gagcgcatgctttcagcattgaaagttttgctatctactggattttgtggccgtactattatgggctcatgttcactgga

SEQ ID NO: 3896 - DNA, 80 bp, synthetic construct
  misc_feature 1..80: note = Synthetic: >SBB-747-cand-10230-10309
  source 1..80: mol_type = other DNA
tatttccgtagagcgcatgctttcagcattgaaagtcttgctatctaccggattttgtggccgtactattatgggctcat

SEQ ID NO: 3897 - DNA, 80 bp, synthetic construct
  misc_feature 1..80: note = Synthetic: >SBB-788-cand-10240-10319
  source 1..80: mol_type = other DNA
gagcgcatgctttcagcattgaaagtcttgctatctaccggattttgtggccgtactattatgggctcatgttcattgga

SEQ ID NO: 3898 - DNA, 80 bp, synthetic construct
  misc_feature 1..80: note = Synthetic: >SBB-041-cand-3800-3879
  source 1..80: mol_type = other DNA
atgcagggcacaggtgtcttttgtcaggaccctaaaccattagatgttagcacgctgttagtgcagcctatttgtgcgtc

SEQ ID NO: 3899 - DNA, 80 bp, synthetic construct
  misc_feature 1..80: note = Synthetic: >SBB-120-cand-3790-3869
  source 1..80: mol_type = other DNA
tattcttaccatgcagggcacaggtgtcttttgtcaggaccctaaaccattagatgttagcacgctgttagttcagcctg

SEQ ID NO: 3900 - DNA, 80 bp, synthetic construct
  misc_feature 1..80: note = Synthetic: >SBB-122-cand-3810-3889
  source 1..80: mol_type = other DNA
caggtgtcttttgtcaggaccctaaaccattagatgttagtatgctgttagtgcagcctgtttgtgcatctgtgtttatg

SEQ ID NO: 3901 - DNA, 80 bp, synthetic construct
  misc_feature 1..80: note = Synthetic: >SBB-747-cand-3110-3189
  source 1..80: mol_type = other DNA
atgctgctaatgttaatttacatcatggtggaggcgttgctggagcccttaatagagctactgacaatgccatgcaaaaa

SEQ ID NO: 3902 - DNA, 80 bp, synthetic construct
  misc_feature 1..80: note = Synthetic: >SBB-130-cand-11280-11359
  source 1..80: mol_type = other DNA
cacaaatgtataaagaggctagggctgttaataggaaggctaaggttatcagtgcaatgcattcattactttttggcatg

SEQ ID NO: 3903 - DNA, 80 bp, synthetic construct
  misc_feature 1..80: note = Synthetic: >SBB-130-cand-14070-14149
  source 1..80: mol_type = other DNA
aatgactactagacagtaccatcaaaagcaccttaagtctatagtcaatacacgtggagcggctgttgtaattggtacca

SEQ ID NO: 3904 - DNA, 80 bp, synthetic construct
  misc_feature 1..80: note = Synthetic: >SBB-120-cand-14080-14159
  source 1..80: mol_type = other DNA
actagacagtaccaccaaaagcatcttaagtctatagtcaacacacgtggagcggctgttgtaattggtaccactaaatt

SEQ ID NO: 3905 - DNA, 80 bp, synthetic construct
  misc_feature 1..80: note = Synthetic: >PRD-0038-cand-17670-17749
  source 1..80: mol_type = other DNA
gccaactcaaactgtggattcatcacagggttctgagtatgattatgtcatattcactcagaccacagagacggctcatt

SEQ ID NO: 3906 - DNA, 80 bp, synthetic construct
  misc_feature 1..80: note = Synthetic: >PDF-2386-cand-17680-17759
  source 1..80: mol_type = other DNA
actgtggattcatcacagggttctgagtatgattatgtcatattcactcagaccacagagacagctcattcctgtaatgt

SEQ ID NO: 3907 - DNA, 80 bp, synthetic construct
  misc_feature 1..80: note = Synthetic: >SBB-130-cand-4190-4269
  source 1..80: mol_type = other DNA
aatgcatatgtcagtgctaatggcaaagttagagtgggtactggtgtcatgttgaactgcgatggagtcaacatttttaa

SEQ ID NO: 3908 - DNA, 80 bp, synthetic construct
  misc_feature 1..80: note = Synthetic: >SBB-041-cand-4200-4279
  source 1..80: mol_type = other DNA
atgttagtgctaatggcaaagttaaagtgggtagtggtgtcatgttgaactgcgatggagtcaacatttttaatgttgta

SEQ ID NO: 3909 - DNA, 80 bp, synthetic construct
  misc_feature 1..80: note = Synthetic: >SBB-747-cand-2230-2309
  source 1..80: mol_type = other DNA
aatggattgcttaccgaagttcaggtgtgtgccaagcgcctgggtcttttattgacacctagacagcaaaagatggaggt

SEQ ID NO: 3910 - DNA, 80 bp, synthetic construct
  misc_feature 1..80: note = Synthetic: >SBB-797-cand-2240-2319
  source 1..80: mol_type = other DNA
ttaccgaagtgcaggtgtgtgccaagcgcctgggtcttttattgacacctagacagcaaaagatggaggtcgaggtgtta

SEQ ID NO: 3911 - DNA, 80 bp, synthetic construct
  misc_feature 1..80: note = Synthetic: >SBB-120-cand-27090-27169
  source 1..80: mol_type = other DNA
aatggtaagcctgtttataagctagtataagtagagtttataaatgttgctgcacttagaccaacgcacatgctacaaga

SEQ ID NO: 3912 - DNA, 80 bp, synthetic construct
  misc_feature 1..80: note = Synthetic: >SBB-122-cand-27060-27139
  source 1..80: mol_type = other DNA
tatacagaatggtaagcctgtttataagctagtataagtagagtttataaatgttgctgcacttagaccaacgcacatgc

SEQ ID NO: 3913 - DNA, 80 bp, synthetic construct
  misc_feature 1..80: note = Synthetic: >SBB-024-cand-27070-27149
  source 1..80: mol_type = other DNA
actcttatacagaatggtaagcctgtttataagctagtataagtagagtttataaatgttgctgcacttagaccaacgca

SEQ ID NO: 3914 - DNA, 80 bp, synthetic construct
  misc_feature 1..80: note = Synthetic: >SBB-797-cand-25760-25839
  source 1..80: mol_type = other DNA
agtggggttacccttctcgttgcaaaccgttatgggtagtcaagatgtgcattctgtggctactgtggccactttccatt

SEQ ID NO: 3915 - DNA, 80 bp, synthetic construct
  misc_feature 1..80: note = Synthetic: >SBB-788-cand-25770-25849
  source 1..80: mol_type = other DNA
cccttctcgttgcaaaccgttatgggtagtcaagatgtgcattttgtggctactatggccactttccattgcagcagccg

SEQ ID NO: 3916 - DNA, 80 bp, synthetic construct
  misc_feature 1..80: note = Synthetic: >GCS-227-cand-27890-27969
  source 1..80: mol_type = other DNA
cagcactgcatctgtggtgaaggctttactgtcgacatttcaggtgcttgcacagactcagccatctactggtccccatt

SEQ ID NO: 3917 - DNA, 80 bp, synthetic construct
  misc_feature 1..80: note = Synthetic: >GCS-211-cand-27890-27969
  source 1..80: mol_type = other DNA
accagcactgcatctgtggtgaaggctttactgtcgacatttcaggtgcttgcacagactcagccatctactggtcccca

SEQ ID NO: 3918 - DNA, 80 bp, synthetic construct
  misc_feature 1..80: note = Synthetic: >GCS-211-cand-15270-15349
  source 1..80: mol_type = other DNA
aatggtacgtattatttaccttatccagacccgtcacgtatactgtctgccggtgtttttgtggatgacgttgtcaaaac

SEQ ID NO: 3919 - DNA, 80 bp, synthetic construct
  misc_feature 1..80: note = Synthetic: >GCS-227-cand-15270-15349
  source 1..80: mol_type = other DNA
tggtacgtattatttaccttatccagacccgtcacgtatactgtctgccggtgtttttgtggatgacgttgtcaaaacag

SEQ ID NO: 3920 - DNA, 80 bp, synthetic construct
  misc_feature 1..80: note = Synthetic: >SBB-747-cand-27640-27719
  source 1..80: mol_type = other DNA
aatggttaggcggtgatgataccgtctatgaagatgaagaagataagcctaagacccagcgtagacataagaaaaggcat

SEQ ID NO: 3921 - DNA, 80 bp, synthetic construct
  misc_feature 1..80: note = Synthetic: >SBB-797-cand-27650-27729
  source 1..80: mol_type = other DNA
cgatgaatggttaggcggtgatgataccgtctatgaagatgaagaagataagcctaagacccagcgtagacataagaaaa

SEQ ID NO: 3922 - DNA, 80 bp, synthetic construct
  misc_feature 1..80: note = Synthetic: >SBB-726-cand-22720-22799
  source 1..80: mol_type = other DNA
tccgtagctgtcagcttaccagcctctgattactgggtagctgctgttgcagataatgctagtactggtgtagttacatt

SEQ ID NO: 3923 - DNA, 80 bp, synthetic construct
  misc_feature 1..80: note = Synthetic: >GCS-227-cand-10390-10469
  source 1..80: mol_type = other DNA
aatgtatggtgtgacactacaaggtggccgtaaaactaatgcacttaagagtgtgttgttggccagctttttctttacat

SEQ ID NO: 3924 - DNA, 80 bp, synthetic construct
  misc_feature 1..80: note = Synthetic: >GCS-211-cand-10400-10479
  source 1..80: mol_type = other DNA
gtgtgacactacaaggtggccgtaaaactaatgcacttaagagtgtgttgttggccagctttttctttacattattctgg

SEQ ID NO: 3925 - DNA, 80 bp, synthetic construct
  misc_feature 1..80: note = Synthetic: >GCS-211-cand-16630-16709
  source 1..80: mol_type = other DNA
gtggctttaaagtcaataataacaatgcacaatatatctttagcactgttaacgcactacctgagtgcgttgtggacatt

SEQ ID NO: 3926 - DNA, 80 bp, synthetic construct
  misc_feature 1..80: note = Synthetic: >GCS-227-cand-16630-16709
  source 1..80: mol_type = other DNA
ggctttaaagtcaataataacaatgcacaatatatctttagcactgttaacgcactacctgagtgcgttgtggacattgt

SEQ ID NO: 3927 - DNA, 80 bp, synthetic construct
  misc_feature 1..80: note = Synthetic: >GCS-211-cand-6090-6169
  source 1..80: mol_type = other DNA
aattacagaaggtgaaaaacccagggtgtactctgattgtggtgctataaatgcttgtgcatatgtggcatacactggtg

SEQ ID NO: 3928 - DNA, 80 bp, synthetic construct
  misc_feature 1..80: note = Synthetic: >GCS-227-cand-6090-6169
  source 1..80: mol_type = other DNA
ttacagaaggtgaaaaacccagggtgtactctgattgtggtgctataaatgcttgtgcatatgtggcatacactggtgac

SEQ ID NO: 3929 - DNA, 80 bp, synthetic construct
  misc_feature 1..80: note = Synthetic: >GCS-227-cand-5930-6009
  source 1..80: mol_type = other DNA
gttaggtctaataagtgcgaactgtgtaaagacacaccaataactcgcaatgcgtctgttttgccactgacactaagtgt

SEQ ID NO: 3930 - DNA, 80 bp, synthetic construct
  misc_feature 1..80: note = Synthetic: >GCS-211-cand-5930-6009
  source 1..80: mol_type = other DNA
ttgttaggtctaataagtgcgaactgtgtaaagacacaccaataactcgcaatgcgtctgttttgccactgacactaagt

SEQ ID NO: 3931 - DNA, 80 bp, synthetic construct
  misc_feature 1..80: note = Synthetic: >GCS-211-cand-730-809
  source 1..80: mol_type = other DNA
acacttgcaggtaaaacttatactttggcttggcgagttgttagatccaacttgccctacaaccaacaaagcgtctgcaa

SEQ ID NO: 3932 - DNA, 80 bp, synthetic construct
  misc_feature 1..80: note = Synthetic: >GCS-227-cand-730-809
  source 1..80: mol_type = other DNA
acttgcaggtaaaacttatactttggcttggcgagttgttagatccaacttgccctacaaccaacaaagcatctgcaaca

SEQ ID NO: 3933 - DNA, 80 bp, synthetic construct
  misc_feature 1..80: note = Synthetic: >GCS-211-cand-23980-24059
  source 1..80: mol_type = other DNA
acagaccatttatacccgtcttgatgagctgtctgctgatgcacaagtggatcgtttgattactgggcggcttgcatcgt

SEQ ID NO: 3934 - DNA, 80 bp, synthetic construct
  misc_feature 1..80: note = Synthetic: >GCS-227-cand-23970-24049
  source 1..80: mol_type = other DNA
tcctccatacagaccatttatacccgtcttgatgagctgtctgctgatgcacaagtggatcgtttgattactgggcggct

SEQ ID NO: 3935 - DNA, 80 bp, synthetic construct
  misc_feature 1..80: note = Synthetic: >GCS-211-cand-7370-7449
  source 1..80: mol_type = other DNA
acagactctatagtggtgatgtgttctggaagtacaattatgacatcacagatgccaaatttagttgtaaggaagtgtta

SEQ ID NO: 3936 - DNA, 80 bp, synthetic construct
  misc_feature 1..80: note = Synthetic: >GCS-227-cand-7370-7449
  source 1..80: mol_type = other DNA
agactctatagtggtgatgtgttctggaagtacaattatgacatcacagatgccaaatttagttgtaaggaagtgttaaa

SEQ ID NO: 3937 - DNA, 80 bp, synthetic construct
  misc_feature 1..80: note = Synthetic: >GCS-211-cand-14790-14869
  source 1..80: mol_type = other DNA
acagaggttgtttactctaatggtggattctatatgaaacctggtggtaccacttcaggtgatgccaccactgcttatgc

SEQ ID NO: 3938 - DNA, 80 bp, synthetic construct
  misc_feature 1..80: note = Synthetic: >GCS-227-cand-14790-14869
  source 1..80: mol_type = other DNA
agaggttgtttactctaatggtggattctatatgaaacctggtggtaccacttcaggtgatgccaccactgcttatgcaa

SEQ ID NO: 3939 - DNA, 80 bp, synthetic construct
  misc_feature 1..80: note = Synthetic: >SBB-122-cand-25700-25779
  source 1..80: mol_type = other DNA
catttctattacttgggcaccggaccacgtgctgatgctaaatttagacaacgcattaacggtgtgtactgggttgctgt

SEQ ID NO: 3940 - DNA, 80 bp, synthetic construct
  misc_feature 1..80: note = Synthetic: >SBB-024-cand-25710-25789
  source 1..80: mol_type = other DNA
gcatttctactacttgggaaccggaccacaagccgacgctaaattcagacaacgcattaacggtgtgtactgggttgctg

SEQ ID NO: 3941 - DNA, 80 bp, synthetic construct
  misc_feature 1..80: note = Synthetic: >SBB-788-cand-22880-22959
  source 1..80: mol_type = other DNA
acagtttatgtttagctaatattacacaaccttcgcagtatggtttaagtactattagtagtgtaaaccttttgagttta

SEQ ID NO: 3942 - DNA, 80 bp, synthetic construct
  misc_feature 1..80: note = Synthetic: >SBB-010-cand-18250-18329
  source 1..80: mol_type = other DNA
ctagcgaaactcaaacctgcaccattcttcttttacgatgatggtccttgtgatcgtgtgcaggaggagattaattatgt

SEQ ID NO: 3943 - DNA, 80 bp, synthetic construct
  misc_feature 1..80: note = Synthetic: >SBB-130-cand-18250-18329
  source 1..80: mol_type = other DNA
gcgaaactcaaacctgcaccattcttcttttatgatgatggtccttgtgatcgtgtgcaggaggagattaattatgtgcc

SEQ ID NO: 3944 - DNA, 80 bp, synthetic construct
  misc_feature 1..80: note = Synthetic: >GCS-211-cand-10080-10159
  source 1..80: mol_type = other DNA
ggtagagggtgctagcagtttggtgactgaaaatgtcgtgtccttcctttatggggctatacttaacggctgcacttggt

SEQ ID NO: 3945 - DNA, 80 bp, synthetic construct
  misc_feature 1..80: note = Synthetic: >GCS-227-cand-10070-10149
  source 1..80: mol_type = other DNA
agcctacaggtagagggtgctagcagtttggtgactgaaaatgtcgtgtccttcctttatggggctatacttaacggctg

SEQ ID NO: 3946 - DNA, 80 bp, synthetic construct
  misc_feature 1..80: note = Synthetic: >SBB-010-cand-22080-22159
  source 1..80: mol_type = other DNA
tttgacaaacgtgacactacttatgtagcacctgttttgagtgagaggtatgttgacatacctgttggacatcaattgat

SEQ ID NO: 3947 - DNA, 80 bp, synthetic construct
  misc_feature 1..80: note = Synthetic: >GCS-227-cand-11590-11669
  source 1..80: mol_type = other DNA
accacaattgcttaagcaattgaagcgagctatgaacattgctaaggcagaatttgacaaggacgcttctgtgcaaaaga

SEQ ID NO: 3948 - DNA, 80 bp, synthetic construct
  misc_feature 1..80: note = Synthetic: >GCS-211-cand-11600-11679
  source 1..80: mol_type = other DNA
tgcttaagcaattgaagcgagctatgaacattgctaaggcagaatttgacaaggacgcttctgtgcaaaagaagataacc

SEQ ID NO: 3949 - DNA, 80 bp, synthetic construct
  misc_feature 1..80: note = Synthetic: >GCS-227-cand-6810-6889
  source 1..80: mol_type = other DNA
cctggcgtcatttgactagtccttttagagtggcacttatgccttttgtgtacctagcgtttttggctatttttggtggt

SEQ ID NO: 3950 - DNA, 80 bp, synthetic construct
  misc_feature 1..80: note = Synthetic: >GCS-211-cand-6810-6889
  source 1..80: mol_type = other DNA
cacctggcgtcatttgactagtccttttagagtggcacttatgccttttgtgtacctagcgtttttggctatttttggtg

SEQ ID NO: 3951 - DNA, 80 bp, synthetic construct
  misc_feature 1..80: note = Synthetic: >GCS-227-cand-7840-7919
  source 1..80: mol_type = other DNA
tgttgcgcagtgcatgcgtgcaagtgcaaaaattgttaatcataatgtcatcactaaagagaaacttagtgttgtctggt

SEQ ID NO: 3952 - DNA, 80 bp, synthetic construct
  misc_feature 1..80: note = Synthetic: >GCS-211-cand-7840-7919
  source 1..80: mol_type = other DNA
gatgttgcgcagtgcatgcgtgcaagtgcaaaaattgttaatcataatgtcatcactaaagagaaacttagtgttgtctg

SEQ ID NO: 3953 - DNA, 80 bp, synthetic construct
  misc_feature 1..80: note = Synthetic: >GCS-211-cand-23340-23419
  source 1..80: mol_type = other DNA
ctgttgaccttaacgagcaaattgcagttaaccagcaagcattatccttagcaataccccagacatttaactcctctggt

SEQ ID NO: 3954 - DNA, 80 bp, synthetic construct
  misc_feature 1..80: note = Synthetic: >GCS-227-cand-23330-23409
  source 1..80: mol_type = other DNA
catagagtctgttgaccttaacgagcaaattgcagttaaccagcaagcattatccttagcaataccccagacatttaact

SEQ ID NO: 3955 - DNA, 80 bp, synthetic construct
  misc_feature 1..80: note = Synthetic: >GCS-211-cand-970-1049
  source 1..80: mol_type = other DNA
accagcattgctgacatcattgccaaacctgttttcattcatgcactagttaagtgcaagtgtggaacagaacagtttgc

SEQ ID NO: 3956 - DNA, 80 bp, synthetic construct
  misc_feature 1..80: note = Synthetic: >GCS-227-cand-970-1049
  source 1..80: mol_type = other DNA
cagcattgctgacatcattgccaaacctgttttcattcatgcactagttaagtgcaagtgtggaacagaacagtttgccg

SEQ ID NO: 3957 - DNA, 80 bp, synthetic construct
  misc_feature 1..80: note = Synthetic: >GCS-227-cand-26210-26289
  source 1..80: mol_type = other DNA
caattgttgcccccactgggatcactctcacgctcttgagcggtactttgctttgtgacggcatacgcgttgcaactggt

SEQ ID NO: 3958 - DNA, 80 bp, synthetic construct
  misc_feature 1..80: note = Synthetic: >GCS-211-cand-26210-26289
  source 1..80: mol_type = other DNA
tacaattgttgcccccactgggatcactctcacgctcttgagcggtactttgctttgtgacggcatacgcgttgcaactg

SEQ ID NO: 3959 - DNA, 80 bp, synthetic construct
  misc_feature 1..80: note = Synthetic: >SBB-024-cand-1350-1429
  source 1..80: mol_type = other DNA
gtttcaagtttggtatgcttaatgcagtctttgcagacgatgtaaaagcagccgttgttgatggtgacattgttgttagc

SEQ ID NO: 3960 - DNA, 80 bp, synthetic construct
  misc_feature 1..80: note = Synthetic: >GCS-227-cand-19340-19419
  source 1..80: mol_type = other DNA
tcctcttttcaactactcctgttaagaagcttagtgccataaaacttaactttggttatcttaatggggttgcagttagt

SEQ ID NO: 3961 - DNA, 80 bp, synthetic construct
  misc_feature 1..80: note = Synthetic: >GCS-211-cand-19350-19429
  source 1..80: mol_type = other DNA
tcaactactcctgttaagaagcttagtgccataaaacttaactttggttatcttaatggggttgcagttagtgaaactac

SEQ ID NO: 3962 - DNA, 80 bp, synthetic construct
  misc_feature 1..80: note = Synthetic: >GCS-227-cand-21090-21169
  source 1..80: mol_type = other DNA
actaaggctggagctcatggcgcatttataagccatgatacttataacagagccttttctataggcgttggcacattgga

SEQ ID NO: 3963 - DNA, 80 bp, synthetic construct
  misc_feature 1..80: note = Synthetic: >GCS-211-cand-21100-21179
  source 1..80: mol_type = other DNA
tggagctcatggcgcatttataagccatgatactcataacagagccttttctataggcgttggcacattggatgcaaaag

SEQ ID NO: 3964 - DNA, 80 bp, synthetic construct
  misc_feature 1..80: note = Synthetic: >SBB-120-cand-15980-16059
  source 1..80: mol_type = other DNA
actaccagatgataggcaaacagaggattactactattcaaggccctcctggtagtggaaagtctcattgtgtcataggc

SEQ ID NO: 3965 - DNA, 80 bp, synthetic construct
  misc_feature 1..80: note = Synthetic: >SBB-120-cand-13360-13439
  source 1..80: mol_type = other DNA
cctttgtgtcgtaaagtttttgtagatggtgtgccattagttgctactgctggttaccattttaaacagctaggtatagt

SEQ ID NO: 3966 - DNA, 80 bp, synthetic construct
  misc_feature 1..80: note = Synthetic: >GCS-211-cand-15830-15909
  source 1..80: mol_type = other DNA
actatcattcccgttatgttcaggtggcaatgtctttggcttgtacaaggccagtgccacaggttcgactgatgtggagt

SEQ ID NO: 3967 - DNA, 80 bp, synthetic construct
  misc_feature 1..80: note = Synthetic: >GCS-227-cand-15830-15909
  source 1..80: mol_type = other DNA
tatcattcccgttatgttcaggtggcaatgtctttggcttgtacaaggccagtgccacaggttcgactgatgtggagttg

SEQ ID NO: 3968 - DNA, 80 bp, synthetic construct
  misc_feature 1..80: note = Synthetic: >SBB-024-cand-10230-10309
  source 1..80: mol_type = other DNA
cattttacaactttgcttgggattggtacataactagtatccttgtagagatgtttgatcaccatgtttctcttatcagc

SEQ ID NO: 3969 - DNA, 80 bp, synthetic construct
  misc_feature 1..80: note = Synthetic: >GCS-211-cand-13270-13349
  source 1..80: mol_type = other DNA
atatgaaatcatggtatgatcccgttgagaatgaggacatctggcgtgtttatgccaaacttggatctattgtggccagt

SEQ ID NO: 3970 - DNA, 80 bp, synthetic construct
  misc_feature 1..80: note = Synthetic: >GCS-227-cand-13270-13349
  source 1..80: mol_type = other DNA
atgaaatcatggtatgatcccgttgagaatgaggacatctggcgtgtttatgccaaacttggatctattgtggccaatgc

SEQ ID NO: 3971 - DNA, 80 bp, synthetic construct
  misc_feature 1..80: note = Synthetic: >GCS-211-cand-2570-2649
  source 1..80: mol_type = other DNA
tgctgcttgacctgtacaatgagtttttggccacagttctagaaactgttgtcatagctggtgttgcgttcaagaagtat

SEQ ID NO: 3972 - DNA, 80 bp, synthetic construct
  misc_feature 1..80: note = Synthetic: >GCS-227-cand-2570-2649
  source 1..80: mol_type = other DNA
ctgcttgacctgtacaatgagtttttggccacagttctagaaactgttgtcatagctggtgtggcgttcaagaagtatgc

SEQ ID NO: 3973 - DNA, 80 bp, synthetic construct
  misc_feature 1..80: note = Synthetic: >SBB-120-cand-9260-9339
  source 1..80: mol_type = other DNA
catgagtattccataatgcgattgcataacttttcaatatctgtaggtaatgtgtttttgggtgttataggtgttactat

SEQ ID NO: 3974 - DNA, 80 bp, synthetic construct
  misc_feature 1..80: note = Synthetic: >SBB-122-cand-9270-9349
  source 1..80: mol_type = other DNA
ccataatgcgcttgcacaacttttcaatatctataggtaatgtgtttttgggtgttataggtgttactatgaagggtaca

SEQ ID NO: 3975 - DNA, 80 bp, synthetic construct
  misc_feature 1..80: note = Synthetic: >GCS-227-cand-25170-25249
  source 1..80: mol_type = other DNA
ctatgtacctaggtgcatatgtggacggtgctataatcaccacaaccctgttgattcgtacgattgtggttggttactat

SEQ ID NO: 3976 - DNA, 80 bp, synthetic construct
  misc_feature 1..80: note = Synthetic: >GCS-211-cand-25180-25259
  source 1..80: mol_type = other DNA
ctaggtgcatatgtggacggtgctataatcaccacaaccctgttgattcgtacgattgtggttggttactatacctgtag

SEQ ID NO: 3977 - DNA, 80 bp, synthetic construct
  misc_feature 1..80: note = Synthetic: >GCS-227-cand-18220-18299
  source 1..80: mol_type = other DNA
tgcttggctgttcatgattgtttcgtgaaaaatgttgactggtcgatcacttaccccttcattgccaatgagaacactat

SEQ ID NO: 3978 - DNA, 80 bp, synthetic construct
  misc_feature 1..80: note = Synthetic: >GCS-211-cand-18230-18309
  source 1..80: mol_type = other DNA
tgttcatgattgtttcgtgaaaaatgttgactggtcgatcacttaccccttcattgccaatgagaacactatcaataaga

SEQ ID NO: 3979 - DNA, 80 bp, synthetic construct
  misc_feature 1..80: note = Synthetic: >SBB-726-cand-26250-26329
  source 1..80: mol_type = other DNA
atataaagtaggcaatcaccgcgttcagaataacaatgaagatggcgagcgtttagctatgtttgttgcttaaagaaata

SEQ ID NO: 3980 - DNA, 80 bp, synthetic construct
  misc_feature 1..80: note = Synthetic: >SBB-788-cand-26250-26329
  source 1..80: mol_type = other DNA
taaagtaggcaatcaccgcgttcagaataacaatgaagatggcgagcgtttagctatgtttgttgcttaaagaaatactc

SEQ ID NO: 3981 - DNA, 80 bp, synthetic construct
  misc_feature 1..80: note = Synthetic: >SBB-797-cand-25280-25359
  source 1..80: mol_type = other DNA
ttctaaggagcttctactccttgatagagtagagcatggttatgattacaccgttttcgtttatgtaaacaatgttatat

SEQ ID NO: 3982 - DNA, 80 bp, synthetic construct
  misc_feature 1..80: note = Synthetic: >SBB-788-cand-25280-25359
  source 1..80: mol_type = other DNA
attttctaaggagcttctactccttgatagagtagagcatggttatgattacactgttttcgtttatgtaaacaatgtta

SEQ ID NO: 3983 - DNA, 80 bp, synthetic construct
  misc_feature 1..80: note = Synthetic: >GCS-227-cand-18460-18539
  source 1..80: mol_type = other DNA
gttaagtgtttggaatacgattatatgctgcatggtcagatgaatgggctttgtctgttttggaactgtaacgttgatat

SEQ ID NO: 3984 - DNA, 80 bp, synthetic construct
  misc_feature 1..80: note = Synthetic: >GCS-211-cand-18470-18549
  source 1..80: mol_type = other DNA
tttggaatacgattatatgctgcatggtcagatgaatgggctttgtctgttttggaactgtaacgttgatatgtaccctg

SEQ ID NO: 3985 - DNA, 80 bp, synthetic construct
  misc_feature 1..80: note = Synthetic: >SBB-726-cand-21450-21529
  source 1..80: mol_type = other DNA
atatggcgattcttgctttataaacaacactttcacaatatctattaatacttctaggttaaacctggggtttaggttta

SEQ ID NO: 3986 - DNA, 80 bp, synthetic construct
  misc_feature 1..80: note = Synthetic: >GCS-227-cand-10550-10629
  source 1..80: mol_type = other DNA
gttgtgtgttctgttatcctgtcgacattaataaagcacaaatcattgtttttccaggcatttttattaccagctgtcat

SEQ ID NO: 3987 - DNA, 80 bp, synthetic construct
  misc_feature 1..80: note = Synthetic: >GCS-211-cand-10560-10639
  source 1..80: mol_type = other DNA
ttctgttatcctgtcgacattaataaagcacaaatcattgtttttccaggcatttttattaccagctgtcatagtgattg

SEQ ID NO: 3988 - DNA, 80 bp, synthetic construct
  misc_feature 1..80: note = Synthetic: >GCS-211-cand-6010-6089
  source 1..80: mol_type = other DNA
gttactggcgttaacgatgggttttgtcagcataatatgcaatggtgttcacgtattaccaacatagatggcgatgtcat

SEQ ID NO: 3989 - DNA, 80 bp, synthetic construct
  misc_feature 1..80: note = Synthetic: >GCS-227-cand-6010-6089
  source 1..80: mol_type = other DNA
tactggcgttaacgatgggttttgtcagcataatatgcaatggtgttcacgtattaccaacatagatggcgatgtcataa

SEQ ID NO: 3990 - DNA, 80 bp, synthetic construct
  misc_feature 1..80: note = Synthetic: >GCS-227-cand-13990-14069
  source 1..80: mol_type = other DNA
gtggctgctttgagtactggtctcacacaacaaactgtgaaaccaggccactttaatgaggagttttataattttctcat

SEQ ID NO: 3991 - DNA, 80 bp, synthetic construct
  misc_feature 1..80: note = Synthetic: >GCS-211-cand-13990-14069
  source 1..80: mol_type = other DNA
ctgtggctgctttgagtactggtctcacacaacaaactgtgaaaccaggccactttaatgaggagttttataattttctc

SEQ ID NO: 3992 - DNA, 80 bp, synthetic construct
  misc_feature 1..80: note = Synthetic: >SBB-120-cand-16760-16839
  source 1..80: mol_type = other DNA
tgcagatacaaactgttgattcctcccaaggtagtgagtacgattatgttatatacacacaaacatcggatactgctcat

SEQ ID NO: 3993 - DNA, 80 bp, synthetic construct
  misc_feature 1..80: note = Synthetic: >SBB-122-cand-16750-16829
  source 1..80: mol_type = other DNA
gctttgggtttgcagatacaaaccgttgattcctcccaaggtagtgagtacgattatgttatatacacacaaacatcgga

SEQ ID NO: 3994 - DNA, 80 bp, synthetic construct
  misc_feature 1..80: note = Synthetic: >SBB-726-cand-21530-21609
  source 1..80: mol_type = other DNA
atgatgggaacttgtacttgtaccattctaaatggttgcctatgcaagggcttaatttgatggtggattaccctctgcac

SEQ ID NO: 3995 - DNA, 80 bp, synthetic construct
  misc_feature 1..80: note = Synthetic: >GCS-227-cand-17180-17259
  source 1..80: mol_type = other DNA
tacaaacacagactgttgattcatctcagggcagtgagtatgactatgtcatatacgcccagacatctgacactaatcat

SEQ ID NO: 3996 - DNA, 80 bp, synthetic construct
  misc_feature 1..80: note = Synthetic: >GCS-211-cand-17190-17269
  source 1..80: mol_type = other DNA
cagactgttgattcatctcaaggcagtgagtatgactatgtcatatacgcccagacatctgacactaatcatgcttgtaa

SEQ ID NO: 3997 - DNA, 80 bp, synthetic construct
  misc_feature 1..80: note = Synthetic: >GCS-227-cand-4490-4569
  source 1..80: mol_type = other DNA
atgattgtttgtagagaccttaaagtgttgaatgtggttggtccccgtgctggtcataacgaagcagcacgaatgctggc

SEQ ID NO: 3998 - DNA, 80 bp, synthetic construct
  misc_feature 1..80: note = Synthetic: >GCS-211-cand-4490-4569
  source 1..80: mol_type = other DNA
tcatgattgtttgtagagaccttaaagtgttgaatgtggttggtcctcgtgctggtcataacgaagcagcacgaatgctg

SEQ ID NO: 3999 - DNA, 80 bp, synthetic construct
  misc_feature 1..80: note = Synthetic: >SBB-010-cand-7370-7449
  source 1..80: mol_type = other DNA
gacttgtcatacaacaattttgttacgtcatatgctaaaccagaggaaaaattgtccacacatgatgttgctgcttgcat

SEQ ID NO: 4000 - DNA, 80 bp, synthetic construct
  misc_feature 1..80: note = Synthetic: >Anlong-cand-23940-24019
  source 1..80: mol_type = other DNA
gcttacatggaggttgcagcattttctggactttgtgttgagggtaaaggctttgtcttgcgagaagttggtaatgtact

SEQ ID NO: 4001 - DNA, 80 bp, synthetic construct
  misc_feature 1..80: note = Synthetic: >Anlong-cand-24020-24099
  source 1..80: mol_type = other DNA
atttgagaaggatggtcgctaccttataactgctcgcaagatgtttgaaccacgtgtccctcagactgctgactttgtgc

SEQ ID NO: 4002 - DNA, 80 bp, synthetic construct
  misc_feature 1..80: note = Synthetic: >Anlong-cand-24100-24179
  source 1..80: mol_type = other DNA
aaatctctggctgtgacgttgtttatcttaatgtgactcgggacgaattgcccactattataccagattatgttgatgtg

SEQ ID NO: 4003 - DNA, 80 bp, synthetic construct
  misc_feature 1..80: note = Synthetic: >Anlong-cand-24180-24259
  source 1..80: mol_type = other DNA
aatggcacagtcgaagacatactcagtaaactccctaacaggacatcacctgagttagatctcgacatctttaatgccac

SEQ ID NO: 4004 - DNA, 80 bp, synthetic construct
  misc_feature 1..80: note = Synthetic: >Anlong-cand-24260-24339
  source 1..80: mol_type = other DNA
atatctcaatctgactagtgaaatagcagatcttactgcacgttccgagtcacttaaaaatactactttggaattgaaag

SEQ ID NO: 4005 - DNA, 80 bp, synthetic construct
  misc_feature 1..80: note = Synthetic: >Anlong-cand-24340-24419
  source 1..80: mol_type = other DNA
agcttattgctaatattaatgctacacttgttgacttggaatggcttaacagagtggagacttatatcaagtggccatgg

SEQ ID NO: 4006 - DNA, 80 bp, synthetic construct
  misc_feature 1..80: note = Synthetic: >Anlong-cand-24420-24499
  source 1..80: mol_type = other DNA
tgggtttggctcatcattgtgcttgtcttgatactcttcacatgtctaatgctattctgttgttgttcaactggttgttg

SEQ ID NO: 4007 - DNA, 80 bp, synthetic construct
  misc_feature 1..80: note = Synthetic: >Anlong-cand-24500-24579
  source 1..80: mol_type = other DNA
tggcatttttagctgtttggctagttcttgcggtgcttgttgtgatattcgtggaactaaacttcagcggtacgaagcaa

SEQ ID NO: 4008 - DNA, 80 bp, synthetic construct
  misc_feature 1..80: note = Synthetic: >Anlong-cand-24580-24659
  source 1..80: mol_type = other DNA
ttgaaaaggtccacgtacaatgagtgacccattaggcgttttgtggtattgggattttgctaaagagacccaacgtgtca

SEQ ID NO: 4009 - DNA, 80 bp, synthetic construct
  misc_feature 1..80: note = Synthetic: >Anlong-cand-24660-24739
  source 1..80: mol_type = other DNA
taaaggcagtacctacagccattgcgccgcaaagtttacaacctattgtggtacactctaacaacagcgtagtaggctat

SEQ ID NO: 4010 - DNA, 80 bp, synthetic construct
  misc_feature 1..80: note = Synthetic: >Anlong-cand-24740-24819
  source 1..80: mol_type = other DNA
ttgttgactagtgttttcatatatttctttgcagtttacaaggctagcacatatagaaggcaaattgcttgtcttttagg

SEQ ID NO: 4011 - DNA, 80 bp, synthetic construct
  misc_feature 1..80: note = Synthetic: >Anlong-cand-24820-24899
  source 1..80: mol_type = other DNA
caagtttttcttgctcctcatttatgtgccattgctagtttactgcggagcttatgttgatgcagtcattataacattag

SEQ ID NO: 4012 - DNA, 80 bp, synthetic construct
  misc_feature 1..80: note = Synthetic: >Anlong-cand-24900-24979
  source 1..80: mol_type = other DNA
tactaaccgtaagattgagctatgtgctctttttttcccttaagtataagacagtagattttctgctgtttaatgagtcc

SEQ ID NO: 4013 - DNA, 80 bp, synthetic construct
  misc_feature 1..80: note = Synthetic: >Anlong-cand-24980-25059
  source 1..80: mol_type = other DNA
ttgctttgtttttccttcggcaaagcaagtagtgtttgtactgtttttaaacattttatggtgtttacaggaggacacca

SEQ ID NO: 4014 - DNA, 80 bp, synthetic construct
  misc_feature 1..80: note = Synthetic: >Anlong-cand-25060-25139
  source 1..80: mol_type = other DNA
ttacattgattttggctataactttgtcccattcgttgacacgagcaaccttgaggtttgtgttcgtggtcgtgacgaat

SEQ ID NO: 4015 - DNA, 80 bp, synthetic construct
  misc_feature 1..80: note = Synthetic: >Anlong-cand-25140-25219
  source 1..80: mol_type = other DNA
ttgacttgcagttttcacgccaaatcgaattgtgtgatggttcatatctttatctctttacgagccagccggttgtcagc

SEQ ID NO: 4016 - DNA, 80 bp, synthetic construct
  misc_feature 1..80: note = Synthetic: >Beluga-cand-3630-3709
  source 1..80: mol_type = other DNA
ttggactggtctgataaaagaactgaagaggaagaagctaatgtctcaggtacttcggtgaaagacataagcacacctag

SEQ ID NO: 4017 - DNA, 80 bp, synthetic construct
  misc_feature 1..80: note = Synthetic: >Beluga-cand-3710-3789
  source 1..80: mol_type = other DNA
aagtgaggctcaagttgttactcctgaggagaaaattaatgaagaacctaagcctgaaaaagctgaggaggttaagaatt

SEQ ID NO: 4018 - DNA, 80 bp, synthetic construct
  misc_feature 1..80: note = Synthetic: >Beluga-cand-3790-3869
  source 1..80: mol_type = other DNA
attggaaaagcgagtgtactcgtgaattgaaccttggtgccgtcagaggattaaatggcatctataaatgtaaaaagagt

SEQ ID NO: 4019 - DNA, 80 bp, synthetic construct
  misc_feature 1..80: note = Synthetic: >Beluga-cand-3870-3949
  source 1..80: mol_type = other DNA
gtttttcatggtagttgtaataatccagaacataagggttattgttgtgtatgtaatggacatgtgtcggaggtagtgta

SEQ ID NO: 4020 - DNA, 80 bp, synthetic construct
  misc_feature 1..80: note = Synthetic: >Beluga-cand-3950-4029
  source 1..80: mol_type = other DNA
ttattctacctttgatggtgttaattacaaaacccataaatttagtaatttgggtaaattagtgaaagacgtcataggtg

SEQ ID NO: 4021 - DNA, 80 bp, synthetic construct
  misc_feature 1..80: note = Synthetic: >Beluga-cand-4020-4099
  source 1..80: mol_type = other DNA
gtcataggtgataaagtctatgttgatggagtttgtgtagataacaaaccattgtttgagattcaaccaggatcaacatt

SEQ ID NO: 4022 - DNA, 80 bp, synthetic construct
  misc_feature 1..80: note = Synthetic: >Beluga-cand-4100-4179
  source 1..80: mol_type = other DNA
tttgcgcttatatccaatttctgaggctgataagcagcatattagagatattaatgagctaagtctaaaacaatatggtg

SEQ ID NO: 4023 - DNA, 80 bp, synthetic construct
  misc_feature 1..80: note = Synthetic: >Beluga-cand-4180-4259
  source 1..80: mol_type = other DNA
tgtttgctgcagtttatgcaagagaacaccccattattgagagtggtggtttgagatatttaaaacagaaaaataataac

SEQ ID NO: 4024 - DNA, 80 bp, synthetic construct
  misc_feature 1..80: note = Synthetic: >Beluga-cand-4260-4339
  source 1..80: mol_type = other DNA
tgttttgtgtctactgccctagttatgttacagcacttgaagcttgaattcaaggggatagttaaggaattatggagtaa

SEQ ID NO: 4025 - DNA, 80 bp, synthetic construct
  misc_feature 1..80: note = Synthetic: >Beluga-cand-4340-4419
  source 1..80: mol_type = other DNA
ctttttggctggagatgctcgtggaattgtagcttatacctatgcattactttatcctactgtgaagtatggagatatgg

SEQ ID NO: 4026 - DNA, 80 bp, synthetic construct
  misc_feature 1..80: note = Synthetic: >Beluga-cand-4420-4499
  source 1..80: mol_type = other DNA
gtgatgcagaagaggtagtacttaagtaccttaataaggcaaatttatgtgcacaattgacattaaatatcaagtgcaaa

SEQ ID NO: 4027 - DNA, 80 bp, synthetic construct
  misc_feature 1..80: note = Synthetic: >Beluga-cand-4500-4579
  source 1..80: mol_type = other DNA
tgtggtgaaaggaatcacacttttaatggtgtagatgctgtttactgcattgctgatgtttctactagacataaagcatt

SEQ ID NO: 4028 - DNA, 80 bp, synthetic construct
  misc_feature 1..80: note = Synthetic: >Beluga-cand-4580-4659
  source 1..80: mol_type = other DNA
aacgagtcgcatagtgtgtgcttgtaataatgttaaatctagtattgtgtatgcagatcttccttttgtttttgttcatc

SEQ ID NO: 4029 - DNA, 80 bp, synthetic construct
  misc_feature 1..80: note = Synthetic: >Beluga-cand-4660-4739
  source 1..80: mol_type = other DNA
gtaatgttacgactaagataaagttagaggaagactttgtttgtgcaaacgtttttaagcatggttcacattattgtggt

SEQ ID NO: 4030 - DNA, 80 bp, synthetic construct
  misc_feature 1..80: note = Synthetic: >Beluga-cand-4740-4819
  source 1..80: mol_type = other DNA
actaatgcaatgtatagttatgattctatgagttctaaagcaggaaaaccgattttagaatccagtttttctgccattgt

SEQ ID NO: 4031 - DNA, 80 bp, synthetic construct
  misc_feature 1..80: note = Synthetic: >Beluga-cand-4820-4899
  source 1..80: mol_type = other DNA
atttgaaggattttttaaggccaataccgaagtctcagaggcgatagatgaggccattgagagcggtgtggatattcacg

SEQ ID NO: 4032 - DNA, 80 bp, synthetic construct
  misc_feature 1..80: note = Synthetic: >Beluga-cand-18910-18989
  source 1..80: mol_type = other DNA
acagactaaaaatgctgtgcttatctcaactactagggttaaggtagatggtattgaactagaaagtgttcgtatccctg

SEQ ID NO: 4033 - DNA, 80 bp, synthetic construct
  misc_feature 1..80: note = Synthetic: >Beluga-cand-18990-19069
  source 1..80: mol_type = other DNA
cctcttcttgtcaaatagattcaacaccagtttccactgtaagggatggaaatggtcaaatgtttgtgtatgtacgcaag

SEQ ID NO: 4034 - DNA, 80 bp, synthetic construct
  misc_feature 1..80: note = Synthetic: >Beluga-cand-19070-19149
  source 1..80: mol_type = other DNA
gatggaaagcacgttgtgcccacctcgcaactttttactgagcagagaagttttgaagacttttttccacttagtgttat

SEQ ID NO: 4035 - DNA, 80 bp, synthetic construct
  misc_feature 1..80: note = Synthetic: >Beluga-cand-19150-19229
  source 1..80: mol_type = other DNA
ggaacgagatttcctgaatatggaagctccccaatttattgctaagtacgattgtaagggcttaggtcttgaacacgtac

SEQ ID NO: 4036 - DNA, 80 bp, synthetic construct
  misc_feature 1..80: note = Synthetic: >Beluga-cand-19230-19309
  source 1..80: mol_type = other DNA
tatatggtgatttcagcaagaaagtgataggaggtgcacacctaactattggtcttgctcgtttatatactcaggaaaaa

SEQ ID NO: 4037 - DNA, 80 bp, synthetic construct
  misc_feature 1..80: note = Synthetic: >Beluga-cand-19310-19389
  source 1..80: mol_type = other DNA
tttgatgtgcatgagatttcgccttcaagttttgatgtgtttaagagttattttgtggtgacacatgcaggtgcaatgaa

SEQ ID NO: 4038 - DNA, 80 bp, synthetic construct
  misc_feature 1..80: note = Synthetic: >Beluga-cand-19390-19469
  source 1..80: mol_type = other DNA
acaggtttgcacagttttggatgtgttgctagatgattttattaacattcttaaggaaattaaagtcagccataagggtg

SEQ ID NO: 4039 - DNA, 80 bp, synthetic construct
  misc_feature 1..80: note = Synthetic: >Beluga-cand-19470-19549
  source 1..80: mol_type = other DNA
ttgtttcagaggtgttacactatgttgttgattatcaaaccgtagattttatgctatggatgggtgataatgccattaat

SEQ ID NO: 4040 - DNA, 80 bp, synthetic construct
  misc_feature 1..80: note = Synthetic: >Beluga-cand-19550-19629
  source 1..80: mol_type = other DNA
acattttaccctaagcttcaagctgattattgggattcaattaaaggaaagcaccctagtgtgtggagtcctggttttaa

SEQ ID NO: 4041 - DNA, 80 bp, synthetic construct
  misc_feature 1..80: note = Synthetic: >Beluga-cand-19630-19709
  source 1..80: mol_type = other DNA
tatgcctgagctgtataaggtccaaaattgccaacttgaaaagtgtgagcttgcaaattatggtaaaacagttttattgc

SEQ ID NO: 4042 - DNA, 80 bp, synthetic construct
  misc_feature 1..80: note = Synthetic: >Beluga-cand-19710-19789
  source 1..80: mol_type = other DNA
cacctggaattttaatgaatgtagcaaaatacactcagttgtgccagtatcttagtaaaaccactatgtgtgtaccccat

SEQ ID NO: 4043 - DNA, 80 bp, synthetic construct
  misc_feature 1..80: note = Synthetic: >Beluga-cand-19790-19869
  source 1..80: mol_type = other DNA
aatatgagggttatgcattttggagctgggtcagataaaggagtagcacctggtacgtctgtacttcgccagtggttacc

SEQ ID NO: 4044 - DNA, 80 bp, synthetic construct
  misc_feature 1..80: note = Synthetic: >Beluga-cand-19870-19949
  source 1..80: mol_type = other DNA
tgaaggggccttgcttattgataatgatattaatcggtatgtttcagatgccgatgcttgtgtgattagtgattgtaatg

SEQ ID NO: 4045 - DNA, 80 bp, synthetic construct
  misc_feature 1..80: note = Synthetic: >Beluga-cand-19950-20029
  source 1..80: mol_type = other DNA
tgtttaagagtcaagggaagtttgacttgattattagtgatatgtatacgtctccaaagggggtggatatacatgaaggt

SEQ ID NO: 4046 - DNA, 80 bp, synthetic construct
  misc_feature 1..80: note = Synthetic: >Beluga-cand-20030-20109
  source 1..80: mol_type = other DNA
attattaagaataatggtatttccgactgttttggctatttatgccactttattaagaataatctctcgcttggcggcac

SEQ ID NO: 4047 - DNA, 80 bp, synthetic construct
  misc_feature 1..80: note = Synthetic: >Beluga-cand-20110-20189
  source 1..80: mol_type = other DNA
ttttgctgttaagattacagagaccagttggttacctgaattgtatgagctagcacagaaatgtgcatattggacgtgtt

SEQ ID NO: 4048 - DNA, 80 bp, synthetic construct
  misc_feature 1..80: note = Synthetic: >BetaSp-cand-6660-6739
  source 1..80: mol_type = other DNA
atggaagcttccctggcatccttgacgtattttaacagacctagtctgattgataaaaataaatttgatgtgttaacagt

SEQ ID NO: 4049 - DNA, 80 bp, synthetic construct
  misc_feature 1..80: note = Synthetic: >BetaSp-cand-6740-6819
  source 1..80: mol_type = other DNA
ggaggagtcgacttcagaggaaaaagatgattctcagcaggttggaatgatcccctttattataaagaggttaagcttaa

SEQ ID NO: 4050 - DNA, 80 bp, synthetic construct
  misc_feature 1..80: note = Synthetic: >BetaSp-cand-6820-6899
  source 1..80: mol_type = other DNA
aaatgttaaaaagcctattagtgtggatggtgtcatcatagagaatgatgaaaaagccgaggccactttagttaaaagtt

SEQ ID NO: 4051 - DNA, 80 bp, synthetic construct
  misc_feature 1..80: note = Synthetic: >BetaSp-cand-6900-6979
  source 1..80: mol_type = other DNA
tgaccttagatgatgtaattgctatgtgggtcacgggcggtaggtatgttgtacgggtagccaattggcttagtaagctc

SEQ ID NO: 4052 - DNA, 80 bp, synthetic construct
  misc_feature 1..80: note = Synthetic: >BetaSp-cand-6980-7059
  source 1..80: mol_type = other DNA
gtatgcacgcctacagtacgtgaatatgctaagcgaggtcttcaaaaggttaaaatacctgtggaactctttttaaggcg

SEQ ID NO: 4053 - DNA, 80 bp, synthetic construct
  misc_feature 1..80: note = Synthetic: >BetaSp-cand-7060-7139
  source 1..80: mol_type = other DNA
tggtgacaagtgcgaatttgtagttcagaagagtataaaacgtgttgttttgactccgatgaatgtgttgcgctggtttt

SEQ ID NO: 4054 - DNA, 80 bp, synthetic construct
  misc_feature 1..80: note = Synthetic: >BetaSp-cand-7140-7219
  source 1..80: mol_type = other DNA
tcacctatctgctaatgtgctcttggttgaagaagccaagtgacaataaagttgtatacaccacagaaattgtttctaag

SEQ ID NO: 4055 - DNA, 80 bp, synthetic construct
  misc_feature 1..80: note = Synthetic: >BetaSp-cand-7220-7299
  source 1..80: mol_type = other DNA
tttagttctaagttgtttgttaaagcatgtggtatagctttacgcaactttaagtggggcatgttgttgcgtggcttttt

SEQ ID NO: 4056 - DNA, 80 bp, synthetic construct
  misc_feature 1..80: note = Synthetic: >BetaSp-cand-7380-7459
  source 1..80: mol_type = other DNA
tacgtttcatgccgacctttgtaggccatgttatcgctaggttcaaatccactttaggattttggacattatgtgatggc

SEQ ID NO: 4057 - DNA, 80 bp, synthetic construct
  misc_feature 1..80: note = Synthetic: >BetaSp-cand-7460-7539
  source 1..80: mol_type = other DNA
atagacgtgtcaggtattgggtttatacgtgataattgtacatcagttgcatggtttgtcaattctgtttatcgggtttc

SEQ ID NO: 4058 - DNA, 80 bp, synthetic construct
  misc_feature 1..80: note = Synthetic: >BetaSp-cand-7540-7619
  source 1..80: mol_type = other DNA
gacatgattgatacgtacaaggctatagactttgtgcagtatcatgtagcaggcttttctggttttgactataagagctt

SEQ ID NO: 4059 - DNA, 80 bp, synthetic construct
  misc_feature 1..80: note = Synthetic: >BetaSp-cand-7620-7699
  source 1..80: mol_type = other DNA
tgcggttttagtgttggaacttgttataagttatgttttgtatacagtgtggttttatcccttgtttgggttggtctgtt

SEQ ID NO: 4060 - DNA, 80 bp, synthetic construct
  misc_feature 1..80: note = Synthetic: >BetaSp-cand-7700-7779
  source 1..80: mol_type = other DNA
tacaaatttttacaacgtggtttcctgatatgtttatgatcactgaattacattggtttgtacgcttgtttctttatatg

SEQ ID NO: 4061 - DNA, 80 bp, synthetic construct
  misc_feature 1..80: note = Synthetic: >CDPHE15-cand-9410-9489
  source 1..80: mol_type = other DNA
cacatttttaggcgttgttggttgttctacgaagggtgcacttttgcttattaaggttggtcaaaataatgttcacacac

SEQ ID NO: 4062 - DNA, 80 bp, synthetic construct
  misc_feature 1..80: note = Synthetic: >CDPHE15-cand-9490-9569
  source 1..80: mol_type = other DNA
ctggtagttacacttttagaacacttaagcctggcgattcatttaacatcttagcatgttatgatggtacagctactggc

SEQ ID NO: 4063 - DNA, 80 bp, synthetic construct
  misc_feature 1..80: note = Synthetic: >CDPHE15-cand-9570-9649
  source 1..80: mol_type = other DNA
gtttatggtgttaatttgagaaccaatcataccattagaggctcttttattaatggagcttgtggttcaccaggttttaa

SEQ ID NO: 4064 - DNA, 80 bp, synthetic construct
  misc_feature 1..80: note = Synthetic: >CDPHE15-cand-9650-9729
  source 1..80: mol_type = other DNA
catacatggtagcactgtagaattttgttatttacatcaactagagcttggctctggttgtcatgtgggtagcgacatga

SEQ ID NO: 4065 - DNA, 80 bp, synthetic construct
  misc_feature 1..80: note = Synthetic: >CDPHE15-cand-9730-9809
  source 1..80: mol_type = other DNA
atggtgctatgtatggtggatatgaagaccaaccctctttccagatagaaggtgttagtaaccttgtatctgagaatgtt

SEQ ID NO: 4066 - DNA, 80 bp, synthetic construct
  misc_feature 1..80: note = Synthetic: >CDPHE15-cand-9810-9889
  source 1..80: mol_type = other DNA
gtagcatttctttatggtgcattgcttaatggatgcaattggtggttagaccagtgtggtgttactgttgaggcctataa

SEQ ID NO: 4067 - DNA, 80 bp, synthetic construct
  misc_feature 1..80: note = Synthetic: >CDPHE15-cand-9890-9969
  source 1..80: mol_type = other DNA
tgattgggctcatagtaatggctgtactagtttatcaagtacagattgtttcacaatattggcagctaagactggtgtcg

SEQ ID NO: 4068 - DNA, 80 bp, synthetic construct
  misc_feature 1..80: note = Synthetic: >CDPHE15-cand-9970-10049
  source 1..80: mol_type = other DNA
aggtgtcaagagtgttggcagctatacagcgtcttaatgtcaattttggtggcaaagctatacttggttacacatcttta

SEQ ID NO: 4069 - DNA, 80 bp, synthetic construct
  misc_feature 1..80: note = Synthetic: >CDPHE15-cand-10050-10129
  source 1..80: mol_type = other DNA
actgacgagtttaccgtgggtgagataattaagcagatgtttggtgttaacctgcaaagtggtattataagccggtcagt

SEQ ID NO: 4070 - DNA, 80 bp, synthetic construct
  misc_feature 1..80: note = Synthetic: >CDPHE15-cand-10130-10209
  source 1..80: mol_type = other DNA
gcgtaatgtgcttttagtcggcttatttgtcctactgttttggtcagagttagttatttatacaccatttttctgggttt

SEQ ID NO: 4071 - DNA, 80 bp, synthetic construct
  misc_feature 1..80: note = Synthetic: >CDPHE15-cand-10210-10289
  source 1..80: mol_type = other DNA
ctccagcttatattacaccattgtttttgattgtcagtggtgtttctatcttgtgcatgagtcttctgaagcataaaaca

SEQ ID NO: 4072 - DNA, 80 bp, synthetic construct
  misc_feature 1..80: note = Synthetic: >CDPHE15-cand-10290-10369
  source 1..80: mol_type = other DNA
ttgtttttgcaaatgtttttgattccagctgttattgcagtgtctgcttacaatctggcatatgatttggagatacgcac

SEQ ID NO: 4073 - DNA, 80 bp, synthetic construct
  misc_feature 1..80: note = Synthetic: >CDPHE15-cand-10370-10449
  source 1..80: mol_type = other DNA
gtggatggctactaagctggattatcatgcctctattcttagctttaacattcagggtatatttaacattatggtgtgtt

SEQ ID NO: 4074 - DNA, 80 bp, synthetic construct
  misc_feature 1..80: note = Synthetic: >CDPHE15-cand-10450-10529
  source 1..80: mol_type = other DNA
gtgttgttgtttgtctccatgcataccgttgtgttactagatcatcatctgttttcactatggttgtggcatgcataacg

SEQ ID NO: 4075 - DNA, 80 bp, synthetic construct
  misc_feature 1..80: note = Synthetic: >CDPHE15-cand-10530-10609
  source 1..80: mol_type = other DNA
tcgtgctatagttatgttatatgtggtgatgccctaagtgctgcaatggctattatgctcaacatcactggtaattggtt

SEQ ID NO: 4076 - DNA, 80 bp, synthetic construct
  misc_feature 1..80: note = Synthetic: >CDPHE15-cand-10610-10689
  source 1..80: mol_type = other DNA
tgttggtgcaggtgcttataggttggcaacatatattgtcttactaaaccctgcactacctgctcttgtcggtgatgtta

SEQ ID NO: 4077 - DNA, 80 bp, synthetic construct
  misc_feature 1..80: note = Synthetic: >Delta-cand-3920-3999
  source 1..80: mol_type = other DNA
caactcctaatcaggagggcatcgacgccaaatcagcatcagttaatagtaacactccagacgaaagtactaaaccgagc

SEQ ID NO: 4078 - DNA, 80 bp, synthetic construct
  misc_feature 1..80: note = Synthetic: >Delta-cand-4000-4079
  source 1..80: mol_type = other DNA
acagagtcagttacacaatttggagatgccacacaagaggtccaacctcagcagcaaactgcatcggcaaccccctctct

SEQ ID NO: 4079 - DNA, 80 bp, synthetic construct
  misc_feature 1..80: note = Synthetic: >Delta-cand-4080-4159
  source 1..80: mol_type = other DNA
cggattagatgaccagaattccattgctaacgcggcacacgatcgcggcaacaacgatagaaaggttatctttgaagctg

SEQ ID NO: 4080 - DNA, 80 bp, synthetic construct
  misc_feature 1..80: note = Synthetic: >Delta-cand-4160-4239
  source 1..80: mol_type = other DNA
tgcacgattcgtttgacgagtcatttgttgatgctgaatcagagacatgcattgtacagtctgatgatccacaagatccg

SEQ ID NO: 4081 - DNA, 80 bp, synthetic construct
  misc_feature 1..80: note = Synthetic: >Delta-cand-4240-4319
  source 1..80: mol_type = other DNA
aactccatcgctaacgcggcatacgatcgtggcgattgtgatagtactgctgtatatgatgatgatgatgttacaacaat

SEQ ID NO: 4082 - DNA, 80 bp, synthetic construct
  misc_feature 1..80: note = Synthetic: >Delta-cand-4320-4399
  source 1..80: mol_type = other DNA
tataacggacagcactgatgtaggcgatgagcctgagacaactctagctaccatcgttaacacacctctgacactcgata

SEQ ID NO: 4083 - DNA, 80 bp, synthetic construct
  misc_feature 1..80: note = Synthetic: >Delta-cand-4400-4479
  source 1..80: mol_type = other DNA
ataacttgccacctgaagccattaaacaacccagcccgactaaggttgagttagttgttggtgaattggcgagtattaaa

SEQ ID NO: 4084 - DNA, 80 bp, synthetic construct
  misc_feature 1..80: note = Synthetic: >Delta-cand-4480-4559
  source 1..80: mol_type = other DNA
tttagagacaattctgtcctagtcaaccctgctaatgcgcaattaacaaatggcggtggagctgcccgtgcaattgcaaa

SEQ ID NO: 4085 - DNA, 80 bp, synthetic construct
  misc_feature 1..80: note = Synthetic: >Delta-cand-4560-4639
  source 1..80: mol_type = other DNA
attagctggtccaaaatatcaagagtactgtaatagtgtggctcctatctcaggaccgcttaccacggactcttttgatg

SEQ ID NO: 4086 - DNA, 80 bp, synthetic construct
  misc_feature 1..80: note = Synthetic: >Delta-cand-4640-4719
  source 1..80: mol_type = other DNA
ccaagaaacttggtgtagcctgcatcttgcatgtagtgccacccaaaggttctgaccctaatgtacaagaactcctgtat

SEQ ID NO: 4087 - DNA, 80 bp, synthetic construct
  misc_feature 1..80: note = Synthetic: >Delta-cand-4720-4799
  source 1..80: mol_type = other DNA
caagcttacaagagtatccttactgaaccagcacactatgttatacctatactaggtgctggtatctttggatgcaaccc

SEQ ID NO: 4088 - DNA, 80 bp, synthetic construct
  misc_feature 1..80: note = Synthetic: >Delta-cand-4800-4879
  source 1..80: mol_type = other DNA
agtccactctctggatgcgttcaggaaagcatgtccaagtgacataggtcgtgtcacccttgtcactatgaacaaaaacc

SEQ ID NO: 4089 - DNA, 80 bp, synthetic construct
  misc_feature 1..80: note = Synthetic: >Delta-cand-4880-4959
  source 1..80: mol_type = other DNA
atttgcaggtgtgggatgctctcaataggaccattgtacgcaccactactgactatgatcaagttaccaccaaggccctt

SEQ ID NO: 4090 - DNA, 80 bp, synthetic construct
  misc_feature 1..80: note = Synthetic: >Delta-cand-4960-5039
  source 1..80: mol_type = other DNA
acaccccagggagtgttagaagccaatctctttgatggtgaggactttgttcaagaaccaaaacccggtcaaatctacct

SEQ ID NO: 4091 - DNA, 80 bp, synthetic construct
  misc_feature 1..80: note = Synthetic: >Delta-cand-5040-5119
  source 1..80: mol_type = other DNA
tgaggttactgaagaagttcagaaccaagccaaggaacttgaccttaaccttcagcaatactgcgtctacctgaagactt

SEQ ID NO: 4092 - DNA, 80 bp, synthetic construct
  misc_feature 1..80: note = Synthetic: >Delta-cand-5120-5199
  source 1..80: mol_type = other DNA
gccaccataaatgggttgtgagtcgtacgaacgggttgatgcatctaaaacaaaaagataacaattgttttgttagtgca

SEQ ID NO: 4093 - DNA, 80 bp, synthetic construct
  misc_feature 1..80: note = Synthetic: >HKU10-cand-6420-6499
  source 1..80: mol_type = other DNA
gatgttaaagttatagctcaagcaccgcaaagaacagggttaatattaagccgcagtttaaagtataatgttaaagcaac

SEQ ID NO: 4094 - DNA, 80 bp, synthetic construct
  misc_feature 1..80: note = Synthetic: >HKU10-cand-6500-6579
  source 1..80: mol_type = other DNA
taacaagtttttacagtcaagaactaaatgggttgttttgtttagtaaaatgctattagtgctttctacattgtatgcat

SEQ ID NO: 4095 - DNA, 80 bp, synthetic construct
  misc_feature 1..80: note = Synthetic: >HKU10-cand-6580-6659
  source 1..80: mol_type = other DNA
tgtggtttcttttaatacgatttggtcctttgcacgacacagtttgtacaagttatgttgaaggttattctaagtctaat

SEQ ID NO: 4096 - DNA, 80 bp, synthetic construct
  misc_feature 1..80: note = Synthetic: >HKU10-cand-6660-6739
  source 1..80: mol_type = other DNA
tttgacaaaaatgctttctgtgaaaacttagcttgtaaaacgtgtttgtatggttatgaagagctttcagattttccgca

SEQ ID NO: 4097 - DNA, 80 bp, synthetic construct
  misc_feature 1..80: note = Synthetic: >HKU10-cand-6740-6819
  source 1..80: mol_type = other DNA
cactgttacaacatggactcatttgggagatccgctttttaaaactttgttgccacttgtttatatagcatttttgctta

SEQ ID NO: 4098 - DNA, 80 bp, synthetic construct
  misc_feature 1..80: note = Synthetic: >HKU10-cand-6820-6899
  source 1..80: mol_type = other DNA
tatttggtggtgttgttgttcgtgggttcatgctttattttgttgcgcaatatgtcaaccaatttggtgtggttttgggt

SEQ ID NO: 4099 - DNA, 80 bp, synthetic construct
  misc_feature 1..80: note = Synthetic: >HKU10-cand-6900-6979
  source 1..80: mol_type = other DNA
ttccaagatagtgtctgggcccttcagcttgtcccattttcaatttttggtgatgaaattgttgtgttgtttctagttat

SEQ ID NO: 4100 - DNA, 80 bp, synthetic construct
  misc_feature 1..80: note = Synthetic: >HKU10-cand-6980-7059
  source 1..80: mol_type = other DNA
aaagtttatgttgtttttaaaacatgttttctttggttgtgaaaaaccttcttgtgttgcttgttcaaaaagtgcacgtt

SEQ ID NO: 4101 - DNA, 80 bp, synthetic construct
  misc_feature 1..80: note = Synthetic: >HKU10-cand-7050-7129
  source 1..80: mol_type = other DNA
agtgcacgtttaacacgtattcctatgcaaactattgttaatggctctaataggtcattttacgttgttgctaatggtgg

SEQ ID NO: 4102 - DNA, 80 bp, synthetic construct
  misc_feature 1..80: note = Synthetic: >HKU10-cand-7130-7209
  source 1..80: mol_type = other DNA
taaaaaattttgtgaaaagcataaatttttctgtgttaattgtgattcttatggacatggtaacacgtttattaatgatg

SEQ ID NO: 4103 - DNA, 80 bp, synthetic construct
  misc_feature 1..80: note = Synthetic: >HKU10-cand-7210-7289
  source 1..80: mol_type = other DNA
tagttgctgcagaagtttctaatgttgttaaaactaatgttattgctacaggccctgctgttgttgacattacaaaggtt

SEQ ID NO: 4104 - DNA, 80 bp, synthetic construct
  misc_feature 1..80: note = Synthetic: >HKU10-cand-7290-7369
  source 1..80: mol_type = other DNA
gaatttcataatggtttctactatttgtatggtgatgatggcaagacattttggcgctacaattttgatattactgaagg

SEQ ID NO: 4105 - DNA, 80 bp, synthetic construct
  misc_feature 1..80: note = Synthetic: >HKU10-cand-7370-7449
  source 1..80: mol_type = other DNA
taaatacagctgtaaagaggttcttaagaactgtaatgttttggcagattttattgtttacaataatgtgggttctaatt

SEQ ID NO: 4106 - DNA, 80 bp, synthetic construct
  misc_feature 1..80: note = Synthetic: >HKU10-cand-7450-7529
  source 1..80: mol_type = other DNA
tggcacaagttaaaaatgcttgtgtttatttctcacagttactttgtaaaccaatcaagcttgttgatgcaactttgttg

SEQ ID NO: 4107 - DNA, 80 bp, synthetic construct
  misc_feature 1..80: note = Synthetic: >HKU10-cand-7530-7609
  source 1..80: mol_type = other DNA
gcaacactgaatgttgattttaatggtgcattgcacgcagcttttgttgaagttcttaacgaaagttttggtaaggacct

SEQ ID NO: 4108 - DNA, 80 bp, synthetic construct
  misc_feature 1..80: note = Synthetic: >HKU10-cand-7610-7689
  source 1..80: mol_type = other DNA
taagagttgtactacaatggcagactgtaaaacagctttggatattgatgctgatgatgaagagtttgtcaatggtgtta

SEQ ID NO: 4109 - DNA, 80 bp, synthetic construct
  misc_feature 1..80: note = Synthetic: >HKU14-cand-12000-12079
  source 1..80: mol_type = other DNA
aacgagatacttgccacttcagatttgagcactgcttttgaaaagcttgctcaattgcttatagttttgtttgctaatcc

SEQ ID NO: 4110 - DNA, 80 bp, synthetic construct
  misc_feature 1..80: note = Synthetic: >HKU14-cand-12080-12159
  source 1..80: mol_type = other DNA
agctgctgtggatagcaagtgcctgtctagtattgaagaagtttgcgatgattatgcaaaggacaatactgttttgcagg

SEQ ID NO: 4111 - DNA, 80 bp, synthetic construct
  misc_feature 1..80: note = Synthetic: >HKU14-cand-12160-12239
  source 1..80: mol_type = other DNA
ctttacagagtgaatttgttaatatggctagcttcgttgaatatgaagttgctaaaaagaatcttgatgaggcgcgctct

SEQ ID NO: 4112 - DNA, 80 bp, synthetic construct
  misc_feature 1..80: note = Synthetic: >HKU14-cand-12240-12319
  source 1..80: mol_type = other DNA
agtggttctgctaatcaacagcaattaaaacaactagagaaagcttgtaatattgcgaaatctgcttatgagcgtgatag

SEQ ID NO: 4113 - DNA, 80 bp, synthetic construct
  misc_feature 1..80: note = Synthetic: >HKU14-cand-12320-12399
  source 1..80: mol_type = other DNA
agctgttgctcgcaagttggagcgcatggcagatttggctttgactaatatgtataaagaagctagaataaatgacaaaa

SEQ ID NO: 4114 - DNA, 80 bp, synthetic construct
  misc_feature 1..80: note = Synthetic: >HKU14-cand-12400-12479
  source 1..80: mol_type = other DNA
agagtaaggtagtttctgctttgcaaactatgctttttagtatggttcgtaaactggataaccaagctcttaattcgata

SEQ ID NO: 4115 - DNA, 80 bp, synthetic construct
  misc_feature 1..80: note = Synthetic: >HKU14-cand-12480-12559
  source 1..80: mol_type = other DNA
ttagataatgcagttaaaggttgtgtacccttgaatgcaataccattacttactgctaacactttgactataattgtacc

SEQ ID NO: 4116 - DNA, 80 bp, synthetic construct
  misc_feature 1..80: note = Synthetic: >HKU14-cand-12560-12639
  source 1..80: mol_type = other DNA
agataaacaagtttttgatcaggttgttgataatgtatatgttgcctatgcagggaatgtttggcatatacaatcagtgc

SEQ ID NO: 4117 - DNA, 80 bp, synthetic construct
  misc_feature 1..80: note = Synthetic: >HKU14-cand-12640-12719
  source 1..80: mol_type = other DNA
aggatgcagatggtacaaataaacaattgaatgagataagtgaagattctaactggccactagttattgttgcaaatagg

SEQ ID NO: 4118 - DNA, 80 bp, synthetic construct
  misc_feature 1..80: note = Synthetic: >HKU14-cand-12720-12799
  source 1..80: mol_type = other DNA
cataatgaggtatctcaagccgttttgcaaaacaatgaattgatgcctgcaaagttaagaacgcagattgtcaatagtgg

SEQ ID NO: 4119 - DNA, 80 bp, synthetic construct
  misc_feature 1..80: note = Synthetic: >HKU14-cand-12800-12879
  source 1..80: mol_type = other DNA
tccagacatgaattgtaatacacccactcagtgttattataataatagtaacacgggtagaattatatatgctattctta

SEQ ID NO: 4120 - DNA, 80 bp, synthetic construct
  misc_feature 1..80: note = Synthetic: >HKU14-cand-12880-12959
  source 1..80: mol_type = other DNA
gtgatgtcgatggtcttaagtacactaagatagtaaaagaagatggaaattgtgttgttttggagcttgatcctccttgt

SEQ ID NO: 4121 - DNA, 80 bp, synthetic construct
  misc_feature 1..80: note = Synthetic: >HKU14-cand-12960-13039
  source 1..80: mol_type = other DNA
aagtttactgttcaagatgctaaaggtcttaaagttaagtacctttattttgttaagggttgtaacacactagcccgtgg

SEQ ID NO: 4122 - DNA, 80 bp, synthetic construct
  misc_feature 1..80: note = Synthetic: >HKU14-cand-13040-13119
  source 1..80: mol_type = other DNA
ctgggttgttggtacaatatcatcgacagttagattacaagctggtactgctactgagtatgcgtccaactcgtctatac

SEQ ID NO: 4123 - DNA, 80 bp, synthetic construct
  misc_feature 1..80: note = Synthetic: >HKU14-cand-13120-13199
  source 1..80: mol_type = other DNA
tgtcattgtgtgcgttttctgtagatcctaagaaaacgtatcttgattttatacaacaaggaggagctcctatttccaat

SEQ ID NO: 4124 - DNA, 80 bp, synthetic construct
  misc_feature 1..80: note = Synthetic: >HKU14-cand-13200-13279
  source 1..80: mol_type = other DNA
tgtgttaaaatgctttgtgaccatgctggtaccggtatggctattactgttaaacctgaggctactactagtcaggattc

SEQ ID NO: 4125 - DNA, 80 bp, synthetic construct
  misc_feature 1..80: note = Synthetic: >HKU25-cand-20-99
  source 1..80: mol_type = other DNA
ctcaccccctctcgttctcttgcagaactctgattttaacgaacttaaataaaaaccctgctgtagggcgtattgttgtg

SEQ ID NO: 4126 - DNA, 80 bp, synthetic construct
  misc_feature 1..80: note = Synthetic: >HKU25-cand-100-179
  source 1..80: mol_type = other DNA
gcttgccagacatatgcactacattgggtacagtactaactaaatagaatttttcattctgagcggcgtgtctcttgtac

SEQ ID NO: 4127 - DNA, 80 bp, synthetic construct
  misc_feature 1..80: note = Synthetic: >HKU25-cand-180-259
  source 1..80: mol_type = other DNA
atctcggtcacaacatccagttccgtctggtgcgtggcaatccggggcacatcatgtcttccgtggcaggtgtggttacg

SEQ ID NO: 4128 - DNA, 80 bp, synthetic construct
  misc_feature 1..80: note = Synthetic: >HKU25-cand-260-339
  source 1..80: mol_type = other DNA
caaggtgcgcgtaacatgtatcgagcagcgctcaacaatgaaaaacgtcaagaccacgtgtctctaactacaccattatg

SEQ ID NO: 4129 - DNA, 80 bp, synthetic construct
  misc_feature 1..80: note = Synthetic: >HKU25-cand-340-419
  source 1..80: mol_type = other DNA
tggtgcaggagacctggcactaaggcttacaccatggttcgcggacggcgaaactgcctgcgaaatggtgaagtccatcc

SEQ ID NO: 4130 - DNA, 80 bp, synthetic construct
  misc_feature 1..80: note = Synthetic: >HKU25-cand-420-499
  source 1..80: mol_type = other DNA
tcaaaaacaaggagaaaatccttttcgtaccagccgctttgactggttttcttaagcatatcccaggcccacgtgtctac

SEQ ID NO: 4131 - DNA, 80 bp, synthetic construct
  misc_feature 1..80: note = Synthetic: >HKU25-cand-500-579
  source 1..80: mol_type = other DNA
ctggttgagaggctcaccggcggaatttattctgccccattcatggtaaaccagttggcttacagccctagcgcaaatga

SEQ ID NO: 4132 - DNA, 80 bp, synthetic construct
  misc_feature 1..80: note = Synthetic: >HKU25-cand-580-659
  source 1..80: mol_type = other DNA
cgccatcgttggcacaaccttgcagggcaagccagttggattcttcttcccttatgatccggaacttgagaacggtgctt

SEQ ID NO: 4133 - DNA, 80 bp, synthetic construct
  misc_feature 1..80: note = Synthetic: >HKU25-cand-660-739
  source 1..80: mol_type = other DNA
acaccttcctcctccggaaagagggtgctggtggtaactacttccgcacttctcgctctactaagcctgatgtctcatcc

SEQ ID NO: 4134 - DNA, 80 bp, synthetic construct
  misc_feature 1..80: note = Synthetic: >HKU25-cand-740-819
  source 1..80: mol_type = other DNA
ggcaatgttccttatgaactcatggatgatctcgaggagaaccccaagggaaaatactccaagagcgtgcttaagaaatt

SEQ ID NO: 4135 - DNA, 80 bp, synthetic construct
  misc_feature 1..80: note = Synthetic: >HKU25-cand-820-899
  source 1..80: mol_type = other DNA
ggttggtggtgatgttatacccattgaccaatacatgtgcggcaaagatggtaaaccaatacctgattatgccgctcttg

SEQ ID NO: 4136 - DNA, 80 bp, synthetic construct
  misc_feature 1..80: note = Synthetic: >HKU25-cand-900-979
  source 1..80: mol_type = other DNA
cagccaatgaaaacattatttcgctggctgatgttgtagcagacgtttctgcccgcgcagatgcgcaaggctacatcaac

SEQ ID NO: 4137 - DNA, 80 bp, synthetic construct
  misc_feature 1..80: note = Synthetic: >HKU25-cand-980-1059
  source 1..80: mol_type = other DNA
ttcaagaacaaattctaccagattgtctggcatgctgagcgtaagaacgttccgtatgcaaaacaatctgtcttcactat

SEQ ID NO: 4138 - DNA, 80 bp, synthetic construct
  misc_feature 1..80: note = Synthetic: >HKU25-cand-1060-1139
  source 1..80: mol_type = other DNA
taacagtgtgatccaaaagaatggcattgatgatgtaccaccacactcattcactcttggaggcaaagtagaagtgctag

SEQ ID NO: 4139 - DNA, 80 bp, synthetic construct
  misc_feature 1..80: note = Synthetic: >HKU25-cand-1140-1219
  source 1..80: mol_type = other DNA
ctccacgcaacaagtggcctggcaagaatactgaccccctcaaagatcgcctcctttacaccttctatggtaaggatgcc

SEQ ID NO: 4140 - DNA, 80 bp, synthetic construct
  misc_feature 1..80: note = Synthetic: >HKU25-cand-1220-1299
  source 1..80: mol_type = other DNA
cttgaaaaacactcatacatctaccactccgcctttgctgactgcactggatgcggaaaaggtagctggctcactggaaa

SEQ ID NO: 4141 - DNA, 80 bp, synthetic construct
  misc_feature 1..80: note = Synthetic: >HKU31-cand-1560-1639
  source 1..80: mol_type = other DNA
tgggttgtgcacagggtactatgtattttgtacctagagcaaaatccgttgtttcaagaattggcacagcttgttttaca

SEQ ID NO: 4142 - DNA, 80 bp, synthetic construct
  misc_feature 1..80: note = Synthetic: >HKU31-cand-1720-1799
  source 1..80: mol_type = other DNA
taatgaatttgttgttagtgatgtggtgttagctattttaactggcaccacatctagagtggatgagttacgtggtcttt

SEQ ID NO: 4143 - DNA, 80 bp, synthetic construct
  misc_feature 1..80: note = Synthetic: >HKU31-cand-1800-1879
  source 1..80: mol_type = other DNA
tgcaggacattacttttgagaagatgcgtgattattgtgcaaaacatggtattaaggttaccatgggagattatgttgat

SEQ ID NO: 4144 - DNA, 80 bp, synthetic construct
  misc_feature 1..80: note = Synthetic: >HKU31-cand-1880-1959
  source 1..80: mol_type = other DNA
agtgctattaatgtaggaggctcaagtttgacgtctgctgctattaatgcaccttttgtagtcctatcaaaacttggtga

SEQ ID NO: 4145 - DNA, 80 bp, synthetic construct
  misc_feature 1..80: note = Synthetic: >HKU31-cand-1960-2039
  source 1..80: mol_type = other DNA
gtcttttaagaaaattgctgcagtaccgtttaaaattggcagttcatttttacagacatgggagtatttgtcagactgta

SEQ ID NO: 4146 - DNA, 80 bp, synthetic construct
  misc_feature 1..80: note = Synthetic: >HKU31-cand-2040-2119
  source 1..80: mol_type = other DNA
ttgtctatagagtactcccttatgagttggaagatgtgtctgactttgtacagttgctgtttaattgtgttgaaatttca

SEQ ID NO: 4147 - DNA, 80 bp, synthetic construct
  misc_feature 1..80: note = Synthetic: >HKU31-cand-2120-2199
  source 1..80: mol_type = other DNA
gcagcatcaatgtattttgcatcggttgttattagagaaaaagttaacacgatgtttaatgcattaccagtgtctgtgca

SEQ ID NO: 4148 - DNA, 80 bp, synthetic construct
  misc_feature 1..80: note = Synthetic: >HKU31-cand-2200-2279
  source 1..80: mol_type = other DNA
aacagctgcaaagaaatttattgatgtttgtttgcgtgctacattatgcactgtaaaattcttaaatgatttgttgagcc

SEQ ID NO: 4149 - DNA, 80 bp, synthetic construct
  misc_feature 1..80: note = Synthetic: >HKU31-cand-2280-2359
  source 1..80: mol_type = other DNA
ttgttaaagtggttgtttacaaggcttttgtgtataccagtgcaggatttgtgtcaacgctggagaaaacttcacctgca

SEQ ID NO: 4150 - DNA, 80 bp, synthetic construct
  misc_feature 1..80: note = Synthetic: >HKU31-cand-2360-2439
  source 1..80: mol_type = other DNA
gcacaaaagttgctagatgttttatctaaagcatttaaattgctgcataagaaagtttcatgggctggttcgaaagtcca

SEQ ID NO: 4151 - DNA, 80 bp, synthetic construct
  misc_feature 1..80: note = Synthetic: >HKU31-cand-2440-2519
  source 1..80: mol_type = other DNA
tgctgttatttatgaaggtaaagatgccttagtgttttcttccggaacatatcattgtgtaacagcacctggaagtgttg

SEQ ID NO: 4152 - DNA, 80 bp, synthetic construct
  misc_feature 1..80: note = Synthetic: >HKU31-cand-2520-2599
  source 1..80: mol_type = other DNA
tgggtgcacatcttgatgccacaataccaggtgaagttgttaagaagcagctttcaatgttgactgctacaaattattca

SEQ ID NO: 4153 - DNA, 80 bp, synthetic construct
  misc_feature 1..80: note = Synthetic: >HKU31-cand-2680-2759
  source 1..80: mol_type = other DNA
agatgttgttgttggggattatgttattgttagtgataaggtttttgtacgtagtgaggaggatgggcaactagcattct

SEQ ID NO: 4154 - DNA, 80 bp, synthetic construct
  misc_feature 1..80: note = Synthetic: >HKU31-cand-2760-2839
  source 1..80: mol_type = other DNA
atcctatgtgtacaaatggaaaggcagtaccatgtatgtttacacttaagggtggtgcacctattaagaaagtctctttt

SEQ ID NO: 4155 - DNA, 80 bp, synthetic construct
  misc_feature 1..80: note = Synthetic: >HKU5-cand-16480-16559
  source 1..80: mol_type = other DNA
cggatcttgtgtcgtgtgccactctcagacgtcgcttcgttgtggtacgtgtatacgaagacccttcctctgctgcaagt

SEQ ID NO: 4156 - DNA, 80 bp, synthetic construct
  misc_feature 1..80: note = Synthetic: >HKU5-cand-16560-16639
  source 1..80: mol_type = other DNA
gttgttatgaccatgtcatagctacacctcataaaatggttctgtctgtgtcaccttatgtctgtaatgctccaggttgt

SEQ ID NO: 4157 - DNA, 80 bp, synthetic construct
  misc_feature 1..80: note = Synthetic: >HKU5-cand-16640-16719
  source 1..80: mol_type = other DNA
gacgttgcagatgttactaaactgtatttaggcggtatgagctacttttgtatcgatcaccgtcctgtatgcagtttccc

SEQ ID NO: 4158 - DNA, 80 bp, synthetic construct
  misc_feature 1..80: note = Synthetic: >HKU5-cand-16720-16799
  source 1..80: mol_type = other DNA
actctgtgcaaacggccttgtgtttggtttgtacaagaacatgtgcactggtagcccatctgttacagaatttaacagac

SEQ ID NO: 4159 - DNA, 80 bp, synthetic construct
  misc_feature 1..80: note = Synthetic: >HKU5-cand-16800-16879
  source 1..80: mol_type = other DNA
tagctacttgtgactggactgaaagtggtgattacacgttagctaataccactacagaaccactaaaattatttgcggct

SEQ ID NO: 4160 - DNA, 80 bp, synthetic construct
  misc_feature 1..80: note = Synthetic: >HKU5-cand-16880-16959
  source 1..80: mol_type = other DNA
gaaacacttagagcaactgaagaagcctctaaacagtcgtacgctattgctactatcaaagaaatagtaggtgagcgtga

SEQ ID NO: 4161 - DNA, 80 bp, synthetic construct
  misc_feature 1..80: note = Synthetic: >HKU5-cand-16960-17039
  source 1..80: mol_type = other DNA
attgttgctcgtgtgggaagctggaaaagccaaaccaccacttaatcgcaactatgttttcactggttatcatataacca

SEQ ID NO: 4162 - DNA, 80 bp, synthetic construct
  misc_feature 1..80: note = Synthetic: >HKU5-cand-17040-17119
  source 1..80: mol_type = other DNA
agaatagtaaagtccagctcggcgagtatgtcttcgagcgcatagactatagtgatgctgtctcctacaagtctagtact

SEQ ID NO: 4163 - DNA, 80 bp, synthetic construct
  misc_feature 1..80: note = Synthetic: >HKU5-cand-17120-17199
  source 1..80: mol_type = other DNA
acgtataagctagcagtcggagacatctttgttcttacttctcattcggtggccaccctgcaggcgcccacaattgtgaa

SEQ ID NO: 4164 - DNA, 80 bp, synthetic construct
  misc_feature 1..80: note = Synthetic: >HKU5-cand-17200-17279
  source 1..80: mol_type = other DNA
tcaagagaggtatgtaaaaataactggattatatccaactcttactgtacctgaggaatttgccaaccatgttgcgaatt

SEQ ID NO: 4165 - DNA, 80 bp, synthetic construct
  misc_feature 1..80: note = Synthetic: >HKU5-cand-17280-17359
  source 1..80: mol_type = other DNA
ttcagaaagtaggttttagtaaatttgtcactgttcaggggccccctggcaccggcaaaagtcattttgctattgggtta

SEQ ID NO: 4166 - DNA, 80 bp, synthetic construct
  misc_feature 1..80: note = Synthetic: >HKU5-cand-17360-17439
  source 1..80: mol_type = other DNA
gcgatttactacccaactgcaagagttgtctatacagcatgctcacacgcagccgtagatgcattgtgtgagaaagcttt

SEQ ID NO: 4167 - DNA, 80 bp, synthetic construct
  misc_feature 1..80: note = Synthetic: >HKU5-cand-17440-17519
  source 1..80: mol_type = other DNA
taaatacctgaacattgcaaaatgttcacgcattatacctgcgaaagcacgtgttgagtgctatgaccagtttaaagtta

SEQ ID NO: 4168 - DNA, 80 bp, synthetic construct
  misc_feature 1..80: note = Synthetic: >HKU5-cand-17520-17599
  source 1..80: mol_type = other DNA
atgaaacaaattctcagtatttgttcagtactattaatgcactgccagaaacgtctgctgatatactggtagttgatgaa

SEQ ID NO: 4169 - DNA, 80 bp, synthetic construct
  misc_feature 1..80: note = Synthetic: >HKU5-cand-17600-17679
  source 1..80: mol_type = other DNA
gttagtatgtgcactaattatgacctttcagtgattaatgcacgcattaaagctaaacacattgtgtatgttggtgatcc

SEQ ID NO: 4170 - DNA, 80 bp, synthetic construct
  misc_feature 1..80: note = Synthetic: >HKU9-cand-160-239
  source 1..80: mol_type = other DNA
ttcccttcttgcgagcagcgggtttcgtcctgtctgtgagccctgcgcaggtttcgtccgtgcagtgatggagggtgtgc

SEQ ID NO: 4171 - DNA, 80 bp, synthetic construct
  misc_feature 1..80: note = Synthetic: >HKU9-cand-240-319
  source 1..80: mol_type = other DNA
ctgacccacctaagcttaaaagtatggtgactatcacttttaagtggatagatcccaatattatgcccagcgtcactggc

SEQ ID NO: 4172 - DNA, 80 bp, synthetic construct
  misc_feature 1..80: note = Synthetic: >HKU9-cand-320-399
  source 1..80: mol_type = other DNA
tgggatattcctatgcaagaggctttggagatcgttaaggacgagctccgtaagcctgaacctaaattggtgtttgtgcc

SEQ ID NO: 4173 - DNA, 80 bp, synthetic construct
  misc_feature 1..80: note = Synthetic: >HKU9-cand-400-479
  source 1..80: mol_type = other DNA
caattatttgtgccatacaccacttataggtagagatcgcgttgttataaccgattccatttaccgtgccactgtcatgg

SEQ ID NO: 4174 - DNA, 80 bp, synthetic construct
  misc_feature 1..80: note = Synthetic: >HKU9-cand-480-559
  source 1..80: mol_type = other DNA
gttggattcctattagggagctagcctttgacgagaatgatattcgttatggtcgcagtggtacttatggtgttctgcta

SEQ ID NO: 4175 - DNA, 80 bp, synthetic construct
  misc_feature 1..80: note = Synthetic: >HKU9-cand-560-639
  source 1..80: mol_type = other DNA
cccatgcaggaccccaagtatattatgggtgagattgacatcgacatgcgtaagtacggtgtcggtgctggctctgagaa

SEQ ID NO: 4176 - DNA, 80 bp, synthetic construct
  misc_feature 1..80: note = Synthetic: >HKU9-cand-640-719
  source 1..80: mol_type = other DNA
gcctgtaccattgctctgggatggttttatagacaccccatgcccagatgtggagcattatttggattttcctgacaagt

SEQ ID NO: 4177 - DNA, 80 bp, synthetic construct
  misc_feature 1..80: note = Synthetic: >HKU9-cand-730-809
  source 1..80: mol_type = other DNA
aaagcctaaggctaagcgaggcggtaatgtttatatgtcagaccagtatggttttgacaacaatggaatcctggtaaaac

SEQ ID NO: 4178 - DNA, 80 bp, synthetic construct
  misc_feature 1..80: note = Synthetic: >HKU9-cand-810-889
  source 1..80: mol_type = other DNA
ctgttcaggaattactgggtgacataaaacctgatctcactctggagaagctaacgctggcccttagtgagtacagaaag

SEQ ID NO: 4179 - DNA, 80 bp, synthetic construct
  misc_feature 1..80: note = Synthetic: >HKU9-cand-890-969
  source 1..80: mol_type = other DNA
gatgatggttatgacctacctggtggctttgtgaaagttgccgttaaggtcatacgcaaacctgtgcctgttgtaaaaca

SEQ ID NO: 4180 - DNA, 80 bp, synthetic construct
  misc_feature 1..80: note = Synthetic: >HKU9-cand-970-1049
  source 1..80: mol_type = other DNA
gacaatttttactgttcagggggttgttgaacaacatgtggaagggtattattacccttattcaccaatgagtgtggtaa

SEQ ID NO: 4181 - DNA, 80 bp, synthetic construct
  misc_feature 1..80: note = Synthetic: >HKU9-cand-1050-1129
  source 1..80: mol_type = other DNA
agcacaccaaacctagatctgacaagcctcttggcaagactgttgaggctattatgctgagcttgtatggcactagtggc

SEQ ID NO: 4182 - DNA, 80 bp, synthetic construct
  misc_feature 1..80: note = Synthetic: >HKU9-cand-1130-1209
  source 1..80: mol_type = other DNA
tacaaccctgcgacacctgtagtgcgcttgcgctgtagttactgtgacttctatggttgggtacccctgaaggatatggg

SEQ ID NO: 4183 - DNA, 80 bp, synthetic construct
  misc_feature 1..80: note = Synthetic: >HKU9-cand-1210-1289
  source 1..80: mol_type = other DNA
tactgttgtttgctcatgtggtgcagagtatcagctcacatcgtcgtgtgttgatgcagaatctgctggtgcgattaagc

SEQ ID NO: 4184 - DNA, 80 bp, synthetic construct
  misc_feature 1..80: note = Synthetic: >HKU9-cand-1290-1369
  source 1..80: mol_type = other DNA
caggttgtgtcatgttgttggacaagagtcctggcatgcgtgttatacctggtaatcgtacatatgtggcctttggtggt

SEQ ID NO: 4185 - DNA, 80 bp, synthetic construct
  misc_feature 1..80: note = Synthetic: >HKU9-cand-1370-1449
  source 1..80: mol_type = other DNA
gctatttggtcacccattggcaaagtcaacggtgttaccgtatgggtacctcgtgcttattctgtagtagctggcgatca

SEQ ID NO: 4186 - DNA, 80 bp, synthetic construct
  misc_feature 1..80: note = Synthetic: >HKU9-cand-5290-5369
  source 1..80: mol_type = other DNA
ttcagaacagaagtcaccttggttacttatgtcacatacaccaacacaggtacctcttgatactagtggcaattggaaga

SEQ ID NO: 4187 - DNA, 80 bp, synthetic construct
  misc_feature 1..80: note = Synthetic: >HKU9-cand-5370-5449
  source 1..80: mol_type = other DNA
ctgccattgtttttaggggaccagttacagcaggacattatatgtatgctgtaaatggtactttgatatctgtttatgac

SEQ ID NO: 4188 - DNA, 80 bp, synthetic construct
  misc_feature 1..80: note = Synthetic: >HKU9-cand-5450-5529
  source 1..80: mol_type = other DNA
gctaatacgcgtaagcgtactagtgatctaaagctgccagctacagatatactgtatggtcctactaattttactagtga

SEQ ID NO: 4189 - DNA, 80 bp, synthetic construct
  misc_feature 1..80: note = Synthetic: >HKU9-cand-5530-5609
  source 1..80: mol_type = other DNA
tagtaaggttgagacttattaccttgatggtgttaagcgtactactatagatccagatcttagtaagtacgtgaagcgtg

SEQ ID NO: 4190 - DNA, 80 bp, synthetic construct
  misc_feature 1..80: note = Synthetic: >HKU9-cand-5610-5689
  source 1..80: mol_type = other DNA
gtgactactactttacaactgcaccccttgatgttgtggcagcacctaagttagtaacaccgtatgatgggttttatttg

SEQ ID NO: 4191 - DNA, 80 bp, synthetic construct
  misc_feature 1..80: note = Synthetic: >HKU9-cand-5690-5769
  source 1..80: mol_type = other DNA
tcatcatgccaaaatccgaagttggcagaggattttaataaggctattaatgctacaaagcagggtcctatgaagttgct

SEQ ID NO: 4192 - DNA, 80 bp, synthetic construct
  misc_feature 1..80: note = Synthetic: >HKU9-cand-5770-5849
  source 1..80: mol_type = other DNA
aactgtgtatcctaacacagctggtgatgttgtagctgtttctgatgataatgtggctgttcacccatatggttctctcc

SEQ ID NO: 4193 - DNA, 80 bp, synthetic construct
  misc_feature 1..80: note = Synthetic: >HKU9-cand-5850-5929
  source 1..80: mol_type = other DNA
atatgggtaagcctgtattgtttgttaataagcctaacacgtggaagaagttagtgccattgttatcttcacttgttgtt

SEQ ID NO: 4194 - DNA, 80 bp, synthetic construct
  misc_feature 1..80: note = Synthetic: >HKU9-cand-5930-6009
  source 1..80: mol_type = other DNA
gacacgactaataattataatgtgttacctgtagatcctttacctgttaatgaggacagtacgaataaacctgtcagtgt

SEQ ID NO: 4195 - DNA, 80 bp, synthetic construct
  misc_feature 1..80: note = Synthetic: >HKU9-cand-6010-6089
  source 1..80: mol_type = other DNA
aaaagccacagtaccgctgtatggtttaaaatcttctatggttctggatggtacaacttatgtacctggtaaaaagggtg

SEQ ID NO: 4196 - DNA, 80 bp, synthetic construct
  misc_feature 1..80: note = Synthetic: >HKU9-cand-6090-6169
  source 1..80: mol_type = other DNA
atttgttgtgtttgaaggagtttactctaactgatttgcagactttttatgtggagggtgtccaaccttttgttttattg

SEQ ID NO: 4197 - DNA, 80 bp, synthetic construct
  misc_feature 1..80: note = Synthetic: >HKU9-cand-6170-6249
  source 1..80: mol_type = other DNA
aaagcttctcatttgagtaaagttttgggtttgcgtgttagtgatactacactacatgtaaaccgtatgagtaagagcct

SEQ ID NO: 4198 - DNA, 80 bp, synthetic construct
  misc_feature 1..80: note = Synthetic: >HKU9-cand-6250-6329
  source 1..80: mol_type = other DNA
ggtctatgcgtatgcagcaaccaggtttactactcgtgttactaaatcagtttttggtgatgtggttactagagctgtga

SEQ ID NO: 4199 - DNA, 80 bp, synthetic construct
  misc_feature 1..80: note = Synthetic: >HKU9-cand-6330-6409
  source 1..80: mol_type = other DNA
ggaagactgcagattttgtacggggtactaatcctggtgcaaagtgtgtgggtctattgtgtttgttttatcagttattg

SEQ ID NO: 4200 - DNA, 80 bp, synthetic construct
  misc_feature 1..80: note = Synthetic: >HKU9-cand-6410-6489
  source 1..80: mol_type = other DNA
atgcgattttggttattagttacaaagccacctatatttaaggtgtctggtattgtagcttataatactggctgtggtgt

SEQ ID NO: 4201 - DNA, 80 bp, synthetic construct
  misc_feature 1..80: note = Synthetic: >HKU9-cand-6490-6569
  source 1..80: mol_type = other DNA
tacagcgtgtgtcttaaattatttgagacggcggtgtggcaacatatcttggacgcgcttgttaaaattgcttcggtatg

SEQ ID NO: 4202 - DNA, 80 bp, synthetic construct
  misc_feature 1..80: note = Synthetic: >MERS-cand-17200-17279
  source 1..80: mol_type = other DNA
tcattcctgcaaaggcacgtgttgagtgctatgacaggtttaaagttaatgagacaaattctcaatatttgtttagtact

SEQ ID NO: 4203 - DNA, 80 bp, synthetic construct
  misc_feature 1..80: note = Synthetic: >MERS-cand-17280-17359
  source 1..80: mol_type = other DNA
attaatgctctaccagaaacttctgccgatattctggtggttgatgaggttagtatgtgcactaattatgatctttcaat

SEQ ID NO: 4204 - DNA, 80 bp, synthetic construct
  misc_feature 1..80: note = Synthetic: >MERS-cand-17360-17439
  source 1..80: mol_type = other DNA
tattaatgcacgtattaaagctaagcacattgtctatgtaggagatccagcacagttgccagctcctaggactttgttga

SEQ ID NO: 4205 - DNA, 80 bp, synthetic construct
  misc_feature 1..80: note = Synthetic: >MERS-cand-17440-17519
  source 1..80: mol_type = other DNA
ctagaggcacattggaaccagaaaatttcaatagtgtcactagattgatgtgtaacttaggtcctgacatatttttaagt

SEQ ID NO: 4206 - DNA, 80 bp, synthetic construct
  misc_feature 1..80: note = Synthetic: >MERS-cand-17520-17599
  source 1..80: mol_type = other DNA
atgtgctacaggtgtcctaaggaaatagtaagcactgtgagcgctcttgtctacaataataaattgttagccaagaagga

SEQ ID NO: 4207 - DNA, 80 bp, synthetic construct
  misc_feature 1..80: note = Synthetic: >MERS-cand-17600-17679
  source 1..80: mol_type = other DNA
gctttcaggccagtgctttaaaatactctataagggcaatgtgacgcatgatgctagctctgccattaatagaccacaac

SEQ ID NO: 4208 - DNA, 80 bp, synthetic construct
  misc_feature 1..80: note = Synthetic: >MERS-cand-17680-17759
  source 1..80: mol_type = other DNA
tcacatttgtgaagaattttattactgccaatccggcatggagtaaggcagtctttatttcgccttataattcacagaat

SEQ ID NO: 4209 - DNA, 80 bp, synthetic construct
  misc_feature 1..80: note = Synthetic: >MERS-cand-17760-17839
  source 1..80: mol_type = other DNA
gctgtggctcgttcaatgctgggtcttactactcagactgttgattcctcacagggttcagaataccagtacgttatctt

SEQ ID NO: 4210 - DNA, 80 bp, synthetic construct
  misc_feature 1..80: note = Synthetic: >MERS-cand-17840-17919
  source 1..80: mol_type = other DNA
ctgtcaaacagcagatacggcacatgctaacaacattaacagatttaatgttgcaatcactcgtgcccaaaaaggtattc

SEQ ID NO: 4211 - DNA, 80 bp, synthetic construct
  misc_feature 1..80: note = Synthetic: >MERS-cand-17920-17999
  source 1..80: mol_type = other DNA
tttgtgttatgacatctcaggcactctttgagtccttagagtttactgaattgtcttttactaattacaagctccagtct

SEQ ID NO: 4212 - DNA, 80 bp, synthetic construct
  misc_feature 1..80: note = Synthetic: >MERS-cand-18000-18079
  source 1..80: mol_type = other DNA
cagattgtaactggcctttttaaagattgctctagagaaacttctggcctctcacctgcttatgcaccaacatacgttag

SEQ ID NO: 4213 - DNA, 80 bp, synthetic construct
  misc_feature 1..80: note = Synthetic: >MERS-cand-18080-18159
  source 1..80: mol_type = other DNA
tgttgatgacaagtataagacgagtgatgagctttgcgtgaatcttaatttacccgcaaatgtcccatactctcgtgtta

SEQ ID NO: 4214 - DNA, 80 bp, synthetic construct
  misc_feature 1..80: note = Synthetic: >MERS-cand-18160-18239
  source 1..80: mol_type = other DNA
tttccaggatgggctttaaactcgatgcaacagttcctggatatcctaagcttttcattactcgtgaagaggctgtaagg

SEQ ID NO: 4215 - DNA, 80 bp, synthetic construct
  misc_feature 1..80: note = Synthetic: >MERS-cand-18240-18319
  source 1..80: mol_type = other DNA
caagttcgaagctggataggcttcgatgttgagggtgctcatgcttcccgtaatgcatgtggcaccaatgtgcctctaca

SEQ ID NO: 4216 - DNA, 80 bp, synthetic construct
  misc_feature 1..80: note = Synthetic: >MERS-cand-18320-18399
  source 1..80: mol_type = other DNA
attaggattttcaactggtgtgaactttgttgttcagccagttggtgttgtagacactgagtggggtaacatgttaacgg

SEQ ID NO: 4217 - DNA, 80 bp, synthetic construct
  misc_feature 1..80: note = Synthetic: >MERS-cand-18400-18479
  source 1..80: mol_type = other DNA
gcattgctgcccgtcctccaccaggtgaacagtttaagcacctcgtgcctcttatgcataagggggctgcgtggcctatt

SEQ ID NO: 4218 - DNA, 80 bp, synthetic construct
  misc_feature 1..80: note = Synthetic: >NL63-cand-11830-11909
  source 1..80: mol_type = other DNA
ttgttaagtgggagtatgagggtggttgcaacacaatcgagttagactctccttgtcgatttatggtcgaaacacctaat

SEQ ID NO: 4219 - DNA, 80 bp, synthetic construct
  misc_feature 1..80: note = Synthetic: >NL63-cand-11910-11989
  source 1..80: mol_type = other DNA
ggtcctcaagtgaagtatttgtattttgttaaaaatttaaataccttacgtagaggtgccgttcttggttttataggtgc

SEQ ID NO: 4220 - DNA, 80 bp, synthetic construct
  misc_feature 1..80: note = Synthetic: >NL63-cand-11990-12069
  source 1..80: mol_type = other DNA
cacaattcgtctacaagctggtaaacaaactgaattggctgttaattctggacttttaactgcttgtgctttttctgttg

SEQ ID NO: 4221 - DNA, 80 bp, synthetic construct
  misc_feature 1..80: note = Synthetic: >NL63-cand-12070-12149
  source 1..80: mol_type = other DNA
atccagcaactacttacttggaagctgttaaacatggtgcaaaacctgtaagtaattgtattaagatgttatctaatggt

SEQ ID NO: 4222 - DNA, 80 bp, synthetic construct
  misc_feature 1..80: note = Synthetic: >NL63-cand-12150-12229
  source 1..80: mol_type = other DNA
gctggtaatggtcaagctataacaactagtgtagatgctaacaccaatcaagattcttatggtggagcgtctatttgttt

SEQ ID NO: 4223 - DNA, 80 bp, synthetic construct
  misc_feature 1..80: note = Synthetic: >NL63-cand-12230-12309
  source 1..80: mol_type = other DNA
gtattgtcgggcccacgttcctcaccctagtatggatggttactgtaagtttaagggtaaatgtgttcaggttcctattg

SEQ ID NO: 4224 - DNA, 80 bp, synthetic construct
  misc_feature 1..80: note = Synthetic: >NL63-cand-12310-12389
  source 1..80: mol_type = other DNA
gttgtttggatcctattaggttttgtttagaaaataatgtgtgtaatgtttgtggttgttggttgggacacgggtgtgct

SEQ ID NO: 4225 - DNA, 80 bp, synthetic construct
  misc_feature 1..80: note = Synthetic: >NL63-cand-12390-12469
  source 1..80: mol_type = other DNA
tgtgaccgtacaactattcaaagtgttgacatttcttatttaaacgagcaaggggttctagtgcagctcgactagaaccc

SEQ ID NO: 4226 - DNA, 80 bp, synthetic construct
  misc_feature 1..80: note = Synthetic: >NL63-cand-12470-12549
  source 1..80: mol_type = other DNA
tgtaatggcacggacatcgataagtgtgttcgtgcttttgacatttataataaaaatgtttcattcttgggtaagtgttt

SEQ ID NO: 4227 - DNA, 80 bp, synthetic construct
  misc_feature 1..80: note = Synthetic: >NL63-cand-12550-12629
  source 1..80: mol_type = other DNA
gaagatgaactgtgttcgttttaaaaatgctgatcttaaggatggttattttgttataaagaggtgtactaagtcggtta

SEQ ID NO: 4228 - DNA, 80 bp, synthetic construct
  misc_feature 1..80: note = Synthetic: >NL63-cand-12630-12709
  source 1..80: mol_type = other DNA
tggaacacgagcaatccatgtataacctacttaacttttctggtgctttggctgagcatgatttctttacttggaaagat

SEQ ID NO: 4229 - DNA, 80 bp, synthetic construct
  misc_feature 1..80: note = Synthetic: >NL63-cand-12710-12789
  source 1..80: mol_type = other DNA
ggcagagtcatttatggtaatgttagtagacataatcttactaaatatactatgatggacttggtctatgctatgcgtaa

SEQ ID NO: 4230 - DNA, 80 bp, synthetic construct
  misc_feature 1..80: note = Synthetic: >NL63-cand-12790-12869
  source 1..80: mol_type = other DNA
ctttgatgaacaaaattgtgatgttctaaaagaagtattagttttaactggttgttgtgacaattcttattttgatagta

SEQ ID NO: 4231 - DNA, 80 bp, synthetic construct
  misc_feature 1..80: note = Synthetic: >NL63-cand-12870-12949
  source 1..80: mol_type = other DNA
agggttggtatgacccagttgaaaatgaagatatacatagagtttatgcatctcttggcaaaattgtagctagagctatg

SEQ ID NO: 4232 - DNA, 80 bp, synthetic construct
  misc_feature 1..80: note = Synthetic: >NL63-cand-12950-13029
  source 1..80: mol_type = other DNA
cttaaatgcgttgctctatgtgatgcgatggttgctaaaggtgttgttggtgttttaacattagataaccaagatcttaa

SEQ ID NO: 4233 - DNA, 80 bp, synthetic construct
  misc_feature 1..80: note = Synthetic: >NL63-cand-13030-13109
  source 1..80: mol_type = other DNA
tggtaacttttatgattttggtgattttgttgttagcttacctaatatgggtgttccctgttgtacatcatattattctt

SEQ ID NO: 4234 - DNA, 80 bp, synthetic construct
  misc_feature 1..80: note = Synthetic: >SARSCoV-cand-15160-15239
  source 1..80: mol_type = other DNA
ggtggctggcataatatgttaaaaactgtttacagtgatgtagaaactccacaccttatgggttgggattatccaaaatg

SEQ ID NO: 4235 - DNA, 80 bp, synthetic construct
  misc_feature 1..80: note = Synthetic: >SARSCoV-cand-15240-15319
  source 1..80: mol_type = other DNA
tgacagagccatgcctaacatgcttaggataatggcctctcttgttcttgctcgcaaacataacacttgctgtaacttat

SEQ ID NO: 4236 - DNA, 80 bp, synthetic construct
  misc_feature 1..80: note = Synthetic: >SARSCoV-cand-15320-15399
  source 1..80: mol_type = other DNA
cacaccgtttctacaggttagctaacgagtgtgcgcaagtattaagtgagatggtcatgtgtggcggctcactatatgtt

SEQ ID NO: 4237 - DNA, 80 bp, synthetic construct
  misc_feature 1..80: note = Synthetic: >SARSCoV-cand-15400-15479
  source 1..80: mol_type = other DNA
aaaccaggtggaacatcatccggtgatgctacaactgcttatgctaatagtgtctttaacatttgtcaagctgttacagc

SEQ ID NO: 4238 - DNA, 80 bp, synthetic construct
  misc_feature 1..80: note = Synthetic: >SARSCoV-cand-15480-15559
  source 1..80: mol_type = other DNA
caatgtaaatgcacttctttcaactgatggtaataagatagctgacaagtatgtccgcaatctacaacacaggctctatg

SEQ ID NO: 4239 - DNA, 80 bp, synthetic construct
  misc_feature 1..80: note = Synthetic: >SARSCoV-cand-15560-15639
  source 1..80: mol_type = other DNA
agtgtctctatagaaatagggatgttgatcatgaattcgtggatgagttttacgcttacctgcgtaaacatttctccatg

SEQ ID NO: 4240 - DNA, 80 bp, synthetic construct
  misc_feature 1..80: note = Synthetic: >SARSCoV-cand-15640-15719
  source 1..80: mol_type = other DNA
atgattctttctgatgatgccgttgtgtgctataacagtaactatgcggctcaaggtttagtagctagcattaagaactt

SEQ ID NO: 4241 - DNA, 80 bp, synthetic construct
  misc_feature 1..80: note = Synthetic: >SARSCoV-cand-15800-15879
  source 1..80: mol_type = other DNA
ctcacgaattttgctcacagcatacaatgctagttaaacaaggagatgattacgtgtacctgccttacccagatccatca

SEQ ID NO: 4242 - DNA, 80 bp, synthetic construct
  misc_feature 1..80: note = Synthetic: >SARSCoV-cand-15880-15959
  source 1..80: mol_type = other DNA
agaatattaggcgcaggctgttttgtcgatgatattgtcaaaacagatggtacacttatgattgaaaggttcgtgtcact

SEQ ID NO: 4243 - DNA, 80 bp, synthetic construct
  misc_feature 1..80: note = Synthetic: >SARSCoV-cand-15960-16039
  source 1..80: mol_type = other DNA
ggctattgatgcttacccacttacaaaacatcctaatcaggagtatgctgatgtctttcacttgtatttacaatacatta

SEQ ID NO: 4244 - DNA, 80 bp, synthetic construct
  misc_feature 1..80: note = Synthetic: >SARSCoV-cand-16040-16119
  source 1..80: mol_type = other DNA
gaaagttacatgatgagcttactggccacatgttggacatgtattccgtaatgctaactaatgataacacctcacggtac

SEQ ID NO: 4245 - DNA, 80 bp, synthetic construct
  misc_feature 1..80: note = Synthetic: >SARSCoV-cand-16120-16199
  source 1..80: mol_type = other DNA
tgggaacctgagttttatgaggctatgtacacaccacatacagtcttgcaggctgtaggtgcttgtgtattgtgcaattc

SEQ ID NO: 4246 - DNA, 80 bp, synthetic construct
  misc_feature 1..80: note = Synthetic: >SARSCoV-cand-16200-16279
  source 1..80: mol_type = other DNA
acagacttcacttcgttgcggtgcctgtattaggagaccattcctatgttgcaagtgctgctatgaccatgtcatttcaa

SEQ ID NO: 4247 - DNA, 80 bp, synthetic construct
  misc_feature 1..80: note = Synthetic: >SARSCoV-cand-16270-16349
  source 1..80: mol_type = other DNA
gtcatttcaacatcacacaaattagtgttgtctgttaatccctatgtttgcaatgccccaggttgtgatgtcactgatgt

SEQ ID NO: 4248 - DNA, 80 bp, synthetic construct
  misc_feature 1..80: note = Synthetic: >SARSCoV-cand-16350-16429
  source 1..80: mol_type = other DNA
gacacaactgtatctaggaggtatgagctattattgcaagtcacataagcctcccattagttttccattatgtgctaatg

SEQ ID NO: 4249 - DNA, 80 bp, synthetic construct
  misc_feature 1..80: note = Synthetic: >SARSCoV-cand-20280-20359
  source 1..80: mol_type = other DNA
tggacaacttggcggtcttcatttaatgataggcttagccaagcgctcacaagattcaccacttaaattagaggatttta

SEQ ID NO: 4250 - DNA, 80 bp, synthetic construct
  misc_feature 1..80: note = Synthetic: >SARSCoV-cand-20360-20439
  source 1..80: mol_type = other DNA
tccctatggacagcacagtgaaaaattacttcataacagatgcgcaaacaggttcatcaaaatgtgtgtgttctgtgatt

SEQ ID NO: 4251 - DNA, 80 bp, synthetic construct
  misc_feature 1..80: note = Synthetic: >SARSCoV-cand-20440-20519
  source 1..80: mol_type = other DNA
gatcttttacttgatgactttgtcgagataataaagtcacaagatttgtcagtgatttcaaaagtggtcaaggttacaat

SEQ ID NO: 4252 - DNA, 80 bp, synthetic construct
  misc_feature 1..80: note = Synthetic: >SARSCoV-cand-20520-20599
  source 1..80: mol_type = other DNA
tgactatgctgaaatttcattcatgctttggtgtaaggatggacatgttgaaaccttctacccaaaactacaagcaagtc

SEQ ID NO: 4253 - DNA, 80 bp, synthetic construct
  misc_feature 1..80: note = Synthetic: >SARSCoV-cand-20600-20679
  source 1..80: mol_type = other DNA
aagcgtggcaaccaggtgttgcgatgcctaacttgtacaagatgcaaagaatgcttcttgaaaagtgtgaccttcagaat

SEQ ID NO: 4254 - DNA, 80 bp, synthetic construct
  misc_feature 1..80: note = Synthetic: >SARSCoV-cand-20680-20759
  source 1..80: mol_type = other DNA
tatggtgaaaatgctgttataccaaaaggaataatgatgaatgtcgcaaagtatactcaactgtgtcaatacttaaatac

SEQ ID NO: 4255 - DNA, 80 bp, synthetic construct
  misc_feature 1..80: note = Synthetic: >SARSCoV-cand-20760-20839
  source 1..80: mol_type = other DNA
acttactttagctgtaccctacaacatgagagttattcactttggtgctggctctgataaaggagttgcaccaggtacag

SEQ ID NO: 4256 - DNA, 80 bp, synthetic construct
  misc_feature 1..80: note = Synthetic: >SARSCoV-cand-20840-20919
  source 1..80: mol_type = other DNA
ctgtgctcagacaatggttgccaactggcacactacttgtcgattcagatcttaatgacttcgtctccgacgcagattct

SEQ ID NO: 4257 - DNA, 80 bp, synthetic construct
  misc_feature 1..80: note = Synthetic: >SARSCoV-cand-20920-20999
  source 1..80: mol_type = other DNA
actttaattggagactgtgcaacagtacatacggctaataaatgggaccttattattagcgatatgtatgaccctaggac

SEQ ID NO: 4258 - DNA, 80 bp, synthetic construct
  misc_feature 1..80: note = Synthetic: >SARSCoV-cand-21000-21079
  source 1..80: mol_type = other DNA
caaacatgtgacaaaagagaatgactctaaagaagggtttttcacttatctgtgtggatttataaagcaaaaactagccc

SEQ ID NO: 4259 - DNA, 80 bp, synthetic construct
  misc_feature 1..80: note = Synthetic: >SARSCoV-cand-21080-21159
  source 1..80: mol_type = other DNA
tgggtggttctatagctgtaaagataacagagcattcttggaatgctgacctttacaagcttatgggccatttctcatgg

SEQ ID NO: 4260 - DNA, 80 bp, synthetic construct
  misc_feature 1..80: note = Synthetic: >SARSCoV-cand-21160-21239
  source 1..80: mol_type = other DNA
tggacagcttttgttacaaatgtaaatgcatcatcatcggaagcatttttaattggggctaactatcttggcaagccgaa

SEQ ID NO: 4261 - DNA, 80 bp, synthetic construct
  misc_feature 1..80: note = Synthetic: >SARSCoV-cand-21240-21319
  source 1..80: mol_type = other DNA
ggaacaaattgatggctataccatgcatgctaactacattttctggaggaacacaaatcctatccagttgtcttcctatt

SEQ ID NO: 4262 - DNA, 80 bp, synthetic construct
  misc_feature 1..80: note = Synthetic: >SARSCoV-cand-21320-21399
  source 1..80: mol_type = other DNA
cactctttgacatgagcaaatttcctcttaaattaagaggaactgctgtaatgtctcttaaggagaatcaaatcaatgat

SEQ ID NO: 4263 - DNA, 80 bp, synthetic construct
  misc_feature 1..80: note = Synthetic: >SARSCoV-cand-21400-21479
  source 1..80: mol_type = other DNA
atgatttattctcttctggaaaaaggtaggcttatcattagagaaaacaacagagttgtggtttcaagtgatattcttgt

SEQ ID NO: 4264 - DNA, 80 bp, synthetic construct
  misc_feature 1..80: note = Synthetic: >SARSCoV-cand-21480-21559
  source 1..80: mol_type = other DNA
taacaactaaacgaacatgaaaatttttattttcttattatttcttactctcactagtggtagtgaccttgaccggtgca

SEQ ID NO: 4265 - DNA, 80 bp, synthetic construct
  misc_feature 1..80: note = Synthetic: >Shrew-cand-8020-8099
  source 1..80: mol_type = other DNA
aacgtttattgtcctagacatgttattgctgaagatgtaaccaaggagatagattatgaaacttgttttatgatgatgag

SEQ ID NO: 4266 - DNA, 80 bp, synthetic construct
  misc_feature 1..80: note = Synthetic: >Shrew-cand-8100-8179
  source 1..80: mol_type = other DNA
gaaaaatatgttggaaattagttataagaatagtttgttgaaggttaatggtgttaatatgaaagggtcacttcttgtga

SEQ ID NO: 4267 - DNA, 80 bp, synthetic construct
  misc_feature 1..80: note = Synthetic: >Shrew-cand-8180-8259
  source 1..80: mol_type = other DNA
ttgaagttgatattaataatgttttaacacctgattatgaatttgtaaaatttaagtcgggtgttagttttaatatttta

SEQ ID NO: 4268 - DNA, 80 bp, synthetic construct
  misc_feature 1..80: note = Synthetic: >Shrew-cand-8260-8339
  source 1..80: mol_type = other DNA
gttagttatgatggcataccttctggtgtgtttggtgttactatgcgttcaaatggcacatgtaaaggtagttttttgaa

SEQ ID NO: 4269 - DNA, 80 bp, synthetic construct
  misc_feature 1..80: note = Synthetic: >Shrew-cand-8340-8419
  source 1..80: mol_type = other DNA
tggatcttgtggttcacctggttttatccttagagataataaagtttgttttggttatatgcatcaaatggaatttaatt

SEQ ID NO: 4270 - DNA, 80 bp, synthetic construct
  misc_feature 1..80: note = Synthetic: >Shrew-cand-8420-8499
  source 1..80: mol_type = other DNA
ctggtgtgcatgtaggtagtgatatggatggtaatatttatggtaattataaagatcaaccagtatttcagattgaagga

SEQ ID NO: 4271 - DNA, 80 bp, synthetic construct
  misc_feature 1..80: note = Synthetic: >Shrew-cand-8500-8579
  source 1..80: mol_type = other DNA
ttagatgtgaaatttgctgataatgtaattgcctttttgtattcagcccttataaatggtgataattggtggttaaccac

SEQ ID NO: 4272 - DNA, 80 bp, synthetic construct
  misc_feature 1..80: note = Synthetic: >Shrew-cand-8580-8659
  source 1..80: mol_type = other DNA
tgatgagtgtactgttagtgcttttaatgattgggcttgtacaaataattttacacaagtggaaaataattttggtctgt

SEQ ID NO: 4273 - DNA, 80 bp, synthetic construct
  misc_feature 1..80: note = Synthetic: >Shrew-cand-8660-8739
  source 1..80: mol_type = other DNA
ttgaaaataaaacaggcgtaaaagtggaaagaattttatatgctattcgcacttattcaaaaggctttggaaataaaact

SEQ ID NO: 4274 - DNA, 80 bp, synthetic construct
  misc_feature 1..80: note = Synthetic: >Shrew-cand-8740-8819
  source 1..80: mol_type = other DNA
gttttgggttttggatctttaacagatgaatttacatccgatgaaatctattcccaaacttttggaatcttgcaagcctc

SEQ ID NO: 4275 - DNA, 80 bp, synthetic construct
  misc_feature 1..80: note = Synthetic: >Shrew-cand-8820-8899
  source 1..80: mol_type = other DNA
taaattgaaaagtggtattaagaatgttttagtgacatttgtgttctgttgtatgtttttaagtgaatggttgatgatgt

SEQ ID NO: 4276 - DNA, 80 bp, synthetic construct
  misc_feature 1..80: note = Synthetic: >Shrew-cand-8900-8979
  source 1..80: mol_type = other DNA
cagccatttattatttttctaaggatttgtttatgttattaataccggttggtgttttgatttcttttgttttatctttg

SEQ ID NO: 4277 - DNA, 80 bp, synthetic construct
  misc_feature 1..80: note = Synthetic: >Shrew-cand-8980-9059
  source 1..80: mol_type = other DNA
ttagtaaaacataagataatgtttattaacctttatttgttgcctactttgattgttatgatggtagataattttagttt

SEQ ID NO: 4278 - DNA, 80 bp, synthetic construct
  misc_feature 1..80: note = Synthetic: >Shrew-cand-9060-9139
  source 1..80: mol_type = other DNA
gtatatgtatgtggcaaattttatgagtgattttaatatgtcaggttttaatttaaattttattgtatccctggttagtg

SEQ ID NO: 4279 - DNA, 80 bp, synthetic construct
  misc_feature 1..80: note = Synthetic: >Shrew-cand-9140-9219
  source 1..80: mol_type = other DNA
ttgtagctgttttctttttgcatttgtatagatttataaatgctaaaaaggactggtttaatattatggtggctttagtt

SEQ ID NO: 4280 - DNA, 80 bp, synthetic construct
  misc_feature 1..80: note = Synthetic: >Shrew-cand-9220-9299
  source 1..80: mol_type = other DNA
ggttcattgtggttttatatgacctataatgaaactgcattgcttaccactgtgttaattagtgttaatccagactggta

SEQ ID NO: 4281 - DNA, 80 bp, synthetic construct
  misc_feature 1..80: note = Synthetic: >Sk512R-cand-10980-11059
  source 1..80: mol_type = other DNA
gatgccttgatactttcgctgaaacttattggcgttggtggtaagagaaccatcaaaatatcttctgttcagtcaaaact

SEQ ID NO: 4282 - DNA, 80 bp, synthetic construct
  misc_feature 1..80: note = Synthetic: >BtSk_AlphaCoV-cand-10950-11029
  source 1..80: mol_type = other DNA
tgatactttcgctgaaacttattggcgttggtggtaagagaaccatcaaaatatcttctgttcagtcaaaactcactgac

SEQ ID NO: 4283 - DNA, 80 bp, synthetic construct
  misc_feature 1..80: note = Synthetic: >Sb512-cand-10990-11069
  source 1..80: mol_type = other DNA
gccttgatactttcgctgaaacttattggcgttggtggtaggaaaaccatcaaaatatcttctgttcagtcaaaactcac

SEQ ID NO: 4284 - DNA, 80 bp, synthetic construct
  misc_feature 1..80: note = Synthetic: >AlphaSp-cand-11000-11079
  source 1..80: mol_type = other DNA
tttcgctgaaacttattggcgttggtggtaagagaaccatcaaaatatcttctgttcagtcaaaactcactgacttgaag

SEQ ID NO: 4285 - DNA, 80 bp, synthetic construct
  misc_feature 1..80: note = Synthetic: >Sk512R-cand-14880-14959
  source 1..80: mol_type = other DNA
atggtgttgtatgttataatagtgagtatgcagctttaggttatgttgctgatctcaatgcttttaaggctgttttgtat

SEQ ID NO: 4286 - DNA, 80 bp, synthetic construct
  misc_feature 1..80: note = Synthetic: >BtSk_AlphaCoV-cand-14850-14929
  source 1..80: mol_type = other DNA
atgttataatagtgagtatgcagctttaggttatgttgctgatctcaatgcttttaaggctgttttgtattaccagaata

SEQ ID NO: 4287 - DNA, 80 bp, synthetic construct
  misc_feature 1..80: note = Synthetic: >Sb512-cand-14900-14979
  source 1..80: mol_type = other DNA
ttataatagtgagtatgcagctttaggttatgttgctgatctcaatgctttcaaggctgttttgtattaccagaataatg

SEQ ID NO: 4288 - DNA, 80 bp, synthetic construct
  misc_feature 1..80: note = Synthetic: >AlphaSp-cand-14910-14989
  source 1..80: mol_type = other DNA
gagtatgcagctttaggttatgttgctgatctcaatgcttttaaggctgttttgtattaccagaataatgtttttatgag

SEQ ID NO: 4289 - DNA, 80 bp, synthetic construct
  misc_feature 1..80: note = Synthetic: >BtRf_AlphaCoV-cand-13350-13429
  source 1..80: mol_type = other DNA
atagcttcatcgcctgccttagttgatcagcgtacagtttgtttttctatcgctgcacttagcactggtataacacatca

SEQ ID NO: 4290 - DNA, 80 bp, synthetic construct
  misc_feature 1..80: note = Synthetic: >HKU2R-cand-13380-13459
  source 1..80: mol_type = other DNA
cttatagcgtcatcgcctgccttagttgaccagcgtacagtttgtttttctatcgctgcacttagcactggtataacaca

SEQ ID NO: 4291 - DNA, 80 bp, synthetic construct
  misc_feature 1..80: note = Synthetic: >HKU2-cand-13550-13629
  source 1..80: mol_type = other DNA
gcttacttatagcgtcatcgcctgccttagttgaccagcgtacagtttgtttttctatcgctgcacttagcactggtata

SEQ ID NO: 4292 - DNA, 80 bp, synthetic construct
  misc_feature 1..80: note = Synthetic: >BtSk_AlphaCoV-cand-14690-14769
  source 1..80: mol_type = other DNA
atagtaatacatgtaacaacatagaagttaagcaattgcagcgtaagttgtatgattgttgttatcgatcatcaagtgtg

SEQ ID NO: 4293 - DNA, 80 bp, synthetic construct
  misc_feature 1..80: note = Synthetic: >Sb512-cand-14740-14819
  source 1..80: mol_type = other DNA
gtaatacatgtaacaacatagaagttaagcaattgcagcgtaagttgtatgattgttgttatcgatcatcaagtgtggat

SEQ ID NO: 4294 - DNA, 80 bp, synthetic construct
  misc_feature 1..80: note = Synthetic: >Sk512R-cand-14720-14799
  source 1..80: mol_type = other DNA
ttgagtgttgatagtaatacatgtaacaacatagaagttaagcaattgcagcgtaagttgtatgattgttgttatcgatc

SEQ ID NO: 4295 - DNA, 80 bp, synthetic construct
  misc_feature 1..80: note = Synthetic: >AlphaSp-cand-14750-14829
  source 1..80: mol_type = other DNA
taacaacatagaagttaagcaattgcagcgtaagttgtatgactgttgttatagatcatcaagtgtggatcaaagttttg

SEQ ID NO: 4296 - DNA, 80 bp, synthetic construct
  misc_feature 1..80: note = Synthetic: >SARSRC-cand-29210-29289
  source 1..80: mol_type = other DNA
tgatgaagctcagcctttaccgcagagacaaaagaaacagcccactgtgactcttcttcctgcggccgacatggatgatt

SEQ ID NO: 4297 - DNA, 80 bp, synthetic construct
  misc_feature 1..80: note = Synthetic: >BetaCoV1-cand-9740-9819
  source 1..80: mol_type = other DNA
aagctcaagcgtgcgtttggtgattatacggccgttgtagtggttaatgtgatagtgtggtttataaattttgtgatgct

SEQ ID NO: 4298 - DNA, 80 bp, synthetic construct
  misc_feature 1..80: note = Synthetic: >Alpha2-cand-5800-5879
  source 1..80: mol_type = other DNA
aaaaagctaaaggtgaaggttaaacctccatttgccgtaaagccattagacgtcaaattacgagcgcttaactctataac

SEQ ID NO: 4299 - DNA, 80 bp, synthetic construct
  misc_feature 1..80: note = Synthetic: >AlphaMink-cand-5820-5899
  source 1..80: mol_type = other DNA
aaggtgaaagttaaacctccatttgtcgtaaagcctttagacgtcaaattacgagcgcttaactctataacacttttaac

SEQ ID NO: 4300 - DNA, 80 bp, synthetic construct
  misc_feature 1..80: note = Synthetic: >HghCoV1-cand-18290-18369
  source 1..80: mol_type = other DNA
caaatgtttcatattcaagagtcatatctagaatgggttttaagctcgatgcatcaatacccaattatcctaagcttttt

SEQ ID NO: 4301 - DNA, 80 bp, synthetic construct
  misc_feature 1..80: note = Synthetic: >HKU31-cand-18360-18439
  source 1..80: mol_type = other DNA
aaatgtttcatattcaagagttatatctagaatgggctttaagcttgatgcatcaatacccaattatcctaagcttttta

SEQ ID NO: 4302 - DNA, 80 bp, synthetic construct
  misc_feature 1..80: note = Synthetic: >MbCoV1-cand-23900-23979
  source 1..80: mol_type = other DNA
tttgctttctcagtacacagctgcacttactggtgctatggtacttggtggtgtcaccgctgctgctgcaataccttttt

SEQ ID NO: 4303 - DNA, 80 bp, synthetic construct
  misc_feature 1..80: note = Synthetic: >MsbCoV1-cand-23900-23979
  source 1..80: mol_type = other DNA
tctcagtacacagctgcacttactggtgctatggtacttggtggtgtcacggctgctgctgcaatacctttttcgcttgc

SEQ ID NO: 4304 - DNA, 80 bp, synthetic construct
  misc_feature 1..80: note = Synthetic: >BetaSp-cand-24380-24459
  source 1..80: mol_type = other DNA
gtttcaggttctacctaccgtaacctgctacttaaggggacccaatggttgagcactaactggtttcttccaccattttt

SEQ ID NO: 4305 - DNA, 80 bp, synthetic construct
  misc_feature 1..80: note = Synthetic: >BetaCoV1-cand-24270-24349
  source 1..80: mol_type = other DNA
ggttctacctaccgtaacctgctacttaaggggacccaatggttgagcactaactggtttcttccaccatttttgtcaga

SEQ ID NO: 4306 - DNA, 80 bp, synthetic construct
  misc_feature 1..80: note = Synthetic: >WIV16-cand-23760-23839
  source 1..80: mol_type = other DNA
caacacacgtgaagtgttcgctcaagtcaaacaaatgtacaaaaccccaactttgaaagattttggtggttttaattttt

SEQ ID NO: 4307 - DNA, 80 bp, synthetic construct
  misc_feature 1..80: note = Synthetic: >SARSCoV-cand-23800-23879
  source 1..80: mol_type = other DNA
aacaggatcgcaacacacgtgaagtgttcgctcaagtcaaacaaatgtacaaaaccccaactttgaaatattttggtggt

SEQ ID NO: 4308 - DNA, 80 bp, synthetic construct
  misc_feature 1..80: note = Synthetic: >HKU24-cand-16180-16259
  source 1..80: mol_type = other DNA
aaaaatttactgacgagtccttctacaagaacatgtatttaagaagtgcagttatgcaaagcgttggtgcctgcgtagtc

SEQ ID NO: 4309 - DNA, 80 bp, synthetic construct
  misc_feature 1..80: note = Synthetic: >BetaSp-cand-24780-24859
  source 1..80: mol_type = other DNA
ataatgtggctgctgataatatttattttcatttctatcaagatggtggaactttttatgcgtatgtaggtgacaagagt

SEQ ID NO: 4310 - DNA, 80 bp, synthetic construct
  misc_feature 1..80: note = Synthetic: >BetaCoV1-cand-10780-10859
  source 1..80: mol_type = other DNA
aatgggagattgtgtcaaatttgtttatatgcatcaattggagcttagtacaggttgtcatactggtactgacttcaatg

SEQ ID NO: 4311 - DNA, 80 bp, synthetic construct
  misc_feature 1..80: note = Synthetic: >Alpha2-cand-26970-27049
  source 1..80: mol_type = other DNA
aatgggttttgctccaaaagaaacacagaagaataagtctcgctctaaatctagagatagggctaagtctagtgaaagac

SEQ ID NO: 4312 - DNA, 80 bp, synthetic construct
  misc_feature 1..80: note = Synthetic: >AlphaMink-cand-26980-27059
  source 1..80: mol_type = other DNA
atgggttttgctccaaaagaaacacagaagaataagtctcgctctaaatctagagatagggctaagtctagtgaaagacc

SEQ ID NO: 4313 - DNA, 80 bp, synthetic construct
  misc_feature 1..80: note = Synthetic: >HKU5-cand-10800-10879
  source 1..80: mol_type = other DNA
aatggtactcacactggttgctcttttgacggtgtcatgtacggagcttttgaagatcgtcaagtacaccaagtccaatt

SEQ ID NO: 4314 - DNA, 80 bp, synthetic construct
  misc_feature 1..80: note = Synthetic: >HKU5R-cand-10790-10869
  source 1..80: mol_type = other DNA
gttatcaaatggtactcacactggttgctcttttgacggtgtcatgtacggagcttttgaagatcgtcaagtacaccaag

SEQ ID NO: 4315 - DNA, 80 bp, synthetic construct
  misc_feature 1..80: note = Synthetic: >AlphaCoV1-cand-6890-6969
  source 1..80: mol_type = other DNA
aatggtactggtaaactctgcaaaaagcataatttttattgtaagaattgtgactcttatgggtttgaacacacattcat

SEQ ID NO: 4316 - DNA, 80 bp, synthetic construct
  misc_feature 1..80: note = Synthetic: >FelineAlpha1-cand-6490-6569
  source 1..80: mol_type = other DNA
aggctaatggtactggtaaactctgcaaaaagcataatttttattgtaagaattgtgactcttatgggtttgatcacacc

SEQ ID NO: 4317 - DNA, 80 bp, synthetic construct
  misc_feature 1..80: note = Synthetic: >HKU5R-cand-24480-24559
  source 1..80: mol_type = other DNA
tgtatgcagcaaggtcctcagtcagctcgagacttgatctgtgcacaatatgttgctggctacaaagtgttgccaccatt

SEQ ID NO: 4318 - DNA, 80 bp, synthetic construct
  misc_feature 1..80: note = Synthetic: >HKU5-cand-24480-24559
  source 1..80: mol_type = other DNA
tatgatgaatgtatgcagcaaggtcctcagtcagctcgagacttgatctgtgcacaatatgttgctggctacaaagtgct

SEQ ID NO: 4319 - DNA, 80 bp, synthetic construct
  misc_feature 1..80: note = Synthetic: >SARSCoV-cand-13720-13799
  source 1..80: mol_type = other DNA
cgtcagcgtctaactaaatacacaatggctgatttagtctatgctctacgtcattttgatgagggtaattgtgatacatt

SEQ ID NO: 4320 - DNA, 80 bp, synthetic construct
  misc_feature 1..80: note = Synthetic: >WIV16-cand-13710-13789
  source 1..80: mol_type = other DNA
acgtcagcgtctaactaaatacacaatggctgatttagtctatgctctacgtcattttgatgagggtaattgtgatacat

SEQ ID NO: 4321 - DNA, 80 bp, synthetic construct
  misc_feature 1..80: note = Synthetic: >HKU5R-cand-5280-5359
  source 1..80: mol_type = other DNA
aatgtgacaatgttgatgttggatatgcttaaggagatcaaattcattgtacctgctttacaagctgcgtacctcaaaca

SEQ ID NO: 4322 - DNA, 80 bp, synthetic construct
  misc_feature 1..80: note = Synthetic: >HKU5-cand-5280-5359
  source 1..80: mol_type = other DNA
gttaatgtgacaatgttgatgctggacatgcttaaggagatcaaattcattgtacctgctttacaagctgcgtacctcaa

SEQ ID NO: 4323 - DNA, 80 bp, synthetic construct
  misc_feature 1..80: note = Synthetic: >HghCoV1-cand-27170-27249
  source 1..80: mol_type = other DNA
aatgttaaaaacattactaccacttgttgatatgaggtctcatttcattcgtgttagtacatgtacatcacatacagtcg

SEQ ID NO: 4324 - DNA, 80 bp, synthetic construct
  misc_feature 1..80: note = Synthetic: >Sb512-cand-5660-5739
  source 1..80: mol_type = other DNA
ctgaaaacactcttaacattatctcacgctttctgaaacctcagggttctgtagaaatgttaagagctacatctaccact

SEQ ID NO: 4325 - DNA, 80 bp, synthetic construct
  misc_feature 1..80: note = Synthetic: >MinkCoV1-cand-14350-14429
  source 1..80: mol_type = other DNA
ctgtctctgcaaatgtcaatagacttttaagtgtagattctaacacctgtaacaattacaatgttaaagcattgcagcgt

SEQ ID NO: 4326 - DNA, 80 bp, synthetic construct
  misc_feature 1..80: note = Synthetic: >Alpha2-cand-14310-14389
  source 1..80: mol_type = other DNA
caggccgtttcggcaaatgtcaatagacttttaagtgtagattctaacacctgtaacaattacaatgttaaagcattgca

SEQ ID NO: 4327 - DNA, 80 bp, synthetic construct
  misc_feature 1..80: note = Synthetic: >MbCoV1-cand-160-239
  source 1..80: mol_type = other DNA
tcagttccgtctgttaggtatactaggtggctgcctttggttcagttccgtctggccattgtgtggatagtacgttccgt

SEQ ID NO: 4328 - DNA, 80 bp, synthetic construct
  misc_feature 1..80: note = Synthetic: >BatCoV1A-cand-160-239
  source 1..80: mol_type = other DNA
tccagttccgtctggtaggtatactaagtggctgcctttggtccagttccgtctggccattgtgtggatagtacgttccg

SEQ ID NO: 4329 - DNA, 80 bp, synthetic construct
  misc_feature 1..80: note = Synthetic: >HKU15-cand-8480-8559
  source 1..80: mol_type = other DNA
acggagcttgtggtagtgtgggttacactcttaagggtaaaacactctacttacattacatgcaccacattgagtttaac

SEQ ID NO: 4330 - DNA, 80 bp, synthetic construct
  misc_feature 1..80: note = Synthetic: >BetaCoV1-cand-9340-9419
  source 1..80: mol_type = other DNA
ctatacggatgggcttgttcaaaatgctagtctgtattcctcattgaggccacacgttcgttatagtctggctaataccc

SEQ ID NO: 4331 - DNA, 80 bp, synthetic construct
  misc_feature 1..80: note = Synthetic: >HKU5R-cand-11670-11749
  source 1..80: mol_type = other DNA
acgggtgactgttctagcccccttacctatctcatgtttctcactacattgactagtgattacactgtaaccgtgtttct

SEQ ID NO: 4332 - DNA, 80 bp, synthetic construct
  misc_feature 1..80: note = Synthetic: >HKU5-cand-11680-11759
  source 1..80: mol_type = other DNA
attgctccagtccccttacctatcttatgtttcttactacattgactagtgattacactgtaaccgtgtttcttgcagtc

SEQ ID NO: 4333 - DNA, 80 bp, synthetic construct
  misc_feature 1..80: note = Synthetic: >MsbCoV1-cand-2480-2559
  source 1..80: mol_type = other DNA
acggtaacagctactgaagtcatgattaacactgttaagcgattcaaacgctttgccagtgcccttgctaagctatatag

SEQ ID NO: 4334 - DNA, 80 bp, synthetic construct
  misc_feature 1..80: note = Synthetic: >MbCoV1-cand-2490-2569
  source 1..80: mol_type = other DNA
ataacggtaacagctactgaagtcatgatcaacactgttaagcgtttcaaacgctttgccagtgcccttgctaagctata

SEQ ID NO: 4335 - DNA, 80 bp, synthetic construct
  misc_feature 1..80: note = Synthetic: >HKU5R-cand-18880-18959
  source 1..80: mol_type = other DNA
acggtgttgcatgtgtaatcgtcgcgcttcgacgtactcttcaccgttacactcttatgcctgctggagtcattctagcg

SEQ ID NO: 4336 - DNA, 80 bp, synthetic construct
  misc_feature 1..80: note = Synthetic: >HghCoV1-cand-600-679
  source 1..80: mol_type = other DNA
ctctgcagggcaaacctattggatttttctttccttttgatgaagagcttgttacaggtacttataccttcaagctacgt

SEQ ID NO: 4337 - DNA, 80 bp, synthetic construct
  misc_feature 1..80: note = Synthetic: >HKU5R-cand-11510-11589
  source 1..80: mol_type = other DNA
tcctgctagtgtgtacatgcgcactactcatactgacttaggtgtctacctcagtctttgctttgcgttagctgttgtag

SEQ ID NO: 4338 - DNA, 80 bp, synthetic construct
  misc_feature 1..80: note = Synthetic: >HKU14-cand-20830-20909
  source 1..80: mol_type = other DNA
agttaatctctggaactacggaaagccaattacattgcctacaggctgtatgatgaatgttgctaagtatactcaattat

SEQ ID NO: 4339 - DNA, 80 bp, synthetic construct
  misc_feature 1..80: note = Synthetic: >HKU23-cand-20660-20739
  source 1..80: mol_type = other DNA
gaaagagttagtctctggaattatgggaagccagttactttgcctacaggctgtatgatgaatgttgctaagtatactca

SEQ ID NO: 4340 - DNA, 80 bp, synthetic construct
  misc_feature 1..80: note = Synthetic: >Sk512R-cand-4850-4929
  source 1..80: mol_type = other DNA
cagtgatttatgtcttggttcttttgttagggattgtgatggttatgttcaaggttcacttggcggtgccattgctaact

SEQ ID NO: 4341 - DNA, 80 bp, synthetic construct
  misc_feature 1..80: note = Synthetic: >Sb512-cand-4860-4939
  source 1..80: mol_type = other DNA
tgatttatgtcttggttcttttgttagggattgtgatggttatgttcaaggttcacttggcggtgccattgccaactaca

SEQ ID NO: 4342 - DNA, 80 bp, synthetic construct
  misc_feature 1..80: note = Synthetic: >BetaCoV1-cand-11580-11659
  source 1..80: mol_type = other DNA
gttgttgtgccggtttattcaatgatctttactaccatgcgtagcattaatcatgatttgttctctattataatatttat

SEQ ID NO: 4343 - DNA, 80 bp, synthetic construct
  misc_feature 1..80: note = Synthetic: >HKU5R-cand-20400-20479
  source 1..80: mol_type = other DNA
agttcgtacagtttactgatacgtactacactcttggtagaacagtctccgatttcacacctgttagtgagatggagaag

SEQ ID NO: 4344 - DNA, 80 bp, synthetic construct
  misc_feature 1..80: note = Synthetic: >HKU5-cand-20410-20489
  source 1..80: mol_type = other DNA
gttcgtacagtttactgatacgtactacactcttggtagaacagtttccgatttcacacctgttagtgaaatggaaaaag

SEQ ID NO: 4345 - DNA, 80 bp, synthetic construct
  misc_feature 1..80: note = Synthetic: >HKU5-cand-0-79
  source 1..80: mol_type = other DNA
ctatccctctctcgatttaagagaatagcctagctatccctctctctcgttctcttgcagaactttgtttttaacgaact

SEQ ID NO: 4346 - DNA, 80 bp, synthetic construct
  misc_feature 1..80: note = Synthetic: >HKU5R-cand-10-89
  source 1..80: mol_type = other DNA
ctctcgttcagagaatagcctagctatccctctctctcgttctcttgcagaactttgtttttaacgaacttaaataatag

SEQ ID NO: 4347 - DNA, 80 bp, synthetic construct
  misc_feature 1..80: note = Synthetic: >HghCoV1-cand-19170-19249
  source 1..80: mol_type = other DNA
agttgaagaccctgtagttgattggcattattatgatgcacaaccattacgtaaaaatgttaaacagttgttttatacag

SEQ ID NO: 4348 - DNA, 80 bp, synthetic construct
  misc_feature 1..80: note = Synthetic: >HKU31-cand-19240-19319
  source 1..80: mol_type = other DNA
gttgaagaccctgtagttgattggcattattatgatgcacaaccattacgtaaaaatgttaaacagttgttttatacaga

SEQ ID NO: 4349 - DNA, 80 bp, synthetic construct
  misc_feature 1..80: note = Synthetic: >HKU5-cand-2960-3039
  source 1..80: mol_type = other DNA
agttgagaaggatctcccagtcaaagatttcgtggatgttgtgaaggatgaagttattgagctgctctctaaacttctcc

SEQ ID NO: 4350 - DNA, 80 bp, synthetic construct
  misc_feature 1..80: note = Synthetic: >HKU5R-cand-2970-3049
  source 1..80: mol_type = other DNA
gatctaccagtcaaagacttcgtggatgttgtgaaggatgaagttattgagctgctctctaaacttctccgtggatacaa

SEQ ID NO: 4351 - DNA, 80 bp, synthetic construct
  misc_feature 1..80: note = Synthetic: >HKU4R-cand-5800-5879
  source 1..80: mol_type = other DNA
ttatacagcagactgtaatgtcgttgtatatgatcttgatggtgttactaaagttgaggtcaatcctgacttatccaact

SEQ ID NO: 4352 - DNA, 80 bp, synthetic construct
  misc_feature 1..80: note = Synthetic: >Sb512-cand-17620-17699
  source 1..80: mol_type = other DNA
gcgaccaatttacgcatttgttacctttgttgcgtaaaggtcaaccatggtctgttattaggcgtcgtattgttcagatg

SEQ ID NO: 4353 - DNA, 80 bp, synthetic construct
  misc_feature 1..80: note = Synthetic: >HKU5R-cand-25450-25529
  source 1..80: mol_type = other DNA
atttcaaggaagagctggatgaattcttcaaaaacgtctcctcacaaggaccaaacttccaggagatttctaagattaac

SEQ ID NO: 4354 - DNA, 80 bp, synthetic construct
  misc_feature 1..80: note = Synthetic: >HKU5-cand-25460-25539
  source 1..80: mol_type = other DNA
tttcaaggaagagctggaggaattcttcaaaaacgtctcctcacaaggaccaaacttccaggagatttctaagattaaca

SEQ ID NO: 4355 - DNA, 80 bp, synthetic construct
  misc_feature 1..80: note = Synthetic: >Sb512-cand-19320-19399
  source 1..80: mol_type = other DNA
atttcagattttcaacctcgtagtaacatggaagaagattttcttaacatggatatgggtttgtttataagtaaatacgg

SEQ ID NO: 4356 - DNA, 80 bp, synthetic construct
  misc_feature 1..80: note = Synthetic: >BtSk_AlphaCoV-cand-19270-19349
  source 1..80: mol_type = other DNA
gtcatttcagattttcaacctcgtagtaacatggaagaagattttcttaacatggatatgggtttgtttataagtaaata

SEQ ID NO: 4357 - DNA, 80 bp, synthetic construct
  misc_feature 1..80: note = Synthetic: >MsbCoV1-cand-24140-24219
  source 1..80: mol_type = other DNA
atttctcaagctcttaataaggttgagaatgttgtcaatgaacaaggaactgctttgtctcagttaaccaagcaacttgc

SEQ ID NO: 4358 - DNA, 80 bp, synthetic construct
  misc_feature 1..80: note = Synthetic: >MbCoV1-cand-24140-24219
  source 1..80: mol_type = other DNA
gaataccatttcccaagcccttaataaggttgagaatgttgtcaatgaacaaggaactgctttgtctcagttaaccaagc

SEQ ID NO: 4359 - DNA, 80 bp, synthetic construct
  misc_feature 1..80: note = Synthetic: >BetaCoV1-cand-9660-9739
  source 1..80: mol_type = other DNA
atttcttttcgttgacgatgagttctgttgttggtgccgttcttgctataataattgttttgatcttttattatctcatc

SEQ ID NO: 4360 - DNA, 80 bp, synthetic construct
  misc_feature 1..80: note = Synthetic: >BetaSp-cand-11940-12019
  source 1..80: mol_type = other DNA
atttgactgatattccgcatgtgaaaattcttttgatgtgttaccttcttgtagggtatattgtgtgttgttactgggga

SEQ ID NO: 4361 - DNA, 80 bp, synthetic construct
  misc_feature 1..80: note = Synthetic: >BetaCoV1-cand-11820-11899
  source 1..80: mol_type = other DNA
ttttatttgactgatattccgcatgtgaaaattcttttgatgtgttaccttcttgtagggtatattgtgtgttgttactg

SEQ ID NO: 4362 - DNA, 80 bp, synthetic construct
  misc_feature 1..80: note = Synthetic: >SARSCoV-cand-14920-14999
  source 1..80: mol_type = other DNA
tatgactcaatgagttatgaggatcaagatgcacttttcgcgtatactaagcgtaatgtcatccctactataactcaaat

SEQ ID NO: 4363 - DNA, 80 bp, synthetic construct
  misc_feature 1..80: note = Synthetic: >WIV16-cand-14910-14989
  source 1..80: mol_type = other DNA
ttatgactcaatgagttatgaggatcaagatgcacttttcgcgtatactaagcgtaatgtcatccctactataactcaaa

SEQ ID NO: 4364 - DNA, 80 bp, synthetic construct
  misc_feature 1..80: note = Synthetic: >229ER-cand-15680-15759
  source 1..80: mol_type = other DNA
taagactttttgcagctgaaactgtcaaggccaaagaggaaagtgttaagtcatcatatgcttatgccaccctaaaggag

SEQ ID NO: 4365 - DNA, 80 bp, synthetic construct
  misc_feature 1..80: note = Synthetic: >AlphaSp-cand-13950-14029
  source 1..80: mol_type = other DNA
gctgttagagattttgattattatagatacaaccgtaccactgttttggacatttgccaagcgcgtgttgtctaccaaat

SEQ ID NO: 4366 - DNA, 80 bp, synthetic construct
  misc_feature 1..80: note = Synthetic: >WIV16-cand-320-399
  source 1..80: mol_type = other DNA
cttcaggttagagacgtgctagtgcgtggcttcggggactctgtggaagaggccctatcggaggcacgtgaacatcttaa

SEQ ID NO: 4367 - DNA, 80 bp, synthetic construct
  misc_feature 1..80: note = Synthetic: >HKU15-cand-14660-14739
  source 1..80: mol_type = other DNA
cttcattaaacttctatgggaacagggtaaaaagccgccacccataacgaagaaccacattttcactggctaccatttta

SEQ ID NO: 4368 - DNA, 80 bp, synthetic construct
  misc_feature 1..80: note = Synthetic: >Delta-cand-16160-16239
  source 1..80: mol_type = other DNA
tcattaaacttctatgggaacagggtaaaaagccgccacccataacgaagaaccacattttcactggctaccattttaac

SEQ ID NO: 4369 - DNA, 80 bp, synthetic construct
  misc_feature 1..80: note = Synthetic: >HKU4-cand-3090-3169
  source 1..80: mol_type = other DNA
tgactgtgcatggagttctaatatgaccttttctattaaccctgttgaggatgtagaggaggttgaagaatttatagaag

SEQ ID NO: 4370 - DNA, 80 bp, synthetic construct
  misc_feature 1..80: note = Synthetic: >HKU4R-cand-3080-3159
  source 1..80: mol_type = other DNA
ggtgactgtgcatggagttctaatatgaccttttctattaaccctgttgaggatgtagaggaggttgaagaatttataga

SEQ ID NO: 4371 - DNA, 80 bp, synthetic construct
  misc_feature 1..80: note = Synthetic: >HKU5R-cand-2890-2969
  source 1..80: mol_type = other DNA
tatctgtggactacgatgttcatcctgtcctagatgcactgttagccggttccgaactggccacatttacagttgagaag

SEQ ID NO: 4372 - DNA, 80 bp, synthetic construct
  misc_feature 1..80: note = Synthetic: >HKU5-cand-2880-2959
  source 1..80: mol_type = other DNA
gtcagaagcgtatctgtggactacgatgttcatcctgtcctagatgcactgttagccggttctgaactggccacatttac

SEQ ID NO: 4373 - DNA, 80 bp, synthetic construct
  misc_feature 1..80: note = Synthetic: >AlphaCoV1-cand-7530-7609
  source 1..80: mol_type = other DNA
cttctggtgtttctgctatggacattggtaagtgcatgacttttgatgctaagattgttaatgcaaaggttttaactcaa

SEQ ID NO: 4374 - DNA, 80 bp, synthetic construct
  misc_feature 1..80: note = Synthetic: >FelineAlpha1-cand-7130-7209
  source 1..80: mol_type = other DNA
tggtactgcaggtgtttctgctatggacatcggtaagtgcatgacttttgatgctaagattgttaatgcaaaggttttaa

SEQ ID NO: 4375 - DNA, 80 bp, synthetic construct
  misc_feature 1..80: note = Synthetic: >SEAC-cand-22680-22759
  source 1..80: mol_type = other DNA
cttctgtaacgctaggcatttttggtggacaagctggcatggccacatggtctgttgctatggctggacgtttaaatgca

SEQ ID NO: 4376 - DNA, 80 bp, synthetic construct
  misc_feature 1..80: note = Synthetic: >HKU2-cand-22720-22799
  source 1..80: mol_type = other DNA
gcttctgtaacgctaggcatttttggtggacaagctggcatggccacatggtctgttgctatggctggacgtttaaatgc

SEQ ID NO: 4377 - DNA, 80 bp, synthetic construct
  misc_feature 1..80: note = Synthetic: >BetaCoV1-cand-13100-13179
  source 1..80: mol_type = other DNA
gaagtacactaagatagtaaaggaagatcaatctgttgtagtgttagaattggatcccccatgtaaatttactgttcaag

SEQ ID NO: 4378 - DNA, 80 bp, synthetic construct
  misc_feature 1..80: note = Synthetic: >SEAC-cand-27060-27139
  source 1..80: mol_type = other DNA
cttgacgagcctatatggaagagccgtcacacctcgtatgcaagtttctgttagtagttgttaattagttgattctttga

SEQ ID NO: 4379 - DNA, 80 bp, synthetic construct
  misc_feature 1..80: note = Synthetic: >BtRf_AlphaCoV-cand-26870-26949
  source 1..80: mol_type = other DNA
tgacgagcctatatggaagagccgtcacacctcgtatgtatgttgctgttagtagttgttagttagttgattctttgaca

SEQ ID NO: 4380 - DNA, 80 bp, synthetic construct
  misc_feature 1..80: note = Synthetic: >SARSRC-cand-4810-4889
  source 1..80: mol_type = other DNA
cttgacggtgaggttctcccacttgacaagctcaagagtcttttgtctcttcgtgaggttaagactattaaagtgtttac

SEQ ID NO: 4381 - DNA, 80 bp, synthetic construct
  misc_feature 1..80: note = Synthetic: >MT114540-cand-20160-20239
  source 1..80: mol_type = other DNA
caatgtttattgtacaacaaattctgattgtgtacaagtcaatgttacacaattaccaggcaatgagaacattattaaag

SEQ ID NO: 4382 - DNA, 80 bp, synthetic construct
  misc_feature 1..80: note = Synthetic: >MN531554-cand-23370-23449
  source 1..80: mol_type = other DNA
tacgtcacgtgacatgtatatgccaagagatattacagcaggagatatagttaccttgacttcttgtcaagcaaactatg

SEQ ID NO: 4383 - DNA, 80 bp, synthetic construct
  misc_feature 1..80: note = Synthetic: >MN711790-cand-2320-2399
  source 1..80: mol_type = other DNA
cattgatagtgttgatgttgaagatctgggtattgttcgagaaaaaccaattgattttgaggtttgcgatgatgtgacac

SEQ ID NO: 4384 - DNA, 80 bp, synthetic construct
  misc_feature 1..80: note = Synthetic: >AJ311317-cand-2320-2399
  source 1..80: mol_type = other DNA
cattgatagtgttgatgttgaagatctgggtgttgttcaggaaaaatcgattgattttgaggtttgcgatgacgtgacac

SEQ ID NO: 4385 - DNA, 80 bp, synthetic construct
  misc_feature 1..80: note = Synthetic: >NC_010800-cand-2320-2399
  source 1..80: mol_type = other DNA
cattgatagtgttgatgttgaagatctgggtgttgttaaagacaaacctatagattttgaggtttgtgaagacgtaacac

SEQ ID NO: 4386 - DNA, 80 bp, synthetic construct
  misc_feature 1..80: note = Synthetic: >MN128087-cand-640-719
  source 1..80: mol_type = other DNA
ccaaaagattacgctgatgcttttgctgttaggcagaagctcgaccgtaatctgggagctgggaaacagtttaaatttga

SEQ ID NO: 4387 - DNA, 80 bp, synthetic construct
  misc_feature 1..80: note = Synthetic: >KR527150-cand-24820-24899
  source 1..80: mol_type = other DNA
ttctgagcgtgagatttcacgcttttattcccttccattagtgacagatgctatggtgcataatgatacttattggtttt

SEQ ID NO: 4388 - DNA, 80 bp, synthetic construct
  misc_feature 1..80: note = Synthetic: >KR527150-cand-24180-24259
  source 1..80: mol_type = other DNA
tgtcatccatttcttcttggcattcatattcttcacgaacaccacttatttcaaatgttaaaacaccaaagactactttt

SEQ ID NO: 4389 - DNA, 80 bp, synthetic construct
  misc_feature 1..80: note = Synthetic: >LC088095-cand-24000-24079
  source 1..80: mol_type = other DNA
tgtcatccacttcttcctggcgttcattttcatcacgaacaccacttatttcaaatgttaaaacaccaaagactactttt

SEQ ID NO: 4390 - DNA, 80 bp, synthetic construct
  misc_feature 1..80: note = Synthetic: >AJ311317-cand-160-239
  source 1..80: mol_type = other DNA
aaaatcttattgttgctggtatcactgcttgttttgccgtgtctcactttatacatctgttgcttgggctacctagtgtc

SEQ ID NO: 4391 - DNA, 80 bp, synthetic construct
  misc_feature 1..80: note = Synthetic: >MK957244-cand-24530-24609
  source 1..80: mol_type = other DNA
aaaattgcactcttgatactgaacaggcagttcagttatttaaggaatataatttgtttataaccgcgttcctattgttt

SEQ ID NO: 4392 - DNA, 80 bp, synthetic construct
  misc_feature 1..80: note = Synthetic: >MN128087-cand-12460-12539
  source 1..80: mol_type = other DNA
ctaatggatgtgatcctgatgttgtaaagcgagcctttgatgtatgtaataaggaatctgccggtatgttcataaatttg

SEQ ID NO: 4393 - DNA, 80 bp, synthetic construct
  misc_feature 1..80: note = Synthetic: >MT114541-cand-14730-14809
  source 1..80: mol_type = other DNA
aaaatttgaatgcaggtgttcttgattcattctcagttacaatgctagaagaaggtcaagataagttctggagtgaagag

SEQ ID NO: 4394 - DNA, 80 bp, synthetic construct
  misc_feature 1..80: note = Synthetic: >MT040335-cand-25300-25379
  source 1..80: mol_type = other DNA
gaacctgttctgaaaggagtcaaattacattacacataaacgaacttaatggatttgtttatgagaatttttaatcttgg

SEQ ID NO: 4395 - DNA, 80 bp, synthetic construct
  misc_feature 1..80: note = Synthetic: >MN509587-cand-650-729
  source 1..80: mol_type = other DNA
gctgatgctttcgcctttaggcagaagttcgaccgtagtctcggtgctgggaaacagtttaaatttgaaactgtgtgtgg

SEQ ID NO: 4396 - DNA, 80 bp, synthetic construct
  misc_feature 1..80: note = Synthetic: >KU556804-cand-640-719
  source 1..80: mol_type = other DNA
gctgatgctcttgcccttaggcagaagtttgatcgtaatcttcagactgggaaacagtttaaatttgaaactgtgtgtgg

SEQ ID NO: 4397 - DNA, 80 bp, synthetic construct
  misc_feature 1..80: note = Synthetic: >LC088095-cand-24160-24239
  source 1..80: mol_type = other DNA
tattgcttctttgggtttgtctatattttcaatcattgaggacagaagagtaacagagcttacacaacagcaaattatgg

SEQ ID NO: 4398 - DNA, 80 bp, synthetic construct
  misc_feature 1..80: note = Synthetic: >MT114542-cand-21100-21179
  source 1..80: mol_type = other DNA
tgcttgtggccagtgcctagttttggtgttgcagcgcaagaattttgttttgaaggtgccaagtttagccaatgcaatgg

SEQ ID NO: 4399 - DNA, 80 bp, synthetic construct
  misc_feature 1..80: note = Synthetic: >MT114541-cand-26480-26559
  source 1..80: mol_type = other DNA
tgctgaaggattcaaaattgctggtggtatgaacatcgacaatttaccaaaatacgtaatggttgcattacctagcagga

SEQ ID NO: 4400 - DNA, 80 bp, synthetic construct
  misc_feature 1..80: note = Synthetic: >SBB-726-cand-6330-6409
  source 1..80: mol_type = other DNA
ttatttgaaacggcgttgtggcaaaatttcttggaagcgtttgttaacgttgttgcgttatgtgctttatatttggtttg

SEQ ID NO: 4401 - DNA, 80 bp, synthetic construct
  misc_feature 1..80: note = Synthetic: >SBB-747-cand-6310-6389
  source 1..80: mol_type = other DNA
gtgacagcgtgcgtgtttaattatttgaaacggcgttgtggcaaaatttcttggaagcgtttgttaacgttgttgcgtta

SEQ ID NO: 4402 - DNA, 80 bp, synthetic construct
  misc_feature 1..80: note = Synthetic: >SBB-788-cand-6320-6399
  source 1..80: mol_type = other DNA
gcgtgtttaattatttgaaacggcgttgtggcaaaatttcttggaagcgtttgttaacgttgttgcgttatgtgctttat

SEQ ID NO: 4403 - DNA, 80 bp, synthetic construct
  misc_feature 1..80: note = Synthetic: >SBB-010-cand-20000-20079
  source 1..80: mol_type = other DNA
ttataaatgagaagctctccgtaggtgggactgtcgctatcaaaataactgagtattcctggaacaaaaagttgtatgag

SEQ ID NO: 4404 - DNA, 80 bp, synthetic construct
  misc_feature 1..80: note = Synthetic: >SBB-053-cand-19990-20069
  source 1..80: mol_type = other DNA
ataaatggtgttataaatgagaagctctctgtgggagggactgtcgctatcaaaataactgagtattcctggaacaaaaa

SEQ ID NO: 4405 - DNA, 80 bp, synthetic construct
  misc_feature 1..80: note = Synthetic: >SBB-747-cand-4310-4389
  source 1..80: mol_type = other DNA
gttttgatgacacatgtctgtatgccataactggtagtgtggttcttaaatttgccacagtcgctaaagcgcgtgcttat

SEQ ID NO: 4406 - DNA, 80 bp, synthetic construct
  misc_feature 1..80: note = Synthetic: >SBB-788-cand-4320-4399
  source 1..80: mol_type = other DNA
cacatgtttgtatgccataactggtagtgtggttcttaaatttgccacagttgctaaggcacgtgcttatttggaaacta

SEQ ID NO: 4407 - DNA, 80 bp, synthetic construct
  misc_feature 1..80: note = Synthetic: >SBB-747-cand-4550-4629
  source 1..80: mol_type = other DNA
tgcccaaagatgaaggtgcacacctttataagcaagacaatttttcgctagaggagttggccgctatgcgtgagtattat

SEQ ID NO: 4408 - DNA, 80 bp, synthetic construct
  misc_feature 1..80: note = Synthetic: >SBB-788-cand-4560-4639
  source 1..80: mol_type = other DNA
tgaaggtgcccacctttataagcaagacaatttttcgcaagaggagttggccgctatgcgtgagtattatggtgttgatg

SEQ ID NO: 4409 - DNA, 80 bp, synthetic construct
  misc_feature 1..80: note = Synthetic: >SBB-797-cand-4560-4639
  source 1..80: mol_type = other DNA
tgaaggtgcacacctttataagcaagacaatttttctctagaggagttggctgctatgcgtgagtattatggtgttgatg

SEQ ID NO: 4410 - DNA, 80 bp, synthetic construct
  misc_feature 1..80: note = Synthetic: >SBB-747-cand-4710-4789
  source 1..80: mol_type = other DNA
cggtagagtcttattggcacaaagggattcaaattgttatctaaatgtggcaatttccttattacaagatattgatgtat

SEQ ID NO: 4411 - DNA, 80 bp, synthetic construct
  misc_feature 1..80: note = Synthetic: >SBB-120-cand-11520-11599
  source 1..80: mol_type = other DNA
tacattatgctggtgttgtttggaatgttgtagacatacgtgacaatgatggcaaagttgtacatatgaaagagattaca

SEQ ID NO: 4412 - DNA, 80 bp, synthetic construct
  misc_feature 1..80: note = Synthetic: >SBB-024-cand-11510-11589
  source 1..80: mol_type = other DNA
gatggttgtgtacattatgctggtgttgtctggaatgttgtagacatacgcgacaatgatggcaaagttgtacatatgaa

SEQ ID NO: 4413 - DNA, 80 bp, synthetic construct
  misc_feature 1..80: note = Synthetic: >SBB-120-cand-17400-17479
  source 1..80: mol_type = other DNA
attcgctcatttgatacctcttatgcgacgtgggcaaccttggtccatagtgcgtaagagaatagttcagatgtgttgtg

SEQ ID NO: 4414 - DNA, 80 bp, synthetic construct
  misc_feature 1..80: note = Synthetic: >SBB-122-cand-17390-17469
  source 1..80: mol_type = other DNA
ctggtgaacaatttgctcatttgatacctcttatgcgacgcggacaaccttggtccgtagtgcgtaagagaatagttcag

SEQ ID NO: 4415 - DNA, 80 bp, synthetic construct
  misc_feature 1..80: note = Synthetic: >SBB-747-cand-13270-13349
  source 1..80: mol_type = other DNA
taaaagaaattttggtattacgtggctgttgtactgaggattattttgatagaaaggactggtatgatcctgtcgagaat

SEQ ID NO: 4416 - DNA, 80 bp, synthetic construct
  misc_feature 1..80: note = Synthetic: >SBB-797-cand-13280-13359
  source 1..80: mol_type = other DNA
tttggtattacgtggttgttgtactgaggattattttgatagaaaggattggtatgatcctgtcgagaatccggacatca

SEQ ID NO: 4417 - DNA, 80 bp, synthetic construct
  misc_feature 1..80: note = Synthetic: >SBB-797-cand-13200-13279
  source 1..80: mol_type = other DNA
ctcactaagtatacaatggctgacttggtttatagtttacgccattttgataataataactgcgatatgctaaaagaaat

SEQ ID NO: 4418 - DNA, 80 bp, synthetic construct
  misc_feature 1..80: note = Synthetic: >SBB-747-cand-13190-13269
  source 1..80: mol_type = other DNA
gcgtgagcgtctcactaagtatacaatggctgacttggtttatagtttacgccattttgataacaataactgcgatatgc

SEQ ID NO: 4419 - DNA, 80 bp, synthetic construct
  misc_feature 1..80: note = Synthetic: >PRD-0038-cand-19670-19749
  source 1..80: mol_type = other DNA
ctgaaacaaaaatactcaacaatttgggtgttgacattgtttctaacacagtaatctgggactacaagcgagagtcacca

SEQ ID NO: 4420 - DNA, 80 bp, synthetic construct
  misc_feature 1..80: note = Synthetic: >PDF-2370-cand-19680-19759
  source 1..80: mol_type = other DNA
aatactcaacaatctgggtgttgacattgtttctaacacagtaatctgggactacaagcgagagtcaccagcattcatgt

SEQ ID NO: 4421 - DNA, 80 bp, synthetic construct
  misc_feature 1..80: note = Synthetic: >SBB-747-cand-630-709
  source 1..80: mol_type = other DNA
accaaaggaggtaccggctctctgggatgggtttgttgaccccgaagagtgtgtggacccctatttagattttcctgatt

SEQ ID NO: 4422 - DNA, 80 bp, synthetic construct
  misc_feature 1..80: note = Synthetic: >SBB-726-cand-640-719
  source 1..80: mol_type = other DNA
gtaccggctctctgggatgggtttgttgaccccgaagagtgtgtggacccctatttagattttcctgattactgttgtcc

SEQ ID NO: 4423 - DNA, 80 bp, synthetic construct
  misc_feature 1..80: note = Synthetic: >SBB-747-cand-15910-15989
  source 1..80: mol_type = other DNA
ttgggctttacaagaatatatgtactggtagtccagatgtagctgactttaatagtctagctacttgtgattggagtaac

SEQ ID NO: 4424 - DNA, 80 bp, synthetic construct
  misc_feature 1..80: note = Synthetic: >SBB-797-cand-15920-15999
  source 1..80: mol_type = other DNA
caagaatatatgtactggtagtccagatgtagctgactttaatagtctagctacttgtgattggagtaacagtaaggact

SEQ ID NO: 4425 - DNA, 80 bp, synthetic construct
  misc_feature 1..80: note = Synthetic: >SBB-747-cand-16550-16629
  source 1..80: mol_type = other DNA
aatcgtttacacggcatgtagtcatgctgcggtggacgcattatgtgagaaggcacataagaatttacctattaataggt

SEQ ID NO: 4426 - DNA, 80 bp, synthetic construct
  misc_feature 1..80: note = Synthetic: >SBB-797-cand-16560-16639
  source 1..80: mol_type = other DNA
acggcatgtagtcatgctgctgtggacgcactatgtgagaaggcacataagaatttacctattaataggtgtagtcgtat

SEQ ID NO: 4427 - DNA, 80 bp, synthetic construct
  misc_feature 1..80: note = Synthetic: >SBB-788-cand-6160-6239
  source 1..80: mol_type = other DNA
acggattttgtacgtggcactaatccaggtgcaaaatgcgtgggtcttttgtgtatcttttatcaattgttgatgagatt

SEQ ID NO: 4428 - DNA, 80 bp, synthetic construct
  misc_feature 1..80: note = Synthetic: >SBB-726-cand-6170-6249
  source 1..80: mol_type = other DNA
tacgtggtactaatccaggtgcaaaatgcgtgggtcttttgtgtatcttttatcaattgttgatgagattttggttgtta

SEQ ID NO: 4429 - DNA, 80 bp, synthetic construct
  misc_feature 1..80: note = Synthetic: >SBB-024-cand-11270-11349
  source 1..80: mol_type = other DNA
gagcaagcagcagcacaaatgtataaagaggctagggctgttaataggaagtctaaggttattagtgcaatgcattcatt

SEQ ID NO: 4430 - DNA, 80 bp, synthetic construct
  misc_feature 1..80: note = Synthetic: >SBB-120-cand-11280-11359
  source 1..80: mol_type = other DNA
cagcacaaatgtataaagaggctagggctgttaacagaaagtctaaagttattagtgcaatgcattcgctactttttggc

SEQ ID NO: 4431 - DNA, 80 bp, synthetic construct
  misc_feature 1..80: note = Synthetic: >SBB-010-cand-18960-19039
  source 1..80: mol_type = other DNA
aattacatacggcatgcttaatggtgttcctgtagctactgttgacaagaaacctgtcacttggtacatttatgtaagga

SEQ ID NO: 4432 - DNA, 80 bp, synthetic construct
  misc_feature 1..80: note = Synthetic: >SBB-130-cand-18960-19039
  source 1..80: mol_type = other DNA
tacatacggtatgcttaatggtgttcctgtagctactgttgacaagaaacctgtcacttggtacatttatgtaaggaagg

SEQ ID NO: 4433 - DNA, 80 bp, synthetic construct
  misc_feature 1..80: note = Synthetic: >GCS-211-cand-22460-22539
  source 1..80: mol_type = other DNA
aattatactacaagtctaaatgatgccaacagtgtgtcacaacattctggcacttgtccttttactttggacactttgaa

SEQ ID NO: 4434 - DNA, 80 bp, synthetic construct
  misc_feature 1..80: note = Synthetic: >GCS-227-cand-22450-22529
  source 1..80: mol_type = other DNA
cagttctcaattataacacaagtaaaaatgatgtcaacagtgtgtcacaacattctggcacttgtccttttactttggac

SEQ ID NO: 4435 - DNA, 80 bp, synthetic construct
  misc_feature 1..80: note = Synthetic: >GCS-227-cand-7050-7129
  source 1..80: mol_type = other DNA
cattcattaaacatgttttgtatggttgtgaaaagactgattgtgttgcatgtagccgtagtgctcgtctcaccagaatt

SEQ ID NO: 4436 - DNA, 80 bp, synthetic construct
  misc_feature 1..80: note = Synthetic: >GCS-211-cand-7050-7129
  source 1..80: mol_type = other DNA
cgcattcattaaacatgttttgtatggttgtgaaaagactgattgtgttgcatgtagccgtagtgctcgtctcaccagaa

SEQ ID NO: 4437 - DNA, 80 bp, synthetic construct
  misc_feature 1..80: note = Synthetic: >GCS-211-cand-2170-2249
  source 1..80: mol_type = other DNA
tctaattataatagtgaacttgttcgctattgttgtaagattgttgatggtgttgtagaggtccaccgtgagtttcaatt

SEQ ID NO: 4438 - DNA, 80 bp, synthetic construct
  misc_feature 1..80: note = Synthetic: >GCS-227-cand-2170-2249
  source 1..80: mol_type = other DNA
taattataatagtgaacttgttcgctattgttgtaagattgttgatggtgttgtagaggtccaccgggagtttcaatttg

SEQ ID NO: 4439 - DNA, 80 bp, synthetic construct
  misc_feature 1..80: note = Synthetic: >SBB-120-cand-13120-13199
  source 1..80: mol_type = other DNA
aattgcatggctagtgagtgctttatgaagagtgacatttttggtgatgattttaaaacgtttgacctcttacactatga

SEQ ID NO: 4440 - DNA, 80 bp, synthetic construct
  misc_feature 1..80: note = Synthetic: >SBB-122-cand-18270-18349
  source 1..80: mol_type = other DNA
accattcttcttttatgatgatggtccttgtgatcgtgtgcaggaggagattaattatgtgccgttgcgtgcctccaatt

SEQ ID NO: 4441 - DNA, 80 bp, synthetic construct
  misc_feature 1..80: note = Synthetic: >GCS-211-cand-4650-4729
  source 1..80: mol_type = other DNA
aattgtacagtctttggatgctatgataaaagcagccaaaggtcgtcatgttaagtgtttcgtgtatttggacgaggagg

SEQ ID NO: 4442 - DNA, 80 bp, synthetic construct
  misc_feature 1..80: note = Synthetic: >GCS-227-cand-4650-4729
  source 1..80: mol_type = other DNA
ttgtacagtctttggatgctatgataaaagcagccaaaggtcgtcatgttaagtgtttcgtgtatttggacgaggaggtg

SEQ ID NO: 4443 - DNA, 80 bp, synthetic construct
  misc_feature 1..80: note = Synthetic: >GCS-211-cand-8320-8399
  source 1..80: mol_type = other DNA
aattgtcctattgtcgttggtgttagcgatgctggtactaccatacctggtgttccttcagatgttctcatttttgaaaa

SEQ ID NO: 4444 - DNA, 80 bp, synthetic construct
  misc_feature 1..80: note = Synthetic: >GCS-227-cand-8320-8399
  source 1..80: mol_type = other DNA
ttgtcctattgtcgttggtgttagcgatgctggtactaccatacctggtgttccttcagatgttctcatttttgaaaaga

SEQ ID NO: 4445 - DNA, 80 bp, synthetic construct
  misc_feature 1..80: note = Synthetic: >SBB-010-cand-17690-17769
  source 1..80: mol_type = other DNA
acatacagcaatggggttatacagggtctcttagccataatcatcatgaaatttgcaatgttcatcgtaatgagcatgta

SEQ ID NO: 4446 - DNA, 80 bp, synthetic construct
  misc_feature 1..80: note = Synthetic: >SBB-130-cand-17690-17769
  source 1..80: mol_type = other DNA
tacagcaatggggttatacagggtctcttagccataatcatcatgaagtttgcaatgttcatcgtaatgagcatgtagca

SEQ ID NO: 4447 - DNA, 80 bp, synthetic construct
  misc_feature 1..80: note = Synthetic: >SBB-788-cand-20890-20969
  source 1..80: mol_type = other DNA
gagatgttggtgatattgttaatgttaccactagtttctgctagaccatcttgtgttactattagtaacttacagtatgt

SEQ ID NO: 4448 - DNA, 80 bp, synthetic construct
  misc_feature 1..80: note = Synthetic: >GCS-211-cand-1210-1289
  source 1..80: mol_type = other DNA
accaccatggacaatgtcgcactatggcgtgttttgaaagtccaagcgtgtaatacagttgcaagctctggtaactatgt

SEQ ID NO: 4449 - DNA, 80 bp, synthetic construct
  misc_feature 1..80: note = Synthetic: >GCS-227-cand-1210-1289
  source 1..80: mol_type = other DNA
caccatggacaatgtcgcactatggcgtgttttgaaagtccaagcgtgtaatacagttgcaagctctggtaactatgttg

SEQ ID NO: 4450 - DNA, 80 bp, synthetic construct
  misc_feature 1..80: note = Synthetic: >GCS-227-cand-1850-1929
  source 1..80: mol_type = other DNA
gtaggccccactactaaggtgaaagctacgcatgtgcaaacgtgtgatagtaaattaactattagtagtgccagtcatgt

SEQ ID NO: 4451 - DNA, 80 bp, synthetic construct
  misc_feature 1..80: note = Synthetic: >GCS-211-cand-1850-1929
  source 1..80: mol_type = other DNA
gtgtaggccccactactaaggtgaaagctacgcatgtgcaaacgtgtgatagtaaattaactattagtagtgccagtcat

SEQ ID NO: 4452 - DNA, 80 bp, synthetic construct
  misc_feature 1..80: note = Synthetic: >SBB-122-cand-10150-10229
  source 1..80: mol_type = other DNA
atctgttcttctcatgtttttgctcaaacataagatattgtttttgtacacttttctcataccagcaattgtagtaatgt

SEQ ID NO: 4453 - DNA, 80 bp, synthetic construct
  misc_feature 1..80: note = Synthetic: >GCS-227-cand-1610-1689
  source 1..80: mol_type = other DNA
ggtgctgttaaaattgtagccgaggtccctagtgagcttagcttagcttttgacaagttttgtgagcttgttgagaatgt

SEQ ID NO: 4454 - DNA, 80 bp, synthetic construct
  misc_feature 1..80: note = Synthetic: >GCS-211-cand-1610-1689
  source 1..80: mol_type = other DNA
acggtgctgttaaaattgtagccgaggtccctagtgagcttagctttgcttttgacaagttttgtgagcttgttgagaat

SEQ ID NO: 4455 - DNA, 80 bp, synthetic construct
  misc_feature 1..80: note = Synthetic: >GCS-227-cand-1770-1849
  source 1..80: mol_type = other DNA
acattgtcgaacttgtcaagactaaggttgttggttctaagcaggctggtttgcagaacatgacatattttgctacccgt

SEQ ID NO: 4456 - DNA, 80 bp, synthetic construct
  misc_feature 1..80: note = Synthetic: >GCS-211-cand-1770-1849
  source 1..80: mol_type = other DNA
tcacattgtcgaacttgtcaagactaaggttgttggttctaagcaggctggtttgcagaacatgacatattttgctaccc

SEQ ID NO: 4457 - DNA, 80 bp, synthetic construct
  misc_feature 1..80: note = Synthetic: >SBB-010-cand-6000-6079
  source 1..80: mol_type = other DNA
acattgttgctgtgctgttatggcttttcagtatgtttagcttgttgtttaaagcttttaaacaaaaggatgtgcgtgtg

SEQ ID NO: 4458 - DNA, 80 bp, synthetic construct
  misc_feature 1..80: note = Synthetic: >SBB-024-cand-6010-6089
  source 1..80: mol_type = other DNA
tgtgctgttatggcttttcagtatgtttagtttgttgtttaaagcttttaaacaaaaggatgtgcgtgtgtttgcgtccg

SEQ ID NO: 4459 - DNA, 80 bp, synthetic construct
  misc_feature 1..80: note = Synthetic: >GCS-227-cand-8080-8159
  source 1..80: mol_type = other DNA
atttccgtggagatatgtgtggtttttctgcagttttgtcatcacctcttaccttgccttgacatactttgctagtggat

SEQ ID NO: 4460 - DNA, 80 bp, synthetic construct
  misc_feature 1..80: note = Synthetic: >GCS-211-cand-8080-8159
  source 1..80: mol_type = other DNA
caatttccgtggagatatgtgtggtttttctgcagttttgtcatcaccttttaccttgccttgacatactttgctagtgg

SEQ ID NO: 4461 - DNA, 80 bp, synthetic construct
  misc_feature 1..80: note = Synthetic: >GCS-211-cand-8160-8239
  source 1..80: mol_type = other DNA
atcccctatgttagctagttttagtggttttgattttaagtacatagaaaacggtcaacttaaaaagtttgatacaggca

SEQ ID NO: 4462 - DNA, 80 bp, synthetic construct
  misc_feature 1..80: note = Synthetic: >GCS-227-cand-8160-8239
  source 1..80: mol_type = other DNA
cccctatgttagctagttttagtggttttgattttaagtacatagaaaacggtcaacttaaaaagtttgatacaggcatc

SEQ ID NO: 4463 - DNA, 80 bp, synthetic construct
  misc_feature 1..80: note = Synthetic: >SBB-122-cand-22240-22319
  source 1..80: mol_type = other DNA
ttttgcttggcaggtatggtggcttctgtcaaaaagttgaagctgacataaagggttctggcaacctgctcgatggcgat

SEQ ID NO: 4464 - DNA, 80 bp, synthetic construct
  misc_feature 1..80: note = Synthetic: >SBB-120-cand-22250-22329
  source 1..80: mol_type = other DNA
caggtatggtggcttctgtcaaaaagttgaagctgacataaagggctctggcaacctgcttgatggcgatattagtagtc

SEQ ID NO: 4465 - DNA, 80 bp, synthetic construct
  misc_feature 1..80: note = Synthetic: >SBB-120-cand-1460-1539
  source 1..80: mol_type = other DNA
ttgaacaaaccgtggtttgtccgagaacttgaagaacttataggaagtgcatggaatgcttttgtggctggtgttaagat

SEQ ID NO: 4466 - DNA, 80 bp, synthetic construct
  misc_feature 1..80: note = Synthetic: >SBB-010-cand-1470-1549
  source 1..80: mol_type = other DNA
cgtggtttgtccgagaacttgaagaacttataggcagtgcatggaatgcttttgttgctggtgttaagctgctagcacac

SEQ ID NO: 4467 - DNA, 80 bp, synthetic construct
  misc_feature 1..80: note = Synthetic: >SBB-120-cand-19210-19289
  source 1..80: mol_type = other DNA
gatgtgtctaagactacattaggaggactacacctcttaatatctcaagttcgcttacaaaagttaggtgttcttaagat

SEQ ID NO: 4468 - DNA, 80 bp, synthetic construct
  misc_feature 1..80: note = Synthetic: >SBB-130-cand-19200-19279
  source 1..80: mol_type = other DNA
ttatggtgatgtgtccaaaactacattaggaggactacacctcttaatatctcaagttcgcttacaaaagttaggtgttc

SEQ ID NO: 4469 - DNA, 80 bp, synthetic construct
  misc_feature 1..80: note = Synthetic: >GCS-227-cand-25650-25729
  source 1..80: mol_type = other DNA
atcttattgatttctgtcacactccttaaactcatacaactttgttttgcatgccatcaatttgcgtccagaacagttta

SEQ ID NO: 4470 - DNA, 80 bp, synthetic construct
  misc_feature 1..80: note = Synthetic: >GCS-211-cand-25660-25739
  source 1..80: mol_type = other DNA
gatttctgtcacactccttaaactcatacaactttgttttgcatgccatcaatttgcgtccagaacagtttatgtgccta

SEQ ID NO: 4471 - DNA, 80 bp, synthetic construct
  misc_feature 1..80: note = Synthetic: >GCS-211-cand-23820-23899
  source 1..80: mol_type = other DNA
ttgatcgtgttggtggtgctattgaacagaccgcacaaggcttagttacagttgctaatgccttgaataaagtacaagat

SEQ ID NO: 4472 - DNA, 80 bp, synthetic construct
  misc_feature 1..80: note = Synthetic: >GCS-227-cand-23810-23889
  source 1..80: mol_type = other DNA
tcaggcttttgatcgtgttggtggtgctattgaacagaccgcacaaggcttagttacagttgctaatgccttgaataaag

SEQ ID NO: 4473 - DNA, 80 bp, synthetic construct
  misc_feature 1..80: note = Synthetic: >GCS-211-cand-27650-27729
  source 1..80: mol_type = other DNA
atgaatgaagaactcaactaaacatgagattcctcttgcttctagcccttgttggtgctgcaattacaagccctatttcc

SEQ ID NO: 4474 - DNA, 80 bp, synthetic construct
  misc_feature 1..80: note = Synthetic: >GCS-227-cand-27650-27729
  source 1..80: mol_type = other DNA
gaatgaagaactcaactaaacatgagattcctcttgcttctagcccttgttggtgctgcaattacaagccctatttccta

SEQ ID NO: 4475 - DNA, 80 bp, synthetic construct
  misc_feature 1..80: note = Synthetic: >AlphaCoV1-cand-13450-13529
  source 1..80: mol_type = other DNA
tatgatttactagcttatgatttcacagaccataaggaaaaacttttccaaaaatactttaagcactgggatcgaacata

SEQ ID NO: 4476 - DNA, 80 bp, synthetic construct
  misc_feature 1..80: note = Synthetic: >AlphaCoV1-cand-13530-13609
  source 1..80: mol_type = other DNA
ccaccctaattgctctgattgtacaagtgatgagtgtattattcattgtgctaattttaacacattgttttcaatgacca

SEQ ID NO: 4477 - DNA, 80 bp, synthetic construct
  misc_feature 1..80: note = Synthetic: >AlphaCoV1-cand-13610-13689
  source 1..80: mol_type = other DNA
taccaatgactgcttttggaccacttgtccgtaaagttcacattgatggtgtaccagtagttgttactgcaggttaccat

SEQ ID NO: 4478 - DNA, 80 bp, synthetic construct
  misc_feature 1..80: note = Synthetic: >AlphaCoV1-cand-13690-13769
  source 1..80: mol_type = other DNA
ttcaaacaacttggtatagtatggaatcttgatgttaaattagacactatgaagttgactatgactgatcttcttagatt

SEQ ID NO: 4479 - DNA, 80 bp, synthetic construct
  misc_feature 1..80: note = Synthetic: >AlphaCoV1-cand-13770-13849
  source 1..80: mol_type = other DNA
tgtcacagatcctacacttcttgtagcatcaagccctgcattgttagatcagcgtactgtctgtttctccattgcagctt

SEQ ID NO: 4480 - DNA, 80 bp, synthetic construct
  misc_feature 1..80: note = Synthetic: >AlphaCoV1-cand-13850-13929
  source 1..80: mol_type = other DNA
tgagtactggtgttacatatcagacagtaaaaccaggtcactttaacaaagatttctacgattttataacagagcgtgga

SEQ ID NO: 4481 - DNA, 80 bp, synthetic construct
  misc_feature 1..80: note = Synthetic: >AlphaCoV1-cand-13930-14009
  source 1..80: mol_type = other DNA
ttctttgaagagggatctgagttaacattaaaacactttttctttgcacagggtggtgaagctgctatgacagacttcaa

SEQ ID NO: 4482 - DNA, 80 bp, synthetic construct
  misc_feature 1..80: note = Synthetic: >AlphaCoV1-cand-14010-14089
  source 1..80: mol_type = other DNA
ttattatcgctacaatagagtcacagtacttgatatttgccaagctcaatttgtttacaaaatagttggcaagtattttg

SEQ ID NO: 4483 - DNA, 80 bp, synthetic construct
  misc_feature 1..80: note = Synthetic: >AlphaCoV1-cand-14090-14169
  source 1..80: mol_type = other DNA
aatgttatgatggtgggtgcattaatgctcgtgaagttgttgttacaaactatgataagagtgctggttatcctctgaac

SEQ ID NO: 4484 - DNA, 80 bp, synthetic construct
  misc_feature 1..80: note = Synthetic: >AlphaCoV1-cand-14180-14259
  source 1..80: mol_type = other DNA
aagctagactttactacgaaactctttcatatgaagagcaggatgcactttttgctttaacaaagagaaatgttctaccc

SEQ ID NO: 4485 - DNA, 80 bp, synthetic construct
  misc_feature 1..80: note = Synthetic: >AlphaCoV1-cand-14260-14339
  source 1..80: mol_type = other DNA
acaatgactcaaatgaatttgaaatatgctatttctggtaaggcaagagctcgtacagtaggaggagtttcacttctttc

SEQ ID NO: 4486 - DNA, 80 bp, synthetic construct
  misc_feature 1..80: note = Synthetic: >AlphaCoV1-cand-14340-14419
  source 1..80: mol_type = other DNA
taccatgactacgagacaataccaccagaagcatttgaagtcaattgctgcaacacgtaatgctactgtggttattggtt

SEQ ID NO: 4487 - DNA, 80 bp, synthetic construct
  misc_feature 1..80: note = Synthetic: >AlphaCoV1-cand-14420-14499
  source 1..80: mol_type = other DNA
caaccaagttttatggtggttgggacaatatgcttaaaaatttgatgcgtgatgttgataatggttgtttgatgggatgg

SEQ ID NO: 4488 - DNA, 80 bp, synthetic construct
  misc_feature 1..80: note = Synthetic: >AlphaCoV1-cand-14500-14579
  source 1..80: mol_type = other DNA
gactatccaaagtgtgaccgtgctttacctaatatgattagaatggcttctgccatgatattgggttctaagcacgttgg

SEQ ID NO: 4489 - DNA, 80 bp, synthetic construct
  misc_feature 1..80: note = Synthetic: >AlphaCoV1-cand-14580-14659
  source 1..80: mol_type = other DNA
ttgttgtacacatagtgataggttctatcgcctctccaatgagttagctcaagtactcacagaagttgtgcattgcacag

SEQ ID NO: 4490 - DNA, 80 bp, synthetic construct
  misc_feature 1..80: note = Synthetic: >AlphaCoV1-cand-14660-14739
  source 1..80: mol_type = other DNA
gtggtttttatattaaacctggtggtacaactagtggtgatggtactacagcatatgctaactctgcttttaacatcttt

SEQ ID NO: 4491 - DNA, 80 bp, synthetic construct
  misc_feature 1..80: note = Synthetic: >AlphaSp-cand-3690-3769
  source 1..80: mol_type = other DNA
ttgttacgagtctcagcgtgctatctttggttctttgggtgatgtctctgcttgtttggagtcattgttaaaagaccgtg

SEQ ID NO: 4492 - DNA, 80 bp, synthetic construct
  misc_feature 1..80: note = Synthetic: >AlphaSp-cand-3770-3849
  source 1..80: mol_type = other DNA
atggcatgtctataacttgtacaatcgaatgtggttgtggtcctggtgttagagtgtacgaaaatgccatttttcgtttt

SEQ ID NO: 4493 - DNA, 80 bp, synthetic construct
  misc_feature 1..80: note = Synthetic: >AlphaSp-cand-3850-3929
  source 1..80: mol_type = other DNA
acaccgcttaaggctgcatttcccatgggacgttgtttaatatgttctaagactcttatgcacacaataacacagatgaa

SEQ ID NO: 4494 - DNA, 80 bp, synthetic construct
  misc_feature 1..80: note = Synthetic: >AlphaSp-cand-3930-4009
  source 1..80: mol_type = other DNA
gggtactggtatcttttgtagagatgccaccgctttagatgttgacacattggttgcaaaacctttatgtgcagctgtgt

SEQ ID NO: 4495 - DNA, 80 bp, synthetic construct
  misc_feature 1..80: note = Synthetic: >AlphaSp-cand-4010-4089
  source 1..80: mol_type = other DNA
atgtgggagctcaagatggtgggcattacttgacaaacatgtatgacgccaatatggctgttgacggtcatggtagacac

SEQ ID NO: 4496 - DNA, 80 bp, synthetic construct
  misc_feature 1..80: note = Synthetic: >AlphaSp-cand-4090-4169
  source 1..80: mol_type = other DNA
cctattaagttcaacacaatcaacactttatgttataaggatgttgattgggagatgtctaatggttcttgtggtgagac

SEQ ID NO: 4497 - DNA, 80 bp, synthetic construct
  misc_feature 1..80: note = Synthetic: >AlphaSp-cand-4170-4249
  source 1..80: mol_type = other DNA
actcaaaccatttttgacttacaagaacattgagttttaccaaggtgaacttagtgctttgttgtctgtgaaccatgatt

SEQ ID NO: 4498 - DNA, 80 bp, synthetic construct
  misc_feature 1..80: note = Synthetic: >AlphaSp-cand-4250-4329
  source 1..80: mol_type = other DNA
ttgttgttaatgcagctaatgaacaactttcacatggtggtggaattgctaaggctttggatgatctcactaaaggtgaa

SEQ ID NO: 4499 - DNA, 80 bp, synthetic construct
  misc_feature 1..80: note = Synthetic: >AlphaSp-cand-4330-4409
  source 1..80: mol_type = other DNA
ttgcaagtgttgtctaaccagtacgttaagcgtaatggtcgcattaaagttggtagtggtgtgcttattaagtgcaaaga

SEQ ID NO: 4500 - DNA, 80 bp, synthetic construct
  misc_feature 1..80: note = Synthetic: >AlphaSp-cand-4410-4489
  source 1..80: mol_type = other DNA
acattccatccttaatgttgtgggaccacgcaaaggtaaacacgcagcagagttgttgacaaaagcttatacttttgttt

SEQ ID NO: 4501 - DNA, 80 bp, synthetic construct
  misc_feature 1..80: note = Synthetic: >AlphaSp-cand-4490-4569
  source 1..80: mol_type = other DNA
tcaagcagaagggtgttcctttgatgccactccttagtgtaggcatttttaaagtgccaattgatgagtctttagctgca

SEQ ID NO: 4502 - DNA, 80 bp, synthetic construct
  misc_feature 1..80: note = Synthetic: >AlphaSp-cand-4570-4649
  source 1..80: mol_type = other DNA
tttttggcttgtgcaggtgacagagtttgtaagtgtttttgttacactgacaaagaacgtcttgccattcaaaactttgt

SEQ ID NO: 4503 - DNA, 80 bp, synthetic construct
  misc_feature 1..80: note = Synthetic: >AlphaSp-cand-4650-4729
  source 1..80: mol_type = other DNA
taccaattttcaaacagaacaacctgttgacccattacctgttattcaggtggtgaaaggtgctcaattagaaaaacctg

SEQ ID NO: 4504 - DNA, 80 bp, synthetic construct
  misc_feature 1..80: note = Synthetic: >AlphaSp-cand-4730-4809
  source 1..80: mol_type = other DNA
ttcctgatgtcaaggttgaaaatccttgtgaaccttttagaattgaaggcgatgctaaattttacgatttgacaccttct

SEQ ID NO: 4505 - DNA, 80 bp, synthetic construct
  misc_feature 1..80: note = Synthetic: >AlphaSp-cand-4810-4889
  source 1..80: mol_type = other DNA
atggttcagtctcttcaggttacaaggttggtctcttttacaaacagtgatttatgtcttggttcttttgttagtgactg

SEQ ID NO: 4506 - DNA, 80 bp, synthetic construct
  misc_feature 1..80: note = Synthetic: >AlphaSp-cand-4890-4969
  source 1..80: mol_type = other DNA
tgatggttacgttcaaggttcacttggcagtgccattgacaactacaagaagtctaacccaattttgcctgctggtaatt

SEQ ID NO: 4507 - DNA, 80 bp, synthetic construct
  misc_feature 1..80: note = Synthetic: >Anlong-cand-3460-3539
  source 1..80: mol_type = other DNA
gtgagtcactttgtgcaacgttgttatgaatctgtcggtgctgttaagggtagtttgggtgatgttactcagcttctcga

SEQ ID NO: 4508 - DNA, 80 bp, synthetic construct
  misc_feature 1..80: note = Synthetic: >Anlong-cand-3540-3619
  source 1..80: mol_type = other DNA
gcgtctctgtaaggatgtcaaatcacttaaggtgacatgtaatgttgcatgtgattgtggcacctcagtaaaagtacttg

SEQ ID NO: 4509 - DNA, 80 bp, synthetic construct
  misc_feature 1..80: note = Synthetic: >Anlong-cand-3620-3699
  source 1..80: mol_type = other DNA
aaggttgtgtttttcactttatgcctgtcgctgatgcatttccatatggtgtgtgtggtacctgtaagcaggttgctatg

SEQ ID NO: 4510 - DNA, 80 bp, synthetic construct
  misc_feature 1..80: note = Synthetic: >Anlong-cand-3700-3779
  source 1..80: mol_type = other DNA
cataccattaagagcattgaaggcactggtttcttttgtcaagaaccagcaccttttgatattacgaagtcattgtgttc

SEQ ID NO: 4511 - DNA, 80 bp, synthetic construct
  misc_feature 1..80: note = Synthetic: >Anlong-cand-3780-3859
  source 1..80: mol_type = other DNA
tattgcagccactgccacatatgttggcaaacagaatggcggccattatagaacaaatgactttgttcatggtaacgccg

SEQ ID NO: 4512 - DNA, 80 bp, synthetic construct
  misc_feature 1..80: note = Synthetic: >Anlong-cand-3860-3939
  source 1..80: mol_type = other DNA
ttgatggttctggtattacacctctaaattacactgcacctgttactaactgtcttgttgtaaatgttaactatgaagcc

SEQ ID NO: 4513 - DNA, 80 bp, synthetic construct
  misc_feature 1..80: note = Synthetic: >Anlong-cand-3940-4019
  source 1..80: mol_type = other DNA
cccacaccgccagttaaagtgaaactcagcccctttaaagttgttgacaatgtagaattctataagggagagttttctga

SEQ ID NO: 4514 - DNA, 80 bp, synthetic construct
  misc_feature 1..80: note = Synthetic: >Anlong-cand-4020-4099
  source 1..80: mol_type = other DNA
actcgcacaattggaatttgattttgttgttaatgcagctaatgagaacctgagtcatggtggtggtgttgcaaaagcta

SEQ ID NO: 4515 - DNA, 80 bp, synthetic construct
  misc_feature 1..80: note = Synthetic: >Anlong-cand-4100-4179
  source 1..80: mol_type = other DNA
tagatgattacactaaaggacagttacagcttctttcaaagacatatgttaagagcaatggtcgtgtgcgtactggttct

SEQ ID NO: 4516 - DNA, 80 bp, synthetic construct
  misc_feature 1..80: note = Synthetic: >Anlong-cand-4180-4259
  source 1..80: mol_type = other DNA
ggtgccatgatcaagtgtaaagcttttgatgtcttgaatgtggttggaccaaagaaaggtggtaaaagttggcaaaaact

SEQ ID NO: 4517 - DNA, 80 bp, synthetic construct
  misc_feature 1..80: note = Synthetic: >Anlong-cand-4260-4339
  source 1..80: mol_type = other DNA
attgcgctttgcttatgagacaatctttaagaatgatggtgtgccacttacaccactacttagttgtggtatctttggtg

SEQ ID NO: 4518 - DNA, 80 bp, synthetic construct
  misc_feature 1..80: note = Synthetic: >Anlong-cand-4340-4419
  source 1..80: mol_type = other DNA
ttccactagaagactcattaaaaacacttcttgaaacatgtggtgatagacgagttaaatgctttgtctacactagtgat

SEQ ID NO: 4519 - DNA, 80 bp, synthetic construct
  misc_feature 1..80: note = Synthetic: >Anlong-cand-4420-4499
  source 1..80: mol_type = other DNA
gaagagcagaaggttgtggcatttttcgacagcttaaaggttcaagatgaagcagttgttgaagaagaagtaaaaccata

SEQ ID NO: 4520 - DNA, 80 bp, synthetic construct
  misc_feature 1..80: note = Synthetic: >Anlong-cand-4500-4579
  source 1..80: mol_type = other DNA
taggaaagagggtaaatacgccttctatgattgtgatgctgcagccgtgctaaagcttaaacctgataacattgtcatat

SEQ ID NO: 4521 - DNA, 80 bp, synthetic construct
  misc_feature 1..80: note = Synthetic: >Anlong-cand-4580-4659
  source 1..80: mol_type = other DNA
ttacagacagtaaactgacattggctggtgcaggtttggattttgacgaatgtttaaataaaagattgtctgcagctata

SEQ ID NO: 4522 - DNA, 80 bp, synthetic construct
  misc_feature 1..80: note = Synthetic: >Anlong-cand-4660-4739
  source 1..80: mol_type = other DNA
aaagagtgtattgacgtaaataaagcaatacctactggtaatgctattaagtttgagtgtaacccaactatatatatggc

SEQ ID NO: 4523 - DNA, 80 bp, synthetic construct
  misc_feature 1..80: note = Synthetic: >Beluga-cand-17630-17709
  source 1..80: mol_type = other DNA
ttccattgctggaaacacagctttgggtgtgattttctttataatccatatttggtagatgtccaacaatggggctattc

SEQ ID NO: 4524 - DNA, 80 bp, synthetic construct
  misc_feature 1..80: note = Synthetic: >Beluga-cand-17710-17789
  source 1..80: mol_type = other DNA
tggtaatttaagtagcaatcatgatcggtattgtaatatgcatggtaatgctcatgttgcatcagcagatgctaagatga

SEQ ID NO: 4525 - DNA, 80 bp, synthetic construct
  misc_feature 1..80: note = Synthetic: >Beluga-cand-17790-17869
  source 1..80: mol_type = other DNA
ctcgttgtttggcagtttatgattgctttgttaagaatataaattgggatgttgaatatcctattattgctaatgaagag

SEQ ID NO: 4526 - DNA, 80 bp, synthetic construct
  misc_feature 1..80: note = Synthetic: >Beluga-cand-17870-17949
  source 1..80: mol_type = other DNA
gacgtcaataggtgttgtcgtcatctgcagaagctgtttgtgaaatcagtttgcataggtatgaactatgacaaagtgca

SEQ ID NO: 4527 - DNA, 80 bp, synthetic construct
  misc_feature 1..80: note = Synthetic: >Beluga-cand-17950-18029
  source 1..80: mol_type = other DNA
tgacattggaaaccctaagggtataaagagtgctaatggtatcagcttcaatttttatgataaagatcccgttgctgata

SEQ ID NO: 4528 - DNA, 80 bp, synthetic construct
  misc_feature 1..80: note = Synthetic: >Beluga-cand-18030-18109
  source 1..80: mol_type = other DNA
atgtcataaggcttgattacgattatgatagtatgtgtgagagattcaaagatggcctagccctcttctggaattgcaat

SEQ ID NO: 4529 - DNA, 80 bp, synthetic construct
  misc_feature 1..80: note = Synthetic: >Beluga-cand-18110-18189
  source 1..80: mol_type = other DNA
gtaaattgctatccagataatgcgctagtatgtcgctttgatacgcgtactttgaatgcattaaatttgccaggttgtaa

SEQ ID NO: 4530 - DNA, 80 bp, synthetic construct
  misc_feature 1..80: note = Synthetic: >Beluga-cand-18190-18269
  source 1..80: mol_type = other DNA
tggaggtagtttgtatgtgaataaacatgcattccacaccgaaaagtacgaccgcagtgcctttagaaatctgaagagta

SEQ ID NO: 4531 - DNA, 80 bp, synthetic construct
  misc_feature 1..80: note = Synthetic: >Beluga-cand-18270-18349
  source 1..80: mol_type = other DNA
tgccattcttcttttttgatgattcaccatgcgacgtcaagttagtaaatgatgttgctcaagatttagttgctttgtca

SEQ ID NO: 4532 - DNA, 80 bp, synthetic construct
  misc_feature 1..80: note = Synthetic: >Beluga-cand-18350-18429
  source 1..80: mol_type = other DNA
gctcgtgattgtattacaaggtgtaatataggaggagctgtatgttggaaacatgctaaggcttatgcagagtttgttca

SEQ ID NO: 4533 - DNA, 80 bp, synthetic construct
  misc_feature 1..80: note = Synthetic: >Beluga-cand-18430-18509
  source 1..80: mol_type = other DNA
tgcatataatacatgcactcttgctggctttaccttttgggtcagtgaaaaatttgatccttatgtattatggaagaaat

SEQ ID NO: 4534 - DNA, 80 bp, synthetic construct
  misc_feature 1..80: note = Synthetic: >Beluga-cand-18510-18589
  source 1..80: mol_type = other DNA
tctataagttacagtcactagaccagctggtggctaatgttgttaagcgtgatcattttgatgatgttaaggatgacgtc

SEQ ID NO: 4535 - DNA, 80 bp, synthetic construct
  misc_feature 1..80: note = Synthetic: >Beluga-cand-18590-18669
  source 1..80: mol_type = other DNA
ccttatgtcataactggagacaaagtgttttatagaaaggggcttcaagatgttttgatttttgagaacaagactagtat

SEQ ID NO: 4536 - DNA, 80 bp, synthetic construct
  misc_feature 1..80: note = Synthetic: >Beluga-cand-18670-18749
  source 1..80: mol_type = other DNA
ggctactagtattgcctttgaatattatgcacgccgcaacattgatgtcattcctaagagtgccatattgtatggtttag

SEQ ID NO: 4537 - DNA, 80 bp, synthetic construct
  misc_feature 1..80: note = Synthetic: >Beluga-cand-18750-18829
  source 1..80: mol_type = other DNA
gtgttgacgttacggcaggatttacattgtgggatagagagcttagtcagcctgtctttaatggtgttgtagacactagt

SEQ ID NO: 4538 - DNA, 80 bp, synthetic construct
  misc_feature 1..80: note = Synthetic: >Beluga-cand-18830-18909
  source 1..80: mol_type = other DNA
aaggttattgatatagaacccaatgaaaagttgtgtgttctctacgatgatagagtgaagggttctagacagagattttt

SEQ ID NO: 4539 - DNA, 80 bp, synthetic construct
  misc_feature 1..80: note = Synthetic: >BetaCoV1-cand-1210-1289
  source 1..80: mol_type = other DNA
gagatgaaaggtttgtgatgagtttgcaaacgtgtgctactatacgtagtattgcatacgtagcagacccaatggatgat

SEQ ID NO: 4540 - DNA, 80 bp, synthetic construct
  misc_feature 1..80: note = Synthetic: >BetaCoV1-cand-1290-1369
  source 1..80: mol_type = other DNA
ttggaaggtgaccaggttgttatgaaggagcctgttcatgttctaagcgccgatgccactgtaaagaagtttgttaaaat

SEQ ID NO: 4541 - DNA, 80 bp, synthetic construct
  misc_feature 1..80: note = Synthetic: >BetaCoV1-cand-1370-1449
  source 1..80: mol_type = other DNA
agcagacttaatgcaggtcactgatgctgtgtctgttatagaaactgtttataaagtccctataaaagattgtggctttg

SEQ ID NO: 4542 - DNA, 80 bp, synthetic construct
  misc_feature 1..80: note = Synthetic: >BetaCoV1-cand-1450-1529
  source 1..80: mol_type = other DNA
tgatgcagttcggtcatgttcagtgtgagcatgacgattgtgattttgttgggtggataccaggtaatatgatagatggt

SEQ ID NO: 4543 - DNA, 80 bp, synthetic construct
  misc_feature 1..80: note = Synthetic: >BetaCoV1-cand-1530-1609
  source 1..80: mol_type = other DNA
tttaagtgcccctctggccataagctgtatgcagctagcgaggttcaagctcaatcttctggagttataccacctaatgc

SEQ ID NO: 4544 - DNA, 80 bp, synthetic construct
  misc_feature 1..80: note = Synthetic: >BetaCoV1-cand-1610-1689
  source 1..80: mol_type = other DNA
tgtgttgtttactgaaagtactgccttgacctcgcaggactcttttaagatgtatggtatgtcagttgttccttttggtg

SEQ ID NO: 4545 - DNA, 80 bp, synthetic construct
  misc_feature 1..80: note = Synthetic: >BetaCoV1-cand-1690-1769
  source 1..80: mol_type = other DNA
gctgtgtttattggtcaccaggagctggcatctggttgcctatcatcatgtcatctgtgaaggcatatgatggtatgacc

SEQ ID NO: 4546 - DNA, 80 bp, synthetic construct
  misc_feature 1..80: note = Synthetic: >BetaCoV1-cand-1770-1849
  source 1..80: mol_type = other DNA
tttacaggttctgttggttttaaaaccattgttcaagagactgctgctatttgtcatgctttgtatttggattatgttca

SEQ ID NO: 4547 - DNA, 80 bp, synthetic construct
  misc_feature 1..80: note = Synthetic: >BetaCoV1-cand-1850-1929
  source 1..80: mol_type = other DNA
acataagtgtgcagatataaaacaacatgccattttgggtgttgatgatctttggcataagcagctgcttcttaatagag

SEQ ID NO: 4548 - DNA, 80 bp, synthetic construct
  misc_feature 1..80: note = Synthetic: >BetaCoV1-cand-1930-2009
  source 1..80: mol_type = other DNA
gtgattattctctcttgttagagaatgtggattattttatcatgcgccgcgctaagttttcggttgataacagcttggtc

SEQ ID NO: 4549 - DNA, 80 bp, synthetic construct
  misc_feature 1..80: note = Synthetic: >BetaCoV1-cand-2010-2089
  source 1..80: mol_type = other DNA
tgttctgaggggtttgcacctttcctgttggatggtgtagccgcgcgtgcgtattattttgtaaattgttgttttagtgc

SEQ ID NO: 4550 - DNA, 80 bp, synthetic construct
  misc_feature 1..80: note = Synthetic: >BetaCoV1-cand-2090-2169
  source 1..80: mol_type = other DNA
acctggcttgccagatagtttatgcaggctaggtattgaagtggagagctggtgtcggagcacattgtgtttgtgtattg

SEQ ID NO: 4551 - DNA, 80 bp, synthetic construct
  misc_feature 1..80: note = Synthetic: >BetaCoV1-cand-2170-2249
  source 1..80: mol_type = other DNA
acacagttcagggtgccacttcatttgtggtgaagaatttgaaagtctttttgtccaagttttatatctttggcaaaaag

SEQ ID NO: 4552 - DNA, 80 bp, synthetic construct
  misc_feature 1..80: note = Synthetic: >BetaCoV1-cand-2250-2329
  source 1..80: mol_type = other DNA
tttattaaaaatgttaaaatgttgggtgccaagctcgtagaagagtgggttgaaaagtttaacgcctttacagatgctac

SEQ ID NO: 4553 - DNA, 80 bp, synthetic construct
  misc_feature 1..80: note = Synthetic: >BetaCoV1-cand-2330-2409
  source 1..80: mol_type = other DNA
tgtttgtgctcttgcttgggttgtcctgcatgtcataaatggtgcttatttaatatttagaagatggcttccattttgtt

SEQ ID NO: 4554 - DNA, 80 bp, synthetic construct
  misc_feature 1..80: note = Synthetic: >BetaCoV1-cand-21700-21779
  source 1..80: mol_type = other DNA
tagtctttttgacatgaccaaatttccacttaaattggctggtactgcagttgtaaatttaaaagcagaccagatcaatg

SEQ ID NO: 4555 - DNA, 80 bp, synthetic construct
  misc_feature 1..80: note = Synthetic: >BetaCoV1-cand-21780-21859
  source 1..80: mol_type = other DNA
atatggtttactctctcatagagaagggtaaactacttgttcgtgatacaaataaagagtgttttataggtgatagccta

SEQ ID NO: 4556 - DNA, 80 bp, synthetic construct
  misc_feature 1..80: note = Synthetic: >BetaCoV1-cand-21860-21939
  source 1..80: mol_type = other DNA
gtaaatgttagtaatctaaactgaaatggctgtggcatatgctgacaagccaactcattttattaattttccgctttctc

SEQ ID NO: 4557 - DNA, 80 bp, synthetic construct
  misc_feature 1..80: note = Synthetic: >BetaCoV1-cand-22020-22099
  source 1..80: mol_type = other DNA
tgtccacatattagtgtcactatgcttgatatcaaagcccagtgacattaattcggttgatattgccattcaggaagtaa

SEQ ID NO: 4558 - DNA, 80 bp, synthetic construct
  misc_feature 1..80: note = Synthetic: >BetaCoV1-cand-22100-22179
  source 1..80: mol_type = other DNA
tagatgacttctgctttgatgatgcggctcttacattttgtaatccgcatattctaggcagatgcattgtcctggatgtt

SEQ ID NO: 4559 - DNA, 80 bp, synthetic construct
  misc_feature 1..80: note = Synthetic: >BetaCoV1-cand-22180-22259
  source 1..80: mol_type = other DNA
aaaggttgtgaagaattgcatgaagatgttgttgagtatattagagaaaagggatgtgttgcagatcagtccagaaaatg

SEQ ID NO: 4560 - DNA, 80 bp, synthetic construct
  misc_feature 1..80: note = Synthetic: >BetaCoV1-cand-22260-22339
  source 1..80: mol_type = other DNA
gattgcacactgtaccattgcacaattcaactaacatacccccaaaacatcttcctgatggtataaaagacctacaattc

SEQ ID NO: 4561 - DNA, 80 bp, synthetic construct
  misc_feature 1..80: note = Synthetic: >BetaCoV1-cand-22340-22419
  source 1..80: mol_type = other DNA
aattgtataataccattttacatcaaacaatctgacattctcacgcctgcatacctagaattggtacagcttggcgcgga

SEQ ID NO: 4562 - DNA, 80 bp, synthetic construct
  misc_feature 1..80: note = Synthetic: >BetaCoV1-cand-22420-22499
  source 1..80: mol_type = other DNA
gaaaaaggatgggttttattctagtgaaatcactatttagtcattggatgggaatcagaagtgttgataaaccgcccact

SEQ ID NO: 4563 - DNA, 80 bp, synthetic construct
  misc_feature 1..80: note = Synthetic: >BetaCoV1-cand-22500-22579
  source 1..80: mol_type = other DNA
gaccatcttggtgctataatgggctattgttgtttggatatgatacgagaagagctaccagaagggagtcttcctgagca

SEQ ID NO: 4564 - DNA, 80 bp, synthetic construct
  misc_feature 1..80: note = Synthetic: >BetaCoV1-cand-22580-22659
  source 1..80: mol_type = other DNA
agatgatgatgcttggagtaagctcgcgtatcattatgacaacaacttgtggttttatcgatttgtcttaaaaaatagta

SEQ ID NO: 4565 - DNA, 80 bp, synthetic construct
  misc_feature 1..80: note = Synthetic: >BetaCoV1-cand-22660-22739
  source 1..80: mol_type = other DNA
aatattttcgaaagacaattcgtcataaatgttgtaactgtgcaggtgagttttcatacacgtcaagtgtatgaagactg

SEQ ID NO: 4566 - DNA, 80 bp, synthetic construct
  misc_feature 1..80: note = Synthetic: >BetaCoV1-cand-22740-22819
  source 1..80: mol_type = other DNA
aactcgtttttagatatggctaacatttgcagtctcaaccataggcctgctttgcctcctcgttggtgttataggttttg

SEQ ID NO: 4567 - DNA, 80 bp, synthetic construct
  misc_feature 1..80: note = Synthetic: >BetaCoV1-cand-22820-22899
  source 1..80: mol_type = other DNA
aaaatcctcccaccaacgtggtttctcatattaatgatgattggtttttgtttggtgacagtcgtagtgactgtaaccat

SEQ ID NO: 4568 - DNA, 80 bp, synthetic construct
  misc_feature 1..80: note = Synthetic: >BetaCoV1-cand-22910-22989
  source 1..80: mol_type = other DNA
tcaatcctaaaaattattcttatatggacctagacccctcattgtgtaattcaggaaaaatatcttctaaggctggtaat

SEQ ID NO: 4569 - DNA, 80 bp, synthetic construct
  misc_feature 1..80: note = Synthetic: >CDPHE15-cand-20940-21019
  source 1..80: mol_type = other DNA
ccaacaaaacgatacaggatacagagaatgataacactacaggcaaacaatgcattgctaatgtacgcatcaatgacgat

SEQ ID NO: 4570 - DNA, 80 bp, synthetic construct
  misc_feature 1..80: note = Synthetic: >CDPHE15-cand-21020-21099
  source 1..80: mol_type = other DNA
gtgccagacaacaagaatcaccagatctatggctgggctcagttggagcggtgaaacactgaaaatgtagtcaccatcca

SEQ ID NO: 4571 - DNA, 80 bp, synthetic construct
  misc_feature 1..80: note = Synthetic: >CDPHE15-cand-21100-21179
  source 1..80: mol_type = other DNA
tatactaaaacatattacacacataacactgccgggggcgcaatattgggacatgactagagttgaatgcgaacacaaaa

SEQ ID NO: 4572 - DNA, 80 bp, synthetic construct
  misc_feature 1..80: note = Synthetic: >CDPHE15-cand-21180-21259
  source 1..80: mol_type = other DNA
actcctgtggccaccaaccagttagcgaggagcggtattacacaactaatgtcaccaatgacacagtgctcaacggcctt

SEQ ID NO: 4573 - DNA, 80 bp, synthetic construct
  misc_feature 1..80: note = Synthetic: >CDPHE15-cand-21260-21339
  source 1..80: mol_type = other DNA
attaccaactaccaagaattgcctgacagtggtgaatatgcagacaatgtgtttaccgttgacgatgatggttctatacc

SEQ ID NO: 4574 - DNA, 80 bp, synthetic construct
  misc_feature 1..80: note = Synthetic: >CDPHE15-cand-21340-21419
  source 1..80: mol_type = other DNA
acaatcctttgcctttaacaactggtttgtactaactaactcctccaccaacatacacggcacggatgccacaaaacagc

SEQ ID NO: 4575 - DNA, 80 bp, synthetic construct
  misc_feature 1..80: note = Synthetic: >CDPHE15-cand-21420-21499
  source 1..80: mol_type = other DNA
cgctgagactaacttgtttgtggcctataccagccagtaagggtactcgcgccaccatatagttcaatgccactaacggt

SEQ ID NO: 4576 - DNA, 80 bp, synthetic construct
  misc_feature 1..80: note = Synthetic: >CDPHE15-cand-21500-21579
  source 1..80: mol_type = other DNA
gcaaagtgcaatggacatcaaactaatgcaacctttgatgccataaggtttaacctcaatgacacactgaatgccttagg

SEQ ID NO: 4577 - DNA, 80 bp, synthetic construct
  misc_feature 1..80: note = Synthetic: >CDPHE15-cand-21580-21659
  source 1..80: mol_type = other DNA
acaaaacttcgccacaggcgtcacactccacacagcaaatggttctgcaacattgcgttgtgcatgtaacaactcaaagc

SEQ ID NO: 4578 - DNA, 80 bp, synthetic construct
  misc_feature 1..80: note = Synthetic: >CDPHE15-cand-21660-21739
  source 1..80: mol_type = other DNA
cagagtatcctgatgcccacgatgtacgtcaaataccattcggcaaacgtgacaagccatattattgctagcccaatata

SEQ ID NO: 4579 - DNA, 80 bp, synthetic construct
  misc_feature 1..80: note = Synthetic: >CDPHE15-cand-21740-21819
  source 1..80: mol_type = other DNA
actacagacactaatagtacaatgaccttcattggggccctcccaaacaatatgcaggagattgtgataacagctaatgg

SEQ ID NO: 4580 - DNA, 80 bp, synthetic construct
  misc_feature 1..80: note = Synthetic: >CDPHE15-cand-21820-21899
  source 1..80: mol_type = other DNA
agaggtgtacatgaatggctatcgctactttcaaaccgcacatcttaatagtgttcaggttcaacttcagacacaacaag

SEQ ID NO: 4581 - DNA, 80 bp, synthetic construct
  misc_feature 1..80: note = Synthetic: >CDPHE15-cand-21900-21979
  source 1..80: mol_type = other DNA
ttaacggttcaacgttttggacaatagcctatacaactgatgagaaagtgctcgtaaaacttaatggtactaacattaag

SEQ ID NO: 4582 - DNA, 80 bp, synthetic construct
  misc_feature 1..80: note = Synthetic: >CDPHE15-cand-21980-22059
  source 1..80: mol_type = other DNA
cgaatgttatactgtgaaaacccgcttaaccgtctcaagtgtaaacacacacaatttgaactggatgatggtttttatcc

SEQ ID NO: 4583 - DNA, 80 bp, synthetic construct
  misc_feature 1..80: note = Synthetic: >CDPHE15-cand-22060-22139
  source 1..80: mol_type = other DNA
attaacacatgttgatcttgctgacaaaccattcacgtttgtcacgttgcctacgtttgctgaccatagctatgtgcaat

SEQ ID NO: 4584 - DNA, 80 bp, synthetic construct
  misc_feature 1..80: note = Synthetic: >CDPHE15-cand-22150-22229
  source 1..80: mol_type = other DNA
actaaagtatgatgaccataatgaagatttcaaactgcaaagctttaacctcacaattaatggccaacggtcgtattgtg

SEQ ID NO: 4585 - DNA, 80 bp, synthetic construct
  misc_feature 1..80: note = Synthetic: >CanadaGoose-cand-20880-20959
  source 1..80: mol_type = other DNA
ggtgttcttactaattatactttttacaaccagtcwgatgttgatactattactattggtactcatggagaccaaatggc

SEQ ID NO: 4586 - DNA, 80 bp, synthetic construct
  misc_feature 1..80: note = Synthetic: >CanadaGoose-cand-20960-21039
  source 1..80: mol_type = other DNA
tcaattagcaaagttgaagttatatcaagagttttctgcttcagaaccttattataacttcaatttcacttttttaaaag

SEQ ID NO: 4587 - DNA, 80 bp, synthetic construct
  misc_feature 1..80: note = Synthetic: >CanadaGoose-cand-21040-21119
  source 1..80: mol_type = other DNA
agtttgagtttattcctaatggtaaggccatttctcttactgctaattatggttctatttattcgtcttgtggttttaca

SEQ ID NO: 4588 - DNA, 80 bp, synthetic construct
  misc_feature 1..80: note = Synthetic: >CanadaGoose-cand-21120-21199
  source 1..80: mol_type = other DNA
cttgacaattttaataatggccattgttttaattctcttagtattaagcttacttatgctcccaagtattggggttgtaa

SEQ ID NO: 4589 - DNA, 80 bp, synthetic construct
  misc_feature 1..80: note = Synthetic: >CanadaGoose-cand-21200-21279
  source 1..80: mol_type = other DNA
ggaggctatgtcatactttcaggcgcaatgctgctatatgtattcttatgacacatctagtaagtgttatggtatagcta

SEQ ID NO: 4590 - DNA, 80 bp, synthetic construct
  misc_feature 1..80: note = Synthetic: >CanadaGoose-cand-21280-21359
  source 1..80: mol_type = other DNA
aggacactgaggattataagtatgagtgtgttctcttagttttggtcttcatgcagcaaggttctaaaatatgtacatct

SEQ ID NO: 4591 - DNA, 80 bp, synthetic construct
  misc_feature 1..80: note = Synthetic: >CanadaGoose-cand-21360-21439
  source 1..80: mol_type = other DNA
ccgactcctcctgttttagttgagcagaatgttttaaataatacatttgtcttagaccaatgtgttaattataccatata

SEQ ID NO: 4592 - DNA, 80 bp, synthetic construct
  misc_feature 1..80: note = Synthetic: >CanadaGoose-cand-21440-21519
  source 1..80: mol_type = other DNA
tggccattatggttatggctatatcattaatatcacagactccgtaagtccaggcactatgcttgctgatggtggtctgt

SEQ ID NO: 4593 - DNA, 80 bp, synthetic construct
  misc_feature 1..80: note = Synthetic: >CanadaGoose-cand-21520-21599
  source 1..80: mol_type = other DNA
tggtacaagattcatctggagccatagatgtttttgctgtagataatgtttatggccgccaatattataaagttaacctc

SEQ ID NO: 4594 - DNA, 80 bp, synthetic construct
  misc_feature 1..80: note = Synthetic: >CanadaGoose-cand-21600-21679
  source 1..80: mol_type = other DNA
tgtaatgatgttaacgaacagtatgtacttactgggtcagttgttactggtaagcttacatcatttaattgcactggctg

SEQ ID NO: 4595 - DNA, 80 bp, synthetic construct
  misc_feature 1..80: note = Synthetic: >CanadaGoose-cand-21680-21759
  source 1..80: mol_type = other DNA
tccattattgtccaaccagtattatcagttgtttagtaataacacaaggcgcaagcgttcacttgattctcaggtcaacg

SEQ ID NO: 4596 - DNA, 80 bp, synthetic construct
  misc_feature 1..80: note = Synthetic: >CanadaGoose-cand-21760-21839
  source 1..80: mol_type = other DNA
ttacttcctgtgattatgttacttttggtgagtattgtctttttcctgacggtacttataaatatatacaatctgcaaca

SEQ ID NO: 4597 - DNA, 80 bp, synthetic construct
  misc_feature 1..80: note = Synthetic: >CanadaGoose-cand-21840-21919
  source 1..80: mol_type = other DNA
tttgacacactctttgagcctctgttgaatgttactgaaaatattcttattcctgatagttttaatcttactgttactga

SEQ ID NO: 4598 - DNA, 80 bp, synthetic construct
  misc_feature 1..80: note = Synthetic: >CanadaGoose-cand-21920-21999
  source 1..80: mol_type = other DNA
agagtttattcaaactcagatgcagcagattcaattaaactgtcttcaatatgtttgtggtgcttcagttcagtgccgta

SEQ ID NO: 4599 - DNA, 80 bp, synthetic construct
  misc_feature 1..80: note = Synthetic: >CanadaGoose-cand-22000-22079
  source 1..80: mol_type = other DNA
atttattcaagcagtatggtagtgtttgtgataacattgtttctattttgaatggtgttgcgcaatctgagagccaacag

SEQ ID NO: 4600 - DNA, 80 bp, synthetic construct
  misc_feature 1..80: note = Synthetic: >CanadaGoose-cand-22080-22159
  source 1..80: mol_type = other DNA
ctcatatcaatgtattctagtacattgcctggacaggacttcaatcctgtgtacgctaatatgtctactggtggctttaa

SEQ ID NO: 4601 - DNA, 80 bp, synthetic construct
  misc_feature 1..80: note = Synthetic: >HKU10-cand-16640-16719
  source 1..80: mol_type = other DNA
cctgaatgtaatgctgacatagttgtggtggatgaggtttcgatgtgcacgaattatgatttgtctgtgattaaccagcg

SEQ ID NO: 4602 - DNA, 80 bp, synthetic construct
  misc_feature 1..80: note = Synthetic: >HKU10-cand-16720-16799
  source 1..80: mol_type = other DNA
tttgtcttacaaacatattgtttatgttggtgaccctcaacaattgcctgcacctagaaccatgattttgcgtggtgttt

SEQ ID NO: 4603 - DNA, 80 bp, synthetic construct
  misc_feature 1..80: note = Synthetic: >HKU10-cand-16800-16879
  source 1..80: mol_type = other DNA
tagaacctaaggattataatgttgtcacacaaagaatgtgtgctgttggtcctgatgtctttttgcacaagtgttatcgt

SEQ ID NO: 4604 - DNA, 80 bp, synthetic construct
  misc_feature 1..80: note = Synthetic: >HKU10-cand-16880-16959
  source 1..80: mol_type = other DNA
tgtccagctgagattgtgaaaacagtttctgagatggtttatgataacaagtttgtgcctgtacatccagagagtaaaca

SEQ ID NO: 4605 - DNA, 80 bp, synthetic construct
  misc_feature 1..80: note = Synthetic: >HKU10-cand-16960-17039
  source 1..80: mol_type = other DNA
gtgttttaagctcttctgtaaaggcaatgtgcatgttgacaatggttctagcattaaccgtaagcaattagatgttgtca

SEQ ID NO: 4606 - DNA, 80 bp, synthetic construct
  misc_feature 1..80: note = Synthetic: >HKU10-cand-17040-17119
  source 1..80: mol_type = other DNA
aattatttttggctaaaaacccatcttggtctaaggcagtgtttatttcaccatacaacagtcaaaattatgtggctagt

SEQ ID NO: 4607 - DNA, 80 bp, synthetic construct
  misc_feature 1..80: note = Synthetic: >HKU10-cand-17120-17199
  source 1..80: mol_type = other DNA
agagctctcggtcttcagatacaaactgtcgattcatcgcaaggcagtgaatatgattatgtcatttttacacaaacatc

SEQ ID NO: 4608 - DNA, 80 bp, synthetic construct
  misc_feature 1..80: note = Synthetic: >HKU10-cand-17280-17359
  source 1..80: mol_type = other DNA
gtgacaaagagctctttgatgctctaaaattttttgaaattaaacttactgatttacaggctggtgaaggttgtggtctt

SEQ ID NO: 4609 - DNA, 80 bp, synthetic construct
  misc_feature 1..80: note = Synthetic: >HKU10-cand-17360-17439
  source 1..80: mol_type = other DNA
tttaaagattgttctaggaaacccgatttattacccccatcgcatgccaccacgtttatgtctttatctgataattttaa

SEQ ID NO: 4610 - DNA, 80 bp, synthetic construct
  misc_feature 1..80: note = Synthetic: >HKU10-cand-17440-17519
  source 1..80: mol_type = other DNA
gacgagtggtgatctcgcagtgcaagttggtgtgaatggtgtttgtaagtatgaacacgtaatttcctttatgggattta

SEQ ID NO: 4611 - DNA, 80 bp, synthetic construct
  misc_feature 1..80: note = Synthetic: >HKU10-cand-17520-17599
  source 1..80: mol_type = other DNA
ggtttgatactaacatacctggttaccacagtttgttttgcaccagagactttgctatgagacatgttagaggttggttg

SEQ ID NO: 4612 - DNA, 80 bp, synthetic construct
  misc_feature 1..80: note = Synthetic: >HKU10-cand-17600-17679
  source 1..80: mol_type = other DNA
ggtatggatgttgaaggcgctcatgttgtaggcgacaacatcggtactaacgtacctttgcaggtgggtttttctaacgg

SEQ ID NO: 4613 - DNA, 80 bp, synthetic construct
  misc_feature 1..80: note = Synthetic: >HKU10-cand-17680-17759
  source 1..80: mol_type = other DNA
tgtggattttgttgtccaaccagaaggttgtgtggtcaacgagtttggcacaaacattcaacccgttagagctcgtgctc

SEQ ID NO: 4614 - DNA, 80 bp, synthetic construct
  misc_feature 1..80: note = Synthetic: >HKU10-cand-17760-17839
  source 1..80: mol_type = other DNA
cgccaggtgaacagttcgcacatctcataccacttatgcgtcgtggtcaaccatgggttgtcgtgcgtaaacgcatagtg

SEQ ID NO: 4615 - DNA, 80 bp, synthetic construct
  misc_feature 1..80: note = Synthetic: >HKU10-cand-17840-17919
  source 1..80: mol_type = other DNA
cagatgtgttgtgactatttgtctggtttatcagatgtgctcgtatttgttctatgggccggtggtttggagttgactac

SEQ ID NO: 4616 - DNA, 80 bp, synthetic construct
  misc_feature 1..80: note = Synthetic: >HKU10-cand-20480-20559
  source 1..80: mol_type = other DNA
ttgttttgtaccagtgttaatacgtcttcatctgaagcgtttttaattggtattaattatcttgggacctttagtgataa

SEQ ID NO: 4617 - DNA, 80 bp, synthetic construct
  misc_feature 1..80: note = Synthetic: >HKU10-cand-20560-20639
  source 1..80: mol_type = other DNA
gccagttatagatggtaatgtagtgcatgctaactatatattctggcgaaattcaacaattatgtcgatgtcttataata

SEQ ID NO: 4618 - DNA, 80 bp, synthetic construct
  misc_feature 1..80: note = Synthetic: >HKU10-cand-20640-20719
  source 1..80: mol_type = other DNA
gtgtacttgatcttgcaaagtttaattgtaaacatagagcaacggcagttatacaacttaaagacagtgacattaatgat

SEQ ID NO: 4619 - DNA, 80 bp, synthetic construct
  misc_feature 1..80: note = Synthetic: >HKU10-cand-20720-20799
  source 1..80: mol_type = other DNA
atggtccttggtcttataaaaagaggtaaaatacttattagaatgaatgggacttatatgggtttttctaaccatttagt

SEQ ID NO: 4620 - DNA, 80 bp, synthetic construct
  misc_feature 1..80: note = Synthetic: >HKU10-cand-20800-20879
  source 1..80: mol_type = other DNA
ctcaactaaacaaagatgatttcgcttgctgtgtatttggctgaattgttggttataattacgaactttccttatcctgg

SEQ ID NO: 4621 - DNA, 80 bp, synthetic construct
  misc_feature 1..80: note = Synthetic: >HKU10-cand-20880-20959
  source 1..80: mol_type = other DNA
tgatgcatgtcaatgcttgcccttgtgagccaaatcctgatgtattagtggtgtactgcctaacttaaatcttggtttgc

SEQ ID NO: 4622 - DNA, 80 bp, synthetic construct
  misc_feature 1..80: note = Synthetic: >HKU10-cand-20960-21039
  source 1..80: mol_type = other DNA
cagccaatttgactactgtttttgttagtggttatttgcctaaacctgaaaacaccaaaaattggcattgtcagattaaa

SEQ ID NO: 4623 - DNA, 80 bp, synthetic construct
  misc_feature 1..80: note = Synthetic: >HKU10-cand-21040-21119
  source 1..80: mol_type = other DNA
ccactaaatcaatcaggtgatactgtttataaaaatgttaatggtgtttattggtcatactacacacatggcacacctgt

SEQ ID NO: 4624 - DNA, 80 bp, synthetic construct
  misc_feature 1..80: note = Synthetic: >HKU10-cand-21120-21199
  source 1..80: mol_type = other DNA
tgaaattggtatttccaattctgatcaacttcaaaatgctgatcagcaatgggctctgtatatttaccagggtaataatg

SEQ ID NO: 4625 - DNA, 80 bp, synthetic construct
  misc_feature 1..80: note = Synthetic: >HKU10-cand-21200-21279
  source 1..80: mol_type = other DNA
ctacatttaatgactcaaatggttatatgcactttaaaatttgtaagtggactggcaagtatagttttgtaaaagaacct

SEQ ID NO: 4626 - DNA, 80 bp, synthetic construct
  misc_feature 1..80: note = Synthetic: >HKU10-cand-21280-21359
  source 1..80: mol_type = other DNA
aacccataccagggtaacacaacttctagtagaggtgtttgtatgtttaataaaaaatttcgttttgtttttccacatgc

SEQ ID NO: 4627 - DNA, 80 bp, synthetic construct
  misc_feature 1..80: note = Synthetic: >HKU10-cand-21360-21439
  source 1..80: mol_type = other DNA
gcgtaacaatgttataggtgtttcttggactggtgattatgttacactttttactactactagtgctaggcgtttttatt

SEQ ID NO: 4628 - DNA, 80 bp, synthetic construct
  misc_feature 1..80: note = Synthetic: >HKU10-cand-21440-21519
  source 1..80: mol_type = other DNA
taaaaaataactggtctagggttaatgttaaatgtcaactagcagaatcttgtgcaatacaaactgtctacaacatcact

SEQ ID NO: 4629 - DNA, 80 bp, synthetic construct
  misc_feature 1..80: note = Synthetic: >HKU10-cand-21520-21599
  source 1..80: mol_type = other DNA
acactaaatattaccaccaatggacaaggtcttataaagtcttacagtgtatgtactgagtgtgatggttttcctaaaca

SEQ ID NO: 4630 - DNA, 80 bp, synthetic construct
  misc_feature 1..80: note = Synthetic: >HKU10-cand-21600-21679
  source 1..80: mol_type = other DNA
tgtttttcctgtccttgatggtgggaaaatacctggtgattttagttttgataattggtttgttttgaccaactcttcca

SEQ ID NO: 4631 - DNA, 80 bp, synthetic construct
  misc_feature 1..80: note = Synthetic: >HKU10-cand-21680-21759
  source 1..80: mol_type = other DNA
ctgttttgcagggtcgaattgtcactgtacaacctttaaaattgctttgtttatggcctgtaccttctcttaacgcaaat

SEQ ID NO: 4632 - DNA, 80 bp, synthetic construct
  misc_feature 1..80: note = Synthetic: >HKU10-cand-24320-24399
  source 1..80: mol_type = other DNA
gtataatgttatttcatacagtcttcatgcctactgagtatgttgctgtacgtgcatgggctggactttgtattgaagac

SEQ ID NO: 4633 - DNA, 80 bp, synthetic construct
  misc_feature 1..80: note = Synthetic: >HKU10-cand-24400-24479
  source 1..80: mol_type = other DNA
aaagttgcttttgtgctacgtgacgttaaaacaacactttttaagactagtgatacttattacatcactactagagacat

SEQ ID NO: 4634 - DNA, 80 bp, synthetic construct
  misc_feature 1..80: note = Synthetic: >HKU10-cand-24480-24559
  source 1..80: mol_type = other DNA
gtatgaacctagacttccacaagttagtgactttgttcaaattaaagattgtcatgttgattatcttaatttgacttcag

SEQ ID NO: 4635 - DNA, 80 bp, synthetic construct
  misc_feature 1..80: note = Synthetic: >HKU10-cand-24560-24639
  source 1..80: mol_type = other DNA
atgaagttaataatgtgatacctgattatattgatgtaaataaaactctggaagattttggccaaatacttcctaataac

SEQ ID NO: 4636 - DNA, 80 bp, synthetic construct
  misc_feature 1..80: note = Synthetic: >HKU10-cand-24640-24719
  source 1..80: mol_type = other DNA
acacgaccaccaatacctgattttggtttagatctttacaataacacaattctcaacttgactgctgagattgatatatt

SEQ ID NO: 4637 - DNA, 80 bp, synthetic construct
  misc_feature 1..80: note = Synthetic: >HKU10-cand-24720-24799
  source 1..80: mol_type = other DNA
gcaaaataaatctgaacaacttttggcttcaactgaaagacttcaacaacttattgataatctcaataagacttatgttg

SEQ ID NO: 4638 - DNA, 80 bp, synthetic construct
  misc_feature 1..80: note = Synthetic: >HKU10-cand-24800-24879
  source 1..80: mol_type = other DNA
atcttgagtggctcaacaggttcgaacaatacattaagtggccatggtatgtgtggttagcaatttttcttgccgttata

SEQ ID NO: 4639 - DNA, 80 bp, synthetic construct
  misc_feature 1..80: note = Synthetic: >HKU10-cand-24880-24959
  source 1..80: mol_type = other DNA
ctattttctttcttaatgctttactgttgttgtgctacaggttgttgtggttgttttagctgtctttctaattcttgtct

SEQ ID NO: 4640 - DNA, 80 bp, synthetic construct
  misc_feature 1..80: note = Synthetic: >HKU10-cand-24960-25039
  source 1..80: mol_type = other DNA
tgattgtcgcggcaaaaatttacaacgttacgaagtagaaaaagtgcacattcaataatgtttactggcctatttcaaac

SEQ ID NO: 4641 - DNA, 80 bp, synthetic construct
  misc_feature 1..80: note = Synthetic: >HKU10-cand-25040-25119
  source 1..80: mol_type = other DNA
ttcttttggtgactcagttcaggctggtgtgcatcatttagttgaaaaattaccattaacgttccatcaacctgatgtac

SEQ ID NO: 4642 - DNA, 80 bp, synthetic construct
  misc_feature 1..80: note = Synthetic: >HKU10-cand-25120-25199
  source 1..80: mol_type = other DNA
attttcaacatgcattgccattagccaattttctcatgactagtgtgtttgtaatttactttgccatgtataaagccagc

SEQ ID NO: 4643 - DNA, 80 bp, synthetic construct
  misc_feature 1..80: note = Synthetic: >HKU10-cand-25200-25279
  source 1..80: mol_type = other DNA
tcagttagaaataactgtattatgtttggctttaggctgtttgcaatgtttgtgtacgcaccattgctatgttactttga

SEQ ID NO: 4644 - DNA, 80 bp, synthetic construct
  misc_feature 1..80: note = Synthetic: >HKU10-cand-25280-25359
  source 1..80: mol_type = other DNA
gctgtatgttgatgccgctattatttttggtgctctttacaccaggcttgtgtatgttacatattatgcctgtaggtaca

SEQ ID NO: 4645 - DNA, 80 bp, synthetic construct
  misc_feature 1..80: note = Synthetic: >HKU10-cand-25360-25439
  source 1..80: mol_type = other DNA
gatcacctgcatttgttgtgcttaacactgacaaacttgcttttgttcaaggctactattggtactatcaggacaactca

SEQ ID NO: 4646 - DNA, 80 bp, synthetic construct
  misc_feature 1..80: note = Synthetic: >HKU10-cand-25440-25519
  source 1..80: mol_type = other DNA
tacctgactttgttaggtggtgaaaactttgtcacctttggtcctaattttgtgcctattgctgccactaatgaccttta

SEQ ID NO: 4647 - DNA, 80 bp, synthetic construct
  misc_feature 1..80: note = Synthetic: >HKU10-cand-25520-25599
  source 1..80: mol_type = other DNA
cattgctctcagaggtaagaaagatgatgatgtaccactggtgaggcgcgtagaactcatcaatggacaattcttttaca

SEQ ID NO: 4648 - DNA, 80 bp, synthetic construct
  misc_feature 1..80: note = Synthetic: >HKU25-cand-16660-16739
  source 1..80: mol_type = other DNA
gaccatgttatagcaaccactcataagatggttctgtcagtctcaccttacgtctgtaatgctcctggttgtgatgtttc

SEQ ID NO: 4649 - DNA, 80 bp, synthetic construct
  misc_feature 1..80: note = Synthetic: >HKU25-cand-16740-16819
  source 1..80: mol_type = other DNA
agatgttactaaactgtatttaggtggtatgagctacttctgcgtagaccatagaccaatatgcagtttccctctctgtg

SEQ ID NO: 4650 - DNA, 80 bp, synthetic construct
  misc_feature 1..80: note = Synthetic: >HKU25-cand-16820-16899
  source 1..80: mol_type = other DNA
ctaatggcctagtctttggcctttacaagaatatgtgcacaggtagtccctctgtatcagaatttaacagactggctaca

SEQ ID NO: 4651 - DNA, 80 bp, synthetic construct
  misc_feature 1..80: note = Synthetic: >HKU25-cand-16900-16979
  source 1..80: mol_type = other DNA
tgtgattggtctgagagtggtgattacatactcgccaatactaccacagaaccacttaaattgtttgctgctgagacatt

SEQ ID NO: 4652 - DNA, 80 bp, synthetic construct
  misc_feature 1..80: note = Synthetic: >HKU25-cand-16980-17059
  source 1..80: mol_type = other DNA
gcgtgccactgaggaggcctctaagcagtcttatgcaatcgccacaattaaagagattgtaggcgaaagagaactaattc

SEQ ID NO: 4653 - DNA, 80 bp, synthetic construct
  misc_feature 1..80: note = Synthetic: >HKU25-cand-17060-17139
  source 1..80: mol_type = other DNA
ttgtgtgggagactggaaaatccaaacccccactcaaccgtaattatgtctttactggttatcatataaccaagaatagt

SEQ ID NO: 4654 - DNA, 80 bp, synthetic construct
  misc_feature 1..80: note = Synthetic: >HKU25-cand-17140-17219
  source 1..80: mol_type = other DNA
aaagtgcagctcggagagtttgtctttgagcgcattgattatagtgatgctgtatcctacaagtcaagcacgacatacaa

SEQ ID NO: 4655 - DNA, 80 bp, synthetic construct
  misc_feature 1..80: note = Synthetic: >HKU25-cand-17220-17299
  source 1..80: mol_type = other DNA
attgactgtaggtgacatctttgttcttacctcacactctgtggcgaccctgacagcgccgacaatagtgaatcaagaga

SEQ ID NO: 4656 - DNA, 80 bp, synthetic construct
  misc_feature 1..80: note = Synthetic: >HKU25-cand-17300-17379
  source 1..80: mol_type = other DNA
ggtatgtaaaaatcactggattatatccaaccattactgtccctgaggaattcgccaaccatgttgccaacttccaaaaa

SEQ ID NO: 4657 - DNA, 80 bp, synthetic construct
  misc_feature 1..80: note = Synthetic: >HKU25-cand-17380-17459
  source 1..80: mol_type = other DNA
gcaggatatagtaaatatgttaccgttcagggtccacctggtaccggtaagagtcactttgctatagggttagcgatata

SEQ ID NO: 4658 - DNA, 80 bp, synthetic construct
  misc_feature 1..80: note = Synthetic: >HKU25-cand-17460-17539
  source 1..80: mol_type = other DNA
ttaccctacagcccgtattgtctacactgcttgctcgcatgcggccgttgatgcattatgcgaaaaagcttttaaatatc

SEQ ID NO: 4659 - DNA, 80 bp, synthetic construct
  misc_feature 1..80: note = Synthetic: >HKU25-cand-17540-17619
  source 1..80: mol_type = other DNA
taaacattggtaaatgttcacgtattatacctgccaaagcacgtgttgagtgctatgataggtttaaagttaatgaaaca

SEQ ID NO: 4660 - DNA, 80 bp, synthetic construct
  misc_feature 1..80: note = Synthetic: >HKU25-cand-17620-17699
  source 1..80: mol_type = other DNA
aatagtcagtatttgttcagtactattaatgcactaccagaaacatcggctgatattctggtggtagatgaagttagtat

SEQ ID NO: 4661 - DNA, 80 bp, synthetic construct
  misc_feature 1..80: note = Synthetic: >HKU25-cand-17700-17779
  source 1..80: mol_type = other DNA
gtgcactaattatgatttgtccatcattaatgcacgtatcaaagctaagcacattgtctatgtaggtgaccccgcacagt

SEQ ID NO: 4662 - DNA, 80 bp, synthetic construct
  misc_feature 1..80: note = Synthetic: >HKU25-cand-17780-17859
  source 1..80: mol_type = other DNA
tgccggcacctaggacattgctcactagaggcacgctggaaccggaaaatttcaatagtgtcactaggcttatgtgtaac

SEQ ID NO: 4663 - DNA, 80 bp, synthetic construct
  misc_feature 1..80: note = Synthetic: >HKU25-cand-17860-17939
  source 1..80: mol_type = other DNA
ttgggacctgacatatttcttagtatgtgctacaggtgccccagggaaattgttaacactgttagtgctcttgtctataa

SEQ ID NO: 4664 - DNA, 80 bp, synthetic construct
  misc_feature 1..80: note = Synthetic: >HKU8-cand-6470-6549
  source 1..80: mol_type = other DNA
atgctagtgttcttaggcatggtgtgggtgatggttattgtcagcatggtaatgattacatcatacgtgtctctcgggtt

SEQ ID NO: 4665 - DNA, 80 bp, synthetic construct
  misc_feature 1..80: note = Synthetic: >HKU8-cand-6550-6629
  source 1..80: mol_type = other DNA
gatggtactgcaattattgttaatgttggcgaaccttctgttaaggctcccaatttacttattagtggcactgcttacac

SEQ ID NO: 4666 - DNA, 80 bp, synthetic construct
  misc_feature 1..80: note = Synthetic: >HKU8-cand-6630-6709
  source 1..80: mol_type = other DNA
agcattttcaggacctatggatgctggtcactaccgcgtttattgtccagcaacatctaaggtgtttgatggtaataatt

SEQ ID NO: 4667 - DNA, 80 bp, synthetic construct
  misc_feature 1..80: note = Synthetic: >HKU8-cand-6710-6789
  source 1..80: mol_type = other DNA
tcgttggtggtgacctttgtaaccttgccgttacttctgttgtggttgttaataagttttttaaagctgaaattggcgat

SEQ ID NO: 4668 - DNA, 80 bp, synthetic construct
  misc_feature 1..80: note = Synthetic: >HKU8-cand-6790-6869
  source 1..80: mol_type = other DNA
gctaagagtacggaacccactgctgtaaaaattatgaataagcttgatgatgcttcagataagtttttcactgctggtga

SEQ ID NO: 4669 - DNA, 80 bp, synthetic construct
  misc_feature 1..80: note = Synthetic: >HKU8-cand-6870-6949
  source 1..80: mol_type = other DNA
tgttgtctcccacaacatcgctaattctgtagtatggttctttactatgcttagtatattgtttaaggcttttaagacta

SEQ ID NO: 4670 - DNA, 80 bp, synthetic construct
  misc_feature 1..80: note = Synthetic: >HKU8-cand-6950-7029
  source 1..80: mol_type = other DNA
gagactttaaggtatttgctctagcacctgaacgtacaggcataatatttactcgtagcttaaaatataacgtgaaggct

SEQ ID NO: 4671 - DNA, 80 bp, synthetic construct
  misc_feature 1..80: note = Synthetic: >HKU8-cand-7030-7109
  source 1..80: mol_type = other DNA
gcacgtgatatgttaaagcgtaaacagaagtgggtgttgtggtttttcaagttttgtctaatagtgtatactgtttatgc

SEQ ID NO: 4672 - DNA, 80 bp, synthetic construct
  misc_feature 1..80: note = Synthetic: >HKU8-cand-7110-7189
  source 1..80: mol_type = other DNA
actgttgtttatgtttgtacgctttggtccacctaatgagaccttgtgtaaagaccatgttgaaggctatgcaaattcaa

SEQ ID NO: 4673 - DNA, 80 bp, synthetic construct
  misc_feature 1..80: note = Synthetic: >HKU8-cand-7190-7269
  source 1..80: mol_type = other DNA
cttttgttaaggatgagtattgtactagtgctatgtgtcgtgtatgcctttttggttatcaggaacttgctgatttgcca

SEQ ID NO: 4674 - DNA, 80 bp, synthetic construct
  misc_feature 1..80: note = Synthetic: >HKU8-cand-7270-7349
  source 1..80: mol_type = other DNA
cacactaatgttgtttggcgacatgttggcatgccgctttttgtgaattggatgccgttgttttatttggctttcctatt

SEQ ID NO: 4675 - DNA, 80 bp, synthetic construct
  misc_feature 1..80: note = Synthetic: >HKU8-cand-7350-7429
  source 1..80: mol_type = other DNA
catatttggtggttttgttactaaaggctttgtattgtattttgttgctcagtatgttaatacctttggtgttcattttg

SEQ ID NO: 4676 - DNA, 80 bp, synthetic construct
  misc_feature 1..80: note = Synthetic: >HKU8-cand-7430-7509
  source 1..80: mol_type = other DNA
gcatgcaagagatgttttggcctttacagttaataccctttagcacttttggtgatgagattgttgtcttgtttatggtg

SEQ ID NO: 4677 - DNA, 80 bp, synthetic construct
  misc_feature 1..80: note = Synthetic: >HKU8-cand-7510-7589
  source 1..80: mol_type = other DNA
ggcaagtttcttatgtttgtcaaacatgtttgctttggttgtgataaagcatcatgtgttgcttgtagtaagagtgctcg

SEQ ID NO: 4678 - DNA, 80 bp, synthetic construct
  misc_feature 1..80: note = Synthetic: >HKU8-cand-7590-7669
  source 1..80: mol_type = other DNA
ccttacacgagttcctatgcagactattgtttgtggtgctaacaagtctttttacgttgctgctaatggtggtaagaact

SEQ ID NO: 4679 - DNA, 80 bp, synthetic construct
  misc_feature 1..80: note = Synthetic: >HKU8-cand-7670-7749
  source 1..80: mol_type = other DNA
tttgttctaggcacaagttcttttgtgtgaattgtgactcacatggacctggcaatacgtttattaatgaggttgtggca

SEQ ID NO: 4680 - DNA, 80 bp, synthetic construct
  misc_feature 1..80: note = Synthetic: >HKU8-cand-12870-12949
  source 1..80: mol_type = other DNA
tcaggctggtacacaaacagagctagttgctaattcttctttgttgactatgtgttcttttgctgttgatcctaaaaagt

SEQ ID NO: 4681 - DNA, 80 bp, synthetic construct
  misc_feature 1..80: note = Synthetic: >HKU8-cand-12950-13029
  source 1..80: mol_type = other DNA
gttatttggatgcagttaaaaatggtgttaaacctgttactaattgtgttaaaatgctttctaatggttctggtactggt

SEQ ID NO: 4682 - DNA, 80 bp, synthetic construct
  misc_feature 1..80: note = Synthetic: >HKU8-cand-13030-13109
  source 1..80: mol_type = other DNA
caagctgttaccgtaggtgttgaagctaatacaaatcaggatagttatggtggtgcttctgtttgcttgtattgccgtgc

SEQ ID NO: 4683 - DNA, 80 bp, synthetic construct
  misc_feature 1..80: note = Synthetic: >HKU8-cand-13110-13189
  source 1..80: mol_type = other DNA
tcatattgaccatcctagtatggatggtttctgtcaatttaagggccgttatgtgcaagtacctgttggtactgttgatc

SEQ ID NO: 4684 - DNA, 80 bp, synthetic construct
  misc_feature 1..80: note = Synthetic: >HKU8-cand-13190-13269
  source 1..80: mol_type = other DNA
ctatccggtattgtcttgagaatgaaatttgtaaggtttgccattgttggttgaataatggctgtacttgtgatcgaacg

SEQ ID NO: 4685 - DNA, 80 bp, synthetic construct
  misc_feature 1..80: note = Synthetic: >HKU8-cand-13270-13349
  source 1..80: mol_type = other DNA
actgttgtgcagtcagttgatcacaattatttaaacgagtgcggggctctagtgcagctcgactagagccctgtaatggt

SEQ ID NO: 4686 - DNA, 80 bp, synthetic construct
  misc_feature 1..80: note = Synthetic: >HKU8-cand-13350-13429
  source 1..80: mol_type = other DNA
actgaaccagagcatgttatacgcgcctttgacatttacaacaaagatgttgcttgtatcggcaagtttgttaaggtgaa

SEQ ID NO: 4687 - DNA, 80 bp, synthetic construct
  misc_feature 1..80: note = Synthetic: >HKU8-cand-13430-13509
  source 1..80: mol_type = other DNA
ctgtgttaggtttaaaaaccttgacaagcatgatgcattctttgttgtaaaacgttgtactaagagtgttatggaacacg

SEQ ID NO: 4688 - DNA, 80 bp, synthetic construct
  misc_feature 1..80: note = Synthetic: >HKU8-cand-13510-13589
  source 1..80: mol_type = other DNA
agcagtccatatatgacgttcttaaggattgtggcgctgtagctactcatgacttctttgtttggaaagatggtcgttct

SEQ ID NO: 4689 - DNA, 80 bp, synthetic construct
  misc_feature 1..80: note = Synthetic: >HKU8-cand-13590-13669
  source 1..80: mol_type = other DNA
atttatggcaatattgcacgtcaagatctaactaagtacactatgatggatctcgttcatgcacttcgtaatttcgatga

SEQ ID NO: 4690 - DNA, 80 bp, synthetic construct
  misc_feature 1..80: note = Synthetic: >HKU8-cand-13670-13749
  source 1..80: mol_type = other DNA
gaagaattgcgagactcttaaagagatccttgttataactggtgcatgtgatgctacttattttgataataagaattggt

SEQ ID NO: 4691 - DNA, 80 bp, synthetic construct
  misc_feature 1..80: note = Synthetic: >HKU8-cand-13750-13829
  source 1..80: mol_type = other DNA
atgacccagttgagaatgaggatattcatagagtgtatgctaagttaggcggtgttgttgctaatgctatgctcaaatgt

SEQ ID NO: 4692 - DNA, 80 bp, synthetic construct
  misc_feature 1..80: note = Synthetic: >HKU8-cand-13830-13909
  source 1..80: mol_type = other DNA
gttgcactttgtgatgctatggttgaaaaaggtgttgttggtgttattacattggacaaccaggatcttaatggtaattt

SEQ ID NO: 4693 - DNA, 80 bp, synthetic construct
  misc_feature 1..80: note = Synthetic: >HKU8-cand-13910-13989
  source 1..80: mol_type = other DNA
ctatgattttggtgattttaccattggtattcctggtgtcggtgttcccctttgcacatcatattattcttaccttatgc

SEQ ID NO: 4694 - DNA, 80 bp, synthetic construct
  misc_feature 1..80: note = Synthetic: >HKU8-cand-13990-14069
  source 1..80: mol_type = other DNA
ctgtcatgggtatgactaattgcctggctcgtgagtgctttattaaaagtgaaatatttggctctgattttaagacttat

SEQ ID NO: 4695 - DNA, 80 bp, synthetic construct
  misc_feature 1..80: note = Synthetic: >HKU8-cand-14070-14149
  source 1..80: mol_type = other DNA
gatcttttggagtatgattttactgagcataagcttagactttttaataagtatttcaagcattgggatcttgattatca

SEQ ID NO: 4696 - DNA, 80 bp, synthetic construct
  misc_feature 1..80: note = Synthetic: >MurineCoV-cand-3790-3869
  source 1..80: mol_type = other DNA
agcttatgctaactggcgttgtttagagtgtgacatggagttaaagcttcaaggcttggacgccatgtttttctatgggg

SEQ ID NO: 4697 - DNA, 80 bp, synthetic construct
  misc_feature 1..80: note = Synthetic: >MurineCoV-cand-3870-3949
  source 1..80: mol_type = other DNA
acgttgtgtctcatatgtgcaagtgtggtaatagcatgaccttgttgtctgcagatataccctacactttgcattttgga

SEQ ID NO: 4698 - DNA, 80 bp, synthetic construct
  misc_feature 1..80: note = Synthetic: >MurineCoV-cand-3950-4029
  source 1..80: mol_type = other DNA
gtgcgagatgataagttttgcgctttttacacgccaagaaaggtctttagggctgcttgtgcggtagatgttaatgattg

SEQ ID NO: 4699 - DNA, 80 bp, synthetic construct
  misc_feature 1..80: note = Synthetic: >MurineCoV-cand-4030-4109
  source 1..80: mol_type = other DNA
tcactctatggctgtagtagagggcaagcaaattgatggtaaagtggttaccaaatttattggtgacaaatttgatttta

SEQ ID NO: 4700 - DNA, 80 bp, synthetic construct
  misc_feature 1..80: note = Synthetic: >MurineCoV-cand-4110-4189
  source 1..80: mol_type = other DNA
tggtgggttacgggatgacatttagtatgtctccttttgaactcgcccagttatatggttcatgtataacaccaaatgtt

SEQ ID NO: 4701 - DNA, 80 bp, synthetic construct
  misc_feature 1..80: note = Synthetic: >MurineCoV-cand-4190-4269
  source 1..80: mol_type = other DNA
tgttttgttaaaggagatgttataaaggttgttcgcttagttaatgctgaagtcattgttaaccctgctaatgggcgtat

SEQ ID NO: 4702 - DNA, 80 bp, synthetic construct
  misc_feature 1..80: note = Synthetic: >MurineCoV-cand-4270-4349
  source 1..80: mol_type = other DNA
ggctcatggtgcaggtgttgcaggtgctatagctgaaaaggcgggcagtgcttttattaaagaaacctccgatatggtga

SEQ ID NO: 4703 - DNA, 80 bp, synthetic construct
  misc_feature 1..80: note = Synthetic: >MurineCoV-cand-4350-4429
  source 1..80: mol_type = other DNA
aggctcagggcgtttgccaggttggtgaatgctatgaatctgccggtggtaagttatgtaaaaaggtgcttaacattgta

SEQ ID NO: 4704 - DNA, 80 bp, synthetic construct
  misc_feature 1..80: note = Synthetic: >MurineCoV-cand-4430-4509
  source 1..80: mol_type = other DNA
gggccagatgcgcgagggcatggcaagcaatgctattcacttttagagcgtgcttatcagcatattaataagtgtgacaa

SEQ ID NO: 4705 - DNA, 80 bp, synthetic construct
  misc_feature 1..80: note = Synthetic: >MurineCoV-cand-4510-4589
  source 1..80: mol_type = other DNA
tgttgtcactactttaatttcggctggtatatttagtgtgcctactgatgtctccctaacttacttacttggtgtagtga

SEQ ID NO: 4706 - DNA, 80 bp, synthetic construct
  misc_feature 1..80: note = Synthetic: >MurineCoV-cand-4590-4669
  source 1..80: mol_type = other DNA
caaagaatgtcattcttgtcagtaacaaccaggatgattttgatgtgatagagaagtgtcaggtgacctccgttgctggt

SEQ ID NO: 4707 - DNA, 80 bp, synthetic construct
  misc_feature 1..80: note = Synthetic: >MurineCoV-cand-4670-4749
  source 1..80: mol_type = other DNA
accaaagcgctatcacttcaattggccaaaaatttgtgccgtgatgtaaagtttgtgacgaatgcatgtagttcgctttt

SEQ ID NO: 4708 - DNA, 80 bp, synthetic construct
  misc_feature 1..80: note = Synthetic: >MurineCoV-cand-4750-4829
  source 1..80: mol_type = other DNA
tagtgaatcttgctttgtctcaagctatgatgtgttgcaggaagttgaagcgctgcgacatgatatacaattggatgatg

SEQ ID NO: 4709 - DNA, 80 bp, synthetic construct
  misc_feature 1..80: note = Synthetic: >MurineCoV-cand-4830-4909
  source 1..80: mol_type = other DNA
atgctcgtgtctttgtgcaggctaatatggactgtctgcccacagactggcgtcttgttaacaaatttgatagtgttgat

SEQ ID NO: 4710 - DNA, 80 bp, synthetic construct
  misc_feature 1..80: note = Synthetic: >MurineCoV-cand-4910-4989
  source 1..80: mol_type = other DNA
ggtgttagaaccattaagtattttgaatgcccgggcgggatttttgtatccagccagggcaaaaagtttggttatgttca

SEQ ID NO: 4711 - DNA, 80 bp, synthetic construct
  misc_feature 1..80: note = Synthetic: >MurineCoV-cand-4990-5069
  source 1..80: mol_type = other DNA
gaatggttcatttaaggaggcgagtgttagccaaataagggctttactcgctaataaggttgatgtcttgtgtactgttg

SEQ ID NO: 4712 - DNA, 80 bp, synthetic construct
  misc_feature 1..80: note = Synthetic: >MurineCoV-cand-8920-8999
  source 1..80: mol_type = other DNA
catgcttcgcaaacaaatttaatcaatttgatcaatggtatgagtctacttttggtcttgcttattaccgcaactctaag

SEQ ID NO: 4713 - DNA, 80 bp, synthetic construct
  misc_feature 1..80: note = Synthetic: >MurineCoV-cand-9000-9079
  source 1..80: mol_type = other DNA
gcttgtcctgttgtggttgctgtaatagatcaagacattggccataccttatttaatgttcctaccacagttttaagata

SEQ ID NO: 4714 - DNA, 80 bp, synthetic construct
  misc_feature 1..80: note = Synthetic: >MurineCoV-cand-9080-9159
  source 1..80: mol_type = other DNA
tggatttcatgtgttgcattttataacccatgcatttgctactgatagcgtgcagtgttacacgccacatatgcaaatcc

SEQ ID NO: 4715 - DNA, 80 bp, synthetic construct
  misc_feature 1..80: note = Synthetic: >MurineCoV-cand-9160-9239
  source 1..80: mol_type = other DNA
cctatgataatttctatgctagtggttgcgtgttgtcatccctctgtactatgcttgcgcatgcagatggaaccccgcat

SEQ ID NO: 4716 - DNA, 80 bp, synthetic construct
  misc_feature 1..80: note = Synthetic: >MurineCoV-cand-9240-9319
  source 1..80: mol_type = other DNA
ccttattgttatacagggggtgttatgcataatgcctctctgtatagttctttggctcctcatgtccgttataacctggc

SEQ ID NO: 4717 - DNA, 80 bp, synthetic construct
  misc_feature 1..80: note = Synthetic: >MurineCoV-cand-9320-9399
  source 1..80: mol_type = other DNA
tagttcaaatggttatatacgttttcccgaagtggttagtgaaggcattgtgcgtgttgtgcgcactcgctctatgacct

SEQ ID NO: 4718 - DNA, 80 bp, synthetic construct
  misc_feature 1..80: note = Synthetic: >MurineCoV-cand-9410-9489
  source 1..80: mol_type = other DNA
tggtttatgtgaggaggccgaggagggtatctgctttaattttaatcgttcatgggtattgaacaacccgtattataggg

SEQ ID NO: 4719 - DNA, 80 bp, synthetic construct
  misc_feature 1..80: note = Synthetic: >MurineCoV-cand-9490-9569
  source 1..80: mol_type = other DNA
ccatgcctggaactttttgtggtaggaatgcttttgatttaatacatcaagttttaggaggattagtgcggcctattgat

SEQ ID NO: 4720 - DNA, 80 bp, synthetic construct
  misc_feature 1..80: note = Synthetic: >MurineCoV-cand-9570-9649
  source 1..80: mol_type = other DNA
ttctttgccttaacggcgagttcagtggctggtgctatccttgcaattattgtcgttttggctttctattatttaataaa

SEQ ID NO: 4721 - DNA, 80 bp, synthetic construct
  misc_feature 1..80: note = Synthetic: >MurineCoV-cand-9650-9729
  source 1..80: mol_type = other DNA
gcttaaacgtgcctttggtgactacactagtgttgtggttatcaatgtaattgtgtggtgtataaattttctgatgcttt

SEQ ID NO: 4722 - DNA, 80 bp, synthetic construct
  misc_feature 1..80: note = Synthetic: >MurineCoV-cand-9730-9809
  source 1..80: mol_type = other DNA
ttgtgtttcaggtttatcccacattgtcttgtttatatgcttgtttttatttctacacaacgctttatttcccttcggag

SEQ ID NO: 4723 - DNA, 80 bp, synthetic construct
  misc_feature 1..80: note = Synthetic: >MurineCoV-cand-9810-9889
  source 1..80: mol_type = other DNA
ataagtgttgttatgcatttgcaatggcttgtcatgtatggtgctattatgcccttgtggttttgcattatttacgtggc

SEQ ID NO: 4724 - DNA, 80 bp, synthetic construct
  misc_feature 1..80: note = Synthetic: >MurineCoV-cand-9890-9969
  source 1..80: mol_type = other DNA
agtcgttgtttcaaaccatgctttgtggttgttctcttactgccgcaaaattggtaccgaggttcgtagtgacggcacat

SEQ ID NO: 4725 - DNA, 80 bp, synthetic construct
  misc_feature 1..80: note = Synthetic: >MurineCoV-cand-9970-10049
  source 1..80: mol_type = other DNA
ttgaggaaatggcccttactacctttatgattactaaagaatcttattgtaagttgaaaaattctgtttctgatgttgct

SEQ ID NO: 4726 - DNA, 80 bp, synthetic construct
  misc_feature 1..80: note = Synthetic: >MurineCoV-cand-10050-10129
  source 1..80: mol_type = other DNA
tttaacaggtacttgagtctttataacaagtatcgttattttagtggcaaaatggatactgccgcttatagagaggctgc

SEQ ID NO: 4727 - DNA, 80 bp, synthetic construct
  misc_feature 1..80: note = Synthetic: >MurineCoV-cand-10130-10209
  source 1..80: mol_type = other DNA
ctgttcacaactggcaaaggcaatggaaacatttaaccataataatggtaatgatgttctctatcagcctccaaccgcct

SEQ ID NO: 4728 - DNA, 80 bp, synthetic construct
  misc_feature 1..80: note = Synthetic: >MurineCoV-cand-15370-15449
  source 1..80: mol_type = other DNA
gttctatggcggttgggatgatatgttacgccgccttattaaagatgttgatagtcctgtactcatgggttgggactatc

SEQ ID NO: 4729 - DNA, 80 bp, synthetic construct
  misc_feature 1..80: note = Synthetic: >MurineCoV-cand-15450-15529
  source 1..80: mol_type = other DNA
ctaaatgtgatcgtgctatgccaaacatactgcgtattgttagtagtttggtgctagcccgtaaacatgattcgtgctgt

SEQ ID NO: 4730 - DNA, 80 bp, synthetic construct
  misc_feature 1..80: note = Synthetic: >MurineCoV-cand-15530-15609
  source 1..80: mol_type = other DNA
tcgcatacggatagattctatcgtcttgcgaacgagtgcgcccaagttttgagtgaaattgttatgtgtggtggttgtta

SEQ ID NO: 4731 - DNA, 80 bp, synthetic construct
  misc_feature 1..80: note = Synthetic: >MurineCoV-cand-15610-15689
  source 1..80: mol_type = other DNA
ttatgttaaaccaggtggcactagtagtggggatgcaaccactgcttttgctaattctgtgtttaacatttgtcaagctg

SEQ ID NO: 4732 - DNA, 80 bp, synthetic construct
  misc_feature 1..80: note = Synthetic: >MurineCoV-cand-15690-15769
  source 1..80: mol_type = other DNA
tttccgccaatgtatgctcgcttatggcatgcaatggacacaaaattgaagatttgagtatacgcgagttacaaaagcgc

SEQ ID NO: 4733 - DNA, 80 bp, synthetic construct
  misc_feature 1..80: note = Synthetic: >MurineCoV-cand-15770-15849
  source 1..80: mol_type = other DNA
ctatactctaatgtctatcgtgcggaccatgttgaccccgcatttgttagtgagtattatgagtttttaaataagcattt

SEQ ID NO: 4734 - DNA, 80 bp, synthetic construct
  misc_feature 1..80: note = Synthetic: >MurineCoV-cand-15850-15929
  source 1..80: mol_type = other DNA
tagtatgatgattttgagtgatgatggtgttgtgtgttataattcagagtttgcgtccaagggttatattgctaatataa

SEQ ID NO: 4735 - DNA, 80 bp, synthetic construct
  misc_feature 1..80: note = Synthetic: >MurineCoV-cand-15930-16009
  source 1..80: mol_type = other DNA
gtgcctttcaacaggtattatattatcaaaataatgtgtttatgtctgaggccaaatgttgggtagaaacagacatcgaa

SEQ ID NO: 4736 - DNA, 80 bp, synthetic construct
  misc_feature 1..80: note = Synthetic: >MurineCoV-cand-16010-16089
  source 1..80: mol_type = other DNA
aagggaccgcatgaattttgttctcaacatacaatgctagtcaagatggatggtgatgaagtctaccttccataccctga

SEQ ID NO: 4737 - DNA, 80 bp, synthetic construct
  misc_feature 1..80: note = Synthetic: >MurineCoV-cand-16090-16169
  source 1..80: mol_type = other DNA
tccttcgagaatcttaggagcaggctgttttgttgatgatttattaaagactgatagcgttctcttgatagagcgtttcg

SEQ ID NO: 4738 - DNA, 80 bp, synthetic construct
  misc_feature 1..80: note = Synthetic: >MurineCoV-cand-16170-16249
  source 1..80: mol_type = other DNA
taagtcttgcaattgatgcttatcctttagtataccatgagaacccagagtatcaaaatgtgttccgggtatatttagaa

SEQ ID NO: 4739 - DNA, 80 bp, synthetic construct
  misc_feature 1..80: note = Synthetic: >MurineCoV-cand-16250-16329
  source 1..80: mol_type = other DNA
tatataaagaagctgtacaatgatctcggtaatcagatcctggacagctacagtgttattttaagtacttgtgatggtca

SEQ ID NO: 4740 - DNA, 80 bp, synthetic construct
  misc_feature 1..80: note = Synthetic: >MurineCoV-cand-16330-16409
  source 1..80: mol_type = other DNA
aaagtttactgatgagaccttttacaagaacatgtatttaagaagtgcagtgctgcaaagcgttggtgcctgcgttgtct

SEQ ID NO: 4741 - DNA, 80 bp, synthetic construct
  misc_feature 1..80: note = Synthetic: >MurineCoV-cand-16410-16489
  source 1..80: mol_type = other DNA
gtagttctcaaacatcattacgttgtggcagttgcatacgcaagcctttgctgtgttgcaaatgcgcctatgatcatgtt

SEQ ID NO: 4742 - DNA, 80 bp, synthetic construct
  misc_feature 1..80: note = Synthetic: >MurineCoV-cand-16490-16569
  source 1..80: mol_type = other DNA
atgtccactgatcataaatatgtcctgagtgtgtcaccatatgtgtgtaattcaccgggatgtgatgtaaatgatgttac

SEQ ID NO: 4743 - DNA, 80 bp, synthetic construct
  misc_feature 1..80: note = Synthetic: >MurineCoV-cand-16570-16649
  source 1..80: mol_type = other DNA
caaattgtatttaggtggtatgtcatattattgtgaggaccataaaccacagtattcattcaaattggtgatgaatggta

SEQ ID NO: 4744 - DNA, 80 bp, synthetic construct
  misc_feature 1..80: note = Synthetic: >MurineCoV-cand-20480-20559
  source 1..80: mol_type = other DNA
ttagatgatgatgtgttcattgcaaaatatagtttacaggactacgcgtttgaacacgttgtttatggtagttttaacca

SEQ ID NO: 4745 - DNA, 80 bp, synthetic construct
  misc_feature 1..80: note = Synthetic: >MurineCoV-cand-20560-20639
  source 1..80: mol_type = other DNA
gaagattattggaggtttgcatttgcttattggcttagcccgtaggcagcaaaaatccaatctggtaattcaagagttcg

SEQ ID NO: 4746 - DNA, 80 bp, synthetic construct
  misc_feature 1..80: note = Synthetic: >MurineCoV-cand-20640-20719
  source 1..80: mol_type = other DNA
tgacatacgactctagcattcattcgtactttatcactgacgagaacagtggtagtagtaagagtgtgtgcactgttatt

SEQ ID NO: 4747 - DNA, 80 bp, synthetic construct
  misc_feature 1..80: note = Synthetic: >MurineCoV-cand-20720-20799
  source 1..80: mol_type = other DNA
gatttattgttagatgattttgtggacattgtaaagtccctgaatctaaagtgtgtgagtaaggttgttaatgttaatgt

SEQ ID NO: 4748 - DNA, 80 bp, synthetic construct
  misc_feature 1..80: note = Synthetic: >MurineCoV-cand-20800-20879
  source 1..80: mol_type = other DNA
tgattttaaagatttccagtttatgttgtggtgcaatgaggagaaggtcatgactttctatcctcgtttgcaggctgctg

SEQ ID NO: 4749 - DNA, 80 bp, synthetic construct
  misc_feature 1..80: note = Synthetic: >MurineCoV-cand-20880-20959
  source 1..80: mol_type = other DNA
ctgactggaaacctggttatgttatgcctgtcttatataagtatttggaatcgcctctggaaagagtaaacctctggaat

SEQ ID NO: 4750 - DNA, 80 bp, synthetic construct
  misc_feature 1..80: note = Synthetic: >MurineCoV-cand-20960-21039
  source 1..80: mol_type = other DNA
tatggcaagccgattactttacctacaggatgtatgatgaatgttgctaagtatactcaattatgtcaatatttgagcac

SEQ ID NO: 4751 - DNA, 80 bp, synthetic construct
  misc_feature 1..80: note = Synthetic: >MurineCoV-cand-21040-21119
  source 1..80: mol_type = other DNA
tacaacattagcagttccggctaatatgcgtgtcttacaccttggtgccggttcggataagggtgttgcccctgggtctg

SEQ ID NO: 4752 - DNA, 80 bp, synthetic construct
  misc_feature 1..80: note = Synthetic: >MurineCoV-cand-21120-21199
  source 1..80: mol_type = other DNA
cagttcttaggcagtggctaccagcgggaagtattcttgtagataatgatgtgaatccatttgtgagtgacagtgtcgcc

SEQ ID NO: 4753 - DNA, 80 bp, synthetic construct
  misc_feature 1..80: note = Synthetic: >MurineCoV-cand-21200-21279
  source 1..80: mol_type = other DNA
tcatattatggaaattgtataaccttaccctttgattgtcagtgggatctgataatttctgatatgtacgaccctcttac

SEQ ID NO: 4754 - DNA, 80 bp, synthetic construct
  misc_feature 1..80: note = Synthetic: >MurineCoV-cand-21280-21359
  source 1..80: mol_type = other DNA
taagaacattggggagtacaacgtgagtaaagatggattctttacttacctctgtcatttaattcgtgacaagttggctc

SEQ ID NO: 4755 - DNA, 80 bp, synthetic construct
  misc_feature 1..80: note = Synthetic: >MurineCoV-cand-21360-21439
  source 1..80: mol_type = other DNA
tgggtggcagtgttgccataaaaataacagagttttcttggaacgctgagttatatagtttaatggggaagtttgcgttc

SEQ ID NO: 4756 - DNA, 80 bp, synthetic construct
  misc_feature 1..80: note = Synthetic: >MurineCoV-cand-21440-21519
  source 1..80: mol_type = other DNA
tggacaatcttttgcaccaacgtaaacgcctcttcaagtgaaggatttttgattggcataaattggttgaataagacccg

SEQ ID NO: 4757 - DNA, 80 bp, synthetic construct
  misc_feature 1..80: note = Synthetic: >MurineCoV-cand-21520-21599
  source 1..80: mol_type = other DNA
taccgaaattgacggtaaaaccatgcatgccaattatctgttttggagaaatagtacaatgtggaatggaggggcttaca

SEQ ID NO: 4758 - DNA, 80 bp, synthetic construct
  misc_feature 1..80: note = Synthetic: >MurineCoV-cand-21600-21679
  source 1..80: mol_type = other DNA
gtctctttgacatgagtaagttccctttgaaagcggctggtacggctgttgttagccttaaaccagaccaaataaatgac

SEQ ID NO: 4759 - DNA, 80 bp, synthetic construct
  misc_feature 1..80: note = Synthetic: >MurineCoV-cand-21680-21759
  source 1..80: mol_type = other DNA
ttagtcctctccttgattgagaagggcaagttattagtgcgtgatacacgcaaagaagtttttgttggcgatagcctagt

SEQ ID NO: 4760 - DNA, 80 bp, synthetic construct
  misc_feature 1..80: note = Synthetic: >SARSCoV2-cand-8420-8499
  source 1..80: mol_type = other DNA
attgtctgaacaactacgaaaacaaatacgtagtgctgctaaaaagaataacttaccttttaagttgacatgtgcaacta

SEQ ID NO: 4761 - DNA, 80 bp, synthetic construct
  misc_feature 1..80: note = Synthetic: >SARSCoV2-cand-8500-8579
  source 1..80: mol_type = other DNA
ctagacaagttgttaatgttgtaacaacaaagatagcacttaagggtggtaaaattgttaataattggttgaagcagtta

SEQ ID NO: 4762 - DNA, 80 bp, synthetic construct
  misc_feature 1..80: note = Synthetic: >SARSCoV2-cand-8580-8659
  source 1..80: mol_type = other DNA
attaaagttacacttgtgttcctttttgttgctgctattttctatttaataacacctgttcatgtcatgtctaaacatac

SEQ ID NO: 4763 - DNA, 80 bp, synthetic construct
  misc_feature 1..80: note = Synthetic: >SARSCoV2-cand-8660-8739
  source 1..80: mol_type = other DNA
tgacttttcaagtgaaatcataggatacaaggctattgatggtggtgtcactcgtgacatagcatctacagatacttgtt

SEQ ID NO: 4764 - DNA, 80 bp, synthetic construct
  misc_feature 1..80: note = Synthetic: >SARSCoV2-cand-8740-8819
  source 1..80: mol_type = other DNA
ttgctaacaaacatgctgattttgacacatggtttagccagcgtggtggtagttatactaatgacaaagcttgcccattg

SEQ ID NO: 4765 - DNA, 80 bp, synthetic construct
  misc_feature 1..80: note = Synthetic: >SARSCoV2-cand-8820-8899
  source 1..80: mol_type = other DNA
attgctgcagtcataacaagagaagtgggttttgtcgtgcctggtttgcctggcacgatattacgcacaactaatggtga

SEQ ID NO: 4766 - DNA, 80 bp, synthetic construct
  misc_feature 1..80: note = Synthetic: >SARSCoV2-cand-8900-8979
  source 1..80: mol_type = other DNA
ctttttgcatttcttacctagagtttttagtgcagttggtaacatctgttacacaccatcaaaacttatagagtacactg

SEQ ID NO: 4767 - DNA, 80 bp, synthetic construct
  misc_feature 1..80: note = Synthetic: >SARSCoV2-cand-8980-9059
  source 1..80: mol_type = other DNA
actttgcaacatcagcttgtgttttggctgctgaatgtacaatttttaaagatgcttctggtaagccagtaccatattgt

SEQ ID NO: 4768 - DNA, 80 bp, synthetic construct
  misc_feature 1..80: note = Synthetic: >SARSCoV2-cand-9060-9139
  source 1..80: mol_type = other DNA
tatgataccaatgtactagaaggttctgttgcttatgaaagtttacgccctgacacacgttatgtgctcatggatggctc

SEQ ID NO: 4769 - DNA, 80 bp, synthetic construct
  misc_feature 1..80: note = Synthetic: >SARSCoV2-cand-9140-9219
  source 1..80: mol_type = other DNA
tattattcaatttcctaacacctaccttgaaggttctgttagagtggtaacaacttttgattctgagtactgtaggcacg

SEQ ID NO: 4770 - DNA, 80 bp, synthetic construct
  misc_feature 1..80: note = Synthetic: >SARSCoV2-cand-9220-9299
  source 1..80: mol_type = other DNA
gcacttgtgaaagatcagaagctggtgtttgtgtatctactagtggtagatgggtacttaacaatgattattacagatct

SEQ ID NO: 4771 - DNA, 80 bp, synthetic construct
  misc_feature 1..80: note = Synthetic: >SARSCoV2-cand-9300-9379
  source 1..80: mol_type = other DNA
ttaccaggagttttctgtggtgtagatgctgtaaatttacttactaatatgtttacaccactaattcaacctattggtgc

SEQ ID NO: 4772 - DNA, 80 bp, synthetic construct
  misc_feature 1..80: note = Synthetic: >SARSCoV2-cand-9380-9459
  source 1..80: mol_type = other DNA
tttggacatatcagcatctatagtagctggtggtattgtagctatcgtagtaacatgccttgcctactattttatgaggt

SEQ ID NO: 4773 - DNA, 80 bp, synthetic construct
  misc_feature 1..80: note = Synthetic: >SARSCoV2-cand-9460-9539
  source 1..80: mol_type = other DNA
ttagaagagcttttggtgaatacagtcatgtagttgcctttaatactttactattccttatgtcattcactgtactctgt

SEQ ID NO: 4774 - DNA, 80 bp, synthetic construct
  misc_feature 1..80: note = Synthetic: >SARSCoV2-cand-9540-9619
  source 1..80: mol_type = other DNA
ttaacaccagtttactcattcttacctggtgtttattctgttatttacttgtacttgacattttatcttactaatgatgt

SEQ ID NO: 4775 - DNA, 80 bp, synthetic construct
  misc_feature 1..80: note = Synthetic: >SARSCoV2-cand-9620-9699
  source 1..80: mol_type = other DNA
ttcttttttagcacatattcagtggatggttatgttcacacctttagtacctttctggataacaattgcttatatcattt

SEQ ID NO: 4776 - DNA, 80 bp, synthetic construct
  misc_feature 1..80: note = Synthetic: >SARSCoV2-cand-14820-14899
  source 1..80: mol_type = other DNA
caatgtgtgatatcagacaactactatttgtagttgaagttgttgataagtactttgattgttacgatggtggctgtatt

SEQ ID NO: 4777 - DNA, 80 bp, synthetic construct
  misc_feature 1..80: note = Synthetic: >SARSCoV2-cand-14900-14979
  source 1..80: mol_type = other DNA
aatgctaaccaagtcatcgtcaacaacctagacaaatcagctggttttccatttaataaatggggtaaggctagacttta

SEQ ID NO: 4778 - DNA, 80 bp, synthetic construct
  misc_feature 1..80: note = Synthetic: >SARSCoV2-cand-14980-15059
  source 1..80: mol_type = other DNA
ttatgattcaatgagttatgaggatcaagatgcacttttcgcatatacaaaacgtaatgtcatccctactataactcaaa

SEQ ID NO: 4779 - DNA, 80 bp, synthetic construct
  misc_feature 1..80: note = Synthetic: >SARSCoV2-cand-15150-15229
  source 1..80: mol_type = other DNA
atcaaaaattattgaaatcaatagccgccactagaggagctactgtagtaattggaacaagcaaattctatggtggttgg

SEQ ID NO: 4780 - DNA, 80 bp, synthetic construct
  misc_feature 1..80: note = Synthetic: >SARSCoV2-cand-15230-15309
  source 1..80: mol_type = other DNA
cacaacatgttaaaaactgtttatagtgatgtagaaaaccctcaccttatgggttgggattatcctaaatgtgatagagc

SEQ ID NO: 4781 - DNA, 80 bp, synthetic construct
  misc_feature 1..80: note = Synthetic: >SARSCoV2-cand-15310-15389
  source 1..80: mol_type = other DNA
catgcctaacatgcttagaattatggcctcacttgttcttgctcgcaaacatacaacgtgttgtagcttgtcacaccgtt

SEQ ID NO: 4782 - DNA, 80 bp, synthetic construct
  misc_feature 1..80: note = Synthetic: >SARSCoV2-cand-15390-15469
  source 1..80: mol_type = other DNA
tctatagattagctaatgagtgtgctcaagtattgagtgaaatggtcatgtgtggcggttcactatatgttaaaccaggt

SEQ ID NO: 4783 - DNA, 80 bp, synthetic construct
  misc_feature 1..80: note = Synthetic: >SARSCoV2-cand-15470-15549
  source 1..80: mol_type = other DNA
ggaacctcatcaggagatgccacaactgcttatgctaatagtgtttttaacatttgtcaagctgtcacggccaatgttaa

SEQ ID NO: 4784 - DNA, 80 bp, synthetic construct
  misc_feature 1..80: note = Synthetic: >SARSCoV2-cand-15550-15629
  source 1..80: mol_type = other DNA
tgcacttttatctactgatggtaacaaaattgccgataagtatgtccgcaatttacaacacagactttatgagtgtctct

SEQ ID NO: 4785 - DNA, 80 bp, synthetic construct
  misc_feature 1..80: note = Synthetic: >SARSCoV2-cand-15630-15709
  source 1..80: mol_type = other DNA
atagaaatagagatgttgacacagactttgtgaatgagttttacgcatatttgcgtaaacatttctcaatgatgatactc

SEQ ID NO: 4786 - DNA, 80 bp, synthetic construct
  misc_feature 1..80: note = Synthetic: >SARSCoV2-cand-15710-15789
  source 1..80: mol_type = other DNA
tctgacgatgctgttgtgtgtttcaatagcacttatgcatctcaaggtctagtggctagcataaagaactttaagtcagt

SEQ ID NO: 4787 - DNA, 80 bp, synthetic construct
  misc_feature 1..80: note = Synthetic: >SARSCoV2-cand-15870-15949
  source 1..80: mol_type = other DNA
tttgctctcaacatacaatgctagttaaacagggtgatgattatgtgtaccttccttacccagatccatcaagaatccta

SEQ ID NO: 4788 - DNA, 80 bp, synthetic construct
  misc_feature 1..80: note = Synthetic: >SARSCoV2-cand-15950-16029
  source 1..80: mol_type = other DNA
ggggccggctgttttgtagatgatatcgtaaaaacagatggtacacttatgattgaacggttcgtgtctttagctataga

SEQ ID NO: 4789 - DNA, 80 bp, synthetic construct
  misc_feature 1..80: note = Synthetic: >SARSCoV2-cand-16030-16109
  source 1..80: mol_type = other DNA
tgcttacccacttactaaacatcctaatcaggagtatgctgatgtctttcatttgtacttacaatacataagaaagctac

SEQ ID NO: 4790 - DNA, 80 bp, synthetic construct
  misc_feature 1..80: note = Synthetic: >SARSCoV2-cand-18680-18759
  source 1..80: mol_type = other DNA
tgcttttccactgcttcagacacttatgcctgttggcatcattctattggatttgattacgtctataatccgtttatgat

SEQ ID NO: 4791 - DNA, 80 bp, synthetic construct
  misc_feature 1..80: note = Synthetic: >SARSCoV2-cand-18760-18839
  source 1..80: mol_type = other DNA
tgatgttcaacaatggggttttacaggtaacctacaaagcaaccatgatctgtattgtcaagtccatggtaatgcacatg

SEQ ID NO: 4792 - DNA, 80 bp, synthetic construct
  misc_feature 1..80: note = Synthetic: >SARSCoV2-cand-18840-18919
  source 1..80: mol_type = other DNA
tagctagttgtgatgcaatcatgactaggtgtctagctgtccacgagtgctttgttaagcgtgttgactggactattgaa

SEQ ID NO: 4793 - DNA, 80 bp, synthetic construct
  misc_feature 1..80: note = Synthetic: >SARSCoV2-cand-18920-18999
  source 1..80: mol_type = other DNA
tatcctataattggtgatgaactgaagattaatgcggcttgtagaaaggttcaacacatggttgttaaagctgcattatt

SEQ ID NO: 4794 - DNA, 80 bp, synthetic construct
  misc_feature 1..80: note = Synthetic: >SARSCoV2-cand-19000-19079
  source 1..80: mol_type = other DNA
agcagacaaattcccagttcttcacgacattggtaaccctaaagctattaagtgtgtacctcaagctgatgtagaatgga

SEQ ID NO: 4795 - DNA, 80 bp, synthetic construct
  misc_feature 1..80: note = Synthetic: >SARSCoV2-cand-19080-19159
  source 1..80: mol_type = other DNA
agttctatgatgcacagccttgtagtgacaaagcttataaaatagaagaattattctattcttatgccacacattctgac

SEQ ID NO: 4796 - DNA, 80 bp, synthetic construct
  misc_feature 1..80: note = Synthetic: >SARSCoV2-cand-19160-19239
  source 1..80: mol_type = other DNA
aaattcacagatggtgtatgcctattttggaattgcaatgtcgatagatatcctgctaattccattgtttgtagatttga

SEQ ID NO: 4797 - DNA, 80 bp, synthetic construct
  misc_feature 1..80: note = Synthetic: >SARSCoV2-cand-19240-19319
  source 1..80: mol_type = other DNA
cactagagtgctatctaaccttaacttgcctggttgtgatggtggcagtttgtatgtaaataaacatgcattccacacac

SEQ ID NO: 4798 - DNA, 80 bp, synthetic construct
  misc_feature 1..80: note = Synthetic: >SARSCoV2-cand-19320-19399
  source 1..80: mol_type = other DNA
cagcttttgataaaagtgcttttgttaatttaaaacaattaccatttttctattactctgacagtccatgtgagtctcat

SEQ ID NO: 4799 - DNA, 80 bp, synthetic construct
  misc_feature 1..80: note = Synthetic: >SARSCoV2-cand-19400-19479
  source 1..80: mol_type = other DNA
ggaaaacaagtagtgtcagatatagattatgtaccactaaagtctgctacgtgtataacacgttgcaatttaggtggtgc

SEQ ID NO: 4800 - DNA, 80 bp, synthetic construct
  misc_feature 1..80: note = Synthetic: >SARSCoV2-cand-19480-19559
  source 1..80: mol_type = other DNA
tgtctgtagacatcatgctaatgagtacagattgtatctcgatgcttataacatgatgatctcagctggctttagcttgt

SEQ ID NO: 4801 - DNA, 80 bp, synthetic construct
  misc_feature 1..80: note = Synthetic: >SARSCoV2-cand-19560-19639
  source 1..80: mol_type = other DNA
gggtttacaaacaatttgatacttataacctctggaacacttttacaagacttcagagtttagaaaatgtggcttttaat

SEQ ID NO: 4802 - DNA, 80 bp, synthetic construct
  misc_feature 1..80: note = Synthetic: >SARSCoV2-cand-19640-19719
  source 1..80: mol_type = other DNA
gttgtaaataagggacactttgatggacaacagggtgaagtaccagtttctatcattaataacactgtttacacaaaagt

SEQ ID NO: 4803 - DNA, 80 bp, synthetic construct
  misc_feature 1..80: note = Synthetic: >SARSCoV2-cand-19720-19799
  source 1..80: mol_type = other DNA
tgatggtgttgatgtagaattgtttgaaaataaaacaacattacctgttaatgtagcatttgagctttgggctaagcgca

SEQ ID NO: 4804 - DNA, 80 bp, synthetic construct
  misc_feature 1..80: note = Synthetic: >SARSCoV2-cand-19800-19879
  source 1..80: mol_type = other DNA
acattaaaccagtaccagaggtgaaaatactcaataatttgggtgtggacattgctgctaatactgtgatctgggactac

SEQ ID NO: 4805 - DNA, 80 bp, synthetic construct
  misc_feature 1..80: note = Synthetic: >SARSCoV2-cand-19880-19959
  source 1..80: mol_type = other DNA
aaaagagatgctccagcacatatatctactattggtgtttgttctatgactgacatagccaagaaaccaactgaaacgat

SEQ ID NO: 4806 - DNA, 80 bp, synthetic construct
  misc_feature 1..80: note = Synthetic: >SARSCoV2-cand-25170-25249
  source 1..80: mol_type = other DNA
aagtatgagcagtatataaaatggccatggtacatttggctaggttttatagctggcttgattgccatagtaatggtgac

SEQ ID NO: 4807 - DNA, 80 bp, synthetic construct
  misc_feature 1..80: note = Synthetic: >SARSCoV2-cand-25250-25329
  source 1..80: mol_type = other DNA
aattatgctttgctgtatgaccagttgctgtagttgtctcaagggctgttgttcttgtggatcctgctgcaaatttgatg

SEQ ID NO: 4808 - DNA, 80 bp, synthetic construct
  misc_feature 1..80: note = Synthetic: >SARSCoV2-cand-25330-25409
  source 1..80: mol_type = other DNA
aagacgactctgagccagtgctcaaaggagtcaaattacattacacataaacgaacttatggatttgtttatgagaatct

SEQ ID NO: 4809 - DNA, 80 bp, synthetic construct
  misc_feature 1..80: note = Synthetic: >SARSCoV2-cand-25410-25489
  source 1..80: mol_type = other DNA
tcacaattggaactgtaactttgaagcaaggtgaaatcaaggatgctactccttcagattttgttcgcgctactgcaacg

SEQ ID NO: 4810 - DNA, 80 bp, synthetic construct
  misc_feature 1..80: note = Synthetic: >SARSCoV2-cand-25490-25569
  source 1..80: mol_type = other DNA
ataccgatacaagcctcactccctttcggatggcttattgttggcgttgcacttcttgctgtttttcagagcgcttccaa

SEQ ID NO: 4811 - DNA, 80 bp, synthetic construct
  misc_feature 1..80: note = Synthetic: >SARSCoV2-cand-25570-25649
  source 1..80: mol_type = other DNA
aatcataaccctcaaaaagagatggcaactagcactctccaagggtgttcactttgtttgcaacttgctgttgttgtttg

SEQ ID NO: 4812 - DNA, 80 bp, synthetic construct
  misc_feature 1..80: note = Synthetic: >SARSCoV2-cand-25650-25729
  source 1..80: mol_type = other DNA
taacagtttactcacaccttttgctcgttgctgctggccttgaagccccttttctctatctttatgctttagtctacttc

SEQ ID NO: 4813 - DNA, 80 bp, synthetic construct
  misc_feature 1..80: note = Synthetic: >SARSCoV2-cand-25730-25809
  source 1..80: mol_type = other DNA
ttgcagagtataaactttgtaagaataataatgaggctttggctttgctggaaatgccgttccaaaaacccattacttta

SEQ ID NO: 4814 - DNA, 80 bp, synthetic construct
  misc_feature 1..80: note = Synthetic: >SARSCoV2-cand-25810-25889
  source 1..80: mol_type = other DNA
tgatgccaactattttctttgctggcatactaattgttacgactattgtataccttacaatagtgtaacttcttcaattg

SEQ ID NO: 4815 - DNA, 80 bp, synthetic construct
  misc_feature 1..80: note = Synthetic: >SARSCoV2-cand-25890-25969
  source 1..80: mol_type = other DNA
tcattacttcaggtgatggcacaacaagtcctatttctgaacatgactaccagattggtggttatactgaaaaatgggaa

SEQ ID NO: 4816 - DNA, 80 bp, synthetic construct
  misc_feature 1..80: note = Synthetic: >SARSCoV2-cand-25970-26049
  source 1..80: mol_type = other DNA
tctggagtaaaagactgtgttgtattacacagttacttcacttcagactattaccagctgtactcaactcaattgagtac

SEQ ID NO: 4817 - DNA, 80 bp, synthetic construct
  misc_feature 1..80: note = Synthetic: >SARSCoV2-cand-26050-26129
  source 1..80: mol_type = other DNA
agacactggtgttgaacatgttaccttcttcatctacaataaaattgttgatgagcctgaagaacatgtccaaattcaca

SEQ ID NO: 4818 - DNA, 80 bp, synthetic construct
  misc_feature 1..80: note = Synthetic: >SARSCoV2-cand-26130-26209
  source 1..80: mol_type = other DNA
caatcgacggttcatccggagttgttaatccagtaatggaaccaatttatgatgaaccgacgacgactactagcgtgcct

SEQ ID NO: 4819 - DNA, 80 bp, synthetic construct
  misc_feature 1..80: note = Synthetic: >SARSCoV2-cand-26210-26289
  source 1..80: mol_type = other DNA
ttgtaagcacaagctgatgagtacgaacttatgtactcattcgtttcggaagagacaggtacgttaatagttaatagcgt

SEQ ID NO: 4820 - DNA, 80 bp, synthetic construct
  misc_feature 1..80: note = Synthetic: >BtSk_AlphaCoV-cand-16850-16929
  source 1..80: mol_type = other DNA
tgtttttggctaagaatcctaaatgggctaaagctgtttttatttctccttacaacagccaaaattatgttgctggcaga

SEQ ID NO: 4821 - DNA, 80 bp, synthetic construct
  misc_feature 1..80: note = Synthetic: >BatCoV1A-cand-26380-26459
  source 1..80: mol_type = other DNA
aactggaacttcagctggaacatagtgcttactgtctttttgatagtaatgcagtatggtcatttcaaatactcgaccat

SEQ ID NO: 4822 - DNA, 80 bp, synthetic construct
  misc_feature 1..80: note = Synthetic: >MbCoV1-cand-26210-26289
  source 1..80: mol_type = other DNA
gaaactggaacttcagctggaacatagtgcttactgtctttttgatagtaatgcagtatggccatttcaaatactcgacc

SEQ ID NO: 4823 - DNA, 80 bp, synthetic construct
  misc_feature 1..80: note = Synthetic: >MsbCoV1-cand-26200-26279
  source 1..80: mol_type = other DNA
taagaaactggaacttcagctggaacatagtgcttactgtctttttgatagtaatgcagtatggccatttcaaatactcg

SEQ ID NO: 4824 - DNA, 80 bp, synthetic construct
  misc_feature 1..80: note = Synthetic: >Delta-cand-19150-19229
  source 1..80: mol_type = other DNA
aacttagcttacaactgttattataagaactgcaatgctcacgttgatgggcagcttgatgtagttattaataataacgc

SEQ ID NO: 4825 - DNA, 80 bp, synthetic construct
  misc_feature 1..80: note = Synthetic: >Sparrow-cand-17540-17619
  source 1..80: mol_type = other DNA
ccttgaaaacttagcttacaactgttattataagaactgcaatgctcatgctgaaggtcagcttgacgtagttattaata

SEQ ID NO: 4826 - DNA, 80 bp, synthetic construct
  misc_feature 1..80: note = Synthetic: >Quail-cand-17460-17539
  source 1..80: mol_type = other DNA
gaacttagctttcaactgttattataagaactgcaatgctcatgctgaaggtcagcttgacgtagttattaatagtaacg

SEQ ID NO: 4827 - DNA, 80 bp, synthetic construct
  misc_feature 1..80: note = Synthetic: >BatCoV1A-cand-27020-27099
  source 1..80: mol_type = other DNA
aagaaaacctgatatggcttctgttcagtttgaagatactaactctcgtggtcgttctggaagaactccactatcttact

SEQ ID NO: 4828 - DNA, 80 bp, synthetic construct
  misc_feature 1..80: note = Synthetic: >MsbCoV1-cand-26840-26919
  source 1..80: mol_type = other DNA
taaacaagaaaacctgatatggcttctgttcagtttgaagatactaactctcgtggtcgttctggtagaataccactatc

SEQ ID NO: 4829 - DNA, 80 bp, synthetic construct
  misc_feature 1..80: note = Synthetic: >MbCoV1-cand-26850-26929
  source 1..80: mol_type = other DNA
acaagaaaacctgatatggcttctgttcagtttgaagataccaactctcgtggtcgttctggtagaataccactatccta

SEQ ID NO: 4830 - DNA, 80 bp, synthetic construct
  misc_feature 1..80: note = Synthetic: >HKU24-cand-17940-18019
  source 1..80: mol_type = other DNA
aagaaaggaattttctgcgttatgagtaatatgcagttatttgaagcattggattttatgccactcaccttggataaaat

SEQ ID NO: 4831 - DNA, 80 bp, synthetic construct
  misc_feature 1..80: note = Synthetic: >BetaCoV1-cand-18180-18259
  source 1..80: mol_type = other DNA
agaaaggaattttctgtgttatgagtaatatgcagttatttgaagcattggattttatgccactcaccttggataaaata

SEQ ID NO: 4832 - DNA, 80 bp, synthetic construct
  misc_feature 1..80: note = Synthetic: >BetaSp-cand-18290-18369
  source 1..80: mol_type = other DNA
gagcaaagaaaggaattttctgtgttatgagtaatatgcagttatttgaagcattggattttatgccactcaccttggat

SEQ ID NO: 4833 - DNA, 80 bp, synthetic construct
  misc_feature 1..80: note = Synthetic: >Sk512R-cand-10740-10819
  source 1..80: mol_type = other DNA
acttataagttagctacctatgttttgccacatacatctttacttgatagttttgatgctatcaaagcagtggtgttctt

SEQ ID NO: 4834 - DNA, 80 bp, synthetic construct
  misc_feature 1..80: note = Synthetic: >Sb512-cand-10750-10829
  source 1..80: mol_type = other DNA
tataagttagctacctatgttttgccacatacatctttacttgatagttttgatgctatcaaagcagtggtgttcttgta

SEQ ID NO: 4835 - DNA, 80 bp, synthetic construct
  misc_feature 1..80: note = Synthetic: >BtSk_AlphaCoV-cand-10710-10789
  source 1..80: mol_type = other DNA
agttagctacctatgttttgccacatacatctttacttgatagttttgatgctatcaaagcagtggtgttcttgtacctg

SEQ ID NO: 4836 - DNA, 80 bp, synthetic construct
  misc_feature 1..80: note = Synthetic: >Sk512R-cand-9310-9389
  source 1..80: mol_type = other DNA
cattacaagctggcttacgtaagatggcccagccttcaggtattgtggaaggttgtattgtcagagtttcttatggtaat

SEQ ID NO: 4837 - DNA, 80 bp, synthetic construct
  misc_feature 1..80: note = Synthetic: >BetaSp-cand-15890-15969
  source 1..80: mol_type = other DNA
aagctgtttctgccaatgtatgtgctttgatgtcatgcaatggcaataagattgaagatttgagtattcgcagcctacag

SEQ ID NO: 4838 - DNA, 80 bp, synthetic construct
  misc_feature 1..80: note = Synthetic: >HKU24-cand-15540-15619
  source 1..80: mol_type = other DNA
gtctctgccaatgtatgtgccttgatgtcatgcaatggcaataagattgaagatttgagtattcgcagcctacagcggcg

SEQ ID NO: 4839 - DNA, 80 bp, synthetic construct
  misc_feature 1..80: note = Synthetic: >BetaSp-cand-17650-17729
  source 1..80: mol_type = other DNA
aagtatgtatttactaccataaatgcattgcctgagattgtcactgatattgttgttgtagatgaagtaagtatgcttac

SEQ ID NO: 4840 - DNA, 80 bp, synthetic construct
  misc_feature 1..80: note = Synthetic: >HKU24-cand-17300-17379
  source 1..80: mol_type = other DNA
tgtatttactaccataaatgcattggctgagattgtcactgatattgttgttgtagatgaagtaagtatgcttaccaact

SEQ ID NO: 4841 - DNA, 80 bp, synthetic construct
  misc_feature 1..80: note = Synthetic: >BatCoV1A-cand-17540-17619
  source 1..80: mol_type = other DNA
ccgtgttcttggtttgcaaattcagactgttgattcttcacaaggcagtgagtatgattatgtcatttacacgcagactt

SEQ ID NO: 4842 - DNA, 80 bp, synthetic construct
  misc_feature 1..80: note = Synthetic: >MsbCoV1-cand-17360-17439
  source 1..80: mol_type = other DNA
gccgtgttcttggtttgcaaattcagactgttgattcttcgcaaggtagtgagtatgattatgtcatttacacacaaact

SEQ ID NO: 4843 - DNA, 80 bp, synthetic construct
  misc_feature 1..80: note = Synthetic: >AlphaSp-cand-16980-17059
  source 1..80: mol_type = other DNA
ttgggtcttcaaattcaaactgttgattcttcacaaggtagtgagtatgattatgtcatttacacacaaacttctgatac

SEQ ID NO: 4844 - DNA, 80 bp, synthetic construct
  misc_feature 1..80: note = Synthetic: >BtRf_AlphaCoV-cand-18410-18489
  source 1..80: mol_type = other DNA
gttgcctgtggcagttgtaaacgatagagtgtctgttagggatggtgttagtgataatgttatctttgttaataagactt

SEQ ID NO: 4845 - DNA, 80 bp, synthetic construct
  misc_feature 1..80: note = Synthetic: >HKU2R-cand-18450-18529
  source 1..80: mol_type = other DNA
gtggcagttgtaaacgatagagtgtctgttagggatggtgttagtgataatgttatctttgttaataagacttcattacc

SEQ ID NO: 4846 - DNA, 80 bp, synthetic construct
  misc_feature 1..80: note = Synthetic: >SEAC-cand-18600-18679
  source 1..80: mol_type = other DNA
ccaggtgagttgcctgtggcagttgtaaacgatagagtgtctgttagggatggtgttagtgataatgttatctttgttaa

SEQ ID NO: 4847 - DNA, 80 bp, synthetic construct
  misc_feature 1..80: note = Synthetic: >MsbCoV1-cand-25400-25479
  source 1..80: mol_type = other DNA
ttgcttttaggcttgcacttatacttttgtatagtcctttgctgttatactatggatcatttattgatggtacatttatt

SEQ ID NO: 4848 - DNA, 80 bp, synthetic construct
  misc_feature 1..80: note = Synthetic: >MbCoV1-cand-25410-25489
  source 1..80: mol_type = other DNA
cttttaggcttgcacttatacttttgtatagtcctttgctgttatactatggatcatttattgatggtacatttattgca

SEQ ID NO: 4849 - DNA, 80 bp, synthetic construct
  misc_feature 1..80: note = Synthetic: >BatCoV1A-cand-25580-25659
  source 1..80: mol_type = other DNA
tttaggcttgcacttatacttttgtatagtcctttgctgttatactatggatcatttattgatggttcatttattgcaat

SEQ ID NO: 4850 - DNA, 80 bp, synthetic construct
  misc_feature 1..80: note = Synthetic: >BtSk_AlphaCoV-cand-660-739
  source 1..80: mol_type = other DNA
tccaagacagtaaccaatttacactcaatggctttacgtatgttaaggcttgggatgtcgatagaaaacctaatgactat

SEQ ID NO: 4851 - DNA, 80 bp, synthetic construct
  misc_feature 1..80: note = Synthetic: >Sk512R-cand-690-769
  source 1..80: mol_type = other DNA
gattacttccaagacagtaaccaatttacactcaatggcatcacgtatgttaaggcttgggatgtcgatagaaaacctaa

SEQ ID NO: 4852 - DNA, 80 bp, synthetic construct
  misc_feature 1..80: note = Synthetic: >AlphaSp-cand-650-729
  source 1..80: mol_type = other DNA
ggattactttccagatggtaaccaatttacactcaatggcatcacgtatgttaaggcttgggatgtcgatagaaaaccta

SEQ ID NO: 4853 - DNA, 80 bp, synthetic construct
  misc_feature 1..80: note = Synthetic: >BetaSp-cand-18210-18289
  source 1..80: mol_type = other DNA
atatgattatgttatttattcacagactgcggaaacagcgcattctgttaatgtgaaccgcttcaatgtggcaattacca

SEQ ID NO: 4854 - DNA, 80 bp, synthetic construct
  misc_feature 1..80: note = Synthetic: >BetaCoV1-cand-18100-18179
  source 1..80: mol_type = other DNA
ttatgttatttattcacagactgcggaaacagcgcattctgttaatgtgaaccgcttcaatgtggcaattaccagagcaa

SEQ ID NO: 4855 - DNA, 80 bp, synthetic construct
  misc_feature 1..80: note = Synthetic: >HKU24-cand-17860-17939
  source 1..80: mol_type = other DNA
attatgttatttattcccagactgcggaaacagcgcattctgttaatgtgaaccgcttcaatgtggcaattaccagagca

SEQ ID NO: 4856 - DNA, 80 bp, synthetic construct
  misc_feature 1..80: note = Synthetic: >HKU2-cand-13230-13309
  source 1..80: mol_type = other DNA
atatgattttacggatcataaagtcaaactctttgataagtactttaaatactggggccaagattaccatcctaattgta

SEQ ID NO: 4857 - DNA, 80 bp, synthetic construct
  misc_feature 1..80: note = Synthetic: >HKU2R-cand-13050-13129
  source 1..80: mol_type = other DNA
cttgaatatgattttacggatcataaagtcaagctttttgataagtactttaaatactggggccaagattaccatcctaa

SEQ ID NO: 4858 - DNA, 80 bp, synthetic construct
  misc_feature 1..80: note = Synthetic: >BatCoV1A-cand-26620-26699
  source 1..80: mol_type = other DNA
atcaacagtttcaggctttatagaagaacacaatcattctgggcttttaacccagaaactgatgccataattacaatctc

SEQ ID NO: 4859 - DNA, 80 bp, synthetic construct
  misc_feature 1..80: note = Synthetic: >MsbCoV1-cand-26440-26519
  source 1..80: mol_type = other DNA
atttcatcaacagtttcaggctttatagaagaacacagtcattctgggcatttaacccagaaactgatgccataattaca

SEQ ID NO: 4860 - DNA, 80 bp, synthetic construct
  misc_feature 1..80: note = Synthetic: >MbCoV1-cand-26450-26529
  source 1..80: mol_type = other DNA
tcatcaacagtttcaggctttatagaagaacacagtcattctgggcattcaacccagaaactgatgccataattacaatc

SEQ ID NO: 4861 - DNA, 80 bp, synthetic construct
  misc_feature 1..80: note = Synthetic: >AlphaMink-cand-400-479
  source 1..80: mol_type = other DNA
ttgtaccggaatactccagagacctgctttctggttgtcgtgaacaggagtacgtttttggtgtgttcggtgctaatgat

SEQ ID NO: 4862 - DNA, 80 bp, synthetic construct
  misc_feature 1..80: note = Synthetic: >MinkCoV1-cand-400-479
  source 1..80: mol_type = other DNA
gtacctgaatactctagagacctgcttactggttgtcgtgaacaggagtacgtttttggtgtgttcggtgctaatgataa

SEQ ID NO: 4863 - DNA, 80 bp, synthetic construct
  misc_feature 1..80: note = Synthetic: >Sk512R-cand-6680-6759
  source 1..80: mol_type = other DNA
ctttggtggcttctttgttcgcattggtactgtgtattttattatgcagtacattaatgctgctggtgtggcccttggat

SEQ ID NO: 4864 - DNA, 80 bp, synthetic construct
  misc_feature 1..80: note = Synthetic: >MbCoV1-cand-16660-16739
  source 1..80: mol_type = other DNA
tggtaaatctcattgtgtcattggtcttggattgtattatcccaacgcacgtattgtctttacagcttgttctcatgcag

SEQ ID NO: 4865 - DNA, 80 bp, synthetic construct
  misc_feature 1..80: note = Synthetic: >HKU5-cand-6000-6079
  source 1..80: mol_type = other DNA
tacttcaccaagaagcctgtcattgagtattcaccagctacaattctatctggtagtgtatatactaatagttgccttgt

SEQ ID NO: 4866 - DNA, 80 bp, synthetic construct
  misc_feature 1..80: note = Synthetic: >HKU5R-cand-6000-6079
  source 1..80: mol_type = other DNA
ttcactaagaagcctgtcattgagtattcaccagctacaattctatctggtagtgtatatactaatagttgccttgtcgg

SEQ ID NO: 4867 - DNA, 80 bp, synthetic construct
  misc_feature 1..80: note = Synthetic: >Lucheng19-cand-0-79
  source 1..80: mol_type = other DNA
acaagtagtgttttaaaaaccttcaaattagtgcctgtaacatctttgcaatgaaagtagcgctcactagcctctatgca

SEQ ID NO: 4868 - DNA, 80 bp, synthetic construct
  misc_feature 1..80: note = Synthetic: >AcCoV_JC34-cand-10-89
  source 1..80: mol_type = other DNA
ttttaaaaaccttcaaattagtgcctgtaacatctttgcaatgaaagtagcgctcactagcctctatgcaaagaatgtta

SEQ ID NO: 4869 - DNA, 80 bp, synthetic construct
  misc_feature 1..80: note = Synthetic: >MsbCoV1-cand-19040-19119
  source 1..80: mol_type = other DNA
acaatacatatgtccaagctggatttactatttgggttcctaacagttttgacacgtataatttgtggcaaacattagtc

SEQ ID NO: 4870 - DNA, 80 bp, synthetic construct
  misc_feature 1..80: note = Synthetic: >MbCoV1-cand-19060-19139
  source 1..80: mol_type = other DNA
tgtccaagctggatttactatttgggttcctaatagttttgacacgtataatttgtggcaaacattagtcactcctcagt

SEQ ID NO: 4871 - DNA, 80 bp, synthetic construct
  misc_feature 1..80: note = Synthetic: >MsbCoV1-cand-23420-23499
  source 1..80: mol_type = other DNA
acaatacctgctaacttcagttttgtagttcaacctgaatacattcagattatgacaaaacccgttagtgtggattgtag

SEQ ID NO: 4872 - DNA, 80 bp, synthetic construct
  misc_feature 1..80: note = Synthetic: >MbCoV1-cand-23420-23499
  source 1..80: mol_type = other DNA
caacattacaatacctgctaatttcagttttgtagttcaacctgaatacattcagattatgacaaaacccgttagtgtgg

SEQ ID NO: 4873 - DNA, 80 bp, synthetic construct
  misc_feature 1..80: note = Synthetic: >HKU4R-cand-2600-2679
  source 1..80: mol_type = other DNA
gttaatgccaatagtacagttgtagatgttgtgcatggtcaattagaaccaactaatgagcatggtcccagcatgattgt

SEQ ID NO: 4874 - DNA, 80 bp, synthetic construct
  misc_feature 1..80: note = Synthetic: >HKU4-cand-2610-2689
  source 1..80: mol_type = other DNA
taatgccaatagtacagttgtagatgttgtgcatggtcaattagaaccaactaatgagcatggtcccagcatgattgtag

SEQ ID NO: 4875 - DNA, 80 bp, synthetic construct
  misc_feature 1..80: note = Synthetic: >MinkCoV1-cand-19270-19349
  source 1..80: mol_type = other DNA
tgttagatgactttgtgacaatagtcaagggtttggatttgagtgttgtttccaaagttgttgatgtggtggtcgattgt

SEQ ID NO: 4876 - DNA, 80 bp, synthetic construct
  misc_feature 1..80: note = Synthetic: >Alpha2-cand-19230-19309
  source 1..80: mol_type = other DNA
atactattagatgactttgtgacaatagtcaagagtttggacttgagtgttgtttccaaagttgttgatgtggtggtcga

SEQ ID NO: 4877 - DNA, 80 bp, synthetic construct
  misc_feature 1..80: note = Synthetic: >AlphaMink-cand-16080-16159
  source 1..80: mol_type = other DNA
acaatgctcagtacatttttagtactgtaaatgcactaccagaatgtaattgtgatattgttgttgttgatgaagtttct

SEQ ID NO: 4878 - DNA, 80 bp, synthetic construct
  misc_feature 1..80: note = Synthetic: >Alpha2-cand-16070-16149
  source 1..80: mol_type = other DNA
caatgctcagtacatttttagtactgtaaatgcattaccagaatgtaactgtgacattgttgtcgttgatgaagtctcta

SEQ ID NO: 4879 - DNA, 80 bp, synthetic construct
  misc_feature 1..80: note = Synthetic: >AlphaCoV1-cand-29210-29289
  source 1..80: mol_type = other DNA
tttagcagaaaccagattactagtagtagtactgcgagtgatctttctagttcttctagggttttcctgctatacattgt

SEQ ID NO: 4880 - DNA, 80 bp, synthetic construct
  misc_feature 1..80: note = Synthetic: >SEAC-cand-25080-25159
  source 1..80: mol_type = other DNA
gctttatcgcagaacgcgaacgttttgggcatttaaccccgaaacagacgccattgctgtcatttcagtctttggtagat

SEQ ID NO: 4881 - DNA, 80 bp, synthetic construct
  misc_feature 1..80: note = Synthetic: >HKU10R-cand-26460-26539
  source 1..80: mol_type = other DNA
gtaccaactggcatgggtgacaaaaatcaacaaattggctattggaatgaacaaccccgttggagaatggtcaaaggcca

SEQ ID NO: 4882 - DNA, 80 bp, synthetic construct
  misc_feature 1..80: note = Synthetic: >MsbCoV1-cand-17760-17839
  source 1..80: mol_type = other DNA
tagatttgatctaaatgttcctggttatcataccttgttctgcactcgtgacttcgcaatgcgcaatgttagcggttggt

SEQ ID NO: 4883 - DNA, 80 bp, synthetic construct
  misc_feature 1..80: note = Synthetic: >MbCoV1-cand-17780-17859
  source 1..80: mol_type = other DNA
ctaaatgttcctggttatcataccttgttctgcactcgtgactttgcaatgcgcaatgttagaggttggttaggcatgga

SEQ ID NO: 4884 - DNA, 80 bp, synthetic construct
  misc_feature 1..80: note = Synthetic: >HKU14-cand-22110-22189
  source 1..80: mol_type = other DNA
ttataaatagcatgcatttcaattataaaatcactatcaatccctcatcaccggctagacttgaaatagttaagcttggt

SEQ ID NO: 4885 - DNA, 80 bp, synthetic construct
  misc_feature 1..80: note = Synthetic: >HKU23-cand-21940-22019
  source 1..80: mol_type = other DNA
tgatttcataaacagcatgcaattcaattataaaatcactatcaatccttcatcaccggctagacttgaaatagttaagc

SEQ ID NO: 4886 - DNA, 80 bp, synthetic construct
  misc_feature 1..80: note = Synthetic: >HKU4-cand-11310-11389
  source 1..80: mol_type = other DNA
actttgtttgacatatgcaaatattgtatatgaaccacagactttaatatcaagcacattgattgctgtagctaattggt

SEQ ID NO: 4887 - DNA, 80 bp, synthetic construct
  misc_feature 1..80: note = Synthetic: >HKU4R-cand-11310-11389
  source 1..80: mol_type = other DNA
tgacatatgcaaatattgtatatgaaccacagactttagtatcaagcacattgattgctgtagctaattggttgactcct

SEQ ID NO: 4888 - DNA, 80 bp, synthetic construct
  misc_feature 1..80: note = Synthetic: >HKU31-cand-15560-15639
  source 1..80: mol_type = other DNA
catgttgtacaaacagtgatagattttatcgcttagctaatgagtgtgctcaagtgctaagtgaatatgtactttgtggt

SEQ ID NO: 4889 - DNA, 80 bp, synthetic construct
  misc_feature 1..80: note = Synthetic: >HghCoV1-cand-15490-15569
  source 1..80: mol_type = other DNA
acttgttgtacaaacagtgacagattttatcgcttagctaatgagtgtgctcaagtgctaagtgaatatgtactttgtgg

SEQ ID NO: 4890 - DNA, 80 bp, synthetic construct
  misc_feature 1..80: note = Synthetic: >Sb512-cand-6470-6549
  source 1..80: mol_type = other DNA
cacctgttggcacacctatatgcaagcggtatacagatggttacgcaaattccacattcgacaagaatgattattgtggt

SEQ ID NO: 4891 - DNA, 80 bp, synthetic construct
  misc_feature 1..80: note = Synthetic: >BtSk_AlphaCoV-cand-6430-6509
  source 1..80: mol_type = other DNA
tgttggcacacctgtatgcaagcagtatacagatggttacgcaaattccacattcgacaagaatgattattgtggtaacg

SEQ ID NO: 4892 - DNA, 80 bp, synthetic construct
  misc_feature 1..80: note = Synthetic: >BtRf_AlphaCoV-cand-17370-17449
  source 1..80: mol_type = other DNA
accaccatgaagtattttgttaaaataggaccatctcagcattgtgattgtggtaaagaggctcgttgctacaatagtgc

SEQ ID NO: 4893 - DNA, 80 bp, synthetic construct
  misc_feature 1..80: note = Synthetic: >SEAC-cand-17560-17639
  source 1..80: mol_type = other DNA
tggaactcacaaccatgaagtattttgttaaaataggaccatctcagcattgtgattgtggtaaagaggctcgttgctac

SEQ ID NO: 4894 - DNA, 80 bp, synthetic construct
  misc_feature 1..80: note = Synthetic: >229E-cand-17940-18019
  source 1..80: mol_type = other DNA
atgactgctttgttaagaatgtggactggtcaattacctatcctatgatagctaatgaaaaagccataaacaggggtggt

SEQ ID NO: 4895 - DNA, 80 bp, synthetic construct
  misc_feature 1..80: note = Synthetic: >Delta-cand-6000-6079
  source 1..80: mol_type = other DNA
cccagattatctggacattttggatctttggattcgtaaacccaaattcatcctcgtaaagtcgtggagtgttttgggta

SEQ ID NO: 4896 - DNA, 80 bp, synthetic construct
  misc_feature 1..80: note = Synthetic: >WIV16-cand-28910-28989
  source 1..80: mol_type = other DNA
atagtggtccagatgaccaaattggctactaccgaagagctacccgacgagttcgtggtggtgacggcaaaatgaaagag

SEQ ID NO: 4897 - DNA, 80 bp, synthetic construct
  misc_feature 1..80: note = Synthetic: >HKU14-cand-24900-24979
  source 1..80: mol_type = other DNA
tttattcaggcagactcatttacttgtaataatattgatgctgctaagatatatggtatgtgtttttccagcataactat

SEQ ID NO: 4898 - DNA, 80 bp, synthetic construct
  misc_feature 1..80: note = Synthetic: >HKU23-cand-24740-24819
  source 1..80: mol_type = other DNA
tcaggcagactcatttacttgtaataatattgatgctgctaagatatatggtatgtgtttttccagcataactatagata

SEQ ID NO: 4899 - DNA, 80 bp, synthetic construct
  misc_feature 1..80: note = Synthetic: >AlphaMink-cand-25540-25619
  source 1..80: mol_type = other DNA
atagttgtttaactcaactaaacaaataatggaggtgttattggtagcagcaactgctgtgttgtctgccataccaacta

SEQ ID NO: 4900 - DNA, 80 bp, synthetic construct
  misc_feature 1..80: note = Synthetic: >Alpha2-cand-25530-25609
  source 1..80: mol_type = other DNA
tatagttgtttaactcaactaaacaaataatggaggtgctgttagtagcagcaactgttgtgctatctgctataccaacc

SEQ ID NO: 4901 - DNA, 80 bp, synthetic construct
  misc_feature 1..80: note = Synthetic: >HghCoV1-cand-17170-17249
  source 1..80: mol_type = other DNA
gtaggttataataagtttgtcactgtacaaggaccacctggcactggcaaaagtcattttgctgtgggtttagctatata

SEQ ID NO: 4902 - DNA, 80 bp, synthetic construct
  misc_feature 1..80: note = Synthetic: >BetaCoV1-cand-28350-28429
  source 1..80: mol_type = other DNA
tgctattttggttctaacacctatattagtagcactagtagttggagttcttctcctttatttttccaaatttgtgatat

SEQ ID NO: 4903 - DNA, 80 bp, synthetic construct
  misc_feature 1..80: note = Synthetic: >BetaSp-cand-28460-28539
  source 1..80: mol_type = other DNA
gattattgctattttggttctaacacctatattagtagcactagtagttggagttcttctcctttatttttccaaatttg

SEQ ID NO: 4904 - DNA, 80 bp, synthetic construct
  misc_feature 1..80: note = Synthetic: >HKU5R-cand-23040-23119
  source 1..80: mol_type = other DNA
catcgagtttcacctagtagtcttgctactggctgttactcttctcttacagtggattattttgcatactccactgatat

SEQ ID NO: 4905 - DNA, 80 bp, synthetic construct
  misc_feature 1..80: note = Synthetic: >MsbCoV1-cand-5850-5929
  source 1..80: mol_type = other DNA
atatgcttgaccatggtgcctatgcatttgacagtgatgtcgttgatggcaaacgtgcactagttggaactgacaataat

SEQ ID NO: 4906 - DNA, 80 bp, synthetic construct
  misc_feature 1..80: note = Synthetic: >MbCoV1-cand-5850-5929
  source 1..80: mol_type = other DNA
gctgaatttcatatgcttgaccatagtgcttttgcatttgacaatgatgtcgttgatggcaaacgtgcactagttggaac

SEQ ID NO: 4907 - DNA, 80 bp, synthetic construct
  misc_feature 1..80: note = Synthetic: >HKU18-cand-17320-17399
  source 1..80: mol_type = other DNA
cacggattgtagcgcggagcagcctattgttgttacttatcgtgactgtgttactcgctgtaacactggcactaccatat

SEQ ID NO: 4908 - DNA, 80 bp, synthetic construct
  misc_feature 1..80: note = Synthetic: >BetaSp-cand-16690-16769
  source 1..80: mol_type = other DNA
catgtaatgtctactgatcataaatacgtcctaagcgtatcaccatatgtgtgtaatgcaccaggatgtgatgtgaatga

SEQ ID NO: 4909 - DNA, 80 bp, synthetic construct
  misc_feature 1..80: note = Synthetic: >Sb512-cand-8680-8759
  source 1..80: mol_type = other DNA
atgtctggccagattttgcttaactgtgtggtagcatttaccgctgttatggcttgttttgccttcactaagtttaagcg

SEQ ID NO: 4910 - DNA, 80 bp, synthetic construct
  misc_feature 1..80: note = Synthetic: >Sk512R-cand-8670-8749
  source 1..80: mol_type = other DNA
gttatgtctggccagattttgcttaactgtgtggtagcatttaccgctgttatggcttgttttgccttcactaagtttaa

SEQ ID NO: 4911 - DNA, 80 bp, synthetic construct
  misc_feature 1..80: note = Synthetic: >HKU18-cand-26340-26419
  source 1..80: mol_type = other DNA
tctaactatacaagccagagagccagtcagagggcgctaccatgcaaactagggctggctactcttgcacagaatcacat

SEQ ID NO: 4912 - DNA, 80 bp, synthetic construct
  misc_feature 1..80: note = Synthetic: >HKU11-cand-26120-26199
  source 1..80: mol_type = other DNA
gaaggtttcagcaaattataaagccagagagccagtcagagggcgctaccatgcaaactagggctggctactcttgcaca

SEQ ID NO: 4913 - DNA, 80 bp, synthetic construct
  misc_feature 1..80: note = Synthetic: >HKU15-cand-11850-11929
  source 1..80: mol_type = other DNA
atgtgcggaacccctgaagattggtttggggaaaattggtttgatccaattgagaacccatccttttacaaggagttcca

SEQ ID NO: 4914 - DNA, 80 bp, synthetic construct
  misc_feature 1..80: note = Synthetic: >Delta-cand-13350-13429
  source 1..80: mol_type = other DNA
cggaacccctgaagattggtttggggaaaattggtttgatccaattgagaacccatccttttacaaggagttccataaac

SEQ ID NO: 4915 - DNA, 80 bp, synthetic construct
  misc_feature 1..80: note = Synthetic: >AlphaMink-cand-16160-16239
  source 1..80: mol_type = other DNA
atgtgtacaaattatgagcttagcgttattaatagtcgcgtaagctacaaacacatagtttatgtaggagacccacaaca

SEQ ID NO: 4916 - DNA, 80 bp, synthetic construct
  misc_feature 1..80: note = Synthetic: >MinkCoV1-cand-16190-16269
  source 1..80: mol_type = other DNA
taccaattatgagcttagcgttattaacagtcgtgtaagctataaacacatagtttatgtaggagacccacaacagttac

SEQ ID NO: 4917 - DNA, 80 bp, synthetic construct
  misc_feature 1..80: note = Synthetic: >FelineAlpha1-cand-19440-19519
  source 1..80: mol_type = other DNA
tgtgtctcgaacggtgtaatctctacaattatggcgcacaagtgaagttacctgacggcattactactaatgtcgttaag

SEQ ID NO: 4918 - DNA, 80 bp, synthetic construct
  misc_feature 1..80: note = Synthetic: >HKU5R-cand-26570-26649
  source 1..80: mol_type = other DNA
atgtgtgaaaaacccacacattgcattcgcttggttttcgaccaatcattacgctgggtgcattttgatggtatcaaaaa

SEQ ID NO: 4919 - DNA, 80 bp, synthetic construct
  misc_feature 1..80: note = Synthetic: >HKU5-cand-26580-26659
  source 1..80: mol_type = other DNA
tgtgtgaaaaacccacacattgtattcgcttggttttcgaccaatcattacgctgggtgcattttgatggtatcaaaaac

SEQ ID NO: 4920 - DNA, 80 bp, synthetic construct
  misc_feature 1..80: note = Synthetic: >Sb512-cand-2700-2779
  source 1..80: mol_type = other DNA
ttgttatcacacagtgacacgcttgtttgcaaaggacctgcaaattccaacagaagatggtgttgccgattttaacacat

SEQ ID NO: 4921 - DNA, 80 bp, synthetic construct
  misc_feature 1..80: note = Synthetic: >Sk512R-cand-2690-2769
  source 1..80: mol_type = other DNA
cggttgttatcacacagtgacacgcttgtttgcaaaggacctgcaaattccaacagaagatggtgttgccgattttaaca

SEQ ID NO: 4922 - DNA, 80 bp, synthetic construct
  misc_feature 1..80: note = Synthetic: >HKU4-cand-5090-5169
  source 1..80: mol_type = other DNA
atgttacatttttgcaacgatattattcactgcagccattggttcagcagtggaaatttgttgtacatgatggtgttaag

SEQ ID NO: 4923 - DNA, 80 bp, synthetic construct
  misc_feature 1..80: note = Synthetic: >HKU8-cand-6230-6309
  source 1..80: mol_type = other DNA
ttgagtttttgtctaagggtgttacagccatgtggaatgagtttctaactggtgatgttgcccgattcgttcactggcta

SEQ ID NO: 4924 - DNA, 80 bp, synthetic construct
  misc_feature 1..80: note = Synthetic: >AcCoV_JC34-cand-18700-18779
  source 1..80: mol_type = other DNA
gcccttctctaatttcacttatgagtgttgtaagtacacggacgttaaccacccatacaaccttgtctatgatggcagta

SEQ ID NO: 4925 - DNA, 80 bp, synthetic construct
  misc_feature 1..80: note = Synthetic: >Lucheng19-cand-19050-19129
  source 1..80: mol_type = other DNA
ttctctaatttcacttatgagtgttgtaagtacacggacgtgaaccacccatacaaccttggctatgatggcagtatcca

SEQ ID NO: 4926 - DNA, 80 bp, synthetic construct
  misc_feature 1..80: note = Synthetic: >BetaCoV1-cand-10220-10299
  source 1..80: mol_type = other DNA
gcttgttctcagttggcaaaagcacttgatacatttaaccataataatggtaatgatgtgctttaccaaccaccgacggc

SEQ ID NO: 4927 - DNA, 80 bp, synthetic construct
  misc_feature 1..80: note = Synthetic: >HKU18-cand-23080-23159
  source 1..80: mol_type = other DNA
gcctagcatgtgcaaaactcagctacaaatgttttctaggtgccaaatacctagtaaatccaattattgtgtactattca

SEQ ID NO: 4928 - DNA, 80 bp, synthetic construct
  misc_feature 1..80: note = Synthetic: >HKU20_FJ376622-cand-23060-23139
  source 1..80: mol_type = other DNA
ttagcatgtgctaagctcagctataaatgttttctaggtgccaaatacctagtaaatccaattattgtgtactattcaaa

SEQ ID NO: 4929 - DNA, 80 bp, synthetic construct
  misc_feature 1..80: note = Synthetic: >Sb512-cand-9960-10039
  source 1..80: mol_type = other DNA
taatggtgatcgctggtggctcagttctgttagtgtaggtgtagatacttataatgagtgggccttgcgcaatggaatga

SEQ ID NO: 4930 - DNA, 80 bp, synthetic construct
  misc_feature 1..80: note = Synthetic: >HghCoV1-cand-19410-19489
  source 1..80: mol_type = other DNA
tgctttccatacaccagcgtatgatgttagtgcatttcgcaatttgaaacctatgcctttcttctattattctaccacgc

SEQ ID NO: 4931 - DNA, 80 bp, synthetic construct
  misc_feature 1..80: note = Synthetic: >HKU31-cand-19480-19559
  source 1..80: mol_type = other DNA
gctttccatacaccagcgtatgatgttagtgcatttcgtaatttgaaacctatgcctttcttctattattctaccacacc

SEQ ID NO: 4932 - DNA, 80 bp, synthetic construct
  misc_feature 1..80: note = Synthetic: >HghCoV1-cand-15410-15489
  source 1..80: mol_type = other DNA
gggattaccctaagtgtgatagagctatgcctaatatgtgtagaatttttgcatcattggtgttagctcgtaaacatagc

SEQ ID NO: 4933 - DNA, 80 bp, synthetic construct
  misc_feature 1..80: note = Synthetic: >HKU31-cand-15480-15559
  source 1..80: mol_type = other DNA
ggattaccctaagtgtgatagagctatgcctaatatgtgtagaatatttgcatcattggtattagctcgtaaacatagca

SEQ ID NO: 4934 - DNA, 80 bp, synthetic construct
  misc_feature 1..80: note = Synthetic: >BatCoV1A-cand-15150-15229
  source 1..80: mol_type = other DNA
gctcaagtgctaactgaggtggtctattctaatggcggtttttatttaaaaccaggtggtacgacatcgggtgatgcaac

SEQ ID NO: 4935 - DNA, 80 bp, synthetic construct
  misc_feature 1..80: note = Synthetic: >MbCoV1-cand-14980-15059
  source 1..80: mol_type = other DNA
ggcacaagtgctaactgaggtggtctattctaacggcggtttttatttgaaaccaggtggtacgacatcgggtgatgcaa

SEQ ID NO: 4936 - DNA, 80 bp, synthetic construct
  misc_feature 1..80: note = Synthetic: >MN548285-cand-400-479
  source 1..80: mol_type = other DNA
cgttgggctacgttctcgcacaaggtcggctatacggcgtttgtagggggtagtgccaaacaacccctgaggtgacaggt

SEQ ID NO: 4937 - DNA, 80 bp, synthetic construct
  misc_feature 1..80: note = Synthetic: >MK953937-cand-27350-27429
  source 1..80: mol_type = other DNA
atcgccagggaaatgtctaatctgtttacttagtagcctggaaacgaacggtagacccttagattttaatttagtttaat

SEQ ID NO: 4938 - DNA, 80 bp, synthetic construct
  misc_feature 1..80: note = Synthetic: >MN199464-cand-27330-27409
  source 1..80: mol_type = other DNA
atcgccagggaaatgtctaatctgtctacttagtagcctggaaacgaacggtagacccttagattttaatatagtttaat

SEQ ID NO: 4939 - DNA, 80 bp, synthetic construct
  misc_feature 1..80: note = Synthetic: >NC_010800-cand-240-319
  source 1..80: mol_type = other DNA
cagcgtcctacgggcgttgtggtcggttcgagtgcgaaggacctctggttcatctagcggtaggcgggtgtgtggaagta

SEQ ID NO: 4940 - DNA, 80 bp, synthetic construct
  misc_feature 1..80: note = Synthetic: >LC061274-cand-400-479
  source 1..80: mol_type = other DNA
ttcaggagggttgtgtgcagtccaacctgatacgtgaaataaagatgaatacacgtcctgatgatatggaccgtgttatt

SEQ ID NO: 4941 - DNA, 80 bp, synthetic construct
  misc_feature 1..80: note = Synthetic: >MT114539-cand-8590-8669
  source 1..80: mol_type = other DNA
aatcatatgctaatagcttcaataaatataagtactacacaggttcaatgggagaagctgactacagaatggcttgctat

SEQ ID NO: 4942 - DNA, 80 bp, synthetic construct
  misc_feature 1..80: note = Synthetic: >AY692454-cand-13130-13209
  source 1..80: mol_type = other DNA
aatcttatgatctcctcaagtatgattatactgaggagaaacacgaattgtttcagaagtactttaagtactgggatcaa

SEQ ID NO: 4943 - DNA, 80 bp, synthetic construct
  misc_feature 1..80: note = Synthetic: >MT114540-cand-27120-27199
  source 1..80: mol_type = other DNA
aatgaatccaaagctttgaaattcgatggtaaagttccaggtgaatttcaacttgaagtgaaccaatcaagggacaattc

SEQ ID NO: 4944 - DNA, 80 bp, synthetic construct
  misc_feature 1..80: note = Synthetic: >MN128088-cand-22100-22179
  source 1..80: mol_type = other DNA
gttcacttaaacaaatagtaccacaagaattacaacatttcgtggcacctttacttaatgttacagaatatgtgctcata

SEQ ID NO: 4945 - DNA, 80 bp, synthetic construct
  misc_feature 1..80: note = Synthetic: >MN517817-cand-17970-18049
  source 1..80: mol_type = other DNA
aatgttgtctatgatataggcaaccctaaaggtataaaatgtgttagacgtggagatgtcagttttaggttctatgataa

SEQ ID NO: 4946 - DNA, 80 bp, synthetic construct
  misc_feature 1..80: note = Synthetic: >MK957245-cand-17890-17969
  source 1..80: mol_type = other DNA
aatgttgtctatgatataggcaaccctaaaggtattaagtgtgttaggcgtggggatgtcgcttttaggttctatgataa

SEQ ID NO: 4947 - DNA, 80 bp, synthetic construct
  misc_feature 1..80: note = Synthetic: >MN509588-cand-17650-17729
  source 1..80: mol_type = other DNA
atactcaagcttatgcttgttggaagcattgcttgggctttgattttgtttataacccacttttagtggatgttcagcaa

SEQ ID NO: 4948 - DNA, 80 bp, synthetic construct
  misc_feature 1..80: note = Synthetic: >MG693168-cand-1540-1619
  source 1..80: mol_type = other DNA
atagctgatgctcttcctgaagatcacgatgcagttactttgaatgtggacttggtcaagcagtatctttttgatgctaa

SEQ ID NO: 4949 - DNA, 80 bp, synthetic construct
  misc_feature 1..80: note = Synthetic: >MT114540-cand-20480-20559
  source 1..80: mol_type = other DNA
cttatcgggatgatgtgcaacataggccacttttaaaacatggattagtgtgcataactgaaagtcgcaatattgactat

SEQ ID NO: 4950 - DNA, 80 bp, synthetic construct
  misc_feature 1..80: note = Synthetic: >MT114542-cand-24220-24299
  source 1..80: mol_type = other DNA
ggtgaaattgatgacttagaatttaggtcagaaaagctacataatactactgtagaacttgccattctcattgacaatat

SEQ ID NO: 4951 - DNA, 80 bp, synthetic construct
  misc_feature 1..80: note = Synthetic: >MN128088-cand-2780-2859
  source 1..80: mol_type = other DNA
catttgagaatgttgcacttgtggataaaaacggtaaagacttggattgcataaaatcatgccatcttatctaccgtgac

SEQ ID NO: 4952 - DNA, 80 bp, synthetic construct
  misc_feature 1..80: note = Synthetic: >AJ311317-cand-2400-2479
  source 1..80: mol_type = other DNA
ttccagaaaaccaacctggtcatatggttcaaatagaggatgatggtaagaactacatgttcttccgttttaaaaaggat

SEQ ID NO: 4953 - DNA, 80 bp, synthetic construct
  misc_feature 1..80: note = Synthetic: >SBB-120-cand-900-979
  source 1..80: mol_type = other DNA
ttgataagtattacaacaaactctacgatgctgtcggtgtgccttttgtgaacaatggtactaatctcagagaaatttta

SEQ ID NO: 4954 - DNA, 80 bp, synthetic construct
  misc_feature 1..80: note = Synthetic: >SBB-130-cand-890-969
  source 1..80: mol_type = other DNA
gctgtagtgcttgacaagtattacaacaaactctacgatgctgttggtgtgccttttgtcaacaatggtaccaatctcag

SEQ ID NO: 4955 - DNA, 80 bp, synthetic construct
  misc_feature 1..80: note = Synthetic: >SBB-747-cand-11670-11749
  source 1..80: mol_type = other DNA
ggagcgcatgtctgaattagcgatgactgctatgtataagcaggcacgcgctgaggataggcgctctaaggttacagcag

SEQ ID NO: 4956 - DNA, 80 bp, synthetic construct
  misc_feature 1..80: note = Synthetic: >SBB-797-cand-11680-11759
  source 1..80: mol_type = other DNA
tccgaattagcgatgactgctatgtataagcaggcacgcgctgaggataggcgctctaaggttacagcagctatgcaaac

SEQ ID NO: 4957 - DNA, 80 bp, synthetic construct
  misc_feature 1..80: note = Synthetic: >SBB-788-cand-12080-12159
  source 1..80: mol_type = other DNA
ctgtcaaattgcaaaataatgagcttatgcctcaaactgttaagcgtatgaatgtagtagcaggtgtaagtcagactgca

SEQ ID NO: 4958 - DNA, 80 bp, synthetic construct
  misc_feature 1..80: note = Synthetic: >SBB-747-cand-12070-12149
  source 1..80: mol_type = other DNA
gccacatcacctgtcaaattgcaaaataatgagcttatgcctcaaactgttaagcgtatgaatgtagtagcaggtgtaag

SEQ ID NO: 4959 - DNA, 80 bp, synthetic construct
  misc_feature 1..80: note = Synthetic: >SBB-747-cand-10470-10549
  source 1..80: mol_type = other DNA
ctttgttggtgcattgcctttgacattgctattaccgcttatagggtttgtagcattgtgtgtaagttttgtttcattgc

SEQ ID NO: 4960 - DNA, 80 bp, synthetic construct
  misc_feature 1..80: note = Synthetic: >SBB-797-cand-10480-10559
  source 1..80: mol_type = other DNA
gcattgcctttgacattgctattaccgcttatagggtttgtagcattgtgtgtaagttttgtttcattgcttataaagca

SEQ ID NO: 4961 - DNA, 80 bp, synthetic construct
  misc_feature 1..80: note = Synthetic: >SBB-747-cand-5350-5429
  source 1..80: mol_type = other DNA
gatagtaaggttgtaacttactacctagatggtgttaagcgtactaccatagacccagatcttagtaagtatgtaaagaa

SEQ ID NO: 4962 - DNA, 80 bp, synthetic construct
  misc_feature 1..80: note = Synthetic: >PRD-0038-cand-19830-19909
  source 1..80: mol_type = other DNA
aattctatttgatggtagaattgagggccaggttgatttattcagaaatgctcgcaatggtgttttaattactgaaggtt

SEQ ID NO: 4963 - DNA, 80 bp, synthetic construct
  misc_feature 1..80: note = Synthetic: >PDF-2386-cand-19840-19919
  source 1..80: mol_type = other DNA
gatggtagagttgagggccaggtcgatttattcagaaatgctcgcaatggtgttttaattactgaaggttccgtgaaggg

SEQ ID NO: 4964 - DNA, 80 bp, synthetic construct
  misc_feature 1..80: note = Synthetic: >SBB-041-cand-15630-15709
  source 1..80: mol_type = other DNA
cacgcttaaggaggttgtaggccctaaagaattgctacttagttgggagtgtggtaaagttaaaccacccctcaaccgta

SEQ ID NO: 4965 - DNA, 80 bp, synthetic construct
  misc_feature 1..80: note = Synthetic: >SBB-041-cand-13550-13629
  source 1..80: mol_type = other DNA
aacgtactgtttgcttttctgtagcagctttgagtaccggtatgacgaaacagactgtgcagccagggcattttaataag

SEQ ID NO: 4966 - DNA, 80 bp, synthetic construct
  misc_feature 1..80: note = Synthetic: >SBB-010-cand-13560-13639
  source 1..80: mol_type = other DNA
ttgcttttctgtagcagctctgagtaccggtatgactaaacagactgtgcagccagggcattttaataaggaattctacg

SEQ ID NO: 4967 - DNA, 80 bp, synthetic construct
  misc_feature 1..80: note = Synthetic: >SBB-130-cand-9300-9379
  source 1..80: mol_type = other DNA
taggtaatgtgtttttaggtgttataggtgttactatgaagggcacaactttgcaaattaaagtaaaccagaccaacgtt

SEQ ID NO: 4968 - DNA, 80 bp, synthetic construct
  misc_feature 1..80: note = Synthetic: >SBB-053-cand-9310-9389
  source 1..80: mol_type = other DNA
tgtgtttttaggtgttataggtgttactatgaagggtacaactttgcaaatcaaagttaaccagaccaatgttcacacgc

SEQ ID NO: 4969 - DNA, 80 bp, synthetic construct
  misc_feature 1..80: note = Synthetic: >PDF-2386-cand-10160-10239
  source 1..80: mol_type = other DNA
ttgcttaggcttaaagttgatacttctaatcctaaaacacctaagtacaaatttgtacgtgttcaaccaggccaaacgtt

SEQ ID NO: 4970 - DNA, 80 bp, synthetic construct
  misc_feature 1..80: note = Synthetic: >SBB-041-cand-1560-1639
  source 1..80: mol_type = other DNA
aactcatagctcttgctaaagctctttcaagctcggtcttgcaagttactaaggatggtctttcctttactgctaacata

SEQ ID NO: 4971 - DNA, 80 bp, synthetic construct
  misc_feature 1..80: note = Synthetic: >GCS-227-cand-5850-5929
  source 1..80: mol_type = other DNA
agaaaggtgaaccaggtgatgctgaagctgttttgataaaactggacaggtatcttgtaccatctggcacagtcacaatt

SEQ ID NO: 4972 - DNA, 80 bp, synthetic construct
  misc_feature 1..80: note = Synthetic: >GCS-211-cand-5850-5929
  source 1..80: mol_type = other DNA
taagaaaggtgaaccaggtgatgctgaagctgttttgataaaactggacaggtatcttgtaccatctggcacagtcacaa

SEQ ID NO: 4973 - DNA, 80 bp, synthetic construct
  misc_feature 1..80: note = Synthetic: >GCS-227-cand-22930-23009
  source 1..80: mol_type = other DNA
acaaacttgtgggtgttctgactgctgataatgacacaatactgggttttaacagtaccgttgtcatgcccacattctat

SEQ ID NO: 4974 - DNA, 80 bp, synthetic construct
  misc_feature 1..80: note = Synthetic: >GCS-211-cand-22940-23019
  source 1..80: mol_type = other DNA
gtgggtgttctgactgctgacaatgacacaatactgggttttaacagtaccgttgtcatgcccacattctattaccacac

SEQ ID NO: 4975 - DNA, 80 bp, synthetic construct
  misc_feature 1..80: note = Synthetic: >GCS-211-cand-15590-15669
  source 1..80: mol_type = other DNA
gttgcaagcttctggtatgtgtgttgtttgtggttctcaaacagttcttaggtgtggtgattgcatacgaagacctttgt

SEQ ID NO: 4976 - DNA, 80 bp, synthetic construct
  misc_feature 1..80: note = Synthetic: >GCS-227-cand-15590-15669
  source 1..80: mol_type = other DNA
tgcaagcttctggtatgtgtgttgtttgtggttctcaaacagttcttaggtgtggtgattgcatacgaagacctttgttg

SEQ ID NO: 4977 - DNA, 80 bp, synthetic construct
  misc_feature 1..80: note = Synthetic: >SBB-122-cand-13760-13839
  source 1..80: mol_type = other DNA
ctactgttcttgacatttgtcaggctcgtgttgcttacaaaattgttagccgttactttgaaatttatgaaggtggttgt

SEQ ID NO: 4978 - DNA, 80 bp, synthetic construct
  misc_feature 1..80: note = Synthetic: >SBB-122-cand-8470-8549
  source 1..80: mol_type = other DNA
gctgaattgttttgtagcttttcttgctattgtgacatgtctgatggtaaccaagtttaagcgtatgtttggtgagctgt

SEQ ID NO: 4979 - DNA, 80 bp, synthetic construct
  misc_feature 1..80: note = Synthetic: >GCS-227-cand-9360-9439
  source 1..80: mol_type = other DNA
acaagtattatagtggtgctgctggtgaaggtgattataggcttgcttgttatgcacatcttgcatatgctatgcaacgt

SEQ ID NO: 4980 - DNA, 80 bp, synthetic construct
  misc_feature 1..80: note = Synthetic: >GCS-211-cand-9360-9439
  source 1..80: mol_type = other DNA
atacaagtattatagtggtgctgctggtgaaggtgattataggcttgcttgttatgcacatcttgcatatgctatgcaac

SEQ ID NO: 4981 - DNA, 80 bp, synthetic construct
  misc_feature 1..80: note = Synthetic: >GCS-211-cand-8880-8959
  source 1..80: mol_type = other DNA
atttaactgttttattgctggtgttgttgtgctttgctgctacatttttatgaagtttaaacgtgtttttggtgacttgt

SEQ ID NO: 4982 - DNA, 80 bp, synthetic construct
  misc_feature 1..80: note = Synthetic: >GCS-227-cand-8880-8959
  source 1..80: mol_type = other DNA
ttaactgttttattgctggtgttgttgtgctttgttgctacacttttatgaagtttaaacgtgtttttggtgacttgtcc

SEQ ID NO: 4983 - DNA, 80 bp, synthetic construct
  misc_feature 1..80: note = Synthetic: >GCS-211-cand-16710-16789
  source 1..80: mol_type = other DNA
gttgtagtggatgaagtttccatgtgtaccaactatgatttgtctgtgattaaccaacgtgttagttacaagcatattgt

SEQ ID NO: 4984 - DNA, 80 bp, synthetic construct
  misc_feature 1..80: note = Synthetic: >GCS-227-cand-16700-16779
  source 1..80: mol_type = other DNA
tggacattgttgtagtggatgaagtttccatgtgtaccaactatgatttgtctgtgattaaccaacgtgttagttacaag

SEQ ID NO: 4985 - DNA, 80 bp, synthetic construct
  misc_feature 1..80: note = Synthetic: >GCS-227-cand-9120-9199
  source 1..80: mol_type = other DNA
atgtcttcttagcaccgtggtggttggttacaatttatgttgttaccatgttgttggaaatagtcccgaacataaccaaa

SEQ ID NO: 4986 - DNA, 80 bp, synthetic construct
  misc_feature 1..80: note = Synthetic: >GCS-211-cand-9120-9199
  source 1..80: mol_type = other DNA
ctatgtcttcttagcaccgtggtggttggttacaatttatgttgttaccatgttgttggaaatagtcccgaacataacca

SEQ ID NO: 4987 - DNA, 80 bp, synthetic construct
  misc_feature 1..80: note = Synthetic: >SBB-024-cand-7530-7609
  source 1..80: mol_type = other DNA
atgtgctttccgaagaaggacgtaagtatgttgttaagacagcaaagcttaagggtgttaactttatgcttacttttaac

SEQ ID NO: 4988 - DNA, 80 bp, synthetic construct
  misc_feature 1..80: note = Synthetic: >GCS-227-cand-5370-5449
  source 1..80: mol_type = other DNA
tgttggctgctgactctagcatagatgagtgtttcaaacctggtgttgttactgttaaggtttctcatgacggtgttaat

SEQ ID NO: 4989 - DNA, 80 bp, synthetic construct
  misc_feature 1..80: note = Synthetic: >GCS-211-cand-5370-5449
  source 1..80: mol_type = other DNA
tgtgttggctgctgactctagcatagatgagtgtttcaaacctggtgttgttactgttaaggtttctcatgacggtgtta

SEQ ID NO: 4990 - DNA, 80 bp, synthetic construct
  misc_feature 1..80: note = Synthetic: >SBB-726-cand-21050-21129
  source 1..80: mol_type = other DNA
gtcagacacttaagcagtccctttacatagcagatacgtctaataccacggtttatccagtaacaccacctgctgttaat

SEQ ID NO: 4991 - DNA, 80 bp, synthetic construct
  misc_feature 1..80: note = Synthetic: >GCS-211-cand-24060-24139
  source 1..80: mol_type = other DNA
tgaacgcgtttgttgcccagacactcaaccggtatacagaggtgaaagcctcacgggcactggcttttgagaagattaat

SEQ ID NO: 4992 - DNA, 80 bp, synthetic construct
  misc_feature 1..80: note = Synthetic: >GCS-227-cand-24050-24129
  source 1..80: mol_type = other DNA
tgcatcgttgaacgcgtttgttgcccagacactcaaccggtatacagaggtgaaagcctcacgggcactggcttttgaga

SEQ ID NO: 4993 - DNA, 80 bp, synthetic construct
  misc_feature 1..80: note = Synthetic: >GCS-211-cand-21180-21259
  source 1..80: mol_type = other DNA
gttggcagttccatatgtttaaaaatagagaggaaatgcgtatcagagtttgtacttggtcgtaccctgttattagtaat

SEQ ID NO: 4994 - DNA, 80 bp, synthetic construct
  misc_feature 1..80: note = Synthetic: >GCS-227-cand-21170-21249
  source 1..80: mol_type = other DNA
tgcaagaggttggcagttccatatgtttaaaaatagagaggaaatgcgtatcagagtttgtacttggtcgtaccctgtta

SEQ ID NO: 4995 - DNA, 80 bp, synthetic construct
  misc_feature 1..80: note = Synthetic: >GCS-227-cand-18380-18459
  source 1..80: mol_type = other DNA
ttggtaaccctaagggcattcgttgtgcagtaacaagtaaaccttggtactgctatgataagcagcccgttaacagtaat

SEQ ID NO: 4996 - DNA, 80 bp, synthetic construct
  misc_feature 1..80: note = Synthetic: >GCS-211-cand-18390-18469
  source 1..80: mol_type = other DNA
cctaagggcattcgttgtgcagtaacaagtaaaccttggtactgctatgataagcagcccgttaacagtaatgttaagtg

SEQ ID NO: 4997 - DNA, 80 bp, synthetic construct
  misc_feature 1..80: note = Synthetic: >GCS-227-cand-27570-27649
  source 1..80: mol_type = other DNA
gctgcgccacctttcacaccaacacagactcctgctacaacaactcaggaggaggatgatgatcaggacgtcgaagtaat

SEQ ID NO: 4998 - DNA, 80 bp, synthetic construct
  misc_feature 1..80: note = Synthetic: >GCS-211-cand-27570-27649
  source 1..80: mol_type = other DNA
cagctgcgccacctttcacaccaacacagactcctgctacaacaactcaggaggaggatgatgatcaggacgtcgaagta

SEQ ID NO: 4999 - DNA, 80 bp, synthetic construct
  misc_feature 1..80: note = Synthetic: >GCS-227-cand-21650-21729
  source 1..80: mol_type = other DNA
ctcttctataatacagggtacgatagtaaccaaccaaccattacgtattttgtgcttacgccccatacctgttggtgttg

SEQ ID NO: 5000 - DNA, 80 bp, synthetic construct
  misc_feature 1..80: note = Synthetic: >GCS-211-cand-21660-21739
  source 1..80: mol_type = other DNA
taatacagggtacgatagtaaccaaccaaccattacgtattttgtgcttacgccccatacctgttggtgttgctgctgag

SEQ ID NO: 5001 - DNA, 80 bp, synthetic construct
  misc_feature 1..80: note = Synthetic: >GCS-211-cand-28690-28769
  source 1..80: mol_type = other DNA
gacataatcgctatctaacgtagagttggagtaagttaaagatccgcttgacattatcctcacactagtgagctctgttg

SEQ ID NO: 5002 - DNA, 80 bp, synthetic construct
  misc_feature 1..80: note = Synthetic: >GCS-227-cand-28690-28769
  source 1..80: mol_type = other DNA
cataatcgctatctaacgtagagttggagtaagttaaagatccgcttgacattaccctcacactagtgagctctgttgtc

SEQ ID NO: 5003 - DNA, 80 bp, synthetic construct
  misc_feature 1..80: note = Synthetic: >SBB-130-cand-17610-17689
  source 1..80: mol_type = other DNA
caacagtgttactcatgactattgttgtttcaagcatgctttgggtagcgactatctgtacaacccctatgtcatagaca

SEQ ID NO: 5004 - DNA, 80 bp, synthetic construct
  misc_feature 1..80: note = Synthetic: >SBB-010-cand-17610-17689
  source 1..80: mol_type = other DNA
ttacaacagtgttactcatgactattgttgtttcaagcacgcgttaggtagtgattatctgtacaacccctatgtcatag

SEQ ID NO: 5005 - DNA, 80 bp, synthetic construct
  misc_feature 1..80: note = Synthetic: >GCS-211-cand-1050-1129
  source 1..80: mol_type = other DNA
cgttggtgattggaccggctttaagaccttatgctgtggaactgtcattagtccacgtagtgtcgtcatcggaaatgttg

SEQ ID NO: 5006 - DNA, 80 bp, synthetic construct
  misc_feature 1..80: note = Synthetic: >GCS-227-cand-1050-1129
  source 1..80: mol_type = other DNA
ttggtgattggaccggctttaagaccttatgctgtggaactgtcattagtccacgtagtgtcgtcatcggaaatgttgaa

SEQ ID NO: 5007 - DNA, 80 bp, synthetic construct
  misc_feature 1..80: note = Synthetic: >SBB-024-cand-8080-8159
  source 1..80: mol_type = other DNA
caacgctgcctgtacaactcttaagggactgggtggtttggtcacatactgttacaagaaaggccttgttgaaggtgcta

SEQ ID NO: 5008 - DNA, 80 bp, synthetic construct
  misc_feature 1..80: note = Synthetic: >SBB-010-cand-8090-8169
  source 1..80: mol_type = other DNA
tgtacaactcttaaagggttgggcggtttagtcacgtactgttacaagaaaggccttgttgaaggtgctaagttgtacac

SEQ ID NO: 5009 - DNA, 80 bp, synthetic construct
  misc_feature 1..80: note = Synthetic: >GCS-227-cand-7210-7289
  source 1..80: mol_type = other DNA
caacttcttttgtgagtcatgtgactcttatggtccaggtaacacatttattaacgattacgttgcaaaggaagtctcta

SEQ ID NO: 5010 - DNA, 80 bp, synthetic construct
  misc_feature 1..80: note = Synthetic: >GCS-211-cand-7210-7289
  source 1..80: mol_type = other DNA
cacaacttcttttgtgagtcatgtgactcttatggtccaggtaacacatttattaacgattacgttgcaaaggaagtctc

SEQ ID NO: 5011 - DNA, 80 bp, synthetic construct
  misc_feature 1..80: note = Synthetic: >SBB-122-cand-14480-14559
  source 1..80: mol_type = other DNA
gcgccaacattaacagattacttagtattgacagcaatacttgtaataatgtaggtgttaaagctttgcagagagacttg

SEQ ID NO: 5012 - DNA, 80 bp, synthetic construct
  misc_feature 1..80: note = Synthetic: >SBB-130-cand-14470-14549
  source 1..80: mol_type = other DNA
gctgttagcgccaacattaacagattacttagtattgacagcaatacttgtaacaatgtaggtgttagagctttgcagag

SEQ ID NO: 5013 - DNA, 80 bp, synthetic construct
  misc_feature 1..80: note = Synthetic: >GCS-227-cand-18300-18379
  source 1..80: mol_type = other DNA
caataagagtgggcgttgtgtccagtctcatgtggtacgtgctatgctcaaagcgtatgatccagtagccatacatgata

SEQ ID NO: 5014 - DNA, 80 bp, synthetic construct
  misc_feature 1..80: note = Synthetic: >GCS-211-cand-18310-18389
  source 1..80: mol_type = other DNA
gtgggcgttgtgtccagtctcatgtggtacgtgctatgctcaaagcgtatgatccagtagccatacatgatattggtaac

SEQ ID NO: 5015 - DNA, 80 bp, synthetic construct
  misc_feature 1..80: note = Synthetic: >229E-cand-20490-20569
  source 1..80: mol_type = other DNA
gtgacattaatgaaatggtgcttagtcttgttaggaatggtaagttgcttgtaaggggtaatggcaagtgtttgagtttt

SEQ ID NO: 5016 - DNA, 80 bp, synthetic construct
  misc_feature 1..80: note = Synthetic: >229E-cand-20570-20649
  source 1..80: mol_type = other DNA
agtaatcatttagtctcaactaaataaaatgtttgttttacttgttgcatatgccttgttgcatattgctggttgtcaaa

SEQ ID NO: 5017 - DNA, 80 bp, synthetic construct
  misc_feature 1..80: note = Synthetic: >229E-cand-20650-20729
  source 1..80: mol_type = other DNA
ctataaatgttctgaacactagtcactctgtttgtaacggctgtgttggttattcagaaaatgtatttgctgttgagagt

SEQ ID NO: 5018 - DNA, 80 bp, synthetic construct
  misc_feature 1..80: note = Synthetic: >229E-cand-20730-20809
  source 1..80: mol_type = other DNA
ggtggttatataccctccgactttgcatttaataattggtttctcttaactaatacctcatctgttgtagacggtgttgt

SEQ ID NO: 5019 - DNA, 80 bp, synthetic construct
  misc_feature 1..80: note = Synthetic: >229E-cand-20810-20889
  source 1..80: mol_type = other DNA
gaggagttttcagcctttgttgcttaattgcttatggtctgtttctggctcgcggtttactactggttttgtctatttta

SEQ ID NO: 5020 - DNA, 80 bp, synthetic construct
  misc_feature 1..80: note = Synthetic: >229E-cand-20890-20969
  source 1..80: mol_type = other DNA
atggtactgggtctagaggtgattgtaaaggtttttcttcaaatgttttgtctgatgtcatacgttacaacatcaatttt

SEQ ID NO: 5021 - DNA, 80 bp, synthetic construct
  misc_feature 1..80: note = Synthetic: >229E-cand-20970-21049
  source 1..80: mol_type = other DNA
gaagaagcttctgttgacaaccttagacgtggaaccattttgtttaaaacatcttttggtgttgttgtgttttattgtac

SEQ ID NO: 5022 - DNA, 80 bp, synthetic construct
  misc_feature 1..80: note = Synthetic: >229E-cand-21050-21129
  source 1..80: mol_type = other DNA
caacaacactttagtttcaggtgatgcttacataccatttggtacagttttgggcaatttttattgctttgtaaatacta

SEQ ID NO: 5023 - DNA, 80 bp, synthetic construct
  misc_feature 1..80: note = Synthetic: >229E-cand-21130-21209
  source 1..80: mol_type = other DNA
ctattggcaatgaaactacttcttcttttgtgggtgcactacctaagacagttcgtgagtttgttatttcacgcacagga

SEQ ID NO: 5024 - DNA, 80 bp, synthetic construct
  misc_feature 1..80: note = Synthetic: >229E-cand-21210-21289
  source 1..80: mol_type = other DNA
catttttatattaatggctatcgctattttactttaggtaatttagaagccgttaatttcaatgtcactaatgcagaaac

SEQ ID NO: 5025 - DNA, 80 bp, synthetic construct
  misc_feature 1..80: note = Synthetic: >229E-cand-21290-21369
  source 1..80: mol_type = other DNA
cacttacttttgtactgttgcgttagcttcttatgctgacgttttggttaatgtgtcacaaaccgctattgctaatataa

SEQ ID NO: 5026 - DNA, 80 bp, synthetic construct
  misc_feature 1..80: note = Synthetic: >229E-cand-21370-21449
  source 1..80: mol_type = other DNA
tttattgcaactctgttattaacagactgagatgtgaccagttgtcctttgatgtaccagatggtttttattccacaagt

SEQ ID NO: 5027 - DNA, 80 bp, synthetic construct
  misc_feature 1..80: note = Synthetic: >229E-cand-21450-21529
  source 1..80: mol_type = other DNA
cctattcaatccgttgagctacctgtgtctattgtgtcgctacctgtttatcacaaacatacgtttattgtgttgtatgt

SEQ ID NO: 5028 - DNA, 80 bp, synthetic construct
  misc_feature 1..80: note = Synthetic: >229E-cand-21530-21609
  source 1..80: mol_type = other DNA
tgattttaaacctcagagtgctagcgccggcacgtgttataactgtcgtccttctgttgttaatattacactggccaatt

SEQ ID NO: 5029 - DNA, 80 bp, synthetic construct
  misc_feature 1..80: note = Synthetic: >229E-cand-21610-21689
  source 1..80: mol_type = other DNA
ttcagaatgaaactaaagggcctttgtgtgttgaaacatcacacttcactaccaaatacgttgctaataaaaaaattagt

SEQ ID NO: 5030 - DNA, 80 bp, synthetic construct
  misc_feature 1..80: note = Synthetic: >229E-cand-21690-21769
  source 1..80: mol_type = other DNA
tattccaatgttggtaggtggagtgctagtattaacacgggaaattgccctttttcttttggcaaagttaataactttgt

SEQ ID NO: 5031 - DNA, 80 bp, synthetic construct
  misc_feature 1..80: note = Synthetic: >AlphaCoV1-cand-5770-5849
  source 1..80: mol_type = other DNA
ttatactggtttgaactcacgtggtcattacacctactacgataatcgtaatggtttaatggttgatgctgaaaaggcct

SEQ ID NO: 5032 - DNA, 80 bp, synthetic construct
  misc_feature 1..80: note = Synthetic: >AlphaCoV1-cand-5850-5929
  source 1..80: mol_type = other DNA
accattttgagaaaaaccttttacaggtcacaacagccattgctagtaattttgttgtcaagaaacctcaagcagagaaa

SEQ ID NO: 5033 - DNA, 80 bp, synthetic construct
  misc_feature 1..80: note = Synthetic: >AlphaCoV1-cand-5930-6009
  source 1..80: mol_type = other DNA
atgcctaagaatcaatctaaagaatcaatagttaaagaaccaaacaaggctcgtgtttttagtgaggttgaagaaactcc

SEQ ID NO: 5034 - DNA, 80 bp, synthetic construct
  misc_feature 1..80: note = Synthetic: >AlphaCoV1-cand-6010-6089
  source 1..80: mol_type = other DNA
taaaaatatagtacatgaacaaaaattgttggctattgagagtggtgcagattatacaatcacaacatttggtaaatatg

SEQ ID NO: 5035 - DNA, 80 bp, synthetic construct
  misc_feature 1..80: note = Synthetic: >AlphaCoV1-cand-6090-6169
  source 1..80: mol_type = other DNA
ctgacatgttctttatggctggtgataaaattcttaggtttctccttgaagtctttaaatatttattgtgctgttatttt

SEQ ID NO: 5036 - DNA, 80 bp, synthetic construct
  misc_feature 1..80: note = Synthetic: >AlphaCoV1-cand-6170-6249
  source 1..80: mol_type = other DNA
gttgtttttatgtgtcttagaaaatctaagatgcctaaagttaaagtaaaaccacctcatgtatttaaagactttggtgc

SEQ ID NO: 5037 - DNA, 80 bp, synthetic construct
  misc_feature 1..80: note = Synthetic: >AlphaCoV1-cand-6250-6329
  source 1..80: mol_type = other DNA
taaagttagaacactgaattacgtaagacaattgaacaaaccagccgtatggcgttatgcaaaactagttttactgttaa

SEQ ID NO: 5038 - DNA, 80 bp, synthetic construct
  misc_feature 1..80: note = Synthetic: >AlphaCoV1-cand-6330-6409
  source 1..80: mol_type = other DNA
tagcattatatcatttcttttatttgtttgtcagtataccagtagtgcataaattagcatgtagtggtagtgttcaagca

SEQ ID NO: 5039 - DNA, 80 bp, synthetic construct
  misc_feature 1..80: note = Synthetic: >AlphaCoV1-cand-6410-6489
  source 1..80: mol_type = other DNA
tatagtaattctagttttgtaaagtcagaagtttgtggtaattctattttgtgcaaggcgtgtttggcatcttatgatga

SEQ ID NO: 5040 - DNA, 80 bp, synthetic construct
  misc_feature 1..80: note = Synthetic: >AlphaCoV1-cand-6490-6569
  source 1..80: mol_type = other DNA
attggcagattttgaacatctccaagtttcatgggattacaagtcagacccactatggaatagagtggtacaattgtctt

SEQ ID NO: 5041 - DNA, 80 bp, synthetic construct
  misc_feature 1..80: note = Synthetic: >AlphaCoV1-cand-6570-6649
  source 1..80: mol_type = other DNA
attttacattcttggctgtttttggtaataattatgttagatgttttcttatgtattttgtatctcagtacctcaacctg

SEQ ID NO: 5042 - DNA, 80 bp, synthetic construct
  misc_feature 1..80: note = Synthetic: >AlphaCoV1-cand-6650-6729
  source 1..80: mol_type = other DNA
tggttttcttattttggttatgttaagtatagttggtttttgcatgttgtcaactttgaatcaatttctgttgaatttgt

SEQ ID NO: 5043 - DNA, 80 bp, synthetic construct
  misc_feature 1..80: note = Synthetic: >AlphaCoV1-cand-6730-6809
  source 1..80: mol_type = other DNA
gatcatagttgtagtttttaaggcagttctcgcacttaaacacattttctttccatgcaaaaacccttcatgtaaaacgt

SEQ ID NO: 5044 - DNA, 80 bp, synthetic construct
  misc_feature 1..80: note = Synthetic: >AlphaCoV1-cand-6810-6889
  source 1..80: mol_type = other DNA
gctctaaaattgctaggcagacacgtattcctatacaggttgtggttaatggttcaatgaagactgtttatgttcatgct

SEQ ID NO: 5045 - DNA, 80 bp, synthetic construct
  misc_feature 1..80: note = Synthetic: >AlphaCoV1-cand-6970-7049
  source 1..80: mol_type = other DNA
ctgtgatgaaattgtgcgtgatctcagtaatagtgttaagcaaactgtttatgctactgatagatcatatcaagaagtca

SEQ ID NO: 5046 - DNA, 80 bp, synthetic construct
  misc_feature 1..80: note = Synthetic: >AlphaSp-cand-13070-13149
  source 1..80: mol_type = other DNA
ctttgacaataagttatggtttgatcctgttgaaaatgaagacattcaccgtgtctatgccaaattgggtaccattgttg

SEQ ID NO: 5047 - DNA, 80 bp, synthetic construct
  misc_feature 1..80: note = Synthetic: >AlphaSp-cand-13230-13309
  source 1..80: mol_type = other DNA
caggatcttaatggtgatttttatgactttggagactttgtgactagtgttaagggtatgggagttcctatatgtacatc

SEQ ID NO: 5048 - DNA, 80 bp, synthetic construct
  misc_feature 1..80: note = Synthetic: >AlphaSp-cand-13390-13469
  source 1..80: mol_type = other DNA
gggaagattttagaacctttgatctcttggagtatgacttcacagagcataaggtcaatctcttcaataaatattttaaa

SEQ ID NO: 5049 - DNA, 80 bp, synthetic construct
  misc_feature 1..80: note = Synthetic: >AlphaSp-cand-13470-13549
  source 1..80: mol_type = other DNA
cattggggacaaacttatcaccccaattgtgaagattgtcacgatgaaagttgtattgttcattgtgccaacttcaatac

SEQ ID NO: 5050 - DNA, 80 bp, synthetic construct
  misc_feature 1..80: note = Synthetic: >AlphaSp-cand-13550-13629
  source 1..80: mol_type = other DNA
tttgtttgcaactactataccaattacagctttcggacctttgtgtcggaagtgttggattgatggagtgccgttggtga

SEQ ID NO: 5051 - DNA, 80 bp, synthetic construct
  misc_feature 1..80: note = Synthetic: >AlphaSp-cand-13630-13709
  source 1..80: mol_type = other DNA
caactgcaggttatcattttaaacaattgggtatagtttggaacaaagatcttaatttacattcaagcagattgacgatc

SEQ ID NO: 5052 - DNA, 80 bp, synthetic construct
  misc_feature 1..80: note = Synthetic: >AlphaSp-cand-13710-13789
  source 1..80: mol_type = other DNA
aatgaattattgcaattctgtgctgacccgtcactgcttatagcatcgtctccagctctagttgacaaacgtacagtttg

SEQ ID NO: 5053 - DNA, 80 bp, synthetic construct
  misc_feature 1..80: note = Synthetic: >AlphaSp-cand-13790-13869
  source 1..80: mol_type = other DNA
cttctctgtagctgcacttggcactggtatgactaatcagactgtcaaaccaggtcactttaacaaagaattctatgact

SEQ ID NO: 5054 - DNA, 80 bp, synthetic construct
  misc_feature 1..80: note = Synthetic: >Anlong-cand-12430-12509
  source 1..80: mol_type = other DNA
cttttgacgtttacaacaaggatgttgcatgtattggcaagtttcttaaggtgaactgtgttcgcttcaagaatgccgat

SEQ ID NO: 5055 - DNA, 80 bp, synthetic construct
  misc_feature 1..80: note = Synthetic: >Anlong-cand-12510-12589
  source 1..80: mol_type = other DNA
agaaatgatgctttctttgttgttaaacgttgtactaagtccgtcatggaacatgagcagtccatatatgacgaacttaa

SEQ ID NO: 5056 - DNA, 80 bp, synthetic construct
  misc_feature 1..80: note = Synthetic: >Anlong-cand-12590-12669
  source 1..80: mol_type = other DNA
acattctaatgcactagccccacatgacttctttacttggaaagaaggtcgttctgtgtatggcaatattagtagacaaa

SEQ ID NO: 5057 - DNA, 80 bp, synthetic construct
  misc_feature 1..80: note = Synthetic: >Anlong-cand-12670-12749
  source 1..80: mol_type = other DNA
accttacaaagtatactatgatggatctatgttatgcacttcgcaactttgatgagcgtaattgtgaaactcttaaagag

SEQ ID NO: 5058 - DNA, 80 bp, synthetic construct
  misc_feature 1..80: note = Synthetic: >Anlong-cand-12750-12829
  source 1..80: mol_type = other DNA
atacttgtgcttacgggctgctgtactgaggcttattttgataataagtgttggtatgaccctgttgaaaatgagcacat

SEQ ID NO: 5059 - DNA, 80 bp, synthetic construct
  misc_feature 1..80: note = Synthetic: >Anlong-cand-12830-12909
  source 1..80: mol_type = other DNA
acacaaagtttacgctcaattgggtgtcatagtagccaatgccatgataaaatgtgttaggctatgtgatgcaatggttg

SEQ ID NO: 5060 - DNA, 80 bp, synthetic construct
  misc_feature 1..80: note = Synthetic: >Anlong-cand-12910-12989
  source 1..80: mol_type = other DNA
agaaaggcatagttggcattttgactcttgataaccaggatcttaatggtgatttttatgattttggtgacttttgcaag

SEQ ID NO: 5061 - DNA, 80 bp, synthetic construct
  misc_feature 1..80: note = Synthetic: >Anlong-cand-12990-13069
  source 1..80: mol_type = other DNA
acagcgcctggtatgggtgtcccgtgctgtacgtcatattactcttatatgatgccagttatgggcatgaccaattgctt

SEQ ID NO: 5062 - DNA, 80 bp, synthetic construct
  misc_feature 1..80: note = Synthetic: >Anlong-cand-13070-13149
  source 1..80: mol_type = other DNA
ggcttctgagtgtttcatgaagagttctatcttcggcgaagattttaaaacttatgatttgttggagtatgacttcacag

SEQ ID NO: 5063 - DNA, 80 bp, synthetic construct
  misc_feature 1..80: note = Synthetic: >Anlong-cand-13150-13229
  source 1..80: mol_type = other DNA
aacataaggaaaggctcttcaagaaatattttaagtattgggatcaagattaccacccaaattgtagtgagtgttttgat

SEQ ID NO: 5064 - DNA, 80 bp, synthetic construct
  misc_feature 1..80: note = Synthetic: >Anlong-cand-13230-13309
  source 1..80: mol_type = other DNA
gagatgtgtgttgtgcattgcgcaaactttaacacactatttgctactaccatacctaatactgcttttggaccattgtg

SEQ ID NO: 5065 - DNA, 80 bp, synthetic construct
  misc_feature 1..80: note = Synthetic: >Anlong-cand-13310-13389
  source 1..80: mol_type = other DNA
ccgcaaggtgtacatcgatggtgtgcctcttgttgcaactgctggttaccattttaagcagctcggtattgtatggaata

SEQ ID NO: 5066 - DNA, 80 bp, synthetic construct
  misc_feature 1..80: note = Synthetic: >Anlong-cand-13390-13469
  source 1..80: mol_type = other DNA
aggacgttaacactcacgcatcacgtttgagtattaatgatttactcatgtttgtgacagatccatcactcattgttgct

SEQ ID NO: 5067 - DNA, 80 bp, synthetic construct
  misc_feature 1..80: note = Synthetic: >Anlong-cand-13470-13549
  source 1..80: mol_type = other DNA
tcttcaccagcattggtagatcagagaacagtttgtttctctgttgctgccttgagtactggtatgacacaacaaattgt

SEQ ID NO: 5068 - DNA, 80 bp, synthetic construct
  misc_feature 1..80: note = Synthetic: >Anlong-cand-13550-13629
  source 1..80: mol_type = other DNA
caaaccaggtcatttcaataaggagttttatgacttccttttgaaacaaggcttctttagtgagggctctgaattgacat

SEQ ID NO: 5069 - DNA, 80 bp, synthetic construct
  misc_feature 1..80: note = Synthetic: >Anlong-cand-13630-13709
  source 1..80: mol_type = other DNA
tgaagcatttcttctttgcacagaaggatgatgctgctgtcaaagattttgatttttatcgttataacagacctaccatg

SEQ ID NO: 5070 - DNA, 80 bp, synthetic construct
  misc_feature 1..80: note = Synthetic: >AvianCoV-cand-17660-17739
  source 1..80: mol_type = other DNA
gtggatattcaacagtggggttactctggtaacctacagtttaatcatgatttgcattgtaatgtgcatggccacgctca

SEQ ID NO: 5071 - DNA, 80 bp, synthetic construct
  misc_feature 1..80: note = Synthetic: >AvianCoV-cand-17740-17819
  source 1..80: mol_type = other DNA
tgtagcttcagcggatgctattatgactcgttgccttgcaattaataatgcattttgtaaagatgtcaactgggaattga

SEQ ID NO: 5072 - DNA, 80 bp, synthetic construct
  misc_feature 1..80: note = Synthetic: >AvianCoV-cand-17820-17899
  source 1..80: mol_type = other DNA
cataccctcatattgcaaatgaggatgaagtaaattctagttgcagatatttacaacgcatgtatcttaatgcatgtgtt

SEQ ID NO: 5073 - DNA, 80 bp, synthetic construct
  misc_feature 1..80: note = Synthetic: >AvianCoV-cand-17900-17979
  source 1..80: mol_type = other DNA
gatgctcttaaagttaatgttgtctatgatataggcaaccctaaaggtataaaatgtgttagacgtggggatgtcaattt

SEQ ID NO: 5074 - DNA, 80 bp, synthetic construct
  misc_feature 1..80: note = Synthetic: >AvianCoV-cand-17980-18059
  source 1..80: mol_type = other DNA
taggttctatgataagaacccaattgtacccaacgtcaaacagtttgagtatgactatagtcagcataaagataagtttg

SEQ ID NO: 5075 - DNA, 80 bp, synthetic construct
  misc_feature 1..80: note = Synthetic: >AvianCoV-cand-18060-18139
  source 1..80: mol_type = other DNA
ctgatggtctttgtatgttttggaattgtaatgtggattgttatcctgacaattctttagtttgtaggtatgacacacga

SEQ ID NO: 5076 - DNA, 80 bp, synthetic construct
  misc_feature 1..80: note = Synthetic: >AvianCoV-cand-18140-18219
  source 1..80: mol_type = other DNA
aatttgagtgtgtttaatttaccaggttgtaatggtggtagcctgtatgttaataaacatgcattccacacacctaaatt

SEQ ID NO: 5077 - DNA, 80 bp, synthetic construct
  misc_feature 1..80: note = Synthetic: >AvianCoV-cand-18220-18299
  source 1..80: mol_type = other DNA
tgatcgcattagctttcgtaatttgaaagctatgccattctttttctatgactcatcgccttgcgaaaccattcaagttg

SEQ ID NO: 5078 - DNA, 80 bp, synthetic construct
  misc_feature 1..80: note = Synthetic: >AvianCoV-cand-18300-18379
  source 1..80: mol_type = other DNA
atggagtagcgcaagaccttgtgtcattagcaactaaagattgtatcacaaaatgcaacattggtggtgctgtttgtaag

SEQ ID NO: 5079 - DNA, 80 bp, synthetic construct
  misc_feature 1..80: note = Synthetic: >AvianCoV-cand-18380-18459
  source 1..80: mol_type = other DNA
aaacatgctcaaatgtatgcagaatttgtggcttcttataatgcagctgttacagctggttttactttttgggttactaa

SEQ ID NO: 5080 - DNA, 80 bp, synthetic construct
  misc_feature 1..80: note = Synthetic: >AvianCoV-cand-18460-18539
  source 1..80: mol_type = other DNA
taattttaacccttacaatttgtggaaaaatttttcagctctccagtctattgacaatattgcttataatatgtataagg

SEQ ID NO: 5081 - DNA, 80 bp, synthetic construct
  misc_feature 1..80: note = Synthetic: >AvianCoV-cand-18540-18619
  source 1..80: mol_type = other DNA
gtgggcattacgatgctattgcaggcgaaatacccacagtcataactggagataaagtttttgttattgatcaaggtatt

SEQ ID NO: 5082 - DNA, 80 bp, synthetic construct
  misc_feature 1..80: note = Synthetic: >AvianCoV-cand-18620-18699
  source 1..80: mol_type = other DNA
gaaaaggcagtttttgttaatcaaacaactctgcctacatcagttgcatttgagttgtatgcgaagagaaatattcgcac

SEQ ID NO: 5083 - DNA, 80 bp, synthetic construct
  misc_feature 1..80: note = Synthetic: >AvianCoV-cand-18700-18779
  source 1..80: mol_type = other DNA
actgccaaataacagaatattgagtggtttaggtgtagacgttaccaatggttttgtaatttgggattacgctaaccaaa

SEQ ID NO: 5084 - DNA, 80 bp, synthetic construct
  misc_feature 1..80: note = Synthetic: >AvianCoV-cand-18780-18859
  source 1..80: mol_type = other DNA
caccattgtatcgtaatactgttaaagtatgtgcatacacagacattgagccaaatggcctaatagttctgtatgatgat

SEQ ID NO: 5085 - DNA, 80 bp, synthetic construct
  misc_feature 1..80: note = Synthetic: >AvianCoV-cand-18860-18939
  source 1..80: mol_type = other DNA
agatatggtgattaccaatcttttcttgctgctgataatgctgttttagtttctacacagtgttataagcggtattcata

SEQ ID NO: 5086 - DNA, 80 bp, synthetic construct
  misc_feature 1..80: note = Synthetic: >Beluga-cand-13810-13889
  source 1..80: mol_type = other DNA
taatcaagttgtagtaactaatttagataagagtgcaggctatccattcaataagtttggtaaagctaggctgtattatg

SEQ ID NO: 5087 - DNA, 80 bp, synthetic construct
  misc_feature 1..80: note = Synthetic: >Beluga-cand-13890-13969
  source 1..80: mol_type = other DNA
aatcactttcatacgctgagcaggatcaattgtttgaactgaccaagcgtaacattttacctaccattacccagattaat

SEQ ID NO: 5088 - DNA, 80 bp, synthetic construct
  misc_feature 1..80: note = Synthetic: >Beluga-cand-13970-14049
  source 1..80: mol_type = other DNA
atgaagtatgccatttctgctaagtcacgtgcacgtactgttgcaggtgtgtcgattcttagcacgatgacaaaccgcca

SEQ ID NO: 5089 - DNA, 80 bp, synthetic construct
  misc_feature 1..80: note = Synthetic: >Beluga-cand-14050-14129
  source 1..80: mol_type = other DNA
atttcatcagaagtgcctcaaatctattgtgaacacgcggaatgcaaccgttgtaataggcactactaagttttatggag

SEQ ID NO: 5090 - DNA, 80 bp, synthetic construct
  misc_feature 1..80: note = Synthetic: >Beluga-cand-14130-14209
  source 1..80: mol_type = other DNA
gatgggataatatgctccgcaaccttatgcgcggtgtggaggatcctgttctgatggggtgggactatcctaagtgtgat

SEQ ID NO: 5091 - DNA, 80 bp, synthetic construct
  misc_feature 1..80: note = Synthetic: >Beluga-cand-14210-14289
  source 1..80: mol_type = other DNA
agagctatgccatcacttttaagacttagtgctagtctaatattagcacgcaggcataaaggttgttgtgactggaatga

SEQ ID NO: 5092 - DNA, 80 bp, synthetic construct
  misc_feature 1..80: note = Synthetic: >Beluga-cand-14290-14369
  source 1..80: mol_type = other DNA
acgcatttataggctcgctaatgaggcggcgcaagtattgtctgaagtggctttatctaatggtggattgtatgtaaagc

SEQ ID NO: 5093 - DNA, 80 bp, synthetic construct
  misc_feature 1..80: note = Synthetic: >Beluga-cand-14370-14449
  source 1..80: mol_type = other DNA
caggtggtactagtagtggagatgcaaccactgcttatgccaacagtgcttttaatttgtttcaagccacagctgctaat

SEQ ID NO: 5094 - DNA, 80 bp, synthetic construct
  misc_feature 1..80: note = Synthetic: >Beluga-cand-14450-14529
  source 1..80: mol_type = other DNA
gtagcgcaattactggccacacccacatctagaatttatgttgaggaggtcagagctttacagcatgaattgtatacaca

SEQ ID NO: 5095 - DNA, 80 bp, synthetic construct
  misc_feature 1..80: note = Synthetic: >Beluga-cand-14530-14609
  source 1..80: mol_type = other DNA
ggtgtatagacgcgataagcccgatatggacttcgtttataccttttatgcatatcttaataagcattttagtctcatga

SEQ ID NO: 5096 - DNA, 80 bp, synthetic construct
  misc_feature 1..80: note = Synthetic: >Beluga-cand-14610-14689
  source 1..80: mol_type = other DNA
tattgagtgatgatggtgttgtgtgttataataaaaattatgctgaagcaggtatggttgccagcattgcttcatttaga

SEQ ID NO: 5097 - DNA, 80 bp, synthetic construct
  misc_feature 1..80: note = Synthetic: >Beluga-cand-14690-14769
  source 1..80: mol_type = other DNA
gaagttttgttttatcagaataatgtgtttatggccgattccaaatgttggaccgaagaagatgttaagattgggccaca

SEQ ID NO: 5098 - DNA, 80 bp, synthetic construct
  misc_feature 1..80: note = Synthetic: >Beluga-cand-14770-14849
  source 1..80: mol_type = other DNA
tgagttttgttcacagcattcaatgctagttgaaatagatggagagatgagatacttaccgtatcctgatccatcacgta

SEQ ID NO: 5099 - DNA, 80 bp, synthetic construct
  misc_feature 1..80: note = Synthetic: >Beluga-cand-14850-14929
  source 1..80: mol_type = other DNA
tattgggagcttgtgtctttgtcgacgatgttgagaagactgaacccgtggtagttatggagagatacgtggcattagca

SEQ ID NO: 5100 - DNA, 80 bp, synthetic construct
  misc_feature 1..80: note = Synthetic: >Beluga-cand-14930-15009
  source 1..80: mol_type = other DNA
attgatgcttacccattgatctatcatgaaaatgaagagtatggaaaagtattttatttacttctttcatacattcaaac

SEQ ID NO: 5101 - DNA, 80 bp, synthetic construct
  misc_feature 1..80: note = Synthetic: >Beluga-cand-15010-15089
  source 1..80: mol_type = other DNA
attgtatcagaggctatcaaatgatatgcttatggattattcctttgtgatgaatattgatactagttctaagttttggg

SEQ ID NO: 5102 - DNA, 80 bp, synthetic construct
  misc_feature 1..80: note = Synthetic: >BetaSp-cand-11780-11859
  source 1..80: mol_type = other DNA
agagcggcttctgtagcgtccatgtggtatatgggttccaatttggagatagaaatacttttgttagttgtttctatctt

SEQ ID NO: 5103 - DNA, 80 bp, synthetic construct
  misc_feature 1..80: note = Synthetic: >BetaSp-cand-11860-11939
  source 1..80: mol_type = other DNA
tggaacctatacctggactactattatatcgctgactgtagctaagactatggcttggtggttgcatgctaatatctttt

SEQ ID NO: 5104 - DNA, 80 bp, synthetic construct
  misc_feature 1..80: note = Synthetic: >BetaSp-cand-12100-12179
  source 1..80: mol_type = other DNA
tatgaatgctaatgggttgcgtccaccacgtaatagttttgaagccttgattcttaattttaagttgcttggtattggtg

SEQ ID NO: 5105 - DNA, 80 bp, synthetic construct
  misc_feature 1..80: note = Synthetic: >BetaSp-cand-12180-12259
  source 1..80: mol_type = other DNA
gtgtgcccattatagaagtatctcaaattcaatctaaattgacagatgttaagtgtgctaatgttgtactccttaattgt

SEQ ID NO: 5106 - DNA, 80 bp, synthetic construct
  misc_feature 1..80: note = Synthetic: >BetaSp-cand-12260-12339
  source 1..80: mol_type = other DNA
ttacagcatctacacgtagcatctaattctaagttgtggcaatattgtagcactttgcacaatgaaatacttgccacttc

SEQ ID NO: 5107 - DNA, 80 bp, synthetic construct
  misc_feature 1..80: note = Synthetic: >BetaSp-cand-12340-12419
  source 1..80: mol_type = other DNA
agatcttggtgtcgcatttgataaattggctcagcttctgattgtgctctttgcaaatccagctgctgttgataccaaat

SEQ ID NO: 5108 - DNA, 80 bp, synthetic construct
  misc_feature 1..80: note = Synthetic: >BetaSp-cand-12420-12499
  source 1..80: mol_type = other DNA
gcttaactagtatagaggatgtgtgtgacgattatgttcgtgacaatacagtcctacaggcattacaaagtgagtttgtt

SEQ ID NO: 5109 - DNA, 80 bp, synthetic construct
  misc_feature 1..80: note = Synthetic: >BetaSp-cand-12500-12579
  source 1..80: mol_type = other DNA
aatatggctagcttcgttgaatatgaaattgccaagaaaaatttggatgaggctaaggctagcggttctgctaatcaaca

SEQ ID NO: 5110 - DNA, 80 bp, synthetic construct
  misc_feature 1..80: note = Synthetic: >BetaSp-cand-12580-12659
  source 1..80: mol_type = other DNA
gcagattaaacagctagaaaaagcctgtaatattgctaagtctgcatatgagcgagacagagctgttgctcgtaagctcg

SEQ ID NO: 5111 - DNA, 80 bp, synthetic construct
  misc_feature 1..80: note = Synthetic: >BetaSp-cand-12660-12739
  source 1..80: mol_type = other DNA
aacgtatggctgatttagctcttaccaatatgtataaagaagctagaataaatgataagaagagcaaggttgtttcggcg

SEQ ID NO: 5112 - DNA, 80 bp, synthetic construct
  misc_feature 1..80: note = Synthetic: >BetaSp-cand-12740-12819
  source 1..80: mol_type = other DNA
ctgcaaacaatgttgtttagcatggtgcgcaaacttgacaaccaggcacttaattctatattagataatgctgttaaagg

SEQ ID NO: 5113 - DNA, 80 bp, synthetic construct
  misc_feature 1..80: note = Synthetic: >BetaSp-cand-12820-12899
  source 1..80: mol_type = other DNA
gtgtgtacctcttaacgcaataccatctcttactgctaactcacttacaattatagtgccagataaaatagtctatgatc

SEQ ID NO: 5114 - DNA, 80 bp, synthetic construct
  misc_feature 1..80: note = Synthetic: >BetaSp-cand-12900-12979
  source 1..80: mol_type = other DNA
aagttgtggataatgtgtacattgcatatgctggtaatgtttggcatatacagagtatacaagatgctgatggcactgtt

SEQ ID NO: 5115 - DNA, 80 bp, synthetic construct
  misc_feature 1..80: note = Synthetic: >CDPHE15-cand-6850-6929
  source 1..80: mol_type = other DNA
tcaatgctaatggaggtacatccttctgtaagaagcataatttttattgtgttaattgtgactcttatggtttgggttgt

SEQ ID NO: 5116 - DNA, 80 bp, synthetic construct
  misc_feature 1..80: note = Synthetic: >CDPHE15-cand-6930-7009
  source 1..80: mol_type = other DNA
actttcattaatgacgttgttgcagctgaagtcggaaatgttactaagttaaacgtccaggcaacaggtcctgcctttgt

SEQ ID NO: 5117 - DNA, 80 bp, synthetic construct
  misc_feature 1..80: note = Synthetic: >CDPHE15-cand-7010-7089
  source 1..80: mol_type = other DNA
tgagattgacaaagtcgaatttaacaatggcttttactacttgtatagtggtaataccttttggaaatacaattatgaca

SEQ ID NO: 5118 - DNA, 80 bp, synthetic construct
  misc_feature 1..80: note = Synthetic: >CDPHE15-cand-7090-7169
  source 1..80: mol_type = other DNA
ttactgatagtcgttatagttgtaaagaagccctgaaaaagtgtaacgtagctgctgacttcataatttgtaataacaca

SEQ ID NO: 5119 - DNA, 80 bp, synthetic construct
  misc_feature 1..80: note = Synthetic: >CDPHE15-cand-7170-7249
  source 1..80: mol_type = other DNA
ggctctaatatggcgcaagtaaagaatgcttgtgtttattttagccaattgttgtgtaaacctattaagattgtagattc

SEQ ID NO: 5120 - DNA, 80 bp, synthetic construct
  misc_feature 1..80: note = Synthetic: >CDPHE15-cand-7250-7329
  source 1..80: mol_type = other DNA
tacacttgtgtcaactttgggtgttgattttagcacatctattcatagtgcttttgttgaaatcctaaccgatagtttcg

SEQ ID NO: 5121 - DNA, 80 bp, synthetic construct
  misc_feature 1..80: note = Synthetic: >CDPHE15-cand-7330-7409
  source 1..80: mol_type = other DNA
gcaaagatctttcaaattgcactactatgtcacagtgtagggctacacttgggtttgatgacatttctgatgaggacttt

SEQ ID NO: 5122 - DNA, 80 bp, synthetic construct
  misc_feature 1..80: note = Synthetic: >CDPHE15-cand-7410-7489
  source 1..80: mol_type = other DNA
acaggtgccgttgctaatgcccatagatatggcttgcttttaacagacatttcatttaataactttattacctcctatgc

SEQ ID NO: 5123 - DNA, 80 bp, synthetic construct
  misc_feature 1..80: note = Synthetic: >CDPHE15-cand-7490-7569
  source 1..80: mol_type = other DNA
taagccagaggagaagatgtctgtacatgacttggccatttgtatgcgtagcggtgctcgtgttgctaatcacaacgtgc

SEQ ID NO: 5124 - DNA, 80 bp, synthetic construct
  misc_feature 1..80: note = Synthetic: >CDPHE15-cand-7570-7649
  source 1..80: mol_type = other DNA
ttgtcaaggaaaatgttcctgttgtgtggtctgctgaagcatttaacgcattatctgaagagtctcgcaagtatgttgtt

SEQ ID NO: 5125 - DNA, 80 bp, synthetic construct
  misc_feature 1..80: note = Synthetic: >CDPHE15-cand-7650-7729
  source 1..80: mol_type = other DNA
aagacttctaaggtcaaaggcttgacttttatgttgtcttttaacaatgttcggatgcacacaactataccatctgttgc

SEQ ID NO: 5126 - DNA, 80 bp, synthetic construct
  misc_feature 1..80: note = Synthetic: >CDPHE15-cand-7730-7809
  source 1..80: mol_type = other DNA
catttcaggtaaaaagggtggtagtacagtttctgcattttttaaaaacttgcgtaagatattgtggtgttcatgtacca

SEQ ID NO: 5127 - DNA, 80 bp, synthetic construct
  misc_feature 1..80: note = Synthetic: >CDPHE15-cand-7810-7889
  source 1..80: mol_type = other DNA
ttattttgtgcttattctttgttacgtcgttgtggaactttgcagaaagttaccacagtggtagtgagttcggttataag

SEQ ID NO: 5128 - DNA, 80 bp, synthetic construct
  misc_feature 1..80: note = Synthetic: >CDPHE15-cand-7890-7969
  source 1..80: mol_type = other DNA
tacattgagaatggtgcactcaaagacttttcaggaccacttgattgtgtgcacaatatttttgatgactttatggcctg

SEQ ID NO: 5129 - DNA, 80 bp, synthetic construct
  misc_feature 1..80: note = Synthetic: >CDPHE15-cand-7970-8049
  source 1..80: mol_type = other DNA
gcatcatgctaagtatggtgttcaacctattaatagcaggcgttgtcctattgttgttggcgttgacgaaaacgtccgca

SEQ ID NO: 5130 - DNA, 80 bp, synthetic construct
  misc_feature 1..80: note = Synthetic: >CDPHE15-cand-8050-8129
  source 1..80: mol_type = other DNA
caatacctggtgtctctgctggtgttatgcttgttggtaaaacattggtttttgccgtcaagtctgtgtatagttctgca

SEQ ID NO: 5131 - DNA, 80 bp, synthetic construct
  misc_feature 1..80: note = Synthetic: >Delta-cand-7750-7829
  source 1..80: mol_type = other DNA
ttgactcgcatcaaagctggtgcacctcccatgcgtaatcaaaaaattttatgtgttatcctggcacttgctattgtgta

SEQ ID NO: 5132 - DNA, 80 bp, synthetic construct
  misc_feature 1..80: note = Synthetic: >Delta-cand-7830-7909
  source 1..80: mol_type = other DNA
ctttgctgctatggcttttggctttttagcaacgtatgcggcaagtcaaattacgcttaatacagtgcctacgattaaat

SEQ ID NO: 5133 - DNA, 80 bp, synthetic construct
  misc_feature 1..80: note = Synthetic: >Delta-cand-7990-8069
  source 1..80: mol_type = other DNA
aataagtttttggcatttgatagcttcattcaagcaccttacactaattcacctgactgtccagttgttgtgggagttgt

SEQ ID NO: 5134 - DNA, 80 bp, synthetic construct
  misc_feature 1..80: note = Synthetic: >Delta-cand-8070-8149
  source 1..80: mol_type = other DNA
tgatgtaacgacgcactctattcctggaattccagcaggtgtcattcatagagacggtctcatacttaacatttatgatc

SEQ ID NO: 5135 - DNA, 80 bp, synthetic construct
  misc_feature 1..80: note = Synthetic: >Delta-cand-8150-8229
  source 1..80: mol_type = other DNA
tacataaataaacgctacagtctctttatgaaacccatcagcgtcagtctatggttagggatgcgttgtcactcaagaca

SEQ ID NO: 5136 - DNA, 80 bp, synthetic construct
  misc_feature 1..80: note = Synthetic: >Delta-cand-8230-8309
  source 1..80: mol_type = other DNA
gcaaatctctttaacctaggcaagcgtgttgtagtaggatacactcaacatgaagttgttgtgggtacctcctattttaa

SEQ ID NO: 5137 - DNA, 80 bp, synthetic construct
  misc_feature 1..80: note = Synthetic: >Delta-cand-8310-8389
  source 1..80: mol_type = other DNA
ttctcctgcactttttaatgcaaagtgcaccttcttacagtatcaggacactagacaactctattgctatgatactgttc

SEQ ID NO: 5138 - DNA, 80 bp, synthetic construct
  misc_feature 1..80: note = Synthetic: >Delta-cand-8390-8469
  source 1..80: mol_type = other DNA
ctactgaacaaacacttagcttcatgggtgaagtagaaacagttataaataaaactgttaagctttactctgatgtgctt

SEQ ID NO: 5139 - DNA, 80 bp, synthetic construct
  misc_feature 1..80: note = Synthetic: >Delta-cand-8470-8549
  source 1..80: mol_type = other DNA
ccgcacgtcgagtataaggctattgacattaatggtgatcttgttcctttcaagataccagagcagataatgttctatcc

SEQ ID NO: 5140 - DNA, 80 bp, synthetic construct
  misc_feature 1..80: note = Synthetic: >Delta-cand-8550-8629
  source 1..80: mol_type = other DNA
acatattgtgcgctatactagcaattcctattgccgtatggggcattgttttaatactaaccctggtatttgcatttcat

SEQ ID NO: 5141 - DNA, 80 bp, synthetic construct
  misc_feature 1..80: note = Synthetic: >Delta-cand-8630-8709
  source 1..80: mol_type = other DNA
ttacggacgaatttataccgtatagtgaaaatgtacacaaacctggtgtgtactgtgctgatacctctttgcagttgttt

SEQ ID NO: 5142 - DNA, 80 bp, synthetic construct
  misc_feature 1..80: note = Synthetic: >Delta-cand-8710-8789
  source 1..80: mol_type = other DNA
tcaaacctcgttttgggcactgtatctggtattcacatctttacatcaacagctgcattgcttggatctactattgtgat

SEQ ID NO: 5143 - DNA, 80 bp, synthetic construct
  misc_feature 1..80: note = Synthetic: >Delta-cand-8790-8869
  source 1..80: mol_type = other DNA
catactatgcgttgttgctgttcttgcagttcagcgattcttcaaggagtacacaacttttgttatgtacacttgtggtc

SEQ ID NO: 5144 - DNA, 80 bp, synthetic construct
  misc_feature 1..80: note = Synthetic: >Delta-cand-8870-8949
  source 1..80: mol_type = other DNA
ttgctcttgtcaacattgttgggcattgcacttatgtacaagtgccttgtcttcgcgattttctattatgcaatctacct

SEQ ID NO: 5145 - DNA, 80 bp, synthetic construct
  misc_feature 1..80: note = Synthetic: >Delta-cand-8950-9029
  source 1..80: mol_type = other DNA
ttactttgtccttactttcccctcctttaagaggaatgtggcattgttttacttcgctgtagtgatcgtgccgcacgtga

SEQ ID NO: 5146 - DNA, 80 bp, synthetic construct
  misc_feature 1..80: note = Synthetic: >HKU10-cand-2590-2669
  source 1..80: mol_type = other DNA
atttgcaggcattctccttaatttgtacagagagtttattgcttctgttacaagtgtggttaagattggtggtaagagtt

SEQ ID NO: 5147 - DNA, 80 bp, synthetic construct
  misc_feature 1..80: note = Synthetic: >HKU10-cand-2670-2749
  source 1..80: mol_type = other DNA
ttacttactacttgtttgagaagcctaaaatggccatttctggtattttgcataatgtgcgtgttcttaaggctaaagat

SEQ ID NO: 5148 - DNA, 80 bp, synthetic construct
  misc_feature 1..80: note = Synthetic: >HKU10-cand-2750-2829
  source 1..80: mol_type = other DNA
tgcactattgctgctgaagatatcgttgggcttgttgaaatgactgtttttgacagctttgaaatacctattcaaccatc

SEQ ID NO: 5149 - DNA, 80 bp, synthetic construct
  misc_feature 1..80: note = Synthetic: >HKU10-cand-2830-2909
  source 1..80: mol_type = other DNA
tcgtgttgaagttcagcaagttgaatttgaagaggcagaatttgtgcaaccacaggctggtggtgttcttgctgttgtta

SEQ ID NO: 5150 - DNA, 80 bp, synthetic construct
  misc_feature 1..80: note = Synthetic: >HKU10-cand-2910-2989
  source 1..80: mol_type = other DNA
acaaacatgtgttttacaataagggcgactactattaccctgccaatgaaacacatgctgtgcctgtatgctacaaaaga

SEQ ID NO: 5151 - DNA, 80 bp, synthetic construct
  misc_feature 1..80: note = Synthetic: >HKU10-cand-2990-3069
  source 1..80: mol_type = other DNA
ggtagtggtactaatggcactgttgtaaaattctctgaagcagttcaggttaaagagatagaacctgtccatcgtgttaa

SEQ ID NO: 5152 - DNA, 80 bp, synthetic construct
  misc_feature 1..80: note = Synthetic: >HKU10-cand-3070-3149
  source 1..80: mol_type = other DNA
acttgaatatgagtttgaagatgaaactattgtagaaatatgcaagaaagtcattggaaaacgttacaagtttacaggta

SEQ ID NO: 5153 - DNA, 80 bp, synthetic construct
  misc_feature 1..80: note = Synthetic: >HKU10-cand-3150-3229
  source 1..80: mol_type = other DNA
cagagtgggaagaactttgtagttacattcatagtgtaatgaaaacagtatcagaccacattgaagtacctgagtacttt

SEQ ID NO: 5154 - DNA, 80 bp, synthetic construct
  misc_feature 1..80: note = Synthetic: >HKU10-cand-3230-3309
  source 1..80: mol_type = other DNA
atctatgatgaagaaggtggaaatgattttacaaaagttgttatggtttcccagtattcaattgctgctgaacagccttg

SEQ ID NO: 5155 - DNA, 80 bp, synthetic construct
  misc_feature 1..80: note = Synthetic: >HKU10-cand-3310-3389
  source 1..80: mol_type = other DNA
tgaaaatgtgggagtggatcaagttcaagtggctgttcttaaagaagaacagacaattgaagacacatccaaaccacagg

SEQ ID NO: 5156 - DNA, 80 bp, synthetic construct
  misc_feature 1..80: note = Synthetic: >HKU10-cand-3390-3469
  source 1..80: mol_type = other DNA
ttgtagttgaaagtgagcccgcaccacctgaagtggaggtgccacagcaaccattgaaacaacaagaatttataaaacca

SEQ ID NO: 5157 - DNA, 80 bp, synthetic construct
  misc_feature 1..80: note = Synthetic: >HKU10-cand-3470-3549
  source 1..80: mol_type = other DNA
caaaagtctcaaattgaagaagttaatgaagctcttagttttatgcttgataccagtacaacaacctgcgaaacctaaac

SEQ ID NO: 5158 - DNA, 80 bp, synthetic construct
  misc_feature 1..80: note = Synthetic: >HKU10-cand-3550-3629
  source 1..80: mol_type = other DNA
ctgttaatccttttaattttgaattctatgactataagggtattagagttcttaaacagaaggataataattgttgggtt

SEQ ID NO: 5159 - DNA, 80 bp, synthetic construct
  misc_feature 1..80: note = Synthetic: >HKU10-cand-3630-3709
  source 1..80: mol_type = other DNA
tcgtctacattggttcaactgcaattattggattgctactctgatcatgcatttgacttgttcaaggctggtagtgttgc

SEQ ID NO: 5160 - DNA, 80 bp, synthetic construct
  misc_feature 1..80: note = Synthetic: >HKU10-cand-3710-3789
  source 1..80: mol_type = other DNA
accgatagtgcaaaagtgctatgagctcacacgaaacattgtaggttctgctggcgatgtttcttttgctttagaacaac

SEQ ID NO: 5161 - DNA, 80 bp, synthetic construct
  misc_feature 1..80: note = Synthetic: >HKU10-cand-3790-3869
  source 1..80: mol_type = other DNA
ttcttaaagacttgcacacaatgtttataacatttgatgttgtgtgtggttgtaacaatggtgaaaggcgccaatcagag

SEQ ID NO: 5162 - DNA, 80 bp, synthetic construct
  misc_feature 1..80: note = Synthetic: >HKU14-cand-20910-20989
  source 1..80: mol_type = other DNA
gtcaatatttgaatactacaacattagcagttcctgttaatatgcgtgttttgcatttaggtgcaggttctgaaaaagga

SEQ ID NO: 5163 - DNA, 80 bp, synthetic construct
  misc_feature 1..80: note = Synthetic: >HKU14-cand-20990-21069
  source 1..80: mol_type = other DNA
gtggctcctggttctgcagttcttaggcagtggttaccagctggcactatccttatagataatgatttatatccatttgt

SEQ ID NO: 5164 - DNA, 80 bp, synthetic construct
  misc_feature 1..80: note = Synthetic: >HKU14-cand-21070-21149
  source 1..80: mol_type = other DNA
gagcgacagtgtcgccacatattttggagattgtattaccttaccctttgaatgtcaatgggatttgataatttctgata

SEQ ID NO: 5165 - DNA, 80 bp, synthetic construct
  misc_feature 1..80: note = Synthetic: >HKU14-cand-21150-21229
  source 1..80: mol_type = other DNA
tgtatgaccctattactaagaacataggggagtacaatgtaagtaaagatgggttttttacatacatttgtcatatgatt

SEQ ID NO: 5166 - DNA, 80 bp, synthetic construct
  misc_feature 1..80: note = Synthetic: >HKU14-cand-21230-21309
  source 1..80: mol_type = other DNA
cgcgacaagttagctctgggtggcagtgttgctataaaaataacagagttttcttggaatgcagaattatataagttaat

SEQ ID NO: 5167 - DNA, 80 bp, synthetic construct
  misc_feature 1..80: note = Synthetic: >HKU14-cand-21310-21389
  source 1..80: mol_type = other DNA
ggggtattttgcattttggacggttttctgcacaaatgcaaatgcttcttctagtgaaggatttttaattggcataaatt

SEQ ID NO: 5168 - DNA, 80 bp, synthetic construct
  misc_feature 1..80: note = Synthetic: >HKU14-cand-21390-21469
  source 1..80: mol_type = other DNA
atttgggcaagcccaaggttgatattgatggaaatgttatgcatgccaattatttgttctggagaaattccacagtttgg

SEQ ID NO: 5169 - DNA, 80 bp, synthetic construct
  misc_feature 1..80: note = Synthetic: >HKU14-cand-21470-21549
  source 1..80: mol_type = other DNA
aacgggggtgcttatagcctgtttgatatggccaaatttccgcttaagttggctggtactgccgtaataaatttaaaacc

SEQ ID NO: 5170 - DNA, 80 bp, synthetic construct
  misc_feature 1..80: note = Synthetic: >HKU14-cand-21550-21629
  source 1..80: mol_type = other DNA
agaccagatcaatgatatggtttattcccttcttgaaaagggtaaactacttattagagacacaaataaagaagtttttg

SEQ ID NO: 5171 - DNA, 80 bp, synthetic construct
  misc_feature 1..80: note = Synthetic: >HKU14-cand-21630-21709
  source 1..80: mol_type = other DNA
ttggtgatagtttggttaacgtaatctaaattttagaaatggctgtcgcttatgctgatatgcctaatcattttatcaat

SEQ ID NO: 5172 - DNA, 80 bp, synthetic construct
  misc_feature 1..80: note = Synthetic: >HKU14-cand-21710-21789
  source 1..80: mol_type = other DNA
tttccacttacccattttgagggttttgtgttaaattataaaggtttacaatttcaaattcttgatgtaggagtggattg

SEQ ID NO: 5173 - DNA, 80 bp, synthetic construct
  misc_feature 1..80: note = Synthetic: >HKU14-cand-21790-21869
  source 1..80: mol_type = other DNA
taaaatataaacagcgccacacattagtcttagcatgctggatatacagcctgaagactataaaagtgttgatgtcgcta

SEQ ID NO: 5174 - DNA, 80 bp, synthetic construct
  misc_feature 1..80: note = Synthetic: >HKU14-cand-21870-21949
  source 1..80: mol_type = other DNA
ttcaagaagttattgatgatatgcattggggtgatggttttcagattaagtttgagaaccctcacatcctaggaagatgc

SEQ ID NO: 5175 - DNA, 80 bp, synthetic construct
  misc_feature 1..80: note = Synthetic: >HKU14-cand-21950-22029
  source 1..80: mol_type = other DNA
atagttttagatattaaaggtgtagaagaattgcatgatgatttagttaattacattcgtgactaaggctgtgttgttga

SEQ ID NO: 5176 - DNA, 80 bp, synthetic construct
  misc_feature 1..80: note = Synthetic: >HKU14-cand-22030-22109
  source 1..80: mol_type = other DNA
ccaatcctggaaatggattggccattgcactatagctcaactcacggatgcagcactttccattaaggaaaatgttgatt

SEQ ID NO: 5177 - DNA, 80 bp, synthetic construct
  misc_feature 1..80: note = Synthetic: >HKU14-cand-23540-23619
  source 1..80: mol_type = other DNA
tatatgattcaccttgtttttcacagcaaggtgtttttaggtatgataatgttagcagtgtctggcctctctacccctac

SEQ ID NO: 5178 - DNA, 80 bp, synthetic construct
  misc_feature 1..80: note = Synthetic: >HKU14-cand-23620-23699
  source 1..80: mol_type = other DNA
ggtagatgtcctactgctgctgatattaatacccctgatgtacctatttgtgtgtatgatccgctaccacttattttgct

SEQ ID NO: 5179 - DNA, 80 bp, synthetic construct
  misc_feature 1..80: note = Synthetic: >HKU14-cand-23780-23859
  source 1..80: mol_type = other DNA
atgatgcttagaccataatctaaacatgtttttgatacttttaatttccttaccaacggcttttgctgttataggtgatt

SEQ ID NO: 5180 - DNA, 80 bp, synthetic construct
  misc_feature 1..80: note = Synthetic: >HKU14-cand-23860-23939
  source 1..80: mol_type = other DNA
taaagtgtactacggcttccattaatgatgttgacaccggtactccttctataagtactgatactgtcgatgttactaat

SEQ ID NO: 5181 - DNA, 80 bp, synthetic construct
  misc_feature 1..80: note = Synthetic: >HKU14-cand-23940-24019
  source 1..80: mol_type = other DNA
ggtttgggtacttactatgttttagatcgtgtgtatttaaataccacgttgttgcttaatggttattatcctatttcagg

SEQ ID NO: 5182 - DNA, 80 bp, synthetic construct
  misc_feature 1..80: note = Synthetic: >HKU14-cand-24020-24099
  source 1..80: mol_type = other DNA
ttccacatttcgtaatatggcactgaaaggaactctactattgagcacactatggtttaaaccaccatttctctctgatt

SEQ ID NO: 5183 - DNA, 80 bp, synthetic construct
  misc_feature 1..80: note = Synthetic: >HKU14-cand-24100-24179
  source 1..80: mol_type = other DNA
ttaataatggtatttttgctaaggtcaaaaataccaaggttattaaaaatggtgtaatgtatagtgagtttcctgctata

SEQ ID NO: 5184 - DNA, 80 bp, synthetic construct
  misc_feature 1..80: note = Synthetic: >HKU14-cand-24180-24259
  source 1..80: mol_type = other DNA
actataggtagtacttttgtgaatacatcctatagtgtggtagtacaaccacatacaaccatttcagataataaagtact

SEQ ID NO: 5185 - DNA, 80 bp, synthetic construct
  misc_feature 1..80: note = Synthetic: >HKU14-cand-24260-24339
  source 1..80: mol_type = other DNA
aggtcttttagagatctctgtttgccagtatactatgtgcgagtacccacatacgatttgtcatcctaatctgggtaata

SEQ ID NO: 5186 - DNA, 80 bp, synthetic construct
  misc_feature 1..80: note = Synthetic: >HKU14-cand-24340-24419
  source 1..80: mol_type = other DNA
agcgtatagaattatggcattttgatacagatgttgtttcctgtttatataaacgtaatttcacatacgatgtgaatgct

SEQ ID NO: 5187 - DNA, 80 bp, synthetic construct
  misc_feature 1..80: note = Synthetic: >HKU14-cand-24420-24499
  source 1..80: mol_type = other DNA
gattttttgtattttcacttttatcaagaaggtggtactttttatgcatattttacagatactggttttgttactaagtt

SEQ ID NO: 5188 - DNA, 80 bp, synthetic construct
  misc_feature 1..80: note = Synthetic: >HKU14-cand-24500-24579
  source 1..80: mol_type = other DNA
tctgtttaatgtttatttaggcacggtgctttcacattattatgttatgcctttgacttgtgatagtacactgtctttag

SEQ ID NO: 5189 - DNA, 80 bp, synthetic construct
  misc_feature 1..80: note = Synthetic: >HKU14-cand-24580-24659
  source 1..80: mol_type = other DNA
aatattgggttacacctctcactcctaggcaatatttactcgcctttaatcaagatggtattatttttaatgctgctgat

SEQ ID NO: 5190 - DNA, 80 bp, synthetic construct
  misc_feature 1..80: note = Synthetic: >HKU14-cand-24660-24739
  source 1..80: mol_type = other DNA
tgtatgagcgattttatgagtgagattaagtgtaaaacacaatctatagcaccatctactggtgtttatgaattaaacgg

SEQ ID NO: 5191 - DNA, 80 bp, synthetic construct
  misc_feature 1..80: note = Synthetic: >HKU2-cand-16990-17069
  source 1..80: mol_type = other DNA
tcagaccttcaatctactattggtgggtgtggtctttttaaggactgttataaatttgatcaggatttaccgcctgcaca

SEQ ID NO: 5192 - DNA, 80 bp, synthetic construct
  misc_feature 1..80: note = Synthetic: >HKU2-cand-17070-17149
  source 1..80: mol_type = other DNA
tgcaacaacatatatggctctttctgacaagttcaagacagataaagaacttgctgttaatattggtcattctgatgttc

SEQ ID NO: 5193 - DNA, 80 bp, synthetic construct
  misc_feature 1..80: note = Synthetic: >HKU2-cand-17150-17229
  source 1..80: mol_type = other DNA
gttatgaacacgttgtttcttatatgggcttccgttttgacatgaacatacctaatttccattccctgttttgcacacgt

SEQ ID NO: 5194 - DNA, 80 bp, synthetic construct
  misc_feature 1..80: note = Synthetic: >HKU2-cand-17230-17309
  source 1..80: mol_type = other DNA
gatttcgcgatgcgtaacgttaggggctggattggtatggacgtagagggggctcatgtttgcggtgataatatcggtac

SEQ ID NO: 5195 - DNA, 80 bp, synthetic construct
  misc_feature 1..80: note = Synthetic: >HKU2-cand-17310-17389
  source 1..80: mol_type = other DNA
aaatgttccattacaagtagggttctctaatggtgttgactttgtcgtacaacctgaaggttgtgttgtaaccaatgagg

SEQ ID NO: 5196 - DNA, 80 bp, synthetic construct
  misc_feature 1..80: note = Synthetic: >HKU2-cand-17390-17469
  source 1..80: mol_type = other DNA
gtaacattgtcaagccagttaaagctagagctccaccgggtgaacaattcacacacctagtacctttgatgcgtaaaggg

SEQ ID NO: 5197 - DNA, 80 bp, synthetic construct
  misc_feature 1..80: note = Synthetic: >HKU2-cand-17470-17549
  source 1..80: mol_type = other DNA
cagccatggtacgttgtacgacgtagaatcgtgcaaatggtctgtgattgtttaaatgggctttcagacgtagtaatttt

SEQ ID NO: 5198 - DNA, 80 bp, synthetic construct
  misc_feature 1..80: note = Synthetic: >HKU2-cand-17550-17629
  source 1..80: mol_type = other DNA
tgtactatgggctggaggtttggaactcacaaccatgaagtattttgttaaaataggaccatctcagcattgtgattgtg

SEQ ID NO: 5199 - DNA, 80 bp, synthetic construct
  misc_feature 1..80: note = Synthetic: >HKU2-cand-17630-17709
  source 1..80: mol_type = other DNA
gtaaagaggctcgttgctacaatagtgcgactcatgcgtactattgtttagcacacgcacttggttgcgattatttgtac

SEQ ID NO: 5200 - DNA, 80 bp, synthetic construct
  misc_feature 1..80: note = Synthetic: >HKU2-cand-17710-17789
  source 1..80: mol_type = other DNA
aacccctttgttatagatatacagcaatggggctatacagggtctcttagcagtaaccatcatgaagtttgtaatgtgca

SEQ ID NO: 5201 - DNA, 80 bp, synthetic construct
  misc_feature 1..80: note = Synthetic: >HKU2-cand-17790-17869
  source 1..80: mol_type = other DNA
ccgtaatgagcatgttgcttcaggtgacgctattatgactagatgtcttgcaattcatgattgttttgtaaaaaatgttg

SEQ ID NO: 5202 - DNA, 80 bp, synthetic construct
  misc_feature 1..80: note = Synthetic: >HKU2-cand-17870-17949
  source 1..80: mol_type = other DNA
actggtctatcacatatccgtttattgccaatgagaatgccattaataagagtggacgaatagttcagtctcatattatg

SEQ ID NO: 5203 - DNA, 80 bp, synthetic construct
  misc_feature 1..80: note = Synthetic: >HKU2-cand-17950-18029
  source 1..80: mol_type = other DNA
aaggctgccttgaaggtgtataatcctaaagctgttcatgacattggaaatcctaaaggcatacgttgtgttgcaactaa

SEQ ID NO: 5204 - DNA, 80 bp, synthetic construct
  misc_feature 1..80: note = Synthetic: >HKU2-cand-18030-18109
  source 1..80: mol_type = other DNA
tgtaccttggtactgttacgacaaacagcctattaattctaatgttaagatgcttgagtatgattatatgactcatggac

SEQ ID NO: 5205 - DNA, 80 bp, synthetic construct
  misc_feature 1..80: note = Synthetic: >HKU2-cand-18100-18179
  source 1..80: mol_type = other DNA
actcatggacaattggacggtatgtgcctattttggaactgtaatgtagatatgtatcctgagttttctattgtctgcag

SEQ ID NO: 5206 - DNA, 80 bp, synthetic construct
  misc_feature 1..80: note = Synthetic: >HKU2-cand-18180-18259
  source 1..80: mol_type = other DNA
gtttgacacacgctgtagatcacatttgtcactagaaggcgttaatggtggtgcactttatgtaaacaatcatgccttcc

SEQ ID NO: 5207 - DNA, 80 bp, synthetic construct
  misc_feature 1..80: note = Synthetic: >HKU2-cand-23360-23439
  source 1..80: mol_type = other DNA
aggacggcgtattagtctctgctaatttaagttattggcagtggtcaccgcgtaacctttacaaaccagaaaatctgact

SEQ ID NO: 5208 - DNA, 80 bp, synthetic construct
  misc_feature 1..80: note = Synthetic: >HKU2-cand-23440-23519
  source 1..80: mol_type = other DNA
tttgctaatgtcattgccgtttcacgtggtgctaattacactacattgaacaaaacttttgacatacctgaattgaatag

SEQ ID NO: 5209 - DNA, 80 bp, synthetic construct
  misc_feature 1..80: note = Synthetic: >HKU2-cand-23520-23599
  source 1..80: mol_type = other DNA
tacttttcccattgaggaggagtttcgtgagtactttcagaatatgtcatctgagctgcaggtcttgaaaaatttgactg

SEQ ID NO: 5210 - DNA, 80 bp, synthetic construct
  misc_feature 1..80: note = Synthetic: >HKU2-cand-23600-23679
  source 1..80: mol_type = other DNA
ctgatatgagcaagcttaacattagtgctgaaattcagcttattaatgaaattgctcataacgtctctaacatgcgcgtt

SEQ ID NO: 5211 - DNA, 80 bp, synthetic construct
  misc_feature 1..80: note = Synthetic: >HKU2-cand-23680-23759
  source 1..80: mol_type = other DNA
gaggttgagaaattccagcgctatgttaattatgtcaaatgggcttggtggcagtggctgcttatatttattgctctaac

SEQ ID NO: 5212 - DNA, 80 bp, synthetic construct
  misc_feature 1..80: note = Synthetic: >HKU2-cand-23760-23839
  source 1..80: mol_type = other DNA
attgctagctggtctaatgctttggtgctgtcttgctactggatgttgtggcatgtgtggttgtttagctgctacatgtg

SEQ ID NO: 5213 - DNA, 80 bp, synthetic construct
  misc_feature 1..80: note = Synthetic: >HKU2-cand-23840-23919
  source 1..80: mol_type = other DNA
catcatgctgtgattgtagaggaactaaacttcaatcatacgagattgaaaaggtccacgtccaataatgtttggtggac

SEQ ID NO: 5214 - DNA, 80 bp, synthetic construct
  misc_feature 1..80: note = Synthetic: >HKU2-cand-23920-23999
  source 1..80: mol_type = other DNA
ttttccagttgacacttgagggtgtcgttaactctactattagagctgctaaacttgaccctaatgacgaagctattatt

SEQ ID NO: 5215 - DNA, 80 bp, synthetic construct
  misc_feature 1..80: note = Synthetic: >HKU2-cand-24000-24079
  source 1..80: mol_type = other DNA
agggaacaagtgcagcctgctattaacggtgccaatatgctgggctatatgttgactagcatgtttgtgtggtactttgc

SEQ ID NO: 5216 - DNA, 80 bp, synthetic construct
  misc_feature 1..80: note = Synthetic: >HKU2-cand-24160-24239
  source 1..80: mol_type = other DNA
ttattgcttactgtggcggtgttgttgacagttgcattatacttgttgctgttgtaagcagattactgtataccagttat

SEQ ID NO: 5217 - DNA, 80 bp, synthetic construct
  misc_feature 1..80: note = Synthetic: >HKU2-cand-24240-24319
  source 1..80: mol_type = other DNA
tatgctttttgttacaggagttttgcttttgttctctttaatgcaccgacactgtgcttcatcaacggcaccgtttgtct

SEQ ID NO: 5218 - DNA, 80 bp, synthetic construct
  misc_feature 1..80: note = Synthetic: >HKU2-cand-24320-24399
  source 1..80: mol_type = other DNA
ctactctagaattactaaagtagctgactatattgctctctatggtggtcaccattatgtgaccatcgagacaactgctg

SEQ ID NO: 5219 - DNA, 80 bp, synthetic construct
  misc_feature 1..80: note = Synthetic: >HKU2-cand-24400-24479
  source 1..80: mol_type = other DNA
ttgaatttgcgcacaaggactcactctatgttgctattagaggtaagaaggaattaaacctttacttatctaaagcaatg

SEQ ID NO: 5220 - DNA, 80 bp, synthetic construct
  misc_feature 1..80: note = Synthetic: >HKU2-cand-24480-24559
  source 1..80: mol_type = other DNA
gaattgtctgatggtgcgtatatttacttatttactaacacaccttttgttggtatctataacgctaattttcagctgca

SEQ ID NO: 5221 - DNA, 80 bp, synthetic construct
  misc_feature 1..80: note = Synthetic: >HKU2-cand-25920-25999
  source 1..80: mol_type = other DNA
taccaccagacctgactgttgttgaggttacttctagaagtgcttcacgttcacagtctcgttctcgcaatcaaagtcaa

SEQ ID NO: 5222 - DNA, 80 bp, synthetic construct
  misc_feature 1..80: note = Synthetic: >HKU2-cand-26010-26089
  source 1..80: mol_type = other DNA
gtgctcagacacctcgtgctaaacaacagccgtcacagtctgttgacattgttgctgcagttaaacaagctttggcagac

SEQ ID NO: 5223 - DNA, 80 bp, synthetic construct
  misc_feature 1..80: note = Synthetic: >HKU2-cand-26090-26169
  source 1..80: mol_type = other DNA
ttgggcatagcttctagccagtccaggcctcaaagtggtaaaaatacacccaaaccaagaagcagagctgtctcacctgc

SEQ ID NO: 5224 - DNA, 80 bp, synthetic construct
  misc_feature 1..80: note = Synthetic: >HKU2-cand-26170-26249
  source 1..80: mol_type = other DNA
acctgcccctaaaccggctcgtaagcagatggacaaacctgaatggaagcgtgttcctaattctgaggaggacgtgcgta

SEQ ID NO: 5225 - DNA, 80 bp, synthetic construct
  misc_feature 1..80: note = Synthetic: >HKU2-cand-26250-26329
  source 1..80: mol_type = other DNA
aatgctttggtcctcgctcagtttctagaaattttggtgacagtgacctcgttcagcacggtgttgaagctaagcacttt

SEQ ID NO: 5226 - DNA, 80 bp, synthetic construct
  misc_feature 1..80: note = Synthetic: >HKU2-cand-26330-26409
  source 1..80: mol_type = other DNA
ccaacaattgctgagttgcttccgacacaagctgcactagcctttggtagtgaaatcacaaccaaagagtctggtgaatt

SEQ ID NO: 5227 - DNA, 80 bp, synthetic construct
  misc_feature 1..80: note = Synthetic: >HKU2-cand-26410-26489
  source 1..80: mol_type = other DNA
tgtagaagtcacctatcactatgtaatgaaggtccccaagactgataaaaatctacccagatttcttgagcaagtctcgg

SEQ ID NO: 5228 - DNA, 80 bp, synthetic construct
  misc_feature 1..80: note = Synthetic: >HKU2-cand-26490-26569
  source 1..80: mol_type = other DNA
cttactctaaacccagtcaaattaggagatctcaatctcaacaagacctaaatgctgatgccccagtgttcactccggca

SEQ ID NO: 5229 - DNA, 80 bp, synthetic construct
  misc_feature 1..80: note = Synthetic: >HKU2-cand-26570-26649
  source 1..80: mol_type = other DNA
cctccagctactccagtttcccaaaatcctgctgaatttcttgaggaggaggttgagatggtggatgagattattaatta

SEQ ID NO: 5230 - DNA, 80 bp, synthetic construct
  misc_feature 1..80: note = Synthetic: >HKU2-cand-26650-26729
  source 1..80: mol_type = other DNA
gttcaactaaacatgaaccagcttatctttttcctgtgtatgatgtgctgttatgctattctttttgattggctttttaa

SEQ ID NO: 5231 - DNA, 80 bp, synthetic construct
  misc_feature 1..80: note = Synthetic: >HKU2-cand-26730-26809
  source 1..80: mol_type = other DNA
tctcttcttttacgcttgccaggtcaatacttggcaggagtttgctttctcatgtaactggagttggtcacttttctttg

SEQ ID NO: 5232 - DNA, 80 bp, synthetic construct
  misc_feature 1..80: note = Synthetic: >HKU2-cand-26810-26889
  source 1..80: mol_type = other DNA
aggacttcagtacctggtttaaatgcctttctgttgttcttattggtactattgctgctgctagctttatgtttgctgat

SEQ ID NO: 5233 - DNA, 80 bp, synthetic construct
  misc_feature 1..80: note = Synthetic: >HKU2-cand-26890-26969
  source 1..80: mol_type = other DNA
ttcgctgttgaggtctttgacctctttgagcggtttttcatcaacgttggcagattttgcagatttgtttgacatacaat

SEQ ID NO: 5234 - DNA, 80 bp, synthetic construct
  misc_feature 1..80: note = Synthetic: >HKU2-cand-26970-27049
  source 1..80: mol_type = other DNA
ccctagctttgcttgtggattcagtctcatacacaatggtaagcacgtaattatgctagtatgagtagagtataattata

SEQ ID NO: 5235 - DNA, 80 bp, synthetic construct
  misc_feature 1..80: note = Synthetic: >HKU2-cand-27050-27129
  source 1..80: mol_type = other DNA
ttgagtcctatagaccaacgcagttaactacatgtctggtgtggtggagtaatcaaaagatccgctttgacgagcactat

SEQ ID NO: 5236 - DNA, 80 bp, synthetic construct
  misc_feature 1..80: note = Synthetic: >HKU2-cand-27130-27209
  source 1..80: mol_type = other DNA
atggaagagccgtcacacctcgtatgcaagtttctgttagtagttgttaattagttgattctttgacagtgatacacaaa

SEQ ID NO: 5237 - DNA, 80 bp, synthetic construct
  misc_feature 1..80: note = Synthetic: >HKU31-cand-2840-2919
  source 1..80: mol_type = other DNA
ggtaatgatgaagttcaagaaattgacgctgttagaactgttacagtagagtataacatacatcctgttttggatactct

SEQ ID NO: 5238 - DNA, 80 bp, synthetic construct
  misc_feature 1..80: note = Synthetic: >HKU31-cand-2920-2999
  source 1..80: mol_type = other DNA
gcttagtaacacggaacttaagacatttgttgtagataaagatcttacagtatcagaatttgcaattgtcgtacaagaag

SEQ ID NO: 5239 - DNA, 80 bp, synthetic construct
  misc_feature 1..80: note = Synthetic: >HKU31-cand-3000-3079
  source 1..80: mol_type = other DNA
ctgttgctgatttgttagctaagctcctgcgcggcatagagttagatgattttgatttggaagattttatagataccaaa

SEQ ID NO: 5240 - DNA, 80 bp, synthetic construct
  misc_feature 1..80: note = Synthetic: >HKU31-cand-3080-3159
  source 1..80: mol_type = other DNA
gtttatgtttttaatttagatggtgatgaagtttggaaatctactatgattttctctgttcatccagttgattgtgatga

SEQ ID NO: 5241 - DNA, 80 bp, synthetic construct
  misc_feature 1..80: note = Synthetic: >HKU31-cand-3160-3239
  source 1..80: mol_type = other DNA
tgaggaagtagatgaggctctggaagaggaagattcttccaatgaggaagaagaagcagattcttgggctgaaatggttg

SEQ ID NO: 5242 - DNA, 80 bp, synthetic construct
  misc_feature 1..80: note = Synthetic: >HKU31-cand-3320-3399
  source 1..80: mol_type = other DNA
gtctcaccgtctgcggtggcggaaaaaatagtgccaatgcatgatgtaagtgatgactctgcttcaaacaatgaagagag

SEQ ID NO: 5243 - DNA, 80 bp, synthetic construct
  misc_feature 1..80: note = Synthetic: >HKU31-cand-3400-3479
  source 1..80: mol_type = other DNA
tgtgtctgcagatgttgagccgaaaggagttgcaccgccagtagatctcactcctaaggaagtaattgtagagactaaag

SEQ ID NO: 5244 - DNA, 80 bp, synthetic construct
  misc_feature 1..80: note = Synthetic: >HKU31-cand-3480-3559
  source 1..80: mol_type = other DNA
tacctacaacgcctccggagcttgaaatattggaagaaagtgacaacccagtgctggctgatgcagacagttcaaaacag

SEQ ID NO: 5245 - DNA, 80 bp, synthetic construct
  misc_feature 1..80: note = Synthetic: >HKU31-cand-3560-3639
  source 1..80: mol_type = other DNA
ccagagtgtgtagaacattctgtagtagtagaaaccacaaacacatcagaggtttgtgttgatgtagaacattgtgtggt

SEQ ID NO: 5246 - DNA, 80 bp, synthetic construct
  misc_feature 1..80: note = Synthetic: >HKU31-cand-3640-3719
  source 1..80: mol_type = other DNA
tgatcaaattagtgaagaagtgccgaaaggagctgcaccgtctgtcgtggaagaggaaaagccaagtcaggaagtaagtg

SEQ ID NO: 5247 - DNA, 80 bp, synthetic construct
  misc_feature 1..80: note = Synthetic: >HKU31-cand-3720-3799
  source 1..80: mol_type = other DNA
ggagcccagagccatcacttaaagcagataaaccgcataaggattgccaaaaacagttggctgataatgaaaaacaacat

SEQ ID NO: 5248 - DNA, 80 bp, synthetic construct
  misc_feature 1..80: note = Synthetic: >HKU31-cand-3800-3879
  source 1..80: mol_type = other DNA
gttaaagttgataacactaatgatgatcaagtagaacctcttaaaaattataaacataaagttttgagtggcaatgtcac

SEQ ID NO: 5249 - DNA, 80 bp, synthetic construct
  misc_feature 1..80: note = Synthetic: >HKU31-cand-3880-3959
  source 1..80: mol_type = other DNA
tattgtattagcagatgctattaaattggcgaagtgcttttctgctagtgtgttggtgaatgctgctaacattcacctaa

SEQ ID NO: 5250 - DNA, 80 bp, synthetic construct
  misc_feature 1..80: note = Synthetic: >HKU31-cand-3960-4039
  source 1..80: mol_type = other DNA
aacatgctggtggtatagcacatgcaattgatagtgcatctaaaggtgctgttcaaaaggagtcagatgactatattaag

SEQ ID NO: 5251 - DNA, 80 bp, synthetic construct
  misc_feature 1..80: note = Synthetic: >HKU31-cand-4040-4119
  source 1..80: mol_type = other DNA
aataatggcgcattacaagttggtgatgctgttttacttaatgggcatggcatagcgaagcatattttgcatgtagtagg

SEQ ID NO: 5252 - DNA, 80 bp, synthetic construct
  misc_feature 1..80: note = Synthetic: >HKU5-cand-13920-13999
  source 1..80: mol_type = other DNA
agctggaaaagcggtgttatgaccttgttaaggattgtgatgccgtagcagttcatgacttcttcatttttgacgttgac

SEQ ID NO: 5253 - DNA, 80 bp, synthetic construct
  misc_feature 1..80: note = Synthetic: >HKU5-cand-14000-14079
  source 1..80: mol_type = other DNA
aaagtcaaaactcctcatatagtacgtcaacgattgacagagtacactatgatggatcttgtatatgctttgaggcactt

SEQ ID NO: 5254 - DNA, 80 bp, synthetic construct
  misc_feature 1..80: note = Synthetic: >HKU5-cand-14080-14159
  source 1..80: mol_type = other DNA
tgatcagaataactgtgaagtgcttaagagcatacttgtaaaatatggctgctgtgatgcatcatattttgataataaat

SEQ ID NO: 5255 - DNA, 80 bp, synthetic construct
  misc_feature 1..80: note = Synthetic: >HKU5-cand-14160-14239
  source 1..80: mol_type = other DNA
tgtggttcgattttgttgaaaaccccaatgttataagtgtctatcacaagcttggtgaaagaattcgccaagctgtgctt

SEQ ID NO: 5256 - DNA, 80 bp, synthetic construct
  misc_feature 1..80: note = Synthetic: >HKU5-cand-14240-14319
  source 1..80: mol_type = other DNA
aacactgttaaattttgtgaccaaatggttaaatctggtcttgttggtgtcttaacccttgacaatcaggatctgaatgg

SEQ ID NO: 5257 - DNA, 80 bp, synthetic construct
  misc_feature 1..80: note = Synthetic: >HKU5-cand-14320-14399
  source 1..80: mol_type = other DNA
caagtggtatgattttggtgatttcgtaatcactcaacctggtgcaggagtagctattgttgatagctactattcttatt

SEQ ID NO: 5258 - DNA, 80 bp, synthetic construct
  misc_feature 1..80: note = Synthetic: >HKU5-cand-14400-14479
  source 1..80: mol_type = other DNA
taatgcctgtgctttctatgaccaactgcttggccgctgaaacacacagggattgtgatttaactaagcctctcattgag

SEQ ID NO: 5259 - DNA, 80 bp, synthetic construct
  misc_feature 1..80: note = Synthetic: >HKU5-cand-14480-14559
  source 1..80: mol_type = other DNA
tggccacttctagagtacgactacacagattacaagattggtctgtttgaaaagtactttaagcattgggatcagcagta

SEQ ID NO: 5260 - DNA, 80 bp, synthetic construct
  misc_feature 1..80: note = Synthetic: >HKU5-cand-14560-14639
  source 1..80: mol_type = other DNA
tcacccaaattgtgtgaactgtactgatgaccgttgtgtgctacattgtgcaaatttcaatgtgcttttctcaatgacgc

SEQ ID NO: 5261 - DNA, 80 bp, synthetic construct
  misc_feature 1..80: note = Synthetic: >HKU5-cand-14640-14719
  source 1..80: mol_type = other DNA
taccgggaacgtcttttggtccaattgtccgaaaaatctttgtcgatggcgtaccatttgtcatatcttgtggttatcac

SEQ ID NO: 5262 - DNA, 80 bp, synthetic construct
  misc_feature 1..80: note = Synthetic: >HKU5-cand-14720-14799
  source 1..80: mol_type = other DNA
tacaaggaattaggattagtcatgaatatggacgtgagtcttcatagacatagactatcacttaaggagctaatgatgta

SEQ ID NO: 5263 - DNA, 80 bp, synthetic construct
  misc_feature 1..80: note = Synthetic: >HKU5-cand-14800-14879
  source 1..80: mol_type = other DNA
tgcagctgatccagccatgcacatagcttcagcctctgccctctgggatttaagaacaccatgttttagtgttgccgcac

SEQ ID NO: 5264 - DNA, 80 bp, synthetic construct
  misc_feature 1..80: note = Synthetic: >HKU5-cand-14880-14959
  source 1..80: mol_type = other DNA
tcacgacaggtctaacctttcagactgtccgtcctggcaactttaataaagatttctatgattttgttgtttctaagggc

SEQ ID NO: 5265 - DNA, 80 bp, synthetic construct
  misc_feature 1..80: note = Synthetic: >HKU5-cand-14960-15039
  source 1..80: mol_type = other DNA
tttttcaaggaagggtcctcagtcacattaaggcatttcttcttcgcgcaagatggacatgctgctattactgattacag

SEQ ID NO: 5266 - DNA, 80 bp, synthetic construct
  misc_feature 1..80: note = Synthetic: >HKU5-cand-15040-15119
  source 1..80: mol_type = other DNA
ctattatgcttacaacctgccaacgatgtgtgacataaagcagatgttgttttgtatggaagttgttgatcgttacttcg

SEQ ID NO: 5267 - DNA, 80 bp, synthetic construct
  misc_feature 1..80: note = Synthetic: >HKU5-cand-15120-15199
  source 1..80: mol_type = other DNA
agatatatgatggcggttgcctcaatgcatcggaagtaattgttaacaatttggataagagcgctggccatccattcaat

SEQ ID NO: 5268 - DNA, 80 bp, synthetic construct
  misc_feature 1..80: note = Synthetic: >HKU5-cand-19050-19129
  source 1..80: mol_type = other DNA
gtagtgttcatcagggagcccacgttgcctctaatgatgcagtaatgactcgttgtttagccattcatgattgttttatt

SEQ ID NO: 5269 - DNA, 80 bp, synthetic construct
  misc_feature 1..80: note = Synthetic: >HKU5-cand-19130-19209
  source 1..80: mol_type = other DNA
gaacgtgttgagtgggatatcacgtatccttacatctcacatgaaaaacgtcttaattcctgttgtagggcagttgaacg

SEQ ID NO: 5270 - DNA, 80 bp, synthetic construct
  misc_feature 1..80: note = Synthetic: >HKU5-cand-19210-19289
  source 1..80: mol_type = other DNA
caatgtcgtacgcgcagctctccttgctggcagattcgaaagagtctacgatattggcaaccctaaaggaattcctattg

SEQ ID NO: 5271 - DNA, 80 bp, synthetic construct
  misc_feature 1..80: note = Synthetic: >HKU5-cand-19290-19369
  source 1..80: mol_type = other DNA
ttgatgaccctgttgttgattggcattattatgatgcacaaccactgaataagaaagttcagcagttgttctacacagaa

SEQ ID NO: 5272 - DNA, 80 bp, synthetic construct
  misc_feature 1..80: note = Synthetic: >HKU5-cand-19370-19449
  source 1..80: mol_type = other DNA
gactgcgccaaaaacttctcagatgggctctgcttattttggaactgtaatgttccaagatatcctaataatgctatagt

SEQ ID NO: 5273 - DNA, 80 bp, synthetic construct
  misc_feature 1..80: note = Synthetic: >HKU5-cand-19530-19609
  source 1..80: mol_type = other DNA
ccttccacacacctgcatatgatgctagtgcattccgtgatctgaaacctttgcccttcttctactattccacaacacca

SEQ ID NO: 5274 - DNA, 80 bp, synthetic construct
  misc_feature 1..80: note = Synthetic: >HKU5-cand-19610-19689
  source 1..80: mol_type = other DNA
tgcgaagtgcatggtaatggtaatatgttagaagacattgattacgtaccactcaagtctgcagtatgtataactgcatg

SEQ ID NO: 5275 - DNA, 80 bp, synthetic construct
  misc_feature 1..80: note = Synthetic: >HKU5-cand-19690-19769
  source 1..80: mol_type = other DNA
taatcttggtggtgcagtctgtcgcaaacatgctgctgaatacagggattatatggaagcatacaaccttgtatcagcat

SEQ ID NO: 5276 - DNA, 80 bp, synthetic construct
  misc_feature 1..80: note = Synthetic: >HKU5-cand-19770-19849
  source 1..80: mol_type = other DNA
ctggttttagactatggtgttacaagacctttgatgtctataacctgtggtcaaccttcactaaaattcaaggtctcgaa

SEQ ID NO: 5277 - DNA, 80 bp, synthetic construct
  misc_feature 1..80: note = Synthetic: >HKU5-cand-19850-19929
  source 1..80: mol_type = other DNA
aacatcgcctacaacgttattaaacaaggtcactttactggtgtcgaaggtgagttgcccgtcgctgtggttaacgacaa

SEQ ID NO: 5278 - DNA, 80 bp, synthetic construct
  misc_feature 1..80: note = Synthetic: >HKU5-cand-19930-20009
  source 1..80: mol_type = other DNA
aatctacaccaaaagtgatgttaatgatgtgtgtatcttcgaaaacaagaccacacttcctactaatattgcatttgaac

SEQ ID NO: 5279 - DNA, 80 bp, synthetic construct
  misc_feature 1..80: note = Synthetic: >HKU5-cand-20010-20089
  source 1..80: mol_type = other DNA
tgtatgctaaaagagctgttcgctcgcatccagatttcaatttgctacgtaatttagaagtagatgtctgctataagttt

SEQ ID NO: 5280 - DNA, 80 bp, synthetic construct
  misc_feature 1..80: note = Synthetic: >HKU5-cand-20090-20169
  source 1..80: mol_type = other DNA
gtgctctgggattacgagcgtagcaacatctatggtagtgcaacaatcggtgtatgcaagtacactgatattgatgtcaa

SEQ ID NO: 5281 - DNA, 80 bp, synthetic construct
  misc_feature 1..80: note = Synthetic: >HKU5-cand-20170-20249
  source 1..80: mol_type = other DNA
ttcagcactgaatatatgttttgacattcgtgataatggctcattggaaagattcatgtctttaccaaatggcatcctta

SEQ ID NO: 5282 - DNA, 80 bp, synthetic construct
  misc_feature 1..80: note = Synthetic: >HKU5-cand-20250-20329
  source 1..80: mol_type = other DNA
tatccgatcgcaaggtgaagaattatccttgcatcgttagttctaactatgcttacttcaatggcacactgataagagac

SEQ ID NO: 5283 - DNA, 80 bp, synthetic construct
  misc_feature 1..80: note = Synthetic: >HKU5-cand-24240-24319
  source 1..80: mol_type = other DNA
tctaaaattaaccaggctcttcatggtgcaaacctacgtcaagatgagtctattgctaatctattttcaagtattaaaac

SEQ ID NO: 5284 - DNA, 80 bp, synthetic construct
  misc_feature 1..80: note = Synthetic: >HKU5-cand-24320-24399
  source 1..80: mol_type = other DNA
ccagaatacccagcctcttcaggcgggattgaatggtgattttaacttgacaatgcttcaaatacctcaagttactacag

SEQ ID NO: 5285 - DNA, 80 bp, synthetic construct
  misc_feature 1..80: note = Synthetic: >HKU5-cand-24400-24479
  source 1..80: mol_type = other DNA
gtgaacgtaagtacaggagtactatcgaagaccttcttttcaataaggttactattgctgatcctggctatatgcaaggc

SEQ ID NO: 5286 - DNA, 80 bp, synthetic construct
  misc_feature 1..80: note = Synthetic: >HKU5-cand-24560-24639
  source 1..80: mol_type = other DNA
gccacccttatatgacccctatatggaagctgcttacacttcttccctattgggcagtattgctggtgctagttggacag

SEQ ID NO: 5287 - DNA, 80 bp, synthetic construct
  misc_feature 1..80: note = Synthetic: >HKU5-cand-24640-24719
  source 1..80: mol_type = other DNA
caggtctgtcgtctttcgcagcaataccatttgcacaaagtatcttttatcgcttgaatggtgttggcatcactcagcag

SEQ ID NO: 5288 - DNA, 80 bp, synthetic construct
  misc_feature 1..80: note = Synthetic: >HKU5-cand-24720-24799
  source 1..80: mol_type = other DNA
gttctgtctgagaatcagaagatcattgccaacaaattcaatcaagctcttggtgccatgcaaactggctttactactac

SEQ ID NO: 5289 - DNA, 80 bp, synthetic construct
  misc_feature 1..80: note = Synthetic: >HKU5-cand-24800-24879
  source 1..80: mol_type = other DNA
taaccttgctttcaacaaggttcaggatgcagtaaatgctaacgcaatggctctttccaaactagctgcggaattatcta

SEQ ID NO: 5290 - DNA, 80 bp, synthetic construct
  misc_feature 1..80: note = Synthetic: >HKU5-cand-24880-24959
  source 1..80: mol_type = other DNA
acactttcggtgctatttcatcttctatcagtgacatcctcgcgaggcttgacactgttgaacaagaggcacaaattgat

SEQ ID NO: 5291 - DNA, 80 bp, synthetic construct
  misc_feature 1..80: note = Synthetic: >HKU5-cand-24960-25039
  source 1..80: mol_type = other DNA
cgactgatcaatggccgtcttacatctcttaacgcattcgttgcgcaacaacttgtgcgtactgaagctgctgccagatc

SEQ ID NO: 5292 - DNA, 80 bp, synthetic construct
  misc_feature 1..80: note = Synthetic: >HKU5-cand-25050-25129
  source 1..80: mol_type = other DNA
gcccaagataaggtcaatgagtgcgtcaaatcgcaatccaaacgaaatggattttgcggaactggcacacatattgtttc

SEQ ID NO: 5293 - DNA, 80 bp, synthetic construct
  misc_feature 1..80: note = Synthetic: >HKU5-cand-25130-25209
  source 1..80: mol_type = other DNA
atttgccattaatgcccctaatggcctctatttcttccatgttggttaccagccaacatcccatgttaatgcaaccgccg

SEQ ID NO: 5294 - DNA, 80 bp, synthetic construct
  misc_feature 1..80: note = Synthetic: >HKU5-cand-25210-25289
  source 1..80: mol_type = other DNA
cctacggcctttgcaacactgaaaatccaccaaagtgcattgcacctattgatggctactttgttttaaatcaaactacc

SEQ ID NO: 5295 - DNA, 80 bp, synthetic construct
  misc_feature 1..80: note = Synthetic: >HKU5-cand-25300-25379
  source 1..80: mol_type = other DNA
gaagcagtggagaccaacaatggtattatactggtagttctttcttccatcctgaacccatcacagaagcaaattctaag

SEQ ID NO: 5296 - DNA, 80 bp, synthetic construct
  misc_feature 1..80: note = Synthetic: >HKU5-cand-25380-25459
  source 1..80: mol_type = other DNA
tatgtgtccatggatgtaaaattcgaaaacctcactaataaacttcctccacctctccttagtaattccacagatttgga

SEQ ID NO: 5297 - DNA, 80 bp, synthetic construct
  misc_feature 1..80: note = Synthetic: >HKU8-cand-24400-24479
  source 1..80: mol_type = other DNA
tttgcaaactgatgtgttgcagcgtaatcagcagatattagctcagtcatttaattctgcaatgggtaacattactgttg

SEQ ID NO: 5298 - DNA, 80 bp, synthetic construct
  misc_feature 1..80: note = Synthetic: >HKU8-cand-24480-24559
  source 1..80: mol_type = other DNA
cttttgatgatgtaagtaatgccattcaacaaacttctcaagctttgaagactgttgctcaagcccttaataaggttcag

SEQ ID NO: 5299 - DNA, 80 bp, synthetic construct
  misc_feature 1..80: note = Synthetic: >HKU8-cand-24560-24639
  source 1..80: mol_type = other DNA
aatgttgttaatgaacaaggtaatgctttgtcccagttaaccaagcagcttgcttctaattttcaagccatttctgcttc

SEQ ID NO: 5300 - DNA, 80 bp, synthetic construct
  misc_feature 1..80: note = Synthetic: >HKU8-cand-24640-24719
  source 1..80: mol_type = other DNA
tattgaagatttgtataataggcttgataaggttgaagctgatcagcaggttgacaggttgattacaggacgtcttgctg

SEQ ID NO: 5301 - DNA, 80 bp, synthetic construct
  misc_feature 1..80: note = Synthetic: >HKU8-cand-24720-24799
  source 1..80: mol_type = other DNA
ctcttaatgcttttgttactcagcagttgactaagtacacagaggttcgtgcttcaagacagttggcccaagagaagatt

SEQ ID NO: 5302 - DNA, 80 bp, synthetic construct
  misc_feature 1..80: note = Synthetic: >HKU8-cand-24800-24879
  source 1..80: mol_type = other DNA
aatgagtgtgttaagtcacagtcttctagatatggcttctgtggtaatggtacacatgtgttttctgttgctaatgctgc

SEQ ID NO: 5303 - DNA, 80 bp, synthetic construct
  misc_feature 1..80: note = Synthetic: >HKU8-cand-24880-24959
  source 1..80: mol_type = other DNA
tcctgatggtattatgtttttccatgctgttcttgtacccactgcatatgttgaagttactgcttttgctggagtttgtg

SEQ ID NO: 5304 - DNA, 80 bp, synthetic construct
  misc_feature 1..80: note = Synthetic: >HKU8-cand-24960-25039
  source 1..80: mol_type = other DNA
ttgatggcagaggataggttcttagagatcgtggtaaggttttgtttcaaaagcctggtaatgataagtatttaatcaca

SEQ ID NO: 5305 - DNA, 80 bp, synthetic construct
  misc_feature 1..80: note = Synthetic: >HKU8-cand-25040-25119
  source 1..80: mol_type = other DNA
cctaggattatgtttgaacctcgagttcctgtgagtgctgattttgttcaaatttccggttgtaatgttacctatgtcaa

SEQ ID NO: 5306 - DNA, 80 bp, synthetic construct
  misc_feature 1..80: note = Synthetic: >HKU8-cand-25120-25199
  source 1..80: mol_type = other DNA
tgttactattgatgagttgccagagcttttgcctgactacattgatgttaataaaactttgaaagaattcgttgctacga

SEQ ID NO: 5307 - DNA, 80 bp, synthetic construct
  misc_feature 1..80: note = Synthetic: >HKU8-cand-25200-25279
  source 1..80: mol_type = other DNA
ttccaaatcacactgaaccgcaattgacgcttgacatttttaatgctacttatcttaatctcactgccgagattaatgca

SEQ ID NO: 5308 - DNA, 80 bp, synthetic construct
  misc_feature 1..80: note = Synthetic: >HKU8-cand-25280-25359
  source 1..80: mol_type = other DNA
cttacgaatcaatctcacgaactgcagaatattgctgatgagtttcatctaacgatttctaagattaatgacactcttgt

SEQ ID NO: 5309 - DNA, 80 bp, synthetic construct
  misc_feature 1..80: note = Synthetic: >HKU8-cand-25360-25439
  source 1..80: mol_type = other DNA
tgaacttgagtggcttaatagagttgaaacttatattaaatggccttggtatgtgtggctcgctattgctgttgcactta

SEQ ID NO: 5310 - DNA, 80 bp, synthetic construct
  misc_feature 1..80: note = Synthetic: >HKU8-cand-25440-25519
  source 1..80: mol_type = other DNA
tcatgttgattgggcttatgctatggtgttgtcttgcaactggttgttgtggttgttgtagttgtatggctagtactctt

SEQ ID NO: 5311 - DNA, 80 bp, synthetic construct
  misc_feature 1..80: note = Synthetic: >HKU8-cand-25520-25599
  source 1..80: mol_type = other DNA
gattttagaggcagtaaacggttacaacaatacgaagttgaaaaagtgcacatccagtaatgtttggtggccttttcaca

SEQ ID NO: 5312 - DNA, 80 bp, synthetic construct
  misc_feature 1..80: note = Synthetic: >HKU8-cand-25600-25679
  source 1..80: mol_type = other DNA
tactcaattgaaaaagttcgtactgcagtaaactcagagcttgagttaccacctgctaaagagcatgatctccttgaaag

SEQ ID NO: 5313 - DNA, 80 bp, synthetic construct
  misc_feature 1..80: note = Synthetic: >MERS-cand-23610-23689
  source 1..80: mol_type = other DNA
ctctttgttcgtagaggactgcaagttgcctcttggtcaatctctctgtgctcttcctgacacacctagtactctcacac

SEQ ID NO: 5314 - DNA, 80 bp, synthetic construct
  misc_feature 1..80: note = Synthetic: >MERS-cand-23690-23769
  source 1..80: mol_type = other DNA
ctcgcagtgtgcgctctgttccaggtgaaatgcgcttggcatccattgcttttaatcatcctattcaggttgatcaactt

SEQ ID NO: 5315 - DNA, 80 bp, synthetic construct
  misc_feature 1..80: note = Synthetic: >MERS-cand-23770-23849
  source 1..80: mol_type = other DNA
aatagtagttattttaaattaagtatacctactaatttttcctttggtgtgactcaggagtacattcagacaaccattca

SEQ ID NO: 5316 - DNA, 80 bp, synthetic construct
  misc_feature 1..80: note = Synthetic: >MERS-cand-23850-23929
  source 1..80: mol_type = other DNA
gaaagttactgttgattgtaaacagtacgtttgcaatggtttccagaagtgtgagcaattactgcgcgagtatggccagt

SEQ ID NO: 5317 - DNA, 80 bp, synthetic construct
  misc_feature 1..80: note = Synthetic: >MERS-cand-23930-24009
  source 1..80: mol_type = other DNA
tttgttccaaaataaaccaggctctccatggtgccaatttacgccaggatgattctgtacgtaatttgtttgcgagcgtg

SEQ ID NO: 5318 - DNA, 80 bp, synthetic construct
  misc_feature 1..80: note = Synthetic: >MERS-cand-24010-24089
  source 1..80: mol_type = other DNA
aaaagctctcaatcatctcctatcataccaggttttggaggtgactttaatttgacacttctagaacctgtttctatatc

SEQ ID NO: 5319 - DNA, 80 bp, synthetic construct
  misc_feature 1..80: note = Synthetic: >MERS-cand-24090-24169
  source 1..80: mol_type = other DNA
tactggcagtcgtagtgcacgtagtgctattgaggatttgctatttgacaaagtcactatagctgatcctggttatatgc

SEQ ID NO: 5320 - DNA, 80 bp, synthetic construct
  misc_feature 1..80: note = Synthetic: >MERS-cand-24170-24249
  source 1..80: mol_type = other DNA
aaggttacgatgattgtatgcagcaaggtccagcatcagctcgtgatcttatttgtgctcaatatgtggctggttataaa

SEQ ID NO: 5321 - DNA, 80 bp, synthetic construct
  misc_feature 1..80: note = Synthetic: >MERS-cand-24250-24329
  source 1..80: mol_type = other DNA
gtattacctcctcttatggatgttaatatggaagccgcgtatacttcatctttgcttggcagcatagcaggtgttggctg

SEQ ID NO: 5322 - DNA, 80 bp, synthetic construct
  misc_feature 1..80: note = Synthetic: >MERS-cand-24330-24409
  source 1..80: mol_type = other DNA
gactgctggcttatcctcctttgctgctattccatttgcacagagtatcttttataggttaaacggtgttggcattactc

SEQ ID NO: 5323 - DNA, 80 bp, synthetic construct
  misc_feature 1..80: note = Synthetic: >MERS-cand-24410-24489
  source 1..80: mol_type = other DNA
aacaggttctttcagagaaccaaaagcttattgccaataagtttaatcaggctctgggagctatgcaaacaggcttcact

SEQ ID NO: 5324 - DNA, 80 bp, synthetic construct
  misc_feature 1..80: note = Synthetic: >MERS-cand-24490-24569
  source 1..80: mol_type = other DNA
acaactaatgaagcttttcggaaggttcaggatgctgtgaacaacaatgcacaggctctatccaaattagctagcgagct

SEQ ID NO: 5325 - DNA, 80 bp, synthetic construct
  misc_feature 1..80: note = Synthetic: >MERS-cand-24570-24649
  source 1..80: mol_type = other DNA
atctaatacttttggtgctatttccgcctctattggagacatcatacaacgtcttgatgttctcgaacaggacgcccaaa

SEQ ID NO: 5326 - DNA, 80 bp, synthetic construct
  misc_feature 1..80: note = Synthetic: >MERS-cand-24650-24729
  source 1..80: mol_type = other DNA
tagacagacttattaatggccgtttgacaacactaaatgcttttgttgcacagcagcttgttcgttccgaatcagctgct

SEQ ID NO: 5327 - DNA, 80 bp, synthetic construct
  misc_feature 1..80: note = Synthetic: >MERS-cand-24730-24809
  source 1..80: mol_type = other DNA
ctttccgctcaattggctaaagataaagtcaatgagtgtgtcaaggcacaatccaagcgttctggattttgcggtcaagg

SEQ ID NO: 5328 - DNA, 80 bp, synthetic construct
  misc_feature 1..80: note = Synthetic: >MERS-cand-24810-24889
  source 1..80: mol_type = other DNA
cacacatatagtgtcctttgttgtaaatgcccctaatggcctttactttatgcatgttggttattaccctagcaaccaca

SEQ ID NO: 5329 - DNA, 80 bp, synthetic construct
  misc_feature 1..80: note = Synthetic: >NL63-cand-320-399
  source 1..80: mol_type = other DNA
ttcggaaatttcaggttttggttttgccattccttctgtagccgttcgcacttatagcgaagccgctgcacaaggttttc

SEQ ID NO: 5330 - DNA, 80 bp, synthetic construct
  misc_feature 1..80: note = Synthetic: >NL63-cand-400-479
  source 1..80: mol_type = other DNA
aggcatgccgttttgttgcttttggcttacaggattgtgtaaccggtattaatgatgatgattatgtcattgcattgact

SEQ ID NO: 5331 - DNA, 80 bp, synthetic construct
  misc_feature 1..80: note = Synthetic: >NL63-cand-480-559
  source 1..80: mol_type = other DNA
ggtactaatcagctctgtgccaaaattttacctttttctgatagaccccttaatttgcgaggttggctcattttttctaa

SEQ ID NO: 5332 - DNA, 80 bp, synthetic construct
  misc_feature 1..80: note = Synthetic: >NL63-cand-560-639
  source 1..80: mol_type = other DNA
cagcaattatgttcttcaggactttgatgttgtttttggccatggtgcaggaagtgtggtttttgtggataagtatatgt

SEQ ID NO: 5333 - DNA, 80 bp, synthetic construct
  misc_feature 1..80: note = Synthetic: >NL63-cand-640-719
  source 1..80: mol_type = other DNA
gtggttttgatggtaaacctgtgttacctaaaaacatgtgggaatttagggattactttaataataatactgatagtatt

SEQ ID NO: 5334 - DNA, 80 bp, synthetic construct
  misc_feature 1..80: note = Synthetic: >NL63-cand-720-799
  source 1..80: mol_type = other DNA
gttattgatggtgtcacttatcaactagcatgggatgttatacgtaaagacctttcttatgaacagcaaaatgttttagc

SEQ ID NO: 5335 - DNA, 80 bp, synthetic construct
  misc_feature 1..80: note = Synthetic: >NL63-cand-800-879
  source 1..80: mol_type = other DNA
cattgagagcattcattaccttggtactacaggtcatactttgaagtctggttgcaaacttactaatgccaagccgccta

SEQ ID NO: 5336 - DNA, 80 bp, synthetic construct
  misc_feature 1..80: note = Synthetic: >NL63-cand-880-959
  source 1..80: mol_type = other DNA
aatattcttctaaggttgttttgagtggtgaatggaatgctgtgtatagggcgtttggttcaccatttattacaaatggt

SEQ ID NO: 5337 - DNA, 80 bp, synthetic construct
  misc_feature 1..80: note = Synthetic: >NL63-cand-960-1039
  source 1..80: mol_type = other DNA
atgtcattgctagatataattgttaaaccagttttctttaatgcttttgttaaatgcaattgtggttctgagagttggag

SEQ ID NO: 5338 - DNA, 80 bp, synthetic construct
  misc_feature 1..80: note = Synthetic: >NL63-cand-1040-1119
  source 1..80: mol_type = other DNA
tgttggtgcatgggatggttacttatcttcttgttgtggcacacctgctaagaaactttgtgttgttcctggtaatgttg

SEQ ID NO: 5339 - DNA, 80 bp, synthetic construct
  misc_feature 1..80: note = Synthetic: >NL63-cand-1120-1199
  source 1..80: mol_type = other DNA
ttcctggtgatgtgatcatcacctcaactggtgctggttgtggtgttaaatactatgctggcttagttgttaaacatatt

SEQ ID NO: 5340 - DNA, 80 bp, synthetic construct
  misc_feature 1..80: note = Synthetic: >NL63-cand-1200-1279
  source 1..80: mol_type = other DNA
actaacattactggtgtgtctttatggcgtgttacagctgttcattctgatggaatgtttgtggcatcatcttcttatga

SEQ ID NO: 5341 - DNA, 80 bp, synthetic construct
  misc_feature 1..80: note = Synthetic: >NL63-cand-1280-1359
  source 1..80: mol_type = other DNA
tgcactcttgcatagaaattcattagaccctttttgctttgatgttaacactttactttctaatcaattacgtctagctt

SEQ ID NO: 5342 - DNA, 80 bp, synthetic construct
  misc_feature 1..80: note = Synthetic: >NL63-cand-1360-1439
  source 1..80: mol_type = other DNA
ttcttggtgcttctgttacagaagatgttaaatttgctgctagcactggtgttattgacattagtgctggtatgtttggt

SEQ ID NO: 5343 - DNA, 80 bp, synthetic construct
  misc_feature 1..80: note = Synthetic: >NL63-cand-1440-1519
  source 1..80: mol_type = other DNA
ctttacgatgacatattgacaaacaataaaccttggtttgtacgcaaagcttctgggctttttgatgcaatctgggatgc

SEQ ID NO: 5344 - DNA, 80 bp, synthetic construct
  misc_feature 1..80: note = Synthetic: >NL63-cand-1520-1599
  source 1..80: mol_type = other DNA
ttttgttgccgctattaagcttgtaccaactactactggtgttttggttaggtttgttaagtctattgcttcaactgttt

SEQ ID NO: 5345 - DNA, 80 bp, synthetic construct
  misc_feature 1..80: note = Synthetic: >NL63-cand-4160-4239
  source 1..80: mol_type = other DNA
tatgcatggaggcggtgttgcacgtgctattgatattttgactgaaggtcaacttcagtcattatctaaagattacatta

SEQ ID NO: 5346 - DNA, 80 bp, synthetic construct
  misc_feature 1..80: note = Synthetic: >NL63-cand-4240-4319
  source 1..80: mol_type = other DNA
gtagtaatggtccacttaaggtaggaacaggtgttatgttggagtgtgaaaaattcaatgtatttaatgttgttggtccg

SEQ ID NO: 5347 - DNA, 80 bp, synthetic construct
  misc_feature 1..80: note = Synthetic: >NL63-cand-4320-4399
  source 1..80: mol_type = other DNA
cgagctggtaaacatgagcattcattacttgttgaagcttataattctattttagttgaaaatggtattccacttatgcc

SEQ ID NO: 5348 - DNA, 80 bp, synthetic construct
  misc_feature 1..80: note = Synthetic: >NL63-cand-4400-4479
  source 1..80: mol_type = other DNA
tcttcttagttgtggtatttttggtgtaaggattgaaaattctcttaaagctttgtttagttgtgacattaataaattat

SEQ ID NO: 5349 - DNA, 80 bp, synthetic construct
  misc_feature 1..80: note = Synthetic: >NL63-cand-4480-4559
  source 1..80: mol_type = other DNA
tgcaagtttttgtttattcttcaaatgaagaacaagctgttcttaagtttttagatggtttagatttaacaccagtcatt

SEQ ID NO: 5350 - DNA, 80 bp, synthetic construct
  misc_feature 1..80: note = Synthetic: >NL63-cand-4560-4639
  source 1..80: mol_type = other DNA
gacgatgttgatgttgttaaaccttttagagttgaaggtaatttttcattctttgattgtggtgtcaatgccttggatgg

SEQ ID NO: 5351 - DNA, 80 bp, synthetic construct
  misc_feature 1..80: note = Synthetic: >NL63-cand-4640-4719
  source 1..80: mol_type = other DNA
tgatatttacttattatttactaactctattttaatgttggataaacaaggacaattattggatacaaaacttaatggta

SEQ ID NO: 5352 - DNA, 80 bp, synthetic construct
  misc_feature 1..80: note = Synthetic: >NL63-cand-4720-4799
  source 1..80: mol_type = other DNA
ttttgcaacaggcagctcttgattatcttgctacagttaaaactgtaccagctggtaatttggttaaacttgttgttgag

SEQ ID NO: 5353 - DNA, 80 bp, synthetic construct
  misc_feature 1..80: note = Synthetic: >NL63-cand-4800-4879
  source 1..80: mol_type = other DNA
agttgtaccatttatatgtgtgttgtaccatcgataaatgatctttcttttgataaaaatcttggtcgttgtgtgcgtaa

SEQ ID NO: 5354 - DNA, 80 bp, synthetic construct
  misc_feature 1..80: note = Synthetic: >NL63-cand-4880-4959
  source 1..80: mol_type = other DNA
acttaatagattgaaaacttgtgttattgccaatgttcctgctattgatgttttgaaaaagcttctttcaagtttgactt

SEQ ID NO: 5355 - DNA, 80 bp, synthetic construct
  misc_feature 1..80: note = Synthetic: >NL63-cand-4960-5039
  source 1..80: mol_type = other DNA
taactgttaaatttgttgtagagagtaatgttatggatgttaacgactgttttaagaatgataatgtagttttgaaaatt

SEQ ID NO: 5356 - DNA, 80 bp, synthetic construct
  misc_feature 1..80: note = Synthetic: >NL63-cand-5040-5119
  source 1..80: mol_type = other DNA
actgaagatggtattaatgttaaagatgttgttgttgagtcttctaagtcacttggtaaacaattgggtgttgtgagtga

SEQ ID NO: 5357 - DNA, 80 bp, synthetic construct
  misc_feature 1..80: note = Synthetic: >NL63-cand-5120-5199
  source 1..80: mol_type = other DNA
tggtgttgactcttttgaaggtgttttacctattaatactgatactgtcttatctgtagctccagaagttgactgggttg

SEQ ID NO: 5358 - DNA, 80 bp, synthetic construct
  misc_feature 1..80: note = Synthetic: >NL63-cand-5200-5279
  source 1..80: mol_type = other DNA
ctttttatggttttgaaaaggcagcactttttgcttctttggatgtaaagccatatggttaccctaatgattttgttggt

SEQ ID NO: 5359 - DNA, 80 bp, synthetic construct
  misc_feature 1..80: note = Synthetic: >NL63-cand-5280-5359
  source 1..80: mol_type = other DNA
ggttttagagttcttgggaccaccgacaataattgttgggttaatgcaacttgtataattttacagtatcttaagcctac

SEQ ID NO: 5360 - DNA, 80 bp, synthetic construct
  misc_feature 1..80: note = Synthetic: >NL63-cand-5360-5439
  source 1..80: mol_type = other DNA
ttttaaatctaagggtttaaatgttctttggaacaaatttgttacaggtgatgttggaccttttgttagttttatttatt

SEQ ID NO: 5361 - DNA, 80 bp, synthetic construct
  misc_feature 1..80: note = Synthetic: >SARSCoV-cand-22840-22919
  source 1..80: mol_type = other DNA
attataattataaatataggtatcttagacatggcaagcttaggccctttgagagagacatatctaatgtgcctttctcc

SEQ ID NO: 5362 - DNA, 80 bp, synthetic construct
  misc_feature 1..80: note = Synthetic: >SARSCoV-cand-22920-22999
  source 1..80: mol_type = other DNA
cctgatggcaaaccttgcaccccacctgctcttaattgttattggccattaaatgattatggtttttacaccactactgg

SEQ ID NO: 5363 - DNA, 80 bp, synthetic construct
  misc_feature 1..80: note = Synthetic: >SARSCoV-cand-23000-23079
  source 1..80: mol_type = other DNA
cattggctaccaaccttacagagttgtagtactttcttttgaacttttaaatgcaccggccacggtttgtggaccaaaat

SEQ ID NO: 5364 - DNA, 80 bp, synthetic construct
  misc_feature 1..80: note = Synthetic: >SARSCoV-cand-23080-23159
  source 1..80: mol_type = other DNA
tatccactgaccttattaagaaccagtgtgtcaattttaattttaatggactcactggtactggtgtgttaactccttct

SEQ ID NO: 5365 - DNA, 80 bp, synthetic construct
  misc_feature 1..80: note = Synthetic: >SARSCoV-cand-23160-23239
  source 1..80: mol_type = other DNA
tcaaagagatttcaaccatttcaacaatttggccgtgatgtttctgatttcactgattccgttcgagatcctaaaacatc

SEQ ID NO: 5366 - DNA, 80 bp, synthetic construct
  misc_feature 1..80: note = Synthetic: >SARSCoV-cand-23240-23319
  source 1..80: mol_type = other DNA
tgaaatattagacatttcaccttgctcttttgggggtgtaagtgtaattacacctggaacaaatgcttcatctgaagttg

SEQ ID NO: 5367 - DNA, 80 bp, synthetic construct
  misc_feature 1..80: note = Synthetic: >SARSCoV-cand-23320-23399
  source 1..80: mol_type = other DNA
ctgttctatatcaagatgttaactgcactgatgtttctacagcaattcatgcagatcaactcacaccagcttggcgcata

SEQ ID NO: 5368 - DNA, 80 bp, synthetic construct
  misc_feature 1..80: note = Synthetic: >SARSCoV-cand-23400-23479
  source 1..80: mol_type = other DNA
tattctactggaaacaatgtattccagactcaagcaggctgtcttataggagctgagcatgtcgacacttcttatgagtg

SEQ ID NO: 5369 - DNA, 80 bp, synthetic construct
  misc_feature 1..80: note = Synthetic: >SARSCoV-cand-23480-23559
  source 1..80: mol_type = other DNA
cgacattcctattggagctggcatttgtgctagttaccatacagtttctttattacgtagtactagccaaaaatctattg

SEQ ID NO: 5370 - DNA, 80 bp, synthetic construct
  misc_feature 1..80: note = Synthetic: >SARSCoV-cand-23560-23639
  source 1..80: mol_type = other DNA
tggcttatactatgtctttaggtgctgatagttcaattgcttactctaataacaccattgctatacctactaacttttca

SEQ ID NO: 5371 - DNA, 80 bp, synthetic construct
  misc_feature 1..80: note = Synthetic: >SARSCoV-cand-23640-23719
  source 1..80: mol_type = other DNA
attagcattactacagaagtaatgcctgtttctatggctaaaacctccgtagattgtaatatgtacatctgcggagattc

SEQ ID NO: 5372 - DNA, 80 bp, synthetic construct
  misc_feature 1..80: note = Synthetic: >SARSCoV-cand-23720-23799
  source 1..80: mol_type = other DNA
tactgaatgtgctaatttgcttctccaatatggtagcttttgcacacaactaaatcgtgcactctcaggtattgctgctg

SEQ ID NO: 5373 - DNA, 80 bp, synthetic construct
  misc_feature 1..80: note = Synthetic: >SARSCoV-cand-23890-23969
  source 1..80: mol_type = other DNA
cacaaatattacctgaccctctaaagccaactaagaggtcttttattgaggacttgctctttaataaggtgacactcgct

SEQ ID NO: 5374 - DNA, 80 bp, synthetic construct
  misc_feature 1..80: note = Synthetic: >SARSCoV-cand-23970-24049
  source 1..80: mol_type = other DNA
gatgctggcttcatgaagcaatatggcgaatgcctaggtgatattaatgctagagatctcatttgtgcgcagaagttcaa

SEQ ID NO: 5375 - DNA, 80 bp, synthetic construct
  misc_feature 1..80: note = Synthetic: >SARSCoV-cand-24050-24129
  source 1..80: mol_type = other DNA
tggacttacagtgttgccacctctgctcactgatgatatgattgctgcctacactgctgctctagttagtggtactgcca

SEQ ID NO: 5376 - DNA, 80 bp, synthetic construct
  misc_feature 1..80: note = Synthetic: >Shrew-cand-1600-1679
  source 1..80: mol_type = other DNA
aatgtgactgtgaatggtgttagatctatgggtcttaccaccatgaatgttattgattttttcttaggtaaaaagtctag

SEQ ID NO: 5377 - DNA, 80 bp, synthetic construct
  misc_feature 1..80: note = Synthetic: >Shrew-cand-1680-1759
  source 1..80: mol_type = other DNA
tgtagtagtaaatgaatttgaagttgctgaatggtggaataattctgttagtatggttttgtgtgatgcaaaaccagaag

SEQ ID NO: 5378 - DNA, 80 bp, synthetic construct
  misc_feature 1..80: note = Synthetic: >Shrew-cand-1760-1839
  source 1..80: mol_type = other DNA
gcaatggaaaaggtgtggttatagctggtcaagctttttataatgaaggtcagttttattggcctttgttgaaaggtact

SEQ ID NO: 5379 - DNA, 80 bp, synthetic construct
  misc_feature 1..80: note = Synthetic: >Shrew-cand-1840-1919
  source 1..80: mol_type = other DNA
actgaagttgcagagactttatgctttaaacaagcgggaggtcagtctgttacttttagtggaaaagatgatataaaaga

SEQ ID NO: 5380 - DNA, 80 bp, synthetic construct
  misc_feature 1..80: note = Synthetic: >Shrew-cand-1920-1999
  source 1..80: mol_type = other DNA
agttgaaaaagtttatcgtgttaagtatgaacttgagttcgattttgaatatgaactttttcaaaagttgttagaaaagt

SEQ ID NO: 5381 - DNA, 80 bp, synthetic construct
  misc_feature 1..80: note = Synthetic: >Shrew-cand-2000-2079
  source 1..80: mol_type = other DNA
tgcttgtagagtctgaatttacttcctggaattccatggctgagtttgtctttgacaaagtcgatgaagtggaaaataca

SEQ ID NO: 5382 - DNA, 80 bp, synthetic construct
  misc_feature 1..80: note = Synthetic: >Shrew-cand-2080-2159
  source 1..80: mol_type = other DNA
gccgaagttcttgttcaaactcttgatcaagataatgttcatgttaaaaactttatggaatttggaattccagaagttta

SEQ ID NO: 5383 - DNA, 80 bp, synthetic construct
  misc_feature 1..80: note = Synthetic: >Shrew-cand-2160-2239
  source 1..80: mol_type = other DNA
tgtttatgatgtagagggtggtgctgatttgactaagccagtgcttgtttctatgtttaaaattaaagatgttgaatatg

SEQ ID NO: 5384 - DNA, 80 bp, synthetic construct
  misc_feature 1..80: note = Synthetic: >Shrew-cand-2240-2319
  source 1..80: mol_type = other DNA
attcagacggtgctgagatgaattcggaagatgatatcattgaggtaccttttgatttaggcagcgaaaaccaagaagat

SEQ ID NO: 5385 - DNA, 80 bp, synthetic construct
  misc_feature 1..80: note = Synthetic: >Shrew-cand-2320-2399
  source 1..80: mol_type = other DNA
gacacagaagaaattaaagttgaagaagtgaaagattctgaagtgcaagagtcagaagctgatttaactaagattcaagt

SEQ ID NO: 5386 - DNA, 80 bp, synthetic construct
  misc_feature 1..80: note = Synthetic: >Shrew-cand-2400-2479
  source 1..80: mol_type = other DNA
tgtgacatctaagaaacctaagccgttgtgtgatacctttaaaggcagtaatgatatagtgtttttgaaacaagctagta

SEQ ID NO: 5387 - DNA, 80 bp, synthetic construct
  misc_feature 1..80: note = Synthetic: >Shrew-cand-2480-2559
  source 1..80: mol_type = other DNA
ataattgttggattaacactactgcatttgtgttgcaagtgttgggttcaaaagattcaacaattcaaaatctttatgaa

SEQ ID NO: 5388 - DNA, 80 bp, synthetic construct
  misc_feature 1..80: note = Synthetic: >Shrew-cand-2560-2639
  source 1..80: mol_type = other DNA
acacctgatgatttcataaataaagtttgttggcaaaacaacaccaagtggggtgataaagatgatgtaggaaatacatt

SEQ ID NO: 5389 - DNA, 80 bp, synthetic construct
  misc_feature 1..80: note = Synthetic: >Shrew-cand-2640-2719
  source 1..80: mol_type = other DNA
ggtgaaatggtttgataattctgatgaagtctttggaacaatgtgcatttctttgaagtgtgcttgtggtttgacttatc

SEQ ID NO: 5390 - DNA, 80 bp, synthetic construct
  misc_feature 1..80: note = Synthetic: >Shrew-cand-2720-2799
  source 1..80: mol_type = other DNA
gggattatctaaatattttctgtggtaatcttagtaagaatccaaatctaggaaattgtggagtttgtaatcagactttt

SEQ ID NO: 5391 - DNA, 80 bp, synthetic construct
  misc_feature 1..80: note = Synthetic: >Shrew-cand-2800-2879
  source 1..80: mol_type = other DNA
caatgtcagattgtcagtcttacaggtaaaatgtgttttgcttttagccctcagatgataagtgatgatattcttaaaga

SEQ ID NO: 5392 - DNA, 80 bp, synthetic construct
  misc_feature 1..80: note = Synthetic: >Shrew-cand-5440-5519
  source 1..80: mol_type = other DNA
tgttttatttttgtaaaaatttttagattttttcatcatgtagtatttggttgtaccaaatccttttgtaaatattgttc

SEQ ID NO: 5393 - DNA, 80 bp, synthetic construct
  misc_feature 1..80: note = Synthetic: >Shrew-cand-5520-5599
  source 1..80: mol_type = other DNA
caaagcagcgaaacagaaaaagtttcttgttagtaccattgtgaatggtagtagtaaaagtttttatgttaatgccaatg

SEQ ID NO: 5394 - DNA, 80 bp, synthetic construct
  misc_feature 1..80: note = Synthetic: >Shrew-cand-5600-5679
  source 1..80: mol_type = other DNA
gtggtggtaaattctgtaacaaacacaatttttattgtaagggttgtgaaagttatggtgtcggtaacacgtttataaat

SEQ ID NO: 5395 - DNA, 80 bp, synthetic construct
  misc_feature 1..80: note = Synthetic: >Shrew-cand-5680-5759
  source 1..80: mol_type = other DNA
gaaagtgttgctgattatttatctgattatgtaaagcatcgtgtggtagccacagcacctgctttaaaggtagtagataa

SEQ ID NO: 5396 - DNA, 80 bp, synthetic construct
  misc_feature 1..80: note = Synthetic: >Shrew-cand-5760-5839
  source 1..80: mol_type = other DNA
agttgcttttgaaaatggtaaatggaagttgtatgttggtgatgaatttattagcattactgaggatttaacttctagta

SEQ ID NO: 5397 - DNA, 80 bp, synthetic construct
  misc_feature 1..80: note = Synthetic: >Shrew-cand-5840-5919
  source 1..80: mol_type = other DNA
gttataccatagagagtgttttaaagaataatcttatggctagtaatgtagtagtggtaagtgataatagtaatatgggt

SEQ ID NO: 5398 - DNA, 80 bp, synthetic construct
  misc_feature 1..80: note = Synthetic: >Shrew-cand-5920-5999
  source 1..80: mol_type = other DNA
gttgtggataatgcatgtgtgtattattcacaattgttttgtaaacctatatttgttgtagatcgacaattattgctttc

SEQ ID NO: 5399 - DNA, 80 bp, synthetic construct
  misc_feature 1..80: note = Synthetic: >Shrew-cand-6010-6089
  source 1..80: mol_type = other DNA
gattataacacagctgtatttgattctttaattaaagtttgtgctaatagttttaataaagattttacaaattgtaaaac

SEQ ID NO: 5400 - DNA, 80 bp, synthetic construct
  misc_feature 1..80: note = Synthetic: >Shrew-cand-6090-6169
  source 1..80: mol_type = other DNA
tttagaagattgtaaaaaagagttagattttagtgttaatacacaagcctttgttgatgctgtgaaaatggcacataagt

SEQ ID NO: 5401 - DNA, 80 bp, synthetic construct
  misc_feature 1..80: note = Synthetic: >Shrew-cand-6170-6249
  source 1..80: mol_type = other DNA
atgatgttctcttaacagatagaagttataataattttactataacttatgctaaaattggtgataagttaagtaaaaca

SEQ ID NO: 5402 - DNA, 80 bp, synthetic construct
  misc_feature 1..80: note = Synthetic: >Shrew-cand-6250-6329
  source 1..80: mol_type = other DNA
gatcaagctgcttgccttcgtgcaaatgttggtattattaatcataatgttgctgttaaagagaatatttctgtagtgtg

SEQ ID NO: 5403 - DNA, 80 bp, synthetic construct
  misc_feature 1..80: note = Synthetic: >Shrew-cand-6340-6419
  source 1..80: mol_type = other DNA
aactttcttcaattatccgaggaaggtaaaaaatatattgttaagacaacaaaagctaagggtgtaggtttttatatcac

SEQ ID NO: 5404 - DNA, 80 bp, synthetic construct
  misc_feature 1..80: note = Synthetic: >Shrew-cand-6420-6499
  source 1..80: mol_type = other DNA
ttttaatgatatcgaagctaacacacaggctcctgtaacaagatttcagaaaaatgctggttttgaaagtagttttagct

SEQ ID NO: 5405 - DNA, 80 bp, synthetic construct
  misc_feature 1..80: note = Synthetic: >Shrew-cand-6500-6579
  source 1..80: mol_type = other DNA
ggaatgtgttattaggattttttgttttaacatttatgagtttaatgttaggttttagttattggaatgttaatagtctt

SEQ ID NO: 5406 - DNA, 80 bp, synthetic construct
  misc_feature 1..80: note = Synthetic: >Shrew-cand-6580-6659
  source 1..80: mol_type = other DNA
agtgactttaatgtagtgggatttaagtatattgaaaatggacgtttgaaaaattttgaaggtcctgtttcttgtttgta

SEQ ID NO: 5407 - DNA, 80 bp, synthetic construct
  misc_feature 1..80: note = Synthetic: >Shrew-cand-6660-6739
  source 1..80: mol_type = other DNA
taataattttataaattttgataactggcattatactaagtttaatgcaggttttaaaaatgataaaaattgtcctatag

SEQ ID NO: 5408 - DNA, 80 bp, synthetic construct
  misc_feature 1..80: note = Synthetic: >Shrew-cand-9300-9379
  source 1..80: mol_type = other DNA
tattggtttggttacttatcatggtgtaaagatagcatttaaattgatgggtgccacttttacctataaatatttggcct

SEQ ID NO: 5409 - DNA, 80 bp, synthetic construct
  misc_feature 1..80: note = Synthetic: >Shrew-cand-9380-9459
  source 1..80: mol_type = other DNA
tgtgttatgtaagtgctggctttgttataaccatgcgctttggagttttgtattggattaataaatttacagggtttact

SEQ ID NO: 5410 - DNA, 80 bp, synthetic construct
  misc_feature 1..80: note = Synthetic: >Shrew-cand-9460-9539
  source 1..80: mol_type = other DNA
tttggtaaatatgattataaagtttcggctcgagagtttaaatatattgtagctaatggtcttaaaacacccactggtgt

SEQ ID NO: 5411 - DNA, 80 bp, synthetic construct
  misc_feature 1..80: note = Synthetic: >Shrew-cand-9540-9619
  source 1..80: mol_type = other DNA
atttgaaactcttaagttgaattataatttaataggtattggtggtaataaaaatattaaggtttcaacagttcaatcta

SEQ ID NO: 5412 - DNA, 80 bp, synthetic construct
  misc_feature 1..80: note = Synthetic: >Shrew-cand-9620-9699
  source 1..80: mol_type = other DNA
aattgactgacattaagtgttgtaatgtagtcttattaggtttgttgaataaccttggtgttagtgctaattctaaagaa

SEQ ID NO: 5413 - DNA, 80 bp, synthetic construct
  misc_feature 1..80: note = Synthetic: >Shrew-cand-9700-9779
  source 1..80: mol_type = other DNA
tggaattggtgtgttagtatgcataataaaatttgtcttagtaatgatgagagtgttgtagaaagtttattggcacttgt

SEQ ID NO: 5414 - DNA, 80 bp, synthetic construct
  misc_feature 1..80: note = Synthetic: >Shrew-cand-9780-9859
  source 1..80: mol_type = other DNA
acttttctttatgtccaaatgtaaaaatgtagatttggatgcgttgttagatgtttattttgataataatagtattttgc

SEQ ID NO: 5415 - DNA, 80 bp, synthetic construct
  misc_feature 1..80: note = Synthetic: >Shrew-cand-9860-9939
  source 1..80: mol_type = other DNA
aatctgttgcaagtacttttgctagtttgcctagttttgtagcatatgaaactgccagagaagcctatgagaaagctttg

SEQ ID NO: 5416 - DNA, 80 bp, synthetic construct
  misc_feature 1..80: note = Synthetic: >Shrew-cand-9940-10019
  source 1..80: mol_type = other DNA
aaggaagaagcaaatgctgtgttgttaaaacaattgaaaaaggctatgaatattgcaaaaagtgaacatgagcaagaggt

SEQ ID NO: 5417 - DNA, 80 bp, synthetic construct
  misc_feature 1..80: note = Synthetic: >Shrew-cand-10020-10099
  source 1..80: mol_type = other DNA
agctgtgcaacgtaaacttgaacgtttagctgaaacagctgctgctcaaatgtataaagatgttagagccagtgataaga

SEQ ID NO: 5418 - DNA, 80 bp, synthetic construct
  misc_feature 1..80: note = Synthetic: >Shrew-cand-10100-10179
  source 1..80: mol_type = other DNA
aagctaaagttatatctgctatgcattcaatgctttttagcatgttgcgtagattggatatgtctagtgttgataatgtg

SEQ ID NO: 5419 - DNA, 80 bp, synthetic construct
  misc_feature 1..80: note = Synthetic: >Shrew-cand-10180-10259
  source 1..80: mol_type = other DNA
ttaaatttagctaaagatggtgttgtacctttgagtattgtacctgttactagtgcttctcgtatgatagttgttgttcc

SEQ ID NO: 5420 - DNA, 80 bp, synthetic construct
  misc_feature 1..80: note = Synthetic: >Shrew-cand-10260-10339
  source 1..80: mol_type = other DNA
gactaaagacgttctagatagaattgtcacagataatagtgttatttatgcaggtgttgtgtggacaattatagatatta

SEQ ID NO: 5421 - DNA, 80 bp, synthetic construct
  misc_feature 1..80: note = Synthetic: >Shrew-cand-10340-10419
  source 1..80: mol_type = other DNA
aagatgttgataataaagttattaatttgaaagaagttatgattggtgatgatatagcttatccacttcatattactgta

SEQ ID NO: 5422 - DNA, 80 bp, synthetic construct
  misc_feature 1..80: note = Synthetic: >Shrew-cand-10420-10499
  source 1..80: mol_type = other DNA
gaacgttttgtaaaattacagaataatgaaattttaccaggtgtagtaaaacagagagtggttaaagctgaaggtggagg

SEQ ID NO: 5423 - DNA, 80 bp, synthetic construct
  misc_feature 1..80: note = Synthetic: >Shrew-cand-10500-10579
  source 1..80: mol_type = other DNA
ttttaatgttgaaggtaaggcactttataccaatgaacaaggcaaaggttttgtctatgcattgatagcagaaaaagatg

SEQ ID NO: 5424 - DNA, 80 bp, synthetic construct
  misc_feature 1..80: note = Synthetic: >Shrew-cand-11860-11939
  source 1..80: mol_type = other DNA
ttgtgacttcttatcttagttatatgatgcctattatgagtatgactgattgcttggcgtgtgaacgttatgtaaaaagt

SEQ ID NO: 5425 - DNA, 80 bp, synthetic construct
  misc_feature 1..80: note = Synthetic: >Shrew-cand-11940-12019
  source 1..80: mol_type = other DNA
gatatttatggtaaagattttaaaacttatgaactgttgaaatatgatttcacagattttaagttagagttattttccaa

SEQ ID NO: 5426 - DNA, 80 bp, synthetic construct
  misc_feature 1..80: note = Synthetic: >Shrew-cand-12020-12099
  source 1..80: mol_type = other DNA
atattttaaatattgggaccgtgtttatcaccctaattgtgtagagtgttttgatgatgattgtataattcattgtgcca

SEQ ID NO: 5427 - DNA, 80 bp, synthetic construct
  misc_feature 1..80: note = Synthetic: >Shrew-cand-12100-12179
  source 1..80: mol_type = other DNA
attttaatacattattttctatggtgttacctgaaacgtcttttggacctttatgtaagaaggtttatatagatggtgtt

SEQ ID NO: 5428 - DNA, 80 bp, synthetic construct
  misc_feature 1..80: note = Synthetic: >Shrew-cand-12180-12259
  source 1..80: mol_type = other DNA
tcaatgttgacaactgctggttttcattttaaacaattgggtgttgtttggaataaagatctaaagttggcaaatagtca

SEQ ID NO: 5429 - DNA, 80 bp, synthetic construct
  misc_feature 1..80: note = Synthetic: >Shrew-cand-12260-12339
  source 1..80: mol_type = other DNA
tttggaaatgacagatcttatgagatttgtttcagatccaagtttgttgataggatcttctgatgcgttattagatttta

SEQ ID NO: 5430 - DNA, 80 bp, synthetic construct
  misc_feature 1..80: note = Synthetic: >Shrew-cand-12340-12419
  source 1..80: mol_type = other DNA
gaactgattgtttttctatagcagcgttgagtactggtttgacacatcaaattgttaagccaggccattttaatcaagaa

SEQ ID NO: 5431 - DNA, 80 bp, synthetic construct
  misc_feature 1..80: note = Synthetic: >Shrew-cand-12420-12499
  source 1..80: mol_type = other DNA
ttttatgattatttagttgcgaaaggtttctttttagaaggttctatgttgactttaaaacattttttctttgttcaaaa

SEQ ID NO: 5432 - DNA, 80 bp, synthetic construct
  misc_feature 1..80: note = Synthetic: >Shrew-cand-12500-12579
  source 1..80: mol_type = other DNA
tggtcaagctgctataacagattttaattattatagatataataagtgtataatgcttgatatttgtcaggctctgtttg

SEQ ID NO: 5433 - DNA, 80 bp, synthetic construct
  misc_feature 1..80: note = Synthetic: >Shrew-cand-12580-12659
  source 1..80: mol_type = other DNA
taaaacaagtagtttttaaatattttgaatgttatgaagggggttgtcttgctgctaaagatgtcattgtgacaaattta

SEQ ID NO: 5434 - DNA, 80 bp, synthetic construct
  misc_feature 1..80: note = Synthetic: >Shrew-cand-12660-12739
  source 1..80: mol_type = other DNA
gataaatcggctggatatccattgaataagtatggtaaagctagattatattatgaaacaatgtcatatgaagaacaaga

SEQ ID NO: 5435 - DNA, 80 bp, synthetic construct
  misc_feature 1..80: note = Synthetic: >Shrew-cand-12740-12819
  source 1..80: mol_type = other DNA
tgaattatataattatacaaagcgtaatgtggttcctacaatgacgcaaatgaatcttaagtatgccattagtggtaaag

SEQ ID NO: 5436 - DNA, 80 bp, synthetic construct
  misc_feature 1..80: note = Synthetic: >Shrew-cand-12820-12899
  source 1..80: mol_type = other DNA
atcgtgctagaactgtgggtggtgttaacttagtgtctactatgacaactcgtcagtatcatcaaaaagttcttaagagt

SEQ ID NO: 5437 - DNA, 80 bp, synthetic construct
  misc_feature 1..80: note = Synthetic: >Shrew-cand-12900-12979
  source 1..80: mol_type = other DNA
attgttaatacacggggtgctacagtagttattggtactaccaaattttatggtggttgggatgatatgcttaaacgatt

SEQ ID NO: 5438 - DNA, 80 bp, synthetic construct
  misc_feature 1..80: note = Synthetic: >Shrew-cand-12980-13059
  source 1..80: mol_type = other DNA
aattcagggtgttgaaaatccctgtttgatgggatgggattatcccaaatgtgatcgtagtttgcctaatatgataagaa

SEQ ID NO: 5439 - DNA, 80 bp, synthetic construct
  misc_feature 1..80: note = Synthetic: >Shrew-cand-13060-13139
  source 1..80: mol_type = other DNA
tgattagtgctatggtgttaggttctaaacatgtgacatgttgtactcataatgaaaaattttatcgtttgtctaatgaa

SEQ ID NO: 5440 - DNA, 80 bp, synthetic construct
  misc_feature 1..80: note = Synthetic: >BtSk_AlphaCoV-cand-17250-17329
  source 1..80: mol_type = other DNA
agataaagatcttgctgttcaaataggtgtcaatggtcctgtcaaatatgagcatgttatctcttttatgggattcagat

SEQ ID NO: 5441 - DNA, 80 bp, synthetic construct
  misc_feature 1..80: note = Synthetic: >Sk512R-cand-17280-17359
  source 1..80: mol_type = other DNA
attttaaaacagataaagatcttgctgttcaaataggtgttaatggtcctgtcaaatatgagcatgttatctcttttatg

SEQ ID NO: 5442 - DNA, 80 bp, synthetic construct
  misc_feature 1..80: note = Synthetic: >AlphaSp-cand-17300-17379
  source 1..80: mol_type = other DNA
taaagatcttgctgtgcaaataggtgtcaatggtcctgttaaatatgagcatgttatctcttttatgggattcagatttg

SEQ ID NO: 5443 - DNA, 80 bp, synthetic construct
  misc_feature 1..80: note = Synthetic: >BtSk_AlphaCoV-cand-11590-11669
  source 1..80: mol_type = other DNA
agctaaggatggtgttgtgccactttctattattcctgctgttagtgctacaaagcttaacattgttgtttcagatattg

SEQ ID NO: 5444 - DNA, 80 bp, synthetic construct
  misc_feature 1..80: note = Synthetic: >Sb512-cand-11630-11709
  source 1..80: mol_type = other DNA
gtttagctaaggatggtgttgtgccactttctattattcctgctgttagtgctacaaaacttaacattgttgtttcagat

SEQ ID NO: 5445 - DNA, 80 bp, synthetic construct
  misc_feature 1..80: note = Synthetic: >AlphaSp-cand-11640-11719
  source 1..80: mol_type = other DNA
ggatggtgttgtgccactttctattatcccagctgttagtgctacaaagcttaacattgttgtttcagatattgaatcat

SEQ ID NO: 5446 - DNA, 80 bp, synthetic construct
  misc_feature 1..80: note = Synthetic: >Sk512R-cand-11620-11699
  source 1..80: mol_type = other DNA
ttagtctagctaaggacggtgttgtgccactttctattattcctgctgttagtgctacaaaacttaacattgttgtttca

SEQ ID NO: 5447 - DNA, 80 bp, synthetic construct
  misc_feature 1..80: note = Synthetic: >AlphaSp-cand-14590-14669
  source 1..80: mol_type = other DNA
ttttaacagaaatggtttactcaaacggtggcttttatgtcaaacctggtggtactacatctggtgatgctacaacagct

SEQ ID NO: 5448 - DNA, 80 bp, synthetic construct
  misc_feature 1..80: note = Synthetic: >Sb512-cand-14580-14659
  source 1..80: mol_type = other DNA
ctagcacaagttttaacagaaatggtttattcaaacggtggcttttatgtcaaacctggtggtactacatctggtgatgc

SEQ ID NO: 5449 - DNA, 80 bp, synthetic construct
  misc_feature 1..80: note = Synthetic: >BtSk_AlphaCoV-cand-14530-14609
  source 1..80: mol_type = other DNA
gaactagcacaagttttaacagaaatggtttattcgaacggtggcttttatgtcaaacctggtggtaccacatctggtga

SEQ ID NO: 5450 - DNA, 80 bp, synthetic construct
  misc_feature 1..80: note = Synthetic: >Sk512R-cand-14560-14639
  source 1..80: mol_type = other DNA
attgtgtaacgaactagcacaagttttaacagaaatggtttattcaaacggtggcttttatgtcaaacctggtggtacta

SEQ ID NO: 5451 - DNA, 80 bp, synthetic construct
  misc_feature 1..80: note = Synthetic: >Sk512R-cand-16240-16319
  source 1..80: mol_type = other DNA
aggtcctcctggtagtggtaagtctcattgcgttattggtttggggctctattttcctggtgccagaattgtttttacag

SEQ ID NO: 5452 - DNA, 80 bp, synthetic construct
  misc_feature 1..80: note = Synthetic: >BtSk_AlphaCoV-cand-16210-16289
  source 1..80: mol_type = other DNA
ggtagtggtaagtctcattgcgttattggtttggggctctattttcctggtgccagaattgtttttacagcttgttcaca

SEQ ID NO: 5453 - DNA, 80 bp, synthetic construct
  misc_feature 1..80: note = Synthetic: >BtSk_AlphaCoV-cand-12470-12549
  source 1..80: mol_type = other DNA
ccgttaggaactttggatcctatacgttttgtacttgaaaatacagtttgtaaggtttgtggttgttggcaagctaatgg

SEQ ID NO: 5454 - DNA, 80 bp, synthetic construct
  misc_feature 1..80: note = Synthetic: >Sk512R-cand-12500-12579
  source 1..80: mol_type = other DNA
tcaggtgccgttaggaactttggatcctatacgttttgtacttgaaaatacagtttgtaaggtttgtggttgttggcaag

SEQ ID NO: 5455 - DNA, 80 bp, synthetic construct
  misc_feature 1..80: note = Synthetic: >Sb512-cand-12510-12589
  source 1..80: mol_type = other DNA
ggtgccgttaggaactttggatcctatacgttttgtacttgaaaatacagtttgtaaggtttgtggctgttggcaagcta

SEQ ID NO: 5456 - DNA, 80 bp, synthetic construct
  misc_feature 1..80: note = Synthetic: >Sk512R-cand-16400-16479
  source 1..80: mol_type = other DNA
cctcaaaaggctcgcattgagtgttatgatggatttaaatccaacaacactagtgcgcagtatctattttcaactgtcaa

SEQ ID NO: 5457 - DNA, 80 bp, synthetic construct
  misc_feature 1..80: note = Synthetic: >BtSk_AlphaCoV-cand-16370-16449
  source 1..80: mol_type = other DNA
ctcgcattgagtgttatgatggatttaaatccaacaacactagtgcgcagtatctattttcaactgtcaatgcgttacca

SEQ ID NO: 5458 - DNA, 80 bp, synthetic construct
  misc_feature 1..80: note = Synthetic: >BtSk_AlphaCoV-cand-16290-16369
  source 1..80: mol_type = other DNA
tgctgctgttgattcactttgtgttaaggcagccacagcttatagctcagatagatgttctcgtattatacctcaaaagg

SEQ ID NO: 5459 - DNA, 80 bp, synthetic construct
  misc_feature 1..80: note = Synthetic: >Sk512R-cand-16320-16399
  source 1..80: mol_type = other DNA
cttgttcacatgctgctgttgattcactttgtgttaaggcagccacagcttatagctcagatagatgttctcgtattata

SEQ ID NO: 5460 - DNA, 80 bp, synthetic construct
  misc_feature 1..80: note = Synthetic: >Sb512-cand-12270-12349
  source 1..80: mol_type = other DNA
ctttgctgttgacccacctaaaacttatttagatgctgtcaagagtggccatagacctgttggtaactgtgtaaaaatgc

SEQ ID NO: 5461 - DNA, 80 bp, synthetic construct
  misc_feature 1..80: note = Synthetic: >Sk512R-cand-12260-12339
  source 1..80: mol_type = other DNA
tgcctttgctgttgacccacctaaaacttatttagatgctgtcaagagtggccatagacctgttggtaactgtataaaaa

SEQ ID NO: 5462 - DNA, 80 bp, synthetic construct
  misc_feature 1..80: note = Synthetic: >BtSk_AlphaCoV-cand-12230-12309
  source 1..80: mol_type = other DNA
gctgttgacccacctaaaacttatttagatgctgtcaagagtggccatagacctgttggtaactgtataaaaatgcttgc

SEQ ID NO: 5463 - DNA, 80 bp, synthetic construct
  misc_feature 1..80: note = Synthetic: >Sparrow-cand-25840-25919
  source 1..80: mol_type = other DNA
gtatcaactaatatagccagagagccagtcagagggcgctaccatgcaaactagggctggctactctagcacagaatcac

SEQ ID NO: 5464 - DNA, 80 bp, synthetic construct
  misc_feature 1..80: note = Synthetic: >Quail-cand-25550-25629
  source 1..80: mol_type = other DNA
tatatatagccagagagccagtcagagggcgctatcatgcaaactagggctggctactctagcacagaatcacatctcag

SEQ ID NO: 5465 - DNA, 80 bp, synthetic construct
  misc_feature 1..80: note = Synthetic: >MbCoV1-cand-24770-24849
  source 1..80: mol_type = other DNA
ctacattgacgttaataaaactttgaaggaattcgctgctaccattccaaatcgcactgaaatgcaattgacgttgaaca

SEQ ID NO: 5466 - DNA, 80 bp, synthetic construct
  misc_feature 1..80: note = Synthetic: >MsbCoV1-cand-24760-24839
  source 1..80: mol_type = other DNA
tgactacattgacgttaataaaactttgaaggaattcgctgctaccattccaaatcgcactgaaatgcaattgacgttga

SEQ ID NO: 5467 - DNA, 80 bp, synthetic construct
  misc_feature 1..80: note = Synthetic: >BatCoV1A-cand-24940-25019
  source 1..80: mol_type = other DNA
tacattgatgttaacaagacattgaaagaatttgctgctactattccaaatcgcactgaaatgcaattgacgttgaacac

SEQ ID NO: 5468 - DNA, 80 bp, synthetic construct
  misc_feature 1..80: note = Synthetic: >AcCoV_JC34-cand-13890-13969
  source 1..80: mol_type = other DNA
ctatgacacagcttaatcttaagtatgccattagtggtaaagctcgtgctcgtactgtaggtggtgtgtctttattaagc

SEQ ID NO: 5469 - DNA, 80 bp, synthetic construct
  misc_feature 1..80: note = Synthetic: >Lucheng19-cand-14240-14319
  source 1..80: mol_type = other DNA
gacacagcttaatcttaagtatgccattagtggtaaagcacgcgctcgaactgtaggtggcgtgtcactactaagcacca

SEQ ID NO: 5470 - DNA, 80 bp, synthetic construct
  misc_feature 1..80: note = Synthetic: >MrAlphaSax-cand-13800-13879
  source 1..80: mol_type = other DNA
tgcccactatgacacagcttaatcttaagtatgccattagtggtaaggaacgcgcacgtacagtaggaggtgtgtcacta

SEQ ID NO: 5471 - DNA, 80 bp, synthetic construct
  misc_feature 1..80: note = Synthetic: >BetaCoV1-cand-15070-15149
  source 1..80: mol_type = other DNA
ggtggatataaagcagttattgttttgtttagaagttgtttttaagtattttgaggtctatgatggtgggtgtatcccag

SEQ ID NO: 5472 - DNA, 80 bp, synthetic construct
  misc_feature 1..80: note = Synthetic: >HKU24-cand-14830-14909
  source 1..80: mol_type = other DNA
tggtggatataaagcagttgttgttttgtttagaagttgtttttaagtattttgaggtctatgatggtgggtgtatccca

SEQ ID NO: 5473 - DNA, 80 bp, synthetic construct
  misc_feature 1..80: note = Synthetic: >Sb512-cand-17540-17619
  source 1..80: mol_type = other DNA
ttttgttgtacggccagagggttgtgtttccactgaagtcggtgatgttattcaacccgttcgtgctcgagctccaccag

SEQ ID NO: 5474 - DNA, 80 bp, synthetic construct
  misc_feature 1..80: note = Synthetic: >BtSk_AlphaCoV-cand-17500-17579
  source 1..80: mol_type = other DNA
gtacggccagagggttgtgtttccactgaagtcggtgatgttattcaacccgttcgtgctcgagccccaccaggcgacca

SEQ ID NO: 5475 - DNA, 80 bp, synthetic construct
  misc_feature 1..80: note = Synthetic: >AlphaMink-cand-14560-14639
  source 1..80: mol_type = other DNA
tgacataagtgcttttaaatctgtactttattaccaaaacaacgtttttatgtcttctgccaagtgttgggttgaaccag

SEQ ID NO: 5476 - DNA, 80 bp, synthetic construct
  misc_feature 1..80: note = Synthetic: >Alpha2-cand-14550-14629
  source 1..80: mol_type = other DNA
gacataagtgctttcaaatctgtactttattaccaaaacaacgtttttatgtcttctgccaagtgttgggttgaaccaga

SEQ ID NO: 5477 - DNA, 80 bp, synthetic construct
  misc_feature 1..80: note = Synthetic: >SARSRC-cand-29370-29449
  source 1..80: mol_type = other DNA
ggcagatgggctatgtaaacgttttcgcaattccgtttacgatacatagtctactcttgtgcagaatgaattctcgtaac

SEQ ID NO: 5478 - DNA, 80 bp, synthetic construct
  misc_feature 1..80: note = Synthetic: >HKU5R-cand-19200-19279
  source 1..80: mol_type = other DNA
ttgaacgcaatgtcgtacgcgcagctctccttgctggcagattcgaaagagtctacgatattggcaaccctaaaggaatt

SEQ ID NO: 5479 - DNA, 80 bp, synthetic construct
  misc_feature 1..80: note = Synthetic: >BtRl_BetaCoV-cand-11080-11159
  source 1..80: mol_type = other DNA
tctcttgcaacagttgcttactttaatatggtctacatgcctgctagctgggtgatgcgtatcatgacatggctcgaatt

SEQ ID NO: 5480 - DNA, 80 bp, synthetic construct
  misc_feature 1..80: note = Synthetic: >WIV16-cand-11110-11189
  source 1..80: mol_type = other DNA
gttaccttctcttgcaacagttgcttactttaatatggtctacatgcctgctagctgggtgatgcgtattatgacatggc

SEQ ID NO: 5481 - DNA, 80 bp, synthetic construct
  misc_feature 1..80: note = Synthetic: >Sk512R-cand-4690-4769
  source 1..80: mol_type = other DNA
ttcaggaggtgaaaggtgtccaattagaaaaacctgttcctgatgtcaaggttgaaaatccttgtgaaccttttagaatt

SEQ ID NO: 5482 - DNA, 80 bp, synthetic construct
  misc_feature 1..80: note = Synthetic: >Sb512-cand-4700-4779
  source 1..80: mol_type = other DNA
aggaggtgaaaggtgtccaattagaaaaacctgttcctgatgtcaaggttgaaaatccttgtgaaccttttagaattgaa

SEQ ID NO: 5483 - DNA, 80 bp, synthetic construct
  misc_feature 1..80: note = Synthetic: >HKU23-cand-22980-23059
  source 1..80: mol_type = other DNA
gtttttgtcgaatacaaagtattatgatgatagtcaatattattttaataaagacactggtgttatttatggtctcaatt

SEQ ID NO: 5484 - DNA, 80 bp, synthetic construct
  misc_feature 1..80: note = Synthetic: >HKU14-cand-23150-23229
  source 1..80: mol_type = other DNA
tgtcgaatacaaagtattatgatgatagtcaatattattttaataaagacactggtgttatttatggtcttaattctact

SEQ ID NO: 5485 - DNA, 80 bp, synthetic construct
  misc_feature 1..80: note = Synthetic: >HKU5R-cand-28330-28409
  source 1..80: mol_type = other DNA
acgtcattaagatgtttgtattatggctactttggccagcatcaatggcactatctatattttgtgctgtctatccaatt

SEQ ID NO: 5486 - DNA, 80 bp, synthetic construct
  misc_feature 1..80: note = Synthetic: >MbCoV1-cand-27090-27169
  source 1..80: mol_type = other DNA
aattggcatttctattatctcggtactggacctcatgcagatttgaaattccgcgaacgccaagttggagttttctgggt

SEQ ID NO: 5487 - DNA, 80 bp, synthetic construct
  misc_feature 1..80: note = Synthetic: >MsbCoV1-cand-27080-27159
  source 1..80: mol_type = other DNA
tctaattggcatttctattatctcggtactggacctcatgcagatttgaaattccgcgaacgccaagttggagttttctg

SEQ ID NO: 5488 - DNA, 80 bp, synthetic construct
  misc_feature 1..80: note = Synthetic: >BetaSp-cand-22450-22529
  source 1..80: mol_type = other DNA
caattcaattgtataataccattttacatcaaacaatctgacattctcacgcctgcatacctagaattggtacagcttgg

SEQ ID NO: 5489 - DNA, 80 bp, synthetic construct
  misc_feature 1..80: note = Synthetic: >SEAC-cand-24440-24519
  source 1..80: mol_type = other DNA
aattgtctgatggtgcgtatatttacttatttactaacacaccttttgttggtatctataacgctaattttcagctgcaa

SEQ ID NO: 5490 - DNA, 80 bp, synthetic construct
  misc_feature 1..80: note = Synthetic: >HKU5R-cand-7440-7519
  source 1..80: mol_type = other DNA
ttgtacacttcaacctttaacgtgttgttactggtggtgtcatctcagtatttcttctcctacaccggagcatttgtaaa

SEQ ID NO: 5491 - DNA, 80 bp, synthetic construct
  misc_feature 1..80: note = Synthetic: >HKU5R-cand-29930-30009
  source 1..80: mol_type = other DNA
acaacaagtggatggagattcttgacgcaaatattgatgcttacaaatccttccctaaaaaggagcgaaagcaaaaacca

SEQ ID NO: 5492 - DNA, 80 bp, synthetic construct
  misc_feature 1..80: note = Synthetic: >HKU5R-cand-5600-5679
  source 1..80: mol_type = other DNA
tacacatgaggaatgctgtcagtgcggtgatgtaagaaaacgacaactcgttgaacacaacgcaccatggctgctgttgt

SEQ ID NO: 5493 - DNA, 80 bp, synthetic construct
  misc_feature 1..80: note = Synthetic: >HKU5-cand-5600-5679
  source 1..80: mol_type = other DNA
tgctacacatgaggaatgctgtcagtgcggtgatgtaagaaaacgacaactcgttgaacacaacgcaccatggctgctgt

SEQ ID NO: 5494 - DNA, 80 bp, synthetic construct
  misc_feature 1..80: note = Synthetic: >WIV16-cand-10790-10869
  source 1..80: mol_type = other DNA
ctgctgcagaatggtatgaatggtcgtactatccttggtagcactattttagaagatgagtttacaccatttgatgttgt

SEQ ID NO: 5495 - DNA, 80 bp, synthetic construct
  misc_feature 1..80: note = Synthetic: >BtRl_BetaCoV-cand-10760-10839
  source 1..80: mol_type = other DNA
agaatggtatgaatggtcgtactatccttggtagcactattttagaagatgagtttacaccatttgatgttgtcagacaa

SEQ ID NO: 5496 - DNA, 80 bp, synthetic construct
  misc_feature 1..80: note = Synthetic: >Sb512-cand-19640-19719
  source 1..80: mol_type = other DNA
acttaaatctgtagatttgagcgttgtttcaaaagttcatgaagtagttatagattgtaaagtttggcgttggatgttgt

SEQ ID NO: 5497 - DNA, 80 bp, synthetic construct
  misc_feature 1..80: note = Synthetic: >BtSk_AlphaCoV-cand-19590-19669
  source 1..80: mol_type = other DNA
catacttaaatctgtagatttgagcgttgtttcaaaagttcatgaagtagttatagattgtaaagtttggcgttggatgt

SEQ ID NO: 5498 - DNA, 80 bp, synthetic construct
  misc_feature 1..80: note = Synthetic: >WIV16-cand-24250-24329
  source 1..80: mol_type = other DNA
acaacatccactgcattgggcaagctgcaagatgtcgtcaaccagaatgctcaagcattaaacacacttgttaaacaact

SEQ ID NO: 5499 - DNA, 80 bp, synthetic construct
  misc_feature 1..80: note = Synthetic: >SARSCoV-cand-24290-24369
  source 1..80: mol_type = other DNA
atcacttacaacaacatcaactgcattgggcaagctgcaagacgttgttaaccagaatgctcaagcattaaacacacttg

SEQ ID NO: 5500 - DNA, 80 bp, synthetic construct
  misc_feature 1..80: note = Synthetic: >HKU24-cand-15300-15379
  source 1..80: mol_type = other DNA
cctaagtgcgatcgtgccatgccaaatattctcagaattctgagtagtttggttcttgcacgtaagcatgatgcatgttg

SEQ ID NO: 5501 - DNA, 80 bp, synthetic construct
  misc_feature 1..80: note = Synthetic: >Sk512R-cand-3730-3809
  source 1..80: mol_type = other DNA
gtgatgtctctgcttgtttggagtcattgttaaaagaccgtgatggcatgtctataacttgtacaatcgactgtggttgt

SEQ ID NO: 5502 - DNA, 80 bp, synthetic construct
  misc_feature 1..80: note = Synthetic: >Sb512-cand-3740-3819
  source 1..80: mol_type = other DNA
atgtctctgcttgtttggagtcattgttaaaagaccgtgatggcatgtctataacttgtacaatcgactgtggttgtggt

SEQ ID NO: 5503 - DNA, 80 bp, synthetic construct
  misc_feature 1..80: note = Synthetic: >AlphaMink-cand-28260-28339
  source 1..80: mol_type = other DNA
ccagagataatagtggtgatgttgtgtatgttaaacttttaacaactgtctctaaggtgaaaatgcttaatgtaggttgt

SEQ ID NO: 5504 - DNA, 80 bp, synthetic construct
  misc_feature 1..80: note = Synthetic: >HKU5R-cand-20480-20559
  source 1..80: mol_type = other DNA
gactttctcgctcttgatagcgatgtttttatcaagaagtataaactagaagattatgcttttgagcatgtggtatacgg

SEQ ID NO: 5505 - DNA, 80 bp, synthetic construct
  misc_feature 1..80: note = Synthetic: >AlphaMink-cand-24820-24899
  source 1..80: mol_type = other DNA
tagctctatctctgtttaagattgctactatttgtttcatatcgccactccttataggtttaggtctatatgttgatggt

SEQ ID NO: 5506 - DNA, 80 bp, synthetic construct
  misc_feature 1..80: note = Synthetic: >Alpha2-cand-24810-24889
  source 1..80: mol_type = other DNA
gtagctctttccctttttaaggttgctactatttgtttcatatcgccactccttataggtttaggtctatatgttgatgg

SEQ ID NO: 5507 - DNA, 80 bp, synthetic construct
  misc_feature 1..80: note = Synthetic: >HKU4-cand-1490-1569
  source 1..80: mol_type = other DNA
cttgtgttgaagttggtggaaagtctttcactttaacctttggtggcgttgtttatgcttacatgggttgttgtgatggt

SEQ ID NO: 5508 - DNA, 80 bp, synthetic construct
  misc_feature 1..80: note = Synthetic: >HKU4R-cand-1480-1559
  source 1..80: mol_type = other DNA
agcttgtgttgaagttggtggaaagtctttcactttaacctttggtggcgttgtttatgcttacatgggttgctgtgatg

SEQ ID NO: 5509 - DNA, 80 bp, synthetic construct
  misc_feature 1..80: note = Synthetic: >BetaSp-cand-24540-24619
  source 1..80: mol_type = other DNA
ggactatagttcttggtacttcctttgtgaatactacttatactatagttatagagccgtccacacagatcattaatggt

SEQ ID NO: 5510 - DNA, 80 bp, synthetic construct
  misc_feature 1..80: note = Synthetic: >BetaCoV1-cand-24430-24509
  source 1..80: mol_type = other DNA
tagttcttggtacttcctttgtgaatactacttatactatagttatagagccgtccacacagatcattaatggtaagcta

SEQ ID NO: 5511 - DNA, 80 bp, synthetic construct
  misc_feature 1..80: note = Synthetic: >HKU8R-cand-12890-12969
  source 1..80: mol_type = other DNA
gcagtcacttgacaacaattatttaaacgagtgcggggctctagtgcagctcgactagagccctgtaatggtactgaacc

SEQ ID NO: 5512 - DNA, 80 bp, synthetic construct
  misc_feature 1..80: note = Synthetic: >HKU5R-cand-23680-23759
  source 1..80: mol_type = other DNA
ataatggtaattactattgtgtcagaccttgtgtcagtgtgcctgtctctgtgatctatgacaaggtatctaattctcat

SEQ ID NO: 5513 - DNA, 80 bp, synthetic construct
  misc_feature 1..80: note = Synthetic: >MsbCoV1-cand-26280-26359
  source 1..80: mol_type = other DNA
accattttgtatggtttgaaaatgcttgtgctttggctcctttggcctcttgtacttgcactctcaattttcgatgcatg

SEQ ID NO: 5514 - DNA, 80 bp, synthetic construct
  misc_feature 1..80: note = Synthetic: >MbCoV1-cand-26290-26369
  source 1..80: mol_type = other DNA
attttgtatggtttgaaaatgcttgtgctttggcttctttggcctcttgtacttgcactctcaattttcgatgcatggtc

SEQ ID NO: 5515 - DNA, 80 bp, synthetic construct
  misc_feature 1..80: note = Synthetic: >BetaSp-cand-21650-21729
  source 1..80: mol_type = other DNA
ttgctttttggacggttttttgtgcaaatgcaaatgcctcttcaagtgaaggatttttagttggcattaattatttgggt

SEQ ID NO: 5516 - DNA, 80 bp, synthetic construct
  misc_feature 1..80: note = Synthetic: >BtSk_AlphaCoV-cand-25110-25189
  source 1..80: mol_type = other DNA
ttttacatggtcatgccaattattataatggcaggccctatgtaatgcttgaaggtggaagccattacgtcacattgggt

SEQ ID NO: 5517 - DNA, 80 bp, synthetic construct
  misc_feature 1..80: note = Synthetic: >SEAC-cand-25320-25399
  source 1..80: mol_type = other DNA
tcgtgcggggcgttcccttaatgcaagcaccaacactggttgggctttttatgtcagaagtaagcatggtgactattctg

SEQ ID NO: 5518 - DNA, 80 bp, synthetic construct
  misc_feature 1..80: note = Synthetic: >HghCoV1-cand-200-279
  source 1..80: mol_type = other DNA
ctgttccgtcaggtgcgtgacaatccggggctcatcatgtcttccgcgactggtgagggttctcaaggtgcgagggccac

SEQ ID NO: 5519 - DNA, 80 bp, synthetic construct
  misc_feature 1..80: note = Synthetic: >AlphaCoV1-cand-9050-9129
  source 1..80: mol_type = other DNA
atagacatgcgttcatatgaaacacttgttaattctacatctatagatagaattaagtcatatgctaacagctttaacaa

SEQ ID NO: 5520 - DNA, 80 bp, synthetic construct
  misc_feature 1..80: note = Synthetic: >BM48_31-cand-6270-6349
  source 1..80: mol_type = other DNA
atagagtgtgacgtgaaaactaccgaagttgtaggcaatgtcatactaaaaccatcagcagatggcattaaagttacatc

SEQ ID NO: 5521 - DNA, 80 bp, synthetic construct
  misc_feature 1..80: note = Synthetic: >SARSCoV-cand-6380-6459
  source 1..80: mol_type = other DNA
gtcatagagtgtgacgtgaaaactaccgaagttgtaggcaatgtcatacttaaaccatcagatgaaggtgttaaagtaac

SEQ ID NO: 5522 - DNA, 80 bp, synthetic construct
  misc_feature 1..80: note = Synthetic: >HKU15-cand-13610-13689
  source 1..80: mol_type = other DNA
caatagattctaccagcatctccaaagttactttggacttatgatattgtctgatgatggtgtcgcatgcatagactcag

SEQ ID NO: 5523 - DNA, 80 bp, synthetic construct
  misc_feature 1..80: note = Synthetic: >HKU4R-cand-4680-4759
  source 1..80: mol_type = other DNA
atttagttagcggtgacctcattgttaaggatgtgtgttataagaagttattgcattggtcaggtcaaaccatttgctat

SEQ ID NO: 5524 - DNA, 80 bp, synthetic construct
  misc_feature 1..80: note = Synthetic: >HKU4-cand-4690-4769
  source 1..80: mol_type = other DNA
ttagttagcggtgacctcattgttaaggatgtgtgttataaaaagttattgcattggtcaggtcaaaccatttgctatgc

SEQ ID NO: 5525 - DNA, 80 bp, synthetic construct
  misc_feature 1..80: note = Synthetic: >BetaCoV1-cand-9260-9339
  source 1..80: mol_type = other DNA
gatttctatagtagcggttgcgtcttgtcgtcagcatgcacaatgtttgcttctgacaatggtgcatcacaggcttattg

SEQ ID NO: 5526 - DNA, 80 bp, synthetic construct
  misc_feature 1..80: note = Synthetic: >Quail-cand-16660-16739
  source 1..80: mol_type = other DNA
ttctcgggacggctctccactaaccacgacgcggtgtgcacataccacgctaatgcccatgtagcatcggctgatgctat

SEQ ID NO: 5527 - DNA, 80 bp, synthetic construct
  misc_feature 1..80: note = Synthetic: >HKU8-cand-15110-15189
  source 1..80: mol_type = other DNA
gggttgggattaccctaaatgtgatcgtgcattgcctaatatgattcgtatgatttctgctatgattttgggttctaagc

SEQ ID NO: 5528 - DNA, 80 bp, synthetic construct
  misc_feature 1..80: note = Synthetic: >SEAC-cand-3410-3489
  source 1..80: mol_type = other DNA
ttagtccatttggttttgacacaaatgagattaatggacggcgtgtgcttgtacagtctaacaacaactgttgggttaat

SEQ ID NO: 5529 - DNA, 80 bp, synthetic construct
  misc_feature 1..80: note = Synthetic: >HKU2R-cand-3250-3329
  source 1..80: mol_type = other DNA
ccatttggttttgacacaaatgagattaatggacggcgtgtgcttgtacaatctaacaacaactgttgggttaatgctgc

SEQ ID NO: 5530 - DNA, 80 bp, synthetic construct
  misc_feature 1..80: note = Synthetic: >BetaSp-cand-20930-21009
  source 1..80: mol_type = other DNA
ctgttattgatttgttgttagatgattttgtggctcttgttaagtcactcgatctgaattgtgttagcaaggtagttaat

SEQ ID NO: 5531 - DNA, 80 bp, synthetic construct
  misc_feature 1..80: note = Synthetic: >HKU23-cand-21060-21139
  source 1..80: mol_type = other DNA
tgattcgcgacaagttagctctgggtggcagtgttgctataaaaataacagagttttcttggaatgcagaattatataag

SEQ ID NO: 5532 - DNA, 80 bp, synthetic construct
  misc_feature 1..80: note = Synthetic: >WIV16-cand-19750-19829
  source 1..80: mol_type = other DNA
attaagatactcaataatttgggtgtcgatatcgctgctaatactgtaatctgggattacaagagagaagcaccagcaca

SEQ ID NO: 5533 - DNA, 80 bp, synthetic construct
  misc_feature 1..80: note = Synthetic: >BtRl_BetaCoV-cand-19710-19789
  source 1..80: mol_type = other DNA
gagattaagatactcaataatttgggtgtcgatatcgctgccaacacagttatctgggactacaagagagaagctccagc

SEQ ID NO: 5534 - DNA, 80 bp, synthetic construct
  misc_feature 1..80: note = Synthetic: >Delta-cand-13910-13989
  source 1..80: mol_type = other DNA
tccagacagtgggtgtacacttgaaagaactcggtatagtccttaaccaggacgttaccacacacatggcaaatattaat

SEQ ID NO: 5535 - DNA, 80 bp, synthetic construct
  misc_feature 1..80: note = Synthetic: >HKU15-cand-12410-12489
  source 1..80: mol_type = other DNA
tgtggtccagacagtgggtgtacacttgaaagaactcggtatagtccttaaccaggacgttaccacacacatggcaaata

SEQ ID NO: 5536 - DNA, 80 bp, synthetic construct
  misc_feature 1..80: note = Synthetic: >BetaSp-cand-27500-27579
  source 1..80: mol_type = other DNA
attaattaatggcagacttactgctcttaatgcctatgtgtcgcaacaacttagcgacataacgcttgttaagttcagtg

SEQ ID NO: 5537 - DNA, 80 bp, synthetic construct
  misc_feature 1..80: note = Synthetic: >AlphaMink-cand-17520-17599
  source 1..80: mol_type = other DNA
tgtacaatccttattgtattgacattcagcagtggggttacacaggttctcttagtatgaatcaccatgaggtgtgtaat

SEQ ID NO: 5538 - DNA, 80 bp, synthetic construct
  misc_feature 1..80: note = Synthetic: >Alpha2-cand-17510-17589
  source 1..80: mol_type = other DNA
gtacaatccttattgtattgacattcagcagtggggttacacaggttctcttagtatgaatcatcatgaggtgtgtaatg

SEQ ID NO: 5539 - DNA, 80 bp, synthetic construct
  misc_feature 1..80: note = Synthetic: >BtRl_BetaCoV-cand-560-639
  source 1..80: mol_type = other DNA
taactttgggagtcctcgtgccacatgtgggcgaaaccccaatcgcataccgcaatgttcttcttcgtaagaacggtaat

SEQ ID NO: 5540 - DNA, 80 bp, synthetic construct
  misc_feature 1..80: note = Synthetic: >Sk512R-cand-10100-10179
  source 1..80: mol_type = other DNA
gcttgcatctatacaaaagttgcatggcaattttggtggtaagagcattctgggttgcacttcattgaatgatgaattta

SEQ ID NO: 5541 - DNA, 80 bp, synthetic construct
  misc_feature 1..80: note = Synthetic: >HKU5R-cand-21600-21679
  source 1..80: mol_type = other DNA
tgagtacttactcactcttcgatctctcacgctttcctctcaaactaaaaggaacaccagttcttcaattaaaagagagc

SEQ ID NO: 5542 - DNA, 80 bp, synthetic construct
  misc_feature 1..80: note = Synthetic: >HKU15-cand-14020-14099
  source 1..80: mol_type = other DNA
tcttttatttgttactagactacatacgtgttcttgctcaggagttacaggacggtatccttgatgctttccaatcactc

SEQ ID NO: 5543 - DNA, 80 bp, synthetic construct
  misc_feature 1..80: note = Synthetic: >Delta-cand-15520-15599
  source 1..80: mol_type = other DNA
ttttatttgttactagactacatacgtgttcttgctcaggagttacaggacggtatccttgatgctttccaatcactcac

SEQ ID NO: 5544 - DNA, 80 bp, synthetic construct
  misc_feature 1..80: note = Synthetic: >WIV16-cand-13630-13709
  source 1..80: mol_type = other DNA
ttggttaaagattgtccagcggttgctgttcatgactttttcaagtttagagtagatggtgacatggtaccacatatatc

SEQ ID NO: 5545 - DNA, 80 bp, synthetic construct
  misc_feature 1..80: note = Synthetic: >SARSCoV-cand-13640-13719
  source 1..80: mol_type = other DNA
tggttaaagattgtccagcggttgctgtccatgactttttcaagtttagagtagatggtgacatggtaccacatatatca

SEQ ID NO: 5546 - DNA, 80 bp, synthetic construct
  misc_feature 1..80: note = Synthetic: >BetaSp-cand-26380-26459
  source 1..80: mol_type = other DNA
tagtatttctatgtcacgctcagtcacttaggtactttgatagttaccttggctgtgtggttaatgccgatgacgatatc

SEQ ID NO: 5547 - DNA, 80 bp, synthetic construct
  misc_feature 1..80: note = Synthetic: >BetaCoV1-cand-26270-26349
  source 1..80: mol_type = other DNA
ttctatgtcacgctcagtcacttaggtactttgatagttaccttggctgtgtggttaatgccgatgacgatatcgcccaa

SEQ ID NO: 5548 - DNA, 80 bp, synthetic construct
  misc_feature 1..80: note = Synthetic: >HKU5R-cand-27450-27529
  source 1..80: mol_type = other DNA
ttggcatatgccttatggtatattgcataatattaatggcgatctggactatcgacagagttcgattttgtctcttgatc

SEQ ID NO: 5549 - DNA, 80 bp, synthetic construct
  misc_feature 1..80: note = Synthetic: >MinkCoV1-cand-1200-1279
  source 1..80: mol_type = other DNA
gtggcgtgtcatggctacgtatgccaatgacgttgttgctacaacaaccttcgacaagtgtaaattagcactgcttgatc

SEQ ID NO: 5550 - DNA, 80 bp, synthetic construct
  misc_feature 1..80: note = Synthetic: >AlphaMink-cand-1200-1279
  source 1..80: mol_type = other DNA
gtgtggcgtgtcatggctacgtatgccaatgacgttgttgccacatcaacctttgacaagtgtaaattggcacttcttga

SEQ ID NO: 5551 - DNA, 80 bp, synthetic construct
  misc_feature 1..80: note = Synthetic: >Lucheng19-cand-15120-15199
  source 1..80: mol_type = other DNA
gatcctagccgcattttaagtgctggtgtttttgttgatgatattattaaaacagatggcgttgttttacttgaacgcta

SEQ ID NO: 5552 - DNA, 80 bp, synthetic construct
  misc_feature 1..80: note = Synthetic: >AcCoV_JC34-cand-14770-14849
  source 1..80: mol_type = other DNA
tcctgatcctagccgtattttaagtgctggtgtttttgttgatgatattattaaaacagatggcgttgttttacttgaac

SEQ ID NO: 5553 - DNA, 80 bp, synthetic construct
  misc_feature 1..80: note = Synthetic: >Lucheng19-cand-12160-12239
  source 1..80: mol_type = other DNA
ttgtattttgttaaaaatttgaatactttgagacgtggtgctgttttagggtttataggagccaccgtaagattgcaagc

SEQ ID NO: 5554 - DNA, 80 bp, synthetic construct
  misc_feature 1..80: note = Synthetic: >Sk512R-cand-13210-13289
  source 1..80: mol_type = other DNA
tacacttgataatcaggatcttaatggtgacttttatgattttggagactttgtgactagtgttaagggtatgggagtgc

SEQ ID NO: 5555 - DNA, 80 bp, synthetic construct
  misc_feature 1..80: note = Synthetic: >Sb512-cand-13220-13299
  source 1..80: mol_type = other DNA
gcttgataatcaggatctcaatggtgacttttatgattttggagactttgtgactagtgttaagggtatgggagtgccta

SEQ ID NO: 5556 - DNA, 80 bp, synthetic construct
  misc_feature 1..80: note = Synthetic: >HghCoV1-cand-19570-19649
  source 1..80: mol_type = other DNA
tgtaatttaggtggtgctgtttgtagaaaacatgctatagagtatagagagtatgttgaggcatataatctagtatctgc

SEQ ID NO: 5557 - DNA, 80 bp, synthetic construct
  misc_feature 1..80: note = Synthetic: >HKU31-cand-19640-19719
  source 1..80: mol_type = other DNA
gtaatttaggtggtgctgtttgtagaaaacatgctatagagtatagagagtatgttgaggcatataatctagtatctgca

SEQ ID NO: 5558 - DNA, 80 bp, synthetic construct
  misc_feature 1..80: note = Synthetic: >HghCoV1-cand-2120-2199
  source 1..80: mol_type = other DNA
gcatcaatgtattttgcatcggttgttattagagaaaaagttaacacgatgtttaatgcattacccttgtctgttcaaac

SEQ ID NO: 5559 - DNA, 80 bp, synthetic construct
  misc_feature 1..80: note = Synthetic: >MsbCoV1-cand-25480-25559
  source 1..80: mol_type = other DNA
gcagctgtccttattggtagaatgtgtcagacactttattattcataccgttataagaatccttcctttgttattcttaa

SEQ ID NO: 5560 - DNA, 80 bp, synthetic construct
  misc_feature 1..80: note = Synthetic: >MbCoV1-cand-25490-25569
  source 1..80: mol_type = other DNA
gctgtccttattggtagaatgtgtcagacactttattattcataccgttataagaatccttcctttgttattcttaatac

SEQ ID NO: 5561 - DNA, 80 bp, synthetic construct
  misc_feature 1..80: note = Synthetic: >Delta-cand-2480-2559
  source 1..80: mol_type = other DNA
tggcactccagcaaaccgacactaagcctactagagctctagaggctgttgatgtcgttgttggtaatactgtactgcaa

SEQ ID NO: 5562 - DNA, 80 bp, synthetic construct
  misc_feature 1..80: note = Synthetic: >BetaSp-cand-19570-19649
  source 1..80: mol_type = other DNA
gcagtagtatgtcggtttgacacaagagtgttaagcaagttaaatctccctggctgtaatggtggtagtctgtatgttaa

SEQ ID NO: 5563 - DNA, 80 bp, synthetic construct
  misc_feature 1..80: note = Synthetic: >BetaSp-cand-16050-16129
  source 1..80: mol_type = other DNA
gcattttagtatgatgattttgagtgatgatggcgttgtgtgttataattctgattatgcgtccaaaggttatattgcta

SEQ ID NO: 5564 - DNA, 80 bp, synthetic construct
  misc_feature 1..80: note = Synthetic: >HKU8R-cand-5840-5919
  source 1..80: mol_type = other DNA
tgttgagtttttgtctaagggtgttacagccatgtggaatgagtttttaacaggtgatgttgctcgtttcgttcactggc

SEQ ID NO: 5565 - DNA, 80 bp, synthetic construct
  misc_feature 1..80: note = Synthetic: >MN548285-cand-320-399
  source 1..80: mol_type = other DNA
gcgcttcagacgtaccggttctgttgcgtgaaatacggggtcacctccccccacatacctctaagggcttttgagcctag

SEQ ID NO: 5566 - DNA, 80 bp, synthetic construct
  misc_feature 1..80: note = Synthetic: >FN430415-cand-6410-6489
  source 1..80: mol_type = other DNA
gatgattatggtcatcaaaatacatttatgtctcccgaagttgctggtgagctttctgaaaagcttaaacgccatgttaa

SEQ ID NO: 5567 - DNA, 80 bp, synthetic construct
  misc_feature 1..80: note = Synthetic: >MN509589-cand-6490-6569
  source 1..80: mol_type = other DNA
gatgtatatggtcaccaaaacacatttatgtctcctgaagttgctggcgagctttctgaaaagcttaaacgccatgttaa

SEQ ID NO: 5568 - DNA, 80 bp, synthetic construct
  misc_feature 1..80: note = Synthetic: >MN531555-cand-2240-2319
  source 1..80: mol_type = other DNA
gcagaattcacggagacttgctcttctggagaggaggtgtacacaagattgttcaagatggcgatgaaatttggtttgac

SEQ ID NO: 5569 - DNA, 80 bp, synthetic construct
  misc_feature 1..80: note = Synthetic: >MK957244-cand-2240-2319
  source 1..80: mol_type = other DNA
gtagaatccatggagacttgttcttctggaagggtggtgtgcacaaaattgttcaagatggcgatgaaatttggtttgac

SEQ ID NO: 5570 - DNA, 80 bp, synthetic construct
  misc_feature 1..80: note = Synthetic: >MT040335-cand-25460-25539
  source 1..80: mol_type = other DNA
aagcctcactccctttcggatggcttattgttggcgttgcacttcttgctgtttttcagagcgcttccaaaataattaca

SEQ ID NO: 5571 - DNA, 80 bp, synthetic construct
  misc_feature 1..80: note = Synthetic: >KU556804-cand-240-319
  source 1..80: mol_type = other DNA
gcgccgtggtcggttcgagtgggaagaacctctggttcatctagcggtacgcgggtgtgtggaagtagcgcttcaggcgt

SEQ ID NO: 5572 - DNA, 80 bp, synthetic construct
  misc_feature 1..80: note = Synthetic: >M95169-cand-17530-17609
  source 1..80: mol_type = other DNA
aaggaacaagtttgttcttgtggttctagagctacaacttttaattctcatactcaagcttatgcttgttggaagcattg

SEQ ID NO: 5573 - DNA, 80 bp, synthetic construct
  misc_feature 1..80: note = Synthetic: >LC061272-cand-1920-1999
  source 1..80: mol_type = other DNA
tgttcagatggctttatgccttttttagtagatgatttaatacctcgttcatattatttgattaaaagtggccaggcctt

SEQ ID NO: 5574 - DNA, 80 bp, synthetic construct
  misc_feature 1..80: note = Synthetic: >AY692454-cand-800-879
  source 1..80: mol_type = other DNA
aagttggcagatttagaagacatctttggtgtctcttctttagcgcggaagtaccgtgaattgttgaaaacagcgtgtca

SEQ ID NO: 5575 - DNA, 80 bp, synthetic construct
  misc_feature 1..80: note = Synthetic: >AJ311317-cand-13610-13689
  source 1..80: mol_type = other DNA
ctggtatgtttaaggagggttcgtctataccacttaaacattttttctatcctcaaactggtaatgctgctataaacgat

SEQ ID NO: 5576 - DNA, 80 bp, synthetic construct
  misc_feature 1..80: note = Synthetic: >AY692454-cand-9360-9439
  source 1..80: mol_type = other DNA
atgcattgcacactggaactgacctaatgggtgaattctatggtggttatgttgatgaagaggttgcacaaagagtgcca

SEQ ID NO: 5577 - DNA, 80 bp, synthetic construct
  misc_feature 1..80: note = Synthetic: >MG693169-cand-1790-1869
  source 1..80: mol_type = other DNA
gtcaaggtcaattttgactattggcagcagttaaccactgttaacattcccttaagagctttccttgttcttgatgccat

SEQ ID NO: 5578 - DNA, 80 bp, synthetic construct
  misc_feature 1..80: note = Synthetic: >LC061272-cand-2400-2479
  source 1..80: mol_type = other DNA
tcaggtagcaatgtctatgaacttgagcgtggtttgttagattcatcgcacttaccatcgagtgtttatgatttgaccat

SEQ ID NO: 5579 - DNA, 80 bp, synthetic construct
  misc_feature 1..80: note = Synthetic: >AY692454-cand-7680-7759
  source 1..80: mol_type = other DNA
atggtgttatgtttatacatatgacacagactgagagaaaaccgtggtacattcctacttggtttaatagggaaattgtc

SEQ ID NO: 5580 - DNA, 80 bp, synthetic construct
  misc_feature 1..80: note = Synthetic: >SBB-797-cand-6560-6639
  source 1..80: mol_type = other DNA
gtatgtctggtatggatggttttaactatcctgctttgcgtatgcaacaacaacgatatggtagtccttatgactacaca

SEQ ID NO: 5581 - DNA, 80 bp, synthetic construct
  misc_feature 1..80: note = Synthetic: >SBB-726-cand-6570-6649
  source 1..80: mol_type = other DNA
tatggatgggtttaactatcctgctttgcgtatgcaacaacaacgatatggtagtccttatgactacacatatatactta

SEQ ID NO: 5582 - DNA, 80 bp, synthetic construct
  misc_feature 1..80: note = Synthetic: >SBB-041-cand-17550-17629
  source 1..80: mol_type = other DNA
gagatattttgttaagataggtccaatacggcattgtcactgtggcaaagaggctacttgttacaacagtgttactcatg

SEQ ID NO: 5583 - DNA, 80 bp, synthetic construct
  misc_feature 1..80: note = Synthetic: >SBB-053-cand-18030-18109
  source 1..80: mol_type = other DNA
ttccaacgtcaagatgtttgagtatgattatataacacatggtcagttagatgggttatgcctattttggaattgcaatg

SEQ ID NO: 5584 - DNA, 80 bp, synthetic construct
  misc_feature 1..80: note = Synthetic: >SBB-120-cand-18030-18109
  source 1..80: mol_type = other DNA
ttccaacgtcaagatgtttgagtacgattatataacacatggtcagttagatgggttgtgcctattttggaattgcaatg

SEQ ID NO: 5585 - DNA, 80 bp, synthetic construct
  misc_feature 1..80: note = Synthetic: >SBB-797-cand-2320-2399
  source 1..80: mol_type = other DNA
gatggtgagtatgatgcgcctgtgaccttaacagacttagagctggaagagtctacaggcgttttagaggaagtgtttgg

SEQ ID NO: 5586 - DNA, 80 bp, synthetic construct
  misc_feature 1..80: note = Synthetic: >SBB-747-cand-2310-2389
  source 1..80: mol_type = other DNA
cgaggtgttagatggtgagtatgatgcgcctgtgaccttaacagacttagagctggaagagtctacaggcgttttagagg

SEQ ID NO: 5587 - DNA, 80 bp, synthetic construct
  misc_feature 1..80: note = Synthetic: >SBB-747-cand-13350-13429
  source 1..80: mol_type = other DNA
ccggacatcatacgtgtttaccataagttgggtgaaaccgttcgtaaagctgtattgtcagctgtagagatggctgacgc

SEQ ID NO: 5588 - DNA, 80 bp, synthetic construct
  misc_feature 1..80: note = Synthetic: >SBB-010-cand-26160-26239
  source 1..80: mol_type = other DNA
gaagaaatccacttctggttcaaacacaccacgtgctaaatcacctgcacgcagtcctcaaagccagcgcaagcagcttg

SEQ ID NO: 5589 - DNA, 80 bp, synthetic construct
  misc_feature 1..80: note = Synthetic: >SBB-041-cand-26150-26229
  source 1..80: mol_type = other DNA
agaagaaatccacttctggttcaaacacaccacgtgcaaaatcacctgcacgcagtcctcaaagccagcgcaagcagctt

SEQ ID NO: 5590 - DNA, 80 bp, synthetic construct
  misc_feature 1..80: note = Synthetic: >SBB-788-cand-15040-15119
  source 1..80: mol_type = other DNA
atcgcagtaatactgtagactatgagttagttttagattattataactacttgcgtaagcattttagtatgatgatcctt

SEQ ID NO: 5591 - DNA, 80 bp, synthetic construct
  misc_feature 1..80: note = Synthetic: >SBB-747-cand-15030-15109
  source 1..80: mol_type = other DNA
ttgggtatatatcgcagtaatactgtagattatgagttagttttggattactataactacttgcgtaagcattttagtat

SEQ ID NO: 5592 - DNA, 80 bp, synthetic construct
  misc_feature 1..80: note = Synthetic: >PRD-0038-cand-0-79
  source 1..80: mol_type = other DNA
aaggatttatccttcccaggacatcctaccaaccccgatctcttgtagatctgttctctaaacgaactttaaaatctgtg

SEQ ID NO: 5593 - DNA, 80 bp, synthetic construct
  misc_feature 1..80: note = Synthetic: >SBB-747-cand-17840-17919
  source 1..80: mol_type = other DNA
attagctaacgtggtgtctaaggcaccgcctggtgatcagtttaaacatttgataccacttatgcgtaagggcgagccct

SEQ ID NO: 5594 - DNA, 80 bp, synthetic construct
  misc_feature 1..80: note = Synthetic: >SBB-130-cand-8100-8179
  source 1..80: mol_type = other DNA
aagggttgggtggtttggtcacatactgttacaagaaaggccttgttgaaggtgctaagttgtacacagaactacaacca

SEQ ID NO: 5595 - DNA, 80 bp, synthetic construct
  misc_feature 1..80: note = Synthetic: >SBB-041-cand-8110-8189
  source 1..80: mol_type = other DNA
gggcggtttagtcacgtactgttataagaaaggccttgttgaaggtgctaagttgtacacagaactacaaccacatcatt

SEQ ID NO: 5596 - DNA, 80 bp, synthetic construct
  misc_feature 1..80: note = Synthetic: >SBB-726-cand-23840-23919
  source 1..80: mol_type = other DNA
atgagattttcagtcggttagatggtttagaagccaacgcgcaggtagacagactcattaatgggcgcatggttgtactt

SEQ ID NO: 5597 - DNA, 80 bp, synthetic construct
  misc_feature 1..80: note = Synthetic: >SBB-747-cand-23820-23899
  source 1..80: mol_type = other DNA
tattaatgaaattttcagtcggttggatggtctagaggccaacgctcaagtagacagactcattaatgggcgcatggttg

SEQ ID NO: 5598 - DNA, 80 bp, synthetic construct
  misc_feature 1..80: note = Synthetic: >PDF-2370-cand-18960-19039
  source 1..80: mol_type = other DNA
tgacaaagcttataagattgaggaattagtctattcttatggcacatgtcatgataaattcactgatggtgtttgtttgt

SEQ ID NO: 5599 - DNA, 80 bp, synthetic construct
  misc_feature 1..80: note = Synthetic: >PRD-0038-cand-16310-16389
  source 1..80: mol_type = other DNA
acaaaccgcccattagcttcccattgtgtgctaatggacaggtttttggtctttataaaaacacatgcgtgggtagtgat

SEQ ID NO: 5600 - DNA, 80 bp, synthetic construct
  misc_feature 1..80: note = Synthetic: >PDF-2386-cand-16320-16399
  source 1..80: mol_type = other DNA
cattagcttcccattgtgtgctaatggacaggtttttggtctttataaaaacacatgcgtgggtagtgataatgtaacag

SEQ ID NO: 5601 - DNA, 80 bp, synthetic construct
  misc_feature 1..80: note = Synthetic: >PDF-2386-cand-19120-19199
  source 1..80: mol_type = other DNA
ttaccaggttgtgatggtggtagtttgtatgtaaacaaacatgcattccacacaccagcatttgacaaaagtgcatttgt

SEQ ID NO: 5602 - DNA, 80 bp, synthetic construct
  misc_feature 1..80: note = Synthetic: >PRD-0038-cand-19110-19189
  source 1..80: mol_type = other DNA
taatctaaatttatcaggttgtgatggtggtagtttgtatgtaaacaagcatgcattccacacaccagcatttgacaaaa

SEQ ID NO: 5603 - DNA, 80 bp, synthetic construct
  misc_feature 1..80: note = Synthetic: >SBB-788-cand-20410-20489
  source 1..80: mol_type = other DNA
acaaatgggatcttattgtaagtgatatgtacgacgcacgtactaagaatgttagtggtgaaaatatatctaaagaggga

SEQ ID NO: 5604 - DNA, 80 bp, synthetic construct
  misc_feature 1..80: note = Synthetic: >SBB-041-cand-8270-8349
  source 1..80: mol_type = other DNA
caagctacaacatattgcaaggttggtcattgtgttgagtctaaggcaggtgtttgctttggttttaacagatttcttgt

SEQ ID NO: 5605 - DNA, 80 bp, synthetic construct
  misc_feature 1..80: note = Synthetic: >SBB-130-cand-8260-8339
  source 1..80: mol_type = other DNA
tcgtacacaagctacaacatattgcaaggttggtcattgtgttgagtctaaggcaggtgtttgctttggttttaacagat

SEQ ID NO: 5606 - DNA, 80 bp, synthetic construct
  misc_feature 1..80: note = Synthetic: >PRD-0038-cand-15270-15349
  source 1..80: mol_type = other DNA
acaagtcctcagtgaaatggtcatgtgtggcggttcactctatgttaagcctggtggcacctcatctggagatgccacta

SEQ ID NO: 5607 - DNA, 80 bp, synthetic construct
  misc_feature 1..80: note = Synthetic: >PDF-2386-cand-15280-15359
  source 1..80: mol_type = other DNA
agtgaaatggtcatgtgtggcggttcactctatgttaagcctggtggcacctcatctggagatgccactactgcttatgc

SEQ ID NO: 5608 - DNA, 80 bp, synthetic construct
  misc_feature 1..80: note = Synthetic: >GCS-211-cand-22860-22939
  source 1..80: mol_type = other DNA
agaacatttctagtgatgaagtttactctattagaccttgtgcatatactgaacaacttgctgtgattggtgacaaactt

SEQ ID NO: 5609 - DNA, 80 bp, synthetic construct
  misc_feature 1..80: note = Synthetic: >GCS-227-cand-22850-22929
  source 1..80: mol_type = other DNA
gggttttaagaacatttctagtgatgaagtttactctattagaccttgtgcatatactgaacaacttgctgtgattggtg

SEQ ID NO: 5610 - DNA, 80 bp, synthetic construct
  misc_feature 1..80: note = Synthetic: >GCS-211-cand-6730-6809
  source 1..80: mol_type = other DNA
aagttttgtgctaacaatcctatgtgtcagttgtgtctgcatgggtttgatgaattgtctaactacggtcaattggctgt

SEQ ID NO: 5611 - DNA, 80 bp, synthetic construct
  misc_feature 1..80: note = Synthetic: >GCS-227-cand-6730-6809
  source 1..80: mol_type = other DNA
gttttgtgctaacaatcatatgtgtcagttgtgtctgcatgggtttgatgaattgtctaactacggtcaattggctgtca

SEQ ID NO: 5612 - DNA, 80 bp, synthetic construct
  misc_feature 1..80: note = Synthetic: >GCS-211-cand-3530-3609
  source 1..80: mol_type = other DNA
caacaccagatgttgtgaaaacagaacaagcagaggtagagaaagctctttcttttatagttgaaaaaccagttgttatt

SEQ ID NO: 5613 - DNA, 80 bp, synthetic construct
  misc_feature 1..80: note = Synthetic: >GCS-227-cand-3530-3609
  source 1..80: mol_type = other DNA
acaccagatgttgtgaaaacagaactagcagaggtagagaaagctctttcttttatagttgaaaaaccagttgttattga

SEQ ID NO: 5614 - DNA, 80 bp, synthetic construct
  misc_feature 1..80: note = Synthetic: >GCS-211-cand-13430-13509
  source 1..80: mol_type = other DNA
tcttaatggtaacttttatgattttggtgattttcttaagactataccagaacatggtatcccgtactgtacatcttatt

SEQ ID NO: 5615 - DNA, 80 bp, synthetic construct
  misc_feature 1..80: note = Synthetic: >GCS-227-cand-13430-13509
  source 1..80: mol_type = other DNA
ttaatggtaacttttatgattttggtgattttcttaagactataccagaacatggtatcccgtactgtacatcttattat

SEQ ID NO: 5616 - DNA, 80 bp, synthetic construct
  misc_feature 1..80: note = Synthetic: >GCS-211-cand-21020-21099
  source 1..80: mol_type = other DNA
aataatgctatagtcactggttattttccacttaaccaatccagtgcttggcaatgcggtggtggtgtttcaactacggc

SEQ ID NO: 5617 - DNA, 80 bp, synthetic construct
  misc_feature 1..80: note = Synthetic: >GCS-227-cand-21010-21089
  source 1..80: mol_type = other DNA
ctaatgctaataatgctatagtcactggttattttccacttaaccaatccagtgcttggcgatgcggtggtggtgtttca

SEQ ID NO: 5618 - DNA, 80 bp, synthetic construct
  misc_feature 1..80: note = Synthetic: >GCS-227-cand-24450-24529
  source 1..80: mol_type = other DNA
aatatcactacaggtaacatccaagagatcttccctgaccattttgatgttaattccactataaatgatatattgtccaa

SEQ ID NO: 5619 - DNA, 80 bp, synthetic construct
  misc_feature 1..80: note = Synthetic: >GCS-211-cand-24460-24539
  source 1..80: mol_type = other DNA
tacaggtaacatccaagagatcttccctgaccattttgatgttaattccactataaatgatatattgtccaagatcccaa

SEQ ID NO: 5620 - DNA, 80 bp, synthetic construct
  misc_feature 1..80: note = Synthetic: >SBB-120-cand-26210-26289
  source 1..80: mol_type = other DNA
aatcacctgcacgcagtccacaaagccagcgtaagcagcttgaacgacctgtttggaagcgtgtgccgacctctgacgag

SEQ ID NO: 5621 - DNA, 80 bp, synthetic construct
  misc_feature 1..80: note = Synthetic: >SBB-122-cand-26180-26259
  source 1..80: mol_type = other DNA
cgtgccaaatcacctgcatgcagtccacaaagccagcgtaagcagcttgaacgacctgtttggaagcgtgtgccgacctc

SEQ ID NO: 5622 - DNA, 80 bp, synthetic construct
  misc_feature 1..80: note = Synthetic: >GCS-227-cand-13830-13909
  source 1..80: mol_type = other DNA
tggttaccacttcaagcaactgggtattgtttggaacaaggatttaaacactcacactacaagacttactattactgatt

SEQ ID NO: 5623 - DNA, 80 bp, synthetic construct
  misc_feature 1..80: note = Synthetic: >GCS-211-cand-13830-13909
  source 1..80: mol_type = other DNA
gctggttaccacttcaagcaactgggtattgtttggaacaaggatttaaacactcacactacaagacttactattacaga

SEQ ID NO: 5624 - DNA, 80 bp, synthetic construct
  misc_feature 1..80: note = Synthetic: >SBB-130-cand-25190-25269
  source 1..80: mol_type = other DNA
gattgtagcaccaactggcatcacactcaccgttctcaatggtactcttttagtggagggcattaaggttgcaacaggtg

SEQ ID NO: 5625 - DNA, 80 bp, synthetic construct
  misc_feature 1..80: note = Synthetic: >SBB-010-cand-25200-25279
  source 1..80: mol_type = other DNA
ccaactggcatcacactcaccgttctcaatggtactcttttagtggagggcattaaggttgcaacaggtgtgcaggtaaa

SEQ ID NO: 5626 - DNA, 80 bp, synthetic construct
  misc_feature 1..80: note = Synthetic: >GCS-211-cand-28050-28129
  source 1..80: mol_type = other DNA
cacggtcaccttcgatggtccccttcttcgtactgccggtgtttactggcatatgatcccgggatctcgaactgccttgc

SEQ ID NO: 5627 - DNA, 80 bp, synthetic construct
  misc_feature 1..80: note = Synthetic: >GCS-227-cand-28050-28129
  source 1..80: mol_type = other DNA
cggtcaccttcgatggtcccattcttcgtactgccggtgtttactggcatatgatcccgggatctcgaactgccttgcag

SEQ ID NO: 5628 - DNA, 80 bp, synthetic construct
  misc_feature 1..80: note = Synthetic: >SBB-120-cand-16190-16269
  source 1..80: mol_type = other DNA
cacgtgttgagtgtttcaacggtttcaaacctaacaacaatagtgcacagtacatcttttcgactataaatgcgttgcca

SEQ ID NO: 5629 - DNA, 80 bp, synthetic construct
  misc_feature 1..80: note = Synthetic: >GCS-211-cand-25340-25419
  source 1..80: mol_type = other DNA
cactaaaatacgctgacgtcttggtcttcaaagggggacctaatgacatgctgtttggcagcgagtatgtcacatttgcc

SEQ ID NO: 5630 - DNA, 80 bp, synthetic construct
  misc_feature 1..80: note = Synthetic: >GCS-227-cand-25330-25409
  source 1..80: mol_type = other DNA
taacaggacactaaaatacgctgacgtcttggtcttcaaagggggacctaatgacatgctgtttggcagcgagtatgtca

SEQ ID NO: 5631 - DNA, 80 bp, synthetic construct
  misc_feature 1..80: note = Synthetic: >SBB-788-cand-21840-21919
  source 1..80: mol_type = other DNA
tgaattgtattgtgtcacaggcacttttagtccgcaggttggtgtttacccattaagtaggtatagagctttagttagtg

SEQ ID NO: 5632 - DNA, 80 bp, synthetic construct
  misc_feature 1..80: note = Synthetic: >SBB-726-cand-21850-21929
  source 1..80: mol_type = other DNA
tgtgtcacaggcacttttagcccgcaggttggtgtttacccattaagtaggtatagagctttagttagtgattatgttca

SEQ ID NO: 5633 - DNA, 80 bp, synthetic construct
  misc_feature 1..80: note = Synthetic: >GCS-227-cand-7610-7689
  source 1..80: mol_type = other DNA
gcattgcatacagcctttaaagatgttttgcagaacagttttagtcaggacctcagcaaatgtgatactatggcagagtg

SEQ ID NO: 5634 - DNA, 80 bp, synthetic construct
  misc_feature 1..80: note = Synthetic: >GCS-211-cand-7610-7689
  source 1..80: mol_type = other DNA
gtacattgcatagagcctttaaagatgttttgcagaacagttttagtcaggacctcagcaaatgtgatactatggcagag

SEQ ID NO: 5635 - DNA, 80 bp, synthetic construct
  misc_feature 1..80: note = Synthetic: >GCS-227-cand-8400-8479
  source 1..80: mol_type = other DNA
cacttttctttgtgattaagactgtttttggtgactcaaatgtctgctatgatacgaatggggttactgattctgcacga

SEQ ID NO: 5636 - DNA, 80 bp, synthetic construct
  misc_feature 1..80: note = Synthetic: >GCS-211-cand-8400-8479
  source 1..80: mol_type = other DNA
gacacttttctttgtgattaagactgtttttggtgactcaaatgtctgctatgatacgaatggggttactgattctgcac

SEQ ID NO: 5637 - DNA, 80 bp, synthetic construct
  misc_feature 1..80: note = Synthetic: >GCS-211-cand-22300-22379
  source 1..80: mol_type = other DNA
tgctgccactattaagaagaaacaatggcctaagactaccgttgtgttacctttcaattttgaccacgttaacgtttctg

SEQ ID NO: 5638 - DNA, 80 bp, synthetic construct
  misc_feature 1..80: note = Synthetic: >GCS-227-cand-22290-22369
  source 1..80: mol_type = other DNA
ttctacaatgctgccactattaagaagaaacaatggcctaaaactaccgttgtgttacctttcaattttgaccacgttaa

SEQ ID NO: 5639 - DNA, 80 bp, synthetic construct
  misc_feature 1..80: note = Synthetic: >AvianCoV-cand-1000-1079
  source 1..80: mol_type = other DNA
tggcaatgcgcagacttgttggtgaagtaactgcaaaagtcatggattctcttggctcaaatttgagcgctctatttcaa

SEQ ID NO: 5640 - DNA, 80 bp, synthetic construct
  misc_feature 1..80: note = Synthetic: >AvianCoV-cand-1080-1159
  source 1..80: mol_type = other DNA
gttgttaaagaacaaatagccagaatctttcaaaaggctctggctatttttgagagtgtgagtgaattaccacagcgtat

SEQ ID NO: 5641 - DNA, 80 bp, synthetic construct
  misc_feature 1..80: note = Synthetic: >AvianCoV-cand-1160-1239
  source 1..80: mol_type = other DNA
tgctgcacttaagatggcttttgccaagtgtgcaaaatcaattacagttgtggttgttgaaaatgctctcattattagag

SEQ ID NO: 5642 - DNA, 80 bp, synthetic construct
  misc_feature 1..80: note = Synthetic: >AvianCoV-cand-1240-1319
  source 1..80: mol_type = other DNA
agtttgctggaacttgtcttgcaagcattaatggtgcagttgcaaaattctttgaagaacttccaactggctttatgggt

SEQ ID NO: 5643 - DNA, 80 bp, synthetic construct
  misc_feature 1..80: note = Synthetic: >AvianCoV-cand-1320-1399
  source 1..80: mol_type = other DNA
gctaaagtctttacaactcttgccttctttaaagaagcagctgtgaagattgtagaaaatataccaaatgcaccaagagg

SEQ ID NO: 5644 - DNA, 80 bp, synthetic construct
  misc_feature 1..80: note = Synthetic: >AvianCoV-cand-1400-1479
  source 1..80: mol_type = other DNA
tactaaaggttttgaagtcgttggcaatgccaaaggtacacaagttgttgtgcgtggcatgcgaaatgacttaactctgc

SEQ ID NO: 5645 - DNA, 80 bp, synthetic construct
  misc_feature 1..80: note = Synthetic: >AvianCoV-cand-1480-1559
  source 1..80: mol_type = other DNA
ttgaccaaaaagctgaaattcctgtggaaccagaaggttggtctgcaattttggagggacatctttgttatgtctttaag

SEQ ID NO: 5646 - DNA, 80 bp, synthetic construct
  misc_feature 1..80: note = Synthetic: >AvianCoV-cand-1560-1639
  source 1..80: mol_type = other DNA
agtggtgatcgcttttatgcggcacctctttcaggaaattttgcattgcatgatgtgcattgctgcgagcgtgtagtctg

SEQ ID NO: 5647 - DNA, 80 bp, synthetic construct
  misc_feature 1..80: note = Synthetic: >AvianCoV-cand-1640-1719
  source 1..80: mol_type = other DNA
tctgtctgatggtgtaacaccggagataaatgatggactcattcttgctgcaatttactcatcttttagtgtttcagaac

SEQ ID NO: 5648 - DNA, 80 bp, synthetic construct
  misc_feature 1..80: note = Synthetic: >AvianCoV-cand-1720-1799
  source 1..80: mol_type = other DNA
ttgtggcagcacttaaaaaaggtgaaccattcaagttcttggggcataaatttgtgtatgcgaaggatgcagcagtttct

SEQ ID NO: 5649 - DNA, 80 bp, synthetic construct
  misc_feature 1..80: note = Synthetic: >AvianCoV-cand-1800-1879
  source 1..80: mol_type = other DNA
ttcactttggcaaaagcagcaactattgcagatgtcctgaagctgtttcaatcagcaagagtaaagacggaagatgtgtg

SEQ ID NO: 5650 - DNA, 80 bp, synthetic construct
  misc_feature 1..80: note = Synthetic: >AvianCoV-cand-1880-1959
  source 1..80: mol_type = other DNA
gtctgcacttactgaaaagtcttttgaattctggaaacttgcatatggaaaagtgcgcaatcttgaagaagttgtgaaga

SEQ ID NO: 5651 - DNA, 80 bp, synthetic construct
  misc_feature 1..80: note = Synthetic: >AvianCoV-cand-1960-2039
  source 1..80: mol_type = other DNA
ctcatttttgtaaagctcaaatgtcaattgtgatcctagcagcagtgcttggtgagggcatttggcatcttgtttcacaa

SEQ ID NO: 5652 - DNA, 80 bp, synthetic construct
  misc_feature 1..80: note = Synthetic: >AvianCoV-cand-2040-2119
  source 1..80: mol_type = other DNA
gtcatctataaattgggtggtctgtttactaaagttgttgacttttgtgaaaaacactggaaaggtttctgtgcacagtt

SEQ ID NO: 5653 - DNA, 80 bp, synthetic construct
  misc_feature 1..80: note = Synthetic: >AvianCoV-cand-2120-2199
  source 1..80: mol_type = other DNA
gaaaaaagctaagcttgttgttacagaaaacctttgtgttttgaaaggagttgcacagcattgttttcaacttttgctgg

SEQ ID NO: 5654 - DNA, 80 bp, synthetic construct
  misc_feature 1..80: note = Synthetic: >AvianCoV-cand-2200-2279
  source 1..80: mol_type = other DNA
atgcaatacattctatgtacaagagttttaagaagtgtgcacttggtagaattcatggagacttgctcttctggaaagga

SEQ ID NO: 5655 - DNA, 80 bp, synthetic construct
  misc_feature 1..80: note = Synthetic: >Beluga-cand-1070-1149
  source 1..80: mol_type = other DNA
acctactgttgttaaggagttggcaaaattggccaagtctattcctatgctgaaagttgagaaccatgtgctgcgtttgt

SEQ ID NO: 5656 - DNA, 80 bp, synthetic construct
  misc_feature 1..80: note = Synthetic: >Beluga-cand-1150-1229
  source 1..80: mol_type = other DNA
tcggagcgggtggtgattttgttgattgtatcaacaagttcctttcagatgtgtattatagacatcctgggcatgtggaa

SEQ ID NO: 5657 - DNA, 80 bp, synthetic construct
  misc_feature 1..80: note = Synthetic: >Beluga-cand-1230-1309
  source 1..80: mol_type = other DNA
tatcatggtgtgaaggtttccgccacgattttctatcgcaacaactgtgcaaagataagccgtgcgtatatcatgccacc

SEQ ID NO: 5658 - DNA, 80 bp, synthetic construct
  misc_feature 1..80: note = Synthetic: >Beluga-cand-1310-1389
  source 1..80: mol_type = other DNA
aaaagttgtttgtaagcctgatgtgtattttgaagctacacctgctactcagtttcaaactgtgattgttgaagggagtg

SEQ ID NO: 5659 - DNA, 80 bp, synthetic construct
  misc_feature 1..80: note = Synthetic: >Beluga-cand-1390-1469
  source 1..80: mol_type = other DNA
gagaggaagtgcatgagctccgtcaagttattggtgaagtaccagaaggacagaaaggcattattgtgctttctgatggt

SEQ ID NO: 5660 - DNA, 80 bp, synthetic construct
  misc_feature 1..80: note = Synthetic: >Beluga-cand-1470-1549
  source 1..80: mol_type = other DNA
gctgcctattttaagtacctaggttcagatggaaaggaatacctttcactctgggtaggtgtgggatgccttaaataccc

SEQ ID NO: 5661 - DNA, 80 bp, synthetic construct
  misc_feature 1..80: note = Synthetic: >Beluga-cand-1550-1629
  source 1..80: mol_type = other DNA
tatttatgtgccagagcaacctgcagcagttaaatttgctgaggctgtgtcagtgttggaatatgaacaagaagaagagc

SEQ ID NO: 5662 - DNA, 80 bp, synthetic construct
  misc_feature 1..80: note = Synthetic: >Beluga-cand-1630-1709
  source 1..80: mol_type = other DNA
cggacattgcgattagatgcaagttcagatgttttaatggcaaccacattgaaaaagaccttgataaggcaattgatgaa

SEQ ID NO: 5663 - DNA, 80 bp, synthetic construct
  misc_feature 1..80: note = Synthetic: >Beluga-cand-1710-1789
  source 1..80: mol_type = other DNA
attgtatttgaagcagagtgtaccattgaggaagttcatgcagtgttttataccagaatgtgtgaatattttgaagagca

SEQ ID NO: 5664 - DNA, 80 bp, synthetic construct
  misc_feature 1..80: note = Synthetic: >Beluga-cand-1790-1869
  source 1..80: mol_type = other DNA
aggtagctctgaagaaattccactttttgaagaaactgcccttgtggatcctgattaccgtcttttggatggtctcagaa

SEQ ID NO: 5665 - DNA, 80 bp, synthetic construct
  misc_feature 1..80: note = Synthetic: >Beluga-cand-1870-1949
  source 1..80: mol_type = other DNA
aggttgttagattagtcatgttgggtgaagtcgccgatgcggaggatgaagacaactatgattggaatgatgaagatgca

SEQ ID NO: 5666 - DNA, 80 bp, synthetic construct
  misc_feature 1..80: note = Synthetic: >Beluga-cand-1950-2029
  source 1..80: mol_type = other DNA
gagtcccagccacctgatgttgaatttgaagagcaggttcaagatgaggatgactctgttgaagtagatgaaggtgatta

SEQ ID NO: 5667 - DNA, 80 bp, synthetic construct
  misc_feature 1..80: note = Synthetic: >Beluga-cand-2030-2109
  source 1..80: mol_type = other DNA
tgaagaagacacctttaacctagctatgggtgtacctatgatccatagcgatgatgagcttgaccttgtatgtgatgttg

SEQ ID NO: 5668 - DNA, 80 bp, synthetic construct
  misc_feature 1..80: note = Synthetic: >Beluga-cand-2110-2189
  source 1..80: mol_type = other DNA
atgatgatgagctggttgacgagggcgaagagcctgatgtgcggagttcatcagaagagactgaccttgaggttaatgtt

SEQ ID NO: 5669 - DNA, 80 bp, synthetic construct
  misc_feature 1..80: note = Synthetic: >Beluga-cand-2190-2269
  source 1..80: mol_type = other DNA
cagtgtaatgatgatgcgggttggtctgaggatcctctggtggttgatgaggactcagcagacacctctgctcaagaaga

SEQ ID NO: 5670 - DNA, 80 bp, synthetic construct
  misc_feature 1..80: note = Synthetic: >Beluga-cand-2270-2349
  source 1..80: mol_type = other DNA
agatgaaaacgaaagtgctagtgcgcctgaaacctctcaagaggatatggcaactacacctgagacatctcataataaaa

SEQ ID NO: 5671 - DNA, 80 bp, synthetic construct
  misc_feature 1..80: note = Synthetic: >BetaSp-cand-23250-23329
  source 1..80: mol_type = other DNA
aataaaggtaagttctatgagcaagtatataggaagatggccgtttatcgaggcctctccataataactgtgccttatgt

SEQ ID NO: 5672 - DNA, 80 bp, synthetic construct
  misc_feature 1..80: note = Synthetic: >BetaSp-cand-23330-23409
  source 1..80: mol_type = other DNA
atatactggaacggcagctgcaacctctatttgtacgagaggcagtctgaccttaaataatcctacgtctatacaaaagg

SEQ ID NO: 5673 - DNA, 80 bp, synthetic construct
  misc_feature 1..80: note = Synthetic: >BetaSp-cand-23410-23489
  source 1..80: mol_type = other DNA
agagcggtttgaataattatttttatactgcagaggctaattttactctcgcgggctgcgatgagtacatagttcctctg

SEQ ID NO: 5674 - DNA, 80 bp, synthetic construct
  misc_feature 1..80: note = Synthetic: >BetaSp-cand-23490-23569
  source 1..80: mol_type = other DNA
tgtatttatagtggtatgtttcaagcttctggtacgtactacaatgatagccagtactattatagttatagcactggaga

SEQ ID NO: 5675 - DNA, 80 bp, synthetic construct
  misc_feature 1..80: note = Synthetic: >BetaSp-cand-23570-23649
  source 1..80: mol_type = other DNA
attttatggccgtaacaacacagttgataaagccactgttgttgattacgagtgccaatatcttaccttgccttctggaa

SEQ ID NO: 5676 - DNA, 80 bp, synthetic construct
  misc_feature 1..80: note = Synthetic: >BetaSp-cand-23650-23729
  source 1..80: mol_type = other DNA
tttataaatctgtttccaatcagttgcttcttacagttccgacgaaggcgatctgtctgacaaagcccaagagctttacg

SEQ ID NO: 5677 - DNA, 80 bp, synthetic construct
  misc_feature 1..80: note = Synthetic: >BetaSp-cand-23740-23819
  source 1..80: mol_type = other DNA
ttgtcgattctcgttggaaccatgccaggctatctgataataaaacagcagaggcatgtcaattgccttattgctatttt

SEQ ID NO: 5678 - DNA, 80 bp, synthetic construct
  misc_feature 1..80: note = Synthetic: >BetaSp-cand-23820-23899
  source 1..80: mol_type = other DNA
cgcaattctaccacagattatgttggtagctatgatattaaccatggagatgttgggttttctagcatccttaagggttt

SEQ ID NO: 5679 - DNA, 80 bp, synthetic construct
  misc_feature 1..80: note = Synthetic: >BetaSp-cand-23900-23979
  source 1..80: mol_type = other DNA
gacttataatgcaccttgttttgctaagcaaggtgtatttatgtataataatgttagtagtgtatggcccgcctatgctt

SEQ ID NO: 5680 - DNA, 80 bp, synthetic construct
  misc_feature 1..80: note = Synthetic: >BetaSp-cand-23980-24059
  source 1..80: mol_type = other DNA
atggtgagtgccccactgctgctaatataaatataaatggaattcccatttgtaactatgatccgctacctgttattttg

SEQ ID NO: 5681 - DNA, 80 bp, synthetic construct
  misc_feature 1..80: note = Synthetic: >BetaSp-cand-24060-24139
  source 1..80: mol_type = other DNA
cttggcattcttcttggaatagcggttataaccattgtggttttgcttttatatttccttgtagataatggtactaggct

SEQ ID NO: 5682 - DNA, 80 bp, synthetic construct
  misc_feature 1..80: note = Synthetic: >BetaSp-cand-24140-24219
  source 1..80: mol_type = other DNA
tcatgatgcgtaggccattaatctaaacatggttataatttttttgctcttattcgccgaacctgtcttttgtgttattg

SEQ ID NO: 5683 - DNA, 80 bp, synthetic construct
  misc_feature 1..80: note = Synthetic: >BetaSp-cand-24220-24299
  source 1..80: mol_type = other DNA
gcgattttaagtgcactcaaagttggattaatagtgccgcctcaccacagccgccaatctccactcagaagttgttgatg

SEQ ID NO: 5684 - DNA, 80 bp, synthetic construct
  misc_feature 1..80: note = Synthetic: >BetaSp-cand-24300-24379
  source 1..80: mol_type = other DNA
tgtctaagggtgttggcacgtactatgtcctaaatcgtgtttatttgaatactagtttgttgctcactggttattaccct

SEQ ID NO: 5685 - DNA, 80 bp, synthetic construct
  misc_feature 1..80: note = Synthetic: >BetaSp-cand-24460-24539
  source 1..80: mol_type = other DNA
gtcagaatttaattctggtatatttgttaaagctagaaatagcaaacctgtgttgaatggcatcactcattctgagttcg

SEQ ID NO: 5686 - DNA, 80 bp, synthetic construct
  misc_feature 1..80: note = Synthetic: >BtCoV_008_16-cand-20900-20979
  source 1..80: mol_type = other DNA
gttactggtactgattgcctcgtaaatcttagaatacctcttcatcttgtagacaactctaatatagttgttggtttgtc

SEQ ID NO: 5687 - DNA, 80 bp, synthetic construct
  misc_feature 1..80: note = Synthetic: >BtCoV_008_16-cand-20980-21059
  source 1..80: mol_type = other DNA
gtggagtggtgattatgtcaccattcatgctgacaagatttataggttctatttgcctggcaatgattggtccagagtta

SEQ ID NO: 5688 - DNA, 80 bp, synthetic construct
  misc_feature 1..80: note = Synthetic: >BtCoV_008_16-cand-21060-21139
  source 1..80: mol_type = other DNA
gaactcactgtgcattaactaatagttgtgctatgcagtaccctagcgtgccactttattatactctcaatgtcactggt

SEQ ID NO: 5689 - DNA, 80 bp, synthetic construct
  misc_feature 1..80: note = Synthetic: >BtCoV_008_16-cand-21140-21219
  source 1..80: mol_type = other DNA
agcaatgttagtgacatttcttattctgcctgcgtatcacctgactgtgacggttttgccactaatgtgtttgctgtcac

SEQ ID NO: 5690 - DNA, 80 bp, synthetic construct
  misc_feature 1..80: note = Synthetic: >BtCoV_008_16-cand-21220-21299
  source 1..80: mol_type = other DNA
tgagggtggttacatccctgccagttttagttttaataactggtttctgcttactaatacctccacattagtaaatggtg

SEQ ID NO: 5691 - DNA, 80 bp, synthetic construct
  misc_feature 1..80: note = Synthetic: >BtCoV_008_16-cand-21300-21379
  source 1..80: mol_type = other DNA
tggtgctttctagccagccaatgcgagtcagctgtcttatacctgtgcctaaattttcgggtggtgctaatacgttttat

SEQ ID NO: 5692 - DNA, 80 bp, synthetic construct
  misc_feature 1..80: note = Synthetic: >BtCoV_008_16-cand-21380-21459
  source 1..80: mol_type = other DNA
tttaatcagtcatccctggatggctgtaatggtgccagcaccaatcacacacccgatgcttttaggtttaatatcaatga

SEQ ID NO: 5693 - DNA, 80 bp, synthetic construct
  misc_feature 1..80: note = Synthetic: >BtCoV_008_16-cand-21460-21539
  source 1..80: mol_type = other DNA
cactaaggcgcttgttgctgctaatagtgtagttcttaccacattggagggttttcagatttctctcgtgtgttcaaata

SEQ ID NO: 5694 - DNA, 80 bp, synthetic construct
  misc_feature 1..80: note = Synthetic: >BtCoV_008_16-cand-21540-21619
  source 1..80: mol_type = other DNA
caagtgaccctcttacagcaactaccttttcgattccttttggtgcagctagtactgtctattactgttttcttaatgtt

SEQ ID NO: 5695 - DNA, 80 bp, synthetic construct
  misc_feature 1..80: note = Synthetic: >BtCoV_008_16-cand-21620-21699
  source 1..80: mol_type = other DNA
agttatggtgataattacaccatagaatttttgtcagttctaccacccagtgttaaggaatttgtagtcactaagtatgg

SEQ ID NO: 5696 - DNA, 80 bp, synthetic construct
  misc_feature 1..80: note = Synthetic: >BtCoV_008_16-cand-21700-21779
  source 1..80: mol_type = other DNA
ctctgtttatatcaatggctatggttatgtccatgccggtcatttatcttctgtgcaaatcaacataccaccatcagact

SEQ ID NO: 5697 - DNA, 80 bp, synthetic construct
  misc_feature 1..80: note = Synthetic: >BtCoV_008_16-cand-21780-21859
  source 1..80: mol_type = other DNA
catttggagtctggactgttgcagccaccacttttactgatgttatggtggaagttaatggcaccaacatagtgcgtatg

SEQ ID NO: 5698 - DNA, 80 bp, synthetic construct
  misc_feature 1..80: note = Synthetic: >BtCoV_008_16-cand-21860-21939
  source 1..80: mol_type = other DNA
ttgtattgtgatacgcctgagcgtaatttaatgtgttcgcaacttagttttgatttgcaggatggtttttacgcaatcac

SEQ ID NO: 5699 - DNA, 80 bp, synthetic construct
  misc_feature 1..80: note = Synthetic: >BtCoV_008_16-cand-21940-22019
  source 1..80: mol_type = other DNA
tcctacaaatgactactttgttgaacaacctcaagcgtttgtacagttaccgtcattcaataaccatggttatttaaatt

SEQ ID NO: 5700 - DNA, 80 bp, synthetic construct
  misc_feature 1..80: note = Synthetic: >BtCoV_008_16-cand-22030-22109
  source 1..80: mol_type = other DNA
tgtgacttttggcgacaccattaatagcaatgttcagtactttgctattttgtttaatggtgagagttctacgtgtgttt

SEQ ID NO: 5701 - DNA, 80 bp, synthetic construct
  misc_feature 1..80: note = Synthetic: >BtCoV_008_16-cand-22110-22189
  source 1..80: mol_type = other DNA
ccacttcacagtttactctttcaattagcaccaagttccagcctaataatgcatatcataacctagagtttcagagtagg

SEQ ID NO: 5702 - DNA, 80 bp, synthetic construct
  misc_feature 1..80: note = Synthetic: >BtCoV_008_16-cand-23470-23549
  source 1..80: mol_type = other DNA
tagtaatattactatggcctttgagggtgtcaacgatgcaattcaacaaacatctcaaggactcagcactgttgcgcagg

SEQ ID NO: 5703 - DNA, 80 bp, synthetic construct
  misc_feature 1..80: note = Synthetic: >BtCoV_008_16-cand-23550-23629
  source 1..80: mol_type = other DNA
cccttactaaagttcaggatgttgttaatacgcagggtcttgcactatcacatctgactaaacagttgcagaacaatttt

SEQ ID NO: 5704 - DNA, 80 bp, synthetic construct
  misc_feature 1..80: note = Synthetic: >BtCoV_008_16-cand-23630-23709
  source 1..80: mol_type = other DNA
caggctatttctagctcaattagtgatatttatgctaggttggaccaactcacagccgatgcacaagttgataggcttat

SEQ ID NO: 5705 - DNA, 80 bp, synthetic construct
  misc_feature 1..80: note = Synthetic: >BtCoV_008_16-cand-23710-23789
  source 1..80: mol_type = other DNA
tactggtaggcttgctgctcttaatgcttttgtgtctcagactatgactaaatatgtcgaggttcaagctagcagacgcc

SEQ ID NO: 5706 - DNA, 80 bp, synthetic construct
  misc_feature 1..80: note = Synthetic: >BtCoV_008_16-cand-23790-23869
  source 1..80: mol_type = other DNA
ttgcacaacagaaggttaatgagtgtgttaaatctcaatccacccgttatggcttctgtggtgacgatggtgaacatatt

SEQ ID NO: 5707 - DNA, 80 bp, synthetic construct
  misc_feature 1..80: note = Synthetic: >BtCoV_008_16-cand-23870-23949
  source 1..80: mol_type = other DNA
ttctccatcgtccaaggtgcacctcagggccttatgttcttgcacacggttttagttccatctagttatgttaatgtcac

SEQ ID NO: 5708 - DNA, 80 bp, synthetic construct
  misc_feature 1..80: note = Synthetic: >BtCoV_008_16-cand-23950-24029
  source 1..80: mol_type = other DNA
tgctgtagctggcctatgtgtcgatgacactaaggcttttgttctgcgcgaaacgggtttagttatgtttaaatctagtg

SEQ ID NO: 5709 - DNA, 80 bp, synthetic construct
  misc_feature 1..80: note = Synthetic: >BtCoV_008_16-cand-24030-24109
  source 1..80: mol_type = other DNA
atagtgatgaaacatatttcttgactcctagaaagatgtttgaaccccgctctattagtgttacagacctcgttcaagtt

SEQ ID NO: 5710 - DNA, 80 bp, synthetic construct
  misc_feature 1..80: note = Synthetic: >BtCoV_008_16-cand-24110-24189
  source 1..80: mol_type = other DNA
gaaacttgtttggtctcgtacttcaatctgacatctaatgagcttcctgacgtagttcctgactatgttgatgttaataa

SEQ ID NO: 5711 - DNA, 80 bp, synthetic construct
  misc_feature 1..80: note = Synthetic: >BtCoV_008_16-cand-24190-24269
  source 1..80: mol_type = other DNA
aacgttagaggatattcttgccagtcttcctaataggtctgagcctacttttcctctagatgtttttaatgccacctatc

SEQ ID NO: 5712 - DNA, 80 bp, synthetic construct
  misc_feature 1..80: note = Synthetic: >BtCoV_008_16-cand-24270-24349
  source 1..80: mol_type = other DNA
ttaacctaactggtgagattgccgatcttgaacaaagggctgatgctcttcataatacctcagaagagttacgtcgtctt

SEQ ID NO: 5713 - DNA, 80 bp, synthetic construct
  misc_feature 1..80: note = Synthetic: >BtCoV_008_16-cand-24350-24429
  source 1..80: mol_type = other DNA
attgacaatattaataacaccctagttgaccttgaatggcttaatagagttgagacatatatcaagtggccttggtgggt

SEQ ID NO: 5714 - DNA, 80 bp, synthetic construct
  misc_feature 1..80: note = Synthetic: >BtCoV_008_16-cand-24430-24509
  source 1..80: mol_type = other DNA
gtggcttattattgttattgttcttatttttgtggtttctctactagtgttttgttgtcttgccacaggttgctgtggtt

SEQ ID NO: 5715 - DNA, 80 bp, synthetic construct
  misc_feature 1..80: note = Synthetic: >BtCoV_008_16-cand-24510-24589
  source 1..80: mol_type = other DNA
gttgtgggtgtcttggttcatgtttttcaggttgttgtaagggtccaagacttcaaccttacgaacctatagaaaaagtg

SEQ ID NO: 5716 - DNA, 80 bp, synthetic construct
  misc_feature 1..80: note = Synthetic: >BtCoV_008_16-cand-24590-24669
  source 1..80: mol_type = other DNA
catatccaataatgtttcttggattgtttcaatataccattgacactgttgttcagaacacagtggagtcggccaacctt

SEQ ID NO: 5717 - DNA, 80 bp, synthetic construct
  misc_feature 1..80: note = Synthetic: >BtCoV_008_16-cand-24670-24749
  source 1..80: mol_type = other DNA
tcagatgaggccgtaagacattttgaggaacaagttgtccctctgcgtcaggcatctcatattacaggtttccttctcac

SEQ ID NO: 5718 - DNA, 80 bp, synthetic construct
  misc_feature 1..80: note = Synthetic: >Delta-cand-21870-21949
  source 1..80: mol_type = other DNA
actaattatcgtaacacatcctacgccttcaacaccaatggcacaacatatcgtttgctgcaatacttaggtattcttcc

SEQ ID NO: 5719 - DNA, 80 bp, synthetic construct
  misc_feature 1..80: note = Synthetic: >Delta-cand-21950-22029
  source 1..80: mol_type = other DNA
acctgatttaactgactttacggtctaccgtactggtcagttctatgctaatggttaccttttaggtactataggaatgt

SEQ ID NO: 5720 - DNA, 80 bp, synthetic construct
  misc_feature 1..80: note = Synthetic: >Delta-cand-22030-22109
  source 1..80: mol_type = other DNA
ccatacaaaatttctttacctattatgcacggttaactatgttaggttgtttcgaattaatcggggtcatttgtctgcca

SEQ ID NO: 5721 - DNA, 80 bp, synthetic construct
  misc_feature 1..80: note = Synthetic: >Delta-cand-22110-22189
  source 1..80: mol_type = other DNA
atagtgcccactttgcccttgcttggtcaaacctaaccgatacactcataacacttaccaatactactatatcgcaaatc

SEQ ID NO: 5722 - DNA, 80 bp, synthetic construct
  misc_feature 1..80: note = Synthetic: >Delta-cand-22190-22269
  source 1..80: mol_type = other DNA
acttattgtgataaagtcagtagttgattcaatagcatgccagcgctcttctcacgaagtggaggatgggttttactccg

SEQ ID NO: 5723 - DNA, 80 bp, synthetic construct
  misc_feature 1..80: note = Synthetic: >Delta-cand-22270-22349
  source 1..80: mol_type = other DNA
acaagcccgctaaacagcaggcttaacctaaatctgccgttaaaaaacctgtgtgagctaggcaacgtactattgttaca

SEQ ID NO: 5724 - DNA, 80 bp, synthetic construct
  misc_feature 1..80: note = Synthetic: >Delta-cand-22350-22429
  source 1..80: mol_type = other DNA
ctacctaagcacacatatacagaaattaactcaatctcccaacgacttgagcttgaagtagtgcagttaaatatttctgc

SEQ ID NO: 5725 - DNA, 80 bp, synthetic construct
  misc_feature 1..80: note = Synthetic: >Delta-cand-22430-22509
  source 1..80: mol_type = other DNA
acacattaaagagcctgcaggattttggcgaagcgtgtctagccagacttgacagcgttaccatcaaaatatcgctttaa

SEQ ID NO: 5726 - DNA, 80 bp, synthetic construct
  misc_feature 1..80: note = Synthetic: >Delta-cand-22510-22589
  source 1..80: mol_type = other DNA
tgcctcaaccagtaactctcgcaaattcactgaacatcctattgtgtcactaagccttacttcaggcttgaaactaactt

SEQ ID NO: 5727 - DNA, 80 bp, synthetic construct
  misc_feature 1..80: note = Synthetic: >Delta-cand-22590-22669
  source 1..80: mol_type = other DNA
tatgtgtagtggtggtactaacactaccaaaccttctgacgaatataagtgcataggtggtttacacaggttgcactatg

SEQ ID NO: 5728 - DNA, 80 bp, synthetic construct
  misc_feature 1..80: note = Synthetic: >Delta-cand-22670-22749
  source 1..80: mol_type = other DNA
aatctgcgcactgcaatcgcaccagaaaattcacatacctgtagttttgacctgtcagcagtaaacaattatttaacatt

SEQ ID NO: 5729 - DNA, 80 bp, synthetic construct
  misc_feature 1..80: note = Synthetic: >Delta-cand-22750-22829
  source 1..80: mol_type = other DNA
tggtggcatgtcattctctcaattctgtctatctagcactgctgaaatctggtgcttgtgagatgaaaattaagcaaaat

SEQ ID NO: 5730 - DNA, 80 bp, synthetic construct
  misc_feature 1..80: note = Synthetic: >Delta-cand-22830-22909
  source 1..80: mol_type = other DNA
attggtcaaaaaatcaggctagttacctacgtatggaattacttgctaagggaaatcagcgtttgtatgttactgctgta

SEQ ID NO: 5731 - DNA, 80 bp, synthetic construct
  misc_feature 1..80: note = Synthetic: >Delta-cand-22910-22989
  source 1..80: mol_type = other DNA
aacaaacagagggccagactcacagcgaaccctggaacgaggattagtattacacttcagcatctcaagactacagtata

SEQ ID NO: 5732 - DNA, 80 bp, synthetic construct
  misc_feature 1..80: note = Synthetic: >Delta-cand-22990-23069
  source 1..80: mol_type = other DNA
catgcaacagacacttctagtgtaatcactgatgtctgcactgactacactatctatggagtctctggtactggcattat

SEQ ID NO: 5733 - DNA, 80 bp, synthetic construct
  misc_feature 1..80: note = Synthetic: >Delta-cand-23070-23149
  source 1..80: mol_type = other DNA
taagccatcagatctcttattgcacaatggcatagcattcacctctccaacaggtgagctttatgcatttaaaaatataa

SEQ ID NO: 5734 - DNA, 80 bp, synthetic construct
  misc_feature 1..80: note = Synthetic: >HKU1-cand-22470-22549
  source 1..80: mol_type = other DNA
tagtactaattattctaaggaagtttattttactttattaggttgttctctttatttagtaccgctttgcctttttaaat

SEQ ID NO: 5735 - DNA, 80 bp, synthetic construct
  misc_feature 1..80: note = Synthetic: >HKU1-cand-22550-22629
  source 1..80: mol_type = other DNA
ctaactttagtcagtactattataacatagatactggctctgtttatggtttttctaatgttgtttatcctgatttagac

SEQ ID NO: 5736 - DNA, 80 bp, synthetic construct
  misc_feature 1..80: note = Synthetic: >HKU1-cand-22630-22709
  source 1..80: mol_type = other DNA
tgtatttatatttctcttaaaccaggttcttataaagtttccaccactgcaccttttttatccttacctactaaagctct

SEQ ID NO: 5737 - DNA, 80 bp, synthetic construct
  misc_feature 1..80: note = Synthetic: >HKU1-cand-22710-22789
  source 1..80: mol_type = other DNA
ctgttttgataaatctaaacaatttgtacctgtacaggttgttgattctagatggaacaacgagcgtgcctcagatattt

SEQ ID NO: 5738 - DNA, 80 bp, synthetic construct
  misc_feature 1..80: note = Synthetic: >HKU1-cand-22790-22869
  source 1..80: mol_type = other DNA
ctttatctgttgcatgtcaattgccatattgttattttcgcaattcttctgctaattatgttggcaagtatgatattaac

SEQ ID NO: 5739 - DNA, 80 bp, synthetic construct
  misc_feature 1..80: note = Synthetic: >HKU1-cand-22870-22949
  source 1..80: mol_type = other DNA
cacggtgatagtggttttatttctattttatctggtcttttatataatgtttcttgtatttcatattatggtgtattttt

SEQ ID NO: 5740 - DNA, 80 bp, synthetic construct
  misc_feature 1..80: note = Synthetic: >HKU1-cand-22950-23029
  source 1..80: mol_type = other DNA
atatgataattttacatccatttggccctattattcttttggtaggtgtcctacatcttctattattaaacatccaattt

SEQ ID NO: 5741 - DNA, 80 bp, synthetic construct
  misc_feature 1..80: note = Synthetic: >HKU1-cand-23030-23109
  source 1..80: mol_type = other DNA
gtgtttatgattttttgcctattattttacaaggtattttattatgtttagctttactttttgttgtttttctattattc

SEQ ID NO: 5742 - DNA, 80 bp, synthetic construct
  misc_feature 1..80: note = Synthetic: >HKU1-cand-23110-23189
  source 1..80: mol_type = other DNA
ttgttatataacgataaatctcattaaatctaaacatgttattaattatttttattttgcctacaacattagctgttata

SEQ ID NO: 5743 - DNA, 80 bp, synthetic construct
  misc_feature 1..80: note = Synthetic: >HKU1-cand-23190-23269
  source 1..80: mol_type = other DNA
ggtgattttaattgtactaattttgctattaatgattaaaacaccacagttcctcgcataagtgagtatgttgtggatgt

SEQ ID NO: 5744 - DNA, 80 bp, synthetic construct
  misc_feature 1..80: note = Synthetic: >HKU1-cand-23270-23349
  source 1..80: mol_type = other DNA
ttcttatggtttgggtacatattatatacttgatcgtgtttatttaaatactactatattatttactggttatttcccta

SEQ ID NO: 5745 - DNA, 80 bp, synthetic construct
  misc_feature 1..80: note = Synthetic: >HKU1-cand-23350-23429
  source 1..80: mol_type = other DNA
aatctggtgccaattttagggatctatctttaaaaggtactacatatttgagtactctttggtatcagaaacccttttta

SEQ ID NO: 5746 - DNA, 80 bp, synthetic construct
  misc_feature 1..80: note = Synthetic: >HKU1-cand-23430-23509
  source 1..80: mol_type = other DNA
tctgattttaataatggtattttttctagagttaagaatactaagttgtatgttaataaaactttgtatagtgagtttag

SEQ ID NO: 5747 - DNA, 80 bp, synthetic construct
  misc_feature 1..80: note = Synthetic: >HKU1-cand-23510-23589
  source 1..80: mol_type = other DNA
tactatagttataggtagtgtttttattaacaactcttatactattgttgttcaacctcataatggtgttttggagatta

SEQ ID NO: 5748 - DNA, 80 bp, synthetic construct
  misc_feature 1..80: note = Synthetic: >HKU1-cand-23590-23669
  source 1..80: mol_type = other DNA
cagcttgtcaatacactatgtgtgagtatcctcatactatttgtaaatctaaaggtagttctcgtaatgaatcttggcat

SEQ ID NO: 5749 - DNA, 80 bp, synthetic construct
  misc_feature 1..80: note = Synthetic: >HKU1-cand-23670-23749
  source 1..80: mol_type = other DNA
tttgataaatctgaacctttgtgtctgttcaagaaaaattttacttataatgtttctacagattggttgtattttcattt

SEQ ID NO: 5750 - DNA, 80 bp, synthetic construct
  misc_feature 1..80: note = Synthetic: >HKU15-cand-5200-5279
  source 1..80: mol_type = other DNA
cactttgattataattcttactgtgcaggtgacttggtttgtcaagcctgttttgacggtcaagactccctacatttgta

SEQ ID NO: 5751 - DNA, 80 bp, synthetic construct
  misc_feature 1..80: note = Synthetic: >HKU15-cand-5280-5359
  source 1..80: mol_type = other DNA
tccgcatttacgtgttaatcagcagccccttcagaccactgactacactgtttatgcgctttcactaatactactattag

SEQ ID NO: 5752 - DNA, 80 bp, synthetic construct
  misc_feature 1..80: note = Synthetic: >HKU15-cand-5360-5439
  source 1..80: mol_type = other DNA
ctaacatgactcttgtcatgggcacgctaatagttactttctttgtgaacttctatggtgtgcaaataccattttatggt

SEQ ID NO: 5753 - DNA, 80 bp, synthetic construct
  misc_feature 1..80: note = Synthetic: >HKU15-cand-5440-5519
  source 1..80: mol_type = other DNA
acacttttgatagattatcaatccgcgctggtgatgactttctcagtgtactacttttataaggtaatgaagtttttccg

SEQ ID NO: 5754 - DNA, 80 bp, synthetic construct
  misc_feature 1..80: note = Synthetic: >HKU15-cand-5520-5599
  source 1..80: mol_type = other DNA
ccatctcacacatggatgtaaaattccaacgtgtgtggtatgtgccaaacttcgtaccccacctactataacagttgaga

SEQ ID NO: 5755 - DNA, 80 bp, synthetic construct
  misc_feature 1..80: note = Synthetic: >HKU15-cand-5600-5679
  source 1..80: mol_type = other DNA
ctgtcgttcagggcaggaaatacccatctgttattgaaacaaatggcgggtttacaatttgtaaagaacacaacttctat

SEQ ID NO: 5756 - DNA, 80 bp, synthetic construct
  misc_feature 1..80: note = Synthetic: >HKU15-cand-5680-5759
  source 1..80: mol_type = other DNA
tgcaaggactgctctctacaaacacccggcactttcatcccgacagaagctattgagtcgctctcacgagctaccaggct

SEQ ID NO: 5757 - DNA, 80 bp, synthetic construct
  misc_feature 1..80: note = Synthetic: >HKU15-cand-5760-5839
  source 1..80: mol_type = other DNA
tagtgtcaaaccaacagcaccagcattcttacttgctagagatgttgagtgccaaactgatgttgtcgttgctcgcgcaa

SEQ ID NO: 5758 - DNA, 80 bp, synthetic construct
  misc_feature 1..80: note = Synthetic: >HKU15-cand-5840-5919
  source 1..80: mol_type = other DNA
tgcataaccaaaatgcgcatgtgtgcatttcaaaatactctgatatccgtaccgttgaccaactacttaagcctactcca

SEQ ID NO: 5759 - DNA, 80 bp, synthetic construct
  misc_feature 1..80: note = Synthetic: >HKU15-cand-5920-5999
  source 1..80: mol_type = other DNA
ctgttttcatacactcccgatgttatcatcgcggcagactttgacaacagaggtagtcttaagacagctaaagaattagc

SEQ ID NO: 5760 - DNA, 80 bp, synthetic construct
  misc_feature 1..80: note = Synthetic: >HKU15-cand-6080-6159
  source 1..80: mol_type = other DNA
aagttgcttctcgtattgagaagtattacccagttgcaaagatcacacccacaggtgacatctttacagacattaagcaa

SEQ ID NO: 5761 - DNA, 80 bp, synthetic construct
  misc_feature 1..80: note = Synthetic: >HKU15-cand-6160-6239
  source 1..80: mol_type = other DNA
gcgaccaatggccaagctagtgactctgctattaatgcagctgttctggctgtccagcgcggtcttgattttacaattga

SEQ ID NO: 5762 - DNA, 80 bp, synthetic construct
  misc_feature 1..80: note = Synthetic: >HKU15-cand-6240-6319
  source 1..80: mol_type = other DNA
caaccctaacaacatattaccacattacgcctttgacttttcaaccctcaatgcagaagaccagtctaccattttggaga

SEQ ID NO: 5763 - DNA, 80 bp, synthetic construct
  misc_feature 1..80: note = Synthetic: >HKU15-cand-6320-6399
  source 1..80: mol_type = other DNA
gtggttgtgctaaaggcaatctcaagggcactaatgttggtgttgttctttcagctagccttgttacacgtcttagtcag

SEQ ID NO: 5764 - DNA, 80 bp, synthetic construct
  misc_feature 1..80: note = Synthetic: >HKU15-cand-6400-6479
  source 1..80: mol_type = other DNA
caggctatacgtgtgattgctaatgctgcttcacgtaatggtgttacatgcgctgttactccatctacacttgttatgcg

SEQ ID NO: 5765 - DNA, 80 bp, synthetic construct
  misc_feature 1..80: note = Synthetic: >HKU2-cand-5460-5539
  source 1..80: mol_type = other DNA
atgttgctggttttgttcaccttctttattatatagagggtgttgacaaaggcgctaagggtgatgttgagagcacatta

SEQ ID NO: 5766 - DNA, 80 bp, synthetic construct
  misc_feature 1..80: note = Synthetic: >HKU2-cand-5540-5619
  source 1..80: mol_type = other DNA
agtaagcttgataagtatattgtatctagtggttctgttactgttgaacgttctacattgtgcgatcgttgtaatagtac

SEQ ID NO: 5767 - DNA, 80 bp, synthetic construct
  misc_feature 1..80: note = Synthetic: >HKU2-cand-5620-5699
  source 1..80: mol_type = other DNA
agttaaaactgttacaggtgctatagctgaggcctctgtcattcttaatggtcacactgatggacactgtcctcataatt

SEQ ID NO: 5768 - DNA, 80 bp, synthetic construct
  misc_feature 1..80: note = Synthetic: >HKU2-cand-5700-5779
  source 1..80: mol_type = other DNA
ttgagtggcgtgtgcaagttatcggtgttaaaggtgacatcattttactacacagcggtagcttattaaacggaccttat

SEQ ID NO: 5769 - DNA, 80 bp, synthetic construct
  misc_feature 1..80: note = Synthetic: >HKU2-cand-5780-5859
  source 1..80: mol_type = other DNA
gtgtatggtgatgcttatgtggcttttagtggtaatactgataatggccattacacagtttttgataataaattatctaa

SEQ ID NO: 5770 - DNA, 80 bp, synthetic construct
  misc_feature 1..80: note = Synthetic: >HKU2-cand-5860-5939
  source 1..80: mol_type = other DNA
gatgtatgatggtattaaatgtgttaaaaccacacttgacacacttgtggcttcctcagttgttatccgtaatggtagtt

SEQ ID NO: 5771 - DNA, 80 bp, synthetic construct
  misc_feature 1..80: note = Synthetic: >HKU2-cand-5940-6019
  source 1..80: mol_type = other DNA
acgctgttaaaacagagcatgtgcccctgattaagaagctagatgattcagctgaaaagtttttcaatgttggtgacatt

SEQ ID NO: 5772 - DNA, 80 bp, synthetic construct
  misc_feature 1..80: note = Synthetic: >HKU2-cand-6020-6099
  source 1..80: mol_type = other DNA
gttgcacataacattgcttactttttcgtttggttgctaactacacttagcactctttataggtgctggcgtggtggtaa

SEQ ID NO: 5773 - DNA, 80 bp, synthetic construct
  misc_feature 1..80: note = Synthetic: >HKU2-cand-6100-6179
  source 1..80: mol_type = other DNA
ttttaaattattgtctagtatacctgaacgtagtggtatagtgttacgcaggagttttaaatataattttagagctttgc

SEQ ID NO: 5774 - DNA, 80 bp, synthetic construct
  misc_feature 1..80: note = Synthetic: >HKU2-cand-6180-6259
  source 1..80: mol_type = other DNA
gttctaatgtggctagtaaacagaagtattgtcttatgtttgctaagttgctattactactgtatactatatatgctatg

SEQ ID NO: 5775 - DNA, 80 bp, synthetic construct
  misc_feature 1..80: note = Synthetic: >HKU2-cand-6260-6339
  source 1..80: mol_type = other DNA
ttgtttatcttagtcaggtttagcttctttaatgattatatttgtggcagtactgttagaggttacgctagttccgactt

SEQ ID NO: 5776 - DNA, 80 bp, synthetic construct
  misc_feature 1..80: note = Synthetic: >HKU2-cand-6340-6419
  source 1..80: mol_type = other DNA
tgacaagagtaagttttgcaatggatctttggtttgtaagacttgtctttttggctatcaggaacttagtgaatttcaac

SEQ ID NO: 5777 - DNA, 80 bp, synthetic construct
  misc_feature 1..80: note = Synthetic: >HKU2-cand-6420-6499
  source 1..80: mol_type = other DNA
atgtaggtgtggtctggagctatgtgcgtgaacctctttttgctagtgttttaccactatgttactttgctgttattgca

SEQ ID NO: 5778 - DNA, 80 bp, synthetic construct
  misc_feature 1..80: note = Synthetic: >HKU2-cand-6500-6579
  source 1..80: mol_type = other DNA
atttttggtggtgttgttgagcggtttgcattatgttattttgctgcacaatttattaataatgtgctcagctttttaaa

SEQ ID NO: 5779 - DNA, 80 bp, synthetic construct
  misc_feature 1..80: note = Synthetic: >HKU2-cand-6580-6659
  source 1..80: mol_type = other DNA
gttgcaggactccttttggctagttcaacttgtcccttttgacatatttggcgatgagatacttgttatgtttttgtcat

SEQ ID NO: 5780 - DNA, 80 bp, synthetic construct
  misc_feature 1..80: note = Synthetic: >HKU2-cand-6660-6739
  source 1..80: mol_type = other DNA
ataaggctatttgtttctttaagcatgttgtttttggttgtgacaaacctagttgcgttgcatgctgtaagagtgctaaa

SEQ ID NO: 5781 - DNA, 80 bp, synthetic construct
  misc_feature 1..80: note = Synthetic: >HKU31-cand-23300-23379
  source 1..80: mol_type = other DNA
aactattatttagggcgtaaatcatataaacctaaaacagatgagggcgatattcaaatggtttatgtaataacgcctaa

SEQ ID NO: 5782 - DNA, 80 bp, synthetic construct
  misc_feature 1..80: note = Synthetic: >HKU31-cand-23380-23459
  source 1..80: mol_type = other DNA
atatgataaaggccctgatactgtatgccctcttaaagatatgagtgctgccacttctaatttagatggcttgttaggac

SEQ ID NO: 5783 - DNA, 80 bp, synthetic construct
  misc_feature 1..80: note = Synthetic: >HKU31-cand-23460-23539
  source 1..80: mol_type = other DNA
agtgcatagattatgacattcatggagtagtaggccgtggtgtttttcaagtttgcaattccacaggaattgctagtcaa

SEQ ID NO: 5784 - DNA, 80 bp, synthetic construct
  misc_feature 1..80: note = Synthetic: >HKU31-cand-23540-23619
  source 1..80: mol_type = other DNA
atttttgtctatgacggatttggtaatatcataggctttcattctaaaaatggtacatactattgtatggcaccatgtgt

SEQ ID NO: 5785 - DNA, 80 bp, synthetic construct
  misc_feature 1..80: note = Synthetic: >HKU31-cand-23620-23699
  source 1..80: mol_type = other DNA
atcagtacctgtttctgtaatttatgataaaagcagtgactttcatgctacactttatagtagcgttgaatgcaatcata

SEQ ID NO: 5786 - DNA, 80 bp, synthetic construct
  misc_feature 1..80: note = Synthetic: >HKU31-cand-23700-23779
  source 1..80: mol_type = other DNA
taaaatcagttgcaacagtttttagtcgtcaaactgcgactaagcttagagcgagtgataacggccttttacaaactgct

SEQ ID NO: 5787 - DNA, 80 bp, synthetic construct
  misc_feature 1..80: note = Synthetic: >HKU31-cand-23780-23859
  source 1..80: mol_type = other DNA
gttggctgtgttattggattccataacacaagtgacactgttgaagattgtaccttacctttaggacaatctctctgtgc

SEQ ID NO: 5788 - DNA, 80 bp, synthetic construct
  misc_feature 1..80: note = Synthetic: >HKU31-cand-23860-23939
  source 1..80: mol_type = other DNA
aaaaccaccttctttttccagtcgtaataccaagtgctaataacacatttgctttagtgcatatgttgttccaaaatcca

SEQ ID NO: 5789 - DNA, 80 bp, synthetic construct
  misc_feature 1..80: note = Synthetic: >HKU31-cand-23940-24019
  source 1..80: mol_type = other DNA
ttaaaagttagtgttctcaattcaactgagtttcaggtttcagtacctcagaattttagttttggtgttacagaagaatt

SEQ ID NO: 5790 - DNA, 80 bp, synthetic construct
  misc_feature 1..80: note = Synthetic: >HKU31-cand-24020-24099
  source 1..80: mol_type = other DNA
tatagaaacatccatacaaaaggttactgttgattgtaagcagtatgtttgtaatggatttgaacgatgtgaacaattgt

SEQ ID NO: 5791 - DNA, 80 bp, synthetic construct
  misc_feature 1..80: note = Synthetic: >HKU31-cand-24100-24179
  source 1..80: mol_type = other DNA
tggtgcagtatggccaattttgttctaaaattaatcaagcattacatggtgttaatttgcgccaggatgatgctactaag

SEQ ID NO: 5792 - DNA, 80 bp, synthetic construct
  misc_feature 1..80: note = Synthetic: >HKU31-cand-24180-24259
  source 1..80: mol_type = other DNA
agtctttttgaggatattaaagtacctcaatcagctcccttaatggcaagtctcactggtgattataatttatcattatt

SEQ ID NO: 5793 - DNA, 80 bp, synthetic construct
  misc_feature 1..80: note = Synthetic: >HKU31-cand-24260-24339
  source 1..80: mol_type = other DNA
tgaggcacctaatattggcactggtggcaatggtaattaccgcagtgctttagaagatctgctttttgataaggttacat

SEQ ID NO: 5794 - DNA, 80 bp, synthetic construct
  misc_feature 1..80: note = Synthetic: >HKU31-cand-24340-24419
  source 1..80: mol_type = other DNA
tatcagatccaggttatatgaaaggatatgacgagtgcatgaaaaaaggaccacctagtgctagggacctaatttgtgca

SEQ ID NO: 5795 - DNA, 80 bp, synthetic construct
  misc_feature 1..80: note = Synthetic: >HKU31-cand-24420-24499
  source 1..80: mol_type = other DNA
caatatgtatctggttataaagttttaccgcctttgtatgatgctaatatggaggctatgtatactgcttctttaactgg

SEQ ID NO: 5796 - DNA, 80 bp, synthetic construct
  misc_feature 1..80: note = Synthetic: >HKU31-cand-24500-24579
  source 1..80: mol_type = other DNA
tagtatagcaggttctttttggactggaggactatcgtctgctgctgcactaccatttgcacagtcaatgttttatcgta

SEQ ID NO: 5797 - DNA, 80 bp, synthetic construct
  misc_feature 1..80: note = Synthetic: >HKU4-cand-25050-25129
  source 1..80: mol_type = other DNA
ttatggtctctgtaacaataacaaccctcctttgtgcattgcaccaattgacgggtatttcattactaatcagactacca

SEQ ID NO: 5798 - DNA, 80 bp, synthetic construct
  misc_feature 1..80: note = Synthetic: >HKU4-cand-25130-25209
  source 1..80: mol_type = other DNA
cttatagtgttgataccgaatggtattacactggtagttctttttataaacctgaacctataactcaggctaattcacgt

SEQ ID NO: 5799 - DNA, 80 bp, synthetic construct
  misc_feature 1..80: note = Synthetic: >HKU4-cand-25210-25289
  source 1..80: mol_type = other DNA
tatgtttctagtgatgtgaaatttgaaaaacttgagaataacttaccacctccactccttgagaattctactgatgtgga

SEQ ID NO: 5800 - DNA, 80 bp, synthetic construct
  misc_feature 1..80: note = Synthetic: >HKU4-cand-25290-25369
  source 1..80: mol_type = other DNA
ttttaaggatgaattggaagaatttttcaagaatgttacctcgcatggtcctaactttgcagagatatctaagattaaca

SEQ ID NO: 5801 - DNA, 80 bp, synthetic construct
  misc_feature 1..80: note = Synthetic: >HKU4-cand-25370-25449
  source 1..80: mol_type = other DNA
ctacactgcttgacctttcagatgagatggcaatattgcaggaagttgttaaacaattaaatgattcctacattgatctt

SEQ ID NO: 5802 - DNA, 80 bp, synthetic construct
  misc_feature 1..80: note = Synthetic: >HKU4-cand-25450-25529
  source 1..80: mol_type = other DNA
aaagaattggggaattatacttattataacaagtggccttggtatatatggctaggttttattgcaggccttgttgcctt

SEQ ID NO: 5803 - DNA, 80 bp, synthetic construct
  misc_feature 1..80: note = Synthetic: >HKU4-cand-25530-25609
  source 1..80: mol_type = other DNA
attattgtgtgtctttttccttctatgctgtactggttgtggtactagctgcttgggaaaaatgaagtgtaagaattgtt

SEQ ID NO: 5804 - DNA, 80 bp, synthetic construct
  misc_feature 1..80: note = Synthetic: >HKU4-cand-25610-25689
  source 1..80: mol_type = other DNA
gtgattcttatgaagaatatgatgtcgaaaagattcatgttcattaagattttaacgaacttttattagcagtatggttt

SEQ ID NO: 5805 - DNA, 80 bp, synthetic construct
  misc_feature 1..80: note = Synthetic: >HKU4-cand-25690-25769
  source 1..80: mol_type = other DNA
cttttaatgctactgctattcttcttttattagttgctaatgctttttctaaacctttatatgtccctgagcattgtggt

SEQ ID NO: 5806 - DNA, 80 bp, synthetic construct
  misc_feature 1..80: note = Synthetic: >HKU4-cand-25770-25849
  source 1..80: mol_type = other DNA
ggcatgtctggcactctgtttcaggcttgtattagacaaactatggttgatacaacaggtatgtacaccaattcagctat

SEQ ID NO: 5807 - DNA, 80 bp, synthetic construct
  misc_feature 1..80: note = Synthetic: >HKU4-cand-25850-25929
  source 1..80: mol_type = other DNA
gtcacatgatggtgttacaataccatttgatagagatggcattgtacatgaagatcattacactgaaacaaaccctacac

SEQ ID NO: 5808 - DNA, 80 bp, synthetic construct
  misc_feature 1..80: note = Synthetic: >HKU4-cand-25930-26009
  source 1..80: mol_type = other DNA
cactttctgatgttgggttttccgtataattgattttaacgaacttatggactacgtctctttgcttaaccaattttggc

SEQ ID NO: 5809 - DNA, 80 bp, synthetic construct
  misc_feature 1..80: note = Synthetic: >HKU4-cand-26010-26089
  source 1..80: mol_type = other DNA
agaagcaaattaagtcttataaagagactcctagtcagtatcattacctgtatccacccaggtttttctataaacctgtt

SEQ ID NO: 5810 - DNA, 80 bp, synthetic construct
  misc_feature 1..80: note = Synthetic: >HKU4-cand-26090-26169
  source 1..80: mol_type = other DNA
ttaggtaatttacagcaccctaccaagtggtgttgtactattaaattttatgagtatagtgctcaggctactgagtgtac

SEQ ID NO: 5811 - DNA, 80 bp, synthetic construct
  misc_feature 1..80: note = Synthetic: >HKU4-cand-26170-26249
  source 1..80: mol_type = other DNA
taaagcatcagcaaaacaagatgcagctagacttatctgtgaacagttacaagctgctggactactcaatggaatggagc

SEQ ID NO: 5812 - DNA, 80 bp, synthetic construct
  misc_feature 1..80: note = Synthetic: >HKU4-cand-26230-26309
  source 1..80: mol_type = other DNA
actactcaatggaatggagctccgattccgtagttctgcctccgacatcttcggacaaaaccgttatgatgccagcaaaa

SEQ ID NO: 5813 - DNA, 80 bp, synthetic construct
  misc_feature 1..80: note = Synthetic: >HKU9-cand-20650-20729
  source 1..80: mol_type = other DNA
aatgttagtggtgataatacatctaaagagggatttttcacttatttgacaggctttataaggagcaagttggctctagg

SEQ ID NO: 5814 - DNA, 80 bp, synthetic construct
  misc_feature 1..80: note = Synthetic: >HKU9-cand-20730-20809
  source 1..80: mol_type = other DNA
aggcagtgttgctattaagataactgagcactcctggagtgcagatttgtatgcaatgatgggccattttaattggtgga

SEQ ID NO: 5815 - DNA, 80 bp, synthetic construct
  misc_feature 1..80: note = Synthetic: >HKU9-cand-20810-20889
  source 1..80: mol_type = other DNA
catgtttttgcacagcggttaatagttcatcatctgaggcttttcttataggtgttaattacctaggtactggtgcgttg

SEQ ID NO: 5816 - DNA, 80 bp, synthetic construct
  misc_feature 1..80: note = Synthetic: >HKU9-cand-20890-20969
  source 1..80: mol_type = other DNA
ttggatggtgaacaaatgcatgctaattacgtattttggcgtaatagtactataatgcaattatcatcatatagtttgta

SEQ ID NO: 5817 - DNA, 80 bp, synthetic construct
  misc_feature 1..80: note = Synthetic: >HKU9-cand-20970-21049
  source 1..80: mol_type = other DNA
tgatgtgcagaaatttcatttgcgcaccaaaggtacgcctgttatggctttaaaagaagatcaattgaacgaactagttt

SEQ ID NO: 5818 - DNA, 80 bp, synthetic construct
  misc_feature 1..80: note = Synthetic: >HKU9-cand-21050-21129
  source 1..80: mol_type = other DNA
taaatttaatacgtacaggtcgtttaattgttcgtgatgttggtgatattgctaatattgccactagtacatgcagcgtc

SEQ ID NO: 5819 - DNA, 80 bp, synthetic construct
  misc_feature 1..80: note = Synthetic: >HKU9-cand-21130-21209
  source 1..80: mol_type = other DNA
tagaccttcttgtttcagtccgagccttactgtgacacctttacagtatttagaacataatattacttacgtttcttttt

SEQ ID NO: 5820 - DNA, 80 bp, synthetic construct
  misc_feature 1..80: note = Synthetic: >HKU9-cand-21210-21289
  source 1..80: mol_type = other DNA
atgttagtaaagtgacacgtttattgccggatccttatgtagcgtattccggtcagactatacgtcaaactttgtatatt

SEQ ID NO: 5821 - DNA, 80 bp, synthetic construct
  misc_feature 1..80: note = Synthetic: >HKU9-cand-21290-21369
  source 1..80: mol_type = other DNA
gcagacacgtctaatactactgtgtatcccgtaacgccacatgcggtggatgctaacaaaacgagtatttataatacctc

SEQ ID NO: 5822 - DNA, 80 bp, synthetic construct
  misc_feature 1..80: note = Synthetic: >HKU9-cand-21370-21449
  source 1..80: mol_type = other DNA
cattttgcctgtaaatgacggtttctttgtgcatacttatatgtataagaaacctcaaccgtctaatatgtattgtcaag

SEQ ID NO: 5823 - DNA, 80 bp, synthetic construct
  misc_feature 1..80: note = Synthetic: >HKU9-cand-21450-21529
  source 1..80: mol_type = other DNA
aaccatttggtgtggcctttggcactacatttgaacaggaccgtatagctattgttattatagcacctgataataaaggt

SEQ ID NO: 5824 - DNA, 80 bp, synthetic construct
  misc_feature 1..80: note = Synthetic: >HKU9-cand-21530-21609
  source 1..80: mol_type = other DNA
tcttggactgctgcgacgaaacggaataaaactaatgttcatatattagtctgtagtaatgcaaccctatgtgcataccc

SEQ ID NO: 5825 - DNA, 80 bp, synthetic construct
  misc_feature 1..80: note = Synthetic: >HKU9-cand-21610-21689
  source 1..80: mol_type = other DNA
tgcatttaatcgatggggtcctgcgggtagcatttatgctagtgatgcttttgttgaccatggtaattcctgttttgtaa

SEQ ID NO: 5826 - DNA, 80 bp, synthetic construct
  misc_feature 1..80: note = Synthetic: >HKU9-cand-21690-21769
  source 1..80: mol_type = other DNA
acaacacttttaatatacctattaatacgtctcgtattaatttggcgtttaggtttaaggatggtaacctattgatgtac

SEQ ID NO: 5827 - DNA, 80 bp, synthetic construct
  misc_feature 1..80: note = Synthetic: >HKU9-cand-21770-21849
  source 1..80: mol_type = other DNA
cattctaggtggttgccaagttctgggcttaaacatggttttttaacggcagattaccctctacacttttttatgagtgt

SEQ ID NO: 5828 - DNA, 80 bp, synthetic construct
  misc_feature 1..80: note = Synthetic: >HKU9-cand-21850-21929
  source 1..80: mol_type = other DNA
gggtgttggtgctaatttgcctaatgcacagtttttccagtccgtagtgcgtaataatacggctcctgatacaggcgctg

SEQ ID NO: 5829 - DNA, 80 bp, synthetic construct
  misc_feature 1..80: note = Synthetic: >Lucheng19-cand-25590-25669
  source 1..80: mol_type = other DNA
ctttcaaccacttaactaatgttaccctcatttttaagagttttcaatgatgagggccttgttcttagcgttctattctg

SEQ ID NO: 5830 - DNA, 80 bp, synthetic construct
  misc_feature 1..80: note = Synthetic: >Lucheng19-cand-25670-25749
  source 1..80: mol_type = other DNA
gctactgtttataataatactgctactgttttcaatagccatgctaaaaacaatacaactagtaggtgtttgttgctctc

SEQ ID NO: 5831 - DNA, 80 bp, synthetic construct
  misc_feature 1..80: note = Synthetic: >Lucheng19-cand-25750-25829
  source 1..80: mol_type = other DNA
tcacaaataaggtcattgtgcttcctgttaagggtgtttatcacctttaccaagattattacaaaatagaaccattgcct

SEQ ID NO: 5832 - DNA, 80 bp, synthetic construct
  misc_feature 1..80: note = Synthetic: >Lucheng19-cand-25830-25909
  source 1..80: mol_type = other DNA
atgtttgaagtttgatcaactaaaatggtactcttttgtgaattcaataacactaccaccaacggctgtgaagcctgtgt

SEQ ID NO: 5833 - DNA, 80 bp, synthetic construct
  misc_feature 1..80: note = Synthetic: >Lucheng19-cand-25910-25989
  source 1..80: mol_type = other DNA
gaatcagggctgcacaggaaatggtgtcaccagtgccagcatcacttggcatttgctgaactggaactttagctggagtg

SEQ ID NO: 5834 - DNA, 80 bp, synthetic construct
  misc_feature 1..80: note = Synthetic: >Lucheng19-cand-25990-26069
  source 1..80: mol_type = other DNA
tcatactcactgtctttgtggcagttctgcagtatggcaatcttaagtacagcatgattctgtacatccttaaaatgatc

SEQ ID NO: 5835 - DNA, 80 bp, synthetic construct
  misc_feature 1..80: note = Synthetic: >Lucheng19-cand-26070-26149
  source 1..80: mol_type = other DNA
atcatgtggttgctatggcccattgtcatagcactaaccatttttgatgccattgaaaccttcaaacaagagcgctatgt

SEQ ID NO: 5836 - DNA, 80 bp, synthetic construct
  misc_feature 1..80: note = Synthetic: >Lucheng19-cand-26150-26229
  source 1..80: mol_type = other DNA
catgttcggattcagcattgcccttggtgtggtaacgctcatactctggatcatgtacttcgtaaacagctttaggcttt

SEQ ID NO: 5837 - DNA, 80 bp, synthetic construct
  misc_feature 1..80: note = Synthetic: >Lucheng19-cand-26230-26309
  source 1..80: mol_type = other DNA
acagacgtactaactcatggtggagcttcaacccagagacaaatgccataatctgtgtgtcagtaatggggagaaacata

SEQ ID NO: 5838 - DNA, 80 bp, synthetic construct
  misc_feature 1..80: note = Synthetic: >Lucheng19-cand-26310-26389
  source 1..80: mol_type = other DNA
accacgccaacaccagtcagccccacaggaatcacactaacgctgctctcaggaacgctctatgttgaaggacaacgcgc

SEQ ID NO: 5839 - DNA, 80 bp, synthetic construct
  misc_feature 1..80: note = Synthetic: >Lucheng19-cand-26390-26469
  source 1..80: mol_type = other DNA
tgccacaggagtgaatcttgacaatctccctaattacgttactgtagcaaaacctggagtaactatagtctaccaccgtg

SEQ ID NO: 5840 - DNA, 80 bp, synthetic construct
  misc_feature 1..80: note = Synthetic: >Lucheng19-cand-26470-26549
  source 1..80: mol_type = other DNA
tgggcaaatcaataagagtctcaacagcaacgggatggatgtactatgtcaagagtaaagcaggagactactcagcctac

SEQ ID NO: 5841 - DNA, 80 bp, synthetic construct
  misc_feature 1..80: note = Synthetic: >Lucheng19-cand-26550-26629
  source 1..80: mol_type = other DNA
tccagtggtggcaacctatcagatcaggaacaactgcttcacatggtctaaactaaaccaagatgattttggttttcctt

SEQ ID NO: 5842 - DNA, 80 bp, synthetic construct
  misc_feature 1..80: note = Synthetic: >Lucheng19-cand-26630-26709
  source 1..80: mol_type = other DNA
ctactaataacagcagccagtgctattactgacactaaaactaattgtagctttagtttcagctcactgcttgtagatgg

SEQ ID NO: 5843 - DNA, 80 bp, synthetic construct
  misc_feature 1..80: note = Synthetic: >Lucheng19-cand-26710-26789
  source 1..80: mol_type = other DNA
tactgtcaagtttgacacagtccaccggacaacttttgccaattgctacttcaattgggaagactggttcagttgcaaag

SEQ ID NO: 5844 - DNA, 80 bp, synthetic construct
  misc_feature 1..80: note = Synthetic: >Lucheng19-cand-26790-26869
  source 1..80: mol_type = other DNA
gttcctcagactgtgacatgatcacaccaaccctcagtgcttttatgccaaacaacacgaatgaaatgttccagaagtgc

SEQ ID NO: 5845 - DNA, 80 bp, synthetic construct
  misc_feature 1..80: note = Synthetic: >NL63-cand-25920-25999
  source 1..80: mol_type = other DNA
gtgggtcagttgcctaaatatgtaatagttgctacacctagtaccacaattgtttgtgaccgtgttggtcgctctgttaa

SEQ ID NO: 5846 - DNA, 80 bp, synthetic construct
  misc_feature 1..80: note = Synthetic: >NL63-cand-26000-26079
  source 1..80: mol_type = other DNA
tgaaacaagccagactggttgggcattctacgtccgtgctaaacatggtgatttttctggtgttgcctctcaggagggtg

SEQ ID NO: 5847 - DNA, 80 bp, synthetic construct
  misc_feature 1..80: note = Synthetic: >NL63-cand-26080-26159
  source 1..80: mol_type = other DNA
ttttgtcagaaagagagaagttgcttcatttaatctaaactaaacaaaatggctagtgtaaattgggccgatgacagagc

SEQ ID NO: 5848 - DNA, 80 bp, synthetic construct
  misc_feature 1..80: note = Synthetic: >NL63-cand-26160-26239
  source 1..80: mol_type = other DNA
tgctaggaagaaatttcctcctccttcattttacatgcctcttttggttagttctgataaggcaccatatagggtcattc

SEQ ID NO: 5849 - DNA, 80 bp, synthetic construct
  misc_feature 1..80: note = Synthetic: >NL63-cand-26240-26319
  source 1..80: mol_type = other DNA
ccaggaatcttgtccctattggtaagggtaataaagatgagcagattggttattggaatgttcaagagcgttggcgtatg

SEQ ID NO: 5850 - DNA, 80 bp, synthetic construct
  misc_feature 1..80: note = Synthetic: >NL63-cand-26320-26399
  source 1..80: mol_type = other DNA
cgcagggggcaacgtgttgatttgcctcctaaagttcatttttattacctaggtactggacctcataaggaccttaaatt

SEQ ID NO: 5851 - DNA, 80 bp, synthetic construct
  misc_feature 1..80: note = Synthetic: >NL63-cand-26400-26479
  source 1..80: mol_type = other DNA
cagacaacgttctgatggtgttgtttgggttgctaaggaaggtgctaaaactgttaataccagtcttggtaatcgcaaac

SEQ ID NO: 5852 - DNA, 80 bp, synthetic construct
  misc_feature 1..80: note = Synthetic: >NL63-cand-26480-26559
  source 1..80: mol_type = other DNA
gtaatcagaaacctttggaaccaaagttctctattgctttgcctccagagctctctgttgttgagtttgaggatcgctct

SEQ ID NO: 5853 - DNA, 80 bp, synthetic construct
  misc_feature 1..80: note = Synthetic: >NL63-cand-26560-26639
  source 1..80: mol_type = other DNA
aataactcatctcgtgctagcagtcgttcttcaactcgtaacaactcacgagactcttctcgtagcacttcaagacaaca

SEQ ID NO: 5854 - DNA, 80 bp, synthetic construct
  misc_feature 1..80: note = Synthetic: >NL63-cand-26640-26719
  source 1..80: mol_type = other DNA
gtctcgcactcgttctgattctaaccagtcttcttcagatcttgttgctgctgttactttggctttaaagaacttaggtt

SEQ ID NO: 5855 - DNA, 80 bp, synthetic construct
  misc_feature 1..80: note = Synthetic: >NL63-cand-26720-26799
  source 1..80: mol_type = other DNA
ttgataaccagtcgaagtcacctagttcttctggtacttccactcctaagaaacctaataagcctctttctcaacccagg

SEQ ID NO: 5856 - DNA, 80 bp, synthetic construct
  misc_feature 1..80: note = Synthetic: >NL63-cand-26800-26879
  source 1..80: mol_type = other DNA
gctgataagccttctcagttgaagaaacctcgttggaagcgtgttcctaccagagaggaaaatgttattcagtgctttgg

SEQ ID NO: 5857 - DNA, 80 bp, synthetic construct
  misc_feature 1..80: note = Synthetic: >NL63-cand-26880-26959
  source 1..80: mol_type = other DNA
tcctcgtgattttaatcacaatatgggggattcagatcttgttcagaatggtgttgatgccaaaggttttccacagcttg

SEQ ID NO: 5858 - DNA, 80 bp, synthetic construct
  misc_feature 1..80: note = Synthetic: >NL63-cand-26960-27039
  source 1..80: mol_type = other DNA
ctgaattgattcctaatcaggctgcgttattctttgatagtgaggttagcactgatgaagtgggtgataatgttcagatt

SEQ ID NO: 5859 - DNA, 80 bp, synthetic construct
  misc_feature 1..80: note = Synthetic: >NL63-cand-27040-27119
  source 1..80: mol_type = other DNA
acctacacctacaaaatgcttgtagctaaggataataagaaccttcctaagttcattgagcagattagtgcttttactaa

SEQ ID NO: 5860 - DNA, 80 bp, synthetic construct
  misc_feature 1..80: note = Synthetic: >NL63-cand-27120-27199
  source 1..80: mol_type = other DNA
acccagttctatcaaagaaatgcagtcacaatcatctcatgttgttcagaacacagtacttaatgcttctattccagaat

SEQ ID NO: 5861 - DNA, 80 bp, synthetic construct
  misc_feature 1..80: note = Synthetic: >SARSCoV-cand-7490-7569
  source 1..80: mol_type = other DNA
aagagatctttctatgtctatgcaaatggaggccgtggcttctgcaagactcacaattggaattgtctcaattgtgacac

SEQ ID NO: 5862 - DNA, 80 bp, synthetic construct
  misc_feature 1..80: note = Synthetic: >SARSCoV-cand-7570-7649
  source 1..80: mol_type = other DNA
attttgcactggtagtacattcattagtgatgaagttgctcgtgatttgtcactccagtttaaaagaccaatcaacccta

SEQ ID NO: 5863 - DNA, 80 bp, synthetic construct
  misc_feature 1..80: note = Synthetic: >SARSCoV-cand-7650-7729
  source 1..80: mol_type = other DNA
ctgaccagtcatcgtatattgttgatagtgttgctgtgaaaaatggcgcgcttcacctctactttgacaaggctggtcaa

SEQ ID NO: 5864 - DNA, 80 bp, synthetic construct
  misc_feature 1..80: note = Synthetic: >SARSCoV-cand-7730-7809
  source 1..80: mol_type = other DNA
aagacctatgagagacatccgctctcccattttgtcaatttagacaatttgagagctaacaacactaaaggttcactgcc

SEQ ID NO: 5865 - DNA, 80 bp, synthetic construct
  misc_feature 1..80: note = Synthetic: >SARSCoV-cand-7810-7889
  source 1..80: mol_type = other DNA
tattaatgtcatagtttttgatggcaagtccaaatgcgacgagtctgcttctaagtctgcttctgtgtactacagtcagc

SEQ ID NO: 5866 - DNA, 80 bp, synthetic construct
  misc_feature 1..80: note = Synthetic: >SARSCoV-cand-7890-7969
  source 1..80: mol_type = other DNA
tgatgtgccaacctattctgttgcttgaccaagctcttgtatcagacgttggagatagtactgaagtttccgttaagatg

SEQ ID NO: 5867 - DNA, 80 bp, synthetic construct
  misc_feature 1..80: note = Synthetic: >SARSCoV-cand-7970-8049
  source 1..80: mol_type = other DNA
tttgatgcttatgtcgacaccttttcagcaacttttagtgttcctatggaaaaacttaaggcacttgttgctacagctca

SEQ ID NO: 5868 - DNA, 80 bp, synthetic construct
  misc_feature 1..80: note = Synthetic: >SARSCoV-cand-8050-8129
  source 1..80: mol_type = other DNA
cagcgagttagcaaagggtgtagctttagatggtgtcctttctacattcgtgtcagctgcccgacaaggtgttgttgata

SEQ ID NO: 5869 - DNA, 80 bp, synthetic construct
  misc_feature 1..80: note = Synthetic: >SARSCoV-cand-8130-8209
  source 1..80: mol_type = other DNA
ccgatgttgacacaaaggatgttattgaatgtctcaaactttcacatcactctgacttagaagtgacaggtgacagttgt

SEQ ID NO: 5870 - DNA, 80 bp, synthetic construct
  misc_feature 1..80: note = Synthetic: >SARSCoV-cand-8210-8289
  source 1..80: mol_type = other DNA
aacaatttcatgctcacctataataaggttgaaaacatgacgcccagagatcttggcgcatgtattgactgtaatgcaag

SEQ ID NO: 5871 - DNA, 80 bp, synthetic construct
  misc_feature 1..80: note = Synthetic: >SARSCoV-cand-8290-8369
  source 1..80: mol_type = other DNA
gcatatcaatgcccaagtagcaaaaagtcacaatgtttcactcatctggaatgtaaaagactacatgtctttatctgaac

SEQ ID NO: 5872 - DNA, 80 bp, synthetic construct
  misc_feature 1..80: note = Synthetic: >SARSCoV-cand-8370-8449
  source 1..80: mol_type = other DNA
agctgcgtaaacaaattcgtagtgctgccaagaagaacaacataccttttagactaacttgtgctacaactagacaggtt

SEQ ID NO: 5873 - DNA, 80 bp, synthetic construct
  misc_feature 1..80: note = Synthetic: >SARSCoV-cand-8450-8529
  source 1..80: mol_type = other DNA
gtcaatgtcataactactaaaatctcactcaagggtggtaagattgttagtacttgttttaaacttatgcttaaggccac

SEQ ID NO: 5874 - DNA, 80 bp, synthetic construct
  misc_feature 1..80: note = Synthetic: >SARSCoV-cand-8530-8609
  source 1..80: mol_type = other DNA
attattgtgcgttcttgctgcattggtttgttatatcgttatgccagtacatacattgtcaatccatgatggttacacaa

SEQ ID NO: 5875 - DNA, 80 bp, synthetic construct
  misc_feature 1..80: note = Synthetic: >SARSCoV-cand-8610-8689
  source 1..80: mol_type = other DNA
atgaaatcattggttacaaagccattcaggatggtgtcactcgtgacatcatttctactgatgattgttttgcaaataaa

SEQ ID NO: 5876 - DNA, 80 bp, synthetic construct
  misc_feature 1..80: note = Synthetic: >SARSCoV-cand-8690-8769
  source 1..80: mol_type = other DNA
catgctggttttgacgcatggtttagccagcgtggtggttcatacaaaaatgacaaaagctgccctgtagtagctgctat

SEQ ID NO: 5877 - DNA, 80 bp, synthetic construct
  misc_feature 1..80: note = Synthetic: >SARSCoV-cand-10050-10129
  source 1..80: mol_type = other DNA
cctgtggaactacaactcttaatggattgtggttggatgacacagtatactgtccaagacatgtcatttgcacagcagaa

SEQ ID NO: 5878 - DNA, 80 bp, synthetic construct
  misc_feature 1..80: note = Synthetic: >SARSCoV-cand-10130-10209
  source 1..80: mol_type = other DNA
gacatgcttaatcctaactatgaagatctgctcattcgcaaatccaaccatagctttcttgttcaggctggcaatgttca

SEQ ID NO: 5879 - DNA, 80 bp, synthetic construct
  misc_feature 1..80: note = Synthetic: >SARSCoV-cand-10210-10289
  source 1..80: mol_type = other DNA
acttcgtgttattggccattctatgcaaaattgtctgcttaggcttaaagttgatacttctaaccctaagacacccaagt

SEQ ID NO: 5880 - DNA, 80 bp, synthetic construct
  misc_feature 1..80: note = Synthetic: >SARSCoV-cand-10290-10369
  source 1..80: mol_type = other DNA
ataaatttgtccgtatccaacctggtcaaacattttcagttctagcatgctacaatggttcaccatctggtgtttatcag

SEQ ID NO: 5881 - DNA, 80 bp, synthetic construct
  misc_feature 1..80: note = Synthetic: >SARSCoV-cand-10370-10449
  source 1..80: mol_type = other DNA
tgtgccatgagacctaatcataccattaaaggttctttccttaatggatcatgtggtagtgttggttttaacattgatta

SEQ ID NO: 5882 - DNA, 80 bp, synthetic construct
  misc_feature 1..80: note = Synthetic: >SARSCoV-cand-10450-10529
  source 1..80: mol_type = other DNA
tgattgcgtgtctttctgctatatgcatcatatggagcttccaacaggagtacacgctggtactgacttagaaggtaaat

SEQ ID NO: 5883 - DNA, 80 bp, synthetic construct
  misc_feature 1..80: note = Synthetic: >SARSCoV-cand-10530-10609
  source 1..80: mol_type = other DNA
tctatggtccatttgttgacagacaaactgcacaggctgcaggtacagacacaaccataacattaaatgttttggcatgg

SEQ ID NO: 5884 - DNA, 80 bp, synthetic construct
  misc_feature 1..80: note = Synthetic: >SARSCoV-cand-10610-10689
  source 1..80: mol_type = other DNA
ctgtatgctgctgttatcaatggtgataggtggtttcttaatagattcaccactactttgaatgactttaaccttgtggc

SEQ ID NO: 5885 - DNA, 80 bp, synthetic construct
  misc_feature 1..80: note = Synthetic: >SARSCoV-cand-10690-10769
  source 1..80: mol_type = other DNA
aatgaagtacaactatgaacctttgacacaagatcatgttgacatattgggacctctttctgctcaaacaggaattgccg

SEQ ID NO: 5886 - DNA, 80 bp, synthetic construct
  misc_feature 1..80: note = Synthetic: >SARSCoV-cand-10770-10849
  source 1..80: mol_type = other DNA
tcttagatatgtgtgctgctttgaaagagctgctgcagaatggtatgaatggtcgtactatccttggtagcactatttta

SEQ ID NO: 5887 - DNA, 80 bp, synthetic construct
  misc_feature 1..80: note = Synthetic: >SARSCoV-cand-10850-10929
  source 1..80: mol_type = other DNA
gaagatgagtttacaccatttgatgttgttagacaatgctctggtgttaccttccaaggtaagttcaagaaaattgttaa

SEQ ID NO: 5888 - DNA, 80 bp, synthetic construct
  misc_feature 1..80: note = Synthetic: >SARSCoV-cand-10930-11009
  source 1..80: mol_type = other DNA
gggcactcatcattggatgcttttaactttcttgacatcactattgattcttgttcaaagtacacagtggtcactgtttt

SEQ ID NO: 5889 - DNA, 80 bp, synthetic construct
  misc_feature 1..80: note = Synthetic: >SARSCoV-cand-11010-11089
  source 1..80: mol_type = other DNA
tctttgtttacgagaatgctttcttgccatttactcttggtattatggcaattgctgcatgtgctatgctgcttgttaag

SEQ ID NO: 5890 - DNA, 80 bp, synthetic construct
  misc_feature 1..80: note = Synthetic: >SARSCoV-cand-11090-11169
  source 1..80: mol_type = other DNA
cataagcacgcattcttgtgcttgtttctgttaccttctcttgcaacagttgcttactttaatatggtctacatgcctgc

SEQ ID NO: 5891 - DNA, 80 bp, synthetic construct
  misc_feature 1..80: note = Synthetic: >SARSCoV-cand-11170-11249
  source 1..80: mol_type = other DNA
tagctgggtgatgcgtatcatgacatggcttgaattggctgacactagcttgtctggttataggcttaaggattgtgtta

SEQ ID NO: 5892 - DNA, 80 bp, synthetic construct
  misc_feature 1..80: note = Synthetic: >SARSCoV-cand-11250-11329
  source 1..80: mol_type = other DNA
tgtatgcttcagctttagttttgcttattctcatgacagctcgcactgtttatgatgatgctgctagacgtgtttggaca

SEQ ID NO: 5893 - DNA, 80 bp, synthetic construct
  misc_feature 1..80: note = Synthetic: >Shrew-cand-18260-18339
  source 1..80: mol_type = other DNA
gttgtggtgtaaagataagaaagttagtactttctatcctacattacaaaatgattggttgtgtggctatagtatgccta

SEQ ID NO: 5894 - DNA, 80 bp, synthetic construct
  misc_feature 1..80: note = Synthetic: >Shrew-cand-18340-18419
  source 1..80: mol_type = other DNA
atgtttataaaatgcaaaatatgttgttggaacgttgtgatttgcctaattatggtgaaagattaaatttgcctggtcaa

SEQ ID NO: 5895 - DNA, 80 bp, synthetic construct
  misc_feature 1..80: note = Synthetic: >Shrew-cand-18420-18499
  source 1..80: mol_type = other DNA
attgtcaaaaataccataaaatatactcaactttgtcaatatcttaataaaaccactatttgtgtgccttacaacatgag

SEQ ID NO: 5896 - DNA, 80 bp, synthetic construct
  misc_feature 1..80: note = Synthetic: >Shrew-cand-18500-18579
  source 1..80: mol_type = other DNA
agttgtacattttggagcttcgggaaatggtgtttcacctggaactgctgttctaaaacgttggttgccacaaagtgcga

SEQ ID NO: 5897 - DNA, 80 bp, synthetic construct
  misc_feature 1..80: note = Synthetic: >Shrew-cand-18580-18659
  source 1..80: mol_type = other DNA
ttttattagacaatgattgtagaaattttgctagtgatgcagattatacaattattggatcttgtgaagttgtaaaaatt

SEQ ID NO: 5898 - DNA, 80 bp, synthetic construct
  misc_feature 1..80: note = Synthetic: >Shrew-cand-18660-18739
  source 1..80: mol_type = other DNA
agtaccaaagtggatttgattattagtgatatgtatgattgtgaaaaagtcagaagtttagaagagaataaaggtgaaga

SEQ ID NO: 5899 - DNA, 80 bp, synthetic construct
  misc_feature 1..80: note = Synthetic: >Shrew-cand-18740-18819
  source 1..80: mol_type = other DNA
tgggttttttagatttcttgtgggctttattcgtgaaaaactttctgttggtggtactgtttgtattaaaataactgaat

SEQ ID NO: 5900 - DNA, 80 bp, synthetic construct
  misc_feature 1..80: note = Synthetic: >Shrew-cand-18820-18899
  source 1..80: mol_type = other DNA
tttcatggaacaaagagttgtatgaagaaatacaaaaatttgagttttggactctattttgtaccagtgttaatgcaagt

SEQ ID NO: 5901 - DNA, 80 bp, synthetic construct
  misc_feature 1..80: note = Synthetic: >Shrew-cand-18900-18979
  source 1..80: mol_type = other DNA
agttctgaagcatttttaattggtgttaattatttaggtaattttagtaataaagatataataaagggtgacgtttgtca

SEQ ID NO: 5902 - DNA, 80 bp, synthetic construct
  misc_feature 1..80: note = Synthetic: >Shrew-cand-18980-19059
  source 1..80: mol_type = other DNA
tgctaattatatattttggagaaatagtacgattatgaaacaaagttataatagtgttttagatttaagtaagtttgagc

SEQ ID NO: 5903 - DNA, 80 bp, synthetic construct
  misc_feature 1..80: note = Synthetic: >Shrew-cand-19060-19139
  source 1..80: mol_type = other DNA
ttaaattgaaaacgactactgtagtggatcttaaagatgataaagtaaatgatttagtgttaggtttaataaaaagtggt

SEQ ID NO: 5904 - DNA, 80 bp, synthetic construct
  misc_feature 1..80: note = Synthetic: >Shrew-cand-19140-19219
  source 1..80: mol_type = other DNA
aagttgattattagagattgtggtaagcaagatttttatgcgaataagtttgtgtaaactaacatgaaacttattatttt

SEQ ID NO: 5905 - DNA, 80 bp, synthetic construct
  misc_feature 1..80: note = Synthetic: >Shrew-cand-19220-19299
  source 1..80: mol_type = other DNA
atttttagttttatcttgtgttgaatgtgttgaatatattaaatgtagtaatacacaattgggtcttttagatctagaga

SEQ ID NO: 5906 - DNA, 80 bp, synthetic construct
  misc_feature 1..80: note = Synthetic: >Shrew-cand-19300-19379
  source 1..80: mol_type = other DNA
aaataacatattctctctttgatttaggtgatgttggtgttaatagtaccacattgattaatggatattttcctagtaaa

SEQ ID NO: 5907 - DNA, 80 bp, synthetic construct
  misc_feature 1..80: note = Synthetic: >Shrew-cand-19380-19459
  source 1..80: mol_type = other DNA
gatattaataattggttgtgtgaaaaaatgggtgttagtgagttgtattatggtcaagctttttataccatattaaataa

SEQ ID NO: 5908 - DNA, 80 bp, synthetic construct
  misc_feature 1..80: note = Synthetic: >Shrew-cand-19460-19539
  source 1..80: mol_type = other DNA
tgtgggtagtgctagtttaaagtttttaattcaacctattgtttatagcaatagttcttatgtaatttatatggcttata

SEQ ID NO: 5909 - DNA, 80 bp, synthetic construct
  misc_feature 1..80: note = Synthetic: >BtSk_AlphaCoV-cand-16610-16689
  source 1..80: mol_type = other DNA
ttcctgaggattataacgtggttacgagacgtatgtgcgttcttaaacctgatatctttttgcacaagtgttatcgttgt

SEQ ID NO: 5910 - DNA, 80 bp, synthetic construct
  misc_feature 1..80: note = Synthetic: >AlphaSp-cand-16660-16739
  source 1..80: mol_type = other DNA
ctgaggattataacgtggttacgagacgtatgtgtgttcttaaacctgatatctttttgcacaagtgttatcgttgtcca

SEQ ID NO: 5911 - DNA, 80 bp, synthetic construct
  misc_feature 1..80: note = Synthetic: >Sk512R-cand-16640-16719
  source 1..80: mol_type = other DNA
ggtgttttggtgcctgaggattataacgtggttacgagacgtatgtgcgttcttaaacctgatatctttttgcacaagtg

SEQ ID NO: 5912 - DNA, 80 bp, synthetic construct
  misc_feature 1..80: note = Synthetic: >HKU2R-cand-12330-12409
  source 1..80: mol_type = other DNA
ccagaacattgtgttcgtgcttttgacgtttataataaggacgttgcatgtattggtaaatttttgaaggttaactgtgt

SEQ ID NO: 5913 - DNA, 80 bp, synthetic construct
  misc_feature 1..80: note = Synthetic: >BtRf_AlphaCoV-cand-12300-12379
  source 1..80: mol_type = other DNA
gaacattgtgttcgtgcttttgacgtttacaacaaggacgtggcatgtattggtaaatttttgaaggttaactgtgttag

SEQ ID NO: 5914 - DNA, 80 bp, synthetic construct
  misc_feature 1..80: note = Synthetic: >SEAC-cand-12500-12579
  source 1..80: mol_type = other DNA
acattgtgttcgtgcttttgacgtttataacaaggatgtagcatgtattggtaaatttttgaaggttaactgtgttaggc

SEQ ID NO: 5915 - DNA, 80 bp, synthetic construct
  misc_feature 1..80: note = Synthetic: >Sparrow-cand-13150-13229
  source 1..80: mol_type = other DNA
ttgcacgcaatcagaccatcgtgattggaacaaccaaattctatggtggttgggacaatatgttacggcggctgatgtgt

SEQ ID NO: 5916 - DNA, 80 bp, synthetic construct
  misc_feature 1..80: note = Synthetic: >HKU15-cand-13130-13209
  source 1..80: mol_type = other DNA
tgcacgcaatcagaccatcgtgattggaacaaccaaattctatggtggttgggacaacatgttacgacgactgatgtgta

SEQ ID NO: 5917 - DNA, 80 bp, synthetic construct
  misc_feature 1..80: note = Synthetic: >Sk512R-cand-14320-14399
  source 1..80: mol_type = other DNA
acacctgaaatctattgttaacactagaggtgcttctgttgttattggaaccactaagttctatggtggttgggataata

SEQ ID NO: 5918 - DNA, 80 bp, synthetic construct
  misc_feature 1..80: note = Synthetic: >BtSk_AlphaCoV-cand-14290-14369
  source 1..80: mol_type = other DNA
tctattgtcaacactagaggtgcttctgttgttattggaaccactaagttctatggtggttgggataatatgctcaaaac

SEQ ID NO: 5919 - DNA, 80 bp, synthetic construct
  misc_feature 1..80: note = Synthetic: >Sb512-cand-14340-14419
  source 1..80: mol_type = other DNA
attgtcaacactagaggtgcttctgttgttattggaaccactaagttctatggtggttgggataatatgctcaaaacact

SEQ ID NO: 5920 - DNA, 80 bp, synthetic construct
  misc_feature 1..80: note = Synthetic: >AlphaSp-cand-14350-14429
  source 1..80: mol_type = other DNA
ctagaggtgcttctgttgttattggaaccactaagttctatggtggttgggataacatgctcaaaacacttattaaggat

SEQ ID NO: 5921 - DNA, 80 bp, synthetic construct
  misc_feature 1..80: note = Synthetic: >BetaSp-cand-27100-27179
  source 1..80: mol_type = other DNA
ttaaagtactaccacctgttctatcagagtcccagatgtctggttatgccacaggtgtagggctatccatgctcttccca

SEQ ID NO: 5922 - DNA, 80 bp, synthetic construct
  misc_feature 1..80: note = Synthetic: >SARSCoV-cand-22040-22119
  source 1..80: mol_type = other DNA
aaaagtcaggtaattttaaacacttacgagagtttgtgtttaaaaataaagatgggtttctctatgtttataagggctat

SEQ ID NO: 5923 - DNA, 80 bp, synthetic construct
  misc_feature 1..80: note = Synthetic: >WIV16-cand-22000-22079
  source 1..80: mol_type = other DNA
gttgctgaaaagtcaggtaattttaaacacttacgagagtttgtgtttaaaaataaggatgggtttctctatgtttacaa

SEQ ID NO: 5924 - DNA, 80 bp, synthetic construct
  misc_feature 1..80: note = Synthetic: >Sb512-cand-3260-3339
  source 1..80: mol_type = other DNA
tgtcgtctgacagtgaagatgactttaaggctgtggatgatgaacctaatgccaacactgatgagacagttgacactttt

SEQ ID NO: 5925 - DNA, 80 bp, synthetic construct
  misc_feature 1..80: note = Synthetic: >Sk512R-cand-3250-3329
  source 1..80: mol_type = other DNA
ctttgtcgtctgatagtgaagatgactttaaggctgtggatgatgaacctaatgccaacactgatgagacagttgacact

SEQ ID NO: 5926 - DNA, 80 bp, synthetic construct
  misc_feature 1..80: note = Synthetic: >HKU4-cand-6690-6769
  source 1..80: mol_type = other DNA
agcagcatgtaagactgctggtcgtggtttctgtaaatttgttgttaattatggtgttttgcagaatatgtttgtatttt

SEQ ID NO: 5927 - DNA, 80 bp, synthetic construct
  misc_feature 1..80: note = Synthetic: >HKU4R-cand-6680-6759
  source 1..80: mol_type = other DNA
acggcagtatgtaagactgctggtcgtggtttctgtaaatttgttgttaattatggtgttttgcagaatatgtttgtatt

SEQ ID NO: 5928 - DNA, 80 bp, synthetic construct
  misc_feature 1..80: note = Synthetic: >BetaSp-cand-18370-18449
  source 1..80: mol_type = other DNA
aaaatactaaatcagagttcttccaagttgcagtgtgtcaccaatttatttaaagattgtagcaagagctatgttggtta

SEQ ID NO: 5929 - DNA, 80 bp, synthetic construct
  misc_feature 1..80: note = Synthetic: >BetaCoV1-cand-18260-18339
  source 1..80: mol_type = other DNA
ctaaatcagagttcttccaagttgcagtgtgtcaccaatttatttaaagattgtagcaagagctatgttggttaccatcc

SEQ ID NO: 5930 - DNA, 80 bp, synthetic construct
  misc_feature 1..80: note = Synthetic: >Delta-cand-13670-13749
  source 1..80: mol_type = other DNA
gtgatggcaacccacttgagtatgatggatttcagtatgacttcacggacttcaagcttggcttgttcgagaagtatttt

SEQ ID NO: 5931 - DNA, 80 bp, synthetic construct
  misc_feature 1..80: note = Synthetic: >HKU15-cand-12170-12249
  source 1..80: mol_type = other DNA
ggatagtgatggcaacccacttgagtatgatggatttcagtatgacttcacggacttcaagcttggcttgttcgagaagt

SEQ ID NO: 5932 - DNA, 80 bp, synthetic construct
  misc_feature 1..80: note = Synthetic: >BetaCoV1-cand-23630-23709
  source 1..80: mol_type = other DNA
attctcgttggaaccatgccaggctatctgataataaaacagcagaggcatgtcaattgccttattgctattttcgcaat

SEQ ID NO: 5933 - DNA, 80 bp, synthetic construct
  misc_feature 1..80: note = Synthetic: >SARSCoV-cand-14120-14199
  source 1..80: mol_type = other DNA
gggcattggctgctgagtcccatatggatgctgatctcgcaaaaccacttattaagtgggatttgctgaaatatgatttt

SEQ ID NO: 5934 - DNA, 80 bp, synthetic construct
  misc_feature 1..80: note = Synthetic: >WIV16-cand-14110-14189
  source 1..80: mol_type = other DNA
agggcattggctgctgagtcccatatggatgctgatttcgcaaaaccacttattaagtgggatttgctgaaatatgattt

SEQ ID NO: 5935 - DNA, 80 bp, synthetic construct
  misc_feature 1..80: note = Synthetic: >Sb512-cand-17780-17859
  source 1..80: mol_type = other DNA
gtactttgttaaacttgggccagtgcaaacttgtgactgtggtaaacgtgctacttgttacaatagcaccaaccacactt

SEQ ID NO: 5936 - DNA, 80 bp, synthetic construct
  misc_feature 1..80: note = Synthetic: >HKU4R-cand-10430-10509
  source 1..80: mol_type = other DNA
aagttaactgttgatgttgctaatcctagtacaccagcatatacttttagtactgttaaacctggcgcctcgtttagcgt

SEQ ID NO: 5937 - DNA, 80 bp, synthetic construct
  misc_feature 1..80: note = Synthetic: >HKU4-cand-10430-10509
  source 1..80: mol_type = other DNA
tcttacttaagttaactgttgatgttgctaatcctagtacaccagcatatacttttagtactgttaaacctggcgcctcg

SEQ ID NO: 5938 - DNA, 80 bp, synthetic construct
  misc_feature 1..80: note = Synthetic: >HKU2-cand-21760-21839
  source 1..80: mol_type = other DNA
aagttacttttcagggtgtgctgtatgagagtaattttactttcgcacagtattataacctattgtatgtaggttctcaa

SEQ ID NO: 5939 - DNA, 80 bp, synthetic construct
  misc_feature 1..80: note = Synthetic: >SEAC-cand-21720-21799
  source 1..80: mol_type = other DNA
tagagaaagttacttttcagggtgtgctgtatgagagtaattttactttcgcacagtattataacctattgtatgtaggt

SEQ ID NO: 5940 - DNA, 80 bp, synthetic construct
  misc_feature 1..80: note = Synthetic: >AlphaMink-cand-15680-15759
  source 1..80: mol_type = other DNA
aagttagtgcctggtatgatatttgttttgacatctcataatgttggagctttgaaagcaccagttttggttaatcaaga

SEQ ID NO: 5941 - DNA, 80 bp, synthetic construct
  misc_feature 1..80: note = Synthetic: >Alpha2-cand-15670-15749
  source 1..80: mol_type = other DNA
agttggtgcctggtatgatatttgttttgacatctcataacgttggagctttgaaagcaccagttttggttaatcaagaa

SEQ ID NO: 5942 - DNA, 80 bp, synthetic construct
  misc_feature 1..80: note = Synthetic: >HKU12-cand-26140-26219
  source 1..80: mol_type = other DNA
agtgcaagaaggacacttataccatttaatatgccgaggccacgcggagtacgatcgagggtacagcataatctcaactt

SEQ ID NO: 5943 - DNA, 80 bp, synthetic construct
  misc_feature 1..80: note = Synthetic: >HKU17-cand-25830-25909
  source 1..80: mol_type = other DNA
ctagaaggttgcttataccatttaatatgccgaggccacgcggagtacgatcgagggtacagcataatctcaacttttgt

SEQ ID NO: 5944 - DNA, 80 bp, synthetic construct
  misc_feature 1..80: note = Synthetic: >HKU5-cand-15200-15279
  source 1..80: mol_type = other DNA
aagtttggaaaagccagagtctattatgagagtctgtcttatcaagaacaggatgagctttttgccatgacaaagcgaaa

SEQ ID NO: 5945 - DNA, 80 bp, synthetic construct
  misc_feature 1..80: note = Synthetic: >HKU5R-cand-15190-15269
  source 1..80: mol_type = other DNA
attcaataagtttggaaaagccagagtctattatgagagtctgtcgtatcaagaacaggatgagctttttgccatgacaa

SEQ ID NO: 5946 - DNA, 80 bp, synthetic construct
  misc_feature 1..80: note = Synthetic: >AlphaMink-cand-28340-28419
  source 1..80: mol_type = other DNA
aataaactagctcccatgttaaatttaccttttggtactaaaatctaccatgataaggatagacaattagaagttgaagg

SEQ ID NO: 5947 - DNA, 80 bp, synthetic construct
  misc_feature 1..80: note = Synthetic: >Alpha2-cand-28330-28409
  source 1..80: mol_type = other DNA
taatagattggctcctatgctaactttgccttttggtactaaaatctaccatgataaggatagacaattagaagttgaag

SEQ ID NO: 5948 - DNA, 80 bp, synthetic construct
  misc_feature 1..80: note = Synthetic: >BetaSp-cand-28300-28379
  source 1..80: mol_type = other DNA
atatagtggttaaaaccactcatgatgattaactccaatatcagaccccataaagcacagcaatataagaaagtgttatt

SEQ ID NO: 5949 - DNA, 80 bp, synthetic construct
  misc_feature 1..80: note = Synthetic: >BetaCoV1-cand-28190-28269
  source 1..80: mol_type = other DNA
tggttaaaaccactcatgatgattaactccaatatcagaccccataaagcacagcaatataagaaagtgttattaagtgt

SEQ ID NO: 5950 - DNA, 80 bp, synthetic construct
  misc_feature 1..80: note = Synthetic: >HKU8R-cand-27300-27379
  source 1..80: mol_type = other DNA
aataactcaagaagtaattcacaggaacgttcccagaaatccaagaagggcaagggcggtagcaatcaagatgaccttgt

SEQ ID NO: 5951 - DNA, 80 bp, synthetic construct
  misc_feature 1..80: note = Synthetic: >Sparrow-cand-12670-12749
  source 1..80: mol_type = other DNA
tctacaagcatttgcttgatagtaacttactagaccaacttggaatagacattcgccacttctactatatgcaagatggt

SEQ ID NO: 5952 - DNA, 80 bp, synthetic construct
  misc_feature 1..80: note = Synthetic: >BetaSp-cand-21090-21169
  source 1..80: mol_type = other DNA
agcagcatctgattggaaacctggttatactatgcctgtgctatataaatatctcaattcatctatggagagagttgatt

SEQ ID NO: 5953 - DNA, 80 bp, synthetic construct
  misc_feature 1..80: note = Synthetic: >BetaCoV1-cand-8860-8939
  source 1..80: mol_type = other DNA
taagtgctttatggcaagtttgatagtcttttgtacattgtggctttttatgcctagctatagtgtacataagtctgatt

SEQ ID NO: 5954 - DNA, 80 bp, synthetic construct
  misc_feature 1..80: note = Synthetic: >MinkCoV1-cand-1040-1119
  source 1..80: mol_type = other DNA
aatcagcctgttgtggcacacctggtaaagttattggtgtgtctataggcgacgccagtgttggtgaagctgtcattaca

SEQ ID NO: 5955 - DNA, 80 bp, synthetic construct
  misc_feature 1..80: note = Synthetic: >Alpha2-cand-1050-1129
  source 1..80: mol_type = other DNA
ttgtggcacacctggtaaagttattggtgtgtctataggtgatgccagtgtcggtgaagctgttattacatcaaaaggct

SEQ ID NO: 5956 - DNA, 80 bp, synthetic construct
  misc_feature 1..80: note = Synthetic: >SARSCoV-cand-14440-14519
  source 1..80: mol_type = other DNA
aatcaggatgtaaacttacatagctcgcgtctcagtttcaaggaacttttagtgtatgctgctgatccagctatgcatgc

SEQ ID NO: 5957 - DNA, 80 bp, synthetic construct
  misc_feature 1..80: note = Synthetic: >WIV16-cand-14430-14509
  source 1..80: mol_type = other DNA
taatcaggatgtaaacttacatagctcgcgtctcagtttcaaggaacttttagtgtatgctgctgatccagccatgcatg

SEQ ID NO: 5958 - DNA, 80 bp, synthetic construct
  misc_feature 1..80: note = Synthetic: >HKU24-cand-14030-14109
  source 1..80: mol_type = other DNA
tgctgatgctatggtagaagcaggcttggtaggtgttttaacacttgataatcaagatttgaatggtatatggtatgatt

SEQ ID NO: 5959 - DNA, 80 bp, synthetic construct
  misc_feature 1..80: note = Synthetic: >HKU23-cand-20980-21059
  source 1..80: mol_type = other DNA
tgatatgtatgaccctattactaagaacataggggagtacaatgtaagtaaagatggtttctttacatacatttgtcata

SEQ ID NO: 5960 - DNA, 80 bp, synthetic construct
  misc_feature 1..80: note = Synthetic: >MbCoV1-cand-17860-17939
  source 1..80: mol_type = other DNA
tgtagaaggtgctcatgtctgtggttctaatgttggcactaatgttcctcttcaagtaggattttctaatggtgtcgatt

SEQ ID NO: 5961 - DNA, 80 bp, synthetic construct
  misc_feature 1..80: note = Synthetic: >MsbCoV1-cand-17840-17919
  source 1..80: mol_type = other DNA
taggcatggatgtagaaggtgctcatgtctgtggttctaatgttggcactaatgttacacttcaagtaggattttctaat

SEQ ID NO: 5962 - DNA, 80 bp, synthetic construct
  misc_feature 1..80: note = Synthetic: >BetaCoV1-cand-24030-24109
  source 1..80: mol_type = other DNA
tgcgtaggccattaatctaaacatggttataatttttttgctcttattcgccgaacctgtcttttgtgttattggcgatt

SEQ ID NO: 5963 - DNA, 80 bp, synthetic construct
  misc_feature 1..80: note = Synthetic: >MsbCoV1-cand-4320-4399
  source 1..80: mol_type = other DNA
ctactactagtggacattataaaaccaatgtttttggcaaaagattttgcgttgatggttctggtgttagcagcatttct

SEQ ID NO: 5964 - DNA, 80 bp, synthetic construct
  misc_feature 1..80: note = Synthetic: >MinkCoV1-cand-19510-19589
  source 1..80: mol_type = other DNA
gtctgcagttaccagatggtataacgacaaatgttattaaatacacacagttgtgtcaatatcttaatacaaccagcatt

SEQ ID NO: 5965 - DNA, 80 bp, synthetic construct
  misc_feature 1..80: note = Synthetic: >Alpha2-cand-19470-19549
  source 1..80: mol_type = other DNA
gctagtctgcagttaccagatggtataacgacaaatgttattaaatacacacagttgtgccaataccttaatactactag

SEQ ID NO: 5966 - DNA, 80 bp, synthetic construct
  misc_feature 1..80: note = Synthetic: >HKU5R-cand-28410-28489
  source 1..80: mol_type = other DNA
gatttagcttcccagataatctctggcatactagccgcaacaagctgcgcgatgtggatttcctacttcgtgcaaagcat

SEQ ID NO: 5967 - DNA, 80 bp, synthetic construct
  misc_feature 1..80: note = Synthetic: >MinkCoV1-cand-19750-19829
  source 1..80: mol_type = other DNA
gagattgtactagtatgtatttagaagacaagtttgatcttctaatatctgacatgtatgatagtacaaataaaagcatt

SEQ ID NO: 5968 - DNA, 80 bp, synthetic construct
  misc_feature 1..80: note = Synthetic: >Alpha2-cand-19710-19789
  source 1..80: mol_type = other DNA
acgggagattgtactagtatgtatttggaagacaagtttgatcttctaatatctgacatgtatgatagtacaaataaaag

SEQ ID NO: 5969 - DNA, 80 bp, synthetic construct
  misc_feature 1..80: note = Synthetic: >BetaSp-cand-16210-16289
  source 1..80: mol_type = other DNA
gtaaagaatggacctcatgaattctgttcgcaacatacaatgctagtaaaaatggatggcgatgatgtctatctgccata

SEQ ID NO: 5970 - DNA, 80 bp, synthetic construct
  misc_feature 1..80: note = Synthetic: >BetaSp-cand-27820-27899
  source 1..80: mol_type = other DNA
aatggatgttcactggtagtggctactaccatcctgaacccattactaatgataatgtcataatgatgagtaattgcgct

SEQ ID NO: 5971 - DNA, 80 bp, synthetic construct
  misc_feature 1..80: note = Synthetic: >AlphaMink-cand-27540-27619
  source 1..80: mol_type = other DNA
atgttgtcctggttctagtattaatatgcctggttttgaagcgtattaaattactagagcagttagtgcttaatgccatt

SEQ ID NO: 5972 - DNA, 80 bp, synthetic construct
  misc_feature 1..80: note = Synthetic: >Alpha2-cand-27530-27609
  source 1..80: mol_type = other DNA
catgttgtcctggttctagtattaatatgcttgatttcgaggcgtattaaattactagagcagttagtgcttaatgccat

SEQ ID NO: 5973 - DNA, 80 bp, synthetic construct
  misc_feature 1..80: note = Synthetic: >MsbCoV1-cand-4400-4479
  source 1..80: mol_type = other DNA
aatggccatattaacacgattcttttgaaggattgtaactatggcatttctgctattgctgaacctaagcaagaaaaagt

SEQ ID NO: 5974 - DNA, 80 bp, synthetic construct
  misc_feature 1..80: note = Synthetic: >MbCoV1-cand-4410-4489
  source 1..80: mol_type = other DNA
tctaatggccatattaacacgattcttttgaaggattgtaactatggcatttctgctattgctgaacctaagcaagaaaa

SEQ ID NO: 5975 - DNA, 80 bp, synthetic construct
  misc_feature 1..80: note = Synthetic: >BetaCoV1-cand-24670-24749
  source 1..80: mol_type = other DNA
tggctgctgataatatttattttcatttctatcaagatggtggaactttttatgcgtatgtaggtgacaagagtcccatt

SEQ ID NO: 5976 - DNA, 80 bp, synthetic construct
  misc_feature 1..80: note = Synthetic: >HKU14-cand-23390-23469
  source 1..80: mol_type = other DNA
gttggaacaatgccaggccttctgataacatgacggcggttgcttgtcaacccccgtactgttattttcgtaattctact

SEQ ID NO: 5977 - DNA, 80 bp, synthetic construct
  misc_feature 1..80: note = Synthetic: >Sparrow-cand-11380-11459
  source 1..80: mol_type = other DNA
aattacgactgcacctgtggaactagtctgcagaattcggcttatttaaacgagtaacgggttctagtgatgcccggcta

SEQ ID NO: 5978 - DNA, 80 bp, synthetic construct
  misc_feature 1..80: note = Synthetic: >HKU17-cand-11360-11439
  source 1..80: mol_type = other DNA
aggtgggtcaaccatgactgcacttgtggttctagtctgcagaattcggcttatttaaacgagtaacgggttctagtgat

SEQ ID NO: 5979 - DNA, 80 bp, synthetic construct
  misc_feature 1..80: note = Synthetic: >HKU8R-cand-13690-13769
  source 1..80: mol_type = other DNA
ggagtatgattttactgagcataagcttggcctttttaataagtatttcaagcattgggatcttgattatcatcctaatt

SEQ ID NO: 5980 - DNA, 80 bp, synthetic construct
  misc_feature 1..80: note = Synthetic: >HKU5R-cand-13910-13989
  source 1..80: mol_type = other DNA
aattatgagctagagaagcggtgttatgacctcgttaaggattgtgatgccgtagcagttcatgacttcttcatttttga

SEQ ID NO: 5981 - DNA, 80 bp, synthetic construct
  misc_feature 1..80: note = Synthetic: >HKU4R-cand-14030-14109
  source 1..80: mol_type = other DNA
aattatggtttgattttgtagaaaaccctagtgtaataggtgtttatcataaacttggtgaaagaattcgccaggctatg

SEQ ID NO: 5982 - DNA, 80 bp, synthetic construct
  misc_feature 1..80: note = Synthetic: >HKU4-cand-14030-14109
  source 1..80: mol_type = other DNA
tgataataaattatggtttgattttgtggaaaaccctagtgtaataggtgtttatcataaacttggtgaaagaattcgcc

SEQ ID NO: 5983 - DNA, 80 bp, synthetic construct
  misc_feature 1..80: note = Synthetic: >HKU4R-cand-13710-13789
  source 1..80: mol_type = other DNA
ttgtagatttgtacaggttgatgatgaaggtcataaacttgattcttactttatcgttaaacgtcatactatgaataatt

SEQ ID NO: 5984 - DNA, 80 bp, synthetic construct
  misc_feature 1..80: note = Synthetic: >HKU4-cand-13710-13789
  source 1..80: mol_type = other DNA
actaatacttgtagatttgtacaggttgatgatgaaggtcataaacttgattcttattttatcgttaaacgtcatactat

SEQ ID NO: 5985 - DNA, 80 bp, synthetic construct
  misc_feature 1..80: note = Synthetic: >HKU5R-cand-16880-16959
  source 1..80: mol_type = other DNA
acacttagagcaactgaagaagcctctaaacagtcgtatgctattgctactatcaaggaaatagtaggtgagcgtgaatt

SEQ ID NO: 5986 - DNA, 80 bp, synthetic construct
  misc_feature 1..80: note = Synthetic: >HKU15-cand-23890-23969
  source 1..80: mol_type = other DNA
ttactgcttgaatatggtagcatatatggtaaagactttatcattcgaccatcgctccaagtcattcttgaagatgaatt

SEQ ID NO: 5987 - DNA, 80 bp, synthetic construct
  misc_feature 1..80: note = Synthetic: >Delta-cand-26680-26759
  source 1..80: mol_type = other DNA
ctttactgcttgaatatggtagcatatatggtaaagactttatcattcgaccatcgctccaagtcattcttgaagatgaa

SEQ ID NO: 5988 - DNA, 80 bp, synthetic construct
  misc_feature 1..80: note = Synthetic: >WIV16-cand-29960-30039
  source 1..80: mol_type = other DNA
ccacacaaggcagatgggctatgtaaacgttttcgcaattccgtttacgatacatagtctactcttgtgcagaatgaatt

SEQ ID NO: 5989 - DNA, 80 bp, synthetic construct
  misc_feature 1..80: note = Synthetic: >HKU5-cand-7680-7759
  source 1..80: mol_type = other DNA
ctgctctgttacaaaaggaatcgcctaacacgtgtggaagcatcaacagtcgtatgtggttctaaacgcacgttttacat

SEQ ID NO: 5990 - DNA, 80 bp, synthetic construct
  misc_feature 1..80: note = Synthetic: >HKU5R-cand-30250-30329
  source 1..80: mol_type = other DNA
acgcaattgtccactcttgcacagaatggaatcatgttttacttacagtgcaagaaggtaagtgaacccatttaattgat

SEQ ID NO: 5991 - DNA, 80 bp, synthetic construct
  misc_feature 1..80: note = Synthetic: >BetaCoV1-cand-7980-8059
  source 1..80: mol_type = other DNA
tcaaacgcactataaatcctactgatgttacgcactatgttgtagagtgtgtgcagcaagttggttgtaaaatgcgcttg

SEQ ID NO: 5992 - DNA, 80 bp, synthetic construct
  misc_feature 1..80: note = Synthetic: >HKU5-cand-21210-21289
  source 1..80: mol_type = other DNA
acgcagatattactctttttggcgactgtgtcactgtgcgtgttggacaacaagtagatttactaatttccgacatgtac

SEQ ID NO: 5993 - DNA, 80 bp, synthetic construct
  misc_feature 1..80: note = Synthetic: >HKU5R-cand-21200-21279
  source 1..80: mol_type = other DNA
gacgcggatattactctttttggcgactgcgtaactgtgcgtgttggacaacaagtagatttactaatttccgacatgta

SEQ ID NO: 5994 - DNA, 80 bp, synthetic construct
  misc_feature 1..80: note = Synthetic: >BetaSp-cand-29660-29739
  source 1..80: mol_type = other DNA
gcgtttacgcattgaataatgtgtatcttggattttctatagtgtttgctatagtgtccattattatgtggattgtgtat

SEQ ID NO: 5995 - DNA, 80 bp, synthetic construct
  misc_feature 1..80: note = Synthetic: >HKU10R-cand-26140-26219
  source 1..80: mol_type = other DNA
actgttgccaagcctagcaccacaattgtgtaccaacgtgctggacgctcgctcaacacgcgctcaaatacaggttgggc

SEQ ID NO: 5996 - DNA, 80 bp, synthetic construct
  misc_feature 1..80: note = Synthetic: >HKU15-cand-560-639
  source 1..80: mol_type = other DNA
acgctattgcgttgcctgaaaatgtaccaccacctctgcaacttttcattcatgttgcagctgctgaagagggtcaccct

SEQ ID NO: 5997 - DNA, 80 bp, synthetic construct
  misc_feature 1..80: note = Synthetic: >Delta-cand-720-799
  source 1..80: mol_type = other DNA
tgcgttgcctgaaaatgtaccaccacctctgcaacttttcattcatgttgcagctgctgaagagggtcaaaccctaaaga

SEQ ID NO: 5998 - DNA, 80 bp, synthetic construct
  misc_feature 1..80: note = Synthetic: >HKU8-cand-16720-16799
  source 1..80: mol_type = other DNA
tgcaacctggcatgatttttgtgttgacttcacacaatatccagccattaagagcccctactattgcaaatcaggagcgt

SEQ ID NO: 5999 - DNA, 80 bp, synthetic construct
  misc_feature 1..80: note = Synthetic: >HKU8R-cand-16340-16419
  source 1..80: mol_type = other DNA
ggcatgatttttgttttgacttcacacaatatccagccattaagagcccctactattgcaaatcaggagcgttatgctgc

SEQ ID NO: 6000 - DNA, 80 bp, synthetic construct
  misc_feature 1..80: note = Synthetic: >Sk512R-cand-5650-5729
  source 1..80: mol_type = other DNA
acgctgaaaacactcttaacattatctcacgcttcctgaaatctcagggttctgtagaaatgttaagagctacatctacc

SEQ ID NO: 6001 - DNA, 80 bp, synthetic construct
  misc_feature 1..80: note = Synthetic: >HKU4-cand-5810-5889
  source 1..80: mol_type = other DNA
atacagcagactgtaatgtcgttgtatatgatcttgatggtgttactaaagttgaagtcaatccagacttatctaactat

SEQ ID NO: 6002 - DNA, 80 bp, synthetic construct
  misc_feature 1..80: note = Synthetic: >SARSCoV-cand-13000-13079
  source 1..80: mol_type = other DNA
ttccttctgtgcttttgcagtagaccctgctaaagcatataaggattacctagcaagtggaggacaaccaatcaccaact

SEQ ID NO: 6003 - DNA, 80 bp, synthetic construct
  misc_feature 1..80: note = Synthetic: >WIV16-cand-12990-13069
  source 1..80: mol_type = other DNA
tttctttctgtgcttttgcagtagaccctgctaaagcgtacaaggattacctagcaagtggaggacaaccaatcaccaac

SEQ ID NO: 6004 - DNA, 80 bp, synthetic construct
  misc_feature 1..80: note = Synthetic: >HKU5R-cand-8000-8079
  source 1..80: mol_type = other DNA
tctctgctactttactaatctagacaagttgaagttcaaagaggtctgcaaaactcccacggggatacctgagcacaact

SEQ ID NO: 6005 - DNA, 80 bp, synthetic construct
  misc_feature 1..80: note = Synthetic: >HKU5-cand-8000-8079
  source 1..80: mol_type = other DNA
ccctctctgctactttactaatctagataagttgaagttcaaagaggtctgcaaaactcccacggggatacctgagcaca

SEQ ID NO: 6006 - DNA, 80 bp, synthetic construct
  misc_feature 1..80: note = Synthetic: >HKU4R-cand-11630-11709
  source 1..80: mol_type = other DNA
gttaacttagctaagtttatttctggcttggtgttcttttatgctccgcatttgggattcatattgccagaagttaaact

SEQ ID NO: 6007 - DNA, 80 bp, synthetic construct
  misc_feature 1..80: note = Synthetic: >HKU4-cand-11630-11709
  source 1..80: mol_type = other DNA
ttgctaccgttaacttagctaagtttatttctggcttggtgttcttttatgctccgcatttgggattcatattgccagaa

SEQ ID NO: 6008 - DNA, 80 bp, synthetic construct
  misc_feature 1..80: note = Synthetic: >FelineAlpha1-cand-90-169
  source 1..80: mol_type = other DNA
agtttggcaatcactcctaggaacggggttgagagaacggcgctccggggttccgtccctgtttggtaagtcgtctagta

SEQ ID NO: 6009 - DNA, 80 bp, synthetic construct
  misc_feature 1..80: note = Synthetic: >HKU5-cand-8960-9039
  source 1..80: mol_type = other DNA
tagtgacgcgtgctttgctaataagtaccagtcctttgctaagtggtttaacgagaatcatggtggattgtttcaaaact

SEQ ID NO: 6010 - DNA, 80 bp, synthetic construct
  misc_feature 1..80: note = Synthetic: >HKU5R-cand-8960-9039
  source 1..80: mol_type = other DNA
tgacgcgtgctttgctaataagtaccagtcctttgctaagtggttcaacgagaatcatggtggattgtttcaaaactcca

SEQ ID NO: 6011 - DNA, 80 bp, synthetic construct
  misc_feature 1..80: note = Synthetic: >HKU31-cand-19000-19079
  source 1..80: mol_type = other DNA
tgcacattgcatcagggtgcacatgtagcatccaatgatgcaataatgactcgttgtttggctgttcattcatgttttat

SEQ ID NO: 6012 - DNA, 80 bp, synthetic construct
  misc_feature 1..80: note = Synthetic: >HghCoV1-cand-18930-19009
  source 1..80: mol_type = other DNA
ttgcacattgcatcagggtgcacatgtagcatccaatgatgcaataatgactcgttgtttggctgttcattcatgtttta

SEQ ID NO: 6013 - DNA, 80 bp, synthetic construct
  misc_feature 1..80: note = Synthetic: >HKU10R-cand-25500-25579
  source 1..80: mol_type = other DNA
ttcaattatgctttacatgtcacaagcttatgagcaacacaatttatgtgcctgtttatagtgcttatgttatgtataaa

SEQ ID NO: 6014 - DNA, 80 bp, synthetic construct
  misc_feature 1..80: note = Synthetic: >HKU17-cand-8960-9039
  source 1..80: mol_type = other DNA
gtctacaatcaagctcccatttcactgcagtcaggagtagttaagaaaacatgtatgtggttcttccacttcttgtttat

SEQ ID NO: 6015 - DNA, 80 bp, synthetic construct
  misc_feature 1..80: note = Synthetic: >SEAC-cand-7460-7539
  source 1..80: mol_type = other DNA
attgtatgcgcagtggtgctaaagttgttaatcataatgtgcttattaaggaaaagatgcctattgtgtggaattgcgtg

SEQ ID NO: 6016 - DNA, 80 bp, synthetic construct
  misc_feature 1..80: note = Synthetic: >HKU2-cand-7460-7539
  source 1..80: mol_type = other DNA
gatttggcacattgtatgcgcagtggtgctaaagttgttaatcataatgtgcttattaaggaaaagatgcctattgtgtg

SEQ ID NO: 6017 - DNA, 80 bp, synthetic construct
  misc_feature 1..80: note = Synthetic: >HghCoV1-cand-120-199
  source 1..80: mol_type = other DNA
ttgtagtgggtttagtaaaaactaaattcatatttttcatttagagctgcgtgtctcaagtgcgtctcggtcacaatata

SEQ ID NO: 6018 - DNA, 80 bp, synthetic construct
  misc_feature 1..80: note = Synthetic: >HKU4R-cand-840-919
  source 1..80: mol_type = other DNA
attgtgtcccagttgaccaatatatgtgtggcaagaacggcaaacctattgctgattatgccaaaatagtagctaaggaa

SEQ ID NO: 6019 - DNA, 80 bp, synthetic construct
  misc_feature 1..80: note = Synthetic: >HKU4-cand-850-929
  source 1..80: mol_type = other DNA
tgtatcccagtcgaccaatatatgtgtggcaaaaacggcaaacctattgctgattatgccaaaatagtagctaaggaagg

SEQ ID NO: 6020 - DNA, 80 bp, synthetic construct
  misc_feature 1..80: note = Synthetic: >HKU4-cand-11470-11549
  source 1..80: mol_type = other DNA
attgttaggcggttgtatcgtccttcaatgtcgaatttagctctagctttatgtagtggtgtgatgtggttttacactta

SEQ ID NO: 6021 - DNA, 80 bp, synthetic construct
  misc_feature 1..80: note = Synthetic: >HKU4R-cand-11470-11549
  source 1..80: mol_type = other DNA
gcggttgtatcgtccttcaatgtcgaatttagctctagctttatgtagtggtgtgatgtggttttacacttatgttatag

SEQ ID NO: 6022 - DNA, 80 bp, synthetic construct
  misc_feature 1..80: note = Synthetic: >Sb512-cand-3660-3739
  source 1..80: mol_type = other DNA
attgtttaatgctggtagagttagtcctatggtcaagcgttgttacgagtctcagcgtgctatctttggttctttgggtg

SEQ ID NO: 6023 - DNA, 80 bp, synthetic construct
  misc_feature 1..80: note = Synthetic: >Sk512R-cand-3650-3729
  source 1..80: mol_type = other DNA
gaaattgtttaatgctggtagagttagtcctatggtcaagcgttgttacgagtctcagcgtgctatctttggttctttgg

SEQ ID NO: 6024 - DNA, 80 bp, synthetic construct
  misc_feature 1..80: note = Synthetic: >BetaSp-cand-19250-19329
  source 1..80: mol_type = other DNA
attgtttttgtaataatgttaattggaaccttgagtatccaattattagtaatgagttagttataaattcctcttgtagg

SEQ ID NO: 6025 - DNA, 80 bp, synthetic construct
  misc_feature 1..80: note = Synthetic: >BetaCoV1-cand-24350-24429
  source 1..80: mol_type = other DNA
atttaattctggtatatttgttaaagctagaaatagcaaacctgtgttgaatggcatcactcattctgagttcgggacta

SEQ ID NO: 6026 - DNA, 80 bp, synthetic construct
  misc_feature 1..80: note = Synthetic: >BtSk_AlphaCoV-cand-17580-17659
  source 1..80: mol_type = other DNA
atttacgcatttattacctttgttgcgtaaaggccaaccatggtctgttattaggcgtcgtattgttcagatgtgtagtg

SEQ ID NO: 6027 - DNA, 80 bp, synthetic construct
  misc_feature 1..80: note = Synthetic: >BtRl_BetaCoV-cand-4790-4869
  source 1..80: mol_type = other DNA
ttgatggcgaggttctttctctaaacaaacttaaaagtcttttgtctcttcgtgaggttaagactattaaagtgtttacc

SEQ ID NO: 6028 - DNA, 80 bp, synthetic construct
  misc_feature 1..80: note = Synthetic: >Anlong-cand-250-329
  source 1..80: mol_type = other DNA
tgtgaatacagtgttccgtcgctgttgaaaccactaacagaagcaatggcttgcagtcagtacacacttgcagtggcaag

SEQ ID NO: 6029 - DNA, 80 bp, synthetic construct
  misc_feature 1..80: note = Synthetic: >MrAlphaSax-cand-240-319
  source 1..80: mol_type = other DNA
gtggaggtgtgtggatacagtgttccgtcgctgttgaaaccactaacataagcaatggcttgcagtcagtacacacttgc

SEQ ID NO: 6030 - DNA, 80 bp, synthetic construct
  misc_feature 1..80: note = Synthetic: >HKU5-cand-5920-5999
  source 1..80: mol_type = other DNA
tcgtagtatactctctggatgggaatacttgggctgatgtagatcctgatctgtcagctttctatatgaaggatggcaag

SEQ ID NO: 6031 - DNA, 80 bp, synthetic construct
  misc_feature 1..80: note = Synthetic: >HKU5R-cand-5920-5999
  source 1..80: mol_type = other DNA
tagtatactctctggatgggaatacttgggctgatgtagatcctgatctgtcagctttttatatgaaggatggcaagtac

SEQ ID NO: 6032 - DNA, 80 bp, synthetic construct
  misc_feature 1..80: note = Synthetic: >HKU5R-cand-12470-12549
  source 1..80: mol_type = other DNA
tgcctatgagaaagataaggctgtagcaagaaaattagagcgcatggctgaacaggctatgacgtcaatgtataagcaag

SEQ ID NO: 6033 - DNA, 80 bp, synthetic construct
  misc_feature 1..80: note = Synthetic: >HKU5-cand-12480-12559
  source 1..80: mol_type = other DNA
gagaaagataaggcagttgcaagaaagttagagcgcatggctgaacaggctatgacgtcaatgtataagcaagcacgtgc

SEQ ID NO: 6034 - DNA, 80 bp, synthetic construct
  misc_feature 1..80: note = Synthetic: >WIV16-cand-25290-25369
  source 1..80: mol_type = other DNA
cttggatcaattactgcacagccaggaaaaattgacaatgcttctcctgcaagtactgttcatgctacagcaacgatacc

SEQ ID NO: 6035 - DNA, 80 bp, synthetic construct
  misc_feature 1..80: note = Synthetic: >SARSCoV-cand-25340-25419
  source 1..80: mol_type = other DNA
tcttggatcaattactgcacagccagtaaaaattgacaatgcttctcctgcaagtactgttcatgctacagcaacgatac

SEQ ID NO: 6036 - DNA, 80 bp, synthetic construct
  misc_feature 1..80: note = Synthetic: >Sparrow-cand-13310-13389
  source 1..80: mol_type = other DNA
ttcatgtttgcttgcacgaaaacacacttgttgtaatcagagtcagcgattctatcgactggctaatgaatgttgccaag

SEQ ID NO: 6037 - DNA, 80 bp, synthetic construct
  misc_feature 1..80: note = Synthetic: >HKU4-cand-1410-1489
  source 1..80: mol_type = other DNA
cttggctaattgtccttgtgctaacaatggtgcatgcagccatagtgcagcacaagtttacagcatcttagatggtaaag

SEQ ID NO: 6038 - DNA, 80 bp, synthetic construct
  misc_feature 1..80: note = Synthetic: >HKU4R-cand-1400-1479
  source 1..80: mol_type = other DNA
ttcttggctaattgtccttgtgctagcaatggtgcatgcagccatagtgcagcacaagtttacagcatcttagatggtaa

SEQ ID NO: 6039 - DNA, 80 bp, synthetic construct
  misc_feature 1..80: note = Synthetic: >MbCoV1-cand-5930-6009
  source 1..80: mol_type = other DNA
tgacaataattgctggataaacgctgtttgtttacaattgcaatttgctgaagtagattttacttcagaaggtcttaaag

SEQ ID NO: 6040 - DNA, 80 bp, synthetic construct
  misc_feature 1..80: note = Synthetic: >MsbCoV1-cand-5930-6009
  source 1..80: mol_type = other DNA
tgctggataaacgctgtttgtttacaattgcaatttgctgaagcagattttacttcagaaggtcttaaagacatgtggaa

SEQ ID NO: 6041 - DNA, 80 bp, synthetic construct
  misc_feature 1..80: note = Synthetic: >MN531554-cand-23690-23769
  source 1..80: mol_type = other DNA
agtggccttggtatgtgtggtttgctatagcttttgccatcattatcttcatcctaatattaggttgggtgtttttcatg

SEQ ID NO: 6042 - DNA, 80 bp, synthetic construct
  misc_feature 1..80: note = Synthetic: >MN517817-cand-23510-23589
  source 1..80: mol_type = other DNA
ccacctaatgctagtcattatgcaatagtacctgctaatggtaggggtgtttttatacaagttaatggcacatactatat

SEQ ID NO: 6043 - DNA, 80 bp, synthetic construct
  misc_feature 1..80: note = Synthetic: >MN711790-cand-960-1039
  source 1..80: mol_type = other DNA
ttcaggtggctgcaaaaattcaagtttcagctatggcaatgcgcaggcttgttggtgaagtaactgcaaaagtcatggaa

SEQ ID NO: 6044 - DNA, 80 bp, synthetic construct
  misc_feature 1..80: note = Synthetic: >MN517816-cand-27130-27209
  source 1..80: mol_type = other DNA
atgcacagctggaatttgatgatgaacccaaagtgattaattggggtgattcagcacttggtgaaaatgaactttgagta

SEQ ID NO: 6045 - DNA, 80 bp, synthetic construct
  misc_feature 1..80: note = Synthetic: >MT114541-cand-25920-25999
  source 1..80: mol_type = other DNA
aagattttgttaatgcttgcgtgcgtcttcgcatgcgtttatggagagcgatattgtgctatgcaagctgatagcggcat

SEQ ID NO: 6046 - DNA, 80 bp, synthetic construct
  misc_feature 1..80: note = Synthetic: >MT114542-cand-24780-24859
  source 1..80: mol_type = other DNA
agcatatgctaagcttggtctctccattattgaagaagtcaatagtcatacagttgtttaatattacagtttacaagttt

SEQ ID NO: 6047 - DNA, 80 bp, synthetic construct
  misc_feature 1..80: note = Synthetic: >KF294370-cand-11710-11789
  source 1..80: mol_type = other DNA
aaagcagttagaaaaggcatgtaatattgctaagtcggcctacgagcgtgatagagctgttgctcgtaaattagagcgta

SEQ ID NO: 6048 - DNA, 80 bp, synthetic construct
  misc_feature 1..80: note = Synthetic: >MT114542-cand-13910-13989
  source 1..80: mol_type = other DNA
aacatgcttaaaaatttaatgcgtgacgttgataatggttgtttgatgggatgggactatcctaagtgtgaccgagcttt

SEQ ID NO: 6049 - DNA, 80 bp, synthetic construct
  misc_feature 1..80: note = Synthetic: >AJ311317-cand-7280-7359
  source 1..80: mol_type = other DNA
tgtcatacacagaagttgttagtagagaaaaaggcaggtggtattgttagcggcacctttaagtgttttaagagttattt

SEQ ID NO: 6050 - DNA, 80 bp, synthetic construct
  misc_feature 1..80: note = Synthetic: >MT114543-cand-8810-8889
  source 1..80: mol_type = other DNA
ttctacacttcagtctggtttgagaaaaatggcacagcctagtggtcttgtagagccttgcattgtaagagtttcctatg

SEQ ID NO: 6051 - DNA, 80 bp, synthetic construct
  misc_feature 1..80: note = Synthetic: >AY692454-cand-1840-1919
  source 1..80: mol_type = other DNA
ccaatcagctcgtgtgatagcagaagatgtttggtcttcatttactgaaaagtcttttgaattctggaagcttgcatatg

SEQ ID NO: 6052 - DNA, 80 bp, synthetic construct
  misc_feature 1..80: note = Synthetic: >LC061273-cand-2480-2559
  source 1..80: mol_type = other DNA
gcctagtaaaattcagaaagccaaccagaagcctatttatttaaaaggtgtgggctttgatttttcattaagtgatgatg

SEQ ID NO: 6053 - DNA, 80 bp, synthetic construct
  misc_feature 1..80: note = Synthetic: >MT114544-cand-19500-19579
  source 1..80: mol_type = other DNA
catctggtgttgctcctggtagtactgtactaagaaggtggttaccagatgatgccatattggttgataatgatttgaga

SEQ ID NO: 6054 - DNA, 80 bp, synthetic construct
  misc_feature 1..80: note = Synthetic: >LC061272-cand-560-639
  source 1..80: mol_type = other DNA
ttgttgtccacaaggttgggctatgggactgtttagacgttgtagcacctgttatggaggttgcgacgtgaatagtcatg

SEQ ID NO: 6055 - DNA, 80 bp, synthetic construct
  misc_feature 1..80: note = Synthetic: >MN987231-cand-12520-12599
  source 1..80: mol_type = other DNA
taaacaaaccactcctagtaattatgaacatgaaaagatctgttacgatgacttaaagtctgaagtaacagctgatcatg

SEQ ID NO: 6056 - DNA, 80 bp, synthetic construct
  misc_feature 1..80: note = Synthetic: >MN987230-cand-12520-12599
  source 1..80: mol_type = other DNA
taaacaaaccactcctagtaattatgaacatgagaaggcgtgttacgaagacttaaagtctgaagtaacagctaatcatg

SEQ ID NO: 6057 - DNA, 80 bp, synthetic construct
  misc_feature 1..80: note = Synthetic: >MN128087-cand-12620-12699
  source 1..80: mol_type = other DNA
taaacaaaccactcctagtaattatgaacatgaaaaagcttgttatgaagacttaaagtcagaagtaacagccgatcatg

SEQ ID NO: 6058 - DNA, 80 bp, synthetic construct
  misc_feature 1..80: note = Synthetic: >MN509588-cand-12660-12739
  source 1..80: mol_type = other DNA
tgttatgaagacttaaagtcagaagtaacagctgatcatgacttctttgtgttcaataagaacatttataatattagtag

SEQ ID NO: 6059 - DNA, 80 bp, synthetic construct
  misc_feature 1..80: note = Synthetic: >MN128088-cand-1580-1659
  source 1..80: mol_type = other DNA
ctctttcaggaaattttgcattgcatgatgttcattgttgcgagcgtgttgtctgtctgactgatggtgttacaccagag

SEQ ID NO: 6060 - DNA, 80 bp, synthetic construct
  misc_feature 1..80: note = Synthetic: >MN517817-cand-1580-1659
  source 1..80: mol_type = other DNA
ctctttcaggaaattttgcattgcatgatgtgcattgctgtgagcgtgttgtctgtctgtctgatggtgtgacaccagag

SEQ ID NO: 6061 - DNA, 80 bp, synthetic construct
  misc_feature 1..80: note = Synthetic: >MT114543-cand-20520-20599
  source 1..80: mol_type = other DNA
tagtactggtaatgcaaggggtaaacctttattattccatgtgcatggtgagccgtttagtgtcatcatatatatatcag

SEQ ID NO: 6062 - DNA, 80 bp, synthetic construct
  misc_feature 1..80: note = Synthetic: >MT114538-cand-25740-25819
  source 1..80: mol_type = other DNA
ctgtcatagatgacaatggaatggtcattagtattattttctggttcctgttgataattatattgatattactatcaata

SEQ ID NO: 6063 - DNA, 80 bp, synthetic construct
  misc_feature 1..80: note = Synthetic: >M95169-cand-16650-16729
  source 1..80: mol_type = other DNA
gcgggaagcaatatttatttcaccttacaatgctatgaaccagagagcttaccgtatgcttggacttaatgttcaaacag

SEQ ID NO: 6064 - DNA, 80 bp, synthetic construct
  misc_feature 1..80: note = Synthetic: >MN517817-cand-5150-5229
  source 1..80: mol_type = other DNA
tctatgagagtcttaaagtgcaggaaacacctgataatattgacgaatatgtgtcatttacaacaaaggaagattctaag

SEQ ID NO: 6065 - DNA, 80 bp, synthetic construct
  misc_feature 1..80: note = Synthetic: >MN128087-cand-5150-5229
  source 1..80: mol_type = other DNA
tctatgagagtcttaaagtgcaggaaacacctgagaattttgatgaatatgtgtcgttcacaacaaaggaagattctaag

SEQ ID NO: 6066 - DNA, 80 bp, synthetic construct
  misc_feature 1..80: note = Synthetic: >SBB-130-cand-9860-9939
  source 1..80: mol_type = other DNA
gtggacgttcaacgcctgttggctgctgtacaacgtttacataagggttttggtggtaaagacatacttggttttactag

SEQ ID NO: 6067 - DNA, 80 bp, synthetic construct
  misc_feature 1..80: note = Synthetic: >SBB-041-cand-9870-9949
  source 1..80: mol_type = other DNA
ttcaacgcctgttggctgctgtacaacgtttacataagggttttggtggtaaagacatacttggttttactagtttaact

SEQ ID NO: 6068 - DNA, 80 bp, synthetic construct
  misc_feature 1..80: note = Synthetic: >SBB-130-cand-9940-10019
  source 1..80: mol_type = other DNA
tttaactgacgagtttacagttagtgaggttattagacagatgtatggtgtgtcattacagggtactaaagtctctaact

SEQ ID NO: 6069 - DNA, 80 bp, synthetic construct
  misc_feature 1..80: note = Synthetic: >SBB-041-cand-9950-10029
  source 1..80: mol_type = other DNA
gatgagtttacagttagtgaggttattagacagatgtatggtgtgtcattacagggtactaaagtctctaactctattag

SEQ ID NO: 6070 - DNA, 80 bp, synthetic construct
  misc_feature 1..80: note = Synthetic: >SBB-010-cand-9950-10029
  source 1..80: mol_type = other DNA
gacgagtttacagttagtgaggttattagacagatgtatggtgtgtcattacagggtactaaagtttctaactctattag

SEQ ID NO: 6071 - DNA, 80 bp, synthetic construct
  misc_feature 1..80: note = Synthetic: >SBB-122-cand-490-569
  source 1..80: mol_type = other DNA
ccaattggtggcccgcattggcaaatttggtgaccgaccatctaacttacgtggttggttgctgttctctaactctaact

SEQ ID NO: 6072 - DNA, 80 bp, synthetic construct
  misc_feature 1..80: note = Synthetic: >SBB-120-cand-500-579
  source 1..80: mol_type = other DNA
gcccgcataggcagatttggtgaccgaccacctaatttgcgtggttggttgctgttctctaactctaactactttttagg

SEQ ID NO: 6073 - DNA, 80 bp, synthetic construct
  misc_feature 1..80: note = Synthetic: >SBB-726-cand-5930-6009
  source 1..80: mol_type = other DNA
agtttactttaactgatttgcacactttttatgtggatggcgtgcaacctttcgttttattgcgatcttctcatttgagc

SEQ ID NO: 6074 - DNA, 80 bp, synthetic construct
  misc_feature 1..80: note = Synthetic: >SBB-788-cand-5920-5999
  source 1..80: mol_type = other DNA
tgtttaaaggagtttactttaactgatttgcacactttttatgtggatggcgtgcaacctttcgttttgttgcgatcttc

SEQ ID NO: 6075 - DNA, 80 bp, synthetic construct
  misc_feature 1..80: note = Synthetic: >SBB-747-cand-5910-5989
  source 1..80: mol_type = other DNA
tgatttgctctgtttaaaggagtttactttaactgatttgcacactttctatgtggatggcgtgcaaccttttgttttat

SEQ ID NO: 6076 - DNA, 80 bp, synthetic construct
  misc_feature 1..80: note = Synthetic: >SBB-053-cand-8190-8269
  source 1..80: mol_type = other DNA
attacagtacatctgacggtggctatgtacgcttacctgaggtgttggctagtggttttggttttagggctgttcgtaca

SEQ ID NO: 6077 - DNA, 80 bp, synthetic construct
  misc_feature 1..80: note = Synthetic: >SBB-747-cand-14790-14869
  source 1..80: mol_type = other DNA
tcggagcgattttataggttggctaatgagtgtgcccaggttttaagtgaaatggtcctttgtgggggcggtttttatgt

SEQ ID NO: 6078 - DNA, 80 bp, synthetic construct
  misc_feature 1..80: note = Synthetic: >SBB-797-cand-14800-14879
  source 1..80: mol_type = other DNA
tttataggttggctaatgagtgtgcccaggttttaagtgaaatggtcctttgtgggggcggtttttatgtgaaacctggt

SEQ ID NO: 6079 - DNA, 80 bp, synthetic construct
  misc_feature 1..80: note = Synthetic: >SBB-041-cand-10430-10509
  source 1..80: mol_type = other DNA
gcatatgggttttatgcgggttctgatgtacttagccttgttatgatggtcttattcaatttcacaacaaactggtatgt

SEQ ID NO: 6080 - DNA, 80 bp, synthetic construct
  misc_feature 1..80: note = Synthetic: >SBB-130-cand-10420-10499
  source 1..80: mol_type = other DNA
ttttatggcatatgggttttatgtaggttctgatgtacttagccttgttatgatggtcttattcaatttcacaacaaact

SEQ ID NO: 6081 - DNA, 80 bp, synthetic construct
  misc_feature 1..80: note = Synthetic: >SBB-010-cand-12200-12279
  source 1..80: mol_type = other DNA
gcgtcagtttgcttgtactgccgcgcgcatgttgaacaccctggtgtcgatggtcgctgtcggtttaaaggcaagtatgt

SEQ ID NO: 6082 - DNA, 80 bp, synthetic construct
  misc_feature 1..80: note = Synthetic: >SBB-041-cand-12190-12269
  source 1..80: mol_type = other DNA
ctatggtggtgcgtcagtttgcttgtattgccgcgcgcatgttgaacaccctggtgtcgatggtcgctgtcggtttaaag

SEQ ID NO: 6083 - DNA, 80 bp, synthetic construct
  misc_feature 1..80: note = Synthetic: >SBB-797-cand-18480-18559
  source 1..80: mol_type = other DNA
gtcagtgtaaataattggcacttctatgacactaagccagtcgtagatggtgttaagcagttacactatgtgtatgatgt

SEQ ID NO: 6084 - DNA, 80 bp, synthetic construct
  misc_feature 1..80: note = Synthetic: >SBB-788-cand-18490-18569
  source 1..80: mol_type = other DNA
ataattggcacttctatgacactaagccagttgtggatggtgttaagcagttacactatgtgtatgatgtgcataaagac

SEQ ID NO: 6085 - DNA, 80 bp, synthetic construct
  misc_feature 1..80: note = Synthetic: >SBB-747-cand-18480-18559
  source 1..80: mol_type = other DNA
gtcagtgtaaataattggtacttctatgacactaaaccagttgtggacggtgttaagcagttacactatgtgtatgatgt

SEQ ID NO: 6086 - DNA, 80 bp, synthetic construct
  misc_feature 1..80: note = Synthetic: >PDF-2386-cand-8160-8239
  source 1..80: mol_type = other DNA
acatgacacccagagacctgggtgcatgcattgattgtggtgctcgtcacatcaatgcacaagtagcaaaaagtcacaat

SEQ ID NO: 6087 - DNA, 80 bp, synthetic construct
  misc_feature 1..80: note = Synthetic: >SBB-747-cand-3350-3429
  source 1..80: mol_type = other DNA
atactggctttgataatgtcttgacaccactagtgtcggcaggcatttttggttttactgtggaggaatctctgcgtagt

SEQ ID NO: 6088 - DNA, 80 bp, synthetic construct
  misc_feature 1..80: note = Synthetic: >SBB-797-cand-3360-3439
  source 1..80: mol_type = other DNA
tgataatgtcttgacaccactagtgtcggcaggcatttttggttttactgtggaggaatctctgcgtagtcttgttagga

SEQ ID NO: 6089 - DNA, 80 bp, synthetic construct
  misc_feature 1..80: note = Synthetic: >PDF-2386-cand-12960-13039
  source 1..80: mol_type = other DNA
actatttagcaagtggtggacaacctataacaaattgtgttaagatgttgtgtactcacacaggtactggacaggcaata

SEQ ID NO: 6090 - DNA, 80 bp, synthetic construct
  misc_feature 1..80: note = Synthetic: >PRD-0038-cand-15670-15749
  source 1..80: mol_type = other DNA
atgtctgaagcaaaatgttggactgagactgaccttactaaaggacctcacgaattttgctctcagcatacaatgctagt

SEQ ID NO: 6091 - DNA, 80 bp, synthetic construct
  misc_feature 1..80: note = Synthetic: >PDF-2386-cand-15680-15759
  source 1..80: mol_type = other DNA
caaaatgttggactgagactgaccttactaaaggacctcacgaattttgctctcagcatacaatgctagttaaacaagga

SEQ ID NO: 6092 - DNA, 80 bp, synthetic construct
  misc_feature 1..80: note = Synthetic: >PRD-0038-cand-17270-17349
  source 1..80: mol_type = other DNA
actatgtctacattggtgacccagctcagttacctgcacctcgcacattgcttactaagggcacactagaaccagaatac

SEQ ID NO: 6093 - DNA, 80 bp, synthetic construct
  misc_feature 1..80: note = Synthetic: >PDF-2386-cand-17280-17359
  source 1..80: mol_type = other DNA
cattggtgacccagctcagttacctgcacctcgcacattgcttactaagggcacactagaaccagaatactttaattcag

SEQ ID NO: 6094 - DNA, 80 bp, synthetic construct
  misc_feature 1..80: note = Synthetic: >SBB-024-cand-8230-8309
  source 1..80: mol_type = other DNA
ggtactggctagtggttttggttttagggctgttcgtacacaagctacaacatattgcaaggttggtcattgtgttgagt

SEQ ID NO: 6095 - DNA, 80 bp, synthetic construct
  misc_feature 1..80: note = Synthetic: >SBB-122-cand-25860-25939
  source 1..80: mol_type = other DNA
aacttccttccaacattcaaattttggaagacagtggttcacgtgctgcatcacgaagccaaagcaataaccgtgaccgc

SEQ ID NO: 6096 - DNA, 80 bp, synthetic construct
  misc_feature 1..80: note = Synthetic: >SBB-120-cand-25890-25969
  source 1..80: mol_type = other DNA
ttccaacattcaaattttggaagacagtggttcacgtgctgcatcacgaagccaaagcaataaccgtgaccgcagccaga

SEQ ID NO: 6097 - DNA, 80 bp, synthetic construct
  misc_feature 1..80: note = Synthetic: >SBB-726-cand-25610-25689
  source 1..80: mol_type = other DNA
aagaacgaatcactcttgaacgaacaagaagagcttttacttgcgccagtatgactggtaatagcacgctttcgcgtgat

SEQ ID NO: 6098 - DNA, 80 bp, synthetic construct
  misc_feature 1..80: note = Synthetic: >SBB-797-cand-25600-25679
  source 1..80: mol_type = other DNA
caaatttaagaacgaatcactcttgaacgaacaagaagagcttttacttgcgccagtatgactggtaatagcacgctttc

SEQ ID NO: 6099 - DNA, 80 bp, synthetic construct
  misc_feature 1..80: note = Synthetic: >GCS-211-cand-22380-22459
  source 1..80: mol_type = other DNA
ttaatgtgcagagtggttctttgaacattaacaatgttgtgtcatactgcgttaatgcttcacagtttaccacagttctt

SEQ ID NO: 6100 - DNA, 80 bp, synthetic construct
  misc_feature 1..80: note = Synthetic: >GCS-227-cand-22370-22449
  source 1..80: mol_type = other DNA
cgtttctgttaatgtgcagagtggttctttgaacattaacaatgttgtgtcatactgcgttaatgcttcacagtttacca

SEQ ID NO: 6101 - DNA, 80 bp, synthetic construct
  misc_feature 1..80: note = Synthetic: >SBB-122-cand-26100-26179
  source 1..80: mol_type = other DNA
aagaacttggagtaacacccaagaatcagcagggcaacaataaacaaaagaagaaatccacttctggctcaaatacacca

SEQ ID NO: 6102 - DNA, 80 bp, synthetic construct
  misc_feature 1..80: note = Synthetic: >SBB-120-cand-26130-26209
  source 1..80: mol_type = other DNA
tggagtaacacccaagaatcagcagggcaacaataaacaaaagaagaaatccacttctggctcaaatacaccacgtgcca

SEQ ID NO: 6103 - DNA, 80 bp, synthetic construct
  misc_feature 1..80: note = Synthetic: >SBB-122-cand-10790-10869
  source 1..80: mol_type = other DNA
ggtattggtggtgagaagacaattaaaatttcttctgttcaatcaaaacttactgacctaaagtgtactaatgttgttct

SEQ ID NO: 6104 - DNA, 80 bp, synthetic construct
  misc_feature 1..80: note = Synthetic: >GCS-227-cand-27810-27889
  source 1..80: mol_type = other DNA
aagaccttgaacgcactattgcccaatacaccggcaagcatagtgcatatgttcaacctaaagccgtgaaaaccattcac

SEQ ID NO: 6105 - DNA, 80 bp, synthetic construct
  misc_feature 1..80: note = Synthetic: >GCS-211-cand-27810-27889
  source 1..80: mol_type = other DNA
tgaagatcttgaacgcactattgcccaatacaccggcaagcatagtgcatatgttcaacctaaagccgtgaaaaccattc

SEQ ID NO: 6106 - DNA, 80 bp, synthetic construct
  misc_feature 1..80: note = Synthetic: >GCS-227-cand-14150-14229
  source 1..80: mol_type = other DNA
aagactttgactattaccggtacaataaaaccacaatgctagacatctgtcaagcgcgcttaacatacaaggtcgttcaa

SEQ ID NO: 6107 - DNA, 80 bp, synthetic construct
  misc_feature 1..80: note = Synthetic: >GCS-211-cand-14150-14229
  source 1..80: mol_type = other DNA
taaagactttgactattaccggtacaataaaaccacaatgctagacatctgtcaagcgcgcttaacatacaaggtcgttc

SEQ ID NO: 6108 - DNA, 80 bp, synthetic construct
  misc_feature 1..80: note = Synthetic: >GCS-211-cand-7450-7529
  source 1..80: mol_type = other DNA
aagagttgtaacttaacagacgacttcattgtgtacaacaattgtggttcaaatgttacgcaggttaagaatgcttgtgt

SEQ ID NO: 6109 - DNA, 80 bp, synthetic construct
  misc_feature 1..80: note = Synthetic: >GCS-227-cand-7450-7529
  source 1..80: mol_type = other DNA
gagttgtaacttaacagacgacttcattgtgtacaacaattgtggttcaaatgttacgcaggttaagaatgcttgtgtgt

SEQ ID NO: 6110 - DNA, 80 bp, synthetic construct
  misc_feature 1..80: note = Synthetic: >GCS-211-cand-12950-13029
  source 1..80: mol_type = other DNA
gtttcctaaggtgaactgtgttcgctacaggaatactgacaaacatgacgcattctttgttattaaacgctgtactactt

SEQ ID NO: 6111 - DNA, 80 bp, synthetic construct
  misc_feature 1..80: note = Synthetic: >GCS-227-cand-12950-13029
  source 1..80: mol_type = other DNA
ttcctaaggtgaactgtgttcgctacaggaatactgacaaacatgacgcattctttgttattaaacgctgtactacttca

SEQ ID NO: 6112 - DNA, 80 bp, synthetic construct
  misc_feature 1..80: note = Synthetic: >GCS-227-cand-15190-15269
  source 1..80: mol_type = other DNA
aagtgctggactgaagaggacattaacaagggaccacatgagttctgttcacaacacaccatgcaaatagttgatggtaa

SEQ ID NO: 6113 - DNA, 80 bp, synthetic construct
  misc_feature 1..80: note = Synthetic: >GCS-211-cand-15190-15269
  source 1..80: mol_type = other DNA
ccaagtgctggactgaagaggacattaacaagggaccacatgagttctgttcacaacacaccatgcaaatagttgatggt

SEQ ID NO: 6114 - DNA, 80 bp, synthetic construct
  misc_feature 1..80: note = Synthetic: >GCS-211-cand-3050-3129
  source 1..80: mol_type = other DNA
aagtgtgtgaaaaggtacttggcactaagctaaagatcgagggtgattggcaggatcttgttcaaatgatccgtacaact

SEQ ID NO: 6115 - DNA, 80 bp, synthetic construct
  misc_feature 1..80: note = Synthetic: >GCS-227-cand-3050-3129
  source 1..80: mol_type = other DNA
gtgtgtgaaaaggtacttggcactaagctaaagatcgagggtgattggcaggatcttgttcaaatgatccgtacaactct

SEQ ID NO: 6116 - DNA, 80 bp, synthetic construct
  misc_feature 1..80: note = Synthetic: >SBB-053-cand-760-839
  source 1..80: mol_type = other DNA
tcgtactgaaggcccttttacaagtcaaaacttgttgtcaattaattctattacttggtgtggtagtatcccacacactt

SEQ ID NO: 6117 - DNA, 80 bp, synthetic construct
  misc_feature 1..80: note = Synthetic: >SBB-122-cand-3080-3159
  source 1..80: mol_type = other DNA
agttttaagtacaatggtgattcatgggacgacttttgtgaacagattcattcagttatgaatgtcgtcggtgaacactt

SEQ ID NO: 6118 - DNA, 80 bp, synthetic construct
  misc_feature 1..80: note = Synthetic: >SBB-120-cand-3070-3149
  source 1..80: mol_type = other DNA
cattggtaagagttttaagtacaatggtgattcatgggacgacttttgtgaacagattcattcagttatgaatgtcgtcg

SEQ ID NO: 6119 - DNA, 80 bp, synthetic construct
  misc_feature 1..80: note = Synthetic: >GCS-227-cand-26530-26609
  source 1..80: mol_type = other DNA
aagttagatttaactcccgtaatggtcgagttccattatctttctttactcccctgattgtaacttctaatagagaattc

SEQ ID NO: 6120 - DNA, 80 bp, synthetic construct
  misc_feature 1..80: note = Synthetic: >GCS-211-cand-26530-26609
  source 1..80: mol_type = other DNA
caaagttagatttaactcccgtaatggtcgagttccactatctttctttactcccctgattgtaacttctaatagagatt

SEQ ID NO: 6121 - DNA, 80 bp, synthetic construct
  misc_feature 1..80: note = Synthetic: >GCS-227-cand-15670-15749
  source 1..80: mol_type = other DNA
tgtaccaagtgtgcatatgaccacgttattagcacacctcacaagttcattatgtcagtcactccttatgtgtgcaactt

SEQ ID NO: 6122 - DNA, 80 bp, synthetic construct
  misc_feature 1..80: note = Synthetic: >GCS-211-cand-15670-15749
  source 1..80: mol_type = other DNA
tgtgtaccaagtgtgcatatgaccacgttattagcacacctcacaagttcattatgtcagtcactccttatgtgtgcaac

SEQ ID NO: 6123 - DNA, 80 bp, synthetic construct
  misc_feature 1..80: note = Synthetic: >SBB-120-cand-4520-4599
  source 1..80: mol_type = other DNA
aagttggatagtgcactggaagttgctcctgttgtattacctaaaccattcaggagtgatggtaggtttgatttttatga

SEQ ID NO: 6124 - DNA, 80 bp, synthetic construct
  misc_feature 1..80: note = Synthetic: >SBB-010-cand-4510-4589
  source 1..80: mol_type = other DNA
tgtggttgctaaactggatagtgcactagaagttactcctgttgttcagcctaaaccattcaggagtgatggtaggtttg

SEQ ID NO: 6125 - DNA, 80 bp, synthetic construct
  misc_feature 1..80: note = Synthetic: >GCS-211-cand-13030-13109
  source 1..80: mol_type = other DNA
cagttatggaacacgagcaatccatttatgaactgctgaaggacagcaatgctgttgccacacatgatttcttcacatgg

SEQ ID NO: 6126 - DNA, 80 bp, synthetic construct
  misc_feature 1..80: note = Synthetic: >GCS-227-cand-13030-13109
  source 1..80: mol_type = other DNA
gttatggaacacgagcaatccatttatgaactgctgagggacagcaatgctgttgccatacatgatttcttcacatggaa

SEQ ID NO: 6127 - DNA, 80 bp, synthetic construct
  misc_feature 1..80: note = Synthetic: >GCS-227-cand-15030-15109
  source 1..80: mol_type = other DNA
tttttacaattacctgcttaaacatttttcacttatgatcctgtctgatgacggggttgtgtgttataacaaggattatg

SEQ ID NO: 6128 - DNA, 80 bp, synthetic construct
  misc_feature 1..80: note = Synthetic: >GCS-211-cand-15030-15109
  source 1..80: mol_type = other DNA
gatttttacaattacctgcttaaacatttttcacttatgatcctgtctgatgacggggttgtgtgttataacaaggatta

SEQ ID NO: 6129 - DNA, 80 bp, synthetic construct
  misc_feature 1..80: note = Synthetic: >SBB-122-cand-9910-9989
  source 1..80: mol_type = other DNA
ttttggtggtaaggacatacttggttttactagcctaactgatgagttcacagttagtgaggttattagacagatgtatg

SEQ ID NO: 6130 - DNA, 80 bp, synthetic construct
  misc_feature 1..80: note = Synthetic: >GCS-211-cand-10320-10399
  source 1..80: mol_type = other DNA
ttttggtggtaaaagtatacttggttttaccagccttactgatgagttcacgcttgcagaagttgtcaaacaaatgtatg

SEQ ID NO: 6131 - DNA, 80 bp, synthetic construct
  misc_feature 1..80: note = Synthetic: >GCS-227-cand-10310-10389
  source 1..80: mol_type = other DNA
tcaaatggttttggtggtaaaagtatacttggttttaccagccttactgatgagttcacgcttgcagaagttgtcaaaca

SEQ ID NO: 6132 - DNA, 80 bp, synthetic construct
  misc_feature 1..80: note = Synthetic: >GCS-227-cand-2490-2569
  source 1..80: mol_type = other DNA
gttcaaagattaaaattgattttggtcttgatggtttcactggtaattgcacaaagcgttttaagaaatggcttcgtatg

SEQ ID NO: 6133 - DNA, 80 bp, synthetic construct
  misc_feature 1..80: note = Synthetic: >GCS-211-cand-2490-2569
  source 1..80: mol_type = other DNA
ttgttcaaagcttaaaattgattttggtcttgatggtttcactggtaattgcacaaagcgttttaagaaatggcttcgta

SEQ ID NO: 6134 - DNA, 80 bp, synthetic construct
  misc_feature 1..80: note = Synthetic: >SBB-024-cand-8550-8629
  source 1..80: mol_type = other DNA
catatggtgtttgctccgtcgtttgtgtggcttttgtgaacaatatttcttatattgttacacagaatgccgttatgatg

SEQ ID NO: 6135 - DNA, 80 bp, synthetic construct
  misc_feature 1..80: note = Synthetic: >SBB-120-cand-8540-8619
  source 1..80: mol_type = other DNA
ggtgagttgtcatatggtgtttgctccgttgtttgtgtggcttttgtgaacaatatttcttatattgttacacagaatgc

SEQ ID NO: 6136 - DNA, 80 bp, synthetic construct
  misc_feature 1..80: note = Synthetic: >GCS-227-cand-16780-16859
  source 1..80: mol_type = other DNA
catattgtttatgttggtgacccacaacaattgcctgcacctcgtactttgatcactaaaggatcgctagcaccagccga

SEQ ID NO: 6137 - DNA, 80 bp, synthetic construct
  misc_feature 1..80: note = Synthetic: >GCS-211-cand-16790-16869
  source 1..80: mol_type = other DNA
ttatgttggtgacccacaacaattgcctgcacctcgtactttgatcactaaaggatcgctagcaccagccgactataatg

SEQ ID NO: 6138 - DNA, 80 bp, synthetic construct
  misc_feature 1..80: note = Synthetic: >GCS-211-cand-810-889
  source 1..80: mol_type = other DNA
catcaagaagattcagtatcttactggtgtaccacacaaacttgttgatggtactactcttacagaggctaaaccagtta

SEQ ID NO: 6139 - DNA, 80 bp, synthetic construct
  misc_feature 1..80: note = Synthetic: >GCS-227-cand-810-889
  source 1..80: mol_type = other DNA
tcaagaagattcagtatcttaatggtgtaccacacaaacttgttgatggtactactcttacagaggctaaaccagttaag

SEQ ID NO: 6140 - DNA, 80 bp, synthetic construct
  misc_feature 1..80: note = Synthetic: >229E-cand-10240-10319
  source 1..80: mol_type = other DNA
ctccgtttatgattttgcttgttgctttgtcactctgtcttacatcttttgttaaacataaggttttgttccttcaagtg

SEQ ID NO: 6141 - DNA, 80 bp, synthetic construct
  misc_feature 1..80: note = Synthetic: >229E-cand-10320-10399
  source 1..80: mol_type = other DNA
tttttgttgccatcaattattgtggctgcaattcagaactgtgcttgggactaccatgtaacaaaggtattggcagagaa

SEQ ID NO: 6142 - DNA, 80 bp, synthetic construct
  misc_feature 1..80: note = Synthetic: >229E-cand-10400-10479
  source 1..80: mol_type = other DNA
gtttgactacaatgtttctgttatgcaaatggacatccagggttttgttaatatttttatttgtttgtttgttgcacttt

SEQ ID NO: 6143 - DNA, 80 bp, synthetic construct
  misc_feature 1..80: note = Synthetic: >229E-cand-10480-10559
  source 1..80: mol_type = other DNA
tgcatacttggcgctttgctaaagagcgttgtacgcattggtgcacttacttgttctcactccttgctgttttatacact

SEQ ID NO: 6144 - DNA, 80 bp, synthetic construct
  misc_feature 1..80: note = Synthetic: >229E-cand-10560-10639
  source 1..80: mol_type = other DNA
gcactgtatagttatgattatgttagcttgctagttatgctactttgcgcaatttctaatgaatggtacataggtgctat

SEQ ID NO: 6145 - DNA, 80 bp, synthetic construct
  misc_feature 1..80: note = Synthetic: >229E-cand-10640-10719
  source 1..80: mol_type = other DNA
tatttttagaatttgtcgttttggtgttgcatgtttgccagtggcatacgtggcatactttggtagtgttaaaactgtgt

SEQ ID NO: 6146 - DNA, 80 bp, synthetic construct
  misc_feature 1..80: note = Synthetic: >229E-cand-10720-10799
  source 1..80: mol_type = other DNA
tgttgttttatatgttgttaggctttgttagctgtatgtactatggtttgttgtactggattaacagattctgtaaatgc

SEQ ID NO: 6147 - DNA, 80 bp, synthetic construct
  misc_feature 1..80: note = Synthetic: >229E-cand-10800-10879
  source 1..80: mol_type = other DNA
acattaggtgtttatgatttttgtgttagtccagctgaatttaagtacatggttgctaatggcttgaatgcaccagatgg

SEQ ID NO: 6148 - DNA, 80 bp, synthetic construct
  misc_feature 1..80: note = Synthetic: >229E-cand-10880-10959
  source 1..80: mol_type = other DNA
cccttttgatgcgctatttctgtcgtttaaactaatgggtattggcggtcctagaactattaaagtttctactgtacaat

SEQ ID NO: 6149 - DNA, 80 bp, synthetic construct
  misc_feature 1..80: note = Synthetic: >229E-cand-10960-11039
  source 1..80: mol_type = other DNA
ctaaattgacagatcttaagtgcacaaacgtcgttctaatgggcattttgtctaatatgaacatagcttctaactcaaag

SEQ ID NO: 6150 - DNA, 80 bp, synthetic construct
  misc_feature 1..80: note = Synthetic: >229E-cand-11040-11119
  source 1..80: mol_type = other DNA
gagtgggcatattgtgttgaaacgcacaataaaataaacttgtgtgataaccccgaaactgctcaggagctgttgctggc

SEQ ID NO: 6151 - DNA, 80 bp, synthetic construct
  misc_feature 1..80: note = Synthetic: >229E-cand-11120-11199
  source 1..80: mol_type = other DNA
gttgttggcatttttcttgtctaagcatagtgattttggtcttggcgatcttgtcgattcttattttgagaatgactcca

SEQ ID NO: 6152 - DNA, 80 bp, synthetic construct
  misc_feature 1..80: note = Synthetic: >229E-cand-11200-11279
  source 1..80: mol_type = other DNA
ttttgcaaagtgttgcatcgtcttttgttggtatgccatcttttgttgcatatgaaacagcaagacaagagtatgaaaat

SEQ ID NO: 6153 - DNA, 80 bp, synthetic construct
  misc_feature 1..80: note = Synthetic: >229E-cand-11280-11359
  source 1..80: mol_type = other DNA
gctgttgcaaatggttcttcaccacaaataatcaaacaattgaaaaaggctatgaatgttgcaaaagctgagtttgacag

SEQ ID NO: 6154 - DNA, 80 bp, synthetic construct
  misc_feature 1..80: note = Synthetic: >229E-cand-11360-11439
  source 1..80: mol_type = other DNA
ggaatcatctgttcaaaggaaaattaatagaatggctgaacaagctgctgcagctatgtataaagaagcacgtgcagtca

SEQ ID NO: 6155 - DNA, 80 bp, synthetic construct
  misc_feature 1..80: note = Synthetic: >229E-cand-11440-11519
  source 1..80: mol_type = other DNA
atagaaaatcaaaggttgttagtgccatgcatagtttactctttggcatgctccgacgattggacatgtctagtgttgat

SEQ ID NO: 6156 - DNA, 80 bp, synthetic construct
  misc_feature 1..80: note = Synthetic: >AlphaCoV1-cand-18590-18669
  source 1..80: mol_type = other DNA
gacaacctaattatgtaccacttaagtcaaatgtttgcataacaaaatgcaacattggtggtgctgtctgcaagaagcat

SEQ ID NO: 6157 - DNA, 80 bp, synthetic construct
  misc_feature 1..80: note = Synthetic: >AlphaCoV1-cand-18670-18749
  source 1..80: mol_type = other DNA
gctgctctttacagagcgtatgttgaggattacaacatgtttatgcaggctggttttacaatatggtgtcctcaaaattt

SEQ ID NO: 6158 - DNA, 80 bp, synthetic construct
  misc_feature 1..80: note = Synthetic: >AlphaCoV1-cand-18750-18829
  source 1..80: mol_type = other DNA
tgacacttatatgctttggcaaggttttgttaatagcaaagcactccagagtttagaaaatgtggcttttaatgtcgtta

SEQ ID NO: 6159 - DNA, 80 bp, synthetic construct
  misc_feature 1..80: note = Synthetic: >AlphaCoV1-cand-18830-18909
  source 1..80: mol_type = other DNA
agaaaggtgccttcactggtttaaaaggtgacttaccaactgctgttattgctgacaagataatggtaagagatggacct

SEQ ID NO: 6160 - DNA, 80 bp, synthetic construct
  misc_feature 1..80: note = Synthetic: >AlphaCoV1-cand-18910-18989
  source 1..80: mol_type = other DNA
actgacaaatgtatttttacaaataagactagtttacctacaaatgtagcttttgagctgtatgcaaaacgcaaacttgg

SEQ ID NO: 6161 - DNA, 80 bp, synthetic construct
  misc_feature 1..80: note = Synthetic: >AlphaCoV1-cand-18990-19069
  source 1..80: mol_type = other DNA
actcacacctccattaacaatacttagaaatctaggtgttgtcgcaacatataaatttgtgttgtgggattatgaagctg

SEQ ID NO: 6162 - DNA, 80 bp, synthetic construct
  misc_feature 1..80: note = Synthetic: >AlphaCoV1-cand-19070-19149
  source 1..80: mol_type = other DNA
aatgtcctttctcaaatttcactaagcaagtgtgttcttacactgatcttgatagtgaagttgtaacatgttttgataat

SEQ ID NO: 6163 - DNA, 80 bp, synthetic construct
  misc_feature 1..80: note = Synthetic: >AlphaCoV1-cand-19150-19229
  source 1..80: mol_type = other DNA
agtattgctggttcttttgaacgctttactactacaaaagatgcagtgcttatttctaataacgctgtgaaagggcttag

SEQ ID NO: 6164 - DNA, 80 bp, synthetic construct
  misc_feature 1..80: note = Synthetic: >AlphaCoV1-cand-19230-19309
  source 1..80: mol_type = other DNA
tgccattaaattacaatatggctttttgaatgatttacctgtaagtactgttggaaacaaacctgtcacatggtatatct

SEQ ID NO: 6165 - DNA, 80 bp, synthetic construct
  misc_feature 1..80: note = Synthetic: >AlphaCoV1-cand-19310-19389
  source 1..80: mol_type = other DNA
atgtgcgcaagaatggtgagtacgtcgaacaaattgatagttattatacacagggacgtacttttgaaacctttaaacct

SEQ ID NO: 6166 - DNA, 80 bp, synthetic construct
  misc_feature 1..80: note = Synthetic: >AlphaCoV1-cand-19390-19469
  source 1..80: mol_type = other DNA
cgtagtacaatggaagaagattttcttagtatggatactacactcttcatccaaaagtatggtcttgaggattatggttt

SEQ ID NO: 6167 - DNA, 80 bp, synthetic construct
  misc_feature 1..80: note = Synthetic: >AlphaCoV1-cand-19470-19549
  source 1..80: mol_type = other DNA
tgaacacgttgtatttggagatgtttctaaaactaccattggtggtatgcatcttcttatatcacaagtgcgccttgcaa

SEQ ID NO: 6168 - DNA, 80 bp, synthetic construct
  misc_feature 1..80: note = Synthetic: >AlphaCoV1-cand-19550-19629
  source 1..80: mol_type = other DNA
aaatgggtttgttttctgttcaagaatttatgaataattctgacagtacactgaaaagttgttgtattacatatgctgat

SEQ ID NO: 6169 - DNA, 80 bp, synthetic construct
  misc_feature 1..80: note = Synthetic: >AlphaCoV1-cand-19630-19709
  source 1..80: mol_type = other DNA
gatccatcttctaagaatgtgtgcacttatatggacatactcttggacgattttgtgactatcattaagagcttagatct

SEQ ID NO: 6170 - DNA, 80 bp, synthetic construct
  misc_feature 1..80: note = Synthetic: >AlphaCoV1-cand-19710-19789
  source 1..80: mol_type = other DNA
taatgttgtgtccaaagttgtggatgttattgtagattgtaaggcatggagatggatgttgtggtgtgagaattcacaaa

SEQ ID NO: 6171 - DNA, 80 bp, synthetic construct
  misc_feature 1..80: note = Synthetic: >AlphaCoV1-cand-19790-19869
  source 1..80: mol_type = other DNA
ttaaaaccttctatccacaactccaatcttctgaatggaatcctggctatagcatgcctacactgtacaaaatccagcgt

SEQ ID NO: 6172 - DNA, 80 bp, synthetic construct
  misc_feature 1..80: note = Synthetic: >AlphaCoV1-cand-30090-30169
  source 1..80: mol_type = other DNA
tggtaagcacgtgtcaataggaggtacaagcaaccctattgcatattaggaagtttagatttgatttggcaatgctagat

SEQ ID NO: 6173 - DNA, 80 bp, synthetic construct
  misc_feature 1..80: note = Synthetic: >AlphaCoV1-cand-30170-30249
  source 1..80: mol_type = other DNA
ttagtaatttagagaagtttaaagatccgctatgacgagccaacaatggaagagctcaacgtctggatctagtgattgtt

SEQ ID NO: 6174 - DNA, 80 bp, synthetic construct
  misc_feature 1..80: note = Synthetic: >AlphaSp-cand-10-89
  source 1..80: mol_type = other DNA
cgattcaactaaacgaaattttgtccttcaacgcacatgtctatgtgcgctgaagtgaaattggaatttcgctaggtttg

SEQ ID NO: 6175 - DNA, 80 bp, synthetic construct
  misc_feature 1..80: note = Synthetic: >AlphaSp-cand-90-169
  source 1..80: mol_type = other DNA
cttagtagctagtacaagtgccgtgctgctccagggttcttggtgtgggttccgtctcgcacttcacaccctcaaagtag

SEQ ID NO: 6176 - DNA, 80 bp, synthetic construct
  misc_feature 1..80: note = Synthetic: >AlphaSp-cand-410-489
  source 1..80: mol_type = other DNA
tgaagacgacgatgtcgtcatgctaatcactggtgtcactcaattgagggcttatttgggcacttttggtgatcgacctc

SEQ ID NO: 6177 - DNA, 80 bp, synthetic construct
  misc_feature 1..80: note = Synthetic: >AlphaSp-cand-570-649
  source 1..80: mol_type = other DNA
ggtactactatacctgtcgatcaatttatgtgcggtgcagatggtgcccctgtcattcaggagggtgattggactttcat

SEQ ID NO: 6178 - DNA, 80 bp, synthetic construct
  misc_feature 1..80: note = Synthetic: >AlphaSp-cand-810-889
  source 1..80: mol_type = other DNA
accacaatgaagactgcacgacaccctaaactgaataagagtgttgttttgtcacctccatttgaccagatctatgacga

SEQ ID NO: 6179 - DNA, 80 bp, synthetic construct
  misc_feature 1..80: note = Synthetic: >AlphaSp-cand-890-969
  source 1..80: mol_type = other DNA
agttggttctccatttatgggtaacggctctacatttttggaaatggtcaaagatccagcttttttccatgcccttatca

SEQ ID NO: 6180 - DNA, 80 bp, synthetic construct
  misc_feature 1..80: note = Synthetic: >AlphaSp-cand-970-1049
  source 1..80: mol_type = other DNA
cgtgtgattgtggcaggtcagagtggactgttggtgattggaagggatacaattccctttgttgcaacatcaaatgcaaa

SEQ ID NO: 6181 - DNA, 80 bp, synthetic construct
  misc_feature 1..80: note = Synthetic: >AlphaSp-cand-1050-1129
  source 1..80: mol_type = other DNA
cccattaccatagtcactccaaaagctgttcctggagctgttgtcatcactaaagctggtattggtgcagggctgaagtg

SEQ ID NO: 6182 - DNA, 80 bp, synthetic construct
  misc_feature 1..80: note = Synthetic: >AlphaSp-cand-28020-28099
  source 1..80: mol_type = other DNA
ttactgtttagtgctgtacatctccaaagataattgggctccctggaggaggtatgttaacctctacaggcccttacatg

SEQ ID NO: 6183 - DNA, 80 bp, synthetic construct
  misc_feature 1..80: note = Synthetic: >AlphaSp-cand-28180-28259
  source 1..80: mol_type = other DNA
ctgggcattggagtcttccaatactagcggtcttggtcttgcacacaacggtaagcctgtaataatgacagtgcaagtag

SEQ ID NO: 6184 - DNA, 80 bp, synthetic construct
  misc_feature 1..80: note = Synthetic: >AlphaSp-cand-28260-28339
  source 1..80: mol_type = other DNA
gttattattatattgcagctacgaggcgaacgtagtctattacaattacactagagcacgagtaatcaaagatccgcttg

SEQ ID NO: 6185 - DNA, 80 bp, synthetic construct
  misc_feature 1..80: note = Synthetic: >AlphaSp-cand-28340-28419
  source 1..80: mol_type = other DNA
acgagcctatatggaagagcgtgcatggtgtaatcgtctaaaagactatctagtaactgaagacctagctgctttgatag

SEQ ID NO: 6186 - DNA, 80 bp, synthetic construct
  misc_feature 1..80: note = Synthetic: >Anlong-cand-10-89
  source 1..80: mol_type = other DNA
atctatctacggatagtgcatactctctctagaccttgccgtctactcaactcaactaaacgaaattttcaccttttggc

SEQ ID NO: 6187 - DNA, 80 bp, synthetic construct
  misc_feature 1..80: note = Synthetic: >Anlong-cand-90-169
  source 1..80: mol_type = other DNA
atttgggcttgcctaaatgccaaagggtgctagccaatatttcggttagactgccccaatttgcttaaaagtagtgtgcc

SEQ ID NO: 6188 - DNA, 80 bp, synthetic construct
  misc_feature 1..80: note = Synthetic: >Anlong-cand-330-409
  source 1..80: mol_type = other DNA
tgatgtggaaataaatggttatggctaccaaaccatgggagaggccgtcacagcttatagcgtggccgcagctgatgggt

SEQ ID NO: 6189 - DNA, 80 bp, synthetic construct
  misc_feature 1..80: note = Synthetic: >Anlong-cand-410-489
  source 1..80: mol_type = other DNA
ttgcacaatgccgctttgttccatttggccttcaagactgtattgttggtgtgaacgacgacgactatgtcatggtgctc

SEQ ID NO: 6190 - DNA, 80 bp, synthetic construct
  misc_feature 1..80: note = Synthetic: >Anlong-cand-490-569
  source 1..80: mol_type = other DNA
actggcgatcacactctttatgcctatttggaccaattttcagctacacccactaacatcaggggctggctgattttctc

SEQ ID NO: 6191 - DNA, 80 bp, synthetic construct
  misc_feature 1..80: note = Synthetic: >Anlong-cand-570-649
  source 1..80: mol_type = other DNA
caactgtaactacgtcctagagacattcgacatggttctcggtcgtagaggtggtaatccaccaatctacgtcgacaact

SEQ ID NO: 6192 - DNA, 80 bp, synthetic construct
  misc_feature 1..80: note = Synthetic: >Anlong-cand-660-739
  source 1..80: mol_type = other DNA
cgccgacggcacaccagcagtacaggagactatgtggtcttacactgatcacttcggtgaggattgcgatgagatcacca

SEQ ID NO: 6193 - DNA, 80 bp, synthetic construct
  misc_feature 1..80: note = Synthetic: >Anlong-cand-740-819
  source 1..80: mol_type = other DNA
tttgtggcattacatatgttcatgcatggaacgttcagcgcgctgaactgccatatgaccagcagaatgccactacaatc

SEQ ID NO: 6194 - DNA, 80 bp, synthetic construct
  misc_feature 1..80: note = Synthetic: >Anlong-cand-820-899
  source 1..80: mol_type = other DNA
ttgtcaatcgaatacctgatcgatgttgatcacgcactgcagaatggcgccactttaaacgtcgcttctgctgcaaaata

SEQ ID NO: 6195 - DNA, 80 bp, synthetic construct
  misc_feature 1..80: note = Synthetic: >AvianCoV-cand-8680-8759
  source 1..80: mol_type = other DNA
agataggtgataaatttgaagcttatctctcagcgtatgctagacttaaatactattcaggcactggcagtgagcaagat

SEQ ID NO: 6196 - DNA, 80 bp, synthetic construct
  misc_feature 1..80: note = Synthetic: >AvianCoV-cand-8760-8839
  source 1..80: mol_type = other DNA
tacttgcaagcctgtcgtgcatggttagcttatgcactagaccaatatagaagtagtggtgtagaaattgtttatactcc

SEQ ID NO: 6197 - DNA, 80 bp, synthetic construct
  misc_feature 1..80: note = Synthetic: >AvianCoV-cand-8840-8919
  source 1..80: mol_type = other DNA
accacgttattctattggtgttagtagattacaagctggttttaagaaactagtttctcctagtagtgctgttgagaagt

SEQ ID NO: 6198 - DNA, 80 bp, synthetic construct
  misc_feature 1..80: note = Synthetic: >AvianCoV-cand-8920-8999
  source 1..80: mol_type = other DNA
gcattgttagtgtctcttatagaggtaataatcttaatggactgtggttgggtgattctatctactgtccacgacatgtg

SEQ ID NO: 6199 - DNA, 80 bp, synthetic construct
  misc_feature 1..80: note = Synthetic: >AvianCoV-cand-9000-9079
  source 1..80: mol_type = other DNA
ttaggtaagtttagtggtgaccaatggagtgatgtacttaatcttgctaataatcatgagtttgaagttgtaactcaaaa

SEQ ID NO: 6200 - DNA, 80 bp, synthetic construct
  misc_feature 1..80: note = Synthetic: >AvianCoV-cand-9080-9159
  source 1..80: mol_type = other DNA
tggtgttactttgaatgttgtcagtaggcgtttgaaaggtgcagttttaattttacaaactgcagttgccaatgctgaaa

SEQ ID NO: 6201 - DNA, 80 bp, synthetic construct
  misc_feature 1..80: note = Synthetic: >AvianCoV-cand-9160-9239
  source 1..80: mol_type = other DNA
ctccaaagtataagtttgtgaaagcaaattgtggtgatagtttcactatagcttgctcttatggtggtacagttatagga

SEQ ID NO: 6202 - DNA, 80 bp, synthetic construct
  misc_feature 1..80: note = Synthetic: >AvianCoV-cand-9240-9319
  source 1..80: mol_type = other DNA
ctctaccctgttactatgcgttctaatggtactattagagcatcttttcttgcaggagcatgtggttcagtaggttttaa

SEQ ID NO: 6203 - DNA, 80 bp, synthetic construct
  misc_feature 1..80: note = Synthetic: >AvianCoV-cand-9320-9399
  source 1..80: mol_type = other DNA
tatagaaaagggtgtagttaatttttactacatgcaccatcttgagttacctaatgcattacacacaggaactgacctaa

SEQ ID NO: 6204 - DNA, 80 bp, synthetic construct
  misc_feature 1..80: note = Synthetic: >AvianCoV-cand-9400-9479
  source 1..80: mol_type = other DNA
tgggtgagttctatggtggttatgtagatgaagaggttgcacagagagtgccaccagataaattagttactaataatatt

SEQ ID NO: 6205 - DNA, 80 bp, synthetic construct
  misc_feature 1..80: note = Synthetic: >AvianCoV-cand-9480-9559
  source 1..80: mol_type = other DNA
gtagcatggctttatgcagcaattattagtgttaaagagagtagtttttcaatacctaaatggcttgaaagtactactgt

SEQ ID NO: 6206 - DNA, 80 bp, synthetic construct
  misc_feature 1..80: note = Synthetic: >AvianCoV-cand-9560-9639
  source 1..80: mol_type = other DNA
cagtattgaagattataataagtgggctggtgataatggttttacaccatttgcaactagcactgctattactaaattaa

SEQ ID NO: 6207 - DNA, 80 bp, synthetic construct
  misc_feature 1..80: note = Synthetic: >AvianCoV-cand-9640-9719
  source 1..80: mol_type = other DNA
gtgctataacaggagtagatgtttgtaaactccttcgcactattatggtaaaaagtacacaatggggtagtgaccctatt

SEQ ID NO: 6208 - DNA, 80 bp, synthetic construct
  misc_feature 1..80: note = Synthetic: >AvianCoV-cand-9720-9799
  source 1..80: mol_type = other DNA
ttaggacaatataattttgaagatgaaatgacaccagaatctgtttttaatcaggtgggtggtgttaggttacagtcttc

SEQ ID NO: 6209 - DNA, 80 bp, synthetic construct
  misc_feature 1..80: note = Synthetic: >AvianCoV-cand-9800-9879
  source 1..80: mol_type = other DNA
tgttgtaaaaaaagctacatcttggttttggagtagatgtgtgttagcttgcttcttatttgtgttgtgtgctattgtct

SEQ ID NO: 6210 - DNA, 80 bp, synthetic construct
  misc_feature 1..80: note = Synthetic: >AvianCoV-cand-9880-9959
  source 1..80: mol_type = other DNA
tgtttacggcagtaccacttagatattatgtacatgcagctgttgttttgtttgcagctgtgctctttatttcttttact

SEQ ID NO: 6211 - DNA, 80 bp, synthetic construct
  misc_feature 1..80: note = Synthetic: >BetaCoV1-cand-10380-10459
  source 1..80: mol_type = other DNA
gtgttacttatggcaatatgactcttaatgggctttggcttgacaataaagtatattgtcctcgtcatgtcatctgtgca

SEQ ID NO: 6212 - DNA, 80 bp, synthetic construct
  misc_feature 1..80: note = Synthetic: >BetaCoV1-cand-10460-10539
  source 1..80: mol_type = other DNA
gccaatgatatggttgatcctgattatgagtctttgctttgtagggttacctcgacagattttgtggttatgtttgatcg

SEQ ID NO: 6213 - DNA, 80 bp, synthetic construct
  misc_feature 1..80: note = Synthetic: >BetaCoV1-cand-10540-10619
  source 1..80: mol_type = other DNA
tatgagtcttactgttatgtcttaccaaatgcagggcgctatgttgatcctgactgtcacattgcaaaatactaaaacac

SEQ ID NO: 6214 - DNA, 80 bp, synthetic construct
  misc_feature 1..80: note = Synthetic: >BetaCoV1-cand-10620-10699
  source 1..80: mol_type = other DNA
caaagtatacttttggcaatgtgaaacctggagagacatttacagttttggctgcatacaatggcaaacctcagggagcc

SEQ ID NO: 6215 - DNA, 80 bp, synthetic construct
  misc_feature 1..80: note = Synthetic: >BetaCoV1-cand-10700-10779
  source 1..80: mol_type = other DNA
tttcatgtgacaatgcgtagcagtttcactattaagggctcttttctctgtggatcttgtggatccgtaggttatgtttt

SEQ ID NO: 6216 - DNA, 80 bp, synthetic construct
  misc_feature 1..80: note = Synthetic: >BetaCoV1-cand-10860-10939
  source 1..80: mol_type = other DNA
ggaatttctatggaccctatcgtgatgctcaagttgtacaactccctatacaggattatgtgcagtctgttaattttgta

SEQ ID NO: 6217 - DNA, 80 bp, synthetic construct
  misc_feature 1..80: note = Synthetic: >BetaCoV1-cand-11020-11099
  source 1..80: mol_type = other DNA
ctgggctatggcaaatggtttcagtcaatttaccatggatcttgttatagatgctttggcttctatgactggagttcctg

SEQ ID NO: 6218 - DNA, 80 bp, synthetic construct
  misc_feature 1..80: note = Synthetic: >BetaCoV1-cand-11100-11179
  source 1..80: mol_type = other DNA
ttgagaagtgtcttgccgccattaaaagattgaataatggttttcagggcaggcaaattttgggcagttgcgtctttgag

SEQ ID NO: 6219 - DNA, 80 bp, synthetic construct
  misc_feature 1..80: note = Synthetic: >BetaCoV1-cand-11180-11259
  source 1..80: mol_type = other DNA
gatgaacttacaccaagcgatgtctatcaacaactcgctggtgttaagttgcaatcgaagcgcactagagtttttaaggg

SEQ ID NO: 6220 - DNA, 80 bp, synthetic construct
  misc_feature 1..80: note = Synthetic: >BetaCoV1-cand-11260-11339
  source 1..80: mol_type = other DNA
tacattgtgctgggtgtttacatcaacgtttttgtttgcgtgtattctctcagcatttgtaaaatggactatgtttatgt

SEQ ID NO: 6221 - DNA, 80 bp, synthetic construct
  misc_feature 1..80: note = Synthetic: >BetaCoV1-cand-11340-11419
  source 1..80: mol_type = other DNA
atgtgactctcaatgtttttagtgtcacaataggaacactttgtcttgtagcctgtgctatgttgtttattaaacacaag

SEQ ID NO: 6222 - DNA, 80 bp, synthetic construct
  misc_feature 1..80: note = Synthetic: >BetaCoV1-cand-11420-11499
  source 1..80: mol_type = other DNA
cacttgtatttgactatgtttatacttcctgtatttttgacactgttgtatactaactatttggtggtttacaaacagtc

SEQ ID NO: 6223 - DNA, 80 bp, synthetic construct
  misc_feature 1..80: note = Synthetic: >BetaCoV1-cand-12780-12859
  source 1..80: mol_type = other DNA
gatcaagttgtggataatgtgtacattgcatatgctggtaatgtttggcatatacagagtatacaagatgctgatggcac

SEQ ID NO: 6224 - DNA, 80 bp, synthetic construct
  misc_feature 1..80: note = Synthetic: >BetaCoV1-cand-12940-13019
  source 1..80: mol_type = other DNA
ctaccgtgatgcagaataacgaacttatgcctgcaaaattaaaaatacaggttgttagtagtggaccagacatgaattgt

SEQ ID NO: 6225 - DNA, 80 bp, synthetic construct
  misc_feature 1..80: note = Synthetic: >BetaCoV1-cand-13020-13099
  source 1..80: mol_type = other DNA
aatgtgcctacccagtgttattataataatagtaacaaagggcggataatttatgctatacttagtgatacggatggttt

SEQ ID NO: 6226 - DNA, 80 bp, synthetic construct
  misc_feature 1..80: note = Synthetic: >BetaCoV1-cand-13180-13259
  source 1..80: mol_type = other DNA
atgcaaagggacttaaagttaagtacttgtattttgttaaaggttgtaacacactagcccgtggctgggttgttggaact

SEQ ID NO: 6227 - DNA, 80 bp, synthetic construct
  misc_feature 1..80: note = Synthetic: >BetaCoV1-cand-13260-13339
  source 1..80: mol_type = other DNA
atatcttcaacagttcgtttgcaggctgggcatgcaactgagtatgctgccaattctgcaatactgtctttgtgtgcgtt

SEQ ID NO: 6228 - DNA, 80 bp, synthetic construct
  misc_feature 1..80: note = Synthetic: >BetaCoV1-cand-13340-13419
  source 1..80: mol_type = other DNA
ctctgtagatcctaagaagacgtatttggattatatacaacaagggggtagtcctatagcaaattgtgtgaagatgcttt

SEQ ID NO: 6229 - DNA, 80 bp, synthetic construct
  misc_feature 1..80: note = Synthetic: >BetaCoV1-cand-13420-13499
  source 1..80: mol_type = other DNA
gcgaccatgcgggtaccggtatggccattacagttaaacctgatgctactactaatcaggattcttatggtggtgcatct

SEQ ID NO: 6230 - DNA, 80 bp, synthetic construct
  misc_feature 1..80: note = Synthetic: >BetaCoV1-cand-13500-13579
  source 1..80: mol_type = other DNA
gtatgtatatactgccgcgctcgtattgaacatccagatatagatggattgtgcaagttgcgtggtaaatttgtgcaagt

SEQ ID NO: 6231 - DNA, 80 bp, synthetic construct
  misc_feature 1..80: note = Synthetic: >BetaCoV1-cand-13740-13819
  source 1..80: mol_type = other DNA
atgcccgtctcgtaccctgtgccagtggtttatctactgatgttcaaaaaagggcatttgatatttgtaatgctaatgtt

SEQ ID NO: 6232 - DNA, 80 bp, synthetic construct
  misc_feature 1..80: note = Synthetic: >BetaCoV1-cand-13820-13899
  source 1..80: mol_type = other DNA
gctggcattggtttacattataaggttaattgctgtcgatttcagtgtgctgaagaagacggtactttattagaccagta

SEQ ID NO: 6233 - DNA, 80 bp, synthetic construct
  misc_feature 1..80: note = Synthetic: >BetaCoV1-cand-13900-13979
  source 1..80: mol_type = other DNA
ctttgttgtaaaaagaactggccttgatatatatgagaaagaaaaagcatgttatgagcggttaaaagattgtagtgttg

SEQ ID NO: 6234 - DNA, 80 bp, synthetic construct
  misc_feature 1..80: note = Synthetic: >BetaCoV1-cand-13980-14059
  source 1..80: mol_type = other DNA
tggctatacacgacttcttcacatttgatgttgaaggtagccgtgttccccacattgtccgcaaatatctaacaaaatat

SEQ ID NO: 6235 - DNA, 80 bp, synthetic construct
  misc_feature 1..80: note = Synthetic: >BetaCoV1-cand-17860-17939
  source 1..80: mol_type = other DNA
ggctaagaatgataagagctcattgtgttttaaggtctattttaagggtcagactacacatgagagttcaagtgctgtca

SEQ ID NO: 6236 - DNA, 80 bp, synthetic construct
  misc_feature 1..80: note = Synthetic: >BetaCoV1-cand-17940-18019
  source 1..80: mol_type = other DNA
atatgcagcagatatatttgattagcaaatttttaaaagctaatcccctctggcaaaaggctgtgtttatcagtccttat

SEQ ID NO: 6237 - DNA, 80 bp, synthetic construct
  misc_feature 1..80: note = Synthetic: >BetaCoV1-cand-18020-18099
  source 1..80: mol_type = other DNA
aatagtcagaactttgctgctaagaggatattaggtttgcaaactcaaaccgttgactctgcacagggttctgaatatga

SEQ ID NO: 6238 - DNA, 80 bp, synthetic construct
  misc_feature 1..80: note = Synthetic: >BetaCoV1-cand-18340-18419
  source 1..80: mol_type = other DNA
tgctcatgctccgtcatttgttgcagtagatgaaaagtacaaagtaagtggtgatttggccgtttgcttggatattgcag

SEQ ID NO: 6239 - DNA, 80 bp, synthetic construct
  misc_feature 1..80: note = Synthetic: >BetaCoV1-cand-18500-18579
  source 1..80: mol_type = other DNA
tttataacaaaagaagaagctgtcaaacgtgtgcgagcttgggtaggctttgatgcggaaggtgctcatgccacacgtga

SEQ ID NO: 6240 - DNA, 80 bp, synthetic construct
  misc_feature 1..80: note = Synthetic: >BetaCoV1-cand-18580-18659
  source 1..80: mol_type = other DNA
caacattgggactaatctcccattacagttaggcttttcaacaggaattgattttgttgttgaggccgttggtttgttat

SEQ ID NO: 6241 - DNA, 80 bp, synthetic construct
  misc_feature 1..80: note = Synthetic: >BetaCoV1-cand-18660-18739
  source 1..80: mol_type = other DNA
ctgaaagagacagctacaaatttgctaaagttgtagcgcgtgctccaccaggtgaacaatttaaacatcttataccacta

SEQ ID NO: 6242 - DNA, 80 bp, synthetic construct
  misc_feature 1..80: note = Synthetic: >BetaCoV1-cand-18740-18819
  source 1..80: mol_type = other DNA
atgaccagaggtcaaaagtgggaagttgttcgtttacgcattgtacaaatgctttcagaccatcttgtagatttagctga

SEQ ID NO: 6243 - DNA, 80 bp, synthetic construct
  misc_feature 1..80: note = Synthetic: >BetaCoV1-cand-18820-18899
  source 1..80: mol_type = other DNA
ttctgttgtttttgttacatgggctgccaattttgaattgacatgtcttcgctattttgcaaaaatagggaaggagacaa

SEQ ID NO: 6244 - DNA, 80 bp, synthetic construct
  misc_feature 1..80: note = Synthetic: >BetaCoV1-cand-18900-18979
  source 1..80: mol_type = other DNA
tttgtaatgtgtgtactaaccgtgccactgtttataattcacgcactggttattatggatgttggcggcacagtttatct

SEQ ID NO: 6245 - DNA, 80 bp, synthetic construct
  misc_feature 1..80: note = Synthetic: >BetaCoV1-cand-18980-19059
  source 1..80: mol_type = other DNA
tgtgattatgtgtataacccacttattgtagatatacagcagtggggttatacaggttctttgtctagcaatcatgacat

SEQ ID NO: 6246 - DNA, 80 bp, synthetic construct
  misc_feature 1..80: note = Synthetic: >BetaCoV1-cand-19060-19139
  source 1..80: mol_type = other DNA
gtattgtagcgttcataagggagctcatgttgcctcttcagacgctataatgactcggtgtttagccgtgtatgattgtt

SEQ ID NO: 6247 - DNA, 80 bp, synthetic construct
  misc_feature 1..80: note = Synthetic: >CDPHE15-cand-24800-24879
  source 1..80: mol_type = other DNA
ctcacagcgatgctgttgttgttgaccagcagctagagccagttaggcaattttctattgcttctggctttttctttacc

SEQ ID NO: 6248 - DNA, 80 bp, synthetic construct
  misc_feature 1..80: note = Synthetic: >CDPHE15-cand-24880-24959
  source 1..80: mol_type = other DNA
agtgtgtttgtgatttacttcacactgtttaaggcgtctacttttagacgtaacctactactactacttgcacgctttat

SEQ ID NO: 6249 - DNA, 80 bp, synthetic construct
  misc_feature 1..80: note = Synthetic: >CDPHE15-cand-24960-25039
  source 1..80: mol_type = other DNA
tgtagtcgtggtttattgtccattgttattttactttggatgccatttagatggttcatttattttgttgaccatctttg

SEQ ID NO: 6250 - DNA, 80 bp, synthetic construct
  misc_feature 1..80: note = Synthetic: >CDPHE15-cand-25040-25119
  source 1..80: mol_type = other DNA
ccagacttttatatgtctgttactatgcctggcgttacaagtccattcaatttgttgtgctcaacacaactacactagct

SEQ ID NO: 6251 - DNA, 80 bp, synthetic construct
  misc_feature 1..80: note = Synthetic: >CDPHE15-cand-25120-25199
  source 1..80: mol_type = other DNA
tttgtcaacggtaagtgcacttattatgctaatgagccattcttcacttttgagggtggtgatcattacattaaattagg

SEQ ID NO: 6252 - DNA, 80 bp, synthetic construct
  misc_feature 1..80: note = Synthetic: >CDPHE15-cand-25200-25279
  source 1..80: mol_type = other DNA
tgagtattatgtcccatttgtggacaggaactccctttatgttgcactccgaggaaagtttgaggaagatgtctatctgt

SEQ ID NO: 6253 - DNA, 80 bp, synthetic construct
  misc_feature 1..80: note = Synthetic: >CDPHE15-cand-25280-25359
  source 1..80: mol_type = other DNA
ctcgtagtatcgagctatttaatggacactttctctatgtctttactcggcagcaagttgtcggcattgtaaattctaat

SEQ ID NO: 6254 - DNA, 80 bp, synthetic construct
  misc_feature 1..80: note = Synthetic: >CDPHE15-cand-25360-25439
  source 1..80: mol_type = other DNA
tttacagatgttcaactcgacgaacttgaatatgcttcagctagttgatgatcatggacttcttgtcaatggcattttat

SEQ ID NO: 6255 - DNA, 80 bp, synthetic construct
  misc_feature 1..80: note = Synthetic: >CDPHE15-cand-25440-25519
  source 1..80: mol_type = other DNA
ggcttattttactcttctttgtcctaatagtttctataacttttatacagcttataaacctctgcttcacttgtcacagg

SEQ ID NO: 6256 - DNA, 80 bp, synthetic construct
  misc_feature 1..80: note = Synthetic: >CDPHE15-cand-25520-25599
  source 1..80: mol_type = other DNA
ttttgtagcagagctgtttatactcctgtaggtaggatgtatggagtctataagtcttatatgcaaatagaaccccttcc

SEQ ID NO: 6257 - DNA, 80 bp, synthetic construct
  misc_feature 1..80: note = Synthetic: >CDPHE15-cand-25600-25679
  source 1..80: mol_type = other DNA
tattattgatgtctaaacgaaaatggctaatgatagcgtctcccaagaggagattatccagcatctcagaaattggaatt

SEQ ID NO: 6258 - DNA, 80 bp, synthetic construct
  misc_feature 1..80: note = Synthetic: >CDPHE15-cand-25680-25759
  source 1..80: mol_type = other DNA
ttggctggaacattatactcactatctttatagtggtattgcaatatggccagtacaaatattctgcttttctgtatggc

SEQ ID NO: 6259 - DNA, 80 bp, synthetic construct
  misc_feature 1..80: note = Synthetic: >CDPHE15-cand-25760-25839
  source 1..80: mol_type = other DNA
ttgaaaatgctggtgctgtggctcttgtggccacttgtgcttgcactctcaatctttgatgcttatgccagctttaatgt

SEQ ID NO: 6260 - DNA, 80 bp, synthetic construct
  misc_feature 1..80: note = Synthetic: >CDPHE15-cand-25840-25919
  source 1..80: mol_type = other DNA
gaactgggttttctttgcgtttagcatccttatggcttgcgtcacgggtgtgctgtgggtaatgtattttgtcaacagca

SEQ ID NO: 6261 - DNA, 80 bp, synthetic construct
  misc_feature 1..80: note = Synthetic: >CDPHE15-cand-25920-25999
  source 1..80: mol_type = other DNA
ttcgcctttggagacgtaccaaatctttctgggcttggagtcctgaaactgacaccattttggcaacaactgtgctcggt

SEQ ID NO: 6262 - DNA, 80 bp, synthetic construct
  misc_feature 1..80: note = Synthetic: >CDPHE15-cand-26000-26079
  source 1..80: mol_type = other DNA
cgcactgtttaccttccactgccagccgcgccgacaggtgtcactctaactctgcttaacggtacgctgcttgtcgaggg

SEQ ID NO: 6263 - DNA, 80 bp, synthetic construct
  misc_feature 1..80: note = Synthetic: >CDPHE15-cand-27360-27439
  source 1..80: mol_type = other DNA
gcaaaacctcagagggaacccaagaagaagaaggacagaagttcacgtccaccaacaccagctcctagtgcgccggttgc

SEQ ID NO: 6264 - DNA, 80 bp, synthetic construct
  misc_feature 1..80: note = Synthetic: >CDPHE15-cand-27440-27519
  source 1..80: mol_type = other DNA
cagtggaaatgctgagcccatatatgcagatgtgcaaccccagggacaaactgagcctgtttacgaaaatccagaccagt

SEQ ID NO: 6265 - DNA, 80 bp, synthetic construct
  misc_feature 1..80: note = Synthetic: >CDPHE15-cand-27520-27599
  source 1..80: mol_type = other DNA
accttggtggtgttgacattgtcaacgaggtttacggtaacctacctgacaattctcagagcacagcttaaatgagcctg

SEQ ID NO: 6266 - DNA, 80 bp, synthetic construct
  misc_feature 1..80: note = Synthetic: >CDPHE15-cand-27600-27679
  source 1..80: mol_type = other DNA
tagtaatgatcaactaaacatgatcttgtactacattgctgttgttggccctcttttgcattggtttgctgaaggttgtc

SEQ ID NO: 6267 - DNA, 80 bp, synthetic construct
  misc_feature 1..80: note = Synthetic: >CDPHE15-cand-27680-27759
  source 1..80: mol_type = other DNA
gagccatttacaaactctggctcgagtgtcgtgacgttcctaattacagcatcaatggtgctcctttaggaactcgtgac

SEQ ID NO: 6268 - DNA, 80 bp, synthetic construct
  misc_feature 1..80: note = Synthetic: >CDPHE15-cand-27760-27839
  source 1..80: mol_type = other DNA
atttgttactacacctcttatgagttcatatacctatgctttatcttctgctttgtttctgtccctattttctgttgggc

SEQ ID NO: 6269 - DNA, 80 bp, synthetic construct
  misc_feature 1..80: note = Synthetic: >CDPHE15-cand-27840-27919
  source 1..80: mol_type = other DNA
ttttatacatgaaaatgcttttgactactacgtgcacaggctgcgctgtattcatcatgcattcatcagattcttgctca

SEQ ID NO: 6270 - DNA, 80 bp, synthetic construct
  misc_feature 1..80: note = Synthetic: >CDPHE15-cand-27920-27999
  source 1..80: mol_type = other DNA
atgcttctgctaaggtttgctttgttctatcaatagtgctaattgtgctgacttgcttccatggctatcaggaccttatg

SEQ ID NO: 6271 - DNA, 80 bp, synthetic construct
  misc_feature 1..80: note = Synthetic: >CDPHE15-cand-28000-28079
  source 1..80: mol_type = other DNA
gacctgtgacttggaagctagtcttgcacacaatggtaagccagtagtaatgacagtgcaagtaggttattactatatta

SEQ ID NO: 6272 - DNA, 80 bp, synthetic construct
  misc_feature 1..80: note = Synthetic: >CDPHE15-cand-28080-28159
  source 1..80: mol_type = other DNA
cggcatataggtaaacagcagttctcattcatctaagtaagagcacgagtgcccaaagatccgcctcgacgagcctactg

SEQ ID NO: 6273 - DNA, 80 bp, synthetic construct
  misc_feature 1..80: note = Synthetic: >CDPHE15-cand-28160-28239
  source 1..80: mol_type = other DNA
gaacatgattccagaggaagagcgtgcattacatttgtttgaaactgcctagtaactgaagactatgctgttttgatatg

SEQ ID NO: 6274 - DNA, 80 bp, synthetic construct
  misc_feature 1..80: note = Synthetic: >CanadaGoose-cand-0-79
  source 1..80: mol_type = other DNA
tgagcattgatatatatatatatatatcatactcaccttgccttgtgcaagaaccttttcttaacaaaacggacttatag

SEQ ID NO: 6275 - DNA, 80 bp, synthetic construct
  misc_feature 1..80: note = Synthetic: >CanadaGoose-cand-80-159
  source 1..80: mol_type = other DNA
tgcgtacggtttgctgtagtatcatacctgccgggggagttcacaacgtctgttgtgcccccggggggtggtgccgcctt

SEQ ID NO: 6276 - DNA, 80 bp, synthetic construct
  misc_feature 1..80: note = Synthetic: >CanadaGoose-cand-160-239
  source 1..80: mol_type = other DNA
ccgtcacgcttgttagatattttattttggagcttgttttattgctgcttgctctgttgtgtctcacttttatacctccg

SEQ ID NO: 6277 - DNA, 80 bp, synthetic construct
  misc_feature 1..80: note = Synthetic: >CanadaGoose-cand-240-319
  source 1..80: mol_type = other DNA
tttctcgggctacctagtatccagcgtcttctgctgtcgtggtttcgtcgagtgcattgaacctctggttcttctagcgg

SEQ ID NO: 6278 - DNA, 80 bp, synthetic construct
  misc_feature 1..80: note = Synthetic: >CanadaGoose-cand-320-399
  source 1..80: mol_type = other DNA
tacgcgggtgtgtggaagtagcatcgtctgtgggatttttgtccttttcagcgtgtgaaacacggggtcgcctcccccca

SEQ ID NO: 6279 - DNA, 80 bp, synthetic construct
  misc_feature 1..80: note = Synthetic: >CanadaGoose-cand-15780-15859
  source 1..80: mol_type = other DNA
tgcgcgtcgatgattgtactcgtatagtacctcaacgcgcaactgtcgattgttttgcaaagtttaaacctaatgacaca

SEQ ID NO: 6280 - DNA, 80 bp, synthetic construct
  misc_feature 1..80: note = Synthetic: >CanadaGoose-cand-15860-15939
  source 1..80: mol_type = other DNA
gctaagaagtacattttttctactataaatgcacttcctgaagttagttgtgacattcttttggttgatgagattagtat

SEQ ID NO: 6281 - DNA, 80 bp, synthetic construct
  misc_feature 1..80: note = Synthetic: >CanadaGoose-cand-15940-16019
  source 1..80: mol_type = other DNA
gctcaccaattatgacctttcatttattaatgcaaagattaattaccaatacgtagtgtatgttggtgaccctgcgcagt

SEQ ID NO: 6282 - DNA, 80 bp, synthetic construct
  misc_feature 1..80: note = Synthetic: >CanadaGoose-cand-16020-16099
  source 1..80: mol_type = other DNA
tgccagcaccacgcacgctacttaatggttctctttcacctaaagattataatgttgttactaatcttatggtgtgtatt

SEQ ID NO: 6283 - DNA, 80 bp, synthetic construct
  misc_feature 1..80: note = Synthetic: >CanadaGoose-cand-16100-16179
  source 1..80: mol_type = other DNA
aagccagatatcttcttggctaagtgttatcgttgtcctaaggaaattgtagatacagtttctactttagtttatgatgg

SEQ ID NO: 6284 - DNA, 80 bp, synthetic construct
  misc_feature 1..80: note = Synthetic: >CanadaGoose-cand-16180-16259
  source 1..80: mol_type = other DNA
taagtttattgccaataacccagaatcacggcagtgttttaaggttattgtcaataaaggtaatagtgatattggccatg

SEQ ID NO: 6285 - DNA, 80 bp, synthetic construct
  misc_feature 1..80: note = Synthetic: >CanadaGoose-cand-16260-16339
  source 1..80: mol_type = other DNA
agagtggctctgcttacaacaatactcaattagagtttgttcgcgattttatatgtaggaataaggagtggcaaaaagcc

SEQ ID NO: 6286 - DNA, 80 bp, synthetic construct
  misc_feature 1..80: note = Synthetic: >CanadaGoose-cand-16340-16419
  source 1..80: mol_type = other DNA
acctttatttctccctataatgcaatgaaccagcgtgcctaccgtatgttaggtttatccgtgcagacagtagattcatc

SEQ ID NO: 6287 - DNA, 80 bp, synthetic construct
  misc_feature 1..80: note = Synthetic: >CanadaGoose-cand-16420-16499
  source 1..80: mol_type = other DNA
gcaaggttctgaatatgactatgttatattttgtgtaacggcagactctgctcatgcacttaatataaatagattcaatg

SEQ ID NO: 6288 - DNA, 80 bp, synthetic construct
  misc_feature 1..80: note = Synthetic: >CanadaGoose-cand-16500-16579
  source 1..80: mol_type = other DNA
ttgctcttactagagctaagattggtattctagtcgtcatgcgtcagcgtgatgaactttataattctcttaaatttgtt

SEQ ID NO: 6289 - DNA, 80 bp, synthetic construct
  misc_feature 1..80: note = Synthetic: >CanadaGoose-cand-16580-16659
  source 1..80: mol_type = other DNA
gatattactgatgcaggtttgcagagtaataccggtttgtttaagatttgtaataaggactttgctggcgttcaccctgc

SEQ ID NO: 6290 - DNA, 80 bp, synthetic construct
  misc_feature 1..80: note = Synthetic: >CanadaGoose-cand-16660-16739
  source 1..80: mol_type = other DNA
tcatgcagtaacaacgtatgcattgtcgtcaaattataaagtgggtgagggtcttgctgcattggttaatgccaatgtgg

SEQ ID NO: 6291 - DNA, 80 bp, synthetic construct
  misc_feature 1..80: note = Synthetic: >CanadaGoose-cand-16740-16819
  source 1..80: mol_type = other DNA
gagacgtcataccttataaacacctaatttctttattaggttttaagatgaatgttgatgtggaatgttgccactcgatg

SEQ ID NO: 6292 - DNA, 80 bp, synthetic construct
  misc_feature 1..80: note = Synthetic: >CanadaGoose-cand-16820-16899
  source 1..80: mol_type = other DNA
tttattactagagatagtgccatacgcaatgttagaggttggattggctttgatgttgaagcaactcatgcgtgtggtac

SEQ ID NO: 6293 - DNA, 80 bp, synthetic construct
  misc_feature 1..80: note = Synthetic: >CanadaGoose-cand-16900-16979
  source 1..80: mol_type = other DNA
taatataggtactaatttgccttttcaaataggcttttcaacgggtgcagactttgtagctgtgccagagggtttagttg

SEQ ID NO: 6294 - DNA, 80 bp, synthetic construct
  misc_feature 1..80: note = Synthetic: >CanadaGoose-cand-16970-17049
  source 1..80: mol_type = other DNA
ggtttagttgacacacctagtggtagccaatttgaacctgtccaatcaaagactcctccaggtgaacagtttaatcacct

SEQ ID NO: 6295 - DNA, 80 bp, synthetic construct
  misc_feature 1..80: note = Synthetic: >CanadaGoose-cand-18330-18409
  source 1..80: mol_type = other DNA
cctttgaactttatgcgaagcgtaatattcgtaatgtgcccaatactaagattctcttaggtttgggtgttgatgttacg

SEQ ID NO: 6296 - DNA, 80 bp, synthetic construct
  misc_feature 1..80: note = Synthetic: >CanadaGoose-cand-18410-18489
  source 1..80: mol_type = other DNA
catggcttttctatttgggactatgagaatagttctgttgtatttagaaacactgttaagtgttgtccttatacagacat

SEQ ID NO: 6297 - DNA, 80 bp, synthetic construct
  misc_feature 1..80: note = Synthetic: >CanadaGoose-cand-18490-18569
  source 1..80: mol_type = other DNA
agactcttctagtctttgtgttttatttgatgataggtataagggtgcattgcagcagtttttgagtgctgataatgcag

SEQ ID NO: 6298 - DNA, 80 bp, synthetic construct
  misc_feature 1..80: note = Synthetic: >CanadaGoose-cand-18570-18649
  source 1..80: mol_type = other DNA
ttcttatttctacacagtgttataaaaagtatccatttatctctttgccattttatgtgcaagagcaaaatggatttact

SEQ ID NO: 6299 - DNA, 80 bp, synthetic construct
  misc_feature 1..80: note = Synthetic: >CanadaGoose-cand-18650-18729
  source 1..80: mol_type = other DNA
ttgcagagtggtgaagctctctttgtttacaagagagtaaagggtaaatttttaaacttacctcaaactctttatacacg

SEQ ID NO: 6300 - DNA, 80 bp, synthetic construct
  misc_feature 1..80: note = Synthetic: >CanadaGoose-cand-18730-18809
  source 1..80: mol_type = other DNA
ttctagagcagtggagggctttaaacctctcactgccctagaagaggaatttttaaattcttctaaggaagaatttttgt

SEQ ID NO: 6301 - DNA, 80 bp, synthetic construct
  misc_feature 1..80: note = Synthetic: >CanadaGoose-cand-18810-18889
  source 1..80: mol_type = other DNA
cyaaatatgataaaggtttaggccttgaacatattatctatggtgacatatctaagcagcagcttggtggtcttcatgcc

SEQ ID NO: 6302 - DNA, 80 bp, synthetic construct
  misc_feature 1..80: note = Synthetic: >CanadaGoose-cand-18890-18969
  source 1..80: mol_type = other DNA
atgataggtgctgccagaatgtttagtaaagatagtttgcagtttaagccagtttctacaactggtgatgtattgcagaa

SEQ ID NO: 6303 - DNA, 80 bp, synthetic construct
  misc_feature 1..80: note = Synthetic: >CanadaGoose-cand-18970-19049
  source 1..80: mol_type = other DNA
ttattatgtgttatctagtaatgggtcatataagcaggtctgtacactttgtgatatagtacttgatgattatattgacc

SEQ ID NO: 6304 - DNA, 80 bp, synthetic construct
  misc_feature 1..80: note = Synthetic: >CanadaGoose-cand-19050-19129
  source 1..80: mol_type = other DNA
tactagctaatattaaaacacagtatggtgacatgacttctaaagtcgttactgtaagtgttgattttcatgatgtacca

SEQ ID NO: 6305 - DNA, 80 bp, synthetic construct
  misc_feature 1..80: note = Synthetic: >CanadaGoose-cand-19130-19209
  source 1..80: mol_type = other DNA
tttatgacttggtttgataatggtgacattaaaacctgctaccctcaactacaatcgggttggcgtagtggttatacaat

SEQ ID NO: 6306 - DNA, 80 bp, synthetic construct
  misc_feature 1..80: note = Synthetic: >CanadaGoose-cand-19210-19289
  source 1..80: mol_type = other DNA
gcctgagctttataaagttcaagattgtgttatggaaccctgcaacatacctaattatggtgttggtgtttcgttgccgg

SEQ ID NO: 6307 - DNA, 80 bp, synthetic construct
  misc_feature 1..80: note = Synthetic: >CanadaGoose-cand-19290-19369
  source 1..80: mol_type = other DNA
atggtatactgatgaatgttgcgaaatatacgcaattgtgtcagtaccttaacaagacgtcaatgtgcgttcctcataac

SEQ ID NO: 6308 - DNA, 80 bp, synthetic construct
  misc_feature 1..80: note = Synthetic: >CanadaGoose-cand-19370-19449
  source 1..80: mol_type = other DNA
atgagggttatgcactttggtgctggttctgataaaggtgttgcccctggcactactgtcttgaaacagtggttgcctga

SEQ ID NO: 6309 - DNA, 80 bp, synthetic construct
  misc_feature 1..80: note = Synthetic: >CanadaGoose-cand-19450-19529
  source 1..80: mol_type = other DNA
gggaacacttttggttgataatgacattgccacttttgtgtcagatgctcatgtgtcttttgttgcagattgtaataagt

SEQ ID NO: 6310 - DNA, 80 bp, synthetic construct
  misc_feature 1..80: note = Synthetic: >CanadaGoose-cand-19530-19609
  source 1..80: mol_type = other DNA
ttagaacagaatataagttcgaccttattatatctgatatgtatactggcagtaacgccaaaagtcatagcggtagcatt

SEQ ID NO: 6311 - DNA, 80 bp, synthetic construct
  misc_feature 1..80: note = Synthetic: >HKU10-cand-19200-19279
  source 1..80: mol_type = other DNA
gctacacagactttgatgaggatgtcacaacatgttttgataatgctattgctggttcttttgaacgctttacattgtct

SEQ ID NO: 6312 - DNA, 80 bp, synthetic construct
  misc_feature 1..80: note = Synthetic: >HKU10-cand-19280-19359
  source 1..80: mol_type = other DNA
agaaatgctgttttgatatctaatgttgccattaagaaactagtaggcatgaaaattgcttatggtttgcttaatggtgt

SEQ ID NO: 6313 - DNA, 80 bp, synthetic construct
  misc_feature 1..80: note = Synthetic: >HKU10-cand-19360-19439
  source 1..80: mol_type = other DNA
gcctgtttctgtgtgtgaaaataaacctgtcacttggtacatatatgttcgtaaggatggacagtttgtagatcagtatg

SEQ ID NO: 6314 - DNA, 80 bp, synthetic construct
  misc_feature 1..80: note = Synthetic: >HKU10-cand-19440-19519
  source 1..80: mol_type = other DNA
acggttactacacacaaggtcgtaacatagcagagtttttgccgcgtagtgatatggaaaaagacttcttagaaatggac

SEQ ID NO: 6315 - DNA, 80 bp, synthetic construct
  misc_feature 1..80: note = Synthetic: >HKU10-cand-19520-19599
  source 1..80: mol_type = other DNA
atgggcatgtttataaataagtatggtcttgaagactatgcttttgagcatgttgtctatggtgatgtctccaaaactac

SEQ ID NO: 6316 - DNA, 80 bp, synthetic construct
  misc_feature 1..80: note = Synthetic: >HKU10-cand-19600-19679
  source 1..80: mol_type = other DNA
acttggtggcttacatctgctcatttctcaagtgcgcctacagaaaatgggtgttcttaaaattgatgagttcacatcta

SEQ ID NO: 6317 - DNA, 80 bp, synthetic construct
  misc_feature 1..80: note = Synthetic: >HKU10-cand-19680-19759
  source 1..80: mol_type = other DNA
gtaatgatggcacactcaaaagctgcactgtcacttatgcaaacaatccgagtagcaaaatggtttgcacatatatggat

SEQ ID NO: 6318 - DNA, 80 bp, synthetic construct
  misc_feature 1..80: note = Synthetic: >HKU10-cand-19760-19839
  source 1..80: mol_type = other DNA
ttgctgttagatgactttgtagcaatacttaaaaatttggacttagatgttgtgtccaaagtacaagaggttattataga

SEQ ID NO: 6319 - DNA, 80 bp, synthetic construct
  misc_feature 1..80: note = Synthetic: >HKU10-cand-19840-19919
  source 1..80: mol_type = other DNA
ttgcaaagtttggcggtggatgctgtggtgtaagggtcataaagtacaaactttttaccctcaattacagtctgctgaat

SEQ ID NO: 6320 - DNA, 80 bp, synthetic construct
  misc_feature 1..80: note = Synthetic: >HKU10-cand-19920-19999
  source 1..80: mol_type = other DNA
ggaaatgtggttattccatgccatcaatctataaaatacaaaggatgtgccttgagccttgtaacctctataattatggt

SEQ ID NO: 6321 - DNA, 80 bp, synthetic construct
  misc_feature 1..80: note = Synthetic: >HKU10-cand-20000-20079
  source 1..80: mol_type = other DNA
gctagtattaaattacctgatggcatcatgtttaatgtcgtaaaatatactcaattatgtcaatatttaaatagcactac

SEQ ID NO: 6322 - DNA, 80 bp, synthetic construct
  misc_feature 1..80: note = Synthetic: >HKU10-cand-20080-20159
  source 1..80: mol_type = other DNA
tatgtgtgtaccatacaacatgagggttttgcaccttggtgcagggtcggataagggagttgcacctggtaccgcagtct

SEQ ID NO: 6323 - DNA, 80 bp, synthetic construct
  misc_feature 1..80: note = Synthetic: >HKU10-cand-20160-20239
  source 1..80: mol_type = other DNA
tacgaaggtggctgccaagtgatgctattattgttgacaatgatgttgaagactatgtcagtgatgctgattacagcatt

SEQ ID NO: 6324 - DNA, 80 bp, synthetic construct
  misc_feature 1..80: note = Synthetic: >HKU10-cand-20240-20319
  source 1..80: mol_type = other DNA
acaggtgattgttctacagtttacttagaagacaagtttgacctagtcatatctgatatgtacgatggtaaaacaaaaca

SEQ ID NO: 6325 - DNA, 80 bp, synthetic construct
  misc_feature 1..80: note = Synthetic: >HKU10-cand-20320-20399
  source 1..80: mol_type = other DNA
ctgtgatggtgagaatgtttcaaaggaaggatttttcgtttacatcaacggtgttataaacgagaaacttgcacttggag

SEQ ID NO: 6326 - DNA, 80 bp, synthetic construct
  misc_feature 1..80: note = Synthetic: >HKU10-cand-20400-20479
  source 1..80: mol_type = other DNA
catccgttgctataaaggtaactgagtattcgtggaacaagaaactttatgagttaattcaacgatttgagttttggaca

SEQ ID NO: 6327 - DNA, 80 bp, synthetic construct
  misc_feature 1..80: note = Synthetic: >HKU14-cand-480-559
  source 1..80: mol_type = other DNA
attcaagaagcacttcagtcccgtagtgctgttttagttacaccacctcagcgcatgtctttggacatgtactataaatt

SEQ ID NO: 6328 - DNA, 80 bp, synthetic construct
  misc_feature 1..80: note = Synthetic: >HKU14-cand-560-639
  source 1..80: mol_type = other DNA
ggggtgttgtcctaaaggttggaccatgggtttgtttcgtcgtcattgccagtgtagaactggcaattgtaatgttgaaa

SEQ ID NO: 6329 - DNA, 80 bp, synthetic construct
  misc_feature 1..80: note = Synthetic: >HKU14-cand-640-719
  source 1..80: mol_type = other DNA
cccatgttgccaatcagctctatatgatagaccctgaaggtgtctgtctaggagcaggtacgtttataggatggtttgtt

SEQ ID NO: 6330 - DNA, 80 bp, synthetic construct
  misc_feature 1..80: note = Synthetic: >HKU14-cand-720-799
  source 1..80: mol_type = other DNA
ccactctttgcgctacctgagcgtgtgcgggataaaacctttccctgggttttgtacctgcgaaagcatggtgagaaagg

SEQ ID NO: 6331 - DNA, 80 bp, synthetic construct
  misc_feature 1..80: note = Synthetic: >HKU14-cand-800-879
  source 1..80: mol_type = other DNA
tgcgcattctaagggtcatggtgacactttttatgtggattatgactttgatgttgaagatgcttacgaagaggttcatg

SEQ ID NO: 6332 - DNA, 80 bp, synthetic construct
  misc_feature 1..80: note = Synthetic: >HKU14-cand-880-959
  source 1..80: mol_type = other DNA
ataaccctaaaggtaagtattctaagaaagcttatgctttgttgaggggatatcgtggtgttaaaccacttctttatgtg

SEQ ID NO: 6333 - DNA, 80 bp, synthetic construct
  misc_feature 1..80: note = Synthetic: >HKU14-cand-960-1039
  source 1..80: mol_type = other DNA
gaccagtatggttgtgactatactggtaatcttgcagagggattggaagcttatgctgagttctctcttcaagagatgaa

SEQ ID NO: 6334 - DNA, 80 bp, synthetic construct
  misc_feature 1..80: note = Synthetic: >HKU14-cand-1040-1119
  source 1..80: mol_type = other DNA
agaactttttcccatatggagtcttagtctcccatatgatgttgttgtggcatggcatgtagttcgtgatcctcagtttg

SEQ ID NO: 6335 - DNA, 80 bp, synthetic construct
  misc_feature 1..80: note = Synthetic: >HKU14-cand-1120-1199
  source 1..80: mol_type = other DNA
tgatgaagttgcaatctcttgctactattcgtagcattgagtatgttgcagaacctactgaggatttagttgatggcacg

SEQ ID NO: 6336 - DNA, 80 bp, synthetic construct
  misc_feature 1..80: note = Synthetic: >HKU14-cand-1200-1279
  source 1..80: mol_type = other DNA
gttgttattaaagaacccgtgcacacacttgccccagatgccatagttttaaagctgcctaagcttattgatcttatgca

SEQ ID NO: 6337 - DNA, 80 bp, synthetic construct
  misc_feature 1..80: note = Synthetic: >HKU14-cand-1280-1359
  source 1..80: mol_type = other DNA
gcatacagattctactgtagtggagtctatttataaaaccaagctgaaacattgtggttttgttatgcagtttggttatg

SEQ ID NO: 6338 - DNA, 80 bp, synthetic construct
  misc_feature 1..80: note = Synthetic: >HKU14-cand-1360-1439
  source 1..80: mol_type = other DNA
ttgaatgttctcaggatgattgcacctttacaggttgggttccagggaatatgatagatggatttgcctgcacatcatgt

SEQ ID NO: 6339 - DNA, 80 bp, synthetic construct
  misc_feature 1..80: note = Synthetic: >HKU14-cand-1440-1519
  source 1..80: mol_type = other DNA
gcttttgtttatggcactgttgatttgcttgcacaatcttctggcgttatgccccaaaatcctgttctttttaccaaagg

SEQ ID NO: 6340 - DNA, 80 bp, synthetic construct
  misc_feature 1..80: note = Synthetic: >HKU14-cand-1520-1599
  source 1..80: mol_type = other DNA
ccaggctattacaaacggggattcatttaagctttatggaaattctgttattccatttggtggttgtttgtattggagcc

SEQ ID NO: 6341 - DNA, 80 bp, synthetic construct
  misc_feature 1..80: note = Synthetic: >HKU14-cand-1600-1679
  source 1..80: mol_type = other DNA
caacacctggtgtttggcttcctttgattaagtcatctgttaaagcatacgatggtatggtttatacaggtgttgtaggt

SEQ ID NO: 6342 - DNA, 80 bp, synthetic construct
  misc_feature 1..80: note = Synthetic: >HKU14-cand-1680-1759
  source 1..80: mol_type = other DNA
tgtaaaaccattgtcaaagaaacagaagctgtttgtaaagcactgtatttggattatgtccagtacaagtgtagtgacct

SEQ ID NO: 6343 - DNA, 80 bp, synthetic construct
  misc_feature 1..80: note = Synthetic: >HKU25-cand-10260-10339
  source 1..80: mol_type = other DNA
catacagagaagctgcggcatctcatctggctaaagctctacagacctacagtgaaactggtagtgacttactttaccaa

SEQ ID NO: 6344 - DNA, 80 bp, synthetic construct
  misc_feature 1..80: note = Synthetic: >HKU25-cand-10340-10419
  source 1..80: mol_type = other DNA
ccaccaaactgcagcatcacatctggtgtgttgcagagcggtctggtaaagatggcatatcccagtggcgacgtagaggc

SEQ ID NO: 6345 - DNA, 80 bp, synthetic construct
  misc_feature 1..80: note = Synthetic: >HKU25-cand-10420-10499
  source 1..80: mol_type = other DNA
atgtatggttcaggtcacatgtggtagtatgactctgaatggtttatggttggacaattatgtctggtgcccaagacacg

SEQ ID NO: 6346 - DNA, 80 bp, synthetic construct
  misc_feature 1..80: note = Synthetic: >HKU25-cand-10500-10579
  source 1..80: mol_type = other DNA
tcatgtgcccagtggaccagctaaatgatccaaattatgatggtcttctcatgtctatgactaaccatagcttcatagtt

SEQ ID NO: 6347 - DNA, 80 bp, synthetic construct
  misc_feature 1..80: note = Synthetic: >HKU25-cand-10580-10659
  source 1..80: mol_type = other DNA
cagaaacatgtgggtgctcctgctaacttacgggtagttggacactccatgcaaggaacccttctgaagttgacagtgga

SEQ ID NO: 6348 - DNA, 80 bp, synthetic construct
  misc_feature 1..80: note = Synthetic: >HKU25-cand-10660-10739
  source 1..80: mol_type = other DNA
ctctgctaacccgagtacacctgcctacactttcactactgttaaacctggcgcttcgtttagcgttctggcttgctaca

SEQ ID NO: 6349 - DNA, 80 bp, synthetic construct
  misc_feature 1..80: note = Synthetic: >HKU25-cand-10740-10819
  source 1..80: mol_type = other DNA
atggcaaacctgtaggtacatacacagttgttatgcgcccaaactacacaattaagggatcattcttgtgtggttcttgt

SEQ ID NO: 6350 - DNA, 80 bp, synthetic construct
  misc_feature 1..80: note = Synthetic: >HKU25-cand-10820-10899
  source 1..80: mol_type = other DNA
ggtagtgttggttacaccaaggaaggtaatgtaatcaacttctgttatatgcatcaaatggagttagcaaatggtaccca

SEQ ID NO: 6351 - DNA, 80 bp, synthetic construct
  misc_feature 1..80: note = Synthetic: >HKU25-cand-10900-10979
  source 1..80: mol_type = other DNA
cacaggctcttcatttgacggtaatatgtatggtgctttccaagatcggcaaatacaccaagcacaattgacagacaaat

SEQ ID NO: 6352 - DNA, 80 bp, synthetic construct
  misc_feature 1..80: note = Synthetic: >HKU25-cand-10980-11059
  source 1..80: mol_type = other DNA
actgtaccgtaaatatagtagcttggctttatgcagctatacttaatggttgcaattggtttgtcaaacccaatcgcacc

SEQ ID NO: 6353 - DNA, 80 bp, synthetic construct
  misc_feature 1..80: note = Synthetic: >HKU25-cand-11060-11139
  source 1..80: mol_type = other DNA
agtgtggtttcttttaatgaatgggccttagccaaccaatttactgaattcgttggtacacaggcaattgacttattagc

SEQ ID NO: 6354 - DNA, 80 bp, synthetic construct
  misc_feature 1..80: note = Synthetic: >HKU25-cand-11140-11219
  source 1..80: mol_type = other DNA
tgttaagactggtgtttcagtagaacagttattgtatgctacccagcaattgagccaaggattcaaaggcaaacagatct

SEQ ID NO: 6355 - DNA, 80 bp, synthetic construct
  misc_feature 1..80: note = Synthetic: >HKU25-cand-11220-11299
  source 1..80: mol_type = other DNA
taggcagcacaatgctggaagatgaattcacccctgaggatgttaacatccagatcatgggtgttgtaatgcaaagtggt

SEQ ID NO: 6356 - DNA, 80 bp, synthetic construct
  misc_feature 1..80: note = Synthetic: >HKU25-cand-11300-11379
  source 1..80: mol_type = other DNA
gttaagagagtgacatatggtaccattcattggctgttggccacactggtactgtcatatgttgctatcttacagtgcac

SEQ ID NO: 6357 - DNA, 80 bp, synthetic construct
  misc_feature 1..80: note = Synthetic: >HKU25-cand-11380-11459
  source 1..80: mol_type = other DNA
caagttcacattgtggaattacctgtttcagactattccgacacagctaactccacttatggttattgtaatggcatgtg

SEQ ID NO: 6358 - DNA, 80 bp, synthetic construct
  misc_feature 1..80: note = Synthetic: >HKU25-cand-11460-11539
  source 1..80: mol_type = other DNA
ttatgttgtttgtcaaacataagcacacattccttacactcttcatattacctactgcaatctgtttgacttatgcaaac

SEQ ID NO: 6359 - DNA, 80 bp, synthetic construct
  misc_feature 1..80: note = Synthetic: >HKU25-cand-17940-18019
  source 1..80: mol_type = other DNA
caacaagctgttgtcaaagaaagagccatcaggacagtgcttcaaaatactctataagggcaacgttacgcatgatgcta

SEQ ID NO: 6360 - DNA, 80 bp, synthetic construct
  misc_feature 1..80: note = Synthetic: >HKU25-cand-18020-18099
  source 1..80: mol_type = other DNA
gctctgccattaatagacctcagttgacatttgtcaaaaatttcatagctgccaacccagcttggagtaaggcagtattt

SEQ ID NO: 6361 - DNA, 80 bp, synthetic construct
  misc_feature 1..80: note = Synthetic: >HKU25-cand-18100-18179
  source 1..80: mol_type = other DNA
atctcaccttataattcacagaatgctgttgcgcgttctatgctcggtttatctacacaaactgtagactcttcacaggg

SEQ ID NO: 6362 - DNA, 80 bp, synthetic construct
  misc_feature 1..80: note = Synthetic: >HKU25-cand-18180-18259
  source 1..80: mol_type = other DNA
ttcagaatacccatacgtcattttctgccaaaccgcagacacagcccacgccaataacctcaacaggtttaatgtggctg

SEQ ID NO: 6363 - DNA, 80 bp, synthetic construct
  misc_feature 1..80: note = Synthetic: >HKU25-cand-18260-18339
  source 1..80: mol_type = other DNA
tgacaagagctcaggtgggtattctgtgtgtaatgacatctcaggcactgtttgattctttacagtttgctgaattgtct

SEQ ID NO: 6364 - DNA, 80 bp, synthetic construct
  misc_feature 1..80: note = Synthetic: >HKU25-cand-18340-18419
  source 1..80: mol_type = other DNA
actaataactacaagttacaatcgcagattgtaactggcttgttcaaagattgctccagagaaccatctggacttcctcc

SEQ ID NO: 6365 - DNA, 80 bp, synthetic construct
  misc_feature 1..80: note = Synthetic: >HKU25-cand-18420-18499
  source 1..80: mol_type = other DNA
agcttatgcaccaacctatgttagtgttgatgataagtataagactagtgatgagctttgcgcgaatttgaatttacccg

SEQ ID NO: 6366 - DNA, 80 bp, synthetic construct
  misc_feature 1..80: note = Synthetic: >HKU25-cand-18500-18579
  source 1..80: mol_type = other DNA
caaatgttccatactcgcgtgttatatcacgaatgggatttaagctagacgcaaatatcccaggttatccaaaactcttc

SEQ ID NO: 6367 - DNA, 80 bp, synthetic construct
  misc_feature 1..80: note = Synthetic: >HKU25-cand-18570-18649
  source 1..80: mol_type = other DNA
aaaactcttcattacacgtgaagaggctgtgaggcaagtcagaagttggattggttttgacgtagagggtgcacatgctt

SEQ ID NO: 6368 - DNA, 80 bp, synthetic construct
  misc_feature 1..80: note = Synthetic: >HKU25-cand-18650-18729
  source 1..80: mol_type = other DNA
cgcgtaatgcatgtggcaccaacgtgcctctccaattaggattctctacaggtgtgaacttcgttgttcagcctgtgggt

SEQ ID NO: 6369 - DNA, 80 bp, synthetic construct
  misc_feature 1..80: note = Synthetic: >HKU25-cand-18730-18809
  source 1..80: mol_type = other DNA
gtagtagatactgaatggggcaatatgctgacaggaatctcagcgagaacccctccaggtgaacaattcaagcatttggt

SEQ ID NO: 6370 - DNA, 80 bp, synthetic construct
  misc_feature 1..80: note = Synthetic: >HKU25-cand-18810-18889
  source 1..80: mol_type = other DNA
gcctctcatgcacaaaggggcagcctggcctgttgtacgacgacgtatagttcagatgctgtccgacaccctggataagt

SEQ ID NO: 6371 - DNA, 80 bp, synthetic construct
  misc_feature 1..80: note = Synthetic: >HKU25-cand-18890-18969
  source 1..80: mol_type = other DNA
tatcggactactgcacgtttgtctgctgggctcatggatttgagcttacatcagcatcttacttctgtaagattggtaaa

SEQ ID NO: 6372 - DNA, 80 bp, synthetic construct
  misc_feature 1..80: note = Synthetic: >HKU25-cand-18970-19049
  source 1..80: mol_type = other DNA
gagcaaaagtgctgtatgtgtaatagacgcgctggtgcttattcttcacccctacaatcatatgcctgttgggcacattc

SEQ ID NO: 6373 - DNA, 80 bp, synthetic construct
  misc_feature 1..80: note = Synthetic: >HKU25-cand-19050-19129
  source 1..80: mol_type = other DNA
ttgtgggtatgattatgtctacaacccattctttgttgacgttcaacaatggggctacgtaggtaatcttactactaacc

SEQ ID NO: 6374 - DNA, 80 bp, synthetic construct
  misc_feature 1..80: note = Synthetic: >HKU25-cand-19130-19209
  source 1..80: mol_type = other DNA
atgatcgttactgctctgtccatcagggtgcccatgtcgcatcaggagacgcaataatgaccaggtgcttagctattcat

SEQ ID NO: 6375 - DNA, 80 bp, synthetic construct
  misc_feature 1..80: note = Synthetic: >HKU8-cand-5190-5269
  source 1..80: mol_type = other DNA
gctgagaaaaagcctattgttgcagctactgttgaacaagagcctattacaacagttgaaacccccttgaaaaaaagtgt

SEQ ID NO: 6376 - DNA, 80 bp, synthetic construct
  misc_feature 1..80: note = Synthetic: >HKU8-cand-5270-5349
  source 1..80: mol_type = other DNA
atcaccaacaccagatttgggaaaaagcctactgcggaggttgaaacagttgttcaaagtgttgctgaagaaaagtcagt

SEQ ID NO: 6377 - DNA, 80 bp, synthetic construct
  misc_feature 1..80: note = Synthetic: >HKU8-cand-5350-5429
  source 1..80: mol_type = other DNA
aactgttgaaagtaagcaagtcagtgaagctgagaaaattgctgcagcgcaggctacagaagtttttgttgcacagccga

SEQ ID NO: 6378 - DNA, 80 bp, synthetic construct
  misc_feature 1..80: note = Synthetic: >HKU8-cand-5430-5509
  source 1..80: mol_type = other DNA
gaaagtcattgttgtgccagaggcacttgttttaaaggttgttggctctgtgacttattatcctgttgatgtcggtgttg

SEQ ID NO: 6379 - DNA, 80 bp, synthetic construct
  misc_feature 1..80: note = Synthetic: >HKU8-cand-5510-5589
  source 1..80: mol_type = other DNA
taggtgttagacctgacaacattattattcacactacgcatgaattagatctttgcgaatttggtaagttacttgataag

SEQ ID NO: 6380 - DNA, 80 bp, synthetic construct
  misc_feature 1..80: note = Synthetic: >HKU8-cand-5590-5669
  source 1..80: mol_type = other DNA
cagtcttgtggtgccttgacagcttctattgctgcatataagcaaaagacagctgttgtaccacctggtaatattgttac

SEQ ID NO: 6381 - DNA, 80 bp, synthetic construct
  misc_feature 1..80: note = Synthetic: >HKU8-cand-5670-5749
  source 1..80: mol_type = other DNA
ttttaagtgcgatggtcaacccactgttgtttttgctgtatttccacctgatgacgatgtcgcatatcttaagaatgtca

SEQ ID NO: 6382 - DNA, 80 bp, synthetic construct
  misc_feature 1..80: note = Synthetic: >HKU8-cand-5750-5829
  source 1..80: mol_type = other DNA
agcgtactattagtaagcttgcaaagcttaagggtgttagtgttagtacattttccacacttgatgtgcacaagcgtctt

SEQ ID NO: 6383 - DNA, 80 bp, synthetic construct
  misc_feature 1..80: note = Synthetic: >HKU8-cand-5830-5909
  source 1..80: mol_type = other DNA
ttggcctttgttaacttgttttgtgttgcctcaatggatgtcattggtgatgttcatactacaacgtctattgttaaagt

SEQ ID NO: 6384 - DNA, 80 bp, synthetic construct
  misc_feature 1..80: note = Synthetic: >HKU8-cand-5910-5989
  source 1..80: mol_type = other DNA
tactgaagatggtcgtactgttaaggatgttgttgtcgcaacaaccactactgctggtgatcaattcggcccatgtgctg

SEQ ID NO: 6385 - DNA, 80 bp, synthetic construct
  misc_feature 1..80: note = Synthetic: >HKU8-cand-5990-6069
  source 1..80: mol_type = other DNA
ttgatggtgctagttttacagcttctgttgttactgatgttgttaatagtgttgttgctgtggctcctaatgttgattgg

SEQ ID NO: 6386 - DNA, 80 bp, synthetic construct
  misc_feature 1..80: note = Synthetic: >HKU8-cand-6070-6149
  source 1..80: mol_type = other DNA
gatagtcattatggctttaaagatgctggtaaatttcatgtgcttgaccatagtgcttatgcttatgacagcgatttcgt

SEQ ID NO: 6387 - DNA, 80 bp, synthetic construct
  misc_feature 1..80: note = Synthetic: >HKU8-cand-6150-6229
  source 1..80: mol_type = other DNA
tgatggtaagcgtgcactagctggcagtgataataattgctgggtaaatgctacatgtttacaattgcagtttgcaggtg

SEQ ID NO: 6388 - DNA, 80 bp, synthetic construct
  misc_feature 1..80: note = Synthetic: >HKU8-cand-6310-6389
  source 1..80: mol_type = other DNA
tattggcttaatggagctaataaaggcgatgtaggtgatgttgaaactactttgaacctggttgccaagtatgccaaacc

SEQ ID NO: 6389 - DNA, 80 bp, synthetic construct
  misc_feature 1..80: note = Synthetic: >HKU8-cand-6390-6469
  source 1..80: mol_type = other DNA
aaacggctgtgttactattgaaaagacaaccgctgatggttgttgtgtttctgaaaagcgtgttaatagtcttgttgtta

SEQ ID NO: 6390 - DNA, 80 bp, synthetic construct
  misc_feature 1..80: note = Synthetic: >HKU8-cand-11590-11669
  source 1..80: mol_type = other DNA
gaatttaagtacatggttgctaatgatcttcgtgctcctagtggtgtgtttgattcactgttacttagtttgaggcttat

SEQ ID NO: 6391 - DNA, 80 bp, synthetic construct
  misc_feature 1..80: note = Synthetic: >HKU8-cand-11670-11749
  source 1..80: mol_type = other DNA
gggtattggtggtgagaaaactattaagatctccactgtccagtcgaaattaactgatattaaatgtactaatgttgtac

SEQ ID NO: 6392 - DNA, 80 bp, synthetic construct
  misc_feature 1..80: note = Synthetic: >HKU8-cand-11750-11829
  source 1..80: mol_type = other DNA
tcatgggtgttctcactagtatgaacattgaggctaatagtaaagattgggctttttgtgttgatttgcataataagatt

SEQ ID NO: 6393 - DNA, 80 bp, synthetic construct
  misc_feature 1..80: note = Synthetic: >HKU8-cand-11830-11909
  source 1..80: mol_type = other DNA
aatctttctgatgatgctgagaaggctatggaatatttgttggcattgttgacattcttccttagtcgacagaaggattt

SEQ ID NO: 6394 - DNA, 80 bp, synthetic construct
  misc_feature 1..80: note = Synthetic: >HKU8-cand-11910-11989
  source 1..80: mol_type = other DNA
taattgcactgagcttttagattcatattttgctgatagtagtatattgcaaagtgttgcttctacatttgtcaacatgc

SEQ ID NO: 6395 - DNA, 80 bp, synthetic construct
  misc_feature 1..80: note = Synthetic: >HKU8-cand-11990-12069
  source 1..80: mol_type = other DNA
cttcatttatagcctatgagactgctcgtcagaactatgaagaggctactaataatggatcttcacctcagctcgtcaag

SEQ ID NO: 6396 - DNA, 80 bp, synthetic construct
  misc_feature 1..80: note = Synthetic: >HKU8-cand-12070-12149
  source 1..80: mol_type = other DNA
cagcttaagcgtgctatgaatattgcaaaagctgagtttgatcacgaggcagctgttcagcgtaagattcatcgcatggc

SEQ ID NO: 6397 - DNA, 80 bp, synthetic construct
  misc_feature 1..80: note = Synthetic: >HKU8-cand-12150-12229
  source 1..80: mol_type = other DNA
tgaacaggctgcttcacagatgtacaaagaggctcgtgctgttaataggaagtctaaggttataagctctatgcacgcat

SEQ ID NO: 6398 - DNA, 80 bp, synthetic construct
  misc_feature 1..80: note = Synthetic: >HKU8-cand-12230-12309
  source 1..80: mol_type = other DNA
ttctttttggaatgttgcgtaagcttgacatgtctgctattgataccattctaaaccttgctcgtggtggtgttgtacca

SEQ ID NO: 6399 - DNA, 80 bp, synthetic construct
  misc_feature 1..80: note = Synthetic: >HKU8-cand-12310-12389
  source 1..80: mol_type = other DNA
cttaatattatacccgctgcgtgtgcaacaaaatttgttgttgttgctagtgattttgagtcatttaagcgtatctatca

SEQ ID NO: 6400 - DNA, 80 bp, synthetic construct
  misc_feature 1..80: note = Synthetic: >HKU8-cand-12390-12469
  source 1..80: mol_type = other DNA
acaaggtgctgttcagtatgctggtgctgtttggactctaactgaagttaaggataatgatggtaaacctgttcatgtta

SEQ ID NO: 6401 - DNA, 80 bp, synthetic construct
  misc_feature 1..80: note = Synthetic: >HKU8-cand-12470-12549
  source 1..80: mol_type = other DNA
aggaaattaccaaagataacactgctttgacatggcctttagtccttaattgtgagcgggttgttaagctacagaataat

SEQ ID NO: 6402 - DNA, 80 bp, synthetic construct
  misc_feature 1..80: note = Synthetic: >HKU8-cand-12550-12629
  source 1..80: mol_type = other DNA
gagattattcctggtaagcttaaacaacgtccagttaagggtgaaggtgatggtggtgttgctgctgatggtaaagcact

SEQ ID NO: 6403 - DNA, 80 bp, synthetic construct
  misc_feature 1..80: note = Synthetic: >HKU8-cand-12630-12709
  source 1..80: mol_type = other DNA
ttataacactgaaggtggcaatactttcatgtatgcttttattgctgacaaaccagacctgaaagttgtcaaatgggagt

SEQ ID NO: 6404 - DNA, 80 bp, synthetic construct
  misc_feature 1..80: note = Synthetic: >HKU8-cand-12710-12789
  source 1..80: mol_type = other DNA
ttgatggtggttgtaataccattgaacttgaaccaccatgccgatttgctgtttctaatagtaatggtaccactgttatt

SEQ ID NO: 6405 - DNA, 80 bp, synthetic construct
  misc_feature 1..80: note = Synthetic: >HKU8-cand-12790-12869
  source 1..80: mol_type = other DNA
aagtatttgtactttgttaaaaatcttaatactttgcggcgaggtgctgtacttggttatattggtgctacagtgcgtct

SEQ ID NO: 6406 - DNA, 80 bp, synthetic construct
  misc_feature 1..80: note = Synthetic: >HKU8-cand-15440-15519
  source 1..80: mol_type = other DNA
catgctgtatgacaattgttatagaagttctgctgttgaccctggttttgttgatacgttttatggctacttgcgcaagc

SEQ ID NO: 6407 - DNA, 80 bp, synthetic construct
  misc_feature 1..80: note = Synthetic: >HKU8-cand-15520-15599
  source 1..80: mol_type = other DNA
atttctctatgatgattttgtcagatgatggtgttgtttgttataacaaggagtatgcttctttgggttatgtagcagat

SEQ ID NO: 6408 - DNA, 80 bp, synthetic construct
  misc_feature 1..80: note = Synthetic: >HKU8-cand-15600-15679
  source 1..80: mol_type = other DNA
attaatgcatttaaggccacattgtattatcagaacaatgttttcatgagtacatctaagtgttgggttgaagaagacct

SEQ ID NO: 6409 - DNA, 80 bp, synthetic construct
  misc_feature 1..80: note = Synthetic: >HKU8-cand-15680-15759
  source 1..80: mol_type = other DNA
aactaaaggccctcatgaattttgttctcaacatacaatgcaaatagttgatggtgatggtacgtattatttgccgtacc

SEQ ID NO: 6410 - DNA, 80 bp, synthetic construct
  misc_feature 1..80: note = Synthetic: >HKU8-cand-15760-15839
  source 1..80: mol_type = other DNA
ctgatccatctcgtattttgtctgcaggtgtgtttgttgatgatgttattaagactgatgctgtcgttcttttagaacgt

SEQ ID NO: 6411 - DNA, 80 bp, synthetic construct
  misc_feature 1..80: note = Synthetic: >HKU8-cand-15840-15919
  source 1..80: mol_type = other DNA
tacgtgtctttggccattgatgcttatccactttccaagcatcctaaccctgaatatcgtaaagtgttttatgttctact

SEQ ID NO: 6412 - DNA, 80 bp, synthetic construct
  misc_feature 1..80: note = Synthetic: >HKU8-cand-15920-15999
  source 1..80: mol_type = other DNA
agattgggttaaacacctaaataacaccttgaatcagggtgtgctagaatctttctcagttactttgcttgaagatgcct

SEQ ID NO: 6413 - DNA, 80 bp, synthetic construct
  misc_feature 1..80: note = Synthetic: >HKU8-cand-16000-16079
  source 1..80: mol_type = other DNA
cttcaaagttttgggatgaatctttctatgcaaatttgtatgagaagtctgctgtcttgcaggctgctgggctttgtgtt

SEQ ID NO: 6414 - DNA, 80 bp, synthetic construct
  misc_feature 1..80: note = Synthetic: >HKU8-cand-16160-16239
  source 1..80: mol_type = other DNA
cgttgtaggcacaaaacacaagttcattttggcaattacaccttatgtgtgtaacgctgctggctgtgctgttaatgatg

SEQ ID NO: 6415 - DNA, 80 bp, synthetic construct
  misc_feature 1..80: note = Synthetic: >HKU8-cand-16240-16319
  source 1..80: mol_type = other DNA
ttactaagctgtatttaggtggtcttagctactattgtgttgatcacaaaccacatttgtcattcccactctgttcaggt

SEQ ID NO: 6416 - DNA, 80 bp, synthetic construct
  misc_feature 1..80: note = Synthetic: >HKU8-cand-16320-16399
  source 1..80: mol_type = other DNA
ggtaatgtttttggcttgtataagaactctgccactggttctccagatgtagaagtttttaacactcttgctacttcaga

SEQ ID NO: 6417 - DNA, 80 bp, synthetic construct
  misc_feature 1..80: note = Synthetic: >HKU8-cand-16400-16479
  source 1..80: mol_type = other DNA
ctggactgacgctaaggattatcgtttggctaatgaggtcaaagattcccttagactctttgctgctgaaactgttaaag

SEQ ID NO: 6418 - DNA, 80 bp, synthetic construct
  misc_feature 1..80: note = Synthetic: >HKU8-cand-16480-16559
  source 1..80: mol_type = other DNA
caaaggaagagtgtgtcaagtcatcctatgcagctgccacacttaaagagattatcggacccaaggaattgcttcttagt

SEQ ID NO: 6419 - DNA, 80 bp, synthetic construct
  misc_feature 1..80: note = Synthetic: >HKU8-cand-16560-16639
  source 1..80: mol_type = other DNA
tgggaacctggaaagataaagccacctcttaataggaattctgttttcacctgttttcaggtgactaaggattctaagtt

SEQ ID NO: 6420 - DNA, 80 bp, synthetic construct
  misc_feature 1..80: note = Synthetic: >HKU8-cand-16640-16719
  source 1..80: mol_type = other DNA
tcaggtgggtgagtttactttcgagaagctggattatggttctgatactgtgtgttataagtcaactgccacttgcaaat

SEQ ID NO: 6421 - DNA, 80 bp, synthetic construct
  misc_feature 1..80: note = Synthetic: >HKU8-cand-20560-20639
  source 1..80: mol_type = other DNA
aatatacacaactttgtcaatatttaaacagtactaccatgtgtgtaccacataatatgagagttttgcatctaggtgct

SEQ ID NO: 6422 - DNA, 80 bp, synthetic construct
  misc_feature 1..80: note = Synthetic: >HKU8-cand-20640-20719
  source 1..80: mol_type = other DNA
ggttctgataaaggtgttgcccctggtactactgtactacgtcgttggttacctgacgatgcagtaattgttgacaatga

SEQ ID NO: 6423 - DNA, 80 bp, synthetic construct
  misc_feature 1..80: note = Synthetic: >HKU8-cand-20720-20799
  source 1..80: mol_type = other DNA
tgttaatgactacgttagtgatgctgatatgagtgttgttggtgattgtactacattgtatctgcaagacaagtttgatc

SEQ ID NO: 6424 - DNA, 80 bp, synthetic construct
  misc_feature 1..80: note = Synthetic: >HKU8-cand-20800-20879
  source 1..80: mol_type = other DNA
ttgtcatttcagatatgtatgatggcagaattaagcaaattgatggtgaaaatgtttctaaagatggtttctttgtgtac

SEQ ID NO: 6425 - DNA, 80 bp, synthetic construct
  misc_feature 1..80: note = Synthetic: >HKU8-cand-20880-20959
  source 1..80: mol_type = other DNA
cttaatggtgttataacagagaaactagctcttggaggttctgttgctattaaaatcactgagcatagttggaacaagcg

SEQ ID NO: 6426 - DNA, 80 bp, synthetic construct
  misc_feature 1..80: note = Synthetic: >HKU8-cand-20960-21039
  source 1..80: mol_type = other DNA
tacttatgagcttattcagaaatttgcttattggactttgttctgtaccagtgtgaacacttcttcatcagaagcttttc

SEQ ID NO: 6427 - DNA, 80 bp, synthetic construct
  misc_feature 1..80: note = Synthetic: >HKU8-cand-21040-21119
  source 1..80: mol_type = other DNA
tcattggtgttaactatttaggtgatttgaaaacaacaccgattgttgatggtaatgttatgcatgccaattatatcttt

SEQ ID NO: 6428 - DNA, 80 bp, synthetic construct
  misc_feature 1..80: note = Synthetic: >HKU8-cand-21120-21199
  source 1..80: mol_type = other DNA
tggcgtaattccacaataatggcgatgtcttataatagtgtcttggatctttctaagtttgagtgcagacataaggcaac

SEQ ID NO: 6429 - DNA, 80 bp, synthetic construct
  misc_feature 1..80: note = Synthetic: >HKU8-cand-21200-21279
  source 1..80: mol_type = other DNA
tgtggttatagctttgaaagatactgatttaagtgaagttatagttggtcttatcaggaatggcaagttgcttattagaa

SEQ ID NO: 6430 - DNA, 80 bp, synthetic construct
  misc_feature 1..80: note = Synthetic: >HKU8-cand-21280-21359
  source 1..80: mol_type = other DNA
agaatggtagtgtttgtggttatggcaatcatttagtttcaactaaataaaatgctttacttgtcttaagccttttcatt

SEQ ID NO: 6431 - DNA, 80 bp, synthetic construct
  misc_feature 1..80: note = Synthetic: >HKU8-cand-21360-21439
  source 1..80: mol_type = other DNA
tatttgttcgttactgtgtgttttaattttgttgctgctaataatggttgtgatgccaatggtaattattgggttaatgc

SEQ ID NO: 6432 - DNA, 80 bp, synthetic construct
  misc_feature 1..80: note = Synthetic: >HKU8-cand-21440-21519
  source 1..80: mol_type = other DNA
ctcttggatatgttgggcctatttttatgatttgaaattaggtttacctcccaatgttactaatgcctatgtttctggtt

SEQ ID NO: 6433 - DNA, 80 bp, synthetic construct
  misc_feature 1..80: note = Synthetic: >HKU8-cand-21520-21599
  source 1..80: mol_type = other DNA
atttaccatcacctgatcattggaattgtactacacataacactgcaggtaatgctaatataacttataatgctaatgct

SEQ ID NO: 6434 - DNA, 80 bp, synthetic construct
  misc_feature 1..80: note = Synthetic: >HKU8-cand-21600-21679
  source 1..80: mol_type = other DNA
gtttttattagctattataagtatgccacagacgttgctgttggtgttggcacttctaagtctaatgattcttttggcat

SEQ ID NO: 6435 - DNA, 80 bp, synthetic construct
  misc_feature 1..80: note = Synthetic: >HKU8-cand-21680-21759
  source 1..80: mol_type = other DNA
ttacttttatcagcagaatggtgaataaagtgccattgtaagaatttgtaagtggaataattataatatgcctacttaca

SEQ ID NO: 6436 - DNA, 80 bp, synthetic construct
  misc_feature 1..80: note = Synthetic: >HKU8-cand-21760-21839
  source 1..80: mol_type = other DNA
gacctacctccactacttatggtaaggattgtttgattaatataaaccttgacaatcttacgtttgttcatcaaggaaaa

SEQ ID NO: 6437 - DNA, 80 bp, synthetic construct
  misc_feature 1..80: note = Synthetic: >MERS-cand-30020-30099
  source 1..80: mol_type = other DNA
ccccccgggaagagctctacagtgtgaaatgtaaataaaaatagctattattcaattagattaggctaattagatgattt

SEQ ID NO: 6438 - DNA, 80 bp, synthetic construct
  misc_feature 1..80: note = Synthetic: >MurineCoV-cand-30-109
  source 1..80: mol_type = other DNA
caactctaaaactcttgttagtttaaatctaatctaatctaaactttataaacggcacttcctgcgtgtccatgcccgcg

SEQ ID NO: 6439 - DNA, 80 bp, synthetic construct
  misc_feature 1..80: note = Synthetic: >MurineCoV-cand-110-189
  source 1..80: mol_type = other DNA
ggcctggtcttgtcatagtgctgacatttgtagttccttgactttcgttctctgccagtgacgtgtccattcggcgccag

SEQ ID NO: 6440 - DNA, 80 bp, synthetic construct
  misc_feature 1..80: note = Synthetic: >MurineCoV-cand-190-269
  source 1..80: mol_type = other DNA
cagcccacccataggttgcataatggcaaagatgggcaaatacggtctcggcttcaaatgggccccagaatttccatgga

SEQ ID NO: 6441 - DNA, 80 bp, synthetic construct
  misc_feature 1..80: note = Synthetic: >MurineCoV-cand-270-349
  source 1..80: mol_type = other DNA
tgcttccgaacgcatcggagaagttgggtaaccctgagaggtcagaggaggatgggttttgcccctctgctgcgcaagaa

SEQ ID NO: 6442 - DNA, 80 bp, synthetic construct
  misc_feature 1..80: note = Synthetic: >MurineCoV-cand-350-429
  source 1..80: mol_type = other DNA
ccgaaagttaaaggaaaaactttggttaatcacgtgagggtgaattgtagccggcttccagctttggaatgctgtgttca

SEQ ID NO: 6443 - DNA, 80 bp, synthetic construct
  misc_feature 1..80: note = Synthetic: >MurineCoV-cand-430-509
  source 1..80: mol_type = other DNA
gtctgccataatccgtgatatttttgtagatgaggatccccagaaggtggaggcctcaactatgatggcattgcagttcg

SEQ ID NO: 6444 - DNA, 80 bp, synthetic construct
  misc_feature 1..80: note = Synthetic: >MurineCoV-cand-510-589
  source 1..80: mol_type = other DNA
gtagtgccgtcttggttaagccatccaagcgcttgtctattcaggcatggactaatttgggtgtgcttcccaaaacagct

SEQ ID NO: 6445 - DNA, 80 bp, synthetic construct
  misc_feature 1..80: note = Synthetic: >MurineCoV-cand-590-669
  source 1..80: mol_type = other DNA
gccatggggttgttcaagcgcgtctgcctgtgtaacaccagggagtgctcttgtgacgcccacgtggcctttcacctttt

SEQ ID NO: 6446 - DNA, 80 bp, synthetic construct
  misc_feature 1..80: note = Synthetic: >MurineCoV-cand-670-749
  source 1..80: mol_type = other DNA
tacggtccaacccgatggtgtatgcctgggtaatggccgttttataggctggttcgttccagtcacagccataccggagt

SEQ ID NO: 6447 - DNA, 80 bp, synthetic construct
  misc_feature 1..80: note = Synthetic: >MurineCoV-cand-750-829
  source 1..80: mol_type = other DNA
atgcgaagcagtggttgcaaccctggtccatccttcttcgtaagggtggtaacaaagggtctgtgacatccggccacttc

SEQ ID NO: 6448 - DNA, 80 bp, synthetic construct
  misc_feature 1..80: note = Synthetic: >MurineCoV-cand-830-909
  source 1..80: mol_type = other DNA
cgccgcgctgttaccatgcctgtgtatgactttaatgtagaggatgcttgtgaggaggttcatcttaacccgaagggtaa

SEQ ID NO: 6449 - DNA, 80 bp, synthetic construct
  misc_feature 1..80: note = Synthetic: >MurineCoV-cand-910-989
  source 1..80: mol_type = other DNA
gtactcctgcaaggcgtatgctcttcttaagggctatcgcggtgttaagcccatcctgtttgtggaccagtatggttgcg

SEQ ID NO: 6450 - DNA, 80 bp, synthetic construct
  misc_feature 1..80: note = Synthetic: >MurineCoV-cand-990-1069
  source 1..80: mol_type = other DNA
actatactggatgtctcgccaagggtcttgaggactatggcgatctcaccttgagtgagatgaaggagttgttccctgtg

SEQ ID NO: 6451 - DNA, 80 bp, synthetic construct
  misc_feature 1..80: note = Synthetic: >MurineCoV-cand-1070-1149
  source 1..80: mol_type = other DNA
tggcgtgactccttggatagtgaagtccttgtggcttggcacgttgatcgagatcctcgggctgctatgcgtctgcagac

SEQ ID NO: 6452 - DNA, 80 bp, synthetic construct
  misc_feature 1..80: note = Synthetic: >MurineCoV-cand-1150-1229
  source 1..80: mol_type = other DNA
tcttgctactgtacgttgcattgattatgtgggccaaccgaccgaggatgtggtggatggagatgtggtagtgcgtgagc

SEQ ID NO: 6453 - DNA, 80 bp, synthetic construct
  misc_feature 1..80: note = Synthetic: >MurineCoV-cand-26880-26959
  source 1..80: mol_type = other DNA
attacctcctgtgttgtcagagagtcagatctctggctacacaaccggtgctactgcggcagctatgttcccaccgtggt

SEQ ID NO: 6454 - DNA, 80 bp, synthetic construct
  misc_feature 1..80: note = Synthetic: >MurineCoV-cand-26960-27039
  source 1..80: mol_type = other DNA
cagcagctgccggtgtgccatttagtttaagtgttcaatatagaattaatggtttaggtgtcactatgaatgtgcttagt

SEQ ID NO: 6455 - DNA, 80 bp, synthetic construct
  misc_feature 1..80: note = Synthetic: >MurineCoV-cand-27040-27119
  source 1..80: mol_type = other DNA
gagaaccaaaagatgattgctagtgcttttaacaatgcgctgggtgctatccaggatgggtttgatgcaaccaattctgc

SEQ ID NO: 6456 - DNA, 80 bp, synthetic construct
  misc_feature 1..80: note = Synthetic: >MurineCoV-cand-27120-27199
  source 1..80: mol_type = other DNA
tttaggtaagatccagtccgttgttaatgcaaatgctgaagcactcaataacttactaaatcaactttctaacaggtttg

SEQ ID NO: 6457 - DNA, 80 bp, synthetic construct
  misc_feature 1..80: note = Synthetic: >MurineCoV-cand-27200-27279
  source 1..80: mol_type = other DNA
gtgctattagtgcttctttacaagaaattctaactcggcttgaggctgtagaagcaaaagcccagatagatcgtcttatt

SEQ ID NO: 6458 - DNA, 80 bp, synthetic construct
  misc_feature 1..80: note = Synthetic: >MurineCoV-cand-27280-27359
  source 1..80: mol_type = other DNA
aatggcaggttaactgcacttaatgcgtatatatccaagcaacttagtgatagtacgcttattaaagttagtgctgctca

SEQ ID NO: 6459 - DNA, 80 bp, synthetic construct
  misc_feature 1..80: note = Synthetic: >MurineCoV-cand-27360-27439
  source 1..80: mol_type = other DNA
ggccatagaaaaggtcaatgagtgcgttaagagccaaaccacgcgtattaatttctgtggcaatggtaatcatatattat

SEQ ID NO: 6460 - DNA, 80 bp, synthetic construct
  misc_feature 1..80: note = Synthetic: >MurineCoV-cand-27440-27519
  source 1..80: mol_type = other DNA
ctcttgtccagaatgcgccttatggcttatattttatacacttcagctatgtgccaatatcctttacaaccgcaaatgtg

SEQ ID NO: 6461 - DNA, 80 bp, synthetic construct
  misc_feature 1..80: note = Synthetic: >MurineCoV-cand-27520-27599
  source 1..80: mol_type = other DNA
agtcctggactttgcatttctggtgatagaggattagcacctaaagctggatattttgttcaagatgatggagaatggaa

SEQ ID NO: 6462 - DNA, 80 bp, synthetic construct
  misc_feature 1..80: note = Synthetic: >MurineCoV-cand-27600-27679
  source 1..80: mol_type = other DNA
gttcacaggcagttcatattactaccctgaacccattacagataaaaacagtgtcattatgagtagttgcgcagtaaact

SEQ ID NO: 6463 - DNA, 80 bp, synthetic construct
  misc_feature 1..80: note = Synthetic: >MurineCoV-cand-27680-27759
  source 1..80: mol_type = other DNA
acacaaaggcacctgaagttttcttgaacacttcaatacctaatccacccgactttaaggaggagttagataaatggttt

SEQ ID NO: 6464 - DNA, 80 bp, synthetic construct
  misc_feature 1..80: note = Synthetic: >MurineCoV-cand-27760-27839
  source 1..80: mol_type = other DNA
aagaatcagacgtctattgcgcctgatttatctctcgatttcgagaagttaaatgttactttgctggacctgacgtatga

SEQ ID NO: 6465 - DNA, 80 bp, synthetic construct
  misc_feature 1..80: note = Synthetic: >MurineCoV-cand-27830-27909
  source 1..80: mol_type = other DNA
tgacgtatgagatgaacaggattcaggatgcaattaagaagttaaatgagagctacatcaacctcaaggaagttggcaca

SEQ ID NO: 6466 - DNA, 80 bp, synthetic construct
  misc_feature 1..80: note = Synthetic: >MurineCoV-cand-27910-27989
  source 1..80: mol_type = other DNA
tatgaaatgtatgtgaaatggccttggtatgtttggttgctaattggattagctggtgtagctgtttgtgtgttgttatt

SEQ ID NO: 6467 - DNA, 80 bp, synthetic construct
  misc_feature 1..80: note = Synthetic: >MurineCoV-cand-27990-28069
  source 1..80: mol_type = other DNA
ctttatatgttgctgcacaggttgtggctcatgttgttttaagaagtgtggaaattgttgtgatgagtatggaggacacc

SEQ ID NO: 6468 - DNA, 80 bp, synthetic construct
  misc_feature 1..80: note = Synthetic: >MurineCoV-cand-28070-28149
  source 1..80: mol_type = other DNA
aggacagtattgtgatacataatatttcctctcatgaggattgactagattcacagcctctcctggaaagacagaaaatc

SEQ ID NO: 6469 - DNA, 80 bp, synthetic construct
  misc_feature 1..80: note = Synthetic: >SARSCoV2-cand-730-809
  source 1..80: mol_type = other DNA
ttcaagaaaactggaacactaaacatagcagtggtgttacccgtgaactcatgcgtgagcttaacggaggggcatacact

SEQ ID NO: 6470 - DNA, 80 bp, synthetic construct
  misc_feature 1..80: note = Synthetic: >SARSCoV2-cand-810-889
  source 1..80: mol_type = other DNA
cgctatgtcgataacaacttctgtggccctgatggctaccctcttgagtgcattaaagaccttctagcacgtgctggtaa

SEQ ID NO: 6471 - DNA, 80 bp, synthetic construct
  misc_feature 1..80: note = Synthetic: >SARSCoV2-cand-890-969
  source 1..80: mol_type = other DNA
agcttcatgcactttgtccgaacaactggactttattgacactaagaggggtgtatactgctgccgtgaacatgagcatg

SEQ ID NO: 6472 - DNA, 80 bp, synthetic construct
  misc_feature 1..80: note = Synthetic: >SARSCoV2-cand-970-1049
  source 1..80: mol_type = other DNA
aaattgcttggtacacggaacgttctgaaaagagctatgaattgcagacaccttttgaaattaaattggcaaagaaattt

SEQ ID NO: 6473 - DNA, 80 bp, synthetic construct
  misc_feature 1..80: note = Synthetic: >SARSCoV2-cand-1050-1129
  source 1..80: mol_type = other DNA
gacaccttcaatggggaatgtccaaattttgtatttcccttaaattccataatcaagactattcaaccaagggttgaaaa

SEQ ID NO: 6474 - DNA, 80 bp, synthetic construct
  misc_feature 1..80: note = Synthetic: >SARSCoV2-cand-1130-1209
  source 1..80: mol_type = other DNA
gaaaaagcttgatggctttatgggtagaattcgatctgtctatccagttgcgtcaccaaatgaatgcaaccaaatgtgcc

SEQ ID NO: 6475 - DNA, 80 bp, synthetic construct
  misc_feature 1..80: note = Synthetic: >SARSCoV2-cand-1210-1289
  source 1..80: mol_type = other DNA
tttcaactctcatgaagtgtgatcattgtggtgaaacttcatggcagacgggcgattttgttaaagccacttgcgaattt

SEQ ID NO: 6476 - DNA, 80 bp, synthetic construct
  misc_feature 1..80: note = Synthetic: >SARSCoV2-cand-1290-1369
  source 1..80: mol_type = other DNA
tgtggcactgagaatttgactaaagaaggtgccactacttgtggttacttaccccaaaatgctgttgttaaaatttattg

SEQ ID NO: 6477 - DNA, 80 bp, synthetic construct
  misc_feature 1..80: note = Synthetic: >SARSCoV2-cand-1370-1449
  source 1..80: mol_type = other DNA
tccagcatgtcacaattcagaagtaggacctgagcatagtcttgccgaataccataatgaatctggcttgaaaaccattc

SEQ ID NO: 6478 - DNA, 80 bp, synthetic construct
  misc_feature 1..80: note = Synthetic: >SARSCoV2-cand-1450-1529
  source 1..80: mol_type = other DNA
ttcgtaagggtggtcgcactattgcctttggaggctgtgtgttctcttatgttggttgccataacaagtgtgcctattgg

SEQ ID NO: 6479 - DNA, 80 bp, synthetic construct
  misc_feature 1..80: note = Synthetic: >SARSCoV2-cand-1530-1609
  source 1..80: mol_type = other DNA
gttccacgtgctagcgctaacataggttgtaaccatacaggtgttgttggagaaggttccgaaggtcttaatgacaacct

SEQ ID NO: 6480 - DNA, 80 bp, synthetic construct
  misc_feature 1..80: note = Synthetic: >SARSCoV2-cand-1610-1689
  source 1..80: mol_type = other DNA
tcttgaaatactccaaaaagagaaagtcaacatcaatattgttggtgactttaaacttaatgaagagatcgccattattt

SEQ ID NO: 6481 - DNA, 80 bp, synthetic construct
  misc_feature 1..80: note = Synthetic: >SARSCoV2-cand-1690-1769
  source 1..80: mol_type = other DNA
tggcatctttttctgcttccacaagtgcttttgtggaaactgtgaaaggtttggattataaagcattcaaacaaattgtt

SEQ ID NO: 6482 - DNA, 80 bp, synthetic construct
  misc_feature 1..80: note = Synthetic: >SARSCoV2-cand-1770-1849
  source 1..80: mol_type = other DNA
gaatcctgtggtaattttaaagttacaaaaggaaaagctaaaaaaggtgcctggaatattggtgaacagaaatcaatact

SEQ ID NO: 6483 - DNA, 80 bp, synthetic construct
  misc_feature 1..80: note = Synthetic: >SARSCoV2-cand-1850-1929
  source 1..80: mol_type = other DNA
gagtcctctttatgcatttgcatcagaggctgctcgtgttgtacgatcaattttctcccgcactcttgaaactgctcaaa

SEQ ID NO: 6484 - DNA, 80 bp, synthetic construct
  misc_feature 1..80: note = Synthetic: >SARSCoV2-cand-1930-2009
  source 1..80: mol_type = other DNA
attctgtgcgtgttttacagaaggccgctataacaatactagatggaatttcacagtattcactgagactcattgatgct

SEQ ID NO: 6485 - DNA, 80 bp, synthetic construct
  misc_feature 1..80: note = Synthetic: >SARSCoV2-cand-23810-23889
  source 1..80: mol_type = other DNA
tcttttgttgcaatatggcagtttttgtacacaattaaaccgtgctttaactggaatagctgttgaacaagacaaaaaca

SEQ ID NO: 6486 - DNA, 80 bp, synthetic construct
  misc_feature 1..80: note = Synthetic: >SARSCoV2-cand-23890-23969
  source 1..80: mol_type = other DNA
cccaagaagtttttgcacaagtcaaacaaatttacaaaacaccaccaattaaagattttggtggttttaatttttcacaa

SEQ ID NO: 6487 - DNA, 80 bp, synthetic construct
  misc_feature 1..80: note = Synthetic: >SARSCoV2-cand-23970-24049
  source 1..80: mol_type = other DNA
atattaccagatccatcaaaaccaagcaagaggtcatttattgaagatctacttttcaacaaagtgacacttgcagatgc

SEQ ID NO: 6488 - DNA, 80 bp, synthetic construct
  misc_feature 1..80: note = Synthetic: >SARSCoV2-cand-24050-24129
  source 1..80: mol_type = other DNA
tggcttcatcaaacaatatggtgattgccttggtgatattgctgctagagacctcatttgtgcacaaaagtttaacggcc

SEQ ID NO: 6489 - DNA, 80 bp, synthetic construct
  misc_feature 1..80: note = Synthetic: >SARSCoV2-cand-24130-24209
  source 1..80: mol_type = other DNA
ttactgttttgccacctttgctcacagatgaaatgattgctcaatacacttctgcactgttagcgggtacaatcacttct

SEQ ID NO: 6490 - DNA, 80 bp, synthetic construct
  misc_feature 1..80: note = Synthetic: >SARSCoV2-cand-24210-24289
  source 1..80: mol_type = other DNA
ggttggacctttggtgcaggtgctgcattacaaataccatttgctatgcaaatggcttataggtttaatggtattggagt

SEQ ID NO: 6491 - DNA, 80 bp, synthetic construct
  misc_feature 1..80: note = Synthetic: >SARSCoV2-cand-24290-24369
  source 1..80: mol_type = other DNA
tacacagaatgttctctatgagaaccaaaaattgattgccaaccaatttaatagtgctattggcaaaattcaagactcac

SEQ ID NO: 6492 - DNA, 80 bp, synthetic construct
  misc_feature 1..80: note = Synthetic: >SARSCoV2-cand-24370-24449
  source 1..80: mol_type = other DNA
tttcttccacagcaagtgcacttggaaaacttcaagatgtggtcaaccaaaatgcacaagctttaaacacgcttgttaaa

SEQ ID NO: 6493 - DNA, 80 bp, synthetic construct
  misc_feature 1..80: note = Synthetic: >SARSCoV2-cand-24450-24529
  source 1..80: mol_type = other DNA
caacttagctccaattttggtgcaatttcaagtgttttaaatgatatcctttcacgtcttgacaaagttgaggctgaagt

SEQ ID NO: 6494 - DNA, 80 bp, synthetic construct
  misc_feature 1..80: note = Synthetic: >SARSCoV2-cand-24530-24609
  source 1..80: mol_type = other DNA
gcaaattgataggttgatcacaggcagacttcaaagtttgcagacatatgtgactcaacaattaattagagctgcagaaa

SEQ ID NO: 6495 - DNA, 80 bp, synthetic construct
  misc_feature 1..80: note = Synthetic: >SARSCoV2-cand-24690-24769
  source 1..80: mol_type = other DNA
aagggctatcatcttatgtccttccctcagtcagcacctcatggtgtagtcttcttgcatgtgacttatgtccctgcaca

SEQ ID NO: 6496 - DNA, 80 bp, synthetic construct
  misc_feature 1..80: note = Synthetic: >SARSCoV2-cand-24770-24849
  source 1..80: mol_type = other DNA
agaaaagaacttcacaactgctcctgccatttgtcatgatggaaaagcacactttcctcgtgaaggtgtctttgtttcaa

SEQ ID NO: 6497 - DNA, 80 bp, synthetic construct
  misc_feature 1..80: note = Synthetic: >SARSCoV2-cand-24850-24929
  source 1..80: mol_type = other DNA
atggcacacactggtttgtaacacaaaggaatttttatgaaccacaaatcattactacagacaacacatttgtgtctggt

SEQ ID NO: 6498 - DNA, 80 bp, synthetic construct
  misc_feature 1..80: note = Synthetic: >SARSCoV2-cand-24930-25009
  source 1..80: mol_type = other DNA
aactgtgatgttgtaataggaattgtcaacaacacagtttatgatcctttgcaacctgaattagactcattcaaggagga

SEQ ID NO: 6499 - DNA, 80 bp, synthetic construct
  misc_feature 1..80: note = Synthetic: >SARSCoV2-cand-25010-25089
  source 1..80: mol_type = other DNA
gttagataaatattttaagaatcatacatcaccagatgttgatttaggtgacatctctggcattaatgcttcagttgtaa

SEQ ID NO: 6500 - DNA, 80 bp, synthetic construct
  misc_feature 1..80: note = Synthetic: >SEAC-cand-14980-15059
  source 1..80: mol_type = other DNA
atgtgtctcttgctattgatgcatacccactgtctaagcatcccaatcgtgaatataggaaggttttctatgttcttctt

SEQ ID NO: 6501 - DNA, 80 bp, synthetic construct
  misc_feature 1..80: note = Synthetic: >HKU2R-cand-14810-14889
  source 1..80: mol_type = other DNA
acgttatgtgtctcttgctattgatgcatatccactatctaagcaccccaatcgtgaatataggaaggttttctatgttc

SEQ ID NO: 6502 - DNA, 80 bp, synthetic construct
  misc_feature 1..80: note = Synthetic: >SARSRC-cand-6320-6399
  source 1..80: mol_type = other DNA
aagaagtagtggaaaatcctaccgtacagaaggaagtaatagagtgtgacgtgaaaactaccgaagttgtaggcaatgtc

SEQ ID NO: 6503 - DNA, 80 bp, synthetic construct
  misc_feature 1..80: note = Synthetic: >BtRl_BetaCoV-cand-6290-6369
  source 1..80: mol_type = other DNA
ccacctctgaagaagtagtggaaaatcctaccatacagaaggaagtaatagagtgtgacgtgaaaactaccgaagttgta

SEQ ID NO: 6504 - DNA, 80 bp, synthetic construct
  misc_feature 1..80: note = Synthetic: >WIV16-cand-6330-6409
  source 1..80: mol_type = other DNA
cctctgaagaagtagtggaaaatcctaccatacagaaggaagtcatagagtgtgacgtgaaaactaccgaagttgtaggc

SEQ ID NO: 6505 - DNA, 80 bp, synthetic construct
  misc_feature 1..80: note = Synthetic: >Delta-cand-16240-16319
  source 1..80: mol_type = other DNA
aagaatggaaaaacccaagttggtgattacattcttgctaaaacagatggcagtgacacttatacttacagaggaacatc

SEQ ID NO: 6506 - DNA, 80 bp, synthetic construct
  misc_feature 1..80: note = Synthetic: >HKU15-cand-14740-14819
  source 1..80: mol_type = other DNA
acaagaatggaaaaacccaagttggtgattacattcttgctaaaacagatggcagtgacacttatacttacagaggaaca

SEQ ID NO: 6507 - DNA, 80 bp, synthetic construct
  misc_feature 1..80: note = Synthetic: >HKU20_FJ376622-cand-14910-14989
  source 1..80: mol_type = other DNA
tcattttaacaagaatggaaaaacccaagttggtgattacattctagctaaaactgatggcactgaaacttacacctatc

SEQ ID NO: 6508 - DNA, 80 bp, synthetic construct
  misc_feature 1..80: note = Synthetic: >MsbCoV1-cand-26760-26839
  source 1..80: mol_type = other DNA
aagaatggcgactattctgctattatgacgatggcagattcattttccgaaaatgaaagattgttacatttagtttaaac

SEQ ID NO: 6509 - DNA, 80 bp, synthetic construct
  misc_feature 1..80: note = Synthetic: >MbCoV1-cand-26770-26849
  source 1..80: mol_type = other DNA
aatggcgactattctgctattatgacgatggcagattcattttccgaaaatgaaagattgttacatttagtttaaactaa

SEQ ID NO: 6510 - DNA, 80 bp, synthetic construct
  misc_feature 1..80: note = Synthetic: >BatCoV1A-cand-26940-27019
  source 1..80: mol_type = other DNA
tggcgactattctgctgttatgacgatggcagattcattttccgaaaatgaaagattgttacatttagtttaaactaaac

SEQ ID NO: 6511 - DNA, 80 bp, synthetic construct
  misc_feature 1..80: note = Synthetic: >HKU24-cand-17060-17139
  source 1..80: mol_type = other DNA
aagatattgtactgtacagggaccacctggtacaggaaaatctcatttagctatcgggctggcagtttattactgcacgg

SEQ ID NO: 6512 - DNA, 80 bp, synthetic construct
  misc_feature 1..80: note = Synthetic: >BetaSp-cand-17410-17489
  source 1..80: mol_type = other DNA
atgaaaagatattgtactgtccagggaccacctggtactggaaaatcgcatttagctatcgggctggcagtttattactg

SEQ ID NO: 6513 - DNA, 80 bp, synthetic construct
  misc_feature 1..80: note = Synthetic: >BtSk_AlphaCoV-cand-420-499
  source 1..80: mol_type = other DNA
atgatgtcgtcatgctaatcactggtgtcacccaattgagggcttatttgggcacttttggtgaccgacctctgaatctt

SEQ ID NO: 6514 - DNA, 80 bp, synthetic construct
  misc_feature 1..80: note = Synthetic: >BetaSp-cand-20850-20929
  source 1..80: mol_type = other DNA
agagttcattgagtatgactctagcatacattcgtactttatcacagatcagaagagtggtagtagtaagagtgtgtgca

SEQ ID NO: 6515 - DNA, 80 bp, synthetic construct
  misc_feature 1..80: note = Synthetic: >AlphaMink-cand-16720-16799
  source 1..80: mol_type = other DNA
aataacgcgtgctaaaattggtatactgtgtgtgatgtgtgataaagccatgtatgatggtcttaatttctatgaaatta

SEQ ID NO: 6516 - DNA, 80 bp, synthetic construct
  misc_feature 1..80: note = Synthetic: >Alpha2-cand-16710-16789
  source 1..80: mol_type = other DNA
ataacgcgtgctaaaattggtatactgtgtgtaatgtgtgacaaagccatgtatgatggtcttaatttctatgaaattaa

SEQ ID NO: 6517 - DNA, 80 bp, synthetic construct
  misc_feature 1..80: note = Synthetic: >MinkCoV1-cand-16740-16819
  source 1..80: mol_type = other DNA
gttgcaataacgcgtgctaaaattggtatactgtgtgtaatgtgtgacaaagccatgtatgatggtcttaatttctatga

SEQ ID NO: 6518 - DNA, 80 bp, synthetic construct
  misc_feature 1..80: note = Synthetic: >MbCoV1-cand-26370-26449
  source 1..80: mol_type = other DNA
gacatttgggcagaagtgggttatgtttgcttttagcatcgttatggcctgcacaacattagtgctgtggttgatgtatt

SEQ ID NO: 6519 - DNA, 80 bp, synthetic construct
  misc_feature 1..80: note = Synthetic: >BatCoV1A-cand-26540-26619
  source 1..80: mol_type = other DNA
catttgggcagaagtgggttatgtttgcttttagcatcgttatggcctgcacaacactagtgctgtggttgatgtatttc

SEQ ID NO: 6520 - DNA, 80 bp, synthetic construct
  misc_feature 1..80: note = Synthetic: >MsbCoV1-cand-26360-26439
  source 1..80: mol_type = other DNA
gtcgacatttgggcagaagtgggttatgtttgcttttagcatcgttatggcctgcacaacactagtgctgtggttgatgt

SEQ ID NO: 6521 - DNA, 80 bp, synthetic construct
  misc_feature 1..80: note = Synthetic: >Quail-cand-13150-13229
  source 1..80: mol_type = other DNA
aatatcaacaatcccattttagtgggttgggattaccctaagtgtgaccgttccatgcctaacatgttgcgaattgccgc

SEQ ID NO: 6522 - DNA, 80 bp, synthetic construct
  misc_feature 1..80: note = Synthetic: >HKU15-cand-13210-13289
  source 1..80: mol_type = other DNA
atatcaacaatcccattttagtgggttgggattaccctaagtgtgatcgttctatgccaaacatgctgcgcattgccgct

SEQ ID NO: 6523 - DNA, 80 bp, synthetic construct
  misc_feature 1..80: note = Synthetic: >HKU24-cand-17700-17779
  source 1..80: mol_type = other DNA
aatatgcagcagatatatctgattagcaagtttttgaaagctaatccactctggcaaaaggctgtgtttatcagtcctta

SEQ ID NO: 6524 - DNA, 80 bp, synthetic construct
  misc_feature 1..80: note = Synthetic: >BetaSp-cand-18050-18129
  source 1..80: mol_type = other DNA
ctgtcaatatgcagcagatatatttgattagcaaatttttaaaagctaatcccctctggcaaaaggctgtgtttatcagt

SEQ ID NO: 6525 - DNA, 80 bp, synthetic construct
  misc_feature 1..80: note = Synthetic: >AlphaMink-cand-25140-25219
  source 1..80: mol_type = other DNA
gcaattagaggctttgttcaattagatcttaatgttgtaaggtccatagaacttcttaacggtgattttatttacatatt

SEQ ID NO: 6526 - DNA, 80 bp, synthetic construct
  misc_feature 1..80: note = Synthetic: >SEAC-cand-13700-13779
  source 1..80: mol_type = other DNA
ttcagagttaacacttaagcattttttctttgctcaaaagggtgatgctgctgttgctgattttgactattataggtaca

SEQ ID NO: 6527 - DNA, 80 bp, synthetic construct
  misc_feature 1..80: note = Synthetic: >Sk512R-cand-930-1009
  source 1..80: mol_type = other DNA
gttggttctccatttatgggtaacggctctacgtttgtagaaatgcttaaagatccagctttcttccatgcccttataac

SEQ ID NO: 6528 - DNA, 80 bp, synthetic construct
  misc_feature 1..80: note = Synthetic: >BtSk_AlphaCoV-cand-900-979
  source 1..80: mol_type = other DNA
ctccatttatgggtaacggctctacgtttgtagaaatgcttaaagacccagctttcttccatgcccttatcacgtgtgaa

SEQ ID NO: 6529 - DNA, 80 bp, synthetic construct
  misc_feature 1..80: note = Synthetic: >BtSk_AlphaCoV-cand-27980-28059
  source 1..80: mol_type = other DNA
cattggaatcttccaatactagcggtcttggtcttgcacacaacggtaagcctgtaataatgacagtgcaagtaggttat

SEQ ID NO: 6530 - DNA, 80 bp, synthetic construct
  misc_feature 1..80: note = Synthetic: >Sk512R-cand-27680-27759
  source 1..80: mol_type = other DNA
atggctgctgggcattggaattttccaatactagcggtcttggtcttgcacacaacggtaagcctgtaataatgacagtg

SEQ ID NO: 6531 - DNA, 80 bp, synthetic construct
  misc_feature 1..80: note = Synthetic: >HKU24-cand-4760-4839
  source 1..80: mol_type = other DNA
ataaggagacaactctagtatcgacttatgataagctgcaggacatctattgtatgcagcatgatataaagttggatgat

SEQ ID NO: 6532 - DNA, 80 bp, synthetic construct
  misc_feature 1..80: note = Synthetic: >BetaSp-cand-5080-5159
  source 1..80: mol_type = other DNA
ctcttcttgataaggagacaactctagtatcgacttatgataagctgcaggacatttattgtatgcagcatgatataaag

SEQ ID NO: 6533 - DNA, 80 bp, synthetic construct
  misc_feature 1..80: note = Synthetic: >Alpha2-cand-24970-25049
  source 1..80: mol_type = other DNA
tattctataacgtctcaactttaatgtttgtacatggtaaagctgcaccgtatttgagaagttctaatcacgctcattat

SEQ ID NO: 6534 - DNA, 80 bp, synthetic construct
  misc_feature 1..80: note = Synthetic: >AlphaMink-cand-24980-25059
  source 1..80: mol_type = other DNA
attctataacgtttcaactttaatgtttgtacatggtaaagctgcaccgtatttgagaagttctaatcacgctcattatg

SEQ ID NO: 6535 - DNA, 80 bp, synthetic construct
  misc_feature 1..80: note = Synthetic: >MinkCoV1-cand-25030-25109
  source 1..80: mol_type = other DNA
ttgaatttttattctacaatgtttcaactttaatgtttgtacatggtaaagctgcaccgtatttgagaagttctaatcac

SEQ ID NO: 6536 - DNA, 80 bp, synthetic construct
  misc_feature 1..80: note = Synthetic: >BetaSp-cand-16370-16449
  source 1..80: mol_type = other DNA
gctttgttagtttggctatagatgcttatccattggtatatcatgagaatgaagaatatcaaaaggtttttagagtgtat

SEQ ID NO: 6537 - DNA, 80 bp, synthetic construct
  misc_feature 1..80: note = Synthetic: >HKU24-cand-16020-16099
  source 1..80: mol_type = other DNA
gttagtttggctatagatgcttatccattggtatatcatgagaatgaagaataccaaaaggtttttagagtgtatttgga

SEQ ID NO: 6538 - DNA, 80 bp, synthetic construct
  misc_feature 1..80: note = Synthetic: >FelineAlpha1-cand-28160-28239
  source 1..80: mol_type = other DNA
gaataaagttttagcagaaaccagattactagtagtagtactgcgagtgatctttctagtacttctagggttttcctgct

SEQ ID NO: 6539 - DNA, 80 bp, synthetic construct
  misc_feature 1..80: note = Synthetic: >BetaCoV1-cand-12060-12139
  source 1..80: mol_type = other DNA
ggtggtgtgcccattatagaagtatctcaaattcaatctaaattgacagatgttaagtgtgctaatgttgtactccttaa

SEQ ID NO: 6540 - DNA, 80 bp, synthetic construct
  misc_feature 1..80: note = Synthetic: >Delta-cand-18030-18109
  source 1..80: mol_type = other DNA
acaatttcgtcaccttaaaaaggacatgcgccaggcgcgtccttggaaggttgttcgacgtgagattgctactcacattg

SEQ ID NO: 6541 - DNA, 80 bp, synthetic construct
  misc_feature 1..80: note = Synthetic: >HKU15-cand-16420-16499
  source 1..80: mol_type = other DNA
gtcaccttaaaaaggacatgcgccaggcgcgtccttggaaggttgttcgacgtgagattgctactcacattgctgaggta

SEQ ID NO: 6542 - DNA, 80 bp, synthetic construct
  misc_feature 1..80: note = Synthetic: >BtSk_AlphaCoV-cand-24470-24549
  source 1..80: mol_type = other DNA
ccaaaatattaacaacacacttgtagaccttcagtggcttaatagggttgagacctatattaagtggccatggtttgtgt

SEQ ID NO: 6543 - DNA, 80 bp, synthetic construct
  misc_feature 1..80: note = Synthetic: >Sb512-cand-24530-24609
  source 1..80: mol_type = other DNA
atccaaaatattaacaacacacttgtagaccttcagtggcttaatagggttgagacctttattaagtggccgtggtacgt

SEQ ID NO: 6544 - DNA, 80 bp, synthetic construct
  misc_feature 1..80: note = Synthetic: >Sb512-cand-11470-11549
  source 1..80: mol_type = other DNA
acacaacgaaagttggatagaatggctgaacaagctgcttcacaaatgtacaaggaggcacgtgctgtaaatagaaagtc

SEQ ID NO: 6545 - DNA, 80 bp, synthetic construct
  misc_feature 1..80: note = Synthetic: >Sk512R-cand-11460-11539
  source 1..80: mol_type = other DNA
tctacacaacgaaagttggatagaatggctgaacaagctgcttcacaaatgtacaaggaggcacgtgctgtaaatagaaa

SEQ ID NO: 6546 - DNA, 80 bp, synthetic construct
  misc_feature 1..80: note = Synthetic: >SEAC-cand-1650-1729
  source 1..80: mol_type = other DNA
gagattttctaaggcttttactgattttctgagttacacccgtgaatgctttactgccctctgtgatgacatcgttgtgt

SEQ ID NO: 6547 - DNA, 80 bp, synthetic construct
  misc_feature 1..80: note = Synthetic: >HKU2R-cand-1480-1559
  source 1..80: mol_type = other DNA
gctgagagattttctaaggcttttaccgattttttaagttacacccgtgaatgctttactgccctctgtgatgacatcgt

SEQ ID NO: 6548 - DNA, 80 bp, synthetic construct
  misc_feature 1..80: note = Synthetic: >229ER-cand-16400-16479
  source 1..80: mol_type = other DNA
acattgttgtcgtagatgaggtgtccatgtgtactaactatgacttgtctgtgattaaccagcgtatatcatacaaacac

SEQ ID NO: 6549 - DNA, 80 bp, synthetic construct
  misc_feature 1..80: note = Synthetic: >HKU5-cand-15280-15359
  source 1..80: mol_type = other DNA
cgttcttccgacgataacgcagatgaatttgaaatatgctattagtgctaagaatagagctcggactgttgccggtgtgt

SEQ ID NO: 6550 - DNA, 80 bp, synthetic construct
  misc_feature 1..80: note = Synthetic: >HKU15-cand-19890-19969
  source 1..80: mol_type = other DNA
ttccacctgatttaactgactttacggtctaccgtactggtcagttctatgctaatggttaccttttaggtactttacct

SEQ ID NO: 6551 - DNA, 80 bp, synthetic construct
  misc_feature 1..80: note = Synthetic: >MsbCoV1-cand-20000-20079
  source 1..80: mol_type = other DNA
acattctacttgatgactttgttaatgtcctgaaatctttggatcttagtgttgtttctaaggtacatgaagtcattgta

SEQ ID NO: 6552 - DNA, 80 bp, synthetic construct
  misc_feature 1..80: note = Synthetic: >MbCoV1-cand-20020-20099
  source 1..80: mol_type = other DNA
tgatgactttgttaatgtcctgaaatctttggatcttagtgtggtttctaaggtacatgaagtcattgtagattgtaaag

SEQ ID NO: 6553 - DNA, 80 bp, synthetic construct
  misc_feature 1..80: note = Synthetic: >229ER-cand-18160-18239
  source 1..80: mol_type = other DNA
acattggaatatgattacatgacacacggtcaaatggatggcctgtgtttgttctggaattgcaatgtggatatgtaccc

SEQ ID NO: 6554 - DNA, 80 bp, synthetic construct
  misc_feature 1..80: note = Synthetic: >229E-cand-18180-18259
  source 1..80: mol_type = other DNA
agtacgattacatgacacatggccaaatggatggcttgtgtttgttctggaattgcaatgtggatatgtaccctgaattc

SEQ ID NO: 6555 - DNA, 80 bp, synthetic construct
  misc_feature 1..80: note = Synthetic: >MinkCoV1-cand-19910-19989
  source 1..80: mol_type = other DNA
tgttgccattaaacttacagaatatagttggaacaaggagctgtatgagttaatacagcgttttgagtattggacaatgt

SEQ ID NO: 6556 - DNA, 80 bp, synthetic construct
  misc_feature 1..80: note = Synthetic: >Alpha2-cand-19870-19949
  source 1..80: mol_type = other DNA
gtagtgttgccattaaacttacagaatatagttggaacaaggaactgtatgaattaatacagcgttttgagtattggaca

SEQ ID NO: 6557 - DNA, 80 bp, synthetic construct
  misc_feature 1..80: note = Synthetic: >MbCoV1-cand-20100-20179
  source 1..80: mol_type = other DNA
tttaccgctggatgttatggtgtaaggattacaaagttcaaactttttatcctcaattgcagtctgccgaatggaaatgt

SEQ ID NO: 6558 - DNA, 80 bp, synthetic construct
  misc_feature 1..80: note = Synthetic: >MsbCoV1-cand-20080-20159
  source 1..80: mol_type = other DNA
gattgtaaagtttaccgctggatgttatggtgtaaggattacaaagttcaaactttttatcctcaattgcagtctgccga

SEQ ID NO: 6559 - DNA, 80 bp, synthetic construct
  misc_feature 1..80: note = Synthetic: >MbCoV1-cand-7210-7289
  source 1..80: mol_type = other DNA
ttgacatttttggtgatgagattgttgtcacatttattgtgtacaaagctcttatgtttatcaagcacgtttgttttggt

SEQ ID NO: 6560 - DNA, 80 bp, synthetic construct
  misc_feature 1..80: note = Synthetic: >MsbCoV1-cand-7210-7289
  source 1..80: mol_type = other DNA
tggtgatgagattgttgtcacatttattgtgtacaaagctcttatgtttataaagcatgtctgttttggttgtgaaaaac

SEQ ID NO: 6561 - DNA, 80 bp, synthetic construct
  misc_feature 1..80: note = Synthetic: >HKU20_FJ376622-cand-15710-15789
  source 1..80: mol_type = other DNA
ctaagctggtttacgataataagctaaaagcggcgaaaccgaactcaagacagtgttacaagaccattgttaattttggt

SEQ ID NO: 6562 - DNA, 80 bp, synthetic construct
  misc_feature 1..80: note = Synthetic: >HKU18-cand-15560-15639
  source 1..80: mol_type = other DNA
gtttacgataataagctaaaagcggcgaaaccgaactcaagacagtgttataagaccattgtcaactttggtcctggaga

SEQ ID NO: 6563 - DNA, 80 bp, synthetic construct
  misc_feature 1..80: note = Synthetic: >HKU2-cand-25120-25199
  source 1..80: mol_type = other DNA
ttaagctttatcgcagaacgcgaacgttttgggcatttaaccccgaaacagacgccattgctgtcatttcagtctttggt

SEQ ID NO: 6564 - DNA, 80 bp, synthetic construct
  misc_feature 1..80: note = Synthetic: >HKU20_FJ376622-cand-17470-17549
  source 1..80: mol_type = other DNA
tattccactacggattgtagcagtgagcagccaatagttgtaacctatcgtgactgtgttactcgctgtaacactggcac

SEQ ID NO: 6565 - DNA, 80 bp, synthetic construct
  misc_feature 1..80: note = Synthetic: >BetaSp-cand-21890-21969
  source 1..80: mol_type = other DNA
tcaatgatatggtttactctctcatagagaagggtaaactacttgttcgtgatacaaataaagagtgttttataggtgat

SEQ ID NO: 6566 - DNA, 80 bp, synthetic construct
  misc_feature 1..80: note = Synthetic: >HKU8R-cand-18900-18979
  source 1..80: mol_type = other DNA
atatgtattatgcgtatgttaatgcgtataatacttttacacaagctggtttcaccatttgggtacccaacagctttgac

SEQ ID NO: 6567 - DNA, 80 bp, synthetic construct
  misc_feature 1..80: note = Synthetic: >MsbCoV1-cand-2400-2479
  source 1..80: mol_type = other DNA
atattgatggcggttctatttttggaactttcatcaatacagttaatgatgctgtgaactttgtcaaatcgttgaagata

SEQ ID NO: 6568 - DNA, 80 bp, synthetic construct
  misc_feature 1..80: note = Synthetic: >MbCoV1-cand-2410-2489
  source 1..80: mol_type = other DNA
tgaatattgatggcggttctatttttggaactttcatcaatacagttaatgatgctgtgaactttgtcaaatcgttgaag

SEQ ID NO: 6569 - DNA, 80 bp, synthetic construct
  misc_feature 1..80: note = Synthetic: >Delta-cand-13190-13269
  source 1..80: mol_type = other DNA
catttggtgtccttgccaaaactgagttcttcaagtttgacaagatacctaatgtcaatcgccagtatctgactaaatat

SEQ ID NO: 6570 - DNA, 80 bp, synthetic construct
  misc_feature 1..80: note = Synthetic: >HKU15-cand-11690-11769
  source 1..80: mol_type = other DNA
tgatacatttggtgtccttgccaaaactgagttcttcaagtttgacaagatacctaatgtcaatcgccagtatctgacta

SEQ ID NO: 6571 - DNA, 80 bp, synthetic construct
  misc_feature 1..80: note = Synthetic: >BetaCoV1-cand-31050-31129
  source 1..80: mol_type = other DNA
ttaataatatgtctggtgctgctgatgagcctcagaaggatgtttatgagctgcgctattctggtgcaataagatttgat

SEQ ID NO: 6572 - DNA, 80 bp, synthetic construct
  misc_feature 1..80: note = Synthetic: >HKU24-cand-30600-30679
  source 1..80: mol_type = other DNA
caacaacatgtctggggctgctgatgagccgcagaaggatgtttatgagctgcgctattctggtgcaataagatttgata

SEQ ID NO: 6573 - DNA, 80 bp, synthetic construct
  misc_feature 1..80: note = Synthetic: >BatCoV1A-cand-27340-27419
  source 1..80: mol_type = other DNA
ccaagcaaggttctaagactgagcctactaagcttggtacacgtaatcgcaaccagcaattgcgtattccaacatttgat

SEQ ID NO: 6574 - DNA, 80 bp, synthetic construct
  misc_feature 1..80: note = Synthetic: >MbCoV1-cand-27170-27249
  source 1..80: mol_type = other DNA
tgccaagcaaggttctaagactgagcctactaatcttggtacacgtaatcgcaatcagcaattgcgtattcctgaatttg

SEQ ID NO: 6575 - DNA, 80 bp, synthetic construct
  misc_feature 1..80: note = Synthetic: >Delta-cand-16750-16829
  source 1..80: mol_type = other DNA
atcaatgccttacctgacattaagtgtgacattgtagttgtagatgaggtttctatgttgaccaattatgagctttcctc

SEQ ID NO: 6576 - DNA, 80 bp, synthetic construct
  misc_feature 1..80: note = Synthetic: >WIV16-cand-14350-14429
  source 1..80: mol_type = other DNA
ctagtaagaaaaatatttgtagatggtgttccttttgttgtttcaactggataccattttcgtgagttaggagttgtaca

SEQ ID NO: 6577 - DNA, 80 bp, synthetic construct
  misc_feature 1..80: note = Synthetic: >Sk512R-cand-4050-4129
  source 1..80: mol_type = other DNA
atgtacgatgccaatatggctgttgatggtcatggtagacaccctattaagttcaacacaatcaacactttatgttacaa

SEQ ID NO: 6578 - DNA, 80 bp, synthetic construct
  misc_feature 1..80: note = Synthetic: >Sb512-cand-4060-4139
  source 1..80: mol_type = other DNA
tacgatgccaatatggctgttgatggtcatggtagacaccctattaagttcaacacaatcaacactttatgttataagga

SEQ ID NO: 6579 - DNA, 80 bp, synthetic construct
  misc_feature 1..80: note = Synthetic: >HKU4R-cand-3960-4039
  source 1..80: mol_type = other DNA
atgtaggtgattccgtattacttaagggccatggtctagcagatgcaatcttgcatgttgttggacctgatgctcgtaat

SEQ ID NO: 6580 - DNA, 80 bp, synthetic construct
  misc_feature 1..80: note = Synthetic: >HKU4-cand-3970-4049
  source 1..80: mol_type = other DNA
gtaggtgattccgtattacttaagggccatggcttagcagatgcaattttgcatgttgttggtcctgatgctcgtaataa

SEQ ID NO: 6581 - DNA, 80 bp, synthetic construct
  misc_feature 1..80: note = Synthetic: >BetaSp-cand-19970-20049
  source 1..80: mol_type = other DNA
tggagaatgtagtatataatttagtcaagactggagcatttactggtgaggccggcgaaatgccttgtgctatccgtaat

SEQ ID NO: 6582 - DNA, 80 bp, synthetic construct
  misc_feature 1..80: note = Synthetic: >BtRl_BetaCoV-cand-6050-6129
  source 1..80: mol_type = other DNA
atgtagtggctattgactatagacattactcagcgagtttcaagaaaggtgctaaattgctacataaaccaattatttgg

SEQ ID NO: 6583 - DNA, 80 bp, synthetic construct
  misc_feature 1..80: note = Synthetic: >SARSRC-cand-6080-6159
  source 1..80: mol_type = other DNA
ctattgactatagacattactcagcgagtttcaagaaaggtgctaaactgctacataagccaattatttggcatatcaat

SEQ ID NO: 6584 - DNA, 80 bp, synthetic construct
  misc_feature 1..80: note = Synthetic: >HKU5R-cand-20160-20239
  source 1..80: mol_type = other DNA
atgtcaattcagcactgaatatatgttttgacattcgtgataatggctcattggaaagattcatgtctttaccaaatggc

SEQ ID NO: 6585 - DNA, 80 bp, synthetic construct
  misc_feature 1..80: note = Synthetic: >BetaSp-cand-19090-19169
  source 1..80: mol_type = other DNA
ttatcttgtgattatgtgtataacccacttattgtagatatacagcagtggggttatacaggttctttgtctagcaatca

SEQ ID NO: 6586 - DNA, 80 bp, synthetic construct
  misc_feature 1..80: note = Synthetic: >HghCoV1-cand-19970-20049
  source 1..80: mol_type = other DNA
atgtcctttgggattatgaacgtagtaacatctatggcactgctactataggtgtatgtaaatacacagatattgaaatc

SEQ ID NO: 6587 - DNA, 80 bp, synthetic construct
  misc_feature 1..80: note = Synthetic: >HKU31-cand-20040-20119
  source 1..80: mol_type = other DNA
tgtcctttgggattatgaacgtagtaacatctatggcactgctactataggtgtatgtaaatacacagatattgaaatca

SEQ ID NO: 6588 - DNA, 80 bp, synthetic construct
  misc_feature 1..80: note = Synthetic: >BetaSp-cand-21010-21089
  source 1..80: mol_type = other DNA
gtaaatgttgattttaaggattttcagtttatgttgtggtgtaactcggataaagttatgactttttatcccagattgca

SEQ ID NO: 6589 - DNA, 80 bp, synthetic construct
  misc_feature 1..80: note = Synthetic: >HKU15-cand-8720-8799
  source 1..80: mol_type = other DNA
tggcacaatctcagataagtatcgaggatttcaactcatgggctgctaacaattcctttgctaacttcccatgtgaacaa

SEQ ID NO: 6590 - DNA, 80 bp, synthetic construct
  misc_feature 1..80: note = Synthetic: >HKU2-cand-15550-15629
  source 1..80: mol_type = other DNA
tggtccgacgtcagtgattataaattggccaatgatgttaaagaatctttgcgactctttgcggctgaaactattaaagc

SEQ ID NO: 6591 - DNA, 80 bp, synthetic construct
  misc_feature 1..80: note = Synthetic: >SEAC-cand-15530-15609
  source 1..80: mol_type = other DNA
tatgtctgattggtccgacgtcagtgattataaattggccaatgatgttaaagaatctttgcgactctttgcggctgaaa

SEQ ID NO: 6592 - DNA, 80 bp, synthetic construct
  misc_feature 1..80: note = Synthetic: >BetaCoV1-cand-25390-25469
  source 1..80: mol_type = other DNA
ggaagaatcctagcggttggaacagtcgctatggctttgttgaattcaagcctcttaatagtggtcagaactcctactca

SEQ ID NO: 6593 - DNA, 80 bp, synthetic construct
  misc_feature 1..80: note = Synthetic: >BetaSp-cand-25500-25579
  source 1..80: mol_type = other DNA
ttaccaggaagaatcctagcggttggaacagtcgctatggctttgttgaattcaagcctcttaatagtggtcagaactcc

SEQ ID NO: 6594 - DNA, 80 bp, synthetic construct
  misc_feature 1..80: note = Synthetic: >HKU4-cand-13470-13549
  source 1..80: mol_type = other DNA
taaaaacgttccgtgtaatgtctgtcagtattgggttgggtatggttgtaattgtgacgcattacgtaacaatacagtcc

SEQ ID NO: 6595 - DNA, 80 bp, synthetic construct
  misc_feature 1..80: note = Synthetic: >HKU4R-cand-13470-13549
  source 1..80: mol_type = other DNA
ttccgtgtaatgtctgtcagtattgggttgggtatggttgtaattgtgacgcgttacgtaacaatacattcccccaatcc

SEQ ID NO: 6596 - DNA, 80 bp, synthetic construct
  misc_feature 1..80: note = Synthetic: >SARSCoV-cand-14280-14359
  source 1..80: mol_type = other DNA
ggatgataggtgtatccttcattgtgcaaactttaatgtgttattttctactgtgtttccacctacaagttttggaccac

SEQ ID NO: 6597 - DNA, 80 bp, synthetic construct
  misc_feature 1..80: note = Synthetic: >WIV16-cand-14270-14349
  source 1..80: mol_type = other DNA
tggatgataggtgtatccttcattgtgcaaactttaatgtgttattttctactgtgtttccacctacaagttttggacca

SEQ ID NO: 6598 - DNA, 80 bp, synthetic construct
  misc_feature 1..80: note = Synthetic: >WIV16-cand-29880-29959
  source 1..80: mol_type = other DNA
ggatgatttctccagacaacttcaaaattccatgagtggagcttctgctgattcaactcaggcataaacactcatgatga

SEQ ID NO: 6599 - DNA, 80 bp, synthetic construct
  misc_feature 1..80: note = Synthetic: >SARSRC-cand-29290-29369
  source 1..80: mol_type = other DNA
tctccagacaacttcaaaattccatgagtggagcttctgctgattcaactcaggcataaacactcatgatgaccacacaa

SEQ ID NO: 6600 - DNA, 80 bp, synthetic construct
  misc_feature 1..80: note = Synthetic: >HKU15-cand-8160-8239
  source 1..80: mol_type = other DNA
tgttgtctactgcccacgccatgtaattggaaaattccgtggtgaccagtggactcacatggtctcaattgctgattgcc

SEQ ID NO: 6601 - DNA, 80 bp, synthetic construct
  misc_feature 1..80: note = Synthetic: >Sb512-cand-7160-7239
  source 1..80: mol_type = other DNA
ttagtaacggtttttactacctttatagtggctctacattttggaagtacaattttgatattacggaggctaagtatgcc

SEQ ID NO: 6602 - DNA, 80 bp, synthetic construct
  misc_feature 1..80: note = Synthetic: >MN531554-cand-480-559
  source 1..80: mol_type = other DNA
ctggtggtgtttagtaagcagacatacaatagacagtgacaacatggcttcaagtctaaaacagggagtatcttcccaaa

SEQ ID NO: 6603 - DNA, 80 bp, synthetic construct
  misc_feature 1..80: note = Synthetic: >NC_010800-cand-80-159
  source 1..80: mol_type = other DNA
gctggtcctcataggtgttccattgcagtgcactttagtgccctggatggcacctggccacctgtcaggtttttgttagt

SEQ ID NO: 6604 - DNA, 80 bp, synthetic construct
  misc_feature 1..80: note = Synthetic: >MT114541-cand-24480-24559
  source 1..80: mol_type = other DNA
aattcaaaatataatagcagttgtttctgctagagaattaataaatcttctaagaactaaacttatgagtcattacaggt

SEQ ID NO: 6605 - DNA, 80 bp, synthetic construct
  misc_feature 1..80: note = Synthetic: >MT114538-cand-24380-24459
  source 1..80: mol_type = other DNA
taggcttagtagtagtattttgcataccgctattgctattttgctgttgtagtacaggttgctgtggatgtataggttgt

SEQ ID NO: 6606 - DNA, 80 bp, synthetic construct
  misc_feature 1..80: note = Synthetic: >MT114542-cand-14150-14229
  source 1..80: mol_type = other DNA
acaactagcggtgatggtactacagcttatgctaactccgcttttaacatctttcaagctgtttctgctaatgttaacaa

SEQ ID NO: 6607 - DNA, 80 bp, synthetic construct
  misc_feature 1..80: note = Synthetic: >KU556804-cand-80-159
  source 1..80: mol_type = other DNA
aggtgtcccattgcagtgcactttagtgccctggatgacacctggccacctgtcaggttttagttattaaattttattgt

SEQ ID NO: 6608 - DNA, 80 bp, synthetic construct
  misc_feature 1..80: note = Synthetic: >MT114544-cand-18470-18549
  source 1..80: mol_type = other DNA
acaatacttagaaatttgggtgttgtcgcaacatataagtttgtgttgtgggattatgaagctgaatgtcctttctcaaa

SEQ ID NO: 6609 - DNA, 80 bp, synthetic construct
  misc_feature 1..80: note = Synthetic: >MT114541-cand-2350-2429
  source 1..80: mol_type = other DNA
ataacaagctctgtaatgcggctcgcactgatattgagatcggtggtataccattttctactttcaaaacaccaacaaac

SEQ ID NO: 6610 - DNA, 80 bp, synthetic construct
  misc_feature 1..80: note = Synthetic: >MG693169-cand-750-829
  source 1..80: mol_type = other DNA
cagaccaatatggatttgatgctgatggtgtccttgttaagcctattatggacttacttgggccaatcaagtcaggttat

SEQ ID NO: 6611 - DNA, 80 bp, synthetic construct
  misc_feature 1..80: note = Synthetic: >AY692454-cand-3120-3199
  source 1..80: mol_type = other DNA
ataactgttttgagggagctgttaaaccacttccacagaaggttgttgatgttcttggtgactggggagaggctgttgat

SEQ ID NO: 6612 - DNA, 80 bp, synthetic construct
  misc_feature 1..80: note = Synthetic: >MK618759-cand-12330-12409
  source 1..80: mol_type = other DNA
ataagaattatttaaacgggtacggggtagcagtgaggctcggctgataccccttgctaatggttgtgaacctgatgttg

SEQ ID NO: 6613 - DNA, 80 bp, synthetic construct
  misc_feature 1..80: note = Synthetic: >MT114543-cand-19640-19719
  source 1..80: mol_type = other DNA
gattacgtttccgacgcagacttcagtgttacaggcgattgtactagtctctacattgaagacaaatttgatttgcttat

SEQ ID NO: 6614 - DNA, 80 bp, synthetic construct
  misc_feature 1..80: note = Synthetic: >MK957245-cand-17570-17649
  source 1..80: mol_type = other DNA
atactcaagcttatgcttgttggaagcattgtttgggttttgattttatttataacccacttttagtggatattcaacaa

SEQ ID NO: 6615 - DNA, 80 bp, synthetic construct
  misc_feature 1..80: note = Synthetic: >SBB-726-cand-5360-5439
  source 1..80: mol_type = other DNA
ttgtaacttactacctagatggtgttaagcgtactaccatagacccagatcttagtaagtatgtaaagaagggtgactac

SEQ ID NO: 6616 - DNA, 80 bp, synthetic construct
  misc_feature 1..80: note = Synthetic: >SBB-747-cand-5030-5109
  source 1..80: mol_type = other DNA
tttacggctcggttgtgttggatgatttgtacgcacctgttagcgtggtgtgcccttgtggtaggcctgctatacggtac

SEQ ID NO: 6617 - DNA, 80 bp, synthetic construct
  misc_feature 1..80: note = Synthetic: >SBB-788-cand-5040-5119
  source 1..80: mol_type = other DNA
tgtcgtgttggatgatttgtacgcacctgttagcgtggtgtgcccttgtggtaggcctgctatacggtacgtttctgagc

SEQ ID NO: 6618 - DNA, 80 bp, synthetic construct
  misc_feature 1..80: note = Synthetic: >SBB-130-cand-5630-5709
  source 1..80: mol_type = other DNA
gttcatggttgtacattttggaacagagtaactgttacaaagggtactgtaatcttaactagtgcttcgccacctacagc

SEQ ID NO: 6619 - DNA, 80 bp, synthetic construct
  misc_feature 1..80: note = Synthetic: >SBB-041-cand-5630-5709
  source 1..80: mol_type = other DNA
tgtgtgcatggttgtacattttggaacagagtaactgttacaaagggtactgtaatcttaactagtgcttcgccacctac

SEQ ID NO: 6620 - DNA, 80 bp, synthetic construct
  misc_feature 1..80: note = Synthetic: >SBB-024-cand-5640-5719
  source 1..80: mol_type = other DNA
gttgtacattttggaacagagtaactgttacaaagggtactgtaatcttaactagtgcttcgccacctgcagctcatcca

SEQ ID NO: 6621 - DNA, 80 bp, synthetic construct
  misc_feature 1..80: note = Synthetic: >SBB-747-cand-9670-9749
  source 1..80: mol_type = other DNA
ggccataatattagagttataggtcatgttatggtgggttctcttttaaagcttactgttgatgttaacaacccacgtac

SEQ ID NO: 6622 - DNA, 80 bp, synthetic construct
  misc_feature 1..80: note = Synthetic: >SBB-788-cand-9680-9759
  source 1..80: mol_type = other DNA
ttagagttataggtcatgttatggtgggttctcttttaaagcttactgttgatgttaacaacccacgtacgcctgcttac

SEQ ID NO: 6623 - DNA, 80 bp, synthetic construct
  misc_feature 1..80: note = Synthetic: >SBB-797-cand-25520-25599
  source 1..80: mol_type = other DNA
ttgctcatcctgcagtttattttaggtacttgtagttgtttgtttagtataatttgcaagcctactattttagtgtacaa

SEQ ID NO: 6624 - DNA, 80 bp, synthetic construct
  misc_feature 1..80: note = Synthetic: >SBB-788-cand-25520-25599
  source 1..80: mol_type = other DNA
ttgttgctcatcctgcagtttattttaggtacttgtagttgtttgtttagtataatttgcaagcctactattttagtgta

SEQ ID NO: 6625 - DNA, 80 bp, synthetic construct
  misc_feature 1..80: note = Synthetic: >SBB-747-cand-3590-3669
  source 1..80: mol_type = other DNA
aacaaactcaagctcaagttgcagctgagatcgtgcccactgaggatattgatgctgaggtagccctttgtgttagggat

SEQ ID NO: 6626 - DNA, 80 bp, synthetic construct
  misc_feature 1..80: note = Synthetic: >SBB-797-cand-3600-3679
  source 1..80: mol_type = other DNA
agttcaagttgcagctgagagcgtgcccactgaggatatcgatgctgaggtagccctttgtgttagggatttgctacggc

SEQ ID NO: 6627 - DNA, 80 bp, synthetic construct
  misc_feature 1..80: note = Synthetic: >SBB-726-cand-19300-19379
  source 1..80: mol_type = other DNA
agtgtaatgcaccattagtgcctaacactgtaggtgtgtgtacttacactgacttaacgaagttggacgatcagattgtt

SEQ ID NO: 6628 - DNA, 80 bp, synthetic construct
  misc_feature 1..80: note = Synthetic: >SBB-788-cand-19290-19369
  source 1..80: mol_type = other DNA
tgggattatgagcgtaatgcaccattagtgcctaacactgtaggtgtgtgtacttacactgacttaacgaagttggacga

SEQ ID NO: 6629 - DNA, 80 bp, synthetic construct
  misc_feature 1..80: note = Synthetic: >SBB-747-cand-310-389
  source 1..80: mol_type = other DNA
actggctgggatatacctataaatgaggcttatgagtatgtgaagcagcagcttcgtttacctagtcctcaagttgtgtt

SEQ ID NO: 6630 - DNA, 80 bp, synthetic construct
  misc_feature 1..80: note = Synthetic: >SBB-797-cand-320-399
  source 1..80: mol_type = other DNA
atatacctataaatgaggcttatgagtatgtgaagcagcagcttcgtttacctagtcctcaagttgtgtttgtgccacat

SEQ ID NO: 6631 - DNA, 80 bp, synthetic construct
  misc_feature 1..80: note = Synthetic: >PRD-0038-cand-16550-16629
  source 1..80: mol_type = other DNA
gtgaagtactatcagacagagaattacatttgtcttgggaggttggtaaaccgcgtcctcccttgaatagaaattatgtt

SEQ ID NO: 6632 - DNA, 80 bp, synthetic construct
  misc_feature 1..80: note = Synthetic: >PDF-2386-cand-16560-16639
  source 1..80: mol_type = other DNA
atcagacagagaattacatttgtcttgggaggttggtaaaccgcgtcctcccttgaatagaaattatgtttttactggct

SEQ ID NO: 6633 - DNA, 80 bp, synthetic construct
  misc_feature 1..80: note = Synthetic: >SBB-788-cand-25930-26009
  source 1..80: mol_type = other DNA
ttgagctactttattagctcattccgcttgctttgtaggactggttcagcatggtctttcatgcctgaaactaatatgtt

SEQ ID NO: 6634 - DNA, 80 bp, synthetic construct
  misc_feature 1..80: note = Synthetic: >SBB-726-cand-25930-26009
  source 1..80: mol_type = other DNA
tggttgagctactttattagctcattccgcttgctttgtaggactggttcagcatggtctttcatgcctgaaactaatat

SEQ ID NO: 6635 - DNA, 80 bp, synthetic construct
  misc_feature 1..80: note = Synthetic: >GCS-227-cand-19980-20059
  source 1..80: mol_type = other DNA
acaatctgctgaatggaaatgtggttattcaatgccttcattgtacaagatacaacgtatgtgtttagagccttgcaatc

SEQ ID NO: 6636 - DNA, 80 bp, synthetic construct
  misc_feature 1..80: note = Synthetic: >GCS-211-cand-19990-20069
  source 1..80: mol_type = other DNA
ctgaatggaaatgcggttattcaatgccttcattgtacaagatacaacgtatgtgtttagagccttgcaatctctataac

SEQ ID NO: 6637 - DNA, 80 bp, synthetic construct
  misc_feature 1..80: note = Synthetic: >GCS-211-cand-170-249
  source 1..80: mol_type = other DNA
ggttagtccctgcggtggtgttccgtcattaccgtacactagctggggccccttgcacagttccgtctgtgcgagtgtgt

SEQ ID NO: 6638 - DNA, 80 bp, synthetic construct
  misc_feature 1..80: note = Synthetic: >GCS-227-cand-170-249
  source 1..80: mol_type = other DNA
ttagtccctgcggtggtgttccgtcattaccgtatactagctagggccccttgcacagttccgtctgtgcgagtgtgtgg

SEQ ID NO: 6639 - DNA, 80 bp, synthetic construct
  misc_feature 1..80: note = Synthetic: >GCS-227-cand-15510-15589
  source 1..80: mol_type = other DNA
agttactatacttgaagattccagtagcaaattctggactgaggagttctacgctaacatgtatgaaaagtccactgtgt

SEQ ID NO: 6640 - DNA, 80 bp, synthetic construct
  misc_feature 1..80: note = Synthetic: >GCS-211-cand-15510-15589
  source 1..80: mol_type = other DNA
tcagttactatacttgaagattccagtagcaaattctggactgaggagttctacgctaacatgtatgaaaagtccactgt

SEQ ID NO: 6641 - DNA, 80 bp, synthetic construct
  misc_feature 1..80: note = Synthetic: >GCS-211-cand-5610-5689
  source 1..80: mol_type = other DNA
cccagaagctgcagtgtttcatactatggaccataacacttatgcatacgaacatgctgttgttgaaggacgcttggtgt

SEQ ID NO: 6642 - DNA, 80 bp, synthetic construct
  misc_feature 1..80: note = Synthetic: >GCS-227-cand-5610-5689
  source 1..80: mol_type = other DNA
cagaagctgcagtgtttcatactatggaccataacacttatgcatacgaacatgctgttgttgaaggacgcttggtgttg

SEQ ID NO: 6643 - DNA, 80 bp, synthetic construct
  misc_feature 1..80: note = Synthetic: >GCS-227-cand-17820-17899
  source 1..80: mol_type = other DNA
acagtttacacaccttattccactgatgcgtaaaggcaggtcttggacagtcgttaggcgtcaaatagtgcaaatggtgt

SEQ ID NO: 6644 - DNA, 80 bp, synthetic construct
  misc_feature 1..80: note = Synthetic: >GCS-211-cand-17830-17909
  source 1..80: mol_type = other DNA
cacaccttattccactgatgcgtaaaggcaggtcttggacagtcgttaggcgtcaaatagtgcaaatggtgtgtgattat

SEQ ID NO: 6645 - DNA, 80 bp, synthetic construct
  misc_feature 1..80: note = Synthetic: >GCS-227-cand-6410-6489
  source 1..80: mol_type = other DNA
tttgtaatgtggcttttcactgtttttaagcttatttataaagcgtgcagaaaagcagaccttaaaattgtggcaggtgt

SEQ ID NO: 6646 - DNA, 80 bp, synthetic construct
  misc_feature 1..80: note = Synthetic: >GCS-211-cand-6410-6489
  source 1..80: mol_type = other DNA
tgtttgtaatgtggcttttcactgtttttaagcttatttataaagcgtgcagaaaagcagaccttaaaattgtggcaggt

SEQ ID NO: 6647 - DNA, 80 bp, synthetic construct
  misc_feature 1..80: note = Synthetic: >GCS-211-cand-19190-19269
  source 1..80: mol_type = other DNA
acacgtgctctgggattatgaggccaagcgacctctgacaccctacactattgatgtgtgtaagtatactgacttcgtag

SEQ ID NO: 6648 - DNA, 80 bp, synthetic construct
  misc_feature 1..80: note = Synthetic: >GCS-227-cand-19180-19259
  source 1..80: mol_type = other DNA
acttacaaacacgtgctctgggattatgaggccaagcgacctctgacaccctacactattgatgtgtgtaagtatactga

SEQ ID NO: 6649 - DNA, 80 bp, synthetic construct
  misc_feature 1..80: note = Synthetic: >GCS-227-cand-12550-12629
  source 1..80: mol_type = other DNA
tggttcaggtaatggacaggctatcactaacaatgtggaggctaatagttcacaggactcttatggtggtgcttcagtgt

SEQ ID NO: 6650 - DNA, 80 bp, synthetic construct
  misc_feature 1..80: note = Synthetic: >GCS-211-cand-12560-12639
  source 1..80: mol_type = other DNA
gtaatggacaggctatcactaacaatgtggaggctaatagttcacaggactcttatggtggtgcttcagtgtgtttgtat

SEQ ID NO: 6651 - DNA, 80 bp, synthetic construct
  misc_feature 1..80: note = Synthetic: >GCS-211-cand-21340-21419
  source 1..80: mol_type = other DNA
ggtgggtgtcacatgggacaacgacttcgttaccttatattggaatatgtatttacacagactgtacgtgcctggtgcat

SEQ ID NO: 6652 - DNA, 80 bp, synthetic construct
  misc_feature 1..80: note = Synthetic: >GCS-227-cand-21330-21409
  source 1..80: mol_type = other DNA
catgttatggtgggtgtcacatgggacaacgacttcgttaccttatattggaatatgtatttacacagactgtacgtgcc

SEQ ID NO: 6653 - DNA, 80 bp, synthetic construct
  misc_feature 1..80: note = Synthetic: >GCS-211-cand-16390-16469
  source 1..80: mol_type = other DNA
gcctcgtgccatattaccaactcatagccagacaacgtatcactaccatccagggacctcctggtagtggaaagtcgcat

SEQ ID NO: 6654 - DNA, 80 bp, synthetic construct
  misc_feature 1..80: note = Synthetic: >GCS-227-cand-16390-16469
  source 1..80: mol_type = other DNA
ctcgtgccatattaccaactcatagccagacaacgtatcactaccatccagggacctcctggtagtggaaagtcgcattg

SEQ ID NO: 6655 - DNA, 80 bp, synthetic construct
  misc_feature 1..80: note = Synthetic: >GCS-211-cand-27090-27169
  source 1..80: mol_type = other DNA
atgctaaccaccaagatcttgtggctgctgtacgtgctgcactggaaggcatgggcataaaacctcagcaggagggttca

SEQ ID NO: 6656 - DNA, 80 bp, synthetic construct
  misc_feature 1..80: note = Synthetic: >GCS-227-cand-27090-27169
  source 1..80: mol_type = other DNA
gctaaccaccaagatcttgtggctgctgtacgtgctgcactggaaggcatgggcataaaacctcagcaggagggttcacg

SEQ ID NO: 6657 - DNA, 80 bp, synthetic construct
  misc_feature 1..80: note = Synthetic: >GCS-211-cand-25980-26059
  source 1..80: mol_type = other DNA
tggccattagtggttgtgctgtcctgtttcaatatttgggcgaatgtcaataccaattggtattatgttgcattcagcat

SEQ ID NO: 6658 - DNA, 80 bp, synthetic construct
  misc_feature 1..80: note = Synthetic: >GCS-227-cand-25970-26049
  source 1..80: mol_type = other DNA
ggctactttggccattagtggttgtgctgtcctgtttcaatatttgggcgaatgtcaataccaattggtattatgttgca

SEQ ID NO: 6659 - DNA, 80 bp, synthetic construct
  misc_feature 1..80: note = Synthetic: >GCS-211-cand-6650-6729
  source 1..80: mol_type = other DNA
atggaccatttaatgcttacacatgtaattcttatgtcagaaattatgttaatggctctgtttcaggttacgataaaggc

SEQ ID NO: 6660 - DNA, 80 bp, synthetic construct
  misc_feature 1..80: note = Synthetic: >GCS-227-cand-6650-6729
  source 1..80: mol_type = other DNA
ggaccatttaatgcctacacatgtaattcttatgtcagaaattatgttaatggctctgtttcaggttacgataaaggcaa

SEQ ID NO: 6661 - DNA, 80 bp, synthetic construct
  misc_feature 1..80: note = Synthetic: >GCS-211-cand-23900-23979
  source 1..80: mol_type = other DNA
gttgtcaacacacaaggcaatgccttaactcatcttactgagcagctgcagaacaatttccaagccatcagctcctccat

SEQ ID NO: 6662 - DNA, 80 bp, synthetic construct
  misc_feature 1..80: note = Synthetic: >GCS-227-cand-23890-23969
  source 1..80: mol_type = other DNA
tacaagatgttgtcaacacacaaggcaatgccttaactcatcttactgagcagctgcagaacaatttccaagccatcagc

SEQ ID NO: 6663 - DNA, 80 bp, synthetic construct
  misc_feature 1..80: note = Synthetic: >SBB-726-cand-24080-24159
  source 1..80: mol_type = other DNA
atggtataatgtttttgcattatacatacaagcctacttcatatgcattggtacaaacagctgcaggtctttgtttaaat

SEQ ID NO: 6664 - DNA, 80 bp, synthetic construct
  misc_feature 1..80: note = Synthetic: >GCS-211-cand-5450-5529
  source 1..80: mol_type = other DNA
atgtcaatgatgttgacactgtgtctactgtacctatcaagcaacaactaggtcctgcgtccataggagatgaagatgtc

SEQ ID NO: 6665 - DNA, 80 bp, synthetic construct
  misc_feature 1..80: note = Synthetic: >GCS-227-cand-5450-5529
  source 1..80: mol_type = other DNA
gtcaatgatgttgacactgtgtctactgtacctatcaagcaacaactaggtcctgcgtccataggagatgaagatgtctc

SEQ ID NO: 6666 - DNA, 80 bp, synthetic construct
  misc_feature 1..80: note = Synthetic: >GCS-211-cand-11520-11599
  source 1..80: mol_type = other DNA
tagtatgccatcttttgtggcgtacgagctagctcgcaagaactatgaggatgctgttgctaatgacacatcgccacaat

SEQ ID NO: 6667 - DNA, 80 bp, synthetic construct
  misc_feature 1..80: note = Synthetic: >GCS-227-cand-11510-11589
  source 1..80: mol_type = other DNA
gcttatgctagtatgccatcttttgtggcgtacgagctagctcgcaagaactatgaggatgctgttgctaatgacacatc

SEQ ID NO: 6668 - DNA, 80 bp, synthetic construct
  misc_feature 1..80: note = Synthetic: >GCS-211-cand-25740-25819
  source 1..80: mol_type = other DNA
ttaggcgtgtgtacaatgcttatcaaacttttatgcaaatagacccttgcccaattgtagatgtctaactaaatcaaaat

SEQ ID NO: 6669 - DNA, 80 bp, synthetic construct
  misc_feature 1..80: note = Synthetic: >GCS-227-cand-25730-25809
  source 1..80: mol_type = other DNA
tgtgcctattaggcgtgtgtacaatgcttatcaaacttttatgcaaatagacccttgcccaattgtagatgtctaactaa

SEQ ID NO: 6670 - DNA, 80 bp, synthetic construct
  misc_feature 1..80: note = Synthetic: >SBB-130-cand-18090-18169
  source 1..80: mol_type = other DNA
attttggaattgcaatgttgacatgtaccctgaattctctattgtttgtaggtttgatacacgttgtcgttctaacctta

SEQ ID NO: 6671 - DNA, 80 bp, synthetic construct
  misc_feature 1..80: note = Synthetic: >SBB-010-cand-18090-18169
  source 1..80: mol_type = other DNA
cctattttggaattgcaatgttgacatgtaccctgaattctctattgtttgtaggtttgatacacgttgtcgttcgaacc

SEQ ID NO: 6672 - DNA, 80 bp, synthetic construct
  misc_feature 1..80: note = Synthetic: >SBB-130-cand-16890-16969
  source 1..80: mol_type = other DNA
attttgtgtcatgtgtgataaggagctttttgatgcccttaaattctttgaggttaaactctcagacttacaagctggag

SEQ ID NO: 6673 - DNA, 80 bp, synthetic construct
  misc_feature 1..80: note = Synthetic: >SBB-010-cand-16890-16969
  source 1..80: mol_type = other DNA
tatattttgtgtcatgtgtgacaaggagctttttgattctcttaaattctttgaggttaaactctcagacttacaagctg

SEQ ID NO: 6674 - DNA, 80 bp, synthetic construct
  misc_feature 1..80: note = Synthetic: >SBB-122-cand-24440-24519
  source 1..80: mol_type = other DNA
ccttgtgtcggtgttgtaaaccttgctttcaaggagattccactctatgagaaaccttcagatgtttgtgctactgtttg

SEQ ID NO: 6675 - DNA, 80 bp, synthetic construct
  misc_feature 1..80: note = Synthetic: >SBB-120-cand-24450-24529
  source 1..80: mol_type = other DNA
gtgttgtaaaccttgctttcaaggagattccactttatgagaaaccctcagacgtttgtgctacggtttaagagtgtctc

SEQ ID NO: 6676 - DNA, 80 bp, synthetic construct
  misc_feature 1..80: note = Synthetic: >SBB-726-cand-22320-22399
  source 1..80: mol_type = other DNA
tggccgccaaccttacaatagttatgttggcaccgtattaaatacaccaaaccctacgtgcacccagctaacttgctttg

SEQ ID NO: 6677 - DNA, 80 bp, synthetic construct
  misc_feature 1..80: note = Synthetic: >SBB-024-cand-2950-3029
  source 1..80: mol_type = other DNA
tggtggaggtgtcatacaattcgcagaaaatgttgaagtcaaagaaattgaccctgtttacaaggtaaaacttgactttg

SEQ ID NO: 6678 - DNA, 80 bp, synthetic construct
  misc_feature 1..80: note = Synthetic: >SBB-130-cand-2960-3039
  source 1..80: mol_type = other DNA
gtcatacaattcgcagaaaatgttgaagtcaaagaaattgaccctgtttacaaggtaaaacttgactttgagttcgagaa

SEQ ID NO: 6679 - DNA, 80 bp, synthetic construct
  misc_feature 1..80: note = Synthetic: >GCS-211-cand-2090-2169
  source 1..80: mol_type = other DNA
gtgaaatgatcaagtgtcctgctaccatagacattgataaagatttgaaaagcacggttgacaccctaacatcgaatttg

SEQ ID NO: 6680 - DNA, 80 bp, synthetic construct
  misc_feature 1..80: note = Synthetic: >GCS-227-cand-2090-2169
  source 1..80: mol_type = other DNA
gaaatgatcaagtgtcctgctaccatagacattgataaagatttgaaaagcacggttgacaccctaacatcggatttgtc

SEQ ID NO: 6681 - DNA, 80 bp, synthetic construct
  misc_feature 1..80: note = Synthetic: >GCS-227-cand-17980-18059
  source 1..80: mol_type = other DNA
tttgttaaggtcggccctagcaaattttgtcactgtggcaaagaggcacgttgttacaatagttcttctcatgagttctg

SEQ ID NO: 6682 - DNA, 80 bp, synthetic construct
  misc_feature 1..80: note = Synthetic: >GCS-211-cand-17990-18069
  source 1..80: mol_type = other DNA
ggtcggccctagcaaattttgtcactgtggcaaagaggcacgttgttacaacagttcttctcatgagttctgttgtttca

SEQ ID NO: 6683 - DNA, 80 bp, synthetic construct
  misc_feature 1..80: note = Synthetic: >GCS-211-cand-27490-27569
  source 1..80: mol_type = other DNA
cagcaaagacaaccctgccttaggtgcgttcttacaacagctgaacgcctttgcaaatgaggacaacacagatctcaatc

SEQ ID NO: 6684 - DNA, 80 bp, synthetic construct
  misc_feature 1..80: note = Synthetic: >GCS-227-cand-27490-27569
  source 1..80: mol_type = other DNA
gcaaagacaaccctgccttaggtgcgttcttacaacagctgaacgcctttgcaaatgaggacaacacagatctcaatcca

SEQ ID NO: 6685 - DNA, 80 bp, synthetic construct
  misc_feature 1..80: note = Synthetic: >GCS-227-cand-27730-27809
  source 1..80: mol_type = other DNA
tagacctggcttcatagaggacaccccagactttgaaactccatttgacaaaaagcatggcggacccatgcaggatgctg

SEQ ID NO: 6686 - DNA, 80 bp, synthetic construct
  misc_feature 1..80: note = Synthetic: >GCS-211-cand-27730-27809
  source 1..80: mol_type = other DNA
tatagacctggcttcatagaggacaccccagactttgaaactccatttgacaaaaagcatggcggacccatgcaggatgc

SEQ ID NO: 6687 - DNA, 80 bp, synthetic construct
  misc_feature 1..80: note = Synthetic: >GCS-227-cand-25090-25169
  source 1..80: mol_type = other DNA
ttatcaacctgctagtcataatgcttgcgctgcagggttattggctagattgtttgtgatgtttgtttatggaccagctg

SEQ ID NO: 6688 - DNA, 80 bp, synthetic construct
  misc_feature 1..80: note = Synthetic: >GCS-211-cand-25100-25179
  source 1..80: mol_type = other DNA
ctgctagtcataatgcttgcgctgcagggttattggctagattgtttgtgatgtttgtttatggaccagctgctatgtac

SEQ ID NO: 6689 - DNA, 80 bp, synthetic construct
  misc_feature 1..80: note = Synthetic: >GCS-227-cand-10230-10309
  source 1..80: mol_type = other DNA
ctagttctgacggttttagcattttggcggctaggactgagctcagtgttgagaacatcctttcgtccattatgaagctg

SEQ ID NO: 6690 - DNA, 80 bp, synthetic construct
  misc_feature 1..80: note = Synthetic: >GCS-211-cand-10240-10319
  source 1..80: mol_type = other DNA
gacggttttagcattttggcggctaggactgagctcagtgttgagaacattctttcgtccattatgaagctgtcaaatgg

SEQ ID NO: 6691 - DNA, 80 bp, synthetic construct
  misc_feature 1..80: note = Synthetic: >GCS-227-cand-1370-1449
  source 1..80: mol_type = other DNA
cagtgtactgagagtgttctgcaggctgctgtgaacggaacaattgatgttagcaacaaaattgttaactttgttgacaa

SEQ ID NO: 6692 - DNA, 80 bp, synthetic construct
  misc_feature 1..80: note = Synthetic: >GCS-211-cand-1370-1449
  source 1..80: mol_type = other DNA
tgcagtgtactgagagtgttctgcaggctgctgtgaacggaacaattgatgttagcaacaaaattgttaactttgttgac

SEQ ID NO: 6693 - DNA, 80 bp, synthetic construct
  misc_feature 1..80: note = Synthetic: >GCS-211-cand-8560-8639
  source 1..80: mol_type = other DNA
cagtgttctgcattgtatagtgacatagtccctaacatggtttacaagctggatgatggtaactacatccgtgttccaga

SEQ ID NO: 6694 - DNA, 80 bp, synthetic construct
  misc_feature 1..80: note = Synthetic: >GCS-227-cand-8560-8639
  source 1..80: mol_type = other DNA
gtgttctgcattgtatagtgacatagtccctaacatggtttacaggctggatgatggtaactacatccgtgttccagagg

SEQ ID NO: 6695 - DNA, 80 bp, synthetic construct
  misc_feature 1..80: note = Synthetic: >GCS-211-cand-27970-28049
  source 1..80: mol_type = other DNA
ttgtttcaggaacgagtcagtgacgttgtgtttgaaatccgcgatggagaacacatcactgggcctgaaccagaacactg

SEQ ID NO: 6696 - DNA, 80 bp, synthetic construct
  misc_feature 1..80: note = Synthetic: >GCS-227-cand-27970-28049
  source 1..80: mol_type = other DNA
gtttcaggaacgagtcagtgacgttgtgtttgaaatccacgatggagaacacatcactgggcctgaaccagaacactgca

SEQ ID NO: 6697 - DNA, 80 bp, synthetic construct
  misc_feature 1..80: note = Synthetic: >SBB-024-cand-1670-1749
  source 1..80: mol_type = other DNA
tttaaggattgtgtcataggcatctttgaccttactgttaaaacagttcagattgcaggtgtcaagtttaagagtgttgg

SEQ ID NO: 6698 - DNA, 80 bp, synthetic construct
  misc_feature 1..80: note = Synthetic: >SBB-130-cand-1670-1749
  source 1..80: mol_type = other DNA
tttaaggactgtgttataggcatctttgatcttaccgtcaaaacagttcagattgcaggtgtcaagtttaagagtgttgg

SEQ ID NO: 6699 - DNA, 80 bp, synthetic construct
  misc_feature 1..80: note = Synthetic: >GCS-227-cand-7130-7209
  source 1..80: mol_type = other DNA
ccaatgcagactattgtcaatggttctagtaaatcgttttatgtgaatgccaatggtggtaagaagttttgcagtaagca

SEQ ID NO: 6700 - DNA, 80 bp, synthetic construct
  misc_feature 1..80: note = Synthetic: >GCS-211-cand-7130-7209
  source 1..80: mol_type = other DNA
ttccaatgcagactattgtcaatggttctagtaaatcgttttatgtgaatgccaatggtggtaagaagttttgcagtaag

SEQ ID NO: 6701 - DNA, 80 bp, synthetic construct
  misc_feature 1..80: note = Synthetic: >SBB-010-cand-21680-21759
  source 1..80: mol_type = other DNA
tgtggagaaaaccacctttcagggtgttttgaagcacagtaattacacactttcacaattctacaatgttttgtatgtgg

SEQ ID NO: 6702 - DNA, 80 bp, synthetic construct
  misc_feature 1..80: note = Synthetic: >SBB-122-cand-13280-13359
  source 1..80: mol_type = other DNA
gtcatgatgaaatgtgtgttgttcactgtgctaactttaacacacttttttctaccactatacctgccactgcctttggg

SEQ ID NO: 6703 - DNA, 80 bp, synthetic construct
  misc_feature 1..80: note = Synthetic: >SBB-130-cand-13270-13349
  source 1..80: mol_type = other DNA
gtagactgtcatgatgaaatgtgtgttgttcactgtgctaattttaacacacttttttctaccactatacctgctactgc

SEQ ID NO: 6704 - DNA, 80 bp, synthetic construct
  misc_feature 1..80: note = Synthetic: >SBB-726-cand-240-319
  source 1..80: mol_type = other DNA
cccaccaaagcttagatgtatggtgatcaccacgttaaagtggtgtgatccaattacaacacccggcgtcactggctggg

SEQ ID NO: 6705 - DNA, 80 bp, synthetic construct
  misc_feature 1..80: note = Synthetic: >SBB-024-cand-7850-7929
  source 1..80: mol_type = other DNA
tatgacaattttgagacttggttccatgctaagtttggttttgtgccacgtaatagtagacgctgtcctatagtcgtagg

SEQ ID NO: 6706 - DNA, 80 bp, synthetic construct
  misc_feature 1..80: note = Synthetic: >SBB-130-cand-13030-13109
  source 1..80: mol_type = other DNA
ggagattttgctaaatccttacctaacatgggagtcccgctttgcacatcttattattcatacatgatgcctgctatggg

SEQ ID NO: 6707 - DNA, 80 bp, synthetic construct
  misc_feature 1..80: note = Synthetic: >SBB-122-cand-13040-13119
  source 1..80: mol_type = other DNA
ttgctaaatccttacctaatatgggagtcccgctttgtacatcttattattcatacatgatgcctgctatgggtatgacc

SEQ ID NO: 6708 - DNA, 80 bp, synthetic construct
  misc_feature 1..80: note = Synthetic: >GCS-227-cand-3130-3209
  source 1..80: mol_type = other DNA
tgacactatagcggaagccatcgaagtgcctgattactacatttacgatgaacaaggtggtgcagatatttgtttgccgg

SEQ ID NO: 6709 - DNA, 80 bp, synthetic construct
  misc_feature 1..80: note = Synthetic: >GCS-211-cand-3130-3209
  source 1..80: mol_type = other DNA
cttgacactatagcggaagccgtcgaagtgcctgattactacatttacgatgaacaaggtggtgcagatatttgtttgcc

SEQ ID NO: 6710 - DNA, 80 bp, synthetic construct
  misc_feature 1..80: note = Synthetic: >229E-cand-3830-3909
  source 1..80: mol_type = other DNA
atttgtgcaacaaaacccagaacctgttaatccttgtgcttttgtcgttaaaccagtttgtgcatcagttttccgtggtg

SEQ ID NO: 6711 - DNA, 80 bp, synthetic construct
  misc_feature 1..80: note = Synthetic: >229E-cand-3910-3989
  source 1..80: mol_type = other DNA
ctgtgtctagtggccattaccaaataaacatctacccacaaaagttatgtgtggatggttttggtgttaacaagatccag

SEQ ID NO: 6712 - DNA, 80 bp, synthetic construct
  misc_feature 1..80: note = Synthetic: >229E-cand-3990-4069
  source 1..80: mol_type = other DNA
ccatggccaaatgatgcacttaacactatttgtattagagatgcaaattatagcgcaaaagttgaaaaacctgtaacacc

SEQ ID NO: 6713 - DNA, 80 bp, synthetic construct
  misc_feature 1..80: note = Synthetic: >229E-cand-4070-4149
  source 1..80: mol_type = other DNA
aggtaaaccaccagctgaactagcacctatagatgagactgttgtcaaggttaagttgaactctttccttacttgcaaca

SEQ ID NO: 6714 - DNA, 80 bp, synthetic construct
  misc_feature 1..80: note = Synthetic: >229E-cand-4150-4229
  source 1..80: mol_type = other DNA
atgtttctttttatcaaggtgacattgatgctgttgttaatggtgttgactttgacttcatcgtgaatgctgccaatgaa

SEQ ID NO: 6715 - DNA, 80 bp, synthetic construct
  misc_feature 1..80: note = Synthetic: >229E-cand-4230-4309
  source 1..80: mol_type = other DNA
aaccttgctcatggtggaggacttgctaaagctttagatgtgtacactaaaggtaaacttcaacgtttatctaaagaaca

SEQ ID NO: 6716 - DNA, 80 bp, synthetic construct
  misc_feature 1..80: note = Synthetic: >229E-cand-4310-4389
  source 1..80: mol_type = other DNA
cattggattagcaggtaaagtaaaggttggcgcaggtgttatggttgagtgtgatggcctgagaatttttaatgttgttg

SEQ ID NO: 6717 - DNA, 80 bp, synthetic construct
  misc_feature 1..80: note = Synthetic: >229E-cand-4390-4469
  source 1..80: mol_type = other DNA
gtccacgcaagggtaaacatgaacgtgatttactcataaaagcttacaacactattaacaatgaacaaggcataccttta

SEQ ID NO: 6718 - DNA, 80 bp, synthetic construct
  misc_feature 1..80: note = Synthetic: >229E-cand-4470-4549
  source 1..80: mol_type = other DNA
acaccaatcctgagctgtggtatttttggtgtcaaacttgaaacttcattagaagttttgcttgctgtttgtaatacaaa

SEQ ID NO: 6719 - DNA, 80 bp, synthetic construct
  misc_feature 1..80: note = Synthetic: >229E-cand-4550-4629
  source 1..80: mol_type = other DNA
ggaagtcaaagtttttgtttacacagacacagaggtttgtaaggttaaggattttgtgtctggtttagtgaaagttcaaa

SEQ ID NO: 6720 - DNA, 80 bp, synthetic construct
  misc_feature 1..80: note = Synthetic: >229E-cand-4630-4709
  source 1..80: mol_type = other DNA
aagttgagcaacctaaaatagaaccaaaatcagtgtccgtaactaaagtcgcacccaagccttataaggtagatggtaaa

SEQ ID NO: 6721 - DNA, 80 bp, synthetic construct
  misc_feature 1..80: note = Synthetic: >229E-cand-4710-4789
  source 1..80: mol_type = other DNA
tttagttactttacagacgacttgttgtgtgtcgctgttggcaaacctattgttctgtttactgattctatgcttacttt

SEQ ID NO: 6722 - DNA, 80 bp, synthetic construct
  misc_feature 1..80: note = Synthetic: >229E-cand-4790-4869
  source 1..80: mol_type = other DNA
ggatgaccgtggtttagctttagacaatgcacttaatggtgtgcttagtgctgctattaaggattgtatagacacaaata

SEQ ID NO: 6723 - DNA, 80 bp, synthetic construct
  misc_feature 1..80: note = Synthetic: >229E-cand-4870-4949
  source 1..80: mol_type = other DNA
aagctataccttctggtaatcttattaagtttgacatagagtctgttgttgtctatatgtgcgttgtgccatcggaccag

SEQ ID NO: 6724 - DNA, 80 bp, synthetic construct
  misc_feature 1..80: note = Synthetic: >229E-cand-4950-5029
  source 1..80: mol_type = other DNA
gacaaacacttggataagaatgttcaacggtgtacacgtaagctgaatagacttatgtgtgatatagtttgtactatacc

SEQ ID NO: 6725 - DNA, 80 bp, synthetic construct
  misc_feature 1..80: note = Synthetic: >229E-cand-5030-5109
  source 1..80: mol_type = other DNA
agctgagcatgtcttgccattattgttgtctagtttgacttgtaatgtttcttttgtaggtgaacttaaagctgttgaat

SEQ ID NO: 6726 - DNA, 80 bp, synthetic construct
  misc_feature 1..80: note = Synthetic: >AlphaCoV1-cand-24980-25059
  source 1..80: mol_type = other DNA
gtgatgtgatgtttgtgaacgctactgtaactgatttgcctagtattatacctgattatattgatattaatcagactgtt

SEQ ID NO: 6727 - DNA, 80 bp, synthetic construct
  misc_feature 1..80: note = Synthetic: >AlphaCoV1-cand-25060-25139
  source 1..80: mol_type = other DNA
caagacatgctagaaaattataaaccaaattggactgtacctgaattgactttacaacttgacatttttaatcaaaccta

SEQ ID NO: 6728 - DNA, 80 bp, synthetic construct
  misc_feature 1..80: note = Synthetic: >AlphaCoV1-cand-25140-25219
  source 1..80: mol_type = other DNA
tttaaacctgactgctgaaattgatgacttagaatttaggtcagaaaagctacataacactactgtagaacttgacattc

SEQ ID NO: 6729 - DNA, 80 bp, synthetic construct
  misc_feature 1..80: note = Synthetic: >AlphaCoV1-cand-25220-25299
  source 1..80: mol_type = other DNA
tcattgacaacattaataatacactagttaatcttgaatggctcaatagaattgaaacttatgtaaaatggccttggtat

SEQ ID NO: 6730 - DNA, 80 bp, synthetic construct
  misc_feature 1..80: note = Synthetic: >AlphaCoV1-cand-25300-25379
  source 1..80: mol_type = other DNA
gtgtggctactaataggtttagtagtagtattttgcataccattattgctattttgctgttttagtacaggttgctgtgg

SEQ ID NO: 6731 - DNA, 80 bp, synthetic construct
  misc_feature 1..80: note = Synthetic: >AlphaCoV1-cand-25380-25459
  source 1..80: mol_type = other DNA
atgcttaggttgtttaaccagctgcgcaggaagttgttgtcattctatttgtagtagaagaccttcaatttgaaaattat

SEQ ID NO: 6732 - DNA, 80 bp, synthetic construct
  misc_feature 1..80: note = Synthetic: >AlphaCoV1-cand-25460-25539
  source 1..80: mol_type = other DNA
gaacctattgaaaaagtgcacgtccattaaattaaaaatgttaattttatcatctgctataatagcatttgtttctgcta

SEQ ID NO: 6733 - DNA, 80 bp, synthetic construct
  misc_feature 1..80: note = Synthetic: >AlphaCoV1-cand-25540-25619
  source 1..80: mol_type = other DNA
gagaattctgttaaggatgatgaataaagtctttaagaactaaacttacgagtcattacaggtcctgtatggacattgtc

SEQ ID NO: 6734 - DNA, 80 bp, synthetic construct
  misc_feature 1..80: note = Synthetic: >AlphaCoV1-cand-25620-25699
  source 1..80: mol_type = other DNA
aaatctattgacatatctgtagacgctgtacttgacgaatttgattgtacatactttgctgtaactcttaaagtagaatt

SEQ ID NO: 6735 - DNA, 80 bp, synthetic construct
  misc_feature 1..80: note = Synthetic: >AlphaCoV1-cand-25700-25779
  source 1..80: mol_type = other DNA
taagactggtaaattacttgtgtgtataggttttggtgatacacttcttgaggctaaggaaaaagcttatgctaaacttg

SEQ ID NO: 6736 - DNA, 80 bp, synthetic construct
  misc_feature 1..80: note = Synthetic: >AlphaCoV1-cand-25780-25859
  source 1..80: mol_type = other DNA
gtctctcggatattgaagaagcgactaatcatacgactgtttaatatcacagtttacgatttttgtgctaaaaattggta

SEQ ID NO: 6737 - DNA, 80 bp, synthetic construct
  misc_feature 1..80: note = Synthetic: >AlphaCoV1-cand-25860-25939
  source 1..80: mol_type = other DNA
taagttaccttttgcagtcagactacgtatcattaaaaacacaaaacctaaagcatcaagtgctacaaaacaaagaaaga

SEQ ID NO: 6738 - DNA, 80 bp, synthetic construct
  misc_feature 1..80: note = Synthetic: >AlphaCoV1-cand-25940-26019
  source 1..80: mol_type = other DNA
gagttgttccagattatagaaaaattgccattctaaactcaacgcgaaaatgattggtggactttttcttaacactctaa

SEQ ID NO: 6739 - DNA, 80 bp, synthetic construct
  misc_feature 1..80: note = Synthetic: >AlphaCoV1-cand-26020-26099
  source 1..80: mol_type = other DNA
gttttataattattagtaaacatgttattgttaataacacagcaaatgtgcattatacacaacaagaacgtgttatagta

SEQ ID NO: 6740 - DNA, 80 bp, synthetic construct
  misc_feature 1..80: note = Synthetic: >AlphaCoV1-cand-26100-26179
  source 1..80: mol_type = other DNA
caacaacatcatgttgttagtgctagaacacaaaattattatccagagttcagcatcgctgtactctttgttttatttct

SEQ ID NO: 6741 - DNA, 80 bp, synthetic construct
  misc_feature 1..80: note = Synthetic: >AlphaCoV1-cand-26180-26259
  source 1..80: mol_type = other DNA
agctttgtaccgtagtacaaactttaagacgtgtgtcggtatcttaatgtttaagattgtatcaatgacacttataggac

SEQ ID NO: 6742 - DNA, 80 bp, synthetic construct
  misc_feature 1..80: note = Synthetic: >AlphaSp-cand-20330-20409
  source 1..80: mol_type = other DNA
gaccttgttttgtaccagtgtcaatacttcgtcctctgaagcctttttggttggtgtgcattatcttggtgatttttcca

SEQ ID NO: 6743 - DNA, 80 bp, synthetic construct
  misc_feature 1..80: note = Synthetic: >AlphaSp-cand-20410-20489
  source 1..80: mol_type = other DNA
ccaatgccatcattgatggtaatattatgcatgccaattatatattttggcgtaattccactattatgactatgtcttat

SEQ ID NO: 6744 - DNA, 80 bp, synthetic construct
  misc_feature 1..80: note = Synthetic: >AlphaSp-cand-20490-20569
  source 1..80: mol_type = other DNA
aatagtgttttagatttaagtaaattttcatgtaagcataaagctactgtggtggttaatttgaaagacagttcagtctc

SEQ ID NO: 6745 - DNA, 80 bp, synthetic construct
  misc_feature 1..80: note = Synthetic: >AlphaSp-cand-20570-20649
  source 1..80: mol_type = other DNA
tgatttggtgctgggtcttttgaaaaatggtaagttgttgattagaaataatggtgttgtttgtgggttttctaaccact

SEQ ID NO: 6746 - DNA, 80 bp, synthetic construct
  misc_feature 1..80: note = Synthetic: >AlphaSp-cand-20650-20729
  source 1..80: mol_type = other DNA
tggtaaattcaaccaaatgaaatatacaattcttcttttattttttgtagtgtttgccacacaagtgtcttgtggcctag

SEQ ID NO: 6747 - DNA, 80 bp, synthetic construct
  misc_feature 1..80: note = Synthetic: >AlphaSp-cand-20730-20809
  source 1..80: mol_type = other DNA
ctgctaatgagcgacttaacattcctgtggtacaactgttaaccttaccaggttgttttccaagtttgatatacaaccac

SEQ ID NO: 6748 - DNA, 80 bp, synthetic construct
  misc_feature 1..80: note = Synthetic: >AlphaSp-cand-20810-20889
  source 1..80: mol_type = other DNA
catctcaagttgtgctagctggtcttttaccaaatcagacagcacaatggaagtgcaccacacaacctgaccaaagagat

SEQ ID NO: 6749 - DNA, 80 bp, synthetic construct
  misc_feature 1..80: note = Synthetic: >AlphaSp-cand-20890-20969
  source 1..80: mol_type = other DNA
cagggtgttggaccaaatccacctgttaaaggtgttttccttagtttctttggtggccagacttcaacacatctggcaac

SEQ ID NO: 6750 - DNA, 80 bp, synthetic construct
  misc_feature 1..80: note = Synthetic: >AlphaSp-cand-20970-21049
  source 1..80: mol_type = other DNA
tagctttgatgtgagttctggtcgtggttttacaataggagtcagctcacaagacaattttggccaccctagcacttacc

SEQ ID NO: 6751 - DNA, 80 bp, synthetic construct
  misc_feature 1..80: note = Synthetic: >AlphaSp-cand-21050-21129
  source 1..80: mol_type = other DNA
acggtgttgctttatttacatagacctgcaaatggaccaatcctaatgccattgcgtatttacgcatctgcaagtggccc

SEQ ID NO: 6752 - DNA, 80 bp, synthetic construct
  misc_feature 1..80: note = Synthetic: >AlphaSp-cand-21130-21209
  source 1..80: mol_type = other DNA
tcccaaaaatggttgtcacagagtacatttaacatggaaaccagtggcagggaatgcttggtcaacaagcagatacctgc

SEQ ID NO: 6753 - DNA, 80 bp, synthetic construct
  misc_feature 1..80: note = Synthetic: >AlphaSp-cand-21210-21289
  source 1..80: mol_type = other DNA
tgcgtttcctgactatgctaatatggttgttggtataacatgggaccaagatcgtgtcactttttatactgaagttagag

SEQ ID NO: 6754 - DNA, 80 bp, synthetic construct
  misc_feature 1..80: note = Synthetic: >AlphaSp-cand-21290-21369
  source 1..80: mol_type = other DNA
tttaccaattttatgtccctaacaaccgctggtcacgtgtagttaagtcgtggtgtgaaaatgctagtagttgtgctatg

SEQ ID NO: 6755 - DNA, 80 bp, synthetic construct
  misc_feature 1..80: note = Synthetic: >AlphaSp-cand-21370-21449
  source 1..80: mol_type = other DNA
caatatattaatagtactatttattataatctcaacgtcactgcacctggacctggtggtattaactattcagtttgtac

SEQ ID NO: 6756 - DNA, 80 bp, synthetic construct
  misc_feature 1..80: note = Synthetic: >AlphaSp-cand-21450-21529
  source 1..80: mol_type = other DNA
gaaacattgtactggtttggcagacaatgtgttttctgtagaccatggtggccacataccagacacttttccatacaata

SEQ ID NO: 6757 - DNA, 80 bp, synthetic construct
  misc_feature 1..80: note = Synthetic: >AlphaSp-cand-21530-21609
  source 1..80: mol_type = other DNA
attggtttttgttaactaacacttccaccctggttcaaggcgttactcgagtgtttcaaccatttatggtcacttgtttg

SEQ ID NO: 6758 - DNA, 80 bp, synthetic construct
  misc_feature 1..80: note = Synthetic: >Anlong-cand-18830-18909
  source 1..80: mol_type = other DNA
gttcgaacgtttcactatggctaaagatgctgtgttgtattctaccacttgcattaagaagttgacttgtataaaagtta

SEQ ID NO: 6759 - DNA, 80 bp, synthetic construct
  misc_feature 1..80: note = Synthetic: >Anlong-cand-18910-18989
  source 1..80: mol_type = other DNA
acttcggttgtttaaatggtaatgcagtttgcagcacaaaagaagtggttggtggtgagactaaagaaaagaacataaca

SEQ ID NO: 6760 - DNA, 80 bp, synthetic construct
  misc_feature 1..80: note = Synthetic: >Anlong-cand-18990-19069
  source 1..80: mol_type = other DNA
tggtatatttacacacgcaagaatggtgcttttgtggaccactatgatggttactacacacaggggcgtaactcaactga

SEQ ID NO: 6761 - DNA, 80 bp, synthetic construct
  misc_feature 1..80: note = Synthetic: >Anlong-cand-19070-19149
  source 1..80: mol_type = other DNA
ttttatcccacgtagtcaaatggaaaaagactttctggctttggacactggtgtgttcattgccaagtatggtcttgaag

SEQ ID NO: 6762 - DNA, 80 bp, synthetic construct
  misc_feature 1..80: note = Synthetic: >Anlong-cand-19150-19229
  source 1..80: mol_type = other DNA
actacaattttgagcatgttgtttatggtgacgtttccaaaacaacacttggaggtttacacttgctaatatctcaggta

SEQ ID NO: 6763 - DNA, 80 bp, synthetic construct
  misc_feature 1..80: note = Synthetic: >Anlong-cand-19230-19309
  source 1..80: mol_type = other DNA
cgtctgtcacagataggcatacttaaggtggatgagttcaatagtgctgacgatagtacacttaaatgttgtacagtcac

SEQ ID NO: 6764 - DNA, 80 bp, synthetic construct
  misc_feature 1..80: note = Synthetic: >Anlong-cand-19310-19389
  source 1..80: mol_type = other DNA
gtacttaaatgatcctagtagcaagattgtgtgtacctacatggacttgttgttggatgactttgtcaccattcttaaga

SEQ ID NO: 6765 - DNA, 80 bp, synthetic construct
  misc_feature 1..80: note = Synthetic: >Anlong-cand-19390-19469
  source 1..80: mol_type = other DNA
acttggacctatctgttgtttcaaaggttcatgaagttatggttgactgcaaggcatggcgttggatgttgtggtgcaaa

SEQ ID NO: 6766 - DNA, 80 bp, synthetic construct
  misc_feature 1..80: note = Synthetic: >Anlong-cand-19470-19549
  source 1..80: mol_type = other DNA
gatgctcacattgaaacgttttatcctcaattgcagtcagctgaatggaagtgtggatattcaatgccctcactttataa

SEQ ID NO: 6767 - DNA, 80 bp, synthetic construct
  misc_feature 1..80: note = Synthetic: >Anlong-cand-19550-19629
  source 1..80: mol_type = other DNA
aatacagcgcatgtgtttggacgcttgtaatctttacaattatggtgctggattgaagttgcctgatggcatcatgttca

SEQ ID NO: 6768 - DNA, 80 bp, synthetic construct
  misc_feature 1..80: note = Synthetic: >Anlong-cand-19630-19709
  source 1..80: mol_type = other DNA
atacactcaagtacacacaactgtgtcagtaccttaatagcactactatgtgtgtgccacacaatatgcgtgtgttacac

SEQ ID NO: 6769 - DNA, 80 bp, synthetic construct
  misc_feature 1..80: note = Synthetic: >Anlong-cand-19710-19789
  source 1..80: mol_type = other DNA
cttggtgcaggttctgacaagggtgttgcacctggtacttgtgtccttaagcgctggttgccattagatgccattgtcgt

SEQ ID NO: 6770 - DNA, 80 bp, synthetic construct
  misc_feature 1..80: note = Synthetic: >Anlong-cand-19790-19869
  source 1..80: mol_type = other DNA
tgataacgacataaatgattatgttagcgacgcagatttcagttatacaggtgattgtaacacattgttccttgaggaca

SEQ ID NO: 6771 - DNA, 80 bp, synthetic construct
  misc_feature 1..80: note = Synthetic: >Anlong-cand-19870-19949
  source 1..80: mol_type = other DNA
agtttgatcttgttatatctgatatgtatgacggtcgcactaagtcatgtgatggtgagaatgtctcaaaagaaggcttt

SEQ ID NO: 6772 - DNA, 80 bp, synthetic construct
  misc_feature 1..80: note = Synthetic: >Anlong-cand-19950-20029
  source 1..80: mol_type = other DNA
ttcccttacatcaatggtgtcattactggcaagttatctcttggtggttctgttgccatcaaaataacagagtatagttg

SEQ ID NO: 6773 - DNA, 80 bp, synthetic construct
  misc_feature 1..80: note = Synthetic: >Anlong-cand-20030-20109
  source 1..80: mol_type = other DNA
gaacaagcgcctttatgagcttattcagaagtttgaattttggacgttgttttgtacgagcgttaacacgtcgtcttctg

SEQ ID NO: 6774 - DNA, 80 bp, synthetic construct
  misc_feature 1..80: note = Synthetic: >AvianCoV-cand-24050-24129
  source 1..80: mol_type = other DNA
ttcaatacttaaaacttatattaagtggccttggtatgtttggctagccataggctttgccacttattatttttatcctt

SEQ ID NO: 6775 - DNA, 80 bp, synthetic construct
  misc_feature 1..80: note = Synthetic: >AvianCoV-cand-24130-24209
  source 1..80: mol_type = other DNA
attttaggatgggtgtttttcatgactggttgttgtggttgttgttgtggatgctttggtatcattcctctaatgagtaa

SEQ ID NO: 6776 - DNA, 80 bp, synthetic construct
  misc_feature 1..80: note = Synthetic: >AvianCoV-cand-24210-24289
  source 1..80: mol_type = other DNA
gtgtggtaagaaatcttcttattacacgacttttgataatgatgtggtaactgaacaatacagacctaaaaagtctgttt

SEQ ID NO: 6777 - DNA, 80 bp, synthetic construct
  misc_feature 1..80: note = Synthetic: >AvianCoV-cand-24290-24369
  source 1..80: mol_type = other DNA
aatgattcaaactcccacgtcttttgtaatagtattaatttttctttggtttaaacttgcattaagttgttttagagagt

SEQ ID NO: 6778 - DNA, 80 bp, synthetic construct
  misc_feature 1..80: note = Synthetic: >AvianCoV-cand-24370-24449
  source 1..80: mol_type = other DNA
gtattgtagcacttcaacaactaatacaagttttactccaaattattaatagtaatttacaatctagactgctcctttgg

SEQ ID NO: 6779 - DNA, 80 bp, synthetic construct
  misc_feature 1..80: note = Synthetic: >AvianCoV-cand-24450-24529
  source 1..80: mol_type = other DNA
cacagtctagactaatgttagattttgagaaaataattgaaactggtgaacaagtaattcaacaaatcagtttcaattta

SEQ ID NO: 6780 - DNA, 80 bp, synthetic construct
  misc_feature 1..80: note = Synthetic: >AvianCoV-cand-24530-24609
  source 1..80: mol_type = other DNA
cagcatatttcaagtgttctaaacacagaaatatttgacccctttgagtgttgttattacagaggaggtaatttttggga

SEQ ID NO: 6781 - DNA, 80 bp, synthetic construct
  misc_feature 1..80: note = Synthetic: >AvianCoV-cand-24610-24689
  source 1..80: mol_type = other DNA
aatagagtcagctgacgattgttcaggtgatgatgaatttattgaataaatcgctagaggagaacggcagttttctaaca

SEQ ID NO: 6782 - DNA, 80 bp, synthetic construct
  misc_feature 1..80: note = Synthetic: >AvianCoV-cand-24690-24769
  source 1..80: mol_type = other DNA
gccctttatatatttgtagcatttgtagcactttatctattaggtagagcactacaagcttttgtacaagcagctgatgc

SEQ ID NO: 6783 - DNA, 80 bp, synthetic construct
  misc_feature 1..80: note = Synthetic: >AvianCoV-cand-24770-24849
  source 1..80: mol_type = other DNA
ttgttgtttattttggtatacatgggtagtagttccgggagctaagggtacagcctttgtgtataaacatacatatggta

SEQ ID NO: 6784 - DNA, 80 bp, synthetic construct
  misc_feature 1..80: note = Synthetic: >AvianCoV-cand-24850-24929
  source 1..80: mol_type = other DNA
gaaaacttaacaatccggagttagaacacgttattgttaacgagttcccgaagaacggttggaaaataataaaagtccag

SEQ ID NO: 6785 - DNA, 80 bp, synthetic construct
  misc_feature 1..80: note = Synthetic: >AvianCoV-cand-24930-25009
  source 1..80: mol_type = other DNA
caaaattttcaagatgtccaacgagacgacaaattgcacccttgattctgagcaggcaattctgcttttcaaggaatata

SEQ ID NO: 6786 - DNA, 80 bp, synthetic construct
  misc_feature 1..80: note = Synthetic: >AvianCoV-cand-25010-25089
  source 1..80: mol_type = other DNA
atctatttataaccgcattcctattgtttataaccatactacttcagtatggatacgcaactaggagtcggtttatttac

SEQ ID NO: 6787 - DNA, 80 bp, synthetic construct
  misc_feature 1..80: note = Synthetic: >AvianCoV-cand-25090-25169
  source 1..80: mol_type = other DNA
atactgaaaatgatagtgttatggtgcttttggccccttaacattgcagtaggtgtaatttcatgtatatacccaccaaa

SEQ ID NO: 6788 - DNA, 80 bp, synthetic construct
  misc_feature 1..80: note = Synthetic: >AvianCoV-cand-25170-25249
  source 1..80: mol_type = other DNA
cacaggaggtcttgtcgcagcgataatacttactgtgtttgcgtgtctttcttttgtaggttattggattcagagtatta

SEQ ID NO: 6789 - DNA, 80 bp, synthetic construct
  misc_feature 1..80: note = Synthetic: >AvianCoV-cand-25250-25329
  source 1..80: mol_type = other DNA
gactctttaagcggtgtaggtcttggtggtcttttaaccccgagtctaatgccgtaggttcaatactcctaacaaatggt

SEQ ID NO: 6790 - DNA, 80 bp, synthetic construct
  misc_feature 1..80: note = Synthetic: >BetaSp-cand-29740-29819
  source 1..80: mol_type = other DNA
tttgtgaatagtattaggttgtttatcagaacgggaagttggtggagtttcaaccccgaaacaaacaacctgatgtgtat

SEQ ID NO: 6791 - DNA, 80 bp, synthetic construct
  misc_feature 1..80: note = Synthetic: >BetaSp-cand-29820-29899
  source 1..80: mol_type = other DNA
agatatgaaagggagaatgtttgttaggcctataattgaggactaccatacccttacggtcacaataatacgtggccacc

SEQ ID NO: 6792 - DNA, 80 bp, synthetic construct
  misc_feature 1..80: note = Synthetic: >BetaSp-cand-29900-29979
  source 1..80: mol_type = other DNA
tttacattcagggtataaagcttggtaccggctatactttgtccgatcttcccgcttatgtgactgtagcaaaagttaca

SEQ ID NO: 6793 - DNA, 80 bp, synthetic construct
  misc_feature 1..80: note = Synthetic: >BetaSp-cand-29980-30059
  source 1..80: mol_type = other DNA
catatttgcacatataagagggcatttttggataagataggcgatatcagtggttttgcagtttatgtgaagtccaaagt

SEQ ID NO: 6794 - DNA, 80 bp, synthetic construct
  misc_feature 1..80: note = Synthetic: >BetaSp-cand-30140-30219
  source 1..80: mol_type = other DNA
ggatgtctcatactccaggtcaacaaaaagctggtagcagatcatcctctgggaaccgctctaatggcggcattcttaag

SEQ ID NO: 6795 - DNA, 80 bp, synthetic construct
  misc_feature 1..80: note = Synthetic: >BetaSp-cand-30220-30299
  source 1..80: mol_type = other DNA
aaaacatcttgggccgaccagacggagcgacctaataatgttaatagcagaggtagaagagcccaacctaagcaaacagc

SEQ ID NO: 6796 - DNA, 80 bp, synthetic construct
  misc_feature 1..80: note = Synthetic: >BetaSp-cand-30300-30379
  source 1..80: mol_type = other DNA
taacacccaggcttcaggaggaaatgttgtaccattttactcctggttctctggaattacccagtttcaaaaagggcaag

SEQ ID NO: 6797 - DNA, 80 bp, synthetic construct
  misc_feature 1..80: note = Synthetic: >BetaSp-cand-30460-30539
  source 1..80: mol_type = other DNA
cacaacagaaagtcctatagaacagctgatggacagcaacggcagctgctacccagatggtatttttactatctcggaac

SEQ ID NO: 6798 - DNA, 80 bp, synthetic construct
  misc_feature 1..80: note = Synthetic: >BetaSp-cand-30540-30619
  source 1..80: mol_type = other DNA
agggccgtatgcgaacaaacaatacgggtcggatatcgacggtgttgtttgggttgctagtccaaatgttgatgtacgtt

SEQ ID NO: 6799 - DNA, 80 bp, synthetic construct
  misc_feature 1..80: note = Synthetic: >BetaSp-cand-30620-30699
  source 1..80: mol_type = other DNA
cccctgcggatgttccagatagggatcctactagccactcagctgagccgactaggtttgcgcctggcacggttctgcct

SEQ ID NO: 6800 - DNA, 80 bp, synthetic construct
  misc_feature 1..80: note = Synthetic: >BetaSp-cand-30700-30779
  source 1..80: mol_type = other DNA
aaaggctattatgttgaaggctcaggaaggtctgctcctagtagtcaaccagcctcgcgatctagctctcgtgcgtccag

SEQ ID NO: 6801 - DNA, 80 bp, synthetic construct
  misc_feature 1..80: note = Synthetic: >BtCoV_008_16-cand-4280-4359
  source 1..80: mol_type = other DNA
tgcattgcgggaacaacaagatcttcaatgttgttggacctcgtaaaggaaagcatgcacctgagctacttgttaaggct

SEQ ID NO: 6802 - DNA, 80 bp, synthetic construct
  misc_feature 1..80: note = Synthetic: >BtCoV_008_16-cand-4360-4439
  source 1..80: mol_type = other DNA
tacaatagtgtcttctctcaacagggcgtgccactgttgcctctgcttagtgttggaatttttagagttcctattagaga

SEQ ID NO: 6803 - DNA, 80 bp, synthetic construct
  misc_feature 1..80: note = Synthetic: >BtCoV_008_16-cand-4440-4519
  source 1..80: mol_type = other DNA
ttctatttctgccctgtttgcttgcgttggacagcgtgtttgccgttgtttttgttatggtgatgaagagcgtgaggcca

SEQ ID NO: 6804 - DNA, 80 bp, synthetic construct
  misc_feature 1..80: note = Synthetic: >BtCoV_008_16-cand-4520-4599
  source 1..80: mol_type = other DNA
tcattgactatgtctccagtttaacgcaattggagccacagccagttccacctgtagttcaaacacttaaaatttcggaa

SEQ ID NO: 6805 - DNA, 80 bp, synthetic construct
  misc_feature 1..80: note = Synthetic: >BtCoV_008_16-cand-4600-4679
  source 1..80: mol_type = other DNA
gctacaccatttagagttgagggtgatgtgaatttctatgatgttcaacctaagtcactgttgtgtctaaaggcggacag

SEQ ID NO: 6806 - DNA, 80 bp, synthetic construct
  misc_feature 1..80: note = Synthetic: >BtCoV_008_16-cand-4680-4759
  source 1..80: mol_type = other DNA
gatagttgctttcacaacccctgatttgaagttttgtgctgctcttgaggcttttgatgtttgccttaatggtggtttga

SEQ ID NO: 6807 - DNA, 80 bp, synthetic construct
  misc_feature 1..80: note = Synthetic: >BtCoV_008_16-cand-4760-4839
  source 1..80: mol_type = other DNA
aggctgtggtatcagattacctaaagggtaatactattgtgccagctggtaattgtgtcacttttaagtgtgacagctcc

SEQ ID NO: 6808 - DNA, 80 bp, synthetic construct
  misc_feature 1..80: note = Synthetic: >BtCoV_008_16-cand-4840-4919
  source 1..80: mol_type = other DNA
gtcacatttactatggtggtactgcctgtggcttccagtgatggttatagtaagaattaccagagggcattaaataagta

SEQ ID NO: 6809 - DNA, 80 bp, synthetic construct
  misc_feature 1..80: note = Synthetic: >BtCoV_008_16-cand-4920-4999
  source 1..80: mol_type = other DNA
ttttaagttaaaaggcactttgttggtggctgtttcaaatcccgatgttcttaaagacattttgcaccacgcagtccttg

SEQ ID NO: 6810 - DNA, 80 bp, synthetic construct
  misc_feature 1..80: note = Synthetic: >BtCoV_008_16-cand-5000-5079
  source 1..80: mol_type = other DNA
gttatattacaacacctgctgttgttgatgttgtgtatactaaggaacctgttgttttgaatgttactagtgacaaccgt

SEQ ID NO: 6811 - DNA, 80 bp, synthetic construct
  misc_feature 1..80: note = Synthetic: >BtCoV_008_16-cand-5080-5159
  source 1..80: mol_type = other DNA
agcttctatgctaaggttctagattcaagtaaaacattgggtgaccagcttggaccttgtgctattggaggtgagagttc

SEQ ID NO: 6812 - DNA, 80 bp, synthetic construct
  misc_feature 1..80: note = Synthetic: >BtCoV_008_16-cand-5160-5239
  source 1..80: mol_type = other DNA
agttgggactaaacctgttcaagttaacaaggatgttttcattgtgcctgatgtaaactgggaagctcactatggtttta

SEQ ID NO: 6813 - DNA, 80 bp, synthetic construct
  misc_feature 1..80: note = Synthetic: >BtCoV_008_16-cand-5240-5319
  source 1..80: mol_type = other DNA
gagatgctggtatcttccatgcacttgaccatagtgcttttgcatttgataacgatgtagtttctggtaagcgtgttctt

SEQ ID NO: 6814 - DNA, 80 bp, synthetic construct
  misc_feature 1..80: note = Synthetic: >BtCoV_008_16-cand-5320-5399
  source 1..80: mol_type = other DNA
aaaacgacagataataactgttgggttaatgttacgtgcttgcagttacaatttgcaaatgcaaaatttaattccaaagg

SEQ ID NO: 6815 - DNA, 80 bp, synthetic construct
  misc_feature 1..80: note = Synthetic: >BtCoV_008_16-cand-5400-5479
  source 1..80: mol_type = other DNA
tttacaagctctctgggaatcttattgcgttggtgatgttgcaaccttttgccattggttgtattggatcactaatgtta

SEQ ID NO: 6816 - DNA, 80 bp, synthetic construct
  misc_feature 1..80: note = Synthetic: >BtCoV_008_16-cand-5480-5559
  source 1..80: mol_type = other DNA
acaaaggcgagcccagtgattccgaaaatgcacttaatgtgatttctaaatatctgtgtgttcaaggatctgttgagtta

SEQ ID NO: 6817 - DNA, 80 bp, synthetic construct
  misc_feature 1..80: note = Synthetic: >BtCoV_008_16-cand-8120-8199
  source 1..80: mol_type = other DNA
ctaacaagggttcttgtgtttttaatgcagcatgtactaccttaactggtattggtggtactgctgtctattgttataag

SEQ ID NO: 6818 - DNA, 80 bp, synthetic construct
  misc_feature 1..80: note = Synthetic: >BtCoV_008_16-cand-8200-8279
  source 1..80: mol_type = other DNA
gatggccttgtagagggatctagactttatagtgatttgttgccacacagtcattataaattggctgatggtaataatat

SEQ ID NO: 6819 - DNA, 80 bp, synthetic construct
  misc_feature 1..80: note = Synthetic: >BtCoV_008_16-cand-8280-8359
  source 1..80: mol_type = other DNA
aatcttaccagaaataatttctcgtggttttggttttaggactgtgaagacacgagagctcacttattgccgtgtaggtc

SEQ ID NO: 6820 - DNA, 80 bp, synthetic construct
  misc_feature 1..80: note = Synthetic: >BtCoV_008_16-cand-8360-8439
  source 1..80: mol_type = other DNA
agtgtatggactctaaggagggcgtctgtataggacgtgatactttctttgtctatactactggtgctggcagtgagttt

SEQ ID NO: 6821 - DNA, 80 bp, synthetic construct
  misc_feature 1..80: note = Synthetic: >BtCoV_008_16-cand-8440-8519
  source 1..80: mol_type = other DNA
gtttgtggtaatggattgttttcattgctttttaatttgtttagtatcttctctaagtctgtacctgtaatggtgctttc

SEQ ID NO: 6822 - DNA, 80 bp, synthetic construct
  misc_feature 1..80: note = Synthetic: >BtCoV_008_16-cand-8520-8599
  source 1..80: mol_type = other DNA
tggccaaattctttttaattgcattgtggcctttttagctgtttctgcttgtttcatctttacaaagtttaaacgtatgt

SEQ ID NO: 6823 - DNA, 80 bp, synthetic construct
  misc_feature 1..80: note = Synthetic: >BtCoV_008_16-cand-8600-8679
  source 1..80: mol_type = other DNA
ttggtgatatgtcatacggtgtttttactgttggttgttgtacaattatttgcaacctttcttatgtagttacacaaaat

SEQ ID NO: 6824 - DNA, 80 bp, synthetic construct
  misc_feature 1..80: note = Synthetic: >BtCoV_008_16-cand-8680-8759
  source 1..80: mol_type = other DNA
tatttaggaatgttggcatatgctctaatatattttctaagcactagaggtgttaagtactcctggatatggcacacagg

SEQ ID NO: 6825 - DNA, 80 bp, synthetic construct
  misc_feature 1..80: note = Synthetic: >BtCoV_008_16-cand-8760-8839
  source 1..80: mol_type = other DNA
tttctgtgtgtcgtattgtcttatggccccatggtggttattgctgtggtactttgcctctgctgtgttagattttatgc

SEQ ID NO: 6826 - DNA, 80 bp, synthetic construct
  misc_feature 1..80: note = Synthetic: >BtCoV_008_16-cand-8840-8919
  source 1..80: mol_type = other DNA
caaacttacttaagttgaaggtgtcaactcagctctttgatggcgacaagtttgttggttcttttgagagtgctgctagt

SEQ ID NO: 6827 - DNA, 80 bp, synthetic construct
  misc_feature 1..80: note = Synthetic: >BtCoV_008_16-cand-8920-8999
  source 1..80: mol_type = other DNA
ggtacatttgtcctagacatgcattcgtatgaacgtcttgctaattctatatctagtgacaagctcaaacagtatgctag

SEQ ID NO: 6828 - DNA, 80 bp, synthetic construct
  misc_feature 1..80: note = Synthetic: >BtCoV_008_16-cand-9000-9079
  source 1..80: mol_type = other DNA
tacttataataagtacaagtattatactggggctggtaacgaagctgattatagattggcatgtttcgctcatttagcga

SEQ ID NO: 6829 - DNA, 80 bp, synthetic construct
  misc_feature 1..80: note = Synthetic: >BtCoV_008_16-cand-9080-9159
  source 1..80: mol_type = other DNA
aggctatgatggacttctgcaactctcatcaggaccagttatatacacctcctactgttagttataattccactttgcaa

SEQ ID NO: 6830 - DNA, 80 bp, synthetic construct
  misc_feature 1..80: note = Synthetic: >BtCoV_008_16-cand-9160-9239
  source 1..80: mol_type = other DNA
tctggacttcgtaaaatggcccaaccttcaggcattgtagaacgttgtatcgttcgtgttagttatggtaacatggttct

SEQ ID NO: 6831 - DNA, 80 bp, synthetic construct
  misc_feature 1..80: note = Synthetic: >BtCoV_008_16-cand-9240-9319
  source 1..80: mol_type = other DNA
taatggcctttggctgggagacacagttatatgcccacgccatgttatcgctagtaacaccaatactcttatcgattatg

SEQ ID NO: 6832 - DNA, 80 bp, synthetic construct
  misc_feature 1..80: note = Synthetic: >BtCoV_008_16-cand-9320-9399
  source 1..80: mol_type = other DNA
ataaggaattgtctcttgtcaggttgcataacttctctgtgtcctatggtaatatgtttttaggtgtcgttggtgtgact

SEQ ID NO: 6833 - DNA, 80 bp, synthetic construct
  misc_feature 1..80: note = Synthetic: >Delta-cand-29560-29639
  source 1..80: mol_type = other DNA
tgaatcattagcaaactagggctggctactctagcacagaatcacttcttatagcagctgtcatcccgataatcaacagt

SEQ ID NO: 6834 - DNA, 80 bp, synthetic construct
  misc_feature 1..80: note = Synthetic: >Delta-cand-29640-29719
  source 1..80: mol_type = other DNA
gctagaaattacatttctatcttaggttgatttggttgattataccagaaacctatttaatatcaatggcccaaatagtt

SEQ ID NO: 6835 - DNA, 80 bp, synthetic construct
  misc_feature 1..80: note = Synthetic: >Delta-cand-29720-29799
  source 1..80: mol_type = other DNA
agaacacctttggaggcttcagccgaggccacgcggagtacgatcgagggtacccaatgtaattgtgattggcaagagtc

SEQ ID NO: 6836 - DNA, 80 bp, synthetic construct
  misc_feature 1..80: note = Synthetic: >Delta-cand-29800-29879
  source 1..80: mol_type = other DNA
taagcataatctcaacttactttgtgtatgtctaactctatccattataactgtaagcttcatttttcagcgccacgtct

SEQ ID NO: 6837 - DNA, 80 bp, synthetic construct
  misc_feature 1..80: note = Synthetic: >Delta-cand-29880-29959
  source 1..80: mol_type = other DNA
gtgttgccattgttggtcagacttagaacaccggcgcaagctattgcgagccacaattttaatcctaattggagaaggac

SEQ ID NO: 6838 - DNA, 80 bp, synthetic construct
  misc_feature 1..80: note = Synthetic: >Delta-cand-29960-30039
  source 1..80: mol_type = other DNA
caaaggactgtactcaagagtagtgagtgacttttgtaggtgtatctagccgaggctatgcaactaatagtcagcatagc

SEQ ID NO: 6839 - DNA, 80 bp, synthetic construct
  misc_feature 1..80: note = Synthetic: >Delta-cand-30040-30119
  source 1..80: mol_type = other DNA
ctgggcttgcagtcgcccactccatcattattaacagtgggaaagcgccaactagggttacaattgtggtggacaaaagt

SEQ ID NO: 6840 - DNA, 80 bp, synthetic construct
  misc_feature 1..80: note = Synthetic: >Delta-cand-30120-30199
  source 1..80: mol_type = other DNA
tgggacaaattaggggaaattaaatttaatcactgggttttggggcttatagtgggggatggagcaaaaaaaaaaaaaaa

SEQ ID NO: 6841 - DNA, 80 bp, synthetic construct
  misc_feature 1..80: note = Synthetic: >HKU1-cand-20-99
  source 1..80: mol_type = other DNA
atcagcttacgatctcttgtcagatctcattaaatctaaactttttaaacaagattccctgttatccatgcttgtgagtg

SEQ ID NO: 6842 - DNA, 80 bp, synthetic construct
  misc_feature 1..80: note = Synthetic: >HKU1-cand-100-179
  source 1..80: mol_type = other DNA
tggtttaatcataatcttgtattttactttccacacttttcatctctctgccagtgacgtgttggttgtcctcagcgtcc

SEQ ID NO: 6843 - DNA, 80 bp, synthetic construct
  misc_feature 1..80: note = Synthetic: >HKU1-cand-180-259
  source 1..80: mol_type = other DNA
ctcccataggtcgcaatgattaaaaccagcaaatacggtctcggcttcaagtgggcgccagaatttcgttggctgcttcc

SEQ ID NO: 6844 - DNA, 80 bp, synthetic construct
  misc_feature 1..80: note = Synthetic: >HKU1-cand-260-339
  source 1..80: mol_type = other DNA
ggatgcagcggaggagttggctagtcctatgaagtcagatgagggtgggttatgcccctctactggtcaagcgatggaaa

SEQ ID NO: 6845 - DNA, 80 bp, synthetic construct
  misc_feature 1..80: note = Synthetic: >HKU1-cand-340-419
  source 1..80: mol_type = other DNA
gtgttggattcgtttatgataatcatgtgaagatagattgtcgctgcattcttggacaagaatggcatgtgcagtcaaat

SEQ ID NO: 6846 - DNA, 80 bp, synthetic construct
  misc_feature 1..80: note = Synthetic: >HKU1-cand-420-499
  source 1..80: mol_type = other DNA
cttatccgtgatatttttgttcatgaagatctacatgttgtagaagttctaactaaaacagccgtaaagtccggtacggc

SEQ ID NO: 6847 - DNA, 80 bp, synthetic construct
  misc_feature 1..80: note = Synthetic: >HKU1-cand-500-579
  source 1..80: mol_type = other DNA
aattttaattaaatcacctttgcatagcttgggtggttttcctaaagggtatgttatgggcttgttccgttcatacaaga

SEQ ID NO: 6848 - DNA, 80 bp, synthetic construct
  misc_feature 1..80: note = Synthetic: >HKU1-cand-580-659
  source 1..80: mol_type = other DNA
ctaaacgttatgttgtacatcatctttctatgactacatctactactaattttggtgaagattttttgggttggattgta

SEQ ID NO: 6849 - DNA, 80 bp, synthetic construct
  misc_feature 1..80: note = Synthetic: >HKU1-cand-10910-10989
  source 1..80: mol_type = other DNA
cactgattttactggtaatttttatggtccatatagagatgctcaagttgtacagttgccagttaaggactatgtccaga

SEQ ID NO: 6850 - DNA, 80 bp, synthetic construct
  misc_feature 1..80: note = Synthetic: >HKU1-cand-10990-11069
  source 1..80: mol_type = other DNA
ctgttaatgttattgcttggctctatgcagctatacttaataattgtgcttggtttgtacaaaatgatgtttgttctact

SEQ ID NO: 6851 - DNA, 80 bp, synthetic construct
  misc_feature 1..80: note = Synthetic: >HKU1-cand-11070-11149
  source 1..80: mol_type = other DNA
gaagattttaatgtttgggctatggcaaatggttttagccaagtaaaagcagatcttgttttagatgctttggcttcaat

SEQ ID NO: 6852 - DNA, 80 bp, synthetic construct
  misc_feature 1..80: note = Synthetic: >HKU1-cand-11150-11229
  source 1..80: mol_type = other DNA
gacaggtgtttctattgaaactttattggctgctattaagcgtctatatatgggatttcaaggtcgtcaaatactaggaa

SEQ ID NO: 6853 - DNA, 80 bp, synthetic construct
  misc_feature 1..80: note = Synthetic: >HKU1-cand-11230-11309
  source 1..80: mol_type = other DNA
gttgtacttttgaagatgaattggcaccttctgacgtttatcaacaattggctggtgttaaattgcaatctaaaacaaaa

SEQ ID NO: 6854 - DNA, 80 bp, synthetic construct
  misc_feature 1..80: note = Synthetic: >HKU1-cand-11310-11389
  source 1..80: mol_type = other DNA
agatttattaaagaaacaatttattggattttgatatctacatttttgtttagttgtataatttctgcatttgttaaatg

SEQ ID NO: 6855 - DNA, 80 bp, synthetic construct
  misc_feature 1..80: note = Synthetic: >HKU1-cand-11390-11469
  source 1..80: mol_type = other DNA
gactatatttatgtatattaatacacatatgattggtgttacattatgtgtactttgttttgttagttttatgatgttac

SEQ ID NO: 6856 - DNA, 80 bp, synthetic construct
  misc_feature 1..80: note = Synthetic: >HKU1-cand-11470-11549
  source 1..80: mol_type = other DNA
tagttaaacataagcatttttatttgactatgtatataattcctgtactctgtaccttgttttatgtaaattatttagtt

SEQ ID NO: 6857 - DNA, 80 bp, synthetic construct
  misc_feature 1..80: note = Synthetic: >HKU1-cand-11550-11629
  source 1..80: mol_type = other DNA
gtttataaggaaggttttagaggttttacttatgtctggctctcatattttgttcctgctgtgaattttacttatgttta

SEQ ID NO: 6858 - DNA, 80 bp, synthetic construct
  misc_feature 1..80: note = Synthetic: >HKU1-cand-11630-11709
  source 1..80: mol_type = other DNA
tgaagtattttatggttgtattttatgtgtttttgctatttttataactatgcatagtattaatcatgacattttttctt

SEQ ID NO: 6859 - DNA, 80 bp, synthetic construct
  misc_feature 1..80: note = Synthetic: >HKU1-cand-11710-11789
  source 1..80: mol_type = other DNA
tgatgtttttggttggtagaatagttactttaatttctatgtggtattttgggtcgaatttagaagaggatgttttgtta

SEQ ID NO: 6860 - DNA, 80 bp, synthetic construct
  misc_feature 1..80: note = Synthetic: >HKU1-cand-11800-11879
  source 1..80: mol_type = other DNA
cctttttaggtacttatacatggaccactattttgtcattagctatagcaaaaattgttgctaattggttgtctgttaat

SEQ ID NO: 6861 - DNA, 80 bp, synthetic construct
  misc_feature 1..80: note = Synthetic: >HKU1-cand-11880-11959
  source 1..80: mol_type = other DNA
atattttattttacagatgtaccttatattaaattgattctcttgagttacttatttatagggtatattttatcttgtta

SEQ ID NO: 6862 - DNA, 80 bp, synthetic construct
  misc_feature 1..80: note = Synthetic: >HKU1-cand-11960-12039
  source 1..80: mol_type = other DNA
ttggggatttttctctcttttaaacagtgtttttagaatgcctatgggtgtttataattataaaatttctgttcaagaat

SEQ ID NO: 6863 - DNA, 80 bp, synthetic construct
  misc_feature 1..80: note = Synthetic: >HKU1-cand-12040-12119
  source 1..80: mol_type = other DNA
tgcgttatatgaatgctaatggcttacgtccacctcgtaatagttttgaggctattttgttaaatttaaaactgcttgga

SEQ ID NO: 6864 - DNA, 80 bp, synthetic construct
  misc_feature 1..80: note = Synthetic: >HKU1-cand-12120-12199
  source 1..80: mol_type = other DNA
ataggtggcgtgccagttattgaagtctcccaaattcaatcaaaattgactgatgtgaaatgtgctaatgttgttttgtt

SEQ ID NO: 6865 - DNA, 80 bp, synthetic construct
  misc_feature 1..80: note = Synthetic: >HKU1-cand-13490-13569
  source 1..80: mol_type = other DNA
tgctggtactggtatggccattactattaaacctgaggctactattaaccaagattcttatggtggtgcctctgtttgta

SEQ ID NO: 6866 - DNA, 80 bp, synthetic construct
  misc_feature 1..80: note = Synthetic: >HKU1-cand-13570-13649
  source 1..80: mol_type = other DNA
tttattgccgtgcacgtgtagagcatccagatgtagatggtatatgtaaattacgtggtaaatttgtacaagtccctttg

SEQ ID NO: 6867 - DNA, 80 bp, synthetic construct
  misc_feature 1..80: note = Synthetic: >HKU1-cand-13650-13729
  source 1..80: mol_type = other DNA
ggtataaaagaccctattctttatgtgttaacacatgatgtttgtcaagtctgtggtttttggagagatggcagttgttc

SEQ ID NO: 6868 - DNA, 80 bp, synthetic construct
  misc_feature 1..80: note = Synthetic: >HKU1-cand-13730-13809
  source 1..80: mol_type = other DNA
ctgtgtaggttcaagtgtcgctgttcaatctaaagatttaaattttttaaacgggttcggggtactagtgtgaatgcccg

SEQ ID NO: 6869 - DNA, 80 bp, synthetic construct
  misc_feature 1..80: note = Synthetic: >HKU1-cand-13810-13889
  source 1..80: mol_type = other DNA
gctagtaccctgtgctagtggtttatctactgatgttcaattaagggcatttgacatttgtaataccaatagagctggta

SEQ ID NO: 6870 - DNA, 80 bp, synthetic construct
  misc_feature 1..80: note = Synthetic: >HKU1-cand-13890-13969
  source 1..80: mol_type = other DNA
taggtttatattataaagtgaattgttgccgttttcagcgtatagatgacgacggtaataaattggataagttctttgtt

SEQ ID NO: 6871 - DNA, 80 bp, synthetic construct
  misc_feature 1..80: note = Synthetic: >HKU1-cand-13970-14049
  source 1..80: mol_type = other DNA
gtcaaaagaactaatttagaagtttataataaagagaaaacttattatgagttgactaaaagttgtggtgttgtggctga

SEQ ID NO: 6872 - DNA, 80 bp, synthetic construct
  misc_feature 1..80: note = Synthetic: >HKU1-cand-14050-14129
  source 1..80: mol_type = other DNA
acatgatttctttacatttgatattgatggtagtcgcgtgccacatatagttcgtaggaatctttcaaagtatactatgt

SEQ ID NO: 6873 - DNA, 80 bp, synthetic construct
  misc_feature 1..80: note = Synthetic: >HKU1-cand-14130-14209
  source 1..80: mol_type = other DNA
tagatctttgctatgcattgcgtcattttgatcgtaatgattgttcaatattgtgtgaaattctttgtgagtatgctgat

SEQ ID NO: 6874 - DNA, 80 bp, synthetic construct
  misc_feature 1..80: note = Synthetic: >HKU1-cand-14210-14289
  source 1..80: mol_type = other DNA
tgtaaagaatcctacttttctaagaaagattggtatgattttgttgaaaatcctgatattattaatatatataaaaaatt

SEQ ID NO: 6875 - DNA, 80 bp, synthetic construct
  misc_feature 1..80: note = Synthetic: >HKU1-cand-14290-14369
  source 1..80: mol_type = other DNA
aggccctatttttaatagagctttacttaatactgtcatttttgcagacaccttagttgaagtaggtttagttggtgttt

SEQ ID NO: 6876 - DNA, 80 bp, synthetic construct
  misc_feature 1..80: note = Synthetic: >HKU1-cand-14370-14449
  source 1..80: mol_type = other DNA
taactttagataaccaagatttgtatggtcaatggtatgattttggtgattttatacaaacagccccaggatttggtgtg

SEQ ID NO: 6877 - DNA, 80 bp, synthetic construct
  misc_feature 1..80: note = Synthetic: >HKU1-cand-14450-14529
  source 1..80: mol_type = other DNA
gcagtcgcagattcttactattcttatatgatgcctatgttgactatgtgtcatgtattagattgtgaattatttgttaa

SEQ ID NO: 6878 - DNA, 80 bp, synthetic construct
  misc_feature 1..80: note = Synthetic: >HKU1-cand-14530-14609
  source 1..80: mol_type = other DNA
tgatagttatagacaattcgatcttgtgcagtatgattttactgattacaagttagagttgtttaataagtattttaagt

SEQ ID NO: 6879 - DNA, 80 bp, synthetic construct
  misc_feature 1..80: note = Synthetic: >HKU1-cand-14610-14689
  source 1..80: mol_type = other DNA
attggggtatgaagtatcatcctaatactgtggattgtgataatgataggtgtattattcattgtgctaattttaatata

SEQ ID NO: 6880 - DNA, 80 bp, synthetic construct
  misc_feature 1..80: note = Synthetic: >HKU1-cand-14690-14769
  source 1..80: mol_type = other DNA
ctatttagtatggttttacctaatacttgttttggtccccttgttagacaaatttttgtagatggtgtaccgtttgttgt

SEQ ID NO: 6881 - DNA, 80 bp, synthetic construct
  misc_feature 1..80: note = Synthetic: >HKU15-cand-11610-11689
  source 1..80: mol_type = other DNA
actaagcagtgtgcagctaaagtcttcgaaatcgaggaggaatgctacaacgctcttagtacagagctttatactactga

SEQ ID NO: 6882 - DNA, 80 bp, synthetic construct
  misc_feature 1..80: note = Synthetic: >HKU15-cand-11770-11849
  source 1..80: mol_type = other DNA
aatatacactcctggacttggcttatgctctacgtcatttgtcaacatctaaggatgttattcaagaaatcttgatcacc

SEQ ID NO: 6883 - DNA, 80 bp, synthetic construct
  misc_feature 1..80: note = Synthetic: >HKU15-cand-11930-12009
  source 1..80: mol_type = other DNA
taaacttggggatattcttaaccgttgtgttcttaatgccaataagtttgctagtgcctgtatagacgctggtcttgttg

SEQ ID NO: 6884 - DNA, 80 bp, synthetic construct
  misc_feature 1..80: note = Synthetic: >HKU15-cand-12250-12329
  source 1..80: mol_type = other DNA
attttaagtactgggaccgtccttaccatcctaacactgttgaatgtccagatgaccgttgcgtattgcactgtgcgaac

SEQ ID NO: 6885 - DNA, 80 bp, synthetic construct
  misc_feature 1..80: note = Synthetic: >HKU15-cand-12330-12409
  source 1..80: mol_type = other DNA
ttcaatgtgttgtttgctatgtgtatacctaatacggcatttggcaatctttgttcaagagctactgttgatggccacct

SEQ ID NO: 6886 - DNA, 80 bp, synthetic construct
  misc_feature 1..80: note = Synthetic: >HKU15-cand-12490-12569
  source 1..80: mol_type = other DNA
ttaatctaaacactctattgcgattggttggtgatcccaccaccattgcaagtgtctcagacaagtgtgtagatttaaga

SEQ ID NO: 6887 - DNA, 80 bp, synthetic construct
  misc_feature 1..80: note = Synthetic: >HKU15-cand-12570-12649
  source 1..80: mol_type = other DNA
actccttgtcagaccttggctactatgtctagcggaattgctaaacagtcagtcaagcccgggcattttaatcaacactt

SEQ ID NO: 6888 - DNA, 80 bp, synthetic construct
  misc_feature 1..80: note = Synthetic: >HKU15-cand-12730-12809
  source 1..80: mol_type = other DNA
aagcggctatcacagactacagctactacaggtataatacccccacgatggtagatatcaagatgttcttattttgcctt

SEQ ID NO: 6889 - DNA, 80 bp, synthetic construct
  misc_feature 1..80: note = Synthetic: >HKU15-cand-12810-12889
  source 1..80: mol_type = other DNA
gaggtggcagataagtatcttgagccctacgaaggtggatgtattaatgcacagtcagttgtggtctctaatttggacaa

SEQ ID NO: 6890 - DNA, 80 bp, synthetic construct
  misc_feature 1..80: note = Synthetic: >HKU15-cand-18030-18109
  source 1..80: mol_type = other DNA
ctgaccacatttgctactacttgtacacagggtagaaatgttgagcagtttatacctaaaacacctatggaaagagactt

SEQ ID NO: 6891 - DNA, 80 bp, synthetic construct
  misc_feature 1..80: note = Synthetic: >HKU15-cand-18110-18189
  source 1..80: mol_type = other DNA
ccttgagatgtctcaacagtccttcatccagcaatatcaattgcaggaactgggtgttgaacacattatctatggtgatg

SEQ ID NO: 6892 - DNA, 80 bp, synthetic construct
  misc_feature 1..80: note = Synthetic: >HKU15-cand-18190-18269
  source 1..80: mol_type = other DNA
attccagtccagtcattggcggaactcacacacttatctcactagttaaaaacaagtttgaacatcagcttgtcaaccat

SEQ ID NO: 6893 - DNA, 80 bp, synthetic construct
  misc_feature 1..80: note = Synthetic: >HKU15-cand-18270-18349
  source 1..80: mol_type = other DNA
gtttacaacccagtccagaactgtgttgttacctcacctaacgcaagctccaagaacgtttgcactgttcttgatgttct

SEQ ID NO: 6894 - DNA, 80 bp, synthetic construct
  misc_feature 1..80: note = Synthetic: >HKU15-cand-18350-18429
  source 1..80: mol_type = other DNA
tcttgatgactacattgacatcataagacaagcacatgccagttacacaagtaaatccaaagtattcactgtgtcaattg

SEQ ID NO: 6895 - DNA, 80 bp, synthetic construct
  misc_feature 1..80: note = Synthetic: >HKU15-cand-18430-18509
  source 1..80: mol_type = other DNA
acaaccaacaaattagattcatgctttggcatgatgagcaagtcaagacttgctacccaatcttacagtcacttaccaat

SEQ ID NO: 6896 - DNA, 80 bp, synthetic construct
  misc_feature 1..80: note = Synthetic: >HKU15-cand-18510-18589
  source 1..80: mol_type = other DNA
ggttaccagatgccatctgtgtacaaaacattggttactgacttacaaccagctgacatccctaattatcattcctacac

SEQ ID NO: 6897 - DNA, 80 bp, synthetic construct
  misc_feature 1..80: note = Synthetic: >HKU15-cand-18600-18679
  source 1..80: mol_type = other DNA
cctggagtagttaagaatgttatcaagtaccgccaacttttcaactacatagttaaaaaggataggttggcagtaccaca

SEQ ID NO: 6898 - DNA, 80 bp, synthetic construct
  misc_feature 1..80: note = Synthetic: >HKU15-cand-18680-18759
  source 1..80: mol_type = other DNA
caatatgaccgtattacaccttggagctgcatctgcactaggtacagcaccaggttcttcagtcataaaacaaatgtttc

SEQ ID NO: 6899 - DNA, 80 bp, synthetic construct
  misc_feature 1..80: note = Synthetic: >HKU15-cand-18760-18839
  source 1..80: mol_type = other DNA
ctgaaggaactgttcttattgacctcgatataagagagttcacttcagatgctaaccaaataatagttacagactacaga

SEQ ID NO: 6900 - DNA, 80 bp, synthetic construct
  misc_feature 1..80: note = Synthetic: >HKU15-cand-18840-18919
  source 1..80: mol_type = other DNA
acttacataccaccacaccacgtagacgtcatattttctgacctctactgttgtgatgacatacacttctttgacaatct

SEQ ID NO: 6901 - DNA, 80 bp, synthetic construct
  misc_feature 1..80: note = Synthetic: >HKU15-cand-18920-18999
  source 1..80: mol_type = other DNA
aataaggatagttaaggagaggctcgccctcggtggttctatctttgttaagataactgaacattcattctcacccgaac

SEQ ID NO: 6902 - DNA, 80 bp, synthetic construct
  misc_feature 1..80: note = Synthetic: >HKU15-cand-19000-19079
  source 1..80: mol_type = other DNA
tctactcacttgcgggttggttcgatgattatcaactattttgcacagcagtcaatgcctcgtcttcagaagcattttta

SEQ ID NO: 6903 - DNA, 80 bp, synthetic construct
  misc_feature 1..80: note = Synthetic: >HKU15-cand-19080-19159
  source 1..80: mol_type = other DNA
tgctgttttaattatttggggcttgctaaggaaaacattaatggttttaacttacatgcttcctacattcaatggcgcaa

SEQ ID NO: 6904 - DNA, 80 bp, synthetic construct
  misc_feature 1..80: note = Synthetic: >HKU15-cand-19160-19239
  source 1..80: mol_type = other DNA
tgaaatagcgttgacaccaacctattctcctttagcggacaacccggctacggcctgtaagctaaaagcaacgcctatta

SEQ ID NO: 6905 - DNA, 80 bp, synthetic construct
  misc_feature 1..80: note = Synthetic: >HKU15-cand-19240-19319
  source 1..80: mol_type = other DNA
tctcggctcgtgagttagagaagaagcctattcttcgctatctcgttgcatcaggacgccttcttgtgaggccaccagaa

SEQ ID NO: 6906 - DNA, 80 bp, synthetic construct
  misc_feature 1..80: note = Synthetic: >HKU4-cand-4610-4689
  source 1..80: mol_type = other DNA
actcagatgttgctattcaaacacctgagacagcatttataaacaatgttacttccaatgggggttatcacagttggcat

SEQ ID NO: 6907 - DNA, 80 bp, synthetic construct
  misc_feature 1..80: note = Synthetic: >HKU4-cand-4770-4849
  source 1..80: mol_type = other DNA
agataataaattctatgtggtaaagaatgatgtagctttaccctttagtgatttagaagcgtgtagggcttatctgactt

SEQ ID NO: 6908 - DNA, 80 bp, synthetic construct
  misc_feature 1..80: note = Synthetic: >HKU4-cand-4930-5009
  source 1..80: mol_type = other DNA
actaccacttttagaaaacagcttggtgctactttctataaaggtgtagatatctcagatgctcttcctactgtgaaaat

SEQ ID NO: 6909 - DNA, 80 bp, synthetic construct
  misc_feature 1..80: note = Synthetic: >HKU4-cand-5010-5089
  source 1..80: mol_type = other DNA
gggaggtgagtctctatttgtggctgataatttatcagaatcggagaaagttgtactgaaagaatattacggtacatctg

SEQ ID NO: 6910 - DNA, 80 bp, synthetic construct
  misc_feature 1..80: note = Synthetic: >HKU4-cand-5170-5249
  source 1..80: mol_type = other DNA
tctttgaagcttagcaattataattgttacattaatgcaacaattatgatgattgatatgctacatgatataaaatttgt

SEQ ID NO: 6911 - DNA, 80 bp, synthetic construct
  misc_feature 1..80: note = Synthetic: >HKU4-cand-5250-5329
  source 1..80: mol_type = other DNA
agtgcctgcgttgcagaatgcctacttaagatataagggcggagatccttatgattttcttgccctaattatggcttatg

SEQ ID NO: 6912 - DNA, 80 bp, synthetic construct
  misc_feature 1..80: note = Synthetic: >HKU4-cand-5330-5409
  source 1..80: mol_type = other DNA
gtgattgtacatttgacaatcctgatgacgaagccaaacttttacatactctccttgctaaagcagaattaactgtttca

SEQ ID NO: 6913 - DNA, 80 bp, synthetic construct
  misc_feature 1..80: note = Synthetic: >HKU4-cand-5410-5489
  source 1..80: mol_type = other DNA
gctaaaatggtatggagagaatggtgcactgtttgtggtattcgcgatattgaatatacaggcatgcgtgcatgcgttta

SEQ ID NO: 6914 - DNA, 80 bp, synthetic construct
  misc_feature 1..80: note = Synthetic: >HKU4-cand-5490-5569
  source 1..80: mol_type = other DNA
tgctggtgttaattcgatggaagaattacaatcagtttttaatgaaacttgtgtgtgtggtagtgtaaaacaccgtcaat

SEQ ID NO: 6915 - DNA, 80 bp, synthetic construct
  misc_feature 1..80: note = Synthetic: >HKU4-cand-5570-5649
  source 1..80: mol_type = other DNA
tggtggaacactcggcaccatggttattggtatctggtttaaatgaagtgaaagtgtctacttccactgatccaatttac

SEQ ID NO: 6916 - DNA, 80 bp, synthetic construct
  misc_feature 1..80: note = Synthetic: >HKU4-cand-5650-5729
  source 1..80: mol_type = other DNA
cgtgcctttaatgtctttcagggtgtggaaacaagtgttggtcactatgtccatattcgagtgaaggatggtttgtttta

SEQ ID NO: 6917 - DNA, 80 bp, synthetic construct
  misc_feature 1..80: note = Synthetic: >HKU4-cand-5730-5809
  source 1..80: mol_type = other DNA
taagtatgactctggtagcttaactaaaacttctgatatgaagtgtaagatgaccagtgtgtggtatcccacagttcgtt

SEQ ID NO: 6918 - DNA, 80 bp, synthetic construct
  misc_feature 1..80: note = Synthetic: >HKU4-cand-9730-9809
  source 1..80: mol_type = other DNA
ggtgaaccggcatttatcatgcatatttcctggtatgtaatgtttggtgctgtagttcctatttggatgttagcatctta

SEQ ID NO: 6919 - DNA, 80 bp, synthetic construct
  misc_feature 1..80: note = Synthetic: >HKU4-cand-9810-9889
  source 1..80: mol_type = other DNA
caccgttggtgtaatgttgcgtcatctgttttgggtgttagcttattttagtaagaagcatgttgatgtttttactgatg

SEQ ID NO: 6920 - DNA, 80 bp, synthetic construct
  misc_feature 1..80: note = Synthetic: >HKU4-cand-9890-9969
  source 1..80: mol_type = other DNA
gtaagcttaattgtagctttcaggatgctgctagtaacatctttgttataggtaaggatacatatgtcgctttacgtaat

SEQ ID NO: 6921 - DNA, 80 bp, synthetic construct
  misc_feature 1..80: note = Synthetic: >HKU4-cand-9970-10049
  source 1..80: mol_type = other DNA
gctataacacaagattcctttgttaggtatttgtcattatttaacaagtacaagtattattcaggtgctatggacacggc

SEQ ID NO: 6922 - DNA, 80 bp, synthetic construct
  misc_feature 1..80: note = Synthetic: >HKU4-cand-10050-10129
  source 1..80: mol_type = other DNA
ttcttatagagaggcttgtgccgcacatttgtgtaaagccttacagacatacagtgaaactggtagtgacatcttgtacc

SEQ ID NO: 6923 - DNA, 80 bp, synthetic construct
  misc_feature 1..80: note = Synthetic: >HKU4-cand-10190-10269
  source 1..80: mol_type = other DNA
ctcctagtggtgctgtagagaactgtattgtgcaagttacatgtgggtctatgacattgaatggtctttggcttgataac

SEQ ID NO: 6924 - DNA, 80 bp, synthetic construct
  misc_feature 1..80: note = Synthetic: >HKU4-cand-10270-10349
  source 1..80: mol_type = other DNA
actgtatggtgtcctcgccatattatgtgtcctgctgaccagttaactgacccaaattatgatgctttgttaatttcaaa

SEQ ID NO: 6925 - DNA, 80 bp, synthetic construct
  misc_feature 1..80: note = Synthetic: >HKU4-cand-10350-10429
  source 1..80: mol_type = other DNA
aactaatcatagttttattgtgcaaaaacacataggagctcaggctaatctgcgtgttgttgctcattctatggttggtg

SEQ ID NO: 6926 - DNA, 80 bp, synthetic construct
  misc_feature 1..80: note = Synthetic: >HKU4-cand-10510-10589
  source 1..80: mol_type = other DNA
tttagcgttttagcttgttataatggcaagcctacaggtgtctttacagttaatttacgccacaattctaccattaaagg

SEQ ID NO: 6927 - DNA, 80 bp, synthetic construct
  misc_feature 1..80: note = Synthetic: >HKU4-cand-10590-10669
  source 1..80: mol_type = other DNA
cagtttcctttgtggttcttgtggtagtgttggttacactgaaaatggaggtgtaatcaactttgtttatatgcatcaga

SEQ ID NO: 6928 - DNA, 80 bp, synthetic construct
  misc_feature 1..80: note = Synthetic: >HKU4-cand-10750-10829
  source 1..80: mol_type = other DNA
cagttacagttaacagacaaatactgcactattaatgtagtagcttggctctatgcagcagttctaaatggttgtaagtg

SEQ ID NO: 6929 - DNA, 80 bp, synthetic construct
  misc_feature 1..80: note = Synthetic: >HKU4-cand-10830-10909
  source 1..80: mol_type = other DNA
gtttgtaaaacccaccagagttggaattgtaacttataatgaatgggctttgagtaatcagtttacagaatttgtaggca

SEQ ID NO: 6930 - DNA, 80 bp, synthetic construct
  misc_feature 1..80: note = Synthetic: >HKU4-cand-10910-10989
  source 1..80: mol_type = other DNA
cacagtccattgatatgcttgctcaccgaactggtgtttctgttgaacaaatgcttgctgctatccagagtctgcatgct

SEQ ID NO: 6931 - DNA, 80 bp, synthetic construct
  misc_feature 1..80: note = Synthetic: >HKU4-cand-14830-14909
  source 1..80: mol_type = other DNA
tatctagaggctttttcaaggaagggtcttcagttacattaaaacatttcttctttgcacaagatggtcatgctgctatt

SEQ ID NO: 6932 - DNA, 80 bp, synthetic construct
  misc_feature 1..80: note = Synthetic: >HKU4-cand-14910-14989
  source 1..80: mol_type = other DNA
acagattatagctattatgcttataatctacctactatggttgacatcaagcagatgttgttctgcatggaagttgtcga

SEQ ID NO: 6933 - DNA, 80 bp, synthetic construct
  misc_feature 1..80: note = Synthetic: >HKU4-cand-14990-15069
  source 1..80: mol_type = other DNA
caaatattttgatatctatgacggtgggtgccttaacgcttctgaagttatagttaataatttagataagagtgctggcc

SEQ ID NO: 6934 - DNA, 80 bp, synthetic construct
  misc_feature 1..80: note = Synthetic: >HKU4-cand-15070-15149
  source 1..80: mol_type = other DNA
atccttttaataagtttggcaaagcacgtgtttattatgaaagtatgagttatcaagagcaagatgaattgtttgctgta

SEQ ID NO: 6935 - DNA, 80 bp, synthetic construct
  misc_feature 1..80: note = Synthetic: >HKU4-cand-15150-15229
  source 1..80: mol_type = other DNA
actaagcgcaacgttttgcctactataactcaaatgaatttgaagtatgctattagtgctaagaatagagcacgtactgt

SEQ ID NO: 6936 - DNA, 80 bp, synthetic construct
  misc_feature 1..80: note = Synthetic: >HKU4-cand-15230-15309
  source 1..80: mol_type = other DNA
agcaggcgtgtctatacttagcacaatgactaatcgtcaatatcaccagaagatgttgaagtctatggctgcaacgcgtg

SEQ ID NO: 6937 - DNA, 80 bp, synthetic construct
  misc_feature 1..80: note = Synthetic: >HKU4-cand-15310-15389
  source 1..80: mol_type = other DNA
gagccacgtgtgtcataggcacaactaaattttatggtggttgggactttatgttaaaaaccttatataaggatgttgag

SEQ ID NO: 6938 - DNA, 80 bp, synthetic construct
  misc_feature 1..80: note = Synthetic: >HKU4-cand-15390-15469
  source 1..80: mol_type = other DNA
agtccacatttaatgggttgggattaccctaagtgtgatcgtgctatgcctaatatgtgtcgcattttagcgtcattgat

SEQ ID NO: 6939 - DNA, 80 bp, synthetic construct
  misc_feature 1..80: note = Synthetic: >HKU4-cand-15470-15549
  source 1..80: mol_type = other DNA
tttggcacgtaagcatagtacttgttgtactaattctgataggttctaccgcttagccaatgagtgtgctcaagtgttaa

SEQ ID NO: 6940 - DNA, 80 bp, synthetic construct
  misc_feature 1..80: note = Synthetic: >HKU4-cand-15550-15629
  source 1..80: mol_type = other DNA
gtgagtatgtcctatgcggaggaggttattatgttaaaccaggtggtacgagtagtggtgatgcaactactgcttatgcc

SEQ ID NO: 6941 - DNA, 80 bp, synthetic construct
  misc_feature 1..80: note = Synthetic: >HKU4-cand-15630-15709
  source 1..80: mol_type = other DNA
aatagtgtttttaacatattacaagccaccaccgctaatgttagtgcacttatgagtgctaatggtaatactatcataga

SEQ ID NO: 6942 - DNA, 80 bp, synthetic construct
  misc_feature 1..80: note = Synthetic: >HKU4-cand-15710-15789
  source 1..80: mol_type = other DNA
tcgtgaaataaaggatatgcaatttgacttgtatatcaatgtatatagaaaagtagtgcctgatcctaaatttgttgaca

SEQ ID NO: 6943 - DNA, 80 bp, synthetic construct
  misc_feature 1..80: note = Synthetic: >HKU4-cand-15790-15869
  source 1..80: mol_type = other DNA
agtactacgcatttcttaataaacacttttctatgatgatcttatcggatgatggtgttgtgtgttataatagcgactat

SEQ ID NO: 6944 - DNA, 80 bp, synthetic construct
  misc_feature 1..80: note = Synthetic: >HKU4-cand-15870-15949
  source 1..80: mol_type = other DNA
gccgctaaaggttatgtcgcctccatccaaaattttaaagagacgctttattatcaaaataatgtctttatgtcagaagc

SEQ ID NO: 6945 - DNA, 80 bp, synthetic construct
  misc_feature 1..80: note = Synthetic: >HKU4-cand-15950-16029
  source 1..80: mol_type = other DNA
taagtgctgggtggaaaccaatttggaaaagggtccacatgaattttgttcacagcatacgctctatattaaagatgggg

SEQ ID NO: 6946 - DNA, 80 bp, synthetic construct
  misc_feature 1..80: note = Synthetic: >HKU4-cand-16030-16109
  source 1..80: mol_type = other DNA
acgatggctacttcttaccttatccagacccttctaggattttgtctgccggttgctttgttgatgatatcgttaagact

SEQ ID NO: 6947 - DNA, 80 bp, synthetic construct
  misc_feature 1..80: note = Synthetic: >HKU4-cand-19940-20019
  source 1..80: mol_type = other DNA
tttagaggtggatgtttgttacaactttgttctttgggactatgatcgtaacaacatctatggtacaactacaatcggtg

SEQ ID NO: 6948 - DNA, 80 bp, synthetic construct
  misc_feature 1..80: note = Synthetic: >HKU4-cand-20020-20099
  source 1..80: mol_type = other DNA
tgtgtaaatacactgatattgatgtcaatccaaatttgaatatgtgttttgacatacgtgacaaaggatcattggaaagg

SEQ ID NO: 6949 - DNA, 80 bp, synthetic construct
  misc_feature 1..80: note = Synthetic: >HKU4-cand-20100-20179
  source 1..80: mol_type = other DNA
tttatgtcaatgcccaatggtgttttgatatcagatcgcaagataaagaattatccttgcatttctggtcctaagcatgc

SEQ ID NO: 6950 - DNA, 80 bp, synthetic construct
  misc_feature 1..80: note = Synthetic: >HKU4-cand-20180-20259
  source 1..80: mol_type = other DNA
ttactttaatggtgctattctacgcaacattgatgccaaacaacctgttattttttatttgtataagaaagtcaataatg

SEQ ID NO: 6951 - DNA, 80 bp, synthetic construct
  misc_feature 1..80: note = Synthetic: >HKU4-cand-20260-20339
  source 1..80: mol_type = other DNA
aattcgtttcattttctgacacgttttatacgtgtggcaggactgttggcgactttactgttttaactcctatggaggaa

SEQ ID NO: 6952 - DNA, 80 bp, synthetic construct
  misc_feature 1..80: note = Synthetic: >HKU4-cand-20340-20419
  source 1..80: mol_type = other DNA
gactttcttgtgctggatagcgatgtttttattaagaagtatggcttggaagactatgcttttgaacacgtagtttatgg

SEQ ID NO: 6953 - DNA, 80 bp, synthetic construct
  misc_feature 1..80: note = Synthetic: >HKU4-cand-20420-20499
  source 1..80: mol_type = other DNA
tgatttttcacatactacgttaggtggcttacatcttcttataggtttatataagaagatgcgtgagggtcacatattaa

SEQ ID NO: 6954 - DNA, 80 bp, synthetic construct
  misc_feature 1..80: note = Synthetic: >HKU4-cand-20500-20579
  source 1..80: mol_type = other DNA
tggaagaaatgctcaaggatagagctactgtccataattattttataacagattctaatacagcttcttataaggctgtt

SEQ ID NO: 6955 - DNA, 80 bp, synthetic construct
  misc_feature 1..80: note = Synthetic: >HKU4-cand-20580-20659
  source 1..80: mol_type = other DNA
tgttctgttattgatttaagacttgatgactttgtcaccatcattaaggaaatggaccttgatgttgtgtcaaaagttgt

SEQ ID NO: 6956 - DNA, 80 bp, synthetic construct
  misc_feature 1..80: note = Synthetic: >HKU4-cand-20660-20739
  source 1..80: mol_type = other DNA
taaagttcctattgatttaactatgattgaatttatgttgtggtgtagagatggaaaggttcaaaccttctatcctagac

SEQ ID NO: 6957 - DNA, 80 bp, synthetic construct
  misc_feature 1..80: note = Synthetic: >HKU4-cand-20740-20819
  source 1..80: mol_type = other DNA
ttcaggctaccaatgattggaaacctggtctaactatgccatctttgtttaaagttcagcaaatgaaccttgaaccatgt

SEQ ID NO: 6958 - DNA, 80 bp, synthetic construct
  misc_feature 1..80: note = Synthetic: >HKU4-cand-20820-20899
  source 1..80: mol_type = other DNA
ttattagctaattataagcaatccataccaatgccaaacggcgttcatatgaatgttgctaaatatatgcaattgtgtca

SEQ ID NO: 6959 - DNA, 80 bp, synthetic construct
  misc_feature 1..80: note = Synthetic: >HKU4-cand-20900-20979
  source 1..80: mol_type = other DNA
gtatttgaatacttgcactctagctgttcccgccaatatgagagtcattcattttggtgctggttgtgaaaaaggtgttg

SEQ ID NO: 6960 - DNA, 80 bp, synthetic construct
  misc_feature 1..80: note = Synthetic: >HKU4-cand-20980-21059
  source 1..80: mol_type = other DNA
cccctggtacatctgttttacggcagtggctgcctttagatgcagtcctgatagataatgatcttaatgagtttgtatca

SEQ ID NO: 6961 - DNA, 80 bp, synthetic construct
  misc_feature 1..80: note = Synthetic: >HKU4-cand-21060-21139
  source 1..80: mol_type = other DNA
gatgctgatataaccatttttggtgattgcgtaacagtacatgtcggtcagcaagtggatttacttatttctgacatgta

SEQ ID NO: 6962 - DNA, 80 bp, synthetic construct
  misc_feature 1..80: note = Synthetic: >HKU4-cand-21140-21219
  source 1..80: mol_type = other DNA
tgacccttgtactaaagctgtaggagaagttaatcaaacgaaggctttgttcttcgtatacctctgcaactttataaaga

SEQ ID NO: 6963 - DNA, 80 bp, synthetic construct
  misc_feature 1..80: note = Synthetic: >HKU9-cand-27090-27169
  source 1..80: mol_type = other DNA
ataatctgggttggtgaagaaggtgccaatatcaaccgtgtaggtgatatgggcacgcgtaatcctaataatgatgctgc

SEQ ID NO: 6964 - DNA, 80 bp, synthetic construct
  misc_feature 1..80: note = Synthetic: >HKU9-cand-27170-27249
  source 1..80: mol_type = other DNA
aattccagtacagcttgcagatggcattcctaagggtttctatgcagagggtcgtaactcacgtggcaatagccgcaata

SEQ ID NO: 6965 - DNA, 80 bp, synthetic construct
  misc_feature 1..80: note = Synthetic: >HKU9-cand-27250-27329
  source 1..80: mol_type = other DNA
gttcacgtaattctagcagagcctcctctcgtggtagttcgagacccagttccagaggtgcttctccaggtagaaacaca

SEQ ID NO: 6966 - DNA, 80 bp, synthetic construct
  misc_feature 1..80: note = Synthetic: >HKU9-cand-27330-27409
  source 1..80: mol_type = other DNA
cctaatggtggttcaggtactgaaccatggatggcctacctagttagtaagttggaaacactggaagctaaggttaatgg

SEQ ID NO: 6967 - DNA, 80 bp, synthetic construct
  misc_feature 1..80: note = Synthetic: >HKU9-cand-27410-27489
  source 1..80: mol_type = other DNA
cactaagtcagaaaccaaagcaccagttcaagtgaccaagaatgctgctgctgagaatgccaagaaactcaggcataagc

SEQ ID NO: 6968 - DNA, 80 bp, synthetic construct
  misc_feature 1..80: note = Synthetic: >HKU9-cand-27490-27569
  source 1..80: mol_type = other DNA
gcacacctcataagggcagtggtgttaccatgaattacggcagacgaggtcctggtgatttagagggcaattttggtgat

SEQ ID NO: 6969 - DNA, 80 bp, synthetic construct
  misc_feature 1..80: note = Synthetic: >HKU9-cand-27570-27649
  source 1..80: mol_type = other DNA
cagactatgttgaaacttggtactgatgatcccaggtttcctgccgctgcgcaaatggcacctaatgtagcatcatttct

SEQ ID NO: 6970 - DNA, 80 bp, synthetic construct
  misc_feature 1..80: note = Synthetic: >HKU9-cand-27650-27729
  source 1..80: mol_type = other DNA
cttcatgtcgcatttttccactagggaagaagatgatgccctttggcttcattataagggcgctattaagctgcctaagg

SEQ ID NO: 6971 - DNA, 80 bp, synthetic construct
  misc_feature 1..80: note = Synthetic: >HKU9-cand-27730-27809
  source 1..80: mol_type = other DNA
atgatcccaattatgagcagtggactaagttgctggaagagaatttgaatgcctacaaggatttccctccaccagaaccc

SEQ ID NO: 6972 - DNA, 80 bp, synthetic construct
  misc_feature 1..80: note = Synthetic: >HKU9-cand-27810-27889
  source 1..80: mol_type = other DNA
aagaaagataagaagaagaaggaagaaatcagttctgacacggtcgtctttgaagatgcctctacaggcactgatcagcc

SEQ ID NO: 6973 - DNA, 80 bp, synthetic construct
  misc_feature 1..80: note = Synthetic: >HKU9-cand-27890-27969
  source 1..80: mol_type = other DNA
tgtagttaaagtctgggttaaggatgaaggtgcgcagactgatgatgaatggctaggcggcgatgacaccgtctatgaag

SEQ ID NO: 6974 - DNA, 80 bp, synthetic construct
  misc_feature 1..80: note = Synthetic: >HKU9-cand-27970-28049
  source 1..80: mol_type = other DNA
aagaagaagacagacctaagactcagaggagacacaagaagaggaattcaacagcgtcacgtgtgacgatagctgatcct

SEQ ID NO: 6975 - DNA, 80 bp, synthetic construct
  misc_feature 1..80: note = Synthetic: >HKU9-cand-28050-28129
  source 1..80: mol_type = other DNA
acgaatgctacatctgaaaggtcctaaggtttttctgcttttagctttttcccttacgaatcactcttgaacgaacatga

SEQ ID NO: 6976 - DNA, 80 bp, synthetic construct
  misc_feature 1..80: note = Synthetic: >HKU9-cand-28130-28209
  source 1..80: mol_type = other DNA
ggttttgtcatgttttaatttttattggcactaacgctactggctagtgtttccggctttaaatttcagctaaacgcgca

SEQ ID NO: 6977 - DNA, 80 bp, synthetic construct
  misc_feature 1..80: note = Synthetic: >HKU9-cand-28210-28289
  source 1..80: mol_type = other DNA
atcttattgtgtatctagtgatttgcaatactgcttctagcgtgttgcgggcttgtaaccccttgcgtaagtctgtaaac

SEQ ID NO: 6978 - DNA, 80 bp, synthetic construct
  misc_feature 1..80: note = Synthetic: >HKU9-cand-28290-28369
  source 1..80: mol_type = other DNA
atacactgtcccaccggtgagcttgtggcggtaccacagccccgtaatctgacagtttttatgtgtgtaaaactcaccgg

SEQ ID NO: 6979 - DNA, 80 bp, synthetic construct
  misc_feature 1..80: note = Synthetic: >Lucheng19-cand-15360-15439
  source 1..80: mol_type = other DNA
gccaagttttggagtgaagaattctacgctaacctctatgaaaagtctagcgtactacaatctgcaggactgtgtgttgt

SEQ ID NO: 6980 - DNA, 80 bp, synthetic construct
  misc_feature 1..80: note = Synthetic: >Lucheng19-cand-15440-15519
  source 1..80: mol_type = other DNA
ctgtcaatcacaaacagtcctacgctgcggggactgccttagacgaccactactctgcactaagtgtgcatacgatcatg

SEQ ID NO: 6981 - DNA, 80 bp, synthetic construct
  misc_feature 1..80: note = Synthetic: >Lucheng19-cand-15520-15599
  source 1..80: mol_type = other DNA
tcatgggaacaaaccataagtttatcatggctgtcacaccctatgtttgctgtcatgcaggttgcaatgtcaatgatgtc

SEQ ID NO: 6982 - DNA, 80 bp, synthetic construct
  misc_feature 1..80: note = Synthetic: >Lucheng19-cand-15600-15679
  source 1..80: mol_type = other DNA
accaagctatatctaggtggcatgagcttctattgtgtagaccatagacctaaactatcatttgcactctgctcaaacgg

SEQ ID NO: 6983 - DNA, 80 bp, synthetic construct
  misc_feature 1..80: note = Synthetic: >Lucheng19-cand-15680-15759
  source 1..80: mol_type = other DNA
caatgtgtttggtctatacaaggctatggcaacaggttcagatgaagtctttgacttcaacagactggcaacaacagact

SEQ ID NO: 6984 - DNA, 80 bp, synthetic construct
  misc_feature 1..80: note = Synthetic: >Lucheng19-cand-15760-15839
  source 1..80: mol_type = other DNA
ggtcaaatgtagatgtctacaagttggcaaacacctgctctaacagcctaaaactttttgccgccgaaactgttaaagct

SEQ ID NO: 6985 - DNA, 80 bp, synthetic construct
  misc_feature 1..80: note = Synthetic: >Lucheng19-cand-15840-15919
  source 1..80: mol_type = other DNA
aaagaggaaagcgtaaaatcctcctatgctattgcaacacttaaagagattgttggcaatagagaaattgtgctacaatg

SEQ ID NO: 6986 - DNA, 80 bp, synthetic construct
  misc_feature 1..80: note = Synthetic: >Lucheng19-cand-15920-15999
  source 1..80: mol_type = other DNA
ggaagcatccaaaacaaaaccacctctgaaccgtaactctgtttttacaggctactatattaataaagacgctaaatttc

SEQ ID NO: 6987 - DNA, 80 bp, synthetic construct
  misc_feature 1..80: note = Synthetic: >Lucheng19-cand-16000-16079
  source 1..80: mol_type = other DNA
aaatgggtgagtatacctttgaaaaatctgattatggtaatgatagcgtattttataaggctaacaccaccacaaagtta

SEQ ID NO: 6988 - DNA, 80 bp, synthetic construct
  misc_feature 1..80: note = Synthetic: >Lucheng19-cand-16160-16239
  source 1..80: mol_type = other DNA
cacctccatctgtaagttgtatccatcattttacatcgacccagcttacagtgcacttgtcccccattatcagttgatag

SEQ ID NO: 6989 - DNA, 80 bp, synthetic construct
  misc_feature 1..80: note = Synthetic: >Lucheng19-cand-16320-16399
  source 1..80: mol_type = other DNA
ccttcagcgcgaatactctttacagcttgctcgcacgcggctgtagattcactatgtgtaaaagcggctaaaacattcgc

SEQ ID NO: 6990 - DNA, 80 bp, synthetic construct
  misc_feature 1..80: note = Synthetic: >Lucheng19-cand-16400-16479
  source 1..80: mol_type = other DNA
acatgagaagtgtaccaggataatacctgccaaggccagagtcgagtgttactctggttttaaggtgaataataatagcg

SEQ ID NO: 6991 - DNA, 80 bp, synthetic construct
  misc_feature 1..80: note = Synthetic: >Lucheng19-cand-16480-16559
  source 1..80: mol_type = other DNA
cccaatatgtatttagcaccattaatgcactaccagaaatatcagtagacctggttgttgttgatgaagtctccatgtgt

SEQ ID NO: 6992 - DNA, 80 bp, synthetic construct
  misc_feature 1..80: note = Synthetic: >PEDV-cand-7390-7469
  source 1..80: mol_type = other DNA
tttgttagtgtgttgtcgaatagttttggcaaagacctgtcaagttgtaatgacatgcaggattgcaagagcacattggg

SEQ ID NO: 6993 - DNA, 80 bp, synthetic construct
  misc_feature 1..80: note = Synthetic: >PEDV-cand-7470-7549
  source 1..80: mol_type = other DNA
ttttgatgatgtaccattggatacctttaatgctgctgttgctgaggctcatcgttacgatgtcctcttgactgacatgt

SEQ ID NO: 6994 - DNA, 80 bp, synthetic construct
  misc_feature 1..80: note = Synthetic: >PEDV-cand-7550-7629
  source 1..80: mol_type = other DNA
cgttcaacaattttaccaccagttatgcaaaaccagaggaaaaacttcccgtccatgacattgccacgtgtatgcgtgta

SEQ ID NO: 6995 - DNA, 80 bp, synthetic construct
  misc_feature 1..80: note = Synthetic: >PEDV-cand-7630-7709
  source 1..80: mol_type = other DNA
ggtgccaagattgttaatcataacgttcttgtcaaggatagtatacctgtggtgtggcttgtacgtgatttcattgccct

SEQ ID NO: 6996 - DNA, 80 bp, synthetic construct
  misc_feature 1..80: note = Synthetic: >PEDV-cand-7710-7789
  source 1..80: mol_type = other DNA
ttctgaagaaactaggaagtacattattcgtacgactaaagttaagggtataaccttcatgttgacctttaatgattgtc

SEQ ID NO: 6997 - DNA, 80 bp, synthetic construct
  misc_feature 1..80: note = Synthetic: >PEDV-cand-7790-7869
  source 1..80: mol_type = other DNA
gtatgcatactaccatacctactgtttgcattgcaaataagaagggtgcaggtcttcctagtttttcaaaggttaagaaa

SEQ ID NO: 6998 - DNA, 80 bp, synthetic construct
  misc_feature 1..80: note = Synthetic: >PEDV-cand-7870-7949
  source 1..80: mol_type = other DNA
ttcttctggtttttgtgtctgttcatagttgctgttttctttgcactaagcttttttgattttagtactcaggttagcag

SEQ ID NO: 6999 - DNA, 80 bp, synthetic construct
  misc_feature 1..80: note = Synthetic: >PEDV-cand-7950-8029
  source 1..80: mol_type = other DNA
tgatagtgattatgacttcaagtatattgagagtggccagttgaagacttttgacaatccacttagttgtgtgcataatg

SEQ ID NO: 7000 - DNA, 80 bp, synthetic construct
  misc_feature 1..80: note = Synthetic: >PEDV-cand-8030-8109
  source 1..80: mol_type = other DNA
tctttagtaacttcgaccagtggcatgatgccaagtttggtttcacccccgtcaacaatcctagttgtcctatagtcgtt

SEQ ID NO: 7001 - DNA, 80 bp, synthetic construct
  misc_feature 1..80: note = Synthetic: >PEDV-cand-8110-8189
  source 1..80: mol_type = other DNA
ggtgtatcagacgaagcgcgcactgttccaggtatcccagcaggtgtttatttagctggtaaaacacttgtttttgctat

SEQ ID NO: 7002 - DNA, 80 bp, synthetic construct
  misc_feature 1..80: note = Synthetic: >PEDV-cand-8190-8269
  source 1..80: mol_type = other DNA
taacaccatttttggtacatctggtttgtgctttgatgctagtggcgttgctgataagggcgcttgcatttttaattcgg

SEQ ID NO: 7003 - DNA, 80 bp, synthetic construct
  misc_feature 1..80: note = Synthetic: >PEDV-cand-8270-8349
  source 1..80: mol_type = other DNA
cttgcaccacattatctggtttgggtggaactgctgtctactgttataagaatggtctagttgaaggtgctaaactttat

SEQ ID NO: 7004 - DNA, 80 bp, synthetic construct
  misc_feature 1..80: note = Synthetic: >PEDV-cand-8350-8429
  source 1..80: mol_type = other DNA
agtgagttggcacctcatagctactataaaatggtagatggtaatgctgtgtctttacctgaaattatctcacgcggctt

SEQ ID NO: 7005 - DNA, 80 bp, synthetic construct
  misc_feature 1..80: note = Synthetic: >PEDV-cand-8430-8509
  source 1..80: mol_type = other DNA
tggcatccgtactatccgtacaaaggctatgacctactgtcgcgttggccagtgtgtgcaatctgcagaaggtgtttgtt

SEQ ID NO: 7006 - DNA, 80 bp, synthetic construct
  misc_feature 1..80: note = Synthetic: >PEDV-cand-8510-8589
  source 1..80: mol_type = other DNA
ttggcgccgatagattctttgtctataatgcagaatctggttctgactttgtttgtggcacagggctctttacattgttg

SEQ ID NO: 7007 - DNA, 80 bp, synthetic construct
  misc_feature 1..80: note = Synthetic: >PEDV-cand-8590-8669
  source 1..80: mol_type = other DNA
atgaacgttattagtgttttttccaagacagtaccagtaactgtgttgtctggtcaaatactttttaattgcattattgc

SEQ ID NO: 7008 - DNA, 80 bp, synthetic construct
  misc_feature 1..80: note = Synthetic: >PEDV-cand-25290-25369
  source 1..80: mol_type = other DNA
ttgttagtagcatcgacttgtatctagctatacgtgggcggcaagaagctgacctacagctgttgcgaactgttgagctt

SEQ ID NO: 7009 - DNA, 80 bp, synthetic construct
  misc_feature 1..80: note = Synthetic: >PEDV-cand-25370-25449
  source 1..80: mol_type = other DNA
cttgatggcaagaagctttatgtcttttcgcaacatcaaattgttggcattactaatgctgcatttgactcaattcaact

SEQ ID NO: 7010 - DNA, 80 bp, synthetic construct
  misc_feature 1..80: note = Synthetic: >PEDV-cand-25450-25529
  source 1..80: mol_type = other DNA
agacgagtatgctacaattagtgaatgataatggtctagtagttaatgttatactttggcttttcgtactctttttcctg

SEQ ID NO: 7011 - DNA, 80 bp, synthetic construct
  misc_feature 1..80: note = Synthetic: >PEDV-cand-25530-25609
  source 1..80: mol_type = other DNA
cttattataagcattactttcgtccaattggttaatctgtgcttcacttgtcaccggttgtgtaatagcgcagtttacac

SEQ ID NO: 7012 - DNA, 80 bp, synthetic construct
  misc_feature 1..80: note = Synthetic: >PEDV-cand-25610-25689
  source 1..80: mol_type = other DNA
acctatagggcgtttgtatagagtttataagtcttacatgcaaatagaccccctccctagtactgttattgacgtataaa

SEQ ID NO: 7013 - DNA, 80 bp, synthetic construct
  misc_feature 1..80: note = Synthetic: >PEDV-cand-25690-25769
  source 1..80: mol_type = other DNA
cgaaatatgtctaacggttctattcccgttgatgaggtgattcaacaccttagaaactggaatttcacatggaatatcat

SEQ ID NO: 7014 - DNA, 80 bp, synthetic construct
  misc_feature 1..80: note = Synthetic: >PEDV-cand-25770-25849
  source 1..80: mol_type = other DNA
actgacgatactacttgtagtgcttcagtatggccattacaagtactctgcgttcttgtatggtgtcaagatggctattc

SEQ ID NO: 7015 - DNA, 80 bp, synthetic construct
  misc_feature 1..80: note = Synthetic: >PEDV-cand-25850-25929
  source 1..80: mol_type = other DNA
tatggatactttggcctcttgtgttagcactgtcactttttgatgcatgggctagctttcaggtcaattgggtctttttt

SEQ ID NO: 7016 - DNA, 80 bp, synthetic construct
  misc_feature 1..80: note = Synthetic: >PEDV-cand-25930-26009
  source 1..80: mol_type = other DNA
gctttcagcatccttatggcttgcatcactcttatgctgtggataatgtactttgtcaatagcattcggttgtggcgcag

SEQ ID NO: 7017 - DNA, 80 bp, synthetic construct
  misc_feature 1..80: note = Synthetic: >PEDV-cand-26010-26089
  source 1..80: mol_type = other DNA
gacacattcttggtggtctttcaatcctgaaacagacgcgcttctcactacttctgtgatgggccgacaggtctgcattc

SEQ ID NO: 7018 - DNA, 80 bp, synthetic construct
  misc_feature 1..80: note = Synthetic: >PEDV-cand-26090-26169
  source 1..80: mol_type = other DNA
cagtgcttggagcaccaactggtgtaacgctaacactccttagtggtacattgcttgtagagggctataaggttgctact

SEQ ID NO: 7019 - DNA, 80 bp, synthetic construct
  misc_feature 1..80: note = Synthetic: >PEDV-cand-26170-26249
  source 1..80: mol_type = other DNA
ggcgtacaggtaagtcaattacctaatttcgtcacagtcgccaaggccactacaacaattgtctacggacgtgttggtcg

SEQ ID NO: 7020 - DNA, 80 bp, synthetic construct
  misc_feature 1..80: note = Synthetic: >PEDV-cand-26250-26329
  source 1..80: mol_type = other DNA
ttcagtcaatgcttcatctggcactggttgggctttctatgtccggtccaaacacggcgactactcagctgtgagtaatc

SEQ ID NO: 7021 - DNA, 80 bp, synthetic construct
  misc_feature 1..80: note = Synthetic: >PEDV-cand-26330-26409
  source 1..80: mol_type = other DNA
cgagttcggttctcacagatagtgagaaagtgcttcatttagtctaaacagaaactttatggcttctgtcagttttcagg

SEQ ID NO: 7022 - DNA, 80 bp, synthetic construct
  misc_feature 1..80: note = Synthetic: >PEDV-cand-26410-26489
  source 1..80: mol_type = other DNA
atcgtggccgcaaacgggtgccattatccctctatgcccctcttagggttactaatgacaaacccctttctaaggtactt

SEQ ID NO: 7023 - DNA, 80 bp, synthetic construct
  misc_feature 1..80: note = Synthetic: >PEDV-cand-26490-26569
  source 1..80: mol_type = other DNA
gcaaataatgctgtacccactaataaaggaaataaggaccagcaaattggatactggaatgagcaaattcgctggcgcat

SEQ ID NO: 7024 - DNA, 80 bp, synthetic construct
  misc_feature 1..80: note = Synthetic: >SARSCoV-cand-1100-1179
  source 1..80: mol_type = other DNA
gtcaaagtcattcaaccacgtgttgaaaagaaaaagactgagggtttcatggggcgtatacgctctgtgtaccctgttgc

SEQ ID NO: 7025 - DNA, 80 bp, synthetic construct
  misc_feature 1..80: note = Synthetic: >SARSCoV-cand-1180-1259
  source 1..80: mol_type = other DNA
atctccacaggagtgtaacaatatgcacttgtctaccttgatgaaatgtaatcattgcgatgaagtttcatggcagacgt

SEQ ID NO: 7026 - DNA, 80 bp, synthetic construct
  misc_feature 1..80: note = Synthetic: >SARSCoV-cand-1260-1339
  source 1..80: mol_type = other DNA
gcgactttctgaaagccacttgtgaacattgtggcactgaaaatttagttattgaaggacctactacatgtgggtaccta

SEQ ID NO: 7027 - DNA, 80 bp, synthetic construct
  misc_feature 1..80: note = Synthetic: >SARSCoV-cand-1340-1419
  source 1..80: mol_type = other DNA
cctactaatgctgtagtgaaaatgccatgtcctgcctgtcaagacccagagattggacctgagcatagtgttgcagatta

SEQ ID NO: 7028 - DNA, 80 bp, synthetic construct
  misc_feature 1..80: note = Synthetic: >SARSCoV-cand-1420-1499
  source 1..80: mol_type = other DNA
tcacaaccactcaaacattgaaactcgactccgcaagggaggtaggactagatgttttggaggctgtgtgtttgcctatg

SEQ ID NO: 7029 - DNA, 80 bp, synthetic construct
  misc_feature 1..80: note = Synthetic: >SARSCoV-cand-1500-1579
  source 1..80: mol_type = other DNA
ttggctgctataataagcgtgcctactgggttcctcgtgctagtgctgatattggctcaggccatactggcattactggt

SEQ ID NO: 7030 - DNA, 80 bp, synthetic construct
  misc_feature 1..80: note = Synthetic: >SARSCoV-cand-1580-1659
  source 1..80: mol_type = other DNA
gacaatgtggagaccttgaatgaggatctccttgagatactgagtcgtgaacgtgttaacattaacattgttggcgattt

SEQ ID NO: 7031 - DNA, 80 bp, synthetic construct
  misc_feature 1..80: note = Synthetic: >SARSCoV-cand-1660-1739
  source 1..80: mol_type = other DNA
tcatttgaatgaagaggttgccatcattttggcatctttctctgcttctacaagtgcctttattgacactataaagagtc

SEQ ID NO: 7032 - DNA, 80 bp, synthetic construct
  misc_feature 1..80: note = Synthetic: >SARSCoV-cand-1740-1819
  source 1..80: mol_type = other DNA
ttgattacaagtctttcaaaaccattgttgagtcctgcggtaactataaagttaccaagggaaagcccgtaaaaggtgct

SEQ ID NO: 7033 - DNA, 80 bp, synthetic construct
  misc_feature 1..80: note = Synthetic: >SARSCoV-cand-1820-1899
  source 1..80: mol_type = other DNA
tggaacattggacaacagagatcagttttaacaccactgtgtggttttccctcacaggctgctggtgttatcagatcaat

SEQ ID NO: 7034 - DNA, 80 bp, synthetic construct
  misc_feature 1..80: note = Synthetic: >SARSCoV-cand-1900-1979
  source 1..80: mol_type = other DNA
ttttgcgcgcacacttgatgcagcaaaccactcaattcctgatttgcaaagagcagctgtcaccatacttgatggtattt

SEQ ID NO: 7035 - DNA, 80 bp, synthetic construct
  misc_feature 1..80: note = Synthetic: >SARSCoV-cand-1980-2059
  source 1..80: mol_type = other DNA
ctgaacagtcattacgtcttgtcgacgccatggtttatacttcagacctgctcaccaacagtgtcattattatggcatat

SEQ ID NO: 7036 - DNA, 80 bp, synthetic construct
  misc_feature 1..80: note = Synthetic: >SARSCoV-cand-2060-2139
  source 1..80: mol_type = other DNA
gtaactggtggtcttgtacaacagacttctcagtggttgtctaatcttttgggcactactgttgaaaaactcaggcctat

SEQ ID NO: 7037 - DNA, 80 bp, synthetic construct
  misc_feature 1..80: note = Synthetic: >SARSCoV-cand-2140-2219
  source 1..80: mol_type = other DNA
ctttgaatggattgaggcgaaacttagtgcaggagttgaatttctcaaggatgcttgggagattctcaaatttctcatta

SEQ ID NO: 7038 - DNA, 80 bp, synthetic construct
  misc_feature 1..80: note = Synthetic: >SARSCoV-cand-2220-2299
  source 1..80: mol_type = other DNA
caggtgtttttgacatcgtcaagggtcaaatacaggttgcttcagataacatcaaggattgtgtaaaatgcttcattgat

SEQ ID NO: 7039 - DNA, 80 bp, synthetic construct
  misc_feature 1..80: note = Synthetic: >SARSCoV-cand-2300-2379
  source 1..80: mol_type = other DNA
gttgttaacaaggcactcgaaatgtgcattgatcaagtcactatcgctggcgcaaagttgcgatcactcaacttaggtga

SEQ ID NO: 7040 - DNA, 80 bp, synthetic construct
  misc_feature 1..80: note = Synthetic: >Sparrow-cand-1310-1389
  source 1..80: mol_type = other DNA
ctgaagttaaggttggagctattacctacattaagaccactgactcaccacctctctactttcctaaagtgaagggtggt

SEQ ID NO: 7041 - DNA, 80 bp, synthetic construct
  misc_feature 1..80: note = Synthetic: >Sparrow-cand-1470-1549
  source 1..80: mol_type = other DNA
cctgctggccttcattcaacttcagcaattcttgaaccgcactgcggattcaagtgttgaaatcactgattgccagagct

SEQ ID NO: 7042 - DNA, 80 bp, synthetic construct
  misc_feature 1..80: note = Synthetic: >Sparrow-cand-1550-1629
  source 1..80: mol_type = other DNA
atgaagtctcaccaaccgtgacggtcaagattggaccgtctaaacctggtgacattgttgtagctactgaagaagactac

SEQ ID NO: 7043 - DNA, 80 bp, synthetic construct
  misc_feature 1..80: note = Synthetic: >Sparrow-cand-1630-1709
  source 1..80: mol_type = other DNA
cttaaatgctttgaaacccctgaggttggaaagctttataaggttttccaaacacaatcttgggcgacaattgagcgcag

SEQ ID NO: 7044 - DNA, 80 bp, synthetic construct
  misc_feature 1..80: note = Synthetic: >Sparrow-cand-1710-1789
  source 1..80: mol_type = other DNA
cttctcctcactgaaggtgcgtgtgtcgaatgccctctctcaatttataagtttcctgcaaactcttgctgaaaactttt

SEQ ID NO: 7045 - DNA, 80 bp, synthetic construct
  misc_feature 1..80: note = Synthetic: >Sparrow-cand-1790-1869
  source 1..80: mol_type = other DNA
cttcaattacaactgttgtcactggactcattcatgagttacagagtctgactctggatgtggcagcacgtatcactaac

SEQ ID NO: 7046 - DNA, 80 bp, synthetic construct
  misc_feature 1..80: note = Synthetic: >Sparrow-cand-1870-1949
  source 1..80: mol_type = other DNA
atccaactagtttaccgtgcaggtaagctcattgttgacactactaatgctattgcaaaacttttccagccactctgtga

SEQ ID NO: 7047 - DNA, 80 bp, synthetic construct
  misc_feature 1..80: note = Synthetic: >Sparrow-cand-1950-2029
  source 1..80: mol_type = other DNA
ctttctgtcacccttccttcggaaggttgctggttttgcagtctacactgttggtaaccgtatgcttatgtttaccagct

SEQ ID NO: 7048 - DNA, 80 bp, synthetic construct
  misc_feature 1..80: note = Synthetic: >Sparrow-cand-2030-2109
  source 1..80: mol_type = other DNA
gtggcacttttcttttgactaaagcaaccactaagatacttaacaaggccaaatacatctttgatgttgagcctgagtat

SEQ ID NO: 7049 - DNA, 80 bp, synthetic construct
  misc_feature 1..80: note = Synthetic: >Sparrow-cand-2110-2189
  source 1..80: mol_type = other DNA
cctgtggatgtaacaacttcaaaagttgtagtacatgaaaccttacagcaaactgataccaagcctactagggctctaga

SEQ ID NO: 7050 - DNA, 80 bp, synthetic construct
  misc_feature 1..80: note = Synthetic: >Sparrow-cand-2190-2269
  source 1..80: mol_type = other DNA
ggcggttgacgttgttgtgggtaatactgtgctgcaaatggctactgatggcaccactttctatccttcggatggaagtc

SEQ ID NO: 7051 - DNA, 80 bp, synthetic construct
  misc_feature 1..80: note = Synthetic: >Sparrow-cand-2270-2349
  source 1..80: mol_type = other DNA
atgcctccctaccaggattcaaagcaggttctgacgagctattcattagcttcaattgtgacctgtttgatgatgaaaca

SEQ ID NO: 7052 - DNA, 80 bp, synthetic construct
  misc_feature 1..80: note = Synthetic: >Sparrow-cand-2350-2429
  source 1..80: mol_type = other DNA
aatgctcaaatcaacgaaacactcgctgcatatgagcttaaccaattagttgctccaggtgattctactccacgtcaaat

SEQ ID NO: 7053 - DNA, 80 bp, synthetic construct
  misc_feature 1..80: note = Synthetic: >Sparrow-cand-2430-2509
  source 1..80: mol_type = other DNA
tgcgacgttggtggttgatacacttgttgatgcaataactgaccactttccggagaaaaccattgacttgccagaggact

SEQ ID NO: 7054 - DNA, 80 bp, synthetic construct
  misc_feature 1..80: note = Synthetic: >Sparrow-cand-2510-2589
  source 1..80: mol_type = other DNA
accaagtcttctcagcccatgatgatctcccacttgcccaacatcacataccatcccacctcagcttgtatattcaagct

SEQ ID NO: 7055 - DNA, 80 bp, synthetic construct
  misc_feature 1..80: note = Synthetic: >Sparrow-cand-6430-6509
  source 1..80: mol_type = other DNA
cgcgtcatagctaatgctgcttctcgtaatggcgtaacctgcgctgttactcctgcaactcttgttatgcgtggaaatat

SEQ ID NO: 7056 - DNA, 80 bp, synthetic construct
  misc_feature 1..80: note = Synthetic: >Sparrow-cand-6510-6589
  source 1..80: mol_type = other DNA
tgccactcagcctttgactcgcatcaaggctggagcaccacccgtgcgtcacaagattcttagagttatcttggcacttg

SEQ ID NO: 7057 - DNA, 80 bp, synthetic construct
  misc_feature 1..80: note = Synthetic: >Sparrow-cand-6590-6669
  source 1..80: mol_type = other DNA
ctattgtgtactttgctgccatggcccttgggttcttggctaaccaaattacacttaatactgtgccaactgctaaatct

SEQ ID NO: 7058 - DNA, 80 bp, synthetic construct
  misc_feature 1..80: note = Synthetic: >Sparrow-cand-6670-6749
  source 1..80: mol_type = other DNA
gacattcgagcatccaccttctacgttgtgagggatggtgtcttggatactattaggtcaactgacaagtgttttgctaa

SEQ ID NO: 7059 - DNA, 80 bp, synthetic construct
  misc_feature 1..80: note = Synthetic: >Sparrow-cand-6750-6829
  source 1..80: mol_type = other DNA
caaattcttggcatttgacagctactaccaagctccttacactaattctcctgactgtcctgttgttgtgggtgtcgtgg

SEQ ID NO: 7060 - DNA, 80 bp, synthetic construct
  misc_feature 1..80: note = Synthetic: >Sparrow-cand-6830-6909
  source 1..80: mol_type = other DNA
atgtaaacacgcactctataccaggcattccagcaggagtcatacatagagatggtctcatacttaacatctatgagcaa

SEQ ID NO: 7061 - DNA, 80 bp, synthetic construct
  misc_feature 1..80: note = Synthetic: >Sparrow-cand-6910-6989
  source 1..80: mol_type = other DNA
gccatctatgaaacacatcagcgccagtctatggtcagggatgcactgtctcttaagacggcgaacctgtttaaccttgg

SEQ ID NO: 7062 - DNA, 80 bp, synthetic construct
  misc_feature 1..80: note = Synthetic: >Sparrow-cand-6990-7069
  source 1..80: mol_type = other DNA
caagcgcgttgttgtaggttacacacagcgtgaagtcgttgtgggtacctcctatcttaactcaccggcactttttaatg

SEQ ID NO: 7063 - DNA, 80 bp, synthetic construct
  misc_feature 1..80: note = Synthetic: >Sparrow-cand-7070-7149
  source 1..80: mol_type = other DNA
caaagtgtacctttttgcagtatgatggcaaacgcaatttgtattgctatgatgctgtacctaaagaacacaagctgtac

SEQ ID NO: 7064 - DNA, 80 bp, synthetic construct
  misc_feature 1..80: note = Synthetic: >Sparrow-cand-7150-7229
  source 1..80: mol_type = other DNA
tctgatgtgattcctcacgtagagtatcaggctattgacattaatggtgaccttgttcctttcaagatcccagagcagat

SEQ ID NO: 7065 - DNA, 80 bp, synthetic construct
  misc_feature 1..80: note = Synthetic: >Sparrow-cand-7230-7309
  source 1..80: mol_type = other DNA
tttgttctacccacacatagtgcgctatactagcaatacctattgccgtatgggccactgctttaacacaaaccctggta

SEQ ID NO: 7066 - DNA, 80 bp, synthetic construct
  misc_feature 1..80: note = Synthetic: >Sparrow-cand-7310-7389
  source 1..80: mol_type = other DNA
tttgcatttcatttacggatgcctttccgtatagtgaaaatgtaggacctggtgtttattgtgctgatacctctgtgcag

SEQ ID NO: 7067 - DNA, 80 bp, synthetic construct
  misc_feature 1..80: note = Synthetic: >Sparrow-cand-7390-7469
  source 1..80: mol_type = other DNA
cttttctcaaaccttgttttgggaactgtctctggtatacatgtttttacctcaactgcagcactcttaggatccactat

SEQ ID NO: 7068 - DNA, 80 bp, synthetic construct
  misc_feature 1..80: note = Synthetic: >Sparrow-cand-7470-7549
  source 1..80: mol_type = other DNA
tgtgatcatcctctgtgttgttgcagttcttgctgttcagcgcttcttcaaggagtacacgacctttgttatgtacacct

SEQ ID NO: 7069 - DNA, 80 bp, synthetic construct
  misc_feature 1..80: note = Synthetic: >Sparrow-cand-7550-7629
  source 1..80: mol_type = other DNA
gtggacttgctgctgttaatatcataggcattgcacttatgtataagtgtcttgtctttgcactcttctattatgcaatt

SEQ ID NO: 7070 - DNA, 80 bp, synthetic construct
  misc_feature 1..80: note = Synthetic: >Sparrow-cand-7630-7709
  source 1..80: mol_type = other DNA
tacttatactttgttcttacattcccctcctttaagaggaatgtggcattgttttaccttgctgtagtgattgttccaca

SEQ ID NO: 7071 - DNA, 80 bp, synthetic construct
  misc_feature 1..80: note = Synthetic: >Sparrow-cand-21760-21839
  source 1..80: mol_type = other DNA
tggttccctaacaggagccatggtctttggtggtcttacagctgcagcagccataccttttgctacagcagtacaagctc

SEQ ID NO: 7072 - DNA, 80 bp, synthetic construct
  misc_feature 1..80: note = Synthetic: >Sparrow-cand-21840-21919
  source 1..80: mol_type = other DNA
gtctcaattatgttgccttgcagacaaatgtactccaagaaaaccagaaaattcttgcagaatcatttaatcaagcagtt

SEQ ID NO: 7073 - DNA, 80 bp, synthetic construct
  misc_feature 1..80: note = Synthetic: >Sparrow-cand-21920-21999
  source 1..80: mol_type = other DNA
ggcaacatttcattagcattatcctctgttaatgatgctattcaacaaacttctgaagcactcaatacagtggcaaatgc

SEQ ID NO: 7074 - DNA, 80 bp, synthetic construct
  misc_feature 1..80: note = Synthetic: >Sparrow-cand-22000-22079
  source 1..80: mol_type = other DNA
tatcaacaaaattcaaacagttgttaaccagcaaggcgaggcactctcacacctcactgctcaactgtcaaacaacttcc

SEQ ID NO: 7075 - DNA, 80 bp, synthetic construct
  misc_feature 1..80: note = Synthetic: >Sparrow-cand-22080-22159
  source 1..80: mol_type = other DNA
aagctatctccacttccattcaggacatttacaatcgtcttgaggaagttgaggctaaccagcaagttgaccgccttata

SEQ ID NO: 7076 - DNA, 80 bp, synthetic construct
  misc_feature 1..80: note = Synthetic: >Sparrow-cand-22160-22239
  source 1..80: mol_type = other DNA
acaggtcggttagctgcacttaatgcatatgttacccagttactcaaccagatgtctcagatcagacaatctaggttgct

SEQ ID NO: 7077 - DNA, 80 bp, synthetic construct
  misc_feature 1..80: note = Synthetic: >Sparrow-cand-22240-22319
  source 1..80: mol_type = other DNA
ggcgcaacaaaagatcaatgaatgtgtcaaatcgcagtcctcccgttatggattctgcggcaatggcacacatctcttct

SEQ ID NO: 7078 - DNA, 80 bp, synthetic construct
  misc_feature 1..80: note = Synthetic: >Sparrow-cand-22320-22399
  source 1..80: mol_type = other DNA
caataacacaagcagcacctaatggaatatttttcatgcatgctgtcttagtgccaaccaaatttacccgcgttaatgcc

SEQ ID NO: 7079 - DNA, 80 bp, synthetic construct
  misc_feature 1..80: note = Synthetic: >Sparrow-cand-22400-22479
  source 1..80: mol_type = other DNA
tcagcaggtatttgcgttgataatagagcacttacactaaaggctactcattgcagccgcaactaatactctaccagttt

SEQ ID NO: 7080 - DNA, 80 bp, synthetic construct
  misc_feature 1..80: note = Synthetic: >Sparrow-cand-22480-22559
  source 1..80: mol_type = other DNA
aatgattcctggagagtcacaccacgtaatatgtatgaacctcgcattcccagggctgcggacttcataccactagtaga

SEQ ID NO: 7081 - DNA, 80 bp, synthetic construct
  misc_feature 1..80: note = Synthetic: >Sparrow-cand-22560-22639
  source 1..80: mol_type = other DNA
ttgcagcgtaacgttttacaacaccactgctagtgacctacctaacataatacctgacattgttgatgtcaatcaaactg

SEQ ID NO: 7082 - DNA, 80 bp, synthetic construct
  misc_feature 1..80: note = Synthetic: >Sparrow-cand-22640-22719
  source 1..80: mol_type = other DNA
tcagtgaaatactaggcaatataacatcaccccaaccacccagctggagtgttgattattataacaatacaatcctcaat

SEQ ID NO: 7083 - DNA, 80 bp, synthetic construct
  misc_feature 1..80: note = Synthetic: >Sparrow-cand-22720-22799
  source 1..80: mol_type = other DNA
ctcacactagagattgatgatctacaagaacgatctaaaaacctgtcactcatagctgacaggctacagatctacataga

SEQ ID NO: 7084 - DNA, 80 bp, synthetic construct
  misc_feature 1..80: note = Synthetic: >Sparrow-cand-22800-22879
  source 1..80: mol_type = other DNA
caatcttaacaacaccctagtagaccttgaatggctaaacagggttgaaacttatcttaaatggccatggtatgtttggc

SEQ ID NO: 7085 - DNA, 80 bp, synthetic construct
  misc_feature 1..80: note = Synthetic: >Sparrow-cand-22880-22959
  source 1..80: mol_type = other DNA
ttgccatcttcctagccattgctgcatttgctgcaatcctcataacaatctttctctgcactggttgttgtggaggttgc

SEQ ID NO: 7086 - DNA, 80 bp, synthetic construct
  misc_feature 1..80: note = Synthetic: >Sparrow-cand-22960-23039
  source 1..80: mol_type = other DNA
tttggttgttgtggtggctgctttggccttttctccaagaagaaaagaatcagagacgaccaaccaactcccagctttaa

SEQ ID NO: 7087 - DNA, 80 bp, synthetic construct
  misc_feature 1..80: note = Synthetic: >SARSCoV-cand-240-319
  source 1..80: mol_type = other DNA
gggtgtgaccgaaaggtaagatggagagccttgttcttggtgtcaacgagaaaacacacgtccaactcagtttgcctgtc

SEQ ID NO: 7088 - DNA, 80 bp, synthetic construct
  misc_feature 1..80: note = Synthetic: >SARSRC-cand-240-319
  source 1..80: mol_type = other DNA
gtgaccgaaaggtaagatggagagccttgttcttggtgtcaacgagaaaacacacgtccaactcagtttacctgttcttc

SEQ ID NO: 7089 - DNA, 80 bp, synthetic construct
  misc_feature 1..80: note = Synthetic: >SARSCoV2-cand-250-329
  source 1..80: mol_type = other DNA
cgaaaggtaagatggagagccttgtccctggtttcaacgagaaaacacacgtccaactcagtttgcctgttttacaggtt

SEQ ID NO: 7090 - DNA, 80 bp, synthetic construct
  misc_feature 1..80: note = Synthetic: >BM48_31-cand-170-249
  source 1..80: mol_type = other DNA
gtgaccgaaaggtaagatggagagccttgtccctggtttcaacgagaaaacacacgtccaactcagtttacctgttttgc

SEQ ID NO: 7091 - DNA, 80 bp, synthetic construct
  misc_feature 1..80: note = Synthetic: >BtRl_BetaCoV-cand-160-239
  source 1..80: mol_type = other DNA
actcgtccttcttctgcagactgcttacggtttcgtccgtgtcgcagtcgatcatcagcatacctaggtttcgtccgggt

SEQ ID NO: 7092 - DNA, 80 bp, synthetic construct
  misc_feature 1..80: note = Synthetic: >WIV16-cand-160-239
  source 1..80: mol_type = other DNA
agtaactcgtccctcttctgcagactgcttacggttccgtccgtgttgcagtcgatcatcagcatacctaggtttcgtcc

SEQ ID NO: 7093 - DNA, 80 bp, synthetic construct
  misc_feature 1..80: note = Synthetic: >BM48_31-cand-90-169
  source 1..80: mol_type = other DNA
actcgtctatcttctgcaggctgcttacggtttcgtccgtgttgcagccgatcatcagcatacctaggtttcgtccgggt

SEQ ID NO: 7094 - DNA, 80 bp, synthetic construct
  misc_feature 1..80: note = Synthetic: >SARSCoV2-cand-170-249
  source 1..80: mol_type = other DNA
tctatcttctgcaggctgcttacggtttcgtccgtgttgcagccgatcatcagcacatctaggtttcgtccgggtgtgac

SEQ ID NO: 7095 - DNA, 80 bp, synthetic construct
  misc_feature 1..80: note = Synthetic: >HKU18-cand-12590-12669
  source 1..80: mol_type = other DNA
acaccttgccagaccttagctactatgtctagcggtatcgctaaacagtcagtcaagcccgggcattttaatcaacattt

SEQ ID NO: 7096 - DNA, 80 bp, synthetic construct
  misc_feature 1..80: note = Synthetic: >HKU17-cand-12570-12649
  source 1..80: mol_type = other DNA
agatttaagaactccttgccagaccttggctactatgtctagcggcattgctaaacagtcagtcaagcccgggcatttta

SEQ ID NO: 7097 - DNA, 80 bp, synthetic construct
  misc_feature 1..80: note = Synthetic: >Sparrow-cand-12590-12669
  source 1..80: mol_type = other DNA
aacaccttgccagaccttggctactatgtctagcggcattgctaaacagtcagtcaagcccgggcattttaaccaacatt

SEQ ID NO: 7098 - DNA, 80 bp, synthetic construct
  misc_feature 1..80: note = Synthetic: >Delta-cand-14070-14149
  source 1..80: mol_type = other DNA
ttgtcagaccttggctactatgtctagcggaattgctaaacagtcagtcaagcccgggcattttaatcaacacttctaca

SEQ ID NO: 7099 - DNA, 80 bp, synthetic construct
  misc_feature 1..80: note = Synthetic: >HKU17-cand-14510-14589
  source 1..80: mol_type = other DNA
agcttgctacatctaactatgacactattgaaccttaccaaaaggccaatcgtgcaccactctcacttatgctcttcgct

SEQ ID NO: 7100 - DNA, 80 bp, synthetic construct
  misc_feature 1..80: note = Synthetic: >BtSk_AlphaCoV-cand-15170-15249
  source 1..80: mol_type = other DNA
aacacgataatcctgagtacaggcgtgttttcacggttatgttggattgggttaagcacttgtacaagacactcaaccaa

SEQ ID NO: 7101 - DNA, 80 bp, synthetic construct
  misc_feature 1..80: note = Synthetic: >Sb512-cand-15220-15299
  source 1..80: mol_type = other DNA
acgataatcctgagtacaggcgtgttttcacggttatgttggattgggttaagcacttgtacaagacacttaaccaagga

SEQ ID NO: 7102 - DNA, 80 bp, synthetic construct
  misc_feature 1..80: note = Synthetic: >Sk512R-cand-15200-15279
  source 1..80: mol_type = other DNA
cctctttccaaacacgacaatcctgagtacaggcgtgttttcacggttatgttggattgggttaagcacttgtacaagac

SEQ ID NO: 7103 - DNA, 80 bp, synthetic construct
  misc_feature 1..80: note = Synthetic: >Sb512-cand-15620-15699
  source 1..80: mol_type = other DNA
cgaccacaagcctagactttcttttcctttgtgttctagtggtaatgtctttgggctgtataaaaattcagctactggtt

SEQ ID NO: 7104 - DNA, 80 bp, synthetic construct
  misc_feature 1..80: note = Synthetic: >BtSk_AlphaCoV-cand-15570-15649
  source 1..80: mol_type = other DNA
tgtcgaccacaagcctagactttcttttcctttgtgttctagtggtaacgtctttgggctgtataaaaattcagctactg

SEQ ID NO: 7105 - DNA, 80 bp, synthetic construct
  misc_feature 1..80: note = Synthetic: >Sk512R-cand-15600-15679
  source 1..80: mol_type = other DNA
gttattggtgtgtcgaccacaagcctagactttcttttcctttgtgttctagtggtaatgtctttgggctgtataaaaat

SEQ ID NO: 7106 - DNA, 80 bp, synthetic construct
  misc_feature 1..80: note = Synthetic: >Sb512-cand-10830-10909
  source 1..80: mol_type = other DNA
cctgttattgggttattgtaactgtgtctattatggctcgctatactggattaacaggttttgcaagctcacattgggtt

SEQ ID NO: 7107 - DNA, 80 bp, synthetic construct
  misc_feature 1..80: note = Synthetic: >BtSk_AlphaCoV-cand-10790-10869
  source 1..80: mol_type = other DNA
ttattgggttattgtaactgtgtctattatggctcgctatactggattaacaggttttgcaagctcacattgggttgcta

SEQ ID NO: 7108 - DNA, 80 bp, synthetic construct
  misc_feature 1..80: note = Synthetic: >Sk512R-cand-10820-10899
  source 1..80: mol_type = other DNA
gtacctgttattgggttattgtaactgtgtctattatggctcgctatactggattaacaggttttgcaaacttacattgg

SEQ ID NO: 7109 - DNA, 80 bp, synthetic construct
  misc_feature 1..80: note = Synthetic: >AlphaSp-cand-10840-10919
  source 1..80: mol_type = other DNA
ggttattgtaactgtgtcttttatggctcgttatactggattaacaggttttgcaagctcacattgggttgctacgactt

SEQ ID NO: 7110 - DNA, 80 bp, synthetic construct
  misc_feature 1..80: note = Synthetic: >Sb512-cand-15700-15779
  source 1..80: mol_type = other DNA
caccagatgtggatgactttaatacgttagccacctctgattggacagatgtcaaagattataagttagcaaatgacgtt

SEQ ID NO: 7111 - DNA, 80 bp, synthetic construct
  misc_feature 1..80: note = Synthetic: >BtSk_AlphaCoV-cand-15650-15729
  source 1..80: mol_type = other DNA
gttcaccagatgtggatgactttaatacgttagccacctctgattggacggatgtcaaagattataagttagcaaacgac

SEQ ID NO: 7112 - DNA, 80 bp, synthetic construct
  misc_feature 1..80: note = Synthetic: >Sk512R-cand-15680-15759
  source 1..80: mol_type = other DNA
tcagctactggttcaccagatgtggatgactttaatacgttagcaacctctgattggacggatgtcaaagattataagtt

SEQ ID NO: 7113 - DNA, 80 bp, synthetic construct
  misc_feature 1..80: note = Synthetic: >Sb512-cand-10590-10669
  source 1..80: mol_type = other DNA
gcatacttttaggtttttgcaaacacctaacaagatcttttcttatgttgttgcagtgttaacagttttgtacacctatt

SEQ ID NO: 7114 - DNA, 80 bp, synthetic construct
  misc_feature 1..80: note = Synthetic: >BtSk_AlphaCoV-cand-10550-10629
  source 1..80: mol_type = other DNA
acttttaggtttttgcaaacacccaacaagatcttttcttatgttgttgcagtgttaacagttttgtacacctattatta

SEQ ID NO: 7115 - DNA, 80 bp, synthetic construct
  misc_feature 1..80: note = Synthetic: >Sk512R-cand-10580-10659
  source 1..80: mol_type = other DNA
tttgcatacctttaggtttttgcaaacacctaacaagatcttctcttatgttgttgcagtgttaacagttttgtacacct

SEQ ID NO: 7116 - DNA, 80 bp, synthetic construct
  misc_feature 1..80: note = Synthetic: >AlphaSp-cand-10600-10679
  source 1..80: mol_type = other DNA
tttttgcaaacacccaacaagatattttcttatgttgttgcagtgttaacagttttgtacacctattattattccaccga

SEQ ID NO: 7117 - DNA, 80 bp, synthetic construct
  misc_feature 1..80: note = Synthetic: >BtSk_AlphaCoV-cand-15330-15409
  source 1..80: mol_type = other DNA
gtatgaacagtcttctgtattgcaatctgctggtctatgtgttgtctgctcttcacagacagtcctaagatgtggcgatt

SEQ ID NO: 7118 - DNA, 80 bp, synthetic construct
  misc_feature 1..80: note = Synthetic: >Sb512-cand-15380-15459
  source 1..80: mol_type = other DNA
tgaacagtcttctgtattgcaatctgcgggtctatgtgttgtctgctcttcacagacagtcctaagatgtggcgattgta

SEQ ID NO: 7119 - DNA, 80 bp, synthetic construct
  misc_feature 1..80: note = Synthetic: >Sk512R-cand-15360-15439
  source 1..80: mol_type = other DNA
atgctagtatgtatgaacagtcttctgtattgcaatctgcgggtctatgtgttgtctgctcttcacagacagtcctaaga

SEQ ID NO: 7120 - DNA, 80 bp, synthetic construct
  misc_feature 1..80: note = Synthetic: >Sb512-cand-16020-16099
  source 1..80: mol_type = other DNA
aatgacgccgttagctacaagtccacagcgacaacaaagttggtacccggtatggtatttgtgctcacttcgcacaatgt

SEQ ID NO: 7121 - DNA, 80 bp, synthetic construct
  misc_feature 1..80: note = Synthetic: >BtSk_AlphaCoV-cand-15970-16049
  source 1..80: mol_type = other DNA
gacaatgacgccgttagctacaagtccacagcgacaacaaagttggtacccggtatggtatttgtgctcacttcgcacaa

SEQ ID NO: 7122 - DNA, 80 bp, synthetic construct
  misc_feature 1..80: note = Synthetic: >Sk512R-cand-16000-16079
  source 1..80: mol_type = other DNA
attagattacgacaatgacgccgttagctacaagtccacagcgacaacaaagttggtacccggtatggtatttgtgctca

SEQ ID NO: 7123 - DNA, 80 bp, synthetic construct
  misc_feature 1..80: note = Synthetic: >Sk512R-cand-13600-13679
  source 1..80: mol_type = other DNA
gattgatggagtgccgttggtgacaactgcaggctatcattttaaacaattgggtatagtttggaacaaagatcttaatt

SEQ ID NO: 7124 - DNA, 80 bp, synthetic construct
  misc_feature 1..80: note = Synthetic: >BtSk_AlphaCoV-cand-13570-13649
  source 1..80: mol_type = other DNA
ggcgtgccgttggtgacaactgcaggctatcattttaaacaattgggtatagtttggaacaaagatcttaatttacattc

SEQ ID NO: 7125 - DNA, 80 bp, synthetic construct
  misc_feature 1..80: note = Synthetic: >Sb512-cand-13620-13699
  source 1..80: mol_type = other DNA
ccgttggtgacaactgcaggctaccattttaaacaattgggtatagtttggaacaaagatcttaatttacattcaagcag

SEQ ID NO: 7126 - DNA, 80 bp, synthetic construct
  misc_feature 1..80: note = Synthetic: >Sb512-cand-18600-18679
  source 1..80: mol_type = other DNA
ggtgcagtctgcagtaaacattgtgctttgtaccataactatgttatggcatacaacacttttactactgctggttttac

SEQ ID NO: 7127 - DNA, 80 bp, synthetic construct
  misc_feature 1..80: note = Synthetic: >Sb512-cand-9640-9719
  source 1..80: mol_type = other DNA
aaaccaggtgattcttttaacattttagcatgttatgacggtagtgctgcaggtgtttatggcgttaatatgcgtacaaa

SEQ ID NO: 7128 - DNA, 80 bp, synthetic construct
  misc_feature 1..80: note = Synthetic: >FelineAlpha1-cand-18960-19039
  source 1..80: mol_type = other DNA
gtagtacaatggaagaagactttcttagtatggatactacactcttcatccaaaagtatggtcttgaggattatggtttc

SEQ ID NO: 7129 - DNA, 80 bp, synthetic construct
  misc_feature 1..80: note = Synthetic: >Sb512-cand-10510-10589
  source 1..80: mol_type = other DNA
tttgactacaaggtgcctttcggtggatttaatgttacaggtgttcttaacatatcactttgttgttttgttatgggttt

SEQ ID NO: 7130 - DNA, 80 bp, synthetic construct
  misc_feature 1..80: note = Synthetic: >Sk512R-cand-10500-10579
  source 1..80: mol_type = other DNA
gaatttgactacaaggtgcctttcggtggatttaatgttacaggtgttcttaacatatcactttgttgttttgttatggg

SEQ ID NO: 7131 - DNA, 80 bp, synthetic construct
  misc_feature 1..80: note = Synthetic: >229ER-cand-16800-16879
  source 1..80: mol_type = other DNA
aaaccctacatggagtaaagctgtttttatttcaccttacaatagtcagaactatgtagctgctaggcttttaggtttac

SEQ ID NO: 7132 - DNA, 80 bp, synthetic construct
  misc_feature 1..80: note = Synthetic: >229E-cand-16820-16899
  source 1..80: mol_type = other DNA
acatggagtaaagctgtatttatttcaccttataatagtcagaactatgtagctgctaggcttttaggtttacaaactca

SEQ ID NO: 7133 - DNA, 80 bp, synthetic construct
  misc_feature 1..80: note = Synthetic: >BetaCoV1-cand-23710-23789
  source 1..80: mol_type = other DNA
tctaccacagattatgttggtagctatgatattaaccatggagatgttgggttttctagcatccttaagggtttgactta

SEQ ID NO: 7134 - DNA, 80 bp, synthetic construct
  misc_feature 1..80: note = Synthetic: >HKU5R-cand-16080-16159
  source 1..80: mol_type = other DNA
aaaccgatttgaaaaaaggtccacatgagttttgctcacagcatacacttttcataaaggatggtgacgatggttacttc

SEQ ID NO: 7135 - DNA, 80 bp, synthetic construct
  misc_feature 1..80: note = Synthetic: >HKU5-cand-16080-16159
  source 1..80: mol_type = other DNA
tggaaaccgatttgaaaaaaggtccacatgagttttgctcacagcatacacttttcataaaggatggtgacgatggttac

SEQ ID NO: 7136 - DNA, 80 bp, synthetic construct
  misc_feature 1..80: note = Synthetic: >Lucheng19-cand-9360-9439
  source 1..80: mol_type = other DNA
tggtttggtagaaccctgtattgttaaagtaacctaccacaactcttaccttaatggtgtctggcttggcgatcaggttt

SEQ ID NO: 7137 - DNA, 80 bp, synthetic construct
  misc_feature 1..80: note = Synthetic: >HKU5-cand-1040-1119
  source 1..80: mol_type = other DNA
tgtgcaacgtaaggacgttgcgtattcaaagcaatctgcctttactatgaatagtatagtccaattggacaccatggagg

SEQ ID NO: 7138 - DNA, 80 bp, synthetic construct
  misc_feature 1..80: note = Synthetic: >MbCoV1-cand-17060-17139
  source 1..80: mol_type = other DNA
aaggattacaatgtagtcacacagcgtatgtgtgcagtaggtcctgatgtgttcttgcataaatgttatcgttgtcctgc

SEQ ID NO: 7139 - DNA, 80 bp, synthetic construct
  misc_feature 1..80: note = Synthetic: >MsbCoV1-cand-17040-17119
  source 1..80: mol_type = other DNA
acttgaacctaaggactacaatgtagtcacacagcgtatgtgtgcagtaggtcctgatgtgttcttgcataaatgttatc

SEQ ID NO: 7140 - DNA, 80 bp, synthetic construct
  misc_feature 1..80: note = Synthetic: >HKU5-cand-9600-9679
  source 1..80: mol_type = other DNA
ttccagcctgtcacctacttccaacttagtacttcgttggctttgggtgtcatgctttgtatcttcttgacaattgcctt

SEQ ID NO: 7141 - DNA, 80 bp, synthetic construct
  misc_feature 1..80: note = Synthetic: >HKU5R-cand-9600-9679
  source 1..80: mol_type = other DNA
cagcctgtcacctatttccaacttagtacttcgttggctttgggtgtcatgctttgtatcttcttgacaattgcctttta

SEQ ID NO: 7142 - DNA, 80 bp, synthetic construct
  misc_feature 1..80: note = Synthetic: >WIV16-cand-13550-13629
  source 1..80: mol_type = other DNA
aaggcaatttattagactcttactttgtagttaagaggcatactatgtctaactaccaacatgaagaggctatttataac

SEQ ID NO: 7143 - DNA, 80 bp, synthetic construct
  misc_feature 1..80: note = Synthetic: >SARSCoV-cand-13560-13639
  source 1..80: mol_type = other DNA
aggcaatttattagactcttactttgtagttaagaggcatactatgtctaactaccaacatgaagagactatttataact

SEQ ID NO: 7144 - DNA, 80 bp, synthetic construct
  misc_feature 1..80: note = Synthetic: >Sparrow-cand-5630-5709
  source 1..80: mol_type = other DNA
aaggcagaaaatacccatctgttattgaaactaatggcgggtttaccatctgtaaagagcacaacttctattgtaaggac

SEQ ID NO: 7145 - DNA, 80 bp, synthetic construct
  misc_feature 1..80: note = Synthetic: >HKU17-cand-5610-5689
  source 1..80: mol_type = other DNA
ctgtcgttcaaggcaggaaatacccatctgttattgaaaccaatggcgggtttaccatctgtaaagagcacaacttctat

SEQ ID NO: 7146 - DNA, 80 bp, synthetic construct
  misc_feature 1..80: note = Synthetic: >HKU4R-cand-3160-3239
  source 1..80: mol_type = other DNA
agatgattatctttctgatgagctgcctattgctgatgatgaagaagcttgggctcgcgctgtggaagaagtcatgcctt

SEQ ID NO: 7147 - DNA, 80 bp, synthetic construct
  misc_feature 1..80: note = Synthetic: >HKU4-cand-3170-3249
  source 1..80: mol_type = other DNA
atgattatctttctgatgagctgcctattgctgatgatgaagaagcttgggctcgcgctgtagaagaagtcatgcctttg

SEQ ID NO: 7148 - DNA, 80 bp, synthetic construct
  misc_feature 1..80: note = Synthetic: >Sb512-cand-3180-3259
  source 1..80: mol_type = other DNA
tgatgtgccagactactttgtctatgacgaagagggtggcacagacttgaatctaactattatggtatctcagtggcctt

SEQ ID NO: 7149 - DNA, 80 bp, synthetic construct
  misc_feature 1..80: note = Synthetic: >Sk512R-cand-3170-3249
  source 1..80: mol_type = other DNA
ccttgatgtgccggattactttgtctatgacgaagagggtggcacagacttgaatctaactattatggtatctcagtggc

SEQ ID NO: 7150 - DNA, 80 bp, synthetic construct
  misc_feature 1..80: note = Synthetic: >HKU4-cand-2450-2529
  source 1..80: mol_type = other DNA
aaggccgtgaagcccttttgtttaatagtggaacatatttttgtctttccactaaagccaaaacattacaggatcaaatg

SEQ ID NO: 7151 - DNA, 80 bp, synthetic construct
  misc_feature 1..80: note = Synthetic: >HKU4R-cand-2440-2519
  source 1..80: mol_type = other DNA
tgaaggccgtgaagctcttttgtttaatagtggaacatatttttgtctttccactaaagccaaaacattacaggatcaaa

SEQ ID NO: 7152 - DNA, 80 bp, synthetic construct
  misc_feature 1..80: note = Synthetic: >HKU5R-cand-25530-25609
  source 1..80: mol_type = other DNA
actacactgcttaacctcaacacagagttgatggtgctgagtgaagtagttaaacaattaaatgaatcctacatcgactt

SEQ ID NO: 7153 - DNA, 80 bp, synthetic construct
  misc_feature 1..80: note = Synthetic: >HKU5-cand-25540-25619
  source 1..80: mol_type = other DNA
ctacactgcttaacctcaacacagagttgatggtgctgagtgaagttgttaaacaattaaatgaatcctatatcgacttg

SEQ ID NO: 7154 - DNA, 80 bp, synthetic construct
  misc_feature 1..80: note = Synthetic: >HKU5-cand-15440-15519
  source 1..80: mol_type = other DNA
gtcatagggactactaagttctatggtggttgggactttatgttaaaaaccttgtataaggatgttgataatcctcactt

SEQ ID NO: 7155 - DNA, 80 bp, synthetic construct
  misc_feature 1..80: note = Synthetic: >HKU5R-cand-15430-15509
  source 1..80: mol_type = other DNA
cacgtgcgtcatagggactactaagttctatggtggttgggactttatgttaaaaaccttgtataaggatgttgataatc

SEQ ID NO: 7156 - DNA, 80 bp, synthetic construct
  misc_feature 1..80: note = Synthetic: >HKU5R-cand-3370-3449
  source 1..80: mol_type = other DNA
aagtgcctagtgcttgtgtgttggaagcctctcaagtagctaacgcggctgaggttgaatcatgtgaggcagaagtttcg

SEQ ID NO: 7157 - DNA, 80 bp, synthetic construct
  misc_feature 1..80: note = Synthetic: >HKU5-cand-3360-3439
  source 1..80: mol_type = other DNA
gaagaagtggaagtgcctagtgcttgtgtgttggaagcctctcaagtagctaacgcggctgaggttgaatcgtgtgaggc

SEQ ID NO: 7158 - DNA, 80 bp, synthetic construct
  misc_feature 1..80: note = Synthetic: >229ER-cand-15920-15999
  source 1..80: mol_type = other DNA
tgacttataaatccactgctactactaagttagtgccaggcatgctgtttattttgacttctcataatgttgctccactt

SEQ ID NO: 7159 - DNA, 80 bp, synthetic construct
  misc_feature 1..80: note = Synthetic: >AlphaMink-cand-27380-27459
  source 1..80: mol_type = other DNA
aagtggctaaagaacaaagatctcgttctaaatctcgtgagaggtcggccacacctgtgccaacacctgtgagtgctaca

SEQ ID NO: 7160 - DNA, 80 bp, synthetic construct
  misc_feature 1..80: note = Synthetic: >Alpha2-cand-27370-27449
  source 1..80: mol_type = other DNA
caagtggctaaagaacaaagatctcgttctaaatctcgtgagagggcggccacacctgtgccaacaactgtgagtgctac

SEQ ID NO: 7161 - DNA, 80 bp, synthetic construct
  misc_feature 1..80: note = Synthetic: >Delta-cand-17630-17709
  source 1..80: mol_type = other DNA
atgagtataatggcgtccatccagctcatgctttgacctggcatgattgtggtgcagagtaccgctgtgaggagccactt

SEQ ID NO: 7162 - DNA, 80 bp, synthetic construct
  misc_feature 1..80: note = Synthetic: >HKU15-cand-16020-16099
  source 1..80: mol_type = other DNA
aatggcgtccatccagctcatgctttgacctggcatgattgtggtgcagagtaccgctgtgaggagccacttgctaaatt

SEQ ID NO: 7163 - DNA, 80 bp, synthetic construct
  misc_feature 1..80: note = Synthetic: >BetaSp-cand-28380-28459
  source 1..80: mol_type = other DNA
aagtgtcaaaacccataagcttttaaagcccgtaatctaaccttcacaatgaaaagtgatagtgtgctcttcataggtaa

SEQ ID NO: 7164 - DNA, 80 bp, synthetic construct
  misc_feature 1..80: note = Synthetic: >BetaCoV1-cand-28270-28349
  source 1..80: mol_type = other DNA
caaaacccataagcttttaaagcccgtaatctaaccttcacaatgaaaagtgatagtgtgctcttcataggtaagattat

SEQ ID NO: 7165 - DNA, 80 bp, synthetic construct
  misc_feature 1..80: note = Synthetic: >Alpha2-cand-23450-23529
  source 1..80: mol_type = other DNA
ataatgccatttatcaaacttcgcagagtttgtcaactgtggcacaggctttaactaaagttcaagatgttgtcaattcg

SEQ ID NO: 7166 - DNA, 80 bp, synthetic construct
  misc_feature 1..80: note = Synthetic: >WIV16-cand-14750-14829
  source 1..80: mol_type = other DNA
caatgtgtgatatcagacaactcctattcgtagttgaagttgttgacaaatactttgattgttacgatggtggctgtatt

SEQ ID NO: 7167 - DNA, 80 bp, synthetic construct
  misc_feature 1..80: note = Synthetic: >SARSCoV-cand-14760-14839
  source 1..80: mol_type = other DNA
aatgtgtgatatcagacaactcctattcgtagttgaagttgttgataaatactttgattgttacgatggtggctgtatta

SEQ ID NO: 7168 - DNA, 80 bp, synthetic construct
  misc_feature 1..80: note = Synthetic: >BetaCoV1-cand-11980-12059
  source 1..80: mol_type = other DNA
gttatatgaatgctaatgggttgcgtccaccacgtaatagttttgaagccttgattcttaattttaagttgcttggtatt

SEQ ID NO: 7169 - DNA, 80 bp, synthetic construct
  misc_feature 1..80: note = Synthetic: >MbCoV1-cand-19620-19699
  source 1..80: mol_type = other DNA
ctagtcatgataataagcccgttacatggtactactatgttcgtaaagatggagtttttgttgaccaatgtgatggtatt

SEQ ID NO: 7170 - DNA, 80 bp, synthetic construct
  misc_feature 1..80: note = Synthetic: >MsbCoV1-cand-19600-19679
  source 1..80: mol_type = other DNA
tgtccaattactagtcatgaaaataagcctgttacatggtactactatgttcgtaaagatggagtttttgttgaccaatg

SEQ ID NO: 7171 - DNA, 80 bp, synthetic construct
  misc_feature 1..80: note = Synthetic: >AlphaMink-cand-23140-23219
  source 1..80: mol_type = other DNA
ctgtggacgaagattacaaacgttgcaccaaaggtgctgatattgctgatttagcatgtgcacagtattataatggtatt

SEQ ID NO: 7172 - DNA, 80 bp, synthetic construct
  misc_feature 1..80: note = Synthetic: >Alpha2-cand-23130-23209
  source 1..80: mol_type = other DNA
agtggatgaagattacaagcgttgcaccaaaggttctgacattgctgatttagcatgtgcacagtattataatggtatta

SEQ ID NO: 7173 - DNA, 80 bp, synthetic construct
  misc_feature 1..80: note = Synthetic: >HKU5R-cand-13590-13669
  source 1..80: mol_type = other DNA
aataccccgtgtaatgtttgtcaattttggataggacatggttgtaattgtgatgctcttcgtggtactacaattcccca

SEQ ID NO: 7174 - DNA, 80 bp, synthetic construct
  misc_feature 1..80: note = Synthetic: >HKU5-cand-13600-13679
  source 1..80: mol_type = other DNA
cgtgtaatgtttgtcaattttggataggacatggttgtaattgtgatgctcttcgtggtactacaattccccagtccaaa

SEQ ID NO: 7175 - DNA, 80 bp, synthetic construct
  misc_feature 1..80: note = Synthetic: >HKU20_FJ376622-cand-480-559
  source 1..80: mol_type = other DNA
tagtgactaggtgtaagtgatctgatctggacgtattgcgttgcgcaagtgcaacacccataggagcgtggaatcctatt

SEQ ID NO: 7176 - DNA, 80 bp, synthetic construct
  misc_feature 1..80: note = Synthetic: >HKU18-cand-480-559
  source 1..80: mol_type = other DNA
ctagtgactaggtgtaagtgatctgatctggacgtatcgtgttgcgcaagtacagcacccataggagcgtgcaatcctat

SEQ ID NO: 7177 - DNA, 80 bp, synthetic construct
  misc_feature 1..80: note = Synthetic: >HKU4R-cand-1560-1639
  source 1..80: mol_type = other DNA
gtactatgtactttattcctcgtgctaaatcgtgtgtctcacgcataggtgatgcaatctttactggttgcacaggcact

SEQ ID NO: 7178 - DNA, 80 bp, synthetic construct
  misc_feature 1..80: note = Synthetic: >BetaCoV1-cand-14060-14139
  source 1..80: mol_type = other DNA
actatgttggatctttgctatgcattgcgtcattttgatcgcaatgactgctcattattatgtgatattctttgcttgta

SEQ ID NO: 7179 - DNA, 80 bp, synthetic construct
  misc_feature 1..80: note = Synthetic: >SEAC-cand-23400-23479
  source 1..80: mol_type = other DNA
ttgctaatgtcattgccgtttcacgtggtgctaattacactacattgaacaaaacttttgacatacctgaattgaatagt

SEQ ID NO: 7180 - DNA, 80 bp, synthetic construct
  misc_feature 1..80: note = Synthetic: >FelineAlpha1-cand-18560-18639
  source 1..80: mol_type = other DNA
ctcacacctccattaacaatacttagaaatctaggtattgtcgcaacatataaatttgtgttgtgggattatgaagctga

SEQ ID NO: 7181 - DNA, 80 bp, synthetic construct
  misc_feature 1..80: note = Synthetic: >HKU4R-cand-4600-4679
  source 1..80: mol_type = other DNA
gaactcagatgttgctattcaaacacctgagacagcatttataaacaatgttacttccaatgggggttatcacagttggc

SEQ ID NO: 7182 - DNA, 80 bp, synthetic construct
  misc_feature 1..80: note = Synthetic: >229ER-cand-15120-15199
  source 1..80: mol_type = other DNA
cgagtacaggaaagtgttttatgcactgttagactgggttaaacatctcaataagactcttaatgaaggtgttttggagt

SEQ ID NO: 7183 - DNA, 80 bp, synthetic construct
  misc_feature 1..80: note = Synthetic: >229E-cand-15140-15219
  source 1..80: mol_type = other DNA
aggaaagtgttttatgcactgttagactgggttaaatatctcaataaaactcttaatgaaggtgttttggagtcattctc

SEQ ID NO: 7184 - DNA, 80 bp, synthetic construct
  misc_feature 1..80: note = Synthetic: >BetaSp-cand-4120-4199
  source 1..80: mol_type = other DNA
actcctattggcgctgcttgaattgtgggattgatagtgagtataaaggccttgatgccatgttcttctatggagatgta

SEQ ID NO: 7185 - DNA, 80 bp, synthetic construct
  misc_feature 1..80: note = Synthetic: >Sb512-cand-18200-18279
  source 1..80: mol_type = other DNA
catacgttgtgttgttacagacgccagttggtattgttatgataaaaatcctacaaataccaatgttaaaatgttagagt

SEQ ID NO: 7186 - DNA, 80 bp, synthetic construct
  misc_feature 1..80: note = Synthetic: >BtSk_AlphaCoV-cand-18150-18229
  source 1..80: mol_type = other DNA
aggcatacgttgtgttgttacagacgccagttggtattgttatgataaaaatcctacaaataccaatgttaaaatgttag

SEQ ID NO: 7187 - DNA, 80 bp, synthetic construct
  misc_feature 1..80: note = Synthetic: >HKU5-cand-11600-11679
  source 1..80: mol_type = other DNA
actctacagacctaatgcatcaaatttggctttagccttaggtagtgccatggtttggttctacacttatactacaggtg

SEQ ID NO: 7188 - DNA, 80 bp, synthetic construct
  misc_feature 1..80: note = Synthetic: >MsbCoV1-cand-7450-7529
  source 1..80: mol_type = other DNA
tggcaacacttttattaatgagactgtggcacgtgagctttccaatgttgttaaaactaatgtacaacctacaggtgaat

SEQ ID NO: 7189 - DNA, 80 bp, synthetic construct
  misc_feature 1..80: note = Synthetic: >FelineAlpha1-cand-18880-18959
  source 1..80: mol_type = other DNA
tgtgcgcaagaatggcgagtacgtcgagcagattgacagttattatacacagggacgtacttttgaaacctttaaacctc

SEQ ID NO: 7190 - DNA, 80 bp, synthetic construct
  misc_feature 1..80: note = Synthetic: >MbCoV1-cand-19380-19459
  source 1..80: mol_type = other DNA
gtacttacaaatttgttctctgggattatgaagctgaccgtccttttactaattacactaaagatgtgtgtgcttttact

SEQ ID NO: 7191 - DNA, 80 bp, synthetic construct
  misc_feature 1..80: note = Synthetic: >MsbCoV1-cand-19360-19439
  source 1..80: mol_type = other DNA
ggtgttacttgtacttacaaatttgttctttgggattatgaagctgaccgtccttttactaattacactaaagatgtgtg

SEQ ID NO: 7192 - DNA, 80 bp, synthetic construct
  misc_feature 1..80: note = Synthetic: >BtSk_AlphaCoV-cand-580-659
  source 1..80: mol_type = other DNA
tatacctgttgatcaatttatgtgcggtgcagatggtgcccctgtcatccaggagggtgattggactttcatggattact

SEQ ID NO: 7193 - DNA, 80 bp, synthetic construct
  misc_feature 1..80: note = Synthetic: >Sk512R-cand-610-689
  source 1..80: mol_type = other DNA
gtactactatacctgttgatcaatttatgtgcggtgcagatggtgcccctgtcatccaggagggtgattggactttcatg

SEQ ID NO: 7194 - DNA, 80 bp, synthetic construct
  misc_feature 1..80: note = Synthetic: >229ER-cand-14960-15039
  source 1..80: mol_type = other DNA
atgaaaatggtaagtattatctaccatacccagatcctagccgtattatttctgctggtgtttttgtggatgacattact

SEQ ID NO: 7195 - DNA, 80 bp, synthetic construct
  misc_feature 1..80: note = Synthetic: >229E-cand-14980-15059
  source 1..80: mol_type = other DNA
tggtaagtattatctaccatacccagatcctagccgtattatttctgctggtgtttttgtggatgacattaccaagactg

SEQ ID NO: 7196 - DNA, 80 bp, synthetic construct
  misc_feature 1..80: note = Synthetic: >HKU5R-cand-24400-24479
  source 1..80: mol_type = other DNA
agtacaggagtgctattgaagaccttctcttcaacaaggttactattgctgatcctggctatatgcaaggctatgatgaa

SEQ ID NO: 7197 - DNA, 80 bp, synthetic construct
  misc_feature 1..80: note = Synthetic: >Alpha2-cand-9330-9409
  source 1..80: mol_type = other DNA
agtacattttgtgtacatgcatcatttagaacttggaaatggttctcatgtaggttcagattttaatggtgttatgtatg

SEQ ID NO: 7198 - DNA, 80 bp, synthetic construct
  misc_feature 1..80: note = Synthetic: >AlphaMink-cand-9340-9419
  source 1..80: mol_type = other DNA
cagtacattttgtgtacatgcatcatttagaacttggaaatggttctcatgtaggttcagatcttaatggtgttatgtat

SEQ ID NO: 7199 - DNA, 80 bp, synthetic construct
  misc_feature 1..80: note = Synthetic: >Delta-cand-27080-27159
  source 1..80: mol_type = other DNA
ttccgcttaactccgccatcaaacccgttgaaaaccatggctactggctgcgttacaccagacaaaagccaggtggtact

SEQ ID NO: 7200 - DNA, 80 bp, synthetic construct
  misc_feature 1..80: note = Synthetic: >HKU17-cand-24240-24319
  source 1..80: mol_type = other DNA
tggagttccgcttaactctgccatcaagcccgctgaaaaccatggctattggctgcgttacaccagacaaaagccaggtg

SEQ ID NO: 7201 - DNA, 80 bp, synthetic construct
  misc_feature 1..80: note = Synthetic: >WIV16-cand-11830-11909
  source 1..80: mol_type = other DNA
agtagaatcatcttctaaattgtgggcacaatgtgtacaactccacaacgatattcttcttgcaaaagacacaactgaag

SEQ ID NO: 7202 - DNA, 80 bp, synthetic construct
  misc_feature 1..80: note = Synthetic: >Sb512-cand-18440-18519
  source 1..80: mol_type = other DNA
ccatgctttccacacaccagcttatgataaacgtgcatttgctaagttaaaagcaatgccgtttttcttttatgatgata

SEQ ID NO: 7203 - DNA, 80 bp, synthetic construct
  misc_feature 1..80: note = Synthetic: >BtRl_BetaCoV-cand-11640-11719
  source 1..80: mol_type = other DNA
gcctcctaagagtagtattgatgctttcaagcttaacattaagttgttgggtattggaggtaaaccatgtatcaaggttg

SEQ ID NO: 7204 - DNA, 80 bp, synthetic construct
  misc_feature 1..80: note = Synthetic: >WIV16-cand-11670-11749
  source 1..80: mol_type = other DNA
ggcttttgcctcctaagagtagtattgatgctttcaagcttaacattaagttgttgggtattggaggtaaaccatgtatc

SEQ ID NO: 7205 - DNA, 80 bp, synthetic construct
  misc_feature 1..80: note = Synthetic: >HKU24-cand-5550-5629
  source 1..80: mol_type = other DNA
gcgagttgccttgagccaagcagatttgtcaagtgctagctgtgagtatgagtttatttgtaaatgtggtgtaaaggttg

SEQ ID NO: 7206 - DNA, 80 bp, synthetic construct
  misc_feature 1..80: note = Synthetic: >BetaSp-cand-5880-5959
  source 1..80: mol_type = other DNA
cgagttgccttgagtcaggcagacttgtcaggtgccagctgtgagtatgagtttatttgtaaatgtggtgtaaaggttga

SEQ ID NO: 7207 - DNA, 80 bp, synthetic construct
  misc_feature 1..80: note = Synthetic: >BetaSp-cand-21330-21409
  source 1..80: mol_type = other DNA
tggctctgcagttcttagacagtggttaccagcaggcacaatacttgtagataatgatttgaatccctttgttagtgata

SEQ ID NO: 7208 - DNA, 80 bp, synthetic construct
  misc_feature 1..80: note = Synthetic: >BetaSp-cand-17730-17809
  source 1..80: mol_type = other DNA
caactatgagctttctgttattaatgctcgtgtgcgtgctaagcattatgtatatattggagatcctgctcaattaccag

SEQ ID NO: 7209 - DNA, 80 bp, synthetic construct
  misc_feature 1..80: note = Synthetic: >HKU17-cand-18360-18439
  source 1..80: mol_type = other DNA
tcttgatgactacattgacatcataagacaagcccatgccaactacactagtaaatctaaagtgtttacggtgtcagttg

SEQ ID NO: 7210 - DNA, 80 bp, synthetic construct
  misc_feature 1..80: note = Synthetic: >HKU4R-cand-12510-12589
  source 1..80: mol_type = other DNA
ttcttaatggtgttatagcaaatgctagaaatggttgtgtgcctcttagcattgttcctctctgtgcatctaataagttg

SEQ ID NO: 7211 - DNA, 80 bp, synthetic construct
  misc_feature 1..80: note = Synthetic: >HKU4-cand-12510-12589
  source 1..80: mol_type = other DNA
taatgatgttcttaatggtgttatagcaaatgctagaaatggttgtgtgcctcttagcattgttcctctttgtgcatcta

SEQ ID NO: 7212 - DNA, 80 bp, synthetic construct
  misc_feature 1..80: note = Synthetic: >HKU4-cand-12430-12509
  source 1..80: mol_type = other DNA
caagcacgtgccgaggataagaaggcaaaaattgtaagtgctatgcaaactatgttatttggcatgattaagaagttaga

SEQ ID NO: 7213 - DNA, 80 bp, synthetic construct
  misc_feature 1..80: note = Synthetic: >HKU4R-cand-12430-12509
  source 1..80: mol_type = other DNA
tgccgaggataagaaggcaaaaattgtaagtgctatgcagactatgttatttggcatgattaagaagttagataatgatg

SEQ ID NO: 7214 - DNA, 80 bp, synthetic construct
  misc_feature 1..80: note = Synthetic: >FelineAlpha1-cand-5770-5849
  source 1..80: mol_type = other DNA
tattggttgtttttatgtgtcttagaaaatctaagatgcctaaagttaaagtaaaaccaccatatgcgtttagagacttg

SEQ ID NO: 7215 - DNA, 80 bp, synthetic construct
  misc_feature 1..80: note = Synthetic: >SARSRC-cand-29610-29689
  source 1..80: mol_type = other DNA
tggaagagccctaatgtgtaaaattaattttagtagtgctatccccatgtgattttaatagcttcttaggagaatgacaa

SEQ ID NO: 7216 - DNA, 80 bp, synthetic construct
  misc_feature 1..80: note = Synthetic: >WIV16-cand-30040-30119
  source 1..80: mol_type = other DNA
ctcgtagctaaacagcacaagtaggtttagttaactttaatctcacatagcaatctttaatcaatgtgtaacattaggga

SEQ ID NO: 7217 - DNA, 80 bp, synthetic construct
  misc_feature 1..80: note = Synthetic: >SARSRC-cand-29450-29529
  source 1..80: mol_type = other DNA
taaacagcacaagtaggtttagttaactttaatttcacatagcaatctttaatcaatgtgtaatgttagggaggacttga

SEQ ID NO: 7218 - DNA, 80 bp, synthetic construct
  misc_feature 1..80: note = Synthetic: >HKU5R-cand-1610-1689
  source 1..80: mol_type = other DNA
gtcatgtgtctccaagattggcgatgccatcttcactggatgcacaggcacctggagtaaggtatgcgaaacagcaaacc

SEQ ID NO: 7219 - DNA, 80 bp, synthetic construct
  misc_feature 1..80: note = Synthetic: >HKU2-cand-22960-23039
  source 1..80: mol_type = other DNA
ctcgttagtggtattactgagaattttggtgctattagcactaattttaaggttatatcacagcgtcttgacaaacttga

SEQ ID NO: 7220 - DNA, 80 bp, synthetic construct
  misc_feature 1..80: note = Synthetic: >SEAC-cand-22920-22999
  source 1..80: mol_type = other DNA
tcgttagtggtattactgagaattttggtgctattagcactaattttaaggttatatcacagcgtcttgacaaacttgaa

SEQ ID NO: 7221 - DNA, 80 bp, synthetic construct
  misc_feature 1..80: note = Synthetic: >HKU5R-cand-250-329
  source 1..80: mol_type = other DNA
tgcgtggcaattcggtgcacatcatgtctttcgtggctggtgtggctcctcaaggtgcgaggggcaagtatagagcagag

SEQ ID NO: 7222 - DNA, 80 bp, synthetic construct
  misc_feature 1..80: note = Synthetic: >HKU5-cand-240-319
  source 1..80: mol_type = other DNA
tttcgtcgggtgcgtggcaattcggtgcacatcatgtctttcgtggctggtgtggctcctcaaggtgcgaggggcaagta

SEQ ID NO: 7223 - DNA, 80 bp, synthetic construct
  misc_feature 1..80: note = Synthetic: >HKU8R-cand-18020-18099
  source 1..80: mol_type = other DNA
ctctgggctggtggtcttgaattgactacaatgcgctattttgttaaggttggacctcgctgtgattgtcactgcggtaa

SEQ ID NO: 7224 - DNA, 80 bp, synthetic construct
  misc_feature 1..80: note = Synthetic: >Sk512R-cand-10180-10259
  source 1..80: mol_type = other DNA
ctcttgctgaagtagtcaaacaaatgtatggtgtgacacttcagagtagtaaggtttccagagcttttagaaatgcatca

SEQ ID NO: 7225 - DNA, 80 bp, synthetic construct
  misc_feature 1..80: note = Synthetic: >Sb512-cand-10190-10269
  source 1..80: mol_type = other DNA
tttctgaagtagtcaaacaaatgtatggcgtaacacttcagagtggtaaggtttccagagcttttagaaatgcatcaata

SEQ ID NO: 7226 - DNA, 80 bp, synthetic construct
  misc_feature 1..80: note = Synthetic: >AlphaMink-cand-10460-10539
  source 1..80: mol_type = other DNA
ctgttgttattatggtgttttgtattggattaaccgctttacacatatgacttgtggtgtgtatcaattttgtgtttcag

SEQ ID NO: 7227 - DNA, 80 bp, synthetic construct
  misc_feature 1..80: note = Synthetic: >Alpha2-cand-10450-10529
  source 1..80: mol_type = other DNA
tgttgttattatggtattttgtattggatcaatcgctttacacatatgacttgtggtgtgtatcaattttgtgtttcagc

SEQ ID NO: 7228 - DNA, 80 bp, synthetic construct
  misc_feature 1..80: note = Synthetic: >MT114542-cand-21980-22059
  source 1..80: mol_type = other DNA
atgttttatatgccacggctgttataaaaactggtacttgtcctttctcatttgataagttgaacaattacttaactttt

SEQ ID NO: 7229 - DNA, 80 bp, synthetic construct
  misc_feature 1..80: note = Synthetic: >MT114541-cand-21920-21999
  source 1..80: mol_type = other DNA
atgttttatatgccacagctgttataaaaactggtacttgtcctttctcatttgataagttgaataattacttaactctt

SEQ ID NO: 7230 - DNA, 80 bp, synthetic construct
  misc_feature 1..80: note = Synthetic: >MN987230-cand-160-239
  source 1..80: mol_type = other DNA
aaaataatattgttgctagtatcactgcttgttttgccgtgtctcactttatacatccgttgcttgggctacctagtatc

SEQ ID NO: 7231 - DNA, 80 bp, synthetic construct
  misc_feature 1..80: note = Synthetic: >MT114542-cand-25260-25339
  source 1..80: mol_type = other DNA
tataggacctatgcttatagcatatggttactacattgatggcattgttacaacaactgtcttagctttaagatttgtct

SEQ ID NO: 7232 - DNA, 80 bp, synthetic construct
  misc_feature 1..80: note = Synthetic: >MN307884-cand-160-239
  source 1..80: mol_type = other DNA
aaataatattgttgctagtatcactgcttgttttgttgtgtctcactttattacatccgttgcttgggctacctagtgcc

SEQ ID NO: 7233 - DNA, 80 bp, synthetic construct
  misc_feature 1..80: note = Synthetic: >MN531554-cand-24090-24169
  source 1..80: mol_type = other DNA
ttgagaaaatacttgaaactggtgatcagataattctacaaatcagtttcaatttacagcatatttcaagtgttttagac

SEQ ID NO: 7234 - DNA, 80 bp, synthetic construct
  misc_feature 1..80: note = Synthetic: >MT114540-cand-23280-23359
  source 1..80: mol_type = other DNA
tgctctacaaactgatgtattgaataaaaaccagcagatcctggctaatgctttcaaccaagctattggtaacattacac

SEQ ID NO: 7235 - DNA, 80 bp, synthetic construct
  misc_feature 1..80: note = Synthetic: >M95169-cand-3680-3759
  source 1..80: mol_type = other DNA
gttgcaaaggcaattgcagacttttgtggactggattttgttgaatattgtgaggactatgttaagaaacatgggccaca

SEQ ID NO: 7236 - DNA, 80 bp, synthetic construct
  misc_feature 1..80: note = Synthetic: >MT114540-cand-24000-24079
  source 1..80: mol_type = other DNA
gttgtttgtcaatgctactgtaattgatttgcctagtattatacctgactatatcgacattaatcagactgttcaagaca

SEQ ID NO: 7237 - DNA, 80 bp, synthetic construct
  misc_feature 1..80: note = Synthetic: >AJ311317-cand-10730-10809
  source 1..80: mol_type = other DNA
gcaaattcaaaaatgcatgtttatcttgttgagttacacaataaaattcttgcttctgatgatgttggagagtgcatgga

SEQ ID NO: 7238 - DNA, 80 bp, synthetic construct
  misc_feature 1..80: note = Synthetic: >MN128087-cand-17020-17099
  source 1..80: mol_type = other DNA
gcaataaagagtttagtggtgtgcatccagcgtatgcggtgaccactaaagctcttgctgcaacttataaagttaatgaa

SEQ ID NO: 7239 - DNA, 80 bp, synthetic construct
  misc_feature 1..80: note = Synthetic: >MN987231-cand-16920-16999
  source 1..80: mol_type = other DNA
gtaacaaagagtttagtggtgttcatcctgcttatgcagttacaaccaaagctcttgctgcaacttataaggttaatgaa

SEQ ID NO: 7240 - DNA, 80 bp, synthetic construct
  misc_feature 1..80: note = Synthetic: >MN509589-cand-22980-23059
  source 1..80: mol_type = other DNA
ttatgcgcaacttgatgcaattcaagcagatgctcaagttgatcgtcttatcactggtagactatcgtctctttcagtgc

SEQ ID NO: 7241 - DNA, 80 bp, synthetic construct
  misc_feature 1..80: note = Synthetic: >MN307884-cand-22930-23009
  source 1..80: mol_type = other DNA
ttatgcgcaacttgatgcaattcaagcagatgcacaagtagaccgtcttattactggcagactctcttctctctcagtgc

SEQ ID NO: 7242 - DNA, 80 bp, synthetic construct
  misc_feature 1..80: note = Synthetic: >AY692454-cand-4400-4479
  source 1..80: mol_type = other DNA
tttctaacagaagcgtgggctaaactgttaggtggagatcctacagactttgttgcctggtgttatgcaagttgtaatgc

SEQ ID NO: 7243 - DNA, 80 bp, synthetic construct
  misc_feature 1..80: note = Synthetic: >MT114541-cand-14570-14649
  source 1..80: mol_type = other DNA
gctggtgtgtttgttgatgacatagttaaaacagacaacgttattatgttagaacgttatgtgtcactggctattgatgc

SEQ ID NO: 7244 - DNA, 80 bp, synthetic construct
  misc_feature 1..80: note = Synthetic: >MN711790-cand-23810-23889
  source 1..80: mol_type = other DNA
tttgataatgatgtggtaactgaacaatacagacctaaaaagtctgtttaatgattcaaagtccaacatctttcttaata

SEQ ID NO: 7245 - DNA, 80 bp, synthetic construct
  misc_feature 1..80: note = Synthetic: >MN128088-cand-23860-23939
  source 1..80: mol_type = other DNA
tttgataatgatgtggtaactgaacaatacagacctaaaaagtctgtttaatgattcaaacgcccacctcatttgtaata

SEQ ID NO: 7246 - DNA, 80 bp, synthetic construct
  misc_feature 1..80: note = Synthetic: >LC061272-cand-1040-1119
  source 1..80: mol_type = other DNA
tttatttggtgtttggagtcaggaactttcttatgatgtagttgtggcatggcacgttgtgcgtgatacacgctacaaaa

SEQ ID NO: 7247 - DNA, 80 bp, synthetic construct
  misc_feature 1..80: note = Synthetic: >MT114542-cand-13670-13749
  source 1..80: mol_type = other DNA
tcatatgaagagcaggatgcacttttcgctttaacaaagagaaatgttctacccacaatgactcagatgaatctgaaata

SEQ ID NO: 7248 - DNA, 80 bp, synthetic construct
  misc_feature 1..80: note = Synthetic: >MG693168-cand-1380-1459
  source 1..80: mol_type = other DNA
tgtctgggtaccacgcacctattctgtgctctgtaatgaacactctggtgttgttggtacaggtgatgttagggcttaca

SEQ ID NO: 7249 - DNA, 80 bp, synthetic construct
  misc_feature 1..80: note = Synthetic: >MT114543-cand-19240-19319
  source 1..80: mol_type = other DNA
tgtgtccaaagttgtggatgtcattgtagattgtaaggcatggagatggatgttgtggtgtgagaattcacagattaaaa

SEQ ID NO: 7250 - DNA, 80 bp, synthetic construct
  misc_feature 1..80: note = Synthetic: >MT114540-cand-28480-28559
  source 1..80: mol_type = other DNA
ttcttttgtagatacattctatatttccttaggtgatagagaagaaaaaatttatcttagagtggttggtgcaacaccaa

SEQ ID NO: 7251 - DNA, 80 bp, synthetic construct
  misc_feature 1..80: note = Synthetic: >SBB-747-cand-9430-9509
  source 1..80: mol_type = other DNA
tgtagcgtagcatctgctgcattacaagctggtttaacgcgcatggcccatccatctggtttggtagaaccgtgtgtagt

SEQ ID NO: 7252 - DNA, 80 bp, synthetic construct
  misc_feature 1..80: note = Synthetic: >SBB-797-cand-9440-9519
  source 1..80: mol_type = other DNA
catctgctgcgttacaagctggtttaacgcgcatggcccatccatctggtttggtagaaccgtgtgtagttaaagttagt

SEQ ID NO: 7253 - DNA, 80 bp, synthetic construct
  misc_feature 1..80: note = Synthetic: >SBB-797-cand-11200-11279
  source 1..80: mol_type = other DNA
gctggtataggcggtatacctatttataaggtgtccactgtacaatctaatatgactgatctgaagtgtactagtgtagt

SEQ ID NO: 7254 - DNA, 80 bp, synthetic construct
  misc_feature 1..80: note = Synthetic: >SBB-747-cand-11190-11269
  source 1..80: mol_type = other DNA
tgttaaattagctggtataggtggtatacctatttataaggtgtccactgtacaatctaatatgactgatctgaagtgta

SEQ ID NO: 7255 - DNA, 80 bp, synthetic construct
  misc_feature 1..80: note = Synthetic: >SBB-726-cand-11190-11269
  source 1..80: mol_type = other DNA
tgttaaattagctggtataggcggtatacctatttataaggtgtccactgtacaatctaatatgactgatttgaagtgta

SEQ ID NO: 7256 - DNA, 80 bp, synthetic construct
  misc_feature 1..80: note = Synthetic: >SBB-747-cand-5270-5349
  source 1..80: mol_type = other DNA
atgcgaacactcgtaaacgtactagtgatcttaaattgcctgctacagatatactgtatgggcccactaattttactagt

SEQ ID NO: 7257 - DNA, 80 bp, synthetic construct
  misc_feature 1..80: note = Synthetic: >SBB-788-cand-5280-5359
  source 1..80: mol_type = other DNA
tcgtaaacgtactagtgatctcaaattgcctgctacagatatactgtatgggcccactaattttactagtgatagtaagg

SEQ ID NO: 7258 - DNA, 80 bp, synthetic construct
  misc_feature 1..80: note = Synthetic: >SBB-726-cand-1040-1119
  source 1..80: mol_type = other DNA
tgaagcaaactaaacccgcagcaggcggtcctattggcaagactgtggaagctataatgcttagtttgtatggtactagt

SEQ ID NO: 7259 - DNA, 80 bp, synthetic construct
  misc_feature 1..80: note = Synthetic: >SBB-747-cand-1030-1109
  source 1..80: mol_type = other DNA
ttaggcgtggtgaagcaaactaaacccgcagcaggcggtcctattggcaagactgttgaagctataatgcttagcttgta

SEQ ID NO: 7260 - DNA, 80 bp, synthetic construct
  misc_feature 1..80: note = Synthetic: >SBB-747-cand-10630-10709
  source 1..80: mol_type = other DNA
actcctgagggtgtgcagggttatttgttaagtttgtacaattatgttaacccgggtagggttgacattattggtacaga

SEQ ID NO: 7261 - DNA, 80 bp, synthetic construct
  misc_feature 1..80: note = Synthetic: >SBB-747-cand-790-869
  source 1..80: mol_type = other DNA
gtcctagtgaagcctgttcaggatttgcttggtgacattaaacctgacctcactcttgagaagctaacgctggctctgag

SEQ ID NO: 7262 - DNA, 80 bp, synthetic construct
  misc_feature 1..80: note = Synthetic: >SBB-726-cand-800-879
  source 1..80: mol_type = other DNA
agcctgttcaggatttgcttggtgacattaaacctgacctcactcttgagaagctaacgctggctctgagtgattacaga

SEQ ID NO: 7263 - DNA, 80 bp, synthetic construct
  misc_feature 1..80: note = Synthetic: >SBB-130-cand-25670-25749
  source 1..80: mol_type = other DNA
gtatgatccgtgggcaacgtaaaaccttgccttccaagtggcatttctactacttgggaacaggaccacaagccgacgct

SEQ ID NO: 7264 - DNA, 80 bp, synthetic construct
  misc_feature 1..80: note = Synthetic: >SBB-010-cand-25680-25759
  source 1..80: mol_type = other DNA
tgggcaacgtaaaaccttgccttccaagtggcacttctactacttgggaacaggaccacaagctgacgctaaattcagac

SEQ ID NO: 7265 - DNA, 80 bp, synthetic construct
  misc_feature 1..80: note = Synthetic: >SBB-053-cand-25670-25749
  source 1..80: mol_type = other DNA
ggcaacgtaaaaccttgccttccaagtggcatttctactacttgggaacaggaccacaagccgacgctaaattcagacaa

SEQ ID NO: 7266 - DNA, 80 bp, synthetic construct
  misc_feature 1..80: note = Synthetic: >SBB-747-cand-13750-13829
  source 1..80: mol_type = other DNA
ccgatgatcgctgcattttgcattgtgccaattttaatatacttttcagtatggttttaccaaatacatcctttgggcct

SEQ ID NO: 7267 - DNA, 80 bp, synthetic construct
  misc_feature 1..80: note = Synthetic: >SBB-797-cand-13760-13839
  source 1..80: mol_type = other DNA
ctgcattttgcattgtgccaattttaatatacttttcagtatggttttaccaaatacatcctttgggcctttagttcaga

SEQ ID NO: 7268 - DNA, 80 bp, synthetic construct
  misc_feature 1..80: note = Synthetic: >SBB-120-cand-340-419
  source 1..80: mol_type = other DNA
aggctttggcaccgtcgaagaggccgtttcattttatagtgaagccgctgtcgatggttttgtcaattgccgatttgtcg

SEQ ID NO: 7269 - DNA, 80 bp, synthetic construct
  misc_feature 1..80: note = Synthetic: >SBB-122-cand-330-409
  source 1..80: mol_type = other DNA
tttcagcattaggctttggcactgtcgaagaggccgtttcattttatagtgaagccgctgtcgatggttttgtcaattgc

SEQ ID NO: 7270 - DNA, 80 bp, synthetic construct
  misc_feature 1..80: note = Synthetic: >SBB-130-cand-24560-24639
  source 1..80: mol_type = other DNA
tgactttgatcaatgacaatggcatgcttcttagcgccattttatggttatttgtcttgttcttcgttctactcattact

SEQ ID NO: 7271 - DNA, 80 bp, synthetic construct
  misc_feature 1..80: note = Synthetic: >SBB-726-cand-3120-3199
  source 1..80: mol_type = other DNA
cgttaatctacatcatggtggaggcgttgctggagcccttaatagagctactgacaatgccatgcaaaaagagtctagtg

SEQ ID NO: 7272 - DNA, 80 bp, synthetic construct
  misc_feature 1..80: note = Synthetic: >SBB-747-cand-1110-1189
  source 1..80: mol_type = other DNA
tggtactagtggctacaagccagcgacgccggtagcgcgcttgaaatgtagttactgtgaccattttggttggacaccat

SEQ ID NO: 7273 - DNA, 80 bp, synthetic construct
  misc_feature 1..80: note = Synthetic: >SBB-726-cand-1120-1199
  source 1..80: mol_type = other DNA
ggctacaagccagcgacgccagtagcgcgcttgaagtgtagttactgtgaccattttggttggacaccattgaaagacat

SEQ ID NO: 7274 - DNA, 80 bp, synthetic construct
  misc_feature 1..80: note = Synthetic: >SBB-120-cand-16600-16679
  source 1..80: mol_type = other DNA
atgtgtaagggtaatgttcaagttgacaacggttctagtattaaccgtaagcaacttgatgttgtcaaaatgtttctcgc

SEQ ID NO: 7275 - DNA, 80 bp, synthetic construct
  misc_feature 1..80: note = Synthetic: >SBB-053-cand-16590-16669
  source 1..80: mol_type = other DNA
ctttaagcttatgtgtaagggtaatgttcaagttgacaatggttctagtattaaccgtaagcaacttgatgttgtcaaaa

SEQ ID NO: 7276 - DNA, 80 bp, synthetic construct
  misc_feature 1..80: note = Synthetic: >SBB-788-cand-10080-10159
  source 1..80: mol_type = other DNA
gtatgcagcagttttaagtggtgagaattggtttttaacaaaatctagtatcacccctgctgagtttaataattgtgctg

SEQ ID NO: 7277 - DNA, 80 bp, synthetic construct
  misc_feature 1..80: note = Synthetic: >SBB-747-cand-10070-10149
  source 1..80: mol_type = other DNA
tggcatggttgtatgcagcagttttaagtggtgagaattggtttttaacaaaatctagtatcacccctgctgagttcaat

SEQ ID NO: 7278 - DNA, 80 bp, synthetic construct
  misc_feature 1..80: note = Synthetic: >SBB-797-cand-18970-19049
  source 1..80: mol_type = other DNA
ttaccctatgggtagataaaacctttgacgtttttaatttgtggtctacttttgttaagctacaatccctggagaatgtg

SEQ ID NO: 7279 - DNA, 80 bp, synthetic construct
  misc_feature 1..80: note = Synthetic: >SBB-726-cand-18980-19059
  source 1..80: mol_type = other DNA
ggtagataaaacctttgacgtttttaatttgtggtctacttttgttaagctacaatccctggagaatgtggcttacaatg

SEQ ID NO: 7280 - DNA, 80 bp, synthetic construct
  misc_feature 1..80: note = Synthetic: >SBB-120-cand-740-819
  source 1..80: mol_type = other DNA
gttaaggcctggatagtcgatcgtactgaaggcccttttacaagtcaaaacttgttgtcaattaattctattacttggtg

SEQ ID NO: 7281 - DNA, 80 bp, synthetic construct
  misc_feature 1..80: note = Synthetic: >SBB-122-cand-730-809
  source 1..80: mol_type = other DNA
tgtcacatatgtgaaggcctggatagtcgatcgtactgaaggcctttttacaagtcaaaacttgttgtcaattatttcta

SEQ ID NO: 7282 - DNA, 80 bp, synthetic construct
  misc_feature 1..80: note = Synthetic: >SBB-120-cand-420-499
  source 1..80: mol_type = other DNA
ctgcgggtcttcaggaaaccgtagaaggtgttcttgaagatgagtatgttctgtgtatcacaggcattcaccaattggtg

SEQ ID NO: 7283 - DNA, 80 bp, synthetic construct
  misc_feature 1..80: note = Synthetic: >SBB-122-cand-410-489
  source 1..80: mol_type = other DNA
cgatttgtcgctgcaggtcttcaggaaaccatagagggtgtccttgaagatgagtatgttctgtgtatcacaggcattca

SEQ ID NO: 7284 - DNA, 80 bp, synthetic construct
  misc_feature 1..80: note = Synthetic: >SBB-788-cand-1520-1599
  source 1..80: mol_type = other DNA
ttgatgatgaaacactggataatccagcctgtgcttcgtttattgctaatttggagtgtgatgcaaagactccaacagtg

SEQ ID NO: 7285 - DNA, 80 bp, synthetic construct
  misc_feature 1..80: note = Synthetic: >SBB-747-cand-1510-1589
  source 1..80: mol_type = other DNA
ggctttaaaattgatgatgaaacactggataatccagcctgtgcttcgtttattgctaatttggagtgtgatgcaaagac

SEQ ID NO: 7286 - DNA, 80 bp, synthetic construct
  misc_feature 1..80: note = Synthetic: >SBB-788-cand-13360-13439
  source 1..80: mol_type = other DNA
tacgtgtttaccataagttgggcgaaaccgttcgtaaagctgtattgtcagctgtagagatggctgacgctatggtggag

SEQ ID NO: 7287 - DNA, 80 bp, synthetic construct
  misc_feature 1..80: note = Synthetic: >SBB-747-cand-8230-8309
  source 1..80: mol_type = other DNA
cctatggtggttggtgtggttagcgacattgtagggactcttgttcctggtttaccggcaagattcctgcgtgttggtac

SEQ ID NO: 7288 - DNA, 80 bp, synthetic construct
  misc_feature 1..80: note = Synthetic: >SBB-788-cand-8240-8319
  source 1..80: mol_type = other DNA
ttggtgtggttagcgacattgtagggactcttgttcctggtttaccggcaagattcctgcgtgttggtactacactttta

SEQ ID NO: 7289 - DNA, 80 bp, synthetic construct
  misc_feature 1..80: note = Synthetic: >SBB-797-cand-8250-8329
  source 1..80: mol_type = other DNA
tagcgacattgtagggactcttgttcctggtttaccggcaagattcctgcgtgttggtactacacttttaccattggtca

SEQ ID NO: 7290 - DNA, 80 bp, synthetic construct
  misc_feature 1..80: note = Synthetic: >SBB-797-cand-10560-10639
  source 1..80: mol_type = other DNA
taaacatacatatttaacagtgtacttgttgcctgtagctatggtgactgcatattataatttccagtacactcctgagg

SEQ ID NO: 7291 - DNA, 80 bp, synthetic construct
  misc_feature 1..80: note = Synthetic: >SBB-747-cand-10550-10629
  source 1..80: mol_type = other DNA
ttataaagcataaacatacatatttaacagtgtatttgttgcctgtagctatggtgactgcatattataatttccagtac

SEQ ID NO: 7292 - DNA, 80 bp, synthetic construct
  misc_feature 1..80: note = Synthetic: >SBB-788-cand-8480-8559
  source 1..80: mol_type = other DNA
ccttactgattaataatgctagtggttatgatacattgcaccctcatgtgatgtatccgttttatgaacatgcgggttac

SEQ ID NO: 7293 - DNA, 80 bp, synthetic construct
  misc_feature 1..80: note = Synthetic: >SBB-747-cand-8470-8549
  source 1..80: mol_type = other DNA
tgtgcggatgccttactgattaataatgctagtggttatgatacattgcaccctcatgtgatgtatccgttttatgaaca

SEQ ID NO: 7294 - DNA, 80 bp, synthetic construct
  misc_feature 1..80: note = Synthetic: >SBB-797-cand-8490-8569
  source 1..80: mol_type = other DNA
taacaatgctagtgcttatgatacattgcaccctcatgtgatgtatccgttttatgaacatgcgggttacataaggtttc

SEQ ID NO: 7295 - DNA, 80 bp, synthetic construct
  misc_feature 1..80: note = Synthetic: >SBB-010-cand-1550-1629
  source 1..80: mol_type = other DNA
acaagtgaacaactcatagctcttgctaaagctctttcaagtgcagttttgcaagttactaaggatggtctttcttttac

SEQ ID NO: 7296 - DNA, 80 bp, synthetic construct
  misc_feature 1..80: note = Synthetic: >PRD-0038-cand-720-799
  source 1..80: mol_type = other DNA
aagaatttgaacaaaactggaacactaaacatggcagtggacttgctcgtcagctccaaagagagttgaatggaggagtt

SEQ ID NO: 7297 - DNA, 80 bp, synthetic construct
  misc_feature 1..80: note = Synthetic: >SBB-797-cand-15120-15199
  source 1..80: mol_type = other DNA
agtgatgatggcgttgtttgttataattcagactacgcgcagaaaggttatgttgctgatatacaaggctttaaggagtt

SEQ ID NO: 7298 - DNA, 80 bp, synthetic construct
  misc_feature 1..80: note = Synthetic: >SBB-747-cand-15110-15189
  source 1..80: mol_type = other DNA
gatgatccttagtgacgatggcgttgtttgttataattcagactacgcgcagaaaggttatgttgctgatatacagggct

SEQ ID NO: 7299 - DNA, 80 bp, synthetic construct
  misc_feature 1..80: note = Synthetic: >SBB-747-cand-15750-15829
  source 1..80: mol_type = other DNA
actacgcacaagttagtgttgtctgtgacaccatatgtttgtaaccaccctagttgtgatgtagcagatgtaactcagtt

SEQ ID NO: 7300 - DNA, 80 bp, synthetic construct
  misc_feature 1..80: note = Synthetic: >SBB-797-cand-15760-15839
  source 1..80: mol_type = other DNA
agttagtgttgtctgtgacaccatatgtttgtaaccaccctagttgcgatgtagcagatgtaactcagttgtatctgggt

SEQ ID NO: 7301 - DNA, 80 bp, synthetic construct
  misc_feature 1..80: note = Synthetic: >SBB-053-cand-8750-8829
  source 1..80: mol_type = other DNA
atttgttcagctttgacaggtttacttcctagtttgcttaagcttaaagttactactcagttgtttgatggtgataagtt

SEQ ID NO: 7302 - DNA, 80 bp, synthetic construct
  misc_feature 1..80: note = Synthetic: >SBB-130-cand-8740-8819
  source 1..80: mol_type = other DNA
ttggtacatttgctcagctttgacaggtttacttcctagtttgcttaagcttaaagttactactcagttgtttgatggtg

SEQ ID NO: 7303 - DNA, 80 bp, synthetic construct
  misc_feature 1..80: note = Synthetic: >SBB-747-cand-15510-15589
  source 1..80: mol_type = other DNA
aagaagttacatgaggagttgacaggtcacttgctggacacatatagtgtcatgcttgctagtgataacgccgctaagta

SEQ ID NO: 7304 - DNA, 80 bp, synthetic construct
  misc_feature 1..80: note = Synthetic: >SBB-788-cand-15520-15599
  source 1..80: mol_type = other DNA
atgaggagttgacaggtcacttgctggacacatatagtgtcatgcttgctagtgataacgccgctaagtattgggaggta

SEQ ID NO: 7305 - DNA, 80 bp, synthetic construct
  misc_feature 1..80: note = Synthetic: >SBB-041-cand-11870-11949
  source 1..80: mol_type = other DNA
aagtttgctgtggacactacaaatggtactgctattaagtacttgtattttgttaaaaatcttaacacactcagacgcgg

SEQ ID NO: 7306 - DNA, 80 bp, synthetic construct
  misc_feature 1..80: note = Synthetic: >SBB-010-cand-11880-11959
  source 1..80: mol_type = other DNA
tggacactacaaatggtattgctattaagtacttgtattttgttaaaaatcttaacacactcagacgcggtgctgtgttg

SEQ ID NO: 7307 - DNA, 80 bp, synthetic construct
  misc_feature 1..80: note = Synthetic: >SBB-797-cand-24400-24479
  source 1..80: mol_type = other DNA
aataatactttcaaccctggggattttaatttttccacggttgatatacagaatgaacttaacacccttaatgctgttgt

SEQ ID NO: 7308 - DNA, 80 bp, synthetic construct
  misc_feature 1..80: note = Synthetic: >SBB-788-cand-24400-24479
  source 1..80: mol_type = other DNA
tttaataatactttcaacccaggtgattttaatttttccacggttgatatacagaatgaacttaacacccttaatgctgt

SEQ ID NO: 7309 - DNA, 80 bp, synthetic construct
  misc_feature 1..80: note = Synthetic: >SBB-797-cand-25040-25119
  source 1..80: mol_type = other DNA
atttgcatgttttctagagcgtttaaccatggccatcaaattacactcattggctccctttaccacaaccgctgattatt

SEQ ID NO: 7310 - DNA, 80 bp, synthetic construct
  misc_feature 1..80: note = Synthetic: >SBB-726-cand-25040-25119
  source 1..80: mol_type = other DNA
tgcatttgcatgttttctagagcgtttaactatggccattaaattacattcattggctccctttaccacaaccgctgatt

SEQ ID NO: 7311 - DNA, 80 bp, synthetic construct
  misc_feature 1..80: note = Synthetic: >SBB-788-cand-25040-25119
  source 1..80: mol_type = other DNA
tgcatttgcatgttttctagagcgtttaaccatggccctcaaattatattcactggctccttttaccacaaccgctgatt

SEQ ID NO: 7312 - DNA, 80 bp, synthetic construct
  misc_feature 1..80: note = Synthetic: >SBB-130-cand-10500-10579
  source 1..80: mol_type = other DNA
ggtatgtaggcgcacttgtttacaaagtagcttgctatgtagcgtacatgactgttttgcctgaatttattggtggtatt

SEQ ID NO: 7313 - DNA, 80 bp, synthetic construct
  misc_feature 1..80: note = Synthetic: >SBB-041-cand-10510-10589
  source 1..80: mol_type = other DNA
aggcgcacttgtttacaaagtagcttgctatgtagcgtacatgactgttttgcctgaatttattggtggtattaaggcag

SEQ ID NO: 7314 - DNA, 80 bp, synthetic construct
  misc_feature 1..80: note = Synthetic: >SBB-053-cand-6030-6109
  source 1..80: mol_type = other DNA
gtatgtttagcttgttgtttaaagcttttaaacaaaaggatgtgcgtgtgtttgcgtctgcgcctgagcgtactggtatt

SEQ ID NO: 7315 - DNA, 80 bp, synthetic construct
  misc_feature 1..80: note = Synthetic: >SBB-130-cand-6020-6099
  source 1..80: mol_type = other DNA
cttttcagtatgtttagtttgttgtttaaagcttttaaacaaaaggatgtgcgtgtgtttgcgtctgcgcctgagcgtac

SEQ ID NO: 7316 - DNA, 80 bp, synthetic construct
  misc_feature 1..80: note = Synthetic: >SBB-120-cand-11040-11119
  source 1..80: mol_type = other DNA
acttggttgaaagttatttttcatcgggttctatgttacagagtgttgcttcaacttttgttaatttgccatcgttcatt

SEQ ID NO: 7317 - DNA, 80 bp, synthetic construct
  misc_feature 1..80: note = Synthetic: >SBB-122-cand-11030-11109
  source 1..80: mol_type = other DNA
ggtgtggatgacttggttgaaagttatttttcatcgggttctatgttacagagtgttgcttcaacttttgttaatttgcc

SEQ ID NO: 7318 - DNA, 80 bp, synthetic construct
  misc_feature 1..80: note = Synthetic: >GCS-211-cand-9760-9839
  source 1..80: mol_type = other DNA
ttgcttgtcataaaagtggaccagagtaatcagaatacaccagcacattgcttcagaccactcaaagttggccagtcatt

SEQ ID NO: 7319 - DNA, 80 bp, synthetic construct
  misc_feature 1..80: note = Synthetic: >GCS-227-cand-9760-9839
  source 1..80: mol_type = other DNA
gcttgtcataaaagtggaccagagtaatcagaatacaccagcacattgcttcagaccactcaaagttggccagtcattta

SEQ ID NO: 7320 - DNA, 80 bp, synthetic construct
  misc_feature 1..80: note = Synthetic: >GCS-227-cand-11670-11749
  source 1..80: mol_type = other DNA
agataaccagaatggctgaaacagctgctgcgcaaatgtataaagaggcgcgtgctgaaaataagaaatctaaagtcatt

SEQ ID NO: 7321 - DNA, 80 bp, synthetic construct
  misc_feature 1..80: note = Synthetic: >GCS-211-cand-11680-11759
  source 1..80: mol_type = other DNA
agaatggctgaaacagctgctgcgcaaatgtataaagaggcgcgtgctgaaaataagaaatctaaggtcattagcgctct

SEQ ID NO: 7322 - DNA, 80 bp, synthetic construct
  misc_feature 1..80: note = Synthetic: >GCS-211-cand-16470-16549
  source 1..80: mol_type = other DNA
tgtatggttgggttgggtttgtactatcccggtgctagaataatgttcactgcatgttcccatgctgccactgactcatt

SEQ ID NO: 7323 - DNA, 80 bp, synthetic construct
  misc_feature 1..80: note = Synthetic: >GCS-227-cand-16470-16549
  source 1..80: mol_type = other DNA
tatggttggattgggtttgtactatcccggtgctagaataatgttcactgcatgttcccatgctgccactgactcattgt

SEQ ID NO: 7324 - DNA, 80 bp, synthetic construct
  misc_feature 1..80: note = Synthetic: >SBB-797-cand-28370-28449
  source 1..80: mol_type = other DNA
gtcctattaccctaaacagttgggtacttttgctcaacctttaagggatgagttataggaacgaacatggaccgtgcatt

SEQ ID NO: 7325 - DNA, 80 bp, synthetic construct
  misc_feature 1..80: note = Synthetic: >SBB-747-cand-28360-28439
  source 1..80: mol_type = other DNA
attaccccaagcagttgggcacttttgctcgacctgttagggatgagttataggaacgaacatggaccgtgcatttggta

SEQ ID NO: 7326 - DNA, 80 bp, synthetic construct
  misc_feature 1..80: note = Synthetic: >GCS-211-cand-14550-14629
  source 1..80: mol_type = other DNA
aatgccgccgttgttataggtacaactaaattttatggtggctgggataatatgcttaaaaacctgattgaaggagttga

SEQ ID NO: 7327 - DNA, 80 bp, synthetic construct
  misc_feature 1..80: note = Synthetic: >GCS-227-cand-14550-14629
  source 1..80: mol_type = other DNA
tgccgccgttgttataggtacaactaaattttatggtggctgggataatatgcttaaaaacctgattgaaggagttgaaa

SEQ ID NO: 7328 - DNA, 80 bp, synthetic construct
  misc_feature 1..80: note = Synthetic: >GCS-227-cand-17260-17339
  source 1..80: mol_type = other DNA
gcttgtaatgtcaatcgctttaatgtcgccataacgcgtgcaaagaaaggtatcttttgcattatgagtgacaaagcatt

SEQ ID NO: 7329 - DNA, 80 bp, synthetic construct
  misc_feature 1..80: note = Synthetic: >GCS-211-cand-17270-17349
  source 1..80: mol_type = other DNA
tgtcaatcgctttaatgtcgccataacgcgtgcaaagaaaggtatcttttgcattatgagtgacaaagcattgtttgata

SEQ ID NO: 7330 - DNA, 80 bp, synthetic construct
  misc_feature 1..80: note = Synthetic: >GCS-227-cand-27410-27489
  source 1..80: mol_type = other DNA
aatgcttttcggtagcgaaataaccactaaggaggttgggaaagatgttgtccttgagttcaaatacaaagtgcaaacca

SEQ ID NO: 7331 - DNA, 80 bp, synthetic construct
  misc_feature 1..80: note = Synthetic: >GCS-211-cand-27410-27489
  source 1..80: mol_type = other DNA
gcaatgcttttcggtagcgaaataaccactaaggaggttgggaaagatgttgtccttgagttcaaatacaaagtgcaaac

SEQ ID NO: 7332 - DNA, 80 bp, synthetic construct
  misc_feature 1..80: note = Synthetic: >SBB-797-cand-28850-28929
  source 1..80: mol_type = other DNA
attagattgatactttcgagtgagactgaggtttgaccgcttcagtccactcttatacagaatggaatcctagtgtacag

SEQ ID NO: 7333 - DNA, 80 bp, synthetic construct
  misc_feature 1..80: note = Synthetic: >SBB-747-cand-28840-28919
  source 1..80: mol_type = other DNA
attgatattttcgagtgagactgaggtttgaccgcttcagtccactcttatacagaatggaatcctagtgtacagcggta

SEQ ID NO: 7334 - DNA, 80 bp, synthetic construct
  misc_feature 1..80: note = Synthetic: >SBB-130-cand-18320-18399
  source 1..80: mol_type = other DNA
attatgtgccattgcgtgcctccaattgtattacacgttgtaacattggaggtgctgtttgtagcacacacgcggcgcag

SEQ ID NO: 7335 - DNA, 80 bp, synthetic construct
  misc_feature 1..80: note = Synthetic: >SBB-010-cand-18330-18409
  source 1..80: mol_type = other DNA
gccattgcgtgcctccaattgtattacacgttgtaacattggaggtgctgtttgtagcacacatgcggcgcagtatcatg

SEQ ID NO: 7336 - DNA, 80 bp, synthetic construct
  misc_feature 1..80: note = Synthetic: >SBB-122-cand-9030-9109
  source 1..80: mol_type = other DNA
attattcgacaaaccaccaagatctattatacacccctcctactattagttacaactccactcttcaatctggtttgaaa

SEQ ID NO: 7337 - DNA, 80 bp, synthetic construct
  misc_feature 1..80: note = Synthetic: >SBB-120-cand-9020-9099
  source 1..80: mol_type = other DNA
gctatgttagattattctacaaaccaccaagaccttttatacacccctcctactattagttacaactccactcttcaatc

SEQ ID NO: 7338 - DNA, 80 bp, synthetic construct
  misc_feature 1..80: note = Synthetic: >GCS-211-cand-26690-26769
  source 1..80: mol_type = other DNA
attcgttggcgcatgcagaaaggcaagcgtcttaaccttcccagtaaatggcactactatcctcttggcactgggcctca

SEQ ID NO: 7339 - DNA, 80 bp, synthetic construct
  misc_feature 1..80: note = Synthetic: >GCS-227-cand-26690-26769
  source 1..80: mol_type = other DNA
tcgttggcgcatgcagaaaggcaagcgtcttaaccttcccagtaaatggcactactatcctcttggcactgggcctcatg

SEQ ID NO: 7340 - DNA, 80 bp, synthetic construct
  misc_feature 1..80: note = Synthetic: >GCS-211-cand-13510-13589
  source 1..80: mol_type = other DNA
attcttatatgatgccagttatgggcatgaccaattgtttggctagtgagtgttttattaagagtgacatctttggttcc

SEQ ID NO: 7341 - DNA, 80 bp, synthetic construct
  misc_feature 1..80: note = Synthetic: >GCS-227-cand-13510-13589
  source 1..80: mol_type = other DNA
tcttatatgatgccagttatgggcatgaccaattgtttggctagtgagtgttttgttaagagtgacatctttggttccga

SEQ ID NO: 7342 - DNA, 80 bp, synthetic construct
  misc_feature 1..80: note = Synthetic: >SBB-024-cand-2230-2309
  source 1..80: mol_type = other DNA
caatttccgtgcacctagttacattcaagatacagaagcttttattgctgcttgttatgcttgtgttgacctaaaagaat

SEQ ID NO: 7343 - DNA, 80 bp, synthetic construct
  misc_feature 1..80: note = Synthetic: >GCS-211-cand-9280-9359
  source 1..80: mol_type = other DNA
attgacaaaaatgtttatgccaagttagtcaatagcattacaccagaaaagttgaaacaacacgctagtagttacaacaa

SEQ ID NO: 7344 - DNA, 80 bp, synthetic construct
  misc_feature 1..80: note = Synthetic: >GCS-227-cand-9280-9359
  source 1..80: mol_type = other DNA
tgacaaaaatgtttatgccaagttagtcaatagcattacaccagaaaagttgaaacaacacgctagtagttacaacaaat

SEQ ID NO: 7345 - DNA, 80 bp, synthetic construct
  misc_feature 1..80: note = Synthetic: >GCS-211-cand-24540-24619
  source 1..80: mol_type = other DNA
attggacaataccacaatttccattggatattttcaatcaaacttatctgaacttatcaggtgagattgctgaccttgaa

SEQ ID NO: 7346 - DNA, 80 bp, synthetic construct
  misc_feature 1..80: note = Synthetic: >GCS-227-cand-24530-24609
  source 1..80: mol_type = other DNA
gatcccaaattggacaataccacaatttccattggatattttcaatcaaacttatctgaacttatcaggtgagattgctg

SEQ ID NO: 7347 - DNA, 80 bp, synthetic construct
  misc_feature 1..80: note = Synthetic: >GCS-227-cand-4330-4409
  source 1..80: mol_type = other DNA
taagttggaacatgattttgttgtcaacgctgctaacggtaagcttgcacatggtggtggtgtcgctaaggccattgatg

SEQ ID NO: 7348 - DNA, 80 bp, synthetic construct
  misc_feature 1..80: note = Synthetic: >GCS-211-cand-4330-4409
  source 1..80: mol_type = other DNA
gttaagttggaacatgattttgttgtcaacgctgctaacggtaagcttgcacatggtggtggtgtcgctaaggccattga

SEQ ID NO: 7349 - DNA, 80 bp, synthetic construct
  misc_feature 1..80: note = Synthetic: >SBB-747-cand-27560-27639
  source 1..80: mol_type = other DNA
ctttgaagatgcctctactggcacagaccagcctgtagttaaggtctgggttaaggacgaaggtatgcaaactgacgatg

SEQ ID NO: 7350 - DNA, 80 bp, synthetic construct
  misc_feature 1..80: note = Synthetic: >SBB-797-cand-27570-27649
  source 1..80: mol_type = other DNA
gtagtctttgaagatgcctctactggcacagaccagcctgtagttaaggtctgggttaaggacgaaggtatgcaaactga

SEQ ID NO: 7351 - DNA, 80 bp, synthetic construct
  misc_feature 1..80: note = Synthetic: >GCS-227-cand-4090-4169
  source 1..80: mol_type = other DNA
gttgtcagtcgtttaccatggtgcgcgtgatggtggtcattatttagttaatgattacaaacacaaattgtgcatagatg

SEQ ID NO: 7352 - DNA, 80 bp, synthetic construct
  misc_feature 1..80: note = Synthetic: >GCS-211-cand-4090-4169
  source 1..80: mol_type = other DNA
cggttgtcagtcgtttaccatggtgcgcgtgatggtggtcattatttagttaatgattacaaacacaaattgtgcataga

SEQ ID NO: 7353 - DNA, 80 bp, synthetic construct
  misc_feature 1..80: note = Synthetic: >SBB-120-cand-17950-18029
  source 1..80: mol_type = other DNA
catgatgttggtaatcctaagggtatacggtgtgctgttactgatgcacgctggtattgctatgacaagcaaccgcttaa

SEQ ID NO: 7354 - DNA, 80 bp, synthetic construct
  misc_feature 1..80: note = Synthetic: >GCS-227-cand-22690-22769
  source 1..80: mol_type = other DNA
tgccagcagctgatgcaggtataaaggatgttagtcacgttgttcaatctcaatgtactgattacaacatttatggcatg

SEQ ID NO: 7355 - DNA, 80 bp, synthetic construct
  misc_feature 1..80: note = Synthetic: >GCS-211-cand-22700-22779
  source 1..80: mol_type = other DNA
gctgatgtaggtataaaggatgtcagtcacgttgtgcaatctcaatgtactgattacaacatttatggcatggtaggtac

SEQ ID NO: 7356 - DNA, 80 bp, synthetic construct
  misc_feature 1..80: note = Synthetic: >GCS-227-cand-13350-13429
  source 1..80: mol_type = other DNA
catgcttaaatgcgtagcattgtgtgatacgatggttgccaagggtgttataggtgtcttaacattagacaatcaggatc

SEQ ID NO: 7357 - DNA, 80 bp, synthetic construct
  misc_feature 1..80: note = Synthetic: >GCS-211-cand-13350-13429
  source 1..80: mol_type = other DNA
gccatgcttaaatgcgtagcattgtgtgatacgatggttgccaagggcgttataggtgtcttaacattagacaatcagga

SEQ ID NO: 7358 - DNA, 80 bp, synthetic construct
  misc_feature 1..80: note = Synthetic: >SBB-788-cand-22000-22079
  source 1..80: mol_type = other DNA
tggaagcgtcacacagttacaaattgttcatttgactttgacgctattgttaatagactccccacttttcagcttaaatg

SEQ ID NO: 7359 - DNA, 80 bp, synthetic construct
  misc_feature 1..80: note = Synthetic: >SBB-024-cand-9990-10069
  source 1..80: mol_type = other DNA
gtgtgtcattacagggtactaaagtctctaactctattagcaatgttgctattgttggtgctttccttgttatgttttgg

SEQ ID NO: 7360 - DNA, 80 bp, synthetic construct
  misc_feature 1..80: note = Synthetic: >SBB-122-cand-9990-10069
  source 1..80: mol_type = other DNA
gcgtgtcattacagggtaccaaagtttctaactccattagcaatgtagctattgttggtgctttccttgttatgttttgg

SEQ ID NO: 7361 - DNA, 80 bp, synthetic construct
  misc_feature 1..80: note = Synthetic: >SBB-122-cand-26260-26339
  source 1..80: mol_type = other DNA
tgacgaggacgttacagcatgctttggtccaagggacgcagctcgcaacttcggtgatgcagctctcgtcagaaatggcg

SEQ ID NO: 7362 - DNA, 80 bp, synthetic construct
  misc_feature 1..80: note = Synthetic: >SBB-120-cand-26290-26369
  source 1..80: mol_type = other DNA
gacgttacagcatgctttggtccaagggacgcagctcgcaacttcggtgatgcagctctcgtcagaaatggcgtggacgc

SEQ ID NO: 7363 - DNA, 80 bp, synthetic construct
  misc_feature 1..80: note = Synthetic: >GCS-211-cand-4170-4249
  source 1..80: mol_type = other DNA
tggtatgggtgtacagccaattacctcagtacgtgttacaaccttgttggtggtagatgcagattaccaagcagctgccg

SEQ ID NO: 7364 - DNA, 80 bp, synthetic construct
  misc_feature 1..80: note = Synthetic: >GCS-227-cand-4170-4249
  source 1..80: mol_type = other DNA
gtatgggtgtacagccaattacctcagcacgtgttacaaccttgttggtggtagatgcagattaccaagcagctgccgaa

SEQ ID NO: 7365 - DNA, 80 bp, synthetic construct
  misc_feature 1..80: note = Synthetic: >GCS-211-cand-28530-28609
  source 1..80: mol_type = other DNA
tttcttctggaggcgtagcctcatgtctagttatcaaggcgactagatcacaccacctcattattgtggttgactagccg

SEQ ID NO: 7366 - DNA, 80 bp, synthetic construct
  misc_feature 1..80: note = Synthetic: >GCS-227-cand-28530-28609
  source 1..80: mol_type = other DNA
tcttctggaggcgtagcctcatgtctagttatcaaggcgactagatcatatcacctcattattgtggttgactagccgtc

SEQ ID NO: 7367 - DNA, 80 bp, synthetic construct
  misc_feature 1..80: note = Synthetic: >SBB-797-cand-28930-29009
  source 1..80: mol_type = other DNA
cggtataagtaagttgtgcattcgctatgtttaggtttagaatgtagtttagtgctagctgattagagtatgttaaagac

SEQ ID NO: 7368 - DNA, 80 bp, synthetic construct
  misc_feature 1..80: note = Synthetic: >SBB-747-cand-28920-28999
  source 1..80: mol_type = other DNA
taagtaagttgtgcattcgctatggttaggtttagaatgtagtttagtgctagctgattagagtatgttaaagactttta

SEQ ID NO: 7369 - DNA, 80 bp, synthetic construct
  misc_feature 1..80: note = Synthetic: >SBB-130-cand-23680-23759
  source 1..80: mol_type = other DNA
tggctggtgtgatgctatggtgttgtcttgcaactggctgctgcggtatgtgtggttgtctttccgctacatgcgctacg

SEQ ID NO: 7370 - DNA, 80 bp, synthetic construct
  misc_feature 1..80: note = Synthetic: >SBB-120-cand-24290-24369
  source 1..80: mol_type = other DNA
cgtcatgtctgcttcggtcatcatgtcataccttttgtcagcgccaatgaattatacattgccttgcgagggcgaaagga

SEQ ID NO: 7371 - DNA, 80 bp, synthetic construct
  misc_feature 1..80: note = Synthetic: >SBB-122-cand-24280-24359
  source 1..80: mol_type = other DNA
tggcggtgaccgtcatgtctgcttcggtcatcatgtcataccttttgtcaatgcaaatgaattatacattgccttgcgag

SEQ ID NO: 7372 - DNA, 80 bp, synthetic construct
  misc_feature 1..80: note = Synthetic: >SBB-010-cand-6410-6489
  source 1..80: mol_type = other DNA
gtaaaagaccccttgtttaaaagagttatgccgttgttttacatggctttcttgcttatctttggtggtgttgttacacg

SEQ ID NO: 7373 - DNA, 80 bp, synthetic construct
  misc_feature 1..80: note = Synthetic: >SBB-120-cand-8310-8389
  source 1..80: mol_type = other DNA
ctaaggcaggtgtttgctttggttttaacaggtttcttgtttatgatggtgagtcaggttctgattttatttgtggcaca

SEQ ID NO: 7374 - DNA, 80 bp, synthetic construct
  misc_feature 1..80: note = Synthetic: >AvianCoV-cand-6120-6199
  source 1..80: mol_type = other DNA
attatttgctattgtgttaagtatttggttttgagttcaactgttttgcaaactggtgtaggatttttagactggtttat

SEQ ID NO: 7375 - DNA, 80 bp, synthetic construct
  misc_feature 1..80: note = Synthetic: >AvianCoV-cand-6200-6279
  source 1..80: mol_type = other DNA
tcaaacagtttttactaactttaattttatgggtgcaggattttatttctggctcttttataagatatatatacaggtgc

SEQ ID NO: 7376 - DNA, 80 bp, synthetic construct
  misc_feature 1..80: note = Synthetic: >AvianCoV-cand-6280-6359
  source 1..80: mol_type = other DNA
atcatataatgtactgtaaggatataacatgtgaagtgtgtaagagagttgcacgcagtaatagacatgaggttagtgtt

SEQ ID NO: 7377 - DNA, 80 bp, synthetic construct
  misc_feature 1..80: note = Synthetic: >AvianCoV-cand-6360-6439
  source 1..80: mol_type = other DNA
gttgttggtgggcgtaaacaacttgtgcacgtctacactaactcaggctataatttttgtaagagacataattggtattg

SEQ ID NO: 7378 - DNA, 80 bp, synthetic construct
  misc_feature 1..80: note = Synthetic: >AvianCoV-cand-6440-6519
  source 1..80: mol_type = other DNA
tagaaattgtgatgagtatggtcaccaaaatacatttatgtctcctgaagttgctggcgagctttctgaaaagcttaagc

SEQ ID NO: 7379 - DNA, 80 bp, synthetic construct
  misc_feature 1..80: note = Synthetic: >AvianCoV-cand-6520-6599
  source 1..80: mol_type = other DNA
gccatgttaaacctacagcatatgcataccacgttgtggatgatgcatgcttagttgatgattttgttaatttaaagtat

SEQ ID NO: 7380 - DNA, 80 bp, synthetic construct
  misc_feature 1..80: note = Synthetic: >AvianCoV-cand-6600-6679
  source 1..80: mol_type = other DNA
aatgctgcaactcctggtaaggatggtgcaccttctgctgttaaatgttttagtgttacagatttcttaaagaaagctgt

SEQ ID NO: 7381 - DNA, 80 bp, synthetic construct
  misc_feature 1..80: note = Synthetic: >AvianCoV-cand-6680-6759
  source 1..80: mol_type = other DNA
ttttcttaaggatgcactgaaatgtgaacaaatatctaatgatagttttatagtttgtaatacacagagtgcgcatgcat

SEQ ID NO: 7382 - DNA, 80 bp, synthetic construct
  misc_feature 1..80: note = Synthetic: >AvianCoV-cand-6760-6839
  source 1..80: mol_type = other DNA
tagaggaagcaaaaaatgctgccatctattatgcgcaatgtctgtgtaaaccaatacttatacttgaccaggcactttat

SEQ ID NO: 7383 - DNA, 80 bp, synthetic construct
  misc_feature 1..80: note = Synthetic: >AvianCoV-cand-6840-6919
  source 1..80: mol_type = other DNA
gaacaattagttgtagaacctgtgtcaaagagtgttgtagataaggtgtgtagcattttgtctaatataatatctgtaga

SEQ ID NO: 7384 - DNA, 80 bp, synthetic construct
  misc_feature 1..80: note = Synthetic: >AvianCoV-cand-6920-6999
  source 1..80: mol_type = other DNA
tactgcagctttgaattataaggctggcacacttcgtgatgccctcctttctgttactaaagatgaagaagctgtagata

SEQ ID NO: 7385 - DNA, 80 bp, synthetic construct
  misc_feature 1..80: note = Synthetic: >AvianCoV-cand-7000-7079
  source 1..80: mol_type = other DNA
tggctatcttctgtcataataatgatgttgaatatactagtgatggttttactaatgttgtaccgtcatatggtatagac

SEQ ID NO: 7386 - DNA, 80 bp, synthetic construct
  misc_feature 1..80: note = Synthetic: >AvianCoV-cand-7080-7159
  source 1..80: mol_type = other DNA
actgataaattaacacctcgtgatagaggctttttgataaatgcagatgcttccattgctaacttgagagtgaaaaattc

SEQ ID NO: 7387 - DNA, 80 bp, synthetic construct
  misc_feature 1..80: note = Synthetic: >AvianCoV-cand-7160-7239
  source 1..80: mol_type = other DNA
tccgccagtagtatggaagttttctgatcttattaaattgtctgacagttgtcttaaatatttaatatcagcaactgtca

SEQ ID NO: 7388 - DNA, 80 bp, synthetic construct
  misc_feature 1..80: note = Synthetic: >AvianCoV-cand-7240-7319
  source 1..80: mol_type = other DNA
agtcaggaggtcgtttctttataacaaggtctggtgctaaacaagttatttcttgttatactcagaaattgttagtagag

SEQ ID NO: 7389 - DNA, 80 bp, synthetic construct
  misc_feature 1..80: note = Synthetic: >AvianCoV-cand-7320-7399
  source 1..80: mol_type = other DNA
aagaaggctggtggtgtcgttagtagcacttttaattggtttaagagttgttgtaaatggctcttagtgttttatttact

SEQ ID NO: 7390 - DNA, 80 bp, synthetic construct
  misc_feature 1..80: note = Synthetic: >Beluga-cand-11260-11339
  source 1..80: mol_type = other DNA
cagatatgtctctttgggagaaggttgttgtacatgattatgttgtgtatggtaacatcgtctgggatatcaatgaagtt

SEQ ID NO: 7391 - DNA, 80 bp, synthetic construct
  misc_feature 1..80: note = Synthetic: >Beluga-cand-11340-11419
  source 1..80: mol_type = other DNA
gttgatatggatggtaatcaaattttgccatgccgtgtatctggtgaagcctcatggcctttggaagttaggcttgtgag

SEQ ID NO: 7392 - DNA, 80 bp, synthetic construct
  misc_feature 1..80: note = Synthetic: >Beluga-cand-11420-11499
  source 1..80: mol_type = other DNA
gaatggaaagctagtgggtgatctagctttgttacagaataatgagttgttgcctacgggcataaagaagagtccttgtg

SEQ ID NO: 7393 - DNA, 80 bp, synthetic construct
  misc_feature 1..80: note = Synthetic: >Beluga-cand-11500-11579
  source 1..80: mol_type = other DNA
tggctggtgcgaaccaggaaaggtgtgctgtgcccgcaaacgcatattatacgagtttgaaaggacaacattttgtagct

SEQ ID NO: 7394 - DNA, 80 bp, synthetic construct
  misc_feature 1..80: note = Synthetic: >Beluga-cand-11580-11659
  source 1..80: mol_type = other DNA
gccataacatcagaggatccaactctgaagtatgcctcttttacgggagcttcaggcaacttagttgtagttgaacttga

SEQ ID NO: 7395 - DNA, 80 bp, synthetic construct
  misc_feature 1..80: note = Synthetic: >Beluga-cand-11660-11739
  source 1..80: mol_type = other DNA
acctccatgtaagtttggtgtaaaaacaccagatggtgcagttaaagttatgcatctgtattttgttaaaaatgttaaga

SEQ ID NO: 7396 - DNA, 80 bp, synthetic construct
  misc_feature 1..80: note = Synthetic: >Beluga-cand-11740-11819
  source 1..80: mol_type = other DNA
atattgtaagaggtatggtgcttggtgcccttactaatgtagttgctttgcaacatggtgtaagtaccgaatcagtggaa

SEQ ID NO: 7397 - DNA, 80 bp, synthetic construct
  misc_feature 1..80: note = Synthetic: >Beluga-cand-11820-11899
  source 1..80: mol_type = other DNA
aactgtggtatattaagcctatgtagttttgctcttgatgctaaggaatgttatcttgaatatattaaggaaggaggtac

SEQ ID NO: 7398 - DNA, 80 bp, synthetic construct
  misc_feature 1..80: note = Synthetic: >Beluga-cand-11900-11979
  source 1..80: mol_type = other DNA
gcccctttctaattgtgttaagatgcttaccttgcatactggttctggtgctgctgtcactgtaaagccggcgcccacac

SEQ ID NO: 7399 - DNA, 80 bp, synthetic construct
  misc_feature 1..80: note = Synthetic: >Beluga-cand-11980-12059
  source 1..80: mol_type = other DNA
cagaacaagattcttttggcggtgcttctgtgtgcttgtattgtagagcacatatttcgcatccaggtgtttatggagtt

SEQ ID NO: 7400 - DNA, 80 bp, synthetic construct
  misc_feature 1..80: note = Synthetic: >Beluga-cand-12060-12139
  source 1..80: mol_type = other DNA
tgccaatttaaaggtaaatttgttcagatacccgtagaggagaaagatcctgtaggattttgcttacgtaataaaatttg

SEQ ID NO: 7401 - DNA, 80 bp, synthetic construct
  misc_feature 1..80: note = Synthetic: >Beluga-cand-12140-12219
  source 1..80: mol_type = other DNA
tactgtttgtcaaatgtggattggatttggttgccaatgtgattctttaagaaaagaccccttatccatagacccgaagc

SEQ ID NO: 7402 - DNA, 80 bp, synthetic construct
  misc_feature 1..80: note = Synthetic: >Beluga-cand-12220-12299
  source 1..80: mol_type = other DNA
ctgcggcaatgccaataagaccaaaggaactgctgggagtaagggccgcgggggaaaacagccaggacagcgctgggttt

SEQ ID NO: 7403 - DNA, 80 bp, synthetic construct
  misc_feature 1..80: note = Synthetic: >Beluga-cand-12300-12379
  source 1..80: mol_type = other DNA
caccatcctggacttgacttcacgcgcgtaggggccaattctgaatcactggaactgcaatctgttccacagaattattt

SEQ ID NO: 7404 - DNA, 80 bp, synthetic construct
  misc_feature 1..80: note = Synthetic: >Beluga-cand-12380-12459
  source 1..80: mol_type = other DNA
aaacgggtacggggtctcagtgaagctcgactgaggccctgtgcatcgggattgttacctgatgttgttaaaagagcttt

SEQ ID NO: 7405 - DNA, 80 bp, synthetic construct
  misc_feature 1..80: note = Synthetic: >Beluga-cand-12460-12539
  source 1..80: mol_type = other DNA
tgatctttataatagtaatacagctggaatgtatgcttctttaaaacataattgtgcccgctttcaggagctggatgaga

SEQ ID NO: 7406 - DNA, 80 bp, synthetic construct
  misc_feature 1..80: note = Synthetic: >Beluga-cand-31700-31779
  source 1..80: mol_type = other DNA
tgagagaagccctgcaatgtaaatccattggggaaagagctagaaaagattgtaactattctaggtgattgtgaaaagta

SEQ ID NO: 7407 - DNA, 80 bp, synthetic construct
  misc_feature 1..80: note = Synthetic: >BetaCoV1-cand-0-79
  source 1..80: mol_type = other DNA
ctgataaagtgtggattagattagatctaacaaaatcgcttccgtagcaagcctcctcgcaccctcgatctcttgttaga

SEQ ID NO: 7408 - DNA, 80 bp, synthetic construct
  misc_feature 1..80: note = Synthetic: >BetaCoV1-cand-80-159
  source 1..80: mol_type = other DNA
tcactaatctaatctaaactttataaaaacactaggtccctgctagcctatgcctgagggtttaggcgttgcatagtctt

SEQ ID NO: 7409 - DNA, 80 bp, synthetic construct
  misc_feature 1..80: note = Synthetic: >BetaCoV1-cand-160-239
  source 1..80: mol_type = other DNA
gtatttcaagtctagtgtctctaggaatttgactgataacactttccagctaacggcgtgttgcactctcggtcttaagc

SEQ ID NO: 7410 - DNA, 80 bp, synthetic construct
  misc_feature 1..80: note = Synthetic: >BetaCoV1-cand-240-319
  source 1..80: mol_type = other DNA
ctcccacccataggaggtatcatggctaagcctaaatctgatatgcttagagtcaacaaatacggcctcacgctaaaatg

SEQ ID NO: 7411 - DNA, 80 bp, synthetic construct
  misc_feature 1..80: note = Synthetic: >BetaCoV1-cand-320-399
  source 1..80: mol_type = other DNA
ggccccagaatttccgtggatgtttgaggacacagaggagaagttgggtaaccctgatagcggagatggggatgggtttt

SEQ ID NO: 7412 - DNA, 80 bp, synthetic construct
  misc_feature 1..80: note = Synthetic: >BetaCoV1-cand-400-479
  source 1..80: mol_type = other DNA
gctccccagttaagcagaaagagggatcggtcaaagatcattttgataatcacgttaagatggattgtagcatcctatct

SEQ ID NO: 7413 - DNA, 80 bp, synthetic construct
  misc_feature 1..80: note = Synthetic: >BetaCoV1-cand-480-559
  source 1..80: mol_type = other DNA
acttatgatatggtgtgcgcagtctgctctgatacgtgatatagtccttaagacaggaccggaagataccgagtctgttt

SEQ ID NO: 7414 - DNA, 80 bp, synthetic construct
  misc_feature 1..80: note = Synthetic: >BetaCoV1-cand-560-639
  source 1..80: mol_type = other DNA
taaagcaagccttgttgtcccgcgaggcagtctttgtgcgaccaccccagcacatgactcttgagtcatgttatgcagga

SEQ ID NO: 7415 - DNA, 80 bp, synthetic construct
  misc_feature 1..80: note = Synthetic: >BetaCoV1-cand-640-719
  source 1..80: mol_type = other DNA
gggtgtgttcctaaaggatgggtcatgggtcagttccgccggtgcacaacctgtactacagggaattgtggtgtggacaa

SEQ ID NO: 7416 - DNA, 80 bp, synthetic construct
  misc_feature 1..80: note = Synthetic: >BetaCoV1-cand-720-799
  source 1..80: mol_type = other DNA
acatgtatcctatgagctctacctgatcagccctcaaggtgttggttatggtgcgggccgttttatgggttgggtagtac

SEQ ID NO: 7417 - DNA, 80 bp, synthetic construct
  misc_feature 1..80: note = Synthetic: >BetaCoV1-cand-800-879
  source 1..80: mol_type = other DNA
caaagagtgtgctgtcacccaaagctcttgcgcgcttggaaccttatgttcttaaggtgcgcaagacaggagttaaaggt

SEQ ID NO: 7418 - DNA, 80 bp, synthetic construct
  misc_feature 1..80: note = Synthetic: >BetaCoV1-cand-880-959
  source 1..80: mol_type = other DNA
gcttacagtcgtgggcactatgaacagccgggtgataagaaggggttatgaggttcgagttttgccctggataatgcctg

SEQ ID NO: 7419 - DNA, 80 bp, synthetic construct
  misc_feature 1..80: note = Synthetic: >BetaCoV1-cand-960-1039
  source 1..80: mol_type = other DNA
tgatgaagtcatgagtgcgccaaagggcaagttctctgccaaagcctatgctcttttaagacagtatagaggcttgaaac

SEQ ID NO: 7420 - DNA, 80 bp, synthetic construct
  misc_feature 1..80: note = Synthetic: >BetaCoV1-cand-1040-1119
  source 1..80: mol_type = other DNA
ctcttgtttttgtggaccagtatgggtgtgactatactggcagccttgcacaaggtctttccgcttttggggaatgcagt

SEQ ID NO: 7421 - DNA, 80 bp, synthetic construct
  misc_feature 1..80: note = Synthetic: >BetaCoV1-cand-1120-1199
  source 1..80: mol_type = other DNA
gtgaaagagatgagagttggtacttggaagtccagtcagtctggcttgcatctgaccaatttgagtatgtggtggcatgg

SEQ ID NO: 7422 - DNA, 80 bp, synthetic construct
  misc_feature 1..80: note = Synthetic: >BetaCoV1-cand-24510-24589
  source 1..80: mol_type = other DNA
attggcaccttgagtgcttctgtatgccaatatactatgtgtgaataccctaacacggcttgtaatccagccttgggtaa

SEQ ID NO: 7423 - DNA, 80 bp, synthetic construct
  misc_feature 1..80: note = Synthetic: >BetaCoV1-cand-24830-24909
  source 1..80: mol_type = other DNA
aacttatgtgcagtattgggtcacacctctgactaagagggaatatcttctagtcttcgatggcaatggtgcaattacta

SEQ ID NO: 7424 - DNA, 80 bp, synthetic construct
  misc_feature 1..80: note = Synthetic: >BetaCoV1-cand-24990-25069
  source 1..80: mol_type = other DNA
gagctcactggatacactgttcaaccaatagcagatgtgtacaggcgtatacccaatctccccgattgtgagattgaaca

SEQ ID NO: 7425 - DNA, 80 bp, synthetic construct
  misc_feature 1..80: note = Synthetic: >BetaCoV1-cand-25230-25309
  source 1..80: mol_type = other DNA
agcataactatagataaatttgccattccaaatagtagaaaggttgatctacagtttggaagttcagggtacattcagaa

SEQ ID NO: 7426 - DNA, 80 bp, synthetic construct
  misc_feature 1..80: note = Synthetic: >BetaCoV1-cand-25310-25389
  source 1..80: mol_type = other DNA
ttacaattataggttggaccagtccgctacttcttgtcaattgtattatggcattcctgccaataatgtaacagttacca

SEQ ID NO: 7427 - DNA, 80 bp, synthetic construct
  misc_feature 1..80: note = Synthetic: >CDPHE15-cand-19660-19739
  source 1..80: mol_type = other DNA
gaagtgtgggtatagtatgccagcactttataagatacaacgtatgtgtctagaaccttgtaatttgtataattatggtg

SEQ ID NO: 7428 - DNA, 80 bp, synthetic construct
  misc_feature 1..80: note = Synthetic: >CDPHE15-cand-19740-19819
  source 1..80: mol_type = other DNA
ctggcattaagttacctgacggcattatgtttaatgtcgtcaaatatacacaattgtgccaatacctgaatagtaccact

SEQ ID NO: 7429 - DNA, 80 bp, synthetic construct
  misc_feature 1..80: note = Synthetic: >CDPHE15-cand-19820-19899
  source 1..80: mol_type = other DNA
atgtgtgtgcctcatcatatgcgctgtttacaccttggtgctggctctgataagggcgttgcaccaggtactgcagtact

SEQ ID NO: 7430 - DNA, 80 bp, synthetic construct
  misc_feature 1..80: note = Synthetic: >CDPHE15-cand-19900-19979
  source 1..80: mol_type = other DNA
caagcgctggctgcctattgatgccgtcattgttgacaatgacgttaatgattatgtcagtgatgctgactttagttaca

SEQ ID NO: 7431 - DNA, 80 bp, synthetic construct
  misc_feature 1..80: note = Synthetic: >CDPHE15-cand-19980-20059
  source 1..80: mol_type = other DNA
caggcgactgtacaactttgtatttggctgacaagtttgatttggtcatctctgatatgtatgatggtaagattaagctg

SEQ ID NO: 7432 - DNA, 80 bp, synthetic construct
  misc_feature 1..80: note = Synthetic: >CDPHE15-cand-20060-20139
  source 1..80: mol_type = other DNA
tgtgatggtgacaatgtttcaaaggaaggctttttcacatacatcaatggtgttatatgcgaaaaacttgccataggtgg

SEQ ID NO: 7433 - DNA, 80 bp, synthetic construct
  misc_feature 1..80: note = Synthetic: >CDPHE15-cand-20140-20219
  source 1..80: mol_type = other DNA
aactgtagccattaagattacagagcatagctggaacaagagactgtatgagctaatacagcgttttgaatactggacta

SEQ ID NO: 7434 - DNA, 80 bp, synthetic construct
  misc_feature 1..80: note = Synthetic: >CDPHE15-cand-20220-20299
  source 1..80: mol_type = other DNA
tgttttgtaccagcgtcaacacatcatcgtcagagtcatttcttataggcgtacattacctcggtgattacgcaacaaca

SEQ ID NO: 7435 - DNA, 80 bp, synthetic construct
  misc_feature 1..80: note = Synthetic: >CDPHE15-cand-20300-20379
  source 1..80: mol_type = other DNA
cctgtcattgatggcaatactatgcatgcaaactacatcttttggcgtaattctactatgatgactatgtcatacaatag

SEQ ID NO: 7436 - DNA, 80 bp, synthetic construct
  misc_feature 1..80: note = Synthetic: >CDPHE15-cand-20380-20459
  source 1..80: mol_type = other DNA
tgttttagaccttagtaagtttgcatgcaagcacaaggcaacggttgttgttaatttgaaagaaaatgccatttcagact

SEQ ID NO: 7437 - DNA, 80 bp, synthetic construct
  misc_feature 1..80: note = Synthetic: >CDPHE15-cand-20460-20539
  source 1..80: mol_type = other DNA
tagttgttagccttgttaggagtggaaaattgcttgttagaggttcaggcccattagttaatttgtcaaatcatttagta

SEQ ID NO: 7438 - DNA, 80 bp, synthetic construct
  misc_feature 1..80: note = Synthetic: >CDPHE15-cand-20540-20619
  source 1..80: mol_type = other DNA
aatactaaatgaaattaataattgtgctgtgcataggcctaccacatgccaatcaacggaaaaacggctccaaccaaggc

SEQ ID NO: 7439 - DNA, 80 bp, synthetic construct
  misc_feature 1..80: note = Synthetic: >CDPHE15-cand-20620-20699
  source 1..80: mol_type = other DNA
aagaatcttaatacattcttcccaaccgtccacagctaggaccgcaaaatgcaactgccgtagtacctggtgacttacct

SEQ ID NO: 7440 - DNA, 80 bp, synthetic construct
  misc_feature 1..80: note = Synthetic: >CDPHE15-cand-20700-20779
  source 1..80: mol_type = other DNA
agacccacagagccatggaattgcaataccaccaagaacgttatatataataacaccaacgcagcgtccaataggcatat

SEQ ID NO: 7441 - DNA, 80 bp, synthetic construct
  misc_feature 1..80: note = Synthetic: >CDPHE15-cand-20780-20859
  source 1..80: mol_type = other DNA
taataatgtactatgccagtgcccaagtggcccagtcagggatttactattacaccctcacaagctctttgtaaccctgc

SEQ ID NO: 7442 - DNA, 80 bp, synthetic construct
  misc_feature 1..80: note = Synthetic: >CDPHE15-cand-20860-20939
  source 1..80: mol_type = other DNA
tgcataccaactgtactttcaaaaccacactaatggcagaccacacacatgggcccacatacgcatttgcaaatgggaca

SEQ ID NO: 7443 - DNA, 80 bp, synthetic construct
  misc_feature 1..80: note = Synthetic: >CanadaGoose-cand-22160-22239
  source 1..80: mol_type = other DNA
tctttctgtgttattgccaaccacacctcaatctcggtcttttattgaagaccttttgtttgataaggttgagtccgtag

SEQ ID NO: 7444 - DNA, 80 bp, synthetic construct
  misc_feature 1..80: note = Synthetic: >CanadaGoose-cand-22240-22319
  source 1..80: mol_type = other DNA
gtttgcccactgaccaggcataccttgattgtatgcgtggatggacagctagggaccttatttgtgcacagtactataat

SEQ ID NO: 7445 - DNA, 80 bp, synthetic construct
  misc_feature 1..80: note = Synthetic: >CanadaGoose-cand-22320-22399
  source 1..80: mol_type = other DNA
ggtattatggtattgccacctattataacgcctgctatgcaagttatgtatacaggtagttttattgcatctatggcatg

SEQ ID NO: 7446 - DNA, 80 bp, synthetic construct
  misc_feature 1..80: note = Synthetic: >CanadaGoose-cand-22400-22479
  source 1..80: mol_type = other DNA
gggtggtcttactgctgctggtgccatcccgtttgcaactcagattcaagcacgcatcaatcatttgggtataacacaga

SEQ ID NO: 7447 - DNA, 80 bp, synthetic construct
  misc_feature 1..80: note = Synthetic: >CanadaGoose-cand-22480-22559
  source 1..80: mol_type = other DNA
cccttttgatagataatcaaaagatgcttgctgaatcttttaataatgctgttaaatatatgcagcagggttttgaagca

SEQ ID NO: 7448 - DNA, 80 bp, synthetic construct
  misc_feature 1..80: note = Synthetic: >CanadaGoose-cand-22560-22639
  source 1..80: mol_type = other DNA
acatcctctgcattgcaacaaattcaagatgttgtcaaccagcagggtgctgttctgcaggaagttttaaattctcttaa

SEQ ID NO: 7449 - DNA, 80 bp, synthetic construct
  misc_feature 1..80: note = Synthetic: >CanadaGoose-cand-22640-22719
  source 1..80: mol_type = other DNA
taaaaacttcggtgcagtttcttctgttattcaggatatttataagtctcttgatgagctttctgcaaatgcgcagatgg

SEQ ID NO: 7450 - DNA, 80 bp, synthetic construct
  misc_feature 1..80: note = Synthetic: >CanadaGoose-cand-22720-22799
  source 1..80: mol_type = other DNA
ataggttgattactggccgtttatcagcgctttctgtcttagcttcttccaagcaggctgaccagttgcgtgttcaacag

SEQ ID NO: 7451 - DNA, 80 bp, synthetic construct
  misc_feature 1..80: note = Synthetic: >CanadaGoose-cand-22800-22879
  source 1..80: mol_type = other DNA
caacgccagcttgcccaggacaaacttaatgagtgtgttctttctcaatccactcgtaattctttttgtggtagtggtaa

SEQ ID NO: 7452 - DNA, 80 bp, synthetic construct
  misc_feature 1..80: note = Synthetic: >CanadaGoose-cand-22880-22959
  source 1..80: mol_type = other DNA
gcatgtcatgaccataccacaaacagcacctaatggaattctttttgtccattttacatacacgccgcaaacatttaaaa

SEQ ID NO: 7453 - DNA, 80 bp, synthetic construct
  misc_feature 1..80: note = Synthetic: >CanadaGoose-cand-22960-23039
  source 1..80: mol_type = other DNA
atgttactgcggtagtgggcttttgtgtccgtggtaacaccactgactcatcttacgagtatgctctcgttccagttaat

SEQ ID NO: 7454 - DNA, 80 bp, synthetic construct
  misc_feature 1..80: note = Synthetic: >CanadaGoose-cand-23040-23119
  source 1..80: mol_type = other DNA
ggaagaggcgtatttattgaaattaatggtacatactatatcacttctcgtgatatgtatatgccacgtaatattactgc

SEQ ID NO: 7455 - DNA, 80 bp, synthetic construct
  misc_feature 1..80: note = Synthetic: >CanadaGoose-cand-23120-23199
  source 1..80: mol_type = other DNA
tggtgatgttgttacattaacatcatgccaagctaattatgtttatgttaatagaactgttgtcactacttttgtagacg

SEQ ID NO: 7456 - DNA, 80 bp, synthetic construct
  misc_feature 1..80: note = Synthetic: >CanadaGoose-cand-23200-23279
  source 1..80: mol_type = other DNA
acagtgattttgattttgatgcagaatttgataaatggtggaatgagactcagcatgactttccacagcttgatgagttc

SEQ ID NO: 7457 - DNA, 80 bp, synthetic construct
  misc_feature 1..80: note = Synthetic: >CanadaGoose-cand-23280-23359
  source 1..80: mol_type = other DNA
aactataccattcctctgcttaacatcactcaacaaatacaggatatacaggatgccattcaaggtttgaatgactccta

SEQ ID NO: 7458 - DNA, 80 bp, synthetic construct
  misc_feature 1..80: note = Synthetic: >CanadaGoose-cand-23360-23439
  source 1..80: mol_type = other DNA
tgtagacctgcatgagttgtctaaacttaccacttatattaagtggccatggtatatttggttggctattgccttcctta

SEQ ID NO: 7459 - DNA, 80 bp, synthetic construct
  misc_feature 1..80: note = Synthetic: >HKU10-cand-17920-17999
  source 1..80: mol_type = other DNA
catgagatattttgttaaagtaggacaagttaagcattgtcactgctctaaagagtctacttgttacaatagtacaactc

SEQ ID NO: 7460 - DNA, 80 bp, synthetic construct
  misc_feature 1..80: note = Synthetic: >HKU10-cand-18000-18079
  source 1..80: mol_type = other DNA
atgagtattattgtttcaagcatgcacttggttgtgattatctgtataatccttttgttattgatatacaacagtggggt

SEQ ID NO: 7461 - DNA, 80 bp, synthetic construct
  misc_feature 1..80: note = Synthetic: >HKU10-cand-18080-18159
  source 1..80: mol_type = other DNA
tatacaggctctttgagtttgaaccatcatgaagtttgtaatgtgcatcgtaatgaacatgttgcatctggtgatgctat

SEQ ID NO: 7462 - DNA, 80 bp, synthetic construct
  misc_feature 1..80: note = Synthetic: >HKU10-cand-18160-18239
  source 1..80: mol_type = other DNA
catgacacggtgtcttgcaattcatgattgttttgtgaaaagtcttgactggtctattacatatccattcattgctaacg

SEQ ID NO: 7463 - DNA, 80 bp, synthetic construct
  misc_feature 1..80: note = Synthetic: >HKU10-cand-18240-18319
  source 1..80: mol_type = other DNA
agcgtgaaattaatagtggtggtcgtgttgtgcagcgtatgctaatgaagacagccattaagttgtacaatcctaaagca

SEQ ID NO: 7464 - DNA, 80 bp, synthetic construct
  misc_feature 1..80: note = Synthetic: >HKU10-cand-18320-18399
  source 1..80: mol_type = other DNA
atccatgacattggtaatccaaagggtatccgctgtgctgtaacagatgctaagtggttttgctacgataggcaaccttt

SEQ ID NO: 7465 - DNA, 80 bp, synthetic construct
  misc_feature 1..80: note = Synthetic: >HKU10-cand-18400-18479
  source 1..80: mol_type = other DNA
gaattccaatgttaaattgtttgagtatgattatataacacacggtcaactggatggtttatgtttgttttggaattgta

SEQ ID NO: 7466 - DNA, 80 bp, synthetic construct
  misc_feature 1..80: note = Synthetic: >HKU10-cand-18480-18559
  source 1..80: mol_type = other DNA
atgttgacatgtatcctgaattttccattgtttgccggtttgatactagatgtagatctagcctcaacctagaaggcacc

SEQ ID NO: 7467 - DNA, 80 bp, synthetic construct
  misc_feature 1..80: note = Synthetic: >HKU10-cand-18560-18639
  source 1..80: mol_type = other DNA
aatggtggttctttatatgtcaacaaacatgctttccacacaccagcttttgataaacgtgcttttgctaagcttaaacc

SEQ ID NO: 7468 - DNA, 80 bp, synthetic construct
  misc_feature 1..80: note = Synthetic: >HKU10-cand-18640-18719
  source 1..80: mol_type = other DNA
tgcacccttcttcttttatgatgacggtccttgtgatcgcatacaagaagaaattaactatgttccattgcgtgctgcta

SEQ ID NO: 7469 - DNA, 80 bp, synthetic construct
  misc_feature 1..80: note = Synthetic: >HKU10-cand-18720-18799
  source 1..80: mol_type = other DNA
attgcataacacgttgtaacattggtggtgctgtttgtagtacacatgctaagcagtactatgattatgttaatgcttac

SEQ ID NO: 7470 - DNA, 80 bp, synthetic construct
  misc_feature 1..80: note = Synthetic: >HKU10-cand-18800-18879
  source 1..80: mol_type = other DNA
aatagctacactcaagctggttttacattatgggttcctaatacatttgatctttttaatttgtggcaaacttttgctga

SEQ ID NO: 7471 - DNA, 80 bp, synthetic construct
  misc_feature 1..80: note = Synthetic: >HKU10-cand-18880-18959
  source 1..80: mol_type = other DNA
tacaaagttacagagtcttgaaaatatcgcatataatgtgattaaaaagggctcttttgttggtgagtctggtgagttac

SEQ ID NO: 7472 - DNA, 80 bp, synthetic construct
  misc_feature 1..80: note = Synthetic: >HKU10-cand-18960-19039
  source 1..80: mol_type = other DNA
cagtcgccattgtaaatgacaaagtttttgtgcgagaaggcactgttgataaccttgtctttgtaaataaaacttcatta

SEQ ID NO: 7473 - DNA, 80 bp, synthetic construct
  misc_feature 1..80: note = Synthetic: >HKU10-cand-19040-19119
  source 1..80: mol_type = other DNA
cctgctaatgtggcgtttgaacttttcgctaaaagaaaagttggtttaacaccaccacttagtgtactcagaaaccttgg

SEQ ID NO: 7474 - DNA, 80 bp, synthetic construct
  misc_feature 1..80: note = Synthetic: >HKU10-cand-19120-19199
  source 1..80: mol_type = other DNA
tgttgtgagtacatataagtttgttttgtgggattatgaagcagaaagaccttttacttcttttacaaagagtacgtgta

SEQ ID NO: 7475 - DNA, 80 bp, synthetic construct
  misc_feature 1..80: note = Synthetic: >HKU14-cand-1760-1839
  source 1..80: mol_type = other DNA
aaagcagagagaaggtttgggtctcgctgatgtttggcataaacagcttttgattaatagaggtgattatcaacctcttt

SEQ ID NO: 7476 - DNA, 80 bp, synthetic construct
  misc_feature 1..80: note = Synthetic: >HKU14-cand-1840-1919
  source 1..80: mol_type = other DNA
tggataatgttgattattttagtatgcgcagagcacgttttagtatggagacagctactgtctgttcagagggatttatg

SEQ ID NO: 7477 - DNA, 80 bp, synthetic construct
  misc_feature 1..80: note = Synthetic: >HKU14-cand-1920-1999
  source 1..80: mol_type = other DNA
ccctttttgttggatggtttggtgccgcgcacttattatttggttaagagtggccaagctttttgtgatatgctttgtga

SEQ ID NO: 7478 - DNA, 80 bp, synthetic construct
  misc_feature 1..80: note = Synthetic: >HKU14-cand-2000-2079
  source 1..80: mol_type = other DNA
gtttggccaagaagttgcagatttgagcaaagagttgcttgttgtgactttagattcagttacttctgcattacaatttt

SEQ ID NO: 7479 - DNA, 80 bp, synthetic construct
  misc_feature 1..80: note = Synthetic: >HKU14-cand-2080-2159
  source 1..80: mol_type = other DNA
tgacgcttaatgttggtaggcttaccgaatgtcttaagggctttggtattaagtttgtcaacaagctgatacagtacttt

SEQ ID NO: 7480 - DNA, 80 bp, synthetic construct
  misc_feature 1..80: note = Synthetic: >HKU14-cand-2160-2239
  source 1..80: mol_type = other DNA
aaaactgctactagatgtaccgctctcgcctttgcatgggttttgcttcatgttttgcgaggcgcatatatagtggttga

SEQ ID NO: 7481 - DNA, 80 bp, synthetic construct
  misc_feature 1..80: note = Synthetic: >HKU14-cand-2240-2319
  source 1..80: mol_type = other DNA
aagtgatatatattttattatgagcattccagattatgcgcgcgttgttgtgcgtacttttcagaatgtttttaagatgg

SEQ ID NO: 7482 - DNA, 80 bp, synthetic construct
  misc_feature 1..80: note = Synthetic: >HKU14-cand-2320-2399
  source 1..80: mol_type = other DNA
cattagattgtgtaaaagtgtcatttttaaaaggcctttctgcttttaagatagggcgtgaaaaaatttgttttgtagga

SEQ ID NO: 7483 - DNA, 80 bp, synthetic construct
  misc_feature 1..80: note = Synthetic: >HKU14-cand-2400-2479
  source 1..80: mol_type = other DNA
agcaagttttataaagtggaacgaggaaatcttaatgatttggttcgtagagatttggttgttcctagtgtaacacagag

SEQ ID NO: 7484 - DNA, 80 bp, synthetic construct
  misc_feature 1..80: note = Synthetic: >HKU14-cand-2480-2559
  source 1..80: mol_type = other DNA
agctaaaaatcagcaacctgtctatttgaccggtaattgtgctcctgttaatgtagatgatgatgtggttgaggttgtta

SEQ ID NO: 7485 - DNA, 80 bp, synthetic construct
  misc_feature 1..80: note = Synthetic: >HKU14-cand-2560-2639
  source 1..80: mol_type = other DNA
ctaacccagttacatcttgtggttatcaaaaaccacctcaaaaatgtgataagatttgtattgtggataatgtttatatg

SEQ ID NO: 7486 - DNA, 80 bp, synthetic construct
  misc_feature 1..80: note = Synthetic: >HKU14-cand-2640-2719
  source 1..80: mol_type = other DNA
gctaaatgtggtgagaagttctttccagttgtggtgaacgaagattacattggccttttagatcaagcttggagatttcc

SEQ ID NO: 7487 - DNA, 80 bp, synthetic construct
  misc_feature 1..80: note = Synthetic: >HKU14-cand-2720-2799
  source 1..80: mol_type = other DNA
ttgtgctggaaagaaaatttcctttgtagaggaaccttcagtgaaggagatcgtcacaaagaagactgttaaagtctgtt

SEQ ID NO: 7488 - DNA, 80 bp, synthetic construct
  misc_feature 1..80: note = Synthetic: >HKU14-cand-2800-2879
  source 1..80: mol_type = other DNA
ttgagcttgatgctaattttaatactattttggacactgcttgtagcgtgtttgaggtagataatactgtagatatggag

SEQ ID NO: 7489 - DNA, 80 bp, synthetic construct
  misc_feature 1..80: note = Synthetic: >HKU14-cand-2880-2959
  source 1..80: mol_type = other DNA
gagtttgctgctgttgtcgctgatgcgatagaggagaaacttactccatgtaaggagcttgatggtgttggcattaaagt

SEQ ID NO: 7490 - DNA, 80 bp, synthetic construct
  misc_feature 1..80: note = Synthetic: >HKU14-cand-2960-3039
  source 1..80: mol_type = other DNA
tagtgcctttttgcagaagctggaagataataatcttcacttctttgatgaagctggtgattgtgttttggcttctaagt

SEQ ID NO: 7491 - DNA, 80 bp, synthetic construct
  misc_feature 1..80: note = Synthetic: >HKU25-cand-7700-7779
  source 1..80: mol_type = other DNA
cttgcctgcctctggtttatgcgtcgtttctataaccatgttattaacggctgtaaagatacagcttgtcttatctgtta

SEQ ID NO: 7492 - DNA, 80 bp, synthetic construct
  misc_feature 1..80: note = Synthetic: >HKU25-cand-7780-7859
  source 1..80: mol_type = other DNA
caagaggaatcgccttacccgcgttgaggccactactgttgtctgtggtgtaaaacgtacattttacattgcagcgaatg

SEQ ID NO: 7493 - DNA, 80 bp, synthetic construct
  misc_feature 1..80: note = Synthetic: >HKU25-cand-7860-7939
  source 1..80: mol_type = other DNA
gtggtacatctttctgtcgcaagcataattggaattgtgtggaatgcgattcggcaggtgtagggaataccttcatctgt

SEQ ID NO: 7494 - DNA, 80 bp, synthetic construct
  misc_feature 1..80: note = Synthetic: >HKU25-cand-7940-8019
  source 1..80: mol_type = other DNA
gaagaagttgcaaatgacctcactaccaccttgcgcaggcttataaaacctaccgataggtctcactattacgtggagtc

SEQ ID NO: 7495 - DNA, 80 bp, synthetic construct
  misc_feature 1..80: note = Synthetic: >HKU25-cand-8020-8099
  source 1..80: mol_type = other DNA
ggttcaggttaaagaaacttctgttcagttattttatgaaagagacggtcaaacctgctatgagcggttccctctctgcc

SEQ ID NO: 7496 - DNA, 80 bp, synthetic construct
  misc_feature 1..80: note = Synthetic: >HKU25-cand-8100-8179
  source 1..80: mol_type = other DNA
acttctccaacctagataaacttaagttcaaagaggtctgcaagtcaactactggtatacctgaacataactttatcata

SEQ ID NO: 7497 - DNA, 80 bp, synthetic construct
  misc_feature 1..80: note = Synthetic: >HKU25-cand-8180-8259
  source 1..80: mol_type = other DNA
tatgactcgagtgaccgtggccaggagaatttggccagatctgcttgtgtgtactattctcaagtgctgagtaaaccgat

SEQ ID NO: 7498 - DNA, 80 bp, synthetic construct
  misc_feature 1..80: note = Synthetic: >HKU25-cand-8260-8339
  source 1..80: mol_type = other DNA
tttactggtcgactctaacttggttacatccgttggtgactcttgtgaaatagccactaaaatgtttgattcctttgtta

SEQ ID NO: 7499 - DNA, 80 bp, synthetic construct
  misc_feature 1..80: note = Synthetic: >HKU25-cand-8340-8419
  source 1..80: mol_type = other DNA
atagtttcgtctctctctacaatgttacgcgcgatcgtcttgagaaacttatctcgactggtcgtgatggcattaagaga

SEQ ID NO: 7500 - DNA, 80 bp, synthetic construct
  misc_feature 1..80: note = Synthetic: >HKU25-cand-8420-8499
  source 1..80: mol_type = other DNA
ggcgaaaacttacaacccattcttaagactttcattgacgctgcccgtgggcccgccggtgtagagtctgatgtagaaac

SEQ ID NO: 7501 - DNA, 80 bp, synthetic construct
  misc_feature 1..80: note = Synthetic: >HKU25-cand-8500-8579
  source 1..80: mol_type = other DNA
taatgaaattgtcgatgcagtgcaatacgcacacaagcatgacatacagttaactaatgagggttacaataattatctac

SEQ ID NO: 7502 - DNA, 80 bp, synthetic construct
  misc_feature 1..80: note = Synthetic: >HKU25-cand-8580-8659
  source 1..80: mol_type = other DNA
ccacttacattaagcctgatactattgctactagtgatttaggtagtttaataaattctaatgctgcatctgtaaatcca

SEQ ID NO: 7503 - DNA, 80 bp, synthetic construct
  misc_feature 1..80: note = Synthetic: >HKU25-cand-8660-8739
  source 1..80: mol_type = other DNA
gctaacatgcgtaaccttaacggggcgtgtgtctggaatgctgcagcttactttaaactttctgatggcctgaaacgcca

SEQ ID NO: 7504 - DNA, 80 bp, synthetic construct
  misc_feature 1..80: note = Synthetic: >HKU25-cand-8740-8819
  source 1..80: mol_type = other DNA
aattcgcgttgcctgccggaagtgtaatcttaactttaggcttaccacgtctaaactccgtgcttcagataatttactat

SEQ ID NO: 7505 - DNA, 80 bp, synthetic construct
  misc_feature 1..80: note = Synthetic: >HKU25-cand-8820-8899
  source 1..80: mol_type = other DNA
ctgttcgttttagtgctaccaaaactgttggtggtgccaaatcttggatggacagtatctataactttacgttgaagagt

SEQ ID NO: 7506 - DNA, 80 bp, synthetic construct
  misc_feature 1..80: note = Synthetic: >HKU25-cand-8900-8979
  source 1..80: mol_type = other DNA
tacattggtttaactgtcattcttgtcttatttgctgtattgatgtatctcatgctacctacattcagtactgcacctgt

SEQ ID NO: 7507 - DNA, 80 bp, synthetic construct
  misc_feature 1..80: note = Synthetic: >HKU25-cand-23040-23119
  source 1..80: mol_type = other DNA
tggttttcaccgactgcaactataatctaacaaaactcctctcactattccaagtgagtgagttttcttgtcatcaagta

SEQ ID NO: 7508 - DNA, 80 bp, synthetic construct
  misc_feature 1..80: note = Synthetic: >HKU25-cand-23120-23199
  source 1..80: mol_type = other DNA
tcaccagatgcgcttgcttcaggttgttactcctctttaactgtagattattttgcttacccaacaagtttagcatcata

SEQ ID NO: 7509 - DNA, 80 bp, synthetic construct
  misc_feature 1..80: note = Synthetic: >HKU25-cand-23200-23279
  source 1..80: mol_type = other DNA
tctacaacaaggttctacgggtgaaataactcagtataactataagcaggattttagcaaccccacttgtaggatacttg

SEQ ID NO: 7510 - DNA, 80 bp, synthetic construct
  misc_feature 1..80: note = Synthetic: >HKU25-cand-23280-23359
  source 1..80: mol_type = other DNA
ccaccgctcctgctaatattactctcactaaacctaacaattataactggctcacacagtgctacaagagtactgctttt

SEQ ID NO: 7511 - DNA, 80 bp, synthetic construct
  misc_feature 1..80: note = Synthetic: >HKU25-cand-23360-23439
  source 1..80: mol_type = other DNA
ggaaaccaaccccactatgttcaaactggccaatacaccccatgcctaggactagccataaaaggctttaccactgctta

SEQ ID NO: 7512 - DNA, 80 bp, synthetic construct
  misc_feature 1..80: note = Synthetic: >HKU25-cand-23440-23519
  source 1..80: mol_type = other DNA
tcaaacacatcgtgaccctaatacaaaaatggctgccacaggcaacatcaccgcaatgacaaacaatcttcaaatggcat

SEQ ID NO: 7513 - DNA, 80 bp, synthetic construct
  misc_feature 1..80: note = Synthetic: >HKU25-cand-23520-23599
  source 1..80: mol_type = other DNA
tcatcatctctgtccagtatggtacagacaccaatagtgtctgtcctatgcaagcactacgcaatgacactagcgtccac

SEQ ID NO: 7514 - DNA, 80 bp, synthetic construct
  misc_feature 1..80: note = Synthetic: >HKU25-cand-23600-23679
  source 1..80: mol_type = other DNA
gataaactaggtcaatgcattgattactcactctatggtgtgactggtagaggcgtatttcagaactgcacagctatagg

SEQ ID NO: 7515 - DNA, 80 bp, synthetic construct
  misc_feature 1..80: note = Synthetic: >HKU25-cand-23680-23759
  source 1..80: mol_type = other DNA
tattacacagcaacggtttgtttatgatagttttgacaacttaactggttaccattcagatgacggtaactattactgtg

SEQ ID NO: 7516 - DNA, 80 bp, synthetic construct
  misc_feature 1..80: note = Synthetic: >HKU25-cand-23760-23839
  source 1..80: mol_type = other DNA
tcagaccctgtgtaagtgtgccattgtctgtggtatacgacaagcaatctaataatcatgctacaatctttggtagcgta

SEQ ID NO: 7517 - DNA, 80 bp, synthetic construct
  misc_feature 1..80: note = Synthetic: >HKU25-cand-23840-23919
  source 1..80: mol_type = other DNA
gcctgtgagtatgtcaacaccatgactactcaactctcgcgcatgactcaagcaaagttgcgagcacgcactgctaataa

SEQ ID NO: 7518 - DNA, 80 bp, synthetic construct
  misc_feature 1..80: note = Synthetic: >HKU25-cand-23920-23999
  source 1..80: mol_type = other DNA
acctattcaaactgctgttggctgtgctataggtcttgttaattcatcacttgtcattgacgacgacaagtgtacccttc

SEQ ID NO: 7519 - DNA, 80 bp, synthetic construct
  misc_feature 1..80: note = Synthetic: >HKU25-cand-24000-24079
  source 1..80: mol_type = other DNA
ctcttggtcaatcgctctgtgccgttccttccaaaaatcgtgatactacagccaaattacaactagccgttattaacttc

SEQ ID NO: 7520 - DNA, 80 bp, synthetic construct
  misc_feature 1..80: note = Synthetic: >HKU25-cand-24080-24159
  source 1..80: mol_type = other DNA
actagaccccaccttgttgaagcactcaattctagtggttttgttgttcaaatacccactaacttttcctttagtatcac

SEQ ID NO: 7521 - DNA, 80 bp, synthetic construct
  misc_feature 1..80: note = Synthetic: >HKU25-cand-24160-24239
  source 1..80: mol_type = other DNA
acaagagtacattcaaactaccatacagaaggttactgttgactgtaaacagtatgtttgtaatggttttgaaaagtgcg

SEQ ID NO: 7522 - DNA, 80 bp, synthetic construct
  misc_feature 1..80: note = Synthetic: >HKU25-cand-24240-24319
  source 1..80: mol_type = other DNA
aaacactgcttcgtgaatatggacagttctgcgctaaaatcaaccaggcattgcatggtgctaatcttaggcaagatgaa

SEQ ID NO: 7523 - DNA, 80 bp, synthetic construct
  misc_feature 1..80: note = Synthetic: >HKU8-cand-1360-1439
  source 1..80: mol_type = other DNA
tgctaagtggcaactttgatgacaatgtcgttgatggcgtccttactggtgcacttgatgttggttttgcagtgctggat

SEQ ID NO: 7524 - DNA, 80 bp, synthetic construct
  misc_feature 1..80: note = Synthetic: >HKU8-cand-1440-1519
  source 1..80: mol_type = other DNA
gtaattgacagaatatgtgataccaagccatggtttatgctgaaatttggtgcactgcttgaatctgcgtgggctgcatt

SEQ ID NO: 7525 - DNA, 80 bp, synthetic construct
  misc_feature 1..80: note = Synthetic: >HKU8-cand-1520-1599
  source 1..80: mol_type = other DNA
tgttgcggccattaaacagattcctgctatggcttcagaagtggtgaagctttgtaacaccctcagtaaagctctccttg

SEQ ID NO: 7526 - DNA, 80 bp, synthetic construct
  misc_feature 1..80: note = Synthetic: >HKU8-cand-1600-1679
  source 1..80: mol_type = other DNA
ttgtgcgagatggtgttattgacttttacgttgagaatgtggcaccgaagtttaaaagtgcctttgagatctttaagaaa

SEQ ID NO: 7527 - DNA, 80 bp, synthetic construct
  misc_feature 1..80: note = Synthetic: >HKU8-cand-1680-1759
  source 1..80: mol_type = other DNA
cttgttactggtgtgtttgatcttgctgttgatacctttaaggttgccggtgagacatttaagcgtgttggtgattacgt

SEQ ID NO: 7528 - DNA, 80 bp, synthetic construct
  misc_feature 1..80: note = Synthetic: >HKU8-cand-1760-1839
  source 1..80: mol_type = other DNA
ccttcttgaaaatgcagttgctaggcttgtcactacaaaggttaagggcgttaagcaggcaggtgttaagaaggtcactt

SEQ ID NO: 7529 - DNA, 80 bp, synthetic construct
  misc_feature 1..80: note = Synthetic: >HKU8-cand-1840-1919
  source 1..80: mol_type = other DNA
ttgctacacctattgttggtgctactaataaagttacttctagtcgtactgaaattgcaactgtcaaactcgttgagtgt

SEQ ID NO: 7530 - DNA, 80 bp, synthetic construct
  misc_feature 1..80: note = Synthetic: >HKU8-cand-1920-1999
  source 1..80: mol_type = other DNA
gctccttcaccacttgttaagaagggcagtactgtcgttattgacggcattgcattctttaagagtggtggtgtttacag

SEQ ID NO: 7531 - DNA, 80 bp, synthetic construct
  misc_feature 1..80: note = Synthetic: >HKU8-cand-2000-2079
  source 1..80: mol_type = other DNA
acttatggctgacactgatgaggtctatgaagaacctgtttattgtcaacaagctgcttgcacagttaagaagccagtct

SEQ ID NO: 7532 - DNA, 80 bp, synthetic construct
  misc_feature 1..80: note = Synthetic: >HKU8-cand-2080-2159
  source 1..80: mol_type = other DNA
ttaagtgtaccaaaccagatggctttcctgatgtaactagtactaaccccgacactttggcccatgaggtcaagaatatt

SEQ ID NO: 7533 - DNA, 80 bp, synthetic construct
  misc_feature 1..80: note = Synthetic: >HKU8-cand-2160-2239
  source 1..80: mol_type = other DNA
ttgggaggcatagcaagaccatatgacaagtacagttgtagtgtcatgaatggtgagtgccaggttgaacatagttataa

SEQ ID NO: 7534 - DNA, 80 bp, synthetic construct
  misc_feature 1..80: note = Synthetic: >HKU8-cand-2240-2319
  source 1..80: mol_type = other DNA
ctttaaggcacctgcttatattgcagacaagcatcagtttgttatgctctgtaaggattttgtcacagatgtcaagtttg

SEQ ID NO: 7535 - DNA, 80 bp, synthetic construct
  misc_feature 1..80: note = Synthetic: >HKU8-cand-2320-2399
  source 1..80: mol_type = other DNA
aagagttttatgttaaggctcttgaagctaattcccttgatggttttgatccttattatgaggcctttaccatctttaaa

SEQ ID NO: 7536 - DNA, 80 bp, synthetic construct
  misc_feature 1..80: note = Synthetic: >HKU8-cand-2400-2479
  source 1..80: mol_type = other DNA
ggcgaagttaagtgtcctgcagagcttattgatcttgatgatggtggtttgtttaacactttcatcaatacagttaacag

SEQ ID NO: 7537 - DNA, 80 bp, synthetic construct
  misc_feature 1..80: note = Synthetic: >HKU8-cand-2480-2559
  source 1..80: mol_type = other DNA
tgcttatgattttgttaaaaatcttaaggtatctgttactgttaatggtgtcatgtgtaccgctgctaagcgttttaagc

SEQ ID NO: 7538 - DNA, 80 bp, synthetic construct
  misc_feature 1..80: note = Synthetic: >HKU8-cand-2560-2639
  source 1..80: mol_type = other DNA
gttgggccaatgcccttgctaagctatatactgagtttattaatagtgcctgtaagactgtcgttattggcggtcttgaa

SEQ ID NO: 7539 - DNA, 80 bp, synthetic construct
  misc_feature 1..80: note = Synthetic: >HKU8-cand-14150-14229
  source 1..80: mol_type = other DNA
tcctaattgttctgactgttatgatgagatgtgtgttattcattgtgctaattttaacacactttttgccactaccattc

SEQ ID NO: 7540 - DNA, 80 bp, synthetic construct
  misc_feature 1..80: note = Synthetic: >HKU8-cand-14230-14309
  source 1..80: mol_type = other DNA
ctgacactgctttcggtcccttgtgccgaaaagtttttattgatggtgttccagttgttactactgctggttaccatttt

SEQ ID NO: 7541 - DNA, 80 bp, synthetic construct
  misc_feature 1..80: note = Synthetic: >HKU8-cand-14310-14389
  source 1..80: mol_type = other DNA
aaacagcttggtttggtgtggaacaaagacatgaatacacattctactcgtttaactattaatgagctgcttaggtttgt

SEQ ID NO: 7542 - DNA, 80 bp, synthetic construct
  misc_feature 1..80: note = Synthetic: >HKU8-cand-14470-14549
  source 1..80: mol_type = other DNA
gtactggtcttacaaagcaaactgttaaaccaggccactttaataaggagttttatgacttcctttgtgcgcatggtttc

SEQ ID NO: 7543 - DNA, 80 bp, synthetic construct
  misc_feature 1..80: note = Synthetic: >HKU8-cand-14550-14629
  source 1..80: mol_type = other DNA
tttgatgagggttctgaacttacgctcaaacactttttctttgcacagaaaggtgatgcagctatacgtgattttgattt

SEQ ID NO: 7544 - DNA, 80 bp, synthetic construct
  misc_feature 1..80: note = Synthetic: >HKU8-cand-14630-14709
  source 1..80: mol_type = other DNA
ttataggtataatagacctactgttttggatatatgtcaagctcgtgtcgcttatcatgttgttaagcgttactttgaaa

SEQ ID NO: 7545 - DNA, 80 bp, synthetic construct
  misc_feature 1..80: note = Synthetic: >HKU8-cand-14710-14789
  source 1..80: mol_type = other DNA
tatatgaaggtggttgtatagctgctcgtgatgttgttgttacaaaccttaataagagcgctggttatccactcaacaaa

SEQ ID NO: 7546 - DNA, 80 bp, synthetic construct
  misc_feature 1..80: note = Synthetic: >HKU8-cand-14790-14869
  source 1..80: mol_type = other DNA
tttggtaaggctagcttgtattatgaatcactgtcctatgaggaacaggacgccttgtatgcacttacaaagcgtaatgt

SEQ ID NO: 7547 - DNA, 80 bp, synthetic construct
  misc_feature 1..80: note = Synthetic: >HKU8-cand-14870-14949
  source 1..80: mol_type = other DNA
tcttccgactatgacacagcttaatcttaagtatgctattagtggtaaagagcgtgcaaggactgttggtggtgtctctt

SEQ ID NO: 7548 - DNA, 80 bp, synthetic construct
  misc_feature 1..80: note = Synthetic: >HKU8-cand-14950-15029
  source 1..80: mol_type = other DNA
tgttgtctactatgacgactagtcaatttcaccagaaacatcttaaatccattgtcaatacacgtaatgccactgttgtc

SEQ ID NO: 7549 - DNA, 80 bp, synthetic construct
  misc_feature 1..80: note = Synthetic: >HKU8-cand-15200-15279
  source 1..80: mol_type = other DNA
ttgtaccaattcagatcgttattatagactatgtaatgagcttgcacaagttcttactgaagtggtctattctaatggcg

SEQ ID NO: 7550 - DNA, 80 bp, synthetic construct
  misc_feature 1..80: note = Synthetic: >HKU8-cand-15280-15359
  source 1..80: mol_type = other DNA
gtttctatatgaaacctggtggtactacatctggtgatgccactacagcctatgctaattctgttttcaacatattccag

SEQ ID NO: 7551 - DNA, 80 bp, synthetic construct
  misc_feature 1..80: note = Synthetic: >HKU8-cand-15360-15439
  source 1..80: mol_type = other DNA
gcagttagtgctaacattaataggattttgggtattaatagtaatacctgtaataatcttactgttaaatcattgcagcg

SEQ ID NO: 7552 - DNA, 80 bp, synthetic construct
  misc_feature 1..80: note = Synthetic: >MurineCoV-cand-2510-2589
  source 1..80: mol_type = other DNA
gtttttgaagatgatgttgttgatgtggttaaagccccattaacatatcaaggctgttgtaagccacccacttctttcga

SEQ ID NO: 7553 - DNA, 80 bp, synthetic construct
  misc_feature 1..80: note = Synthetic: >MurineCoV-cand-2590-2669
  source 1..80: mol_type = other DNA
gaagatttgtattgtggataaattgtatatggccaagtgtggtgatcaattttaccctgtggttgttgataacgacactg

SEQ ID NO: 7554 - DNA, 80 bp, synthetic construct
  misc_feature 1..80: note = Synthetic: >MurineCoV-cand-2670-2749
  source 1..80: mol_type = other DNA
ttggcgtgttagatcagtgctggaggtttccctgtgcgggcaagaaagtcgagtttaacgacaagcccaaagtcaggaag

SEQ ID NO: 7555 - DNA, 80 bp, synthetic construct
  misc_feature 1..80: note = Synthetic: >MurineCoV-cand-2750-2829
  source 1..80: mol_type = other DNA
ataccctccacccgtaagattaagatcaccttcgcactggatgcgacctttgatagtgttctttcgaaggcgtgttcaga

SEQ ID NO: 7556 - DNA, 80 bp, synthetic construct
  misc_feature 1..80: note = Synthetic: >MurineCoV-cand-2830-2909
  source 1..80: mol_type = other DNA
gtttgaagttgataaagatgttacattggatgagctgcttgatgttgtgcttgacgcagttgagagtacgctcagccctt

SEQ ID NO: 7557 - DNA, 80 bp, synthetic construct
  misc_feature 1..80: note = Synthetic: >MurineCoV-cand-2910-2989
  source 1..80: mol_type = other DNA
gtaaggagcatgatgtgataggcacaaaagtttgtgctttacttgataggttggcaggagattatgtctatctttttgat

SEQ ID NO: 7558 - DNA, 80 bp, synthetic construct
  misc_feature 1..80: note = Synthetic: >MurineCoV-cand-2990-3069
  source 1..80: mol_type = other DNA
gagggaggcgatgaagtgatcgccccgaggatgtattgttccttttctgctcctgatgatgaagactgcgttgcagcgga

SEQ ID NO: 7559 - DNA, 80 bp, synthetic construct
  misc_feature 1..80: note = Synthetic: >MurineCoV-cand-3070-3149
  source 1..80: mol_type = other DNA
tgatgttgtagatgcagatgaaaaccaagatgatgatgctgaagactcagcagtccttgtcgctgatacccaagaagagg

SEQ ID NO: 7560 - DNA, 80 bp, synthetic construct
  misc_feature 1..80: note = Synthetic: >MurineCoV-cand-3150-3229
  source 1..80: mol_type = other DNA
acggcgttgccaaggggcaggttgattcggcggattcggaaatttgcgttgcgcatactggtagtcaagaagaattggct

SEQ ID NO: 7561 - DNA, 80 bp, synthetic construct
  misc_feature 1..80: note = Synthetic: >MurineCoV-cand-3230-3309
  source 1..80: mol_type = other DNA
gagcctgatgctgtcggatctcaaactcccatcgcctctgctgaggaaaccgaagtcggagaggcaagcgacagggaagg

SEQ ID NO: 7562 - DNA, 80 bp, synthetic construct
  misc_feature 1..80: note = Synthetic: >MurineCoV-cand-3310-3389
  source 1..80: mol_type = other DNA
gattgctgaggcgaaggcaactgtgtgtgctgatgctgtagatgcctgccccgatcaagtggaggcatttgaaattgaaa

SEQ ID NO: 7563 - DNA, 80 bp, synthetic construct
  misc_feature 1..80: note = Synthetic: >MurineCoV-cand-3390-3469
  source 1..80: mol_type = other DNA
aggttgaagactctatcttggatgagcttcaaactgaacttaatgcgccagcggacaagacctatgaggatgtcttggca

SEQ ID NO: 7564 - DNA, 80 bp, synthetic construct
  misc_feature 1..80: note = Synthetic: >MurineCoV-cand-3470-3549
  source 1..80: mol_type = other DNA
ttcgatgccgtatgctcagaggcgttgtctgcattctatgctgtgccgagtgatgagacgcactttaaagtgtgtggatt

SEQ ID NO: 7565 - DNA, 80 bp, synthetic construct
  misc_feature 1..80: note = Synthetic: >MurineCoV-cand-3550-3629
  source 1..80: mol_type = other DNA
ctattcgcctgctatagagcgcactaattgttggctgcgttctactttgatagtaatgcagagtctacctttggaattta

SEQ ID NO: 7566 - DNA, 80 bp, synthetic construct
  misc_feature 1..80: note = Synthetic: >MurineCoV-cand-3630-3709
  source 1..80: mol_type = other DNA
aagacttggagatgcaaaagctctggttgtcttacaaggccggctatgaccaatgctttgtggacaaactagttaagagc

SEQ ID NO: 7567 - DNA, 80 bp, synthetic construct
  misc_feature 1..80: note = Synthetic: >MurineCoV-cand-3710-3789
  source 1..80: mol_type = other DNA
gtgcccaagtctattatccttccacaaggtggttatgtggcagattttgcctatttctttctaagccagtgtagctttaa

SEQ ID NO: 7568 - DNA, 80 bp, synthetic construct
  misc_feature 1..80: note = Synthetic: >MurineCoV-cand-23050-23129
  source 1..80: mol_type = other DNA
agtgtatgagaagatggcccaatataggagcctatcgtttgttaatgtgtcttatgcctatggaggtaatgcaaagccca

SEQ ID NO: 7569 - DNA, 80 bp, synthetic construct
  misc_feature 1..80: note = Synthetic: >MurineCoV-cand-23130-23209
  source 1..80: mol_type = other DNA
cctccatttgcaaagacaaaactttaacactcaataaccccaccttcatatcgaaggagtctaattatgttgattattac

SEQ ID NO: 7570 - DNA, 80 bp, synthetic construct
  misc_feature 1..80: note = Synthetic: >MurineCoV-cand-23210-23289
  source 1..80: mol_type = other DNA
tatgagagtgaggctaatttcacactagaaggttgtgatgaatttatagtaccgctctgtggttttaatggccattccaa

SEQ ID NO: 7571 - DNA, 80 bp, synthetic construct
  misc_feature 1..80: note = Synthetic: >MurineCoV-cand-23290-23369
  source 1..80: mol_type = other DNA
gggcagctcttcggatcctgccaataaatattatactgactctcagagttactataatatggatactggtgtcttatatg

SEQ ID NO: 7572 - DNA, 80 bp, synthetic construct
  misc_feature 1..80: note = Synthetic: >MurineCoV-cand-23370-23449
  source 1..80: mol_type = other DNA
ggttcaattcgaccttggatgttggcaacactgctaaggatccgggtcttgatctcacttgtaggtatcttgcattgact

SEQ ID NO: 7573 - DNA, 80 bp, synthetic construct
  misc_feature 1..80: note = Synthetic: >MurineCoV-cand-23450-23529
  source 1..80: mol_type = other DNA
cctggtaattataaggctgtgtccttagaatatttgttaagcttaccctcaaaggctatttgcctccgtaagccaaagcg

SEQ ID NO: 7574 - DNA, 80 bp, synthetic construct
  misc_feature 1..80: note = Synthetic: >MurineCoV-cand-23530-23609
  source 1..80: mol_type = other DNA
ctttatgcctgtgcaggtagttgattcaaggtggaatagcacccgccagtcagacaatatgaccgctgtagcctgtcagc

SEQ ID NO: 7575 - DNA, 80 bp, synthetic construct
  misc_feature 1..80: note = Synthetic: >MurineCoV-cand-23610-23689
  source 1..80: mol_type = other DNA
tgccatattgtttcttccgcaacacatctgcggattatagtggtggcacacatgatgtacaccatggtgattttcatttc

SEQ ID NO: 7576 - DNA, 80 bp, synthetic construct
  misc_feature 1..80: note = Synthetic: >MurineCoV-cand-23690-23769
  source 1..80: mol_type = other DNA
aggcagttattgtctggtttgttatataatgtttcctgtattgcccagcagggtgcatttctttataataatgttagctc

SEQ ID NO: 7577 - DNA, 80 bp, synthetic construct
  misc_feature 1..80: note = Synthetic: >MurineCoV-cand-23770-23849
  source 1..80: mol_type = other DNA
ctcttggccagcctatgggtacggtcattgtccaacggcagctaacattggttatatggcacctgtttgtatctatgacc

SEQ ID NO: 7578 - DNA, 80 bp, synthetic construct
  misc_feature 1..80: note = Synthetic: >MurineCoV-cand-23850-23929
  source 1..80: mol_type = other DNA
ctctcccggtcatactgctaggtgtgttattgggtatagctgtgttgattattgtgtttttgatgttttattttatgacg

SEQ ID NO: 7579 - DNA, 80 bp, synthetic construct
  misc_feature 1..80: note = Synthetic: >MurineCoV-cand-23930-24009
  source 1..80: mol_type = other DNA
gatagcggtgttagattgcatgaggcataaaaggaaatctaaacatgctgtttgtcgtgtttattctatttttgccctct

SEQ ID NO: 7580 - DNA, 80 bp, synthetic construct
  misc_feature 1..80: note = Synthetic: >MurineCoV-cand-24010-24089
  source 1..80: mol_type = other DNA
tgtctagggtatattggtgattttagatgtatccagcttgtgaattcaaacggtgctaatgttagtgctccaagcattag

SEQ ID NO: 7581 - DNA, 80 bp, synthetic construct
  misc_feature 1..80: note = Synthetic: >MurineCoV-cand-24090-24169
  source 1..80: mol_type = other DNA
cactgagaccgttgaagtttcacaaggcctggggacatattatgtgttagatcgagtttatttaaatgccacattattgc

SEQ ID NO: 7582 - DNA, 80 bp, synthetic construct
  misc_feature 1..80: note = Synthetic: >MurineCoV-cand-24170-24249
  source 1..80: mol_type = other DNA
ttactggttactacccggtcgatggttctaagtttagaaacctcgctcttacgggaactaactcagttagcttgtcgtgg

SEQ ID NO: 7583 - DNA, 80 bp, synthetic construct
  misc_feature 1..80: note = Synthetic: >MurineCoV-cand-24250-24329
  source 1..80: mol_type = other DNA
tttcaaccaccctatttaagtcagtttaatgatggcatatttgcgaaggtgcagaaccttaagacaagtacgccatcagg

SEQ ID NO: 7584 - DNA, 80 bp, synthetic construct
  misc_feature 1..80: note = Synthetic: >SARSCoV2-cand-5860-5939
  source 1..80: mol_type = other DNA
tctacaaagaaaacagttacacaacaaccataaaaccagttacttataaattggatggtgttgtttgtacagaaattgac

SEQ ID NO: 7585 - DNA, 80 bp, synthetic construct
  misc_feature 1..80: note = Synthetic: >SARSCoV2-cand-5940-6019
  source 1..80: mol_type = other DNA
cctaagttggacaattattataagaaagacaattcttatttcacagagcaaccaattgatcttgtaccaaaccaaccata

SEQ ID NO: 7586 - DNA, 80 bp, synthetic construct
  misc_feature 1..80: note = Synthetic: >SARSCoV2-cand-6020-6099
  source 1..80: mol_type = other DNA
tccaaacgcaagcttcgataattttaagtttgtatgtgataatatcaaatttgctgatgatttaaaccagttaactggtt

SEQ ID NO: 7587 - DNA, 80 bp, synthetic construct
  misc_feature 1..80: note = Synthetic: >SARSCoV2-cand-6100-6179
  source 1..80: mol_type = other DNA
ataagaaacctgcttcaagagagcttaaagttacatttttccctgacttaaatggtgatgtggtggctattgattataaa

SEQ ID NO: 7588 - DNA, 80 bp, synthetic construct
  misc_feature 1..80: note = Synthetic: >SARSCoV2-cand-6180-6259
  source 1..80: mol_type = other DNA
cactacacaccctcttttaagaaaggagctaaattgttacataaacctattgtttggcatgttaacaatgcaactaataa

SEQ ID NO: 7589 - DNA, 80 bp, synthetic construct
  misc_feature 1..80: note = Synthetic: >SARSCoV2-cand-6260-6339
  source 1..80: mol_type = other DNA
agccacgtataaaccaaatacctggtgtatacgttgtctttggagcacaaaaccagttgaaacatcaaattcgtttgatg

SEQ ID NO: 7590 - DNA, 80 bp, synthetic construct
  misc_feature 1..80: note = Synthetic: >SARSCoV2-cand-6340-6419
  source 1..80: mol_type = other DNA
tactgaagtcagaggacgcgcagggaatggataatcttgcctgcgaagatctaaaaccagtctctgaagaagtagtggaa

SEQ ID NO: 7591 - DNA, 80 bp, synthetic construct
  misc_feature 1..80: note = Synthetic: >SARSCoV2-cand-6420-6499
  source 1..80: mol_type = other DNA
aatcctaccatacagaaagacgttcttgagtgtaatgtgaaaactaccgaagttgtaggagacattatacttaaaccagc

SEQ ID NO: 7592 - DNA, 80 bp, synthetic construct
  misc_feature 1..80: note = Synthetic: >SARSCoV2-cand-6500-6579
  source 1..80: mol_type = other DNA
aaataatagtttaaaaattacagaagaggttggccacacagatctaatggctgcttatgtagacaattctagtcttacta

SEQ ID NO: 7593 - DNA, 80 bp, synthetic construct
  misc_feature 1..80: note = Synthetic: >SARSCoV2-cand-6580-6659
  source 1..80: mol_type = other DNA
ttaagaaacctaatgaattatctagagtattaggtttgaaaacccttgctactcatggtttagctgctgttaatagtgtc

SEQ ID NO: 7594 - DNA, 80 bp, synthetic construct
  misc_feature 1..80: note = Synthetic: >SARSCoV2-cand-6660-6739
  source 1..80: mol_type = other DNA
ccttgggatactatagctaattatgctaagccttttcttaacaaagttgttagtacaactactaacatagttacacggtg

SEQ ID NO: 7595 - DNA, 80 bp, synthetic construct
  misc_feature 1..80: note = Synthetic: >SARSCoV2-cand-6740-6819
  source 1..80: mol_type = other DNA
tttaaaccgtgtttgtactaattatatgccttatttctttactttattgctacaattgtgtacttttactagaagtacaa

SEQ ID NO: 7596 - DNA, 80 bp, synthetic construct
  misc_feature 1..80: note = Synthetic: >SARSCoV2-cand-6820-6899
  source 1..80: mol_type = other DNA
attctagaattaaagcatctatgccgactactatagcaaagaatactgttaagagtgtcggtaaattttgtctagaggct

SEQ ID NO: 7597 - DNA, 80 bp, synthetic construct
  misc_feature 1..80: note = Synthetic: >SARSCoV2-cand-6900-6979
  source 1..80: mol_type = other DNA
tcatttaattatttgaagtcacctaatttttctaaactgataaatattataatttggtttttactattaagtgtttgcct

SEQ ID NO: 7598 - DNA, 80 bp, synthetic construct
  misc_feature 1..80: note = Synthetic: >SARSCoV2-cand-6980-7059
  source 1..80: mol_type = other DNA
aggttctttaatctactcaaccgctgctttaggtgttttaatgtctaatttaggcatgccttcttactgtactggttaca

SEQ ID NO: 7599 - DNA, 80 bp, synthetic construct
  misc_feature 1..80: note = Synthetic: >SARSCoV2-cand-7060-7139
  source 1..80: mol_type = other DNA
gagaaggctatttgaactctactaatgtcactattgcaacctactgtactggttctataccttgtagtgtttgtcttagt

SEQ ID NO: 7600 - DNA, 80 bp, synthetic construct
  misc_feature 1..80: note = Synthetic: >SARSCoV2-cand-17390-17469
  source 1..80: mol_type = other DNA
gtcaatgccagattacgtgctaagcactatgtgtacattggcgaccctgctcaattacctgcaccacgcacattgctaac

SEQ ID NO: 7601 - DNA, 80 bp, synthetic construct
  misc_feature 1..80: note = Synthetic: >SARSCoV2-cand-17470-17549
  source 1..80: mol_type = other DNA
taagggcacactagaaccagaatatttcaattcagtgtgtagacttatgaaaactataggtccagacatgttcctcggaa

SEQ ID NO: 7602 - DNA, 80 bp, synthetic construct
  misc_feature 1..80: note = Synthetic: >SARSCoV2-cand-17550-17629
  source 1..80: mol_type = other DNA
cttgtcggcgttgtcctgctgaaattgttgacactgtgagtgctttggtttatgataataagcttaaagcacataaagac

SEQ ID NO: 7603 - DNA, 80 bp, synthetic construct
  misc_feature 1..80: note = Synthetic: >SARSCoV2-cand-17630-17709
  source 1..80: mol_type = other DNA
aaatcagctcaatgctttaaaatgttttataagggtgttatcacgcatgatgtttcatctgcaattaacaggccacaaat

SEQ ID NO: 7604 - DNA, 80 bp, synthetic construct
  misc_feature 1..80: note = Synthetic: >SARSCoV2-cand-17710-17789
  source 1..80: mol_type = other DNA
aggcgtggtaagagaattccttacacgtaaccctgcttggagaaaagctgtctttatttcaccttataattcacagaatg

SEQ ID NO: 7605 - DNA, 80 bp, synthetic construct
  misc_feature 1..80: note = Synthetic: >SARSCoV2-cand-17790-17869
  source 1..80: mol_type = other DNA
ctgtagcctcaaagattttgggactaccaactcaaactgttgattcatcacagggctcagaatatgactatgtcatattc

SEQ ID NO: 7606 - DNA, 80 bp, synthetic construct
  misc_feature 1..80: note = Synthetic: >SARSCoV2-cand-17870-17949
  source 1..80: mol_type = other DNA
actcaaaccactgaaacagctcactcttgtaatgtaaacagatttaatgttgctattaccagagcaaaagtaggcatact

SEQ ID NO: 7607 - DNA, 80 bp, synthetic construct
  misc_feature 1..80: note = Synthetic: >SARSCoV2-cand-17950-18029
  source 1..80: mol_type = other DNA
ttgcataatgtctgatagagacctttatgacaagttgcaatttacaagtcttgaaattccacgtaggaatgtggcaactt

SEQ ID NO: 7608 - DNA, 80 bp, synthetic construct
  misc_feature 1..80: note = Synthetic: >SARSCoV2-cand-18030-18109
  source 1..80: mol_type = other DNA
tacaagctgaaaatgtaacaggactctttaaagattgtagtaaggtaatcactgggttacatcctacacaggcacctaca

SEQ ID NO: 7609 - DNA, 80 bp, synthetic construct
  misc_feature 1..80: note = Synthetic: >SARSCoV2-cand-18110-18189
  source 1..80: mol_type = other DNA
cacctcagtgttgacactaaattcaaaactgaaggtttatgtgttgacatacctggcatacctaaggacatgacctatag

SEQ ID NO: 7610 - DNA, 80 bp, synthetic construct
  misc_feature 1..80: note = Synthetic: >SARSCoV2-cand-18190-18269
  source 1..80: mol_type = other DNA
aagactcatctctatgatgggttttaaaatgaattatcaagttaatggttaccctaacatgtttatcacccgcgaagaag

SEQ ID NO: 7611 - DNA, 80 bp, synthetic construct
  misc_feature 1..80: note = Synthetic: >SARSCoV2-cand-18270-18349
  source 1..80: mol_type = other DNA
ctataagacatgtacgtgcatggattggcttcgatgtcgaggggtgtcatgctactagagaagctgttggtaccaattta

SEQ ID NO: 7612 - DNA, 80 bp, synthetic construct
  misc_feature 1..80: note = Synthetic: >SARSCoV2-cand-18350-18429
  source 1..80: mol_type = other DNA
cctttacagctaggtttttctacaggtgttaacctagttgctgtacctacaggttatgttgatacacctaataatacaga

SEQ ID NO: 7613 - DNA, 80 bp, synthetic construct
  misc_feature 1..80: note = Synthetic: >SARSCoV2-cand-18430-18509
  source 1..80: mol_type = other DNA
tttttccagagttagtgctaaaccaccgcctggagatcaatttaaacacctcataccacttatgtacaaaggacttcctt

SEQ ID NO: 7614 - DNA, 80 bp, synthetic construct
  misc_feature 1..80: note = Synthetic: >SARSCoV2-cand-18520-18599
  source 1..80: mol_type = other DNA
gcgtataaagattgtacaaatgttaagtgacacacttaaaaatctctctgacagagtcgtatttgtcttatgggcacatg

SEQ ID NO: 7615 - DNA, 80 bp, synthetic construct
  misc_feature 1..80: note = Synthetic: >SARSCoV2-cand-18600-18679
  source 1..80: mol_type = other DNA
gctttgagttgacatctatgaagtattttgtgaaaataggacctgagcgcacctgttgtctatgtgatagacgtgccaca

SEQ ID NO: 7616 - DNA, 80 bp, synthetic construct
  misc_feature 1..80: note = Synthetic: >SARSCoV2-cand-22520-22599
  source 1..80: mol_type = other DNA
accaacagaatctattgttagatttcctaatattacaaacttgtgcccttttggtgaagtttttaacgccaccagatttg

SEQ ID NO: 7617 - DNA, 80 bp, synthetic construct
  misc_feature 1..80: note = Synthetic: >SARSCoV2-cand-22600-22679
  source 1..80: mol_type = other DNA
catctgtttatgcttggaacaggaagagaatcagcaactgtgttgctgattattctgtcctatataattccgcatcattt

SEQ ID NO: 7618 - DNA, 80 bp, synthetic construct
  misc_feature 1..80: note = Synthetic: >SARSCoV2-cand-22680-22759
  source 1..80: mol_type = other DNA
tccacttttaagtgttatggagtgtctcctactaaattaaatgatctctgctttactaatgtctatgcagattcatttgt

SEQ ID NO: 7619 - DNA, 80 bp, synthetic construct
  misc_feature 1..80: note = Synthetic: >SARSCoV2-cand-22760-22839
  source 1..80: mol_type = other DNA
aattagaggtgatgaagtcagacaaatcgctccagggcaaactggaaagattgctgattataattataaattaccagatg

SEQ ID NO: 7620 - DNA, 80 bp, synthetic construct
  misc_feature 1..80: note = Synthetic: >SARSCoV2-cand-22840-22919
  source 1..80: mol_type = other DNA
attttacaggctgcgttatagcttggaattctaacaatcttgattctaaggttggtggtaattataattacctgtataga

SEQ ID NO: 7621 - DNA, 80 bp, synthetic construct
  misc_feature 1..80: note = Synthetic: >SARSCoV2-cand-22920-22999
  source 1..80: mol_type = other DNA
ttgtttaggaagtctaatctcaaaccttttgagagagatatttcaactgaaatctatcaggccggtagcacaccttgtaa

SEQ ID NO: 7622 - DNA, 80 bp, synthetic construct
  misc_feature 1..80: note = Synthetic: >SARSCoV2-cand-23000-23079
  source 1..80: mol_type = other DNA
tggtgttgaaggttttaattgttactttcctttacaatcatatggtttccaacccactaatggtgttggttaccaaccat

SEQ ID NO: 7623 - DNA, 80 bp, synthetic construct
  misc_feature 1..80: note = Synthetic: >SARSCoV2-cand-23080-23159
  source 1..80: mol_type = other DNA
acagagtagtagtactttcttttgaacttctacatgcaccagcaactgtttgtggacctaaaaagtctactaatttggtt

SEQ ID NO: 7624 - DNA, 80 bp, synthetic construct
  misc_feature 1..80: note = Synthetic: >SARSCoV2-cand-23160-23239
  source 1..80: mol_type = other DNA
aaaaacaaatgtgtcaatttcaacttcaatggtttaacaggcacaggtgttcttactgagtctaacaaaaagtttctgcc

SEQ ID NO: 7625 - DNA, 80 bp, synthetic construct
  misc_feature 1..80: note = Synthetic: >SARSCoV2-cand-23240-23319
  source 1..80: mol_type = other DNA
tttccaacaatttggcagagacattgctgacactactgatgctgtccgtgatccacagacacttgagattcttgacatta

SEQ ID NO: 7626 - DNA, 80 bp, synthetic construct
  misc_feature 1..80: note = Synthetic: >SARSCoV2-cand-23320-23399
  source 1..80: mol_type = other DNA
caccatgttcttttggtggtgtcagtgttataacaccaggaacaaatacttctaaccaggttgctgttctttatcaggat

SEQ ID NO: 7627 - DNA, 80 bp, synthetic construct
  misc_feature 1..80: note = Synthetic: >SARSCoV2-cand-23400-23479
  source 1..80: mol_type = other DNA
gttaactgcacagaagtccctgttgctattcatgcagatcaacttactcctacttggcgtgtttattctacaggttctaa

SEQ ID NO: 7628 - DNA, 80 bp, synthetic construct
  misc_feature 1..80: note = Synthetic: >SARSCoV2-cand-23480-23559
  source 1..80: mol_type = other DNA
tgtttttcaaacacgtgcaggctgtttaataggggctgaacatgtcaacaactcatatgagtgtgacatacccattggtg

SEQ ID NO: 7629 - DNA, 80 bp, synthetic construct
  misc_feature 1..80: note = Synthetic: >SARSCoV2-cand-23570-23649
  source 1..80: mol_type = other DNA
cgctagttatcagactcagactaattctcctcggcgggcacgtagtgtagctagtcaatccatcattgcctacactatgt

SEQ ID NO: 7630 - DNA, 80 bp, synthetic construct
  misc_feature 1..80: note = Synthetic: >SARSCoV2-cand-23650-23729
  source 1..80: mol_type = other DNA
cacttggtgcagaaaattcagttgcttactctaataactctattgccatacccacaaattttactattagtgttaccaca

SEQ ID NO: 7631 - DNA, 80 bp, synthetic construct
  misc_feature 1..80: note = Synthetic: >SARSCoV2-cand-23730-23809
  source 1..80: mol_type = other DNA
gaaattctaccagtgtctatgaccaagacatcagtagattgtacaatgtacatttgtggtgattcaactgaatgcagcaa

SEQ ID NO: 7632 - DNA, 80 bp, synthetic construct
  misc_feature 1..80: note = Synthetic: >HKU2-cand-13790-13869
  source 1..80: mol_type = other DNA
acaagcctactatgcttgacatatgtatggcacgttttacctataaagtggtacagcgttattttgagtgctatgatggt

SEQ ID NO: 7633 - DNA, 80 bp, synthetic construct
  misc_feature 1..80: note = Synthetic: >HKU2R-cand-13620-13699
  source 1..80: mol_type = other DNA
cctactatgcttgacatatgtatggcacgttttacatataaagtagtacagcgttattttgagtgctatgatggtggttg

SEQ ID NO: 7634 - DNA, 80 bp, synthetic construct
  misc_feature 1..80: note = Synthetic: >AlphaMink-cand-15520-15599
  source 1..80: mol_type = other DNA
acaatgggaagcttctaagacaaagccaccacttaatagaaactcagtttttacgtgttaccaaattcttaaagattcaa

SEQ ID NO: 7635 - DNA, 80 bp, synthetic construct
  misc_feature 1..80: note = Synthetic: >Alpha2-cand-15510-15589
  source 1..80: mol_type = other DNA
caatgggaagcttctaagacaaagccaccacttaatagaaactcagtttttacgtgttatcaaattcttaaaaattcaaa

SEQ ID NO: 7636 - DNA, 80 bp, synthetic construct
  misc_feature 1..80: note = Synthetic: >MinkCoV1-cand-15550-15629
  source 1..80: mol_type = other DNA
gggaagcttctaagacaaagccaccacttaataggaattcagtttttacatgttaccaaattcttaaagattcaaaagta

SEQ ID NO: 7637 - DNA, 80 bp, synthetic construct
  misc_feature 1..80: note = Synthetic: >BatCoV1A-cand-26860-26939
  source 1..80: mol_type = other DNA
acaattatctatcgacgtgccggaaggtcacttaatgcgaaaacccagactgggtggtcgttttacgtgcgtgctaagaa

SEQ ID NO: 7638 - DNA, 80 bp, synthetic construct
  misc_feature 1..80: note = Synthetic: >MbCoV1-cand-26690-26769
  source 1..80: mol_type = other DNA
ctacaattatctatcgacgtgccggaaggtcactgaatgctaaaacccagactggatgggcattctatgtacgtgcaaag

SEQ ID NO: 7639 - DNA, 80 bp, synthetic construct
  misc_feature 1..80: note = Synthetic: >MsbCoV1-cand-26680-26759
  source 1..80: mol_type = other DNA
ccactacaattatctatcgacgtgccggaaggtcactgaatgctaagactcaaactggatgggcattctatgtacgtgca

SEQ ID NO: 7640 - DNA, 80 bp, synthetic construct
  misc_feature 1..80: note = Synthetic: >Sb512-cand-7400-7479
  source 1..80: mol_type = other DNA
atgttgactttagtgctaatttgcataaggcatttgttgaggtgcttagtaacagttttggcaaggatttgtcaaattgt

SEQ ID NO: 7641 - DNA, 80 bp, synthetic construct
  misc_feature 1..80: note = Synthetic: >Sk512R-cand-7400-7479
  source 1..80: mol_type = other DNA
ctttagtgctaatttgcataaggcatttgttgaggtgcttagtaacagttttggcaaggatttgtcaaattgtagtaata

SEQ ID NO: 7642 - DNA, 80 bp, synthetic construct
  misc_feature 1..80: note = Synthetic: >AlphaSp-cand-7390-7469
  source 1..80: mol_type = other DNA
tccttgaatgttgattttagtgctaatttgcataaggcatttgttgaggtgcttagtaacagttttggcaaggatttgtc

SEQ ID NO: 7643 - DNA, 80 bp, synthetic construct
  misc_feature 1..80: note = Synthetic: >Sb512-cand-15540-15619
  source 1..80: mol_type = other DNA
ccttatgtgtgctgttcttctggctgtggagtctcagacgtcaccaaattatatttgggtggtctgagttattggtgtgt

SEQ ID NO: 7644 - DNA, 80 bp, synthetic construct
  misc_feature 1..80: note = Synthetic: >BtSk_AlphaCoV-cand-15490-15569
  source 1..80: mol_type = other DNA
accccttatgtgtgctgttcttctggctgtggagtctcagacgtcaccaaactatatttgggtggtctgagttattggtg

SEQ ID NO: 7645 - DNA, 80 bp, synthetic construct
  misc_feature 1..80: note = Synthetic: >MsbCoV1-cand-16960-17039
  source 1..80: mol_type = other DNA
agggtttcatacagacatattgtatatgttggtgatccacaacagctgcctgctcctagaactatgataacacgaggtgt

SEQ ID NO: 7646 - DNA, 80 bp, synthetic construct
  misc_feature 1..80: note = Synthetic: >BtRl_BetaCoV-cand-720-799
  source 1..80: mol_type = other DNA
agattatgaacaaaactggaacactaagcatggcagtggtgcactccgtgaactcactcgtgagctcaatggaggtgtag

SEQ ID NO: 7647 - DNA, 80 bp, synthetic construct
  misc_feature 1..80: note = Synthetic: >SARSCoV-cand-710-789
  source 1..80: mol_type = other DNA
actgatcccattgaagattatgaacaaaactggaacactaagcatggcagtggtgcactccgtgaactcactcgtgagct

SEQ ID NO: 7648 - DNA, 80 bp, synthetic construct
  misc_feature 1..80: note = Synthetic: >BM48_31-cand-11310-11389
  source 1..80: mol_type = other DNA
acctctaactattctggtgtcgttacgactatcatgtttttagctagagctatagtgtttttgtgtgttgagtattatcc

SEQ ID NO: 7649 - DNA, 80 bp, synthetic construct
  misc_feature 1..80: note = Synthetic: >SARSCoV-cand-11410-11489
  source 1..80: mol_type = other DNA
tatttctgtaacctctaactattctggtgtcgttacgactatcatgtttttagctagagctatagtgtttgtgtgtgttg

SEQ ID NO: 7650 - DNA, 80 bp, synthetic construct
  misc_feature 1..80: note = Synthetic: >SARSRC-cand-11400-11479
  source 1..80: mol_type = other DNA
taactattctggtgtcgttacgactatcatgttcttagctagagctatagtttttgtgtgtgttgagtattaccctttct

SEQ ID NO: 7651 - DNA, 80 bp, synthetic construct
  misc_feature 1..80: note = Synthetic: >Quail-cand-13800-13879
  source 1..80: mol_type = other DNA
accttactacttaccttacccagatgtctctcgcatcttgggagcctgtatttttgtggatgacgttaataaggctgacc

SEQ ID NO: 7652 - DNA, 80 bp, synthetic construct
  misc_feature 1..80: note = Synthetic: >HKU15-cand-13850-13929
  source 1..80: mol_type = other DNA
tgatggtaaaccttactacttaccttacccagatgtctctcgcattctgggtgcatgcatctttgtggatgacgttaaca

SEQ ID NO: 7653 - DNA, 80 bp, synthetic construct
  misc_feature 1..80: note = Synthetic: >BtSk_AlphaCoV-cand-14770-14849
  source 1..80: mol_type = other DNA
gatcaaagttttgttgaagagtactttggttatcttcgtaaacacttttccatgatgatactttctgatgatggtgtcgt

SEQ ID NO: 7654 - DNA, 80 bp, synthetic construct
  misc_feature 1..80: note = Synthetic: >Sb512-cand-14820-14899
  source 1..80: mol_type = other DNA
caaagttttgttgaagagtactttggttaccttcgtaagcacttttccatgatgatactttctgatgatggtgtcgtatg

SEQ ID NO: 7655 - DNA, 80 bp, synthetic construct
  misc_feature 1..80: note = Synthetic: >Sk512R-cand-14800-14879
  source 1..80: mol_type = other DNA
atcaagtgtggatcaaagttttgttgaagagtactttggttaccttcgtaaacacttttctatgatgatactttctgatg

SEQ ID NO: 7656 - DNA, 80 bp, synthetic construct
  misc_feature 1..80: note = Synthetic: >MbCoV1-cand-16740-16819
  source 1..80: mol_type = other DNA
ctgtggactctttatgtgtgaaagctagtaaaaattatgttgtggatcattgctcccgtataataccagcacgtgctcgt

SEQ ID NO: 7657 - DNA, 80 bp, synthetic construct
  misc_feature 1..80: note = Synthetic: >MsbCoV1-cand-16720-16799
  source 1..80: mol_type = other DNA
tctcatgcagcggtggactctttatgtgtgaaggctagtaaaaattacgttgtggatcattgctcccgtataataccagc

SEQ ID NO: 7658 - DNA, 80 bp, synthetic construct
  misc_feature 1..80: note = Synthetic: >BatCoV1A-cand-16900-16979
  source 1..80: mol_type = other DNA
ctcatgcagcagtggactctttatgtgtgaaggctagtaagaactatgttgtggatcattgctcccgtataataccagca

SEQ ID NO: 7659 - DNA, 80 bp, synthetic construct
  misc_feature 1..80: note = Synthetic: >BetaSp-cand-4920-4999
  source 1..80: mol_type = other DNA
gccaccactaaaaaggtagtgttggtcagtaataataaagaagattttaagctcatcgagggttgtcaaacaacagccgt

SEQ ID NO: 7660 - DNA, 80 bp, synthetic construct
  misc_feature 1..80: note = Synthetic: >HKU24-cand-4600-4679
  source 1..80: mol_type = other DNA
actaaaaaggtagtgttggtcagtaataataaagaagattttaagctcatcgagggttgccaaacaacagccgtcgatgg

SEQ ID NO: 7661 - DNA, 80 bp, synthetic construct
  misc_feature 1..80: note = Synthetic: >HghCoV1-cand-17970-18049
  source 1..80: mol_type = other DNA
ttcagaatacccctatgtgatattttgtcagacggctgacacagcacatgccaataatattaataggttcaatgttgctg

SEQ ID NO: 7662 - DNA, 80 bp, synthetic construct
  misc_feature 1..80: note = Synthetic: >Sparrow-cand-14200-14279
  source 1..80: mol_type = other DNA
ccagtggtgtttgtgtggtgtgtaattcacccactatactacgctgtggtgattgcattcggcgaccactattgtgctgt

SEQ ID NO: 7663 - DNA, 80 bp, synthetic construct
  misc_feature 1..80: note = Synthetic: >AlphaSp-cand-26010-26089
  source 1..80: mol_type = other DNA
tgatgcatgggccagctttggcgttaattgggttttcttcgcattcagcatcctaatggcctgcatcacagctgtgctgt

SEQ ID NO: 7664 - DNA, 80 bp, synthetic construct
  misc_feature 1..80: note = Synthetic: >Sk512R-cand-25760-25839
  source 1..80: mol_type = other DNA
ttccatctttgacgcatgggccagctttggggttaattgggtgttctttgcattcagcatcctaatggcctgcatcacag

SEQ ID NO: 7665 - DNA, 80 bp, synthetic construct
  misc_feature 1..80: note = Synthetic: >SEAC-cand-24280-24359
  source 1..80: mol_type = other DNA
tactctagaattactaaagtagctgactatattgctctctatggtggtcaccattatgtgaccatcgagacaactgctgt

SEQ ID NO: 7666 - DNA, 80 bp, synthetic construct
  misc_feature 1..80: note = Synthetic: >HKU15-cand-8640-8719
  source 1..80: mol_type = other DNA
agcattccagtattacactgataatgttgttgctcaattatatgcacacttactgactgttgatgctagaccaaaatggc

SEQ ID NO: 7667 - DNA, 80 bp, synthetic construct
  misc_feature 1..80: note = Synthetic: >BetaSp-cand-20050-20129
  source 1..80: mol_type = other DNA
gacaaagtctttgctaagattgaacaggaggatgttttagtgtttaaaaataacacaacattccctactaatgtggctgt

SEQ ID NO: 7668 - DNA, 80 bp, synthetic construct
  misc_feature 1..80: note = Synthetic: >BetaCoV1-cand-28670-28749
  source 1..80: mol_type = other DNA
ttttacattgggtaaaccttataattttcggcacttgccgaagtttagaagacctaccctcacatggatccctgggctgt

SEQ ID NO: 7669 - DNA, 80 bp, synthetic construct
  misc_feature 1..80: note = Synthetic: >BetaSp-cand-28780-28859
  source 1..80: mol_type = other DNA
gcccatttttacattgggtaaaccttataattttcggcacttgccgaagtttagaagacctaccctcacatggatccctg

SEQ ID NO: 7670 - DNA, 80 bp, synthetic construct
  misc_feature 1..80: note = Synthetic: >HKU5-cand-16400-16479
  source 1..80: mol_type = other DNA
tgtggtgataattcagctaaattctgggaagagagcttctatagagacctctatactgctccaaccacacttcaggctgt

SEQ ID NO: 7671 - DNA, 80 bp, synthetic construct
  misc_feature 1..80: note = Synthetic: >HKU5R-cand-16400-16479
  source 1..80: mol_type = other DNA
ggtgataattcagccaaattctgggaagagagcttttatagagacctctatactgctccaaccacacttcaggctgtcgg

SEQ ID NO: 7672 - DNA, 80 bp, synthetic construct
  misc_feature 1..80: note = Synthetic: >MbCoV1-cand-7530-7609
  source 1..80: mol_type = other DNA
acaggtgaatcttttatcgaagtcgataaagtatcatttgaaaatggttcctactatttatatagtggtgaaactttttg

SEQ ID NO: 7673 - DNA, 80 bp, synthetic construct
  misc_feature 1..80: note = Synthetic: >MbCoV1-cand-17460-17539
  source 1..80: mol_type = other DNA
ctcatgcttgcaacattaataggtttaatgttgctattactagagctaagaagggcatcttttgtgtcatgtgtgataaa

SEQ ID NO: 7674 - DNA, 80 bp, synthetic construct
  misc_feature 1..80: note = Synthetic: >HKU5R-cand-14630-14709
  source 1..80: mol_type = other DNA
atgacactaccgggaacgtcttttggtccaattgtccgaaagatttttgtcgatggtgtaccatttgtcatatcttgtgg

SEQ ID NO: 7675 - DNA, 80 bp, synthetic construct
  misc_feature 1..80: note = Synthetic: >HKU15-cand-13530-13609
  source 1..80: mol_type = other DNA
cttaataaggacattgcggacttgcatcgtagtctttatgaagatatttatcgtggtgactctaatgatatcaccgtcat

SEQ ID NO: 7676 - DNA, 80 bp, synthetic construct
  misc_feature 1..80: note = Synthetic: >HKU4-cand-10990-11069
  source 1..80: mol_type = other DNA
ggttttcagggtaaaactattctgggccagtctactttggaggatgagttcactcctgatgatgttaatatgcaagtcat

SEQ ID NO: 7677 - DNA, 80 bp, synthetic construct
  misc_feature 1..80: note = Synthetic: >HKU4R-cand-10990-11069
  source 1..80: mol_type = other DNA
gggtaaaattatcctgggccagtctactttggaggatgagttcactcctgatgatgttaatatgcaagtcatgggtgttg

SEQ ID NO: 7678 - DNA, 80 bp, synthetic construct
  misc_feature 1..80: note = Synthetic: >Sb512-cand-9880-9959
  source 1..80: mol_type = other DNA
gatcagccgacattacaaattgaaggtgctagtaacttggttactgaaaatgtttgctcgtggctttacggtgctctcat

SEQ ID NO: 7679 - DNA, 80 bp, synthetic construct
  misc_feature 1..80: note = Synthetic: >AcCoV_JC34-cand-19100-19179
  source 1..80: mol_type = other DNA
ggtctacaagaatatggttttgagcatgtagtctatggcgatttttctaaaaccaccataggcggtttacatttgctcat

SEQ ID NO: 7680 - DNA, 80 bp, synthetic construct
  misc_feature 1..80: note = Synthetic: >Lucheng19-cand-19450-19529
  source 1..80: mol_type = other DNA
tacaagaatatggttttgagcatgtagtctatggcgatttttctaaaaccaccataggcgggttacacctgctcatttca

SEQ ID NO: 7681 - DNA, 80 bp, synthetic construct
  misc_feature 1..80: note = Synthetic: >BetaSp-cand-4280-4359
  source 1..80: mol_type = other DNA
gatcgacaccacatttagtgcgttcttttcattgaagagagtgtacttagcagcgtgtgttgttgatgtgcataatcgac

SEQ ID NO: 7682 - DNA, 80 bp, synthetic construct
  misc_feature 1..80: note = Synthetic: >HKU5-cand-2640-2719
  source 1..80: mol_type = other DNA
gtggtggaagtagttgttggtcaattagaacctactaaggaacatagtcccgaactagtcgtcggtgattatgtgatcat

SEQ ID NO: 7683 - DNA, 80 bp, synthetic construct
  misc_feature 1..80: note = Synthetic: >HKU14-cand-22430-22509
  source 1..80: mol_type = other DNA
tatttccgtaaggcttgtcaaaatttagattgtaattgtctgaggttttatgaatcttcatttgaagaagactaaactca

SEQ ID NO: 7684 - DNA, 80 bp, synthetic construct
  misc_feature 1..80: note = Synthetic: >MinkCoV1-cand-15950-16029
  source 1..80: mol_type = other DNA
tcctggtgcacgtatagtttatactgcttgttcacatgcagctgttgattcactttgtgaaaaggctgctaaaaatttta

SEQ ID NO: 7685 - DNA, 80 bp, synthetic construct
  misc_feature 1..80: note = Synthetic: >AlphaMink-cand-15920-15999
  source 1..80: mol_type = other DNA
tattatcctggtgcacgtatagtttatactgcttgttcacatgcggctgttgattcactttgtgaaaaggctgctaaaaa

SEQ ID NO: 7686 - DNA, 80 bp, synthetic construct
  misc_feature 1..80: note = Synthetic: >WIV16-cand-23520-23599
  source 1..80: mol_type = other DNA
tatgtctttaggtgctgatagttcaattgcttactctaataacaccattgctatacctactaacttttcaattagcatta

SEQ ID NO: 7687 - DNA, 80 bp, synthetic construct
  misc_feature 1..80: note = Synthetic: >Alpha2-cand-26490-26569
  source 1..80: mol_type = other DNA
tttcaaccctataactcacacaggtaacaagaaattttggaatgttgcaccaaaagacttagtacctaaaggtaagggta

SEQ ID NO: 7688 - DNA, 80 bp, synthetic construct
  misc_feature 1..80: note = Synthetic: >AlphaMink-cand-26500-26579
  source 1..80: mol_type = other DNA
ttcaaccctataactcatacaggtaacaagaagttttggaatgttgcaccaaaagacttagtacctaaaggtaagggtaa

SEQ ID NO: 7689 - DNA, 80 bp, synthetic construct
  misc_feature 1..80: note = Synthetic: >HKU5R-cand-21840-21919
  source 1..80: mol_type = other DNA
ttaaggtctcaagtcagacctgaatattttgacattgtccgtaacacatggccaatgcctattgatacgagtaaggctga

SEQ ID NO: 7690 - DNA, 80 bp, synthetic construct
  misc_feature 1..80: note = Synthetic: >Quail-cand-13560-13639
  source 1..80: mol_type = other DNA
ttatcagcatctccagagctactttggacttatgatattatctgatgacggtgtcgcatgtatcgactcagacatggcta

SEQ ID NO: 7691 - DNA, 80 bp, synthetic construct
  misc_feature 1..80: note = Synthetic: >Sparrow-cand-13630-13709
  source 1..80: mol_type = other DNA
ttaacagattctatcaacatctccagaattattttggacttatgatattatctgatgacggtgtcgcatgtatcgactca

SEQ ID NO: 7692 - DNA, 80 bp, synthetic construct
  misc_feature 1..80: note = Synthetic: >Sk512R-cand-19840-19919
  source 1..80: mol_type = other DNA
ttatggcagtggcctgaagttaccagatggtatcatgtttaacgtagtcaaatacacacagctttgtcagtatttgaata

SEQ ID NO: 7693 - DNA, 80 bp, synthetic construct
  misc_feature 1..80: note = Synthetic: >HKU5R-cand-6640-6719
  source 1..80: mol_type = other DNA
tcaaagagaataattggtctgcactatttaatatacacactgtagaaaagggagatctcagtgtaattgctgcatcagga

SEQ ID NO: 7694 - DNA, 80 bp, synthetic construct
  misc_feature 1..80: note = Synthetic: >HKU5-cand-6640-6719
  source 1..80: mol_type = other DNA
ttctcaaagagaataattggtctgcactatttaatatacacactgtagaaaagggagatctcagtgtaattgctgcatca

SEQ ID NO: 7695 - DNA, 80 bp, synthetic construct
  misc_feature 1..80: note = Synthetic: >HghCoV1-cand-2040-2119
  source 1..80: mol_type = other DNA
tctatagagtactcccttatgagttggaagatgtgtctgactttgtacagttgctgtttaattgtgttgaaatttcagca

SEQ ID NO: 7696 - DNA, 80 bp, synthetic construct
  misc_feature 1..80: note = Synthetic: >MG693168-cand-1060-1139
  source 1..80: mol_type = other DNA
actgtgtcatctattatgctcagtctttacggcactgctcagtatgccccagtcactcctgtggctcgcattgcttgtcc

SEQ ID NO: 7697 - DNA, 80 bp, synthetic construct
  misc_feature 1..80: note = Synthetic: >MN307884-cand-21650-21729
  source 1..80: mol_type = other DNA
actttaaatacttgtgttgagtacaatatatatggcagatttggccaaggctttattactaatgtaactgactccgcagc

SEQ ID NO: 7698 - DNA, 80 bp, synthetic construct
  misc_feature 1..80: note = Synthetic: >MN128088-cand-21700-21779
  source 1..80: mol_type = other DNA
actttaaatacttgtgttgagtacaatatatatggtagagttggccaaggctttataactaatgtaaccgactcagcagc

SEQ ID NO: 7699 - DNA, 80 bp, synthetic construct
  misc_feature 1..80: note = Synthetic: >AY692454-cand-3920-3999
  source 1..80: mol_type = other DNA
tcaggaatttttggtgtagattttaaaatgtcaatagacgcaatgcgtgaagcttttgaaggttgcaccatacgcgttct

SEQ ID NO: 7700 - DNA, 80 bp, synthetic construct
  misc_feature 1..80: note = Synthetic: >MT114544-cand-13830-13909
  source 1..80: mol_type = other DNA
agaagcatttgaagtcaattgctgctacacgcaatgccactgtggtcattggttcaaccaagttttatggtggttgggat

SEQ ID NO: 7701 - DNA, 80 bp, synthetic construct
  misc_feature 1..80: note = Synthetic: >AY692454-cand-4720-4799
  source 1..80: mol_type = other DNA
agaagcttcgttaccgtacttattgctttttgctactgatggtcctgctacagttgattgtgatgaggatgctgtgggga

SEQ ID NO: 7702 - DNA, 80 bp, synthetic construct
  misc_feature 1..80: note = Synthetic: >MT114542-cand-26860-26939
  source 1..80: mol_type = other DNA
agaataatagtatacctctttcattcttcaatcccattaccctccaacaaggttcaaaattttggaacttatgtccgaga

SEQ ID NO: 7703 - DNA, 80 bp, synthetic construct
  misc_feature 1..80: note = Synthetic: >PDF-2386-cand-18160-18239
  source 1..80: mol_type = other DNA
gtagagggttgtcatgcaactagagatgctgtgggtacaaaccttcctcttcagttaggattttcaacaggtgtcaattt

SEQ ID NO: 7704 - DNA, 80 bp, synthetic construct
  misc_feature 1..80: note = Synthetic: >PRD-0038-cand-18150-18229
  source 1..80: mol_type = other DNA
tggcttcgacgtagagggttgtcatgcaactagagatgctgtgggtacaaaccttcctcttcagttaggattttcaacag

SEQ ID NO: 7705 - DNA, 80 bp, synthetic construct
  misc_feature 1..80: note = Synthetic: >SBB-797-cand-24320-24399
  source 1..80: mol_type = other DNA
tgttgccaccaacagacaacatggattttaactttactgcagagtttgagaagtggtataaaaatcacagttctcaattt

SEQ ID NO: 7706 - DNA, 80 bp, synthetic construct
  misc_feature 1..80: note = Synthetic: >SBB-726-cand-24320-24399
  source 1..80: mol_type = other DNA
ctgtgttgcctcctacggacaacatggactttaactttactgcagagtttgagaagtggtataaaaatcacagttctcaa

SEQ ID NO: 7707 - DNA, 80 bp, synthetic construct
  misc_feature 1..80: note = Synthetic: >SBB-122-cand-9350-9429
  source 1..80: mol_type = other DNA
actttgcaaatcaaagttaatcagaccaatgtccacacgccaacgtatgtatttaagactcttaaacaaggtgacaattt

SEQ ID NO: 7708 - DNA, 80 bp, synthetic construct
  misc_feature 1..80: note = Synthetic: >SBB-120-cand-9340-9419
  source 1..80: mol_type = other DNA
gaagggtacaactttgcaaatcaaagttaatcagaccaatgtccacacgccaacgtatgtatttaagactcttaaacaag

SEQ ID NO: 7709 - DNA, 80 bp, synthetic construct
  misc_feature 1..80: note = Synthetic: >PRD-0038-cand-8800-8879
  source 1..80: mol_type = other DNA
ttgctacacaccttctaaattaatagagtatagtgattttgcaacttcagcttgtgttttagctgcagagtgcacaattt

SEQ ID NO: 7710 - DNA, 80 bp, synthetic construct
  misc_feature 1..80: note = Synthetic: >SBB-053-cand-7310-7389
  source 1..80: mol_type = other DNA
gatgatgaagatttcgttaactgtgttagtaatgctcataggtttaacgtgttgttaacagatttgtcatacaacaattt

SEQ ID NO: 7711 - DNA, 80 bp, synthetic construct
  misc_feature 1..80: note = Synthetic: >SBB-130-cand-7300-7379
  source 1..80: mol_type = other DNA
tgatgcagatgatgaagatttcgttaactgtgttagtaatgctcataggtttaacgtgttgttaacagatttgtcataca

SEQ ID NO: 7712 - DNA, 80 bp, synthetic construct
  misc_feature 1..80: note = Synthetic: >SBB-726-cand-25530-25609
  source 1..80: mol_type = other DNA
tcctacagtttattttaggtacttgtagttgtttgtttagtataatttgcaagcctactattttagtgtacaacaaattt

SEQ ID NO: 7713 - DNA, 80 bp, synthetic construct
  misc_feature 1..80: note = Synthetic: >SBB-747-cand-17280-17359
  source 1..80: mol_type = other DNA
tgtcagacttctgatactgcccatgcattaaatgtaaataggtttaacgtggctattactagagctaagaagggcatctt

SEQ ID NO: 7714 - DNA, 80 bp, synthetic construct
  misc_feature 1..80: note = Synthetic: >SBB-726-cand-24880-24959
  source 1..80: mol_type = other DNA
tttctgttttgttatggtgccttggtaaggtaagatatccttatgtacgtatattagctcacacagtgttttgcttgctt

SEQ ID NO: 7715 - DNA, 80 bp, synthetic construct
  misc_feature 1..80: note = Synthetic: >SBB-797-cand-24880-24959
  source 1..80: mol_type = other DNA
ctgttttgatatggtgccttggtaaggtaagatatccttatgtacgtatattagctcacacagtgttttgcttgcttcag

SEQ ID NO: 7716 - DNA, 80 bp, synthetic construct
  misc_feature 1..80: note = Synthetic: >SBB-053-cand-12750-12829
  source 1..80: mol_type = other DNA
ggatcttgtctacgcgctcagaaattttgatgaaaagaattgcgagactctcaaagaaatacttactattacaggtgctt

SEQ ID NO: 7717 - DNA, 80 bp, synthetic construct
  misc_feature 1..80: note = Synthetic: >SBB-010-cand-12760-12839
  source 1..80: mol_type = other DNA
tacgcgctcagaaattttgatgaaaagaattgcgagactctcaaagaaatacttactattacaggtgcttgcgatgtcaa

SEQ ID NO: 7718 - DNA, 80 bp, synthetic construct
  misc_feature 1..80: note = Synthetic: >SBB-130-cand-8500-8579
  source 1..80: mol_type = other DNA
gacatgcctgctggtaactaagtttaagcgtatgtttggtgagctgtcatatggtgtttgctccgtcgtttgtgtggctt

SEQ ID NO: 7719 - DNA, 80 bp, synthetic construct
  misc_feature 1..80: note = Synthetic: >SBB-041-cand-8510-8589
  source 1..80: mol_type = other DNA
ctgatggtaactaagtttaagcgtatgtttggtgagctgtcatatggtgtttgctccgtcgtttgtgtggcttttgtgaa

SEQ ID NO: 7720 - DNA, 80 bp, synthetic construct
  misc_feature 1..80: note = Synthetic: >SBB-797-cand-3280-3359
  source 1..80: mol_type = other DNA
ctccatgtagttggtccagacaagcgcttaggacaggatattggattgctggatcaagtttatcaggcatatactggctt

SEQ ID NO: 7721 - DNA, 80 bp, synthetic construct
  misc_feature 1..80: note = Synthetic: >SBB-747-cand-3270-3349
  source 1..80: mol_type = other DNA
acatggtattctccatgtagttggtccagacaagcgcttaggacaggatattggattgctggatcaagtttatcaggcat

SEQ ID NO: 7722 - DNA, 80 bp, synthetic construct
  misc_feature 1..80: note = Synthetic: >PRD-0038-cand-17990-18069
  source 1..80: mol_type = other DNA
agacagaaggtttatgtgttgacataccaggaatacccaaggacatgacttatcgtaggctcatctctatgatgggtttc

SEQ ID NO: 7723 - DNA, 80 bp, synthetic construct
  misc_feature 1..80: note = Synthetic: >PDF-2370-cand-18000-18079
  source 1..80: mol_type = other DNA
tttatgtgttgacataccaggaatacccaaggacatgacttatcgtaggctcatctctatgatgggtttcaagatgaatt

SEQ ID NO: 7724 - DNA, 80 bp, synthetic construct
  misc_feature 1..80: note = Synthetic: >SBB-010-cand-26480-26559
  source 1..80: mol_type = other DNA
tgaggaaagacgacaaaaacctgccagcttttcttcaacaagtcagtgcttatgcaactccctcgcaggcacaatcaatt

SEQ ID NO: 7725 - DNA, 80 bp, synthetic construct
  misc_feature 1..80: note = Synthetic: >SBB-053-cand-26470-26549
  source 1..80: mol_type = other DNA
gtgaggaaagacgacaaaaacctgccagcttttcttcaacaagtcagtgcttatgcaaccccttcgcaggcacaatcaat

SEQ ID NO: 7726 - DNA, 80 bp, synthetic construct
  misc_feature 1..80: note = Synthetic: >SBB-747-cand-15590-15669
  source 1..80: mol_type = other DNA
ttgggaggtagatttttatgaaaatatgtacatggaatctgctactttacagagtgtaggtacatgtgtcgtgtgcaatt

SEQ ID NO: 7727 - DNA, 80 bp, synthetic construct
  misc_feature 1..80: note = Synthetic: >SBB-797-cand-15600-15679
  source 1..80: mol_type = other DNA
gatttttatgaaaatatgtacatggaatctgctactttacagagtgtaggtacatgtgttgtgtgcaattcgcaaacatc

SEQ ID NO: 7728 - DNA, 80 bp, synthetic construct
  misc_feature 1..80: note = Synthetic: >SBB-120-cand-25650-25729
  source 1..80: mol_type = other DNA
aattggctactggaatgaacaacaacgctggcgcatgatccgtgggcaacgtaaaaccttgccttccaagtggcatttct

SEQ ID NO: 7729 - DNA, 80 bp, synthetic construct
  misc_feature 1..80: note = Synthetic: >SBB-024-cand-25630-25709
  source 1..80: mol_type = other DNA
gatcaacaaattggctactggaatgaacaaccacgttggcgcatgatccgtgggcaacgtaaaaccttgccttccaagtg

SEQ ID NO: 7730 - DNA, 80 bp, synthetic construct
  misc_feature 1..80: note = Synthetic: >SBB-122-cand-25620-25699
  source 1..80: mol_type = other DNA
atcaacaaattggctactggaatgaacaaccacgctggcgcatgatccgcggtcaacgtaaggaattgccttccaagtgg

SEQ ID NO: 7731 - DNA, 80 bp, synthetic construct
  misc_feature 1..80: note = Synthetic: >SBB-041-cand-14830-14909
  source 1..80: mol_type = other DNA
atgcagatcgtagatgagaatggtaagtactatttaccttaccctgatccatcacgtatcctatctgctggtgtttttgt

SEQ ID NO: 7732 - DNA, 80 bp, synthetic construct
  misc_feature 1..80: note = Synthetic: >SBB-010-cand-14820-14899
  source 1..80: mol_type = other DNA
acaacacaccatgcagatcgtagatgagaatggtaagtactatttaccttaccctgatccatcacgtatcttatctgctg

SEQ ID NO: 7733 - DNA, 80 bp, synthetic construct
  misc_feature 1..80: note = Synthetic: >PRD-0038-cand-18950-19029
  source 1..80: mol_type = other DNA
agccttgtagtgacaaagcttataagattgaggaattagtctattcttatggcacatgtcatgataaattcactgatggt

SEQ ID NO: 7734 - DNA, 80 bp, synthetic construct
  misc_feature 1..80: note = Synthetic: >GCS-211-cand-8640-8719
  source 1..80: mol_type = other DNA
ggtcttagcacgcggcgccggtattagagttgtacgcacagttgcaacgacttattgtcgtgttggagagtgtgtggatt

SEQ ID NO: 7735 - DNA, 80 bp, synthetic construct
  misc_feature 1..80: note = Synthetic: >GCS-227-cand-8640-8719
  source 1..80: mol_type = other DNA
tcttagcacgcggcgccggtattagagttgtacgcacagttgcaacgacttattgtcgtgttggagagtgtgtggattcg

SEQ ID NO: 7736 - DNA, 80 bp, synthetic construct
  misc_feature 1..80: note = Synthetic: >SBB-726-cand-23040-23119
  source 1..80: mol_type = other DNA
attgggtgctattactgaatacattcaaactacgtcacctaaagttaatgtggactgcgtcaaatatttatgtggagatt

SEQ ID NO: 7737 - DNA, 80 bp, synthetic construct
  misc_feature 1..80: note = Synthetic: >GCS-211-cand-3210-3289
  source 1..80: mol_type = other DNA
ggttatggtgtcccagtatgccatacaggatgatgaagactgctgtgaagaacaatcaactgatgtgttgcaagacgatt

SEQ ID NO: 7738 - DNA, 80 bp, synthetic construct
  misc_feature 1..80: note = Synthetic: >GCS-227-cand-3210-3289
  source 1..80: mol_type = other DNA
ttatggtgtcccagtatgccatacaggatgatgaagactgctgtgaagaacagtcaactgatgtgttgcaagacgattgt

SEQ ID NO: 7739 - DNA, 80 bp, synthetic construct
  misc_feature 1..80: note = Synthetic: >SBB-024-cand-6170-6249
  source 1..80: mol_type = other DNA
gttgtgtggattaaactgttctgtaagttgttgttgttgttattcacagtgtactcctcttggtttttgcttgttagatt

SEQ ID NO: 7740 - DNA, 80 bp, synthetic construct
  misc_feature 1..80: note = Synthetic: >SBB-010-cand-6160-6239
  source 1..80: mol_type = other DNA
tttgtctaaggttgtgtggattaaactgttctgtaagttgttgttgctgttattcacagtgtattcctcttggtttttgc

SEQ ID NO: 7741 - DNA, 80 bp, synthetic construct
  misc_feature 1..80: note = Synthetic: >GCS-211-cand-3290-3369
  source 1..80: mol_type = other DNA
gtggtgacgcaacacagggtgatgtcacacaagcggaagagtcttgtgatgaccagcaattagacgttgacgttgagatt

SEQ ID NO: 7742 - DNA, 80 bp, synthetic construct
  misc_feature 1..80: note = Synthetic: >GCS-227-cand-3290-3369
  source 1..80: mol_type = other DNA
ggtgacgcaacacaggatgatgtcacacaagcggaagagtcttgtgatgaccagcaattagacgttgacgttgagattgt

SEQ ID NO: 7743 - DNA, 80 bp, synthetic construct
  misc_feature 1..80: note = Synthetic: >SBB-130-cand-970-1049
  source 1..80: mol_type = other DNA
agaaattttaagtgaccctattttcttgcacgcacttgtcaaatgcgtttgtggaaccactagctggactgtaggagatt

SEQ ID NO: 7744 - DNA, 80 bp, synthetic construct
  misc_feature 1..80: note = Synthetic: >SBB-120-cand-980-1059
  source 1..80: mol_type = other DNA
agtgaccctattttcttgcacgcacttgtcaaatgtgtctgtggaaccactagctggactgtaggggattggtcttgcta

SEQ ID NO: 7745 - DNA, 80 bp, synthetic construct
  misc_feature 1..80: note = Synthetic: >GCS-211-cand-21740-21819
  source 1..80: mol_type = other DNA
ggtgtcttagatttttctgaaattaacactacattgtgtaatgggtatgcgttgaatggcactgctgatgccatcagatt

SEQ ID NO: 7746 - DNA, 80 bp, synthetic construct
  misc_feature 1..80: note = Synthetic: >GCS-227-cand-21730-21809
  source 1..80: mol_type = other DNA
ctgctgagggtgtcttagatttttctgaaattaacactacattgtgtaatgggtatgctttgaatggcactgctgatgcc

SEQ ID NO: 7747 - DNA, 80 bp, synthetic construct
  misc_feature 1..80: note = Synthetic: >GCS-227-cand-19500-19579
  source 1..80: mol_type = other DNA
tgtagatcgttgtgacggtttttacagccaaggtcgcaccacaaacgacttcatgccgcgtagtaccatggagaaagatt

SEQ ID NO: 7748 - DNA, 80 bp, synthetic construct
  misc_feature 1..80: note = Synthetic: >GCS-211-cand-19510-19589
  source 1..80: mol_type = other DNA
gttgtgacggtttttacagccaaggtcgcaccacaaacgacttcatgccgcgtagtaccatggagaaagattttcttgaa

SEQ ID NO: 7749 - DNA, 80 bp, synthetic construct
  misc_feature 1..80: note = Synthetic: >GCS-211-cand-13590-13669
  source 1..80: mol_type = other DNA
gattttaaaacttatgatttgttggagtatgacttcactgagcataaggaaaaactttttcagaagtattttaaatattg

SEQ ID NO: 7750 - DNA, 80 bp, synthetic construct
  misc_feature 1..80: note = Synthetic: >GCS-227-cand-13590-13669
  source 1..80: mol_type = other DNA
ttttaaaaattatgatttgttggagtatgacttcactgagcataaggaaaaactttttcagaagtattttaaatattggg

SEQ ID NO: 7751 - DNA, 80 bp, synthetic construct
  misc_feature 1..80: note = Synthetic: >GCS-227-cand-23170-23249
  source 1..80: mol_type = other DNA
caattgctgttcacaccgagtacattcaacattccaacagacctgttgttgttgattgccgtacttatgtatgtagtggc

SEQ ID NO: 7752 - DNA, 80 bp, synthetic construct
  misc_feature 1..80: note = Synthetic: >GCS-211-cand-23180-23259
  source 1..80: mol_type = other DNA
gttcacaccgagtacattcaacattccaacagacctgttgttgttgattgccgtacttatgtatgtagtggcaaccctag

SEQ ID NO: 7753 - DNA, 80 bp, synthetic construct
  misc_feature 1..80: note = Synthetic: >SBB-120-cand-19060-19139
  source 1..80: mol_type = other DNA
caatttgatggcttctatacccaaggtcgaaatgtgaaggacttcatcgcacgcagtgatatggaacgtgatttcctaga

SEQ ID NO: 7754 - DNA, 80 bp, synthetic construct
  misc_feature 1..80: note = Synthetic: >SBB-122-cand-9110-9189
  source 1..80: mol_type = other DNA
cggatggcacaaccatctggtttagtggagcgttgtatagttcgtgtgtgttatggtaacatggttttgaatggtttgtg

SEQ ID NO: 7755 - DNA, 80 bp, synthetic construct
  misc_feature 1..80: note = Synthetic: >SBB-120-cand-9100-9179
  source 1..80: mol_type = other DNA
tggtttgaaacggatggcacaaccatctggtttagtggagcgctgcatagtccgtgtgtgttatggtaacatggttttga

SEQ ID NO: 7756 - DNA, 80 bp, synthetic construct
  misc_feature 1..80: note = Synthetic: >SBB-788-cand-22560-22639
  source 1..80: mol_type = other DNA
taaattattcgtggctagctccacgggtgatattattgctgctaaagttagaggcaaggtttattctataacaccttgtg

SEQ ID NO: 7757 - DNA, 80 bp, synthetic construct
  misc_feature 1..80: note = Synthetic: >GCS-227-cand-10790-10869
  source 1..80: mol_type = other DNA
cacaccagtgctactgttgttgtaacataccttatgtctatgggttcagttttatacacctatttttatggtgttgatta

SEQ ID NO: 7758 - DNA, 80 bp, synthetic construct
  misc_feature 1..80: note = Synthetic: >GCS-211-cand-10800-10879
  source 1..80: mol_type = other DNA
tgctactgttgttgtaacataccttatgtctatgggttcagttttatacacctatttttgtggtgttgattacttgtccc

SEQ ID NO: 7759 - DNA, 80 bp, synthetic construct
  misc_feature 1..80: note = Synthetic: >SBB-130-cand-14310-14389
  source 1..80: mol_type = other DNA
ctgtaattctgaggaacgttattacaggttatgtaatgagttggcacaagtgttgactgaagttgtgtatacaaatggtg

SEQ ID NO: 7760 - DNA, 80 bp, synthetic construct
  misc_feature 1..80: note = Synthetic: >SBB-120-cand-14320-14399
  source 1..80: mol_type = other DNA
tctgaggaacgttattacaggttatgtaatgagttggcacaagtgttgactgaagttgtgtacacaaatggtggctttta

SEQ ID NO: 7761 - DNA, 80 bp, synthetic construct
  misc_feature 1..80: note = Synthetic: >GCS-227-cand-22610-22689
  source 1..80: mol_type = other DNA
gtacaggtggtcttttgttcacattcaacaggcttttagcatttacgtctcttatacttatggagatcgtataatgggtg

SEQ ID NO: 7762 - DNA, 80 bp, synthetic construct
  misc_feature 1..80: note = Synthetic: >GCS-211-cand-22620-22699
  source 1..80: mol_type = other DNA
ggtctttcattcacattcaacaggcttttagcatttacgtctcttatacttatggagatcgtataatgggtgtgccagca

SEQ ID NO: 7763 - DNA, 80 bp, synthetic construct
  misc_feature 1..80: note = Synthetic: >GCS-227-cand-18140-18219
  source 1..80: mol_type = other DNA
ctcttagcctcaaccatcatcaacactgtaatgtgcatcgtaatgagcatgtggcatctggtgatgccataatgacacgg

SEQ ID NO: 7764 - DNA, 80 bp, synthetic construct
  misc_feature 1..80: note = Synthetic: >GCS-211-cand-18150-18229
  source 1..80: mol_type = other DNA
ctcaaccatcatcaacactgtaatgtgcatcgtaatgagcatgtggcatctggtgatgccataatgacacggtgcttggc

SEQ ID NO: 7765 - DNA, 80 bp, synthetic construct
  misc_feature 1..80: note = Synthetic: >GCS-211-cand-26930-27009
  source 1..80: mol_type = other DNA
cctagtggtggttcgcgacccaactcccgctcgcagagcaggagcaataacaactactcaaggtcgcgaagcagcacccc

SEQ ID NO: 7766 - DNA, 80 bp, synthetic construct
  misc_feature 1..80: note = Synthetic: >GCS-227-cand-26930-27009
  source 1..80: mol_type = other DNA
tagtggtagttcgcgacccaactcccgctcgcagagcaggagcaataacaactactcaaggtcgcgaagcagcaccccag

SEQ ID NO: 7767 - DNA, 80 bp, synthetic construct
  misc_feature 1..80: note = Synthetic: >GCS-227-cand-23410-23489
  source 1..80: mol_type = other DNA
cctctggttacaattttggacctgttttaccagctaggaaaggcatgcgcagcaaaattgaagacatcctttttaataag

SEQ ID NO: 7768 - DNA, 80 bp, synthetic construct
  misc_feature 1..80: note = Synthetic: >GCS-211-cand-23420-23499
  source 1..80: mol_type = other DNA
tacaattttggacctgttttaccagctgggaaaggcatgcgcagcaaaattgaagacatcctttttaataaggttgtcac

SEQ ID NO: 7769 - DNA, 80 bp, synthetic construct
  misc_feature 1..80: note = Synthetic: >GCS-211-cand-9920-9999
  source 1..80: mol_type = other DNA
ccttcattaatggggcttgtggttccccagggtttgtgcttaccagtgctggtgttgaatttgtttatatgcaccattta

SEQ ID NO: 7770 - DNA, 80 bp, synthetic construct
  misc_feature 1..80: note = Synthetic: >GCS-227-cand-9920-9999
  source 1..80: mol_type = other DNA
ttcattaatggggcttgtggttccccagggtttgtgcttaccagtgctggtgttgaatttgtttatatgcaccatttaga

SEQ ID NO: 7771 - DNA, 80 bp, synthetic construct
  misc_feature 1..80: note = Synthetic: >GCS-227-cand-5050-5129
  source 1..80: mol_type = other DNA
gttgtggactaattccatgttaagacttggtcaagtgggtgacatcgtagaccagatgtctaatggtgcactacagaagg

SEQ ID NO: 7772 - DNA, 80 bp, synthetic construct
  misc_feature 1..80: note = Synthetic: >GCS-211-cand-5050-5129
  source 1..80: mol_type = other DNA
ttgttgtggactaattccatgttaagacttggtcaagtgggtgacatcgtagaccagatgtctaatggtgcactacagaa

SEQ ID NO: 7773 - DNA, 80 bp, synthetic construct
  misc_feature 1..80: note = Synthetic: >SBB-130-cand-25270-25349
  source 1..80: mol_type = other DNA
tgcaggtaaatcaattacctacatacatcactgtcgccaaaccttctactactattgtctaccagagaactggccgttcg

SEQ ID NO: 7774 - DNA, 80 bp, synthetic construct
  misc_feature 1..80: note = Synthetic: >SBB-010-cand-25280-25359
  source 1..80: mol_type = other DNA
tcaattacctacatacatcactgtcgccaaaccttctactactattgtctaccagagaactggccgttcgctgaacgcac

SEQ ID NO: 7775 - DNA, 80 bp, synthetic construct
  misc_feature 1..80: note = Synthetic: >SBB-120-cand-24370-24449
  source 1..80: mol_type = other DNA
ggaagacattcccctgtcacgtagcatcgagcttcttaatggagtgtacctctatgtttttgcacctgaaccttgtgtcg

SEQ ID NO: 7776 - DNA, 80 bp, synthetic construct
  misc_feature 1..80: note = Synthetic: >SBB-122-cand-24360-24439
  source 1..80: mol_type = other DNA
ggcggaaggaggaagacattcccttgtcacgtagcatcgagcttcttaatggagtgtacctctatgtttttgcacctgaa

SEQ ID NO: 7777 - DNA, 80 bp, synthetic construct
  misc_feature 1..80: note = Synthetic: >GCS-227-cand-16310-16389
  source 1..80: mol_type = other DNA
cgaccattgctaaccaagagcgctactcttacaatgctaagttgcgcccagcttttaatatcagtgactcttattctagc

SEQ ID NO: 7778 - DNA, 80 bp, synthetic construct
  misc_feature 1..80: note = Synthetic: >GCS-211-cand-16310-16389
  source 1..80: mol_type = other DNA
tgcgaccattgctaaccaagagcgctactcttacaatgctaagttgcgcccagcttttaatatcagtgactcttattcta

SEQ ID NO: 7779 - DNA, 80 bp, synthetic construct
  misc_feature 1..80: note = Synthetic: >229E-cand-11520-11599
  source 1..80: mol_type = other DNA
actattcttaatatggcacgtaatggtgttgttcctctttctgttatccctgccacttcggcatccaagctcgtcgtcgt

SEQ ID NO: 7780 - DNA, 80 bp, synthetic construct
  misc_feature 1..80: note = Synthetic: >229E-cand-11600-11679
  source 1..80: mol_type = other DNA
ggtgccagatcatgattcatttgcgagaatgatggtagatggttttgtgcactacgctggcgttgtttggacattacaag

SEQ ID NO: 7781 - DNA, 80 bp, synthetic construct
  misc_feature 1..80: note = Synthetic: >229E-cand-11680-11759
  source 1..80: mol_type = other DNA
aagttaaggataatgatggtaagaatgtgcatcttaaagatgttacaaaggaaaaccaggaaacacttgtttggcctctg

SEQ ID NO: 7782 - DNA, 80 bp, synthetic construct
  misc_feature 1..80: note = Synthetic: >229E-cand-11760-11839
  source 1..80: mol_type = other DNA
attttgacttgtgaacgcgtcgttaaattgcagaacaatgaaataatgccgggcaagatgaaggttaaagccaccaaagc

SEQ ID NO: 7783 - DNA, 80 bp, synthetic construct
  misc_feature 1..80: note = Synthetic: >229E-cand-11840-11919
  source 1..80: mol_type = other DNA
tgaaggtgatggaggcattactagtgaaggtaatgctctatacaacaatgaaggtggacgtgcatttatgtatgcatatg

SEQ ID NO: 7784 - DNA, 80 bp, synthetic construct
  misc_feature 1..80: note = Synthetic: >229E-cand-11920-11999
  source 1..80: mol_type = other DNA
tgactacgaagcctgacatgaagtatgttaaatgggagcatgactctggtgtggttacagttgaattggaaccaccttgc

SEQ ID NO: 7785 - DNA, 80 bp, synthetic construct
  misc_feature 1..80: note = Synthetic: >229E-cand-12000-12079
  source 1..80: mol_type = other DNA
agatttgttgtagacacacctactggacctcaaattaagtatctttactttgttaagaatcttaacactttaaggagggg

SEQ ID NO: 7786 - DNA, 80 bp, synthetic construct
  misc_feature 1..80: note = Synthetic: >229E-cand-12080-12159
  source 1..80: mol_type = other DNA
tgctgttttgggttacataggcgctactgtgagattgcaagctggtaaacagactgagtttgtttcaaattcccatttat

SEQ ID NO: 7787 - DNA, 80 bp, synthetic construct
  misc_feature 1..80: note = Synthetic: >229E-cand-12160-12239
  source 1..80: mol_type = other DNA
taacgcattgttcattcgctgttgacccagctgcagcttatcttgatgctgttaaacaaggcgcaaaacctgttggcaac

SEQ ID NO: 7788 - DNA, 80 bp, synthetic construct
  misc_feature 1..80: note = Synthetic: >229E-cand-12240-12319
  source 1..80: mol_type = other DNA
tgtgtaaagatgttgactaatggttctggtagtggtcaggctattactagtactattgactctaatactacacaggatac

SEQ ID NO: 7789 - DNA, 80 bp, synthetic construct
  misc_feature 1..80: note = Synthetic: >229E-cand-12320-12399
  source 1..80: mol_type = other DNA
atatggtggcgcttctgtttgtatttattgcagagcacatgttgcacatccaaccatggatggtttttgtcagtataaag

SEQ ID NO: 7790 - DNA, 80 bp, synthetic construct
  misc_feature 1..80: note = Synthetic: >229E-cand-12400-12479
  source 1..80: mol_type = other DNA
gcaagtgggtacaagtgcctataggtacaaatgaccctataagattttgtcttgaaaatactgtttgtaaagtttgtggt

SEQ ID NO: 7791 - DNA, 80 bp, synthetic construct
  misc_feature 1..80: note = Synthetic: >229E-cand-12480-12559
  source 1..80: mol_type = other DNA
tgttggcttaatcatggctgtacatgtgaccggactgctattcaaagttttgataacagttatttaaacgagtcaggggc

SEQ ID NO: 7792 - DNA, 80 bp, synthetic construct
  misc_feature 1..80: note = Synthetic: >229E-cand-12560-12639
  source 1..80: mol_type = other DNA
tctagtgccgctcgactagagccctgcaatggtacagacatagattattgtgtccgtgcatttgacgtttacaataaaga

SEQ ID NO: 7793 - DNA, 80 bp, synthetic construct
  misc_feature 1..80: note = Synthetic: >229E-cand-12640-12719
  source 1..80: mol_type = other DNA
tgcttcttttatcggcaaaaacttgaagtccaattgtgtgcgcttcaagaacgcagataaggatgatgcgttttatattg

SEQ ID NO: 7794 - DNA, 80 bp, synthetic construct
  misc_feature 1..80: note = Synthetic: >229E-cand-12720-12799
  source 1..80: mol_type = other DNA
ttaaacgttgcattaagtcagttatggaccacgagcagtccatgtataacttacttaaaggctgtaatgctgttgctaag

SEQ ID NO: 7795 - DNA, 80 bp, synthetic construct
  misc_feature 1..80: note = Synthetic: >AlphaCoV1-cand-17310-17389
  source 1..80: mol_type = other DNA
tgcaacgacatatatgagtttgtctgataattttaagacaagtgatggtttagctgttaacatcggtacaaaggatgtta

SEQ ID NO: 7796 - DNA, 80 bp, synthetic construct
  misc_feature 1..80: note = Synthetic: >AlphaCoV1-cand-17390-17469
  source 1..80: mol_type = other DNA
aatatgctaatgtcatctcatatatgggattcaggtttgaagccaacataccaggctatcacacattgttttgcacacga

SEQ ID NO: 7797 - DNA, 80 bp, synthetic construct
  misc_feature 1..80: note = Synthetic: >AlphaCoV1-cand-17470-17549
  source 1..80: mol_type = other DNA
gactttgctatgcgtaatgttagagcatggcttggttttgatgttgaaggtgcacatgtctgtggtgataatgttggaac

SEQ ID NO: 7798 - DNA, 80 bp, synthetic construct
  misc_feature 1..80: note = Synthetic: >AlphaCoV1-cand-17550-17629
  source 1..80: mol_type = other DNA
taatgtaccattacagctgggtttctcaaatggtgtggattttgtagtacaaactgaaggatgtgttgttactgaaaaag

SEQ ID NO: 7799 - DNA, 80 bp, synthetic construct
  misc_feature 1..80: note = Synthetic: >AlphaCoV1-cand-17630-17709
  source 1..80: mol_type = other DNA
gtaatagcattgaggttgtaaaagcaagagcaccaccgggtgagcaatttgcacacttgataccacttatgagaaagggt

SEQ ID NO: 7800 - DNA, 80 bp, synthetic construct
  misc_feature 1..80: note = Synthetic: >AlphaCoV1-cand-17710-17789
  source 1..80: mol_type = other DNA
caaccttggcacattgttagacgccgtatagtgcagatggtctgtgactattttgatggcttgtcagacattctaatctt

SEQ ID NO: 7801 - DNA, 80 bp, synthetic construct
  misc_feature 1..80: note = Synthetic: >AlphaCoV1-cand-17790-17869
  source 1..80: mol_type = other DNA
tgtgctttgggctggtggtcttgaacttacaactatgagatactttgttaaaattggaaaaccacaaaaatgtgagtgcg

SEQ ID NO: 7802 - DNA, 80 bp, synthetic construct
  misc_feature 1..80: note = Synthetic: >AlphaCoV1-cand-17870-17949
  source 1..80: mol_type = other DNA
gcaaaattgcaacttgttatagtagctctcaatgtgtctatgcttgttttaagcatgcattaggatgtgattatttatac

SEQ ID NO: 7803 - DNA, 80 bp, synthetic construct
  misc_feature 1..80: note = Synthetic: >AlphaCoV1-cand-17950-18029
  source 1..80: mol_type = other DNA
aacccttattgcattgacatacaacaatggggctacacaggatctttgagcatgaatcatcatgaagtttgtaacattca

SEQ ID NO: 7804 - DNA, 80 bp, synthetic construct
  misc_feature 1..80: note = Synthetic: >AlphaCoV1-cand-18030-18109
  source 1..80: mol_type = other DNA
tagaaatgagcatgtagctagtggtgatgctatcatgactagatgtcttgctatacatgattgttttgtcaaacgtgttg

SEQ ID NO: 7805 - DNA, 80 bp, synthetic construct
  misc_feature 1..80: note = Synthetic: >AlphaCoV1-cand-18110-18189
  source 1..80: mol_type = other DNA
attggtcaattgtgtacccttttattgacaatgaagaaaagatcaataaagctggtcgcattgtacaatcacatgtcatg

SEQ ID NO: 7806 - DNA, 80 bp, synthetic construct
  misc_feature 1..80: note = Synthetic: >AlphaCoV1-cand-18190-18269
  source 1..80: mol_type = other DNA
aaagctgctctgaagatttttaaccctgctgcaattcacgatgttggtaatccaaaaggcatccgttgtgctacaacacc

SEQ ID NO: 7807 - DNA, 80 bp, synthetic construct
  misc_feature 1..80: note = Synthetic: >AlphaCoV1-cand-18270-18349
  source 1..80: mol_type = other DNA
aataccatggttttgttatgatcgtgatcctattaataacaatgttagatgtctggagtatgactatatggtacatggtc

SEQ ID NO: 7808 - DNA, 80 bp, synthetic construct
  misc_feature 1..80: note = Synthetic: >AlphaCoV1-cand-18350-18429
  source 1..80: mol_type = other DNA
aaatgaatggtcttatgttattttggaattgtaatgtagacatgtacccagagttctcaattgtttgtagatttgatact

SEQ ID NO: 7809 - DNA, 80 bp, synthetic construct
  misc_feature 1..80: note = Synthetic: >AlphaCoV1-cand-18430-18509
  source 1..80: mol_type = other DNA
cgcactcgctctaaattgtctttagaaggttgtaatggtggtgcattgtatgttaataaccatgctttccacacaccagc

SEQ ID NO: 7810 - DNA, 80 bp, synthetic construct
  misc_feature 1..80: note = Synthetic: >AlphaCoV1-cand-18510-18589
  source 1..80: mol_type = other DNA
ttatgatagaagagcttttgctaagcttaaacctatgccattcttttactatgatgatagtaattgtgaacttgttgatg

SEQ ID NO: 7811 - DNA, 80 bp, synthetic construct
  misc_feature 1..80: note = Synthetic: >AlphaSp-cand-1130-1209
  source 1..80: mol_type = other DNA
ctacaacaacgtctttttaaaacacattatagacctagttgtaccaggcactaacttgggttggggtgtttggcgtatag

SEQ ID NO: 7812 - DNA, 80 bp, synthetic construct
  misc_feature 1..80: note = Synthetic: >AlphaSp-cand-1210-1289
  source 1..80: mol_type = other DNA
ccaaagttcagtcaaaggatgacgttgccacttctggtaatgtccttgttgacgaccctgaagaccgcttggacccatgc

SEQ ID NO: 7813 - DNA, 80 bp, synthetic construct
  misc_feature 1..80: note = Synthetic: >AlphaSp-cand-1450-1529
  source 1..80: mol_type = other DNA
tcaagaaacttgggtctcttgttactgcactgtgggatcagtttgttgcaggtattcaaagtatgaaaatctgcactttg

SEQ ID NO: 7814 - DNA, 80 bp, synthetic construct
  misc_feature 1..80: note = Synthetic: >AlphaSp-cand-1530-1609
  source 1..80: mol_type = other DNA
aagattgttgagcttgctaagtcactatcatgtgccactatgtctgtggtcaagggtgttattacactggtggctgaagt

SEQ ID NO: 7815 - DNA, 80 bp, synthetic construct
  misc_feature 1..80: note = Synthetic: >AlphaSp-cand-1610-1689
  source 1..80: mol_type = other DNA
ccctgagattttcaagggacttttctgtacactgacttctgctttgaaggctttgtgtaccagtagttgtgatgcgctcg

SEQ ID NO: 7816 - DNA, 80 bp, synthetic construct
  misc_feature 1..80: note = Synthetic: >AlphaSp-cand-1690-1769
  source 1..80: mol_type = other DNA
ttgtcgcaggtaagtcttttgccaagattggagactatgttctcctgccttcagcacttgtccgtttggttaggtctaag

SEQ ID NO: 7817 - DNA, 80 bp, synthetic construct
  misc_feature 1..80: note = Synthetic: >AlphaSp-cand-1770-1849
  source 1..80: mol_type = other DNA
gttaaggggaaaactcaatctggcattaagcagctccaatttgctacagttgtgctgggagatactcagaaggtggaatc

SEQ ID NO: 7818 - DNA, 80 bp, synthetic construct
  misc_feature 1..80: note = Synthetic: >AlphaSp-cand-1850-1929
  source 1..80: mol_type = other DNA
tgatagagttgaattctctagtgttaaccttaaaatggttgacgaggactttccactgaaccccgtgggacatactgtgg

SEQ ID NO: 7819 - DNA, 80 bp, synthetic construct
  misc_feature 1..80: note = Synthetic: >AlphaSp-cand-2010-2089
  source 1..80: mol_type = other DNA
atttttaaacctgaacttgaattagagccaatctttgagtgtgatgccattccaggttttccaaaagttgcagcctccaa

SEQ ID NO: 7820 - DNA, 80 bp, synthetic construct
  misc_feature 1..80: note = Synthetic: >AlphaSp-cand-2090-2169
  source 1..80: mol_type = other DNA
tgttgcagagctgtgtgttaaggttgacaatgtgctctttaattatgacaagccttataaaaagtatagtaccattatta

SEQ ID NO: 7821 - DNA, 80 bp, synthetic construct
  misc_feature 1..80: note = Synthetic: >AlphaSp-cand-2250-2329
  source 1..80: mol_type = other DNA
ctttgtgagaagtattgcaaactcccagattttgatgctttttataatgctgtgcatgctgcaactgatatggatcagtt

SEQ ID NO: 7822 - DNA, 80 bp, synthetic construct
  misc_feature 1..80: note = Synthetic: >AlphaSp-cand-2330-2409
  source 1..80: mol_type = other DNA
ttgtgcattgtgtacttctggttttgaggtttttacaccacgtgttccagaatgcccaccaattttgaacgacatagatg

SEQ ID NO: 7823 - DNA, 80 bp, synthetic construct
  misc_feature 1..80: note = Synthetic: >Anlong-cand-900-979
  source 1..80: mol_type = other DNA
caagaagagtgtagtgccttccgacagctataaaaaactctacgaggcatgtggggttccagcagtccaaaatggcaata

SEQ ID NO: 7824 - DNA, 80 bp, synthetic construct
  misc_feature 1..80: note = Synthetic: >Anlong-cand-980-1059
  source 1..80: mol_type = other DNA
agcttgtcgacattctgacaaaaccagcatttttacatgccatagtggagtgcaactgcggacgcagctcatacactgtc

SEQ ID NO: 7825 - DNA, 80 bp, synthetic construct
  misc_feature 1..80: note = Synthetic: >Anlong-cand-1060-1139
  source 1..80: mol_type = other DNA
ggtgactggaaaattggattccgctctctgtgctgtggtaagcgacgtgaacccataactatagttgctggagatgtcaa

SEQ ID NO: 7826 - DNA, 80 bp, synthetic construct
  misc_feature 1..80: note = Synthetic: >Anlong-cand-1140-1219
  source 1..80: mol_type = other DNA
gccaggtgacatcgttgtcactagcactaatgctggtaatggcgtccgttattttaatgggctaacagtcagctatgttg

SEQ ID NO: 7827 - DNA, 80 bp, synthetic construct
  misc_feature 1..80: note = Synthetic: >Anlong-cand-1220-1299
  source 1..80: mol_type = other DNA
gagactttgatggtgttagctgctggcgtgttgttggtgtgcaagcctttaatggttttgtcgcatcatcaacatttagt

SEQ ID NO: 7828 - DNA, 80 bp, synthetic construct
  misc_feature 1..80: note = Synthetic: >Anlong-cand-1300-1379
  source 1..80: mol_type = other DNA
gagcagcttcacaactatagtctagatgcctgctcttacactgcaaatacacggcttttcaaattgttgaaacttgctgt

SEQ ID NO: 7829 - DNA, 80 bp, synthetic construct
  misc_feature 1..80: note = Synthetic: >Anlong-cand-1380-1459
  source 1..80: mol_type = other DNA
cctcagtggtaacactaatgatgaggttacaagtgccgtagttgcaggtgttgttgacattagcagcaatgtctacaatt

SEQ ID NO: 7830 - DNA, 80 bp, synthetic construct
  misc_feature 1..80: note = Synthetic: >Anlong-cand-1460-1539
  source 1..80: mol_type = other DNA
ttgtggatgctgttcttgaacagaaaccatggtttgttcgaaagttggacaagctttgtgagactgcatggagtttgctc

SEQ ID NO: 7831 - DNA, 80 bp, synthetic construct
  misc_feature 1..80: note = Synthetic: >Anlong-cand-1540-1619
  source 1..80: mol_type = other DNA
tgtgatgctcttaagagtttgtctattcgggcatcagaccttttggattttgtcaagactatgtcagtagctgttgttac

SEQ ID NO: 7832 - DNA, 80 bp, synthetic construct
  misc_feature 1..80: note = Synthetic: >Anlong-cand-1620-1699
  source 1..80: mol_type = other DNA
agttgttgaaggcaagctgacacttattgcagacgtgccacaagctttttagaacgtttatgaaacatttaagcttgcac

SEQ ID NO: 7833 - DNA, 80 bp, synthetic construct
  misc_feature 1..80: note = Synthetic: >Anlong-cand-1700-1779
  source 1..80: mol_type = other DNA
ttgagggaatctttgatgcgtgtgctaacactattacaattgctggtaaggcttttaggtctgcatttgactacttactg

SEQ ID NO: 7834 - DNA, 80 bp, synthetic construct
  misc_feature 1..80: note = Synthetic: >Anlong-cand-1780-1859
  source 1..80: mol_type = other DNA
tttgacaattgtattgttaagctgtcaactgtaaaggctgttggtcttaagcaagcgggtgttaagaacattacctatgc

SEQ ID NO: 7835 - DNA, 80 bp, synthetic construct
  misc_feature 1..80: note = Synthetic: >Anlong-cand-1860-1939
  source 1..80: mol_type = other DNA
aagtgtagtgttaggtcctacacagtctgttaagacggaacgtatagaggtctctagtgtaaaacttacgcctgtgctgg

SEQ ID NO: 7836 - DNA, 80 bp, synthetic construct
  misc_feature 1..80: note = Synthetic: >Anlong-cand-1940-2019
  source 1..80: mol_type = other DNA
aaaaagtgccattgaagagagaaggcgttgctgttctcattgatggtgtcgctttcttttgtagtgatggttattacagg

SEQ ID NO: 7837 - DNA, 80 bp, synthetic construct
  misc_feature 1..80: note = Synthetic: >Anlong-cand-2020-2099
  source 1..80: mol_type = other DNA
cttatgtctgacaatgattgcgtgcttgaagaaccagtttttaaaactgcccctgtgactgatgttaaacctgctgttga

SEQ ID NO: 7838 - DNA, 80 bp, synthetic construct
  misc_feature 1..80: note = Synthetic: >Anlong-cand-2100-2179
  source 1..80: mol_type = other DNA
gtgtccttcattgtttgtgagcgttgatggtggtgcaatatggcgtacagttattgccaccattgatagtgttgcagact

SEQ ID NO: 7839 - DNA, 80 bp, synthetic construct
  misc_feature 1..80: note = Synthetic: >AvianCoV-cand-9960-10039
  source 1..80: mol_type = other DNA
gtgaaacatgttatggcatatatggatactttcctattgccaacattgattacagttattattggagtttgtgctgaagt

SEQ ID NO: 7840 - DNA, 80 bp, synthetic construct
  misc_feature 1..80: note = Synthetic: >AvianCoV-cand-10040-10119
  source 1..80: mol_type = other DNA
acctttcatctacaatactctaattagtcaaattgttattttctttagccaatggtatgatccagtagtctttgatacta

SEQ ID NO: 7841 - DNA, 80 bp, synthetic construct
  misc_feature 1..80: note = Synthetic: >AvianCoV-cand-10120-10199
  source 1..80: mol_type = other DNA
tagtaccatggatgtttttaccattagtcttgtacacagcttttaagtgtgtacaaggttgttatagtgtaaattctttc

SEQ ID NO: 7842 - DNA, 80 bp, synthetic construct
  misc_feature 1..80: note = Synthetic: >AvianCoV-cand-10200-10279
  source 1..80: mol_type = other DNA
aatacttctctgttagtgttgtatcagtttatgaagttgggttttgttatatatacctcttctaatactcttacagcata

SEQ ID NO: 7843 - DNA, 80 bp, synthetic construct
  misc_feature 1..80: note = Synthetic: >AvianCoV-cand-10280-10359
  source 1..80: mol_type = other DNA
ctcagaaggtaattgggagttattctttgagttagtgcacactactgtgttggctaatgttagtagtaattctttaattg

SEQ ID NO: 7844 - DNA, 80 bp, synthetic construct
  misc_feature 1..80: note = Synthetic: >AvianCoV-cand-10360-10439
  source 1..80: mol_type = other DNA
gtttaattgtgtttaagtttgctaagtggatgctgtattattgtaatgccacataccttaataattatgtgctaatggct

SEQ ID NO: 7845 - DNA, 80 bp, synthetic construct
  misc_feature 1..80: note = Synthetic: >AvianCoV-cand-10440-10519
  source 1..80: mol_type = other DNA
gtcattgttaatggcataggttggctgtttacttgttactttggattttattggtggattaataaggtttttggtttaac

SEQ ID NO: 7846 - DNA, 80 bp, synthetic construct
  misc_feature 1..80: note = Synthetic: >AvianCoV-cand-10520-10599
  source 1..80: mol_type = other DNA
cttaggtaaatataatttcaaagtttcagtagatcaatataggtatatgtgtcttcataagataaacccacctaaaactg

SEQ ID NO: 7847 - DNA, 80 bp, synthetic construct
  misc_feature 1..80: note = Synthetic: >AvianCoV-cand-10600-10679
  source 1..80: mol_type = other DNA
tgtgggaagtcttttctacaaatatacttatacaaggaataggtggtgaccgtgtgttgcctatagctacagtgcaatct

SEQ ID NO: 7848 - DNA, 80 bp, synthetic construct
  misc_feature 1..80: note = Synthetic: >AvianCoV-cand-10680-10759
  source 1..80: mol_type = other DNA
aaattgagtgatgtaaagtgtacaactgttgttttaatgcagcttttgactaagcttaatgttgaagcaaattcaaaaat

SEQ ID NO: 7849 - DNA, 80 bp, synthetic construct
  misc_feature 1..80: note = Synthetic: >AvianCoV-cand-10760-10839
  source 1..80: mol_type = other DNA
gcatgcttatcttgttgagttacacaataaaattcttgcctctgatgatgttaatgagtgcatggataatttgttgggta

SEQ ID NO: 7850 - DNA, 80 bp, synthetic construct
  misc_feature 1..80: note = Synthetic: >AvianCoV-cand-10840-10919
  source 1..80: mol_type = other DNA
tgcttgtaacactattttgtgtagatagtactattgatttaagtgagtattgtgatgatatacttaagaggtcaactgtt

SEQ ID NO: 7851 - DNA, 80 bp, synthetic construct
  misc_feature 1..80: note = Synthetic: >AvianCoV-cand-10920-10999
  source 1..80: mol_type = other DNA
ttacagtcagttactcaagagttttcacacataccctcttatgctgagtatgaaagagctaaagatctttatgaaaaggt

SEQ ID NO: 7852 - DNA, 80 bp, synthetic construct
  misc_feature 1..80: note = Synthetic: >AvianCoV-cand-11000-11079
  source 1..80: mol_type = other DNA
tttagctgattctaaaaatggtggtgttacacagcaagagcttgctgcatatcgtaaagctgccaatattgcaaagtcag

SEQ ID NO: 7853 - DNA, 80 bp, synthetic construct
  misc_feature 1..80: note = Synthetic: >AvianCoV-cand-11080-11159
  source 1..80: mol_type = other DNA
tttttgatagagacttggctgttcagaagaagttagatagcatggcagaacgtgctatgacaacaatgtataaagaagcg

SEQ ID NO: 7854 - DNA, 80 bp, synthetic construct
  misc_feature 1..80: note = Synthetic: >AvianCoV-cand-11160-11239
  source 1..80: mol_type = other DNA
cgtgttactgatagaagagcaaaatttgtttcatcattacatgcgctactattttcaatgcttaagaagatagattctga

SEQ ID NO: 7855 - DNA, 80 bp, synthetic construct
  misc_feature 1..80: note = Synthetic: >BetaCoV1-cand-8940-9019
  source 1..80: mol_type = other DNA
atgagctaccagcttatgccagttttaaggttatagataatggagttgtgcgtgatgttgatgttaaagatgtatgtttt

SEQ ID NO: 7856 - DNA, 80 bp, synthetic construct
  misc_feature 1..80: note = Synthetic: >BetaCoV1-cand-9180-9259
  source 1..80: mol_type = other DNA
atgtgttgcattttataacatatgcattctcagctgatggtgtgcaatgttatactccgcatgaacagatttcttattca

SEQ ID NO: 7857 - DNA, 80 bp, synthetic construct
  misc_feature 1..80: note = Synthetic: >BetaCoV1-cand-9580-9659
  source 1..80: mol_type = other DNA
gaaaatgccaggcactttttgtggtagggattttatggatatttttaatcaatttgtagtaggattagcccaaccaatag

SEQ ID NO: 7858 - DNA, 80 bp, synthetic construct
  misc_feature 1..80: note = Synthetic: >BetaCoV1-cand-9820-9899
  source 1..80: mol_type = other DNA
ttttgttttccaggtttatcccacttttgctgttatatatgctttgtgttatttttatgtgacattgtatttcccctcgg

SEQ ID NO: 7859 - DNA, 80 bp, synthetic construct
  misc_feature 1..80: note = Synthetic: >BetaCoV1-cand-9900-9979
  source 1..80: mol_type = other DNA
agattagtgtcataatgcatctacagtggcttgtgatgtatggtacaattatgccaatatggttttgtatactctacgtt

SEQ ID NO: 7860 - DNA, 80 bp, synthetic construct
  misc_feature 1..80: note = Synthetic: >BetaCoV1-cand-9980-10059
  source 1..80: mol_type = other DNA
gcagctgttgtttcaaatcatgctttctgggtatttagttactttaggaagttgcatactggtatacgtagtgatggtac

SEQ ID NO: 7861 - DNA, 80 bp, synthetic construct
  misc_feature 1..80: note = Synthetic: >BetaCoV1-cand-10060-10139
  source 1..80: mol_type = other DNA
ctttgaagaaatgtccctcactacttttatgattaataaggatacttattgtaagttgaagaactctctgtcggaggttg

SEQ ID NO: 7862 - DNA, 80 bp, synthetic construct
  misc_feature 1..80: note = Synthetic: >BetaCoV1-cand-10140-10219
  source 1..80: mol_type = other DNA
catttaataaatatttgagtttgtataataagtataggtattacagtggtaaaatggataccgctgcgtaccgtgaagct

SEQ ID NO: 7863 - DNA, 80 bp, synthetic construct
  misc_feature 1..80: note = Synthetic: >BetaCoV1-cand-14140-14219
  source 1..80: mol_type = other DNA
tgctgagtgtgaacagtcctattttactaaaaaggactggtatgattttgttgaaaatcctgatattattaatgtgtata

SEQ ID NO: 7864 - DNA, 80 bp, synthetic construct
  misc_feature 1..80: note = Synthetic: >BetaCoV1-cand-14220-14299
  source 1..80: mol_type = other DNA
aaaagcttggtcccatttttaatagggctttgcttaacactgctaagtttgctgatgctatggtagaagcaggcttggta

SEQ ID NO: 7865 - DNA, 80 bp, synthetic construct
  misc_feature 1..80: note = Synthetic: >BetaCoV1-cand-14300-14379
  source 1..80: mol_type = other DNA
ggtgttttaacacttgataatcaagatttgaatggtatatggtatgattttggtgattttgttcttgcagcccccggttg

SEQ ID NO: 7866 - DNA, 80 bp, synthetic construct
  misc_feature 1..80: note = Synthetic: >BetaCoV1-cand-14380-14459
  source 1..80: mol_type = other DNA
tggtgttgcaatagcagattcttattattcttatatgatgccaatgttgacaatgtgtcatgcattggacagtgaattgt

SEQ ID NO: 7867 - DNA, 80 bp, synthetic construct
  misc_feature 1..80: note = Synthetic: >BetaCoV1-cand-14460-14539
  source 1..80: mol_type = other DNA
atgttaatggagcttatagacaatttgatcttgtacagtatgattttactgattacaagctagagttgtttaataagtac

SEQ ID NO: 7868 - DNA, 80 bp, synthetic construct
  misc_feature 1..80: note = Synthetic: >BetaCoV1-cand-14540-14619
  source 1..80: mol_type = other DNA
tttaagtattggactatgccttaccatccaaacacatgtgattgcgaggatgataggtgcataatacattgtgccaattt

SEQ ID NO: 7869 - DNA, 80 bp, synthetic construct
  misc_feature 1..80: note = Synthetic: >BetaCoV1-cand-14620-14699
  source 1..80: mol_type = other DNA
taatatactctttagtatggtattgcctaatacctgttttgggcctcttgttaggcaaatctttgtagatggtgtgcctt

SEQ ID NO: 7870 - DNA, 80 bp, synthetic construct
  misc_feature 1..80: note = Synthetic: >BetaCoV1-cand-14700-14779
  source 1..80: mol_type = other DNA
ttgtcgtttcaataggctaccattataaggaattaggtgttgttatgaatatggatgtggatacccataggtacagattg

SEQ ID NO: 7871 - DNA, 80 bp, synthetic construct
  misc_feature 1..80: note = Synthetic: >BetaCoV1-cand-14780-14859
  source 1..80: mol_type = other DNA
tccctaaaggatctacttttatatgctgctgatccagctttacatgtggcatcagcaaatgcattgtatgatttacgcac

SEQ ID NO: 7872 - DNA, 80 bp, synthetic construct
  misc_feature 1..80: note = Synthetic: >BetaCoV1-cand-14860-14939
  source 1..80: mol_type = other DNA
atgttgctttagcgttgcagctatagcgagtggcgtgaaatttcaaaccgttaaacccggtaattttaatcaggattttt

SEQ ID NO: 7873 - DNA, 80 bp, synthetic construct
  misc_feature 1..80: note = Synthetic: >BetaCoV1-cand-14940-15019
  source 1..80: mol_type = other DNA
atgattttatattaagtaaaggcttgcttaaggaaggtagttctgttgatttgaagcacttcttctttacgcaagatggt

SEQ ID NO: 7874 - DNA, 80 bp, synthetic construct
  misc_feature 1..80: note = Synthetic: >BetaCoV1-cand-14990-15069
  source 1..80: mol_type = other DNA
ttgaagcacttcttctttacgcaagatggtaatgctgctatcactgattataattattataaatataatttacccaccat

SEQ ID NO: 7875 - DNA, 80 bp, synthetic construct
  misc_feature 1..80: note = Synthetic: >BetaCoV1-cand-15150-15229
  source 1..80: mol_type = other DNA
catcacaggttattgttaataattatgataagagtgctggctatccattcaataagtttggtaaggcccgcctctactac

SEQ ID NO: 7876 - DNA, 80 bp, synthetic construct
  misc_feature 1..80: note = Synthetic: >BetaCoV1-cand-15230-15309
  source 1..80: mol_type = other DNA
gaagcactttcatttgaagagcaggatgacgtttacgcatataccaagcgaaacgtccttccaactcttacacaaatgaa

SEQ ID NO: 7877 - DNA, 80 bp, synthetic construct
  misc_feature 1..80: note = Synthetic: >CanadaGoose-cand-5510-5589
  source 1..80: mol_type = other DNA
tcttaatgtgttgtatgattctatgggtacttctctttgtgaagcttatagtaattatactcatatatcttttaatgcca

SEQ ID NO: 7878 - DNA, 80 bp, synthetic construct
  misc_feature 1..80: note = Synthetic: >CanadaGoose-cand-5590-5669
  source 1..80: mol_type = other DNA
tgagttattgtaaaggtagtttacgttgccttacgtgtcttcgtggcttagattctttgcacttatataaacatgcttac

SEQ ID NO: 7879 - DNA, 80 bp, synthetic construct
  misc_feature 1..80: note = Synthetic: >CanadaGoose-cand-5670-5749
  source 1..80: mol_type = other DNA
agtgttgagcaagtttataaatctgcttttgtttgggattatacactttttgtgtatttatttgtagtcttgctgctttc

SEQ ID NO: 7880 - DNA, 80 bp, synthetic construct
  misc_feature 1..80: note = Synthetic: >CanadaGoose-cand-5750-5829
  source 1..80: mol_type = other DNA
taggggttgttttttggcctctatggctttttacactcttaaggttgcagttgtttattttggattttttaaaacaggtg

SEQ ID NO: 7881 - DNA, 80 bp, synthetic construct
  misc_feature 1..80: note = Synthetic: >CanadaGoose-cand-5830-5909
  source 1..80: mol_type = other DNA
tgacttttcttgattggactgtttatactgttttaagtaactttaattttgttggctttgccctctatgtttgggttatg

SEQ ID NO: 7882 - DNA, 80 bp, synthetic construct
  misc_feature 1..80: note = Synthetic: >CanadaGoose-cand-5910-5989
  source 1..80: mol_type = other DNA
tggcgtatttttagaattgtgcgtcatgttttttattgtaaggatgttaattgtgtctattgtggtaagttggcaaagaa

SEQ ID NO: 7883 - DNA, 80 bp, synthetic construct
  misc_feature 1..80: note = Synthetic: >CanadaGoose-cand-5990-6069
  source 1..80: mol_type = other DNA
tgcacgttatgaggtgactttggttgttgctggtaagaagcattctgtctatgtttatactaatgctggttacttctatt

SEQ ID NO: 7884 - DNA, 80 bp, synthetic construct
  misc_feature 1..80: note = Synthetic: >CanadaGoose-cand-6070-6149
  source 1..80: mol_type = other DNA
gtaagcagcataattggtattgtagaaattgtaataaatttggccaccagaatacttttatttctcctgaagttgctggt

SEQ ID NO: 7885 - DNA, 80 bp, synthetic construct
  misc_feature 1..80: note = Synthetic: >CanadaGoose-cand-6150-6229
  source 1..80: mol_type = other DNA
gatctttcagataaacttaagcgtcgtataatgccaactagtgttgcctatgctcaggttaatgctgttgatgttaacaa

SEQ ID NO: 7886 - DNA, 80 bp, synthetic construct
  misc_feature 1..80: note = Synthetic: >CanadaGoose-cand-6230-6309
  source 1..80: mol_type = other DNA
tgattatgttactcttaaatatatgcttaatggcgccgaggcttttaaaggttataccatggcagaatttttgaaagctg

SEQ ID NO: 7887 - DNA, 80 bp, synthetic construct
  misc_feature 1..80: note = Synthetic: >CanadaGoose-cand-6310-6389
  source 1..80: mol_type = other DNA
ctactcctgttaaagaagccattaagtgtgagaattttggcgatgctgattttatagtctgtgatactactagtagcgca

SEQ ID NO: 7888 - DNA, 80 bp, synthetic construct
  misc_feature 1..80: note = Synthetic: >CanadaGoose-cand-6390-6469
  source 1..80: mol_type = other DNA
ttgttagagtctgccaaaaatgctgctattttttatgctcaattgttgtgtaaacctattcttatagttgaccagcaatt

SEQ ID NO: 7889 - DNA, 80 bp, synthetic construct
  misc_feature 1..80: note = Synthetic: >CanadaGoose-cand-6470-6549
  source 1..80: mol_type = other DNA
gtatgattcagttatagtgcagcctgttagtgctaatactatagaagatattttggttattcttggtaatattgttagta

SEQ ID NO: 7890 - DNA, 80 bp, synthetic construct
  misc_feature 1..80: note = Synthetic: >CanadaGoose-cand-6550-6629
  source 1..80: mol_type = other DNA
ttactagagaaaatttaaatcttaaggctggttctatcaaagaggtgttactcactgtcactgacgatgttggtgctgtt

SEQ ID NO: 7891 - DNA, 80 bp, synthetic construct
  misc_feature 1..80: note = Synthetic: >CanadaGoose-cand-6630-6709
  source 1..80: mol_type = other DNA
gattgtgcacttttttgtcataattataatttgtcttttactaatgatggttacactaatgttgtgccatcatatggttt

SEQ ID NO: 7892 - DNA, 80 bp, synthetic construct
  misc_feature 1..80: note = Synthetic: >CanadaGoose-cand-6710-6789
  source 1..80: mol_type = other DNA
tgacacctctaagctctctgctagggatagaggttttatgattaatgccggtgcttctattgctaatttgaagatacgca

SEQ ID NO: 7893 - DNA, 80 bp, synthetic construct
  misc_feature 1..80: note = Synthetic: >CanadaGoose-cand-11930-12009
  source 1..80: mol_type = other DNA
tagtagagaacctcctacatcgaggtttgtagatggtcctactaaagctgataataattatttaaacgggtacggggtag

SEQ ID NO: 7894 - DNA, 80 bp, synthetic construct
  misc_feature 1..80: note = Synthetic: >CanadaGoose-cand-12010-12089
  source 1..80: mol_type = other DNA
cagtgaggctcggctgatacccctaacagatggtgttcaacccgatgttgtaaagagagcctttgacatctgtaataaag

SEQ ID NO: 7895 - DNA, 80 bp, synthetic construct
  misc_feature 1..80: note = Synthetic: >CanadaGoose-cand-12090-12169
  source 1..80: mol_type = other DNA
atgcagctggtatgttccagaatcttaagcacaattgcgctagattccaggaattaggtcctgaggattataagaagggt

SEQ ID NO: 7896 - DNA, 80 bp, synthetic construct
  misc_feature 1..80: note = Synthetic: >CanadaGoose-cand-12170-12249
  source 1..80: mol_type = other DNA
tttccctatcttaattccttttttgttgttaaacagacaacgcctgctaattaccagcatgagttgagtgtttaccagga

SEQ ID NO: 7897 - DNA, 80 bp, synthetic construct
  misc_feature 1..80: note = Synthetic: >CanadaGoose-cand-12250-12329
  source 1..80: mol_type = other DNA
tttgaaatctgaggttgtggctgtccatgacttctttatctttgataagtccacgtataatatagttaggcaacgcctta

SEQ ID NO: 7898 - DNA, 80 bp, synthetic construct
  misc_feature 1..80: note = Synthetic: >CanadaGoose-cand-12330-12409
  source 1..80: mol_type = other DNA
ctaaatattctatgatggacttttgttatgcacttagacactttgatcctaaagactgtgaagttcttaaagagatctta

SEQ ID NO: 7899 - DNA, 80 bp, synthetic construct
  misc_feature 1..80: note = Synthetic: >CanadaGoose-cand-12410-12489
  source 1..80: mol_type = other DNA
gttgattttgagtgtattcctggttattattctcatatgtttggcccggacctttctccaggttcatggtttgatcataa

SEQ ID NO: 7900 - DNA, 80 bp, synthetic construct
  misc_feature 1..80: note = Synthetic: >CanadaGoose-cand-12490-12569
  source 1..80: mol_type = other DNA
tcctttgtggtatgaccctatagaaaatcctagttaccatgatattatggctaacttgggttgtgttgttaatagagcag

SEQ ID NO: 7901 - DNA, 80 bp, synthetic construct
  misc_feature 1..80: note = Synthetic: >CanadaGoose-cand-12570-12649
  source 1..80: mol_type = other DNA
ttcttaattgtgttaagttctgcgatcttatggttgacaagggttatattggtgtcataacgcttgacaatcaagatatg

SEQ ID NO: 7902 - DNA, 80 bp, synthetic construct
  misc_feature 1..80: note = Synthetic: >CanadaGoose-cand-12650-12729
  source 1..80: mol_type = other DNA
aatggcaagttttatgactttggtgattttcaaaagactatgcctggtagtggtgtaccagttgttgatagttattattc

SEQ ID NO: 7903 - DNA, 80 bp, synthetic construct
  misc_feature 1..80: note = Synthetic: >CanadaGoose-cand-12730-12809
  source 1..80: mol_type = other DNA
atatttgatgcctctccttactatgactgatgctctagcatgtgagaggtattataattttgataaaataaaggggttta

SEQ ID NO: 7904 - DNA, 80 bp, synthetic construct
  misc_feature 1..80: note = Synthetic: >CanadaGoose-cand-12810-12889
  source 1..80: mol_type = other DNA
agacttatgacctctttaagtatgattatactgaagagaagcgtcagcttttcaataagtattttaagtattgggatcaa

SEQ ID NO: 7905 - DNA, 80 bp, synthetic construct
  misc_feature 1..80: note = Synthetic: >CanadaGoose-cand-12890-12969
  source 1..80: mol_type = other DNA
gaatatcaccccaattgttgcgattgtgttgacgataggtgtgttattcattgtgccaattttaatgtacttttttccac

SEQ ID NO: 7906 - DNA, 80 bp, synthetic construct
  misc_feature 1..80: note = Synthetic: >CanadaGoose-cand-12970-13049
  source 1..80: mol_type = other DNA
attaataccacaaactagttttggtaatttgtgtagaaaagtctatgttgatggtgtcccgtttattgcaactactggat

SEQ ID NO: 7907 - DNA, 80 bp, synthetic construct
  misc_feature 1..80: note = Synthetic: >CanadaGoose-cand-13050-13129
  source 1..80: mol_type = other DNA
accattctaaagaattgggtgtcattatgaaccaagataatactttatctttttctaaaatgtcactcactcaacttatg

SEQ ID NO: 7908 - DNA, 80 bp, synthetic construct
  misc_feature 1..80: note = Synthetic: >CanadaGoose-cand-13130-13209
  source 1..80: mol_type = other DNA
aaatttgtaggagatcctgctcttttagtgggcacctccaacaatttagttgatttgcgcacttcttgtttttcgttgtg

SEQ ID NO: 7909 - DNA, 80 bp, synthetic construct
  misc_feature 1..80: note = Synthetic: >CanadaGoose-cand-14500-14579
  source 1..80: mol_type = other DNA
ataccctgatccttctcgtattttaggtgcttgtgtctttgttgatgatattgaaaagactgagcctgttgctgttatgg

SEQ ID NO: 7910 - DNA, 80 bp, synthetic construct
  misc_feature 1..80: note = Synthetic: >CanadaGoose-cand-14580-14659
  source 1..80: mol_type = other DNA
agcgttatgttgcccttgcaattgatgcctatcctttggttttccatgagaatgaagagtataggcgtgtcttttatgtc

SEQ ID NO: 7911 - DNA, 80 bp, synthetic construct
  misc_feature 1..80: note = Synthetic: >CanadaGoose-cand-14660-14739
  source 1..80: mol_type = other DNA
ttgttagcatatattagaaaactctatcaggagctttctaaaaatatgctgactgactattcttttgttttggatattga

SEQ ID NO: 7912 - DNA, 80 bp, synthetic construct
  misc_feature 1..80: note = Synthetic: >CanadaGoose-cand-14740-14819
  source 1..80: mol_type = other DNA
taagggtagtaaattctgggaagaggaattctactctaatatgtatcgtacacccactactcttcagagttgtggtgttt

SEQ ID NO: 7913 - DNA, 80 bp, synthetic construct
  misc_feature 1..80: note = Synthetic: >CanadaGoose-cand-14820-14899
  source 1..80: mol_type = other DNA
gtgtcgtttgccaatctcagactatattgagatgtggcaattgtgttagaaaaccatttttgtgttgtaaatgttgttat

SEQ ID NO: 7914 - DNA, 80 bp, synthetic construct
  misc_feature 1..80: note = Synthetic: >CanadaGoose-cand-14900-14979
  source 1..80: mol_type = other DNA
gaccatgtcatgaacaccacgcacaaaaatgtcttatctattaatccctacatttgtagtagtccgggttgtggtgaggc

SEQ ID NO: 7915 - DNA, 80 bp, synthetic construct
  misc_feature 1..80: note = Synthetic: >CanadaGoose-cand-14980-15059
  source 1..80: mol_type = other DNA
agatgttaccaagttgtatcttggtggtatgtcttatttttgtgcactccataaaccaaagcttgccattcctcttgtta

SEQ ID NO: 7916 - DNA, 80 bp, synthetic construct
  misc_feature 1..80: note = Synthetic: >CanadaGoose-cand-15060-15139
  source 1..80: mol_type = other DNA
gtaatggcactgtttttggtatttatagggctaattgtgtgggtagtgacaacgttgatgattttaatacgttagccact

SEQ ID NO: 7917 - DNA, 80 bp, synthetic construct
  misc_feature 1..80: note = Synthetic: >CanadaGoose-cand-15140-15219
  source 1..80: mol_type = other DNA
actaattggactactgttgagccatatattttggctaacaattgtagtgatactcttagacgctttgcggctgagactgt

SEQ ID NO: 7918 - DNA, 80 bp, synthetic construct
  misc_feature 1..80: note = Synthetic: >CanadaGoose-cand-15220-15299
  source 1..80: mol_type = other DNA
taaagctactgaagaacttcacaagcaacagtatgcaagtgctgaagttcgtgaagttatttcagagcgtgaattagttc

SEQ ID NO: 7919 - DNA, 80 bp, synthetic construct
  misc_feature 1..80: note = Synthetic: >CanadaGoose-cand-15300-15379
  source 1..80: mol_type = other DNA
ttacatgggaacctggtaaagctagacctcctcttaacaggaactatgtctttacaggctttcattttacaaaaaatagt

SEQ ID NO: 7920 - DNA, 80 bp, synthetic construct
  misc_feature 1..80: note = Synthetic: >CanadaGoose-cand-15380-15459
  source 1..80: mol_type = other DNA
aaagtccagttgggtgattttacttttgaaaagggtgagggcagggatgtagtctattataaagctacatctactgcaaa

SEQ ID NO: 7921 - DNA, 80 bp, synthetic construct
  misc_feature 1..80: note = Synthetic: >CanadaGoose-cand-15460-15539
  source 1..80: mol_type = other DNA
attaacacctggtgatttgtttgtcttaacttcacacaatgttgtgtcgttaacggcacctacattatgtcctcagcaaa

SEQ ID NO: 7922 - DNA, 80 bp, synthetic construct
  misc_feature 1..80: note = Synthetic: >CanadaGoose-cand-15540-15619
  source 1..80: mol_type = other DNA
cttttgctaggtttataaatttacatccaaatgtaatggtccctgattgttttgttaacaacataccattgtatcatttg

SEQ ID NO: 7923 - DNA, 80 bp, synthetic construct
  misc_feature 1..80: note = Synthetic: >CanadaGoose-cand-15620-15699
  source 1..80: mol_type = other DNA
gttggtaagcagaaacgtaccactgtgcagggacctcccggtagtggtaaatctcattttgctataggccttgctgccta

SEQ ID NO: 7924 - DNA, 80 bp, synthetic construct
  misc_feature 1..80: note = Synthetic: >CanadaGoose-cand-15700-15779
  source 1..80: mol_type = other DNA
tttctcaaatgctagagtggtgtacacagcttgctctcatgcagctgtggatgcactatgtgaaaaagcatttaaattct

SEQ ID NO: 7925 - DNA, 80 bp, synthetic construct
  misc_feature 1..80: note = Synthetic: >CanadaGoose-cand-17050-17129
  source 1..80: mol_type = other DNA
gcgtagtctttttaaacttgctaagccgtggtctgttttaagaccacgtattatccaaatgcttgcagacaacctctctg

SEQ ID NO: 7926 - DNA, 80 bp, synthetic construct
  misc_feature 1..80: note = Synthetic: >CanadaGoose-cand-17130-17209
  source 1..80: mol_type = other DNA
gagtttcagagtgtgttgtctttgttacctggtgtcatggtttggagttaaccaccatgcgctatttttgtaaaattggt

SEQ ID NO: 7927 - DNA, 80 bp, synthetic construct
  misc_feature 1..80: note = Synthetic: >CanadaGoose-cand-17210-17289
  source 1..80: mol_type = other DNA
cctgaaaagagatgtcattgtggccaacgagctacatgtatgtcatcttctcaggactcatattcttgttggaaacacag

SEQ ID NO: 7928 - DNA, 80 bp, synthetic construct
  misc_feature 1..80: note = Synthetic: >CanadaGoose-cand-17290-17369
  source 1..80: mol_type = other DNA
cttaggctgtgattttgtttataatccctatattgttgatattcagcagtggggttattctggaaatttacaatccaatc

SEQ ID NO: 7929 - DNA, 80 bp, synthetic construct
  misc_feature 1..80: note = Synthetic: >CanadaGoose-cand-17370-17449
  source 1..80: mol_type = other DNA
atgatttgtattgtaatgtccatggtcatgctcatgtagcgtcagctgatgccactatgacgcgatgtttggccatttat

SEQ ID NO: 7930 - DNA, 80 bp, synthetic construct
  misc_feature 1..80: note = Synthetic: >CanadaGoose-cand-17450-17529
  source 1..80: mol_type = other DNA
aatgcattttgtcaggatgtcaactgggagattacttaccctcatattgttaatgaggatgaaataaattctagttgccg

SEQ ID NO: 7931 - DNA, 80 bp, synthetic construct
  misc_feature 1..80: note = Synthetic: >CanadaGoose-cand-17530-17609
  source 1..80: mol_type = other DNA
cttgttacagcgttattttcttaacgcttgtattgatgccctgaaacccagtactatttatgatattggtaatccaaagg

SEQ ID NO: 7932 - DNA, 80 bp, synthetic construct
  misc_feature 1..80: note = Synthetic: >CanadaGoose-cand-17610-17689
  source 1..80: mol_type = other DNA
gcattaagtgtgtgagacgctctgacgttaactttaggttctttgataagcaacctatagtgcataatgtcaagcagctt

SEQ ID NO: 7933 - DNA, 80 bp, synthetic construct
  misc_feature 1..80: note = Synthetic: >CanadaGoose-cand-17690-17769
  source 1..80: mol_type = other DNA
acttatgactttaatgaacattctaataagtttaaggatggtctttgtcttttctggaattgcaatgtcgattgctatcc

SEQ ID NO: 7934 - DNA, 80 bp, synthetic construct
  misc_feature 1..80: note = Synthetic: >CanadaGoose-cand-17770-17849
  source 1..80: mol_type = other DNA
agataactctcttgtgtgtaggtttgatacacgtaatttaagtgtattaaacctaccaggttgtaatggtggtagcttgt

SEQ ID NO: 7935 - DNA, 80 bp, synthetic construct
  misc_feature 1..80: note = Synthetic: >CanadaGoose-cand-17850-17929
  source 1..80: mol_type = other DNA
atgttaataagcatgcattccatacacctcgttttgataggacaagtttcaagtacttgaaacctatgccgtttttcttt

SEQ ID NO: 7936 - DNA, 80 bp, synthetic construct
  misc_feature 1..80: note = Synthetic: >CanadaGoose-cand-17930-18009
  source 1..80: mol_type = other DNA
tatgactcaagcccttgcgacaccattcagattgatggtgtttcacaagatcttgttagtctatcaactaaagattgcat

SEQ ID NO: 7937 - DNA, 80 bp, synthetic construct
  misc_feature 1..80: note = Synthetic: >CanadaGoose-cand-18010-18089
  source 1..80: mol_type = other DNA
tactcgttgtaatataggtggtgcagtatgtaaaaagcatgctcagctatatgctgagtttgttagtgcttataatgtag

SEQ ID NO: 7938 - DNA, 80 bp, synthetic construct
  misc_feature 1..80: note = Synthetic: >CanadaGoose-cand-18090-18169
  source 1..80: mol_type = other DNA
cagtcacagcaggttttaccttctgggttgctaatggttttgatccatataatttatggaaacagtttacttcccttcag

SEQ ID NO: 7939 - DNA, 80 bp, synthetic construct
  misc_feature 1..80: note = Synthetic: >CanadaGoose-cand-18170-18249
  source 1..80: mol_type = other DNA
tctatagacaatttagcttataatgtctatatgagaggccattttgacgatgttgctggtgaaatgattactgtagtaac

SEQ ID NO: 7940 - DNA, 80 bp, synthetic construct
  misc_feature 1..80: note = Synthetic: >CanadaGoose-cand-18250-18329
  source 1..80: mol_type = other DNA
tggtgacagagttagtgtcataaaggacgatgtagagaaggttgtctttgttaataagacaacactacctactactgtag

SEQ ID NO: 7941 - DNA, 80 bp, synthetic construct
  misc_feature 1..80: note = Synthetic: >HKU10-cand-21760-21839
  source 1..80: mol_type = other DNA
gataaacctgtctattttaacctatcacttaactcaggtgttagatgtaatggttatactaatgctggttcctatgctca

SEQ ID NO: 7942 - DNA, 80 bp, synthetic construct
  misc_feature 1..80: note = Synthetic: >HKU10-cand-21840-21919
  source 1..80: mol_type = other DNA
agcgttgaggttttcgcttaactttacagcaaaccaagtcttgaatggtgtgcatagtattaaacttttcgctgccaatc

SEQ ID NO: 7943 - DNA, 80 bp, synthetic construct
  misc_feature 1..80: note = Synthetic: >HKU10-cand-21920-21999
  source 1..80: mol_type = other DNA
aaaattttacattcacatgctcaaataacagtactctagaaagtggtgatcgaataataccttttggtcgtgttgaaagt

SEQ ID NO: 7944 - DNA, 80 bp, synthetic construct
  misc_feature 1..80: note = Synthetic: >HKU10-cand-22080-22159
  source 1..80: mol_type = other DNA
agagtttgttatttcacgttatggtgctgtttatataaatggtgtacatataatgtctttacctcctttggaaagtgtca

SEQ ID NO: 7945 - DNA, 80 bp, synthetic construct
  misc_feature 1..80: note = Synthetic: >HKU10-cand-22160-22239
  source 1..80: mol_type = other DNA
tttttaatgtcactagtagtgtgggttctgacttttggactgttgcttttgctgatgaagctgaagttttgttggatttg

SEQ ID NO: 7946 - DNA, 80 bp, synthetic construct
  misc_feature 1..80: note = Synthetic: >HKU10-cand-22240-22319
  source 1..80: mol_type = other DNA
aatgccacaaacatagtagacattttgtattgtgacacttcggtcaataaaataaaatgtcaacatcttgcattttcttt

SEQ ID NO: 7947 - DNA, 80 bp, synthetic construct
  misc_feature 1..80: note = Synthetic: >HKU10-cand-22320-22399
  source 1..80: mol_type = other DNA
ggaggatggtttttatgctacatccaatcttatagaacgtgacatacctagaacttacgtagctttaccctaccatgcaa

SEQ ID NO: 7948 - DNA, 80 bp, synthetic construct
  misc_feature 1..80: note = Synthetic: >HKU10-cand-22400-22479
  source 1..80: mol_type = other DNA
ctcattctgtagtgggtttgaatgttacgatttattatgaaaatgatgtgagtgatgatgcgcagttagctgcaagtaat

SEQ ID NO: 7949 - DNA, 80 bp, synthetic construct
  misc_feature 1..80: note = Synthetic: >HKU10-cand-22480-22559
  source 1..80: mol_type = other DNA
ctcactttgtctccttcagatcctgtgtgtgttaatacctcacagttcacaacttatttctcaactaatgtcactgctga

SEQ ID NO: 7950 - DNA, 80 bp, synthetic construct
  misc_feature 1..80: note = Synthetic: >HKU10-cand-22560-22639
  source 1..80: mol_type = other DNA
cactaatggtttcaatgccagaattattaatgttgactgtccttttacttttgataagcttaacaattacattagttttg

SEQ ID NO: 7951 - DNA, 80 bp, synthetic construct
  misc_feature 1..80: note = Synthetic: >HKU10-cand-22640-22719
  source 1..80: mol_type = other DNA
aatccatttgtttttctttggaaccttttgctggtggttgttctatgcgtattgaaagtttcttttttagctatgttagg

SEQ ID NO: 7952 - DNA, 80 bp, synthetic construct
  misc_feature 1..80: note = Synthetic: >HKU10-cand-22720-22799
  source 1..80: mol_type = other DNA
actgtgggcagtctttacattctttttaagaatggtaataagattactggtgttacagaaactacagctggcgtttatga

SEQ ID NO: 7953 - DNA, 80 bp, synthetic construct
  misc_feature 1..80: note = Synthetic: >HKU10-cand-22800-22879
  source 1..80: mol_type = other DNA
cactagttttctacacacagatgtttgcacagattacactatttatggcattactggtagaggtgttataactaagctta

SEQ ID NO: 7954 - DNA, 80 bp, synthetic construct
  misc_feature 1..80: note = Synthetic: >HKU10-cand-22880-22959
  source 1..80: mol_type = other DNA
atactactattatagctggtttatattacacctcacaatctggtcaaatacttggttttaaaaatgccaccaatggtgac

SEQ ID NO: 7955 - DNA, 80 bp, synthetic construct
  misc_feature 1..80: note = Synthetic: >HKU10-cand-22960-23039
  source 1..80: mol_type = other DNA
atttatgctgttagaccttgtgacttgtctagtcaagctgctgttgttagtaatcaaattgttggtgttatgtctgcttc

SEQ ID NO: 7956 - DNA, 80 bp, synthetic construct
  misc_feature 1..80: note = Synthetic: >HKU10-cand-28160-28239
  source 1..80: mol_type = other DNA
tttgatctcacctaaatttgctgttaaaattccttccaatgtggtggttgtagaggacacaacctctcgccctccttcta

SEQ ID NO: 7957 - DNA, 80 bp, synthetic construct
  misc_feature 1..80: note = Synthetic: >HKU10-cand-28240-28319
  source 1..80: mol_type = other DNA
gatcacaaagtaacagcaggcctcgcagtcagagcagaaacaactctaggcctcggggtccaaaacagggtaattctaaa

SEQ ID NO: 7958 - DNA, 80 bp, synthetic construct
  misc_feature 1..80: note = Synthetic: >HKU10-cand-28320-28399
  source 1..80: mol_type = other DNA
atctaaaaataactctctcaaaagaacaactctcgtgaccagcagcgctctaggaataactcgagagcaccaagcagacc

SEQ ID NO: 7959 - DNA, 80 bp, synthetic construct
  misc_feature 1..80: note = Synthetic: >HKU10-cand-28400-28479
  source 1..80: mol_type = other DNA
tcgctcacgcgcaaattcaactagctcatccactaatgatgctgttgacattgttgctgccgtgaaacaagcgcttaaag

SEQ ID NO: 7960 - DNA, 80 bp, synthetic construct
  misc_feature 1..80: note = Synthetic: >HKU10-cand-28480-28559
  source 1..80: mol_type = other DNA
agcttggtgtaacacctgagaagaaaaaccaagaaaaacaaaagaaaagcaagaaaagcaattctggtagcggtaacaac

SEQ ID NO: 7961 - DNA, 80 bp, synthetic construct
  misc_feature 1..80: note = Synthetic: >HKU10-cand-28560-28639
  source 1..80: mol_type = other DNA
actccaaaagaggctgccactccaaaacaactaaatctagcccttcaacaccaaggaagcagctagaaagaccagagtgg

SEQ ID NO: 7962 - DNA, 80 bp, synthetic construct
  misc_feature 1..80: note = Synthetic: >HKU10-cand-28640-28719
  source 1..80: mol_type = other DNA
aaacgtgtgccaaacaaggaggaaaatgttactgcttgttttggaccacgagacactcttcacaacttcggtgatcaaaa

SEQ ID NO: 7963 - DNA, 80 bp, synthetic construct
  misc_feature 1..80: note = Synthetic: >HKU10-cand-28720-28799
  source 1..80: mol_type = other DNA
gcttattgcagaaggtgtgcaagctcctcattacccacaacttgctgaactcgtacctacaccagctgcactgctgtttg

SEQ ID NO: 7964 - DNA, 80 bp, synthetic construct
  misc_feature 1..80: note = Synthetic: >HKU10-cand-28800-28879
  source 1..80: mol_type = other DNA
gtggcgaggtttcaacgagagaacgtggtgatgaagttgaaattatgtatgtttataaaatgaaggttcacaaatcaaac

SEQ ID NO: 7965 - DNA, 80 bp, synthetic construct
  misc_feature 1..80: note = Synthetic: >HKU10-cand-28880-28959
  source 1..80: mol_type = other DNA
aaggaccttcctgctttcttgcaacaagtcagtgcttatgctcaagctcctgatgctacaactacagaaaaagccactgt

SEQ ID NO: 7966 - DNA, 80 bp, synthetic construct
  misc_feature 1..80: note = Synthetic: >HKU10-cand-28960-29039
  source 1..80: mol_type = other DNA
gcaaccactgctgaacccaactgctccagacttcaaaccagctcaagacacatcggatgaagtcattgaaatgattaaca

SEQ ID NO: 7967 - DNA, 80 bp, synthetic construct
  misc_feature 1..80: note = Synthetic: >HKU10-cand-29040-29119
  source 1..80: mol_type = other DNA
ctgtgtatgattcttttgatgcgtaagtttgcaaaattcctcaactaaacaaggaatgcacttccttatagttgcattag

SEQ ID NO: 7968 - DNA, 80 bp, synthetic construct
  misc_feature 1..80: note = Synthetic: >HKU10-cand-29120-29199
  source 1..80: mol_type = other DNA
cattctactttcagtgctttttgtgggctttacacagatgccaattcgtgaggcgtggctggctaatttttggatacttt

SEQ ID NO: 7969 - DNA, 80 bp, synthetic construct
  misc_feature 1..80: note = Synthetic: >HKU10-cand-29200-29279
  source 1..80: mol_type = other DNA
ccttattgcgtctacgagattttagatgctaacctagcacaacttcatacttttatagtgcttttggtttcagtacttgg

SEQ ID NO: 7970 - DNA, 80 bp, synthetic construct
  misc_feature 1..80: note = Synthetic: >HKU10-cand-29280-29359
  source 1..80: mol_type = other DNA
ctgtattgctattggctctttgtttactgacgttgttttcgagcttcttgatttcatcgcctttaagtttctgttagttt

SEQ ID NO: 7971 - DNA, 80 bp, synthetic construct
  misc_feature 1..80: note = Synthetic: >HKU10-cand-29360-29439
  source 1..80: mol_type = other DNA
ctttctaccggtaggtttcttaagaacacctctttggtgttttcttgctaggttttaatcaatcacaatgaaattgttac

SEQ ID NO: 7972 - DNA, 80 bp, synthetic construct
  misc_feature 1..80: note = Synthetic: >HKU25-cand-11540-11619
  source 1..80: mol_type = other DNA
attgtatatgagcctactactcctgtctcatcagccctcatagccgttgctaactggctgacacccgacaatgtctacat

SEQ ID NO: 7973 - DNA, 80 bp, synthetic construct
  misc_feature 1..80: note = Synthetic: >HKU25-cand-11620-11699
  source 1..80: mol_type = other DNA
gcgaacaactcacactgacattggcttgtacataagccttagtctcgtgttggctgtcgttgttaagcgtctgtacaatc

SEQ ID NO: 7974 - DNA, 80 bp, synthetic construct
  misc_feature 1..80: note = Synthetic: >HKU25-cand-11700-11779
  source 1..80: mol_type = other DNA
catctctgtctaaccttgcacttgccttgtgcagtttggtcatgtggttgtatacttatagtattggagaacattcttca

SEQ ID NO: 7975 - DNA, 80 bp, synthetic construct
  misc_feature 1..80: note = Synthetic: >HKU25-cand-11780-11859
  source 1..80: mol_type = other DNA
ccaatagcttacttgctatttgtcacatcactcactagtgattatacgatcaccgtctttatggctgtgaattctgctaa

SEQ ID NO: 7976 - DNA, 80 bp, synthetic construct
  misc_feature 1..80: note = Synthetic: >HKU25-cand-11860-11939
  source 1..80: mol_type = other DNA
attcttaacttacctcatctacgcctactcgccacaggctatgttggtgttccctgaggtaaagatgatcctattgatgt

SEQ ID NO: 7977 - DNA, 80 bp, synthetic construct
  misc_feature 1..80: note = Synthetic: >HKU25-cand-11940-12019
  source 1..80: mol_type = other DNA
acacttgcattggttatgtgtgtacatgctactttggtgtcttttcattattaaaccttaaactccggtcacccatggga

SEQ ID NO: 7978 - DNA, 80 bp, synthetic construct
  misc_feature 1..80: note = Synthetic: >HKU25-cand-12020-12099
  source 1..80: mol_type = other DNA
gtctacgactttaaggtttctactcaagagttcaggtacatgaccgccaacaatctccatgcgccacgcaattcatggga

SEQ ID NO: 7979 - DNA, 80 bp, synthetic construct
  misc_feature 1..80: note = Synthetic: >HKU25-cand-12100-12179
  source 1..80: mol_type = other DNA
ggcattggctttgaactttaaacttattggtattggaggaacaccttgcataaaagtggctaccgtccaatccaaactta

SEQ ID NO: 7980 - DNA, 80 bp, synthetic construct
  misc_feature 1..80: note = Synthetic: >HKU25-cand-12180-12259
  source 1..80: mol_type = other DNA
ctgatattaaatgcacatccgtggtcttactctcagtgttgcaacaacttcacttagaggctaatagtaaagcgtgggcg

SEQ ID NO: 7981 - DNA, 80 bp, synthetic construct
  misc_feature 1..80: note = Synthetic: >HKU25-cand-12260-12339
  source 1..80: mol_type = other DNA
tggtgtgtcaagagtcataacgacattctcactgctgtcgatcccactgaggctttcgaaaaattcgtttgtctctttgc

SEQ ID NO: 7982 - DNA, 80 bp, synthetic construct
  misc_feature 1..80: note = Synthetic: >HKU25-cand-12340-12419
  source 1..80: mol_type = other DNA
tactctcatgaccttctcaggcaatgttgacctcgaaggcttagctagtgacttgtttgataacccaaccatcttacaag

SEQ ID NO: 7983 - DNA, 80 bp, synthetic construct
  misc_feature 1..80: note = Synthetic: >HKU25-cand-12420-12499
  source 1..80: mol_type = other DNA
ctacactttctgaattctctcacttggctagttttgctgagttagaggctgcacaaaggtcttatcaagaagctgtagac

SEQ ID NO: 7984 - DNA, 80 bp, synthetic construct
  misc_feature 1..80: note = Synthetic: >HKU25-cand-12500-12579
  source 1..80: mol_type = other DNA
tcaggtgatgcctcacctcaagtcttaaaagctcttcagaaggctgttaatattgccaagaacgcatacgaaaaggataa

SEQ ID NO: 7985 - DNA, 80 bp, synthetic construct
  misc_feature 1..80: note = Synthetic: >HKU25-cand-12590-12669
  source 1..80: mol_type = other DNA
cgtaaattggaacgcatggctgaacaggctatgacgtctatgtacaagcaagcacgcgctgaagacaaaaagtctaaaat

SEQ ID NO: 7986 - DNA, 80 bp, synthetic construct
  misc_feature 1..80: note = Synthetic: >HKU25-cand-12670-12749
  source 1..80: mol_type = other DNA
cgttagtgctatgcagaccatgctctttggtatgattaagaagttggacaacgatgttcttaatggtataatttctaacg

SEQ ID NO: 7987 - DNA, 80 bp, synthetic construct
  misc_feature 1..80: note = Synthetic: >HKU25-cand-12750-12829
  source 1..80: mol_type = other DNA
ctaggaacggttgtatacctcttagtgttgtgccactgtgtgcatcaaataagcttagagttgtaattcccgactttact

SEQ ID NO: 7988 - DNA, 80 bp, synthetic construct
  misc_feature 1..80: note = Synthetic: >HKU25-cand-15390-15469
  source 1..80: mol_type = other DNA
tcagatgaatttgaaatatgctattagtgctaagaatcgtgctcgcactgttgcaggcgtgtctatacttagtaccatga

SEQ ID NO: 7989 - DNA, 80 bp, synthetic construct
  misc_feature 1..80: note = Synthetic: >HKU25-cand-15460-15539
  source 1..80: mol_type = other DNA
agtaccatgactaatcgccaattccaccagaaaatgctcaagtccatggctgccacacgtggcgcgacttgtgtcattgg

SEQ ID NO: 7990 - DNA, 80 bp, synthetic construct
  misc_feature 1..80: note = Synthetic: >HKU25-cand-15540-15619
  source 1..80: mol_type = other DNA
aacaacgaagttctatggtgggtgggattttatgcttaagacgttgtacaaagacgtcgaaaatccacacctaatgggat

SEQ ID NO: 7991 - DNA, 80 bp, synthetic construct
  misc_feature 1..80: note = Synthetic: >HKU25-cand-15620-15699
  source 1..80: mol_type = other DNA
gggattaccctaagtgtgatcgtgctatgcctaacatgtgtaggatttttgcatctctaattcttgcacacaagcatgga

SEQ ID NO: 7992 - DNA, 80 bp, synthetic construct
  misc_feature 1..80: note = Synthetic: >HKU25-cand-15700-15779
  source 1..80: mol_type = other DNA
acttgctgcactactagagatagattttaccgcttagctaatgagtgtgctcaggtactaagcgaatacgttctctgtgg

SEQ ID NO: 7993 - DNA, 80 bp, synthetic construct
  misc_feature 1..80: note = Synthetic: >HKU25-cand-15780-15859
  source 1..80: mol_type = other DNA
cggtggttattacgtcaaacctggcggaaccagcagcggcgacgccaccacagcttatgccaacagtgtttttaacatat

SEQ ID NO: 7994 - DNA, 80 bp, synthetic construct
  misc_feature 1..80: note = Synthetic: >HKU25-cand-15860-15939
  source 1..80: mol_type = other DNA
tgcaggcgacaactgcaaatgttagtgcacttatgggcgctaatggcaacaaaattgttgataaagagattagggacatg

SEQ ID NO: 7995 - DNA, 80 bp, synthetic construct
  misc_feature 1..80: note = Synthetic: >HKU25-cand-15940-16019
  source 1..80: mol_type = other DNA
caattcgatttgtatgtcaatgtttacaggaataccacccctgacccaaaatttgtagataaatattatgcttttctcaa

SEQ ID NO: 7996 - DNA, 80 bp, synthetic construct
  misc_feature 1..80: note = Synthetic: >HKU25-cand-16020-16099
  source 1..80: mol_type = other DNA
taagcacttctctatcatgatactgtctgaagatggtgttgtctgctataacagtgactatgcttcaaaaggatacattg

SEQ ID NO: 7997 - DNA, 80 bp, synthetic construct
  misc_feature 1..80: note = Synthetic: >HKU25-cand-16100-16179
  source 1..80: mol_type = other DNA
ctggcatacagaactttaaagaaactctatactaccagaacaatgtgtttatgtcagaagctaaatgctgggtggagtca

SEQ ID NO: 7998 - DNA, 80 bp, synthetic construct
  misc_feature 1..80: note = Synthetic: >HKU25-cand-16180-16259
  source 1..80: mol_type = other DNA
gatttgaaaaaaggcccacatgaattctgttctcagcatacgctttttattaaggatggtgacgatggttacttcctgcc

SEQ ID NO: 7999 - DNA, 80 bp, synthetic construct
  misc_feature 1..80: note = Synthetic: >HKU25-cand-16260-16339
  source 1..80: mol_type = other DNA
ttatccagacccctcaaggattttgtctgccggttgctttgtagatgatattgttaaaactgatggtacactcatggtag

SEQ ID NO: 8000 - DNA, 80 bp, synthetic construct
  misc_feature 1..80: note = Synthetic: >HKU25-cand-16340-16419
  source 1..80: mol_type = other DNA
agaggtttgtttccttagccattgatgcgtaccctcttacaaagcatgatgatatagaataccaaaatgtattctgggtg

SEQ ID NO: 8001 - DNA, 80 bp, synthetic construct
  misc_feature 1..80: note = Synthetic: >HKU25-cand-16420-16499
  source 1..80: mol_type = other DNA
tatttacagtacattgaaaagctgtacaaagaccttacagggcacatgctggacagttactctgttatgctatgtggtga

SEQ ID NO: 8002 - DNA, 80 bp, synthetic construct
  misc_feature 1..80: note = Synthetic: >HKU25-cand-16500-16579
  source 1..80: mol_type = other DNA
taattccgctaagttctgggaggagagcttctatagagaactctatgaagctcccaccaccctgcaggctgttggttctt

SEQ ID NO: 8003 - DNA, 80 bp, synthetic construct
  misc_feature 1..80: note = Synthetic: >HKU25-cand-16580-16659
  source 1..80: mol_type = other DNA
gtgtagtgtgtcattcacaaacctcgttgcgttgtggcacatgtatacgtagacctttcctctgttgtaagtgttgttac

SEQ ID NO: 8004 - DNA, 80 bp, synthetic construct
  misc_feature 1..80: note = Synthetic: >HKU25-cand-21770-21849
  source 1..80: mol_type = other DNA
ttatatccctcttgtcgcaaggtaaactccttattcgcgacaatgacactctcaatgtttctactgatgttcttgttaac

SEQ ID NO: 8005 - DNA, 80 bp, synthetic construct
  misc_feature 1..80: note = Synthetic: >HKU25-cand-21850-21929
  source 1..80: mol_type = other DNA
acacataaaaggagatgttgacctaggtcctgactccgctgcacagagttgtcaggaagtggacatccaaccacaatatt

SEQ ID NO: 8006 - DNA, 80 bp, synthetic construct
  misc_feature 1..80: note = Synthetic: >HKU25-cand-21930-22009
  source 1..80: mol_type = other DNA
tccaaaaacactggacaaaaccaatagatcctgctaaagcggatggtatcatataccccacgggcagatcatattctaac

SEQ ID NO: 8007 - DNA, 80 bp, synthetic construct
  misc_feature 1..80: note = Synthetic: >HKU25-cand-22000-22079
  source 1..80: mol_type = other DNA
atattctaacataacattgtcatatcaaggactgttccctaggcaaggagaccaaggacagctctacttatattccgttt

SEQ ID NO: 8008 - DNA, 80 bp, synthetic construct
  misc_feature 1..80: note = Synthetic: >HKU25-cand-22080-22159
  source 1..80: mol_type = other DNA
cacatgcagacccaaacacacaaaaaacaggacctgatggaatcggtaaactcttcatatccaactacaccaatgaaacc

SEQ ID NO: 8009 - DNA, 80 bp, synthetic construct
  misc_feature 1..80: note = Synthetic: >HKU25-cand-22160-22239
  source 1..80: mol_type = other DNA
aacacgtttgataatggcttcgttgttagaattggagacgctgcaaactctacctacccaataataatatcgccccaagg

SEQ ID NO: 8010 - DNA, 80 bp, synthetic construct
  misc_feature 1..80: note = Synthetic: >HKU25-cand-22240-22319
  source 1..80: mol_type = other DNA
tcctcctcgtaccattaagaagatttatccagcgtttatgcttggcgcatacattggaaacttcaccaacaataggactg

SEQ ID NO: 8011 - DNA, 80 bp, synthetic construct
  misc_feature 1..80: note = Synthetic: >HKU25-cand-22320-22399
  source 1..80: mol_type = other DNA
tgcgataccttaatcacacccttgtcattcttccagaagggtgtggtactagcttatcagtcttctattgcgtgctcata

SEQ ID NO: 8012 - DNA, 80 bp, synthetic construct
  misc_feature 1..80: note = Synthetic: >HKU25-cand-22400-22479
  source 1..80: mol_type = other DNA
ccacgcaaacaacataggtgtcccgaagataatgcttactcctcatatgttatctgggaaacaccccatcaagattgtga

SEQ ID NO: 8013 - DNA, 80 bp, synthetic construct
  misc_feature 1..80: note = Synthetic: >HKU25-cand-22480-22559
  source 1..80: mol_type = other DNA
aggctccaatgtaaatcggaacatctcactcaatgcttttaaacattatttcaacttgacacagtgcaagttcttctatt

SEQ ID NO: 8014 - DNA, 80 bp, synthetic construct
  misc_feature 1..80: note = Synthetic: >HKU25-cand-22560-22639
  source 1..80: mol_type = other DNA
cgtacaatattacagaggatgagcatgctgagtggtttggaatcactcaagatgcccgaggcgttcacctctattcgtca

SEQ ID NO: 8015 - DNA, 80 bp, synthetic construct
  misc_feature 1..80: note = Synthetic: >HKU25-cand-22640-22719
  source 1..80: mol_type = other DNA
agaaagggtgacctctatggtggtaacatgttcctctttgcatcattgcctatatatgacactcttaagtattatacagt

SEQ ID NO: 8016 - DNA, 80 bp, synthetic construct
  misc_feature 1..80: note = Synthetic: >HKU25-cand-22720-22799
  source 1..80: mol_type = other DNA
cattccacgcagcatccgttctaaatacaatgctagacaaggatgggctgctttctacatatataaacttcaccagttaa

SEQ ID NO: 8017 - DNA, 80 bp, synthetic construct
  misc_feature 1..80: note = Synthetic: >HKU25-cand-22800-22879
  source 1..80: mol_type = other DNA
cctatttgcttgattttactgttgatggttatatccgtagggctgttgactgtggacatgacgacctagctcagctccgc

SEQ ID NO: 8018 - DNA, 80 bp, synthetic construct
  misc_feature 1..80: note = Synthetic: >HKU25-cand-22880-22959
  source 1..80: mol_type = other DNA
tgttcctatgagtcttttgatgtcgattctggtgtttactcagtttcttcatttgaggcacaacctcgtggtgcattcat

SEQ ID NO: 8019 - DNA, 80 bp, synthetic construct
  misc_feature 1..80: note = Synthetic: >HKU25-cand-22960-23039
  source 1..80: mol_type = other DNA
tgagcaatctagtggcaaagagtgtgacttctcacctatgctcactggcacaccacctcaagtttataattttcgcagat

SEQ ID NO: 8020 - DNA, 80 bp, synthetic construct
  misc_feature 1..80: note = Synthetic: >HKU8-cand-2640-2719
  source 1..80: mol_type = other DNA
tttgcatactattgttttgcaaaacctgctattgcactcggtgacatctttgtgcgcgtttctaagaatgctcttagtgc

SEQ ID NO: 8021 - DNA, 80 bp, synthetic construct
  misc_feature 1..80: note = Synthetic: >HKU8-cand-2720-2799
  source 1..80: mol_type = other DNA
ctttaatggccctgttgaagctggtcctaatgatgctaagacctttgatggtggtgatattgatactgtttgctcacgtg

SEQ ID NO: 8022 - DNA, 80 bp, synthetic construct
  misc_feature 1..80: note = Synthetic: >HKU8-cand-2800-2879
  source 1..80: mol_type = other DNA
ttcagtttgatactgttgagcttgaacctgtgcaagacgtaccggttcctagtgatggttatgtcgctgttgttgatgga

SEQ ID NO: 8023 - DNA, 80 bp, synthetic construct
  misc_feature 1..80: note = Synthetic: >HKU8-cand-2870-2949
  source 1..80: mol_type = other DNA
tgttgatggatacacattctttacagatggcactcattacttcccaactggactgtctcgttgctacacaacgtgtttta

SEQ ID NO: 8024 - DNA, 80 bp, synthetic construct
  misc_feature 1..80: note = Synthetic: >HKU8-cand-2950-3029
  source 1..80: mol_type = other DNA
agcgtggtggtggatctactgttgagttttctgaagttgtggaagttaaagaaattgaccctgtctataaagttcgactt

SEQ ID NO: 8025 - DNA, 80 bp, synthetic construct
  misc_feature 1..80: note = Synthetic: >HKU8-cand-3030-3109
  source 1..80: mol_type = other DNA
gagtacgaatttgaggatgagactattggtagtgtttgtaagaaggcaattggtaagaacatcacttttgaaggcaatga

SEQ ID NO: 8026 - DNA, 80 bp, synthetic construct
  misc_feature 1..80: note = Synthetic: >HKU8-cand-3110-3189
  source 1..80: mol_type = other DNA
ctggtccgactttgaacaaactattaataacgctgtgtctgtggttggtgagtttgtcgacctacctgatttttttgtct

SEQ ID NO: 8027 - DNA, 80 bp, synthetic construct
  misc_feature 1..80: note = Synthetic: >HKU8-cand-3190-3269
  source 1..80: mol_type = other DNA
atgatgaggaaggtggtactgatcttactaacgttgttatggtttcacaatggcctttgaaaacaacaccagaaccacaa

SEQ ID NO: 8028 - DNA, 80 bp, synthetic construct
  misc_feature 1..80: note = Synthetic: >HKU8-cand-3270-3349
  source 1..80: mol_type = other DNA
gtgtttgatccatcaccactagcagcttttgttgttagttggggtttggaatgtgactttagtggttgtgctgaccctgt

SEQ ID NO: 8029 - DNA, 80 bp, synthetic construct
  misc_feature 1..80: note = Synthetic: >HKU8-cand-3350-3429
  source 1..80: mol_type = other DNA
tagttgtttgaatactgtcgatggtgctgctctttgtgtttcaatggagcgttcttgtaagtgtggcactgatcaggctg

SEQ ID NO: 8030 - DNA, 80 bp, synthetic construct
  misc_feature 1..80: note = Synthetic: >HKU8-cand-3430-3509
  source 1..80: mol_type = other DNA
tttgtgaaggtttttatgtgcctgttaaaccatgtgctgacactgatgtttgtgatgagtgtggtggtgatcgtattact

SEQ ID NO: 8031 - DNA, 80 bp, synthetic construct
  misc_feature 1..80: note = Synthetic: >HKU8-cand-3510-3589
  source 1..80: mol_type = other DNA
accatcactagcatggttggtactggttttgtggacttttgtgatgaacctgttgtgccttttgattgtgcagagtgagg

SEQ ID NO: 8032 - DNA, 80 bp, synthetic construct
  misc_feature 1..80: note = Synthetic: >HKU8-cand-3590-3669
  source 1..80: mol_type = other DNA
ttttggtggttacaatgatgtttgttttgtcaatgacacagtgttacctcctccttttgatgttgcaatcccaccacctc

SEQ ID NO: 8033 - DNA, 80 bp, synthetic construct
  misc_feature 1..80: note = Synthetic: >HKU8-cand-3670-3749
  source 1..80: mol_type = other DNA
ctattgaggaagaactagtagtagaagatgtcatcgcagctgatgaagttgttgatgccaacaccactacacaagcagaa

SEQ ID NO: 8034 - DNA, 80 bp, synthetic construct
  misc_feature 1..80: note = Synthetic: >HKU8-cand-3750-3829
  source 1..80: mol_type = other DNA
gcagagactcctgttgatgctgtcctaattacatctgaagaagaagtgaatgatgctaatgaaccacaagaagaagacat

SEQ ID NO: 8035 - DNA, 80 bp, synthetic construct
  misc_feature 1..80: note = Synthetic: >HKU8-cand-3830-3909
  source 1..80: mol_type = other DNA
tgtcaaacctgaggaggttactgatgtttcttctgatattgaagctgttaaccaggcactgtcatttattgtagatgaac

SEQ ID NO: 8036 - DNA, 80 bp, synthetic construct
  misc_feature 1..80: note = Synthetic: >HKU8-cand-10310-10389
  source 1..80: mol_type = other DNA
tggcttgttatgatggaacacctgctggtgtttatggcatcaccctgcgccctaattaaactattagaggttcatttatt

SEQ ID NO: 8037 - DNA, 80 bp, synthetic construct
  misc_feature 1..80: note = Synthetic: >HKU8-cand-10390-10469
  source 1..80: mol_type = other DNA
aatggcgcgtgtggttcacctggttataatgttgttaatggtaaagttgagttttgctatttgcaccagctggaacttgg

SEQ ID NO: 8038 - DNA, 80 bp, synthetic construct
  misc_feature 1..80: note = Synthetic: >HKU8-cand-10470-10549
  source 1..80: mol_type = other DNA
cagtggttgccatgtaggttctaattttgatggtgttatgtatggcggttttcaggatcagccatctcttcaaattgaag

SEQ ID NO: 8039 - DNA, 80 bp, synthetic construct
  misc_feature 1..80: note = Synthetic: >HKU8-cand-10550-10629
  source 1..80: mol_type = other DNA
gtgctgatcagttggttacacctaatgttgtagcatttttgtatggtgccctacttaatggttgtaattggttcctgtct

SEQ ID NO: 8040 - DNA, 80 bp, synthetic construct
  misc_feature 1..80: note = Synthetic: >HKU8-cand-10630-10709
  source 1..80: mol_type = other DNA
aatgagcgccttagtgttgaggctttcaatgaatgggcacatgacaatggctttactgatatgggcggtgttgactgttt

SEQ ID NO: 8041 - DNA, 80 bp, synthetic construct
  misc_feature 1..80: note = Synthetic: >HKU8-cand-10710-10789
  source 1..80: mol_type = other DNA
caccatgttggctgctaagactggcgttgatgttcaacgtgttctggcttctattcagaaactagctaaaggttttggtg

SEQ ID NO: 8042 - DNA, 80 bp, synthetic construct
  misc_feature 1..80: note = Synthetic: >HKU8-cand-10790-10869
  source 1..80: mol_type = other DNA
gtaggaacattcttggatttacatcactcactgatgagtttactgctgctgaggttattaaacagatgtatggtgtaaac

SEQ ID NO: 8043 - DNA, 80 bp, synthetic construct
  misc_feature 1..80: note = Synthetic: >HKU8-cand-10870-10949
  source 1..80: mol_type = other DNA
ctacagtctcgtaggttgcctagtgtctttaataacatcatgcttgttggtgtgttttggtttatgtttatgtcagagat

SEQ ID NO: 8044 - DNA, 80 bp, synthetic construct
  misc_feature 1..80: note = Synthetic: >HKU8-cand-10950-11029
  source 1..80: mol_type = other DNA
gttgtattatacatctagctattggattaaaccagacctcatcacacctatgtttgtcttattgtttgccattgctgtgt

SEQ ID NO: 8045 - DNA, 80 bp, synthetic construct
  misc_feature 1..80: note = Synthetic: >HKU8-cand-11030-11109
  source 1..80: mol_type = other DNA
tgttcacagcctttattaagcataaggttttgttcctttacaccttttttgtgcctggtatagttataactgccacctcc

SEQ ID NO: 8046 - DNA, 80 bp, synthetic construct
  misc_feature 1..80: note = Synthetic: >HKU8-cand-11110-11189
  source 1..80: mol_type = other DNA
aatttggcttgggattgctacgtgcgtgaactgctggctaagtaccttgattaccatatgtctatctttaatatggacat

SEQ ID NO: 8047 - DNA, 80 bp, synthetic construct
  misc_feature 1..80: note = Synthetic: >HKU8-cand-11190-11269
  source 1..80: mol_type = other DNA
acagggtttctttaatattgcagcttgttttatcgttaatgcgattcatacatggcgttatatgcgtagtggttctacta

SEQ ID NO: 8048 - DNA, 80 bp, synthetic construct
  misc_feature 1..80: note = Synthetic: >HKU8-cand-11270-11349
  source 1..80: mol_type = other DNA
ctagattgacatatgttgtgtcacttgttgtgtcagtttataattactggtatgttggtgacgttttgtctttggccatg

SEQ ID NO: 8049 - DNA, 80 bp, synthetic construct
  misc_feature 1..80: note = Synthetic: >HKU8-cand-11350-11429
  source 1..80: mol_type = other DNA
atgctcctgcttaatattaataataattggtatattggtgcgtttgcttacaggtttgtacttattgttgctaactatat

SEQ ID NO: 8050 - DNA, 80 bp, synthetic construct
  misc_feature 1..80: note = Synthetic: >HKU8-cand-11430-11509
  source 1..80: mol_type = other DNA
gaatccatctgttataggaattcttggcgcttttaaagtcattatgtttttgtatgttgctgttggttatttatgctgta

SEQ ID NO: 8051 - DNA, 80 bp, synthetic construct
  misc_feature 1..80: note = Synthetic: >HKU8-cand-11510-11589
  source 1..80: mol_type = other DNA
tttattatggcatattgtactggcttaacaggttctttaagtgcacactcggactttatgactttaaagtttctgccgct

SEQ ID NO: 8052 - DNA, 80 bp, synthetic construct
  misc_feature 1..80: note = Synthetic: >MurineCoV-cand-7640-7719
  source 1..80: mol_type = other DNA
tctttgtagacatgttatgtatggatgtagtaagcctggttgcttgttttgttataagagaaaccgtagtgtccgtgtta

SEQ ID NO: 8053 - DNA, 80 bp, synthetic construct
  misc_feature 1..80: note = Synthetic: >MurineCoV-cand-7720-7799
  source 1..80: mol_type = other DNA
agtgtagcaccgttgttggtggttcactacgctattacgatgtaatggctaacggcggcacaggtttctgtacaaagcac

SEQ ID NO: 8054 - DNA, 80 bp, synthetic construct
  misc_feature 1..80: note = Synthetic: >MurineCoV-cand-7800-7879
  source 1..80: mol_type = other DNA
cagtggaactgtcttaattgcaattcctggaaaccaggcaatacattcataactcatgaagcagcggcggacctctctaa

SEQ ID NO: 8055 - DNA, 80 bp, synthetic construct
  misc_feature 1..80: note = Synthetic: >MurineCoV-cand-7880-7959
  source 1..80: mol_type = other DNA
ggagttgaaacgccctgtgaatccaacagattctgcttattactcggtcacagaggttaagcaggttggttgttccatgc

SEQ ID NO: 8056 - DNA, 80 bp, synthetic construct
  misc_feature 1..80: note = Synthetic: >MurineCoV-cand-7960-8039
  source 1..80: mol_type = other DNA
gtttgttctacgagagagatggacagcgtgtttatgatgatgttaatgctagtttgtttgtggacatgaatggtctgctg

SEQ ID NO: 8057 - DNA, 80 bp, synthetic construct
  misc_feature 1..80: note = Synthetic: >MurineCoV-cand-8040-8119
  source 1..80: mol_type = other DNA
cattctaaagttaaaggtgtgcctgaaacgcatgttgtggttgttgagaatgaagctgataaagctggttttctcggcgc

SEQ ID NO: 8058 - DNA, 80 bp, synthetic construct
  misc_feature 1..80: note = Synthetic: >MurineCoV-cand-8120-8199
  source 1..80: mol_type = other DNA
tgcagtgttttatgcacaatcgctctacagacctatgttgatggtggaaaagaaattaataactaccgccaacactggtt

SEQ ID NO: 8059 - DNA, 80 bp, synthetic construct
  misc_feature 1..80: note = Synthetic: >MurineCoV-cand-8200-8279
  source 1..80: mol_type = other DNA
tgtctgttagtcgaactatgtttgacctttatgtagattcattgctgaacgtcctcgacgtggatcgcaagagtctaaca

SEQ ID NO: 8060 - DNA, 80 bp, synthetic construct
  misc_feature 1..80: note = Synthetic: >MurineCoV-cand-8280-8359
  source 1..80: mol_type = other DNA
agttttgtaaatgctgcgcacaactctctaaaggagggtgttcagcttgaacaagttatggatacctttattggctgtgc

SEQ ID NO: 8061 - DNA, 80 bp, synthetic construct
  misc_feature 1..80: note = Synthetic: >MurineCoV-cand-8360-8439
  source 1..80: mol_type = other DNA
ccgacgtaagtgttctgctatagattctgatgttgaaaccaagtctattaccaagtccgtcatgtcggcagtaaatgctg

SEQ ID NO: 8062 - DNA, 80 bp, synthetic construct
  misc_feature 1..80: note = Synthetic: >MurineCoV-cand-8440-8519
  source 1..80: mol_type = other DNA
gcgttgattttacggatgagagttgtaataacttggtgcctacctatgttaaaagtgacactatcgttgcagccgatttg

SEQ ID NO: 8063 - DNA, 80 bp, synthetic construct
  misc_feature 1..80: note = Synthetic: >MurineCoV-cand-8520-8599
  source 1..80: mol_type = other DNA
ggtgttcttattcagaataatgctaagcatgtacaggctaatgttgctaaagccgctaatgtggcttgcatttggtctgt

SEQ ID NO: 8064 - DNA, 80 bp, synthetic construct
  misc_feature 1..80: note = Synthetic: >MurineCoV-cand-8600-8679
  source 1..80: mol_type = other DNA
ggatgcttttaaccagctatctgctgacttacagcataggctgcgaaaagcatgttcaaaaactggcttgaagattaagc

SEQ ID NO: 8065 - DNA, 80 bp, synthetic construct
  misc_feature 1..80: note = Synthetic: >MurineCoV-cand-8680-8759
  source 1..80: mol_type = other DNA
ttacttataataagcaggaggcaaatgttcctattttaactacaccgttctctcttaaagggggcgctgtttttagtaga

SEQ ID NO: 8066 - DNA, 80 bp, synthetic construct
  misc_feature 1..80: note = Synthetic: >MurineCoV-cand-8760-8839
  source 1..80: mol_type = other DNA
atgttacaatggttgtttgttgctaatttgatttgtttcattgtgttgtgggcccttatgccaacatatgcagtgcacaa

SEQ ID NO: 8067 - DNA, 80 bp, synthetic construct
  misc_feature 1..80: note = Synthetic: >MurineCoV-cand-8840-8919
  source 1..80: mol_type = other DNA
atcggatatgcagttgcctttatatgccagttttaaagttatagataatggtgtgctaagggatgtgtctgttactgacg

SEQ ID NO: 8068 - DNA, 80 bp, synthetic construct
  misc_feature 1..80: note = Synthetic: >MurineCoV-cand-11510-11589
  source 1..80: mol_type = other DNA
tatggtgtttgttaccatgcgtagcataaaccacgacgtcttttctattatgttcttggttggtagacttgtcagcctgg

SEQ ID NO: 8069 - DNA, 80 bp, synthetic construct
  misc_feature 1..80: note = Synthetic: >MurineCoV-cand-11590-11669
  source 1..80: mol_type = other DNA
tatccatgtggtattttggagccaatttagaggaagaggtactattgttcctcacatccctatttggcacgtacacatgg

SEQ ID NO: 8070 - DNA, 80 bp, synthetic construct
  misc_feature 1..80: note = Synthetic: >MurineCoV-cand-11670-11749
  source 1..80: mol_type = other DNA
actactatgttgtcattggctaccgctaaggttattgctaaatggttggctgtgaatgtcttgtacttcacagacgtacc

SEQ ID NO: 8071 - DNA, 80 bp, synthetic construct
  misc_feature 1..80: note = Synthetic: >MurineCoV-cand-11750-11829
  source 1..80: mol_type = other DNA
gcaaattaaattagttcttttgagctacttgtgtattggttatgtgtgttgttgttattggggaatcttgtcactcctta

SEQ ID NO: 8072 - DNA, 80 bp, synthetic construct
  misc_feature 1..80: note = Synthetic: >MurineCoV-cand-11830-11909
  source 1..80: mol_type = other DNA
atagcatttttaggatgccattgggcgtctacaattataaaatctccgttcaggagttacgttatatgaatgctaatggc

SEQ ID NO: 8073 - DNA, 80 bp, synthetic construct
  misc_feature 1..80: note = Synthetic: >MurineCoV-cand-11910-11989
  source 1..80: mol_type = other DNA
ttgcgcccacctagaaatagttttgaggccctgatgcttaattttaagctgttgggaattggtggtgtgccagtcattga

SEQ ID NO: 8074 - DNA, 80 bp, synthetic construct
  misc_feature 1..80: note = Synthetic: >MurineCoV-cand-11990-12069
  source 1..80: mol_type = other DNA
agtatctcaaattcaatcaagattgacggatgttaaatgtgctaatgttgtgttgcttaattgcctccagcacttgcata

SEQ ID NO: 8075 - DNA, 80 bp, synthetic construct
  misc_feature 1..80: note = Synthetic: >MurineCoV-cand-12070-12149
  source 1..80: mol_type = other DNA
ttgcatctaattctaagttgtggcagtattgtagtactttgcacaatgaaatactggctacatctgatttgagcgtggcc

SEQ ID NO: 8076 - DNA, 80 bp, synthetic construct
  misc_feature 1..80: note = Synthetic: >MurineCoV-cand-12150-12229
  source 1..80: mol_type = other DNA
ttcgataagttggctcagctcttagttgttttatttgctaatccagcagcagtggatagcaagtgccttgcaagtattga

SEQ ID NO: 8077 - DNA, 80 bp, synthetic construct
  misc_feature 1..80: note = Synthetic: >MurineCoV-cand-12230-12309
  source 1..80: mol_type = other DNA
agaagtgagcgatgattacgttcgcgacaatactgtcttgcaagccttacagagtgaatttgttaatatggctagcttcg

SEQ ID NO: 8078 - DNA, 80 bp, synthetic construct
  misc_feature 1..80: note = Synthetic: >MurineCoV-cand-12310-12389
  source 1..80: mol_type = other DNA
ttgagtatgaacttgctaagaagaatctagatgaggctaaggctagcggctctgccaatcaacagcagattaagcagcta

SEQ ID NO: 8079 - DNA, 80 bp, synthetic construct
  misc_feature 1..80: note = Synthetic: >MurineCoV-cand-12390-12469
  source 1..80: mol_type = other DNA
gagaaggcgtgtaatattgctaagtcagcatatgagcgcgacagagctgttgctcgtaagctggaacgtatggctgattt

SEQ ID NO: 8080 - DNA, 80 bp, synthetic construct
  misc_feature 1..80: note = Synthetic: >MurineCoV-cand-12470-12549
  source 1..80: mol_type = other DNA
agctcttacaaacatgtataaagaagctagaattaatgataagaagagtaaggtagtgtctgcattgcaaaccatgctct

SEQ ID NO: 8081 - DNA, 80 bp, synthetic construct
  misc_feature 1..80: note = Synthetic: >MurineCoV-cand-12550-12629
  source 1..80: mol_type = other DNA
ttagtatggtgcgtaagctagataaccaagctcttaattctattttagataatgcagttaagggttgtgtacctttgaat

SEQ ID NO: 8082 - DNA, 80 bp, synthetic construct
  misc_feature 1..80: note = Synthetic: >MurineCoV-cand-12630-12709
  source 1..80: mol_type = other DNA
gcaataccatcattgacttcgaacactctgactataatagtgccagataagcaggtttttgatcaggttgtggataatgt

SEQ ID NO: 8083 - DNA, 80 bp, synthetic construct
  misc_feature 1..80: note = Synthetic: >MurineCoV-cand-12710-12789
  source 1..80: mol_type = other DNA
gtatgtcacctatgctgggaatgtatggcatatacagtttattcaagatgctgatggtgctgttaaacaattgaatgaga

SEQ ID NO: 8084 - DNA, 80 bp, synthetic construct
  misc_feature 1..80: note = Synthetic: >SARSCoV2-cand-13540-13619
  source 1..80: mol_type = other DNA
tgacatctacaatgataaagtagctggttttgctaaattcctaaaaactaattgttgtcgcttccaagaaaaggacgaag

SEQ ID NO: 8085 - DNA, 80 bp, synthetic construct
  misc_feature 1..80: note = Synthetic: >SARSCoV2-cand-13620-13699
  source 1..80: mol_type = other DNA
atgacaatttaattgattcttactttgtagttaagagacacactttctctaactaccaacatgaagaaacaatttataat

SEQ ID NO: 8086 - DNA, 80 bp, synthetic construct
  misc_feature 1..80: note = Synthetic: >SARSCoV2-cand-13700-13779
  source 1..80: mol_type = other DNA
ttacttaaggattgtccagctgttgctaaacatgacttctttaagtttagaatagacggtgacatggtaccacatatatc

SEQ ID NO: 8087 - DNA, 80 bp, synthetic construct
  misc_feature 1..80: note = Synthetic: >SARSCoV2-cand-13780-13859
  source 1..80: mol_type = other DNA
acgtcaacgtcttactaaatacacaatggcagacctcgtctatgctttaaggcattttgatgaaggtaattgtgacacat

SEQ ID NO: 8088 - DNA, 80 bp, synthetic construct
  misc_feature 1..80: note = Synthetic: >SARSCoV2-cand-13860-13939
  source 1..80: mol_type = other DNA
taaaagaaatacttgtcacatacaattgttgtgatgatgattatttcaataaaaaggactggtatgattttgtagaaaac

SEQ ID NO: 8089 - DNA, 80 bp, synthetic construct
  misc_feature 1..80: note = Synthetic: >SARSCoV2-cand-13940-14019
  source 1..80: mol_type = other DNA
ccagatatattacgcgtatacgccaacttaggtgaacgtgtacgccaagctttgttaaaaacagtacaattctgtgatgc

SEQ ID NO: 8090 - DNA, 80 bp, synthetic construct
  misc_feature 1..80: note = Synthetic: >SARSCoV2-cand-14020-14099
  source 1..80: mol_type = other DNA
catgcgaaatgctggtattgttggtgtactgacattagataatcaagatctcaatggtaactggtatgatttcggtgatt

SEQ ID NO: 8091 - DNA, 80 bp, synthetic construct
  misc_feature 1..80: note = Synthetic: >SARSCoV2-cand-14100-14179
  source 1..80: mol_type = other DNA
tcatacaaaccacgccaggtagtggagttcctgttgtagattcttattattcattgttaatgcctatattaaccttgacc

SEQ ID NO: 8092 - DNA, 80 bp, synthetic construct
  misc_feature 1..80: note = Synthetic: >SARSCoV2-cand-14180-14259
  source 1..80: mol_type = other DNA
agggctttaactgcagagtcacatgttgacactgacttaacaaagccttacattaagtgggatttgttaaaatatgactt

SEQ ID NO: 8093 - DNA, 80 bp, synthetic construct
  misc_feature 1..80: note = Synthetic: >SARSCoV2-cand-14260-14339
  source 1..80: mol_type = other DNA
cacggaagagaggttaaaactctttgaccgttattttaaatattgggatcagacataccacccaaattgtgttaactgtt

SEQ ID NO: 8094 - DNA, 80 bp, synthetic construct
  misc_feature 1..80: note = Synthetic: >SARSCoV2-cand-14340-14419
  source 1..80: mol_type = other DNA
tggatgacagatgcattctgcattgtgcaaactttaatgttttattctctacagtgttcccacctacaagttttggacca

SEQ ID NO: 8095 - DNA, 80 bp, synthetic construct
  misc_feature 1..80: note = Synthetic: >SARSCoV2-cand-14420-14499
  source 1..80: mol_type = other DNA
ctagtgagaaaaatatttgttgatggtgttccatttgtagtttcaactggataccacttcagagagctaggtgttgtaca

SEQ ID NO: 8096 - DNA, 80 bp, synthetic construct
  misc_feature 1..80: note = Synthetic: >SARSCoV2-cand-14500-14579
  source 1..80: mol_type = other DNA
taatcaggatgtaaacttacatagctctagacttagttttaaggaattacttgtgtatgctgctgaccctgctatgcacg

SEQ ID NO: 8097 - DNA, 80 bp, synthetic construct
  misc_feature 1..80: note = Synthetic: >SARSCoV2-cand-14580-14659
  source 1..80: mol_type = other DNA
ctgcttctggtaatctattactagataaacgcactacgtgcttttcagtagctgcacttactaacaatgttgcttttcaa

SEQ ID NO: 8098 - DNA, 80 bp, synthetic construct
  misc_feature 1..80: note = Synthetic: >SARSCoV2-cand-14740-14819
  source 1..80: mol_type = other DNA
tgaattaaaacacttcttctttgctcaggatggtaatgctgctatcagcgattatgactactatcgttataatctaccaa

SEQ ID NO: 8099 - DNA, 80 bp, synthetic construct
  misc_feature 1..80: note = Synthetic: >MbCoV1-cand-16980-17059
  source 1..80: mol_type = other DNA
acagacatattgtatatgttggtgatccacagcagctgcctgctcctagaactatgataacacgaggtgtacttgaacct

SEQ ID NO: 8100 - DNA, 80 bp, synthetic construct
  misc_feature 1..80: note = Synthetic: >BatCoV1A-cand-17140-17219
  source 1..80: mol_type = other DNA
gggtttcttacagacatattgtatatgttggtgatccacagcagctgcccgctcccagaactatgataactcgaggtgta

SEQ ID NO: 8101 - DNA, 80 bp, synthetic construct
  misc_feature 1..80: note = Synthetic: >Sb512-cand-9400-9479
  source 1..80: mol_type = other DNA
acacttaatggtctttggcttggtgatactgttatctgtcctagacatgttatagcaagtaacactactaatgtgataga

SEQ ID NO: 8102 - DNA, 80 bp, synthetic construct
  misc_feature 1..80: note = Synthetic: >Sk512R-cand-9390-9469
  source 1..80: mol_type = other DNA
ttgacacttaatggtctttggcttggtgatactgttatctgtcctagacatgttatagcaagtaacaccactaatgtgat

SEQ ID NO: 8103 - DNA, 80 bp, synthetic construct
  misc_feature 1..80: note = Synthetic: >HKU8R-cand-12570-12649
  source 1..80: mol_type = other DNA
gatgcagttaaaaatggtgttaaacctgttactaactgtgtcaaaatgctttctaatggttccggtactggacaggctgt

SEQ ID NO: 8104 - DNA, 80 bp, synthetic construct
  misc_feature 1..80: note = Synthetic: >MsbCoV1-cand-12680-12759
  source 1..80: mol_type = other DNA
tatttggacgctgttaaaagtggtgttaaacctgttaacaattgtgttaaaatgctttctaatggttctggtactggtca

SEQ ID NO: 8105 - DNA, 80 bp, synthetic construct
  misc_feature 1..80: note = Synthetic: >HKU24-cand-14910-14989
  source 1..80: mol_type = other DNA
gcatcacaggttattgttaataattatgataagagtgctggatacccatttaataagtttggtaaggcccgactctacta

SEQ ID NO: 8106 - DNA, 80 bp, synthetic construct
  misc_feature 1..80: note = Synthetic: >HKU15-cand-10230-10309
  source 1..80: mol_type = other DNA
tgcaaaggcggaatgggagcgtgaggctgcttctcagcgtaagcttgaaaagcttgctgatgctgctatgaagtctatgt

SEQ ID NO: 8107 - DNA, 80 bp, synthetic construct
  misc_feature 1..80: note = Synthetic: >Quail-cand-10180-10259
  source 1..80: mol_type = other DNA
tgaatgggagcgtgaggctgcctctcagcgtaagcttgagaagctagctgatgctgctatgaagtctatgtatcttgcag

SEQ ID NO: 8108 - DNA, 80 bp, synthetic construct
  misc_feature 1..80: note = Synthetic: >Sk512R-cand-8520-8599
  source 1..80: mol_type = other DNA
tgcatcgactcccaagctggtgtttgtgtaggtcttgatcgtttctttgtctatagtaaggcacctggtagtgactatgt

SEQ ID NO: 8109 - DNA, 80 bp, synthetic construct
  misc_feature 1..80: note = Synthetic: >Sb512-cand-8520-8599
  source 1..80: mol_type = other DNA
cggtgaatgcatcgactcccaagctggtgtttgtgtaggtcttgatcgtttctttgtctatagtaagacacctggtagtg

SEQ ID NO: 8110 - DNA, 80 bp, synthetic construct
  misc_feature 1..80: note = Synthetic: >HKU2-cand-12110-12189
  source 1..80: mol_type = other DNA
agtgctgttaaacagggcgctaaaccagttggtaattgtgtaaagatgcttgcaaatggttctggtagtggacaagccgt

SEQ ID NO: 8111 - DNA, 80 bp, synthetic construct
  misc_feature 1..80: note = Synthetic: >SEAC-cand-12090-12169
  source 1..80: mol_type = other DNA
ggcctatgttagtgctgttaaacagggcgctaaaccagttggtaattgtgtaaagatgcttgcaaatggttctggtagtg

SEQ ID NO: 8112 - DNA, 80 bp, synthetic construct
  misc_feature 1..80: note = Synthetic: >HKU2R-cand-11930-12009
  source 1..80: mol_type = other DNA
acgttagtgctgttaaacagggtgctaaaccagttggtaattgtgtaaagatgcttgcaaatggttctggtagtggacaa

SEQ ID NO: 8113 - DNA, 80 bp, synthetic construct
  misc_feature 1..80: note = Synthetic: >SARSRC-cand-27140-27219
  source 1..80: mol_type = other DNA
actaagaagaaatatcctcagttagatgatgaagaacctatggagttagattatccataaaacgaacatgaaaattattc

SEQ ID NO: 8114 - DNA, 80 bp, synthetic construct
  misc_feature 1..80: note = Synthetic: >SARSCoV-cand-27260-27339
  source 1..80: mol_type = other DNA
gaattattcggagttagatgatgaagaacctatggagttagattatccataaaacgaacatgaaaattattctcttcctg

SEQ ID NO: 8115 - DNA, 80 bp, synthetic construct
  misc_feature 1..80: note = Synthetic: >BtRl_BetaCoV-cand-27130-27209
  source 1..80: mol_type = other DNA
tattctgagttagatgatgaagaacctatggagttagattatccataaaacgaacatgaaaattattctcttcctggcat

SEQ ID NO: 8116 - DNA, 80 bp, synthetic construct
  misc_feature 1..80: note = Synthetic: >HKU2R-cand-12170-12249
  source 1..80: mol_type = other DNA
ttaggttttgtatagagaatgaagtttgtaaggtctgtggttgctggcttaacaacggttgctcttgtgacaggtctagt

SEQ ID NO: 8117 - DNA, 80 bp, synthetic construct
  misc_feature 1..80: note = Synthetic: >SEAC-cand-12340-12419
  source 1..80: mol_type = other DNA
ttttgtatagagaatgaagtttgtaaggtctgtggttgttggcttaacaacggttgctcttgtgataggtctagtgttca

SEQ ID NO: 8118 - DNA, 80 bp, synthetic construct
  misc_feature 1..80: note = Synthetic: >Sb512-cand-11150-11229
  source 1..80: mol_type = other DNA
actgcgttgatttacataataagattaatttgtgtaacgacgctgaagcagctcaggagatgttgttggcattgttggct

SEQ ID NO: 8119 - DNA, 80 bp, synthetic construct
  misc_feature 1..80: note = Synthetic: >BtSk_AlphaCoV-cand-11110-11189
  source 1..80: mol_type = other DNA
cgttgatttgcataataagattaatttgtgtaacgacgctgaagcagctcaggagatgttgttggcattgttggctttct

SEQ ID NO: 8120 - DNA, 80 bp, synthetic construct
  misc_feature 1..80: note = Synthetic: >Sk512R-cand-11140-11219
  source 1..80: mol_type = other DNA
cttattgcgttgatttgcataataagattaatttgtgtaacgacgctgaagcagctcaggagatgttgttggcattgttg

SEQ ID NO: 8121 - DNA, 80 bp, synthetic construct
  misc_feature 1..80: note = Synthetic: >HKU24-cand-30910-30989
  source 1..80: mol_type = other DNA
gatgatacccagggaagctcagaaatataagagaatgaaccctatgtcggcactaggtggataaaacctcgctagccagt

SEQ ID NO: 8122 - DNA, 80 bp, synthetic construct
  misc_feature 1..80: note = Synthetic: >BetaSp-cand-31500-31579
  source 1..80: mol_type = other DNA
cccagggaagctcagaaatataagagaatgaaccctatgtcggcactaggtggataaaacctcgctagccagtcgggata

SEQ ID NO: 8123 - DNA, 80 bp, synthetic construct
  misc_feature 1..80: note = Synthetic: >BetaCoV1-cand-31370-31449
  source 1..80: mol_type = other DNA
attgatgaatgatacccagggaagctcagaaatataagagaatgaaccctatgtcggcactaggtggataaaacctcgct

SEQ ID NO: 8124 - DNA, 80 bp, synthetic construct
  misc_feature 1..80: note = Synthetic: >HKU18-cand-15480-15559
  source 1..80: mol_type = other DNA
tggtacatgctggcgctgatgttatgctggatatgtgctatcgctgcccacgtgaaatcgtagatacagtgtctaaactg

SEQ ID NO: 8125 - DNA, 80 bp, synthetic construct
  misc_feature 1..80: note = Synthetic: >MsbCoV1-cand-24840-24919
  source 1..80: mol_type = other DNA
acacttataatgctactgttcttaatctcactgacgaagttaaatcacttatgtcacaagctgacgatttgacaaaaatc

SEQ ID NO: 8126 - DNA, 80 bp, synthetic construct
  misc_feature 1..80: note = Synthetic: >MbCoV1-cand-24850-24929
  source 1..80: mol_type = other DNA
cttataatgctactgttcttaatctcactgacgaagttaaatcacttatgtcacaagctgacgatttgacaaaaatcgct

SEQ ID NO: 8127 - DNA, 80 bp, synthetic construct
  misc_feature 1..80: note = Synthetic: >Sk512R-cand-1090-1169
  source 1..80: mol_type = other DNA
ccattaccatagttactcccaaagctgttccaggggctgttgtcatcactaaagctggtattggtgcagggctgaagtgt

SEQ ID NO: 8128 - DNA, 80 bp, synthetic construct
  misc_feature 1..80: note = Synthetic: >MinkCoV1-cand-1120-1199
  source 1..80: mol_type = other DNA
tcaaaaggctgtggtactgggactaagttttatgctggtgctgttctcaagtatgtcggtgatgctgaaggtgtttctgt

SEQ ID NO: 8129 - DNA, 80 bp, synthetic construct
  misc_feature 1..80: note = Synthetic: >AlphaMink-cand-1120-1199
  source 1..80: mol_type = other DNA
catcaaaaggctgtggtactgggactaagttttatgctggtgctgttctcaagtttgttggtgatgctgaaggtgtttct

SEQ ID NO: 8130 - DNA, 80 bp, synthetic construct
  misc_feature 1..80: note = Synthetic: >HKU5R-cand-24560-24639
  source 1..80: mol_type = other DNA
atatgacccctatatggaagctgcttacacttcttccctattgggcagtattgctggtgctagttggacagcaggtctgt

SEQ ID NO: 8131 - DNA, 80 bp, synthetic construct
  misc_feature 1..80: note = Synthetic: >Sb512-cand-8360-8439
  source 1..80: mol_type = other DNA
acagagaaggcgtagttgataatgctaagttgtatagtagtcttttaccacatagttattacaggctcatggacggtaat

SEQ ID NO: 8132 - DNA, 80 bp, synthetic construct
  misc_feature 1..80: note = Synthetic: >Sk512R-cand-8360-8439
  source 1..80: mol_type = other DNA
cggcgtagttgataatgctaagttgtatagtagtcttttaccacatagttattacaggctcatggacggtaatcatatcg

SEQ ID NO: 8133 - DNA, 80 bp, synthetic construct
  misc_feature 1..80: note = Synthetic: >HKU4-cand-13150-13229
  source 1..80: mol_type = other DNA
acagagtttgctagtaattcaactgttcttactcttgtggcatttgcagttgatccagctaaagcatacttggactatgt

SEQ ID NO: 8134 - DNA, 80 bp, synthetic construct
  misc_feature 1..80: note = Synthetic: >HKU4R-cand-13150-13229
  source 1..80: mol_type = other DNA
tgctagtaattcaactgttcttactcttgtggcatttgcagttgatccagctaaagcatacttggactatgttggttctg

SEQ ID NO: 8135 - DNA, 80 bp, synthetic construct
  misc_feature 1..80: note = Synthetic: >HKU5R-cand-1690-1769
  source 1..80: mol_type = other DNA
ttttcctcgaaagggctcagcatgccatcaattttgttaatgagtttgtgctcacagagactgtagtggcactactttct

SEQ ID NO: 8136 - DNA, 80 bp, synthetic construct
  misc_feature 1..80: note = Synthetic: >MsbCoV1-cand-7530-7609
  source 1..80: mol_type = other DNA
cttttatcgaagtcgataaagtatcatttgaaaatggtttctactatttgtatagtggtgaaactttttggcgctataac

SEQ ID NO: 8137 - DNA, 80 bp, synthetic construct
  misc_feature 1..80: note = Synthetic: >229ER-cand-15280-15359
  source 1..80: mol_type = other DNA
acagtactacaagccgctggtctttgcgtagtatgtggttctcaaacagttctaagatgcggtgattgtttacgcaaacc

SEQ ID NO: 8138 - DNA, 80 bp, synthetic construct
  misc_feature 1..80: note = Synthetic: >229E-cand-15300-15379
  source 1..80: mol_type = other DNA
tacaagctgctggtctttgtgtagtatgtggctctcaaacagttctaagatgcggtgattgtttacgcaaaccgatgttg

SEQ ID NO: 8139 - DNA, 80 bp, synthetic construct
  misc_feature 1..80: note = Synthetic: >Alpha2-cand-19150-19229
  source 1..80: mol_type = other DNA
acagtgacagtactttaaaaagttgttgcgtaacgtatgctgatgaccctagttctaagagtttgtgtacatacatggac

SEQ ID NO: 8140 - DNA, 80 bp, synthetic construct
  misc_feature 1..80: note = Synthetic: >MinkCoV1-cand-19190-19269
  source 1..80: mol_type = other DNA
tgacagcactttaaagagctgttgtataacgtacgctgatgatcctagttctaagagtttgtgtacatacatggacatac

SEQ ID NO: 8141 - DNA, 80 bp, synthetic construct
  misc_feature 1..80: note = Synthetic: >Sb512-cand-19560-19639
  source 1..80: mol_type = other DNA
acagttacttatgttgacaaccctagtagtaagatggtttgtacatatgttgacttgttgcttgatgactttgttaacat

SEQ ID NO: 8142 - DNA, 80 bp, synthetic construct
  misc_feature 1..80: note = Synthetic: >BtSk_AlphaCoV-cand-19510-19589
  source 1..80: mol_type = other DNA
tgtacagttacttatgttgacaaccctagtagtaagatggtttgtacatatgttgacttgttgcttgatgactttgttaa

SEQ ID NO: 8143 - DNA, 80 bp, synthetic construct
  misc_feature 1..80: note = Synthetic: >SARSRC-cand-28740-28819
  source 1..80: mol_type = other DNA
gcgctattgctgttagacagattgaaccagctggagagcaaagtttctggtaaaggccaacaacaacaaggccaaactgt

SEQ ID NO: 8144 - DNA, 80 bp, synthetic construct
  misc_feature 1..80: note = Synthetic: >SARSCoV2-cand-28930-29009
  source 1..80: mol_type = other DNA
tgctgctgcttgacagattgaaccagcttgagagcaaaatgtctggtaaaggccaacaacaacaaggccaaactgtcact

SEQ ID NO: 8145 - DNA, 80 bp, synthetic construct
  misc_feature 1..80: note = Synthetic: >BtRl_BetaCoV-cand-7170-7249
  source 1..80: mol_type = other DNA
tttacttggtctctctgctataatgcaggtgttctttggctattttgctactcatttcatcagtaattcatggcttatgt

SEQ ID NO: 8146 - DNA, 80 bp, synthetic construct
  misc_feature 1..80: note = Synthetic: >SARSRC-cand-7200-7279
  source 1..80: mol_type = other DNA
tctctctgctataatgcaggtgttctttggctactttgctagtcatttcatcagcaattcatggcttatgtggtttatca

SEQ ID NO: 8147 - DNA, 80 bp, synthetic construct
  misc_feature 1..80: note = Synthetic: >HKU5-cand-5360-5439
  source 1..80: mol_type = other DNA
acataagggtggtgattccactgaattcattgccctaataatggcatatggtgattgtacctatggtgaacctgacgatg

SEQ ID NO: 8148 - DNA, 80 bp, synthetic construct
  misc_feature 1..80: note = Synthetic: >HKU5R-cand-5360-5439
  source 1..80: mol_type = other DNA
taagggtggtgattccactgaattcattgccctaataatggcatatggtgattgtacctatggtgaacctgacgacgcct

SEQ ID NO: 8149 - DNA, 80 bp, synthetic construct
  misc_feature 1..80: note = Synthetic: >BtSk_AlphaCoV-cand-25030-25109
  source 1..80: mol_type = other DNA
tcgtctattgtttttgacttactactcatggcgttacaaaacttataaatttcttatttacaactcttccacacttatgt

SEQ ID NO: 8150 - DNA, 80 bp, synthetic construct
  misc_feature 1..80: note = Synthetic: >BetaSp-cand-29420-29499
  source 1..80: mol_type = other DNA
tagttcatctaaacattatgagtggtcaagcaacaaccccagagccagtctatagctggactgcggatgaggcaattaga

SEQ ID NO: 8151 - DNA, 80 bp, synthetic construct
  misc_feature 1..80: note = Synthetic: >BetaSp-cand-25100-25179
  source 1..80: mol_type = other DNA
gtatacgagctcactggatacactgttcaaccaatagcagatgtgtacaggcgtatacccaatctccccgattgtgagat

SEQ ID NO: 8152 - DNA, 80 bp, synthetic construct
  misc_feature 1..80: note = Synthetic: >SEAC-cand-25560-25639
  source 1..80: mol_type = other DNA
gttatagatggcaaaaacttttggaatgtcatgcctagaaatggagttccgacaggtaaaggcactccagatcaacagat

SEQ ID NO: 8153 - DNA, 80 bp, synthetic construct
  misc_feature 1..80: note = Synthetic: >HKU2-cand-25600-25679
  source 1..80: mol_type = other DNA
tttgcgtgttatagatggcaaaaacttttggaatgtcatgcctagaaatggagttccgacaggtaaaggcactccagatc

SEQ ID NO: 8154 - DNA, 80 bp, synthetic construct
  misc_feature 1..80: note = Synthetic: >HKU4R-cand-1800-1879
  source 1..80: mol_type = other DNA
atgaaaaggtgcgtgaccatttagtaaaccatggctttgtggtcacaattggtgattatattagagatgcaattaatata

SEQ ID NO: 8155 - DNA, 80 bp, synthetic construct
  misc_feature 1..80: note = Synthetic: >HKU4-cand-1810-1889
  source 1..80: mol_type = other DNA
gaaaaggtgcgtgaccatttagtaaaccatggctttgtggtcacaattggtgattatattagagatgcaattaatatagg

SEQ ID NO: 8156 - DNA, 80 bp, synthetic construct
  misc_feature 1..80: note = Synthetic: >MbCoV1-cand-16900-16979
  source 1..80: mol_type = other DNA
taatgctgacatagtagtggtggatgaagtgtccatgtgtactaattatgatttgtctgttataaaccaaagggtttcat

SEQ ID NO: 8157 - DNA, 80 bp, synthetic construct
  misc_feature 1..80: note = Synthetic: >MsbCoV1-cand-16880-16959
  source 1..80: mol_type = other DNA
tgcctgagtgtaatgctgacatagtagtggtggatgaagtgtccatgtgtattaattatgatttgtctgttataaaccaa

SEQ ID NO: 8158 - DNA, 80 bp, synthetic construct
  misc_feature 1..80: note = Synthetic: >Sk512R-cand-14160-14239
  source 1..80: mol_type = other DNA
atgaagagcaggatgacttgtatgcttatacaaagcgtaatatcatacctactatgacccagcttaacttgaagtatgcc

SEQ ID NO: 8159 - DNA, 80 bp, synthetic construct
  misc_feature 1..80: note = Synthetic: >BtSk_AlphaCoV-cand-14130-14209
  source 1..80: mol_type = other DNA
ggatgacttgtatgcttatacaaagcgtaatatcatacctactatgacccagcttaatttgaagtatgccattagtgcta

SEQ ID NO: 8160 - DNA, 80 bp, synthetic construct
  misc_feature 1..80: note = Synthetic: >MinkCoV1-cand-13950-14029
  source 1..80: mol_type = other DNA
atgacaacacggcagtatcatcagaagcatttgaaatctattgctgccacacgtaatgctacagttgtgattggcactac

SEQ ID NO: 8161 - DNA, 80 bp, synthetic construct
  misc_feature 1..80: note = Synthetic: >Alpha2-cand-13910-13989
  source 1..80: mol_type = other DNA
tactatgacaacacggcagtatcatcagaagcatttgaagtctattgccgccacacgtaacgctacagttgtgattggca

SEQ ID NO: 8162 - DNA, 80 bp, synthetic construct
  misc_feature 1..80: note = Synthetic: >MsbCoV1-cand-17440-17519
  source 1..80: mol_type = other DNA
tctgatactgctcatgcttgcaacattaatcgatttaatgttgctattactagagctaagaagggcatcttttgtgtcat

SEQ ID NO: 8163 - DNA, 80 bp, synthetic construct
  misc_feature 1..80: note = Synthetic: >HKU5R-cand-2650-2729
  source 1..80: mol_type = other DNA
tagttgttggtcagttagaacctactaaggagcatagtcccgaactagtcgtcggtgattatgtgatcattagtaataaa

SEQ ID NO: 8164 - DNA, 80 bp, synthetic construct
  misc_feature 1..80: note = Synthetic: >Alpha2-cand-25210-25289
  source 1..80: mol_type = other DNA
tttcaccagagcctgttgttggtgtttacaatgcagcgttttctcaagacattgtaaacgaaattaaactagacgatcat

SEQ ID NO: 8165 - DNA, 80 bp, synthetic construct
  misc_feature 1..80: note = Synthetic: >AlphaMink-cand-25220-25299
  source 1..80: mol_type = other DNA
ttcaccagagcctgttgttggtgtttacaatgcagcgttttctcaagacattgtaaacgaaattaaactagacgatcata

SEQ ID NO: 8166 - DNA, 80 bp, synthetic construct
  misc_feature 1..80: note = Synthetic: >SARSRC-cand-12280-12359
  source 1..80: mol_type = other DNA
atgcttaggaagctagataatgatgcacttaacaacattatcaacaatgcacgtgatggttgtgtaccactcaacatcat

SEQ ID NO: 8167 - DNA, 80 bp, synthetic construct
  misc_feature 1..80: note = Synthetic: >BM48_31-cand-12190-12269
  source 1..80: mol_type = other DNA
tcactatgcttagaaagcttgataatgatgctttgaacaatattattaacaatgcacgtgatggttgtgtaccactcaac

SEQ ID NO: 8168 - DNA, 80 bp, synthetic construct
  misc_feature 1..80: note = Synthetic: >MbCoV1-cand-3210-3289
  source 1..80: mol_type = other DNA
atgatttctcaatggccagtgtttgatccatcagcactacaacttttagttgctgacttgggtgtcaactgtgatttcaa

SEQ ID NO: 8169 - DNA, 80 bp, synthetic construct
  misc_feature 1..80: note = Synthetic: >MsbCoV1-cand-3200-3279
  source 1..80: mol_type = other DNA
atttctcaatggccagtgtttgatccatcagcactacaacttttagttgctgatttgggtgtcaattgtgacttcaatgg

SEQ ID NO: 8170 - DNA, 80 bp, synthetic construct
  misc_feature 1..80: note = Synthetic: >HKU17-cand-14350-14429
  source 1..80: mol_type = other DNA
tgcaatgaggataatgttgaaaaactattcatctcaggcacagcgatttattgtgaaaaccacaaacctacgctgtgcat

SEQ ID NO: 8171 - DNA, 80 bp, synthetic construct
  misc_feature 1..80: note = Synthetic: >HKU20_FJ376622-cand-14510-14589
  source 1..80: mol_type = other DNA
ttgataattgcaatgaagacaatgttgaaaaactttacatttcaggcacagcgatttattgtgaaaaccacaaacctacg

SEQ ID NO: 8172 - DNA, 80 bp, synthetic construct
  misc_feature 1..80: note = Synthetic: >HKU15-cand-14340-14419
  source 1..80: mol_type = other DNA
tgcaatgaggacaatgttgaaaaacttttcatttctggcactgcgatttattgtgagaatcacaaacccacgctgtgcat

SEQ ID NO: 8173 - DNA, 80 bp, synthetic construct
  misc_feature 1..80: note = Synthetic: >Delta-cand-15840-15919
  source 1..80: mol_type = other DNA
caatgaggacaatgttgaaaaacttttcatttctggcactgcgatttattgtgagaatcacaaacccacgctgtgcatac

SEQ ID NO: 8174 - DNA, 80 bp, synthetic construct
  misc_feature 1..80: note = Synthetic: >HKU15-cand-16180-16259
  source 1..80: mol_type = other DNA
atgcatatcataatatgttcctaacacgtgacgcgtgtcgcacctatgttcagagttggatcggcatagatgttgaagca

SEQ ID NO: 8175 - DNA, 80 bp, synthetic construct
  misc_feature 1..80: note = Synthetic: >Delta-cand-17790-17869
  source 1..80: mol_type = other DNA
taaaattgatgcatatcataatatgttcctaacacgtgacgcgtgtcgcacctatgttcagagttggatcggcatagatg

SEQ ID NO: 8176 - DNA, 80 bp, synthetic construct
  misc_feature 1..80: note = Synthetic: >HKU4-cand-11070-11149
  source 1..80: mol_type = other DNA
gggtgttgtaatgcagagtggtgttaaacgtatatcatatggctttatacactggttgatttcaacctttgtattggcat

SEQ ID NO: 8177 - DNA, 80 bp, synthetic construct
  misc_feature 1..80: note = Synthetic: >HKU4R-cand-11070-11149
  source 1..80: mol_type = other DNA
taatgcagagtggtgttaaacgtatatcatatggctttatacactggtcgatttcaacccttgtattggcatatgttagc

SEQ ID NO: 8178 - DNA, 80 bp, synthetic construct
  misc_feature 1..80: note = Synthetic: >HghCoV1-cand-19250-19329
  source 1..80: mol_type = other DNA
atgccatggcttctgattttagtgatggtttgtgtttattttggaactgtaatgttccattatatccaaataatgctgta

SEQ ID NO: 8179 - DNA, 80 bp, synthetic construct
  misc_feature 1..80: note = Synthetic: >HKU4R-cand-10670-10749
  source 1..80: mol_type = other DNA
tcaaatggtacacatactggtagttcctttgatggtgttatgtatggtgcttttgaagataaacaaacacaccagttaca

SEQ ID NO: 8180 - DNA, 80 bp, synthetic construct
  misc_feature 1..80: note = Synthetic: >HghCoV1-cand-19890-19969
  source 1..80: mol_type = other DNA
gttatatgcaaaaagagctgttcgctcgcatcctgatttcaaattgctaaagaatttgcaagctgatgtttgctacaaac

SEQ ID NO: 8181 - DNA, 80 bp, synthetic construct
  misc_feature 1..80: note = Synthetic: >HKU31-cand-19960-20039
  source 1..80: mol_type = other DNA
ttatatgcaaaaagagctgtacgctcgcatccagatttcaaattgctaaagaatttgcaagctgatgtttgctacaaaca

SEQ ID NO: 8182 - DNA, 80 bp, synthetic construct
  misc_feature 1..80: note = Synthetic: >BtRf_AlphaCoV-cand-19370-19449
  source 1..80: mol_type = other DNA
gttgcagtctgctgagtggaaatgtggttacagtatgcctagcctttacaaaatacagaatatgtgtatggatgcatgta

SEQ ID NO: 8183 - DNA, 80 bp, synthetic construct
  misc_feature 1..80: note = Synthetic: >HKU2R-cand-19410-19489
  source 1..80: mol_type = other DNA
tccgctgagtggaagtgtggttacagcatgccgagcctctataaaatacagaatatgtgtatggatgcatgtaatttgta

SEQ ID NO: 8184 - DNA, 80 bp, synthetic construct
  misc_feature 1..80: note = Synthetic: >HghCoV1-cand-17650-17729
  source 1..80: mol_type = other DNA
ttaggaccagacatctttttaagtacatgttatcgttgtcctaaagaaattgtaaccactgttagtgctctagtttacaa

SEQ ID NO: 8185 - DNA, 80 bp, synthetic construct
  misc_feature 1..80: note = Synthetic: >BtSk_AlphaCoV-cand-10230-10309
  source 1..80: mol_type = other DNA
gttgtttcttattcttgtttttgtcagaaatgttgaaccactcaaatttgttttggatcaacccaggttatattacacca

SEQ ID NO: 8186 - DNA, 80 bp, synthetic construct
  misc_feature 1..80: note = Synthetic: >AlphaSp-cand-10280-10359
  source 1..80: mol_type = other DNA
tattcttgtttttgtcagaaatgttgaaccactcaaatttgttttggatcaacccaggttatattacaccagtttttcta

SEQ ID NO: 8187 - DNA, 80 bp, synthetic construct
  misc_feature 1..80: note = Synthetic: >MsbCoV1-cand-2640-2719
  source 1..80: mol_type = other DNA
tagtgataaaagacgtcttttatcgcatctatgatgctgctgtagacacattcaatgtcgctgttgaagcaggtctaaac

SEQ ID NO: 8188 - DNA, 80 bp, synthetic construct
  misc_feature 1..80: note = Synthetic: >MbCoV1-cand-2650-2729
  source 1..80: mol_type = other DNA
ttctagtgatcaaagatatcttttaccgcatctatgatgctgctgtagacacattcaatgtcgctgttgaagcaggtcta

SEQ ID NO: 8189 - DNA, 80 bp, synthetic construct
  misc_feature 1..80: note = Synthetic: >HghCoV1-cand-3080-3159
  source 1..80: mol_type = other DNA
tatgtttttaatttagatggtgatgaagtttggaaatctactatgattttctccgttcatccagttgattgtgatgatga

SEQ ID NO: 8190 - DNA, 80 bp, synthetic construct
  misc_feature 1..80: note = Synthetic: >HKU23-cand-22260-22339
  source 1..80: mol_type = other DNA
gtttttatttccgtaagtcttgtcaaaatttagattgtaattgtttggggttttatgaatcttcatttgaagaagactaa

SEQ ID NO: 8191 - DNA, 80 bp, synthetic construct
  misc_feature 1..80: note = Synthetic: >Sb512-cand-17860-17939
  source 1..80: mol_type = other DNA
tctcttgctttagacatgcacttggcagtgattatatatataactgctactgcattgacattcagcaatggggttacaca

SEQ ID NO: 8192 - DNA, 80 bp, synthetic construct
  misc_feature 1..80: note = Synthetic: >MbCoV1-cand-5210-5289
  source 1..80: mol_type = other DNA
tgaacctgttttaaaggttgctggtgtgtcttattataatattgaagacagttttgctgttggtgctgacaatattgtca

SEQ ID NO: 8193 - DNA, 80 bp, synthetic construct
  misc_feature 1..80: note = Synthetic: >MsbCoV1-cand-5210-5289
  source 1..80: mol_type = other DNA
ttaaaggttgctggtgtgtcttattataatattgaagacagttttgctgttggtgctgacaatattgtcattcttactaa

SEQ ID NO: 8194 - DNA, 80 bp, synthetic construct
  misc_feature 1..80: note = Synthetic: >HKU15-cand-17950-18029
  source 1..80: mol_type = other DNA
ttgtttgtacagcactgaccctaaatggcctcgccattgacggtgaagagctatacatctatgtacgctataacaatcaa

SEQ ID NO: 8195 - DNA, 80 bp, synthetic construct
  misc_feature 1..80: note = Synthetic: >HKU17-cand-17960-18039
  source 1..80: mol_type = other DNA
ttgtttgtacagcactgaccctaaatggccttgccattgatggtgatgagctttacatttacgtacgctataacaaccaa

SEQ ID NO: 8196 - DNA, 80 bp, synthetic construct
  misc_feature 1..80: note = Synthetic: >NC_010800-cand-0-79
  source 1..80: mol_type = other DNA
aagatagatattaatatatatctatcatactagccttgtgctagatttccaacttaacaaaacggacttaaatacctaca

SEQ ID NO: 8197 - DNA, 80 bp, synthetic construct
  misc_feature 1..80: note = Synthetic: >AF208067-cand-16080-16159
  source 1..80: mol_type = other DNA
gttgatgatttattaaagactgatagcgttctcttgatagagcgtttcgtaagtcttgcaattgatgcttatcctttagt

SEQ ID NO: 8198 - DNA, 80 bp, synthetic construct
  misc_feature 1..80: note = Synthetic: >MT114541-cand-26320-26399
  source 1..80: mol_type = other DNA
ttagatccattcagttatacagaaggactaagtcttggtggtctttcaaccctgaaactaacgcaattctttgcgttagt

SEQ ID NO: 8199 - DNA, 80 bp, synthetic construct
  misc_feature 1..80: note = Synthetic: >MK957245-cand-15000-15079
  source 1..80: mol_type = other DNA
agagctttctcagaatatgcttatggactactcttttgtaatggatatagacaagggtagtaaattttgggaacaggagt

SEQ ID NO: 8200 - DNA, 80 bp, synthetic construct
  misc_feature 1..80: note = Synthetic: >MT114542-cand-24700-24779
  source 1..80: mol_type = other DNA
actcttaaagtagagtttaagactggtaaactacttgtgtgtataggttttggtgacacacttcttgaggctaaggacaa

SEQ ID NO: 8201 - DNA, 80 bp, synthetic construct
  misc_feature 1..80: note = Synthetic: >MT114540-cand-27600-27679
  source 1..80: mol_type = other DNA
actgcaaaggaagatggtgatcagattgaagtcacattcacacacaaataccacttgcccaaggatgatcctaagacagg

SEQ ID NO: 8202 - DNA, 80 bp, synthetic construct
  misc_feature 1..80: note = Synthetic: >MN199464-cand-27250-27329
  source 1..80: mol_type = other DNA
tctgctttattctttgttatatcgtagaagtttattaaaggttaaggaagataggcatgtagcttagcacctacatgtct

SEQ ID NO: 8203 - DNA, 80 bp, synthetic construct
  misc_feature 1..80: note = Synthetic: >MT114543-cand-1040-1119
  source 1..80: mol_type = other DNA
tatgagcgcaggtaagggagtcaagttctttgccaattgtgttctccaatatgctggtgatgttgaaaatgtctctatct

SEQ ID NO: 8204 - DNA, 80 bp, synthetic construct
  misc_feature 1..80: note = Synthetic: >NC_028806-cand-1150-1229
  source 1..80: mol_type = other DNA
tatgagcgcaggtaagggagttaagttctttgccaattgtgttcttcaatatgctggtgacgttgaaggtgtctctatat

SEQ ID NO: 8205 - DNA, 80 bp, synthetic construct
  misc_feature 1..80: note = Synthetic: >LC088095-cand-23440-23519
  source 1..80: mol_type = other DNA
tgaacttaaacaatctgagtctgttttgttgcaggacattgaggggggcattgttgttgaccacaatactggctcaatct

SEQ ID NO: 8206 - DNA, 80 bp, synthetic construct
  misc_feature 1..80: note = Synthetic: >MN128087-cand-14060-14139
  source 1..80: mol_type = other DNA
agcgcgtacagtggcaggtgtgtcaattctttctactatgactaatagacagtttcatcagaaggttctcaagtctatag

SEQ ID NO: 8207 - DNA, 80 bp, synthetic construct
  misc_feature 1..80: note = Synthetic: >MK953937-cand-25030-25109
  source 1..80: mol_type = other DNA
agcggaaataagaaaaggtttgctacgtttgtctatgcaaaacaatcagtagatactggtgagctagagagtgtagcaac

SEQ ID NO: 8208 - DNA, 80 bp, synthetic construct
  misc_feature 1..80: note = Synthetic: >PDF-2386-cand-19760-19839
  source 1..80: mol_type = other DNA
ctactataggtgtgtgtgcgatgactgacatcgcaaagaagcctactgaaaaccaatgctcttcattaacaattctattt

SEQ ID NO: 8209 - DNA, 80 bp, synthetic construct
  misc_feature 1..80: note = Synthetic: >PRD-0038-cand-19750-19829
  source 1..80: mol_type = other DNA
gcattcatgtctactataggtgtgtgtgcgatgactgacatcgcaaagaagcctactgaaaaccaatgctcttcattaac

SEQ ID NO: 8210 - DNA, 80 bp, synthetic construct
  misc_feature 1..80: note = Synthetic: >PDF-2386-cand-17760-17839
  source 1..80: mol_type = other DNA
aaataggtttaatgtcgctataaccagagctaaaattggtattttatgcataatgtctgatagagatctttatgataaac

SEQ ID NO: 8211 - DNA, 80 bp, synthetic construct
  misc_feature 1..80: note = Synthetic: >PRD-0038-cand-17750-17829
  source 1..80: mol_type = other DNA
cctgtaatgtaaacaggtttaatgtcgctataaccagagctaaaattggtattttatgcataatgtctgatagagatctt

SEQ ID NO: 8212 - DNA, 80 bp, synthetic construct
  misc_feature 1..80: note = Synthetic: >SBB-120-cand-6490-6569
  source 1..80: mol_type = other DNA
ggcttgtatgttgtacttcgtggcacagtatgttaattcattcggtgttatgttgggtttgcaagataatgtaactattt

SEQ ID NO: 8213 - DNA, 80 bp, synthetic construct
  misc_feature 1..80: note = Synthetic: >SBB-024-cand-6490-6569
  source 1..80: mol_type = other DNA
agcttgcatgttgtatttcgtagcacagtatgtcaattcattcggtgttatgttgggtctgcaagataatgtaactattt

SEQ ID NO: 8214 - DNA, 80 bp, synthetic construct
  misc_feature 1..80: note = Synthetic: >SBB-788-cand-16160-16239
  source 1..80: mol_type = other DNA
gccccctctaaatagaaactatgtatttacggggtttcacattactaagaatagtaaggtgcaactaggtgaatatattt

SEQ ID NO: 8215 - DNA, 80 bp, synthetic construct
  misc_feature 1..80: note = Synthetic: >SBB-747-cand-16150-16229
  source 1..80: mol_type = other DNA
gtaaaactcggccccctctaaatagaaattatgtatttacggggtttcacattactaagaatagtaaggtgcaactaggt

SEQ ID NO: 8216 - DNA, 80 bp, synthetic construct
  misc_feature 1..80: note = Synthetic: >PRD-0038-cand-6320-6399
  source 1..80: mol_type = other DNA
accgaagctgtaggtaatgtcatactaaaaccatcagctgaaggaatcaaggttgtgccagaactaagtcatgaggattt

SEQ ID NO: 8217 - DNA, 80 bp, synthetic construct
  misc_feature 1..80: note = Synthetic: >SBB-130-cand-9700-9779
  source 1..80: mol_type = other DNA
tgttctagcattcttgtatggtgctttacttaatggcgtcacatggtggttgaattcagaccgtgtctctgttgagtctt

SEQ ID NO: 8218 - DNA, 80 bp, synthetic construct
  misc_feature 1..80: note = Synthetic: >SBB-053-cand-9710-9789
  source 1..80: mol_type = other DNA
gcattcttgtatggtgctttacttaatggcgtcacatggtggttgaattcagaccgtgtctctgttgagtcttttaatga

SEQ ID NO: 8219 - DNA, 80 bp, synthetic construct
  misc_feature 1..80: note = Synthetic: >SBB-024-cand-11670-11749
  source 1..80: mol_type = other DNA
atgaaattatgccaggcaaactcaaacaacgcgctgttaaggcagaaggtgatggctttgtgtctgatggtaaggctctt

SEQ ID NO: 8220 - DNA, 80 bp, synthetic construct
  misc_feature 1..80: note = Synthetic: >SBB-122-cand-11680-11759
  source 1..80: mol_type = other DNA
gccgggcaaacttaaacaacgcgctgttaaggcagaaggtgatggctttgtgtctgatggtaaggctctttacaataatg

SEQ ID NO: 8221 - DNA, 80 bp, synthetic construct
  misc_feature 1..80: note = Synthetic: >SBB-041-cand-6430-6509
  source 1..80: mol_type = other DNA
aagagttatgccattgttttatatggctttcttgcttatttttggtggtgttgttacacgagcttgcatgttgtatttcg

SEQ ID NO: 8222 - DNA, 80 bp, synthetic construct
  misc_feature 1..80: note = Synthetic: >SBB-130-cand-6420-6499
  source 1..80: mol_type = other DNA
tgtttaaaagagttatgccattgttttatatggctttcttgcttatttttggtggtgttgttacacgagcttgcatgttg

SEQ ID NO: 8223 - DNA, 80 bp, synthetic construct
  misc_feature 1..80: note = Synthetic: >PDF-2386-cand-3600-3679
  source 1..80: mol_type = other DNA
tgtcttctggcatcttcggtgttaagccacttcattctttgcaatcatgtatgagagtcgtcaaaagtaaggtctatctt

SEQ ID NO: 8224 - DNA, 80 bp, synthetic construct
  misc_feature 1..80: note = Synthetic: >PRD-0038-cand-18070-18149
  source 1..80: mol_type = other DNA
aagatgaattatcaagttaatggttaccctaacatgtttattacccgtgacgaagccatcaagcacgtacgtgcctggat

SEQ ID NO: 8225 - DNA, 80 bp, synthetic construct
  misc_feature 1..80: note = Synthetic: >PDF-2386-cand-18080-18159
  source 1..80: mol_type = other DNA
atcaagttaatggttaccctaacatgtttatcacccgtgacgaagccatcaagcacgtacgtgcctggattggcttcgat

SEQ ID NO: 8226 - DNA, 80 bp, synthetic construct
  misc_feature 1..80: note = Synthetic: >PRD-0038-cand-16390-16469
  source 1..80: mol_type = other DNA
aatgtaacagactttaatgctatagccacgtgtgactggacaaatgccggtgattacatacttgctaacacttgcactga

SEQ ID NO: 8227 - DNA, 80 bp, synthetic construct
  misc_feature 1..80: note = Synthetic: >PDF-2386-cand-16400-16479
  source 1..80: mol_type = other DNA
actttaatgctatagccacgtgtgactggacaaatgccggtgattacatacttgctaacacttgcactgagaggttaaaa

SEQ ID NO: 8228 - DNA, 80 bp, synthetic construct
  misc_feature 1..80: note = Synthetic: >PDF-2386-cand-5680-5759
  source 1..80: mol_type = other DNA
aatgtcagagtacaagggtcctgtaacagatgttttttataaagaaacatcttacagtacaactattagacccgtgacat

SEQ ID NO: 8229 - DNA, 80 bp, synthetic construct
  misc_feature 1..80: note = Synthetic: >PDF-2386-cand-10800-10879
  source 1..80: mol_type = other DNA
aatgttctggtgtaaccttccaaggtaaatttaagaaagttgttaaaggcactcatcattggttgttgctgactttctta

SEQ ID NO: 8230 - DNA, 80 bp, synthetic construct
  misc_feature 1..80: note = Synthetic: >PDF-2386-cand-5360-5439
  source 1..80: mol_type = other DNA
aatgttgtgtgtaaacattgtggacaaaggtctaccacactacagggtgttgaggctgttatgtacatgggaacactttc

SEQ ID NO: 8231 - DNA, 80 bp, synthetic construct
  misc_feature 1..80: note = Synthetic: >PDF-2370-cand-2240-2319
  source 1..80: mol_type = other DNA
ggcaaaattcaggtacttaatgacaacttgcaacaatttgtggctggttttattaatactgttaacaaagcacttgaatt

SEQ ID NO: 8232 - DNA, 80 bp, synthetic construct
  misc_feature 1..80: note = Synthetic: >PDF-2386-cand-20400-20479
  source 1..80: mol_type = other DNA
tttgtcagtagtttctaaagtagtcaatgtcacaattgactatgcagaagtctcatttatgctttggtgtaaagatggac

SEQ ID NO: 8233 - DNA, 80 bp, synthetic construct
  misc_feature 1..80: note = Synthetic: >SBB-122-cand-20320-20399
  source 1..80: mol_type = other DNA
tcattaaaggatagagacgttaatgatgttgttttaagccttataaagagtggtagacttcttattagaaacaatggtgt

SEQ ID NO: 8234 - DNA, 80 bp, synthetic construct
  misc_feature 1..80: note = Synthetic: >SBB-053-cand-20310-20389
  source 1..80: mol_type = other DNA
tgctgttgtagcattaaaagatagagacattaatgatgttgttttaagccttataaagagtggtagacttcttattagaa

SEQ ID NO: 8235 - DNA, 80 bp, synthetic construct
  misc_feature 1..80: note = Synthetic: >SBB-788-cand-3520-3599
  source 1..80: mol_type = other DNA
acacccccttctacagcgcagcctatcgtggattgggctgaggctgtagaggtgcaagaatctgtggtacaacagactca

SEQ ID NO: 8236 - DNA, 80 bp, synthetic construct
  misc_feature 1..80: note = Synthetic: >SBB-747-cand-3510-3589
  source 1..80: mol_type = other DNA
tgacgatcctacacctacccctacagcgcagcctatcgtggattgggctgaggctgtagaggtgcaagaatctgtggtac

SEQ ID NO: 8237 - DNA, 80 bp, synthetic construct
  misc_feature 1..80: note = Synthetic: >SBB-726-cand-3520-3599
  source 1..80: mol_type = other DNA
acacctacccctacagcgcagcctatcgtggattgggctgaggctgtagaggtgcaagaatctgtggtacaacaaactca

SEQ ID NO: 8238 - DNA, 80 bp, synthetic construct
  misc_feature 1..80: note = Synthetic: >SBB-130-cand-12870-12949
  source 1..80: mol_type = other DNA
agaaaatgaggacatacacagagtttatgcacacttgggcaaaacaattgctaacgctatgcttaagtgtgtacgtctgt

SEQ ID NO: 8239 - DNA, 80 bp, synthetic construct
  misc_feature 1..80: note = Synthetic: >SBB-122-cand-12880-12959
  source 1..80: mol_type = other DNA
gaggacatacacagagtttatgcacacttgggtaaaacaattgccaacgctatgcttaagtgtgtacgtctgtgtgatgc

SEQ ID NO: 8240 - DNA, 80 bp, synthetic construct
  misc_feature 1..80: note = Synthetic: >PDF-2386-cand-16640-16719
  source 1..80: mol_type = other DNA
acagagttaccaaaaacagtaaagtacagattggagagtacacctttgaaaaaggtgattatggagatgctgtagtctac

SEQ ID NO: 8241 - DNA, 80 bp, synthetic construct
  misc_feature 1..80: note = Synthetic: >PRD-0038-cand-16630-16709
  source 1..80: mol_type = other DNA
tttactggctacagagttaccaaaaacagtaaagtacagattggagagtacacctttgaaaaaggtgattatggagatgc

SEQ ID NO: 8242 - DNA, 80 bp, synthetic construct
  misc_feature 1..80: note = Synthetic: >SBB-130-cand-8180-8259
  source 1..80: mol_type = other DNA
catcattattacagtacatctgacggtggctatgtacgcttacctgaggtattggctagtggttttggttttagggctgt

SEQ ID NO: 8243 - DNA, 80 bp, synthetic construct
  misc_feature 1..80: note = Synthetic: >SBB-726-cand-19700-19779
  source 1..80: mol_type = other DNA
tttaggtcttgagcatattgcatatggtcaatttgatggtaccataggcggtttacatttgttaattggtgcagtgcggc

SEQ ID NO: 8244 - DNA, 80 bp, synthetic construct
  misc_feature 1..80: note = Synthetic: >SBB-788-cand-19690-19769
  source 1..80: mol_type = other DNA
acttacatgatttaggtcttgagcatattgcatatggtcaatttgatggtaccataggcggtttacatttgttaattggt

SEQ ID NO: 8245 - DNA, 80 bp, synthetic construct
  misc_feature 1..80: note = Synthetic: >SBB-788-cand-18410-18489
  source 1..80: mol_type = other DNA
cgctgtcaaagcattacatacagatactatttatgacattggcaatcctaaggctattaaagtctatggtgtcagtgtaa

SEQ ID NO: 8246 - DNA, 80 bp, synthetic construct
  misc_feature 1..80: note = Synthetic: >SBB-747-cand-18400-18479
  source 1..80: mol_type = other DNA
cgttgaaagccgctgtcaaagcattacatacggatactatttatgacattggcaatcctaaggctattaaagtctatggt

SEQ ID NO: 8247 - DNA, 80 bp, synthetic construct
  misc_feature 1..80: note = Synthetic: >SBB-130-cand-6660-6739
  source 1..80: mol_type = other DNA
gttgtgacaaaccttcttgtgttgcttgtaccaagagtgcacgtttgacacgcatacctatgcagactattgtcaatggt

SEQ ID NO: 8248 - DNA, 80 bp, synthetic construct
  misc_feature 1..80: note = Synthetic: >SBB-053-cand-6670-6749
  source 1..80: mol_type = other DNA
caaaccttcttgtgttgcttgtaccaagagtgcacgtttgacacgcatacctatgcagaccattgtcaatggttctaata

SEQ ID NO: 8249 - DNA, 80 bp, synthetic construct
  misc_feature 1..80: note = Synthetic: >SBB-024-cand-25550-25629
  source 1..80: mol_type = other DNA
accctgttatggttactgatgacacaccattctggcgtgtcatgcctaacaatgctgtccctactggaactggtacaaga

SEQ ID NO: 8250 - DNA, 80 bp, synthetic construct
  misc_feature 1..80: note = Synthetic: >SBB-122-cand-25540-25619
  source 1..80: mol_type = other DNA
ccctgttatggttactgatgacacaccattttggcgtgccatgcctaacaatgctgtccctactggaactggtacaagag

SEQ ID NO: 8251 - DNA, 80 bp, synthetic construct
  misc_feature 1..80: note = Synthetic: >SBB-120-cand-25570-25649
  source 1..80: mol_type = other DNA
atggttactgatgacacaccattttggcgtgccatgcctagcaatgctgtccctactggaactggtaataaggaccaaca

SEQ ID NO: 8252 - DNA, 80 bp, synthetic construct
  misc_feature 1..80: note = Synthetic: >PRD-0038-cand-18710-18789
  source 1..80: mol_type = other DNA
caatcatgactagatgtttggccattcatgagtgctttgtaaagcgtgttgattggtctgttgaataccctattataggt

SEQ ID NO: 8253 - DNA, 80 bp, synthetic construct
  misc_feature 1..80: note = Synthetic: >PDF-2386-cand-18720-18799
  source 1..80: mol_type = other DNA
tagatgtttggccattcatgagtgctttgtaaagcgtgttgattggtctgttgaataccctattataggtgatgaactta

SEQ ID NO: 8254 - DNA, 80 bp, synthetic construct
  misc_feature 1..80: note = Synthetic: >SBB-010-cand-11640-11719
  source 1..80: mol_type = other DNA
attgtgaacgcattgttaaattgcaaaacaatgaaattatgccaggcaaactcaaacaacgcgctgttaaggcagaaggt

SEQ ID NO: 8255 - DNA, 80 bp, synthetic construct
  misc_feature 1..80: note = Synthetic: >SBB-041-cand-11630-11709
  source 1..80: mol_type = other DNA
ttgtttttgaattgtgaacgcattgttaaattgcaaaacaatgaaattatgccaggcaaactcaaacaacgcgctgttaa

SEQ ID NO: 8256 - DNA, 80 bp, synthetic construct
  misc_feature 1..80: note = Synthetic: >SBB-130-cand-2390-2469
  source 1..80: mol_type = other DNA
aaggacacagtttcttgtcctacattcttgagagagattgatggtggtggtatttggaacactttcatagcaactattaa

SEQ ID NO: 8257 - DNA, 80 bp, synthetic construct
  misc_feature 1..80: note = Synthetic: >GCS-227-cand-28290-28369
  source 1..80: mol_type = other DNA
aaggaggcaaaccacgccgtgttttcaccatggattacacaggcttttctccagcagcttccttgcagtggtacaatcag

SEQ ID NO: 8258 - DNA, 80 bp, synthetic construct
  misc_feature 1..80: note = Synthetic: >GCS-211-cand-28290-28369
  source 1..80: mol_type = other DNA
taaaggaggcaaaccacgccgtgttttcaccatggattacacaggcttttctccagcagcttccttgcagtggtacaatc

SEQ ID NO: 8259 - DNA, 80 bp, synthetic construct
  misc_feature 1..80: note = Synthetic: >GCS-211-cand-13110-13189
  source 1..80: mol_type = other DNA
aaggatggccgagcatgttatggtaacatcagtcgccaaaatctcactaagtatactatgatggacttgtgtttcgcact

SEQ ID NO: 8260 - DNA, 80 bp, synthetic construct
  misc_feature 1..80: note = Synthetic: >GCS-227-cand-13110-13189
  source 1..80: mol_type = other DNA
ggatggccgagcatgttatggtaacatcagtcgccaaaatcttactaagtatactatgatggacttgtgctttgcacttc

SEQ ID NO: 8261 - DNA, 80 bp, synthetic construct
  misc_feature 1..80: note = Synthetic: >GCS-227-cand-21890-21969
  source 1..80: mol_type = other DNA
tcggtttgtttttatttgtggcaatagtagtgaacccagtgacaagactttctttccttttgggaagcaagacacccctt

SEQ ID NO: 8262 - DNA, 80 bp, synthetic construct
  misc_feature 1..80: note = Synthetic: >GCS-211-cand-21900-21979
  source 1..80: mol_type = other DNA
tttttatttgtggcaatagtagtgaacccagtgacaagactttctttccttttgggaagcaagacacccctttttactgc

SEQ ID NO: 8263 - DNA, 80 bp, synthetic construct
  misc_feature 1..80: note = Synthetic: >GCS-227-cand-570-649
  source 1..80: mol_type = other DNA
ctaactttgtgttagaggaatttgacatcatttttggtcaccgtggtggcactcctagtgttaacactgaccaatacctt

SEQ ID NO: 8264 - DNA, 80 bp, synthetic construct
  misc_feature 1..80: note = Synthetic: >GCS-211-cand-570-649
  source 1..80: mol_type = other DNA
ctctaactttgtgttagaggaatttgacatcatttttggtcaccgtggtggcactcctagtgttaacactgaccaatacc

SEQ ID NO: 8265 - DNA, 80 bp, synthetic construct
  misc_feature 1..80: note = Synthetic: >GCS-227-cand-26770-26849
  source 1..80: mol_type = other DNA
ctgacgcaccttacagagaaaggattccaggcgtggtttgggtttccactagtggagctgacctcaaacccaccaacctt

SEQ ID NO: 8266 - DNA, 80 bp, synthetic construct
  misc_feature 1..80: note = Synthetic: >GCS-211-cand-26770-26849
  source 1..80: mol_type = other DNA
tgctgacgcaccttacagagaaaggattccaggcgtggtttgggtttccactagtggagctgacctcaaacctaccaacc

SEQ ID NO: 8267 - DNA, 80 bp, synthetic construct
  misc_feature 1..80: note = Synthetic: >SBB-130-cand-16970-17049
  source 1..80: mol_type = other DNA
aaggttgtggcctctttaaagattgttataggaaaccagatctgttaccaccctctcatgccaccacgtttatgtcactt

SEQ ID NO: 8268 - DNA, 80 bp, synthetic construct
  misc_feature 1..80: note = Synthetic: >SBB-010-cand-16970-17049
  source 1..80: mol_type = other DNA
gagaaggttgtggcctctttaaagattgttataggaaaccagatctgttaccaccctctcatgccaccacgtttatgtca

SEQ ID NO: 8269 - DNA, 80 bp, synthetic construct
  misc_feature 1..80: note = Synthetic: >GCS-211-cand-18630-18709
  source 1..80: mol_type = other DNA
gtgaacaaccatgcattccacacaccagcttttgataagcgagcttttgctaagctcaaacaaatgccattcttttactt

SEQ ID NO: 8270 - DNA, 80 bp, synthetic construct
  misc_feature 1..80: note = Synthetic: >GCS-227-cand-18620-18699
  source 1..80: mol_type = other DNA
ccctttatgtgaacaaccatgcattccacacaccagcttttgataagcgagcttttgctaagctcaaacaaatgccattc

SEQ ID NO: 8271 - DNA, 80 bp, synthetic construct
  misc_feature 1..80: note = Synthetic: >GCS-227-cand-16860-16939
  source 1..80: mol_type = other DNA
ctataatgtcgttacacagcgtatgtgttgtcttggtccagacgtgttcttacacaagtgctataggtgtccagctgaaa

SEQ ID NO: 8272 - DNA, 80 bp, synthetic construct
  misc_feature 1..80: note = Synthetic: >GCS-211-cand-16870-16949
  source 1..80: mol_type = other DNA
tcgttacacagcgtatgtgttgtcttggtccagacgtgttcttacacaagtgctataggtgtccagctgaaattgttgac

SEQ ID NO: 8273 - DNA, 80 bp, synthetic construct
  misc_feature 1..80: note = Synthetic: >SBB-120-cand-18430-18509
  source 1..80: mol_type = other DNA
gactttgtacaagctggctttacactctgggttcccaattcttttgatttgtttaacctttggcaaacttttaaggatag

SEQ ID NO: 8274 - DNA, 80 bp, synthetic construct
  misc_feature 1..80: note = Synthetic: >SBB-024-cand-1190-1269
  source 1..80: mol_type = other DNA
ctcaaatttgttgacgctgttgacggttttctgttgtggcgcgtcattaaattgcagagtgttaatgggtttgttgcttc

SEQ ID NO: 8275 - DNA, 80 bp, synthetic construct
  misc_feature 1..80: note = Synthetic: >SBB-747-cand-29000-29079
  source 1..80: mol_type = other DNA
gagcgccttagggaagagctaatcagtaatacattatgcaaaattttaagcaacccctaatcatagtatgctttatagag

SEQ ID NO: 8276 - DNA, 80 bp, synthetic construct
  misc_feature 1..80: note = Synthetic: >SBB-797-cand-29010-29089
  source 1..80: mol_type = other DNA
ttttagagcgccctagggaagagctaatcagtaatacattatgcaaaattttaagcaacccctaatcatagtatgcttta

SEQ ID NO: 8277 - DNA, 80 bp, synthetic construct
  misc_feature 1..80: note = Synthetic: >GCS-211-cand-12480-12559
  source 1..80: mol_type = other DNA
tgccaaggcatatcttgatgcagtaaagagtggtgttaaaccactgtctaactgcgtcaaaatgttgtccaatggttcag

SEQ ID NO: 8278 - DNA, 80 bp, synthetic construct
  misc_feature 1..80: note = Synthetic: >GCS-227-cand-12470-12549
  source 1..80: mol_type = other DNA
tgtgaccctgccaaggcatatcttgatgcagtaaagagtggtgttaaaccactgtctaactgcgtcaaaatgttgtccaa

SEQ ID NO: 8279 - DNA, 80 bp, synthetic construct
  misc_feature 1..80: note = Synthetic: >GCS-227-cand-26370-26449
  source 1..80: mol_type = other DNA
tgtcagcaagtctaccaacactggttgggctttctacgcaagggcgcagcacggtgattattctgctgtatctaattcag

SEQ ID NO: 8280 - DNA, 80 bp, synthetic construct
  misc_feature 1..80: note = Synthetic: >GCS-211-cand-26370-26449
  source 1..80: mol_type = other DNA
tctgtcagcaagtctaccaacactggttgggctttctatgcaagggcgcagcacggtgattattctgctgtatctaattc

SEQ ID NO: 8281 - DNA, 80 bp, synthetic construct
  misc_feature 1..80: note = Synthetic: >GCS-227-cand-7770-7849
  source 1..80: mol_type = other DNA
tgactgaaaattcatttaataattttataactagctatgcaaaaccagaggagaaactttctgcctttgatgttgcgcag

SEQ ID NO: 8282 - DNA, 80 bp, synthetic construct
  misc_feature 1..80: note = Synthetic: >GCS-211-cand-7770-7849
  source 1..80: mol_type = other DNA
gttgactgaaaattcatttaataattttataactagctatgcaaaaccagaggagaaactttctgcctttgatgttgcgc

SEQ ID NO: 8283 - DNA, 80 bp, synthetic construct
  misc_feature 1..80: note = Synthetic: >GCS-211-cand-10720-10799
  source 1..80: mol_type = other DNA
gttgatgttcagggtgttattaatatagcactttgtctcatcgttatgtgtgtacacacatggcgtttcacacacaccag

SEQ ID NO: 8284 - DNA, 80 bp, synthetic construct
  misc_feature 1..80: note = Synthetic: >GCS-227-cand-10710-10789
  source 1..80: mol_type = other DNA
tgatgggtattgatgttcagggtgttattaatatagcactttgtctcatcgttatgtgtgtacacacatggcgtttcaca

SEQ ID NO: 8285 - DNA, 80 bp, synthetic construct
  misc_feature 1..80: note = Synthetic: >229E-cand-16660-16739
  source 1..80: mol_type = other DNA
tgtttcagagcttgtttacgaaaacaagtttgtacctgtcaaagaagctagtaagcagtgcttcaaaatctttgaacgtg

SEQ ID NO: 8286 - DNA, 80 bp, synthetic construct
  misc_feature 1..80: note = Synthetic: >229E-cand-16740-16819
  source 1..80: mol_type = other DNA
gtagtgtgcaggtagataatggttccagtataaatagacgccaacttgatgttgttaagcgatttatacataaaaaccct

SEQ ID NO: 8287 - DNA, 80 bp, synthetic construct
  misc_feature 1..80: note = Synthetic: >229E-cand-16900-16979
  source 1..80: mol_type = other DNA
gacggtggattctgctcaaggcagtgaatatgattatgtaatattcgcacagacatcagatactgctcatgcttgtaatg

SEQ ID NO: 8288 - DNA, 80 bp, synthetic construct
  misc_feature 1..80: note = Synthetic: >229E-cand-16980-17059
  source 1..80: mol_type = other DNA
ccaatcgttttaacgttgccattactagagcaaagaaaggcatcttttgtattatgtctgacagaactctgtttgatgca

SEQ ID NO: 8289 - DNA, 80 bp, synthetic construct
  misc_feature 1..80: note = Synthetic: >229E-cand-17060-17139
  source 1..80: mol_type = other DNA
cttaaattctttgaaatcactatgacagatttacagtctgaaaatagttgtggtttgtttaaagattgtgcacgtaaccc

SEQ ID NO: 8290 - DNA, 80 bp, synthetic construct
  misc_feature 1..80: note = Synthetic: >229E-cand-17140-17219
  source 1..80: mol_type = other DNA
cattgatttaccaccaagtcatgctactacttatctatcattgtctgatagatttaagactagtggtgatttagctgttc

SEQ ID NO: 8291 - DNA, 80 bp, synthetic construct
  misc_feature 1..80: note = Synthetic: >229E-cand-17300-17379
  source 1..80: mol_type = other DNA
agtcatagtttgttctgtactagagattttgccatgcgtcatgttagaggttggttaggaatggatgtagaaggtgcaca

SEQ ID NO: 8292 - DNA, 80 bp, synthetic construct
  misc_feature 1..80: note = Synthetic: >229E-cand-17380-17459
  source 1..80: mol_type = other DNA
tgtcacaggtgataatgttggcactaatgtacctctacaagtagggttttccaatggtgtggattttgtagcgcaacctg

SEQ ID NO: 8293 - DNA, 80 bp, synthetic construct
  misc_feature 1..80: note = Synthetic: >229E-cand-17460-17539
  source 1..80: mol_type = other DNA
agggttgtgttgtaacaaacactggtagtgttgtaaaacctgttcgtgcacgtgcaccacctggtgaacaatttacccac

SEQ ID NO: 8294 - DNA, 80 bp, synthetic construct
  misc_feature 1..80: note = Synthetic: >229E-cand-17540-17619
  source 1..80: mol_type = other DNA
cttgtacctctgttacgcaagggacaaccttggagtgttttgagaaaacgtattgttcaaatgatagcagactaccttgc

SEQ ID NO: 8295 - DNA, 80 bp, synthetic construct
  misc_feature 1..80: note = Synthetic: >229E-cand-17620-17699
  source 1..80: mol_type = other DNA
tggttcatctgacgtactggtgtttgtactgtgggctggcggtttagagttgaccactatgcgttattttgtcaagattg

SEQ ID NO: 8296 - DNA, 80 bp, synthetic construct
  misc_feature 1..80: note = Synthetic: >229E-cand-17700-17779
  source 1..80: mol_type = other DNA
gagctgttaaacattgccaatgtggtactgttgcaacatgctacaactctgttagtaatgattattgttgttttaaacat

SEQ ID NO: 8297 - DNA, 80 bp, synthetic construct
  misc_feature 1..80: note = Synthetic: >229E-cand-17780-17859
  source 1..80: mol_type = other DNA
gcattgggctgtgactatgtttacaatccatatgtcatagacattcaacaatggggttatgttggttcactctctattaa

SEQ ID NO: 8298 - DNA, 80 bp, synthetic construct
  misc_feature 1..80: note = Synthetic: >229E-cand-17860-17939
  source 1..80: mol_type = other DNA
tcaccatgccatttgtaatgttcatagaaatgagcatgtggcttctggtgacgctattatgactagatgtttggctgtgt

SEQ ID NO: 8299 - DNA, 80 bp, synthetic construct
  misc_feature 1..80: note = Synthetic: >AvianCoV-cand-3560-3639
  source 1..80: mol_type = other DNA
tgaaaaacccaaatttttggagtacacaacatgtgtaggtgatttgactgttgtaattgccaaagcattggatgagttta

SEQ ID NO: 8300 - DNA, 80 bp, synthetic construct
  misc_feature 1..80: note = Synthetic: >AvianCoV-cand-3640-3719
  source 1..80: mol_type = other DNA
aagagttctgcgttgtaaacgccgcaaatgagcatatgtctcatggtggtggcgttgcgaaggcaattgctgacttttgt

SEQ ID NO: 8301 - DNA, 80 bp, synthetic construct
  misc_feature 1..80: note = Synthetic: >AvianCoV-cand-3720-3799
  source 1..80: mol_type = other DNA
ggacctgattttgtggaatattgtgaggactatgttaagaaacatgggccacaacaaagacttgtcacaccttcgtatgt

SEQ ID NO: 8302 - DNA, 80 bp, synthetic construct
  misc_feature 1..80: note = Synthetic: >AvianCoV-cand-3800-3879
  source 1..80: mol_type = other DNA
caaaggcattcaatgtgtgaataatgttgtaggaccccgccatggagacaaagatttggatgaaaaacttgttgctgcct

SEQ ID NO: 8303 - DNA, 80 bp, synthetic construct
  misc_feature 1..80: note = Synthetic: >AvianCoV-cand-3880-3959
  source 1..80: mol_type = other DNA
acaagaatgttcttgtagatggtgtggtcaattatgttgtgccagttctctcatcaggaatttttggtgtagattttaaa

SEQ ID NO: 8304 - DNA, 80 bp, synthetic construct
  misc_feature 1..80: note = Synthetic: >AvianCoV-cand-3960-4039
  source 1..80: mol_type = other DNA
atttcaatagacgcgatgcgtaaggcctttgaaggtcttaacatacgcgttcttcttttttctctgagtcaagaacacat

SEQ ID NO: 8305 - DNA, 80 bp, synthetic construct
  misc_feature 1..80: note = Synthetic: >AvianCoV-cand-4040-4119
  source 1..80: mol_type = other DNA
cgattatttcgatgcaacttgtaagcagaagaaaatttatcttacagaagatggtgttaaataccgctctgttgttgtga

SEQ ID NO: 8306 - DNA, 80 bp, synthetic construct
  misc_feature 1..80: note = Synthetic: >AvianCoV-cand-4120-4199
  source 1..80: mol_type = other DNA
aacctggcgactctttgggtcaatttggacaggtttttgcaaagaacaagacagtttttacagcagatgatgttgaggat

SEQ ID NO: 8307 - DNA, 80 bp, synthetic construct
  misc_feature 1..80: note = Synthetic: >AvianCoV-cand-4200-4279
  source 1..80: mol_type = other DNA
gaagaaattctcttcattccaacaactgacaaagctgttcttgaatattatggtttggatgcgcaaaagtatgtaatata

SEQ ID NO: 8308 - DNA, 80 bp, synthetic construct
  misc_feature 1..80: note = Synthetic: >AvianCoV-cand-4280-4359
  source 1..80: mol_type = other DNA
tttgcaaacacttgcgcagaaatgggaagtccaatatagggacaattttattttacttgagtggcgtgatggaaactgct

SEQ ID NO: 8309 - DNA, 80 bp, synthetic construct
  misc_feature 1..80: note = Synthetic: >AvianCoV-cand-4360-4439
  source 1..80: mol_type = other DNA
ggattagttcagcaatagtgctccttcaggctgctaagattaggtttagaggttttcttgcagaagcatgggctaaattc

SEQ ID NO: 8310 - DNA, 80 bp, synthetic construct
  misc_feature 1..80: note = Synthetic: >AvianCoV-cand-4440-4519
  source 1..80: mol_type = other DNA
ttgggtggagaccctacggattttgttgcttggtgctatgcaagttgcaatgctaaagttggtgatttttcagactgcaa

SEQ ID NO: 8311 - DNA, 80 bp, synthetic construct
  misc_feature 1..80: note = Synthetic: >AvianCoV-cand-4520-4599
  source 1..80: mol_type = other DNA
ttggcttttggctaatttggcagaatactttgatgcagattacacgaatgcactgcttaagaagcgtgtgtcgtgtaact

SEQ ID NO: 8312 - DNA, 80 bp, synthetic construct
  misc_feature 1..80: note = Synthetic: >AvianCoV-cand-4600-4679
  source 1..80: mol_type = other DNA
gtggtgttaagagttatgaacttagaggccttgaagcttgtattcaaccagtaagggcacctaatcttctacattttaag

SEQ ID NO: 8313 - DNA, 80 bp, synthetic construct
  misc_feature 1..80: note = Synthetic: >AvianCoV-cand-4680-4759
  source 1..80: mol_type = other DNA
acgcaatactcaaattgtccaacttgtggtgcaaatagtatggatgaagttgttgaagcatcactaccgtacttgttgct

SEQ ID NO: 8314 - DNA, 80 bp, synthetic construct
  misc_feature 1..80: note = Synthetic: >AvianCoV-cand-4760-4839
  source 1..80: mol_type = other DNA
tgttgctactgatggtcctgctgcagttgattgtgatgaaaatgctgtaggaaatgttgttttcattgggtctactaata

SEQ ID NO: 8315 - DNA, 80 bp, synthetic construct
  misc_feature 1..80: note = Synthetic: >Beluga-cand-30420-30499
  source 1..80: mol_type = other DNA
aggcaataaagggaaggaaggctggtgaagaaggaattacctttaagggaccaggtgtacctgttaatgaaaatgtgtcc

SEQ ID NO: 8316 - DNA, 80 bp, synthetic construct
  misc_feature 1..80: note = Synthetic: >Beluga-cand-30500-30579
  source 1..80: mol_type = other DNA
aagaatcagaaccatggatattggattcagaggtctaggacaacacccggaggaaagaagttagctcctctgtattattt

SEQ ID NO: 8317 - DNA, 80 bp, synthetic construct
  misc_feature 1..80: note = Synthetic: >Beluga-cand-30580-30659
  source 1..80: mol_type = other DNA
ttattatactggcacaggacctagagatcaagccaagtatgggcaggatatcccatatgttacctgggtgaaaggagaag

SEQ ID NO: 8318 - DNA, 80 bp, synthetic construct
  misc_feature 1..80: note = Synthetic: >Beluga-cand-30660-30739
  source 1..80: mol_type = other DNA
gagcgaagaccagtcagttgtctgaagcaggttctcgcgatgtgaataaatttcccaatgcttttccactgatctttccg

SEQ ID NO: 8319 - DNA, 80 bp, synthetic construct
  misc_feature 1..80: note = Synthetic: >Beluga-cand-30740-30819
  source 1..80: mol_type = other DNA
actggtgatggacctgaccgtggcttctttattgagcgatctcgtagccggtctagaagtaattctcaggctgacaacag

SEQ ID NO: 8320 - DNA, 80 bp, synthetic construct
  misc_feature 1..80: note = Synthetic: >Beluga-cand-30820-30899
  source 1..80: mol_type = other DNA
atccaaaagtagagaaaggtcgcagtctagtgacaaacccaggaaggaagatagggggagatctaagtcacccgctcaga

SEQ ID NO: 8321 - DNA, 80 bp, synthetic construct
  misc_feature 1..80: note = Synthetic: >Beluga-cand-30900-30979
  source 1..80: mol_type = other DNA
aaaacccaggctctggtggtaaaattaccaaggagaaggcagctttgatggtttcgcgcgcttatggtaagagaaccata

SEQ ID NO: 8322 - DNA, 80 bp, synthetic construct
  misc_feature 1..80: note = Synthetic: >Beluga-cand-30980-31059
  source 1..80: mol_type = other DNA
ccacccaataagtccgtggatggagtttttggggcgcgtgatattgaaaagaattttggtgatgcagagatgattaagaa

SEQ ID NO: 8323 - DNA, 80 bp, synthetic construct
  misc_feature 1..80: note = Synthetic: >Beluga-cand-31060-31139
  source 1..80: mol_type = other DNA
aggcatgtcggaccctaggttcactgcagcacttattccaacaccaggacctcaggcagctctttttggttcacatgtga

SEQ ID NO: 8324 - DNA, 80 bp, synthetic construct
  misc_feature 1..80: note = Synthetic: >Beluga-cand-31140-31219
  source 1..80: mol_type = other DNA
cccttaaggagaaacccgatgggcttgaaattacttataagtataggacacttttccccaagaccgatgagaggtatgag

SEQ ID NO: 8325 - DNA, 80 bp, synthetic construct
  misc_feature 1..80: note = Synthetic: >Beluga-cand-31220-31299
  source 1..80: mol_type = other DNA
gaggtaaagcacgcctatctatctaatgtaccgcttcaggatggtggtcagccactacattccagtggagtccagaagaa

SEQ ID NO: 8326 - DNA, 80 bp, synthetic construct
  misc_feature 1..80: note = Synthetic: >Beluga-cand-31300-31379
  source 1..80: mol_type = other DNA
actcaagagccggtcaaagtcgagagatcgtactgatgacggcgttgagaaccccaccacagtgaatctggactggtcat

SEQ ID NO: 8327 - DNA, 80 bp, synthetic construct
  misc_feature 1..80: note = Synthetic: >Beluga-cand-31380-31459
  source 1..80: mol_type = other DNA
cagagcccgttgaaggttttctcgacgatggaactggtgatcttgaatggtctgaagcttaaacattgatgccttttggc

SEQ ID NO: 8328 - DNA, 80 bp, synthetic construct
  misc_feature 1..80: note = Synthetic: >Beluga-cand-31460-31539
  source 1..80: mol_type = other DNA
acagcaacaatgaattaataccctaattacccgtctttattttcgggattagcagataggcgaccaggatttgcttgcgt

SEQ ID NO: 8329 - DNA, 80 bp, synthetic construct
  misc_feature 1..80: note = Synthetic: >Beluga-cand-31540-31619
  source 1..80: mol_type = other DNA
tgatacgttcgcgtctgtaggttttgcgttgtctactgcttggagaatcagcaatttgtcatcttatagccaagagtacg

SEQ ID NO: 8330 - DNA, 80 bp, synthetic construct
  misc_feature 1..80: note = Synthetic: >Beluga-cand-31620-31699
  source 1..80: mol_type = other DNA
aaggatgacacggtttattatgaaagaatttcatcaaaaattgattacgccttaggctagactaggtccaaagaatccag

SEQ ID NO: 8331 - DNA, 80 bp, synthetic construct
  misc_feature 1..80: note = Synthetic: >BetaCoV1-cand-30820-30899
  source 1..80: mol_type = other DNA
gacagccaaggaaataaaacagaaaattctcaacaaaccccgccaaaagcggacgcccaataagcagtgcactgttcaac

SEQ ID NO: 8332 - DNA, 80 bp, synthetic construct
  misc_feature 1..80: note = Synthetic: >BetaCoV1-cand-30900-30979
  source 1..80: mol_type = other DNA
agtgtttcggcaaaaggggccccagccagaattttggtggtggtagcatgcttaaattgggaactagtgatccacagttc

SEQ ID NO: 8333 - DNA, 80 bp, synthetic construct
  misc_feature 1..80: note = Synthetic: >BetaCoV1-cand-30980-31059
  source 1..80: mol_type = other DNA
cccatccttgcagaattggcccccacagcgggagcctttttctttgggtccaggttggaattggccaaagttaataatat

SEQ ID NO: 8334 - DNA, 80 bp, synthetic construct
  misc_feature 1..80: note = Synthetic: >BetaCoV1-cand-31130-31209
  source 1..80: mol_type = other DNA
agcaccctacctgggtttgagactatcatgaaagttatgaatgaaaatttggatgcgtaccaaaaccacacagaagaggg

SEQ ID NO: 8335 - DNA, 80 bp, synthetic construct
  misc_feature 1..80: note = Synthetic: >BetaCoV1-cand-31210-31289
  source 1..80: mol_type = other DNA
tgcgcaattattgagcccaaaatttcagcgcaagcagaagaaagggcaagcggctcaacatattgaaaaggataatgtga

SEQ ID NO: 8336 - DNA, 80 bp, synthetic construct
  misc_feature 1..80: note = Synthetic: >BetaCoV1-cand-31290-31369
  source 1..80: mol_type = other DNA
gtgctgcaacgcccaagagtcgtgtgcagcaaaatgtaagaagagagctaactccccaggacctcagcattctcgcgcag

SEQ ID NO: 8337 - DNA, 80 bp, synthetic construct
  misc_feature 1..80: note = Synthetic: >BetaCoV1-cand-31610-31689
  source 1..80: mol_type = other DNA
tgcccatgtggaagagccagcatgttaagtgatctaggaatagattagtagatggatgaaggtaatcatgaccaattgga

SEQ ID NO: 8338 - DNA, 80 bp, synthetic construct
  misc_feature 1..80: note = Synthetic: >BetaSp-cand-20-99
  source 1..80: mol_type = other DNA
atctaatctaatctaaactttataaagtttagattggattagatcttccgtagcatcgcaccctcgatctcttgttagat

SEQ ID NO: 8339 - DNA, 80 bp, synthetic construct
  misc_feature 1..80: note = Synthetic: >BetaSp-cand-100-179
  source 1..80: mol_type = other DNA
ctaatctaatctaaacctgataaagtgtggattagattagatctaacaaaatcgcttccgtagcaagcctcctcgcaccc

SEQ ID NO: 8340 - DNA, 80 bp, synthetic construct
  misc_feature 1..80: note = Synthetic: >BetaSp-cand-180-259
  source 1..80: mol_type = other DNA
tcgatctcttgttagatcactaatctaatctaaactttataaaaacactaggtccctgctagcctatgcctgagggttta

SEQ ID NO: 8341 - DNA, 80 bp, synthetic construct
  misc_feature 1..80: note = Synthetic: >BetaSp-cand-1540-1619
  source 1..80: mol_type = other DNA
agtccctataaaagattgtggctttgtgatgcagttcggtcatgttcagtgtgagcatgacgattgtgattttgttgggt

SEQ ID NO: 8342 - DNA, 80 bp, synthetic construct
  misc_feature 1..80: note = Synthetic: >BetaSp-cand-1620-1699
  source 1..80: mol_type = other DNA
ggataccaggtaatatgatagatggttttaagtgcccctctggccataagctgtatgcagctagcgaggttcaagctcaa

SEQ ID NO: 8343 - DNA, 80 bp, synthetic construct
  misc_feature 1..80: note = Synthetic: >BetaSp-cand-1700-1779
  source 1..80: mol_type = other DNA
tcttctggagttataccacctaatgctgtgttgtttactgaaagtactgccttgacctcgcaggactcttttaagatgta

SEQ ID NO: 8344 - DNA, 80 bp, synthetic construct
  misc_feature 1..80: note = Synthetic: >BetaSp-cand-1780-1859
  source 1..80: mol_type = other DNA
tggtatgtcagttgttccttttggtggctgtgtttattggtcaccaggagctggcatctggttgcctatcatcatgtcat

SEQ ID NO: 8345 - DNA, 80 bp, synthetic construct
  misc_feature 1..80: note = Synthetic: >BetaSp-cand-1860-1939
  source 1..80: mol_type = other DNA
ctgtgaaggcatatgatggtatgacctttacaggttctgttggttttaaaaccattgttcaagagactgctgctatttgt

SEQ ID NO: 8346 - DNA, 80 bp, synthetic construct
  misc_feature 1..80: note = Synthetic: >BetaSp-cand-1940-2019
  source 1..80: mol_type = other DNA
catgctttgtatttggattatgttcaacataagtgtgcagatataaaacaacatgccattttgggtgttgatgatctttg

SEQ ID NO: 8347 - DNA, 80 bp, synthetic construct
  misc_feature 1..80: note = Synthetic: >BetaSp-cand-2020-2099
  source 1..80: mol_type = other DNA
gcataagcagctgcttcttaatagaggtgattattctctcttgttagagaatgtggattattttatcatgcgccgcgcta

SEQ ID NO: 8348 - DNA, 80 bp, synthetic construct
  misc_feature 1..80: note = Synthetic: >BetaSp-cand-2100-2179
  source 1..80: mol_type = other DNA
agttttcggttgataacagcttggtctgttctgaggggtttgcacctttcctgttggatggtgtagccgcgcgtgcgtat

SEQ ID NO: 8349 - DNA, 80 bp, synthetic construct
  misc_feature 1..80: note = Synthetic: >BetaSp-cand-2180-2259
  source 1..80: mol_type = other DNA
tattttgtaaattgttgttttagtgcacctggcttgccagatagtttatgcaggctaggtattgaagtggagagctggtg

SEQ ID NO: 8350 - DNA, 80 bp, synthetic construct
  misc_feature 1..80: note = Synthetic: >BetaSp-cand-2260-2339
  source 1..80: mol_type = other DNA
tcggagcacattgtgtttgtgtattgacacagttcagggtgccacttcatttgtggtgaagaatttgaaagtctttttgt

SEQ ID NO: 8351 - DNA, 80 bp, synthetic construct
  misc_feature 1..80: note = Synthetic: >BetaSp-cand-2340-2419
  source 1..80: mol_type = other DNA
ccaagttttatatctttggcaaaaagtttattaaaaatgttaaaatgttgggtgccaagctcgtagaagagtgggttgaa

SEQ ID NO: 8352 - DNA, 80 bp, synthetic construct
  misc_feature 1..80: note = Synthetic: >BetaSp-cand-2420-2499
  source 1..80: mol_type = other DNA
aagtttaacgcctttacagatgctactgtttgtgctcttgcttgggttgtcctgcatgtcataaatggtgcttatttaat

SEQ ID NO: 8353 - DNA, 80 bp, synthetic construct
  misc_feature 1..80: note = Synthetic: >BetaSp-cand-2500-2579
  source 1..80: mol_type = other DNA
atttagaagatggcttccattttgttggaagtgtgcctgattatgctcgcaattttgtgaggatacttagggagatgatt

SEQ ID NO: 8354 - DNA, 80 bp, synthetic construct
  misc_feature 1..80: note = Synthetic: >BetaSp-cand-2580-2659
  source 1..80: mol_type = other DNA
aatatggtgttggattgtatgaaacacaccataattaagggtctaccttgttttaaggtggctgctgagtacattgtctt

SEQ ID NO: 8355 - DNA, 80 bp, synthetic construct
  misc_feature 1..80: note = Synthetic: >BetaSp-cand-2660-2739
  source 1..80: mol_type = other DNA
ctctggaagctttgcatacaaattgggtttggctatgatagataatctagtcctacctagtggtatgatacagagtgagc

SEQ ID NO: 8356 - DNA, 80 bp, synthetic construct
  misc_feature 1..80: note = Synthetic: >BetaSp-cand-2740-2819
  source 1..80: mol_type = other DNA
aacttcttgctttgcatggtgaggttacccctgtgacattagaaagtgaggttgtggaagttgtgaaacaaccactaaaa

SEQ ID NO: 8357 - DNA, 80 bp, synthetic construct
  misc_feature 1..80: note = Synthetic: >CDPHE15-cand-15800-15879
  source 1..80: mol_type = other DNA
aagcctgctcttaatcgtaactcagtctttactggttttcatatcactaaaaatatgaagtctcagataggcgagtttac

SEQ ID NO: 8358 - DNA, 80 bp, synthetic construct
  misc_feature 1..80: note = Synthetic: >CDPHE15-cand-15880-15959
  source 1..80: mol_type = other DNA
gtttgagaagtctgactatgatagtgatgctgtcatatacaagtctaccaccacggttaaattacaacctggtatggtct

SEQ ID NO: 8359 - DNA, 80 bp, synthetic construct
  misc_feature 1..80: note = Synthetic: >CDPHE15-cand-15960-16039
  source 1..80: mol_type = other DNA
ttgtgttgacatctcacaatgttcagtctttacgtgccccaactattgccaatcaggaacgttatgctaaccttgttaag

SEQ ID NO: 8360 - DNA, 80 bp, synthetic construct
  misc_feature 1..80: note = Synthetic: >CDPHE15-cand-16040-16119
  source 1..80: mol_type = other DNA
ttgaggcctgcttttaacgtacctcctgattacgctaatcttgtagcctattatcaaatgataggtcaccagaagattac

SEQ ID NO: 8361 - DNA, 80 bp, synthetic construct
  misc_feature 1..80: note = Synthetic: >CDPHE15-cand-16120-16199
  source 1..80: mol_type = other DNA
cacaatccaaggtcctcctggtagtggtaaatctcattgcgttattggcttaggattgtactaccctggtgctagaatcg

SEQ ID NO: 8362 - DNA, 80 bp, synthetic construct
  misc_feature 1..80: note = Synthetic: >CDPHE15-cand-16200-16279
  source 1..80: mol_type = other DNA
tttatactgcatgttctcatgctgcagttgattctttgtgttgcaaggcagccactgcttttagtgccgacaggtgttcc

SEQ ID NO: 8363 - DNA, 80 bp, synthetic construct
  misc_feature 1..80: note = Synthetic: >CDPHE15-cand-16280-16359
  source 1..80: mol_type = other DNA
agaattatacctcaacgtgctcgtgtggagtgctattcgggttttaaacctaataacactactgcacagtacatattttc

SEQ ID NO: 8364 - DNA, 80 bp, synthetic construct
  misc_feature 1..80: note = Synthetic: >CDPHE15-cand-16360-16439
  source 1..80: mol_type = other DNA
tactgttaatgcattgcctgagtgtgccactgatatcgtcgttgttgatgaagtttcaatgtgcactaattatgagcttt

SEQ ID NO: 8365 - DNA, 80 bp, synthetic construct
  misc_feature 1..80: note = Synthetic: >CDPHE15-cand-16440-16519
  source 1..80: mol_type = other DNA
ctataattaaccaacgtgttagttataagcacatagtgtatgttggtgacccacaacaattgccagcaccacgcataatg

SEQ ID NO: 8366 - DNA, 80 bp, synthetic construct
  misc_feature 1..80: note = Synthetic: >CDPHE15-cand-16540-16619
  source 1..80: mol_type = other DNA
acctagcgattataatgttgtcacccagcgcatgtgtgctattaagcctgacattttcttgcataagtgttatcgctgtc

SEQ ID NO: 8367 - DNA, 80 bp, synthetic construct
  misc_feature 1..80: note = Synthetic: >CDPHE15-cand-16620-16699
  source 1..80: mol_type = other DNA
ctgctgagattgttgacactgtttctgagatggtttatgaaaaccagttcaaacctgttaacaaagcaagcaaacagtgc

SEQ ID NO: 8368 - DNA, 80 bp, synthetic construct
  misc_feature 1..80: note = Synthetic: >CDPHE15-cand-16700-16779
  source 1..80: mol_type = other DNA
ttcaaaatcatgtgtaagggtaatgtcatggtagataatggttcaagtattaacaggaggcagctggaggttgttaaaat

SEQ ID NO: 8369 - DNA, 80 bp, synthetic construct
  misc_feature 1..80: note = Synthetic: >CDPHE15-cand-16780-16859
  source 1..80: mol_type = other DNA
gtttttggcaaagaatcctagttggcgtaatgctgtttttatttcaccctacaatagtcagaactatgtggctagtcgct

SEQ ID NO: 8370 - DNA, 80 bp, synthetic construct
  misc_feature 1..80: note = Synthetic: >CDPHE15-cand-16860-16939
  source 1..80: mol_type = other DNA
cccttggtctccagatacagactgttgattcatcacagggtagtgagtatgattatgtcatatttacccagacttctgac

SEQ ID NO: 8371 - DNA, 80 bp, synthetic construct
  misc_feature 1..80: note = Synthetic: >CDPHE15-cand-16940-17019
  source 1..80: mol_type = other DNA
acagcacatgctagtaacattaacaggtttaatgttgctatcactagagctaagaagggtattttgtgtgttatgtgtga

SEQ ID NO: 8372 - DNA, 80 bp, synthetic construct
  misc_feature 1..80: note = Synthetic: >CDPHE15-cand-17020-17099
  source 1..80: mol_type = other DNA
caaaaatctttatgatttgcttaagttttatgagcttaagttgtctgacttacaagcacaaactgatggttgcggtctgt

SEQ ID NO: 8373 - DNA, 80 bp, synthetic construct
  misc_feature 1..80: note = Synthetic: >CDPHE15-cand-18380-18459
  source 1..80: mol_type = other DNA
atgcctttcttttactatgacacttctgactgcgataagttgcatgactctattaattatgtaccacttaaagcatctaa

SEQ ID NO: 8374 - DNA, 80 bp, synthetic construct
  misc_feature 1..80: note = Synthetic: >CDPHE15-cand-18460-18539
  source 1..80: mol_type = other DNA
ttgcattactaggtgcaatgttggtggtgctgtgtgtagtaggcatgctgagcagtatcatagttacgttgcagcataca

SEQ ID NO: 8375 - DNA, 80 bp, synthetic construct
  misc_feature 1..80: note = Synthetic: >CDPHE15-cand-18540-18619
  source 1..80: mol_type = other DNA
ataattttacacaggctggtttcaccatttgggtacctcaaaactttgacctctacaacttgtggcaaacacttgctaag

SEQ ID NO: 8376 - DNA, 80 bp, synthetic construct
  misc_feature 1..80: note = Synthetic: >CDPHE15-cand-18620-18699
  source 1..80: mol_type = other DNA
cctaacttacaaggtttggaaaatattgcctttaatgttgttaagaagggttcttttgtaggtgctgaaggtgaattacc

SEQ ID NO: 8377 - DNA, 80 bp, synthetic construct
  misc_feature 1..80: note = Synthetic: >CDPHE15-cand-18700-18779
  source 1..80: mol_type = other DNA
tgttgctattgttggtgataaagttcttgttcgtgagaacgatgttgataacctcgtgttcacaaataagacatctctac

SEQ ID NO: 8378 - DNA, 80 bp, synthetic construct
  misc_feature 1..80: note = Synthetic: >CDPHE15-cand-18780-18859
  source 1..80: mol_type = other DNA
ctaccaatgtagcatttgaattgtatgcaaagcgaaaggttggtttgactccacctcttaccatattacgcaacttgggt

SEQ ID NO: 8379 - DNA, 80 bp, synthetic construct
  misc_feature 1..80: note = Synthetic: >CDPHE15-cand-18860-18939
  source 1..80: mol_type = other DNA
gtggttcgcacttataagtttgtgttgtgggattatgaggcagagagaccatttacgtcttatactaaggacgtttgcaa

SEQ ID NO: 8380 - DNA, 80 bp, synthetic construct
  misc_feature 1..80: note = Synthetic: >CDPHE15-cand-18940-19019
  source 1..80: mol_type = other DNA
gtacacagactttgatgctggcgtttgcacatgttatgataatagtgtgcaaggttcatttgaacgttttacattggacc

SEQ ID NO: 8381 - DNA, 80 bp, synthetic construct
  misc_feature 1..80: note = Synthetic: >CDPHE15-cand-19020-19099
  source 1..80: mol_type = other DNA
ctgatgcggtactcatttcactcactgctgttaaaaagttgacacccattaaaattagttacggctatcttaatggtgtc

SEQ ID NO: 8382 - DNA, 80 bp, synthetic construct
  misc_feature 1..80: note = Synthetic: >CDPHE15-cand-19100-19179
  source 1..80: mol_type = other DNA
gctgtttcacagcatgagaagaaacctcttacttggtacatatataccaggaaaggtggcaagtttgatgattacccaga

SEQ ID NO: 8383 - DNA, 80 bp, synthetic construct
  misc_feature 1..80: note = Synthetic: >CDPHE15-cand-19180-19259
  source 1..80: mol_type = other DNA
gggcttttacactcagggccgtacttctgctgattttaagcctcgtagtaccatggaggaagatttccttaacatggaca

SEQ ID NO: 8384 - DNA, 80 bp, synthetic construct
  misc_feature 1..80: note = Synthetic: >CDPHE15-cand-19260-19339
  source 1..80: mol_type = other DNA
ctggactctttatatctaaatatggccttgaggattatgcttttgagcatgtggtctatggtgacatctccaaaacaacc

SEQ ID NO: 8385 - DNA, 80 bp, synthetic construct
  misc_feature 1..80: note = Synthetic: >CDPHE15-cand-19340-19419
  source 1..80: mol_type = other DNA
cttggtgggttacatttgttgatatcacaagttagactgtctaaattaggcatcctaaaaattgatgagttcatagcggc

SEQ ID NO: 8386 - DNA, 80 bp, synthetic construct
  misc_feature 1..80: note = Synthetic: >CDPHE15-cand-19420-19499
  source 1..80: mol_type = other DNA
tggtgacagtacattgaaatcttgtactgttacatttgcagacaatcctagtagtaaatctgtttgcacttatatggatt

SEQ ID NO: 8387 - DNA, 80 bp, synthetic construct
  misc_feature 1..80: note = Synthetic: >CDPHE15-cand-19500-19579
  source 1..80: mol_type = other DNA
tattattggatgactttgttacaattatgaagagtcttgaccttagcgttgtgtctaaagtccatgaggttatggttgac

SEQ ID NO: 8388 - DNA, 80 bp, synthetic construct
  misc_feature 1..80: note = Synthetic: >CDPHE15-cand-19580-19659
  source 1..80: mol_type = other DNA
tgtaagatgtggagatggatgttatggtgtaaagaccacaaagtccaaaccttctatcctcagttacaatctgccgaatg

SEQ ID NO: 8389 - DNA, 80 bp, synthetic construct
  misc_feature 1..80: note = Synthetic: >CanadaGoose-cand-24720-24799
  source 1..80: mol_type = other DNA
atgtacgtgtgtacgccagataggagacacacatacaagagagtagcagcttatgctggcgataacaaaacaaagaaatc

SEQ ID NO: 8390 - DNA, 80 bp, synthetic construct
  misc_feature 1..80: note = Synthetic: >CanadaGoose-cand-24800-24879
  source 1..80: mol_type = other DNA
atttgccacctttatctttactaaagagaaggtggacactggtgaccttgataaagtaaccacatctgtgggagatcttt

SEQ ID NO: 8391 - DNA, 80 bp, synthetic construct
  misc_feature 1..80: note = Synthetic: >CanadaGoose-cand-24880-24959
  source 1..80: mol_type = other DNA
accagtaatgtgtaattgcaaaattcatttgcagaacatctttggttctaaatctattcttaaggtctatacctctataa

SEQ ID NO: 8392 - DNA, 80 bp, synthetic construct
  misc_feature 1..80: note = Synthetic: >CanadaGoose-cand-24960-25039
  source 1..80: mol_type = other DNA
ttgttactgatatagaagttagttccttatgttttgctattactctctctgagttgttaaagttaaaccagcttatgctg

SEQ ID NO: 8393 - DNA, 80 bp, synthetic construct
  misc_feature 1..80: note = Synthetic: >CanadaGoose-cand-25040-25119
  source 1..80: mol_type = other DNA
tcttttcttcctagtattatcatagttaatggcattgacattgttgttaaattcggtgtcgttcactatgatggtatacc

SEQ ID NO: 8394 - DNA, 80 bp, synthetic construct
  misc_feature 1..80: note = Synthetic: >CanadaGoose-cand-25120-25199
  source 1..80: mol_type = other DNA
acttgttaaaggagtcttaacaaaatcggcatgagtctatttcgccgtcttttcaggacgattagacgctattgtcgtat

SEQ ID NO: 8395 - DNA, 80 bp, synthetic construct
  misc_feature 1..80: note = Synthetic: >CanadaGoose-cand-25200-25279
  source 1..80: mol_type = other DNA
taattttggaaaaactccagattttacttctggtagttggtacgtaagtgcatttaactaccctgagttttatggtgtca

SEQ ID NO: 8396 - DNA, 80 bp, synthetic construct
  misc_feature 1..80: note = Synthetic: >CanadaGoose-cand-25280-25359
  source 1..80: mol_type = other DNA
ctgatagtgtgactgactctgtgtatattgtgccgaaagtcatagacctttggcagaattaacaaaacgatgtgcaaatg

SEQ ID NO: 8397 - DNA, 80 bp, synthetic construct
  misc_feature 1..80: note = Synthetic: >CanadaGoose-cand-25360-25439
  source 1..80: mol_type = other DNA
tgctaacttcatacaaaatattttgtatcgtaacacaattgcctattcttcccgcgctattgttgtgtcgcgtgaagtaa

SEQ ID NO: 8398 - DNA, 80 bp, synthetic construct
  misc_feature 1..80: note = Synthetic: >CanadaGoose-cand-25440-25519
  source 1..80: mol_type = other DNA
atccgctctgctttggtgttacattgcagaacggtatatattgtaacccttctcttatagcgtttcttccgaacactata

SEQ ID NO: 8399 - DNA, 80 bp, synthetic construct
  misc_feature 1..80: note = Synthetic: >CanadaGoose-cand-25520-25599
  source 1..80: mol_type = other DNA
agagttaattcagttacatatttcattcaaggtgaacaagttttgtacaatggacgaaacctgctcaccagagattttgt

SEQ ID NO: 8400 - DNA, 80 bp, synthetic construct
  misc_feature 1..80: note = Synthetic: >CanadaGoose-cand-25600-25679
  source 1..80: mol_type = other DNA
tattgaaaaagcaagcacagcagtctaggcttagacttattagcttgcagccttttattgtcaaaggccctggtgggtct

SEQ ID NO: 8401 - DNA, 80 bp, synthetic construct
  misc_feature 1..80: note = Synthetic: >CanadaGoose-cand-25680-25759
  source 1..80: mol_type = other DNA
tgggtgtataaatttgatgatcatgaaccttctgtacatgattatacaattgtttgtagtagtgagcccttaacaaaacg

SEQ ID NO: 8402 - DNA, 80 bp, synthetic construct
  misc_feature 1..80: note = Synthetic: >CanadaGoose-cand-25760-25839
  source 1..80: mol_type = other DNA
gtatgataaaactggttaagggctttgttgtgttttgtgcgaaattttacagatctcttctgctctgtgaagttcgcatt

SEQ ID NO: 8403 - DNA, 80 bp, synthetic construct
  misc_feature 1..80: note = Synthetic: >CanadaGoose-cand-25840-25919
  source 1..80: mol_type = other DNA
cttagtcttttggtcaataagtttggccttaattgtcttttggctaattgcagggattttctctcactgcaacttaacgt

SEQ ID NO: 8404 - DNA, 80 bp, synthetic construct
  misc_feature 1..80: note = Synthetic: >CanadaGoose-cand-25920-25999
  source 1..80: mol_type = other DNA
agtttatagattaattgatagtagtaataattcgctggtatgaataatccttttgcaaccgcaacagcaagaaaagctcg

SEQ ID NO: 8405 - DNA, 80 bp, synthetic construct
  misc_feature 1..80: note = Synthetic: >HKU10-cand-14080-14159
  source 1..80: mol_type = other DNA
gcaaaaaggtgatgctgccattaaggattttgactattataggtataataaacctacaatgttagatgtctgtcaggcac

SEQ ID NO: 8406 - DNA, 80 bp, synthetic construct
  misc_feature 1..80: note = Synthetic: >HKU10-cand-14160-14239
  source 1..80: mol_type = other DNA
gtgttgcgtacaaacttgttagtcgctatttcgatatttatgatggtggttgtataactgctaaagatgttgtggttaca

SEQ ID NO: 8407 - DNA, 80 bp, synthetic construct
  misc_feature 1..80: note = Synthetic: >HKU10-cand-14240-14319
  source 1..80: mol_type = other DNA
aacctcaacaaaagtgctggttacccacttaataaatttggaaaggctggtttgtattatgaatccttgacttatgaaga

SEQ ID NO: 8408 - DNA, 80 bp, synthetic construct
  misc_feature 1..80: note = Synthetic: >HKU10-cand-14320-14399
  source 1..80: mol_type = other DNA
gcaagatgctctttatgctgtcacaaagcgtaatgtgttgcctactatgacacagctcaatttaaagtatgctattagtg

SEQ ID NO: 8409 - DNA, 80 bp, synthetic construct
  misc_feature 1..80: note = Synthetic: >HKU10-cand-14400-14479
  source 1..80: mol_type = other DNA
gtaaggaacgtgcacgcactgttggtggtgtttctcttttatccactatgactactagacagtaccatcaaaaacacctt

SEQ ID NO: 8410 - DNA, 80 bp, synthetic construct
  misc_feature 1..80: note = Synthetic: >HKU10-cand-14480-14559
  source 1..80: mol_type = other DNA
aaatctattgtgaatacacgcaatgcttctgttgtcattggtaccactaaattttatggtggttgggataacatgttaaa

SEQ ID NO: 8411 - DNA, 80 bp, synthetic construct
  misc_feature 1..80: note = Synthetic: >HKU10-cand-14560-14639
  source 1..80: mol_type = other DNA
cacgcttattaatggtgttgaaaacccttgtcttatgggttgggactaccctaagtgtgacagagcattgcctaacatga

SEQ ID NO: 8412 - DNA, 80 bp, synthetic construct
  misc_feature 1..80: note = Synthetic: >HKU10-cand-14640-14719
  source 1..80: mol_type = other DNA
tacgcatgatctctgctatgatacttggttctaaacacacaacatgttgtaccactgatgaaagatattatcgtttgtgt

SEQ ID NO: 8413 - DNA, 80 bp, synthetic construct
  misc_feature 1..80: note = Synthetic: >HKU10-cand-14720-14799
  source 1..80: mol_type = other DNA
aatgagttggcccaagtgttaacagaggttgtgtattctaatggtggcttttattttaaacctggtggtactacttcagg

SEQ ID NO: 8414 - DNA, 80 bp, synthetic construct
  misc_feature 1..80: note = Synthetic: >HKU10-cand-14800-14879
  source 1..80: mol_type = other DNA
tgatgcttctacagcctatgctaactcagtctttaacattttccaggcagtcagttctaacattaacagattgttgacta

SEQ ID NO: 8415 - DNA, 80 bp, synthetic construct
  misc_feature 1..80: note = Synthetic: >HKU10-cand-14880-14959
  source 1..80: mol_type = other DNA
tcgacagcaatgtttgtaataatgttagtgtcaaaactctgcaaagagagttgtatgacaactgctacaggtcatcaagt

SEQ ID NO: 8416 - DNA, 80 bp, synthetic construct
  misc_feature 1..80: note = Synthetic: >HKU10-cand-14960-15039
  source 1..80: mol_type = other DNA
gtcgacgaacaattcatagataaatattattgctatttacgcaaacatttttctatgatgattttgtctgatgatggtgt

SEQ ID NO: 8417 - DNA, 80 bp, synthetic construct
  misc_feature 1..80: note = Synthetic: >HKU10-cand-15040-15119
  source 1..80: mol_type = other DNA
agtctgttacaacaaagattacgcagaccttggttatgtagcagatattagtgcatttaaagctacattgtactatcaga

SEQ ID NO: 8418 - DNA, 80 bp, synthetic construct
  misc_feature 1..80: note = Synthetic: >HKU10-cand-15120-15199
  source 1..80: mol_type = other DNA
acaatgtctttatgagcacagccaagtgttgggttgaacctgacattactaagggtccacatgagttttgttcacaacac

SEQ ID NO: 8419 - DNA, 80 bp, synthetic construct
  misc_feature 1..80: note = Synthetic: >HKU10-cand-15200-15279
  source 1..80: mol_type = other DNA
actatgcagattgttgatgaaaatggtaaatattatttaccttaccctgatccatctaggatattgtctgcaggtgtttt

SEQ ID NO: 8420 - DNA, 80 bp, synthetic construct
  misc_feature 1..80: note = Synthetic: >HKU10-cand-15280-15359
  source 1..80: mol_type = other DNA
tgttgatgatgttgttaaaaccgacgctgtcattttgcttgaacgctatgtttcattggctattgacgcttaccctttgt

SEQ ID NO: 8421 - DNA, 80 bp, synthetic construct
  misc_feature 1..80: note = Synthetic: >HKU14-cand-4320-4399
  source 1..80: mol_type = other DNA
gttggtcctgacgcacgagctcagggtaagcaatgttatgcattgttagaaaagacatataaacaccttaacaagtatga

SEQ ID NO: 8422 - DNA, 80 bp, synthetic construct
  misc_feature 1..80: note = Synthetic: >HKU14-cand-4400-4479
  source 1..80: mol_type = other DNA
ttgtagtcttactacacttatttctgctggcatatttagtgtgccatctgatgtgtctttgacatacttacttggtgttg

SEQ ID NO: 8423 - DNA, 80 bp, synthetic construct
  misc_feature 1..80: note = Synthetic: >HKU14-cand-4480-4559
  source 1..80: mol_type = other DNA
tagaaaaacaagttattcttgttagtaacaacaaagaagattttgatttgatttctaagtgtcaactaacggctgtagag

SEQ ID NO: 8424 - DNA, 80 bp, synthetic construct
  misc_feature 1..80: note = Synthetic: >HKU14-cand-4560-4639
  source 1..80: mol_type = other DNA
ggcactagaaagtttgcagagcgtctatcttttaatgtaggacgcactattaaatatgaaacagatgctaataagttgct

SEQ ID NO: 8425 - DNA, 80 bp, synthetic construct
  misc_feature 1..80: note = Synthetic: >HKU14-cand-4640-4719
  source 1..80: mol_type = other DNA
tattagcaatgatgtagtatttgtttctacttttaatgtgttgcaagatgttaacacattgcggcacgatattaaacttg

SEQ ID NO: 8426 - DNA, 80 bp, synthetic construct
  misc_feature 1..80: note = Synthetic: >HKU14-cand-4720-4799
  source 1..80: mol_type = other DNA
atgatgatgcgcgtgtttttgtgcagtcaaatatggagaatttgcctacagattggcgcatagttaataagtttgatcag

SEQ ID NO: 8427 - DNA, 80 bp, synthetic construct
  misc_feature 1..80: note = Synthetic: >HKU14-cand-4800-4879
  source 1..80: mol_type = other DNA
attaatggtgttagaaccgttaaatattttgaatgtcctggtggcatagacatttgtagccagggtaaagattttggtta

SEQ ID NO: 8428 - DNA, 80 bp, synthetic construct
  misc_feature 1..80: note = Synthetic: >HKU14-cand-4880-4959
  source 1..80: mol_type = other DNA
tatacagcagggttctttttacaaggccactgtaagccaaattaaggctttgtttgttgataaaatagatgttttgctta

SEQ ID NO: 8429 - DNA, 80 bp, synthetic construct
  misc_feature 1..80: note = Synthetic: >HKU14-cand-4960-5039
  source 1..80: mol_type = other DNA
ctgttgatggtgttaattttaccactaggtatgtacctcttggtgaagtttttggcaaaacactaggcaatgtattttgt

SEQ ID NO: 8430 - DNA, 80 bp, synthetic construct
  misc_feature 1..80: note = Synthetic: >HKU14-cand-5040-5119
  source 1..80: mol_type = other DNA
gatgctattaatgtcacaaaatgcaaggctgaacagaaatataaaggaaaggtgttctttcagtttgataatctgtctaa

SEQ ID NO: 8431 - DNA, 80 bp, synthetic construct
  misc_feature 1..80: note = Synthetic: >HKU14-cand-5120-5199
  source 1..80: mol_type = other DNA
tgcagatttaaaagctgttaagagttctttcaattttgatcaaaaagaattgttggcttattacaatgtccttgtgagtt

SEQ ID NO: 8432 - DNA, 80 bp, synthetic construct
  misc_feature 1..80: note = Synthetic: >HKU14-cand-5200-5279
  source 1..80: mol_type = other DNA
gtggtaagtggcaaattgttgttaatggtaaatattttacttttaagcaggcaaataataattgctttgttaatgctgca

SEQ ID NO: 8433 - DNA, 80 bp, synthetic construct
  misc_feature 1..80: note = Synthetic: >HKU14-cand-5280-5359
  source 1..80: mol_type = other DNA
tgtcttatgcttcagaatgttaatttgaagtttgtaagcatgcaatggcaggaagcatggctcgaatttagagccggaaa

SEQ ID NO: 8434 - DNA, 80 bp, synthetic construct
  misc_feature 1..80: note = Synthetic: >HKU14-cand-5360-5439
  source 1..80: mol_type = other DNA
acccctacggtttgtagcacttgtttatgctaagggtgcttttaaatttggcgatcctgctgattctagagattttattc

SEQ ID NO: 8435 - DNA, 80 bp, synthetic construct
  misc_feature 1..80: note = Synthetic: >HKU14-cand-5440-5519
  source 1..80: mol_type = other DNA
gtgtggttcttagccaaactgatttggctgaggctgcatgtgattatgagattgtttgtaaatgtggtgttaagcaagag

SEQ ID NO: 8436 - DNA, 80 bp, synthetic construct
  misc_feature 1..80: note = Synthetic: >HKU14-cand-5520-5599
  source 1..80: mol_type = other DNA
cagcgtaaaggtattgacgctgttatgcattttggaacattgagtcgtgaagatcttgaaaaaggctacacaattgattg

SEQ ID NO: 8437 - DNA, 80 bp, synthetic construct
  misc_feature 1..80: note = Synthetic: >HKU14-cand-8160-8239
  source 1..80: mol_type = other DNA
aagagtctgacttcatttataaatacagctcattcttctattaaggagggtgttcagctggataaggttttgaatacgtt

SEQ ID NO: 8438 - DNA, 80 bp, synthetic construct
  misc_feature 1..80: note = Synthetic: >HKU14-cand-8240-8319
  source 1..80: mol_type = other DNA
tattagctgtgctagaaagagttgctctatagattctgatgttgacactaaatgtgtggctgattctgtcatgtctgcag

SEQ ID NO: 8439 - DNA, 80 bp, synthetic construct
  misc_feature 1..80: note = Synthetic: >HKU14-cand-8320-8399
  source 1..80: mol_type = other DNA
ttgctgcgggtattgaattgacagatgaaagctataataatttggtaccaacgtatataaagagtgataatatagtcgca

SEQ ID NO: 8440 - DNA, 80 bp, synthetic construct
  misc_feature 1..80: note = Synthetic: >HKU14-cand-8400-8479
  source 1..80: mol_type = other DNA
gctgatttaggtgttcttattcaaaattcttctaagcatgtacagggcaacgttgctaaaatcgctggtgtgtcttgtat

SEQ ID NO: 8441 - DNA, 80 bp, synthetic construct
  misc_feature 1..80: note = Synthetic: >HKU14-cand-8480-8559
  source 1..80: mol_type = other DNA
atggtctgtggatgcttttaatcagcttagttctgattttcagcataaattgaagaaggcatgttgtaaaactggtctta

SEQ ID NO: 8442 - DNA, 80 bp, synthetic construct
  misc_feature 1..80: note = Synthetic: >HKU14-cand-8560-8639
  source 1..80: mol_type = other DNA
aattgaagcttacttataataagcagagttctaatgtctctgttttgactacaccatttagtttgaaaggtggtgctgtt

SEQ ID NO: 8443 - DNA, 80 bp, synthetic construct
  misc_feature 1..80: note = Synthetic: >HKU14-cand-8640-8719
  source 1..80: mol_type = other DNA
tttagttactttgtttatagttgttttgttgttagtttgatttgttttataggattgtggtgcttgatgcctacttattc

SEQ ID NO: 8444 - DNA, 80 bp, synthetic construct
  misc_feature 1..80: note = Synthetic: >HKU14-cand-8720-8799
  source 1..80: mol_type = other DNA
tgtgcacaaatcagacttcgagcttcctatttatgccagttataaagttttggataatggtgttatcagagatgttagcg

SEQ ID NO: 8445 - DNA, 80 bp, synthetic construct
  misc_feature 1..80: note = Synthetic: >HKU14-cand-8800-8879
  source 1..80: mol_type = other DNA
tgaatgatgtttgtttcgctaacaaatttgaacagtttgatgcatggtatgagtctacttttggtttgacttattatagc

SEQ ID NO: 8446 - DNA, 80 bp, synthetic construct
  misc_feature 1..80: note = Synthetic: >HKU14-cand-8880-8959
  source 1..80: mol_type = other DNA
aatagtatggcttgtcctattgttgttgctgtgatagatcaagatataggctctactgtttttaatgttcctaccaaagt

SEQ ID NO: 8447 - DNA, 80 bp, synthetic construct
  misc_feature 1..80: note = Synthetic: >HKU14-cand-8960-9039
  source 1..80: mol_type = other DNA
gttacggtatggttttcatgtgttgcattttataactcatgcactttctactgatagtgtgcagtgttatactccacatt

SEQ ID NO: 8448 - DNA, 80 bp, synthetic construct
  misc_feature 1..80: note = Synthetic: >HKU14-cand-9040-9119
  source 1..80: mol_type = other DNA
accaaataccgtattctaatttttatgatagtggttgtgttttgtcatcagcttgcactatgtttgctatgtctgatgga

SEQ ID NO: 8449 - DNA, 80 bp, synthetic construct
  misc_feature 1..80: note = Synthetic: >HKU14-cand-9120-9199
  source 1..80: mol_type = other DNA
aaaccacaacctttttgttatacggatgggcttatgaataatgcttctctgtatagctcattggctccacacgtgcgtta

SEQ ID NO: 8450 - DNA, 80 bp, synthetic construct
  misc_feature 1..80: note = Synthetic: >HKU14-cand-9200-9279
  source 1..80: mol_type = other DNA
taaccttgcaaatgttaaaggttatatacggtttcctgaagtgctgcgtgaaggtcttgtgcgtattgttcgcacacgat

SEQ ID NO: 8451 - DNA, 80 bp, synthetic construct
  misc_feature 1..80: note = Synthetic: >HKU14-cand-9280-9359
  source 1..80: mol_type = other DNA
ctatgacgtattgcagagttgggctatgtgaggtttcagatgagggtatttgttttaattttaatggttcatgggttttg

SEQ ID NO: 8452 - DNA, 80 bp, synthetic construct
  misc_feature 1..80: note = Synthetic: >HKU14-cand-9360-9439
  source 1..80: mol_type = other DNA
aataatgattattatagaagtttgccaggaacattttgtggtagggatgtttttgatttggtatatcagtttttgagcgg

SEQ ID NO: 8453 - DNA, 80 bp, synthetic construct
  misc_feature 1..80: note = Synthetic: >HKU14-cand-14550-14629
  source 1..80: mol_type = other DNA
atgtggacacacatcgttatcgcttgtctcttaaagacttgcttttatacgctgctgatcctgctttgcatgttgcatca

SEQ ID NO: 8454 - DNA, 80 bp, synthetic construct
  misc_feature 1..80: note = Synthetic: >HKU14-cand-14630-14709
  source 1..80: mol_type = other DNA
gctacagcattgtatgatttacgtacctgttgctttagtgtagcagctatagcaagtggtgtgaagtttcaaacagttaa

SEQ ID NO: 8455 - DNA, 80 bp, synthetic construct
  misc_feature 1..80: note = Synthetic: >HKU14-cand-14710-14789
  source 1..80: mol_type = other DNA
gcctggtaattttaatcaggatttttatgattttattttaagtaagggcttgcttaaagagggtagctcagttgatttga

SEQ ID NO: 8456 - DNA, 80 bp, synthetic construct
  misc_feature 1..80: note = Synthetic: >HKU14-cand-14790-14869
  source 1..80: mol_type = other DNA
agcactttttctttacgcaagatggtaatgctgctattactgattataattattataagtataatttgcccactatggtg

SEQ ID NO: 8457 - DNA, 80 bp, synthetic construct
  misc_feature 1..80: note = Synthetic: >HKU14-cand-14870-14949
  source 1..80: mol_type = other DNA
gacattaagcagttgttgtttgttttggaggttgtttataagtattttgagatttatgatggtggttgtatacccgcatc

SEQ ID NO: 8458 - DNA, 80 bp, synthetic construct
  misc_feature 1..80: note = Synthetic: >HKU14-cand-14950-15029
  source 1..80: mol_type = other DNA
acaagttattgtaaataattatgataagagtgctggctatccatttaataaatttggaaaagccagactatactacgagg

SEQ ID NO: 8459 - DNA, 80 bp, synthetic construct
  misc_feature 1..80: note = Synthetic: >HKU14-cand-15030-15109
  source 1..80: mol_type = other DNA
cattgtcatttgatgagcaggatgatatttacgcttatactaagcggaatgtcctgcccacacttacacaaatgaacctt

SEQ ID NO: 8460 - DNA, 80 bp, synthetic construct
  misc_feature 1..80: note = Synthetic: >HKU14-cand-15110-15189
  source 1..80: mol_type = other DNA
aagtatgccattagtgctaaaaatagggcccgcactgtagctggagtttctattttgagtactatgactggcagaatgtt

SEQ ID NO: 8461 - DNA, 80 bp, synthetic construct
  misc_feature 1..80: note = Synthetic: >HKU14-cand-15190-15269
  source 1..80: mol_type = other DNA
tcaccaaaagtgtttgaaaagtatagcagctactcgtggtgttcctgttgttataggcactacgaaattctatggcgggt

SEQ ID NO: 8462 - DNA, 80 bp, synthetic construct
  misc_feature 1..80: note = Synthetic: >HKU14-cand-15270-15349
  source 1..80: mol_type = other DNA
gggatgatatgctccgccgccttattaaagatgttgataatcctgtacttatgggttgggattatccaaaatgtgatcgt

SEQ ID NO: 8463 - DNA, 80 bp, synthetic construct
  misc_feature 1..80: note = Synthetic: >HKU14-cand-15350-15429
  source 1..80: mol_type = other DNA
gctatgccaaacatactacgtattgttagtagtttggtattagcgcgaaaacatgatgcatgttgtacgcaaagcgatag

SEQ ID NO: 8464 - DNA, 80 bp, synthetic construct
  misc_feature 1..80: note = Synthetic: >HKU14-cand-15430-15509
  source 1..80: mol_type = other DNA
gttttaccgacttgcgaatgaatgtgcacaagtgttgagcgagattgttatgtgtggtggctgttattatgttaaacctg

SEQ ID NO: 8465 - DNA, 80 bp, synthetic construct
  misc_feature 1..80: note = Synthetic: >HKU14-cand-15510-15589
  source 1..80: mol_type = other DNA
gcggtactagtagtggtgatgcaaccactgcctttgctaactcagtttttaacatatgtcaagctgtttcagccaatgta

SEQ ID NO: 8466 - DNA, 80 bp, synthetic construct
  misc_feature 1..80: note = Synthetic: >HKU14-cand-15590-15669
  source 1..80: mol_type = other DNA
tgctcattaatggcatgcaatggaaataagattgaagatttgagtattcgcgctcttcaaaagcgtttatactcacatgt

SEQ ID NO: 8467 - DNA, 80 bp, synthetic construct
  misc_feature 1..80: note = Synthetic: >HKU14-cand-15670-15749
  source 1..80: mol_type = other DNA
gtatagaagtgacactgttgacccaacatttgtcacagagtattatgaatttttaaataagcattttagtatgatgattt

SEQ ID NO: 8468 - DNA, 80 bp, synthetic construct
  misc_feature 1..80: note = Synthetic: >HKU14-cand-15750-15829
  source 1..80: mol_type = other DNA
tgagtgatgatggtgttgtgtgttataattctgattatgcgtccaaagggtatattgctaatataagtgcctttcaacag

SEQ ID NO: 8469 - DNA, 80 bp, synthetic construct
  misc_feature 1..80: note = Synthetic: >HKU2-cand-24800-24879
  source 1..80: mol_type = other DNA
tctaaactaaacgatgagtactgattctaacaacacggtccctgtgaccgaagttttagaacatcttagaaactggaact

SEQ ID NO: 8470 - DNA, 80 bp, synthetic construct
  misc_feature 1..80: note = Synthetic: >HKU2-cand-24880-24959
  source 1..80: mol_type = other DNA
tcagctggaatatcatactgacagtatttattgcagtgcttcagtatggtaacatgaagtacagtttctttctctatgga

SEQ ID NO: 8471 - DNA, 80 bp, synthetic construct
  misc_feature 1..80: note = Synthetic: >HKU2-cand-25040-25119
  source 1..80: mol_type = other DNA
taattggtggttcttctccttcagcattctgatgcttgtcataacgctagttctctggcttatgtacataattaatagtt

SEQ ID NO: 8472 - DNA, 80 bp, synthetic construct
  misc_feature 1..80: note = Synthetic: >HKU2-cand-25200-25279
  source 1..80: mol_type = other DNA
agatcctactcgatacctatgccagtggcaccaacaggtattactctgacgattttaagtggaacactctttttcgatgg

SEQ ID NO: 8473 - DNA, 80 bp, synthetic construct
  misc_feature 1..80: note = Synthetic: >HKU2-cand-25280-25359
  source 1..80: mol_type = other DNA
catcagaattgctactggtgtgcagcctgcacacttaccgcaatttgtgactgtcgccaaacctggcacgactataattt

SEQ ID NO: 8474 - DNA, 80 bp, synthetic construct
  misc_feature 1..80: note = Synthetic: >HKU2-cand-25440-25519
  source 1..80: mol_type = other DNA
tctgctttatcaaatagtagtgataacttgacagaaaatgacagattgctgcatttagtctaaactaaacgaatatggcc

SEQ ID NO: 8475 - DNA, 80 bp, synthetic construct
  misc_feature 1..80: note = Synthetic: >HKU2-cand-25520-25599
  source 1..80: mol_type = other DNA
actgttaattggggtgacgctgttgaacaggcggaatctcgtggtcgtaaacctagaattccattgtcactctttgcgcc

SEQ ID NO: 8476 - DNA, 80 bp, synthetic construct
  misc_feature 1..80: note = Synthetic: >HKU2-cand-25680-25759
  source 1..80: mol_type = other DNA
aacagattggttattgggttgaacaaaaacgctggcgaatgcaaaaaggccaacgtaaagatcagccttctaactggcac

SEQ ID NO: 8477 - DNA, 80 bp, synthetic construct
  misc_feature 1..80: note = Synthetic: >HKU2-cand-25760-25839
  source 1..80: mol_type = other DNA
ttttattaccttggtactggtcctcacgcagatgctcctttcaggaaacggattcagggtgtgcattgggtcgctgttga

SEQ ID NO: 8478 - DNA, 80 bp, synthetic construct
  misc_feature 1..80: note = Synthetic: >HKU2-cand-25840-25919
  source 1..80: mol_type = other DNA
cggtgctaaaactagccccacaggtcttggtgttcgcaatcgtaacaaagaacctgctacacctcagtttgggtttcaat

SEQ ID NO: 8479 - DNA, 80 bp, synthetic construct
  misc_feature 1..80: note = Synthetic: >HKU31-cand-4120-4199
  source 1..80: mol_type = other DNA
ccctgatgcaaggcaaggacaggatgtaacattgctttctaaatgttataaggctatgaatgcccatcctttaattgtta

SEQ ID NO: 8480 - DNA, 80 bp, synthetic construct
  misc_feature 1..80: note = Synthetic: >HKU31-cand-4210-4289
  source 1..80: mol_type = other DNA
gtcagcaggcatatttggtgttgaccctaaagtgtcattgcaaatgttacagcaggttgcaaagactaggtttttggttt

SEQ ID NO: 8481 - DNA, 80 bp, synthetic construct
  misc_feature 1..80: note = Synthetic: >HKU31-cand-4290-4369
  source 1..80: mol_type = other DNA
gtgtaaattctgctactatatatgaagagttgacaaaagtggtagtaccacaaggtttaactttttcatttgaaggcatg

SEQ ID NO: 8482 - DNA, 80 bp, synthetic construct
  misc_feature 1..80: note = Synthetic: >HKU31-cand-4370-4449
  source 1..80: mol_type = other DNA
aagagtgctgttgctaaggccaacgaatatggatttaccatgttcatttgtgtagataataaacagaatgttaagctgtt

SEQ ID NO: 8483 - DNA, 80 bp, synthetic construct
  misc_feature 1..80: note = Synthetic: >HKU31-cand-4450-4529
  source 1..80: mol_type = other DNA
gaaaacactaggtgttaaagctgataagaaacagtccacagtgaatggtgtaaggtattattgttatacttctgaagaca

SEQ ID NO: 8484 - DNA, 80 bp, synthetic construct
  misc_feature 1..80: note = Synthetic: >HKU31-cand-4530-4609
  source 1..80: mol_type = other DNA
ccgttcctaatttagtggctgtagctaataaacaaaaaggtattgtagcattacctttgggttatgttactcatgggttt

SEQ ID NO: 8485 - DNA, 80 bp, synthetic construct
  misc_feature 1..80: note = Synthetic: >HKU31-cand-4610-4689
  source 1..80: mol_type = other DNA
gatttaatgcaagcagctgcgatagttaaaatggtaacagtgccatatgtgtgtctgcttgctaataaagaccaattggc

SEQ ID NO: 8486 - DNA, 80 bp, synthetic construct
  misc_feature 1..80: note = Synthetic: >HKU31-cand-4690-4769
  source 1..80: mol_type = other DNA
tataattcaaggtgatgtcatgaagagtacgccatttgaagaatttgtcagtggtattaaaggccataatggttatgcac

SEQ ID NO: 8487 - DNA, 80 bp, synthetic construct
  misc_feature 1..80: note = Synthetic: >HKU31-cand-4770-4849
  source 1..80: mol_type = other DNA
attggcaattagtccaaggtgaaatactggttaatggtgtttcatatagtaagttgttacaatggtctgatcaaactgtt

SEQ ID NO: 8488 - DNA, 80 bp, synthetic construct
  misc_feature 1..80: note = Synthetic: >HKU31-cand-4850-4929
  source 1..80: mol_type = other DNA
gtgtacagtagtaataaattgtttgttttaaagaatggcaatttattgcccttcaaaagtgtagagcagtgtcgttcata

SEQ ID NO: 8489 - DNA, 80 bp, synthetic construct
  misc_feature 1..80: note = Synthetic: >HKU31-cand-4930-5009
  source 1..80: mol_type = other DNA
tttgaattctagaacgacgcaacagttagacatcgaagtgcttgtcactgtcgatggtgttaattttagaactgttattc

SEQ ID NO: 8490 - DNA, 80 bp, synthetic construct
  misc_feature 1..80: note = Synthetic: >HKU31-cand-5010-5089
  source 1..80: mol_type = other DNA
taaataataagaacacctttagaagccaactgggtacagtgtttctagatggtgtagatgtgtctgataccataccaagt

SEQ ID NO: 8491 - DNA, 80 bp, synthetic construct
  misc_feature 1..80: note = Synthetic: >HKU31-cand-5090-5169
  source 1..80: mol_type = other DNA
gtcaataagaatggtgccagtgtttatattgcagataatttttcaaaggaagaattagctgcagttaaagaaacgtatgg

SEQ ID NO: 8492 - DNA, 80 bp, synthetic construct
  misc_feature 1..80: note = Synthetic: >HKU31-cand-5170-5249
  source 1..80: mol_type = other DNA
cgttgaagatccaacgtttttatataagtattattccatacgtgcaaaggttgtaaaatggaaaatggctatgtgtgaag

SEQ ID NO: 8493 - DNA, 80 bp, synthetic construct
  misc_feature 1..80: note = Synthetic: >HKU31-cand-5250-5329
  source 1..80: mol_type = other DNA
gtacaccttctctctgtcttaatagtaataactgctatttgaatgcggcggttatgatgttggactgtttgagagatatt

SEQ ID NO: 8494 - DNA, 80 bp, synthetic construct
  misc_feature 1..80: note = Synthetic: >HKU31-cand-5340-5419
  source 1..80: mol_type = other DNA
taccagctttccaagctgcgtatatgaaatttaaaggtggtgattttggagattttatatctcttttaatggcatatggt

SEQ ID NO: 8495 - DNA, 80 bp, synthetic construct
  misc_feature 1..80: note = Synthetic: >HKU31-cand-11820-11899
  source 1..80: mol_type = other DNA
gtactatgtattttggtgtcttctcatttttaaatcttaaaatgcgcgcacctatgggtgtgtattcctatgaagtttct

SEQ ID NO: 8496 - DNA, 80 bp, synthetic construct
  misc_feature 1..80: note = Synthetic: >HKU31-cand-11900-11979
  source 1..80: mol_type = other DNA
acccaggagttcaggtatatgaatgctaatggacttcgagcacctagaaattcatgggatgctatggttttgaattttaa

SEQ ID NO: 8497 - DNA, 80 bp, synthetic construct
  misc_feature 1..80: note = Synthetic: >HKU31-cand-11980-12059
  source 1..80: mol_type = other DNA
attgttaggtgtaggtggcgtaccttgtattaaaattgctagtgttcaatctaaacttactgatttaaagtgcacatctg

SEQ ID NO: 8498 - DNA, 80 bp, synthetic construct
  misc_feature 1..80: note = Synthetic: >HKU31-cand-12050-12129
  source 1..80: mol_type = other DNA
tgcacatctgtggtattgctttcagtgttacaacagttacatttggaagctaatagtaaagcttggagtcattgtgtcaa

SEQ ID NO: 8499 - DNA, 80 bp, synthetic construct
  misc_feature 1..80: note = Synthetic: >HKU31-cand-12130-12209
  source 1..80: mol_type = other DNA
gctacataatgatatattatctgcaacagaccccagtgaggcttttgaaaaatttgtagccttattagcaacattaatgt

SEQ ID NO: 8500 - DNA, 80 bp, synthetic construct
  misc_feature 1..80: note = Synthetic: >HKU31-cand-12210-12289
  source 1..80: mol_type = other DNA
ctttttcaggtagtgtagatttagaagctttagcaagtgaattgttagacaatcatagtgttttgcaatccactttaaca

SEQ ID NO: 8501 - DNA, 80 bp, synthetic construct
  misc_feature 1..80: note = Synthetic: >HKU31-cand-12290-12369
  source 1..80: mol_type = other DNA
gaattttcacatttagcgagttatgcagagttggaaactgctcaaaagtcttaccaagaagctgtagcatcaggtgatgc

SEQ ID NO: 8502 - DNA, 80 bp, synthetic construct
  misc_feature 1..80: note = Synthetic: >HKU31-cand-12370-12449
  source 1..80: mol_type = other DNA
gtcaccccaaatgctaaaagctttgcagaaggctgttaatgtggcaaaaaatacttatgaaaaagataagtctattgcta

SEQ ID NO: 8503 - DNA, 80 bp, synthetic construct
  misc_feature 1..80: note = Synthetic: >HKU31-cand-12450-12529
  source 1..80: mol_type = other DNA
gaaagttagagcgcatggctgagcaagctatgacatctatgtataagcaagcacgtgctgaagacaaaaagtctaaaatt

SEQ ID NO: 8504 - DNA, 80 bp, synthetic construct
  misc_feature 1..80: note = Synthetic: >HKU31-cand-12530-12609
  source 1..80: mol_type = other DNA
gttagtgctatgcagactatgttgtttggtatgattaagaagttagataatgatgttcttaatggtatcatttcaaatgc

SEQ ID NO: 8505 - DNA, 80 bp, synthetic construct
  misc_feature 1..80: note = Synthetic: >HKU31-cand-12610-12689
  source 1..80: mol_type = other DNA
tagaaatgggtgtgtaccacttagcattataccactgtgtgcttctaataaacttagagttgtaattccagatatgcaaa

SEQ ID NO: 8506 - DNA, 80 bp, synthetic construct
  misc_feature 1..80: note = Synthetic: >HKU31-cand-12690-12769
  source 1..80: mol_type = other DNA
tctggaaacaggttgtaacgtatcctgtattatcgtatgcaggtgcgctttgggacattacacttataaataatgttgat

SEQ ID NO: 8507 - DNA, 80 bp, synthetic construct
  misc_feature 1..80: note = Synthetic: >HKU31-cand-12770-12849
  source 1..80: mol_type = other DNA
ggtgaagtagttagaccttctgatgtagtagatacaaatgaaagtctaacttggccattattattagaatgcactagagc

SEQ ID NO: 8508 - DNA, 80 bp, synthetic construct
  misc_feature 1..80: note = Synthetic: >HKU31-cand-12850-12929
  source 1..80: mol_type = other DNA
tgtagcatctgctgtcaagttgcaaaataatgagattaagcctacaggacttaaaactatggttgtatcagctggtcaag

SEQ ID NO: 8509 - DNA, 80 bp, synthetic construct
  misc_feature 1..80: note = Synthetic: >HKU31-cand-12930-13009
  source 1..80: mol_type = other DNA
aacaaaatagctgtactgtaaagtctgtagcatattatgaacctgtacaaggtcgtaaaatgcttatgggtatattgtct

SEQ ID NO: 8510 - DNA, 80 bp, synthetic construct
  misc_feature 1..80: note = Synthetic: >HKU31-cand-13010-13089
  source 1..80: mol_type = other DNA
gaagatgctcatttaaaatgggcaagagttgaaggtcaagatggttttataactattgagttacaaccaccttgtaagtt

SEQ ID NO: 8511 - DNA, 80 bp, synthetic construct
  misc_feature 1..80: note = Synthetic: >HKU5-cand-6240-6319
  source 1..80: mol_type = other DNA
atatacaagaatggcgcaatgctacacggcaagcctatcttatgggttaacaattctaaatttgacagtgcacttaacaa

SEQ ID NO: 8512 - DNA, 80 bp, synthetic construct
  misc_feature 1..80: note = Synthetic: >HKU5-cand-6320-6399
  source 1..80: mol_type = other DNA
gtttaatagggctacgcttagacaagtctatgacatagcacctgttactcttgagaataaattcactgtccttcaagaca

SEQ ID NO: 8513 - DNA, 80 bp, synthetic construct
  misc_feature 1..80: note = Synthetic: >HKU5-cand-6400-6479
  source 1..80: mol_type = other DNA
accaaatacagcaggttgaggttgaagcaccaaaggaggatgctaaaccacaatctcctgttcaggttgcagaagtaata

SEQ ID NO: 8514 - DNA, 80 bp, synthetic construct
  misc_feature 1..80: note = Synthetic: >HKU5-cand-6480-6559
  source 1..80: mol_type = other DNA
gataataagctacccattatcaagtgcaaagggctcaaaaagccatttgtaaaggatgggtatagttttgttaatgaccc

SEQ ID NO: 8515 - DNA, 80 bp, synthetic construct
  misc_feature 1..80: note = Synthetic: >HKU5-cand-6560-6639
  source 1..80: mol_type = other DNA
acagggtgtcaatgtggtagacacactaggtattgatgatctacgtgcgttatacgtggaccgcaatcagcgattaattg

SEQ ID NO: 8516 - DNA, 80 bp, synthetic construct
  misc_feature 1..80: note = Synthetic: >HKU5-cand-6720-6799
  source 1..80: mol_type = other DNA
ggatccatcacaagaagagtgaaaattcttctaagtgcatcctctctttttgcacaatttgcatctgttacggtcaacgt

SEQ ID NO: 8517 - DNA, 80 bp, synthetic construct
  misc_feature 1..80: note = Synthetic: >HKU5-cand-6800-6879
  source 1..80: mol_type = other DNA
caccactgcgatggggaaagctttaggtagaaggactcgtaatgtaattactaatactggcattattggacagagctttg

SEQ ID NO: 8518 - DNA, 80 bp, synthetic construct
  misc_feature 1..80: note = Synthetic: >HKU5-cand-6880-6959
  source 1..80: mol_type = other DNA
ctctgctcaaaatgttattaatattacctttcacattctggaagtctaaaaaccaaagcaccgttaaagttgaagtaggt

SEQ ID NO: 8519 - DNA, 80 bp, synthetic construct
  misc_feature 1..80: note = Synthetic: >HKU5-cand-6960-7039
  source 1..80: mol_type = other DNA
gctctaagaactgctggcattgtcacgactaatgttgtaaaacagtgtgcctcggcagcatatgatatgttagtagtcaa

SEQ ID NO: 8520 - DNA, 80 bp, synthetic construct
  misc_feature 1..80: note = Synthetic: >HKU5-cand-7040-7119
  source 1..80: mol_type = other DNA
gtttaagcgtattgactggaaatccactttacgcctgcttttccttatatgtacaactgggctattgttgtcttcactat

SEQ ID NO: 8521 - DNA, 80 bp, synthetic construct
  misc_feature 1..80: note = Synthetic: >HKU5-cand-7120-7199
  source 1..80: mol_type = other DNA
attacttgttcttgtttcatcaagtcttaacaagtgacgtcatgttggatggtgccgaaggcatgttggctacttatagg

SEQ ID NO: 8522 - DNA, 80 bp, synthetic construct
  misc_feature 1..80: note = Synthetic: >HKU5-cand-7280-7359
  source 1..80: mol_type = other DNA
cgatttttgctcaaaccgttcagctctatgtaactggtgtcttattggacaagactcacttactcgatattccgcgttcc

SEQ ID NO: 8523 - DNA, 80 bp, synthetic construct
  misc_feature 1..80: note = Synthetic: >HKU5-cand-7360-7439
  source 1..80: mol_type = other DNA
agatgatccaaactcatgttaccagctatgtcattaacatagactgggtgtggtttgtaatggaattcgcacttgcttac

SEQ ID NO: 8524 - DNA, 80 bp, synthetic construct
  misc_feature 1..80: note = Synthetic: >HKU9-cand-10380-10459
  source 1..80: mol_type = other DNA
ttttgcaaccacttgcagctaaaacaggtgtttcagtagaacgcatgctttcagctttgaaggttttgctctctgctgga

SEQ ID NO: 8525 - DNA, 80 bp, synthetic construct
  misc_feature 1..80: note = Synthetic: >HKU9-cand-10460-10539
  source 1..80: mol_type = other DNA
ttttgtggccgtactattatgggctcatgttcattagaggatgagcatacaccatatgatattggacgccagatgttagg

SEQ ID NO: 8526 - DNA, 80 bp, synthetic construct
  misc_feature 1..80: note = Synthetic: >HKU9-cand-10540-10619
  source 1..80: mol_type = other DNA
tgttaaattgcaaggtaaatttcagtctgcatttaaatggacactacagtggtttgctatagtttttgttcttaccgtac

SEQ ID NO: 8527 - DNA, 80 bp, synthetic construct
  misc_feature 1..80: note = Synthetic: >HKU9-cand-10620-10699
  source 1..80: mol_type = other DNA
ttattttgctgcaattggcgcagtggacctttgttggtgcattgcctttaactttgctattaccgcttatagggtttgta

SEQ ID NO: 8528 - DNA, 80 bp, synthetic construct
  misc_feature 1..80: note = Synthetic: >HKU9-cand-10700-10779
  source 1..80: mol_type = other DNA
gcatgctgtgtagggtttgtgtctttgcttataaagcataaacatacatatcttacagtgtacttgttgcctgtagcaat

SEQ ID NO: 8529 - DNA, 80 bp, synthetic construct
  misc_feature 1..80: note = Synthetic: >HKU9-cand-10780-10859
  source 1..80: mol_type = other DNA
ggttacagcatattataatttccagtacacgcctgagggtgtacagggttatttgcttagtttgtacaattacgttaacc

SEQ ID NO: 8530 - DNA, 80 bp, synthetic construct
  misc_feature 1..80: note = Synthetic: >HKU9-cand-10860-10939
  source 1..80: mol_type = other DNA
caggtcgtattgacgttattggtacagacatagtaacaatgcttattataagtgtagcttgtacattgttaagtgtgcgt

SEQ ID NO: 8531 - DNA, 80 bp, synthetic construct
  misc_feature 1..80: note = Synthetic: >HKU9-cand-10940-11019
  source 1..80: mol_type = other DNA
atggttagaaccgatgcatacagtcgtgtgtggtacgtctgtactgcaattggttggttgtataactgctggaccggtag

SEQ ID NO: 8532 - DNA, 80 bp, synthetic construct
  misc_feature 1..80: note = Synthetic: >HKU9-cand-11020-11099
  source 1..80: mol_type = other DNA
tgctgatactgtagctattagttaccttacatttatggtctcagtttttactaattacacaggtgttgcctgtgtatctt

SEQ ID NO: 8533 - DNA, 80 bp, synthetic construct
  misc_feature 1..80: note = Synthetic: >HKU9-cand-11100-11179
  source 1..80: mol_type = other DNA
tgtatgcagcacaatttatggtatgggttcttagatatttagaccccgccattttattgttgtatggtaagtttagatgc

SEQ ID NO: 8534 - DNA, 80 bp, synthetic construct
  misc_feature 1..80: note = Synthetic: >HKU9-cand-11180-11259
  source 1..80: mol_type = other DNA
gtgttagtttgctatttggtagttggttacttttgcacatgttactttggtgtatttaaccttattaataggttatttag

SEQ ID NO: 8535 - DNA, 80 bp, synthetic construct
  misc_feature 1..80: note = Synthetic: >HKU9-cand-11260-11339
  source 1..80: mol_type = other DNA
atgcaccttaggtaattatgagtatgtcgttagctctcaagagcttagttctcaggaactacgatatatgaattcacatg

SEQ ID NO: 8536 - DNA, 80 bp, synthetic construct
  misc_feature 1..80: note = Synthetic: >HKU9-cand-11340-11419
  source 1..80: mol_type = other DNA
gcctattgccgcctactacatcatggcaggcgcttatgttaaatattaagttggctggtataggaggtattcctatttat

SEQ ID NO: 8537 - DNA, 80 bp, synthetic construct
  misc_feature 1..80: note = Synthetic: >HKU9-cand-11420-11499
  source 1..80: mol_type = other DNA
aaggtgtccactatacagtcaaatatgacagatttaaaatgcactagtgttgttttgctatctgtgttacaacaattacg

SEQ ID NO: 8538 - DNA, 80 bp, synthetic construct
  misc_feature 1..80: note = Synthetic: >HKU9-cand-11500-11579
  source 1..80: mol_type = other DNA
tgttgaatccagtagtaaattgtgggcactatgtgttaagttgcataatgaaatattagcatctagttcgccaacagagg

SEQ ID NO: 8539 - DNA, 80 bp, synthetic construct
  misc_feature 1..80: note = Synthetic: >HKU9-cand-11580-11659
  source 1..80: mol_type = other DNA
cgtttgaggcttttgtttcattgttgtcagtgttgttatctttaccaggtgctataaacttggatgagttgtgtagtagc

SEQ ID NO: 8540 - DNA, 80 bp, synthetic construct
  misc_feature 1..80: note = Synthetic: >HKU9-cand-14230-14309
  source 1..80: mol_type = other DNA
gtagctgctatgactacgggcgtcacttttcagactgtcaaaccagggcagtttaatgaggatttttataattttgctgt

SEQ ID NO: 8541 - DNA, 80 bp, synthetic construct
  misc_feature 1..80: note = Synthetic: >HKU9-cand-14310-14389
  source 1..80: mol_type = other DNA
aaagtgtggtttcttcaaagaaggaagtactatttcttttaagcattttttctatgcccaggatggcaatgctgccatct

SEQ ID NO: 8542 - DNA, 80 bp, synthetic construct
  misc_feature 1..80: note = Synthetic: >HKU9-cand-14390-14469
  source 1..80: mol_type = other DNA
ctgattatgattattataggtataatttgcctactatgtgtgatattaaacaacttctattttcattagaagttgttgat

SEQ ID NO: 8543 - DNA, 80 bp, synthetic construct
  misc_feature 1..80: note = Synthetic: >HKU9-cand-14470-14549
  source 1..80: mol_type = other DNA
aaatattttgaatgctatgatggtggctgcctacaggcaagtcaggttgttgtagctaattatgataagtcagcaggctt

SEQ ID NO: 8544 - DNA, 80 bp, synthetic construct
  misc_feature 1..80: note = Synthetic: >HKU9-cand-14560-14639
  source 1..80: mol_type = other DNA
aagtttggtaaggcacgcctatattatgaatctcttagttatgctgaccaggatgagctttttgcgtacaccaaacgtaa

SEQ ID NO: 8545 - DNA, 80 bp, synthetic construct
  misc_feature 1..80: note = Synthetic: >HKU9-cand-14640-14719
  source 1..80: mol_type = other DNA
tgttctacccactattacacagatgaatttgaagtatgctataagtgctaaaaatcgagctcgcactgtggcaggtgttt

SEQ ID NO: 8546 - DNA, 80 bp, synthetic construct
  misc_feature 1..80: note = Synthetic: >HKU9-cand-14720-14799
  source 1..80: mol_type = other DNA
ctatagcatctactatgacaaatagacaatttcatcagaagatgcttaagtctattgctgcggctcgtggtgcatctgtt

SEQ ID NO: 8547 - DNA, 80 bp, synthetic construct
  misc_feature 1..80: note = Synthetic: >HKU9-cand-14800-14879
  source 1..80: mol_type = other DNA
gttataggcaccactaaattttatggagggtggaaccgcatgcttcgcactttgtgcgaaggtgtagagaaaccacattt

SEQ ID NO: 8548 - DNA, 80 bp, synthetic construct
  misc_feature 1..80: note = Synthetic: >HKU9-cand-14880-14959
  source 1..80: mol_type = other DNA
aatgggttgggactatcctaaatgtgatagagctatgcctaatctattgcgcatatttgctagccttattttagcccgta

SEQ ID NO: 8549 - DNA, 80 bp, synthetic construct
  misc_feature 1..80: note = Synthetic: >HKU9-cand-14960-15039
  source 1..80: mol_type = other DNA
agcatgcaacttgttgcaatgcttcagagcggttttataggttggctaatgaatgtgcacaggttttgagtgaaatggtc

SEQ ID NO: 8550 - DNA, 80 bp, synthetic construct
  misc_feature 1..80: note = Synthetic: >HKU9-cand-15040-15119
  source 1..80: mol_type = other DNA
ctttgtgggggcggtttttatgtaaaacctggtggtaccagtagtggagattccaccactgcatatgctaatagtgtttt

SEQ ID NO: 8551 - DNA, 80 bp, synthetic construct
  misc_feature 1..80: note = Synthetic: >HKU9-cand-15120-15199
  source 1..80: mol_type = other DNA
taacatttgtcaggctgttagtgctaaccttaatacctttttatctatagatggtaataagatttacactacttatgtgc

SEQ ID NO: 8552 - DNA, 80 bp, synthetic construct
  misc_feature 1..80: note = Synthetic: >HKU9-cand-15200-15279
  source 1..80: mol_type = other DNA
aggaactacagaggcggttatacttgggtatataccgtagtaatactgtagataatgagttagttttggattattataac

SEQ ID NO: 8553 - DNA, 80 bp, synthetic construct
  misc_feature 1..80: note = Synthetic: >HKU9-cand-15280-15359
  source 1..80: mol_type = other DNA
tatttgcgtaagcattttagtatgatgatccttagtgatgatggtgttgtctgttataattcagactacgcccaaaaagg

SEQ ID NO: 8554 - DNA, 80 bp, synthetic construct
  misc_feature 1..80: note = Synthetic: >HKU9-cand-15360-15439
  source 1..80: mol_type = other DNA
ttatgtagctgatatacagggctttaaggagttgttgtattttcagaacaatgtgtttatgtctgaagctaagtgttggg

SEQ ID NO: 8555 - DNA, 80 bp, synthetic construct
  misc_feature 1..80: note = Synthetic: >HKU9-cand-15440-15519
  source 1..80: mol_type = other DNA
tagaaccggatataactaaaggtcctcatgaattttgctctcagcatactatgttagtggacatgaagggtgagcaagtt

SEQ ID NO: 8556 - DNA, 80 bp, synthetic construct
  misc_feature 1..80: note = Synthetic: >MERS-cand-4400-4479
  source 1..80: mol_type = other DNA
tgcgtagagttaacgtgccctacgtgtgtctcctagctaataaagagcaagaagctattttgatgtctgaagacgttaag

SEQ ID NO: 8557 - DNA, 80 bp, synthetic construct
  misc_feature 1..80: note = Synthetic: >MERS-cand-4480-4559
  source 1..80: mol_type = other DNA
ttaaacccttcagaagattttataaagcacgtccgcactaatggtggttacaattcttggcatttagtcgagggtgaact

SEQ ID NO: 8558 - DNA, 80 bp, synthetic construct
  misc_feature 1..80: note = Synthetic: >MERS-cand-4560-4639
  source 1..80: mol_type = other DNA
attggtgcaagacttacgcttaaataagctcctgcattggtctgatcaaaccatatgctacaaggatagtgtgttttatg

SEQ ID NO: 8559 - DNA, 80 bp, synthetic construct
  misc_feature 1..80: note = Synthetic: >MERS-cand-4640-4719
  source 1..80: mol_type = other DNA
ttgtaaagaatagtacagcttttccatttgaaacactttcagcatgtcgtgcgtatttggattcacgcacgacacagcag

SEQ ID NO: 8560 - DNA, 80 bp, synthetic construct
  misc_feature 1..80: note = Synthetic: >MERS-cand-4720-4799
  source 1..80: mol_type = other DNA
ttaacaatcgaagtcttagtgactgtcgatggtgtaaattttagaacagtcgttctaaataataagaacacttatagatc

SEQ ID NO: 8561 - DNA, 80 bp, synthetic construct
  misc_feature 1..80: note = Synthetic: >MERS-cand-4800-4879
  source 1..80: mol_type = other DNA
acagcttggatgcgttttctttaatggtgctgatatttctgataccattcctgatgagaaacagaatggtcacagtttat

SEQ ID NO: 8562 - DNA, 80 bp, synthetic construct
  misc_feature 1..80: note = Synthetic: >MERS-cand-4880-4959
  source 1..80: mol_type = other DNA
atctagcagacaatttgactgctgatgaaacaaaggcgcttaaagagttatatggccccgttgatcctactttcttacac

SEQ ID NO: 8563 - DNA, 80 bp, synthetic construct
  misc_feature 1..80: note = Synthetic: >MERS-cand-4960-5039
  source 1..80: mol_type = other DNA
agattctattcacttaaggctgcagtccataagtggaagatggttgtgtgtgataaggtacgttctctcaaattgagtga

SEQ ID NO: 8564 - DNA, 80 bp, synthetic construct
  misc_feature 1..80: note = Synthetic: >MERS-cand-5040-5119
  source 1..80: mol_type = other DNA
taataattgttatcttaatgcagttattatgacacttgatttattgaaggacattaaatttgttatacctgctctacagc

SEQ ID NO: 8565 - DNA, 80 bp, synthetic construct
  misc_feature 1..80: note = Synthetic: >MERS-cand-5120-5199
  source 1..80: mol_type = other DNA
atgcatttatgaaacataagggcggtgattcaactgacttcatagccctcattatggcttatggcaattgcacatttggt

SEQ ID NO: 8566 - DNA, 80 bp, synthetic construct
  misc_feature 1..80: note = Synthetic: >MERS-cand-5200-5279
  source 1..80: mol_type = other DNA
gctccagatgatgcctctcggttacttcataccgtgcttgcaaaggctgagttatgctgttctgcacgcatggtttggag

SEQ ID NO: 8567 - DNA, 80 bp, synthetic construct
  misc_feature 1..80: note = Synthetic: >MERS-cand-5280-5359
  source 1..80: mol_type = other DNA
agagtggtgcaatgtctgtggcataaaagatgttgttctacaaggcttaaaagcttgttgttacgtgggtgtgcaaactg

SEQ ID NO: 8568 - DNA, 80 bp, synthetic construct
  misc_feature 1..80: note = Synthetic: >MERS-cand-5360-5439
  source 1..80: mol_type = other DNA
ttgaagatctgcgtgctcgcatgacatatgtatgccagtgtggtggtgaacgtcatcggcaaatagtcgaacacaccacc

SEQ ID NO: 8569 - DNA, 80 bp, synthetic construct
  misc_feature 1..80: note = Synthetic: >MERS-cand-5440-5519
  source 1..80: mol_type = other DNA
ccctggttgctgctctcaggcacaccaaatgaaaaattggtgacaacctccacggcgcctgattttgtagcgtttaatgt

SEQ ID NO: 8570 - DNA, 80 bp, synthetic construct
  misc_feature 1..80: note = Synthetic: >MERS-cand-5520-5599
  source 1..80: mol_type = other DNA
ctttcagggcattgaaacggctgttggccattatgttcatgctcgcctgaagggtggtcttattttaaagtttgactctg

SEQ ID NO: 8571 - DNA, 80 bp, synthetic construct
  misc_feature 1..80: note = Synthetic: >MERS-cand-5600-5679
  source 1..80: mol_type = other DNA
gcaccgttagcaagacttcagactggaagtgcaaggtgacagatgtacttttccccggccaaaaatacagtagcgattgt

SEQ ID NO: 8572 - DNA, 80 bp, synthetic construct
  misc_feature 1..80: note = Synthetic: >NL63-cand-20790-20869
  source 1..80: mol_type = other DNA
tggtataaacactacttttgattttttaagtaatgcttctagttcttttgactgtatagttaatttgttatttacagaac

SEQ ID NO: 8573 - DNA, 80 bp, synthetic construct
  misc_feature 1..80: note = Synthetic: >NL63-cand-20870-20949
  source 1..80: mol_type = other DNA
agttaggtgcgcctttgggcataactatatctggtgaaactgtgcgtctgcatttatataatgtaactcgtactttttat

SEQ ID NO: 8574 - DNA, 80 bp, synthetic construct
  misc_feature 1..80: note = Synthetic: >NL63-cand-20950-21029
  source 1..80: mol_type = other DNA
gtgccagcagcttataaacttactaaacttagtgttaaatgttactttaactattcctgtgtttttagtgttgtcaacgc

SEQ ID NO: 8575 - DNA, 80 bp, synthetic construct
  misc_feature 1..80: note = Synthetic: >NL63-cand-21030-21109
  source 1..80: mol_type = other DNA
caccgttactgtgaatgtcaccacacataatggccgtgtagttaactacactgtttgtgatgattgtaatggttatactg

SEQ ID NO: 8576 - DNA, 80 bp, synthetic construct
  misc_feature 1..80: note = Synthetic: >NL63-cand-21120-21199
  source 1..80: mol_type = other DNA
ttctgttcaacaggatggccgcattcctaatggtttcccttttaataattggtttttgctaactaatggttccacactag

SEQ ID NO: 8577 - DNA, 80 bp, synthetic construct
  misc_feature 1..80: note = Synthetic: >NL63-cand-21200-21279
  source 1..80: mol_type = other DNA
tggacggggtctctagactttatcaaccactccgtttaacttgtttatggcctgtacctggtcttaaatcttcaactggt

SEQ ID NO: 8578 - DNA, 80 bp, synthetic construct
  misc_feature 1..80: note = Synthetic: >NL63-cand-21280-21359
  source 1..80: mol_type = other DNA
tttgtttattttaatgccactggttctgatgttaattgtaacggctatcaacataattctgttgctgatgttatgcgtta

SEQ ID NO: 8579 - DNA, 80 bp, synthetic construct
  misc_feature 1..80: note = Synthetic: >NL63-cand-21360-21439
  source 1..80: mol_type = other DNA
caatcttaacttcagtgctaattctgtggataatctcaagagtggtgttatagtttttaaaactctacagtacgatgttt

SEQ ID NO: 8580 - DNA, 80 bp, synthetic construct
  misc_feature 1..80: note = Synthetic: >NL63-cand-21440-21519
  source 1..80: mol_type = other DNA
tgttttactgtagtaattcttcttcgggcgttctagacaccacaataccttttggcccttcctctcaaccttattactgt

SEQ ID NO: 8581 - DNA, 80 bp, synthetic construct
  misc_feature 1..80: note = Synthetic: >NL63-cand-21520-21599
  source 1..80: mol_type = other DNA
tttataaatagtaccatcaacaccactcatgttagcacttttgtgggtgtcctaccacccactgtgcgtgagattgttgt

SEQ ID NO: 8582 - DNA, 80 bp, synthetic construct
  misc_feature 1..80: note = Synthetic: >NL63-cand-21600-21679
  source 1..80: mol_type = other DNA
tgctagaactggtcagttttatattaatggttttaagtattttgatttgggttttatcgaagctgtcaattttaatgtca

SEQ ID NO: 8583 - DNA, 80 bp, synthetic construct
  misc_feature 1..80: note = Synthetic: >NL63-cand-21680-21759
  source 1..80: mol_type = other DNA
cgactgctagtgccacagatttttggacggttgcatttgctacttttgttgatgttttggttaatgttagtgcaactaac

SEQ ID NO: 8584 - DNA, 80 bp, synthetic construct
  misc_feature 1..80: note = Synthetic: >NL63-cand-21760-21839
  source 1..80: mol_type = other DNA
attcaaaacttactttattgcgattctccatttgaaaagttgcagtgtgagcacttgcagtttggattgcaagatggttt

SEQ ID NO: 8585 - DNA, 80 bp, synthetic construct
  misc_feature 1..80: note = Synthetic: >NL63-cand-21840-21919
  source 1..80: mol_type = other DNA
ttattctgcaaattttcttgatgataatgttttgcctgagacttatgttgcactccccatttattatcaacacacggaca

SEQ ID NO: 8586 - DNA, 80 bp, synthetic construct
  misc_feature 1..80: note = Synthetic: >NL63-cand-21920-21999
  source 1..80: mol_type = other DNA
taaattttactgcaactgcatcttttggtggttcttgttatgtttgtaaaccacaccaggttaatatatctcttaatggt

SEQ ID NO: 8587 - DNA, 80 bp, synthetic construct
  misc_feature 1..80: note = Synthetic: >NL63-cand-22000-22079
  source 1..80: mol_type = other DNA
aacacttcagtgtgtgttagaacatctcatttttcaattaggtatatttataaccgcgttaagagtggttcaccaggtga

SEQ ID NO: 8588 - DNA, 80 bp, synthetic construct
  misc_feature 1..80: note = Synthetic: >SARSCoV-cand-11330-11409
  source 1..80: mol_type = other DNA
ctgatgaatgtcattacacttgtttacaaagtctactatggtaatgctttagatcaagctatttccatgtgggccttagt

SEQ ID NO: 8589 - DNA, 80 bp, synthetic construct
  misc_feature 1..80: note = Synthetic: >SARSCoV-cand-11490-11569
  source 1..80: mol_type = other DNA
agtattacccattgttatttattactggcaacaccttacagtgtatcatgcttgtttattgtttcttaggctattgttgc

SEQ ID NO: 8590 - DNA, 80 bp, synthetic construct
  misc_feature 1..80: note = Synthetic: >SARSCoV-cand-11570-11649
  source 1..80: mol_type = other DNA
tgctgctactttggccttttctgtttactcaaccgttacttcaggcttactcttggtgtttatgactacttggtctctac

SEQ ID NO: 8591 - DNA, 80 bp, synthetic construct
  misc_feature 1..80: note = Synthetic: >SARSCoV-cand-11650-11729
  source 1..80: mol_type = other DNA
acaagaatttaggtatatgaactcccaggggcttttgcctcctaagagtagtattgatgctttcaagcttaacattaagt

SEQ ID NO: 8592 - DNA, 80 bp, synthetic construct
  misc_feature 1..80: note = Synthetic: >SARSCoV-cand-11730-11809
  source 1..80: mol_type = other DNA
tgttgggtattggaggtaaaccatgtatcaaggttgctactgtacagtctaaaatgtctgacgtaaagtgcacatctgtg

SEQ ID NO: 8593 - DNA, 80 bp, synthetic construct
  misc_feature 1..80: note = Synthetic: >SARSCoV-cand-11810-11889
  source 1..80: mol_type = other DNA
gtactgctctcggttcttcaacaacttagagtagagtcatcttctaaattgtgggcacaatgtgtacaactccacaatga

SEQ ID NO: 8594 - DNA, 80 bp, synthetic construct
  misc_feature 1..80: note = Synthetic: >SARSCoV-cand-11890-11969
  source 1..80: mol_type = other DNA
tattcttcttgcaaaagacacaactgaagctttcgagaagatggtttctcttttgtctgttttgctatccatgcagggtg

SEQ ID NO: 8595 - DNA, 80 bp, synthetic construct
  misc_feature 1..80: note = Synthetic: >SARSCoV-cand-11970-12049
  source 1..80: mol_type = other DNA
ctgtagacattaataggttgtgcgaggaaatgctcgataaccgtgctactcttcaggctattgcttcagaatttagttct

SEQ ID NO: 8596 - DNA, 80 bp, synthetic construct
  misc_feature 1..80: note = Synthetic: >SARSCoV-cand-12050-12129
  source 1..80: mol_type = other DNA
ttaccatcatatgccgcttatgccactgcccaggaggcctatgagcaggctgtagctaatggtgattctgaagtcgttct

SEQ ID NO: 8597 - DNA, 80 bp, synthetic construct
  misc_feature 1..80: note = Synthetic: >SARSCoV-cand-12130-12209
  source 1..80: mol_type = other DNA
caaaaagttaaagaaatctttgaatgtggctaaatctgagtttgaccgtgatgctgccatgcaacgcaagttggaaaaga

SEQ ID NO: 8598 - DNA, 80 bp, synthetic construct
  misc_feature 1..80: note = Synthetic: >SARSCoV-cand-12210-12289
  source 1..80: mol_type = other DNA
tggcagatcaggctatgacccaaatgtacaaacaggcaagatctgaggacaagagggcaaaagtaactagtgctatgcaa

SEQ ID NO: 8599 - DNA, 80 bp, synthetic construct
  misc_feature 1..80: note = Synthetic: >SARSCoV-cand-12290-12369
  source 1..80: mol_type = other DNA
acaatgctcttcactatgcttaggaagcttgataatgatgcacttaacaacattatcaacaatgcgcgtgatggttgtgt

SEQ ID NO: 8600 - DNA, 80 bp, synthetic construct
  misc_feature 1..80: note = Synthetic: >SARSCoV-cand-12370-12449
  source 1..80: mol_type = other DNA
tccactcaacatcataccattgactacagcagccaaactcatggttgttgtccctgattatggtacctacaagaacactt

SEQ ID NO: 8601 - DNA, 80 bp, synthetic construct
  misc_feature 1..80: note = Synthetic: >SARSCoV-cand-12450-12529
  source 1..80: mol_type = other DNA
gtgatggtaacacctttacatatgcatctgcactctgggaaatccagcaagttgttgatgcggatagcaagattgttcaa

SEQ ID NO: 8602 - DNA, 80 bp, synthetic construct
  misc_feature 1..80: note = Synthetic: >SARSCoV-cand-12530-12609
  source 1..80: mol_type = other DNA
cttagtgaaattaacatggacaattcaccaaatttggcttggcctcttattgttacagctctaagagccaactcagctgt

SEQ ID NO: 8603 - DNA, 80 bp, synthetic construct
  misc_feature 1..80: note = Synthetic: >Shrew-cand-16980-17059
  source 1..80: mol_type = other DNA
aaacatgcatttcataccgatttttatgatcgaagggcttttgtaaatttgaagcaaataccattctttttctttgatga

SEQ ID NO: 8604 - DNA, 80 bp, synthetic construct
  misc_feature 1..80: note = Synthetic: >Shrew-cand-17060-17139
  source 1..80: mol_type = other DNA
tagtgagtgtgaagttatttgtgatgttgtaaattatgttcctttaagtgataagaattgtatcacaaaatgtaacattg

SEQ ID NO: 8605 - DNA, 80 bp, synthetic construct
  misc_feature 1..80: note = Synthetic: >Shrew-cand-17140-17219
  source 1..80: mol_type = other DNA
gcaatgctatttgtaataagcatgctaagttatatcaagaatatttagaaaagtataatttatttgtttcaaatggtttt

SEQ ID NO: 8606 - DNA, 80 bp, synthetic construct
  misc_feature 1..80: note = Synthetic: >Shrew-cand-17220-17299
  source 1..80: mol_type = other DNA
aatttgtggggtcctaaatcttttgatgtttataatttgtggtctcttttaaggggcaataatagtttgcaggctcttga

SEQ ID NO: 8607 - DNA, 80 bp, synthetic construct
  misc_feature 1..80: note = Synthetic: >Shrew-cand-17300-17379
  source 1..80: mol_type = other DNA
aagattagcctataatgtagttaatagtggttatgataaaggtttagatggatctttgcctgtagccattgttaatgatc

SEQ ID NO: 8608 - DNA, 80 bp, synthetic construct
  misc_feature 1..80: note = Synthetic: >Shrew-cand-17380-17459
  source 1..80: mol_type = other DNA
gtgtaatagtaaagaaagatttagaagacattgtagtttttgaaaataaaactgcactacctacaaatgtagcatttgaa

SEQ ID NO: 8609 - DNA, 80 bp, synthetic construct
  misc_feature 1..80: note = Synthetic: >Shrew-cand-17460-17539
  source 1..80: mol_type = other DNA
ttatatgttcgtcgtaatgtaggtcttacacctccattatcgttgttgagaaatttgagtgttgttcgaaccgataggtt

SEQ ID NO: 8610 - DNA, 80 bp, synthetic construct
  misc_feature 1..80: note = Synthetic: >Shrew-cand-17540-17619
  source 1..80: mol_type = other DNA
ttgtctttgggattatgatgataataaaccatttactaattatacaagcaatttttgtttgtatacagattttgattttg

SEQ ID NO: 8611 - DNA, 80 bp, synthetic construct
  misc_feature 1..80: note = Synthetic: >Shrew-cand-17620-17699
  source 1..80: mol_type = other DNA
atgttatgacgtgttatgataatagcattagtggtagtattgaaagatttcgtagtgctaataatgctgttttattttcc

SEQ ID NO: 8612 - DNA, 80 bp, synthetic construct
  misc_feature 1..80: note = Synthetic: >Shrew-cand-17700-17779
  source 1..80: mol_type = other DNA
atgactaatattagaggtcttaaaggctttagtattaattatgcatatttaaatggtaagagtgtttttagttctgatgg

SEQ ID NO: 8613 - DNA, 80 bp, synthetic construct
  misc_feature 1..80: note = Synthetic: >Shrew-cand-17780-17859
  source 1..80: mol_type = other DNA
taaagatataaaattatatttttatatcagagaaaaaggtgtgtatgtagaaaatatctgttcattttttacacaaggta

SEQ ID NO: 8614 - DNA, 80 bp, synthetic construct
  misc_feature 1..80: note = Synthetic: >Shrew-cand-17860-17939
  source 1..80: mol_type = other DNA
gaacatttgatacatttgttccacgtagtgaaatggaaaagaattttcttaatatggaaacacaggattttattgtaaaa

SEQ ID NO: 8615 - DNA, 80 bp, synthetic construct
  misc_feature 1..80: note = Synthetic: >Shrew-cand-17940-18019
  source 1..80: mol_type = other DNA
tatggtttagaagattttggttttgaacatgtagtttatggtgatgtaagtaaaaatgttgttggtggtttgcatttatt

SEQ ID NO: 8616 - DNA, 80 bp, synthetic construct
  misc_feature 1..80: note = Synthetic: >Shrew-cand-18020-18099
  source 1..80: mol_type = other DNA
aatttcacaagtgagactttcaaaaatgggagtcttaaaatgtgagcattttggtggtagtgttttaaacactattaatt

SEQ ID NO: 8617 - DNA, 80 bp, synthetic construct
  misc_feature 1..80: note = Synthetic: >Shrew-cand-18100-18179
  source 1..80: mol_type = other DNA
gttgtagtgtaatttatttggataacccttcttataagcatgtctgtacttatatggatatgcttttggatgattttgtg

SEQ ID NO: 8618 - DNA, 80 bp, synthetic construct
  misc_feature 1..80: note = Synthetic: >Shrew-cand-18180-18259
  source 1..80: mol_type = other DNA
gttatattaaaatcacaagatctgtcagtggtttctaaagtagttaatattaatgttgatttgaagaattttagatttat

SEQ ID NO: 8619 - DNA, 80 bp, synthetic construct
  misc_feature 1..80: note = Synthetic: >Sk512R-cand-12340-12419
  source 1..80: mol_type = other DNA
tgcttgctaatggctctggtaatggacaagctattaccaatggcgttgaagctagcacaaaccaagattcatacggtggt

SEQ ID NO: 8620 - DNA, 80 bp, synthetic construct
  misc_feature 1..80: note = Synthetic: >BtSk_AlphaCoV-cand-12310-12389
  source 1..80: mol_type = other DNA
taatggctctggtaatggacaagctattaccaatggcgttgaagctagcacaaaccaagattcatacggtggtgcttctg

SEQ ID NO: 8621 - DNA, 80 bp, synthetic construct
  misc_feature 1..80: note = Synthetic: >AlphaSp-cand-12350-12429
  source 1..80: mol_type = other DNA
ttgctaatggctctggtaatggacaagctattaccaatggcgttgaagctagtacaaatcaagattcatacggtggtgct

SEQ ID NO: 8622 - DNA, 80 bp, synthetic construct
  misc_feature 1..80: note = Synthetic: >Sk512R-cand-12020-12099
  source 1..80: mol_type = other DNA
accagatttgaaagtagtcaaatgggaatttgatggtggttctaatgcaattgagcttgaacctccttgtaaattcttag

SEQ ID NO: 8623 - DNA, 80 bp, synthetic construct
  misc_feature 1..80: note = Synthetic: >Sb512-cand-12030-12109
  source 1..80: mol_type = other DNA
agatttgaaagtagtcaaatgggaatttgatggtggttctaatgcaattgagcttgaacctccttgtaaattcttagtgg

SEQ ID NO: 8624 - DNA, 80 bp, synthetic construct
  misc_feature 1..80: note = Synthetic: >BtSk_AlphaCoV-cand-11990-12069
  source 1..80: mol_type = other DNA
ttgaaagtagtcaaatgggaatttgatggtggttctaatgcaattgagcttgaacctccttgtaaattcttagtggaagc

SEQ ID NO: 8625 - DNA, 80 bp, synthetic construct
  misc_feature 1..80: note = Synthetic: >AlphaSp-cand-12030-12109
  source 1..80: mol_type = other DNA
agatttgaaagtagtcaaatgggaatttgatggtggttctaatgctatcgagctcgaacctccttgtaagttcttggtgg

SEQ ID NO: 8626 - DNA, 80 bp, synthetic construct
  misc_feature 1..80: note = Synthetic: >HKU24-cand-16420-16499
  source 1..80: mol_type = other DNA
ccaaattgtatttaggtggtatgtcatattattgtgaagaccataagccacaatattcgtttaaattagtaatgaatggt

SEQ ID NO: 8627 - DNA, 80 bp, synthetic construct
  misc_feature 1..80: note = Synthetic: >BetaSp-cand-16770-16849
  source 1..80: mol_type = other DNA
tgttaccaaattgtatttaggtggtatgtcatattattgtgaagaccataagccacaatattcttttaaattagtaatga

SEQ ID NO: 8628 - DNA, 80 bp, synthetic construct
  misc_feature 1..80: note = Synthetic: >Sk512R-cand-11860-11939
  source 1..80: mol_type = other DNA
attgtgaacgtattattaagttgcagaataatgagattattcctagcaagattaagcaacgtccaattaaggcagaaggt

SEQ ID NO: 8629 - DNA, 80 bp, synthetic construct
  misc_feature 1..80: note = Synthetic: >Sb512-cand-11870-11949
  source 1..80: mol_type = other DNA
gtgaacgtattattaagttgcagaataatgagattattcctagcaagattaagcaacgtccaattaaggcagaaggtgag

SEQ ID NO: 8630 - DNA, 80 bp, synthetic construct
  misc_feature 1..80: note = Synthetic: >BtSk_AlphaCoV-cand-11830-11909
  source 1..80: mol_type = other DNA
acgtattattaagttgcagaataatgagattattcctagcaagattaagcaacgtccaattaaggcagaaggtgagggtg

SEQ ID NO: 8631 - DNA, 80 bp, synthetic construct
  misc_feature 1..80: note = Synthetic: >AlphaSp-cand-11870-11949
  source 1..80: mol_type = other DNA
gtgaacgtattattaagttgcagaataacgagattattcctagcaagattaagcaacgtccaattaaggcagaaggtgaa

SEQ ID NO: 8632 - DNA, 80 bp, synthetic construct
  misc_feature 1..80: note = Synthetic: >HKU17-cand-5850-5929
  source 1..80: mol_type = other DNA
tgcataaccaaaatgcacatgtctgcatttcaaaatactctgacattcgtaccgttgaccaactgcttaagcctactcca

SEQ ID NO: 8633 - DNA, 80 bp, synthetic construct
  misc_feature 1..80: note = Synthetic: >HKU15-cand-17060-17139
  source 1..80: mol_type = other DNA
aaaactaaagtacaagccagagatggaggcccgtttcaccgatggtttgactatgttttggaattgtaatgttgacacat

SEQ ID NO: 8634 - DNA, 80 bp, synthetic construct
  misc_feature 1..80: note = Synthetic: >HKU17-cand-17080-17159
  source 1..80: mol_type = other DNA
tacaagccggagatggaggcccgtttcaccgatggcttgactatgttttggaattgtaatgttgacacataccctgctaa

SEQ ID NO: 8635 - DNA, 80 bp, synthetic construct
  misc_feature 1..80: note = Synthetic: >SEAC-cand-25800-25879
  source 1..80: mol_type = other DNA
aaaactagccccacaggtcttggtgttcgcaatcgtaacaaagaacctgctacacctcagtttgggtttcaattaccacc

SEQ ID NO: 8636 - DNA, 80 bp, synthetic construct
  misc_feature 1..80: note = Synthetic: >HKU5R-cand-23520-23599
  source 1..80: mol_type = other DNA
agaaatgacactagcattgaagataagctagacgtttgtgttgaatactccctccatggaataacaggaaggggagtttt

SEQ ID NO: 8637 - DNA, 80 bp, synthetic construct
  misc_feature 1..80: note = Synthetic: >Sb512-cand-9720-9799
  source 1..80: mol_type = other DNA
ctacactatcagaggttcttttattagtggagcttgtggttcaccaggctacaatatcaataatggtgttgtagagtttt

SEQ ID NO: 8638 - DNA, 80 bp, synthetic construct
  misc_feature 1..80: note = Synthetic: >HKU14-cand-22350-22429
  source 1..80: mol_type = other DNA
atgatgatgcttggtttaagctatcgtaccattatgaaaacaattcttggttctttcggcatgtctataggaaaagtttt

SEQ ID NO: 8639 - DNA, 80 bp, synthetic construct
  misc_feature 1..80: note = Synthetic: >HKU23-cand-22180-22259
  source 1..80: mol_type = other DNA
gaatgatgatgatgcttggtttaagctatcgtaccattatgaaaacaattcttggttctttcgacatgtctacaggaaaa

SEQ ID NO: 8640 - DNA, 80 bp, synthetic construct
  misc_feature 1..80: note = Synthetic: >Sk512R-cand-6920-6999
  source 1..80: mol_type = other DNA
cactagagtccctctgcaaactattttacagggtgttactaagtcattctatgttaatgccaatggtggtaaaaagtttt

SEQ ID NO: 8641 - DNA, 80 bp, synthetic construct
  misc_feature 1..80: note = Synthetic: >Sb512-cand-6920-6999
  source 1..80: mol_type = other DNA
ctaaactcactagagtccctctgcaaactattttacagggtgttactaagtcattctatgttaatgccaatggtggtaaa

SEQ ID NO: 8642 - DNA, 80 bp, synthetic construct
  misc_feature 1..80: note = Synthetic: >BtRl_BetaCoV-cand-21390-21469
  source 1..80: mol_type = other DNA
attagagaaaacaacagagttgtggtctcaagtgacattcttgttaataactaaacgaacatgattatacttcttctttt

SEQ ID NO: 8643 - DNA, 80 bp, synthetic construct
  misc_feature 1..80: note = Synthetic: >WIV16-cand-21430-21509
  source 1..80: mol_type = other DNA
agagaaaacaacagagttgtggtctcaagtgatattcttgttaataactaaacgaacatgtttattttcttattctttct

SEQ ID NO: 8644 - DNA, 80 bp, synthetic construct
  misc_feature 1..80: note = Synthetic: >BatCoV1A-cand-8090-8169
  source 1..80: mol_type = other DNA
ttgatgtttcagatgaggaatttgtcaatgctgttagcaacgcacatagatttaatgtgttgctttctgacaattctttt

SEQ ID NO: 8645 - DNA, 80 bp, synthetic construct
  misc_feature 1..80: note = Synthetic: >BetaCoV1-cand-12380-12459
  source 1..80: mol_type = other DNA
tgttaatatggctagcttcgttgaatatgaaattgccaagaaaaatttggatgaggctaaggctagcggttctgctaatc

SEQ ID NO: 8646 - DNA, 80 bp, synthetic construct
  misc_feature 1..80: note = Synthetic: >HKU31-cand-15640-15719
  source 1..80: mol_type = other DNA
ggtggttattatgttaaacctggaggcactagcagtggtgatgcaaccacagcttatgcaaacagtgtttttaacatatt

SEQ ID NO: 8647 - DNA, 80 bp, synthetic construct
  misc_feature 1..80: note = Synthetic: >HghCoV1-cand-15570-15649
  source 1..80: mol_type = other DNA
tggcggttattatgttaaaccaggaggcactagcagtggtgatgcaaccacagcttatgcaaacagtgtttttaacatat

SEQ ID NO: 8648 - DNA, 80 bp, synthetic construct
  misc_feature 1..80: note = Synthetic: >BetaSp-cand-20290-20369
  source 1..80: mol_type = other DNA
aatattagtcaattaaatgtattgtatgatggtcgtgacaatggtgctcttgaagcatttagaaacgcacaaaatggtgt

SEQ ID NO: 8649 - DNA, 80 bp, synthetic construct
  misc_feature 1..80: note = Synthetic: >BetaSp-cand-22770-22849
  source 1..80: mol_type = other DNA
atagtaaatattttcgaaagacaattcgtcataaatgttgtaactgtgcaggtgagttttcatacacgtcaagtgtatga

SEQ ID NO: 8650 - DNA, 80 bp, synthetic construct
  misc_feature 1..80: note = Synthetic: >BetaSp-cand-20210-20289
  source 1..80: mol_type = other DNA
agcatatcatatgggattatgttagagagagtatattttgcactagcacctttggtgtttgcaagtatactgatattaaa

SEQ ID NO: 8651 - DNA, 80 bp, synthetic construct
  misc_feature 1..80: note = Synthetic: >SARSCoV-cand-21800-21879
  source 1..80: mol_type = other DNA
aatcaaatgttgtccgtggttgggtttttggttctaccatgaacaacaagtcacagtcggtgattattattaacaattct

SEQ ID NO: 8652 - DNA, 80 bp, synthetic construct
  misc_feature 1..80: note = Synthetic: >WIV16-cand-21760-21839
  source 1..80: mol_type = other DNA
actgagaaatcaaatgttgtccgtggttgggtttttggctctaccatgaacaacaagtctcagtcggtgattatcatcaa

SEQ ID NO: 8653 - DNA, 80 bp, synthetic construct
  misc_feature 1..80: note = Synthetic: >Quail-cand-12580-12659
  source 1..80: mol_type = other DNA
aatcaacatttctacaagcatttgcttgatagtaatctattagaccaacttggaatagacattcgccacttctactatat

SEQ ID NO: 8654 - DNA, 80 bp, synthetic construct
  misc_feature 1..80: note = Synthetic: >SARSCoV-cand-24130-24209
  source 1..80: mol_type = other DNA
ctgctggatggacatttggtgctggcgctgctcttcaaataccttttgctatgcaaatggcatataggttcaatggcatt

SEQ ID NO: 8655 - DNA, 80 bp, synthetic construct
  misc_feature 1..80: note = Synthetic: >WIV16-cand-24090-24169
  source 1..80: mol_type = other DNA
gacattcggtgctggcgctgctcttcaaataccttttgctatgcaaatggcatataggttcaatggcattggagttactc

SEQ ID NO: 8656 - DNA, 80 bp, synthetic construct
  misc_feature 1..80: note = Synthetic: >Sb512-cand-4460-4539
  source 1..80: mol_type = other DNA
ctgagttgttgacaaaagcttatacttttgttttcaagcagaagggtgttcctttgatgccactccttagtgtgggcatt

SEQ ID NO: 8657 - DNA, 80 bp, synthetic construct
  misc_feature 1..80: note = Synthetic: >Sk512R-cand-4450-4529
  source 1..80: mol_type = other DNA
cagctgagttgttgacaaaagcttatacttttgttttcaagcagaagggtgttcctttgatgccactccttagtgtgggc

SEQ ID NO: 8658 - DNA, 80 bp, synthetic construct
  misc_feature 1..80: note = Synthetic: >BetaSp-cand-17250-17329
  source 1..80: mol_type = other DNA
atcagtgggtgatgtttttgttttaacatcacactctgtagcaaatttaagtgctcctacgcttgttccacaggagcatt

SEQ ID NO: 8659 - DNA, 80 bp, synthetic construct
  misc_feature 1..80: note = Synthetic: >HKU5-cand-13040-13119
  source 1..80: mol_type = other DNA
aatgctgatgggtattctttctgaaaacgcacatctaaagtgggctaaagttgaaggccgcgatggatttgtgaatattg

SEQ ID NO: 8660 - DNA, 80 bp, synthetic construct
  misc_feature 1..80: note = Synthetic: >HKU5R-cand-13030-13109
  source 1..80: mol_type = other DNA
gtcgtaaaatgctgatgggtattctttctgaaaacgcacatctaaagtgggctaaagttgaaggccgcgatggatttgtg

SEQ ID NO: 8661 - DNA, 80 bp, synthetic construct
  misc_feature 1..80: note = Synthetic: >WIV16-cand-29150-29229
  source 1..80: mol_type = other DNA
ccgtgctacaacttcctcaaggaacaacattgccaaaaggcttctacgcagaggggagcagaggcggcagtcaagcctct

SEQ ID NO: 8662 - DNA, 80 bp, synthetic construct
  misc_feature 1..80: note = Synthetic: >HKU5R-cand-1930-2009
  source 1..80: mol_type = other DNA
ttaatgccccgtttgttgttctctccggactcggagaatcctttaagaaggccgctgcaactccttggaaattgtgcagc

SEQ ID NO: 8663 - DNA, 80 bp, synthetic construct
  misc_feature 1..80: note = Synthetic: >MbCoV1-cand-4330-4409
  source 1..80: mol_type = other DNA
gttctactactagtggacactataaaaccaatgtctttggcaaaagattttgcgttgatggttctggtgttagcagcatt

SEQ ID NO: 8664 - DNA, 80 bp, synthetic construct
  misc_feature 1..80: note = Synthetic: >HKU5R-cand-17120-17199
  source 1..80: mol_type = other DNA
tataagctagcagtcggagacatctttgttcttacttctcattcggtggccaccctgcaggcgcccacaattgtgaatca

SEQ ID NO: 8665 - DNA, 80 bp, synthetic construct
  misc_feature 1..80: note = Synthetic: >BetaSp-cand-26220-26299
  source 1..80: mol_type = other DNA
attctaatggtggtctttatggttttaaagactttctcaccaatagaacttatatgatacgtagttgttatagcggacgt

SEQ ID NO: 8666 - DNA, 80 bp, synthetic construct
  misc_feature 1..80: note = Synthetic: >BetaCoV1-cand-26110-26189
  source 1..80: mol_type = other DNA
atggtggtctttatggttttaaagactttctcaccaatagaacttatatgatacgtagttgttatagcggacgtgtaagt

SEQ ID NO: 8667 - DNA, 80 bp, synthetic construct
  misc_feature 1..80: note = Synthetic: >HKU5R-cand-23920-23999
  source 1..80: mol_type = other DNA
atgaatgtcaacttcctcttggtcaatcactttgtgctattccaccaactacttctacacgcgttcgacgtgctacttct

SEQ ID NO: 8668 - DNA, 80 bp, synthetic construct
  misc_feature 1..80: note = Synthetic: >HKU5R-cand-8720-8799
  source 1..80: mol_type = other DNA
cattttgtctgttaaatttagtgctaccaaactctcgggcggtgcacccaaatggcttttgaaactccgtgacttcacgt

SEQ ID NO: 8669 - DNA, 80 bp, synthetic construct
  misc_feature 1..80: note = Synthetic: >HKU5-cand-8720-8799
  source 1..80: mol_type = other DNA
caacattttgtctgttaaatttagtgctaccaaactctcgggaggtgcacccaaatggcttttgaaactccgtgacttca

SEQ ID NO: 8670 - DNA, 80 bp, synthetic construct
  misc_feature 1..80: note = Synthetic: >BetaSp-cand-27660-27739
  source 1..80: mol_type = other DNA
atattgtcccttgtccagaacgcgccatatggattatattttattcactttagctaccaaccaactaaatacaccactgc

SEQ ID NO: 8671 - DNA, 80 bp, synthetic construct
  misc_feature 1..80: note = Synthetic: >HKU23-cand-170-249
  source 1..80: mol_type = other DNA
acgtgttgtatcctaggcagtggcccacccataggtcacaatgtcgaagatcaacaaatacggtctcgaactacattggg

SEQ ID NO: 8672 - DNA, 80 bp, synthetic construct
  misc_feature 1..80: note = Synthetic: >HKU14-cand-160-239
  source 1..80: mol_type = other DNA
ggtgacgtgttgtatcctaggcagtggcccacccataggtcataatgccgaagatcaacaaatacggtctcgagctgcaa

SEQ ID NO: 8673 - DNA, 80 bp, synthetic construct
  misc_feature 1..80: note = Synthetic: >FelineAlpha1-cand-6330-6409
  source 1..80: mol_type = other DNA
tttgtgatcatagttgtagtttttaaggcagttctcgcacttaaacacattttcctaccatgcaacaacccgtcatgtaa

SEQ ID NO: 8674 - DNA, 80 bp, synthetic construct
  misc_feature 1..80: note = Synthetic: >BatCoV1A-cand-9860-9939
  source 1..80: mol_type = other DNA
ataattcaactcttcaggctggtttgcgtaaattcgctcaaccatcaggtgttattgaacattgcattgtgcgcgttagt

SEQ ID NO: 8675 - DNA, 80 bp, synthetic construct
  misc_feature 1..80: note = Synthetic: >HKU10R-cand-25980-26059
  source 1..80: mol_type = other DNA
tgatgccattatcacactgtccgtctttggtcgccaagtttcaattccagcccttgtggctccaactggcattacgctca

SEQ ID NO: 8676 - DNA, 80 bp, synthetic construct
  misc_feature 1..80: note = Synthetic: >MbCoV1-cand-24930-25009
  source 1..80: mol_type = other DNA
agtgagcttaatcttaccatttctaagattaataatactcttgttgaacttgagtggcttaacagagttgaaacttacat

SEQ ID NO: 8677 - DNA, 80 bp, synthetic construct
  misc_feature 1..80: note = Synthetic: >MsbCoV1-cand-24920-24999
  source 1..80: mol_type = other DNA
gctagtgagcttaatcttactatttctaagattaataatactcttgttgaacttgagtggcttaacagagttgaaactta

SEQ ID NO: 8678 - DNA, 80 bp, synthetic construct
  misc_feature 1..80: note = Synthetic: >BetaCoV1-cand-23870-23949
  source 1..80: mol_type = other DNA
agtgccccactgctgctaatataaatataaatggaattcccatttgtaactatgatccgctacctgttattttgcttggc

SEQ ID NO: 8679 - DNA, 80 bp, synthetic construct
  misc_feature 1..80: note = Synthetic: >MsbCoV1-cand-24680-24759
  source 1..80: mol_type = other DNA
agtgctgattttgttgaagttagcagttgtaatgttacctttattaatttgactattaatgagttgccagagcttttgcc

SEQ ID NO: 8680 - DNA, 80 bp, synthetic construct
  misc_feature 1..80: note = Synthetic: >MbCoV1-cand-24690-24769
  source 1..80: mol_type = other DNA
gctgattttgttgaagttagcagttgtaatgttacctttattaatttgactatcaatgagttgccagagcttttgcctga

SEQ ID NO: 8681 - DNA, 80 bp, synthetic construct
  misc_feature 1..80: note = Synthetic: >BetaSp-cand-22530-22609
  source 1..80: mol_type = other DNA
cgcggagaaaaaggatgggttttattctagtgaaatcactatttagtcattggatgggaatcagaagtgttgataaaccg

SEQ ID NO: 8682 - DNA, 80 bp, synthetic construct
  misc_feature 1..80: note = Synthetic: >HKU5R-cand-30010-30089
  source 1..80: mol_type = other DNA
agtggtgatgatgctgctacagcacctgccacatctcagatggaagatgtccctgaactgcctcctaagcaacagcgcaa

SEQ ID NO: 8683 - DNA, 80 bp, synthetic construct
  misc_feature 1..80: note = Synthetic: >BetaSp-cand-28700-28779
  source 1..80: mol_type = other DNA
agtgtctatttgggtaaatttagaggatttgatacgagtacaacaggatttaaaacccctgattatagtaccagtatcaa

SEQ ID NO: 8684 - DNA, 80 bp, synthetic construct
  misc_feature 1..80: note = Synthetic: >BetaCoV1-cand-28590-28669
  source 1..80: mol_type = other DNA
tatttgggtaaatttagaggatttgatacgagtacaacaggatttaaaacccctgattatagtaccagtatcaagcccat

SEQ ID NO: 8685 - DNA, 80 bp, synthetic construct
  misc_feature 1..80: note = Synthetic: >HKU5-cand-11520-11599
  source 1..80: mol_type = other DNA
agtgtgtacatgcgcactactcatactgacttaggtgtctacctcagtctttgctttgcgttagctgtcgttgtccgtag

SEQ ID NO: 8686 - DNA, 80 bp, synthetic construct
  misc_feature 1..80: note = Synthetic: >Sb512-cand-13940-14019
  source 1..80: mol_type = other DNA
gggtgacgcagctgttagagattttgattattatagatacaaccgtaccactgttttggacatttgccaagcacgtgttg

SEQ ID NO: 8687 - DNA, 80 bp, synthetic construct
  misc_feature 1..80: note = Synthetic: >HKU5-cand-2560-2639
  source 1..80: mol_type = other DNA
gtgatctgagcaagaagcaaattggcattcttgaacctacacccaactctaccaccgttgataagaaaatcaacacaaat

SEQ ID NO: 8688 - DNA, 80 bp, synthetic construct
  misc_feature 1..80: note = Synthetic: >HKU5R-cand-2570-2649
  source 1..80: mol_type = other DNA
caagaagcaaattggcattcttgaacctacacccaactctaccaccgttgataagaaaatcaacacaaacgtggtggaag

SEQ ID NO: 8689 - DNA, 80 bp, synthetic construct
  misc_feature 1..80: note = Synthetic: >MbCoV1-cand-27720-27799
  source 1..80: mol_type = other DNA
caggctgctttgttctttggttcgagagtctctactaaagaagttggtgatactgttgaaatcaagtatcactacaaaat

SEQ ID NO: 8690 - DNA, 80 bp, synthetic construct
  misc_feature 1..80: note = Synthetic: >MsbCoV1-cand-27720-27799
  source 1..80: mol_type = other DNA
ctttgttctttggttcgagagtctctactaaagaagttggtgatactgttgaaatcaagtatcactacaaaatgtctgta

SEQ ID NO: 8691 - DNA, 80 bp, synthetic construct
  misc_feature 1..80: note = Synthetic: >Sk512R-cand-4530-4609
  source 1..80: mol_type = other DNA
atttttaaagtgccaattactgagtctttagctgcatttttggcttgtgtgggtgacagagtttgtaagtgtttttgtta

SEQ ID NO: 8692 - DNA, 80 bp, synthetic construct
  misc_feature 1..80: note = Synthetic: >Sb512-cand-4540-4619
  source 1..80: mol_type = other DNA
tttaaagtgccaattactgagtctttagctgcatttttggcttgtgtgggtgacagagtttgtaagtgtttttgttacac

SEQ ID NO: 8693 - DNA, 80 bp, synthetic construct
  misc_feature 1..80: note = Synthetic: >BetaCoV1-cand-8380-8459
  source 1..80: mol_type = other DNA
tattcaagcagcgcacaagtctcttgcagaaggtgtgcagcttgaaaaagttttaaacacatttattggctgtgcacgaa

SEQ ID NO: 8694 - DNA, 80 bp, synthetic construct
  misc_feature 1..80: note = Synthetic: >HKU4-cand-930-1009
  source 1..80: mol_type = other DNA
gttgaccaccttggctgacattgaagttgatgttaaatctcgtatggattcagatcgcttcattgtattaaacaaaaaat

SEQ ID NO: 8695 - DNA, 80 bp, synthetic construct
  misc_feature 1..80: note = Synthetic: >HKU4R-cand-920-999
  source 1..80: mol_type = other DNA
gggttgactaccttggctgacattgaagctgatgttaaatcccgtatggattcagatcgcttcattgtattaaacaaaaa

SEQ ID NO: 8696 - DNA, 80 bp, synthetic construct
  misc_feature 1..80: note = Synthetic: >Sb512-cand-9560-9639
  source 1..80: mol_type = other DNA
cttctatgcgtggcactttgttgcatattaaagtcaatcaatctaatgttaacacacctaattatacctataaggttttg

SEQ ID NO: 8697 - DNA, 80 bp, synthetic construct
  misc_feature 1..80: note = Synthetic: >HghCoV1-cand-2360-2439
  source 1..80: mol_type = other DNA
caaaagttgcttgatgttttatctaaagcatttaaattgctgcataagaaagtttcatgggctggttcgaaagtccatgc

SEQ ID NO: 8698 - DNA, 80 bp, synthetic construct
  misc_feature 1..80: note = Synthetic: >Sk512R-cand-4770-4849
  source 1..80: mol_type = other DNA
gaaggtgatgctaaattttatgatttgacaccttctatggttcagtcacttcaggttacaaggttggtctcttttacaaa

SEQ ID NO: 8699 - DNA, 80 bp, synthetic construct
  misc_feature 1..80: note = Synthetic: >HKU4R-cand-440-519
  source 1..80: mol_type = other DNA
cttaaagaaaaaggtaaagtcctttttgtcccgatgcatatgcagagggctatgaagtttctcccaggcccacgtgttta

SEQ ID NO: 8700 - DNA, 80 bp, synthetic construct
  misc_feature 1..80: note = Synthetic: >HKU4-cand-450-529
  source 1..80: mol_type = other DNA
taaagaaaaaggtaaaatcctttttgtcccgatgcatatgcagagggctatgaagtttctcccaggcccacgtgtttacc

SEQ ID NO: 8701 - DNA, 80 bp, synthetic construct
  misc_feature 1..80: note = Synthetic: >BtRl_BetaCoV-cand-10600-10679
  source 1..80: mol_type = other DNA
cttaacagattcactactactttgaatgactttaaccttgtggcaatgaagtacaactatgaacctttgacacaagacca

SEQ ID NO: 8702 - DNA, 80 bp, synthetic construct
  misc_feature 1..80: note = Synthetic: >WIV16-cand-10630-10709
  source 1..80: mol_type = other DNA
gtggtttcttaatagattcaccactactttgaatgactttaaccttgtggcaatgaagtacaactatgaacctttgacac

SEQ ID NO: 8703 - DNA, 80 bp, synthetic construct
  misc_feature 1..80: note = Synthetic: >Alpha2-cand-12700-12779
  source 1..80: mol_type = other DNA
ggtatgaccctgtggagaatgaagctattcatgttgtttacgccaagttaggacatattgttgcaaatgcaatgcttaag

SEQ ID NO: 8704 - DNA, 80 bp, synthetic construct
  misc_feature 1..80: note = Synthetic: >AlphaMink-cand-12710-12789
  source 1..80: mol_type = other DNA
tggtatgaccctgtggagaatgaagctattcacgttgtttatgctaagttaggacgcattgttgcaaatgccatgcttaa

SEQ ID NO: 8705 - DNA, 80 bp, synthetic construct
  misc_feature 1..80: note = Synthetic: >BetaSp-cand-26620-26699
  source 1..80: mol_type = other DNA
gtggtctctatgagattcaaattccgacagaatttactataggtaacctagaagaatttgtacaaacaacttcccctaag

SEQ ID NO: 8706 - DNA, 80 bp, synthetic construct
  misc_feature 1..80: note = Synthetic: >BetaCoV1-cand-26510-26589
  source 1..80: mol_type = other DNA
tctatgagattcaaattccgacagaatttactataggtaacctagaagaatttgtacaaacaacttcccctaaggtaacc

SEQ ID NO: 8707 - DNA, 80 bp, synthetic construct
  misc_feature 1..80: note = Synthetic: >HKU2-cand-21840-21919
  source 1..80: mol_type = other DNA
cttaggtatgtgcgtatactcggtaaagtttatgaagtttcatcttgttttgaggcttcatatgacgttttataccgtaa

SEQ ID NO: 8708 - DNA, 80 bp, synthetic construct
  misc_feature 1..80: note = Synthetic: >SEAC-cand-21800-21879
  source 1..80: mol_type = other DNA
tctcaacttaggtatgtgcgtatactcggtaaagtttatgaagtttcatcttgttttgaggcttcatatgacgttttata

SEQ ID NO: 8709 - DNA, 80 bp, synthetic construct
  misc_feature 1..80: note = Synthetic: >SARSRC-cand-7040-7119
  source 1..80: mol_type = other DNA
gtgtttgtttaagtggactagattctcttgattcttaccccgctttagaaactattcaggttacgatttcatcgtataag

SEQ ID NO: 8710 - DNA, 80 bp, synthetic construct
  misc_feature 1..80: note = Synthetic: >BtRl_BetaCoV-cand-7010-7089
  source 1..80: mol_type = other DNA
ttccttgtagtgtttgtttaagtgggttggattctcttgattcttaccccgctttagaaactattcaggttacgatttca

SEQ ID NO: 8711 - DNA, 80 bp, synthetic construct
  misc_feature 1..80: note = Synthetic: >HKU8R-cand-19940-20019
  source 1..80: mol_type = other DNA
gtttccaaagttcacgaagttattgttgactgtaaagtttaccgctggatgttgtggtgtaaggatcataaggttcagac

SEQ ID NO: 8712 - DNA, 80 bp, synthetic construct
  misc_feature 1..80: note = Synthetic: >MN517816-cand-22490-22569
  source 1..80: mol_type = other DNA
cttttatagaagatttgttatttacaagtgttgaaacagttgggttgccaactgatgctgaatataaaaaatgcacagcg

SEQ ID NO: 8713 - DNA, 80 bp, synthetic construct
  misc_feature 1..80: note = Synthetic: >MN531555-cand-27610-27689
  source 1..80: mol_type = other DNA
gcactaggacgcccattaggggaagagctaaattttagtttaagttaagttcaattggctaagtatagttaaaatttata

SEQ ID NO: 8714 - DNA, 80 bp, synthetic construct
  misc_feature 1..80: note = Synthetic: >MN199465-cand-26950-27029
  source 1..80: mol_type = other DNA
gcgccaaaagaaggagaaaaagccaaagaagctggatgatgaattggataaagcattgacatcagatgaggagaggaaca

SEQ ID NO: 8715 - DNA, 80 bp, synthetic construct
  misc_feature 1..80: note = Synthetic: >MN531554-cand-27050-27129
  source 1..80: mol_type = other DNA
gcgcccaaagaaagagaaaaagcccaagaagcaggatgatgaagtggataaagcattgacctcagatgaggagaggaaca

SEQ ID NO: 8716 - DNA, 80 bp, synthetic construct
  misc_feature 1..80: note = Synthetic: >MN517817-cand-22390-22469
  source 1..80: mol_type = other DNA
gctcatacctaacagctttaatttgactgttacagatgagtacatacaaactcgtatggataaagttcaaattaattgcc

SEQ ID NO: 8717 - DNA, 80 bp, synthetic construct
  misc_feature 1..80: note = Synthetic: >MT114541-cand-21120-21199
  source 1..80: mol_type = other DNA
tgtgtctttaaataatacagtggatgttattagattcaaccttaactttactgcagatgtacaatctggcatgggtgcta

SEQ ID NO: 8718 - DNA, 80 bp, synthetic construct
  misc_feature 1..80: note = Synthetic: >MT114540-cand-19840-19919
  source 1..80: mol_type = other DNA
tattaactacttaggaccatactgtgacaaagctatagtagatggtaatataatgcatgccaattatatattttggagaa

SEQ ID NO: 8719 - DNA, 80 bp, synthetic construct
  misc_feature 1..80: note = Synthetic: >MT114544-cand-20380-20459
  source 1..80: mol_type = other DNA
tctcgaactgcaaccactactgcctacgagtgtttcagtaacatacatgctttctattttgatatggaagctatggaaaa

SEQ ID NO: 8720 - DNA, 80 bp, synthetic construct
  misc_feature 1..80: note = Synthetic: >MN517816-cand-23930-24009
  source 1..80: mol_type = other DNA
tgtaatactattaattcttctttggtttaaacttgtgctcagttgttttagagagtgtgttataacacttcaacaactaa

SEQ ID NO: 8721 - DNA, 80 bp, synthetic construct
  misc_feature 1..80: note = Synthetic: >MT114544-cand-13510-13589
  source 1..80: mol_type = other DNA
ttgccaagctcagtttgtttacaaaatagttggcaaatattttgaatgttatgatggtggatgcattaatgctcgtgaag

SEQ ID NO: 8722 - DNA, 80 bp, synthetic construct
  misc_feature 1..80: note = Synthetic: >AY338732-cand-16090-16169
  source 1..80: mol_type = other DNA
tgttgactgcttctcaaaatttaaagctaatgacacaggcaaaaagtacatttttagtactattaatgccttgccagaag

SEQ ID NO: 8723 - DNA, 80 bp, synthetic construct
  misc_feature 1..80: note = Synthetic: >MN548288-cand-16130-16209
  source 1..80: mol_type = other DNA
tatcgactgcttttcaaagtttaaagcaaatgacacaggaaaaaagtacatttttagtactattaatgccttgccagaag

SEQ ID NO: 8724 - DNA, 80 bp, synthetic construct
  misc_feature 1..80: note = Synthetic: >MT114541-cand-23840-23919
  source 1..80: mol_type = other DNA
gtgcttcagatggcgatcgcacttttggacttatcgttaaagatgttcagttgacgttgtttcgtaatctagatgacaag

SEQ ID NO: 8725 - DNA, 80 bp, synthetic construct
  misc_feature 1..80: note = Synthetic: >MT114541-cand-3870-3949
  source 1..80: mol_type = other DNA
ctttacacatccacactatttatcaatgctaatgtaatgactagagttgaaaaaccaaaacaacaacttaaagttgaaaa

SEQ ID NO: 8726 - DNA, 80 bp, synthetic construct
  misc_feature 1..80: note = Synthetic: >MT114544-cand-3930-4009
  source 1..80: mol_type = other DNA
tgttatacatccacactattcatcaacgctaatgtgatgactagagctgaaaaaccaaaacaacaacttaaagttgaaaa

SEQ ID NO: 8727 - DNA, 80 bp, synthetic construct
  misc_feature 1..80: note = Synthetic: >MG693169-cand-990-1069
  source 1..80: mol_type = other DNA
ttccgggtatttattacccgtattcaagtggtagtaaagttgttactaccaaacctgctcgtgacagccccgctgcaaag

SEQ ID NO: 8728 - DNA, 80 bp, synthetic construct
  misc_feature 1..80: note = Synthetic: >SBB-053-cand-24550-24629
  source 1..80: mol_type = other DNA
ttaatcaatgacaatggcatgcttctcagcgccattttatggttatttgtcttgttcttcgttctactcattactattac

SEQ ID NO: 8729 - DNA, 80 bp, synthetic construct
  misc_feature 1..80: note = Synthetic: >SBB-010-cand-24560-24639
  source 1..80: mol_type = other DNA
tgactttaatcaatgacaatggcatgcttctcagcgccattctttggttgtttgtcttgttcttcgttctgctcattaca

SEQ ID NO: 8730 - DNA, 80 bp, synthetic construct
  misc_feature 1..80: note = Synthetic: >SBB-010-cand-15440-15519
  source 1..80: mol_type = other DNA
tgtttggtttgtataagaattctgccacaggttctcctgatgttgagatctttaacacattagccacttcagattggact

SEQ ID NO: 8731 - DNA, 80 bp, synthetic construct
  misc_feature 1..80: note = Synthetic: >SBB-130-cand-15440-15519
  source 1..80: mol_type = other DNA
ttggtttgtataagaattctgccacaggttcccctgatgttgagatctttaacacattagccacttcagattggactgat

SEQ ID NO: 8732 - DNA, 80 bp, synthetic construct
  misc_feature 1..80: note = Synthetic: >SBB-120-cand-260-339
  source 1..80: mol_type = other DNA
ggttgaaaccggtaactgtccctcatggctagcaaccacatttctttggcttttgccaatgatcaggagatttcagcact

SEQ ID NO: 8733 - DNA, 80 bp, synthetic construct
  misc_feature 1..80: note = Synthetic: >SBB-130-cand-250-329
  source 1..80: mol_type = other DNA
gttccgtcttggttgaaaccggtaactgtccctcatggctagcaaccatatttctttggcttttgccaatgatcaggaga

SEQ ID NO: 8734 - DNA, 80 bp, synthetic construct
  misc_feature 1..80: note = Synthetic: >SBB-041-cand-4280-4359
  source 1..80: mol_type = other DNA
ggccctcgacaaggtaaacatgctgccactttacttgagaaaacttatgcttctgtgttagccaatccgggagttccact

SEQ ID NO: 8735 - DNA, 80 bp, synthetic construct
  misc_feature 1..80: note = Synthetic: >SBB-010-cand-4270-4349
  source 1..80: mol_type = other DNA
taatgttgtaggccctcgacaaggtaaacatgctgccactttacttgagaaaacttatgcttctgtgttagccaatccag

SEQ ID NO: 8736 - DNA, 80 bp, synthetic construct
  misc_feature 1..80: note = Synthetic: >SBB-130-cand-4270-4349
  source 1..80: mol_type = other DNA
tgttgtaggccctcgacaaggtaaacatgctgccactttacttgagaaaacttatgcctctgtgttagccaatccaggag

SEQ ID NO: 8737 - DNA, 80 bp, synthetic construct
  misc_feature 1..80: note = Synthetic: >SBB-797-cand-24720-24799
  source 1..80: mol_type = other DNA
acgaacagcatgaatttgtatagactagtggttgatgcatatcaagcaccacctactatatcatcagatgaggcagaact

SEQ ID NO: 8738 - DNA, 80 bp, synthetic construct
  misc_feature 1..80: note = Synthetic: >SBB-788-cand-24720-24799
  source 1..80: mol_type = other DNA
taaacgaacagcatgaatttgtatagactagtggttgatgcataccaagcaccacctactatatcatcagatgaggcaca

SEQ ID NO: 8739 - DNA, 80 bp, synthetic construct
  misc_feature 1..80: note = Synthetic: >SBB-747-cand-18080-18159
  source 1..80: mol_type = other DNA
acgcgcaaccttatttagtagtgtttatggggcatattcttgctggagtcaccatagacacataggaggcgcagactttg

SEQ ID NO: 8740 - DNA, 80 bp, synthetic construct
  misc_feature 1..80: note = Synthetic: >SBB-788-cand-18090-18169
  source 1..80: mol_type = other DNA
ttatttagtagtgtttatggggcatattcttgctggagtcaccatagacacataggaggcgcagactttgtctacaaccc

SEQ ID NO: 8741 - DNA, 80 bp, synthetic construct
  misc_feature 1..80: note = Synthetic: >SBB-797-cand-18080-18159
  source 1..80: mol_type = other DNA
acgtgcaaccttatttagtagtgtttatggggcatattcttgctggagtcaccatagacacataggaggcgcagattttg

SEQ ID NO: 8742 - DNA, 80 bp, synthetic construct
  misc_feature 1..80: note = Synthetic: >PDF-2386-cand-18560-18639
  source 1..80: mol_type = other DNA
acgcttgctggcaccactcagtgggttttgattatgtctataacccatttatgattgatgtccaacagtggggttttaca

SEQ ID NO: 8743 - DNA, 80 bp, synthetic construct
  misc_feature 1..80: note = Synthetic: >PRD-0038-cand-18550-18629
  source 1..80: mol_type = other DNA
tcagatacatacgcttgctggcaccactcagtgggttttgactatgtctataacccatttatgattgatgtccagcagtg

SEQ ID NO: 8744 - DNA, 80 bp, synthetic construct
  misc_feature 1..80: note = Synthetic: >SBB-747-cand-14070-14149
  source 1..80: mol_type = other DNA
acggttaagcccggtcagtttaatgaggatttttataaatttgctgtaaagtgtggcttcttcaaggaaggtagctccat

SEQ ID NO: 8745 - DNA, 80 bp, synthetic construct
  misc_feature 1..80: note = Synthetic: >SBB-797-cand-14080-14159
  source 1..80: mol_type = other DNA
ccggtcagtttaatgaggatttttataaatttgctgtaaagtgtggcttcttcaaggaaggtagctccatttcttttaag

SEQ ID NO: 8746 - DNA, 80 bp, synthetic construct
  misc_feature 1..80: note = Synthetic: >SBB-041-cand-11390-11469
  source 1..80: mol_type = other DNA
gacactatcctcaatttagctagggatggtgttgtacctctttctattatacctgctgcaagtgcaactaagcttaacgt

SEQ ID NO: 8747 - DNA, 80 bp, synthetic construct
  misc_feature 1..80: note = Synthetic: >SBB-010-cand-11400-11479
  source 1..80: mol_type = other DNA
tcaatttagctagggatggtgttgtacctctttctattatacctgctgcaagtgcaactaagcttaacgttgttagtgca

SEQ ID NO: 8748 - DNA, 80 bp, synthetic construct
  misc_feature 1..80: note = Synthetic: >SBB-747-cand-2070-2149
  source 1..80: mol_type = other DNA
gaaaggtaggttccagtttgtacgtggagctttgaataagacctgcggcaatttacgtgatatgcttaccgttgtagtgg

SEQ ID NO: 8749 - DNA, 80 bp, synthetic construct
  misc_feature 1..80: note = Synthetic: >SBB-797-cand-2080-2159
  source 1..80: mol_type = other DNA
ttccagtttgtacgtggagctttgaataagacctgcggcaatttacgtgatatgcttaccgttgtagtaggtaagcttct

SEQ ID NO: 8750 - DNA, 80 bp, synthetic construct
  misc_feature 1..80: note = Synthetic: >SBB-797-cand-1920-1999
  source 1..80: mol_type = other DNA
agaagcttttggtggtgctaaatctgcaatttatgacattttgaaaccagctttagactgggttttaaagaagatgtcct

SEQ ID NO: 8751 - DNA, 80 bp, synthetic construct
  misc_feature 1..80: note = Synthetic: >SBB-747-cand-1910-1989
  source 1..80: mol_type = other DNA
gcaaaactaaagaagcttttggtggtgttaaatctgcaatttatgacattttgaaaccagctttagactgggttttaaag

SEQ ID NO: 8752 - DNA, 80 bp, synthetic construct
  misc_feature 1..80: note = Synthetic: >SBB-041-cand-6910-6989
  source 1..80: mol_type = other DNA
tcctgctactattgaagtaactaaagttgagttcagtaatggtttttattatctgtatggtgcagatggtgatacattct

SEQ ID NO: 8753 - DNA, 80 bp, synthetic construct
  misc_feature 1..80: note = Synthetic: >SBB-130-cand-6900-6979
  source 1..80: mol_type = other DNA
ctacagctcctgctactattgaagtaactaaagttgagttcagtaatggtttctattatctgtatggtgcagatggtgat

SEQ ID NO: 8754 - DNA, 80 bp, synthetic construct
  misc_feature 1..80: note = Synthetic: >SBB-747-cand-14550-14629
  source 1..80: mol_type = other DNA
agacaatttcatcaaaagatgcttaagtcaattgctgcggctcgtggtgcgtctgttgttataggtaccactaagtttta

SEQ ID NO: 8755 - DNA, 80 bp, synthetic construct
  misc_feature 1..80: note = Synthetic: >SBB-797-cand-14560-14639
  source 1..80: mol_type = other DNA
atcaaaagatgcttaagtcaattgctgcggctcgtggtgcgtctgttgttataggtaccactaagttttatggtgggtgg

SEQ ID NO: 8756 - DNA, 80 bp, synthetic construct
  misc_feature 1..80: note = Synthetic: >SBB-120-cand-12000-12079
  source 1..80: mol_type = other DNA
agacagaattggcttctaattcgcccctgcttactatgtgtgcattctcagttgaccctgcaaaaacgtatcttgatgct

SEQ ID NO: 8757 - DNA, 80 bp, synthetic construct
  misc_feature 1..80: note = Synthetic: >SBB-130-cand-11990-12069
  source 1..80: mol_type = other DNA
ggtaagcagacagaattggcttctaattcgcccctgcttactatgtgtgccttttcagttgaccctgcaaaaacgtatct

SEQ ID NO: 8758 - DNA, 80 bp, synthetic construct
  misc_feature 1..80: note = Synthetic: >SBB-024-cand-11990-12069
  source 1..80: mol_type = other DNA
gcaggtaagcagacagaattggcttctaattcgcctctgcttactatgtgtgctttttcagttgaccctgcaaaaacgta

SEQ ID NO: 8759 - DNA, 80 bp, synthetic construct
  misc_feature 1..80: note = Synthetic: >PRD-0038-cand-16150-16229
  source 1..80: mol_type = other DNA
agaccatttctatgttgcaaatgctgttatgaccatgttatttcaacatcacataaattagtgttgtctgttaatcccta

SEQ ID NO: 8760 - DNA, 80 bp, synthetic construct
  misc_feature 1..80: note = Synthetic: >SBB-130-cand-2310-2389
  source 1..80: mol_type = other DNA
ttgattctttttatgtcaacgcacatgctgtagaaacactcactgcttttgaaccagtgttcccagattttgccaaattc

SEQ ID NO: 8761 - DNA, 80 bp, synthetic construct
  misc_feature 1..80: note = Synthetic: >GCS-227-cand-21970-22049
  source 1..80: mol_type = other DNA
tttactgctttcttaatagtacggttttaaacaagccagtttttctgggtgttttgccgcgtatacttagagagtttgtt

SEQ ID NO: 8762 - DNA, 80 bp, synthetic construct
  misc_feature 1..80: note = Synthetic: >GCS-211-cand-21980-22059
  source 1..80: mol_type = other DNA
tttcttaatagtacggttttagacaagccagtttttctgggtgttttgccgcgtatacttagagagtttgtttttactaa

SEQ ID NO: 8763 - DNA, 80 bp, synthetic construct
  misc_feature 1..80: note = Synthetic: >SBB-130-cand-18400-18479
  source 1..80: mol_type = other DNA
tatcatgcttacgtcaactcttacaatgactttgtacaagctggttttacactctgggttcctaattcttttgatttgtt

SEQ ID NO: 8764 - DNA, 80 bp, synthetic construct
  misc_feature 1..80: note = Synthetic: >SBB-010-cand-18410-18489
  source 1..80: mol_type = other DNA
cttatgttaattcttacaatgatttcgtgcaagctggtttcacactctgggttcctaattcttttgatttgtttaacctc

SEQ ID NO: 8765 - DNA, 80 bp, synthetic construct
  misc_feature 1..80: note = Synthetic: >GCS-227-cand-16150-16229
  source 1..80: mol_type = other DNA
ttaataaccaaggactcaaagtgccaaataggtgagttcacttttgaaaaggcagattatggtagtgacactgtgttgtt

SEQ ID NO: 8766 - DNA, 80 bp, synthetic construct
  misc_feature 1..80: note = Synthetic: >GCS-211-cand-16150-16229
  source 1..80: mol_type = other DNA
atttaataaccaaggactcaaagtgccaaataggtgagttcacttttgaaaaggcagattatggtagtgacactgtgttg

SEQ ID NO: 8767 - DNA, 80 bp, synthetic construct
  misc_feature 1..80: note = Synthetic: >GCS-211-cand-26140-26219
  source 1..80: mol_type = other DNA
tctgggcttttaatcctgaaactgactgcatcatcgtgctcaatgtcctgggcaatcagaggtttatacctacaattgtt

SEQ ID NO: 8768 - DNA, 80 bp, synthetic construct
  misc_feature 1..80: note = Synthetic: >GCS-227-cand-26130-26209
  source 1..80: mol_type = other DNA
tcctacattttgggcttttaatcctgaaactgactgcatcatcgtgctcaatgtcctgggcaatcagaggtttataccta

SEQ ID NO: 8769 - DNA, 80 bp, synthetic construct
  misc_feature 1..80: note = Synthetic: >GCS-211-cand-12080-12159
  source 1..80: mol_type = other DNA
tacagaataatgaagtaatgcccactagccaccttaaagaacgtgctgttaatgcagaaggtgaaggttgcactggtgtt

SEQ ID NO: 8770 - DNA, 80 bp, synthetic construct
  misc_feature 1..80: note = Synthetic: >GCS-227-cand-12070-12149
  source 1..80: mol_type = other DNA
tgttaagttacagaataatgaagtaatgcccactagccaccttaaagaacgtgctgttaatgcagaaggtgaaggttgca

SEQ ID NO: 8771 - DNA, 80 bp, synthetic construct
  misc_feature 1..80: note = Synthetic: >SBB-130-cand-25510-25589
  source 1..80: mol_type = other DNA
aacagaggccgtactggcagagtcccactttcattatatcaccctgttatggttactgatgacacaccattttggcgtgt

SEQ ID NO: 8772 - DNA, 80 bp, synthetic construct
  misc_feature 1..80: note = Synthetic: >SBB-010-cand-25520-25599
  source 1..80: mol_type = other DNA
gtactggcagagtcccactttcattatatcaccctgttatggttactgatgacacaccattttggcgtgtcatgcctggt

SEQ ID NO: 8773 - DNA, 80 bp, synthetic construct
  misc_feature 1..80: note = Synthetic: >SBB-130-cand-4990-5069
  source 1..80: mol_type = other DNA
aacagagtgttttgacgtgcagagtgttgtggtcaaagtgacagaaaacggtcgtgatgttaatgatgtcgtggttacga

SEQ ID NO: 8774 - DNA, 80 bp, synthetic construct
  misc_feature 1..80: note = Synthetic: >SBB-120-cand-5000-5079
  source 1..80: mol_type = other DNA
tgttttgacgtgcagagtgttgtggtcaaagtgacggagaacggtcgtgacgttaatgatgtcgtggttacaagtgcaga

SEQ ID NO: 8775 - DNA, 80 bp, synthetic construct
  misc_feature 1..80: note = Synthetic: >GCS-227-cand-4570-4649
  source 1..80: mol_type = other DNA
aactacttacaacaccatctttaaagaaccaggtgtgccacttacgcctcttattagtgtcggaatatttggaatgccaa

SEQ ID NO: 8776 - DNA, 80 bp, synthetic construct
  misc_feature 1..80: note = Synthetic: >GCS-211-cand-4570-4649
  source 1..80: mol_type = other DNA
gcaactacttacaacaccatctttaaagaaccaggtgtgccacttacgcctcttattagtgtcggaatattcggaatgcc

SEQ ID NO: 8777 - DNA, 80 bp, synthetic construct
  misc_feature 1..80: note = Synthetic: >GCS-211-cand-17350-17429
  source 1..80: mol_type = other DNA
aactcaagttctatgaattaaaaatgaccgacctgcaggctactgaaggttgtggtttgtttaaaaactgctatcgtaat

SEQ ID NO: 8778 - DNA, 80 bp, synthetic construct
  misc_feature 1..80: note = Synthetic: >GCS-227-cand-17340-17419
  source 1..80: mol_type = other DNA
gtttgataaactcaagttctatgaattaaaaatgaccgacctgcaggctactgaaggttgtggtttgtttaaaaactgct

SEQ ID NO: 8779 - DNA, 80 bp, synthetic construct
  misc_feature 1..80: note = Synthetic: >SBB-122-cand-14000-14079
  source 1..80: mol_type = other DNA
aactcaatcttaagtatgctataagtggcaaagaacgcgcccgtactgtcggtggtgtgtcgttgttgtctacaatgact

SEQ ID NO: 8780 - DNA, 80 bp, synthetic construct
  misc_feature 1..80: note = Synthetic: >SBB-130-cand-13990-14069
  source 1..80: mol_type = other DNA
atgactcaacttaatcttaagtatgctataagcggcaaagaacgtgcccgtactgtcggtggtgtgtcgttgttgtctac

SEQ ID NO: 8781 - DNA, 80 bp, synthetic construct
  misc_feature 1..80: note = Synthetic: >GCS-227-cand-11030-11109
  source 1..80: mol_type = other DNA
ggtttctttagctgtgtgtactggggtttgctttattgggtcaatcgattcttcaaattaacaattggtgtttatgagtt

SEQ ID NO: 8782 - DNA, 80 bp, synthetic construct
  misc_feature 1..80: note = Synthetic: >GCS-211-cand-11040-11119
  source 1..80: mol_type = other DNA
tagctgtgtgtactggggtttgctttattgggtcaatcgattcttcaaattaacaattggtgtttatgagtttaaagtta

SEQ ID NO: 8783 - DNA, 80 bp, synthetic construct
  misc_feature 1..80: note = Synthetic: >SBB-788-cand-23680-23759
  source 1..80: mol_type = other DNA
aactcttttaataaagcgcttgttagtatacaacaaggctttgatgctacgaacgaggcacttagtaagatgcagtctgt

SEQ ID NO: 8784 - DNA, 80 bp, synthetic construct
  misc_feature 1..80: note = Synthetic: >GCS-227-cand-19900-19979
  source 1..80: mol_type = other DNA
gaagttatagtggattgtaaaccttttagatggatgttatggtgtgaaggttccaaagttgcaaccttctaccctcagtt

SEQ ID NO: 8785 - DNA, 80 bp, synthetic construct
  misc_feature 1..80: note = Synthetic: >GCS-211-cand-19910-19989
  source 1..80: mol_type = other DNA
agtggattgtaaaccttttagatggatgttatggtgtgaaggttccaaagttgcaaccttctaccctcagttacaatctg

SEQ ID NO: 8786 - DNA, 80 bp, synthetic construct
  misc_feature 1..80: note = Synthetic: >GCS-211-cand-15110-15189
  source 1..80: mol_type = other DNA
tgccgatatgggttacatcgccaatatttcggctttcaagtcagttttgtattaccagaataatgttttcatgagcagtt

SEQ ID NO: 8787 - DNA, 80 bp, synthetic construct
  misc_feature 1..80: note = Synthetic: >GCS-227-cand-15110-15189
  source 1..80: mol_type = other DNA
ccgatatgggttacatcgccaatatttcggctttcaagtcagttttgtattaccagaataatgttttcatgagcagttcc

SEQ ID NO: 8788 - DNA, 80 bp, synthetic construct
  misc_feature 1..80: note = Synthetic: >GCS-211-cand-23500-23579
  source 1..80: mol_type = other DNA
aactggtttaggcactgttgaccaggattataagtcctgtagccagggtctttccattgctgaccttgcatgtgctcagt

SEQ ID NO: 8789 - DNA, 80 bp, synthetic construct
  misc_feature 1..80: note = Synthetic: >GCS-227-cand-23490-23569
  source 1..80: mol_type = other DNA
gttgtcacaactggtttaggcactgttgaccaggattataagtcctgtagccagggtctttccattgctgaccttgcatg

SEQ ID NO: 8790 - DNA, 80 bp, synthetic construct
  misc_feature 1..80: note = Synthetic: >SBB-120-cand-7210-7289
  source 1..80: mol_type = other DNA
gcatagtgcatttgtcgacgttcttaaagagagttttggcaaagatcttagtagttgcactactatggcagattgtaaag

SEQ ID NO: 8791 - DNA, 80 bp, synthetic construct
  misc_feature 1..80: note = Synthetic: >SBB-024-cand-7210-7289
  source 1..80: mol_type = other DNA
gcatagtgcatttgtcgacgttcttaaagagagttttggtaaaaatctcagtagttgcactactatggctgattgcaaag

SEQ ID NO: 8792 - DNA, 80 bp, synthetic construct
  misc_feature 1..80: note = Synthetic: >SBB-788-cand-22080-22159
  source 1..80: mol_type = other DNA
ctttggggtgtcacctgctaagttggctcaaatgtgttattccagtgttacactggacatttttagagccaatacaactc

SEQ ID NO: 8793 - DNA, 80 bp, synthetic construct
  misc_feature 1..80: note = Synthetic: >SBB-130-cand-1750-1829
  source 1..80: mol_type = other DNA
tgattttgtaatgcttgataatgcacttgtcaaactagtcacagtcaaagttaaaggacttcgccatgctggcataaaag

SEQ ID NO: 8794 - DNA, 80 bp, synthetic construct
  misc_feature 1..80: note = Synthetic: >SBB-120-cand-14560-14639
  source 1..80: mol_type = other DNA
tatgacaattgttaccgttcatctaccgtttgtgatgttttcgtagataagtattactgttatcttagaaagcacttttc

SEQ ID NO: 8795 - DNA, 80 bp, synthetic construct
  misc_feature 1..80: note = Synthetic: >GCS-227-cand-19420-19499
  source 1..80: mol_type = other DNA
gaaactactgttgttgaaaatgagcaagaaactaagaagcctgttacctggtatatttacactcgtaaggacaatgccta

SEQ ID NO: 8796 - DNA, 80 bp, synthetic construct
  misc_feature 1..80: note = Synthetic: >GCS-211-cand-19430-19509
  source 1..80: mol_type = other DNA
tgttgttgaaaatgagcaagaaactaagaagcctgttacctggtatatttacactcgtaaggacaatgcctatgtagatc

SEQ ID NO: 8797 - DNA, 80 bp, synthetic construct
  misc_feature 1..80: note = Synthetic: >SBB-120-cand-15580-15659
  source 1..80: mol_type = other DNA
gaaactgtcaaagctaaggaggaaagtgttaaatcttcttatgcttgtgcaacgcttaaggaggttgtaggccctaaaga

SEQ ID NO: 8798 - DNA, 80 bp, synthetic construct
  misc_feature 1..80: note = Synthetic: >GCS-227-cand-21570-21649
  source 1..80: mol_type = other DNA
gacaacattttcagtaatactgaaggtggacaaataccagctgatttttcaccacacaactggtttgtgcttaccaatca

SEQ ID NO: 8799 - DNA, 80 bp, synthetic construct
  misc_feature 1..80: note = Synthetic: >GCS-211-cand-21580-21659
  source 1..80: mol_type = other DNA
tttcagtaatactgaaggtggacaaataccagctgatttttcaccacacaactggtttgtgcttaccaaccactcttcta

SEQ ID NO: 8800 - DNA, 80 bp, synthetic construct
  misc_feature 1..80: note = Synthetic: >SBB-010-cand-5840-5919
  source 1..80: mol_type = other DNA
gacctttcattgtgcgctgtcacatcactagtagcaacagaaacttctgcccctgctcttacatcacacaataaaaagac

SEQ ID NO: 8801 - DNA, 80 bp, synthetic construct
  misc_feature 1..80: note = Synthetic: >SBB-024-cand-5850-5929
  source 1..80: mol_type = other DNA
tgtgcgctgtcacatcactagtagcaacagaaacttctgcccctgctcctacatcacacaataaaaagacaattgaatta

SEQ ID NO: 8802 - DNA, 80 bp, synthetic construct
  misc_feature 1..80: note = Synthetic: >229E-cand-25610-25689
  source 1..80: mol_type = other DNA
aaggtccgtaaattcacgaaacagcacaggctgggttttctacgtacgagtaaaacacggtgacttttctgcagtgagct

SEQ ID NO: 8803 - DNA, 80 bp, synthetic construct
  misc_feature 1..80: note = Synthetic: >229E-cand-25690-25769
  source 1..80: mol_type = other DNA
ctcctacgagcaatatgacagaaaacgaaagattgcttcatttgatctaaactgaacgaaaagatggctacagtcaactg

SEQ ID NO: 8804 - DNA, 80 bp, synthetic construct
  misc_feature 1..80: note = Synthetic: >229E-cand-25770-25849
  source 1..80: mol_type = other DNA
ggctgattcctctgaaccacaacgtggtcgtcagggcagaataccttattccctttatagccctttgcttgttgatagtg

SEQ ID NO: 8805 - DNA, 80 bp, synthetic construct
  misc_feature 1..80: note = Synthetic: >229E-cand-25850-25929
  source 1..80: mol_type = other DNA
aacaaccttggaaggtgatacctcgtaatttggtacccaccaacaagaaagataaaagcaagcttataggctattggaat

SEQ ID NO: 8806 - DNA, 80 bp, synthetic construct
  misc_feature 1..80: note = Synthetic: >229E-cand-25930-26009
  source 1..80: mol_type = other DNA
attcaaaaacgtttcagaactagaaagggcaaacgggttgacttgtcacctaagttgcatttctattatcttggcacagg

SEQ ID NO: 8807 - DNA, 80 bp, synthetic construct
  misc_feature 1..80: note = Synthetic: >229E-cand-26010-26089
  source 1..80: mol_type = other DNA
accccacaaagatgctaaattcagagagcgcattgaaggtgcaaacattgtctgggttgctgttgatggtgctaaaaccg

SEQ ID NO: 8808 - DNA, 80 bp, synthetic construct
  misc_feature 1..80: note = Synthetic: >229E-cand-26090-26169
  source 1..80: mol_type = other DNA
aacctactggttatggtgttaggcgcaagaattcagatccagaagaaccacgcttcagtcaaagtcttccaaatggtgtt

SEQ ID NO: 8809 - DNA, 80 bp, synthetic construct
  misc_feature 1..80: note = Synthetic: >229E-cand-26170-26249
  source 1..80: mol_type = other DNA
actgttgttgaagaacctgactctcgtgctccttcgcgttctcagtcaaagtcacagagccgaggtcgtggtgaatttaa

SEQ ID NO: 8810 - DNA, 80 bp, synthetic construct
  misc_feature 1..80: note = Synthetic: >229E-cand-26250-26329
  source 1..80: mol_type = other DNA
acctcagtcgcgcaattcttcaagtgagcgcctaccaaaatctaacagaaaccatacaagtcaggacgacattattaagg

SEQ ID NO: 8811 - DNA, 80 bp, synthetic construct
  misc_feature 1..80: note = Synthetic: >229E-cand-26330-26409
  source 1..80: mol_type = other DNA
cagtagctgctgctcttaaatctttaggttttgaaaagcctcaggaaacttcacaagagaaagaggcagcgaaaaagggt

SEQ ID NO: 8812 - DNA, 80 bp, synthetic construct
  misc_feature 1..80: note = Synthetic: >229E-cand-26410-26489
  source 1..80: mol_type = other DNA
actcctaagccttctagaaatcagagtcctgcttcttttcagactcgtgccaagagccctgctcgtcctcagaattctga

SEQ ID NO: 8813 - DNA, 80 bp, synthetic construct
  misc_feature 1..80: note = Synthetic: >229E-cand-26490-26569
  source 1..80: mol_type = other DNA
aacaaaagaacaaaagcatgaaatgcaaaaaccacggtggaaaagacagcctaatgatgatttgacatctaatgttacac

SEQ ID NO: 8814 - DNA, 80 bp, synthetic construct
  misc_feature 1..80: note = Synthetic: >229E-cand-26570-26649
  source 1..80: mol_type = other DNA
agtgttttggccccagagatccttaccacaactttggaagtgcaggtgttgtagctaatggtgtcaaagccaaaggctac

SEQ ID NO: 8815 - DNA, 80 bp, synthetic construct
  misc_feature 1..80: note = Synthetic: >229E-cand-26650-26729
  source 1..80: mol_type = other DNA
ccacaatttgctgaacttgtgccttctacagctgccatgctgtttgacagtcacattgactctaaggagtctggcaataa

SEQ ID NO: 8816 - DNA, 80 bp, synthetic construct
  misc_feature 1..80: note = Synthetic: >229E-cand-26730-26809
  source 1..80: mol_type = other DNA
tgttgttcttacttacacaactagggttacagtgcccaaggaccacccgcatttgggcaagttcttagaggagttaaatg

SEQ ID NO: 8817 - DNA, 80 bp, synthetic construct
  misc_feature 1..80: note = Synthetic: >229E-cand-26810-26889
  source 1..80: mol_type = other DNA
cattcactaagcctctacaagtaagagacatgcaacaacacccaattgtacctcttcttaaccctagtgcacaagaattc

SEQ ID NO: 8818 - DNA, 80 bp, synthetic construct
  misc_feature 1..80: note = Synthetic: >Anlong-cand-25220-25299
  source 1..80: mol_type = other DNA
atttttaacatcgttacaacaactcaacttgacgaaacagtcgttgaactgtagcgtgttatgttgctgaaaatcatcga

SEQ ID NO: 8819 - DNA, 80 bp, synthetic construct
  misc_feature 1..80: note = Synthetic: >Anlong-cand-25300-25379
  source 1..80: mol_type = other DNA
ggataatggtgtcattgttaatggcatcatttggctcttgatccttgtatttgtactacttatttgtatcactatattga

SEQ ID NO: 8820 - DNA, 80 bp, synthetic construct
  misc_feature 1..80: note = Synthetic: >Anlong-cand-25380-25459
  source 1..80: mol_type = other DNA
agctaatacagctctgtattgcctgtcaccagtttgcaaataggactgtgtatgcccctgtttatagtgtgtaccagtgg

SEQ ID NO: 8821 - DNA, 80 bp, synthetic construct
  misc_feature 1..80: note = Synthetic: >Anlong-cand-25460-25539
  source 1..80: mol_type = other DNA
tacaaggattacatgcgaattgcgccccttcctccagcttttgatgtttaaactaaaacgatgagtggcagtaatcaaac

SEQ ID NO: 8822 - DNA, 80 bp, synthetic construct
  misc_feature 1..80: note = Synthetic: >Anlong-cand-25540-25619
  source 1..80: mol_type = other DNA
tgtccccgtcggggaagttctcgaacatctccgtaactggagttttgcctggaacataatattaactgtgttaatagtta

SEQ ID NO: 8823 - DNA, 80 bp, synthetic construct
  misc_feature 1..80: note = Synthetic: >Anlong-cand-25620-25699
  source 1..80: mol_type = other DNA
tgctccaatatggcaactttaagtacagcaaaatcctgtatgggattaaaatggctgtgttatggctgctttggccttgt

SEQ ID NO: 8824 - DNA, 80 bp, synthetic construct
  misc_feature 1..80: note = Synthetic: >Anlong-cand-25700-25779
  source 1..80: mol_type = other DNA
gtcattgcactctctgtaactaatgcctgggctgacttcaatgttaattgggcgtattttggcatcagcatttttatgct

SEQ ID NO: 8825 - DNA, 80 bp, synthetic construct
  misc_feature 1..80: note = Synthetic: >Anlong-cand-25780-25859
  source 1..80: mol_type = other DNA
tgttgtcacattagtactctggattatgtattttctgaacagtttccgcctttacaggcgaaccaggagcttctgggcct

SEQ ID NO: 8826 - DNA, 80 bp, synthetic construct
  misc_feature 1..80: note = Synthetic: >Anlong-cand-25860-25939
  source 1..80: mol_type = other DNA
ttaacccggaaactgattctataattgtcttttctgtctatggaacaacctattccattccagtgatccaagcccctcag

SEQ ID NO: 8827 - DNA, 80 bp, synthetic construct
  misc_feature 1..80: note = Synthetic: >Anlong-cand-25940-26019
  source 1..80: mol_type = other DNA
ggcattacattcacaatcctcagtggtacacttttggtcgacggcataaaaattgcaacagcggtgcgcattgatgcact

SEQ ID NO: 8828 - DNA, 80 bp, synthetic construct
  misc_feature 1..80: note = Synthetic: >Anlong-cand-26020-26099
  source 1..80: mol_type = other DNA
gccgcaatatgtcactgtggctaaagctactacgaccattgtgttccacagagttggaaaggctgtgaatgaaaggaccc

SEQ ID NO: 8829 - DNA, 80 bp, synthetic construct
  misc_feature 1..80: note = Synthetic: >Anlong-cand-26100-26179
  source 1..80: mol_type = other DNA
aaacgggatggctgttcttcgttcggtcgggctatggtgactacgctgctcattctaccggaacaggacagatgacagaa

SEQ ID NO: 8830 - DNA, 80 bp, synthetic construct
  misc_feature 1..80: note = Synthetic: >Anlong-cand-26180-26259
  source 1..80: mol_type = other DNA
agtgaaaaattgcttcatatagcataaactaaacaatgagctctgtcaaatttgaggcctctggtcgcactggcagaact

SEQ ID NO: 8831 - DNA, 80 bp, synthetic construct
  misc_feature 1..80: note = Synthetic: >Anlong-cand-26260-26339
  source 1..80: mol_type = other DNA
cctctctcctattttgcccctataacagttacctctgggaaaaatctttggaacgtcctccctaaaaatgcagtcccatc

SEQ ID NO: 8832 - DNA, 80 bp, synthetic construct
  misc_feature 1..80: note = Synthetic: >Anlong-cand-26340-26419
  source 1..80: mol_type = other DNA
tggaaaaggaaaggccaaccagcaggttggatactggtccgaacaaaccagatggaagatgcagaagggagagcgggttg

SEQ ID NO: 8833 - DNA, 80 bp, synthetic construct
  misc_feature 1..80: note = Synthetic: >Anlong-cand-26420-26499
  source 1..80: mol_type = other DNA
agaagccttctttctggcacttctactttcttggtaccggccctcacgctgatgccaagtttagagagcgcatccaaggt

SEQ ID NO: 8834 - DNA, 80 bp, synthetic construct
  misc_feature 1..80: note = Synthetic: >Beluga-cand-6180-6259
  source 1..80: mol_type = other DNA
gagcgaacggagctcagttgtgtagttggaagtaaaaggtttccctattatgtgtatgctaatagtgtagctaagatgtg

SEQ ID NO: 8835 - DNA, 80 bp, synthetic construct
  misc_feature 1..80: note = Synthetic: >Beluga-cand-6260-6339
  source 1..80: mol_type = other DNA
cagtaagcatatgtggtgctgcaagaattgtgatgtatttggtgaaggtaatacatttatttccacagctattgtgggcg

SEQ ID NO: 8836 - DNA, 80 bp, synthetic construct
  misc_feature 1..80: note = Synthetic: >Beluga-cand-6340-6419
  source 1..80: mol_type = other DNA
acctcactgataagattagaaggaaagtcaaggctacgtcagaagcattggctattgctacattggtagaagaaggagat

SEQ ID NO: 8837 - DNA, 80 bp, synthetic construct
  misc_feature 1..80: note = Synthetic: >Beluga-cand-6420-6499
  source 1..80: mol_type = other DNA
aattatgaactccactataaattaaatggtgctgaaggtagccgtgtgtatgataaaaaccaattttggaattgtgctat

SEQ ID NO: 8838 - DNA, 80 bp, synthetic construct
  misc_feature 1..80: note = Synthetic: >Beluga-cand-6500-6579
  source 1..80: mol_type = other DNA
accagtgtctgatgcgtcaaagtgtggtaagtttgaaccagacaattttattacctataatgccagttcacaaagtgagt

SEQ ID NO: 8839 - DNA, 80 bp, synthetic construct
  misc_feature 1..80: note = Synthetic: >Beluga-cand-6580-6659
  source 1..80: mol_type = other DNA
tgtcattagcaaagcaatgtgctgtgtattatgctcaagtgttgtctagaccaaccattattgtgcctctttctcaggag

SEQ ID NO: 8840 - DNA, 80 bp, synthetic construct
  misc_feature 1..80: note = Synthetic: >Beluga-cand-6660-6739
  source 1..80: mol_type = other DNA
gaatatactagtggtaaggttactagaacacaagtgacgcgtcttttagatctttgtgatgattattacggcatcagtga

SEQ ID NO: 8841 - DNA, 80 bp, synthetic construct
  misc_feature 1..80: note = Synthetic: >Beluga-cand-6740-6819
  source 1..80: mol_type = other DNA
tgctgaggtaaaaatgtctgttattaagagtaatactggagcaacactgtcagcagcagtgcagcaatatgttgcaaaga

SEQ ID NO: 8842 - DNA, 80 bp, synthetic construct
  misc_feature 1..80: note = Synthetic: >Beluga-cand-6820-6899
  source 1..80: mol_type = other DNA
tagtgcctagtcaagttatgaatcttgatgtagactttttattgttttgtgatcgttatggtctcaccccaagtcaggct

SEQ ID NO: 8843 - DNA, 80 bp, synthetic construct
  misc_feature 1..80: note = Synthetic: >Beluga-cand-6900-6979
  source 1..80: mol_type = other DNA
gcatataacaatgcagtgcccaatagcacctgtaatttggatgcctatgagggcgagcagtttttgcgtgtcaaagagca

SEQ ID NO: 8844 - DNA, 80 bp, synthetic construct
  misc_feature 1..80: note = Synthetic: >Beluga-cand-6980-7059
  source 1..80: mol_type = other DNA
agttaagagtgcctttgtacaatttggtgttaagtatgttgattttaaaatggctttgaatgatagcaagattgctattt

SEQ ID NO: 8845 - DNA, 80 bp, synthetic construct
  misc_feature 1..80: note = Synthetic: >Beluga-cand-7060-7139
  source 1..80: mol_type = other DNA
tgcaatatgatttccttaagagcttgccaggtaattatctgccaagtcttcttatgaggattagacaggctggtgttact

SEQ ID NO: 8846 - DNA, 80 bp, synthetic construct
  misc_feature 1..80: note = Synthetic: >Beluga-cand-7140-7219
  source 1..80: mol_type = other DNA
cttagagttactactagtcaaattatgcagcaagatacactagggggtgtgcgtgttacaatggtagaagatagagttag

SEQ ID NO: 8847 - DNA, 80 bp, synthetic construct
  misc_feature 1..80: note = Synthetic: >Beluga-cand-7220-7299
  source 1..80: mol_type = other DNA
caagacccagaagatgcctaagaagaagggtggtaatcctccttcttggattcagaggttctttaactttatgcaagagt

SEQ ID NO: 8848 - DNA, 80 bp, synthetic construct
  misc_feature 1..80: note = Synthetic: >Beluga-cand-7300-7379
  source 1..80: mol_type = other DNA
cctttaagatgagtcttataggtgtattgcttggtgccttaatgattagcctaattgcccccacatttacaccgagtgta

SEQ ID NO: 8849 - DNA, 80 bp, synthetic construct
  misc_feature 1..80: note = Synthetic: >Beluga-cand-7380-7459
  source 1..80: mol_type = other DNA
gtggaattggcagctagtggctataaggttattgataatggagttattaggcctattgtagagactgataactgctttgc

SEQ ID NO: 8850 - DNA, 80 bp, synthetic construct
  misc_feature 1..80: note = Synthetic: >BetaSp-cand-19410-19489
  source 1..80: mol_type = other DNA
gattgcctgtgtcaaagattttgattttaagttctatgatgctaagcctcttgttaaggcggtgaagactcttgtctaca

SEQ ID NO: 8851 - DNA, 80 bp, synthetic construct
  misc_feature 1..80: note = Synthetic: >BetaSp-cand-19650-19729
  source 1..80: mol_type = other DNA
taaacatgcattccacacacctccctttacaagggcagcctttgagtatttgaaaccaatgccttttttctattattcag

SEQ ID NO: 8852 - DNA, 80 bp, synthetic construct
  misc_feature 1..80: note = Synthetic: >BetaSp-cand-19810-19889
  source 1..80: mol_type = other DNA
agatgcaatttaggtggtgcagtttgtttaaagcatgctgaggagtatcgtgagtatcttgaatgctacaatacagcaac

SEQ ID NO: 8853 - DNA, 80 bp, synthetic construct
  misc_feature 1..80: note = Synthetic: >BetaSp-cand-19890-19969
  source 1..80: mol_type = other DNA
tacagcaggttttactttttgggtctataagacctttgagttttataatttgtggaatacatttacccaactgcagagtt

SEQ ID NO: 8854 - DNA, 80 bp, synthetic construct
  misc_feature 1..80: note = Synthetic: >BetaSp-cand-20370-20449
  source 1..80: mol_type = other DNA
gtacattagcacgacaaaaataaaaagtctatcgatgattaaaggtccaccacgcgcagaattaaatggcctggtggtgg

SEQ ID NO: 8855 - DNA, 80 bp, synthetic construct
  misc_feature 1..80: note = Synthetic: >BetaSp-cand-20450-20529
  source 1..80: mol_type = other DNA
ataaagttggaaaagaagatgtttctttttattttgcagttcgtaaagagggtcaggacgttatcttcagccagttaacc

SEQ ID NO: 8856 - DNA, 80 bp, synthetic construct
  misc_feature 1..80: note = Synthetic: >BetaSp-cand-20530-20609
  source 1..80: mol_type = other DNA
agcctgggagtcagccctaactggagcccacaaggtaatccagggggttatgccaaacccggtaatggcgctggtaatga

SEQ ID NO: 8857 - DNA, 80 bp, synthetic construct
  misc_feature 1..80: note = Synthetic: >BetaSp-cand-20610-20689
  source 1..80: mol_type = other DNA
tgctctagcgcttgggaatctctttacgcaaagtagacagcttgagacatttgaacctcgttcagagatggagagggact

SEQ ID NO: 8858 - DNA, 80 bp, synthetic construct
  misc_feature 1..80: note = Synthetic: >BtCoV_008_16-cand-27290-27369
  source 1..80: mol_type = other DNA
accagctcctccaccactaccaaatcagacagatggtgatgagggtgaacaggagtctcactatgagaatgttagtgacg

SEQ ID NO: 8859 - DNA, 80 bp, synthetic construct
  misc_feature 1..80: note = Synthetic: >BtCoV_008_16-cand-27370-27449
  source 1..80: mol_type = other DNA
ttcttcctcctggagctcaggttgaaatcataaacgaggtttatgatgatgcttcttcagtccggcagcagagttaattc

SEQ ID NO: 8860 - DNA, 80 bp, synthetic construct
  misc_feature 1..80: note = Synthetic: >BtCoV_008_16-cand-27450-27529
  source 1..80: mol_type = other DNA
ggcttcaaccaaacaatgttattcttacttgcattggctggtcctctccttcatttctgtgctgaatactttcgtgccct

SEQ ID NO: 8861 - DNA, 80 bp, synthetic construct
  misc_feature 1..80: note = Synthetic: >BtCoV_008_16-cand-27530-27609
  source 1..80: mol_type = other DNA
gcacaggctattctatgactgtgcgggctgctcttctaattctgctaatggtagctttcttacctatagggatgtttgtt

SEQ ID NO: 8862 - DNA, 80 bp, synthetic construct
  misc_feature 1..80: note = Synthetic: >BtCoV_008_16-cand-27610-27689
  source 1..80: mol_type = other DNA
atctaacacatcctgatatgctttacatcattgtcatctttacctttgtggctatcccttgtctggtcacttgttgcaca

SEQ ID NO: 8863 - DNA, 80 bp, synthetic construct
  misc_feature 1..80: note = Synthetic: >BtCoV_008_16-cand-27690-27769
  source 1..80: mol_type = other DNA
ggtttagagatttttgatgaatatattgagttactacgccgctttcatcattggtttcttcgccaattgtttgattgcag

SEQ ID NO: 8864 - DNA, 80 bp, synthetic construct
  misc_feature 1..80: note = Synthetic: >BtCoV_008_16-cand-27770-27849
  source 1..80: mol_type = other DNA
tgctgtggtactctacctactagctttatttatgattgtgacatggtcgctgggcatgcgttttgcataaaccagcgatc

SEQ ID NO: 8865 - DNA, 80 bp, synthetic construct
  misc_feature 1..80: note = Synthetic: >BtCoV_008_16-cand-27850-27929
  source 1..80: mol_type = other DNA
atagtcttgcacacaatggtaagccagtagtaatgtcagtgcaagaaggatattactatatcactgcatataggggaacg

SEQ ID NO: 8866 - DNA, 80 bp, synthetic construct
  misc_feature 1..80: note = Synthetic: >BtCoV_008_16-cand-27930-28009
  source 1..80: mol_type = other DNA
gcaattccaattcatctaaatcagagcacgagtgcccaaagatcgcttgacgagcccactagaacttgattctaggggaa

SEQ ID NO: 8867 - DNA, 80 bp, synthetic construct
  misc_feature 1..80: note = Synthetic: >BtCoV_008_16-cand-28010-28089
  source 1..80: mol_type = other DNA
gagcgtgcatgatatttgttttggactgcttagtaaccaaagactatgcggtgttgatatggatacacaaaaaaaaaaaa

SEQ ID NO: 8868 - DNA, 80 bp, synthetic construct
  misc_feature 1..80: note = Synthetic: >CDPHE15-cand-0-79
  source 1..80: mol_type = other DNA
atccctcactagttccgtctggtgaggtgcgtggatagtgtgttctgtcacacttgaagccgacaactgctcagtatggc

SEQ ID NO: 8869 - DNA, 80 bp, synthetic construct
  misc_feature 1..80: note = Synthetic: >CDPHE15-cand-80-159
  source 1..80: mol_type = other DNA
aagcaatcatctaacactggcttttgccagtgatatggaagtttcagctataggctttgggtccattaatgaagccgtat

SEQ ID NO: 8870 - DNA, 80 bp, synthetic construct
  misc_feature 1..80: note = Synthetic: >CDPHE15-cand-160-239
  source 1..80: mol_type = other DNA
cattttacagtgatgccgccattgatggttttacccaatgccgttttgttgctgcaggtctcgctaacactgtcgagggt

SEQ ID NO: 8871 - DNA, 80 bp, synthetic construct
  misc_feature 1..80: note = Synthetic: >CDPHE15-cand-240-319
  source 1..80: mol_type = other DNA
gttgaaccctctgactttgttatggttgtgacaggtgtcacccaattgcgagcctacattgacacttttggtagccggcc

SEQ ID NO: 8872 - DNA, 80 bp, synthetic construct
  misc_feature 1..80: note = Synthetic: >CDPHE15-cand-320-399
  source 1..80: mol_type = other DNA
tgctaatttacgcggctggttgctgttttctaattccaattatttccttagtgagatggagcttatttttggtcgccggg

SEQ ID NO: 8873 - DNA, 80 bp, synthetic construct
  misc_feature 1..80: note = Synthetic: >CDPHE15-cand-400-479
  source 1..80: mol_type = other DNA
gtggtaacaccatctatgttgaccagtacctctgtggtgcggatggtaagcctgtcgtccctgaggaattttgggacttt

SEQ ID NO: 8874 - DNA, 80 bp, synthetic construct
  misc_feature 1..80: note = Synthetic: >Delta-cand-18110-18189
  source 1..80: mol_type = other DNA
ctgaggtagctcctcacactgattatatatgctttgtcacttgggctcaccagcttgagctagcgacaatgcgctacttt

SEQ ID NO: 8875 - DNA, 80 bp, synthetic construct
  misc_feature 1..80: note = Synthetic: >Delta-cand-18190-18269
  source 1..80: mol_type = other DNA
gtcaaactaggtatggaagagaaatgcttttgtggcaggcgggcttgtttcactactaaaaatggaactgagttcgcttg

SEQ ID NO: 8876 - DNA, 80 bp, synthetic construct
  misc_feature 1..80: note = Synthetic: >Delta-cand-18270-18349
  source 1..80: mol_type = other DNA
caaagcacaccattctctcaccattccacaatgtgattatgtgtacaatccattcctcatcgacgtggctacgtggggat

SEQ ID NO: 8877 - DNA, 80 bp, synthetic construct
  misc_feature 1..80: note = Synthetic: >Delta-cand-18350-18429
  source 1..80: mol_type = other DNA
tctcgggacggctttccaccaaccatgacgcggtatgcacatatcatgctaatgcccatgttgcatcagctgatgcaatc

SEQ ID NO: 8878 - DNA, 80 bp, synthetic construct
  misc_feature 1..80: note = Synthetic: >Delta-cand-18430-18509
  source 1..80: mol_type = other DNA
atgacggtatgtttagctatccatgaactgttcagtactgttgactggaaccttgaatttccagtaactgctgagcaatc

SEQ ID NO: 8879 - DNA, 80 bp, synthetic construct
  misc_feature 1..80: note = Synthetic: >Delta-cand-18510-18589
  source 1..80: mol_type = other DNA
gcaacttaacaaggcctgtcgcttagtacaggcaaattacttaaatatactactcactacaaccaaagccacggtggttc

SEQ ID NO: 8880 - DNA, 80 bp, synthetic construct
  misc_feature 1..80: note = Synthetic: >Delta-cand-18590-18669
  source 1..80: mol_type = other DNA
acgatattggtaacccaaaaggtatccctatcgtgcgcaaacctggtgttaaatatcacttctatgatcaagcacccatt

SEQ ID NO: 8881 - DNA, 80 bp, synthetic construct
  misc_feature 1..80: note = Synthetic: >Delta-cand-18670-18749
  source 1..80: mol_type = other DNA
gtcaaacacgttcaaaaactaaagtacaagccagagatggaggcccgtttcaccgatggtttgactatgttttggaattg

SEQ ID NO: 8882 - DNA, 80 bp, synthetic construct
  misc_feature 1..80: note = Synthetic: >Delta-cand-18750-18829
  source 1..80: mol_type = other DNA
taatgttgacacataccctgctaacgcccttgtgtgccgctacgacactcatcggcagaagcatttaattggacctaatg

SEQ ID NO: 8883 - DNA, 80 bp, synthetic construct
  misc_feature 1..80: note = Synthetic: >Delta-cand-18830-18909
  source 1..80: mol_type = other DNA
gttcagcactatatgttaataagcatgcttttctcacccctgagatgcatacttatgctacacataaactcaacttggct

SEQ ID NO: 8884 - DNA, 80 bp, synthetic construct
  misc_feature 1..80: note = Synthetic: >Delta-cand-18910-18989
  source 1..80: mol_type = other DNA
ccactcatctactactccaccacagattgtagtagtgaacagcctattgttgttacctacagagattgtgtcacccggtg

SEQ ID NO: 8885 - DNA, 80 bp, synthetic construct
  misc_feature 1..80: note = Synthetic: >Delta-cand-18990-19069
  source 1..80: mol_type = other DNA
caatactggaaaaactctctgtccaaatcatgctcttgaataccaagagtttatcaatgcatacaatctcatggctcgcc

SEQ ID NO: 8886 - DNA, 80 bp, synthetic construct
  misc_feature 1..80: note = Synthetic: >Delta-cand-19070-19149
  source 1..80: mol_type = other DNA
atggatttaatgtttacataccacgcaatgtcaacgtctacaactgttggcttactttcactaatctccaaaaccttgaa

SEQ ID NO: 8887 - DNA, 80 bp, synthetic construct
  misc_feature 1..80: note = Synthetic: >Delta-cand-19230-19309
  source 1..80: mol_type = other DNA
tgtatatgctaaggtcgacaataatcttgtcaaacttttcgacaaccgcactaacttacctgtctcagtggcctttgaac

SEQ ID NO: 8888 - DNA, 80 bp, synthetic construct
  misc_feature 1..80: note = Synthetic: >HKU1-cand-25010-25089
  source 1..80: mol_type = other DNA
tgattacgacctttatggtattacaggacaaggtatttttaaagaagtttctgctgtttattataatagttggcaaaatc

SEQ ID NO: 8889 - DNA, 80 bp, synthetic construct
  misc_feature 1..80: note = Synthetic: >HKU1-cand-25090-25169
  source 1..80: mol_type = other DNA
ttttgtatgattctaatggcaacattattggttttaaagattttgttactaataaaacatataatattttcccttgttat

SEQ ID NO: 8890 - DNA, 80 bp, synthetic construct
  misc_feature 1..80: note = Synthetic: >HKU1-cand-25170-25249
  source 1..80: mol_type = other DNA
gcaggaagagtttctgctgcttttcatcaaaatgcttcctctttggctttactttatcgtaatttaaaatgtagctatgt

SEQ ID NO: 8891 - DNA, 80 bp, synthetic construct
  misc_feature 1..80: note = Synthetic: >HKU1-cand-25250-25329
  source 1..80: mol_type = other DNA
tttgaataatatttctttagctactcagccattttattttgatagttatcttggttgcgtttttaatgctgataatttaa

SEQ ID NO: 8892 - DNA, 80 bp, synthetic construct
  misc_feature 1..80: note = Synthetic: >HKU1-cand-25330-25409
  source 1..80: mol_type = other DNA
ctgattattctgtttcttcttgtgctcttcgcatgggtagtggtttttgtgttgattataactcaccttcttcttcctct

SEQ ID NO: 8893 - DNA, 80 bp, synthetic construct
  misc_feature 1..80: note = Synthetic: >HKU1-cand-25410-25489
  source 1..80: mol_type = other DNA
tcgcgtcgtaaacgtagaagtatttctgcttcttatcgttttgttacttttgaaccctttaatgtcagttttgttaatga

SEQ ID NO: 8894 - DNA, 80 bp, synthetic construct
  misc_feature 1..80: note = Synthetic: >HKU1-cand-25490-25569
  source 1..80: mol_type = other DNA
cagtattgagtctgtgggtggtctttatgagatcaaaattcccactaactttactatagttggtcaagaggaatttattc

SEQ ID NO: 8895 - DNA, 80 bp, synthetic construct
  misc_feature 1..80: note = Synthetic: >HKU1-cand-25570-25649
  source 1..80: mol_type = other DNA
aaactaattctcctaaagttactattgattgttctttatttgtctgttctaattatgcagcttgccatgacttattgtca

SEQ ID NO: 8896 - DNA, 80 bp, synthetic construct
  misc_feature 1..80: note = Synthetic: >HKU1-cand-25650-25729
  source 1..80: mol_type = other DNA
gagtatggcactttttgtgataatattaatagtattttagatgaagttaatggtttacttgatactactcaattgcatgt

SEQ ID NO: 8897 - DNA, 80 bp, synthetic construct
  misc_feature 1..80: note = Synthetic: >HKU1-cand-25730-25809
  source 1..80: mol_type = other DNA
agctgatactcttatgcaaggtgtcacacttagctccaatcttaatactaatttgcattttgatgttgataatattaatt

SEQ ID NO: 8898 - DNA, 80 bp, synthetic construct
  misc_feature 1..80: note = Synthetic: >HKU1-cand-25810-25889
  source 1..80: mol_type = other DNA
ttaaatccctagttggatgtttaggtccacactgcggttcttcttctcgttctttttttgaagatttattgtttgacaaa

SEQ ID NO: 8899 - DNA, 80 bp, synthetic construct
  misc_feature 1..80: note = Synthetic: >HKU1-cand-25890-25969
  source 1..80: mol_type = other DNA
gttaaactttcagatgttggttttgttgaagcttataacaattgtactggtggtagtgaaattagagatcttctttgtgt

SEQ ID NO: 8900 - DNA, 80 bp, synthetic construct
  misc_feature 1..80: note = Synthetic: >HKU1-cand-25970-26049
  source 1..80: mol_type = other DNA
acaatcctttaatggtattaaagttttgcctcctattttgtctgaatctcaaatttctggttacaccacagccgctactg

SEQ ID NO: 8901 - DNA, 80 bp, synthetic construct
  misc_feature 1..80: note = Synthetic: >HKU1-cand-26050-26129
  source 1..80: mol_type = other DNA
ttgctgctatgtttccaccatggtcagcagcagctggcataccattttctcttaatgtacaatatagaattaatggtttg

SEQ ID NO: 8902 - DNA, 80 bp, synthetic construct
  misc_feature 1..80: note = Synthetic: >HKU1-cand-26130-26209
  source 1..80: mol_type = other DNA
ggtgttactatggatgttcttaataaaaatcaaaagttgatagctactgcttttaataatgctcttctttctattcagaa

SEQ ID NO: 8903 - DNA, 80 bp, synthetic construct
  misc_feature 1..80: note = Synthetic: >HKU1-cand-26210-26289
  source 1..80: mol_type = other DNA
tggttttagtgctaccaactctgcacttgctaaaatacaaagtgttgttaattctaatgctcaagcacttaatagtttgt

SEQ ID NO: 8904 - DNA, 80 bp, synthetic construct
  misc_feature 1..80: note = Synthetic: >HKU14-cand-28590-28669
  source 1..80: mol_type = other DNA
attggttataatagttgtagtggcattattggcaacttttaaattgtgtattcaactttgcggtatgtgtaataccttag

SEQ ID NO: 8905 - DNA, 80 bp, synthetic construct
  misc_feature 1..80: note = Synthetic: >HKU14-cand-28670-28749
  source 1..80: mol_type = other DNA
tactgtccccttctatttatgtgtttaatagaggtaggcagttgtatgagttttacaatgatgtaaaaccaccagtcctt

SEQ ID NO: 8906 - DNA, 80 bp, synthetic construct
  misc_feature 1..80: note = Synthetic: >HKU14-cand-28750-28829
  source 1..80: mol_type = other DNA
gatgtggatgacgtcttaatccaaacattatgagtagtacaactacaccagcaccagtttacatctggactgctgatgaa

SEQ ID NO: 8907 - DNA, 80 bp, synthetic construct
  misc_feature 1..80: note = Synthetic: >HKU14-cand-28830-28909
  source 1..80: mol_type = other DNA
gctattaaattcctaaaggaatggaatttctctttgggtattatactactttttattacaatcatactgcaatttggata

SEQ ID NO: 8908 - DNA, 80 bp, synthetic construct
  misc_feature 1..80: note = Synthetic: >HKU14-cand-28910-28989
  source 1..80: mol_type = other DNA
tacaagccgcagtatgtttgtttatgtcattaagatgattattttgtggcttatgtggccacttactatcatcttaacta

SEQ ID NO: 8909 - DNA, 80 bp, synthetic construct
  misc_feature 1..80: note = Synthetic: >HKU14-cand-28990-29069
  source 1..80: mol_type = other DNA
ttttcaactgcgtatacgcgttgaataatgtgtatcttggtttttctatagtttttaccatagtggccattattatgtgg

SEQ ID NO: 8910 - DNA, 80 bp, synthetic construct
  misc_feature 1..80: note = Synthetic: >HKU14-cand-29070-29149
  source 1..80: mol_type = other DNA
attgtgtattttgtgaatagtatcaggttgtttattagaactggcagttggtggagtttcaacccagaaacaaacaactt

SEQ ID NO: 8911 - DNA, 80 bp, synthetic construct
  misc_feature 1..80: note = Synthetic: >HKU14-cand-29150-29229
  source 1..80: mol_type = other DNA
gatgtgtatagatatgaagggaagaatgtatgttaggccgattattgaggactaccataccctgacggtcacaataatac

SEQ ID NO: 8912 - DNA, 80 bp, synthetic construct
  misc_feature 1..80: note = Synthetic: >HKU14-cand-29230-29309
  source 1..80: mol_type = other DNA
gtggccatctctacattcaaggtataaaactaggtactggctattctttgtcggatttgccagcttatgtgactgttgct

SEQ ID NO: 8913 - DNA, 80 bp, synthetic construct
  misc_feature 1..80: note = Synthetic: >HKU14-cand-29310-29389
  source 1..80: mol_type = other DNA
aaggttacacatctttgcacgtataagcgtggttttcttgacaggataggcgatactagtggttttgctgtttatgttaa

SEQ ID NO: 8914 - DNA, 80 bp, synthetic construct
  misc_feature 1..80: note = Synthetic: >HKU14-cand-29390-29469
  source 1..80: mol_type = other DNA
gtccaaagtcggtaattatcgactgccatcaactcaaaagggtactggcatggacaccgcattgttgagaaataatatct

SEQ ID NO: 8915 - DNA, 80 bp, synthetic construct
  misc_feature 1..80: note = Synthetic: >HKU14-cand-29470-29549
  source 1..80: mol_type = other DNA
aaactttaaggatgtcctttactcctggtaagcaacccagcagtagagcgtcctctggaaatcgtgctggtaatggcatc

SEQ ID NO: 8916 - DNA, 80 bp, synthetic construct
  misc_feature 1..80: note = Synthetic: >HKU14-cand-29550-29629
  source 1..80: mol_type = other DNA
cttaagtgggccgatcagtccgaacagtctagaaacattcaaaccaggggtagaagagctcaacccaagcaaactgttac

SEQ ID NO: 8917 - DNA, 80 bp, synthetic construct
  misc_feature 1..80: note = Synthetic: >HKU14-cand-29630-29709
  source 1..80: mol_type = other DNA
ttctcagcaaccaacaggagggaacgttgtaccctactattcttggttctctggaattactcagtttcaaaagggaaagg

SEQ ID NO: 8918 - DNA, 80 bp, synthetic construct
  misc_feature 1..80: note = Synthetic: >HKU14-cand-29710-29789
  source 1..80: mol_type = other DNA
agtttgaatttgcagaaggacaaggtgtgcctattgcaccaggagtcccagctactgaagctaaggggtattggtacaga

SEQ ID NO: 8919 - DNA, 80 bp, synthetic construct
  misc_feature 1..80: note = Synthetic: >HKU14-cand-29790-29869
  source 1..80: mol_type = other DNA
cacagcagacgttcttttaaaacagccgacggcaatcagcgtcaattgctgccacgatggtatttctactatctgggaac

SEQ ID NO: 8920 - DNA, 80 bp, synthetic construct
  misc_feature 1..80: note = Synthetic: >HKU2-cand-13150-13229
  source 1..80: mol_type = other DNA
atgactaattgtttggcatgcgagtgttttatgaaaagtgatatttttgggtcagattttaaaacttacgatttgcttga

SEQ ID NO: 8921 - DNA, 80 bp, synthetic construct
  misc_feature 1..80: note = Synthetic: >HKU2-cand-13310-13389
  source 1..80: mol_type = other DNA
gtgattgttatgatgacatgtgtttgttacactgttctaattttaacacactattttctactactatacctaatactgcc

SEQ ID NO: 8922 - DNA, 80 bp, synthetic construct
  misc_feature 1..80: note = Synthetic: >HKU2-cand-13390-13469
  source 1..80: mol_type = other DNA
tttggtcctctctgcagaaaagtttttgtagatggtgtgccacttattgccaccgccggctaccattttaagcagttggg

SEQ ID NO: 8923 - DNA, 80 bp, synthetic construct
  misc_feature 1..80: note = Synthetic: >HKU2-cand-13470-13549
  source 1..80: mol_type = other DNA
tttagtctggaacaaggatattaatacccataattctcgccttagtatgactgacttgttgcagtttgttacagatcctg

SEQ ID NO: 8924 - DNA, 80 bp, synthetic construct
  misc_feature 1..80: note = Synthetic: >HKU2-cand-13630-13709
  source 1..80: mol_type = other DNA
acacatcaaactgtaaaacctggtcattttaacaaggaattctatgactatttattgtctcaaggattctttgatgaagg

SEQ ID NO: 8925 - DNA, 80 bp, synthetic construct
  misc_feature 1..80: note = Synthetic: >HKU2-cand-13870-13949
  source 1..80: mol_type = other DNA
ggttgtattactgctagagaagttgttgtcactaatttagataagagtgctggttaccctcttaataggtttggtaaagc

SEQ ID NO: 8926 - DNA, 80 bp, synthetic construct
  misc_feature 1..80: note = Synthetic: >HKU2-cand-13950-14029
  source 1..80: mol_type = other DNA
tcgtttgttttacgaaacctttagttatgaggagcaagacgcactttacgctatgacaaagcgtaatatcttaccaacta

SEQ ID NO: 8927 - DNA, 80 bp, synthetic construct
  misc_feature 1..80: note = Synthetic: >HKU2-cand-14110-14189
  source 1..80: mol_type = other DNA
atgaccactaggcaattccatcaaaagcatttgaagtcaattgtcaacacgcgtaatgcacctgttgtcattggtacaac

SEQ ID NO: 8928 - DNA, 80 bp, synthetic construct
  misc_feature 1..80: note = Synthetic: >HKU2-cand-14190-14269
  source 1..80: mol_type = other DNA
aaagttttatggtggttgggacaatatgctcaagaatttgatgaatgatgtcgataatggtgcactcatgggctgggatt

SEQ ID NO: 8929 - DNA, 80 bp, synthetic construct
  misc_feature 1..80: note = Synthetic: >HKU2-cand-14350-14429
  source 1..80: mol_type = other DNA
tgtacagacagtgataggttttacagactttctaatgaacttgcacaagttcttaatgaggttgtgcattctaacggagg

SEQ ID NO: 8930 - DNA, 80 bp, synthetic construct
  misc_feature 1..80: note = Synthetic: >HKU2-cand-18260-18339
  source 1..80: mol_type = other DNA
acacacctgcatacgacaagcgtgcctttgctaagcttaagcccatgccatttttcttttatgatgatggtgaatgtgat

SEQ ID NO: 8931 - DNA, 80 bp, synthetic construct
  misc_feature 1..80: note = Synthetic: >HKU2-cand-18330-18409
  source 1..80: mol_type = other DNA
tgaatgtgatgtttcacagggacagattaattatgtgccacttcgtgctaccgtgtgtattactaagtgtaatattggtg

SEQ ID NO: 8932 - DNA, 80 bp, synthetic construct
  misc_feature 1..80: note = Synthetic: >HKU2-cand-18410-18489
  source 1..80: mol_type = other DNA
gtgctgtttgtaagcgacacgctagtctttatagggcttatgttgaggcttataatacttttactcagaatggttttaac

SEQ ID NO: 8933 - DNA, 80 bp, synthetic construct
  misc_feature 1..80: note = Synthetic: >HKU2-cand-18490-18569
  source 1..80: mol_type = other DNA
atttggtgtcccaacagttttgatgtttataatttatggcaaactctagttgacactaatttgcagggccttgagaacat

SEQ ID NO: 8934 - DNA, 80 bp, synthetic construct
  misc_feature 1..80: note = Synthetic: >HKU2-cand-18570-18649
  source 1..80: mol_type = other DNA
tgcatacaatgttgtcaagaagggatcttttgttggtgaaccaggtgagttgcctgtggcagttgtaaacgatagagtgt

SEQ ID NO: 8935 - DNA, 80 bp, synthetic construct
  misc_feature 1..80: note = Synthetic: >HKU2-cand-18650-18729
  source 1..80: mol_type = other DNA
ctgttagggatggtgttagtgataatgttatctttgttaataagacttcattaccaaccaatgttgcatttgagctgtat

SEQ ID NO: 8936 - DNA, 80 bp, synthetic construct
  misc_feature 1..80: note = Synthetic: >HKU2-cand-18730-18809
  source 1..80: mol_type = other DNA
gctaagcgcaaaattggtcttacaccgccacttaccattctgaaaaatatgggtgttgttgctacacatggtttcgtgtt

SEQ ID NO: 8937 - DNA, 80 bp, synthetic construct
  misc_feature 1..80: note = Synthetic: >HKU2-cand-18810-18889
  source 1..80: mol_type = other DNA
atgggactatgatgctgacagacccttttctaattttactaaatctgtttgcaagtatacagactttgatgaggacgtgt

SEQ ID NO: 8938 - DNA, 80 bp, synthetic construct
  misc_feature 1..80: note = Synthetic: >HKU2-cand-18890-18969
  source 1..80: mol_type = other DNA
gtacttgctttgacaatggcatacaaggtgcatttgagaggtttactttgtgtaagaatggtgtattaatctctaatgtc

SEQ ID NO: 8939 - DNA, 80 bp, synthetic construct
  misc_feature 1..80: note = Synthetic: >HKU2-cand-18970-19049
  source 1..80: mol_type = other DNA
gctatcaagaaattacgtggtatacgtttgaattttggttatttgaacggtgttgcagttagtagtatcactgaaggtga

SEQ ID NO: 8940 - DNA, 80 bp, synthetic construct
  misc_feature 1..80: note = Synthetic: >HKU2-cand-19050-19129
  source 1..80: mol_type = other DNA
gactactaagcctgttgactggtatatctatcaacgcaaagacggttcatttgttgagcctgttgatggttactactcac

SEQ ID NO: 8941 - DNA, 80 bp, synthetic construct
  misc_feature 1..80: note = Synthetic: >HKU2-cand-19130-19209
  source 1..80: mol_type = other DNA
agggtcgtaatgctagtacattcttgccacgttctcagatggaaaaagactttttagaacttgacactggtttgtttata

SEQ ID NO: 8942 - DNA, 80 bp, synthetic construct
  misc_feature 1..80: note = Synthetic: >HKU2-cand-19210-19289
  source 1..80: mol_type = other DNA
agcaagtatggacttgaagactttaattttgagcacatcgtttatggcgatgtctcaaaaactactcttggtggtctaca

SEQ ID NO: 8943 - DNA, 80 bp, synthetic construct
  misc_feature 1..80: note = Synthetic: >HKU2-cand-19290-19369
  source 1..80: mol_type = other DNA
cttacttatatcacaggttcgtttagcacgtattggtgttcttaaggttgaggactttgttgactcagctgatgatacac

SEQ ID NO: 8944 - DNA, 80 bp, synthetic construct
  misc_feature 1..80: note = Synthetic: >HKU2-cand-19370-19449
  source 1..80: mol_type = other DNA
tacatagttgttccgttacgtatgctaatgatcctagtagtaaatccgtctgcacctatatggatatacttttagatgat

SEQ ID NO: 8945 - DNA, 80 bp, synthetic construct
  misc_feature 1..80: note = Synthetic: >HKU2-cand-19450-19529
  source 1..80: mol_type = other DNA
tttgttgtgattcttaagaatcttgatctttctgtgacgtctaaagtgcatgatgtcattgttgattgtaaggcttggcg

SEQ ID NO: 8946 - DNA, 80 bp, synthetic construct
  misc_feature 1..80: note = Synthetic: >HKU31-cand-9260-9339
  source 1..80: mol_type = other DNA
cctggagctgtaccatatgatactatgttaccacatgtgagatatgatctttatgattcaaatatgtttattaagtttcc

SEQ ID NO: 8947 - DNA, 80 bp, synthetic construct
  misc_feature 1..80: note = Synthetic: >HKU31-cand-9340-9419
  source 1..80: mol_type = other DNA
tgaagtggttgttgaaggcacactcagggttgttaagacccttaagactcaatattgtagacttggcagttgtgagtggt

SEQ ID NO: 8948 - DNA, 80 bp, synthetic construct
  misc_feature 1..80: note = Synthetic: >HKU31-cand-9420-9499
  source 1..80: mol_type = other DNA
ctgaagcaggtatttgtgttagcacaaatggttcatggatgcttaataatgagcattatgccagtaaaccaggtgtttat

SEQ ID NO: 8949 - DNA, 80 bp, synthetic construct
  misc_feature 1..80: note = Synthetic: >HKU31-cand-9500-9579
  source 1..80: mol_type = other DNA
tgtggcagtgattatttagatatggtaaggcgtagtattatgagcttgttccagcctataacatattttcaattaaccac

SEQ ID NO: 8950 - DNA, 80 bp, synthetic construct
  misc_feature 1..80: note = Synthetic: >HKU31-cand-9580-9659
  source 1..80: mol_type = other DNA
atctttatttatgggtttttgtttgtgtttaggaattgtggtagttttctattatgttaataagtttaagagggcttttg

SEQ ID NO: 8951 - DNA, 80 bp, synthetic construct
  misc_feature 1..80: note = Synthetic: >HKU31-cand-9660-9739
  source 1..80: mol_type = other DNA
cagattatacacagtgtgttttaatcgctgttatggccacaggacttaatggattatgcctgtgttttgtcgcatcaaat

SEQ ID NO: 8952 - DNA, 80 bp, synthetic construct
  misc_feature 1..80: note = Synthetic: >HKU31-cand-9740-9819
  source 1..80: mol_type = other DNA
ccatttttaataataccttatagtgcattttattattatagcactttttatgtgactaatgaaccagctgttgttatgca

SEQ ID NO: 8953 - DNA, 80 bp, synthetic construct
  misc_feature 1..80: note = Synthetic: >HKU31-cand-9820-9899
  source 1..80: mol_type = other DNA
tgcatcttggcttataatgtttatgccagtagcatctgtatgggtggtttgttcatatctagcagctatttgctttagac

SEQ ID NO: 8954 - DNA, 80 bp, synthetic construct
  misc_feature 1..80: note = Synthetic: >HKU31-cand-9900-9979
  source 1..80: mol_type = other DNA
actgtttctgggttttggcatattttagccgtaagaaggtagatgtgtttacagatggtaaactcaattgtacatttcaa

SEQ ID NO: 8955 - DNA, 80 bp, synthetic construct
  misc_feature 1..80: note = Synthetic: >HKU31-cand-9980-10059
  source 1..80: mol_type = other DNA
gaagctgcagctaatatctttgtagttaacagagatacatatgtagccttgagaaatgcaattagtcaggaggcctataa

SEQ ID NO: 8956 - DNA, 80 bp, synthetic construct
  misc_feature 1..80: note = Synthetic: >HKU31-cand-10060-10139
  source 1..80: mol_type = other DNA
taagtacctgggtatgtttaataagtataaatatttctcaggtgttatggatactgctgcttatagagaggcttctgctg

SEQ ID NO: 8957 - DNA, 80 bp, synthetic construct
  misc_feature 1..80: note = Synthetic: >HKU31-cand-10140-10219
  source 1..80: mol_type = other DNA
cacatttagctaaggctctacaagtttttagtgagaatggtagtgacctcttgtatcaaccacctaattgtagcgtagca

SEQ ID NO: 8958 - DNA, 80 bp, synthetic construct
  misc_feature 1..80: note = Synthetic: >HKU31-cand-10220-10299
  source 1..80: mol_type = other DNA
tctagcgtgttacaaagtggtttggtaaagatggcacatcctagtggtgctgttgaacaatgtatagttcaagttacttg

SEQ ID NO: 8959 - DNA, 80 bp, synthetic construct
  misc_feature 1..80: note = Synthetic: >HKU31-cand-10300-10379
  source 1..80: mol_type = other DNA
tggcagcatgactcttaatggtttgtggttagataatatagtttattgtccacgccatgtaatgtgcccacaagatcaat

SEQ ID NO: 8960 - DNA, 80 bp, synthetic construct
  misc_feature 1..80: note = Synthetic: >HKU31-cand-10380-10459
  source 1..80: mol_type = other DNA
tagttgaccctaattatgatgctttgttgaattctatgactaatcatagtttcactatacagcgtcatggtaagtcaaca

SEQ ID NO: 8961 - DNA, 80 bp, synthetic construct
  misc_feature 1..80: note = Synthetic: >HKU31-cand-10460-10539
  source 1..80: mol_type = other DNA
gctaatttaagatgtataggccatgctatgcatggaacattgttaaagctgactgtggattctgctaacccagaaacacc

SEQ ID NO: 8962 - DNA, 80 bp, synthetic construct
  misc_feature 1..80: note = Synthetic: >HKU5-cand-8800-8879
  source 1..80: mol_type = other DNA
cgtggaaaagttattgtgtagtcacattagtagtctttgctatggctgtgttgtcctacctatgtttaccggcgttcaac

SEQ ID NO: 8963 - DNA, 80 bp, synthetic construct
  misc_feature 1..80: note = Synthetic: >HKU5-cand-8880-8959
  source 1..80: mol_type = other DNA
atgagtcaagttgctttccatgaggaccgcattctcacatacaaagttgtagagaatggcatcattagggatatcacccc

SEQ ID NO: 8964 - DNA, 80 bp, synthetic construct
  misc_feature 1..80: note = Synthetic: >HKU5-cand-9040-9119
  source 1..80: mol_type = other DNA
ccattgattgtcccgttaccgtggctgttattgctggtgttgcaggtgctcgtgtacccaaccttccagctaatgtagca

SEQ ID NO: 8965 - DNA, 80 bp, synthetic construct
  misc_feature 1..80: note = Synthetic: >HKU5-cand-9120-9199
  source 1..80: mol_type = other DNA
tgggtcggtcgccaaatagtcttatttgtctcccgagtctttgcctcttctaataacgtctgttacactcctaccgctga

SEQ ID NO: 8966 - DNA, 80 bp, synthetic construct
  misc_feature 1..80: note = Synthetic: >HKU5-cand-9200-9279
  source 1..80: mol_type = other DNA
aatcccttacgagagattctccgatagtgggtgcgtcttagcatctgaatgcacattgttcagggatgcagagggtaaga

SEQ ID NO: 8967 - DNA, 80 bp, synthetic construct
  misc_feature 1..80: note = Synthetic: >HKU5-cand-9360-9439
  source 1..80: mol_type = other DNA
atgtatgattcagacatgtacataaagtttccagaagtggtctttgagagcactctgcgcattactaaaaccttggctac

SEQ ID NO: 8968 - DNA, 80 bp, synthetic construct
  misc_feature 1..80: note = Synthetic: >HKU5-cand-9440-9519
  source 1..80: mol_type = other DNA
tcgttattgtcgctttggcagttgcgaagatgctaatgaaggtgtctgtattactactaatggctcttgggctatctata

SEQ ID NO: 8969 - DNA, 80 bp, synthetic construct
  misc_feature 1..80: note = Synthetic: >HKU5-cand-9520-9599
  source 1..80: mol_type = other DNA
atgaccactacgcaaataaacctggtgtctattgtggtgataactactttgatattgtcagaagacttggtttatccctt

SEQ ID NO: 8970 - DNA, 80 bp, synthetic construct
  misc_feature 1..80: note = Synthetic: >HKU5-cand-9680-9759
  source 1..80: mol_type = other DNA
ttactacgtcaacaaggtcaaacgtgcccttgctgattacacacagtgtgcagttgtagcagtagctgccgctcttctta

SEQ ID NO: 8971 - DNA, 80 bp, synthetic construct
  misc_feature 1..80: note = Synthetic: >HKU5-cand-9760-9839
  source 1..80: mol_type = other DNA
atagcttatgtttatgctttgttgtgtcaaatccactactcgtgttgccatacacagcattgtactactatgccactttc

SEQ ID NO: 8972 - DNA, 80 bp, synthetic construct
  misc_feature 1..80: note = Synthetic: >HKU5-cand-9840-9919
  source 1..80: mol_type = other DNA
taccttactggtgagcctgcatttgtcatgcatgtctcatggtttgtcatgtttggaacagttgtccctatatggatggt

SEQ ID NO: 8973 - DNA, 80 bp, synthetic construct
  misc_feature 1..80: note = Synthetic: >HKU5-cand-9920-9999
  source 1..80: mol_type = other DNA
ctttgcctacattgtgggagtctgtcttcgtcatttactctgggttatggcttacttcagtaagaaacatgttgaagttt

SEQ ID NO: 8974 - DNA, 80 bp, synthetic construct
  misc_feature 1..80: note = Synthetic: >HKU5-cand-10000-10079
  source 1..80: mol_type = other DNA
ttactgatggtaaactgaattgtagtttccaggatgcagctgctaatatctttgtgattaacaaggatacatacgtggca

SEQ ID NO: 8975 - DNA, 80 bp, synthetic construct
  misc_feature 1..80: note = Synthetic: >HKU5-cand-15360-15439
  source 1..80: mol_type = other DNA
cgatccttagcacaatgactaatcgtcaataccaccagaaaatgcttaagtctatggcagccacgcggggttccacgtgc

SEQ ID NO: 8976 - DNA, 80 bp, synthetic construct
  misc_feature 1..80: note = Synthetic: >HKU5-cand-15520-15599
  source 1..80: mol_type = other DNA
gatgggttgggactaccctaagtgtgatcgcgctatgcctaatatgtgcagaatctttgcatctctcatattagcccgta

SEQ ID NO: 8977 - DNA, 80 bp, synthetic construct
  misc_feature 1..80: note = Synthetic: >HKU5-cand-15600-15679
  source 1..80: mol_type = other DNA
agcatagtacttgttgtactaatactgatagattttaccgcttagcaaatgagtgcgctcaagtgcttagtgagtatgtc

SEQ ID NO: 8978 - DNA, 80 bp, synthetic construct
  misc_feature 1..80: note = Synthetic: >HKU5-cand-15680-15759
  source 1..80: mol_type = other DNA
ctttgtggtggtggttactacgtcaaacctggtgggaccagtagcggagatgcaaccacagcttacgccaatagtgtctt

SEQ ID NO: 8979 - DNA, 80 bp, synthetic construct
  misc_feature 1..80: note = Synthetic: >HKU5-cand-15760-15839
  source 1..80: mol_type = other DNA
taacattctgcaggcgacaaccgcgaatgttagtgcacttatgggcgctaatggcaacactattgttgacaaagaagtta

SEQ ID NO: 8980 - DNA, 80 bp, synthetic construct
  misc_feature 1..80: note = Synthetic: >HKU5-cand-15840-15919
  source 1..80: mol_type = other DNA
aggacatgcagtttgagctgtatgtaaatgtttacagaaagagccaacctgaccctaaatttgtggacaggtattatgcc

SEQ ID NO: 8981 - DNA, 80 bp, synthetic construct
  misc_feature 1..80: note = Synthetic: >HKU5-cand-15920-15999
  source 1..80: mol_type = other DNA
tttctgaataagcacttttccatgatgatactgtctgatgatggtgtcgtatgctataatagtgattacgccactaaggg

SEQ ID NO: 8982 - DNA, 80 bp, synthetic construct
  misc_feature 1..80: note = Synthetic: >HKU5-cand-16000-16079
  source 1..80: mol_type = other DNA
ctatatcgcatccattcaaaattttaaggagactctgtattatcagaataatgtcttcatgtcagaggctaaatgctggg

SEQ ID NO: 8983 - DNA, 80 bp, synthetic construct
  misc_feature 1..80: note = Synthetic: >HKU5-cand-16160-16239
  source 1..80: mol_type = other DNA
ttcctaccttatccagacccttcaagaattctgtctgccggttgcttcgtcgatgatatcgtcaagactgacggtacgct

SEQ ID NO: 8984 - DNA, 80 bp, synthetic construct
  misc_feature 1..80: note = Synthetic: >HKU5-cand-16240-16319
  source 1..80: mol_type = other DNA
catggttgagagattcgtgtcattggctatagacgcttatcctctcacgaagcatgatgatcctgaataccaaaatgtat

SEQ ID NO: 8985 - DNA, 80 bp, synthetic construct
  misc_feature 1..80: note = Synthetic: >HKU5-cand-20330-20409
  source 1..80: mol_type = other DNA
aacactggtaactctgaaagtggcgatgatgaagtaaagcagcctgtaacattttacatctacaagaaagtcaataatga

SEQ ID NO: 8986 - DNA, 80 bp, synthetic construct
  misc_feature 1..80: note = Synthetic: >HKU5-cand-20570-20649
  source 1..80: mol_type = other DNA
gacttttcacgtaccacattaggtggcctccatcttcttattggcttatataagaagcatcaagaaggtcacattatcat

SEQ ID NO: 8987 - DNA, 80 bp, synthetic construct
  misc_feature 1..80: note = Synthetic: >HKU5-cand-20650-20729
  source 1..80: mol_type = other DNA
ggaggaaatgcttaaagaaagagctaccgtccataactattttattactgaatcaaacacagcatcgttcaaagcggtct

SEQ ID NO: 8988 - DNA, 80 bp, synthetic construct
  misc_feature 1..80: note = Synthetic: >HKU5-cand-20730-20809
  source 1..80: mol_type = other DNA
gttcggttattgatttaaagcttgacgacttcgttgacattataaaggcaatggaccttagtgtcgtttcaaaagtcgtc

SEQ ID NO: 8989 - DNA, 80 bp, synthetic construct
  misc_feature 1..80: note = Synthetic: >HKU5-cand-20810-20889
  source 1..80: mol_type = other DNA
aagattcctattgacttaactatgattgagtttatgctatggtgtaaggatggtcaggtgcaaaccttctacccaagact

SEQ ID NO: 8990 - DNA, 80 bp, synthetic construct
  misc_feature 1..80: note = Synthetic: >HKU5-cand-20890-20969
  source 1..80: mol_type = other DNA
tcaggctatcaatgattggaagcctggtcttgcaatgccttcactatttaaagttcaaaactcaaaccttgaaccatgca

SEQ ID NO: 8991 - DNA, 80 bp, synthetic construct
  misc_feature 1..80: note = Synthetic: >HKU5-cand-21050-21129
  source 1..80: mol_type = other DNA
tatctgaatacatgcacaattgcagtacctgccaacatgcgagttatgcattttggcgctggatctgataaaggcgtcgc

SEQ ID NO: 8992 - DNA, 80 bp, synthetic construct
  misc_feature 1..80: note = Synthetic: >HKU5-cand-21130-21209
  source 1..80: mol_type = other DNA
tcctggctcctcagttctacgacaatggcttccgacggatgccatcctaattgataatgacctaaacgagtatgtatctg

SEQ ID NO: 8993 - DNA, 80 bp, synthetic construct
  misc_feature 1..80: note = Synthetic: >HKU5-cand-21290-21369
  source 1..80: mol_type = other DNA
gatccatccactaaagtagtaggtgaaacaaatgaagcaaaggcgcttttctttgtgtatctctgcaactttattaaaaa

SEQ ID NO: 8994 - DNA, 80 bp, synthetic construct
  misc_feature 1..80: note = Synthetic: >HKU5-cand-21370-21449
  source 1..80: mol_type = other DNA
taatctagctcttggagggtccgttgcgataaaaataacggaacactcctggagcgcagaattatatgaattaatgggaa

SEQ ID NO: 8995 - DNA, 80 bp, synthetic construct
  misc_feature 1..80: note = Synthetic: >HKU5-cand-21450-21529
  source 1..80: mol_type = other DNA
gatttgcatggtggactgtgttttgcaccaatgcgaatgcatcctcatcagaaggatttctcatcggaataaattactta

SEQ ID NO: 8996 - DNA, 80 bp, synthetic construct
  misc_feature 1..80: note = Synthetic: >HKU5-cand-21530-21609
  source 1..80: mol_type = other DNA
ggagagctaaaagaagttatagatggtaatgtgatgcatgccaactatatattctggcgtaatactactctaatgaacct

SEQ ID NO: 8997 - DNA, 80 bp, synthetic construct
  misc_feature 1..80: note = Synthetic: >HKU8-cand-28250-28329
  source 1..80: mol_type = other DNA
aagctgctcttgtctttggcagtcgtgtcgaagttaaagaatttaaggatgaggttgaaatcaagtaccactacaaaatg

SEQ ID NO: 8998 - DNA, 80 bp, synthetic construct
  misc_feature 1..80: note = Synthetic: >HKU8-cand-28330-28409
  source 1..80: mol_type = other DNA
aatgttcctaaggataataagaacctccctgtcttccttcaacaggttgatgcttatttggatccaaattctcgtgagga

SEQ ID NO: 8999 - DNA, 80 bp, synthetic construct
  misc_feature 1..80: note = Synthetic: >HKU8-cand-28410-28489
  source 1..80: mol_type = other DNA
taaaccaaaagagcctaagcgtaaacctaaggaaaagaagaaggaagagacaactcctcaactcaatcctgcagcacctg

SEQ ID NO: 9000 - DNA, 80 bp, synthetic construct
  misc_feature 1..80: note = Artificial Sequence: >HKU8-cand-28490-28569
  source 1..80: mol_type = other DNA
tgtttacacctcctgttgtggtgccagatgctgttgctcaagttgagtttgagatggtcgatgaggttattgatgtcgat

SEQ ID NO: 9001 - DNA, 80 bp, synthetic construct
  misc_feature 1..80: note = Synthetic: >HKU8-cand-28570-28649
  source 1..80: mol_type = other DNA
cctcttggtgagtcttttgcatgaattatcaactaaacaaatgatgcttgctcttgctttgtattattcttgcggctatt

SEQ ID NO: 9002 - DNA, 80 bp, synthetic construct
  misc_feature 1..80: note = Synthetic: >HKU8-cand-28650-28729
  source 1..80: mol_type = other DNA
gttaactctgcccccattcctgttaagcataatgatcttaacccttacgagccctctatcagtggttttcgcggttcttg

SEQ ID NO: 9003 - DNA, 80 bp, synthetic construct
  misc_feature 1..80: note = Synthetic: >HKU8-cand-28730-28809
  source 1..80: mol_type = other DNA
tgaacagcttgctctcacttgcaggcttaatgtgaatccagatgcattccatgccgcagctaccactggttcccctgttc

SEQ ID NO: 9004 - DNA, 80 bp, synthetic construct
  misc_feature 1..80: note = Synthetic: >HKU8-cand-28810-28889
  source 1..80: mol_type = other DNA
cgattcctcgaacttgttgttctattcacactgtatccggtacttgcagctgccgaagcatgactttggttatctcatga

SEQ ID NO: 9005 - DNA, 80 bp, synthetic construct
  misc_feature 1..80: note = Synthetic: >HKU8-cand-28890-28969
  source 1..80: mol_type = other DNA
gtcctgaggtgcatgtgacccattttgatgtcacaataaaacctgatggaaagtacaaatacgagctaaattctcttgcc

SEQ ID NO: 9006 - DNA, 80 bp, synthetic construct
  misc_feature 1..80: note = Synthetic: >HKU8-cand-28970-29049
  source 1..80: mol_type = other DNA
ttcacacccgagggtgctactgtggctgacacgcttgttgatggctacgcccacctttctgaacgtcgtaaaatcatcaa

SEQ ID NO: 9007 - DNA, 80 bp, synthetic construct
  misc_feature 1..80: note = Synthetic: >HKU8-cand-29050-29129
  source 1..80: mol_type = other DNA
gcacggtcgccgtgataagcttcctgacctagatgctttagaaaaaaaataccacccctcgactggtgcacaacctgaac

SEQ ID NO: 9008 - DNA, 80 bp, synthetic construct
  misc_feature 1..80: note = Synthetic: >HKU8-cand-29130-29209
  source 1..80: mol_type = other DNA
tgaccctactgaaactcagtgataaggtggcagtcttatacactatggtaagcctgtaattaaatagtataagcaatgtt

SEQ ID NO: 9009 - DNA, 80 bp, synthetic construct
  misc_feature 1..80: note = Synthetic: >HKU8-cand-29210-29289
  source 1..80: mol_type = other DNA
taattatattactagccttagatgaaaattagttgcctaaagtgctacccctttcggagtaattgaaagatcgctttgac

SEQ ID NO: 9010 - DNA, 80 bp, synthetic construct
  misc_feature 1..80: note = Synthetic: >HKU9-cand-0-79
  source 1..80: mol_type = other DNA
aaaggtaatagctgcgtgctagagccgatcctttccccccgtttcgtcttgtacgaatcactcttgaacgaacttaaaat

SEQ ID NO: 9011 - DNA, 80 bp, synthetic construct
  misc_feature 1..80: note = Synthetic: >HKU9-cand-80-159
  source 1..80: mol_type = other DNA
tgcatcatacgtcacagtgggtttcgtcttgctgtgcgtaagttgcacacaaattttagtgaagcttttaggttaagtac

SEQ ID NO: 9012 - DNA, 80 bp, synthetic construct
  misc_feature 1..80: note = Synthetic: >MERS-cand-22330-22409
  source 1..80: mol_type = other DNA
tctatcattcctcacagtattcgttctatccaaagtgatagaaaagcttgggctgccttctacgtatataaacttcaacc

SEQ ID NO: 9013 - DNA, 80 bp, synthetic construct
  misc_feature 1..80: note = Synthetic: >MERS-cand-22410-22489
  source 1..80: mol_type = other DNA
gttaactttcctgttggatttttctgttgatggttatatacgcagagctatagactgtggttttaatgatttgtcacaac

SEQ ID NO: 9014 - DNA, 80 bp, synthetic construct
  misc_feature 1..80: note = Synthetic: >MERS-cand-22490-22569
  source 1..80: mol_type = other DNA
tccactgctcatatgaatccttcgatgttgaatctggagtttattcagtttcgtctttcgaagcaaaaccttctggctca

SEQ ID NO: 9015 - DNA, 80 bp, synthetic construct
  misc_feature 1..80: note = Synthetic: >MERS-cand-22570-22649
  source 1..80: mol_type = other DNA
gttgtggaacaggctgaaggtgttgaatgtgatttttcacctcttctgtctggcacacctcctcaggtttataatttcaa

SEQ ID NO: 9016 - DNA, 80 bp, synthetic construct
  misc_feature 1..80: note = Synthetic: >MERS-cand-22650-22729
  source 1..80: mol_type = other DNA
gcgtttggtttttaccaattgcaattataatcttaccaaattgctttcacttttttctgtgaatgattttacttgtagtc

SEQ ID NO: 9017 - DNA, 80 bp, synthetic construct
  misc_feature 1..80: note = Synthetic: >MERS-cand-22730-22809
  source 1..80: mol_type = other DNA
aaatatctccagcagcaattgctagcaactgttattcttcactgattttggattatttttcatacccacttagtatgaaa

SEQ ID NO: 9018 - DNA, 80 bp, synthetic construct
  misc_feature 1..80: note = Synthetic: >MERS-cand-22810-22889
  source 1..80: mol_type = other DNA
tccgatctcagtgttagttctgctggtccaatatcccagtttaattataaacagtccttttctaatcccacatgtttgat

SEQ ID NO: 9019 - DNA, 80 bp, synthetic construct
  misc_feature 1..80: note = Synthetic: >MERS-cand-22890-22969
  source 1..80: mol_type = other DNA
tttagcgactgttcctcataaccttactactattactaagcctcttaagtacagctatattaacaagtgctctcgtcttc

SEQ ID NO: 9020 - DNA, 80 bp, synthetic construct
  misc_feature 1..80: note = Synthetic: >MERS-cand-22970-23049
  source 1..80: mol_type = other DNA
tttctgatgatcgtactgaagtacctcagttagtgaacgctaatcaatactcaccctgtgtatccattgtcccatccact

SEQ ID NO: 9021 - DNA, 80 bp, synthetic construct
  misc_feature 1..80: note = Synthetic: >MERS-cand-23050-23129
  source 1..80: mol_type = other DNA
gtgtgggaagacggtgattattataggaaacaactatctccacttgaaggtggtggctggcttgttgctagtggctcaac

SEQ ID NO: 9022 - DNA, 80 bp, synthetic construct
  misc_feature 1..80: note = Synthetic: >MERS-cand-23130-23209
  source 1..80: mol_type = other DNA
tgttgccatgactgagcaattacagatgggctttggtattacagttcaatatggtacagacaccaatagtgtttgcccca

SEQ ID NO: 9023 - DNA, 80 bp, synthetic construct
  misc_feature 1..80: note = Synthetic: >MERS-cand-23210-23289
  source 1..80: mol_type = other DNA
agcttgaatttgctaatgacacaaaaattgcctctcaattaggcaattgcgtggaatattccctctatggtgtttcgggc

SEQ ID NO: 9024 - DNA, 80 bp, synthetic construct
  misc_feature 1..80: note = Synthetic: >MERS-cand-23290-23369
  source 1..80: mol_type = other DNA
cgtggtgtttttcagaattgcacagctgtaggtgttcgacagcagcgctttgtttatgatgcgtaccagaatttagttgg

SEQ ID NO: 9025 - DNA, 80 bp, synthetic construct
  misc_feature 1..80: note = Synthetic: >MERS-cand-23370-23449
  source 1..80: mol_type = other DNA
ctattattctgatgatggcaactactactgtttgcgtgcttgtgttagtgttcctgtttctgtcatctatgataaagaaa

SEQ ID NO: 9026 - DNA, 80 bp, synthetic construct
  misc_feature 1..80: note = Synthetic: >MERS-cand-23450-23529
  source 1..80: mol_type = other DNA
ctaaaacccacgctactctatttggtagtgttgcatgtgaacacatttcctctaccatgtctcaatactcccgttctacg

SEQ ID NO: 9027 - DNA, 80 bp, synthetic construct
  misc_feature 1..80: note = Synthetic: >MERS-cand-23530-23609
  source 1..80: mol_type = other DNA
cgatcaatgcttaaacggcgagattctacatatggtccccttcagacacctgttggttgtgtcctaggacttgttaattc

SEQ ID NO: 9028 - DNA, 80 bp, synthetic construct
  misc_feature 1..80: note = Synthetic: >MERS-cand-27460-27539
  source 1..80: mol_type = other DNA
gcgattcagttcctcttcacataatcgccccgagctcgcttatcgtttaagcagctctgcgctactatgggtcccgtgta

SEQ ID NO: 9029 - DNA, 80 bp, synthetic construct
  misc_feature 1..80: note = Synthetic: >MERS-cand-27540-27619
  source 1..80: mol_type = other DNA
gaggctaatccattagtctctctttggacatatggaaaacgaactatgttaccctttgtccaagaacgaatagggttgtt

SEQ ID NO: 9030 - DNA, 80 bp, synthetic construct
  misc_feature 1..80: note = Synthetic: >MERS-cand-27620-27699
  source 1..80: mol_type = other DNA
catagtaaactttttcatttttaccgtagtatgtgctataacactcttggtgtgtatggctttccttacggctactagat

SEQ ID NO: 9031 - DNA, 80 bp, synthetic construct
  misc_feature 1..80: note = Synthetic: >MERS-cand-27700-27779
  source 1..80: mol_type = other DNA
tatgtgtgcaatgtatgacaggcttcaataccctgttagttcagcccgcattatacttgtataatactggacgttcagtc

SEQ ID NO: 9032 - DNA, 80 bp, synthetic construct
  misc_feature 1..80: note = Synthetic: >MERS-cand-27780-27859
  source 1..80: mol_type = other DNA
tatgtaaaattccaggatagtaaaccccctctaccacctgacgagtgggtttaacgaactccttcataatgtctaatatg

SEQ ID NO: 9033 - DNA, 80 bp, synthetic construct
  misc_feature 1..80: note = Synthetic: >MERS-cand-27860-27939
  source 1..80: mol_type = other DNA
acgcaactcactgaggcgcagattattgccattattaaagactggaactttgcatggtccctgatctttctcttaattac

SEQ ID NO: 9034 - DNA, 80 bp, synthetic construct
  misc_feature 1..80: note = Synthetic: >MERS-cand-27940-28019
  source 1..80: mol_type = other DNA
tatcgtactacagtatggatacccatcccgtagtatgactgtctatgtctttaaaatgtttgttttatggctcctatggc

SEQ ID NO: 9035 - DNA, 80 bp, synthetic construct
  misc_feature 1..80: note = Synthetic: >MERS-cand-28020-28099
  source 1..80: mol_type = other DNA
catcttccatggcgctatcaatatttagcgccatttatccaattgatctagcttcccagataatctctggcattgtagca

SEQ ID NO: 9036 - DNA, 80 bp, synthetic construct
  misc_feature 1..80: note = Synthetic: >MERS-cand-28100-28179
  source 1..80: mol_type = other DNA
gctgtttcagctatgatgtggatttcctactttgtgcagagtatccggctgtttatgagaactggatcatggtggtcatt

SEQ ID NO: 9037 - DNA, 80 bp, synthetic construct
  misc_feature 1..80: note = Synthetic: >MERS-cand-28180-28259
  source 1..80: mol_type = other DNA
caatcctgagactaattgccttttgaacgttccatttggtggtacaactgtcgtacgtccactcgtagaggactctacca

SEQ ID NO: 9038 - DNA, 80 bp, synthetic construct
  misc_feature 1..80: note = Synthetic: >MERS-cand-28260-28339
  source 1..80: mol_type = other DNA
gtgtaactgctgttgtaaccaatggtcacctcaaaatggctggcatgcatttcggtgcttgtgactacgacagacttcct

SEQ ID NO: 9039 - DNA, 80 bp, synthetic construct
  misc_feature 1..80: note = Synthetic: >MERS-cand-28340-28419
  source 1..80: mol_type = other DNA
aatgaagtcaccgtggccaaacccaatgtgctgattgctttaaaaatggtgaagcggcaaagctacggaactaattccgg

SEQ ID NO: 9040 - DNA, 80 bp, synthetic construct
  misc_feature 1..80: note = Synthetic: >MERS-cand-28420-28499
  source 1..80: mol_type = other DNA
cgttgccatttaccatagatataaggcaggtaattacaggagtccgcctattacggcggatattgaacttgcattgcttc

SEQ ID NO: 9041 - DNA, 80 bp, synthetic construct
  misc_feature 1..80: note = Synthetic: >MERS-cand-28500-28579
  source 1..80: mol_type = other DNA
gagcttaggctctttagtaagagtatcttaattgattttaacgaatctcaatttcattgttatggcatcccctgctgcac

SEQ ID NO: 9042 - DNA, 80 bp, synthetic construct
  misc_feature 1..80: note = Synthetic: >MERS-cand-28580-28659
  source 1..80: mol_type = other DNA
ctcgtgctgtttcctttgccgataacaatgatataacaaatacaaacctgtctcgaggtagaggacgtaatccaaaacca

SEQ ID NO: 9043 - DNA, 80 bp, synthetic construct
  misc_feature 1..80: note = Synthetic: >MERS-cand-28660-28739
  source 1..80: mol_type = other DNA
cgagctgcaccaaataacactgtctcttggtacactgggcttacccaacacgggaaagtccctcttacctttccacctgg

SEQ ID NO: 9044 - DNA, 80 bp, synthetic construct
  misc_feature 1..80: note = Synthetic: >MurineCoV-cand-28150-28229
  source 1..80: mol_type = other DNA
taaacaatttatagcattctcattgctacctggcccctgtaagagagcagtcaagtagctatggccgtcgttggtcctaa

SEQ ID NO: 9045 - DNA, 80 bp, synthetic construct
  misc_feature 1..80: note = Synthetic: >MurineCoV-cand-28230-28309
  source 1..80: mol_type = other DNA
ggctacattggctgctgtctttattggtccatttattgtagcatgtatgctaggcattggcctagtttatttattgcaat

SEQ ID NO: 9046 - DNA, 80 bp, synthetic construct
  misc_feature 1..80: note = Synthetic: >MurineCoV-cand-28310-28389
  source 1..80: mol_type = other DNA
tgcaagttcaaatttttcatgttaaggataccatacgtgtgactggcaagccagccactgtgtcttatactacaagtaca

SEQ ID NO: 9047 - DNA, 80 bp, synthetic construct
  misc_feature 1..80: note = Synthetic: >MurineCoV-cand-28390-28469
  source 1..80: mol_type = other DNA
ccagtaacaccgagcgcgacgacgctcgatggtactacgtatactttaattagacccactagctcttatacaagagttta

SEQ ID NO: 9048 - DNA, 80 bp, synthetic construct
  misc_feature 1..80: note = Synthetic: >MurineCoV-cand-28470-28549
  source 1..80: mol_type = other DNA
tcttggtactccaagaggttttgattatagtacatttgggcctaagaccctagattatgttactaattctaaacctcatc

SEQ ID NO: 9049 - DNA, 80 bp, synthetic construct
  misc_feature 1..80: note = Synthetic: >MurineCoV-cand-28550-28629
  source 1..80: mol_type = other DNA
ttaattctggtcgtccatatacttttaaggcattgtccaggcatatgagaccaacagccacatggagatttggcatgtga

SEQ ID NO: 9050 - DNA, 80 bp, synthetic construct
  misc_feature 1..80: note = Synthetic: >MurineCoV-cand-28630-28709
  source 1..80: mol_type = other DNA
gtgatgcatggttacgccgcacgcgggactttggtgtcattcgcctagaagatttttgttttcaatttaattatagccaa

SEQ ID NO: 9051 - DNA, 80 bp, synthetic construct
  misc_feature 1..80: note = Synthetic: >MurineCoV-cand-28690-28769
  source 1..80: mol_type = other DNA
ttcaatttaattatagccaaccccgagttggttattgtagagttcctttaaaggcttggtgtagcaaccagggtaaattt

SEQ ID NO: 9052 - DNA, 80 bp, synthetic construct
  misc_feature 1..80: note = Synthetic: >MurineCoV-cand-28770-28849
  source 1..80: mol_type = other DNA
gcagcgcagtttaccctaaaaagttgcgaaaaaccaggtcacgaaaaatttattactagcttcacggcctacggcagaac

SEQ ID NO: 9053 - DNA, 80 bp, synthetic construct
  misc_feature 1..80: note = Synthetic: >MurineCoV-cand-28850-28929
  source 1..80: mol_type = other DNA
tgtccaacaggccgttagcaagttagtagaaagaagctgttgattttattctttttagggccacgcagctcgaaagaaat

SEQ ID NO: 9054 - DNA, 80 bp, synthetic construct
  misc_feature 1..80: note = Synthetic: >MurineCoV-cand-28930-29009
  source 1..80: mol_type = other DNA
gtttaatttattccttacagacacagtatggtatgtggggcagattatttttatattcgcagtgtgtttgatggtcacca

SEQ ID NO: 9055 - DNA, 80 bp, synthetic construct
  misc_feature 1..80: note = Synthetic: >MurineCoV-cand-29010-29089
  source 1..80: mol_type = other DNA
taattgtggttgccttccttgcgtctatcaaactttgtattcaactttgcggtttatgtaatactttggtgctgtcccct

SEQ ID NO: 9056 - DNA, 80 bp, synthetic construct
  misc_feature 1..80: note = Synthetic: >MurineCoV-cand-29080-29159
  source 1..80: mol_type = other DNA
gctgtccccttctatttatttgtatgataggagtaagcagctttataagtattataatgaagaaatgagactgcccctat

SEQ ID NO: 9057 - DNA, 80 bp, synthetic construct
  misc_feature 1..80: note = Synthetic: >MurineCoV-cand-29160-29239
  source 1..80: mol_type = other DNA
tagaggtggatgataatctaatccaaacattatgagtagtactactcaggccccagagcccgtctatcaatggacggccg

SEQ ID NO: 9058 - DNA, 80 bp, synthetic construct
  misc_feature 1..80: note = Synthetic: >MurineCoV-cand-29240-29319
  source 1..80: mol_type = other DNA
acgaggcagttcaattccttaaggaatggaacttctcgttgggcattatactactctttattactatcatactacagttc

SEQ ID NO: 9059 - DNA, 80 bp, synthetic construct
  misc_feature 1..80: note = Synthetic: >MurineCoV-cand-29320-29399
  source 1..80: mol_type = other DNA
ggttacacgagccgtagcatgtttatttatgttgtgaaaatgataatcttgtggttaatgtggccactgactattgtttt

SEQ ID NO: 9060 - DNA, 80 bp, synthetic construct
  misc_feature 1..80: note = Synthetic: >NL63-cand-2880-2959
  source 1..80: mol_type = other DNA
gtttctggtgattatctttggtatgttgtagatgacatttattatccagcttcatgtaatggtgtattgccagttgcttt

SEQ ID NO: 9061 - DNA, 80 bp, synthetic construct
  misc_feature 1..80: note = Synthetic: >NL63-cand-2960-3039
  source 1..80: mol_type = other DNA
tacaaaattagcaggtggtaaaatatctttttctgatgatgttatagttcatgatgttgaacctacccataaagtcaagc

SEQ ID NO: 9062 - DNA, 80 bp, synthetic construct
  misc_feature 1..80: note = Synthetic: >NL63-cand-3040-3119
  source 1..80: mol_type = other DNA
tcatatttgagtttgaagatgatgttgttaccagtctttgtaagaagagttttggtaagtccattatttatacaggtgat

SEQ ID NO: 9063 - DNA, 80 bp, synthetic construct
  misc_feature 1..80: note = Synthetic: >NL63-cand-3120-3199
  source 1..80: mol_type = other DNA
tgggaaggtctacatgaagttcttacatctgcaatgaatgtcattgggcaacatattaagttgccacaattttatattta

SEQ ID NO: 9064 - DNA, 80 bp, synthetic construct
  misc_feature 1..80: note = Synthetic: >NL63-cand-3200-3279
  source 1..80: mol_type = other DNA
tgatgaagagggtggttatgatgtttctaaaccagttatgatttcacaatggcctattagtaatgatagtaatggttgtg

SEQ ID NO: 9065 - DNA, 80 bp, synthetic construct
  misc_feature 1..80: note = Synthetic: >NL63-cand-3280-3359
  source 1..80: mol_type = other DNA
ttgttgaagcgagcactgattttcatcaattagaatgtattgttgatgactctgttagagaagaggttgatataattgaa

SEQ ID NO: 9066 - DNA, 80 bp, synthetic construct
  misc_feature 1..80: note = Synthetic: >NL63-cand-3360-3439
  source 1..80: mol_type = other DNA
caaccttttgaagaagttgaacatgtgctctcaattaaacaacctttttctttttcttttagagatgaattgggtgttcg

SEQ ID NO: 9067 - DNA, 80 bp, synthetic construct
  misc_feature 1..80: note = Synthetic: >NL63-cand-3440-3519
  source 1..80: mol_type = other DNA
tgttttagatcaatctgataataattgttggattagtaccacacttgtacagttgcaacttacaaagcttttggatgatt

SEQ ID NO: 9068 - DNA, 80 bp, synthetic construct
  misc_feature 1..80: note = Synthetic: >NL63-cand-3520-3599
  source 1..80: mol_type = other DNA
ctattgagatgcaattgtttaaagttggtaaagttgattcaattgtccaaaagtgttatgagttgtctcatttaattagt

SEQ ID NO: 9069 - DNA, 80 bp, synthetic construct
  misc_feature 1..80: note = Synthetic: >NL63-cand-3600-3679
  source 1..80: mol_type = other DNA
ggttcacttggtgatagtggtaaacttcttagtgaacttcttaaagaaaaatatacatgttctataacttttgagatgtc

SEQ ID NO: 9070 - DNA, 80 bp, synthetic construct
  misc_feature 1..80: note = Synthetic: >NL63-cand-3680-3759
  source 1..80: mol_type = other DNA
ttgtgattgtggtaaaaagtttgatgagcaggttggttgtttgttttggattatgccttacacaaaactttttcaaaaag

SEQ ID NO: 9071 - DNA, 80 bp, synthetic construct
  misc_feature 1..80: note = Synthetic: >NL63-cand-3760-3839
  source 1..80: mol_type = other DNA
gtgagtgttgtatttgtcataaaatgcagacttataagcttgttagtatgaaaggtactggtgtgtttgtacaggatcca

SEQ ID NO: 9072 - DNA, 80 bp, synthetic construct
  misc_feature 1..80: note = Synthetic: >NL63-cand-3840-3919
  source 1..80: mol_type = other DNA
gcacctattgacattgatgctttccctgtgaaacctatatgttcatctgtatatttaggtgttaagggttctggtcatta

SEQ ID NO: 9073 - DNA, 80 bp, synthetic construct
  misc_feature 1..80: note = Synthetic: >NL63-cand-3920-3999
  source 1..80: mol_type = other DNA
tcaaacaaatttatacagttttaacaaagctattgatggttttggtgtctttgacattaaaaatagtagtgttaatactg

SEQ ID NO: 9074 - DNA, 80 bp, synthetic construct
  misc_feature 1..80: note = Synthetic: >NL63-cand-4000-4079
  source 1..80: mol_type = other DNA
tttgttttgttgatgttgattttcatagtgtagaagtagaagctggtgaagttaaaccttttgctgtatataaaaatgtt

SEQ ID NO: 9075 - DNA, 80 bp, synthetic construct
  misc_feature 1..80: note = Synthetic: >NL63-cand-4080-4159
  source 1..80: mol_type = other DNA
aaattttatttaggtgatatttcacaccttgtaaactgtgtttcttttgactttgttgtcaatgctgctaatgagaatct

SEQ ID NO: 9076 - DNA, 80 bp, synthetic construct
  misc_feature 1..80: note = Synthetic: >NL63-cand-7990-8069
  source 1..80: mol_type = other DNA
agactcttgtttttacattacaggctgcttttggaaacacaggtgtttgttatgactttgatggtgttaccactagtgat

SEQ ID NO: 9077 - DNA, 80 bp, synthetic construct
  misc_feature 1..80: note = Synthetic: >NL63-cand-8070-8149
  source 1..80: mol_type = other DNA
aagtgtatttttaattctgcttgtactaggttggaaggtttgggtggtgacaatgtttattgttacaacactgatcttat

SEQ ID NO: 9078 - DNA, 80 bp, synthetic construct
  misc_feature 1..80: note = Synthetic: >NL63-cand-8150-8229
  source 1..80: mol_type = other DNA
tgaaggttctaaaccttatagtactttacagcctaatgcttattataagtatgatgttaaaaattatgtacgttttccag

SEQ ID NO: 9079 - DNA, 80 bp, synthetic construct
  misc_feature 1..80: note = Synthetic: >NL63-cand-8230-8309
  source 1..80: mol_type = other DNA
aaattttagctagaggttttggcttacgtactattagaactttggctacacgttattgtagagttggtgaatgccgtgac

SEQ ID NO: 9080 - DNA, 80 bp, synthetic construct
  misc_feature 1..80: note = Synthetic: >NL63-cand-8310-8389
  source 1..80: mol_type = other DNA
tcacataaaggtgtttgttttggttttgataaatggtatgttaatgatggacgtgttgatgacggttacatttgtggtga

SEQ ID NO: 9081 - DNA, 80 bp, synthetic construct
  misc_feature 1..80: note = Synthetic: >NL63-cand-8390-8469
  source 1..80: mol_type = other DNA
tggtcttatagaccttcttgttaatgtactctcaatctttagttcatcttttagcgttgtggctatgtctggacatatgt

SEQ ID NO: 9082 - DNA, 80 bp, synthetic construct
  misc_feature 1..80: note = Synthetic: >NL63-cand-8470-8549
  source 1..80: mol_type = other DNA
tgtttaattttctttttgcagcatttattacatttttgtgctttttagttactaaatttaaacgtgtttttggtgatctt

SEQ ID NO: 9083 - DNA, 80 bp, synthetic construct
  misc_feature 1..80: note = Synthetic: >NL63-cand-8550-8629
  source 1..80: mol_type = other DNA
tcttatggtgtttttactgttgtttgtgcaactttgattaataacatttcttatgttgttactcaaaatttattttttat

SEQ ID NO: 9084 - DNA, 80 bp, synthetic construct
  misc_feature 1..80: note = Synthetic: >NL63-cand-8630-8709
  source 1..80: mol_type = other DNA
gttgctttatgctattttgtattttgtttttactaggacagtgcgttatgcttggatttggcatattgcatacattgttg

SEQ ID NO: 9085 - DNA, 80 bp, synthetic construct
  misc_feature 1..80: note = Synthetic: >NL63-cand-8710-8789
  source 1..80: mol_type = other DNA
catacttcttgttaataccatggtggcttctcacatggtttagttttgctgcatttttagagcttttacctaatgttttt

SEQ ID NO: 9086 - DNA, 80 bp, synthetic construct
  misc_feature 1..80: note = Synthetic: >NL63-cand-8790-8869
  source 1..80: mol_type = other DNA
aagttaaaaatctctactcaattgtttgaaggtgataagtttataggtacttttgagagtgctgctgcaggtacatttgt

SEQ ID NO: 9087 - DNA, 80 bp, synthetic construct
  misc_feature 1..80: note = Synthetic: >NL63-cand-8870-8949
  source 1..80: mol_type = other DNA
tcttgacatgcgttcttatgaaaggctgataaatactatttcacctgagaaacttaagaattatgctgcaagttataata

SEQ ID NO: 9088 - DNA, 80 bp, synthetic construct
  misc_feature 1..80: note = Synthetic: >NL63-cand-8950-9029
  source 1..80: mol_type = other DNA
aatataaatattatagtggtagtgctagtgaggctgattatcgttgtgcttgttatgctcatttagccaaggctatgtta

SEQ ID NO: 9089 - DNA, 80 bp, synthetic construct
  misc_feature 1..80: note = Synthetic: >NL63-cand-9030-9109
  source 1..80: mol_type = other DNA
gattacgcaaaagatcataatgacatgttatattctccacctaccattagctacaattccaccttacaatctggtcttaa

SEQ ID NO: 9090 - DNA, 80 bp, synthetic construct
  misc_feature 1..80: note = Synthetic: >NL63-cand-9110-9189
  source 1..80: mol_type = other DNA
gaagatggcacaaccatctggttgtgttgagagatgtgtggttcgcgtctgttatggtagtactgtgcttaatggagttt

SEQ ID NO: 9091 - DNA, 80 bp, synthetic construct
  misc_feature 1..80: note = Synthetic: >NL63-cand-9190-9269
  source 1..80: mol_type = other DNA
ggttaggtgacactgttacttgtcctagacatgtcatagcaccatcaaccactgttcttattgattatgatcatgcatat

SEQ ID NO: 9092 - DNA, 80 bp, synthetic construct
  misc_feature 1..80: note = Synthetic: >SARSCoV-cand-19000-19079
  source 1..80: mol_type = other DNA
caggctgaagtagaatggaagttctacgatgctcagccatgtagtgacaaagcttacaaaatagaggaactcttctattc

SEQ ID NO: 9093 - DNA, 80 bp, synthetic construct
  misc_feature 1..80: note = Synthetic: >SARSCoV-cand-19080-19159
  source 1..80: mol_type = other DNA
ttatgctacacatcacgataaattcactgatggtgtttgtttgttttggaattgtaacgttgatcgttacccagccaatg

SEQ ID NO: 9094 - DNA, 80 bp, synthetic construct
  misc_feature 1..80: note = Synthetic: >SARSCoV-cand-19160-19239
  source 1..80: mol_type = other DNA
caattgtgtgtaggtttgacacaagagtcttgtcaaacttgaacttaccaggctgtgatggtggtagtttgtatgtgaat

SEQ ID NO: 9095 - DNA, 80 bp, synthetic construct
  misc_feature 1..80: note = Synthetic: >SARSCoV-cand-19240-19319
  source 1..80: mol_type = other DNA
aagcatgcattccacactccagctttcgataaaagtgcatttactaatttaaagcaattgcctttcttttactattctga

SEQ ID NO: 9096 - DNA, 80 bp, synthetic construct
  misc_feature 1..80: note = Synthetic: >SARSCoV-cand-19320-19399
  source 1..80: mol_type = other DNA
tagtccttgtgagtctcatggcaaacaagtagtgtcggatattgattatgttccactcaaatctgctacgtgtattacac

SEQ ID NO: 9097 - DNA, 80 bp, synthetic construct
  misc_feature 1..80: note = Synthetic: >SARSCoV-cand-19400-19479
  source 1..80: mol_type = other DNA
gatgcaatttaggtggtgctgtttgcagacaccatgcaaatgagtaccgacagtacttggatgcatataatatgatgatt

SEQ ID NO: 9098 - DNA, 80 bp, synthetic construct
  misc_feature 1..80: note = Synthetic: >SARSCoV-cand-19480-19559
  source 1..80: mol_type = other DNA
tctgctggatttagcctatggatttacaaacaatttgatacttataacctgtggaatacatttaccaggttacagagttt

SEQ ID NO: 9099 - DNA, 80 bp, synthetic construct
  misc_feature 1..80: note = Synthetic: >SARSCoV-cand-19560-19639
  source 1..80: mol_type = other DNA
agaaaatgtggcttataatgttgttaataaaggacactttgatggacacgccggcgaagcacctgtttccatcattaata

SEQ ID NO: 9100 - DNA, 80 bp, synthetic construct
  misc_feature 1..80: note = Synthetic: >SARSCoV-cand-19640-19719
  source 1..80: mol_type = other DNA
atgctgtttacacaaaggtagatggtattgatgtggagatctttgaaaataagacaacacttcctgttaatgttgcattt

SEQ ID NO: 9101 - DNA, 80 bp, synthetic construct
  misc_feature 1..80: note = Synthetic: >SARSCoV-cand-19720-19799
  source 1..80: mol_type = other DNA
gagctttgggctaagcgtaacattaaaccagtgccagagattaagatactcaataatttgggtgttgatatcgctgctaa

SEQ ID NO: 9102 - DNA, 80 bp, synthetic construct
  misc_feature 1..80: note = Synthetic: >SARSCoV-cand-19800-19879
  source 1..80: mol_type = other DNA
tactgtaatctgggactacaaaagagaagccccagcacatgtatctacaataggtgtctgcacaatgactgacattgcca

SEQ ID NO: 9103 - DNA, 80 bp, synthetic construct
  misc_feature 1..80: note = Synthetic: >SARSCoV-cand-19880-19959
  source 1..80: mol_type = other DNA
agaaacctactgagagtgcttgttcttcacttactgtcttgtttgatggtagagtggaaggacaggtagacctttttaga

SEQ ID NO: 9104 - DNA, 80 bp, synthetic construct
  misc_feature 1..80: note = Synthetic: >SARSCoV-cand-19960-20039
  source 1..80: mol_type = other DNA
aacgcccgtaatggtgttttaataacagaaggttcagtcaaaggtctaacaccttcaaagggaccagcacaagctagcgt

SEQ ID NO: 9105 - DNA, 80 bp, synthetic construct
  misc_feature 1..80: note = Synthetic: >SARSCoV-cand-20040-20119
  source 1..80: mol_type = other DNA
caatggagtcacattaattggagaatcagtaaaaacacagtttaactactttaagaaagtagacggcattattcaacagt

SEQ ID NO: 9106 - DNA, 80 bp, synthetic construct
  misc_feature 1..80: note = Synthetic: >SARSCoV-cand-20120-20199
  source 1..80: mol_type = other DNA
tgcctgaaacctactttactcagagcagagacttagaggattttaagcccagatcacaaatggaaactgactttctcgag

SEQ ID NO: 9107 - DNA, 80 bp, synthetic construct
  misc_feature 1..80: note = Synthetic: >SARSCoV-cand-20200-20279
  source 1..80: mol_type = other DNA
ctcgctatggatgaattcatacagcgatataagctcgagggctatgccttcgaacacatcgtttatggagatttcagtca

SEQ ID NO: 9108 - DNA, 80 bp, synthetic construct
  misc_feature 1..80: note = Synthetic: >Shrew-cand-4160-4239
  source 1..80: mol_type = other DNA
tgcaaaatgtggctaataattgttgggttaactctgttggattaatgcttcaaagagctgatgttgtttttaatagtgaa

SEQ ID NO: 9109 - DNA, 80 bp, synthetic construct
  misc_feature 1..80: note = Synthetic: >Shrew-cand-4240-4319
  source 1..80: mol_type = other DNA
ggtcttaatgttttgtggaaaagatatttagaaggaaaaaatggtggttttatagcatttctttattttattatgaataa

SEQ ID NO: 9110 - DNA, 80 bp, synthetic construct
  misc_feature 1..80: note = Synthetic: >Shrew-cand-4320-4399
  source 1..80: mol_type = other DNA
agagattggagatttaggtgatgcagaacaagttctgttagttcttaataagtatattaagtgtgaaagtaaagttattg

SEQ ID NO: 9111 - DNA, 80 bp, synthetic construct
  misc_feature 1..80: note = Synthetic: >Shrew-cand-4400-4479
  source 1..80: mol_type = other DNA
tttccacagaatatgagtgtgatagttgtgaaaataaggttgtaacatatgaaggattaattgcacctgtttcgttgatt

SEQ ID NO: 9112 - DNA, 80 bp, synthetic construct
  misc_feature 1..80: note = Synthetic: >Shrew-cand-4480-4559
  source 1..80: mol_type = other DNA
gaaagaaattttcaatgtgatcatggtaagaaagttactactaaagttttgaaacttagtggtgatatgatttttgtaga

SEQ ID NO: 9113 - DNA, 80 bp, synthetic construct
  misc_feature 1..80: note = Synthetic: >Shrew-cand-4560-4639
  source 1..80: mol_type = other DNA
tgttaatgggtttaatccatttgaatccaatggatttaatcttcagagtgcaaatgtgatagttggtggtgaagaacttt

SEQ ID NO: 9114 - DNA, 80 bp, synthetic construct
  misc_feature 1..80: note = Synthetic: >Shrew-cand-4640-4719
  source 1..80: mol_type = other DNA
gtcattattggtattgggataaacaaaagaatattgtctttacaggcaaaggctggagtgataaatctgttaaagataaa

SEQ ID NO: 9115 - DNA, 80 bp, synthetic construct
  misc_feature 1..80: note = Synthetic: >Shrew-cand-4720-4799
  source 1..80: mol_type = other DNA
attgcttattcagcttttgtgaagaatgatgaatttaagaagaaaaataaaatgaatgatacagtggtggcctgtgaaaa

SEQ ID NO: 9116 - DNA, 80 bp, synthetic construct
  misc_feature 1..80: note = Synthetic: >Shrew-cand-4800-4879
  source 1..80: mol_type = other DNA
aaatgaaagtttagactatgtgggtaaattcttcaattatggagaaaaatttttgaatattatagtcttctttctacaat

SEQ ID NO: 9117 - DNA, 80 bp, synthetic construct
  misc_feature 1..80: note = Synthetic: >Shrew-cand-4880-4959
  source 1..80: mol_type = other DNA
tgttttaccgcctagttattatggctaaaggctatattaataaaaaggattttcgcgtagtggctatacaaacaacaagt

SEQ ID NO: 9118 - DNA, 80 bp, synthetic construct
  misc_feature 1..80: note = Synthetic: >Shrew-cand-4960-5039
  source 1..80: mol_type = other DNA
acatctagatttgtatttagatctcttgtagctaatttggctggtgttacggagggaataaagaaaaagaaaaagaaaat

SEQ ID NO: 9119 - DNA, 80 bp, synthetic construct
  misc_feature 1..80: note = Synthetic: >Shrew-cand-5040-5119
  source 1..80: mol_type = other DNA
aagtttctgttataaaacaggaatattattattcggactctttcaattattacttttagtatcacaattggatcatagtt

SEQ ID NO: 9120 - DNA, 80 bp, synthetic construct
  misc_feature 1..80: note = Synthetic: >Shrew-cand-5120-5199
  source 1..80: mol_type = other DNA
attatgatgaatatagtcaatctaattttaataaaaaggaattttgtggtaaaaatttttggtgttatttaacactttgg

SEQ ID NO: 9121 - DNA, 80 bp, synthetic construct
  misc_feature 1..80: note = Synthetic: >Shrew-cand-5200-5279
  source 1..80: mol_type = other DNA
aatgtagatggtttagaagattttccacatcttaatattcaatggaatgtttttaaaggtggtttttcttttaccatttt

SEQ ID NO: 9122 - DNA, 80 bp, synthetic construct
  misc_feature 1..80: note = Synthetic: >Shrew-cand-5280-5359
  source 1..80: mol_type = other DNA
gcctttgttttatatggctattatgttttgttttggaaatttttatttgcagggctttttgatagctatgttatttcaat

SEQ ID NO: 9123 - DNA, 80 bp, synthetic construct
  misc_feature 1..80: note = Synthetic: >Shrew-cand-5360-5439
  source 1..80: mol_type = other DNA
ggtttggtagtgtgatgggtttgagtattgaagtattagatattgttaatttaacccagtttttggaaccagtgttttgt

SEQ ID NO: 9124 - DNA, 80 bp, synthetic construct
  misc_feature 1..80: note = Synthetic: >AlphaSp-cand-8120-8199
  source 1..80: mol_type = other DNA
ctactaatagtaggcgttgtcctatagttgttggcacatctgatgaggttcgatacattccaggtgtaccagctggtgtc

SEQ ID NO: 9125 - DNA, 80 bp, synthetic construct
  misc_feature 1..80: note = Synthetic: >BetaSp-cand-4360-4439
  source 1..80: mol_type = other DNA
actcattggcagtgattgattataatggtttaaaacaagttgatgggacgcttgttacaaatgttagtagtaacaagttt

SEQ ID NO: 9126 - DNA, 80 bp, synthetic construct
  misc_feature 1..80: note = Synthetic: >HKU24-cand-4030-4109
  source 1..80: mol_type = other DNA
cggcactcattggcagtgattgattataatggtttaaagcaagttgatggaacgcttgttacagatgttagtagtaacaa

SEQ ID NO: 9127 - DNA, 80 bp, synthetic construct
  misc_feature 1..80: note = Synthetic: >Quail-cand-14600-14679
  source 1..80: mol_type = other DNA
gcttcattaaacttctttgggaacagggcaagaaacccccgcccataacgaagaaccatatattcactggctatcatttt

SEQ ID NO: 9128 - DNA, 80 bp, synthetic construct
  misc_feature 1..80: note = Synthetic: >HKU17-cand-14670-14749
  source 1..80: mol_type = other DNA
attcattaaacttctttgggaacagggcaaaaagcctccgcccattacgaagaaccatatattcactggctatcatttta

SEQ ID NO: 9129 - DNA, 80 bp, synthetic construct
  misc_feature 1..80: note = Synthetic: >Sk512R-cand-7640-7719
  source 1..80: mol_type = other DNA
cgatatagctaattgtatgcgtgttggtgccaaagttgttaaccacaatgttcttacaaaagacaatgtccctgttgttt

SEQ ID NO: 9130 - DNA, 80 bp, synthetic construct
  misc_feature 1..80: note = Synthetic: >Sb512-cand-7640-7719
  source 1..80: mol_type = other DNA
cagtgcacgatatagctaattgtatgcgtgttggtgccaaagttgttaatcataatgttcttacaaaagacaatgttcct

SEQ ID NO: 9131 - DNA, 80 bp, synthetic construct
  misc_feature 1..80: note = Synthetic: >AlphaSp-cand-7640-7719
  source 1..80: mol_type = other DNA
tgcatgatatagctaattgtatgcgtgttggtgccaaagttgccaatcacaatgttcttacaaaagacaatgtccctgtt

SEQ ID NO: 9132 - DNA, 80 bp, synthetic construct
  misc_feature 1..80: note = Synthetic: >BetaSp-cand-15730-15809
  source 1..80: mol_type = other DNA
tgttgttcacaaactgataggttctatcgtttggcgaatgagtgcgcacaagttttaagtgaaattgttatgtgtggtgg

SEQ ID NO: 9133 - DNA, 80 bp, synthetic construct
  misc_feature 1..80: note = Synthetic: >HKU24-cand-15380-15459
  source 1..80: mol_type = other DNA
ttcacaaactgataggttctatcgtttggcgaatgagtgtgcacaagttttgagtgaaattgttatgtgtggtggctgtt

SEQ ID NO: 9134 - DNA, 80 bp, synthetic construct
  misc_feature 1..80: note = Synthetic: >WIV16-cand-5140-5219
  source 1..80: mol_type = other DNA
aaaccacacaaagaaatggaaatttcctcaagttggtggtttaacttcaattaaatgggctgataacaattgttatttgt

SEQ ID NO: 9135 - DNA, 80 bp, synthetic construct
  misc_feature 1..80: note = Synthetic: >SARSRC-cand-5130-5209
  source 1..80: mol_type = other DNA
cacaaagaaatggaaatttcctcaagttggtggtttaacttcaatcaaatgggctgacaataactgttatttgtccagtg

SEQ ID NO: 9136 - DNA, 80 bp, synthetic construct
  misc_feature 1..80: note = Synthetic: >BtRl_BetaCoV-cand-5110-5189
  source 1..80: mol_type = other DNA
acaaagaaatggaaatttcctcaagttggtggtttaactgcaatcaaatgggctgataataactgttatttgtccagtgt

SEQ ID NO: 9137 - DNA, 80 bp, synthetic construct
  misc_feature 1..80: note = Synthetic: >BtSk_AlphaCoV-cand-16530-16609
  source 1..80: mol_type = other DNA
taattacaggcatattgtatatgttggtgatcctcagcaattaccagcacctagagttatgataactagaggtgttttgg

SEQ ID NO: 9138 - DNA, 80 bp, synthetic construct
  misc_feature 1..80: note = Synthetic: >Sb512-cand-16580-16659
  source 1..80: mol_type = other DNA
ttacaggcacattgtatatgttggtgatcctcagcaattaccagcacctagagttatgataactagaggtgttttggtgc

SEQ ID NO: 9139 - DNA, 80 bp, synthetic construct
  misc_feature 1..80: note = Synthetic: >HKU2R-cand-13140-13219
  source 1..80: mol_type = other DNA
tgttatgatgacatgtgtttgttacactgttccaattttaacacactattttctactactatacctaatactgcttttgg

SEQ ID NO: 9140 - DNA, 80 bp, synthetic construct
  misc_feature 1..80: note = Synthetic: >MsbCoV1-cand-26040-26119
  source 1..80: mol_type = other DNA
ccgcttccagttttaaatgtctaaacgagaatgattaactttattgttctttgttgcgcctttataggcgttatttatgc

SEQ ID NO: 9141 - DNA, 80 bp, synthetic construct
  misc_feature 1..80: note = Synthetic: >MbCoV1-cand-26050-26129
  source 1..80: mol_type = other DNA
cttccagttttaaatgtctaaacgagaatgattaactttattgttctttgttgcgcctttataggcgttatttatgcaga

SEQ ID NO: 9142 - DNA, 80 bp, synthetic construct
  misc_feature 1..80: note = Synthetic: >BatCoV1A-cand-26220-26299
  source 1..80: mol_type = other DNA
tccagttttaaatgtctaaacgagaatgattaagtacattattctattttgcgccttcttaggcgttatgtatgcagaag

SEQ ID NO: 9143 - DNA, 80 bp, synthetic construct
  misc_feature 1..80: note = Synthetic: >BtRf_AlphaCoV-cand-14140-14219
  source 1..80: mol_type = other DNA
gttgtacagacagtgataggttttacagactttctaatgaacttgcacaagttcttaatgaggttgtacattccaatgga

SEQ ID NO: 9144 - DNA, 80 bp, synthetic construct
  misc_feature 1..80: note = Synthetic: >HKU2-cand-12190-12269
  source 1..80: mol_type = other DNA
tactaatggtgttgaggctaacatgaatcaagattcttatggtggtgcttcagtttgtatttactgtagagcgcatgtcg

SEQ ID NO: 9145 - DNA, 80 bp, synthetic construct
  misc_feature 1..80: note = Synthetic: >SEAC-cand-12170-12249
  source 1..80: mol_type = other DNA
gacaagccgttactaatggtgttgaggctaacatgaatcaagattcttatggtggtgcttcagtttgtatttactgtaga

SEQ ID NO: 9146 - DNA, 80 bp, synthetic construct
  misc_feature 1..80: note = Synthetic: >HKU2R-cand-12010-12089
  source 1..80: mol_type = other DNA
gccgttactaatggtgttgaggctaacatgaaccaagactcttatggtggtgcttcagtttgtatttactgtagagcgca

SEQ ID NO: 9147 - DNA, 80 bp, synthetic construct
  misc_feature 1..80: note = Synthetic: >HKU15-cand-25090-25169
  source 1..80: mol_type = other DNA
cgtagtgtatagccagagagccagtcagagggcgctatcatgcaaactagggctggctactctagcacagaatcacatcc

SEQ ID NO: 9148 - DNA, 80 bp, synthetic construct
  misc_feature 1..80: note = Synthetic: >HKU31-cand-27300-27379
  source 1..80: mol_type = other DNA
acattactaccacttgttgatatgaggtctcatttcattcgtgttagtacatgtacatcaaatacagtcgtggcagtttc

SEQ ID NO: 9149 - DNA, 80 bp, synthetic construct
  misc_feature 1..80: note = Synthetic: >HKU15-cand-6800-6879
  source 1..80: mol_type = other DNA
gagttgttgatgtaacgacgcactctattcctggaattccagcaggtgtcattcatagagacggtctcatacttaacatt

SEQ ID NO: 9150 - DNA, 80 bp, synthetic construct
  misc_feature 1..80: note = Synthetic: >MsbCoV1-cand-26120-26199
  source 1..80: mol_type = other DNA
agaaaatggtgataacaccactgctgttactccaacactcccacctcagcaaataccgctgaaagaggtgatggaacatt

SEQ ID NO: 9151 - DNA, 80 bp, synthetic construct
  misc_feature 1..80: note = Synthetic: >MbCoV1-cand-26130-26209
  source 1..80: mol_type = other DNA
caatggtgataacaccactgctgttactccaacacttccacctcagcaaataccgctgaaagaggtgatggaacatttaa

SEQ ID NO: 9152 - DNA, 80 bp, synthetic construct
  misc_feature 1..80: note = Synthetic: >WIV16-cand-24890-24969
  source 1..80: mol_type = other DNA
acaagtacttcaaaaatcacacatcaccagatgttgatcttggcgacatttcaggcattaacgcttctgtcgtcaacatt

SEQ ID NO: 9153 - DNA, 80 bp, synthetic construct
  misc_feature 1..80: note = Synthetic: >SARSCoV-cand-24930-25009
  source 1..80: mol_type = other DNA
gaagagctggacaagtacttcaaaaatcatacatcaccagatgttgatcttggcgacatttcaggcattaacgcttctgt

SEQ ID NO: 9154 - DNA, 80 bp, synthetic construct
  misc_feature 1..80: note = Synthetic: >HKU5-cand-11760-11839
  source 1..80: mol_type = other DNA
aatgttgctaagtttttcgctcgggttgtgttcctttatgcgccgcatgctggattcatcttcccagaggttaaacttgt

SEQ ID NO: 9155 - DNA, 80 bp, synthetic construct
  misc_feature 1..80: note = Synthetic: >HKU5R-cand-11750-11829
  source 1..80: mol_type = other DNA
tgcagtcaatgttgctaagtttttcgctcgggttgtgttcctttatgcgccgcatactggattcatcttcccagaggtta

SEQ ID NO: 9156 - DNA, 80 bp, synthetic construct
  misc_feature 1..80: note = Synthetic: >HKU8R-cand-28580-28659
  source 1..80: mol_type = other DNA
aatgtttaattatattactagccttagatgaaaattagttgcctacagtgctacccctttcggagtaattgaaagatcgc

SEQ ID NO: 9157 - DNA, 80 bp, synthetic construct
  misc_feature 1..80: note = Synthetic: >HghCoV1-cand-16690-16769
  source 1..80: mol_type = other DNA
tgtgattggagtgaaagcggtgattatacacttgctaatactactacagaacctttaaaattatttgctgctgaaacatt

SEQ ID NO: 9158 - DNA, 80 bp, synthetic construct
  misc_feature 1..80: note = Synthetic: >HKU31-cand-16760-16839
  source 1..80: mol_type = other DNA
gtgattggagtgaaagtggtgattatacacttgctaataccactacagaacctttaaaattatttgctgctgaaacatta

SEQ ID NO: 9159 - DNA, 80 bp, synthetic construct
  misc_feature 1..80: note = Synthetic: >HghCoV1-cand-17570-17649
  source 1..80: mol_type = other DNA
tgcctgcacctcggactttgttaactagaggcacattagaacctgaaaattttaatagtgtcactaggtttatgtgtaat

SEQ ID NO: 9160 - DNA, 80 bp, synthetic construct
  misc_feature 1..80: note = Synthetic: >HKU23-cand-23220-23299
  source 1..80: mol_type = other DNA
ctcgcggtggaacaatgccaggcagtctgataacatgacggcagttgcttgtcaacccccgtactgttattttcgtaatt

SEQ ID NO: 9161 - DNA, 80 bp, synthetic construct
  misc_feature 1..80: note = Synthetic: >BetaSp-cand-29020-29099
  source 1..80: mol_type = other DNA
accttgtacggaaacgacacctcaacggataaaaattttggaattatttctggctttaagagtttcggtaattcaccttc

SEQ ID NO: 9162 - DNA, 80 bp, synthetic construct
  misc_feature 1..80: note = Synthetic: >BetaCoV1-cand-28910-28989
  source 1..80: mol_type = other DNA
tacggaaacgacacctcaacggataaaaattttggaattatttctggctttaagagtttcggtaattcaccttccgaggc

SEQ ID NO: 9163 - DNA, 80 bp, synthetic construct
  misc_feature 1..80: note = Synthetic: >HKU5R-cand-20720-20799
  source 1..80: mol_type = other DNA
tgttcggttattgatttaaagcttgacgacttcgttgacattataaaggcaatggaccttagtgtcgtttcaaaagtcgt

SEQ ID NO: 9164 - DNA, 80 bp, synthetic construct
  misc_feature 1..80: note = Synthetic: >BetaCoV1-cand-8060-8139
  source 1..80: mol_type = other DNA
ttctacgagaaggatggacagcgtgtttatgatgatgtaaatgctagcatgtttgtagactttaatggtctgctgcattc

SEQ ID NO: 9165 - DNA, 80 bp, synthetic construct
  misc_feature 1..80: note = Synthetic: >HKU5R-cand-27930-28009
  source 1..80: mol_type = other DNA
gttaccttttgtccaagaacaaataggtgcattcatagtaaactttttcatattatccgtagtttgtgctgtaacactcg

SEQ ID NO: 9166 - DNA, 80 bp, synthetic construct
  misc_feature 1..80: note = Synthetic: >HKU10R-cand-16630-16709
  source 1..80: mol_type = other DNA
ttttggagcccaaggattacaatgttgttacacaacgaatgtgtgctgttggtcctgatgtctttttgcacaagtgttat

SEQ ID NO: 9167 - DNA, 80 bp, synthetic construct
  misc_feature 1..80: note = Synthetic: >HKU5R-cand-15030-15109
  source 1..80: mol_type = other DNA
attacagctattatgcttacaacctgccaacgatgtgtgacataaagcagatgttgttttgtatggaagttgttgatcgt

SEQ ID NO: 9168 - DNA, 80 bp, synthetic construct
  misc_feature 1..80: note = Synthetic: >HKU8R-cand-18180-18259
  source 1..80: mol_type = other DNA
cgtatgtcatagatattcagcagtggggttatacaggttccttgagttccaatcaccatgagcattgtaatgttcatcgt

SEQ ID NO: 9169 - DNA, 80 bp, synthetic construct
  misc_feature 1..80: note = Synthetic: >HKU5R-cand-7680-7759
  source 1..80: mol_type = other DNA
ctctgttacaaaaggaatcgcctaacacgtgtggaagcatcaacagttgtatgtggttctaaacgcacgttctacatcgt

SEQ ID NO: 9170 - DNA, 80 bp, synthetic construct
  misc_feature 1..80: note = Synthetic: >Sparrow-cand-8980-9059
  source 1..80: mol_type = other DNA
caagcacccatttcactgcagtcaggagtagttaagaaaacatgtatgtggttcttccacttcttgtttatggcattcat

SEQ ID NO: 9171 - DNA, 80 bp, synthetic construct
  misc_feature 1..80: note = Synthetic: >HKU4R-cand-15800-15879
  source 1..80: mol_type = other DNA
ataaacacttttctatgatgattctatctgacgatggtgttgtgtgttataatagcgactatgccgctaaaggttatgtc

SEQ ID NO: 9172 - DNA, 80 bp, synthetic construct
  misc_feature 1..80: note = Synthetic: >Lucheng19-cand-14880-14959
  source 1..80: mol_type = other DNA
ttttctatgatgattctatctgacgatggtgttgtgtgttacaacaaggagtatgcagatttaggttatgtcgcagacat

SEQ ID NO: 9173 - DNA, 80 bp, synthetic construct
  misc_feature 1..80: note = Synthetic: >AlphaMink-cand-16320-16399
  source 1..80: mol_type = other DNA
cattaggtccagatgtgtttttacacaagtgttttaggtgtccagctgaaattgttaatacagtctctgctttggtttat

SEQ ID NO: 9174 - DNA, 80 bp, synthetic construct
  misc_feature 1..80: note = Synthetic: >Alpha2-cand-16310-16389
  source 1..80: mol_type = other DNA
attaggtccagatgtgtttttacacaagtgttttaggtgtccagctgaaattgttaatacagtctctgctttggtttatg

SEQ ID NO: 9175 - DNA, 80 bp, synthetic construct
  misc_feature 1..80: note = Synthetic: >HKU31-cand-18680-18759
  source 1..80: mol_type = other DNA
ataaaggtgcggcttggcctgttgtacgacgacgtatagttcagatggtgtcagacactttagataaattgtctgaccat

SEQ ID NO: 9176 - DNA, 80 bp, synthetic construct
  misc_feature 1..80: note = Synthetic: >HghCoV1-cand-18610-18689
  source 1..80: mol_type = other DNA
cataaaggtgcggcttggcctgttgtacgacgacgtatagttcagatggtttcagacactttagataaattgtctgacca

SEQ ID NO: 9177 - DNA, 80 bp, synthetic construct
  misc_feature 1..80: note = Synthetic: >HKU24-cand-5470-5549
  source 1..80: mol_type = other DNA
cgacctctgcgttttgttgcacttgtgcttgcaaaaggtgcctttgtttatggacaaccagctgatgcgcgtgactttat

SEQ ID NO: 9178 - DNA, 80 bp, synthetic construct
  misc_feature 1..80: note = Synthetic: >BetaSp-cand-5800-5879
  source 1..80: mol_type = other DNA
gacctctgcgctttgttgcacttgtgcttgcaaaaggtgcctttgtttatggacaaccagctgatgcgcgtgactttatg

SEQ ID NO: 9179 - DNA, 80 bp, synthetic construct
  misc_feature 1..80: note = Synthetic: >HghCoV1-cand-16370-16449
  source 1..80: mol_type = other DNA
gtgtcgtgtgccattcacaaacatctttgaggtgtggtacatgcatacgtagaccgtttttatgctgcaaatgttgttat

SEQ ID NO: 9180 - DNA, 80 bp, synthetic construct
  misc_feature 1..80: note = Synthetic: >HKU31-cand-16440-16519
  source 1..80: mol_type = other DNA
tgtcgtgtgccattcacaaacttctttgaggtgtggtacatgcatacgtagaccgtttttatgctgcaaatgttgttatg

SEQ ID NO: 9181 - DNA, 80 bp, synthetic construct
  misc_feature 1..80: note = Synthetic: >Alpha2-cand-28570-28649
  source 1..80: mol_type = other DNA
ataacaagatcttcaggcgtgtactgcgagatctactcttacacagaatggtaagcacgtatctatgtagggtgtaagta

SEQ ID NO: 9182 - DNA, 80 bp, synthetic construct
  misc_feature 1..80: note = Synthetic: >AlphaMink-cand-28580-28659
  source 1..80: mol_type = other DNA
taacaagatcttcaggcgagtactgcgagatctactcttacacagaatggtaagcacgtatctatgtagggtgtaagtaa

SEQ ID NO: 9183 - DNA, 80 bp, synthetic construct
  misc_feature 1..80: note = Synthetic: >MbCoV1-cand-15300-15379
  source 1..80: mol_type = other DNA
ataacaaggagtatgcatctcttggctatgttgcagatattggtgcattcaaagctacactttattatcaaaacaatgta

SEQ ID NO: 9184 - DNA, 80 bp, synthetic construct
  misc_feature 1..80: note = Synthetic: >MsbCoV1-cand-25800-25879
  source 1..80: mol_type = other DNA
tgtgaaagttgttgacatgttgagttcaactacacgaagatgttaactttggtagatgatcatggattagttattaatgc

SEQ ID NO: 9185 - DNA, 80 bp, synthetic construct
  misc_feature 1..80: note = Synthetic: >SEAC-cand-23720-23799
  source 1..80: mol_type = other DNA
ttgctagctggtctaatgctttggtgctgtcttgctactggatgttgtggcatgtgtggttgtttagctgctacatgtgc

SEQ ID NO: 9186 - DNA, 80 bp, synthetic construct
  misc_feature 1..80: note = Synthetic: >Quail-cand-16740-16819
  source 1..80: mol_type = other DNA
catgacggtatgtttagcaatccatgaactgttcagtactgtcgactggacccttgaatttccagtaactgctgagcaat

SEQ ID NO: 9187 - DNA, 80 bp, synthetic construct
  misc_feature 1..80: note = Synthetic: >Sparrow-cand-16820-16899
  source 1..80: mol_type = other DNA
tgctatcatgacggtatgtttagcaatccatgaactgttcagtactgttgactggactcttgagtttccagtaactgctg

SEQ ID NO: 9188 - DNA, 80 bp, synthetic construct
  misc_feature 1..80: note = Synthetic: >Sk512R-cand-5090-5169
  source 1..80: mol_type = other DNA
attgcttgttgttgttgaagacagctctgtctttaacaaaatatctcatgctagtgttgcaggttatgtggcaaagccgg

SEQ ID NO: 9189 - DNA, 80 bp, synthetic construct
  misc_feature 1..80: note = Synthetic: >Sb512-cand-5100-5179
  source 1..80: mol_type = other DNA
gcttgttgttgttgaagacagttctgtctttaacaaaatatctcatgctagtgttgcaggttatgtggcaaagccggcac

SEQ ID NO: 9190 - DNA, 80 bp, synthetic construct
  misc_feature 1..80: note = Synthetic: >WIV16-cand-23440-23519
  source 1..80: mol_type = other DNA
attggagctggcatttgtgctagttaccatacagtttcttcattacgtagtactagccaaaaatctattgtggcttatac

SEQ ID NO: 9191 - DNA, 80 bp, synthetic construct
  misc_feature 1..80: note = Synthetic: >FelineAlpha1-cand-17680-17759
  source 1..80: mol_type = other DNA
ttggtccattgtgtacccttttattgaaaatgaagaaaagatcaataaagctggtcgcattgtacaatcacatgtcatga

SEQ ID NO: 9192 - DNA, 80 bp, synthetic construct
  misc_feature 1..80: note = Synthetic: >Alpha2-cand-10130-10209
  source 1..80: mol_type = other DNA
gtgttcattgttacaggtttatcacacaaaagcaatctatccctgtttgcttaatgacattgtgttttgtatgttacaat

SEQ ID NO: 9193 - DNA, 80 bp, synthetic construct
  misc_feature 1..80: note = Synthetic: >AlphaMink-cand-10140-10219
  source 1..80: mol_type = other DNA
tgtgttcattgttacaggtttatcacacaaaagcaatctattccagtttgtttaataactttatgcttcgtatgttataa

SEQ ID NO: 9194 - DNA, 80 bp, synthetic construct
  misc_feature 1..80: note = Synthetic: >BtRl_BetaCoV-cand-26570-26649
  source 1..80: mol_type = other DNA
attgtaggcttgatgtggcttagctacttcgttgcttccttcaggctgtttgctcgtacccgctcaaggtggtcgttcaa

SEQ ID NO: 9195 - DNA, 80 bp, synthetic construct
  misc_feature 1..80: note = Synthetic: >SARSCoV-cand-26700-26779
  source 1..80: mol_type = other DNA
ttgtaggcttgatgtggcttagctacttcgttgcttccttcaggctgtttgctcgtacccgctcaatgtggtcattcaac

SEQ ID NO: 9196 - DNA, 80 bp, synthetic construct
  misc_feature 1..80: note = Synthetic: >229ER-cand-15760-15839
  source 1..80: mol_type = other DNA
attgtaggtcctaaggaacttttgctctcatgggaaagtggaaaagccaaaccaccgttaaatcgtaattctgtttttac

SEQ ID NO: 9197 - DNA, 80 bp, synthetic construct
  misc_feature 1..80: note = Synthetic: >BetaSp-cand-27020-27099
  source 1..80: mol_type = other DNA
tggttttgtggacgcttataacaactgcactcaagggtctgaaatcagagatctagtttgtgtgcagagttttaatggta

SEQ ID NO: 9198 - DNA, 80 bp, synthetic construct
  misc_feature 1..80: note = Synthetic: >SEAC-cand-1730-1809
  source 1..80: mol_type = other DNA
tcggtgtcaagtgcaaagctgttggtgactacattatttttaataatagtgtcgtcaaaactgttaaagccaaaataaag

SEQ ID NO: 9199 - DNA, 80 bp, synthetic construct
  misc_feature 1..80: note = Synthetic: >HKU2R-cand-1560-1639
  source 1..80: mol_type = other DNA
tgtgttcggtgtcaagtgcaaagctgttggtgactacattatttttaataatagtgttgttaaaactgttaaagccaaaa

SEQ ID NO: 9200 - DNA, 80 bp, synthetic construct
  misc_feature 1..80: note = Synthetic: >AlphaMink-cand-28180-28259
  source 1..80: mol_type = other DNA
ctttcaggctaaagaccatgtggattacaggtttgacatccaatcaccgttctacatgtttgttgacaattttaccataa

SEQ ID NO: 9201 - DNA, 80 bp, synthetic construct
  misc_feature 1..80: note = Synthetic: >Alpha2-cand-28170-28249
  source 1..80: mol_type = other DNA
tctatcaggctgagaaccatgtggattacaggtttgacatccagtcaccgttctacatgtttgttgacaattttaccata

SEQ ID NO: 9202 - DNA, 80 bp, synthetic construct
  misc_feature 1..80: note = Synthetic: >HKU10R-cand-12390-12469
  source 1..80: mol_type = other DNA
ttatggtggtgcatctgtttgtttgtattgtagagcacacgttgaacaccctagtatggatggttattgtaaactgaaag

SEQ ID NO: 9203 - DNA, 80 bp, synthetic construct
  misc_feature 1..80: note = Synthetic: >MbCoV1-cand-3930-4009
  source 1..80: mol_type = other DNA
ctttcatgcttgttggatgatgatgacactatggctctttttaaggctggtagtgtgtcaccattagttcgcaagtgcta

SEQ ID NO: 9204 - DNA, 80 bp, synthetic construct
  misc_feature 1..80: note = Synthetic: >MsbCoV1-cand-3920-3999
  source 1..80: mol_type = other DNA
tcgggcttgttggatgatgatgacactatggccctttttaaggctggtagtgtgtcaccattagttcgcaagtgctatga

SEQ ID NO: 9205 - DNA, 80 bp, synthetic construct
  misc_feature 1..80: note = Synthetic: >HghCoV1-cand-17010-17089
  source 1..80: mol_type = other DNA
gctttctataggtgacatttttgtacttacatctcactcagtggctacgttgacagcccctactgtagtaaatcaagaga

SEQ ID NO: 9206 - DNA, 80 bp, synthetic construct
  misc_feature 1..80: note = Synthetic: >HKU5-cand-25780-25859
  source 1..80: mol_type = other DNA
gtgactcgtatgatgagtatgaggtcgagaagatccatgttcattgagcattttaacgaacttatgatgcgtgtgcaaag

SEQ ID NO: 9207 - DNA, 80 bp, synthetic construct
  misc_feature 1..80: note = Synthetic: >HKU5R-cand-25770-25849
  source 1..80: mol_type = other DNA
tgtgactcgtatgatgagtatgaggtcgagaagatccatgttcattgagcattttaacgaacttatgatgcgtgtgcaaa

SEQ ID NO: 9208 - DNA, 80 bp, synthetic construct
  misc_feature 1..80: note = Synthetic: >SARSRC-cand-26520-26599
  source 1..80: mol_type = other DNA
ctttgtgcttgctgctgtttacagaattaattgggtgactggcggtattgcgattgcaatggcttgcatcgtaggcttga

SEQ ID NO: 9209 - DNA, 80 bp, synthetic construct
  misc_feature 1..80: note = Synthetic: >WIV16-cand-26590-26669
  source 1..80: mol_type = other DNA
tgctgctgtttacagaattaattgggtgactggcgggattgcgattgcaatggcttgtattgtaggcttgatgtggctta

SEQ ID NO: 9210 - DNA, 80 bp, synthetic construct
  misc_feature 1..80: note = Synthetic: >SARSCoV-cand-26860-26939
  source 1..80: mol_type = other DNA
tggtgctgtgatcattcgtggtcacttgcgaatggccggacactccctagggcgctgtgacattaaggacctgccaaaag

SEQ ID NO: 9211 - DNA, 80 bp, synthetic construct
  misc_feature 1..80: note = Synthetic: >MN517817-cand-22470-22549
  source 1..80: mol_type = other DNA
ttcaatatgtttgtggtaattctattgaatgcagaaaattgtttcagcaatatggccctgtctgtgacaacatattgtct

SEQ ID NO: 9212 - DNA, 80 bp, synthetic construct
  misc_feature 1..80: note = Synthetic: >MN509589-cand-6090-6169
  source 1..80: mol_type = other DNA
tagttttaattggaattggctttatttggtctttctaatattatttgttaaaccagtagcaggtttcgttattatttgct

SEQ ID NO: 9213 - DNA, 80 bp, synthetic construct
  misc_feature 1..80: note = Synthetic: >MT114541-cand-23360-23439
  source 1..80: mol_type = other DNA
aggcatttggtaaggttaatgatgctatacatcatacttcacaaggtcttgctactgttgctaaagcattggcaaaagtg

SEQ ID NO: 9214 - DNA, 80 bp, synthetic construct
  misc_feature 1..80: note = Synthetic: >MN509589-cand-7050-7129
  source 1..80: mol_type = other DNA
ctgtcataatcatgaagttgaatatacaggtgatggttttactaatgttataccgtcatatggtatagacactgataaat

SEQ ID NO: 9215 - DNA, 80 bp, synthetic construct
  misc_feature 1..80: note = Synthetic: >MN128086-cand-7050-7129
  source 1..80: mol_type = other DNA
ctgtcataatcatgaagtggaatacactggtgacggttttactaatataataccgtcatatggtatagacactgataaat

SEQ ID NO: 9216 - DNA, 80 bp, synthetic construct
  misc_feature 1..80: note = Synthetic: >MT114544-cand-20140-20219
  source 1..80: mol_type = other DNA
caaattactaaactttggtaatcacttggttaacgtgccatgattgttctaacattgttcattcttttggtcttatacac

SEQ ID NO: 9217 - DNA, 80 bp, synthetic construct
  misc_feature 1..80: note = Synthetic: >MN517817-cand-23670-23749
  source 1..80: mol_type = other DNA
ttagtgttaacaaaaccgtcattactacatttgtggataacgatgattttgattttgatgatgaattgtcaaaatggtgg

SEQ ID NO: 9218 - DNA, 80 bp, synthetic construct
  misc_feature 1..80: note = Synthetic: >MN517816-cand-26170-26249
  source 1..80: mol_type = other DNA
gccagcagcatggatactggagacgccaagccaggtataagccaagcaaaggtggaagaaaaccagtcccggatgcatgg

SEQ ID NO: 9219 - DNA, 80 bp, synthetic construct
  misc_feature 1..80: note = Synthetic: >MT114542-cand-20060-20139
  source 1..80: mol_type = other DNA
gtaaatttaaaagaaaaagagttgaatgaaatggttgtcggattactaaggaagggtaagctgctcattagaaataatgg

SEQ ID NO: 9220 - DNA, 80 bp, synthetic construct
  misc_feature 1..80: note = Synthetic: >MN531555-cand-21610-21689
  source 1..80: mol_type = other DNA
ttggtttatcttactaagagtgatggctctcgtatacaaacagccacagaaccaccggttataactcaacacaattataa

SEQ ID NO: 9221 - DNA, 80 bp, synthetic construct
  misc_feature 1..80: note = Synthetic: >AY692454-cand-18170-18249
  source 1..80: mol_type = other DNA
acgttaacaaacatgcattccacacacctaaatttgaccgcattagcttccgcaatttgaaagctatgccattctttttt

SEQ ID NO: 9222 - DNA, 80 bp, synthetic construct
  misc_feature 1..80: note = Synthetic: >MT114544-cand-2650-2729
  source 1..80: mol_type = other DNA
aaaacaatggtaatatcattgttattgctggttacacattttacaaggatgaggatgaacatttctatccttatggttca

SEQ ID NO: 9223 - DNA, 80 bp, synthetic construct
  misc_feature 1..80: note = Synthetic: >MT040336-cand-21700-21779
  source 1..80: mol_type = other DNA
ttacctttcttttctaatgttacttggtttaacaccataacttatcaaggaggctctaagaagtttgacaatcctgtttt

SEQ ID NO: 9224 - DNA, 80 bp, synthetic construct
  misc_feature 1..80: note = Synthetic: >NC_048214-cand-19960-20039
  source 1..80: mol_type = other DNA
tgccattaaagttacagagacaagttggcatgatagtttatatgatattgcacaggattgtgcatggtggacaatgtttt

SEQ ID NO: 9225 - DNA, 80 bp, synthetic construct
  misc_feature 1..80: note = Synthetic: >AY692454-cand-20010-20089
  source 1..80: mol_type = other DNA
tgctgtaaaagtgacagagacaagttggcacgaagttttatatgacattgcacaggattgtgcatggtggacaatgtttt

SEQ ID NO: 9226 - DNA, 80 bp, synthetic construct
  misc_feature 1..80: note = Synthetic: >LC088095-cand-24640-24719
  source 1..80: mol_type = other DNA
ttcagagcgtgagatttcacgcttttattctcttccgcttgtgactgatgctatggtgcataatgatacttattggtttt

SEQ ID NO: 9227 - DNA, 80 bp, synthetic construct
  misc_feature 1..80: note = Synthetic: >MN711790-cand-12340-12419
  source 1..80: mol_type = other DNA
cgggtacggggtagcagtgaggctcggctgataccccttgctagtggatgtgatcctgatgttgtaaagcgagcctttga

SEQ ID NO: 9228 - DNA, 80 bp, synthetic construct
  misc_feature 1..80: note = Synthetic: >MG693168-cand-1620-1699
  source 1..80: mol_type = other DNA
tgtgcctttgggccagcgaccagttccatctgatccttaccaccctgctatacagggtgtgtcttaccatgtgcgtagag

SEQ ID NO: 9229 - DNA, 80 bp, synthetic construct
  misc_feature 1..80: note = Synthetic: >MT114539-cand-8990-9069
  source 1..80: mol_type = other DNA
cgtgtctgctaaatacaagggtgtgaatcttgtactcaaagtcaaccaggtcaatcctaacacaccagaacataaattta

SEQ ID NO: 9230 - DNA, 80 bp, synthetic construct
  misc_feature 1..80: note = Synthetic: >MN794188-cand-20190-20269
  source 1..80: mol_type = other DNA
cgttgcaaagtttgaattaaaactaaaagcaacgccagttgttaatttgaaaactgaacaaaagacagacttagtcttta

SEQ ID NO: 9231 - DNA, 80 bp, synthetic construct
  misc_feature 1..80: note = Synthetic: >AY692454-cand-20250-20329
  source 1..80: mol_type = other DNA
cgttgctaagtttgatttgagattgaaagcaacgccagttgttaatttgaaaactgaacaaaagacagacttagtcttta

SEQ ID NO: 9232 - DNA, 80 bp, synthetic construct
  misc_feature 1..80: note = Synthetic: >AJ311317-cand-3360-3439
  source 1..80: mol_type = other DNA
ctacagatcttgaagttgcaaaagaaacagcagaagaggttgatgagtttattctcatttttgctgttcctaaagaagaa

SEQ ID NO: 9233 - DNA, 80 bp, synthetic construct
  misc_feature 1..80: note = Synthetic: >MK957245-cand-12580-12659
  source 1..80: mol_type = other DNA
tgttacgaagacttaaagtcagacgtaacagctgcgcatgatttctttgtgttcaataagaacatttataatattagtag

SEQ ID NO: 9234 - DNA, 80 bp, synthetic construct
  misc_feature 1..80: note = Synthetic: >MT114541-cand-26400-26479
  source 1..80: mol_type = other DNA
gcattaggaagaagctacgtgcttcctcttgaaggtgtgccaactggcgtcactttaacattgctttcagggaatttgta

SEQ ID NO: 9235 - DNA, 80 bp, synthetic construct
  misc_feature 1..80: note = Synthetic: >AY692454-cand-6160-6239
  source 1..80: mol_type = other DNA
tggtgtttgttttttagattggtttgtacaaacagtttttagtcactttaattttatgggagcaggattttatttctggc

SEQ ID NO: 9236 - DNA, 80 bp, synthetic construct
  misc_feature 1..80: note = Synthetic: >LC088095-cand-20750-20829
  source 1..80: mol_type = other DNA
ggtttttagtactagtttaagttatagatttagtagtgttaagtttgtgcaaaaatgtttttatgtctctgtaccgcggc

SEQ ID NO: 9237 - DNA, 80 bp, synthetic construct
  misc_feature 1..80: note = Synthetic: >NC_010800-cand-25830-25909
  source 1..80: mol_type = other DNA
tggcatatacgcccacccaatcgctggtatgaataatagtaaagataatccttttcgcggagcaatagcaagaaaagcgc

SEQ ID NO: 9238 - DNA, 80 bp, synthetic construct
  misc_feature 1..80: note = Synthetic: >MK957245-cand-25700-25779
  source 1..80: mol_type = other DNA
tggtgtatacaccaacccaatcgttggtatgaataatagtaaagaaaatccttttcgcggagcaatagcaagaaaagcgc

SEQ ID NO: 9239 - DNA, 80 bp, synthetic construct
  misc_feature 1..80: note = Synthetic: >AY692454-cand-15290-15369
  source 1..80: mol_type = other DNA
gcggtgaggcagatgttactaaattgtacctcgggggtatgtcgtacttctgtggtaatcataaaccgaaattgtcaata

SEQ ID NO: 9240 - DNA, 80 bp, synthetic construct
  misc_feature 1..80: note = Synthetic: >MN509588-cand-10720-10799
  source 1..80: mol_type = other DNA
gctacagttcaatctaagttgagtgatgtaaaatgtacaactgttgttttaatgcagcttttgactaagcttaatgttga

SEQ ID NO: 9241 - DNA, 80 bp, synthetic construct
  misc_feature 1..80: note = Synthetic: >MT114541-cand-28480-28559
  source 1..80: mol_type = other DNA
ttcttttgtggataaattctacatttcattaggtgatagagaagtaaaaatttatcttagagtggttggtgcaacaccaa

SEQ ID NO: 9242 - DNA, 80 bp, synthetic construct
  misc_feature 1..80: note = Synthetic: >MT114542-cand-18630-18709
  source 1..80: mol_type = other DNA
ttgaacgctttactactacaaaagatgcagtgcttatttctaataacgctgtgaagggacttagtgccattaaattacaa

SEQ ID NO: 9243 - DNA, 80 bp, synthetic construct
  misc_feature 1..80: note = Synthetic: >SBB-130-cand-19440-19519
  source 1..80: mol_type = other DNA
taaagtacatgaggttatggttgattgtaagatttatagatggatgttgtggtgtaaagaccacaaagtacaaacatttt

SEQ ID NO: 9244 - DNA, 80 bp, synthetic construct
  misc_feature 1..80: note = Synthetic: >SBB-010-cand-19440-19519
  source 1..80: mol_type = other DNA
ttctaaagtacatgaggttatggttgattgtaagatttatagatggatgttgtggtgtaaagaccacaaagtacaaacat

SEQ ID NO: 9245 - DNA, 80 bp, synthetic construct
  misc_feature 1..80: note = Synthetic: >SBB-120-cand-19450-19529
  source 1..80: mol_type = other DNA
catgaggttatggttgattgtaaaatttatagatggatgttgtggtgtaaagaccacaaagtacaaacattttaccctca

SEQ ID NO: 9246 - DNA, 80 bp, synthetic construct
  misc_feature 1..80: note = Synthetic: >SBB-024-cand-19430-19509
  source 1..80: mol_type = other DNA
taagtgttgtttctaaagtacatgaggttatggttgattgtaagatttacagatggatgttgtggtgtaaagaccacaaa

SEQ ID NO: 9247 - DNA, 80 bp, synthetic construct
  misc_feature 1..80: note = Synthetic: >SBB-010-cand-19280-19359
  source 1..80: mol_type = other DNA
ttcttaagatagaagaattttcatctagtgatgattctacacttaagtgttgcactgtaacttatgctaatgatcctagc

SEQ ID NO: 9248 - DNA, 80 bp, synthetic construct
  misc_feature 1..80: note = Synthetic: >SBB-041-cand-4040-4119
  source 1..80: mol_type = other DNA
gctaatattaccttctaccaaggcgatttgacagaggttatggctgttaagcatgactttgttgtcaatgccgctaatga

SEQ ID NO: 9249 - DNA, 80 bp, synthetic construct
  misc_feature 1..80: note = Synthetic: >SBB-120-cand-4030-4109
  source 1..80: mol_type = other DNA
tgcacaacatgctaatattaccttctaccaaggcgatttgactgaagttatggctgttaagcatgacttcgttgtcaatg

SEQ ID NO: 9250 - DNA, 80 bp, synthetic construct
  misc_feature 1..80: note = Synthetic: >SBB-130-cand-19120-19199
  source 1..80: mol_type = other DNA
gagcgcgatttcctagacatggacatgggtttgttcattagcaagtatggacttgaggattttgcatttgaacacgttgt

SEQ ID NO: 9251 - DNA, 80 bp, synthetic construct
  misc_feature 1..80: note = Synthetic: >SBB-010-cand-19120-19199
  source 1..80: mol_type = other DNA
atggagcgcgatttcctagacatggacatgggtttgttcattagcaagtatggacttgaggattttgcatttgaacacgt

SEQ ID NO: 9252 - DNA, 80 bp, synthetic construct
  misc_feature 1..80: note = Synthetic: >SBB-041-cand-19110-19189
  source 1..80: mol_type = other DNA
acgcagtgacatggagcgcgatttcctagacatggacatgggtttattcattagcaagtatggacttgaggattttgcat

SEQ ID NO: 9253 - DNA, 80 bp, synthetic construct
  misc_feature 1..80: note = Synthetic: >SBB-024-cand-5160-5239
  source 1..80: mol_type = other DNA
acattattagtgctgcaccagatgttgattggaatgcttattatggatttcaacgtgcagacttgtggcatacacttagt

SEQ ID NO: 9254 - DNA, 80 bp, synthetic construct
  misc_feature 1..80: note = Synthetic: >SBB-130-cand-5150-5229
  source 1..80: mol_type = other DNA
ctaactgacattattagtgctgcaccagatgttgattggaatgcttattatggatttcaacgtgcagacttgtggcatac

SEQ ID NO: 9255 - DNA, 80 bp, synthetic construct
  misc_feature 1..80: note = Synthetic: >SBB-120-cand-5160-5239
  source 1..80: mol_type = other DNA
acattattagtgctgcaccagatgttgattggaattcctattacgggtttcaacgtgcagacttatggcatacacttagt

SEQ ID NO: 9256 - DNA, 80 bp, synthetic construct
  misc_feature 1..80: note = Synthetic: >SBB-024-cand-4760-4839
  source 1..80: mol_type = other DNA
ccatctggtaatcttataactttcaagtgtgaggacactgtagatgttagttttgccatcttgcccgaagttgatgacgt

SEQ ID NO: 9257 - DNA, 80 bp, synthetic construct
  misc_feature 1..80: note = Synthetic: >SBB-797-cand-7520-7599
  source 1..80: mol_type = other DNA
atactactgctttgcaacaaattgcctctggcatgactgtagaggcagttttgaaagtgtttgtgggatccacacgtgca

SEQ ID NO: 9258 - DNA, 80 bp, synthetic construct
  misc_feature 1..80: note = Synthetic: >SBB-726-cand-7530-7609
  source 1..80: mol_type = other DNA
tttgcaacaaattgcctctggcatgactgtagaggcagttttgaaagtgtttgtgggatccacacgtgcagaggctaaag

SEQ ID NO: 9259 - DNA, 80 bp, synthetic construct
  misc_feature 1..80: note = Synthetic: >SBB-130-cand-5710-5789
  source 1..80: mol_type = other DNA
tcatccagctaatttgctgataccaggtgactcttatactgtttacactggtgatgtcaacagtggacattacactgttt

SEQ ID NO: 9260 - DNA, 80 bp, synthetic construct
  misc_feature 1..80: note = Synthetic: >SBB-024-cand-5720-5799
  source 1..80: mol_type = other DNA
gctaatttgctgataccaggtgactcttatactgtttacactggtgatgtcaacagtggacattacactgtttttagcaa

SEQ ID NO: 9261 - DNA, 80 bp, synthetic construct
  misc_feature 1..80: note = Synthetic: >SBB-041-cand-5710-5789
  source 1..80: mol_type = other DNA
agctcatccagctaatttgctgataccaggtgactcttatactgtttacactggtgatgtcaacagcggacattacactg

SEQ ID NO: 9262 - DNA, 80 bp, synthetic construct
  misc_feature 1..80: note = Synthetic: >SBB-010-cand-1710-1789
  source 1..80: mol_type = other DNA
aaacagttcagattgcaggtgtcacgtttaagagtgttggtgattttgtaatgcttgataatgcacttgtcaaactagtc

SEQ ID NO: 9263 - DNA, 80 bp, synthetic construct
  misc_feature 1..80: note = Synthetic: >SBB-122-cand-1720-1799
  source 1..80: mol_type = other DNA
gattgcaggtgtcaagtttaagagtgttggtgactttgtaatgctagataatgcacttgttaaacttgtcacagttaaag

SEQ ID NO: 9264 - DNA, 80 bp, synthetic construct
  misc_feature 1..80: note = Synthetic: >SBB-747-cand-9990-10069
  source 1..80: mol_type = other DNA
gggtgtcttctatggcccctttgaagacaagcaggttccacagttagcggctcctgattgtactattactgtgaatgttt

SEQ ID NO: 9265 - DNA, 80 bp, synthetic construct
  misc_feature 1..80: note = Synthetic: >SBB-797-cand-10000-10079
  source 1..80: mol_type = other DNA
tatggcccttttgaagacaaacaggttccacagttagcggctcctgattgtactattactgtgaatgttttggcatggtt

SEQ ID NO: 9266 - DNA, 80 bp, synthetic construct
  misc_feature 1..80: note = Synthetic: >SBB-747-cand-6790-6869
  source 1..80: mol_type = other DNA
gttataaggttagttccattcactagtatgttgcgcatgtatatagttattgcctttttgtggttgtgctataaaggttt

SEQ ID NO: 9267 - DNA, 80 bp, synthetic construct
  misc_feature 1..80: note = Synthetic: >SBB-788-cand-3840-3919
  source 1..80: mol_type = other DNA
taaggaaaagggtttgttaatacctgttgttattgattatccagcatttactaaagttttaaagcgcttttctccgaagg

SEQ ID NO: 9268 - DNA, 80 bp, synthetic construct
  misc_feature 1..80: note = Synthetic: >SBB-747-cand-6070-6149
  source 1..80: mol_type = other DNA
ttggtttatgcgtatgcagcagccaaatttactactcgtaaggctgtatcagtttcatgtgatttgattactacagcttt

SEQ ID NO: 9269 - DNA, 80 bp, synthetic construct
  misc_feature 1..80: note = Synthetic: >SBB-788-cand-6080-6159
  source 1..80: mol_type = other DNA
catatgcagcagccaaatttaccactcgtaaggctgtatcagtttcatgtgatttgattactacagctttgcgtaaaact

SEQ ID NO: 9270 - DNA, 80 bp, synthetic construct
  misc_feature 1..80: note = Synthetic: >SBB-726-cand-6090-6169
  source 1..80: mol_type = other DNA
agccaaatttactactcgtaaggctgtatcagtttcatgtgatttgattactacagctttgcgtaaaactacggattttg

SEQ ID NO: 9271 - DNA, 80 bp, synthetic construct
  misc_feature 1..80: note = Synthetic: >SBB-010-cand-3950-4029
  source 1..80: mol_type = other DNA
ggtcctattacatggaatactgtcaacactgtttgttttaaggatgttaacttctctagggttgtggaacctaaagcttt

SEQ ID NO: 9272 - DNA, 80 bp, synthetic construct
  misc_feature 1..80: note = Synthetic: >SBB-130-cand-3950-4029
  source 1..80: mol_type = other DNA
cctattacatggaatactgtcaacactgtttgtcttaaggatgttaacttctctagggttgtggaacctaaagcttttgc

SEQ ID NO: 9273 - DNA, 80 bp, synthetic construct
  misc_feature 1..80: note = Synthetic: >SBB-041-cand-3960-4039
  source 1..80: mol_type = other DNA
catggaatactgtcaacactgtttgtcttaaggatgttaacttctctagggttgtggaacctaaagcttttgcacaacat

SEQ ID NO: 9274 - DNA, 80 bp, synthetic construct
  misc_feature 1..80: note = Synthetic: >SBB-747-cand-7430-7509
  source 1..80: mol_type = other DNA
atgccactatagcaaagaccatgtttgaggcgtatgcgcaaaattatttgcttaaatacagcataaatatggagaaggta

SEQ ID NO: 9275 - DNA, 80 bp, synthetic construct
  misc_feature 1..80: note = Synthetic: >SBB-797-cand-7440-7519
  source 1..80: mol_type = other DNA
agcaaagaccatgtttgaggcgtatgcgcaaaattatttgcttaaatacagcataaatatggagaaggtaaaacacctct

SEQ ID NO: 9276 - DNA, 80 bp, synthetic construct
  misc_feature 1..80: note = Synthetic: >SBB-726-cand-7450-7529
  source 1..80: mol_type = other DNA
atgtttgaggcgtatgcgcaaaattatttgcttaaatacagcataaatatggagaaggtaaaacacctctatactactgc

SEQ ID NO: 9277 - DNA, 80 bp, synthetic construct
  misc_feature 1..80: note = Synthetic: >SBB-122-cand-170-249
  source 1..80: mol_type = other DNA
cctgattaggtgttccgtcaccaatcatacaccacaagcaccctctgctagttccgtctagtagagtgcgtggatatcaa

SEQ ID NO: 9278 - DNA, 80 bp, synthetic construct
  misc_feature 1..80: note = Synthetic: >SBB-788-cand-9200-9279
  source 1..80: mol_type = other DNA
aagacgctgctttgcaaacttttatgctggataaggaggtattcttacggcttaaacgtgagatttcctcggatgcttat

SEQ ID NO: 9279 - DNA, 80 bp, synthetic construct
  misc_feature 1..80: note = Synthetic: >SBB-747-cand-9190-9269
  source 1..80: mol_type = other DNA
cattcttttcaagacgctgctttgcaaacttttatgctggataaggaggtattcttacggcttaaacgtgagatttcctc

SEQ ID NO: 9280 - DNA, 80 bp, synthetic construct
  misc_feature 1..80: note = Synthetic: >SBB-747-cand-1990-2069
  source 1..80: mol_type = other DNA
aagatgtccttagcaaagggtgtatggttacactatgcggaggctatcttagctttgtttaaagcgcaatttaccttcgt

SEQ ID NO: 9281 - DNA, 80 bp, synthetic construct
  misc_feature 1..80: note = Synthetic: >SBB-788-cand-2000-2079
  source 1..80: mol_type = other DNA
tagcaaagggtgtatggttacactatgcggaagctattttagctttgtttaaagcgcaatttaccttcgtgagaggtaag

SEQ ID NO: 9282 - DNA, 80 bp, synthetic construct
  misc_feature 1..80: note = Synthetic: >SBB-130-cand-12390-12469
  source 1..80: mol_type = other DNA
aagcatttgacagcggttatttaaacgagcaaggggctctagtgctgctcaactagagccctgtaatggtacagacacgg

SEQ ID NO: 9283 - DNA, 80 bp, synthetic construct
  misc_feature 1..80: note = Synthetic: >SBB-024-cand-12390-12469
  source 1..80: mol_type = other DNA
tccaagcatttgacagcggttatttaaacgagcaaggggctctagtgctgctcaactagagccctgtaatggtacagaca

SEQ ID NO: 9284 - DNA, 80 bp, synthetic construct
  misc_feature 1..80: note = Synthetic: >SBB-120-cand-12400-12479
  source 1..80: mol_type = other DNA
tgacagcggttatttaaacgagcaaggggctctagtgctgctcaactagagccctgtaatggtacagacacggatcattg

SEQ ID NO: 9285 - DNA, 80 bp, synthetic construct
  misc_feature 1..80: note = Synthetic: >SBB-122-cand-12400-12479
  source 1..80: mol_type = other DNA
tgacagtggttatttaaacgagcaaggggctctagtgctgctcaactagagccctgtaatggtacagacacggaacattg

SEQ ID NO: 9286 - DNA, 80 bp, synthetic construct
  misc_feature 1..80: note = Synthetic: >SBB-788-cand-5680-5759
  source 1..80: mol_type = other DNA
aagccagttttgtttgtaacgcgccctaacacgtggaagaagttagtgccattgttatctacacttgttgttaacacgac

SEQ ID NO: 9287 - DNA, 80 bp, synthetic construct
  misc_feature 1..80: note = Synthetic: >SBB-747-cand-13670-13749
  source 1..80: mol_type = other DNA
cacgcagtttaagtactcattatttaataagtactttaagcattgggacatgcagtatcatgctaattgtgttgcgtgta

SEQ ID NO: 9288 - DNA, 80 bp, synthetic construct
  misc_feature 1..80: note = Synthetic: >SBB-788-cand-13680-13759
  source 1..80: mol_type = other DNA
aagtactcattatttaataagtactttaagcattgggacatgcagtatcatgctaattgtgttgcgtgtaccgatgatcg

SEQ ID NO: 9289 - DNA, 80 bp, synthetic construct
  misc_feature 1..80: note = Synthetic: >SBB-130-cand-27110-27189
  source 1..80: mol_type = other DNA
aagtagagtttataaatgttgctgcacttagaccaacgcacatgatacaagaccacctagagtcagagtaatcaaagatc

SEQ ID NO: 9290 - DNA, 80 bp, synthetic construct
  misc_feature 1..80: note = Synthetic: >SBB-053-cand-27100-27179
  source 1..80: mol_type = other DNA
gtagagtttataaatgttgctgcacttagaccaacgcacatgatacaagaccacctagagtcagagtaatcaaagatccg

SEQ ID NO: 9291 - DNA, 80 bp, synthetic construct
  misc_feature 1..80: note = Synthetic: >SBB-010-cand-27110-27189
  source 1..80: mol_type = other DNA
tagagtttataaatgttgctgcacttagaccaacgcacatgatacaagaccacctagagtcagagtaatcaaagatccgc

SEQ ID NO: 9292 - DNA, 80 bp, synthetic construct
  misc_feature 1..80: note = Synthetic: >SBB-747-cand-2390-2469
  source 1..80: mol_type = other DNA
aagtgtttggtgcatcagatgttaaattggtacagggcactttggtggcacttgccagcaaattgtttgtgcgtacagcg

SEQ ID NO: 9293 - DNA, 80 bp, synthetic construct
  misc_feature 1..80: note = Synthetic: >SBB-788-cand-2400-2479
  source 1..80: mol_type = other DNA
tgcatcagatgttaaactggtacagggcactttggtgtcacttgccagcaagttgtttgtgcgtacatcggatggtttgt

SEQ ID NO: 9294 - DNA, 80 bp, synthetic construct
  misc_feature 1..80: note = Synthetic: >SBB-747-cand-5430-5509
  source 1..80: mol_type = other DNA
gggtgactactactttactacggctcccattgaggttgtagccgcacctaaattagtaacaccgtacgatgggttttatt

SEQ ID NO: 9295 - DNA, 80 bp, synthetic construct
  misc_feature 1..80: note = Synthetic: >SBB-788-cand-5440-5519
  source 1..80: mol_type = other DNA
tactttactacggctcccattgaggttgtagccgcacctaagttagtaacaccgtacgatgggttttatttgtcgtcatg

SEQ ID NO: 9296 - DNA, 80 bp, synthetic construct
  misc_feature 1..80: note = Synthetic: >SBB-747-cand-4790-4869
  source 1..80: mol_type = other DNA
cctttagtacaccgtgggttagtagagcctatgatgcgcttaagggtggtaatccgctacctatggctgaagtgcttatt

SEQ ID NO: 9297 - DNA, 80 bp, synthetic construct
  misc_feature 1..80: note = Synthetic: >SBB-024-cand-22880-22959
  source 1..80: mol_type = other DNA
taatggcatcagtgaaaactttggtgccattagctctaacttcaaaattttgtcagaacgtcttgacagacttgaggctg

SEQ ID NO: 9298 - DNA, 80 bp, synthetic construct
  misc_feature 1..80: note = Synthetic: >PDF-2386-cand-12720-12799
  source 1..80: mol_type = other DNA
caggcactatctatacagagctggaaccaccttgtaggtttgttacagacacaccgaaagggcctaaagtaaaatactta

SEQ ID NO: 9299 - DNA, 80 bp, synthetic construct
  misc_feature 1..80: note = Synthetic: >SBB-726-cand-24960-25039
  source 1..80: mol_type = other DNA
caggcgggcatgctgttgtggctaatgtttgttcagaataagtacatcagtatctttgcgcaaggtactgttgttgtatg

SEQ ID NO: 9300 - DNA, 80 bp, synthetic construct
  misc_feature 1..80: note = Synthetic: >SBB-797-cand-24960-25039
  source 1..80: mol_type = other DNA
gcgggcatgctgttgtggctaatgtttgttcagaataagtacatcagtatctttgcgcaaggtactgttgttgtatgtgc

SEQ ID NO: 9301 - DNA, 80 bp, synthetic construct
  misc_feature 1..80: note = Synthetic: >PDF-2386-cand-17520-17599
  source 1..80: mol_type = other DNA
tgtgattacacatgatgtttcatctgcaatcaacagacctcaaataggtgttgttagagaattcctagcacgcaaccctg

SEQ ID NO: 9302 - DNA, 80 bp, synthetic construct
  misc_feature 1..80: note = Synthetic: >PRD-0038-cand-17510-17589
  source 1..80: mol_type = other DNA
tctataagggtgtgattacacatgatgtttcatctgcaatcaacagacctcaaataggtgttgttagagaattcctagca

SEQ ID NO: 9303 - DNA, 80 bp, synthetic construct
  misc_feature 1..80: note = Synthetic: >SBB-053-cand-26310-26389
  source 1..80: mol_type = other DNA
tttcggtgatgcagctctcgtcagaaatggcgtggatgctaagcattacccacagattgctgaacttgtcccgtcaactg

SEQ ID NO: 9304 - DNA, 80 bp, synthetic construct
  misc_feature 1..80: note = Synthetic: >SBB-010-cand-26320-26399
  source 1..80: mol_type = other DNA
ttcggtgatgcagctctcgtcagaaatggcgtggatgctaagcattacccacagattgctgaacttgtcccgtcaactgc

SEQ ID NO: 9305 - DNA, 80 bp, synthetic construct
  misc_feature 1..80: note = Synthetic: >SBB-726-cand-25850-25929
  source 1..80: mol_type = other DNA
ccgtctttgcggcggtctacccaatcaatacagttgcatttggctttgccattgcatttgcttgtatttcagggcttatg

SEQ ID NO: 9306 - DNA, 80 bp, synthetic construct
  misc_feature 1..80: note = Synthetic: >SBB-788-cand-25850-25929
  source 1..80: mol_type = other DNA
tttttgcggcggtctacccaatcaatacagttgcatttggctttgccattgcatttgcttgtatttcagggcttatgtgg

SEQ ID NO: 9307 - DNA, 80 bp, synthetic construct
  misc_feature 1..80: note = Synthetic: >SBB-797-cand-25840-25919
  source 1..80: mol_type = other DNA
gcagcagccgtttttgcggcggtctacccaatcaatacagttgcatttggctttgccattgcatttgcttgtatttcagg

SEQ ID NO: 9308 - DNA, 80 bp, synthetic construct
  misc_feature 1..80: note = Synthetic: >SBB-797-cand-20330-20409
  source 1..80: mol_type = other DNA
cgttgataatgacctggataggtgcgcgtctgatgcaaatgccacttttgttggcaattgtgagttgtttgctacgcctc

SEQ ID NO: 9309 - DNA, 80 bp, synthetic construct
  misc_feature 1..80: note = Synthetic: >SBB-747-cand-16310-16389
  source 1..80: mol_type = other DNA
ctattttgtgcttacatcacattcagttcagccacttagttcacctactttactcccccaagagcgttacactaagttag

SEQ ID NO: 9310 - DNA, 80 bp, synthetic construct
  misc_feature 1..80: note = Synthetic: >SBB-797-cand-16320-16399
  source 1..80: mol_type = other DNA
cttacatcacattcagttcagccactcagttcacctactttactcccccaagagcgttacactaagttagtaggattgta

SEQ ID NO: 9311 - DNA, 80 bp, synthetic construct
  misc_feature 1..80: note = Synthetic: >SBB-747-cand-14390-14469
  source 1..80: mol_type = other DNA
ttatgaatctctaagttatgctgaccaagatgagctttttgcgtacactaagcgtaatgttttacccactattacacaga

SEQ ID NO: 9312 - DNA, 80 bp, synthetic construct
  misc_feature 1..80: note = Synthetic: >SBB-797-cand-14400-14479
  source 1..80: mol_type = other DNA
ttaagttatgctgaccaagatgagctttttgcgtacactaagcgtaatgttttacccactattacacagatgaatttgaa

SEQ ID NO: 9313 - DNA, 80 bp, synthetic construct
  misc_feature 1..80: note = Synthetic: >SBB-747-cand-14230-14309
  source 1..80: mol_type = other DNA
ctatgtgtgatattaaacagcttttattttctttagaggttgttgataaatattttgaatgctatgatggtggatgctta

SEQ ID NO: 9314 - DNA, 80 bp, synthetic construct
  misc_feature 1..80: note = Synthetic: >SBB-797-cand-14240-14319
  source 1..80: mol_type = other DNA
tattaaacagcttttattttctttagaggttgttgataaatactttgaatgctatgatggtggatgcctacaggcaagtc

SEQ ID NO: 9315 - DNA, 80 bp, synthetic construct
  misc_feature 1..80: note = Synthetic: >SBB-010-cand-11070-11149
  source 1..80: mol_type = other DNA
ctatgttgcagagtgttgcttcaacttttgttaatttaccctctttcattgcttatgagaatgctcgtaaggcctatgaa

SEQ ID NO: 9316 - DNA, 80 bp, synthetic construct
  misc_feature 1..80: note = Synthetic: >SBB-130-cand-15200-15279
  source 1..80: mol_type = other DNA
ctcaaacagtcctacgctgtggtgactgtttaaggagacctatgctctgtactaagtgtgcctatgaccatgttgtatca

SEQ ID NO: 9317 - DNA, 80 bp, synthetic construct
  misc_feature 1..80: note = Synthetic: >SBB-120-cand-15200-15279
  source 1..80: mol_type = other DNA
gttcacaaacagtcctacgttgtggtgactgtctaaggagacctatgctctgtactaagtgtgcctatgaccatgttgta

SEQ ID NO: 9318 - DNA, 80 bp, synthetic construct
  misc_feature 1..80: note = Synthetic: >AlphaCoV1-cand-7050-7129
  source 1..80: mol_type = other DNA
caaaagttgaatgttctgatggcttttacagattttatgttggtgatgaattcacggcatatgactatgatgtaaaacat

SEQ ID NO: 9319 - DNA, 80 bp, synthetic construct
  misc_feature 1..80: note = Synthetic: >AlphaCoV1-cand-7130-7209
  source 1..80: mol_type = other DNA
aagaagtatagtagtcaagaggttcttaagactatgttcctgcttgatgacttcattgtgtacagtccatcaggttcttc

SEQ ID NO: 9320 - DNA, 80 bp, synthetic construct
  misc_feature 1..80: note = Synthetic: >AlphaCoV1-cand-7290-7369
  source 1..80: mol_type = other DNA
ttgaagatttgtctgtagactttaaaggagcactttttaatgctaaaaagaatgttattaagaattctttcaatgttgat

SEQ ID NO: 9321 - DNA, 80 bp, synthetic construct
  misc_feature 1..80: note = Synthetic: >AlphaCoV1-cand-7370-7449
  source 1..80: mol_type = other DNA
gtctcagaatgtaaaaatcttgacgagtgttacaaggcttgtaaccttgatgttacattttctacatttgaaatggctgt

SEQ ID NO: 9322 - DNA, 80 bp, synthetic construct
  misc_feature 1..80: note = Synthetic: >AlphaCoV1-cand-7450-7529
  source 1..80: mol_type = other DNA
taataatgctcatagatttggtattttgattacagaccgttcttttaacaatttctggccatcaaaaattaagcctggtt

SEQ ID NO: 9323 - DNA, 80 bp, synthetic construct
  misc_feature 1..80: note = Synthetic: >AlphaCoV1-cand-7610-7689
  source 1..80: mol_type = other DNA
cgtggtaaaagtgttgtatggcttagtcaggatttttctgcacttagctctacagcacaaaaggttttggttaaaacttt

SEQ ID NO: 9324 - DNA, 80 bp, synthetic construct
  misc_feature 1..80: note = Synthetic: >AlphaCoV1-cand-7690-7769
  source 1..80: mol_type = other DNA
tgtagaagaaggtgtcaacttttcactcacatttaatgctgtaggttcagatgaagatctgccttatgagagattcactg

SEQ ID NO: 9325 - DNA, 80 bp, synthetic construct
  misc_feature 1..80: note = Synthetic: >AlphaCoV1-cand-7770-7849
  source 1..80: mol_type = other DNA
aatctgtgtctccaaagagcggttcaggcttctttgatgtacttaaacagcttaaacaaattttgtggtgtgttgttgtg

SEQ ID NO: 9326 - DNA, 80 bp, synthetic construct
  misc_feature 1..80: note = Synthetic: >AlphaCoV1-cand-7850-7929
  source 1..80: mol_type = other DNA
tttattactatttatggtttatgctctgtctacagtgttgcaactcagtcttatattgattctgctgaaggttatgatta

SEQ ID NO: 9327 - DNA, 80 bp, synthetic construct
  misc_feature 1..80: note = Synthetic: >AlphaCoV1-cand-7930-8009
  source 1..80: mol_type = other DNA
catggttattaagaatggtattgttcaaccatttgatgattctattaactgtgtacataacacatacaaaggctttgcag

SEQ ID NO: 9328 - DNA, 80 bp, synthetic construct
  misc_feature 1..80: note = Synthetic: >AlphaCoV1-cand-8010-8089
  source 1..80: mol_type = other DNA
tgtggtttaaagctaaatatggttttgtacctacatttgataaatcatgtcctattgttttaggaactgtttttgatctt

SEQ ID NO: 9329 - DNA, 80 bp, synthetic construct
  misc_feature 1..80: note = Synthetic: >AlphaCoV1-cand-8090-8169
  source 1..80: mol_type = other DNA
gtaggtaatatgagaccaatccctgatgtgcctgcatatgtagcacttgttggtagatctcttgtttttgcaattaatgc

SEQ ID NO: 9330 - DNA, 80 bp, synthetic construct
  misc_feature 1..80: note = Synthetic: >AlphaCoV1-cand-8170-8249
  source 1..80: mol_type = other DNA
tgcatttggtgttactaatgtgtgctatgatcatactggcactgcagtaagtaaggactcttactttgacacttgtgtgt

SEQ ID NO: 9331 - DNA, 80 bp, synthetic construct
  misc_feature 1..80: note = Synthetic: >AlphaCoV1-cand-8250-8329
  source 1..80: mol_type = other DNA
tcaattctgcgtgcaccactcttacaggtcttggtggtacaattgtttattgtgctaagcaaggacttgttgagggtgct

SEQ ID NO: 9332 - DNA, 80 bp, synthetic construct
  misc_feature 1..80: note = Synthetic: >AlphaSp-cand-7560-7639
  source 1..80: mol_type = other DNA
tcgttatgatgttttgatctccgacgtttcgtttaacaatttgattgtgtcctatgccaagcctgaagaaaaattggcag

SEQ ID NO: 9333 - DNA, 80 bp, synthetic construct
  misc_feature 1..80: note = Synthetic: >AlphaSp-cand-7720-7799
  source 1..80: mol_type = other DNA
gtttggcttgctaaggattttattgcactatctgaagaggcgcgcaaatacattgtccgcaccactaagactaagggtat

SEQ ID NO: 9334 - DNA, 80 bp, synthetic construct
  misc_feature 1..80: note = Synthetic: >AlphaSp-cand-7800-7879
  source 1..80: mol_type = other DNA
taattttatgcttacgtttaatgataggcgtatgcatttaacgattcccactgttagtgttgctaacaaaaagggtgcag

SEQ ID NO: 9335 - DNA, 80 bp, synthetic construct
  misc_feature 1..80: note = Synthetic: >AlphaSp-cand-7880-7959
  source 1..80: mol_type = other DNA
gtttaccttcactttttagtaggttgtacagcttcttctggcatttgtgtgtcttgatagttgtgttgtttttcgccact

SEQ ID NO: 9336 - DNA, 80 bp, synthetic construct
  misc_feature 1..80: note = Synthetic: >AlphaSp-cand-7960-8039
  source 1..80: mol_type = other DNA
agtttgttggatttttccgcacaggttactagtgatacacaatacgatttcaagtacattgaaaatggtgtgcttaaagt

SEQ ID NO: 9337 - DNA, 80 bp, synthetic construct
  misc_feature 1..80: note = Synthetic: >AlphaSp-cand-8040-8119
  source 1..80: mol_type = other DNA
ctttgaaaaacctctagattgtgtgcacaatgcttttgacaactttaatgaatggcacaatgctaaatttggtagtacac

SEQ ID NO: 9338 - DNA, 80 bp, synthetic construct
  misc_feature 1..80: note = Synthetic: >AlphaSp-cand-8200-8279
  source 1..80: mol_type = other DNA
tttttgtatggcaagtcacttatctttgctatgagtaccatttttggcacgtcagggctttgttttgatgatagaggcct

SEQ ID NO: 9339 - DNA, 80 bp, synthetic construct
  misc_feature 1..80: note = Synthetic: >AlphaSp-cand-8360-8439
  source 1..80: mol_type = other DNA
gagacggcgtagttgacaatgctaagttgtatagtagtcttctaccacatagttattacaagcttgtggacggtaattat

SEQ ID NO: 9340 - DNA, 80 bp, synthetic construct
  misc_feature 1..80: note = Synthetic: >AlphaSp-cand-8600-8679
  source 1..80: mol_type = other DNA
atgtgtgtggtactggcttcttttcacttctttttaatgtgattggcatgttttctaattctataccagtcactgttatg

SEQ ID NO: 9341 - DNA, 80 bp, synthetic construct
  misc_feature 1..80: note = Synthetic: >AlphaSp-cand-8680-8759
  source 1..80: mol_type = other DNA
tctggccagattttgcttaactgtatggtagcatttaccgctgttatggtttgttttgccttcactaagtttaagcgctt

SEQ ID NO: 9342 - DNA, 80 bp, synthetic construct
  misc_feature 1..80: note = Synthetic: >AlphaSp-cand-8760-8839
  source 1..80: mol_type = other DNA
gtttggcgatatgtcatttggcgttcttagtgttggactgtgcacagtggtgaacaatttgtcatatgttgtaactcaaa

SEQ ID NO: 9343 - DNA, 80 bp, synthetic construct
  misc_feature 1..80: note = Synthetic: >Anlong-cand-9870-9949
  source 1..80: mol_type = other DNA
ttctacacttacagacgacttcacattgagtgaggttgttaaacaaatgtttggtgttaacttgcagagcagtaagaagg

SEQ ID NO: 9344 - DNA, 80 bp, synthetic construct
  misc_feature 1..80: note = Synthetic: >Anlong-cand-9950-10029
  source 1..80: mol_type = other DNA
ctacatgtttcaagtcacttatgcttgtaggaggtttctttgcaatgttttggggtgaatttctcatgtattcctctgtt

SEQ ID NO: 9345 - DNA, 80 bp, synthetic construct
  misc_feature 1..80: note = Synthetic: >Anlong-cand-10030-10109
  source 1..80: mol_type = other DNA
atgtgggtgcatccagctatagttacacctattttgctgggtttaggctgtgtatcaatgtttttgtcttgttttattaa

SEQ ID NO: 9346 - DNA, 80 bp, synthetic construct
  misc_feature 1..80: note = Synthetic: >Anlong-cand-10110-10189
  source 1..80: mol_type = other DNA
gcacaagatgatgtttctccagacgtttttgctgccatctattatagttgttgcagctaataatttcttctgggattact

SEQ ID NO: 9347 - DNA, 80 bp, synthetic construct
  misc_feature 1..80: note = Synthetic: >Anlong-cand-10190-10269
  source 1..80: mol_type = other DNA
ttgtcacgcagttgcttattcagtattttgattacacagcttctttgtttagtcttgacattcagggacttcttaatatt

SEQ ID NO: 9348 - DNA, 80 bp, synthetic construct
  misc_feature 1..80: note = Synthetic: >Anlong-cand-10270-10349
  source 1..80: mol_type = other DNA
accatgtgcctgtttgttatgtttttacacacttatagatttgttggcagtggtactaatgctattgcatacgtatcttc

SEQ ID NO: 9349 - DNA, 80 bp, synthetic construct
  misc_feature 1..80: note = Synthetic: >Anlong-cand-10350-10429
  source 1..80: mol_type = other DNA
attgtgtgttagcgcatacacttatcttatgggtggagatccaatgtattgtgctattatggtactgtgttccctttcta

SEQ ID NO: 9350 - DNA, 80 bp, synthetic construct
  misc_feature 1..80: note = Synthetic: >Anlong-cand-10430-10509
  source 1..80: mol_type = other DNA
gcgagtggtatgttggcgctgtttgttataaattagcactcaggctagcaccatttgttaacccaatagtagttacaatc

SEQ ID NO: 9351 - DNA, 80 bp, synthetic construct
  misc_feature 1..80: note = Synthetic: >Anlong-cand-10510-10589
  source 1..80: mol_type = other DNA
tttggccagtcaaaagttatagtgtttgtgtatcttgcacttggttattgtacttgtgtgtactggggcttcttgtattg

SEQ ID NO: 9352 - DNA, 80 bp, synthetic construct
  misc_feature 1..80: note = Synthetic: >Anlong-cand-10590-10669
  source 1..80: mol_type = other DNA
gtttaacaggttctttaagtttactcttggtgagtatgattttaaggtaagtcctgctgaatttaaatacatggttgcaa

SEQ ID NO: 9353 - DNA, 80 bp, synthetic construct
  misc_feature 1..80: note = Synthetic: >Anlong-cand-10670-10749
  source 1..80: mol_type = other DNA
acaatcttagtgcaccgcgtggaccattcgactcacttgctctctctctgcggcttgtgggtgttggtggtcagcgtaca

SEQ ID NO: 9354 - DNA, 80 bp, synthetic construct
  misc_feature 1..80: note = Synthetic: >Anlong-cand-10750-10829
  source 1..80: mol_type = other DNA
attagagtttctaccgtgcagtcaaaactcacagaccttaaatgtgctaatgttgtgcttcttggttgtctttctagtat

SEQ ID NO: 9355 - DNA, 80 bp, synthetic construct
  misc_feature 1..80: note = Synthetic: >Anlong-cand-10830-10909
  source 1..80: mol_type = other DNA
gaatattgctagtaactcaaaggattgggagtattgtgttacattgcataataaaatcaacctttgtgatgaccctgaga

SEQ ID NO: 9356 - DNA, 80 bp, synthetic construct
  misc_feature 1..80: note = Synthetic: >Anlong-cand-10910-10989
  source 1..80: mol_type = other DNA
aggctcatgagatgttgttagcattgttggcatttttcttgagtaaacaacaggcatttggtgttgatggtcttgttgat

SEQ ID NO: 9357 - DNA, 80 bp, synthetic construct
  misc_feature 1..80: note = Synthetic: >Anlong-cand-10990-11069
  source 1..80: mol_type = other DNA
tcatattttgacaataatagcatgttgcagagtgttgctaacacttatgtaaacttgccatcttttgttgcatacgagac

SEQ ID NO: 9358 - DNA, 80 bp, synthetic construct
  misc_feature 1..80: note = Synthetic: >Anlong-cand-11070-11149
  source 1..80: mol_type = other DNA
tgcacggcagaattatgaggacgccgttaataatggttcttctactcaaattataaaacaaatgcgtcgtgctatgcatc

SEQ ID NO: 9359 - DNA, 80 bp, synthetic construct
  misc_feature 1..80: note = Synthetic: >AvianCoV-cand-16380-16459
  source 1..80: mol_type = other DNA
atggttcactttcaccaaaggattataatgtcatcacaaatcttatggtttgtgttaaacctgacattttccttgcgaag

SEQ ID NO: 9360 - DNA, 80 bp, synthetic construct
  misc_feature 1..80: note = Synthetic: >AvianCoV-cand-16460-16539
  source 1..80: mol_type = other DNA
tgttaccgttgtcctaaagaaattgtagacactgtgtctactcttgtttatgatggaaagtttgttgcaaataacccaga

SEQ ID NO: 9361 - DNA, 80 bp, synthetic construct
  misc_feature 1..80: note = Synthetic: >AvianCoV-cand-16540-16619
  source 1..80: mol_type = other DNA
atcacgtgagtgcttcaaggttatagttaataatggtaattctgatgtaggtcatgaaagtggttcagcctacaacacaa

SEQ ID NO: 9362 - DNA, 80 bp, synthetic construct
  misc_feature 1..80: note = Synthetic: >AvianCoV-cand-16620-16699
  source 1..80: mol_type = other DNA
cacaattggaatttgtgaaagattttgtttgtcgcaataaacaatggcgagaagcaacattcatttcaccttataatgct

SEQ ID NO: 9363 - DNA, 80 bp, synthetic construct
  misc_feature 1..80: note = Synthetic: >AvianCoV-cand-16700-16779
  source 1..80: mol_type = other DNA
atgaaccagagagcctatcgtatgcttggacttaatgttcagacagtagactcctcacaaggttcagagtatgattatgt

SEQ ID NO: 9364 - DNA, 80 bp, synthetic construct
  misc_feature 1..80: note = Synthetic: >AvianCoV-cand-16780-16859
  source 1..80: mol_type = other DNA
tatattctgtgttacagctgattctcagcatgcactgaatattaacagatttaatgttgcgcttacaagagctaagcgtg

SEQ ID NO: 9365 - DNA, 80 bp, synthetic construct
  misc_feature 1..80: note = Synthetic: >AvianCoV-cand-16860-16939
  source 1..80: mol_type = other DNA
gtatacttgttgtcatgcgccagcgtgatgaattgtattctgctcttaaatttacagagctagatactgaagcaagtctg

SEQ ID NO: 9366 - DNA, 80 bp, synthetic construct
  misc_feature 1..80: note = Synthetic: >AvianCoV-cand-16940-17019
  source 1..80: mol_type = other DNA
caaggtacaggtttgtttaaaatttgcaacaaggaatttagtggtgttcatcctgcttatgcagtcaccactaaagctct

SEQ ID NO: 9367 - DNA, 80 bp, synthetic construct
  misc_feature 1..80: note = Synthetic: >AvianCoV-cand-17020-17099
  source 1..80: mol_type = other DNA
tgctgcaacttataaagttaatgatgaactagctgcacttgttaatgtagaagctggttcagaaataacttataaacatc

SEQ ID NO: 9368 - DNA, 80 bp, synthetic construct
  misc_feature 1..80: note = Synthetic: >AvianCoV-cand-17100-17179
  source 1..80: mol_type = other DNA
ttatttctctgttagggtttaagatgagtgttaatgttgaaggttgtcacaacatgtttataacacgtgatgaggcaatt

SEQ ID NO: 9369 - DNA, 80 bp, synthetic construct
  misc_feature 1..80: note = Synthetic: >AvianCoV-cand-17180-17259
  source 1..80: mol_type = other DNA
cgcaatgtaagaggttgggtaggttttgatgtagaagccacacatgcttgtggtactaatattggtactaaccttccttt

SEQ ID NO: 9370 - DNA, 80 bp, synthetic construct
  misc_feature 1..80: note = Synthetic: >AvianCoV-cand-17260-17339
  source 1..80: mol_type = other DNA
tcaagtaggattctctactggtgctgactttgtagtcacacctgagggtcttgttgatacttcaataggcaataattttg

SEQ ID NO: 9371 - DNA, 80 bp, synthetic construct
  misc_feature 1..80: note = Synthetic: >AvianCoV-cand-17340-17419
  source 1..80: mol_type = other DNA
agcctgtgaattctaaagcacctccaggtgaacaatttaatcacttgagagctttgtttaagagtgctaagccttggcat

SEQ ID NO: 9372 - DNA, 80 bp, synthetic construct
  misc_feature 1..80: note = Synthetic: >AvianCoV-cand-17420-17499
  source 1..80: mol_type = other DNA
gttataagaccaaggatagttcagatgttagcagacaatctatgcaatgtttcagattgtgtagtgtttgtcacatggtg

SEQ ID NO: 9373 - DNA, 80 bp, synthetic construct
  misc_feature 1..80: note = Synthetic: >AvianCoV-cand-17500-17579
  source 1..80: mol_type = other DNA
tcatggcctagaactaactactttgcgctattttgttaaaataggcaaggaacaagtttgttcttgtggttctagagcta

SEQ ID NO: 9374 - DNA, 80 bp, synthetic construct
  misc_feature 1..80: note = Synthetic: >AvianCoV-cand-17580-17659
  source 1..80: mol_type = other DNA
caacttttaattctcatactcaagcttatgcttgttggaagcactgcttgggttttgattttgtttataatccactttta

SEQ ID NO: 9375 - DNA, 80 bp, synthetic construct
  misc_feature 1..80: note = Synthetic: >Beluga-cand-12540-12619
  source 1..80: mol_type = other DNA
acgatgatgaaatagattcgttctttgttgtaaagcaaactactcctcataattttgaacatgaggagaagtgctatttg

SEQ ID NO: 9376 - DNA, 80 bp, synthetic construct
  misc_feature 1..80: note = Synthetic: >Beluga-cand-12620-12699
  source 1..80: mol_type = other DNA
gatttaaaagcagactgtgtggctgttcatgatttctttcgctttgaaggcatgtataatatatgccgccaaaggcttac

SEQ ID NO: 9377 - DNA, 80 bp, synthetic construct
  misc_feature 1..80: note = Synthetic: >Beluga-cand-12700-12779
  source 1..80: mol_type = other DNA
taaatatactatgatggatttgtgttatgcttttaggcattttgatcctaatgattgtgatgtgctcaaagagatccttg

SEQ ID NO: 9378 - DNA, 80 bp, synthetic construct
  misc_feature 1..80: note = Synthetic: >Beluga-cand-12780-12859
  source 1..80: mol_type = other DNA
ttgttaagggttgctgtgagtgggattattttgatcagcccaactggtatgatccagttgaaaatccagattggtttagc

SEQ ID NO: 9379 - DNA, 80 bp, synthetic construct
  misc_feature 1..80: note = Synthetic: >Beluga-cand-12850-12929
  source 1..80: mol_type = other DNA
ttggtttagccttatttctaggttgggaccaatctttcaaagggcattgattaaggtggctgaattttgcgatttgatgg

SEQ ID NO: 9380 - DNA, 80 bp, synthetic construct
  misc_feature 1..80: note = Synthetic: >Beluga-cand-12930-13009
  source 1..80: mol_type = other DNA
ttgaaaagggttacataggtgttgtaacgcttgataaccaagatttgaatggtaatttttatgattttggtgattttaaa

SEQ ID NO: 9381 - DNA, 80 bp, synthetic construct
  misc_feature 1..80: note = Synthetic: >Beluga-cand-13010-13089
  source 1..80: mol_type = other DNA
aaagttttgccaggatgtggagtaccagttactacttcatattatagttatatgatgccatgccttacagcttgtgatgc

SEQ ID NO: 9382 - DNA, 80 bp, synthetic construct
  misc_feature 1..80: note = Synthetic: >Beluga-cand-13090-13169
  source 1..80: mol_type = other DNA
attggcgtctgagaggtttttcgaatttaaggcaacttcaggttataagcaatatgaccttacgaagtatgactttactg

SEQ ID NO: 9383 - DNA, 80 bp, synthetic construct
  misc_feature 1..80: note = Synthetic: >Beluga-cand-13170-13249
  source 1..80: mol_type = other DNA
aagaaaagcttcaattatttatgaaatattttaagtactgggaccgtacttatcatcctaattgtgtagagtgcattgat

SEQ ID NO: 9384 - DNA, 80 bp, synthetic construct
  misc_feature 1..80: note = Synthetic: >Beluga-cand-13250-13329
  source 1..80: mol_type = other DNA
gataggtgtttgattcattgcgctaattttaatattttatttgctacactgtttcctcaaacagcttttggatgtctttg

SEQ ID NO: 9385 - DNA, 80 bp, synthetic construct
  misc_feature 1..80: note = Synthetic: >Beluga-cand-13330-13409
  source 1..80: mol_type = other DNA
taagcgtgtgtatatagatggtgttccatttatttccacgactggttatcatagtaaggagttaggagttttgcttaata

SEQ ID NO: 9386 - DNA, 80 bp, synthetic construct
  misc_feature 1..80: note = Synthetic: >Beluga-cand-13410-13489
  source 1..80: mol_type = other DNA
aagataattccatgtccttttcaaagatgtctataggtgaattaatgcgttttgctgcagacccttctcttttggtttca

SEQ ID NO: 9387 - DNA, 80 bp, synthetic construct
  misc_feature 1..80: note = Synthetic: >Beluga-cand-13490-13569
  source 1..80: mol_type = other DNA
gctagtgatgcatttgttgatcttaggacaagttgtttttcattgagtgctttgtcaactggtttgacataccaaactgt

SEQ ID NO: 9388 - DNA, 80 bp, synthetic construct
  misc_feature 1..80: note = Synthetic: >Beluga-cand-13570-13649
  source 1..80: mol_type = other DNA
gaaacctggtcatttcaacgaagatttttataactttgctgaaaagaaagggtttttcaaggaaggttcgtctattccat

SEQ ID NO: 9389 - DNA, 80 bp, synthetic construct
  misc_feature 1..80: note = Synthetic: >Beluga-cand-13650-13729
  source 1..80: mol_type = other DNA
tgaagcatttcttttatatacaggatggtaatgctgccattgctgattttgattattataggtttaataagcctactatg

SEQ ID NO: 9390 - DNA, 80 bp, synthetic construct
  misc_feature 1..80: note = Synthetic: >Beluga-cand-13730-13809
  source 1..80: mol_type = other DNA
gttgatatacagcagtttttgttttgctttgaagttactgataaatactttgagcagtatgatggtggttgtatccctgc

SEQ ID NO: 9391 - DNA, 80 bp, synthetic construct
  misc_feature 1..80: note = Synthetic: >BetaSp-cand-15590-15669
  source 1..80: mol_type = other DNA
gggatgatatgttgcgtcgccttattaaaggagttgataatcctgtccttatgggctgggattatcctaagtgcgatcgt

SEQ ID NO: 9392 - DNA, 80 bp, synthetic construct
  misc_feature 1..80: note = Synthetic: >BetaSp-cand-15670-15749
  source 1..80: mol_type = other DNA
gctatgcctaacattctcagaattctgagcagtttggttcttgcacgtaagcatgatgcatgttgttcacaaactgatag

SEQ ID NO: 9393 - DNA, 80 bp, synthetic construct
  misc_feature 1..80: note = Synthetic: >BetaSp-cand-16130-16209
  source 1..80: mol_type = other DNA
atattagtgcctttcaacaggtgctgtattatcaaaataacgtgtttatgtcagaatccaaatgttgggtagaaaatgac

SEQ ID NO: 9394 - DNA, 80 bp, synthetic construct
  misc_feature 1..80: note = Synthetic: >BetaSp-cand-16290-16369
  source 1..80: mol_type = other DNA
tcctgaccctagtcgaattctaggagcaggctgttttgtggacgatctattaaagactgatagtgtcttattaatagagc

SEQ ID NO: 9395 - DNA, 80 bp, synthetic construct
  misc_feature 1..80: note = Synthetic: >BetaSp-cand-16450-16529
  source 1..80: mol_type = other DNA
ttggagtatataaagaagttgtataatgatttgggcaaccagatattagacagctatagtgtgattttaagtacttgtga

SEQ ID NO: 9396 - DNA, 80 bp, synthetic construct
  misc_feature 1..80: note = Synthetic: >BetaSp-cand-16530-16609
  source 1..80: mol_type = other DNA
tggacaaaaatttactgatgagtccttttacaagaacatgtatttaagaagtgcagttatgcaaagcgttggcgcctgcg

SEQ ID NO: 9397 - DNA, 80 bp, synthetic construct
  misc_feature 1..80: note = Synthetic: >CDPHE15-cand-1750-1829
  source 1..80: mol_type = other DNA
gtggtaaggcctttttctgtagtgaaggttactataggtttatggctacccccaatgttgtgcttgatgaacctgtgttt

SEQ ID NO: 9398 - DNA, 80 bp, synthetic construct
  misc_feature 1..80: note = Synthetic: >CDPHE15-cand-1830-1909
  source 1..80: mol_type = other DNA
cgtgcagcggcagaattgaatccagtttttgagtgcgaaaagcctgatggttttccagttctcgttgcatccgatgtggc

SEQ ID NO: 9399 - DNA, 80 bp, synthetic construct
  misc_feature 1..80: note = Synthetic: >CDPHE15-cand-1910-1989
  source 1..80: mol_type = other DNA
tgaactctgtgttaaagttgatcagctcctgcccaactatagtacctcatacaaacgttatgagagtgttatacgtggtg

SEQ ID NO: 9400 - DNA, 80 bp, synthetic construct
  misc_feature 1..80: note = Synthetic: >CDPHE15-cand-1990-2069
  source 1..80: mol_type = other DNA
agcagtgctttatacgctgtatttacgattttagagcaccatcatttattaggaaaggtgatgatgctgagaaatttgtg

SEQ ID NO: 9401 - DNA, 80 bp, synthetic construct
  misc_feature 1..80: note = Synthetic: >CDPHE15-cand-2070-2149
  source 1..80: mol_type = other DNA
aaacaatgtgaagtgcttgttagcaaccccctgttctttgagttttatactcaggcgcatgaggctgttgaccttgatca

SEQ ID NO: 9402 - DNA, 80 bp, synthetic construct
  misc_feature 1..80: note = Synthetic: >CDPHE15-cand-2150-2229
  source 1..80: mol_type = other DNA
gtatgttaacacagcttgtaccttagaaggtttttcgcatatggctcctgctgtacccaagccacatcctttgtttttgc

SEQ ID NO: 9403 - DNA, 80 bp, synthetic construct
  misc_feature 1..80: note = Synthetic: >CDPHE15-cand-2230-2309
  source 1..80: mol_type = other DNA
aaattgatggcggtgccatatggcgaagtgttgttcgccgtgtgagcgccgtagcagattttgtcagaaaccttaaggtt

SEQ ID NO: 9404 - DNA, 80 bp, synthetic construct
  misc_feature 1..80: note = Synthetic: >CDPHE15-cand-2310-2389
  source 1..80: mol_type = other DNA
agttttggtttggagggcattattgtctcagcagctaggaaattcaaacaatgggctaaacttttggctcagatgtataa

SEQ ID NO: 9405 - DNA, 80 bp, synthetic construct
  misc_feature 1..80: note = Synthetic: >CDPHE15-cand-2390-2469
  source 1..80: mol_type = other DNA
tgaatttcttaactctgtttcagctgccattcatattgcaggggttaagtttatacattatgccaccactgtgccacagc

SEQ ID NO: 9406 - DNA, 80 bp, synthetic construct
  misc_feature 1..80: note = Synthetic: >CDPHE15-cand-2470-2549
  source 1..80: mol_type = other DNA
ttgcctataatggttgcctctatgctcttaaaaagacatatgctgcaactgtaggacttcaaaccgaagagggtattgac

SEQ ID NO: 9407 - DNA, 80 bp, synthetic construct
  misc_feature 1..80: note = Synthetic: >CDPHE15-cand-2550-2629
  source 1..80: mol_type = other DNA
agcttttatgcttttgaccattgtcaattaccagtaactcctaggttgctgcaggttgaagatgtcaatttagaagaagc

SEQ ID NO: 9408 - DNA, 80 bp, synthetic construct
  misc_feature 1..80: note = Synthetic: >CDPHE15-cand-2630-2709
  source 1..80: mol_type = other DNA
tgattttaaacccccagtaggtggtggttgtgtggcagtgattaatggttactcattttatgtggaaggtgattcttatt

SEQ ID NO: 9409 - DNA, 80 bp, synthetic construct
  misc_feature 1..80: note = Synthetic: >CDPHE15-cand-2710-2789
  source 1..80: mol_type = other DNA
accccactgattgtagtgctattcattcactgcgctttagaaagcttggtggtgctggtgttgctttttcagaagatgtg

SEQ ID NO: 9410 - DNA, 80 bp, synthetic construct
  misc_feature 1..80: note = Synthetic: >CDPHE15-cand-2790-2869
  source 1..80: mol_type = other DNA
gcagttaaaactattgatcctgtctacaaggttcgactcgattttgaattcgaagatgattcagttgttgcactttgcaa

SEQ ID NO: 9411 - DNA, 80 bp, synthetic construct
  misc_feature 1..80: note = Synthetic: >CDPHE15-cand-2870-2949
  source 1..80: mol_type = other DNA
gaagactattggcaagtccattaagtttaatggtacagaatgggacaaatttgtcgccattttggaaactgcactaggtg

SEQ ID NO: 9412 - DNA, 80 bp, synthetic construct
  misc_feature 1..80: note = Synthetic: >CDPHE15-cand-2950-3029
  source 1..80: mol_type = other DNA
ttcttgcaaagcatgttacgttgccaccatacttcatttatgacgaccatggtggcaagaacttatcacgcactgtagtg

SEQ ID NO: 9413 - DNA, 80 bp, synthetic construct
  misc_feature 1..80: note = Synthetic: >Delta-cand-16830-16909
  source 1..80: mol_type = other DNA
tgtgaatgctcgtttggtttacaatcacattgtgtatgttggtgatccttatcagttaccttcacctagaactatgctta

SEQ ID NO: 9414 - DNA, 80 bp, synthetic construct
  misc_feature 1..80: note = Synthetic: >Delta-cand-16910-16989
  source 1..80: mol_type = other DNA
cgtctggccagctttcgccagctgactataacgtagttactgatataatggtacatgcaggagcggatgttatgctcgac

SEQ ID NO: 9415 - DNA, 80 bp, synthetic construct
  misc_feature 1..80: note = Synthetic: >Delta-cand-16990-17069
  source 1..80: mol_type = other DNA
atgtgctacagatgcccacgtgaaatcgttgagacagtgtctaaacttgtctacgataacaaactaaaagcggcgaaacc

SEQ ID NO: 9416 - DNA, 80 bp, synthetic construct
  misc_feature 1..80: note = Synthetic: >Delta-cand-17070-17149
  source 1..80: mol_type = other DNA
gaactcaagacagtgttacaagaccattgtgaactttggtcctggagacgttgctcatgagggacaatctgcctacaacg

SEQ ID NO: 9417 - DNA, 80 bp, synthetic construct
  misc_feature 1..80: note = Synthetic: >Delta-cand-17150-17229
  source 1..80: mol_type = other DNA
aagcacagttgcgtttcgcactcgcatttagacaacaaaagcggtgggataacgtgactttcatatctccatataatgct

SEQ ID NO: 9418 - DNA, 80 bp, synthetic construct
  misc_feature 1..80: note = Synthetic: >Delta-cand-17230-17309
  source 1..80: mol_type = other DNA
atgaatgtgaaagcatccttagcaggtttctctactcagaccgttgactcttctcaaggttctgagtatgattatgttat

SEQ ID NO: 9419 - DNA, 80 bp, synthetic construct
  misc_feature 1..80: note = Synthetic: >Delta-cand-17310-17389
  source 1..80: mol_type = other DNA
cttttgcgtgaccactgattcagcacacgcacttaacatggctcgtttgaacgttgcccttacacgcgcaaagataggta

SEQ ID NO: 9420 - DNA, 80 bp, synthetic construct
  misc_feature 1..80: note = Synthetic: >Delta-cand-17390-17469
  source 1..80: mol_type = other DNA
tccttgtggtgtttaggcaggcaaacgaactttacaatagtttgcagtttgaatctattgattcaagcctcgtaggtcaa

SEQ ID NO: 9421 - DNA, 80 bp, synthetic construct
  misc_feature 1..80: note = Synthetic: >Delta-cand-17470-17549
  source 1..80: mol_type = other DNA
gagggagtactcctgatgacggaccgacgcagtactgccttggcgaaaagtgggagtactcccatgcagcttcagtcgag

SEQ ID NO: 9422 - DNA, 80 bp, synthetic construct
  misc_feature 1..80: note = Synthetic: >Delta-cand-17550-17629
  source 1..80: mol_type = other DNA
tgctgagaaaaaccaggaagtacttcctgagggctcgtcgagtactcgcttgctcacaccactgtttaagcgctgcggct

SEQ ID NO: 9423 - DNA, 80 bp, synthetic construct
  misc_feature 1..80: note = Synthetic: >Delta-cand-17710-17789
  source 1..80: mol_type = other DNA
gctaaattagtaggagttgccgatggcactcttatatcatacaaaaccctagtatccacacttgggtttcttccatcact

SEQ ID NO: 9424 - DNA, 80 bp, synthetic construct
  misc_feature 1..80: note = Synthetic: >Delta-cand-17870-17949
  source 1..80: mol_type = other DNA
ttgaagcagcacacgccataaaacctaacaccgggactaacctgccattgcaaataggttttagtaccggaaagaatttt

SEQ ID NO: 9425 - DNA, 80 bp, synthetic construct
  misc_feature 1..80: note = Synthetic: >Delta-cand-17950-18029
  source 1..80: mol_type = other DNA
tcagttactccagagggaatttgggtaaacgagcacggatcttgcactgagcccgtccctgccaaaatacctcctggaga

SEQ ID NO: 9426 - DNA, 80 bp, synthetic construct
  misc_feature 1..80: note = Synthetic: >HKU1-cand-26290-26369
  source 1..80: mol_type = other DNA
tacagcaattatttaataaatttggtgcaattagttcttctttacaagaaattttatctcgtctcgatgctttagaggct

SEQ ID NO: 9427 - DNA, 80 bp, synthetic construct
  misc_feature 1..80: note = Synthetic: >HKU1-cand-26370-26449
  source 1..80: mol_type = other DNA
caggttcagattgataggcttattaatggtcgtttaactgctttaaatgcttatgtctctcaacagcttagtgatatttc

SEQ ID NO: 9428 - DNA, 80 bp, synthetic construct
  misc_feature 1..80: note = Synthetic: >HKU1-cand-26450-26529
  source 1..80: mol_type = other DNA
tcttgtaaaatttggtgctgctttagctatggagaaggttaatgagtgtgttaaaagtcaatctcctcgtattaattttt

SEQ ID NO: 9429 - DNA, 80 bp, synthetic construct
  misc_feature 1..80: note = Synthetic: >HKU1-cand-26530-26609
  source 1..80: mol_type = other DNA
gtggtaatggtaatcatattttgtcattagttcaaaatgctccttatggtttgttgtttatgcattttagttataaacct

SEQ ID NO: 9430 - DNA, 80 bp, synthetic construct
  misc_feature 1..80: note = Synthetic: >HKU1-cand-26610-26689
  source 1..80: mol_type = other DNA
atttcttttaaaactgttttagtaagtcctggtttgtgtatatcaggtgatgtaggtattgcacctaaacaagggtattt

SEQ ID NO: 9431 - DNA, 80 bp, synthetic construct
  misc_feature 1..80: note = Synthetic: >HKU1-cand-26690-26769
  source 1..80: mol_type = other DNA
tattaaacataatgatcattggatgttcactggtagttcttactattatcctgaaccaatttcagataaaaatgttgttt

SEQ ID NO: 9432 - DNA, 80 bp, synthetic construct
  misc_feature 1..80: note = Synthetic: >HKU1-cand-26770-26849
  source 1..80: mol_type = other DNA
ttatgaatacttgttctgttaattttactaaagcgcctcttgtttatttgaatcattctgtaccaaaattgtctgatttt

SEQ ID NO: 9433 - DNA, 80 bp, synthetic construct
  misc_feature 1..80: note = Synthetic: >HKU1-cand-26850-26929
  source 1..80: mol_type = other DNA
gaatctgagttatctcattggtttaaaaatcaaacatccattgcgcctaatttgactttaaatcttcatactattaatgc

SEQ ID NO: 9434 - DNA, 80 bp, synthetic construct
  misc_feature 1..80: note = Synthetic: >HKU1-cand-26930-27009
  source 1..80: mol_type = other DNA
tacttttttagatttgtattatgagatgaatcttattcaagagtctattaagtctttgaataatagttatatcaatctta

SEQ ID NO: 9435 - DNA, 80 bp, synthetic construct
  misc_feature 1..80: note = Synthetic: >HKU1-cand-27010-27089
  source 1..80: mol_type = other DNA
aagatataggtacatatgaaatgtatgtaaaatggccttggtatgtttggctactaatttctttttcatttataatattc

SEQ ID NO: 9436 - DNA, 80 bp, synthetic construct
  misc_feature 1..80: note = Synthetic: >HKU1-cand-27090-27169
  source 1..80: mol_type = other DNA
cttgtattgctcttttttatatgttgttgtactggttgtggttctgcatgttttagtaaatgtcataattgttgtgatga

SEQ ID NO: 9437 - DNA, 80 bp, synthetic construct
  misc_feature 1..80: note = Synthetic: >HKU1-cand-27170-27249
  source 1..80: mol_type = other DNA
gtatggtggtcatcatgattttgttatcaaaacatctcatgatgattagaatctcttgtcagatctcattaaatctaaac

SEQ ID NO: 9438 - DNA, 80 bp, synthetic construct
  misc_feature 1..80: note = Synthetic: >HKU1-cand-27250-27329
  source 1..80: mol_type = other DNA
tttatttatggacgtttggagacctagctacacacattctcttgttattagagaatttggtgttacaaaccttgaagatt

SEQ ID NO: 9439 - DNA, 80 bp, synthetic construct
  misc_feature 1..80: note = Synthetic: >HKU1-cand-27330-27409
  source 1..80: mol_type = other DNA
tgtgtctaaagtataattactgtcaacctattgttggttactgtattgtacctttaaatgtttggtgtcgcaagtttggc

SEQ ID NO: 9440 - DNA, 80 bp, synthetic construct
  misc_feature 1..80: note = Synthetic: >HKU1-cand-27410-27489
  source 1..80: mol_type = other DNA
aaatttgcttctcactttacattacgtagtcacgatatttcccatagtaataattttggtgttgtaactagttttactac

SEQ ID NO: 9441 - DNA, 80 bp, synthetic construct
  misc_feature 1..80: note = Synthetic: >HKU1-cand-27490-27569
  source 1..80: mol_type = other DNA
ttatggtaatactgtttctgaggctgtgtctagattagttgaatcagcttctgaatttattgtttggcgtgcagaggcac

SEQ ID NO: 9442 - DNA, 80 bp, synthetic construct
  misc_feature 1..80: note = Synthetic: >HKU15-cand-80-159
  source 1..80: mol_type = other DNA
aggtgcgtctgccaccaagttggctacccttcctaggggcgctttcgcgcttgctcaccattagattacctggaaaccag

SEQ ID NO: 9443 - DNA, 80 bp, synthetic construct
  misc_feature 1..80: note = Synthetic: >HKU15-cand-160-239
  source 1..80: mol_type = other DNA
ccattcaggttggagtttccccaggctcttttgtgtgggcattagcggcttgtggtttttgcacaaaatctaagctactt

SEQ ID NO: 9444 - DNA, 80 bp, synthetic construct
  misc_feature 1..80: note = Synthetic: >HKU15-cand-240-319
  source 1..80: mol_type = other DNA
accgttcctctgaccatccaccacttctatagacagcactgattaccgtagggtttaagtcacaccggtctgcaccgccc

SEQ ID NO: 9445 - DNA, 80 bp, synthetic construct
  misc_feature 1..80: note = Synthetic: >HKU15-cand-320-399
  source 1..80: mol_type = other DNA
gtcagcggacacattacccagcatagcactccttgcaccgagcctaggtaggataaaaccccctaccgggtgactcttaa

SEQ ID NO: 9446 - DNA, 80 bp, synthetic construct
  misc_feature 1..80: note = Synthetic: >HKU15-cand-400-479
  source 1..80: mol_type = other DNA
ggcgtttcctccacgggatagccactagtcactaggtgtaagtgatctgatctgggcgtattgtgttgcgcaagtgtgat

SEQ ID NO: 9447 - DNA, 80 bp, synthetic construct
  misc_feature 1..80: note = Synthetic: >HKU15-cand-480-559
  source 1..80: mol_type = other DNA
acccataggagcgtggaatcctattctgcggctcagtgcctgatatagctgtgaaatggccaagaacaagtccaagcgcg

SEQ ID NO: 9448 - DNA, 80 bp, synthetic construct
  misc_feature 1..80: note = Synthetic: >HKU15-cand-640-719
  source 1..80: mol_type = other DNA
aaggttactacttaccttggcaactataacctctatgccaccaaggctccgcctggcgtgcaggttcttagtgctaaaac

SEQ ID NO: 9449 - DNA, 80 bp, synthetic construct
  misc_feature 1..80: note = Synthetic: >HKU15-cand-720-799
  source 1..80: mol_type = other DNA
ctctcttactgactttgagaatgtctttggagctcaacccaccttgcgatcaattcgtaatctggtttgtgaggctcgct

SEQ ID NO: 9450 - DNA, 80 bp, synthetic construct
  misc_feature 1..80: note = Synthetic: >HKU15-cand-800-879
  source 1..80: mol_type = other DNA
cggctgaatggacaacttccaagaatgcttttgcactcaaagccactcaacttgactactctgatgccgttttgagggca

SEQ ID NO: 9451 - DNA, 80 bp, synthetic construct
  misc_feature 1..80: note = Synthetic: >HKU15-cand-880-959
  source 1..80: mol_type = other DNA
atgattcgtttctgccctccaaaggtgtccacactcgctgcctttgctctttttggccgattggttaaaattgaggacaa

SEQ ID NO: 9452 - DNA, 80 bp, synthetic construct
  misc_feature 1..80: note = Synthetic: >HKU15-cand-960-1039
  source 1..80: mol_type = other DNA
ggaacttgctgagttagctcgtgatactgcccttgagttggcgtacacggctaaaattggtacatctcttgctgacacga

SEQ ID NO: 9453 - DNA, 80 bp, synthetic construct
  misc_feature 1..80: note = Synthetic: >HKU15-cand-1040-1119
  source 1..80: mol_type = other DNA
gatctgtctcacttattcataaggacgcttatctaactctcagtaatgaggttgttggcgtaacttttactgccgcactt

SEQ ID NO: 9454 - DNA, 80 bp, synthetic construct
  misc_feature 1..80: note = Synthetic: >HKU15-cand-1120-1199
  source 1..80: mol_type = other DNA
atggcaaaggctaccactgttaatggagcaatgcaatactcaaacttttacctctaccctcgtgccactattaaggtaac

SEQ ID NO: 9455 - DNA, 80 bp, synthetic construct
  misc_feature 1..80: note = Synthetic: >HKU15-cand-1200-1279
  source 1..80: mol_type = other DNA
cgatggtaaggctgaagcaattgcaactaagcctctgtctgctgccactaaaggcaagcaaatcacagaggatgtcaacc

SEQ ID NO: 9456 - DNA, 80 bp, synthetic construct
  misc_feature 1..80: note = Synthetic: >HKU15-cand-1280-1359
  source 1..80: mol_type = other DNA
ttctccctgactatcagcagctgcttgttgatcaagtgactggcactgaggttaaggttggagctctaacctatgttaag

SEQ ID NO: 9457 - DNA, 80 bp, synthetic construct
  misc_feature 1..80: note = Synthetic: >HKU2-cand-11860-11939
  source 1..80: mol_type = other DNA
ggaatatgatggtggttgtaagactattgaacttgaacctccattgaaatttgctgttgaagctcctactggcgttcaga

SEQ ID NO: 9458 - DNA, 80 bp, synthetic construct
  misc_feature 1..80: note = Synthetic: >HKU2-cand-11950-12029
  source 1..80: mol_type = other DNA
ttattatgttaagaatcttaacaatttgcgtagaggtgctactttaggctacataggtgctactgttaggttgcaggctg

SEQ ID NO: 9459 - DNA, 80 bp, synthetic construct
  misc_feature 1..80: note = Synthetic: >HKU2-cand-12030-12109
  source 1..80: mol_type = other DNA
gtaaacagactgagctagcatgcaattcttctttgctcactctttgcgcttttgctgttgaccctgctaaggcctatgtt

SEQ ID NO: 9460 - DNA, 80 bp, synthetic construct
  misc_feature 1..80: note = Synthetic: >HKU2-cand-12430-12509
  source 1..80: mol_type = other DNA
gagtactgatcaggcttatttaaacgggcaaggggctctagtgcagctcgactagagccctgtaatggtactgaaccaga

SEQ ID NO: 9461 - DNA, 80 bp, synthetic construct
  misc_feature 1..80: note = Synthetic: >HKU2-cand-12590-12669
  source 1..80: mol_type = other DNA
tcaaaaatttagataagcatgatgccttctttgttattaagcgttgcactaagtctgtcatgggacacgagcagtccatg

SEQ ID NO: 9462 - DNA, 80 bp, synthetic construct
  misc_feature 1..80: note = Synthetic: >HKU2-cand-12670-12749
  source 1..80: mol_type = other DNA
tataacaaacttagtggttccaatgcattagctgtgcatgatttctttacttggaaagatggccgctctatttacggtaa

SEQ ID NO: 9463 - DNA, 80 bp, synthetic construct
  misc_feature 1..80: note = Synthetic: >HKU2-cand-12750-12829
  source 1..80: mol_type = other DNA
tgtttgcagacaggacctcagtaagtatactatgatggacctctgctatgcattacgtaattttgatgagcgcaattgtg

SEQ ID NO: 9464 - DNA, 80 bp, synthetic construct
  misc_feature 1..80: note = Synthetic: >HKU2-cand-12830-12909
  source 1..80: mol_type = other DNA
agactcttaaagaaattttggttcttacgggctgttgtgatcaatcttattttgataacaaggtctggtatgatcctgtt

SEQ ID NO: 9465 - DNA, 80 bp, synthetic construct
  misc_feature 1..80: note = Synthetic: >HKU2-cand-12910-12989
  source 1..80: mol_type = other DNA
gaaaatgaagaccttcatcgcgtgtacgcactattgggacagcgtgttgctaacgctatgctcaagtgcgttaaattatg

SEQ ID NO: 9466 - DNA, 80 bp, synthetic construct
  misc_feature 1..80: note = Synthetic: >HKU2-cand-12990-13069
  source 1..80: mol_type = other DNA
cgatgagatggtcactaaaggtgttgttggcgtcttaacattggacaaccaagaccttaatggtaatttttacgattttg

SEQ ID NO: 9467 - DNA, 80 bp, synthetic construct
  misc_feature 1..80: note = Synthetic: >HKU2-cand-13070-13149
  source 1..80: mol_type = other DNA
gtgactttgtcgatgttatgccaggtatgggtattccctgttgtacctcatattactcttacatgatgccaattatgact

SEQ ID NO: 9468 - DNA, 80 bp, synthetic construct
  misc_feature 1..80: note = Synthetic: >HKU2-cand-15710-15789
  source 1..80: mol_type = other DNA
gggaagttgggaaggcccgtcctcctcttaacaggaattctgttttcacctgctttcaaattagtaaggactctaagtgg

SEQ ID NO: 9469 - DNA, 80 bp, synthetic construct
  misc_feature 1..80: note = Synthetic: >HKU2-cand-15790-15869
  source 1..80: mol_type = other DNA
caagttggcgagtttacatttgagaagctcgactatggctctgacactgtgtgttataagtctaatgtcactgctaagct

SEQ ID NO: 9470 - DNA, 80 bp, synthetic construct
  misc_feature 1..80: note = Synthetic: >HKU2-cand-15870-15949
  source 1..80: mol_type = other DNA
tgttcctggcatgatctttgtacttacatctcataatgtcttatcactcaaagcacctactattgccaaccaagagcggt

SEQ ID NO: 9471 - DNA, 80 bp, synthetic construct
  misc_feature 1..80: note = Synthetic: >HKU2-cand-15950-16029
  source 1..80: mol_type = other DNA
attcaactatttataagttgtatccatctctgaacgttgatgatgcgtattcatctttggttccgtattaccaacttatt

SEQ ID NO: 9472 - DNA, 80 bp, synthetic construct
  misc_feature 1..80: note = Synthetic: >HKU2-cand-16030-16109
  source 1..80: mol_type = other DNA
ggcaagcagaaaattactacaatacaaggacctcctggtagtggcaaatcacattgtgttattggtctaggtttgtatta

SEQ ID NO: 9473 - DNA, 80 bp, synthetic construct
  misc_feature 1..80: note = Synthetic: >HKU2-cand-16110-16189
  source 1..80: mol_type = other DNA
ccctagtgcacgtattgtgtttgctgcttgttcacacgctgctgttgattctttatgtcataaagctgctaaagcctaca

SEQ ID NO: 9474 - DNA, 80 bp, synthetic construct
  misc_feature 1..80: note = Synthetic: >HKU2-cand-16190-16269
  source 1..80: mol_type = other DNA
gtgtagacagatgctcacgtattattcctgcacgagcgcgtgttgagtgctatagtggttttaaaccgaataacacctca

SEQ ID NO: 9475 - DNA, 80 bp, synthetic construct
  misc_feature 1..80: note = Synthetic: >HKU2-cand-16270-16349
  source 1..80: mol_type = other DNA
gctcagtacatcttttcaactgttaatgctttaccagaggttaatgccgacattgttgtcattgatgaagtgtctatgtg

SEQ ID NO: 9476 - DNA, 80 bp, synthetic construct
  misc_feature 1..80: note = Synthetic: >HKU2-cand-16350-16429
  source 1..80: mol_type = other DNA
cactaactatgatttgtctattgttaatgctcgtgtggcatataagcacattgtctatgttggtgacccgcagcagttac

SEQ ID NO: 9477 - DNA, 80 bp, synthetic construct
  misc_feature 1..80: note = Synthetic: >HKU2-cand-16430-16509
  source 1..80: mol_type = other DNA
ctgcacccagaaccatgataacgcgtggtgtgttacaacctgaagattataatgttgtcacccagcgtatgtgtggtgta

SEQ ID NO: 9478 - DNA, 80 bp, synthetic construct
  misc_feature 1..80: note = Synthetic: >HKU2-cand-16510-16589
  source 1..80: mol_type = other DNA
ggacctgatgtgtttttgcacaagtgttaccggtgccctgctgaggttgttaacactgtgtctgaacttgtttatgaaaa

SEQ ID NO: 9479 - DNA, 80 bp, synthetic construct
  misc_feature 1..80: note = Synthetic: >HKU2-cand-16590-16669
  source 1..80: mol_type = other DNA
caaattcaaaccagtgaaagaccacagcaaacagtgttttaagatgtttgttaagggtaatgttcagattgataatggct

SEQ ID NO: 9480 - DNA, 80 bp, synthetic construct
  misc_feature 1..80: note = Synthetic: >HKU2-cand-16670-16749
  source 1..80: mol_type = other DNA
ctagtgttaataagaagcagcttgaggtggttaaagcctttatcgcaaagaaccctaaatggagccgcgctgtgtttatc

SEQ ID NO: 9481 - DNA, 80 bp, synthetic construct
  misc_feature 1..80: note = Synthetic: >HKU2-cand-16750-16829
  source 1..80: mol_type = other DNA
tcaccatacaacagtcaaaactatgttgctgggcgtatgttaggtttgcagacacaaaccgtggactctgcgcaaggtag

SEQ ID NO: 9482 - DNA, 80 bp, synthetic construct
  misc_feature 1..80: note = Synthetic: >HKU2-cand-16830-16909
  source 1..80: mol_type = other DNA
cgagtatgactatgttatttatacacagacttctgacacatctcatgcccttaatgttaataggtttaatgttgctatta

SEQ ID NO: 9483 - DNA, 80 bp, synthetic construct
  misc_feature 1..80: note = Synthetic: >HKU2-cand-16910-16989
  source 1..80: mol_type = other DNA
cacgcaccaagattggtattttgtgtattatgtgtgacaaggcactgtatgacacattgaaattttttgagatcagtcaa

SEQ ID NO: 9484 - DNA, 80 bp, synthetic construct
  misc_feature 1..80: note = Synthetic: >HKU2-cand-20800-20879
  source 1..80: mol_type = other DNA
cttgggagctatggatccaccgtaaatggggtgttaactcagttgttactgttagattatgtaggtggtggcagtttatg

SEQ ID NO: 9485 - DNA, 80 bp, synthetic construct
  misc_feature 1..80: note = Synthetic: >HKU2-cand-20880-20959
  source 1..80: mol_type = other DNA
agttttaactctactagccatgcagcagatgctggtcctactaatgcatttgagtgtcttataaatggttcctatcctac

SEQ ID NO: 9486 - DNA, 80 bp, synthetic construct
  misc_feature 1..80: note = Synthetic: >HKU2-cand-20960-21039
  source 1..80: mol_type = other DNA
tcatcgtaacactggttatatgtttggtgttacttggtacaatgatttagttagaatagtttttccacctactgttcttg

SEQ ID NO: 9487 - DNA, 80 bp, synthetic construct
  misc_feature 1..80: note = Synthetic: >HKU2-cand-21040-21119
  source 1..80: mol_type = other DNA
aaatgcagcttgatggtttacagtgggaacgtgtccagtttaatagtcctgttaatgctggacatgctactaggtttaac

SEQ ID NO: 9488 - DNA, 80 bp, synthetic construct
  misc_feature 1..80: note = Synthetic: >HKU2-cand-21120-21199
  source 1..80: mol_type = other DNA
gtcgttaaggacatttctactgttttggttgaaactaacagtggtggctctgtttttagatattcgtattgtgctgatgg

SEQ ID NO: 9489 - DNA, 80 bp, synthetic construct
  misc_feature 1..80: note = Synthetic: >HKU2-cand-21200-21279
  source 1..80: mol_type = other DNA
gtttgttaacggtctgcaatgtaagcttagactatttgatataccccctggtgtttattctaatagtgaggttgaatatc

SEQ ID NO: 9490 - DNA, 80 bp, synthetic construct
  misc_feature 1..80: note = Synthetic: >HKU2-cand-21280-21359
  source 1..80: mol_type = other DNA
ctacagcactatatactgttgtacacaatatgtcagcctgtccagagaggccagatagctattgtggttctaattcgtgc

SEQ ID NO: 9491 - DNA, 80 bp, synthetic construct
  misc_feature 1..80: note = Synthetic: >HKU2-cand-21360-21439
  source 1..80: mol_type = other DNA
ccttttaagcgtgcagtgttttctaattgtattgttaattatactacctgggctatgaacggaattaatccagatgccac

SEQ ID NO: 9492 - DNA, 80 bp, synthetic construct
  misc_feature 1..80: note = Synthetic: >HKU2-cand-21520-21599
  source 1..80: mol_type = other DNA
ttgtaactgatggttgcgttcctggtttcgttcttagagttggtcgtggtaaggctgttaacagaactattgttacacct

SEQ ID NO: 9493 - DNA, 80 bp, synthetic construct
  misc_feature 1..80: note = Synthetic: >HKU2-cand-21600-21679
  source 1..80: mol_type = other DNA
tatctcaagccttatgaatgttttgggtggtcatggaatgacaaccaggatagtatttatgactggtggattgctgattt

SEQ ID NO: 9494 - DNA, 80 bp, synthetic construct
  misc_feature 1..80: note = Synthetic: >HKU2-cand-21680-21759
  source 1..80: mol_type = other DNA
tgtctccactggtgctttcgtttgtgagagtaatcccgaagctcctaagactggggtttgtgtgacatacactgtagaga

SEQ ID NO: 9495 - DNA, 80 bp, synthetic construct
  misc_feature 1..80: note = Synthetic: >HKU2-cand-21920-21999
  source 1..80: mol_type = other DNA
caatcagtcttttgggttgctttatagaagtttcgattgtaatcagcttcatattaaatctgcacgttttgtggaccgtt

SEQ ID NO: 9496 - DNA, 80 bp, synthetic construct
  misc_feature 1..80: note = Synthetic: >HKU31-cand-6710-6789
  source 1..80: mol_type = other DNA
acttcttctatgtgtaaagaatttttaagtcgtacttttgtagccactaagtgtgtaaatagtgttgtatctgcaacagt

SEQ ID NO: 9497 - DNA, 80 bp, synthetic construct
  misc_feature 1..80: note = Synthetic: >HKU31-cand-6790-6869
  source 1..80: mol_type = other DNA
acgaaaattttgttgtaataatagagatatctttatgaaagtatttagttttattaagatgttatgctttataccgctta

SEQ ID NO: 9498 - DNA, 80 bp, synthetic construct
  misc_feature 1..80: note = Synthetic: >HKU31-cand-6870-6949
  source 1..80: mol_type = other DNA
ggcattttaataaacaaaaagagagtatcaatgtggatgttaacgctctttctatagctggtgttgtaacaggcaatgta

SEQ ID NO: 9499 - DNA, 80 bp, synthetic construct
  misc_feature 1..80: note = Synthetic: >HKU31-cand-6950-7029
  source 1..80: mol_type = other DNA
ataaaacagtgttgcagaacaggattttatttgtttaaacaaaagttacgacgtatagattggaaatcatctttgcgttt

SEQ ID NO: 9500 - DNA, 80 bp, synthetic construct
  misc_feature 1..80: note = Synthetic: >HKU31-cand-7030-7109
  source 1..80: mol_type = other DNA
gttactttttatgttaacaactgtggttatgttgttgtctgtgtatcatttgtatgtatttaatgctgtgcttacaagtg

SEQ ID NO: 9501 - DNA, 80 bp, synthetic construct
  misc_feature 1..80: note = Synthetic: >HKU31-cand-7110-7189
  source 1..80: mol_type = other DNA
atgttattaaagaagtaaacacaggtattaaaggtgtctattatagaataagctcctacctaggtgttacttctgtttgt

SEQ ID NO: 9502 - DNA, 80 bp, synthetic construct
  misc_feature 1..80: note = Synthetic: >HKU31-cand-7190-7269
  source 1..80: mol_type = other DNA
gatggattttcaagtagttatcggaatgttagttttaatagagatgattattgtgaaaagtttgggtatgtgtgtcattg

SEQ ID NO: 9503 - DNA, 80 bp, synthetic construct
  misc_feature 1..80: note = Synthetic: >HKU31-cand-7270-7349
  source 1..80: mol_type = other DNA
gtgtctaatgggacaagactcgctcactcagtatagcgcaattcaaatagttcaaaccaatttaagccactatgttttaa

SEQ ID NO: 9504 - DNA, 80 bp, synthetic construct
  misc_feature 1..80: note = Synthetic: >HKU31-cand-7350-7429
  source 1..80: mol_type = other DNA
gcatagattggatgtggttttggatagaattgagcattgcttatttgatgtacacgccagcatttaattgggttttgctt

SEQ ID NO: 9505 - DNA, 80 bp, synthetic construct
  misc_feature 1..80: note = Synthetic: >HKU31-cand-7430-7509
  source 1..80: mol_type = other DNA
gtctgtacattacaatatttctttagccagactagccatattataaattggaggtcttataattttgttatgtctggagt

SEQ ID NO: 9506 - DNA, 80 bp, synthetic construct
  misc_feature 1..80: note = Synthetic: >HKU31-cand-7510-7589
  source 1..80: mol_type = other DNA
ttatttattaaccacatacattcccttgtgtggtcttcttagagtttataatgtgctagccaccctttggtatttgcgta

SEQ ID NO: 9507 - DNA, 80 bp, synthetic construct
  misc_feature 1..80: note = Synthetic: >HKU31-cand-7590-7669
  source 1..80: mol_type = other DNA
ggttttataaccatgtaattaatgggtgtaaagatacagcttgcatgttatgttataagaggaatcgtttaacacgtgtt

SEQ ID NO: 9508 - DNA, 80 bp, synthetic construct
  misc_feature 1..80: note = Synthetic: >HKU31-cand-7670-7749
  source 1..80: mol_type = other DNA
gaagcttctaccgtcgtttgtggtgtgaaacgtacgttttatattacagctaatggcggtatatcattctgcagtagaca

SEQ ID NO: 9509 - DNA, 80 bp, synthetic construct
  misc_feature 1..80: note = Synthetic: >HKU31-cand-7750-7829
  source 1..80: mol_type = other DNA
taattggaattgtgtggattgcgacaccacaggtttagggaacaccttcatctgtgaagaagtcgctaatgatcttacaa

SEQ ID NO: 9510 - DNA, 80 bp, synthetic construct
  misc_feature 1..80: note = Synthetic: >HKU31-cand-7830-7909
  source 1..80: mol_type = other DNA
catctctacgcagacttgttaaacccactgataggtcccattattatgtggaatcagttgaggttaaaaattctgtagta

SEQ ID NO: 9511 - DNA, 80 bp, synthetic construct
  misc_feature 1..80: note = Synthetic: >HKU31-cand-7910-7989
  source 1..80: mol_type = other DNA
cagcttaattatactagagatggtcaactatgctatgagcgagtcccactctgtaactttagtaatatagacaaatttaa

SEQ ID NO: 9512 - DNA, 80 bp, synthetic construct
  misc_feature 1..80: note = Synthetic: >HKU31-cand-14370-14449
  source 1..80: mol_type = other DNA
gactgacgctttagcagctgagacacatagggattgtgatattagtaaaccactcatagaatggtcacttttagattatg

SEQ ID NO: 9513 - DNA, 80 bp, synthetic construct
  misc_feature 1..80: note = Synthetic: >HKU31-cand-14450-14529
  source 1..80: mol_type = other DNA
attttacagattataaattgtgtatgtttgaaaaatatttcaagcattgggatcagccataccatccaaattgtgtgaat

SEQ ID NO: 9514 - DNA, 80 bp, synthetic construct
  misc_feature 1..80: note = Synthetic: >HKU31-cand-14530-14609
  source 1..80: mol_type = other DNA
tgtgctgatgaccgttgtatattacattgtgctaatttcaatgtattgttttcaatgacactacctaaaacatcttttgg

SEQ ID NO: 9515 - DNA, 80 bp, synthetic construct
  misc_feature 1..80: note = Synthetic: >HKU31-cand-14610-14689
  source 1..80: mol_type = other DNA
acctttggtcagaaaagtttatgtagatggagtgccatttgttgtatcttgtggttatcactataaggaattaggattag

SEQ ID NO: 9516 - DNA, 80 bp, synthetic construct
  misc_feature 1..80: note = Synthetic: >HKU31-cand-14690-14769
  source 1..80: mol_type = other DNA
ttatgaatatggatgttaacatgcatagacatagactatcacttaaagagttgatgatgtatgcagctgatccagccatg

SEQ ID NO: 9517 - DNA, 80 bp, synthetic construct
  misc_feature 1..80: note = Synthetic: >HKU31-cand-14770-14849
  source 1..80: mol_type = other DNA
cacgtagcttcttctaatgctttattagatttgaggacatcatgttttagtgtcgcggcattagctacaggtttaacatt

SEQ ID NO: 9518 - DNA, 80 bp, synthetic construct
  misc_feature 1..80: note = Synthetic: >HKU31-cand-14850-14929
  source 1..80: mol_type = other DNA
tcaaaccgtacggccaggcaattttaaccaggatttttatgatttcgtggtctctaaaggattttttaaagaaggttcat

SEQ ID NO: 9519 - DNA, 80 bp, synthetic construct
  misc_feature 1..80: note = Synthetic: >HKU31-cand-14930-15009
  source 1..80: mol_type = other DNA
ctgtgaccttaaagcatttcttctttgctcaagatggacatgctgctattacagattataattattattcttataatctg

SEQ ID NO: 9520 - DNA, 80 bp, synthetic construct
  misc_feature 1..80: note = Synthetic: >HKU31-cand-15010-15089
  source 1..80: mol_type = other DNA
cctactatgtgtgatattaaacaactcttgttttgtttagaagttgttaataagtattttgatatctatgatggtggatg

SEQ ID NO: 9521 - DNA, 80 bp, synthetic construct
  misc_feature 1..80: note = Synthetic: >HKU31-cand-15090-15169
  source 1..80: mol_type = other DNA
cttaaatgcatcagaagtcatagttaataatttagataaaagtgctggctatccttttaataagtttggcaaagcacgtg

SEQ ID NO: 9522 - DNA, 80 bp, synthetic construct
  misc_feature 1..80: note = Synthetic: >HKU31-cand-15170-15249
  source 1..80: mol_type = other DNA
tttattatgagagtatgagtttgcaggaacaagatgagttgtttgcattaacaaagcgaaatgttgttccaactattact

SEQ ID NO: 9523 - DNA, 80 bp, synthetic construct
  misc_feature 1..80: note = Synthetic: >HKU31-cand-15250-15329
  source 1..80: mol_type = other DNA
caaatgaatttaaagtatgctataagtgctaagaatagagctcgcactgttgctggagtttctattcttagtactatgac

SEQ ID NO: 9524 - DNA, 80 bp, synthetic construct
  misc_feature 1..80: note = Synthetic: >HKU31-cand-15330-15409
  source 1..80: mol_type = other DNA
taatcgccaataccatcaaaagatgctcaagtctatggctgccactaggggagctacttgtgtcataggaactactaagt

SEQ ID NO: 9525 - DNA, 80 bp, synthetic construct
  misc_feature 1..80: note = Synthetic: >HKU31-cand-15410-15489
  source 1..80: mol_type = other DNA
tctatggtggttgggattttatgctaaaaacattgtataaagatgttgataatccagaacttatgggttgggattaccct

SEQ ID NO: 9526 - DNA, 80 bp, synthetic construct
  misc_feature 1..80: note = Synthetic: >HKU5-cand-4960-5039
  source 1..80: mol_type = other DNA
ttcttgtaacaatcgatggggttaatttcaggactgctgttctgaataatacaactacttatagggtacagttaggttct

SEQ ID NO: 9527 - DNA, 80 bp, synthetic construct
  misc_feature 1..80: note = Synthetic: >HKU5-cand-5040-5119
  source 1..80: mol_type = other DNA
gtattctataagggttctgacatatcggacaccattcccactgaaaagatgagtggtgaagccgtttacctggctgacaa

SEQ ID NO: 9528 - DNA, 80 bp, synthetic construct
  misc_feature 1..80: note = Synthetic: >HKU5-cand-5120-5199
  source 1..80: mol_type = other DNA
tttgtcagaagctgaaaaggctgtacttagtgaagtctatggaacagctgatgcagcatttctgcacaggtattactccc

SEQ ID NO: 9529 - DNA, 80 bp, synthetic construct
  misc_feature 1..80: note = Synthetic: >HKU5-cand-5200-5279
  source 1..80: mol_type = other DNA
tcttggcactggttaagagatggaagtatacggtgcatgatggtgttaaatcccttaaactcaatagcaacaattgttac

SEQ ID NO: 9530 - DNA, 80 bp, synthetic construct
  misc_feature 1..80: note = Synthetic: >HKU5-cand-5440-5519
  source 1..80: mol_type = other DNA
cctccagactactgcacaccatcctttccaaggctgagcttaccactcaagccaaaatggtttggagacaatggtgcaat

SEQ ID NO: 9531 - DNA, 80 bp, synthetic construct
  misc_feature 1..80: note = Synthetic: >HKU5-cand-5520-5599
  source 1..80: mol_type = other DNA
gtctgtggcgtccaagatactactactacaggcctcaaggcgtgcatttatgtaggaatgaactcactagacgagcttca

SEQ ID NO: 9532 - DNA, 80 bp, synthetic construct
  misc_feature 1..80: note = Synthetic: >HKU5-cand-5680-5759
  source 1..80: mol_type = other DNA
tatcaggacttaatgaagctaaggtaatgacgcccacgtcgcagtcggccggtcctgactatacagcattcaatgtcttt

SEQ ID NO: 9533 - DNA, 80 bp, synthetic construct
  misc_feature 1..80: note = Synthetic: >HKU5-cand-5760-5839
  source 1..80: mol_type = other DNA
caaggtgtagagacctctgtgggtcactacttgcatgtacgcgtgaaggacaacctactatataaatatgactccggtag

SEQ ID NO: 9534 - DNA, 80 bp, synthetic construct
  misc_feature 1..80: note = Synthetic: >HKU5-cand-5840-5919
  source 1..80: mol_type = other DNA
cttgagcaagacttccgatatgaagtgcaagatgaccgatgtctattatcctaagcagaggtatagtgcagactgcaatg

SEQ ID NO: 9535 - DNA, 80 bp, synthetic construct
  misc_feature 1..80: note = Synthetic: >HKU5-cand-6160-6239
  source 1..80: mol_type = other DNA
tgtcaaagaaactcacgtattccttcttcccggatttcgagggagatgtgatccttacagagtattctacttatgacccc

SEQ ID NO: 9536 - DNA, 80 bp, synthetic construct
  misc_feature 1..80: note = Synthetic: >HKU5-cand-10080-10159
  source 1..80: mol_type = other DNA
ctccggaattctattacccaagattcctataatagatacttgtccatgtttaataagtacaagtattattctggtgcgat

SEQ ID NO: 9537 - DNA, 80 bp, synthetic construct
  misc_feature 1..80: note = Synthetic: >HKU5-cand-10160-10239
  source 1..80: mol_type = other DNA
ggacactgcatcctatagagaagcatctgccgcgcatttgtgtaaagctctccaagtctacagcgaaactggtagtgatg

SEQ ID NO: 9538 - DNA, 80 bp, synthetic construct
  misc_feature 1..80: note = Synthetic: >HKU5-cand-10240-10319
  source 1..80: mol_type = other DNA
tcctcttccagccacccaattgcagtgtcacctcaagtgtgttgcagagtggtctggtcaagatggctgctcccagtgga

SEQ ID NO: 9539 - DNA, 80 bp, synthetic construct
  misc_feature 1..80: note = Synthetic: >HKU5-cand-10400-10479
  source 1..80: mol_type = other DNA
tcctcgtcatgttatgtgtcccgctgatcagttatctgaccccaattatgatgctcttcttgtttcaaaaaccaacctta

SEQ ID NO: 9540 - DNA, 80 bp, synthetic construct
  misc_feature 1..80: note = Synthetic: >HKU5-cand-10480-10559
  source 1..80: mol_type = other DNA
gtttcatcgttcaaaagaacgtgggtgcaccagctaacttacgggttgttggacacactatggttggtactctcctaaag

SEQ ID NO: 9541 - DNA, 80 bp, synthetic construct
  misc_feature 1..80: note = Synthetic: >HKU5-cand-10560-10639
  source 1..80: mol_type = other DNA
ttgactgtggaatctgctaacccgcagacacccgcatacacttttaccactgtaaaaccaggagcgtccttcagtgtctt

SEQ ID NO: 9542 - DNA, 80 bp, synthetic construct
  misc_feature 1..80: note = Synthetic: >HKU5-cand-10640-10719
  source 1..80: mol_type = other DNA
agcctgttacaatggcagaccaaccggagtcttcatggtaaatatgcgccagaacagcaccataaaaggatctttcttat

SEQ ID NO: 9543 - DNA, 80 bp, synthetic construct
  misc_feature 1..80: note = Synthetic: >HKU5-cand-10960-11039
  source 1..80: mol_type = other DNA
caaataagactggaatcgctacttttaatgaatgggctatgagtaaccaattcacagagttcattggtacacaatccgta

SEQ ID NO: 9544 - DNA, 80 bp, synthetic construct
  misc_feature 1..80: note = Synthetic: >HKU5-cand-11040-11119
  source 1..80: mol_type = other DNA
gacatgcttgctcataagactggtgtctctgttgagcaactcctttatgctatccagacattacacaaaggtttccaggg

SEQ ID NO: 9545 - DNA, 80 bp, synthetic construct
  misc_feature 1..80: note = Synthetic: >HKU5-cand-11280-11359
  source 1..80: mol_type = other DNA
ctgcaactcaccaagtttactatctggaactacttgtttgaggcgatacccctacaactaactccactaattctgtgtgt

SEQ ID NO: 9546 - DNA, 80 bp, synthetic construct
  misc_feature 1..80: note = Synthetic: >HKU9-cand-7850-7929
  source 1..80: mol_type = other DNA
ggttgggactggaccactgattcgtggaataatctagttccaacctatattaagcaggatacattgagcactctagaagt

SEQ ID NO: 9547 - DNA, 80 bp, synthetic construct
  misc_feature 1..80: note = Synthetic: >HKU9-cand-7930-8009
  source 1..80: mol_type = other DNA
tggtcagtttatgactgctaatgctcgatatgttaatgctaacgtagctaagggcgcagccgttaatttagtgtggcggt

SEQ ID NO: 9548 - DNA, 80 bp, synthetic construct
  misc_feature 1..80: note = Synthetic: >HKU9-cand-8010-8089
  source 1..80: mol_type = other DNA
atgcagattttattaagttgagtgagtctgtgcggcggcaacttcgtgttgctgcacgtaagactggtcttaatttattt

SEQ ID NO: 9549 - DNA, 80 bp, synthetic construct
  misc_feature 1..80: note = Synthetic: >HKU9-cand-8090-8169
  source 1..80: mol_type = other DNA
gttacaacgtctagcctaaaggctgatgtaccttgtatggtgacaccttttaagattataggtggtcataggcgtatagt

SEQ ID NO: 9550 - DNA, 80 bp, synthetic construct
  misc_feature 1..80: note = Synthetic: >HKU9-cand-8170-8249
  source 1..80: mol_type = other DNA
accatggaagcgtgttttattacacgtctttatgttaatggttgtgttaaaccctcagtggtttacaccttggtatataa

SEQ ID NO: 9551 - DNA, 80 bp, synthetic construct
  misc_feature 1..80: note = Synthetic: >HKU9-cand-8250-8329
  source 1..80: mol_type = other DNA
tgaggcctattgattataatgttgtggattttaaagttatagacaatgctgtaataagagatataactcctgcagatcag

SEQ ID NO: 9552 - DNA, 80 bp, synthetic construct
  misc_feature 1..80: note = Synthetic: >HKU9-cand-8330-8409
  source 1..80: mol_type = other DNA
tgctttgctaacaaatttagtgcttttgatgcctggtattctaatagatatggtagttatgttaattcacgtagttgtcc

SEQ ID NO: 9553 - DNA, 80 bp, synthetic construct
  misc_feature 1..80: note = Synthetic: >HKU9-cand-8410-8489
  source 1..80: mol_type = other DNA
tatggtggttggtgttgttagcgacgttgtaggtaatcttgttcctggtttaccggcaagattcctacgcgttggtacta

SEQ ID NO: 9554 - DNA, 80 bp, synthetic construct
  misc_feature 1..80: note = Synthetic: >HKU9-cand-8490-8569
  source 1..80: mol_type = other DNA
cacttttaccattggtcaattacggattaggtgctgtaggtagtgtgtgttacacaccgcaccatgctattaactatgat

SEQ ID NO: 9555 - DNA, 80 bp, synthetic construct
  misc_feature 1..80: note = Synthetic: >HKU9-cand-8570-8649
  source 1..80: mol_type = other DNA
gtttttgaaaccagtgcatgtgtgttagctgccacttgtactctttttgctagtgctaatggtgaacctatgccttattg

SEQ ID NO: 9556 - DNA, 80 bp, synthetic construct
  misc_feature 1..80: note = Synthetic: >HKU9-cand-8650-8729
  source 1..80: mol_type = other DNA
tgcagattcagcattaatacaaaatgctagtcgttatgacacattgaacccacatgtgatgtatccgttttatgaacatg

SEQ ID NO: 9557 - DNA, 80 bp, synthetic construct
  misc_feature 1..80: note = Synthetic: >HKU9-cand-8730-8809
  source 1..80: mol_type = other DNA
ctggttacatacgttttcctgaagttatttcagctggtgttcacatagttaagactatggctatggagtactgtaaagtg

SEQ ID NO: 9558 - DNA, 80 bp, synthetic construct
  misc_feature 1..80: note = Synthetic: >HKU9-cand-8810-8889
  source 1..80: mol_type = other DNA
ggacgttgtgacgtatctgaagcagggttgtgcatgtcgttacaaccccggtgggtcgttaacaatgcctattttagaca

SEQ ID NO: 9559 - DNA, 80 bp, synthetic construct
  misc_feature 1..80: note = Synthetic: >HKU9-cand-8890-8969
  source 1..80: mol_type = other DNA
acagccaggtgtttactgtggtacaagtgcattagatttatttatgaatatgctactgccaatatttacacccgtaggtg

SEQ ID NO: 9560 - DNA, 80 bp, synthetic construct
  misc_feature 1..80: note = Synthetic: >HKU9-cand-8960-9039
  source 1..80: mol_type = other DNA
cccgtaggtgctgttgatataacaacatctatattgatgggtgccttattggctgtagtagtttctatgtctctttatta

SEQ ID NO: 9561 - DNA, 80 bp, synthetic construct
  misc_feature 1..80: note = Synthetic: >HKU9-cand-9040-9119
  source 1..80: mol_type = other DNA
tctgttaagatttagaagagcatttggtgattattcaggagtcatttttactaatattttggcttttgtattgaatgtta

SEQ ID NO: 9562 - DNA, 80 bp, synthetic construct
  misc_feature 1..80: note = Synthetic: >HKU9-cand-11660-11739
  source 1..80: mol_type = other DNA
atattggagaacaattctgttctgcaagctgttgctagtgagtttagtaatttatcctcttatgtggattatgaaaatgc

SEQ ID NO: 9563 - DNA, 80 bp, synthetic construct
  misc_feature 1..80: note = Synthetic: >HKU9-cand-11740-11819
  source 1..80: mol_type = other DNA
tcaaaaggcttatgatacagctgttgccacaggtgcaccagcgtctactgtcaaagctttaaagaaagctatgaatgtag

SEQ ID NO: 9564 - DNA, 80 bp, synthetic construct
  misc_feature 1..80: note = Synthetic: >HKU9-cand-11820-11899
  source 1..80: mol_type = other DNA
ctaagagtgtgctggataaagatgtagccactactcgtaaattagagcgtatgtccgaattggctatgactgctatgtat

SEQ ID NO: 9565 - DNA, 80 bp, synthetic construct
  misc_feature 1..80: note = Synthetic: >HKU9-cand-11900-11979
  source 1..80: mol_type = other DNA
aagcaggctcgagctgaggataggcgctctaaggttacggctgctatgcaaactatgttgttcaatatgatacgtcgtct

SEQ ID NO: 9566 - DNA, 80 bp, synthetic construct
  misc_feature 1..80: note = Synthetic: >HKU9-cand-11980-12059
  source 1..80: mol_type = other DNA
tgatagtgacgctcttagtaacattttgaacaatgcacgtaatggtgttgtaccacttggtgtcatacctaggacagcag

SEQ ID NO: 9567 - DNA, 80 bp, synthetic construct
  misc_feature 1..80: note = Synthetic: >HKU9-cand-12060-12139
  source 1..80: mol_type = other DNA
ctaataagctgttgctagtggtgcccgatttttccgtttatacagcgaccataactatgcctacgcttacctatgcaggt

SEQ ID NO: 9568 - DNA, 80 bp, synthetic construct
  misc_feature 1..80: note = Synthetic: >HKU9-cand-12140-12219
  source 1..80: mol_type = other DNA
agtgcgtgggatgttatgcaggttgcagatgcagatggaaaaactgttaatgcaactgacataacgcgcgagaatagtgt

SEQ ID NO: 9569 - DNA, 80 bp, synthetic construct
  misc_feature 1..80: note = Synthetic: >HKU9-cand-12220-12299
  source 1..80: mol_type = other DNA
taacttggcatggccgttagtagtaacggcgcagcggcagcaggccacatcacctgtcaagttgcagaataatgagctta

SEQ ID NO: 9570 - DNA, 80 bp, synthetic construct
  misc_feature 1..80: note = Synthetic: >HKU9-cand-12300-12379
  source 1..80: mol_type = other DNA
tgcctcagacagttaagcgtatgaatgtagttgctggtgtaagccaaactgcttgtgttacagatgctgtagcatattat

SEQ ID NO: 9571 - DNA, 80 bp, synthetic construct
  misc_feature 1..80: note = Synthetic: >HKU9-cand-12380-12459
  source 1..80: mol_type = other DNA
aatgctacaaaagaaggccgtcatgttatggctattttagctgacacagacggtctagcctttgctaaggttgaaaagtc

SEQ ID NO: 9572 - DNA, 80 bp, synthetic construct
  misc_feature 1..80: note = Synthetic: >HKU9-cand-12460-12539
  source 1..80: mol_type = other DNA
tacaggagatggcttcgtaattttagaattggaaccaccctgtaagtttatggtagatacccctaagggccctgctctta

SEQ ID NO: 9573 - DNA, 80 bp, synthetic construct
  misc_feature 1..80: note = Synthetic: >HKU9-cand-12540-12619
  source 1..80: mol_type = other DNA
agtatttgtattttactaaaggccttaaaaatttgtgtcgtggcacagtattgggcactttggcttgtacagttaggttg

SEQ ID NO: 9574 - DNA, 80 bp, synthetic construct
  misc_feature 1..80: note = Synthetic: >HKU9-cand-12620-12699
  source 1..80: mol_type = other DNA
catgcgggctcagctacagaagttgcaagtaactcatctattttatccttatgtgcttttagtgtagacccagaagctac

SEQ ID NO: 9575 - DNA, 80 bp, synthetic construct
  misc_feature 1..80: note = Synthetic: >HKU9-cand-12700-12779
  source 1..80: mol_type = other DNA
atataaggattatttagataatggcggttcccctataggtaactgcgttaagatgctaactccccatactggtactggct

SEQ ID NO: 9576 - DNA, 80 bp, synthetic construct
  misc_feature 1..80: note = Synthetic: >HKU9-cand-12780-12859
  source 1..80: mol_type = other DNA
tggctattacagctaaacctgatgccaatatagaccaagagtcctttggaggtgcatcatgctgtttgtattgtagatgt

SEQ ID NO: 9577 - DNA, 80 bp, synthetic construct
  misc_feature 1..80: note = Synthetic: >HKU9-cand-12860-12939
  source 1..80: mol_type = other DNA
catatagagcatcccggtgcaagtggtgtgtgtaaatataagggcaagttcgtacaaataccactagtaggtgttaatga

SEQ ID NO: 9578 - DNA, 80 bp, synthetic construct
  misc_feature 1..80: note = Synthetic: >HKU9-cand-15520-15599
  source 1..80: mol_type = other DNA
tacttgccatatccagatccttctagaatattgggagctggttgttttgtggatgacttgctgaagactgatggtactct

SEQ ID NO: 9579 - DNA, 80 bp, synthetic construct
  misc_feature 1..80: note = Synthetic: >HKU9-cand-15600-15679
  source 1..80: mol_type = other DNA
tatgatggagcgatatgtgtcacttgctattgatgcatatccacttacgaagcattccgatcctgagtaccaaaatgttt

SEQ ID NO: 9580 - DNA, 80 bp, synthetic construct
  misc_feature 1..80: note = Synthetic: >HKU9-cand-15680-15759
  source 1..80: mol_type = other DNA
tctggtgttatctgcaatatataaagaagttacatgaggagttaacaggtcatttattagacacatatagtgtcatgttg

SEQ ID NO: 9581 - DNA, 80 bp, synthetic construct
  misc_feature 1..80: note = Synthetic: >HKU9-cand-15760-15839
  source 1..80: mol_type = other DNA
gctagtgataacgcttctaagtactgggaggtagatttctatgaaaatatgtacatggaatctgccactttacagagtgt

SEQ ID NO: 9582 - DNA, 80 bp, synthetic construct
  misc_feature 1..80: note = Synthetic: >HKU9-cand-15840-15919
  source 1..80: mol_type = other DNA
aggtacatgtgtcgtgtgtaattcacaaacatctttaaggtgtggtggttgcatacgtagacctttcctctgctgtaaat

SEQ ID NO: 9583 - DNA, 80 bp, synthetic construct
  misc_feature 1..80: note = Synthetic: >HKU9-cand-15920-15999
  source 1..80: mol_type = other DNA
gttgttacgaccatgtggtgtccactacacacaagttagtgttgtctgtgacaccatatgtttgtaaccaccctagttgt

SEQ ID NO: 9584 - DNA, 80 bp, synthetic construct
  misc_feature 1..80: note = Synthetic: >HKU9-cand-16000-16079
  source 1..80: mol_type = other DNA
gatgttgcagatgtaacccaattgtatttgggtggcatgtcttattattgtagagaacataggccgcctatatcattccc

SEQ ID NO: 9585 - DNA, 80 bp, synthetic construct
  misc_feature 1..80: note = Synthetic: >HKU9-cand-16080-16159
  source 1..80: mol_type = other DNA
tttatgtgcgaatggtcaggtgtttggtctctacaagaatatatgtactggtagtccagatgtagctgactttaatagtc

SEQ ID NO: 9586 - DNA, 80 bp, synthetic construct
  misc_feature 1..80: note = Synthetic: >HKU9-cand-16160-16239
  source 1..80: mol_type = other DNA
tagctacttgtgattggagtaacagtaaggattatgtcttagccaatacagccactgagcgcttgaagctttttgccgct

SEQ ID NO: 9587 - DNA, 80 bp, synthetic construct
  misc_feature 1..80: note = Synthetic: >HKU9-cand-16240-16319
  source 1..80: mol_type = other DNA
gagacactacgtgctaccgaagaaaatgctaaacaagcatatgcttctgcagttgttaaggaggttcttagtgataggga

SEQ ID NO: 9588 - DNA, 80 bp, synthetic construct
  misc_feature 1..80: note = Synthetic: >HKU9-cand-16320-16399
  source 1..80: mol_type = other DNA
acttgtcctttcatgggagacaggtaaaacccgccctcccctaaatagaaattatgtattcacggggtttcacattacta

SEQ ID NO: 9589 - DNA, 80 bp, synthetic construct
  misc_feature 1..80: note = Synthetic: >HKU9-cand-16400-16479
  source 1..80: mol_type = other DNA
agaatagtaaggtgcaactaggtgaatacatttttgagaaaggtgactacggtgacgtagttaactatcgttccagtaca

SEQ ID NO: 9590 - DNA, 80 bp, synthetic construct
  misc_feature 1..80: note = Synthetic: >HKU9-cand-16480-16559
  source 1..80: mol_type = other DNA
acttataaattacaggttggtgattactttgtgcttacatcacattcggtgcaaccacttagttcacctactttacttcc

SEQ ID NO: 9591 - DNA, 80 bp, synthetic construct
  misc_feature 1..80: note = Synthetic: >HKU9-cand-16560-16639
  source 1..80: mol_type = other DNA
acaggagcgttacactaagctagtaggtttgtatccagctatgaatgtaccagagagttttgttagtaatgttgtacatt

SEQ ID NO: 9592 - DNA, 80 bp, synthetic construct
  misc_feature 1..80: note = Synthetic: >HKU9-cand-16640-16719
  source 1..80: mol_type = other DNA
accaacgtgttggtatgtcgcgttacaccaccgtacaaggcccaccaggtacgggtaagagccacttgtccataggactt

SEQ ID NO: 9593 - DNA, 80 bp, synthetic construct
  misc_feature 1..80: note = Synthetic: >HKU9-cand-16720-16799
  source 1..80: mol_type = other DNA
gcgctctattacccatctgctaaaattgtttacacagcatgtagtcatgctgctgtggacgcattgtgtgagaaggccca

SEQ ID NO: 9594 - DNA, 80 bp, synthetic construct
  misc_feature 1..80: note = Synthetic: >MERS-cand-560-639
  source 1..80: mol_type = other DNA
cttgtgaaaatccattcatggttaaccaattggcttatagctctagtgcaaatggcagcctggttggcacaactttgcag

SEQ ID NO: 9595 - DNA, 80 bp, synthetic construct
  misc_feature 1..80: note = Synthetic: >MERS-cand-640-719
  source 1..80: mol_type = other DNA
ggcaagcctattggtatgttcttcccttatgacatcgaacttgtcacaggaaagcaaaatattctcctgcgcaagtatgg

SEQ ID NO: 9596 - DNA, 80 bp, synthetic construct
  misc_feature 1..80: note = Synthetic: >MERS-cand-720-799
  source 1..80: mol_type = other DNA
ccgtggtggttatcactacaccccattccactatgagcgagacaacacctcttgccctgagtggatggacgattttgagg

SEQ ID NO: 9597 - DNA, 80 bp, synthetic construct
  misc_feature 1..80: note = Synthetic: >MERS-cand-800-879
  source 1..80: mol_type = other DNA
cggatcctaaaggcaaatatgcccagaatctgcttaagaagttgattggcggtgatgtcactccagttgaccaatacatg

SEQ ID NO: 9598 - DNA, 80 bp, synthetic construct
  misc_feature 1..80: note = Synthetic: >MERS-cand-880-959
  source 1..80: mol_type = other DNA
tgtggcgttgatggaaaacccattagtgcctacgcatttttaatggccaaggatggaataaccaaactggctgatgttga

SEQ ID NO: 9599 - DNA, 80 bp, synthetic construct
  misc_feature 1..80: note = Synthetic: >MERS-cand-960-1039
  source 1..80: mol_type = other DNA
agcggacgtcgcagcacgtgctgatgacgaaggcttcatcacattaaagaacaatctatatagattggtttggcatgttg

SEQ ID NO: 9600 - DNA, 80 bp, synthetic construct
  misc_feature 1..80: note = Synthetic: >MERS-cand-1040-1119
  source 1..80: mol_type = other DNA
agcgtaaagacgttccatatcctaagcaatctatttttactattaatagtgtggtccaaaaggatggtgttgaaaacact

SEQ ID NO: 9601 - DNA, 80 bp, synthetic construct
  misc_feature 1..80: note = Synthetic: >MERS-cand-1120-1199
  source 1..80: mol_type = other DNA
cctcctcactattttactcttggatgcaaaattttaacgctcaccccacgcaacaagtggagtggcgtttctgacttgtc

SEQ ID NO: 9602 - DNA, 80 bp, synthetic construct
  misc_feature 1..80: note = Synthetic: >MERS-cand-1200-1279
  source 1..80: mol_type = other DNA
cctcaaacaaaaactcctttacaccttctatggtaaggagtcacttgagaacccaacctacatttaccactccgcattca

SEQ ID NO: 9603 - DNA, 80 bp, synthetic construct
  misc_feature 1..80: note = Synthetic: >MERS-cand-1280-1359
  source 1..80: mol_type = other DNA
ttgagtgtggaagttgtggtaatgattcctggcttacagggaatgctatccaagggtttgcctgtggatgtggggcatca

SEQ ID NO: 9604 - DNA, 80 bp, synthetic construct
  misc_feature 1..80: note = Synthetic: >MERS-cand-1360-1439
  source 1..80: mol_type = other DNA
tatacagctaatgatgtcgaagtccaatcatctggcatgattaagccaaatgctcttctttgtgctacttgcccctttgc

SEQ ID NO: 9605 - DNA, 80 bp, synthetic construct
  misc_feature 1..80: note = Synthetic: >MERS-cand-1440-1519
  source 1..80: mol_type = other DNA
taagggtgacagctgttcttctaattgcaaacattcagttgctcagttggttagttacctttctgaacgctgtaatgtta

SEQ ID NO: 9606 - DNA, 80 bp, synthetic construct
  misc_feature 1..80: note = Synthetic: >MERS-cand-1520-1599
  source 1..80: mol_type = other DNA
ttgctgattctaagtccttcacacttatctttggtggcgtagcttacgcctactttggatgtgaggaaggtactatgtac

SEQ ID NO: 9607 - DNA, 80 bp, synthetic construct
  misc_feature 1..80: note = Synthetic: >MERS-cand-1600-1679
  source 1..80: mol_type = other DNA
tttgtgcctagagctaagtctgttgtctcaaggattggagactccatctttacaggctgtactggctcttggaacaaggt

SEQ ID NO: 9608 - DNA, 80 bp, synthetic construct
  misc_feature 1..80: note = Synthetic: >MERS-cand-1680-1759
  source 1..80: mol_type = other DNA
cactcaaattgctaacatgttcttggaacagactcagcattcccttaactttgtgggagagttcgttgtcaacgatgttg

SEQ ID NO: 9609 - DNA, 80 bp, synthetic construct
  misc_feature 1..80: note = Synthetic: >MERS-cand-1760-1839
  source 1..80: mol_type = other DNA
tcctcgcaattctctctggaaccacaactaatgttgacaaaatacgccagcttctcaaaggtgtcaccattgacaagttg

SEQ ID NO: 9610 - DNA, 80 bp, synthetic construct
  misc_feature 1..80: note = Synthetic: >NL63-cand-24640-24719
  source 1..80: mol_type = other DNA
atcttaaacctgttactacacttagtactatcactgcttatttgttagttagtttgtttgtcacttattttgctttattc

SEQ ID NO: 9611 - DNA, 80 bp, synthetic construct
  misc_feature 1..80: note = Synthetic: >NL63-cand-24720-24799
  source 1..80: mol_type = other DNA
aaacctcttactgctagaggtcgtgttgcttgttttgttttaaaactattgacactatttgtctatgtgcctttattggt

SEQ ID NO: 9612 - DNA, 80 bp, synthetic construct
  misc_feature 1..80: note = Synthetic: >NL63-cand-24800-24879
  source 1..80: mol_type = other DNA
tctttttggtatgtatcttgacagttttataattttttctacgctgttgtttcgattcatacatgttggctattatgcct

SEQ ID NO: 9613 - DNA, 80 bp, synthetic construct
  misc_feature 1..80: note = Synthetic: >NL63-cand-24880-24959
  source 1..80: mol_type = other DNA
atctctataaaaatttttcatttgttttgttcaatgttactaaactatgcttcgtttcaggcaagtgttggtatcttgaa

SEQ ID NO: 9614 - DNA, 80 bp, synthetic construct
  misc_feature 1..80: note = Synthetic: >NL63-cand-24960-25039
  source 1..80: mol_type = other DNA
caatcattttatgaaaatcgttttgctgctatttatggtggtgaccactatgtcgttttaggtggtgaaactattacttt

SEQ ID NO: 9615 - DNA, 80 bp, synthetic construct
  misc_feature 1..80: note = Synthetic: >NL63-cand-25040-25119
  source 1..80: mol_type = other DNA
tgtttcttttgatgacctttatgttgctattagaggttcttgtgaaaagaacctacaacttatgcgtaaggttgacttgt

SEQ ID NO: 9616 - DNA, 80 bp, synthetic construct
  misc_feature 1..80: note = Synthetic: >NL63-cand-25120-25199
  source 1..80: mol_type = other DNA
ataatggtgctgtcatttacatttttgccgaagagcctgttgttggtatagtctactcttctcaactatacgaagatgtt

SEQ ID NO: 9617 - DNA, 80 bp, synthetic construct
  misc_feature 1..80: note = Synthetic: >NL63-cand-25200-25279
  source 1..80: mol_type = other DNA
ccttcgattaattgatgacaatggcattgtcctcaattccattttatggctccttgttatgatatttttctttgtgttgg

SEQ ID NO: 9618 - DNA, 80 bp, synthetic construct
  misc_feature 1..80: note = Synthetic: >NL63-cand-25280-25359
  source 1..80: mol_type = other DNA
caatgacctttattaaactgattcaattgtgttttacttgtcattatttttttagtaggacattatatcaaccagtttat

SEQ ID NO: 9619 - DNA, 80 bp, synthetic construct
  misc_feature 1..80: note = Synthetic: >NL63-cand-25360-25439
  source 1..80: mol_type = other DNA
aaaatttttcttgcttaccaagattatatgcaaatagcacctgttccagctgaagtactaaatgtctaaactaaacgatg

SEQ ID NO: 9620 - DNA, 80 bp, synthetic construct
  misc_feature 1..80: note = Synthetic: >NL63-cand-25440-25519
  source 1..80: mol_type = other DNA
tctaatagtagtgtgcctctttcagaggtttatgtccatttacgtaactggaactttagttggaatttaattctaacgct

SEQ ID NO: 9621 - DNA, 80 bp, synthetic construct
  misc_feature 1..80: note = Synthetic: >NL63-cand-25520-25599
  source 1..80: mol_type = other DNA
ttttatagttgtgttgcagtatgggcattataagtatagcagacttctttatggtttaaagatgtctgttttatggtgtt

SEQ ID NO: 9622 - DNA, 80 bp, synthetic construct
  misc_feature 1..80: note = Synthetic: >NL63-cand-25600-25679
  source 1..80: mol_type = other DNA
tatggccacttgttctagctttgtctatttttgactgttttgtcaattttaatgtggactgggtcttttttggttttagt

SEQ ID NO: 9623 - DNA, 80 bp, synthetic construct
  misc_feature 1..80: note = Synthetic: >NL63-cand-25680-25759
  source 1..80: mol_type = other DNA
attcttatgtctattattacactttgtttatgggttatgtattttgttaatagtttcagactttggcgccgtgttaaaac

SEQ ID NO: 9624 - DNA, 80 bp, synthetic construct
  misc_feature 1..80: note = Synthetic: >NL63-cand-25760-25839
  source 1..80: mol_type = other DNA
tttttgggcttttaatcctgaaactaatgcaatcatctctctccaggtttacggacataattattacttaccggtgatgg

SEQ ID NO: 9625 - DNA, 80 bp, synthetic construct
  misc_feature 1..80: note = Synthetic: >NL63-cand-25840-25919
  source 1..80: mol_type = other DNA
ctgcacctacaggtgttacattaacacttcttagtggtgtacttcttgttgatggccataagattgctactcgtgttcaa

SEQ ID NO: 9626 - DNA, 80 bp, synthetic construct
  misc_feature 1..80: note = Synthetic: >PEDV-cand-970-1049
  source 1..80: mol_type = other DNA
agcgatgctcgttctatcattaagagaccagtgttcctccacgcttttgttaagtgtaagtgtggtagttatcattggac

SEQ ID NO: 9627 - DNA, 80 bp, synthetic construct
  misc_feature 1..80: note = Synthetic: >PEDV-cand-1050-1129
  source 1..80: mol_type = other DNA
tgttggtgattggacttcctatgtctccacttgctgtggctttaagtgtaagccagtccttgtggcttcatgctctgcta

SEQ ID NO: 9628 - DNA, 80 bp, synthetic construct
  misc_feature 1..80: note = Synthetic: >PEDV-cand-1140-1219
  source 1..80: mol_type = other DNA
tgttgtggttacgcgcgctggtgctggcactggtgttaagtattacaacaacatgttcctgcgccatgtggcagacattg

SEQ ID NO: 9629 - DNA, 80 bp, synthetic construct
  misc_feature 1..80: note = Synthetic: >PEDV-cand-1220-1299
  source 1..80: mol_type = other DNA
atgggttggcattctggcgaattctcaaggtgcagtccaaagacgacctcgcttgctctggtaaattccttgaacaccat

SEQ ID NO: 9630 - DNA, 80 bp, synthetic construct
  misc_feature 1..80: note = Synthetic: >PEDV-cand-1300-1379
  source 1..80: mol_type = other DNA
gaggaaggtttcacagatccttgctactttttgaatgactcgagcattgctactaagctcaagtttgacatccttagtgg

SEQ ID NO: 9631 - DNA, 80 bp, synthetic construct
  misc_feature 1..80: note = Synthetic: >PEDV-cand-1380-1459
  source 1..80: mol_type = other DNA
caagttttctgatgaagtcaaacaagctatctttgctggtcatgttgttgttggcagcgcgctcgttgacattgttgacg

SEQ ID NO: 9632 - DNA, 80 bp, synthetic construct
  misc_feature 1..80: note = Synthetic: >PEDV-cand-1460-1539
  source 1..80: mol_type = other DNA
atgcactgggacagccttggtttatacgtaagcttggtgaccttgcaagtgcagcttgggagcagcttaaggctgtcgtt

SEQ ID NO: 9633 - DNA, 80 bp, synthetic construct
  misc_feature 1..80: note = Synthetic: >PEDV-cand-1540-1619
  source 1..80: mol_type = other DNA
agaggccttaacctcctgtctgatgaggtcgtgctctttggcaaaagacttagctgtgccactcttagtatcgttaacgg

SEQ ID NO: 9634 - DNA, 80 bp, synthetic construct
  misc_feature 1..80: note = Synthetic: >PEDV-cand-1620-1699
  source 1..80: mol_type = other DNA
tgtttttgagttcatcgccgaagtgcctgagaagttggctgcggctgttacagtttttgtcaacttcttgaatgagcttt

SEQ ID NO: 9635 - DNA, 80 bp, synthetic construct
  misc_feature 1..80: note = Synthetic: >PEDV-cand-1700-1779
  source 1..80: mol_type = other DNA
ttgagtctgcctgtgactgcttaaaggtcggaggtaaaacctttaacaaggttggctcttatgttctttttgacaacgca

SEQ ID NO: 9636 - DNA, 80 bp, synthetic construct
  misc_feature 1..80: note = Synthetic: >PEDV-cand-1780-1859
  source 1..80: mol_type = other DNA
ttggttaagcttgtcaaggcaaaagttcgcggcccacgacaggcaggtgtttgtgaagttcgttacacaagccttgttat

SEQ ID NO: 9637 - DNA, 80 bp, synthetic construct
  misc_feature 1..80: note = Synthetic: >PEDV-cand-1860-1939
  source 1..80: mol_type = other DNA
tgggagtactaccaaggtggtttccaagcgcgttgaaaatgccaatgtgaatctcgtcgtcgttgacgaggatgtgaccc

SEQ ID NO: 9638 - DNA, 80 bp, synthetic construct
  misc_feature 1..80: note = Synthetic: >PEDV-cand-1940-2019
  source 1..80: mol_type = other DNA
tcaacaccactggtcgtacagttgttgttgacggacttgcattcttcgagagtgacgggttttacagacatcttgctgat

SEQ ID NO: 9639 - DNA, 80 bp, synthetic construct
  misc_feature 1..80: note = Synthetic: >PEDV-cand-2020-2099
  source 1..80: mol_type = other DNA
gctgacgttgtcattgaacatcctgtttataagtctgcttgtgagctcaagccagtttttgagtgtgacccaatacctga

SEQ ID NO: 9640 - DNA, 80 bp, synthetic construct
  misc_feature 1..80: note = Synthetic: >PEDV-cand-2100-2179
  source 1..80: mol_type = other DNA
ttttcctatgcctgtggccgctagtgttgcagagctttgtgtgcaaactgatctgttgcttaaaaattacaacactcctt

SEQ ID NO: 9641 - DNA, 80 bp, synthetic construct
  misc_feature 1..80: note = Synthetic: >PEDV-cand-2180-2259
  source 1..80: mol_type = other DNA
ataaaacttacagctgcgttgtgagaggtgataagtgttgcatcacttgcaccttacatttcacagcaccaagttatatg

SEQ ID NO: 9642 - DNA, 80 bp, synthetic construct
  misc_feature 1..80: note = Synthetic: >SARSCoV-cand-4940-5019
  source 1..80: mol_type = other DNA
acacagcttgtggatatgtctatgacatatggacagcagtttggtccaacatacttggatggtgctgatgttacaaaaat

SEQ ID NO: 9643 - DNA, 80 bp, synthetic construct
  misc_feature 1..80: note = Synthetic: >SARSCoV-cand-5020-5099
  source 1..80: mol_type = other DNA
taaacctcatgtaaatcatgagggtaagactttctttgtactacctagtgatgacacactacgtagtgaagctttcgagt

SEQ ID NO: 9644 - DNA, 80 bp, synthetic construct
  misc_feature 1..80: note = Synthetic: >SARSCoV-cand-5100-5179
  source 1..80: mol_type = other DNA
actaccatactcttgatgagagttttcttggtaggtacatgtctgctttaaaccacacaaagaaatggaaatttcctcaa

SEQ ID NO: 9645 - DNA, 80 bp, synthetic construct
  misc_feature 1..80: note = Synthetic: >SARSCoV-cand-5180-5259
  source 1..80: mol_type = other DNA
gttggtggtttaacttcaattaaatgggctgataacaattgttatttgtctagtgttttattagcacttcaacagcttga

SEQ ID NO: 9646 - DNA, 80 bp, synthetic construct
  misc_feature 1..80: note = Synthetic: >SARSCoV-cand-5260-5339
  source 1..80: mol_type = other DNA
agtcaaattcaatgcaccagcacttcaagaggcttattatagagcccgtgctggtgatgctgctaacttttgtgcactca

SEQ ID NO: 9647 - DNA, 80 bp, synthetic construct
  misc_feature 1..80: note = Synthetic: >SARSCoV-cand-5340-5419
  source 1..80: mol_type = other DNA
tactcgcttacagtaataaaactgttggcgagcttggtgatgtcagagaaactatgacccatcttctacagcatgctaat

SEQ ID NO: 9648 - DNA, 80 bp, synthetic construct
  misc_feature 1..80: note = Synthetic: >SARSCoV-cand-5420-5499
  source 1..80: mol_type = other DNA
ttggaatctgcaaagcgagttcttaatgtggtgtgtaaacattgtggtcagaaaactactaccttaacgggtgtagaagc

SEQ ID NO: 9649 - DNA, 80 bp, synthetic construct
  misc_feature 1..80: note = Synthetic: >SARSCoV-cand-5500-5579
  source 1..80: mol_type = other DNA
tgtgatgtatatgggtactctatcttatgataatcttaagacaggtgtttccattccatgtgtgtgtggtcgtgatgcta

SEQ ID NO: 9650 - DNA, 80 bp, synthetic construct
  misc_feature 1..80: note = Synthetic: >SARSCoV-cand-5580-5659
  source 1..80: mol_type = other DNA
cacaatatctagtacaacaagagtcttcttttgttatgatgtctgcaccacctgctgagtataaattacagcaaggtaca

SEQ ID NO: 9651 - DNA, 80 bp, synthetic construct
  misc_feature 1..80: note = Synthetic: >SARSCoV-cand-5660-5739
  source 1..80: mol_type = other DNA
ttcttatgtgcgaatgagtacactggtaactatcagtgtggtcattacactcatataactgctaaggagaccctctatcg

SEQ ID NO: 9652 - DNA, 80 bp, synthetic construct
  misc_feature 1..80: note = Synthetic: >SARSCoV-cand-5740-5819
  source 1..80: mol_type = other DNA
tattgacggagctcaccttacaaagatgtcagagtacaaaggaccagtgactgatgttttctacaaggaaacatcttaca

SEQ ID NO: 9653 - DNA, 80 bp, synthetic construct
  misc_feature 1..80: note = Synthetic: >SARSCoV-cand-5820-5899
  source 1..80: mol_type = other DNA
ctacaaccatcaagcctgtgtcgtataaactcgatggagttacttacacagagattgaaccaaaattggatgggtattat

SEQ ID NO: 9654 - DNA, 80 bp, synthetic construct
  misc_feature 1..80: note = Synthetic: >SARSCoV-cand-5900-5979
  source 1..80: mol_type = other DNA
aaaaaggataatgcttactatacagagcagcctatagaccttgtaccaactcaaccattaccaaatgcgagttttgataa

SEQ ID NO: 9655 - DNA, 80 bp, synthetic construct
  misc_feature 1..80: note = Synthetic: >SARSCoV-cand-5980-6059
  source 1..80: mol_type = other DNA
tttcaaactcacatgttctaacacaaaatttgctgatgatttaaatcaaatgacaggcttcacaaagccagcttcacgag

SEQ ID NO: 9656 - DNA, 80 bp, synthetic construct
  misc_feature 1..80: note = Synthetic: >SARSCoV-cand-6060-6139
  source 1..80: mol_type = other DNA
agctatctgtcacattcttcccagacttgaatggcgatgtagtggctattgactatagacactattcagcgagtttcaag

SEQ ID NO: 9657 - DNA, 80 bp, synthetic construct
  misc_feature 1..80: note = Synthetic: >SARSCoV-cand-6140-6219
  source 1..80: mol_type = other DNA
aaaggtgctaaattactgcataagccaattgtttggcacattaaccaggctacaaccaagacaacgttcaaaccaaacac

SEQ ID NO: 9658 - DNA, 80 bp, synthetic construct
  misc_feature 1..80: note = Synthetic: >Shrew-cand-23380-23459
  source 1..80: mol_type = other DNA
tgtttttaattgtgtttataaagtgttgtaagtgtgtgtttttaacacaccgtgccttgaacgctactgtctataggcca

SEQ ID NO: 9659 - DNA, 80 bp, synthetic construct
  misc_feature 1..80: note = Synthetic: >Shrew-cand-23460-23539
  source 1..80: mol_type = other DNA
gtggctaaattttatagacagtatcaagagtttatgcatattgagcctttgtctgaagatattgtctaaaaactaaacaa

SEQ ID NO: 9660 - DNA, 80 bp, synthetic construct
  misc_feature 1..80: note = Synthetic: >Shrew-cand-23540-23619
  source 1..80: mol_type = other DNA
aatgtctaatagtagtggaaatataacattatctgtgagtgaactcacgcaacatttgaccaattggtcatttagttgga

SEQ ID NO: 9661 - DNA, 80 bp, synthetic construct
  misc_feature 1..80: note = Synthetic: >Shrew-cand-23620-23699
  source 1..80: mol_type = other DNA
atataattctaactgtaatgatcattgtgttgcagtatggttttattaaatatggaagggttgtttatgcattgaaaatg

SEQ ID NO: 9662 - DNA, 80 bp, synthetic construct
  misc_feature 1..80: note = Synthetic: >Shrew-cand-23700-23779
  source 1..80: mol_type = other DNA
tttgtgctgtggcttttatggccattggttttggcattgagtatattcaatgctattgtaagcttgaattatagctatgt

SEQ ID NO: 9663 - DNA, 80 bp, synthetic construct
  misc_feature 1..80: note = Synthetic: >Shrew-cand-23780-23859
  source 1..80: mol_type = other DNA
aatgtttgccttctgtattgtattgatttgtgtgacatttgggttgtggttggcatactttgtaaacagcattaaattgt

SEQ ID NO: 9664 - DNA, 80 bp, synthetic construct
  misc_feature 1..80: note = Synthetic: >Shrew-cand-23860-23939
  source 1..80: mol_type = other DNA
acagaagaacgcatagtccttggtcttttgatccatccactaatgcggtcctgtgcttttctgtgcttggaagaagtcat

SEQ ID NO: 9665 - DNA, 80 bp, synthetic construct
  misc_feature 1..80: note = Synthetic: >Shrew-cand-23940-24019
  source 1..80: mol_type = other DNA
gccattccagtgccaaccgtgccaaccggaatcactttaactctgttgtctggacaattgaatgttgaaggaattccaat

SEQ ID NO: 9666 - DNA, 80 bp, synthetic construct
  misc_feature 1..80: note = Synthetic: >Shrew-cand-24020-24099
  source 1..80: mol_type = other DNA
ttgtaatggtttgaattttcatgatatgcctgagttcattagtgttgccaaacctaatgttacaattctttatgaagtga

SEQ ID NO: 9667 - DNA, 80 bp, synthetic construct
  misc_feature 1..80: note = Synthetic: >Shrew-cand-24100-24179
  source 1..80: mol_type = other DNA
gatcaagaaaaggcaatacgaatacaaaaactggttgggtttattatgttaggagtaaacatggagattattccgcatat

SEQ ID NO: 9668 - DNA, 80 bp, synthetic construct
  misc_feature 1..80: note = Synthetic: >Shrew-cand-24180-24259
  source 1..80: mol_type = other DNA
agatctcaaccaacattgaataatgacgatttaattctacatttagcctaaacgatgtctgccgaaaaagtaagctggag

SEQ ID NO: 9669 - DNA, 80 bp, synthetic construct
  misc_feature 1..80: note = Synthetic: >Shrew-cand-24260-24339
  source 1..80: mol_type = other DNA
cagtagtctccctactaaggctgatactaaaaatggatctaaggtagaagttgaattgtctgcatgggacccaataatta

SEQ ID NO: 9670 - DNA, 80 bp, synthetic construct
  misc_feature 1..80: note = Synthetic: >Shrew-cand-24340-24419
  source 1..80: mol_type = other DNA
tacagaataataaaaatattcaagatgttttgcccaggacttcagttccaaaaggattgccgtctggacatgaaattggc

SEQ ID NO: 9671 - DNA, 80 bp, synthetic construct
  misc_feature 1..80: note = Synthetic: >Shrew-cand-24420-24499
  source 1..80: mol_type = other DNA
tattggtacaaaggacctgaaagataccgctttactaggggtgaaaaagtgcctctagatcctaaatggtatttttatcc

SEQ ID NO: 9672 - DNA, 80 bp, synthetic construct
  misc_feature 1..80: note = Synthetic: >Shrew-cand-24500-24579
  source 1..80: mol_type = other DNA
tttaggccatggacctgctgctaataaaaaatggaattctaaagtagaaggtgtattctgggttgcaagagatggagcat

SEQ ID NO: 9673 - DNA, 80 bp, synthetic construct
  misc_feature 1..80: note = Synthetic: >Shrew-cand-24580-24659
  source 1..80: mol_type = other DNA
ccattgaaaaagttccagattttgaaccaagaaagaaaggtgccgaagcaaagcgtgtgcgtttgcctggaaaagcccct

SEQ ID NO: 9674 - DNA, 80 bp, synthetic construct
  misc_feature 1..80: note = Synthetic: >BtSk_AlphaCoV-cand-17170-17249
  source 1..80: mol_type = other DNA
aaagattgttataaaggtgaagataaccttccaccatcacatgcacctacgtttatgtctctgtctgacaattttaaaac

SEQ ID NO: 9675 - DNA, 80 bp, synthetic construct
  misc_feature 1..80: note = Synthetic: >Sk512R-cand-17200-17279
  source 1..80: mol_type = other DNA
cggtctttttaaagattgttataaaggtgaagataaccttccaccatcacatgcacctacgtttatgtctctgtctgaca

SEQ ID NO: 9676 - DNA, 80 bp, synthetic construct
  misc_feature 1..80: note = Synthetic: >AlphaSp-cand-17220-17299
  source 1..80: mol_type = other DNA
gattgttataaaggtgaagataacctaccaccatcacatgcacccacgtttatgtctctgtctgacaattttaaaacaga

SEQ ID NO: 9677 - DNA, 80 bp, synthetic construct
  misc_feature 1..80: note = Synthetic: >SARSRC-cand-27540-27619
  source 1..80: mol_type = other DNA
atactttgcttcaccattaagagaaagacagaatgagtgagctcactttaattgacttctatttgtgctttttagccttt

SEQ ID NO: 9678 - DNA, 80 bp, synthetic construct
  misc_feature 1..80: note = Synthetic: >SARSCoV-cand-27660-27739
  source 1..80: mol_type = other DNA
cttcaccattaagagaaagacagaatgaatgagctcactttaattgacttctatttgtgctttttagcctttctgctatt

SEQ ID NO: 9679 - DNA, 80 bp, synthetic construct
  misc_feature 1..80: note = Synthetic: >BtRl_BetaCoV-cand-27530-27609
  source 1..80: mol_type = other DNA
accattaagagaaagacagaatgaatgagctcaccttaattgacttctatttgtgctttttagcctttctgctattcctt

SEQ ID NO: 9680 - DNA, 80 bp, synthetic construct
  misc_feature 1..80: note = Synthetic: >SARSCoV2-cand-27730-27809
  source 1..80: mol_type = other DNA
cacactcaaaagaaagacagaatgattgaactttcattaattgacttctatttgtgctttttagcctttctgctattcct

SEQ ID NO: 9681 - DNA, 80 bp, synthetic construct
  misc_feature 1..80: note = Synthetic: >BtSk_AlphaCoV-cand-12950-13029
  source 1..80: mol_type = other DNA
tgcgcaactttgatgaaaataattgtgaaactcttaaaaagattcttgttgtagtgggagcttgtgatgagtcctacttt

SEQ ID NO: 9682 - DNA, 80 bp, synthetic construct
  misc_feature 1..80: note = Synthetic: >Sb512-cand-12990-13069
  source 1..80: mol_type = other DNA
gcattgcgcaactttgatgaaaataattgtgaaactcttaaaaagattcttgttgtagtgggagcttgtgatgagtccta

SEQ ID NO: 9683 - DNA, 80 bp, synthetic construct
  misc_feature 1..80: note = Synthetic: >Sk512R-cand-12980-13059
  source 1..80: mol_type = other DNA
tatgcattgcgcaactttgatgaaaataattgtgaaactcttaaaaagattcttgttgtagtaggagcttgtgatgagtc

SEQ ID NO: 9684 - DNA, 80 bp, synthetic construct
  misc_feature 1..80: note = Synthetic: >Sb512-cand-10350-10429
  source 1..80: mol_type = other DNA
accagtttttctagcaattattgttgcctcatctgcactaatgttgttggttaaacacaagttgttgtttttgcaacttt

SEQ ID NO: 9685 - DNA, 80 bp, synthetic construct
  misc_feature 1..80: note = Synthetic: >Sk512R-cand-10340-10419
  source 1..80: mol_type = other DNA
tacaccagtttttctagcaattattgttgcctcatctgcactaatgttgttggttaaacacaagttgttgtttttgcaac

SEQ ID NO: 9686 - DNA, 80 bp, synthetic construct
  misc_feature 1..80: note = Synthetic: >BtSk_AlphaCoV-cand-10310-10389
  source 1..80: mol_type = other DNA
gtttttctagcaattattgttgcttcatctgcactaatgttgttggttaaacacaagttgttgtttttgcaactttattt

SEQ ID NO: 9687 - DNA, 80 bp, synthetic construct
  misc_feature 1..80: note = Synthetic: >AlphaSp-cand-10360-10439
  source 1..80: mol_type = other DNA
gcaattattgttgcttcatcggcattaatgttgttggttaaacacaagttgttgtttttgcaactttatttgttgccatc

SEQ ID NO: 9688 - DNA, 80 bp, synthetic construct
  misc_feature 1..80: note = Synthetic: >FelineAlpha1-cand-19680-19759
  source 1..80: mol_type = other DNA
tgagagattacgtttccgacgcagacttcagtgttacaggtgattgtactaacctctatatcgaggacaaatttgattta

SEQ ID NO: 9689 - DNA, 80 bp, synthetic construct
  misc_feature 1..80: note = Synthetic: >Sb512-cand-5980-6059
  source 1..80: mol_type = other DNA
actggtgttgggcactatacagtgtttgacaaggaagcaaaacttatgtttgatggtgacgtgcttaagccttgtgattt

SEQ ID NO: 9690 - DNA, 80 bp, synthetic construct
  misc_feature 1..80: note = Synthetic: >Sk512R-cand-5970-6049
  source 1..80: mol_type = other DNA
actactggtgttgggcactatacagtgtttgacaaggaggcaaaacgtatgtttgatggtgacatgcttaagccttgtga

SEQ ID NO: 9691 - DNA, 80 bp, synthetic construct
  misc_feature 1..80: note = Synthetic: >SARSCoV-cand-13960-14039
  source 1..80: mol_type = other DNA
atgcgtgatgcaggcattgtaggcgtactgacattagataatcaggatcttaatgggaactggtacgatttcggtgattt

SEQ ID NO: 9692 - DNA, 80 bp, synthetic construct
  misc_feature 1..80: note = Synthetic: >WIV16-cand-13950-14029
  source 1..80: mol_type = other DNA
tatgcgtgatgcaggcattgtaggcgtactgacattagataatcaggatcttaatgggaattggtatgatttcggtgatt

SEQ ID NO: 9693 - DNA, 80 bp, synthetic construct
  misc_feature 1..80: note = Synthetic: >SEAC-cand-21560-21639
  source 1..80: mol_type = other DNA
acaccttatctcaagccttatgaatgttttgggtggtcatggaatgacaaccaggatagtatttatgactggtggattgc

SEQ ID NO: 9694 - DNA, 80 bp, synthetic construct
  misc_feature 1..80: note = Synthetic: >HKU5R-cand-30410-30489
  source 1..80: mol_type = other DNA
ccccctgggaagagctctatagtgtgaaatgtaaataaaaacagctattattcaattagattaggctttttagatgattt

SEQ ID NO: 9695 - DNA, 80 bp, synthetic construct
  misc_feature 1..80: note = Synthetic: >Sparrow-cand-10820-10899
  source 1..80: mol_type = other DNA
ctaaagacaaccttaaaactgtgacctgcctaactgaaactggtaaggctatcctcaacctggatccacctatgcgattt

SEQ ID NO: 9696 - DNA, 80 bp, synthetic construct
  misc_feature 1..80: note = Synthetic: >HKU17-cand-10800-10879
  source 1..80: mol_type = other DNA
ttacatcaactaaagacaaccttaaaactgtgacctgccttactgacacaggtaagacagtcctcaatctggaccctcct

SEQ ID NO: 9697 - DNA, 80 bp, synthetic construct
  misc_feature 1..80: note = Synthetic: >BtRf_AlphaCoV-cand-12780-12859
  source 1..80: mol_type = other DNA
tgcgatgagatggttactaaaggtgttgttggcgttttaacattggacaaccaggaccttaatggtaatttttacgattt

SEQ ID NO: 9698 - DNA, 80 bp, synthetic construct
  misc_feature 1..80: note = Synthetic: >HKU2R-cand-12810-12889
  source 1..80: mol_type = other DNA
ttgtgtgatgagatggttactaaaggtgttgttggcgttttaacattggacaaccaggaccttaatggtaatttttacga

SEQ ID NO: 9699 - DNA, 80 bp, synthetic construct
  misc_feature 1..80: note = Synthetic: >BetaSp-cand-18850-18929
  source 1..80: mol_type = other DNA
ccactaatgaccagaggtcaaaagtgggaagttgttcgtttacgcattgtacaaatgctttcagaccatcttgtagattt

SEQ ID NO: 9700 - DNA, 80 bp, synthetic construct
  misc_feature 1..80: note = Synthetic: >HKU2R-cand-13460-13539
  source 1..80: mol_type = other DNA
tcaaactgtaaaacctggtcatttcaacaaggaattctatgactatttattgtcccaaggattctttgatgaaggctcag

SEQ ID NO: 9701 - DNA, 80 bp, synthetic construct
  misc_feature 1..80: note = Synthetic: >MinkCoV1-cand-15630-15709
  source 1..80: mol_type = other DNA
caattgggtgaatttgtttttgagcaaacagagtatggtggcgatgctgtttattacaagagcacttctactactaagtt

SEQ ID NO: 9702 - DNA, 80 bp, synthetic construct
  misc_feature 1..80: note = Synthetic: >Alpha2-cand-15590-15669
  source 1..80: mol_type = other DNA
agtacaattgggtgaatttgtttttgagcaaacagagtatggtggcgattcagtttattacaagagtacttctactaata

SEQ ID NO: 9703 - DNA, 80 bp, synthetic construct
  misc_feature 1..80: note = Synthetic: >Sb512-cand-4220-4299
  source 1..80: mol_type = other DNA
aacttagtgctttgttgtctgtgaaccatgattttgttgttaatgcagctaatgaacaactttcacatggtggtggaatt

SEQ ID NO: 9704 - DNA, 80 bp, synthetic construct
  misc_feature 1..80: note = Synthetic: >Sk512R-cand-4210-4289
  source 1..80: mol_type = other DNA
gtgaacttagtgctttgttgtctgtgaaccatgattttgttgttaatgcagctaatgaacaactttcacatggtggtgga

SEQ ID NO: 9705 - DNA, 80 bp, synthetic construct
  misc_feature 1..80: note = Synthetic: >BetaSp-cand-24940-25019
  source 1..80: mol_type = other DNA
cagggaaacttatgtgcagtattgggtcacacctctgactaagagggaatatcttctagtcttcgatggcaatggtgcaa

SEQ ID NO: 9706 - DNA, 80 bp, synthetic construct
  misc_feature 1..80: note = Synthetic: >HKU5-cand-13120-13199
  source 1..80: mol_type = other DNA
aacttcaaccgccgtgtaagttcttaattgctggtcccaaaggcccagaagttagatacttgtactttgttaaaaacctt

SEQ ID NO: 9707 - DNA, 80 bp, synthetic construct
  misc_feature 1..80: note = Synthetic: >HKU5R-cand-13110-13189
  source 1..80: mol_type = other DNA
aatattgaacttcaaccgccgtgtaagttcttaattgctggtcccaaaggcccagaagttagatacttgtactttgttaa

SEQ ID NO: 9708 - DNA, 80 bp, synthetic construct
  misc_feature 1..80: note = Synthetic: >HKU5R-cand-6960-7039
  source 1..80: mol_type = other DNA
ctaagaactgctggcattgtcacgactaatgttgtaaaacagtgtgcctcagcagcatatgatattttagtagtcaagtt

SEQ ID NO: 9709 - DNA, 80 bp, synthetic construct
  misc_feature 1..80: note = Synthetic: >SARSCoV-cand-25170-25249
  source 1..80: mol_type = other DNA
gttacaatcttgctttgttgcatgactagttgttgcagttgcctcaagggtgcatgctcttgtggttcttgctgcaagtt

SEQ ID NO: 9710 - DNA, 80 bp, synthetic construct
  misc_feature 1..80: note = Synthetic: >WIV16-cand-25130-25209
  source 1..80: mol_type = other DNA
tgctttgttgcatgactagttgttgcagttgcctcaagggtgcatgctcttgtggttcttgctgcaagtttgatgaggat

SEQ ID NO: 9711 - DNA, 80 bp, synthetic construct
  misc_feature 1..80: note = Synthetic: >AcCoV_JC34-cand-22700-22779
  source 1..80: mol_type = other DNA
aacttgctaatggttttaacaacctcacacagtatgtggctgatggttttaaaaccactagtcaagcactttctgctata

SEQ ID NO: 9712 - DNA, 80 bp, synthetic construct
  misc_feature 1..80: note = Synthetic: >BetaSp-cand-29100-29179
  source 1..80: mol_type = other DNA
cgaggctgttaataagctggtatctgagaccattgaattcatactctggcgtgcagagcatttgaatagatatggttgaa

SEQ ID NO: 9713 - DNA, 80 bp, synthetic construct
  misc_feature 1..80: note = Synthetic: >FelineAlpha1-cand-17600-17679
  source 1..80: mol_type = other DNA
agaaatgagcatgtagctagtggtgatgctatcatgactaggtgccttgctatatatgattgctttgtcaaacgtgtaga

SEQ ID NO: 9714 - DNA, 80 bp, synthetic construct
  misc_feature 1..80: note = Synthetic: >Alpha2-cand-16390-16469
  source 1..80: mol_type = other DNA
agaacaaattcaagcctgtaaagcctgagtcaaaacagtgttttaagatgtacgtacgaggtaatgttcaaattgataat

SEQ ID NO: 9715 - DNA, 80 bp, synthetic construct
  misc_feature 1..80: note = Synthetic: >AlphaMink-cand-16400-16479
  source 1..80: mol_type = other DNA
gagaataagttcaaacctgtaaagcctgagtcaaaacagtgttttaagatgtacgtacgaggtaatgttcaaattgataa

SEQ ID NO: 9716 - DNA, 80 bp, synthetic construct
  misc_feature 1..80: note = Synthetic: >BetaCoV1-cand-8540-8619
  source 1..80: mol_type = other DNA
atgacagatgagtcctgcaataatctagtgccaacttatataaagagcgataatatagtggcagccgatttaggtgttct

SEQ ID NO: 9717 - DNA, 80 bp, synthetic construct
  misc_feature 1..80: note = Synthetic: >MbCoV1-cand-17300-17379
  source 1..80: mol_type = other DNA
ttagccaagaatcctcgttggtctaaggctgtattcattaccccttataatagccagaattatgttgctagccgtgttct

SEQ ID NO: 9718 - DNA, 80 bp, synthetic construct
  misc_feature 1..80: note = Synthetic: >MsbCoV1-cand-17280-17359
  source 1..80: mol_type = other DNA
gaagatgtttttagccaagaatcctcgttggtctaaggctgtattcatttccccttataatagccagaattatgttgcta

SEQ ID NO: 9719 - DNA, 80 bp, synthetic construct
  misc_feature 1..80: note = Synthetic: >Quail-cand-12660-12739
  source 1..80: mol_type = other DNA
gcaagatggtgaagcggctattacagactacagctactataggtataatacacccacaatgttagacatcaagatgttct

SEQ ID NO: 9720 - DNA, 80 bp, synthetic construct
  misc_feature 1..80: note = Synthetic: >Sparrow-cand-12750-12829
  source 1..80: mol_type = other DNA
gaagcggctattacagactacagctactacaggtataatacacccacaatgttagacatcaagatgttcttgttctgtct

SEQ ID NO: 9721 - DNA, 80 bp, synthetic construct
  misc_feature 1..80: note = Synthetic: >HKU31-cand-19080-19159
  source 1..80: mol_type = other DNA
agaacgtgtggattgggatatagagtatccttatatatcacatgaaaagcagttaaattccttttgtagaattgttgagc

SEQ ID NO: 9722 - DNA, 80 bp, synthetic construct
  misc_feature 1..80: note = Synthetic: >HghCoV1-cand-19010-19089
  source 1..80: mol_type = other DNA
tagagcgtgtggattgggatatagagtatccttatatatcacacgagaagcagttaaattccttttgtagaattgttgag

SEQ ID NO: 9723 - DNA, 80 bp, synthetic construct
  misc_feature 1..80: note = Synthetic: >HKU5R-cand-25290-25369
  source 1..80: mol_type = other DNA
agaagcagtgaataccaacaatggtattatactggtagttctttcttccatcctgaacccatcacagaagcaaattctaa

SEQ ID NO: 9724 - DNA, 80 bp, synthetic construct
  misc_feature 1..80: note = Synthetic: >HKU10R-cand-11910-11989
  source 1..80: mol_type = other DNA
agctgaaggtgatggtgtttctgctgagggtatggcattgtttaataatgagtctggtaaaacgtttatgtatgcgttta

SEQ ID NO: 9725 - DNA, 80 bp, synthetic construct
  misc_feature 1..80: note = Synthetic: >Sk512R-cand-19680-19759
  source 1..80: mol_type = other DNA
ttatagattgtaaagtttggcgttggatgttgtggtgtaaagaccacaaagtacagaccttctatcctcagctccagtca

SEQ ID NO: 9726 - DNA, 80 bp, synthetic construct
  misc_feature 1..80: note = Synthetic: >Alpha2-cand-27450-27529
  source 1..80: mol_type = other DNA
agctgagaattacactgatgtttttgatgagaatgttgaaattattgatgaactaaactaattacatgctagtatgtctg

SEQ ID NO: 9727 - DNA, 80 bp, synthetic construct
  misc_feature 1..80: note = Synthetic: >AlphaMink-cand-27460-27539
  source 1..80: mol_type = other DNA
gctgagaattacactgatgtttttgatgagaatgttgaaattattgatgaactaaactaattacatgctagtatgtctgc

SEQ ID NO: 9728 - DNA, 80 bp, synthetic construct
  misc_feature 1..80: note = Synthetic: >HKU2-cand-23040-23119
  source 1..80: mol_type = other DNA
agctgatgttcagatggataggcttattaatggcagaatgaatgtcttacagctttttgtcactaactacaagctaaaaa

SEQ ID NO: 9729 - DNA, 80 bp, synthetic construct
  misc_feature 1..80: note = Synthetic: >SEAC-cand-23000-23079
  source 1..80: mol_type = other DNA
gctgatgttcagatggataggcttattaatggcagaatgcatgtcttacagctttttgtcactaactacaagctaaaaat

SEQ ID NO: 9730 - DNA, 80 bp, synthetic construct
  misc_feature 1..80: note = Synthetic: >BetaSp-cand-18930-19009
  source 1..80: mol_type = other DNA
agctgattctgttgtttttgttacatgggctgccaattttgaattgacatgtcttcgctattttgcaaaaatagggaagg

SEQ ID NO: 9731 - DNA, 80 bp, synthetic construct
  misc_feature 1..80: note = Synthetic: >SARSCoV-cand-22280-22359
  source 1..80: mol_type = other DNA
agctgcagcctattttgttggctatttaaagccaactacatttatgctcaagtatgatgaaaatggtacaatcacagatg

SEQ ID NO: 9732 - DNA, 80 bp, synthetic construct
  misc_feature 1..80: note = Synthetic: >WIV16-cand-22240-22319
  source 1..80: mol_type = other DNA
tattttgttggctatttaaagccagctacattcatgcttaagtatgatgaaaatggtacaatcacagatgctgttgattg

SEQ ID NO: 9733 - DNA, 80 bp, synthetic construct
  misc_feature 1..80: note = Synthetic: >BM48_31-cand-11150-11229
  source 1..80: mol_type = other DNA
agctgctttcttactcatccttatgacagctcgtactgtttatgatgatgctgctagacgtgtttggacagttatgaatg

SEQ ID NO: 9734 - DNA, 80 bp, synthetic construct
  misc_feature 1..80: note = Synthetic: >Sk512R-cand-6130-6209
  source 1..80: mol_type = other DNA
agctggatgctagtaaatttttggacactatgaatgcggcttcagataagtttttcacttttggtgattttgtttctaga

SEQ ID NO: 9735 - DNA, 80 bp, synthetic construct
  misc_feature 1..80: note = Synthetic: >HKU5R-cand-28570-28649
  source 1..80: mol_type = other DNA
ccactgttgtgcgaccacttgtcgaagactcgaccagtgtcactgctgtggtcactgatggctaccttaagatggcaggc

SEQ ID NO: 9736 - DNA, 80 bp, synthetic construct
  misc_feature 1..80: note = Synthetic: >HKU4R-cand-10750-10829
  source 1..80: mol_type = other DNA
gttaacagacaaatactgcactattaatgtagtagcttggctctatgcagcagttctaaatggttgtaagtggtttgtaa

SEQ ID NO: 9737 - DNA, 80 bp, synthetic construct
  misc_feature 1..80: note = Synthetic: >HKU8R-cand-4480-4559
  source 1..80: mol_type = other DNA
cacttccttgcgactttgtggttaatgctgccaatgaaaatttgcagcatgccggtggtgtcgctaaagctattaatgac

SEQ ID NO: 9738 - DNA, 80 bp, synthetic construct
  misc_feature 1..80: note = Synthetic: >BetaSp-cand-17970-18049
  source 1..80: mol_type = other DNA
gctgaaggctaagaatgataagagctcattgtgttttaaggtctattttaagggtcagactacacatgagagttcaagtg

SEQ ID NO: 9739 - DNA, 80 bp, synthetic construct
  misc_feature 1..80: note = Synthetic: >MbCoV1-cand-23980-24059
  source 1..80: mol_type = other DNA
cacttgctgttcaagctagacttaattatctggcttgccaaactgatgtgttgcagcgtaatcagatgatattagctcag

SEQ ID NO: 9740 - DNA, 80 bp, synthetic construct
  misc_feature 1..80: note = Synthetic: >MsbCoV1-cand-23980-24059
  source 1..80: mol_type = other DNA
tgttcaggctagacttaattacctggctttgcaaactgatgtgttgcagcgtaatcagatgatattagctcagtctttta

SEQ ID NO: 9741 - DNA, 80 bp, synthetic construct
  misc_feature 1..80: note = Synthetic: >MbCoV1-cand-20660-20739
  source 1..80: mol_type = other DNA
gctattaaaatcactgagtatagttggaataagaggctttatgaattaattcaaaagttctcttactggactatgttctg

SEQ ID NO: 9742 - DNA, 80 bp, synthetic construct
  misc_feature 1..80: note = Synthetic: >MsbCoV1-cand-20640-20719
  source 1..80: mol_type = other DNA
tggtactgttgctattaaaatcactgagtatagttggaataagaggctttatgaattaattcaaaagttctcttattgga

SEQ ID NO: 9743 - DNA, 80 bp, synthetic construct
  misc_feature 1..80: note = Synthetic: >BetaSp-cand-27260-27339
  source 1..80: mol_type = other DNA
tttgaaccagaaccagaaaatgattgctaatgccttcaacaacgcactgactgctattcagaatgggttcgatgcaacca

SEQ ID NO: 9744 - DNA, 80 bp, synthetic construct
  misc_feature 1..80: note = Synthetic: >BetaSp-cand-22130-22209
  source 1..80: mol_type = other DNA
cagaattgtccacatattagtgtcactatgcttgatatcaaagcccagtgacattaattcggttgatattgccattcagg

SEQ ID NO: 9745 - DNA, 80 bp, synthetic construct
  misc_feature 1..80: note = Synthetic: >SARSCoV-cand-24450-24529
  source 1..80: mol_type = other DNA
gaggtacaaattgacaggttaattacaggcagacttcaaagccttcaaacctatgtaacacaacaactaatcagggctgc

SEQ ID NO: 9746 - DNA, 80 bp, synthetic construct
  misc_feature 1..80: note = Synthetic: >HKU15-cand-16900-16979
  source 1..80: mol_type = other DNA
cctgtcgcttagtacaggcaaattacttaaatatactactcactacaaccaaagccacggtggttcacgatattggtaac

SEQ ID NO: 9747 - DNA, 80 bp, synthetic construct
  misc_feature 1..80: note = Synthetic: >HKU17-cand-16920-16999
  source 1..80: mol_type = other DNA
tgttcaggcgaactacttaaacattctactcaccacaaccaaagccacggtggttcacgatattggtaacccaaaaggta

SEQ ID NO: 9748 - DNA, 80 bp, synthetic construct
  misc_feature 1..80: note = Synthetic: >MbCoV1-cand-21930-22009
  source 1..80: mol_type = other DNA
cctgtttattttaacatgtcaatgaatgaaaatgtgacttgcaacggctacagcaactttgatgttggtgttgttgatgc

SEQ ID NO: 9749 - DNA, 80 bp, synthetic construct
  misc_feature 1..80: note = Synthetic: >MsbCoV1-cand-21920-21999
  source 1..80: mol_type = other DNA
ctacctgtttattttaatatgtcaatgaatgaaaatgcgacttgcaatggctacagcaactttgatgttggtgttgttga

SEQ ID NO: 9750 - DNA, 80 bp, synthetic construct
  misc_feature 1..80: note = Synthetic: >BtRl_BetaCoV-cand-12120-12199
  source 1..80: mol_type = other DNA
tgagtttgaccgtgatgctgccatgcaacgcaagttggaaaagatggcagatcaggctatgacccaaatgtacaaacagg

SEQ ID NO: 9751 - DNA, 80 bp, synthetic construct
  misc_feature 1..80: note = Synthetic: >WIV16-cand-12150-12229
  source 1..80: mol_type = other DNA
ctaaatctgagtttgaccgtgatgctgccatgcaacgcaagttggaaaagatggcagatcaggctatgacccaaatgtac

SEQ ID NO: 9752 - DNA, 80 bp, synthetic construct
  misc_feature 1..80: note = Synthetic: >HKU5R-cand-19760-19839
  source 1..80: mol_type = other DNA
tcagcatctggttttagactatggtgttacaagacctttgatgtctataacctgtggccaaccttcactaaaattcaagg

SEQ ID NO: 9753 - DNA, 80 bp, synthetic construct
  misc_feature 1..80: note = Synthetic: >BetaCoV1-cand-12620-12699
  source 1..80: mol_type = other DNA
ggcgctgcaaacaatgttgtttagcatggtgcgcaaacttgacaaccaggcacttaattctatattagataatgctgtta

SEQ ID NO: 9754 - DNA, 80 bp, synthetic construct
  misc_feature 1..80: note = Synthetic: >HKU4R-cand-10510-10589
  source 1..80: mol_type = other DNA
tttagcttgttataatggcaagcctacaggtgtctttacagttaatttacgccacaattctaccattaaaggcagtttcc

SEQ ID NO: 9755 - DNA, 80 bp, synthetic construct
  misc_feature 1..80: note = Synthetic: >Sb512-cand-18120-18199
  source 1..80: mol_type = other DNA
ttggtacaatcacatgtaatgcgtgcagtcttgaaactgtacaatcctaaggctatccacgatgttggtaatcctaaagg

SEQ ID NO: 9756 - DNA, 80 bp, synthetic construct
  misc_feature 1..80: note = Synthetic: >BtSk_AlphaCoV-cand-18070-18149
  source 1..80: mol_type = other DNA
cgtttggtacaatcacatgtaatgcgtgcagtcttgaaactgtacaatcctaaggctatccacgatgttggtaatcctaa

SEQ ID NO: 9757 - DNA, 80 bp, synthetic construct
  misc_feature 1..80: note = Synthetic: >HKU5R-cand-650-729
  source 1..80: mol_type = other DNA
gcgtgttggaatgttcttcccatttgatgcagatcttgttactggagagttccaatttctgcttcgtaagaagggcttcg

SEQ ID NO: 9758 - DNA, 80 bp, synthetic construct
  misc_feature 1..80: note = Synthetic: >MN531555-cand-14010-14089
  source 1..80: mol_type = other DNA
aatctaaaatatgccatatctgcgaagaatagagcgcgtacggtggcaggtgtgtcaatcctttctactatgactaatag

SEQ ID NO: 9759 - DNA, 80 bp, synthetic construct
  misc_feature 1..80: note = Synthetic: >MN509589-cand-5130-5209
  source 1..80: mol_type = other DNA
taacatctacgagagtcttaaagtgcaggatgtacctgagaatattgatgaatatgtgtcattcacaacgaaagaagata

SEQ ID NO: 9760 - DNA, 80 bp, synthetic construct
  misc_feature 1..80: note = Synthetic: >MN517816-cand-8650-8729
  source 1..80: mol_type = other DNA
aattatgatcttgctgcgaagagcacttttgtgattcgtggttctgaatttgttaagcttatgaatgagataggtgataa

SEQ ID NO: 9761 - DNA, 80 bp, synthetic construct
  misc_feature 1..80: note = Synthetic: >MT114543-cand-21480-21559
  source 1..80: mol_type = other DNA
gtacttaggaacgctaccacctagtgtcaaggaaattgctattagtaagtggggccatttttatattaatggttacaatt

SEQ ID NO: 9762 - DNA, 80 bp, synthetic construct
  misc_feature 1..80: note = Synthetic: >AJ311317-cand-2960-3039
  source 1..80: mol_type = other DNA
gatgaggatactaaagtgttggctcttatacaagacccggcaagtattaaataccctctgcctcttgatgaagattatag

SEQ ID NO: 9763 - DNA, 80 bp, synthetic construct
  misc_feature 1..80: note = Synthetic: >MN531554-cand-1920-1999
  source 1..80: mol_type = other DNA
tggaaaagtgcgtaatctggaagaacttttgaagactcatttttgtaaagctcaaatgtcaactgtgatcttggcagcag

SEQ ID NO: 9764 - DNA, 80 bp, synthetic construct
  misc_feature 1..80: note = Synthetic: >MT114540-cand-21840-21919
  source 1..80: mol_type = other DNA
ttctaaccaattttcagtatacacccattccacttgtaaaagttcttcgtgggacaacaattttaatcaagattgcacag

SEQ ID NO: 9765 - DNA, 80 bp, synthetic construct
  misc_feature 1..80: note = Synthetic: >MT114542-cand-24620-24699
  source 1..80: mol_type = other DNA
cttgtatggacattgtcaaatctattgacacatccgtagacgctgtgcttgacgaacttgatcgtgcatactttgctgta

SEQ ID NO: 9766 - DNA, 80 bp, synthetic construct
  misc_feature 1..80: note = Synthetic: >SBB-120-cand-19530-19609
  source 1..80: mol_type = other DNA
gctacaatctgctgagtggaaatgtggttacgcaatgccatctctttacaaaattcaacgaatgtgcctagagccatgta

SEQ ID NO: 9767 - DNA, 80 bp, synthetic construct
  misc_feature 1..80: note = Synthetic: >SBB-010-cand-19520-19599
  source 1..80: mol_type = other DNA
tttacccccagctacaatctgctgagtggaaatgtggatacgcaatgccatctctttacaaaattcaacgaatgtgccta

SEQ ID NO: 9768 - DNA, 80 bp, synthetic construct
  misc_feature 1..80: note = Synthetic: >SBB-024-cand-19510-19589
  source 1..80: mol_type = other DNA
gtacaaacattttacccccagctacaatctgctgagtggaaatgtggatacgcaatgccatctctttacaaaattcaacg

SEQ ID NO: 9769 - DNA, 80 bp, synthetic construct
  misc_feature 1..80: note = Synthetic: >SBB-130-cand-19760-19839
  source 1..80: mol_type = other DNA
gagttgctcctggtaccgcagtcttaaggagatggctgcctagtgatgctattattgttgacaatgatgttaacgactat

SEQ ID NO: 9770 - DNA, 80 bp, synthetic construct
  misc_feature 1..80: note = Synthetic: >SBB-122-cand-19760-19839
  source 1..80: mol_type = other DNA
agggagttgctcctggtaccgcagtcttaaggagatggctgcctagtgatgctattattgttgacaatgatgttaacgat

SEQ ID NO: 9771 - DNA, 80 bp, synthetic construct
  misc_feature 1..80: note = Synthetic: >SBB-024-cand-19750-19829
  source 1..80: mol_type = other DNA
gggtcggataagggagttgctcctggtactgcagtcttaaggagatggctgcctagtgatgctattattgttgacaatga

SEQ ID NO: 9772 - DNA, 80 bp, synthetic construct
  misc_feature 1..80: note = Synthetic: >SBB-120-cand-19770-19849
  source 1..80: mol_type = other DNA
tcctggtactgcagtcttaaggagatggctgcctagtgatgctattattgttgacaatgatgttaacgattatgttagtg

SEQ ID NO: 9773 - DNA, 80 bp, synthetic construct
  misc_feature 1..80: note = Synthetic: >SBB-053-cand-19910-19989
  source 1..80: mol_type = other DNA
tcgtcatatctgacatgtatgatggtaagatcaaacagtgtgatggtgaaaatgtctcaaaagacggcttctttacgtat

SEQ ID NO: 9774 - DNA, 80 bp, synthetic construct
  misc_feature 1..80: note = Synthetic: >SBB-747-cand-950-1029
  source 1..80: mol_type = other DNA
ctgttgtaaaacagaccatttttactgttcagggggttgttgaacaacatgtagaagggtattattacccttatgcgcca

SEQ ID NO: 9775 - DNA, 80 bp, synthetic construct
  misc_feature 1..80: note = Synthetic: >SBB-726-cand-960-1039
  source 1..80: mol_type = other DNA
acagaccatttttactgttcagggggttgttgaacaacatgtagaagggtattattacccttatgcgccattaggcgtgg

SEQ ID NO: 9776 - DNA, 80 bp, synthetic construct
  misc_feature 1..80: note = Synthetic: >SBB-010-cand-25440-25519
  source 1..80: mol_type = other DNA
acagacgatgagaaagtgcttcatttagtataaactaaacaagatggcttcagtcagcttccaagagcaaaacagaggcc

SEQ ID NO: 9777 - DNA, 80 bp, synthetic construct
  misc_feature 1..80: note = Synthetic: >SBB-130-cand-25430-25509
  source 1..80: mol_type = other DNA
agatacgatgacagacgatgagaaagtgcttcatttagtataaactaaacaagatggcttcagtcagcttccaagagcaa

SEQ ID NO: 9778 - DNA, 80 bp, synthetic construct
  misc_feature 1..80: note = Synthetic: >SBB-053-cand-25430-25509
  source 1..80: mol_type = other DNA
agaagatgagaaagtgcttcatttagtataaactaaacaagatggcttcagtcagctttcaagagcaaaacagaggccgc

SEQ ID NO: 9779 - DNA, 80 bp, synthetic construct
  misc_feature 1..80: note = Synthetic: >SBB-797-cand-12240-12319
  source 1..80: mol_type = other DNA
tctagcctttgctaaggttgaaaagtctacgggagatgggttcgtaattttggaattggaacctccctgtaaatttatgg

SEQ ID NO: 9780 - DNA, 80 bp, synthetic construct
  misc_feature 1..80: note = Synthetic: >SBB-747-cand-12230-12309
  source 1..80: mol_type = other DNA
acgttgatggcctagcctttgctaaggttgaaaagtctacgggagatgggttcgtaattttggaattggaacctccctgt

SEQ ID NO: 9781 - DNA, 80 bp, synthetic construct
  misc_feature 1..80: note = Synthetic: >SBB-120-cand-17710-17789
  source 1..80: mol_type = other DNA
acagggtctcttagccataatcatcatgaaatttgcaatgttcatcgtaatgagcatgtagcatctggtgacgctatcat

SEQ ID NO: 9782 - DNA, 80 bp, synthetic construct
  misc_feature 1..80: note = Synthetic: >SBB-010-cand-13480-13559
  source 1..80: mol_type = other DNA
attaatgagttgttgcaatttgtgacagacccctctcttcttgtagcctcgtctcctgctcttgtggatcaacgtactgt

SEQ ID NO: 9783 - DNA, 80 bp, synthetic construct
  misc_feature 1..80: note = Synthetic: >SBB-053-cand-14270-14349
  source 1..80: mol_type = other DNA
ggatgatatccgcaatgatcttgggttctaaacatgttacatgctgtaattctgaggaacgttattacaggttatgtaat

SEQ ID NO: 9784 - DNA, 80 bp, synthetic construct
  misc_feature 1..80: note = Synthetic: >SBB-041-cand-12030-12109
  source 1..80: mol_type = other DNA
ttactatgtgtgccttttcagttgaccctgcaaaaacgtatcttgatgctgtcaagcgtggttgcaagcctgtaggtaat

SEQ ID NO: 9785 - DNA, 80 bp, synthetic construct
  misc_feature 1..80: note = Synthetic: >SBB-010-cand-12040-12119
  source 1..80: mol_type = other DNA
tgccttttcagttgaccctgtaaaaacgtatcttgatgctgtcaagcgtggttgcaagcctgtaggtaattgtgtgaaaa

SEQ ID NO: 9786 - DNA, 80 bp, synthetic construct
  misc_feature 1..80: note = Synthetic: >SBB-747-cand-470-549
  source 1..80: mol_type = other DNA
attacggctggcaacctatacgtgagctagccatggataaggatggcattaggtttggtaggagtggtacttatggagtg

SEQ ID NO: 9787 - DNA, 80 bp, synthetic construct
  misc_feature 1..80: note = Synthetic: >SBB-726-cand-480-559
  source 1..80: mol_type = other DNA
gcaacctatacgtgagctagccatggataaggatggcattaggtttggtaggagtggtacttatggagtgctgcttccta

SEQ ID NO: 9788 - DNA, 80 bp, synthetic construct
  misc_feature 1..80: note = Synthetic: >SBB-010-cand-23440-23519
  source 1..80: mol_type = other DNA
cttcttttgatgacgagttcaatcaacacttcaacaacatgtcttcccaattgcaggctctcaataatttgaccgctaat

SEQ ID NO: 9789 - DNA, 80 bp, synthetic construct
  misc_feature 1..80: note = Synthetic: >SBB-041-cand-23430-23509
  source 1..80: mol_type = other DNA
tttgatgaagagttcaaggaacacttcactaacatgtcctcacaattgcaggctctcaataatttgaccgctaatttaaa

SEQ ID NO: 9790 - DNA, 80 bp, synthetic construct
  misc_feature 1..80: note = Synthetic: >SBB-797-cand-13920-13999
  source 1..80: mol_type = other DNA
attaggcaacatgctcaacgtttgtctctgcgtgagctactagtctatgcagcagatcctgctatgcatgtggctgctag

SEQ ID NO: 9791 - DNA, 80 bp, synthetic construct
  misc_feature 1..80: note = Synthetic: >SBB-747-cand-13910-13989
  source 1..80: mol_type = other DNA
gaaccaagatattaggcaacatgctcaacgtttgtctctgcgtgagctactagtctatgcagcagatcctgctatgcatg

SEQ ID NO: 9792 - DNA, 80 bp, synthetic construct
  misc_feature 1..80: note = Synthetic: >PDF-2386-cand-19280-19359
  source 1..80: mol_type = other DNA
attatgtacccctaaaatcagcaacgtgtattacacgatgcaatttgggtggtgctgtttgccgtcatcatgcatctgag

SEQ ID NO: 9793 - DNA, 80 bp, synthetic construct
  misc_feature 1..80: note = Synthetic: >PRD-0038-cand-19270-19349
  source 1..80: mol_type = other DNA
tcagacatagattatgtacccctaaaatcagcaacgtgtattacacgatgcaatttgggtggtgctgtttgccgtcatca

SEQ ID NO: 9794 - DNA, 80 bp, synthetic construct
  misc_feature 1..80: note = Synthetic: >SBB-053-cand-14430-14509
  source 1..80: mol_type = other DNA
tgcaagtacagcatatgctaactctgttttcaatatctttcaagctgttagcgccaacattaatagattacttagtattg

SEQ ID NO: 9795 - DNA, 80 bp, synthetic construct
  misc_feature 1..80: note = Synthetic: >PDF-2370-cand-7360-7439
  source 1..80: mol_type = other DNA
caatagggctactagagttgaatgtaccactgttgttaatggagctaagaagtccttttacgtctatgctaatggcggta

SEQ ID NO: 9796 - DNA, 80 bp, synthetic construct
  misc_feature 1..80: note = Synthetic: >SBB-010-cand-2350-2429
  source 1..80: mol_type = other DNA
cactgcttttgaaccagtgttcccagattttgccaaatttaaggacacagtttcttgtcctacattcttgagagagattg

SEQ ID NO: 9797 - DNA, 80 bp, synthetic construct
  misc_feature 1..80: note = Synthetic: >SBB-053-cand-2360-2439
  source 1..80: mol_type = other DNA
gaaccggtgtttccagattttgccaaatttaaggacacagtttcttgtcctacattcttgagagagattgatggtggtgg

SEQ ID NO: 9798 - DNA, 80 bp, synthetic construct
  misc_feature 1..80: note = Synthetic: >SBB-797-cand-25440-25519
  source 1..80: mol_type = other DNA
ctgatacgtctgtaattgttacaaacgttttagttattatcattctttgtctatttgttgttattgttggctgtgcattg

SEQ ID NO: 9799 - DNA, 80 bp, synthetic construct
  misc_feature 1..80: note = Synthetic: >SBB-788-cand-25440-25519
  source 1..80: mol_type = other DNA
gtgctgatacgtctgtaattgttacaaacgttttagttattatcattctttgtctatttgttgttattgttggctgtgca

SEQ ID NO: 9800 - DNA, 80 bp, synthetic construct
  misc_feature 1..80: note = Synthetic: >SBB-726-cand-25450-25529
  source 1..80: mol_type = other DNA
gtctgtaattgttacaaacgttttagttattatcattctttgtttatttgttgttattgtaggctgtgcattgttgctca

SEQ ID NO: 9801 - DNA, 80 bp, synthetic construct
  misc_feature 1..80: note = Synthetic: >SBB-010-cand-3230-3309
  source 1..80: mol_type = other DNA
caatgggacatacaagctgatgctgatgatgctgcaaccaatgatcagatggacgccgttgaagatgttgtcgctgaaga

SEQ ID NO: 9802 - DNA, 80 bp, synthetic construct
  misc_feature 1..80: note = Synthetic: >SBB-053-cand-3240-3319
  source 1..80: mol_type = other DNA
tacaagctgatgctgatgatgctgcaaccaatgatcagacggacgccgttgaagatgttgtcgctgaagatcaagttgaa

SEQ ID NO: 9803 - DNA, 80 bp, synthetic construct
  misc_feature 1..80: note = Synthetic: >PRD-0038-cand-11680-11759
  source 1..80: mol_type = other DNA
tgcaactgtgcagtctaaaatgtctgacataaagtgcacttccgtagtgttattatcagttctacaacaacttagaattg

SEQ ID NO: 9804 - DNA, 80 bp, synthetic construct
  misc_feature 1..80: note = Synthetic: >PDF-2370-cand-20160-20239
  source 1..80: mol_type = other DNA
tgcttttgagcatatcgtgtatggtgactttagccatggacagttaggaggtctacatttactgataggcctcgctaaac

SEQ ID NO: 9805 - DNA, 80 bp, synthetic construct
  misc_feature 1..80: note = Synthetic: >SBB-788-cand-19370-19449
  source 1..80: mol_type = other DNA
tcagattgttttagtcgatggtagacagttggattcatatagtaaattttgtcagttgaaaaatgcagtctatttttcgc

SEQ ID NO: 9806 - DNA, 80 bp, synthetic construct
  misc_feature 1..80: note = Synthetic: >SBB-726-cand-19380-19459
  source 1..80: mol_type = other DNA
ttagtcgatggtagacagttggattcatatagtaaattttgtcagttgaaaaatgcagtctatttttcgacaagcaaacc

SEQ ID NO: 9807 - DNA, 80 bp, synthetic construct
  misc_feature 1..80: note = Synthetic: >PDF-2386-cand-11520-11599
  source 1..80: mol_type = other DNA
gctattttagacttactcttggtgtgtatgactatttagtttctacgcaagagtttaggtatatgaattctcaaggttta

SEQ ID NO: 9808 - DNA, 80 bp, synthetic construct
  misc_feature 1..80: note = Synthetic: >PDF-2386-cand-16240-16319
  source 1..80: mol_type = other DNA
gctccaggttgtgacgtcactgatgttacacaactttatttaggtggtatgagctactactgtaagtcacacaaaccgcc

SEQ ID NO: 9809 - DNA, 80 bp, synthetic construct
  misc_feature 1..80: note = Synthetic: >PRD-0038-cand-16230-16309
  source 1..80: mol_type = other DNA
tgtttgcaatgctccaggttgtgacgtcactgatgttacacaactttatttaggtggtatgagctactactgtaagtcac

SEQ ID NO: 9810 - DNA, 80 bp, synthetic construct
  misc_feature 1..80: note = Synthetic: >PRD-0038-cand-17190-17269
  source 1..80: mol_type = other DNA
tgacatcgtagtctttgacgaagtgtcaatggcaactaattatgacctgagtgttgtcaatgctagactacgtgctaagc

SEQ ID NO: 9811 - DNA, 80 bp, synthetic construct
  misc_feature 1..80: note = Synthetic: >PDF-2386-cand-17200-17279
  source 1..80: mol_type = other DNA
gtctttgacgaagtgtcaatggcaactaattatgacctgagtgttgtcaatgctagactacgtgctaagcactacgtcta

SEQ ID NO: 9812 - DNA, 80 bp, synthetic construct
  misc_feature 1..80: note = Synthetic: >SBB-041-cand-3720-3799
  source 1..80: mol_type = other DNA
gctttttgcctacatacaaaccattttcttatggtagttgtgcagactgtggttgtacacgcaaattcactattcttacc

SEQ ID NO: 9813 - DNA, 80 bp, synthetic construct
  misc_feature 1..80: note = Synthetic: >SBB-010-cand-3710-3789
  source 1..80: mol_type = other DNA
tgcgtgtttcgctttttacccacagacaaaccattttcctatggtaattgtgcagactgtggttgtacacgcaaattcac

SEQ ID NO: 9814 - DNA, 80 bp, synthetic construct
  misc_feature 1..80: note = Synthetic: >SBB-041-cand-5000-5079
  source 1..80: mol_type = other DNA
tgttttgatgtgcagagtgttgtggtcaaagtgacagagaacggtcgcgacgtcaacgatgtcgtggtaacaagtgcaga

SEQ ID NO: 9815 - DNA, 80 bp, synthetic construct
  misc_feature 1..80: note = Synthetic: >PDF-2370-cand-2160-2239
  source 1..80: mol_type = other DNA
tgcaggtgggtgtcaagtttttgaaagaagcttggcacatccttaaatttcttgtgtcaggagcctacacaatcgtaaaa

SEQ ID NO: 9816 - DNA, 80 bp, synthetic construct
  misc_feature 1..80: note = Synthetic: >SBB-788-cand-24640-24719
  source 1..80: mol_type = other DNA
tgctttaaaggtatgtgtgcatgtaaaccttgccattatgacgaggtcgaagatgtttatcctgcagttcgtgtatataa

SEQ ID NO: 9817 - DNA, 80 bp, synthetic construct
  misc_feature 1..80: note = Synthetic: >SBB-797-cand-24640-24719
  source 1..80: mol_type = other DNA
tttaaaggtatgtgtgcatgtaaaccttgccattatgacgaggtcgaagatgtttatcctgcagttcgtgtatataataa

SEQ ID NO: 9818 - DNA, 80 bp, synthetic construct
  misc_feature 1..80: note = Synthetic: >SBB-797-cand-18000-18079
  source 1..80: mol_type = other DNA
tgggcacatggttttgaactcactacccttcattattttgctaaagtgggacctgagcgtaagtgctttatgtgtcctaa

SEQ ID NO: 9819 - DNA, 80 bp, synthetic construct
  misc_feature 1..80: note = Synthetic: >GCS-211-cand-330-409
  source 1..80: mol_type = other DNA
ctctgaaatttatggaaatggctttcctaccatggaggatgccgtgaacttttatagttcaaccgcacctgatggttttt

SEQ ID NO: 9820 - DNA, 80 bp, synthetic construct
  misc_feature 1..80: note = Synthetic: >GCS-227-cand-330-409
  source 1..80: mol_type = other DNA
ctgaaatttatggaaatggctttcctaccatggaggatgccgtgaacttttatagttcaaccgcacctgatggtttttgg

SEQ ID NO: 9821 - DNA, 80 bp, synthetic construct
  misc_feature 1..80: note = Synthetic: >GCS-227-cand-14310-14389
  source 1..80: mol_type = other DNA
gccacttaacaaagttggtaaagcaggtctttactatgaggcactgagttatgaggaacaagatgcattgtatgcttttt

SEQ ID NO: 9822 - DNA, 80 bp, synthetic construct
  misc_feature 1..80: note = Synthetic: >GCS-211-cand-14310-14389
  source 1..80: mol_type = other DNA
tggccacttaacaaagttggtaaagcaggtctttactatgaggcactgagttatgaggaacaagatgcattgtatgcttt

SEQ ID NO: 9823 - DNA, 80 bp, synthetic construct
  misc_feature 1..80: note = Synthetic: >GCS-211-cand-5530-5609
  source 1..80: mol_type = other DNA
tcagacaaacacccaacagctctagaaactagtgtcattaatgtggcacctgttatagattgggatgcccattatggttt

SEQ ID NO: 9824 - DNA, 80 bp, synthetic construct
  misc_feature 1..80: note = Synthetic: >GCS-227-cand-5530-5609
  source 1..80: mol_type = other DNA
agacaaacacccaacagctctagaaactagtgtcattaatgtggcacctgttatagattgggatgcccattatggtttcc

SEQ ID NO: 9825 - DNA, 80 bp, synthetic construct
  misc_feature 1..80: note = Synthetic: >GCS-211-cand-18870-18949
  source 1..80: mol_type = other DNA
gggttcacgttgtggtgtcccacttcttttgacacgtttaacttatggcaatctttctgtgataccaaaatacagggttt

SEQ ID NO: 9826 - DNA, 80 bp, synthetic construct
  misc_feature 1..80: note = Synthetic: >GCS-227-cand-18860-18939
  source 1..80: mol_type = other DNA
cttcagcgggattcacgttgtggtgtcccacttcttttgacacgtttaacttatggcaatctttctgtgataccaaaata

SEQ ID NO: 9827 - DNA, 80 bp, synthetic construct
  misc_feature 1..80: note = Synthetic: >GCS-211-cand-14630-14709
  source 1..80: mol_type = other DNA
aaaccctgtgttaatgggttgggattatcccaagtgtgacagagccttacctaacatgattaggatgatatcagctatga

SEQ ID NO: 9828 - DNA, 80 bp, synthetic construct
  misc_feature 1..80: note = Synthetic: >GCS-227-cand-14630-14709
  source 1..80: mol_type = other DNA
accctgtgttaatgggttgggattatcccaagtgtgacagagccttacctaacatgattaggatgatatcagctatgatt

SEQ ID NO: 9829 - DNA, 80 bp, synthetic construct
  misc_feature 1..80: note = Synthetic: >GCS-227-cand-5690-5769
  source 1..80: mol_type = other DNA
aaacctactgacaacaactgttgggttaatgcagtgtgcttagccttacagtaccttaaacctaattttaaacacacagg

SEQ ID NO: 9830 - DNA, 80 bp, synthetic construct
  misc_feature 1..80: note = Synthetic: >GCS-211-cand-5690-5769
  source 1..80: mol_type = other DNA
tgaaacctactgacaacaactgttgggttaatgcagtgtgcttagccttacagtaccttaaacctaattttaaacacaca

SEQ ID NO: 9831 - DNA, 80 bp, synthetic construct
  misc_feature 1..80: note = Synthetic: >GCS-227-cand-15910-15989
  source 1..80: mol_type = other DNA
tttaataagcttgcttgttccgattggtccgatgtgagtgactacaaacttgctaatgaggttaaagactctcttcgttt

SEQ ID NO: 9832 - DNA, 80 bp, synthetic construct
  misc_feature 1..80: note = Synthetic: >GCS-211-cand-15910-15989
  source 1..80: mol_type = other DNA
tgtttaataagcttgcttgttccgattggtctgatgtgagtgactacaaacttgctaatgaggttaaagactctcttcgt

SEQ ID NO: 9833 - DNA, 80 bp, synthetic construct
  misc_feature 1..80: note = Synthetic: >GCS-211-cand-14870-14949
  source 1..80: mol_type = other DNA
aaactctgtatttaacatcttccaagctaccagtgctaatattaacaggttgcttagtgtggacacaaataaatgccaca

SEQ ID NO: 9834 - DNA, 80 bp, synthetic construct
  misc_feature 1..80: note = Synthetic: >GCS-227-cand-14870-14949
  source 1..80: mol_type = other DNA
actctgtatttaacatcttccaagctaccagtgctaatattaacaggttgcttagtgtggacacaaataaatgccacaat

SEQ ID NO: 9835 - DNA, 80 bp, synthetic construct
  misc_feature 1..80: note = Synthetic: >GCS-227-cand-28770-28849
  source 1..80: mol_type = other DNA
aaacttgcaattaccaattgcaggtcgacgagccaacaatggaagagccaacatgcgatttagctgattgtgatttagta

SEQ ID NO: 9836 - DNA, 80 bp, synthetic construct
  misc_feature 1..80: note = Synthetic: >GCS-211-cand-28770-28849
  source 1..80: mol_type = other DNA
tcaaacttgcaattaccaattgcaggtcgacgagccaacaatggaagagccaacatgcgatttagctgattgtgatttag

SEQ ID NO: 9837 - DNA, 80 bp, synthetic construct
  misc_feature 1..80: note = Synthetic: >GCS-227-cand-3770-3849
  source 1..80: mol_type = other DNA
aaacttgtttcacggtgttaccaagctattggtgcatttaagggctcacttggcgatgccaaccagtgtctttcgaagtt

SEQ ID NO: 9838 - DNA, 80 bp, synthetic construct
  misc_feature 1..80: note = Synthetic: >GCS-211-cand-3770-3849
  source 1..80: mol_type = other DNA
agaaacttgtttcacggtgttaccaagctattggtgcatttaagggctcacttggcgatgccaaccagtgtctttcaaag

SEQ ID NO: 9839 - DNA, 80 bp, synthetic construct
  misc_feature 1..80: note = Synthetic: >SBB-024-cand-3980-4059
  source 1..80: mol_type = other DNA
gtttgttttaaggatgttaacttctctagggttgtggaacctaaagcttttgcacaacatgctaatattaccttctacca

SEQ ID NO: 9840 - DNA, 80 bp, synthetic construct
  misc_feature 1..80: note = Synthetic: >SBB-122-cand-3970-4049
  source 1..80: mol_type = other DNA
tgtcaacactgtttgttttaaggatgttaatttctctagaactgtggaacctaaagcttttgcacaacatgctaatatta

SEQ ID NO: 9841 - DNA, 80 bp, synthetic construct
  misc_feature 1..80: note = Synthetic: >SBB-010-cand-21440-21519
  source 1..80: mol_type = other DNA
tgtcaaccacatagttggcaactgtgcaccggcctttgtgcttcgttatagtctaggtgtttctactgatgacactgtta

SEQ ID NO: 9842 - DNA, 80 bp, synthetic construct
  misc_feature 1..80: note = Synthetic: >SBB-788-cand-20810-20889
  source 1..80: mol_type = other DNA
tacacctgttatggttttgaaagaagaacaagtgaacgaactcgttttaaatttaatacgtactgggcgcctaatagtta

SEQ ID NO: 9843 - DNA, 80 bp, synthetic construct
  misc_feature 1..80: note = Synthetic: >SBB-122-cand-18900-18979
  source 1..80: mol_type = other DNA
tcttgctcgtaatggtgttttgatttctaatacagctgttaagaaacttgtaggtatgaaaattacatacggtatgctta

SEQ ID NO: 9844 - DNA, 80 bp, synthetic construct
  misc_feature 1..80: note = Synthetic: >GCS-227-cand-12790-12869
  source 1..80: mol_type = other DNA
tacctgtgatcgtgccaatgtgcagtcttttgaccagcagtatttaaacgatcacggggttctagtgcagctcgactaga

SEQ ID NO: 9845 - DNA, 80 bp, synthetic construct
  misc_feature 1..80: note = Synthetic: >GCS-211-cand-12790-12869
  source 1..80: mol_type = other DNA
tgtacctgtgatcgtgccaatgtgcagtcttttgaccagcagtatttaaacgatcacggggttctagtgcagctcgacta

SEQ ID NO: 9846 - DNA, 80 bp, synthetic construct
  misc_feature 1..80: note = Synthetic: >SBB-010-cand-7930-8009
  source 1..80: mol_type = other DNA
tgtgtcagaggaagcccgctttgtgcctggtgtgcctgcaggtgtcttccttaatgataaaaccttggtgtttgccacta

SEQ ID NO: 9847 - DNA, 80 bp, synthetic construct
  misc_feature 1..80: note = Synthetic: >SBB-120-cand-2590-2669
  source 1..80: mol_type = other DNA
tattgcttctgtaacacaggttgttaaagttggaagcatttcattcacgtattatgctttcactgtgcctaaagttttca

SEQ ID NO: 9848 - DNA, 80 bp, synthetic construct
  misc_feature 1..80: note = Synthetic: >SBB-788-cand-20170-20249
  source 1..80: mol_type = other DNA
tgaatgtggctaaatacacccaattgtgtcagtacttgaataattgctctttagctgtacctgcaaagatgagagtaata

SEQ ID NO: 9849 - DNA, 80 bp, synthetic construct
  misc_feature 1..80: note = Synthetic: >229E-cand-8960-9039
  source 1..80: mol_type = other DNA
tgaaagtgctgctgcaggaacatttgttattgacatgcgttcttatgaaaaacttgctaatagcatctctccagaaaagt

SEQ ID NO: 9850 - DNA, 80 bp, synthetic construct
  misc_feature 1..80: note = Synthetic: >229E-cand-9040-9119
  source 1..80: mol_type = other DNA
tgaaaagttatgctgctagctataatagatacaagtattatagtggtaatgcaaatgaagcagattaccgttgtgcttgt

SEQ ID NO: 9851 - DNA, 80 bp, synthetic construct
  misc_feature 1..80: note = Synthetic: >229E-cand-9120-9199
  source 1..80: mol_type = other DNA
tatgcctatttagcgaaagcaatgttggacttttcgcgtgatcacaatgacattttgtacacacctccaactgtcagtta

SEQ ID NO: 9852 - DNA, 80 bp, synthetic construct
  misc_feature 1..80: note = Synthetic: >229E-cand-9200-9279
  source 1..80: mol_type = other DNA
tggttctacattacaggcaggtttgcgtaaaatggcacagccatctggcattgtggaaaaatgcgttgttcgcgtctgtt

SEQ ID NO: 9853 - DNA, 80 bp, synthetic construct
  misc_feature 1..80: note = Synthetic: >229E-cand-9280-9359
  source 1..80: mol_type = other DNA
atggcaacactgtgttaaatggtttatggcttggtgacattgtttattgtccacgtcatgttattgcatctaacacaact

SEQ ID NO: 9854 - DNA, 80 bp, synthetic construct
  misc_feature 1..80: note = Synthetic: >229E-cand-9360-9439
  source 1..80: mol_type = other DNA
gctgctatagactatgatcatgagtatagtattatgcgtttgcataatttttctataaattctggtacagcatttcttgg

SEQ ID NO: 9855 - DNA, 80 bp, synthetic construct
  misc_feature 1..80: note = Synthetic: >229E-cand-9440-9519
  source 1..80: mol_type = other DNA
tgttgtaggtgctactatgcatggagcaactcttaaaattaaagtttcacagactaacatgcacacacctagacattctt

SEQ ID NO: 9856 - DNA, 80 bp, synthetic construct
  misc_feature 1..80: note = Synthetic: >229E-cand-9520-9599
  source 1..80: mol_type = other DNA
ttaagacactaaaatctggcgaaggttttaacatcttagcttgttatgatggttgtgcccaaggtgttttcggtgtgaac

SEQ ID NO: 9857 - DNA, 80 bp, synthetic construct
  misc_feature 1..80: note = Synthetic: >229E-cand-9600-9679
  source 1..80: mol_type = other DNA
atgaggaccaattggactatccgaggttcatttattaatggtgcatgtggttctcctggctataatcttaaaaatggcga

SEQ ID NO: 9858 - DNA, 80 bp, synthetic construct
  misc_feature 1..80: note = Synthetic: >229E-cand-9680-9759
  source 1..80: mol_type = other DNA
agtggaatttgtttacatgcatcagattgaactcggaagtggtagccatgtaggttctagctttgatggtgttatgtatg

SEQ ID NO: 9859 - DNA, 80 bp, synthetic construct
  misc_feature 1..80: note = Synthetic: >229E-cand-9760-9839
  source 1..80: mol_type = other DNA
gtggttttgaagaccaacctaaccttcaagttgaatctgccaaccagatgctaacagttaatgtggtcgcatttctttat

SEQ ID NO: 9860 - DNA, 80 bp, synthetic construct
  misc_feature 1..80: note = Synthetic: >229E-cand-9840-9919
  source 1..80: mol_type = other DNA
gctgctatattgaatggttgcatatggtggctcaaaggtgataaattgtctgtagaacattataatgagtgggcacaggc

SEQ ID NO: 9861 - DNA, 80 bp, synthetic construct
  misc_feature 1..80: note = Synthetic: >229E-cand-9920-9999
  source 1..80: mol_type = other DNA
taatggttttacagccatgaatggtgaagatgccttttccattcttgctgctaaaactggtgtctgtgttgaaagattac

SEQ ID NO: 9862 - DNA, 80 bp, synthetic construct
  misc_feature 1..80: note = Synthetic: >229E-cand-10000-10079
  source 1..80: mol_type = other DNA
tccatgctattcaagttttgaataatggctttggtggtaaaaacattttgggttattctagtcttaatgatgagttcaat

SEQ ID NO: 9863 - DNA, 80 bp, synthetic construct
  misc_feature 1..80: note = Synthetic: >229E-cand-10080-10159
  source 1..80: mol_type = other DNA
attaatgaagttgtcaaacaaatgtttggtgttaacttacaaagtggcaagaccactagtatgtttaaatcactaagttt

SEQ ID NO: 9864 - DNA, 80 bp, synthetic construct
  misc_feature 1..80: note = Synthetic: >229E-cand-10160-10239
  source 1..80: mol_type = other DNA
gtttgctggtttctttattatgttctgggctgagttgtttgtttataccaccactgtttgggttaaccctggttttctca

SEQ ID NO: 9865 - DNA, 80 bp, synthetic construct
  misc_feature 1..80: note = Synthetic: >AlphaCoV1-cand-9610-9689
  source 1..80: mol_type = other DNA
taacattcttgcttgttatgaaggatgtcctggtagtgtttatggtgtgaacatgagaagtcagggtactattaaaggtt

SEQ ID NO: 9866 - DNA, 80 bp, synthetic construct
  misc_feature 1..80: note = Synthetic: >AlphaCoV1-cand-9690-9769
  source 1..80: mol_type = other DNA
cttttattgctggtacttgtgggtcagtaggttatgtgttagaaaatggaattctctattttgtatacatgcaccactta

SEQ ID NO: 9867 - DNA, 80 bp, synthetic construct
  misc_feature 1..80: note = Synthetic: >AlphaCoV1-cand-9850-9929
  source 1..80: mol_type = other DNA
attggaaggtactaatgtcatgtcatcagataatgtggttgcatttttgtatgctgcacttatcaatggtgaaagatggt

SEQ ID NO: 9868 - DNA, 80 bp, synthetic construct
  misc_feature 1..80: note = Synthetic: >AlphaCoV1-cand-9930-10009
  source 1..80: mol_type = other DNA
ttgttacaaacgcatcaatgtcattagaatcttacaatgcatgggccaaaactaacagttttacggaaattgtgtcaact

SEQ ID NO: 9869 - DNA, 80 bp, synthetic construct
  misc_feature 1..80: note = Synthetic: >AlphaCoV1-cand-10010-10089
  source 1..80: mol_type = other DNA
gatgcttttaacatgttggctgcaaaaactggttaaagtgttgaaaagttgcttgattgtattgttagactcaacaaagg

SEQ ID NO: 9870 - DNA, 80 bp, synthetic construct
  misc_feature 1..80: note = Synthetic: >AlphaCoV1-cand-10090-10169
  source 1..80: mol_type = other DNA
ttttggaggtcgtactatactgtcttatggctcattgtgtgatgaattcacacctactgaagtcataaggcaaatgtatg

SEQ ID NO: 9871 - DNA, 80 bp, synthetic construct
  misc_feature 1..80: note = Synthetic: >AlphaCoV1-cand-10170-10249
  source 1..80: mol_type = other DNA
gtgttaatcttcagagtggtaaagtgaaatctttcttttaccctatgatgactgcaatggctattctttttgcattttgg

SEQ ID NO: 9872 - DNA, 80 bp, synthetic construct
  misc_feature 1..80: note = Synthetic: >AlphaCoV1-cand-10250-10329
  source 1..80: mol_type = other DNA
ttagaattcttcatgtacacaccctttacgtggattaatccaacatttgttagtgttgttctagctgttacaactttggt

SEQ ID NO: 9873 - DNA, 80 bp, synthetic construct
  misc_feature 1..80: note = Synthetic: >AlphaCoV1-cand-10330-10409
  source 1..80: mol_type = other DNA
atctgcgatattagtcgctggaattaaacacaaaatgttgttctttatgtcttttgtaatgcctagtgttattttagcta

SEQ ID NO: 9874 - DNA, 80 bp, synthetic construct
  misc_feature 1..80: note = Synthetic: >AlphaCoV1-cand-10410-10489
  source 1..80: mol_type = other DNA
ctgcacataatgtggtctgggacttgacttattatgaaagtttacaggctcttgttgaaaatattaacactacgttttta

SEQ ID NO: 9875 - DNA, 80 bp, synthetic construct
  misc_feature 1..80: note = Synthetic: >AlphaCoV1-cand-10490-10569
  source 1..80: mol_type = other DNA
ccagttgacatgcaaggtgtcatgcttgcagtgttttgtgttattgtgtttgttacatacactgtaagattcttcacatg

SEQ ID NO: 9876 - DNA, 80 bp, synthetic construct
  misc_feature 1..80: note = Synthetic: >AlphaCoV1-cand-10570-10649
  source 1..80: mol_type = other DNA
caaacaatcatggttttcactgtttgtaacaactgtttttgtgatgtttaacattgttgcccaatggtactattagctaa

SEQ ID NO: 9877 - DNA, 80 bp, synthetic construct
  misc_feature 1..80: note = Synthetic: >AlphaCoV1-cand-10650-10729
  source 1..80: mol_type = other DNA
aattattaggtatgttaggtgaaccatggactgaagaccacattttgttgtgtcttgtaaacatgcttactatgttgata

SEQ ID NO: 9878 - DNA, 80 bp, synthetic construct
  misc_feature 1..80: note = Synthetic: >AlphaCoV1-cand-10730-10809
  source 1..80: mol_type = other DNA
agtcttactacaaaggattggtttgttgtctttgcatcatacaaaattgcttattatatagttgtatatgtaatgcaacc

SEQ ID NO: 9879 - DNA, 80 bp, synthetic construct
  misc_feature 1..80: note = Synthetic: >AlphaCoV1-cand-10810-10889
  source 1..80: mol_type = other DNA
agcttttgttcaagactttggttttatgaagtgtgtaagcattgtttacatggcttgtggttatttgttctgttgttatt

SEQ ID NO: 9880 - DNA, 80 bp, synthetic construct
  misc_feature 1..80: note = Synthetic: >AlphaSp-cand-10120-10199
  source 1..80: mol_type = other DNA
aagttgcatggcaattttggtggtaagagcattctgggttgcacttcattgaatgatgaatttactcttgctgaagtagt

SEQ ID NO: 9881 - DNA, 80 bp, synthetic construct
  misc_feature 1..80: note = Synthetic: >AlphaSp-cand-10200-10279
  source 1..80: mol_type = other DNA
caaacaaatgtatggcgtaacacttcagagtagtaaggtttccagagcttttagaaatgcatcaatagtttgttgtttct

SEQ ID NO: 9882 - DNA, 80 bp, synthetic construct
  misc_feature 1..80: note = Synthetic: >AlphaSp-cand-10440-10519
  source 1..80: mol_type = other DNA
attgtgcatagtgtctggttataatatttttaaggattatcatttttacacttatatgcttgaagaatttgactataaag

SEQ ID NO: 9883 - DNA, 80 bp, synthetic construct
  misc_feature 1..80: note = Synthetic: >AlphaSp-cand-10520-10599
  source 1..80: mol_type = other DNA
tgcctttcggtggatttaatgtcacaggtgttcttaacatagcactttgttgttttgttatgggtttgcatacctttagg

SEQ ID NO: 9884 - DNA, 80 bp, synthetic construct
  misc_feature 1..80: note = Synthetic: >AlphaSp-cand-10680-10759
  source 1..80: mol_type = other DNA
catcttaggtcttattttgacctctatgtctggttttactaatcactggtttattggcactgccacttataagttagcta

SEQ ID NO: 9885 - DNA, 80 bp, synthetic construct
  misc_feature 1..80: note = Synthetic: >AlphaSp-cand-10760-10839
  source 1..80: mol_type = other DNA
cctatgttttgccatacacatctttacttgatagtatctttgatgctatcaaagcagtggtgttcttgtacctgttattg

SEQ ID NO: 9886 - DNA, 80 bp, synthetic construct
  misc_feature 1..80: note = Synthetic: >AlphaSp-cand-10920-10999
  source 1..80: mol_type = other DNA
taaagtcagtgccgcagaatttaaatatatggtggctaatggactacgtgcacctactggtgtttttgatgccttgatac

SEQ ID NO: 9887 - DNA, 80 bp, synthetic construct
  misc_feature 1..80: note = Synthetic: >AlphaSp-cand-11080-11159
  source 1..80: mol_type = other DNA
tgcactaatgttgtgttgttgggttgtttatccaatatgaacattgctgctaattcaaaggagtgggcttattgcgttga

SEQ ID NO: 9888 - DNA, 80 bp, synthetic construct
  misc_feature 1..80: note = Synthetic: >AlphaSp-cand-11160-11239
  source 1..80: mol_type = other DNA
tttacataataagattaatttgtgtaatgacgccgaagcagctcaggagatgttgttagcattgttggctttcttcttaa

SEQ ID NO: 9889 - DNA, 80 bp, synthetic construct
  misc_feature 1..80: note = Synthetic: >AlphaSp-cand-11240-11319
  source 1..80: mol_type = other DNA
gtaagaatagcgcttttggtgtggatgatttgttggattcttatttcaacgatagttctatcctccagagcgttgcagct

SEQ ID NO: 9890 - DNA, 80 bp, synthetic construct
  misc_feature 1..80: note = Synthetic: >Anlong-cand-7310-7389
  source 1..80: mol_type = other DNA
acaattttatagttagttatgccaagcctgaagaaaaattgtcagcatttgattgtgcacagtgtgtacgcgctggtgct

SEQ ID NO: 9891 - DNA, 80 bp, synthetic construct
  misc_feature 1..80: note = Synthetic: >Anlong-cand-7390-7469
  source 1..80: mol_type = other DNA
aaaatagtcaaccataatgtcctagttaaagaaaagctgtctgttgtgtggcttgctaaagattttcagaatctttcagc

SEQ ID NO: 9892 - DNA, 80 bp, synthetic construct
  misc_feature 1..80: note = Synthetic: >Anlong-cand-7470-7549
  source 1..80: mol_type = other DNA
agaggggcgtaagtatttggttaagactgcaaaagttaaaggtcttaattttatacttacgcttaatgataatgccgcac

SEQ ID NO: 9893 - DNA, 80 bp, synthetic construct
  misc_feature 1..80: note = Synthetic: >Anlong-cand-7550-7629
  source 1..80: mol_type = other DNA
agtgcagtgtcccagttgttagtatgatgagtaagaagggtgcaggtcccaagcgtagatcatacttttggtttatgtgg

SEQ ID NO: 9894 - DNA, 80 bp, synthetic construct
  misc_feature 1..80: note = Synthetic: >Anlong-cand-7630-7709
  source 1..80: mol_type = other DNA
gcactttgtgctcttatacttggaatatactatgctactagctacattacatttggtactcaagttagtagttttgctgg

SEQ ID NO: 9895 - DNA, 80 bp, synthetic construct
  misc_feature 1..80: note = Synthetic: >Anlong-cand-7710-7789
  source 1..80: mol_type = other DNA
ttatgactttaagtacattgagcatggacagctccgtgaatttgaagctgggcttccatgtgttcataatacatttgaca

SEQ ID NO: 9896 - DNA, 80 bp, synthetic construct
  misc_feature 1..80: note = Synthetic: >Anlong-cand-7790-7869
  source 1..80: mol_type = other DNA
attttatggaatggcatttccagaagtttggtatacgtcctagtactagtacaaactgccctgtagtagtaggtgttggt

SEQ ID NO: 9897 - DNA, 80 bp, synthetic construct
  misc_feature 1..80: note = Synthetic: >Anlong-cand-7870-7949
  source 1..80: mol_type = other DNA
gataatggtcgtaccatacctggtgtgccagcagatgtgcaacttgttggtcacactctcgtttttaccgttaagacagt

SEQ ID NO: 9898 - DNA, 80 bp, synthetic construct
  misc_feature 1..80: note = Synthetic: >Anlong-cand-7950-8029
  source 1..80: mol_type = other DNA
ttttggcaacaccaacctgtgctatgatactagtggtgttgttaatgcagctagctgcattttcacatccgcatgtactg

SEQ ID NO: 9899 - DNA, 80 bp, synthetic construct
  misc_feature 1..80: note = Synthetic: >Anlong-cand-8030-8109
  source 1..80: mol_type = other DNA
tgctcgagggtcttggtggtgctattacatactgctataaaaatggtattgtagagggtgctaaattatatagtgacttg

SEQ ID NO: 9900 - DNA, 80 bp, synthetic construct
  misc_feature 1..80: note = Synthetic: >Anlong-cand-8110-8189
  source 1..80: mol_type = other DNA
caacctaatgctcattacaagtttgatgcagacaattacgtgaagataccagaagttctcgctaggggttttggtatgcg

SEQ ID NO: 9901 - DNA, 80 bp, synthetic construct
  misc_feature 1..80: note = Synthetic: >Anlong-cand-8190-8269
  source 1..80: mol_type = other DNA
tacaattagaaccattgaaactacatattgccgcgttggcgaatgtattgaatctaaggctggtatttgtattggagctg

SEQ ID NO: 9902 - DNA, 80 bp, synthetic construct
  misc_feature 1..80: note = Synthetic: >Anlong-cand-8270-8349
  source 1..80: mol_type = other DNA
accgttggttagtttacagtgcagaatcaggttcagactttgtttgtggttctagtttaatacagttgctgtgtaatgct

SEQ ID NO: 9903 - DNA, 80 bp, synthetic construct
  misc_feature 1..80: note = Synthetic: >Anlong-cand-8350-8429
  source 1..80: mol_type = other DNA
tttaaagtctttaattatgactttagtacagcagcattgtctggtcaaatgatgtttaatgctattgttgcaggtcttgc

SEQ ID NO: 9904 - DNA, 80 bp, synthetic construct
  misc_feature 1..80: note = Synthetic: >Anlong-cand-8430-8509
  source 1..80: mol_type = other DNA
tattatgatttgttttcttgtaacaaagttcaagcgcgtttttggtgacttgtcttatggtgttttcactgttattgtca

SEQ ID NO: 9905 - DNA, 80 bp, synthetic construct
  misc_feature 1..80: note = Synthetic: >Anlong-cand-8510-8589
  source 1..80: mol_type = other DNA
cggcgcttgtttgtaatttgtcttattttgttacacaaaattatttgggcttatacatattttcagggctgtattacctt

SEQ ID NO: 9906 - DNA, 80 bp, synthetic construct
  misc_feature 1..80: note = Synthetic: >AvianCoV-cand-12540-12619
  source 1..80: mol_type = other DNA
agtatcgtgattcttattttgtggttaaacaaaccactcctagtaattatgaacatgagaaagcttgttatgaagactta

SEQ ID NO: 9907 - DNA, 80 bp, synthetic construct
  misc_feature 1..80: note = Synthetic: >AvianCoV-cand-12620-12699
  source 1..80: mol_type = other DNA
aagtcagaagtaacagctgatcatgatttctttgtgttcaataagaacatttataatattagtaggcaacggcttactaa

SEQ ID NO: 9908 - DNA, 80 bp, synthetic construct
  misc_feature 1..80: note = Synthetic: >AvianCoV-cand-12700-12779
  source 1..80: mol_type = other DNA
gtatactatgatggacttttgctatgctttgaggcattttgacccaaaggattgcgaagttcttaaagaaatacttgtca

SEQ ID NO: 9909 - DNA, 80 bp, synthetic construct
  misc_feature 1..80: note = Synthetic: >AvianCoV-cand-12780-12859
  source 1..80: mol_type = other DNA
cttatggttgtatagaagattatcaccctaagtggtttgaagaaaataaggattggtacgacccaatagaaaacccaaaa

SEQ ID NO: 9910 - DNA, 80 bp, synthetic construct
  misc_feature 1..80: note = Synthetic: >AvianCoV-cand-12860-12939
  source 1..80: mol_type = other DNA
tattatgccatgttggctaaaatgggacctattgtacgtcgtgcattattgaatgctgttgagtttggaaacctaatggt

SEQ ID NO: 9911 - DNA, 80 bp, synthetic construct
  misc_feature 1..80: note = Synthetic: >AvianCoV-cand-12940-13019
  source 1..80: mol_type = other DNA
tgaaaagggttatgtaggtgttgttacactagataaccaggacctcaatggcaaattttatgattttggtgattttcaga

SEQ ID NO: 9912 - DNA, 80 bp, synthetic construct
  misc_feature 1..80: note = Synthetic: >AvianCoV-cand-13020-13099
  source 1..80: mol_type = other DNA
aaacagcacctggtgctggtgttcctgtttttgatacatattattcctacatgatgcccatcatagccatgacggatgcg

SEQ ID NO: 9913 - DNA, 80 bp, synthetic construct
  misc_feature 1..80: note = Synthetic: >AvianCoV-cand-13100-13179
  source 1..80: mol_type = other DNA
ttagcacctgaaaggtattttgaatatgatgtgcataagggttataagtcttatgatctcctcaagtatgattatacaga

SEQ ID NO: 9914 - DNA, 80 bp, synthetic construct
  misc_feature 1..80: note = Synthetic: >AvianCoV-cand-13180-13259
  source 1..80: mol_type = other DNA
ggagaaacaagaattgtttcaaaagtactttaagtactgggatcaagagtaccaccctaattgtcgagattgtattgacg

SEQ ID NO: 9915 - DNA, 80 bp, synthetic construct
  misc_feature 1..80: note = Synthetic: >AvianCoV-cand-13260-13339
  source 1..80: mol_type = other DNA
ataggtgtttgatacattgtgcaaacttcaacatacttttctctacactaataccacaaacttcttttggtaatttgtgt

SEQ ID NO: 9916 - DNA, 80 bp, synthetic construct
  misc_feature 1..80: note = Synthetic: >AvianCoV-cand-13340-13419
  source 1..80: mol_type = other DNA
agaaaagtgtttgttgatggtgtaccatttatagctacttgtggctatcattctaaggaacttggtgttattatgaatca

SEQ ID NO: 9917 - DNA, 80 bp, synthetic construct
  misc_feature 1..80: note = Synthetic: >AvianCoV-cand-13420-13499
  source 1..80: mol_type = other DNA
agataacaccatgtctttttcaaaaatgggtttaagccagcttatgaagtttgtaggagatcctgctcttttagtaggaa

SEQ ID NO: 9918 - DNA, 80 bp, synthetic construct
  misc_feature 1..80: note = Synthetic: >AvianCoV-cand-13500-13579
  source 1..80: mol_type = other DNA
cttctaacaatttagttgatcttagaacttcttgttttagtgtctgtgctttagcttctggtataacacaccagacagta

SEQ ID NO: 9919 - DNA, 80 bp, synthetic construct
  misc_feature 1..80: note = Synthetic: >AvianCoV-cand-13580-13659
  source 1..80: mol_type = other DNA
aaaccaggtcactttaataaggatttctatgattttgctgaaaaagcaggtatgtttaaggaaggatcatcaataccact

SEQ ID NO: 9920 - DNA, 80 bp, synthetic construct
  misc_feature 1..80: note = Synthetic: >AvianCoV-cand-13660-13739
  source 1..80: mol_type = other DNA
taaacatttcttctacccacagactggtaatgctgctataaacgattatgattattatcgttataacaggcctactatgt

SEQ ID NO: 9921 - DNA, 80 bp, synthetic construct
  misc_feature 1..80: note = Synthetic: >AvianCoV-cand-13740-13819
  source 1..80: mol_type = other DNA
ttgatatacgtcagcttctattttgtttagaagtgacgtctaaatattttgaatgttatgaaggtggttgtataccagct

SEQ ID NO: 9922 - DNA, 80 bp, synthetic construct
  misc_feature 1..80: note = Synthetic: >BetaCoV1-cand-7820-7899
  source 1..80: mol_type = other DNA
agcactgttgttggtggcatgttacgctattacgatgtgatggctaatggtggcatcaacttttgtaacaaacatcagtg

SEQ ID NO: 9923 - DNA, 80 bp, synthetic construct
  misc_feature 1..80: note = Synthetic: >BetaCoV1-cand-7900-7979
  source 1..80: mol_type = other DNA
gaattgcattggatgcgattcttacaaacctggcaatacttttataaccgtagaggctgcagctgaattgtctaaagaat

SEQ ID NO: 9924 - DNA, 80 bp, synthetic construct
  misc_feature 1..80: note = Synthetic: >BetaCoV1-cand-8140-8219
  source 1..80: mol_type = other DNA
taaagttaatggtgtgcctaagactaatgtagtcattgtggatggtgatgctgataaggctaactttctcaatgctgttg

SEQ ID NO: 9925 - DNA, 80 bp, synthetic construct
  misc_feature 1..80: note = Synthetic: >BetaCoV1-cand-8300-8379
  source 1..80: mol_type = other DNA
gtttctaagactatgttcgacgtatacgtggataccctgttgggcatgtttgaggtcgaacgcaagtcgctcaataattt

SEQ ID NO: 9926 - DNA, 80 bp, synthetic construct
  misc_feature 1..80: note = Synthetic: >BetaCoV1-cand-8460-8539
  source 1..80: mol_type = other DNA
aaatttgctctatagattctgatgttgacactggatgccttgcagacactgttatgtctacagtggccgctgggcttgac

SEQ ID NO: 9927 - DNA, 80 bp, synthetic construct
  misc_feature 1..80: note = Synthetic: >BetaCoV1-cand-8700-8779
  source 1..80: mol_type = other DNA
ttaatcagcttagttctgattttcagcataaattaaagaaagcatgtgtaaagactggccttaagcttaagctcacttat

SEQ ID NO: 9928 - DNA, 80 bp, synthetic construct
  misc_feature 1..80: note = Synthetic: >BetaCoV1-cand-8780-8859
  source 1..80: mol_type = other DNA
aataaacagtccgctaatgtgtctattttgacaatgcctttttcccttaagggaggtgcgcttgttagcaatgtgttgtt

SEQ ID NO: 9929 - DNA, 80 bp, synthetic construct
  misc_feature 1..80: note = Synthetic: >BetaCoV1-cand-11500-11579
  source 1..80: mol_type = other DNA
atttagagggtatgcctatgcatggctatcatatgtggtgccttctgttgactatacttatacctatgaggttttgtatg

SEQ ID NO: 9930 - DNA, 80 bp, synthetic construct
  misc_feature 1..80: note = Synthetic: >BetaCoV1-cand-11660-11739
  source 1..80: mol_type = other DNA
aactagagcggcttctgtagcgtccatgtggtatatgggttccaatttggagatagaaatacttttgttagttgtttcta

SEQ ID NO: 9931 - DNA, 80 bp, synthetic construct
  misc_feature 1..80: note = Synthetic: >BetaCoV1-cand-11740-11819
  source 1..80: mol_type = other DNA
tctttggaacctatacctggactactattatatcgctgactgtagctaagactatggcttggtggttgcatgctaatatc

SEQ ID NO: 9932 - DNA, 80 bp, synthetic construct
  misc_feature 1..80: note = Synthetic: >BetaCoV1-cand-12140-12219
  source 1..80: mol_type = other DNA
ttgtttacagcatctacacgtagcatctaattctaagttgtggcaatattgtagcactttgcacaatgaaatacttgcca

SEQ ID NO: 9933 - DNA, 80 bp, synthetic construct
  misc_feature 1..80: note = Synthetic: >BetaCoV1-cand-12220-12299
  source 1..80: mol_type = other DNA
cttcagatcttggtgtcgcatttgataaattggctcagcttctgattgtgctctttgcaaatccagctgctgttgatacc

SEQ ID NO: 9934 - DNA, 80 bp, synthetic construct
  misc_feature 1..80: note = Synthetic: >BetaCoV1-cand-12300-12379
  source 1..80: mol_type = other DNA
aaatgcttaactagtatagaggatgtgtgtgacgattatgttcgtgacaatacagtcctacaggcattacaaagtgagtt

SEQ ID NO: 9935 - DNA, 80 bp, synthetic construct
  misc_feature 1..80: note = Synthetic: >BetaCoV1-cand-12460-12539
  source 1..80: mol_type = other DNA
aacagcagattaaacagctagaaaaagcctgtaatattgctaagtctgcatatgagcgagacagagctgttgctcgtaag

SEQ ID NO: 9936 - DNA, 80 bp, synthetic construct
  misc_feature 1..80: note = Synthetic: >BetaCoV1-cand-12540-12619
  source 1..80: mol_type = other DNA
ctcgaacgtatggctgatttagctcttaccaatatgtataaagaagctagaataaatgataagaagagcaaggttgtttc

SEQ ID NO: 9937 - DNA, 80 bp, synthetic construct
  misc_feature 1..80: note = Synthetic: >BetaCoV1-cand-12700-12779
  source 1..80: mol_type = other DNA
aagggtgtgtacctcttaacgcaataccatctcttactgctaactcacttacaattatagtgccagataaaatagtctat

SEQ ID NO: 9938 - DNA, 80 bp, synthetic construct
  misc_feature 1..80: note = Synthetic: >CanadaGoose-cand-8070-8149
  source 1..80: mol_type = other DNA
cttgttgtgaccttttattttattgtgccaatgtggatttttgttatctatgttgtgttcttattgtatgcttatacacc

SEQ ID NO: 9939 - DNA, 80 bp, synthetic construct
  misc_feature 1..80: note = Synthetic: >CanadaGoose-cand-8150-8229
  source 1..80: mol_type = other DNA
actttgtttttggtgtgttggtaatgttagggctactaagaaactctatgaaaatggtgagtttgttggtagttatgata

SEQ ID NO: 9940 - DNA, 80 bp, synthetic construct
  misc_feature 1..80: note = Synthetic: >CanadaGoose-cand-8230-8309
  source 1..80: mol_type = other DNA
tagcttctcaggcaacttttgttataagagcagctgaatattgtaagttggctaatgaagttggtgataagcttgatgct

SEQ ID NO: 9941 - DNA, 80 bp, synthetic construct
  misc_feature 1..80: note = Synthetic: >CanadaGoose-cand-8310-8389
  source 1..80: mol_type = other DNA
tatttggctgcatatgctagacttaaatattattctggtactggtggtgatgaagagtatagacaggcttgtagagcttg

SEQ ID NO: 9942 - DNA, 80 bp, synthetic construct
  misc_feature 1..80: note = Synthetic: >CanadaGoose-cand-8390-8469
  source 1..80: mol_type = other DNA
gcttgcttatgcacttaaccagtaccaaacttctcaagttgaggtgctttatactcctcctaaatttgctattggtacta

SEQ ID NO: 9943 - DNA, 80 bp, synthetic construct
  misc_feature 1..80: note = Synthetic: >CanadaGoose-cand-8470-8549
  source 1..80: mol_type = other DNA
ctagattgcaggctggttttaaaaaattagtcgcacctagtagtggtatagagaatgtcttagtcatggtgaggtttaag

SEQ ID NO: 9944 - DNA, 80 bp, synthetic construct
  misc_feature 1..80: note = Synthetic: >CanadaGoose-cand-8550-8629
  source 1..80: mol_type = other DNA
ggcaatgtacttaatggtatttggcttaatgaccttatctattgtcctagacatgttattggtaagtattctggcgatga

SEQ ID NO: 9945 - DNA, 80 bp, synthetic construct
  misc_feature 1..80: note = Synthetic: >CanadaGoose-cand-8630-8709
  source 1..80: mol_type = other DNA
ttggcagaatgctttgcatatggctaataattttgattttgaagttattagtaataaaattggtggtcttagtgtgattg

SEQ ID NO: 9946 - DNA, 80 bp, synthetic construct
  misc_feature 1..80: note = Synthetic: >CanadaGoose-cand-8710-8789
  source 1..80: mol_type = other DNA
agcgccgcatgcaaggagctcttcttgttttgcgtgttaatcaatctaataagaatacacctaagtttaaatttgtaaag

SEQ ID NO: 9947 - DNA, 80 bp, synthetic construct
  misc_feature 1..80: note = Synthetic: >CanadaGoose-cand-8790-8869
  source 1..80: mol_type = other DNA
gctcatgatggtgatactttcactatagcatgttcttataatggagtaatagcggggttatacccctgtaccttgagagc

SEQ ID NO: 9948 - DNA, 80 bp, synthetic construct
  misc_feature 1..80: note = Synthetic: >CanadaGoose-cand-8870-8949
  source 1..80: mol_type = other DNA
taacggtactattaagggttcttttggcctgggatcatgtggttctataggctataatctagttaatggtatttatgagc

SEQ ID NO: 9949 - DNA, 80 bp, synthetic construct
  misc_feature 1..80: note = Synthetic: >CanadaGoose-cand-8950-9029
  source 1..80: mol_type = other DNA
tttgttatatgcatcatttggagttacctggtgctattcatgcagggactgatttgtctggtaacttttatggtgatttt

SEQ ID NO: 9950 - DNA, 80 bp, synthetic construct
  misc_feature 1..80: note = Synthetic: >CanadaGoose-cand-9030-9109
  source 1..80: mol_type = other DNA
gtagatgaggaaaaggctcaatttgtaaagccagatcctctaattgctaataatgtggttgcatggttgtatgcggctat

SEQ ID NO: 9951 - DNA, 80 bp, synthetic construct
  misc_feature 1..80: note = Synthetic: >CanadaGoose-cand-9110-9189
  source 1..80: mol_type = other DNA
tataaattatagagaaagtcattattgttatcctaagtggcttgaatcctctagtgtttctcttgaggagtttaatgctt

SEQ ID NO: 9952 - DNA, 80 bp, synthetic construct
  misc_feature 1..80: note = Synthetic: >CanadaGoose-cand-9190-9269
  source 1..80: mol_type = other DNA
gggctaaggataatggttttactagttttattgatggtcctgtcttccaaaagctggcttctattactggagtagagctt

SEQ ID NO: 9953 - DNA, 80 bp, synthetic construct
  misc_feature 1..80: note = Synthetic: >CanadaGoose-cand-9270-9349
  source 1..80: mol_type = other DNA
ggtagagttttaaggactatcttaactaaacatgcttgttggggtaatgaccctattttaggcagttttagttttgatga

SEQ ID NO: 9954 - DNA, 80 bp, synthetic construct
  misc_feature 1..80: note = Synthetic: >CanadaGoose-cand-10630-10709
  source 1..80: mol_type = other DNA
gtattgttatttcaccacaggaagttgctgcttatcgtaaggctgctaatatagctaaggccacttttgatagggattta

SEQ ID NO: 9955 - DNA, 80 bp, synthetic construct
  misc_feature 1..80: note = Synthetic: >CanadaGoose-cand-10710-10789
  source 1..80: mol_type = other DNA
gcagttcagaaaaaacttgatgctatggctgaacgtgctatgacctctatgtataaagaagctcgtgttaatgatagaaa

SEQ ID NO: 9956 - DNA, 80 bp, synthetic construct
  misc_feature 1..80: note = Synthetic: >CanadaGoose-cand-10790-10869
  source 1..80: mol_type = other DNA
ggctaagcttgtttcatcattgcacgctcttttgttttctatgcttaagaagatagattctgacaagcttaatacattat

SEQ ID NO: 9957 - DNA, 80 bp, synthetic construct
  misc_feature 1..80: note = Synthetic: >CanadaGoose-cand-10870-10949
  source 1..80: mol_type = other DNA
ttgaacaggctcagaatggtgttgttccattagcttctgttcctatagtttgtagtaataaactcacacttgtaattcca

SEQ ID NO: 9958 - DNA, 80 bp, synthetic construct
  misc_feature 1..80: note = Synthetic: >CanadaGoose-cand-10970-11049
  source 1..80: mol_type = other DNA
gtgtgtagagaatgatgttgttacatattccggtgttgtctggaatattgattctattttcgatggtgatgataatgagg

SEQ ID NO: 9959 - DNA, 80 bp, synthetic construct
  misc_feature 1..80: note = Synthetic: >CanadaGoose-cand-11050-11129
  source 1..80: mol_type = other DNA
ttaaaccacagtttgttcgtagagataatattacagtaccttattatgatataaaacctgacatggcttggcctttaaaa

SEQ ID NO: 9960 - DNA, 80 bp, synthetic construct
  misc_feature 1..80: note = Synthetic: >CanadaGoose-cand-11130-11209
  source 1..80: mol_type = other DNA
cttagccttgttagaaatactcataataagatagtattgcaaaataatgaacttatgcccactggtgttaaaactgcggc

SEQ ID NO: 9961 - DNA, 80 bp, synthetic construct
  misc_feature 1..80: note = Synthetic: >CanadaGoose-cand-11210-11289
  source 1..80: mol_type = other DNA
ctgtgtggctggtgtagaccagacatcatgtaatgttgaggctaagtgttattatactaatattaatggtgctaaagttg

SEQ ID NO: 9962 - DNA, 80 bp, synthetic construct
  misc_feature 1..80: note = Synthetic: >CanadaGoose-cand-11290-11369
  source 1..80: mol_type = other DNA
tagctgccattactagtttgaaggctgatttacgttatgcatcattctttaacgatgctggtaaacagatctatatagag

SEQ ID NO: 9963 - DNA, 80 bp, synthetic construct
  misc_feature 1..80: note = Synthetic: >CanadaGoose-cand-11370-11449
  source 1..80: mol_type = other DNA
cttgacccaccatgtaagtttggtatgaatgttaatggtaaggttgaagttgtttatctgtattttattaagaacactcg

SEQ ID NO: 9964 - DNA, 80 bp, synthetic construct
  misc_feature 1..80: note = Synthetic: >CanadaGoose-cand-11450-11529
  source 1..80: mol_type = other DNA
ttctattgttaggggtatggttcttggtgccatatctaatgttgttgtgttacaaggcaagggtcatgacacggaagaag

SEQ ID NO: 9965 - DNA, 80 bp, synthetic construct
  misc_feature 1..80: note = Synthetic: >CanadaGoose-cand-11530-11609
  source 1..80: mol_type = other DNA
tggaggcagtaggtatactgtcactctgttcttttgctgttgatcctgcttcatgttataaggaatacattgctggtggt

SEQ ID NO: 9966 - DNA, 80 bp, synthetic construct
  misc_feature 1..80: note = Synthetic: >CanadaGoose-cand-11610-11689
  source 1..80: mol_type = other DNA
ggtaaaccactagctaattgtgtaaaaatgctaactgtacacaatggcagtggttttgctattacaacaaaaccttctcc

SEQ ID NO: 9967 - DNA, 80 bp, synthetic construct
  misc_feature 1..80: note = Synthetic: >CanadaGoose-cand-11690-11769
  source 1..80: mol_type = other DNA
tactcctgaccaggattcttatggaggagcttctgtgtgtttgtattgtagggctcatgttgcacaccctaatatggatg

SEQ ID NO: 9968 - DNA, 80 bp, synthetic construct
  misc_feature 1..80: note = Synthetic: >CanadaGoose-cand-11770-11849
  source 1..80: mol_type = other DNA
gtaagtgtccatacaaaggatcatttgtgcagataccctctgttgagcaggaccccgtgatgttttgtttgattaataaa

SEQ ID NO: 9969 - DNA, 80 bp, synthetic construct
  misc_feature 1..80: note = Synthetic: >CanadaGoose-cand-11850-11929
  source 1..80: mol_type = other DNA
gtttgtaatgtttgtcaatgttggattggttatggttgtaagtgtgatgaacttagaccaacaatgcaatttgactctta

SEQ ID NO: 9970 - DNA, 80 bp, synthetic construct
  misc_feature 1..80: note = Synthetic: >HKU10-cand-25600-25679
  source 1..80: mol_type = other DNA
tctttgcacaagagcctgttgtaggtgtggtgaacatgtgcttttctgaacttagactctgtgaagaggttgatgcagtt

SEQ ID NO: 9971 - DNA, 80 bp, synthetic construct
  misc_feature 1..80: note = Synthetic: >HKU10-cand-25680-25759
  source 1..80: mol_type = other DNA
caatctgattaattgagtctctaattcctcttgtccctggttatgttttcaagtagtttcatactatttacaggtctaat

SEQ ID NO: 9972 - DNA, 80 bp, synthetic construct
  misc_feature 1..80: note = Synthetic: >HKU10-cand-25760-25839
  source 1..80: mol_type = other DNA
ctgtaacgtagcgtgggtaccactacattataaccatactgcacaagttgtggttactcttattggtgtgaatagcgttg

SEQ ID NO: 9973 - DNA, 80 bp, synthetic construct
  misc_feature 1..80: note = Synthetic: >HKU10-cand-25840-25919
  source 1..80: mol_type = other DNA
attaccaccttacaaataacactttatgtgttggtggtaagtctgttagactaggttatagttattgttacaacactact

SEQ ID NO: 9974 - DNA, 80 bp, synthetic construct
  misc_feature 1..80: note = Synthetic: >HKU10-cand-25920-25999
  source 1..80: mol_type = other DNA
gtgtcttatacaataaacaccggttatagtagtattgacttccgagctcagctcattaacggtactgctattactggaaa

SEQ ID NO: 9975 - DNA, 80 bp, synthetic construct
  misc_feature 1..80: note = Synthetic: >HKU10-cand-26000-26079
  source 1..80: mol_type = other DNA
aattcacctagatctttcaatcgctagtgcatttaccactgctgtcccactcaaacaatactcctggtctgtccaagact

SEQ ID NO: 9976 - DNA, 80 bp, synthetic construct
  misc_feature 1..80: note = Synthetic: >HKU10-cand-26080-26159
  source 1..80: mol_type = other DNA
aaatgagtgttatagcgtgtcttgtgttagttactgttacagtttcccaccttaatttgtttgttgatttcaatggtaga

SEQ ID NO: 9977 - DNA, 80 bp, synthetic construct
  misc_feature 1..80: note = Synthetic: >HKU10-cand-26160-26239
  source 1..80: mol_type = other DNA
gttgattactacttaggtagtggtagaaagatctgttcatttggacattctttcaaccctcagctctacaattgcacaaa

SEQ ID NO: 9978 - DNA, 80 bp, synthetic construct
  misc_feature 1..80: note = Synthetic: >HKU10-cand-26240-26319
  source 1..80: mol_type = other DNA
cacttcattgagtcttgacatttggcaaggctatataggtgaattctctgtacattgtgtgggtgattctatcgtcagca

SEQ ID NO: 9979 - DNA, 80 bp, synthetic construct
  misc_feature 1..80: note = Synthetic: >HKU10-cand-26320-26399
  source 1..80: mol_type = other DNA
atggttacgtggcaattgtctatgttaactccgctcattgtaatacaccactgattttgatttgcattgtcatgccctgt

SEQ ID NO: 9980 - DNA, 80 bp, synthetic construct
  misc_feature 1..80: note = Synthetic: >HKU10-cand-26400-26479
  source 1..80: mol_type = other DNA
ctgctttactattcatcatattagttactgctgctcttgctgtacaccttacatcaatggcagtacagtacaactctact

SEQ ID NO: 9981 - DNA, 80 bp, synthetic construct
  misc_feature 1..80: note = Synthetic: >HKU10-cand-26480-26559
  source 1..80: mol_type = other DNA
ttccagtattctgtagagtctaattacaagagcgtagagtggaaatttaacaatagttacatttgctcttcgggtggttt

SEQ ID NO: 9982 - DNA, 80 bp, synthetic construct
  misc_feature 1..80: note = Synthetic: >HKU10-cand-26560-26639
  source 1..80: mol_type = other DNA
agtgtatgacactttcaatgccacctttacttgtgaaaattcgacgctcacaggtaacacactttatagtggtattgacg

SEQ ID NO: 9983 - DNA, 80 bp, synthetic construct
  misc_feature 1..80: note = Synthetic: >HKU10-cand-26640-26719
  source 1..80: mol_type = other DNA
tgctgcagatcgaatgtaaaatgcataatggtagctctttgagtgccattgtcaatacaattgattcggtttactacaca

SEQ ID NO: 9984 - DNA, 80 bp, synthetic construct
  misc_feature 1..80: note = Synthetic: >HKU10-cand-26720-26799
  source 1..80: mol_type = other DNA
agccccccccacaacagtgtttgtcactacacagacctcgcgtctcataaactcaactaaattaactcattatagtttgt

SEQ ID NO: 9985 - DNA, 80 bp, synthetic construct
  misc_feature 1..80: note = Synthetic: >HKU10-cand-26800-26879
  source 1..80: mol_type = other DNA
ttgttgcatttactatagtacctgtagtttactgtaacctaacaccatgatgtttacattagtgaatgataatggtatga

SEQ ID NO: 9986 - DNA, 80 bp, synthetic construct
  misc_feature 1..80: note = Synthetic: >HKU10-cand-29440-29519
  source 1..80: mol_type = other DNA
tgcttcttagtattcttagcttttcctctgctgccccaactgacattgttcactacattgattgtacctatcgggcatct

SEQ ID NO: 9987 - DNA, 80 bp, synthetic construct
  misc_feature 1..80: note = Synthetic: >HKU10-cand-29520-29599
  source 1..80: mol_type = other DNA
caagctgctaaagtactaatttataccactgaaaaagtcactctaaataaccagagaacacgaactcatacacaaaatgg

SEQ ID NO: 9988 - DNA, 80 bp, synthetic construct
  misc_feature 1..80: note = Synthetic: >HKU10-cand-29600-29679
  source 1..80: mol_type = other DNA
ggtgtgtgctccactaggatggaacacatatgcacaaaatccgcattgtctgtcctcacgaacacaatggttgtggttaa

SEQ ID NO: 9989 - DNA, 80 bp, synthetic construct
  misc_feature 1..80: note = Synthetic: >HKU10-cand-29680-29759
  source 1..80: mol_type = other DNA
tggtaggtgggttgaaacagccaaaccgccaagaccaactgtacgaccgaatgcaggtgtagccattgctattccccttg

SEQ ID NO: 9990 - DNA, 80 bp, synthetic construct
  misc_feature 1..80: note = Synthetic: >HKU10-cand-29760-29839
  source 1..80: mol_type = other DNA
atgctcatggtcaagaccatgaacatttccatacgagcctagaagtgaaaaaccaggttcctgttggttctcactttgat

SEQ ID NO: 9991 - DNA, 80 bp, synthetic construct
  misc_feature 1..80: note = Synthetic: >HKU10-cand-29840-29919
  source 1..80: mol_type = other DNA
tatggccgtattacaacgagtatgagagtatcttgtgtgctgcatttgagcatgtcagtaatgacattgcaaaaattgct

SEQ ID NO: 9992 - DNA, 80 bp, synthetic construct
  misc_feature 1..80: note = Synthetic: >HKU10-cand-29920-29999
  source 1..80: mol_type = other DNA
gctcaattggctcaaacacagcgtagacatcatacttttgctgtgacgactttcaagtggtcttctccttcaaattaata

SEQ ID NO: 9993 - DNA, 80 bp, synthetic construct
  misc_feature 1..80: note = Synthetic: >HKU10-cand-30000-30079
  source 1..80: mol_type = other DNA
cgcaccctttcttctaggattgaaaagcgggctagcaagttaaggtgctactcttatacagaatggtaagcctgtttata

SEQ ID NO: 9994 - DNA, 80 bp, synthetic construct
  misc_feature 1..80: note = Synthetic: >HKU10-cand-30080-30159
  source 1..80: mol_type = other DNA
agctagtataagtagagtttatagatattgctgtgcctagaccaacgtacatattacaagacacctccagagtcagagta

SEQ ID NO: 9995 - DNA, 80 bp, synthetic construct
  misc_feature 1..80: note = Synthetic: >HKU10-cand-30160-30239
  source 1..80: mol_type = other DNA
atttaaagatccgcatagacgagccaacaatggaagagctgtcatggaatcttgtatatatgtagtcagtagttgttagt

SEQ ID NO: 9996 - DNA, 80 bp, synthetic construct
  misc_feature 1..80: note = Synthetic: >HKU14-cand-0-79
  source 1..80: mol_type = other DNA
ctgagcgatttgcgtgcgtgcatccgcctcagtgaactcttgttagttctaatttaatctaaactttataaaaacaccta

SEQ ID NO: 9997 - DNA, 80 bp, synthetic construct
  misc_feature 1..80: note = Synthetic: >HKU14-cand-80-159
  source 1..80: mol_type = other DNA
ctccctgtaatctatgcttgcgagtgtagatctttcatagtggtgtctagttttgttccatttgttaacagctttcagcc

SEQ ID NO: 9998 - DNA, 80 bp, synthetic construct
  misc_feature 1..80: note = Synthetic: >HKU14-cand-240-319
  source 1..80: mol_type = other DNA
tgggctccagaatttccgtggatgtttgaggacacagaggagaagttggactaccctagcagttcagaagtgggtatggt

SEQ ID NO: 9999 - DNA, 80 bp, synthetic construct
  misc_feature 1..80: note = Synthetic: >HKU14-cand-320-399
  source 1..80: mol_type = other DNA
ttgccccactaccgcgcaaaagctgggatcaagtggaatttttcttaagaatcacgtgatggttgattgtcgccgcctcg

SEQ ID NO: 10000 - DNA, 80 bp, synthetic construct
  misc_feature 1..80: note = Synthetic: >HKU14-cand-400-479
  source 1..80: mol_type = other DNA
taaagtatgagtgttgtgtgcagtctaatctgatacgtgaaataaatatgaatacaggtcctgatgctatggacgctgtt

SEQ ID NO: 10001 - DNA, 80 bp, synthetic construct
  misc_feature 1..80: note = Synthetic: >HKU25-cand-8980-9059
  source 1..80: mol_type = other DNA
gtctttttacgaggaccgcattctagaatataaagttctggataatggcgttatcagagacatagttcctggtgacaagt

SEQ ID NO: 10002 - DNA, 80 bp, synthetic construct
  misc_feature 1..80: note = Synthetic: >HKU25-cand-9060-9139
  source 1..80: mol_type = other DNA
gctttgctaacaagtaccagtccttcgcccaatggtttcacgagcatgttggtggtagttatgataactcaattgactgt

SEQ ID NO: 10003 - DNA, 80 bp, synthetic construct
  misc_feature 1..80: note = Synthetic: >HKU25-cand-9140-9219
  source 1..80: mol_type = other DNA
cccgtgactgttgctgttattgcaggtgtggcaggtgctcgcgtacctggtgtacctactactctggcatgggttcggaa

SEQ ID NO: 10004 - DNA, 80 bp, synthetic construct
  misc_feature 1..80: note = Synthetic: >HKU25-cand-9220-9299
  source 1..80: mol_type = other DNA
tcaaattgtcttctttgtttcacgagtctttgctaattctcctagtgtctgctacacgcctcgtagtgagataccctata

SEQ ID NO: 10005 - DNA, 80 bp, synthetic construct
  misc_feature 1..80: note = Synthetic: >HKU25-cand-9300-9379
  source 1..80: mol_type = other DNA
agaattttgctgatagtggatgcattctgccgtcggaatgtactatgtttaggaatgcagatggtaaaatggtaccatat

SEQ ID NO: 10006 - DNA, 80 bp, synthetic construct
  misc_feature 1..80: note = Synthetic: >HKU25-cand-9380-9459
  source 1..80: mol_type = other DNA
tgctatgatcctacagtcctgcctggagctttctcatatggtgatatgaagccccacgttcgttatgacatgtacgaagg

SEQ ID NO: 10007 - DNA, 80 bp, synthetic construct
  misc_feature 1..80: note = Synthetic: >HKU25-cand-9460-9539
  source 1..80: mol_type = other DNA
taacatgtatattaaattccctgaggtgattctggaaagcaccattagggttactagaactcttaacactcagtactgcc

SEQ ID NO: 10008 - DNA, 80 bp, synthetic construct
  misc_feature 1..80: note = Synthetic: >HKU25-cand-9540-9619
  source 1..80: mol_type = other DNA
gatttggtagttgtgagcaggctcaagagggtgtctgtataactactaatagctcatgggctatcttcaatgacttccac

SEQ ID NO: 10009 - DNA, 80 bp, synthetic construct
  misc_feature 1..80: note = Synthetic: >HKU25-cand-9620-9699
  source 1..80: mol_type = other DNA
gctaatagacctggtgtctattgtggtgctgattacttagacattgtcagacgcttggcactcggtgtcttccaacctat

SEQ ID NO: 10010 - DNA, 80 bp, synthetic construct
  misc_feature 1..80: note = Synthetic: >HKU25-cand-9700-9779
  source 1..80: mol_type = other DNA
tacctatttccagttgaccacgtcacttgtcatgggtattggtttgtgtgcgtttatgacacttgtcttctattacatta

SEQ ID NO: 10011 - DNA, 80 bp, synthetic construct
  misc_feature 1..80: note = Synthetic: >HKU25-cand-9780-9859
  source 1..80: mol_type = other DNA
ataaggtaaagagagcacttgctgactatacacagtgcgctgtgattgcagtgtgtgctaccattatgaatagcttatgt

SEQ ID NO: 10012 - DNA, 80 bp, synthetic construct
  misc_feature 1..80: note = Synthetic: >HKU25-cand-9860-9939
  source 1..80: mol_type = other DNA
ctttgctttgtagtggcatgcccattgtgcattgtgccttactcagctctgtactactatgctaccttctacttcaccaa

SEQ ID NO: 10013 - DNA, 80 bp, synthetic construct
  misc_feature 1..80: note = Synthetic: >HKU25-cand-9940-10019
  source 1..80: mol_type = other DNA
tgagcctgcattcattatgcacctctcttggtttgtcatgttcagtgctgttgtcccagtttggactagcgccatgtaca

SEQ ID NO: 10014 - DNA, 80 bp, synthetic construct
  misc_feature 1..80: note = Synthetic: >HKU25-cand-10020-10099
  source 1..80: mol_type = other DNA
tagttgccatgtgtttcagacattgcttctgggtactagcttacttcagcaaaaagcatgttgatgttttcactgatgga

SEQ ID NO: 10015 - DNA, 80 bp, synthetic construct
  misc_feature 1..80: note = Synthetic: >HKU25-cand-10100-10179
  source 1..80: mol_type = other DNA
cggcttaattgcactttccaggaggctgctgctaacatctttgttgtgaacaaagatacgtatgctgctcttagaaactc

SEQ ID NO: 10016 - DNA, 80 bp, synthetic construct
  misc_feature 1..80: note = Synthetic: >HKU25-cand-10180-10259
  source 1..80: mol_type = other DNA
tcttaattcagattcttatgcacggtaccttggcatgtacaacaagtacaagtacttctctggtgctatggatactgctg

SEQ ID NO: 10017 - DNA, 80 bp, synthetic construct
  misc_feature 1..80: note = Synthetic: >HKU25-cand-19210-19289
  source 1..80: mol_type = other DNA
gcttgttttatagagcgtgtcgattgggatgttgaatacccctacatctcccatgaaaagaaactgaattcctgctgtag

SEQ ID NO: 10018 - DNA, 80 bp, synthetic construct
  misc_feature 1..80: note = Synthetic: >HKU25-cand-19290-19369
  source 1..80: mol_type = other DNA
gattgtcgaacgcaatgttgtgcgcgctgcactacttgctggttcatttgaacgtgtctatgacatcggcaaccctaagg

SEQ ID NO: 10019 - DNA, 80 bp, synthetic construct
  misc_feature 1..80: note = Synthetic: >HKU25-cand-19370-19449
  source 1..80: mol_type = other DNA
gaattccaattgttgatgaccctgtggtcgattggcattattatgatgcacagcccttacgtaaaaatgtccaacagctc

SEQ ID NO: 10020 - DNA, 80 bp, synthetic construct
  misc_feature 1..80: note = Synthetic: >HKU25-cand-19450-19529
  source 1..80: mol_type = other DNA
ttctacacagaggatatggcctctagatttgctgatggcttgtgcttgttctggaattgcaatgttccacgttaccctaa

SEQ ID NO: 10021 - DNA, 80 bp, synthetic construct
  misc_feature 1..80: note = Synthetic: >HKU25-cand-19530-19609
  source 1..80: mol_type = other DNA
taatgccattgtatgcaggtttgatactcgtgtgcactcagagttcaatttgccaggttgtgatggtggtagcttgtatg

SEQ ID NO: 10022 - DNA, 80 bp, synthetic construct
  misc_feature 1..80: note = Synthetic: >HKU25-cand-19610-19689
  source 1..80: mol_type = other DNA
ttaacaagcacgcctttcacacaccagcatatgatactagtgcattcagagatctgaaacctttacctttcttctactat

SEQ ID NO: 10023 - DNA, 80 bp, synthetic construct
  misc_feature 1..80: note = Synthetic: >HKU25-cand-19690-19769
  source 1..80: mol_type = other DNA
tctaccacaccatgtgaagtgcatggaaatggtagtatgatagaggatattgattatgtacctcttaaatctgctgtctg

SEQ ID NO: 10024 - DNA, 80 bp, synthetic construct
  misc_feature 1..80: note = Synthetic: >HKU25-cand-19770-19849
  source 1..80: mol_type = other DNA
tgtgacggcgtgtaatttaggaggggctgtttgtagaaggcatgctactgaatacagagaatatatggaagcatataatc

SEQ ID NO: 10025 - DNA, 80 bp, synthetic construct
  misc_feature 1..80: note = Synthetic: >HKU25-cand-19850-19929
  source 1..80: mol_type = other DNA
ttgtttcagcatcaggctttcgtttatggtgttataagacctttgatatctacaatctctggtctacctttactaaggtt

SEQ ID NO: 10026 - DNA, 80 bp, synthetic construct
  misc_feature 1..80: note = Synthetic: >HKU25-cand-19930-20009
  source 1..80: mol_type = other DNA
caaggtcttgaaaacatcgctttcaatgtaataaaacaaggccacttcactggtgttgaaggtgaactacccgtagcggt

SEQ ID NO: 10027 - DNA, 80 bp, synthetic construct
  misc_feature 1..80: note = Synthetic: >HKU25-cand-20010-20089
  source 1..80: mol_type = other DNA
agtcaatgacaaaatcttcaccaagagtggtgttaatgatgtgtgtgtcttcgagaataagacagcattacctactaata

SEQ ID NO: 10028 - DNA, 80 bp, synthetic construct
  misc_feature 1..80: note = Synthetic: >HKU25-cand-20090-20169
  source 1..80: mol_type = other DNA
tagcatttgaactctatgcgaagcgtgcagttcgctcacatccagatttcaaattgctccataatttgcaggccgatatt

SEQ ID NO: 10029 - DNA, 80 bp, synthetic construct
  misc_feature 1..80: note = Synthetic: >HKU25-cand-20170-20249
  source 1..80: mol_type = other DNA
tgttacaagttcgtcctgtgggactatgaacgttgtaatatttacggcacagccactattggtgtatgcaaatacacaga

SEQ ID NO: 10030 - DNA, 80 bp, synthetic construct
  misc_feature 1..80: note = Synthetic: >HKU25-cand-20250-20329
  source 1..80: mol_type = other DNA
tatcgatgtcaatgcagcattgaatatatgctacgacatccgtgataatggatcattagagaagttcatggcttccccta

SEQ ID NO: 10031 - DNA, 80 bp, synthetic construct
  misc_feature 1..80: note = Synthetic: >HKU25-cand-20330-20409
  source 1..80: mol_type = other DNA
atgctatcttaatttcagacagaaaagtcaagaaatacccttgtatggtaggacctgactatgcttacttcaatggcgcc

SEQ ID NO: 10032 - DNA, 80 bp, synthetic construct
  misc_feature 1..80: note = Synthetic: >HKU25-cand-20410-20489
  source 1..80: mol_type = other DNA
atcattcgtgatgacagtgcaaagcagccagtgaagttctatatttataagaaaataaataatgaatttgttgatttcac

SEQ ID NO: 10033 - DNA, 80 bp, synthetic construct
  misc_feature 1..80: note = Synthetic: >HKU25-cand-24320-24399
  source 1..80: mol_type = other DNA
tctgttgccaatttatttgcaaatataaaaacacaaaccacacaggctcttaatgccggtttaaatggtgactttaattt

SEQ ID NO: 10034 - DNA, 80 bp, synthetic construct
  misc_feature 1..80: note = Synthetic: >HKU25-cand-24400-24479
  source 1..80: mol_type = other DNA
gactttactacaagtgccaaaagttactactagtcagtatagctatagaagcactattgaagaccttcttttcaacaagg

SEQ ID NO: 10035 - DNA, 80 bp, synthetic construct
  misc_feature 1..80: note = Synthetic: >HKU25-cand-24480-24559
  source 1..80: mol_type = other DNA
ttactattgctgaccctggctatatgcagggttatgatgaatgcatgcaacagggacctccatcagctagggacctcatc

SEQ ID NO: 10036 - DNA, 80 bp, synthetic construct
  misc_feature 1..80: note = Synthetic: >HKU25-cand-24560-24639
  source 1..80: mol_type = other DNA
tgtgcacaatttgttgcaggctacaaagtcttgccgccattatatgatcctaacatggaagcggcttacacttcttctct

SEQ ID NO: 10037 - DNA, 80 bp, synthetic construct
  misc_feature 1..80: note = Synthetic: >HKU25-cand-24640-24719
  source 1..80: mol_type = other DNA
attgggttcaatcttaggcgctggatggactgctggtctatcatcctttgccgccataccctttgcacagagtatattct

SEQ ID NO: 10038 - DNA, 80 bp, synthetic construct
  misc_feature 1..80: note = Synthetic: >HKU25-cand-24720-24799
  source 1..80: mol_type = other DNA
acaggatgaatggtattggtatcacacagcaggttctatctgagaaccaaaagcaaatcgacaaaaaattcaaccaggct

SEQ ID NO: 10039 - DNA, 80 bp, synthetic construct
  misc_feature 1..80: note = Synthetic: >HKU25-cand-24800-24879
  source 1..80: mol_type = other DNA
ttaaatgctatgcagacaggcttcactacaactaatcttgctttttcgaaagttcaagatgcagtgaatgctaatgcaca

SEQ ID NO: 10040 - DNA, 80 bp, synthetic construct
  misc_feature 1..80: note = Synthetic: >HKU25-cand-24880-24959
  source 1..80: mol_type = other DNA
agctcttgctaaactagcatctgagttgtctaacacttttggtgctatttcatcatccatcagcgacatccttaagagat

SEQ ID NO: 10041 - DNA, 80 bp, synthetic construct
  misc_feature 1..80: note = Synthetic: >HKU25-cand-24960-25039
  source 1..80: mol_type = other DNA
tagatgctgtagaacaagaggcacaaattgaccgactgatcaatggccgcctcacatctttaaatgcattcgttgcccaa

SEQ ID NO: 10042 - DNA, 80 bp, synthetic construct
  misc_feature 1..80: note = Synthetic: >HKU25-cand-25040-25119
  source 1..80: mol_type = other DNA
caacttgtgcgttctgaaactgctgctagatcagcacaactggcctctgataaggttaatgagtgtgtcaaatcacaatc

SEQ ID NO: 10043 - DNA, 80 bp, synthetic construct
  misc_feature 1..80: note = Synthetic: >HKU25-cand-25120-25199
  source 1..80: mol_type = other DNA
caaaagaaatggattttgcggatctggtacccatattgtctcgtttgtcattaatgcaccagacgggctatacttcttcc

SEQ ID NO: 10044 - DNA, 80 bp, synthetic construct
  misc_feature 1..80: note = Synthetic: >HKU25-cand-25200-25279
  source 1..80: mol_type = other DNA
atgttggttatgtgccaactgatcatattaatgctactgcagcatatggactttgcaacaatgataaccctcctagatgc

SEQ ID NO: 10045 - DNA, 80 bp, synthetic construct
  misc_feature 1..80: note = Synthetic: >HKU25-cand-25280-25359
  source 1..80: mol_type = other DNA
attgcacctatcgacggttactttgttcgaaattctacaactactcgtgacgccaatgatgaatggtattacaccggtag

SEQ ID NO: 10046 - DNA, 80 bp, synthetic construct
  misc_feature 1..80: note = Synthetic: >HKU25-cand-25360-25439
  source 1..80: mol_type = other DNA
ttcttattataatcctgaaccgatctctatggcgaacactcgctacgtttcgcaggatactaagtttgaaaatctcacta

SEQ ID NO: 10047 - DNA, 80 bp, synthetic construct
  misc_feature 1..80: note = Synthetic: >HKU25-cand-25440-25519
  source 1..80: mol_type = other DNA
ctaacattcccccacctcttctcaacaaccgaacagatacggatttcaaagacgagttggaggagttctttaagaatgtt

SEQ ID NO: 10048 - DNA, 80 bp, synthetic construct
  misc_feature 1..80: note = Synthetic: >HKU25-cand-25520-25599
  source 1..80: mol_type = other DNA
tcttctcaaggtcccaactttgcggagatatcaaagattaacactaccttacttgacctttcaactgaaatgaatgcgtt

SEQ ID NO: 10049 - DNA, 80 bp, synthetic construct
  misc_feature 1..80: note = Synthetic: >HKU25-cand-28150-28229
  source 1..80: mol_type = other DNA
tgatgagtgggtttaacgaactctataatcatgtctaacactacgctcaccagtgagcaaattgttgctataattaaaga

SEQ ID NO: 10050 - DNA, 80 bp, synthetic construct
  misc_feature 1..80: note = Synthetic: >HKU25-cand-28230-28309
  source 1..80: mol_type = other DNA
ttggaactttgcttggtccatcatctttttactaataactatcgtgctacaatatggatatccatctcgtagcatgacag

SEQ ID NO: 10051 - DNA, 80 bp, synthetic construct
  misc_feature 1..80: note = Synthetic: >HKU25-cand-28310-28389
  source 1..80: mol_type = other DNA
tatatgttttcaaaatgtttatattatggttgttatggccattatctatggcgctttcgatattctgcgccgtttatcca

SEQ ID NO: 10052 - DNA, 80 bp, synthetic construct
  misc_feature 1..80: note = Synthetic: >HKU25-cand-28390-28469
  source 1..80: mol_type = other DNA
attgacctttccacccagataatctctggaatactagccttcatttctgcatgcatgtggctttcctacttcgtgcagag

SEQ ID NO: 10053 - DNA, 80 bp, synthetic construct
  misc_feature 1..80: note = Synthetic: >HKU25-cand-28470-28549
  source 1..80: mol_type = other DNA
cattaggctgtttatgcggactggctcttggcggtcatgcaaccccgaaactaattgcctcttgaacgtaccaattggtg

SEQ ID NO: 10054 - DNA, 80 bp, synthetic construct
  misc_feature 1..80: note = Synthetic: >HKU25-cand-28550-28629
  source 1..80: mol_type = other DNA
gtacaactgttgtcagacctcttgtcgaagactcgactagtgtgaccgctgttgttgccaatggacatctcaagatcgca

SEQ ID NO: 10055 - DNA, 80 bp, synthetic construct
  misc_feature 1..80: note = Synthetic: >HKU25-cand-28630-28709
  source 1..80: mol_type = other DNA
ggtatgcactttggtccttgtgactatcgctcgttgccaaacgagttgacagttgctaagccaagtgttttaatagcttt

SEQ ID NO: 10056 - DNA, 80 bp, synthetic construct
  misc_feature 1..80: note = Synthetic: >HKU25-cand-28710-28789
  source 1..80: mol_type = other DNA
gaaaatggtaaagagacaggactacggaacaaactccggtgttgctatttatcacagatacaaggcaggtaattacaggc

SEQ ID NO: 10057 - DNA, 80 bp, synthetic construct
  misc_feature 1..80: note = Synthetic: >HKU25-cand-28790-28869
  source 1..80: mol_type = other DNA
gtccagccgctgtgcccgacgctgatcttgcactactgcgagcgtaagctcattagtaagagtatgatttaaaatcatta

SEQ ID NO: 10058 - DNA, 80 bp, synthetic construct
  misc_feature 1..80: note = Synthetic: >HKU25-cand-28870-28949
  source 1..80: mol_type = other DNA
acgaatcttatctttcattgttatggccaccccagtagcaccacgtgctgttactttcagtgataacaatgacaacaata

SEQ ID NO: 10059 - DNA, 80 bp, synthetic construct
  misc_feature 1..80: note = Synthetic: >HKU25-cand-28950-29029
  source 1..80: mol_type = other DNA
ccaacaaccagcagtctcgaggccgaggaagaactcctaagcccagacctgctccaaacaacactgtctcatggtacact

SEQ ID NO: 10060 - DNA, 80 bp, synthetic construct
  misc_feature 1..80: note = Synthetic: >HKU25-cand-29030-29109
  source 1..80: mol_type = other DNA
ggccttacccaacacgggaaattcccactttctttccctcctggacaaggcgtacctcttaatgccaattcaacccctga

SEQ ID NO: 10061 - DNA, 80 bp, synthetic construct
  misc_feature 1..80: note = Synthetic: >HKU25-cand-29110-29189
  source 1..80: mol_type = other DNA
acagaatgctgggtattggcggagacaggacagaaaactcaatacaggaaatggtgttaaacagctggcccccaggtggt

SEQ ID NO: 10062 - DNA, 80 bp, synthetic construct
  misc_feature 1..80: note = Synthetic: >HKU25-cand-29190-29269
  source 1..80: mol_type = other DNA
ttttctactacactggaacaggacctgaagctaacctccctttccgagctgtcaaagacggaatcgtctgggtccacgaa

SEQ ID NO: 10063 - DNA, 80 bp, synthetic construct
  misc_feature 1..80: note = Synthetic: >HKU25-cand-29270-29349
  source 1..80: mol_type = other DNA
aacggtgccacagacgctccttcaacttttgggacgcggaaccctaacaatgacccagctattgttacgcagttcgctcc

SEQ ID NO: 10064 - DNA, 80 bp, synthetic construct
  misc_feature 1..80: note = Synthetic: >HKU25-cand-29350-29429
  source 1..80: mol_type = other DNA
tggtactcagcttcctaaaaacttccacattgaaggcactggaggcaacagtcaatcatcttcaagagcatctagcgcca

SEQ ID NO: 10065 - DNA, 80 bp, synthetic construct
  misc_feature 1..80: note = Synthetic: >HKU5-cand-25620-25699
  source 1..80: mol_type = other DNA
aaagagttggggaattatactttttaccaaaaatggccatggtatatatggcttggctttattgcagggcttgttgctct

SEQ ID NO: 10066 - DNA, 80 bp, synthetic construct
  misc_feature 1..80: note = Synthetic: >HKU5-cand-25700-25779
  source 1..80: mol_type = other DNA
tgctctttgtgtgttcttcatcttatgctgtactggctgtggtactagctgtttggggaaactaaaatgtaatcgttgtt

SEQ ID NO: 10067 - DNA, 80 bp, synthetic construct
  misc_feature 1..80: note = Synthetic: >HKU5-cand-25860-25939
  source 1..80: mol_type = other DNA
accacccacactcttgctcattttattagttgctaatgctttctcaaagcccattggcactcctatacctgagcactgtt

SEQ ID NO: 10068 - DNA, 80 bp, synthetic construct
  misc_feature 1..80: note = Synthetic: >HKU5-cand-25940-26019
  source 1..80: mol_type = other DNA
ctacccttgttggtagagagtttcaatcttgtattcgacaagcacagtttgatacggctggcatgtacactaatcgcgtc

SEQ ID NO: 10069 - DNA, 80 bp, synthetic construct
  misc_feature 1..80: note = Synthetic: >HKU5-cand-26020-26099
  source 1..80: mol_type = other DNA
atcgtgctcgatcgagcacgtactcatcgctatcctattgatcgtgacactactactgctcacgacacctcttacgacac

SEQ ID NO: 10070 - DNA, 80 bp, synthetic construct
  misc_feature 1..80: note = Synthetic: >HKU5-cand-26180-26259
  source 1..80: mol_type = other DNA
cgctgctcaaccaggtttggcagaaacaggtcaattccgctcaagaaggaactttggctcctattcgccctacatacgcc

SEQ ID NO: 10071 - DNA, 80 bp, synthetic construct
  misc_feature 1..80: note = Synthetic: >HKU5-cand-26260-26339
  source 1..80: mol_type = other DNA
tatcggccagtgcagggtaaccttcagtgtcctattaagtggcgctgcatctacacttttgcaggctacacaggcactgc

SEQ ID NO: 10072 - DNA, 80 bp, synthetic construct
  misc_feature 1..80: note = Synthetic: >HKU5-cand-26340-26419
  source 1..80: mol_type = other DNA
aaccgagccaactaaagcattagcaaaacaagaagccgctaggaaggtttgccttaggcttcaagagtatggacgactcg

SEQ ID NO: 10073 - DNA, 80 bp, synthetic construct
  misc_feature 1..80: note = Synthetic: >HKU5-cand-26500-26579
  source 1..80: mol_type = other DNA
gaaacgtcgtcgtcatccgatgaataaaagacgctatgctaagcgccgttttactcctgttgagccaaacgatataataa

SEQ ID NO: 10074 - DNA, 80 bp, synthetic construct
  misc_feature 1..80: note = Synthetic: >HKU5-cand-26660-26739
  source 1..80: mol_type = other DNA
atcctcagtgattatgatgttatctttaaccctgatttacacgttactgtagcattagtttgcgcaggtaacggtgttac

SEQ ID NO: 10075 - DNA, 80 bp, synthetic construct
  misc_feature 1..80: note = Synthetic: >HKU8-cand-80-159
  source 1..80: mol_type = other DNA
gccatacttgtatggcgaattgaaatttccctaggttaccaccatcccggcccaagtgtcgtgtcattcagtggtccctc

SEQ ID NO: 10076 - DNA, 80 bp, synthetic construct
  misc_feature 1..80: note = Synthetic: >HKU8-cand-160-239
  source 1..80: mol_type = other DNA
gcactagttccgtcagttagcttaaaccactgtctgacctgcacgcagttccgtctgggtgcagtgtggatagtacgttc

SEQ ID NO: 10077 - DNA, 80 bp, synthetic construct
  misc_feature 1..80: note = Synthetic: >HKU8-cand-240-319
  source 1..80: mol_type = other DNA
cgtcgtgcttgaaaccgataacaggccgctatgggttctaaccatttgacattggcttttgccagtgattctgaaatttc

SEQ ID NO: 10078 - DNA, 80 bp, synthetic construct
  misc_feature 1..80: note = Synthetic: >HKU8-cand-320-399
  source 1..80: mol_type = other DNA
tgcagaaggctgctctactcgtggtgatgccgtctcacgttatagtgaggccgcagtttatggttttgagaattgccgtt

SEQ ID NO: 10079 - DNA, 80 bp, synthetic construct
  misc_feature 1..80: note = Synthetic: >HKU8-cand-400-479
  source 1..80: mol_type = other DNA
ttgttgcgtccggtctacaagagatcgttgacggtgtcagcgcagatgattatgtgctgtgtttctcaggtgtcacaaca

SEQ ID NO: 10080 - DNA, 80 bp, synthetic construct
  misc_feature 1..80: note = Synthetic: >HKU8-cand-480-559
  source 1..80: mol_type = other DNA
ctgagggcttttattggcaaatttggggaccgtcctcgaaacttgcgtggttggttcttgttctccaattgtaattattt

SEQ ID NO: 10081 - DNA, 80 bp, synthetic construct
  misc_feature 1..80: note = Synthetic: >HKU8-cand-560-639
  source 1..80: mol_type = other DNA
tcttgaagaaatggatgtcatttttggctgtggtggtggcaatgcaattcctgtatatgtggataactacatgtgcggtg

SEQ ID NO: 10082 - DNA, 80 bp, synthetic construct
  misc_feature 1..80: note = Synthetic: >HKU8-cand-640-719
  source 1..80: mol_type = other DNA
ccaatggtaaacccgttttgccagctgatgtgtggtgcttccaggactattttggtgatgagacagataaaatcattgtt

SEQ ID NO: 10083 - DNA, 80 bp, synthetic construct
  misc_feature 1..80: note = Synthetic: >HKU8-cand-720-799
  source 1..80: mol_type = other DNA
aatggtgttgaccatgttaaggcatggaatgtcactcgtactgacgtcccataccagtttcagtctgctggtgccattga

SEQ ID NO: 10084 - DNA, 80 bp, synthetic construct
  misc_feature 1..80: note = Synthetic: >HKU8-cand-800-879
  source 1..80: mol_type = other DNA
ttccattgagtggcttactgacgttcctcacgtgctgcgaaatggtagtaaacttaaggctgctaaagcacctaagtttt

SEQ ID NO: 10085 - DNA, 80 bp, synthetic construct
  misc_feature 1..80: note = Synthetic: >HKU8-cand-880-959
  source 1..80: mol_type = other DNA
ctaagaacgttgttctttctgagccactcaaaacactttatcaggcctgtggcagtccatttgttactaatggcaccaat

SEQ ID NO: 10086 - DNA, 80 bp, synthetic construct
  misc_feature 1..80: note = Synthetic: >HKU8-cand-960-1039
  source 1..80: mol_type = other DNA
ttgcttgaggctgtaacaaaacctgtttttgcacatgcatatgttgcgtgtaaatgtgggactaaacattggactgttgg

SEQ ID NO: 10087 - DNA, 80 bp, synthetic construct
  misc_feature 1..80: note = Synthetic: >HKU8-cand-1040-1119
  source 1..80: mol_type = other DNA
tgactggtctggttacaaatcaacgtgttgtggcatttttggaaatgtcctgtgcactgtctttggtgatgttgtacctg

SEQ ID NO: 10088 - DNA, 80 bp, synthetic construct
  misc_feature 1..80: note = Synthetic: >HKU8-cand-1120-1199
  source 1..80: mol_type = other DNA
gtgaagttcttatgacatcaactcctgttggtgccagccctggtggtacacgctactataatggtctgacacttaaacat

SEQ ID NO: 10089 - DNA, 80 bp, synthetic construct
  misc_feature 1..80: note = Synthetic: >HKU8-cand-1200-1279
  source 1..80: mol_type = other DNA
gttgtcactgttgatggtgttgcatgctggcgtgtccttaaaactcagggtgttgatggctttgtagccactccatcttt

SEQ ID NO: 10090 - DNA, 80 bp, synthetic construct
  misc_feature 1..80: note = Synthetic: >HKU8-cand-1280-1359
  source 1..80: mol_type = other DNA
tgaggactattctgatgccactttcgattcttgtacttacgacaattacacctcagttgctaaggcctttaagtttggtc

SEQ ID NO: 10091 - DNA, 80 bp, synthetic construct
  misc_feature 1..80: note = Synthetic: >HKU8-cand-16800-16879
  source 1..80: mol_type = other DNA
tatgctgccatttgcaagttgaatcctactttcaatattagtgatgcctattccaccttggttccatattaccagatgat

SEQ ID NO: 10092 - DNA, 80 bp, synthetic construct
  misc_feature 1..80: note = Synthetic: >HKU8-cand-16880-16959
  source 1..80: mol_type = other DNA
tggtaggcaaaagattaccactattcagggtcctcctggtagtggtaaatcacactgtgttattggactgggactttatt

SEQ ID NO: 10093 - DNA, 80 bp, synthetic construct
  misc_feature 1..80: note = Synthetic: >HKU8-cand-16960-17039
  source 1..80: mol_type = other DNA
atcctggcgcacgtatagtctttgctgcatgttcgcacgctgcagttgactctctttgtgtgaaggctagcacaacttat

SEQ ID NO: 10094 - DNA, 80 bp, synthetic construct
  misc_feature 1..80: note = Synthetic: >HKU8-cand-17040-17119
  source 1..80: mol_type = other DNA
gttgtggagcattgtactcgtataattccagcacgtgctcgagttgagtgctttagtggttttaaggctaataataatag

SEQ ID NO: 10095 - DNA, 80 bp, synthetic construct
  misc_feature 1..80: note = Synthetic: >HKU8-cand-17120-17199
  source 1..80: mol_type = other DNA
tgcacaatacatcttttcaactgtcaatgcattacctgagtgtactgcagacattgttgtcatagatgaagtgtctatgt

SEQ ID NO: 10096 - DNA, 80 bp, synthetic construct
  misc_feature 1..80: note = Synthetic: >HKU8-cand-17200-17279
  source 1..80: mol_type = other DNA
gtactaattatgatttgtccattgttaaccagagagtggcttacaaacacattgtatatgttggtgatccacaacaactg

SEQ ID NO: 10097 - DNA, 80 bp, synthetic construct
  misc_feature 1..80: note = Synthetic: >HKU8-cand-17280-17359
  source 1..80: mol_type = other DNA
cctgctcctcgaactatgataactcgtggtgtgttggaacctaaggattataatgttgttacccaacgaatgtgtgctgt

SEQ ID NO: 10098 - DNA, 80 bp, synthetic construct
  misc_feature 1..80: note = Synthetic: >HKU8-cand-17440-17519
  source 1..80: mol_type = other DNA
acaagttcgtacctgtgcattctgagagtaaacagtgtttcaagatcttttgcaaaggtgcagttcaggttgataacggt

SEQ ID NO: 10099 - DNA, 80 bp, synthetic construct
  misc_feature 1..80: note = Synthetic: >HKU8-cand-17520-17599
  source 1..80: mol_type = other DNA
tctagtattaaccgtagtcaacttgaagttgttaagatgtttttggcaaagaatccgtcatggtctaaggctgttttcat

SEQ ID NO: 10100 - DNA, 80 bp, synthetic construct
  misc_feature 1..80: note = Synthetic: >HKU8-cand-17600-17679
  source 1..80: mol_type = other DNA
ttccccttataacagccagaattatgttgctagccggtctttgggccttcagattcagactgttgattcctcacaaggca

SEQ ID NO: 10101 - DNA, 80 bp, synthetic construct
  misc_feature 1..80: note = Synthetic: >HKU8-cand-17680-17759
  source 1..80: mol_type = other DNA
gtgagtatgattatgttatcttcgcgcaaacttctgatacagctcatgcgtgcaacataaatcggtttaatgttgctatc

SEQ ID NO: 10102 - DNA, 80 bp, synthetic construct
  misc_feature 1..80: note = Synthetic: >HKU8-cand-17840-17919
  source 1..80: mol_type = other DNA
cactgatctgcaggctggagatacttgtggtctttttaaagattgcagtaagtttgaagatccaccattgccaccatctc

SEQ ID NO: 10103 - DNA, 80 bp, synthetic construct
  misc_feature 1..80: note = Synthetic: >HKU8-cand-17920-17999
  source 1..80: mol_type = other DNA
atgcacccacatatgttgcactttcagataggtttaaaactgaaggtgatcttgccgtccagattggtagtaagacacct

SEQ ID NO: 10104 - DNA, 80 bp, synthetic construct
  misc_feature 1..80: note = Synthetic: >MurineCoV-cand-1230-1309
  source 1..80: mol_type = other DNA
ctgctcatcttctcgcagccaatgccattgttaaaagactcccccgtttggtggagactatgctgtatacggattcgtcc

SEQ ID NO: 10105 - DNA, 80 bp, synthetic construct
  misc_feature 1..80: note = Synthetic: >MurineCoV-cand-1310-1389
  source 1..80: mol_type = other DNA
gttacagaattttgttataaaaccaagctgtgtgaatgcggttttatcacgcagtttggctatgtggattgttgtggtga

SEQ ID NO: 10106 - DNA, 80 bp, synthetic construct
  misc_feature 1..80: note = Synthetic: >MurineCoV-cand-1390-1469
  source 1..80: mol_type = other DNA
cacctgcgattttcgtgggtgggttgccggcaatatgatggatggctttccatgtccagggtgtaccaaaaattatatgc

SEQ ID NO: 10107 - DNA, 80 bp, synthetic construct
  misc_feature 1..80: note = Synthetic: >MurineCoV-cand-1470-1549
  source 1..80: mol_type = other DNA
cctgggaattggaggcccagtcatcaggtgttataccagaaggaggtgttctattcactcagagcactgatacagtgaat

SEQ ID NO: 10108 - DNA, 80 bp, synthetic construct
  misc_feature 1..80: note = Synthetic: >MurineCoV-cand-1550-1629
  source 1..80: mol_type = other DNA
cgtgagtcctttaagctctacggtcatgctgttgtgccttttggttctgctgtgtattggagcccttgcccaggtatgtg

SEQ ID NO: 10109 - DNA, 80 bp, synthetic construct
  misc_feature 1..80: note = Synthetic: >MurineCoV-cand-1630-1709
  source 1..80: mol_type = other DNA
gcttccagtaatttggtcttctgttaagtcatactctggtttgacttatacaggagtagttggttgtaaggcaattgttc

SEQ ID NO: 10110 - DNA, 80 bp, synthetic construct
  misc_feature 1..80: note = Synthetic: >MurineCoV-cand-1710-1789
  source 1..80: mol_type = other DNA
aagagacagacgctatatgtcgttctctgtatatggattatgtccagcacaagtgtggcaatctcgagcagagagctatc

SEQ ID NO: 10111 - DNA, 80 bp, synthetic construct
  misc_feature 1..80: note = Synthetic: >MurineCoV-cand-1790-1869
  source 1..80: mol_type = other DNA
cttggattggacgatgtctatcatagacagttgcttgtgaataggggtgactatagtctcctccttgagaatgtggattt

SEQ ID NO: 10112 - DNA, 80 bp, synthetic construct
  misc_feature 1..80: note = Synthetic: >MurineCoV-cand-1870-1949
  source 1..80: mol_type = other DNA
gtttgttaagcggcgcgctgaatttgcttgcaaattcgccacctgtggagatggtcttgtacccctcctactagatggtt

SEQ ID NO: 10113 - DNA, 80 bp, synthetic construct
  misc_feature 1..80: note = Synthetic: >MurineCoV-cand-1950-2029
  source 1..80: mol_type = other DNA
tagtgccccgcagttattatttgattaagagtggtcaagctttcacctctatgatggttaattttagccatgaggtgact

SEQ ID NO: 10114 - DNA, 80 bp, synthetic construct
  misc_feature 1..80: note = Synthetic: >MurineCoV-cand-2030-2109
  source 1..80: mol_type = other DNA
gacatgtgtatggacatggctttattgttcatgcatgatgttaaagtggccactaagtatgttaagaaggttactggcaa

SEQ ID NO: 10115 - DNA, 80 bp, synthetic construct
  misc_feature 1..80: note = Synthetic: >MurineCoV-cand-2110-2189
  source 1..80: mol_type = other DNA
actggccgtgcgctttaaagcgttgggtgtagccgttgtcagaaaaattactgaatggtttgatttagccgtggacattg

SEQ ID NO: 10116 - DNA, 80 bp, synthetic construct
  misc_feature 1..80: note = Synthetic: >MurineCoV-cand-2190-2269
  source 1..80: mol_type = other DNA
ctgctagtgccgctggatggctttgctaccagctggtaaatggcttatttgcagtggccaatggtgttataacctttgta

SEQ ID NO: 10117 - DNA, 80 bp, synthetic construct
  misc_feature 1..80: note = Synthetic: >MurineCoV-cand-2270-2349
  source 1..80: mol_type = other DNA
caggaggtgcctgagcttgtcaagaattttgttgacaagttcaaggcatttttcaaggttttgatcgactctatgtcggt

SEQ ID NO: 10118 - DNA, 80 bp, synthetic construct
  misc_feature 1..80: note = Synthetic: >MurineCoV-cand-2350-2429
  source 1..80: mol_type = other DNA
ttctatcttgtctggacttactgttgtcaagactgcctcaaatagggtgtgtcttgctggcagtaaggtttatgaagttg

SEQ ID NO: 10119 - DNA, 80 bp, synthetic construct
  misc_feature 1..80: note = Synthetic: >MurineCoV-cand-2430-2509
  source 1..80: mol_type = other DNA
tgcagaaatctttgtctgcatatgttatgcctgtgggttgcagcgaagccacttgtttggtgggtgagattgaacctgca

SEQ ID NO: 10120 - DNA, 80 bp, synthetic construct
  misc_feature 1..80: note = Synthetic: >MurineCoV-cand-25610-25689
  source 1..80: mol_type = other DNA
atctccgctgtcggcaaattaaaaccattgttaatgtgggtgaccattgtgaaggcttaggtgttttagaagataattgt

SEQ ID NO: 10121 - DNA, 80 bp, synthetic construct
  misc_feature 1..80: note = Synthetic: >MurineCoV-cand-25690-25769
  source 1..80: mol_type = other DNA
ggcaatgctgatccacataagggttgtatctgtgccaacaattcatttattggatggtcacatgatacctgccttgttaa

SEQ ID NO: 10122 - DNA, 80 bp, synthetic construct
  misc_feature 1..80: note = Synthetic: >MurineCoV-cand-25770-25849
  source 1..80: mol_type = other DNA
tgatcgctgccaaatttttgctaatatattgttaaatggcattaatagtggtaccacatgttccacagatttgcagttgc

SEQ ID NO: 10123 - DNA, 80 bp, synthetic construct
  misc_feature 1..80: note = Synthetic: >MurineCoV-cand-25850-25929
  source 1..80: mol_type = other DNA
ctaatactgaagtggttactggcatttgtgtcaaatatgacctctacggtattactggacaaggtgtttttaaagaggtt

SEQ ID NO: 10124 - DNA, 80 bp, synthetic construct
  misc_feature 1..80: note = Synthetic: >MurineCoV-cand-25930-26009
  source 1..80: mol_type = other DNA
aaggctgactattataatagctggcaaacccttctgtatgatgttaatggtaatttgaatggttttcgtgatcttaccac

SEQ ID NO: 10125 - DNA, 80 bp, synthetic construct
  misc_feature 1..80: note = Synthetic: >MurineCoV-cand-26000-26079
  source 1..80: mol_type = other DNA
atcttaccactaacaagacttatacgataaggagctgttatagtggccgtgtttctgctgcatttcataaagatgcaccc

SEQ ID NO: 10126 - DNA, 80 bp, synthetic construct
  misc_feature 1..80: note = Synthetic: >MurineCoV-cand-26080-26159
  source 1..80: mol_type = other DNA
gaaccggctctgctctatcgtaatataaattgtagctatgtttttagcaataatatttcccgtgaggagaacccacttaa

SEQ ID NO: 10127 - DNA, 80 bp, synthetic construct
  misc_feature 1..80: note = Synthetic: >MurineCoV-cand-26160-26239
  source 1..80: mol_type = other DNA
ttactttgatagttatttgggttgtgttgttaatgctgataaccgcacggatgaggcgcttcctaattgtgatctccgta

SEQ ID NO: 10128 - DNA, 80 bp, synthetic construct
  misc_feature 1..80: note = Synthetic: >MurineCoV-cand-26240-26319
  source 1..80: mol_type = other DNA
tgggtgctggcttatgcgttgattattcaaaatcacgcagggctcaccgatcagtttctactggctatcggttaactaca

SEQ ID NO: 10129 - DNA, 80 bp, synthetic construct
  misc_feature 1..80: note = Synthetic: >MurineCoV-cand-26320-26399
  source 1..80: mol_type = other DNA
tttgagccatacactccgatgttagttaatgatagtgtccaatccgttgatggattatatgagatgcaaataccaaccaa

SEQ ID NO: 10130 - DNA, 80 bp, synthetic construct
  misc_feature 1..80: note = Synthetic: >MurineCoV-cand-26400-26479
  source 1..80: mol_type = other DNA
ttttactattgggcaccatgaggagttcattcaaactagatctccaaaggtgactatagattgtgctgcatttgtctgtg

SEQ ID NO: 10131 - DNA, 80 bp, synthetic construct
  misc_feature 1..80: note = Synthetic: >MurineCoV-cand-26480-26559
  source 1..80: mol_type = other DNA
gtgataacactgcatgcaggcagcagttggttgagtatggctctttctgtgttaatgttaatgccattcttaatgaggtt

SEQ ID NO: 10132 - DNA, 80 bp, synthetic construct
  misc_feature 1..80: note = Synthetic: >MurineCoV-cand-26560-26639
  source 1..80: mol_type = other DNA
aataacctcttggataatatgcaactacaagttgctagtgcattaatgcagggtgttactataagctcgagactgccaga

SEQ ID NO: 10133 - DNA, 80 bp, synthetic construct
  misc_feature 1..80: note = Synthetic: >MurineCoV-cand-26640-26719
  source 1..80: mol_type = other DNA
cggcatctcaggccctatagatgacattaattttagtcctctacttggatgcataggttcaacatgtgctgaagacggca

SEQ ID NO: 10134 - DNA, 80 bp, synthetic construct
  misc_feature 1..80: note = Synthetic: >MurineCoV-cand-26720-26799
  source 1..80: mol_type = other DNA
atggacctagtgcaatccgagggcgttctgctatagaggatttgttatttgacaaggtcaaattatctgatgttggcttt

SEQ ID NO: 10135 - DNA, 80 bp, synthetic construct
  misc_feature 1..80: note = Synthetic: >MurineCoV-cand-26800-26879
  source 1..80: mol_type = other DNA
gtcgaggcttataataattgcaccggtggtcaagaagttcgtgacctcctttgtgtacaatcttttaatggcatcaaagt

SEQ ID NO: 10136 - DNA, 80 bp, synthetic construct
  misc_feature 1..80: note = Synthetic: >MurineCoV-cand-29400-29479
  source 1..80: mol_type = other DNA
gtgtattttcaattgcgtgtatgcgctaaataatgtgtatcttggattttctatagtgtttactatagtgtccattgtaa

SEQ ID NO: 10137 - DNA, 80 bp, synthetic construct
  misc_feature 1..80: note = Synthetic: >MurineCoV-cand-29480-29559
  source 1..80: mol_type = other DNA
tctggattatgtattttgttaatagcataaggttgtttatcaggactggtagctggtggagcttcaaccccgaaacaaac

SEQ ID NO: 10138 - DNA, 80 bp, synthetic construct
  misc_feature 1..80: note = Synthetic: >MurineCoV-cand-29560-29639
  source 1..80: mol_type = other DNA
aaccttatgtgtatagatatgaaaggtaccgtgtatgttagacccattattgaggattaccatacactaacagccactat

SEQ ID NO: 10139 - DNA, 80 bp, synthetic construct
  misc_feature 1..80: note = Synthetic: >MurineCoV-cand-29640-29719
  source 1..80: mol_type = other DNA
tattcgtggccacctctacatgcaaggtgttaagctaggcaccggtttctctttgtctgacttgcccgcttatgttacag

SEQ ID NO: 10140 - DNA, 80 bp, synthetic construct
  misc_feature 1..80: note = Synthetic: >MurineCoV-cand-29720-29799
  source 1..80: mol_type = other DNA
ttgctaaggtgtcacacctttgcacttataagcgcgcattcttagacaaggtagacggtgtgtttagcggttttgctgtt

SEQ ID NO: 10141 - DNA, 80 bp, synthetic construct
  misc_feature 1..80: note = Synthetic: >MurineCoV-cand-29800-29879
  source 1..80: mol_type = other DNA
tatgtgaagtccaaggtcggaaattaccgactgccctcaaacaaaccgagtggcgcggacaccgcattgttgagaatcta

SEQ ID NO: 10142 - DNA, 80 bp, synthetic construct
  misc_feature 1..80: note = Synthetic: >MurineCoV-cand-29880-29959
  source 1..80: mol_type = other DNA
atctaaactttaaggatgtcttttgttcctgggcaagaaaatgccggtggcagaagctcctctgtaaaccgcgctggtaa

SEQ ID NO: 10143 - DNA, 80 bp, synthetic construct
  misc_feature 1..80: note = Synthetic: >MurineCoV-cand-29960-30039
  source 1..80: mol_type = other DNA
tggaatcctcaagaagaccacttgggctgaccaaaccgagcgtggaccaaataatcaaaatagaggcagaaggaatcagc

SEQ ID NO: 10144 - DNA, 80 bp, synthetic construct
  misc_feature 1..80: note = Synthetic: >MurineCoV-cand-30040-30119
  source 1..80: mol_type = other DNA
caaagcagactgcaactactcaacccaactccgggagtgtggttccccattactcctggttttctggcattacccagttc

SEQ ID NO: 10145 - DNA, 80 bp, synthetic construct
  misc_feature 1..80: note = Synthetic: >MurineCoV-cand-30120-30199
  source 1..80: mol_type = other DNA
caaaagggaaaggagtttcagtttgcagaaggacaaggagtgcctattgccaatggaatccccgcttcagagcaaaaggg

SEQ ID NO: 10146 - DNA, 80 bp, synthetic construct
  misc_feature 1..80: note = Synthetic: >MurineCoV-cand-30200-30279
  source 1..80: mol_type = other DNA
atattggtatagacacaaccgccgttcttttaaaacacctgatgggcagcagaagcaattactgcccagatggtattttt

SEQ ID NO: 10147 - DNA, 80 bp, synthetic construct
  misc_feature 1..80: note = Synthetic: >MurineCoV-cand-30280-30359
  source 1..80: mol_type = other DNA
actatcttggcacagggccccatgctggagccagttatggagacagcattgaaggtgtcttctgggttgcaaacagccaa

SEQ ID NO: 10148 - DNA, 80 bp, synthetic construct
  misc_feature 1..80: note = Synthetic: >MurineCoV-cand-30360-30439
  source 1..80: mol_type = other DNA
gcggacaccaatacccgctctgatattgtcgaaagggacccaagcagtcatgaggctattcctactaggtttgcgcccgg

SEQ ID NO: 10149 - DNA, 80 bp, synthetic construct
  misc_feature 1..80: note = Synthetic: >MurineCoV-cand-30440-30519
  source 1..80: mol_type = other DNA
cacggtattgcctcagggcttttatgttgaaggctctggaaggtctgcacctgctagccgatctggttcgcggtcacaat

SEQ ID NO: 10150 - DNA, 80 bp, synthetic construct
  misc_feature 1..80: note = Synthetic: >MurineCoV-cand-30520-30599
  source 1..80: mol_type = other DNA
cccgtgggccaaataatcgcgctagaagcagttccaaccagcgccagcctgcctctactgtaaaacctgatatggccgaa

SEQ ID NO: 10151 - DNA, 80 bp, synthetic construct
  misc_feature 1..80: note = Synthetic: >MurineCoV-cand-30600-30679
  source 1..80: mol_type = other DNA
gaaattgctgctcttgttttggctaagctcggtaaagatgccggccagcccaagcaagtaacgaagcaaagtgccaaaga

SEQ ID NO: 10152 - DNA, 80 bp, synthetic construct
  misc_feature 1..80: note = Synthetic: >NL63-cand-1600-1679
  source 1..80: mol_type = other DNA
taactgtctctaatggtgttattattatgtgtgcagatgttccagatgcttttcaatcagtttatcgcacatttacacaa

SEQ ID NO: 10153 - DNA, 80 bp, synthetic construct
  misc_feature 1..80: note = Synthetic: >NL63-cand-1680-1759
  source 1..80: mol_type = other DNA
gctatttgtgctgcatttgatttttctttagatgtatttaaaattggtgatgttaaatttaaacgacttggtgattatgt

SEQ ID NO: 10154 - DNA, 80 bp, synthetic construct
  misc_feature 1..80: note = Synthetic: >NL63-cand-1760-1839
  source 1..80: mol_type = other DNA
tcttactgaaaacgctcttgttcgtttgactactgaagttgttcgtggtgttcgtgatgctcgcataaagaaagccatgt

SEQ ID NO: 10155 - DNA, 80 bp, synthetic construct
  misc_feature 1..80: note = Synthetic: >NL63-cand-1840-1919
  source 1..80: mol_type = other DNA
ttactaaagtagttgtaggtcctacaactgaagttaagttttctgttattgaacttgccactgttaatttgcgtcttgtt

SEQ ID NO: 10156 - DNA, 80 bp, synthetic construct
  misc_feature 1..80: note = Synthetic: >NL63-cand-1920-1999
  source 1..80: mol_type = other DNA
gattgtgcacctgtagtttgccctaaaggtaagattgttgttattgctggacaagcttttttctatagtggtggttttta

SEQ ID NO: 10157 - DNA, 80 bp, synthetic construct
  misc_feature 1..80: note = Synthetic: >NL63-cand-2000-2079
  source 1..80: mol_type = other DNA
tcgttttatggttgatcctacaactgtattaaatgatcctgtttttactggtgatttattttacactattaagtttagtg

SEQ ID NO: 10158 - DNA, 80 bp, synthetic construct
  misc_feature 1..80: note = Synthetic: >NL63-cand-2080-2159
  source 1..80: mol_type = other DNA
gttttaagcttgatggttttaaccatcagtttgttactgctagttctgctacagatgccattattgctgttgagctgttg

SEQ ID NO: 10159 - DNA, 80 bp, synthetic construct
  misc_feature 1..80: note = Synthetic: >NL63-cand-2160-2239
  source 1..80: mol_type = other DNA
ttattggattttaaaactgcagtttttgtgtacacatgtgtggttgatggctgtagtgtcattgttagacgtgatgctac

SEQ ID NO: 10160 - DNA, 80 bp, synthetic construct
  misc_feature 1..80: note = Synthetic: >NL63-cand-2240-2319
  source 1..80: mol_type = other DNA
attcgccacacatgtgtgttttaaggactgttataatatttgggagcaattctgcattgataattgtggtgagccatggt

SEQ ID NO: 10161 - DNA, 80 bp, synthetic construct
  misc_feature 1..80: note = Synthetic: >NL63-cand-2320-2399
  source 1..80: mol_type = other DNA
ttttgactgattataatgctatcttgcagagtaataaccctcaatgtgctattgttcaagcatcggagtctaaagttttg

SEQ ID NO: 10162 - DNA, 80 bp, synthetic construct
  misc_feature 1..80: note = Synthetic: >NL63-cand-2400-2479
  source 1..80: mol_type = other DNA
cttgagaggtttttacctaagtgtcctgaaatactgttgagtattgatgatggccatttatggaatctttttgttgaaaa

SEQ ID NO: 10163 - DNA, 80 bp, synthetic construct
  misc_feature 1..80: note = Synthetic: >NL63-cand-2480-2559
  source 1..80: mol_type = other DNA
gtttaattttgttacagattggttaaaaactcttaagcttacacttacttctaatggtcttttaggtaattgtgccaaac

SEQ ID NO: 10164 - DNA, 80 bp, synthetic construct
  misc_feature 1..80: note = Synthetic: >NL63-cand-2560-2639
  source 1..80: mol_type = other DNA
gttttagacgtgttttggtaaaattgcttgatgtctataatggttttcttgaaactgtctgtagtgtcgcacacactgct

SEQ ID NO: 10165 - DNA, 80 bp, synthetic construct
  misc_feature 1..80: note = Synthetic: >NL63-cand-2640-2719
  source 1..80: mol_type = other DNA
ggtgtttgcatcaaatattatgctgttaatgttccatatgtagttattagtggttttgtaagtcgtgtaattcgtagaga

SEQ ID NO: 10166 - DNA, 80 bp, synthetic construct
  misc_feature 1..80: note = Synthetic: >NL63-cand-2720-2799
  source 1..80: mol_type = other DNA
aaggtgtgacatgacttttccttgtgttagttgtgtcacttttttctatgaatttttagacacttgttttggtgttagta

SEQ ID NO: 10167 - DNA, 80 bp, synthetic construct
  misc_feature 1..80: note = Synthetic: >NL63-cand-2800-2879
  source 1..80: mol_type = other DNA
aacctaatgccattgatgttgaacatttagagcttaaagaaactgtttttgttgaacctaaggatggtggtcaatttttt

SEQ ID NO: 10168 - DNA, 80 bp, synthetic construct
  misc_feature 1..80: note = Synthetic: >SARSCoV-cand-25420-25499
  source 1..80: mol_type = other DNA
cgctacaagcctcactccctttcggatggcttgttattggcgttgcatttcttgctgtttttcagagcgctaccaaaata

SEQ ID NO: 10169 - DNA, 80 bp, synthetic construct
  misc_feature 1..80: note = Synthetic: >SARSCoV-cand-25500-25579
  source 1..80: mol_type = other DNA
attgcgctcaataaaagatggcagctagccctttataagggcttccagttcatttgcaatttactgctgctatttgttac

SEQ ID NO: 10170 - DNA, 80 bp, synthetic construct
  misc_feature 1..80: note = Synthetic: >SARSCoV-cand-25580-25659
  source 1..80: mol_type = other DNA
catctattcacatcttttgcttgtcgctgcaggtatggaggcgcaatttttgtacctctatgccttgatatattttctac

SEQ ID NO: 10171 - DNA, 80 bp, synthetic construct
  misc_feature 1..80: note = Synthetic: >SARSCoV-cand-25660-25739
  source 1..80: mol_type = other DNA
aatgcatcaacgcatgtagaattattatgagatgttggctttgttggaagtgcaaatccaagaacccattactttatgat

SEQ ID NO: 10172 - DNA, 80 bp, synthetic construct
  misc_feature 1..80: note = Synthetic: >SARSCoV-cand-25740-25819
  source 1..80: mol_type = other DNA
gccaactactttgtttgctggcacacacataactatgactactgtataccatataacagtgtcacagatacaattgtcgt

SEQ ID NO: 10173 - DNA, 80 bp, synthetic construct
  misc_feature 1..80: note = Synthetic: >SARSCoV-cand-25820-25899
  source 1..80: mol_type = other DNA
tactgaaggtgacggcatttcaacaccaaaactcaaagaagactaccaaattggtggttattctgaggataggcactcag

SEQ ID NO: 10174 - DNA, 80 bp, synthetic construct
  misc_feature 1..80: note = Synthetic: >SARSCoV-cand-25980-26059
  source 1..80: mol_type = other DNA
actggtattgaaaatgctacattcttcatctttaacaagcttgttaaagacccaccgaatgtgcaaatacacacaatcga

SEQ ID NO: 10175 - DNA, 80 bp, synthetic construct
  misc_feature 1..80: note = Synthetic: >SARSCoV-cand-26060-26139
  source 1..80: mol_type = other DNA
cggctcttcaggagttgctaatccagcaatggatccaatttatgatgagccgacgacgactactagcgtgcctttgtaag

SEQ ID NO: 10176 - DNA, 80 bp, synthetic construct
  misc_feature 1..80: note = Synthetic: >SARSCoV-cand-26140-26219
  source 1..80: mol_type = other DNA
cacaagaaagtgagtacgaacttatgtactcattcgtttcggaagaaacaggtacgttaatagttaatagcgtacttctt

SEQ ID NO: 10177 - DNA, 80 bp, synthetic construct
  misc_feature 1..80: note = Synthetic: >SARSCoV-cand-26300-26379
  source 1..80: mol_type = other DNA
tgttaacgtgagtttagtaaaaccaacggtttacgtctactcgcgtgttaaaaatctgaactcttctgaaggagttcctg

SEQ ID NO: 10178 - DNA, 80 bp, synthetic construct
  misc_feature 1..80: note = Synthetic: >SARSCoV-cand-26380-26459
  source 1..80: mol_type = other DNA
atcttctggtctaaacgaactaactattattattattctgtttggaactttaacattgcttatcatggcagacaacggta

SEQ ID NO: 10179 - DNA, 80 bp, synthetic construct
  misc_feature 1..80: note = Synthetic: >SARSCoV-cand-26460-26539
  source 1..80: mol_type = other DNA
ctattaccgttgaggagcttaaacaactcctggaacaatggaacctagtaataggtttcctattcctagcctggattatg

SEQ ID NO: 10180 - DNA, 80 bp, synthetic construct
  misc_feature 1..80: note = Synthetic: >SARSCoV-cand-26540-26619
  source 1..80: mol_type = other DNA
ttactacaatttgcctattctaatcggaacaggtttttgtacataataaagcttgttttcctctggctcttgtggccagt

SEQ ID NO: 10181 - DNA, 80 bp, synthetic construct
  misc_feature 1..80: note = Synthetic: >SARSCoV-cand-26620-26699
  source 1..80: mol_type = other DNA
aacacttgcttgttttgtgcttgctgctgtctacagaattaattgggtgactggcgggattgcgattgcaatggcttgta

SEQ ID NO: 10182 - DNA, 80 bp, synthetic construct
  misc_feature 1..80: note = Synthetic: >SARSCoV2-cand-29010-29089
  source 1..80: mol_type = other DNA
aagaaatctgctgctgaggcttctaagaagcctcggcaaaaacgtactgccactaaagcatacaatgtaacacaagcttt

SEQ ID NO: 10183 - DNA, 80 bp, synthetic construct
  misc_feature 1..80: note = Synthetic: >SARSCoV2-cand-29090-29169
  source 1..80: mol_type = other DNA
cggcagacgtggtccagaacaaacccaaggaaattttggggaccaggaactaatcagacaaggaactgattacaaacatt

SEQ ID NO: 10184 - DNA, 80 bp, synthetic construct
  misc_feature 1..80: note = Synthetic: >SARSCoV2-cand-29170-29249
  source 1..80: mol_type = other DNA
ggccgcaaattgcacaatttgcccccagcgcttcagcgttcttcggaatgtcgcgcattggcatggaagtcacaccttcg

SEQ ID NO: 10185 - DNA, 80 bp, synthetic construct
  misc_feature 1..80: note = Synthetic: >SARSCoV2-cand-29250-29329
  source 1..80: mol_type = other DNA
ggaacgtggttgacctacacaggtgccatcaaattggatgacaaagatccaaatttcaaagatcaagtcattttgctgaa

SEQ ID NO: 10186 - DNA, 80 bp, synthetic construct
  misc_feature 1..80: note = Synthetic: >SARSCoV2-cand-29330-29409
  source 1..80: mol_type = other DNA
taagcatattgacgcatacaaaacattcccaccaacagagcctaaaaaggacaaaaagaagaaggctgatgaaactcaag

SEQ ID NO: 10187 - DNA, 80 bp, synthetic construct
  misc_feature 1..80: note = Synthetic: >SARSCoV2-cand-29410-29489
  source 1..80: mol_type = other DNA
ccttaccgcagagacagaagaaacagcaaactgtgactcttcttcctgctgcagatttggatgatttctccaaacaattg

SEQ ID NO: 10188 - DNA, 80 bp, synthetic construct
  misc_feature 1..80: note = Synthetic: >SARSCoV2-cand-29490-29569
  source 1..80: mol_type = other DNA
caacaatccatgagcagtgctgactcaactcaggcctaaactcatgcagaccacacaaggcagatgggctatataaacgt

SEQ ID NO: 10189 - DNA, 80 bp, synthetic construct
  misc_feature 1..80: note = Synthetic: >SARSCoV2-cand-29570-29649
  source 1..80: mol_type = other DNA
tttcgcttttccgtttacgatatatagtctactcttgtgcagaatgaattctcgtaactacatagcacaagtagatgtag

SEQ ID NO: 10190 - DNA, 80 bp, synthetic construct
  misc_feature 1..80: note = Synthetic: >SARSCoV2-cand-29650-29729
  source 1..80: mol_type = other DNA
ttaactttaatctcacatagcaatctttaatcagtgtgtaacattagggaggacttgaaagagccaccacattttcaccg

SEQ ID NO: 10191 - DNA, 80 bp, synthetic construct
  misc_feature 1..80: note = Synthetic: >SARSCoV2-cand-29810-29889
  source 1..80: mol_type = other DNA
attaattttagtagtgctatccccatgtgattttaatagcttcttaggagaatgacaaaaaaaaaaaaaaaaaaaaaaaa

SEQ ID NO: 10192 - DNA, 80 bp, synthetic construct
  misc_feature 1..80: note = Synthetic: >Shrew-cand-0-79
  source 1..80: mol_type = other DNA
ttttttgagcgtgtctcgtcgtttcaaactaaacgaaatttgcaaaatacacatggttgtgtgttttgcgtaataatttc

SEQ ID NO: 10193 - DNA, 80 bp, synthetic construct
  misc_feature 1..80: note = Synthetic: >Shrew-cand-80-159
  source 1..80: mol_type = other DNA
gactaatcattgctctttgagtgttgcacaagtgtggtgtttttgtgctaagttctgtttggcacgaaaaccttaagtct

SEQ ID NO: 10194 - DNA, 80 bp, synthetic construct
  misc_feature 1..80: note = Synthetic: >Shrew-cand-160-239
  source 1..80: mol_type = other DNA
agttccgtctggcttaagtgtgaaactgttgttccgtctgcagtgaatcccataactggcaacatgtctgtgagcaaagt

SEQ ID NO: 10195 - DNA, 80 bp, synthetic construct
  misc_feature 1..80: note = Synthetic: >Shrew-cand-240-319
  source 1..80: mol_type = other DNA
agagttgtttgtaccaatctctgatgaagtcgatgctactcactttggaacttttggtgatgccgtagaggcatatgcct

SEQ ID NO: 10196 - DNA, 80 bp, synthetic construct
  misc_feature 1..80: note = Synthetic: >Shrew-cand-2880-2959
  source 1..80: mol_type = other DNA
gtttggagttgtagcagcggctgtttatcatggagttgtgtttgctggacattggttgtgtagcgattttgtaaatcgta

SEQ ID NO: 10197 - DNA, 80 bp, synthetic construct
  misc_feature 1..80: note = Synthetic: >Shrew-cand-2960-3039
  source 1..80: mol_type = other DNA
ttacaattgatggtcatggtaaacaagatctctttgttaaaagtccgcttgctgttgttgtaacaaatgttgagataaaa

SEQ ID NO: 10198 - DNA, 80 bp, synthetic construct
  misc_feature 1..80: note = Synthetic: >Shrew-cand-3040-3119
  source 1..80: mol_type = other DNA
gaagaagaaaaagtggaagttgaagaaaagattgtggaacccttccttgtgagaagtcacataaaattctttcaactcaa

SEQ ID NO: 10199 - DNA, 80 bp, synthetic construct
  misc_feature 1..80: note = Synthetic: >Shrew-cand-3120-3199
  source 1..80: mol_type = other DNA
ttgtaatcaattgttaaagttgaaacctcgtttaattgttaacgctgctaatagtcatttgcgccatggaggtggacttg

SEQ ID NO: 10200 - DNA, 80 bp, synthetic construct
  misc_feature 1..80: note = Synthetic: >Shrew-cand-3200-3279
  source 1..80: mol_type = other DNA
cagccggtttgaatgatgttacaaatggtgaattgcagaaacagtctaatgcttatgtgaaaaagtatggacctgttcct

SEQ ID NO: 10201 - DNA, 80 bp, synthetic construct
  misc_feature 1..80: note = Synthetic: >Shrew-cand-3280-3359
  source 1..80: mol_type = other DNA
gttggtggttctgcttttataagatgtaaggtagataataattgtgtggatatcttaaatatcgttgcacctcgtaaagg

SEQ ID NO: 10202 - DNA, 80 bp, synthetic construct
  misc_feature 1..80: note = Synthetic: >Shrew-cand-3360-3439
  source 1..80: mol_type = other DNA
agatgacgatgtttatggaaatttaataaaagcttatagcaatgttaaagtcgaagatgcatttgtgcccattttaggtt

SEQ ID NO: 10203 - DNA, 80 bp, synthetic construct
  misc_feature 1..80: note = Synthetic: >Shrew-cand-3440-3519
  source 1..80: mol_type = other DNA
gtggcatttttggcttaccattgattaaatccttacgttgtcttatgaaagtaattagaggaaaagttaatgtttttgtt

SEQ ID NO: 10204 - DNA, 80 bp, synthetic construct
  misc_feature 1..80: note = Synthetic: >Shrew-cand-3520-3599
  source 1..80: mol_type = other DNA
tatttggattctgaagtgaaaatgatcctagattattttgccaaagagtctaaagctgatgttgtagataatgtttctgt

SEQ ID NO: 10205 - DNA, 80 bp, synthetic construct
  misc_feature 1..80: note = Synthetic: >Shrew-cand-3600-3679
  source 1..80: mol_type = other DNA
tattaaagcttcctctaaagatttgcaatctgagacgaagaaagatatagtgcagaaagttgtagcttccaaggaagtga

SEQ ID NO: 10206 - DNA, 80 bp, synthetic construct
  misc_feature 1..80: note = Synthetic: >Shrew-cand-3680-3759
  source 1..80: mol_type = other DNA
atgtgaaagagagttctttgaataataatagatttagtgtattgtcacaaaaagacacagaagaaaataatgctttgcaa

SEQ ID NO: 10207 - DNA, 80 bp, synthetic construct
  misc_feature 1..80: note = Synthetic: >Shrew-cand-3760-3839
  source 1..80: mol_type = other DNA
acagaagtagataaagtagaaacttctagtagcgttgttgcacctgatgtcagtagtgtgatgaatgttgaatctattaa

SEQ ID NO: 10208 - DNA, 80 bp, synthetic construct
  misc_feature 1..80: note = Synthetic: >Shrew-cand-3840-3919
  source 1..80: mol_type = other DNA
tgataatacatcaactaaaaaaactacacacaaagaaagtgttgtagttgaaaatttgactgtagatattagaaatgatg

SEQ ID NO: 10209 - DNA, 80 bp, synthetic construct
  misc_feature 1..80: note = Synthetic: >Shrew-cand-3920-3999
  source 1..80: mol_type = other DNA
tgaatattgaagttcctgtagaaagtgaacaaaatatacatgtttcagatattgaagattctaaagaatcaaaaattgta

SEQ ID NO: 10210 - DNA, 80 bp, synthetic construct
  misc_feature 1..80: note = Synthetic: >Shrew-cand-4000-4079
  source 1..80: mol_type = other DNA
aatttgaatggtcgtgatagttatagagtagattctaattatgaagaagaggatgcagattgggaaaccttttatggatt

SEQ ID NO: 10211 - DNA, 80 bp, synthetic construct
  misc_feature 1..80: note = Synthetic: >Shrew-cand-4080-4159
  source 1..80: mol_type = other DNA
ttcaaatgcaaaagtcttttctgaaattgattatagccgctataaaactaagtttaagattaaacatggttatgtggctt

SEQ ID NO: 10212 - DNA, 80 bp, synthetic construct
  misc_feature 1..80: note = Synthetic: >Shrew-cand-6740-6819
  source 1..80: mol_type = other DNA
ttgttggaacttttgaagatggtaaagtaataccaaatgtaccagcgaatgttaaattggttggtaatttgttgtatttt

SEQ ID NO: 10213 - DNA, 80 bp, synthetic construct
  misc_feature 1..80: note = Synthetic: >Shrew-cand-6820-6899
  source 1..80: mol_type = other DNA
ggattgaactcagtttttcagtctcaagacaatttgtgttttgatcaatttggtttgactgaaaattgtgtgtttaattc

SEQ ID NO: 10214 - DNA, 80 bp, synthetic construct
  misc_feature 1..80: note = Synthetic: >Shrew-cand-6900-6979
  source 1..80: mol_type = other DNA
tgcatgtttaaagttaacaggtattgttggtgagagagtttattgttattccaaaggtttggtaaatgattctttgcttt

SEQ ID NO: 10215 - DNA, 80 bp, synthetic construct
  misc_feature 1..80: note = Synthetic: >Shrew-cand-6980-7059
  source 1..80: mol_type = other DNA
atgcagatattttaccacacttagcataccaaacagttgatggagctcttttgcgtttgccaaaattgatctttagtata

SEQ ID NO: 10216 - DNA, 80 bp, synthetic construct
  misc_feature 1..80: note = Synthetic: >Shrew-cand-7060-7139
  source 1..80: mol_type = other DNA
ctgggattgaaatttgtacaacttaaggatttgttatattgtaaaatgggtgaatgtgtaaactcacaactaggttattg

SEQ ID NO: 10217 - DNA, 80 bp, synthetic construct
  misc_feature 1..80: note = Synthetic: >Shrew-cand-7140-7219
  source 1..80: mol_type = other DNA
tctgggagctgaatcattcatggtttataataaggagtataataaagataaatatgttttttgtggtgaaggatttttag

SEQ ID NO: 10218 - DNA, 80 bp, synthetic construct
  misc_feature 1..80: note = Synthetic: >Shrew-cand-7220-7299
  source 1..80: mol_type = other DNA
gttttattagaaatttttataccacatttaacactaatgtctttagtttgtttttgactacccaagtgatgattaatttt

SEQ ID NO: 10219 - DNA, 80 bp, synthetic construct
  misc_feature 1..80: note = Synthetic: >Shrew-cand-7300-7379
  source 1..80: mol_type = other DNA
ttagttatgttaattgtgttgtttggattttggttagcaatgcgtataaggcgtatgtttggtgattttactatgagtgt

SEQ ID NO: 10220 - DNA, 80 bp, synthetic construct
  misc_feature 1..80: note = Synthetic: >Shrew-cand-7380-7459
  source 1..80: mol_type = other DNA
ttgttatattgtagttgctacaatggtaaattctttatcatatttagtaactggtaacagcattggactcttagtttatg

SEQ ID NO: 10221 - DNA, 80 bp, synthetic construct
  misc_feature 1..80: note = Synthetic: >Shrew-cand-7460-7539
  source 1..80: mol_type = other DNA
gtttagtgtatttctttgttactttgcgcttgaattatacttatatttggcatatgtgttttataattgcatatttgaca

SEQ ID NO: 10222 - DNA, 80 bp, synthetic construct
  misc_feature 1..80: note = Synthetic: >Shrew-cand-7540-7619
  source 1..80: mol_type = other DNA
atagcgcctatgtggactattttcttgtatgtgtttggtttattttattattttgttcctaatgtgtttaaattaggttt

SEQ ID NO: 10223 - DNA, 80 bp, synthetic construct
  misc_feature 1..80: note = Synthetic: >Shrew-cand-7620-7699
  source 1..80: mol_type = other DNA
ggcaaaaggtctttatgaaggagaagtgtttgtgggtacttttgatagtgcttcacaggctacctttctattaaataagg

SEQ ID NO: 10224 - DNA, 80 bp, synthetic construct
  misc_feature 1..80: note = Synthetic: >Shrew-cand-7700-7779
  source 1..80: mol_type = other DNA
atacttatgttaagttagttaatagtttatcaagagataaattagaatattatgccagtaagtacaatcaatataaatat

SEQ ID NO: 10225 - DNA, 80 bp, synthetic construct
  misc_feature 1..80: note = Synthetic: >Shrew-cand-7780-7859
  source 1..80: mol_type = other DNA
tatcagggtagtggtaaggatggtgagtatttgttagcttgtaaaacacatttggctaaggcgttggcagattttgctaa

SEQ ID NO: 10226 - DNA, 80 bp, synthetic construct
  misc_feature 1..80: note = Synthetic: >Shrew-cand-7860-7939
  source 1..80: mol_type = other DNA
ttctcaagtagatgttgtatatttacccccaactgtgacttttacatcacgtatgcaagctggtttaagaaaaattctgc

SEQ ID NO: 10227 - DNA, 80 bp, synthetic construct
  misc_feature 1..80: note = Synthetic: >Shrew-cand-7940-8019
  source 1..80: mol_type = other DNA
agcctacgggtgtagtagagagttgtgtggtgaaagttagttatggtagtctgactcttaatggtttatggcttggtaat

SEQ ID NO: 10228 - DNA, 80 bp, synthetic construct
  misc_feature 1..80: note = Synthetic: >Shrew-cand-10580-10659
  source 1..80: mol_type = other DNA
gtcttactcatattaaatgggatagtaataatgaagttataaccattgagttagaacgtgcttctaagtttttagtagat

SEQ ID NO: 10229 - DNA, 80 bp, synthetic construct
  misc_feature 1..80: note = Synthetic: >Shrew-cand-10660-10739
  source 1..80: mol_type = other DNA
agaccaaatggcacacctaaagtaatgtatttgtattttgttaaaaatttgaatacattgcgtaggggtgctgttttagg

SEQ ID NO: 10230 - DNA, 80 bp, synthetic construct
  misc_feature 1..80: note = Synthetic: >Shrew-cand-10740-10819
  source 1..80: mol_type = other DNA
atggattggagcttctatgcgtttgcaagctggaaggcctacagagtttcctgaaaattccaatttgttgtctatttgtg

SEQ ID NO: 10231 - DNA, 80 bp, synthetic construct
  misc_feature 1..80: note = Synthetic: >Shrew-cand-10820-10899
  source 1..80: mol_type = other DNA
cttttgctgttgatcccgctaaagcttatcttgatgctattaaatcaggtgtgaaacctcttacaaattgtattaagatg

SEQ ID NO: 10232 - DNA, 80 bp, synthetic construct
  misc_feature 1..80: note = Synthetic: >Shrew-cand-10900-10979
  source 1..80: mol_type = other DNA
ctctctaatggatctggtaatggtcaagctgtaagttatacagttgatgccaaaacaaatcaagattcatatggtggtgc

SEQ ID NO: 10233 - DNA, 80 bp, synthetic construct
  misc_feature 1..80: note = Synthetic: >Shrew-cand-10980-11059
  source 1..80: mol_type = other DNA
atctgtttgtatttattgtcgcgcttatgttgaacatccaaccgttgatggtttatgtcaatttaagggtagatttgttc

SEQ ID NO: 10234 - DNA, 80 bp, synthetic construct
  misc_feature 1..80: note = Synthetic: >Shrew-cand-11060-11139
  source 1..80: mol_type = other DNA
aagtaccattagggactaaagatcctgtgggtttttgtattgaaaatagtatttgtagtgtttgtaagtgttggattggt

SEQ ID NO: 10235 - DNA, 80 bp, synthetic construct
  misc_feature 1..80: note = Synthetic: >Shrew-cand-11140-11219
  source 1..80: mol_type = other DNA
catggttgtgtttgtgacagatccaatatgcagactacagttgtagataataattatttaaacgggcaaggggttctagt

SEQ ID NO: 10236 - DNA, 80 bp, synthetic construct
  misc_feature 1..80: note = Synthetic: >Shrew-cand-11220-11299
  source 1..80: mol_type = other DNA
ggagctcgactagaaccctgtggtaatggtactgaacctgatgtagttgtaagagcttttgatatttgtaataaaggtaa

SEQ ID NO: 10237 - DNA, 80 bp, synthetic construct
  misc_feature 1..80: note = Synthetic: >Shrew-cand-11300-11379
  source 1..80: mol_type = other DNA
tgcatgtttagccaaagcttataagaggaattgttgcagatttaaaaatgtggatttgcacgatgcctattatataataa

SEQ ID NO: 10238 - DNA, 80 bp, synthetic construct
  misc_feature 1..80: note = Synthetic: >Shrew-cand-11380-11459
  source 1..80: mol_type = other DNA
aacgtgtgaatgttgaaagtatggaatttgagaaaaatgtttttgagagttttaaaggtagtaattgtgttgcagaacat

SEQ ID NO: 10239 - DNA, 80 bp, synthetic construct
  misc_feature 1..80: note = Synthetic: >Shrew-cand-11460-11539
  source 1..80: mol_type = other DNA
gatttctttaagtttcatcatggtagacaagagtttggtaatatttgtagaaaaaatcttaccaaatataccatgatgga

SEQ ID NO: 10240 - DNA, 80 bp, synthetic construct
  misc_feature 1..80: note = Synthetic: >Shrew-cand-11540-11619
  source 1..80: mol_type = other DNA
tctttgttttgctcttagaaactttgatgaaaatcattgtgaagttttaaaagagattttagttttaactaagtgttgtg

SEQ ID NO: 10241 - DNA, 80 bp, synthetic construct
  misc_feature 1..80: note = Synthetic: >Shrew-cand-11620-11699
  source 1..80: mol_type = other DNA
atgaaaagtattttgaaaataagttgtggtttgatcctattgaaaatgaagatttgtataaggtttatgctaaattgggt

SEQ ID NO: 10242 - DNA, 80 bp, synthetic construct
  misc_feature 1..80: note = Synthetic: >Shrew-cand-11700-11779
  source 1..80: mol_type = other DNA
cacatagtaaacactgctttattaaagtgtgttgaaatgtgtgatttaatggtagctaagggttatattggtgtgttgac

SEQ ID NO: 10243 - DNA, 80 bp, synthetic construct
  misc_feature 1..80: note = Synthetic: >Shrew-cand-11780-11859
  source 1..80: mol_type = other DNA
attagataatcaagatttaaatggtaatttttatgattttggtgattttatgagaagtcctccaggtatgggtgtacctg

SEQ ID NO: 10244 - DNA, 80 bp, synthetic construct
  misc_feature 1..80: note = Synthetic: >BtRf_AlphaCoV-cand-12860-12939
  source 1..80: mol_type = other DNA
tggtgattttgtcgatgttatgccaggtatgggtattccctgttgtacttcatattactcttacatgatgccaattatga

SEQ ID NO: 10245 - DNA, 80 bp, synthetic construct
  misc_feature 1..80: note = Synthetic: >HKU2R-cand-12890-12969
  source 1..80: mol_type = other DNA
ttttggtgattttgtcgatgttatgccaggtatgggtattccttgttgtacttcatattactcttacatgatgccaatta

SEQ ID NO: 10246 - DNA, 80 bp, synthetic construct
  misc_feature 1..80: note = Synthetic: >BtSk_AlphaCoV-cand-12550-12629
  source 1..80: mol_type = other DNA
ctgcacttgtgatagagctgtcatacagagtgttgacagcggttatttaaacgagtgcggggctctagtgcagctcgact

SEQ ID NO: 10247 - DNA, 80 bp, synthetic construct
  misc_feature 1..80: note = Synthetic: >Sk512R-cand-12580-12659
  source 1..80: mol_type = other DNA
ctaatggctgcacttgtgatagagctgtcatacagagtgttgacagcggttatttaaacgagtgcggggctctagtgcag

SEQ ID NO: 10248 - DNA, 80 bp, synthetic construct
  misc_feature 1..80: note = Synthetic: >Sb512-cand-12590-12669
  source 1..80: mol_type = other DNA
atggttgcacttgtgatagagctgtcatacagagtgttgacagcggttatttaaacgagtgcggggctctagtgcagctc

SEQ ID NO: 10249 - DNA, 80 bp, synthetic construct
  misc_feature 1..80: note = Synthetic: >AlphaSp-cand-14030-14109
  source 1..80: mol_type = other DNA
agtgcagtgctattttggtatgtatgagggtggttgcataactgctaaagaagttattgttaacaacctcaacaagagtg

SEQ ID NO: 10250 - DNA, 80 bp, synthetic construct
  misc_feature 1..80: note = Synthetic: >Sb512-cand-14020-14099
  source 1..80: mol_type = other DNA
tctatcaaatagttcagtgctattttggtatgtatgagggtggttgcataactgctaaagaagttattgttaacaacctc

SEQ ID NO: 10251 - DNA, 80 bp, synthetic construct
  misc_feature 1..80: note = Synthetic: >BtSk_AlphaCoV-cand-13970-14049
  source 1..80: mol_type = other DNA
ttgtctatcaaatagttcagtgctattttggtatgtatgagggtggttgcataactgctaaagaagttattgttaacaac

SEQ ID NO: 10252 - DNA, 80 bp, synthetic construct
  misc_feature 1..80: note = Synthetic: >Sk512R-cand-14000-14079
  source 1..80: mol_type = other DNA
caagcacgtgttgtctatcaaatagttcagtgctattttggtatgtatgagggtggttgcataactgctaaagaagttat

SEQ ID NO: 10253 - DNA, 80 bp, synthetic construct
  misc_feature 1..80: note = Synthetic: >MsbCoV1-cand-13000-13079
  source 1..80: mol_type = other DNA
agttatccaatctgttgatcaggcttatttaaacgagcaaggggctctagtgcagctcgactagagccctgtaatggtac

SEQ ID NO: 10254 - DNA, 80 bp, synthetic construct
  misc_feature 1..80: note = Synthetic: >HKU2R-cand-12250-12329
  source 1..80: mol_type = other DNA
gttcagagtactgatcaggcttatttaaacgggcaaggggctctagtgcagctcgactagagccctgtaatggtactgaa

SEQ ID NO: 10255 - DNA, 80 bp, synthetic construct
  misc_feature 1..80: note = Synthetic: >Sk512R-cand-2530-2609
  source 1..80: mol_type = other DNA
ttaacggcgttgtcgtttttgtgaccaaaaagtttaggaaggctggcgcccttttgcaaaagctgtacaatgcatttttg

SEQ ID NO: 10256 - DNA, 80 bp, synthetic construct
  misc_feature 1..80: note = Synthetic: >Sb512-cand-2540-2619
  source 1..80: mol_type = other DNA
acggcgttgtcgtttttgtgaccaaaaagtttaggaaggctggcgcccttttgcaaaagctgtacaatgcatttttggat

SEQ ID NO: 10257 - DNA, 80 bp, synthetic construct
  misc_feature 1..80: note = Synthetic: >AlphaMink-cand-24900-24979
  source 1..80: mol_type = other DNA
attgttacattagtggtactcttaggtcgctacttgtatttgagttacttttggtttaagtttgaacgttttgaattttt

SEQ ID NO: 10258 - DNA, 80 bp, synthetic construct
  misc_feature 1..80: note = Synthetic: >MinkCoV1-cand-24950-25029
  source 1..80: mol_type = other DNA
tgttgatggtattgttacgttagtggtactcttaagtcgctacttttatttgagttacttttggtttaagtttgaacgtt

SEQ ID NO: 10259 - DNA, 80 bp, synthetic construct
  misc_feature 1..80: note = Synthetic: >Alpha2-cand-24890-24969
  source 1..80: mol_type = other DNA
tattgttacattagtggtactcttatgtcgctacttgtatttgagttacttttggtttaagtttgaacgtttcgaatttt

SEQ ID NO: 10260 - DNA, 80 bp, synthetic construct
  misc_feature 1..80: note = Synthetic: >Sb512-cand-8920-8999
  source 1..80: mol_type = other DNA
gttggttttgccatctcatattgtttcttagcaccttggtgggtggttttggcctatttgatttgtgcgttgttagaatt

SEQ ID NO: 10261 - DNA, 80 bp, synthetic construct
  misc_feature 1..80: note = Synthetic: >Sk512R-cand-8910-8989
  source 1..80: mol_type = other DNA
catgttggttttgccatctcatattgtttcttagcaccttggtgggtggttttagcctatttgatttgtgcgttgttaga

SEQ ID NO: 10262 - DNA, 80 bp, synthetic construct
  misc_feature 1..80: note = Synthetic: >Sparrow-cand-17060-17139
  source 1..80: mol_type = other DNA
acccattgtcaaacacgttcaaaaactaaagtacaaaccggagatggaggcccgtttcaccgatggtttgactatgtttt

SEQ ID NO: 10263 - DNA, 80 bp, synthetic construct
  misc_feature 1..80: note = Synthetic: >Quail-cand-16980-17059
  source 1..80: mol_type = other DNA
tgtcaaacacgttcaaaaactaaagtacaaaccggagatggaggcccgtttcaccgatggtttgactatgttttggaatt

SEQ ID NO: 10264 - DNA, 80 bp, synthetic construct
  misc_feature 1..80: note = Synthetic: >Sparrow-cand-5950-6029
  source 1..80: mol_type = other DNA
tacacccccgatgttatcatcgcggcggattttgataacagaggtagtattaagacagctaaagaattagctgtggtttt

SEQ ID NO: 10265 - DNA, 80 bp, synthetic construct
  misc_feature 1..80: note = Synthetic: >HKU17-cand-5930-6009
  source 1..80: mol_type = other DNA
ctgttttcatacacccccgatgttatcatcgcggcggattttgataacagaggtagtattaagacagctaaagaattagc

SEQ ID NO: 10266 - DNA, 80 bp, synthetic construct
  misc_feature 1..80: note = Synthetic: >Delta-cand-7180-7259
  source 1..80: mol_type = other DNA
actcccgatgttatcatcgcggcagactttgacaacagaggtagtcttaagacagctaaagaattagctgtggttttgtc

SEQ ID NO: 10267 - DNA, 80 bp, synthetic construct
  misc_feature 1..80: note = Synthetic: >Sb512-cand-17380-17459
  source 1..80: mol_type = other DNA
acattaatgtgccaaaccaacatacgttgttttgcactcgtgatttcgcgatgcgcaacgctaggggttggctaggtttt

SEQ ID NO: 10268 - DNA, 80 bp, synthetic construct
  misc_feature 1..80: note = Synthetic: >SEAC-cand-7690-7769
  source 1..80: mol_type = other DNA
ctgtcctctatgtggaaaaatttttggtatgcatgtggtgccattttggcgttattcgtgctactgaattgtgtgggttt

SEQ ID NO: 10269 - DNA, 80 bp, synthetic construct
  misc_feature 1..80: note = Synthetic: >HKU2R-cand-7520-7599
  source 1..80: mol_type = other DNA
gtaagttatcctctatgtggaaaaatttttggtacgcatgtggcgctattttggcgttattcgtgctactgaattgtgtg

SEQ ID NO: 10270 - DNA, 80 bp, synthetic construct
  misc_feature 1..80: note = Synthetic: >Sparrow-cand-15000-15079
  source 1..80: mol_type = other DNA
tataatgagatagctatgcagcgggttacaactgtattaggtccacctggcacaggtaaatcaacctttgctatcggttt

SEQ ID NO: 10271 - DNA, 80 bp, synthetic construct
  misc_feature 1..80: note = Synthetic: >HKU20_FJ376622-cand-15150-15229
  source 1..80: mol_type = other DNA
taagtcatataatgagatagctatgcagcgggttacaactgtccttggaccacctggcactggtaaatcaacctttgcta

SEQ ID NO: 10272 - DNA, 80 bp, synthetic construct
  misc_feature 1..80: note = Synthetic: >HKU18-cand-15000-15079
  source 1..80: mol_type = other DNA
ataatgagatagctatgcagcgggttacaactgttcttggcccacccggcactggtaagtccacctttgctattggcttt

SEQ ID NO: 10273 - DNA, 80 bp, synthetic construct
  misc_feature 1..80: note = Synthetic: >Sk512R-cand-7800-7879
  source 1..80: mol_type = other DNA
tttatgcttacgtttaatgataggcgtatgcatttgacgattcccactattagtgttgctaacaagaagggtgcaggttt

SEQ ID NO: 10274 - DNA, 80 bp, synthetic construct
  misc_feature 1..80: note = Synthetic: >Sb512-cand-7800-7879
  source 1..80: mol_type = other DNA
tatcaattttatgcttacgtttaatgataggcgtatgcatttgacgattcccactattagtgttgctaacaagaagggtg

SEQ ID NO: 10275 - DNA, 80 bp, synthetic construct
  misc_feature 1..80: note = Synthetic: >Sk512R-cand-2290-2369
  source 1..80: mol_type = other DNA
tttgtactaagtattacaaactcccagattttgatgctttttataatgctgtgcatgctgcaactgatatggatcagttt

SEQ ID NO: 10276 - DNA, 80 bp, synthetic construct
  misc_feature 1..80: note = Synthetic: >Sb512-cand-2300-2379
  source 1..80: mol_type = other DNA
gtactaagtattacaaactcccagattttgatgctttttataatgctgtgcatgctgcaactgatatggatcagttttgt

SEQ ID NO: 10277 - DNA, 80 bp, synthetic construct
  misc_feature 1..80: note = Synthetic: >Sk512R-cand-7960-8039
  source 1..80: mol_type = other DNA
tgttggacttttccgcacaggttactagtgatacacaatatgatttcaagtacattgaaaatggtgtgcttaaagtcttt

SEQ ID NO: 10278 - DNA, 80 bp, synthetic construct
  misc_feature 1..80: note = Synthetic: >Sb512-cand-7960-8039
  source 1..80: mol_type = other DNA
actagcttgttggacttttccgcacaggttactagtgacacacaatatgatttcaagtacattgaaaatggtgtgcttaa

SEQ ID NO: 10279 - DNA, 80 bp, synthetic construct
  misc_feature 1..80: note = Synthetic: >BtSk_AlphaCoV-cand-12150-12229
  source 1..80: mol_type = other DNA
ttggagctacagttagactgcaagctggtaaacaaacagaacaggctactaattcttctttgctgactttatgtgccttt

SEQ ID NO: 10280 - DNA, 80 bp, synthetic construct
  misc_feature 1..80: note = Synthetic: >HKU15-cand-13940-14019
  source 1..80: mol_type = other DNA
tgttcagaaccttgaacgttacatctcacttgcaattgatgcatatcccctcaccaaggttgaccctattaagggtaaag

SEQ ID NO: 10281 - DNA, 80 bp, synthetic construct
  misc_feature 1..80: note = Synthetic: >HKU10R-cand-25900-25979
  source 1..80: mol_type = other DNA
gtgctgtggataatgtattttgtcaacagtttcaggctgtaccgcagaaccaacactttctgggcttttaacccagaaac

SEQ ID NO: 10282 - DNA, 80 bp, synthetic construct
  misc_feature 1..80: note = Synthetic: >CHB25-cand-25670-25749
  source 1..80: mol_type = other DNA
ggtgctgtggataatgtattttgtcaacagtttcaggctgtatcgcagaactcaaactttctgggcttttaacccagaaa

SEQ ID NO: 10283 - DNA, 80 bp, synthetic construct
  misc_feature 1..80: note = Synthetic: >SEAC-cand-26900-26979
  source 1..80: mol_type = other DNA
tttgtttgacatacaatccctagctttgcttgtggattcagtctcatacacaatggtaagcacgtaattatgctagtatg

SEQ ID NO: 10284 - DNA, 80 bp, synthetic construct
  misc_feature 1..80: note = Synthetic: >BtRf_AlphaCoV-cand-26710-26789
  source 1..80: mol_type = other DNA
tgtttgacatacaatccctagccttgcttgtggattcagtctcatacacaatggtaagcacgtaattatgctagtatgag

SEQ ID NO: 10285 - DNA, 80 bp, synthetic construct
  misc_feature 1..80: note = Synthetic: >HKU2R-cand-26700-26779
  source 1..80: mol_type = other DNA
gcagatttgtctgacatacaatcccatgcttcgcatgtggattcagtctcatacacaatggtaagcacgtaattatgcta

SEQ ID NO: 10286 - DNA, 80 bp, synthetic construct
  misc_feature 1..80: note = Synthetic: >WIV16-cand-6010-6089
  source 1..80: mol_type = other DNA
tttaaatcaaatgacaggcttcacaaagccagcttcacgagagttatctgtcacattctttccagacttgaatggcgatg

SEQ ID NO: 10287 - DNA, 80 bp, synthetic construct
  misc_feature 1..80: note = Synthetic: >SARSRC-cand-6000-6079
  source 1..80: mol_type = other DNA
tcaaatgacaggctttaaaaagccagcttcacgtgagctatctgtcacattctttccagacttgaatggcgatgtagtgg

SEQ ID NO: 10288 - DNA, 80 bp, synthetic construct
  misc_feature 1..80: note = Synthetic: >BtRl_BetaCoV-cand-5970-6049
  source 1..80: mol_type = other DNA
tgatcttaatcaaatgacaggcttcaaaaagccagcttcacgtgagctatctgtcacattctttccagacttgaatggcg

SEQ ID NO: 10289 - DNA, 80 bp, synthetic construct
  misc_feature 1..80: note = Synthetic: >BtRf_AlphaCoV-cand-19290-19369
  source 1..80: mol_type = other DNA
catgatgtcattgttgattgtaaggcttggcgctggatgctttggtgtaaagactccaaagtagctactttctacccgca

SEQ ID NO: 10290 - DNA, 80 bp, synthetic construct
  misc_feature 1..80: note = Synthetic: >SEAC-cand-19480-19559
  source 1..80: mol_type = other DNA
ctaaagtgcatgatgtcattgttgattgtaaggcttggcgctggatgctttggtgtaaagactccaaggttgccactttc

SEQ ID NO: 10291 - DNA, 80 bp, synthetic construct
  misc_feature 1..80: note = Synthetic: >HKU2R-cand-19330-19409
  source 1..80: mol_type = other DNA
tcattgttgattgtaaggcttggcgctggatgctttggtgtaaggactccaaggtggctactttctacccacagttgcag

SEQ ID NO: 10292 - DNA, 80 bp, synthetic construct
  misc_feature 1..80: note = Synthetic: >HKU23-cand-13760-13839
  source 1..80: mol_type = other DNA
tatgctggttgtgaacaatcctactttactaagaaggattggtatgattttgttgaaaatcctgatattattaatgttta

SEQ ID NO: 10293 - DNA, 80 bp, synthetic construct
  misc_feature 1..80: note = Synthetic: >Alpha2-cand-13260-13339
  source 1..80: mol_type = other DNA
tttaaacagcttggtttagtgtggaataaagacgttaatgtaaacaatcaaaaattatctatgactgaccttcttaaatt

SEQ ID NO: 10294 - DNA, 80 bp, synthetic construct
  misc_feature 1..80: note = Synthetic: >AlphaMink-cand-13270-13349
  source 1..80: mol_type = other DNA
ttttaaacagcttggtttagtgtggaataaagatgttaatgtaaataatcaaaaattgtctatgacagaccttcttaagt

SEQ ID NO: 10295 - DNA, 80 bp, synthetic construct
  misc_feature 1..80: note = Synthetic: >HghCoV1-cand-28530-28609
  source 1..80: mol_type = other DNA
aatttaatctcattgtaatggcaacaccacagcaacctcgcgctgtaacttttgccgataacaatggaaatcaacaaaat

SEQ ID NO: 10296 - DNA, 80 bp, synthetic construct
  misc_feature 1..80: note = Synthetic: >HKU31-cand-28650-28729
  source 1..80: mol_type = other DNA
cgaatttaattcctcattgtaatggcaacaccacagcaacctcgcgctgtaacttttgccgataacaatggaaatcaaca

SEQ ID NO: 10297 - DNA, 80 bp, synthetic construct
  misc_feature 1..80: note = Synthetic: >MbCoV1-cand-25730-25809
  source 1..80: mol_type = other DNA
aatttagagttgattcgcgttgcagaattacctcatgaatcattgttttacatctttggtactgaacctgttaatgatgt

SEQ ID NO: 10298 - DNA, 80 bp, synthetic construct
  misc_feature 1..80: note = Synthetic: >MsbCoV1-cand-25720-25799
  source 1..80: mol_type = other DNA
ctaaatttagagttgattcgcgttgcagaattaccttatgaatcattgttttacatctttggtactgaacctgttaatga

SEQ ID NO: 10299 - DNA, 80 bp, synthetic construct
  misc_feature 1..80: note = Synthetic: >HKU23-cand-21140-21219
  source 1..80: mol_type = other DNA
ttaatggggtattttgcattttggacggttttctgcacaaatgcaaatgcttcttctagtgaagggtttttaattggcat

SEQ ID NO: 10300 - DNA, 80 bp, synthetic construct
  misc_feature 1..80: note = Synthetic: >HKU5R-cand-28250-28329
  source 1..80: mol_type = other DNA
gaatttcacctggtcggtggttttcctgctcatcacaatcgtgctccaatatggctacccatctaggagcatgtttgtct

SEQ ID NO: 10301 - DNA, 80 bp, synthetic construct
  misc_feature 1..80: note = Synthetic: >HghCoV1-cand-20130-20209
  source 1..80: mol_type = other DNA
aatttctgatagaaaaatcaagaactacccttgtgttgtaggtcctgattatgcgtattttaatggtgctactatccgtg

SEQ ID NO: 10302 - DNA, 80 bp, synthetic construct
  misc_feature 1..80: note = Synthetic: >HKU31-cand-20200-20279
  source 1..80: mol_type = other DNA
atttctgatagaaaaatcaagaactacccttgtgttgtaggtcctgattatgcttattttaatggtgccattatccgtga

SEQ ID NO: 10303 - DNA, 80 bp, synthetic construct
  misc_feature 1..80: note = Synthetic: >HKU2-cand-22320-22399
  source 1..80: mol_type = other DNA
aatttgctatttaggtatggtggtttttgtcaaaaagttgaggctgacattcgtggtgcaggcattcttttggacggtga

SEQ ID NO: 10304 - DNA, 80 bp, synthetic construct
  misc_feature 1..80: note = Synthetic: >Alpha2-cand-17810-17889
  source 1..80: mol_type = other DNA
aggcatacgttgtgttacaacaccattaccatggttttgttacgataaggatcctattaacagtaatgttagatgcttag

SEQ ID NO: 10305 - DNA, 80 bp, synthetic construct
  misc_feature 1..80: note = Synthetic: >HKU5R-cand-6880-6959
  source 1..80: mol_type = other DNA
tgctcaaaatgttattaatactacctttcacattctggaagtctaaaaaccaaagcaccgttaaagttgaagtaggtgct

SEQ ID NO: 10306 - DNA, 80 bp, synthetic construct
  misc_feature 1..80: note = Synthetic: >Quail-cand-15620-15699
  source 1..80: mol_type = other DNA
ttagacaacaaaagcggtgggacaacgtgacctttatatcaccatataatgctatgaatgtcaaagcagccttagcaggt

SEQ ID NO: 10307 - DNA, 80 bp, synthetic construct
  misc_feature 1..80: note = Synthetic: >Sk512R-cand-5730-5809
  source 1..80: mol_type = other DNA
acctgtgacggtacttgctcaaccaagcgtgtagtttcaacacctgtggttaatgcaagtgttcttaaggtggggttaga

SEQ ID NO: 10308 - DNA, 80 bp, synthetic construct
  misc_feature 1..80: note = Synthetic: >Sb512-cand-5740-5819
  source 1..80: mol_type = other DNA
tgtgacggtacttgctcaaccaagcgtgtagtttcaacgcctgtggttaatgcaagtgttcttaaggtggggttagatga

SEQ ID NO: 10309 - DNA, 80 bp, synthetic construct
  misc_feature 1..80: note = Synthetic: >MsbCoV1-cand-19200-19279
  source 1..80: mol_type = other DNA
acctgttgccattgtgtctgacaaagtttttgttcgtgatggtgtggttgataatgttatattcactaacaagaccacct

SEQ ID NO: 10310 - DNA, 80 bp, synthetic construct
  misc_feature 1..80: note = Synthetic: >MbCoV1-cand-19220-19299
  source 1..80: mol_type = other DNA
attgtgtctgacaaagtttttgttcgtgatggtgtggttgataatgttatatttactaacaagaccactctaccgacaaa

SEQ ID NO: 10311 - DNA, 80 bp, synthetic construct
  misc_feature 1..80: note = Synthetic: >Sk512R-cand-7880-7959
  source 1..80: mol_type = other DNA
accttcactttttactaggttgtacagcttcttctggcatttgtgtgtcttgattgttgtgttgtttgtcgccactagct

SEQ ID NO: 10312 - DNA, 80 bp, synthetic construct
  misc_feature 1..80: note = Synthetic: >Sb512-cand-7880-7959
  source 1..80: mol_type = other DNA
caggtttaccttcactttttactaggttgtacagcttcttctggcatttgtgtgtcttgattgttgtgttgtttgtcgcc

SEQ ID NO: 10313 - DNA, 80 bp, synthetic construct
  misc_feature 1..80: note = Synthetic: >AlphaMink-cand-26820-26899
  source 1..80: mol_type = other DNA
ttgcgcagttcctgctgaatttaaattagaacaaaatgttaactctagaagcaactctaggtctaggtctaggggaaggt

SEQ ID NO: 10314 - DNA, 80 bp, synthetic construct
  misc_feature 1..80: note = Synthetic: >Alpha2-cand-26810-26889
  source 1..80: mol_type = other DNA
attgcgcagttcctgctgaatttaaattagaacaaaatgttaactctagaagtaactctaggtctagatctagaggaagg

SEQ ID NO: 10315 - DNA, 80 bp, synthetic construct
  misc_feature 1..80: note = Synthetic: >HghCoV1-cand-840-919
  source 1..80: mol_type = other DNA
tcatacctgtggatcaatatatgtgtggttttgatgggtcgcctatcaaaccatatttggatctagccaacaaagaaggt

SEQ ID NO: 10316 - DNA, 80 bp, synthetic construct
  misc_feature 1..80: note = Synthetic: >SEAC-cand-25720-25799
  source 1..80: mol_type = other DNA
accttggtactggtcctcacgcagatgctcctttcaggaaacggattcagggtgtgcattgggtcgctgttgacggtgct

SEQ ID NO: 10317 - DNA, 80 bp, synthetic construct
  misc_feature 1..80: note = Synthetic: >BatCoV1A-cand-15470-15549
  source 1..80: mol_type = other DNA
taacaaggagtatgcatctcttggctatgttgcagacattggtgcatttaaagccacactttactaccagaacaatgtat

SEQ ID NO: 10318 - DNA, 80 bp, synthetic construct
  misc_feature 1..80: note = Synthetic: >HghCoV1-cand-18370-18449
  source 1..80: mol_type = other DNA
ataaccaaagaagaagctataagacaagttagaagctggataggttttgatgttgaaggtgcacatgcttcgcgaaatgc

SEQ ID NO: 10319 - DNA, 80 bp, synthetic construct
  misc_feature 1..80: note = Synthetic: >HKU31-cand-18440-18519
  source 1..80: mol_type = other DNA
taaccaaagaagaagctataagacaagttagaagctggataggttttgatgttgaaggtgcacatgcttcgcgaaatgcg

SEQ ID NO: 10320 - DNA, 80 bp, synthetic construct
  misc_feature 1..80: note = Synthetic: >HghCoV1-cand-18770-18849
  source 1..80: mol_type = other DNA
gttgtatgtgtaatagacgcgctggtgcgtactcatcacctctgcattcctatgcatgctgggcacattccagtggttat

SEQ ID NO: 10321 - DNA, 80 bp, synthetic construct
  misc_feature 1..80: note = Synthetic: >HKU31-cand-18840-18919
  source 1..80: mol_type = other DNA
ttgtatgtgtaatagacgcgctggtgcgtactcatcacctctgcattcctatgcatgctgggcacattccagtggttatg

SEQ ID NO: 10322 - DNA, 80 bp, synthetic construct
  misc_feature 1..80: note = Synthetic: >BtRl_BetaCoV-cand-11960-12039
  source 1..80: mol_type = other DNA
ataaccgtgctactcttcaggctattgcttcagaatttagttctttaccatcatatgccgcttatgccactgcccaagag

SEQ ID NO: 10323 - DNA, 80 bp, synthetic construct
  misc_feature 1..80: note = Synthetic: >WIV16-cand-11990-12069
  source 1..80: mol_type = other DNA
atgctcgacaaccgtgctactctccaggctattgcttcagaatttagttctttaccatcatatgccgcttatgccactgc

SEQ ID NO: 10324 - DNA, 80 bp, synthetic construct
  misc_feature 1..80: note = Synthetic: >HKU31-cand-18920-18999
  source 1..80: mol_type = other DNA
attatgtttacaacccattctttgtagatgtacaacagtggggttatgtaggcaatcttgctaccaatcacgatcgttat

SEQ ID NO: 10325 - DNA, 80 bp, synthetic construct
  misc_feature 1..80: note = Synthetic: >HghCoV1-cand-18850-18929
  source 1..80: mol_type = other DNA
gattatgtttacaacccattctttgtagatgtacaacagtggggttatgtaggcaatcttgctaccaatcacgaccgtta

SEQ ID NO: 10326 - DNA, 80 bp, synthetic construct
  misc_feature 1..80: note = Synthetic: >BtSk_AlphaCoV-cand-25510-25589
  source 1..80: mol_type = other DNA
ataacgttgtttataagcctgttggaaaagtgtacggagtatacaagtcttatatgcgaattcaacccttgacatctgac

SEQ ID NO: 10327 - DNA, 80 bp, synthetic construct
  misc_feature 1..80: note = Synthetic: >Sb512-cand-25570-25649
  source 1..80: mol_type = other DNA
taataacgttgtttataagcctgttggaaaagtatacggagtatacaagtcttatatgcgaattcaacccttgacatctg

SEQ ID NO: 10328 - DNA, 80 bp, synthetic construct
  misc_feature 1..80: note = Synthetic: >HKU5R-cand-28810-28889
  source 1..80: mol_type = other DNA
cgcccattatacaagaccaagaactcgcactgctaagggcttaattgctctagtaagagacagatttttaacgaatctta

SEQ ID NO: 10329 - DNA, 80 bp, synthetic construct
  misc_feature 1..80: note = Synthetic: >MsbCoV1-cand-11310-11389
  source 1..80: mol_type = other DNA
gtcccgctgaatttaagtacatggttgctaatgatcttcgtgctcctacaggtgcttttgattcaatgtcacttagtctg

SEQ ID NO: 10330 - DNA, 80 bp, synthetic construct
  misc_feature 1..80: note = Synthetic: >BatCoV-cand-17770-17849
  source 1..80: mol_type = other DNA
tcgtaatgagcatgtagcatctggtgacgctatcatgactcggtgtcttgcaatacatgactgttttgtgaagaatgttg

SEQ ID NO: 10331 - DNA, 80 bp, synthetic construct
  misc_feature 1..80: note = Synthetic: >HKU4R-cand-12990-13069
  source 1..80: mol_type = other DNA
tagagttacaaccaccttgcaaatttttaattgcaggtcctaagggccctgaaattagatatctttactttgtaaagaat

SEQ ID NO: 10332 - DNA, 80 bp, synthetic construct
  misc_feature 1..80: note = Synthetic: >HKU4-cand-12990-13069
  source 1..80: mol_type = other DNA
tattaacatagagttacaaccaccttgcaaatttttaattgcaggtcctaagggccctgaaattagatatctttactttg

SEQ ID NO: 10333 - DNA, 80 bp, synthetic construct
  misc_feature 1..80: note = Synthetic: >HuB-cand-12510-12589
  source 1..80: mol_type = other DNA
gtaatattagtcgtcaaaatttgaccaaatataccatgatggacctcgtctacgctttaagaaattttgatgaaaagaat

SEQ ID NO: 10334 - DNA, 80 bp, synthetic construct
  misc_feature 1..80: note = Synthetic: >BatCoV-cand-12730-12809
  source 1..80: mol_type = other DNA
cattagtaggcaagatcttactaagtataccatgatggacctcgtctacgctttaagaaattttgatgaaaagaattgtg

SEQ ID NO: 10335 - DNA, 80 bp, synthetic construct
  misc_feature 1..80: note = Synthetic: >WIV16-cand-28750-28829
  source 1..80: mol_type = other DNA
attgacaataaccagaatggaggacgcaatggggcaaggccaaaacagcgccgaccccaaggtttacccaataatactgc

SEQ ID NO: 10336 - DNA, 80 bp, synthetic construct
  misc_feature 1..80: note = Synthetic: >Sk512R-cand-7720-7799
  source 1..80: mol_type = other DNA
ggcttgctaaggactttattgcactatctgaagaggctcgcaaatgtattgttaaaaccactaagattaagggtatcaat

SEQ ID NO: 10337 - DNA, 80 bp, synthetic construct
  misc_feature 1..80: note = Synthetic: >Sb512-cand-7720-7799
  source 1..80: mol_type = other DNA
gttgtttggcttgctaaggactttattgcactatctgaagaggctcgcaaatatattgttcgaaccactaagactaaggg

SEQ ID NO: 10338 - DNA, 80 bp, synthetic construct
  misc_feature 1..80: note = Synthetic: >HKU5-cand-800-879
  source 1..80: mol_type = other DNA
tgaggctgacccttgtggtaagtactctcagagccttcttaagaagctcgttggaggtgatttcaccccaatcgatcaat

SEQ ID NO: 10339 - DNA, 80 bp, synthetic construct
  misc_feature 1..80: note = Synthetic: >HKU5R-cand-810-889
  source 1..80: mol_type = other DNA
ccttgtggtaagtactctcagagccttcttaagaagctcgttggaggtgattttaccccaatcgatcaatacatgtgtgg

SEQ ID NO: 10340 - DNA, 80 bp, synthetic construct
  misc_feature 1..80: note = Synthetic: >BetaCoV1-cand-26590-26669
  source 1..80: mol_type = other DNA
attgattgtgctgcgtttgtctgtggggactatgcggcttgtagagaacaattagtagagtatggtagtttctgtgataa

SEQ ID NO: 10341 - DNA, 80 bp, synthetic construct
  misc_feature 1..80: note = Synthetic: >BetaSp-cand-26700-26779
  source 1..80: mol_type = other DNA
gtaaccattgattgtgctgcgtttgtctgtggggactatgcggcttgtagagaacaattagtagagtatggtagtttctg

SEQ ID NO: 10342 - DNA, 80 bp, synthetic construct
  misc_feature 1..80: note = Synthetic: >MbCoV1-cand-25810-25889
  source 1..80: mol_type = other DNA
gaaagttgttgacatgttgagttcaactacacgaagatgttaactttggtagatgatcatggattagttattaatgcaat

SEQ ID NO: 10343 - DNA, 80 bp, synthetic construct
  misc_feature 1..80: note = Synthetic: >BtRl_BetaCoV-cand-26730-26809
  source 1..80: mol_type = other DNA
ttggtgctgtgatcattcgtggtcacttgcgaatggctggacactccctggggcgctgtgacattaaggacctgccaaaa

SEQ ID NO: 10344 - DNA, 80 bp, synthetic construct
  misc_feature 1..80: note = Synthetic: >HKU5R-cand-14870-14949
  source 1..80: mol_type = other DNA
gccgcactcacgacaggtctaacatttcagactgtccgtcctggcaactttaataaagatttctatgattttgttgtttc

SEQ ID NO: 10345 - DNA, 80 bp, synthetic construct
  misc_feature 1..80: note = Synthetic: >MsbCoV1-cand-5770-5849
  source 1..80: mol_type = other DNA
tgttattgacactattgttaatgttgccccagaagttgattgggattctttttatggtttcccacatgcagctgaatttc

SEQ ID NO: 10346 - DNA, 80 bp, synthetic construct
  misc_feature 1..80: note = Synthetic: >MbCoV1-cand-5770-5849
  source 1..80: mol_type = other DNA
ttgtaactgatgttattgacactattgttaatgttgccccagaagttgattgggattctttttatggtttcccacatgca

SEQ ID NO: 10347 - DNA, 80 bp, synthetic construct
  misc_feature 1..80: note = Synthetic: >HKU4-cand-11790-11869
  source 1..80: mol_type = other DNA
gaaattgcgtgtaccattgggtgtgtatgactattcagtttcaactcaagaatttcgcttccttacaggtaatggccttc

SEQ ID NO: 10348 - DNA, 80 bp, synthetic construct
  misc_feature 1..80: note = Synthetic: >HKU4R-cand-11790-11869
  source 1..80: mol_type = other DNA
gtgtaccattgggtgtgtatgactattcagtttcaactcaagaatttcgcttccttacaggtaatggccttcatgcgcca

SEQ ID NO: 10349 - DNA, 80 bp, synthetic construct
  misc_feature 1..80: note = Synthetic: >HKU15-cand-16340-16419
  source 1..80: mol_type = other DNA
tccagagggaatttgggtaaacgagcacggatcttgcactgagcccgtccctgccaaaatacctcctggagaacaatttc

SEQ ID NO: 10350 - DNA, 80 bp, synthetic construct
  misc_feature 1..80: note = Synthetic: >FelineAlpha1-cand-19040-19119
  source 1..80: mol_type = other DNA
gaacatgttgtatttggagatgtttcaaaaaccaccattggtggtatgcatcttcttatatcacaagtgcgccttgcaaa

SEQ ID NO: 10351 - DNA, 80 bp, synthetic construct
  misc_feature 1..80: note = Synthetic: >MsbCoV1-cand-5450-5529
  source 1..80: mol_type = other DNA
gtagttcctagcgatggcgatgtccaatatgtcaaaaatgttaagcgtactatttccaaactgtcaaaacttaggggttc

SEQ ID NO: 10352 - DNA, 80 bp, synthetic construct
  misc_feature 1..80: note = Synthetic: >MbCoV1-cand-5450-5529
  source 1..80: mol_type = other DNA
tgtgtttgcagtagttcctagcgatggcgatgtccaatatgtcagaaatgtcaagcgtactatttccaaactgtcaaaac

SEQ ID NO: 10353 - DNA, 80 bp, synthetic construct
  misc_feature 1..80: note = Synthetic: >SARSCoV-cand-14680-14759
  source 1..80: mol_type = other DNA
gaactaaaacacttcttctttgctcaggatggcaacgctgctatcagtgattatgactattatcgttataatctgccaac

SEQ ID NO: 10354 - DNA, 80 bp, synthetic construct
  misc_feature 1..80: note = Synthetic: >WIV16-cand-14670-14749
  source 1..80: mol_type = other DNA
tgaactaaaacacttcttctttgctcaggatggcaatgctgctatcagtgattatgactattatcgttataatctgccaa

SEQ ID NO: 10355 - DNA, 80 bp, synthetic construct
  misc_feature 1..80: note = Synthetic: >BatCoV-cand-15050-15129
  source 1..80: mol_type = other DNA
gattgggttaaacatttacacaacacactcaaccagggtgttttagaatctttctcagttactttgcttgaggatgcttc

SEQ ID NO: 10356 - DNA, 80 bp, synthetic construct
  misc_feature 1..80: note = Synthetic: >MN517817-cand-23030-23109
  source 1..80: mol_type = other DNA
gcttcctttaataaggccattggtcatatgcaggaaggttttagaagcacttcgctagcattacaacagattcaagatgt

SEQ ID NO: 10357 - DNA, 80 bp, synthetic construct
  misc_feature 1..80: note = Synthetic: >MN531554-cand-23770-23849
  source 1..80: mol_type = other DNA
actggttgttgtggttgttgttgtggatgctttggcattattccattaatgagtaagtgtggtaagaagtcttcttacta

SEQ ID NO: 10358 - DNA, 80 bp, synthetic construct
  misc_feature 1..80: note = Synthetic: >NC_010800-cand-720-799
  source 1..80: mol_type = other DNA
ctgtgtgtggtctcttccttttgaagggagttgacaaaataacacctggcgtcccagcaaaagttttaaaagccacttct

SEQ ID NO: 10359 - DNA, 80 bp, synthetic construct
  misc_feature 1..80: note = Synthetic: >MT114540-cand-18810-18889
  source 1..80: mol_type = other DNA
aagattttcttagtatggatactacactcttcatccaaaagtatggtctagaggattatggttttgaacacgttgtattt

SEQ ID NO: 10360 - DNA, 80 bp, synthetic construct
  misc_feature 1..80: note = Synthetic: >MN128088-cand-23140-23219
  source 1..80: mol_type = other DNA
aaatcacaatctactaggtatggattttgtggtagtggaagacatgttctttcgataccacaaaatgcacctaatggtat

SEQ ID NO: 10361 - DNA, 80 bp, synthetic construct
  misc_feature 1..80: note = Synthetic: >KY370048-cand-2900-2979
  source 1..80: mol_type = other DNA
agtactcttggtccttgtaaggagcatccacaaattggacagcatgttcaaatgcttttgaatagacttaatgatgattt

SEQ ID NO: 10362 - DNA, 80 bp, synthetic construct
  misc_feature 1..80: note = Synthetic: >KY370043-cand-2900-2979
  source 1..80: mol_type = other DNA
agtactcttggtccttgtaaggagcatccagacattggtgtgcatgttcaaatgcttttgaatagacttaatgatgattt

SEQ ID NO: 10363 - DNA, 80 bp, synthetic construct
  misc_feature 1..80: note = Synthetic: >MN987231-cand-16520-16599
  source 1..80: mol_type = other DNA
gttaataatggtaattctgatgtaggacatgaaagtgggtcggcctacaacacaacccagttagagtttgtgaaggactt

SEQ ID NO: 10364 - DNA, 80 bp, synthetic construct
  misc_feature 1..80: note = Synthetic: >MN987231-cand-14920-14999
  source 1..80: mol_type = other DNA
aaatgaggaatacaagaaggttttctttgtactcctttcttatattagaaaactctaccaagagctttctcagaatatgc

SEQ ID NO: 10365 - DNA, 80 bp, synthetic construct
  misc_feature 1..80: note = Synthetic: >MN128087-cand-15020-15099
  source 1..80: mol_type = other DNA
aaatgaggagtataagaaggttttctttgtgctcctttcctacattagaaaactctaccaagagctttctcagaatatgc

SEQ ID NO: 10366 - DNA, 80 bp, synthetic construct
  misc_feature 1..80: note = Synthetic: >LC061272-cand-1520-1599
  source 1..80: mol_type = other DNA
taagagtgcagcaggttatgcgggttttggttgtaaagattcttttactttatttgaccagactgtagtgtgttttggtg

SEQ ID NO: 10367 - DNA, 80 bp, synthetic construct
  misc_feature 1..80: note = Synthetic: >MT114544-cand-19420-19499
  source 1..80: mol_type = other DNA
tcagttgtgtcaataccttaacactactactttgtgtgtaccacacaaaatgcgagttttgcatttaggagctgctggtg

SEQ ID NO: 10368 - DNA, 80 bp, synthetic construct
  misc_feature 1..80: note = Synthetic: >MT114541-cand-26080-26159
  source 1..80: mol_type = other DNA
ggaacttcagctggtctataatattgattgtgtttataactgtgttacaatatggtagacctcaatttagctggttcgtg

SEQ ID NO: 10369 - DNA, 80 bp, synthetic construct
  misc_feature 1..80: note = Synthetic: >AJ311317-cand-1920-1999
  source 1..80: mol_type = other DNA
gaaaagtgcgcaaccttgaagaatttgtgaagacctatgtttgtaaggctcaaatgtcgattgtgattctagcagcagtg

SEQ ID NO: 10370 - DNA, 80 bp, synthetic construct
  misc_feature 1..80: note = Synthetic: >LC061273-cand-960-1039
  source 1..80: mol_type = other DNA
cagtatggctgtgattatactggtagtcttgcagttggtttagaggcttatgctgataagacactgcaggaaatgaagag

SEQ ID NO: 10371 - DNA, 80 bp, synthetic construct
  misc_feature 1..80: note = Synthetic: >SBB-788-cand-4720-4799
  source 1..80: mol_type = other DNA
ttattggcacaaagggattcaaattgttatcttaatgtggcaatttccttattacaagatattgatgtatcctttagtac

SEQ ID NO: 10372 - DNA, 80 bp, synthetic construct
  misc_feature 1..80: note = Synthetic: >SBB-130-cand-27030-27109
  source 1..80: mol_type = other DNA
gtttgctaggctatggcttcgccctctaactagcaaacctactcttatacagaatggtaagcctgtttataagctagtat

SEQ ID NO: 10373 - DNA, 80 bp, synthetic construct
  misc_feature 1..80: note = Synthetic: >SBB-053-cand-27020-27099
  source 1..80: mol_type = other DNA
ttgctaggctatggcttcgccctctaactagcaaacctactcttatacagaatggtaagcctgtttataagctagtataa

SEQ ID NO: 10374 - DNA, 80 bp, synthetic construct
  misc_feature 1..80: note = Synthetic: >SBB-010-cand-27030-27109
  source 1..80: mol_type = other DNA
tgctaggctatggcttcgccctctaactagcaaacctactcttatacagaatggtaagcctgtttataagctagtataag

SEQ ID NO: 10375 - DNA, 80 bp, synthetic construct
  misc_feature 1..80: note = Synthetic: >SBB-130-cand-10180-10259
  source 1..80: mol_type = other DNA
gatattgtttttgtacacttttctcataccagcaattgtagtaatgtcattttacaactttgcttgggattggtacataa

SEQ ID NO: 10376 - DNA, 80 bp, synthetic construct
  misc_feature 1..80: note = Synthetic: >SBB-010-cand-10190-10269
  source 1..80: mol_type = other DNA
tttttgtacacttttctcataccagcaattgtggtaatgtcattttacaactttgcttgggattggtacataaccagtat

SEQ ID NO: 10377 - DNA, 80 bp, synthetic construct
  misc_feature 1..80: note = Synthetic: >SBB-010-cand-27190-27269
  source 1..80: mol_type = other DNA
atagacgagccaacaatggaagagctgtcataggaccttgtacacatgtgttagtagttgctagtagttgcggcttcgat

SEQ ID NO: 10378 - DNA, 80 bp, synthetic construct
  misc_feature 1..80: note = Synthetic: >SBB-053-cand-27180-27259
  source 1..80: mol_type = other DNA
catagacgagccaacaatggaagagctgtcataggaccttgtacacatgtgttagtagttgctagtagttgcggcttcga

SEQ ID NO: 10379 - DNA, 80 bp, synthetic construct
  misc_feature 1..80: note = Synthetic: >SBB-130-cand-27190-27269
  source 1..80: mol_type = other DNA
cgcatagacgagccaacaatggaagagctgtcataggaccttgtacacatgtgttagtagttgctagtagttgcggcttc

SEQ ID NO: 10380 - DNA, 80 bp, synthetic construct
  misc_feature 1..80: note = Synthetic: >SBB-788-cand-8320-8399
  source 1..80: mol_type = other DNA
ccattggtcaattttggattaggtggtgctagtagtgtatgttacaccccgtaccatgctattaactatgatgttttcga

SEQ ID NO: 10381 - DNA, 80 bp, synthetic construct
  misc_feature 1..80: note = Synthetic: >SBB-797-cand-8330-8409
  source 1..80: mol_type = other DNA
attttggattaggtggtgctagtagtgtatgttacacgccgtaccacgctattaactatgatgtttttgaaaccagctca

SEQ ID NO: 10382 - DNA, 80 bp, synthetic construct
  misc_feature 1..80: note = Synthetic: >SBB-747-cand-8310-8389
  source 1..80: mol_type = other DNA
tacacttttaccattggtcaattttggattaggtggtgctagtagtgtatgttacaccccgtaccatgctattaactatg

SEQ ID NO: 10383 - DNA, 80 bp, synthetic construct
  misc_feature 1..80: note = Synthetic: >SBB-747-cand-11990-12069
  source 1..80: mol_type = other DNA
ctgttaatgctactgacataacgcgcgagaatagtgctaatttggcatggccgttagtagttacggcgcagcggcagttg

SEQ ID NO: 10384 - DNA, 80 bp, synthetic construct
  misc_feature 1..80: note = Synthetic: >SBB-797-cand-12000-12079
  source 1..80: mol_type = other DNA
tactgacataacgcgcgagaatagtgctaatttggcatggccgttagtagttacggcgcagcggcagttggccacatcac

SEQ ID NO: 10385 - DNA, 80 bp, synthetic construct
  misc_feature 1..80: note = Synthetic: >SBB-788-cand-9280-9359
  source 1..80: mol_type = other DNA
gctaagtatttggctatgtacaataagtataagtattatagtggccctatggatactagcgcttatcgtgaagctgcttg

SEQ ID NO: 10386 - DNA, 80 bp, synthetic construct
  misc_feature 1..80: note = Synthetic: >SBB-747-cand-9270-9349
  source 1..80: mol_type = other DNA
ggatgcttatgctaagtatttggttatgtacaataagtataagtattatagtggccctatggatactagcgcttatcgtg

SEQ ID NO: 10387 - DNA, 80 bp, synthetic construct
  misc_feature 1..80: note = Synthetic: >SBB-747-cand-9750-9829
  source 1..80: mol_type = other DNA
gcctgcttactcttttatacgggtgagcactggtcaggctatgagtttgcttgcttgttatgatggtgttcctactggtg

SEQ ID NO: 10388 - DNA, 80 bp, synthetic construct
  misc_feature 1..80: note = Synthetic: >SBB-797-cand-9760-9839
  source 1..80: mol_type = other DNA
tcttttatacgggtgagcactggtcaggctatgagtttgcttgcttgttatgatggtgttcctactggtgtttacacttg

SEQ ID NO: 10389 - DNA, 80 bp, synthetic construct
  misc_feature 1..80: note = Synthetic: >SBB-120-cand-18510-18589
  source 1..80: mol_type = other DNA
tagtttgcagggtttggaaaatatagcattcaatgtagttaagaaaggctcctttgtaggtgaagctggtgagttgcctg

SEQ ID NO: 10390 - DNA, 80 bp, synthetic construct
  misc_feature 1..80: note = Synthetic: >SBB-788-cand-5840-5919
  source 1..80: mol_type = other DNA
cagtacctttgtatggtttaaaatctgctatggttctggacggtactacttatgtacctgggcaaaagggtgatttgctc

SEQ ID NO: 10391 - DNA, 80 bp, synthetic construct
  misc_feature 1..80: note = Synthetic: >SBB-726-cand-5850-5929
  source 1..80: mol_type = other DNA
gtatggtttaaaatctgctatggttctggacggtactacttatgtacctgggcaaaagggtgatttgctctgtttaaagg

SEQ ID NO: 10392 - DNA, 80 bp, synthetic construct
  misc_feature 1..80: note = Synthetic: >SBB-747-cand-5830-5909
  source 1..80: mol_type = other DNA
gtaaaacctacagtacctttgtatggtttaaaatctgctatggttctggacggtactacttatgtacctgggcaaaaggg

SEQ ID NO: 10393 - DNA, 80 bp, synthetic construct
  misc_feature 1..80: note = Synthetic: >SBB-041-cand-10350-10429
  source 1..80: mol_type = other DNA
ttgttacattgttgcacacttataggttttttaagagtaactcatctgttgctacctatgcattgtccctagcttttatg

SEQ ID NO: 10394 - DNA, 80 bp, synthetic construct
  misc_feature 1..80: note = Synthetic: >SBB-130-cand-10340-10419
  source 1..80: mol_type = other DNA
tgtttgtttgttacattgttgcacacttataggttttttaagagtaactcatctgttgctacctatgcattgtccctagc

SEQ ID NO: 10395 - DNA, 80 bp, synthetic construct
  misc_feature 1..80: note = Synthetic: >SBB-747-cand-5190-5269
  source 1..80: mol_type = other DNA
gactgccattgtttttaggggtccagttacggcaggtcattatatgtatgctgtaaatggcactcttatatctgtgtatg

SEQ ID NO: 10396 - DNA, 80 bp, synthetic construct
  misc_feature 1..80: note = Synthetic: >SBB-726-cand-5200-5279
  source 1..80: mol_type = other DNA
gtttttaggggtccagttacggcaggtcattatatgtatgctgtaaatggcactcttatatctgtgtatgatgctaacac

SEQ ID NO: 10397 - DNA, 80 bp, synthetic construct
  misc_feature 1..80: note = Synthetic: >SBB-797-cand-5200-5279
  source 1..80: mol_type = other DNA
gtttttagaggtccagttacggcaggtcattatatgtatgctgtaaatggcactcttatatctgtgtatgatgcgaacac

SEQ ID NO: 10398 - DNA, 80 bp, synthetic construct
  misc_feature 1..80: note = Synthetic: >SBB-788-cand-5200-5279
  source 1..80: mol_type = other DNA
gtctttaggggtccagttacggcaggtcattatatgtatgctgtaaatggcactcttatatctgtgtatgatgcgaatac

SEQ ID NO: 10399 - DNA, 80 bp, synthetic construct
  misc_feature 1..80: note = Synthetic: >SBB-747-cand-6550-6629
  source 1..80: mol_type = other DNA
catcatttgtgtatgtctggtatggatggttttaactatcctgctttgcgtatgcaacaacaacgatatggtagtcctta

SEQ ID NO: 10400 - DNA, 80 bp, synthetic construct
  misc_feature 1..80: note = Synthetic: >SBB-041-cand-8590-8669
  source 1..80: mol_type = other DNA
caatatttcttatattgttacacagaatgccgttatgatggttgcttatgccgtgctctatttcctatgcactcgtactt

SEQ ID NO: 10401 - DNA, 80 bp, synthetic construct
  misc_feature 1..80: note = Synthetic: >SBB-130-cand-8580-8659
  source 1..80: mol_type = other DNA
ttgtgaacaatatttcttatattgttacacagaatgccgttatgatggttgcttatgctgtgctctatttcctatgcaca

SEQ ID NO: 10402 - DNA, 80 bp, synthetic construct
  misc_feature 1..80: note = Synthetic: >PRD-0038-cand-16950-17029
  source 1..80: mol_type = other DNA
aagtcattttgccataggattagcactttattacccttcagcacgtattgtgtacacagcttgctcccatgcagccgttg

SEQ ID NO: 10403 - DNA, 80 bp, synthetic construct
  misc_feature 1..80: note = Synthetic: >PDF-2386-cand-16960-17039
  source 1..80: mol_type = other DNA
gccataggattagcactttattacccttcagcacgtattgtgtacacagcttgctcccatgcagccgttgatgcactatg

SEQ ID NO: 10404 - DNA, 80 bp, synthetic construct
  misc_feature 1..80: note = Synthetic: >SBB-053-cand-3080-3159
  source 1..80: mol_type = other DNA
agctttaagtataatggtgattcatgggacgatttttgtgagcagattcattctgttatgaacgttgtcggtgaacactt

SEQ ID NO: 10405 - DNA, 80 bp, synthetic construct
  misc_feature 1..80: note = Synthetic: >SBB-010-cand-3070-3149
  source 1..80: mol_type = other DNA
cattggtaagagctttaagtataatggtgattcatgggacgatttttgtgagcagattcattctgttatgaacgtcgtcg

SEQ ID NO: 10406 - DNA, 80 bp, synthetic construct
  misc_feature 1..80: note = Synthetic: >SBB-120-cand-7610-7689
  source 1..80: mol_type = other DNA
aataataaaatgcaaacatcaattcctgttgttagcatagcttacaaacaaggttctggtttgaagagatgttacaactt

SEQ ID NO: 10407 - DNA, 80 bp, synthetic construct
  misc_feature 1..80: note = Synthetic: >SBB-797-cand-14320-14399
  source 1..80: mol_type = other DNA
aagttgttgtagcaaattatgataagtcagcaggctttccatttaataaatttggtaaggctcgcttatattatgaatct

SEQ ID NO: 10408 - DNA, 80 bp, synthetic construct
  misc_feature 1..80: note = Synthetic: >SBB-747-cand-14310-14389
  source 1..80: mol_type = other DNA
caggcaagtcaagttgttgtagcaaattatgataagtcagcaggctttccatttaataaatttggtaaggctcgcttata

SEQ ID NO: 10409 - DNA, 80 bp, synthetic construct
  misc_feature 1..80: note = Synthetic: >SBB-130-cand-8420-8499
  source 1..80: mol_type = other DNA
atgttttcaatgcccttcactataatggcaatgtcaggtcaagtcatgctgaactgtttcgtagcttttcttgctattgt

SEQ ID NO: 10410 - DNA, 80 bp, synthetic construct
  misc_feature 1..80: note = Synthetic: >SBB-041-cand-8430-8509
  source 1..80: mol_type = other DNA
caatgcccttcactataatggcaatgtcaggtcaggtcatgctgaactgtttcgtagcttttcttgctattgtgacatgc

SEQ ID NO: 10411 - DNA, 80 bp, synthetic construct
  misc_feature 1..80: note = Synthetic: >PRD-0038-cand-18310-18389
  source 1..80: mol_type = other DNA
ccacctggtgaccaatttaaacatcttataccactaatgtacaaaggtttaccttggaacatagtgcgtgttaagattgt

SEQ ID NO: 10412 - DNA, 80 bp, synthetic construct
  misc_feature 1..80: note = Synthetic: >PDF-2386-cand-18320-18399
  source 1..80: mol_type = other DNA
accaatttaaacatcttataccactaatgtacaaaggtttaccttggaacatagtgcgtgttaagattgtgcagatgctc

SEQ ID NO: 10413 - DNA, 80 bp, synthetic construct
  misc_feature 1..80: note = Synthetic: >SBB-010-cand-11160-11239
  source 1..80: mol_type = other DNA
acaatgacacttctcctcaacttgtcaagcagcttaaacgtgctatgaatatagccaaagcagagtttgaccatgaggct

SEQ ID NO: 10414 - DNA, 80 bp, synthetic construct
  misc_feature 1..80: note = Synthetic: >SBB-041-cand-11150-11229
  source 1..80: mol_type = other DNA
gatgcaattaacaatgacacttctcctcaacttgtcaagcagcttaaacgtgctatgaatatagccaaagcagagtttga

SEQ ID NO: 10415 - DNA, 80 bp, synthetic construct
  misc_feature 1..80: note = Synthetic: >SBB-130-cand-7380-7459
  source 1..80: mol_type = other DNA
acaatttcgttacgtcatatgctaaaccagaagagaaattgtctacacatgatgttgctgcttgcatgcgcggtggtgca

SEQ ID NO: 10416 - DNA, 80 bp, synthetic construct
  misc_feature 1..80: note = Synthetic: >SBB-041-cand-7390-7469
  source 1..80: mol_type = other DNA
tgttacgtcatatgctaaaccagaagagaaattgtccacacatgatgttgctgcttgcatgcgcggtggtgcaaaagttg

SEQ ID NO: 10417 - DNA, 80 bp, synthetic construct
  misc_feature 1..80: note = Synthetic: >SBB-726-cand-18740-18819
  source 1..80: mol_type = other DNA
taagaatgcttttgttaatcttaaaccactcccatttttctattactccgacacagcatgtgaaaatgccactggtgtgt

SEQ ID NO: 10418 - DNA, 80 bp, synthetic construct
  misc_feature 1..80: note = Synthetic: >SBB-747-cand-18730-18809
  source 1..80: mol_type = other DNA
atgcatttaataagaatgcttttgttaatctcaaaccactcccatttttctactactccgacacagcatgtgagaatgcc

SEQ ID NO: 10419 - DNA, 80 bp, synthetic construct
  misc_feature 1..80: note = Synthetic: >PRD-0038-cand-20390-20469
  source 1..80: mol_type = other DNA
agtcacaggatttgtcagtagtttctaaagtagtcaatgtcacaattgactatgcagaagtctcatttatgctttggtgt

SEQ ID NO: 10420 - DNA, 80 bp, synthetic construct
  misc_feature 1..80: note = Synthetic: >SBB-053-cand-24230-24309
  source 1..80: mol_type = other DNA
ggcaaattctggtatggcgatgatctaccctacactatcttgagtggtggtgaccgtcatgtttgtttcggtcatcatgt

SEQ ID NO: 10421 - DNA, 80 bp, synthetic construct
  misc_feature 1..80: note = Synthetic: >SBB-010-cand-24240-24319
  source 1..80: mol_type = other DNA
tcaatggcaagtcttggtatggtgatgacctaccctacacaatcttgagtggtggtgaccgtcatgtttgtttcggtcat

SEQ ID NO: 10422 - DNA, 80 bp, synthetic construct
  misc_feature 1..80: note = Synthetic: >SBB-041-cand-11790-11869
  source 1..80: mol_type = other DNA
tagcagacaagccagatctcaagtatgttaaatgggaatttgatggtggttgtaacactatagagttagagcctccatgt

SEQ ID NO: 10423 - DNA, 80 bp, synthetic construct
  misc_feature 1..80: note = Synthetic: >SBB-010-cand-11800-11879
  source 1..80: mol_type = other DNA
gccagatctcaagtatgttaaatgggaatttgatggtggttgtaacactatagagttagagcctccatgtaagtttgctg

SEQ ID NO: 10424 - DNA, 80 bp, synthetic construct
  misc_feature 1..80: note = Synthetic: >SBB-120-cand-27170-27249
  source 1..80: mol_type = other DNA
ccacctagagtcagagtaatcaaagatccgcatagacgagccaacaatggaagagctgtcataggaccttgtacacatgt

SEQ ID NO: 10425 - DNA, 80 bp, synthetic construct
  misc_feature 1..80: note = Synthetic: >SBB-122-cand-27140-27219
  source 1..80: mol_type = other DNA
tacaagaccacctagagtcagagtaatcaaagatccgcatagacgagccaacaatggaagagctgtcataggaccttgta

SEQ ID NO: 10426 - DNA, 80 bp, synthetic construct
  misc_feature 1..80: note = Synthetic: >SBB-024-cand-27150-27229
  source 1..80: mol_type = other DNA
catgatacaagaccacctagagtcagagtaatcaaagatccgcatagacgagccaacaatggaagagctgtcataggacc

SEQ ID NO: 10427 - DNA, 80 bp, synthetic construct
  misc_feature 1..80: note = Synthetic: >PRD-0038-cand-17430-17509
  source 1..80: mol_type = other DNA
tgttgacactgtcagtgcgctggtctatgataacaaattaaaggccaataaagaaaagtctggacagtgttttaaaatgt

SEQ ID NO: 10428 - DNA, 80 bp, synthetic construct
  misc_feature 1..80: note = Synthetic: >PDF-2386-cand-17440-17519
  source 1..80: mol_type = other DNA
gtcagtgcgctggtctatgataacaaattaaaggccaataaagaaaagtctggacagtgttttaaaatgttctataaggg

SEQ ID NO: 10429 - DNA, 80 bp, synthetic construct
  misc_feature 1..80: note = Synthetic: >SBB-130-cand-26710-26789
  source 1..80: mol_type = other DNA
accaatactgcatttttgtgctgagtgtgttagagcatttttcagggtatttgctgattgtatttctgtacctaattata

SEQ ID NO: 10430 - DNA, 80 bp, synthetic construct
  misc_feature 1..80: note = Synthetic: >SBB-053-cand-26700-26779
  source 1..80: mol_type = other DNA
caatactgcatttttgtgctgagtgtgttagagcatttttcagggtatttgctgattgtatttctgtacctaattatagt

SEQ ID NO: 10431 - DNA, 80 bp, synthetic construct
  misc_feature 1..80: note = Synthetic: >SBB-130-cand-14630-14709
  source 1..80: mol_type = other DNA
acttttccatgatgattctttcagatgacggtgttgtttgctacaacaaagattatgctgatttgggttatgttgctgat

SEQ ID NO: 10432 - DNA, 80 bp, synthetic construct
  misc_feature 1..80: note = Synthetic: >SBB-120-cand-14640-14719
  source 1..80: mol_type = other DNA
catgatgattctttcagatgacggtgttgtttgttacaacaaggattatgctgatttgggttatgttgctgatataggtg

SEQ ID NO: 10433 - DNA, 80 bp, synthetic construct
  misc_feature 1..80: note = Synthetic: >SBB-122-cand-11350-11429
  source 1..80: mol_type = other DNA
actttttggcatgttgcgtaaacttgatatgtctagtgtagacactatcctcaatttagctagggatggtgttgtacctc

SEQ ID NO: 10434 - DNA, 80 bp, synthetic construct
  misc_feature 1..80: note = Synthetic: >SBB-120-cand-11360-11439
  source 1..80: mol_type = other DNA
atgttgcgtaaacttgatatgtctagtgtggacactatcctcaatttagctagggatggtgttgtacctctttcaattat

SEQ ID NO: 10435 - DNA, 80 bp, synthetic construct
  misc_feature 1..80: note = Synthetic: >SBB-797-cand-20250-20329
  source 1..80: mol_type = other DNA
cacttcggtgctggtagtgataagggtgtatgtcctggaacatcagtgctgaaacagtggttgccaactgacgcttttct

SEQ ID NO: 10436 - DNA, 80 bp, synthetic construct
  misc_feature 1..80: note = Synthetic: >SBB-010-cand-3150-3229
  source 1..80: mol_type = other DNA
gtgaacacttagacttacctaactactacatctatgacgaagagggtggtagtgacttgtgtaaaactgttatgatttct

SEQ ID NO: 10437 - DNA, 80 bp, synthetic construct
  misc_feature 1..80: note = Synthetic: >SBB-053-cand-3160-3239
  source 1..80: mol_type = other DNA
agacttacctaactactacatctatgacgaagagggtggtagtgacttgtgtaaaactgttatgatttctcaatgggaca

SEQ ID NO: 10438 - DNA, 80 bp, synthetic construct
  misc_feature 1..80: note = Synthetic: >SBB-053-cand-12910-12989
  source 1..80: mol_type = other DNA
ggtaaaacaattgctaacgctatgcttaagtgcgtacgtctgtgtgatgccatggttgaacatggcattgtaggtgttct

SEQ ID NO: 10439 - DNA, 80 bp, synthetic construct
  misc_feature 1..80: note = Synthetic: >SBB-010-cand-12920-12999
  source 1..80: mol_type = other DNA
ttgctaacgctatgcttaagtgtgtacgtctgtgtgatgccatggttgaacatggcattgtaggtgttcttacattggat

SEQ ID NO: 10440 - DNA, 80 bp, synthetic construct
  misc_feature 1..80: note = Synthetic: >SBB-120-cand-6090-6169
  source 1..80: mol_type = other DNA
cgcctgagcgtactggtattatacttagtcgtagtgtcaagtataatttcaaagcatgcaaacaactgcttttgtctaag

SEQ ID NO: 10441 - DNA, 80 bp, synthetic construct
  misc_feature 1..80: note = Synthetic: >SBB-041-cand-14990-15069
  source 1..80: mol_type = other DNA
agcattcgaatcctgagtacagaaaggttttctatgctttgcttgattgggtcaaacatcttcacaacacacttaaccag

SEQ ID NO: 10442 - DNA, 80 bp, synthetic construct
  misc_feature 1..80: note = Synthetic: >SBB-010-cand-14980-15059
  source 1..80: mol_type = other DNA
ccattgtctaagcattcgaatcctgagtacagaaaggttttctatgctttgcttgactgggtcaaacatcttcacaacac

SEQ ID NO: 10443 - DNA, 80 bp, synthetic construct
  misc_feature 1..80: note = Synthetic: >SBB-747-cand-14710-14789
  source 1..80: mol_type = other DNA
gtgatagagccatgcccaatcttttgcgcatttttgctagccttatattagcccgtaagcatgcaacttgttgcaatgct

SEQ ID NO: 10444 - DNA, 80 bp, synthetic construct
  misc_feature 1..80: note = Synthetic: >SBB-797-cand-14720-14799
  source 1..80: mol_type = other DNA
catgcccaatcttttgcgcatttttgctagccttatattagcccgtaagcatgcaacttgttgcaatgcttcggaacgat

SEQ ID NO: 10445 - DNA, 80 bp, synthetic construct
  misc_feature 1..80: note = Synthetic: >SBB-747-cand-4070-4149
  source 1..80: mol_type = other DNA
cagccgttagtatgcggtcacttaccgttgaacatactgtagttgtaccatcagattcaagtgtgcctttatatagggct

SEQ ID NO: 10446 - DNA, 80 bp, synthetic construct
  misc_feature 1..80: note = Synthetic: >SBB-726-cand-4080-4159
  source 1..80: mol_type = other DNA
tatgcggtcacttaccgtcgaacatactgtagttgtaccatcagattcaagtgtgcctttatataaggcttattttaatg

SEQ ID NO: 10447 - DNA, 80 bp, synthetic construct
  misc_feature 1..80: note = Synthetic: >PDF-2370-cand-2560-2639
  source 1..80: mol_type = other DNA
agctcttagtgacatagtcactggtgcagttgaaggagctccggtgtgcattaatggtttaatgctgctggagttaaaag

SEQ ID NO: 10448 - DNA, 80 bp, synthetic construct
  misc_feature 1..80: note = Synthetic: >SBB-122-cand-8790-8869
  source 1..80: mol_type = other DNA
agcttaaagttactactcagttgtttgatggtgataagttcgttggtaattttgagagtgctgcatcgggtacttttgtg

SEQ ID NO: 10449 - DNA, 80 bp, synthetic construct
  misc_feature 1..80: note = Synthetic: >SBB-120-cand-8780-8859
  source 1..80: mol_type = other DNA
agtttgcttaagcttaaagttactactcagttgtttgatggcgataagttcgttggtaattttgagagtgctgcgtcagg

SEQ ID NO: 10450 - DNA, 80 bp, synthetic construct
  misc_feature 1..80: note = Synthetic: >SBB-120-cand-2750-2829
  source 1..80: mol_type = other DNA
aacgtagttgatggtggttctatccctgtcaagcctactagagttgagcgtgttagcgttagtcttgaagaggccgattt

SEQ ID NO: 10451 - DNA, 80 bp, synthetic construct
  misc_feature 1..80: note = Synthetic: >SBB-122-cand-2760-2839
  source 1..80: mol_type = other DNA
atggtggttctatccctgtcaagcctactagagttgagcgtgttagcgttagtcttgaagaggccgactttgttaatcct

SEQ ID NO: 10452 - DNA, 80 bp, synthetic construct
  misc_feature 1..80: note = Synthetic: >GCS-211-cand-2890-2969
  source 1..80: mol_type = other DNA
aaatctggcaccaattattacttgtatggtacaagtggtatattaccttatacttttaaacgtggtggtggtgttacatt

SEQ ID NO: 10453 - DNA, 80 bp, synthetic construct
  misc_feature 1..80: note = Synthetic: >GCS-227-cand-2890-2969
  source 1..80: mol_type = other DNA
atctggcaccaattattacttgtatggtacaagtggtgtattaccttgtacttttaaacgtggtggtggtgttacatttg

SEQ ID NO: 10454 - DNA, 80 bp, synthetic construct
  misc_feature 1..80: note = Synthetic: >GCS-227-cand-12310-12389
  source 1..80: mol_type = other DNA
aaatggcccacaggttaagtacctttactttgttaagaaccttaacacgttacgtagaggtgctgtcttgggttacatcg

SEQ ID NO: 10455 - DNA, 80 bp, synthetic construct
  misc_feature 1..80: note = Synthetic: >GCS-211-cand-12320-12399
  source 1..80: mol_type = other DNA
cacaggttaagtacctttattttgttaagaaccttaacacgttacgtagaggtgctgtcttgggttacatcggtgctacc

SEQ ID NO: 10456 - DNA, 80 bp, synthetic construct
  misc_feature 1..80: note = Synthetic: >SBB-010-cand-13080-13159
  source 1..80: mol_type = other DNA
atcttattactcatacatgatgcctgctatgggtatgaccaattgcatggctagtgagtgctttatgaagagtgacattt

SEQ ID NO: 10457 - DNA, 80 bp, synthetic construct
  misc_feature 1..80: note = Synthetic: >SBB-024-cand-13090-13169
  source 1..80: mol_type = other DNA
tcatatatgatgcctgctatgggtatgaccaattgcatggctagtgagtgctttatgaagagtgacatttttggtgatga

SEQ ID NO: 10458 - DNA, 80 bp, synthetic construct
  misc_feature 1..80: note = Synthetic: >GCS-227-cand-25250-25329
  source 1..80: mol_type = other DNA
acctgtagatacaaaaattttcaattcatgttgaaaaattcaaacacactgtgctttgcatttggcaaagcatgtaattt

SEQ ID NO: 10459 - DNA, 80 bp, synthetic construct
  misc_feature 1..80: note = Synthetic: >GCS-211-cand-25260-25339
  source 1..80: mol_type = other DNA
atacaaaaattttcaattcatgttgaaaaattcaaacacactgtgctttgcatttggcaaagcatgtaattttaacagga

SEQ ID NO: 10460 - DNA, 80 bp, synthetic construct
  misc_feature 1..80: note = Synthetic: >GCS-227-cand-11110-11189
  source 1..80: mol_type = other DNA
taaagttagcgctgctgaatttaaatatatgatcgctaatgatttgaaggctccaaccacaccatgggattctctaattt

SEQ ID NO: 10461 - DNA, 80 bp, synthetic construct
  misc_feature 1..80: note = Synthetic: >GCS-211-cand-11120-11199
  source 1..80: mol_type = other DNA
gcgctgctgaatttaaatatatgatcgctaatgatttgaaggctccaaccacaccatgggattctctaattttgtctatt

SEQ ID NO: 10462 - DNA, 80 bp, synthetic construct
  misc_feature 1..80: note = Synthetic: >SBB-788-cand-24160-24239
  source 1..80: mol_type = other DNA
aacactggctatgcaccacgtgatggtttgtttgttttgcccaatggttctatatactggcagtttactaaaatgaattt

SEQ ID NO: 10463 - DNA, 80 bp, synthetic construct
  misc_feature 1..80: note = Synthetic: >GCS-227-cand-22050-22129
  source 1..80: mol_type = other DNA
tttactaagtggggttctgtctatatcaatggttacaactactttcagttgccacctattaataatatcacattcaattt

SEQ ID NO: 10464 - DNA, 80 bp, synthetic construct
  misc_feature 1..80: note = Synthetic: >GCS-211-cand-22060-22139
  source 1..80: mol_type = other DNA
gtggggttctgtctatatcaatggttacaactactttcagttgccacctattaataatatcacattcaatttgtatagta

SEQ ID NO: 10465 - DNA, 80 bp, synthetic construct
  misc_feature 1..80: note = Synthetic: >SBB-788-cand-16960-17039
  source 1..80: mol_type = other DNA
cttgctacaggtgtcctaaggaaatagttgaaacagttagcgctttagtttatgataagaaactaaaagctaataaggtt

SEQ ID NO: 10466 - DNA, 80 bp, synthetic construct
  misc_feature 1..80: note = Synthetic: >SBB-747-cand-16950-17029
  source 1..80: mol_type = other DNA
ttcctggccacttgctacaggtgtcctaaggaaatagttgaaacagttagcgctttagtttatgataagaaactaaaagc

SEQ ID NO: 10467 - DNA, 80 bp, synthetic construct
  misc_feature 1..80: note = Synthetic: >GCS-211-cand-9200-9279
  source 1..80: mol_type = other DNA
aacttaaggtgaccacacaactgtttgatggcaattgttttgttggtacattcgagagtgctgcaagcggtactttcgtt

SEQ ID NO: 10468 - DNA, 80 bp, synthetic construct
  misc_feature 1..80: note = Synthetic: >GCS-227-cand-9200-9279
  source 1..80: mol_type = other DNA
cttaaggtgaccacacaactgtttgatggcaattgttttgttggtacattcgagagtgctgcaagcggtactttcgttat

SEQ ID NO: 10469 - DNA, 80 bp, synthetic construct
  misc_feature 1..80: note = Synthetic: >SBB-024-cand-20960-21039
  source 1..80: mol_type = other DNA
caatgattttgttcgtgtagtctttccgcctactgtgttagagctgcaattacagggcttgttgtgggaagttgttcgtt

SEQ ID NO: 10470 - DNA, 80 bp, synthetic construct
  misc_feature 1..80: note = Synthetic: >SBB-010-cand-25600-25679
  source 1..80: mol_type = other DNA
aacgctgtacccactggaactggtaacaaggaccaacaaattggctactggaatgaacaaccgcgctggcgcatgatccg

SEQ ID NO: 10471 - DNA, 80 bp, synthetic construct
  misc_feature 1..80: note = Synthetic: >SBB-130-cand-25590-25669
  source 1..80: mol_type = other DNA
catgcctggtaacgctgtacccactggaactggtaacaaggaccaacaaattggctactggaatgagcaacaacgctggc

SEQ ID NO: 10472 - DNA, 80 bp, synthetic construct
  misc_feature 1..80: note = Synthetic: >SBB-120-cand-25410-25489
  source 1..80: mol_type = other DNA
aacggcgactattctgctgtcacgagtcatgtagatacgatgacagacgatgagaaagtgcttcatttagtataaactaa

SEQ ID NO: 10473 - DNA, 80 bp, synthetic construct
  misc_feature 1..80: note = Synthetic: >SBB-122-cand-25390-25469
  source 1..80: mol_type = other DNA
ggcgactactctgctgttacgagtcatgtagacacgttgacagacgatgagaaagtgcttcatttagtataaactaaaca

SEQ ID NO: 10474 - DNA, 80 bp, synthetic construct
  misc_feature 1..80: note = Synthetic: >GCS-211-cand-650-729
  source 1..80: mol_type = other DNA
tttgtggtgttgatggtagacctgttcttgctgaatcagagtggtcttttcaagattactttggcgacgattctaccgtt

SEQ ID NO: 10475 - DNA, 80 bp, synthetic construct
  misc_feature 1..80: note = Synthetic: >GCS-227-cand-650-729
  source 1..80: mol_type = other DNA
tgtggtgttgatggtagacctgttcttgctgaatcagagtggtcttttcaagattactttggcgacgagtctaccgttac

SEQ ID NO: 10476 - DNA, 80 bp, synthetic construct
  misc_feature 1..80: note = Synthetic: >GCS-211-cand-14230-14309
  source 1..80: mol_type = other DNA
aacggtattttgagtgttatgacggtggttgtattactgctaaagaagttgtcgttaccaaccttaataagagtgccggt

SEQ ID NO: 10477 - DNA, 80 bp, synthetic construct
  misc_feature 1..80: note = Synthetic: >GCS-227-cand-14230-14309
  source 1..80: mol_type = other DNA
cggtattttgagtgttatgacggtggttgtattactgctaaagaagttgtcgttaccaaccttaataagagtgccggttg

SEQ ID NO: 10478 - DNA, 80 bp, synthetic construct
  misc_feature 1..80: note = Synthetic: >GCS-211-cand-6570-6649
  source 1..80: mol_type = other DNA
gacttggtacgtgacatttttgttaaaagtgttactactgctttacacagcatacctattaggttttatgtttatacgtt

SEQ ID NO: 10479 - DNA, 80 bp, synthetic construct
  misc_feature 1..80: note = Synthetic: >GCS-227-cand-6570-6649
  source 1..80: mol_type = other DNA
cttggtacgtgacatttttgttaaaagtgttactactgctttacacagcatacttattaggttttatgtttatacgttat

SEQ ID NO: 10480 - DNA, 80 bp, synthetic construct
  misc_feature 1..80: note = Synthetic: >SBB-120-cand-1380-1459
  source 1..80: mol_type = other DNA
tttcggatgatgtaaaagcagctgttgttgatggtgacattgttgtcagtagcgaaattttgaatgttactgacctagtc

SEQ ID NO: 10481 - DNA, 80 bp, synthetic construct
  misc_feature 1..80: note = Synthetic: >SBB-010-cand-1390-1469
  source 1..80: mol_type = other DNA
tgtaaaagcagctgttgttgatggtgacattgttgttagcagtgaaatcttgaatgttactgaccttatcttgaacaagc

SEQ ID NO: 10482 - DNA, 80 bp, synthetic construct
  misc_feature 1..80: note = Synthetic: >SBB-120-cand-17790-17869
  source 1..80: mol_type = other DNA
gactcgatgtcttgctatacatgactgttttgtgaaaaatgtcgactggtctatcacttacccatttatttctaatgaac

SEQ ID NO: 10483 - DNA, 80 bp, synthetic construct
  misc_feature 1..80: note = Synthetic: >GCS-211-cand-19110-19189
  source 1..80: mol_type = other DNA
gagctttatgccaagcgaaaaactggcttgacaccgcctctcacactactacgcaaccttggtgttgctgccacttacaa

SEQ ID NO: 10484 - DNA, 80 bp, synthetic construct
  misc_feature 1..80: note = Synthetic: >GCS-227-cand-19100-19179
  source 1..80: mol_type = other DNA
tcgcttttgagctttatgccaagcgaaaaactggcttgacaccgcctcttacactactacgcaaccttggtgttgctgcc

SEQ ID NO: 10485 - DNA, 80 bp, synthetic construct
  misc_feature 1..80: note = Synthetic: >SBB-122-cand-12720-12799
  source 1..80: mol_type = other DNA
tcgtcaaaatttgactaagtacaccatgatggatctggtttacgcgctcagaaattttgacgagaagaattgcgagactc

SEQ ID NO: 10486 - DNA, 80 bp, synthetic construct
  misc_feature 1..80: note = Synthetic: >GCS-211-cand-8480-8559
  source 1..80: mol_type = other DNA
gatgcatttttaattcagcttgtactaccttgacaggtcttggtggcacacgtgtgttctgtgccaacaatgacttagta

SEQ ID NO: 10487 - DNA, 80 bp, synthetic construct
  misc_feature 1..80: note = Synthetic: >GCS-227-cand-8480-8559
  source 1..80: mol_type = other DNA
tgcatttttaattcagcttgtactaccttgacaggtcttggtggcacacgtgtgttctgtgccaacaatgacttagtaca

SEQ ID NO: 10488 - DNA, 80 bp, synthetic construct
  misc_feature 1..80: note = Synthetic: >SBB-122-cand-5180-5259
  source 1..80: mol_type = other DNA
gatgctgattggaattcctattatggatttcaacgtgcagacttatggcatacacttagtcatgaagcctatgcatatga

SEQ ID NO: 10489 - DNA, 80 bp, synthetic construct
  misc_feature 1..80: note = Synthetic: >SBB-010-cand-5180-5259
  source 1..80: mol_type = other DNA
gatgttgattggaattcctactacgggtttcaacgtgcaaacttgtggcatacacttagtcatgaagcctatgcatatga

SEQ ID NO: 10490 - DNA, 80 bp, synthetic construct
  misc_feature 1..80: note = Synthetic: >SBB-120-cand-15520-15599
  source 1..80: mol_type = other DNA
gatgttactcactacagacttgctaatgaagctaaggattctttgcggctgtttgctgctgaaactgtcaaagctaagga

SEQ ID NO: 10491 - DNA, 80 bp, synthetic construct
  misc_feature 1..80: note = Synthetic: >GCS-227-cand-1690-1769
  source 1..80: mol_type = other DNA
gtttaatgcacttaaagacaaaatctgcatttttggcctgacctgtgttagagctggtgattaccttatttttggcaatc

SEQ ID NO: 10492 - DNA, 80 bp, synthetic construct
  misc_feature 1..80: note = Synthetic: >GCS-211-cand-1690-1769
  source 1..80: mol_type = other DNA
gtgtttaatgcacttaaagacaaaatctgcatttttggcctgacctgtgttagagctggtgactaccttatttttggcaa

SEQ ID NO: 10493 - DNA, 80 bp, synthetic construct
  misc_feature 1..80: note = Synthetic: >229E-cand-12800-12879
  source 1..80: mol_type = other DNA
catgattttttcacttggcatgaaggcagaaccatctatggtaacgttagtagacaggatcttactaaatacaccatgat

SEQ ID NO: 10494 - DNA, 80 bp, synthetic construct
  misc_feature 1..80: note = Synthetic: >229E-cand-12880-12959
  source 1..80: mol_type = other DNA
ggacttgtgctttgctctgcgtaactttgatgaaaaagactgtgaagttcttaaggagatactggttcttactggttgtt

SEQ ID NO: 10495 - DNA, 80 bp, synthetic construct
  misc_feature 1..80: note = Synthetic: >229E-cand-12960-13039
  source 1..80: mol_type = other DNA
gtggtactgattacttcgaaatgaagaattggtttgacccagtagaaaatgaggacatacaccgtgtgtatgctgctttg

SEQ ID NO: 10496 - DNA, 80 bp, synthetic construct
  misc_feature 1..80: note = Synthetic: >229E-cand-13040-13119
  source 1..80: mol_type = other DNA
ggtacagtagtcgcaaatgcaatgcttaagtgtgttgctctttgcgacgaaatggtgcttagaggagttgttggtgtttt

SEQ ID NO: 10497 - DNA, 80 bp, synthetic construct
  misc_feature 1..80: note = Synthetic: >229E-cand-13120-13199
  source 1..80: mol_type = other DNA
gaccttagacaaccaagatcttaatgggaatttctacgattttggggactttgttttgtgtcctcctggtatgggaatac

SEQ ID NO: 10498 - DNA, 80 bp, synthetic construct
  misc_feature 1..80: note = Synthetic: >229E-cand-13200-13279
  source 1..80: mol_type = other DNA
cctattgcacatcatattattcttatatgatgcctgttatgggtatgaccaattgtctagctagtgagtgttttatgaaa

SEQ ID NO: 10499 - DNA, 80 bp, synthetic construct
  misc_feature 1..80: note = Synthetic: >229E-cand-13280-13359
  source 1..80: mol_type = other DNA
agtgacatttttggtcaagacttcaaaacttatgatttgttgaaatatgatttcacagagcataaggaggttttgttcaa

SEQ ID NO: 10500 - DNA, 80 bp, synthetic construct
  misc_feature 1..80: note = Synthetic: >229E-cand-13360-13439
  source 1..80: mol_type = other DNA
caagtattttaagtattggggacagggttaccatcctgattgtgtagattgttatgatgagatgtgtattttgcattgtt

SEQ ID NO: 10501 - DNA, 80 bp, synthetic construct
  misc_feature 1..80: note = Synthetic: >229E-cand-13440-13519
  source 1..80: mol_type = other DNA
caaattttaacacactcttcgcaaccacaattccaaatacagcttttggacccctatgcagaaaagtgtttattgatggt

SEQ ID NO: 10502 - DNA, 80 bp, synthetic construct
  misc_feature 1..80: note = Synthetic: >229E-cand-13520-13599
  source 1..80: mol_type = other DNA
gtacctgttgttgctactgctggttaccattttaaacaactaggacttgtgtggaataaagatgttaacactcactctac

SEQ ID NO: 10503 - DNA, 80 bp, synthetic construct
  misc_feature 1..80: note = Synthetic: >229E-cand-13600-13679
  source 1..80: mol_type = other DNA
tagacttactattactgaacttttacagttcgtgacagatcctgcgcttatagttgcgtcatcgccagctttagtggata

SEQ ID NO: 10504 - DNA, 80 bp, synthetic construct
  misc_feature 1..80: note = Synthetic: >229E-cand-13680-13759
  source 1..80: mol_type = other DNA
aacgcactgtatgcttttctgtcgcagctctgagtacagggttgacatctcaaacagtaaaacctggccattttaataag

SEQ ID NO: 10505 - DNA, 80 bp, synthetic construct
  misc_feature 1..80: note = Synthetic: >229E-cand-13760-13839
  source 1..80: mol_type = other DNA
gagttttatgacttcttacgctctcaagggtttttcgatgaaggttcagaattgacattgaagcacttcttttttacaca

SEQ ID NO: 10506 - DNA, 80 bp, synthetic construct
  misc_feature 1..80: note = Synthetic: >229E-cand-13840-13919
  source 1..80: mol_type = other DNA
aaagggtgatgctgcaattaaagattttgactattatcggtataacagacccaccatgctagatattggacaagcacgtg

SEQ ID NO: 10507 - DNA, 80 bp, synthetic construct
  misc_feature 1..80: note = Synthetic: >229E-cand-13920-13999
  source 1..80: mol_type = other DNA
tggcatatcaagtagcatctcgttactttgactgctatgaaggtggttgtattacatctagagaggtggttgttactaac

SEQ ID NO: 10508 - DNA, 80 bp, synthetic construct
  misc_feature 1..80: note = Synthetic: >229E-cand-14000-14079
  source 1..80: mol_type = other DNA
cttaataagagtgctggttggccacttaataagtttggtaaagctggtttatattatgagtctattagttatgaagaaca

SEQ ID NO: 10509 - DNA, 80 bp, synthetic construct
  misc_feature 1..80: note = Synthetic: >AvianCoV-cand-4840-4919
  source 1..80: mol_type = other DNA
gtggccattgttatacacaagctgttggaaaagcttttgataatttggctcaagatagaaaatttggaaagagatcgcct

SEQ ID NO: 10510 - DNA, 80 bp, synthetic construct
  misc_feature 1..80: note = Synthetic: >AvianCoV-cand-4920-4999
  source 1..80: mol_type = other DNA
tacattactgcaatgtatacgcgcttctctcttaagagtgaaaattctctgtctgttgctaaaaagagtaagagtaagag

SEQ ID NO: 10511 - DNA, 80 bp, synthetic construct
  misc_feature 1..80: note = Synthetic: >AvianCoV-cand-5000-5079
  source 1..80: mol_type = other DNA
taaagtagtaaaagaagatgtttctaaccttgctactagttcaaaagtcagttttgatgatcttactgactttgaacagt

SEQ ID NO: 10512 - DNA, 80 bp, synthetic construct
  misc_feature 1..80: note = Synthetic: >AvianCoV-cand-5080-5159
  source 1..80: mol_type = other DNA
ggtatgatagtaacatctatgaaagtcttaaagtgcaggaaacacctgagaatatggatgagtatgtgtcatttacaaca

SEQ ID NO: 10513 - DNA, 80 bp, synthetic construct
  misc_feature 1..80: note = Synthetic: >AvianCoV-cand-5160-5239
  source 1..80: mol_type = other DNA
aaggaagattccaagttgccactgacacttaaagttagaggtatcaaatcagttgttgactttaagtcaaaggatggctt

SEQ ID NO: 10514 - DNA, 80 bp, synthetic construct
  misc_feature 1..80: note = Synthetic: >AvianCoV-cand-5240-5319
  source 1..80: mol_type = other DNA
tacttataagttaacacctgacactgatgaaaattcaaaagcaccagtctactaccctgtcttggactctattagtctta

SEQ ID NO: 10515 - DNA, 80 bp, synthetic construct
  misc_feature 1..80: note = Synthetic: >AvianCoV-cand-5320-5399
  source 1..80: mol_type = other DNA
aggcaatatgggtggaaggtagtgctaattttgttgttggacatccaaactataatagtaaagctctgcgtattcctact

SEQ ID NO: 10516 - DNA, 80 bp, synthetic construct
  misc_feature 1..80: note = Synthetic: >AvianCoV-cand-5400-5479
  source 1..80: mol_type = other DNA
ttttgggaatgtgcagagagctttgttaaaataggtgaaaaagttgatggtgtaactatgggcctttggcgtgcagaaca

SEQ ID NO: 10517 - DNA, 80 bp, synthetic construct
  misc_feature 1..80: note = Synthetic: >AvianCoV-cand-5480-5559
  source 1..80: mol_type = other DNA
ccttaataaacctaatttggaaagaattttcaacatcgttaagaaaacgattgttggaactagtgttgttactacacaat

SEQ ID NO: 10518 - DNA, 80 bp, synthetic construct
  misc_feature 1..80: note = Synthetic: >AvianCoV-cand-5560-5639
  source 1..80: mol_type = other DNA
gtggtaaattaattagtaaagcagctacattcattgctgataaagtaggtgatggtgtagttcgcaatgttacagataga

SEQ ID NO: 10519 - DNA, 80 bp, synthetic construct
  misc_feature 1..80: note = Synthetic: >AvianCoV-cand-5640-5719
  source 1..80: mol_type = other DNA
attaagggtttttttgggtttacacgtgggcattttgaaagaaaagtgtctccacaattcataaaaacactctttttctt

SEQ ID NO: 10520 - DNA, 80 bp, synthetic construct
  misc_feature 1..80: note = Synthetic: >AvianCoV-cand-5720-5799
  source 1..80: mol_type = other DNA
cttcttttattttttaaaggctagtgctaagagtttagtggctagctacaagagtgtgttatgtaaagtggtatttactg

SEQ ID NO: 10521 - DNA, 80 bp, synthetic construct
  misc_feature 1..80: note = Synthetic: >AvianCoV-cand-5800-5879
  source 1..80: mol_type = other DNA
ctttatttatattatggtttgtctacacaagtaatccagtaatatttactggaatacgtgtgttagacttcttatttgaa

SEQ ID NO: 10522 - DNA, 80 bp, synthetic construct
  misc_feature 1..80: note = Synthetic: >AvianCoV-cand-5880-5959
  source 1..80: mol_type = other DNA
ggttcattatgtagtccttataatgactatggtaaagagtcttttgatgttttacgctattgtggaggtgattttacttg

SEQ ID NO: 10523 - DNA, 80 bp, synthetic construct
  misc_feature 1..80: note = Synthetic: >AvianCoV-cand-5960-6039
  source 1..80: mol_type = other DNA
tcgtgtttgtttacatggtaaggattcacttcatttgtataaacatgcttatagcgtagaacagttttataaagatgcag

SEQ ID NO: 10524 - DNA, 80 bp, synthetic construct
  misc_feature 1..80: note = Synthetic: >AvianCoV-cand-6040-6119
  source 1..80: mol_type = other DNA
tttctggcattagttttaattggaattggctttatttggtctttctaatattgtttgttaagccagtagcaggttttgtt

SEQ ID NO: 10525 - DNA, 80 bp, synthetic construct
  misc_feature 1..80: note = Synthetic: >Beluga-cand-4900-4979
  source 1..80: mol_type = other DNA
gaagtgaggaaaaccaggatgctgatgctggaaagcaacatgcaggaagtaccttcactccccctcgaaaaggcgacacc

SEQ ID NO: 10526 - DNA, 80 bp, synthetic construct
  misc_feature 1..80: note = Synthetic: >Beluga-cand-4980-5059
  source 1..80: mol_type = other DNA
cgaggtgccactgggcgtactgtggtggacgtccccagtaaaggtgatgtagggagtgcggtgaaaactgtagagagtgt

SEQ ID NO: 10527 - DNA, 80 bp, synthetic construct
  misc_feature 1..80: note = Synthetic: >Beluga-cand-5060-5139
  source 1..80: mol_type = other DNA
gagtaatgctattagtgttcgtcaggacccacatttccatgtgaataattttgaagtccttagtgtgcaaagtttgcccg

SEQ ID NO: 10528 - DNA, 80 bp, synthetic construct
  misc_feature 1..80: note = Synthetic: >Beluga-cand-5140-5219
  source 1..80: mol_type = other DNA
ctgagagtgctgatcctgttgtaaagaaagctagtgtagttactatgaagggcgattttaaaccctttaaagtaggaaac

SEQ ID NO: 10529 - DNA, 80 bp, synthetic construct
  misc_feature 1..80: note = Synthetic: >Beluga-cand-5220-5299
  source 1..80: mol_type = other DNA
actactgttaaacctggtaaaggacctcaattagaggagtatttaacgttagatgtgattaagcaagcttggataactgg

SEQ ID NO: 10530 - DNA, 80 bp, synthetic construct
  misc_feature 1..80: note = Synthetic: >Beluga-cand-5300-5379
  source 1..80: mol_type = other DNA
cgattacaatgttgtaattcgccggacatccaccctaacaaagatgttgggagttgtagcaatggatacaggtaaaatag

SEQ ID NO: 10531 - DNA, 80 bp, synthetic construct
  misc_feature 1..80: note = Synthetic: >Beluga-cand-5380-5459
  source 1..80: mol_type = other DNA
tgtttgatagtatgcttaaggcagcaaatgctattattgattatgcaaagagacataaccttcagaagaaggcaatacaa

SEQ ID NO: 10532 - DNA, 80 bp, synthetic construct
  misc_feature 1..80: note = Synthetic: >Beluga-cand-5460-5539
  source 1..80: mol_type = other DNA
gaagcaaaggaagttgctactatgttgtctccttatatggatgttaaagtagtaaaaggcatgttatttaacgtctggag

SEQ ID NO: 10533 - DNA, 80 bp, synthetic construct
  misc_feature 1..80: note = Synthetic: >Beluga-cand-5540-5619
  source 1..80: mol_type = other DNA
ctacttgttgactgtattgccattgttgcaaaaacctacagaattgtatggtgaatgtctaaagaagtcttctaaggttg

SEQ ID NO: 10534 - DNA, 80 bp, synthetic construct
  misc_feature 1..80: note = Synthetic: >Beluga-cand-5620-5699
  source 1..80: mol_type = other DNA
ttggaggtgttaaggcttctacttgggctgtcatgggtttggcatgcatgtgctggtggagacagagacaaatagccgca

SEQ ID NO: 10535 - DNA, 80 bp, synthetic construct
  misc_feature 1..80: note = Synthetic: >Beluga-cand-5700-5779
  source 1..80: mol_type = other DNA
ggtgcagtaagattagctaactggtttacactaggctacctctgttatgattataatacgtacagtgattaccattttaa

SEQ ID NO: 10536 - DNA, 80 bp, synthetic construct
  misc_feature 1..80: note = Synthetic: >Beluga-cand-5780-5859
  source 1..80: mol_type = other DNA
tgtttttgattattgtaatggtactctctgtgaattgtgtttgtctggtgtagattcattacacctgtataagcatgcta

SEQ ID NO: 10537 - DNA, 80 bp, synthetic construct
  misc_feature 1..80: note = Synthetic: >Beluga-cand-5860-5939
  source 1..80: mol_type = other DNA
agactacatatcaaaaggttgtgacaactgattttgtaggctatgcacccttatattttatattgcaagctgtctttttt

SEQ ID NO: 10538 - DNA, 80 bp, synthetic construct
  misc_feature 1..80: note = Synthetic: >Beluga-cand-5940-6019
  source 1..80: mol_type = other DNA
aagagcgcagctatgttgagtggtttgttgtttatgattaagttcaccataaattttggtgtctttaataccggtattta

SEQ ID NO: 10539 - DNA, 80 bp, synthetic construct
  misc_feature 1..80: note = Synthetic: >Beluga-cand-6020-6099
  source 1..80: mol_type = other DNA
tattgtggattatgtggtatccacaattgctaataccatagaccctattatgatttcaacgattgtgtgcggtatgatta

SEQ ID NO: 10540 - DNA, 80 bp, synthetic construct
  misc_feature 1..80: note = Synthetic: >Beluga-cand-6100-6179
  source 1..80: mol_type = other DNA
aattgtatcgcatggcaaatcattatttttatggatgcaaaaaccctgcttgtgataggtgtcacgcagctaatgtatca

SEQ ID NO: 10541 - DNA, 80 bp, synthetic construct
  misc_feature 1..80: note = Synthetic: >Beluga-cand-20190-20269
  source 1..80: mol_type = other DNA
tttgcaccgccgtgaatactagttcctctgaggcttttctggtaggtgttaattatttaggagatgtagaaaaaccgatt

SEQ ID NO: 10542 - DNA, 80 bp, synthetic construct
  misc_feature 1..80: note = Synthetic: >Beluga-cand-20270-20349
  source 1..80: mol_type = other DNA
attgatggatcggtgatgcatgcaaattatttgttctggcggaatgtgacagatttaccgcttagtgcacgtagtctgtt

SEQ ID NO: 10543 - DNA, 80 bp, synthetic construct
  misc_feature 1..80: note = Synthetic: >Beluga-cand-20350-20429
  source 1..80: mol_type = other DNA
tgacattgcaaagtttggtttaaaagtgaaagcaacccctgtagtgaatttaaaaaaggaaaacattacagagcttgtta

SEQ ID NO: 10544 - DNA, 80 bp, synthetic construct
  misc_feature 1..80: note = Synthetic: >Beluga-cand-20430-20509
  source 1..80: mol_type = other DNA
taaacctgcttaagaatggtaaaattgttatacgtgatagtgctagtgtgcactacgttgacgattcccttattatataa

SEQ ID NO: 10545 - DNA, 80 bp, synthetic construct
  misc_feature 1..80: note = Synthetic: >Beluga-cand-20510-20589
  source 1..80: mol_type = other DNA
tgccgaagaatttttagattttgatctttggccatgtgatacctgttggaatagtagtttattagaggaaaataatacat

SEQ ID NO: 10546 - DNA, 80 bp, synthetic construct
  misc_feature 1..80: note = Synthetic: >Beluga-cand-20590-20669
  source 1..80: mol_type = other DNA
atactgctgcagcttttcatcagtatggtattatacctttttattatagtataaattggaccgtcgttatgaattatacg

SEQ ID NO: 10547 - DNA, 80 bp, synthetic construct
  misc_feature 1..80: note = Synthetic: >Beluga-cand-20670-20749
  source 1..80: mol_type = other DNA
ggtgatggtatttatgattataagtgggatgatgttgcttataactcatccaactatttggctgttaatgttagtcttgt

SEQ ID NO: 10548 - DNA, 80 bp, synthetic construct
  misc_feature 1..80: note = Synthetic: >Beluga-cand-20750-20829
  source 1..80: mol_type = other DNA
tggcaggaattgcaccgcaaatttcacaaatgagacgcttactgagtataagggtttcgattttaaaggttttccctttt

SEQ ID NO: 10549 - DNA, 80 bp, synthetic construct
  misc_feature 1..80: note = Synthetic: >Beluga-cand-20830-20909
  source 1..80: mol_type = other DNA
cctgcccagattttaatgttactagtatagaccatggtatgtatggttatttattacagaatgtcttattgggaagatgc

SEQ ID NO: 10550 - DNA, 80 bp, synthetic construct
  misc_feature 1..80: note = Synthetic: >Beluga-cand-20910-20989
  source 1..80: mol_type = other DNA
acttctcatttgtgtgtagttgtgataccgcagggtagagtatttttccaaaaagatgagatgtggtggtggagctgggg

SEQ ID NO: 10551 - DNA, 80 bp, synthetic construct
  misc_feature 1..80: note = Synthetic: >Beluga-cand-20990-21069
  source 1..80: mol_type = other DNA
tgaccgataccaaccaggtaggtatatcctcacacttcacacgttttatggtttttgatagaaatataaccgttattggt

SEQ ID NO: 10552 - DNA, 80 bp, synthetic construct
  misc_feature 1..80: note = Synthetic: >Beluga-cand-21070-21149
  source 1..80: mol_type = other DNA
atagcgggtaattttgatttatatagattaggccacatgatgggtgtaagtatgtaagaggccaatcgtgtcctggctat

SEQ ID NO: 10553 - DNA, 80 bp, synthetic construct
  misc_feature 1..80: note = Synthetic: >Beluga-cand-21150-21229
  source 1..80: mol_type = other DNA
aattggatgaacgtaacgcgcattcctgtagttggtcaggtgtgtcgttggttttatgctgatcaggagtgctaatttat

SEQ ID NO: 10554 - DNA, 80 bp, synthetic construct
  misc_feature 1..80: note = Synthetic: >Beluga-cand-21230-21309
  source 1..80: mol_type = other DNA
gtaatttaacccgtgttgataatatgccaaaaacatattacacagcagaattagcccgaccagctactgcaagtgttatt

SEQ ID NO: 10555 - DNA, 80 bp, synthetic construct
  misc_feature 1..80: note = Synthetic: >Beluga-cand-21310-21389
  source 1..80: mol_type = other DNA
gttgatggtgcttataaacccgtttatactggtaagtttgttgatgatgaaacattaggtccagattatccctgtcctac

SEQ ID NO: 10556 - DNA, 80 bp, synthetic construct
  misc_feature 1..80: note = Synthetic: >Beluga-cand-21390-21469
  source 1..80: mol_type = other DNA
atcatcttcattacaggcttcttatgtacctggggattgtgctattaaggactgggtctggatacgttcttttgatttta

SEQ ID NO: 10557 - DNA, 80 bp, synthetic construct
  misc_feature 1..80: note = Synthetic: >BetaCoV1-cand-2490-2569
  source 1..80: mol_type = other DNA
caccataattaagggtctaccttgttttaaggtggctgctgagtacattgtcttctctggaagctttgcatacaaattgg

SEQ ID NO: 10558 - DNA, 80 bp, synthetic construct
  misc_feature 1..80: note = Synthetic: >BetaCoV1-cand-2570-2649
  source 1..80: mol_type = other DNA
gtttggctatgatagataatctagtcctacctagtggtatgatacagagtgagcaacttcttgctttgcatggtgaggtt

SEQ ID NO: 10559 - DNA, 80 bp, synthetic construct
  misc_feature 1..80: note = Synthetic: >BetaCoV1-cand-2650-2729
  source 1..80: mol_type = other DNA
acccctgtgacattagaaagtgaggttgtggaagttgtgaaacaaccactaaaaccacttggctatcgaaagcctccaat

SEQ ID NO: 10560 - DNA, 80 bp, synthetic construct
  misc_feature 1..80: note = Synthetic: >BetaCoV1-cand-2730-2809
  source 1..80: mol_type = other DNA
gaaagcagctcggctgtgtgttgtagataatttgtatatggctcaaaacggtgactgtctatatcctgtgatatttgatg

SEQ ID NO: 10561 - DNA, 80 bp, synthetic construct
  misc_feature 1..80: note = Synthetic: >BetaCoV1-cand-2810-2889
  source 1..80: mol_type = other DNA
gtcagcgtattgggttattggatcaggcttggcgctttccctgtgcgggtaagagtgtgtctttcgctgcagaagatgat

SEQ ID NO: 10562 - DNA, 80 bp, synthetic construct
  misc_feature 1..80: note = Synthetic: >BetaCoV1-cand-2890-2969
  source 1..80: mol_type = other DNA
gttaaaatcatagctgcaaagaagaaggtcacagttgagtatgatctagatgttgaatttaacaccatcttaaatactgc

SEQ ID NO: 10563 - DNA, 80 bp, synthetic construct
  misc_feature 1..80: note = Synthetic: >BetaCoV1-cand-2970-3049
  source 1..80: mol_type = other DNA
ttgtaacagttttgaggtggatggtagtgttgatgcggaagagcttgctgctgtgattgttgatacaatccaggacaagt

SEQ ID NO: 10564 - DNA, 80 bp, synthetic construct
  misc_feature 1..80: note = Synthetic: >BetaCoV1-cand-3050-3129
  source 1..80: mol_type = other DNA
tagaatcttgcaagacacttgaaggagtgggtgaaaaagtctgtgcatttttgtgtaggttggatgaagaacctatttac

SEQ ID NO: 10565 - DNA, 80 bp, synthetic construct
  misc_feature 1..80: note = Synthetic: >BetaCoV1-cand-3130-3209
  source 1..80: mol_type = other DNA
ttgtttgatgagtgtggtgatgagaaactttcttctcatatgttctgcacattctgcccaccagaagatgatgatgttgt

SEQ ID NO: 10566 - DNA, 80 bp, synthetic construct
  misc_feature 1..80: note = Synthetic: >BetaCoV1-cand-3210-3289
  source 1..80: mol_type = other DNA
aatgtttgagtgtgaagatgaaggttgtgaccttagtgaagtggaaacacctgaaacagtggaagcagaaccagccagcc

SEQ ID NO: 10567 - DNA, 80 bp, synthetic construct
  misc_feature 1..80: note = Synthetic: >BetaCoV1-cand-3290-3369
  source 1..80: mol_type = other DNA
agtcagacagccaaaatggtgatgtcgatggtaatggtgtaggcgacgtgaaagctgtggatgctgtggaaactgaagct

SEQ ID NO: 10568 - DNA, 80 bp, synthetic construct
  misc_feature 1..80: note = Synthetic: >BetaCoV1-cand-3370-3449
  source 1..80: mol_type = other DNA
gtggttgactctgaatctgaacaagatcaaacattaagtgcaaataaagagctgctttgtgcagtatttgaagaagacgt

SEQ ID NO: 10569 - DNA, 80 bp, synthetic construct
  misc_feature 1..80: note = Synthetic: >BetaCoV1-cand-3450-3529
  source 1..80: mol_type = other DNA
agaagccacagaaccggtcattgtcactgattgcactagccattatggtagcctggtaggtaataccagtggtagtggta

SEQ ID NO: 10570 - DNA, 80 bp, synthetic construct
  misc_feature 1..80: note = Synthetic: >BetaCoV1-cand-3530-3609
  source 1..80: mol_type = other DNA
gcagcagtgttgccagtgaggctgaacaagtggaagaagtctttgatatagcgacatgcgatgatcctattttgcaggaa

SEQ ID NO: 10571 - DNA, 80 bp, synthetic construct
  misc_feature 1..80: note = Synthetic: >BetaCoV1-cand-3610-3689
  source 1..80: mol_type = other DNA
ttagagcaggtcgtaaatgttgagtatcatgtgcttcatgataatgtctgcgactatgttgcagcttatgaggccaatta

SEQ ID NO: 10572 - DNA, 80 bp, synthetic construct
  misc_feature 1..80: note = Synthetic: >BetaCoV1-cand-3690-3769
  source 1..80: mol_type = other DNA
ttcacaagctgttagtgatttttggacagtacagcaggacgagtttattcacgtctgtgttaatggtgtatttgttccta

SEQ ID NO: 10573 - DNA, 80 bp, synthetic construct
  misc_feature 1..80: note = Synthetic: >BetaCoV1-cand-22990-23069
  source 1..80: mol_type = other DNA
tccatctttaggagctttcatttcactgatttctacaattatcagggagaagggaatcaaataatattctatgaaggcgt

SEQ ID NO: 10574 - DNA, 80 bp, synthetic construct
  misc_feature 1..80: note = Synthetic: >BetaCoV1-cand-23070-23149
  source 1..80: mol_type = other DNA
taatttttcaccgagtcatgcgtttaaatgtaccgcgtccggtgataatggtatttggataagtaataaaggtaagttct

SEQ ID NO: 10575 - DNA, 80 bp, synthetic construct
  misc_feature 1..80: note = Synthetic: >BetaCoV1-cand-23150-23229
  source 1..80: mol_type = other DNA
atgagcaagtatataggaagatggccgtttatcgaggcctctccataataactgtgccttatgtatatactggaacggca

SEQ ID NO: 10576 - DNA, 80 bp, synthetic construct
  misc_feature 1..80: note = Synthetic: >BetaCoV1-cand-23230-23309
  source 1..80: mol_type = other DNA
gctgcaacctctatttgtacgagaggcagtctgaccttaaataatcctacgtctatacaaaaggagagcggtttgaataa

SEQ ID NO: 10577 - DNA, 80 bp, synthetic construct
  misc_feature 1..80: note = Synthetic: >BetaCoV1-cand-23310-23389
  source 1..80: mol_type = other DNA
ttatttttatactgcagaggctaattttactctcgcgggctgcgatgagtacatagttcctctgtgtatttatagtggta

SEQ ID NO: 10578 - DNA, 80 bp, synthetic construct
  misc_feature 1..80: note = Synthetic: >BetaCoV1-cand-23390-23469
  source 1..80: mol_type = other DNA
tgtttcaagcttctggtacgtactacaatgatagccagtactattatagttatagcactggagaattttatggccgtaac

SEQ ID NO: 10579 - DNA, 80 bp, synthetic construct
  misc_feature 1..80: note = Synthetic: >BetaCoV1-cand-23470-23549
  source 1..80: mol_type = other DNA
aacacagttgataaagccactgttgttgattacgagtgccaatatcttaccttgccttctggaatttataaatctgtttc

SEQ ID NO: 10580 - DNA, 80 bp, synthetic construct
  misc_feature 1..80: note = Synthetic: >BetaCoV1-cand-23550-23629
  source 1..80: mol_type = other DNA
caatcagttgcttcttacagttccgacgaaggcgatctgtctgacaaagcccaagagctttacgccagtacaggttgtcg

SEQ ID NO: 10581 - DNA, 80 bp, synthetic construct
  misc_feature 1..80: note = Synthetic: >BetaCoV1-cand-23790-23869
  source 1..80: mol_type = other DNA
taatgcaccttgttttgctaagcaaggtgtatttatgtataataatgttagtagtgtatggcccgcctatgcttatggtg

SEQ ID NO: 10582 - DNA, 80 bp, synthetic construct
  misc_feature 1..80: note = Synthetic: >BetaCoV1-cand-23950-24029
  source 1..80: mol_type = other DNA
attcttcttggaatagcggttataaccattgtggttttgcttttatatttccttgtagataatggtactaggcttcatga

SEQ ID NO: 10583 - DNA, 80 bp, synthetic construct
  misc_feature 1..80: note = Synthetic: >BetaCoV1-cand-24110-24189
  source 1..80: mol_type = other DNA
ttaagtgcactcaaagttggattaatagtgccgcctcaccacagccgccaatctccactcagaagttgttgatgtgtcta

SEQ ID NO: 10584 - DNA, 80 bp, synthetic construct
  misc_feature 1..80: note = Synthetic: >BetaCoV1-cand-24190-24269
  source 1..80: mol_type = other DNA
agggtgttggcacgtactatgtcctaaatcgtgtttatttgaatactagtttgttgctcactggttattaccctgtttca

SEQ ID NO: 10585 - DNA, 80 bp, synthetic construct
  misc_feature 1..80: note = Synthetic: >BetaCoV1-cand-25550-25629
  source 1..80: mol_type = other DNA
tgtaaacacgtgtgttcagaataaaacttggtctgccgcatgccccactggtactgttgaacgacctcaaattggtactt

SEQ ID NO: 10586 - DNA, 80 bp, synthetic construct
  misc_feature 1..80: note = Synthetic: >BetaCoV1-cand-25710-25789
  source 1..80: mol_type = other DNA
acaccagccattgtgggtgtaggacaacattgtcctggtgtgggcgttttggcagaccaatgtgcgccatccatgccagg

SEQ ID NO: 10587 - DNA, 80 bp, synthetic construct
  misc_feature 1..80: note = Synthetic: >BetaCoV1-cand-25950-26029
  source 1..80: mol_type = other DNA
agcggtaccacatgtgccacggatttacagaaagcaaacactgaaatcatagtaggtgtttgtgttaaatatgaccttta

SEQ ID NO: 10588 - DNA, 80 bp, synthetic construct
  misc_feature 1..80: note = Synthetic: >BetaCoV1-cand-26030-26109
  source 1..80: mol_type = other DNA
tggcatctcaggtcagggcatttttactgaggttaatgctacctattataatagttggcagaaccttctttatgattcta

SEQ ID NO: 10589 - DNA, 80 bp, synthetic construct
  misc_feature 1..80: note = Synthetic: >BetaCoV1-cand-26350-26429
  source 1..80: mol_type = other DNA
gccgttggttcttgtaatctcactgtaggcagtggttattgcgtggactattcagctactcggcgtgccaagagagattt

SEQ ID NO: 10590 - DNA, 80 bp, synthetic construct
  misc_feature 1..80: note = Synthetic: >BetaCoV1-cand-26430-26509
  source 1..80: mol_type = other DNA
aaacactggttatcggcttactaactttgaacctttcgttcctactctcgtgaacgatagtgttgaatctgttggtggtc

SEQ ID NO: 10591 - DNA, 80 bp, synthetic construct
  misc_feature 1..80: note = Synthetic: >BetaCoV1-cand-28110-28189
  source 1..80: mol_type = other DNA
ctgttgcacaggatgtggagctagttgttttaagaagtgtggaagttgttgtgatgattatggtggtcatcaagatatag

SEQ ID NO: 10592 - DNA, 80 bp, synthetic construct
  misc_feature 1..80: note = Synthetic: >BetaCoV1-cand-28430-28509
  source 1..80: mol_type = other DNA
cagggctagatataagaaataccacaaacccatccgcaaggattggtactgtgtcttatacaattaacactccgcccgca

SEQ ID NO: 10593 - DNA, 80 bp, synthetic construct
  misc_feature 1..80: note = Synthetic: >BetaCoV1-cand-28510-28589
  source 1..80: mol_type = other DNA
ccaatggttatcaccagccttgatatggtgaagacggtcgtgttacattaataaaacccactgacacctatacgagtgtc

SEQ ID NO: 10594 - DNA, 80 bp, synthetic construct
  misc_feature 1..80: note = Synthetic: >BetaCoV1-cand-28750-28829
  source 1..80: mol_type = other DNA
agacaacattcgattggtttacactcgtgcatttgatgtttacaacctagagagttattgttccatttttggatataaaa

SEQ ID NO: 10595 - DNA, 80 bp, synthetic construct
  misc_feature 1..80: note = Synthetic: >BetaCoV1-cand-28830-28909
  source 1..80: mol_type = other DNA
gacccatagtgggttattcttttgtagataataaatcgtggtgccgtaatcaaggtaaagttcttgcaacccttaccttg

SEQ ID NO: 10596 - DNA, 80 bp, synthetic construct
  misc_feature 1..80: note = Synthetic: >BetaCoV1-cand-28990-29069
  source 1..80: mol_type = other DNA
tgttaataagctggtatctgagaccattgaattcatactctggcgtgcagagcatttgaatagatatggttgaactttct

SEQ ID NO: 10597 - DNA, 80 bp, synthetic construct
  misc_feature 1..80: note = Synthetic: >BetaCoV1-cand-29070-29149
  source 1..80: mol_type = other DNA
cttacagacacagtgtggtatgtggggcagataattttaattgttgctatttgcctgcttgttattgttatagtggtagc

SEQ ID NO: 10598 - DNA, 80 bp, synthetic construct
  misc_feature 1..80: note = Synthetic: >BetaCoV1-cand-29150-29229
  source 1..80: mol_type = other DNA
agctttggcaacatttaaactatgtattcaactttgcggtatgtgtaatactttagtagtgtccccttctatttatgtgt

SEQ ID NO: 10599 - DNA, 80 bp, synthetic construct
  misc_feature 1..80: note = Synthetic: >CDPHE15-cand-17100-17179
  source 1..80: mol_type = other DNA
ttaaggattgtagtaggcgcgacgacatgttaccaccttcacatgcttctacttatatggcactttctgacaattttaag

SEQ ID NO: 10600 - DNA, 80 bp, synthetic construct
  misc_feature 1..80: note = Synthetic: >CDPHE15-cand-17180-17259
  source 1..80: mol_type = other DNA
acagacaaagaattggctgtccaaattggtgtgaatggtccaattaagtatgagcatgttgtttcattcatgggcttcag

SEQ ID NO: 10601 - DNA, 80 bp, synthetic construct
  misc_feature 1..80: note = Synthetic: >CDPHE15-cand-17260-17339
  source 1..80: mol_type = other DNA
attcgatgttaacatacctaacaatcatacactgttttgtacacgtgactttgcaataaggcacgtgcgtggttggcttg

SEQ ID NO: 10602 - DNA, 80 bp, synthetic construct
  misc_feature 1..80: note = Synthetic: >CDPHE15-cand-17340-17419
  source 1..80: mol_type = other DNA
gttttgatgtcgaaggagcacatgtagttggtgaaaatgtcggtacaaatgtgccactacaacttgggttttctaatggt

SEQ ID NO: 10603 - DNA, 80 bp, synthetic construct
  misc_feature 1..80: note = Synthetic: >CDPHE15-cand-17420-17499
  source 1..80: mol_type = other DNA
attgactttgttgtcagaccagaagggtgtgttgttactgatactggtagtgctattgttcctgttaaagctcgtgcacc

SEQ ID NO: 10604 - DNA, 80 bp, synthetic construct
  misc_feature 1..80: note = Synthetic: >CDPHE15-cand-17500-17579
  source 1..80: mol_type = other DNA
acctggtgaacaattcgcgcacttggtgccattgcttaggaaggggcagccatggagtgttgtcaggaaacgcatcgttc

SEQ ID NO: 10605 - DNA, 80 bp, synthetic construct
  misc_feature 1..80: note = Synthetic: >CDPHE15-cand-17580-17659
  source 1..80: mol_type = other DNA
agatgtgttgtgaccatttcattaatttgtctgacattgtagtgtttgttttatggtctggaggccttgaattgacaaca

SEQ ID NO: 10606 - DNA, 80 bp, synthetic construct
  misc_feature 1..80: note = Synthetic: >CDPHE15-cand-17660-17739
  source 1..80: mol_type = other DNA
atgcgctactttgttaaggttggtcccattaagcactgcgagtgtggcaagttagcgacttgctataacagtgtgtcaca

SEQ ID NO: 10607 - DNA, 80 bp, synthetic construct
  misc_feature 1..80: note = Synthetic: >CDPHE15-cand-17740-17819
  source 1..80: mol_type = other DNA
ctctttctattgttttactcatgcatttggttgtgattacctgtataacccttactgtatcgacatacagcaatggggtt

SEQ ID NO: 10608 - DNA, 80 bp, synthetic construct
  misc_feature 1..80: note = Synthetic: >CDPHE15-cand-17820-17899
  source 1..80: mol_type = other DNA
acactggctcacttagtagtaaccaccaccagcattgcaatctacatcgtaacgaacatgtggcatctggtgatgctatc

SEQ ID NO: 10609 - DNA, 80 bp, synthetic construct
  misc_feature 1..80: note = Synthetic: >CDPHE15-cand-17900-17979
  source 1..80: mol_type = other DNA
atgacccgctgtttggccatttatgactgctttgttaaaaacgttgattggtctgtgacatatcctttcatagccaatga

SEQ ID NO: 10610 - DNA, 80 bp, synthetic construct
  misc_feature 1..80: note = Synthetic: >CDPHE15-cand-17980-18059
  source 1..80: mol_type = other DNA
aaacttaattaacaaaagtggtcgtatggtacagtcccatgtgatgcgggctgcactagcattgtataaacctaaggcca

SEQ ID NO: 10611 - DNA, 80 bp, synthetic construct
  misc_feature 1..80: note = Synthetic: >CDPHE15-cand-18060-18139
  source 1..80: mol_type = other DNA
tccatgatattggtaatcctaagggtatacgctgtgcagttactgatgtcagctggtattgttatgacaaacaacctctt

SEQ ID NO: 10612 - DNA, 80 bp, synthetic construct
  misc_feature 1..80: note = Synthetic: >CDPHE15-cand-18140-18219
  source 1..80: mol_type = other DNA
aacaacaatgttaagactctagaatatgactacattacacatggtcagtttgatggtttgtgtctgttctggaactgtaa

SEQ ID NO: 10613 - DNA, 80 bp, synthetic construct
  misc_feature 1..80: note = Synthetic: >CDPHE15-cand-18220-18299
  source 1..80: mol_type = other DNA
tgtggatatgtatccagagttttcaattgtttgtcgctttgatactagacaacgttccctgttaaatttagaaggctgta

SEQ ID NO: 10614 - DNA, 80 bp, synthetic construct
  misc_feature 1..80: note = Synthetic: >CDPHE15-cand-18300-18379
  source 1..80: mol_type = other DNA
atggtggttctctttatgttaacaaccatgcttttcatacgccagcttttgataagcgagcatttgctaagcttaaagcc

SEQ ID NO: 10615 - DNA, 80 bp, synthetic construct
  misc_feature 1..80: note = Synthetic: >CanadaGoose-cand-26000-26079
  source 1..80: mol_type = other DNA
cgtggtttgtttaaatagaggtgcaagaagtgtctattttcttaacaaacaaggacttcccgttccttgtccccattgca

SEQ ID NO: 10616 - DNA, 80 bp, synthetic construct
  misc_feature 1..80: note = Synthetic: >CanadaGoose-cand-26080-26159
  source 1..80: mol_type = other DNA
ctacgctcgtcgttcgtggccttctttgtgaagaacaccagttcgacgacaatatctatataggatggcatccagaggga

SEQ ID NO: 10617 - DNA, 80 bp, synthetic construct
  misc_feature 1..80: note = Synthetic: >CanadaGoose-cand-26160-26239
  source 1..80: mol_type = other DNA
actctagaacacgccagaaccagggtgggaaatcggatgctccagcaccggttctaaagctctctggtggaccaccaaag

SEQ ID NO: 10618 - DNA, 80 bp, synthetic construct
  misc_feature 1..80: note = Synthetic: >CanadaGoose-cand-26240-26319
  source 1..80: mol_type = other DNA
gtaggaggtagtggatcagcgtcctggttccaggctcttaagtctaggaaaccagatggacctgaaccacacttctcagg

SEQ ID NO: 10619 - DNA, 80 bp, synthetic construct
  misc_feature 1..80: note = Synthetic: >CanadaGoose-cand-26320-26399
  source 1..80: mol_type = other DNA
tagtggtgttccagtgaacgacaatgtcgacctgaaagccagtcatggctattggcggaggcagcgtcgctttaaacctg

SEQ ID NO: 10620 - DNA, 80 bp, synthetic construct
  misc_feature 1..80: note = Synthetic: >CanadaGoose-cand-26400-26479
  source 1..80: mol_type = other DNA
gtaagggtggcagaaaacctgtcggtgatgcctggtacttctattatacgggtactgggccactggcagatcttcaatat

SEQ ID NO: 10621 - DNA, 80 bp, synthetic construct
  misc_feature 1..80: note = Synthetic: >CanadaGoose-cand-26480-26559
  source 1..80: mol_type = other DNA
gctgaccctcatgatgatgttgtgtgggtgaaggccaagggtgcagacaccagcacacgttccaagcagggtactagaga

SEQ ID NO: 10622 - DNA, 80 bp, synthetic construct
  misc_feature 1..80: note = Synthetic: >CanadaGoose-cand-26560-26639
  source 1..80: mol_type = other DNA
tcctgataagtttgaacagtttccactcaggtttgccgatggtggtcctgataatggatttcgctgggatttcataccta

SEQ ID NO: 10623 - DNA, 80 bp, synthetic construct
  misc_feature 1..80: note = Synthetic: >CanadaGoose-cand-26640-26719
  source 1..80: mol_type = other DNA
caagccgtggtagaagtggtagaaactctgtagcctcatctcgagagcagtctcgtaatggaagcagagccgctacacct

SEQ ID NO: 10624 - DNA, 80 bp, synthetic construct
  misc_feature 1..80: note = Synthetic: >CanadaGoose-cand-26720-26799
  source 1..80: mol_type = other DNA
gaacgccgtggtaggactagttctgtcaatgaggacctcatccaaaaggcagctgacattatcctgaagaaccagggcaa

SEQ ID NO: 10625 - DNA, 80 bp, synthetic construct
  misc_feature 1..80: note = Synthetic: >CanadaGoose-cand-26800-26879
  source 1..80: mol_type = other DNA
gagcggcagaattactaaagcaaaggccaatgaaatggctgagcggcggtattgcaagcgtgttctggctccaggaaaag

SEQ ID NO: 10626 - DNA, 80 bp, synthetic construct
  misc_feature 1..80: note = Synthetic: >CanadaGoose-cand-26880-26959
  source 1..80: mol_type = other DNA
atgttgattctgtttttggagctcgtactaaaaacaagcccagaaactttggtgacgataagatggtggaagagggcatc

SEQ ID NO: 10627 - DNA, 80 bp, synthetic construct
  misc_feature 1..80: note = Synthetic: >CanadaGoose-cand-26960-27039
  source 1..80: mol_type = other DNA
agagatggcagaacaactgctatgctgaatattgtgccctccagccatgctttgctgtttggtggagaagtgcagtcaaa

SEQ ID NO: 10628 - DNA, 80 bp, synthetic construct
  misc_feature 1..80: note = Synthetic: >CanadaGoose-cand-27040-27119
  source 1..80: mol_type = other DNA
actcaatcctgaaggactggctgtcacttttacttttactactactgttgatcgcaatgatccgcagtttgataattatg

SEQ ID NO: 10629 - DNA, 80 bp, synthetic construct
  misc_feature 1..80: note = Synthetic: >CanadaGoose-cand-27120-27199
  source 1..80: mol_type = other DNA
tgaaaatttgtagtgagtgtgtgaatggtgttggaacaagaccatctggagacactaaaccaaaatccaagccttcttct

SEQ ID NO: 10630 - DNA, 80 bp, synthetic construct
  misc_feature 1..80: note = Synthetic: >CanadaGoose-cand-27200-27279
  source 1..80: mol_type = other DNA
cgtgctcaatctccggctccaaagccacagagaaagaagcaacagaagaagaagcagcaggatgaagatgttgtgccgaa

SEQ ID NO: 10631 - DNA, 80 bp, synthetic construct
  misc_feature 1..80: note = Synthetic: >HKU10-cand-10240-10319
  source 1..80: mol_type = other DNA
ctgtacaacgcttacacaatagttttggtggtaaaaatatcctcggttatactactcttacagatgagtttactgttggt

SEQ ID NO: 10632 - DNA, 80 bp, synthetic construct
  misc_feature 1..80: note = Synthetic: >HKU10-cand-10320-10399
  source 1..80: mol_type = other DNA
gaggttattaagcagatgtatggtgttactttacagagtaataaagttgttggtgcgttttgcaacttagccattgtggg

SEQ ID NO: 10633 - DNA, 80 bp, synthetic construct
  misc_feature 1..80: note = Synthetic: >HKU10-cand-10400-10479
  source 1..80: mol_type = other DNA
cctttttgttacaatgttttggtctgaacttttacaatatacagcatttttctgggttagtcctggttttgtgactcctg

SEQ ID NO: 10634 - DNA, 80 bp, synthetic construct
  misc_feature 1..80: note = Synthetic: >HKU10-cand-10480-10559
  source 1..80: mol_type = other DNA
tattctttgcactgttgttagtgtcatttatacttatgtgttttcttaaacataaagtgttgtttttgtacacttttctt

SEQ ID NO: 10635 - DNA, 80 bp, synthetic construct
  misc_feature 1..80: note = Synthetic: >HKU10-cand-10560-10639
  source 1..80: mol_type = other DNA
ataccatcagttataattatggcaagttacaattttgtgtgggactggtctgtggcagctgaattggcccgcatctttga

SEQ ID NO: 10636 - DNA, 80 bp, synthetic construct
  misc_feature 1..80: note = Synthetic: >HKU10-cand-10640-10719
  source 1..80: mol_type = other DNA
ttaccatgtttccattgttagttttgacattcaaggtttattgaatgttgccgtatgtttgtttgtcactctgttacaca

SEQ ID NO: 10637 - DNA, 80 bp, synthetic construct
  misc_feature 1..80: note = Synthetic: >HKU10-cand-10720-10799
  source 1..80: mol_type = other DNA
caatgcggtttttcaaaacaaatataaattactcatcaatctcaacttatgtattgtcattggcatttactgtttatggc

SEQ ID NO: 10638 - DNA, 80 bp, synthetic construct
  misc_feature 1..80: note = Synthetic: >HKU10-cand-10800-10879
  source 1..80: mol_type = other DNA
tttgttgttggttctgatgtttttagtattgttatgactttgctttttaatttgacatcttcttggtatgttggtgctat

SEQ ID NO: 10639 - DNA, 80 bp, synthetic construct
  misc_feature 1..80: note = Synthetic: >HKU10-cand-10880-10959
  source 1..80: mol_type = other DNA
tgtttacaaattggcatattaccttcaatattatacatcatttgcacaaattttgggttctataaaagctattatgcttt

SEQ ID NO: 10640 - DNA, 80 bp, synthetic construct
  misc_feature 1..80: note = Synthetic: >HKU10-cand-10960-11039
  source 1..80: mol_type = other DNA
gttatataggccttggttatttgtgttgtgtttattatggctttttgtactggattaaccgtttttgtaaactgtctctt

SEQ ID NO: 10641 - DNA, 80 bp, synthetic construct
  misc_feature 1..80: note = Synthetic: >HKU10-cand-11040-11119
  source 1..80: mol_type = other DNA
ggtgtttacgattttaaggttagtgccaatgagtttaaatttatggttgctaatggtttgcaagcacctcgtggtgtttt

SEQ ID NO: 10642 - DNA, 80 bp, synthetic construct
  misc_feature 1..80: note = Synthetic: >HKU10-cand-11120-11199
  source 1..80: mol_type = other DNA
tgatagtttggcattgtcaattaagctcatgggtattggtggtgaaaagactattaaagtttcttctgttcagtcaaaat

SEQ ID NO: 10643 - DNA, 80 bp, synthetic construct
  misc_feature 1..80: note = Synthetic: >HKU10-cand-11200-11279
  source 1..80: mol_type = other DNA
tgactgatattaagtgtacaaatgttgtgcttcttggttgtttgtctagtatgaacattgctgctaatactaaagagtgg

SEQ ID NO: 10644 - DNA, 80 bp, synthetic construct
  misc_feature 1..80: note = Synthetic: >HKU10-cand-11280-11359
  source 1..80: mol_type = other DNA
tcttattgtgttgatttgcataataagattaatctttgtaatgaccctgaagctgcacaagaaatgttgttggctctact

SEQ ID NO: 10645 - DNA, 80 bp, synthetic construct
  misc_feature 1..80: note = Synthetic: >HKU10-cand-11360-11439
  source 1..80: mol_type = other DNA
tgcatttttccttagtaagcataaagattttggttttgatgatttgttggactcatattttgcagataattccattctgc

SEQ ID NO: 10646 - DNA, 80 bp, synthetic construct
  misc_feature 1..80: note = Synthetic: >HKU10-cand-11440-11519
  source 1..80: mol_type = other DNA
aaagtgtggcatccacatttgttaatatgccatcatttattgcttatgaaaatgcgcgtcaagcttatgaagatgctatt

SEQ ID NO: 10647 - DNA, 80 bp, synthetic construct
  misc_feature 1..80: note = Synthetic: >HKU14-cand-9440-9519
  source 1..80: mol_type = other DNA
tttgtctcagcctgtggatttctttgctcttactgcaagttccatagctggtgccattcttgctattattgttgttttgg

SEQ ID NO: 10648 - DNA, 80 bp, synthetic construct
  misc_feature 1..80: note = Synthetic: >HKU14-cand-9520-9599
  source 1..80: mol_type = other DNA
tgttttattacctaataaagctcaaaagagcttttggtgattacactagtgttgtggttgttaatgtgatagtttggttt

SEQ ID NO: 10649 - DNA, 80 bp, synthetic construct
  misc_feature 1..80: note = Synthetic: >HKU14-cand-9600-9679
  source 1..80: mol_type = other DNA
gttaatttcctgatgctatttgtgtttcaggtttatcccactctatcttgtatatatgctgcattttatttttatattac

SEQ ID NO: 10650 - DNA, 80 bp, synthetic construct
  misc_feature 1..80: note = Synthetic: >HKU14-cand-9680-9759
  source 1..80: mol_type = other DNA
gctctatttcccttcggagattagtgtaattatgcatttgcagtgggtggtgatgtatggtagtattatgcccttgtggt

SEQ ID NO: 10651 - DNA, 80 bp, synthetic construct
  misc_feature 1..80: note = Synthetic: >HKU14-cand-9760-9839
  source 1..80: mol_type = other DNA
ttagtctgctttatattgccatagttatttcaaaccacgcattctgggtattctcttactgcagaaagcttggtactggt

SEQ ID NO: 10652 - DNA, 80 bp, synthetic construct
  misc_feature 1..80: note = Synthetic: >HKU14-cand-9840-9919
  source 1..80: mol_type = other DNA
gtacgtagtgatggcacttttgaagagatggctctcactacttttatgattactaaggattcttattgtaagcttaagaa

SEQ ID NO: 10653 - DNA, 80 bp, synthetic construct
  misc_feature 1..80: note = Synthetic: >HKU14-cand-9920-9999
  source 1..80: mol_type = other DNA
ttcgctttctgatgttgcttttaatagatatttgggtttgtataataaatataggtattacagtggtaaaatggataccg

SEQ ID NO: 10654 - DNA, 80 bp, synthetic construct
  misc_feature 1..80: note = Synthetic: >HKU14-cand-10000-10079
  source 1..80: mol_type = other DNA
ctgcttatagagaggctgcttgttcacagttggcaaaggcaatggacacatttaccaataataatggtagtgacgtgctt

SEQ ID NO: 10655 - DNA, 80 bp, synthetic construct
  misc_feature 1..80: note = Synthetic: >HKU14-cand-10080-10159
  source 1..80: mol_type = other DNA
taccaaccacctacggcgtctgtttccacatcatttttgcaatctggtattgtgaagatggttagtcctacttctaaagt

SEQ ID NO: 10656 - DNA, 80 bp, synthetic construct
  misc_feature 1..80: note = Synthetic: >HKU14-cand-10160-10239
  source 1..80: mol_type = other DNA
agaaccttgcgttgtcagtgttacctacggtaatatgacattgaatggtctttggttggatgataaagtctactgtccta

SEQ ID NO: 10657 - DNA, 80 bp, synthetic construct
  misc_feature 1..80: note = Synthetic: >HKU14-cand-10240-10319
  source 1..80: mol_type = other DNA
ggcatgttatttgctctgcttcagatatgactaatccagattatcctaatttgctttgtagagtaacatcaagtgatttt

SEQ ID NO: 10658 - DNA, 80 bp, synthetic construct
  misc_feature 1..80: note = Synthetic: >HKU14-cand-10320-10399
  source 1..80: mol_type = other DNA
actataatgtctgatcgtatgagcctgactgttatgtcttatcagatgcaaggatgtatgcttgttctaactgtaacatt

SEQ ID NO: 10659 - DNA, 80 bp, synthetic construct
  misc_feature 1..80: note = Synthetic: >HKU14-cand-10400-10479
  source 1..80: mol_type = other DNA
gcagaatcctcgaacaccaaaatatacttttggtgttgtcaaacctggtgagacatttacagttcttgctgcttataatg

SEQ ID NO: 10660 - DNA, 80 bp, synthetic construct
  misc_feature 1..80: note = Synthetic: >HKU14-cand-10480-10559
  source 1..80: mol_type = other DNA
gcagaccacaaggagcctttcatgtgactatgagaagtagttttactattaagggttcctttttgtgcggatcttgtgga

SEQ ID NO: 10661 - DNA, 80 bp, synthetic construct
  misc_feature 1..80: note = Synthetic: >HKU14-cand-10560-10639
  source 1..80: mol_type = other DNA
tctgttggttatgttttgatgggtgattgtgttaagtttgtttatatgcatcaattggagcttagtactggttgtcatac

SEQ ID NO: 10662 - DNA, 80 bp, synthetic construct
  misc_feature 1..80: note = Synthetic: >HKU14-cand-10640-10719
  source 1..80: mol_type = other DNA
tggaactgacttcaatggggacttttatggtccttataaagatgcacaagttgtccaattgcccgttcaagattatgtgc

SEQ ID NO: 10663 - DNA, 80 bp, synthetic construct
  misc_feature 1..80: note = Synthetic: >HKU14-cand-15830-15909
  source 1..80: mol_type = other DNA
gtgttatattaccaaaataacgtttttatgtctgaagccaaatgttgggttgaaaatgacataaaccatggacctcatga

SEQ ID NO: 10664 - DNA, 80 bp, synthetic construct
  misc_feature 1..80: note = Synthetic: >HKU14-cand-15900-15979
  source 1..80: mol_type = other DNA
gacctcatgaattttgttcacaacatacaatgctagttaaaatggatggtgatgatgtctaccttccatatcctgatcct

SEQ ID NO: 10665 - DNA, 80 bp, synthetic construct
  misc_feature 1..80: note = Synthetic: >HKU14-cand-15980-16059
  source 1..80: mol_type = other DNA
agtcgtattctaggagctggatgttttgtagatgatttgttaaagactgatagcgttcttttgatagagcgatttgtaag

SEQ ID NO: 10666 - DNA, 80 bp, synthetic construct
  misc_feature 1..80: note = Synthetic: >HKU14-cand-16060-16139
  source 1..80: mol_type = other DNA
tcttgcaatagatgcttatccattagtatatcacgaaaatgaagaataccaaaaggtgtttcgtgtgtatttggagtata

SEQ ID NO: 10667 - DNA, 80 bp, synthetic construct
  misc_feature 1..80: note = Synthetic: >HKU14-cand-16140-16219
  source 1..80: mol_type = other DNA
taaagaagttgtacaatgatctgggtaatcagattttggacagctatagtgttattttaagtacttgtgatggacaaaaa

SEQ ID NO: 10668 - DNA, 80 bp, synthetic construct
  misc_feature 1..80: note = Synthetic: >HKU14-cand-16220-16299
  source 1..80: mol_type = other DNA
tttactgacgagtccttttacaagaacatgtatttaagaagtgcagttatgcaaagcgttggtgcctgcgtagtctgctc

SEQ ID NO: 10669 - DNA, 80 bp, synthetic construct
  misc_feature 1..80: note = Synthetic: >HKU14-cand-16300-16379
  source 1..80: mol_type = other DNA
ctctcaaacatctttacgttgtggcagttgcattagaaaacctcttttgtgctgcaagtgctgttacgatcatgttatgg

SEQ ID NO: 10670 - DNA, 80 bp, synthetic construct
  misc_feature 1..80: note = Synthetic: >HKU14-cand-16380-16459
  source 1..80: mol_type = other DNA
caactgatcataaatatgtcctgagtgtttcaccatatgtgtgtaattcgccaggatgtgatgtaaatgatgttaccaaa

SEQ ID NO: 10671 - DNA, 80 bp, synthetic construct
  misc_feature 1..80: note = Synthetic: >HKU14-cand-16460-16539
  source 1..80: mol_type = other DNA
ttgtatctaggtggtatgtcatattattgtgaagaccataaaccacagtattcttttaagttagtaatgaatggtatggt

SEQ ID NO: 10672 - DNA, 80 bp, synthetic construct
  misc_feature 1..80: note = Synthetic: >HKU14-cand-16540-16619
  source 1..80: mol_type = other DNA
ttttggtttgtataaacagtcttgtaccggatctccgtacatagatgattttaatcgcattgctagctgtaaatggactg

SEQ ID NO: 10673 - DNA, 80 bp, synthetic construct
  misc_feature 1..80: note = Synthetic: >HKU14-cand-16620-16699
  source 1..80: mol_type = other DNA
atgtagacgattacatactagcaaatgaatgtaccgaacgcttaaaattgtttgctgcagagacacaaaaggccactgaa

SEQ ID NO: 10674 - DNA, 80 bp, synthetic construct
  misc_feature 1..80: note = Synthetic: >HKU14-cand-16700-16779
  source 1..80: mol_type = other DNA
gaggcatttaagcagagctatgcatcagcaacaatccaagagattgtaagcgatcgtgaattaattctctcttgggagac

SEQ ID NO: 10675 - DNA, 80 bp, synthetic construct
  misc_feature 1..80: note = Synthetic: >HKU14-cand-16780-16859
  source 1..80: mol_type = other DNA
tggtaaggttaagccaccgcttaataagaattatgtttttactggttaccatttcactaagaatggtaagacagttttgg

SEQ ID NO: 10676 - DNA, 80 bp, synthetic construct
  misc_feature 1..80: note = Synthetic: >HKU14-cand-16860-16939
  source 1..80: mol_type = other DNA
gtgaatatatttttgataagagtgagttgactaatggtgtgtactatcgcgccacaaccacttataagctatctgttggt

SEQ ID NO: 10677 - DNA, 80 bp, synthetic construct
  misc_feature 1..80: note = Synthetic: >HKU14-cand-16910-16989
  source 1..80: mol_type = other DNA
gccacaaccacttataagctatctgttggtgatgtctttgttttgacctctcattcagtagctaatttaagtgctcctac

SEQ ID NO: 10678 - DNA, 80 bp, synthetic construct
  misc_feature 1..80: note = Synthetic: >HKU14-cand-16990-17069
  source 1..80: mol_type = other DNA
gcttgtaccgcaggagaattatagtagcataagatttgctagtgtttatagtgtgcctgaaacgtttcagagcaatgttg

SEQ ID NO: 10679 - DNA, 80 bp, synthetic construct
  misc_feature 1..80: note = Synthetic: >HKU14-cand-19630-19709
  source 1..80: mol_type = other DNA
acaaagtttggagaatgttgtgtataatttagtcaagactggacattatactggacagactggtgaaatgccttgtgcca

SEQ ID NO: 10680 - DNA, 80 bp, synthetic construct
  misc_feature 1..80: note = Synthetic: >HKU14-cand-19710-19789
  source 1..80: mol_type = other DNA
ttataaatgataaagttgtggctaagatcgaacaggaggatgttgttatttttactaataatacaacataccctactaat

SEQ ID NO: 10681 - DNA, 80 bp, synthetic construct
  misc_feature 1..80: note = Synthetic: >HKU14-cand-19790-19869
  source 1..80: mol_type = other DNA
attgctgttgaactctttgctaagcgcagtgttcgacaccaccctgagctcaagctccttagaaacttgaatattgacgt

SEQ ID NO: 10682 - DNA, 80 bp, synthetic construct
  misc_feature 1..80: note = Synthetic: >HKU14-cand-19870-19949
  source 1..80: mol_type = other DNA
gtgctggaagcacgtcatttgggattatgttagacagagtatatactgcagtaatacctatggtgtctgcacatatacag

SEQ ID NO: 10683 - DNA, 80 bp, synthetic construct
  misc_feature 1..80: note = Synthetic: >HKU14-cand-19950-20029
  source 1..80: mol_type = other DNA
atttaaagttcattgataaattgaatgtcctttttgatggtcgtgataatggtgctcttgaagcttttaaacgttgtgag

SEQ ID NO: 10684 - DNA, 80 bp, synthetic construct
  misc_feature 1..80: note = Synthetic: >HKU14-cand-20030-20109
  source 1..80: mol_type = other DNA
aacggcgtttacatttccacgacaaaaattaaaagtcttcagatgattaaaggtccaccacgtgctgaattaaatggcgt

SEQ ID NO: 10685 - DNA, 80 bp, synthetic construct
  misc_feature 1..80: note = Synthetic: >HKU14-cand-20110-20189
  source 1..80: mol_type = other DNA
agtggtggataaagttggagacactgatgttgtgttttacttcgctatgagaaaagatggtcaggatgttatcttcagcc

SEQ ID NO: 10686 - DNA, 80 bp, synthetic construct
  misc_feature 1..80: note = Synthetic: >HKU14-cand-20190-20269
  source 1..80: mol_type = other DNA
atatagacagcctgggagtcagcccttactggagcccacaaggtaatccagggggtaatggtaaacccggtaatgtcggt

SEQ ID NO: 10687 - DNA, 80 bp, synthetic construct
  misc_feature 1..80: note = Synthetic: >HKU14-cand-20270-20349
  source 1..80: mol_type = other DNA
ggtaatgatgctctagcacaggttactatctttactcagagtcgcgttattagctctttcgaatgccgttctgacatgga

SEQ ID NO: 10688 - DNA, 80 bp, synthetic construct
  misc_feature 1..80: note = Synthetic: >HKU14-cand-20350-20429
  source 1..80: mol_type = other DNA
gaaagattttatagctctagatgaagagatgtttattcagaagtatggtctggaggactatgcttttgatcacattgtat

SEQ ID NO: 10689 - DNA, 80 bp, synthetic construct
  misc_feature 1..80: note = Synthetic: >HKU14-cand-20430-20509
  source 1..80: mol_type = other DNA
atggaagtttcaaccagaagattattggaggtttgcatttgcttataggcttgttccggcggcatcaaaaatccaatctg

SEQ ID NO: 10690 - DNA, 80 bp, synthetic construct
  misc_feature 1..80: note = Synthetic: >HKU14-cand-20510-20589
  source 1..80: mol_type = other DNA
gttgtacaggagttcgttagttatgactccagcattcattcttattttattactgatgagaagagtggtagtagtaagag

SEQ ID NO: 10691 - DNA, 80 bp, synthetic construct
  misc_feature 1..80: note = Synthetic: >HKU14-cand-20590-20669
  source 1..80: mol_type = other DNA
tgtctgcactgttgtagatattttgttagatgattttgtggctcttgttaagtcactgaatctaaattgtgtgagtaagg

SEQ ID NO: 10692 - DNA, 80 bp, synthetic construct
  misc_feature 1..80: note = Synthetic: >HKU14-cand-20670-20749
  source 1..80: mol_type = other DNA
ttgttaatgttaatgtggattttaaagattttcagtttatgctgtggtgcaatgaggagaaagttatgactttctacccc

SEQ ID NO: 10693 - DNA, 80 bp, synthetic construct
  misc_feature 1..80: note = Synthetic: >HKU14-cand-20750-20829
  source 1..80: mol_type = other DNA
agattgcaagctgcatctgactggaaacctggttatagtatgcctgtgttatataagtatttgacttcccctatggaaag

SEQ ID NO: 10694 - DNA, 80 bp, synthetic construct
  misc_feature 1..80: note = Synthetic: >HKU2-cand-19530-19609
  source 1..80: mol_type = other DNA
ctggatgctttggtgtaaagactccaaggttgccactttctacccgcagttgcagtctgctgagtggaagtgtggttaca

SEQ ID NO: 10695 - DNA, 80 bp, synthetic construct
  misc_feature 1..80: note = Synthetic: >HKU2-cand-19610-19689
  source 1..80: mol_type = other DNA
gcatgccaagcctttataaaatacagaatatgtgtatggatgcatgtaatttgtataattatggtgctagtattaagttg

SEQ ID NO: 10696 - DNA, 80 bp, synthetic construct
  misc_feature 1..80: note = Synthetic: >HKU2-cand-19690-19769
  source 1..80: mol_type = other DNA
ccagatggtattatgtttaacgttgttaaatatacccagctgtgtcagtttcttaataccactaccatgtgtgttcctca

SEQ ID NO: 10697 - DNA, 80 bp, synthetic construct
  misc_feature 1..80: note = Synthetic: >HKU2-cand-19760-19839
  source 1..80: mol_type = other DNA
gtgttcctcataatatgcgtgtcttacaccttggtgctggctctgataagggtgtagcaccgggtacagctgttttacgt

SEQ ID NO: 10698 - DNA, 80 bp, synthetic construct
  misc_feature 1..80: note = Synthetic: >HKU2-cand-19840-19919
  source 1..80: mol_type = other DNA
agatggctccctgacgatgcaataatcgttgacaatgatgttaatgattatgtcagtgatgctgattttagtataacagg

SEQ ID NO: 10699 - DNA, 80 bp, synthetic construct
  misc_feature 1..80: note = Synthetic: >HKU2-cand-19920-19999
  source 1..80: mol_type = other DNA
tgattgtacacatgtttatgttgaagacaaatttgacctacttatatcagatatgtatgatggaaaaattaagagcatcg

SEQ ID NO: 10700 - DNA, 80 bp, synthetic construct
  misc_feature 1..80: note = Synthetic: >HKU2-cand-20000-20079
  source 1..80: mol_type = other DNA
atggtgacaatgtgtctaaagatggatttttcacttatattaatggatttatacgtgaaaaacttgcgcttggtggcgct

SEQ ID NO: 10701 - DNA, 80 bp, synthetic construct
  misc_feature 1..80: note = Synthetic: >HKU2-cand-20080-20159
  source 1..80: mol_type = other DNA
atggctgttaagattaccgagtatagttggaataaacaactttatgagattgcgcagaagtttgaatattggacactgtt

SEQ ID NO: 10702 - DNA, 80 bp, synthetic construct
  misc_feature 1..80: note = Synthetic: >HKU2-cand-20160-20239
  source 1..80: mol_type = other DNA
ttgtaccagtgttaacacttcttcttctgaagctttccttattggtattaactatcttggtgacttttctagtgctagtg

SEQ ID NO: 10703 - DNA, 80 bp, synthetic construct
  misc_feature 1..80: note = Synthetic: >HKU2-cand-20240-20319
  source 1..80: mol_type = other DNA
ttatagatggcaatgttatgcatgccaactatatattttggcgcaattccactattatgactatgtcatataattcagtt

SEQ ID NO: 10704 - DNA, 80 bp, synthetic construct
  misc_feature 1..80: note = Synthetic: >HKU2-cand-20320-20399
  source 1..80: mol_type = other DNA
cttgatctgtcaaaatttaggtgtaaacataaagcgactgtcattattacacttaaagataaagacattactgatatggt

SEQ ID NO: 10705 - DNA, 80 bp, synthetic construct
  misc_feature 1..80: note = Synthetic: >HKU2-cand-20400-20479
  source 1..80: mol_type = other DNA
gcttggtctgattaaaaatggcaagttgttgattcgcaactcgcaaaaattattaaattttagcaaccatcttgtaacaa

SEQ ID NO: 10706 - DNA, 80 bp, synthetic construct
  misc_feature 1..80: note = Synthetic: >HKU2-cand-20480-20559
  source 1..80: mol_type = other DNA
ctaaatgaaactttttacagttttcacgcttttggcctctattagagtgctttatggctgtgaatccgttgattttaatt

SEQ ID NO: 10707 - DNA, 80 bp, synthetic construct
  misc_feature 1..80: note = Synthetic: >HKU2-cand-20560-20639
  source 1..80: mol_type = other DNA
tgtttaatacaatattttcaacacacagaggtttaagtaataccacctctgttatcactggtgcttacccttccaccaat

SEQ ID NO: 10708 - DNA, 80 bp, synthetic construct
  misc_feature 1..80: note = Synthetic: >HKU2-cand-20640-20719
  source 1..80: mol_type = other DNA
aagtcagactggtcttgtaatacaagaactggtcatttgagtggtagtggtttcggcataggtttgtatgtacagacacc

SEQ ID NO: 10709 - DNA, 80 bp, synthetic construct
  misc_feature 1..80: note = Synthetic: >HKU2-cand-20720-20799
  source 1..80: mol_type = other DNA
acgtgaacaataccagtatgatggttctggtgcaggcggctatactatagctgtttcgcccattcacgttacgaatttga

SEQ ID NO: 10710 - DNA, 80 bp, synthetic construct
  misc_feature 1..80: note = Synthetic: >HKU31-cand-7990-8069
  source 1..80: mol_type = other DNA
gttcaaagaggtttgtaaatcaactacgggtatacctgaatttaattttgttatatatgattctaccgatcgtggccaag

SEQ ID NO: 10711 - DNA, 80 bp, synthetic construct
  misc_feature 1..80: note = Synthetic: >HKU31-cand-8070-8149
  source 1..80: mol_type = other DNA
aaaatttagctaggtcggcatgtgtttattattcacaagttttgtgtaagtctattcttttagtagattcaaatcttatg

SEQ ID NO: 10712 - DNA, 80 bp, synthetic construct
  misc_feature 1..80: note = Synthetic: >HKU31-cand-8150-8229
  source 1..80: mol_type = other DNA
aatactgttggtgactctagtgcgattgccatcagactgttggattcctttattaatagctttgctagtctttataatgt

SEQ ID NO: 10713 - DNA, 80 bp, synthetic construct
  misc_feature 1..80: note = Synthetic: >HKU31-cand-8230-8309
  source 1..80: mol_type = other DNA
ttctagagataagttggagaaattgatttctacagctaaagattgtgttaagagaggtgaagacttgcagagtgtcctta

SEQ ID NO: 10714 - DNA, 80 bp, synthetic construct
  misc_feature 1..80: note = Synthetic: >HKU31-cand-8310-8389
  source 1..80: mol_type = other DNA
aaacattcatacaagctgcacgtgtgcatgctaatgtggagtctgatgttgagactgatagtatagttgatggtatacaa

SEQ ID NO: 10715 - DNA, 80 bp, synthetic construct
  misc_feature 1..80: note = Synthetic: >HKU31-cand-8390-8469
  source 1..80: mol_type = other DNA
tatgctcataaaaatgatattgagctggttactgattcatttaataattatataccatcctatgttaaacctgatagtat

SEQ ID NO: 10716 - DNA, 80 bp, synthetic construct
  misc_feature 1..80: note = Synthetic: >HKU31-cand-8470-8549
  source 1..80: mol_type = other DNA
agcaactgtagatttaggttgccttatagatttgaaagctgcatcagttaatcccgctagcatgaggaatgctaatggcg

SEQ ID NO: 10717 - DNA, 80 bp, synthetic construct
  misc_feature 1..80: note = Synthetic: >HKU31-cand-8550-8629
  source 1..80: mol_type = other DNA
cgtgcgtgtggaatattgatgcatatttaaaactgtccgattctctaaaaagacaaattagagtggcatgtcggaagtgt

SEQ ID NO: 10718 - DNA, 80 bp, synthetic construct
  misc_feature 1..80: note = Synthetic: >HKU31-cand-8630-8709
  source 1..80: mol_type = other DNA
agtcttaacttcaagttaacaacttcgaagcttagagcacaagacaatatattgtctgttaaatttagtgtaaccaaatt

SEQ ID NO: 10719 - DNA, 80 bp, synthetic construct
  misc_feature 1..80: note = Synthetic: >HKU31-cand-8710-8789
  source 1..80: mol_type = other DNA
tgttggtggttctttaaatagtaaattgcgtacatctttgtttaaaatgtatgcagggtttactatttgtttagtaatcc

SEQ ID NO: 10720 - DNA, 80 bp, synthetic construct
  misc_feature 1..80: note = Synthetic: >HKU31-cand-8790-8869
  source 1..80: mol_type = other DNA
ttgcgatattgatgtattgcattttgcctacatttaatatggctaaagtagactttaataatgatcgcatccttggctat

SEQ ID NO: 10721 - DNA, 80 bp, synthetic construct
  misc_feature 1..80: note = Synthetic: >HKU31-cand-8870-8949
  source 1..80: mol_type = other DNA
aaagtgctcgataatggtatagtaagagatataggtattgatgacaaatgctttgctaacaagtataaagcatttgatgc

SEQ ID NO: 10722 - DNA, 80 bp, synthetic construct
  misc_feature 1..80: note = Synthetic: >HKU31-cand-8950-9029
  source 1..80: mol_type = other DNA
atggtatcagcaggaatttggtagtagttatgataatgattacaattgtcctgttgtagttgctgtaatagctggcatag

SEQ ID NO: 10723 - DNA, 80 bp, synthetic construct
  misc_feature 1..80: note = Synthetic: >HKU31-cand-9030-9109
  source 1..80: mol_type = other DNA
caggcgagagagtgccaggtgtgccaacaagtttaacatgggctgggaaccaaatattgttttttgtttctagagttttt

SEQ ID NO: 10724 - DNA, 80 bp, synthetic construct
  misc_feature 1..80: note = Synthetic: >HKU31-cand-9110-9189
  source 1..80: mol_type = other DNA
gcaactaataataacatttgttatacacctaatatggaaattgcttatgaaaagttttcagatagtggttgtgtattggc

SEQ ID NO: 10725 - DNA, 80 bp, synthetic construct
  misc_feature 1..80: note = Synthetic: >HKU31-cand-9190-9269
  source 1..80: mol_type = other DNA
atcagaatgcaccctttttaaagatgcagtaggtaatatggtaccctattgttatgatgctaatgtcttacctggagctg

SEQ ID NO: 10726 - DNA, 80 bp, synthetic construct
  misc_feature 1..80: note = Synthetic: >HKU31-cand-15800-15879
  source 1..80: mol_type = other DNA
agtttgaattgtatgtcaatgtttatagaaattccaaaccggatttcaagtttgtagataaatattatgcttttttaaat

SEQ ID NO: 10727 - DNA, 80 bp, synthetic construct
  misc_feature 1..80: note = Synthetic: >HKU31-cand-15880-15959
  source 1..80: mol_type = other DNA
aagcacttttcaatgatgatactttctgatgatggtgttgtctgctataacaaagattatgcagcgcgtggttatatagc

SEQ ID NO: 10728 - DNA, 80 bp, synthetic construct
  misc_feature 1..80: note = Synthetic: >HKU31-cand-15960-16039
  source 1..80: mol_type = other DNA
tggtatacagaattttaaagaaacattgtattatcagaacaatgtgtttttgtcagaggctaagtgttgggtggaaccgg

SEQ ID NO: 10729 - DNA, 80 bp, synthetic construct
  misc_feature 1..80: note = Synthetic: >HKU31-cand-16040-16119
  source 1..80: mol_type = other DNA
atttagaaaaaggtccacatgagttttgctctcaacacacactattaataaaggaaggtgatgatcactacttcttacct

SEQ ID NO: 10730 - DNA, 80 bp, synthetic construct
  misc_feature 1..80: note = Synthetic: >HKU31-cand-16200-16279
  source 1..80: mol_type = other DNA
gcggtttgtgtctttggctatagatgcttaccctctaacaaagcatgataatatagaataccaaaatgtattctgggtct

SEQ ID NO: 10731 - DNA, 80 bp, synthetic construct
  misc_feature 1..80: note = Synthetic: >HKU31-cand-16360-16439
  source 1..80: mol_type = other DNA
aattcttcaaagttttgggaagagcagttttacaaagatttgtatagtgctccaacaactttacaggctgtgggctcgtg

SEQ ID NO: 10732 - DNA, 80 bp, synthetic construct
  misc_feature 1..80: note = Synthetic: >HKU31-cand-16600-16679
  source 1..80: mol_type = other DNA
gacgtaaccaaattgtatttggggggtatgagttatttttgtgtgaaccacaaaccgatatgttcatttccactatgtgc

SEQ ID NO: 10733 - DNA, 80 bp, synthetic construct
  misc_feature 1..80: note = Synthetic: >HKU31-cand-16680-16759
  source 1..80: mol_type = other DNA
taatggcttggtttttggtttgtataaaaatatgtgtacaggtagtgcttccattactgaatttaataggttggctactt

SEQ ID NO: 10734 - DNA, 80 bp, synthetic construct
  misc_feature 1..80: note = Synthetic: >HKU31-cand-16840-16919
  source 1..80: mol_type = other DNA
cgtgctactgaggaagcatctaagcagtcttatgcaatagccaccatcaaagaaattgttggtgagcgtgaattaattct

SEQ ID NO: 10735 - DNA, 80 bp, synthetic construct
  misc_feature 1..80: note = Synthetic: >HKU5-cand-3680-3759
  source 1..80: mol_type = other DNA
aaaggctctgggcacttcggttgagcggatgaggtcgacgagtgagtgtactgttgttgagactagcttaaaacaggaga

SEQ ID NO: 10736 - DNA, 80 bp, synthetic construct
  misc_feature 1..80: note = Synthetic: >HKU5-cand-3760-3839
  source 1..80: mol_type = other DNA
ctgctgtaatagtcaaaaatgatagctctgccaaaccacaaagggttaaaaagcccaaggcagagaatcctcttaaaaac

SEQ ID NO: 10737 - DNA, 80 bp, synthetic construct
  misc_feature 1..80: note = Synthetic: >HKU5-cand-3840-3919
  source 1..80: mol_type = other DNA
ttcaaacacattgtcttgaacaatgatgttacactagtctttggtgacgctattgctgtggcaagagctactgaagactg

SEQ ID NO: 10738 - DNA, 80 bp, synthetic construct
  misc_feature 1..80: note = Synthetic: >HKU5-cand-3920-3999
  source 1..80: mol_type = other DNA
cattcttgtcaatgccgctaacacccatttgaaacatggcggtggcattgcagctgctattgacagagcatctggtgggc

SEQ ID NO: 10739 - DNA, 80 bp, synthetic construct
  misc_feature 1..80: note = Synthetic: >HKU5-cand-4000-4079
  source 1..80: mol_type = other DNA
ttgtacaagctgaatcagatgactatgtcaacttttatgggccactcaatgtgggtgactctactctcctgaaaggacac

SEQ ID NO: 10740 - DNA, 80 bp, synthetic construct
  misc_feature 1..80: note = Synthetic: >HKU5-cand-4080-4159
  source 1..80: mol_type = other DNA
ggccttgcaactggcatccttcacgtcgtaggcccagacgcgcgtgccaatcaggacattcaacttcttaaacgttgtta

SEQ ID NO: 10741 - DNA, 80 bp, synthetic construct
  misc_feature 1..80: note = Synthetic: >HKU5-cand-4160-4239
  source 1..80: mol_type = other DNA
caaggcgtttaataagtaccccttagttgtgtcgcctctaatctccgcaggcattttctgcgtagaaccaagggtgtcac

SEQ ID NO: 10742 - DNA, 80 bp, synthetic construct
  misc_feature 1..80: note = Synthetic: >HKU5-cand-4240-4319
  source 1..80: mol_type = other DNA
ttgaatatctactctctgttgtacacaccaaaacatatgttgttgtcaactcagagaaggtttataatgatcttgctgct

SEQ ID NO: 10743 - DNA, 80 bp, synthetic construct
  misc_feature 1..80: note = Synthetic: >HKU5-cand-4320-4399
  source 1..80: mol_type = other DNA
ccaaaacctccgactggattaacttattcacacgagggttggcgtggcatcattcgtaatgcaaaatcctttggattcac

SEQ ID NO: 10744 - DNA, 80 bp, synthetic construct
  misc_feature 1..80: note = Synthetic: >HKU5-cand-4400-4479
  source 1..80: mol_type = other DNA
gtgctttatctgcactgatcaatccgcaaacgcaaaacttctcaagggaaggggtgtggatcttactaagaaaactcaaa

SEQ ID NO: 10745 - DNA, 80 bp, synthetic construct
  misc_feature 1..80: note = Synthetic: >HKU5-cand-4480-4559
  source 1..80: mol_type = other DNA
ctgtcgatggtgtcaagtactatctttatagttctaaagacccattggcggacataataactgctgctaatgcctgcaaa

SEQ ID NO: 10746 - DNA, 80 bp, synthetic construct
  misc_feature 1..80: note = Synthetic: >HKU5-cand-4560-4639
  source 1..80: mol_type = other DNA
ggcatctgtgccatgcctatcggttatgtaactcatgggcttgacttagcacaggcagggcaacaagttaagaaaataac

SEQ ID NO: 10747 - DNA, 80 bp, synthetic construct
  misc_feature 1..80: note = Synthetic: >HKU5-cand-4640-4719
  source 1..80: mol_type = other DNA
tgtgccatacgtctgtttgctagcatcaaaggaccaagttcctatcttaaattctgatgttgcagttcaaacaccagaac

SEQ ID NO: 10748 - DNA, 80 bp, synthetic construct
  misc_feature 1..80: note = Synthetic: >HKU5-cand-4720-4799
  source 1..80: mol_type = other DNA
agtctttcattaacactgtcattgctaatgggggttaccattgttggcatcttgtcactggtgaactcatagttaaggga

SEQ ID NO: 10749 - DNA, 80 bp, synthetic construct
  misc_feature 1..80: note = Synthetic: >HKU5-cand-4800-4879
  source 1..80: mol_type = other DNA
gtgtcatatcgaaaactgctaaattggtcagatcaaaccatttgctatgcagataataagttttatgtggtaaaaggaca

SEQ ID NO: 10750 - DNA, 80 bp, synthetic construct
  misc_feature 1..80: note = Synthetic: >HKU5-cand-4880-4959
  source 1..80: mol_type = other DNA
aattgccttaccatttgactcacttgagaagtgtcggacctacctgacttcaagggccgcacaacagaaaaacgtcgatg

SEQ ID NO: 10751 - DNA, 80 bp, synthetic construct
  misc_feature 1..80: note = Synthetic: >HKU9-cand-16800-16879
  source 1..80: mol_type = other DNA
taagaatttacctattaataggtgtagtcgtattgtgccagctaaagcgcgtgttgagtgcttttctaagttcaaagtga

SEQ ID NO: 10752 - DNA, 80 bp, synthetic construct
  misc_feature 1..80: note = Synthetic: >HKU9-cand-16880-16959
  source 1..80: mol_type = other DNA
acgatgtaagcgctcaatacgtgttttctactataaatgctttgcctgaaacaacagcagacattcttgttgtagatgaa

SEQ ID NO: 10753 - DNA, 80 bp, synthetic construct
  misc_feature 1..80: note = Synthetic: >HKU9-cand-16960-17039
  source 1..80: mol_type = other DNA
gttagtatgtgtactaactatgatctaagtatgattaatgcaagggttcgcgctaaacatattgtttatgtaggcgatcc

SEQ ID NO: 10754 - DNA, 80 bp, synthetic construct
  misc_feature 1..80: note = Synthetic: >HKU9-cand-17040-17119
  source 1..80: mol_type = other DNA
tgcgcagttacctgcacctagaacccttcttacgaagggtacgcttgcaccggaacattttaattctgtgtgtaggctta

SEQ ID NO: 10755 - DNA, 80 bp, synthetic construct
  misc_feature 1..80: note = Synthetic: >HKU9-cand-17120-17199
  source 1..80: mol_type = other DNA
tggttgctgtaggtcctgatattttcctggccacttgttataggtgtcctaaggaaatagttgatacagttagcgcttta

SEQ ID NO: 10756 - DNA, 80 bp, synthetic construct
  misc_feature 1..80: note = Synthetic: >HKU9-cand-17200-17279
  source 1..80: mol_type = other DNA
gtttatgataaaaagctaaaggctaataaagttactacgggtgagtgttataagtgctactacaagggtagtgtcactca

SEQ ID NO: 10757 - DNA, 80 bp, synthetic construct
  misc_feature 1..80: note = Synthetic: >HKU9-cand-17280-17359
  source 1..80: mol_type = other DNA
tgactcatctagtgctattaataagccacagttaggtttagttaaggagtttttagttaaaaaccctaagtggcagagtg

SEQ ID NO: 10758 - DNA, 80 bp, synthetic construct
  misc_feature 1..80: note = Synthetic: >HKU9-cand-17360-17439
  source 1..80: mol_type = other DNA
cagtgtttatttcaccttataatagtcaaaattctgttgcacgccgcatgctaggtttgcaaacacagactgttgactcc

SEQ ID NO: 10759 - DNA, 80 bp, synthetic construct
  misc_feature 1..80: note = Synthetic: >HKU9-cand-17440-17519
  source 1..80: mol_type = other DNA
tctcagggttcagagttcgactatgttatttattgtcagacttctgacactgcccatgcattgaatgtaaataggtttaa

SEQ ID NO: 10760 - DNA, 80 bp, synthetic construct
  misc_feature 1..80: note = Synthetic: >HKU9-cand-17520-17599
  source 1..80: mol_type = other DNA
tgtggctattactagagctaagaaaggcattttgtgtgtgatgtcagactctactttgtatgagtctttagaattcacac

SEQ ID NO: 10761 - DNA, 80 bp, synthetic construct
  misc_feature 1..80: note = Synthetic: >HKU9-cand-17600-17679
  source 1..80: mol_type = other DNA
ctctggatgtcaatgattatgtaaaacctaaaatgcagtctgaagtcactgtagggttgtttaaagattgtgctaaggcc

SEQ ID NO: 10762 - DNA, 80 bp, synthetic construct
  misc_feature 1..80: note = Synthetic: >HKU9-cand-17680-17759
  source 1..80: mol_type = other DNA
gagccattaggtccagcctatgcacctacttttgtgtccgtaaatgacaagttcaaattgaacgagtcactttgtgtaca

SEQ ID NO: 10763 - DNA, 80 bp, synthetic construct
  misc_feature 1..80: note = Synthetic: >HKU9-cand-17760-17839
  source 1..80: mol_type = other DNA
ttttgacacaacggaattacaaatgccttataatagacttatttccaaaatgggttttaagtttgatttaaatatacctg

SEQ ID NO: 10764 - DNA, 80 bp, synthetic construct
  misc_feature 1..80: note = Synthetic: >HKU9-cand-17840-17919
  source 1..80: mol_type = other DNA
gttatagtaagttgtttataactcgtgagcaggctattaaggaggtacgtggttggatagggtttgatgttgagggtgca

SEQ ID NO: 10765 - DNA, 80 bp, synthetic construct
  misc_feature 1..80: note = Synthetic: >HKU9-cand-17920-17999
  source 1..80: mol_type = other DNA
catgcatgtggtcccaacattggcactaacctgccactacagatagggttttccactggtgtaaactttgtagttacacc

SEQ ID NO: 10766 - DNA, 80 bp, synthetic construct
  misc_feature 1..80: note = Synthetic: >HKU9-cand-18000-18079
  source 1..80: mol_type = other DNA
tagtggttatatagatacagaatctggttctaggttggctaacgtggtgtctaaggcaccacctggtgatcagtttaaac

SEQ ID NO: 10767 - DNA, 80 bp, synthetic construct
  misc_feature 1..80: note = Synthetic: >Lucheng19-cand-28150-28229
  source 1..80: mol_type = other DNA
aaaaccagccaccttccagcaaacacaaaacttctgggaaaatcaagcttcaaatcagaacaaaatcacagagtacttca

SEQ ID NO: 10768 - DNA, 80 bp, synthetic construct
  misc_feature 1..80: note = Synthetic: >Lucheng19-cand-28230-28309
  source 1..80: mol_type = other DNA
aagcaacaacaccaggtgccggcagttctacagttgaaattgaaaatctagaaataactgatgaaactaacgcctaaaat

SEQ ID NO: 10769 - DNA, 80 bp, synthetic construct
  misc_feature 1..80: note = Synthetic: >Lucheng19-cand-28310-28389
  source 1..80: mol_type = other DNA
gaattgcttgttgctgctgctaattggatctgtaatgggtgcgcccacagtgacatttatcagaagtaaaaccctggagc

SEQ ID NO: 10770 - DNA, 80 bp, synthetic construct
  misc_feature 1..80: note = Synthetic: >Lucheng19-cand-28390-28469
  source 1..80: mol_type = other DNA
agccacaaacccaagaagaattattaactgactacaaacttttggatgacattctaacgcccgacacagcacaagaaatc

SEQ ID NO: 10771 - DNA, 80 bp, synthetic construct
  misc_feature 1..80: note = Synthetic: >Lucheng19-cand-28470-28549
  source 1..80: mol_type = other DNA
actagtccctacacagaagaacacactgaaatcaaaccttgggactggagtcccatgaatgaagacagaaaacgcatttt

SEQ ID NO: 10772 - DNA, 80 bp, synthetic construct
  misc_feature 1..80: note = Synthetic: >Lucheng19-cand-28550-28629
  source 1..80: mol_type = other DNA
ggccctgcttaaatgcaaggacctaatgcagtaggcagagggatctgttcctgaaatttgtaagaagctttaagtgagag

SEQ ID NO: 10773 - DNA, 80 bp, synthetic construct
  misc_feature 1..80: note = Synthetic: >Lucheng19-cand-28630-28709
  source 1..80: mol_type = other DNA
aatcctatggtagcatgctaatataagacactagtgtacagaatcattaccacgtctatagtagggtacacataactatc

SEQ ID NO: 10774 - DNA, 80 bp, synthetic construct
  misc_feature 1..80: note = Synthetic: >Lucheng19-cand-28710-28789
  source 1..80: mol_type = other DNA
tatagatatagaaaacctagatgaacaggacgaaaaactagccacaacacaggagtatccaaagatcgcaagacgagcca

SEQ ID NO: 10775 - DNA, 80 bp, synthetic construct
  misc_feature 1..80: note = Synthetic: >Lucheng19-cand-28790-28869
  source 1..80: mol_type = other DNA
tcaatgccaggaaaaagaatggaagagcccgtaccaccccacttcggaaatccctagtagttatgttaatctaaataggg

SEQ ID NO: 10776 - DNA, 80 bp, synthetic construct
  misc_feature 1..80: note = Synthetic: >MERS-cand-0-79
  source 1..80: mol_type = other DNA
taagtgaatagcttggctatctcacttcccctcgttctcttgcagaactttgattttaacgaacttaaataaaagccctg

SEQ ID NO: 10777 - DNA, 80 bp, synthetic construct
  misc_feature 1..80: note = Synthetic: >MERS-cand-80-159
  source 1..80: mol_type = other DNA
ttgtttagcgtattgttgcacttgtctggtgggattgtggcactaatttgcctgctcatctaggcagtggacatatgctc

SEQ ID NO: 10778 - DNA, 80 bp, synthetic construct
  misc_feature 1..80: note = Synthetic: >MERS-cand-160-239
  source 1..80: mol_type = other DNA
aacactgggtataattctaattgaatactatttttcagttagagcgtcgtgtctcttgtacgtctcggtcacaatacacg

SEQ ID NO: 10779 - DNA, 80 bp, synthetic construct
  misc_feature 1..80: note = Synthetic: >MERS-cand-240-319
  source 1..80: mol_type = other DNA
gtttcgtccggtgcgtggcaattcggggcacatcatgtctttcgtggctggtgtgatcgcgcaaggtgcgcgcggtacgt

SEQ ID NO: 10780 - DNA, 80 bp, synthetic construct
  misc_feature 1..80: note = Synthetic: >MERS-cand-320-399
  source 1..80: mol_type = other DNA
atcgagcagcgctcaactctgaaaaacatcaagaccatgtgtctctaactgtgccactctgtggttcaggaaacctggtt

SEQ ID NO: 10781 - DNA, 80 bp, synthetic construct
  misc_feature 1..80: note = Synthetic: >MERS-cand-400-479
  source 1..80: mol_type = other DNA
gaaaaactttcaccatggttcatggatggcgaaaatgcctatgaagtggtgaaggccatgttacttaaaaaagagccact

SEQ ID NO: 10782 - DNA, 80 bp, synthetic construct
  misc_feature 1..80: note = Synthetic: >MERS-cand-480-559
  source 1..80: mol_type = other DNA
tctctatgtgcccatccggctggctggacacactagacacctcccaggtcctcgtgtgtacctggttgagaggctcattg

SEQ ID NO: 10783 - DNA, 80 bp, synthetic construct
  misc_feature 1..80: note = Synthetic: >MERS-cand-3120-3199
  source 1..80: mol_type = other DNA
tgatgcatcttggtcttctactatgatcttctctcttcaccccgtcgagtgtgacgaggagtgttctgaagtagaggctt

SEQ ID NO: 10784 - DNA, 80 bp, synthetic construct
  misc_feature 1..80: note = Synthetic: >MERS-cand-3200-3279
  source 1..80: mol_type = other DNA
cagatttagaagaaggtgaatcagagtgcatttctgagacttcaactgaacaagttgacgtttctcatgaggtttctgac

SEQ ID NO: 10785 - DNA, 80 bp, synthetic construct
  misc_feature 1..80: note = Synthetic: >MERS-cand-3280-3359
  source 1..80: mol_type = other DNA
gacgagtgggctgctgcagttgatgaagcgttccccctcgatgaagcagaagatgttactgaatctgtgcaagaagaagc

SEQ ID NO: 10786 - DNA, 80 bp, synthetic construct
  misc_feature 1..80: note = Synthetic: >MERS-cand-3360-3439
  source 1..80: mol_type = other DNA
acaaccagtagaagtacctgttgaagatattgcgcaggttgtcatagctgacaccttacaggaaactcctgttgtgtctg

SEQ ID NO: 10787 - DNA, 80 bp, synthetic construct
  misc_feature 1..80: note = Synthetic: >MERS-cand-3440-3519
  source 1..80: mol_type = other DNA
atactgttgaagtcccaccgcaagtggtgaaacttccgtctgaacctcagactatccagcccgaggtaaaagaagttgca

SEQ ID NO: 10788 - DNA, 80 bp, synthetic construct
  misc_feature 1..80: note = Synthetic: >MERS-cand-3520-3599
  source 1..80: mol_type = other DNA
cctgtctatgaggctgataccgaacagacacagagtgttactgttaaacctaagaggttacgcaaaaagcgtaatgttga

SEQ ID NO: 10789 - DNA, 80 bp, synthetic construct
  misc_feature 1..80: note = Synthetic: >MERS-cand-3600-3679
  source 1..80: mol_type = other DNA
ccctttgtccaattttgaacataaggttattacagagtgcgttaccatagttttaggtgacgcaattcaagtagccaagt

SEQ ID NO: 10790 - DNA, 80 bp, synthetic construct
  misc_feature 1..80: note = Synthetic: >MERS-cand-3680-3759
  source 1..80: mol_type = other DNA
gctatggggagtctgtgttagttaatgctgctaacacacatcttaagcatggcggtggtatcgctggtgctattaatgcg

SEQ ID NO: 10791 - DNA, 80 bp, synthetic construct
  misc_feature 1..80: note = Synthetic: >MERS-cand-3760-3839
  source 1..80: mol_type = other DNA
gcttcaaaaggggctgtccaaaaagagtcagatgagtatattctggctaaagggccgttacaagtaggagattcagttct

SEQ ID NO: 10792 - DNA, 80 bp, synthetic construct
  misc_feature 1..80: note = Synthetic: >MERS-cand-3840-3919
  source 1..80: mol_type = other DNA
cttgcaaggccattctctagctaagaatatcctgcatgtcgtaggcccagatgcccgcgctaaacaggatgtttctctcc

SEQ ID NO: 10793 - DNA, 80 bp, synthetic construct
  misc_feature 1..80: note = Synthetic: >MERS-cand-3920-3999
  source 1..80: mol_type = other DNA
ttagtaagtgctataaggctatgaatgcatatcctcttgtagtcactcctcttgtttcagcaggcatatttggtgtaaaa

SEQ ID NO: 10794 - DNA, 80 bp, synthetic construct
  misc_feature 1..80: note = Synthetic: >MERS-cand-4000-4079
  source 1..80: mol_type = other DNA
ccagctgtgtcttttgattatcttattagagaggctaagactagagttttagtcgtcgttaattcccaagatgtctataa

SEQ ID NO: 10795 - DNA, 80 bp, synthetic construct
  misc_feature 1..80: note = Synthetic: >MERS-cand-4080-4159
  source 1..80: mol_type = other DNA
gagtcttaccatagttgacattccacagagtttgactttttcatatgatgggttacgtggcgcaatacgtaaagctaaag

SEQ ID NO: 10796 - DNA, 80 bp, synthetic construct
  misc_feature 1..80: note = Synthetic: >MERS-cand-4160-4239
  source 1..80: mol_type = other DNA
attatggttttactgtttttgtgtgcacagacaactctgctaacactaaagttcttaggaacaagggtgttgattatact

SEQ ID NO: 10797 - DNA, 80 bp, synthetic construct
  misc_feature 1..80: note = Synthetic: >MERS-cand-4240-4319
  source 1..80: mol_type = other DNA
aagaagtttcttacagttgacggtgtgcaatattattgctacacgtctaaggacactttagatgatatcttacaacaggc

SEQ ID NO: 10798 - DNA, 80 bp, synthetic construct
  misc_feature 1..80: note = Synthetic: >MERS-cand-4320-4399
  source 1..80: mol_type = other DNA
taataagtctgttggtattatatctatgcctttgggatatgtgtctcatggtttagacttaattcaagcagggagtgtcg

SEQ ID NO: 10799 - DNA, 80 bp, synthetic construct
  misc_feature 1..80: note = Synthetic: >MERS-cand-6960-7039
  source 1..80: mol_type = other DNA
ttgtgacggtcttgcttcagcttatagggcgaattcatttgatgtacctacattctgcgcaaaccgttctgcaatgtgta

SEQ ID NO: 10800 - DNA, 80 bp, synthetic construct
  misc_feature 1..80: note = Synthetic: >MERS-cand-7040-7119
  source 1..80: mol_type = other DNA
attggtgcttgattagccaagattccataactcactacccagctcttaagatggttcaaacacatcttagccactatgtt

SEQ ID NO: 10801 - DNA, 80 bp, synthetic construct
  misc_feature 1..80: note = Synthetic: >MERS-cand-7120-7199
  source 1..80: mol_type = other DNA
cttaacatagattggttgtggtttgcatttgagactggtttggcatacatgctctatacctcggccttcaactggttgtt

SEQ ID NO: 10802 - DNA, 80 bp, synthetic construct
  misc_feature 1..80: note = Synthetic: >MERS-cand-7200-7279
  source 1..80: mol_type = other DNA
gttggcaggtacattgcattatttctttgcacagacttccatatttgtagactggcggtcatacaattatgctgtgtcta

SEQ ID NO: 10803 - DNA, 80 bp, synthetic construct
  misc_feature 1..80: note = Synthetic: >MERS-cand-7280-7359
  source 1..80: mol_type = other DNA
gtgccttctggttattcacccacattccaatggcgggtttggtacgaatgtataatttgttagcatgcctttggctttta

SEQ ID NO: 10804 - DNA, 80 bp, synthetic construct
  misc_feature 1..80: note = Synthetic: >MERS-cand-7360-7439
  source 1..80: mol_type = other DNA
cgcaagttttatcagcatgtaatcaatggttgcaaagatacggcatgcttgctctgctataagaggaaccgacttactag

SEQ ID NO: 10805 - DNA, 80 bp, synthetic construct
  misc_feature 1..80: note = Synthetic: >MERS-cand-7440-7519
  source 1..80: mol_type = other DNA
agttgaagcttctaccgttgtctgtggtggaaaacgtacgttttatatcacagcaaatggcggtatttcattctgtcgta

SEQ ID NO: 10806 - DNA, 80 bp, synthetic construct
  misc_feature 1..80: note = Synthetic: >MERS-cand-7520-7599
  source 1..80: mol_type = other DNA
ggcataattggaattgtgtggattgtgacactgcaggtgtggggaataccttcatctgtgaagaagtcgcaaatgacctc

SEQ ID NO: 10807 - DNA, 80 bp, synthetic construct
  misc_feature 1..80: note = Synthetic: >MERS-cand-7600-7679
  source 1..80: mol_type = other DNA
actaccgccctacgcaggcctattaacgctacggatagatcacattattatgtggattccgttacagttaaagagactgt

SEQ ID NO: 10808 - DNA, 80 bp, synthetic construct
  misc_feature 1..80: note = Synthetic: >MERS-cand-7680-7759
  source 1..80: mol_type = other DNA
tgttcagtttaattatcgtagagacggtcaaccattctacgagcggtttcccctctgcgcttttacaaatctagataagt

SEQ ID NO: 10809 - DNA, 80 bp, synthetic construct
  misc_feature 1..80: note = Synthetic: >MERS-cand-7760-7839
  source 1..80: mol_type = other DNA
tgaagttcaaagaggtctgtaaaactactactggtatacctgaatacaactttatcatctacgactcatcagatcgtggc

SEQ ID NO: 10810 - DNA, 80 bp, synthetic construct
  misc_feature 1..80: note = Synthetic: >MERS-cand-7840-7919
  source 1..80: mol_type = other DNA
caggaaagtttagctaggtctgcatgtgtttattattctcaagtcttgtgtaaatcaattcttttggttgactcaagttt

SEQ ID NO: 10811 - DNA, 80 bp, synthetic construct
  misc_feature 1..80: note = Synthetic: >MERS-cand-7920-7999
  source 1..80: mol_type = other DNA
ggttacttctgttggtgattctagtgaaatcgccactaaaatgtttgattcctttgttaatagtttcgtctcgctgtata

SEQ ID NO: 10812 - DNA, 80 bp, synthetic construct
  misc_feature 1..80: note = Synthetic: >MERS-cand-8000-8079
  source 1..80: mol_type = other DNA
atgtcacacgcgataagttggaaaaacttatctctactgctcgtgatggcgtaaggcgaggcgataacttccatagtgtc

SEQ ID NO: 10813 - DNA, 80 bp, synthetic construct
  misc_feature 1..80: note = Synthetic: >MERS-cand-8080-8159
  source 1..80: mol_type = other DNA
ttaacaacattcattgacgcagcacgaggccccgcaggtgtggagtctgatgttgagaccaatgaaattgttgactctgt

SEQ ID NO: 10814 - DNA, 80 bp, synthetic construct
  misc_feature 1..80: note = Synthetic: >MERS-cand-8160-8239
  source 1..80: mol_type = other DNA
gcagtatgctcataaacatgacatacaaattactaatgagagttacaataattatgtaccctcatatgttaaacctgata

SEQ ID NO: 10815 - DNA, 80 bp, synthetic construct
  misc_feature 1..80: note = Synthetic: >MERS-cand-10800-10879
  source 1..80: mol_type = other DNA
tgaacagctgctttatgcgatccaacaactttatactgggttccagggaaagcaaatccttggcagtactatgttggaag

SEQ ID NO: 10816 - DNA, 80 bp, synthetic construct
  misc_feature 1..80: note = Synthetic: >MERS-cand-10880-10959
  source 1..80: mol_type = other DNA
atgaattcacacctgaggatgttaatatgcagattatgggtgtggttatgcagagtggtgtgagaaaagttacatatggt

SEQ ID NO: 10817 - DNA, 80 bp, synthetic construct
  misc_feature 1..80: note = Synthetic: >MERS-cand-10960-11039
  source 1..80: mol_type = other DNA
actgcgcattggttgttcgcgacccttgtctcaacctatgtgataatcttacaagccactaaatttactttgtggaacta

SEQ ID NO: 10818 - DNA, 80 bp, synthetic construct
  misc_feature 1..80: note = Synthetic: >MERS-cand-11040-11119
  source 1..80: mol_type = other DNA
cttgtttgagactattcccacacagttgttcccactcttatttgtgactatggccttcgttatgttgttggttaaacaca

SEQ ID NO: 10819 - DNA, 80 bp, synthetic construct
  misc_feature 1..80: note = Synthetic: >MERS-cand-11120-11199
  source 1..80: mol_type = other DNA
aacacacctttttgacacttttcttgttgcctgtggctatttgtttgacttatgcaaacatagtctacgagcccactact

SEQ ID NO: 10820 - DNA, 80 bp, synthetic construct
  misc_feature 1..80: note = Synthetic: >MERS-cand-11200-11279
  source 1..80: mol_type = other DNA
cccatttcgtcagcgctgattgcagttgcaaattggcttgcccccactaatgcttatatgcgcactacacatactgatat

SEQ ID NO: 10821 - DNA, 80 bp, synthetic construct
  misc_feature 1..80: note = Synthetic: >MERS-cand-11280-11359
  source 1..80: mol_type = other DNA
tggtgtctacattagtatgtcacttgtattagtcattgtagtgaagagattgtacaacccatcactttctaactttgcgt

SEQ ID NO: 10822 - DNA, 80 bp, synthetic construct
  misc_feature 1..80: note = Synthetic: >MERS-cand-11360-11439
  source 1..80: mol_type = other DNA
tagcattgtgcagtggtgtaatgtggttgtacacttatagcattggagaagcctcaagccccattgcctatctggttttt

SEQ ID NO: 10823 - DNA, 80 bp, synthetic construct
  misc_feature 1..80: note = Synthetic: >MERS-cand-11440-11519
  source 1..80: mol_type = other DNA
gtcactacactcactagtgattatacgattacagtctttgttactgtcaaccttgcaaaagtttgcacttatgccatctt

SEQ ID NO: 10824 - DNA, 80 bp, synthetic construct
  misc_feature 1..80: note = Synthetic: >MERS-cand-11520-11599
  source 1..80: mol_type = other DNA
tgcttactcaccacagcttacacttgtgtttccggaagtgaagatgatacttttattatacacatgtttaggtttcatgt

SEQ ID NO: 10825 - DNA, 80 bp, synthetic construct
  misc_feature 1..80: note = Synthetic: >MERS-cand-11600-11679
  source 1..80: mol_type = other DNA
gtacttgctattttggtgtcttctctcttttgaaccttaagcttagagcacctatgggtgtctatgactttaaggtctca

SEQ ID NO: 10826 - DNA, 80 bp, synthetic construct
  misc_feature 1..80: note = Synthetic: >MERS-cand-11680-11759
  source 1..80: mol_type = other DNA
acacaagagttcagattcatgactgctaacaatctaactgcacctagaaattcttgggaggctatggctctgaactttaa

SEQ ID NO: 10827 - DNA, 80 bp, synthetic construct
  misc_feature 1..80: note = Synthetic: >MERS-cand-11760-11839
  source 1..80: mol_type = other DNA
gttaataggtattggcggtacaccttgtataaaggttgctgctatgcagtctaaacttacagatcttaaatgcacatctg

SEQ ID NO: 10828 - DNA, 80 bp, synthetic construct
  misc_feature 1..80: note = Synthetic: >MERS-cand-11840-11919
  source 1..80: mol_type = other DNA
tggttctcctctctgtgctccaacagttacacttagaggctaatagtagggcctgggctttctgtgttaaatgccataat

SEQ ID NO: 10829 - DNA, 80 bp, synthetic construct
  misc_feature 1..80: note = Synthetic: >MERS-cand-11920-11999
  source 1..80: mol_type = other DNA
gatatattggcagcaacagaccccagtgaggctttcgagaaattcgtaagtctctttgccactttaatgactttttctgg

SEQ ID NO: 10830 - DNA, 80 bp, synthetic construct
  misc_feature 1..80: note = Synthetic: >MERS-cand-12000-12079
  source 1..80: mol_type = other DNA
taatgtagatcttgatgcgttagctagtgatatttttgacactcctagcgtacttcaagctactctttctgagttttcac

SEQ ID NO: 10831 - DNA, 80 bp, synthetic construct
  misc_feature 1..80: note = Synthetic: >NL63-cand-18230-18309
  source 1..80: mol_type = other DNA
catgcgtttcatacaccagcatatgataaacgtgcttttgttaaattaaaacctatgccctttttttactttgatgacag

SEQ ID NO: 10832 - DNA, 80 bp, synthetic construct
  misc_feature 1..80: note = Synthetic: >NL63-cand-18310-18389
  source 1..80: mol_type = other DNA
tgattgtgatgttgtgcaagaacaagttaattatgtaccccttcgcgctagtagttgtgttacccgttgtaatataggtg

SEQ ID NO: 10833 - DNA, 80 bp, synthetic construct
  misc_feature 1..80: note = Synthetic: >NL63-cand-18390-18469
  source 1..80: mol_type = other DNA
gtgctgtttgttcaaaacatgcaaatttgtatcaaaaatatgttgaggcatataatacatttacacaggctggttttaac

SEQ ID NO: 10834 - DNA, 80 bp, synthetic construct
  misc_feature 1..80: note = Synthetic: >NL63-cand-18470-18549
  source 1..80: mol_type = other DNA
atttgggtaccacatagttttgatgtttataatttgtggcaaatttttattgaaactaatttacaaagtcttgaaaatat

SEQ ID NO: 10835 - DNA, 80 bp, synthetic construct
  misc_feature 1..80: note = Synthetic: >NL63-cand-18550-18629
  source 1..80: mol_type = other DNA
agcatttaatgttgtaaaaaaagggtgttttactggtgttgatggtgagttacctgttgcagttgttaacgacaaagttt

SEQ ID NO: 10836 - DNA, 80 bp, synthetic construct
  misc_feature 1..80: note = Synthetic: >NL63-cand-18630-18709
  source 1..80: mol_type = other DNA
ttgttcgctatggcgatgttgacaacttggtttttacaaataaaacaacattgcctactaatgttgcttttgaattgttt

SEQ ID NO: 10837 - DNA, 80 bp, synthetic construct
  misc_feature 1..80: note = Synthetic: >NL63-cand-18710-18789
  source 1..80: mol_type = other DNA
gcaaaacgaaaaatgggtttaacaccaccattgtctattctcaaaaatctcggtgttgttgctacatataaatttgtttt

SEQ ID NO: 10838 - DNA, 80 bp, synthetic construct
  misc_feature 1..80: note = Synthetic: >NL63-cand-18790-18869
  source 1..80: mol_type = other DNA
atgggattatgaagctgaaagaccttttacctcatatactaagagtgtatgtaaatacactgattttaatgaggatgttt

SEQ ID NO: 10839 - DNA, 80 bp, synthetic construct
  misc_feature 1..80: note = Synthetic: >NL63-cand-18870-18949
  source 1..80: mol_type = other DNA
gtgtttgttttgacaatagtattcagggttcgtatgagcgttttacgcttactacgaacgctgttttattttctactgtt

SEQ ID NO: 10840 - DNA, 80 bp, synthetic construct
  misc_feature 1..80: note = Synthetic: >NL63-cand-18950-19029
  source 1..80: mol_type = other DNA
gtcattaaaaatttaacacctataaagttgaattttggtatgttgaatggtatgccagtttcttctattaagggtgataa

SEQ ID NO: 10841 - DNA, 80 bp, synthetic construct
  misc_feature 1..80: note = Synthetic: >NL63-cand-19030-19109
  source 1..80: mol_type = other DNA
aggtgttgaaaaattagttaattggtacatatatgttcgtaaaaatggtcaatttcaagatcactatgatggtttttaca

SEQ ID NO: 10842 - DNA, 80 bp, synthetic construct
  misc_feature 1..80: note = Synthetic: >NL63-cand-19110-19189
  source 1..80: mol_type = other DNA
ctcaaggtaggaatttatcagactttacaccaagaagtgatatggagtatgattttcttaacatggatatgggtgttttt

SEQ ID NO: 10843 - DNA, 80 bp, synthetic construct
  misc_feature 1..80: note = Synthetic: >NL63-cand-19190-19269
  source 1..80: mol_type = other DNA
attaataaatatggtcttgaggattttaattttgaacatgttgtatatggtgatgtttcaaaaactacattaggaggtct

SEQ ID NO: 10844 - DNA, 80 bp, synthetic construct
  misc_feature 1..80: note = Synthetic: >NL63-cand-19270-19349
  source 1..80: mol_type = other DNA
tcatttgttgatatcacagtttaggcttagtaaaatgggtgttttgaaagctgatgattttgtcactgcttctgacacaa

SEQ ID NO: 10845 - DNA, 80 bp, synthetic construct
  misc_feature 1..80: note = Synthetic: >NL63-cand-19350-19429
  source 1..80: mol_type = other DNA
ctttgaggtgctgtactgttacttatcttaatgaacttagttcaaaagttgtttgtacttatatggatttgttgttggac

SEQ ID NO: 10846 - DNA, 80 bp, synthetic construct
  misc_feature 1..80: note = Synthetic: >NL63-cand-19430-19509
  source 1..80: mol_type = other DNA
gactttgttactatactaaagagtttagatcttggtgtaatatctaaagttcatgaagttattatagataataaacctta

SEQ ID NO: 10847 - DNA, 80 bp, synthetic construct
  misc_feature 1..80: note = Synthetic: >NL63-cand-23360-23439
  source 1..80: mol_type = other DNA
ctgatgtgcttcaagaaaatcagaaaattttggctgcatcatttaataaggctattaataacattgttgcttcttttagt

SEQ ID NO: 10848 - DNA, 80 bp, synthetic construct
  misc_feature 1..80: note = Synthetic: >NL63-cand-23440-23519
  source 1..80: mol_type = other DNA
agcgttaatgatgctattacacaaactgcagaggctatacatactgttactattgcacttaataagattcaggatgttgt

SEQ ID NO: 10849 - DNA, 80 bp, synthetic construct
  misc_feature 1..80: note = Synthetic: >NL63-cand-23520-23599
  source 1..80: mol_type = other DNA
taatcaacagggtagtgctcttaaccatctcacttcacaattgagacataattttcaggccatttctaattcaattcaag

SEQ ID NO: 10850 - DNA, 80 bp, synthetic construct
  misc_feature 1..80: note = Synthetic: >NL63-cand-23600-23679
  source 1..80: mol_type = other DNA
ctatttatgaccggcttgattcaattcaagccgatcaacaagttgacagattaattactggacggcttgcagctttgaat

SEQ ID NO: 10851 - DNA, 80 bp, synthetic construct
  misc_feature 1..80: note = Synthetic: >NL63-cand-23680-23759
  source 1..80: mol_type = other DNA
gcatttgtttcccaagttttgaataaatatactgaagttcgtagttccagacgcttagcacagcagaagattaatgaatg

SEQ ID NO: 10852 - DNA, 80 bp, synthetic construct
  misc_feature 1..80: note = Synthetic: >NL63-cand-23760-23839
  source 1..80: mol_type = other DNA
tgtcaaatcacaatctaatagatatggtttttgtggcaatggcacccatatcttttcaatcgtcaactcagctccagatg

SEQ ID NO: 10853 - DNA, 80 bp, synthetic construct
  misc_feature 1..80: note = Synthetic: >NL63-cand-23840-23919
  source 1..80: mol_type = other DNA
gtttgctttttcttcatactgttttgctgccaactgattacaagaatgtaaaggcgtggtcgggtatctgtgttgatggc

SEQ ID NO: 10854 - DNA, 80 bp, synthetic construct
  misc_feature 1..80: note = Synthetic: >NL63-cand-23920-23999
  source 1..80: mol_type = other DNA
atttatggctatgttctgcgtcaacctaacttggttctttattctgataatggtgtctttcgtgtaacttccagggtcat

SEQ ID NO: 10855 - DNA, 80 bp, synthetic construct
  misc_feature 1..80: note = Synthetic: >NL63-cand-24000-24079
  source 1..80: mol_type = other DNA
gtttcaacctcgtttacctgttttgtctgattttgtgcaaatatataattgtaatgttacttttgttaacatatctcgtg

SEQ ID NO: 10856 - DNA, 80 bp, synthetic construct
  misc_feature 1..80: note = Synthetic: >NL63-cand-24080-24159
  source 1..80: mol_type = other DNA
tcgagttacatactgtcatacctgactacgttgatgttaataaaacattacaagagtttgcacaaaacttaccaaagtat

SEQ ID NO: 10857 - DNA, 80 bp, synthetic construct
  misc_feature 1..80: note = Synthetic: >NL63-cand-24160-24239
  source 1..80: mol_type = other DNA
gttaagcctaattttgacttgactccttttaatttaacatatcttaatttgagttctgagttgaagcaactcgaagctaa

SEQ ID NO: 10858 - DNA, 80 bp, synthetic construct
  misc_feature 1..80: note = Synthetic: >NL63-cand-24240-24319
  source 1..80: mol_type = other DNA
aactgctagtcttttccaaactactgttgaattacaaggtcttattgatcagattaacagtacatatgttgatttgaagt

SEQ ID NO: 10859 - DNA, 80 bp, synthetic construct
  misc_feature 1..80: note = Synthetic: >NL63-cand-24320-24399
  source 1..80: mol_type = other DNA
tgcttaataggtttgaaaattatattaaatggccttggtgggtttggctcattatttctgttgtttttgttgtattgttg

SEQ ID NO: 10860 - DNA, 80 bp, synthetic construct
  misc_feature 1..80: note = Synthetic: >NL63-cand-24400-24479
  source 1..80: mol_type = other DNA
agtcttcttgtgttttgttgtctttctacaggttgttgtggttgttgcaattgtttaacttcatcaatgcgaggttgttg

SEQ ID NO: 10861 - DNA, 80 bp, synthetic construct
  misc_feature 1..80: note = Synthetic: >NL63-cand-24480-24559
  source 1..80: mol_type = other DNA
tgattgtggttcaactaaacttccttattacgaatttgaaaaggtccacgttcaataatgcctttcggtggcctatttca

SEQ ID NO: 10862 - DNA, 80 bp, synthetic construct
  misc_feature 1..80: note = Synthetic: >NL63-cand-24560-24639
  source 1..80: mol_type = other DNA
acttactcttgaaagtactattaataagagtgtggctaatctcaaattaccacctcatgatgttactgtcttgcgtgaca

SEQ ID NO: 10863 - DNA, 80 bp, synthetic construct
  misc_feature 1..80: note = Synthetic: >NL63-cand-27200-27279
  source 1..80: mol_type = other DNA
ctaaaccattggctgatgatgattcagccattatagaaattgtcaacgaggttttgcattaaattgttttgtaattccag

SEQ ID NO: 10864 - DNA, 80 bp, synthetic construct
  misc_feature 1..80: note = Synthetic: >NL63-cand-27280-27359
  source 1..80: mol_type = other DNA
ttgaatgtttattattattagttgcaaccccatgcgtttagcgcatgataagggtttagtcttacacacaatggtaggcc

SEQ ID NO: 10865 - DNA, 80 bp, synthetic construct
  misc_feature 1..80: note = Synthetic: >NL63-cand-27360-27439
  source 1..80: mol_type = other DNA
agtgatagtaaagtgtaagtaatttgctatcatattaacatgtctagaggaaagtcagaactttttctgtttgtgttgtt

SEQ ID NO: 10866 - DNA, 80 bp, synthetic construct
  misc_feature 1..80: note = Synthetic: >NL63-cand-27440-27519
  source 1..80: mol_type = other DNA
ggagtacttaaagatcgcataggcgcgccaacaatggaagagccaacaacatatctaaaaatgttttgtctggtacttgt

SEQ ID NO: 10867 - DNA, 80 bp, synthetic construct
  misc_feature 1..80: note = Synthetic: >PEDV-cand-10-89
  source 1..80: mol_type = other DNA
tctatctacggatagttagctctttttctagactcttgtctactcaattcaactaaacagaaattttgtccttccggccg

SEQ ID NO: 10868 - DNA, 80 bp, synthetic construct
  misc_feature 1..80: note = Synthetic: >PEDV-cand-90-169
  source 1..80: mol_type = other DNA
catgtccatgctgctggaagctgacgtggaatttcattaggtttgcttaagtagccatcgcaagtgctgtgctgtcctct

SEQ ID NO: 10869 - DNA, 80 bp, synthetic construct
  misc_feature 1..80: note = Synthetic: >PEDV-cand-170-249
  source 1..80: mol_type = other DNA
agttcctggttggcgttccgtcgccttctacatactagacaaacagccttcctccggttccgtctgggggttgtgtggat

SEQ ID NO: 10870 - DNA, 80 bp, synthetic construct
  misc_feature 1..80: note = Synthetic: >PEDV-cand-250-329
  source 1..80: mol_type = other DNA
aactagttccgtctagtttgaaaccagtaactgtcggctatggctagcaaccatgttacattggcttttgccaatgatgc

SEQ ID NO: 10871 - DNA, 80 bp, synthetic construct
  misc_feature 1..80: note = Synthetic: >PEDV-cand-330-409
  source 1..80: mol_type = other DNA
agaaatttcagcttttggcttttgcactgctagtgaagccgtctcatactattctgaggccgccgctagtggatttatgc

SEQ ID NO: 10872 - DNA, 80 bp, synthetic construct
  misc_feature 1..80: note = Synthetic: >PEDV-cand-410-489
  source 1..80: mol_type = other DNA
aatgccgtttcgtgtccttcgatctcgctgacactgttgagggattgcttcccgaagactatgtcatggtggtggtcggc

SEQ ID NO: 10873 - DNA, 80 bp, synthetic construct
  misc_feature 1..80: note = Synthetic: >PEDV-cand-490-569
  source 1..80: mol_type = other DNA
actaccaagcttagtgcgtatgtggacacttttggtagccgccccaaaaacatttgtggttggctgttattttctaactg

SEQ ID NO: 10874 - DNA, 80 bp, synthetic construct
  misc_feature 1..80: note = Synthetic: >PEDV-cand-570-649
  source 1..80: mol_type = other DNA
taattacttcctcgaagagttagagcttacttttggtcgtcgtggtggtaacatcgtgccagttgaccaatacatgtgtg

SEQ ID NO: 10875 - DNA, 80 bp, synthetic construct
  misc_feature 1..80: note = Synthetic: >PEDV-cand-650-729
  source 1..80: mol_type = other DNA
gcgctgacggtaaacctgttcttcaggaatccgaatgggagtatacagatttctttgctgactccgaagacggtcaactc

SEQ ID NO: 10876 - DNA, 80 bp, synthetic construct
  misc_feature 1..80: note = Synthetic: >PEDV-cand-730-809
  source 1..80: mol_type = other DNA
aacattgctggtatcacttatgtgaaggcctggattgtagagcgatcggatgtctcttatgcgagtcagaatttaacatc

SEQ ID NO: 10877 - DNA, 80 bp, synthetic construct
  misc_feature 1..80: note = Synthetic: >PEDV-cand-810-889
  source 1..80: mol_type = other DNA
tattaagtctattacttactgttcaacctatgagcatacttttcctgatggtactgccatgaaggttgcacgtactccaa

SEQ ID NO: 10878 - DNA, 80 bp, synthetic construct
  misc_feature 1..80: note = Synthetic: >PEDV-cand-890-969
  source 1..80: mol_type = other DNA
agattaagaagactgttgtcttgtctgagccacttgctactatctacagggaaattggttctccttttgtggataatggg

SEQ ID NO: 10879 - DNA, 80 bp, synthetic construct
  misc_feature 1..80: note = Synthetic: >SARSCoV-cand-6220-6299
  source 1..80: mol_type = other DNA
ttggtgtttacgttgtctttggagtacaaagccagtagatacttcaaattcatttgaagttctggcagtagaagacacac

SEQ ID NO: 10880 - DNA, 80 bp, synthetic construct
  misc_feature 1..80: note = Synthetic: >SARSCoV-cand-6300-6379
  source 1..80: mol_type = other DNA
aaggaatggacaatcttgcttgtgaaagtcaacaacccacctctgaagaagtagtggaaaatcctaccatacagaaggaa

SEQ ID NO: 10881 - DNA, 80 bp, synthetic construct
  misc_feature 1..80: note = Synthetic: >SARSCoV-cand-6460-6539
  source 1..80: mol_type = other DNA
acaagagttaggtcatgaggatcttatggctgcttatgtggaaaacacaagcattaccattaagaaacctaatgagcttt

SEQ ID NO: 10882 - DNA, 80 bp, synthetic construct
  misc_feature 1..80: note = Synthetic: >SARSCoV-cand-6540-6619
  source 1..80: mol_type = other DNA
cactagccttaggtttaaaaacaattgccactcatggtattgctgcaattaatagtgttccttggagtaaaattttggct

SEQ ID NO: 10883 - DNA, 80 bp, synthetic construct
  misc_feature 1..80: note = Synthetic: >SARSCoV-cand-6620-6699
  source 1..80: mol_type = other DNA
tatgtcaaaccattcttaggacaagcagcaattacaacatcaaattgcgctaagagattagcacaacgtgtgtttaacaa

SEQ ID NO: 10884 - DNA, 80 bp, synthetic construct
  misc_feature 1..80: note = Synthetic: >SARSCoV-cand-6700-6779
  source 1..80: mol_type = other DNA
ttatatgccttatgtgtttacattattgttccaattgtgtacttttactaaaagtaccaattctagaattagagcttcac

SEQ ID NO: 10885 - DNA, 80 bp, synthetic construct
  misc_feature 1..80: note = Synthetic: >SARSCoV-cand-6770-6849
  source 1..80: mol_type = other DNA
agagcttcactacctacaactattgctaaaaatagtgttaagagtgttgctaaattatgtttggatgccggcattaatta

SEQ ID NO: 10886 - DNA, 80 bp, synthetic construct
  misc_feature 1..80: note = Synthetic: >SARSCoV-cand-6850-6929
  source 1..80: mol_type = other DNA
tgtgaagtcacccaaattttctaaattgttcacaatcgctatgtggctattgttgttaagtatttgcttaggttctctaa

SEQ ID NO: 10887 - DNA, 80 bp, synthetic construct
  misc_feature 1..80: note = Synthetic: >SARSCoV-cand-6930-7009
  source 1..80: mol_type = other DNA
tctgtgtaactgctgcttttggtgtactcttatctaattttggtgctccttcttattgtaatggcgttagagaattgtat

SEQ ID NO: 10888 - DNA, 80 bp, synthetic construct
  misc_feature 1..80: note = Synthetic: >SARSCoV-cand-7010-7089
  source 1..80: mol_type = other DNA
cttaattcgtctaacgttactactatggatttctgtgaaggttcttttccttgcagcatttgtttaagtggattagactc

SEQ ID NO: 10889 - DNA, 80 bp, synthetic construct
  misc_feature 1..80: note = Synthetic: >SARSCoV-cand-7090-7169
  source 1..80: mol_type = other DNA
ccttgattcttatccagctcttgaaaccattcaggtgacgatttcatcgtacaagctagacttgacaattttaggtctgg

SEQ ID NO: 10890 - DNA, 80 bp, synthetic construct
  misc_feature 1..80: note = Synthetic: >SARSCoV-cand-7170-7249
  source 1..80: mol_type = other DNA
ccgctgagtgggttttggcatatatgttgttcacaaaattcttttatttattaggtctttcagctataatgcaggtgttc

SEQ ID NO: 10891 - DNA, 80 bp, synthetic construct
  misc_feature 1..80: note = Synthetic: >SARSCoV-cand-7250-7329
  source 1..80: mol_type = other DNA
tttggctattttgctagtcatttcatcagcaattcttggctcatgtggtttatcattagtattgtacaaatggcacccgt

SEQ ID NO: 10892 - DNA, 80 bp, synthetic construct
  misc_feature 1..80: note = Synthetic: >SARSCoV-cand-7330-7409
  source 1..80: mol_type = other DNA
ttctgcaatggttaggatgtacatcttctttgcttctttctactacatatggaagagctatgttcatatcatggatggtt

SEQ ID NO: 10893 - DNA, 80 bp, synthetic construct
  misc_feature 1..80: note = Synthetic: >SARSCoV-cand-7410-7489
  source 1..80: mol_type = other DNA
gcacctcttcgacttgcatgatgtgctataagcgcaatcgtgccacacgcgttgagtgtacaactattgttaatggcatg

SEQ ID NO: 10894 - DNA, 80 bp, synthetic construct
  misc_feature 1..80: note = Synthetic: >Shrew-cand-22100-22179
  source 1..80: mol_type = other DNA
tgtgagtaaaaatgattcaaactggtacattacaccaaggaataagtacgtacctaagaatatcacgaatagtgatatta

SEQ ID NO: 10895 - DNA, 80 bp, synthetic construct
  misc_feature 1..80: note = Synthetic: >Shrew-cand-22180-22259
  source 1..80: mol_type = other DNA
tatttactacttattcggagaattttaccgttattaataacacaattcaatttccaggtattgaatttccacaagatggt

SEQ ID NO: 10896 - DNA, 80 bp, synthetic construct
  misc_feature 1..80: note = Synthetic: >Shrew-cand-22260-22339
  source 1..80: mol_type = other DNA
gattttgatggacaaattaaaaatgtcacattagaattacaaagtttgaaagatgtggttgctaatatgtcttatttaga

SEQ ID NO: 10897 - DNA, 80 bp, synthetic construct
  misc_feature 1..80: note = Synthetic: >Shrew-cand-22340-22419
  source 1..80: mol_type = other DNA
tttaagcaatcacacagcgttgttgaaaaatattagtgaagaagtgaaaaaaatgaacattaccgtttcccaatttaaac

SEQ ID NO: 10898 - DNA, 80 bp, synthetic construct
  misc_feature 1..80: note = Synthetic: >Shrew-cand-22420-22499
  source 1..80: mol_type = other DNA
aatatgttaaatatgtgaaatggccttggtatgtttggcttttgatagtaatggctttgattgcttttggtttggtgtgt

SEQ ID NO: 10899 - DNA, 80 bp, synthetic construct
  misc_feature 1..80: note = Synthetic: >Shrew-cand-22500-22579
  source 1..80: mol_type = other DNA
ttttggatttttatgtgtactggttgttgtggtttgtgtgattgtattagaagaagttgttgtgattctaatacatatga

SEQ ID NO: 10900 - DNA, 80 bp, synthetic construct
  misc_feature 1..80: note = Synthetic: >Shrew-cand-22580-22659
  source 1..80: mol_type = other DNA
accaatcgaaaaaatacacattcaataatggattttttgagttttaaccttggtggtttatttttgcctgctcttgtcaa

SEQ ID NO: 10901 - DNA, 80 bp, synthetic construct
  misc_feature 1..80: note = Synthetic: >Shrew-cand-22660-22739
  source 1..80: mol_type = other DNA
tcctaggaggtatttccatattgctttagcaaatggtagtactgttaggattgttgatacaggttcagaatgtgtaagcc

SEQ ID NO: 10902 - DNA, 80 bp, synthetic construct
  misc_feature 1..80: note = Synthetic: >Shrew-cand-22740-22819
  source 1..80: mol_type = other DNA
atgactacaactatatcaaacatagtgttgattgttttgtagtctttgtttatacattgttttattggtatgtgttttca

SEQ ID NO: 10903 - DNA, 80 bp, synthetic construct
  misc_feature 1..80: note = Synthetic: >Shrew-cand-22820-22899
  source 1..80: mol_type = other DNA
caaaagtttaataagccgctgttaagaatattgggtgtgttagaaagattgtggatgttgttaatgacaatttgtgtctt

SEQ ID NO: 10904 - DNA, 80 bp, synthetic construct
  misc_feature 1..80: note = Synthetic: >Shrew-cand-22900-22979
  source 1..80: mol_type = other DNA
atattatgattcacttcttggtttagtgttagtaattgttttaataataaaacaaggatatctcggttatctgtgttata

SEQ ID NO: 10905 - DNA, 80 bp, synthetic construct
  misc_feature 1..80: note = Synthetic: >Shrew-cand-22980-23059
  source 1..80: mol_type = other DNA
aatacaagacatttgatttcttgttatataacactagtttaatgttctatctaaaagacaaaaagcaggcatatacacat

SEQ ID NO: 10906 - DNA, 80 bp, synthetic construct
  misc_feature 1..80: note = Synthetic: >Shrew-cand-23060-23139
  source 1..80: mol_type = other DNA
ttttgtgattatcatacttttatcaccctttgtggtggtaataaacatgttaatcttaatggtgtaatttgcttttttga

SEQ ID NO: 10907 - DNA, 80 bp, synthetic construct
  misc_feature 1..80: note = Synthetic: >Shrew-cand-23140-23219
  source 1..80: mol_type = other DNA
tactttagatgaactttgtttaacagtgattggttattatgaattgattttgccaaatgtgaaaaaggttgaaggatttg

SEQ ID NO: 10908 - DNA, 80 bp, synthetic construct
  misc_feature 1..80: note = Synthetic: >Shrew-cand-23220-23299
  source 1..80: mol_type = other DNA
aaggtgattgttgttatatttttagtaaagagcctgtggttagtataattaatatactaaactgtgaggcagaaagtgat

SEQ ID NO: 10909 - DNA, 80 bp, synthetic construct
  misc_feature 1..80: note = Synthetic: >Shrew-cand-23300-23379
  source 1..80: mol_type = other DNA
tatgttgccgttgatttataatgataatggacttgtagtttctgtgtttttgtggtttttaattttaattgtgtttttgt

SEQ ID NO: 10910 - DNA, 80 bp, synthetic construct
  misc_feature 1..80: note = Synthetic: >BtSk_AlphaCoV-cand-14210-14289
  source 1..80: mol_type = other DNA
aagagcgagcacgcactgttggtggtgtttcactcttgtctaccatgactactagacaataccaccagaaacacctgaaa

SEQ ID NO: 10911 - DNA, 80 bp, synthetic construct
  misc_feature 1..80: note = Synthetic: >Sk512R-cand-14240-14319
  source 1..80: mol_type = other DNA
attagtggtaaagagcgagcacgcactgttggtggtgtttcactcttgtctaccatgactactagacaataccaccagaa

SEQ ID NO: 10912 - DNA, 80 bp, synthetic construct
  misc_feature 1..80: note = Synthetic: >Sb512-cand-14260-14339
  source 1..80: mol_type = other DNA
atcgagcacgcactgttggtggtgtttcactcttgtctaccatgactactagacaataccaccagaaacacctgaaatct

SEQ ID NO: 10913 - DNA, 80 bp, synthetic construct
  misc_feature 1..80: note = Synthetic: >AlphaSp-cand-14270-14349
  source 1..80: mol_type = other DNA
cactgttggtggtgtttcactcttgtctaccatgactactagacaataccaccagaaacacctgaaatctattgtcaaca

SEQ ID NO: 10914 - DNA, 80 bp, synthetic construct
  misc_feature 1..80: note = Synthetic: >Sb512-cand-16740-16819
  source 1..80: mol_type = other DNA
gctgaaattgttaatacagtttctgagatggtttacgagaaccagtttgtgcccgtaaaatctgagagcaaagagtgctt

SEQ ID NO: 10915 - DNA, 80 bp, synthetic construct
  misc_feature 1..80: note = Synthetic: >BtSk_AlphaCoV-cand-16690-16769
  source 1..80: mol_type = other DNA
ccagctgaaattgttaatacagtttctgagatggtttacgagaaccagtttgtgcccgtaaaatctgagagcaaagagtg

SEQ ID NO: 10916 - DNA, 80 bp, synthetic construct
  misc_feature 1..80: note = Synthetic: >Sk512R-cand-16720-16799
  source 1..80: mol_type = other DNA
ttatcgttgtccagctgaaattgttaatacagtttctgagatggtttacgagaaccagtttgtgcccgtaaaatctgaga

SEQ ID NO: 10917 - DNA, 80 bp, synthetic construct
  misc_feature 1..80: note = Synthetic: >Sb512-cand-11070-11149
  source 1..80: mol_type = other DNA
tgacttgaagtgcactaatgttgtgttgttgggttgtttatccaatatgaacattgctgctaattcaagggagtgggctt

SEQ ID NO: 10918 - DNA, 80 bp, synthetic construct
  misc_feature 1..80: note = Synthetic: >Sk512R-cand-11060-11139
  source 1..80: mol_type = other DNA
cactgacttgaagtgcactaatgttgtgttgttgggttgcttatccaatatgaacattgctgctaattcaagggagtggg

SEQ ID NO: 10919 - DNA, 80 bp, synthetic construct
  misc_feature 1..80: note = Synthetic: >BtSk_AlphaCoV-cand-11030-11109
  source 1..80: mol_type = other DNA
ttgaagtgcactaatgttgtgttgttgggttgcttatccaatatgaacattgctgctaattcaagggagtgggcttattg

SEQ ID NO: 10920 - DNA, 80 bp, synthetic construct
  misc_feature 1..80: note = Synthetic: >HKU15-cand-13370-13449
  source 1..80: mol_type = other DNA
actatctgaagtggtagtctctggtaacaacctctatgtaaaaccaggtggcactagcagtggtgatgcaaccacagctt

SEQ ID NO: 10921 - DNA, 80 bp, synthetic construct
  misc_feature 1..80: note = Synthetic: >Quail-cand-13310-13389
  source 1..80: mol_type = other DNA
tgctatctgaagtggtagtctctggcaataatctttatgtaaaaccaggtggcactagcagtggtgatgcaaccacagct

SEQ ID NO: 10922 - DNA, 80 bp, synthetic construct
  misc_feature 1..80: note = Synthetic: >HKU12-cand-13350-13429
  source 1..80: mol_type = other DNA
ttgccaggtactgtcagaagttgtggtgtctggtaataatctatatgttaaaccaggtggcactagcagtggtgatgcaa

SEQ ID NO: 10923 - DNA, 80 bp, synthetic construct
  misc_feature 1..80: note = Synthetic: >AcCoV_JC34-cand-9010-9089
  source 1..80: mol_type = other DNA
catctggtttggttgaaccttgtattgttcgtgtaacttaccacaactcttaccttaatggtgtctggcttggcgatcag

SEQ ID NO: 10924 - DNA, 80 bp, synthetic construct
  misc_feature 1..80: note = Synthetic: >HKU4R-cand-12030-12109
  source 1..80: mol_type = other DNA
gtaaagcgtggtcatattgtgttaagttacacaatgaaattttggctgcggttgatcctacagaagcttttgaaaggttt

SEQ ID NO: 10925 - DNA, 80 bp, synthetic construct
  misc_feature 1..80: note = Synthetic: >HKU4-cand-12030-12109
  source 1..80: mol_type = other DNA
gtctaatagtaaggcgtggtcatattgtgttaagttacacaatgaaattttggctgcggttgatcctacagaagcttttg

SEQ ID NO: 10926 - DNA, 80 bp, synthetic construct
  misc_feature 1..80: note = Synthetic: >BetaSp-cand-29580-29659
  source 1..80: mol_type = other DNA
tagcatgtttgtttatgtcatcaagatgataattctttggctcatgtggcctttgactatcattttggtcatttttaatt

SEQ ID NO: 10927 - DNA, 80 bp, synthetic construct
  misc_feature 1..80: note = Synthetic: >HKU5R-cand-30090-30169
  source 1..80: mol_type = other DNA
gaaacgcgttgttcaaggcagtatcacccaacgttcagcaggcgtgcctagctttgaggatgttgtggatgccattttcc

SEQ ID NO: 10928 - DNA, 80 bp, synthetic construct
  misc_feature 1..80: note = Synthetic: >WIV16-cand-28670-28749
  source 1..80: mol_type = other DNA
aaactaaaatgtctgataatggaccccaaccaaatcagcgtagtgccccccgcattacatttggtggacccacagattca

SEQ ID NO: 10929 - DNA, 80 bp, synthetic construct
  misc_feature 1..80: note = Synthetic: >HKU15-cand-8800-8879
  source 1..80: mol_type = other DNA
actaatatgtcctacattatgggactctcgcaaacagctcgagtccctgtagaacgtatcctcaataccattatacagct

SEQ ID NO: 10930 - DNA, 80 bp, synthetic construct
  misc_feature 1..80: note = Synthetic: >HghCoV1-cand-3320-3399
  source 1..80: mol_type = other DNA
tcaccgtctgcggcggcggaaaaaatagtgccaatgcatgatgtaagtgatgactctgcttcaaacaatgaagagagttt

SEQ ID NO: 10931 - DNA, 80 bp, synthetic construct
  misc_feature 1..80: note = Synthetic: >HghCoV1-cand-28050-28129
  source 1..80: mol_type = other DNA
aatttagtttcgcagattatatctggtttactagctgctgtctctgtatttatgtggcttggctactttctacagagttt

SEQ ID NO: 10932 - DNA, 80 bp, synthetic construct
  misc_feature 1..80: note = Synthetic: >BetaSp-cand-22290-22369
  source 1..80: mol_type = other DNA
gatgttaaaggttgtgaagaattgcatgaagatgttgttgagtatattagagaaaagggatgtgttgcagatcagtccag

SEQ ID NO: 10933 - DNA, 80 bp, synthetic construct
  misc_feature 1..80: note = Synthetic: >HKU15-cand-16500-16579
  source 1..80: mol_type = other DNA
gctcctcacactgattatatatgctttgtcacttgggctcaccagcttgagctagcgacaatgcgctactttgtcaaact

SEQ ID NO: 10934 - DNA, 80 bp, synthetic construct
  misc_feature 1..80: note = Synthetic: >SEAC-cand-22040-22119
  source 1..80: mol_type = other DNA
atggtaaattgcactaacccacttggtgatgggttttgtgctgatttgctaggtaatgtcgctgttaggcgtatgacttt

SEQ ID NO: 10935 - DNA, 80 bp, synthetic construct
  misc_feature 1..80: note = Synthetic: >HKU2-cand-22080-22159
  source 1..80: mol_type = other DNA
aattgcactaacccacttggtgatgggttttgtgctgatttgctaggtaatgtcgctgttaggcgtatgacttttgaaaa

SEQ ID NO: 10936 - DNA, 80 bp, synthetic construct
  misc_feature 1..80: note = Synthetic: >HKU4R-cand-280-359
  source 1..80: mol_type = other DNA
gcaaggtgcgcgtggtaagtatcgagcagagctctataatgaaaaaagaagtgaccatgttgcctgtacagtaccacttt

SEQ ID NO: 10937 - DNA, 80 bp, synthetic construct
  misc_feature 1..80: note = Synthetic: >HKU4-cand-290-369
  source 1..80: mol_type = other DNA
aaggtgcgcgtggtaagtatcgagcagagctctataatgaaaaaagaagtgaccatgttgcttgtacagtaccactttgt

SEQ ID NO: 10938 - DNA, 80 bp, synthetic construct
  misc_feature 1..80: note = Synthetic: >HKU10R-cand-26220-26299
  source 1..80: mol_type = other DNA
gttttatgtcagatcgaaaaacggcgactactctgctgtaacgagttctgctgattcgcttacagaagacgagaaacttt

SEQ ID NO: 10939 - DNA, 80 bp, synthetic construct
  misc_feature 1..80: note = Synthetic: >BetaSp-cand-29260-29339
  source 1..80: mol_type = other DNA
ggtagcagctttggcaacatttaaactatgtattcaactttgcggtatgtgtaatactttagtagtgtccccttctattt

SEQ ID NO: 10940 - DNA, 80 bp, synthetic construct
  misc_feature 1..80: note = Synthetic: >HKU4-cand-13950-14029
  source 1..80: mol_type = other DNA
ttgcgccactttgaccagaataattgtgaagtgttaaagagcatattagttaaatatggttgctgtgaacagtcatattt

SEQ ID NO: 10941 - DNA, 80 bp, synthetic construct
  misc_feature 1..80: note = Synthetic: >HKU4R-cand-13950-14029
  source 1..80: mol_type = other DNA
ctttgaccagaataattgtgaagtgttaaagagcatattagttaaatatggttgctgtgaacagtcatattttgataata

SEQ ID NO: 10942 - DNA, 80 bp, synthetic construct
  misc_feature 1..80: note = Synthetic: >Lucheng19-cand-23920-23999
  source 1..80: mol_type = other DNA
taatggttttaacaacctcacacagtatgtggcagatggctttaaaaccaccagtcaagcactctcaaccatacaagctg

SEQ ID NO: 10943 - DNA, 80 bp, synthetic construct
  misc_feature 1..80: note = Synthetic: >HghCoV1-cand-3000-3079
  source 1..80: mol_type = other DNA
ttgctgatctgttagctaagcttcttcgcggcatagcgttagatgattttgatttggaagattttatagataccaaagtt

SEQ ID NO: 10944 - DNA, 80 bp, synthetic construct
  misc_feature 1..80: note = Synthetic: >MsbCoV1-cand-2880-2959
  source 1..80: mol_type = other DNA
acccttgtgaccagaacaattgcttctcacagtgttttaagaaggttggtggatctgctgttacattctctgaaaaagtt

SEQ ID NO: 10945 - DNA, 80 bp, synthetic construct
  misc_feature 1..80: note = Synthetic: >BatCoV1A-cand-2890-2969
  source 1..80: mol_type = other DNA
cacccttgtgaccaacaaaattgtttctcacagtgttttaaaaaggtcggtggatctgctgttacattctctgaaaaagt

SEQ ID NO: 10946 - DNA, 80 bp, synthetic construct
  misc_feature 1..80: note = Synthetic: >BtRl_BetaCoV-cand-6930-7009
  source 1..80: mol_type = other DNA
cccttcttattgtggtggtgttagagatttgtatatcaattcctctaatgtaaccattatggacttctgtgagggttctt

SEQ ID NO: 10947 - DNA, 80 bp, synthetic construct
  misc_feature 1..80: note = Synthetic: >SARSRC-cand-6960-7039
  source 1..80: mol_type = other DNA
ttgtggtggtgttagagatttgtatatcaattcctctaatgtcaccattatggacttctgtgagggctcttttccttgta

SEQ ID NO: 10948 - DNA, 80 bp, synthetic construct
  misc_feature 1..80: note = Synthetic: >HKU17-cand-17560-17639
  source 1..80: mol_type = other DNA
aagaactgcaatgcccacgttgatggacagcttgatgtagttattaataataacgctgtatatgctaaggttgataacaa

SEQ ID NO: 10949 - DNA, 80 bp, synthetic construct
  misc_feature 1..80: note = Synthetic: >HKU15-cand-17540-17619
  source 1..80: mol_type = other DNA
ctgttattataagaactgcaatgctcacgttgatgggcagcttgatgtagttattaataataacgctgtatatgctaagg

SEQ ID NO: 10950 - DNA, 80 bp, synthetic construct
  misc_feature 1..80: note = Synthetic: >Sk512R-cand-3490-3569
  source 1..80: mol_type = other DNA
ttattgaagataagcctgttgttgtaaaacctgatgtctttgcttttagctatgccagttatggtggcttgaaagttctt

SEQ ID NO: 10951 - DNA, 80 bp, synthetic construct
  misc_feature 1..80: note = Synthetic: >Sb512-cand-3500-3579
  source 1..80: mol_type = other DNA
ttgaagataagcctgttgttgtaaaacctgatgtctttgcttttagctatgccagttatggtggcttgaaagttcttaac

SEQ ID NO: 10952 - DNA, 80 bp, synthetic construct
  misc_feature 1..80: note = Synthetic: >BetaSp-cand-28060-28139
  source 1..80: mol_type = other DNA
aagaagagatggataggattcaggatgctattaagaagttaaatgacagttacatcaacctaaaggagattggtacgtac

SEQ ID NO: 10953 - DNA, 80 bp, synthetic construct
  misc_feature 1..80: note = Synthetic: >HKU31-cand-29050-29129
  source 1..80: mol_type = other DNA
aagaaggtgctagtgaagccccttcagattttggtaccaggaatcctgctaatgacccagctattgtcacgcagttcgct

SEQ ID NO: 10954 - DNA, 80 bp, synthetic construct
  misc_feature 1..80: note = Synthetic: >WIV16-cand-23040-23119
  source 1..80: mol_type = other DNA
ccttattaaaaatcaatgtgtcaattttaactttaatggactcactggtactggtgtgttaactccttcttcaaagagat

SEQ ID NO: 10955 - DNA, 80 bp, synthetic construct
  misc_feature 1..80: note = Synthetic: >HKU5-cand-3440-3519
  source 1..80: mol_type = other DNA
agaagtttcgtcttcgatccccctccatgatgatgctgaagtcgccaaggccaacgattgtgccgaaggtgtgcctgcgc

SEQ ID NO: 10956 - DNA, 80 bp, synthetic construct
  misc_feature 1..80: note = Synthetic: >HKU5R-cand-3450-3529
  source 1..80: mol_type = other DNA
tcttcgatccccctccatgatgatgctgaagtcactaaggccaacgattgtgccgaaggtgtgcctgcgctcgatagtac

SEQ ID NO: 10957 - DNA, 80 bp, synthetic construct
  misc_feature 1..80: note = Synthetic: >AlphaMink-cand-27700-27779
  source 1..80: mol_type = other DNA
tgattgtctagatctttatagtttacagcgtgctattgttgaagtgcgcattcttagactattgattagggttttattct

SEQ ID NO: 10958 - DNA, 80 bp, synthetic construct
  misc_feature 1..80: note = Synthetic: >Alpha2-cand-27690-27769
  source 1..80: mol_type = other DNA
ctgattgtctagatctttatagtttgcagcgtgctattgttgaagtgcgcattcttagactattgattagggttttattc

SEQ ID NO: 10959 - DNA, 80 bp, synthetic construct
  misc_feature 1..80: note = Synthetic: >HKU5R-cand-16240-16319
  source 1..80: mol_type = other DNA
ggttgagagattcgtgtcattggctatagacgcttatcctctcacgaagcatgatgatcctgaataccaaaatgtattct

SEQ ID NO: 10960 - DNA, 80 bp, synthetic construct
  misc_feature 1..80: note = Synthetic: >HKU5R-cand-17040-17119
  source 1..80: mol_type = other DNA
atagtaaagtccagctcggcgagtatgtcttcgagcgcatagactatagtgatgctgtttcctacaagtctagtactacg

SEQ ID NO: 10961 - DNA, 80 bp, synthetic construct
  misc_feature 1..80: note = Synthetic: >HghCoV1-cand-19730-19809
  source 1..80: mol_type = other DNA
agaatattgcttttaatgttgtaaaacacggccactttaaaggtgttgaaggagaactaccagtagctgtagtcaatgat

SEQ ID NO: 10962 - DNA, 80 bp, synthetic construct
  misc_feature 1..80: note = Synthetic: >HKU31-cand-19800-19879
  source 1..80: mol_type = other DNA
gaatattgcttttaatgttgtaaaacatggccactttaaaggtgttgaaggagaactaccagtagctgtagtcaatgata

SEQ ID NO: 10963 - DNA, 80 bp, synthetic construct
  misc_feature 1..80: note = Synthetic: >HKU4-cand-12350-12429
  source 1..80: mol_type = other DNA
agaatgcctatgaaaaagataaggctgtagcacgtaagttagagcgtatggctgaacaagctatgacatctatgtataag

SEQ ID NO: 10964 - DNA, 80 bp, synthetic construct
  misc_feature 1..80: note = Synthetic: >HKU4R-cand-12350-12429
  source 1..80: mol_type = other DNA
tatgaaaaagataaggctgtagcacgtaaattagaacgtatggctgaacaagctatgacatctatgtataagcaagcacg

SEQ ID NO: 10965 - DNA, 80 bp, synthetic construct
  misc_feature 1..80: note = Synthetic: >HKU5R-cand-16160-16239
  source 1..80: mol_type = other DNA
ctaccttatccagacccttcaagaatcttgtctgccggttgcttcgtcgatgatatcgtcaagactgacggtacgctcat

SEQ ID NO: 10966 - DNA, 80 bp, synthetic construct
  misc_feature 1..80: note = Synthetic: >HKU5R-cand-28970-29049
  source 1..80: mol_type = other DNA
agcgtccagggcgtccaagaactaagcccagacctgcccctaataccactgtctcatggttcacgggccttacccagcac

SEQ ID NO: 10967 - DNA, 80 bp, synthetic construct
  misc_feature 1..80: note = Synthetic: >Delta-cand-16080-16159
  source 1..80: mol_type = other DNA
tgaaaccattaaggcactcgaggagtctatcaagaagtcatatgctaccgcaaccgtcaaggatgtgtatgaccaacgct

SEQ ID NO: 10968 - DNA, 80 bp, synthetic construct
  misc_feature 1..80: note = Synthetic: >HKU15-cand-14580-14659
  source 1..80: mol_type = other DNA
gctgaaaccattaaggcactcgaggagtctatcaagaagtcatatgctaccgcaaccgtcaaggatgtgtatgaccaacg

SEQ ID NO: 10969 - DNA, 80 bp, synthetic construct
  misc_feature 1..80: note = Synthetic: >MbCoV1-cand-5290-5369
  source 1..80: mol_type = other DNA
ttcttactaacagtaaattagaattaggcaaaattggtgaatgtattgataagcattctgatggtgccttgaaactagct

SEQ ID NO: 10970 - DNA, 80 bp, synthetic construct
  misc_feature 1..80: note = Synthetic: >MsbCoV1-cand-5290-5369
  source 1..80: mol_type = other DNA
cagtaaattagaattaggcaaaattggtgaatgtattgataagcattctgatggtgccttgaaactagctgtctctgaat

SEQ ID NO: 10971 - DNA, 80 bp, synthetic construct
  misc_feature 1..80: note = Synthetic: >HKU15-cand-24050-24129
  source 1..80: mol_type = other DNA
agctcaaaacaaaaaggctactcatcctcagtttcgtggcaatggagttccgcttaactccgccatcaaacccgttgaaa

SEQ ID NO: 10972 - DNA, 80 bp, synthetic construct
  misc_feature 1..80: note = Synthetic: >Sparrow-cand-24310-24389
  source 1..80: mol_type = other DNA
tcaaaacaaaaaggctactcatcctcagtttcgtggcaatggagttccacttaactctgccatcaaacccgcagaaaacc

SEQ ID NO: 10973 - DNA, 80 bp, synthetic construct
  misc_feature 1..80: note = Synthetic: >HKU17-cand-10720-10799
  source 1..80: mol_type = other DNA
agctcaagatcttaatggcaatgaatcaactgcaaaatccttctatgttaccagaactggtaagaagattttggttgcca

SEQ ID NO: 10974 - DNA, 80 bp, synthetic construct
  misc_feature 1..80: note = Synthetic: >Sparrow-cand-10740-10819
  source 1..80: mol_type = other DNA
ccttaatggcaatgaatcaactgcaaaatcattctatgttaccagaactggtaagaagattttggttgccatcacatcaa

SEQ ID NO: 10975 - DNA, 80 bp, synthetic construct
  misc_feature 1..80: note = Synthetic: >Sb512-cand-7080-7159
  source 1..80: mol_type = other DNA
agctcccgagttgagtaacgtaactaagcttaatgttattccaactggaccagctacaataattattgataaggtggaat

SEQ ID NO: 10976 - DNA, 80 bp, synthetic construct
  misc_feature 1..80: note = Synthetic: >AlphaSp-cand-7070-7149
  source 1..80: mol_type = other DNA
atgttatagctcctgagttgagtaacgttactaagcttaatgttattccaactggaccagctacaataattattgataag

SEQ ID NO: 10977 - DNA, 80 bp, synthetic construct
  misc_feature 1..80: note = Synthetic: >BtSk_AlphaCoV-cand-18790-18869
  source 1..80: mol_type = other DNA
gtaatggttcgtgatggtgtttcagataatgttgtgtttgttaataacacttctttgcctacaaatgtagccttcgagct

SEQ ID NO: 10978 - DNA, 80 bp, synthetic construct
  misc_feature 1..80: note = Synthetic: >Sb512-cand-18840-18919
  source 1..80: mol_type = other DNA
atggttcgtgatggtgtttcagataatgttgtgtttgttaataacacttctttgcctacaaatgtggccttcgagctata

SEQ ID NO: 10979 - DNA, 80 bp, synthetic construct
  misc_feature 1..80: note = Synthetic: >HKU5R-cand-27850-27929
  source 1..80: mol_type = other DNA
agctcgcttcgcgctgctatgggtcccatgttgaggctaatccatttagtctcactttggacatttggaaaacgaactat

SEQ ID NO: 10980 - DNA, 80 bp, synthetic construct
  misc_feature 1..80: note = Synthetic: >HKU4-cand-3570-3649
  source 1..80: mol_type = other DNA
tgaacaggctcaacaatgtggtgtttcttcattacctattcaagatgaagctagtgaaaatcaggtgcatcaagtgtctg

SEQ ID NO: 10981 - DNA, 80 bp, synthetic construct
  misc_feature 1..80: note = Synthetic: >HKU4R-cand-3560-3639
  source 1..80: mol_type = other DNA
gttgaacaggctcaacaatgtggtgtttcctcattacctattcaagatgaagctagtgaaaatcaggtgcatcaagtgtc

SEQ ID NO: 10982 - DNA, 80 bp, synthetic construct
  misc_feature 1..80: note = Synthetic: >HKU5R-cand-2810-2889
  source 1..80: mol_type = other DNA
cagactcaaaggtggtgcgcctcccaaaggagttaagtttggtggtgaacaaacaaaagaaataactgcagtcagaagcg

SEQ ID NO: 10983 - DNA, 80 bp, synthetic construct
  misc_feature 1..80: note = Synthetic: >HKU5-cand-2800-2879
  source 1..80: mol_type = other DNA
ctactttgttcagactcaaaggtggtgcgcctcccaaaggagttaagtttggtggtgaacaaacaaaagaaataactgca

SEQ ID NO: 10984 - DNA, 80 bp, synthetic construct
  misc_feature 1..80: note = Synthetic: >BetaSp-cand-19330-19409
  source 1..80: mol_type = other DNA
gcattgcagagagttatgcttaaggcggcgatgctctgtaataggtatagtttgtgttatgacattggcaacccgaaagc

SEQ ID NO: 10985 - DNA, 80 bp, synthetic construct
  misc_feature 1..80: note = Synthetic: >HKU4R-cand-6040-6119
  source 1..80: mol_type = other DNA
ttttgatgaaacaaagcctatttctaagaaactcacttattctctgttgcctaatgaagatggcgatgttttattatctg

SEQ ID NO: 10986 - DNA, 80 bp, synthetic construct
  misc_feature 1..80: note = Synthetic: >HKU4-cand-6050-6129
  source 1..80: mol_type = other DNA
ttgatgaaacaaagcctatttctaagaaactcacttattctctgttgcctaatgaagatggcgatgttttattatctgag

SEQ ID NO: 10987 - DNA, 80 bp, synthetic construct
  misc_feature 1..80: note = Synthetic: >BtRf_AlphaCoV-cand-19130-19209
  source 1..80: mol_type = other DNA
tgaggactttgttgactcagctgatgatacactacacagttgttctgttacgtatgctaatgatcctagtagtaaatctg

SEQ ID NO: 10988 - DNA, 80 bp, synthetic construct
  misc_feature 1..80: note = Synthetic: >SEAC-cand-19320-19399
  source 1..80: mol_type = other DNA
cttaaggttgaggactttgttgactcagctgatgatacactacatagttgttccgttacgtatgctaatgatcctagtag

SEQ ID NO: 10989 - DNA, 80 bp, synthetic construct
  misc_feature 1..80: note = Synthetic: >HKU5R-cand-18160-18239
  source 1..80: mol_type = other DNA
tgcagttacgcgtgcgcagaagggtattctttgcgtcatgacttctcaagcactcttcgattcgctcgagtttgctgagg

SEQ ID NO: 10990 - DNA, 80 bp, synthetic construct
  misc_feature 1..80: note = Synthetic: >WIV16-cand-23680-23759
  source 1..80: mol_type = other DNA
gctaatttgcttctccaatatggtagcttttgcacacaactaaatcgtgcactctcaggtattgctgttgaacaggatcg

SEQ ID NO: 10991 - DNA, 80 bp, synthetic construct
  misc_feature 1..80: note = Synthetic: >SARSRC-cand-6480-6559
  source 1..80: mol_type = other DNA
tacaagcattaccattaagaaacctaatgagctctcgttggccttaggtttaaaaacacttgccactcatggtgctgctg

SEQ ID NO: 10992 - DNA, 80 bp, synthetic construct
  misc_feature 1..80: note = Synthetic: >HKU23-cand-24500-24579
  source 1..80: mol_type = other DNA
tagtgattttatgagtgagattaagtgtaaaacattatctatatcaccatctactggtgtttatgaattaaacggttaca

SEQ ID NO: 10993 - DNA, 80 bp, synthetic construct
  misc_feature 1..80: note = Synthetic: >MsbCoV1-cand-27800-27879
  source 1..80: mol_type = other DNA
cctaaaactaatcctaaccttccttactttcttcagcaggtaaatgcttatcttgatccaaactctgatcagcctatacc

SEQ ID NO: 10994 - DNA, 80 bp, synthetic construct
  misc_feature 1..80: note = Synthetic: >MbCoV1-cand-27800-27879
  source 1..80: mol_type = other DNA
gtctgtacctaaaactaatcctaaccttccttactttcttcagcaggtaaatgcttatcttgatccaaactctgatcagc

SEQ ID NO: 10995 - DNA, 80 bp, synthetic construct
  misc_feature 1..80: note = Synthetic: >HKU5R-cand-25210-25289
  source 1..80: mol_type = other DNA
tttgcaacactgaaaatccaccaaagtgcattgcacctattgatggatacttcgttcttaatcaaaccaccagcactgca

SEQ ID NO: 10996 - DNA, 80 bp, synthetic construct
  misc_feature 1..80: note = Synthetic: >HKU5R-cand-19280-19359
  source 1..80: mol_type = other DNA
cctattgttgatgaccctgttgttgattggcattattatgatgcacagccactgagtaagaaagtccagcagttgttcta

SEQ ID NO: 10997 - DNA, 80 bp, synthetic construct
  misc_feature 1..80: note = Synthetic: >Quail-cand-23870-23949
  source 1..80: mol_type = other DNA
cctctactctttgaatatggtaacatatatggtaaagactttatcattagaccatccctacaggtcattcttgaagaaga

SEQ ID NO: 10998 - DNA, 80 bp, synthetic construct
  misc_feature 1..80: note = Synthetic: >Sparrow-cand-24150-24229
  source 1..80: mol_type = other DNA
cttgaatatggtaacatatatggtaaagactttctcattcgaccatccctacaggtcattcttgaagaagaatgacttaa

SEQ ID NO: 10999 - DNA, 80 bp, synthetic construct
  misc_feature 1..80: note = Synthetic: >Sb512-cand-8200-8279
  source 1..80: mol_type = other DNA
gtatttttgtatggcaagtcactcatctttgctatgagtaccatttttggcacgtcaggactttgttttgatgatagagg

SEQ ID NO: 11000 - DNA, 80 bp, synthetic construct
  misc_feature 1..80: note = Synthetic: >Sk512R-cand-8200-8279
  source 1..80: mol_type = other DNA
tgtatggcaagtcactcatctttgctatgagtaccatttttggcacgtcaggactttgttttgatgatagaggccttaca

SEQ ID NO: 11001 - DNA, 80 bp, synthetic construct
  misc_feature 1..80: note = Synthetic: >HKU17-cand-6010-6089
  source 1..80: mol_type = other DNA
tgtggttttgtcaatggaccttaaacgtactataattatcattgatcagacctactctagacccattgataattatcaag

SEQ ID NO: 11002 - DNA, 80 bp, synthetic construct
  misc_feature 1..80: note = Synthetic: >WIV16-cand-24410-24489
  source 1..80: mol_type = other DNA
ttgacaggttaattacaggcagactgcaaagccttcaaacctatgtaacacaacaactaatcagggctgctgaaatcagg

SEQ ID NO: 11003 - DNA, 80 bp, synthetic construct
  misc_feature 1..80: note = Synthetic: >KT253270-cand-400-479
  source 1..80: mol_type = other DNA
gatttagagcatgccgatttgtttcatttggcttgcaagattgcgttgttggcattgcagatgcagactacgttatgggt

SEQ ID NO: 11004 - DNA, 80 bp, synthetic construct
  misc_feature 1..80: note = Synthetic: >KT253269-cand-400-479
  source 1..80: mol_type = other DNA
gatttagagcatgccgatttgtttcatttggtttgcaagattgcgttgttggtgttgcagacacagactatgttatgggt

SEQ ID NO: 11005 - DNA, 80 bp, synthetic construct
  misc_feature 1..80: note = Synthetic: >NC_028752-cand-400-479
  source 1..80: mol_type = other DNA
gatttagagcatgccgatttgtttcatttggcttgcatgattgcgttgttggcattgcaaacgacgattatgtcatgggt

SEQ ID NO: 11006 - DNA, 80 bp, synthetic construct
  misc_feature 1..80: note = Synthetic: >MN517816-cand-9290-9369
  source 1..80: mol_type = other DNA
ctatgcgttctaatggtactattagagcatctttccttgctggagcctgtggttcagtaggtcttactatagaaaagggt

SEQ ID NO: 11007 - DNA, 80 bp, synthetic construct
  misc_feature 1..80: note = Synthetic: >MT114542-cand-22940-23019
  source 1..80: mol_type = other DNA
ttgaagcgttcaatagtacagaacatttagatcctatttataaagaatggcctaacataggtggttcttggctaggaggt

SEQ ID NO: 11008 - DNA, 80 bp, synthetic construct
  misc_feature 1..80: note = Synthetic: >KU556804-cand-14880-14959
  source 1..80: mol_type = other DNA
gccgttatggagcgttatatagctcttgccatagatgcttacccgctaatacatcatgaaaatgaagagtacaagaaggt

SEQ ID NO: 11009 - DNA, 80 bp, synthetic construct
  misc_feature 1..80: note = Synthetic: >MN690610-cand-29380-29459
  source 1..80: mol_type = other DNA
tgatagacacaccctgaatgccaatggctatgcaggatttgtacggcattatcctaatcgcaaagcttatggcagcgatg

SEQ ID NO: 11010 - DNA, 80 bp, synthetic construct
  misc_feature 1..80: note = Synthetic: >MT114541-cand-22080-22159
  source 1..80: mol_type = other DNA
ggttgttagaagtttatatgtaatatatgaagaaggagataatatagttggtgtaccgtctgataatagtggtcttcacg

SEQ ID NO: 11011 - DNA, 80 bp, synthetic construct
  misc_feature 1..80: note = Synthetic: >MN128086-cand-10410-10489
  source 1..80: mol_type = other DNA
taagtttgctaaatggatgctgtgttattgtaatgcaacatactttaataattatgtgctaatggcggtcattgttaatg

SEQ ID NO: 11012 - DNA, 80 bp, synthetic construct
  misc_feature 1..80: note = Synthetic: >MN531555-cand-20490-20569
  source 1..80: mol_type = other DNA
ttatgtttattactatcagagcgcttttagaccgccaaatggttggcatttacatggtggtgcttatgcagtagtcaatg

SEQ ID NO: 11013 - DNA, 80 bp, synthetic construct
  misc_feature 1..80: note = Synthetic: >SBB-130-cand-18640-18719
  source 1..80: mol_type = other DNA
gtcttcacaaataagacttctttacccactaatgttgcgtttgagctttttgctaagcgcaaagttggtttgacaccacc

SEQ ID NO: 11014 - DNA, 80 bp, synthetic construct
  misc_feature 1..80: note = Synthetic: >SBB-041-cand-18630-18709
  source 1..80: mol_type = other DNA
cactgataaccttgtcttcacaaataagacttctttacccactaatgttgcgtttgagctttttgctaagcgcaaagttg

SEQ ID NO: 11015 - DNA, 80 bp, synthetic construct
  misc_feature 1..80: note = Synthetic: >SBB-122-cand-2920-2999
  source 1..80: mol_type = other DNA
tgctgtgttaccagtttgttacaaacgatgtggtggaggtgtcatacaattcgcagaaaatgttgaagtcaaagaaattg

SEQ ID NO: 11016 - DNA, 80 bp, synthetic construct
  misc_feature 1..80: note = Synthetic: >SBB-120-cand-2910-2989
  source 1..80: mol_type = other DNA
gtaatggaagtgctgtgctaccagtttgttacaaacgatgcggtggaggtgtcatacaattcgcagaaaatgttgaagtc

SEQ ID NO: 11017 - DNA, 80 bp, synthetic construct
  misc_feature 1..80: note = Synthetic: >SBB-120-cand-4680-4759
  source 1..80: mol_type = other DNA
tagttgcagattatgatgctcatctaaatggttccatctcagcttgtattgatgcctacagaaaagaaaataaggttgtg

SEQ ID NO: 11018 - DNA, 80 bp, synthetic construct
  misc_feature 1..80: note = Synthetic: >SBB-122-cand-4690-4769
  source 1..80: mol_type = other DNA
ttatgatgctcatctaaatggttctatctcagcttgtattgatgcctacagaaaagaaaataaggttgtgccatccggta

SEQ ID NO: 11019 - DNA, 80 bp, synthetic construct
  misc_feature 1..80: note = Synthetic: >SBB-024-cand-4680-4759
  source 1..80: mol_type = other DNA
tagttgcagattatgatgctcatttaaatggctctatttcagcttgcattgatgcctacagaaaagaaaataaggttgtg

SEQ ID NO: 11020 - DNA, 80 bp, synthetic construct
  misc_feature 1..80: note = Synthetic: >SBB-130-cand-4670-4749
  source 1..80: mol_type = other DNA
gatggtatagttgcagattatgatgctcatttaaatggctctatttcagtttgcattgatgcctacagaaaagaaaataa

SEQ ID NO: 11021 - DNA, 80 bp, synthetic construct
  misc_feature 1..80: note = Synthetic: >SBB-010-cand-4670-4749
  source 1..80: mol_type = other DNA
cttgatggtatagttgcagattatgatgctcatttgactggttctatttcagcttgcattgatgcctacagaaaagaaaa

SEQ ID NO: 11022 - DNA, 80 bp, synthetic construct
  misc_feature 1..80: note = Synthetic: >SBB-120-cand-5080-5159
  source 1..80: mol_type = other DNA
ggttattgatgcgcaagttggtgcttgcagtatgaataatcttgatcttactggtgttaagccagataatgcacttactg

SEQ ID NO: 11023 - DNA, 80 bp, synthetic construct
  misc_feature 1..80: note = Synthetic: >SBB-130-cand-5070-5149
  source 1..80: mol_type = other DNA
gtgcagaggttattgatgcgcaagttggtgcttgcagtatgaacaaccttgatcttactggtgttaaaccagataatgca

SEQ ID NO: 11024 - DNA, 80 bp, synthetic construct
  misc_feature 1..80: note = Synthetic: >SBB-797-cand-10160-10239
  source 1..80: mol_type = other DNA
ttaagtacatgtgtcaatcagttagtagtgatagtttgcaagtgttgcaaccattagctgctaagactggtatttccgta

SEQ ID NO: 11025 - DNA, 80 bp, synthetic construct
  misc_feature 1..80: note = Synthetic: >SBB-726-cand-10150-10229
  source 1..80: mol_type = other DNA
aattgtgctgttaagtacatgtgtcaatcagttagtagtgatagtttgcaagtgttgcaaccattagctgctaagactgg

SEQ ID NO: 11026 - DNA, 80 bp, synthetic construct
  misc_feature 1..80: note = Synthetic: >SBB-130-cand-10260-10339
  source 1..80: mol_type = other DNA
ctagtatccttgtagagatgtttgatcaccatgtttctcttatcagcttggacatacaaggtgttttaaatattattgct

SEQ ID NO: 11027 - DNA, 80 bp, synthetic construct
  misc_feature 1..80: note = Synthetic: >SBB-010-cand-10270-10349
  source 1..80: mol_type = other DNA
tcttgtagagatgtttgaccaccatgtttctcttatcagcttggacatacaaggtgttttaaatattattgcttgtttgt

SEQ ID NO: 11028 - DNA, 80 bp, synthetic construct
  misc_feature 1..80: note = Synthetic: >SBB-726-cand-12710-12789
  source 1..80: mol_type = other DNA
gcaagttcgtgcagataccacaagtaggtgttaatgaccctataggtttttgtatacgtaatgtcgtttgtgcagtttgt

SEQ ID NO: 11029 - DNA, 80 bp, synthetic construct
  misc_feature 1..80: note = Synthetic: >SBB-788-cand-12720-12799
  source 1..80: mol_type = other DNA
gcagataccacaagtaggtgttaatgaccctataggtttttgtatacgtaatgtcgtttgtgcagtttgtaatatgtggc

SEQ ID NO: 11030 - DNA, 80 bp, synthetic construct
  misc_feature 1..80: note = Synthetic: >SBB-747-cand-6470-6549
  source 1..80: mol_type = other DNA
ttagtaggtttaaacagttttttggcatagttatgccctgtgattacgttctagtcaatgagactggaagtggttggttg

SEQ ID NO: 11031 - DNA, 80 bp, synthetic construct
  misc_feature 1..80: note = Synthetic: >SBB-788-cand-6480-6559
  source 1..80: mol_type = other DNA
taaacagttttttggcatagttatgccctgtgattacgttctagtcaatgagacaggaagtggttggttgcatcatttgt

SEQ ID NO: 11032 - DNA, 80 bp, synthetic construct
  misc_feature 1..80: note = Synthetic: >SBB-726-cand-6490-6569
  source 1..80: mol_type = other DNA
tttggcatagttatgccctgtgattacgttctagtcaatgagactggaagtggttggttgcatcacttgtgtatgtctgg

SEQ ID NO: 11033 - DNA, 80 bp, synthetic construct
  misc_feature 1..80: note = Synthetic: >SBB-747-cand-7830-7909
  source 1..80: mol_type = other DNA
ttatgcggattttataaagttgagcgagtctgtaaggcgtcaattacgtgttgctgctcgaaagactggtcttaatttgt

SEQ ID NO: 11034 - DNA, 80 bp, synthetic construct
  misc_feature 1..80: note = Synthetic: >SBB-797-cand-14000-14079
  source 1..80: mol_type = other DNA
caacgcattggcagataagcgtacagtctgtatgtctgtagctgctatgacgactggcgtgactttccaaacggttaagc

SEQ ID NO: 11035 - DNA, 80 bp, synthetic construct
  misc_feature 1..80: note = Synthetic: >SBB-747-cand-13990-14069
  source 1..80: mol_type = other DNA
tggctgctagcaacgcattggcagataagcgtacagtctgtatgtctgtagctgctatgacgactggcgtgactttccaa

SEQ ID NO: 11036 - DNA, 80 bp, synthetic construct
  misc_feature 1..80: note = Synthetic: >SBB-053-cand-2680-2759
  source 1..80: mol_type = other DNA
tttacaccctgtaagaactattgaagccacgtcacttgaccttgctgtccaagatggtttaacagagctcaacgtagttg

SEQ ID NO: 11037 - DNA, 80 bp, synthetic construct
  misc_feature 1..80: note = Synthetic: >SBB-010-cand-2670-2749
  source 1..80: mol_type = other DNA
tctctggtattttacaccctgtaagaactattgaagccacgtcacttgatcttgctgtccaagatggtttaacagagttc

SEQ ID NO: 11038 - DNA, 80 bp, synthetic construct
  misc_feature 1..80: note = Synthetic: >SBB-053-cand-9390-9469
  source 1..80: mol_type = other DNA
caacttatgtatttaagactcttaaacaaggtgacaattttaacatattggcttgttatgatggtgctgctgctggtgtc

SEQ ID NO: 11039 - DNA, 80 bp, synthetic construct
  misc_feature 1..80: note = Synthetic: >SBB-130-cand-9380-9459
  source 1..80: mol_type = other DNA
cacacgccaacttatgtatttaagactcttaaacaaggtgacaattttaatatattggcttgttatgatggtgctgctgc

SEQ ID NO: 11040 - DNA, 80 bp, synthetic construct
  misc_feature 1..80: note = Synthetic: >SBB-130-cand-6580-6659
  source 1..80: mol_type = other DNA
ttttgatgtctttggtgatgagattgtagtcttcttcgttgttgttaagtgtttattgttcttcaagcatgtcctgcttg

SEQ ID NO: 11041 - DNA, 80 bp, synthetic construct
  misc_feature 1..80: note = Synthetic: >SBB-053-cand-6590-6669
  source 1..80: mol_type = other DNA
gtctttggtgatgagattgtagtcttcttcgttgttgttaagtgtttattgttcttcaagcatgtcctgcttggttgtga

SEQ ID NO: 11042 - DNA, 80 bp, synthetic construct
  misc_feature 1..80: note = Synthetic: >SBB-747-cand-16070-16149
  source 1..80: mol_type = other DNA
gaatgctaaacaagcatatgcttctgctgttgtaaaggaggttcttagtgatagggaacttgtcctctcttgggagacgg

SEQ ID NO: 11043 - DNA, 80 bp, synthetic construct
  misc_feature 1..80: note = Synthetic: >SBB-797-cand-16080-16159
  source 1..80: mol_type = other DNA
caagcatatgcttctgctgttgtaaaggaggttcttagtgatagggaacttgtcctttcttgggagacgggtaaaactcg

SEQ ID NO: 11044 - DNA, 80 bp, synthetic construct
  misc_feature 1..80: note = Synthetic: >SBB-788-cand-17760-17839
  source 1..80: mol_type = other DNA
ccactacagattggtttttccactggtgtaaactttgttgttacacctagtggttatatagatacagaatctggttctag

SEQ ID NO: 11045 - DNA, 80 bp, synthetic construct
  misc_feature 1..80: note = Synthetic: >PRD-0038-cand-2880-2959
  source 1..80: mol_type = other DNA
ttgtggctgatgctgttgtgaaaaccttacaaccaatttctgaacttctcataccaatgggcatagaccttgatgaatgg

SEQ ID NO: 11046 - DNA, 80 bp, synthetic construct
  misc_feature 1..80: note = Synthetic: >SBB-797-cand-19130-19209
  source 1..80: mol_type = other DNA
tataaaagaggaaggtgttgataaattgttatttactaacaatacatgcttgcctactaatgtggcatttgagctgtggg

SEQ ID NO: 11047 - DNA, 80 bp, synthetic construct
  misc_feature 1..80: note = Synthetic: >SBB-726-cand-19140-19219
  source 1..80: mol_type = other DNA
gaaggtgttgataaattgttatttactaacaatacatgcttgcctactaatgtggcatttgagctgtgggcaaagcgatc

SEQ ID NO: 11048 - DNA, 80 bp, synthetic construct
  misc_feature 1..80: note = Synthetic: >SBB-788-cand-16400-16479
  source 1..80: mol_type = other DNA
tcctgctatgaatgtcccagaaagcttcgttagtaatgttgtacattaccaacgtgttggtatgtcacgctataccaccg

SEQ ID NO: 11049 - DNA, 80 bp, synthetic construct
  misc_feature 1..80: note = Synthetic: >SBB-747-cand-16390-16469
  source 1..80: mol_type = other DNA
taggattgtatcctgctatgaatgtcccagaaagcttcgttagtaatgttgtacattaccaacgtgtaggtatgtcacgc

SEQ ID NO: 11050 - DNA, 80 bp, synthetic construct
  misc_feature 1..80: note = Synthetic: >SBB-747-cand-16870-16949
  source 1..80: mol_type = other DNA
cccttcttacgaagggtacgcttgcaccagagcattttaactctgtgtgtaggctcatggtggctgtaggtcctgatata

SEQ ID NO: 11051 - DNA, 80 bp, synthetic construct
  misc_feature 1..80: note = Synthetic: >SBB-797-cand-16880-16959
  source 1..80: mol_type = other DNA
taagggtacgcttgcaccagagcattttaactctgtgtgtaggcttatggtggctgtaggtcctgatatattcctggcca

SEQ ID NO: 11052 - DNA, 80 bp, synthetic construct
  misc_feature 1..80: note = Synthetic: >PRD-0038-cand-19910-19989
  source 1..80: mol_type = other DNA
ccgtgaagggcctcgtaccttctagagggccgccacaagcaagtctcaatggagtcacattgataggagattcagtaaag

SEQ ID NO: 11053 - DNA, 80 bp, synthetic construct
  misc_feature 1..80: note = Synthetic: >PDF-2386-cand-19920-19999
  source 1..80: mol_type = other DNA
cctcgtaccttctagagggccgccacaagcaagtctcaatggagtcacattgataggagattcagtaaagacacagttta

SEQ ID NO: 11054 - DNA, 80 bp, synthetic construct
  misc_feature 1..80: note = Synthetic: >AlphaCoV1-cand-4490-4569
  source 1..80: mol_type = other DNA
cccacagttacggctgcggaaaaagtcgatcttatactaccattttacaaagcgggtaaagtttcattttaccaaggtga

SEQ ID NO: 11055 - DNA, 80 bp, synthetic construct
  misc_feature 1..80: note = Synthetic: >AlphaCoV1-cand-4570-4649
  source 1..80: mol_type = other DNA
tttggatgttttgattaacttccttgaacctgatgttattgttaatgctgctaatggtgatcttaaacacatgggtggtg

SEQ ID NO: 11056 - DNA, 80 bp, synthetic construct
  misc_feature 1..80: note = Synthetic: >AlphaCoV1-cand-4650-4729
  source 1..80: mol_type = other DNA
ttgctagagccattgatgtattcacaggtggtaagttaacaaaacgttctaaggattatcttaaaacgaacaaatcaata

SEQ ID NO: 11057 - DNA, 80 bp, synthetic construct
  misc_feature 1..80: note = Synthetic: >AlphaCoV1-cand-4730-4809
  source 1..80: mol_type = other DNA
gctcctggtaatgctgttctttttgaaaatgtacttgagcatcttagtgttttgaatgctgtaggaccacgtaatggtga

SEQ ID NO: 11058 - DNA, 80 bp, synthetic construct
  misc_feature 1..80: note = Synthetic: >AlphaCoV1-cand-4810-4889
  source 1..80: mol_type = other DNA
cagtcgagttgaaggtaaactttgtaatgtttacaaagcaattgcaaagtgtgaaggtaaaatattaacaccacttatta

SEQ ID NO: 11059 - DNA, 80 bp, synthetic construct
  misc_feature 1..80: note = Synthetic: >AlphaCoV1-cand-4890-4969
  source 1..80: mol_type = other DNA
gtgttggtatctttaatgtcaaactggaaacatcattgcagtgtttacttaaaactgtcactgatagagaattaaatgtc

SEQ ID NO: 11060 - DNA, 80 bp, synthetic construct
  misc_feature 1..80: note = Synthetic: >AlphaCoV1-cand-4970-5049
  source 1..80: mol_type = other DNA
tttgtttacactgaccaagagagacataccatagaaaatttcttcaatggtactatccctgtcaaggtaacggaagacaa

SEQ ID NO: 11061 - DNA, 80 bp, synthetic construct
  misc_feature 1..80: note = Synthetic: >AlphaCoV1-cand-5050-5129
  source 1..80: mol_type = other DNA
tgtgaatcataagcgtgtgtctgtagcacttgataaaacttatggtgaacaacttaaaggcactgttgttattaaagaca

SEQ ID NO: 11062 - DNA, 80 bp, synthetic construct
  misc_feature 1..80: note = Synthetic: >AlphaCoV1-cand-5130-5209
  source 1..80: mol_type = other DNA
aagatgttacaaaccagttgcctagtgtgtctgatgttggtgaaaactacagttgtgaagttttgactaaggctattgat

SEQ ID NO: 11063 - DNA, 80 bp, synthetic construct
  misc_feature 1..80: note = Synthetic: >AlphaCoV1-cand-5210-5289
  source 1..80: mol_type = other DNA
gttgattggaaagctcattatggttttccaaatgctgctgcttttagcgccagttcccatgatgcttataaatttgaagt

SEQ ID NO: 11064 - DNA, 80 bp, synthetic construct
  misc_feature 1..80: note = Synthetic: >AlphaCoV1-cand-5290-5369
  source 1..80: mol_type = other DNA
tgtaacacataacaacttcattgttcataagcaaactgataacaattgttgggttaatgcaatttgtttagcattacaga

SEQ ID NO: 11065 - DNA, 80 bp, synthetic construct
  misc_feature 1..80: note = Synthetic: >AlphaCoV1-cand-5370-5449
  source 1..80: mol_type = other DNA
gacttaaaccaacatggaaatttcctggtgttaaaagtttgtggaatgaatttcttgagcgtaaaactgctggttttgta

SEQ ID NO: 11066 - DNA, 80 bp, synthetic construct
  misc_feature 1..80: note = Synthetic: >AlphaCoV1-cand-5450-5529
  source 1..80: mol_type = other DNA
catatgctgtatcacatttcaggcttaaagaaaggacaacctggtgatgctgaattgactttacataagcttggtgagtt

SEQ ID NO: 11067 - DNA, 80 bp, synthetic construct
  misc_feature 1..80: note = Synthetic: >AlphaCoV1-cand-5530-5609
  source 1..80: mol_type = other DNA
gatggaaagtgatagtgaagtcactgtcacacatacaactgcatgtgataagtgcgcaaaagttgaaacttttactggac

SEQ ID NO: 11068 - DNA, 80 bp, synthetic construct
  misc_feature 1..80: note = Synthetic: >AlphaCoV1-cand-5610-5689
  source 1..80: mol_type = other DNA
ctgtggtagcagcacctcttgtaattcatggcactgatgaaacttgtgttcatggtgttagtgtcaatgttaaagtgaca

SEQ ID NO: 11069 - DNA, 80 bp, synthetic construct
  misc_feature 1..80: note = Synthetic: >AlphaCoV1-cand-5690-5769
  source 1..80: mol_type = other DNA
agtattagaggcactgttgctatcacttctttaataggtcctgttgttggagatgtaattgatgcaactggttatatttg

SEQ ID NO: 11070 - DNA, 80 bp, synthetic construct
  misc_feature 1..80: note = Synthetic: >AlphaSp-cand-14190-14269
  source 1..80: mol_type = other DNA
gcttacacaaagcgtaatatcatacctactatgacccagcttaatttgaagtatgccattagtggtaaagagcgagcacg

SEQ ID NO: 11071 - DNA, 80 bp, synthetic construct
  misc_feature 1..80: note = Synthetic: >AlphaSp-cand-14430-14509
  source 1..80: mol_type = other DNA
gttgaaaacccccatttaatgggatgggattatcctaagtgtgatagagctttgcccaacatgattagaatgatttctgc

SEQ ID NO: 11072 - DNA, 80 bp, synthetic construct
  misc_feature 1..80: note = Synthetic: >AlphaSp-cand-14510-14589
  source 1..80: mol_type = other DNA
aatgatacttggttctaagcacgttaattgctgtagttccagcgataggtactacagattgtgtaacgagctagcacagg

SEQ ID NO: 11073 - DNA, 80 bp, synthetic construct
  misc_feature 1..80: note = Synthetic: >AlphaSp-cand-14670-14749
  source 1..80: mol_type = other DNA
tacgctaattcagtttttaacatatttcaagcaactagtgcaaatgttaaccgcttgttgagtgttgatagtaacacatg

SEQ ID NO: 11074 - DNA, 80 bp, synthetic construct
  misc_feature 1..80: note = Synthetic: >AlphaSp-cand-14830-14909
  source 1..80: mol_type = other DNA
ttgaagagtattttggttaccttcgtaaacacttttctatgatgatactttctgatgacggtgtcgtatgttacaatagt

SEQ ID NO: 11075 - DNA, 80 bp, synthetic construct
  misc_feature 1..80: note = Synthetic: >AlphaSp-cand-15150-15229
  source 1..80: mol_type = other DNA
aaaactgaccctgttatactccttgaacgatatgtgtctttagctatagatgcctaccctctttccaaacatgacaatcc

SEQ ID NO: 11076 - DNA, 80 bp, synthetic construct
  misc_feature 1..80: note = Synthetic: >AvianCoV-cand-22770-22849
  source 1..80: mol_type = other DNA
tttgttatttacaagtgttgaaacagttggtttgcctgaaactgatgctgaatataaaaaatgcacagcatctagagcag

SEQ ID NO: 11077 - DNA, 80 bp, synthetic construct
  misc_feature 1..80: note = Synthetic: >AvianCoV-cand-22850-22929
  source 1..80: mol_type = other DNA
gacctttaggtactcttaaggatcttatctgtgctagggaatataatggtttattagtgttgcctccaattattacggcg

SEQ ID NO: 11078 - DNA, 80 bp, synthetic construct
  misc_feature 1..80: note = Synthetic: >AvianCoV-cand-22930-23009
  source 1..80: mol_type = other DNA
gatatgcaaacaatgtatactgcttctttagtaggtgctatggcttttggtggtattacagcagcaggtgctataccttt

SEQ ID NO: 11079 - DNA, 80 bp, synthetic construct
  misc_feature 1..80: note = Synthetic: >AvianCoV-cand-23010-23089
  source 1..80: mol_type = other DNA
tgcaactcagatacaagctagaattaatcatttgggtattacacagtctctgttattgaaaaatcaagagaaaattgctg

SEQ ID NO: 11080 - DNA, 80 bp, synthetic construct
  misc_feature 1..80: note = Synthetic: >AvianCoV-cand-23090-23169
  source 1..80: mol_type = other DNA
cttcctttaataaggccattggtcatatgcagtcagcattagacactgtttcccagggatttgttgaagtagctgaaggt

SEQ ID NO: 11081 - DNA, 80 bp, synthetic construct
  misc_feature 1..80: note = Synthetic: >AvianCoV-cand-23170-23249
  source 1..80: mol_type = other DNA
tttagaagcacttcgctagcattacaacaggttcaagatgttgttaataagcagagtgctattcttactgaaactatgaa

SEQ ID NO: 11082 - DNA, 80 bp, synthetic construct
  misc_feature 1..80: note = Synthetic: >AvianCoV-cand-23250-23329
  source 1..80: mol_type = other DNA
ttctcttaataagaattttggtgctatttcatcagtaattcaagacatttatgcgcaacttgatgcaattcaagcagatg

SEQ ID NO: 11083 - DNA, 80 bp, synthetic construct
  misc_feature 1..80: note = Synthetic: >AvianCoV-cand-23330-23409
  source 1..80: mol_type = other DNA
cacaagttgaccgtcttattactggtagactctcttctctctcagtgctagcctctgctaagcagtctgagtacattaga

SEQ ID NO: 11084 - DNA, 80 bp, synthetic construct
  misc_feature 1..80: note = Synthetic: >AvianCoV-cand-23410-23489
  source 1..80: mol_type = other DNA
gtttcccaacagcgtgaattagccactcaaaaaattaatgagtgtgttaaatcacaatctaataggtatggtttttgtgg

SEQ ID NO: 11085 - DNA, 80 bp, synthetic construct
  misc_feature 1..80: note = Synthetic: >AvianCoV-cand-23490-23569
  source 1..80: mol_type = other DNA
tagtggaagacatgttctttcgataccacaaaatgcacctaatggtatagtgtttatacactttacttacactccagaga

SEQ ID NO: 11086 - DNA, 80 bp, synthetic construct
  misc_feature 1..80: note = Synthetic: >AvianCoV-cand-23570-23649
  source 1..80: mol_type = other DNA
gttttgttaatgttactgcaatagtgggtttttgtgtaaagcctgctaatgctagtcagtatgcaatagtgcctgttaat

SEQ ID NO: 11087 - DNA, 80 bp, synthetic construct
  misc_feature 1..80: note = Synthetic: >AvianCoV-cand-23650-23729
  source 1..80: mol_type = other DNA
ggtagaggtatttttatacaagttaatggtagttactatatcactgcacgtgatatgtatatgccaagagacattactgc

SEQ ID NO: 11088 - DNA, 80 bp, synthetic construct
  misc_feature 1..80: note = Synthetic: >AvianCoV-cand-23730-23809
  source 1..80: mol_type = other DNA
aggagatatagttactcttacttcttgtcaagcaaattatgttaatgtaaataaaagtgaaacaccctttcaaccgtcat

SEQ ID NO: 11089 - DNA, 80 bp, synthetic construct
  misc_feature 1..80: note = Synthetic: >AvianCoV-cand-23810-23889
  source 1..80: mol_type = other DNA
tactacatttgtagaagatgacgattttgatgattttgatgatgagttgtcaaaatggtggaatgatactaagcatgagc

SEQ ID NO: 11090 - DNA, 80 bp, synthetic construct
  misc_feature 1..80: note = Synthetic: >AvianCoV-cand-23890-23969
  source 1..80: mol_type = other DNA
taccagactttgacgacttcaattacacagtacccatacttaatattagtggtgaaatttgtagattgaatcactccatt

SEQ ID NO: 11091 - DNA, 80 bp, synthetic construct
  misc_feature 1..80: note = Synthetic: >AvianCoV-cand-23970-24049
  source 1..80: mol_type = other DNA
aacacactatataattatagtgatcatattcaaggtgttatacagggtcttaatgactcccttatagaccttgaagaact

SEQ ID NO: 11092 - DNA, 80 bp, synthetic construct
  misc_feature 1..80: note = Synthetic: >BtCoV_008_16-cand-1710-1789
  source 1..80: mol_type = other DNA
cggcaaatgttttagcaaggttggcaattatgtcctccttgataacgcacttgtccgtcttgctaagactagagttaagg

SEQ ID NO: 11093 - DNA, 80 bp, synthetic construct
  misc_feature 1..80: note = Synthetic: >BtCoV_008_16-cand-1790-1869
  source 1..80: mol_type = other DNA
gtcccagacaagccggtgttaatcatgtgaattatgcgagtgttgttcttggccctacttataaggttaaatcttctagg

SEQ ID NO: 11094 - DNA, 80 bp, synthetic construct
  misc_feature 1..80: note = Synthetic: >BtCoV_008_16-cand-1870-1949
  source 1..80: mol_type = other DNA
gttgagtcctacaaggttaatcttgtccttgtagatgagcctgtgcctgtggctactactggccacgttgtcattgtgga

SEQ ID NO: 11095 - DNA, 80 bp, synthetic construct
  misc_feature 1..80: note = Synthetic: >BtCoV_008_16-cand-1950-2029
  source 1..80: mol_type = other DNA
tggcatggctttctattgctcagatggtttttaccgctttatggctaatgaggaaactgttcttgaagaaccagttttcc

SEQ ID NO: 11096 - DNA, 80 bp, synthetic construct
  misc_feature 1..80: note = Synthetic: >BtCoV_008_16-cand-2030-2109
  source 1..80: mol_type = other DNA
gtgacatagaggacttcaaaccagtttttgagtgtgagcctatagatggttttcctactgttgtcgcaggtaatgttgtt

SEQ ID NO: 11097 - DNA, 80 bp, synthetic construct
  misc_feature 1..80: note = Synthetic: >BtCoV_008_16-cand-2110-2189
  source 1..80: mol_type = other DNA
gaactctgtgttaaggttgatgaccttctcaaaaattatgacactgtatataggaaatatagtgctataattaagggtga

SEQ ID NO: 11098 - DNA, 80 bp, synthetic construct
  misc_feature 1..80: note = Synthetic: >BtCoV_008_16-cand-2190-2269
  source 1..80: mol_type = other DNA
gaagtgttgtattacatgtgtctacgattttcatgcacctccatatataacggacgttgaacgttttgtggaattgtgtg

SEQ ID NO: 11099 - DNA, 80 bp, synthetic construct
  misc_feature 1..80: note = Synthetic: >BtCoV_008_16-cand-2270-2349
  source 1..80: mol_type = other DNA
aggattgtgttggtaattcagggttccatgagttttacacttctgcgcatgaagtaggggacttggctgcctttgtcact

SEQ ID NO: 11100 - DNA, 80 bp, synthetic construct
  misc_feature 1..80: note = Synthetic: >BtCoV_008_16-cand-2350-2429
  source 1..80: mol_type = other DNA
cagtgttgtaccatggaaggcttcgagtgttttaggcccattactcctgaatgtccccaaatcttggtagagatcgatgg

SEQ ID NO: 11101 - DNA, 80 bp, synthetic construct
  misc_feature 1..80: note = Synthetic: >BtCoV_008_16-cand-2430-2509
  source 1..80: mol_type = other DNA
tgggtctatatggcagtcttttctagctggtttaaaatctgcagcagattttatcaagcatcttaagatagactttgggc

SEQ ID NO: 11102 - DNA, 80 bp, synthetic construct
  misc_feature 1..80: note = Synthetic: >BtCoV_008_16-cand-2510-2589
  source 1..80: mol_type = other DNA
ttgaaggcattgttgttagcgttttaaaacgctttaagaaggcgggtgcattgcttgctaagttatataacacctttttg

SEQ ID NO: 11103 - DNA, 80 bp, synthetic construct
  misc_feature 1..80: note = Synthetic: >BtCoV_008_16-cand-2590-2669
  source 1..80: mol_type = other DNA
gacagtgttagcagttgtttgaagttggccggtgttagcttcaagtattatgctacagcaataccaaaaattcttattgg

SEQ ID NO: 11104 - DNA, 80 bp, synthetic construct
  misc_feature 1..80: note = Synthetic: >BtCoV_008_16-cand-2670-2749
  source 1..80: mol_type = other DNA
ttcctgttatcacagtgttagggatattaaagttgatgaactagatatcccggctgaaagtgaactcttacagtttaagg

SEQ ID NO: 11105 - DNA, 80 bp, synthetic construct
  misc_feature 1..80: note = Synthetic: >BtCoV_008_16-cand-2750-2829
  source 1..80: mol_type = other DNA
cctttgatcattgtacattccctgtaacacctaagcgtgtggaagtggagtcaattgaacttgaggagatccactttgtt

SEQ ID NO: 11106 - DNA, 80 bp, synthetic construct
  misc_feature 1..80: note = Synthetic: >BtCoV_008_16-cand-2830-2909
  source 1..80: mol_type = other DNA
gaaccccgggattttggtaagttgtccataattgatggttatgctttttattgtgatggtaaacgttactatccttctag

SEQ ID NO: 11107 - DNA, 80 bp, synthetic construct
  misc_feature 1..80: note = Synthetic: >BtCoV_008_16-cand-2910-2989
  source 1..80: mol_type = other DNA
tattgacagtgttgcacctgtttgttaccaaaagaagtgtggtggtgttgttaaaatttctgatgaagtgcaagtcaagg

SEQ ID NO: 11108 - DNA, 80 bp, synthetic construct
  misc_feature 1..80: note = Synthetic: >BtCoV_008_16-cand-5560-5639
  source 1..80: mol_type = other DNA
cacacaacaactcgctttagagatagttgtgataactcctgtactagcacacgtgttgtgtccacacctgttgttaatgt

SEQ ID NO: 11109 - DNA, 80 bp, synthetic construct
  misc_feature 1..80: note = Synthetic: >BtCoV_008_16-cand-5640-5719
  source 1..80: mol_type = other DNA
tagtttgttacgcctgggtatggaggatggtgtttgtaaacatggtgaaacacgtataacgcgtgtttctgctgtgaaag

SEQ ID NO: 11110 - DNA, 80 bp, synthetic construct
  misc_feature 1..80: note = Synthetic: >BtCoV_008_16-cand-5720-5799
  source 1..80: mol_type = other DNA
gcactgttattcttgttaaccctggtaaacccttacttgcaacgcctgagatgtatctggatggtgtttcttataccatg

SEQ ID NO: 11111 - DNA, 80 bp, synthetic construct
  misc_feature 1..80: note = Synthetic: >BtCoV_008_16-cand-5800-5879
  source 1..80: mol_type = other DNA
tttacagataatggtataggtgttgggcattacactgtgtttgaacgttccactggtcttgcttttgacggtgacacacg

SEQ ID NO: 11112 - DNA, 80 bp, synthetic construct
  misc_feature 1..80: note = Synthetic: >BtCoV_008_16-cand-5880-5959
  source 1..80: mol_type = other DNA
tcgtccttcagatatagcaacatctcatattactaacatggttgttagtgctagtaataatgttgtttttgaagagcccg

SEQ ID NO: 11113 - DNA, 80 bp, synthetic construct
  misc_feature 1..80: note = Synthetic: >BtCoV_008_16-cand-5960-6039
  source 1..80: mol_type = other DNA
ccaagaaggctgaatttgacatggctaagttcatggataagatgaactacgcttctgaaaagtttttcactttcggtgac

SEQ ID NO: 11114 - DNA, 80 bp, synthetic construct
  misc_feature 1..80: note = Synthetic: >BtCoV_008_16-cand-6040-6119
  source 1..80: mol_type = other DNA
tttgtgtctcgtaatattttgactgtgctagtctacttgatgagtatactatcactttgttataagtcattcaaaaagcg

SEQ ID NO: 11115 - DNA, 80 bp, synthetic construct
  misc_feature 1..80: note = Synthetic: >BtCoV_008_16-cand-6120-6199
  source 1..80: mol_type = other DNA
agatttaaaagtcttagcgggcgtcccacagcgcacaggtatcatcttccgtaagagtgttaaatataatgttaaagcac

SEQ ID NO: 11116 - DNA, 80 bp, synthetic construct
  misc_feature 1..80: note = Synthetic: >BtCoV_008_16-cand-6200-6279
  source 1..80: mol_type = other DNA
ttggctttttctttaaaattaaattttattgggtcaagcagtttttgaagttatgtttatgtctttatacaatttactca

SEQ ID NO: 11117 - DNA, 80 bp, synthetic construct
  misc_feature 1..80: note = Synthetic: >BtCoV_008_16-cand-6280-6359
  source 1..80: mol_type = other DNA
ttggcttttatgtttatacgctttacaccaataggcggtccattatgtgatggttacgtcgagggttatgctaattcaac

SEQ ID NO: 11118 - DNA, 80 bp, synthetic construct
  misc_feature 1..80: note = Synthetic: >BtCoV_008_16-cand-6360-6439
  source 1..80: mol_type = other DNA
atttgataaaaatgagtattgtgatagtgtgctgtgtaagatttgtctttatggttatcaggagctctctgatttctcac

SEQ ID NO: 11119 - DNA, 80 bp, synthetic construct
  misc_feature 1..80: note = Synthetic: >BtCoV_008_16-cand-6440-6519
  source 1..80: mol_type = other DNA
acactcaggtggtttggcagcatttaaaggatccccttattggtaacataatgccaggaatctatttggcatttcttact

SEQ ID NO: 11120 - DNA, 80 bp, synthetic construct
  misc_feature 1..80: note = Synthetic: >BtCoV_008_16-cand-6520-6599
  source 1..80: mol_type = other DNA
atatttggggacttttatgctcgtatagttgccttttatttctttctccaatacttcaattcttttggtgtagcattggg

SEQ ID NO: 11121 - DNA, 80 bp, synthetic construct
  misc_feature 1..80: note = Synthetic: >BtCoV_008_16-cand-6600-6679
  source 1..80: mol_type = other DNA
ttaccaggactctgtctggttcttacaagctataccctttgacgtttttggtgatgaaatattggtgtcttttatcgtta

SEQ ID NO: 11122 - DNA, 80 bp, synthetic construct
  misc_feature 1..80: note = Synthetic: >BtCoV_008_16-cand-6680-6759
  source 1..80: mol_type = other DNA
tcagagtgcttttgtttcttaagcatgtgctcttcggctgtgataaaccctcttgtgtggcatgttctaagagtgctaag

SEQ ID NO: 11123 - DNA, 80 bp, synthetic construct
  misc_feature 1..80: note = Synthetic: >BtCoV_008_16-cand-6760-6839
  source 1..80: mol_type = other DNA
ctcactcgtattcccttgcagactatctttcagggtacatccaagtccttttatgtacatgctaatggcggtaagaaatt

SEQ ID NO: 11124 - DNA, 80 bp, synthetic construct
  misc_feature 1..80: note = Synthetic: >HKU1-cand-1940-2019
  source 1..80: mol_type = other DNA
tatgtgtttaaaaatgtgtattttgtttatggacagagtttcagttgctacattttatatagagcattatgttaataggt

SEQ ID NO: 11125 - DNA, 80 bp, synthetic construct
  misc_feature 1..80: note = Synthetic: >HKU1-cand-2020-2099
  source 1..80: mol_type = other DNA
tggttactcaatttaagttattgggtactacacttgttaataaaatggttaattggtttaataccatgttagatgctagt

SEQ ID NO: 11126 - DNA, 80 bp, synthetic construct
  misc_feature 1..80: note = Synthetic: >HKU1-cand-2100-2179
  source 1..80: mol_type = other DNA
gcacctgctacaggctggcttctttaccaattattgaatggtctttttgtagtatctcaagccaactttaattttgttgc

SEQ ID NO: 11127 - DNA, 80 bp, synthetic construct
  misc_feature 1..80: note = Synthetic: >HKU1-cand-2180-2259
  source 1..80: mol_type = other DNA
tttaatacctgattatgctaaaattttagttaataaattttacactttttttaagttattattagagtgtgttacagttg

SEQ ID NO: 11128 - DNA, 80 bp, synthetic construct
  misc_feature 1..80: note = Synthetic: >HKU1-cand-2260-2339
  source 1..80: mol_type = other DNA
atgttttaaaagatatgcctgttcttaaaactattaatggtttagtttgtattgtaggcaataagttttataacgttagt

SEQ ID NO: 11129 - DNA, 80 bp, synthetic construct
  misc_feature 1..80: note = Synthetic: >HKU1-cand-2340-2419
  source 1..80: mol_type = other DNA
acagggttaattcctggttttgttttaccatgtaatgcacaggaacaacaaatttatttttttgaaggcgttgcagaatc

SEQ ID NO: 11130 - DNA, 80 bp, synthetic construct
  misc_feature 1..80: note = Synthetic: >HKU1-cand-2420-2499
  source 1..80: mol_type = other DNA
tgttatagtagaagatgatgttattgagaatgtcaaatcttctttatcatcttatgagtattgtcaaccacctaaatctg

SEQ ID NO: 11131 - DNA, 80 bp, synthetic construct
  misc_feature 1..80: note = Synthetic: >HKU1-cand-2500-2579
  source 1..80: mol_type = other DNA
tagaaaaaatttgtattatagataatatgtacatgggtaagtgtggtgataaatttttccctattgtcatgaatgataaa

SEQ ID NO: 11132 - DNA, 80 bp, synthetic construct
  misc_feature 1..80: note = Synthetic: >HKU1-cand-2580-2659
  source 1..80: mol_type = other DNA
aatatttgtcttttagatcaggcttggcgttttccatgtgcaggtagaaaagttaattttaacgagaaacctgttgttat

SEQ ID NO: 11133 - DNA, 80 bp, synthetic construct
  misc_feature 1..80: note = Synthetic: >HKU1-cand-2660-2739
  source 1..80: mol_type = other DNA
ggagattccgtctttgatgacagttaaggttatgtttgatttagattctacttttgatgatattttaggtaaagtttgtt

SEQ ID NO: 11134 - DNA, 80 bp, synthetic construct
  misc_feature 1..80: note = Synthetic: >HKU1-cand-2740-2819
  source 1..80: mol_type = other DNA
cagaatttgaagtagaaaagggtgttactgtagatgattttgttgctgttgtttgtgatgctatagagaatgctttaaac

SEQ ID NO: 11135 - DNA, 80 bp, synthetic construct
  misc_feature 1..80: note = Synthetic: >HKU1-cand-2820-2899
  source 1..80: mol_type = other DNA
tcttgtaaagagcatccagtggttggttatcaagttcgtgcatttttaaataaacttaatgagaatgttgtttatttatt

SEQ ID NO: 11136 - DNA, 80 bp, synthetic construct
  misc_feature 1..80: note = Synthetic: >HKU1-cand-2900-2979
  source 1..80: mol_type = other DNA
tgatgaggctggtgatgaagcaatggcctctcgtatgtattgtacttttgctattgaggatgttgaagacgttatcagta

SEQ ID NO: 11137 - DNA, 80 bp, synthetic construct
  misc_feature 1..80: note = Synthetic: >HKU1-cand-2980-3059
  source 1..80: mol_type = other DNA
gtgaagctgtcgaagatactattgatggtgtcgttgaagacactattaatgacgatgaagatgttgttactggtgacaat

SEQ ID NO: 11138 - DNA, 80 bp, synthetic construct
  misc_feature 1..80: note = Synthetic: >HKU1-cand-3140-3219
  source 1..80: mol_type = other DNA
tggtgacaatgacgatgaagatgttgttactggtgacaatgacgatgaagatgttgttactggtgacaatgacgatgaag

SEQ ID NO: 11139 - DNA, 80 bp, synthetic construct
  misc_feature 1..80: note = Synthetic: >HKU1-cand-5780-5859
  source 1..80: mol_type = other DNA
agctaaaggtcattttaaatttgatgaaccatcagatgctactgattttattcgtgttgttttgaaacaagctgatttat

SEQ ID NO: 11140 - DNA, 80 bp, synthetic construct
  misc_feature 1..80: note = Synthetic: >HKU1-cand-5860-5939
  source 1..80: mol_type = other DNA
caggtgcaatttgtgaattagaacttatttgtgattgtggtattaaacaagaaagtcgtgttggtgttgatgctgttatg

SEQ ID NO: 11141 - DNA, 80 bp, synthetic construct
  misc_feature 1..80: note = Synthetic: >HKU1-cand-5940-6019
  source 1..80: mol_type = other DNA
cattttggtacattagcaaagactgatctttttaatggttataagattggctgtaattgtgcaggtagaattgtccattg

SEQ ID NO: 11142 - DNA, 80 bp, synthetic construct
  misc_feature 1..80: note = Synthetic: >HKU1-cand-6020-6099
  source 1..80: mol_type = other DNA
tactaaattgaatgtaccatttttgatttgttctaatactcctctgagtaaggatttacctgatgatgttgttgcagcta

SEQ ID NO: 11143 - DNA, 80 bp, synthetic construct
  misc_feature 1..80: note = Synthetic: >HKU1-cand-6100-6179
  source 1..80: mol_type = other DNA
acatgtttatgggtgtaggtgtaggccattatacacatttgaaatgtggttcaccttaccaacattatgatgcttgtagt

SEQ ID NO: 11144 - DNA, 80 bp, synthetic construct
  misc_feature 1..80: note = Synthetic: >HKU1-cand-6190-6269
  source 1..80: mol_type = other DNA
atacaggtgttagtggttgtttaactgactgcttgtatcttaaaaatttaacccagacttttacatctatgttgactaat

SEQ ID NO: 11145 - DNA, 80 bp, synthetic construct
  misc_feature 1..80: note = Synthetic: >HKU1-cand-6270-6349
  source 1..80: mol_type = other DNA
tattttttggatgatgttgaaatggttgcttataaccctgatctttcacaatattattgtgataatggtaagtattatac

SEQ ID NO: 11146 - DNA, 80 bp, synthetic construct
  misc_feature 1..80: note = Synthetic: >HKU1-cand-6350-6429
  source 1..80: mol_type = other DNA
aaaacctattataaaggctcagtttaaaccatttgctaaagttgacggtgtttatactaactttaagttagttggacatg

SEQ ID NO: 11147 - DNA, 80 bp, synthetic construct
  misc_feature 1..80: note = Synthetic: >HKU1-cand-6430-6509
  source 1..80: mol_type = other DNA
atatttgtgctcaattgaatgataagttaggttttaatgtagatttgccgtttgttgagtacaaagtaacagtctggcct

SEQ ID NO: 11148 - DNA, 80 bp, synthetic construct
  misc_feature 1..80: note = Synthetic: >HKU1-cand-6510-6589
  source 1..80: mol_type = other DNA
gtagctactggtgatgttgttttggcatctgatgatttatatgtgaaacgttattttaaaggatgtgaaacttttggtaa

SEQ ID NO: 11149 - DNA, 80 bp, synthetic construct
  misc_feature 1..80: note = Synthetic: >HKU1-cand-6590-6669
  source 1..80: mol_type = other DNA
gcctgttatttggttttgtcatgatgaagcatcattgaattctcttacttattttaataaacctagttttaaatctgaaa

SEQ ID NO: 11150 - DNA, 80 bp, synthetic construct
  misc_feature 1..80: note = Synthetic: >HKU1-cand-6670-6749
  source 1..80: mol_type = other DNA
atagatatagtgttttgtctgttgattctgtatctgaggagtcacaaggtaatgtggttacttctgttatggaatcgcag

SEQ ID NO: 11151 - DNA, 80 bp, synthetic construct
  misc_feature 1..80: note = Synthetic: >HKU1-cand-6750-6829
  source 1..80: mol_type = other DNA
attagtactaaagaggttaagttaaagggtgttagaaagactgttaaaatagaagatgctattattgttaatgatgaaaa

SEQ ID NO: 11152 - DNA, 80 bp, synthetic construct
  misc_feature 1..80: note = Synthetic: >HKU1-cand-6830-6909
  source 1..80: mol_type = other DNA
tagttctattaaggttgttaaaagtttatctttagttgatgtttgggatatgtatttgacaggttgtgattatgttgttt

SEQ ID NO: 11153 - DNA, 80 bp, synthetic construct
  misc_feature 1..80: note = Synthetic: >HKU1-cand-6910-6989
  source 1..80: mol_type = other DNA
gggttgctaatgaattgtcacgcctagttaaatcaccaacagttagggaatatatacgatatggtattaaacctattact

SEQ ID NO: 11154 - DNA, 80 bp, synthetic construct
  misc_feature 1..80: note = Synthetic: >HKU1-cand-6990-7069
  source 1..80: mol_type = other DNA
atacctatagatttgttatgtttaagagatgataatcaaactcttttagttcctaaaatttttaaagcaagagctataga

SEQ ID NO: 11155 - DNA, 80 bp, synthetic construct
  misc_feature 1..80: note = Synthetic: >HKU1-cand-8350-8429
  source 1..80: mol_type = other DNA
gtaatggtatctctgtaacccagactatgtttgatgtttatgttgatacttttatgtctcattttgatgttgatagaaag

SEQ ID NO: 11156 - DNA, 80 bp, synthetic construct
  misc_feature 1..80: note = Synthetic: >HKU1-cand-8430-8509
  source 1..80: mol_type = other DNA
agttttaataattttgttaacattgctcatgcttctcttagagagggtgtgcaattagaaaaggttttagatacttttgt

SEQ ID NO: 11157 - DNA, 80 bp, synthetic construct
  misc_feature 1..80: note = Synthetic: >HKU1-cand-8510-8589
  source 1..80: mol_type = other DNA
gggatgtgtacgtaaatgttgttccattgattcagatgttgaaacaagatttattactaaatctatgatatctgcagtag

SEQ ID NO: 11158 - DNA, 80 bp, synthetic construct
  misc_feature 1..80: note = Synthetic: >HKU1-cand-8590-8669
  source 1..80: mol_type = other DNA
ctgctggtttggaatttactgatgaaaattataacaatttggtacctacatatttaaagagtgataatattgtagctgct

SEQ ID NO: 11159 - DNA, 80 bp, synthetic construct
  misc_feature 1..80: note = Synthetic: >HKU1-cand-8670-8749
  source 1..80: mol_type = other DNA
gatttaggtgttcttatacagaatggtgctaagcatgtacagggtaatgttgctaaggcagctaatatttcttgtatatg

SEQ ID NO: 11160 - DNA, 80 bp, synthetic construct
  misc_feature 1..80: note = Synthetic: >HKU1-cand-8750-8829
  source 1..80: mol_type = other DNA
gtttattgatgcttttaatcaacttactgctgatttacagcataaattaaaaaaagcatgtgttaaaactggcttgaagt

SEQ ID NO: 11161 - DNA, 80 bp, synthetic construct
  misc_feature 1..80: note = Synthetic: >HKU1-cand-8830-8909
  source 1..80: mol_type = other DNA
taaaattgacttttaataagcaagaggcaagtgtccctattcttacaacacccttttcacttaaaggaggtgttgtattg

SEQ ID NO: 11162 - DNA, 80 bp, synthetic construct
  misc_feature 1..80: note = Synthetic: >HKU1-cand-8910-8989
  source 1..80: mol_type = other DNA
agtaatttgttatatatattattttttattagtttaatctgttttatattattgtgggctttactgcctacatatagtgt

SEQ ID NO: 11163 - DNA, 80 bp, synthetic construct
  misc_feature 1..80: note = Synthetic: >HKU1-cand-8990-9069
  source 1..80: mol_type = other DNA
ttataagtctgatattcatttgcctgcttatgctagttttaaagttattgataatggtgttgttagagatatttcagtta

SEQ ID NO: 11164 - DNA, 80 bp, synthetic construct
  misc_feature 1..80: note = Synthetic: >HKU1-cand-9070-9149
  source 1..80: mol_type = other DNA
atgatttatgttttgctaataaatttttccaatttgatcaatggtatgagtccacttttgggtctgtttactatcataat

SEQ ID NO: 11165 - DNA, 80 bp, synthetic construct
  misc_feature 1..80: note = Synthetic: >HKU1-cand-9150-9229
  source 1..80: mol_type = other DNA
tctatggattgccctattgtagtggcagttatggatgaagatatcggttctactatgtttaatgttcctactaaagtttt

SEQ ID NO: 11166 - DNA, 80 bp, synthetic construct
  misc_feature 1..80: note = Synthetic: >HKU1-cand-9230-9309
  source 1..80: mol_type = other DNA
gagacatggctttcatgttttacattttttaacttatgcatttgctagtgatagtgttcagtgctatacaccacatattc

SEQ ID NO: 11167 - DNA, 80 bp, synthetic construct
  misc_feature 1..80: note = Synthetic: >HKU1-cand-9310-9389
  source 1..80: mol_type = other DNA
agatttcttataatgatttttatgctagtggttgtgttttatcatctttgtgtactatgtttaaaagaggtgatggtaca

SEQ ID NO: 11168 - DNA, 80 bp, synthetic construct
  misc_feature 1..80: note = Synthetic: >HKU1-cand-9390-9469
  source 1..80: mol_type = other DNA
ccacatccttattgttattcagatggtgttatgaagaatgcttctttgtatacatctttggttccacatacacgttatag

SEQ ID NO: 11169 - DNA, 80 bp, synthetic construct
  misc_feature 1..80: note = Synthetic: >HKU1-cand-9470-9549
  source 1..80: mol_type = other DNA
ccttgctaattctaatggttttataagatttcctgatgttattagtgaaggtattgtacgtattgtaagaacgcgctcta

SEQ ID NO: 11170 - DNA, 80 bp, synthetic construct
  misc_feature 1..80: note = Synthetic: >HKU1-cand-9550-9629
  source 1..80: mol_type = other DNA
tgacttattgtagagtgggtgcatgtgaatacgccgaagagggtatatgttttaattttaatagttcctgggttttgaat

SEQ ID NO: 11171 - DNA, 80 bp, synthetic construct
  misc_feature 1..80: note = Synthetic: >HKU15-cand-15460-15539
  source 1..80: mol_type = other DNA
tggtacatgcaggagcggatgttatgctcgacatgtgctacagatgcccacgtgaaatcgttgagacagtgtctaaactt

SEQ ID NO: 11172 - DNA, 80 bp, synthetic construct
  misc_feature 1..80: note = Synthetic: >HKU15-cand-15540-15619
  source 1..80: mol_type = other DNA
gtctacgataacaaactaaaagcggcgaaaccgaactcaagacagtgttacaagaccattgtgaactttggtcctggaga

SEQ ID NO: 11173 - DNA, 80 bp, synthetic construct
  misc_feature 1..80: note = Synthetic: >HKU15-cand-15620-15699
  source 1..80: mol_type = other DNA
cgttgctcatgagggacaatctgcctacaacgaagcacagttgcgtttcgcactcgcatttagacaacaaaagcggtggg

SEQ ID NO: 11174 - DNA, 80 bp, synthetic construct
  misc_feature 1..80: note = Synthetic: >HKU15-cand-15700-15779
  source 1..80: mol_type = other DNA
ataacgtgactttcatatctccatataatgctatgaatgtgaaagcatccttagcaggtttctctactcagaccgttgac

SEQ ID NO: 11175 - DNA, 80 bp, synthetic construct
  misc_feature 1..80: note = Synthetic: >HKU15-cand-15780-15859
  source 1..80: mol_type = other DNA
tcttctcaaggttctgagtatgattatgttatcttttgcgtgaccactgattcagcacacgcacttaacatggctcgttt

SEQ ID NO: 11176 - DNA, 80 bp, synthetic construct
  misc_feature 1..80: note = Synthetic: >HKU15-cand-15860-15939
  source 1..80: mol_type = other DNA
gaacgttgcccttacacgcgcaaagataggtatccttgtggtgtttaggcaggcaaacgaactttacaatagtttgcagt

SEQ ID NO: 11177 - DNA, 80 bp, synthetic construct
  misc_feature 1..80: note = Synthetic: >HKU15-cand-15940-16019
  source 1..80: mol_type = other DNA
ttgaatctattgattcacagcttcagtcgagtgctgagaaaaacctcacaccactgtttaagcgctgcggctatgagtat

SEQ ID NO: 11178 - DNA, 80 bp, synthetic construct
  misc_feature 1..80: note = Synthetic: >HKU15-cand-16100-16179
  source 1..80: mol_type = other DNA
agtaggagttgccgatggcactcttatatcatacaaaaccctagtatccacacttgggtttcttccatcacttaaaattg

SEQ ID NO: 11179 - DNA, 80 bp, synthetic construct
  misc_feature 1..80: note = Synthetic: >HKU15-cand-16260-16339
  source 1..80: mol_type = other DNA
gcacacgccataaaacctaacaccgggactaacctgccattgcaaataggttttagtaccggaaagaatttttcagtcac

SEQ ID NO: 11180 - DNA, 80 bp, synthetic construct
  misc_feature 1..80: note = Synthetic: >HKU15-cand-16580-16659
  source 1..80: mol_type = other DNA
aggtatggaagagaaatgcttttgtggcaggcgggcttgtttcactaatggaactgagttcgcttgcaaagcacaccatt

SEQ ID NO: 11181 - DNA, 80 bp, synthetic construct
  misc_feature 1..80: note = Synthetic: >HKU15-cand-16660-16739
  source 1..80: mol_type = other DNA
ctctcaccattccacaatgtgattatgtgtacaatccattcctcatcgacgtggctacgtggggattctcgggacggctt

SEQ ID NO: 11182 - DNA, 80 bp, synthetic construct
  misc_feature 1..80: note = Synthetic: >HKU15-cand-20610-20689
  source 1..80: mol_type = other DNA
atgtctgcactgactacactatctatggagtctctggtactggcattattaagccatcagatctcttattgcacaatggc

SEQ ID NO: 11183 - DNA, 80 bp, synthetic construct
  misc_feature 1..80: note = Synthetic: >HKU15-cand-20690-20769
  source 1..80: mol_type = other DNA
atagcattcacctctccaacaggtgagctttatgcatttaaaaatataaccactggcaaaacccttcaggtcttaccgtg

SEQ ID NO: 11184 - DNA, 80 bp, synthetic construct
  misc_feature 1..80: note = Synthetic: >HKU15-cand-20770-20849
  source 1..80: mol_type = other DNA
tgaaaccccttctcaactgattgtgataaacaacaccgttgtcggtgctatcacatccagtaattcaactgaaaataata

SEQ ID NO: 11185 - DNA, 80 bp, synthetic construct
  misc_feature 1..80: note = Synthetic: >HKU15-cand-20860-20939
  source 1..80: mol_type = other DNA
tactattgtcacacctactttcttttattccacaaatgccaccactttcaactgcactaagcctgttttgtcctatggac

SEQ ID NO: 11186 - DNA, 80 bp, synthetic construct
  misc_feature 1..80: note = Synthetic: >HKU15-cand-20940-21019
  source 1..80: mol_type = other DNA
ctatcagcgtgtgtagtgatggtgcaattgtgggaacatccacattacagaatactcgaccatccatagtttcactatac

SEQ ID NO: 11187 - DNA, 80 bp, synthetic construct
  misc_feature 1..80: note = Synthetic: >HKU15-cand-21020-21099
  source 1..80: mol_type = other DNA
gatggcgaagttgaaataccatctgcattttctctttctgttcagacggagtacttgcaagttcaagcagagcaagttat

SEQ ID NO: 11188 - DNA, 80 bp, synthetic construct
  misc_feature 1..80: note = Synthetic: >HKU15-cand-21100-21179
  source 1..80: mol_type = other DNA
agttgattgtcctcagtatgtatgcaatggcaacagccgttgtctacaattactggcacaatacacctcagcttgctcta

SEQ ID NO: 11189 - DNA, 80 bp, synthetic construct
  misc_feature 1..80: note = Synthetic: >HKU15-cand-21180-21259
  source 1..80: mol_type = other DNA
acattgaagcagctctgcattcctctgcacagttggatagcagagagattataaatatgtttcaaacatcaacacagtcc

SEQ ID NO: 11190 - DNA, 80 bp, synthetic construct
  misc_feature 1..80: note = Synthetic: >HKU15-cand-21260-21339
  source 1..80: mol_type = other DNA
ttgcagttagctaatattaccaacttcaagggtgactacaattttagcagcatactaaccaccagaattggtggcagatc

SEQ ID NO: 11191 - DNA, 80 bp, synthetic construct
  misc_feature 1..80: note = Synthetic: >HKU15-cand-21340-21419
  source 1..80: mol_type = other DNA
tgctattgaagaccttctttttaataaagttgttactagtggccttggcactgttgatcaggactacaaatcctgctcta

SEQ ID NO: 11192 - DNA, 80 bp, synthetic construct
  misc_feature 1..80: note = Synthetic: >HKU15-cand-21420-21499
  source 1..80: mol_type = other DNA
gagacatggccatcgctgacttagtttgttcccagtattacaatggcatcatggttctacctggtgttgttgatgctgag

SEQ ID NO: 11193 - DNA, 80 bp, synthetic construct
  misc_feature 1..80: note = Synthetic: >HKU15-cand-21500-21579
  source 1..80: mol_type = other DNA
aaaatggcaatgtatactggctctcttactggagctatggtatttggaggactgactgccgcagcggcaataccatttgc

SEQ ID NO: 11194 - DNA, 80 bp, synthetic construct
  misc_feature 1..80: note = Synthetic: >HKU15-cand-21580-21659
  source 1..80: mol_type = other DNA
cacggcagtacaagctcgcctcaattatgtcgcactgcaaacaaatgtactacaagaaaaccagaaaattcttgcagaat

SEQ ID NO: 11195 - DNA, 80 bp, synthetic construct
  misc_feature 1..80: note = Synthetic: >HKU15-cand-21660-21739
  source 1..80: mol_type = other DNA
catttaaccaagcagttggcaatatatcacttgcactatcttctgttaatgatgccatccagcaaacttctgaggctctt

SEQ ID NO: 11196 - DNA, 80 bp, synthetic construct
  misc_feature 1..80: note = Synthetic: >HKU15-cand-21740-21819
  source 1..80: mol_type = other DNA
aacaccgtagctattgctattaaaaagattcaaacagttgttaaccagcagggcgaggcattatcacacctgactgcaca

SEQ ID NO: 11197 - DNA, 80 bp, synthetic construct
  misc_feature 1..80: note = Synthetic: >HKU15-cand-21820-21899
  source 1..80: mol_type = other DNA
gctgtcaaacaattttcaagcaatttcgacttctattcaagacatttacaaccgtcttgaggaagtagaggctaaccagc

SEQ ID NO: 11198 - DNA, 80 bp, synthetic construct
  misc_feature 1..80: note = Synthetic: >HKU4-cand-3330-3409
  source 1..80: mol_type = other DNA
aggtgaaagcatctcagatgagttgtgtgtagttgaaacagccgaagcacaagaaccaagtgtagagtcaatagactcta

SEQ ID NO: 11199 - DNA, 80 bp, synthetic construct
  misc_feature 1..80: note = Synthetic: >HKU4-cand-3490-3569
  source 1..80: mol_type = other DNA
ctagaagtggaaacggccgtagtaggtggacctgtgtcagatgtcacggctagtgttgtgacaaatgacatagtgtctgt

SEQ ID NO: 11200 - DNA, 80 bp, synthetic construct
  misc_feature 1..80: note = Synthetic: >HKU4-cand-3650-3729
  source 1..80: mol_type = other DNA
atttacaaggtaatgaattactttgttcagaaactaaggttgaaatagtacaacctagacaagatttgaagccaagacgc

SEQ ID NO: 11201 - DNA, 80 bp, synthetic construct
  misc_feature 1..80: note = Synthetic: >HKU4-cand-3890-3969
  source 1..80: mol_type = other DNA
ctggtgctataaataaggcatctggtggtgatgttcaggaagaatcagatgaatatataagtaataatggaccacttcat

SEQ ID NO: 11202 - DNA, 80 bp, synthetic construct
  misc_feature 1..80: note = Synthetic: >HKU4-cand-4050-4129
  source 1..80: mol_type = other DNA
tgaagatgctgctttacttaaacgctgttataaggcgtttaataagcatactattgtagtaacaccgttaatatcagctg

SEQ ID NO: 11203 - DNA, 80 bp, synthetic construct
  misc_feature 1..80: note = Synthetic: >HKU4-cand-4210-4289
  source 1..80: mol_type = other DNA
aatgaggatatttataatacacttgcaacaccatcaaaaccagatggtcttgtttattcatttgaaggatggcgtggtac

SEQ ID NO: 11204 - DNA, 80 bp, synthetic construct
  misc_feature 1..80: note = Synthetic: >HKU4-cand-4370-4449
  source 1..80: mol_type = other DNA
aaggtgtggatactactaagaaaattcaaacagttgatggtgttagctattatttatatagtgctagagatgccttgact

SEQ ID NO: 11205 - DNA, 80 bp, synthetic construct
  misc_feature 1..80: note = Synthetic: >HKU4-cand-4450-4529
  source 1..80: mol_type = other DNA
gatgttattgcagctgctaatggctgctcaggtatttgtgccatgccttttggctacgttacgcatggacttgatttggc

SEQ ID NO: 11206 - DNA, 80 bp, synthetic construct
  misc_feature 1..80: note = Synthetic: >Lucheng19-cand-7680-7759
  source 1..80: mol_type = other DNA
agtttggagtgttaacgtttttaccaagctatctaccgacacacaagattacatcgttaaaactacgaaggctaagggac

SEQ ID NO: 11207 - DNA, 80 bp, synthetic construct
  misc_feature 1..80: note = Synthetic: >Lucheng19-cand-7760-7839
  source 1..80: mol_type = other DNA
ttctctttcttctaacatttaatgaccatgttaatacgcagaatctgccgtgtaacatggtcaactctaaaaatgctggc

SEQ ID NO: 11208 - DNA, 80 bp, synthetic construct
  misc_feature 1..80: note = Synthetic: >Lucheng19-cand-7840-7919
  source 1..80: mol_type = other DNA
atcccaaatccaaggaggttgaagaactttggactggccaagacatgttactacatgattccagcagccgctattgccta

SEQ ID NO: 11209 - DNA, 80 bp, synthetic construct
  misc_feature 1..80: note = Synthetic: >Lucheng19-cand-7920-7999
  source 1..80: mol_type = other DNA
tgctactgtctgggtgtctaatattaattttaaaacagccacattcgacagcgtcccggaatatgattttcgttatatag

SEQ ID NO: 11210 - DNA, 80 bp, synthetic construct
  misc_feature 1..80: note = Synthetic: >Lucheng19-cand-8000-8079
  source 1..80: mol_type = other DNA
agaatggtgctatgaaattctttaataaagagctaccctgtgtctacaacctgtataaagaatttccagactggcataaa

SEQ ID NO: 11211 - DNA, 80 bp, synthetic construct
  misc_feature 1..80: note = Synthetic: >Lucheng19-cand-8080-8159
  source 1..80: mol_type = other DNA
cagcgatatggatcagttccaacattttctgcaagctgtccaataattgtaggcgccaacgatcttaacaccaatgtagt

SEQ ID NO: 11212 - DNA, 80 bp, synthetic construct
  misc_feature 1..80: note = Synthetic: >Lucheng19-cand-8160-8239
  source 1..80: mol_type = other DNA
tccaaacgtaccatctaatgtggcactggcgggaaggatactggtttttacctatcaaacacactttggccatagtaaac

SEQ ID NO: 11213 - DNA, 80 bp, synthetic construct
  misc_feature 1..80: note = Synthetic: >Lucheng19-cand-8240-8319
  source 1..80: mol_type = other DNA
tgtgctttaatgatgcatacaattctaatatggccaaaatctcagatggcgactgtgaacgtgcagcaatctttccttct

SEQ ID NO: 11214 - DNA, 80 bp, synthetic construct
  misc_feature 1..80: note = Synthetic: >Lucheng19-cand-8320-8399
  source 1..80: mol_type = other DNA
gcctgcaccacactccaaggtgtgggtggtaggcaggtctattgctttacggatggcctatacccgggcgctaagctata

SEQ ID NO: 11215 - DNA, 80 bp, synthetic construct
  misc_feature 1..80: note = Synthetic: >Lucheng19-cand-8400-8479
  source 1..80: mol_type = other DNA
ttcggacataatgccacacttaaggtattatactgatgccaacaattacattatgttacccgaggttattatgcgtggct

SEQ ID NO: 11216 - DNA, 80 bp, synthetic construct
  misc_feature 1..80: note = Synthetic: >Lucheng19-cand-8480-8559
  source 1..80: mol_type = other DNA
ttggttttaaaataacacgctttttggaagaaacatactgcagagttggtgaatgcgcaaaatccaatgcaggaatatgc

SEQ ID NO: 11217 - DNA, 80 bp, synthetic construct
  misc_feature 1..80: note = Synthetic: >Lucheng19-cand-8560-8639
  source 1..80: mol_type = other DNA
gtaagcgccgacgagtggtatgtttatgataagaacataggtgacaattacgtttgcagcaaagatgttaaagggctcgt

SEQ ID NO: 11218 - DNA, 80 bp, synthetic construct
  misc_feature 1..80: note = Synthetic: >Lucheng19-cand-8640-8719
  source 1..80: mol_type = other DNA
atgggctttccttagcgtctttaatgcaaacattggcactgtactacttacaggccaacttacacttaacactgtgatag

SEQ ID NO: 11219 - DNA, 80 bp, synthetic construct
  misc_feature 1..80: note = Synthetic: >Lucheng19-cand-8720-8799
  source 1..80: mol_type = other DNA
cttgtgccattgttggcatctgctacacatttgttaagtttaagagaatatttggtgatatgtcgacattggtactgatg

SEQ ID NO: 11220 - DNA, 80 bp, synthetic construct
  misc_feature 1..80: note = Synthetic: >Lucheng19-cand-8800-8879
  source 1..80: mol_type = other DNA
gtgctggctgcaacagttattaattctatgagttatttgcttacagtgaactttgtgttcctgatgttgtacacttgtgt

SEQ ID NO: 11221 - DNA, 80 bp, synthetic construct
  misc_feature 1..80: note = Synthetic: >Lucheng19-cand-8880-8959
  source 1..80: mol_type = other DNA
gtacttcatctcgacgcgaaaggtgcacttcccaatggtctgggacttaatgtatgtggtagcctacgtttttgttgcac

SEQ ID NO: 11222 - DNA, 80 bp, synthetic construct
  misc_feature 1..80: note = Synthetic: >Lucheng19-cand-11520-11599
  source 1..80: mol_type = other DNA
aatggctgataatgctgctgcacagatgtttaaagatgcacgtaatgtcgatcgcaaggctaaagttgtatcatccatgc

SEQ ID NO: 11223 - DNA, 80 bp, synthetic construct
  misc_feature 1..80: note = Synthetic: >Lucheng19-cand-11600-11679
  source 1..80: mol_type = other DNA
acggactgctggtcgctatgcttagaagactcgacatgtcatctattaacgaactgatggaccttgcaaaagatggtatc

SEQ ID NO: 11224 - DNA, 80 bp, synthetic construct
  misc_feature 1..80: note = Synthetic: >Lucheng19-cand-11680-11759
  source 1..80: mol_type = other DNA
ctacccctggctgtcataccagcggctgcatccaacagactgatagttgtaacaccgtctattgaagcttttgataaaat

SEQ ID NO: 11225 - DNA, 80 bp, synthetic construct
  misc_feature 1..80: note = Synthetic: >Lucheng19-cand-11760-11839
  source 1..80: mol_type = other DNA
taggcatgacaacagcatttgctatgccggtgcagcatggacaattacagctattaaggatgttgatggtacaactgtgc

SEQ ID NO: 11226 - DNA, 80 bp, synthetic construct
  misc_feature 1..80: note = Synthetic: >Lucheng19-cand-11840-11919
  source 1..80: mol_type = other DNA
aactagcagaagtctgtgcaaataatgacaaaacactgaattggccactgcatattgaagcagaacgcattgttaaatta

SEQ ID NO: 11227 - DNA, 80 bp, synthetic construct
  misc_feature 1..80: note = Synthetic: >Lucheng19-cand-11920-11999
  source 1..80: mol_type = other DNA
caaaataatgaaatcacaccaggtaaacttgcacaacgtgtggttaatacagacagtggcacaggaaaagccctctactg

SEQ ID NO: 11228 - DNA, 80 bp, synthetic construct
  misc_feature 1..80: note = Synthetic: >Lucheng19-cand-12000-12079
  source 1..80: mol_type = other DNA
taatgaacaaggtaaaggttttatctatgcactacttgctgatactccagatatcacatatattaaatgggataatggcc

SEQ ID NO: 11229 - DNA, 80 bp, synthetic construct
  misc_feature 1..80: note = Synthetic: >Lucheng19-cand-12080-12159
  source 1..80: mol_type = other DNA
taggagatgatatggtaatagaacttgaaaaacctgttaaattctcagtacaaacacctaatggcccacaaattaagtat

SEQ ID NO: 11230 - DNA, 80 bp, synthetic construct
  misc_feature 1..80: note = Synthetic: >Lucheng19-cand-12240-12319
  source 1..80: mol_type = other DNA
tggtaaacctaccgagtatgcaacagattgtcaaatactaactctttgtgccttcgctgtaaaccctaaggatgcatatt

SEQ ID NO: 11231 - DNA, 80 bp, synthetic construct
  misc_feature 1..80: note = Synthetic: >Lucheng19-cand-12320-12399
  source 1..80: mol_type = other DNA
taacagctgttaaacagggtcataaaccacttagcaattgtattaagatgataaataatggcagtggaaacggcctggct

SEQ ID NO: 11232 - DNA, 80 bp, synthetic construct
  misc_feature 1..80: note = Synthetic: >Lucheng19-cand-12400-12479
  source 1..80: mol_type = other DNA
attacacaacgtgtagaagctaacacagtacaagattcatatggtggcgcgtcatgctgtctatactgtagagcaagcgt

SEQ ID NO: 11233 - DNA, 80 bp, synthetic construct
  misc_feature 1..80: note = Synthetic: >Lucheng19-cand-12480-12559
  source 1..80: mol_type = other DNA
ggaacacccgagtatgaatggtatttgcaatctaagaggtaagtacgtgcaagtacccactggcacaacagatccagtac

SEQ ID NO: 11234 - DNA, 80 bp, synthetic construct
  misc_feature 1..80: note = Synthetic: >Lucheng19-cand-12560-12639
  source 1..80: mol_type = other DNA
gttttgttcttgagaacgaagtctgctctgtctgctcatgttggctgggacatggatgcgtctgcgatcgcagtaccgtc

SEQ ID NO: 11235 - DNA, 80 bp, synthetic construct
  misc_feature 1..80: note = Synthetic: >Lucheng19-cand-12720-12799
  source 1..80: mol_type = other DNA
catgtgataagagcttttgatatttacaataaggacgtggcatgtataactaagtttcctaaaataaactgtgtgagatt

SEQ ID NO: 11236 - DNA, 80 bp, synthetic construct
  misc_feature 1..80: note = Synthetic: >PEDV-cand-12510-12589
  source 1..80: mol_type = other DNA
tgtacttgagaatgacgtttgcaaggtttgtggttgttggctggctaatggctgcacttgtgacagatccattatgcaaa

SEQ ID NO: 11237 - DNA, 80 bp, synthetic construct
  misc_feature 1..80: note = Synthetic: >PEDV-cand-12590-12669
  source 1..80: mol_type = other DNA
gcactgatatggcttatttaaacgagtacggggctctagtgcagctcgactagagccctgtaacggtactgatacacaac

SEQ ID NO: 11238 - DNA, 80 bp, synthetic construct
  misc_feature 1..80: note = Synthetic: >PEDV-cand-12670-12749
  source 1..80: mol_type = other DNA
atgtgtatcgtgcttttgacatctacaacaaggatgttgcttgtctaggtaaattcctcaaggtgaactgtgttcgcctg

SEQ ID NO: 11239 - DNA, 80 bp, synthetic construct
  misc_feature 1..80: note = Synthetic: >PEDV-cand-12750-12829
  source 1..80: mol_type = other DNA
aagaatttggataagcatgatgcattctatgttgtcaaaagatgtaccaagtctgcgatggaacacgagcaatccatcta

SEQ ID NO: 11240 - DNA, 80 bp, synthetic construct
  misc_feature 1..80: note = Synthetic: >PEDV-cand-12830-12909
  source 1..80: mol_type = other DNA
tagcagacttgaaaagtgtggagccgtagccgaacacgatttcttcacttggaaggatggtcgtgccatctatggtaacg

SEQ ID NO: 11241 - DNA, 80 bp, synthetic construct
  misc_feature 1..80: note = Synthetic: >PEDV-cand-12910-12989
  source 1..80: mol_type = other DNA
tttgtagaaaggatcttaccgagtatactatgatggatttgtgttacgctttacgtaactttgatgaaaacaattgcgat

SEQ ID NO: 11242 - DNA, 80 bp, synthetic construct
  misc_feature 1..80: note = Synthetic: >PEDV-cand-12990-13069
  source 1..80: mol_type = other DNA
gttcttaagagcattttaattaaggtaggcgcttgtgaggagtcctacttcaataataaagtctggtttgaccctgttga

SEQ ID NO: 11243 - DNA, 80 bp, synthetic construct
  misc_feature 1..80: note = Synthetic: >PEDV-cand-13070-13149
  source 1..80: mol_type = other DNA
aaatgaagacattcatcgtgtctatgcattgttaggtaccattgtttcacgtgctatgcttaaatgcgttaagttctgtg

SEQ ID NO: 11244 - DNA, 80 bp, synthetic construct
  misc_feature 1..80: note = Synthetic: >PEDV-cand-13150-13229
  source 1..80: mol_type = other DNA
atgcaatggttgaacaaggtatagttggtgttgtcacattagataatcaggatcttaatggtgatttttatgattttggt

SEQ ID NO: 11245 - DNA, 80 bp, synthetic construct
  misc_feature 1..80: note = Synthetic: >PEDV-cand-13230-13309
  source 1..80: mol_type = other DNA
gattttacttgtagcatcaagggaatgggtatacccatttgcacatcatattactcttatatgatgcctgttatgggtat

SEQ ID NO: 11246 - DNA, 80 bp, synthetic construct
  misc_feature 1..80: note = Synthetic: >PEDV-cand-13310-13389
  source 1..80: mol_type = other DNA
gactaattgccttgctagtgagtgttttgttaagagtgatatatttggtgaggatttcaagtcatatgacctgctggaat

SEQ ID NO: 11247 - DNA, 80 bp, synthetic construct
  misc_feature 1..80: note = Synthetic: >PEDV-cand-13390-13469
  source 1..80: mol_type = other DNA
atgatttcacggagcataagacagcactcttcaacaagtatttcaagtattggggactgcaataccaccctaactgtgtg

SEQ ID NO: 11248 - DNA, 80 bp, synthetic construct
  misc_feature 1..80: note = Synthetic: >PEDV-cand-13470-13549
  source 1..80: mol_type = other DNA
gactgcagtgatgagcagtgcatagttcactgtgccaacttcaatacgttgttttccactactatacctattacggcatt

SEQ ID NO: 11249 - DNA, 80 bp, synthetic construct
  misc_feature 1..80: note = Synthetic: >PEDV-cand-13550-13629
  source 1..80: mol_type = other DNA
tggacctttgtgtcgcaagtgttggattgatggtgttccactggtaactacagctggttatcattttaaacagttaggta

SEQ ID NO: 11250 - DNA, 80 bp, synthetic construct
  misc_feature 1..80: note = Synthetic: >PEDV-cand-13630-13709
  source 1..80: mol_type = other DNA
tagtttggaacaatgacctcaacttacactctagcaggctctctattaacgaattactccagttttgtagtgatcctgca

SEQ ID NO: 11251 - DNA, 80 bp, synthetic construct
  misc_feature 1..80: note = Synthetic: >PEDV-cand-13710-13789
  source 1..80: mol_type = other DNA
ttgcttatagcatcatcaccagcccttgttgatcagcgtactgtttgcttttcagttgcagcgctaggtacaggtatgac

SEQ ID NO: 11252 - DNA, 80 bp, synthetic construct
  misc_feature 1..80: note = Synthetic: >PEDV-cand-20180-20259
  source 1..80: mol_type = other DNA
atattaatggtgtcatcaccgaaaagttggcacttggtggtactgtagctattaaggtgacggagtttagttggaataag

SEQ ID NO: 11253 - DNA, 80 bp, synthetic construct
  misc_feature 1..80: note = Synthetic: >PEDV-cand-20260-20339
  source 1..80: mol_type = other DNA
aagttgtatgaactcattcagaggtttgagtattggacaatgttctgtaccagtgttaacacgtcatcgtcagaggcatt

SEQ ID NO: 11254 - DNA, 80 bp, synthetic construct
  misc_feature 1..80: note = Synthetic: >PEDV-cand-20340-20419
  source 1..80: mol_type = other DNA
tttaattggtgttcactatttaggtgattttgcaagtggcgctgtgattgacggcaacactatgcatgccaattatatct

SEQ ID NO: 11255 - DNA, 80 bp, synthetic construct
  misc_feature 1..80: note = Synthetic: >PEDV-cand-20420-20499
  source 1..80: mol_type = other DNA
tctggcgtaattccacaattatgactatgtcttacaatagtgtacttgatttaagcaagttcaattgtaagcataaggct

SEQ ID NO: 11256 - DNA, 80 bp, synthetic construct
  misc_feature 1..80: note = Synthetic: >PEDV-cand-20500-20579
  source 1..80: mol_type = other DNA
acagttgtcattaatttaaaagattcatccattagtgatgttgtgttaggtttgttgaagaatggtaagttgctagtgcg

SEQ ID NO: 11257 - DNA, 80 bp, synthetic construct
  misc_feature 1..80: note = Synthetic: >PEDV-cand-20580-20659
  source 1..80: mol_type = other DNA
taataatgacgccatttgtggtttttctaatcatttggtcaacgtaaacaaatgaagtctttaacctacttctggttgtt

SEQ ID NO: 11258 - DNA, 80 bp, synthetic construct
  misc_feature 1..80: note = Synthetic: >PEDV-cand-20660-20739
  source 1..80: mol_type = other DNA
cttaccagtactttcaacacttagcctaccacaagatgtcaccaggtgctcagctaacactaattttaggcggttctttt

SEQ ID NO: 11259 - DNA, 80 bp, synthetic construct
  misc_feature 1..80: note = Synthetic: >PEDV-cand-20740-20819
  source 1..80: mol_type = other DNA
caaaatttaatgttcaggcgcctgcagttgttgtactgggcggttatctacctattggtgaaaaccagggtgtcaattca

SEQ ID NO: 11260 - DNA, 80 bp, synthetic construct
  misc_feature 1..80: note = Synthetic: >PEDV-cand-20820-20899
  source 1..80: mol_type = other DNA
actagctggtactgtgctggccaacatccaactgctagtggcgttcatggtatctttgttagccatattagaggtggtca

SEQ ID NO: 11261 - DNA, 80 bp, synthetic construct
  misc_feature 1..80: note = Synthetic: >PEDV-cand-20900-20979
  source 1..80: mol_type = other DNA
tggctttgagattggcatttcgcaagagccttttgaccctagtggttaccagctttatttacataaggctactaacggta

SEQ ID NO: 11262 - DNA, 80 bp, synthetic construct
  misc_feature 1..80: note = Synthetic: >PEDV-cand-20980-21059
  source 1..80: mol_type = other DNA
acactaatgctactgcgcgactgcgcatttgccagtttcctagcattaaaacattgggccccactgctaataatgatgtt

SEQ ID NO: 11263 - DNA, 80 bp, synthetic construct
  misc_feature 1..80: note = Synthetic: >PEDV-cand-21060-21139
  source 1..80: mol_type = other DNA
acaacaggtcgtaattgcctatttaacaaagccatcccagctcatatgcaggatagtgaacatagtgttgtcggcataac

SEQ ID NO: 11264 - DNA, 80 bp, synthetic construct
  misc_feature 1..80: note = Synthetic: >PEDV-cand-21140-21219
  source 1..80: mol_type = other DNA
atgggataatgatcgtgtcactgtcttttctgacaagatctattatttttattttaaaaatgccaattggtcccgtgttg

SEQ ID NO: 11265 - DNA, 80 bp, synthetic construct
  misc_feature 1..80: note = Synthetic: >PEDV-cand-21220-21299
  source 1..80: mol_type = other DNA
cgacaaagtgttacaacagtggaggttgtgctatgcaatatgtttacgaacccacctattacatgcttaatgttactagt

SEQ ID NO: 11266 - DNA, 80 bp, synthetic construct
  misc_feature 1..80: note = Synthetic: >PEDV-cand-21300-21379
  source 1..80: mol_type = other DNA
gctggtgaggatggtatttcttatcaaccctgtacagctaattgcattggttatgctgccaatgtatttgctactgagcc

SEQ ID NO: 11267 - DNA, 80 bp, synthetic construct
  misc_feature 1..80: note = Synthetic: >PEDV-cand-21380-21459
  source 1..80: mol_type = other DNA
caatggccacataccagaaggttttagttttaataattggtttcttttgtccaatgattccactttggtgcatggtaagg

SEQ ID NO: 11268 - DNA, 80 bp, synthetic construct
  misc_feature 1..80: note = Synthetic: >PEDV-cand-24010-24089
  source 1..80: mol_type = other DNA
ttaaatcgcaatctcagcgttatggtttttgtggtggtgatggcgagcacattttctctctggtacaggcagcacctcag

SEQ ID NO: 11269 - DNA, 80 bp, synthetic construct
  misc_feature 1..80: note = Synthetic: >PEDV-cand-24090-24169
  source 1..80: mol_type = other DNA
ggcctgctgtttttacatacagtacttgtaccgagtgattttgtagatgttattgccatcgctggcttatgcgttaacga

SEQ ID NO: 11270 - DNA, 80 bp, synthetic construct
  misc_feature 1..80: note = Synthetic: >PEDV-cand-24170-24249
  source 1..80: mol_type = other DNA
tgaaattgccttgactctacgtgagcctggcttagtcttgtttacgcatgaacttcaaaatcatactgcgacggaatatt

SEQ ID NO: 11271 - DNA, 80 bp, synthetic construct
  misc_feature 1..80: note = Synthetic: >PEDV-cand-24250-24329
  source 1..80: mol_type = other DNA
ttgtttcatcgcgacgtatgtttgaacctagaaaacctaccgttagtgattttgttcaaattgagagttgtgtggtcacc

SEQ ID NO: 11272 - DNA, 80 bp, synthetic construct
  misc_feature 1..80: note = Synthetic: >PEDV-cand-24330-24409
  source 1..80: mol_type = other DNA
tatgtcaatttgactagagaccaactaccagatgtaatcccagattacatcgatgttaacaaaacacttgatgagatttt

SEQ ID NO: 11273 - DNA, 80 bp, synthetic construct
  misc_feature 1..80: note = Synthetic: >PEDV-cand-24410-24489
  source 1..80: mol_type = other DNA
agcttctctgcccaatagaactggtccaagtcttcctttagatgtttttaatgccacttatcttaatctcactggtgaaa

SEQ ID NO: 11274 - DNA, 80 bp, synthetic construct
  misc_feature 1..80: note = Synthetic: >PEDV-cand-24490-24569
  source 1..80: mol_type = other DNA
ttgcagatttagagcagcgttcagagtctctccgtaatactacagaggagctccaaagtcttatatataatatcaacaac

SEQ ID NO: 11275 - DNA, 80 bp, synthetic construct
  misc_feature 1..80: note = Synthetic: >PEDV-cand-24570-24649
  source 1..80: mol_type = other DNA
acactagttgaccttgagtggctcaaccgagttgagacatatatcaagtggccgtggtgggtttggttgattattttcat

SEQ ID NO: 11276 - DNA, 80 bp, synthetic construct
  misc_feature 1..80: note = Synthetic: >PEDV-cand-24650-24729
  source 1..80: mol_type = other DNA
tgttctcatctttgttgtgtcattactagtgttctgctgcatttccacgggttgttgtggatgctgcggctgctgctgtg

SEQ ID NO: 11277 - DNA, 80 bp, synthetic construct
  misc_feature 1..80: note = Synthetic: >PEDV-cand-24730-24809
  source 1..80: mol_type = other DNA
cttgtttctcaggttgttgtaggggtcctagacttcaaccttacgaagtttttgaaaaggtccacgtgcagtgatgtttc

SEQ ID NO: 11278 - DNA, 80 bp, synthetic construct
  misc_feature 1..80: note = Synthetic: >PEDV-cand-24810-24889
  source 1..80: mol_type = other DNA
ttggactttttcaatacacgattgacacagttgtcaaagatgtctcaaagtctgctaacttgtctttggatgctgtccaa

SEQ ID NO: 11279 - DNA, 80 bp, synthetic construct
  misc_feature 1..80: note = Synthetic: >PEDV-cand-24890-24969
  source 1..80: mol_type = other DNA
gagttggagctcaatgtagttccaattagacaagcttcaaatgtgacgggttttcttttcaccagtgtttttatctactt

SEQ ID NO: 11280 - DNA, 80 bp, synthetic construct
  misc_feature 1..80: note = Synthetic: >PEDV-cand-24970-25049
  source 1..80: mol_type = other DNA
ctttgcactgtttaaagcgtcttctttgaggcgcaattatattatgttggcagcgcgttttgctgtcattgttctttatt

SEQ ID NO: 11281 - DNA, 80 bp, synthetic construct
  misc_feature 1..80: note = Synthetic: >PEDV-cand-25050-25129
  source 1..80: mol_type = other DNA
gcccacttttatattattgtggtgcatttttagatgcaactattatttgttgcacacttattggcaggctttgtttagtc

SEQ ID NO: 11282 - DNA, 80 bp, synthetic construct
  misc_feature 1..80: note = Synthetic: >PEDV-cand-25130-25209
  source 1..80: mol_type = other DNA
tgcttttactcctggcgctataaaaatgcgctctttattatttttaatactacgacactttctttcctcaatggtaaagc

SEQ ID NO: 11283 - DNA, 80 bp, synthetic construct
  misc_feature 1..80: note = Synthetic: >PEDV-cand-25210-25289
  source 1..80: mol_type = other DNA
agcttattatgacggcaaatccattgtgattttagaaggtggtgaccattacatcacttttggcaactcttttgttgctt

SEQ ID NO: 11284 - DNA, 80 bp, synthetic construct
  misc_feature 1..80: note = Synthetic: >PEDV-cand-26570-26649
  source 1..80: mol_type = other DNA
gcgccgtggtgagcgaattgaacaaccttccaattggcatttctactacctcggaacaggacctcacgccgacctccgct

SEQ ID NO: 11285 - DNA, 80 bp, synthetic construct
  misc_feature 1..80: note = Synthetic: >PEDV-cand-26650-26729
  source 1..80: mol_type = other DNA
ataggactcgtactgagggtgttttctgggttgctaaagaaggcgcaaagactgaacccactaacctgggtgtcagaaag

SEQ ID NO: 11286 - DNA, 80 bp, synthetic construct
  misc_feature 1..80: note = Synthetic: >PEDV-cand-26730-26809
  source 1..80: mol_type = other DNA
gcgtctgaaaagccaattattccaaatttctctcaacagcttcccagcgtagttgagattgttgaacctaacacacctcc

SEQ ID NO: 11287 - DNA, 80 bp, synthetic construct
  misc_feature 1..80: note = Synthetic: >PEDV-cand-26810-26889
  source 1..80: mol_type = other DNA
tacttcacgtgcaaattcacgtagcaggagtcgtggtaatggcaacaacaggtccagatctccaagtaacaacagaggca

SEQ ID NO: 11288 - DNA, 80 bp, synthetic construct
  misc_feature 1..80: note = Synthetic: >PEDV-cand-26890-26969
  source 1..80: mol_type = other DNA
ataaccagtcccgcggtaattcacagaatcgtggaaataaccagggtcgtggagcttctcagaacagaggaggcaataat

SEQ ID NO: 11289 - DNA, 80 bp, synthetic construct
  misc_feature 1..80: note = Synthetic: >PEDV-cand-26970-27049
  source 1..80: mol_type = other DNA
aataacaataacaagtctcgtaaccagtccaagaacagaaaccagtcaaatgaccgtggtggtgtaacatcacgcgatga

SEQ ID NO: 11290 - DNA, 80 bp, synthetic construct
  misc_feature 1..80: note = Synthetic: >PEDV-cand-27050-27129
  source 1..80: mol_type = other DNA
tctggtggctgctgtcaaggatgcccttaaatctttgggtattggcgaaaaccctgacaagcttaagcaacagcagaagc

SEQ ID NO: 11291 - DNA, 80 bp, synthetic construct
  misc_feature 1..80: note = Synthetic: >PEDV-cand-27130-27209
  source 1..80: mol_type = other DNA
ccaaacaggaaaggtctgacagcagcggcaaaaatacacctaagaagaacaaatccagagccacttcgaaagaacgtgac

SEQ ID NO: 11292 - DNA, 80 bp, synthetic construct
  misc_feature 1..80: note = Synthetic: >PEDV-cand-27210-27289
  source 1..80: mol_type = other DNA
ctcaaagacatcccagagtggaggagaattcccaagggcgaaaatagcgtagcagcttgcttcggacccaggggaggctt

SEQ ID NO: 11293 - DNA, 80 bp, synthetic construct
  misc_feature 1..80: note = Synthetic: >PEDV-cand-27290-27369
  source 1..80: mol_type = other DNA
caaaaattttggagatgcggaatttgtcgaaaaaggtgttgatgcctcaggctatgctcagatcgccagtttagcaccaa

SEQ ID NO: 11294 - DNA, 80 bp, synthetic construct
  misc_feature 1..80: note = Synthetic: >PEDV-cand-27370-27449
  source 1..80: mol_type = other DNA
atgttgcagcattgctctttggtggtaatgtggctgttcgtgagctagcggactcttacgagattacatataattataaa

SEQ ID NO: 11295 - DNA, 80 bp, synthetic construct
  misc_feature 1..80: note = Synthetic: >PEDV-cand-27450-27529
  source 1..80: mol_type = other DNA
atgactgtgccaaagtctgatccaaatgtagagcttcttgtttcacaggtggatgcatttaaaactgggaatgcaaaacc

SEQ ID NO: 11296 - DNA, 80 bp, synthetic construct
  misc_feature 1..80: note = Synthetic: >PEDV-cand-27530-27609
  source 1..80: mol_type = other DNA
ccagagaaagaaggaaaagaagaacaagcgtgaaaccacgcagcagctgaatgaagaggccatctacgatgatgtgggtg

SEQ ID NO: 11297 - DNA, 80 bp, synthetic construct
  misc_feature 1..80: note = Synthetic: >PEDV-cand-27610-27689
  source 1..80: mol_type = other DNA
tgccatctgatgtgactcatgccaatttggaatgggacacagctgttgatggtggtgacacggccgttgaaattatcaac

SEQ ID NO: 11298 - DNA, 80 bp, synthetic construct
  misc_feature 1..80: note = Synthetic: >PEDV-cand-27690-27769
  source 1..80: mol_type = other DNA
gagatcttcgacacaggaaattaaacaatgtttgactggcttatcctggctatgtcccagggtagtgccattacactgtt

SEQ ID NO: 11299 - DNA, 80 bp, synthetic construct
  misc_feature 1..80: note = Synthetic: >PEDV-cand-27770-27849
  source 1..80: mol_type = other DNA
attactgagtgtttttctagcgacttggctgctgggctatggctttgccctctaactagcggtcttggtcttgcacacaa

SEQ ID NO: 11300 - DNA, 80 bp, synthetic construct
  misc_feature 1..80: note = Synthetic: >Sparrow-cand-7710-7789
  source 1..80: mol_type = other DNA
tgttagcaacatgcaattgcttgctatcattgtgtgtagtattatctactttctctacagctatgttcatactgtagcca

SEQ ID NO: 11301 - DNA, 80 bp, synthetic construct
  misc_feature 1..80: note = Synthetic: >Sparrow-cand-7790-7869
  source 1..80: mol_type = other DNA
agacagcaggaaaattctcctccttcttggacgcagctaaatctacttttgtcattgataatgacaaatatgtattgttg

SEQ ID NO: 11302 - DNA, 80 bp, synthetic construct
  misc_feature 1..80: note = Synthetic: >Sparrow-cand-7870-7949
  source 1..80: mol_type = other DNA
agagacttggcaggtgctgaatttgatcagtatctagcctcttacaacaagtacaaatacttttctggtactgcttctga

SEQ ID NO: 11303 - DNA, 80 bp, synthetic construct
  misc_feature 1..80: note = Synthetic: >Sparrow-cand-7950-8029
  source 1..80: mol_type = other DNA
taaggattatgataaggtctgcatggcatttcttgccaaggcattgtcatctttccgtgaaggaggcggttcccagcttt

SEQ ID NO: 11304 - DNA, 80 bp, synthetic construct
  misc_feature 1..80: note = Synthetic: >Sparrow-cand-8030-8109
  source 1..80: mol_type = other DNA
atacaccacctaagtttgcagttgttcagagtcttaagacaaaattgcaagctggtattaagatcctactgcacccatct

SEQ ID NO: 11305 - DNA, 80 bp, synthetic construct
  misc_feature 1..80: note = Synthetic: >Sparrow-cand-8110-8189
  source 1..80: mol_type = other DNA
ggtgttgtagaacggtgtattgtttcagttgtctacaatggttctgcattgaatggcatctggttaaagaatgttgtcta

SEQ ID NO: 11306 - DNA, 80 bp, synthetic construct
  misc_feature 1..80: note = Synthetic: >Sparrow-cand-8180-8259
  source 1..80: mol_type = other DNA
atgttgtctattgcccacgccacgttattggaaaatatcgtggtgagcagtggtcacacatggtttctatagctgactgc

SEQ ID NO: 11307 - DNA, 80 bp, synthetic construct
  misc_feature 1..80: note = Synthetic: >Sparrow-cand-8260-8339
  source 1..80: mol_type = other DNA
cgagactttattgtcaagtgtccaacacagggtattcagcttaatgttcaatctgttaagatggtaggggctctcctcca

SEQ ID NO: 11308 - DNA, 80 bp, synthetic construct
  misc_feature 1..80: note = Synthetic: >Sparrow-cand-8340-8419
  source 1..80: mol_type = other DNA
actgacagttcatacaaacaacacagccacaccagactacaagtttgagaggctggcaccaggatcatcgatgacaattg

SEQ ID NO: 11309 - DNA, 80 bp, synthetic construct
  misc_feature 1..80: note = Synthetic: >Sparrow-cand-8420-8499
  source 1..80: mol_type = other DNA
cctgcgcctatgatggcgttgttcggcatgtctatcatgtggtcctacaacttaacaatcttatttatgcaagcttcctt

SEQ ID NO: 11310 - DNA, 80 bp, synthetic construct
  misc_feature 1..80: note = Synthetic: >Sparrow-cand-8500-8579
  source 1..80: mol_type = other DNA
aatggagcttgtggtagtgttggctatacccttaaaggtaagacactctacttacactatatgcaccacattgagtttaa

SEQ ID NO: 11311 - DNA, 80 bp, synthetic construct
  misc_feature 1..80: note = Synthetic: >Sparrow-cand-8580-8659
  source 1..80: mol_type = other DNA
caacaagactcatagtggtacagatctagagggtaacttctacggaccttatgtcgacgaagaagttatacaacatcaga

SEQ ID NO: 11312 - DNA, 80 bp, synthetic construct
  misc_feature 1..80: note = Synthetic: >Sparrow-cand-8660-8739
  source 1..80: mol_type = other DNA
cagcatttcagtattacactgataatgttgttgctcaactttatgctcacttgctgactgttgatgctagacctaagtgg

SEQ ID NO: 11313 - DNA, 80 bp, synthetic construct
  misc_feature 1..80: note = Synthetic: >Sparrow-cand-8740-8819
  source 1..80: mol_type = other DNA
cttgctcaatctcagataagtgttgaagactttaacgcatgggctgctaacaattcctttgctaacttcccgtgtgaaca

SEQ ID NO: 11314 - DNA, 80 bp, synthetic construct
  misc_feature 1..80: note = Synthetic: >Sparrow-cand-8820-8899
  source 1..80: mol_type = other DNA
aactaacatgtcctacattatgggactcgcacagactgccagaatccccgtagaacgtatacttaataccattgtgcagc

SEQ ID NO: 11315 - DNA, 80 bp, synthetic construct
  misc_feature 1..80: note = Synthetic: >Sparrow-cand-8900-8979
  source 1..80: mol_type = other DNA
tcacccttaatagagatggagctcttattatgggatcaccagattttgagtgcgattggacgccagaaatggtctacaat

SEQ ID NO: 11316 - DNA, 80 bp, synthetic construct
  misc_feature 1..80: note = Synthetic: >Sparrow-cand-17940-18019
  source 1..80: mol_type = other DNA
actaagaccaaagtgaagaaagctgaaccttttgtttgtagagcactcacactaaatggcctggccattgatggtgatga

SEQ ID NO: 11317 - DNA, 80 bp, synthetic construct
  misc_feature 1..80: note = Synthetic: >Sparrow-cand-18020-18099
  source 1..80: mol_type = other DNA
gctttacatttaccttagacaaaacaaccaactgacaacattcactaccatgtgcacgcagggtagaaatgttgagcaat

SEQ ID NO: 11318 - DNA, 80 bp, synthetic construct
  misc_feature 1..80: note = Synthetic: >Sparrow-cand-18100-18179
  source 1..80: mol_type = other DNA
tcatacctaaaacacctatggaaagagacttccttgagttgtctcaggaatccttcattgagcaatatcaattgcaggat

SEQ ID NO: 11319 - DNA, 80 bp, synthetic construct
  misc_feature 1..80: note = Synthetic: >Sparrow-cand-18180-18259
  source 1..80: mol_type = other DNA
ttaggtgttgaacacataatctatggcgaagactccactcctattatagggggaactcatacgctaatttcactagtcaa

SEQ ID NO: 11320 - DNA, 80 bp, synthetic construct
  misc_feature 1..80: note = Synthetic: >Sparrow-cand-18260-18339
  source 1..80: mol_type = other DNA
aaacaagtttgaatatcaacttgtaaaccacgtttacaacccagtgcagaactgcgttgttacttcacctaatgcaagtt

SEQ ID NO: 11321 - DNA, 80 bp, synthetic construct
  misc_feature 1..80: note = Synthetic: >Sparrow-cand-18340-18419
  source 1..80: mol_type = other DNA
ccaagaacgtttgcacagtacttgatgttctacttgatgactatattgacatcataagacaagcacacgccaattacaca

SEQ ID NO: 11322 - DNA, 80 bp, synthetic construct
  misc_feature 1..80: note = Synthetic: >Sparrow-cand-18420-18499
  source 1..80: mol_type = other DNA
actaagtccaaagtatttactgtgtcaattgacaatcaacaaattagattcatgctttggcatgatgagcaagtcaagac

SEQ ID NO: 11323 - DNA, 80 bp, synthetic construct
  misc_feature 1..80: note = Synthetic: >Sparrow-cand-18500-18579
  source 1..80: mol_type = other DNA
ttgctatccaatattacagtcacttaccaatggataccagatgccatctgtgtacaaaacattggttactgacttacaac

SEQ ID NO: 11324 - DNA, 80 bp, synthetic construct
  misc_feature 1..80: note = Synthetic: >Sparrow-cand-18580-18659
  source 1..80: mol_type = other DNA
cagctgacattcctaactaccattcctacaccccaaaagtgccaggaattgttaagaatgttatcaaataccgtcaactt

SEQ ID NO: 11325 - DNA, 80 bp, synthetic construct
  misc_feature 1..80: note = Synthetic: >Sparrow-cand-18660-18739
  source 1..80: mol_type = other DNA
tttaactacatagttaaaaaggatagacttgctgtaccacacaatatgactgtactacaccttggagcggcttccgcact

SEQ ID NO: 11326 - DNA, 80 bp, synthetic construct
  misc_feature 1..80: note = Synthetic: >Sparrow-cand-18740-18819
  source 1..80: mol_type = other DNA
tggaactgcaccaggctcttcagttataaaacaaatgttacctgaaggaactgtacttattgatcttgacataagagagt

SEQ ID NO: 11327 - DNA, 80 bp, synthetic construct
  misc_feature 1..80: note = Synthetic: >Sparrow-cand-18820-18899
  source 1..80: mol_type = other DNA
tcacttcagatgccaatcaaataataattacagattacaggacttatatgccaccacaccatgtagacgccatattttct

SEQ ID NO: 11328 - DNA, 80 bp, synthetic construct
  misc_feature 1..80: note = Synthetic: >Sparrow-cand-18900-18979
  source 1..80: mol_type = other DNA
gacctctacagctgtgatgacattcacttctttgacaacttaataaggatagttaaagagaggttagctctcggtggttc

SEQ ID NO: 11329 - DNA, 80 bp, synthetic construct
  misc_feature 1..80: note = Synthetic: >Sparrow-cand-18980-19059
  source 1..80: mol_type = other DNA
tatctttgttaaaataactgaacattcatactcacctgaactctactctcttgcggggtggttcgatgattaccaactat

SEQ ID NO: 11330 - DNA, 80 bp, synthetic construct
  misc_feature 1..80: note = Synthetic: >Sparrow-cand-19060-19139
  source 1..80: mol_type = other DNA
tttgtacagcagtaaatgcgtcttcttcggagacctttttatgctgtttcaattatttggggtatgcaaaggaaaacatt

SEQ ID NO: 11331 - DNA, 80 bp, synthetic construct
  misc_feature 1..80: note = Synthetic: >Sparrow-cand-19140-19219
  source 1..80: mol_type = other DNA
aatggttttaacttacatgcctcatatattcaatggcgcaatgaaattgcgttgacaccaacctattctcctttggctga

SEQ ID NO: 11332 - DNA, 80 bp, synthetic construct
  misc_feature 1..80: note = Synthetic: >WIV16-cand-1050-1129
  source 1..80: mol_type = other DNA
acaccttcaaaggggaatgcccaaagtttgtatttcctctcaattcaaaagtcaaagtcattcaaccacgtgttgaaaag

SEQ ID NO: 11333 - DNA, 80 bp, synthetic construct
  misc_feature 1..80: note = Synthetic: >HKU5R-cand-14790-14869
  source 1..80: mol_type = other DNA
tgatgtatgcagctgatccagccatgcacatagcttcagcctctgccctttgggatttaagaacaccatgttttagtgtt

SEQ ID NO: 11334 - DNA, 80 bp, synthetic construct
  misc_feature 1..80: note = Synthetic: >HKU4R-cand-5880-5959
  source 1..80: mol_type = other DNA
attatatgaaggatggtaagtattacactagtaaacctaccattaaatattcacctgctaccatattacctggtagtgtt

SEQ ID NO: 11335 - DNA, 80 bp, synthetic construct
  misc_feature 1..80: note = Synthetic: >HKU4-cand-5890-5969
  source 1..80: mol_type = other DNA
tatatgaaggatggtaagtattatactagtaaacctaccattaaatattcacctgctaccatattacctggtagtgttta

SEQ ID NO: 11336 - DNA, 80 bp, synthetic construct
  misc_feature 1..80: note = Synthetic: >HKU8R-cand-19860-19939
  source 1..80: mol_type = other DNA
catccaagatggtttgttcttatatggatattttgcttgatgactttgttacattgctcaagacattagacttgagtgtt

SEQ ID NO: 11337 - DNA, 80 bp, synthetic construct
  misc_feature 1..80: note = Synthetic: >HKU5R-cand-14230-14309
  source 1..80: mol_type = other DNA
tgtgcttaacactgttaaattttgtgaccagatggttaaatctggtcttgttggtgtcttaacccttgacaatcaggatc

SEQ ID NO: 11338 - DNA, 80 bp, synthetic construct
  misc_feature 1..80: note = Synthetic: >BtRl_BetaCoV-cand-26490-26569
  source 1..80: mol_type = other DNA
taacacttgcttgctttgtgcttgctgctgtttacagaattaattggttgactggcgggattgcgattgcaatggcttgt

SEQ ID NO: 11339 - DNA, 80 bp, synthetic construct
  misc_feature 1..80: note = Synthetic: >Sb512-cand-20120-20199
  source 1..80: mol_type = other DNA
aacagacaagttcgacctggtcatctctgatatgtatgacggtagaactaagtcttgtgatggtgacaatgtttccaaag

SEQ ID NO: 11340 - DNA, 80 bp, synthetic construct
  misc_feature 1..80: note = Synthetic: >BtSk_AlphaCoV-cand-20070-20149
  source 1..80: mol_type = other DNA
cctaacagacaagttcgacctcgtcgtctccgatatgtatgacggtagaactaagtcttgtgatggtgacaatgtttcca

SEQ ID NO: 11341 - DNA, 80 bp, synthetic construct
  misc_feature 1..80: note = Synthetic: >BtRl_BetaCoV-cand-18730-18809
  source 1..80: mol_type = other DNA
atgtggctagttgtgatgctatcatgactagatgcttggcagtccatgagtgctttgttaagcgcgttgattggtctgtt

SEQ ID NO: 11342 - DNA, 80 bp, synthetic construct
  misc_feature 1..80: note = Synthetic: >HKU4-cand-13070-13149
  source 1..80: mol_type = other DNA
taaagaatcttaataatttacatagaggccaactcttggggcatatagctgcaactgtacgtttgcaagctggtgctaat

SEQ ID NO: 11343 - DNA, 80 bp, synthetic construct
  misc_feature 1..80: note = Synthetic: >HKU5R-cand-18480-18559
  source 1..80: mol_type = other DNA
tcttcataacacgtgaggaggctataaggcaagtcagaagctggataggcttcgacgtcgaaggtgcccatgcatcgcgt

SEQ ID NO: 11344 - DNA, 80 bp, synthetic construct
  misc_feature 1..80: note = Synthetic: >BetaSp-cand-20770-20849
  source 1..80: mol_type = other DNA
tttaaccagaagataattggtgggttgcatttgcttataggtttgtaccgaaggcagcaaacctccaagctggaaattca

SEQ ID NO: 11345 - DNA, 80 bp, synthetic construct
  misc_feature 1..80: note = Synthetic: >HKU5-cand-12000-12079
  source 1..80: mol_type = other DNA
aactcttgggaggcccttcgtcttaacatcaaattgattggcattggcggtacaccttgtatcaaaattgctagtgtcca

SEQ ID NO: 11346 - DNA, 80 bp, synthetic construct
  misc_feature 1..80: note = Synthetic: >HKU5R-cand-11990-12069
  source 1..80: mol_type = other DNA
gccacgtaactcttgggaggcccttcgtcttaacatgaaattgattggcattggcggtacaccttgtatcaaaattgcta

SEQ ID NO: 11347 - DNA, 80 bp, synthetic construct
  misc_feature 1..80: note = Synthetic: >Sparrow-cand-6350-6429
  source 1..80: mol_type = other DNA
ctaagggcaatctcaaaggtactaatgttggtgttgttttgtcagcaaaccttgtgactcgtcttagccagcaggcagtt

SEQ ID NO: 11348 - DNA, 80 bp, synthetic construct
  misc_feature 1..80: note = Synthetic: >HKU17-cand-6330-6409
  source 1..80: mol_type = other DNA
gtggttgcgctaagggcaatctcaaaggtactaatgttggtgttgttctttcagctagccttgtcacacgtcttagccag

SEQ ID NO: 11349 - DNA, 80 bp, synthetic construct
  misc_feature 1..80: note = Synthetic: >MbCoV1-cand-6170-6249
  source 1..80: mol_type = other DNA
aactgctgaaggttgttgtgttaatgaacatcgcattaatagctttgttgtcaatgctagtgttttaaggagtggttgta

SEQ ID NO: 11350 - DNA, 80 bp, synthetic construct
  misc_feature 1..80: note = Synthetic: >MsbCoV1-cand-6170-6249
  source 1..80: mol_type = other DNA
ggttgttgtgttaatgaacatcgcattaatagctttgttgtcaatgctagtgttttaaggagtggttgtaatgacggcta

SEQ ID NO: 11351 - DNA, 80 bp, synthetic construct
  misc_feature 1..80: note = Synthetic: >HKU4-cand-2850-2929
  source 1..80: mol_type = other DNA
aactgcttatcgtagtgtatcgattacatatgatattcatccagttcttgatgcattacttagtagctcaaagttagcta

SEQ ID NO: 11352 - DNA, 80 bp, synthetic construct
  misc_feature 1..80: note = Synthetic: >HKU4R-cand-2840-2919
  source 1..80: mol_type = other DNA
gtaactgcttatcgtagtgtatcgattacatatgatattcatccagttcttgatgcattacttggtagctcaaagttagc

SEQ ID NO: 11353 - DNA, 80 bp, synthetic construct
  misc_feature 1..80: note = Synthetic: >SEAC-cand-17320-17399
  source 1..80: mol_type = other DNA
ggttctctaatggtgttgactttgtcgtacaacctgaaggttgtgttgtaaccaatgagggtaacattgtcaagccagtt

SEQ ID NO: 11354 - DNA, 80 bp, synthetic construct
  misc_feature 1..80: note = Synthetic: >BtRf_AlphaCoV-cand-17130-17209
  source 1..80: mol_type = other DNA
aatggtgttgactttgtcgtacaacctgaaggttgtgttgtaaccaatgatggtaacattgtcaaaccagttaaagctag

SEQ ID NO: 11355 - DNA, 80 bp, synthetic construct
  misc_feature 1..80: note = Synthetic: >BtRf_AlphaCoV-cand-13430-13509
  source 1..80: mol_type = other DNA
aactgtaaaacctggtcatttcaacaaggaattctatgactatttgttgtctcaagggttctttgatgaaggttctgagt

SEQ ID NO: 11356 - DNA, 80 bp, synthetic construct
  misc_feature 1..80: note = Synthetic: >WIV16-cand-30120-30199
  source 1..80: mol_type = other DNA
ggacttgaaagagccaccacattttcaccgaggccacgcggagtacgatcgagggtacagtgaataatgctagggagagc

SEQ ID NO: 11357 - DNA, 80 bp, synthetic construct
  misc_feature 1..80: note = Synthetic: >HKU24-cand-14350-14429
  source 1..80: mol_type = other DNA
atgataggtgcataatacattgtgccaattttaatatactatttagtatggtattgcctaatacctgttttgggcctctt

SEQ ID NO: 11358 - DNA, 80 bp, synthetic construct
  misc_feature 1..80: note = Synthetic: >HKU8R-cand-7520-7599
  source 1..80: mol_type = other DNA
caaagaggctcttaagagttgtaatgttttgtctgatttcatagtttataatgatgcaggctctaacattactcaagttc

SEQ ID NO: 11359 - DNA, 80 bp, synthetic construct
  misc_feature 1..80: note = Synthetic: >BtSk_AlphaCoV-cand-20150-20229
  source 1..80: mol_type = other DNA
aagagggcttctttccctatattaatggtgtcatcaccgaaaagttagcgctgggtggaacagttgctattaaaataact

SEQ ID NO: 11360 - DNA, 80 bp, synthetic construct
  misc_feature 1..80: note = Synthetic: >Sb512-cand-20200-20279
  source 1..80: mol_type = other DNA
agggcttctttccctacattaatggtgttatcaccgaaaaattagcgctgggtggaacagttgctattaaaataactgag

SEQ ID NO: 11361 - DNA, 80 bp, synthetic construct
  misc_feature 1..80: note = Synthetic: >Sk512R-cand-25600-25679
  source 1..80: mol_type = other DNA
aagaggtggttactcaccttagaaactggaacttttcctggaatatcgtacttacagtactcttagtagtgttgcagtat

SEQ ID NO: 11362 - DNA, 80 bp, synthetic construct
  misc_feature 1..80: note = Synthetic: >AlphaSp-cand-25850-25929
  source 1..80: mol_type = other DNA
ttcaacacctcagaaattggaacttttcctggaatatcatacttacagtactcttagtagtgttgcagtatggacattac

SEQ ID NO: 11363 - DNA, 80 bp, synthetic construct
  misc_feature 1..80: note = Synthetic: >MbCoV1-cand-27330-27409
  source 1..80: mol_type = other DNA
aagagtaataatcaatctcggtctaattcaaaggcacgtgatcagtctggaaccagaactccaaagaatgcttctcagaa

SEQ ID NO: 11364 - DNA, 80 bp, synthetic construct
  misc_feature 1..80: note = Synthetic: >MsbCoV1-cand-27320-27399
  source 1..80: mol_type = other DNA
agcaagagtaataatcaatctcggtctaactcaaaggcacgtgatcagtctggaaccagaactccaaagaatgcttctca

SEQ ID NO: 11365 - DNA, 80 bp, synthetic construct
  misc_feature 1..80: note = Synthetic: >BetaSp-cand-31420-31499
  source 1..80: mol_type = other DNA
aagagtcgtgtgcagcaaaatgtaagaagagagctaactccccaggacctcagcattctcgcgcagattgatgaatgata

SEQ ID NO: 11366 - DNA, 80 bp, synthetic construct
  misc_feature 1..80: note = Synthetic: >HKU24-cand-30840-30919
  source 1..80: mol_type = other DNA
gagtcgtgtgcagcaaaatgtaagaagagagctaacgccccaggacctcagcattctcgcgcagattgatgatgataccc

SEQ ID NO: 11367 - DNA, 80 bp, synthetic construct
  misc_feature 1..80: note = Synthetic: >HKU24-cand-730-809
  source 1..80: mol_type = other DNA
aagagtgtgctgccacccaaagctcttgcgcgcttggaaccttatgttcttaaggtgcgcaagacaggagttaaaggtgc

SEQ ID NO: 11368 - DNA, 80 bp, synthetic construct
  misc_feature 1..80: note = Synthetic: >Quail-cand-18820-18899
  source 1..80: mol_type = other DNA
tacagctgtgatgacattcacttctttgacaatttgataaggatagttaaagagagattagctctcggaggttctatctt

SEQ ID NO: 11369 - DNA, 80 bp, synthetic construct
  misc_feature 1..80: note = Synthetic: >SEAC-cand-17960-18039
  source 1..80: mol_type = other DNA
taatcctaaagctgttcatgacattggaaatcctaaaggcatacgttgtgttgcaactaatgtaccttggtactgttacg

SEQ ID NO: 11370 - DNA, 80 bp, synthetic construct
  misc_feature 1..80: note = Synthetic: >HKU8R-cand-26260-26339
  source 1..80: mol_type = other DNA
atttcgctttcagcatcgttatggcctgcatcacctttgtgctgtggataatgtattttatcaacagcttcaggctttat

SEQ ID NO: 11371 - DNA, 80 bp, synthetic construct
  misc_feature 1..80: note = Synthetic: >HKU8R-cand-27460-27539
  source 1..80: mol_type = other DNA
ctccaagcagtggaaagtcaactcccaaggactcgcgctcaaaatcgccagcgagacctcagtcgaccaagaaacagctt

SEQ ID NO: 11372 - DNA, 80 bp, synthetic construct
  misc_feature 1..80: note = Synthetic: >HKU5-cand-400-479
  source 1..80: mol_type = other DNA
tcaagatctcaccatggtttatggacggcgaaagcgcctataaacatgtgagtgaacaactctctaagggaagtaagctt

SEQ ID NO: 11373 - DNA, 80 bp, synthetic construct
  misc_feature 1..80: note = Synthetic: >HKU5R-cand-410-489
  source 1..80: mol_type = other DNA
accatggtttatggacggcgaaagcgcctataaacatgtgagtgaacaactctctaagggaagtaaacttctctttgtcc

SEQ ID NO: 11374 - DNA, 80 bp, synthetic construct
  misc_feature 1..80: note = Synthetic: >BtRf_AlphaCoV-cand-18010-18089
  source 1..80: mol_type = other DNA
gcgttaatggtggtgcactttatgtaaacaaccatgccttccacacacctgcatatgacaagcgtgcctttgctaagctt

SEQ ID NO: 11375 - DNA, 80 bp, synthetic construct
  misc_feature 1..80: note = Synthetic: >SEAC-cand-18200-18279
  source 1..80: mol_type = other DNA
actagaaggcgttaatggtggtgcactttatgtaaacaatcatgccttccacacacctgcatacgacaagcgtgcctttg

SEQ ID NO: 11376 - DNA, 80 bp, synthetic construct
  misc_feature 1..80: note = Synthetic: >HKU17-cand-8400-8479
  source 1..80: mol_type = other DNA
tgacaattgcctgcgcctatgatggcgttgttcggcatgtctatcacgtggtcctccaacttaacaatctcatttatgca

SEQ ID NO: 11377 - DNA, 80 bp, synthetic construct
  misc_feature 1..80: note = Synthetic: >BM48_31-cand-6190-6269
  source 1..80: mol_type = other DNA
gaatggacaatcttgcttgtgaaagtcaacaaactgtcgctgaagaagtagtggataatcctaccatacagaaagacatc

SEQ ID NO: 11378 - DNA, 80 bp, synthetic construct
  misc_feature 1..80: note = Synthetic: >Sparrow-cand-11940-12019
  source 1..80: mol_type = other DNA
aaggaattccacaaacttggtgatattttaaatcgttgtgttcttaatgccaataagtttgccagtgcctgtatcgacgc

SEQ ID NO: 11379 - DNA, 80 bp, synthetic construct
  misc_feature 1..80: note = Synthetic: >HKU17-cand-11920-11999
  source 1..80: mol_type = other DNA
tccttctacaaggaattccataaacttggtgacatacttaaccgttgtgttcttaatgccaataagtttgccagtgcctg

SEQ ID NO: 11380 - DNA, 80 bp, synthetic construct
  misc_feature 1..80: note = Synthetic: >HKU5R-cand-1050-1129
  source 1..80: mol_type = other DNA
aaggacgttgcgtattcaaagcaatctgcctttactatgaatagtatagtccaattggacaccacggaggatgtccctag

SEQ ID NO: 11381 - DNA, 80 bp, synthetic construct
  misc_feature 1..80: note = Synthetic: >BtRl_BetaCoV-cand-26410-26489
  source 1..80: mol_type = other DNA
gttattacaatttgcctattctaatcggaacaggtttttgtacataataaagcttgttttcctctggctcttgtggccag

SEQ ID NO: 11382 - DNA, 80 bp, synthetic construct
  misc_feature 1..80: note = Synthetic: >HKU2-cand-22800-22879
  source 1..80: mol_type = other DNA
actgggtgttgttcagaatgctctagtcgacgatgtcaataagcttgctaacggctttaaccaattgacagcgagtgtta

SEQ ID NO: 11383 - DNA, 80 bp, synthetic construct
  misc_feature 1..80: note = Synthetic: >SEAC-cand-22760-22839
  source 1..80: mol_type = other DNA
ctgggtgttgttcagaatgctctagtcgacgatgtcaataagcttgctaacggctttaaccaattgacagcgagtgttag

SEQ ID NO: 11384 - DNA, 80 bp, synthetic construct
  misc_feature 1..80: note = Synthetic: >HKU4R-cand-10270-10349
  source 1..80: mol_type = other DNA
gtgtcctcgccatattatgtgtcctgctgaccagttaactgacccaaattatgatgctttgttaatttcaaaaactaatc

SEQ ID NO: 11385 - DNA, 80 bp, synthetic construct
  misc_feature 1..80: note = Synthetic: >MinkCoV1-cand-22390-22469
  source 1..80: mol_type = other DNA
actgtcatgggtggtctatattacacatcgctgtcaggtgatctcctaggttttaaaaatgtcacaactggcactgtgta

SEQ ID NO: 11386 - DNA, 80 bp, synthetic construct
  misc_feature 1..80: note = Synthetic: >AlphaMink-cand-22330-22409
  source 1..80: mol_type = other DNA
ctgtcttgggtggtctatattacacatcgttgtcaggtgatcttttaggttttaaaaatgtcacaactggcactgtgtac

SEQ ID NO: 11387 - DNA, 80 bp, synthetic construct
  misc_feature 1..80: note = Synthetic: >Sb512-cand-2620-2699
  source 1..80: mol_type = other DNA
actgtgaccagttttattaaggtggccggtgttgcttttaaatactgtgctacatgtgttccaaaaattgtgattaacgg

SEQ ID NO: 11388 - DNA, 80 bp, synthetic construct
  misc_feature 1..80: note = Synthetic: >Sk512R-cand-2610-2689
  source 1..80: mol_type = other DNA
gatactgtgaccagttttattaaggtggccggtgttgcttttaaatactgtgctacatgtgttccaaaaattgtgattaa

SEQ ID NO: 11389 - DNA, 80 bp, synthetic construct
  misc_feature 1..80: note = Synthetic: >HKU8R-cand-16660-16739
  source 1..80: mol_type = other DNA
gcattgtactcgtataattccagcacgtgctcgagttgaatgcttcagtggttttaaggctaataataatagtgcacagt

SEQ ID NO: 11390 - DNA, 80 bp, synthetic construct
  misc_feature 1..80: note = Synthetic: >BetaSp-cand-19010-19089
  source 1..80: mol_type = other DNA
agacaatttgtaatgtgtgtactaaccgtgccactgtttataattcacgcactggttattatggatgttggcggcacagt

SEQ ID NO: 11391 - DNA, 80 bp, synthetic construct
  misc_feature 1..80: note = Synthetic: >MbCoV1-cand-5370-5449
  source 1..80: mol_type = other DNA
gtctctgaatatttaagtcagacacctaatgtacctcctggcaatgtaatctcaatgcgttgtagtggtttagccacagt

SEQ ID NO: 11392 - DNA, 80 bp, synthetic construct
  misc_feature 1..80: note = Synthetic: >HKU31-cand-28010-28089
  source 1..80: mol_type = other DNA
ggaactttgcatggtccatagtctttcttattattactgctgtactacagtatggttatccatctcgtagtatgacagcc

SEQ ID NO: 11393 - DNA, 80 bp, synthetic construct
  misc_feature 1..80: note = Synthetic: >SEAC-cand-23960-24039
  source 1..80: mol_type = other DNA
gggaacaagtgcagcctgctattaacggtgccaatatgctgggctatatgttgactagcatgtttgtgtggtactttgca

SEQ ID NO: 11394 - DNA, 80 bp, synthetic construct
  misc_feature 1..80: note = Synthetic: >Sb512-cand-20040-20119
  source 1..80: mol_type = other DNA
gtgattgttgacaatgatgtcaatgactatgttagtgatgcagatttcagttacactggtgattgtgcttctatgtacct

SEQ ID NO: 11395 - DNA, 80 bp, synthetic construct
  misc_feature 1..80: note = Synthetic: >BtSk_AlphaCoV-cand-19990-20069
  source 1..80: mol_type = other DNA
gctgtgattgttgacaatgatgtcaatgactatgttagtgatgcagatttcagttacactggtgattgtgcttctatgta

SEQ ID NO: 11396 - DNA, 80 bp, synthetic construct
  misc_feature 1..80: note = Synthetic: >HKU5R-cand-22080-22159
  source 1..80: mol_type = other DNA
caggtagagtcttttgatgatggtttcgttgttcgtattggagcagcatccaataagaccggaaccactgtcatttctca

SEQ ID NO: 11397 - DNA, 80 bp, synthetic construct
  misc_feature 1..80: note = Synthetic: >HKU5R-cand-29290-29369
  source 1..80: mol_type = other DNA
gctccttcggtttttgggacacgcaaccctgcaaacgatccagctatcgtcacgcagtttgctcctggtactacgctacc

SEQ ID NO: 11398 - DNA, 80 bp, synthetic construct
  misc_feature 1..80: note = Synthetic: >HKU5R-cand-7760-7839
  source 1..80: mol_type = other DNA
tgcaaatggcggtacttcattctgttgtaggcataactggaattgtgttgattgtgacaccgcaggtatcgggaatacct

SEQ ID NO: 11399 - DNA, 80 bp, synthetic construct
  misc_feature 1..80: note = Synthetic: >HKU5-cand-7760-7839
  source 1..80: mol_type = other DNA
cgttgcaaatggcggtacttcattctgttgtaggcataattggaattgtgttgattgtgacaccgcaggtatcgggaata

SEQ ID NO: 11400 - DNA, 80 bp, synthetic construct
  misc_feature 1..80: note = Synthetic: >HKU8R-cand-26180-26259
  source 1..80: mol_type = other DNA
tatactctggctgttatggcctcttgtgcttgccctgtccatctttgatgcatgggcgagctttgatgtcaattggacct

SEQ ID NO: 11401 - DNA, 80 bp, synthetic construct
  misc_feature 1..80: note = Synthetic: >Sk512R-cand-5170-5249
  source 1..80: mol_type = other DNA
cacttgttgatacactgtttgaggctaaacctgttcaggttgttgttactcaagaccagcgtagttttcatactgtggaa

SEQ ID NO: 11402 - DNA, 80 bp, synthetic construct
  misc_feature 1..80: note = Synthetic: >Alpha2-cand-12380-12459
  source 1..80: mol_type = other DNA
caattgtagtcgttttaagaacttagatgctcacgatgcctattacattgtaaaacgttgtcgtaaaagcgttatggacc

SEQ ID NO: 11403 - DNA, 80 bp, synthetic construct
  misc_feature 1..80: note = Synthetic: >MinkCoV1-cand-12410-12489
  source 1..80: mol_type = other DNA
taaaaccaattgtagtcgttttaaaaacttagatgcacatgatgcctattacattgtaaaacgttgtcgtaaaagcgtta

SEQ ID NO: 11404 - DNA, 80 bp, synthetic construct
  misc_feature 1..80: note = Synthetic: >Sk512R-cand-2770-2849
  source 1..80: mol_type = other DNA
cattcaatcattgtgtgtttcctgttaaccctactaggatcgaaacagattctttagagttggaggaagttgactttgtg

SEQ ID NO: 11405 - DNA, 80 bp, synthetic construct
  misc_feature 1..80: note = Synthetic: >Sb512-cand-2780-2859
  source 1..80: mol_type = other DNA
tcaatcattgtgtgtttcctgttaaccctactaggatcgaaacagattctttagagttggaggaagttgactttgtggag

SEQ ID NO: 11406 - DNA, 80 bp, synthetic construct
  misc_feature 1..80: note = Synthetic: >Sb512-cand-25490-25569
  source 1..80: mol_type = other DNA
tttgtactcttttttgtgctagttattagcattactttcgtccaacttataaacctttgttttacttgccaccggttgtg

SEQ ID NO: 11407 - DNA, 80 bp, synthetic construct
  misc_feature 1..80: note = Synthetic: >BtSk_AlphaCoV-cand-25430-25509
  source 1..80: mol_type = other DNA
tgtactctttttcgtgctagttattagcatcacttttgtccaacttataaacctttgttttacttgccaccggttgtgta

SEQ ID NO: 11408 - DNA, 80 bp, synthetic construct
  misc_feature 1..80: note = Synthetic: >FelineAlpha1-cand-9040-9119
  source 1..80: mol_type = other DNA
ctagtgtgcgtttacataacttttctatagcaaaaaacaatgtgtttttgggtgttgtgtctgccaaatataagggtgta

SEQ ID NO: 11409 - DNA, 80 bp, synthetic construct
  misc_feature 1..80: note = Synthetic: >HKU5R-cand-1370-1449
  source 1..80: mol_type = other DNA
tgctaatgacgtagacttgcagtcttcgggccttgtgcggaagaatgctgtcctgcttactacctgtccctgcaataagg

SEQ ID NO: 11410 - DNA, 80 bp, synthetic construct
  misc_feature 1..80: note = Synthetic: >HKU8R-cand-7840-7919
  source 1..80: mol_type = other DNA
gttataatgtgttgctttctgacacttcttgtaataacctggttacctcttatgccaagcctgaagaaaaactctctgtg

SEQ ID NO: 11411 - DNA, 80 bp, synthetic construct
  misc_feature 1..80: note = Synthetic: >HKU15-cand-23490-23569
  source 1..80: mol_type = other DNA
tatcagtcagaaatccgccacaggatatggtgatagtgtcaccaagtgacacctttcactacacttttaagaaacctgtg

SEQ ID NO: 11412 - DNA, 80 bp, synthetic construct
  misc_feature 1..80: note = Synthetic: >BetaSp-cand-28220-28299
  source 1..80: mol_type = other DNA
tgtatgctgttgcacaggatgtggagctagttgttttaagaagtgtggaagttgttgtgatgattatggtggtcatcaag

SEQ ID NO: 11413 - DNA, 80 bp, synthetic construct
  misc_feature 1..80: note = Synthetic: >Lucheng19-cand-11360-11439
  source 1..80: mol_type = other DNA
ctatgccatcatatatagcatatgaaaaagcaaaaatggattatgaacaggcaaagcagaatggtacatcagaccaggtc

SEQ ID NO: 11414 - DNA, 80 bp, synthetic construct
  misc_feature 1..80: note = Synthetic: >AcCoV_JC34-cand-11010-11089
  source 1..80: mol_type = other DNA
gcctctatgccatcatatatagcatatgaaaaagcaaaaatggattatgaacaggctaagcagaatggtacctcagatca

SEQ ID NO: 11415 - DNA, 80 bp, synthetic construct
  misc_feature 1..80: note = Synthetic: >MsbCoV1-cand-20720-20799
  source 1..80: mol_type = other DNA
ctatgttctgtactagtgttaacacttcttcatcagaagcatttttgattggtgttaattatttgggtgattttgcaaca

SEQ ID NO: 11416 - DNA, 80 bp, synthetic construct
  misc_feature 1..80: note = Synthetic: >MbCoV1-cand-20740-20819
  source 1..80: mol_type = other DNA
tactagtgttaacacttcttcatcagaagcatctttgattggtgttaattacttgggtgattttgcaacagatccaatta

SEQ ID NO: 11417 - DNA, 80 bp, synthetic construct
  misc_feature 1..80: note = Synthetic: >Sk512R-cand-3010-3089
  source 1..80: mol_type = other DNA
ctattgaccctgtttacaaggtcagattagagtacgagtttgaggatgaaactcttgtcaaggtttgcgaaaaggccata

SEQ ID NO: 11418 - DNA, 80 bp, synthetic construct
  misc_feature 1..80: note = Synthetic: >Sb512-cand-3020-3099
  source 1..80: mol_type = other DNA
ttgaccctgtttacaaggtcagattggagtacgagtttgaggatgaaactcttgtcaaggtttgcgaaaaggccataggc

SEQ ID NO: 11419 - DNA, 80 bp, synthetic construct
  misc_feature 1..80: note = Synthetic: >229ER-cand-16560-16639
  source 1..80: mol_type = other DNA
taatgttgtgacacaacgtatgtgtgctataggacctgatgtctttttacacaagtgttacagatgtcctgctgaaatag

SEQ ID NO: 11420 - DNA, 80 bp, synthetic construct
  misc_feature 1..80: note = Synthetic: >SARSCoV-cand-12770-12849
  source 1..80: mol_type = other DNA
ctcaaatgggctagattccctaagagtgatggtacaggtacaatttacacagaactggaaccaccttgtaggtttgttac

SEQ ID NO: 11421 - DNA, 80 bp, synthetic construct
  misc_feature 1..80: note = Synthetic: >SARSRC-cand-12750-12829
  source 1..80: mol_type = other DNA
gtgggctagattccctaagagtgacggaacaggtactatttatacagaactggaaccaccttgtaggtttgttacagaca

SEQ ID NO: 11422 - DNA, 80 bp, synthetic construct
  misc_feature 1..80: note = Synthetic: >HKU5R-cand-330-409
  source 1..80: mol_type = other DNA
ctcaacactgaaaaaaggactgaccatgtgtctctcaaagcgtcactctgtgatgcaggagacctggttctcaagatctc

SEQ ID NO: 11423 - DNA, 80 bp, synthetic construct
  misc_feature 1..80: note = Synthetic: >HKU5-cand-320-399
  source 1..80: mol_type = other DNA
tagagcagagctcaacactgaaaaaaggactgaccatgtgtctctcaaagcgtcactctgtgatgcaggagacctggttc

SEQ ID NO: 11424 - DNA, 80 bp, synthetic construct
  misc_feature 1..80: note = Synthetic: >MbCoV1-cand-6730-6809
  source 1..80: mol_type = other DNA
gtgtcatacttagtagaagcttaaaatataacttgaaggctgctcaacatgtgttgcgtcgtaaacagacgtatgttgag

SEQ ID NO: 11425 - DNA, 80 bp, synthetic construct
  misc_feature 1..80: note = Synthetic: >MT114542-cand-22300-22379
  source 1..80: mol_type = other DNA
aacagcacaatacttagtggcttatattacacatcactagcaggtgatttattaggttttaaaaatgttagtgatggtgt

SEQ ID NO: 11426 - DNA, 80 bp, synthetic construct
  misc_feature 1..80: note = Synthetic: >MT114543-cand-20680-20759
  source 1..80: mol_type = other DNA
aacaggttcaccagcggtcagtggaattccatatgtactggtaatgacagaaaaattcctttctctgtcatacctacgga

SEQ ID NO: 11427 - DNA, 80 bp, synthetic construct
  misc_feature 1..80: note = Synthetic: >MT114540-cand-20560-20639
  source 1..80: mol_type = other DNA
aacagtttcaccagccagcagtggaattccatatgtacgggtaatgacagaaaaattcctttctctgtcatacccacgga

SEQ ID NO: 11428 - DNA, 80 bp, synthetic construct
  misc_feature 1..80: note = Synthetic: >MN307884-cand-11930-12009
  source 1..80: mol_type = other DNA
tttgcagtagatccagctgacacatattgtaagtatgtagcagcaggtaatcaacctttaggtaactgtgttaaaatgtt

SEQ ID NO: 11429 - DNA, 80 bp, synthetic construct
  misc_feature 1..80: note = Synthetic: >MN690608-cand-15220-15299
  source 1..80: mol_type = other DNA
atgttgttatgatcacgttatggaaacggagcataagaatgttctcagcattaatccttatgtttgtagtgttgccggtt

SEQ ID NO: 11430 - DNA, 80 bp, synthetic construct
  misc_feature 1..80: note = Synthetic: >MN531555-cand-20730-20809
  source 1..80: mol_type = other DNA
ggacgttacagtgtttgttacacattgttttaattcaactcgaggcgcttgtcctacgggctttgttccaaggaattata

SEQ ID NO: 11431 - DNA, 80 bp, synthetic construct
  misc_feature 1..80: note = Synthetic: >MN690610-cand-16980-17059
  source 1..80: mol_type = other DNA
ttaaaggattacgccccgcgtatgcgccaaccgctatagcgctggctgagaaatataaagtaggagatagtgttttggcc

SEQ ID NO: 11432 - DNA, 80 bp, synthetic construct
  misc_feature 1..80: note = Synthetic: >MN690608-cand-16980-17059
  source 1..80: mol_type = other DNA
ttaaaggattaccccccgcgtatgcgccaacctatatagcgttggatgagaaatataaagtaggagatagtgttttggcc

SEQ ID NO: 11433 - DNA, 80 bp, synthetic construct
  misc_feature 1..80: note = Synthetic: >MT114540-cand-25520-25599
  source 1..80: mol_type = other DNA
ttagagcagttgaacttctcaatggtgattttatctatatattctcacaggagcccgtagtcggtgtttacaatgcagcc

SEQ ID NO: 11434 - DNA, 80 bp, synthetic construct
  misc_feature 1..80: note = Synthetic: >MK618759-cand-480-559
  source 1..80: mol_type = other DNA
ggtggtgtttagtgagcagacatacaatagacagtgacaacatggcttcaagcctaaaacagggagtatcttcccaaaac

SEQ ID NO: 11435 - DNA, 80 bp, synthetic construct
  misc_feature 1..80: note = Synthetic: >MN199463-cand-8540-8619
  source 1..80: mol_type = other DNA
taattatgatcttgctgcgaagagcacttttgttattcgtggttctgagtttgtaaagcttacgaatgagataggtgata

SEQ ID NO: 11436 - DNA, 80 bp, synthetic construct
  misc_feature 1..80: note = Synthetic: >MT114540-cand-28400-28479
  source 1..80: mol_type = other DNA
tttccatgttcttggcctggttataaagcttatgctcataaccatattgattatcattttgatctttccaacccattcta

SEQ ID NO: 11437 - DNA, 80 bp, synthetic construct
  misc_feature 1..80: note = Synthetic: >MT114538-cand-24460-24539
  source 1..80: mol_type = other DNA
ttaggaagttgttgtcattctatttgtagtagaagacaatttgaaaattacgaaccaattgaaaaagtgcatgtccacta

SEQ ID NO: 11438 - DNA, 80 bp, synthetic construct
  misc_feature 1..80: note = Synthetic: >AJ311317-cand-13050-13129
  source 1..80: mol_type = other DNA
ttacatgatgcccatcatagccatgacggatgctttagcacctgagaggtactttgaatatgatgtgcacaagggttata

SEQ ID NO: 11439 - DNA, 80 bp, synthetic construct
  misc_feature 1..80: note = Synthetic: >MT114542-cand-8430-8509
  source 1..80: mol_type = other DNA
tatgactcactcccttcactgttcaaacttaaggtttcaacaaacctttttgaaggtgataaatttgtgggtaactttga

SEQ ID NO: 11440 - DNA, 80 bp, synthetic construct
  misc_feature 1..80: note = Synthetic: >MT114541-cand-26160-26239
  source 1..80: mol_type = other DNA
tatggcattaaaatgcttattatgtggctactatggcccattgtgttagctcttacgatatttaatgcatactcggaata

SEQ ID NO: 11441 - DNA, 80 bp, synthetic construct
  misc_feature 1..80: note = Synthetic: >SBB-010-cand-23200-23279
  source 1..80: mol_type = other DNA
ataacactatcactgtaaagactactcctggtttgtgtgagactgaccaaattggctccaaatgcatcgtggccaaaaac

SEQ ID NO: 11442 - DNA, 80 bp, synthetic construct
  misc_feature 1..80: note = Synthetic: >SBB-024-cand-0-79
  source 1..80: mol_type = other DNA
aaagatattatctatctatagatagacagtgtcttcttagacctcgtgtctcatcccctcaactaaacgaaatttttctt

SEQ ID NO: 11443 - DNA, 80 bp, synthetic construct
  misc_feature 1..80: note = Synthetic: >SBB-010-cand-10-89
  source 1..80: mol_type = other DNA
tctatctatagatagacagtgtcttcttagacctcgtgtctcatcccctcaactaaacgaaatttttctttcatggcgca

SEQ ID NO: 11444 - DNA, 80 bp, synthetic construct
  misc_feature 1..80: note = Synthetic: >SBB-120-cand-20-99
  source 1..80: mol_type = other DNA
gatagacagtgtcttcttagacctcgtgtctcatcccctcaactaaacgaaatttttctttcatggcgcatgttccatgc

SEQ ID NO: 11445 - DNA, 80 bp, synthetic construct
  misc_feature 1..80: note = Synthetic: >SBB-041-cand-4120-4199
  source 1..80: mol_type = other DNA
aaatcttagccatggtggtggtatagcagcagcgcttaataagctgaccggtggtgtcttgcagaagctgtccaatgcac

SEQ ID NO: 11446 - DNA, 80 bp, synthetic construct
  misc_feature 1..80: note = Synthetic: >SBB-130-cand-4110-4189
  source 1..80: mol_type = other DNA
ctaatgaaaatcttagccatggtggtggtatagcagcagcgcttaataagctgaccggtggtgtcttgcagaagctgtcc

SEQ ID NO: 11447 - DNA, 80 bp, synthetic construct
  misc_feature 1..80: note = Synthetic: >SBB-122-cand-4130-4209
  source 1..80: mol_type = other DNA
catggtggtggtatagcagctgcgcttaataagctaactggtggtgtcttgcagaagctgtccaatgcacatgttggtgc

SEQ ID NO: 11448 - DNA, 80 bp, synthetic construct
  misc_feature 1..80: note = Synthetic: >SBB-120-cand-4110-4189
  source 1..80: mol_type = other DNA
ccgctaatgaaaatcttagccatggtggtggtatagcagctgcgcttaataagctaaccggtggtgttttgcagaagttg

SEQ ID NO: 11449 - DNA, 80 bp, synthetic construct
  misc_feature 1..80: note = Synthetic: >SBB-130-cand-4830-4909
  source 1..80: mol_type = other DNA
atgacgtgtcatatgataaaaatgtgatgcgtactcttaccaaggtgtcaaaagtaaaaggtaacgtctttactacagtt

SEQ ID NO: 11450 - DNA, 80 bp, synthetic construct
  misc_feature 1..80: note = Synthetic: >SBB-024-cand-4840-4919
  source 1..80: mol_type = other DNA
gtcatatgataaaaatgtgatgcgtactcttactaaggtgtctaaagtaaaaggtaatgtctttactacagttcctccat

SEQ ID NO: 11451 - DNA, 80 bp, synthetic construct
  misc_feature 1..80: note = Synthetic: >SBB-120-cand-4840-4919
  source 1..80: mol_type = other DNA
ttcatatgataaaaatgtgatgcgtactcttacaaaagtggcaaaagtaaaaggtaacgtctttactacagttcctccac

SEQ ID NO: 11452 - DNA, 80 bp, synthetic construct
  misc_feature 1..80: note = Synthetic: >SBB-130-cand-5470-5549
  source 1..80: mol_type = other DNA
tgagcatactctgaatgcaatatcgtgttacattgttgacagtggtaccatagaagtcgttaagaccacagacacggagt

SEQ ID NO: 11453 - DNA, 80 bp, synthetic construct
  misc_feature 1..80: note = Synthetic: >SBB-041-cand-5470-5549
  source 1..80: mol_type = other DNA
tgttgagcatactctgaatgcaatatcgtgttatattgttgatagtggtaccatagaagtcgttaagaccacagacacgg

SEQ ID NO: 11454 - DNA, 80 bp, synthetic construct
  misc_feature 1..80: note = Synthetic: >SBB-726-cand-4480-4559
  source 1..80: mol_type = other DNA
acacagagctataaagctcaaattggtaaggttttttgtgacggtaaggattggtcagataacaagccaacgcccaaaga

SEQ ID NO: 11455 - DNA, 80 bp, synthetic construct
  misc_feature 1..80: note = Synthetic: >SBB-747-cand-4470-4549
  source 1..80: mol_type = other DNA
tgtttctggtacacagagctataaagctcagattggtaaggtcttttgtgacggtaaggattggtcagataacaagccaa

SEQ ID NO: 11456 - DNA, 80 bp, synthetic construct
  misc_feature 1..80: note = Synthetic: >SBB-788-cand-4480-4559
  source 1..80: mol_type = other DNA
acacagagctataaagctcagattggtaaggtcttttgcgacggtaaggattggtcagacaacaagccgatgcccaaaga

SEQ ID NO: 11457 - DNA, 80 bp, synthetic construct
  misc_feature 1..80: note = Synthetic: >SBB-053-cand-16270-16349
  source 1..80: mol_type = other DNA
gagtgtaatgttgacatagttgttatagatgaagtgtcgatgtgtacaaattatgatctttctgttgtcaaccagcgtgt

SEQ ID NO: 11458 - DNA, 80 bp, synthetic construct
  misc_feature 1..80: note = Synthetic: >SBB-024-cand-12230-12309
  source 1..80: mol_type = other DNA
gttgaacaccctggtgtcgatggtcgttgtcggtttaaaggcaagtatgtgcaagtgccattgggtaccatagaccctat

SEQ ID NO: 11459 - DNA, 80 bp, synthetic construct
  misc_feature 1..80: note = Synthetic: >SBB-120-cand-12240-12319
  source 1..80: mol_type = other DNA
ctggtgtcgatggtcgctgtcggtttaaaggcaagtatgtgcaagtgccattgggtaccatagaccctatacggttctgt

SEQ ID NO: 11460 - DNA, 80 bp, synthetic construct
  misc_feature 1..80: note = Synthetic: >SBB-130-cand-12230-12309
  source 1..80: mol_type = other DNA
gaacaccctggtgtcgatggtcgctgtcggtttaaaggcaagtatgtgcaagtgccactgggtaccatagaccctatacg

SEQ ID NO: 11461 - DNA, 80 bp, synthetic construct
  misc_feature 1..80: note = Synthetic: >SBB-120-cand-17160-17239
  source 1..80: mol_type = other DNA
tgtacctggttatcacagtttgttttgtacacgtgatttcgccatgcgacatgttagaggatggattggtatggatgttg

SEQ ID NO: 11462 - DNA, 80 bp, synthetic construct
  misc_feature 1..80: note = Synthetic: >SBB-053-cand-17150-17229
  source 1..80: mol_type = other DNA
ttgacactaatgtacctggttatcacagtttgttctgtacacgtgattttgccatgagacatgttagaggatggattggt

SEQ ID NO: 11463 - DNA, 80 bp, synthetic construct
  misc_feature 1..80: note = Synthetic: >SBB-797-cand-12560-12639
  source 1..80: mol_type = other DNA
tgttgacaccccataccggcacgggcttggctataacagctaaacctgatgctaatatagaacaagaatcttttggtggt

SEQ ID NO: 11464 - DNA, 80 bp, synthetic construct
  misc_feature 1..80: note = Synthetic: >SBB-726-cand-12550-12629
  source 1..80: mol_type = other DNA
tgcgttaagatgttgacaccccatactggcacaggcttggctataacagctaaacctgatgctaatatagaacaagaatc

SEQ ID NO: 11465 - DNA, 80 bp, synthetic construct
  misc_feature 1..80: note = Synthetic: >SBB-130-cand-9780-9859
  source 1..80: mol_type = other DNA
ttaatgaatgggccattaataatggcttcactagttttactggtattgattgctttgctatgttggctgccaagactggt

SEQ ID NO: 11466 - DNA, 80 bp, synthetic construct
  misc_feature 1..80: note = Synthetic: >SBB-010-cand-9790-9869
  source 1..80: mol_type = other DNA
atgggccattaataatggcttcactagttttactggtgttgactgctttgctatgttggctgccaaaactggtgtagacg

SEQ ID NO: 11467 - DNA, 80 bp, synthetic construct
  misc_feature 1..80: note = Synthetic: >SBB-041-cand-13310-13389
  source 1..80: mol_type = other DNA
ctaattttaacacactcttttctaccactatacctgctactgcctttggacccttgtgtcgtaaagtttttgtggatggt

SEQ ID NO: 11468 - DNA, 80 bp, synthetic construct
  misc_feature 1..80: note = Synthetic: >SBB-010-cand-13320-13399
  source 1..80: mol_type = other DNA
cacactcttttctaccactatacctgctactgcctttgggcctttgtgtcgtaaagtttttgtagatggtgtgccattag

SEQ ID NO: 11469 - DNA, 80 bp, synthetic construct
  misc_feature 1..80: note = Synthetic: >SBB-024-cand-13330-13409
  source 1..80: mol_type = other DNA
tctaccactatacctgctactgcctttgggcctttgtgtcgtaaagtttttgtagatggtgtgccactagttgccactgc

SEQ ID NO: 11470 - DNA, 80 bp, synthetic construct
  misc_feature 1..80: note = Synthetic: >SBB-010-cand-9070-9149
  source 1..80: mol_type = other DNA
tactattagttataactctactcttcaatctggtttgaaacggatggcacaaccatctggtttggtagagcgttgtatag

SEQ ID NO: 11471 - DNA, 80 bp, synthetic construct
  misc_feature 1..80: note = Synthetic: >SBB-797-cand-6240-6319
  source 1..80: mol_type = other DNA
ttggttattagttaccaagcctcctttgtttaaggtgtctggtattgtagcctataatactggctgtagtgtgacagcgt

SEQ ID NO: 11472 - DNA, 80 bp, synthetic construct
  misc_feature 1..80: note = Synthetic: >SBB-747-cand-6230-6309
  source 1..80: mol_type = other DNA
tgatgagattttggttattagttaccaagcctcctttgtttaaggtgtctggtattgtagcctataatactggctgtagt

SEQ ID NO: 11473 - DNA, 80 bp, synthetic construct
  misc_feature 1..80: note = Synthetic: >SBB-726-cand-6250-6329
  source 1..80: mol_type = other DNA
gttaccaagcctcctttgtttaaggtgtctggtattgtagcatataacactggctgtagtgtgacagcgtgcgtgtttaa

SEQ ID NO: 11474 - DNA, 80 bp, synthetic construct
  misc_feature 1..80: note = Synthetic: >SBB-747-cand-2790-2869
  source 1..80: mol_type = other DNA
catggcgtcagagtgctatgtttacagcaaagactatgagaaagttctcatgtctgatatgtatttttctttagaggatg

SEQ ID NO: 11475 - DNA, 80 bp, synthetic construct
  misc_feature 1..80: note = Synthetic: >SBB-788-cand-2800-2879
  source 1..80: mol_type = other DNA
gagtgctatgtttacagcaaagactatgagaaggttctcatgtctgatatgtatttttctctagaggatgccgttcccgt

SEQ ID NO: 11476 - DNA, 80 bp, synthetic construct
  misc_feature 1..80: note = Synthetic: >SBB-797-cand-10720-10799
  source 1..80: mol_type = other DNA
atggtaattataagtgtaacttgtacattactgagtgtacgtatagttaaaaccgatgcatacagccgtgtgtggtacgt

SEQ ID NO: 11477 - DNA, 80 bp, synthetic construct
  misc_feature 1..80: note = Synthetic: >SBB-747-cand-10710-10789
  source 1..80: mol_type = other DNA
cattgttacaatggtaattataagtgtaacttgtacattactgagtgtacgtatagttaaaaccgatgcatacagccgtg

SEQ ID NO: 11478 - DNA, 80 bp, synthetic construct
  misc_feature 1..80: note = Synthetic: >SBB-726-cand-3920-3999
  source 1..80: mol_type = other DNA
agggttatttcacgtgtgaaggttatcagttttatggttacagtcgtgatacacctttacagcatgttagcaaagctttg

SEQ ID NO: 11479 - DNA, 80 bp, synthetic construct
  misc_feature 1..80: note = Synthetic: >SBB-747-cand-3910-3989
  source 1..80: mol_type = other DNA
tctccgaaagagggttattttacgtgtgaaggttatcagttttatggttacagtcgtgatacacctttacagcatgttag

SEQ ID NO: 11480 - DNA, 80 bp, synthetic construct
  misc_feature 1..80: note = Synthetic: >SBB-130-cand-14710-14789
  source 1..80: mol_type = other DNA
ataggtgcttttaaagccaccttgtactaccagaataatgtttttatgagtacttcaaagtgttgggttgaaacagacct

SEQ ID NO: 11481 - DNA, 80 bp, synthetic construct
  misc_feature 1..80: note = Synthetic: >SBB-120-cand-14720-14799
  source 1..80: mol_type = other DNA
cttttaaagccaccttgtactatcagaataatgttttcatgagtacttcaaagtgttgggttgaaacagacctttcaaag

SEQ ID NO: 11482 - DNA, 80 bp, synthetic construct
  misc_feature 1..80: note = Synthetic: >SBB-747-cand-15990-16069
  source 1..80: mol_type = other DNA
agtaaggattatgtcttagccaacaccgccaccgaacggttgaagctttttgctgctgagactctacgtgcaaccgaaga

SEQ ID NO: 11483 - DNA, 80 bp, synthetic construct
  misc_feature 1..80: note = Synthetic: >SBB-797-cand-16000-16079
  source 1..80: mol_type = other DNA
atgtcttagccaacaccgccactgaacggttgaagctttttgctgctgagactctacgtgcaaccgaagagaatgctaaa

SEQ ID NO: 11484 - DNA, 80 bp, synthetic construct
  misc_feature 1..80: note = Synthetic: >SBB-788-cand-16000-16079
  source 1..80: mol_type = other DNA
atgtcttagccaacaccgccaccgaacggttgaagctttttgctgctgagactttacgtgcaaccgaagagaatgctaaa

SEQ ID NO: 11485 - DNA, 80 bp, synthetic construct
  misc_feature 1..80: note = Synthetic: >SBB-010-cand-18800-18879
  source 1..80: mol_type = other DNA
ttacttccttcactaagaatgtctgtagctacacagacttcgttgaagatgtcaacacatgttacgataatgcaattact

SEQ ID NO: 11486 - DNA, 80 bp, synthetic construct
  misc_feature 1..80: note = Synthetic: >SBB-130-cand-18800-18879
  source 1..80: mol_type = other DNA
cttccttcactaagaatgtctgtagctacacagattttgttgaagatgtcaacacatgttacgataatgcaattactgga

SEQ ID NO: 11487 - DNA, 80 bp, synthetic construct
  misc_feature 1..80: note = Synthetic: >SBB-024-cand-18790-18869
  source 1..80: mol_type = other DNA
gagagaccttttacttcctttactaagaatgtctgtagctatacagatttcgttgaagatgtcaacacatgttacgataa

SEQ ID NO: 11488 - DNA, 80 bp, synthetic construct
  misc_feature 1..80: note = Synthetic: >PDF-2386-cand-16480-16559
  source 1..80: mol_type = other DNA
ctctttgctgctgaaacactcaaagctaatgaagagacatttaaattgtcttatggtatcgccactgtacgtgaagtact

SEQ ID NO: 11489 - DNA, 80 bp, synthetic construct
  misc_feature 1..80: note = Synthetic: >PRD-0038-cand-16470-16549
  source 1..80: mol_type = other DNA
gaggttaaaactctttgctgctgaaacacttaaagctaatgaagagacatttaaattgtcttatggtatcgccactgtac

SEQ ID NO: 11490 - DNA, 80 bp, synthetic construct
  misc_feature 1..80: note = Synthetic: >SBB-122-cand-26420-26499
  source 1..80: mol_type = other DNA
agagaagttggtgatgaagtggaaatcacttaccattacaaaatgaaagtgaggaaagatgacaaaaatctgccagcttt

SEQ ID NO: 11491 - DNA, 80 bp, synthetic construct
  misc_feature 1..80: note = Synthetic: >SBB-120-cand-26450-26529
  source 1..80: mol_type = other DNA
ttggtgatgaagtggaaatcacttaccattacaaaatgaaagtgaggaaagatgacaaaaatctgccagcttttcttcaa

SEQ ID NO: 11492 - DNA, 80 bp, synthetic construct
  misc_feature 1..80: note = Synthetic: >GCS-227-cand-24850-24929
  source 1..80: mol_type = other DNA
tgtccagttgttgtagtcgaactaaactcaaaccttacacggaacttgaaaagttgcacatacaatgattggaggacttt

SEQ ID NO: 11493 - DNA, 80 bp, synthetic construct
  misc_feature 1..80: note = Synthetic: >GCS-211-cand-24860-24939
  source 1..80: mol_type = other DNA
tgttgtagtcgaactaaactcaaaccttacacggaacttgaaaagttgcacatacaatgattggaggacttttcttgttc

SEQ ID NO: 11494 - DNA, 80 bp, synthetic construct
  misc_feature 1..80: note = Synthetic: >GCS-227-cand-7920-7999
  source 1..80: mol_type = other DNA
ctgctaaagactttaacaatttgtcacctgaggctcgcaagtatgtggtaaagacgacaaaagctaagggcttgaacttt

SEQ ID NO: 11495 - DNA, 80 bp, synthetic construct
  misc_feature 1..80: note = Synthetic: >GCS-211-cand-7920-7999
  source 1..80: mol_type = other DNA
gtctgctaaagactttaacaatttgtcacctgaggctcgcaagtatgtggtaaagacgacaaaagctaagggcttgaact

SEQ ID NO: 11496 - DNA, 80 bp, synthetic construct
  misc_feature 1..80: note = Synthetic: >GCS-227-cand-10950-11029
  source 1..80: mol_type = other DNA
tttgcactcagtttgttgacccattagcggtagtggctttaggtcacattaaggttgttgtcttcttgtacctcttattt

SEQ ID NO: 11497 - DNA, 80 bp, synthetic construct
  misc_feature 1..80: note = Synthetic: >GCS-211-cand-10960-11039
  source 1..80: mol_type = other DNA
cagtttgttgacccattagcggtagtggctttaggtcacattaaggttgttgtcttcttgtacctcttatttggtttctt

SEQ ID NO: 11498 - DNA, 80 bp, synthetic construct
  misc_feature 1..80: note = Synthetic: >GCS-227-cand-6890-6969
  source 1..80: mol_type = other DNA
aaatacacgcgatgtcttgtgttatacttcattgcgcagtatgtgaacaaactcggtgtttacctccatttgcaacagaa

SEQ ID NO: 11499 - DNA, 80 bp, synthetic construct
  misc_feature 1..80: note = Synthetic: >GCS-211-cand-6890-6969
  source 1..80: mol_type = other DNA
gtaaatacacgcgatgtcttgtgttatacttcattgcgcagtatgtgaacaaactcggtgtttacctccatttgcaacag

SEQ ID NO: 11500 - DNA, 80 bp, synthetic construct
  misc_feature 1..80: note = Synthetic: >SBB-120-cand-26690-26769
  source 1..80: mol_type = other DNA
aaatattctggctcctagcactcctagcaccaataatgcatttttgtgctgagtgtgttagagcatttttcagagtattt

SEQ ID NO: 11501 - DNA, 80 bp, synthetic construct
  misc_feature 1..80: note = Synthetic: >SBB-122-cand-26660-26739
  source 1..80: mol_type = other DNA
atcggtcaaatattctggctcctagcacacctagcaccaataatgcatttttgtgctgagtgtgttagagcatttttcag

SEQ ID NO: 11502 - DNA, 80 bp, synthetic construct
  misc_feature 1..80: note = Synthetic: >GCS-227-cand-25570-25649
  source 1..80: mol_type = other DNA
ttacgaagatgctgtttaagattgttgatgacaatggctttgccatcaacgctatcttatggctcctcatattactattt

SEQ ID NO: 11503 - DNA, 80 bp, synthetic construct
  misc_feature 1..80: note = Synthetic: >GCS-211-cand-25580-25659
  source 1..80: mol_type = other DNA
atgctgtttaagattgttgatgacaatggctttgccatcaacgctatcttatggctcctcatattactatttatcttatt

SEQ ID NO: 11504 - DNA, 80 bp, synthetic construct
  misc_feature 1..80: note = Synthetic: >GCS-227-cand-26610-26689
  source 1..80: mol_type = other DNA
aaatcaatattacctaataatgctgttcccactaacctaggtgacagaagacaggctgtcggatactggaatgaacagat

SEQ ID NO: 11505 - DNA, 80 bp, synthetic construct
  misc_feature 1..80: note = Synthetic: >GCS-211-cand-26610-26689
  source 1..80: mol_type = other DNA
tcaaatcaatattacctaataatgctgttcccactaacctaggtgacagaagacaggctgtcggatactggaatgaacag

SEQ ID NO: 11506 - DNA, 80 bp, synthetic construct
  misc_feature 1..80: note = Synthetic: >GCS-211-cand-19670-19749
  source 1..80: mol_type = other DNA
aaccacacttggtggtttacacttactcatatcacaaattaggctgtctaaaatgggtgtgtttaaaactgaagagtttg

SEQ ID NO: 11507 - DNA, 80 bp, synthetic construct
  misc_feature 1..80: note = Synthetic: >GCS-227-cand-19660-19739
  source 1..80: mol_type = other DNA
gtgtctaaaaccacacttggtggtttacacttactcatatcacaaattaggctgtctaaaatgggtgtgtttaaaactga

SEQ ID NO: 11508 - DNA, 80 bp, synthetic construct
  misc_feature 1..80: note = Synthetic: >GCS-227-cand-18540-18619
  source 1..80: mol_type = other DNA
gtaccctgagtttagcattgtgtgtaggtttgacactcgtgtgcgttctaagttgaaccttgaagggtgtaatggtggtt

SEQ ID NO: 11509 - DNA, 80 bp, synthetic construct
  misc_feature 1..80: note = Synthetic: >GCS-211-cand-18550-18629
  source 1..80: mol_type = other DNA
agtttagcattgtgtgtaggtttgacactcgtgtgcgttctaagttgaaccttgaagggtgtaatggtggttccctttat

SEQ ID NO: 11510 - DNA, 80 bp, synthetic construct
  misc_feature 1..80: note = Synthetic: >GCS-227-cand-3850-3929
  source 1..80: mol_type = other DNA
gtgcgaaggtatgcacactttgttcatagttctaaaagccaaatgtgattgtggcttgagtgacttgcaactcagtggtt

SEQ ID NO: 11511 - DNA, 80 bp, synthetic construct
  misc_feature 1..80: note = Synthetic: >GCS-211-cand-3850-3929
  source 1..80: mol_type = other DNA
ttgtgcgaagatatgcacactttgttcatagttctaaaagccaaatgtgattgtggcttgagtgacttgcaactcagtgg

SEQ ID NO: 11512 - DNA, 80 bp, synthetic construct
  misc_feature 1..80: note = Synthetic: >GCS-211-cand-16070-16149
  source 1..80: mol_type = other DNA
tggaaacagagagcttctgttggattgggaagctggtaaagccagaccaccactcaatcgcaattctgttttcactggtt

SEQ ID NO: 11513 - DNA, 80 bp, synthetic construct
  misc_feature 1..80: note = Synthetic: >GCS-227-cand-16070-16149
  source 1..80: mol_type = other DNA
gaaacagagagcttctgttggattgggaagccggtaaagccagaccaccactcaatcgcaattctgttttcactggttat

SEQ ID NO: 11514 - DNA, 80 bp, synthetic construct
  misc_feature 1..80: note = Synthetic: >SBB-120-cand-16680-16759
  source 1..80: mol_type = other DNA
taaaaacccatcttggtctaaggcagtcttcatttcaccttataacagtcagaactatgttgctagtcgtgctttgggtt

SEQ ID NO: 11515 - DNA, 80 bp, synthetic construct
  misc_feature 1..80: note = Synthetic: >SBB-122-cand-16670-16749
  source 1..80: mol_type = other DNA
tgtttctcgctaaaaacccatcttggtctaaggcagtcttcatttcaccttataacagtcagaactatgttgctagtcgt

SEQ ID NO: 11516 - DNA, 80 bp, synthetic construct
  misc_feature 1..80: note = Synthetic: >GCS-211-cand-9840-9919
  source 1..80: mol_type = other DNA
tagcatacttgcgtgttatgatggccttccttccagtgtgtacagtgttaacatgcgtacaaatttcactgttaggggtt

SEQ ID NO: 11517 - DNA, 80 bp, synthetic construct
  misc_feature 1..80: note = Synthetic: >GCS-227-cand-9840-9919
  source 1..80: mol_type = other DNA
gcatacttgcgtgttatgatggccttccttccagtgtgtacagtgttaacatgcgtacaaatttcactgttaggggttcc

SEQ ID NO: 11518 - DNA, 80 bp, synthetic construct
  misc_feature 1..80: note = Synthetic: >GCS-227-cand-23250-23329
  source 1..80: mol_type = other DNA
aaccctaggtgtaacaagcttttgttacagtatgcacaagcatgtcttaatatagagaaggctcttcatatgagtgctcg

SEQ ID NO: 11519 - DNA, 80 bp, synthetic construct
  misc_feature 1..80: note = Synthetic: >GCS-211-cand-23260-23339
  source 1..80: mol_type = other DNA
gtgtaacaagcttttgttacagtatgcacaagcatgtcttaatatagagaaggctcttcatatgagtgctcgcatagagt

SEQ ID NO: 11520 - DNA, 80 bp, synthetic construct
  misc_feature 1..80: note = Synthetic: >GCS-227-cand-14390-14469
  source 1..80: mol_type = other DNA
ctaagcgcaacatcttaccaaccatgactcagttgaaccttaagtacgccataagtggcaaggaacgtgccagaacggtt

SEQ ID NO: 11521 - DNA, 80 bp, synthetic construct
  misc_feature 1..80: note = Synthetic: >GCS-211-cand-14390-14469
  source 1..80: mol_type = other DNA
ttctaagcgcaacatcttaccaaccatgactcagttgaaccttaagtacgccataagtggcaaggaacgtgccagaacgg

SEQ ID NO: 11522 - DNA, 80 bp, synthetic construct
  misc_feature 1..80: note = Synthetic: >SBB-010-cand-16250-16329
  source 1..80: mol_type = other DNA
caactataaatgcgttgccagagtgtaatgttgacatagttgttatagatgaagtgtcgatgtgtacaaattatgatctt

SEQ ID NO: 11523 - DNA, 80 bp, synthetic construct
  misc_feature 1..80: note = Synthetic: >SBB-130-cand-16250-16329
  source 1..80: mol_type = other DNA
ctataaatgcattgccagagtgtaatgttgacatagttgttatagatgaagtgtcgatgtgtacaaattatgatctttct

SEQ ID NO: 11524 - DNA, 80 bp, synthetic construct
  misc_feature 1..80: note = Synthetic: >GCS-211-cand-14710-14789
  source 1..80: mol_type = other DNA
ttttgggttctaaacatgtcacatgttgtactgactccgacaggtattacagactttcaaatgaactagcacaagtgctt

SEQ ID NO: 11525 - DNA, 80 bp, synthetic construct
  misc_feature 1..80: note = Synthetic: >GCS-227-cand-14710-14789
  source 1..80: mol_type = other DNA
ttgggttctaaacatgtcacatgttgtactgactccgacaggtattacagactttcaaatgaactagcacaagtgcttac

SEQ ID NO: 11526 - DNA, 80 bp, synthetic construct
  misc_feature 1..80: note = Synthetic: >GCS-227-cand-1930-2009
  source 1..80: mol_type = other DNA
gctggaacctaagggttatgctgtagtgattgatggtctggcgtatttttgcagtggtggtgtttatcgtatgatggctt

SEQ ID NO: 11527 - DNA, 80 bp, synthetic construct
  misc_feature 1..80: note = Synthetic: >GCS-211-cand-1930-2009
  source 1..80: mol_type = other DNA
gtgctggaacctaagggttatgctgtagtgattgatggtctggcgtatttttgcagtggtggtgtttatcgtatgatggc

SEQ ID NO: 11528 - DNA, 80 bp, synthetic construct
  misc_feature 1..80: note = Synthetic: >GCS-227-cand-10630-10709
  source 1..80: mol_type = other DNA
agtgattgctgtaaacaactttgcgtgggactcaacaatcttcagggttttgtcagagcatgttggtaacactacggctt

SEQ ID NO: 11529 - DNA, 80 bp, synthetic construct
  misc_feature 1..80: note = Synthetic: >GCS-211-cand-10640-10719
  source 1..80: mol_type = other DNA
ctgtaaacaactttgcgtgggactcaacaatcttcagggttttgtcagagcatgttggtaacactacggctttgatgggt

SEQ ID NO: 11530 - DNA, 80 bp, synthetic construct
  misc_feature 1..80: note = Synthetic: >GCS-211-cand-23740-23819
  source 1..80: mol_type = other DNA
gcaaactgatgttttgcagaacaaccagaagcagcttgcaacagcattcaacaatgccattggcaatatcactcaggctt

SEQ ID NO: 11531 - DNA, 80 bp, synthetic construct
  misc_feature 1..80: note = Synthetic: >GCS-227-cand-23730-23809
  source 1..80: mol_type = other DNA
gttgctttgcaaactgatgttttgcagaacaaccagaagcagcttgcaacagcattcaacaatgccattggcaatatcac

SEQ ID NO: 11532 - DNA, 80 bp, synthetic construct
  misc_feature 1..80: note = Synthetic: >GCS-227-cand-4810-4889
  source 1..80: mol_type = other DNA
agttccaactgaacccttagtggagggcaatatacccatacaaatggacgccaacgtaggtgttagtgacgagcccgctt

SEQ ID NO: 11533 - DNA, 80 bp, synthetic construct
  misc_feature 1..80: note = Synthetic: >GCS-211-cand-4810-4889
  source 1..80: mol_type = other DNA
gtagttccaactgaacccttagaggagggcaatatacccatacaaatggacgccaacgtaggtgttagtgacgagcccgc

SEQ ID NO: 11534 - DNA, 80 bp, synthetic construct
  misc_feature 1..80: note = Synthetic: >SBB-747-cand-27720-27799
  source 1..80: mol_type = other DNA
tctacagcgtcacgtgtgacgattgcagatcctacaaatgttaattcagaaaggtcgtaaggtttttccgctttaagctt

SEQ ID NO: 11535 - DNA, 80 bp, synthetic construct
  misc_feature 1..80: note = Synthetic: >SBB-797-cand-27730-27809
  source 1..80: mol_type = other DNA
ggcattctacagcgtcacgtgtgacgattgcagatcctacaaatgttacttcagaaaggtcgtaaggtttttccgcttta

SEQ ID NO: 11536 - DNA, 80 bp, synthetic construct
  misc_feature 1..80: note = Synthetic: >SBB-726-cand-23520-23599
  source 1..80: mol_type = other DNA
gctgtacacttccttattagtgggtgcagttgcgtctgctggatacacatttggtgtaacttcagtaggcgttattcctt

SEQ ID NO: 11537 - DNA, 80 bp, synthetic construct
  misc_feature 1..80: note = Synthetic: >GCS-227-cand-12150-12229
  source 1..80: mol_type = other DNA
ctggtgttggtaaggctatctatcaacaagaaggtggtaacgctttcatgtatgcatttatttcagacactgccaattta

SEQ ID NO: 11538 - DNA, 80 bp, synthetic construct
  misc_feature 1..80: note = Synthetic: >GCS-211-cand-12160-12239
  source 1..80: mol_type = other DNA
ggtaaggctatctatcaacaagaaggtggtaacgctttcatgtatgcatttatctcagacactgccaatttacggtttgc

SEQ ID NO: 11539 - DNA, 80 bp, synthetic construct
  misc_feature 1..80: note = Synthetic: >SBB-130-cand-1990-2069
  source 1..80: mol_type = other DNA
tggttattacagactcatgagtgagtttgacactgttttaaatgaaccagtttttcaggctgttgccaatcatgaaccag

SEQ ID NO: 11540 - DNA, 80 bp, synthetic construct
  misc_feature 1..80: note = Synthetic: >GCS-211-cand-17110-17189
  source 1..80: mol_type = other DNA
ctgtttggtctaaagcagtttttatttcaccttataatagtcagaattatgttgccagtcgtatgctgaatctacaaaca

SEQ ID NO: 11541 - DNA, 80 bp, synthetic construct
  misc_feature 1..80: note = Synthetic: >GCS-227-cand-17100-17179
  source 1..80: mol_type = other DNA
taaaaaccctgtttggtctaaagcagtttttatttcaccttataatagtcagaattatgttgccagtcgtatgctgaatc

SEQ ID NO: 11542 - DNA, 80 bp, synthetic construct
  misc_feature 1..80: note = Synthetic: >SBB-010-cand-6810-6889
  source 1..80: mol_type = other DNA
gtgttaactgtgactcctatggatctggcaacacgtttattaacgatgttgtagctgcagaggtgtcttctgttgttaag

SEQ ID NO: 11543 - DNA, 80 bp, synthetic construct
  misc_feature 1..80: note = Synthetic: >GCS-211-cand-26290-26369
  source 1..80: mol_type = other DNA
gtgtaacaaatgaaatgttaccatcagtcatcactgttgcgaagcctaccactaccatcatctatgagcgaaagagtaag

SEQ ID NO: 11544 - DNA, 80 bp, synthetic construct
  misc_feature 1..80: note = Synthetic: >GCS-227-cand-26290-26369
  source 1..80: mol_type = other DNA
gtaacaaatgaaatgttaccatcagtcatcactgttgcgaagcctaccactaccatcatttatgagcgaaagagtaagtc

SEQ ID NO: 11545 - DNA, 80 bp, synthetic construct
  misc_feature 1..80: note = Synthetic: >SBB-120-cand-26370-26449
  source 1..80: mol_type = other DNA
taagcattacccgcagattgctgaacttgttccatcaactgctgcattgctctttggtggtgaagtaactaccagagaag

SEQ ID NO: 11546 - DNA, 80 bp, synthetic construct
  misc_feature 1..80: note = Synthetic: >SBB-122-cand-26340-26419
  source 1..80: mol_type = other DNA
tggacgctaagcattacccgcagattgctgaacttgttccatcaactgctgcattgctctttggtggtgaagtaactacc

SEQ ID NO: 11547 - DNA, 80 bp, synthetic construct
  misc_feature 1..80: note = Synthetic: >SBB-024-cand-6570-6649
  source 1..80: mol_type = other DNA
tacagtttgttccctttgatgtctttggtgatgagattgtagtctttttcgttgttgttaagtgtttattgttcttcaag

SEQ ID NO: 11548 - DNA, 80 bp, synthetic construct
  misc_feature 1..80: note = Synthetic: >SBB-041-cand-20550-20629
  source 1..80: mol_type = other DNA
cttgtgattactggtgcattcccctctaccaatgcatctgattggttctgtgatcagtggaagggaccccaagacgcaac

SEQ ID NO: 11549 - DNA, 80 bp, synthetic construct
  misc_feature 1..80: note = Synthetic: >SBB-024-cand-2630-2709
  source 1..80: mol_type = other DNA
tcatttacttattatgctttcactgtgcctaaagtttttatctctggtattttacaccctgtaagaactattgaagccac

SEQ ID NO: 11550 - DNA, 80 bp, synthetic construct
  misc_feature 1..80: note = Synthetic: >GCS-227-cand-2970-3049
  source 1..80: mol_type = other DNA
gtggggatgaagtccgagaaataccttgtgtgcacagagtccacgtcatgtttgaatttgaggatgaaaacatcgttaaa

SEQ ID NO: 11551 - DNA, 80 bp, synthetic construct
  misc_feature 1..80: note = Synthetic: >GCS-211-cand-2970-3049
  source 1..80: mol_type = other DNA
tggtggggatgaagtccgagaaataccttgtgtgcacagagtccacgtcatgtttgaatttgaggatgaaaacatcgtta

SEQ ID NO: 11552 - DNA, 80 bp, synthetic construct
  misc_feature 1..80: note = Synthetic: >GCS-227-cand-1530-1609
  source 1..80: mol_type = other DNA
tgcatggtttgaattttactagtaagctctttgtcaaatttgtcaaggcattgtgtgacgccgcttttacagtgcttaac

SEQ ID NO: 11553 - DNA, 80 bp, synthetic construct
  misc_feature 1..80: note = Synthetic: >GCS-211-cand-1530-1609
  source 1..80: mol_type = other DNA
tttgcatggtttgaattttactagtaagctctttgtcaaatttgtcaaggcattgtgtggcgccgcttttacagtgctta

SEQ ID NO: 11554 - DNA, 80 bp, synthetic construct
  misc_feature 1..80: note = Synthetic: >GCS-227-cand-18700-18779
  source 1..80: mol_type = other DNA
ttttactttgatgagtgtgcttgtgacctggtccaggatcaagtcaattacgtaccattgcgtgccaacaattgcataac

SEQ ID NO: 11555 - DNA, 80 bp, synthetic construct
  misc_feature 1..80: note = Synthetic: >GCS-211-cand-18710-18789
  source 1..80: mol_type = other DNA
tgatgagagtgcttgtgacctggtccaggatcaagtcaattacgtaccattgcgtgccaacaattgcataactaaatgta

SEQ ID NO: 11556 - DNA, 80 bp, synthetic construct
  misc_feature 1..80: note = Synthetic: >GCS-211-cand-6490-6569
  source 1..80: mol_type = other DNA
gttcctgaacgtactggtattatatttaagcgtagtcttaaatataatttaaaggcctttcgtaagtttatgatgggtaa

SEQ ID NO: 11557 - DNA, 80 bp, synthetic construct
  misc_feature 1..80: note = Synthetic: >GCS-227-cand-6490-6569
  source 1..80: mol_type = other DNA
tccagaacgtactggtattatatttaagcgtagtcttaaatataatttaaaggcctttcgtaagtttatgatgggtaaga

SEQ ID NO: 11558 - DNA, 80 bp, synthetic construct
  misc_feature 1..80: note = Synthetic: >GCS-211-cand-28610-28689
  source 1..80: mol_type = other DNA
tctactcttgtacagaatggtagtccagtgatgatgcaagtacaagcaattgcacatcatattggaggtgccagacgaac

SEQ ID NO: 11559 - DNA, 80 bp, synthetic construct
  misc_feature 1..80: note = Synthetic: >GCS-227-cand-28610-28689
  source 1..80: mol_type = other DNA
tactcttgtacagaatggtagtccagtgatgatgcaagtacaagcaattgcacatcatattggaggtgccagacgaacaa

SEQ ID NO: 11560 - DNA, 80 bp, synthetic construct
  misc_feature 1..80: note = Synthetic: >GCS-227-cand-17740-17819
  source 1..80: mol_type = other DNA
gttgtcactccagagggatgtgtctctactgaagttggcgatattgtcaaacctgtgaaagcccgtgctccacctggaga

SEQ ID NO: 11561 - DNA, 80 bp, synthetic construct
  misc_feature 1..80: note = Synthetic: >GCS-211-cand-17750-17829
  source 1..80: mol_type = other DNA
tccagagggatgtgtctctactgaagttggcgatattgtcaaacctgtgaaagcccgtgctccacctggagaacagttta

SEQ ID NO: 11562 - DNA, 80 bp, synthetic construct
  misc_feature 1..80: note = Synthetic: >GCS-227-cand-15750-15829
  source 1..80: mol_type = other DNA
ttctggttgtaccgtatgtgacgtcactaaattgtttttaggcggacttagttattggtgtgcggaacacaaaccacaac

SEQ ID NO: 11563 - DNA, 80 bp, synthetic construct
  misc_feature 1..80: note = Synthetic: >GCS-211-cand-15750-15829
  source 1..80: mol_type = other DNA
ttttctggttgtaccgtatgtgacgtcactaaattgtttttaggtggacttagttattggtgtgcggaacacaaaccaca

SEQ ID NO: 11564 - DNA, 80 bp, synthetic construct
  misc_feature 1..80: note = Synthetic: >229E-cand-18020-18099
  source 1..80: mol_type = other DNA
cgcactgtgcaaagtcatatcatgcgtgctgctattaaattgtacaaccctaaagcaattcatgatattggtaatcctaa

SEQ ID NO: 11565 - DNA, 80 bp, synthetic construct
  misc_feature 1..80: note = Synthetic: >229E-cand-18100-18179
  source 1..80: mol_type = other DNA
gggtattcgttgtgctgtaactgatgcaaagtggtattgttacgacaaggaccctattaattctaatgtgaaaacattag

SEQ ID NO: 11566 - DNA, 80 bp, synthetic construct
  misc_feature 1..80: note = Synthetic: >229E-cand-18260-18339
  source 1..80: mol_type = other DNA
tcaattgtttgcaggtttgatacacgtacgcgctctacattgaaccttgaaggcgtaaatgggggttcgttatacgtcaa

SEQ ID NO: 11567 - DNA, 80 bp, synthetic construct
  misc_feature 1..80: note = Synthetic: >229E-cand-18340-18419
  source 1..80: mol_type = other DNA
caaccatgcattccacactccagcttatgataaacgtgctatggccaagttaaaaccagcaccgtttttctattatgatg

SEQ ID NO: 11568 - DNA, 80 bp, synthetic construct
  misc_feature 1..80: note = Synthetic: >229E-cand-18420-18499
  source 1..80: mol_type = other DNA
acggtccatgtgaagttgttcatgatcaagtcaactatgttcctttgagagccactaattgtattactaagtgtaatatt

SEQ ID NO: 11569 - DNA, 80 bp, synthetic construct
  misc_feature 1..80: note = Synthetic: >229E-cand-18500-18579
  source 1..80: mol_type = other DNA
ggtggtgctgtatgttctaagcatgctaatctttatagagcatatgtggagtcatataacactttcacccaagctggctt

SEQ ID NO: 11570 - DNA, 80 bp, synthetic construct
  misc_feature 1..80: note = Synthetic: >229E-cand-18580-18659
  source 1..80: mol_type = other DNA
taacatttgggttcctaccacgtttgattgttataatttgtggcagacctttacagaggttaacctgcaaggtttggaga

SEQ ID NO: 11571 - DNA, 80 bp, synthetic construct
  misc_feature 1..80: note = Synthetic: >229E-cand-18660-18739
  source 1..80: mol_type = other DNA
atattgcttttaatgttttaaaaaaaggttcatttgtctgtgctgatggtgaactaccagtagccattagtggtgataaa

SEQ ID NO: 11572 - DNA, 80 bp, synthetic construct
  misc_feature 1..80: note = Synthetic: >229E-cand-18740-18819
  source 1..80: mol_type = other DNA
gtgttcgtacgtgatggtaacattgacaatttagtctttgttaataagacatcactgcccacaaacatagcatttgaact

SEQ ID NO: 11573 - DNA, 80 bp, synthetic construct
  misc_feature 1..80: note = Synthetic: >229E-cand-18820-18899
  source 1..80: mol_type = other DNA
tttcgcaaagaggaaggttggtttaacaccacccctcagtattctcaaaaacctcggtgttgttgctacatataagtttg

SEQ ID NO: 11574 - DNA, 80 bp, synthetic construct
  misc_feature 1..80: note = Synthetic: >229E-cand-18900-18979
  source 1..80: mol_type = other DNA
tcttgtgggattatgaagctgagcgtccctttacaagttttactaagtctgtttgtggttatacagactttacagaggat

SEQ ID NO: 11575 - DNA, 80 bp, synthetic construct
  misc_feature 1..80: note = Synthetic: >229E-cand-18980-19059
  source 1..80: mol_type = other DNA
gtttgtacctgctacgataatagtatacaaggttcgtacgaacgttttactctgtcaaataatgctgtgttattctctgc

SEQ ID NO: 11576 - DNA, 80 bp, synthetic construct
  misc_feature 1..80: note = Synthetic: >229E-cand-19130-19209
  source 1..80: mol_type = other DNA
gccattgctactgtcaaatcagaagatggtaacattaaaaatgttaactggtttgtttatgtacgcaaagatggtaagcc

SEQ ID NO: 11577 - DNA, 80 bp, synthetic construct
  misc_feature 1..80: note = Synthetic: >AlphaCoV1-cand-22420-22499
  source 1..80: mol_type = other DNA
attagtagaagttgaaaacacagctattacaagggtgacgtattgtaacagtcacattaataacattaagtgttctcaac

SEQ ID NO: 11578 - DNA, 80 bp, synthetic construct
  misc_feature 1..80: note = Synthetic: >AlphaCoV1-cand-22500-22579
  source 1..80: mol_type = other DNA
ttactgctaatttgcaaaatggattttatcctgttacttcaagtgaagttggtcttgttaataagagtgtacctaagaca

SEQ ID NO: 11579 - DNA, 80 bp, synthetic construct
  misc_feature 1..80: note = Synthetic: >AlphaCoV1-cand-22580-22659
  source 1..80: mol_type = other DNA
tgtgttactacctaacatttttacaattggatgaatgtcacgttacataccgtttttaacataactattgaaaaagctga

SEQ ID NO: 11580 - DNA, 80 bp, synthetic construct
  misc_feature 1..80: note = Synthetic: >AlphaCoV1-cand-22660-22739
  source 1..80: mol_type = other DNA
tatctcttggtatgaagcttagtggttatggtcaacccatagcctcaacatttagtaacatcacactaccaaggcaagga

SEQ ID NO: 11581 - DNA, 80 bp, synthetic construct
  misc_feature 1..80: note = Synthetic: >AlphaCoV1-cand-22740-22819
  source 1..80: mol_type = other DNA
taacaataccgatgtgttctgtgttcattctaaacaattttcagtttattttcattctacttgcaaaagtgctttatggg

SEQ ID NO: 11582 - DNA, 80 bp, synthetic construct
  misc_feature 1..80: note = Synthetic: >AlphaCoV1-cand-22820-22899
  source 1..80: mol_type = other DNA
acaatatttttaacaaagattgtacagatgttttagatgctacagctgttataaaaactggtacttgtcctttctcattt

SEQ ID NO: 11583 - DNA, 80 bp, synthetic construct
  misc_feature 1..80: note = Synthetic: >AlphaCoV1-cand-22900-22979
  source 1..80: mol_type = other DNA
gataaattgaataattacttgacttttaacaagttctgtttttcgttgagtcctgttggtgctgattgtaagtttgatgt

SEQ ID NO: 11584 - DNA, 80 bp, synthetic construct
  misc_feature 1..80: note = Synthetic: >AlphaCoV1-cand-22980-23059
  source 1..80: mol_type = other DNA
agttgctcatacaagatccaataagcaggttgttacaagtatgtatgtaatatataaagaaggtgacaacatagtgggtg

SEQ ID NO: 11585 - DNA, 80 bp, synthetic construct
  misc_feature 1..80: note = Synthetic: >AlphaCoV1-cand-23060-23139
  source 1..80: mol_type = other DNA
tgccgactgcaaatagtggtttgcacgatttgtctgtgctacacctagattcatgcacagattacaatatatatggtata

SEQ ID NO: 11586 - DNA, 80 bp, synthetic construct
  misc_feature 1..80: note = Synthetic: >AlphaCoV1-cand-23140-23219
  source 1..80: mol_type = other DNA
actggtgttggtattattagacaaactaacagaacgctacttggtggcctatattacacatcactatctggtgatttgtt

SEQ ID NO: 11587 - DNA, 80 bp, synthetic construct
  misc_feature 1..80: note = Synthetic: >AlphaCoV1-cand-23220-23299
  source 1..80: mol_type = other DNA
aggttttaaaaatgttactaatggtgtcatctactctgtaacgccatgtgatgtaagcgcacaagcagctgttattgatg

SEQ ID NO: 11588 - DNA, 80 bp, synthetic construct
  misc_feature 1..80: note = Synthetic: >AlphaCoV1-cand-23300-23379
  source 1..80: mol_type = other DNA
gtgccatagttggagctataacttccattaatagaactgatctgtttgaattgttaggtctaacacattggacaagatca

SEQ ID NO: 11589 - DNA, 80 bp, synthetic construct
  misc_feature 1..80: note = Synthetic: >AlphaCoV1-cand-23380-23459
  source 1..80: mol_type = other DNA
cgtaggtcaacaacacctaatttttattactactctatatataccacaattttattacacaactgagaggaatagtggca

SEQ ID NO: 11590 - DNA, 80 bp, synthetic construct
  misc_feature 1..80: note = Synthetic: >AlphaCoV1-cand-23460-23539
  source 1..80: mol_type = other DNA
ctgcacattgacagtaacgatgttaattgtaaacctgtcataacctattctaacataggtgtttgtaaaaatggtgcttt

SEQ ID NO: 11591 - DNA, 80 bp, synthetic construct
  misc_feature 1..80: note = Synthetic: >AlphaCoV1-cand-23540-23619
  source 1..80: mol_type = other DNA
tgtttttattaacgtcacacattctgaaattgtggatgatagtattggagatgttcaacctattagcactggtaacgtca

SEQ ID NO: 11592 - DNA, 80 bp, synthetic construct
  misc_feature 1..80: note = Synthetic: >AlphaCoV1-cand-23620-23699
  source 1..80: mol_type = other DNA
cgatacctacaaattttactatatcagtgcaagtcgaatacattcaggtttacactaaaccagtttcaatagattgtgca

SEQ ID NO: 11593 - DNA, 80 bp, synthetic construct
  misc_feature 1..80: note = Synthetic: >AlphaSp-cand-21610-21689
  source 1..80: mol_type = other DNA
gtggcaatgcctaaattgcaaggtcttacgactactttgtcttttaataaaccactgaatgtgccggggttcgcttgtaa

SEQ ID NO: 11594 - DNA, 80 bp, synthetic construct
  misc_feature 1..80: note = Synthetic: >AlphaSp-cand-21690-21769
  source 1..80: mol_type = other DNA
tggcgctaatgggtctggctcagctgaagcctttcgttttaacgttaatgatactaagttgtttgttggtgctggtgctg

SEQ ID NO: 11595 - DNA, 80 bp, synthetic construct
  misc_feature 1..80: note = Synthetic: >AlphaSp-cand-21770-21849
  source 1..80: mol_type = other DNA
ttacattgaacactgttgatggtgttaatgtttctattgtttttgtgctccaataatgcaacccaacccactagatcaag

SEQ ID NO: 11596 - DNA, 80 bp, synthetic construct
  misc_feature 1..80: note = Synthetic: >AlphaSp-cand-21850-21929
  source 1..80: mol_type = other DNA
caacctgcagggtgatacagacttgccctattattgctttactaaaactagtagtggcactaattatactattaagtttc

SEQ ID NO: 11597 - DNA, 80 bp, synthetic construct
  misc_feature 1..80: note = Synthetic: >AlphaSp-cand-21930-22009
  source 1..80: mol_type = other DNA
tttcagttttgccaccaaccattcgtgagtttgtcgtcaccaagtatggcaatgtttacgttaatggctatatctatttg

SEQ ID NO: 11598 - DNA, 80 bp, synthetic construct
  misc_feature 1..80: note = Synthetic: >AlphaSp-cand-22010-22089
  source 1..80: mol_type = other DNA
aaaactagaccgttgaaagctgttaattttaatgccccttctcattctaaggatgttgctggattttggaccattgctgc

SEQ ID NO: 11599 - DNA, 80 bp, synthetic construct
  misc_feature 1..80: note = Synthetic: >AlphaSp-cand-22090-22169
  source 1..80: mol_type = other DNA
cacaaattttgcggatgtgcttgttgaggtgaacaacactagcattcagaggttgttgtactgtgatacgcctgaaaata

SEQ ID NO: 11600 - DNA, 80 bp, synthetic construct
  misc_feature 1..80: note = Synthetic: >AlphaSp-cand-22170-22249
  source 1..80: mol_type = other DNA
gtgtcaaatgctcacagctctcttttgaacttgatgatgggttttatgctatgactgcagataatgcatttgcagtttcc

SEQ ID NO: 11601 - DNA, 80 bp, synthetic construct
  misc_feature 1..80: note = Synthetic: >AlphaSp-cand-22250-22329
  source 1..80: mol_type = other DNA
aaaccccacacgtttgtgacattgcccacgtttaatgatcatgggtttgttaatgttactgtgggtggtaaatttgacaa

SEQ ID NO: 11602 - DNA, 80 bp, synthetic construct
  misc_feature 1..80: note = Synthetic: >AlphaSp-cand-22330-22409
  source 1..80: mol_type = other DNA
ttcatacccacctcagtttactgctaatggcacttttgttaataatggcactgtggtttgtgttacttctaatcagttca

SEQ ID NO: 11603 - DNA, 80 bp, synthetic construct
  misc_feature 1..80: note = Synthetic: >AlphaSp-cand-22410-22489
  source 1..80: mol_type = other DNA
cacttagaacacttcacgacttcatggtacaatattctagtggtatgcgtaagggtatctttgagtactctagcacagaa

SEQ ID NO: 11604 - DNA, 80 bp, synthetic construct
  misc_feature 1..80: note = Synthetic: >AlphaSp-cand-22490-22569
  source 1..80: mol_type = other DNA
ctgccctttcaatagagaaactattaataactaccttacgtttggtcgtatttgtttctccacttcaccggcggacggtg

SEQ ID NO: 11605 - DNA, 80 bp, synthetic construct
  misc_feature 1..80: note = Synthetic: >AlphaSp-cand-22570-22649
  source 1..80: mol_type = other DNA
cttgcgaattacgaagtattatgtgtactcaggaacaccattggggctgtttcacatttagctggcaccttgtatgttca

SEQ ID NO: 11606 - DNA, 80 bp, synthetic construct
  misc_feature 1..80: note = Synthetic: >AlphaSp-cand-22650-22729
  source 1..80: mol_type = other DNA
acatacaacgggtgacacaataactggtacacccaaaccacttgagggtttgaatgatatttctgaattgcacctagata

SEQ ID NO: 11607 - DNA, 80 bp, synthetic construct
  misc_feature 1..80: note = Synthetic: >AlphaSp-cand-22730-22809
  source 1..80: mol_type = other DNA
cgtgcactacttacaccatttatggtttcaggggtgacggtgttattaggttgaccaatcaaactttcttatcaggtgtc

SEQ ID NO: 11608 - DNA, 80 bp, synthetic construct
  misc_feature 1..80: note = Synthetic: >AlphaSp-cand-22810-22889
  source 1..80: mol_type = other DNA
tattacacttcagagagtggccagttattagcttttaagaatgttactacagggcagatttattctgttacaccttgtca

SEQ ID NO: 11609 - DNA, 80 bp, synthetic construct
  misc_feature 1..80: note = Synthetic: >Anlong-cand-20110-20189
  source 1..80: mol_type = other DNA
aggcttttcttattggcattaattatcttggtgatttctgtgacagacctataacagatggtaacaccatgcatgccaat

SEQ ID NO: 11610 - DNA, 80 bp, synthetic construct
  misc_feature 1..80: note = Synthetic: >Anlong-cand-20190-20269
  source 1..80: mol_type = other DNA
tacatattttggcgcaattccactattatgaccatgtcatataactctgttttggacctttctaagtttgcctgcaagca

SEQ ID NO: 11611 - DNA, 80 bp, synthetic construct
  misc_feature 1..80: note = Synthetic: >Anlong-cand-20270-20349
  source 1..80: mol_type = other DNA
caaggctaccgtcgttgtgtcacttaaagatagtgatgtgaatgaaatggttcttggtcttgtaaagagtggcagacttt

SEQ ID NO: 11612 - DNA, 80 bp, synthetic construct
  misc_feature 1..80: note = Synthetic: >Anlong-cand-20350-20429
  source 1..80: mol_type = other DNA
tggttcgtaataataacaagttgtgtggtttttcaaatcatttagtttcaactaaataaaatgctacgcaacatagaagt

SEQ ID NO: 11613 - DNA, 80 bp, synthetic construct
  misc_feature 1..80: note = Synthetic: >Anlong-cand-20430-20509
  source 1..80: mol_type = other DNA
ttttgtccctgtttgtgtttagcgtggtgctaccatgtgcctattcaaataccggcacatgttctaatactattaataga

SEQ ID NO: 11614 - DNA, 80 bp, synthetic construct
  misc_feature 1..80: note = Synthetic: >Anlong-cand-20510-20589
  source 1..80: mol_type = other DNA
tttatgtatcttaagctcggcttgcctgagagtgttaatgatgcatatgtatctggctatttaccagtacgcgacaattg

SEQ ID NO: 11615 - DNA, 80 bp, synthetic construct
  misc_feature 1..80: note = Synthetic: >Anlong-cand-20590-20669
  source 1..80: mol_type = other DNA
gacatgttctgccggtttttggcaatattataatgcccatgccatatttatgtcttattattctactgccatggacttcg

SEQ ID NO: 11616 - DNA, 80 bp, synthetic construct
  misc_feature 1..80: note = Synthetic: >Anlong-cand-20670-20749
  source 1..80: mol_type = other DNA
ctattggtgttggttcttcaaaaagttataacacaaagtggggcttgtatttttggcaaaagaataatggatatcgtgct

SEQ ID NO: 11617 - DNA, 80 bp, synthetic construct
  misc_feature 1..80: note = Synthetic: >Anlong-cand-20750-20829
  source 1..80: mol_type = other DNA
gtttttagaatttgtaagtgggattctaaaattgaaccctccttcaaaccttctaatcagcaggccagagaatgccttat

SEQ ID NO: 11618 - DNA, 80 bp, synthetic construct
  misc_feature 1..80: note = Synthetic: >Anlong-cand-20830-20909
  source 1..80: mol_type = other DNA
taataaggaattctacatgggctttgggcatgctaaaaaccagatttttggtgtttcatggtcaggtaacagggttacac

SEQ ID NO: 11619 - DNA, 80 bp, synthetic construct
  misc_feature 1..80: note = Synthetic: >Anlong-cand-20910-20989
  source 1..80: mol_type = other DNA
ttcatacattggataaggttgttagtttcttcgtcgaaggtgcagacacgtgggattatgcttcctacaggtgtgctaat

SEQ ID NO: 11620 - DNA, 80 bp, synthetic construct
  misc_feature 1..80: note = Synthetic: >Anlong-cand-20990-21069
  source 1..80: mol_type = other DNA
ggttattcatgcgcacaccaagttgtttacacacctgtgacgcttagaattacaacagtcccagagggtatacgttcgta

SEQ ID NO: 11621 - DNA, 80 bp, synthetic construct
  misc_feature 1..80: note = Synthetic: >Anlong-cand-21070-21149
  source 1..80: mol_type = other DNA
tgacttgtgcaccaattgctctggttttccggagcacgtatttgcagtgctagatggtggtgaaattcctccaaactttg

SEQ ID NO: 11622 - DNA, 80 bp, synthetic construct
  misc_feature 1..80: note = Synthetic: >Anlong-cand-21150-21229
  source 1..80: mol_type = other DNA
attttacgaactggttttacctcaccaatgcgtcatctcctgtatcaggtcgcgttgttggtgttcagccgttgcagtta

SEQ ID NO: 11623 - DNA, 80 bp, synthetic construct
  misc_feature 1..80: note = Synthetic: >Anlong-cand-21230-21309
  source 1..80: mol_type = other DNA
ctttgcctttggcctataccagctttgcttggtactgctacggatattacttttgacagaaatggtactagtgatgtgcg

SEQ ID NO: 11624 - DNA, 80 bp, synthetic construct
  misc_feature 1..80: note = Synthetic: >Anlong-cand-21310-21389
  source 1..80: mol_type = other DNA
atgcaatgggttttcatccaatgcaacggcggatgctatgagattttcgcttaatttcactgagaatggtgtttttgcga

SEQ ID NO: 11625 - DNA, 80 bp, synthetic construct
  misc_feature 1..80: note = Synthetic: >AvianCoV-cand-21500-21579
  source 1..80: mol_type = other DNA
atatgctggcactatactcttaccacccaaggccaggtagtagttgtaattccaaaggtcttagaccagaaactattaat

SEQ ID NO: 11626 - DNA, 80 bp, synthetic construct
  misc_feature 1..80: note = Synthetic: >AvianCoV-cand-21580-21659
  source 1..80: mol_type = other DNA
aatggtttgtggtttaattcattgtcagtttcacttgcttacggaccccttcaaggtgggtgtaagcaatctgttttaga

SEQ ID NO: 11627 - DNA, 80 bp, synthetic construct
  misc_feature 1..80: note = Synthetic: >AvianCoV-cand-21660-21739
  source 1..80: mol_type = other DNA
ctagtggtagagcaacatggtgttgttatgcttactcttatgtcgttagtgtagaaggttttgatagttataatggtcct

SEQ ID NO: 11628 - DNA, 80 bp, synthetic construct
  misc_feature 1..80: note = Synthetic: >AvianCoV-cand-21740-21819
  source 1..80: mol_type = other DNA
agggcatgtaaaggtgtttattcaggtgagttaaatcataattttgaatgtggattgctggtttatgttactaagagtga

SEQ ID NO: 11629 - DNA, 80 bp, synthetic construct
  misc_feature 1..80: note = Synthetic: >AvianCoV-cand-21820-21899
  source 1..80: mol_type = other DNA
tggctctcgtatacaaactagaactgaacccctagtattaactcaacacaattataataatattactttagataagtgtg

SEQ ID NO: 11630 - DNA, 80 bp, synthetic construct
  misc_feature 1..80: note = Synthetic: >AvianCoV-cand-21900-21979
  source 1..80: mol_type = other DNA
ttgattataatatatatggcagagttggccaaggttttattactaatgtaactgattcagctgctaattataattattta

SEQ ID NO: 11631 - DNA, 80 bp, synthetic construct
  misc_feature 1..80: note = Synthetic: >AvianCoV-cand-21980-22059
  source 1..80: mol_type = other DNA
gcagatggtgggttagctattttagatacttcgggtgccatagacatctttgttgtacaaggtgaatatggtcttaatta

SEQ ID NO: 11632 - DNA, 80 bp, synthetic construct
  misc_feature 1..80: note = Synthetic: >AvianCoV-cand-22060-22139
  source 1..80: mol_type = other DNA
ttataaggttaatccttgtgaagatgttaaccaacagtttgtagtgtctggtggcaatttagttggcattcttacttctc

SEQ ID NO: 11633 - DNA, 80 bp, synthetic construct
  misc_feature 1..80: note = Synthetic: >AvianCoV-cand-22140-22219
  source 1..80: mol_type = other DNA
gttcttgttggttagccaatcaatttaatctaggtaatgaaacaggttctcaacatgttgagaaccagttttatgttaaa

SEQ ID NO: 11634 - DNA, 80 bp, synthetic construct
  misc_feature 1..80: note = Synthetic: >AvianCoV-cand-22220-22299
  source 1..80: mol_type = other DNA
ttaactaatagaacacgtcgttgtagacgttctattagtgaaaatgaatgcacgtaacaagttgtccttatgttagttat

SEQ ID NO: 11635 - DNA, 80 bp, synthetic construct
  misc_feature 1..80: note = Synthetic: >AvianCoV-cand-22300-22379
  source 1..80: mol_type = other DNA
ggcaggttttgtattgaaccagatggttcattaaagattagaatagtaccagaagaattggttgaacagtttgtggcacc

SEQ ID NO: 11636 - DNA, 80 bp, synthetic construct
  misc_feature 1..80: note = Synthetic: >AvianCoV-cand-22370-22449
  source 1..80: mol_type = other DNA
ttgtggcacctttacttaatgttactgaaaatgtgctcatacctaacagttttaatttaactgttacagatgagtacata

SEQ ID NO: 11637 - DNA, 80 bp, synthetic construct
  misc_feature 1..80: note = Synthetic: >AvianCoV-cand-22450-22529
  source 1..80: mol_type = other DNA
caaacacgtatggataaggtccaaattaattgccttcaatatgtttgtggcaattctttggagtgtagaaaattgtttca

SEQ ID NO: 11638 - DNA, 80 bp, synthetic construct
  misc_feature 1..80: note = Synthetic: >AvianCoV-cand-22530-22609
  source 1..80: mol_type = other DNA
acaatatggtcctgtttgtgataacatattgtctgttgtaaatagtgttggtcaaaaagaagataatggtttactgcaat

SEQ ID NO: 11639 - DNA, 80 bp, synthetic construct
  misc_feature 1..80: note = Synthetic: >AvianCoV-cand-22610-22689
  source 1..80: mol_type = other DNA
atgtggaacttttaagtttctattcttctactaaaccagctggttataatacaccagtttttagtaatattagtactggt

SEQ ID NO: 11640 - DNA, 80 bp, synthetic construct
  misc_feature 1..80: note = Synthetic: >AvianCoV-cand-22690-22769
  source 1..80: mol_type = other DNA
gattttaatatttctcttttattaacaccacctagtagtcctagagggctacaaaatcaaggtagttcttttatagaaga

SEQ ID NO: 11641 - DNA, 80 bp, synthetic construct
  misc_feature 1..80: note = Synthetic: >Beluga-cand-16370-16449
  source 1..80: mol_type = other DNA
cttaatggttgtttagaaccagctcattacaatttggtaactaatataatggtttctacgaagcctgatatatttttagc

SEQ ID NO: 11642 - DNA, 80 bp, synthetic construct
  misc_feature 1..80: note = Synthetic: >Beluga-cand-16450-16529
  source 1..80: mol_type = other DNA
aaaatgttatcggtgtccaaaagaaattgttgacactgtgtctgagcttgtttatgaaggtaaatttatagcaaataatc

SEQ ID NO: 11643 - DNA, 80 bp, synthetic construct
  misc_feature 1..80: note = Synthetic: >Beluga-cand-16530-16609
  source 1..80: mol_type = other DNA
cagttagtggacagtgctttaaatgtgttgttaatacaggcaactctgatgttaagagagagttgggcagtgcctataat

SEQ ID NO: 11644 - DNA, 80 bp, synthetic construct
  misc_feature 1..80: note = Synthetic: >Beluga-cand-16610-16689
  source 1..80: mol_type = other DNA
caggtgcagctagattttgttgcagatttccttaagcacaaccctttgtggcgtaaggcatgttttatatcaccctataa

SEQ ID NO: 11645 - DNA, 80 bp, synthetic construct
  misc_feature 1..80: note = Synthetic: >Beluga-cand-16690-16769
  source 1..80: mol_type = other DNA
ttcaatgaatcagagggcgaggcggcaattgggcttagaagtccaaaccgtggattcatctcaggggagtgagtatgact

SEQ ID NO: 11646 - DNA, 80 bp, synthetic construct
  misc_feature 1..80: note = Synthetic: >Beluga-cand-16770-16849
  source 1..80: mol_type = other DNA
atgtcatttttgctgtaacagcagattcaccccatgctatgaatattaatagatttaatgttgcagttacgcgtgccaag

SEQ ID NO: 11647 - DNA, 80 bp, synthetic construct
  misc_feature 1..80: note = Synthetic: >Beluga-cand-16850-16929
  source 1..80: mol_type = other DNA
gtaggtatccttgtgttaatgagacacaatgatagcttttaccaggggttgaagtttgtggaaattgaaggtcctagagg

SEQ ID NO: 11648 - DNA, 80 bp, synthetic construct
  misc_feature 1..80: note = Synthetic: >Beluga-cand-16930-17009
  source 1..80: mol_type = other DNA
taagcttcaatcacaaactacaggtttgtttaagatttgttcacgtaattttaaaggattaccccccgcgtatgcaccaa

SEQ ID NO: 11649 - DNA, 80 bp, synthetic construct
  misc_feature 1..80: note = Synthetic: >Beluga-cand-17010-17089
  source 1..80: mol_type = other DNA
cctatatagcgttggatgagaaatataaagtgggagatagtgttttggccacacttcttaaggttgatactggtagttgt

SEQ ID NO: 11650 - DNA, 80 bp, synthetic construct
  misc_feature 1..80: note = Synthetic: >Beluga-cand-17070-17149
  source 1..80: mol_type = other DNA
aggttgatactggtagttgtgtttcctattcccatttagtttcattgttaggatttaagtttgataaaggcgcaggctct

SEQ ID NO: 11651 - DNA, 80 bp, synthetic construct
  misc_feature 1..80: note = Synthetic: >Beluga-cand-17150-17229
  source 1..80: mol_type = other DNA
tctcaaattgtgtctaagtatagtcctttcataacacgagatatggctatacgtaatgtacgtggttgggtgggctttga

SEQ ID NO: 11652 - DNA, 80 bp, synthetic construct
  misc_feature 1..80: note = Synthetic: >Beluga-cand-17230-17309
  source 1..80: mol_type = other DNA
tgtggaagcatctcacgcagccaatgaacatataggtactaatcttccattgatggtaggatttagtattggtactgatt

SEQ ID NO: 11653 - DNA, 80 bp, synthetic construct
  misc_feature 1..80: note = Synthetic: >Beluga-cand-17310-17389
  source 1..80: mol_type = other DNA
atcttgtagctaatgagggtcttgttatgaccgagtataatgatgagtttagaaagataccagcaagatgtccacctgga

SEQ ID NO: 11654 - DNA, 80 bp, synthetic construct
  misc_feature 1..80: note = Synthetic: >Beluga-cand-17390-17469
  source 1..80: mol_type = other DNA
gatcaatttgcttatcttaaaccattattgcataaggggaaaccatggaatgttatacgtcctcaaatagtgcgcatgat

SEQ ID NO: 11655 - DNA, 80 bp, synthetic construct
  misc_feature 1..80: note = Synthetic: >Beluga-cand-17470-17549
  source 1..80: mol_type = other DNA
ggcggatcacttacaggacatttctgattgtgtggttttggtgacatggagccatagtcttgaacttaccactatgagat

SEQ ID NO: 11656 - DNA, 80 bp, synthetic construct
  misc_feature 1..80: note = Synthetic: >Beluga-cand-17550-17629
  source 1..80: mol_type = other DNA
atttttgtaaaatgggtaaagaacagaaatgtaagcagtgcgaagggcgcgggtgtgcttacaattctgctgctgaaaca

SEQ ID NO: 11657 - DNA, 80 bp, synthetic construct
  misc_feature 1..80: note = Synthetic: >BetaSp-cand-16850-16929
  source 1..80: mol_type = other DNA
atggtatggtttttggtctgtataaacaatcttgtacaggttctccctttatagatgattttaatcgcattgctagttgt

SEQ ID NO: 11658 - DNA, 80 bp, synthetic construct
  misc_feature 1..80: note = Synthetic: >BetaSp-cand-16930-17009
  source 1..80: mol_type = other DNA
aaatggactgatgtggacgattacatactagccaatgaatgtaccgagcgcttaaaattatttgctgcagagactcagaa

SEQ ID NO: 11659 - DNA, 80 bp, synthetic construct
  misc_feature 1..80: note = Synthetic: >BetaSp-cand-17010-17089
  source 1..80: mol_type = other DNA
ggcaactgaagaggctttcaagcaaagctatgcttctgctactatacaggagatagtaagcgatcgtgaattaattctct

SEQ ID NO: 11660 - DNA, 80 bp, synthetic construct
  misc_feature 1..80: note = Synthetic: >BetaSp-cand-17170-17249
  source 1..80: mol_type = other DNA
accgttttaggtgagtatgtttttgataagagtgagttgactaatggcgtctattatagagccacaaccacttataagct

SEQ ID NO: 11661 - DNA, 80 bp, synthetic construct
  misc_feature 1..80: note = Synthetic: >BetaSp-cand-17490-17569
  source 1..80: mol_type = other DNA
tacagcgcgagttgtttatacagcagcgagccatgcggccgttgatgcgttgtgtgagaaggcatacaaatttttgaatt

SEQ ID NO: 11662 - DNA, 80 bp, synthetic construct
  misc_feature 1..80: note = Synthetic: >BetaSp-cand-17570-17649
  source 1..80: mol_type = other DNA
tgaatgactgcacgcgaattattcctgcaaaggtgcgtgtggagtgctatgataagtttaagataaatgacacatctcgc

SEQ ID NO: 11663 - DNA, 80 bp, synthetic construct
  misc_feature 1..80: note = Synthetic: >CDPHE15-cand-480-559
  source 1..80: mol_type = other DNA
aaggactattttgctgatgatgatcaggttgtggttaatggcaccacttacattaaggcttgggtggttgaacgcgcaaa

SEQ ID NO: 11664 - DNA, 80 bp, synthetic construct
  misc_feature 1..80: note = Synthetic: >CDPHE15-cand-560-639
  source 1..80: mol_type = other DNA
tgttgcttatgaagctcagaatgtgactgctatcaatggcattacatattgcgccaaaatcccccatactttgcctgacg

SEQ ID NO: 11665 - DNA, 80 bp, synthetic construct
  misc_feature 1..80: note = Synthetic: >CDPHE15-cand-640-719
  source 1..80: mol_type = other DNA
ggagtgttgtccgtgtggcccgtaaacctaagatcaaaaagtcaatagtcctctcagatgtttacaagcctttgttagag

SEQ ID NO: 11666 - DNA, 80 bp, synthetic construct
  misc_feature 1..80: note = Synthetic: >CDPHE15-cand-720-799
  source 1..80: mol_type = other DNA
ggcttgggtgcaccatttgttaagaatggtgacacacttgcatctattctcactgaacctgtgtttttgcatgcgctcgt

SEQ ID NO: 11667 - DNA, 80 bp, synthetic construct
  misc_feature 1..80: note = Synthetic: >CDPHE15-cand-800-879
  source 1..80: mol_type = other DNA
taagtgtacttgtggcaaaaccatgtggaccgttggtgactggagttgctacaagtcattgtgttgcggtgtagtttgca

SEQ ID NO: 11668 - DNA, 80 bp, synthetic construct
  misc_feature 1..80: note = Synthetic: >CDPHE15-cand-880-959
  source 1..80: mol_type = other DNA
aaccactttgtaacgttgctggcattgttaatcctggttcagctgttgtcacccgtactggattaggttctggtattaag

SEQ ID NO: 11669 - DNA, 80 bp, synthetic construct
  misc_feature 1..80: note = Synthetic: >CDPHE15-cand-950-1029
  source 1..80: mol_type = other DNA
tggtattaagtactactgtggcatgttcttgcgtcacattcttgacgtcgatggcgtttctgtgtggcgtgtgatcagat

SEQ ID NO: 11670 - DNA, 80 bp, synthetic construct
  misc_feature 1..80: note = Synthetic: >CDPHE15-cand-1030-1109
  source 1..80: mol_type = other DNA
tacagagtgcaggcgagactgtgacttcgaccaactttgaggagtttggtgatgtgtgccctatggacacatgtcactat

SEQ ID NO: 11671 - DNA, 80 bp, synthetic construct
  misc_feature 1..80: note = Synthetic: >CDPHE15-cand-1110-1189
  source 1..80: mol_type = other DNA
tctctagattcaaggctggctgtcatgttcaaacttaacctgctttcaggtgacttttgtgctgaggtgcgtcaggctat

SEQ ID NO: 11672 - DNA, 80 bp, synthetic construct
  misc_feature 1..80: note = Synthetic: >CDPHE15-cand-1190-1269
  source 1..80: mol_type = other DNA
tgctagcggtgttttcagcgttggtaatttcatttgtgacgttactgacgatgtgcttggaaaaccatggttcttgaaga

SEQ ID NO: 11673 - DNA, 80 bp, synthetic construct
  misc_feature 1..80: note = Synthetic: >CDPHE15-cand-1270-1349
  source 1..80: mol_type = other DNA
aacttggtgttctagcagatgctgcctggaccgcctttgttgccagtcttcgtaaaattaaagttatgagttcgcagctt

SEQ ID NO: 11674 - DNA, 80 bp, synthetic construct
  misc_feature 1..80: note = Synthetic: >CDPHE15-cand-1350-1429
  source 1..80: mol_type = other DNA
gtggatcttgctaaagcattagcgtgtgctagtgtttctgttattaacaggtgcctggttcttgctgctgatgtgcctcc

SEQ ID NO: 11675 - DNA, 80 bp, synthetic construct
  misc_feature 1..80: note = Synthetic: >CDPHE15-cand-1430-1509
  source 1..80: mol_type = other DNA
tattttcaaggagtgttttgctaagtttgtcagtgctattgcagctctgtttaagtctacttgtgacactgtcaaggttg

SEQ ID NO: 11676 - DNA, 80 bp, synthetic construct
  misc_feature 1..80: note = Synthetic: >CDPHE15-cand-1510-1589
  source 1..80: mol_type = other DNA
cacgtcattcatatccaaggctttttgactatgttttgcttgataatcatttggtgaaaatggttactcaacgcattact

SEQ ID NO: 11677 - DNA, 80 bp, synthetic construct
  misc_feature 1..80: note = Synthetic: >CDPHE15-cand-1590-1669
  source 1..80: mol_type = other DNA
ggtaaaaagcaggctggattgactgaggctacatttgctgatgtaattctgggtgccactactaatgtgacatcagaccg

SEQ ID NO: 11678 - DNA, 80 bp, synthetic construct
  misc_feature 1..80: note = Synthetic: >CDPHE15-cand-1670-1749
  source 1..80: mol_type = other DNA
tactgaggcttgtaatgttggccttgtgctttgtgactatgacgtgcccgttctgaatactggatacactgccattattg

SEQ ID NO: 11679 - DNA, 80 bp, synthetic construct
  misc_feature 1..80: note = Synthetic: >Delta-cand-15440-15519
  source 1..80: mol_type = other DNA
ttcagaaccttgaacgttacatctcacttgcaattgatgcatatcccctcaccaaggttgaccctattaagggtaaagtc

SEQ ID NO: 11680 - DNA, 80 bp, synthetic construct
  misc_feature 1..80: note = Synthetic: >Delta-cand-15600-15679
  source 1..80: mol_type = other DNA
tgacatgtcgtatgtaaataactttatgaatgaggccttttatgctcagatgtatgagcaaagtcctacactacaggcca

SEQ ID NO: 11681 - DNA, 80 bp, synthetic construct
  misc_feature 1..80: note = Synthetic: >Delta-cand-15680-15759
  source 1..80: mol_type = other DNA
gcggtgtttgtgtggtgtgtaattcacccactatactgcgctgtggtgattgcattcgtcgaccactactttgttgcgtc

SEQ ID NO: 11682 - DNA, 80 bp, synthetic construct
  misc_feature 1..80: note = Synthetic: >Delta-cand-16000-16079
  source 1..80: mol_type = other DNA
cttgctacatctaactatgacactattgaaccttatcagaaggccaatcgtgcacctttatcacttatgctcttcgctgc

SEQ ID NO: 11683 - DNA, 80 bp, synthetic construct
  misc_feature 1..80: note = Synthetic: >Delta-cand-16350-16429
  source 1..80: mol_type = other DNA
agtcttaatggcacatgttgttacaccgctctcagcaccccctgtgctaacgcagacaacatatgtcagaaaatcacttt

SEQ ID NO: 11684 - DNA, 80 bp, synthetic construct
  misc_feature 1..80: note = Synthetic: >Delta-cand-16430-16509
  source 1..80: mol_type = other DNA
tacccgactctgttggtgcgtcttattatgtgcaacattttaagtcatataatgagatagctatgcagagggttacaaca

SEQ ID NO: 11685 - DNA, 80 bp, synthetic construct
  misc_feature 1..80: note = Synthetic: >Delta-cand-16510-16589
  source 1..80: mol_type = other DNA
gtattaggtccaccaggcacaggtaagtcaacctttgctattggtttggctaagtactttcctagtgcacgtatttgcta

SEQ ID NO: 11686 - DNA, 80 bp, synthetic construct
  misc_feature 1..80: note = Synthetic: >Delta-cand-16590-16669
  source 1..80: mol_type = other DNA
cactgcgtcttcgcatgcagcaatcgatgcactctgtgaaaaagctttcaagacaatacctgtaggccaatgcagtcgta

SEQ ID NO: 11687 - DNA, 80 bp, synthetic construct
  misc_feature 1..80: note = Synthetic: >Delta-cand-16670-16749
  source 1..80: mol_type = other DNA
tcgtacccacacgtacaactgttgagtgctttcaggagtttgtcgtaaataacacaactgcacagtatatcttctcgact

SEQ ID NO: 11688 - DNA, 80 bp, synthetic construct
  misc_feature 1..80: note = Synthetic: >HKU1-cand-27570-27649
  source 1..80: mol_type = other DNA
ttaataagtatggttgatttatttttcaatgatactgcttggtacataggacagattttagttttagttttattttgtct

SEQ ID NO: 11689 - DNA, 80 bp, synthetic construct
  misc_feature 1..80: note = Synthetic: >HKU1-cand-27650-27729
  source 1..80: mol_type = other DNA
tatttctttaatctttgttgttgcttttttagcaactattaagctttgtatgcaactttgtggtttttgtaatttcttta

SEQ ID NO: 11690 - DNA, 80 bp, synthetic construct
  misc_feature 1..80: note = Synthetic: >HKU1-cand-27730-27809
  source 1..80: mol_type = other DNA
ttatttcaccttcggcttacgtttataaaagaggtatgcagttgtataagtcttatagtgaacaagttataccacccact

SEQ ID NO: 11691 - DNA, 80 bp, synthetic construct
  misc_feature 1..80: note = Synthetic: >HKU1-cand-27810-27889
  source 1..80: mol_type = other DNA
tcagattatttaatctaaatctaaacattatgaataaatctttttttcctcaatttacttctgatcaagctgttacattc

SEQ ID NO: 11692 - DNA, 80 bp, synthetic construct
  misc_feature 1..80: note = Synthetic: >HKU1-cand-27890-27969
  source 1..80: mol_type = other DNA
ttaaaagaatggaatttctctttgggtgtaatactactttttattactatcatattgcagttcggttatacgagccgtag

SEQ ID NO: 11693 - DNA, 80 bp, synthetic construct
  misc_feature 1..80: note = Synthetic: >HKU1-cand-27960-28039
  source 1..80: mol_type = other DNA
cgagccgtagtatgtttgtttattttatcaagatgattattctttggcttatgtggccattgactatcaccttgactata

SEQ ID NO: 11694 - DNA, 80 bp, synthetic construct
  misc_feature 1..80: note = Synthetic: >HKU1-cand-28040-28119
  source 1..80: mol_type = other DNA
tttaattgcttttatgctttgaataatgcttttcttgcattttctatagtgtttactattatttctattgttatatggat

SEQ ID NO: 11695 - DNA, 80 bp, synthetic construct
  misc_feature 1..80: note = Synthetic: >HKU1-cand-28120-28199
  source 1..80: mol_type = other DNA
tctttattttgttaatagtattcggctttttattagaactggcagttggtggagttttaatccagagaccaataatctta

SEQ ID NO: 11696 - DNA, 80 bp, synthetic construct
  misc_feature 1..80: note = Synthetic: >HKU1-cand-28200-28279
  source 1..80: mol_type = other DNA
tgtgtattgatatgaaaggcaagatgtttgttaggccagttattgaggactatcacacattaactgctactgttattcgt

SEQ ID NO: 11697 - DNA, 80 bp, synthetic construct
  misc_feature 1..80: note = Synthetic: >HKU1-cand-28280-28359
  source 1..80: mol_type = other DNA
ggtcatctttatatacagggtgtcaaacttggcactggttatactctttcagatttgcccgtatatgttactgtagctaa

SEQ ID NO: 11698 - DNA, 80 bp, synthetic construct
  misc_feature 1..80: note = Synthetic: >HKU1-cand-28360-28439
  source 1..80: mol_type = other DNA
ggtgcaagtactttgtacctataaacgtgcctttttagataagttagatgttaatagtggttttgctgtttttgttaagt

SEQ ID NO: 11699 - DNA, 80 bp, synthetic construct
  misc_feature 1..80: note = Synthetic: >HKU1-cand-28440-28519
  source 1..80: mol_type = other DNA
ctaaagttggtaactatcgtttaccgtctagtaaacctagtggtatggatactgccttgttaagagcttaaatctaaact

SEQ ID NO: 11700 - DNA, 80 bp, synthetic construct
  misc_feature 1..80: note = Synthetic: >HKU1-cand-28520-28599
  source 1..80: mol_type = other DNA
attaggatgtcttatactcccggtcattatgctggaagtagaagctcctctggaaatcgttcaggaatcctcaagaaaac

SEQ ID NO: 11701 - DNA, 80 bp, synthetic construct
  misc_feature 1..80: note = Synthetic: >HKU1-cand-28600-28679
  source 1..80: mol_type = other DNA
ttcttgggctgaccaatctgagcgaaattaccaaacctttaatagaggcagaaaaacccaacctaaattcactgtgtcta

SEQ ID NO: 11702 - DNA, 80 bp, synthetic construct
  misc_feature 1..80: note = Synthetic: >HKU1-cand-28680-28759
  source 1..80: mol_type = other DNA
ctcaaccacaaggaaatactatcccacattattcctggttctccgggatcactcaatttcaaaaaggtagagactttaaa

SEQ ID NO: 11703 - DNA, 80 bp, synthetic construct
  misc_feature 1..80: note = Synthetic: >HKU1-cand-28760-28839
  source 1..80: mol_type = other DNA
ttttcagatggtcaaggagttcccattgctttcggagtacccccttctgaagcaaaaggatattggtatagacacagccg

SEQ ID NO: 11704 - DNA, 80 bp, synthetic construct
  misc_feature 1..80: note = Synthetic: >HKU14-cand-26020-26099
  source 1..80: mol_type = other DNA
atagtaccgcttccactgttcaaacatgtgatctcacagtaggtagtggttactgtgtggattactccacacaattacgg

SEQ ID NO: 11705 - DNA, 80 bp, synthetic construct
  misc_feature 1..80: note = Synthetic: >HKU14-cand-26100-26179
  source 1..80: mol_type = other DNA
agtcgtagagcgattaccactggttatcggtttactaattttgagccatttactgttaatgcagtaaatgacagtttaca

SEQ ID NO: 11706 - DNA, 80 bp, synthetic construct
  misc_feature 1..80: note = Synthetic: >HKU14-cand-26180-26259
  source 1..80: mol_type = other DNA
acctgtgggtggtttgtatgaaattcaaataccttcagagtttactataggtaatatggaggagtttattcaaacaagcg

SEQ ID NO: 11707 - DNA, 80 bp, synthetic construct
  misc_feature 1..80: note = Synthetic: >HKU14-cand-26260-26339
  source 1..80: mol_type = other DNA
ctcctaaagttactattgattgtgctgcatttgtctgtggtgattatgcagcatgtaaatcacagttagttgagtatggt

SEQ ID NO: 11708 - DNA, 80 bp, synthetic construct
  misc_feature 1..80: note = Synthetic: >HKU14-cand-26340-26419
  source 1..80: mol_type = other DNA
agtttctgtgataacattaatgccatactcacagaagtaaatgaactacttgacactacacagttgcaagtagctaatag

SEQ ID NO: 11709 - DNA, 80 bp, synthetic construct
  misc_feature 1..80: note = Synthetic: >HKU14-cand-26420-26499
  source 1..80: mol_type = other DNA
tttaatgaatggcgtcactcttagtactaagctcaaagatggcgttaatttcaatgtagacgacatcaatttttcccctg

SEQ ID NO: 11710 - DNA, 80 bp, synthetic construct
  misc_feature 1..80: note = Synthetic: >HKU14-cand-26500-26579
  source 1..80: mol_type = other DNA
tattaggttgtctgggcagtgattgtaataaagcgtccagtagatctgctatagaggatttacttttcgataaagtaaaa

SEQ ID NO: 11711 - DNA, 80 bp, synthetic construct
  misc_feature 1..80: note = Synthetic: >HKU14-cand-26580-26659
  source 1..80: mol_type = other DNA
ttagctgatgtcggttttgttgaggcctataataattgcactggaggtgccgaaattagggatctcatttgtgtgcaaag

SEQ ID NO: 11712 - DNA, 80 bp, synthetic construct
  misc_feature 1..80: note = Synthetic: >HKU14-cand-26660-26739
  source 1..80: mol_type = other DNA
ttataatggtatcaaagttttgccgccactactctcagaaaatcagattagtggctacactttggctgccacctctgcta

SEQ ID NO: 11713 - DNA, 80 bp, synthetic construct
  misc_feature 1..80: note = Synthetic: >HKU14-cand-26740-26819
  source 1..80: mol_type = other DNA
gtttgttccctccttggacagcagcagcaggtgtaccattttatttaaatgttcagtttcgtattaatgggcttggtgtc

SEQ ID NO: 11714 - DNA, 80 bp, synthetic construct
  misc_feature 1..80: note = Synthetic: >HKU14-cand-26820-26899
  source 1..80: mol_type = other DNA
accatggatgtgctaagtcaaaaccaaaagcttattgctaatgcatttaacaatgcccttgatgctattcaggaggggtt

SEQ ID NO: 11715 - DNA, 80 bp, synthetic construct
  misc_feature 1..80: note = Synthetic: >HKU14-cand-26900-26979
  source 1..80: mol_type = other DNA
tgatgcaaccaattctgctttagctaaaattcaggccgttgttaatgcaaatgctgaagctcttaataatttattgcaac

SEQ ID NO: 11716 - DNA, 80 bp, synthetic construct
  misc_feature 1..80: note = Synthetic: >HKU14-cand-26980-27059
  source 1..80: mol_type = other DNA
aattatctaatagatttggtgccataagttcttctttacaagaaattctatctaggctcgatgctcttgaagcagctgcc

SEQ ID NO: 11717 - DNA, 80 bp, synthetic construct
  misc_feature 1..80: note = Synthetic: >HKU14-cand-27060-27139
  source 1..80: mol_type = other DNA
cagatagacagacttattaatgggcgtcttaccgctcttaatgcttatgtttcccaacagcttagtgattctacactagt

SEQ ID NO: 11718 - DNA, 80 bp, synthetic construct
  misc_feature 1..80: note = Synthetic: >HKU14-cand-27140-27219
  source 1..80: mol_type = other DNA
gaaatttagtgcagcacaagctatggaaaaggttaatgaatgtgttaaaagccaatcatctaggataaatttctgtggta

SEQ ID NO: 11719 - DNA, 80 bp, synthetic construct
  misc_feature 1..80: note = Synthetic: >HKU14-cand-27220-27299
  source 1..80: mol_type = other DNA
atggtaatcatattatatcattagtgcagaatgcgccatatggtttgtattttatccactttagctatgtccctactaaa

SEQ ID NO: 11720 - DNA, 80 bp, synthetic construct
  misc_feature 1..80: note = Synthetic: >HKU2-cand-14430-14509
  source 1..80: mol_type = other DNA
tttctatgtaaaacctggtggcaccacatcaggtgatgctacaactgcttacgcgaattctgtctttaacatttttcagg

SEQ ID NO: 11721 - DNA, 80 bp, synthetic construct
  misc_feature 1..80: note = Synthetic: >HKU2-cand-14510-14589
  source 1..80: mol_type = other DNA
cggttagctctaatattaataggcttctttccgttgatagtaatgtgtgcaacaatttgtatgtcaagaagcttcagcgt

SEQ ID NO: 11722 - DNA, 80 bp, synthetic construct
  misc_feature 1..80: note = Synthetic: >HKU2-cand-14590-14669
  source 1..80: mol_type = other DNA
tctatctatgacaattgttatagatctagcgctgttgatgataatgttgttacagacttttataactaccttaagaagca

SEQ ID NO: 11723 - DNA, 80 bp, synthetic construct
  misc_feature 1..80: note = Synthetic: >HKU2-cand-14670-14749
  source 1..80: mol_type = other DNA
tttttccatgatgattttgtctgatgatggcgttgtctgttacaacaaggagtatgcatcgttgggttatgttggtgaca

SEQ ID NO: 11724 - DNA, 80 bp, synthetic construct
  misc_feature 1..80: note = Synthetic: >HKU2-cand-14750-14829
  source 1..80: mol_type = other DNA
tctctgcatttaaggcaactttgtactatcagaataacgtgtttatgagtacagccaagtgttgggtcgaagaagatttg

SEQ ID NO: 11725 - DNA, 80 bp, synthetic construct
  misc_feature 1..80: note = Synthetic: >HKU2-cand-14830-14909
  source 1..80: mol_type = other DNA
tctgtcggacctcatgagttttgctcacaacacactatgcaaatagttgattctgatggtgattattatttgccgtaccc

SEQ ID NO: 11726 - DNA, 80 bp, synthetic construct
  misc_feature 1..80: note = Synthetic: >HKU2-cand-14910-14989
  source 1..80: mol_type = other DNA
agaccctagccgtattcttagtgctggtgtttttgtggatgacattgtcaaaactgaccctgttattttgcttgagcgct

SEQ ID NO: 11727 - DNA, 80 bp, synthetic construct
  misc_feature 1..80: note = Synthetic: >HKU2-cand-15070-15149
  source 1..80: mol_type = other DNA
gactgggttaagcatttacataatacacttaaccaaggcattctcgaaactttctctgttacattacttgatgatgtgca

SEQ ID NO: 11728 - DNA, 80 bp, synthetic construct
  misc_feature 1..80: note = Synthetic: >HKU2-cand-15150-15229
  source 1..80: mol_type = other DNA
gagtaagttttgggatgaggctttttatgctggtatgtatgagaagtctactgttcttcaagcagctggtatgtgtattg

SEQ ID NO: 11729 - DNA, 80 bp, synthetic construct
  misc_feature 1..80: note = Synthetic: >HKU2-cand-15230-15309
  source 1..80: mol_type = other DNA
tatgtggatcgcaaactgttctcagatgtggtgattgtctacgccgtcctttgttatgtacaaaatgtgcttatgaccat

SEQ ID NO: 11730 - DNA, 80 bp, synthetic construct
  misc_feature 1..80: note = Synthetic: >HKU2-cand-15310-15389
  source 1..80: mol_type = other DNA
gttgtaggcaccacccataggtttatcttgtctattactccctatgtgtgtaacacatctggttgtaatgttaatgacgt

SEQ ID NO: 11731 - DNA, 80 bp, synthetic construct
  misc_feature 1..80: note = Synthetic: >HKU2-cand-15390-15469
  source 1..80: mol_type = other DNA
taccaagttgtttttgggtggtcttaattattattgtcatgatcacaagccgcagctctcattcccactttgtgctaatg

SEQ ID NO: 11732 - DNA, 80 bp, synthetic construct
  misc_feature 1..80: note = Synthetic: >HKU31-cand-10540-10619
  source 1..80: mol_type = other DNA
agcttatactttcaccaccataaagcaaggtagttcttttagtgtgttagcgtgctataatgggcgtccatcaggcacat

SEQ ID NO: 11733 - DNA, 80 bp, synthetic construct
  misc_feature 1..80: note = Synthetic: >HKU31-cand-10620-10699
  source 1..80: mol_type = other DNA
atacagttgtaatgagacccaatagcacaattaaaggttcttttctttgtggttcttgtggtagtgttggttatgttaaa

SEQ ID NO: 11734 - DNA, 80 bp, synthetic construct
  misc_feature 1..80: note = Synthetic: >HKU31-cand-10700-10779
  source 1..80: mol_type = other DNA
gaaggtaatgtaatcaacttttgttatatgcatcaaatggagttggctaatggtacacatactggatcttcatttgatgg

SEQ ID NO: 11735 - DNA, 80 bp, synthetic construct
  misc_feature 1..80: note = Synthetic: >HKU31-cand-10780-10859
  source 1..80: mol_type = other DNA
taatatgtatggtaattttcaggataggcaaatttaccaagcacaattatcagacaaacactgcactacaaatgtggtgg

SEQ ID NO: 11736 - DNA, 80 bp, synthetic construct
  misc_feature 1..80: note = Synthetic: >HKU31-cand-10860-10939
  source 1..80: mol_type = other DNA
cttggctatatgcagctgtgttaaatggttgtaattggtttgttaagccaaataagactggtgttgcagcttttaatgaa

SEQ ID NO: 11737 - DNA, 80 bp, synthetic construct
  misc_feature 1..80: note = Synthetic: >HKU31-cand-10940-11019
  source 1..80: mol_type = other DNA
tgggctttgtctaatcaatttactgaatttgtaagtacacaggctctagaattattagctgtaaaaactggtgttcagat

SEQ ID NO: 11738 - DNA, 80 bp, synthetic construct
  misc_feature 1..80: note = Synthetic: >HKU31-cand-11020-11099
  source 1..80: mol_type = other DNA
tgaacagctattgtattctatacaacaattgaataatggcttccaaggtaatgttatacttggtagtacaatgctagaag

SEQ ID NO: 11739 - DNA, 80 bp, synthetic construct
  misc_feature 1..80: note = Synthetic: >HKU31-cand-11100-11179
  source 1..80: mol_type = other DNA
atgagtatacacctgaagatgttaatatgcaaatgatgggtgtagtaatgcagagtagtgttagaaaaattacttatggg

SEQ ID NO: 11740 - DNA, 80 bp, synthetic construct
  misc_feature 1..80: note = Synthetic: >HKU31-cand-11180-11259
  source 1..80: mol_type = other DNA
ttaacacattggcttctagcaactagtgtattaacctatgttgtaattttacaacttactaagtttacaatttggaattt

SEQ ID NO: 11741 - DNA, 80 bp, synthetic construct
  misc_feature 1..80: note = Synthetic: >HKU31-cand-11260-11339
  source 1..80: mol_type = other DNA
cttgtttaatgttataccattacaattgactccaattatgtttgtagtgttggcacttgctatgttatgtgttaagcata

SEQ ID NO: 11742 - DNA, 80 bp, synthetic construct
  misc_feature 1..80: note = Synthetic: >HKU31-cand-11340-11419
  source 1..80: mol_type = other DNA
aacatgcatttttgacaacattcttattacctggtgcactatgtttgacatatgccaacttagtgtatgagcctaataca

SEQ ID NO: 11743 - DNA, 80 bp, synthetic construct
  misc_feature 1..80: note = Synthetic: >HKU31-cand-11420-11499
  source 1..80: mol_type = other DNA
ccagtttcctcatttttgatcaagtttgttaattggttaaatcctgatggcacatatatgcgtactactcatatggattt

SEQ ID NO: 11744 - DNA, 80 bp, synthetic construct
  misc_feature 1..80: note = Synthetic: >HKU31-cand-11500-11579
  source 1..80: mol_type = other DNA
gggagtttacgttagtctttgcctagcgctattagttgtagttaggagattgtataaaccatcagtaactaattgtgcat

SEQ ID NO: 11745 - DNA, 80 bp, synthetic construct
  misc_feature 1..80: note = Synthetic: >HKU31-cand-11580-11659
  source 1..80: mol_type = other DNA
ttgctttgacaagtttagttatgtggttttatagctatagtgtaggtgatgcatcatcacctattgtttatttgcagttt

SEQ ID NO: 11746 - DNA, 80 bp, synthetic construct
  misc_feature 1..80: note = Synthetic: >HKU31-cand-11660-11739
  source 1..80: mol_type = other DNA
gtcacagcagctactagtgactatatggtcacagtgtttctagctgtgaatgtggctaagtgcctaacatatcttacctc

SEQ ID NO: 11747 - DNA, 80 bp, synthetic construct
  misc_feature 1..80: note = Synthetic: >HKU31-cand-11740-11819
  source 1..80: mol_type = other DNA
catgtatttcacaactttaagtgtggttgtacctgaagttaagatagttttattaatgtatatttgtataggttttatct

SEQ ID NO: 11748 - DNA, 80 bp, synthetic construct
  misc_feature 1..80: note = Synthetic: >HKU5-cand-11360-11439
  source 1..80: mol_type = other DNA
aatggcatgtgttatgttgacggtaaagcatagacacacattccttacgctgtttcttttgcccacagctatttgcctaa

SEQ ID NO: 11749 - DNA, 80 bp, synthetic construct
  misc_feature 1..80: note = Synthetic: >HKU5-cand-11440-11519
  source 1..80: mol_type = other DNA
catatgcaaatattgtctatgagcctcaaacaccagtttcaagtgcactgattgctgttgctaactggcttaatcctgct

SEQ ID NO: 11750 - DNA, 80 bp, synthetic construct
  misc_feature 1..80: note = Synthetic: >HKU5-cand-11840-11919
  source 1..80: mol_type = other DNA
attgctgatgtatcttgctgtaggatacttctgtactgtttattttggtgtcttctctttgttgaacctgaaacttcgtg

SEQ ID NO: 11751 - DNA, 80 bp, synthetic construct
  misc_feature 1..80: note = Synthetic: >HKU5-cand-11920-11999
  source 1..80: mol_type = other DNA
tgccacttggtgtctacgattatacagtttcaacccaagaatttcgctatctcacgggtaacgggcttcatgcgccacgt

SEQ ID NO: 11752 - DNA, 80 bp, synthetic construct
  misc_feature 1..80: note = Synthetic: >HKU5-cand-12080-12159
  source 1..80: mol_type = other DNA
gtcaaaacttactgatcttaaatgcacatctgtggttcttctttctgttcttcaacagttacacctcgaagctaacagta

SEQ ID NO: 11753 - DNA, 80 bp, synthetic construct
  misc_feature 1..80: note = Synthetic: >HKU5-cand-12160-12239
  source 1..80: mol_type = other DNA
aagcttgggctcactgtgttaagctccataatgacatcttggctgcgactgaccctacagaggcatttgacaaactcgtt

SEQ ID NO: 11754 - DNA, 80 bp, synthetic construct
  misc_feature 1..80: note = Synthetic: >HKU5-cand-12240-12319
  source 1..80: mol_type = other DNA
tgtctctttgctactcttatgtcattctcagccaatgtggatttagaggctttagcaagtgacctgcttgaccacccatc

SEQ ID NO: 11755 - DNA, 80 bp, synthetic construct
  misc_feature 1..80: note = Synthetic: >HKU5-cand-12400-12479
  source 1..80: mol_type = other DNA
aagctctgaactctggtgatgcttcaccgcaggttcttaaggctttgcagaaggctgttaatattgctaagaatgcctat

SEQ ID NO: 11756 - DNA, 80 bp, synthetic construct
  misc_feature 1..80: note = Synthetic: >HKU5-cand-12560-12639
  source 1..80: mol_type = other DNA
cgaggataagaaggccaagattgtaagtgctatgcaaactatgctctttggcatgattaagaagttagataacgacgttc

SEQ ID NO: 11757 - DNA, 80 bp, synthetic construct
  misc_feature 1..80: note = Synthetic: >HKU9-cand-6570-6649
  source 1..80: mol_type = other DNA
tgctttatatatggtttgtttggacatgtttgactatatgtggtgtttggttatctgaaccttatgctccaaatttgtta

SEQ ID NO: 11758 - DNA, 80 bp, synthetic construct
  misc_feature 1..80: note = Synthetic: >HKU9-cand-6650-6729
  source 1..80: mol_type = other DNA
aataggtttaaacaattcattggtatagttatgccatgtgactatgttcttgttaatgagacaggcactggttggttaca

SEQ ID NO: 11759 - DNA, 80 bp, synthetic construct
  misc_feature 1..80: note = Synthetic: >HKU9-cand-6730-6809
  source 1..80: mol_type = other DNA
tcatttgtgtatggcgggtatggatggtttagactatcctgctttgcgtatgcaacagcaaaggtatggtagtccttatg

SEQ ID NO: 11760 - DNA, 80 bp, synthetic construct
  misc_feature 1..80: note = Synthetic: >HKU9-cand-6810-6889
  source 1..80: mol_type = other DNA
actacacatatatacttatgctattagaagctttttgtgcctacctgttgtacacaccggcattgcctatagtaggtgtt

SEQ ID NO: 11761 - DNA, 80 bp, synthetic construct
  misc_feature 1..80: note = Synthetic: >HKU9-cand-6890-6969
  source 1..80: mol_type = other DNA
ttggcagtactgcacttagttgtgttatatttgcctatacccttaggtaatagttggctggtagtctttttgtattatat

SEQ ID NO: 11762 - DNA, 80 bp, synthetic construct
  misc_feature 1..80: note = Synthetic: >HKU9-cand-6970-7049
  source 1..80: mol_type = other DNA
aataaggttggtaccatttactagtatgttgcgcatgtatatagttatagcctttttgtggttgtgctataaagggtttt

SEQ ID NO: 11763 - DNA, 80 bp, synthetic construct
  misc_feature 1..80: note = Synthetic: >HKU9-cand-7050-7129
  source 1..80: mol_type = other DNA
tgcatgttaggtacggttgcaataatgtagcctgcctaatgtgttataaaaagaatgtcgctaagcgcattgagtgttct

SEQ ID NO: 11764 - DNA, 80 bp, synthetic construct
  misc_feature 1..80: note = Synthetic: >HKU9-cand-7130-7209
  source 1..80: mol_type = other DNA
acggttgttaatggtgtaaaacgtatgttttacgtcaatgctaatggtggtacacatttttgcactaagcataattggaa

SEQ ID NO: 11765 - DNA, 80 bp, synthetic construct
  misc_feature 1..80: note = Synthetic: >HKU9-cand-7210-7289
  source 1..80: mol_type = other DNA
ttgtgtttcatgtgacacctacacagttgatagcacttttatttctaggcaagtagctttggatttaagtgctcaattta

SEQ ID NO: 11766 - DNA, 80 bp, synthetic construct
  misc_feature 1..80: note = Synthetic: >HKU9-cand-7290-7369
  source 1..80: mol_type = other DNA
aaagacccataatgcatactgatgaagcttattatgaggttacttctgttgaggttcgtaatggttatgtttattgttac

SEQ ID NO: 11767 - DNA, 80 bp, synthetic construct
  misc_feature 1..80: note = Synthetic: >HKU9-cand-7370-7449
  source 1..80: mol_type = other DNA
tttgacagtgacggtcaacgtagttatgaacggtttcctatggatgcttttactaatgttagtaagttgcattattcaga

SEQ ID NO: 11768 - DNA, 80 bp, synthetic construct
  misc_feature 1..80: note = Synthetic: >HKU9-cand-7450-7529
  source 1..80: mol_type = other DNA
gttaaaaggcgcggcgccagcatttaatgttttagtgtttgacgcaactaatcgtatagaagagaatgcagttaagactg

SEQ ID NO: 11769 - DNA, 80 bp, synthetic construct
  misc_feature 1..80: note = Synthetic: >HKU9-cand-7530-7609
  source 1..80: mol_type = other DNA
ctgctatttattatgcacaactagcttgtaaacctattttattggttgacaagcgtatggttggtgtagtcggtgatgat

SEQ ID NO: 11770 - DNA, 80 bp, synthetic construct
  misc_feature 1..80: note = Synthetic: >HKU9-cand-7610-7689
  source 1..80: mol_type = other DNA
gccaccatagcaaaggctatgtttgaggcgtatgcgcagaattatctgcttaagtacagcattgctatggagaaagtaaa

SEQ ID NO: 11771 - DNA, 80 bp, synthetic construct
  misc_feature 1..80: note = Synthetic: >HKU9-cand-7690-7769
  source 1..80: mol_type = other DNA
acacttgtatagtactgctttgcaacaaatatcctcgggtatgactgttgaggctgttcttaaagtgtttgtgggatcca

SEQ ID NO: 11772 - DNA, 80 bp, synthetic construct
  misc_feature 1..80: note = Synthetic: >HKU9-cand-7770-7849
  source 1..80: mol_type = other DNA
cacgtgcagaggcaaaagatttggagtcagatgttgacactaatgatttggtttcttgtattagattgtgtcatcaggag

SEQ ID NO: 11773 - DNA, 80 bp, synthetic construct
  misc_feature 1..80: note = Synthetic: >MERS-cand-15920-15999
  source 1..80: mol_type = other DNA
gtctgccggttgctttgtagatgatatcgttaagactgacggtacactcatggtagagcggtttgtgtctttggctatag

SEQ ID NO: 11774 - DNA, 80 bp, synthetic construct
  misc_feature 1..80: note = Synthetic: >MERS-cand-16000-16079
  source 1..80: mol_type = other DNA
atgcttaccctctcacaaagcatgaagatatagaataccagaatgtattctgggtctacttacagtatatagaaaaactg

SEQ ID NO: 11775 - DNA, 80 bp, synthetic construct
  misc_feature 1..80: note = Synthetic: >MERS-cand-16080-16159
  source 1..80: mol_type = other DNA
tataaagaccttacaggacacatgcttgacagttattctgtcatgctatgtggtgataattctgctaagttttgggaaga

SEQ ID NO: 11776 - DNA, 80 bp, synthetic construct
  misc_feature 1..80: note = Synthetic: >MERS-cand-16160-16239
  source 1..80: mol_type = other DNA
ggcattctacagagatctctatagttcgcctaccactttgcaggctgtcggttcatgcgttgtatgccattcacagactt

SEQ ID NO: 11777 - DNA, 80 bp, synthetic construct
  misc_feature 1..80: note = Synthetic: >MERS-cand-16240-16319
  source 1..80: mol_type = other DNA
ccctacgctgtgggacatgcatccgtagaccatttctctgctgtaaatgctgctatgatcatgttatagcaactccacat

SEQ ID NO: 11778 - DNA, 80 bp, synthetic construct
  misc_feature 1..80: note = Synthetic: >MERS-cand-16320-16399
  source 1..80: mol_type = other DNA
aagatggttttgtctgtttctccttacgtttgtaatgcccctggttgtggcgtttcagacgttactaagctatatttagg

SEQ ID NO: 11779 - DNA, 80 bp, synthetic construct
  misc_feature 1..80: note = Synthetic: >MERS-cand-16400-16479
  source 1..80: mol_type = other DNA
tggtatgagctacttttgtgtagatcatagacctgtgtgtagttttccactttgcgctaatggtcttgtattcggcttat

SEQ ID NO: 11780 - DNA, 80 bp, synthetic construct
  misc_feature 1..80: note = Synthetic: >MERS-cand-16480-16559
  source 1..80: mol_type = other DNA
acaagaatatgtgcacaggtagtccttctatagttgaatttaataggttggctacctgtgactggactgaaagtggtgat

SEQ ID NO: 11781 - DNA, 80 bp, synthetic construct
  misc_feature 1..80: note = Synthetic: >MERS-cand-16560-16639
  source 1..80: mol_type = other DNA
tacacccttgccaatactacaacagaaccactcaaactttttgctgctgagactttacgtgccactgaagaggcgtctaa

SEQ ID NO: 11782 - DNA, 80 bp, synthetic construct
  misc_feature 1..80: note = Synthetic: >MERS-cand-16640-16719
  source 1..80: mol_type = other DNA
gcagtcttatgctattgccaccatcaaagaaattgttggtgagcgccaactattacttgtgtgggaggctggcaagtcca

SEQ ID NO: 11783 - DNA, 80 bp, synthetic construct
  misc_feature 1..80: note = Synthetic: >MERS-cand-16720-16799
  source 1..80: mol_type = other DNA
aaccaccactcaatcgtaattatgtttttactggttatcatataaccaaaaatagtaaagtgcagctcggtgagtacatc

SEQ ID NO: 11784 - DNA, 80 bp, synthetic construct
  misc_feature 1..80: note = Synthetic: >MERS-cand-16800-16879
  source 1..80: mol_type = other DNA
ttcgagcgcattgattatagtgatgctgtatcctacaagtctagtacaacgtataaactgactgtaggtgacatcttcgt

SEQ ID NO: 11785 - DNA, 80 bp, synthetic construct
  misc_feature 1..80: note = Synthetic: >MERS-cand-16880-16959
  source 1..80: mol_type = other DNA
acttacctctcactctgtggctaccttgacggcgcccacaattgtgaatcaagagaggtatgttaaaattactgggttgt

SEQ ID NO: 11786 - DNA, 80 bp, synthetic construct
  misc_feature 1..80: note = Synthetic: >MERS-cand-16960-17039
  source 1..80: mol_type = other DNA
acccaaccattacggtacctgaagagttcgcaagtcatgttgccaacttccaaaaatcaggttatagtaaatatgtcact

SEQ ID NO: 11787 - DNA, 80 bp, synthetic construct
  misc_feature 1..80: note = Synthetic: >MERS-cand-17040-17119
  source 1..80: mol_type = other DNA
gttcagggaccacctggcactggcaaaagtcattttgctatagggttagcgatttactaccctacagcacgtgttgttta

SEQ ID NO: 11788 - DNA, 80 bp, synthetic construct
  misc_feature 1..80: note = Synthetic: >MERS-cand-17120-17199
  source 1..80: mol_type = other DNA
tacagcatgttcacacgcagctgttgatgctttgtgtgaaaaagcttttaaatatttgaacattgctaaatgttcccgta

SEQ ID NO: 11789 - DNA, 80 bp, synthetic construct
  misc_feature 1..80: note = Synthetic: >NL63-cand-13110-13189
  source 1..80: mol_type = other DNA
atatgatgcctattatgggtttaactaattgtttagctagtgagtgttttgtcaagagtgatatttttggtagtgatttt

SEQ ID NO: 11790 - DNA, 80 bp, synthetic construct
  misc_feature 1..80: note = Synthetic: >NL63-cand-13190-13269
  source 1..80: mol_type = other DNA
aaaacttttgatttgcttaagtatgatttcactgaacataaagaaaatttattcaataagtactttaagcattggagttt

SEQ ID NO: 11791 - DNA, 80 bp, synthetic construct
  misc_feature 1..80: note = Synthetic: >NL63-cand-13270-13349
  source 1..80: mol_type = other DNA
tgattatcatcctaattgtagtgactgttatgatgatatgtgtgttatacattgtgctaattttaatacactatttgcca

SEQ ID NO: 11792 - DNA, 80 bp, synthetic construct
  misc_feature 1..80: note = Synthetic: >NL63-cand-13350-13429
  source 1..80: mol_type = other DNA
caactataccaggtactgcttttggtccactatgtcgtaaagtttttatagatggtgttccacttgttacaactgctggt

SEQ ID NO: 11793 - DNA, 80 bp, synthetic construct
  misc_feature 1..80: note = Synthetic: >NL63-cand-13430-13509
  source 1..80: mol_type = other DNA
tatcattttaagcaattaggtttggtttggaataaagatgttaacacacactcagttaggttgacaattactgaactttt

SEQ ID NO: 11794 - DNA, 80 bp, synthetic construct
  misc_feature 1..80: note = Synthetic: >NL63-cand-13510-13589
  source 1..80: mol_type = other DNA
gcaatttgtcaccgacccttccttgataatagcttcttccccagcactcgttgatcaacgcactatttgtttttctgttg

SEQ ID NO: 11795 - DNA, 80 bp, synthetic construct
  misc_feature 1..80: note = Synthetic: >NL63-cand-13590-13669
  source 1..80: mol_type = other DNA
cagcattgagtactggtttgacaaatcaagttgttaagccaggtcattttaatgaagagttttataactttcttcgttta

SEQ ID NO: 11796 - DNA, 80 bp, synthetic construct
  misc_feature 1..80: note = Synthetic: >NL63-cand-13670-13749
  source 1..80: mol_type = other DNA
agaggtttctttgatgaaggttctgaacttacattaaaacatttcttcttcgcacagaatggtgatgctgctgttaaaga

SEQ ID NO: 11797 - DNA, 80 bp, synthetic construct
  misc_feature 1..80: note = Synthetic: >NL63-cand-13750-13829
  source 1..80: mol_type = other DNA
ttttgacttttaccgttataataagcctaccattttagatatttgtcaagctagagttacatataagatagtctctcgtt

SEQ ID NO: 11798 - DNA, 80 bp, synthetic construct
  misc_feature 1..80: note = Synthetic: >NL63-cand-13830-13909
  source 1..80: mol_type = other DNA
attttgacatttatgaaggtggctgtattaaggcatgtgaagttgttgtaacaaatcttaataagagtgctggttggcca

SEQ ID NO: 11799 - DNA, 80 bp, synthetic construct
  misc_feature 1..80: note = Synthetic: >NL63-cand-13910-13989
  source 1..80: mol_type = other DNA
ttaaataagtttggtaaagctagtttgtattatgaatctatatcttatgaagaacaggatgctttgtttgctttgacaaa

SEQ ID NO: 11800 - DNA, 80 bp, synthetic construct
  misc_feature 1..80: note = Synthetic: >NL63-cand-13990-14069
  source 1..80: mol_type = other DNA
gcgtaatgtcctccctactatgacacagctgaatcttaagtatgctattagtggtaaagaacgtgctagaactgttggtg

SEQ ID NO: 11801 - DNA, 80 bp, synthetic construct
  misc_feature 1..80: note = Synthetic: >NL63-cand-14070-14149
  source 1..80: mol_type = other DNA
gtgtttctctgttgtccacaatgaccacaagacaataccatcaaaaacatcttaaatccattgttaatacacgcaatgcc

SEQ ID NO: 11802 - DNA, 80 bp, synthetic construct
  misc_feature 1..80: note = Synthetic: >NL63-cand-14150-14229
  source 1..80: mol_type = other DNA
actgttgttattggtactaccaaattttatggtggttggaataatatgttgcgtactttaattgatggtgttgaaaaccc

SEQ ID NO: 11803 - DNA, 80 bp, synthetic construct
  misc_feature 1..80: note = Synthetic: >NL63-cand-14230-14309
  source 1..80: mol_type = other DNA
tatgctcatgggttgggattatcccaaatgtgatagagctttgcctaacatgatacgtatgatttcagccatggtgttgg

SEQ ID NO: 11804 - DNA, 80 bp, synthetic construct
  misc_feature 1..80: note = Synthetic: >NL63-cand-14310-14389
  source 1..80: mol_type = other DNA
gctctaagcatgttaattgttgtactgcaacagataggttttataggcttggtaatgagttggcacaagttttaacagaa

SEQ ID NO: 11805 - DNA, 80 bp, synthetic construct
  misc_feature 1..80: note = Synthetic: >NL63-cand-15670-15749
  source 1..80: mol_type = other DNA
taaagaattgcttcttagttgggaaagtggtaaagttaaaccacctttgaatcgtaattctgttttcacctgttttcaaa

SEQ ID NO: 11806 - DNA, 80 bp, synthetic construct
  misc_feature 1..80: note = Synthetic: >NL63-cand-15750-15829
  source 1..80: mol_type = other DNA
taagtaaggactcaaaattccaaataggtgagttcatctttgagaaggttgaatatggttctgatactgttacgtataag

SEQ ID NO: 11807 - DNA, 80 bp, synthetic construct
  misc_feature 1..80: note = Synthetic: >NL63-cand-15830-15909
  source 1..80: mol_type = other DNA
tctactgtaactactaagttagttcctggtatgatttttgtcttaacatctcacaatgtccaacctttacgtgcaccaac

SEQ ID NO: 11808 - DNA, 80 bp, synthetic construct
  misc_feature 1..80: note = Synthetic: >NL63-cand-15910-15989
  source 1..80: mol_type = other DNA
tattgcaaaccaagagaagtattctagcatttataaattgcaccctgcttttaatgtcagtgatgcatatgctaatttgg

SEQ ID NO: 11809 - DNA, 80 bp, synthetic construct
  misc_feature 1..80: note = Synthetic: >NL63-cand-15990-16069
  source 1..80: mol_type = other DNA
ttccatattaccaacttattggtaaacaaaagataactacaatacagggtcctcctggtagtggtaagtcacattgttcc

SEQ ID NO: 11810 - DNA, 80 bp, synthetic construct
  misc_feature 1..80: note = Synthetic: >NL63-cand-16070-16149
  source 1..80: mol_type = other DNA
attggacttggattgtactacccaggtgcgcgtattgtttttgttgcttgtgcccatgctgctgttgattccttatgtgc

SEQ ID NO: 11811 - DNA, 80 bp, synthetic construct
  misc_feature 1..80: note = Synthetic: >NL63-cand-16150-16229
  source 1..80: mol_type = other DNA
aaaagctatgactgtttatagcattgataagtgtactaggattatacctgcaagagctcgggttgagtgttatagtggct

SEQ ID NO: 11812 - DNA, 80 bp, synthetic construct
  misc_feature 1..80: note = Synthetic: >NL63-cand-16230-16309
  source 1..80: mol_type = other DNA
ttaaaccaaataacactagtgcacaatacatatttagcactgttaacgcattacctgagtgtaatgctgatatcgttgtt

SEQ ID NO: 11813 - DNA, 80 bp, synthetic construct
  misc_feature 1..80: note = Synthetic: >NL63-cand-16310-16389
  source 1..80: mol_type = other DNA
gtagatgaagtttcaatgtgtacaaattatgacctttctgttattaatcagcgtttatcatataaacatattgtttatgt

SEQ ID NO: 11814 - DNA, 80 bp, synthetic construct
  misc_feature 1..80: note = Synthetic: >NL63-cand-16390-16469
  source 1..80: mol_type = other DNA
tggtgatccacaacaacttcctgcacctagagtaatgattactaaaggtgttatggagcctgttgattataacgttgtta

SEQ ID NO: 11815 - DNA, 80 bp, synthetic construct
  misc_feature 1..80: note = Synthetic: >NL63-cand-16470-16549
  source 1..80: mol_type = other DNA
ctcaacgtatgtgtgctataggccctgatgtttttcttcataaatgttatagatgtcctgctgaaatagttaatacagtt

SEQ ID NO: 11816 - DNA, 80 bp, synthetic construct
  misc_feature 1..80: note = Synthetic: >NL63-cand-16550-16629
  source 1..80: mol_type = other DNA
tctgaacttgtttatgagaacaagtttgtccctgttaaacctgctagtaaacagtgttttaaagtcttttttaagggtaa

SEQ ID NO: 11817 - DNA, 80 bp, synthetic construct
  misc_feature 1..80: note = Synthetic: >NL63-cand-16630-16709
  source 1..80: mol_type = other DNA
tgtacaggttgacaatggttctagtattaacagaaagcagcttgaaatagttaagctgtttttagttaaaaatccaagtt

SEQ ID NO: 11818 - DNA, 80 bp, synthetic construct
  misc_feature 1..80: note = Synthetic: >NL63-cand-16710-16789
  source 1..80: mol_type = other DNA
ggagtaaggctgtgtttatttctccttataatagtcagaattatgttgctagtagatttttaggacttcaaattcaaact

SEQ ID NO: 11819 - DNA, 80 bp, synthetic construct
  misc_feature 1..80: note = Synthetic: >NL63-cand-16790-16869
  source 1..80: mol_type = other DNA
gttgattcttctcaaggtagtgagtatgattatgtaatctatgcacaaacttctgacactgcacatgcttgcaatgtaaa

SEQ ID NO: 11820 - DNA, 80 bp, synthetic construct
  misc_feature 1..80: note = Synthetic: >NL63-cand-16870-16949
  source 1..80: mol_type = other DNA
ccgttttaatgttgctataacacgtgctaagaagggtatattttgtgtaatgtgtgataaaactttgtttgattcactta

SEQ ID NO: 11821 - DNA, 80 bp, synthetic construct
  misc_feature 1..80: note = Synthetic: >NL63-cand-19510-19589
  source 1..80: mol_type = other DNA
taggtggatgttgtggtgtaaagataaccacttgtccactttttatccacagttgcagtctgctgaatggaagtgtggtt

SEQ ID NO: 11822 - DNA, 80 bp, synthetic construct
  misc_feature 1..80: note = Synthetic: >NL63-cand-19590-19669
  source 1..80: mol_type = other DNA
atgctatgccacaaatttataagcttcaacgtatgtgtttggaaccttgtaatttatataattatggtgctggtattaag

SEQ ID NO: 11823 - DNA, 80 bp, synthetic construct
  misc_feature 1..80: note = Synthetic: >NL63-cand-19670-19749
  source 1..80: mol_type = other DNA
ttgcctagtggtataatgttaaatgttgttaaatacactcagctttgtcaatacctaaatagcactacaatgtgcgtacc

SEQ ID NO: 11824 - DNA, 80 bp, synthetic construct
  misc_feature 1..80: note = Synthetic: >NL63-cand-19750-19829
  source 1..80: mol_type = other DNA
tcataatatgcgtgttttgcactatggtgctggttctgacaaaggtgtggcacctggtacaactgttttaaaacgttggc

SEQ ID NO: 11825 - DNA, 80 bp, synthetic construct
  misc_feature 1..80: note = Synthetic: >NL63-cand-19830-19909
  source 1..80: mol_type = other DNA
taccacctgatgcaataatcattgataatgatatcaatgattatgttagtgatgcagattttagcattacaggtgattgt

SEQ ID NO: 11826 - DNA, 80 bp, synthetic construct
  misc_feature 1..80: note = Synthetic: >NL63-cand-19910-19989
  source 1..80: mol_type = other DNA
gctactgtttatcttgaagataagtttgacttacttatttctgatatgtatgatggtagaattaaattttgtgatggtga

SEQ ID NO: 11827 - DNA, 80 bp, synthetic construct
  misc_feature 1..80: note = Synthetic: >NL63-cand-19990-20069
  source 1..80: mol_type = other DNA
aaacgtctctaaagatgggttttttacttatcttaatggtgttattagagaaaaattagctattggtggtagtgttgcca

SEQ ID NO: 11828 - DNA, 80 bp, synthetic construct
  misc_feature 1..80: note = Synthetic: >NL63-cand-20070-20149
  source 1..80: mol_type = other DNA
ttaagattacagaatatagttggaataagtatctttatgaattaatacaaagatttgctttttggactttgttttgcacg

SEQ ID NO: 11829 - DNA, 80 bp, synthetic construct
  misc_feature 1..80: note = Synthetic: >NL63-cand-20150-20229
  source 1..80: mol_type = other DNA
tctgttaatacatcctcttcagaagcttttcttattggtattaattatttaggtgactttattcaaggtccttttatagc

SEQ ID NO: 11830 - DNA, 80 bp, synthetic construct
  misc_feature 1..80: note = Synthetic: >NL63-cand-20230-20309
  source 1..80: mol_type = other DNA
tggtaacactgttcatgctaattatatattttggcgtaattctactattatgtctttgtcatacaattcagttttagatt

SEQ ID NO: 11831 - DNA, 80 bp, synthetic construct
  misc_feature 1..80: note = Synthetic: >NL63-cand-20310-20389
  source 1..80: mol_type = other DNA
taagtaagtttgaatgtaaacataaggccactgttgttgttacacttaaagatagtgatgtaaatgatatggttttgagt

SEQ ID NO: 11832 - DNA, 80 bp, synthetic construct
  misc_feature 1..80: note = Synthetic: >NL63-cand-20390-20469
  source 1..80: mol_type = other DNA
ttgattaagagtggtaggttgttgttacgcaataatggtcgttttggtggttttagtaatcatttagtctcaactaaatg

SEQ ID NO: 11833 - DNA, 80 bp, synthetic construct
  misc_feature 1..80: note = Synthetic: >NL63-cand-20470-20549
  source 1..80: mol_type = other DNA
aaacttttcttgattttgcttgttttgcccctggcctcttgctttttcacatgtaatagtaatgctaatctctctatgtt

SEQ ID NO: 11834 - DNA, 80 bp, synthetic construct
  misc_feature 1..80: note = Synthetic: >NL63-cand-20550-20629
  source 1..80: mol_type = other DNA
acaattaggtgttcctgacaattcttcaactattgtcacgggtttattgccaactcattggatttgtgctaatcagagta

SEQ ID NO: 11835 - DNA, 80 bp, synthetic construct
  misc_feature 1..80: note = Synthetic: >NL63-cand-20630-20709
  source 1..80: mol_type = other DNA
catctgtttactcagccaatggtttcttttatattgatgttggtaatcaccgtagtgcttttgcgctccatactggttat

SEQ ID NO: 11836 - DNA, 80 bp, synthetic construct
  misc_feature 1..80: note = Synthetic: >NL63-cand-20710-20789
  source 1..80: mol_type = other DNA
tatgatgttaatcagtattatatttatgttactaatgaaataggcttaaatgcttctgttactcttaagatttgtaagtt

SEQ ID NO: 11837 - DNA, 80 bp, synthetic construct
  misc_feature 1..80: note = Synthetic: >SARSCoV-cand-12690-12769
  source 1..80: mol_type = other DNA
ctgatgacaatgcacttgcctactataacaattcgaagggaggtaggtttgtgctggcattactatcagaccaccaagat

SEQ ID NO: 11838 - DNA, 80 bp, synthetic construct
  misc_feature 1..80: note = Synthetic: >SARSCoV-cand-12850-12929
  source 1..80: mol_type = other DNA
agacacaccaaaagggcctaaagtgaaatacttgtacttcatcaaaggcttaaacaacctaaatagaggtatggtgctgg

SEQ ID NO: 11839 - DNA, 80 bp, synthetic construct
  misc_feature 1..80: note = Synthetic: >SARSCoV-cand-12930-13009
  source 1..80: mol_type = other DNA
gcagtttagctgctacagtacgtcttcaggctggaaatgctacagaagtacctgccaattcaactgtgctttccttctgt

SEQ ID NO: 11840 - DNA, 80 bp, synthetic construct
  misc_feature 1..80: note = Synthetic: >SARSCoV-cand-13160-13239
  source 1..80: mol_type = other DNA
tttggtggtgcttcatgttgtctgtattgtagatgccacattgaccatccaaatcctaaaggattctgtgacttgaaagg

SEQ ID NO: 11841 - DNA, 80 bp, synthetic construct
  misc_feature 1..80: note = Synthetic: >SARSCoV-cand-13240-13319
  source 1..80: mol_type = other DNA
taagtacgtccaaatacctaccacttgtgctaatgacccagtgggttttacacttagaaacacagtctgtaccgtctgcg

SEQ ID NO: 11842 - DNA, 80 bp, synthetic construct
  misc_feature 1..80: note = Synthetic: >SARSCoV-cand-13320-13399
  source 1..80: mol_type = other DNA
gaatgtggaaaggttatggctgtagttgtgaccaactccgcgaacccttgatgcagtctgcggatgcatcaacgttttta

SEQ ID NO: 11843 - DNA, 80 bp, synthetic construct
  misc_feature 1..80: note = Synthetic: >SARSCoV-cand-13480-13559
  source 1..80: mol_type = other DNA
gatatttacaacgaaaaagttgctggttttgcaaagttcctaaaaactaattgctgtcgcttccaggagaaggatgagga

SEQ ID NO: 11844 - DNA, 80 bp, synthetic construct
  misc_feature 1..80: note = Synthetic: >SARSCoV-cand-13800-13879
  source 1..80: mol_type = other DNA
aaaagaaatactcgtcacatacaattgctgtgatgatgattatttcaataagaaggattggtatgacttcgtagagaatc

SEQ ID NO: 11845 - DNA, 80 bp, synthetic construct
  misc_feature 1..80: note = Synthetic: >SARSCoV-cand-16430-16509
  source 1..80: mol_type = other DNA
gtcaggtttttggtttatacaaaaacacatgtgtaggcagtgacaatgtcactgacttcaatgcgatagcaacatgtgat

SEQ ID NO: 11846 - DNA, 80 bp, synthetic construct
  misc_feature 1..80: note = Synthetic: >SARSCoV-cand-16510-16589
  source 1..80: mol_type = other DNA
tggactaatgctggcgattacatacttgccaacacttgtactgagagactcaagcttttcgcagcagaaacgctcaaagc

SEQ ID NO: 11847 - DNA, 80 bp, synthetic construct
  misc_feature 1..80: note = Synthetic: >SARSCoV-cand-16590-16669
  source 1..80: mol_type = other DNA
cactgaggaaacatttaagctgtcatatggtattgccactgtacgcgaagtactctctgacagagaattgcatctttcat

SEQ ID NO: 11848 - DNA, 80 bp, synthetic construct
  misc_feature 1..80: note = Synthetic: >SARSCoV-cand-16670-16749
  source 1..80: mol_type = other DNA
gggaggttggaaaacctagaccaccattgaacagaaactatgtctttactggttaccgtgtaactaaaaatagtaaagta

SEQ ID NO: 11849 - DNA, 80 bp, synthetic construct
  misc_feature 1..80: note = Synthetic: >SARSCoV-cand-16750-16829
  source 1..80: mol_type = other DNA
cagattggagagtacacctttgaaaaaggtgactatggtgatgctgttgtgtacagaggtactacgacatacaagttgaa

SEQ ID NO: 11850 - DNA, 80 bp, synthetic construct
  misc_feature 1..80: note = Synthetic: >SARSCoV-cand-16830-16909
  source 1..80: mol_type = other DNA
tgttggtgattactttgtgttgacatctcacactgtaatgccacttagtgcacctactctagtgccacaagagcactatg

SEQ ID NO: 11851 - DNA, 80 bp, synthetic construct
  misc_feature 1..80: note = Synthetic: >SARSCoV-cand-16910-16989
  source 1..80: mol_type = other DNA
tgagaattactggcttgtacccaacactcaacatctcagatgagttttctagcaatgttgcaaattatcaaaaggtcggc

SEQ ID NO: 11852 - DNA, 80 bp, synthetic construct
  misc_feature 1..80: note = Synthetic: >SARSCoV-cand-16990-17069
  source 1..80: mol_type = other DNA
atgcaaaagtactctacactccaaggaccacctggtactggtaagagtcattttgccatcggacttgctctctattaccc

SEQ ID NO: 11853 - DNA, 80 bp, synthetic construct
  misc_feature 1..80: note = Synthetic: >SARSCoV-cand-17070-17149
  source 1..80: mol_type = other DNA
atctgctcgcatagtgtatacggcatgctctcatgcagctgttgatgccctatgtgaaaaggcattaaaatatttgccca

SEQ ID NO: 11854 - DNA, 80 bp, synthetic construct
  misc_feature 1..80: note = Synthetic: >SARSCoV-cand-17150-17229
  source 1..80: mol_type = other DNA
tagataaatgtagtagaatcatacctgcgcgtgcgcgcgtagagtgttttgataaattcaaagtgaattcaacactagaa

SEQ ID NO: 11855 - DNA, 80 bp, synthetic construct
  misc_feature 1..80: note = Synthetic: >SARSCoV-cand-17230-17309
  source 1..80: mol_type = other DNA
cagtatgttttctgcactgtaaatgcattgccagaaacaactgctgacattgtagtctttgatgaaatctctatggctac

SEQ ID NO: 11856 - DNA, 80 bp, synthetic construct
  misc_feature 1..80: note = Synthetic: >SARSCoV-cand-17310-17389
  source 1..80: mol_type = other DNA
taattatgacttgagtgttgtcaatgctagacttcgtgcaaaacactacgtctatattggcgatcctgctcaattaccag

SEQ ID NO: 11857 - DNA, 80 bp, synthetic construct
  misc_feature 1..80: note = Synthetic: >SARSCoV-cand-17390-17469
  source 1..80: mol_type = other DNA
ccccccgcacattgctgactaaaggcacactagaaccagaatattttaattcagtgtgcagacttatgaaaacaataggt

SEQ ID NO: 11858 - DNA, 80 bp, synthetic construct
  misc_feature 1..80: note = Synthetic: >SARSCoV-cand-17470-17549
  source 1..80: mol_type = other DNA
ccagacatgttccttggaacttgtcgccgttgtcctgctgaaattgttgacactgtgagtgctttagtttatgacaataa

SEQ ID NO: 11859 - DNA, 80 bp, synthetic construct
  misc_feature 1..80: note = Synthetic: >SARSCoV-cand-17550-17629
  source 1..80: mol_type = other DNA
gctaaaagcacacaaggataagtcagctcaatgcttcaaaatgttctacaaaggtgttattacacatgatgtttcatctg

SEQ ID NO: 11860 - DNA, 80 bp, synthetic construct
  misc_feature 1..80: note = Synthetic: >SARSCoV-cand-17630-17709
  source 1..80: mol_type = other DNA
caatcaacagacctcaaataggcgttgtaagagaatttcttacacgcaatcctgcttggagaaaagctgtttttatctca

SEQ ID NO: 11861 - DNA, 80 bp, synthetic construct
  misc_feature 1..80: note = Synthetic: >Shrew-cand-14420-14499
  source 1..80: mol_type = other DNA
aaaagaggttattggacctaaagaaatagtattatcatgggaaccaggtaaaattcgtcctcctttgaatcataattctg

SEQ ID NO: 11862 - DNA, 80 bp, synthetic construct
  misc_feature 1..80: note = Synthetic: >Shrew-cand-14500-14579
  source 1..80: mol_type = other DNA
tttttatttgttataatatggtgaaagatacacgtgttcagattggtgaatatgtgtttgagaaagtggattgttcttcg

SEQ ID NO: 11863 - DNA, 80 bp, synthetic construct
  misc_feature 1..80: note = Synthetic: >Shrew-cand-14580-14659
  source 1..80: mol_type = other DNA
gatagtgtttattttaagagcaatgctacttctaagttagtaccaggtatgatttttgtacttgtgtcacataatgttca

SEQ ID NO: 11864 - DNA, 80 bp, synthetic construct
  misc_feature 1..80: note = Synthetic: >Shrew-cand-14660-14739
  source 1..80: mol_type = other DNA
aagtttaaaagctcaaactatagtttctcaagaaatttatagtaaagtaaggttgtttagtactttgaatgttaaagaag

SEQ ID NO: 11865 - DNA, 80 bp, synthetic construct
  misc_feature 1..80: note = Synthetic: >Shrew-cand-14740-14819
  source 1..80: mol_type = other DNA
attatgtaaatttaataccgtattatacaatgattggtaagcaacgtgttactactattcagggtccgcctggtagtggt

SEQ ID NO: 11866 - DNA, 80 bp, synthetic construct
  misc_feature 1..80: note = Synthetic: >Shrew-cand-14820-14899
  source 1..80: mol_type = other DNA
aagtcacattgtattattggtcttggtttgtattatcccactattaagatagtgtttacagcttgttctcatgctgctgt

SEQ ID NO: 11867 - DNA, 80 bp, synthetic construct
  misc_feature 1..80: note = Synthetic: >Shrew-cand-14900-14979
  source 1..80: mol_type = other DNA
agattctttgtgtaataaagcctttaagaattataatattgtagattgtagtagaataatacctgctagagcacgtgtag

SEQ ID NO: 11868 - DNA, 80 bp, synthetic construct
  misc_feature 1..80: note = Synthetic: >Shrew-cand-14980-15059
  source 1..80: mol_type = other DNA
aatgttttgataaatttagggttaatgattgtagtgctaaatatgtatttagtactatcaatgctttaccagatgtagta

SEQ ID NO: 11869 - DNA, 80 bp, synthetic construct
  misc_feature 1..80: note = Synthetic: >Shrew-cand-15060-15139
  source 1..80: mol_type = other DNA
gctgatgtggtagttgtagatgaagtttctatgttgactaattatgatcttagtgtcattaatagtcgtgttaagtataa

SEQ ID NO: 11870 - DNA, 80 bp, synthetic construct
  misc_feature 1..80: note = Synthetic: >Shrew-cand-15140-15219
  source 1..80: mol_type = other DNA
acatattgtttatgtaggtgatccacaacaattaccatctcctcgtattttgataacgcgaggtgttttaaaacctgaag

SEQ ID NO: 11871 - DNA, 80 bp, synthetic construct
  misc_feature 1..80: note = Synthetic: >Shrew-cand-15220-15299
  source 1..80: mol_type = other DNA
attataattgtgtgacaaggagaatgtgtttattaggacctgatgtctttttaaacaaatgttatcgttgtcccgcagaa

SEQ ID NO: 11872 - DNA, 80 bp, synthetic construct
  misc_feature 1..80: note = Synthetic: >Shrew-cand-15300-15379
  source 1..80: mol_type = other DNA
gtagttaaaactgttagtgctttggtttatgaaaataagttcttagcagttaataaaatttcaggtaagtgttttaaagt

SEQ ID NO: 11873 - DNA, 80 bp, synthetic construct
  misc_feature 1..80: note = Synthetic: >Shrew-cand-15380-15459
  source 1..80: mol_type = other DNA
gtttttaaagggtcatgttcaagttgataatggttctagtgttaatagaaaacagttggattttgttaaaacatttttag

SEQ ID NO: 11874 - DNA, 80 bp, synthetic construct
  misc_feature 1..80: note = Synthetic: >Shrew-cand-15460-15539
  source 1..80: mol_type = other DNA
agcataataaagagtggcaaaatgctgtctttatttcaccttataattcacagaattatgtggcttctaaaatgttaggt

SEQ ID NO: 11875 - DNA, 80 bp, synthetic construct
  misc_feature 1..80: note = Synthetic: >Shrew-cand-15540-15619
  source 1..80: mol_type = other DNA
ttacaaactcaaactgttgattcagctcaaggaagtgagtatgattatgtgatctatactcaaacttctgatacagcaca

SEQ ID NO: 11876 - DNA, 80 bp, synthetic construct
  misc_feature 1..80: note = Synthetic: >Shrew-cand-15620-15699
  source 1..80: mol_type = other DNA
tgcttgtaacattaatcgttttaatgttgcaattactaggactaagtatggtattttgtgtattatgaataataagaaaa

SEQ ID NO: 11877 - DNA, 80 bp, synthetic construct
  misc_feature 1..80: note = Synthetic: >HKU2R-cand-12410-12489
  source 1..80: mol_type = other DNA
taggctcaaaaatttagacaaacatgatgccttctttgttattaagcgttgcactaagtctgtcatggaacacgagcagt

SEQ ID NO: 11878 - DNA, 80 bp, synthetic construct
  misc_feature 1..80: note = Synthetic: >BtRf_AlphaCoV-cand-12380-12459
  source 1..80: mol_type = other DNA
gctcaaaaatttagataagcatgatgccttctttgttattaagcgttgcactaagtctgtcatggaacacgagcagtcca

SEQ ID NO: 11879 - DNA, 80 bp, synthetic construct
  misc_feature 1..80: note = Synthetic: >BtSk_AlphaCoV-cand-14370-14449
  source 1..80: mol_type = other DNA
acttattaaggatgttgaaaacccccatttaatgggatgggattatcctaagtgtgatagagctttgcccaacatgatta

SEQ ID NO: 11880 - DNA, 80 bp, synthetic construct
  misc_feature 1..80: note = Synthetic: >Sb512-cand-14420-14499
  source 1..80: mol_type = other DNA
tattaaggatgttgaaaacccccatttaatgggatgggattatcctaagtgtgatagagctttgcccaacatgattagaa

SEQ ID NO: 11881 - DNA, 80 bp, synthetic construct
  misc_feature 1..80: note = Synthetic: >Sk512R-cand-14400-14479
  source 1..80: mol_type = other DNA
tgctcaaaacacttattaaggatgttgaaaacccccatttaatgggatgggattatcctaagtgtgatagagctttgccc

SEQ ID NO: 11882 - DNA, 80 bp, synthetic construct
  misc_feature 1..80: note = Synthetic: >Sb512-cand-13540-13619
  source 1..80: mol_type = other DNA
acttcaatactttgtttgcaactactataccaattacagctttcggacctttgtgtaggaagtgttggattgatggggtg

SEQ ID NO: 11883 - DNA, 80 bp, synthetic construct
  misc_feature 1..80: note = Synthetic: >BtSk_AlphaCoV-cand-13490-13569
  source 1..80: mol_type = other DNA
gtgccaacttcaatactttgtttgcaactactataccaattacagctttcggacctttgtgtaggaagtgttggattgat

SEQ ID NO: 11884 - DNA, 80 bp, synthetic construct
  misc_feature 1..80: note = Synthetic: >Sk512R-cand-13520-13599
  source 1..80: mol_type = other DNA
gttcattgtgccaacttcaatactttgtttgcaactactataccaattacagctttcggacctttgtgtaggaagtgttg

SEQ ID NO: 11885 - DNA, 80 bp, synthetic construct
  misc_feature 1..80: note = Synthetic: >HKU24-cand-16660-16739
  source 1..80: mol_type = other DNA
ctgaagaggctttcaagcaaagctatgcttctgctactatacaggagatagtaagcgatcgtgaattaattctctcttgg

SEQ ID NO: 11886 - DNA, 80 bp, synthetic construct
  misc_feature 1..80: note = Synthetic: >BtSk_AlphaCoV-cand-15890-15969
  source 1..80: mol_type = other DNA
attctgttttcacgtgttatcacataacgaaaaacaccaagtttcaagttggtgagtttacgtttgagaaactagattac

SEQ ID NO: 11887 - DNA, 80 bp, synthetic construct
  misc_feature 1..80: note = Synthetic: >Sk512R-cand-15920-15999
  source 1..80: mol_type = other DNA
ctaagtcgtaattctgttttcacgtgttatcacataacgaaaaacaccaagtttcaagttggtgagtttacgtttgagaa

SEQ ID NO: 11888 - DNA, 80 bp, synthetic construct
  misc_feature 1..80: note = Synthetic: >Sb512-cand-15940-16019
  source 1..80: mol_type = other DNA
ctgttttcacgtgttatcacataacgaaaaacaccaagtttcaagttggtgagtttacgtttgagaaattagattacgac

SEQ ID NO: 11889 - DNA, 80 bp, synthetic construct
  misc_feature 1..80: note = Synthetic: >BtSk_AlphaCoV-cand-10390-10469
  source 1..80: mol_type = other DNA
gttgccatcattgtgcatagtgtctggttataatatttttaaggattatcatttctatacttatatgcttgaagaatttg

SEQ ID NO: 11890 - DNA, 80 bp, synthetic construct
  misc_feature 1..80: note = Synthetic: >Sb512-cand-10430-10509
  source 1..80: mol_type = other DNA
atttgttgccatcattgtgcatagtgtctggttataatatttttaaggattatcatttctacacttacatgcttgaagaa

SEQ ID NO: 11891 - DNA, 80 bp, synthetic construct
  misc_feature 1..80: note = Synthetic: >Sk512R-cand-10420-10499
  source 1..80: mol_type = other DNA
tttatttgttgccatcattgtgcatagtgtctggttataatatttttaaggactatcatttctacacttacatgcttgaa

SEQ ID NO: 11892 - DNA, 80 bp, synthetic construct
  misc_feature 1..80: note = Synthetic: >BtSk_AlphaCoV-cand-14610-14689
  source 1..80: mol_type = other DNA
tgctacaacagcttatgccaattcagtttttaacatatttcaggcaactagtgcaaatgttaaccgcttgttgagtgttg

SEQ ID NO: 11893 - DNA, 80 bp, synthetic construct
  misc_feature 1..80: note = Synthetic: >Sb512-cand-14660-14739
  source 1..80: mol_type = other DNA
tacaacagcttatgccaattcagtttttaacatatttcaggcaactagtgcaaatgttaaccgcttgttgagtgttgata

SEQ ID NO: 11894 - DNA, 80 bp, synthetic construct
  misc_feature 1..80: note = Synthetic: >Sk512R-cand-14640-14719
  source 1..80: mol_type = other DNA
catctggtgatgctacaacagcttatgccaattcagtttttaacatatttcaggcaactagtgcaaatgttaaccgcttg

SEQ ID NO: 11895 - DNA, 80 bp, synthetic construct
  misc_feature 1..80: note = Synthetic: >MbCoV1-cand-17380-17459
  source 1..80: mol_type = other DNA
cggtttgcaaattcagactgttgattcttcacaaggtagtgagtatgattatgtcatttatacacaaacttctgatactg

SEQ ID NO: 11896 - DNA, 80 bp, synthetic construct
  misc_feature 1..80: note = Synthetic: >Sb512-cand-16980-17059
  source 1..80: mol_type = other DNA
ttgggtcttcaaattcaaactgttgactcttcacaaggtagtgagtatgattatgtcatttatacacaaacttctgatac

SEQ ID NO: 11897 - DNA, 80 bp, synthetic construct
  misc_feature 1..80: note = Synthetic: >BtSk_AlphaCoV-cand-16930-17009
  source 1..80: mol_type = other DNA
gttttgggtcttcaaattcaaactgttgactcttcacaaggtagtgagtatgattatgtcatttatacacaaacttctga

SEQ ID NO: 11898 - DNA, 80 bp, synthetic construct
  misc_feature 1..80: note = Synthetic: >Sk512R-cand-16960-17039
  source 1..80: mol_type = other DNA
tgctggcagagttttgggtcttcaaattcaaactgttgactcttcacaaggtagtgagtatgattatgtcatttatacac

SEQ ID NO: 11899 - DNA, 80 bp, synthetic construct
  misc_feature 1..80: note = Synthetic: >HKU24-cand-16100-16179
  source 1..80: mol_type = other DNA
gtatataaagaagttgtacaatgatttgggtaaccagatattggacagctatagtgtgattttaagtacttgtgacggac

SEQ ID NO: 11900 - DNA, 80 bp, synthetic construct
  misc_feature 1..80: note = Synthetic: >MinkCoV1-cand-320-399
  source 1..80: mol_type = other DNA
cacatggctacaaatcctacaacgattgtagcaatgctttaaagctttgctggcatgtaggatttgatggctatgttttt

SEQ ID NO: 11901 - DNA, 80 bp, synthetic construct
  misc_feature 1..80: note = Synthetic: >AlphaMink-cand-320-399
  source 1..80: mol_type = other DNA
cacgcatggttacaaatcctacactgattgtagcaatgctttaaagctttgctggcatgtaggatttgatggctatgttt

SEQ ID NO: 11902 - DNA, 80 bp, synthetic construct
  misc_feature 1..80: note = Synthetic: >HKU4-cand-1970-2049
  source 1..80: mol_type = other DNA
ctgcaataccatggaaaatttgcagtaatcttaaaagtgccttagactactatagttctaatattatgtttagggttttt

SEQ ID NO: 11903 - DNA, 80 bp, synthetic construct
  misc_feature 1..80: note = Synthetic: >HKU4R-cand-1960-2039
  source 1..80: mol_type = other DNA
ttctgcaataccatggaaaatttgcagtaatcttaaaagtgccttagactactatagttctaatattatgtttagggttt

SEQ ID NO: 11904 - DNA, 80 bp, synthetic construct
  misc_feature 1..80: note = Synthetic: >WIV16-cand-13310-13389
  source 1..80: mol_type = other DNA
ggaatgtggaaaggttatggctgtagttgtgatcaactccgcgaacccatgatgcagtctgcggatgcgtcaacgttttt

SEQ ID NO: 11905 - DNA, 80 bp, synthetic construct
  misc_feature 1..80: note = Synthetic: >HKU5R-cand-12950-13029
  source 1..80: mol_type = other DNA
aaaaactatggttgttagtgctggtatggatcaggctaactgtaatactagctcactggcttattatgaacctgttgagg

SEQ ID NO: 11906 - DNA, 80 bp, synthetic construct
  misc_feature 1..80: note = Synthetic: >HKU5-cand-12960-13039
  source 1..80: mol_type = other DNA
atggttgttagtgctggtattgatcaggctaactgtaatactagctcactggcttattatgaacctgttgagggtcgtaa

SEQ ID NO: 11907 - DNA, 80 bp, synthetic construct
  misc_feature 1..80: note = Synthetic: >HKU5R-cand-29370-29449
  source 1..80: mol_type = other DNA
taaaaacttccacatcgaaggcactggtggcaatagtcagtcatcttcgagagcctccagcagaagctcatctagatcta

SEQ ID NO: 11908 - DNA, 80 bp, synthetic construct
  misc_feature 1..80: note = Synthetic: >AlphaMink-cand-8220-8299
  source 1..80: mol_type = other DNA
tcagttgttgcaacatcaggttacatgattactaatttgatcattgccttatgtgccatagcagtttgttacttcttttt

SEQ ID NO: 11909 - DNA, 80 bp, synthetic construct
  misc_feature 1..80: note = Synthetic: >Alpha2-cand-8210-8289
  source 1..80: mol_type = other DNA
cagttgttgcaacatcaggttacatgattactaatttaatcatagccttatgtgccatagccgtttgttactttttctta

SEQ ID NO: 11910 - DNA, 80 bp, synthetic construct
  misc_feature 1..80: note = Synthetic: >WIV16-cand-29800-29879
  source 1..80: mol_type = other DNA
aaaaagactgatgaagctcagcctttaccgcagagacaaaagaagcagcccactgtgactcttcttcctgcggctgacat

SEQ ID NO: 11911 - DNA, 80 bp, synthetic construct
  misc_feature 1..80: note = Synthetic: >MbCoV1-cand-7930-8009
  source 1..80: mol_type = other DNA
cggatgaggaatttgtcgatgctgttagtaatgcacatagatttaatgtgttgctttctgacaattcttttaacaacctg

SEQ ID NO: 11912 - DNA, 80 bp, synthetic construct
  misc_feature 1..80: note = Synthetic: >HKU2-cand-7380-7459
  source 1..80: mol_type = other DNA
ttgatgtgcttattactgacacatcctttaataatttctgtacgtcttatgccaaaccagcagagaaattgtcctctttt

SEQ ID NO: 11913 - DNA, 80 bp, synthetic construct
  misc_feature 1..80: note = Synthetic: >SEAC-cand-7380-7459
  source 1..80: mol_type = other DNA
tattactgacacatcctttaataatttctgtacgtcttatgccaaaccagcagagaaattgtcctcttttgatttggcac

SEQ ID NO: 11914 - DNA, 80 bp, synthetic construct
  misc_feature 1..80: note = Synthetic: >HKU8R-cand-16500-16579
  source 1..80: mol_type = other DNA
aaaagattaccactattcagggtcctcctggtagtggtaaatcacactgtgttattgggttgggactttattaccctggt

SEQ ID NO: 11915 - DNA, 80 bp, synthetic construct
  misc_feature 1..80: note = Synthetic: >BtSk_AlphaCoV-cand-25350-25429
  source 1..80: mol_type = other DNA
ttgaggagattcaactagacgaatatgctacaattagtgaatgataatggtgtagttgtaaatgcgattctctggctttt

SEQ ID NO: 11916 - DNA, 80 bp, synthetic construct
  misc_feature 1..80: note = Synthetic: >Sb512-cand-25410-25489
  source 1..80: mol_type = other DNA
ttttgaggagattcaactagacgaatatgctacaattagtgaatgataatggtgtagttgtaaatgcgattctctggctt

SEQ ID NO: 11917 - DNA, 80 bp, synthetic construct
  misc_feature 1..80: note = Synthetic: >BtRl_BetaCoV-cand-11560-11639
  source 1..80: mol_type = other DNA
tacttcaggcttactcttggtgtttatgactacttggtctctacacaagaatttaggtacatgaactcccaggggctttt

SEQ ID NO: 11918 - DNA, 80 bp, synthetic construct
  misc_feature 1..80: note = Synthetic: >WIV16-cand-11590-11669
  source 1..80: mol_type = other DNA
caaccgttacttcaggcttactcttggtgtttatgactacttggtctctacacaagaatttaggtatatgaactcccagg

SEQ ID NO: 11919 - DNA, 80 bp, synthetic construct
  misc_feature 1..80: note = Synthetic: >HKU10-cand-5780-5859
  source 1..80: mol_type = other DNA
aaaaggtcaacctggtgatgttgagtatttgcttggtacgataagtcgctatctagtgaatagtggtacagtcactattt

SEQ ID NO: 11920 - DNA, 80 bp, synthetic construct
  misc_feature 1..80: note = Synthetic: >HKU10R-cand-5660-5739
  source 1..80: mol_type = other DNA
aaggtcaacctggtgatgttgagtatttgcttggtaagataagccgttatttagtaaatagtggtacagtcactatttcc

SEQ ID NO: 11921 - DNA, 80 bp, synthetic construct
  misc_feature 1..80: note = Synthetic: >BetaSp-cand-18130-18209
  source 1..80: mol_type = other DNA
ccttataatagtcagaactttgctgctaagaggatattaggtttgcaaactcaaaccgttgactctgcacagggttctga

SEQ ID NO: 11922 - DNA, 80 bp, synthetic construct
  misc_feature 1..80: note = Synthetic: >HKU8R-cand-26580-26659
  source 1..80: mol_type = other DNA
ggtaaatcacttaatgcggccagccaaacaggctgggctttttatgtgaggtccaagaatggcgactactctgctgtgtc

SEQ ID NO: 11923 - DNA, 80 bp, synthetic construct
  misc_feature 1..80: note = Synthetic: >SEAC-cand-17640-17719
  source 1..80: mol_type = other DNA
aatagtgcgactcatgcgtactattgtttagcacacgcacttggttgcgattatttgtacaacccctttgttatagatat

SEQ ID NO: 11924 - DNA, 80 bp, synthetic construct
  misc_feature 1..80: note = Synthetic: >BtRf_AlphaCoV-cand-17450-17529
  source 1..80: mol_type = other DNA
gactcatgcgtactattgtttagcacacgcacttggttgcgattatttgtacaacccctttgttatagatatacagcaat

SEQ ID NO: 11925 - DNA, 80 bp, synthetic construct
  misc_feature 1..80: note = Synthetic: >Sk512R-cand-20480-20559
  source 1..80: mol_type = other DNA
tataatagtgttttagatttaagtaaattttcatgtaagcataaagccactgtggtggttaatttgaaagacagctcagt

SEQ ID NO: 11926 - DNA, 80 bp, synthetic construct
  misc_feature 1..80: note = Synthetic: >AlphaMink-cand-15360-15439
  source 1..80: mol_type = other DNA
ctgattggtcaaatgttgaagattacaagctagctaataatgttaaagaatctttgaagttgtttgcagctgaaactatt

SEQ ID NO: 11927 - DNA, 80 bp, synthetic construct
  misc_feature 1..80: note = Synthetic: >MinkCoV1-cand-15390-15469
  source 1..80: mol_type = other DNA
tggtcaaatgttgaagattacaagctagctaatgttgttaaagaatctttgaagttgtttgcagctgaaactattaaagc

SEQ ID NO: 11928 - DNA, 80 bp, synthetic construct
  misc_feature 1..80: note = Synthetic: >Delta-cand-13270-13349
  source 1..80: mol_type = other DNA
acactcctggacttggcttatgctctacgtcatttgtcaacatctaaggatgttattcaagaaatcttgatcaccatgtg

SEQ ID NO: 11929 - DNA, 80 bp, synthetic construct
  misc_feature 1..80: note = Synthetic: >Sparrow-cand-11460-11539
  source 1..80: mol_type = other DNA
gaacccctgcagcctggaactcaaccagatgctgtaaaaagggccttccatgtgcataatgatactacctctggtatatt

SEQ ID NO: 11930 - DNA, 80 bp, synthetic construct
  misc_feature 1..80: note = Synthetic: >HKU17-cand-11440-11519
  source 1..80: mol_type = other DNA
gcccggctagaacccctgcagcctggtactcagccagatgctgtaaaaagggccttccatgtgcataatgatactacctc

SEQ ID NO: 11931 - DNA, 80 bp, synthetic construct
  misc_feature 1..80: note = Synthetic: >HKU5R-cand-7040-7119
  source 1..80: mol_type = other DNA
taagcgtattgactggaaatccactttacgcctgcttttccttacatgtacaactgggctattgttgtcttcactatatt

SEQ ID NO: 11932 - DNA, 80 bp, synthetic construct
  misc_feature 1..80: note = Synthetic: >Sb512-cand-5020-5099
  source 1..80: mol_type = other DNA
ttacccaaggaaggtgacactaattatgagaaaaatttcaatagagccattgctaagtttttaaaacttaagggttcatt

SEQ ID NO: 11933 - DNA, 80 bp, synthetic construct
  misc_feature 1..80: note = Synthetic: >Sk512R-cand-5010-5089
  source 1..80: mol_type = other DNA
attttacccacggaaggtgacactaattatgagaaaaatttcaatagagccattgctaagtttttaaaacttaagggttc

SEQ ID NO: 11934 - DNA, 80 bp, synthetic construct
  misc_feature 1..80: note = Synthetic: >MsbCoV1-cand-25240-25319
  source 1..80: mol_type = other DNA
tctgatcttaatttgcctaaagagcatttgaaagtggttgagtctcatctcgcacccattcattatgcaacgtcttcatt

SEQ ID NO: 11935 - DNA, 80 bp, synthetic construct
  misc_feature 1..80: note = Synthetic: >MbCoV1-cand-25250-25329
  source 1..80: mol_type = other DNA
gatcttaatttgcctaaagagcatttgaaagtggttgagtctcatctcgcacccattcattatgcaacgtcttcattggg

SEQ ID NO: 11936 - DNA, 80 bp, synthetic construct
  misc_feature 1..80: note = Synthetic: >HKU4R-cand-4040-4119
  source 1..80: mol_type = other DNA
aatgaagatgctgccttacttaaacgctgttataaggcgtttaataagcatactattgtagtaacaccgttaatatcagc

SEQ ID NO: 11937 - DNA, 80 bp, synthetic construct
  misc_feature 1..80: note = Synthetic: >Sb512-cand-4940-5019
  source 1..80: mol_type = other DNA
agaagtctaacccagttttgcctgctggtaattgtgtgactcttaagtgtgatggtttcatatcgttcacttttgtcatt

SEQ ID NO: 11938 - DNA, 80 bp, synthetic construct
  misc_feature 1..80: note = Synthetic: >Sk512R-cand-4930-5009
  source 1..80: mol_type = other DNA
acaagaagtctaacccagttttgcctgctggtaattgtgtgactcttaagtgtgatggtttcatatcgttcacttttgtc

SEQ ID NO: 11939 - DNA, 80 bp, synthetic construct
  misc_feature 1..80: note = Synthetic: >HKU4R-cand-4200-4279
  source 1..80: mol_type = other DNA
acaatgaggatatttataatacacttgcaacaccaccaaaaccagatggtcttgtttattcatttgaaggatggcgtggt

SEQ ID NO: 11940 - DNA, 80 bp, synthetic construct
  misc_feature 1..80: note = Synthetic: >HKU10R-cand-14550-14629
  source 1..80: mol_type = other DNA
tgtaatgaattagcccaagtgttaacagaggttgtctactctaatggtggcttttattttaaacctggtggtactacttc

SEQ ID NO: 11941 - DNA, 80 bp, synthetic construct
  misc_feature 1..80: note = Synthetic: >HKU5R-cand-28730-28809
  source 1..80: mol_type = other DNA
aatgatcaaacgccaagcgtatggtacaaattctggtgttgctatttatcataggtataaggcaggcaactataggaggc

SEQ ID NO: 11942 - DNA, 80 bp, synthetic construct
  misc_feature 1..80: note = Synthetic: >HghCoV1-cand-2840-2919
  source 1..80: mol_type = other DNA
aatgatgaaattcatgaaattgacgctgttagaaccgttacagttgagtataacatacatcctgttttggatactcttct

SEQ ID NO: 11943 - DNA, 80 bp, synthetic construct
  misc_feature 1..80: note = Synthetic: >MbCoV1-cand-9690-9769
  source 1..80: mol_type = other DNA
tataattcaactcttcaagctggtctgcgtaaatttgcgcagccttcaggtgttattgaacattgcattgtgcgcgttag

SEQ ID NO: 11944 - DNA, 80 bp, synthetic construct
  misc_feature 1..80: note = Synthetic: >MsbCoV1-cand-20400-20479
  source 1..80: mol_type = other DNA
actaagaagatggttacccactgatgctgttatagttgacaatgatgtgaatgattatgttagtgacgctgatattagtg

SEQ ID NO: 11945 - DNA, 80 bp, synthetic construct
  misc_feature 1..80: note = Synthetic: >MbCoV1-cand-20420-20499
  source 1..80: mol_type = other DNA
tggttacccactgatgctgttatagttgacaatgatgtgaatgattatgttagtgacgctgatattagtgttactggtga

SEQ ID NO: 11946 - DNA, 80 bp, synthetic construct
  misc_feature 1..80: note = Synthetic: >BetaSp-cand-21490-21569
  source 1..80: mol_type = other DNA
cctataactaagaatataggagagtacaatgttagtaaagatggcttctttacgtatatttgtcatttaatccgttccaa

SEQ ID NO: 11947 - DNA, 80 bp, synthetic construct
  misc_feature 1..80: note = Synthetic: >Delta-cand-13110-13189
  source 1..80: mol_type = other DNA
gcagtgtgcagctaaagtcttcgaaatcgaggaggaatgctacaacgctcttagtacagagctttatactactgatgata

SEQ ID NO: 11948 - DNA, 80 bp, synthetic construct
  misc_feature 1..80: note = Synthetic: >Quail-cand-18340-18419
  source 1..80: mol_type = other DNA
tccaaagtatttactgtgtcaattgacaatcaacaaattagattcatgctctggcatgatgagcaagttaggacttgcta

SEQ ID NO: 11949 - DNA, 80 bp, synthetic construct
  misc_feature 1..80: note = Synthetic: >BetaSp-cand-21250-21329
  source 1..80: mol_type = other DNA
ttgaatactacaacgctggctgtacctgcaaatatgagagtcttgcacttaggagcaggctcagataaaggtgttgcacc

SEQ ID NO: 11950 - DNA, 80 bp, synthetic construct
  misc_feature 1..80: note = Synthetic: >HghCoV1-cand-27090-27169
  source 1..80: mol_type = other DNA
actacgttaggaacacctatattggtgttcattgttgtagtgtctataatttggctagtggatcgtatccgcttttgcct

SEQ ID NO: 11951 - DNA, 80 bp, synthetic construct
  misc_feature 1..80: note = Synthetic: >HKU31-cand-27220-27299
  source 1..80: mol_type = other DNA
gaacacctatattggtgttcattgttgtagtgtttataatttggctagtggatcgtatccgcttttgcctaatgttaaaa

SEQ ID NO: 11952 - DNA, 80 bp, synthetic construct
  misc_feature 1..80: note = Synthetic: >HKU5R-cand-1770-1849
  source 1..80: mol_type = other DNA
ggtactacttctagtatcgaagaacttcgtgacctttgccgtaacgcaacgttcgaaaaggtccgaaactatttaacacc

SEQ ID NO: 11953 - DNA, 80 bp, synthetic construct
  misc_feature 1..80: note = Synthetic: >Sb512-cand-19400-19479
  source 1..80: mol_type = other DNA
actagaagattatggttttgaacatgttgtgtttggtgatgtttctaaaaccacattgggtggtttgcatttacttatat

SEQ ID NO: 11954 - DNA, 80 bp, synthetic construct
  misc_feature 1..80: note = Synthetic: >BtSk_AlphaCoV-cand-24950-25029
  source 1..80: mol_type = other DNA
gcgttattaatttatgcacccattttaatattttgtggtgcatacttggacgcttttatagtagtcgcaacattgacttc

SEQ ID NO: 11955 - DNA, 80 bp, synthetic construct
  misc_feature 1..80: note = Synthetic: >BM48_31-cand-29070-29149
  source 1..80: mol_type = other DNA
gtgtaacattagggaggactggaaagagccaccacatagtcaccgaggccacgcggagtacgatcgagggtacagtgact

SEQ ID NO: 11956 - DNA, 80 bp, synthetic construct
  misc_feature 1..80: note = Synthetic: >SARSCoV-cand-29660-29739
  source 1..80: mol_type = other DNA
tcaatgtgtaacattagggaggacttgaaagagccaccacattttcatcgaggccacgcggagtacgatcgagggtacag

SEQ ID NO: 11957 - DNA, 80 bp, synthetic construct
  misc_feature 1..80: note = Synthetic: >AcCoV_JC34-cand-12850-12929
  source 1..80: mol_type = other DNA
ctgtgacgccatggttgagaaaggtcttataggtgttgtcacacttgataaccaggacctcaatggtaacttctatgact

SEQ ID NO: 11958 - DNA, 80 bp, synthetic construct
  misc_feature 1..80: note = Synthetic: >Lucheng19-cand-13200-13279
  source 1..80: mol_type = other DNA
gacgcaatggttgaaaaaggtctaataggtgtggtcacacttgataaccaggacctcaatggtaacttctatgacttcgg

SEQ ID NO: 11959 - DNA, 80 bp, synthetic construct
  misc_feature 1..80: note = Synthetic: >SEAC-cand-23800-23879
  source 1..80: mol_type = other DNA
atcatgctgtgattgtagaggaactaaacttcaatcatacgagattgaaaaggtccacgtccaataatgtttggtggact

SEQ ID NO: 11960 - DNA, 80 bp, synthetic construct
  misc_feature 1..80: note = Synthetic: >HKU5-cand-8240-8319
  source 1..80: mol_type = other DNA
ttcctatgttaatagcttcatttctctttttggcgtgaatcgtgacaagttggataaacttgttgctaccgcccgcgact

SEQ ID NO: 11961 - DNA, 80 bp, synthetic construct
  misc_feature 1..80: note = Synthetic: >HKU5R-cand-8240-8319
  source 1..80: mol_type = other DNA
ctatgttaatagcttcatttctctttttggcgttaatcgcgacaagttggataaacttgttgctactgcccgtgactgcg

SEQ ID NO: 11962 - DNA, 80 bp, synthetic construct
  misc_feature 1..80: note = Synthetic: >HKU15-cand-13050-13129
  source 1..80: mol_type = other DNA
cgcactgtggcaggagtgtctataattagcaccatgactaacaggcagtaccatcaaaagatgctgaaatctatttcact

SEQ ID NO: 11963 - DNA, 80 bp, synthetic construct
  misc_feature 1..80: note = Synthetic: >BtSk_AlphaCoV-cand-19030-19109
  source 1..80: mol_type = other DNA
gtttgcacactttttgtcaatagtgttcctggtgcttttgagcgctttactgttactaagaatgcagtgctcatttcact

SEQ ID NO: 11964 - DNA, 80 bp, synthetic construct
  misc_feature 1..80: note = Synthetic: >Sb512-cand-19080-19159
  source 1..80: mol_type = other DNA
tgtacactttttgataatagtgttcctggtgcttttgagcgttttactgttactaagaatgcagtgctcatttcacttac

SEQ ID NO: 11965 - DNA, 80 bp, synthetic construct
  misc_feature 1..80: note = Synthetic: >BetaSp-cand-5240-5319
  source 1..80: mol_type = other DNA
tgtttgtgctggtgttagagttgttaaatattttgagtgccctggcggtatatttatatgcagtcagggttcagattttg

SEQ ID NO: 11966 - DNA, 80 bp, synthetic construct
  misc_feature 1..80: note = Synthetic: >HKU24-cand-4920-4999
  source 1..80: mol_type = other DNA
tggtgttagagttgttaaatattttgagtgccccggcggtatatctatatgcagtcagggttcggattttggatatgtac

SEQ ID NO: 11967 - DNA, 80 bp, synthetic construct
  misc_feature 1..80: note = Synthetic: >HKU5R-cand-6800-6879
  source 1..80: mol_type = other DNA
cactgcgatggggaaagctttaggtagaaggactcgtaatgtaattactaatactggcattattggacggggttttgctc

SEQ ID NO: 11968 - DNA, 80 bp, synthetic construct
  misc_feature 1..80: note = Synthetic: >Sb512-cand-2940-3019
  source 1..80: mol_type = other DNA
caaaggtgttgttgcatcttgctttaagaagaagggtggcggtgttgttaccatttctgacgaagttcaagttcgtacta

SEQ ID NO: 11969 - DNA, 80 bp, synthetic construct
  misc_feature 1..80: note = Synthetic: >Sk512R-cand-2930-3009
  source 1..80: mol_type = other DNA
tggcaaaggtgttgttgcatcttgctttaagaagaagggtggcggtgttgttaccatttctgacgaagttcaagttcgta

SEQ ID NO: 11970 - DNA, 80 bp, synthetic construct
  misc_feature 1..80: note = Synthetic: >HKU4R-cand-4440-4519
  source 1..80: mol_type = other DNA
ctgatgttattgcagctgctaatggctgctcaggtatttgtgctatgccttttggctacgttacgcatggacttgatttg

SEQ ID NO: 11971 - DNA, 80 bp, synthetic construct
  misc_feature 1..80: note = Synthetic: >HKU8R-cand-14890-14969
  source 1..80: mol_type = other DNA
tggtttctatatgaagcctggtggtactacatctggtgatgccactacagcctatgctaattctgttttcaacatattcc

SEQ ID NO: 11972 - DNA, 80 bp, synthetic construct
  misc_feature 1..80: note = Synthetic: >HKU15-cand-8240-8319
  source 1..80: mol_type = other DNA
gcgactttatagtcaagtgtccaatacagggtattcagctaaatgtccaatcagttaagatggtaggagctctcctccag

SEQ ID NO: 11973 - DNA, 80 bp, synthetic construct
  misc_feature 1..80: note = Synthetic: >HKU5R-cand-28010-28089
  source 1..80: mol_type = other DNA
ttgtgtgtctagcaatccttacggctattcgattatgtgtgcagtgtgtttctggttgtcatacactagtatttctacca

SEQ ID NO: 11974 - DNA, 80 bp, synthetic construct
  misc_feature 1..80: note = Synthetic: >BtRf_AlphaCoV-cand-17930-18009
  source 1..80: mol_type = other DNA
ctgtaatgtagatatgtatcctgagttttctattgtctgcaggtttgacacacgctgtagatcacatttgtcactggaag

SEQ ID NO: 11975 - DNA, 80 bp, synthetic construct
  misc_feature 1..80: note = Synthetic: >SEAC-cand-18120-18199
  source 1..80: mol_type = other DNA
ttttggaactgtaatgtagatatgtatcctgagttttctattgtctgcaggtttgacacacgctgtagatcacatttgtc

SEQ ID NO: 11976 - DNA, 80 bp, synthetic construct
  misc_feature 1..80: note = Synthetic: >HKU10R-cand-26060-26139
  source 1..80: mol_type = other DNA
ctgtgttaagtggtacactcctagtggaaggcattaaggttgctactggtgtgcaggtaaatcaattacctacgtacatc

SEQ ID NO: 11977 - DNA, 80 bp, synthetic construct
  misc_feature 1..80: note = Synthetic: >Sk512R-cand-25840-25919
  source 1..80: mol_type = other DNA
ctgtgttgtggatcatgtatttcgttaacagtgtcaggttgtggcgacgcacccattcttggtggtccttcaatcctgaa

SEQ ID NO: 11978 - DNA, 80 bp, synthetic construct
  misc_feature 1..80: note = Synthetic: >AlphaSp-cand-26090-26169
  source 1..80: mol_type = other DNA
ggattatgtactttgttaacagtatcaggttgtggcgacgcacccattcttggtggtccttcaatcctgaaacggactcc

SEQ ID NO: 11979 - DNA, 80 bp, synthetic construct
  misc_feature 1..80: note = Synthetic: >BetaSp-cand-25420-25499
  source 1..80: mol_type = other DNA
tcagaattacaattataggttggaccagtccgctacttcttgtcaattgtattatggcattcctgccaataatgtaacag

SEQ ID NO: 11980 - DNA, 80 bp, synthetic construct
  misc_feature 1..80: note = Synthetic: >MinkCoV1-cand-19110-19189
  source 1..80: mol_type = other DNA
ggtggtatgcatttgttaatctcacaagtgcgtttgtccaagatgggcttgttttctgtgcaagaatttatgactaacag

SEQ ID NO: 11981 - DNA, 80 bp, synthetic construct
  misc_feature 1..80: note = Synthetic: >Alpha2-cand-19070-19149
  source 1..80: mol_type = other DNA
gttaggtggtatgcacttgttaatatcacaagtgcgcttgtcaaagatgggcttgttttctgtgcaagaatttatgacta

SEQ ID NO: 11982 - DNA, 80 bp, synthetic construct
  misc_feature 1..80: note = Synthetic: >Sb512-cand-4780-4859
  source 1..80: mol_type = other DNA
ggtgatgctaagttttatgatttgacaccttctatggttcagtcacttcaggttacaaggttggtctcttttacaaacag

SEQ ID NO: 11983 - DNA, 80 bp, synthetic construct
  misc_feature 1..80: note = Synthetic: >MN548285-cand-12360-12439
  source 1..80: mol_type = other DNA
gggtagcagtgaggctcggctgataccccttgctagtggatgtgatcctgatgttgtgaagcgagcctttgatgtttgta

SEQ ID NO: 11984 - DNA, 80 bp, synthetic construct
  misc_feature 1..80: note = Synthetic: >MN517816-cand-22330-22409
  source 1..80: mol_type = other DNA
gtagtaaatagtgttggtcagaaagaagacatggaacttttacacttctattcttctactaaaccaaaaggttttgatac

SEQ ID NO: 11985 - DNA, 80 bp, synthetic construct
  misc_feature 1..80: note = Synthetic: >MT114542-cand-21340-21419
  source 1..80: mol_type = other DNA
tacagttatggtgaaattccatttggcataactgatggaccacggtactgttatgtgctctataatggcacggctcttaa

SEQ ID NO: 11986 - DNA, 80 bp, synthetic construct
  misc_feature 1..80: note = Synthetic: >MN531554-cand-20810-20889
  source 1..80: mol_type = other DNA
tacgtatttctgctatgaaaaatggttctctgttttataattcaacaattagtgtatttaaataccctagatttatgtca

SEQ ID NO: 11987 - DNA, 80 bp, synthetic construct
  misc_feature 1..80: note = Synthetic: >MN128086-cand-4970-5049
  source 1..80: mol_type = other DNA
tgtacacgcgtttctcccttaagagtgaaagttctttacctgttgctactaaaaagagcaagggtaaaggtaaagtagta

SEQ ID NO: 11988 - DNA, 80 bp, synthetic construct
  misc_feature 1..80: note = Synthetic: >MN531554-cand-4890-4969
  source 1..80: mol_type = other DNA
tactcaagccgtaggtaaggcttttgataatcttgctaaggatagaaaatatggaaggaggtcgccttacattacagcaa

SEQ ID NO: 11989 - DNA, 80 bp, synthetic construct
  misc_feature 1..80: note = Synthetic: >MT040335-cand-25060-25139
  source 1..80: mol_type = other DNA
gaaattgaccgcctcaatgaggttgccaaaaatttgaatgaatcactcattgacctacaagagcttggaaaatatgagca

SEQ ID NO: 11990 - DNA, 80 bp, synthetic construct
  misc_feature 1..80: note = Synthetic: >MN128087-cand-18050-18129
  source 1..80: mol_type = other DNA
gaacccaattgtacccaacgtcaaacagtttaattacgactacagccaacacaaagataaatttgttgacggtctttgta

SEQ ID NO: 11991 - DNA, 80 bp, synthetic construct
  misc_feature 1..80: note = Synthetic: >MN517817-cand-18050-18129
  source 1..80: mol_type = other DNA
gaacccaattgtacccaatgtcaagcaatttaattatgactatagtcaacacaaagataaatttgttgacggtctttgta

SEQ ID NO: 11992 - DNA, 80 bp, synthetic construct
  misc_feature 1..80: note = Synthetic: >MT114541-cand-28320-28399
  source 1..80: mol_type = other DNA
gaagtaccttgtacatcacaacgaaccaaatcctatctctaccattaggagcagaaatttattgtgatgatattgaagga

SEQ ID NO: 11993 - DNA, 80 bp, synthetic construct
  misc_feature 1..80: note = Synthetic: >NC_010800-cand-25910-25989
  source 1..80: mol_type = other DNA
gaatttatctgagagaaggattagattgtgtttactttcttaacaaagcaggacaagcagagccttgttccgcgtgtacc

SEQ ID NO: 11994 - DNA, 80 bp, synthetic construct
  misc_feature 1..80: note = Synthetic: >AJ311317-cand-3280-3359
  source 1..80: mol_type = other DNA
gacaatgactgaacaagtcgttgtagaagatcaagaactacctgttgttgaacaagatcaggatgtagttgtttatacac

SEQ ID NO: 11995 - DNA, 80 bp, synthetic construct
  misc_feature 1..80: note = Synthetic: >NC_028806-cand-830-909
  source 1..80: mol_type = other DNA
gacattcctcataagttgtcaaactgtgctattagacatgtagcaccgccagtcaaaaagaactctaaaatagttctgtc

SEQ ID NO: 11996 - DNA, 80 bp, synthetic construct
  misc_feature 1..80: note = Synthetic: >M95169-cand-11770-11849
  source 1..80: mol_type = other DNA
gggtgtcaaggttgaggttgtttacttgtattttataaagaatacaaggtcgattgttaggggtatggtacttggtgcta

SEQ ID NO: 11997 - DNA, 80 bp, synthetic construct
  misc_feature 1..80: note = Synthetic: >MT114541-cand-2670-2749
  source 1..80: mol_type = other DNA
ggtaaaattgtgcagagaatgtacaataaaatgggtggtggtgacaaaacagtatcatttgcagaggaagtagacgttca

SEQ ID NO: 11998 - DNA, 80 bp, synthetic construct
  misc_feature 1..80: note = Synthetic: >MT114544-cand-2730-2809
  source 1..80: mol_type = other DNA
ggtatgatcgtacagaaaatgtacaataaaatgggtggtggtgacaaaacagtatcatttgcagaagaagtagatgttca

SEQ ID NO: 11999 - DNA, 80 bp, synthetic construct
  misc_feature 1..80: note = Synthetic: >MT114540-cand-26640-26719
  source 1..80: mol_type = other DNA
ggtgattactcaacagatgcaagaactgacaatttgagtgagcaagaaaaattattacatatggtataactaaacttcta

SEQ ID NO: 12000 - DNA, 80 bp, synthetic construct
  misc_feature 1..80: note = Synthetic: >MT114538-cand-810-889
  source 1..80: mol_type = other DNA
tgctttgacactcttcattttattgctgctactcttaagtgcccatgtggttctgaaagtagtggtgttggagattggac

SEQ ID NO: 12001 - DNA, 80 bp, synthetic construct
  misc_feature 1..80: note = Synthetic: >LC088095-cand-25440-25519
  source 1..80: mol_type = other DNA
gtttaatccctgcttggattacttggcttactttaggttttagtttgtttagtatattaataagtggtgtaaatattata

SEQ ID NO: 12002 - DNA, 80 bp, synthetic construct
  misc_feature 1..80: note = Synthetic: >SBB-041-cand-10750-10829
  source 1..80: mol_type = other DNA
aggtgtttttgattcattggctttatcagtgcggcttattggtattggtggtgagaagacaattaaaatttcttctgttc

SEQ ID NO: 12003 - DNA, 80 bp, synthetic construct
  misc_feature 1..80: note = Synthetic: >SBB-747-cand-10310-10389
  source 1..80: mol_type = other DNA
gttcattggaggatgagcatacaccatatgatattggacgccagatgttaggagtgaaattgcaaggtaaagtacagtct

SEQ ID NO: 12004 - DNA, 80 bp, synthetic construct
  misc_feature 1..80: note = Synthetic: >SBB-788-cand-10320-10399
  source 1..80: mol_type = other DNA
ggatgagcatacaccatacgacattggacgccagatgttaggagtgaaattgcaaggtaaagtacagtctgcatttaaat

SEQ ID NO: 12005 - DNA, 80 bp, synthetic construct
  misc_feature 1..80: note = Synthetic: >SBB-024-cand-11590-11669
  source 1..80: mol_type = other DNA
agagattacacaagaaaacactgaatcgcttgcatggcctttgtttttaaattgtgaacgcattgttaaattgcaaaaca

SEQ ID NO: 12006 - DNA, 80 bp, synthetic construct
  misc_feature 1..80: note = Synthetic: >SBB-122-cand-11600-11679
  source 1..80: mol_type = other DNA
caagaaaacactgaatcgcttgcatggcctttgtttttaaattgtgaacgcattgttaaattgcaaaacaatgaaattat

SEQ ID NO: 12007 - DNA, 80 bp, synthetic construct
  misc_feature 1..80: note = Synthetic: >SBB-130-cand-11600-11679
  source 1..80: mol_type = other DNA
gaaaacactgaatcgcttgcatggcctttgtttttaaattgtgaacgcattgttaaattgcaaaacaatgaaattatgcc

SEQ ID NO: 12008 - DNA, 80 bp, synthetic construct
  misc_feature 1..80: note = Synthetic: >SBB-726-cand-2960-3039
  source 1..80: mol_type = other DNA
ggttgggtgaagagagtgctgaagagagtgtgtcagacattagtgtgtctactgcttttagcggttacacaagggttgct

SEQ ID NO: 12009 - DNA, 80 bp, synthetic construct
  misc_feature 1..80: note = Synthetic: >SBB-747-cand-2950-3029
  source 1..80: mol_type = other DNA
gatgatcagtggttaggtgaagagagtgctgaagagagtgtgtcagacattagtgtgtctactgcttttagcggttacac

SEQ ID NO: 12010 - DNA, 80 bp, synthetic construct
  misc_feature 1..80: note = Synthetic: >SBB-797-cand-2960-3039
  source 1..80: mol_type = other DNA
ggttaggtgaagagagtgctgaagagagtgtgtcagacattagtgtgtctactgcttttagcggttacacaaagattgct

SEQ ID NO: 12011 - DNA, 80 bp, synthetic construct
  misc_feature 1..80: note = Synthetic: >SBB-010-cand-23520-23599
  source 1..80: mol_type = other DNA
ttaaacaagctcaatattagcgagcaaattaaaactctcaatgtgattgcctacaatgtatcaaacatgaaagttgaagt

SEQ ID NO: 12012 - DNA, 80 bp, synthetic construct
  misc_feature 1..80: note = Synthetic: >SBB-041-cand-23510-23589
  source 1..80: mol_type = other DNA
caagctcaatattagcgagcaaattaaaaccctcaatgtgattgcctacaatgtatcaaacatgaaagttgaagtggaaa

SEQ ID NO: 12013 - DNA, 80 bp, synthetic construct
  misc_feature 1..80: note = Synthetic: >SBB-053-cand-23280-23359
  source 1..80: mol_type = other DNA
gctaatctgtcttactggcaatggtcaccacgcaatgtctacaaaccggaaaatcttacagctgctaatgttattgaagt

SEQ ID NO: 12014 - DNA, 80 bp, synthetic construct
  misc_feature 1..80: note = Synthetic: >SBB-120-cand-23290-23369
  source 1..80: mol_type = other DNA
atctctcttactggcaatggtcaccacgcaatgtctacaaaccagaaaatcttacagctgctaatgttattgaagtgaca

SEQ ID NO: 12015 - DNA, 80 bp, synthetic construct
  misc_feature 1..80: note = Synthetic: >SBB-010-cand-26560-26639
  source 1..80: mol_type = other DNA
ccttctcaattaaatccacaagcatccacatttcaaccagctcaaagcgaagttgaagtggtggaaatgatcaatgaagt

SEQ ID NO: 12016 - DNA, 80 bp, synthetic construct
  misc_feature 1..80: note = Synthetic: >SBB-053-cand-26550-26629
  source 1..80: mol_type = other DNA
tccttctcaattaaatccacaagcatccacctttcaaccagcccaaagcgaagttgaagtggtggaaatgatcaatgaag

SEQ ID NO: 12017 - DNA, 80 bp, synthetic construct
  misc_feature 1..80: note = Synthetic: >SBB-122-cand-570-649
  source 1..80: mol_type = other DNA
acttcttaggggagttagatcttgtctttggtggacctggtggtagcaccgtctacgtagacaatttcatgtgtggctct

SEQ ID NO: 12018 - DNA, 80 bp, synthetic construct
  misc_feature 1..80: note = Synthetic: >SBB-120-cand-580-659
  source 1..80: mol_type = other DNA
ggagttagatcttgtctttggtggacctggtggtggcaccgtctacgtagacaacttcatgtgtggctctgacggcaaac

SEQ ID NO: 12019 - DNA, 80 bp, synthetic construct
  misc_feature 1..80: note = Synthetic: >SBB-010-cand-570-649
  source 1..80: mol_type = other DNA
actttttaggggagttagatcttgtctttggtggacctggtggtaaaaccgtctacgtagacaatttcatgtgtggttct

SEQ ID NO: 12020 - DNA, 80 bp, synthetic construct
  misc_feature 1..80: note = Synthetic: >PRD-0038-cand-11600-11679
  source 1..80: mol_type = other DNA
ttgcctccaaagaatagtattgacgccttcaagctcaacataaagttgttgggaattggtggcaagccctgcatcaaagt

SEQ ID NO: 12021 - DNA, 80 bp, synthetic construct
  misc_feature 1..80: note = Synthetic: >SBB-120-cand-25490-25569
  source 1..80: mol_type = other DNA
acaagatggcttcagtcagctttcaagagcaaaacagaggccgcactggcaaagtcccactttcattataccaccctgtt

SEQ ID NO: 12022 - DNA, 80 bp, synthetic construct
  misc_feature 1..80: note = Synthetic: >SBB-122-cand-25470-25549
  source 1..80: mol_type = other DNA
agatggcttcagtcagctttcaagagcaaaacagaggccgcactggcagagtcccactttcattataccaccctgttatg

SEQ ID NO: 12023 - DNA, 80 bp, synthetic construct
  misc_feature 1..80: note = Synthetic: >GCS-227-cand-22770-22849
  source 1..80: mol_type = other DNA
gtaggtaccggcgttataacccctactaacttgtcttttataggtggtttgtattacacagcggtttccggtaacctgtt

SEQ ID NO: 12024 - DNA, 80 bp, synthetic construct
  misc_feature 1..80: note = Synthetic: >GCS-211-cand-22780-22859
  source 1..80: mol_type = other DNA
cggcgttataacccctactaacttgtcttttataggtggtttgtattacacagcggtttccggtaacctgttgggtttta

SEQ ID NO: 12025 - DNA, 80 bp, synthetic construct
  misc_feature 1..80: note = Synthetic: >SBB-130-cand-5230-5309
  source 1..80: mol_type = other DNA
acttagtcacgaagcctatgcatatgaaagcaaagaacaagatggcatccgtgtgcttaaattctcggataacaactgtt

SEQ ID NO: 12026 - DNA, 80 bp, synthetic construct
  misc_feature 1..80: note = Synthetic: >SBB-024-cand-5240-5319
  source 1..80: mol_type = other DNA
cacgaagcctatgcatatgaaagcaaagaacaagatggcatccgtgtgcttaaattctcggataacaactgttggattaa

SEQ ID NO: 12027 - DNA, 80 bp, synthetic construct
  misc_feature 1..80: note = Synthetic: >SBB-010-cand-16730-16809
  source 1..80: mol_type = other DNA
agaactatgttgccagtcgtgctttgggtttgcagatacagactgttgattcttctcaaggtagtgagtacgattatgtt

SEQ ID NO: 12028 - DNA, 80 bp, synthetic construct
  misc_feature 1..80: note = Synthetic: >SBB-130-cand-16730-16809
  source 1..80: mol_type = other DNA
actatgttgccagtcgtgctttgggtttgcagatacagactgttgactcctctcaaggtagtgagtacgattacgttata

SEQ ID NO: 12029 - DNA, 80 bp, synthetic construct
  misc_feature 1..80: note = Synthetic: >GCS-227-cand-8960-9039
  source 1..80: mol_type = other DNA
tacggtgttgctactgttgttgggtctttggttgtcaacaatctgtcatattttgttacaggcaactacataactatgtt

SEQ ID NO: 12030 - DNA, 80 bp, synthetic construct
  misc_feature 1..80: note = Synthetic: >GCS-211-cand-8960-9039
  source 1..80: mol_type = other DNA
cctatggtgttgctactgttgttgggtctttggttgtcaacaatctgtcatattttgttacaggcaactacataactatg

SEQ ID NO: 12031 - DNA, 80 bp, synthetic construct
  misc_feature 1..80: note = Synthetic: >GCS-227-cand-24770-24849
  source 1..80: mol_type = other DNA
cattttcactattgcgctcctagcattttgttgtcttaccactggttgttgtgggtgttgtggttgtgtgggtggatgtt

SEQ ID NO: 12032 - DNA, 80 bp, synthetic construct
  misc_feature 1..80: note = Synthetic: >GCS-211-cand-24780-24859
  source 1..80: mol_type = other DNA
ctattgcgctcctagcattttgttgtcttaccactggttgttgtgggtgttgtggttgtgtgggtggatgtttgtccagt

SEQ ID NO: 12033 - DNA, 80 bp, synthetic construct
  misc_feature 1..80: note = Synthetic: >GCS-227-cand-24370-24449
  source 1..80: mol_type = other DNA
ctccacgcaccatgtttcaacctcgtgtgcctactcctggcgactttgtagaaatcgctagttgtacagttgagcatgtt

SEQ ID NO: 12034 - DNA, 80 bp, synthetic construct
  misc_feature 1..80: note = Synthetic: >GCS-211-cand-24380-24459
  source 1..80: mol_type = other DNA
accatgtttcaacctcgtgtgcctactcctggcgactttgtagaaatcgctagttgcacagttgagcatgttaatatcac

SEQ ID NO: 12035 - DNA, 80 bp, synthetic construct
  misc_feature 1..80: note = Synthetic: >GCS-211-cand-1130-1209
  source 1..80: mol_type = other DNA
aagctggtgatgttgtgtttactagtgccaatgctggtactggtgttaagtactatcatggcattaccatccgccatgtt

SEQ ID NO: 12036 - DNA, 80 bp, synthetic construct
  misc_feature 1..80: note = Synthetic: >GCS-227-cand-1130-1209
  source 1..80: mol_type = other DNA
gctggtgatgttgtgtttactagtgccaatgctggtactggtgttaagtactatcatggcattaccatccgccatgttac

SEQ ID NO: 12037 - DNA, 80 bp, synthetic construct
  misc_feature 1..80: note = Synthetic: >SBB-053-cand-15550-15629
  source 1..80: mol_type = other DNA
gctaaggactctttgcgtctgtttgctgcagaaactgtcaaagctaaagaggaaagtgttaagtcttcctatgcttgtgc

SEQ ID NO: 12038 - DNA, 80 bp, synthetic construct
  misc_feature 1..80: note = Synthetic: >GCS-211-cand-2650-2729
  source 1..80: mol_type = other DNA
gcttttgagaagccaatgctttgctttaatggtgttttgcattacatgcacactgttgatagtaaagaatacgattgtgc

SEQ ID NO: 12039 - DNA, 80 bp, synthetic construct
  misc_feature 1..80: note = Synthetic: >GCS-227-cand-2650-2729
  source 1..80: mol_type = other DNA
ttttgagaaaccaatgctttgctttaatggtgttttgcattacatgtacactgttgatagtaaagaatacgattgtgcta

SEQ ID NO: 12040 - DNA, 80 bp, synthetic construct
  misc_feature 1..80: note = Synthetic: >GCS-211-cand-5770-5849
  source 1..80: mol_type = other DNA
ggtcttgagaatttgtggaataagtttatgattggtgatgttaaaggttttgtgcactttttgtatcatgttgcaggtgc

SEQ ID NO: 12041 - DNA, 80 bp, synthetic construct
  misc_feature 1..80: note = Synthetic: >GCS-227-cand-5770-5849
  source 1..80: mol_type = other DNA
tcttgaggatttgtggaataagtttatgattggtgatgttaaaggttttgtgcactttttgtatcatgttgcaggtgcta

SEQ ID NO: 12042 - DNA, 80 bp, synthetic construct
  misc_feature 1..80: note = Synthetic: >SBB-010-cand-17770-17849
  source 1..80: mol_type = other DNA
gcatctggtgacgctatcatgactcgatgtcttgctatacatgattgttttgtgaaaaatgtcgattggtctatcactta

SEQ ID NO: 12043 - DNA, 80 bp, synthetic construct
  misc_feature 1..80: note = Synthetic: >SBB-130-cand-17770-17849
  source 1..80: mol_type = other DNA
tctggtgacgctatcatgactcgatgtcttgctatacatgattgttttgtgaaaaatgtcgattggtctgtcacttaccc

SEQ ID NO: 12044 - DNA, 80 bp, synthetic construct
  misc_feature 1..80: note = Synthetic: >GCS-211-cand-9440-9519
  source 1..80: mol_type = other DNA
gttatagccaggatcaaaacgaccttctttatacaccgccaactgtatcttttaatagttcactacaagctggtctgcgc

SEQ ID NO: 12045 - DNA, 80 bp, synthetic construct
  misc_feature 1..80: note = Synthetic: >GCS-227-cand-9440-9519
  source 1..80: mol_type = other DNA
tatagccaggatcaacacgaccttctttatacaccgccaactgtatcttttaatagttcactacaagctggtctgcgcaa

SEQ ID NO: 12046 - DNA, 80 bp, synthetic construct
  misc_feature 1..80: note = Synthetic: >SBB-797-cand-25680-25759
  source 1..80: mol_type = other DNA
gcgtgatgaagttgttaaggctgtgaaggattggaattttgcaatttcaatcttcctcttgtttattacagttttgctac

SEQ ID NO: 12047 - DNA, 80 bp, synthetic construct
  misc_feature 1..80: note = Synthetic: >SBB-788-cand-25690-25769
  source 1..80: mol_type = other DNA
gttgttaaggctgtgaaggattggaattttgcaatttcaatcttcctcttgtttattacagttttgctacagtggggtta

SEQ ID NO: 12048 - DNA, 80 bp, synthetic construct
  misc_feature 1..80: note = Synthetic: >GCS-227-cand-27330-27409
  source 1..80: mol_type = other DNA
ggcgatgatgcttttgttgcagaaggtgcacagcacaagcaatttcctctagtggcctcactcgtaccaaatactgcagc

SEQ ID NO: 12049 - DNA, 80 bp, synthetic construct
  misc_feature 1..80: note = Synthetic: >GCS-211-cand-27330-27409
  source 1..80: mol_type = other DNA
tcggcgatgatgcttttgttgcagaaggtgcacagcacaagcaatttcctctagtggcctcactcgtaccaaatactgca

SEQ ID NO: 12050 - DNA, 80 bp, synthetic construct
  misc_feature 1..80: note = Synthetic: >GCS-211-cand-28210-28289
  source 1..80: mol_type = other DNA
tgtctcacaacatccccctggttcaaattggacttccagatgccaaagggcgcacgtgctgcttctatgtatcacattcc

SEQ ID NO: 12051 - DNA, 80 bp, synthetic construct
  misc_feature 1..80: note = Synthetic: >GCS-227-cand-28210-28289
  source 1..80: mol_type = other DNA
tctcacaacatccccctggttcacattggacttccggatgccaaagggcgcacgtgctgcttctatgtatcacattccta

SEQ ID NO: 12052 - DNA, 80 bp, synthetic construct
  misc_feature 1..80: note = Synthetic: >229E-cand-2570-2649
  source 1..80: mol_type = other DNA
tttaaccgttcttttagacgcttacaatgcatttttagacactgtggcttctattgttaagattggtggtaaagctttta

SEQ ID NO: 12053 - DNA, 80 bp, synthetic construct
  misc_feature 1..80: note = Synthetic: >229E-cand-2650-2729
  source 1..80: mol_type = other DNA
aaaagtatgcatttgacaaaccttatattgtggtatgtgatatcgtgtgtaaggttgagcataaaacagatgctgactgg

SEQ ID NO: 12054 - DNA, 80 bp, synthetic construct
  misc_feature 1..80: note = Synthetic: >229E-cand-2730-2809
  source 1..80: mol_type = other DNA
gttgagcttatgccacgtaatgacagaattaagtcttttagtacttttgaaaatgcatacttacctattgctgacccaac

SEQ ID NO: 12055 - DNA, 80 bp, synthetic construct
  misc_feature 1..80: note = Synthetic: >229E-cand-2820-2899
  source 1..80: mol_type = other DNA
attgaagaagttgaacttcttgatacggaatttgttgaaccaggttgtggtggtattttggcattgatagatgatcatgt

SEQ ID NO: 12056 - DNA, 80 bp, synthetic construct
  misc_feature 1..80: note = Synthetic: >229E-cand-2900-2979
  source 1..80: mol_type = other DNA
cttttataaaaaggatgacatttattatccatcaaatggtactaaaatattacccgttgcatttactaaagccgccggtg

SEQ ID NO: 12057 - DNA, 80 bp, synthetic construct
  misc_feature 1..80: note = Synthetic: >229E-cand-2980-3059
  source 1..80: mol_type = other DNA
gtaaagtttctttctctgacgcagtagaagttaaagatattccacctgtctatagagttaaactttgctttgagtttgag

SEQ ID NO: 12058 - DNA, 80 bp, synthetic construct
  misc_feature 1..80: note = Synthetic: >229E-cand-3060-3139
  source 1..80: mol_type = other DNA
gatgaaaaacttgtggatgtgtgtgaaaaggcaattggcgagaaaattaaacatgagggtgactgggatagtttttgtaa

SEQ ID NO: 12059 - DNA, 80 bp, synthetic construct
  misc_feature 1..80: note = Synthetic: >229E-cand-3140-3219
  source 1..80: mol_type = other DNA
aactattcaatcagcactttctgttgtttcaagttatgtaaacctacctacatattacatctacgatgagcaaggcggca

SEQ ID NO: 12060 - DNA, 80 bp, synthetic construct
  misc_feature 1..80: note = Synthetic: >229E-cand-3220-3299
  source 1..80: mol_type = other DNA
ctgatttgagtttgcctgttatgatttctgaatggcctctttccgaatctgacaaggaagaggaggttcaacaagagcaa

SEQ ID NO: 12061 - DNA, 80 bp, synthetic construct
  misc_feature 1..80: note = Synthetic: >229E-cand-3300-3379
  source 1..80: mol_type = other DNA
caagaagacactgtggtgcctgctgaagttgaagtcgttgttgaccaagttgaagaagttaatagtagttttgctattga

SEQ ID NO: 12062 - DNA, 80 bp, synthetic construct
  misc_feature 1..80: note = Synthetic: >229E-cand-3380-3459
  source 1..80: mol_type = other DNA
ggcagtggatgttaaacatgaggtgagtccttttgaaatgccatttgaagagttaaatggtttaaaaatactcaaacaaa

SEQ ID NO: 12063 - DNA, 80 bp, synthetic construct
  misc_feature 1..80: note = Synthetic: >229E-cand-3460-3539
  source 1..80: mol_type = other DNA
tggataataactgctgggttaactcagttatgttacagctacaattaacaggcatactcgatgatgactatgctatgcag

SEQ ID NO: 12064 - DNA, 80 bp, synthetic construct
  misc_feature 1..80: note = Synthetic: >229E-cand-3510-3589
  source 1..80: mol_type = other DNA
ggcatactcgatgatgactatgctatgcagttctttaaaattggcagagtttccaagatggttgaacgctgttacaatgc

SEQ ID NO: 12065 - DNA, 80 bp, synthetic construct
  misc_feature 1..80: note = Synthetic: >229E-cand-3590-3669
  source 1..80: mol_type = other DNA
tgagcaatgcatacgcggtgccatgggtgatgtaggcctttgtttgtatagactgcttaaagatttgcacactggtttta

SEQ ID NO: 12066 - DNA, 80 bp, synthetic construct
  misc_feature 1..80: note = Synthetic: >229E-cand-3670-3749
  source 1..80: mol_type = other DNA
tggttatggactacaaatgtagttgtaccagtggtagacttgaagaatcgggttccgtcttgttttgtacacctactaag

SEQ ID NO: 12067 - DNA, 80 bp, synthetic construct
  misc_feature 1..80: note = Synthetic: >229E-cand-3750-3829
  source 1..80: mol_type = other DNA
aaggcgtttccctatggtacttgtctaaattgtaatgcacctcgtatgtgtacaattaggcagttgcaaggtactataat

SEQ ID NO: 12068 - DNA, 80 bp, synthetic construct
  misc_feature 1..80: note = Synthetic: >AlphaCoV1-cand-28810-28889
  source 1..80: mol_type = other DNA
gagcagattgatgcctataagcgtccatcagaagtggctaaagaacagagacaaagaaaatctcgttctaagtctgctga

SEQ ID NO: 12069 - DNA, 80 bp, synthetic construct
  misc_feature 1..80: note = Synthetic: >AlphaCoV1-cand-28890-28969
  source 1..80: mol_type = other DNA
taagtcggcaaagcctgaggaattgtctgttactcttgtagctgaggcatatacagatgtgtttgatgacacacaggttg

SEQ ID NO: 12070 - DNA, 80 bp, synthetic construct
  misc_feature 1..80: note = Synthetic: >AlphaCoV1-cand-28970-29049
  source 1..80: mol_type = other DNA
agatgattgatgaggttacgaactaaacgagatgctcgttttcctccatgctgtatttattacagttttaatcttactac

SEQ ID NO: 12071 - DNA, 80 bp, synthetic construct
  misc_feature 1..80: note = Synthetic: >AlphaCoV1-cand-29050-29129
  source 1..80: mol_type = other DNA
taattggtagaatccaattattagaaagattattactcagtcatcttcttaatcttacaacagtcagtaatgttttaggt

SEQ ID NO: 12072 - DNA, 80 bp, synthetic construct
  misc_feature 1..80: note = Synthetic: >AlphaCoV1-cand-29130-29209
  source 1..80: mol_type = other DNA
gtgcctgacagtagtctgcgtgtaaattgcttacagcttttgaaaccagactgccttgattttaatatcttacataaagt

SEQ ID NO: 12073 - DNA, 80 bp, synthetic construct
  misc_feature 1..80: note = Synthetic: >AlphaCoV1-cand-29290-29369
  source 1..80: mol_type = other DNA
taggtgcattattttaactggaagaaaaatcaaaacagactacagccgcagagctatgtaaaataggaaaaacaaaaatg

SEQ ID NO: 12074 - DNA, 80 bp, synthetic construct
  misc_feature 1..80: note = Synthetic: >AlphaCoV1-cand-29370-29449
  source 1..80: mol_type = other DNA
caaatcatgattgttgtactccttgtaatgtgtatttttttggctaatggaattaaagctactggaagcatacaagaacc

SEQ ID NO: 12075 - DNA, 80 bp, synthetic construct
  misc_feature 1..80: note = Synthetic: >AlphaCoV1-cand-29450-29529
  source 1..80: mol_type = other DNA
tgtgcaacatgaccttcatgaacatccagtcctaacttgggaattattgcaacattttgtaggacacactctttacatta

SEQ ID NO: 12076 - DNA, 80 bp, synthetic construct
  misc_feature 1..80: note = Synthetic: >AlphaCoV1-cand-29530-29609
  source 1..80: mol_type = other DNA
caacacatcagatcttagcattaccgcttggatctcgtgttgagtgtgagagtgttgaaggtttcaattgcacatggcct

SEQ ID NO: 12077 - DNA, 80 bp, synthetic construct
  misc_feature 1..80: note = Synthetic: >AlphaCoV1-cand-29610-29689
  source 1..80: mol_type = other DNA
ggctttcaaaatcctgcacatgatcatattgatttctattttgatctttctaatcctttctattcctttgtagataattt

SEQ ID NO: 12078 - DNA, 80 bp, synthetic construct
  misc_feature 1..80: note = Synthetic: >AlphaCoV1-cand-29690-29769
  source 1..80: mol_type = other DNA
ttatatttctgtaggtgagggaaatcaaagaattaatctcagattagttggtgctgtgccaaaacaaaagagattaaatg

SEQ ID NO: 12079 - DNA, 80 bp, synthetic construct
  misc_feature 1..80: note = Synthetic: >AlphaCoV1-cand-29770-29849
  source 1..80: mol_type = other DNA
ttggttgtcatacatcagtttgctgttgaccttccatttggaactcagatataccatgacagggattttcaacaccctgt

SEQ ID NO: 12080 - DNA, 80 bp, synthetic construct
  misc_feature 1..80: note = Synthetic: >AlphaCoV1-cand-29850-29929
  source 1..80: mol_type = other DNA
taatggtagacatctagagtgtactcacagagtttactttgtgaagtactgtccacacaacctgcatggttattgcttta

SEQ ID NO: 12081 - DNA, 80 bp, synthetic construct
  misc_feature 1..80: note = Synthetic: >AlphaCoV1-cand-29930-30009
  source 1..80: mol_type = other DNA
atgagaagctgaaagtttatgacttgaagcaactcagaagcaagaaggtcttcgacaaaatcaaccaacatcataaaact

SEQ ID NO: 12082 - DNA, 80 bp, synthetic construct
  misc_feature 1..80: note = Synthetic: >AlphaCoV1-cand-30010-30089
  source 1..80: mol_type = other DNA
gagttataaggcaacccgatgtttaaaactggtttttccgaggaattactggtcatcgcgctgtctactcttgtacagaa

SEQ ID NO: 12083 - DNA, 80 bp, synthetic construct
  misc_feature 1..80: note = Synthetic: >AlphaSp-cand-24170-24249
  source 1..80: mol_type = other DNA
gtgatgatggggaacatattttctcactcacccaagctgcaccacagggtctgatgttcttacacacagttttagtacct

SEQ ID NO: 12084 - DNA, 80 bp, synthetic construct
  misc_feature 1..80: note = Synthetic: >AlphaSp-cand-24250-24329
  source 1..80: mol_type = other DNA
actggttttattaacgtcacagcagttacaggtttatgtgttgatgataacatagcaatgacgttacgtcagagtggttt

SEQ ID NO: 12085 - DNA, 80 bp, synthetic construct
  misc_feature 1..80: note = Synthetic: >AlphaSp-cand-24330-24409
  source 1..80: mol_type = other DNA
tgttttgtttgtgcaaaatggtaagtatcttgtgtcaccgaggaaaatgtttgaacctcgcagacctgaagttgctgact

SEQ ID NO: 12086 - DNA, 80 bp, synthetic construct
  misc_feature 1..80: note = Synthetic: >AlphaSp-cand-24410-24489
  source 1..80: mol_type = other DNA
ttgtgcaaataaaaacatgcctaattagttatgttaacatcaccaatgaacagttgcctgatattattccagattacgta

SEQ ID NO: 12087 - DNA, 80 bp, synthetic construct
  misc_feature 1..80: note = Synthetic: >AlphaSp-cand-24490-24569
  source 1..80: mol_type = other DNA
gacgttaataagacaatagatgacattctggccaacttacctaataatactgtgcctgatttgccacttgatgtcttcaa

SEQ ID NO: 12088 - DNA, 80 bp, synthetic construct
  misc_feature 1..80: note = Synthetic: >AlphaSp-cand-24570-24649
  source 1..80: mol_type = other DNA
tcaaacttttcttaatctcactggtgagattgcagaccttgaagcgcgatctgaatcccttaaaaacacatcagaagaac

SEQ ID NO: 12089 - DNA, 80 bp, synthetic construct
  misc_feature 1..80: note = Synthetic: >AlphaSp-cand-24650-24729
  source 1..80: mol_type = other DNA
ttagacagttgatccaaaatattaacaacacacttgtagacctacagtggcttaatagggttgagacctatattaagtgg

SEQ ID NO: 12090 - DNA, 80 bp, synthetic construct
  misc_feature 1..80: note = Synthetic: >AlphaSp-cand-24730-24809
  source 1..80: mol_type = other DNA
ccatggtacgtgtggttggctattgttatagctcttattttggttgtttcactgcttgtgttctgttgtatatctacagg

SEQ ID NO: 12091 - DNA, 80 bp, synthetic construct
  misc_feature 1..80: note = Synthetic: >AlphaSp-cand-24810-24889
  source 1..80: mol_type = other DNA
ttgttgcggttgttgcggttgtttgtgtggttcttgtttctcaggttgcgattgtcgtggaactaaacttcaacattacg

SEQ ID NO: 12092 - DNA, 80 bp, synthetic construct
  misc_feature 1..80: note = Synthetic: >AlphaSp-cand-24890-24969
  source 1..80: mol_type = other DNA
aaccaatagaaaaggttcacgtgcaataatgtttcttggtctgttccagtatactattgatactgcagttgagcacactg

SEQ ID NO: 12093 - DNA, 80 bp, synthetic construct
  misc_feature 1..80: note = Synthetic: >AlphaSp-cand-24970-25049
  source 1..80: mol_type = other DNA
tagaacatgctaacttgtcccaagaagaggctttgatgttggaagaaaacatcgttcctctgagacaagctacacatgtt

SEQ ID NO: 12094 - DNA, 80 bp, synthetic construct
  misc_feature 1..80: note = Synthetic: >AlphaSp-cand-25050-25129
  source 1..80: mol_type = other DNA
actggattcttgctcaccagtgtttttgtttacttctttgcactgtttaaggcttcaagctacaaacgtaatttgttgct

SEQ ID NO: 12095 - DNA, 80 bp, synthetic construct
  misc_feature 1..80: note = Synthetic: >AlphaSp-cand-25130-25209
  source 1..80: mol_type = other DNA
atttttagcacgtttgttggctttactattttatgcacccattttaatattttgtggtgcatatttggacgctgctatag

SEQ ID NO: 12096 - DNA, 80 bp, synthetic construct
  misc_feature 1..80: note = Synthetic: >AlphaSp-cand-25210-25289
  source 1..80: mol_type = other DNA
tagtcacaacattgacttttcgtctattgtttttgacctactattcatggcgttataaaacttataaatttctcatttac

SEQ ID NO: 12097 - DNA, 80 bp, synthetic construct
  misc_feature 1..80: note = Synthetic: >AlphaSp-cand-25290-25369
  source 1..80: mol_type = other DNA
aattcttccacacttatgtttttacatggccatgccaattattataatggcaggccttatgtaatgctcgaaggtggaag

SEQ ID NO: 12098 - DNA, 80 bp, synthetic construct
  misc_feature 1..80: note = Synthetic: >AlphaSp-cand-25370-25449
  source 1..80: mol_type = other DNA
ccattacgtcacattgggtactgatatagtaccattcgtcagtcgaaacaatctctatcttgccattcgtggtagcgctg

SEQ ID NO: 12099 - DNA, 80 bp, synthetic construct
  misc_feature 1..80: note = Synthetic: >Anlong-cand-22670-22749
  source 1..80: mol_type = other DNA
cgcagatagcttctactacttaagtaatagcgctgagccatgtgaccaacccgtgcttacttatgctggtataggcattt

SEQ ID NO: 12100 - DNA, 80 bp, synthetic construct
  misc_feature 1..80: note = Synthetic: >Anlong-cand-22750-22829
  source 1..80: mol_type = other DNA
gcgctgacggtagcattactaataatacagcaagacgtgctgcttcagatcctattagtcctgtaatttctggtaatatc

SEQ ID NO: 12101 - DNA, 80 bp, synthetic construct
  misc_feature 1..80: note = Synthetic: >Anlong-cand-22830-22909
  source 1..80: mol_type = other DNA
tctgtacctaccaatttcacattttctgtgcaagttgagtatattcagttgatgcttaaaccagtaaccgttgattgtag

SEQ ID NO: 12102 - DNA, 80 bp, synthetic construct
  misc_feature 1..80: note = Synthetic: >Anlong-cand-22910-22989
  source 1..80: mol_type = other DNA
tgtctatgtttgtaatggaaatccacgctgtttgcaattactagcacagtatgctagtgcttgccgaacaatagaacaag

SEQ ID NO: 12103 - DNA, 80 bp, synthetic construct
  misc_feature 1..80: note = Synthetic: >Anlong-cand-22990-23069
  source 1..80: mol_type = other DNA
ctttgcaattgagtgctaggcttgaatctgttgaggttaacagtatgatctccatttcacaacaggcgctcgatctcggt

SEQ ID NO: 12104 - DNA, 80 bp, synthetic construct
  misc_feature 1..80: note = Synthetic: >Anlong-cand-23070-23149
  source 1..80: mol_type = other DNA
gttattgacaactttaaccatgactttaatctgactaatgtactgcctgcaagtgtaggtggtcgttcagctgttgaaga

SEQ ID NO: 12105 - DNA, 80 bp, synthetic construct
  misc_feature 1..80: note = Synthetic: >Anlong-cand-23150-23229
  source 1..80: mol_type = other DNA
cttgttgtttgataaagttgtcacttcaggacttggtactgttgatgctgattataaggagtgtgcttcacgcacggcta

SEQ ID NO: 12106 - DNA, 80 bp, synthetic construct
  misc_feature 1..80: note = Synthetic: >Anlong-cand-23230-23309
  source 1..80: mol_type = other DNA
ataccgttgctgaagttggctgtgtgcagtactataatggtattatggtgctgccaggtgtagtagaccagtctctgctc

SEQ ID NO: 12107 - DNA, 80 bp, synthetic construct
  misc_feature 1..80: note = Synthetic: >Anlong-cand-23310-23389
  source 1..80: mol_type = other DNA
gctcaatattcagctgctttaacaggtgctatggttttgggtggtataactgcggctgcagctgtaccattctccattgc

SEQ ID NO: 12108 - DNA, 80 bp, synthetic construct
  misc_feature 1..80: note = Synthetic: >Anlong-cand-23390-23469
  source 1..80: mol_type = other DNA
ggttcagtctcgtctgaactatcttgcattgcagactgatgtgttgcagcgtaaccagcagcagttggctaactccttta

SEQ ID NO: 12109 - DNA, 80 bp, synthetic construct
  misc_feature 1..80: note = Synthetic: >Anlong-cand-23470-23549
  source 1..80: mol_type = other DNA
atgcagccatgggtaatattactgaagcttttggtcgtgttaacgacgccatagagcaaacgtcacatgctatttctact

SEQ ID NO: 12110 - DNA, 80 bp, synthetic construct
  misc_feature 1..80: note = Synthetic: >Anlong-cand-23540-23619
  source 1..80: mol_type = other DNA
tatttctactgttgcacaggcattggacaaggtgcagactgtagtcaatgaccaaggtatggctctctctcaacttacta

SEQ ID NO: 12111 - DNA, 80 bp, synthetic construct
  misc_feature 1..80: note = Synthetic: >Anlong-cand-23620-23699
  source 1..80: mol_type = other DNA
agcagttggcttctaactttcaggctatttcgtcttctattgaggatttgtataatagacttgacagagttgaagctgac

SEQ ID NO: 12112 - DNA, 80 bp, synthetic construct
  misc_feature 1..80: note = Synthetic: >Anlong-cand-23700-23779
  source 1..80: mol_type = other DNA
cagcaggttgacagacttatcacaggccgtttagcagcactaaatgcttttgtggcacagcagttgactaagtacacgga

SEQ ID NO: 12113 - DNA, 80 bp, synthetic construct
  misc_feature 1..80: note = Synthetic: >Anlong-cand-23780-23859
  source 1..80: mol_type = other DNA
tgtccgcgcttctagacagttagcacaggaaaagattaatgagtgtgttaaatcacagtcctttagatatggtttctgtg

SEQ ID NO: 12114 - DNA, 80 bp, synthetic construct
  misc_feature 1..80: note = Synthetic: >Anlong-cand-23860-23939
  source 1..80: mol_type = other DNA
gcaatggaacacatgtgttttcagttgtcaatgcggcacctgatggtatgatgttctttcactcagttttgcttcccact

SEQ ID NO: 12115 - DNA, 80 bp, synthetic construct
  misc_feature 1..80: note = Synthetic: >AvianCoV-cand-26600-26679
  source 1..80: mol_type = other DNA
ggtataagccaggtaaaggcggaagaaaaccagtcccagatgcgtggtacttctattacactggaacaggaccagccgct

SEQ ID NO: 12116 - DNA, 80 bp, synthetic construct
  misc_feature 1..80: note = Synthetic: >AvianCoV-cand-26680-26759
  source 1..80: mol_type = other DNA
gacctgaattggggtgattctcaagatggtatagtgtgggttgctgctaagggtgctgatgtaaaatctagatctaatca

SEQ ID NO: 12117 - DNA, 80 bp, synthetic construct
  misc_feature 1..80: note = Synthetic: >AvianCoV-cand-26760-26839
  source 1..80: mol_type = other DNA
gggtacaagagatcctgataagtttgaccaatatccactacgattttcagatggaggacctgatggtaatttccgttggg

SEQ ID NO: 12118 - DNA, 80 bp, synthetic construct
  misc_feature 1..80: note = Synthetic: >AvianCoV-cand-26840-26919
  source 1..80: mol_type = other DNA
acttcattcctctgaatcgtggtaggagtggaagatcaacagcagcttcatcagcagcatctagtagagcaccatctcgt

SEQ ID NO: 12119 - DNA, 80 bp, synthetic construct
  misc_feature 1..80: note = Synthetic: >AvianCoV-cand-26920-26999
  source 1..80: mol_type = other DNA
gaaggttcacgtggtcgtaggagtggagctgaagatgatcttattgctcgtgcagcaaagattattcaggaccagcaaaa

SEQ ID NO: 12120 - DNA, 80 bp, synthetic construct
  misc_feature 1..80: note = Synthetic: >AvianCoV-cand-27000-27079
  source 1..80: mol_type = other DNA
gaagggttctcgcattacaaaggcaaaggcagatgaaatggctcatcgccggtattgtaagcgtactattccacctggtt

SEQ ID NO: 12121 - DNA, 80 bp, synthetic construct
  misc_feature 1..80: note = Synthetic: >AvianCoV-cand-27080-27159
  source 1..80: mol_type = other DNA
atagagttgatcaagtctttggccctcgtactaaaggtaaggagggaaattttggtgatgacaagatgaatgaggaaggt

SEQ ID NO: 12122 - DNA, 80 bp, synthetic construct
  misc_feature 1..80: note = Synthetic: >AvianCoV-cand-27160-27239
  source 1..80: mol_type = other DNA
attaaggatgggcgtgttacagcaatgctcaaccttgtacctagcagccatgcttgtctttttggaagtagagtgacgcc

SEQ ID NO: 12123 - DNA, 80 bp, synthetic construct
  misc_feature 1..80: note = Synthetic: >AvianCoV-cand-27240-27319
  source 1..80: mol_type = other DNA
caagcttcaaccagatgggcttcacttgaaatttgaatttactactgtggtgccacgtgatgacccgcagtttgataatt

SEQ ID NO: 12124 - DNA, 80 bp, synthetic construct
  misc_feature 1..80: note = Synthetic: >AvianCoV-cand-27320-27399
  source 1..80: mol_type = other DNA
atgtaaaaatttgtgatcagtgtgttgatggtgtaggaacacgtccaaaagacgatgaaccaagaccaaagtcacgctca

SEQ ID NO: 12125 - DNA, 80 bp, synthetic construct
  misc_feature 1..80: note = Synthetic: >AvianCoV-cand-27400-27479
  source 1..80: mol_type = other DNA
agttcaagacctgctacaagaggaaattctccagcgccaagacaacagcgccaaaagaaggagaaaaagccaaagaagca

SEQ ID NO: 12126 - DNA, 80 bp, synthetic construct
  misc_feature 1..80: note = Synthetic: >AvianCoV-cand-27470-27549
  source 1..80: mol_type = other DNA
caaagaagcaggatgatgaagtggataaagcattgacctcagatgaggagaggaacaatgcacagctggaatttgatgat

SEQ ID NO: 12127 - DNA, 80 bp, synthetic construct
  misc_feature 1..80: note = Synthetic: >AvianCoV-cand-27550-27629
  source 1..80: mol_type = other DNA
gaacccaaagtgattaattggggtgattcagcacttggtgaaaatgaactttgaggctagatttccaacttaacataatg

SEQ ID NO: 12128 - DNA, 80 bp, synthetic construct
  misc_feature 1..80: note = Synthetic: >AvianCoV-cand-27630-27709
  source 1..80: mol_type = other DNA
gacgtgcgtatgttgctacattttatgtggcattgctgttgttattatttttttgcttttctctcaatcattatgggttt

SEQ ID NO: 12129 - DNA, 80 bp, synthetic construct
  misc_feature 1..80: note = Synthetic: >AvianCoV-cand-27710-27789
  source 1..80: mol_type = other DNA
tgattgtgattatgtgcagtatcttagttggtttcccttgttgtttgcagtttgttttctttctgtgcttattgttttta

SEQ ID NO: 12130 - DNA, 80 bp, synthetic construct
  misc_feature 1..80: note = Synthetic: >AvianCoV-cand-27790-27869
  source 1..80: mol_type = other DNA
ttctgctttattctttgttatatcgtagaagttcattattaaaggttaaggaagataggcatgtagcttgattacctaca

SEQ ID NO: 12131 - DNA, 80 bp, synthetic construct
  misc_feature 1..80: note = Synthetic: >BetaSp-cand-25820-25899
  source 1..80: mol_type = other DNA
aaacaaacaccagccattgtgggtgtaggacaacattgtcctggtgtgggcgttttggcagaccaatgtgcgccatccat

SEQ ID NO: 12132 - DNA, 80 bp, synthetic construct
  misc_feature 1..80: note = Synthetic: >BetaSp-cand-26060-26139
  source 1..80: mol_type = other DNA
gtaaatagcggtaccacatgtgccacggatttacagaaagcaaacactgaaatcatagtaggtgtttgtgttaaatatga

SEQ ID NO: 12133 - DNA, 80 bp, synthetic construct
  misc_feature 1..80: note = Synthetic: >BetaSp-cand-26140-26219
  source 1..80: mol_type = other DNA
cctttatggcatctcaggtcagggcatttttactgaggttaatgctacctattataatagttggcagaaccttctttatg

SEQ ID NO: 12134 - DNA, 80 bp, synthetic construct
  misc_feature 1..80: note = Synthetic: >BetaSp-cand-26460-26539
  source 1..80: mol_type = other DNA
gcccaagccgttggttcttgtaatctcactgtaggcagtggttattgcgtggactattcagctactcggcgtgccaagag

SEQ ID NO: 12135 - DNA, 80 bp, synthetic construct
  misc_feature 1..80: note = Synthetic: >BetaSp-cand-26540-26619
  source 1..80: mol_type = other DNA
agatttaaacactggttatcggcttactaactttgaacctttcgttcctactctcgtgaacgatagtgttgaatctgttg

SEQ ID NO: 12136 - DNA, 80 bp, synthetic construct
  misc_feature 1..80: note = Synthetic: >BtCoV_008_16-cand-13220-13299
  source 1..80: mol_type = other DNA
tgacatttttggtgatgattttagaacctatgaccttttggaatatgattttacagagcataaacttaagctcttttcta

SEQ ID NO: 12137 - DNA, 80 bp, synthetic construct
  misc_feature 1..80: note = Synthetic: >BtCoV_008_16-cand-13300-13379
  source 1..80: mol_type = other DNA
agtatttcaaacattggggtcaggtctatcatccaaactgtgtggattgctacgatgaacagtgtgttgttcattgtgca

SEQ ID NO: 12138 - DNA, 80 bp, synthetic construct
  misc_feature 1..80: note = Synthetic: >BtCoV_008_16-cand-13380-13459
  source 1..80: mol_type = other DNA
aattttaacacactgtttgccactactatacccttaacagcatttggacccctttgtcgcaaatgctggatagatggtgt

SEQ ID NO: 12139 - DNA, 80 bp, synthetic construct
  misc_feature 1..80: note = Synthetic: >BtCoV_008_16-cand-13460-13539
  source 1..80: mol_type = other DNA
accactggttactacagccggttaccattttaaacaactgggcatagtttggaataaggatctcaacgttcattctaata

SEQ ID NO: 12140 - DNA, 80 bp, synthetic construct
  misc_feature 1..80: note = Synthetic: >BtCoV_008_16-cand-13540-13619
  source 1..80: mol_type = other DNA
gacttactattaatgaactgttgcagttctgtgcagatcctgcactacttatagcctcttcacccgcactcgtggaccaa

SEQ ID NO: 12141 - DNA, 80 bp, synthetic construct
  misc_feature 1..80: note = Synthetic: >BtCoV_008_16-cand-13620-13699
  source 1..80: mol_type = other DNA
cgtaccgtctgtttctctgttgctgcgctcagtacaggtatgacatcacagacagtcaaaccaggacattttaataagga

SEQ ID NO: 12142 - DNA, 80 bp, synthetic construct
  misc_feature 1..80: note = Synthetic: >BtCoV_008_16-cand-13700-13779
  source 1..80: mol_type = other DNA
gttttacgacttccttaggggtcatggcttctttgatgaaggtgctgagttgactctcaagcactttttctttgcgcaaa

SEQ ID NO: 12143 - DNA, 80 bp, synthetic construct
  misc_feature 1..80: note = Synthetic: >BtCoV_008_16-cand-13780-13859
  source 1..80: mol_type = other DNA
ggggtgatgctgctattagagattttgatttctacaggtataatcgtaccactgtactagacatctgccaggctcgtgtt

SEQ ID NO: 12144 - DNA, 80 bp, synthetic construct
  misc_feature 1..80: note = Synthetic: >BtCoV_008_16-cand-13860-13939
  source 1..80: mol_type = other DNA
gtgtatcaaatagttcaacgctattttgatatctatgagggtggttgtatcaccgccaaggaagtggttgttaccaacct

SEQ ID NO: 12145 - DNA, 80 bp, synthetic construct
  misc_feature 1..80: note = Synthetic: >BtCoV_008_16-cand-13940-14019
  source 1..80: mol_type = other DNA
caataagagtgctggttttccctttaacaagtttggcaaagctggcctgtattatgaatctttgtcatatgatgagcagg

SEQ ID NO: 12146 - DNA, 80 bp, synthetic construct
  misc_feature 1..80: note = Synthetic: >BtCoV_008_16-cand-14020-14099
  source 1..80: mol_type = other DNA
atgagttatacgcctacacaaagcgtaatattctacccactatgacgcaacttaatcttaagtatgctatcagtggaaag

SEQ ID NO: 12147 - DNA, 80 bp, synthetic construct
  misc_feature 1..80: note = Synthetic: >BtCoV_008_16-cand-14100-14179
  source 1..80: mol_type = other DNA
gaacgtgcgcgcacagtgggaggtgtctccttgctttcgacaatgactacaagacagtatcaccagaaacatcttaagtc

SEQ ID NO: 12148 - DNA, 80 bp, synthetic construct
  misc_feature 1..80: note = Synthetic: >BtCoV_008_16-cand-14180-14259
  source 1..80: mol_type = other DNA
tattgtcaacacacgcggtgcgtctgttgttataggcactacaaagttttatggtggctgggataatatgcttaggacac

SEQ ID NO: 12149 - DNA, 80 bp, synthetic construct
  misc_feature 1..80: note = Synthetic: >BtCoV_008_16-cand-14260-14339
  source 1..80: mol_type = other DNA
ttatcggcgatgtggagaatcctaaccttatgggttgggattatcccaagtgtgacagggcattacctaatatgattaga

SEQ ID NO: 12150 - DNA, 80 bp, synthetic construct
  misc_feature 1..80: note = Synthetic: >BtCoV_008_16-cand-14340-14419
  source 1..80: mol_type = other DNA
atgatctctgccatgatattgggctccaaacatgttacgtgctgtaataccagtgacaggttttacagactttgtaacga

SEQ ID NO: 12151 - DNA, 80 bp, synthetic construct
  misc_feature 1..80: note = Synthetic: >BtCoV_008_16-cand-14420-14499
  source 1..80: mol_type = other DNA
gttagcacaagttttgacagaggtggtctactctaatggtgggttttatctaaaaccaggtggtactacatcaggtgatg

SEQ ID NO: 12152 - DNA, 80 bp, synthetic construct
  misc_feature 1..80: note = Synthetic: >Delta-cand-27000-27079
  source 1..80: mol_type = other DNA
tactactgacgcgtcttggtttcaggtgctcaaagctcaaaacaaaaaggctactcatcctcagtttcgtggcaatggag

SEQ ID NO: 12153 - DNA, 80 bp, synthetic construct
  misc_feature 1..80: note = Synthetic: >Delta-cand-27160-27239
  source 1..80: mol_type = other DNA
ccgattcctccatcctatgccttttattatactggcacaggtcccagaggaaatcttaagtatggtgaactccctcctaa

SEQ ID NO: 12154 - DNA, 80 bp, synthetic construct
  misc_feature 1..80: note = Synthetic: >Delta-cand-27240-27319
  source 1..80: mol_type = other DNA
tgataccccagcaaatgccactcgtgttacttgggttaagggttcgggagctgacacttctattaaacctcatgttgcca

SEQ ID NO: 12155 - DNA, 80 bp, synthetic construct
  misc_feature 1..80: note = Synthetic: >Delta-cand-27320-27399
  source 1..80: mol_type = other DNA
aacgcaaccccaacaatcctaaacatcagctgctacctctccgattcccaaccggagatggcccagctcaaggtttcaga

SEQ ID NO: 12156 - DNA, 80 bp, synthetic construct
  misc_feature 1..80: note = Synthetic: >Delta-cand-27400-27479
  source 1..80: mol_type = other DNA
gttgaccccttcaacgctcagagaggaagacctcaggagcgtggacagagtggcccaagatctcaatctgttaactccag

SEQ ID NO: 12157 - DNA, 80 bp, synthetic construct
  misc_feature 1..80: note = Synthetic: >Delta-cand-27480-27559
  source 1..80: mol_type = other DNA
aggcacaggctccaatcagcccaggaaacgcgaccaatctgcaccagctgcggtacgtcgtaagacccagcatcaagcta

SEQ ID NO: 12158 - DNA, 80 bp, synthetic construct
  misc_feature 1..80: note = Synthetic: >Delta-cand-27560-27639
  source 1..80: mol_type = other DNA
tacccaagcggactttacccaagggtaaaaccatttctcaggtatttggcaaccggtctcgtactggtgccaatgtcggc

SEQ ID NO: 12159 - DNA, 80 bp, synthetic construct
  misc_feature 1..80: note = Synthetic: >Delta-cand-27640-27719
  source 1..80: mol_type = other DNA
tctgcagacactgagaagacgggtatggctgatcctcgcatcatggctctagccagacatgtgcctggtgttcaggaaat

SEQ ID NO: 12160 - DNA, 80 bp, synthetic construct
  misc_feature 1..80: note = Synthetic: >Delta-cand-27720-27799
  source 1..80: mol_type = other DNA
gcttttcgctggccaccttgagagcaactttcaggcgaagggggcaattacccttaccttctcctactcaatcacagtca

SEQ ID NO: 12161 - DNA, 80 bp, synthetic construct
  misc_feature 1..80: note = Synthetic: >Delta-cand-27800-27879
  source 1..80: mol_type = other DNA
aggagggttctcctgactatgagagacttaaggatgcgctcaatacggtcgttaaccagacctatgagccacccaatctg

SEQ ID NO: 12162 - DNA, 80 bp, synthetic construct
  misc_feature 1..80: note = Synthetic: >Delta-cand-27880-27959
  source 1..80: mol_type = other DNA
ccatctcagaaacctaagagcaccaaacccaaaccaactaaggacaagaagcctgacaaacaagaccagtctaaaaagaa

SEQ ID NO: 12163 - DNA, 80 bp, synthetic construct
  misc_feature 1..80: note = Synthetic: >Delta-cand-27960-28039
  source 1..80: mol_type = other DNA
ggctgaaaaagctaaacccaaacagcagaaaaagaaacctaaaaaggctaactctgctgaggcagacaaagctaatgata

SEQ ID NO: 12164 - DNA, 80 bp, synthetic construct
  misc_feature 1..80: note = Synthetic: >Delta-cand-28040-28119
  source 1..80: mol_type = other DNA
aggatgaaacagcagacaaacaggattgggagtgggatgatgcttttgagataaagcttgaatcattctcgtaatgggaa

SEQ ID NO: 12165 - DNA, 80 bp, synthetic construct
  misc_feature 1..80: note = Synthetic: >Delta-cand-28120-28199
  source 1..80: mol_type = other DNA
atcaccagaccagtatacacaacactgtccagaatactcacattaaagcgtctgaggaatcagcagcgtagacatcaatc

SEQ ID NO: 12166 - DNA, 80 bp, synthetic construct
  misc_feature 1..80: note = Synthetic: >Delta-cand-28200-28279
  source 1..80: mol_type = other DNA
tatgtctgttatgaactgcaaacagtaatgcagattatatcaccattgactaccatacacaagtcagtggtacttcttag

SEQ ID NO: 12167 - DNA, 80 bp, synthetic construct
  misc_feature 1..80: note = Synthetic: >HKU1-cand-660-739
  source 1..80: mol_type = other DNA
ccttttggttttatgccatcttatgttcacaaatggtttcaattctgtaggttgtatattgaagagagtgatttaataat

SEQ ID NO: 12168 - DNA, 80 bp, synthetic construct
  misc_feature 1..80: note = Synthetic: >HKU1-cand-740-819
  source 1..80: mol_type = other DNA
ttcaaattttaaatttgatgattatgattttagtgtagaagatgcttatgctgaggttcatgctgagcctaaaggtaaat

SEQ ID NO: 12169 - DNA, 80 bp, synthetic construct
  misc_feature 1..80: note = Synthetic: >HKU1-cand-820-899
  source 1..80: mol_type = other DNA
attcacaaaaagcttatgctttacttagacaatatcgtggtattaaacccgtactttttgtagaccagtatggttgtgac

SEQ ID NO: 12170 - DNA, 80 bp, synthetic construct
  misc_feature 1..80: note = Synthetic: >HKU1-cand-900-979
  source 1..80: mol_type = other DNA
tattctggtaaattagcagattgtcttcaagcttatggtcattattctttgcaagatatgagacaaaagcagtctgtatg

SEQ ID NO: 12171 - DNA, 80 bp, synthetic construct
  misc_feature 1..80: note = Synthetic: >HKU1-cand-980-1059
  source 1..80: mol_type = other DNA
gcttgccaattgtgactttgatattgtagtggcttggcatgtagttcgtgattcacgatttgttatgcgcctgcagacta

SEQ ID NO: 12172 - DNA, 80 bp, synthetic construct
  misc_feature 1..80: note = Synthetic: >HKU1-cand-1060-1139
  source 1..80: mol_type = other DNA
tagctactatttgtggtattaaatatgttgcacaacctacagaagatgtagtagatggagatgtagttatacgtgaacct

SEQ ID NO: 12173 - DNA, 80 bp, synthetic construct
  misc_feature 1..80: note = Synthetic: >HKU1-cand-1140-1219
  source 1..80: mol_type = other DNA
gtacatttattatctgctgatgcaatagttttaaagcttcctagtttgatgaaagttatgactcatatggatgatttttc

SEQ ID NO: 12174 - DNA, 80 bp, synthetic construct
  misc_feature 1..80: note = Synthetic: >HKU1-cand-1220-1299
  source 1..80: mol_type = other DNA
tattaaatctatatataatgttgatttgtgtgattgtggttttgttatgcagtatggttatgtagattgttttaatgata

SEQ ID NO: 12175 - DNA, 80 bp, synthetic construct
  misc_feature 1..80: note = Synthetic: >HKU1-cand-1300-1379
  source 1..80: mol_type = other DNA
attgtgatttttatggttgggtttcaggtaatatgatggatggtttttcttgtccattgtgttgtacagtttatgactct

SEQ ID NO: 12176 - DNA, 80 bp, synthetic construct
  misc_feature 1..80: note = Synthetic: >HKU1-cand-1380-1459
  source 1..80: mol_type = other DNA
agcgaagttaaagcccaatcatctggtgttattcctgaaaatcctgtgttatttactaatagtactgatactgttaacca

SEQ ID NO: 12177 - DNA, 80 bp, synthetic construct
  misc_feature 1..80: note = Synthetic: >HKU1-cand-1460-1539
  source 1..80: mol_type = other DNA
tgattcttttaatttgtatggttattctgtcacaccatttggttcttgtatatattggtcgccgcgtcctggattgtgga

SEQ ID NO: 12178 - DNA, 80 bp, synthetic construct
  misc_feature 1..80: note = Synthetic: >HKU1-cand-1540-1619
  source 1..80: mol_type = other DNA
ttcctataattaaatcttcagtcaagtcttatgatgatttggtttattcaggtgtagtaggttgtaaatctattgttaaa

SEQ ID NO: 12179 - DNA, 80 bp, synthetic construct
  misc_feature 1..80: note = Synthetic: >HKU1-cand-1620-1699
  source 1..80: mol_type = other DNA
gaaactgctcttattactcatgcactttacttagattatgttcaatgtaagtgtggtaatcttgaacaaaatcatattct

SEQ ID NO: 12180 - DNA, 80 bp, synthetic construct
  misc_feature 1..80: note = Synthetic: >HKU1-cand-1700-1779
  source 1..80: mol_type = other DNA
tggcgttaataattcttggtgtaggcaactgttgcttaatagaggtgattataatatgcttctaaaaaatattgacttgt

SEQ ID NO: 12181 - DNA, 80 bp, synthetic construct
  misc_feature 1..80: note = Synthetic: >HKU1-cand-1780-1859
  source 1..80: mol_type = other DNA
ttgttaagcgtcgtgctgattttgcttgcaagtttgcagtttgtggagatggttttgtaccttttttactagatggttta

SEQ ID NO: 12182 - DNA, 80 bp, synthetic construct
  misc_feature 1..80: note = Synthetic: >HKU1-cand-1860-1939
  source 1..80: mol_type = other DNA
attccccgtagttattatctaattcagagtggtattttctttacatctttgatgtctcaattttcacaagaagtttctga

SEQ ID NO: 12183 - DNA, 80 bp, synthetic construct
  misc_feature 1..80: note = Synthetic: >HKU1-cand-7070-7149
  source 1..80: mol_type = other DNA
attttatggttttttgaagtggttgtttatttatgtttttagtttattacattttacaaatgataaaaccattttttata

SEQ ID NO: 12184 - DNA, 80 bp, synthetic construct
  misc_feature 1..80: note = Synthetic: >HKU1-cand-7150-7229
  source 1..80: mol_type = other DNA
ctacagaaatagcttctaagtttacttttaatttgttttgtttggctcttaaaaatgcttttcagacatttagatggagt

SEQ ID NO: 12185 - DNA, 80 bp, synthetic construct
  misc_feature 1..80: note = Synthetic: >HKU1-cand-7230-7309
  source 1..80: mol_type = other DNA
atatttataaaaggttttcttgttgtagccactgtgtttttgttttggtttaattttttgtatataaatgttatttttag

SEQ ID NO: 12186 - DNA, 80 bp, synthetic construct
  misc_feature 1..80: note = Synthetic: >HKU1-cand-7310-7389
  source 1..80: mol_type = other DNA
tgatttttatcttcctaatattagtgtttttcctatttttgtgggaagaattgttatgtggataaaggctacttttggtt

SEQ ID NO: 12187 - DNA, 80 bp, synthetic construct
  misc_feature 1..80: note = Synthetic: >HKU1-cand-7390-7469
  source 1..80: mol_type = other DNA
tggttacaatttgtgatttttattctaagttaggtgtaggttttacaagtcatttttgtaatggtagttttatatgtgaa

SEQ ID NO: 12188 - DNA, 80 bp, synthetic construct
  misc_feature 1..80: note = Synthetic: >HKU1-cand-7470-7549
  source 1..80: mol_type = other DNA
ttgtgttattctggttttgatatgttggatacatatgcagctatagattttgttcagtatgaagtagatagacgtgtttt

SEQ ID NO: 12189 - DNA, 80 bp, synthetic construct
  misc_feature 1..80: note = Synthetic: >HKU1-cand-7550-7629
  source 1..80: mol_type = other DNA
atttgattatgttagtttagtcaaattaattgttgaactcgttattggttattcattatatacagtatggttttatccat

SEQ ID NO: 12190 - DNA, 80 bp, synthetic construct
  misc_feature 1..80: note = Synthetic: >HKU1-cand-7630-7709
  source 1..80: mol_type = other DNA
tattttgtcttattggtttacaattatttactacatggttgcctgatttgtttatgttagaaactatgcattggttgatt

SEQ ID NO: 12191 - DNA, 80 bp, synthetic construct
  misc_feature 1..80: note = Synthetic: >HKU1-cand-7710-7789
  source 1..80: mol_type = other DNA
agatttattgtatttgtagctaatatgttacctgcttttgtcttgttgcggttttatatagttgttactgctatgtataa

SEQ ID NO: 12192 - DNA, 80 bp, synthetic construct
  misc_feature 1..80: note = Synthetic: >HKU1-cand-7790-7869
  source 1..80: mol_type = other DNA
agtagttggttttattaggcatattgtttatggttgtaataaagctggttgtttattttgttataaacgaaattgtagtg

SEQ ID NO: 12193 - DNA, 80 bp, synthetic construct
  misc_feature 1..80: note = Synthetic: >HKU1-cand-7870-7949
  source 1..80: mol_type = other DNA
ttcgtgttaagtgtagtactattgttggtggtgtaattcgttattatgatattactgctaatggtggtactggtttttgt

SEQ ID NO: 12194 - DNA, 80 bp, synthetic construct
  misc_feature 1..80: note = Synthetic: >HKU1-cand-7950-8029
  source 1..80: mol_type = other DNA
gttaaacatcaatggaattgttttaattgccattcttttaaaccaggtaacacttttataactgtagaagctgctataga

SEQ ID NO: 12195 - DNA, 80 bp, synthetic construct
  misc_feature 1..80: note = Synthetic: >HKU1-cand-8030-8109
  source 1..80: mol_type = other DNA
actttctaaagagcttaaacgacctgtaaatccaactgatgcttcacattatgtagttactgatattaagcaagttggtt

SEQ ID NO: 12196 - DNA, 80 bp, synthetic construct
  misc_feature 1..80: note = Synthetic: >HKU1-cand-8110-8189
  source 1..80: mol_type = other DNA
gtatgatgcgtttgttctatgatagagatggacagcgtgtttacgatgatgttgatgctagtttatttgtagatattaat

SEQ ID NO: 12197 - DNA, 80 bp, synthetic construct
  misc_feature 1..80: note = Synthetic: >HKU1-cand-8190-8269
  source 1..80: mol_type = other DNA
aatctgttacattctaaagttaaagttgttcctaatttgtatgtagttgtagtagagagtgatgctgatagagctaattt

SEQ ID NO: 12198 - DNA, 80 bp, synthetic construct
  misc_feature 1..80: note = Synthetic: >HKU1-cand-8270-8349
  source 1..80: mol_type = other DNA
tctgaatgctgttgtgttttatgcacaatcattgtataggcctatattacttgtagacaaaaagttaattactacagctt

SEQ ID NO: 12199 - DNA, 80 bp, synthetic construct
  misc_feature 1..80: note = Synthetic: >HKU1-cand-9630-9709
  source 1..80: mol_type = other DNA
aatgattattatagaagtatgcctggaactttttgtggtagagatctttttgatttgttttatcaattttttagtagttt

SEQ ID NO: 12200 - DNA, 80 bp, synthetic construct
  misc_feature 1..80: note = Synthetic: >HKU1-cand-9710-9789
  source 1..80: mol_type = other DNA
aattcgtcctatagatttcttttctcttactgctagttctatttttggagctatattggctatagttgttgtcttggttt

SEQ ID NO: 12201 - DNA, 80 bp, synthetic construct
  misc_feature 1..80: note = Synthetic: >HKU1-cand-9790-9869
  source 1..80: mol_type = other DNA
tttattatttaataaaacttaagcgtgcttttggagattatactagtgttgtagttataaatgttgttgtttggtgtatt

SEQ ID NO: 12202 - DNA, 80 bp, synthetic construct
  misc_feature 1..80: note = Synthetic: >HKU1-cand-9870-9949
  source 1..80: mol_type = other DNA
aattttcttatgctttttgtttttcaagtttatcctatttgtgcatgtgtttatgcttgtttttatttttatgtaacatt

SEQ ID NO: 12203 - DNA, 80 bp, synthetic construct
  misc_feature 1..80: note = Synthetic: >HKU1-cand-9950-10029
  source 1..80: mol_type = other DNA
gtattttccttctgaaattagtgtaattatgcatttgcaatggattgttatgtatggtgctataatgcctttttggtttt

SEQ ID NO: 12204 - DNA, 80 bp, synthetic construct
  misc_feature 1..80: note = Synthetic: >HKU1-cand-10030-10109
  source 1..80: mol_type = other DNA
gtgtcacatatgtagctatggttattgcaaaccatgttttatggttattttcatattgtaggaaaattggtgttaatgta

SEQ ID NO: 12205 - DNA, 80 bp, synthetic construct
  misc_feature 1..80: note = Synthetic: >HKU1-cand-10110-10189
  source 1..80: mol_type = other DNA
tgtagtgatagtacatttgaagaaacatctcttactacttttatgattactaaagattcttattgtagattaaagaattc

SEQ ID NO: 12206 - DNA, 80 bp, synthetic construct
  misc_feature 1..80: note = Synthetic: >HKU1-cand-10190-10269
  source 1..80: mol_type = other DNA
tgtttctgatgttgcctacaatagatatttgagtttgtataataagtatcgttactatagtggtaaaatggatactgctg

SEQ ID NO: 12207 - DNA, 80 bp, synthetic construct
  misc_feature 1..80: note = Synthetic: >HKU1-cand-10270-10349
  source 1..80: mol_type = other DNA
cctatagagaagcggcgtgttctcagttagctaaagctatggaaacatttaatcacaataatggtaatgatgtcttatac

SEQ ID NO: 12208 - DNA, 80 bp, synthetic construct
  misc_feature 1..80: note = Synthetic: >HKU1-cand-10350-10429
  source 1..80: mol_type = other DNA
caacctcctacagcatctgtttctacatcttttttgcaatcaggtattgtaaagatggtatctcctacgtcaaaaattga

SEQ ID NO: 12209 - DNA, 80 bp, synthetic construct
  misc_feature 1..80: note = Synthetic: >HKU1-cand-10430-10509
  source 1..80: mol_type = other DNA
accttgtattgttagtgttacttatggtagtatgactttgaatggtttatggttagatgacaaagtttattgtcctcgtc

SEQ ID NO: 12210 - DNA, 80 bp, synthetic construct
  misc_feature 1..80: note = Synthetic: >HKU1-cand-10510-10589
  source 1..80: mol_type = other DNA
atgttatatgttcatcctctaatatgaacgaacctgattattctgccttattgtgtagagttactctaggtgattttact

SEQ ID NO: 12211 - DNA, 80 bp, synthetic construct
  misc_feature 1..80: note = Synthetic: >HKU1-cand-10590-10669
  source 1..80: mol_type = other DNA
ataatgtctggtcggatgagtttaacagttgtgtcttaccagatgcagggctgtcaacttgttttgacagtctctttaca

SEQ ID NO: 12212 - DNA, 80 bp, synthetic construct
  misc_feature 1..80: note = Synthetic: >HKU1-cand-10670-10749
  source 1..80: mol_type = other DNA
aaatccttacactccaaaatatacttttggtaatgttaaacctggtgaaacttttactgttttagctgcgtataatggcc

SEQ ID NO: 12213 - DNA, 80 bp, synthetic construct
  misc_feature 1..80: note = Synthetic: >HKU1-cand-10750-10829
  source 1..80: mol_type = other DNA
gaccacaaggggcatttcatgttactatgcgtagtagttatactattaaaggttcttttttgtgtgggtcatgtggatct

SEQ ID NO: 12214 - DNA, 80 bp, synthetic construct
  misc_feature 1..80: note = Synthetic: >HKU1-cand-10830-10909
  source 1..80: mol_type = other DNA
gttggttatgtattaacaggtgatagtgttaagtttgtatatatgcatcaattagagctcagtactggttgtcacactgg

SEQ ID NO: 12215 - DNA, 80 bp, synthetic construct
  misc_feature 1..80: note = Synthetic: >HKU15-cand-14180-14259
  source 1..80: mol_type = other DNA
cagcggtgtttgtgtggtgtgtaattcacccactatactgcgctgtggtgattgcattcgtcgaccactactttgttgcg

SEQ ID NO: 12216 - DNA, 80 bp, synthetic construct
  misc_feature 1..80: note = Synthetic: >HKU15-cand-14500-14579
  source 1..80: mol_type = other DNA
agcttgctacatctaactatgacactattgaaccttatcagaaggccaatcgtgcacctttatcacttatgctcttcgct

SEQ ID NO: 12217 - DNA, 80 bp, synthetic construct
  misc_feature 1..80: note = Synthetic: >HKU15-cand-14820-14899
  source 1..80: mol_type = other DNA
tctacctacaaactccaaacaggtgatgttctagtcttaatggcacatgttgttacaccgctctcagcaccccctgtgct

SEQ ID NO: 12218 - DNA, 80 bp, synthetic construct
  misc_feature 1..80: note = Synthetic: >HKU15-cand-14900-14979
  source 1..80: mol_type = other DNA
aacgcagacaacatatgtcagaaaatcacttttacccgactctgttggtgcgtcttattatgtgcaacattttaagtcat

SEQ ID NO: 12219 - DNA, 80 bp, synthetic construct
  misc_feature 1..80: note = Synthetic: >HKU15-cand-14980-15059
  source 1..80: mol_type = other DNA
ataatgagatagctatgcagagggttacaacagtattaggtccaccaggcacaggtaagtcaacctttgctattggtttg

SEQ ID NO: 12220 - DNA, 80 bp, synthetic construct
  misc_feature 1..80: note = Synthetic: >HKU15-cand-15140-15219
  source 1..80: mol_type = other DNA
caagacaatacctgtaggccaatgcagtcgtatcgtacccacacgtacaactgttgagtgctttcaggagtttgtcgtaa

SEQ ID NO: 12221 - DNA, 80 bp, synthetic construct
  misc_feature 1..80: note = Synthetic: >HKU15-cand-15220-15299
  source 1..80: mol_type = other DNA
ataacacaactgcacagtatatcttctcgactatcaatgccttacctgacattaagtgtgacattgtagttgtagatgag

SEQ ID NO: 12222 - DNA, 80 bp, synthetic construct
  misc_feature 1..80: note = Synthetic: >HKU15-cand-15300-15379
  source 1..80: mol_type = other DNA
gtttctatgttgaccaattatgagctttcctctgtgaatgctcgtttggtttacaatcacattgtgtatgttggtgatcc

SEQ ID NO: 12223 - DNA, 80 bp, synthetic construct
  misc_feature 1..80: note = Synthetic: >HKU15-cand-15380-15459
  source 1..80: mol_type = other DNA
ttatcagttaccttcacctagaactatgcttacgtctggccagctttcgccagctgactataacgtagttactgatataa

SEQ ID NO: 12224 - DNA, 80 bp, synthetic construct
  misc_feature 1..80: note = Synthetic: >HKU15-cand-19320-19399
  source 1..80: mol_type = other DNA
tgcagagagctctattgattatgaccttactttgtctcgttcgagcaaagtttgctgatgatctactcgatttgctcacc

SEQ ID NO: 12225 - DNA, 80 bp, synthetic construct
  misc_feature 1..80: note = Synthetic: >HKU15-cand-19400-19479
  source 1..80: mol_type = other DNA
ttcccgggtgcacatcgcttcttacataaacccacgaggaattccagcagtctctactcgcgggctaataataattttga

SEQ ID NO: 12226 - DNA, 80 bp, synthetic construct
  misc_feature 1..80: note = Synthetic: >HKU15-cand-19480-19559
  source 1..80: mol_type = other DNA
tgttggcgttcttcctggctaccccactaagaacgttaacctcttctcaccacttactaactccactttgcccattaatg

SEQ ID NO: 12227 - DNA, 80 bp, synthetic construct
  misc_feature 1..80: note = Synthetic: >HKU15-cand-19560-19639
  source 1..80: mol_type = other DNA
gccttcatcggagttaccaaccactcatgctgaattgtcttactaaaataactaaccacactctcagcatgtatctccta

SEQ ID NO: 12228 - DNA, 80 bp, synthetic construct
  misc_feature 1..80: note = Synthetic: >HKU15-cand-19640-19719
  source 1..80: mol_type = other DNA
cctagtgagatacaaacttatagctgcggcggtgccatggttaaataccagacacatgatgcagttcgtatcattttaga

SEQ ID NO: 12229 - DNA, 80 bp, synthetic construct
  misc_feature 1..80: note = Synthetic: >HKU15-cand-19730-19809
  source 1..80: mol_type = other DNA
actgaccacatctctgttgaagtcgttggccaacatggtgaaaattatgtgtttgtttgtagtgagcagtttaactacac

SEQ ID NO: 12230 - DNA, 80 bp, synthetic construct
  misc_feature 1..80: note = Synthetic: >HKU15-cand-19810-19889
  source 1..80: mol_type = other DNA
cactgcattacacaactctaccttcttctcacttaattctgagctttattgctttactaataacacctacttaggtattc

SEQ ID NO: 12231 - DNA, 80 bp, synthetic construct
  misc_feature 1..80: note = Synthetic: >HKU15-cand-19970-20049
  source 1..80: mol_type = other DNA
attacggttaactatgttaggttgtatcggggtcatttgtctgccaatagtgcccactttgcccttgcaaacctaaccga

SEQ ID NO: 12232 - DNA, 80 bp, synthetic construct
  misc_feature 1..80: note = Synthetic: >HKU15-cand-20050-20129
  source 1..80: mol_type = other DNA
tacactcataacacttaccaatactactatatcgcaaatcacttattgtgataagtcagtagttgattcaatagcatgcc

SEQ ID NO: 12233 - DNA, 80 bp, synthetic construct
  misc_feature 1..80: note = Synthetic: >HKU15-cand-20130-20209
  source 1..80: mol_type = other DNA
agcgctcttctcacgaagtggaggatgggttttactccgaccctaaatctgccgttagagctaggcaacgtactattgtt

SEQ ID NO: 12234 - DNA, 80 bp, synthetic construct
  misc_feature 1..80: note = Synthetic: >HKU15-cand-20210-20289
  source 1..80: mol_type = other DNA
acactacctaagctccctgagcttgaagtagtgcagttaaatatttctgcacacatggattttggcgaagccagacttga

SEQ ID NO: 12235 - DNA, 80 bp, synthetic construct
  misc_feature 1..80: note = Synthetic: >HKU15-cand-20290-20369
  source 1..80: mol_type = other DNA
cagcgttaccatcaatggtaacacatcctattgtgtcactaagccttacttcaggcttgaaactaactttatgtgtacag

SEQ ID NO: 12236 - DNA, 80 bp, synthetic construct
  misc_feature 1..80: note = Synthetic: >HKU15-cand-20370-20449
  source 1..80: mol_type = other DNA
gttgcactatgaatctgcgcactgatacctgtagttttgacctgtcagcagtaaacaatggcatgtcattctctcaattc

SEQ ID NO: 12237 - DNA, 80 bp, synthetic construct
  misc_feature 1..80: note = Synthetic: >HKU15-cand-20450-20529
  source 1..80: mol_type = other DNA
tgtctaagcactgaatctggtgcttgtgagatgaaaattattgttacctacgtatggaattacttgctaaggcagcgttt

SEQ ID NO: 12238 - DNA, 80 bp, synthetic construct
  misc_feature 1..80: note = Synthetic: >HKU15-cand-20530-20609
  source 1..80: mol_type = other DNA
gtatgttactgctgtagagggccagactcacactggaaccacttcagtacatgcaacagacacttctagtgtaatcactg

SEQ ID NO: 12239 - DNA, 80 bp, synthetic construct
  misc_feature 1..80: note = Synthetic: >HKU2-cand-1630-1709
  source 1..80: mol_type = other DNA
tccagttattgtctgcactgttgctgagagattttctaaggcttttactgattttctgagttacacccgtgaatgcttta

SEQ ID NO: 12240 - DNA, 80 bp, synthetic construct
  misc_feature 1..80: note = Synthetic: >HKU2-cand-1710-1789
  source 1..80: mol_type = other DNA
ctgccctctgtgatgacatcgttgtgttcggtgtcaagtgcaaagctgttggtgactacattatttttaataatagtgtc

SEQ ID NO: 12241 - DNA, 80 bp, synthetic construct
  misc_feature 1..80: note = Synthetic: >HKU2-cand-1790-1869
  source 1..80: mol_type = other DNA
gtcaaaactgttaaagccaaaataaagggtgttaaagaagctggtcttaagactatgacctacacacagtgtctacttgg

SEQ ID NO: 12242 - DNA, 80 bp, synthetic construct
  misc_feature 1..80: note = Synthetic: >HKU2-cand-1870-1949
  source 1..80: mol_type = other DNA
atctaccaagcctgttaaggttaagcgcgttgaacgtagtgttgcacagcttaaagttgttgacactgctgtaccattaa

SEQ ID NO: 12243 - DNA, 80 bp, synthetic construct
  misc_feature 1..80: note = Synthetic: >HKU2-cand-1950-2029
  source 1..80: mol_type = other DNA
aacaggaaggtgaatgtcttgttgttggtggtcgtgctatgtttaggtctgatggctattataggtttatggctgatgct

SEQ ID NO: 12244 - DNA, 80 bp, synthetic construct
  misc_feature 1..80: note = Synthetic: >HKU2-cand-2030-2109
  source 1..80: mol_type = other DNA
gatgttgtactcgagtcacctgtttttacagctggctctcaatacaatgttgtgttcgaaactgatgccctattcatagc

SEQ ID NO: 12245 - DNA, 80 bp, synthetic construct
  misc_feature 1..80: note = Synthetic: >HKU2-cand-2110-2189
  source 1..80: mol_type = other DNA
cccagagattagcactgtgtttgaaggtgacaacattgacactgtggttcagactgttgccaataaagtccaagcattta

SEQ ID NO: 12246 - DNA, 80 bp, synthetic construct
  misc_feature 1..80: note = Synthetic: >HKU2-cand-2190-2269
  source 1..80: mol_type = other DNA
acaatagattcgttgtttacaacgcacatgttgttgatggtgctattaatgtgttttgtgattataagtttacttgtcct

SEQ ID NO: 12247 - DNA, 80 bp, synthetic construct
  misc_feature 1..80: note = Synthetic: >HKU2-cand-2270-2349
  source 1..80: mol_type = other DNA
gctttcttggatggttttccagagtggttttcattctgtaagaatcattttaaggatgccggatttgttgagttttatga

SEQ ID NO: 12248 - DNA, 80 bp, synthetic construct
  misc_feature 1..80: note = Synthetic: >HKU2-cand-2350-2429
  source 1..80: mol_type = other DNA
ctgcattattaatagtgacggtacttttcagaccacttttcagccttatttggaccttaaaccatctgttgatgcgtatt

SEQ ID NO: 12249 - DNA, 80 bp, synthetic construct
  misc_feature 1..80: note = Synthetic: >HKU2-cand-2430-2509
  source 1..80: mol_type = other DNA
taggtcctgagattgtacgagctgttgatggtggtcgtctgtggcgtactgttattaatggcattagtgacgctgttaat

SEQ ID NO: 12250 - DNA, 80 bp, synthetic construct
  misc_feature 1..80: note = Synthetic: >HKU2-cand-2510-2589
  source 1..80: mol_type = other DNA
ttttgtaagaatcttaggttgcacttcgattttggtgagcttaagggtactgttgttaagcgttttaagggtatacttag

SEQ ID NO: 12251 - DNA, 80 bp, synthetic construct
  misc_feature 1..80: note = Synthetic: >HKU2-cand-2590-2669
  source 1..80: mol_type = other DNA
gacgcttcttacagtttacaatgagtttattcaaactactgtgtctgttcttactatctgcggcattagtgccaagtact

SEQ ID NO: 12252 - DNA, 80 bp, synthetic construct
  misc_feature 1..80: note = Synthetic: >HKU2-cand-2670-2749
  source 1..80: mol_type = other DNA
atgcttttgacaagcctatgctttgtatgcatggtattacagagcgtgttactagttttgacattactagtcttggaaag

SEQ ID NO: 12253 - DNA, 80 bp, synthetic construct
  misc_feature 1..80: note = Synthetic: >HKU2-cand-2750-2829
  source 1..80: mol_type = other DNA
cctattttagatggtctttctaggtgtaatgtctttgcacgtggttctactgcagttgtagttgattctgttgatcacga

SEQ ID NO: 12254 - DNA, 80 bp, synthetic construct
  misc_feature 1..80: note = Synthetic: >HKU2-cand-2830-2909
  source 1..80: mol_type = other DNA
acttcttgatcttgaggagtgtgattttgttgaacctgctagtcatggtgtgcttgtcgtatcagatgattatggctttt

SEQ ID NO: 12255 - DNA, 80 bp, synthetic construct
  misc_feature 1..80: note = Synthetic: >HKU31-cand-28410-28489
  source 1..80: mol_type = other DNA
tatgcattttggtcagtgcgattattcgcgactacctacagaaataacagtggctaaacccaatgttttaatagccttga

SEQ ID NO: 12256 - DNA, 80 bp, synthetic construct
  misc_feature 1..80: note = Synthetic: >HKU31-cand-28490-28569
  source 1..80: mol_type = other DNA
aaatggttaaacggcaagattatggtgttaattctggtgttgcaatataccatagatataaggctggtaattacaggcgt

SEQ ID NO: 12257 - DNA, 80 bp, synthetic construct
  misc_feature 1..80: note = Synthetic: >HKU31-cand-28570-28649
  source 1..80: mol_type = other DNA
ccaccagtagtggtggacgaagaacttgcactgcttagagcttaagctcattagtaagagtatgatattatatcatttaa

SEQ ID NO: 12258 - DNA, 80 bp, synthetic construct
  misc_feature 1..80: note = Synthetic: >HKU31-cand-28730-28809
  source 1..80: mol_type = other DNA
aaatggaaataatcaacctcgaggtagaccaagacaacctaaacctcgaccagccccaaacaagtctgtctcatggtaca

SEQ ID NO: 12259 - DNA, 80 bp, synthetic construct
  misc_feature 1..80: note = Synthetic: >HKU31-cand-28810-28889
  source 1..80: mol_type = other DNA
ccggcattacacagcatggtaagcaacctcttgcctttccggcaggacagggcgtacctcttaatgccaattccactccc

SEQ ID NO: 12260 - DNA, 80 bp, synthetic construct
  misc_feature 1..80: note = Synthetic: >HKU31-cand-28890-28969
  source 1..80: mol_type = other DNA
aagcaaaatgcagggtattggcgcagacaagacagaaagcttaatacaggcaatggagtcaaacagctggcccccaggtg

SEQ ID NO: 12261 - DNA, 80 bp, synthetic construct
  misc_feature 1..80: note = Synthetic: >HKU31-cand-28970-29049
  source 1..80: mol_type = other DNA
gtatttttactacactggaacaggacctgaagcaaacctgccattcagaacagtcaaagatggcatctactgggtttggg

SEQ ID NO: 12262 - DNA, 80 bp, synthetic construct
  misc_feature 1..80: note = Synthetic: >HKU31-cand-29130-29209
  source 1..80: mol_type = other DNA
cctggtactcaattacctaaaaactgccacattgagggcactggaggtaatagtcagtcatcttctagagcgtccagcac

SEQ ID NO: 12263 - DNA, 80 bp, synthetic construct
  misc_feature 1..80: note = Synthetic: >HKU31-cand-29210-29289
  source 1..80: mol_type = other DNA
tagcagaaactccagaagatctaattccagaggatcccaacctggtagtagaagtcactcaccaggaaatgtagcaggac

SEQ ID NO: 12264 - DNA, 80 bp, synthetic construct
  misc_feature 1..80: note = Synthetic: >HKU31-cand-29290-29369
  source 1..80: mol_type = other DNA
cctcagatgcatcagcactgctctatcttgaactagctaagagactagaagctttagaagcaggtaaatcaaaatcagca

SEQ ID NO: 12265 - DNA, 80 bp, synthetic construct
  misc_feature 1..80: note = Synthetic: >HKU31-cand-29370-29449
  source 1..80: mol_type = other DNA
cctaaggtcatcactaaaaaagatgccgcagatgctaagaaaaagatgcgccataagcgtgtcgccaccaaagcatacaa

SEQ ID NO: 12266 - DNA, 80 bp, synthetic construct
  misc_feature 1..80: note = Synthetic: >HKU31-cand-29450-29529
  source 1..80: mol_type = other DNA
ccctacacaagcattcggtctgagaggaccaggtgacttgcagggtaactttggtgacttaaagtattgcaaagaaggtg

SEQ ID NO: 12267 - DNA, 80 bp, synthetic construct
  misc_feature 1..80: note = Synthetic: >HKU31-cand-29530-29609
  source 1..80: mol_type = other DNA
ttgatgacccacgctggcctcaaatggctgagctggcaccttcagcatctgcattcttaagcatgtcacagttgaaacta

SEQ ID NO: 12268 - DNA, 80 bp, synthetic construct
  misc_feature 1..80: note = Synthetic: >HKU31-cand-29610-29689
  source 1..80: mol_type = other DNA
gtgcaccattctaatgacacagacaaaaagccagtttatatgctgcgctattctggtgccattaaattagaccccaagaa

SEQ ID NO: 12269 - DNA, 80 bp, synthetic construct
  misc_feature 1..80: note = Synthetic: >HKU4-cand-11230-11309
  source 1..80: mol_type = other DNA
ttattgggttttatggcatgcgttatgtttactgttaaacataaacataccttcatgtcactcttcctattacctgtggc

SEQ ID NO: 12270 - DNA, 80 bp, synthetic construct
  misc_feature 1..80: note = Synthetic: >HKU4-cand-11390-11469
  source 1..80: mol_type = other DNA
tgactcctactagtgtgtatatgcgcactacacatttggactttggcttatatattagccttagttttgtattagcgatt

SEQ ID NO: 12271 - DNA, 80 bp, synthetic construct
  misc_feature 1..80: note = Synthetic: >HKU4-cand-11550-11629
  source 1..80: mol_type = other DNA
tgttataggggaccacagtagtcccataacctatcttatgtttataactacgttgactagtgattacacaattactgttt

SEQ ID NO: 12272 - DNA, 80 bp, synthetic construct
  misc_feature 1..80: note = Synthetic: >HKU4-cand-11710-11789
  source 1..80: mol_type = other DNA
gttaaacttgtgttattaatatacctgggtttagggtatatgtgtacaatgtattttggtgtcttttcattattgaacct

SEQ ID NO: 12273 - DNA, 80 bp, synthetic construct
  misc_feature 1..80: note = Synthetic: >HKU4-cand-11870-11949
  source 1..80: mol_type = other DNA
atgcgccacgtaactcatgggaagctctaatacttaattttaaattgcttggtattggcggtacaccttgtattaaggtt

SEQ ID NO: 12274 - DNA, 80 bp, synthetic construct
  misc_feature 1..80: note = Synthetic: >HKU4-cand-12110-12189
  source 1..80: mol_type = other DNA
aaagatttgtttgtctttttgcaacgctaatgtctttttctgctaatgttgatttagatgctttagccaatgatctcttt

SEQ ID NO: 12275 - DNA, 80 bp, synthetic construct
  misc_feature 1..80: note = Synthetic: >HKU4-cand-12190-12269
  source 1..80: mol_type = other DNA
gagaattcatcagtcttacaagctactcttactgagttctctcatttagctacttatgctgaattagagacagctcagtc

SEQ ID NO: 12276 - DNA, 80 bp, synthetic construct
  misc_feature 1..80: note = Synthetic: >Lucheng19-cand-2560-2639
  source 1..80: mol_type = other DNA
ttgatgatgtcgacagtgttgctgacgagactgatgttgcagatgattgtgtacagagtgatgagccagttacacaggaa

SEQ ID NO: 12277 - DNA, 80 bp, synthetic construct
  misc_feature 1..80: note = Synthetic: >Lucheng19-cand-2640-2719
  source 1..80: mol_type = other DNA
tcagatagtgttgaaatcgattgtgcacctctcgagagcaccatagccaacgacacactctatctaggtcccagtaaatt

SEQ ID NO: 12278 - DNA, 80 bp, synthetic construct
  misc_feature 1..80: note = Synthetic: >Lucheng19-cand-2720-2799
  source 1..80: mol_type = other DNA
ctggaaaaaacactggaatttggactgtaaaccaatggtaacaaaggaagttaaaggcaccaaagtgtggtttccagctg

SEQ ID NO: 12279 - DNA, 80 bp, synthetic construct
  misc_feature 1..80: note = Synthetic: >Lucheng19-cand-2800-2879
  source 1..80: mol_type = other DNA
ttaacaaatggaatgcaactattagaacaacagctgtctttgtaggccaaatgtttaagctcgctgcggatgatctgaaa

SEQ ID NO: 12280 - DNA, 80 bp, synthetic construct
  misc_feature 1..80: note = Synthetic: >Lucheng19-cand-2880-2959
  source 1..80: mol_type = other DNA
tggcgtgatacagaactacaaaaattgtgggaaaccaaatcacaccacctgtggtataagctagcagttgcagctgagcc

SEQ ID NO: 12281 - DNA, 80 bp, synthetic construct
  misc_feature 1..80: note = Synthetic: >Lucheng19-cand-2960-3039
  source 1..80: mol_type = other DNA
gaacaaagatgaacgtggaaatgagggtagctattctgaaaacgcaatggatgacaacaccctcctcaacgaggcattac

SEQ ID NO: 12282 - DNA, 80 bp, synthetic construct
  misc_feature 1..80: note = Synthetic: >Lucheng19-cand-3040-3119
  source 1..80: mol_type = other DNA
ctaaactgaaactgaccaaagcaaaggcaaactgggtttgtaaatgtggtgcacaagtccaactgaatgggctcgaggca

SEQ ID NO: 12283 - DNA, 80 bp, synthetic construct
  misc_feature 1..80: note = Synthetic: >Lucheng19-cand-3120-3199
  source 1..80: mol_type = other DNA
tgcactggacactttgcaaaagtccagtgcttatgtggcccgaccatggttgcaaaagaacttaaagtgccctttgaaat

SEQ ID NO: 12284 - DNA, 80 bp, synthetic construct
  misc_feature 1..80: note = Synthetic: >Lucheng19-cand-3200-3279
  source 1..80: mol_type = other DNA
catagcaccaggttacgctatgaggcccgtccaaaaggcctcggcccacgcatgtgtggttgcagcgattgataatatgg

SEQ ID NO: 12285 - DNA, 80 bp, synthetic construct
  misc_feature 1..80: note = Synthetic: >Lucheng19-cand-3280-3359
  source 1..80: mol_type = other DNA
ctacaacacaaacatccgctgttatgcacgatggagataaaccactactgatagatgatgcagataataatgttacctac

SEQ ID NO: 12286 - DNA, 80 bp, synthetic construct
  misc_feature 1..80: note = Synthetic: >Lucheng19-cand-3360-3439
  source 1..80: mol_type = other DNA
cccctttccaaactataagccactgccatattatgcatacgccgttctcaaaagaggttacactgtggagaccaatgatg

SEQ ID NO: 12287 - DNA, 80 bp, synthetic construct
  misc_feature 1..80: note = Synthetic: >Lucheng19-cand-3440-3519
  source 1..80: mol_type = other DNA
tagaatttgaggccagccatacacaatacaaatgtaacatcagcgtagcaaagaaaccctttgcaaaactacacacaaaa

SEQ ID NO: 12288 - DNA, 80 bp, synthetic construct
  misc_feature 1..80: note = Synthetic: >Lucheng19-cand-3520-3599
  source 1..80: mol_type = other DNA
tataaccatgttctgctcccaggcatgcatccaaacaaagaagaaactaagggtgaaaaagtgctaacagatctaggttt

SEQ ID NO: 12289 - DNA, 80 bp, synthetic construct
  misc_feature 1..80: note = Synthetic: >Lucheng19-cand-3600-3679
  source 1..80: mol_type = other DNA
aaaaaacatgaaacctgctatgatgaatgccctacacaagactggtgagtactggtgcgatgttacacaaggaaccacaa

SEQ ID NO: 12290 - DNA, 80 bp, synthetic construct
  misc_feature 1..80: note = Synthetic: >Lucheng19-cand-3680-3759
  source 1..80: mol_type = other DNA
cctaccactgcctaggaaatccgaaaggattcaatgcacgtaataagcttaacacagcaatcaataagtgcccagatggt

SEQ ID NO: 12291 - DNA, 80 bp, synthetic construct
  misc_feature 1..80: note = Synthetic: >Lucheng19-cand-3760-3839
  source 1..80: mol_type = other DNA
agcgaaatcctcttgcctaaagtgaatattcgcatacgcgatctggtactggtctgtgctagtaagaagctttcttttgt

SEQ ID NO: 12292 - DNA, 80 bp, synthetic construct
  misc_feature 1..80: note = Synthetic: >Lucheng19-cand-12800-12879
  source 1..80: mol_type = other DNA
taggaatactgaaaaacatgatgcctattatattgtaaagaagtgcaatgcgagagttatggattatgagcagtccatct

SEQ ID NO: 12293 - DNA, 80 bp, synthetic construct
  misc_feature 1..80: note = Synthetic: >Lucheng19-cand-12880-12959
  source 1..80: mol_type = other DNA
acaaaaaactcgtgcactctaatgcccttgcggcacatagcttcttcccctataaagaggcgcgcaatatctatggtaat

SEQ ID NO: 12294 - DNA, 80 bp, synthetic construct
  misc_feature 1..80: note = Synthetic: >Lucheng19-cand-12960-13039
  source 1..80: mol_type = other DNA
ataactcgtcataatttgacgaagtataccatgatggatctgtgcttcgcacttcgcaattttgatgaaaaaaattgcga

SEQ ID NO: 12295 - DNA, 80 bp, synthetic construct
  misc_feature 1..80: note = Synthetic: >Lucheng19-cand-13040-13119
  source 1..80: mol_type = other DNA
cgtgcttaaggaaattcttgtgcttaccaattgttgtgatgaaaactatttcgagaatccaaattggtacgaccctgttg

SEQ ID NO: 12296 - DNA, 80 bp, synthetic construct
  misc_feature 1..80: note = Synthetic: >Lucheng19-cand-13120-13199
  source 1..80: mol_type = other DNA
aaaatgaacacattcatgttgtgtactataagctaggcactgtcatagcaaacgccatgcttaagtgtgtggcgctctgt

SEQ ID NO: 12297 - DNA, 80 bp, synthetic construct
  misc_feature 1..80: note = Synthetic: >Lucheng19-cand-13280-13359
  source 1..80: mol_type = other DNA
tgatttcgtagaagggccagaaggttatggtgttccctgtgttacatcatattatagttatatgatgccaatcatgggta

SEQ ID NO: 12298 - DNA, 80 bp, synthetic construct
  misc_feature 1..80: note = Synthetic: >Lucheng19-cand-13360-13439
  source 1..80: mol_type = other DNA
tgacaaattgtctcgcacaagagtgctacatgaatagtgacatttttggcaaagattttaaacgctatgacctccttatg

SEQ ID NO: 12299 - DNA, 80 bp, synthetic construct
  misc_feature 1..80: note = Synthetic: >Lucheng19-cand-13520-13599
  source 1..80: mol_type = other DNA
agattgtgtagacgatctatgccttctacattgtgcaaatttcaacacattgtttgccacaacaataccgcccacagcgt

SEQ ID NO: 12300 - DNA, 80 bp, synthetic construct
  misc_feature 1..80: note = Synthetic: >Lucheng19-cand-13600-13679
  source 1..80: mol_type = other DNA
tcggaccgctagtccggaaagtttttattgatggagtggcagtagctgttacagctggctatcattttaaacagctaggt

SEQ ID NO: 12301 - DNA, 80 bp, synthetic construct
  misc_feature 1..80: note = Synthetic: >Lucheng19-cand-13680-13759
  source 1..80: mol_type = other DNA
ctcgtctggaataatgacattaatgtcaataattccaagctcacctttaatgacctactgaggtttgtaactgacccagc

SEQ ID NO: 12302 - DNA, 80 bp, synthetic construct
  misc_feature 1..80: note = Synthetic: >Lucheng19-cand-13760-13839
  source 1..80: mol_type = other DNA
tatcctgatagctagctcaccagcacttattgaccagcgcacctgttgtctgagcgtagccgctctatcaacaggtgtca

SEQ ID NO: 12303 - DNA, 80 bp, synthetic construct
  misc_feature 1..80: note = Synthetic: >Lucheng19-cand-13840-13919
  source 1..80: mol_type = other DNA
attatcaaattgtcaaaccaggttactttaacaaagaattctacgactttctgctggaaagaggtttcttcaatgaaggt

SEQ ID NO: 12304 - DNA, 80 bp, synthetic construct
  misc_feature 1..80: note = Synthetic: >Lucheng19-cand-13920-13999
  source 1..80: mol_type = other DNA
tcagacttgacattgcgacatttcttctttgcacaaaatggcgcagcagctattacagattttgattattatcgttacaa

SEQ ID NO: 12305 - DNA, 80 bp, synthetic construct
  misc_feature 1..80: note = Synthetic: >Lucheng19-cand-14000-14079
  source 1..80: mol_type = other DNA
tcataccactatgttagatatttgccaagcacgctttgtttttaaagtcgttggcaagtactttgagtgttacgagggcg

SEQ ID NO: 12306 - DNA, 80 bp, synthetic construct
  misc_feature 1..80: note = Synthetic: >PEDV-cand-11230-11309
  source 1..80: mol_type = other DNA
gatgacttattggaatcctattttaatgacaatagtatgttgcagagtgttgcatctacttatgtcggtttgccttctta

SEQ ID NO: 12307 - DNA, 80 bp, synthetic construct
  misc_feature 1..80: note = Synthetic: >PEDV-cand-11310-11389
  source 1..80: mol_type = other DNA
tgtcatttatgaaaatgcacgccaacagtatgaagatgctgttaataatggttctccacctcagttggttaagcaattgc

SEQ ID NO: 12308 - DNA, 80 bp, synthetic construct
  misc_feature 1..80: note = Synthetic: >PEDV-cand-11390-11469
  source 1..80: mol_type = other DNA
gccatgccatgaatgtagcaaagagcgaatttgaccgtgaggcttctactcagcgtaagcttgatagaatggcggaacag

SEQ ID NO: 12309 - DNA, 80 bp, synthetic construct
  misc_feature 1..80: note = Synthetic: >PEDV-cand-11470-11549
  source 1..80: mol_type = other DNA
gctgcagcacagatgtacaaagaggcacgagcagttaataggaagtccaaagttgtaagtgctatgcattcactgctttt

SEQ ID NO: 12310 - DNA, 80 bp, synthetic construct
  misc_feature 1..80: note = Synthetic: >PEDV-cand-11550-11629
  source 1..80: mol_type = other DNA
tggtatgttgagacgtttggacatgtcttctgtagacaccattctcaacttggcaaaggatggggttgtacctctgtctg

SEQ ID NO: 12311 - DNA, 80 bp, synthetic construct
  misc_feature 1..80: note = Synthetic: >PEDV-cand-11630-11709
  source 1..80: mol_type = other DNA
tcataccggcagtcagtgctactaagcttaacattgttacttctgatatcgattcttataatcgtatccagcgtgaggga

SEQ ID NO: 12312 - DNA, 80 bp, synthetic construct
  misc_feature 1..80: note = Synthetic: >PEDV-cand-11710-11789
  source 1..80: mol_type = other DNA
tgtgtccactacgctggtaccatttggaatataattgatatcaaggacaatgatggcaaggtggtacacgttaaggaggt

SEQ ID NO: 12313 - DNA, 80 bp, synthetic construct
  misc_feature 1..80: note = Synthetic: >PEDV-cand-11790-11869
  source 1..80: mol_type = other DNA
aaccgcacagaatgctgagtccctgtcatggcccctggtccttgggtgtgagcgtattgtcaagctccagaataatgaaa

SEQ ID NO: 12314 - DNA, 80 bp, synthetic construct
  misc_feature 1..80: note = Synthetic: >PEDV-cand-11870-11949
  source 1..80: mol_type = other DNA
ttattcctggtaagctgaagcagcgctccattaaggcagaaggagatggcatagttggagaaggtaaggcactttacaat

SEQ ID NO: 12315 - DNA, 80 bp, synthetic construct
  misc_feature 1..80: note = Synthetic: >PEDV-cand-11950-12029
  source 1..80: mol_type = other DNA
aatgagggtggacgtacttttatgtatgctttcatctcggacaaaccggacctgcgtgtagtcaagtgggagttcgatgg

SEQ ID NO: 12316 - DNA, 80 bp, synthetic construct
  misc_feature 1..80: note = Synthetic: >PEDV-cand-12030-12109
  source 1..80: mol_type = other DNA
tggttgtaacactattgagctagaaccaccacgtaagttcttggtggattctcctaatggtgcacagatcaagtatctct

SEQ ID NO: 12317 - DNA, 80 bp, synthetic construct
  misc_feature 1..80: note = Synthetic: >PEDV-cand-12110-12189
  source 1..80: mol_type = other DNA
actttgttcgtaaccttaacacgttacgtaggggtgctgttctcggctacataggtgccactgtacgcttgcaggctggt

SEQ ID NO: 12318 - DNA, 80 bp, synthetic construct
  misc_feature 1..80: note = Synthetic: >PEDV-cand-12190-12269
  source 1..80: mol_type = other DNA
aaacaaacagaacaggctattaactcttcattgttgacactttgcgctttcgctgtggatcctgctaagacctacatcga

SEQ ID NO: 12319 - DNA, 80 bp, synthetic construct
  misc_feature 1..80: note = Synthetic: >PEDV-cand-12270-12349
  source 1..80: mol_type = other DNA
tgctgtcaaaagtggtcacaaaccagtaggtaactgtgttaagatgttggccaatggttctggtaatggacaagctgtta

SEQ ID NO: 12320 - DNA, 80 bp, synthetic construct
  misc_feature 1..80: note = Synthetic: >PEDV-cand-12350-12429
  source 1..80: mol_type = other DNA
ctaatggtgtggaggctagtactaaccaggattcatacggtggtgcgtccgtgtgtctatattgtagagcacatgttgag

SEQ ID NO: 12321 - DNA, 80 bp, synthetic construct
  misc_feature 1..80: note = Synthetic: >PEDV-cand-12430-12509
  source 1..80: mol_type = other DNA
catccatctatggatggtttttgcagactgaaaggcaagtacgtacaggttccactaggtacagtggatcctatacgttt

SEQ ID NO: 12322 - DNA, 80 bp, synthetic construct
  misc_feature 1..80: note = Synthetic: >PEDV-cand-15070-15149
  source 1..80: mol_type = other DNA
atccttcaagaatcctctctgcaggtgtgtttgttgatgacgttgttaaaactgatgcagttgtattgcttgaacgttat

SEQ ID NO: 12323 - DNA, 80 bp, synthetic construct
  misc_feature 1..80: note = Synthetic: >PEDV-cand-15150-15229
  source 1..80: mol_type = other DNA
gtgtcattggctatagatgcctacccgttatctaagcatgaaaaccctgaatataagaaggtgttttatgtgcttttgga

SEQ ID NO: 12324 - DNA, 80 bp, synthetic construct
  misc_feature 1..80: note = Synthetic: >PEDV-cand-15220-15299
  source 1..80: mol_type = other DNA
tgcttttggattgggttaagcatctgtacaaaactcttaatgctggtgtgttagagtctttttctgtcacacttttggaa

SEQ ID NO: 12325 - DNA, 80 bp, synthetic construct
  misc_feature 1..80: note = Synthetic: >PEDV-cand-15300-15379
  source 1..80: mol_type = other DNA
gattctactgctaaattctgggatgagagcttttatgccaacatgtatgagaaatctgcagttttacaatctgcagggct

SEQ ID NO: 12326 - DNA, 80 bp, synthetic construct
  misc_feature 1..80: note = Synthetic: >PEDV-cand-15380-15459
  source 1..80: mol_type = other DNA
ttgtgttgtttgtggctctcaaactgttttacgttgtggtgattgtctacggcgtcctatgctttgtactaagtgtgctt

SEQ ID NO: 12327 - DNA, 80 bp, synthetic construct
  misc_feature 1..80: note = Synthetic: >PEDV-cand-15460-15539
  source 1..80: mol_type = other DNA
atgatcatgtcattggaacaactcacaagttcattttggccatcactccatatgtgtgttgtgcttcagattgtggtgtc

SEQ ID NO: 12328 - DNA, 80 bp, synthetic construct
  misc_feature 1..80: note = Synthetic: >PEDV-cand-15540-15619
  source 1..80: mol_type = other DNA
aatgatgtaactaagctctacttaggtggtcttagttattggtgtcatgaccacaagccacgtcttgcattcccgttgtg

SEQ ID NO: 12329 - DNA, 80 bp, synthetic construct
  misc_feature 1..80: note = Synthetic: >PEDV-cand-15620-15699
  source 1..80: mol_type = other DNA
ctctgctggtaatgtttttggcttgtacaaaaattctgctaccggctcacccgatgttgaagactttaatcgcattgcta

SEQ ID NO: 12330 - DNA, 80 bp, synthetic construct
  misc_feature 1..80: note = Synthetic: >PEDV-cand-15700-15779
  source 1..80: mol_type = other DNA
catccgattggactgatgtttctgactacaggttggcaaatgatgtcaaggactcattgcgtctgtttgcagcggaaact

SEQ ID NO: 12331 - DNA, 80 bp, synthetic construct
  misc_feature 1..80: note = Synthetic: >PEDV-cand-15780-15859
  source 1..80: mol_type = other DNA
atcaaggccaaggaggagagcgttaagtcatcctatgcttgtgcaacactacatgaggttgtaggacctaaagagttgtt

SEQ ID NO: 12332 - DNA, 80 bp, synthetic construct
  misc_feature 1..80: note = Synthetic: >PEDV-cand-15860-15939
  source 1..80: mol_type = other DNA
gctcaaatgggaagtcggcagacccaaaccaccccttaatagaaattcggttttcacttgttatcatataacgaagaaca

SEQ ID NO: 12333 - DNA, 80 bp, synthetic construct
  misc_feature 1..80: note = Synthetic: >PEDV-cand-15940-16019
  source 1..80: mol_type = other DNA
ccaaatttcaaatcggtgagtttgtgtttgagaaggcagaatatgataatgatgctgtaacatataaaactaccgccaca

SEQ ID NO: 12334 - DNA, 80 bp, synthetic construct
  misc_feature 1..80: note = Synthetic: >PEDV-cand-16020-16099
  source 1..80: mol_type = other DNA
acaaaacttgttcctggcatggtttttgtgcttacctcacataatgttcagccattgcgcgcaccgaccattgctaatca

SEQ ID NO: 12335 - DNA, 80 bp, synthetic construct
  misc_feature 1..80: note = Synthetic: >PEDV-cand-16100-16179
  source 1..80: mol_type = other DNA
agaacgttattccactatacataagttgcatcctgcttttaacatacctgaagcttattctagcttagtgccctattacc

SEQ ID NO: 12336 - DNA, 80 bp, synthetic construct
  misc_feature 1..80: note = Synthetic: >PEDV-cand-16180-16259
  source 1..80: mol_type = other DNA
aattgattggtaagcagaagattacaactattcagggacctcccggtagtggtaaatctcactgtgttatagggctaggt

SEQ ID NO: 12337 - DNA, 80 bp, synthetic construct
  misc_feature 1..80: note = Synthetic: >PEDV-cand-16260-16339
  source 1..80: mol_type = other DNA
ttgtactatccaggtgcacgtatagtgtttacagcttgttctcatgcagcggtcgattcactttgtgtgaaagcttccac

SEQ ID NO: 12338 - DNA, 80 bp, synthetic construct
  misc_feature 1..80: note = Synthetic: >PEDV-cand-21460-21539
  source 1..80: mol_type = other DNA
tggtttccaaccaaccattgttggtcaattgtcttttggccattcctaagatttatggactaggccaatttttctccttt

SEQ ID NO: 12339 - DNA, 80 bp, synthetic construct
  misc_feature 1..80: note = Synthetic: >PEDV-cand-21540-21619
  source 1..80: mol_type = other DNA
aatcaaacgatcgatggtgtttgtaatggagctgctgtgcagcgtgcaccagaggctctgaggtttaatattaatgacac

SEQ ID NO: 12340 - DNA, 80 bp, synthetic construct
  misc_feature 1..80: note = Synthetic: >PEDV-cand-21620-21699
  source 1..80: mol_type = other DNA
ctctgtcattcttgctgaaggctcaattgtacttcatactgctttaggaacaaatttttcttttgtttgcagtaattcct

SEQ ID NO: 12341 - DNA, 80 bp, synthetic construct
  misc_feature 1..80: note = Synthetic: >PEDV-cand-21700-21779
  source 1..80: mol_type = other DNA
caaatcctcacttagccaccttcgccatacctctgggtgctacccaagtaccctattattgttttcttaaagtggatact

SEQ ID NO: 12342 - DNA, 80 bp, synthetic construct
  misc_feature 1..80: note = Synthetic: >PEDV-cand-21780-21859
  source 1..80: mol_type = other DNA
tacaactccactgtttataaattcttggctgttttacctcctaccgtcagggaaattgtcatcaccaagtatggtgatgt

SEQ ID NO: 12343 - DNA, 80 bp, synthetic construct
  misc_feature 1..80: note = Synthetic: >PEDV-cand-21860-21939
  source 1..80: mol_type = other DNA
ttatgtcaatgggtttggatacttgcatctcggtttgttggatgctgtcacaattaatttcactggtcatggcactgacg

SEQ ID NO: 12344 - DNA, 80 bp, synthetic construct
  misc_feature 1..80: note = Synthetic: >PEDV-cand-21940-22019
  source 1..80: mol_type = other DNA
atgatgtttctggtttttggaccatagcatcgactaattttgttgatgcactcatcgaagttcaaggaaccgccattcag

SEQ ID NO: 12345 - DNA, 80 bp, synthetic construct
  misc_feature 1..80: note = Synthetic: >PEDV-cand-22020-22099
  source 1..80: mol_type = other DNA
cgtattctttattgtgatgatcctgttagccaactcaagtgttctcaggttgcttttgaccttgacgatggtttttaccc

SEQ ID NO: 12346 - DNA, 80 bp, synthetic construct
  misc_feature 1..80: note = Synthetic: >PEDV-cand-22100-22179
  source 1..80: mol_type = other DNA
tatttcttctagaaaccttctgagtcatgaacagccaatttcttttgttactctgccatcatttaatgatcattcttttg

SEQ ID NO: 12347 - DNA, 80 bp, synthetic construct
  misc_feature 1..80: note = Synthetic: >PEDV-cand-22180-22259
  source 1..80: mol_type = other DNA
ttaacattactgtatctgcttcctttggtggtcatagtggtgccaaccttattgcatctgacactactatcaatgggttt

SEQ ID NO: 12348 - DNA, 80 bp, synthetic construct
  misc_feature 1..80: note = Synthetic: >PEDV-cand-22260-22339
  source 1..80: mol_type = other DNA
agttctttctgtgttgacactagacaatttaccatttcactgttttataacgttacaaacagttatggttatgtgtctaa

SEQ ID NO: 12349 - DNA, 80 bp, synthetic construct
  misc_feature 1..80: note = Synthetic: >PEDV-cand-22340-22419
  source 1..80: mol_type = other DNA
atcacaggacagtaattgccctttcaccttgcaatctgttaatgattacctgtcttttagcaaattttgtgtttccacca

SEQ ID NO: 12350 - DNA, 80 bp, synthetic construct
  misc_feature 1..80: note = Synthetic: >PEDV-cand-22420-22499
  source 1..80: mol_type = other DNA
gccttttggctagtgcctgtaccatagatctttttggttaccctgagtttggtagtggtgttaagtttacgtccctttac

SEQ ID NO: 12351 - DNA, 80 bp, synthetic construct
  misc_feature 1..80: note = Synthetic: >PEDV-cand-22500-22579
  source 1..80: mol_type = other DNA
tttcaattcacaaagggtgagttgattactggcacgcctaaaccacttgaaggtgtcacggacgtttcttttatgactct

SEQ ID NO: 12352 - DNA, 80 bp, synthetic construct
  misc_feature 1..80: note = Synthetic: >PEDV-cand-22580-22659
  source 1..80: mol_type = other DNA
ggatgtgtgtaccaagtatactatctatggctttaaaggtgagggtatcattacccttacaaattctagctttttggcag

SEQ ID NO: 12353 - DNA, 80 bp, synthetic construct
  misc_feature 1..80: note = Synthetic: >PEDV-cand-22660-22739
  source 1..80: mol_type = other DNA
gtgtttattacacatctgattctggacagttgttagcctttaagaatgtcactagtggtgctgtttattctgttacgcca

SEQ ID NO: 12354 - DNA, 80 bp, synthetic construct
  misc_feature 1..80: note = Synthetic: >Sparrow-cand-10340-10419
  source 1..80: mol_type = other DNA
aacgtgctgaggacagacgtattaagctaacctccggacttactgcaatgctttatcatatgcttagacgtcttgactca

SEQ ID NO: 12355 - DNA, 80 bp, synthetic construct
  misc_feature 1..80: note = Synthetic: >Sparrow-cand-10420-10499
  source 1..80: mol_type = other DNA
gatcgggtaaaagctctttttgagtgcgctaagcaacaaattctgcctattcatgctgtagtaggcatttccaatgacaa

SEQ ID NO: 12356 - DNA, 80 bp, synthetic construct
  misc_feature 1..80: note = Synthetic: >Sparrow-cand-10500-10579
  source 1..80: mol_type = other DNA
ccttaaagttatttttaacgataaggaaagttacgctcactatgttgagggtaacacactaatacacaagggagtgcgct

SEQ ID NO: 12357 - DNA, 80 bp, synthetic construct
  misc_feature 1..80: note = Synthetic: >Sparrow-cand-10580-10659
  source 1..80: mol_type = other DNA
acactattgtgaagaaactctccttggacaatgctcctattgaaggtgtacctgaagaattccctgttgtcgttgagaca

SEQ ID NO: 12358 - DNA, 80 bp, synthetic construct
  misc_feature 1..80: note = Synthetic: >Sparrow-cand-10660-10739
  source 1..80: mol_type = other DNA
gttagggagggtgtacctcaattacaaaacaatgaattgtgtctgcgtaatgtttttacagcgcagaatacagctcaaga

SEQ ID NO: 12359 - DNA, 80 bp, synthetic construct
  misc_feature 1..80: note = Synthetic: >Sparrow-cand-10900-10979
  source 1..80: mol_type = other DNA
gcgcatactgttggtggtaaacagtcagttgtctacctttatttcatccaaaatattagttcacttaacagaggaatggt

SEQ ID NO: 12360 - DNA, 80 bp, synthetic construct
  misc_feature 1..80: note = Synthetic: >Sparrow-cand-10980-11059
  source 1..80: mol_type = other DNA
cattggccacatctctggaactaccatcctccaggcaaatggtactcaaattgagtatcaacaaaatgcctctctcttga

SEQ ID NO: 12361 - DNA, 80 bp, synthetic construct
  misc_feature 1..80: note = Synthetic: >Sparrow-cand-11060-11139
  source 1..80: mol_type = other DNA
cctatttggctttcgctgtagaccctaaggctgcctaccttaagcatcttgctgacggtggttcacctatacagggttgt

SEQ ID NO: 12362 - DNA, 80 bp, synthetic construct
  misc_feature 1..80: note = Synthetic: >Sparrow-cand-11140-11219
  source 1..80: mol_type = other DNA
attcagatgattgctacaatgggtcccggatttgcggttactactaaaccacaacctaatgagcaccagtattcttatgg

SEQ ID NO: 12363 - DNA, 80 bp, synthetic construct
  misc_feature 1..80: note = Synthetic: >Sparrow-cand-11220-11299
  source 1..80: mol_type = other DNA
tggtgcctcaatctgtctttactgccgcgcacatataccacaccctggtgttgatgggcggtgtccatacaaggggcgct

SEQ ID NO: 12364 - DNA, 80 bp, synthetic construct
  misc_feature 1..80: note = Synthetic: >Sparrow-cand-11300-11379
  source 1..80: mol_type = other DNA
ttgttcacattgacaaagataaggagcctgtttcctttgccctcactcatgagccatgcagttcttgccagaggtgggtc

SEQ ID NO: 12365 - DNA, 80 bp, synthetic construct
  misc_feature 1..80: note = Synthetic: >Sparrow-cand-14280-14359
  source 1..80: mol_type = other DNA
gtctgtgcttaccagcatgtgacccagacatctcataaacgaatcattgctatcaacaactacatctgtagtgttgagaa

SEQ ID NO: 12366 - DNA, 80 bp, synthetic construct
  misc_feature 1..80: note = Synthetic: >Sparrow-cand-14360-14439
  source 1..80: mol_type = other DNA
ttgcaatgaagacaatgttgaaaaacttttcatctcaggcacagcgatttattgtgaaaaccacaaacctacactgtgca

SEQ ID NO: 12367 - DNA, 80 bp, synthetic construct
  misc_feature 1..80: note = Synthetic: >Sparrow-cand-14440-14519
  source 1..80: mol_type = other DNA
tacctattgtagctaatggctctgtttttggtatctaccgtcacacagcccgtggcagtgatgacatagatctctttaac

SEQ ID NO: 12368 - DNA, 80 bp, synthetic construct
  misc_feature 1..80: note = Synthetic: >Sparrow-cand-14520-14599
  source 1..80: mol_type = other DNA
gagcttgctacatctaattatgacactattgaaccttaccaaaaggccaatcgtgcaccactctcacttatgctcttcgc

SEQ ID NO: 12369 - DNA, 80 bp, synthetic construct
  misc_feature 1..80: note = Synthetic: >Sparrow-cand-14600-14679
  source 1..80: mol_type = other DNA
tgctgaaaccattaaggcacttgaggagtctatcaaaaagtcatatgcaactgcaactgttaaggatgtgtatgaccaac

SEQ ID NO: 12370 - DNA, 80 bp, synthetic construct
  misc_feature 1..80: note = Synthetic: >Sparrow-cand-14760-14839
  source 1..80: mol_type = other DNA
aacaagaatggaaagacccaagttggggattacattctcgctaaaacagatggcagtgacacttacacttacagaggaac

SEQ ID NO: 12371 - DNA, 80 bp, synthetic construct
  misc_feature 1..80: note = Synthetic: >Sparrow-cand-14840-14919
  source 1..80: mol_type = other DNA
atctacctataaactccaaacaggtgatgttctagtcctaatggcacatgttgttacaccgctttctgcaccaccagtgc

SEQ ID NO: 12372 - DNA, 80 bp, synthetic construct
  misc_feature 1..80: note = Synthetic: >Sparrow-cand-14920-14999
  source 1..80: mol_type = other DNA
tggcgcaaacaacatatgtcagaaaagcacttttacccgattctgttggcgcgtcttattatgtgcaacacttcaagtca

SEQ ID NO: 12373 - DNA, 80 bp, synthetic construct
  misc_feature 1..80: note = Synthetic: >Sparrow-cand-15080-15159
  source 1..80: mol_type = other DNA
ggccaaatactatcctagtgcgcgtatttgctacacagcctcatcgcatgcagcaatagacgcactttgtgaaaaagctt

SEQ ID NO: 12374 - DNA, 80 bp, synthetic construct
  misc_feature 1..80: note = Synthetic: >Sparrow-cand-15160-15239
  source 1..80: mol_type = other DNA
tcaagacactacctgtaggccaatgcagtcgtatcgtacccacacgtacaactgtcgagtgctttcaggagtttgtcgta

SEQ ID NO: 12375 - DNA, 80 bp, synthetic construct
  misc_feature 1..80: note = Synthetic: >Sparrow-cand-15240-15319
  source 1..80: mol_type = other DNA
aacaacacaactgcccaatacatcttctcaactatcaatgcacttcctgacataaagtgtgacattgtagttgtagatga

SEQ ID NO: 12376 - DNA, 80 bp, synthetic construct
  misc_feature 1..80: note = Synthetic: >Sparrow-cand-15320-15399
  source 1..80: mol_type = other DNA
agtttctatgttgaccaactatgagctttcctctgtgaatgccaggttggtttacaatcacattgtttatgttggtgacc

SEQ ID NO: 12377 - DNA, 80 bp, synthetic construct
  misc_feature 1..80: note = Synthetic: >Sparrow-cand-20480-20559
  source 1..80: mol_type = other DNA
tgacacctactgtgtcaccaaaccatattttaatatacaagttaatcttgcactgcactgtaccgttgcacactaactcg

SEQ ID NO: 12378 - DNA, 80 bp, synthetic construct
  misc_feature 1..80: note = Synthetic: >Sparrow-cand-20560-20639
  source 1..80: mol_type = other DNA
gcacggaatttggcgctgacacctgcaactttgacataaacgcactcaataatggcatgtccttcactcaactttgcatt

SEQ ID NO: 12379 - DNA, 80 bp, synthetic construct
  misc_feature 1..80: note = Synthetic: >Sparrow-cand-20640-20719
  source 1..80: mol_type = other DNA
agcactgttaacaatggtggctgcactattctggtacatgcgatattaaaataattgccacatacgtatggcactaccgc

SEQ ID NO: 12380 - DNA, 80 bp, synthetic construct
  misc_feature 1..80: note = Synthetic: >Sparrow-cand-20720-20799
  source 1..80: mol_type = other DNA
atacggaaacgaatttattttacctctgtagagggtcagacccacactgggacgcggcatgccaaaagcctctgtgtcag

SEQ ID NO: 12381 - DNA, 80 bp, synthetic construct
  misc_feature 1..80: note = Synthetic: >Sparrow-cand-20800-20879
  source 1..80: mol_type = other DNA
ctattgacacctccactgttgtcacaggtgtttgcactgactataccatttatggtatatcaggcacaggtgtcattcat

SEQ ID NO: 12382 - DNA, 80 bp, synthetic construct
  misc_feature 1..80: note = Synthetic: >Sparrow-cand-20880-20959
  source 1..80: mol_type = other DNA
caatctgaattacccttacataatggaatagcatttacctcccccactggagaactatatgcctttaaaaatacaactac

SEQ ID NO: 12383 - DNA, 80 bp, synthetic construct
  misc_feature 1..80: note = Synthetic: >Sparrow-cand-20960-21039
  source 1..80: mol_type = other DNA
tgacaaggcttatcaagtcttaccttgtgaaacctcctctcaagtagtagtcattaacaacacaattgttggtgccatca

SEQ ID NO: 12384 - DNA, 80 bp, synthetic construct
  misc_feature 1..80: note = Synthetic: >Sparrow-cand-21040-21119
  source 1..80: mol_type = other DNA
cttcaaccaacaatttcacactacgtggttttaccaagaccatacccacacctacattctactattccacaattggtaat

SEQ ID NO: 12385 - DNA, 80 bp, synthetic construct
  misc_feature 1..80: note = Synthetic: >Sparrow-cand-21120-21199
  source 1..80: mol_type = other DNA
gcaacaaccttcaactgcactgacccagctctatcctatggtccaattagtgtgtgcacagatggtgccatagtagaaac

SEQ ID NO: 12386 - DNA, 80 bp, synthetic construct
  misc_feature 1..80: note = Synthetic: >Sparrow-cand-21200-21279
  source 1..80: mol_type = other DNA
taaaatactccaagacacacgaccaatgatgtagacgctgtagtctccatttatgatggtgaagttgaaataccatccga

SEQ ID NO: 12387 - DNA, 80 bp, synthetic construct
  misc_feature 1..80: note = Synthetic: >Sparrow-cand-21280-21359
  source 1..80: mol_type = other DNA
ttttactctctctgttcagactgagtacctgcagatacaatctgagcaagttattgtagattgcccacagtatgtatgca

SEQ ID NO: 12388 - DNA, 80 bp, synthetic construct
  misc_feature 1..80: note = Synthetic: >Sparrow-cand-21360-21439
  source 1..80: mol_type = other DNA
atggtaacacccgttgcctgcatctactagcacaatatacatctgcatgctccaacatagaatcagctctacattctacc

SEQ ID NO: 12389 - DNA, 80 bp, synthetic construct
  misc_feature 1..80: note = Synthetic: >Sparrow-cand-21440-21519
  source 1..80: mol_type = other DNA
gctcagctagacagcagagagattacaacaatgtttcaaacctcatcgcagtcactagagctagccaacattaccaactt

SEQ ID NO: 12390 - DNA, 80 bp, synthetic construct
  misc_feature 1..80: note = Synthetic: >Sparrow-cand-21520-21599
  source 1..80: mol_type = other DNA
taagggagatggtatcaaatataattttacctccatcctaactaataagctaggtggtaagtctgccattgaagatttgc

SEQ ID NO: 12391 - DNA, 80 bp, synthetic construct
  misc_feature 1..80: note = Synthetic: >Sparrow-cand-21600-21679
  source 1..80: mol_type = other DNA
tctttaacaaagttgttaccaatggcctgggaactgtggaccaggattataaatcctgtactaaagacatagccattgct

SEQ ID NO: 12392 - DNA, 80 bp, synthetic construct
  misc_feature 1..80: note = Synthetic: >Sparrow-cand-21680-21759
  source 1..80: mol_type = other DNA
gacttagtttgctctcagtattacaatggcattatggtcctaccaggtgtcgttgatgctcagaagatggcaatgtatac

SEQ ID NO: 12393 - DNA, 80 bp, synthetic construct
  misc_feature 1..80: note = Synthetic: >Sparrow-cand-24480-24559
  source 1..80: mol_type = other DNA
gaggaaatcttaagtatggtgaactccctcctaatgatacccaggcaaccactcgtgttacttgggttaagggtccggga

SEQ ID NO: 12394 - DNA, 80 bp, synthetic construct
  misc_feature 1..80: note = Synthetic: >Sparrow-cand-24560-24639
  source 1..80: mol_type = other DNA
gcagacacttctattaagcctcatgttgccaaacgcaaccccaacaatcctaaacatcagctgctaccactccgatttcc

SEQ ID NO: 12395 - DNA, 80 bp, synthetic construct
  misc_feature 1..80: note = Synthetic: >Sparrow-cand-24640-24719
  source 1..80: mol_type = other DNA
aaatggagatggcccagctcaaggattcagagttgaccccttcaacgcaagaggaagacctcaggagcgtggaagtggcc

SEQ ID NO: 12396 - DNA, 80 bp, synthetic construct
  misc_feature 1..80: note = Synthetic: >Sparrow-cand-24720-24799
  source 1..80: mol_type = other DNA
cacgatctcagtctgttaacaccagaggcagtaataatcagcccagaaaacgcgaccagtccgcgcctgctgcggtacgt

SEQ ID NO: 12397 - DNA, 80 bp, synthetic construct
  misc_feature 1..80: note = Synthetic: >Sparrow-cand-24800-24879
  source 1..80: mol_type = other DNA
cgtaagacccaacatcaagctcccaagaggactttgcccaagggcaaaaccatttctcaggtatttggcaaccggtctcg

SEQ ID NO: 12398 - DNA, 80 bp, synthetic construct
  misc_feature 1..80: note = Synthetic: >Sparrow-cand-24880-24959
  source 1..80: mol_type = other DNA
tactggcgccaatgtcggctctgcagacactgagaagacgggtatggctgatcctagaatcatggctttagccagacatg

SEQ ID NO: 12399 - DNA, 80 bp, synthetic construct
  misc_feature 1..80: note = Synthetic: >Sparrow-cand-24960-25039
  source 1..80: mol_type = other DNA
ttcctggtgtccaggaaatgttatttgctggacatgtggattccacatttcaggcaggggccatgacccttaccttcacc

SEQ ID NO: 12400 - DNA, 80 bp, synthetic construct
  misc_feature 1..80: note = Synthetic: >Sparrow-cand-25040-25119
  source 1..80: mol_type = other DNA
tactcaatcactgtcaaggagggatctcctgactatgaaagacttaaggaggctctcaactcggttgtcaaccagagcta

SEQ ID NO: 12401 - DNA, 80 bp, synthetic construct
  misc_feature 1..80: note = Synthetic: >Sparrow-cand-25120-25199
  source 1..80: mol_type = other DNA
tgagccacccacgaaacctaccaaggaaaagaagcctgagaagtctgaaaagtctgctaaacctaagcagcagaagaaac

SEQ ID NO: 12402 - DNA, 80 bp, synthetic construct
  misc_feature 1..80: note = Synthetic: >Sparrow-cand-25200-25279
  source 1..80: mol_type = other DNA
ccaaaaaggtgactctgccagcagacaaacaagacctggagtgggatgatgcttttgagataaagcaagaatctgcagcg

SEQ ID NO: 12403 - DNA, 80 bp, synthetic construct
  misc_feature 1..80: note = Synthetic: >Sparrow-cand-25280-25359
  source 1..80: mol_type = other DNA
tagacaccaatctatgcctgtcaagcccacatacccacactcaagcatctctctggttccagagagttgccgaaactcat

SEQ ID NO: 12404 - DNA, 80 bp, synthetic construct
  misc_feature 1..80: note = Synthetic: >Sparrow-cand-25360-25439
  source 1..80: mol_type = other DNA
tagaaccctgctccttaccgaagccagggtgctacaaacaacacatcaattacgggtttgagctcataattgatgacctc

SEQ ID NO: 12405 - DNA, 80 bp, synthetic construct
  misc_feature 1..80: note = Synthetic: >Sparrow-cand-25440-25519
  source 1..80: mol_type = other DNA
ctcagaactggaaccacaaaggcacccaacgcttttctagttctggaaactgaagactacaacctctggaaattacattg

SEQ ID NO: 12406 - DNA, 80 bp, synthetic construct
  misc_feature 1..80: note = Synthetic: >Sparrow-cand-25520-25599
  source 1..80: mol_type = other DNA
gcagcgcggtcgtcactgcgggccaggacactgcatagccgttttccagtacaaaaactcaccacaaccctacgaaggac

SEQ ID NO: 12407 - DNA, 80 bp, synthetic construct
  misc_feature 1..80: note = Synthetic: >FelineAlpha1-cand-8560-8639
  source 1..80: mol_type = other DNA
aacttaaggtaacaacaaacctttttgaaggtgataaatttgtgggtagttttgaatcagcagctatgggtacttttgtt

SEQ ID NO: 12408 - DNA, 80 bp, synthetic construct
  misc_feature 1..80: note = Synthetic: >BtSk_AlphaCoV-cand-17420-17499
  source 1..80: mol_type = other DNA
aaggtgctcatgttattggcagcaatgttggtactaacgtcccactacaattgggcttttccaatggtgttgattttgtt

SEQ ID NO: 12409 - DNA, 80 bp, synthetic construct
  misc_feature 1..80: note = Synthetic: >Sb512-cand-17460-17539
  source 1..80: mol_type = other DNA
gatgtcgaaggtgctcatgttattggcagcaatgttggtactaatgttccactacaattgggcttttccaatggtgttga

SEQ ID NO: 12410 - DNA, 80 bp, synthetic construct
  misc_feature 1..80: note = Synthetic: >HKU32-cand-26080-26159
  source 1..80: mol_type = other DNA
gccccccccacaacagtgtttgtcactacacagacctcgcgtctcatcccctcaactaaacgaactcattatagtttgtt

SEQ ID NO: 12411 - DNA, 80 bp, synthetic construct
  misc_feature 1..80: note = Synthetic: >HKU4R-cand-11230-11309
  source 1..80: mol_type = other DNA
ttttatggcatgcgttatgtttactgttaaacataaacataccttcatgtcactcttcctattacctgtggcactttgtt

SEQ ID NO: 12412 - DNA, 80 bp, synthetic construct
  misc_feature 1..80: note = Synthetic: >HKU4-cand-1010-1089
  source 1..80: mol_type = other DNA
tataccgtgttgtttggaatgttacacgtcgtaatgtgccatattccaaacaaacggcttttactattgtgagtgttgtt

SEQ ID NO: 12413 - DNA, 80 bp, synthetic construct
  misc_feature 1..80: note = Synthetic: >HKU4R-cand-1000-1079
  source 1..80: mol_type = other DNA
attataccgtgttgtttggaatgttacacgtcgtaatgtgccatattccaaacaaacggcttttactattgtgggtgttg

SEQ ID NO: 12414 - DNA, 80 bp, synthetic construct
  misc_feature 1..80: note = Synthetic: >HKU10R-cand-11110-11189
  source 1..80: mol_type = other DNA
aaggagtggtcttactgtgttgatttgcacaataagattaatctgtgtaatgaccctgaagctgcacaagaaatgttgtt

SEQ ID NO: 12415 - DNA, 80 bp, synthetic construct
  misc_feature 1..80: note = Synthetic: >HKU4-cand-1330-1409
  source 1..80: mol_type = other DNA
gcttgtgattgtggtgctaattatagtgccaatgatgttgatttgcaatcttcaggtctagtacctaggaatgcgttgtt

SEQ ID NO: 12416 - DNA, 80 bp, synthetic construct
  misc_feature 1..80: note = Synthetic: >HKU4R-cand-1320-1399
  source 1..80: mol_type = other DNA
ttgcttgtgattgtggtgctaattatagtgccaatgatgtagatttgcagtcttcaggtcttgtacctaggaatgcgttg

SEQ ID NO: 12417 - DNA, 80 bp, synthetic construct
  misc_feature 1..80: note = Synthetic: >AlphaMink-cand-7660-7739
  source 1..80: mol_type = other DNA
ccatagttgtaggtactgtatttgacttagtagacaacatgaagcctgtgccagatgtgccagcttatgtgacacttgtt

SEQ ID NO: 12418 - DNA, 80 bp, synthetic construct
  misc_feature 1..80: note = Synthetic: >BetaSp-cand-22210-22289
  source 1..80: mol_type = other DNA
aagtaatagatgacttctgctttgatgatgcggctcttacattttgtaatccgcatattctaggcagatgcattgtcctg

SEQ ID NO: 12419 - DNA, 80 bp, synthetic construct
  misc_feature 1..80: note = Synthetic: >HKU15-cand-17380-17459
  source 1..80: mol_type = other DNA
ctctctgtccaaatcatgctcttgaataccaagagtttatcaatgcatacaatctcatggctcgccatggatttaatgtt

SEQ ID NO: 12420 - DNA, 80 bp, synthetic construct
  misc_feature 1..80: note = Synthetic: >HKU17-cand-17400-17479
  source 1..80: mol_type = other DNA
cacccatgctcttgaataccaggagtttatcaatgcatacaatctcatggctcgccatggatttaatgtttacataccac

SEQ ID NO: 12421 - DNA, 80 bp, synthetic construct
  misc_feature 1..80: note = Synthetic: >BtSk_AlphaCoV-cand-18470-18549
  source 1..80: mol_type = other DNA
atagtgagtgtgagaaacttcaggacgcagtcaattacgtgcctcttagagcatcaaattgcattaccaggtgtaatgtt

SEQ ID NO: 12422 - DNA, 80 bp, synthetic construct
  misc_feature 1..80: note = Synthetic: >Sb512-cand-18520-18599
  source 1..80: mol_type = other DNA
gtgagtgtgagaaacttcaggatgcagtcaattacgtgcctcttagagcatcaaattgcattaccaggtgtaatgttgga

SEQ ID NO: 12423 - DNA, 80 bp, synthetic construct
  misc_feature 1..80: note = Synthetic: >Alpha2-cand-25370-25449
  source 1..80: mol_type = other DNA
taattgtaattatattattttctatagcactacttaatgttgttaagttgtgcatggtttgttgtagattaagtaatgtt

SEQ ID NO: 12424 - DNA, 80 bp, synthetic construct
  misc_feature 1..80: note = Synthetic: >AlphaMink-cand-25380-25459
  source 1..80: mol_type = other DNA
aattgtaattatattattttctatagcactacttaacgttgttaagttgtgcatggtttgttgtagattaagtaatgttg

SEQ ID NO: 12425 - DNA, 80 bp, synthetic construct
  misc_feature 1..80: note = Synthetic: >HKU10R-cand-11510-11589
  source 1..80: mol_type = other DNA
ttaatagaaaatctaaggttattggtgctatgcattcattgcttatgggcatgcttcgtaagttggacatgtctaatgtt

SEQ ID NO: 12426 - DNA, 80 bp, synthetic construct
  misc_feature 1..80: note = Synthetic: >Sb512-cand-2060-2139
  source 1..80: mol_type = other DNA
ttaaacctgaacttgagttggagccaatcttcgagtgtgatgccatcccaggctttccaaaagttgcagcctctaatgtt

SEQ ID NO: 12427 - DNA, 80 bp, synthetic construct
  misc_feature 1..80: note = Synthetic: >Sk512R-cand-2050-2129
  source 1..80: mol_type = other DNA
tttttaaacctgaacttgagttggagccaatctttgagtgtgatgccatcccaggctttccaaaagttgcagcctctaat

SEQ ID NO: 12428 - DNA, 80 bp, synthetic construct
  misc_feature 1..80: note = Synthetic: >HKU15-cand-8080-8159
  source 1..80: mol_type = other DNA
cacccttcaggtgtagttgagcgatgtatggtctcagttgtctacaatggatctgcattgaatggcatctggcttaagaa

SEQ ID NO: 12429 - DNA, 80 bp, synthetic construct
  misc_feature 1..80: note = Synthetic: >SEAC-cand-2930-3009
  source 1..80: mol_type = other DNA
atgctagtgatggtaaagttttgccattgcggtttaggaaaaaggctggtggtaagaatgttgcctttgatgacaatgtt

SEQ ID NO: 12430 - DNA, 80 bp, synthetic construct
  misc_feature 1..80: note = Synthetic: >HKU4R-cand-10350-10429
  source 1..80: mol_type = other DNA
atagttttattgtgcaaaaacacataggagctcaggctaatctgcgtgttgttgctcattctatggttggtgtcttactt

SEQ ID NO: 12431 - DNA, 80 bp, synthetic construct
  misc_feature 1..80: note = Synthetic: >HKU5R-cand-23840-23919
  source 1..80: mol_type = other DNA
gctcgcgcgtacaactcctggccctttgcaaactactgttggttgtgcaatgggcttcattaattcttcaatggtagttg

SEQ ID NO: 12432 - DNA, 80 bp, synthetic construct
  misc_feature 1..80: note = Synthetic: >HKU2R-cand-15520-15599
  source 1..80: mol_type = other DNA
aactactgttgcaatgggaagttgggaaggctcgacctccccttaacaggaattctgtttttacctgcttccaaattagt

SEQ ID NO: 12433 - DNA, 80 bp, synthetic construct
  misc_feature 1..80: note = Synthetic: >BtRf_AlphaCoV-cand-15480-15559
  source 1..80: mol_type = other DNA
cctaaagaactactgttgcaatgggaagttgggaaggctcgacctcctcttaacaggaattctgtttttacttgttttca

SEQ ID NO: 12434 - DNA, 80 bp, synthetic construct
  misc_feature 1..80: note = Synthetic: >AlphaMink-cand-160-239
  source 1..80: mol_type = other DNA
gtctggctagctgagcgtgttccgtcacgctcagtaggtgcctcagctagttccgtctagctgttgcgtggatcctagtt

SEQ ID NO: 12435 - DNA, 80 bp, synthetic construct
  misc_feature 1..80: note = Synthetic: >MinkCoV1-cand-160-239
  source 1..80: mol_type = other DNA
ttggctggctgagcgtgttccgtcacgcttagtaggtgcttcagctagttccgtctagctgttgcgtggatcctagttcc

SEQ ID NO: 12436 - DNA, 80 bp, synthetic construct
  misc_feature 1..80: note = Synthetic: >HKU5R-cand-27610-27689
  source 1..80: mol_type = other DNA
taactatagcaaaccctggtttgtcaaaaattttaatcagcgttgtcgctgtacaaattgtttctttgcgcactcagcaa

SEQ ID NO: 12437 - DNA, 80 bp, synthetic construct
  misc_feature 1..80: note = Synthetic: >Lucheng19-cand-20490-20569
  source 1..80: mol_type = other DNA
aactatatattctggcgtaatagcacagtcatggcactgagctataattctgttttagatgttaataagtttcgtctaaa

SEQ ID NO: 12438 - DNA, 80 bp, synthetic construct
  misc_feature 1..80: note = Synthetic: >AcCoV_JC34-cand-20140-20219
  source 1..80: mol_type = other DNA
cgccaattatatattctggcgtaatagcactgtcatggcacttagttataattctgttttagatgttaataagtttcgtc

SEQ ID NO: 12439 - DNA, 80 bp, synthetic construct
  misc_feature 1..80: note = Synthetic: >HghCoV1-cand-27570-27649
  source 1..80: mol_type = other DNA
aactatgttaccttttgtccatcaacaattagggtcattcatagttaactttttcatctttaccgtagcttgcgctgtaa

SEQ ID NO: 12440 - DNA, 80 bp, synthetic construct
  misc_feature 1..80: note = Synthetic: >HKU31-cand-27690-27769
  source 1..80: mol_type = other DNA
gaactatgttaccttttgtccatcaacaattagggtcattcatagtaaactttttcatcttcaccgtagcttgcgctgta

SEQ ID NO: 12441 - DNA, 80 bp, synthetic construct
  misc_feature 1..80: note = Synthetic: >HghCoV1-cand-28930-29009
  source 1..80: mol_type = other DNA
tagtgaagccccttcagattttggtaccaggaatcctgctaatgacgcagctattgtcacgcagttcgcgcctggcactc

SEQ ID NO: 12442 - DNA, 80 bp, synthetic construct
  misc_feature 1..80: note = Synthetic: >SARSRC-cand-26040-26119
  source 1..80: mol_type = other DNA
agtgagtacgaacttatgtactcattcgtttcggaagaaacaggtacgttaatagttaatagcgtacttctttttgttgc

SEQ ID NO: 12443 - DNA, 80 bp, synthetic construct
  misc_feature 1..80: note = Synthetic: >BetaSp-cand-28140-28219
  source 1..80: mol_type = other DNA
gagatgtatgtaaaatggccttggtatgtatggcttctaattggccttgcaggtgtagctgtcttagtactcctattctt

SEQ ID NO: 12444 - DNA, 80 bp, synthetic construct
  misc_feature 1..80: note = Synthetic: >WIV16-cand-29720-29799
  source 1..80: mol_type = other DNA
aagacaacgtcatactgctgaataagcacattgacgcatacaaaacattcccaccaacagagcctaaaaaggacaaaaag

SEQ ID NO: 12445 - DNA, 80 bp, synthetic construct
  misc_feature 1..80: note = Synthetic: >SARSRC-cand-29130-29209
  source 1..80: mol_type = other DNA
gtcatactgctgaacaagcacattgacgcatacaaaacattcccaccaacagagcctaaaaaggacaaaaagaaaaagac

SEQ ID NO: 12446 - DNA, 80 bp, synthetic construct
  misc_feature 1..80: note = Synthetic: >HKU5R-cand-10550-10629
  source 1..80: mol_type = other DNA
tttaaagttgactgtggaatctgctaacccgcagacacccgcatatacttttaccactgtaaaaccaggagcgtccttta

SEQ ID NO: 12447 - DNA, 80 bp, synthetic construct
  misc_feature 1..80: note = Synthetic: >HKU8R-cand-14490-14569
  source 1..80: mol_type = other DNA
ctatgacacagcttaatcttaagtatgctattagtggtaaagagcgtgctaggactgttggtggtgtctctttgttgtct

SEQ ID NO: 12448 - DNA, 80 bp, synthetic construct
  misc_feature 1..80: note = Synthetic: >HKU15-cand-4880-4959
  source 1..80: mol_type = other DNA
gtaaggcaggtaaagttgtctttgtcagtgcttcgcttttgacccgtttctacaattaccttgtagagattggtgctctt

SEQ ID NO: 12449 - DNA, 80 bp, synthetic construct
  misc_feature 1..80: note = Synthetic: >Delta-cand-6080-6159
  source 1..80: mol_type = other DNA
gagcactatgtaaggcaggtaaagttgtctttgtcagtgcttcgcttttgacccgtttctacaattaccttgtagagatt

SEQ ID NO: 12450 - DNA, 80 bp, synthetic construct
  misc_feature 1..80: note = Synthetic: >SARSRC-cand-29530-29609
  source 1..80: mol_type = other DNA
aagagccaccacattttcaccgaggccacgcggagtacgatcgagggtacagtgaataatgctagggagagctgcctata

SEQ ID NO: 12451 - DNA, 80 bp, synthetic construct
  misc_feature 1..80: note = Synthetic: >HKU5R-cand-5760-5839
  source 1..80: mol_type = other DNA
ggtgtagagacctctgtgggtcactacttgcatgtacgcgtgaaggacaacctattatataagtatgactccggtagctt

SEQ ID NO: 12452 - DNA, 80 bp, synthetic construct
  misc_feature 1..80: note = Synthetic: >HKU4-cand-14110-14189
  source 1..80: mol_type = other DNA
aagctatgttaaacactgtaaaaatgtgtgaccacatggttaaaagtggccttgtgggtgttttaacacttgataaccaa

SEQ ID NO: 12453 - DNA, 80 bp, synthetic construct
  misc_feature 1..80: note = Synthetic: >HKU4R-cand-14110-14189
  source 1..80: mol_type = other DNA
ttaaacactgtaaaaatgtgtgaccacatggttaaaggcggccttgtgggtgttttaacacttgataaccaagaccttaa

SEQ ID NO: 12454 - DNA, 80 bp, synthetic construct
  misc_feature 1..80: note = Synthetic: >HKU15-cand-7120-7199
  source 1..80: mol_type = other DNA
aagctctactctgatgtgcttccgcacgtcgagtataaggctattgacattaatggtgatcttgttcctttcaagatacc

SEQ ID NO: 12455 - DNA, 80 bp, synthetic construct
  misc_feature 1..80: note = Synthetic: >HKU17-cand-7120-7199
  source 1..80: mol_type = other DNA
tactgaacacaagctgtactctgatgtgctcccgcacgttgagtataaggctattgacattaatggtgatcttgttcctt

SEQ ID NO: 12456 - DNA, 80 bp, synthetic construct
  misc_feature 1..80: note = Synthetic: >HKU5R-cand-12390-12469
  source 1..80: mol_type = other DNA
taccaaaaggctctgaactctggtgacgcgtcaccgcaggttcttaaggctttgcagaaggctgttaatattgctaagaa

SEQ ID NO: 12457 - DNA, 80 bp, synthetic construct
  misc_feature 1..80: note = Synthetic: >Alpha2-cand-26250-26329
  source 1..80: mol_type = other DNA
aagctgcaaattctacaggatggtcatactatgttcgtgctaaagcaggcgattactcaacagaagcaagaaatgacaat

SEQ ID NO: 12458 - DNA, 80 bp, synthetic construct
  misc_feature 1..80: note = Synthetic: >AlphaMink-cand-26260-26339
  source 1..80: mol_type = other DNA
ggctgcaaattctactggatggtcttattatgttcgtgctaaagcaggcgattactcaacagaagcaagaaatgacaatt

SEQ ID NO: 12459 - DNA, 80 bp, synthetic construct
  misc_feature 1..80: note = Synthetic: >BtRf_AlphaCoV-cand-17770-17849
  source 1..80: mol_type = other DNA
aagctgttcatgacattggaaatcctaaaggcatacgttgtgctgtaactaatgtaccttggtactgttacgacaaacag

SEQ ID NO: 12460 - DNA, 80 bp, synthetic construct
  misc_feature 1..80: note = Synthetic: >HKU2R-cand-13300-13379
  source 1..80: mol_type = other DNA
tctggaacaaggatattaatacccataactctcgccttagcatgactgatttgttacagtttgttacagatcctggctta

SEQ ID NO: 12461 - DNA, 80 bp, synthetic construct
  misc_feature 1..80: note = Synthetic: >BetaSp-cand-25660-25739
  source 1..80: mol_type = other DNA
taatgttgtaaacacgtgtgttcagaataaaacttggtctgccgcatgccccactggtactgttgaacgacctcaaattg

SEQ ID NO: 12462 - DNA, 80 bp, synthetic construct
  misc_feature 1..80: note = Synthetic: >Delta-cand-13750-13829
  source 1..80: mol_type = other DNA
aagtactgggaccgtccttaccatcctaacactgttgaatgtccagatgaccgttgcgtattgcactgtgcgaacttcaa

SEQ ID NO: 12463 - DNA, 80 bp, synthetic construct
  misc_feature 1..80: note = Synthetic: >HKU5R-cand-2170-2249
  source 1..80: mol_type = other DNA
aagtagagcaactcactaaccttgtcttctcctcatgccagagcgcagttacagcttttgtacaggcatgcatgtctact

SEQ ID NO: 12464 - DNA, 80 bp, synthetic construct
  misc_feature 1..80: note = Synthetic: >MbCoV1-cand-16180-16259
  source 1..80: mol_type = other DNA
agactcacttaggttgtttgctgctgaaactgttaaagctcgtgaagagagtgttaagtcttcttatgcagctgctactt

SEQ ID NO: 12465 - DNA, 80 bp, synthetic construct
  misc_feature 1..80: note = Synthetic: >MsbCoV1-cand-16160-16239
  source 1..80: mol_type = other DNA
atgaggtcaaagactcacttaggttgtttgctgctgaaactgtcaaagctcgtgaagagagtgttaagtcttcttatgca

SEQ ID NO: 12466 - DNA, 80 bp, synthetic construct
  misc_feature 1..80: note = Synthetic: >SARSRC-cand-29050-29129
  source 1..80: mol_type = other DNA
aagtcacaccttcgggaacatggctgacttatcatggagccattaaattggatgacaaagatccccaattcaaagacaac

SEQ ID NO: 12467 - DNA, 80 bp, synthetic construct
  misc_feature 1..80: note = Synthetic: >WIV16-cand-29640-29719
  source 1..80: mol_type = other DNA
tggcatggaagtcacaccttcgggaacatggctgacttatcatggagccattaaattggatgacaaagatccacaattca

SEQ ID NO: 12468 - DNA, 80 bp, synthetic construct
  misc_feature 1..80: note = Synthetic: >HKU4R-cand-4760-4839
  source 1..80: mol_type = other DNA
gcagataataaattctatgtggtaaagaatgatgtagctttaccctttagtgatttagaagcgtgtagggcttatttgac

SEQ ID NO: 12469 - DNA, 80 bp, synthetic construct
  misc_feature 1..80: note = Synthetic: >SEAC-cand-23320-23399
  source 1..80: mol_type = other DNA
ggacggcgtattagtctctgctaatttaagttattggcagtggtcaccgcgtaacctttacaaaccagaaaatctgactt

SEQ ID NO: 12470 - DNA, 80 bp, synthetic construct
  misc_feature 1..80: note = Synthetic: >HKU5R-cand-18240-18319
  source 1..80: mol_type = other DNA
tttctcttaacaactacaagcttcagtctcagatagtaacgggcttgtataaagattgctccagagagtcatctggactt

SEQ ID NO: 12471 - DNA, 80 bp, synthetic construct
  misc_feature 1..80: note = Synthetic: >SEAC-cand-24120-24199
  source 1..80: mol_type = other DNA
tattgcttactgtggcggtgttgttgacagttgcattatacttgttgctgttgtaagcagattactgtataccagttatt

SEQ ID NO: 12472 - DNA, 80 bp, synthetic construct
  misc_feature 1..80: note = Synthetic: >WIV16-cand-11190-11269
  source 1..80: mol_type = other DNA
ttgaattggctgacactagcttgtctggttatcggcttaaggactgtgttatgtatgcttcagctttagttttgcttatt

SEQ ID NO: 12473 - DNA, 80 bp, synthetic construct
  misc_feature 1..80: note = Synthetic: >BtRl_BetaCoV-cand-11160-11239
  source 1..80: mol_type = other DNA
ggctgacactagcttgtctggttatcggcttaaggattgtgttatgtatgcttcagctttagtattgcttattctcatga

SEQ ID NO: 12474 - DNA, 80 bp, synthetic construct
  misc_feature 1..80: note = Synthetic: >HKU5R-cand-6480-6559
  source 1..80: mol_type = other DNA
aataagctacccattatcaagtgcaaagggctcaaaaagccatttgtaaaggatgggtatagttttgttaatgacccaca

SEQ ID NO: 12475 - DNA, 80 bp, synthetic construct
  misc_feature 1..80: note = Synthetic: >BatCoV1A-cand-10820-10899
  source 1..80: mol_type = other DNA
ttgttagtgtgttttggtctatgtttttgtcagagttattgtactatacttctagctactggatcaaacctgaccttatt

SEQ ID NO: 12476 - DNA, 80 bp, synthetic construct
  misc_feature 1..80: note = Synthetic: >MbCoV1-cand-10650-10729
  source 1..80: mol_type = other DNA
cttgttagtgtgttttggtctatgtttttgtcagagcttttgtattacacatctagctattggataaaaccagacctaat

SEQ ID NO: 12477 - DNA, 80 bp, synthetic construct
  misc_feature 1..80: note = Synthetic: >HKU15-cand-6720-6799
  source 1..80: mol_type = other DNA
ctttgcaaataagtttttggcatttgatagcttcattcaagcaccttacactaattcacctgactgtccagttgttgtgg

SEQ ID NO: 12478 - DNA, 80 bp, synthetic construct
  misc_feature 1..80: note = Synthetic: >SEAC-cand-23880-23959
  source 1..80: mol_type = other DNA
tttccagttgacacttgagggtgtcgttaactctactattagagctgctaaacttgaccctaatgacgaagctattatta

SEQ ID NO: 12479 - DNA, 80 bp, synthetic construct
  misc_feature 1..80: note = Synthetic: >Alpha2-cand-20030-20109
  source 1..80: mol_type = other DNA
atacattattgatggaaatgtaatgcatgctaattacatattttggagaaattcaactgttatgtctttgtcctattatt

SEQ ID NO: 12480 - DNA, 80 bp, synthetic construct
  misc_feature 1..80: note = Synthetic: >MinkCoV1-cand-20070-20149
  source 1..80: mol_type = other DNA
attattgatggaaatgtaatgcatgctaattacatattttggagaaattcgactgttatggctttgtcctattattctgt

SEQ ID NO: 12481 - DNA, 80 bp, synthetic construct
  misc_feature 1..80: note = Synthetic: >AlphaMink-cand-23460-23539
  source 1..80: mol_type = other DNA
aataatgccatctaccaaacttcacaaagtttgtcaacagtggcacaagctttaactaaagttcaagatgttgtcaattc

SEQ ID NO: 12482 - DNA, 80 bp, synthetic construct
  misc_feature 1..80: note = Synthetic: >HKU4R-cand-11390-11469
  source 1..80: mol_type = other DNA
actagtgtgtatatgcgcactacacatttggactttggcttatatattagccttagttttgtattagcgattattgttag

SEQ ID NO: 12483 - DNA, 80 bp, synthetic construct
  misc_feature 1..80: note = Synthetic: >Sk512R-cand-10020-10099
  source 1..80: mol_type = other DNA
cgcaatggaatgacggcattgaaaaatgtcgattgcttttccttgcttgttgcaaaaacaggtgttgatgtaggtagatt

SEQ ID NO: 12484 - DNA, 80 bp, synthetic construct
  misc_feature 1..80: note = Synthetic: >Sb512-cand-10030-10109
  source 1..80: mol_type = other DNA
aatggaatgacggcattgaaaaatgtcgattgtttttccttgcttgttgcaaaaacaggtgttgatgtaggtagattgct

SEQ ID NO: 12485 - DNA, 80 bp, synthetic construct
  misc_feature 1..80: note = Synthetic: >HKU4-cand-2530-2609
  source 1..80: mol_type = other DNA
aatcttgttttgccaggcgattataacaagaagactttaggtattcttgaccctgttcccaatgcagacactattgacgt

SEQ ID NO: 12486 - DNA, 80 bp, synthetic construct
  misc_feature 1..80: note = Synthetic: >HKU4R-cand-2520-2599
  source 1..80: mol_type = other DNA
tgaatcttgtcttgccaggcgattataacaagaagactttaggtattcttgaccctgttcccaatgcagacactattgac

SEQ ID NO: 12487 - DNA, 80 bp, synthetic construct
  misc_feature 1..80: note = Synthetic: >BetaSp-cand-4200-4279
  source 1..80: mol_type = other DNA
atctcacagccatgtaagacatgtggtcagagtatggtggcacttaagctagatgcaccatgcacactacacttttcatt

SEQ ID NO: 12488 - DNA, 80 bp, synthetic construct
  misc_feature 1..80: note = Synthetic: >WIV16-cand-28990-29069
  source 1..80: mol_type = other DNA
ctcagccccagatggtacttttattacctaggaaccggcccagaagcttcacttccctacggcgctaacaaagaaggcat

SEQ ID NO: 12489 - DNA, 80 bp, synthetic construct
  misc_feature 1..80: note = Synthetic: >HKU24-cand-2580-2659
  source 1..80: mol_type = other DNA
aatgaaagcagctcgtctgtgtgttgtagacaatttgtatatggctcaaaacggtgactgtctatatcctgtgatatttg

SEQ ID NO: 12490 - DNA, 80 bp, synthetic construct
  misc_feature 1..80: note = Synthetic: >HKU8R-cand-18260-18339
  source 1..80: mol_type = other DNA
aatgaacacgttgcttctggtgatgctataatgacccgctgtttggctatttatgattgctttgttaagaatgttgattg

SEQ ID NO: 12491 - DNA, 80 bp, synthetic construct
  misc_feature 1..80: note = Synthetic: >BtSk_AlphaCoV-cand-19350-19429
  source 1..80: mol_type = other DNA
cggactagaagattatggttttgaacatgttgtgtttggtgatgtttctaaaaccacattgggtggtttgcatttactta

SEQ ID NO: 12492 - DNA, 80 bp, synthetic construct
  misc_feature 1..80: note = Synthetic: >BM48_31-cand-19070-19149
  source 1..80: mol_type = other DNA
actagagtgttatctaacttgaatctgcctggctgtgatggtggtagtttgtatgtaaataaacatgcattccacacacc

SEQ ID NO: 12493 - DNA, 80 bp, synthetic construct
  misc_feature 1..80: note = Synthetic: >WIV16-cand-4980-5059
  source 1..80: mol_type = other DNA
catacttggatggtgctgatgttacaaaaattaaaccccatgtaaatcatgagggtaagactttctttgtactacctagt

SEQ ID NO: 12494 - DNA, 80 bp, synthetic construct
  misc_feature 1..80: note = Synthetic: >BtRl_BetaCoV-cand-4950-5029
  source 1..80: mol_type = other DNA
ggatggtgctgatgtcactaaaaccaaacctcatgtaaatcatgagggtaagactttctttgtactacctagtgatgata

SEQ ID NO: 12495 - DNA, 80 bp, synthetic construct
  misc_feature 1..80: note = Synthetic: >HKU4R-cand-2040-2119
  source 1..80: mol_type = other DNA
ttccttatgacataccttgcgatgtcagtaattttgtagagctgctgttagattgtggcaaacttacagtggctactagt

SEQ ID NO: 12496 - DNA, 80 bp, synthetic construct
  misc_feature 1..80: note = Synthetic: >HKU4-cand-2050-2129
  source 1..80: mol_type = other DNA
ccttatgacataccttgcgatgtcagtaattttgtagagctgctgttagattgtggtaaacttacagtggctactagtta

SEQ ID NO: 12497 - DNA, 80 bp, synthetic construct
  misc_feature 1..80: note = Synthetic: >BtSk_AlphaCoV-cand-10470-10549
  source 1..80: mol_type = other DNA
actataaagtgcctttcggtggatttaatgtcacaggtgttcttaacatatcactctgttgttttgttatgggtttgcat

SEQ ID NO: 12498 - DNA, 80 bp, synthetic construct
  misc_feature 1..80: note = Synthetic: >BetaSp-cand-29180-29259
  source 1..80: mol_type = other DNA
ctttctcttacagacacagtgtggtatgtggggcagataattttaattgttgctatttgcctgcttgttattgttatagt

SEQ ID NO: 12499 - DNA, 80 bp, synthetic construct
  misc_feature 1..80: note = Synthetic: >Sk512R-cand-5890-5969
  source 1..80: mol_type = other DNA
gtgatacccctggtaaacctgttgtagccactgaaaatcttttgttagatggtgtgtcctacacagtgtttcaggatagt

SEQ ID NO: 12500 - DNA, 80 bp, synthetic construct
  misc_feature 1..80: note = Synthetic: >Sb512-cand-5900-5979
  source 1..80: mol_type = other DNA
atacccctggtaaacctgttgtagccactgaaaatcttttgttagatggtgtgtcctatacagtgtttcaggatagtacc

SEQ ID NO: 12501 - DNA, 80 bp, synthetic construct
  misc_feature 1..80: note = Synthetic: >Alpha2-cand-13830-13909
  source 1..80: mol_type = other DNA
actatgacacaaatgaatctaaagtacgcgatttctggtaaggctagagcacgtactgtgggtggtgtttcgttattgtc

SEQ ID NO: 12502 - DNA, 80 bp, synthetic construct
  misc_feature 1..80: note = Synthetic: >MinkCoV1-cand-13870-13949
  source 1..80: mol_type = other DNA
tgacacaaatgaatctaaagtacgcgatttctggtaaggctagagcacgtactgtgggtggtgtttcgctattatccact

SEQ ID NO: 12503 - DNA, 80 bp, synthetic construct
  misc_feature 1..80: note = Synthetic: >HKU4-cand-1570-1649
  source 1..80: mol_type = other DNA
actatgtactttgttcctcgtgctaaatcttgtgtctcacgcataggtgatgcaatctttactggttgcacaggcacttg

SEQ ID NO: 12504 - DNA, 80 bp, synthetic construct
  misc_feature 1..80: note = Synthetic: >BtRl_BetaCoV-cand-11800-11879
  source 1..80: mol_type = other DNA
tcatcttctaaattgtgggcacaatgtgtacaactccacaatgatatccttcttgcaaaagacacaactgaagccttcga

SEQ ID NO: 12505 - DNA, 80 bp, synthetic construct
  misc_feature 1..80: note = Synthetic: >HKU5R-cand-18960-19039
  source 1..80: mol_type = other DNA
gatatgactatgtctataacccattttttgtagatgtacaacaatggggatatataggcaatttagcgactaatcacgac

SEQ ID NO: 12506 - DNA, 80 bp, synthetic construct
  misc_feature 1..80: note = Synthetic: >MbCoV1-cand-27640-27719
  source 1..80: mol_type = other DNA
gaaactgtggatcagcttctgtagttgcaatgggtgttgaagcacctaattttcctcagattgctgaattgattcctact

SEQ ID NO: 12507 - DNA, 80 bp, synthetic construct
  misc_feature 1..80: note = Synthetic: >MsbCoV1-cand-27640-27719
  source 1..80: mol_type = other DNA
tggatcagcttctgtggttgcaatgggtgttgaagcacctaattttcctcagattgctgaattgattcctactcaggctg

SEQ ID NO: 12508 - DNA, 80 bp, synthetic construct
  misc_feature 1..80: note = Synthetic: >HghCoV1-cand-17090-17169
  source 1..80: mol_type = other DNA
agtatgtaaaaatagttggattgtatccaacaattacagtaccagaggagttttctactcatgtagtcaatttccaaaag

SEQ ID NO: 12509 - DNA, 80 bp, synthetic construct
  misc_feature 1..80: note = Synthetic: >MbCoV1-cand-20900-20979
  source 1..80: mol_type = other DNA
gatttagctaaattccaatgcagacataaggcgactgttgttatagctttaaaagataatgacattagtgatgtaatact

SEQ ID NO: 12510 - DNA, 80 bp, synthetic construct
  misc_feature 1..80: note = Synthetic: >MsbCoV1-cand-20880-20959
  source 1..80: mol_type = other DNA
tagtgtattggatttagctaaattccaatgcagacataaggcaactgttgttatagctttaaaagataatgatattagtg

SEQ ID NO: 12511 - DNA, 80 bp, synthetic construct
  misc_feature 1..80: note = Synthetic: >HKU8R-cand-19140-19219
  source 1..80: mol_type = other DNA
atgtgctctttgttaacaagaccactttaccaacaaatgtggcatttgaactttacgcaaaacgtaagactggtaatact

SEQ ID NO: 12512 - DNA, 80 bp, synthetic construct
  misc_feature 1..80: note = Synthetic: >HKU5R-cand-8880-8959
  source 1..80: mol_type = other DNA
agtcaagttgctttccatgaggaccgtattctcacatacaaagttgtagagaatggcatcattagggatatcacccctag

SEQ ID NO: 12513 - DNA, 80 bp, synthetic construct
  misc_feature 1..80: note = Synthetic: >Sb512-cand-25010-25089
  source 1..80: mol_type = other DNA
tagctttattaatttatgcacccattttaatattttgtggtgcatacttggacgcttttatagtagtcgcaacattgact

SEQ ID NO: 12514 - DNA, 80 bp, synthetic construct
  misc_feature 1..80: note = Synthetic: >Delta-cand-13430-13509
  source 1..80: mol_type = other DNA
ttggggatattcttaaccgttgtgttcttaatgccaataagtttgctagtgcctgtatagacgctggtcttgttggcata

SEQ ID NO: 12515 - DNA, 80 bp, synthetic construct
  misc_feature 1..80: note = Synthetic: >MinkCoV1-cand-14990-15069
  source 1..80: mol_type = other DNA
ggataaattttggagtgaagagttttatgctaatctgtacgaaaagtctactgttttacaagctgcgggtatgtgtgttg

SEQ ID NO: 12516 - DNA, 80 bp, synthetic construct
  misc_feature 1..80: note = Synthetic: >AlphaMink-cand-14960-15039
  source 1..80: mol_type = other DNA
ggtcaggataaattttggagtgaagagttttatgctaatttgtatgaaaagtctactgttttacaagctgcgggtatgtg

SEQ ID NO: 12517 - DNA, 80 bp, synthetic construct
  misc_feature 1..80: note = Synthetic: >HghCoV1-cand-2440-2519
  source 1..80: mol_type = other DNA
tgttatttatgaaggtaaagatgccttagtgttttcttcgggaacatatcattgtgtaacagcacctggaagtgttgtgg

SEQ ID NO: 12518 - DNA, 80 bp, synthetic construct
  misc_feature 1..80: note = Synthetic: >MsbCoV1-cand-27960-28039
  source 1..80: mol_type = other DNA
ctgctgttgagcttgaaatggtcgatgaagtcttcgacatcgatcctcttggtgactctgttgcttgagtcaatctgttg

SEQ ID NO: 12519 - DNA, 80 bp, synthetic construct
  misc_feature 1..80: note = Synthetic: >MbCoV1-cand-27960-28039
  source 1..80: mol_type = other DNA
caggaacctgctgttgagcttgaaatggtcgatgaagtcttcgacatcgatcctcttggtgactctgttgcttgagtcaa

SEQ ID NO: 12520 - DNA, 80 bp, synthetic construct
  misc_feature 1..80: note = Synthetic: >Sk512R-cand-5810-5889
  source 1..80: mol_type = other DNA
tgatggtaactgtgtacatggtctcccacttgttgaccgtgtcgtctcagtcaatggcactgttattattaccaatgttg

SEQ ID NO: 12521 - DNA, 80 bp, synthetic construct
  misc_feature 1..80: note = Synthetic: >Sb512-cand-5820-5899
  source 1..80: mol_type = other DNA
tggtaactgcgtacatggtctcccacttgttgaccgtgtcgtctcagtcaatggcactgttattattaccaatgttggtg

SEQ ID NO: 12522 - DNA, 80 bp, synthetic construct
  misc_feature 1..80: note = Synthetic: >HKU10R-cand-17350-17429
  source 1..80: mol_type = other DNA
ttaggtttgatactaacataccaggttaccacagtttattttgcaccagagactttgctatgagacatgttagaggttgg

SEQ ID NO: 12523 - DNA, 80 bp, synthetic construct
  misc_feature 1..80: note = Synthetic: >HghCoV1-cand-27730-27809
  source 1..80: mol_type = other DNA
caaccagccatatatgtttataacatgggacattctgtctatgtaaagtatcagaatagtaaaccagaactgccgccagc

SEQ ID NO: 12524 - DNA, 80 bp, synthetic construct
  misc_feature 1..80: note = Synthetic: >HKU31-cand-27850-27929
  source 1..80: mol_type = other DNA
tcaaccagccatatatgtttataacatgggacattctgtctatgtaaagtatcagaatagtaaaccagaactgccgccag

SEQ ID NO: 12525 - DNA, 80 bp, synthetic construct
  misc_feature 1..80: note = Synthetic: >BtSk_AlphaCoV-cand-18390-18469
  source 1..80: mol_type = other DNA
caaccatgctttccacacaccagcttatgataaacgtgcatttgctaagttaaaagcaatgccgtttttcttttatgatg

SEQ ID NO: 12526 - DNA, 80 bp, synthetic construct
  misc_feature 1..80: note = Synthetic: >BetaSp-cand-18770-18849
  source 1..80: mol_type = other DNA
tgttatctgaaagagacagctacaaatttgctaaagttgtagcgcgtgctccaccaggtgaacaatttaaacatcttata

SEQ ID NO: 12527 - DNA, 80 bp, synthetic construct
  misc_feature 1..80: note = Synthetic: >FelineAlpha1-cand-28880-28959
  source 1..80: mol_type = other DNA
ctgagttataagacaacccgatgtttaaaactggtctttccgaggaattactggtcatcgcgctgtctactcttgtacag

SEQ ID NO: 12528 - DNA, 80 bp, synthetic construct
  misc_feature 1..80: note = Synthetic: >HKU5R-cand-10000-10079
  source 1..80: mol_type = other DNA
ctgatggtaaactgaattgtagtttccaggatgcagctgctaatatctttgtgattaacaaggatacctatgtggcactc

SEQ ID NO: 12529 - DNA, 80 bp, synthetic construct
  misc_feature 1..80: note = Synthetic: >HKU4R-cand-600-679
  source 1..80: mol_type = other DNA
ctgcaatgatgcgcaccacattgaatgctaagcctcttggtatgttctttccatatgattcaagtttggagactggtgaa

SEQ ID NO: 12530 - DNA, 80 bp, synthetic construct
  misc_feature 1..80: note = Synthetic: >HKU4-cand-610-689
  source 1..80: mol_type = other DNA
gcaatgatgcgcaccacattgaatgctaagcctcttggtatgttctttccatatgattcaagtttggagactggtgaata

SEQ ID NO: 12531 - DNA, 80 bp, synthetic construct
  misc_feature 1..80: note = Synthetic: >HKU23-cand-25540-25619
  source 1..80: mol_type = other DNA
gtgttaattatgatctttatggtatttctggccaaggcatttttgtcgaggttaatgcgacttattataatagttggcag

SEQ ID NO: 12532 - DNA, 80 bp, synthetic construct
  misc_feature 1..80: note = Synthetic: >HKU14-cand-25700-25779
  source 1..80: mol_type = other DNA
taattatgatctctatggcatctcaggccaaggcatttttgtcgaggttaatgcgacttattataatagttggcagaacc

SEQ ID NO: 12533 - DNA, 80 bp, synthetic construct
  misc_feature 1..80: note = Synthetic: >HKU5R-cand-17920-17999
  source 1..80: mol_type = other DNA
tgctagctctgccattaacagacctcagcttaactttgttaagtcttttattgctgctaaccccaattggagtaaagcag

SEQ ID NO: 12534 - DNA, 80 bp, synthetic construct
  misc_feature 1..80: note = Synthetic: >SEAC-cand-24840-24919
  source 1..80: mol_type = other DNA
ctggaatatcatactgacagtatttattgcagtgcttcagtatggtaacatgaagtacagtttctttctctatggagtta

SEQ ID NO: 12535 - DNA, 80 bp, synthetic construct
  misc_feature 1..80: note = Synthetic: >MK618759-cand-24670-24749
  source 1..80: mol_type = other DNA
ttggccccttaacattgcagtaggtgtaatttcatgtgtatatccaccagacacagcgggtcttatcgcagcgataatac

SEQ ID NO: 12536 - DNA, 80 bp, synthetic construct
  misc_feature 1..80: note = Synthetic: >KU556806-cand-24670-24749
  source 1..80: mol_type = other DNA
ttggcctctcaacattgcagtaggtgtaatttcatgtatatacccaccaaacacaggaggtcttgtcgcagcgataatac

SEQ ID NO: 12537 - DNA, 80 bp, synthetic construct
  misc_feature 1..80: note = Synthetic: >MN517817-cand-23270-23349
  source 1..80: mol_type = other DNA
tcagtgctagcgtctgctaagcagtctgaataccttagagtatcacaacagcgtgagttggctactcaaaaaattaatga

SEQ ID NO: 12538 - DNA, 80 bp, synthetic construct
  misc_feature 1..80: note = Synthetic: >MN128086-cand-15370-15449
  source 1..80: mol_type = other DNA
acctcggaggtatgtcatacttctgcggtaaccataaaccaaagttgtcaataccgttagtatctaatggtactgttttt

SEQ ID NO: 12539 - DNA, 80 bp, synthetic construct
  misc_feature 1..80: note = Synthetic: >MN517816-cand-15050-15129
  source 1..80: mol_type = other DNA
aaaactctatcaagagctttctcagaatatgcttatggattactcttttgttatggatatagacaggggtagtaaatttt

SEQ ID NO: 12540 - DNA, 80 bp, synthetic construct
  misc_feature 1..80: note = Synthetic: >MT114543-cand-22680-22759
  source 1..80: mol_type = other DNA
taaaaatggtgctttggtctttattaacgttacccactctgatggtgacgttcaaccaattagcactggtaatgtcacga

SEQ ID NO: 12541 - DNA, 80 bp, synthetic construct
  misc_feature 1..80: note = Synthetic: >AJ311317-cand-640-719
  source 1..80: mol_type = other DNA
taaggattacgctgatgcttttgcagttaggcagaagtttgaccgtagtctccagactgggaaacagttcaaatttgaaa

SEQ ID NO: 12542 - DNA, 80 bp, synthetic construct
  misc_feature 1..80: note = Synthetic: >NC_010800-cand-640-719
  source 1..80: mol_type = other DNA
taaggattacgctgatgcttttgcagttaggcataagtttgaccgtaatcttcagactgggaagcagtttaaatttgaaa

SEQ ID NO: 12543 - DNA, 80 bp, synthetic construct
  misc_feature 1..80: note = Synthetic: >MT114541-cand-23520-23599
  source 1..80: mol_type = other DNA
ttctatcagtgacatttataacaggcttgatgaactgagtgctgatgcacaagttgataggctgattacaggcagactta

SEQ ID NO: 12544 - DNA, 80 bp, synthetic construct
  misc_feature 1..80: note = Synthetic: >MN531555-cand-23610-23689
  source 1..80: mol_type = other DNA
tcgtattcaaggtgttatacagggtctcaatgactctttgatagacctcgaaacactctcaattctcaaaacttacatta

SEQ ID NO: 12545 - DNA, 80 bp, synthetic construct
  misc_feature 1..80: note = Synthetic: >MT114543-cand-720-799
  source 1..80: mol_type = other DNA
gatattcctcacaaattgccaaactgtgctactaggtgtgtagcaccaccagtcaaaaagaactctaaaatagttctgtc

SEQ ID NO: 12546 - DNA, 80 bp, synthetic construct
  misc_feature 1..80: note = Synthetic: >MK618759-cand-12730-12809
  source 1..80: mol_type = other DNA
gattgcgatgttcttaaggaaatacttgtcacttatggttgtatagaagattatcaccctaagtggtttgaagagaataa

SEQ ID NO: 12547 - DNA, 80 bp, synthetic construct
  misc_feature 1..80: note = Synthetic: >MT114544-cand-100-179
  source 1..80: mol_type = other DNA
tcctgtgatctccctcgccggccgccaggagaatgagttccaaacaattcaagatcctcgtcaacgaggactaccaagtc

SEQ ID NO: 12548 - DNA, 80 bp, synthetic construct
  misc_feature 1..80: note = Synthetic: >MT114543-cand-160-239
  source 1..80: mol_type = other DNA
gtcctgcgactccctcgccggccgccaggagaatgagttccaaacaattcaagatcctcgtcaatgaggactaccaagtc

SEQ ID NO: 12549 - DNA, 80 bp, synthetic construct
  misc_feature 1..80: note = Synthetic: >MT114541-cand-26880-26959
  source 1..80: mol_type = other DNA
gattttgtacccaaaggaataggtaacaaggatcaacagattggttattggaatagacaaactcgctatcgcatggtgaa

SEQ ID NO: 12550 - DNA, 80 bp, synthetic construct
  misc_feature 1..80: note = Synthetic: >MT114538-cand-2970-3049
  source 1..80: mol_type = other DNA
gatactctagcaaaccagggtgtcgaacttgaaggttacttcatttatgacacttgtggtggctttgatatcaaaaatcc

SEQ ID NO: 12551 - DNA, 80 bp, synthetic construct
  misc_feature 1..80: note = Synthetic: >MT114544-cand-13750-13829
  source 1..80: mol_type = other DNA
tgctatttctggaaaggctagagctcgtacagtgggaggagtgtcacttctttctactatgactacgagacaatatcatc

SEQ ID NO: 12552 - DNA, 80 bp, synthetic construct
  misc_feature 1..80: note = Synthetic: >MT114542-cand-13750-13829
  source 1..80: mol_type = other DNA
tgctatttctggaaaggctagagctcgtacagtaggaggagtttcactcctttctactatgactacgagacaataccacc

SEQ ID NO: 12553 - DNA, 80 bp, synthetic construct
  misc_feature 1..80: note = Synthetic: >MH603532-cand-14740-14819
  source 1..80: mol_type = other DNA
taaggctatgtgtcttaataatgttaggccatttttgcaagatcctgcaaatttaacaacaacaccatttttttcacaac

SEQ ID NO: 12554 - DNA, 80 bp, synthetic construct
  misc_feature 1..80: note = Synthetic: >NC_034976-cand-14930-15009
  source 1..80: mol_type = other DNA
taaagcaatgtgtttaaataatgttagaccatttttgagagatccagccaatttaacaacaacaccatttttttcacaac

SEQ ID NO: 12555 - DNA, 80 bp, synthetic construct
  misc_feature 1..80: note = Synthetic: >MT040333-cand-22820-22899
  source 1..80: mol_type = other DNA
gttgtgttattgcttggaactcagttaagcaagatgctttgactggtggtaattatggttatttgtatagattatttaga

SEQ ID NO: 12556 - DNA, 80 bp, synthetic construct
  misc_feature 1..80: note = Synthetic: >KT253269-cand-710-789
  source 1..80: mol_type = other DNA
tgaaaacgaagagattgtcatcaatggtcatatctacgtttgtgcttggcttactaagcgtaagcctttagattacaaac

SEQ ID NO: 12557 - DNA, 80 bp, synthetic construct
  misc_feature 1..80: note = Synthetic: >MN128087-cand-18450-18529
  source 1..80: mol_type = other DNA
tatgcagaatttgtgacgtcttataatgcagctgtcacagctggttttacattttgggttactaatcagtttaaccctta

SEQ ID NO: 12558 - DNA, 80 bp, synthetic construct
  misc_feature 1..80: note = Synthetic: >MT114540-cand-18330-18409
  source 1..80: mol_type = other DNA
ttacaaataagactagtttacctacaaatgtagctttcgagctatatgcaaaacgtaaacttggactcacaccgccatta

SEQ ID NO: 12559 - DNA, 80 bp, synthetic construct
  misc_feature 1..80: note = Synthetic: >SBB-122-cand-19920-19999
  source 1..80: mol_type = other DNA
tgacatgtatgatggtaagatcaaacagtgtgatggtgaaaatgtctcaaaagacggcttctttacgtatataaatggtg

SEQ ID NO: 12560 - DNA, 80 bp, synthetic construct
  misc_feature 1..80: note = Synthetic: >SBB-120-cand-19930-20009
  source 1..80: mol_type = other DNA
gatggtaagatcaaacagtgtgatggtgaaaatgtctcaaaagacggcttctttacttatataaatggtgttataaatga

SEQ ID NO: 12561 - DNA, 80 bp, synthetic construct
  misc_feature 1..80: note = Synthetic: >SBB-130-cand-19920-19999
  source 1..80: mol_type = other DNA
tatgtatgatggtaagatcaaacagtgtgatggtgaaaatgtctcgaaagacggcttcttcacgtatataaatggtgtta

SEQ ID NO: 12562 - DNA, 80 bp, synthetic construct
  misc_feature 1..80: note = Synthetic: >SBB-053-cand-20150-20229
  source 1..80: mol_type = other DNA
tgattggtgttaattggctcggtactttttcaaatagtcctatcttagacggtaacactatgcatgccaattacatcttt

SEQ ID NO: 12563 - DNA, 80 bp, synthetic construct
  misc_feature 1..80: note = Synthetic: >SBB-122-cand-20160-20239
  source 1..80: mol_type = other DNA
taattggctcggtactttttcaaatagtcctattctagatggtaacactatgcatgccaattacatcttttggcgtaatt

SEQ ID NO: 12564 - DNA, 80 bp, synthetic construct
  misc_feature 1..80: note = Synthetic: >SBB-130-cand-20160-20239
  source 1..80: mol_type = other DNA
ttggctcggtactttttcaaatagtcctatcttagacggtaacaccatgcatgccaattacatcttttggcgtaattcaa

SEQ ID NO: 12565 - DNA, 80 bp, synthetic construct
  misc_feature 1..80: note = Synthetic: >SBB-120-cand-19370-19449
  source 1..80: mol_type = other DNA
tctgtacttatatggatttacttttagacgactttgtcgtcatgcttaaaaatttagacctaagtgttgtttctaaagta

SEQ ID NO: 12566 - DNA, 80 bp, synthetic construct
  misc_feature 1..80: note = Synthetic: >SBB-010-cand-19360-19439
  source 1..80: mol_type = other DNA
tcaaaaatggtctgtacttatatggatttacttttagacgacttcgtcgtcatgcttaaaaatttagacctaagtgttgt

SEQ ID NO: 12567 - DNA, 80 bp, synthetic construct
  misc_feature 1..80: note = Synthetic: >SBB-024-cand-19350-19429
  source 1..80: mol_type = other DNA
tgatcctagctctaaaatggtttgtacttacatggatttacttttagacgactttgtcgtcatgcttaaaaatttagacc

SEQ ID NO: 12568 - DNA, 80 bp, synthetic construct
  misc_feature 1..80: note = Synthetic: >SBB-010-cand-4770-4849
  source 1..80: mol_type = other DNA
atcttataactttcaagtgtgaggatgctgtagatgttagttttgctattttgcccgaagttgatgacgtgtcatatgat

SEQ ID NO: 12569 - DNA, 80 bp, synthetic construct
  misc_feature 1..80: note = Synthetic: >SBB-130-cand-4750-4829
  source 1..80: mol_type = other DNA
ggttgtgccatctggtaatcttataactttcaagtgtgagggtactgtagatgttagttttgctattttgcccgaagttg

SEQ ID NO: 12570 - DNA, 80 bp, synthetic construct
  misc_feature 1..80: note = Synthetic: >SBB-053-cand-2120-2199
  source 1..80: mol_type = other DNA
ttgccggaacttgttagtgttgtcacagctcagtttatacaactcaacacaccttatcgtacatacgatgttaaagtcat

SEQ ID NO: 12571 - DNA, 80 bp, synthetic construct
  misc_feature 1..80: note = Synthetic: >SBB-010-cand-2110-2189
  source 1..80: mol_type = other DNA
ttgtagtaccttgccggaacttgttagtgttgtcacagctcagtttatgcaactcaacacaccttatcgtacatatgacg

SEQ ID NO: 12572 - DNA, 80 bp, synthetic construct
  misc_feature 1..80: note = Synthetic: >SBB-120-cand-2110-2189
  source 1..80: mol_type = other DNA
ttgtagtactttgccggaacttgttagtgttgtcacagctcagtttatgcaacttaacacaccttatcgcacatatgacg

SEQ ID NO: 12573 - DNA, 80 bp, synthetic construct
  misc_feature 1..80: note = Synthetic: >SBB-122-cand-2120-2199
  source 1..80: mol_type = other DNA
ttgccggaacttgttagtgttgtcacagctcaatttatgcaacttaacacatcttattgtacatatgacgttaaagtcat

SEQ ID NO: 12574 - DNA, 80 bp, synthetic construct
  misc_feature 1..80: note = Synthetic: >SBB-120-cand-3310-3389
  source 1..80: mol_type = other DNA
tcaagttgaaatggttgttgatcaagttgaagaagtgactgaggctttgtcgttcatagttgaccaacctaagacacctg

SEQ ID NO: 12575 - DNA, 80 bp, synthetic construct
  misc_feature 1..80: note = Synthetic: >SBB-122-cand-3320-3399
  source 1..80: mol_type = other DNA
atggttgttgatcaagttgaagaagtgactgaggctttgtcgttcatagttgaccaacctaagacacctgttactagtcc

SEQ ID NO: 12576 - DNA, 80 bp, synthetic construct
  misc_feature 1..80: note = Synthetic: >SBB-010-cand-18640-18719
  source 1..80: mol_type = other DNA
cttgtcttcacaaataagacttctttacccactaatgttgcgtttgagctttttgctaagcgcaaagttggtttgacacc

SEQ ID NO: 12577 - DNA, 80 bp, synthetic construct
  misc_feature 1..80: note = Synthetic: >SBB-747-cand-1750-1829
  source 1..80: mol_type = other DNA
acttttgaagcacttaggacttttgtccgagctgaagaggagcgcctggcacatttttgtggcagtgtgtgtgcacctat

SEQ ID NO: 12578 - DNA, 80 bp, synthetic construct
  misc_feature 1..80: note = Synthetic: >SBB-726-cand-1760-1839
  source 1..80: mol_type = other DNA
cacttaggacttttgtccgagctgaggaggatcgcctggcacatttctgtggcagtgtgtgtgcacctattaatagttgt

SEQ ID NO: 12579 - DNA, 80 bp, synthetic construct
  misc_feature 1..80: note = Synthetic: >SBB-747-cand-4870-4949
  source 1..80: mol_type = other DNA
gcactaggtaaggccgtaccaggtgagagtgatgatgctcacatggtgttatcagctgtgctaaatcatggtacagttgt

SEQ ID NO: 12580 - DNA, 80 bp, synthetic construct
  misc_feature 1..80: note = Synthetic: >SBB-788-cand-4880-4959
  source 1..80: mol_type = other DNA
aggccgtcccaggtgagagtgatgatgctcacatggttttatcagctgtgctaaatcatggtacagttgtggcacgccgt

SEQ ID NO: 12581 - DNA, 80 bp, synthetic construct
  misc_feature 1..80: note = Synthetic: >SBB-788-cand-11920-11999
  source 1..80: mol_type = other DNA
acaatgccaacacttacctatgcaggtagtgcttgggatgttatgcaagttgcggatgctgatggtaaaactgttaatgc

SEQ ID NO: 12582 - DNA, 80 bp, synthetic construct
  misc_feature 1..80: note = Synthetic: >SBB-726-cand-11910-11989
  source 1..80: mol_type = other DNA
cgccactataacaatgccaacacttacctatgcaggtagtgcctgggatgttatgcaagttgcggatgctgatggtaaaa

SEQ ID NO: 12583 - DNA, 80 bp, synthetic construct
  misc_feature 1..80: note = Synthetic: >SBB-747-cand-8150-8229
  source 1..80: mol_type = other DNA
agtgttttgctaacaaatttagtgcttttgatggctggtattctaatagatatggtagttatgttaattcacgtaattgt

SEQ ID NO: 12584 - DNA, 80 bp, synthetic construct
  misc_feature 1..80: note = Synthetic: >SBB-788-cand-8160-8239
  source 1..80: mol_type = other DNA
taacaaatttagtgcttttgatggctggtattctaatagatatggtagttatgttaattcacgtaattgtcctatggtgg

SEQ ID NO: 12585 - DNA, 80 bp, synthetic construct
  misc_feature 1..80: note = Synthetic: >SBB-797-cand-8170-8249
  source 1..80: mol_type = other DNA
agtgcttttgatggctggtattctaatagatatggtagttatgttaattcacgtaattgtcctatggtggttggtgtggt

SEQ ID NO: 12586 - DNA, 80 bp, synthetic construct
  misc_feature 1..80: note = Synthetic: >SBB-024-cand-5480-5559
  source 1..80: mol_type = other DNA
actctgaatgcaatatcgtgttacattgttgacagtggtaccatagaagtcgttaagaccacagacacagagtgttgtgt

SEQ ID NO: 12587 - DNA, 80 bp, synthetic construct
  misc_feature 1..80: note = Synthetic: >SBB-788-cand-3760-3839
  source 1..80: mol_type = other DNA
gaagttgcaccctcagatgcacctggaagtgtgctggtagatgtagtgtcaatgtctttttctgccatgttgaattatgg

SEQ ID NO: 12588 - DNA, 80 bp, synthetic construct
  misc_feature 1..80: note = Synthetic: >SBB-747-cand-4230-4309
  source 1..80: mol_type = other DNA
gtgggaagttatacagacaacttgtactgtagaccgtaaagtttataaaactctttgtaaacgtggtgatacatacatgt

SEQ ID NO: 12589 - DNA, 80 bp, synthetic construct
  misc_feature 1..80: note = Synthetic: >SBB-726-cand-4240-4319
  source 1..80: mol_type = other DNA
atacagacaacttgtactgtagaccgtaaagtttataaaactctttgtaaacgtggtgacacatacatgtgttttgatga

SEQ ID NO: 12590 - DNA, 80 bp, synthetic construct
  misc_feature 1..80: note = Synthetic: >SBB-130-cand-9140-9219
  source 1..80: mol_type = other DNA
tgtatagttcgtgtgtgctatggtaacatggttctgaatggtttgtggttgggtgatgttgttatatgccctagacatgt

SEQ ID NO: 12591 - DNA, 80 bp, synthetic construct
  misc_feature 1..80: note = Synthetic: >SBB-010-cand-9150-9229
  source 1..80: mol_type = other DNA
ttcgtgtgtgctatggtaacatggtcctgaatggtttgtggttgggtgatgttgttatatgccctagacatgtgatagct

SEQ ID NO: 12592 - DNA, 80 bp, synthetic construct
  misc_feature 1..80: note = Synthetic: >SBB-010-cand-22320-22399
  source 1..80: mol_type = other DNA
gatggcgacattagcagtctatattcaactattgctgcacgaagcacatcacaacaccctgtcactgatggctttaatgt

SEQ ID NO: 12593 - DNA, 80 bp, synthetic construct
  misc_feature 1..80: note = Synthetic: >SBB-041-cand-22310-22389
  source 1..80: mol_type = other DNA
cgacattagcagtctttactcaactattgctgctagaagcacctcacaacaccctgtcactgatggctttaatgtgtctc

SEQ ID NO: 12594 - DNA, 80 bp, synthetic construct
  misc_feature 1..80: note = Synthetic: >SBB-747-cand-3670-3749
  source 1..80: mol_type = other DNA
ttgctacggcaggtagttaagaaggttaaacgcgataagcgcctgcctcctatattacaacccgatgttgctgagaatgt

SEQ ID NO: 12595 - DNA, 80 bp, synthetic construct
  misc_feature 1..80: note = Synthetic: >SBB-788-cand-18330-18409
  source 1..80: mol_type = other DNA
gatgtggagtatccaattatagctaatgagttagctataaataaggcctgccgtagtgtgcagcgagttgcgttgaaagc

SEQ ID NO: 12596 - DNA, 80 bp, synthetic construct
  misc_feature 1..80: note = Synthetic: >SBB-797-cand-17920-17999
  source 1..80: mol_type = other DNA
ggagtatcgtacgtaagcgtatagtggaaatgctttgtgatacactggacggtgttagtgacacagtaacatttgtgact

SEQ ID NO: 12597 - DNA, 80 bp, synthetic construct
  misc_feature 1..80: note = Synthetic: >PRD-0038-cand-17830-17909
  source 1..80: mol_type = other DNA
tatgataaactccaatttactagtcttgaaattccacgtaggagcgtggctgtcttacaggcagagaatgttacaggact

SEQ ID NO: 12598 - DNA, 80 bp, synthetic construct
  misc_feature 1..80: note = Synthetic: >PDF-2386-cand-17840-17919
  source 1..80: mol_type = other DNA
tccaatttactagtcttgaaattccacgtaggagcgtggctgtcttacaggcagagaatgttacaggactttttaaggat

SEQ ID NO: 12599 - DNA, 80 bp, synthetic construct
  misc_feature 1..80: note = Synthetic: >SBB-010-cand-22640-22719
  source 1..80: mol_type = other DNA
agtctcattgggtctttttggtggtcaagctggcattacaacatggtctactgccatctctgctagacttaatgcactag

SEQ ID NO: 12600 - DNA, 80 bp, synthetic construct
  misc_feature 1..80: note = Synthetic: >SBB-122-cand-22640-22719
  source 1..80: mol_type = other DNA
gggtctttttggtggtcaagctggcattacaacatggtctactgccatttctgccagacttaatgcacttggtgttgtcc

SEQ ID NO: 12601 - DNA, 80 bp, synthetic construct
  misc_feature 1..80: note = Synthetic: >PDF-2386-cand-18400-18479
  source 1..80: mol_type = other DNA
agtgatacactgcgcgatttgtcggatagagtcgtgtttgtcctttgggcacatggctttgagttgacatcaatgaagta

SEQ ID NO: 12602 - DNA, 80 bp, synthetic construct
  misc_feature 1..80: note = Synthetic: >PRD-0038-cand-18390-18469
  source 1..80: mol_type = other DNA
gcagatgctcagtgatacactgcgcgatttgtccgatagggtcgtgttcgtcctttgggcacatggctttgagttgacat

SEQ ID NO: 12603 - DNA, 80 bp, synthetic construct
  misc_feature 1..80: note = Synthetic: >SBB-130-cand-13910-13989
  source 1..80: mol_type = other DNA
ctggtttgtactacgagtcacttacttacgaagagcaggatgctttgtatgcgataactaagcgtaacatcttacccact

SEQ ID NO: 12604 - DNA, 80 bp, synthetic construct
  misc_feature 1..80: note = Synthetic: >SBB-122-cand-13920-13999
  source 1..80: mol_type = other DNA
gtactacgagtcactgacttacgaagagcaggatgctttgtatgcgataactaagcgtaacatcttacccactatgactc

SEQ ID NO: 12605 - DNA, 80 bp, synthetic construct
  misc_feature 1..80: note = Synthetic: >SBB-797-cand-7360-7439
  source 1..80: mol_type = other DNA
tattacgcacaacttgcttgtaagcctattcttcttgtagataagcgtatggttggtgtagtgggcgatgatgccactat

SEQ ID NO: 12606 - DNA, 80 bp, synthetic construct
  misc_feature 1..80: note = Synthetic: >SBB-747-cand-7350-7429
  source 1..80: mol_type = other DNA
tgctgctatctattacgcacaacttgcttgtaagcctattcttcttgtagacaagcgtatggttggtgtagtgggcgatg

SEQ ID NO: 12607 - DNA, 80 bp, synthetic construct
  misc_feature 1..80: note = Synthetic: >SBB-024-cand-23130-23209
  source 1..80: mol_type = other DNA
ctgcacgtgttttcactcatgcaaaatgcaccaggtggcattatgttcttccactactcgcttattccaaataacactat

SEQ ID NO: 12608 - DNA, 80 bp, synthetic construct
  misc_feature 1..80: note = Synthetic: >SBB-010-cand-23120-23199
  source 1..80: mol_type = other DNA
cggtcaaggcctgcacgtgttttcactcatgcaaaatgcaccaggtggcattatgttcttccactactcgcttattccaa

SEQ ID NO: 12609 - DNA, 80 bp, synthetic construct
  misc_feature 1..80: note = Synthetic: >SBB-122-cand-23120-23199
  source 1..80: mol_type = other DNA
cttacatgtgttctcactcatgcaaaatgcaccaggtggcatcatgtttttccactactcgcttattccaaataacacta

SEQ ID NO: 12610 - DNA, 80 bp, synthetic construct
  misc_feature 1..80: note = Synthetic: >SBB-747-cand-14950-15029
  source 1..80: mol_type = other DNA
ctaaccttaataccttcttatctatagatggtaataagatttacactacttatgtgcaggatctacagaggcggttatat

SEQ ID NO: 12611 - DNA, 80 bp, synthetic construct
  misc_feature 1..80: note = Synthetic: >SBB-797-cand-14960-15039
  source 1..80: mol_type = other DNA
taccttcttatctatagatggtaataagatttacactacttatgtgcaggatctacagaggcggttatatttgggtatat

SEQ ID NO: 12612 - DNA, 80 bp, synthetic construct
  misc_feature 1..80: note = Synthetic: >SBB-053-cand-6510-6589
  source 1..80: mol_type = other DNA
tagcacagtatgtcaatgcattcggtgttatgttgggtttgcaagataatgtaactattttacagtttgttccctttgat

SEQ ID NO: 12613 - DNA, 80 bp, synthetic construct
  misc_feature 1..80: note = Synthetic: >SBB-130-cand-6500-6579
  source 1..80: mol_type = other DNA
tatttcgtagcacagtatgtcaattcattcggtgttatgttgggtctgcaagataatgtaactattttacagtttgttcc

SEQ ID NO: 12614 - DNA, 80 bp, synthetic construct
  misc_feature 1..80: note = Synthetic: >SBB-130-cand-14790-14869
  source 1..80: mol_type = other DNA
atcaaagggaccacatgagttctgttcacaacatactatgcagatcgtagatgagaatggtaagtactatttaccttacc

SEQ ID NO: 12615 - DNA, 80 bp, synthetic construct
  misc_feature 1..80: note = Synthetic: >SBB-120-cand-14800-14879
  source 1..80: mol_type = other DNA
ggaccacatgagttctgttcacaacacaccatgcagatcgtagatgagaatggtaagtattatttaccttacccggaccc

SEQ ID NO: 12616 - DNA, 80 bp, synthetic construct
  misc_feature 1..80: note = Synthetic: >SBB-788-cand-8720-8799
  source 1..80: mol_type = other DNA
gtgtttattgtggcaccaatgttttagatctgtttatgagtatgctattgccaatttttgctcctgtaggtgccgttgat

SEQ ID NO: 12617 - DNA, 80 bp, synthetic construct
  misc_feature 1..80: note = Synthetic: >GCS-211-cand-24300-24379
  source 1..80: mol_type = other DNA
aaaatagagcctttgtgctgcatgatgttaaactgttgttgttccatggcaacagtacacactaccagctcactccacgc

SEQ ID NO: 12618 - DNA, 80 bp, synthetic construct
  misc_feature 1..80: note = Synthetic: >GCS-227-cand-24290-24369
  source 1..80: mol_type = other DNA
ctgctatgaaaatagagcctttgtgctgcatgatgttaaactgttgttgttccatggcaacagtacacactaccagctca

SEQ ID NO: 12619 - DNA, 80 bp, synthetic construct
  misc_feature 1..80: note = Synthetic: >SBB-120-cand-17480-17559
  source 1..80: mol_type = other DNA
actgtttgtccggtttgtcagatgtcctagtttttgtactatgggcaggtggcttggagttaaccaccatgagatatttt

SEQ ID NO: 12620 - DNA, 80 bp, synthetic construct
  misc_feature 1..80: note = Synthetic: >SBB-122-cand-17470-17549
  source 1..80: mol_type = other DNA
atgtgctgtgattgtttgtctggtttgtcagatgtcctagtttttgtactatgggcaggtggcttggagttaaccaccat

SEQ ID NO: 12621 - DNA, 80 bp, synthetic construct
  misc_feature 1..80: note = Synthetic: >GCS-227-cand-17660-17739
  source 1..80: mol_type = other DNA
ttgagggtgcacacgtttgtggtgacaatatcggcactaacgttcctttacagatagggttttccaacggtgttgatttt

SEQ ID NO: 12622 - DNA, 80 bp, synthetic construct
  misc_feature 1..80: note = Synthetic: >GCS-211-cand-17670-17749
  source 1..80: mol_type = other DNA
gcacacgtttgtggtgaaaatatcggcactaacgttcctttacagatagggttttccaacggtgttgattttgttgtcac

SEQ ID NO: 12623 - DNA, 80 bp, synthetic construct
  misc_feature 1..80: note = Synthetic: >GCS-211-cand-9520-9599
  source 1..80: mol_type = other DNA
aaaatggcacacccgtcaggcattgttgaaccatgtatagtgcgtgttgcttatgacaacatggtactaaatggtctttg

SEQ ID NO: 12624 - DNA, 80 bp, synthetic construct
  misc_feature 1..80: note = Synthetic: >GCS-227-cand-9520-9599
  source 1..80: mol_type = other DNA
aatggcacacccgtcaggcattgttgaaccatgtatagtgcgtgttgcttatgacaacatggtactaaatggtctttggc

SEQ ID NO: 12625 - DNA, 80 bp, synthetic construct
  misc_feature 1..80: note = Synthetic: >GCS-211-cand-12240-12319
  source 1..80: mol_type = other DNA
aaaatgggaaacttctactggtgtggttgttgttgaattagaccctccatgtcgttttgcagttgaaacaccaaatggcc

SEQ ID NO: 12626 - DNA, 80 bp, synthetic construct
  misc_feature 1..80: note = Synthetic: >GCS-227-cand-12230-12309
  source 1..80: mol_type = other DNA
cggtttgcaaaatgggaaacttctactggtgtggttgttgttgaattagaccctccatgtcgttttgcagttgaaacacc

SEQ ID NO: 12627 - DNA, 80 bp, synthetic construct
  misc_feature 1..80: note = Synthetic: >GCS-211-cand-23020-23099
  source 1..80: mol_type = other DNA
ttcgtcgcaatcgaattgcaccaaacctgttatcacatactcaaattttggagtttgtgcagatggtggtgttacatttt

SEQ ID NO: 12628 - DNA, 80 bp, synthetic construct
  misc_feature 1..80: note = Synthetic: >GCS-227-cand-23010-23089
  source 1..80: mol_type = other DNA
taccacacttcgtcgcaatcaaattgcaccaaacctgttatcacatactcaaattttggagtttgtgcagatggtggtgt

SEQ ID NO: 12629 - DNA, 80 bp, synthetic construct
  misc_feature 1..80: note = Synthetic: >GCS-227-cand-2410-2489
  source 1..80: mol_type = other DNA
cccggcattgtttaaaatggtcgataatggcagaatttggggtgttgtcacatcagctattagtgatttggctgaatttt

SEQ ID NO: 12630 - DNA, 80 bp, synthetic construct
  misc_feature 1..80: note = Synthetic: >GCS-211-cand-2410-2489
  source 1..80: mol_type = other DNA
tgcccggcattgtttaaaatggtcgataatggcagaatttggggtgttgtcacatcagctattagtgatttggctgaatt

SEQ ID NO: 12631 - DNA, 80 bp, synthetic construct
  misc_feature 1..80: note = Synthetic: >GCS-211-cand-6970-7049
  source 1..80: mol_type = other DNA
aacttgtggtttgtacaacttgttccttttgacacgttcggtgacgaaattgttgtcatctttgttgttgccagaatttt

SEQ ID NO: 12632 - DNA, 80 bp, synthetic construct
  misc_feature 1..80: note = Synthetic: >GCS-227-cand-6970-7049
  source 1..80: mol_type = other DNA
cttgtggtttgtacaacttgttccttttgacacgttcggtgacgaaattgttgtcatctttgttgttgccagaattttcg

SEQ ID NO: 12633 - DNA, 80 bp, synthetic construct
  misc_feature 1..80: note = Synthetic: >SBB-120-cand-2990-3069
  source 1..80: mol_type = other DNA
aaagaaattgatcctgtttataaggttaaacttgatttcgagtttgagaatgatgacatcgttaacgtctgcaagaaagt

SEQ ID NO: 12634 - DNA, 80 bp, synthetic construct
  misc_feature 1..80: note = Synthetic: >SBB-122-cand-3000-3079
  source 1..80: mol_type = other DNA
atcctgtttacaaagttaaacttgactttgagtttgagaatgatgacatcgttaacgtctgcaagaaagtcattggtaag

SEQ ID NO: 12635 - DNA, 80 bp, synthetic construct
  misc_feature 1..80: note = Synthetic: >GCS-227-cand-2250-2329
  source 1..80: mol_type = other DNA
tcaccccaatgttccttaaaaacagagtgtctgactggactgtgttttgtgaaacacatgttgataaaccatggttcttt

SEQ ID NO: 12636 - DNA, 80 bp, synthetic construct
  misc_feature 1..80: note = Synthetic: >GCS-211-cand-2250-2329
  source 1..80: mol_type = other DNA
tgtcaccccaatgttccttaaaaacagagtgtctgactggactgtgttttgtgaaacacatgttgataaaccatggttct

SEQ ID NO: 12637 - DNA, 80 bp, synthetic construct
  misc_feature 1..80: note = Synthetic: >GCS-227-cand-25890-25969
  source 1..80: mol_type = other DNA
tacagtgctcttaatggcactacagtatggccacatgaaatatagctttctactttatggactcaaaatggccattcttt

SEQ ID NO: 12638 - DNA, 80 bp, synthetic construct
  misc_feature 1..80: note = Synthetic: >GCS-211-cand-25900-25979
  source 1..80: mol_type = other DNA
tcttaatggcactacagtatggccacatgaaatatagctttctactttatggactcaaaatggccattctttggctactt

SEQ ID NO: 12639 - DNA, 80 bp, synthetic construct
  misc_feature 1..80: note = Synthetic: >GCS-227-cand-9680-9759
  source 1..80: mol_type = other DNA
tctatgcgccttcatagttttagtatctcaaagggaaacatacaattaagtgtcattagtgccaaaatgcagcggtcttt

SEQ ID NO: 12640 - DNA, 80 bp, synthetic construct
  misc_feature 1..80: note = Synthetic: >GCS-211-cand-9680-9759
  source 1..80: mol_type = other DNA
cttctatgcgccttcatagttttagtatctcaaagggaaacatacaattaagtgtcattagtgccaaaatgcagcggtct

SEQ ID NO: 12641 - DNA, 80 bp, synthetic construct
  misc_feature 1..80: note = Synthetic: >GCS-211-cand-19270-19349
  source 1..80: mol_type = other DNA
aacaagtgtgcacatgttttgacaattccataccaggttcacttgaaaaatttagtttgacagctaatgctgtcctcttt

SEQ ID NO: 12642 - DNA, 80 bp, synthetic construct
  misc_feature 1..80: note = Synthetic: >GCS-227-cand-19260-19339
  source 1..80: mol_type = other DNA
cttcgtagaacaagtgtgcacatgttttgacaattccataccaggttcacttgaaaaatttagtttgacagctaatgctg

SEQ ID NO: 12643 - DNA, 80 bp, synthetic construct
  misc_feature 1..80: note = Synthetic: >SBB-122-cand-16990-17069
  source 1..80: mol_type = other DNA
aaagattgttataggaaaccagatcttttaccaccctcacatgccaccacgtttatgtcactctctgataactttaagac

SEQ ID NO: 12644 - DNA, 80 bp, synthetic construct
  misc_feature 1..80: note = Synthetic: >SBB-120-cand-17000-17079
  source 1..80: mol_type = other DNA
ataggaaaccagatcttttaccaccctcacatgccaccacgtttatgtcactctctgataactttaagactagtggtgat

SEQ ID NO: 12645 - DNA, 80 bp, synthetic construct
  misc_feature 1..80: note = Synthetic: >GCS-211-cand-23660-23739
  source 1..80: mol_type = other DNA
atggccttaggcggcatcacagcggctgcatctgctcctttttctattgctgtccaagctcgtcttaattatgttgcttt

SEQ ID NO: 12646 - DNA, 80 bp, synthetic construct
  misc_feature 1..80: note = Synthetic: >GCS-227-cand-23650-23729
  source 1..80: mol_type = other DNA
ttggaggtatggccttaggcggcatcacagcggctgcatctgctcctttttctattgctgtccaagctcgtcttaattat

SEQ ID NO: 12647 - DNA, 80 bp, synthetic construct
  misc_feature 1..80: note = Synthetic: >GCS-227-cand-4730-4809
  source 1..80: mol_type = other DNA
aaagcagttagggcgcatttgagtgtaaacaaaattagggatgctagtgctaaccaaacaccagttgaggagcccgtcgt

SEQ ID NO: 12648 - DNA, 80 bp, synthetic construct
  misc_feature 1..80: note = Synthetic: >GCS-211-cand-4730-4809
  source 1..80: mol_type = other DNA
tgaaagcagttagggcgcatttgagtgtaaacaaaattagggatgctagtgctaaccaaacaccagttgaagagcccgtc

SEQ ID NO: 12649 - DNA, 80 bp, synthetic construct
  misc_feature 1..80: note = Synthetic: >SBB-788-cand-21610-21689
  source 1..80: mol_type = other DNA
tttcttatgagtgtaggggtgggtgcaaatctaccaaatatgcagttttatcaggctgttgtgcgtcaaggtactccacc

SEQ ID NO: 12650 - DNA, 80 bp, synthetic construct
  misc_feature 1..80: note = Synthetic: >GCS-227-cand-26850-26929
  source 1..80: mol_type = other DNA
ggatcgcgttcacgcaacaaggataccattgtgccagaattttctgtcaaacttcctggagacatcaaagttgaagaacc

SEQ ID NO: 12651 - DNA, 80 bp, synthetic construct
  misc_feature 1..80: note = Synthetic: >GCS-211-cand-26850-26929
  source 1..80: mol_type = other DNA
ttggatcgcgttcacgcaacaaggataccattgtgccagaattttctgtcaaacttcctggagacatcaaagttgaagaa

SEQ ID NO: 12652 - DNA, 80 bp, synthetic construct
  misc_feature 1..80: note = Synthetic: >SBB-120-cand-18590-18669
  source 1..80: mol_type = other DNA
tcgctattgtcaacgaccgtgttcttgtacgcgagggtaccactgataaccttgtcttcacaaataaaacttctttaccc

SEQ ID NO: 12653 - DNA, 80 bp, synthetic construct
  misc_feature 1..80: note = Synthetic: >GCS-227-cand-3930-4009
  source 1..80: mol_type = other DNA
gtgtcttctatcttttgcccactaaggagtcatttgattacggtatttgccctacttgtaaacaagtacgcatttgtacc

SEQ ID NO: 12654 - DNA, 80 bp, synthetic construct
  misc_feature 1..80: note = Synthetic: >GCS-211-cand-3930-4009
  source 1..80: mol_type = other DNA
ttgtgtcttctatcttttgcccactaaggagtcatttgattacggtatttgccctacttgtaaacaagtacgcatttgta

SEQ ID NO: 12655 - DNA, 80 bp, synthetic construct
  misc_feature 1..80: note = Synthetic: >SBB-024-cand-21280-21359
  source 1..80: mol_type = other DNA
gtccagacgtaccattgtttcctactacatccaatttgattaagcgtttggttttttcaaattgtgttgtcaactacacc

SEQ ID NO: 12656 - DNA, 80 bp, synthetic construct
  misc_feature 1..80: note = Synthetic: >GCS-211-cand-17510-17589
  source 1..80: mol_type = other DNA
tgctattggtactacaccccagcactgtagatatgaacacgtcatatccttcatggggttccggtttgattataatgtac

SEQ ID NO: 12657 - DNA, 80 bp, synthetic construct
  misc_feature 1..80: note = Synthetic: >GCS-227-cand-17500-17579
  source 1..80: mol_type = other DNA
ttagccgttgctattggtactacaccccagcactgtagatatgaacacgtcatatccttcatggggttccggtttgatta

SEQ ID NO: 12658 - DNA, 80 bp, synthetic construct
  misc_feature 1..80: note = Synthetic: >GCS-227-cand-25010-25089
  source 1..80: mol_type = other DNA
tctggacttgagcctgttagacagacggcaagtcttgttgggtacatgctcactagcatttttgttgtcttctttgctac

SEQ ID NO: 12659 - DNA, 80 bp, synthetic construct
  misc_feature 1..80: note = Synthetic: >GCS-211-cand-25020-25099
  source 1..80: mol_type = other DNA
tgagcctgttagacagacggcaagtcttgttgggtacatgctcactagcatttttgttgtcttctttgctacttatcaac

SEQ ID NO: 12660 - DNA, 80 bp, synthetic construct
  misc_feature 1..80: note = Synthetic: >SBB-130-cand-2710-2789
  source 1..80: mol_type = other DNA
gtcacttgaccttgctgtccaagatggtttaacagagctcaacgtagttgatggtggttctatccctgtcaatcctacta

SEQ ID NO: 12661 - DNA, 80 bp, synthetic construct
  misc_feature 1..80: note = Synthetic: >GCS-227-cand-11270-11349
  source 1..80: mol_type = other DNA
tgtgctaatgttgttctgcttggcattttgtctaatacaggtgttgctgcaaattcacgtgaatggaacttttgtgttga

SEQ ID NO: 12662 - DNA, 80 bp, synthetic construct
  misc_feature 1..80: note = Synthetic: >GCS-211-cand-11280-11359
  source 1..80: mol_type = other DNA
tgttgttctgcttggcattttgtctaatacaggtgttgctgcaaattcacgtgaatggaacttttgtgttgaacttcaca

SEQ ID NO: 12663 - DNA, 80 bp, synthetic construct
  misc_feature 1..80: note = Synthetic: >SBB-024-cand-7290-7369
  source 1..80: mol_type = other DNA
tggctctggacattgatgcagatgatgaagacttcgttaactgtgttagtaatgctcataggtttaacgtattgttaaca

SEQ ID NO: 12664 - DNA, 80 bp, synthetic construct
  misc_feature 1..80: note = Synthetic: >GCS-211-cand-8000-8079
  source 1..80: mol_type = other DNA
ttttgcttacattcaatgagaatgttgcaatgactcaggtcccatgcattagtatagtgcaaaagagcggatcaggccca

SEQ ID NO: 12665 - DNA, 80 bp, synthetic construct
  misc_feature 1..80: note = Synthetic: >GCS-227-cand-8000-8079
  source 1..80: mol_type = other DNA
ttgcttacattcaatgagaatgttgcaatgactcaggtcccatgcattagtatagtgcaaaagagcggatcaggcccaca

SEQ ID NO: 12666 - DNA, 80 bp, synthetic construct
  misc_feature 1..80: note = Synthetic: >Anlong-cand-2180-2259
  source 1..80: mol_type = other DNA
ttgtgaagggcctcaagattcagtttggtattgatggttttgttggcacatgtgctaagcgcttcaggaagattttaaaa

SEQ ID NO: 12667 - DNA, 80 bp, synthetic construct
  misc_feature 1..80: note = Synthetic: >Anlong-cand-2260-2339
  source 1..80: mol_type = other DNA
actcttcttacaatgtataatgatttagccaatagcattaggcgtactgttgtgttagctggtgttacactgcaatacta

SEQ ID NO: 12668 - DNA, 80 bp, synthetic construct
  misc_feature 1..80: note = Synthetic: >Anlong-cand-2340-2419
  source 1..80: mol_type = other DNA
cgcctttgagaaacctgcattggctattaatggtgtcctgcattttgttaagcgtactaaggcaaaggatcttggtgttc

SEQ ID NO: 12669 - DNA, 80 bp, synthetic construct
  misc_feature 1..80: note = Synthetic: >Anlong-cand-2420-2499
  source 1..80: mol_type = other DNA
catgtgaagcgggtgtagaggattttaacctactggaaggtggtgactatcctttaaagcctacagccgttgaattggct

SEQ ID NO: 12670 - DNA, 80 bp, synthetic construct
  misc_feature 1..80: note = Synthetic: >Anlong-cand-2500-2579
  source 1..80: mol_type = other DNA
tatgaaatggaattaatggaatcagattatgaggaaccttgtgaaggcggtgtactccgtatctgcgatgattatgcatg

SEQ ID NO: 12671 - DNA, 80 bp, synthetic construct
  misc_feature 1..80: note = Synthetic: >Anlong-cand-2580-2659
  source 1..80: mol_type = other DNA
gtatatggatgatgaccgattttacccatatggtgacaatggtgttataccaatctgctacaagcttggtggtggcaaag

SEQ ID NO: 12672 - DNA, 80 bp, synthetic construct
  misc_feature 1..80: note = Synthetic: >Anlong-cand-2660-2739
  source 1..80: mol_type = other DNA
tagataaccaagtcacctttggtgaggatgaagtcaaagaaataccaccactcaataatgtcaagctcatttttgagttt

SEQ ID NO: 12673 - DNA, 80 bp, synthetic construct
  misc_feature 1..80: note = Synthetic: >Anlong-cand-2740-2819
  source 1..80: mol_type = other DNA
gaaaatgatattatcagtgaggcctgtaaaaaggccattggtaagcgtattagttttgagggtgactggagtgacctgtg

SEQ ID NO: 12674 - DNA, 80 bp, synthetic construct
  misc_feature 1..80: note = Synthetic: >Anlong-cand-2820-2899
  source 1..80: mol_type = other DNA
tgctatgatagacattgctatgaaggctttgtctgagcatatagaggtgcctcagtattacatctatgatgaagaaggtg

SEQ ID NO: 12675 - DNA, 80 bp, synthetic construct
  misc_feature 1..80: note = Synthetic: >Anlong-cand-2900-2979
  source 1..80: mol_type = other DNA
gtaatgacttggacctcccagttatgatttcagaatggccatgtaatgccgataaccaggagattcatgcgcaagagtgt

SEQ ID NO: 12676 - DNA, 80 bp, synthetic construct
  misc_feature 1..80: note = Synthetic: >Anlong-cand-2980-3059
  source 1..80: mol_type = other DNA
gtgatgccagatattgaattagaaacccctacaacatttgaaggcgttgatagttgcaacgccaaaagctcaagtgttaa

SEQ ID NO: 12677 - DNA, 80 bp, synthetic construct
  misc_feature 1..80: note = Synthetic: >Anlong-cand-3060-3139
  source 1..80: mol_type = other DNA
actgctaaaagccacttgcgttgaatctaagactgtgcaccctggtggtgatgttactcttgagattcaagtttctacaa

SEQ ID NO: 12678 - DNA, 80 bp, synthetic construct
  misc_feature 1..80: note = Synthetic: >Anlong-cand-3140-3219
  source 1..80: mol_type = other DNA
ctactgacataaaacctattacagtatgtaatgctgttgttaaggatgttagtgtttgtaaggctgttgcacgtaaacct

SEQ ID NO: 12679 - DNA, 80 bp, synthetic construct
  misc_feature 1..80: note = Synthetic: >Anlong-cand-3220-3299
  source 1..80: mol_type = other DNA
gttgttaaggttgcagcagatcaagctaaggaggttgaggatgcattggcatacatgaaaccaaaggacactaaggtaaa

SEQ ID NO: 12680 - DNA, 80 bp, synthetic construct
  misc_feature 1..80: note = Synthetic: >Anlong-cand-3300-3379
  source 1..80: mol_type = other DNA
ggtggaaaagtcaatttttgactatccaagtacagtctttaagggtgtacgtgttcttaaacaggttgctaataactgtt

SEQ ID NO: 12681 - DNA, 80 bp, synthetic construct
  misc_feature 1..80: note = Synthetic: >Anlong-cand-3380-3459
  source 1..80: mol_type = other DNA
ggttgacaagtgccgcttatcagctgcagttggctaattgttatgaagcagatgacttcaacctttttaaggttggtagt

SEQ ID NO: 12682 - DNA, 80 bp, synthetic construct
  misc_feature 1..80: note = Synthetic: >BetaSp-cand-27340-27419
  source 1..80: mol_type = other DNA
attctgctctagctaagatccagtccgttgtgaatgcaaatgcagaagctttaaataacttattgcagcagctctctaat

SEQ ID NO: 12683 - DNA, 80 bp, synthetic construct
  misc_feature 1..80: note = Synthetic: >BetaSp-cand-27420-27499
  source 1..80: mol_type = other DNA
agatttggtgcgattagttcctctttacaagaaattctctctaggttggatgcccttgaggcacaagtccaaatagatag

SEQ ID NO: 12684 - DNA, 80 bp, synthetic construct
  misc_feature 1..80: note = Synthetic: >BetaSp-cand-27900-27979
  source 1..80: mol_type = other DNA
gtgaatttcacaaaagcgcctgatgtagttttgaacacatcaataccaaatctccccgattttaaggaggagttagacaa

SEQ ID NO: 12685 - DNA, 80 bp, synthetic construct
  misc_feature 1..80: note = Synthetic: >BtCoV_008_16-cand-9400-9479
  source 1..80: mol_type = other DNA
atgcgtggtgcgcttttgcacatcaaggtcaatcaagccaatgttaatactcctaattatacatatcggacattaagacc

SEQ ID NO: 12686 - DNA, 80 bp, synthetic construct
  misc_feature 1..80: note = Synthetic: >BtCoV_008_16-cand-9480-9559
  source 1..80: mol_type = other DNA
tggtgaatcctttaacattcttgcatgctatgatggcagtgcatctggtgtttatggtgttaatatgcgcacgaatcata

SEQ ID NO: 12687 - DNA, 80 bp, synthetic construct
  misc_feature 1..80: note = Synthetic: >BtCoV_008_16-cand-9560-9639
  source 1..80: mol_type = other DNA
ccattcgtggctcttttattaatggtgcttgtgggtcaccaggttataaccttagtggaggtgttgtagagttttgttat

SEQ ID NO: 12688 - DNA, 80 bp, synthetic construct
  misc_feature 1..80: note = Synthetic: >BtCoV_008_16-cand-9640-9719
  source 1..80: mol_type = other DNA
atgcaccaattagaacttggttctggatgtcacgttggtagtgatatggatggtgttatgtatggtggtcatcaggatca

SEQ ID NO: 12689 - DNA, 80 bp, synthetic construct
  misc_feature 1..80: note = Synthetic: >BtCoV_008_16-cand-9720-9799
  source 1..80: mol_type = other DNA
accaactcttcaaattgaaagtgctagtagtttgattactgagaatgttcttgcatttttgtatggcgcacttataaacg

SEQ ID NO: 12690 - DNA, 80 bp, synthetic construct
  misc_feature 1..80: note = Synthetic: >BtCoV_008_16-cand-9800-9879
  source 1..80: mol_type = other DNA
gctgcaactggtggcttagcgcaagtcgccttagtgtagagaagtttaatgagtgggctatacataatggtatgactact

SEQ ID NO: 12691 - DNA, 80 bp, synthetic construct
  misc_feature 1..80: note = Synthetic: >BtCoV_008_16-cand-9880-9959
  source 1..80: mol_type = other DNA
attggtaacttagacacttactccattttggctgcaaaaacaggtgttgatgctcagcgtttgcttgcatctatacaagc

SEQ ID NO: 12692 - DNA, 80 bp, synthetic construct
  misc_feature 1..80: note = Synthetic: >BtCoV_008_16-cand-9960-10039
  source 1..80: mol_type = other DNA
tttgcaacgcaattttggtggtaaggagattttaggttacactagtcttacagatgagtttacaactgctgaagttatca

SEQ ID NO: 12693 - DNA, 80 bp, synthetic construct
  misc_feature 1..80: note = Synthetic: >BtCoV_008_16-cand-10040-10119
  source 1..80: mol_type = other DNA
aacagatgtttggtgtcaaccttcagagtggtaaaattagtagagcatttaggaatgtggtcattattggtgctttcatt

SEQ ID NO: 12694 - DNA, 80 bp, synthetic construct
  misc_feature 1..80: note = Synthetic: >BtCoV_008_16-cand-10120-10199
  source 1..80: mol_type = other DNA
actttgttttggactgagcttgtcgcttatacaaaattcttctgggttaacccaggttatgttacacctatgtttttgtg

SEQ ID NO: 12695 - DNA, 80 bp, synthetic construct
  misc_feature 1..80: note = Synthetic: >BtCoV_008_16-cand-10200-10279
  source 1..80: mol_type = other DNA
tataacagtgttgtcatctttgcttatgttgtttttaaaacataagttgttgttcttgcagatgtttttgttgccgtctg

SEQ ID NO: 12696 - DNA, 80 bp, synthetic construct
  misc_feature 1..80: note = Synthetic: >BtCoV_008_16-cand-10280-10359
  source 1..80: mol_type = other DNA
ttgttattgctgcggccattaatttggctgccgacttcagagtctatgcctatcttgaggagcatctcgattatcatgtt

SEQ ID NO: 12697 - DNA, 80 bp, synthetic construct
  misc_feature 1..80: note = Synthetic: >BtCoV_008_16-cand-10350-10429
  source 1..80: mol_type = other DNA
ttatcatgtttcccttatgggctttaacgcgcaaggtctcttgaatataggcttgtgcattgtcgttatgcttcttcata

SEQ ID NO: 12698 - DNA, 80 bp, synthetic construct
  misc_feature 1..80: note = Synthetic: >BtCoV_008_16-cand-10430-10509
  source 1..80: mol_type = other DNA
catttaggtttgccaggtcctcgacgcactgggtgacttatttggttgcactgttatctgcatgttataactacttttac

SEQ ID NO: 12699 - DNA, 80 bp, synthetic construct
  misc_feature 1..80: note = Synthetic: >BtCoV_008_16-cand-10510-10589
  source 1..80: mol_type = other DNA
atgaatgatgctcttagttgtgccattacactgttttctagcctaacaggtcactggttcataggtgcccttgtttataa

SEQ ID NO: 12700 - DNA, 80 bp, synthetic construct
  misc_feature 1..80: note = Synthetic: >BtCoV_008_16-cand-10590-10669
  source 1..80: mol_type = other DNA
gctagctgtcatagttgtggcgcaatttccaattatattggttacatttgagcaggctaaaggtgtagttatatgttact

SEQ ID NO: 12701 - DNA, 80 bp, synthetic construct
  misc_feature 1..80: note = Synthetic: >BtCoV_008_16-cand-11950-12029
  source 1..80: mol_type = other DNA
tcacccactggacctgttattaagtacctctactttgtttgtaatttgaacaatttacgtaggggagcggttttaggttt

SEQ ID NO: 12702 - DNA, 80 bp, synthetic construct
  misc_feature 1..80: note = Synthetic: >BtCoV_008_16-cand-12020-12099
  source 1..80: mol_type = other DNA
ttttaggtttcattggtgccacagttaggttgcaggctggtaagcaaactgagcacgcaactaattcctctgttcttaca

SEQ ID NO: 12703 - DNA, 80 bp, synthetic construct
  misc_feature 1..80: note = Synthetic: >BtCoV_008_16-cand-12100-12179
  source 1..80: mol_type = other DNA
ttatgtgccttttcagtagaccctgctaaaacatacattgatgcagttaagggtggtcataaacctgtcggtaattgtgt

SEQ ID NO: 12704 - DNA, 80 bp, synthetic construct
  misc_feature 1..80: note = Synthetic: >BtCoV_008_16-cand-12180-12259
  source 1..80: mol_type = other DNA
taagatgttatctaatggttctggaaatggcatggctataaccaatggtgtggaagctacaagcaaccaagattcatacg

SEQ ID NO: 12705 - DNA, 80 bp, synthetic construct
  misc_feature 1..80: note = Synthetic: >BtCoV_008_16-cand-12260-12339
  source 1..80: mol_type = other DNA
gtggtgcgtctgtgtgtctctattgtagagcacacgtagaacaccctgcaatggatggtatttgcagattaaaaggcaag

SEQ ID NO: 12706 - DNA, 80 bp, synthetic construct
  misc_feature 1..80: note = Synthetic: >BtCoV_008_16-cand-12340-12419
  source 1..80: mol_type = other DNA
tatgtgcaaatacctatagggacacaggatcctattaggtatgtacttgagaatacagtctgcaaagtttgtggttgttg

SEQ ID NO: 12707 - DNA, 80 bp, synthetic construct
  misc_feature 1..80: note = Synthetic: >BtCoV_008_16-cand-12420-12499
  source 1..80: mol_type = other DNA
gcaagctaatggttgtgcttgtgataggtccactttgcaaactacgcttgacactggttatttaaacgagtacggggctc

SEQ ID NO: 12708 - DNA, 80 bp, synthetic construct
  misc_feature 1..80: note = Synthetic: >BtCoV_008_16-cand-12500-12579
  source 1..80: mol_type = other DNA
tagtgcagctcgactagagccctgtaatggtactgatacacagcatgtgtatcgtgcttttgacatttacaacaaggaag

SEQ ID NO: 12709 - DNA, 80 bp, synthetic construct
  misc_feature 1..80: note = Synthetic: >BtCoV_008_16-cand-12580-12659
  source 1..80: mol_type = other DNA
ctgcatgtattagcaagtttcttaaggtgaactgtgttcgctttaagaacttggatttgcatgatgctttttgggttgta

SEQ ID NO: 12710 - DNA, 80 bp, synthetic construct
  misc_feature 1..80: note = Synthetic: >BtCoV_008_16-cand-12660-12739
  source 1..80: mol_type = other DNA
aagaagtgtacgaagtcagttatggaacacgagcaatccatatatgagctgatttcagattgtggtgctgttgccaagca

SEQ ID NO: 12711 - DNA, 80 bp, synthetic construct
  misc_feature 1..80: note = Synthetic: >BtCoV_008_16-cand-12740-12819
  source 1..80: mol_type = other DNA
tgatttctttcagtggaaagaaggaaggtctatatatggtaatgtctgtaggaaggatcttacggaatacactatgatgg

SEQ ID NO: 12712 - DNA, 80 bp, synthetic construct
  misc_feature 1..80: note = Synthetic: >BtCoV_008_16-cand-12820-12899
  source 1..80: mol_type = other DNA
acttgtgctttgcattgcgcaatttcgatgaaagtaactgtgacaccttaaagaaaattcttgttatagtaggtgcttgt

SEQ ID NO: 12713 - DNA, 80 bp, synthetic construct
  misc_feature 1..80: note = Synthetic: >BtCoV_008_16-cand-12900-12979
  source 1..80: mol_type = other DNA
gatgaaacctactttgaaaataaatcctggtttgaccctgtggagaatgaggacatacatcgtgtgtattccattctcgg

SEQ ID NO: 12714 - DNA, 80 bp, synthetic construct
  misc_feature 1..80: note = Synthetic: >BtCoV_008_16-cand-12980-13059
  source 1..80: mol_type = other DNA
taaggttgttgctagagctatgctcaagtgtgttgcattttgtgatgccatggtagaaaagggtattgttggtgttgtta

SEQ ID NO: 12715 - DNA, 80 bp, synthetic construct
  misc_feature 1..80: note = Synthetic: >BtCoV_008_16-cand-13060-13139
  source 1..80: mol_type = other DNA
cactcgataaccaagatcttaatggtaacttctatgattttggtgattttgtggtcactgttaaaggcatgggagttccc

SEQ ID NO: 12716 - DNA, 80 bp, synthetic construct
  misc_feature 1..80: note = Synthetic: >BtCoV_008_16-cand-13140-13219
  source 1..80: mol_type = other DNA
gtgtgtacatcatattattcttatatgatgccaatcatggggcttaccaattgccttgctgcagagtgctttattaagag

SEQ ID NO: 12717 - DNA, 80 bp, synthetic construct
  misc_feature 1..80: note = Synthetic: >Delta-cand-28280-28359
  source 1..80: mol_type = other DNA
aacattttcaccaatttttaaccttgtcctttaactacggtttatgaaggctaaacttagagctagaactatagtcaagc

SEQ ID NO: 12718 - DNA, 80 bp, synthetic construct
  misc_feature 1..80: note = Synthetic: >Delta-cand-28360-28439
  source 1..80: mol_type = other DNA
gaaagtcattaatagattccgcttgacaccttatattatgcttgattgtaaatctgctgctgagtcgacgaatacgaagg

SEQ ID NO: 12719 - DNA, 80 bp, synthetic construct
  misc_feature 1..80: note = Synthetic: >Delta-cand-28440-28519
  source 1..80: mol_type = other DNA
ggcttattgtgtctctggtttcacattttcttgaatggcaatcatttgaaggaccagattttgtgtgtgaatccttttgg

SEQ ID NO: 12720 - DNA, 80 bp, synthetic construct
  misc_feature 1..80: note = Synthetic: >Delta-cand-28520-28599
  source 1..80: mol_type = other DNA
gaacaagattcctatgaatcctcagaggagaattaaacccacccaactccttggagtgattctagtaccaactcaaatat

SEQ ID NO: 12721 - DNA, 80 bp, synthetic construct
  misc_feature 1..80: note = Synthetic: >Delta-cand-28600-28679
  source 1..80: mol_type = other DNA
ctctttggttccagagagtcgtagaaactcaatagaaccctgctacataccgaagggcaactcttgttgtttattacaaa

SEQ ID NO: 12722 - DNA, 80 bp, synthetic construct
  misc_feature 1..80: note = Synthetic: >Delta-cand-28680-28759
  source 1..80: mol_type = other DNA
gtgtatgctagtgttgccagggccctacaaaccatacatcaatgaagcttttaagctcattcttgatgaaattgtcgaaa

SEQ ID NO: 12723 - DNA, 80 bp, synthetic construct
  misc_feature 1..80: note = Synthetic: >Delta-cand-28760-28839
  source 1..80: mol_type = other DNA
ctggaacaacaaattcaccccatgcttttctagttttggaagatccagactataacatttggaaaatacattggcagcgc

SEQ ID NO: 12724 - DNA, 80 bp, synthetic construct
  misc_feature 1..80: note = Synthetic: >Delta-cand-28840-28919
  source 1..80: mol_type = other DNA
ggtccgctgcactaaacaccttctcacctccacgatctgttgtgtctgtgactgtgggccaggacactgcataaccgttt

SEQ ID NO: 12725 - DNA, 80 bp, synthetic construct
  misc_feature 1..80: note = Synthetic: >Delta-cand-28920-28999
  source 1..80: mol_type = other DNA
tccagaacaaaaattcagaaccactctactggggacacgaggatttcacaaccaatagcgtctacaccattccaggaccc

SEQ ID NO: 12726 - DNA, 80 bp, synthetic construct
  misc_feature 1..80: note = Synthetic: >Delta-cand-29000-29079
  source 1..80: mol_type = other DNA
accaaacctaaataatttacatgggtaccctaccagtggcctagacagtctactaccaatgtaaataaccaaattaatca

SEQ ID NO: 12727 - DNA, 80 bp, synthetic construct
  misc_feature 1..80: note = Synthetic: >Delta-cand-29080-29159
  source 1..80: mol_type = other DNA
aaaacaaatatacacgcttctcatgattcatcagtacaaacatacaactcaaataaatcagatatacaagctctattgca

SEQ ID NO: 12728 - DNA, 80 bp, synthetic construct
  misc_feature 1..80: note = Synthetic: >Delta-cand-29160-29239
  source 1..80: mol_type = other DNA
gcagggattaccatttcttgtgataacacttgcaatgttgtttttattgcaatcagcagtgttgattcatttatttcgac

SEQ ID NO: 12729 - DNA, 80 bp, synthetic construct
  misc_feature 1..80: note = Synthetic: >Delta-cand-29240-29319
  source 1..80: mol_type = other DNA
gcattaaaagactcaagtcaagactttcagcagttcaaccactacaaaattaataccatgattagctttggatactacat

SEQ ID NO: 12730 - DNA, 80 bp, synthetic construct
  misc_feature 1..80: note = Synthetic: >Delta-cand-29320-29399
  source 1..80: mol_type = other DNA
tatcaagtttatcaccctcatcttcttcggagttttagaccccgaaggttgccgagccagtaggtcctttcatcgacctt

SEQ ID NO: 12731 - DNA, 80 bp, synthetic construct
  misc_feature 1..80: note = Synthetic: >Delta-cand-29400-29479
  source 1..80: mol_type = other DNA
gaaatatttgggtttgtagcataagagcaaaatccccctcaagtggccttatattttggatctggatttttcgtcctcgt

SEQ ID NO: 12732 - DNA, 80 bp, synthetic construct
  misc_feature 1..80: note = Synthetic: >Delta-cand-29480-29559
  source 1..80: mol_type = other DNA
gctgcaaaacctatccttaatcaaccaatgcttgtaagcaagcagcaacttgtatagccagagagccagtcagagggcgc

SEQ ID NO: 12733 - DNA, 80 bp, synthetic construct
  misc_feature 1..80: note = Synthetic: >HKU1-cand-14770-14849
  source 1..80: mol_type = other DNA
ttctattggttaccattacaaagagttaggtgtagttatgaacttagatgttgacacacaccgttatcgtttgtctctta

SEQ ID NO: 12734 - DNA, 80 bp, synthetic construct
  misc_feature 1..80: note = Synthetic: >HKU1-cand-14850-14929
  source 1..80: mol_type = other DNA
aagatttacttctttatgcagcagatcctgctatgcatgttgcatctgctagtgctctgcttgatttacgaacttgttgt

SEQ ID NO: 12735 - DNA, 80 bp, synthetic construct
  misc_feature 1..80: note = Synthetic: >HKU1-cand-14930-15009
  source 1..80: mol_type = other DNA
tttagtgtagctgccattacaagtggtataaaatttcaaactgtaaaaccaggtaactttaaccaagacttttacgagtt

SEQ ID NO: 12736 - DNA, 80 bp, synthetic construct
  misc_feature 1..80: note = Synthetic: >HKU1-cand-15020-15099
  source 1..80: mol_type = other DNA
aaaggcttgtttaaagagggtagtacagttgatttgaaacattttttctttactcaagatggtaatgctgcaattactga

SEQ ID NO: 12737 - DNA, 80 bp, synthetic construct
  misc_feature 1..80: note = Synthetic: >HKU1-cand-15100-15179
  source 1..80: mol_type = other DNA
ttataattattataagtataatttacctactatggttgatattaagcagttattgtttgtattagaagttgtttataaat

SEQ ID NO: 12738 - DNA, 80 bp, synthetic construct
  misc_feature 1..80: note = Synthetic: >HKU1-cand-15180-15259
  source 1..80: mol_type = other DNA
attttgaaatttatgatggtggttgtataccagcatcacaagttattgttaataattatgataaaagtgctggttatcca

SEQ ID NO: 12739 - DNA, 80 bp, synthetic construct
  misc_feature 1..80: note = Synthetic: >HKU1-cand-15260-15339
  source 1..80: mol_type = other DNA
tttaataaatttggtaaagccagactttattatgaggcattatcatttgaagaacagaatgaaatttatgcatatactaa

SEQ ID NO: 12740 - DNA, 80 bp, synthetic construct
  misc_feature 1..80: note = Synthetic: >HKU1-cand-15340-15419
  source 1..80: mol_type = other DNA
acgtaatgttctgcccaccttaactcaaatgaatttaaaatatgctatcagtgctaagaatagagctcgcactgtagcag

SEQ ID NO: 12741 - DNA, 80 bp, synthetic construct
  misc_feature 1..80: note = Synthetic: >HKU1-cand-15420-15499
  source 1..80: mol_type = other DNA
gtgtttctattcttagtactatgacaggccgaatgttccatcaaaaatgtttgaagagtatagcagctacccgaggtgtt

SEQ ID NO: 12742 - DNA, 80 bp, synthetic construct
  misc_feature 1..80: note = Synthetic: >HKU1-cand-15500-15579
  source 1..80: mol_type = other DNA
cctgttgttataggaaccactaaattttatggtggttgggacgatatgttacgtcatcttataaaggatgttgacaaccc

SEQ ID NO: 12743 - DNA, 80 bp, synthetic construct
  misc_feature 1..80: note = Synthetic: >HKU1-cand-15580-15659
  source 1..80: mol_type = other DNA
tgttcttatgggttgggattatcctaaatgtgatcgtgctatgccaaatattttgcgtattgttagtagtttagttttgg

SEQ ID NO: 12744 - DNA, 80 bp, synthetic construct
  misc_feature 1..80: note = Synthetic: >HKU1-cand-15660-15739
  source 1..80: mol_type = other DNA
cccgcaaacatgaattttgttgttcacatggtgatagattttatcgccttgcgaatgaatgtgctcaagttttgagtgaa

SEQ ID NO: 12745 - DNA, 80 bp, synthetic construct
  misc_feature 1..80: note = Synthetic: >HKU1-cand-15740-15819
  source 1..80: mol_type = other DNA
atagttatgtgtggcggttgctattatgttaagcctggtggtactagcagtggtgatgcaactactgcttttgctaattc

SEQ ID NO: 12746 - DNA, 80 bp, synthetic construct
  misc_feature 1..80: note = Synthetic: >HKU1-cand-15820-15899
  source 1..80: mol_type = other DNA
tgtttttaatatatgtcaggctgttactgctaacgtttgttctcttatggcctgtaatggccataagattgaagatttaa

SEQ ID NO: 12747 - DNA, 80 bp, synthetic construct
  misc_feature 1..80: note = Synthetic: >HKU1-cand-15900-15979
  source 1..80: mol_type = other DNA
gtatacgcaatttacaaaaacgcttatactctaatgtttatcgtacagattatgttgattatacatttgttaatgagtat

SEQ ID NO: 12748 - DNA, 80 bp, synthetic construct
  misc_feature 1..80: note = Synthetic: >HKU1-cand-15980-16059
  source 1..80: mol_type = other DNA
tatgaatttttatgtaagcattttagtatgatgattttgagtgatgatggtgttgtctgttataactctgattatgctag

SEQ ID NO: 12749 - DNA, 80 bp, synthetic construct
  misc_feature 1..80: note = Synthetic: >HKU1-cand-17350-17429
  source 1..80: mol_type = other DNA
cattggaatgaaacgttattgcactgttcaaggtccccctggtacgggaaagtctcatcttgctataggtctagctgttt

SEQ ID NO: 12750 - DNA, 80 bp, synthetic construct
  misc_feature 1..80: note = Synthetic: >HKU1-cand-17430-17509
  source 1..80: mol_type = other DNA
attactacacagcacgtgtagtttatactgctgctagtcatgctgctgtagatgcattgtgtgaaaaagcttataagttt

SEQ ID NO: 12751 - DNA, 80 bp, synthetic construct
  misc_feature 1..80: note = Synthetic: >HKU1-cand-17510-17589
  source 1..80: mol_type = other DNA
ttaaatattaacgattgtacacgtattattcctgctaaagttcgtgtagattgttatgataagtttaaaattaatgatac

SEQ ID NO: 12752 - DNA, 80 bp, synthetic construct
  misc_feature 1..80: note = Synthetic: >HKU1-cand-17590-17669
  source 1..80: mol_type = other DNA
cacttgtaagtatgtttttaccacaataaatgcattaccagagttggttacagatattgttgttgttgatgaagttagta

SEQ ID NO: 12753 - DNA, 80 bp, synthetic construct
  misc_feature 1..80: note = Synthetic: >HKU1-cand-17670-17749
  source 1..80: mol_type = other DNA
tgcttactaattatgaattgtctgttataaatgctcgtattaaagctaaacattatgtatatattggagatcctgctcaa

SEQ ID NO: 12754 - DNA, 80 bp, synthetic construct
  misc_feature 1..80: note = Synthetic: >HKU1-cand-17750-17829
  source 1..80: mol_type = other DNA
ttacctgcaccacgtgtgctgttgagcaagggttctttagaacctaggcacttcaattctattactaaaataatgtgttg

SEQ ID NO: 12755 - DNA, 80 bp, synthetic construct
  misc_feature 1..80: note = Synthetic: >HKU1-cand-17830-17909
  source 1..80: mol_type = other DNA
tttaggtcctgatatctttttgggaaattgttataggtgtcctaaagaaattgtagaaactgtttcagcattggtttatg

SEQ ID NO: 12756 - DNA, 80 bp, synthetic construct
  misc_feature 1..80: note = Synthetic: >HKU1-cand-17910-17989
  source 1..80: mol_type = other DNA
ataataaactcaaggctaaaaatgataatagttcattatgttttaaagtatattttaagggacagacaacacatgagagt

SEQ ID NO: 12757 - DNA, 80 bp, synthetic construct
  misc_feature 1..80: note = Synthetic: >HKU1-cand-17990-18069
  source 1..80: mol_type = other DNA
tcaagtgctgtaaatattcaacagatatatctaattagtaaatttttaaaagctaatccagtttggaatagtgctgtttt

SEQ ID NO: 12758 - DNA, 80 bp, synthetic construct
  misc_feature 1..80: note = Synthetic: >HKU1-cand-18070-18149
  source 1..80: mol_type = other DNA
tattagtccttataatagtcagaattatgttgctaagcgtgttttaggtgttcaaacacaaactgtagattctgctcaag

SEQ ID NO: 12759 - DNA, 80 bp, synthetic construct
  misc_feature 1..80: note = Synthetic: >HKU1-cand-18150-18229
  source 1..80: mol_type = other DNA
gttcggaatatgattacgttatatattcacaaacagcagaaacagcccattctgttaatgttaatcgatttaatgttgcc

SEQ ID NO: 12760 - DNA, 80 bp, synthetic construct
  misc_feature 1..80: note = Synthetic: >HKU1-cand-18230-18309
  source 1..80: mol_type = other DNA
ataactagagccaagaagggcattttttgtgttatgagtaatatgcaattatttgaatctcttaattttattactctacc

SEQ ID NO: 12761 - DNA, 80 bp, synthetic construct
  misc_feature 1..80: note = Synthetic: >HKU1-cand-18310-18389
  source 1..80: mol_type = other DNA
tttagataaaattcaaaatcaaactttacctcgtttgcattgcacaactaatctttttaaagattgtagtaaaagttgct

SEQ ID NO: 12762 - DNA, 80 bp, synthetic construct
  misc_feature 1..80: note = Synthetic: >HKU1-cand-18390-18469
  source 1..80: mol_type = other DNA
taggttatcatccagcgcatgccccctcatttttagcagttgatgataaatataaggttaatgaaaatttggctgtaaat

SEQ ID NO: 12763 - DNA, 80 bp, synthetic construct
  misc_feature 1..80: note = Synthetic: >HKU1-cand-18470-18549
  source 1..80: mol_type = other DNA
ttaaatatttgtgaacctgttttaacatattctcgtttaatatctcttatgggttttaaattagatttgactcttgatgg

SEQ ID NO: 12764 - DNA, 80 bp, synthetic construct
  misc_feature 1..80: note = Synthetic: >HKU1-cand-18550-18629
  source 1..80: mol_type = other DNA
ttattctaaattgtttattactaaagatgaagccattaaacgtgttagaggttgggttggttttgatgttgaaggcgctc

SEQ ID NO: 12765 - DNA, 80 bp, synthetic construct
  misc_feature 1..80: note = Synthetic: >HKU15-cand-10310-10389
  source 1..80: mol_type = other DNA
atcttgcagaacgtgctgaggatcgtcgcattaagctaacctctggacttactgcaatgctttaccatatgcttagacgt

SEQ ID NO: 12766 - DNA, 80 bp, synthetic construct
  misc_feature 1..80: note = Synthetic: >HKU15-cand-10390-10469
  source 1..80: mol_type = other DNA
cttgactcagatagggtaaaagctctgtttgagtgcgctaaggcacaaatcttgccaatacatgctgtagttggaatttc

SEQ ID NO: 12767 - DNA, 80 bp, synthetic construct
  misc_feature 1..80: note = Synthetic: >HKU15-cand-10470-10549
  source 1..80: mol_type = other DNA
taatgacaaccttaaagttatttttaacgataaggacagctactctcattatgtagagggcaacacacttatacataagg

SEQ ID NO: 12768 - DNA, 80 bp, synthetic construct
  misc_feature 1..80: note = Synthetic: >HKU15-cand-10550-10629
  source 1..80: mol_type = other DNA
gagttcgctacactattgtgaagaaactctccttagataatgcacctattgaaggcgtaccagaagaattccctgtggtc

SEQ ID NO: 12769 - DNA, 80 bp, synthetic construct
  misc_feature 1..80: note = Synthetic: >HKU15-cand-10630-10709
  source 1..80: mol_type = other DNA
gttgagactgttagggaaggtgtgccccagttgcaaaacaatgagctatgtttgcgcaatgttttcactgctcagaacac

SEQ ID NO: 12770 - DNA, 80 bp, synthetic construct
  misc_feature 1..80: note = Synthetic: >HKU15-cand-10710-10789
  source 1..80: mol_type = other DNA
agctcaggacttcaatggcaatgaatccactgtaaaatctttttatgttactagaaccggtaagaagattttggttgcca

SEQ ID NO: 12771 - DNA, 80 bp, synthetic construct
  misc_feature 1..80: note = Synthetic: >HKU15-cand-10790-10869
  source 1..80: mol_type = other DNA
ttacatcaactaaagacaatcttaagactgtgacctgccttactgagaccggtaagacagtccttaacttggacccccct

SEQ ID NO: 12772 - DNA, 80 bp, synthetic construct
  misc_feature 1..80: note = Synthetic: >HKU15-cand-10870-10949
  source 1..80: mol_type = other DNA
atgcgcttcgcacataccgtaggtggaaaacagtctgttgtctatctctattttattcagaatattagttcactcaacag

SEQ ID NO: 12773 - DNA, 80 bp, synthetic construct
  misc_feature 1..80: note = Synthetic: >HKU15-cand-10950-11029
  source 1..80: mol_type = other DNA
aggtatggttattggccacatctctgaaactactatccttcaggcaagtggcactcaaattgagtaccagcaaaatgcct

SEQ ID NO: 12774 - DNA, 80 bp, synthetic construct
  misc_feature 1..80: note = Synthetic: >HKU15-cand-11030-11109
  source 1..80: mol_type = other DNA
ctcttttgacctatttggctttcgctgtagaccctaagacagcctaccttaagcatcttgctgatggtgggtctcctata

SEQ ID NO: 12775 - DNA, 80 bp, synthetic construct
  misc_feature 1..80: note = Synthetic: >HKU15-cand-11190-11269
  source 1..80: mol_type = other DNA
ttcttatggtggtgcttcaatttgtctttattgccgtgctcatataccacatcctggtgttgatggacggtgcccctaca

SEQ ID NO: 12776 - DNA, 80 bp, synthetic construct
  misc_feature 1..80: note = Synthetic: >HKU15-cand-11270-11349
  source 1..80: mol_type = other DNA
aaggccgctttgttcacatcgacaaagataaggaacctgtttccttcgccttgactcatgagccatgcagttcttgtcaa

SEQ ID NO: 12777 - DNA, 80 bp, synthetic construct
  misc_feature 1..80: note = Synthetic: >HKU15-cand-11350-11429
  source 1..80: mol_type = other DNA
cggtgggttaattatgactgcacctgcggatctagtctgcagaattcggcttatttaaacgagtaacgggttctagtgac

SEQ ID NO: 12778 - DNA, 80 bp, synthetic construct
  misc_feature 1..80: note = Synthetic: >HKU15-cand-11450-11529
  source 1..80: mol_type = other DNA
gcctggaactcaaccagatgctgtaaaaagggccttccatgtgcataatgataccacctctggtatattcttaagcacaa

SEQ ID NO: 12779 - DNA, 80 bp, synthetic construct
  misc_feature 1..80: note = Synthetic: >HKU15-cand-11530-11609
  source 1..80: mol_type = other DNA
aatctaactgcgctcggtttaaaaccacacgcagtgccctgcctttacctaataagggagaggttgaattgtactttgtt

SEQ ID NO: 12780 - DNA, 80 bp, synthetic construct
  misc_feature 1..80: note = Synthetic: >HKU15-cand-23180-23259
  source 1..80: mol_type = other DNA
ttcaccctagtggtgaccatttggaccgcagttgacagatcatctaagaaggacgcagttttcattgtgtccataatttt

SEQ ID NO: 12781 - DNA, 80 bp, synthetic construct
  misc_feature 1..80: note = Synthetic: >HKU15-cand-23250-23329
  source 1..80: mol_type = other DNA
ccataatttttgccgtactgaccttcatatcctgggccaagtactggtatgactcaattcgtttattaatgaaaaccaga

SEQ ID NO: 12782 - DNA, 80 bp, synthetic construct
  misc_feature 1..80: note = Synthetic: >HKU15-cand-23330-23409
  source 1..80: mol_type = other DNA
tctgcatgggcactctcacctgagagtagactccttgcagggattatggatccaatgggtacatggaggtgcattcccat

SEQ ID NO: 12783 - DNA, 80 bp, synthetic construct
  misc_feature 1..80: note = Synthetic: >HKU15-cand-23410-23489
  source 1..80: mol_type = other DNA
cgaccacatggctccaattctcacaccagtcgttaagcatggcaagctcaagctacatgggcaagagctggccaatggca

SEQ ID NO: 12784 - DNA, 80 bp, synthetic construct
  misc_feature 1..80: note = Synthetic: >HKU15-cand-23730-23809
  source 1..80: mol_type = other DNA
attgtgcaataagcggcacatcagaagagaggatgttcctgagcttattgaccctctcgttaaaactcgctgttttgctt

SEQ ID NO: 12785 - DNA, 80 bp, synthetic construct
  misc_feature 1..80: note = Synthetic: >HKU15-cand-23810-23889
  source 1..80: mol_type = other DNA
acagtctcgtggttcttgctaatgctaatccaattgcatttagcatactacctcggaaaattcttatcaatggtgagcct

SEQ ID NO: 12786 - DNA, 80 bp, synthetic construct
  misc_feature 1..80: note = Synthetic: >HKU15-cand-23970-24049
  source 1..80: mol_type = other DNA
aaattaaagttttgacaccaatctatcatggctgcaccagtagtccctactactgacgcgtcttggtttcaggtgctcaa

SEQ ID NO: 12787 - DNA, 80 bp, synthetic construct
  misc_feature 1..80: note = Synthetic: >HKU15-cand-24130-24209
  source 1..80: mol_type = other DNA
accatggctactggctgcgttacaccagacaaaagccaggtggtactccgattcctccatcctatgccttttattatact

SEQ ID NO: 12788 - DNA, 80 bp, synthetic construct
  misc_feature 1..80: note = Synthetic: >HKU15-cand-24210-24289
  source 1..80: mol_type = other DNA
ggcacaggtcccagaggaaatcttaagtatggtgaactccctcctaatgataccccagcaaccactcgtgttacttgggt

SEQ ID NO: 12789 - DNA, 80 bp, synthetic construct
  misc_feature 1..80: note = Synthetic: >HKU15-cand-24290-24369
  source 1..80: mol_type = other DNA
taagggttcgggagctgacacttctattaaacctcatgttgccaaacgcaaccccaacaatcctaaacatcagctgctac

SEQ ID NO: 12790 - DNA, 80 bp, synthetic construct
  misc_feature 1..80: note = Synthetic: >HKU15-cand-24370-24449
  source 1..80: mol_type = other DNA
ctctccgattcccaaccggagatggcccagctcaaggtttcagagttgaccccttcaacgctagaggaagacctcaggag

SEQ ID NO: 12791 - DNA, 80 bp, synthetic construct
  misc_feature 1..80: note = Synthetic: >HKU4-cand-2130-2209
  source 1..80: mol_type = other DNA
cttcgtactccgttatttggatgagaagtttgatacagttcttggcactgttagtagtgcatgtcaaactgccttgagta

SEQ ID NO: 12792 - DNA, 80 bp, synthetic construct
  misc_feature 1..80: note = Synthetic: >HKU4-cand-2290-2369
  source 1..80: mol_type = other DNA
atgcataagctatatgtctacactagttgtggctatgtagctgttgctgaacattcttctaaaattgtacaacaagtgct

SEQ ID NO: 12793 - DNA, 80 bp, synthetic construct
  misc_feature 1..80: note = Synthetic: >HKU4-cand-2370-2449
  source 1..80: mol_type = other DNA
cgacattatgtctaaggcaatgaagttgttgcacactaatgtttcctgggcaggtactaaattatctgccattatttatg

SEQ ID NO: 12794 - DNA, 80 bp, synthetic construct
  misc_feature 1..80: note = Synthetic: >HKU4-cand-2690-2769
  source 1..80: mol_type = other DNA
ggaactatgtactcgttagcgacaaattgtttgttcgcactgaggacgaagaattttatcctctttgcactaatggtaaa

SEQ ID NO: 12795 - DNA, 80 bp, synthetic construct
  misc_feature 1..80: note = Synthetic: >HKU4-cand-2770-2849
  source 1..80: mol_type = other DNA
gttgtgtctaccttgtttagacttaagggtggcatgccttctaaaaaagttacattcggtgatgttaataccgttgaagt

SEQ ID NO: 12796 - DNA, 80 bp, synthetic construct
  misc_feature 1..80: note = Synthetic: >HKU4-cand-2930-3009
  source 1..80: mol_type = other DNA
cttttacagttgagaaagatcttctagttgaagattttgttgatgtcatcaaggatgaggtgttaacattgcttacacct

SEQ ID NO: 12797 - DNA, 80 bp, synthetic construct
  misc_feature 1..80: note = Synthetic: >HKU4-cand-3010-3089
  source 1..80: mol_type = other DNA
ttgctccgtggttatgatatcgatggttttgatgtagaagattttattgatgtaccatgctatgtttataaccaagatgg

SEQ ID NO: 12798 - DNA, 80 bp, synthetic construct
  misc_feature 1..80: note = Synthetic: >HKU4-cand-8450-8529
  source 1..80: mol_type = other DNA
accaaactagtatgcgaaatgcaaatggtgcatgtgtttggaatagtggtgattatatgaagctttctgatagtttcaag

SEQ ID NO: 12799 - DNA, 80 bp, synthetic construct
  misc_feature 1..80: note = Synthetic: >HKU4-cand-8530-8609
  source 1..80: mol_type = other DNA
cgtcagattagaattgcttgcagaaagtgtaatattccgtttagacttactacgtctaaacttcgtgcagctgacaatat

SEQ ID NO: 12800 - DNA, 80 bp, synthetic construct
  misc_feature 1..80: note = Synthetic: >HKU4-cand-8610-8689
  source 1..80: mol_type = other DNA
tttgtctgtaaaatttagcgccactaaaattgttggtggcgctcctagttggcttttaagagtgcgtgatttaactgtta

SEQ ID NO: 12801 - DNA, 80 bp, synthetic construct
  misc_feature 1..80: note = Synthetic: >HKU4-cand-8690-8769
  source 1..80: mol_type = other DNA
aaggttactgcattcttacgctttttgtgtttacagtagctgtgctatcctggttttgtttacctagttatagtattgcg

SEQ ID NO: 12802 - DNA, 80 bp, synthetic construct
  misc_feature 1..80: note = Synthetic: >HKU4-cand-8770-8849
  source 1..80: mol_type = other DNA
actgttaattttaatgatgaccgcattcttacatataaagttattgagaatggtattgttagagacatagcacctaacga

SEQ ID NO: 12803 - DNA, 80 bp, synthetic construct
  misc_feature 1..80: note = Synthetic: >HKU4-cand-8850-8929
  source 1..80: mol_type = other DNA
tgtatgctttgccaataaatatggtcatttttcgaaatggtttaatgagaaccacggaggcgtttatcgtaactccatgg

SEQ ID NO: 12804 - DNA, 80 bp, synthetic construct
  misc_feature 1..80: note = Synthetic: >HKU4-cand-8930-9009
  source 1..80: mol_type = other DNA
attgtcccattactatagctgtaatagctggtgtagcaggtgctcgtgtggcaaatgttccagcaaatttagcttgggtt

SEQ ID NO: 12805 - DNA, 80 bp, synthetic construct
  misc_feature 1..80: note = Synthetic: >HKU4-cand-9010-9089
  source 1..80: mol_type = other DNA
ggtaaacaaatagtgttgtttgtctcccgtgtctttgctaatactaatgtgtgttttacacctattaatgaaattcctta

SEQ ID NO: 12806 - DNA, 80 bp, synthetic construct
  misc_feature 1..80: note = Synthetic: >HKU4-cand-9090-9169
  source 1..80: mol_type = other DNA
tgatacattctctgatagtggctgtgtgctttcttcagagtgtacgttgtttagggatgcagaaggtaatttaaatccat

SEQ ID NO: 12807 - DNA, 80 bp, synthetic construct
  misc_feature 1..80: note = Synthetic: >HKU4-cand-9170-9249
  source 1..80: mol_type = other DNA
tttgctatgaccctactgtactacctggtgcttcaagctatgctgatatgaaacctcatgtacgttatgacatgtatgat

SEQ ID NO: 12808 - DNA, 80 bp, synthetic construct
  misc_feature 1..80: note = Synthetic: >HKU4-cand-9250-9329
  source 1..80: mol_type = other DNA
tctgacatgtatattaaatttcctgaggttatagttgaaagtactctcagaattactaaaactttagcaactcaatactg

SEQ ID NO: 12809 - DNA, 80 bp, synthetic construct
  misc_feature 1..80: note = Synthetic: >HKU4-cand-9330-9409
  source 1..80: mol_type = other DNA
ccgttttggtagttgtgaagagtcagctgctggtgtatgcattagcaccaatggatcttgggccttgtataatcaaaatt

SEQ ID NO: 12810 - DNA, 80 bp, synthetic construct
  misc_feature 1..80: note = Synthetic: >HKU4-cand-9410-9489
  source 1..80: mol_type = other DNA
atagtactcgtcctggaatctattgtggtgatgattattttgatatagtacgacggttggccatatctttatttcaacca

SEQ ID NO: 12811 - DNA, 80 bp, synthetic construct
  misc_feature 1..80: note = Synthetic: >HKU4-cand-9490-9569
  source 1..80: mol_type = other DNA
gttacgtattttcaacttagcacatctttagctatgggtttagtactttgtgtgtttcttacagccgctttttactatat

SEQ ID NO: 12812 - DNA, 80 bp, synthetic construct
  misc_feature 1..80: note = Synthetic: >HKU4-cand-9570-9649
  source 1..80: mol_type = other DNA
taataaagttaagcgtgctcttgccgattacacacaatgtgctgttgtagctgtagttgcagcgttgttaaacagcttat

SEQ ID NO: 12813 - DNA, 80 bp, synthetic construct
  misc_feature 1..80: note = Synthetic: >HKU4-cand-9650-9729
  source 1..80: mol_type = other DNA
gtttatgctttatagttgccaacccattgttggttgctccctatacagctatgtattactatgccacattttatcttact

SEQ ID NO: 12814 - DNA, 80 bp, synthetic construct
  misc_feature 1..80: note = Synthetic: >HKU4-cand-12270-12349
  source 1..80: mol_type = other DNA
atcttaccaaaaagctttgaactctggtgatgcgtcaccacaggttcttaaagcgttacaaaaagctgttaacgttgcta

SEQ ID NO: 12815 - DNA, 80 bp, synthetic construct
  misc_feature 1..80: note = Synthetic: >HKU4-cand-12590-12669
  source 1..80: mol_type = other DNA
ataagttgagggtcgtaatacctgatatttctgtttggaataaagttgttaattggcctagtgtttcctatgctgggtct

SEQ ID NO: 12816 - DNA, 80 bp, synthetic construct
  misc_feature 1..80: note = Synthetic: >HKU4-cand-12670-12749
  source 1..80: mol_type = other DNA
ttgtgggatattacagttataaacaatgtggataatgaagttgtcaaacctacagatgttgtagaaactaatgaaagttt

SEQ ID NO: 12817 - DNA, 80 bp, synthetic construct
  misc_feature 1..80: note = Synthetic: >HKU4-cand-12750-12829
  source 1..80: mol_type = other DNA
gacatggccacttgttattgaatgtagccgatcttctagttctgctgtgaagctacagaataatgagatccatcctaagg

SEQ ID NO: 12818 - DNA, 80 bp, synthetic construct
  misc_feature 1..80: note = Synthetic: >HKU4-cand-12830-12909
  source 1..80: mol_type = other DNA
gtctgaagactatggtcataacagctggtgtagatcaagttaattgtaatagtagtgccgtagcttactatgagcctgtt

SEQ ID NO: 12819 - DNA, 80 bp, synthetic construct
  misc_feature 1..80: note = Synthetic: >HKU4-cand-12910-12989
  source 1..80: mol_type = other DNA
caaggccataggatggttatgggtttgttatcagagaatgctcaccttaaatgggctaaagttgagggtaaagatggttt

SEQ ID NO: 12820 - DNA, 80 bp, synthetic construct
  misc_feature 1..80: note = Synthetic: >HKU4-cand-13310-13389
  source 1..80: mol_type = other DNA
agccagaagcaactgcagaccaagaaacatatggtggtgcgtctgtgtgtctctattgtagagcacatatagaacatcct

SEQ ID NO: 12821 - DNA, 80 bp, synthetic construct
  misc_feature 1..80: note = Synthetic: >HKU4-cand-13390-13469
  source 1..80: mol_type = other DNA
gatgtttcaggtgtctgtaaatataaaacgcgttttgtacaaatcccagcgcacgtacgtgatcctgtgggatttttact

SEQ ID NO: 12822 - DNA, 80 bp, synthetic construct
  misc_feature 1..80: note = Synthetic: >HKU4-cand-17390-17469
  source 1..80: mol_type = other DNA
gtttaaagtcaatgatacaaattctcaatatttattcagtactgttaatgcattaccagaaatatcagtcgatatactgg

SEQ ID NO: 12823 - DNA, 80 bp, synthetic construct
  misc_feature 1..80: note = Synthetic: >HKU4-cand-17470-17549
  source 1..80: mol_type = other DNA
tagtggatgaagttagcatgtgtactaattatgatttgtcaatcataaattcacgtgttaaagctaaacatatagtgtat

SEQ ID NO: 12824 - DNA, 80 bp, synthetic construct
  misc_feature 1..80: note = Synthetic: >HKU4-cand-17550-17629
  source 1..80: mol_type = other DNA
gtaggtgatcctgctcagttaccagcaccacgcactttgttgatacgaggcactttggagcctgaaaatttcaatagtgt

SEQ ID NO: 12825 - DNA, 80 bp, synthetic construct
  misc_feature 1..80: note = Synthetic: >HKU4-cand-17630-17709
  source 1..80: mol_type = other DNA
tactcgtttaatgtgtaacttgggacctgacatatttcttagtgtatgttaccggtgtcctaaggaaattgtgagcactg

SEQ ID NO: 12826 - DNA, 80 bp, synthetic construct
  misc_feature 1..80: note = Synthetic: >HKU4-cand-17710-17789
  source 1..80: mol_type = other DNA
taagcgcattagtttacaacaataaattgtcagctaagaaagatgcttctggccagtgctttaagatactatttaaaggc

SEQ ID NO: 12827 - DNA, 80 bp, synthetic construct
  misc_feature 1..80: note = Synthetic: >HKU4-cand-17790-17869
  source 1..80: mol_type = other DNA
agtgtgacgcatgatgcgagctctgccattaatagacctcaattgaattttgtaaaaacttttatagctgctaacccaaa

SEQ ID NO: 12828 - DNA, 80 bp, synthetic construct
  misc_feature 1..80: note = Synthetic: >HKU4-cand-17870-17949
  source 1..80: mol_type = other DNA
ttggagtaaagcagtatttatttcaccttataacagtcaaaatgctgtagctagatccatgttaggactaactacgcaga

SEQ ID NO: 12829 - DNA, 80 bp, synthetic construct
  misc_feature 1..80: note = Synthetic: >HKU4-cand-17950-18029
  source 1..80: mol_type = other DNA
ctgttgattcttcacagggctctgaatacccgtatgtgattttctgtcaaacagcagacactgcacatgctaataactta

SEQ ID NO: 12830 - DNA, 80 bp, synthetic construct
  misc_feature 1..80: note = Synthetic: >HKU4-cand-18030-18109
  source 1..80: mol_type = other DNA
aataggtttaatgtggcagtgactagagcacagaagggtatattatgtgttatgacatctcaagttttattcgattctct

SEQ ID NO: 12831 - DNA, 80 bp, synthetic construct
  misc_feature 1..80: note = Synthetic: >HKU4-cand-18110-18189
  source 1..80: mol_type = other DNA
cgaatttgctgaattgtctcttaataattacaaattgcagtctcagattgtgactggtttgtttaaagattgttctagag

SEQ ID NO: 12832 - DNA, 80 bp, synthetic construct
  misc_feature 1..80: note = Synthetic: >HKU4-cand-18190-18269
  source 1..80: mol_type = other DNA
aggacactggtcttcctcctgcttatgcacctacttatttaagtgtagatgctaaatataaaactacagatgagttgtgt

SEQ ID NO: 12833 - DNA, 80 bp, synthetic construct
  misc_feature 1..80: note = Synthetic: >HKU4-cand-18270-18349
  source 1..80: mol_type = other DNA
gtgaatttgaatataacacctaacgttacatattctagagttatatcacgtatgggatttaagcttgatgcgacaatccc

SEQ ID NO: 12834 - DNA, 80 bp, synthetic construct
  misc_feature 1..80: note = Synthetic: >HKU4-cand-18350-18429
  source 1..80: mol_type = other DNA
aggttatcctaagttattcatcacgcgtgatgaagctataaggcaagttcgaagctgggtaggtttcgatgttgagggtg

SEQ ID NO: 12835 - DNA, 80 bp, synthetic construct
  misc_feature 1..80: note = Synthetic: >HKU4-cand-18430-18509
  source 1..80: mol_type = other DNA
cacatgcttctcgtaatgcatgtggcaccaatgtgcctttacagttaggattttctacaggtgtgaactttgttgttcaa

SEQ ID NO: 12836 - DNA, 80 bp, synthetic construct
  misc_feature 1..80: note = Synthetic: >HKU4-cand-18510-18589
  source 1..80: mol_type = other DNA
cccgttggagttgtagacactgagtggggtagtatgctgacgactatttcagcacgaccaccacctggtgaacaatttaa

SEQ ID NO: 12837 - DNA, 80 bp, synthetic construct
  misc_feature 1..80: note = Synthetic: >HKU4-cand-18580-18659
  source 1..80: mol_type = other DNA
aacaatttaaacacctcgtgccactaatgaataagggtgcgacttggcctattgtacgaagacgtatagttcaaatgtta

SEQ ID NO: 12838 - DNA, 80 bp, synthetic construct
  misc_feature 1..80: note = Synthetic: >HKU4-cand-21220-21299
  source 1..80: mol_type = other DNA
ataatcttgcattaggtggctccgttgcgattaaaataactgagcattcatggagtgcagatttgtataaaattatggga

SEQ ID NO: 12839 - DNA, 80 bp, synthetic construct
  misc_feature 1..80: note = Synthetic: >HKU4-cand-21300-21379
  source 1..80: mol_type = other DNA
agatttgcatattggacagttttctgtactaatgcaaatgcatcctcttcagaagggtttctcattggtataaatttctt

SEQ ID NO: 12840 - DNA, 80 bp, synthetic construct
  misc_feature 1..80: note = Synthetic: >HKU4-cand-21380-21459
  source 1..80: mol_type = other DNA
aggcgagttaaaagaagaaattgatggcaatgttatgcatgccaattatatattttggagaaattcaactccaatgaatt

SEQ ID NO: 12841 - DNA, 80 bp, synthetic construct
  misc_feature 1..80: note = Synthetic: >HKU4-cand-21460-21539
  source 1..80: mol_type = other DNA
tgagtacatactcactttttgatttatctcgctttcctcttaaattaaaaggtacaccagtacttcaattaaaggagagt

SEQ ID NO: 12842 - DNA, 80 bp, synthetic construct
  misc_feature 1..80: note = Synthetic: >HKU4-cand-21540-21619
  source 1..80: mol_type = other DNA
caaattaacgaacttgtaatttctctcttgtcacaaggaaagttgcttatacgcgacaatgacactcttaatgtgtctac

SEQ ID NO: 12843 - DNA, 80 bp, synthetic construct
  misc_feature 1..80: note = Synthetic: >HKU4-cand-21620-21699
  source 1..80: mol_type = other DNA
tgatgtccttgttaattttcgtaagaggctgtgattcacaatttgttgacatgagtccagctagtaatactagtgagtgt

SEQ ID NO: 12844 - DNA, 80 bp, synthetic construct
  misc_feature 1..80: note = Synthetic: >HKU4-cand-21700-21779
  source 1..80: mol_type = other DNA
ttggagtcacaagttgacgcagctgcattttctaaattaatgtggccttatcctattgatccttccaaagttgatggtat

SEQ ID NO: 12845 - DNA, 80 bp, synthetic construct
  misc_feature 1..80: note = Synthetic: >HKU4-cand-21780-21859
  source 1..80: mol_type = other DNA
catttatccacttggtaggacatattctaatattacattagcatatactggtctttttcccctacaaggagatttaggta

SEQ ID NO: 12846 - DNA, 80 bp, synthetic construct
  misc_feature 1..80: note = Synthetic: >HKU4-cand-21860-21939
  source 1..80: mol_type = other DNA
gccagtatttatattctgtaagtcatgctgtaggtcatgatggtgatcctacaaaagcttatatttctaattattcacta

SEQ ID NO: 12847 - DNA, 80 bp, synthetic construct
  misc_feature 1..80: note = Synthetic: >HKU4-cand-21940-22019
  source 1..80: mol_type = other DNA
ttggtgaatgattttgataacggttttgttgtacgaattggtgctgcagctaattcaactggcaccattgtaatttcacc

SEQ ID NO: 12848 - DNA, 80 bp, synthetic construct
  misc_feature 1..80: note = Synthetic: >HKU4-cand-22020-22099
  source 1..80: mol_type = other DNA
gtctgttaatactaagattaaaaaagcttatcctgcttttatcttaggttcgtctcttactaatacatcggctggtcagc

SEQ ID NO: 12849 - DNA, 80 bp, synthetic construct
  misc_feature 1..80: note = Synthetic: >HKU4-cand-22090-22169
  source 1..80: mol_type = other DNA
gctggtcagccattgtatgctaattacagtttaaccatcattcctgatggttgtgggactgtgttgcatgctttttattg

SEQ ID NO: 12850 - DNA, 80 bp, synthetic construct
  misc_feature 1..80: note = Synthetic: >HKU4-cand-22170-22249
  source 1..80: mol_type = other DNA
catattaaaaccacgtactgggaatcgatgtcctagtggtactggttatgtgtcttattttatttatgaaacagttcata

SEQ ID NO: 12851 - DNA, 80 bp, synthetic construct
  misc_feature 1..80: note = Synthetic: >HKU4-cand-22250-22329
  source 1..80: mol_type = other DNA
atgattgtcagtctacaattaacaggaacgcttctcttaattcttttaagagctttttcgatcttgttaattgtactttc

SEQ ID NO: 12852 - DNA, 80 bp, synthetic construct
  misc_feature 1..80: note = Synthetic: >HKU4-cand-22330-22409
  source 1..80: mol_type = other DNA
tttaatagttgggatatcactgctgatgaaacaaaagagtggtttggtattacccaagacactcaaggtgttcatctcta

SEQ ID NO: 12853 - DNA, 80 bp, synthetic construct
  misc_feature 1..80: note = Synthetic: >HKU4-cand-22410-22489
  source 1..80: mol_type = other DNA
ctcttctaggaaaggtgatttatatggcggaaatatgtttcgctttgctacattacctgtgtacgagggtataaaatatt

SEQ ID NO: 12854 - DNA, 80 bp, synthetic construct
  misc_feature 1..80: note = Synthetic: >HKU9-cand-24490-24569
  source 1..80: mol_type = other DNA
ttttataatcctgttagtattacagatagtaacactcaggttctaactacatgtagtgttaattatactactgttaatta

SEQ ID NO: 12855 - DNA, 80 bp, synthetic construct
  misc_feature 1..80: note = Synthetic: >HKU9-cand-24570-24649
  source 1..80: mol_type = other DNA
cactgtgttgaacccaacggtacctagtgattttgattttgaggaagagtttgataagtggtataaaaaccatagttcta

SEQ ID NO: 12856 - DNA, 80 bp, synthetic construct
  misc_feature 1..80: note = Synthetic: >HKU9-cand-24690-24769
  source 1..80: mol_type = other DNA
tacggttgatgtaaagaaacaactggccactcttactgatgttgttaagcagctgaacaagtcttttattgatttgaagc

SEQ ID NO: 12857 - DNA, 80 bp, synthetic construct
  misc_feature 1..80: note = Synthetic: >HKU9-cand-24770-24849
  source 1..80: mol_type = other DNA
aattaaatgtttatgaacagaccattaaatggccgtggtatatatggctcgctatgatagcgggcctagttggtttagct

SEQ ID NO: 12858 - DNA, 80 bp, synthetic construct
  misc_feature 1..80: note = Synthetic: >HKU9-cand-24850-24929
  source 1..80: mol_type = other DNA
ctagcagtggttatgcttttatgtatgactaattgttgttcatgctttaaaggcatgtgttcatgtaaacattgccacgg

SEQ ID NO: 12859 - DNA, 80 bp, synthetic construct
  misc_feature 1..80: note = Synthetic: >HKU9-cand-24930-25009
  source 1..80: mol_type = other DNA
ttcttatgatgaggtagatgatgtatatcctgctgttcgtgtatataataaacgaacagcatgaatttgtatagattagt

SEQ ID NO: 12860 - DNA, 80 bp, synthetic construct
  misc_feature 1..80: note = Synthetic: >HKU9-cand-25010-25089
  source 1..80: mol_type = other DNA
ggttgatgcgtttcaagcaacacccactatatcaacagaagacgtacaactcattaatgaagttgtacaaggtgttaaag

SEQ ID NO: 12861 - DNA, 80 bp, synthetic construct
  misc_feature 1..80: note = Synthetic: >HKU9-cand-25090-25169
  source 1..80: mol_type = other DNA
actatgtacattccacaacgattcagtggcactaattttgtatgctactgtttctgttttattatggttcctcggtaaat

SEQ ID NO: 12862 - DNA, 80 bp, synthetic construct
  misc_feature 1..80: note = Synthetic: >HKU9-cand-25170-25249
  source 1..80: mol_type = other DNA
caagatatccttatgtacgtatattggctcatacagtgttttgcttattacaagcaggcgtgctggtatggctcatgttt

SEQ ID NO: 12863 - DNA, 80 bp, synthetic construct
  misc_feature 1..80: note = Synthetic: >HKU9-cand-25250-25329
  source 1..80: mol_type = other DNA
tctaataataagttcattagtatctttgcgcagggcactgttgtcgtttgtgcatttgcatgttttcttgagcgtttaac

SEQ ID NO: 12864 - DNA, 80 bp, synthetic construct
  misc_feature 1..80: note = Synthetic: >HKU9-cand-25330-25409
  source 1..80: mol_type = other DNA
catggccattaaattacgttcattggctccttttacgacaacggctgattattttgctattgttaagacaacatgtgata

SEQ ID NO: 12865 - DNA, 80 bp, synthetic construct
  misc_feature 1..80: note = Synthetic: >HKU9-cand-25410-25489
  source 1..80: mol_type = other DNA
cttatgtatttcctgttgattcgtctaaagagaatttggttgtgcttacaacttcacgtggtctctattgtaatggaaac

SEQ ID NO: 12866 - DNA, 80 bp, synthetic construct
  misc_feature 1..80: note = Synthetic: >HKU9-cand-25490-25569
  source 1..80: mol_type = other DNA
cacgtaacaggttccatagctgtgtctgatagtgctactattgtcagtttatttaataagcatcttctactcttagatag

SEQ ID NO: 12867 - DNA, 80 bp, synthetic construct
  misc_feature 1..80: note = Synthetic: >HKU9-cand-25570-25649
  source 1..80: mol_type = other DNA
agtggagcatggttatgattacactgttttcatttatgttaacagtgttatattagagaacactcaccctaaagtgggtg

SEQ ID NO: 12868 - DNA, 80 bp, synthetic construct
  misc_feature 1..80: note = Synthetic: >HKU9-cand-25650-25729
  source 1..80: mol_type = other DNA
tctctaatccagagttcgacaatgtcgaactataatgtatgaattggtaagtgctgatacgtctgtagttattgcaaacg

SEQ ID NO: 12869 - DNA, 80 bp, synthetic construct
  misc_feature 1..80: note = Synthetic: >HKU9-cand-25730-25809
  source 1..80: mol_type = other DNA
ttttagtaattattattctttgtttatttgttgttattgtgggctgtgcattgttgctcatcctacagtttatattaggt

SEQ ID NO: 12870 - DNA, 80 bp, synthetic construct
  misc_feature 1..80: note = Synthetic: >Lucheng19-cand-20570-20649
  source 1..80: mol_type = other DNA
aacaaaagcaacaccagtgctgtcactgaaagaagggtcctttacaccattggttttaacacttattaaaaatggtaaac

SEQ ID NO: 12871 - DNA, 80 bp, synthetic construct
  misc_feature 1..80: note = Synthetic: >Lucheng19-cand-20650-20729
  source 1..80: mol_type = other DNA
ttattgttagagacacaggcgtggttgtcaactttacaaatcatttagtcaaccatttaaataaatgatggcactcactg

SEQ ID NO: 12872 - DNA, 80 bp, synthetic construct
  misc_feature 1..80: note = Synthetic: >Lucheng19-cand-20730-20809
  source 1..80: mol_type = other DNA
ataagccaactcattacgctaacaacccgctgaaatacttcgaagagttctatgagcattgccctttaatccagcgcaaa

SEQ ID NO: 12873 - DNA, 80 bp, synthetic construct
  misc_feature 1..80: note = Synthetic: >Lucheng19-cand-20810-20889
  source 1..80: mol_type = other DNA
ttggtctctaagttagattgtaaggttcaaactactccacatgtgtcacttactatgcttgaagctcgtaatagcgaact

SEQ ID NO: 12874 - DNA, 80 bp, synthetic construct
  misc_feature 1..80: note = Synthetic: >Lucheng19-cand-20890-20969
  source 1..80: mol_type = other DNA
caaatatattgactttgctattaaagactgcacagaccacatgtatgctggcaatgttgaaattgggttttccaatcttc

SEQ ID NO: 12875 - DNA, 80 bp, synthetic construct
  misc_feature 1..80: note = Synthetic: >Lucheng19-cand-20970-21049
  source 1..80: mol_type = other DNA
accttctcggcaagcatattgttgccgatgtctctggcctgcgggagtggcacgatgtagttgagtactacaccaacaat

SEQ ID NO: 12876 - DNA, 80 bp, synthetic construct
  misc_feature 1..80: note = Synthetic: >Lucheng19-cand-21050-21129
  source 1..80: mol_type = other DNA
gctggttatgtatgtggtcaatcacgtgcttggcttccacatctaactattgctagtttggaatgtgttgatgatgataa

SEQ ID NO: 12877 - DNA, 80 bp, synthetic construct
  misc_feature 1..80: note = Synthetic: >Lucheng19-cand-21130-21209
  source 1..80: mol_type = other DNA
tcttgttagaagtaagaccattcttgaggagagcaattttagttttgaatttgaactagttatcaggaaggggacaccta

SEQ ID NO: 12878 - DNA, 80 bp, synthetic construct
  misc_feature 1..80: note = Synthetic: >Lucheng19-cand-21210-21289
  source 1..80: mol_type = other DNA
tctacctaaagatagttaagataggtgctcctaagcatgatggctactatgagcaggagtttagtgcttgggtttattct

SEQ ID NO: 12879 - DNA, 80 bp, synthetic construct
  misc_feature 1..80: note = Synthetic: >Lucheng19-cand-21290-21369
  source 1..80: mol_type = other DNA
aggtgctcagttgaaccacccacttgtaagctcagcgctataatgtgttatggttgtcttcaccatgtcatttcggagat

SEQ ID NO: 12880 - DNA, 80 bp, synthetic construct
  misc_feature 1..80: note = Synthetic: >Lucheng19-cand-21370-21449
  source 1..80: mol_type = other DNA
ggaacctgatgactttcctaatgatgagcacgatgcatggtataagcttcaatattcctacgaatataatggatggtttt

SEQ ID NO: 12881 - DNA, 80 bp, synthetic construct
  misc_feature 1..80: note = Synthetic: >Lucheng19-cand-21450-21529
  source 1..80: mol_type = other DNA
ggcgttattgccgtaccaagtctagaacttttcgtaggcatattcgtgcgagaacatgcacgtgcttagattgttctgat

SEQ ID NO: 12882 - DNA, 80 bp, synthetic construct
  misc_feature 1..80: note = Synthetic: >Lucheng19-cand-21520-21599
  source 1..80: mol_type = other DNA
ttgttctgattccgatgactaaactaaacatgcaactcacattgctactgctgtgtgtcaaacccgacactgccattcaa

SEQ ID NO: 12883 - DNA, 80 bp, synthetic construct
  misc_feature 1..80: note = Synthetic: >Lucheng19-cand-21600-21679
  source 1..80: mol_type = other DNA
acctgtcctgccccaggtaatgttaacctggagatctccaactaatagcacgcaacgaaagcatctattaatgccacgtt

SEQ ID NO: 12884 - DNA, 80 bp, synthetic construct
  misc_feature 1..80: note = Synthetic: >Lucheng19-cand-21680-21759
  source 1..80: mol_type = other DNA
tcaagttgttcaagttctgccccaagtaccgtggaagtgcaatagttattctaatggtccttccaacaagtttaacggca

SEQ ID NO: 12885 - DNA, 80 bp, synthetic construct
  misc_feature 1..80: note = Synthetic: >PEDV-cand-4840-4919
  source 1..80: mol_type = other DNA
ttggatttttgtagcgttggtaagtgtcttaacaatgtgactggcggtgcattgcttgaagccataaatgtatttaaaaa

SEQ ID NO: 12886 - DNA, 80 bp, synthetic construct
  misc_feature 1..80: note = Synthetic: >PEDV-cand-4920-4999
  source 1..80: mol_type = other DNA
gagtaacaaaacagtgcctgctggcaactgtgttacttttgagtgtgcagatatgatttctattactatggtagtattgc

SEQ ID NO: 12887 - DNA, 80 bp, synthetic construct
  misc_feature 1..80: note = Synthetic: >PEDV-cand-5000-5079
  source 1..80: mol_type = other DNA
catctgacggtgatgctaattatgacaaaaattatgcacgcgccgtcgtcaaggtatctaagcttaaaggcaagttattg

SEQ ID NO: 12888 - DNA, 80 bp, synthetic construct
  misc_feature 1..80: note = Synthetic: >PEDV-cand-5080-5159
  source 1..80: mol_type = other DNA
cttgctgttggtgatgccatgttgtattccaagttgtcccacctcagcgtgttaggtttcgtatccacacctgatgatgt

SEQ ID NO: 12889 - DNA, 80 bp, synthetic construct
  misc_feature 1..80: note = Synthetic: >PEDV-cand-5160-5239
  source 1..80: mol_type = other DNA
ggagcgtttctacgcaaataagagtgtggttattaaagttactgaggatacacgtagtgttaagactgttaaagtagaat

SEQ ID NO: 12890 - DNA, 80 bp, synthetic construct
  misc_feature 1..80: note = Synthetic: >PEDV-cand-5240-5319
  source 1..80: mol_type = other DNA
ccactgttacttatggacaacaaattggaccttgtcttgttaatgacaccgttgtcacagacaacaaacctgttgttgct

SEQ ID NO: 12891 - DNA, 80 bp, synthetic construct
  misc_feature 1..80: note = Synthetic: >PEDV-cand-5320-5399
  source 1..80: mol_type = other DNA
gatgttgtagctaaggttgtaccaagtgctaattgggattcacattatggttttgataaggctggtgagttccacatgct

SEQ ID NO: 12892 - DNA, 80 bp, synthetic construct
  misc_feature 1..80: note = Synthetic: >PEDV-cand-5400-5479
  source 1..80: mol_type = other DNA
agaccatactgggtttgcctttcctagtgaagttgttaacggtaggcgtgtgcttaaaaccacagataataactgttggg

SEQ ID NO: 12893 - DNA, 80 bp, synthetic construct
  misc_feature 1..80: note = Synthetic: >PEDV-cand-5480-5559
  source 1..80: mol_type = other DNA
ttaatgttacatgtttacaattacagtttgctagatttaggttcaagtcagcaggtctacaggctatgtgggagtcctat

SEQ ID NO: 12894 - DNA, 80 bp, synthetic construct
  misc_feature 1..80: note = Synthetic: >PEDV-cand-5560-5639
  source 1..80: mol_type = other DNA
tgtactggtgatgttgctatgtttgtgcattggttgtactggcttactggtgttgacaaaggtcagcctagtgattcaga

SEQ ID NO: 12895 - DNA, 80 bp, synthetic construct
  misc_feature 1..80: note = Synthetic: >PEDV-cand-5640-5719
  source 1..80: mol_type = other DNA
aaatgcacttaacatgttgtctaagtacattgttcctgctggttctgtcactattgaacgtgtcacgcatgacggttgtt

SEQ ID NO: 12896 - DNA, 80 bp, synthetic construct
  misc_feature 1..80: note = Synthetic: >PEDV-cand-5720-5799
  source 1..80: mol_type = other DNA
gttgtagtaagcgtgttgtcactgcaccagttgtgaatgctagcgtgttgaagcttggcgtcgaggatggtctttgtcca

SEQ ID NO: 12897 - DNA, 80 bp, synthetic construct
  misc_feature 1..80: note = Synthetic: >PEDV-cand-5800-5879
  source 1..80: mol_type = other DNA
catggtcttaactacattgacaaagttgttgtagttaaaggtactacaattgttgtcaatgttggaaaacctgtagtggc

SEQ ID NO: 12898 - DNA, 80 bp, synthetic construct
  misc_feature 1..80: note = Synthetic: >PEDV-cand-5880-5959
  source 1..80: mol_type = other DNA
accatcgcacctctttcttaagggtgtttcctacacaacattcctagataatggtaacggtgttgccggccattatactg

SEQ ID NO: 12899 - DNA, 80 bp, synthetic construct
  misc_feature 1..80: note = Synthetic: >PEDV-cand-5950-6029
  source 1..80: mol_type = other DNA
cattatactgtttttgatcatgacactggtatggtgcatgatggagatgtttttgtaccaggtgatctcaatgtgtctcc

SEQ ID NO: 12900 - DNA, 80 bp, synthetic construct
  misc_feature 1..80: note = Synthetic: >PEDV-cand-6030-6109
  source 1..80: mol_type = other DNA
tgttacaaatgttgtcgtctcagagcagacggctgttgtgattaaagaccctgtgaagaaagtagagttagacgctacaa

SEQ ID NO: 12901 - DNA, 80 bp, synthetic construct
  misc_feature 1..80: note = Synthetic: >PEDV-cand-9950-10029
  source 1..80: mol_type = other DNA
ttgctgtagacaggtttaatgagtgggctgttcataatggtatgacaacagtagttaatactgattgcttttctattctt

SEQ ID NO: 12902 - DNA, 80 bp, synthetic construct
  misc_feature 1..80: note = Synthetic: >PEDV-cand-10030-10109
  source 1..80: mol_type = other DNA
gctgctaagactggtgttgatgtacaacgtttgttggcctcaatccagtctctgcataagaattttggtggaaagcaaat

SEQ ID NO: 12903 - DNA, 80 bp, synthetic construct
  misc_feature 1..80: note = Synthetic: >PEDV-cand-10110-10189
  source 1..80: mol_type = other DNA
tcttggctatacctcgttgacagatgagtttactacaggtgaagttatacgtcaaatgtatggcgttaatcttcagagtg

SEQ ID NO: 12904 - DNA, 80 bp, synthetic construct
  misc_feature 1..80: note = Synthetic: >PEDV-cand-10190-10269
  source 1..80: mol_type = other DNA
gttatgtttcacgcgcctgtagaaatgtcttgctggttggttcttttctgactttcttttggtcagaattagtttcctac

SEQ ID NO: 12905 - DNA, 80 bp, synthetic construct
  misc_feature 1..80: note = Synthetic: >PEDV-cand-10270-10349
  source 1..80: mol_type = other DNA
actaagttcttttgggtaaatcctggttatgtcacacctatgtttgcgtgtttgtcattgctgtcctcacttttgatgtt

SEQ ID NO: 12906 - DNA, 80 bp, synthetic construct
  misc_feature 1..80: note = Synthetic: >PEDV-cand-10350-10429
  source 1..80: mol_type = other DNA
cacactcaagcataagacattgtttttccaggtctttctaatacctgctctgattgttacatcttgcattaatttggcat

SEQ ID NO: 12907 - DNA, 80 bp, synthetic construct
  misc_feature 1..80: note = Synthetic: >PEDV-cand-10430-10509
  source 1..80: mol_type = other DNA
ttgatgttgaagtctacaactatttggcagagcattttgattaccatgtttctctcatgggttttaatgcacaaggtctt

SEQ ID NO: 12908 - DNA, 80 bp, synthetic construct
  misc_feature 1..80: note = Synthetic: >PEDV-cand-10510-10589
  source 1..80: mol_type = other DNA
gttaacatctttgtctgctttgttgttaccattttacacggcacatacacatggcgcttttttaacacacctgtgagttc

SEQ ID NO: 12909 - DNA, 80 bp, synthetic construct
  misc_feature 1..80: note = Synthetic: >PEDV-cand-10590-10669
  source 1..80: mol_type = other DNA
tgtcacttatgtggtagctttgctgactgcggcatataactatttttacgctagtgacattcttagttgtgctatgacac

SEQ ID NO: 12910 - DNA, 80 bp, synthetic construct
  misc_feature 1..80: note = Synthetic: >PEDV-cand-10670-10749
  source 1..80: mol_type = other DNA
tatttgctagtgtgactggcaactggttcgttggtgctgtttgttataaagctgctgtttatatggccttgagatttcct

SEQ ID NO: 12911 - DNA, 80 bp, synthetic construct
  misc_feature 1..80: note = Synthetic: >PEDV-cand-10750-10829
  source 1..80: mol_type = other DNA
acttttgtggctatttttggtgatattaagagtgttatgttctgttaccttgtgttgggttattttacctgttgcttcta

SEQ ID NO: 12912 - DNA, 80 bp, synthetic construct
  misc_feature 1..80: note = Synthetic: >PEDV-cand-10830-10909
  source 1..80: mol_type = other DNA
cggtattctctactggttcaacaggttttttaaggttagtgtaggtgtctatgactatactgttagtgctgctgagttta

SEQ ID NO: 12913 - DNA, 80 bp, synthetic construct
  misc_feature 1..80: note = Synthetic: >PEDV-cand-10910-10989
  source 1..80: mol_type = other DNA
agtatatggttgctaacggcctacgtgcaccaactggaacacttgattcactacttctgtctgccaaattgattggtatt

SEQ ID NO: 12914 - DNA, 80 bp, synthetic construct
  misc_feature 1..80: note = Synthetic: >PEDV-cand-10990-11069
  source 1..80: mol_type = other DNA
ggtggtgagcggaatattaagatttcttccgttcagtctaaactgactgatattaagtgtagtaacgttgtgcttttagg

SEQ ID NO: 12915 - DNA, 80 bp, synthetic construct
  misc_feature 1..80: note = Synthetic: >PEDV-cand-11070-11149
  source 1..80: mol_type = other DNA
ctgtctctctagcatgaatgtctcagcaaattcaacagaatgggcctattgtgttgacttgcataacaagatcaacttgt

SEQ ID NO: 12916 - DNA, 80 bp, synthetic construct
  misc_feature 1..80: note = Synthetic: >PEDV-cand-11150-11229
  source 1..80: mol_type = other DNA
gtaatgacccagaaaaagcgcaggaaatgctacttgctttgttggcatttttccttagtaagaatagtgcttttggttta

SEQ ID NO: 12917 - DNA, 80 bp, synthetic construct
  misc_feature 1..80: note = Synthetic: >PEDV-cand-22730-22809
  source 1..80: mol_type = other DNA
tgttacgccatgttctttttcagagcaggctgcatatgttgatgatgatatagtgggtgttatttctagtttgtctagct

SEQ ID NO: 12918 - DNA, 80 bp, synthetic construct
  misc_feature 1..80: note = Synthetic: >PEDV-cand-22810-22889
  source 1..80: mol_type = other DNA
ccacttttaacagtactagggagttgcctggtttcttctaccattctaatgatggctctaattgtacagagcctgtgttg

SEQ ID NO: 12919 - DNA, 80 bp, synthetic construct
  misc_feature 1..80: note = Synthetic: >PEDV-cand-22890-22969
  source 1..80: mol_type = other DNA
gtgtatagtaacataggtgtttgtaaatctggcagtattggctacgtcccatctcagtctggccaagtcaagattgcacc

SEQ ID NO: 12920 - DNA, 80 bp, synthetic construct
  misc_feature 1..80: note = Synthetic: >PEDV-cand-22970-23049
  source 1..80: mol_type = other DNA
cacggttactgggaatattagtattcccaccaactttagtatgagtattaggacagaatatttacagctttacaacacgc

SEQ ID NO: 12921 - DNA, 80 bp, synthetic construct
  misc_feature 1..80: note = Synthetic: >PEDV-cand-23050-23129
  source 1..80: mol_type = other DNA
ctgttagtgttgattgtgccacatatgtttgtaatggtaactctcgttgtaaacaattactcacccagtacactgcagca

SEQ ID NO: 12922 - DNA, 80 bp, synthetic construct
  misc_feature 1..80: note = Synthetic: >PEDV-cand-23130-23209
  source 1..80: mol_type = other DNA
tgtaagaccatagagtcagcattacaactcagcgctaggcttgagtctgttgaagttaactctatgcttactatttctga

SEQ ID NO: 12923 - DNA, 80 bp, synthetic construct
  misc_feature 1..80: note = Synthetic: >PEDV-cand-23210-23289
  source 1..80: mol_type = other DNA
agaggctctacagttagctaccattagttcgtttaatggtgatggatataattttactaatgtgctgggtgtttctgtgt

SEQ ID NO: 12924 - DNA, 80 bp, synthetic construct
  misc_feature 1..80: note = Synthetic: >PEDV-cand-23290-23369
  source 1..80: mol_type = other DNA
atgatcctgcaagtggcagggtggtacaaaaaaggtcttttattgaagacctgctttttaataaagtggttactaatggc

SEQ ID NO: 12925 - DNA, 80 bp, synthetic construct
  misc_feature 1..80: note = Synthetic: >PEDV-cand-23370-23449
  source 1..80: mol_type = other DNA
cttggtactgttgatgaagactataagcgctgttctaatggtcgctctgtggcagatctagtctgtgcacagtattactc

SEQ ID NO: 12926 - DNA, 80 bp, synthetic construct
  misc_feature 1..80: note = Synthetic: >PEDV-cand-23450-23529
  source 1..80: mol_type = other DNA
tggtgtcatggtactacctggtgttgttgacgctgagaagcttcacatgtatagtgcgtctctcatcggtggtatggtgc

SEQ ID NO: 12927 - DNA, 80 bp, synthetic construct
  misc_feature 1..80: note = Synthetic: >PEDV-cand-23530-23609
  source 1..80: mol_type = other DNA
taggaggttttacttctgcagcggcattgccttttagctatgctgttcaagctagactcaattatcttgctctacagacg

SEQ ID NO: 12928 - DNA, 80 bp, synthetic construct
  misc_feature 1..80: note = Synthetic: >PEDV-cand-23610-23689
  source 1..80: mol_type = other DNA
gatgttctacagcggaaccagcaattgcttgctgagtcttttaactctgctattggtaatataacttcagcctttgagag

SEQ ID NO: 12929 - DNA, 80 bp, synthetic construct
  misc_feature 1..80: note = Synthetic: >PEDV-cand-23690-23769
  source 1..80: mol_type = other DNA
tgttaaagaggctattagtcaaacttccaagggtttgaacactgtggctcatgcgcttactaaggttcaagaggttgtta

SEQ ID NO: 12930 - DNA, 80 bp, synthetic construct
  misc_feature 1..80: note = Synthetic: >PEDV-cand-23770-23849
  source 1..80: mol_type = other DNA
actcgcagggtgcagctttgactcaacttaccgtacagctgcaacacaacttccaagccatttctagttctattgatgac

SEQ ID NO: 12931 - DNA, 80 bp, synthetic construct
  misc_feature 1..80: note = Synthetic: >PEDV-cand-23850-23929
  source 1..80: mol_type = other DNA
atttactctcgactggacattctttcagccgatgttcaggttgaccgtctcatcaccggcagattatcagcacttaatgc

SEQ ID NO: 12932 - DNA, 80 bp, synthetic construct
  misc_feature 1..80: note = Synthetic: >PEDV-cand-23930-24009
  source 1..80: mol_type = other DNA
ttttgttgctcaaaccctcactaagtatactgaggttcaggctagcaggaagttagcacagcaaaaggttaatgagtgcg

SEQ ID NO: 12933 - DNA, 80 bp, synthetic construct
  misc_feature 1..80: note = Synthetic: >Sparrow-cand-9060-9139
  source 1..80: mol_type = other DNA
catactacttgctgctatccatgtcttcccagtacagttgtacccaatagttttgccaggatttacagtcgtggcatttc

SEQ ID NO: 12934 - DNA, 80 bp, synthetic construct
  misc_feature 1..80: note = Synthetic: >Sparrow-cand-9140-9219
  source 1..80: mol_type = other DNA
tgttgacgttaaccattaaacacactgttgtgtttacaactacttatttactgccttcactgctcatgatggtagttaat

SEQ ID NO: 12935 - DNA, 80 bp, synthetic construct
  misc_feature 1..80: note = Synthetic: >Sparrow-cand-9220-9299
  source 1..80: mol_type = other DNA
gctaacaccttttggattcctaacactttcttgcgcagctgctatgaaagtgtctttggttcctcactcgctatgcgact

SEQ ID NO: 12936 - DNA, 80 bp, synthetic construct
  misc_feature 1..80: note = Synthetic: >Sparrow-cand-9300-9379
  source 1..80: mol_type = other DNA
ctatggttattctgtcgcattttatattcttatctatgctggacttgctatcaactacacattgaatacattccggtata

SEQ ID NO: 12937 - DNA, 80 bp, synthetic construct
  misc_feature 1..80: note = Synthetic: >Sparrow-cand-9380-9459
  source 1..80: mol_type = other DNA
gagcaacctcatttacaactttctgtatgcaatggctgcaatatggttatatggcaaacattgtgtaccagttgttaacc

SEQ ID NO: 12938 - DNA, 80 bp, synthetic construct
  misc_feature 1..80: note = Synthetic: >Sparrow-cand-9460-9539
  source 1..80: mol_type = other DNA
aaaccttggacagaacccttactctttacagctttctccatgctctctagccacccattgttggcggctgtgagctggtg

SEQ ID NO: 12939 - DNA, 80 bp, synthetic construct
  misc_feature 1..80: note = Synthetic: >Sparrow-cand-9540-9619
  source 1..80: mol_type = other DNA
gattgcagatagagtcccactgcccattgttatgcctgacctagccattcgtgttgttgtttacaacatcattggttatg

SEQ ID NO: 12940 - DNA, 80 bp, synthetic construct
  misc_feature 1..80: note = Synthetic: >Sparrow-cand-9620-9699
  source 1..80: mol_type = other DNA
tcatgtgtgtgcggtttggcgttatttggcttgtcaatcgcctcactactatacctatgggcacctactcttatatggtg

SEQ ID NO: 12941 - DNA, 80 bp, synthetic construct
  misc_feature 1..80: note = Synthetic: >Sparrow-cand-9700-9779
  source 1..80: mol_type = other DNA
tctgtagaacaacttaaatatatgatggcagtcaaaatggcacctccacgcaatgcgttcgaggtgatgattgctaacat

SEQ ID NO: 12942 - DNA, 80 bp, synthetic construct
  misc_feature 1..80: note = Synthetic: >Sparrow-cand-9780-9859
  source 1..80: mol_type = other DNA
tagacttttaggactgggaggcaaccgcaacatagctgtctccactgtccagaacaaaattcttgatgcaaaagccactg

SEQ ID NO: 12943 - DNA, 80 bp, synthetic construct
  misc_feature 1..80: note = Synthetic: >Sparrow-cand-9860-9939
  source 1..80: mol_type = other DNA
ctgttgttgtcgctaaccttcttgaaaaggctggtgtcactaacaagcatgctgtttgcaaaaagattgttaagtttcac

SEQ ID NO: 12944 - DNA, 80 bp, synthetic construct
  misc_feature 1..80: note = Synthetic: >Sparrow-cand-9940-10019
  source 1..80: mol_type = other DNA
aatgatactctcaaggccaccaattatgaggaggcagaggtagcacttgtaaaacttcttgcacacattattgagtttct

SEQ ID NO: 12945 - DNA, 80 bp, synthetic construct
  misc_feature 1..80: note = Synthetic: >Sparrow-cand-10020-10099
  source 1..80: mol_type = other DNA
ccctactgaccaggtagatgcatatctagctgatgccagtaaagctcaacatgtaaacacttatcttgacaatctgctgg

SEQ ID NO: 12946 - DNA, 80 bp, synthetic construct
  misc_feature 1..80: note = Synthetic: >Sparrow-cand-10100-10179
  source 1..80: mol_type = other DNA
agcacaaaactgttgttcaggcagttgccgacattaacattaatctggattcttatagaatatataaggaggcagatgct

SEQ ID NO: 12947 - DNA, 80 bp, synthetic construct
  misc_feature 1..80: note = Synthetic: >Sparrow-cand-16660-16739
  source 1..80: mol_type = other DNA
tcgcttgcaaagcacatcactctcttaccactccacaatgtgattatgtgtacaatccctttctgatcgacgtggcaacg

SEQ ID NO: 12948 - DNA, 80 bp, synthetic construct
  misc_feature 1..80: note = Synthetic: >Sparrow-cand-16900-16979
  source 1..80: mol_type = other DNA
agcaatcgcaacttaacaaggcctgtcgcttagtacaggcaaactacttgaacatacttctcaccacaaccaaagccacg

SEQ ID NO: 12949 - DNA, 80 bp, synthetic construct
  misc_feature 1..80: note = Synthetic: >Sparrow-cand-16980-17059
  source 1..80: mol_type = other DNA
gtggttcacgatattggtaacccaaaaggtatccctatcgtgcgcaagcctggtgttaaatatcacttctatgatcaagc

SEQ ID NO: 12950 - DNA, 80 bp, synthetic construct
  misc_feature 1..80: note = Synthetic: >Sparrow-cand-17140-17219
  source 1..80: mol_type = other DNA
ggaattgtaatgttgacacttaccctgctaatgctcttgtgtgccgctacgacactcatcggcaaaagcatttaattgga

SEQ ID NO: 12951 - DNA, 80 bp, synthetic construct
  misc_feature 1..80: note = Synthetic: >Sparrow-cand-17220-17299
  source 1..80: mol_type = other DNA
cctaatggttcagcactatatgtcaataagcatgcttttctcactcctgagatgcatacttatgctacacacaaactaag

SEQ ID NO: 12952 - DNA, 80 bp, synthetic construct
  misc_feature 1..80: note = Synthetic: >Sparrow-cand-17300-17379
  source 1..80: mol_type = other DNA
tttggctccactcatctactactccaccacggattgtagtagtgaacagccaatcgtagttacttatcgcgattgtgtta

SEQ ID NO: 12953 - DNA, 80 bp, synthetic construct
  misc_feature 1..80: note = Synthetic: >Sparrow-cand-17380-17459
  source 1..80: mol_type = other DNA
cccgttgtaacactggtaccacactctgccctgttcatgctcttgaatatcaggagtttatcaatgcatacaatctcatg

SEQ ID NO: 12954 - DNA, 80 bp, synthetic construct
  misc_feature 1..80: note = Synthetic: >Sparrow-cand-17460-17539
  source 1..80: mol_type = other DNA
gctcgccatggatttaatgtctatataccacgcaatgtcaacgtctacaactgttggctaacattcactaatcttcaaaa

SEQ ID NO: 12955 - DNA, 80 bp, synthetic construct
  misc_feature 1..80: note = Synthetic: >Sparrow-cand-17620-17699
  source 1..80: mol_type = other DNA
ataacgctgtatatgctaaggttgacactaaccttgtcaaactctttgacaatcgtactaacttacctgtttcagtggcc

SEQ ID NO: 12956 - DNA, 80 bp, synthetic construct
  misc_feature 1..80: note = Synthetic: >Sparrow-cand-17700-17779
  source 1..80: mol_type = other DNA
tttgagcactacactaacagacacactaagtcattacctaccacgcaattgttgtctggcttaggcgttactgccaccag

SEQ ID NO: 12957 - DNA, 80 bp, synthetic construct
  misc_feature 1..80: note = Synthetic: >Sparrow-cand-17780-17859
  source 1..80: mol_type = other DNA
aaacttcaccgtgtggttagatgatgatactatctttcaatacactataaatgtatcaacttatactgacgtcgatccta

SEQ ID NO: 12958 - DNA, 80 bp, synthetic construct
  misc_feature 1..80: note = Synthetic: >Sparrow-cand-17860-17939
  source 1..80: mol_type = other DNA
atacccacgttgtcctttgtgacgataggtatggcacagattggagtcagtttaaccaacttccaaatgcagttttcctc

SEQ ID NO: 12959 - DNA, 80 bp, synthetic construct
  misc_feature 1..80: note = Synthetic: >Delta-cand-20830-20909
  source 1..80: mol_type = other DNA
gacaacccggctacggcctgtaagctaaaagcaacgcctattatctcggctcgtgagttagagaagaagcctattcttcg

SEQ ID NO: 12960 - DNA, 80 bp, synthetic construct
  misc_feature 1..80: note = Synthetic: >MsbCoV1-cand-4240-4319
  source 1..80: mol_type = other DNA
cttcttttgtcaggacccaaaaccttttaatactgcacgtgctattgtaaagccagtttgtgctagtatttatcagggtt

SEQ ID NO: 12961 - DNA, 80 bp, synthetic construct
  misc_feature 1..80: note = Synthetic: >MbCoV1-cand-4250-4329
  source 1..80: mol_type = other DNA
tggcttcttttgtcaggacccaaaaccttttaatactgcacgtgctattgtaaagccagtttgtgctagtatttatcagg

SEQ ID NO: 12962 - DNA, 80 bp, synthetic construct
  misc_feature 1..80: note = Synthetic: >FelineAlpha1-cand-17520-17599
  source 1..80: mol_type = other DNA
atccttattgcattgacattcagcaatggggctacacaggttctttgagcatgaatcatcatgaagtttgtaacattcat

SEQ ID NO: 12963 - DNA, 80 bp, synthetic construct
  misc_feature 1..80: note = Synthetic: >HKU5R-cand-26330-26409
  source 1..80: mol_type = other DNA
cgactgagccaaccaaagcattagcaaaacaagaagccgctaggaaggtttgccttaggcttcaagagtatggacgactc

SEQ ID NO: 12964 - DNA, 80 bp, synthetic construct
  misc_feature 1..80: note = Synthetic: >HKU18-cand-7940-8019
  source 1..80: mol_type = other DNA
tgcttctgataaggattatgataaggtctgcatggcattccttgccaaggccctgtcatctttccgcgaaggaggcggtt

SEQ ID NO: 12965 - DNA, 80 bp, synthetic construct
  misc_feature 1..80: note = Synthetic: >HKU17-cand-7920-7999
  source 1..80: mol_type = other DNA
tttctggaacagcttctgacaaggattatgataaggtctgcatggcattccttgccaaggccctgtcatctttccgcgaa

SEQ ID NO: 12966 - DNA, 80 bp, synthetic construct
  misc_feature 1..80: note = Synthetic: >HKU4R-cand-6760-6839
  source 1..80: mol_type = other DNA
cttaaaaatgctatttttcttaccatttaattatttatggcctaagaaacaaccaactgttgatgtgggtgttagcggtt

SEQ ID NO: 12967 - DNA, 80 bp, synthetic construct
  misc_feature 1..80: note = Synthetic: >HKU4-cand-6770-6849
  source 1..80: mol_type = other DNA
taaaaatgctatttttcttaccatttaattatttatggcctaagaaacaaccaactgttgacatcggtgttagcggttta

SEQ ID NO: 12968 - DNA, 80 bp, synthetic construct
  misc_feature 1..80: note = Synthetic: >HKU4-cand-5970-6049
  source 1..80: mol_type = other DNA
ttctaatagttgccttgtaggtgtagatggaactcctggcagtgatactattagtaaattctttaatgatctgttaggtt

SEQ ID NO: 12969 - DNA, 80 bp, synthetic construct
  misc_feature 1..80: note = Synthetic: >HKU4R-cand-5960-6039
  source 1..80: mol_type = other DNA
tattctaatagttgccttgtaggtgtagatggaacccctggcagtgatactattagtaaattcttcaatgatttgttagg

SEQ ID NO: 12970 - DNA, 80 bp, synthetic construct
  misc_feature 1..80: note = Synthetic: >SEAC-cand-17480-17559
  source 1..80: mol_type = other DNA
acgtagaatcgtgcaaatggtctgtgattgtttaaatgggctttcagacgtagtaatttttgtactatgggctggaggtt

SEQ ID NO: 12971 - DNA, 80 bp, synthetic construct
  misc_feature 1..80: note = Synthetic: >BtRf_AlphaCoV-cand-17290-17369
  source 1..80: mol_type = other DNA
tcgtgcaaatggtctgtgattgtttaaatgggctttcagacgtagtaatttttgtactatgggctggaggtttggagctc

SEQ ID NO: 12972 - DNA, 80 bp, synthetic construct
  misc_feature 1..80: note = Synthetic: >HKU23-cand-25620-25699
  source 1..80: mol_type = other DNA
aacctcttatatgattctaatggtaatctctatggtttcagggattatttaacaaatagaacttttatgattcgtagttg

SEQ ID NO: 12973 - DNA, 80 bp, synthetic construct
  misc_feature 1..80: note = Synthetic: >Quail-cand-23310-23389
  source 1..80: mol_type = other DNA
agatctgcatgggcactctcaccagagagcagactcctggcaggaattatggatccaatgggtacatggaggtgcattcc

SEQ ID NO: 12974 - DNA, 80 bp, synthetic construct
  misc_feature 1..80: note = Synthetic: >HKU5R-cand-7360-7439
  source 1..80: mol_type = other DNA
tgattcaaactcatgttaccagctatgtcattaacatagactgggtgtggtttgtaatggaattcgcacttgcttacgcc

SEQ ID NO: 12975 - DNA, 80 bp, synthetic construct
  misc_feature 1..80: note = Synthetic: >BetaSp-cand-22690-22769
  source 1..80: mol_type = other DNA
tgagcaagatgatgatgcttggagtaagctcgcgtatcattatgacaacaacttgtggttttatcgatttgtcttaaaaa

SEQ ID NO: 12976 - DNA, 80 bp, synthetic construct
  misc_feature 1..80: note = Synthetic: >HKU20_FJ376622-cand-10330-10409
  source 1..80: mol_type = other DNA
agatgctatatatagacgctctgtagagatgaatgaatcacctcaggagcaaaagaaaaagcttaaagctgttaacatag

SEQ ID NO: 12977 - DNA, 80 bp, synthetic construct
  misc_feature 1..80: note = Synthetic: >HKU15-cand-10150-10229
  source 1..80: mol_type = other DNA
gcagatgctatttataaacgatctgttgagatgaacgaatctccgcaggagcaaaagaaaaagcttaaagctgttaacat

SEQ ID NO: 12978 - DNA, 80 bp, synthetic construct
  misc_feature 1..80: note = Synthetic: >Sb512-cand-9160-9239
  source 1..80: mol_type = other DNA
tgcgcttcatacaaccgttataagtattatagcggtagtgctagtgaggcagattaccggcttgcatgctttgcacatct

SEQ ID NO: 12979 - DNA, 80 bp, synthetic construct
  misc_feature 1..80: note = Synthetic: >HKU23-cand-23460-23539
  source 1..80: mol_type = other DNA
atgccccactgctgctgatattaatacccctcatgtacctatttgtgtgtatgatccgctaccacttattttgcttggca

SEQ ID NO: 12980 - DNA, 80 bp, synthetic construct
  misc_feature 1..80: note = Synthetic: >HKU17-cand-24800-24879
  source 1..80: mol_type = other DNA
ctgagaagacgggtatggctgatcctcgcatcatggctctagccagacatgtgcctggtgttcaggaaatgttgtttgct

SEQ ID NO: 12981 - DNA, 80 bp, synthetic construct
  misc_feature 1..80: note = Synthetic: >MsbCoV1-cand-7050-7129
  source 1..80: mol_type = other DNA
ggttaccgttcttgtaccttgcattcctattcacatttggaggtatttttgttaaaggtcttgtatgttacttctttgct

SEQ ID NO: 12982 - DNA, 80 bp, synthetic construct
  misc_feature 1..80: note = Synthetic: >MbCoV1-cand-7050-7129
  source 1..80: mol_type = other DNA
tttgtcaattggttaccgttcttgtaccttgcattcctattcacatttggtggcatctttgttaaaggtcttgtatgtta

SEQ ID NO: 12983 - DNA, 80 bp, synthetic construct
  misc_feature 1..80: note = Synthetic: >HKU5R-cand-29850-29929
  source 1..80: mol_type = other DNA
gagcaatgatgaaaatggtgaaccggtgtacttcctaagttactcgggcgccataaaattagaccccaagaatcccaact

SEQ ID NO: 12984 - DNA, 80 bp, synthetic construct
  misc_feature 1..80: note = Synthetic: >BtRf_AlphaCoV-cand-25190-25269
  source 1..80: mol_type = other DNA
agcacggtgactattctgctttatcaaatagtagtgataatttgacagaaaatgacagattgctgcatttagtctaaact

SEQ ID NO: 12985 - DNA, 80 bp, synthetic construct
  misc_feature 1..80: note = Synthetic: >HKU2R-cand-25180-25259
  source 1..80: mol_type = other DNA
agtaagcatggtgactattctgctttatcaaatagtagtgataacttaacagaaaatgacagattgctgcatttagtcta

SEQ ID NO: 12986 - DNA, 80 bp, synthetic construct
  misc_feature 1..80: note = Synthetic: >HKU18-cand-400-479
  source 1..80: mol_type = other DNA
agcactccttgcaccgagcctaggtaggataaaaccccctaccgggtcactcttaaggcgtttcctgcacgggatagcca

SEQ ID NO: 12987 - DNA, 80 bp, synthetic construct
  misc_feature 1..80: note = Synthetic: >HKU17-cand-330-409
  source 1..80: mol_type = other DNA
ccttgcaccgagcctaggtaggataaaaccccctaccgggtcactcttaaggcgtttcctccgtgggatagccactagtg

SEQ ID NO: 12988 - DNA, 80 bp, synthetic construct
  misc_feature 1..80: note = Synthetic: >HKU5R-cand-27210-27289
  source 1..80: mol_type = other DNA
ttgtaatccaaaaggagacacacggcggtgaacctagcagtcttaatgatgtcatcacatgcattcctcttacaggctac

SEQ ID NO: 12989 - DNA, 80 bp, synthetic construct
  misc_feature 1..80: note = Synthetic: >AcCoV_JC34-cand-14850-14929
  source 1..80: mol_type = other DNA
gctatgtgtctcttgctattgatgcatatcctctgtctaagcatactaatcctgagtataggaaagttttctatactatg

SEQ ID NO: 12990 - DNA, 80 bp, synthetic construct
  misc_feature 1..80: note = Synthetic: >Lucheng19-cand-15200-15279
  source 1..80: mol_type = other DNA
tgtgtctcttgctattgatgcatatcctctgtctaagcatactaatcctgagtatagaaaagtattctatactatgctgg

SEQ ID NO: 12991 - DNA, 80 bp, synthetic construct
  misc_feature 1..80: note = Synthetic: >MbCoV1-cand-15700-15779
  source 1..80: mol_type = other DNA
tttagaatctttctcagttactttgcttgaagattccagttcaaagttctgggatgaaggattctatgctagtttatatg

SEQ ID NO: 12992 - DNA, 80 bp, synthetic construct
  misc_feature 1..80: note = Synthetic: >BatCoV1A-cand-15870-15949
  source 1..80: mol_type = other DNA
ttagaatctttctcagttactttgcttgaagattccagttcaaagttctgggacgaaggattctatgctagtttgtatga

SEQ ID NO: 12993 - DNA, 80 bp, synthetic construct
  misc_feature 1..80: note = Synthetic: >MsbCoV1-cand-6490-6569
  source 1..80: mol_type = other DNA
tgttgtaattaaaaacaaagtttttaaaattcaaacagcagacaataacactcctgtaaaaatcattaaaaagcttgatg

SEQ ID NO: 12994 - DNA, 80 bp, synthetic construct
  misc_feature 1..80: note = Synthetic: >MbCoV1-cand-6490-6569
  source 1..80: mol_type = other DNA
ccgttacagctgttgtaattaaaaacaaagtttttaaaattcaaacagcagataacaacactcctgtaaaaatcattaaa

SEQ ID NO: 12995 - DNA, 80 bp, synthetic construct
  misc_feature 1..80: note = Synthetic: >WIV16-cand-24010-24089
  source 1..80: mol_type = other DNA
gtgctgccacctctgctcactgatgatatgattgctgcctacactgctgctctagttagtggtactgccactgctggatg

SEQ ID NO: 12996 - DNA, 80 bp, synthetic construct
  misc_feature 1..80: note = Synthetic: >HKU5R-cand-17440-17519
  source 1..80: mol_type = other DNA
gtacctgaacattgcaaaatgttcacgcattatacctgcgaaagcacgtgttgagtgctatgaccagtttaaagttaatg

SEQ ID NO: 12997 - DNA, 80 bp, synthetic construct
  misc_feature 1..80: note = Synthetic: >HKU14-cand-24740-24819
  source 1..80: mol_type = other DNA
ttacactgttcagccaattgcagatgtttaccgacgtatacctaatcttcccgattgtaatatagaggcttggcttaatg

SEQ ID NO: 12998 - DNA, 80 bp, synthetic construct
  misc_feature 1..80: note = Synthetic: >HKU23-cand-24580-24659
  source 1..80: mol_type = other DNA
ctgttcagccaattgcagatgtttaccgacgtatacctaatcttcccgattgtaatatagaggcttggcttaatgataag

SEQ ID NO: 12999 - DNA, 80 bp, synthetic construct
  misc_feature 1..80: note = Synthetic: >HghCoV1-cand-18530-18609
  source 1..80: mol_type = other DNA
ccgattggggtaatatgttgacaaatatatcagcaaaacccccaccaggtgaacaatttaagcatttagtcccactaatg

SEQ ID NO: 13000 - DNA, 80 bp, synthetic construct
  misc_feature 1..80: note = Synthetic: >HKU31-cand-18600-18679
  source 1..80: mol_type = other DNA
cgattggggtaatatgttgacaaatatatcagcaaaacccccaccaggtgaacaatttaagcatttagtcccactaatgc

SEQ ID NO: 13001 - DNA, 80 bp, synthetic construct
  misc_feature 1..80: note = Synthetic: >MsbCoV1-cand-3040-3119
  source 1..80: mol_type = other DNA
gcaggcaattggtaaatacatctcttttgaaggcaatgactggtccagctttgaggaaactattcataacgctatgaatg

SEQ ID NO: 13002 - DNA, 80 bp, synthetic construct
  misc_feature 1..80: note = Synthetic: >MbCoV1-cand-3050-3129
  source 1..80: mol_type = other DNA
taagcaggcaattggtaaatacatctcttttgaaggcaatgactggtccagctttgaggaaactattcataacgctatga

SEQ ID NO: 13003 - DNA, 80 bp, synthetic construct
  misc_feature 1..80: note = Synthetic: >BetaSp-cand-21810-21889
  source 1..80: mol_type = other DNA
gtcttatagtctttttgacatgaccaaatttccacttaaattggctggtactgcagttgtaaatttaaaagcagaccaga

SEQ ID NO: 13004 - DNA, 80 bp, synthetic construct
  misc_feature 1..80: note = Synthetic: >MsbCoV1-cand-23580-23659
  source 1..80: mol_type = other DNA
cattgcagctaaatgcacgtttagaagcactagagcttaccagtatgattgtcgtccaggataaaactttgaatcttgga

SEQ ID NO: 13005 - DNA, 80 bp, synthetic construct
  misc_feature 1..80: note = Synthetic: >MbCoV1-cand-23580-23659
  source 1..80: mol_type = other DNA
gaagaaccattgcagctaaatgcacgtttagaagcactagagcttaccagtatgattattgttcaagacaaaactttgaa

SEQ ID NO: 13006 - DNA, 80 bp, synthetic construct
  misc_feature 1..80: note = Synthetic: >HKU5R-cand-5840-5919
  source 1..80: mol_type = other DNA
gagcaagacttctgatatgaagtgcaagatgaccgatgtctattatcctaagcagaggtatagtgcagactgcaatgtcg

SEQ ID NO: 13007 - DNA, 80 bp, synthetic construct
  misc_feature 1..80: note = Synthetic: >MN531554-cand-3840-3919
  source 1..80: mol_type = other DNA
aggcattcaatgtgttaacaatgttgttggaccacgccatggagattgcgacttgtttaataaacttgtcgctgcctaca

SEQ ID NO: 13008 - DNA, 80 bp, synthetic construct
  misc_feature 1..80: note = Synthetic: >MN531555-cand-18650-18729
  source 1..80: mol_type = other DNA
aggtgttgaaaaggcagttttttttaatcaaacaacactgcctacatctgtagcatttgagttgtatgcgaagcgaaata

SEQ ID NO: 13009 - DNA, 80 bp, synthetic construct
  misc_feature 1..80: note = Synthetic: >NC_010800-cand-24800-24879
  source 1..80: mol_type = other DNA
tggccccttaacattgcagtaggtgtaatttcatgtatatacccaccaaacacaggaggtcttgtcgcagcgataatact

SEQ ID NO: 13010 - DNA, 80 bp, synthetic construct
  misc_feature 1..80: note = Synthetic: >MT114538-cand-24140-24219
  source 1..80: mol_type = other DNA
tattagaaaactacagaccaaactggactgcacctgaattgacacttgacatctttaacgcaacctatttaaatctgact

SEQ ID NO: 13011 - DNA, 80 bp, synthetic construct
  misc_feature 1..80: note = Synthetic: >AY692454-cand-1040-1119
  source 1..80: mol_type = other DNA
gctctgggctcaaacttgagtgctctttttcaaattgttaaacaacaaatagccagaatctttcaaaaggcactggctat

SEQ ID NO: 13012 - DNA, 80 bp, synthetic construct
  misc_feature 1..80: note = Synthetic: >MN531554-cand-9530-9609
  source 1..80: mol_type = other DNA
atgctgcaattattagtgttaaagagagtagtctttcaaaccctaaatggattgagagtactactgttagtgttgatgat

SEQ ID NO: 13013 - DNA, 80 bp, synthetic construct
  misc_feature 1..80: note = Synthetic: >MN987231-cand-2610-2689
  source 1..80: mol_type = other DNA
attgagtgttgtggtgaaccatggaatacaatcttcaagaaggcttataaagagcccattgaagttgagactgatctcac

SEQ ID NO: 13014 - DNA, 80 bp, synthetic construct
  misc_feature 1..80: note = Synthetic: >MT114541-cand-22480-22559
  source 1..80: mol_type = other DNA
gagagaactcgtggcactgcaattgacagtaatgatgttgattgtgaacctataataacctattccaacataggtgtttg

SEQ ID NO: 13015 - DNA, 80 bp, synthetic construct
  misc_feature 1..80: note = Synthetic: >SBB-130-cand-12470-12549
  source 1..80: mol_type = other DNA
atcattgtgttcgtgcctttgacatctataacaaggatgttgcatgcatgggcaagtttctgaaagtcaattgtgttcgt

SEQ ID NO: 13016 - DNA, 80 bp, synthetic construct
  misc_feature 1..80: note = Synthetic: >SBB-122-cand-12480-12559
  source 1..80: mol_type = other DNA
tgttcgtgcctttgacatctataacaaggatgttgcatgcatgggcaagtttctgaaagtcaattgtgttcgttttagga

SEQ ID NO: 13017 - DNA, 80 bp, synthetic construct
  misc_feature 1..80: note = Synthetic: >SBB-747-cand-9510-9589
  source 1..80: mol_type = other DNA
taaagttagttatggttccatgaccttaaatggtgtgtggttggataactttgttatgtgccctagacatgttatgtgtt

SEQ ID NO: 13018 - DNA, 80 bp, synthetic construct
  misc_feature 1..80: note = Synthetic: >SBB-797-cand-9520-9599
  source 1..80: mol_type = other DNA
tatggttccatgaccttaaatggtgtgtggttggataactttgttatgtgtcctagacatgttatgtgttctagggatga

SEQ ID NO: 13019 - DNA, 80 bp, synthetic construct
  misc_feature 1..80: note = Synthetic: >SBB-120-cand-100-179
  source 1..80: mol_type = other DNA
gtcgtgaaaagtaattgaaatttcactaggttgcccaagtgtgggttcaagtgctgagtgccctggtgttcctggttagg

SEQ ID NO: 13020 - DNA, 80 bp, synthetic construct
  misc_feature 1..80: note = Synthetic: >SBB-010-cand-90-169
  source 1..80: mol_type = other DNA
tgttccatgcggcgtgaaaagtaattgaaatttcattaggttgcccaagtgtgggttcaagtgctgagtgccctggtgtt

SEQ ID NO: 13021 - DNA, 80 bp, synthetic construct
  misc_feature 1..80: note = Synthetic: >SBB-053-cand-5550-5629
  source 1..80: mol_type = other DNA
agtgttgttgtatcaggcgtagtgttagcacagcagtctttaactgtagtgtactacgtgctggttacgaagatggtgtt

SEQ ID NO: 13022 - DNA, 80 bp, synthetic construct
  misc_feature 1..80: note = Synthetic: >SBB-024-cand-5560-5639
  source 1..80: mol_type = other DNA
taccaggcgtagtgttagcacagcagtctttaactgtagtgtactacgtgctggttacgaagatggtgtttgtgttcatg

SEQ ID NO: 13023 - DNA, 80 bp, synthetic construct
  misc_feature 1..80: note = Synthetic: >SBB-130-cand-5550-5629
  source 1..80: mol_type = other DNA
gttgtgttaccaggcgtagtgttagcacagcagtctttaactgtagtgtactacgtgctggttacgaagatggtgtttgt

SEQ ID NO: 13024 - DNA, 80 bp, synthetic construct
  misc_feature 1..80: note = Synthetic: >SBB-726-cand-6890-6969
  source 1..80: mol_type = other DNA
gtaacaatgtatcttgccttatgtgttataaaaagaatgtcgctaagcgcattgagtgttctactgtcgttaatggtgtt

SEQ ID NO: 13025 - DNA, 80 bp, synthetic construct
  misc_feature 1..80: note = Synthetic: >PDF-2386-cand-18640-18719
  source 1..80: mol_type = other DNA
ggtaaccttcaaagtaaccatgacttgtattgtcaggttcatggtaatgctcatgttgctagttgtgatgcaatcatgac

SEQ ID NO: 13026 - DNA, 80 bp, synthetic construct
  misc_feature 1..80: note = Synthetic: >PDF-2386-cand-19440-19519
  source 1..80: mol_type = other DNA
taacttgtggaatactttcacaaagttacagagtcttgagaatgtggcttacaatgttgttaacaagggacatttcgatg

SEQ ID NO: 13027 - DNA, 80 bp, synthetic construct
  misc_feature 1..80: note = Synthetic: >PRD-0038-cand-19430-19509
  source 1..80: mol_type = other DNA
ttgacacttataacctgtggaatactttcacaaagttacagagtcttgagaatgtggcttacaatgttgttaacaaggga

SEQ ID NO: 13028 - DNA, 80 bp, synthetic construct
  misc_feature 1..80: note = Synthetic: >PDF-2386-cand-13840-13919
  source 1..80: mol_type = other DNA
catgccttgttaaagactgtacaattttgcgatgccatgcgcgacgctggcatcgtaggtgtacttacattggacaatca

SEQ ID NO: 13029 - DNA, 80 bp, synthetic construct
  misc_feature 1..80: note = Synthetic: >SBB-797-cand-14160-14239
  source 1..80: mol_type = other DNA
cattttttctatgctcaagatggcaatgctgccatctctgactatgatttttataggtataatttgcctactatgtgtga

SEQ ID NO: 13030 - DNA, 80 bp, synthetic construct
  misc_feature 1..80: note = Synthetic: >SBB-747-cand-14150-14229
  source 1..80: mol_type = other DNA
ttcttttaagcattttttctatgcccaagatggcaatgctgccatctctgactatgatttttataggtataatttgccta

SEQ ID NO: 13031 - DNA, 80 bp, synthetic construct
  misc_feature 1..80: note = Synthetic: >SBB-788-cand-18250-18329
  source 1..80: mol_type = other DNA
gtgcacatgttgccagctgtgatgccataatgactagatgtttggccattcatgattgcttttgcggtgaagttaattgg

SEQ ID NO: 13032 - DNA, 80 bp, synthetic construct
  misc_feature 1..80: note = Synthetic: >SBB-747-cand-18240-18319
  source 1..80: mol_type = other DNA
gtccataagggtgcacatgttgccagctgtgatgccataatgactagatgtttggctattcatgattgcttttgcggtga

SEQ ID NO: 13033 - DNA, 80 bp, synthetic construct
  misc_feature 1..80: note = Synthetic: >229E-cand-21770-21849
  source 1..80: mol_type = other DNA
taaatttggcagtgtatgtttttcactaaaggatatacccggtggttgcgcaatgcctatagtggctaattttgcttata

SEQ ID NO: 13034 - DNA, 80 bp, synthetic construct
  misc_feature 1..80: note = Synthetic: >229E-cand-21850-21929
  source 1..80: mol_type = other DNA
ttaattcttatactataggctcattgtatgtttcttggagtgatggtgatggaattactggcgtcccaaaacctgttgag

SEQ ID NO: 13035 - DNA, 80 bp, synthetic construct
  misc_feature 1..80: note = Synthetic: >229E-cand-21930-22009
  source 1..80: mol_type = other DNA
ggtgttagttcctttatgaatgttacattgaataaatgtactaaatataatatttatgatgtatctggtgtgggtgttat

SEQ ID NO: 13036 - DNA, 80 bp, synthetic construct
  misc_feature 1..80: note = Synthetic: >229E-cand-22010-22089
  source 1..80: mol_type = other DNA
tcgcattagcaatgacacctttcttaatggaattacgtacacatcaacttcaggtaaccttttgggtttcaaagatgtta

SEQ ID NO: 13037 - DNA, 80 bp, synthetic construct
  misc_feature 1..80: note = Synthetic: >229E-cand-22090-22169
  source 1..80: mol_type = other DNA
ctaatggtatcatctactctatcactccttgtaacccaccagatcagcttgttgtttatcagcaagctgttgttggtgct

SEQ ID NO: 13038 - DNA, 80 bp, synthetic construct
  misc_feature 1..80: note = Synthetic: >229E-cand-22170-22249
  source 1..80: mol_type = other DNA
atgttgtctgaaaattcaagtagttacggcttctctaatgttgtggaattgcctaactttttctacgcttctaatggcac

SEQ ID NO: 13039 - DNA, 80 bp, synthetic construct
  misc_feature 1..80: note = Synthetic: >229E-cand-22250-22329
  source 1..80: mol_type = other DNA
ttacaattgcacagatgctgttttaacttattctagctttggtgtttgtgcagatggttctataattgctgttcaaccac

SEQ ID NO: 13040 - DNA, 80 bp, synthetic construct
  misc_feature 1..80: note = Synthetic: >229E-cand-22330-22409
  source 1..80: mol_type = other DNA
gcaatgtttcttatgatggtgtctcagcgattgtcacagctaatttgtctataccttccaattggactacttcagtccag

SEQ ID NO: 13041 - DNA, 80 bp, synthetic construct
  misc_feature 1..80: note = Synthetic: >229E-cand-22410-22489
  source 1..80: mol_type = other DNA
gttgagtatttacaaattacaagcacacctattttagtggattgctccacttatgtttgcaatggtaatgtgcgctgtgt

SEQ ID NO: 13042 - DNA, 80 bp, synthetic construct
  misc_feature 1..80: note = Synthetic: >229E-cand-22490-22569
  source 1..80: mol_type = other DNA
tgaattgcttaagcagtatacttctgcttgtaaaactattgaagatgccttaagaattagtgctatgctggagtctgcag

SEQ ID NO: 13043 - DNA, 80 bp, synthetic construct
  misc_feature 1..80: note = Synthetic: >229E-cand-22570-22649
  source 1..80: mol_type = other DNA
atgttggtgagatgctcacttttgacgagaaagcgtttacacttgctaatgttagtagttttggtgactacaaccttagc

SEQ ID NO: 13044 - DNA, 80 bp, synthetic construct
  misc_feature 1..80: note = Synthetic: >229E-cand-22650-22729
  source 1..80: mol_type = other DNA
agtgttatacctagcttgcctacaagtggtagtagagtggccggtcgcagtgccatagaagacatactttttagtaaagt

SEQ ID NO: 13045 - DNA, 80 bp, synthetic construct
  misc_feature 1..80: note = Synthetic: >229E-cand-22730-22809
  source 1..80: mol_type = other DNA
tgttacttctggacttggcactgtggacgcagactacaaaaagtgcactaagggtctttccattgctgatttggcttgtg

SEQ ID NO: 13046 - DNA, 80 bp, synthetic construct
  misc_feature 1..80: note = Synthetic: >229E-cand-22810-22889
  source 1..80: mol_type = other DNA
ctcaatattataatggcattatggttttgcctggcgttgctgatgctgaacgaatggccatgtacacaggttccttaatt

SEQ ID NO: 13047 - DNA, 80 bp, synthetic construct
  misc_feature 1..80: note = Synthetic: >229E-cand-22890-22969
  source 1..80: mol_type = other DNA
ggtggcattgccttaggaggtcttacatcagccgctgcaataccattttctttagctcttcaggcacgtttgaactatgt

SEQ ID NO: 13048 - DNA, 80 bp, synthetic construct
  misc_feature 1..80: note = Synthetic: >229E-cand-22970-23049
  source 1..80: mol_type = other DNA
ggcattgcagactgatgttttgcaagaaaatcagaaaattcttgctgcatcttttaataaagcaatgactaacattgtcg

SEQ ID NO: 13049 - DNA, 80 bp, synthetic construct
  misc_feature 1..80: note = Synthetic: >AlphaCoV1-cand-10890-10969
  source 1..80: mol_type = other DNA
atggtattctttattgggttaacagatttacatgcatgacgtgtggtgtttaccaattcactgtttcaccagctgagctt

(The sequence listing continues in the following parts.)
